United States Patent Application Publication US 2015/0232836 A1 - sequence listing, part 37

SEQ ID NO: 1442060 - DNA, 15 bp, Homo sapiens
tacttagcttctcca

SEQ ID NO: 1442061 - DNA, 15 bp, Homo sapiens
acttagcttctccaa

SEQ ID NO: 1442062 - DNA, 15 bp, Homo sapiens
cttagcttctccaag

SEQ ID NO: 1442063 - DNA, 15 bp, Homo sapiens
ttagcttctccaagc

SEQ ID NO: 1442064 - DNA, 15 bp, Homo sapiens
tagcttctccaagcc

SEQ ID NO: 1442065 - DNA, 15 bp, Homo sapiens
agcttctccaagcct

SEQ ID NO: 1442066 - DNA, 15 bp, Homo sapiens
gcttctccaagcctc

SEQ ID NO: 1442067 - DNA, 15 bp, Homo sapiens
cttctccaagcctca

SEQ ID NO: 1442068 - DNA, 15 bp, Homo sapiens
ttctccaagcctcag

SEQ ID NO: 1442069 - DNA, 15 bp, Homo sapiens
tctccaagcctcagt

SEQ ID NO: 1442070 - DNA, 15 bp, Homo sapiens
ctccaagcctcagtt

SEQ ID NO: 1442071 - DNA, 15 bp, Homo sapiens
tccaagcctcagttt

SEQ ID NO: 1442072 - DNA, 15 bp, Homo sapiens
ccaagcctcagtttc

SEQ ID NO: 1442073 - DNA, 15 bp, Homo sapiens
caagcctcagtttct

SEQ ID NO: 1442074 - DNA, 15 bp, Homo sapiens
aagcctcagtttctt

SEQ ID NO: 1442075 - DNA, 15 bp, Homo sapiens
agcctcagtttctta

SEQ ID NO: 1442076 - DNA, 15 bp, Homo sapiens
gcctcagtttcttaa

SEQ ID NO: 1442077 - DNA, 15 bp, Homo sapiens
cctcagtttcttaac

SEQ ID NO: 1442078 - DNA, 15 bp, Homo sapiens
ctcagtttcttaact

SEQ ID NO: 1442079 - DNA, 15 bp, Homo sapiens
tcagtttcttaactc

SEQ ID NO: 1442080 - DNA, 15 bp, Homo sapiens
cagtttcttaactca

SEQ ID NO: 1442081 - DNA, 15 bp, Homo sapiens
agtttcttaactcag

SEQ ID NO: 1442082 - DNA, 15 bp, Homo sapiens
gtttcttaactcaga

SEQ ID NO: 1442083 - DNA, 15 bp, Homo sapiens
tttcttaactcagat

SEQ ID NO: 1442084 - DNA, 15 bp, Homo sapiens
ttcttaactcagatg

SEQ ID NO: 1442085 - DNA, 15 bp, Homo sapiens
tcttaactcagatgg

SEQ ID NO: 1442086 - DNA, 15 bp, Homo sapiens
cttaactcagatgga

SEQ ID NO: 1442087 - DNA, 15 bp, Homo sapiens
ttaactcagatggaa

SEQ ID NO: 1442088 - DNA, 15 bp, Homo sapiens
taactcagatggaaa

SEQ ID NO: 1442089 - DNA, 15 bp, Homo sapiens
aactcagatggaaaa

SEQ ID NO: 1442090 - DNA, 15 bp, Homo sapiens
actcagatggaaaat

SEQ ID NO: 1442091 - DNA, 15 bp, Homo sapiens
ctcagatggaaaatg

SEQ ID NO: 1442092 - DNA, 15 bp, Homo sapiens
tcagatggaaaatga

SEQ ID NO: 1442093 - DNA, 15 bp, Homo sapiens
cagatggaaaatgag

SEQ ID NO: 1442094 - DNA, 15 bp, Homo sapiens
agatggaaaatgagg

SEQ ID NO: 1442095 - DNA, 15 bp, Homo sapiens
gatggaaaatgagga

SEQ ID NO: 1442096 - DNA, 15 bp, Homo sapiens
atggaaaatgaggac

SEQ ID NO: 1442097 - DNA, 15 bp, Homo sapiens
tggaaaatgaggaca

SEQ ID NO: 1442098 - DNA, 15 bp, Homo sapiens
ggaaaatgaggacaa

SEQ ID NO: 1442099 - DNA, 15 bp, Homo sapiens
gaaaatgaggacaat

SEQ ID NO: 1442100 - DNA, 15 bp, Homo sapiens
aaaatgaggacaatg

SEQ ID NO: 1442101 - DNA, 15 bp, Homo sapiens
aaatgaggacaatgt

SEQ ID NO: 1442102 - DNA, 15 bp, Homo sapiens
aatgaggacaatgta

SEQ ID NO: 1442103 - DNA, 15 bp, Homo sapiens
atgaggacaatgtaa

SEQ ID NO: 1442104 - DNA, 15 bp, Homo sapiens
tgaggacaatgtaag

SEQ ID NO: 1442105 - DNA, 15 bp, Homo sapiens
gaggacaatgtaagc

SEQ ID NO: 1442106 - DNA, 15 bp, Homo sapiens
aggacaatgtaagca

SEQ ID NO: 1442107 - DNA, 15 bp, Homo sapiens
ggacaatgtaagcac

SEQ ID NO: 1442108 - DNA, 15 bp, Homo sapiens
gacaatgtaagcacc

SEQ ID NO: 1442109 - DNA, 15 bp, Homo sapiens
acaatgtaagcacct

SEQ ID NO: 1442110 - DNA, 15 bp, Homo sapiens
caatgtaagcaccta

SEQ ID NO: 1442111 - DNA, 15 bp, Homo sapiens
aatgtaagcacctat

SEQ ID NO: 1442112 - DNA, 15 bp, Homo sapiens
atgtaagcacctatt

SEQ ID NO: 1442113 - DNA, 15 bp, Homo sapiens
tgtaagcacctattt

SEQ ID NO: 1442114 - DNA, 15 bp, Homo sapiens
gtaagcacctatttc

SEQ ID NO: 1442115 - DNA, 15 bp, Homo sapiens
taagcacctatttca

SEQ ID NO: 1442116 - DNA, 15 bp, Homo sapiens
aagcacctatttcac

SEQ ID NO: 1442117 - DNA, 15 bp, Homo sapiens
agcacctatttcact

SEQ ID NO: 1442118 - DNA, 15 bp, Homo sapiens
gcacctatttcactg

SEQ ID NO: 1442119 - DNA, 15 bp, Homo sapiens
cacctatttcactgg

SEQ ID NO: 1442120 - DNA, 15 bp, Homo sapiens
acctatttcactgga

SEQ ID NO: 1442121 - DNA, 15 bp, Homo sapiens
cctatttcactggat

SEQ ID NO: 1442122 - DNA, 15 bp, Homo sapiens
ctatttcactggatt

SEQ ID NO: 1442123 - DNA, 15 bp, Homo sapiens
tatttcactggattg

SEQ ID NO: 1442124 - DNA, 15 bp, Homo sapiens
atttcactggattgt

SEQ ID NO: 1442125 - DNA, 15 bp, Homo sapiens
tttcactggattgta

SEQ ID NO: 1442126 - DNA, 15 bp, Homo sapiens
ttcactggattgtaa

SEQ ID NO: 1442127 - DNA, 15 bp, Homo sapiens
tcactggattgtaag

SEQ ID NO: 1442128 - DNA, 15 bp, Homo sapiens
cactggattgtaagg

SEQ ID NO: 1442129 - DNA, 15 bp, Homo sapiens
actggattgtaagga

SEQ ID NO: 1442130 - DNA, 15 bp, Homo sapiens
ctggattgtaaggaa

SEQ ID NO: 1442131 - DNA, 15 bp, Homo sapiens
tggattgtaaggaag

SEQ ID NO: 1442132 - DNA, 15 bp, Homo sapiens
ggattgtaaggaaga

SEQ ID NO: 1442133 - DNA, 15 bp, Homo sapiens
gattgtaaggaagaa

SEQ ID NO: 1442134 - DNA, 15 bp, Homo sapiens
attgtaaggaagaat

SEQ ID NO: 1442135 - DNA, 15 bp, Homo sapiens
ttgtaaggaagaata

SEQ ID NO: 1442136 - DNA, 15 bp, Homo sapiens
tgtaaggaagaataa

SEQ ID NO: 1442137 - DNA, 15 bp, Homo sapiens
gtaaggaagaataaa

SEQ ID NO: 1442138 - DNA, 15 bp, Homo sapiens
taaggaagaataaac

SEQ ID NO: 1442139 - DNA, 15 bp, Homo sapiens
aaggaagaataaaca

SEQ ID NO: 1442140 - DNA, 15 bp, Homo sapiens
aggaagaataaacaa

SEQ ID NO: 1442141 - DNA, 15 bp, Homo sapiens
ggaagaataaacaag

SEQ ID NO: 1442142 - DNA, 15 bp, Homo sapiens
gaagaataaacaaga

SEQ ID NO: 1442143 - DNA, 15 bp, Homo sapiens
aagaataaacaagat

SEQ ID NO: 1442144 - DNA, 15 bp, Homo sapiens
agaataaacaagata

SEQ ID NO: 1442145 - DNA, 15 bp, Homo sapiens
gaataaacaagataa

SEQ ID NO: 1442146 - DNA, 15 bp, Homo sapiens
aataaacaagataat

SEQ ID NO: 1442147 - DNA, 15 bp, Homo sapiens
ataaacaagataatg

SEQ ID NO: 1442148 - DNA, 15 bp, Homo sapiens
taaacaagataatga

SEQ ID NO: 1442149 - DNA, 15 bp, Homo sapiens
aaacaagataatgaa

SEQ ID NO: 1442150 - DNA, 15 bp, Homo sapiens
aacaagataatgaat

SEQ ID NO: 1442151 - DNA, 15 bp, Homo sapiens
acaagataatgaata

SEQ ID NO: 1442152 - DNA, 15 bp, Homo sapiens
caagataatgaatag

SEQ ID NO: 1442153 - DNA, 15 bp, Homo sapiens
aagataatgaatagt

SEQ ID NO: 1442154 - DNA, 15 bp, Homo sapiens
agataatgaatagta

SEQ ID NO: 1442155 - DNA, 15 bp, Homo sapiens
gataatgaatagtat

SEQ ID NO: 1442156 - DNA, 15 bp, Homo sapiens
ataatgaatagtatt

SEQ ID NO: 1442157 - DNA, 15 bp, Homo sapiens
taatgaatagtattt

SEQ ID NO: 1442158 - DNA, 15 bp, Homo sapiens
aatgaatagtatttg

SEQ ID NO: 1442159 - DNA, 15 bp, Homo sapiens
atgaatagtatttgg

SEQ ID NO: 1442160 - DNA, 15 bp, Homo sapiens
tgaatagtatttggc

SEQ ID NO: 1442161 - DNA, 15 bp, Homo sapiens
gaatagtatttggca

SEQ ID NO: 1442162 - DNA, 15 bp, Homo sapiens
aatagtatttggcat

SEQ ID NO: 1442163 - DNA, 15 bp, Homo sapiens
atagtatttggcata

SEQ ID NO: 1442164 - DNA, 15 bp, Homo sapiens
tagtatttggcatat

SEQ ID NO: 1442165 - DNA, 15 bp, Homo sapiens
agtatttggcatata

SEQ ID NO: 1442166 - DNA, 15 bp, Homo sapiens
gtatttggcatataa

SEQ ID NO: 1442167 - DNA, 15 bp, Homo sapiens
tatttggcatataat

SEQ ID NO: 1442168 - DNA, 15 bp, Homo sapiens
atttggcatataatc

SEQ ID NO: 1442169 - DNA, 15 bp, Homo sapiens
tttggcatataatct

SEQ ID NO: 1442170 - DNA, 15 bp, Homo sapiens
ttggcatataatctt

SEQ ID NO: 1442171 - DNA, 15 bp, Homo sapiens
tggcatataatcttt

SEQ ID NO: 1442172 - DNA, 15 bp, Homo sapiens
ggcatataatctttc

SEQ ID NO: 1442173 - DNA, 15 bp, Homo sapiens
gcatataatctttca

SEQ ID NO: 1442174 - DNA, 15 bp, Homo sapiens
catataatctttcag

SEQ ID NO: 1442175 - DNA, 15 bp, Homo sapiens
atataatctttcaga

SEQ ID NO: 1442176 - DNA, 15 bp, Homo sapiens
tataatctttcagaa

SEQ ID NO: 1442177 - DNA, 15 bp, Homo sapiens
ataatctttcagaaa

SEQ ID NO: 1442178 - DNA, 15 bp, Homo sapiens
taatctttcagaaaa

SEQ ID NO: 1442179 - DNA, 15 bp, Homo sapiens
aatctttcagaaaag

SEQ ID NO: 1442180 - DNA, 15 bp, Homo sapiens
atctttcagaaaagt

SEQ ID NO: 1442181 - DNA, 15 bp, Homo sapiens
tctttcagaaaagta

SEQ ID NO: 1442182 - DNA, 15 bp, Homo sapiens
ctttcagaaaagtag

SEQ ID NO: 1442183 - DNA, 15 bp, Homo sapiens
tttcagaaaagtagt

SEQ ID NO: 1442184 - DNA, 15 bp, Homo sapiens
ttcagaaaagtagta

SEQ ID NO: 1442185 - DNA, 15 bp, Homo sapiens
tcagaaaagtagtaa

SEQ ID NO: 1442186 - DNA, 15 bp, Homo sapiens
cagaaaagtagtaaa

SEQ ID NO: 1442187 - DNA, 15 bp, Homo sapiens
agaaaagtagtaaaa

SEQ ID NO: 1442188 - DNA, 15 bp, Homo sapiens
gaaaagtagtaaaat

SEQ ID NO: 1442189 - DNA, 15 bp, Homo sapiens
aaaagtagtaaaatt

SEQ ID NO: 1442190 - DNA, 15 bp, Homo sapiens
aaagtagtaaaattg

SEQ ID NO: 1442191 - DNA, 15 bp, Homo sapiens
aagtagtaaaattgt

SEQ ID NO: 1442192 - DNA, 15 bp, Homo sapiens
agtagtaaaattgtc

SEQ ID NO: 1442193 - DNA, 15 bp, Homo sapiens
gtagtaaaattgtca

SEQ ID NO: 1442194 - DNA, 15 bp, Homo sapiens
tagtaaaattgtcat

SEQ ID NO: 1442195 - DNA, 15 bp, Homo sapiens
agtaaaattgtcatt

SEQ ID NO: 1442196 - DNA, 15 bp, Homo sapiens
gtaaaattgtcattc

SEQ ID NO: 1442197 - DNA, 15 bp, Homo sapiens
taaaattgtcattcc

SEQ ID NO: 1442198 - DNA, 15 bp, Homo sapiens
aaaattgtcattcct

SEQ ID NO: 1442199 - DNA, 15 bp, Homo sapiens
aaattgtcattccta

SEQ ID NO: 1442200 - DNA, 15 bp, Homo sapiens
aattgtcattcctat

SEQ ID NO: 1442201 - DNA, 15 bp, Homo sapiens
attgtcattcctata

SEQ ID NO: 1442202 - DNA, 15 bp, Homo sapiens
ttgtcattcctataa

SEQ ID NO: 1442203 - DNA, 15 bp, Homo sapiens
tgtcattcctataaa

SEQ ID NO: 1442204 - DNA, 15 bp, Homo sapiens
gtcattcctataaat

SEQ ID NO: 1442205 - DNA, 15 bp, Homo sapiens
tcattcctataaatc

SEQ ID NO: 1442206 - DNA, 15 bp, Homo sapiens
cattcctataaatct

SEQ ID NO: 1442207 - DNA, 15 bp, Homo sapiens
attcctataaatcta

SEQ ID NO: 1442208 - DNA, 15 bp, Homo sapiens
ttcctataaatctaa

SEQ ID NO: 1442209 - DNA, 15 bp, Homo sapiens
tcctataaatctaac

SEQ ID NO: 1442210 - DNA, 15 bp, Homo sapiens
cctataaatctaact

SEQ ID NO: 1442211 - DNA, 15 bp, Homo sapiens
ctataaatctaacta

SEQ ID NO: 1442212 - DNA, 15 bp, Homo sapiens
tataaatctaactaa

SEQ ID NO: 1442213 - DNA, 15 bp, Homo sapiens
ataaatctaactaat

SEQ ID NO: 1442214 - DNA, 15 bp, Homo sapiens
taaatctaactaatg

SEQ ID NO: 1442215 - DNA, 15 bp, Homo sapiens
aaatctaactaatgt

SEQ ID NO: 1442216 - DNA, 15 bp, Homo sapiens
aatctaactaatgtc

SEQ ID NO: 1442217 - DNA, 15 bp, Homo sapiens
atctaactaatgtct

SEQ ID NO: 1442218 - DNA, 15 bp, Homo sapiens
tctaactaatgtctt

SEQ ID NO: 1442219 - DNA, 15 bp, Homo sapiens
ctaactaatgtcttt

SEQ ID NO: 1442220 - DNA, 15 bp, Homo sapiens
taactaatgtcttta

SEQ ID NO: 1442221 - DNA, 15 bp, Homo sapiens
aactaatgtctttaa

SEQ ID NO: 1442222 - DNA, 15 bp, Homo sapiens
actaatgtctttaaa

SEQ ID NO: 1442223 - DNA, 15 bp, Homo sapiens
ctaatgtctttaaaa

SEQ ID NO: 1442224 - DNA, 15 bp, Homo sapiens
taatgtctttaaaat

SEQ ID NO: 1442225 - DNA, 15 bp, Homo sapiens
aatgtctttaaaatt

SEQ ID NO: 1442226 - DNA, 15 bp, Homo sapiens
atgtctttaaaattc

SEQ ID NO: 1442227 - DNA, 15 bp, Homo sapiens
tgtctttaaaattca

SEQ ID NO: 1442228 - DNA, 15 bp, Homo sapiens
gtctttaaaattcat

SEQ ID NO: 1442229 - DNA, 15 bp, Homo sapiens
tctttaaaattcatc

SEQ ID NO: 1442230 - DNA, 15 bp, Homo sapiens
ctttaaaattcatct

SEQ ID NO: 1442231 - DNA, 15 bp, Homo sapiens
tttaaaattcatctc

SEQ ID NO: 1442232 - DNA, 15 bp, Homo sapiens
ttaaaattcatctca

SEQ ID NO: 1442233 - DNA, 15 bp, Homo sapiens
taaaattcatctcac

SEQ ID NO: 1442234 - DNA, 15 bp, Homo sapiens
aaaattcatctcaca

SEQ ID NO: 1442235 - DNA, 15 bp, Homo sapiens
aaattcatctcacaa

SEQ ID NO: 1442236 - DNA, 15 bp, Homo sapiens
aattcatctcacaaa

SEQ ID NO: 1442237 - DNA, 15 bp, Homo sapiens
attcatctcacaaaa

SEQ ID NO: 1442238 - DNA, 15 bp, Homo sapiens
ttcatctcacaaaat

SEQ ID NO: 1442239 - DNA, 15 bp, Homo sapiens
tcatctcacaaaatc

SEQ ID NO: 1442240 - DNA, 15 bp, Homo sapiens
catctcacaaaatca

SEQ ID NO: 1442241 - DNA, 15 bp, Homo sapiens
atctcacaaaatcag

SEQ ID NO: 1442242 - DNA, 15 bp, Homo sapiens
tctcacaaaatcagt

SEQ ID NO: 1442243 - DNA, 15 bp, Homo sapiens
ctcacaaaatcagta

SEQ ID NO: 1442244 - DNA, 15 bp, Homo sapiens
tcacaaaatcagtat

SEQ ID NO: 1442245 - DNA, 15 bp, Homo sapiens
cacaaaatcagtatc

SEQ ID NO: 1442246 - DNA, 15 bp, Homo sapiens
acaaaatcagtatct

SEQ ID NO: 1442247 - DNA, 15 bp, Homo sapiens
caaaatcagtatctt

SEQ ID NO: 1442248 - DNA, 15 bp, Homo sapiens
aaaatcagtatcttt

SEQ ID NO: 1442249 - DNA, 15 bp, Homo sapiens
aaatcagtatctttt

SEQ ID NO: 1442250 - DNA, 15 bp, Homo sapiens
aatcagtatcttttt

SEQ ID NO: 1442251 - DNA, 15 bp, Homo sapiens
atcagtatcttttta

SEQ ID NO: 1442252 - DNA, 15 bp, Homo sapiens
tcagtatctttttat

SEQ ID NO: 1442253 - DNA, 15 bp, Homo sapiens
cagtatctttttatt

SEQ ID NO: 1442254 - DNA, 15 bp, Homo sapiens
agtatctttttattt

SEQ ID NO: 1442255 - DNA, 15 bp, Homo sapiens
gtatctttttatttt

SEQ ID NO: 1442256 - DNA, 15 bp, Homo sapiens
tatctttttattttg

SEQ ID NO: 1442257 - DNA, 15 bp, Homo sapiens
atctttttattttgt

SEQ ID NO: 1442258 - DNA, 15 bp, Homo sapiens
tctttttattttgta

SEQ ID NO: 1442259 - DNA, 15 bp, Homo sapiens
ctttttattttgtac

SEQ ID NO: 1442260 - DNA, 15 bp, Homo sapiens
tttttattttgtact

SEQ ID NO: 1442261 - DNA, 15 bp, Homo sapiens
ttttattttgtactg

SEQ ID NO: 1442262 - DNA, 15 bp, Homo sapiens
tttattttgtactga

SEQ ID NO: 1442263 - DNA, 15 bp, Homo sapiens
ttattttgtactgag

SEQ ID NO: 1442264 - DNA, 15 bp, Homo sapiens
tattttgtactgagc

SEQ ID NO: 1442265 - DNA, 15 bp, Homo sapiens
attttgtactgagct

SEQ ID NO: 1442266 - DNA, 15 bp, Homo sapiens
ttttgtactgagcta

SEQ ID NO: 1442267 - DNA, 15 bp, Homo sapiens
tttgtactgagctac

SEQ ID NO: 1442268 - DNA, 15 bp, Homo sapiens
ttgtactgagctact

SEQ ID NO: 1442269 - DNA, 15 bp, Homo sapiens
tgtactgagctactt

SEQ ID NO: 1442270 - DNA, 15 bp, Homo sapiens
gtactgagctactta

SEQ ID NO: 1442271 - DNA, 15 bp, Homo sapiens
tactgagctacttat

SEQ ID NO: 1442272 - DNA, 15 bp, Homo sapiens
actgagctacttatt

SEQ ID NO: 1442273 - DNA, 15 bp, Homo sapiens
ctgagctacttattt

SEQ ID NO: 1442274 - DNA, 15 bp, Homo sapiens
tgagctacttatttt

SEQ ID NO: 1442275 - DNA, 15 bp, Homo sapiens
gagctacttatttta

SEQ ID NO: 1442276 - DNA, 15 bp, Homo sapiens
agctacttattttac

SEQ ID NO: 1442277 - DNA, 15 bp, Homo sapiens
gctacttattttacc

SEQ ID NO: 1442278 - DNA, 15 bp, Homo sapiens
ctacttattttaccc

SEQ ID NO: 1442279 - DNA, 15 bp, Homo sapiens
tacttattttaccca

SEQ ID NO: 1442280 - DNA, 15 bp, Homo sapiens
acttattttacccaa

SEQ ID NO: 1442281 - DNA, 15 bp, Homo sapiens
cttattttacccaaa

SEQ ID NO: 1442282 - DNA, 15 bp, Homo sapiens
ttattttacccaaat

SEQ ID NO: 1442283 - DNA, 15 bp, Homo sapiens
tattttacccaaatt

SEQ ID NO: 1442284 - DNA, 15 bp, Homo sapiens
attttacccaaattg

SEQ ID NO: 1442285 - DNA, 15 bp, Homo sapiens
ttttacccaaattgg

SEQ ID NO: 1442286 - DNA, 15 bp, Homo sapiens
tttacccaaattggg

SEQ ID NO: 1442287 - DNA, 15 bp, Homo sapiens
ttacccaaattgggg

SEQ ID NO: 1442288 - DNA, 15 bp, Homo sapiens
tacccaaattggggg

SEQ ID NO: 1442289 - DNA, 15 bp, Homo sapiens
acccaaattgggggt

SEQ ID NO: 1442290 - DNA, 15 bp, Homo sapiens
cccaaattgggggtt

SEQ ID NO: 1442291 - DNA, 15 bp, Homo sapiens
ccaaattgggggttt

SEQ ID NO: 1442292 - DNA, 15 bp, Homo sapiens
caaattgggggttta

SEQ ID NO: 1442293 - DNA, 15 bp, Homo sapiens
aaattgggggtttaa

SEQ ID NO: 1442294 - DNA, 15 bp, Homo sapiens
aattgggggtttaaa

SEQ ID NO: 1442295 - DNA, 15 bp, Homo sapiens
attgggggtttaaaa

SEQ ID NO: 1442296 - DNA, 15 bp, Homo sapiens
ttgggggtttaaaaa

SEQ ID NO: 1442297 - DNA, 15 bp, Homo sapiens
tgggggtttaaaaag

SEQ ID NO: 1442298 - DNA, 15 bp, Homo sapiens
gggggtttaaaaaga

SEQ ID NO: 1442299 - DNA, 15 bp, Homo sapiens
ggggtttaaaaagaa

SEQ ID NO: 1442300 - DNA, 15 bp, Homo sapiens
gggtttaaaaagaaa

SEQ ID NO: 1442301 - DNA, 15 bp, Homo sapiens
ggtttaaaaagaaac

SEQ ID NO: 1442302 - DNA, 15 bp, Homo sapiens
gtttaaaaagaaact

SEQ ID NO: 1442303 - DNA, 15 bp, Homo sapiens
tttaaaaagaaactc

SEQ ID NO: 1442304 - DNA, 15 bp, Homo sapiens
ttaaaaagaaactca

SEQ ID NO: 1442305 - DNA, 15 bp, Homo sapiens
taaaaagaaactcat

SEQ ID NO: 1442306 - DNA, 15 bp, Homo sapiens
aaaaagaaactcatt

SEQ ID NO: 1442307 - DNA, 15 bp, Homo sapiens
aaaagaaactcatta

SEQ ID NO: 1442308 - DNA, 15 bp, Homo sapiens
aaagaaactcattac

SEQ ID NO: 1442309 - DNA, 15 bp, Homo sapiens
aagaaactcattact

SEQ ID NO: 1442310 - DNA, 15 bp, Homo sapiens
agaaactcattactt

SEQ ID NO: 1442311 - DNA, 15 bp, Homo sapiens
gaaactcattactta

SEQ ID NO: 1442312 - DNA, 15 bp, Homo sapiens
aaactcattacttat

SEQ ID NO: 1442313 - DNA, 15 bp, Homo sapiens
aactcattacttatt

SEQ ID NO: 1442314 - DNA, 15 bp, Homo sapiens
actcattacttattt

SEQ ID NO: 1442315 - DNA, 15 bp, Homo sapiens
ctcattacttatttt

SEQ ID NO: 1442316 - DNA, 15 bp, Homo sapiens
tcattacttattttc

SEQ ID NO: 1442317 - DNA, 15 bp, Homo sapiens
cattacttattttcg

SEQ ID NO: 1442318 - DNA, 15 bp, Homo sapiens
attacttattttcga

SEQ ID NO: 1442319 - DNA, 15 bp, Homo sapiens
ttacttattttcgaa

SEQ ID NO: 1442320 - DNA, 15 bp, Homo sapiens
tacttattttcgaaa

SEQ ID NO: 1442321 - DNA, 15 bp, Homo sapiens
acttattttcgaaag

SEQ ID NO: 1442322 - DNA, 15 bp, Homo sapiens
cttattttcgaaagg

SEQ ID NO: 1442323 - DNA, 15 bp, Homo sapiens
ttattttcgaaagga

SEQ ID NO: 1442324 - DNA, 15 bp, Homo sapiens
tattttcgaaaggaa

SEQ ID NO: 1442325 - DNA, 15 bp, Homo sapiens
attttcgaaaggaaa

SEQ ID NO: 1442326 - DNA, 15 bp, Homo sapiens
ttttcgaaaggaaaa

SEQ ID NO: 1442327 - DNA, 15 bp, Homo sapiens
tttcgaaaggaaaat

SEQ ID NO: 1442328 - DNA, 15 bp, Homo sapiens
ttcgaaaggaaaatt

SEQ ID NO: 1442329 - DNA, 15 bp, Homo sapiens
tcgaaaggaaaattt

SEQ ID NO: 1442330 - DNA, 15 bp, Homo sapiens
cgaaaggaaaattta

SEQ ID NO: 1442331 - DNA, 15 bp, Homo sapiens
gaaaggaaaatttac

SEQ ID NO: 1442332 - DNA, 15 bp, Homo sapiens
aaaggaaaatttact

SEQ ID NO: 1442333 - DNA, 15 bp, Homo sapiens
aaggaaaatttactg

SEQ ID NO: 1442334 - DNA, 15 bp, Homo sapiens
aggaaaatttactgt

SEQ ID NO: 1442335 - DNA, 15 bp, Homo sapiens
ggaaaatttactgtc

SEQ ID NO: 1442336 - DNA, 15 bp, Homo sapiens
gaaaatttactgtca

SEQ ID NO: 1442337 - DNA, 15 bp, Homo sapiens
aaaatttactgtcaa

SEQ ID NO: 1442338 - DNA, 15 bp, Homo sapiens
aaatttactgtcaag

SEQ ID NO: 1442339 - DNA, 15 bp, Homo sapiens
aatttactgtcaagt

SEQ ID NO: 1442340 - DNA, 15 bp, Homo sapiens
atttactgtcaagta

SEQ ID NO: 1442341 - DNA, 15 bp, Homo sapiens
tttactgtcaagtac

SEQ ID NO: 1442342 - DNA, 15 bp, Homo sapiens
ttactgtcaagtaca

SEQ ID NO: 1442343 - DNA, 15 bp, Homo sapiens
tactgtcaagtacag

SEQ ID NO: 1442344 - DNA, 15 bp, Homo sapiens
actgtcaagtacagt

SEQ ID NO: 1442345 - DNA, 15 bp, Homo sapiens
ctgtcaagtacagta

SEQ ID NO: 1442346 - DNA, 15 bp, Homo sapiens
tgtcaagtacagtaa

SEQ ID NO: 1442347 - DNA, 15 bp, Homo sapiens
gtcaagtacagtaat

SEQ ID NO: 1442348 - DNA, 15 bp, Homo sapiens
tcaagtacagtaatt

SEQ ID NO: 1442349 - DNA, 15 bp, Homo sapiens
caagtacagtaattt

SEQ ID NO: 1442350 - DNA, 15 bp, Homo sapiens
aagtacagtaatttt

SEQ ID NO: 1442351 - DNA, 15 bp, Homo sapiens
agtacagtaattttt

SEQ ID NO: 1442352 - DNA, 15 bp, Homo sapiens
gtacagtaatttttt

SEQ ID NO: 1442353 - DNA, 15 bp, Homo sapiens
tacagtaattttttt

SEQ ID NO: 1442354 - DNA, 15 bp, Homo sapiens
acagtaatttttttt

SEQ ID NO: 1442355 - DNA, 15 bp, Homo sapiens
gtaatttttttttta

SEQ ID NO: 1442356 - DNA, 15 bp, Homo sapiens
ttttttttttaaagc

SEQ ID NO: 1442357 - DNA, 15 bp, Homo sapiens
tttttttttaaagca

SEQ ID NO: 1442358 - DNA, 15 bp, Homo sapiens
ttttttttaaagcag

SEQ ID NO: 1442359 - DNA, 15 bp, Homo sapiens
tttttttaaagcagc

SEQ ID NO: 1442360 - DNA, 15 bp, Homo sapiens
ttttttaaagcagcg

SEQ ID NO: 1442361 - DNA, 15 bp, Homo sapiens
tttttaaagcagcgt

SEQ ID NO: 1442362 - DNA, 15 bp, Homo sapiens
ttttaaagcagcgtt

SEQ ID NO: 1442363 - DNA, 15 bp, Homo sapiens
tttaaagcagcgttt

SEQ ID NO: 1442364 - DNA, 15 bp, Homo sapiens
ttaaagcagcgttta

SEQ ID NO: 1442365 - DNA, 15 bp, Homo sapiens
taaagcagcgtttaa

SEQ ID NO: 1442366 - DNA, 15 bp, Homo sapiens
aaagcagcgtttaaa

SEQ ID NO: 1442367 - DNA, 15 bp, Homo sapiens
aagcagcgtttaaaa

SEQ ID NO: 1442368 - DNA, 15 bp, Homo sapiens
agcagcgtttaaaaa

SEQ ID NO: 1442369 - DNA, 15 bp, Homo sapiens
gcagcgtttaaaaaa

SEQ ID NO: 1442370 - DNA, 15 bp, Homo sapiens
cagcgtttaaaaaaa

SEQ ID NO: 1442371 - DNA, 15 bp, Homo sapiens
agcgtttaaaaaaaa

SEQ ID NO: 1442372 - DNA, 15 bp, Homo sapiens
gcgtttaaaaaaaaa

SEQ ID NO: 1442373 - DNA, 15 bp, Homo sapiens
cgtttaaaaaaaaaa

SEQ ID NO: 1442374 - DNA, 15 bp, Homo sapiens
taaaaaaaaaaaaag

SEQ ID NO: 1442375 - DNA, 15 bp, Homo sapiens
aaaaaaaagacaaag

SEQ ID NO: 1442376 - DNA, 15 bp, Homo sapiens
aaaaaaagacaaagc

SEQ ID NO: 1442377 - DNA, 15 bp, Homo sapiens
aaaaaagacaaagca

SEQ ID NO: 1442378 - DNA, 15 bp, Homo sapiens
aaaaagacaaagcac

SEQ ID NO: 1442379 - DNA, 15 bp, Homo sapiens
aaaagacaaagcact

SEQ ID NO: 1442380 - DNA, 15 bp, Homo sapiens
aaagacaaagcactg

SEQ ID NO: 1442381 - DNA, 15 bp, Homo sapiens
aagacaaagcactgg

SEQ ID NO: 1442382 - DNA, 15 bp, Homo sapiens
agacaaagcactggt

SEQ ID NO: 1442383 - DNA, 15 bp, Homo sapiens
gacaaagcactggtc

SEQ ID NO: 1442384 - DNA, 15 bp, Homo sapiens
acaaagcactggtcc

SEQ ID NO: 1442385 - DNA, 15 bp, Homo sapiens
caaagcactggtcca

SEQ ID NO: 1442386 - DNA, 15 bp, Homo sapiens
aaagcactggtccag

SEQ ID NO: 1442387 - DNA, 15 bp, Homo sapiens
aagcactggtccaga

SEQ ID NO: 1442388 - DNA, 15 bp, Homo sapiens
agcactggtccagat

SEQ ID NO: 1442389 - DNA, 15 bp, Homo sapiens
gcactggtccagata

SEQ ID NO: 1442390 - DNA, 15 bp, Homo sapiens
cactggtccagatag

SEQ ID NO: 1442391 - DNA, 15 bp, Homo sapiens
actggtccagatagt

SEQ ID NO: 1442392 - DNA, 15 bp, Homo sapiens
ctggtccagatagtt

SEQ ID NO: 1442393 - DNA, 15 bp, Homo sapiens
tggtccagatagttg

SEQ ID NO: 1442394 - DNA, 15 bp, Homo sapiens
ggtccagatagttgg

SEQ ID NO: 1442395 - DNA, 15 bp, Homo sapiens
gtccagatagttgga

SEQ ID NO: 1442396 - DNA, 15 bp, Homo sapiens
tccagatagttggaa

SEQ ID NO: 1442397 - DNA, 15 bp, Homo sapiens
ccagatagttggaaa

SEQ ID NO: 1442398 - DNA, 15 bp, Homo sapiens
cagatagttggaaat

SEQ ID NO: 1442399 - DNA, 15 bp, Homo sapiens
agatagttggaaatg

SEQ ID NO: 1442400 - DNA, 15 bp, Homo sapiens
gatagttggaaatgt

SEQ ID NO: 1442401 - DNA, 15 bp, Homo sapiens
atagttggaaatgtc

SEQ ID NO: 1442402 - DNA, 15 bp, Homo sapiens
tagttggaaatgtca

SEQ ID NO: 1442403 - DNA, 15 bp, Homo sapiens
agttggaaatgtcat

SEQ ID NO: 1442404 - DNA, 15 bp, Homo sapiens
gttggaaatgtcatt

SEQ ID NO: 1442405 - DNA, 15 bp, Homo sapiens
ttggaaatgtcattt

SEQ ID NO: 1442406 - DNA, 15 bp, Homo sapiens
tggaaatgtcattta

SEQ ID NO: 1442407 - DNA, 15 bp, Homo sapiens
ggaaatgtcatttag

SEQ ID NO: 1442408 - DNA, 15 bp, Homo sapiens
gaaatgtcatttaga

SEQ ID NO: 1442409 - DNA, 15 bp, Homo sapiens
aaatgtcatttagat

SEQ ID NO: 1442410 - DNA, 15 bp, Homo sapiens
aatgtcatttagatt

SEQ ID NO: 1442411 - DNA, 15 bp, Homo sapiens
atgtcatttagattt

SEQ ID NO: 1442412 - DNA, 15 bp, Homo sapiens
tgtcatttagattta

SEQ ID NO: 1442413 - DNA, 15 bp, Homo sapiens
gtcatttagatttaa

SEQ ID NO: 1442414 - DNA, 15 bp, Homo sapiens
tcatttagatttaag

SEQ ID NO: 1442415 - DNA, 15 bp, Homo sapiens
catttagatttaagt

SEQ ID NO: 1442416 - DNA, 15 bp, Homo sapiens
atttagatttaagtc

SEQ ID NO: 1442417 - DNA, 15 bp, Homo sapiens
tttagatttaagtct

SEQ ID NO: 1442418 - DNA, 15 bp, Homo sapiens
ttagatttaagtcta

SEQ ID NO: 1442419 - DNA, 15 bp, Homo sapiens
tagatttaagtctac

SEQ ID NO: 1442420 - DNA, 15 bp, Homo sapiens
agatttaagtctaca

SEQ ID NO: 1442421 - DNA, 15 bp, Homo sapiens
gatttaagtctacag

SEQ ID NO: 1442422 - DNA, 15 bp, Homo sapiens
atttaagtctacagc

SEQ ID NO: 1442423 - DNA, 15 bp, Homo sapiens
tttaagtctacagct

SEQ ID NO: 1442424 - DNA, 15 bp, Homo sapiens
ttaagtctacagctt

SEQ ID NO: 1442425 - DNA, 15 bp, Homo sapiens
taagtctacagcttc

SEQ ID NO: 1442426 - DNA, 15 bp, Homo sapiens
aagtctacagcttct

SEQ ID NO: 1442427 - DNA, 15 bp, Homo sapiens
agtctacagcttctt

SEQ ID NO: 1442428 - DNA, 15 bp, Homo sapiens
gtctacagcttctta

SEQ ID NO: 1442429 - DNA, 15 bp, Homo sapiens
tctacagcttcttag

SEQ ID NO: 1442430 - DNA, 15 bp, Homo sapiens
ctacagcttcttagg

SEQ ID NO: 1442431 - DNA, 15 bp, Homo sapiens
tacagcttcttagga

SEQ ID NO: 1442432 - DNA, 15 bp, Homo sapiens
acagcttcttaggaa

SEQ ID NO: 1442433 - DNA, 15 bp, Homo sapiens
cagcttcttaggaaa

SEQ ID NO: 1442434 - DNA, 15 bp, Homo sapiens
agcttcttaggaaag

SEQ ID NO: 1442435 - DNA, 15 bp, Homo sapiens
gcttcttaggaaagt

SEQ ID NO: 1442436 - DNA, 15 bp, Homo sapiens
cttcttaggaaagtt

SEQ ID NO: 1442437 - DNA, 15 bp, Homo sapiens
ttcttaggaaagtta

SEQ ID NO: 1442438 - DNA, 15 bp, Homo sapiens
tcttaggaaagttag

SEQ ID NO: 1442439 - DNA, 15 bp, Homo sapiens
cttaggaaagttagg

SEQ ID NO: 1442440 - DNA, 15 bp, Homo sapiens
ttaggaaagttaggt

SEQ ID NO: 1442441 - DNA, 15 bp, Homo sapiens
taggaaagttaggta

SEQ ID NO: 1442442 - DNA, 15 bp, Homo sapiens
catcatcctgaacac

SEQ ID NO: 1442443 - DNA, 15 bp, Homo sapiens
atcatcctgaacacc

SEQ ID NO: 1442444 - DNA, 15 bp, Homo sapiens
tcatcctgaacaccg

SEQ ID NO: 1442445 - DNA, 15 bp, Homo sapiens
catcctgaacaccga

SEQ ID NO: 1442446 - DNA, 15 bp, Homo sapiens
atcctgaacaccgag

SEQ ID NO: 1442447 - DNA, 15 bp, Homo sapiens
tcctgaacaccgagc

SEQ ID NO: 1442448 - DNA, 15 bp, Homo sapiens
cctgaacaccgagct

SEQ ID NO: 1442449 - DNA, 15 bp, Homo sapiens
ctgaacaccgagctc

SEQ ID NO: 1442450 - DNA, 15 bp, Homo sapiens
tgaacaccgagctct

SEQ ID NO: 1442451 - DNA, 15 bp, Homo sapiens
gaacaccgagctctg

SEQ ID NO: 1442452 - DNA, 15 bp, Homo sapiens
aacaccgagctctgg

SEQ ID NO: 1442453 - DNA, 15 bp, Homo sapiens
acaccgagctctggg

SEQ ID NO: 1442454 - DNA, 15 bp, Homo sapiens
caccgagctctggga

SEQ ID NO: 1442455 - DNA, 15 bp, Homo sapiens
accgagctctgggac

SEQ ID NO: 1442456 - DNA, 15 bp, Homo sapiens
ccgagctctgggact

SEQ ID NO: 1442457 - DNA, 15 bp, Homo sapiens
cgagctctgggactc

SEQ ID NO: 1442458 - DNA, 15 bp, Homo sapiens
gagctctgggactcc

SEQ ID NO: 1442459 - DNA, 15 bp, Homo sapiens
agctctgggactccg

SEQ ID NO: 1442460 - DNA, 15 bp, Homo sapiens
gctctgggactccgg

SEQ ID NO: 1442461 - DNA, 15 bp, Homo sapiens
ctctgggactccggc

SEQ ID NO: 1442462 - DNA, 15 bp, Homo sapiens
tctgggactccggcg

SEQ ID NO: 1442463 - DNA, 15 bp, Homo sapiens
ctgggactccggcgg

SEQ ID NO: 1442464 - DNA, 15 bp, Homo sapiens
tgggactccggcgga

SEQ ID NO: 1442465 - DNA, 15 bp, Homo sapiens
gggactccggcggag

SEQ ID NO: 1442466 - DNA, 15 bp, Homo sapiens
ggactccggcggaga

SEQ ID NO: 1442467 - DNA, 15 bp, Homo sapiens
gactccggcggagaa

SEQ ID NO: 1442468 - DNA, 15 bp, Homo sapiens
actccggcggagaat

SEQ ID NO: 1442469 - DNA, 15 bp, Homo sapiens
ctccggcggagaatc

SEQ ID NO: 1442470 - DNA, 15 bp, Homo sapiens
tccggcggagaatct

SEQ ID NO: 1442471 - DNA, 15 bp, Homo sapiens
ccggcggagaatcta

SEQ ID NO: 1442472 - DNA, 15 bp, Homo sapiens
cggcggagaatctaa

SEQ ID NO: 1442473 - DNA, 15 bp, Homo sapiens
ggcggagaatctaaa

SEQ ID NO: 1442474 - DNA, 15 bp, Homo sapiens
gcggagaatctaaac

SEQ ID NO: 1442475 - DNA, 15 bp, Homo sapiens
cggagaatctaaacg

SEQ ID NO: 1442476 - DNA, 15 bp, Homo sapiens
ggagaatctaaacgt

SEQ ID NO: 1442477 - DNA, 15 bp, Homo sapiens
gagaatctaaacgta

SEQ ID NO: 1442478 - DNA, 15 bp, Homo sapiens
agaatctaaacgtaa

SEQ ID NO: 1442479 - DNA, 15 bp, Homo sapiens
gaatctaaacgtaaa

SEQ ID NO: 1442480 - DNA, 15 bp, Homo sapiens
aatctaaacgtaaag

SEQ ID NO: 1442481 - DNA, 15 bp, Homo sapiens
atctaaacgtaaagc

SEQ ID NO: 1442482 - DNA, 15 bp, Homo sapiens
tctaaacgtaaagca

SEQ ID NO: 1442483 - DNA, 15 bp, Homo sapiens
ctaaacgtaaagcat

SEQ ID NO: 1442484 - DNA, 15 bp, Homo sapiens
taaacgtaaagcatc

SEQ ID NO: 1442485 - DNA, 15 bp, Homo sapiens
aaacgtaaagcatca

SEQ ID NO: 1442486 - DNA, 15 bp, Homo sapiens
aacgtaaagcatcac

SEQ ID NO: 1442487 - DNA, 15 bp, Homo sapiens
acgtaaagcatcacc

SEQ ID NO: 1442488 - DNA, 15 bp, Homo sapiens
cgtaaagcatcaccc

SEQ ID NO: 1442489 - DNA, 15 bp, Homo sapiens
gtaaagcatcaccca

SEQ ID NO: 1442490 - DNA, 15 bp, Homo sapiens
taaagcatcacccac

SEQ ID NO: 1442491 - DNA, 15 bp, Homo sapiens
aaagcatcacccacg

SEQ ID NO: 1442492 - DNA, 15 bp, Homo sapiens
aagcatcacccacgg

SEQ ID NO: 1442493 - DNA, 15 bp, Homo sapiens
agcatcacccacggt

SEQ ID NO: 1442494 - DNA, 15 bp, Homo sapiens
gcatcacccacggtc

SEQ ID NO: 1442495 - DNA, 15 bp, Homo sapiens
catcacccacggtcg

SEQ ID NO: 1442496 - DNA, 15 bp, Homo sapiens
atcacccacggtcgt

SEQ ID NO: 1442497 - DNA, 15 bp, Homo sapiens
tcacccacggtcgtg

SEQ ID NO: 1442498 - DNA, 15 bp, Homo sapiens
cacccacggtcgtga

SEQ ID NO: 1442499 - DNA, 15 bp, Homo sapiens
acccacggtcgtgaa

SEQ ID NO: 1442500 - DNA, 15 bp, Homo sapiens
cccacggtcgtgaac

SEQ ID NO: 1442501 - DNA, 15 bp, Homo sapiens
ccacggtcgtgaact

SEQ ID NO: 1442502 - DNA, 15 bp, Homo sapiens
cacggtcgtgaactg

SEQ ID NO: 1442503 - DNA, 15 bp, Homo sapiens
acggtcgtgaactgt

SEQ ID NO: 1442504 - DNA, 15 bp, Homo sapiens
cggtcgtgaactgta

SEQ ID NO: 1442505 - DNA, 15 bp, Homo sapiens
ggtcgtgaactgtag

SEQ ID NO: 1442506 - DNA, 15 bp, Homo sapiens
gtcgtgaactgtagg

SEQ ID NO: 1442507 - DNA, 15 bp, Homo sapiens
tcgtgaactgtaggc

SEQ ID NO: 1442508 - DNA, 15 bp, Homo sapiens
cgtgaactgtaggct

SEQ ID NO: 1442509 - DNA, 15 bp, Homo sapiens
gtgaactgtaggctc

SEQ ID NO: 1442510 - DNA, 15 bp, Homo sapiens
tgaactgtaggctct

SEQ ID NO: 1442511 - DNA, 15 bp, Homo sapiens
gaactgtaggctctc

SEQ ID NO: 1442512 - DNA, 15 bp, Homo sapiens
aactgtaggctctcc

SEQ ID NO: 1442513 - DNA, 15 bp, Homo sapiens
actgtaggctctcct

SEQ ID NO: 1442514 - DNA, 15 bp, Homo sapiens
ctgtaggctctcctg

SEQ ID NO: 1442515 - DNA, 15 bp, Homo sapiens
tgtaggctctcctgg

SEQ ID NO: 1442516 - DNA, 15 bp, Homo sapiens
gtaggctctcctggc

SEQ ID NO: 1442517 - DNA, 15 bp, Homo sapiens
taggctctcctggca

SEQ ID NO: 1442518 - DNA, 15 bp, Homo sapiens
aggctctcctggcat

SEQ ID NO: 1442519 - DNA, 15 bp, Homo sapiens
ggctctcctggcatc

SEQ ID NO: 1442520 - DNA, 15 bp, Homo sapiens
gctctcctggcatcc

SEQ ID NO: 1442521 - DNA, 15 bp, Homo sapiens
ctctcctggcatccg

SEQ ID NO: 1442522 - DNA, 15 bp, Homo sapiens
tctcctggcatccgg

SEQ ID NO: 1442523 - DNA, 15 bp, Homo sapiens
ctcctggcatccggg

SEQ ID NO: 1442524 - DNA, 15 bp, Homo sapiens
tcctggcatccggga

SEQ ID NO: 1442525 - DNA, 15 bp, Homo sapiens
cctggcatccgggat

SEQ ID NO: 1442526 - DNA, 15 bp, Homo sapiens
ctggcatccgggatc

SEQ ID NO: 1442527 - DNA, 15 bp, Homo sapiens
tggcatccgggatct

SEQ ID NO: 1442528 - DNA, 15 bp, Homo sapiens
ggcatccgggatctt

SEQ ID NO: 1442529 - DNA, 15 bp, Homo sapiens
gcatccgggatctta

SEQ ID NO: 1442530 - DNA, 15 bp, Homo sapiens
catccgggatcttat

SEQ ID NO: 1442531 - DNA, 15 bp, Homo sapiens
atccgggatcttatt

SEQ ID NO: 1442532 - DNA, 15 bp, Homo sapiens
tccgggatcttattc

SEQ ID NO: 1442533 - DNA, 15 bp, Homo sapiens
ccgggatcttattct

SEQ ID NO: 1442534 - DNA, 15 bp, Homo sapiens
cgggatcttattctg

SEQ ID NO: 1442535 - DNA, 15 bp, Homo sapiens
gggatcttattctgg

SEQ ID NO: 1442536 - DNA, 15 bp, Homo sapiens
ggatcttattctggc

SEQ ID NO: 1442537 - DNA, 15 bp, Homo sapiens
gatcttattctggcc

SEQ ID NO: 1442538 - DNA, 15 bp, Homo sapiens
atcttattctggcct

SEQ ID NO: 1442539 - DNA, 15 bp, Homo sapiens
tcttattctggcctt

SEQ ID NO: 1442540 - DNA, 15 bp, Homo sapiens
cttattctggccttg

SEQ ID NO: 1442541 - DNA, 15 bp, Homo sapiens
ttattctggccttgg

SEQ ID NO: 1442542 - DNA, 15 bp, Homo sapiens
tattctggccttggc

SEQ ID NO: 1442543 - DNA, 15 bp, Homo sapiens
attctggccttggcg

SEQ ID NO: 1442544 - DNA, 15 bp, Homo sapiens
ttctggccttggcgg

SEQ ID NO: 1442545 - DNA, 15 bp, Homo sapiens
tctggccttggcgga

SEQ ID NO: 1442546 - DNA, 15 bp, Homo sapiens
ctggccttggcggag

SEQ ID NO: 1442547 - DNA, 15 bp, Homo sapiens
tggccttggcggagt

SEQ ID NO: 1442548 - DNA, 15 bp, Homo sapiens
ggccttggcggagtt

SEQ ID NO: 1442549 - DNA, 15 bp, Homo sapiens
gccttggcggagttg

SEQ ID NO: 1442550 - DNA, 15 bp, Homo sapiens
ccttggcggagttgg

SEQ ID NO: 1442551 - DNA, 15 bp, Homo sapiens
cttggcggagttggg

SEQ ID NO: 1442552 - DNA, 15 bp, Homo sapiens
ttggcggagttgggg

SEQ ID NO: 1442553 - DNA, 15 bp, Homo sapiens
tggcggagttgggga

SEQ ID NO: 1442554 - DNA, 15 bp, Homo sapiens
ggcggagttggggat

SEQ ID NO: 1442555 - DNA, 15 bp, Homo sapiens
gcggagttggggatg

SEQ ID NO: 1442556 - DNA, 15 bp, Homo sapiens
cggagttggggatgg

SEQ ID NO: 1442557 - DNA, 15 bp, Homo sapiens
ggagttggggatggt

SEQ ID NO: 1442558 - DNA, 15 bp, Homo sapiens
gagttggggatggtg

SEQ ID NO: 1442559 - DNA, 15 bp, Homo sapiens
agttggggatggtgt

SEQ ID NO: 1442560 - DNA, 15 bp, Homo sapiens
gttggggatggtgtc

SEQ ID NO: 1442561 - DNA, 15 bp, Homo sapiens
ttggggatggtgtcg

SEQ ID NO: 1442562 - DNA, 15 bp, Homo sapiens
tggggatggtgtcgc

SEQ ID NO: 1442563 - DNA, 15 bp, Homo sapiens
ggggatggtgtcgcc

SEQ ID NO: 1442564 - DNA, 15 bp, Homo sapiens
gggatggtgtcgcct

SEQ ID NO: 1442565 - DNA, 15 bp, Homo sapiens
ggatggtgtcgccta

SEQ ID NO: 1442566 - DNA, 15 bp, Homo sapiens
gatggtgtcgcctag

SEQ ID NO: 1442567 - DNA, 15 bp, Homo sapiens
atggtgtcgcctagc

SEQ ID NO: 1442568 - DNA, 15 bp, Homo sapiens
tggtgtcgcctagca

SEQ ID NO: 1442569 - DNA, 15 bp, Homo sapiens
ggtgtcgcctagcag

SEQ ID NO: 1442570 - DNA, 15 bp, Homo sapiens
gtgtcgcctagcagc

SEQ ID NO: 1442571 - DNA, 15 bp, Homo sapiens
tgtcgcctagcagcc

SEQ ID NO: 1442572 - DNA, 15 bp, Homo sapiens
gtcgcctagcagccg

SEQ ID NO: 1442573 - DNA, 15 bp, Homo sapiens
tcgcctagcagccgc

SEQ ID NO: 1442574 - DNA, 15 bp, Homo sapiens
cgcctagcagccgct

SEQ ID NO: 1442575 - DNA, 15 bp, Homo sapiens
gcctagcagccgctg

SEQ ID NO: 1442576 - DNA, 15 bp, Homo sapiens
cctagcagccgctgc

SEQ ID NO: 1442577 - DNA, 15 bp, Homo sapiens
ctagcagccgctgcc

SEQ ID NO: 1442578 - DNA, 15 bp, Homo sapiens
tagcagccgctgccg

SEQ ID NO: 1442579 - DNA, 15 bp, Homo sapiens
agcagccgctgccgc

SEQ ID NO: 1442580 - DNA, 15 bp, Homo sapiens
gcagccgctgccgct

SEQ ID NO: 1442581 - DNA, 15 bp, Homo sapiens
cagccgctgccgctt

SEQ ID NO: 1442582 - DNA, 15 bp, Homo sapiens
agccgctgccgcttt

SEQ ID NO: 1442583 - DNA, 15 bp, Homo sapiens
gccgctgccgctttg

SEQ ID NO: 1442584 - DNA, 15 bp, Homo sapiens
ccgctgccgctttgg

SEQ ID NO: 1442585 - DNA, 15 bp, Homo sapiens
cgctgccgctttggc

SEQ ID NO: 1442586 - DNA, 15 bp, Homo sapiens
gctgccgctttggct

SEQ ID NO: 1442587 - DNA, 15 bp, Homo sapiens
ctgccgctttggctt

SEQ ID NO: 1442588 - DNA, 15 bp, Homo sapiens
tgccgctttggcttg

SEQ ID NO: 1442589 - DNA, 15 bp, Homo sapiens
gccgctttggcttgc

SEQ ID NO: 1442590 - DNA, 15 bp, Homo sapiens
ccgctttggcttgct

SEQ ID NO: 1442591 - DNA, 15 bp, Homo sapiens
cgctttggcttgctc

SEQ ID NO: 1442592 - DNA, 15 bp, Homo sapiens
gctttggcttgctcg

SEQ ID NO: 1442593 - DNA, 15 bp, Homo sapiens
ctttggcttgctcgg

SEQ ID NO: 1442594 - DNA, 15 bp, Homo sapiens
tttggcttgctcggg

SEQ ID NO: 1442595 - DNA, 15 bp, Homo sapiens
ttggcttgctcggga

SEQ ID NO: 1442596 - DNA, 15 bp, Homo sapiens
tggcttgctcgggac

SEQ ID NO: 1442597 - DNA, 15 bp, Homo sapiens
ggcttgctcgggacc

SEQ ID NO: 1442598 - DNA, 15 bp, Homo sapiens
gcttgctcgggacca

SEQ ID NO: 1442599 - DNA, 15 bp, Homo sapiens
cttgctcgggaccat

SEQ ID NO: 1442600 - DNA, 15 bp, Homo sapiens
ttgctcgggaccatt

SEQ ID NO: 1442601 - DNA, 15 bp, Homo sapiens
tgctcgggaccattt

SEQ ID NO: 1442602 - DNA, 15 bp, Homo sapiens
gctcgggaccatttg

SEQ ID NO: 1442603 - DNA, 15 bp, Homo sapiens
ctcgggaccatttgg

SEQ ID NO: 1442604 - DNA, 15 bp, Homo sapiens
tcgggaccatttggc

SEQ ID NO: 1442605 - DNA, 15 bp, Homo sapiens
cgggaccatttggct

SEQ ID NO: 1442606 - DNA, 15 bp, Homo sapiens
gggaccatttggctg

SEQ ID NO: 1442607 - DNA, 15 bp, Homo sapiens
ggaccatttggctgg

SEQ ID NO: 1442608 - DNA, 15 bp, Homo sapiens
gaccatttggctgga

SEQ ID NO: 1442609 - DNA, 15 bp, Homo sapiens
accatttggctggac

SEQ ID NO: 1442610 - DNA, 15 bp, Homo sapiens
ccatttggctggacc

SEQ ID NO: 1442611 - DNA, 15 bp, Homo sapiens
catttggctggaccc

SEQ ID NO: 1442612 - DNA, 15 bp, Homo sapiens
atttggctggaccca

SEQ ID NO: 1442613 - DNA, 15 bp, Homo sapiens
tttggctggacccag

SEQ ID NO: 1442614 - DNA, 15 bp, Homo sapiens
ttggctggacccaga

SEQ ID NO: 1442615 - DNA, 15 bp, Homo sapiens
tggctggacccagag

SEQ ID NO: 1442616 - DNA, 15 bp, Homo sapiens
ggctggacccagagt

SEQ ID NO: 1442617 - DNA, 15 bp, Homo sapiens
gctggacccagagtc

SEQ ID NO: 1442618 - DNA, 15 bp, Homo sapiens
ctggacccagagtcc

SEQ ID NO: 1442619 - DNA, 15 bp, Homo sapiens
tggacccagagtccg

SEQ ID NO: 1442620 - DNA, 15 bp, Homo sapiens
ggacccagagtccgc

SEQ ID NO: 1442621 - DNA, 15 bp, Homo sapiens
gacccagagtccgcg

SEQ ID NO: 1442622 - DNA, 15 bp, Homo sapiens
acccagagtccgcgt

SEQ ID NO: 1442623 - DNA, 15 bp, Homo sapiens
cccagagtccgcgtg

SEQ ID NO: 1442624 - DNA, 15 bp, Homo sapiens
ccagagtccgcgtgg

SEQ ID NO: 1442625 - DNA, 15 bp, Homo sapiens
cagagtccgcgtgga

SEQ ID NO: 1442626 - DNA, 15 bp, Homo sapiens
agagtccgcgtggaa

SEQ ID NO: 1442627 - DNA, 15 bp, Homo sapiens
gagtccgcgtggaac

SEQ ID NO: 1442628 - DNA, 15 bp, Homo sapiens
agtccgcgtggaacc

SEQ ID NO: 1442629 - DNA, 15 bp, Homo sapiens
gtccgcgtggaaccg

SEQ ID NO: 1442630 - DNA, 15 bp, Homo sapiens
tccgcgtggaaccgc

SEQ ID NO: 1442631 - DNA, 15 bp, Homo sapiens
ccgcgtggaaccgcg

SEQ ID NO: 1442632 - DNA, 15 bp, Homo sapiens
cgcgtggaaccgcga

SEQ ID NO: 1442633 - DNA, 15 bp, Homo sapiens
gcgtggaaccgcgat

SEQ ID NO: 1442634 - DNA, 15 bp, Homo sapiens
cgtggaaccgcgata

SEQ ID NO: 1442635 - DNA, 15 bp, Homo sapiens
gtggaaccgcgatag

SEQ ID NO: 1442636 - DNA, 15 bp, Homo sapiens
tggaaccgcgatagg

SEQ ID NO: 1442637 - DNA, 15 bp, Homo sapiens
ggaaccgcgataggg

SEQ ID NO: 1442638 - DNA, 15 bp, Homo sapiens
gaaccgcgataggga

SEQ ID NO: 1442639 - DNA, 15 bp, Homo sapiens
aaccgcgatagggat

SEQ ID NO: 1442640 - DNA, 15 bp, Homo sapiens
accgcgatagggatc

SEQ ID NO: 1442641 - DNA, 15 bp, Homo sapiens
ccgcgatagggatct

SEQ ID NO: 1442642 - DNA, 15 bp, Homo sapiens
cgcgatagggatctg

SEQ ID NO: 1442643 - DNA, 15 bp, Homo sapiens
gcgatagggatctgt

SEQ ID NO: 1442644 - DNA, 15 bp, Homo sapiens
cgatagggatctgtc

SEQ ID NO: 1442645 - DNA, 15 bp, Homo sapiens
gatagggatctgtca

SEQ ID NO: 1442646 - DNA, 15 bp, Homo sapiens
atagggatctgtcag

SEQ ID NO: 1442647 - DNA, 15 bp, Homo sapiens
tagggatctgtcagg

SEQ ID NO: 1442648 - DNA, 15 bp, Homo sapiens
agggatctgtcaggg

SEQ ID NO: 1442649 - DNA, 15 bp, Homo sapiens
gggatctgtcagggc

SEQ ID NO: 1442650 - DNA, 15 bp, Homo sapiens
ggatctgtcagggcc

SEQ ID NO: 1442651 - DNA, 15 bp, Homo sapiens
gatctgtcagggccc

SEQ ID NO: 1442652 - DNA, 15 bp, Homo sapiens
atctgtcagggcccg

SEQ ID NO: 1442653 - DNA, 15 bp, Homo sapiens
tctgtcagggcccgc

SEQ ID NO: 1442654 - DNA, 15 bp, Homo sapiens
ctgtcagggcccgcg

SEQ ID NO: 1442655 - DNA, 15 bp, Homo sapiens
tgtcagggcccgcgg

SEQ ID NO: 1442656 - DNA, 15 bp, Homo sapiens
gtcagggcccgcggc

SEQ ID NO: 1442657 - DNA, 15 bp, Homo sapiens
tcagggcccgcggcc

SEQ ID NO: 1442658 - DNA, 15 bp, Homo sapiens
cagggcccgcggccg

SEQ ID NO: 1442659 - DNA, 15 bp, Homo sapiens
agggcccgcggccgg

SEQ ID NO: 1442660 - DNA, 15 bp, Homo sapiens
gggcccgcggccggg

SEQ ID NO: 1442661 - DNA, 15 bp, Homo sapiens
ggcccgcggccgggt

SEQ ID NO: 1442662 - DNA, 15 bp, Homo sapiens
gcccgcggccgggtc

SEQ ID NO: 1442663 - DNA, 15 bp, Homo sapiens
cccgcggccgggtcc

SEQ ID NO: 1442664 - DNA, 15 bp, Homo sapiens
ccgcggccgggtcca

SEQ ID NO: 1442665 - DNA, 15 bp, Homo sapiens
cgcggccgggtccag

SEQ ID NO: 1442666 - DNA, 15 bp, Homo sapiens
gcggccgggtccagc

SEQ ID NO: 1442667 - DNA, 15 bp, Homo sapiens
cggccgggtccagct

SEQ ID NO: 1442668 - DNA, 15 bp, Homo sapiens
ggccgggtccagctt

SEQ ID NO: 1442669 - DNA, 15 bp, Homo sapiens
gccgggtccagcttg

SEQ ID NO: 1442670 - DNA, 15 bp, Homo sapiens
ccgggtccagcttgg

SEQ ID NO: 1442671 - DNA, 15 bp, Homo sapiens
cgggtccagcttggt

SEQ ID NO: 1442672 - DNA, 15 bp, Homo sapiens
gggtccagcttggtg

SEQ ID NO: 1442673 - DNA, 15 bp, Homo sapiens
ggtccagcttggtgg

SEQ ID NO: 1442674 - DNA, 15 bp, Homo sapiens
gtccagcttggtggt

SEQ ID NO: 1442675 - DNA, 15 bp, Homo sapiens
tccagcttggtggtt

SEQ ID NO: 1442676 - DNA, 15 bp, Homo sapiens
ccagcttggtggttg

SEQ ID NO: 1442677 - DNA, 15 bp, Homo sapiens
cagcttggtggttgc

SEQ ID NO: 1442678 - DNA, 15 bp, Homo sapiens
agcttggtggttgcg

SEQ ID NO: 1442679 - DNA, 15 bp, Homo sapiens
gcttggtggttgcgg

SEQ ID NO: 1442680 - DNA, 15 bp, Homo sapiens
cttggtggttgcggt

SEQ ID NO: 1442681 - DNA, 15 bp, Homo sapiens
ttggtggttgcggta

SEQ ID NO: 1442682 - DNA, 15 bp, Homo sapiens
tggtggttgcggtag

SEQ ID NO: 1442683 - DNA, 15 bp, Homo sapiens
ggtggttgcggtagt

SEQ ID NO: 1442684 - DNA, 15 bp, Homo sapiens
gtggttgcggtagtg

SEQ ID NO: 1442685 - DNA, 15 bp, Homo sapiens
tggttgcggtagtga

SEQ ID NO: 1442686 - DNA, 15 bp, Homo sapiens
ggttgcggtagtgag

SEQ ID NO: 1442687 - DNA, 15 bp, Homo sapiens
gttgcggtagtgaga

SEQ ID NO: 1442688 - DNA, 15 bp, Homo sapiens
ttgcggtagtgagag

SEQ ID NO: 1442689 - DNA, 15 bp, Homo sapiens
tgcggtagtgagagg

SEQ ID NO: 1442690 - DNA, 15 bp, Homo sapiens
gcggtagtgagaggc

SEQ ID NO: 1442691 - DNA, 15 bp, Homo sapiens
cggtagtgagaggcc

SEQ ID NO: 1442692 - DNA, 15 bp, Homo sapiens
ggtagtgagaggcct

SEQ ID NO: 1442693 - DNA, 15 bp, Homo sapiens
gtagtgagaggcctc

SEQ ID NO: 1442694 - DNA, 15 bp, Homo sapiens
tagtgagaggcctcc

SEQ ID NO: 1442695 - DNA, 15 bp, Homo sapiens
agtgagaggcctccg

SEQ ID NO: 1442696 - DNA, 15 bp, Homo sapiens
gtgagaggcctccgc

SEQ ID NO: 1442697 - DNA, 15 bp, Homo sapiens
tgagaggcctccgct

SEQ ID NO: 1442698 - DNA, 15 bp, Homo sapiens
gagaggcctccgctg

SEQ ID NO: 1442699 - DNA, 15 bp, Homo sapiens
agaggcctccgctgg

SEQ ID NO: 1442700 - DNA, 15 bp, Homo sapiens
gaggcctccgctggt

SEQ ID NO: 1442701 - DNA, 15 bp, Homo sapiens
aggcctccgctggtt

SEQ ID NO: 1442702 - DNA, 15 bp, Homo sapiens
ggcctccgctggttg

SEQ ID NO: 1442703 - DNA, 15 bp, Homo sapiens
gcctccgctggttgc

SEQ ID NO: 1442704 - DNA, 15 bp, Homo sapiens
cctccgctggttgcc

SEQ ID NO: 1442705 - DNA, 15 bp, Homo sapiens
ctccgctggttgcca

SEQ ID NO: 1442706 - DNA, 15 bp, Homo sapiens
tccgctggttgccag

SEQ ID NO: 1442707 - DNA, 15 bp, Homo sapiens
ccgctggttgccagg

SEQ ID NO: 1442708 - DNA, 15 bp, Homo sapiens
cgctggttgccaggc

SEQ ID NO: 1442709 - DNA, 15 bp, Homo sapiens
gctggttgccaggct

SEQ ID NO: 1442710 - DNA, 15 bp, Homo sapiens
ctggttgccaggctt

SEQ ID NO: 1442711 - DNA, 15 bp, Homo sapiens
tggttgccaggcttg

SEQ ID NO: 1442712 - DNA, 15 bp, Homo sapiens
ggttgccaggcttgg

SEQ ID NO: 1442713 - DNA, 15 bp, Homo sapiens
gttgccaggcttggt

SEQ ID NO: 1442714 - DNA, 15 bp, Homo sapiens
ttgccaggcttggtc

SEQ ID NO: 1442715 - DNA, 15 bp, Homo sapiens
tgccaggcttggtct

SEQ ID NO: 1442716 - DNA, 15 bp, Homo sapiens
gccaggcttggtcta

SEQ ID NO: 1442717 - DNA, 15 bp, Homo sapiens
ccaggcttggtctag

SEQ ID NO: 1442718 - DNA, 15 bp, Homo sapiens
caggcttggtctagg

SEQ ID NO: 1442719 - DNA, 15 bp, Homo sapiens
aggcttggtctaggt

SEQ ID NO: 1442720 - DNA, 15 bp, Homo sapiens
ggcttggtctaggtg

SEQ ID NO: 1442721 - DNA, 15 bp, Homo sapiens
gcttggtctaggtgg

SEQ ID NO: 1442722 - DNA, 15 bp, Homo sapiens
cttggtctaggtggg

SEQ ID NO: 1442723 - DNA, 15 bp, Homo sapiens
ttggtctaggtgggt

SEQ ID NO: 1442724 - DNA, 15 bp, Homo sapiens
tggtctaggtgggtg

SEQ ID NO: 1442725 - DNA, 15 bp, Homo sapiens
ggtctaggtgggtgg

SEQ ID NO: 1442726 - DNA, 15 bp, Homo sapiens
gtctaggtgggtgga

SEQ ID NO: 1442727 - DNA, 15 bp, Homo sapiens
tctaggtgggtggat

SEQ ID NO: 1442728 - DNA, 15 bp, Homo sapiens
taggtgggtggatcc

SEQ ID NO: 1442729 - DNA, 15 bp, Homo sapiens
aggtgggtggatcct

SEQ ID NO: 1442730 - DNA, 15 bp, Homo sapiens
ggtgggtggatcctt

SEQ ID NO: 1442731 - DNA, 15 bp, Homo sapiens
gtgggtggatccttg

SEQ ID NO: 1442732 - DNA, 15 bp, Homo sapiens
tgggtggatccttgt

SEQ ID NO: 1442733 - DNA, 15 bp, Homo sapiens
gggtggatccttgta

SEQ ID NO: 1442734 - DNA, 15 bp, Homo sapiens
ggtggatccttgtaa

SEQ ID NO: 1442735 - DNA, 15 bp, Homo sapiens
gtggatccttgtaag

SEQ ID NO: 1442736 - DNA, 15 bp, Homo sapiens
tggatccttgtaagc

SEQ ID NO: 1442737 - DNA, 15 bp, Homo sapiens
ggatccttgtaagca

SEQ ID NO: 1442738 - DNA, 15 bp, Homo sapiens
gatccttgtaagcag

SEQ ID NO: 1442739 - DNA, 15 bp, Homo sapiens
atccttgtaagcagg

SEQ ID NO: 1442740 - DNA, 15 bp, Homo sapiens
tccttgtaagcagga

SEQ ID NO: 1442741 - DNA, 15 bp, Homo sapiens
ccttgtaagcaggat

SEQ ID NO: 1442742 - DNA, 15 bp, Homo sapiens
cttgtaagcaggatt

SEQ ID NO: 1442743 - DNA, 15 bp, Homo sapiens
ttgtaagcaggatta

SEQ ID NO: 1442744 - DNA, 15 bp, Homo sapiens
tgtaagcaggattag

SEQ ID NO: 1442745 - DNA, 15 bp, Homo sapiens
gtaagcaggattagc

SEQ ID NO: 1442746 - DNA, 15 bp, Homo sapiens
taagcaggattagcg

SEQ ID NO: 1442747 - DNA, 15 bp, Homo sapiens
aagcaggattagcga

SEQ ID NO: 1442748 - DNA, 15 bp, Homo sapiens
agcaggattagcgag

SEQ ID NO: 1442749 - DNA, 15 bp, Homo sapiens
gcaggattagcgagt

SEQ ID NO: 1442750 - DNA, 15 bp, Homo sapiens
caggattagcgagtc

SEQ ID NO: 1442751 - DNA, 15 bp, Homo sapiens
aggattagcgagtca

SEQ ID NO: 1442752 - DNA, 15 bp, Homo sapiens
ggattagcgagtcac

SEQ ID NO: 1442753 - DNA, 15 bp, Homo sapiens
gattagcgagtcact

SEQ ID NO: 1442754 - DNA, 15 bp, Homo sapiens
attagcgagtcactc

SEQ ID NO: 1442755 - DNA, 15 bp, Homo sapiens
ttagcgagtcactcc

SEQ ID NO: 1442756 - DNA, 15 bp, Homo sapiens
tagcgagtcactcca

SEQ ID NO: 1442757 - DNA, 15 bp, Homo sapiens
agcgagtcactccac

SEQ ID NO: 1442758 - DNA, 15 bp, Homo sapiens
gcgagtcactccacg

SEQ ID NO: 1442759 - DNA, 15 bp, Homo sapiens
cgagtcactccacgc

SEQ ID NO: 1442760 - DNA, 15 bp, Homo sapiens
gagtcactccacgct

SEQ ID NO: 1442761 - DNA, 15 bp, Homo sapiens
agtcactccacgctc

SEQ ID NO: 1442762 - DNA, 15 bp, Homo sapiens
gtcactccacgctca

SEQ ID NO: 1442763 - DNA, 15 bp, Homo sapiens
tcactccacgctcag

SEQ ID NO: 1442764 - DNA, 15 bp, Homo sapiens
cactccacgctcagg

SEQ ID NO: 1442765 - DNA, 15 bp, Homo sapiens
actccacgctcaggt

SEQ ID NO: 1442766 - DNA, 15 bp, Homo sapiens
ctccacgctcaggtt

SEQ ID NO: 1442767 - DNA, 15 bp, Homo sapiens
tccacgctcaggttc

SEQ ID NO: 1442768 - DNA, 15 bp, Homo sapiens
ccacgctcaggttct

SEQ ID NO: 1442769 - DNA, 15 bp, Homo sapiens
cacgctcaggttctt

SEQ ID NO: 1442770 - DNA, 15 bp, Homo sapiens
acgctcaggttcttt

SEQ ID NO: 1442771 - DNA, 15 bp, Homo sapiens
cgctcaggttcttta

SEQ ID NO: 1442772 - DNA, 15 bp, Homo sapiens
gctcaggttctttag

SEQ ID NO: 1442773 - DNA, 15 bp, Homo sapiens
ctcaggttctttagc

SEQ ID NO: 1442774 - DNA, 15 bp, Homo sapiens
tcaggttctttagcc

SEQ ID NO: 1442775 - DNA, 15 bp, Homo sapiens
caggttctttagcct

SEQ ID NO: 1442776 - DNA, 15 bp, Homo sapiens
aggttctttagcctg

SEQ ID NO: 1442777 - DNA, 15 bp, Homo sapiens
ggttctttagcctga

SEQ ID NO: 1442778 - DNA, 15 bp, Homo sapiens
gttctttagcctgag

SEQ ID NO: 1442779 - DNA, 15 bp, Homo sapiens
ttctttagcctgagg

SEQ ID NO: 1442780 - DNA, 15 bp, Homo sapiens
tctttagcctgaggg

SEQ ID NO: 1442781 - DNA, 15 bp, Homo sapiens
ctttagcctgagggc

SEQ ID NO: 1442782 - DNA, 15 bp, Homo sapiens
tttagcctgagggcc

SEQ ID NO: 1442783 - DNA, 15 bp, Homo sapiens
ttagcctgagggccc

SEQ ID NO: 1442784 - DNA, 15 bp, Homo sapiens
tagcctgagggcccg

SEQ ID NO: 1442785 - DNA, 15 bp, Homo sapiens
agcctgagggcccgt

SEQ ID NO: 1442786 - DNA, 15 bp, Homo sapiens
gcctgagggcccgtg

SEQ ID NO: 1442787 - DNA, 15 bp, Homo sapiens
cctgagggcccgtgt

SEQ ID NO: 1442788 - DNA, 15 bp, Homo sapiens
ctgagggcccgtgtg

SEQ ID NO: 1442789 - DNA, 15 bp, Homo sapiens
tgagggcccgtgtgc

SEQ ID NO: 1442790 - DNA, 15 bp, Homo sapiens
gagggcccgtgtgcc

SEQ ID NO: 1442791 - DNA, 15 bp, Homo sapiens
agggcccgtgtgcca

SEQ ID NO: 1442792 - DNA, 15 bp, Homo sapiens
gggcccgtgtgccac

SEQ ID NO: 1442793 - DNA, 15 bp, Homo sapiens
ggcccgtgtgccaca

SEQ ID NO: 1442794 - DNA, 15 bp, Homo sapiens
gcccgtgtgccacag

SEQ ID NO: 1442795 - DNA, 15 bp, Homo sapiens
cccgtgtgccacagc

SEQ ID NO: 1442796 - DNA, 15 bp, Homo sapiens
ccgtgtgccacagca

SEQ ID NO: 1442797 - DNA, 15 bp, Homo sapiens
cgtgtgccacagcat

SEQ ID NO: 1442798 - DNA, 15 bp, Homo sapiens
gtgtgccacagcata

SEQ ID NO: 1442799 - DNA, 15 bp, Homo sapiens
tgtgccacagcatag

SEQ ID NO: 1442800 - DNA, 15 bp, Homo sapiens
gtgccacagcatagc

SEQ ID NO: 1442801 - DNA, 15 bp, Homo sapiens
tgccacagcatagct

SEQ ID NO: 1442802 - DNA, 15 bp, Homo sapiens
gccacagcatagcta

SEQ ID NO: 1442803 - DNA, 15 bp, Homo sapiens
ccacagcatagctac

SEQ ID NO: 1442804 - DNA, 15 bp, Homo sapiens
cacagcatagctacc

SEQ ID NO: 1442805 - DNA, 15 bp, Homo sapiens
acagcatagctaccc

SEQ ID NO: 1442806 - DNA, 15 bp, Homo sapiens
cagcatagctacccc

SEQ ID NO: 1442807 - DNA, 15 bp, Homo sapiens
agcatagctaccccg

SEQ ID NO: 1442808 - DNA, 15 bp, Homo sapiens
gcatagctaccccgc

SEQ ID NO: 1442809 - DNA, 15 bp, Homo sapiens
catagctaccccgcc

SEQ ID NO: 1442810 - DNA, 15 bp, Homo sapiens
atagctaccccgccc

SEQ ID NO: 1442811 - DNA, 15 bp, Homo sapiens
tagctaccccgccct

SEQ ID NO: 1442812 - DNA, 15 bp, Homo sapiens
agctaccccgccctt

SEQ ID NO: 1442813 - DNA, 15 bp, Homo sapiens
gctaccccgcccttc

SEQ ID NO: 1442814 - DNA, 15 bp, Homo sapiens
ctaccccgcccttcc

SEQ ID NO: 1442815 - DNA, 15 bp, Homo sapiens
taccccgcccttcca

SEQ ID NO: 1442816 - DNA, 15 bp, Homo sapiens
accccgcccttccag

SEQ ID NO: 1442817 - DNA, 15 bp, Homo sapiens
ccccgcccttccagc

SEQ ID NO: 1442818 - DNA, 15 bp, Homo sapiens
cccgcccttccagcc

SEQ ID NO: 1442819 - DNA, 15 bp, Homo sapiens
ccgcccttccagcct

SEQ ID NO: 1442820 - DNA, 15 bp, Homo sapiens
cgcccttccagcctc

SEQ ID NO: 1442821 - DNA, 15 bp, Homo sapiens
gcccttccagcctcg

SEQ ID NO: 1442822 - DNA, 15 bp, Homo sapiens
cccttccagcctcgg

SEQ ID NO: 1442823 - DNA, 15 bp, Homo sapiens
ccttccagcctcggg

SEQ ID NO: 1442824 - DNA, 15 bp, Homo sapiens
cttccagcctcgggt

SEQ ID NO: 1442825 - DNA, 15 bp, Homo sapiens
ttccagcctcgggtc

SEQ ID NO: 1442826 - DNA, 15 bp, Homo sapiens
tccagcctcgggtcc

SEQ ID NO: 1442827 - DNA, 15 bp, Homo sapiens
ccagcctcgggtccc

SEQ ID NO: 1442828 - DNA, 15 bp, Homo sapiens
cagcctcgggtccct

SEQ ID NO: 1442829 - DNA, 15 bp, Homo sapiens
agcctcgggtcccta

SEQ ID NO: 1442830 - DNA, 15 bp, Homo sapiens
gcctcgggtccctaa

SEQ ID NO: 1442831 - DNA, 15 bp, Homo sapiens
cctcgggtccctaat

SEQ ID NO: 1442832 - DNA, 15 bp, Homo sapiens
ctcgggtccctaata

SEQ ID NO: 1442833 - DNA, 15 bp, Homo sapiens
tcgggtccctaatac

SEQ ID NO: 1442834 - DNA, 15 bp, Homo sapiens
cgggtccctaatact

SEQ ID NO: 1442835 - DNA, 15 bp, Homo sapiens
gggtccctaatactg

SEQ ID NO: 1442836 - DNA, 15 bp, Homo sapiens
ggtccctaatactgc

SEQ ID NO: 1442837 - DNA, 15 bp, Homo sapiens
gtccctaatactgcc

SEQ ID NO: 1442838 - DNA, 15 bp, Homo sapiens
tccctaatactgcct

SEQ ID NO: 1442839 - DNA, 15 bp, Homo sapiens
ccctaatactgcctt

SEQ ID NO: 1442840 - DNA, 15 bp, Homo sapiens
cctaatactgccttg

SEQ ID NO: 1442841 - DNA, 15 bp, Homo sapiens
ctaatactgccttgc

SEQ ID NO: 1442842 - DNA, 15 bp, Homo sapiens
taatactgccttgct

SEQ ID NO: 1442843 - DNA, 15 bp, Homo sapiens
aatactgccttgctt

SEQ ID NO: 1442844 - DNA, 15 bp, Homo sapiens
atactgccttgcttc

SEQ ID NO: 1442845 - DNA, 15 bp, Homo sapiens
tactgccttgcttcg

SEQ ID NO: 1442846 - DNA, 15 bp, Homo sapiens
actgccttgcttcgg

SEQ ID NO: 1442847 - DNA, 15 bp, Homo sapiens
ctgccttgcttcggt

SEQ ID NO: 1442848 - DNA, 15 bp, Homo sapiens
tgccttgcttcggtt

SEQ ID NO: 1442849 - DNA, 15 bp, Homo sapiens
gccttgcttcggttc

SEQ ID NO: 1442850 - DNA, 15 bp, Homo sapiens
ccttgcttcggttcc

SEQ ID NO: 1442851 - DNA, 15 bp, Homo sapiens
cttgcttcggttcca

SEQ ID NO: 1442852 - DNA, 15 bp, Homo sapiens
ttgcttcggttccag

SEQ ID NO: 1442853 - DNA, 15 bp, Homo sapiens
tgcttcggttccagt

SEQ ID NO: 1442854 - DNA, 15 bp, Homo sapiens
gcttcggttccagtt

SEQ ID NO: 1442855 - DNA, 15 bp, Homo sapiens
cttcggttccagttt

SEQ ID NO: 1442856 - DNA, 15 bp, Homo sapiens
ttcggttccagtttc

SEQ ID NO: 1442857 - DNA, 15 bp, Homo sapiens
tcggttccagtttcc

SEQ ID NO: 1442858 - DNA, 15 bp, Homo sapiens
cggttccagtttccg

SEQ ID NO: 1442859 - DNA, 15 bp, Homo sapiens
ggttccagtttccgc

SEQ ID NO: 1442860 - DNA, 15 bp, Homo sapiens
gttccagtttccgcc

SEQ ID NO: 1442861 - DNA, 15 bp, Homo sapiens
ttccagtttccgccg

SEQ ID NO: 1442862 - DNA, 15 bp, Homo sapiens
tccagtttccgccgc

SEQ ID NO: 1442863 - DNA, 15 bp, Homo sapiens
ccagtttccgccgca

SEQ ID NO: 1442864 - DNA, 15 bp, Homo sapiens
cagtttccgccgcac

SEQ ID NO: 1442865 - DNA, 15 bp, Homo sapiens
agtttccgccgcaca

SEQ ID NO: 1442866 - DNA, 15 bp, Homo sapiens
gtttccgccgcacaa

SEQ ID NO: 1442867 - DNA, 15 bp, Homo sapiens
tttccgccgcacaac

SEQ ID NO: 1442868 - DNA, 15 bp, Homo sapiens
ttccgccgcacaact

SEQ ID NO: 1442869 - DNA, 15 bp, Homo sapiens
tccgccgcacaactt

SEQ ID NO: 1442870 - DNA, 15 bp, Homo sapiens
ccgccgcacaacttc

SEQ ID NO: 1442871 - DNA, 15 bp, Homo sapiens
cgccgcacaacttca

SEQ ID NO: 1442872 - DNA, 15 bp, Homo sapiens
gccgcacaacttcac

SEQ ID NO: 1442873 - DNA, 15 bp, Homo sapiens
ccgcacaacttcact

SEQ ID NO: 1442874 - DNA, 15 bp, Homo sapiens
cgcacaacttcactc

SEQ ID NO: 1442875 - DNA, 15 bp, Homo sapiens
gcacaacttcactca

SEQ ID NO: 1442876 - DNA, 15 bp, Homo sapiens
cacaacttcactcat

SEQ ID NO: 1442877 - DNA, 15 bp, Homo sapiens
acaacttcactcatt

SEQ ID NO: 1442878 - DNA, 15 bp, Homo sapiens
caacttcactcattc

SEQ ID NO: 1442879 - DNA, 15 bp, Homo sapiens
aacttcactcattcc

SEQ ID NO: 1442880 - DNA, 15 bp, Homo sapiens
acttcactcattcca

SEQ ID NO: 1442881 - DNA, 15 bp, Homo sapiens
cttcactcattccaa

SEQ ID NO: 1442882 - DNA, 15 bp, Homo sapiens
ttcactcattccaaa

SEQ ID NO: 1442883 - DNA, 15 bp, Homo sapiens
tcactcattccaaat

SEQ ID NO: 1442884 - DNA, 15 bp, Homo sapiens
cactcattccaaatg

SEQ ID NO: 1442885 - DNA, 15 bp, Homo sapiens
actcattccaaatgt

SEQ ID NO: 1442886 - DNA, 15 bp, Homo sapiens
ctcattccaaatgtt

SEQ ID NO: 1442887 - DNA, 15 bp, Homo sapiens
tcattccaaatgtta

SEQ ID NO: 1442888 - DNA, 15 bp, Homo sapiens
cattccaaatgttaa

SEQ ID NO: 1442889 - DNA, 15 bp, Homo sapiens
attccaaatgttaat

SEQ ID NO: 1442890 - DNA, 15 bp, Homo sapiens
ttccaaatgttaatt

SEQ ID NO: 1442891 - DNA, 15 bp, Homo sapiens
tccaaatgttaattt

SEQ ID NO: 1442892 - DNA, 15 bp, Homo sapiens
ccaaatgttaatttc

SEQ ID NO: 1442893 - DNA, 15 bp, Homo sapiens
caaatgttaatttct

SEQ ID NO: 1442894 - DNA, 15 bp, Homo sapiens
aaatgttaatttctg

SEQ ID NO: 1442895 - DNA, 15 bp, Homo sapiens
aatgttaatttctgc

SEQ ID NO: 1442896 - DNA, 15 bp, Homo sapiens
atgttaatttctgcg

SEQ ID NO: 1442897 - DNA, 15 bp, Homo sapiens
tgttaatttctgcgt

SEQ ID NO: 1442898 - DNA, 15 bp, Homo sapiens
gttaatttctgcgtt

SEQ ID NO: 1442899 - DNA, 15 bp, Homo sapiens
ttaatttctgcgttt

SEQ ID NO: 1442900 - DNA, 15 bp, Homo sapiens
taatttctgcgtttt

SEQ ID NO: 1442901 - DNA, 15 bp, Homo sapiens
aatttctgcgttttt

SEQ ID NO: 1442902 - DNA, 15 bp, Homo sapiens
atttctgcgtttttt

SEQ ID NO: 1442903 - DNA, 15 bp, Homo sapiens
tttctgcgttttttt

SEQ ID NO: 1442904 - DNA, 15 bp, Homo sapiens
ttctgcgtttttttt

SEQ ID NO: 1442905 - DNA, 15 bp, Homo sapiens
tctgcgttttttttc

SEQ ID NO: 1442906 - DNA, 15 bp, Homo sapiens
ctgcgttttttttca

SEQ ID NO: 1442907 - DNA, 15 bp, Homo sapiens
tgcgttttttttcag

SEQ ID NO: 1442908 - DNA, 15 bp, Homo sapiens
gcgttttttttcagc

SEQ ID NO: 1442909 - DNA, 15 bp, Homo sapiens
cgttttttttcagcc

SEQ ID NO: 1442910 - DNA, 15 bp, Homo sapiens
gttttttttcagccc

SEQ ID NO: 1442911 - DNA, 15 bp, Homo sapiens
ttttttttcagcccc

SEQ ID NO: 1442912 - DNA, 15 bp, Homo sapiens
tttttttcagcccca

SEQ ID NO: 1442913 - DNA, 15 bp, Homo sapiens
ttttttcagccccaa

SEQ ID NO: 1442914 - DNA, 15 bp, Homo sapiens
tttttcagccccaat

SEQ ID NO: 1442915 - DNA, 15 bp, Homo sapiens
ttttcagccccaatt

SEQ ID NO: 1442916 - DNA, 15 bp, Homo sapiens
tttcagccccaattc

SEQ ID NO: 1442917 - DNA, 15 bp, Homo sapiens
ttcagccccaattct

SEQ ID NO: 1442918 - DNA, 15 bp, Homo sapiens
tcagccccaattctg

SEQ ID NO: 1442919 - DNA, 15 bp, Homo sapiens
cagccccaattctgt

SEQ ID NO: 1442920 - DNA, 15 bp, Homo sapiens
agccccaattctgtt

SEQ ID NO: 1442921 - DNA, 15 bp, Homo sapiens
gccccaattctgttt

SEQ ID NO: 1442922 - DNA, 15 bp, Homo sapiens
ccccaattctgtttc

SEQ ID NO: 1442923 - DNA, 15 bp, Homo sapiens
cccaattctgtttct

SEQ ID NO: 1442924 - DNA, 15 bp, Homo sapiens
ccaattctgtttctc

SEQ ID NO: 1442925 - DNA, 15 bp, Homo sapiens
caattctgtttctcc

SEQ ID NO: 1442926 - DNA, 15 bp, Homo sapiens
aattctgtttctcca

SEQ ID NO: 1442927 - DNA, 15 bp, Homo sapiens
attctgtttctccaa

SEQ ID NO: 1442928 - DNA, 15 bp, Homo sapiens
tctgtttctccaaat

SEQ ID NO: 1442929 - DNA, 15 bp, Homo sapiens
ctgtttctccaaatc

SEQ ID NO: 1442930 - DNA, 15 bp, Homo sapiens
tgtttctccaaatca

SEQ ID NO: 1442931 - DNA, 15 bp, Homo sapiens
gtttctccaaatcag

SEQ ID NO: 1442932 - DNA, 15 bp, Homo sapiens
tttctccaaatcagg

SEQ ID NO: 1442933 - DNA, 15 bp, Homo sapiens
ttctccaaatcaggg

SEQ ID NO: 1442934 - DNA, 15 bp, Homo sapiens
tctccaaatcaggga

SEQ ID NO: 1442935 - DNA, 15 bp, Homo sapiens
ctccaaatcagggat

SEQ ID NO: 1442936 - DNA, 15 bp, Homo sapiens
tccaaatcagggatg

SEQ ID NO: 1442937 - DNA, 15 bp, Homo sapiens
ccaaatcagggatga

SEQ ID NO: 1442938 - DNA, 15 bp, Homo sapiens
caaatcagggatgat

SEQ ID NO: 1442939 - DNA, 15 bp, Homo sapiens
aaatcagggatgatt

SEQ ID NO: 1442940 - DNA, 15 bp, Homo sapiens
aatcagggatgattg

SEQ ID NO: 1442941 - DNA, 15 bp, Homo sapiens
atcagggatgattgt

SEQ ID NO: 1442942 - DNA, 15 bp, Homo sapiens
tcagggatgattgtc

SEQ ID NO: 1442943 - DNA, 15 bp, Homo sapiens
cagggatgattgtcg

SEQ ID NO: 1442944 - DNA, 15 bp, Homo sapiens
agggatgattgtcgg

SEQ ID NO: 1442945 - DNA, 15 bp, Homo sapiens
gggatgattgtcggc

SEQ ID NO: 1442946 - DNA, 15 bp, Homo sapiens
ggatgattgtcggcc

SEQ ID NO: 1442947 - DNA, 15 bp, Homo sapiens
gatgattgtcggcct

SEQ ID NO: 1442948 - DNA, 15 bp, Homo sapiens
atgattgtcggcctt

SEQ ID NO: 1442949 - DNA, 15 bp, Homo sapiens
tgattgtcggccttc

SEQ ID NO: 1442950 - DNA, 15 bp, Homo sapiens
gattgtcggccttcc

SEQ ID NO: 1442951 - DNA, 15 bp, Homo sapiens
attgtcggccttcca

SEQ ID NO: 1442952 - DNA, 15 bp, Homo sapiens
ttgtcggccttccac

SEQ ID NO: 1442953 - DNA, 15 bp, Homo sapiens
tgtcggccttccaca

SEQ ID NO: 1442954 - DNA, 15 bp, Homo sapiens
gtcggccttccacag

SEQ ID NO: 1442955 - DNA, 15 bp, Homo sapiens
tcggccttccacaga

SEQ ID NO: 1442956 - DNA, 15 bp, Homo sapiens
cggccttccacagac

SEQ ID NO: 1442957 - DNA, 15 bp, Homo sapiens
ggccttccacagacc

SEQ ID NO: 1442958 - DNA, 15 bp, Homo sapiens
gccttccacagaccc

SEQ ID NO: 1442959 - DNA, 15 bp, Homo sapiens
ccttccacagaccct

SEQ ID NO: 1442960 - DNA, 15 bp, Homo sapiens
cttccacagaccctc

SEQ ID NO: 1442961 - DNA, 15 bp, Homo sapiens
ttccacagaccctcg

SEQ ID NO: 1442962 - DNA, 15 bp, Homo sapiens
tccacagaccctcgc

SEQ ID NO: 1442963 - DNA, 15 bp, Homo sapiens
ccacagaccctcgcg

SEQ ID NO: 1442964 - DNA, 15 bp, Homo sapiens
cacagaccctcgcgc

SEQ ID NO: 1442965 - DNA, 15 bp, Homo sapiens
acagaccctcgcgct

SEQ ID NO: 1442966 - DNA, 15 bp, Homo sapiens
cagaccctcgcgctt

SEQ ID NO: 1442967 - DNA, 15 bp, Homo sapiens
agaccctcgcgcttg

SEQ ID NO: 1442968 - DNA, 15 bp, Homo sapiens
gaccctcgcgcttgc

SEQ ID NO: 1442969 - DNA, 15 bp, Homo sapiens
accctcgcgcttgcc

SEQ ID NO: 1442970 - DNA, 15 bp, Homo sapiens
ccctcgcgcttgcca

SEQ ID NO: 1442971 - DNA, 15 bp, Homo sapiens
cctcgcgcttgccag

SEQ ID NO: 1442972 - DNA, 15 bp, Homo sapiens
ctcgcgcttgccagg

SEQ ID NO: 1442973 - DNA, 15 bp, Homo sapiens
tcgcgcttgccagga

SEQ ID NO: 1442974 - DNA, 15 bp, Homo sapiens
cgcgcttgccaggat

SEQ ID NO: 1442975 - DNA, 15 bp, Homo sapiens
gcgcttgccaggatt

SEQ ID NO: 1442976 - DNA, 15 bp, Homo sapiens
cgcttgccaggatta

SEQ ID NO: 1442977 - DNA, 15 bp, Homo sapiens
ctaatataaactgga

SEQ ID NO: 1442978 - DNA, 15 bp, Homo sapiens
taatataaactggaa

SEQ ID NO: 1442979 - DNA, 15 bp, Homo sapiens
aatataaactggaaa

SEQ ID NO: 1442980 - DNA, 15 bp, Homo sapiens
atataaactggaaag

SEQ ID NO: 1442981 - DNA, 15 bp, Homo sapiens
tataaactggaaaga

SEQ ID NO: 1442982 - DNA, 15 bp, Homo sapiens
ataaactggaaagaa

SEQ ID NO: 1442983 - DNA, 15 bp, Homo sapiens
taaactggaaagaaa

SEQ ID NO: 1442984 - DNA, 15 bp, Homo sapiens
aaactggaaagaaat

SEQ ID NO: 1442985 - DNA, 15 bp, Homo sapiens
aactggaaagaaata

SEQ ID NO: 1442986 - DNA, 15 bp, Homo sapiens
actggaaagaaataa

SEQ ID NO: 1442987 - DNA, 15 bp, Homo sapiens
ctggaaagaaataat

SEQ ID NO: 1442988 - DNA, 15 bp, Homo sapiens
tggaaagaaataatg

SEQ ID NO: 1442989 - DNA, 15 bp, Homo sapiens
ggaaagaaataatga

SEQ ID NO: 1442990 - DNA, 15 bp, Homo sapiens
gaaagaaataatgaa

SEQ ID NO: 1442991 - DNA, 15 bp, Homo sapiens
aaagaaataatgaaa

SEQ ID NO: 1442992 - DNA, 15 bp, Homo sapiens
aagaaataatgaaag

SEQ ID NO: 1442993 - DNA, 15 bp, Homo sapiens
agaaataatgaaagt

SEQ ID NO: 1442994 - DNA, 15 bp, Homo sapiens
gaaataatgaaagtt

SEQ ID NO: 1442995 - DNA, 15 bp, Homo sapiens
aaataatgaaagttg

SEQ ID NO: 1442996 - DNA, 15 bp, Homo sapiens
aataatgaaagttga

SEQ ID NO: 1442997 - DNA, 15 bp, Homo sapiens
ataatgaaagttgac

SEQ ID NO: 1442998 - DNA, 15 bp, Homo sapiens
taatgaaagttgacc

SEQ ID NO: 1442999 - DNA, 15 bp, Homo sapiens
aatgaaagttgaccc

SEQ ID NO: 1443000 - DNA, 15 bp, Homo sapiens
atgaaagttgaccca

SEQ ID NO: 1443001 - DNA, 15 bp, Homo sapiens
tgaaagttgacccag

SEQ ID NO: 1443002 - DNA, 15 bp, Homo sapiens
gaaagttgacccaga

SEQ ID NO: 1443003 - DNA, 15 bp, Homo sapiens
aaagttgacccagat

SEQ ID NO: 1443004 - DNA, 15 bp, Homo sapiens
aagttgacccagatg

SEQ ID NO: 1443005 - DNA, 15 bp, Homo sapiens
agttgacccagatga

SEQ ID NO: 1443006 - DNA, 15 bp, Homo sapiens
gttgacccagatgac

SEQ ID NO: 1443007 - DNA, 15 bp, Homo sapiens
ttgacccagatgacc

SEQ ID NO: 1443008 - DNA, 15 bp, Homo sapiens
tgacccagatgacct

SEQ ID NO: 1443009 - DNA, 15 bp, Homo sapiens
gacccagatgacctg

SEQ ID NO: 1443010 - DNA, 15 bp, Homo sapiens
acccagatgacctgc

SEQ ID NO: 1443011 - DNA, 15 bp, Homo sapiens
cccagatgacctgcc

SEQ ID NO: 1443012 - DNA, 15 bp, Homo sapiens
ccagatgacctgccc

SEQ ID NO: 1443013 - DNA, 15 bp, Homo sapiens
cagatgacctgcccc

SEQ ID NO: 1443014 - DNA, 15 bp, Homo sapiens
agatgacctgccccg

SEQ ID NO: 1443015 - DNA, 15 bp, Homo sapiens
gatgacctgccccgt

SEQ ID NO: 1443016 - DNA, 15 bp, Homo sapiens
atgacctgccccgtc

SEQ ID NO: 1443017 - DNA, 15 bp, Homo sapiens
tgacctgccccgtca

SEQ ID NO: 1443018 - DNA, 15 bp, Homo sapiens
gacctgccccgtcaa

SEQ ID NO: 1443019 - DNA, 15 bp, Homo sapiens
acctgccccgtcaag

SEQ ID NO: 1443020 - DNA, 15 bp, Homo sapiens
cctgccccgtcaaga

SEQ ID NO: 1443021 - DNA, 15 bp, Homo sapiens
ctgccccgtcaagaa

SEQ ID NO: 1443022 - DNA, 15 bp, Homo sapiens
tgccccgtcaagaag

SEQ ID NO: 1443023 - DNA, 15 bp, Homo sapiens
gccccgtcaagaaga

SEQ ID NO: 1443024 - DNA, 15 bp, Homo sapiens
ccccgtcaagaagaa

SEQ ID NO: 1443025 - DNA, 15 bp, Homo sapiens
cccgtcaagaagaac

SEQ ID NO: 1443026 - DNA, 15 bp, Homo sapiens
ccgtcaagaagaact

SEQ ID NO: 1443027 - DNA, 15 bp, Homo sapiens
cgtcaagaagaactg

SEQ ID NO: 1443028 - DNA, 15 bp, Homo sapiens
gtcaagaagaactgg

SEQ ID NO: 1443029 - DNA, 15 bp, Homo sapiens
tcaagaagaactggc

SEQ ID NO: 1443030 - DNA, 15 bp, Homo sapiens
caagaagaactggca

SEQ ID NO: 1443031 - DNA, 15 bp, Homo sapiens
aagaagaactggcag

SEQ ID NO: 1443032 - DNA, 15 bp, Homo sapiens
agaagaactggcaga

SEQ ID NO: 1443033 - DNA, 15 bp, Homo sapiens
gaagaactggcagat

SEQ ID NO: 1443034 - DNA, 15 bp, Homo sapiens
aagaactggcagata

SEQ ID NO: 1443035 - DNA, 15 bp, Homo sapiens
agaactggcagataa

SEQ ID NO: 1443036 - DNA, 15 bp, Homo sapiens
gaactggcagataat

SEQ ID NO: 1443037 - DNA, 15 bp, Homo sapiens
aactggcagataatt

SEQ ID NO: 1443038 - DNA, 15 bp, Homo sapiens
actggcagataattt

SEQ ID NO: 1443039 - DNA, 15 bp, Homo sapiens
ctggcagataattta

SEQ ID NO: 1443040 - DNA, 15 bp, Homo sapiens
tggcagataatttat

SEQ ID NO: 1443041 - DNA, 15 bp, Homo sapiens
ggcagataatttatt

SEQ ID NO: 1443042 - DNA, 15 bp, Homo sapiens
gcagataatttattg

SEQ ID NO: 1443043 - DNA, 15 bp, Homo sapiens
cagataatttattga

SEQ ID NO: 1443044 - DNA, 15 bp, Homo sapiens
agataatttattgat

SEQ ID NO: 1443045 - DNA, 15 bp, Homo sapiens
gataatttattgatt

SEQ ID NO: 1443046 - DNA, 15 bp, Homo sapiens
ataatttattgattt

SEQ ID NO: 1443047 - DNA, 15 bp, Homo sapiens
taatttattgatttc

SEQ ID NO: 1443048 - DNA, 15 bp, Homo sapiens
aatttattgatttcc

SEQ ID NO: 1443049 - DNA, 15 bp, Homo sapiens
atttattgatttcct

SEQ ID NO: 1443050 - DNA, 15 bp, Homo sapiens
ttattgatttcctta

SEQ ID NO: 1443051 - DNA, 15 bp, Homo sapiens
tattgatttccttat

SEQ ID NO: 1443052 - DNA, 15 bp, Homo sapiens
attgatttccttatc

SEQ ID NO: 1443053 - DNA, 15 bp, Homo sapiens
ttgatttccttatcc

SEQ ID NO: 1443054 - DNA, 15 bp, Homo sapiens
tgatttccttatcca

SEQ ID NO: 1443055 - DNA, 15 bp, Homo sapiens
gatttccttatccaa

SEQ ID NO: 1443056 - DNA, 15 bp, Homo sapiens
atttccttatccaag

SEQ ID NO: 1443057 - DNA, 15 bp, Homo sapiens
tttccttatccaagg

SEQ ID NO: 1443058 - DNA, 15 bp, Homo sapiens
ttccttatccaaggt

SEQ ID NO: 1443059 - DNA, 15 bp, Homo sapiens
tccttatccaaggtg

SEQ ID NO: 1443060 - DNA, 15 bp, Homo sapiens
ccttatccaaggtgc

SEQ ID NO: 1443061 - DNA, 15 bp, Homo sapiens
cttatccaaggtgct

SEQ ID NO: 1443062 - DNA, 15 bp, Homo sapiens
ttatccaaggtgctt

SEQ ID NO: 1443063 - DNA, 15 bp, Homo sapiens
tatccaaggtgctta

SEQ ID NO: 1443064 - DNA, 15 bp, Homo sapiens
atccaaggtgcttaa

SEQ ID NO: 1443065 - DNA, 15 bp, Homo sapiens
tccaaggtgcttaat

SEQ ID NO: 1443066 - DNA, 15 bp, Homo sapiens
ccaaggtgcttaatt

SEQ ID NO: 1443067 - DNA, 15 bp, Homo sapiens
caaggtgcttaattg

SEQ ID NO: 1443068 - DNA, 15 bp, Homo sapiens
aaggtgcttaattgg

SEQ ID NO: 1443069 - DNA, 15 bp, Homo sapiens
aggtgcttaattggt

SEQ ID NO: 1443070 - DNA, 15 bp, Homo sapiens
ggtgcttaattggtc

SEQ ID NO: 1443071 - DNA, 15 bp, Homo sapiens
gtgcttaattggtca

SEQ ID NO: 1443072 - DNA, 15 bp, Homo sapiens
tgcttaattggtcaa

SEQ ID NO: 1443073 - DNA, 15 bp, Homo sapiens
gcttaattggtcaat

SEQ ID NO: 1443074 - DNA, 15 bp, Homo sapiens
cttaattggtcaata

SEQ ID NO: 1443075 - DNA, 15 bp, Homo sapiens
ttaattggtcaataa

SEQ ID NO: 1443076 - DNA, 15 bp, Homo sapiens
taattggtcaataat

SEQ ID NO: 1443077 - DNA, 15 bp, Homo sapiens
aattggtcaataata

SEQ ID NO: 1443078 - DNA, 15 bp, Homo sapiens
attggtcaataataa

SEQ ID NO: 1443079 - DNA, 15 bp, Homo sapiens
ttggtcaataataat

SEQ ID NO: 1443080 - DNA, 15 bp, Homo sapiens
tggtcaataataata

SEQ ID NO: 1443081 - DNA, 15 bp, Homo sapiens
ggtcaataataatag

SEQ ID NO: 1443082 - DNA, 15 bp, Homo sapiens
gtcaataataataga

SEQ ID NO: 1443083 - DNA, 15 bp, Homo sapiens
tcaataataatagat

SEQ ID NO: 1443084 - DNA, 15 bp, Homo sapiens
caataataatagata

SEQ ID NO: 1443085 - DNA, 15 bp, Homo sapiens
aataataatagatat

SEQ ID NO: 1443086 - DNA, 15 bp, Homo sapiens
ataataatagatata

SEQ ID NO: 1443087 - DNA, 15 bp, Homo sapiens
taataatagatatat

SEQ ID NO: 1443088 - DNA, 15 bp, Homo sapiens
aataatagatatata

SEQ ID NO: 1443089 - DNA, 15 bp, Homo sapiens
ataatagatatatac

SEQ ID NO: 1443090 - DNA, 15 bp, Homo sapiens
taatagatatataca

SEQ ID NO: 1443091 - DNA, 15 bp, Homo sapiens
aatagatatatacat

SEQ ID NO: 1443092 - DNA, 15 bp, Homo sapiens
atagatatatacatt

SEQ ID NO: 1443093 - DNA, 15 bp, Homo sapiens
tagatatatacatta

SEQ ID NO: 1443094 - DNA, 15 bp, Homo sapiens
agatatatacattaa

SEQ ID NO: 1443095 - DNA, 15 bp, Homo sapiens
gatatatacattaac

SEQ ID NO: 1443096 - DNA, 15 bp, Homo sapiens
atatatacattaact

SEQ ID NO: 1443097 - DNA, 15 bp, Homo sapiens
tatatacattaactt

SEQ ID NO: 1443098 - DNA, 15 bp, Homo sapiens
atatacattaactta

SEQ ID NO: 1443099 - DNA, 15 bp, Homo sapiens
tatacattaacttat

SEQ ID NO: 1443100 - DNA, 15 bp, Homo sapiens
atacattaacttatg

SEQ ID NO: 1443101 - DNA, 15 bp, Homo sapiens
tacattaacttatga

SEQ ID NO: 1443102 - DNA, 15 bp, Homo sapiens
acattaacttatgat

SEQ ID NO: 1443103 - DNA, 15 bp, Homo sapiens
cattaacttatgatt

SEQ ID NO: 1443104 - DNA, 15 bp, Homo sapiens
attaacttatgatta

SEQ ID NO: 1443105 - DNA, 15 bp, Homo sapiens
ttaacttatgattaa

SEQ ID NO: 1443106 - DNA, 15 bp, Homo sapiens
taacttatgattaat

SEQ ID NO: 1443107 - DNA, 15 bp, Homo sapiens
aacttatgattaatt

SEQ ID NO: 1443108 - DNA, 15 bp, Homo sapiens
acttatgattaattt

SEQ ID NO: 1443109 - DNA, 15 bp, Homo sapiens
cttatgattaattta

SEQ ID NO: 1443110 - DNA, 15 bp, Homo sapiens
ttatgattaatttat

SEQ ID NO: 1443111 - DNA, 15 bp, Homo sapiens
tatgattaatttatt

SEQ ID NO: 1443112 - DNA, 15 bp, Homo sapiens
atgattaatttatta

SEQ ID NO: 1443113 - DNA, 15 bp, Homo sapiens
tgattaatttattaa

SEQ ID NO: 1443114 - DNA, 15 bp, Homo sapiens
gattaatttattaat

SEQ ID NO: 1443115 - DNA, 15 bp, Homo sapiens
attaatttattaata

SEQ ID NO: 1443116 - DNA, 15 bp, Homo sapiens
ttaatttattaataa

SEQ ID NO: 1443117 - DNA, 15 bp, Homo sapiens
taatttattaataaa

SEQ ID NO: 1443118 - DNA, 15 bp, Homo sapiens
aatttattaataaaa

SEQ ID NO: 1443119 - DNA, 15 bp, Homo sapiens
atttattaataaaat

SEQ ID NO: 1443120 - DNA, 15 bp, Homo sapiens
tttattaataaaata

SEQ ID NO: 1443121 - DNA, 15 bp, Homo sapiens
tattaataaaatatg

SEQ ID NO: 1443122 - DNA, 15 bp, Homo sapiens
attaataaaatatga

SEQ ID NO: 1443123 - DNA, 15 bp, Homo sapiens
ttaataaaatatgaa

SEQ ID NO: 1443124 - DNA, 15 bp, Homo sapiens
taataaaatatgaat

SEQ ID NO: 1443125 - DNA, 15 bp, Homo sapiens
aataaaatatgaatt

SEQ ID NO: 1443126 - DNA, 15 bp, Homo sapiens
ataaaatatgaattt

SEQ ID NO: 1443127 - DNA, 15 bp, Homo sapiens
taaaatatgaattta

SEQ ID NO: 1443128 - DNA, 15 bp, Homo sapiens
aaaatatgaatttat

SEQ ID NO: 1443129 - DNA, 15 bp, Homo sapiens
aaatatgaatttatt

SEQ ID NO: 1443130 - DNA, 15 bp, Homo sapiens
aatatgaatttattt

SEQ ID NO: 1443131 - DNA, 15 bp, Homo sapiens
atatgaatttatttt

SEQ ID NO: 1443132 - DNA, 15 bp, Homo sapiens
tatgaatttattttt

SEQ ID NO: 1443133 - DNA, 15 bp, Homo sapiens
atgaatttatttttt

SEQ ID NO: 1443134 - DNA, 15 bp, Homo sapiens
tgaatttattttttt

SEQ ID NO: 1443135 - DNA, 15 bp, Homo sapiens
gaatttatttttttc

SEQ ID NO: 1443136 - DNA, 15 bp, Homo sapiens
aatttatttttttca

SEQ ID NO: 1443137 - DNA, 15 bp, Homo sapiens
atttatttttttcag

SEQ ID NO: 1443138 - DNA, 15 bp, Homo sapiens
tttatttttttcagg

SEQ ID NO: 1443139 - DNA, 15 bp, Homo sapiens
ttatttttttcaggg

SEQ ID NO: 1443140 - DNA, 15 bp, Homo sapiens
tatttttttcaggga

SEQ ID NO: 1443141 - DNA, 15 bp, Homo sapiens
atttttttcagggac

SEQ ID NO: 1443142 - DNA, 15 bp, Homo sapiens
tttttttcagggaca

SEQ ID NO: 1443143 - DNA, 15 bp, Homo sapiens
ttttttcagggacaa

SEQ ID NO: 1443144 - DNA, 15 bp, Homo sapiens
tttttcagggacaac

SEQ ID NO: 1443145 - DNA, 15 bp, Homo sapiens
ttttcagggacaact

SEQ ID NO: 1443146 - DNA, 15 bp, Homo sapiens
tttcagggacaacta

SEQ ID NO: 1443147 - DNA, 15 bp, Homo sapiens
ttcagggacaactat

SEQ ID NO: 1443148 - DNA, 15 bp, Homo sapiens
tcagggacaactata

SEQ ID NO: 1443149 - DNA, 15 bp, Homo sapiens
cagggacaactataa

SEQ ID NO: 1443150 - DNA, 15 bp, Homo sapiens
agggacaactataat

SEQ ID NO: 1443151 - DNA, 15 bp, Homo sapiens
gggacaactataatt

SEQ ID NO: 1443152 - DNA, 15 bp, Homo sapiens
ggacaactataattg

SEQ ID NO: 1443153 - DNA, 15 bp, Homo sapiens
gacaactataattgt

SEQ ID NO: 1443154 - DNA, 15 bp, Homo sapiens
acaactataattgtc

SEQ ID NO: 1443155 - DNA, 15 bp, Homo sapiens
caactataattgtca

SEQ ID NO: 1443156 - DNA, 15 bp, Homo sapiens
aactataattgtcac

SEQ ID NO: 1443157 - DNA, 15 bp, Homo sapiens
actataattgtcaca

SEQ ID NO: 1443158 - DNA, 15 bp, Homo sapiens
ctataattgtcacaa

SEQ ID NO: 1443159 - DNA, 15 bp, Homo sapiens
tataattgtcacaat

SEQ ID NO: 1443160 - DNA, 15 bp, Homo sapiens
ataattgtcacaatc

SEQ ID NO: 1443161 - DNA, 15 bp, Homo sapiens
taattgtcacaatct

SEQ ID NO: 1443162 - DNA, 15 bp, Homo sapiens
aattgtcacaatctg

SEQ ID NO: 1443163 - DNA, 15 bp, Homo sapiens
attgtcacaatctgg

SEQ ID NO: 1443164 - DNA, 15 bp, Homo sapiens
ttgtcacaatctgga

SEQ ID NO: 1443165 - DNA, 15 bp, Homo sapiens
tgtcacaatctggaa

SEQ ID NO: 1443166 - DNA, 15 bp, Homo sapiens
gtcacaatctggaag

SEQ ID NO: 1443167 - DNA, 15 bp, Homo sapiens
tcacaatctggaagt

SEQ ID NO: 1443168 - DNA, 15 bp, Homo sapiens
cacaatctggaagtg

SEQ ID NO: 1443169 - DNA, 15 bp, Homo sapiens
acaatctggaagtgt

SEQ ID NO: 1443170 - DNA, 15 bp, Homo sapiens
caatctggaagtgtt

SEQ ID NO: 1443171 - DNA, 15 bp, Homo sapiens
aatctggaagtgttc

SEQ ID NO: 1443172 - DNA, 15 bp, Homo sapiens
atctggaagtgttct

SEQ ID NO: 1443173 - DNA, 15 bp, Homo sapiens
tctggaagtgttctt

SEQ ID NO: 1443174 - DNA, 15 bp, Homo sapiens
ctggaagtgttctta

SEQ ID NO: 1443175 - DNA, 15 bp, Homo sapiens
tggaagtgttcttat

SEQ ID NO: 1443176 - DNA, 15 bp, Homo sapiens
ggaagtgttcttata

SEQ ID NO: 1443177 - DNA, 15 bp, Homo sapiens
gaagtgttcttatat

SEQ ID NO: 1443178 - DNA, 15 bp, Homo sapiens
aagtgttcttatatt

SEQ ID NO: 1443179 - DNA, 15 bp, Homo sapiens
agtgttcttatattt

SEQ ID NO: 1443180 - DNA, 15 bp, Homo sapiens
gtgttcttatatttt

SEQ ID NO: 1443181 - DNA, 15 bp, Homo sapiens
tgttcttatattttg

SEQ ID NO: 1443182 - DNA, 15 bp, Homo sapiens
gttcttatattttgc

SEQ ID NO: 1443183 - DNA, 15 bp, Homo sapiens
ttcttatattttgct

SEQ ID NO: 1443184 - DNA, 15 bp, Homo sapiens
tcttatattttgctt

SEQ ID NO: 1443185 - DNA, 15 bp, Homo sapiens
cttatattttgcttg

SEQ ID NO: 1443186 - DNA, 15 bp, Homo sapiens
ttatattttgcttga

SEQ ID NO: 1443187 - DNA, 15 bp, Homo sapiens
tatattttgcttgaa

SEQ ID NO: 1443188 - DNA, 15 bp, Homo sapiens
atattttgcttgaag

SEQ ID NO: 1443189 - DNA, 15 bp, Homo sapiens
tattttgcttgaagg

SEQ ID NO: 1443190 - DNA, 15 bp, Homo sapiens
attttgcttgaaggt

SEQ ID NO: 1443191 - DNA, 15 bp, Homo sapiens
ttttgcttgaaggtt

SEQ ID NO: 1443192 - DNA, 15 bp, Homo sapiens
tttgcttgaaggtta

SEQ ID NO: 1443193 - DNA, 15 bp, Homo sapiens
ttgcttgaaggttat

SEQ ID NO: 1443194 - DNA, 15 bp, Homo sapiens
tgcttgaaggttata

SEQ ID NO: 1443195 - DNA, 15 bp, Homo sapiens
gcttgaaggttataa

SEQ ID NO: 1443196 - DNA, 15 bp, Homo sapiens
cttgaaggttataaa

SEQ ID NO: 1443197 - DNA, 15 bp, Homo sapiens
ttgaaggttataaaa

SEQ ID NO: 1443198 - DNA, 15 bp, Homo sapiens
tgaaggttataaaat

SEQ ID NO: 1443199 - DNA, 15 bp, Homo sapiens
gaaggttataaaata

SEQ ID NO: 1443200 - DNA, 15 bp, Homo sapiens
aaggttataaaatat

SEQ ID NO: 1443201 - DNA, 15 bp, Homo sapiens
aggttataaaatata

SEQ ID NO: 1443202 - DNA, 15 bp, Homo sapiens
ggttataaaatataa

SEQ ID NO: 1443203 - DNA, 15 bp, Homo sapiens
gttataaaatataaa

SEQ ID NO: 1443204 - DNA, 15 bp, Homo sapiens
ttataaaatataaaa

SEQ ID NO: 1443205 - DNA, 15 bp, Homo sapiens
tataaaatataaaac

SEQ ID NO: 1443206 - DNA, 15 bp, Homo sapiens
ataaaatataaaaca

SEQ ID NO: 1443207 - DNA, 15 bp, Homo sapiens
taaaatataaaacag

SEQ ID NO: 1443208 - DNA, 15 bp, Homo sapiens
aaaatataaaacagt

SEQ ID NO: 1443209 - DNA, 15 bp, Homo sapiens
aaatataaaacagtt

SEQ ID NO: 1443210 - DNA, 15 bp, Homo sapiens
aatataaaacagttg

SEQ ID NO: 1443211 - DNA, 15 bp, Homo sapiens
atataaaacagttgc

SEQ ID NO: 1443212 - DNA, 15 bp, Homo sapiens
tataaaacagttgct

SEQ ID NO: 1443213 - DNA, 15 bp, Homo sapiens
ataaaacagttgctt

SEQ ID NO: 1443214 - DNA, 15 bp, Homo sapiens
taaaacagttgcttt

SEQ ID NO: 1443215 - DNA, 15 bp, Homo sapiens
aaaacagttgctttt

SEQ ID NO: 1443216 - DNA, 15 bp, Homo sapiens
aaacagttgcttttc

SEQ ID NO: 1443217 - DNA, 15 bp, Homo sapiens
aacagttgcttttct

SEQ ID NO: 1443218 - DNA, 15 bp, Homo sapiens
acagttgcttttctg

SEQ ID NO: 1443219 - DNA, 15 bp, Homo sapiens
cagttgcttttctgt

SEQ ID NO: 1443220 - DNA, 15 bp, Homo sapiens
agttgcttttctgtt

SEQ ID NO: 1443221 - DNA, 15 bp, Homo sapiens
gttgcttttctgttt

SEQ ID NO: 1443222 - DNA, 15 bp, Homo sapiens
ttgcttttctgttta

SEQ ID NO: 1443223 - DNA, 15 bp, Homo sapiens
tgcttttctgtttac

SEQ ID NO: 1443224 - DNA, 15 bp, Homo sapiens
gcttttctgtttact

SEQ ID NO: 1443225 - DNA, 15 bp, Homo sapiens
cttttctgtttactt

SEQ ID NO: 1443226 - DNA, 15 bp, Homo sapiens
ttttctgtttactta

SEQ ID NO: 1443227 - DNA, 15 bp, Homo sapiens
tttctgtttacttag

SEQ ID NO: 1443228 - DNA, 15 bp, Homo sapiens
ttctgtttacttagg

SEQ ID NO: 1443229 - DNA, 15 bp, Homo sapiens
tctgtttacttaggt

SEQ ID NO: 1443230 - DNA, 15 bp, Homo sapiens
ctgtttacttaggtg

SEQ ID NO: 1443231 - DNA, 15 bp, Homo sapiens
tgtttacttaggtgg

SEQ ID NO: 1443232 - DNA, 15 bp, Homo sapiens
gtttacttaggtgga

SEQ ID NO: 1443233 - DNA, 15 bp, Homo sapiens
tttacttaggtggaa

SEQ ID NO: 1443234 - DNA, 15 bp, Homo sapiens
ttacttaggtggaag

SEQ ID NO: 1443235 - DNA, 15 bp, Homo sapiens
tacttaggtggaagt

SEQ ID NO: 1443236 - DNA, 15 bp, Homo sapiens
acttaggtggaagta

SEQ ID NO: 1443237 - DNA, 15 bp, Homo sapiens
cttaggtggaagtaa

SEQ ID NO: 1443238 - DNA, 15 bp, Homo sapiens
ttaggtggaagtaaa

SEQ ID NO: 1443239 - DNA, 15 bp, Homo sapiens
taggtggaagtaaat

SEQ ID NO: 1443240 - DNA, 15 bp, Homo sapiens
aggtggaagtaaatg

SEQ ID NO: 1443241 - DNA, 15 bp, Homo sapiens
ggtggaagtaaatga

SEQ ID NO: 1443242 - DNA, 15 bp, Homo sapiens
gtggaagtaaatgag

SEQ ID NO: 1443243 - DNA, 15 bp, Homo sapiens
tggaagtaaatgagc

SEQ ID NO: 1443244 - DNA, 15 bp, Homo sapiens
ggaagtaaatgagct

SEQ ID NO: 1443245 - DNA, 15 bp, Homo sapiens
gaagtaaatgagcta

SEQ ID NO: 1443246 - DNA, 15 bp, Homo sapiens
aagtaaatgagctaa

SEQ ID NO: 1443247 - DNA, 15 bp, Homo sapiens
agtaaatgagctaaa

SEQ ID NO: 1443248 - DNA, 15 bp, Homo sapiens
gtaaatgagctaaaa

SEQ ID NO: 1443249 - DNA, 15 bp, Homo sapiens
taaatgagctaaaaa

SEQ ID NO: 1443250 - DNA, 15 bp, Homo sapiens
aaatgagctaaaaag

SEQ ID NO: 1443251 - DNA, 15 bp, Homo sapiens
aatgagctaaaaagt

SEQ ID NO: 1443252 - DNA, 15 bp, Homo sapiens
atgagctaaaaagtg

SEQ ID NO: 1443253 - DNA, 15 bp, Homo sapiens
tgagctaaaaagtga

SEQ ID NO: 1443254 - DNA, 15 bp, Homo sapiens
gagctaaaaagtgaa

SEQ ID NO: 1443255 - DNA, 15 bp, Homo sapiens
agctaaaaagtgaaa

SEQ ID NO: 1443256 - DNA, 15 bp, Homo sapiens
gctaaaaagtgaaaa

SEQ ID NO: 1443257 - DNA, 15 bp, Homo sapiens
ctaaaaagtgaaaag

SEQ ID NO: 1443258 - DNA, 15 bp, Homo sapiens
taaaaagtgaaaagc

SEQ ID NO: 1443259 - DNA, 15 bp, Homo sapiens
aaaaagtgaaaagca

SEQ ID NO: 1443260 - DNA, 15 bp, Homo sapiens
aaaagtgaaaagcaa

SEQ ID NO: 1443261 - DNA, 15 bp, Homo sapiens
aaagtgaaaagcaag

SEQ ID NO: 1443262 - DNA, 15 bp, Homo sapiens
aagtgaaaagcaaga

SEQ ID NO: 1443263 - DNA, 15 bp, Homo sapiens
agtgaaaagcaagaa

SEQ ID NO: 1443264 - DNA, 15 bp, Homo sapiens
gtgaaaagcaagaaa

SEQ ID NO: 1443265 - DNA, 15 bp, Homo sapiens
tgaaaagcaagaaaa

SEQ ID NO: 1443266 - DNA, 15 bp, Homo sapiens
gaaaagcaagaaaat

SEQ ID NO: 1443267 - DNA, 15 bp, Homo sapiens
aaaagcaagaaaatg

SEQ ID NO: 1443268 - DNA, 15 bp, Homo sapiens
aaagcaagaaaatgt

SEQ ID NO: 1443269 - DNA, 15 bp, Homo sapiens
aagcaagaaaatgtg

SEQ ID NO: 1443270 - DNA, 15 bp, Homo sapiens
agcaagaaaatgtga

SEQ ID NO: 1443271 - DNA, 15 bp, Homo sapiens
gcaagaaaatgtgat

SEQ ID NO: 1443272 - DNA, 15 bp, Homo sapiens
caagaaaatgtgata

SEQ ID NO: 1443273 - DNA, 15 bp, Homo sapiens
aagaaaatgtgatac

SEQ ID NO: 1443274 - DNA, 15 bp, Homo sapiens
agaaaatgtgataca

SEQ ID NO: 1443275 - DNA, 15 bp, Homo sapiens
gaaaatgtgatacac

SEQ ID NO: 1443276 - DNA, 15 bp, Homo sapiens
aaaatgtgatacacc

SEQ ID NO: 1443277 - DNA, 15 bp, Homo sapiens
aaatgtgatacacct

SEQ ID NO: 1443278 - DNA, 15 bp, Homo sapiens
aatgtgatacacctt

SEQ ID NO: 1443279 - DNA, 15 bp, Homo sapiens
atgtgatacaccttt

SEQ ID NO: 1443280 - DNA, 15 bp, Homo sapiens
tgtgatacacctttt

SEQ ID NO: 1443281 - DNA, 15 bp, Homo sapiens
gtgatacaccttttc

SEQ ID NO: 1443282 - DNA, 15 bp, Homo sapiens
tgatacaccttttca

SEQ ID NO: 1443283 - DNA, 15 bp, Homo sapiens
gatacaccttttcag

SEQ ID NO: 1443284 - DNA, 15 bp, Homo sapiens
atacaccttttcaga

SEQ ID NO: 1443285 - DNA, 15 bp, Homo sapiens
tacaccttttcagaa

SEQ ID NO: 1443286 - DNA, 15 bp, Homo sapiens
acaccttttcagaat

SEQ ID NO: 1443287 - DNA, 15 bp, Homo sapiens
caccttttcagaatt

SEQ ID NO: 1443288 - DNA, 15 bp, Homo sapiens
accttttcagaatta

SEQ ID NO: 1443289 - DNA, 15 bp, Homo sapiens
ccttttcagaattac

SEQ ID NO: 1443290 - DNA, 15 bp, Homo sapiens
cttttcagaattact

SEQ ID NO: 1443291 - DNA, 15 bp, Homo sapiens
ttttcagaattactc

SEQ ID NO: 1443292 - DNA, 15 bp, Homo sapiens
tttcagaattactca

SEQ ID NO: 1443293 - DNA, 15 bp, Homo sapiens
ttcagaattactcag

SEQ ID NO: 1443294 - DNA, 15 bp, Homo sapiens
tcagaattactcagt

SEQ ID NO: 1443295 - DNA, 15 bp, Homo sapiens
cagaattactcagtc

SEQ ID NO: 1443296 - DNA, 15 bp, Homo sapiens
agaattactcagtca

SEQ ID NO: 1443297 - DNA, 15 bp, Homo sapiens
gaattactcagtcac

SEQ ID NO: 1443298 - DNA, 15 bp, Homo sapiens
aattactcagtcact

SEQ ID NO: 1443299 - DNA, 15 bp, Homo sapiens
attactcagtcacta

SEQ ID NO: 1443300 - DNA, 15 bp, Homo sapiens
ttactcagtcactaa

SEQ ID NO: 1443301 - DNA, 15 bp, Homo sapiens
tactcagtcactaat

SEQ ID NO: 1443302 - DNA, 15 bp, Homo sapiens
actcagtcactaatg

SEQ ID NO: 1443303 - DNA, 15 bp, Homo sapiens
ctcagtcactaatga

SEQ ID NO: 1443304 - DNA, 15 bp, Homo sapiens
tcagtcactaatgaa

SEQ ID NO: 1443305 - DNA, 15 bp, Homo sapiens
cagtcactaatgaag

SEQ ID NO: 1443306 - DNA, 15 bp, Homo sapiens
agtcactaatgaagg

SEQ ID NO: 1443307 - DNA, 15 bp, Homo sapiens
gtcactaatgaaggt

SEQ ID NO: 1443308 - DNA, 15 bp, Homo sapiens
tcactaatgaaggtt

SEQ ID NO: 1443309 - DNA, 15 bp, Homo sapiens
cactaatgaaggttt

SEQ ID NO: 1443310 - DNA, 15 bp, Homo sapiens
actaatgaaggtttg

SEQ ID NO: 1443311 - DNA, 15 bp, Homo sapiens
ctaatgaaggtttgt

SEQ ID NO: 1443312 - DNA, 15 bp, Homo sapiens
taatgaaggtttgta

SEQ ID NO: 1443313 - DNA, 15 bp, Homo sapiens
aatgaaggtttgtat

SEQ ID NO: 1443314 - DNA, 15 bp, Homo sapiens
atgaaggtttgtatg

SEQ ID NO: 1443315 - DNA, 15 bp, Homo sapiens
tgaaggtttgtatgt

SEQ ID NO: 1443316 - DNA, 15 bp, Homo sapiens
gaaggtttgtatgta

SEQ ID NO: 1443317 - DNA, 15 bp, Homo sapiens
aaggtttgtatgtag

SEQ ID NO: 1443318 - DNA, 15 bp, Homo sapiens
aggtttgtatgtagt

SEQ ID NO: 1443319 - DNA, 15 bp, Homo sapiens
ggtttgtatgtagta

SEQ ID NO: 1443320 - DNA, 15 bp, Homo sapiens
gtttgtatgtagtag

SEQ ID NO: 1443321 - DNA, 15 bp, Homo sapiens
tttgtatgtagtagg

SEQ ID NO: 1443322 - DNA, 15 bp, Homo sapiens
ttgtatgtagtaggt

SEQ ID NO: 1443323 - DNA, 15 bp, Homo sapiens
tgtatgtagtaggtt

SEQ ID NO: 1443324 - DNA, 15 bp, Homo sapiens
gtatgtagtaggttt

SEQ ID NO: 1443325 - DNA, 15 bp, Homo sapiens
tatgtagtaggtttt

SEQ ID NO: 1443326 - DNA, 15 bp, Homo sapiens
atgtagtaggtttta

SEQ ID NO: 1443327 - DNA, 15 bp, Homo sapiens
tgtagtaggttttaa

SEQ ID NO: 1443328 - DNA, 15 bp, Homo sapiens
gtagtaggttttaac

SEQ ID NO: 1443329 - DNA, 15 bp, Homo sapiens
tagtaggttttaact

SEQ ID NO: 1443330 - DNA, 15 bp, Homo sapiens
agtaggttttaacta

SEQ ID NO: 1443331 - DNA, 15 bp, Homo sapiens
gtaggttttaactat

SEQ ID NO: 1443332 - DNA, 15 bp, Homo sapiens
taggttttaactata

SEQ ID NO: 1443333 - DNA, 15 bp, Homo sapiens
aggttttaactatag

SEQ ID NO: 1443334 - DNA, 15 bp, Homo sapiens
ggttttaactatagg

SEQ ID NO: 1443335 - DNA, 15 bp, Homo sapiens
gttttaactataggt

SEQ ID NO: 1443336 - DNA, 15 bp, Homo sapiens
ttttaactataggtt

SEQ ID NO: 1443337 - DNA, 15 bp, Homo sapiens
tttaactataggttt

SEQ ID NO: 1443338 - DNA, 15 bp, Homo sapiens
ttaactataggtttg

SEQ ID NO: 1443339 - DNA, 15 bp, Homo sapiens
taactataggtttgg

SEQ ID NO: 1443340 - DNA, 15 bp, Homo sapiens
aactataggtttggc

SEQ ID NO: 1443341 - DNA, 15 bp, Homo sapiens
actataggtttggct

SEQ ID NO: 1443342 - DNA, 15 bp, Homo sapiens
ctataggtttggcta

SEQ ID NO: 1443343 - DNA, 15 bp, Homo sapiens
tataggtttggctat

SEQ ID NO: 1443344 - DNA, 15 bp, Homo sapiens
ataggtttggctatt

SEQ ID NO: 1443345 - DNA, 15 bp, Homo sapiens
taggtttggctatta

SEQ ID NO: 1443346 - DNA, 15 bp, Homo sapiens
aggtttggctattag

SEQ ID NO: 1443347 - DNA, 15 bp, Homo sapiens
ggtttggctattagt

SEQ ID NO: 1443348 - DNA, 15 bp, Homo sapiens
gtttggctattagtg

SEQ ID NO: 1443349 - DNA, 15 bp, Homo sapiens
tttggctattagtgg

SEQ ID NO: 1443350 - DNA, 15 bp, Homo sapiens
ttggctattagtgga

SEQ ID NO: 1443351 - DNA, 15 bp, Homo sapiens
tggctattagtggaa

SEQ ID NO: 1443352 - DNA, 15 bp, Homo sapiens
ggctattagtggaac

SEQ ID NO: 1443353 - DNA, 15 bp, Homo sapiens
gctattagtggaact

SEQ ID NO: 1443354 - DNA, 15 bp, Homo sapiens
ctattagtggaacta

SEQ ID NO: 1443355 - DNA, 15 bp, Homo sapiens
tattagtggaactat

SEQ ID NO: 1443356 - DNA, 15 bp, Homo sapiens
attagtggaactata

SEQ ID NO: 1443357 - DNA, 15 bp, Homo sapiens
ttagtggaactataa

SEQ ID NO: 1443358 - DNA, 15 bp, Homo sapiens
tagtggaactataaa

SEQ ID NO: 1443359 - DNA, 15 bp, Homo sapiens
agtggaactataaaa

SEQ ID NO: 1443360 - DNA, 15 bp, Homo sapiens
gtggaactataaaaa

SEQ ID NO: 1443361 - DNA, 15 bp, Homo sapiens
tggaactataaaaat

SEQ ID NO: 1443362 - DNA, 15 bp, Homo sapiens
ggaactataaaaatc

SEQ ID NO: 1443363 - DNA, 15 bp, Homo sapiens
gaactataaaaatct

SEQ ID NO: 1443364 - DNA, 15 bp, Homo sapiens
aactataaaaatctg

SEQ ID NO: 1443365 - DNA, 15 bp, Homo sapiens
actataaaaatctgt

SEQ ID NO: 1443366 - DNA, 15 bp, Homo sapiens
ctataaaaatctgtt

SEQ ID NO: 1443367 - DNA, 15 bp, Homo sapiens
tataaaaatctgttc

SEQ ID NO: 1443368 - DNA, 15 bp, Homo sapiens
ataaaaatctgttct

SEQ ID NO: 1443369 - DNA, 15 bp, Homo sapiens
taaaaatctgttctt

SEQ ID NO: 1443370 - DNA, 15 bp, Homo sapiens
aaaaatctgttctta

SEQ ID NO: 1443371 - DNA, 15 bp, Homo sapiens
aaaatctgttcttat

SEQ ID NO: 1443372 - DNA, 15 bp, Homo sapiens
aaatctgttcttata

SEQ ID NO: 1443373 - DNA, 15 bp, Homo sapiens
aatctgttcttatat

SEQ ID NO: 1443374 - DNA, 15 bp, Homo sapiens
atctgttcttatata

SEQ ID NO: 1443375 - DNA, 15 bp, Homo sapiens
tctgttcttatataa

SEQ ID NO: 1443376 - DNA, 15 bp, Homo sapiens
ctgttcttatataag

SEQ ID NO: 1443377 - DNA, 15 bp, Homo sapiens
tgttcttatataagg

SEQ ID NO: 1443378 - DNA, 15 bp, Homo sapiens
gttcttatataaggt

SEQ ID NO: 1443379 - DNA, 15 bp, Homo sapiens
ttcttatataaggta

SEQ ID NO: 1443380 - DNA, 15 bp, Homo sapiens
tcttatataaggtaa

SEQ ID NO: 1443381 - DNA, 15 bp, Homo sapiens
cttatataaggtaat

SEQ ID NO: 1443382 - DNA, 15 bp, Homo sapiens
ttatataaggtaatc

SEQ ID NO: 1443383 - DNA, 15 bp, Homo sapiens
tatataaggtaatct

SEQ ID NO: 1443384 - DNA, 15 bp, Homo sapiens
atataaggtaatctt

SEQ ID NO: 1443385 - DNA, 15 bp, Homo sapiens
tataaggtaatcttt

SEQ ID NO: 1443386 - DNA, 15 bp, Homo sapiens
ataaggtaatctttg

SEQ ID NO: 1443387 - DNA, 15 bp, Homo sapiens
taaggtaatctttgt

SEQ ID NO: 1443388 - DNA, 15 bp, Homo sapiens
aaggtaatctttgtg

SEQ ID NO: 1443389 - DNA, 15 bp, Homo sapiens
aggtaatctttgtga

SEQ ID NO: 1443390 - DNA, 15 bp, Homo sapiens
ggtaatctttgtgaa

SEQ ID NO: 1443391 - DNA, 15 bp, Homo sapiens
gtaatctttgtgaaa

SEQ ID NO: 1443392 - DNA, 15 bp, Homo sapiens
taatctttgtgaaaa

SEQ ID NO: 1443393 - DNA, 15 bp, Homo sapiens
aatctttgtgaaaat

SEQ ID NO: 1443394 - DNA, 15 bp, Homo sapiens
atctttgtgaaaata

SEQ ID NO: 1443395 - DNA, 15 bp, Homo sapiens
tctttgtgaaaatac

SEQ ID NO: 1443396 - DNA, 15 bp, Homo sapiens
ctttgtgaaaatacc

SEQ ID NO: 1443397 - DNA, 15 bp, Homo sapiens
tttgtgaaaatacct

SEQ ID NO: 1443398 - DNA, 15 bp, Homo sapiens
ttgtgaaaatacctg

SEQ ID NO: 1443399 - DNA, 15 bp, Homo sapiens
tgtgaaaatacctgg

SEQ ID NO: 1443400 - DNA, 15 bp, Homo sapiens
gtgaaaatacctggt

SEQ ID NO: 1443401 - DNA, 15 bp, Homo sapiens
tgaaaatacctggta

SEQ ID NO: 1443402 - DNA, 15 bp, Homo sapiens
gaaaatacctggtaa

SEQ ID NO: 1443403 - DNA, 15 bp, Homo sapiens
aaaatacctggtaat

SEQ ID NO: 1443404 - DNA, 15 bp, Homo sapiens
aaatacctggtaata

SEQ ID NO: 1443405 - DNA, 15 bp, Homo sapiens
aatacctggtaatat

SEQ ID NO: 1443406 - DNA, 15 bp, Homo sapiens
atacctggtaatatc

SEQ ID NO: 1443407 - DNA, 15 bp, Homo sapiens
tacctggtaatatct

SEQ ID NO: 1443408 - DNA, 15 bp, Homo sapiens
acctggtaatatcta

SEQ ID NO: 1443409 - DNA, 15 bp, Homo sapiens
cctggtaatatctac

SEQ ID NO: 1443410 - DNA, 15 bp, Homo sapiens
ctggtaatatctaca

SEQ ID NO: 1443411 - DNA, 15 bp, Homo sapiens
tggtaatatctacat

SEQ ID NO: 1443412 - DNA, 15 bp, Homo sapiens
ggtaatatctacatc

SEQ ID NO: 1443413 - DNA, 15 bp, Homo sapiens
gtaatatctacatca

SEQ ID NO: 1443414 - DNA, 15 bp, Homo sapiens
taatatctacatcac

SEQ ID NO: 1443415 - DNA, 15 bp, Homo sapiens
aatatctacatcacc

SEQ ID NO: 1443416 - DNA, 15 bp, Homo sapiens
atatctacatcacca

SEQ ID NO: 1443417 - DNA, 15 bp, Homo sapiens
tatctacatcaccac

SEQ ID NO: 1443418 - DNA, 15 bp, Homo sapiens
atctacatcaccact

SEQ ID NO: 1443419 - DNA, 15 bp, Homo sapiens
tctacatcaccacta

SEQ ID NO: 1443420 - DNA, 15 bp, Homo sapiens
ctacatcaccactaa

SEQ ID NO: 1443421 - DNA, 15 bp, Homo sapiens
tacatcaccactaaa

SEQ ID NO: 1443422 - DNA, 15 bp, Homo sapiens
acatcaccactaaaa

SEQ ID NO: 1443423 - DNA, 15 bp, Homo sapiens
catcaccactaaaaa

SEQ ID NO: 1443424 - DNA, 15 bp, Homo sapiens
atcaccactaaaaaa

SEQ ID NO: 1443425 - DNA, 15 bp, Homo sapiens
tcaccactaaaaaat

SEQ ID NO: 1443426 - DNA, 15 bp, Homo sapiens
caccactaaaaaatg

SEQ ID NO: 1443427 - DNA, 15 bp, Homo sapiens
accactaaaaaatgc

SEQ ID NO: 1443428 - DNA, 15 bp, Homo sapiens
ccactaaaaaatgca

SEQ ID NO: 1443429 - DNA, 15 bp, Homo sapiens
cactaaaaaatgcaa

SEQ ID NO: 1443430 - DNA, 15 bp, Homo sapiens
actaaaaaatgcaat

SEQ ID NO: 1443431 - DNA, 15 bp, Homo sapiens
ctaaaaaatgcaata

SEQ ID NO: 1443432 - DNA, 15 bp, Homo sapiens
taaaaaatgcaatat

SEQ ID NO: 1443433 - DNA, 15 bp, Homo sapiens
aaaaaatgcaatata

SEQ ID NO: 1443434 - DNA, 15 bp, Homo sapiens
aaaaatgcaatatat

SEQ ID NO: 1443435 - DNA, 15 bp, Homo sapiens
aaaatgcaatatatt

SEQ ID NO: 1443436 - DNA, 15 bp, Homo sapiens
aaatgcaatatattt

SEQ ID NO: 1443437 - DNA, 15 bp, Homo sapiens
aatgcaatatattta

SEQ ID NO: 1443438 - DNA, 15 bp, Homo sapiens
atgcaatatatttaa

SEQ ID NO: 1443439 - DNA, 15 bp, Homo sapiens
tgcaatatatttaaa

SEQ ID NO: 1443440 - DNA, 15 bp, Homo sapiens
gcaatatatttaaat

SEQ ID NO: 1443441 - DNA, 15 bp, Homo sapiens
caatatatttaaatg

SEQ ID NO: 1443442 - DNA, 15 bp, Homo sapiens
aatatatttaaatgt

SEQ ID NO: 1443443 - DNA, 15 bp, Homo sapiens
atatatttaaatgtg

SEQ ID NO: 1443444 - DNA, 15 bp, Homo sapiens
tatatttaaatgtga

SEQ ID NO: 1443445 - DNA, 15 bp, Homo sapiens
atatttaaatgtgaa

SEQ ID NO: 1443446 - DNA, 15 bp, Homo sapiens
tatttaaatgtgaat

SEQ ID NO: 1443447 - DNA, 15 bp, Homo sapiens
atttaaatgtgaatt

SEQ ID NO: 1443448 - DNA, 15 bp, Homo sapiens
tttaaatgtgaatta

SEQ ID NO: 1443449 - DNA, 15 bp, Homo sapiens
ttaaatgtgaattaa

SEQ ID NO: 1443450 - DNA, 15 bp, Homo sapiens
taaatgtgaattaag

SEQ ID NO: 1443451 - DNA, 15 bp, Homo sapiens
aaatgtgaattaagt

SEQ ID NO: 1443452 - DNA, 15 bp, Homo sapiens
aatgtgaattaagta

SEQ ID NO: 1443453 - DNA, 15 bp, Homo sapiens
atgtgaattaagtat

SEQ ID NO: 1443454 - DNA, 15 bp, Homo sapiens
tgtgaattaagtatt

SEQ ID NO: 1443455 - DNA, 15 bp, Homo sapiens
gtgaattaagtattt

SEQ ID NO: 1443456 - DNA, 15 bp, Homo sapiens
tgaattaagtatttt

SEQ ID NO: 1443457 - DNA, 15 bp, Homo sapiens
gaattaagtatttta

SEQ ID NO: 1443458 - DNA, 15 bp, Homo sapiens
aattaagtattttag

SEQ ID NO: 1443459 - DNA, 15 bp, Homo sapiens
attaagtattttagt

SEQ ID NO: 1443460 - DNA, 15 bp, Homo sapiens
ttaagtattttagtg

SEQ ID NO: 1443461 - DNA, 15 bp, Homo sapiens
taagtattttagtgt

SEQ ID NO: 1443462 - DNA, 15 bp, Homo sapiens
aagtattttagtgta

SEQ ID NO: 1443463 - DNA, 15 bp, Homo sapiens
agtattttagtgtat

SEQ ID NO: 1443464 - DNA, 15 bp, Homo sapiens
gtattttagtgtata

SEQ ID NO: 1443465 - DNA, 15 bp, Homo sapiens
tattttagtgtataa

SEQ ID NO: 1443466 - DNA, 15 bp, Homo sapiens
attttagtgtataaa

SEQ ID NO: 1443467 - DNA, 15 bp, Homo sapiens
ttttagtgtataaaa

SEQ ID NO: 1443468 - DNA, 15 bp, Homo sapiens
tttagtgtataaaac

SEQ ID NO: 1443469 - DNA, 15 bp, Homo sapiens
ttagtgtataaaaca

SEQ ID NO: 1443470 - DNA, 15 bp, Homo sapiens
tagtgtataaaacat

SEQ ID NO: 1443471 - DNA, 15 bp, Homo sapiens
agtgtataaaacatt

SEQ ID NO: 1443472 - DNA, 15 bp, Homo sapiens
gtgtataaaacattg

SEQ ID NO: 1443473 - DNA, 15 bp, Homo sapiens
tgtataaaacattgc

SEQ ID NO: 1443474 - DNA, 15 bp, Homo sapiens
gtataaaacattgct

SEQ ID NO: 1443475 - DNA, 15 bp, Homo sapiens
tataaaacattgcta

SEQ ID NO: 1443476 - DNA, 15 bp, Homo sapiens
ataaaacattgctag

SEQ ID NO: 1443477 - DNA, 15 bp, Homo sapiens
taaaacattgctagt

SEQ ID NO: 1443478 - DNA, 15 bp, Homo sapiens
aaaacattgctagtt

SEQ ID NO: 1443479 - DNA, 15 bp, Homo sapiens
aaacattgctagttt

SEQ ID NO: 1443480 - DNA, 15 bp, Homo sapiens
aacattgctagtttc

SEQ ID NO: 1443481 - DNA, 15 bp, Homo sapiens
acattgctagtttct

SEQ ID NO: 1443482 - DNA, 15 bp, Homo sapiens
cattgctagtttcta

SEQ ID NO: 1443483 - DNA, 15 bp, Homo sapiens
attgctagtttctac

SEQ ID NO: 1443484 - DNA, 15 bp, Homo sapiens
ttgctagtttctact

SEQ ID NO: 1443485 - DNA, 15 bp, Homo sapiens
tgctagtttctactt

SEQ ID NO: 1443486 - DNA, 15 bp, Homo sapiens
gctagtttctactta

SEQ ID NO: 1443487 - DNA, 15 bp, Homo sapiens
ctagtttctacttaa

SEQ ID NO: 1443488 - DNA, 15 bp, Homo sapiens
tagtttctacttaaa

SEQ ID NO: 1443489 - DNA, 15 bp, Homo sapiens
agtttctacttaaag

SEQ ID NO: 1443490 - DNA, 15 bp, Homo sapiens
gtttctacttaaagt

SEQ ID NO: 1443491 - DNA, 15 bp, Homo sapiens
tttctacttaaagtt

SEQ ID NO: 1443492 - DNA, 15 bp, Homo sapiens
ttctacttaaagttt

SEQ ID NO: 1443493 - DNA, 15 bp, Homo sapiens
tctacttaaagtttc

SEQ ID NO: 1443494 - DNA, 15 bp, Homo sapiens
ctacttaaagtttct

SEQ ID NO: 1443495 - DNA, 15 bp, Homo sapiens
tacttaaagtttcta

SEQ ID NO: 1443496 - DNA, 15 bp, Homo sapiens
acttaaagtttctaa

SEQ ID NO: 1443497 - DNA, 15 bp, Homo sapiens
cttaaagtttctaaa

SEQ ID NO: 1443498 - DNA, 15 bp, Homo sapiens
ttaaagtttctaaaa

SEQ ID NO: 1443499 - DNA, 15 bp, Homo sapiens
taaagtttctaaaag

SEQ ID NO: 1443500 - DNA, 15 bp, Homo sapiens
aaagtttctaaaagg

SEQ ID NO: 1443501 - DNA, 15 bp, Homo sapiens
aagtttctaaaaggg

SEQ ID NO: 1443502 - DNA, 15 bp, Homo sapiens
agtttctaaaagggt

SEQ ID NO: 1443503 - DNA, 15 bp, Homo sapiens
gtttctaaaagggtg

SEQ ID NO: 1443504 - DNA, 15 bp, Homo sapiens
tttctaaaagggtgt

SEQ ID NO: 1443505 - DNA, 15 bp, Homo sapiens
ttctaaaagggtgtg

SEQ ID NO: 1443506 - DNA, 15 bp, Homo sapiens
tctaaaagggtgtgt

SEQ ID NO: 1443507 - DNA, 15 bp, Homo sapiens
ctaaaagggtgtgta

SEQ ID NO: 1443508 - DNA, 15 bp, Homo sapiens
taaaagggtgtgtag

SEQ ID NO: 1443509 - DNA, 15 bp, Homo sapiens
aaaagggtgtgtagg

SEQ ID NO: 1443510 - DNA, 15 bp, Homo sapiens
aaagggtgtgtaggg

SEQ ID NO: 1443511 - DNA, 15 bp, Homo sapiens
aagggtgtgtagggg

SEQ ID NO: 1443512 - DNA, 15 bp, Homo sapiens
agggtgtgtagggga

SEQ ID NO: 1443513 - DNA, 15 bp, Homo sapiens
gggtgtgtaggggaa

SEQ ID NO: 1443514 - DNA, 15 bp, Homo sapiens
ggtgtgtaggggaaa

SEQ ID NO: 1443515 - DNA, 15 bp, Homo sapiens
gtgtgtaggggaaat

SEQ ID NO: 1443516 - DNA, 15 bp, Homo sapiens
tgtgtaggggaaata

SEQ ID NO: 1443517 - DNA, 15 bp, Homo sapiens
gtgtaggggaaatag

SEQ ID NO: 1443518 - DNA, 15 bp, Homo sapiens
tgtaggggaaataga

SEQ ID NO: 1443519 - DNA, 15 bp, Homo sapiens
gtaggggaaatagaa

SEQ ID NO: 1443520 - DNA, 15 bp, Homo sapiens
taggggaaatagaat

SEQ ID NO: 1443521 - DNA, 15 bp, Homo sapiens
aggggaaatagaatg

SEQ ID NO: 1443522 - DNA, 15 bp, Homo sapiens
ggggaaatagaatga

SEQ ID NO: 1443523 - DNA, 15 bp, Homo sapiens
gggaaatagaatgag

SEQ ID NO: 1443524 - DNA, 15 bp, Homo sapiens
ggaaatagaatgagt

SEQ ID NO: 1443525 - DNA, 15 bp, Homo sapiens
gaaatagaatgagta

SEQ ID NO: 1443526 - DNA, 15 bp, Homo sapiens
aaatagaatgagtat

SEQ ID NO: 1443527 - DNA, 15 bp, Homo sapiens
aatagaatgagtatg

SEQ ID NO: 1443528 - DNA, 15 bp, Homo sapiens
atagaatgagtatgt

SEQ ID NO: 1443529 - DNA, 15 bp, Homo sapiens
tagaatgagtatgtt

SEQ ID NO: 1443530 - DNA, 15 bp, Homo sapiens
agaatgagtatgttg

SEQ ID NO: 1443531 - DNA, 15 bp, Homo sapiens
gaatgagtatgttga

SEQ ID NO: 1443532 - DNA, 15 bp, Homo sapiens
aatgagtatgttgaa

SEQ ID NO: 1443533 - DNA, 15 bp, Homo sapiens
atgagtatgttgaaa

SEQ ID NO: 1443534 - DNA, 15 bp, Homo sapiens
tgagtatgttgaaaa

SEQ ID NO: 1443535 - DNA, 15 bp, Homo sapiens
gagtatgttgaaaag

SEQ ID NO: 1443536 - DNA, 15 bp, Homo sapiens
agtatgttgaaaagt

SEQ ID NO: 1443537 - DNA, 15 bp, Homo sapiens
gtatgttgaaaagta

SEQ ID NO: 1443538 - DNA, 15 bp, Homo sapiens
tatgttgaaaagtaa

SEQ ID NO: 1443539 - DNA, 15 bp, Homo sapiens
atgttgaaaagtaac

SEQ ID NO: 1443540 - DNA, 15 bp, Homo sapiens
tgttgaaaagtaaca

SEQ ID NO: 1443541 - DNA, 15 bp, Homo sapiens
gttgaaaagtaacat

SEQ ID NO: 1443542 - DNA, 15 bp, Homo sapiens
ttgaaaagtaacata

SEQ ID NO: 1443543 - DNA, 15 bp, Homo sapiens
tgaaaagtaacataa

SEQ ID NO: 1443544 - DNA, 15 bp, Homo sapiens
gaaaagtaacataag

SEQ ID NO: 1443545 - DNA, 15 bp, Homo sapiens
aaaagtaacataagg

SEQ ID NO: 1443546 - DNA, 15 bp, Homo sapiens
aaagtaacataagga

SEQ ID NO: 1443547 - DNA, 15 bp, Homo sapiens
aagtaacataaggaa

SEQ ID NO: 1443548 - DNA, 15 bp, Homo sapiens
agtaacataaggaaa

SEQ ID NO: 1443549 - DNA, 15 bp, Homo sapiens
gtaacataaggaaat

SEQ ID NO: 1443550 - DNA, 15 bp, Homo sapiens
taacataaggaaata

SEQ ID NO: 1443551 - DNA, 15 bp, Homo sapiens
aacataaggaaatat

SEQ ID NO: 1443552 - DNA, 15 bp, Homo sapiens
acataaggaaatata

SEQ ID NO: 1443553 - DNA, 15 bp, Homo sapiens
cataaggaaatatat

SEQ ID NO: 1443554 - DNA, 15 bp, Homo sapiens
ataaggaaatatatc

SEQ ID NO: 1443555 - DNA, 15 bp, Homo sapiens
taaggaaatatatct

SEQ ID NO: 1443556 - DNA, 15 bp, Homo sapiens
aaggaaatatatctt

SEQ ID NO: 1443557 - DNA, 15 bp, Homo sapiens
aggaaatatatcttg

SEQ ID NO: 1443558 - DNA, 15 bp, Homo sapiens
ggaaatatatcttga

SEQ ID NO: 1443559 - DNA, 15 bp, Homo sapiens
gaaatatatcttgag

SEQ ID NO: 1443560 - DNA, 15 bp, Homo sapiens
aaatatatcttgagg

SEQ ID NO: 1443561 - DNA, 15 bp, Homo sapiens
aatatatcttgaggt

SEQ ID NO: 1443562 - DNA, 15 bp, Homo sapiens
atatatcttgaggtc

SEQ ID NO: 1443563 - DNA, 15 bp, Homo sapiens
tatatcttgaggtcc

SEQ ID NO: 1443564 - DNA, 15 bp, Homo sapiens
atatcttgaggtcca

SEQ ID NO: 1443565 - DNA, 15 bp, Homo sapiens
tatcttgaggtccaa

SEQ ID NO: 1443566 - DNA, 15 bp, Homo sapiens
atcttgaggtccaaa

SEQ ID NO: 1443567 - DNA, 15 bp, Homo sapiens
tcttgaggtccaaat

SEQ ID NO: 1443568 - DNA, 15 bp, Homo sapiens
cttgaggtccaaatg

SEQ ID NO: 1443569 - DNA, 15 bp, Homo sapiens
ttgaggtccaaatga

SEQ ID NO: 1443570 - DNA, 15 bp, Homo sapiens
tgaggtccaaatgac

SEQ ID NO: 1443571 - DNA, 15 bp, Homo sapiens
gaggtccaaatgaca

SEQ ID NO: 1443572 - DNA, 15 bp, Homo sapiens
aggtccaaatgacaa

SEQ ID NO: 1443573 - DNA, 15 bp, Homo sapiens
ggtccaaatgacaaa

SEQ ID NO: 1443574 - DNA, 15 bp, Homo sapiens
gtccaaatgacaaat

SEQ ID NO: 1443575 - DNA, 15 bp, Homo sapiens
tccaaatgacaaatg

SEQ ID NO: 1443576 - DNA, 15 bp, Homo sapiens
ccaaatgacaaatgc

SEQ ID NO: 1443577 - DNA, 15 bp, Homo sapiens
caaatgacaaatgca

SEQ ID NO: 1443578 - DNA, 15 bp, Homo sapiens
aaatgacaaatgcag

SEQ ID NO: 1443579 - DNA, 15 bp, Homo sapiens
aatgacaaatgcaga

SEQ ID NO: 1443580 - DNA, 15 bp, Homo sapiens
atgacaaatgcagac

SEQ ID NO: 1443581 - DNA, 15 bp, Homo sapiens
tgacaaatgcagaca

SEQ ID NO: 1443582 - DNA, 15 bp, Homo sapiens
gacaaatgcagacaa

SEQ ID NO: 1443583 - DNA, 15 bp, Homo sapiens
acaaatgcagacaat

SEQ ID NO: 1443584 - DNA, 15 bp, Homo sapiens
caaatgcagacaatg

SEQ ID NO: 1443585 - DNA, 15 bp, Homo sapiens
aaatgcagacaatga

SEQ ID NO: 1443586 - DNA, 15 bp, Homo sapiens
aatgcagacaatgac

SEQ ID NO: 1443587 - DNA, 15 bp, Homo sapiens
atgcagacaatgact

SEQ ID NO: 1443588 - DNA, 15 bp, Homo sapiens
tgcagacaatgactg

SEQ ID NO: 1443589 - DNA, 15 bp, Homo sapiens
gcagacaatgactgc

SEQ ID NO: 1443590 - DNA, 15 bp, Homo sapiens
cagacaatgactgct

SEQ ID NO: 1443591 - DNA, 15 bp, Homo sapiens
agacaatgactgcta

SEQ ID NO: 1443592 - DNA, 15 bp, Homo sapiens
gacaatgactgctat

SEQ ID NO: 1443593 - DNA, 15 bp, Homo sapiens
acaatgactgctata

SEQ ID NO: 1443594 - DNA, 15 bp, Homo sapiens
caatgactgctatag

SEQ ID NO: 1443595 - DNA, 15 bp, Homo sapiens
aatgactgctatagg

SEQ ID NO: 1443596 - DNA, 15 bp, Homo sapiens
atgactgctataggg

SEQ ID NO: 1443597 - DNA, 15 bp, Homo sapiens
tgactgctataggga

SEQ ID NO: 1443598 - DNA, 15 bp, Homo sapiens
gactgctatagggat

SEQ ID NO: 1443599 - DNA, 15 bp, Homo sapiens
actgctatagggatt

SEQ ID NO: 1443600 - DNA, 15 bp, Homo sapiens
ctgctatagggattt

SEQ ID NO: 1443601 - DNA, 15 bp, Homo sapiens
tgctatagggatttg

SEQ ID NO: 1443602 - DNA, 15 bp, Homo sapiens
gctatagggatttgt

SEQ ID NO: 1443603 - DNA, 15 bp, Homo sapiens
ctatagggatttgtt

SEQ ID NO: 1443604 - DNA, 15 bp, Homo sapiens
tatagggatttgtta

SEQ ID NO: 1443605 - DNA, 15 bp, Homo sapiens
atagggatttgttaa

SEQ ID NO: 1443606 - DNA, 15 bp, Homo sapiens
tagggatttgttaag

SEQ ID NO: 1443607 - DNA, 15 bp, Homo sapiens
agggatttgttaaga

SEQ ID NO: 1443608 - DNA, 15 bp, Homo sapiens
gggatttgttaagag

SEQ ID NO: 1443609 - DNA, 15 bp, Homo sapiens
ggatttgttaagagg

SEQ ID NO: 1443610 - DNA, 15 bp, Homo sapiens
gatttgttaagaggg

SEQ ID NO: 1443611 - DNA, 15 bp, Homo sapiens
atttgttaagagggg

SEQ ID NO: 1443612 - DNA, 15 bp, Homo sapiens
tttgttaagagggga

SEQ ID NO: 1443613 - DNA, 15 bp, Homo sapiens
ttgttaagaggggaa

SEQ ID NO: 1443614 - DNA, 15 bp, Homo sapiens
tgttaagaggggaaa

SEQ ID NO: 1443615 - DNA, 15 bp, Homo sapiens
gttaagaggggaaat

SEQ ID NO: 1443616 - DNA, 15 bp, Homo sapiens
ttaagaggggaaatg

SEQ ID NO: 1443617 - DNA, 15 bp, Homo sapiens
taagaggggaaatga

SEQ ID NO: 1443618 - DNA, 15 bp, Homo sapiens
aagaggggaaatgat

SEQ ID NO: 1443619 - DNA, 15 bp, Homo sapiens
agaggggaaatgatt

SEQ ID NO: 1443620 - DNA, 15 bp, Homo sapiens
gaggggaaatgattt

SEQ ID NO: 1443621 - DNA, 15 bp, Homo sapiens
aggggaaatgattta

SEQ ID NO: 1443622 - DNA, 15 bp, Homo sapiens
ggggaaatgatttaa

SEQ ID NO: 1443623 - DNA, 15 bp, Homo sapiens
gggaaatgatttaag

SEQ ID NO: 1443624 - DNA, 15 bp, Homo sapiens
ggaaatgatttaaga

SEQ ID NO: 1443625 - DNA, 15 bp, Homo sapiens
gaaatgatttaagag

SEQ ID NO: 1443626 - DNA, 15 bp, Homo sapiens
aaatgatttaagaga

SEQ ID NO: 1443627 - DNA, 15 bp, Homo sapiens
aatgatttaagagat

SEQ ID NO: 1443628 - DNA, 15 bp, Homo sapiens
atgatttaagagatg

SEQ ID NO: 1443629 - DNA, 15 bp, Homo sapiens
tgatttaagagatgt

SEQ ID NO: 1443630 - DNA, 15 bp, Homo sapiens
gatttaagagatgtc

SEQ ID NO: 1443631 - DNA, 15 bp, Homo sapiens
atttaagagatgtca

SEQ ID NO: 1443632 - DNA, 15 bp, Homo sapiens
tttaagagatgtcag

SEQ ID NO: 1443633 - DNA, 15 bp, Homo sapiens
ttaagagatgtcaga

SEQ ID NO: 1443634 - DNA, 15 bp, Homo sapiens
taagagatgtcagaa

SEQ ID NO: 1443635 - DNA, 15 bp, Homo sapiens
aagagatgtcagaag

SEQ ID NO: 1443636 - DNA, 15 bp, Homo sapiens
agagatgtcagaaga

SEQ ID NO: 1443637 - DNA, 15 bp, Homo sapiens
gagatgtcagaagac

SEQ ID NO: 1443638 - DNA, 15 bp, Homo sapiens
agatgtcagaagact

SEQ ID NO: 1443639 - DNA, 15 bp, Homo sapiens
gatgtcagaagactt

SEQ ID NO: 1443640 - DNA, 15 bp, Homo sapiens
atgtcagaagacttc

SEQ ID NO: 1443641 - DNA, 15 bp, Homo sapiens
tgtcagaagacttca

SEQ ID NO: 1443642 - DNA, 15 bp, Homo sapiens
gtcagaagacttcac

SEQ ID NO: 1443643 - DNA, 15 bp, Homo sapiens
tcagaagacttcaca

SEQ ID NO: 1443644 - DNA, 15 bp, Homo sapiens
cagaagacttcacaa

SEQ ID NO: 1443645 - DNA, 15 bp, Homo sapiens
agaagacttcacaaa

SEQ ID NO: 1443646 - DNA, 15 bp, Homo sapiens
gaagacttcacaaag

SEQ ID NO: 1443647 - DNA, 15 bp, Homo sapiens
aagacttcacaaagg

SEQ ID NO: 1443648 - DNA, 15 bp, Homo sapiens
agacttcacaaagga

SEQ ID NO: 1443649 - DNA, 15 bp, Homo sapiens
gacttcacaaaggat

SEQ ID NO: 1443650 - DNA, 15 bp, Homo sapiens
acttcacaaaggatc

SEQ ID NO: 1443651 - DNA, 15 bp, Homo sapiens
cttcacaaaggatca

SEQ ID NO: 1443652 - DNA, 15 bp, Homo sapiens
ttcacaaaggatcaa

SEQ ID NO: 1443653 - DNA, 15 bp, Homo sapiens
tcacaaaggatcaat

SEQ ID NO: 1443654 - DNA, 15 bp, Homo sapiens
cacaaaggatcaata

SEQ ID NO: 1443655 - DNA, 15 bp, Homo sapiens
acaaaggatcaatac

SEQ ID NO: 1443656 - DNA, 15 bp, Homo sapiens
caaaggatcaatact

SEQ ID NO: 1443657 - DNA, 15 bp, Homo sapiens
aaaggatcaatactg

SEQ ID NO: 1443658 - DNA, 15 bp, Homo sapiens
aaggatcaatactga

SEQ ID NO: 1443659 - DNA, 15 bp, Homo sapiens
aggatcaatactgag

SEQ ID NO: 1443660 - DNA, 15 bp, Homo sapiens
ggatcaatactgagg

SEQ ID NO: 1443661 - DNA, 15 bp, Homo sapiens
gatcaatactgagga

SEQ ID NO: 1443662 - DNA, 15 bp, Homo sapiens
atcaatactgaggag

SEQ ID NO: 1443663 - DNA, 15 bp, Homo sapiens
tcaatactgaggagt

SEQ ID NO: 1443664 - DNA, 15 bp, Homo sapiens
caatactgaggagta

SEQ ID NO: 1443665 - DNA, 15 bp, Homo sapiens
aatactgaggagtag

SEQ ID NO: 1443666 - DNA, 15 bp, Homo sapiens
atactgaggagtagt

SEQ ID NO: 1443667 - DNA, 15 bp, Homo sapiens
tactgaggagtagtg

SEQ ID NO: 1443668 - DNA, 15 bp, Homo sapiens
actgaggagtagtgt

SEQ ID NO: 1443669 - DNA, 15 bp, Homo sapiens
ctgaggagtagtgtt

SEQ ID NO: 1443670 - DNA, 15 bp, Homo sapiens
tgaggagtagtgtta

SEQ ID NO: 1443671 - DNA, 15 bp, Homo sapiens
gaggagtagtgttag

SEQ ID NO: 1443672 - DNA, 15 bp, Homo sapiens
aggagtagtgttaga

SEQ ID NO: 1443673 - DNA, 15 bp, Homo sapiens
ggagtagtgttagat

SEQ ID NO: 1443674 - DNA, 15 bp, Homo sapiens
gagtagtgttagata

SEQ ID NO: 1443675 - DNA, 15 bp, Homo sapiens
agtagtgttagataa

SEQ ID NO: 1443676 - DNA, 15 bp, Homo sapiens
gtagtgttagataag

SEQ ID NO: 1443677 - DNA, 15 bp, Homo sapiens
tagtgttagataagt

SEQ ID NO: 1443678 - DNA, 15 bp, Homo sapiens
agtgttagataagtg

SEQ ID NO: 1443679 - DNA, 15 bp, Homo sapiens
gtgttagataagtgg

SEQ ID NO: 1443680 - DNA, 15 bp, Homo sapiens
tgttagataagtgga

SEQ ID NO: 1443681 - DNA, 15 bp, Homo sapiens
gttagataagtggaa

SEQ ID NO: 1443682 - DNA, 15 bp, Homo sapiens
ttagataagtggaag

SEQ ID NO: 1443683 - DNA, 15 bp, Homo sapiens
tagataagtggaagg

SEQ ID NO: 1443684 - DNA, 15 bp, Homo sapiens
agataagtggaaggc

SEQ ID NO: 1443685 - DNA, 15 bp, Homo sapiens
gataagtggaaggca

SEQ ID NO: 1443686 - DNA, 15 bp, Homo sapiens
ataagtggaaggcaa

SEQ ID NO: 1443687 - DNA, 15 bp, Homo sapiens
taagtggaaggcaat

SEQ ID NO: 1443688 - DNA, 15 bp, Homo sapiens
aagtggaaggcaatg

SEQ ID NO: 1443689 - DNA, 15 bp, Homo sapiens
agtggaaggcaatgc

SEQ ID NO: 1443690 - DNA, 15 bp, Homo sapiens
gtggaaggcaatgca

SEQ ID NO: 1443691 - DNA, 15 bp, Homo sapiens
tggaaggcaatgcag

SEQ ID NO: 1443692 - DNA, 15 bp, Homo sapiens
ggaaggcaatgcagt

SEQ ID NO: 1443693 - DNA, 15 bp, Homo sapiens
gaaggcaatgcagtg

SEQ ID NO: 1443694 - DNA, 15 bp, Homo sapiens
aaggcaatgcagtgg

SEQ ID NO: 1443695 - DNA, 15 bp, Homo sapiens
aggcaatgcagtggt

SEQ ID NO: 1443696 - DNA, 15 bp, Homo sapiens
ggcaatgcagtggta

SEQ ID NO: 1443697 - DNA, 15 bp, Homo sapiens
gcaatgcagtggtaa

SEQ ID NO: 1443698 - DNA, 15 bp, Homo sapiens
caatgcagtggtaag

SEQ ID NO: 1443699 - DNA, 15 bp, Homo sapiens
aatgcagtggtaaga

SEQ ID NO: 1443700 - DNA, 15 bp, Homo sapiens
atgcagtggtaagat

SEQ ID NO: 1443701 - DNA, 15 bp, Homo sapiens
tgcagtggtaagata

SEQ ID NO: 1443702 - DNA, 15 bp, Homo sapiens
gcagtggtaagatag

SEQ ID NO: 1443703 - DNA, 15 bp, Homo sapiens
cagtggtaagatagt

SEQ ID NO: 1443704 - DNA, 15 bp, Homo sapiens
agtggtaagatagta

SEQ ID NO: 1443705 - DNA, 15 bp, Homo sapiens
gtggtaagatagtaa

SEQ ID NO: 1443706 - DNA, 15 bp, Homo sapiens
tggtaagatagtaag

SEQ ID NO: 1443707 - DNA, 15 bp, Homo sapiens
ggtaagatagtaagg

SEQ ID NO: 1443708 - DNA, 15 bp, Homo sapiens
gtaagatagtaaggg

SEQ ID NO: 1443709 - DNA, 15 bp, Homo sapiens
taagatagtaaggga

SEQ ID NO: 1443710 - DNA, 15 bp, Homo sapiens
aagatagtaagggaa

SEQ ID NO: 1443711 - DNA, 15 bp, Homo sapiens
agatagtaagggaat

SEQ ID NO: 1443712 - DNA, 15 bp, Homo sapiens
gatagtaagggaatt

SEQ ID NO: 1443713 - DNA, 15 bp, Homo sapiens
atagtaagggaattc

SEQ ID NO: 1443714 - DNA, 15 bp, Homo sapiens
tagtaagggaattct

SEQ ID NO: 1443715 - DNA, 15 bp, Homo sapiens
agtaagggaattcta

SEQ ID NO: 1443716 - DNA, 15 bp, Homo sapiens
gtaagggaattctag

SEQ ID NO: 1443717 - DNA, 15 bp, Homo sapiens
taagggaattctaga

SEQ ID NO: 1443718 - DNA, 15 bp, Homo sapiens
aagggaattctagag

SEQ ID NO: 1443719 - DNA, 15 bp, Homo sapiens
agggaattctagagc

SEQ ID NO: 1443720 - DNA, 15 bp, Homo sapiens
gggaattctagagct

SEQ ID NO: 1443721 - DNA, 15 bp, Homo sapiens
ggaattctagagctg

SEQ ID NO: 1443722 - DNA, 15 bp, Homo sapiens
gaattctagagctgt

SEQ ID NO: 1443723 - DNA, 15 bp, Homo sapiens
aattctagagctgtt

SEQ ID NO: 1443724 - DNA, 15 bp, Homo sapiens
attctagagctgttg

SEQ ID NO: 1443725 - DNA, 15 bp, Homo sapiens
ttctagagctgttgg

SEQ ID NO: 1443726 - DNA, 15 bp, Homo sapiens
tctagagctgttggt

SEQ ID NO: 1443727 - DNA, 15 bp, Homo sapiens
ctagagctgttggtt

SEQ ID NO: 1443728 - DNA, 15 bp, Homo sapiens
tagagctgttggtta

SEQ ID NO: 1443729 - DNA, 15 bp, Homo sapiens
agagctgttggttac

SEQ ID NO: 1443730 - DNA, 15 bp, Homo sapiens
gagctgttggttacc

SEQ ID NO: 1443731 - DNA, 15 bp, Homo sapiens
agctgttggttacca

SEQ ID NO: 1443732 - DNA, 15 bp, Homo sapiens
gctgttggttaccat

SEQ ID NO: 1443733 - DNA, 15 bp, Homo sapiens
ctgttggttaccata

SEQ ID NO: 1443734 - DNA, 15 bp, Homo sapiens
tgttggttaccataa

SEQ ID NO: 1443735 - DNA, 15 bp, Homo sapiens
gttggttaccataaa

SEQ ID NO: 1443736 - DNA, 15 bp, Homo sapiens
ttggttaccataaat

SEQ ID NO: 1443737 - DNA, 15 bp, Homo sapiens
tggttaccataaata

SEQ ID NO: 1443738 - DNA, 15 bp, Homo sapiens
ggttaccataaataa

SEQ ID NO: 1443739 - DNA, 15 bp, Homo sapiens
gttaccataaataaa

SEQ ID NO: 1443740 - DNA, 15 bp, Homo sapiens
ttaccataaataaat

SEQ ID NO: 1443741 - DNA, 15 bp, Homo sapiens
taccataaataaata

SEQ ID NO: 1443742 - DNA, 15 bp, Homo sapiens
accataaataaatac

SEQ ID NO: 1443743 - DNA, 15 bp, Homo sapiens
ccataaataaatact

SEQ ID NO: 1443744 - DNA, 15 bp, Homo sapiens
cataaataaatactg

SEQ ID NO: 1443745 - DNA, 15 bp, Homo sapiens
ataaataaatactga

SEQ ID NO: 1443746 - DNA, 15 bp, Homo sapiens
taaataaatactgag

SEQ ID NO: 1443747 - DNA, 15 bp, Homo sapiens
aaataaatactgaga

SEQ ID NO: 1443748 - DNA, 15 bp, Homo sapiens
aataaatactgagaa

SEQ ID NO: 1443749 - DNA, 15 bp, Homo sapiens
ataaatactgagaac

SEQ ID NO: 1443750 - DNA, 15 bp, Homo sapiens
taaatactgagaaca

SEQ ID NO: 1443751 - DNA, 15 bp, Homo sapiens
aaatactgagaacag

SEQ ID NO: 1443752 - DNA, 15 bp, Homo sapiens
aatactgagaacagg

SEQ ID NO: 1443753 - DNA, 15 bp, Homo sapiens
atactgagaacagga

SEQ ID NO: 1443754 - DNA, 15 bp, Homo sapiens
tactgagaacaggaa

SEQ ID NO: 1443755 - DNA, 15 bp, Homo sapiens
actgagaacaggaaa

SEQ ID NO: 1443756 - DNA, 15 bp, Homo sapiens
ctgagaacaggaaat

SEQ ID NO: 1443757 - DNA, 15 bp, Homo sapiens
tgagaacaggaaata

SEQ ID NO: 1443758 - DNA, 15 bp, Homo sapiens
gagaacaggaaatat

SEQ ID NO: 1443759 - DNA, 15 bp, Homo sapiens
agaacaggaaatatg

SEQ ID NO: 1443760 - DNA, 15 bp, Homo sapiens
gaacaggaaatatgt

SEQ ID NO: 1443761 - DNA, 15 bp, Homo sapiens
aacaggaaatatgtt

SEQ ID NO: 1443762 - DNA, 15 bp, Homo sapiens
acaggaaatatgttt

SEQ ID NO: 1443763 - DNA, 15 bp, Homo sapiens
caggaaatatgttta

SEQ ID NO: 1443764 - DNA, 15 bp, Homo sapiens
aggaaatatgtttat

SEQ ID NO: 1443765 - DNA, 15 bp, Homo sapiens
ggaaatatgtttatt

SEQ ID NO: 1443766 - DNA, 15 bp, Homo sapiens
gaaatatgtttattc

SEQ ID NO: 1443767 - DNA, 15 bp, Homo sapiens
aaatatgtttattct

SEQ ID NO: 1443768 - DNA, 15 bp, Homo sapiens
aatatgtttattctt

SEQ ID NO: 1443769 - DNA, 15 bp, Homo sapiens
atatgtttattcttt

SEQ ID NO: 1443770 - DNA, 15 bp, Homo sapiens
tatgtttattcttta

SEQ ID NO: 1443771 - DNA, 15 bp, Homo sapiens
atgtttattctttat

SEQ ID NO: 1443772 - DNA, 15 bp, Homo sapiens
tgtttattctttata

SEQ ID NO: 1443773 - DNA, 15 bp, Homo sapiens
gtttattctttatat

SEQ ID NO: 1443774 - DNA, 15 bp, Homo sapiens
tttattctttatatt

SEQ ID NO: 1443775 - DNA, 15 bp, Homo sapiens
ttattctttatattt

SEQ ID NO: 1443776 - DNA, 15 bp, Homo sapiens
tattctttatatttg

SEQ ID NO: 1443777 - DNA, 15 bp, Homo sapiens
attctttatatttga

SEQ ID NO: 1443778 - DNA, 15 bp, Homo sapiens
ttctttatatttgag

SEQ ID NO: 1443779 - DNA, 15 bp, Homo sapiens
tctttatatttgagg

SEQ ID NO: 1443780 - DNA, 15 bp, Homo sapiens
ctttatatttgagga

SEQ ID NO: 1443781 - DNA, 15 bp, Homo sapiens
tttatatttgaggaa

SEQ ID NO: 1443782 - DNA, 15 bp, Homo sapiens
ttatatttgaggaaa

SEQ ID NO: 1443783 - DNA, 15 bp, Homo sapiens
tatatttgaggaaac

SEQ ID NO: 1443784 - DNA, 15 bp, Homo sapiens
atatttgaggaaaca

SEQ ID NO: 1443785 - DNA, 15 bp, Homo sapiens
tatttgaggaaacaa

SEQ ID NO: 1443786 - DNA, 15 bp, Homo sapiens
atttgaggaaacaag

SEQ ID NO: 1443787 - DNA, 15 bp, Homo sapiens
tttgaggaaacaagg

SEQ ID NO: 1443788 - DNA, 15 bp, Homo sapiens
ttgaggaaacaaggt

SEQ ID NO: 1443789 - DNA, 15 bp, Homo sapiens
tgaggaaacaaggtg

SEQ ID NO: 1443790 - DNA, 15 bp, Homo sapiens
gaggaaacaaggtgc

SEQ ID NO: 1443791 - DNA, 15 bp, Homo sapiens
aggaaacaaggtgca

SEQ ID NO: 1443792 - DNA, 15 bp, Homo sapiens
ggaaacaaggtgcag

SEQ ID NO: 1443793 - DNA, 15 bp, Homo sapiens
gaaacaaggtgcagc

SEQ ID NO: 1443794 - DNA, 15 bp, Homo sapiens
aaacaaggtgcagca

SEQ ID NO: 1443795 - DNA, 15 bp, Homo sapiens
aacaaggtgcagcaa

SEQ ID NO: 1443796 - DNA, 15 bp, Homo sapiens
acaaggtgcagcaag

SEQ ID NO: 1443797 - DNA, 15 bp, Homo sapiens
caaggtgcagcaagt

SEQ ID NO: 1443798 - DNA, 15 bp, Homo sapiens
aaggtgcagcaagtt

SEQ ID NO: 1443799 - DNA, 15 bp, Homo sapiens
aggtgcagcaagttt

SEQ ID NO: 1443800 - DNA, 15 bp, Homo sapiens
ggtgcagcaagtttg

SEQ ID NO: 1443801 - DNA, 15 bp, Homo sapiens
gtgcagcaagtttgt

SEQ ID NO: 1443802 - DNA, 15 bp, Homo sapiens
tgcagcaagtttgta

SEQ ID NO: 1443803 - DNA, 15 bp, Homo sapiens
gcagcaagtttgtag

SEQ ID NO: 1443804 - DNA, 15 bp, Homo sapiens
cagcaagtttgtagc

SEQ ID NO: 1443805 - DNA, 15 bp, Homo sapiens
agcaagtttgtagca

SEQ ID NO: 1443806 - DNA, 15 bp, Homo sapiens
gcaagtttgtagcag

SEQ ID NO: 1443807 - DNA, 15 bp, Homo sapiens
caagtttgtagcaga

SEQ ID NO: 1443808 - DNA, 15 bp, Homo sapiens
aagtttgtagcagac

SEQ ID NO: 1443809 - DNA, 15 bp, Homo sapiens
agtttgtagcagact

SEQ ID NO: 1443810 - DNA, 15 bp, Homo sapiens
gtttgtagcagactg

SEQ ID NO: 1443811 - DNA, 15 bp, Homo sapiens
tttgtagcagactgt

SEQ ID NO: 1443812 - DNA, 15 bp, Homo sapiens
ttgtagcagactgta

SEQ ID NO: 1443813 - DNA, 15 bp, Homo sapiens
tgtagcagactgtag

SEQ ID NO: 1443814 - DNA, 15 bp, Homo sapiens
gtagcagactgtaga

SEQ ID NO: 1443815 - DNA, 15 bp, Homo sapiens
tagcagactgtagag

SEQ ID NO: 1443816 - DNA, 15 bp, Homo sapiens
agcagactgtagaga

SEQ ID NO: 1443817 - DNA, 15 bp, Homo sapiens
gcagactgtagagaa

SEQ ID NO: 1443818 - DNA, 15 bp, Homo sapiens
cagactgtagagaaa

SEQ ID NO: 1443819 - DNA, 15 bp, Homo sapiens
agactgtagagaaaa

SEQ ID NO: 1443820 - DNA, 15 bp, Homo sapiens
gactgtagagaaaac

SEQ ID NO: 1443821 - DNA, 15 bp, Homo sapiens
actgtagagaaaaca

SEQ ID NO: 1443822 - DNA, 15 bp, Homo sapiens
ctgtagagaaaacaa

SEQ ID NO: 1443823 - DNA, 15 bp, Homo sapiens
tgtagagaaaacaaa

SEQ ID NO: 1443824 - DNA, 15 bp, Homo sapiens
gtagagaaaacaaat

SEQ ID NO: 1443825 - DNA, 15 bp, Homo sapiens
tagagaaaacaaatc

SEQ ID NO: 1443826 - DNA, 15 bp, Homo sapiens
agagaaaacaaatct

SEQ ID NO: 1443827 - DNA, 15 bp, Homo sapiens
gagaaaacaaatctt

SEQ ID NO: 1443828 - DNA, 15 bp, Homo sapiens
agaaaacaaatcttg

SEQ ID NO: 1443829 - DNA, 15 bp, Homo sapiens
gaaaacaaatcttgg

SEQ ID NO: 1443830 - DNA, 15 bp, Homo sapiens
aaaacaaatcttggg

SEQ ID NO: 1443831 - DNA, 15 bp, Homo sapiens
aaacaaatcttgggt

SEQ ID NO: 1443832 - DNA, 15 bp, Homo sapiens
aacaaatcttgggta

SEQ ID NO: 1443833 - DNA, 15 bp, Homo sapiens
acaaatcttgggtaa

SEQ ID NO: 1443834 - DNA, 15 bp, Homo sapiens
caaatcttgggtaag

SEQ ID NO: 1443835 - DNA, 15 bp, Homo sapiens
aaatcttgggtaagt

SEQ ID NO: 1443836 - DNA, 15 bp, Homo sapiens
aatcttgggtaagta

SEQ ID NO: 1443837 - DNA, 15 bp, Homo sapiens
atcttgggtaagtac

SEQ ID NO: 1443838 - DNA, 15 bp, Homo sapiens
tcttgggtaagtact

SEQ ID NO: 1443839 - DNA, 15 bp, Homo sapiens
cttgggtaagtactt

SEQ ID NO: 1443840 - DNA, 15 bp, Homo sapiens
ttgggtaagtacttt

SEQ ID NO: 1443841 - DNA, 15 bp, Homo sapiens
tgggtaagtactttg

SEQ ID NO: 1443842 - DNA, 15 bp, Homo sapiens
gggtaagtactttga

SEQ ID NO: 1443843 - DNA, 15 bp, Homo sapiens
ggtaagtactttgag

SEQ ID NO: 1443844 - DNA, 15 bp, Homo sapiens
gtaagtactttgaga

SEQ ID NO: 1443845 - DNA, 15 bp, Homo sapiens
taagtactttgagat

SEQ ID NO: 1443846 - DNA, 15 bp, Homo sapiens
aagtactttgagata

SEQ ID NO: 1443847 - DNA, 15 bp, Homo sapiens
agtactttgagatag

SEQ ID NO: 1443848 - DNA, 15 bp, Homo sapiens
gtactttgagatagg

SEQ ID NO: 1443849 - DNA, 15 bp, Homo sapiens
tactttgagataggt

SEQ ID NO: 1443850 - DNA, 15 bp, Homo sapiens
actttgagataggtt

SEQ ID NO: 1443851 - DNA, 15 bp, Homo sapiens
ctttgagataggttg

SEQ ID NO: 1443852 - DNA, 15 bp, Homo sapiens
tttgagataggttgt

SEQ ID NO: 1443853 - DNA, 15 bp, Homo sapiens
ttgagataggttgtt

SEQ ID NO: 1443854 - DNA, 15 bp, Homo sapiens
tgagataggttgttg

SEQ ID NO: 1443855 - DNA, 15 bp, Homo sapiens
gagataggttgttga

SEQ ID NO: 1443856 - DNA, 15 bp, Homo sapiens
agataggttgttgag

SEQ ID NO: 1443857 - DNA, 15 bp, Homo sapiens
gataggttgttgagg

SEQ ID NO: 1443858 - DNA, 15 bp, Homo sapiens
ataggttgttgaggg

SEQ ID NO: 1443859 - DNA, 15 bp, Homo sapiens
taggttgttgagggc

SEQ ID NO: 1443860 - DNA, 15 bp, Homo sapiens
aggttgttgagggcc

SEQ ID NO: 1443861 - DNA, 15 bp, Homo sapiens
ggttgttgagggcct

SEQ ID NO: 1443862 - DNA, 15 bp, Homo sapiens
gttgttgagggcctt

SEQ ID NO: 1443863 - DNA, 15 bp, Homo sapiens
ttgttgagggcctta

SEQ ID NO: 1443864 - DNA, 15 bp, Homo sapiens
tgttgagggccttaa

SEQ ID NO: 1443865 - DNA, 15 bp, Homo sapiens
gttgagggccttaaa

SEQ ID NO: 1443866 - DNA, 15 bp, Homo sapiens
ttgagggccttaaag

SEQ ID NO: 1443867 - DNA, 15 bp, Homo sapiens
tgagggccttaaagg

SEQ ID NO: 1443868 - DNA, 15 bp, Homo sapiens
gagggccttaaaggt

SEQ ID NO: 1443869 - DNA, 15 bp, Homo sapiens
agggccttaaaggtg

SEQ ID NO: 1443870 - DNA, 15 bp, Homo sapiens
gggccttaaaggtgt

SEQ ID NO: 1443871 - DNA, 15 bp, Homo sapiens
ggccttaaaggtgta

SEQ ID NO: 1443872 - DNA, 15 bp, Homo sapiens
gccttaaaggtgtat

SEQ ID NO: 1443873 - DNA, 15 bp, Homo sapiens
ccttaaaggtgtatt

SEQ ID NO: 1443874 - DNA, 15 bp, Homo sapiens
cttaaaggtgtattt

SEQ ID NO: 1443875 - DNA, 15 bp, Homo sapiens
ttaaaggtgtatttt

SEQ ID NO: 1443876 - DNA, 15 bp, Homo sapiens
taaaggtgtatttta

SEQ ID NO: 1443877 - DNA, 15 bp, Homo sapiens
aaaggtgtattttat

SEQ ID NO: 1443878 - DNA, 15 bp, Homo sapiens
aaggtgtattttatg

SEQ ID NO: 1443879 - DNA, 15 bp, Homo sapiens
aggtgtattttatgc

SEQ ID NO: 1443880 - DNA, 15 bp, Homo sapiens
ggtgtattttatgct

SEQ ID NO: 1443881 - DNA, 15 bp, Homo sapiens
gtgtattttatgcta

SEQ ID NO: 1443882 - DNA, 15 bp, Homo sapiens
tgtattttatgctat

SEQ ID NO: 1443883 - DNA, 15 bp, Homo sapiens
gtattttatgctatc

SEQ ID NO: 1443884 - DNA, 15 bp, Homo sapiens
tattttatgctatca

SEQ ID NO: 1443885 - DNA, 15 bp, Homo sapiens
attttatgctatcag

SEQ ID NO: 1443886 - DNA, 15 bp, Homo sapiens
ttttatgctatcagc

SEQ ID NO: 1443887 - DNA, 15 bp, Homo sapiens
tttatgctatcagca

SEQ ID NO: 1443888 - DNA, 15 bp, Homo sapiens
ttatgctatcagcaa

SEQ ID NO: 1443889 - DNA, 15 bp, Homo sapiens
tatgctatcagcaat

SEQ ID NO: 1443890 - DNA, 15 bp, Homo sapiens
atgctatcagcaatt

SEQ ID NO: 1443891 - DNA, 15 bp, Homo sapiens
tgctatcagcaattg

SEQ ID NO: 1443892 - DNA, 15 bp, Homo sapiens
gctatcagcaattga

SEQ ID NO: 1443893 - DNA, 15 bp, Homo sapiens
ctatcagcaattgag

SEQ ID NO: 1443894 - DNA, 15 bp, Homo sapiens
tatcagcaattgaga

SEQ ID NO: 1443895 - DNA, 15 bp, Homo sapiens
atcagcaattgagaa

SEQ ID NO: 1443896 - DNA, 15 bp, Homo sapiens
tcagcaattgagaag

SEQ ID NO: 1443897 - DNA, 15 bp, Homo sapiens
cagcaattgagaagg

SEQ ID NO: 1443898 - DNA, 15 bp, Homo sapiens
agcaattgagaaggc

SEQ ID NO: 1443899 - DNA, 15 bp, Homo sapiens
gcaattgagaaggca

SEQ ID NO: 1443900 - DNA, 15 bp, Homo sapiens
caattgagaaggcag

SEQ ID NO: 1443901 - DNA, 15 bp, Homo sapiens
aattgagaaggcagt

SEQ ID NO: 1443902 - DNA, 15 bp, Homo sapiens
attgagaaggcagta

SEQ ID NO: 1443903 - DNA, 15 bp, Homo sapiens
ttgagaaggcagtaa

SEQ ID NO: 1443904 - DNA, 15 bp, Homo sapiens
tgagaaggcagtaaa

SEQ ID NO: 1443905 - DNA, 15 bp, Homo sapiens
gagaaggcagtaaag

SEQ ID NO: 1443906 - DNA, 15 bp, Homo sapiens
agaaggcagtaaagg

SEQ ID NO: 1443907 - DNA, 15 bp, Homo sapiens
gaaggcagtaaaggt

SEQ ID NO: 1443908 - DNA, 15 bp, Homo sapiens
aaggcagtaaaggtt

SEQ ID NO: 1443909 - DNA, 15 bp, Homo sapiens
aggcagtaaaggttt

SEQ ID NO: 1443910 - DNA, 15 bp, Homo sapiens
ggcagtaaaggtttt

SEQ ID NO: 1443911 - DNA, 15 bp, Homo sapiens
gcagtaaaggttttc

SEQ ID NO: 1443912 - DNA, 15 bp, Homo sapiens
cagtaaaggttttcg

SEQ ID NO: 1443913 - DNA, 15 bp, Homo sapiens
agtaaaggttttcga

SEQ ID NO: 1443914 - DNA, 15 bp, Homo sapiens
gtaaaggttttcgaa

SEQ ID NO: 1443915 - DNA, 15 bp, Homo sapiens
taaaggttttcgaaa

SEQ ID NO: 1443916 - DNA, 15 bp, Homo sapiens
aaaggttttcgaaac

SEQ ID NO: 1443917 - DNA, 15 bp, Homo sapiens
aaggttttcgaaaca

SEQ ID NO: 1443918 - DNA, 15 bp, Homo sapiens
aggttttcgaaacac

SEQ ID NO: 1443919 - DNA, 15 bp, Homo sapiens
ggttttcgaaacaca

SEQ ID NO: 1443920 - DNA, 15 bp, Homo sapiens
gttttcgaaacacaa

SEQ ID NO: 1443921 - DNA, 15 bp, Homo sapiens
ttttcgaaacacaat

SEQ ID NO: 1443922 - DNA, 15 bp, Homo sapiens
tttcgaaacacaatt

SEQ ID NO: 1443923 - DNA, 15 bp, Homo sapiens
ttcgaaacacaattg

SEQ ID NO: 1443924 - DNA, 15 bp, Homo sapiens
tcgaaacacaattga

SEQ ID NO: 1443925 - DNA, 15 bp, Homo sapiens
cgaaacacaattgat

SEQ ID NO: 1443926 - DNA, 15 bp, Homo sapiens
gaaacacaattgata

SEQ ID NO: 1443927 - DNA, 15 bp, Homo sapiens
aaacacaattgatag

SEQ ID NO: 1443928 - DNA, 15 bp, Homo sapiens
aacacaattgatagg

SEQ ID NO: 1443929 - DNA, 15 bp, Homo sapiens
acacaattgataggt

SEQ ID NO: 1443930 - DNA, 15 bp, Homo sapiens
cacaattgataggta

SEQ ID NO: 1443931 - DNA, 15 bp, Homo sapiens
acaattgataggtac

SEQ ID NO: 1443932 - DNA, 15 bp, Homo sapiens
caattgataggtaca

SEQ ID NO: 1443933 - DNA, 15 bp, Homo sapiens
aattgataggtacaa

SEQ ID NO: 1443934 - DNA, 15 bp, Homo sapiens
attgataggtacaaa

SEQ ID NO: 1443935 - DNA, 15 bp, Homo sapiens
ttgataggtacaaaa

SEQ ID NO: 1443936 - DNA, 15 bp, Homo sapiens
tgataggtacaaaaa

SEQ ID NO: 1443937 - DNA, 15 bp, Homo sapiens
gataggtacaaaaat

SEQ ID NO: 1443938 - DNA, 15 bp, Homo sapiens
ataggtacaaaaata

SEQ ID NO: 1443939 - DNA, 15 bp, Homo sapiens
taggtacaaaaatac

SEQ ID NO: 1443940 - DNA, 15 bp, Homo sapiens
aggtacaaaaataca

SEQ ID NO: 1443941 - DNA, 15 bp, Homo sapiens
ggtacaaaaatacac

SEQ ID NO: 1443942 - DNA, 15 bp, Homo sapiens
gtacaaaaatacacc

SEQ ID NO: 1443943 - DNA, 15 bp, Homo sapiens
tacaaaaatacacct

SEQ ID NO: 1443944 - DNA, 15 bp, Homo sapiens
acaaaaatacacctt

SEQ ID NO: 1443945 - DNA, 15 bp, Homo sapiens
caaaaatacacctta

SEQ ID NO: 1443946 - DNA, 15 bp, Homo sapiens
aaaaatacaccttaa

SEQ ID NO: 1443947 - DNA, 15 bp, Homo sapiens
aaaatacaccttaag

SEQ ID NO: 1443948 - DNA, 15 bp, Homo sapiens
aaatacaccttaaga

SEQ ID NO: 1443949 - DNA, 15 bp, Homo sapiens
aatacaccttaagaa

SEQ ID NO: 1443950 - DNA, 15 bp, Homo sapiens
atacaccttaagaag

SEQ ID NO: 1443951 - DNA, 15 bp, Homo sapiens
tacaccttaagaagg

SEQ ID NO: 1443952 - DNA, 15 bp, Homo sapiens
acaccttaagaaggc

SEQ ID NO: 1443953 - DNA, 15 bp, Homo sapiens
caccttaagaaggca

SEQ ID NO: 1443954 - DNA, 15 bp, Homo sapiens
accttaagaaggcaa

SEQ ID NO: 1443955 - DNA, 15 bp, Homo sapiens
ccttaagaaggcaaa

SEQ ID NO: 1443956 - DNA, 15 bp, Homo sapiens
cttaagaaggcaaaa

SEQ ID NO: 1443957 - DNA, 15 bp, Homo sapiens
ttaagaaggcaaaac

SEQ ID NO: 1443958 - DNA, 15 bp, Homo sapiens
taagaaggcaaaact

SEQ ID NO: 1443959 - DNA, 15 bp, Homo sapiens
aagaaggcaaaactg

SEQ ID NO: 1443960 - DNA, 15 bp, Homo sapiens
agaaggcaaaactga

SEQ ID NO: 1443961 - DNA, 15 bp, Homo sapiens
gaaggcaaaactgag

SEQ ID NO: 1443962 - DNA, 15 bp, Homo sapiens
aaggcaaaactgagt

SEQ ID NO: 1443963 - DNA, 15 bp, Homo sapiens
aggcaaaactgagta

SEQ ID NO: 1443964 - DNA, 15 bp, Homo sapiens
ggcaaaactgagtat

SEQ ID NO: 1443965 - DNA, 15 bp, Homo sapiens
gcaaaactgagtata

SEQ ID NO: 1443966 - DNA, 15 bp, Homo sapiens
caaaactgagtatat

SEQ ID NO: 1443967 - DNA, 15 bp, Homo sapiens
aaaactgagtatatt

SEQ ID NO: 1443968 - DNA, 15 bp, Homo sapiens
aaactgagtatatta

SEQ ID NO: 1443969 - DNA, 15 bp, Homo sapiens
aactgagtatattat

SEQ ID NO: 1443970 - DNA, 15 bp, Homo sapiens
actgagtatattatg

SEQ ID NO: 1443971 - DNA, 15 bp, Homo sapiens
ctgagtatattatgt

SEQ ID NO: 1443972 - DNA, 15 bp, Homo sapiens
tgagtatattatgta

SEQ ID NO: 1443973 - DNA, 15 bp, Homo sapiens
gagtatattatgtag

SEQ ID NO: 1443974 - DNA, 15 bp, Homo sapiens
agtatattatgtagg

SEQ ID NO: 1443975 - DNA, 15 bp, Homo sapiens
gtatattatgtagga

SEQ ID NO: 1443976 - DNA, 15 bp, Homo sapiens
tatattatgtaggac

SEQ ID NO: 1443977 - DNA, 15 bp, Homo sapiens
atattatgtaggaca

SEQ ID NO: 1443978 - DNA, 15 bp, Homo sapiens
tattatgtaggacaa

SEQ ID NO: 1443979 - DNA, 15 bp, Homo sapiens
attatgtaggacaaa

SEQ ID NO: 1443980 - DNA, 15 bp, Homo sapiens
ttatgtaggacaaac

SEQ ID NO: 1443981 - DNA, 15 bp, Homo sapiens
tatgtaggacaaact

SEQ ID NO: 1443982 - DNA, 15 bp, Homo sapiens
atgtaggacaaactg

SEQ ID NO: 1443983 - DNA, 15 bp, Homo sapiens
tgtaggacaaactga

SEQ ID NO: 1443984 - DNA, 15 bp, Homo sapiens
gtaggacaaactgaa

SEQ ID NO: 1443985 - DNA, 15 bp, Homo sapiens
taggacaaactgaag

SEQ ID NO: 1443986 - DNA, 15 bp, Homo sapiens
aggacaaactgaagg

SEQ ID NO: 1443987 - DNA, 15 bp, Homo sapiens
ggacaaactgaagga

SEQ ID NO: 1443988 - DNA, 15 bp, Homo sapiens
gacaaactgaaggaa

SEQ ID NO: 1443989 - DNA, 15 bp, Homo sapiens
acaaactgaaggaaa

SEQ ID NO: 1443990 - DNA, 15 bp, Homo sapiens
caaactgaaggaaat

SEQ ID NO: 1443991 - DNA, 15 bp, Homo sapiens
aaactgaaggaaatt

SEQ ID NO: 1443992 - DNA, 15 bp, Homo sapiens
aactgaaggaaattg

SEQ ID NO: 1443993 - DNA, 15 bp, Homo sapiens
actgaaggaaattgg

SEQ ID NO: 1443994 - DNA, 15 bp, Homo sapiens
ctgaaggaaattgga

SEQ ID NO: 1443995 - DNA, 15 bp, Homo sapiens
tgaaggaaattggag

SEQ ID NO: 1443996 - DNA, 15 bp, Homo sapiens
gaaggaaattggagc

SEQ ID NO: 1443997 - DNA, 15 bp, Homo sapiens
aaggaaattggagct

SEQ ID NO: 1443998 - DNA, 15 bp, Homo sapiens
aggaaattggagctt

SEQ ID NO: 1443999 - DNA, 15 bp, Homo sapiens
ggaaattggagcttt

SEQ ID NO: 1444000 - DNA, 15 bp, Homo sapiens
gaaattggagctttg

SEQ ID NO: 1444001 - DNA, 15 bp, Homo sapiens
aaattggagctttgt

SEQ ID NO: 1444002 - DNA, 15 bp, Homo sapiens
aattggagctttgta

SEQ ID NO: 1444003 - DNA, 15 bp, Homo sapiens
attggagctttgtag

SEQ ID NO: 1444004 - DNA, 15 bp, Homo sapiens
ttggagctttgtaga

SEQ ID NO: 1444005 - DNA, 15 bp, Homo sapiens
tggagctttgtagac

SEQ ID NO: 1444006 - DNA, 15 bp, Homo sapiens
ggagctttgtagaca

SEQ ID NO: 1444007 - DNA, 15 bp, Homo sapiens
gagctttgtagacat

SEQ ID NO: 1444008 - DNA, 15 bp, Homo sapiens
agctttgtagacatc

SEQ ID NO: 1444009 - DNA, 15 bp, Homo sapiens
gctttgtagacatca

SEQ ID NO: 1444010 - DNA, 15 bp, Homo sapiens
ctttgtagacatcac

SEQ ID NO: 1444011 - DNA, 15 bp, Homo sapiens
tttgtagacatcaca

SEQ ID NO: 1444012 - DNA, 15 bp, Homo sapiens
ttgtagacatcacat

SEQ ID NO: 1444013 - DNA, 15 bp, Homo sapiens
tgtagacatcacatt

SEQ ID NO: 1444014 - DNA, 15 bp, Homo sapiens
gtagacatcacatta

SEQ ID NO: 1444015 - DNA, 15 bp, Homo sapiens
tagacatcacattat

SEQ ID NO: 1444016 - DNA, 15 bp, Homo sapiens
agacatcacattata

SEQ ID NO: 1444017 - DNA, 15 bp, Homo sapiens
gacatcacattatag

SEQ ID NO: 1444018 - DNA, 15 bp, Homo sapiens
acatcacattatagc

SEQ ID NO: 1444019 - DNA, 15 bp, Homo sapiens
catcacattatagcg

SEQ ID NO: 1444020 - DNA, 15 bp, Homo sapiens
atcacattatagcgg

SEQ ID NO: 1444021 - DNA, 15 bp, Homo sapiens
tcacattatagcgga

SEQ ID NO: 1444022 - DNA, 15 bp, Homo sapiens
cacattatagcggag

SEQ ID NO: 1444023 - DNA, 15 bp, Homo sapiens
acattatagcggagt

SEQ ID NO: 1444024 - DNA, 15 bp, Homo sapiens
cattatagcggagtt

SEQ ID NO: 1444025 - DNA, 15 bp, Homo sapiens
attatagcggagttt

SEQ ID NO: 1444026 - DNA, 15 bp, Homo sapiens
ttatagcggagttta

SEQ ID NO: 1444027 - DNA, 15 bp, Homo sapiens
tatagcggagtttaa

SEQ ID NO: 1444028 - DNA, 15 bp, Homo sapiens
atagcggagtttaaa

SEQ ID NO: 1444029 - DNA, 15 bp, Homo sapiens
tagcggagtttaaac

SEQ ID NO: 1444030 - DNA, 15 bp, Homo sapiens
agcggagtttaaacc

SEQ ID NO: 1444031 - DNA, 15 bp, Homo sapiens
gcggagtttaaacct

SEQ ID NO: 1444032 - DNA, 15 bp, Homo sapiens
cggagtttaaacctg

SEQ ID NO: 1444033 - DNA, 15 bp, Homo sapiens
ggagtttaaacctga

SEQ ID NO: 1444034 - DNA, 15 bp, Homo sapiens
gagtttaaacctgaa

SEQ ID NO: 1444035 - DNA, 15 bp, Homo sapiens
agtttaaacctgaaa

SEQ ID NO: 1444036 - DNA, 15 bp, Homo sapiens
gtttaaacctgaaat

SEQ ID NO: 1444037 - DNA, 15 bp, Homo sapiens
tttaaacctgaaatt

SEQ ID NO: 1444038 - DNA, 15 bp, Homo sapiens
ttaaacctgaaatta

SEQ ID NO: 1444039 - DNA, 15 bp, Homo sapiens
taaacctgaaattat

SEQ ID NO: 1444040 - DNA, 15 bp, Homo sapiens
aaacctgaaattatg

SEQ ID NO: 1444041 - DNA, 15 bp, Homo sapiens
aacctgaaattatgg

SEQ ID NO: 1444042 - DNA, 15 bp, Homo sapiens
acctgaaattatgga

SEQ ID NO: 1444043 - DNA, 15 bp, Homo sapiens
cctgaaattatggat

SEQ ID NO: 1444044 - DNA, 15 bp, Homo sapiens
ctgaaattatggatt

SEQ ID NO: 1444045 - DNA, 15 bp, Homo sapiens
tgaaattatggatta

SEQ ID NO: 1444046 - DNA, 15 bp, Homo sapiens
gaaattatggattag

SEQ ID NO: 1444047 - DNA, 15 bp, Homo sapiens
aaattatggattaga

SEQ ID NO: 1444048 - DNA, 15 bp, Homo sapiens
aattatggattagaa

SEQ ID NO: 1444049 - DNA, 15 bp, Homo sapiens
attatggattagaat

SEQ ID NO: 1444050 - DNA, 15 bp, Homo sapiens
ttatggattagaata

SEQ ID NO: 1444051 - DNA, 15 bp, Homo sapiens
tatggattagaataa

SEQ ID NO: 1444052 - DNA, 15 bp, Homo sapiens
atggattagaataat

SEQ ID NO: 1444053 - DNA, 15 bp, Homo sapiens
tggattagaataata

SEQ ID NO: 1444054 - DNA, 15 bp, Homo sapiens
ggattagaataatag

SEQ ID NO: 1444055 - DNA, 15 bp, Homo sapiens
gattagaataatagc

SEQ ID NO: 1444056 - DNA, 15 bp, Homo sapiens
attagaataatagca

SEQ ID NO: 1444057 - DNA, 15 bp, Homo sapiens
ttagaataatagcaa

SEQ ID NO: 1444058 - DNA, 15 bp, Homo sapiens
tagaataatagcaat

SEQ ID NO: 1444059 - DNA, 15 bp, Homo sapiens
agaataatagcaatt

SEQ ID NO: 1444060 - DNA, 15 bp, Homo sapiens
gaataatagcaattg

SEQ ID NO: 1444061 - DNA, 15 bp, Homo sapiens
aataatagcaattgg

SEQ ID NO: 1444062 - DNA, 15 bp, Homo sapiens
ataatagcaattgga

SEQ ID NO: 1444063 - DNA, 15 bp, Homo sapiens
taatagcaattggaa

SEQ ID NO: 1444064 - DNA, 15 bp, Homo sapiens
aatagcaattggaac

SEQ ID NO: 1444065 - DNA, 15 bp, Homo sapiens
atagcaattggaaca

SEQ ID NO: 1444066 - DNA, 15 bp, Homo sapiens
tagcaattggaacag

SEQ ID NO: 1444067 - DNA, 15 bp, Homo sapiens
agcaattggaacaga

SEQ ID NO: 1444068 - DNA, 15 bp, Homo sapiens
gcaattggaacagaa

SEQ ID NO: 1444069 - DNA, 15 bp, Homo sapiens
caattggaacagaaa

SEQ ID NO: 1444070 - DNA, 15 bp, Homo sapiens
aattggaacagaaaa

SEQ ID NO: 1444071 - DNA, 15 bp, Homo sapiens
attggaacagaaaaa

SEQ ID NO: 1444072 - DNA, 15 bp, Homo sapiens
ttggaacagaaaaaa

SEQ ID NO: 1444073 - DNA, 15 bp, Homo sapiens
tggaacagaaaaaaa

SEQ ID NO: 1444074 - DNA, 15 bp, Homo sapiens
ggaacagaaaaaaag

SEQ ID NO: 1444075 - DNA, 15 bp, Homo sapiens
gaacagaaaaaaagt

SEQ ID NO: 1444076 - DNA, 15 bp, Homo sapiens
aacagaaaaaaagta

SEQ ID NO: 1444077 - DNA, 15 bp, Homo sapiens
cagaaaaaaagtagt

SEQ ID NO: 1444078 - DNA, 15 bp, Homo sapiens
agaaaaaaagtagtg

SEQ ID NO: 1444079 - DNA, 15 bp, Homo sapiens
gaaaaaaagtagtgg

SEQ ID NO: 1444080 - DNA, 15 bp, Homo sapiens
aaaaaaagtagtgga

SEQ ID NO: 1444081 - DNA, 15 bp, Homo sapiens
aaaaaagtagtggaa

SEQ ID NO: 1444082 - DNA, 15 bp, Homo sapiens
aaaaagtagtggaaa

SEQ ID NO: 1444083 - DNA, 15 bp, Homo sapiens
aaaagtagtggaaag

SEQ ID NO: 1444084 - DNA, 15 bp, Homo sapiens
aaagtagtggaaaga

SEQ ID NO: 1444085 - DNA, 15 bp, Homo sapiens
aagtagtggaaagac

SEQ ID NO: 1444086 - DNA, 15 bp, Homo sapiens
agtagtggaaagaca

SEQ ID NO: 1444087 - DNA, 15 bp, Homo sapiens
gtagtggaaagacat

SEQ ID NO: 1444088 - DNA, 15 bp, Homo sapiens
tagtggaaagacatt

SEQ ID NO: 1444089 - DNA, 15 bp, Homo sapiens
agtggaaagacatta

SEQ ID NO: 1444090 - DNA, 15 bp, Homo sapiens
gtggaaagacattac

SEQ ID NO: 1444091 - DNA, 15 bp, Homo sapiens
tggaaagacattaca

SEQ ID NO: 1444092 - DNA, 15 bp, Homo sapiens
ggaaagacattacaa

SEQ ID NO: 1444093 - DNA, 15 bp, Homo sapiens
gaaagacattacaaa

SEQ ID NO: 1444094 - DNA, 15 bp, Homo sapiens
aaagacattacaaag

SEQ ID NO: 1444095 - DNA, 15 bp, Homo sapiens
aagacattacaaagg

SEQ ID NO: 1444096 - DNA, 15 bp, Homo sapiens
agacattacaaaggg

SEQ ID NO: 1444097 - DNA, 15 bp, Homo sapiens
gacattacaaaggga

SEQ ID NO: 1444098 - DNA, 15 bp, Homo sapiens
acattacaaagggag

SEQ ID NO: 1444099 - DNA, 15 bp, Homo sapiens
cattacaaagggaga

SEQ ID NO: 1444100 - DNA, 15 bp, Homo sapiens
attacaaagggagat

SEQ ID NO: 1444101 - DNA, 15 bp, Homo sapiens
ttacaaagggagatg

SEQ ID NO: 1444102 - DNA, 15 bp, Homo sapiens
tacaaagggagatgt

SEQ ID NO: 1444103 - DNA, 15 bp, Homo sapiens
acaaagggagatgtt

SEQ ID NO: 1444104 - DNA, 15 bp, Homo sapiens
caaagggagatgttg

SEQ ID NO: 1444105 - DNA, 15 bp, Homo sapiens
aaagggagatgttgc

SEQ ID NO: 1444106 - DNA, 15 bp, Homo sapiens
aagggagatgttgca

SEQ ID NO: 1444107 - DNA, 15 bp, Homo sapiens
agggagatgttgcat

SEQ ID NO: 1444108 - DNA, 15 bp, Homo sapiens
gggagatgttgcatt

SEQ ID NO: 1444109 - DNA, 15 bp, Homo sapiens
ggagatgttgcatta

SEQ ID NO: 1444110 - DNA, 15 bp, Homo sapiens
gagatgttgcattac

SEQ ID NO: 1444111 - DNA, 15 bp, Homo sapiens
agatgttgcattact

SEQ ID NO: 1444112 - DNA, 15 bp, Homo sapiens
gatgttgcattactg

SEQ ID NO: 1444113 - DNA, 15 bp, Homo sapiens
atgttgcattactgg

SEQ ID NO: 1444114 - DNA, 15 bp, Homo sapiens
tgttgcattactgga

SEQ ID NO: 1444115 - DNA, 15 bp, Homo sapiens
gttgcattactggat

SEQ ID NO: 1444116 - DNA, 15 bp, Homo sapiens
ttgcattactggata

SEQ ID NO: 1444117 - DNA, 15 bp, Homo sapiens
tgcattactggatat

SEQ ID NO: 1444118 - DNA, 15 bp, Homo sapiens
gcattactggatata

SEQ ID NO: 1444119 - DNA, 15 bp, Homo sapiens
cattactggatataa

SEQ ID NO: 1444120 - DNA, 15 bp, Homo sapiens
attactggatataag

SEQ ID NO: 1444121 - DNA, 15 bp, Homo sapiens
ttactggatataaga

SEQ ID NO: 1444122 - DNA, 15 bp, Homo sapiens
tactggatataagac

SEQ ID NO: 1444123 - DNA, 15 bp, Homo sapiens
actggatataagact

SEQ ID NO: 1444124 - DNA, 15 bp, Homo sapiens
ctggatataagactt

SEQ ID NO: 1444125 - DNA, 15 bp, Homo sapiens
tggatataagacttg

SEQ ID NO: 1444126 - DNA, 15 bp, Homo sapiens
ggatataagacttga

SEQ ID NO: 1444127 - DNA, 15 bp, Homo sapiens
gatataagacttgag

SEQ ID NO: 1444128 - DNA, 15 bp, Homo sapiens
atataagacttgagg

SEQ ID NO: 1444129 - DNA, 15 bp, Homo sapiens
tataagacttgagga

SEQ ID NO: 1444130 - DNA, 15 bp, Homo sapiens
ataagacttgaggac

SEQ ID NO: 1444131 - DNA, 15 bp, Homo sapiens
taagacttgaggact

SEQ ID NO: 1444132 - DNA, 15 bp, Homo sapiens
aagacttgaggactt

SEQ ID NO: 1444133 - DNA, 15 bp, Homo sapiens
agacttgaggacttg

SEQ ID NO: 1444134 - DNA, 15 bp, Homo sapiens
gacttgaggacttga

SEQ ID NO: 1444135 - DNA, 15 bp, Homo sapiens
acttgaggacttgag

SEQ ID NO: 1444136 - DNA, 15 bp, Homo sapiens
cttgaggacttgagg

SEQ ID NO: 1444137 - DNA, 15 bp, Homo sapiens
ttgaggacttgaggt

SEQ ID NO: 1444138 - DNA, 15 bp, Homo sapiens
tgaggacttgaggta

SEQ ID NO: 1444139 - DNA, 15 bp, Homo sapiens
gaggacttgaggtaa

SEQ ID NO: 1444140 - DNA, 15 bp, Homo sapiens
aggacttgaggtaaa

SEQ ID NO: 1444141 - DNA, 15 bp, Homo sapiens
ggacttgaggtaaaa

SEQ ID NO: 1444142 - DNA, 15 bp, Homo sapiens
gacttgaggtaaaaa

SEQ ID NO: 1444143 - DNA, 15 bp, Homo sapiens
acttgaggtaaaaag

SEQ ID NO: 1444144 - DNA, 15 bp, Homo sapiens
cttgaggtaaaaagg

SEQ ID NO: 1444145 - DNA, 15 bp, Homo sapiens
ttgaggtaaaaagga

SEQ ID NO: 1444146 - DNA, 15 bp, Homo sapiens
tgaggtaaaaaggag

SEQ ID NO: 1444147 - DNA, 15 bp, Homo sapiens
gaggtaaaaaggaga

SEQ ID NO: 1444148 - DNA, 15 bp, Homo sapiens
aggtaaaaaggagaa

SEQ ID NO: 1444149 - DNA, 15 bp, Homo sapiens
ggtaaaaaggagaat

SEQ ID NO: 1444150 - DNA, 15 bp, Homo sapiens
gtaaaaaggagaatc

SEQ ID NO: 1444151 - DNA, 15 bp, Homo sapiens
taaaaaggagaatca

SEQ ID NO: 1444152 - DNA, 15 bp, Homo sapiens
aaaaaggagaatcaa

SEQ ID NO: 1444153 - DNA, 15 bp, Homo sapiens
aaaaggagaatcaaa

SEQ ID NO: 1444154 - DNA, 15 bp, Homo sapiens
aaaggagaatcaaaa

SEQ ID NO: 1444155 - DNA, 15 bp, Homo sapiens
aaggagaatcaaaaa

SEQ ID NO: 1444156 - DNA, 15 bp, Homo sapiens
aggagaatcaaaaat

SEQ ID NO: 1444157 - DNA, 15 bp, Homo sapiens
ggagaatcaaaaatg

SEQ ID NO: 1444158 - DNA, 15 bp, Homo sapiens
gagaatcaaaaatgt

SEQ ID NO: 1444159 - DNA, 15 bp, Homo sapiens
agaatcaaaaatgtt

SEQ ID NO: 1444160 - DNA, 15 bp, Homo sapiens
gaatcaaaaatgttt

SEQ ID NO: 1444161 - DNA, 15 bp, Homo sapiens
aatcaaaaatgtttc

SEQ ID NO: 1444162 - DNA, 15 bp, Homo sapiens
atcaaaaatgtttca

SEQ ID NO: 1444163 - DNA, 15 bp, Homo sapiens
tcaaaaatgtttcat

SEQ ID NO: 1444164 - DNA, 15 bp, Homo sapiens
caaaaatgtttcatg

SEQ ID NO: 1444165 - DNA, 15 bp, Homo sapiens
aaaaatgtttcatgc

SEQ ID NO: 1444166 - DNA, 15 bp, Homo sapiens
aaaatgtttcatgct

SEQ ID NO: 1444167 - DNA, 15 bp, Homo sapiens
aaatgtttcatgcta

SEQ ID NO: 1444168 - DNA, 15 bp, Homo sapiens
aatgtttcatgctat

SEQ ID NO: 1444169 - DNA, 15 bp, Homo sapiens
atgtttcatgctatt

SEQ ID NO: 1444170 - DNA, 15 bp, Homo sapiens
tgtttcatgctatta

SEQ ID NO: 1444171 - DNA, 15 bp, Homo sapiens
gtttcatgctattaa

SEQ ID NO: 1444172 - DNA, 15 bp, Homo sapiens
tttcatgctattaaa

SEQ ID NO: 1444173 - DNA, 15 bp, Homo sapiens
ttcatgctattaaaa

SEQ ID NO: 1444174 - DNA, 15 bp, Homo sapiens
tcatgctattaaaaa

SEQ ID NO: 1444175 - DNA, 15 bp, Homo sapiens
catgctattaaaaat

SEQ ID NO: 1444176 - DNA, 15 bp, Homo sapiens
atgctattaaaaatc

SEQ ID NO: 1444177 - DNA, 15 bp, Homo sapiens
tgctattaaaaatct

SEQ ID NO: 1444178 - DNA, 15 bp, Homo sapiens
gctattaaaaatcta

SEQ ID NO: 1444179 - DNA, 15 bp, Homo sapiens
ctattaaaaatctag

SEQ ID NO: 1444180 - DNA, 15 bp, Homo sapiens
tattaaaaatctaga

SEQ ID NO: 1444181 - DNA, 15 bp, Homo sapiens
attaaaaatctagaa

SEQ ID NO: 1444182 - DNA, 15 bp, Homo sapiens
ttaaaaatctagaaa

SEQ ID NO: 1444183 - DNA, 15 bp, Homo sapiens
taaaaatctagaaat

SEQ ID NO: 1444184 - DNA, 15 bp, Homo sapiens
aaaaatctagaaatt

SEQ ID NO: 1444185 - DNA, 15 bp, Homo sapiens
aaaatctagaaattg

SEQ ID NO: 1444186 - DNA, 15 bp, Homo sapiens
aaatctagaaattgt

SEQ ID NO: 1444187 - DNA, 15 bp, Homo sapiens
aatctagaaattgta

SEQ ID NO: 1444188 - DNA, 15 bp, Homo sapiens
atctagaaattgtag

SEQ ID NO: 1444189 - DNA, 15 bp, Homo sapiens
tctagaaattgtagt

SEQ ID NO: 1444190 - DNA, 15 bp, Homo sapiens
ctagaaattgtagtc

SEQ ID NO: 1444191 - DNA, 15 bp, Homo sapiens
tagaaattgtagtct

SEQ ID NO: 1444192 - DNA, 15 bp, Homo sapiens
agaaattgtagtctt

SEQ ID NO: 1444193 - DNA, 15 bp, Homo sapiens
gaaattgtagtctta

SEQ ID NO: 1444194 - DNA, 15 bp, Homo sapiens
aaattgtagtcttaa

SEQ ID NO: 1444195 - DNA, 15 bp, Homo sapiens
aattgtagtcttaag

SEQ ID NO: 1444196 - DNA, 15 bp, Homo sapiens
attgtagtcttaagt

SEQ ID NO: 1444197 - DNA, 15 bp, Homo sapiens
ttgtagtcttaagta

SEQ ID NO: 1444198 - DNA, 15 bp, Homo sapiens
tgtagtcttaagtaa

SEQ ID NO: 1444199 - DNA, 15 bp, Homo sapiens
gtagtcttaagtaag

SEQ ID NO: 1444200 - DNA, 15 bp, Homo sapiens
tagtcttaagtaaga

SEQ ID NO: 1444201 - DNA, 15 bp, Homo sapiens
agtcttaagtaagaa

SEQ ID NO: 1444202 - DNA, 15 bp, Homo sapiens
gtcttaagtaagaaa

SEQ ID NO: 1444203 - DNA, 15 bp, Homo sapiens
tcttaagtaagaaaa

SEQ ID NO: 1444204 - DNA, 15 bp, Homo sapiens
cttaagtaagaaaat

SEQ ID NO: 1444205 - DNA, 15 bp, Homo sapiens
ttaagtaagaaaatt

SEQ ID NO: 1444206 - DNA, 15 bp, Homo sapiens
taagtaagaaaattg

SEQ ID NO: 1444207 - DNA, 15 bp, Homo sapiens
aagtaagaaaattgc

SEQ ID NO: 1444208 - DNA, 15 bp, Homo sapiens
agtaagaaaattgcc

SEQ ID NO: 1444209 - DNA, 15 bp, Homo sapiens
gtaagaaaattgcct

SEQ ID NO: 1444210 - DNA, 15 bp, Homo sapiens
taagaaaattgcctg

SEQ ID NO: 1444211 - DNA, 15 bp, Homo sapiens
aagaaaattgcctgg

SEQ ID NO: 1444212 - DNA, 15 bp, Homo sapiens
agaaaattgcctggc

SEQ ID NO: 1444213 - DNA, 15 bp, Homo sapiens
gaaaattgcctggca

SEQ ID NO: 1444214 - DNA, 15 bp, Homo sapiens
aaaattgcctggcat

SEQ ID NO: 1444215 - DNA, 15 bp, Homo sapiens
aaattgcctggcatg

SEQ ID NO: 1444216 - DNA, 15 bp, Homo sapiens
aattgcctggcatgg

SEQ ID NO: 1444217 - DNA, 15 bp, Homo sapiens
attgcctggcatggt

SEQ ID NO: 1444218 - DNA, 15 bp, Homo sapiens
ttgcctggcatggtg

SEQ ID NO: 1444219 - DNA, 15 bp, Homo sapiens
tgcctggcatggtgg

SEQ ID NO: 1444220 - DNA, 15 bp, Homo sapiens
cctggcatggtggct

SEQ ID NO: 1444221 - DNA, 15 bp, Homo sapiens
ctggcatggtggctc

SEQ ID NO: 1444222 - DNA, 15 bp, Homo sapiens
tggcatggtggctca

SEQ ID NO: 1444223 - DNA, 15 bp, Homo sapiens
cacgtctgtaatccc

SEQ ID NO: 1444224 - DNA, 15 bp, Homo sapiens
acgtctgtaatccca

SEQ ID NO: 1444225 - DNA, 15 bp, Homo sapiens
cgtctgtaatcccag

SEQ ID NO: 1444226 - DNA, 15 bp, Homo sapiens
aggaggattgcttga

SEQ ID NO: 1444227 - DNA, 15 bp, Homo sapiens
tgagcctgggagttc

SEQ ID NO: 1444228 - DNA, 15 bp, Homo sapiens
gagcctgggagttca

SEQ ID NO: 1444229 - DNA, 15 bp, Homo sapiens
agcctgggagttcaa

SEQ ID NO: 1444230 - DNA, 15 bp, Homo sapiens
gcctgggagttcaag

SEQ ID NO: 1444231 - DNA, 15 bp, Homo sapiens
cctgggagttcaaga

SEQ ID NO: 1444232 - DNA, 15 bp, Homo sapiens
ctgggagttcaagac

SEQ ID NO: 1444233 - DNA, 15 bp, Homo sapiens
tgggagttcaagact

SEQ ID NO: 1444234 - DNA, 15 bp, Homo sapiens
gggagttcaagacta

SEQ ID NO: 1444235 - DNA, 15 bp, Homo sapiens
caagactagcctgga

SEQ ID NO: 1444236 - DNA, 15 bp, Homo sapiens
aagactagcctggat

SEQ ID NO: 1444237 - DNA, 15 bp, Homo sapiens
agactagcctggata

SEQ ID NO: 1444238 - DNA, 15 bp, Homo sapiens
gactagcctggataa

SEQ ID NO: 1444239 - DNA, 15 bp, Homo sapiens
actagcctggataat

SEQ ID NO: 1444240 - DNA, 15 bp, Homo sapiens
ctagcctggataata

SEQ ID NO: 1444241 - DNA, 15 bp, Homo sapiens
tagcctggataatat

SEQ ID NO: 1444242 - DNA, 15 bp, Homo sapiens
agcctggataatata

SEQ ID NO: 1444243 - DNA, 15 bp, Homo sapiens
gcctggataatatag

SEQ ID NO: 1444244 - DNA, 15 bp, Homo sapiens
cctggataatatagt

SEQ ID NO: 1444245 - DNA, 15 bp, Homo sapiens
ctggataatatagtg

SEQ ID NO: 1444246 - DNA, 15 bp, Homo sapiens
tggataatatagtga

SEQ ID NO: 1444247 - DNA, 15 bp, Homo sapiens
ggataatatagtgag

SEQ ID NO: 1444248 - DNA, 15 bp, Homo sapiens
gataatatagtgagt

SEQ ID NO: 1444249 - DNA, 15 bp, Homo sapiens
ataatatagtgagtc

SEQ ID NO: 1444250 - DNA, 15 bp, Homo sapiens
taatatagtgagtcc

SEQ ID NO: 1444251 - DNA, 15 bp, Homo sapiens
aatatagtgagtcct

SEQ ID NO: 1444252 - DNA, 15 bp, Homo sapiens
atatagtgagtcctt

SEQ ID NO: 1444253 - DNA, 15 bp, Homo sapiens
tatagtgagtccttg

SEQ ID NO: 1444254 - DNA, 15 bp, Homo sapiens
atagtgagtccttgc

SEQ ID NO: 1444255 - DNA, 15 bp, Homo sapiens
tagtgagtccttgcc

SEQ ID NO: 1444256 - DNA, 15 bp, Homo sapiens
agtgagtccttgcct

SEQ ID NO: 1444257 - DNA, 15 bp, Homo sapiens
gtgagtccttgcctg

SEQ ID NO: 1444258 - DNA, 15 bp, Homo sapiens
tgagtccttgcctgt

SEQ ID NO: 1444259 - DNA, 15 bp, Homo sapiens
gagtccttgcctgta

SEQ ID NO: 1444260 - DNA, 15 bp, Homo sapiens
agtccttgcctgtac

SEQ ID NO: 1444261 - DNA, 15 bp, Homo sapiens
gtccttgcctgtacg

SEQ ID NO: 1444262 - DNA, 15 bp, Homo sapiens
tccttgcctgtacga

SEQ ID NO: 1444263 - DNA, 15 bp, Homo sapiens
ccttgcctgtacgaa

SEQ ID NO: 1444264 - DNA, 15 bp, Homo sapiens
cttgcctgtacgaaa

SEQ ID NO: 1444265 - DNA, 15 bp, Homo sapiens
ttgcctgtacgaaaa

SEQ ID NO: 1444266 - DNA, 15 bp, Homo sapiens
tgcctgtacgaaaaa

SEQ ID NO: 1444267 - DNA, 15 bp, Homo sapiens
gcctgtacgaaaaaa

SEQ ID NO: 1444268 - DNA, 15 bp, Homo sapiens
cctgtacgaaaaaat

SEQ ID NO: 1444269 - DNA, 15 bp, Homo sapiens
ctgtacgaaaaaatt

SEQ ID NO: 1444270 - DNA, 15 bp, Homo sapiens
tgtacgaaaaaattt

SEQ ID NO: 1444271 - DNA, 15 bp, Homo sapiens
gtacgaaaaaatttg

SEQ ID NO: 1444272 - DNA, 15 bp, Homo sapiens
tacgaaaaaatttgc

SEQ ID NO: 1444273 - DNA, 15 bp, Homo sapiens
acgaaaaaatttgcc

SEQ ID NO: 1444274 - DNA, 15 bp, Homo sapiens
cgaaaaaatttgccg

SEQ ID NO: 1444275 - DNA, 15 bp, Homo sapiens
gaaaaaatttgccga

SEQ ID NO: 1444276 - DNA, 15 bp, Homo sapiens
aaaaaatttgccgag

SEQ ID NO: 1444277 - DNA, 15 bp, Homo sapiens
aaaaatttgccgagc

SEQ ID NO: 1444278 - DNA, 15 bp, Homo sapiens
aaaatttgccgagca

SEQ ID NO: 1444279 - DNA, 15 bp, Homo sapiens
aaatttgccgagcat

SEQ ID NO: 1444280 - DNA, 15 bp, Homo sapiens
aatttgccgagcatg

SEQ ID NO: 1444281 - DNA, 15 bp, Homo sapiens
atttgccgagcatga

SEQ ID NO: 1444282 - DNA, 15 bp, Homo sapiens
tttgccgagcatgat

SEQ ID NO: 1444283 - DNA, 15 bp, Homo sapiens
ttgccgagcatgatg

SEQ ID NO: 1444284 - DNA, 15 bp, Homo sapiens
tgccgagcatgatgg

SEQ ID NO: 1444285 - DNA, 15 bp, Homo sapiens
gccgagcatgatggc

SEQ ID NO: 1444286 - DNA, 15 bp, Homo sapiens
ccgagcatgatggca

SEQ ID NO: 1444287 - DNA, 15 bp, Homo sapiens
cgagcatgatggcac

SEQ ID NO: 1444288 - DNA, 15 bp, Homo sapiens
gagcatgatggcaca

SEQ ID NO: 1444289 - DNA, 15 bp, Homo sapiens
gcatgatggcacacc

SEQ ID NO: 1444290 - DNA, 15 bp, Homo sapiens
catgatggcacacca

SEQ ID NO: 1444291 - DNA, 15 bp, Homo sapiens
atgatggcacaccaa

SEQ ID NO: 1444292 - DNA, 15 bp, Homo sapiens
tgatggcacaccaag

SEQ ID NO: 1444293 - DNA, 15 bp, Homo sapiens
gatggcacaccaagc

SEQ ID NO: 1444294 - DNA, 15 bp, Homo sapiens
atggcacaccaagca

SEQ ID NO: 1444295 - DNA, 15 bp, Homo sapiens
tggcacaccaagcat

SEQ ID NO: 1444296 - DNA, 15 bp, Homo sapiens
ggcacaccaagcatg

SEQ ID NO: 1444297 - DNA, 15 bp, Homo sapiens
gcacaccaagcatga

SEQ ID NO: 1444298 - DNA, 15 bp, Homo sapiens
cacaccaagcatgat

SEQ ID NO: 1444299 - DNA, 15 bp, Homo sapiens
acaccaagcatgatg

SEQ ID NO: 1444300 - DNA, 15 bp, Homo sapiens
caccaagcatgatgg

SEQ ID NO: 1444301 - DNA, 15 bp, Homo sapiens
accaagcatgatggc

SEQ ID NO: 1444302 - DNA, 15 bp, Homo sapiens
aagcatgatggcacg

SEQ ID NO: 1444303 - DNA, 15 bp, Homo sapiens
agcatgatggcacgc

SEQ ID NO: 1444304 - DNA, 15 bp, Homo sapiens
gcatgatggcacgcc

SEQ ID NO: 1444305 - DNA, 15 bp, Homo sapiens
catgatggcacgcca

SEQ ID NO: 1444306 - DNA, 15 bp, Homo sapiens
atgatggcacgccaa

SEQ ID NO: 1444307 - DNA, 15 bp, Homo sapiens
tgatggcacgccaag

SEQ ID NO: 1444308 - DNA, 15 bp, Homo sapiens
gatggcacgccaagc

SEQ ID NO: 1444309 - DNA, 15 bp, Homo sapiens
atggcacgccaagca

SEQ ID NO: 1444310 - DNA, 15 bp, Homo sapiens
tggcacgccaagcat

SEQ ID NO: 1444311 - DNA, 15 bp, Homo sapiens
ggcacgccaagcatg

SEQ ID NO: 1444312 - DNA, 15 bp, Homo sapiens
gcacgccaagcatga

SEQ ID NO: 1444313 - DNA, 15 bp, Homo sapiens
cacgccaagcatgat

SEQ ID NO: 1444314 - DNA, 15 bp, Homo sapiens
acgccaagcatgatg

SEQ ID NO: 1444315 - DNA, 15 bp, Homo sapiens
cgccaagcatgatgg

SEQ ID NO: 1444316 - DNA, 15 bp, Homo sapiens
caagcatgatggcat

SEQ ID NO: 1444317 - DNA, 15 bp, Homo sapiens
aagcatgatggcatg

SEQ ID NO: 1444318 - DNA, 15 bp, Homo sapiens
agcatgatggcatgc

SEQ ID NO: 1444319 - DNA, 15 bp, Homo sapiens
gcatgatggcatgca

SEQ ID NO: 1444320 - DNA, 15 bp, Homo sapiens
catgatggcatgcac

SEQ ID NO: 1444321 - DNA, 15 bp, Homo sapiens
atgatggcatgcacc

SEQ ID NO: 1444322 - DNA, 15 bp, Homo sapiens
tgatggcatgcacct

SEQ ID NO: 1444323 - DNA, 15 bp, Homo sapiens
gatggcatgcacctg

SEQ ID NO: 1444324 - DNA, 15 bp, Homo sapiens
atggcatgcacctgt

SEQ ID NO: 1444325 - DNA, 15 bp, Homo sapiens
cagctactcaggaga

SEQ ID NO: 1444326 - DNA, 15 bp, Homo sapiens
agctactcaggagac

SEQ ID NO: 1444327 - DNA, 15 bp, Homo sapiens
gctactcaggagact

SEQ ID NO: 1444328 - DNA, 15 bp, Homo sapiens
ctactcaggagactg

SEQ ID NO: 1444329 - DNA, 15 bp, Homo sapiens
ctcaggagactgaga

SEQ ID NO: 1444330 - DNA, 15 bp, Homo sapiens
tcaggagactgagat

SEQ ID NO: 1444331 - DNA, 15 bp, Homo sapiens
caggagactgagatg

SEQ ID NO: 1444332 - DNA, 15 bp, Homo sapiens
aggagactgagatgg

SEQ ID NO: 1444333 - DNA, 15 bp, Homo sapiens
ggagactgagatggg

SEQ ID NO: 1444334 - DNA, 15 bp, Homo sapiens
gagactgagatggga

SEQ ID NO: 1444335 - DNA, 15 bp, Homo sapiens
agactgagatgggaa

SEQ ID NO: 1444336 - DNA, 15 bp, Homo sapiens
gactgagatgggaag

SEQ ID NO: 1444337 - DNA, 15 bp, Homo sapiens
actgagatgggaaga

SEQ ID NO: 1444338 - DNA, 15 bp, Homo sapiens
ctgagatgggaagat

SEQ ID NO: 1444339 - DNA, 15 bp, Homo sapiens
tgagatgggaagatt

SEQ ID NO: 1444340 - DNA, 15 bp, Homo sapiens
gagatgggaagattg

SEQ ID NO: 1444341 - DNA, 15 bp, Homo sapiens
agatgggaagattgc

SEQ ID NO: 1444342 - DNA, 15 bp, Homo sapiens
gatgggaagattgct

SEQ ID NO: 1444343 - DNA, 15 bp, Homo sapiens
atgggaagattgctt

SEQ ID NO: 1444344 - DNA, 15 bp, Homo sapiens
cttgagcccaggagg

SEQ ID NO: 1444345 - DNA, 15 bp, Homo sapiens
ttgagcccaggaggc

SEQ ID NO: 1444346 - DNA, 15 bp, Homo sapiens
tgagcccaggaggca

SEQ ID NO: 1444347 - DNA, 15 bp, Homo sapiens
gagcccaggaggcag

SEQ ID NO: 1444348 - DNA, 15 bp, Homo sapiens
agcccaggaggcagg

SEQ ID NO: 1444349 - DNA, 15 bp, Homo sapiens
gcccaggaggcagga

SEQ ID NO: 1444350 - DNA, 15 bp, Homo sapiens
cccaggaggcaggag

SEQ ID NO: 1444351 - DNA, 15 bp, Homo sapiens
ccaggaggcaggagg

SEQ ID NO: 1444352 - DNA, 15 bp, Homo sapiens
caggaggcaggaggt

SEQ ID NO: 1444353 - DNA, 15 bp, Homo sapiens
aggaggcaggaggtt

SEQ ID NO: 1444354 - DNA, 15 bp, Homo sapiens
ggaggcaggaggttg

SEQ ID NO: 1444355 - DNA, 15 bp, Homo sapiens
gaggcaggaggttgc

SEQ ID NO: 1444356 - DNA, 15 bp, Homo sapiens
aggcaggaggttgca

SEQ ID NO: 1444357 - DNA, 15 bp, Homo sapiens
ggcaggaggttgcag

SEQ ID NO: 1444358 - DNA, 15 bp, Homo sapiens
gcaggaggttgcagt

SEQ ID NO: 1444359 - DNA, 15 bp, Homo sapiens
caggaggttgcagtg

SEQ ID NO: 1444360 - DNA, 15 bp, Homo sapiens
gagctgagattgtgc

SEQ ID NO: 1444361 - DNA, 15 bp, Homo sapiens
agctgagattgtgcc

SEQ ID NO: 1444362 - DNA, 15 bp, Homo sapiens
gctgagattgtgcca

SEQ ID NO: 1444363 - DNA, 15 bp, Homo sapiens
ctgagattgtgccac

SEQ ID NO: 1444364 - DNA, 15 bp, Homo sapiens
tgagattgtgccact

SEQ ID NO: 1444365 - DNA, 15 bp, Homo sapiens
ggtgacaaagtgagg

SEQ ID NO: 1444366 - DNA, 15 bp, Homo sapiens
gtgacaaagtgaggc

SEQ ID NO: 1444367 - DNA, 15 bp, Homo sapiens
tgacaaagtgaggcc

SEQ ID NO: 1444368 - DNA, 15 bp, Homo sapiens
gacaaagtgaggccc

SEQ ID NO: 1444369 - DNA, 15 bp, Homo sapiens
acaaagtgaggccct

SEQ ID NO: 1444370 - DNA, 15 bp, Homo sapiens
caaagtgaggcccta

SEQ ID NO: 1444371 - DNA, 15 bp, Homo sapiens
aaagtgaggccctat

SEQ ID NO: 1444372 - DNA, 15 bp, Homo sapiens
aagtgaggccctatc

SEQ ID NO: 1444373 - DNA, 15 bp, Homo sapiens
agtgaggccctatct

SEQ ID NO: 1444374 - DNA, 15 bp, Homo sapiens
gtgaggccctatctc

SEQ ID NO: 1444375 - DNA, 15 bp, Homo sapiens
tgaggccctatctca

SEQ ID NO: 1444376 - DNA, 15 bp, Homo sapiens
gaggccctatctcaa

SEQ ID NO: 1444377 - DNA, 15 bp, Homo sapiens
aggccctatctcaaa

SEQ ID NO: 1444378 - DNA, 15 bp, Homo sapiens
ggccctatctcaaaa

SEQ ID NO: 1444379 - DNA, 15 bp, Homo sapiens
gccctatctcaaaag

SEQ ID NO: 1444380 - DNA, 15 bp, Homo sapiens
ccctatctcaaaagc

SEQ ID NO: 1444381 - DNA, 15 bp, Homo sapiens
cctatctcaaaagca

SEQ ID NO: 1444382 - DNA, 15 bp, Homo sapiens
ctatctcaaaagcaa

SEQ ID NO: 1444383 - DNA, 15 bp, Homo sapiens
tatctcaaaagcaaa

SEQ ID NO: 1444384 - DNA, 15 bp, Homo sapiens
atctcaaaagcaaaa

SEQ ID NO: 1444385 - DNA, 15 bp, Homo sapiens
tctcaaaagcaaaaa

SEQ ID NO: 1444386 - DNA, 15 bp, Homo sapiens
ctcaaaagcaaaaaa

SEQ ID NO: 1444387 - DNA, 15 bp, Homo sapiens
tcaaaagcaaaaaaa

SEQ ID NO: 1444388 - DNA, 15 bp, Homo sapiens
caaaagcaaaaaaaa

SEQ ID NO: 1444389 - DNA, 15 bp, Homo sapiens
aaaagcaaaaaaaac

SEQ ID NO: 1444390 - DNA, 15 bp, Homo sapiens
aaagcaaaaaaaaca

SEQ ID NO: 1444391 - DNA, 15 bp, Homo sapiens
aagcaaaaaaaacaa

SEQ ID NO: 1444392 - DNA, 15 bp, Homo sapiens
agcaaaaaaaacaaa

SEQ ID NO: 1444393 - DNA, 15 bp, Homo sapiens
gcaaaaaaaacaaaa

SEQ ID NO: 1444394 - DNA, 15 bp, Homo sapiens
aaaaaaaacaaaaac

SEQ ID NO: 1444395 - DNA, 15 bp, Homo sapiens
acaaaaacaaaaacc

SEQ ID NO: 1444396 - DNA, 15 bp, Homo sapiens
aaaaacaaaaaccaa

SEQ ID NO: 1444397 - DNA, 15 bp, Homo sapiens
aaaacaaaaaccaaa

SEQ ID NO: 1444398 - DNA, 15 bp, Homo sapiens
aaacaaaaaccaaaa

SEQ ID NO: 1444399 - DNA, 15 bp, Homo sapiens
aacaaaaaccaaaaa

SEQ ID NO: 1444400 - DNA, 15 bp, Homo sapiens
acaaaaaccaaaaac

SEQ ID NO: 1444401 - DNA, 15 bp, Homo sapiens
caaaaaccaaaaact

SEQ ID NO: 1444402 - DNA, 15 bp, Homo sapiens
aaaaaccaaaaacta

SEQ ID NO: 1444403 - DNA, 15 bp, Homo sapiens
aaaaccaaaaactat

SEQ ID NO: 1444404 - DNA, 15 bp, Homo sapiens
aaaccaaaaactatt

SEQ ID NO: 1444405 - DNA, 15 bp, Homo sapiens
aaccaaaaactattt

SEQ ID NO: 1444406 - DNA, 15 bp, Homo sapiens
accaaaaactattta

SEQ ID NO: 1444407 - DNA, 15 bp, Homo sapiens
ccaaaaactatttat

SEQ ID NO: 1444408 - DNA, 15 bp, Homo sapiens
caaaaactatttatt

SEQ ID NO: 1444409 - DNA, 15 bp, Homo sapiens
aaaaactatttattc

SEQ ID NO: 1444410 - DNA, 15 bp, Homo sapiens
aaaactatttattca

SEQ ID NO: 1444411 - DNA, 15 bp, Homo sapiens
aaactatttattcag

SEQ ID NO: 1444412 - DNA, 15 bp, Homo sapiens
aactatttattcagc

SEQ ID NO: 1444413 - DNA, 15 bp, Homo sapiens
actatttattcagca

SEQ ID NO: 1444414 - DNA, 15 bp, Homo sapiens
ctatttattcagcaa

SEQ ID NO: 1444415 - DNA, 15 bp, Homo sapiens
tatttattcagcaaa

SEQ ID NO: 1444416 - DNA, 15 bp, Homo sapiens
atttattcagcaaat

SEQ ID NO: 1444417 - DNA, 15 bp, Homo sapiens
tttattcagcaaata

SEQ ID NO: 1444418 - DNA, 15 bp, Homo sapiens
ttattcagcaaatat

SEQ ID NO: 1444419 - DNA, 15 bp, Homo sapiens
tattcagcaaatatt

SEQ ID NO: 1444420 - DNA, 15 bp, Homo sapiens
attcagcaaatattt

SEQ ID NO: 1444421 - DNA, 15 bp, Homo sapiens
ttcagcaaatattta

SEQ ID NO: 1444422 - DNA, 15 bp, Homo sapiens
tcagcaaatatttac

SEQ ID NO: 1444423 - DNA, 15 bp, Homo sapiens
cagcaaatatttact

SEQ ID NO: 1444424 - DNA, 15 bp, Homo sapiens
agcaaatatttactg

SEQ ID NO: 1444425 - DNA, 15 bp, Homo sapiens
gcaaatatttactga

SEQ ID NO: 1444426 - DNA, 15 bp, Homo sapiens
caaatatttactgaa

SEQ ID NO: 1444427 - DNA, 15 bp, Homo sapiens
aaatatttactgaac

SEQ ID NO: 1444428 - DNA, 15 bp, Homo sapiens
aatatttactgaacg

SEQ ID NO: 1444429 - DNA, 15 bp, Homo sapiens
atatttactgaacgt

SEQ ID NO: 1444430 - DNA, 15 bp, Homo sapiens
tatttactgaacgtc

SEQ ID NO: 1444431 - DNA, 15 bp, Homo sapiens
atttactgaacgtct

SEQ ID NO: 1444432 - DNA, 15 bp, Homo sapiens
tttactgaacgtctc

SEQ ID NO: 1444433 - DNA, 15 bp, Homo sapiens
ttactgaacgtctcc

SEQ ID NO: 1444434 - DNA, 15 bp, Homo sapiens
tactgaacgtctcca

SEQ ID NO: 1444435 - DNA, 15 bp, Homo sapiens
actgaacgtctccat

SEQ ID NO: 1444436 - DNA, 15 bp, Homo sapiens
ctgaacgtctccatg

SEQ ID NO: 1444437 - DNA, 15 bp, Homo sapiens
tgaacgtctccatgt

SEQ ID NO: 1444438 - DNA, 15 bp, Homo sapiens
gaacgtctccatgtg

SEQ ID NO: 1444439 - DNA, 15 bp, Homo sapiens
aacgtctccatgtgc

SEQ ID NO: 1444440 - DNA, 15 bp, Homo sapiens
acgtctccatgtgcc

SEQ ID NO: 1444441 - DNA, 15 bp, Homo sapiens
cgtctccatgtgcca

SEQ ID NO: 1444442 - DNA, 15 bp, Homo sapiens
gtctccatgtgccag

SEQ ID NO: 1444443 - DNA, 15 bp, Homo sapiens
tctccatgtgccagc

SEQ ID NO: 1444444 - DNA, 15 bp, Homo sapiens
ctccatgtgccagcc

SEQ ID NO: 1444445 - DNA, 15 bp, Homo sapiens
tccatgtgccagcca

SEQ ID NO: 1444446 - DNA, 15 bp, Homo sapiens
ccatgtgccagccat

SEQ ID NO: 1444447 - DNA, 15 bp, Homo sapiens
catgtgccagccatt

SEQ ID NO: 1444448 - DNA, 15 bp, Homo sapiens
atgtgccagccattg

SEQ ID NO: 1444449 - DNA, 15 bp, Homo sapiens
tgtgccagccattgc

SEQ ID NO: 1444450 - DNA, 15 bp, Homo sapiens
gtgccagccattgct

SEQ ID NO: 1444451 - DNA, 15 bp, Homo sapiens
tgccagccattgctg

SEQ ID NO: 1444452 - DNA, 15 bp, Homo sapiens
gccagccattgctgg

SEQ ID NO: 1444453 - DNA, 15 bp, Homo sapiens
ccagccattgctggc

SEQ ID NO: 1444454 - DNA, 15 bp, Homo sapiens
cagccattgctggca

SEQ ID NO: 1444455 - DNA, 15 bp, Homo sapiens
agccattgctggcac

SEQ ID NO: 1444456 - DNA, 15 bp, Homo sapiens
gccattgctggcact

SEQ ID NO: 1444457 - DNA, 15 bp, Homo sapiens
ccattgctggcacta

SEQ ID NO: 1444458 - DNA, 15 bp, Homo sapiens
cattgctggcactaa

SEQ ID NO: 1444459 - DNA, 15 bp, Homo sapiens
attgctggcactaag

SEQ ID NO: 1444460 - DNA, 15 bp, Homo sapiens
ttgctggcactaagg

SEQ ID NO: 1444461 - DNA, 15 bp, Homo sapiens
tgctggcactaagga

SEQ ID NO: 1444462 - DNA, 15 bp, Homo sapiens
gctggcactaaggat

SEQ ID NO: 1444463 - DNA, 15 bp, Homo sapiens
ctggcactaaggatc

SEQ ID NO: 1444464 - DNA, 15 bp, Homo sapiens
tggcactaaggatca

SEQ ID NO: 1444465 - DNA, 15 bp, Homo sapiens
ggcactaaggatcat

SEQ ID NO: 1444466 - DNA, 15 bp, Homo sapiens
gcactaaggatcata

SEQ ID NO: 1444467 - DNA, 15 bp, Homo sapiens
cactaaggatcataa

SEQ ID NO: 1444468 - DNA, 15 bp, Homo sapiens
actaaggatcataac

SEQ ID NO: 1444469 - DNA, 15 bp, Homo sapiens
ctaaggatcataaca

SEQ ID NO: 1444470 - DNA, 15 bp, Homo sapiens
taaggatcataacaa

SEQ ID NO: 1444471 - DNA, 15 bp, Homo sapiens
aaggatcataacaaa

SEQ ID NO: 1444472 - DNA, 15 bp, Homo sapiens
aggatcataacaaat

SEQ ID NO: 1444473 - DNA, 15 bp, Homo sapiens
ggatcataacaaata

SEQ ID NO: 1444474 - DNA, 15 bp, Homo sapiens
gatcataacaaataa

SEQ ID NO: 1444475 - DNA, 15 bp, Homo sapiens
atcataacaaataaa

SEQ ID NO: 1444476 - DNA, 15 bp, Homo sapiens
tcataacaaataaaa

SEQ ID NO: 1444477 - DNA, 15 bp, Homo sapiens
cataacaaataaaac

SEQ ID NO: 1444478 - DNA, 15 bp, Homo sapiens
ataacaaataaaaca

SEQ ID NO: 1444479 - DNA, 15 bp, Homo sapiens
taacaaataaaacag

SEQ ID NO: 1444480 - DNA, 15 bp, Homo sapiens
aacaaataaaacaga

SEQ ID NO: 1444481 - DNA, 15 bp, Homo sapiens
acaaataaaacagaa

SEQ ID NO: 1444482 - DNA, 15 bp, Homo sapiens
caaataaaacagaat

SEQ ID NO: 1444483 - DNA, 15 bp, Homo sapiens
aaataaaacagaatt

SEQ ID NO: 1444484 - DNA, 15 bp, Homo sapiens
aataaaacagaattt

SEQ ID NO: 1444485 - DNA, 15 bp, Homo sapiens
taaaacagaattttt

SEQ ID NO: 1444486 - DNA, 15 bp, Homo sapiens
aaaacagaattttta

SEQ ID NO: 1444487 - DNA, 15 bp, Homo sapiens
aaacagaatttttat

SEQ ID NO: 1444488 - DNA, 15 bp, Homo sapiens
aacagaatttttatt

SEQ ID NO: 1444489 - DNA, 15 bp, Homo sapiens
acagaatttttattt

SEQ ID NO: 1444490 - DNA, 15 bp, Homo sapiens
cagaatttttatttt

SEQ ID NO: 1444491 - DNA, 15 bp, Homo sapiens
agaatttttattttc

SEQ ID NO: 1444492 - DNA, 15 bp, Homo sapiens
gaatttttattttca

SEQ ID NO: 1444493 - DNA, 15 bp, Homo sapiens
aatttttattttcag

SEQ ID NO: 1444494 - DNA, 15 bp, Homo sapiens
atttttattttcagt

SEQ ID NO: 1444495 - DNA, 15 bp, Homo sapiens
tttttattttcagtg

SEQ ID NO: 1444496 - DNA, 15 bp, Homo sapiens
ttttattttcagtgc

SEQ ID NO: 1444497 - DNA, 15 bp, Homo sapiens
tttattttcagtgct

SEQ ID NO: 1444498 - DNA, 15 bp, Homo sapiens
ttattttcagtgctt

SEQ ID NO: 1444499 - DNA, 15 bp, Homo sapiens
tattttcagtgctta

SEQ ID NO: 1444500 - DNA, 15 bp, Homo sapiens
attttcagtgcttac

SEQ ID NO: 1444501 - DNA, 15 bp, Homo sapiens
ttttcagtgcttaca

SEQ ID NO: 1444502 - DNA, 15 bp, Homo sapiens
tttcagtgcttacat

SEQ ID NO: 1444503 - DNA, 15 bp, Homo sapiens
ttcagtgcttacatt

SEQ ID NO: 1444504 - DNA, 15 bp, Homo sapiens
tcagtgcttacattc

SEQ ID NO: 1444505 - DNA, 15 bp, Homo sapiens
cagtgcttacattcc

SEQ ID NO: 1444506 - DNA, 15 bp, Homo sapiens
agtgcttacattcca

SEQ ID NO: 1444507 - DNA, 15 bp, Homo sapiens
gtgcttacattccag

SEQ ID NO: 1444508 - DNA, 15 bp, Homo sapiens
tgcttacattccagt

SEQ ID NO: 1444509 - DNA, 15 bp, Homo sapiens
gcttacattccagta

SEQ ID NO: 1444510 - DNA, 15 bp, Homo sapiens
cttacattccagtat

SEQ ID NO: 1444511 - DNA, 15 bp, Homo sapiens
ttacattccagtata

SEQ ID NO: 1444512 - DNA, 15 bp, Homo sapiens
tacattccagtataa

SEQ ID NO: 1444513 - DNA, 15 bp, Homo sapiens
acattccagtataaa

SEQ ID NO: 1444514 - DNA, 15 bp, Homo sapiens
cattccagtataaag

SEQ ID NO: 1444515 - DNA, 15 bp, Homo sapiens
attccagtataaagg

SEQ ID NO: 1444516 - DNA, 15 bp, Homo sapiens
ttccagtataaaggc

SEQ ID NO: 1444517 - DNA, 15 bp, Homo sapiens
tccagtataaaggca

SEQ ID NO: 1444518 - DNA, 15 bp, Homo sapiens
ccagtataaaggcat

SEQ ID NO: 1444519 - DNA, 15 bp, Homo sapiens
cagtataaaggcata

SEQ ID NO: 1444520 - DNA, 15 bp, Homo sapiens
agtataaaggcatat

SEQ ID NO: 1444521 - DNA, 15 bp, Homo sapiens
gtataaaggcatatt

SEQ ID NO: 1444522 - DNA, 15 bp, Homo sapiens
tataaaggcatattg

SEQ ID NO: 1444523 - DNA, 15 bp, Homo sapiens
ataaaggcatattga

SEQ ID NO: 1444524 - DNA, 15 bp, Homo sapiens
taaaggcatattgaa

SEQ ID NO: 1444525 - DNA, 15 bp, Homo sapiens
aaaggcatattgaaa

SEQ ID NO: 1444526 - DNA, 15 bp, Homo sapiens
aaggcatattgaaat

SEQ ID NO: 1444527 - DNA, 15 bp, Homo sapiens
aggcatattgaaata

SEQ ID NO: 1444528 - DNA, 15 bp, Homo sapiens
ggcatattgaaataa

SEQ ID NO: 1444529 - DNA, 15 bp, Homo sapiens
gcatattgaaataac

SEQ ID NO: 1444530 - DNA, 15 bp, Homo sapiens
catattgaaataacc

SEQ ID NO: 1444531 - DNA, 15 bp, Homo sapiens
atattgaaataacct

SEQ ID NO: 1444532 - DNA, 15 bp, Homo sapiens
tattgaaataacctt

SEQ ID NO: 1444533 - DNA, 15 bp, Homo sapiens
attgaaataaccttt

SEQ ID NO: 1444534 - DNA, 15 bp, Homo sapiens
ttgaaataacctttt

SEQ ID NO: 1444535 - DNA, 15 bp, Homo sapiens
tgaaataaccttttt

SEQ ID NO: 1444536 - DNA, 15 bp, Homo sapiens
gaaataacctttttt

SEQ ID NO: 1444537 - DNA, 15 bp, Homo sapiens
aaataaccttttttt

SEQ ID NO: 1444538 - DNA, 15 bp, Homo sapiens
aataaccttttttta

SEQ ID NO: 1444539 - DNA, 15 bp, Homo sapiens
ataacctttttttaa

SEQ ID NO: 1444540 - DNA, 15 bp, Homo sapiens
taacctttttttaat

SEQ ID NO: 1444541 - DNA, 15 bp, Homo sapiens
aacctttttttaatg

SEQ ID NO: 1444542 - DNA, 15 bp, Homo sapiens
acctttttttaatgt

SEQ ID NO: 1444543 - DNA, 15 bp, Homo sapiens
cctttttttaatgtt

SEQ ID NO: 1444544 - DNA, 15 bp, Homo sapiens
ctttttttaatgttt

SEQ ID NO: 1444545 - DNA, 15 bp, Homo sapiens
tttttttaatgttta

SEQ ID NO: 1444546 - DNA, 15 bp, Homo sapiens
ttttttaatgtttag

SEQ ID NO: 1444547 - DNA, 15 bp, Homo sapiens
tttttaatgtttaga

SEQ ID NO: 1444548 - DNA, 15 bp, Homo sapiens
ttttaatgtttagat

SEQ ID NO: 1444549 - DNA, 15 bp, Homo sapiens
tttaatgtttagatg

SEQ ID NO: 1444550 - DNA, 15 bp, Homo sapiens
ttaatgtttagatga

SEQ ID NO: 1444551 - DNA, 15 bp, Homo sapiens
taatgtttagatgaa

SEQ ID NO: 1444552 - DNA, 15 bp, Homo sapiens
aatgtttagatgaaa

SEQ ID NO: 1444553 - DNA, 15 bp, Homo sapiens
atgtttagatgaaag

SEQ ID NO: 1444554 - DNA, 15 bp, Homo sapiens
tgtttagatgaaagc

SEQ ID NO: 1444555 - DNA, 15 bp, Homo sapiens
gtttagatgaaagct

SEQ ID NO: 1444556 - DNA, 15 bp, Homo sapiens
tttagatgaaagctc

SEQ ID NO: 1444557 - DNA, 15 bp, Homo sapiens
ttagatgaaagctca

SEQ ID NO: 1444558 - DNA, 15 bp, Homo sapiens
tagatgaaagctcaa

SEQ ID NO: 1444559 - DNA, 15 bp, Homo sapiens
agatgaaagctcaag

SEQ ID NO: 1444560 - DNA, 15 bp, Homo sapiens
gatgaaagctcaaga

SEQ ID NO: 1444561 - DNA, 15 bp, Homo sapiens
atgaaagctcaagaa

SEQ ID NO: 1444562 - DNA, 15 bp, Homo sapiens
tgaaagctcaagaag

SEQ ID NO: 1444563 - DNA, 15 bp, Homo sapiens
gaaagctcaagaagt

SEQ ID NO: 1444564 - DNA, 15 bp, Homo sapiens
aaagctcaagaagtg

SEQ ID NO: 1444565 - DNA, 15 bp, Homo sapiens
aagctcaagaagtgg

SEQ ID NO: 1444566 - DNA, 15 bp, Homo sapiens
agctcaagaagtgga

SEQ ID NO: 1444567 - DNA, 15 bp, Homo sapiens
gctcaagaagtggag

SEQ ID NO: 1444568 - DNA, 15 bp, Homo sapiens
ctcaagaagtggagc

SEQ ID NO: 1444569 - DNA, 15 bp, Homo sapiens
tcaagaagtggagct

SEQ ID NO: 1444570 - DNA, 15 bp, Homo sapiens
caagaagtggagctg

SEQ ID NO: 1444571 - DNA, 15 bp, Homo sapiens
aagaagtggagctgg

SEQ ID NO: 1444572 - DNA, 15 bp, Homo sapiens
agaagtggagctggc

SEQ ID NO: 1444573 - DNA, 15 bp, Homo sapiens
gaagtggagctggct

SEQ ID NO: 1444574 - DNA, 15 bp, Homo sapiens
aagtggagctggctt

SEQ ID NO: 1444575 - DNA, 15 bp, Homo sapiens
agtggagctggcttt

SEQ ID NO: 1444576 - DNA, 15 bp, Homo sapiens
gtggagctggctttg

SEQ ID NO: 1444577 - DNA, 15 bp, Homo sapiens
tggagctggctttgg

SEQ ID NO: 1444578 - DNA, 15 bp, Homo sapiens
ggagctggctttgga

SEQ ID NO: 1444579 - DNA, 15 bp, Homo sapiens
gagctggctttggaa

SEQ ID NO: 1444580 - DNA, 15 bp, Homo sapiens
agctggctttggaag

SEQ ID NO: 1444581 - DNA, 15 bp, Homo sapiens
gctggctttggaaga

SEQ ID NO: 1444582 - DNA, 15 bp, Homo sapiens
ctggctttggaagaa

SEQ ID NO: 1444583 - DNA, 15 bp, Homo sapiens
tggctttggaagaag

SEQ ID NO: 1444584 - DNA, 15 bp, Homo sapiens
ggctttggaagaagt

SEQ ID NO: 1444585 - DNA, 15 bp, Homo sapiens
gctttggaagaagta

SEQ ID NO: 1444586 - DNA, 15 bp, Homo sapiens
ctttggaagaagtag

SEQ ID NO: 1444587 - DNA, 15 bp, Homo sapiens
tttggaagaagtaga

SEQ ID NO: 1444588 - DNA, 15 bp, Homo sapiens
ttggaagaagtagaa

SEQ ID NO: 1444589 - DNA, 15 bp, Homo sapiens
tggaagaagtagaaa

SEQ ID NO: 1444590 - DNA, 15 bp, Homo sapiens
ggaagaagtagaaaa

SEQ ID NO: 1444591 - DNA, 15 bp, Homo sapiens
gaagaagtagaaaaa

SEQ ID NO: 1444592 - DNA, 15 bp, Homo sapiens
aagaagtagaaaaag

SEQ ID NO: 1444593 - DNA, 15 bp, Homo sapiens
agaagtagaaaaagc

SEQ ID NO: 1444594 - DNA, 15 bp, Homo sapiens
gaagtagaaaaagct

SEQ ID NO: 1444595 - DNA, 15 bp, Homo sapiens
aagtagaaaaagctg

SEQ ID NO: 1444596 - DNA, 15 bp, Homo sapiens
agtagaaaaagctgg

SEQ ID NO: 1444597 - DNA, 15 bp, Homo sapiens
gtagaaaaagctgga

SEQ ID NO: 1444598 - DNA, 15 bp, Homo sapiens
tagaaaaagctggag

SEQ ID NO: 1444599 - DNA, 15 bp, Homo sapiens
agaaaaagctggaga

SEQ ID NO: 1444600 - DNA, 15 bp, Homo sapiens
gaaaaagctggagaa

SEQ ID NO: 1444601 - DNA, 15 bp, Homo sapiens
aaaaagctggagaag

SEQ ID NO: 1444602 - DNA, 15 bp, Homo sapiens
aaaagctggagaaga

SEQ ID NO: 1444603 - DNA, 15 bp, Homo sapiens
aaagctggagaagaa

SEQ ID NO: 1444604 - DNA, 15 bp, Homo sapiens
aagctggagaagaac

SEQ ID NO: 1444605 - DNA, 15 bp, Homo sapiens
agctggagaagaaca

SEQ ID NO: 1444606 - DNA, 15 bp, Homo sapiens
gctggagaagaacaa

SEQ ID NO: 1444607 - DNA, 15 bp, Homo sapiens
ctggagaagaacaag

SEQ ID NO: 1444608 - DNA, 15 bp, Homo sapiens
tggagaagaacaagc

SEQ ID NO: 1444609 - DNA, 15 bp, Homo sapiens
ggagaagaacaagca

SEQ ID NO: 1444610 - DNA, 15 bp, Homo sapiens
gagaagaacaagcaa

SEQ ID NO: 1444611 - DNA, 15 bp, Homo sapiens
agaagaacaagcaaa

SEQ ID NO: 1444612 - DNA, 15 bp, Homo sapiens
gaagaacaagcaaaa

SEQ ID NO: 1444613 - DNA, 15 bp, Homo sapiens
aagaacaagcaaaat

SEQ ID NO: 1444614 - DNA, 15 bp, Homo sapiens
agaacaagcaaaatt

SEQ ID NO: 1444615 - DNA, 15 bp, Homo sapiens
gaacaagcaaaattt

SEQ ID NO: 1444616 - DNA, 15 bp, Homo sapiens
aacaagcaaaatttg

SEQ ID NO: 1444617 - DNA, 15 bp, Homo sapiens
acaagcaaaatttgg

SEQ ID NO: 1444618 - DNA, 15 bp, Homo sapiens
caagcaaaatttggt

SEQ ID NO: 1444619 - DNA, 15 bp, Homo sapiens
aagcaaaatttggta

SEQ ID NO: 1444620 - DNA, 15 bp, Homo sapiens
agcaaaatttggtaa

SEQ ID NO: 1444621 - DNA, 15 bp, Homo sapiens
gcaaaatttggtaag

SEQ ID NO: 1444622 - DNA, 15 bp, Homo sapiens
caaaatttggtaagc

SEQ ID NO: 1444623 - DNA, 15 bp, Homo sapiens
aaaatttggtaagca

SEQ ID NO: 1444624 - DNA, 15 bp, Homo sapiens
aaatttggtaagcac

SEQ ID NO: 1444625 - DNA, 15 bp, Homo sapiens
aatttggtaagcacc

SEQ ID NO: 1444626 - DNA, 15 bp, Homo sapiens
atttggtaagcacct

SEQ ID NO: 1444627 - DNA, 15 bp, Homo sapiens
tttggtaagcacctt

SEQ ID NO: 1444628 - DNA, 15 bp, Homo sapiens
ttggtaagcaccttg

SEQ ID NO: 1444629 - DNA, 15 bp, Homo sapiens
tggtaagcaccttgg

SEQ ID NO: 1444630 - DNA, 15 bp, Homo sapiens
ggtaagcaccttgga

SEQ ID NO: 1444631 - DNA, 15 bp, Homo sapiens
gtaagcaccttggaa

SEQ ID NO: 1444632 - DNA, 15 bp, Homo sapiens
taagcaccttggaaa

SEQ ID NO: 1444633 - DNA, 15 bp, Homo sapiens
aagcaccttggaaaa

SEQ ID NO: 1444634 - DNA, 15 bp, Homo sapiens
agcaccttggaaaaa

SEQ ID NO: 1444635 - DNA, 15 bp, Homo sapiens
gcaccttggaaaaag

SEQ ID NO: 1444636 - DNA, 15 bp, Homo sapiens
caccttggaaaaagt

SEQ ID NO: 1444637 - DNA, 15 bp, Homo sapiens
accttggaaaaagtt

SEQ ID NO: 1444638 - DNA, 15 bp, Homo sapiens
ccttggaaaaagttt

SEQ ID NO: 1444639 - DNA, 15 bp, Homo sapiens
cttggaaaaagttta

SEQ ID NO: 1444640 - DNA, 15 bp, Homo sapiens
ttggaaaaagtttat

SEQ ID NO: 1444641 - DNA, 15 bp, Homo sapiens
tggaaaaagtttatt

SEQ ID NO: 1444642 - DNA, 15 bp, Homo sapiens
ggaaaaagtttatta

SEQ ID NO: 1444643 - DNA, 15 bp, Homo sapiens
gaaaaagtttattat

SEQ ID NO: 1444644 - DNA, 15 bp, Homo sapiens
aaaaagtttattatg

SEQ ID NO: 1444645 - DNA, 15 bp, Homo sapiens
aaaagtttattatgg

SEQ ID NO: 1444646 - DNA, 15 bp, Homo sapiens
aaagtttattatggt

SEQ ID NO: 1444647 - DNA, 15 bp, Homo sapiens
aagtttattatggta

SEQ ID NO: 1444648 - DNA, 15 bp, Homo sapiens
agtttattatggtat

SEQ ID NO: 1444649 - DNA, 15 bp, Homo sapiens
gtttattatggtatt

SEQ ID NO: 1444650 - DNA, 15 bp, Homo sapiens
tttattatggtatta

SEQ ID NO: 1444651 - DNA, 15 bp, Homo sapiens
ttattatggtattaa

SEQ ID NO: 1444652 - DNA, 15 bp, Homo sapiens
tattatggtattaaa

SEQ ID NO: 1444653 - DNA, 15 bp, Homo sapiens
attatggtattaaat

SEQ ID NO: 1444654 - DNA, 15 bp, Homo sapiens
ttatggtattaaata

SEQ ID NO: 1444655 - DNA, 15 bp, Homo sapiens
tatggtattaaataa

SEQ ID NO: 1444656 - DNA, 15 bp, Homo sapiens
atggtattaaataat

SEQ ID NO: 1444657 - DNA, 15 bp, Homo sapiens
tggtattaaataatg

SEQ ID NO: 1444658 - DNA, 15 bp, Homo sapiens
ggtattaaataatga

SEQ ID NO: 1444659 - DNA, 15 bp, Homo sapiens
gtattaaataatgaa

SEQ ID NO: 1444660 - DNA, 15 bp, Homo sapiens
tattaaataatgaat

SEQ ID NO: 1444661 - DNA, 15 bp, Homo sapiens
attaaataatgaatt

SEQ ID NO: 1444662 - DNA, 15 bp, Homo sapiens
ttaaataatgaattc

SEQ ID NO: 1444663 - DNA, 15 bp, Homo sapiens
taaataatgaattcc

SEQ ID NO: 1444664 - DNA, 15 bp, Homo sapiens
aaataatgaattcca

SEQ ID NO: 1444665 - DNA, 15 bp, Homo sapiens
aataatgaattccat

SEQ ID NO: 1444666 - DNA, 15 bp, Homo sapiens
ataatgaattccatt

SEQ ID NO: 1444667 - DNA, 15 bp, Homo sapiens
taatgaattccattt

SEQ ID NO: 1444668 - DNA, 15 bp, Homo sapiens
aatgaattccatttg

SEQ ID NO: 1444669 - DNA, 15 bp, Homo sapiens
atgaattccatttgt

SEQ ID NO: 1444670 - DNA, 15 bp, Homo sapiens
tgaattccatttgtt

SEQ ID NO: 1444671 - DNA, 15 bp, Homo sapiens
gaattccatttgttc

SEQ ID NO: 1444672 - DNA, 15 bp, Homo sapiens
aattccatttgttca

SEQ ID NO: 1444673 - DNA, 15 bp, Homo sapiens
attccatttgttcat

SEQ ID NO: 1444674 - DNA, 15 bp, Homo sapiens
ttccatttgttcatt

SEQ ID NO: 1444675 - DNA, 15 bp, Homo sapiens
tccatttgttcatta

SEQ ID NO: 1444676 - DNA, 15 bp, Homo sapiens
ccatttgttcattaa

SEQ ID NO: 1444677 - DNA, 15 bp, Homo sapiens
catttgttcattaaa

SEQ ID NO: 1444678 - DNA, 15 bp, Homo sapiens
atttgttcattaaac

SEQ ID NO: 1444679 - DNA, 15 bp, Homo sapiens
tttgttcattaaact

SEQ ID NO: 1444680 - DNA, 15 bp, Homo sapiens
ttgttcattaaactg

SEQ ID NO: 1444681 - DNA, 15 bp, Homo sapiens
tgttcattaaactgt

SEQ ID NO: 1444682 - DNA, 15 bp, Homo sapiens
gttcattaaactgta

SEQ ID NO: 1444683 - DNA, 15 bp, Homo sapiens
ttcattaaactgtag

SEQ ID NO: 1444684 - DNA, 15 bp, Homo sapiens
tcattaaactgtaga

SEQ ID NO: 1444685 - DNA, 15 bp, Homo sapiens
cattaaactgtagaa

SEQ ID NO: 1444686 - DNA, 15 bp, Homo sapiens
attaaactgtagaaa

SEQ ID NO: 1444687 - DNA, 15 bp, Homo sapiens
ttaaactgtagaaaa

SEQ ID NO: 1444688 - DNA, 15 bp, Homo sapiens
taaactgtagaaaat

SEQ ID NO: 1444689 - DNA, 15 bp, Homo sapiens
aaactgtagaaaatt

SEQ ID NO: 1444690 - DNA, 15 bp, Homo sapiens
aactgtagaaaatta

SEQ ID NO: 1444691 - DNA, 15 bp, Homo sapiens
actgtagaaaattaa

SEQ ID NO: 1444692 - DNA, 15 bp, Homo sapiens
ctgtagaaaattaaa

SEQ ID NO: 1444693 - DNA, 15 bp, Homo sapiens
tgtagaaaattaaat

SEQ ID NO: 1444694 - DNA, 15 bp, Homo sapiens
gtagaaaattaaatt

SEQ ID NO: 1444695 - DNA, 15 bp, Homo sapiens
tagaaaattaaatta

SEQ ID NO: 1444696 - DNA, 15 bp, Homo sapiens
agaaaattaaattat

SEQ ID NO: 1444697 - DNA, 15 bp, Homo sapiens
gaaaattaaattata

SEQ ID NO: 1444698 - DNA, 15 bp, Homo sapiens
aaaattaaattatat

SEQ ID NO: 1444699 - DNA, 15 bp, Homo sapiens
aaattaaattatatt

SEQ ID NO: 1444700 - DNA, 15 bp, Homo sapiens
aattaaattatattc

SEQ ID NO: 1444701 - DNA, 15 bp, Homo sapiens
attaaattatattct

SEQ ID NO: 1444702 - DNA, 15 bp, Homo sapiens
ttaaattatattcta

SEQ ID NO: 1444703 - DNA, 15 bp, Homo sapiens
taaattatattctat

SEQ ID NO: 1444704 - DNA, 15 bp, Homo sapiens
aaattatattctata

SEQ ID NO: 1444705 - DNA, 15 bp, Homo sapiens
aattatattctataa

SEQ ID NO: 1444706 - DNA, 15 bp, Homo sapiens
attatattctataaa

SEQ ID NO: 1444707 - DNA, 15 bp, Homo sapiens
ttatattctataaaa

SEQ ID NO: 1444708 - DNA, 15 bp, Homo sapiens
tatattctataaaat

SEQ ID NO: 1444709 - DNA, 15 bp, Homo sapiens
atattctataaaata

SEQ ID NO: 1444710 - DNA, 15 bp, Homo sapiens
tattctataaaatat

SEQ ID NO: 1444711 - DNA, 15 bp, Homo sapiens
attctataaaatata

SEQ ID NO: 1444712 - DNA, 15 bp, Homo sapiens
ttctataaaatatat

SEQ ID NO: 1444713 - DNA, 15 bp, Homo sapiens
tctataaaatatata

SEQ ID NO: 1444714 - DNA, 15 bp, Homo sapiens
ctataaaatatatat

SEQ ID NO: 1444715 - DNA, 15 bp, Homo sapiens
tataaaatatatata

SEQ ID NO: 1444716 - DNA, 15 bp, Homo sapiens
ataaaatatatatat

SEQ ID NO: 1444717 - DNA, 15 bp, Homo sapiens
taaaatatatatatt

SEQ ID NO: 1444718 - DNA, 15 bp, Homo sapiens
aaaatatatatattc

SEQ ID NO: 1444719 - DNA, 15 bp, Homo sapiens
aaatatatatattca

SEQ ID NO: 1444720 - DNA, 15 bp, Homo sapiens
aatatatatattcag

SEQ ID NO: 1444721 - DNA, 15 bp, Homo sapiens
atatatatattcagt

SEQ ID NO: 1444722 - DNA, 15 bp, Homo sapiens
tatatatattcagtt

SEQ ID NO: 1444723 - DNA, 15 bp, Homo sapiens
atatatattcagttt

SEQ ID NO: 1444724 - DNA, 15 bp, Homo sapiens
tatatattcagttta

SEQ ID NO: 1444725 - DNA, 15 bp, Homo sapiens
atatattcagtttat

SEQ ID NO: 1444726 - DNA, 15 bp, Homo sapiens
tatattcagtttatt

SEQ ID NO: 1444727 - DNA, 15 bp, Homo sapiens
atattcagtttattt

SEQ ID NO: 1444728 - DNA, 15 bp, Homo sapiens
tattcagtttatttt

SEQ ID NO: 1444729 - DNA, 15 bp, Homo sapiens
attcagtttattttt

SEQ ID NO: 1444730 - DNA, 15 bp, Homo sapiens
ttcagtttattttta

SEQ ID NO: 1444731 - DNA, 15 bp, Homo sapiens
tcagtttatttttaa

SEQ ID NO: 1444732 - DNA, 15 bp, Homo sapiens
cagtttatttttaat

SEQ ID NO: 1444733 - DNA, 15 bp, Homo sapiens
agtttatttttaata

SEQ ID NO: 1444734 - DNA, 15 bp, Homo sapiens
gtttatttttaatat

SEQ ID NO: 1444735 - DNA, 15 bp, Homo sapiens
tttatttttaatata

SEQ ID NO: 1444736 - DNA, 15 bp, Homo sapiens
ttatttttaatatat

SEQ ID NO: 1444737 - DNA, 15 bp, Homo sapiens
tatttttaatatata

SEQ ID NO: 1444738 - DNA, 15 bp, Homo sapiens
atttttaatatataa

SEQ ID NO: 1444739 - DNA, 15 bp, Homo sapiens
tttttaatatataac

SEQ ID NO: 1444740 - DNA, 15 bp, Homo sapiens
ttttaatatataaca

SEQ ID NO: 1444741 - DNA, 15 bp, Homo sapiens
tttaatatataacat

SEQ ID NO: 1444742 - DNA, 15 bp, Homo sapiens
ttaatatataacatt

SEQ ID NO: 1444743 - DNA, 15 bp, Homo sapiens
taatatataacattt

SEQ ID NO: 1444744 - DNA, 15 bp, Homo sapiens
aatatataacattta

SEQ ID NO: 1444745 - DNA, 15 bp, Homo sapiens
atatataacatttaa

SEQ ID NO: 1444746 - DNA, 15 bp, Homo sapiens
tatataacatttaat

SEQ ID NO: 1444747 - DNA, 15 bp, Homo sapiens
ataacatttaataat

SEQ ID NO: 1444748 - DNA, 15 bp, Homo sapiens
taacatttaataata

SEQ ID NO: 1444749 - DNA, 15 bp, Homo sapiens
aacatttaataataa

SEQ ID NO: 1444750 - DNA, 15 bp, Homo sapiens
acatttaataataaa

SEQ ID NO: 1444751 - DNA, 15 bp, Homo sapiens
catttaataataaat

SEQ ID NO: 1444752 - DNA, 15 bp, Homo sapiens
atttaataataaata

SEQ ID NO: 1444753 - DNA, 15 bp, Homo sapiens
tttaataataaatat

SEQ ID NO: 1444754 - DNA, 15 bp, Homo sapiens
ttaataataaatatt

SEQ ID NO: 1444755 - DNA, 15 bp, Homo sapiens
taataataaatattt

SEQ ID NO: 1444756 - DNA, 15 bp, Homo sapiens
aataataaatatttc

SEQ ID NO: 1444757 - DNA, 15 bp, Homo sapiens
ataataaatatttct

SEQ ID NO: 1444758 - DNA, 15 bp, Homo sapiens
taataaatatttcta

SEQ ID NO: 1444759 - DNA, 15 bp, Homo sapiens
aataaatatttctag

SEQ ID NO: 1444760 - DNA, 15 bp, Homo sapiens
ataaatatttctaga

SEQ ID NO: 1444761 - DNA, 15 bp, Homo sapiens
taaatatttctagac

SEQ ID NO: 1444762 - DNA, 15 bp, Homo sapiens
aaatatttctagact

SEQ ID NO: 1444763 - DNA, 15 bp, Homo sapiens
aatatttctagactc

SEQ ID NO: 1444764 - DNA, 15 bp, Homo sapiens
atatttctagactcc

SEQ ID NO: 1444765 - DNA, 15 bp, Homo sapiens
tatttctagactcct

SEQ ID NO: 1444766 - DNA, 15 bp, Homo sapiens
atttctagactccta

SEQ ID NO: 1444767 - DNA, 15 bp, Homo sapiens
tttctagactcctat

SEQ ID NO: 1444768 - DNA, 15 bp, Homo sapiens
ttctagactcctatt

SEQ ID NO: 1444769 - DNA, 15 bp, Homo sapiens
tctagactcctattt

SEQ ID NO: 1444770 - DNA, 15 bp, Homo sapiens
ctagactcctatttt

SEQ ID NO: 1444771 - DNA, 15 bp, Homo sapiens
tagactcctatttta

SEQ ID NO: 1444772 - DNA, 15 bp, Homo sapiens
agactcctattttat

SEQ ID NO: 1444773 - DNA, 15 bp, Homo sapiens
gactcctattttatg

SEQ ID NO: 1444774 - DNA, 15 bp, Homo sapiens
actcctattttatgg

SEQ ID NO: 1444775 - DNA, 15 bp, Homo sapiens
ctcctattttatgga

SEQ ID NO: 1444776 - DNA, 15 bp, Homo sapiens
tcctattttatggat

SEQ ID NO: 1444777 - DNA, 15 bp, Homo sapiens
cctattttatggatc

SEQ ID NO: 1444778 - DNA, 15 bp, Homo sapiens
ctattttatggatct

SEQ ID NO: 1444779 - DNA, 15 bp, Homo sapiens
tattttatggatctg

SEQ ID NO: 1444780 - DNA, 15 bp, Homo sapiens
attttatggatctgc

SEQ ID NO: 1444781 - DNA, 15 bp, Homo sapiens
ttttatggatctgcc

SEQ ID NO: 1444782 - DNA, 15 bp, Homo sapiens
tttatggatctgcca

SEQ ID NO: 1444783 - DNA, 15 bp, Homo sapiens
ttatggatctgccat

SEQ ID NO: 1444784 - DNA, 15 bp, Homo sapiens
tatggatctgccata

SEQ ID NO: 1444785 - DNA, 15 bp, Homo sapiens
atggatctgccatat

SEQ ID NO: 1444786 - DNA, 15 bp, Homo sapiens
tggatctgccatata

SEQ ID NO: 1444787 - DNA, 15 bp, Homo sapiens
ggatctgccatataa

SEQ ID NO: 1444788 - DNA, 15 bp, Homo sapiens
gatctgccatataat

SEQ ID NO: 1444789 - DNA, 15 bp, Homo sapiens
atctgccatataata

SEQ ID NO: 1444790 - DNA, 15 bp, Homo sapiens
tctgccatataatac

SEQ ID NO: 1444791 - DNA, 15 bp, Homo sapiens
ctgccatataatact

SEQ ID NO: 1444792 - DNA, 15 bp, Homo sapiens
tgccatataatactt

SEQ ID NO: 1444793 - DNA, 15 bp, Homo sapiens
gccatataatacttt

SEQ ID NO: 1444794 - DNA, 15 bp, Homo sapiens
ccatataatactttt

SEQ ID NO: 1444795 - DNA, 15 bp, Homo sapiens
catataatacttttt

SEQ ID NO: 1444796 - DNA, 15 bp, Homo sapiens
atataatactttttg

SEQ ID NO: 1444797 - DNA, 15 bp, Homo sapiens
tataatactttttgt

SEQ ID NO: 1444798 - DNA, 15 bp, Homo sapiens
ataatactttttgtt

SEQ ID NO: 1444799 - DNA, 15 bp, Homo sapiens
taatactttttgtta

SEQ ID NO: 1444800 - DNA, 15 bp, Homo sapiens
aatactttttgttac

SEQ ID NO: 1444801 - DNA, 15 bp, Homo sapiens
atactttttgttacc

SEQ ID NO: 1444802 - DNA, 15 bp, Homo sapiens
tactttttgttacct

SEQ ID NO: 1444803 - DNA, 15 bp, Homo sapiens
actttttgttacctt

SEQ ID NO: 1444804 - DNA, 15 bp, Homo sapiens
ctttttgttacctta

SEQ ID NO: 1444805 - DNA, 15 bp, Homo sapiens
tttttgttaccttat

SEQ ID NO: 1444806 - DNA, 15 bp, Homo sapiens
ttttgttaccttata

SEQ ID NO: 1444807 - DNA, 15 bp, Homo sapiens
tttgttaccttataa

SEQ ID NO: 1444808 - DNA, 15 bp, Homo sapiens
ttgttaccttataat

SEQ ID NO: 1444809 - DNA, 15 bp, Homo sapiens
cgctatactgggttt

SEQ ID NO: 1444810 - DNA, 15 bp, Homo sapiens
gctatactgggttta

SEQ ID NO: 1444811 - DNA, 15 bp, Homo sapiens
ctatactgggtttat

SEQ ID NO: 1444812 - DNA, 15 bp, Homo sapiens
tatactgggtttatg

SEQ ID NO: 1444813 - DNA, 15 bp, Homo sapiens
atactgggtttatgc

SEQ ID NO: 1444814 - DNA, 15 bp, Homo sapiens
tactgggtttatgcc

SEQ ID NO: 1444815 - DNA, 15 bp, Homo sapiens
actgggtttatgcca

SEQ ID NO: 1444816 - DNA, 15 bp, Homo sapiens
ctgggtttatgccaa

SEQ ID NO: 1444817 - DNA, 15 bp, Homo sapiens
tgggtttatgccaag

SEQ ID NO: 1444818 - DNA, 15 bp, Homo sapiens
gggtttatgccaaga

SEQ ID NO: 1444819 - DNA, 15 bp, Homo sapiens
ggtttatgccaagaa

SEQ ID NO: 1444820 - DNA, 15 bp, Homo sapiens
gtttatgccaagaac

SEQ ID NO: 1444821 - DNA, 15 bp, Homo sapiens
tttatgccaagaaca

SEQ ID NO: 1444822 - DNA, 15 bp, Homo sapiens
ttatgccaagaacat

SEQ ID NO: 1444823 - DNA, 15 bp, Homo sapiens
tatgccaagaacatt

SEQ ID NO: 1444824 - DNA, 15 bp, Homo sapiens
atgccaagaacatta

SEQ ID NO: 1444825 - DNA, 15 bp, Homo sapiens
tgccaagaacattac

SEQ ID NO: 1444826 - DNA, 15 bp, Homo sapiens
gccaagaacattaca

SEQ ID NO: 1444827 - DNA, 15 bp, Homo sapiens
ccaagaacattacac

SEQ ID NO: 1444828 - DNA, 15 bp, Homo sapiens
caagaacattacaca

SEQ ID NO: 1444829 - DNA, 15 bp, Homo sapiens
aagaacattacacat

SEQ ID NO: 1444830 - DNA, 15 bp, Homo sapiens
agaacattacacatg

SEQ ID NO: 1444831 - DNA, 15 bp, Homo sapiens
gaacattacacatgt

SEQ ID NO: 1444832 - DNA, 15 bp, Homo sapiens
aacattacacatgtt

SEQ ID NO: 1444833 - DNA, 15 bp, Homo sapiens
acattacacatgttt

SEQ ID NO: 1444834 - DNA, 15 bp, Homo sapiens
cattacacatgtttg

SEQ ID NO: 1444835 - DNA, 15 bp, Homo sapiens
attacacatgtttgt

SEQ ID NO: 1444836 - DNA, 15 bp, Homo sapiens
ttacacatgtttgtg

SEQ ID NO: 1444837 - DNA, 15 bp, Homo sapiens
tacacatgtttgtgg

SEQ ID NO: 1444838 - DNA, 15 bp, Homo sapiens
acacatgtttgtgga

SEQ ID NO: 1444839 - DNA, 15 bp, Homo sapiens
cacatgtttgtggaa

SEQ ID NO: 1444840 - DNA, 15 bp, Homo sapiens
acatgtttgtggaat

SEQ ID NO: 1444841 - DNA, 15 bp, Homo sapiens
catgtttgtggaatg

SEQ ID NO: 1444842 - DNA, 15 bp, Homo sapiens
atgtttgtggaatgc

SEQ ID NO: 1444843 - DNA, 15 bp, Homo sapiens
tgtttgtggaatgct

SEQ ID NO: 1444844 - DNA, 15 bp, Homo sapiens
gtttgtggaatgctc

SEQ ID NO: 1444845 - DNA, 15 bp, Homo sapiens
tttgtggaatgctca

SEQ ID NO: 1444846 - DNA, 15 bp, Homo sapiens
ttgtggaatgctcat

SEQ ID NO: 1444847 - DNA, 15 bp, Homo sapiens
tgtggaatgctcatg

SEQ ID NO: 1444848 - DNA, 15 bp, Homo sapiens
gtggaatgctcatgt

SEQ ID NO: 1444849 - DNA, 15 bp, Homo sapiens
tggaatgctcatgtg

SEQ ID NO: 1444850 - DNA, 15 bp, Homo sapiens
ggaatgctcatgtgt

SEQ ID NO: 1444851 - DNA, 15 bp, Homo sapiens
gaatgctcatgtgta

SEQ ID NO: 1444852 - DNA, 15 bp, Homo sapiens
aatgctcatgtgtag

SEQ ID NO: 1444853 - DNA, 15 bp, Homo sapiens
atgctcatgtgtaga

SEQ ID NO: 1444854 - DNA, 15 bp, Homo sapiens
tgctcatgtgtagac

SEQ ID NO: 1444855 - DNA, 15 bp, Homo sapiens
gctcatgtgtagaca

SEQ ID NO: 1444856 - DNA, 15 bp, Homo sapiens
ctcatgtgtagacaa

SEQ ID NO: 1444857 - DNA, 15 bp, Homo sapiens
tcatgtgtagacaac

SEQ ID NO: 1444858 - DNA, 15 bp, Homo sapiens
catgtgtagacaaca

SEQ ID NO: 1444859 - DNA, 15 bp, Homo sapiens
atgtgtagacaacag

SEQ ID NO: 1444860 - DNA, 15 bp, Homo sapiens
tgtgtagacaacagt

SEQ ID NO: 1444861 - DNA, 15 bp, Homo sapiens
gtgtagacaacagtg

SEQ ID NO: 1444862 - DNA, 15 bp, Homo sapiens
tgtagacaacagtgt

SEQ ID NO: 1444863 - DNA, 15 bp, Homo sapiens
gtagacaacagtgtc

SEQ ID NO: 1444864 - DNA, 15 bp, Homo sapiens
tagacaacagtgtct

SEQ ID NO: 1444865 - DNA, 15 bp, Homo sapiens
agacaacagtgtctt

SEQ ID NO: 1444866 - DNA, 15 bp, Homo sapiens
gacaacagtgtctta

SEQ ID NO: 1444867 - DNA, 15 bp, Homo sapiens
acaacagtgtcttac

SEQ ID NO: 1444868 - DNA, 15 bp, Homo sapiens
caacagtgtcttaca

SEQ ID NO: 1444869 - DNA, 15 bp, Homo sapiens
aacagtgtcttacac

SEQ ID NO: 1444870 - DNA, 15 bp, Homo sapiens
acagtgtcttacaca

SEQ ID NO: 1444871 - DNA, 15 bp, Homo sapiens
cagtgtcttacacaa

SEQ ID NO: 1444872 - DNA, 15 bp, Homo sapiens
agtgtcttacacaac

SEQ ID NO: 1444873 - DNA, 15 bp, Homo sapiens
gtgtcttacacaact

SEQ ID NO: 1444874 - DNA, 15 bp, Homo sapiens
tgtcttacacaactt

SEQ ID NO: 1444875 - DNA, 15 bp, Homo sapiens
gtcttacacaacttc

SEQ ID NO: 1444876 - DNA, 15 bp, Homo sapiens
tcttacacaacttca

SEQ ID NO: 1444877 - DNA, 15 bp, Homo sapiens
cttacacaacttcaa

SEQ ID NO: 1444878 - DNA, 15 bp, Homo sapiens
ttacacaacttcaaa

SEQ ID NO: 1444879 - DNA, 15 bp, Homo sapiens
tacacaacttcaaaa

SEQ ID NO: 1444880 - DNA, 15 bp, Homo sapiens
acacaacttcaaaaa

SEQ ID NO: 1444881 - DNA, 15 bp, Homo sapiens
cacaacttcaaaaaa

SEQ ID NO: 1444882 - DNA, 15 bp, Homo sapiens
acaacttcaaaaaaa

SEQ ID NO: 1444883 - DNA, 15 bp, Homo sapiens
caacttcaaaaaaat

SEQ ID NO: 1444884 - DNA, 15 bp, Homo sapiens
aacttcaaaaaaata

SEQ ID NO: 1444885 - DNA, 15 bp, Homo sapiens
acttcaaaaaaataa

SEQ ID NO: 1444886 - DNA, 15 bp, Homo sapiens
cttcaaaaaaataat

SEQ ID NO: 1444887 - DNA, 15 bp, Homo sapiens
ttcaaaaaaataatt

SEQ ID NO: 1444888 - DNA, 15 bp, Homo sapiens
tcaaaaaaataattt

SEQ ID NO: 1444889 - DNA, 15 bp, Homo sapiens
caaaaaaataattta

SEQ ID NO: 1444890 - DNA, 15 bp, Homo sapiens
aaaaaaataatttat

SEQ ID NO: 1444891 - DNA, 15 bp, Homo sapiens
aaaaaataatttata

SEQ ID NO: 1444892 - DNA, 15 bp, Homo sapiens
aaaaataatttatat

SEQ ID NO: 1444893 - DNA, 15 bp, Homo sapiens
taatttatatataaa

SEQ ID NO: 1444894 - DNA, 15 bp, Homo sapiens
aatttatatataaat

SEQ ID NO: 1444895 - DNA, 15 bp, Homo sapiens
atttatatataaata

SEQ ID NO: 1444896 - DNA, 15 bp, Homo sapiens
tttatatataaatat

SEQ ID NO: 1444897 - DNA, 15 bp, Homo sapiens
ttatatataaatatg

SEQ ID NO: 1444898 - DNA, 15 bp, Homo sapiens
tatatataaatatgt

SEQ ID NO: 1444899 - DNA, 15 bp, Homo sapiens
atatataaatatgtt

SEQ ID NO: 1444900 - DNA, 15 bp, Homo sapiens
tatataaatatgttt

SEQ ID NO: 1444901 - DNA, 15 bp, Homo sapiens
atataaatatgtttt

SEQ ID NO: 1444902 - DNA, 15 bp, Homo sapiens
tataaatatgtttta

SEQ ID NO: 1444903 - DNA, 15 bp, Homo sapiens
ataaatatgttttaa

SEQ ID NO: 1444904 - DNA, 15 bp, Homo sapiens
taaatatgttttaaa

SEQ ID NO: 1444905 - DNA, 15 bp, Homo sapiens
aaatatgttttaaat

SEQ ID NO: 1444906 - DNA, 15 bp, Homo sapiens
aatatgttttaaatt

SEQ ID NO: 1444907 - DNA, 15 bp, Homo sapiens
atatgttttaaatta

SEQ ID NO: 1444908 - DNA, 15 bp, Homo sapiens
tatgttttaaattac

SEQ ID NO: 1444909 - DNA, 15 bp, Homo sapiens
atgttttaaattact

SEQ ID NO: 1444910 - DNA, 15 bp, Homo sapiens
tgttttaaattactt

SEQ ID NO: 1444911 - DNA, 15 bp, Homo sapiens
gttttaaattacttt

SEQ ID NO: 1444912 - DNA, 15 bp, Homo sapiens
ttttaaattactttt

SEQ ID NO: 1444913 - DNA, 15 bp, Homo sapiens
tttaaattacttttt

SEQ ID NO: 1444914 - DNA, 15 bp, Homo sapiens
ttaaattacttttta

SEQ ID NO: 1444915 - DNA, 15 bp, Homo sapiens
taaattactttttaa

SEQ ID NO: 1444916 - DNA, 15 bp, Homo sapiens
aaattactttttaaa

SEQ ID NO: 1444917 - DNA, 15 bp, Homo sapiens
aattactttttaaat

SEQ ID NO: 1444918 - DNA, 15 bp, Homo sapiens
attactttttaaatt

SEQ ID NO: 1444919 - DNA, 15 bp, Homo sapiens
ttactttttaaattc

SEQ ID NO: 1444920 - DNA, 15 bp, Homo sapiens
tactttttaaattca

SEQ ID NO: 1444921 - DNA, 15 bp, Homo sapiens
actttttaaattcac

SEQ ID NO: 1444922 - DNA, 15 bp, Homo sapiens
ctttttaaattcaca

SEQ ID NO: 1444923 - DNA, 15 bp, Homo sapiens
tttttaaattcacaa

SEQ ID NO: 1444924 - DNA, 15 bp, Homo sapiens
ttttaaattcacaag

SEQ ID NO: 1444925 - DNA, 15 bp, Homo sapiens
tttaaattcacaaga

SEQ ID NO: 1444926 - DNA, 15 bp, Homo sapiens
ttaaattcacaagaa

SEQ ID NO: 1444927 - DNA, 15 bp, Homo sapiens
taaattcacaagaat

SEQ ID NO: 1444928 - DNA, 15 bp, Homo sapiens
aaattcacaagaatt

SEQ ID NO: 1444929 - DNA, 15 bp, Homo sapiens
aattcacaagaattt

SEQ ID NO: 1444930 - DNA, 15 bp, Homo sapiens
attcacaagaattta

SEQ ID NO: 1444931 - DNA, 15 bp, Homo sapiens
ttcacaagaatttat

SEQ ID NO: 1444932 - DNA, 15 bp, Homo sapiens
tcacaagaatttatg

SEQ ID NO: 1444933 - DNA, 15 bp, Homo sapiens
cacaagaatttatgg

SEQ ID NO: 1444934 - DNA, 15 bp, Homo sapiens
acaagaatttatggt

SEQ ID NO: 1444935 - DNA, 15 bp, Homo sapiens
caagaatttatggta

SEQ ID NO: 1444936 - DNA, 15 bp, Homo sapiens
aagaatttatggtat

SEQ ID NO: 1444937 - DNA, 15 bp, Homo sapiens
agaatttatggtata

SEQ ID NO: 1444938 - DNA, 15 bp, Homo sapiens
gaatttatggtatac

SEQ ID NO: 1444939 - DNA, 15 bp, Homo sapiens
aatttatggtataca

SEQ ID NO: 1444940 - DNA, 15 bp, Homo sapiens
atttatggtatacaa

SEQ ID NO: 1444941 - DNA, 15 bp, Homo sapiens
tttatggtatacaac

SEQ ID NO: 1444942 - DNA, 15 bp, Homo sapiens
ttatggtatacaaca

SEQ ID NO: 1444943 - DNA, 15 bp, Homo sapiens
tatggtatacaacat

SEQ ID NO: 1444944 - DNA, 15 bp, Homo sapiens
atggtatacaacatg

SEQ ID NO: 1444945 - DNA, 15 bp, Homo sapiens
tggtatacaacatgg

SEQ ID NO: 1444946 - DNA, 15 bp, Homo sapiens
ggtatacaacatggt

SEQ ID NO: 1444947 - DNA, 15 bp, Homo sapiens
gtatacaacatggtg

SEQ ID NO: 1444948 - DNA, 15 bp, Homo sapiens
tatacaacatggtgt

SEQ ID NO: 1444949 - DNA, 15 bp, Homo sapiens
atacaacatggtgtt

SEQ ID NO: 1444950 - DNA, 15 bp, Homo sapiens
tacaacatggtgttc

SEQ ID NO: 1444951 - DNA, 15 bp, Homo sapiens
acaacatggtgttct

SEQ ID NO: 1444952 - DNA, 15 bp, Homo sapiens
caacatggtgttcta

SEQ ID NO: 1444953 - DNA, 15 bp, Homo sapiens
aacatggtgttctat

SEQ ID NO: 1444954 - DNA, 15 bp, Homo sapiens
acatggtgttctata

SEQ ID NO: 1444955 - DNA, 15 bp, Homo sapiens
catggtgttctatat

SEQ ID NO: 1444956 - DNA, 15 bp, Homo sapiens
atggtgttctatata

SEQ ID NO: 1444957 - DNA, 15 bp, Homo sapiens
tggtgttctatatat

SEQ ID NO: 1444958 - DNA, 15 bp, Homo sapiens
ggtgttctatatatg

SEQ ID NO: 1444959 - DNA, 15 bp, Homo sapiens
gtgttctatatatgt

SEQ ID NO: 1444960 - DNA, 15 bp, Homo sapiens
tgttctatatatgta

SEQ ID NO: 1444961 - DNA, 15 bp, Homo sapiens
gttctatatatgtat

SEQ ID NO: 1444962 - DNA, 15 bp, Homo sapiens
ttctatatatgtata

SEQ ID NO: 1444963 - DNA, 15 bp, Homo sapiens
tctatatatgtatat

SEQ ID NO: 1444964 - DNA, 15 bp, Homo sapiens
ctatatatgtatata

SEQ ID NO: 1444965 - DNA, 15 bp, Homo sapiens
tatatatgtatatac

SEQ ID NO: 1444966 - DNA, 15 bp, Homo sapiens
atatatgtatatact

SEQ ID NO: 1444967 - DNA, 15 bp, Homo sapiens
tatatgtatatacta

SEQ ID NO: 1444968 - DNA, 15 bp, Homo sapiens
atatgtatatactat

SEQ ID NO: 1444969 - DNA, 15 bp, Homo sapiens
tatgtatatactatg

SEQ ID NO: 1444970 - DNA, 15 bp, Homo sapiens
atgtatatactatgc

SEQ ID NO: 1444971 - DNA, 15 bp, Homo sapiens
tgtatatactatgct

SEQ ID NO: 1444972 - DNA, 15 bp, Homo sapiens
gtatatactatgcta

SEQ ID NO: 1444973 - DNA, 15 bp, Homo sapiens
tatatactatgctat

SEQ ID NO: 1444974 - DNA, 15 bp, Homo sapiens
atatactatgctata

SEQ ID NO: 1444975 - DNA, 15 bp, Homo sapiens
tatactatgctatac

SEQ ID NO: 1444976 - DNA, 15 bp, Homo sapiens
atactatgctataca

SEQ ID NO: 1444977 - DNA, 15 bp, Homo sapiens
tactatgctatacaa

SEQ ID NO: 1444978 - DNA, 15 bp, Homo sapiens
actatgctatacaac

SEQ ID NO: 1444979 - DNA, 15 bp, Homo sapiens
ctatgctatacaaca

SEQ ID NO: 1444980 - DNA, 15 bp, Homo sapiens
tatgctatacaacat

SEQ ID NO: 1444981 - DNA, 15 bp, Homo sapiens
atgctatacaacatg

SEQ ID NO: 1444982 - DNA, 15 bp, Homo sapiens
tgctatacaacatgg

SEQ ID NO: 1444983 - DNA, 15 bp, Homo sapiens
gctatacaacatggt

SEQ ID NO: 1444984 - DNA, 15 bp, Homo sapiens
ctatacaacatggtg

SEQ ID NO: 1444985 - DNA, 15 bp, Homo sapiens
tatatgtatatactg

SEQ ID NO: 1444986 - DNA, 15 bp, Homo sapiens
atatgtatatactgt

SEQ ID NO: 1444987 - DNA, 15 bp, Homo sapiens
tatgtatatactgtg

SEQ ID NO: 1444988 - DNA, 15 bp, Homo sapiens
atgtatatactgtgg

SEQ ID NO: 1444989 - DNA, 15 bp, Homo sapiens
tgtatatactgtgga

SEQ ID NO: 1444990 - DNA, 15 bp, Homo sapiens
gtatatactgtggaa

SEQ ID NO: 1444991 - DNA, 15 bp, Homo sapiens
tatatactgtggaat

SEQ ID NO: 1444992 - DNA, 15 bp, Homo sapiens
atatactgtggaatg

SEQ ID NO: 1444993 - DNA, 15 bp, Homo sapiens
tatactgtggaatgg

SEQ ID NO: 1444994 - DNA, 15 bp, Homo sapiens
atactgtggaatggc

SEQ ID NO: 1444995 - DNA, 15 bp, Homo sapiens
tactgtggaatggct

SEQ ID NO: 1444996 - DNA, 15 bp, Homo sapiens
actgtggaatggcta

SEQ ID NO: 1444997 - DNA, 15 bp, Homo sapiens
ctgtggaatggctaa

SEQ ID NO: 1444998 - DNA, 15 bp, Homo sapiens
tgtggaatggctaaa

SEQ ID NO: 1444999 - DNA, 15 bp, Homo sapiens
gtggaatggctaaat

SEQ ID NO: 1445000 - DNA, 15 bp, Homo sapiens
tggaatggctaaatc

SEQ ID NO: 1445001 - DNA, 15 bp, Homo sapiens
ggaatggctaaatca

SEQ ID NO: 1445002 - DNA, 15 bp, Homo sapiens
gaatggctaaatcaa

SEQ ID NO: 1445003 - DNA, 15 bp, Homo sapiens
aatggctaaatcaag

SEQ ID NO: 1445004 - DNA, 15 bp, Homo sapiens
atggctaaatcaagc

SEQ ID NO: 1445005 - DNA, 15 bp, Homo sapiens
tggctaaatcaagct

SEQ ID NO: 1445006 - DNA, 15 bp, Homo sapiens
ggctaaatcaagcta

SEQ ID NO: 1445007 - DNA, 15 bp, Homo sapiens
gctaaatcaagctac

SEQ ID NO: 1445008 - DNA, 15 bp, Homo sapiens
ctaaatcaagctact

SEQ ID NO: 1445009 - DNA, 15 bp, Homo sapiens
taaatcaagctactt

SEQ ID NO: 1445010 - DNA, 15 bp, Homo sapiens
aaatcaagctactta

SEQ ID NO: 1445011 - DNA, 15 bp, Homo sapiens
aatcaagctacttaa

SEQ ID NO: 1445012 - DNA, 15 bp, Homo sapiens
atcaagctacttaac

SEQ ID NO: 1445013 - DNA, 15 bp, Homo sapiens
tcaagctacttaaca

SEQ ID NO: 1445014 - DNA, 15 bp, Homo sapiens
caagctacttaacat

SEQ ID NO: 1445015 - DNA, 15 bp, Homo sapiens
aagctacttaacata

SEQ ID NO: 1445016 - DNA, 15 bp, Homo sapiens
agctacttaacatat

SEQ ID NO: 1445017 - DNA, 15 bp, Homo sapiens
gctacttaacatatg

SEQ ID NO: 1445018 - DNA, 15 bp, Homo sapiens
ctacttaacatatgt

SEQ ID NO: 1445019 - DNA, 15 bp, Homo sapiens
tacttaacatatgta

SEQ ID NO: 1445020 - DNA, 15 bp, Homo sapiens
acttaacatatgtat

SEQ ID NO: 1445021 - DNA, 15 bp, Homo sapiens
cttaacatatgtatt

SEQ ID NO: 1445022 - DNA, 15 bp, Homo sapiens
ttaacatatgtatta

SEQ ID NO: 1445023 - DNA, 15 bp, Homo sapiens
taacatatgtattac

SEQ ID NO: 1445024 - DNA, 15 bp, Homo sapiens
aacatatgtattacc

SEQ ID NO: 1445025 - DNA, 15 bp, Homo sapiens
acatatgtattacct

SEQ ID NO: 1445026 - DNA, 15 bp, Homo sapiens
catatgtattacctc

SEQ ID NO: 1445027 - DNA, 15 bp, Homo sapiens
atatgtattacctcg

SEQ ID NO: 1445028 - DNA, 15 bp, Homo sapiens
tatgtattacctcgc

SEQ ID NO: 1445029 - DNA, 15 bp, Homo sapiens
atgtattacctcgca

SEQ ID NO: 1445030 - DNA, 15 bp, Homo sapiens
tgtattacctcgcat

SEQ ID NO: 1445031 - DNA, 15 bp, Homo sapiens
gtattacctcgcata

SEQ ID NO: 1445032 - DNA, 15 bp, Homo sapiens
tattacctcgcatac

SEQ ID NO: 1445033 - DNA, 15 bp, Homo sapiens
attacctcgcatact

SEQ ID NO: 1445034 - DNA, 15 bp, Homo sapiens
ttacctcgcatactt

SEQ ID NO: 1445035 - DNA, 15 bp, Homo sapiens
tacctcgcatacttt

SEQ ID NO: 1445036 - DNA, 15 bp, Homo sapiens
acctcgcatactttt

SEQ ID NO: 1445037 - DNA, 15 bp, Homo sapiens
cctcgcatacttttt

SEQ ID NO: 1445038 - DNA, 15 bp, Homo sapiens
ctcgcatactttttt

SEQ ID NO: 1445039 - DNA, 15 bp, Homo sapiens
tcgcatacttttttt

SEQ ID NO: 1445040 - DNA, 15 bp, Homo sapiens
cgcatactttttttt

SEQ ID NO: 1445041 - DNA, 15 bp, Homo sapiens
gcatacttttttttt

SEQ ID NO: 1445042 - DNA, 15 bp, Homo sapiens
catactttttttttt

SEQ ID NO: 1445043 - DNA, 15 bp, Homo sapiens
tttttttttttcctt

SEQ ID NO: 1445044 - DNA, 15 bp, Homo sapiens
ttttttttttccttg

SEQ ID NO: 1445045 - DNA, 15 bp, Homo sapiens
ttttttttccttgag

SEQ ID NO: 1445046 - DNA, 15 bp, Homo sapiens
tttttttccttgaga

SEQ ID NO: 1445047 - DNA, 15 bp, Homo sapiens
ttttttccttgagac

SEQ ID NO: 1445048 - DNA, 15 bp, Homo sapiens
tttttccttgagaca

SEQ ID NO: 1445049 - DNA, 15 bp, Homo sapiens
ttttccttgagacag

SEQ ID NO: 1445050 - DNA, 15 bp, Homo sapiens
tttccttgagacaga

SEQ ID NO: 1445051 - DNA, 15 bp, Homo sapiens
ttccttgagacagag

SEQ ID NO: 1445052 - DNA, 15 bp, Homo sapiens
tccttgagacagagt

SEQ ID NO: 1445053 - DNA, 15 bp, Homo sapiens
ccttgagacagagtc

SEQ ID NO: 1445054 - DNA, 15 bp, Homo sapiens
cttgagacagagtct

SEQ ID NO: 1445055 - DNA, 15 bp, Homo sapiens
gagtgcagtggcgct

SEQ ID NO: 1445056 - DNA, 15 bp, Homo sapiens
agtgcagtggcgcta

SEQ ID NO: 1445057 - DNA, 15 bp, Homo sapiens
gtgcagtggcgctat

SEQ ID NO: 1445058 - DNA, 15 bp, Homo sapiens
tgcagtggcgctatc

SEQ ID NO: 1445059 - DNA, 15 bp, Homo sapiens
gcagtggcgctatct

SEQ ID NO: 1445060 - DNA, 15 bp, Homo sapiens
cagtggcgctatctt

SEQ ID NO: 1445061 - DNA, 15 bp, Homo sapiens
agtggcgctatcttg

SEQ ID NO: 1445062 - DNA, 15 bp, Homo sapiens
gtggcgctatcttgg

SEQ ID NO: 1445063 - DNA, 15 bp, Homo sapiens
tggcgctatcttggc

SEQ ID NO: 1445064 - DNA, 15 bp, Homo sapiens
ggcgctatcttggct

SEQ ID NO: 1445065 - DNA, 15 bp, Homo sapiens
ctcctgggtccaagt

SEQ ID NO: 1445066 - DNA, 15 bp, Homo sapiens
tcctgggtccaagtt

SEQ ID NO: 1445067 - DNA, 15 bp, Homo sapiens
cctgggtccaagtta

SEQ ID NO: 1445068 - DNA, 15 bp, Homo sapiens
ctgggtccaagttat

SEQ ID NO: 1445069 - DNA, 15 bp, Homo sapiens
tgggtccaagttatt

SEQ ID NO: 1445070 - DNA, 15 bp, Homo sapiens
gggtccaagttattt

SEQ ID NO: 1445071 - DNA, 15 bp, Homo sapiens
ggtccaagttatttt

SEQ ID NO: 1445072 - DNA, 15 bp, Homo sapiens
gtccaagttattttc

SEQ ID NO: 1445073 - DNA, 15 bp, Homo sapiens
tccaagttattttct

SEQ ID NO: 1445074 - DNA, 15 bp, Homo sapiens
ccaagttattttctt

SEQ ID NO: 1445075 - DNA, 15 bp, Homo sapiens
caagttattttcttg

SEQ ID NO: 1445076 - DNA, 15 bp, Homo sapiens
agttattttcttgcc

SEQ ID NO: 1445077 - DNA, 15 bp, Homo sapiens
gttattttcttgcct

SEQ ID NO: 1445078 - DNA, 15 bp, Homo sapiens
ttattttcttgcctc

SEQ ID NO: 1445079 - DNA, 15 bp, Homo sapiens
tattttcttgcctca

SEQ ID NO: 1445080 - DNA, 15 bp, Homo sapiens
attttcttgcctcag

SEQ ID NO: 1445081 - DNA, 15 bp, Homo sapiens
ttttcttgcctcagc

SEQ ID NO: 1445082 - DNA, 15 bp, Homo sapiens
tttcttgcctcagcc

SEQ ID NO: 1445083 - DNA, 15 bp, Homo sapiens
ttcttgcctcagcct

SEQ ID NO: 1445084 - DNA, 15 bp, Homo sapiens
ttgtatttttggtaa

SEQ ID NO: 1445085 - DNA, 15 bp, Homo sapiens
tgtatttttggtaaa

SEQ ID NO: 1445086 - DNA, 15 bp, Homo sapiens
gtatttttggtaaag

SEQ ID NO: 1445087 - DNA, 15 bp, Homo sapiens
tatttttggtaaaga

SEQ ID NO: 1445088 - DNA, 15 bp, Homo sapiens
atttttggtaaagac

SEQ ID NO: 1445089 - DNA, 15 bp, Homo sapiens
tttttggtaaagacg

SEQ ID NO: 1445090 - DNA, 15 bp, Homo sapiens
ttttggtaaagacgg

SEQ ID NO: 1445091 - DNA, 15 bp, Homo sapiens
tttggtaaagacgga

SEQ ID NO: 1445092 - DNA, 15 bp, Homo sapiens
ttggtaaagacggag

SEQ ID NO: 1445093 - DNA, 15 bp, Homo sapiens
tggtaaagacggagt

SEQ ID NO: 1445094 - DNA, 15 bp, Homo sapiens
ggtaaagacggagtt

SEQ ID NO: 1445095 - DNA, 15 bp, Homo sapiens
gtaaagacggagttt

SEQ ID NO: 1445096 - DNA, 15 bp, Homo sapiens
taaagacggagtttt

SEQ ID NO: 1445097 - DNA, 15 bp, Homo sapiens
aaagacggagttttg

SEQ ID NO: 1445098 - DNA, 15 bp, Homo sapiens
aagacggagttttgc

SEQ ID NO: 1445099 - DNA, 15 bp, Homo sapiens
agacggagttttgcc

SEQ ID NO: 1445100 - DNA, 15 bp, Homo sapiens
gacggagttttgcca

SEQ ID NO: 1445101 - DNA, 15 bp, Homo sapiens
acggagttttgccat

SEQ ID NO: 1445102 - DNA, 15 bp, Homo sapiens
cggagttttgccata

SEQ ID NO: 1445103 - DNA, 15 bp, Homo sapiens
ggagttttgccatat

SEQ ID NO: 1445104 - DNA, 15 bp, Homo sapiens
gagttttgccatatt

SEQ ID NO: 1445105 - DNA, 15 bp, Homo sapiens
agttttgccatattg

SEQ ID NO: 1445106 - DNA, 15 bp, Homo sapiens
gttttgccatattgt

SEQ ID NO: 1445107 - DNA, 15 bp, Homo sapiens
ttttgccatattgtc

SEQ ID NO: 1445108 - DNA, 15 bp, Homo sapiens
tttgccatattgtcc

SEQ ID NO: 1445109 - DNA, 15 bp, Homo sapiens
ttgccatattgtcca

SEQ ID NO: 1445110 - DNA, 15 bp, Homo sapiens
tgccatattgtccac

SEQ ID NO: 1445111 - DNA, 15 bp, Homo sapiens
gccatattgtccacg

SEQ ID NO: 1445112 - DNA, 15 bp, Homo sapiens
ccatattgtccacgc

SEQ ID NO: 1445113 - DNA, 15 bp, Homo sapiens
catattgtccacgct

SEQ ID NO: 1445114 - DNA, 15 bp, Homo sapiens
atattgtccacgcta

SEQ ID NO: 1445115 - DNA, 15 bp, Homo sapiens
tattgtccacgctag

SEQ ID NO: 1445116 - DNA, 15 bp, Homo sapiens
attgtccacgctagt

SEQ ID NO: 1445117 - DNA, 15 bp, Homo sapiens
ttgtccacgctagtc

SEQ ID NO: 1445118 - DNA, 15 bp, Homo sapiens
tgtccacgctagtct

SEQ ID NO: 1445119 - DNA, 15 bp, Homo sapiens
gtccacgctagtctc

SEQ ID NO: 1445120 - DNA, 15 bp, Homo sapiens
tccacgctagtctca

SEQ ID NO: 1445121 - DNA, 15 bp, Homo sapiens
ccacgctagtctcaa

SEQ ID NO: 1445122 - DNA, 15 bp, Homo sapiens
cacgctagtctcaaa

SEQ ID NO: 1445123 - DNA, 15 bp, Homo sapiens
acgctagtctcaaaa

SEQ ID NO: 1445124 - DNA, 15 bp, Homo sapiens
cgctagtctcaaaat

SEQ ID NO: 1445125 - DNA, 15 bp, Homo sapiens
gctagtctcaaaatt

SEQ ID NO: 1445126 - DNA, 15 bp, Homo sapiens
ctagtctcaaaattc

SEQ ID NO: 1445127 - DNA, 15 bp, Homo sapiens
tagtctcaaaattcc

SEQ ID NO: 1445128 - DNA, 15 bp, Homo sapiens
agtctcaaaattcct

SEQ ID NO: 1445129 - DNA, 15 bp, Homo sapiens
gtctcaaaattccta

SEQ ID NO: 1445130 - DNA, 15 bp, Homo sapiens
tctcaaaattcctag

SEQ ID NO: 1445131 - DNA, 15 bp, Homo sapiens
ctcaaaattcctagc

SEQ ID NO: 1445132 - DNA, 15 bp, Homo sapiens
tcaaaattcctagcc

SEQ ID NO: 1445133 - DNA, 15 bp, Homo sapiens
caaaattcctagcct

SEQ ID NO: 1445134 - DNA, 15 bp, Homo sapiens
aaaattcctagcctc

SEQ ID NO: 1445135 - DNA, 15 bp, Homo sapiens
aaattcctagcctca

SEQ ID NO: 1445136 - DNA, 15 bp, Homo sapiens
aattcctagcctcaa

SEQ ID NO: 1445137 - DNA, 15 bp, Homo sapiens
attcctagcctcaag

SEQ ID NO: 1445138 - DNA, 15 bp, Homo sapiens
ttcctagcctcaagc

SEQ ID NO: 1445139 - DNA, 15 bp, Homo sapiens
tcctagcctcaagca

SEQ ID NO: 1445140 - DNA, 15 bp, Homo sapiens
cctagcctcaagcaa

SEQ ID NO: 1445141 - DNA, 15 bp, Homo sapiens
ctagcctcaagcaat

SEQ ID NO: 1445142 - DNA, 15 bp, Homo sapiens
tagcctcaagcaatc

SEQ ID NO: 1445143 - DNA, 15 bp, Homo sapiens
agcctcaagcaatct

SEQ ID NO: 1445144 - DNA, 15 bp, Homo sapiens
gcctcaagcaatctg

SEQ ID NO: 1445145 - DNA, 15 bp, Homo sapiens
cctcaagcaatctgc

SEQ ID NO: 1445146 - DNA, 15 bp, Homo sapiens
ctcaagcaatctgcc

SEQ ID NO: 1445147 - DNA, 15 bp, Homo sapiens
tcaagcaatctgccc

SEQ ID NO: 1445148 - DNA, 15 bp, Homo sapiens
caagcaatctgccca

SEQ ID NO: 1445149 - DNA, 15 bp, Homo sapiens
aagcaatctgcccac

SEQ ID NO: 1445150 - DNA, 15 bp, Homo sapiens
agcaatctgcccacc

SEQ ID NO: 1445151 - DNA, 15 bp, Homo sapiens
gcaatctgcccacct

SEQ ID NO: 1445152 - DNA, 15 bp, Homo sapiens
caatctgcccacctt

SEQ ID NO: 1445153 - DNA, 15 bp, Homo sapiens
aatctgcccaccttg

SEQ ID NO: 1445154 - DNA, 15 bp, Homo sapiens
gctgggattacagca

SEQ ID NO: 1445155 - DNA, 15 bp, Homo sapiens
ctgggattacagcat

SEQ ID NO: 1445156 - DNA, 15 bp, Homo sapiens
tgggattacagcata

SEQ ID NO: 1445157 - DNA, 15 bp, Homo sapiens
gggattacagcatac

SEQ ID NO: 1445158 - DNA, 15 bp, Homo sapiens
ggattacagcatact

SEQ ID NO: 1445159 - DNA, 15 bp, Homo sapiens
gattacagcatactt

SEQ ID NO: 1445160 - DNA, 15 bp, Homo sapiens
attacagcatacttc

SEQ ID NO: 1445161 - DNA, 15 bp, Homo sapiens
ttacagcatacttct

SEQ ID NO: 1445162 - DNA, 15 bp, Homo sapiens
tacagcatacttctt

SEQ ID NO: 1445163 - DNA, 15 bp, Homo sapiens
acagcatacttcttc

SEQ ID NO: 1445164 - DNA, 15 bp, Homo sapiens
cagcatacttcttct

SEQ ID NO: 1445165 - DNA, 15 bp, Homo sapiens
agcatacttcttctt

SEQ ID NO: 1445166 - DNA, 15 bp, Homo sapiens
gcatacttcttctta

SEQ ID NO: 1445167 - DNA, 15 bp, Homo sapiens
catacttcttcttat

SEQ ID NO: 1445168 - DNA, 15 bp, Homo sapiens
atacttcttcttatt

SEQ ID NO: 1445169 - DNA, 15 bp, Homo sapiens
tacttcttcttattt

SEQ ID NO: 1445170 - DNA, 15 bp, Homo sapiens
acttcttcttatttt

SEQ ID NO: 1445171 - DNA, 15 bp, Homo sapiens
cttcttcttattttt

SEQ ID NO: 1445172 - DNA, 15 bp, Homo sapiens
ttcttcttatttttt

SEQ ID NO: 1445173 - DNA, 15 bp, Homo sapiens
tcttcttattttttt

SEQ ID NO: 1445174 - DNA, 15 bp, Homo sapiens
cttcttatttttttt

SEQ ID NO: 1445175 - DNA, 15 bp, Homo sapiens
ttcttattttttttt

SEQ ID NO: 1445176 - DNA, 15 bp, Homo sapiens
ttttttttttttgca

SEQ ID NO: 1445177 - DNA, 15 bp, Homo sapiens
tttttttttttgcac

SEQ ID NO: 1445178 - DNA, 15 bp, Homo sapiens
ttttttttttgcact

SEQ ID NO: 1445179 - DNA, 15 bp, Homo sapiens
tttttttttgcacta

SEQ ID NO: 1445180 - DNA, 15 bp, Homo sapiens
ttttttttgcactaa

SEQ ID NO: 1445181 - DNA, 15 bp, Homo sapiens
tttttttgcactaag

SEQ ID NO: 1445182 - DNA, 15 bp, Homo sapiens
ttttttgcactaaga

SEQ ID NO: 1445183 - DNA, 15 bp, Homo sapiens
tttttgcactaagaa

SEQ ID NO: 1445184 - DNA, 15 bp, Homo sapiens
ttttgcactaagaac

SEQ ID NO: 1445185 - DNA, 15 bp, Homo sapiens
tttgcactaagaaca

SEQ ID NO: 1445186 - DNA, 15 bp, Homo sapiens
ttgcactaagaacac

SEQ ID NO: 1445187 - DNA, 15 bp, Homo sapiens
tgcactaagaacact

SEQ ID NO: 1445188 - DNA, 15 bp, Homo sapiens
gcactaagaacactt

SEQ ID NO: 1445189 - DNA, 15 bp, Homo sapiens
cactaagaacactta

SEQ ID NO: 1445190 - DNA, 15 bp, Homo sapiens
actaagaacacttaa

SEQ ID NO: 1445191 - DNA, 15 bp, Homo sapiens
ctaagaacacttaaa

SEQ ID NO: 1445192 - DNA, 15 bp, Homo sapiens
taagaacacttaaaa

SEQ ID NO: 1445193 - DNA, 15 bp, Homo sapiens
aagaacacttaaaat

SEQ ID NO: 1445194 - DNA, 15 bp, Homo sapiens
agaacacttaaaatt

SEQ ID NO: 1445195 - DNA, 15 bp, Homo sapiens
gaacacttaaaattt

SEQ ID NO: 1445196 - DNA, 15 bp, Homo sapiens
aacacttaaaattta

SEQ ID NO: 1445197 - DNA, 15 bp, Homo sapiens
acacttaaaatttac

SEQ ID NO: 1445198 - DNA, 15 bp, Homo sapiens
cacttaaaatttact

SEQ ID NO: 1445199 - DNA, 15 bp, Homo sapiens
acttaaaatttactc

SEQ ID NO: 1445200 - DNA, 15 bp, Homo sapiens
cttaaaatttactct

SEQ ID NO: 1445201 - DNA, 15 bp, Homo sapiens
ttaaaatttactctc

SEQ ID NO: 1445202 - DNA, 15 bp, Homo sapiens
taaaatttactctct

SEQ ID NO: 1445203 - DNA, 15 bp, Homo sapiens
aaaatttactctctt

SEQ ID NO: 1445204 - DNA, 15 bp, Homo sapiens
aaatttactctctta

SEQ ID NO: 1445205 - DNA, 15 bp, Homo sapiens
aatttactctcttag

SEQ ID NO: 1445206 - DNA, 15 bp, Homo sapiens
atttactctcttagc

SEQ ID NO: 1445207 - DNA, 15 bp, Homo sapiens
tttactctcttagca

SEQ ID NO: 1445208 - DNA, 15 bp, Homo sapiens
ttactctcttagcaa

SEQ ID NO: 1445209 - DNA, 15 bp, Homo sapiens
tactctcttagcaat

SEQ ID NO: 1445210 - DNA, 15 bp, Homo sapiens
actctcttagcaatt

SEQ ID NO: 1445211 - DNA, 15 bp, Homo sapiens
ctctcttagcaattt

SEQ ID NO: 1445212 - DNA, 15 bp, Homo sapiens
tctcttagcaatttt

SEQ ID NO: 1445213 - DNA, 15 bp, Homo sapiens
ctcttagcaatttta

SEQ ID NO: 1445214 - DNA, 15 bp, Homo sapiens
tcttagcaattttaa

SEQ ID NO: 1445215 - DNA, 15 bp, Homo sapiens
cttagcaattttaaa

SEQ ID NO: 1445216 - DNA, 15 bp, Homo sapiens
ttagcaattttaaag

SEQ ID NO: 1445217 - DNA, 15 bp, Homo sapiens
tagcaattttaaagt

SEQ ID NO: 1445218 - DNA, 15 bp, Homo sapiens
agcaattttaaagta

SEQ ID NO: 1445219 - DNA, 15 bp, Homo sapiens
gcaattttaaagtat

SEQ ID NO: 1445220 - DNA, 15 bp, Homo sapiens
caattttaaagtata

SEQ ID NO: 1445221 - DNA, 15 bp, Homo sapiens
aattttaaagtatat

SEQ ID NO: 1445222 - DNA, 15 bp, Homo sapiens
attttaaagtatata

SEQ ID NO: 1445223 - DNA, 15 bp, Homo sapiens
ttttaaagtatataa

SEQ ID NO: 1445224 - DNA, 15 bp, Homo sapiens
tttaaagtatataat

SEQ ID NO: 1445225 - DNA, 15 bp, Homo sapiens
ttaaagtatataata

SEQ ID NO: 1445226 - DNA, 15 bp, Homo sapiens
taaagtatataatat

SEQ ID NO: 1445227 - DNA, 15 bp, Homo sapiens
aaagtatataatata

SEQ ID NO: 1445228 - DNA, 15 bp, Homo sapiens
aagtatataatatac

SEQ ID NO: 1445229 - DNA, 15 bp, Homo sapiens
agtatataatatact

SEQ ID NO: 1445230 - DNA, 15 bp, Homo sapiens
gtatataatatactg

SEQ ID NO: 1445231 - DNA, 15 bp, Homo sapiens
tatataatatactgt

SEQ ID NO: 1445232 - DNA, 15 bp, Homo sapiens
atataatatactgtt

SEQ ID NO: 1445233 - DNA, 15 bp, Homo sapiens
tataatatactgtta

SEQ ID NO: 1445234 - DNA, 15 bp, Homo sapiens
ataatatactgttat

SEQ ID NO: 1445235 - DNA, 15 bp, Homo sapiens
taatatactgttatt

SEQ ID NO: 1445236 - DNA, 15 bp, Homo sapiens
aatatactgttatta

SEQ ID NO: 1445237 - DNA, 15 bp, Homo sapiens
atatactgttattaa

SEQ ID NO: 1445238 - DNA, 15 bp, Homo sapiens
tatactgttattaac

SEQ ID NO: 1445239 - DNA, 15 bp, Homo sapiens
atactgttattaact

SEQ ID NO: 1445240 - DNA, 15 bp, Homo sapiens
tactgttattaactt

SEQ ID NO: 1445241 - DNA, 15 bp, Homo sapiens
actgttattaacttt

SEQ ID NO: 1445242 - DNA, 15 bp, Homo sapiens
ctgttattaactttg

SEQ ID NO: 1445243 - DNA, 15 bp, Homo sapiens
tgttattaactttgg

SEQ ID NO: 1445244 - DNA, 15 bp, Homo sapiens
gttattaactttggt

SEQ ID NO: 1445245 - DNA, 15 bp, Homo sapiens
ttattaactttggtc

SEQ ID NO: 1445246 - DNA, 15 bp, Homo sapiens
tattaactttggtca

SEQ ID NO: 1445247 - DNA, 15 bp, Homo sapiens
attaactttggtcac

SEQ ID NO: 1445248 - DNA, 15 bp, Homo sapiens
ttaactttggtcact

SEQ ID NO: 1445249 - DNA, 15 bp, Homo sapiens
taactttggtcacta

SEQ ID NO: 1445250 - DNA, 15 bp, Homo sapiens
aactttggtcactat

SEQ ID NO: 1445251 - DNA, 15 bp, Homo sapiens
actttggtcactatt

SEQ ID NO: 1445252 - DNA, 15 bp, Homo sapiens
ctttggtcactattt

SEQ ID NO: 1445253 - DNA, 15 bp, Homo sapiens
tttggtcactatttt

SEQ ID NO: 1445254 - DNA, 15 bp, Homo sapiens
ttggtcactatttta

SEQ ID NO: 1445255 - DNA, 15 bp, Homo sapiens
tggtcactattttaa

SEQ ID NO: 1445256 - DNA, 15 bp, Homo sapiens
ggtcactattttaat

SEQ ID NO: 1445257 - DNA, 15 bp, Homo sapiens
gtcactattttaatt

SEQ ID NO: 1445258 - DNA, 15 bp, Homo sapiens
tcactattttaatta

SEQ ID NO: 1445259 - DNA, 15 bp, Homo sapiens
cactattttaattag

SEQ ID NO: 1445260 - DNA, 15 bp, Homo sapiens
actattttaattaga

SEQ ID NO: 1445261 - DNA, 15 bp, Homo sapiens
ctattttaattagac

SEQ ID NO: 1445262 - DNA, 15 bp, Homo sapiens
tattttaattagact

SEQ ID NO: 1445263 - DNA, 15 bp, Homo sapiens
attttaattagactt

SEQ ID NO: 1445264 - DNA, 15 bp, Homo sapiens
ttttaattagactta

SEQ ID NO: 1445265 - DNA, 15 bp, Homo sapiens
tttaattagacttaa

SEQ ID NO: 1445266 - DNA, 15 bp, Homo sapiens
ttaattagacttaag

SEQ ID NO: 1445267 - DNA, 15 bp, Homo sapiens
taattagacttaaga

SEQ ID NO: 1445268 - DNA, 15 bp, Homo sapiens
aattagacttaagat

SEQ ID NO: 1445269 - DNA, 15 bp, Homo sapiens
attagacttaagatg

SEQ ID NO: 1445270 - DNA, 15 bp, Homo sapiens
ttagacttaagatgt

SEQ ID NO: 1445271 - DNA, 15 bp, Homo sapiens
tagacttaagatgtg

SEQ ID NO: 1445272 - DNA, 15 bp, Homo sapiens
agacttaagatgtgt

SEQ ID NO: 1445273 - DNA, 15 bp, Homo sapiens
gacttaagatgtgtt

SEQ ID NO: 1445274 - DNA, 15 bp, Homo sapiens
acttaagatgtgttt

SEQ ID NO: 1445275 - DNA, 15 bp, Homo sapiens
cttaagatgtgtttg

SEQ ID NO: 1445276 - DNA, 15 bp, Homo sapiens
ttaagatgtgtttgt

SEQ ID NO: 1445277 - DNA, 15 bp, Homo sapiens
taagatgtgtttgta

SEQ ID NO: 1445278 - DNA, 15 bp, Homo sapiens
aagatgtgtttgtat

SEQ ID NO: 1445279 - DNA, 15 bp, Homo sapiens
agatgtgtttgtatt

SEQ ID NO: 1445280 - DNA, 15 bp, Homo sapiens
gatgtgtttgtattc

SEQ ID NO: 1445281 - DNA, 15 bp, Homo sapiens
atgtgtttgtattca

SEQ ID NO: 1445282 - DNA, 15 bp, Homo sapiens
tgtgtttgtattcaa

SEQ ID NO: 1445283 - DNA, 15 bp, Homo sapiens
gtgtttgtattcaaa

SEQ ID NO: 1445284 - DNA, 15 bp, Homo sapiens
tgtttgtattcaaat

SEQ ID NO: 1445285 - DNA, 15 bp, Homo sapiens
gtttgtattcaaatt

SEQ ID NO: 1445286 - DNA, 15 bp, Homo sapiens
tttgtattcaaatta

SEQ ID NO: 1445287 - DNA, 15 bp, Homo sapiens
ttgtattcaaattat

SEQ ID NO: 1445288 - DNA, 15 bp, Homo sapiens
tgtattcaaattatt

SEQ ID NO: 1445289 - DNA, 15 bp, Homo sapiens
gtattcaaattattt

SEQ ID NO: 1445290 - DNA, 15 bp, Homo sapiens
tattcaaattatttt

SEQ ID NO: 1445291 - DNA, 15 bp, Homo sapiens
attcaaattattttg

SEQ ID NO: 1445292 - DNA, 15 bp, Homo sapiens
ttcaaattattttgt

SEQ ID NO: 1445293 - DNA, 15 bp, Homo sapiens
tcaaattattttgta

SEQ ID NO: 1445294 - DNA, 15 bp, Homo sapiens
caaattattttgtaa

SEQ ID NO: 1445295 - DNA, 15 bp, Homo sapiens
aaattattttgtaag

SEQ ID NO: 1445296 - DNA, 15 bp, Homo sapiens
aattattttgtaagc

SEQ ID NO: 1445297 - DNA, 15 bp, Homo sapiens
attattttgtaagca

SEQ ID NO: 1445298 - DNA, 15 bp, Homo sapiens
ttattttgtaagcat

SEQ ID NO: 1445299 - DNA, 15 bp, Homo sapiens
tattttgtaagcatt

SEQ ID NO: 1445300 - DNA, 15 bp, Homo sapiens
attttgtaagcattt

SEQ ID NO: 1445301 - DNA, 15 bp, Homo sapiens
ttttgtaagcattta

SEQ ID NO: 1445302 - DNA, 15 bp, Homo sapiens
tttgtaagcatttaa

SEQ ID NO: 1445303 - DNA, 15 bp, Homo sapiens
ttgtaagcatttaac

SEQ ID NO: 1445304 - DNA, 15 bp, Homo sapiens
tgtaagcatttaaca

SEQ ID NO: 1445305 - DNA, 15 bp, Homo sapiens
gtaagcatttaacac

SEQ ID NO: 1445306 - DNA, 15 bp, Homo sapiens
taagcatttaacacc

SEQ ID NO: 1445307 - DNA, 15 bp, Homo sapiens
aagcatttaacaccc

SEQ ID NO: 1445308 - DNA, 15 bp, Homo sapiens
agcatttaacaccca

SEQ ID NO: 1445309 - DNA, 15 bp, Homo sapiens
gcatttaacacccaa

SEQ ID NO: 1445310 - DNA, 15 bp, Homo sapiens
catttaacacccaaa

SEQ ID NO: 1445311 - DNA, 15 bp, Homo sapiens
atttaacacccaaat

SEQ ID NO: 1445312 - DNA, 15 bp, Homo sapiens
tttaacacccaaatt

SEQ ID NO: 1445313 - DNA, 15 bp, Homo sapiens
ttaacacccaaattt

SEQ ID NO: 1445314 - DNA, 15 bp, Homo sapiens
taacacccaaatttg

SEQ ID NO: 1445315 - DNA, 15 bp, Homo sapiens
aacacccaaatttga

SEQ ID NO: 1445316 - DNA, 15 bp, Homo sapiens
acacccaaatttgag

SEQ ID NO: 1445317 - DNA, 15 bp, Homo sapiens
cacccaaatttgaga

SEQ ID NO: 1445318 - DNA, 15 bp, Homo sapiens
acccaaatttgagag

SEQ ID NO: 1445319 - DNA, 15 bp, Homo sapiens
cccaaatttgagagt

SEQ ID NO: 1445320 - DNA, 15 bp, Homo sapiens
ccaaatttgagagtg

SEQ ID NO: 1445321 - DNA, 15 bp, Homo sapiens
caaatttgagagtgg

SEQ ID NO: 1445322 - DNA, 15 bp, Homo sapiens
aaatttgagagtggg

SEQ ID NO: 1445323 - DNA, 15 bp, Homo sapiens
aatttgagagtgggg

SEQ ID NO: 1445324 - DNA, 15 bp, Homo sapiens
atttgagagtggggt

SEQ ID NO: 1445325 - DNA, 15 bp, Homo sapiens
tttgagagtggggtc

SEQ ID NO: 1445326 - DNA, 15 bp, Homo sapiens
ttgagagtggggtca

SEQ ID NO: 1445327 - DNA, 15 bp, Homo sapiens
tgagagtggggtcag

SEQ ID NO: 1445328 - DNA, 15 bp, Homo sapiens
gagagtggggtcaga

SEQ ID NO: 1445329 - DNA, 15 bp, Homo sapiens
agagtggggtcagaa

SEQ ID NO: 1445330 - DNA, 15 bp, Homo sapiens
gagtggggtcagaat

SEQ ID NO: 1445331 - DNA, 15 bp, Homo sapiens
agtggggtcagaatg

SEQ ID NO: 1445332 - DNA, 15 bp, Homo sapiens
gtggggtcagaatgt

SEQ ID NO: 1445333 - DNA, 15 bp, Homo sapiens
tggggtcagaatgtt

SEQ ID NO: 1445334 - DNA, 15 bp, Homo sapiens
ggggtcagaatgttg

SEQ ID NO: 1445335 - DNA, 15 bp, Homo sapiens
gggtcagaatgttgg

SEQ ID NO: 1445336 - DNA, 15 bp, Homo sapiens
ggtcagaatgttgga

SEQ ID NO: 1445337 - DNA, 15 bp, Homo sapiens
gtcagaatgttggaa

SEQ ID NO: 1445338 - DNA, 15 bp, Homo sapiens
tcagaatgttggaat

SEQ ID NO: 1445339 - DNA, 15 bp, Homo sapiens
cagaatgttggaatt

SEQ ID NO: 1445340 - DNA, 15 bp, Homo sapiens
agaatgttggaattt

SEQ ID NO: 1445341 - DNA, 15 bp, Homo sapiens
gaatgttggaatttg

SEQ ID NO: 1445342 - DNA, 15 bp, Homo sapiens
aatgttggaatttga

SEQ ID NO: 1445343 - DNA, 15 bp, Homo sapiens
atgttggaatttgat

SEQ ID NO: 1445344 - DNA, 15 bp, Homo sapiens
tgttggaatttgatt

SEQ ID NO: 1445345 - DNA, 15 bp, Homo sapiens
gttggaatttgattt

SEQ ID NO: 1445346 - DNA, 15 bp, Homo sapiens
ttggaatttgatttc

SEQ ID NO: 1445347 - DNA, 15 bp, Homo sapiens
tggaatttgatttct

SEQ ID NO: 1445348 - DNA, 15 bp, Homo sapiens
ggaatttgatttcta

SEQ ID NO: 1445349 - DNA, 15 bp, Homo sapiens
gaatttgatttctag

SEQ ID NO: 1445350 - DNA, 15 bp, Homo sapiens
aatttgatttctaga

SEQ ID NO: 1445351 - DNA, 15 bp, Homo sapiens
atttgatttctagaa

SEQ ID NO: 1445352 - DNA, 15 bp, Homo sapiens
tttgatttctagaat

SEQ ID NO: 1445353 - DNA, 15 bp, Homo sapiens
ttgatttctagaatt

SEQ ID NO: 1445354 - DNA, 15 bp, Homo sapiens
tgatttctagaatta

SEQ ID NO: 1445355 - DNA, 15 bp, Homo sapiens
gatttctagaattag

SEQ ID NO: 1445356 - DNA, 15 bp, Homo sapiens
atttctagaattagt

SEQ ID NO: 1445357 - DNA, 15 bp, Homo sapiens
tttctagaattagta

SEQ ID NO: 1445358 - DNA, 15 bp, Homo sapiens
ttctagaattagtat

SEQ ID NO: 1445359 - DNA, 15 bp, Homo sapiens
tctagaattagtata

SEQ ID NO: 1445360 - DNA, 15 bp, Homo sapiens
ctagaattagtatag

SEQ ID NO: 1445361 - DNA, 15 bp, Homo sapiens
tagaattagtatagg

SEQ ID NO: 1445362 - DNA, 15 bp, Homo sapiens
agaattagtataggg

SEQ ID NO: 1445363 - DNA, 15 bp, Homo sapiens
gaattagtatagggt

SEQ ID NO: 1445364 - DNA, 15 bp, Homo sapiens
aattagtatagggta

SEQ ID NO: 1445365 - DNA, 15 bp, Homo sapiens
attagtatagggtat

SEQ ID NO: 1445366 - DNA, 15 bp, Homo sapiens
ttagtatagggtatt

SEQ ID NO: 1445367 - DNA, 15 bp, Homo sapiens
tagtatagggtatta

SEQ ID NO: 1445368 - DNA, 15 bp, Homo sapiens
agtatagggtattat

SEQ ID NO: 1445369 - DNA, 15 bp, Homo sapiens
gtatagggtattatt

SEQ ID NO: 1445370 - DNA, 15 bp, Homo sapiens
tatagggtattattt

SEQ ID NO: 1445371 - DNA, 15 bp, Homo sapiens
atagggtattatttt

SEQ ID NO: 1445372 - DNA, 15 bp, Homo sapiens
tagggtattattttc

SEQ ID NO: 1445373 - DNA, 15 bp, Homo sapiens
agggtattattttcc

SEQ ID NO: 1445374 - DNA, 15 bp, Homo sapiens
gggtattattttcct

SEQ ID NO: 1445375 - DNA, 15 bp, Homo sapiens
ggtattattttccta

SEQ ID NO: 1445376 - DNA, 15 bp, Homo sapiens
gtattattttcctac

SEQ ID NO: 1445377 - DNA, 15 bp, Homo sapiens
tattattttcctact

SEQ ID NO: 1445378 - DNA, 15 bp, Homo sapiens
attattttcctactt

SEQ ID NO: 1445379 - DNA, 15 bp, Homo sapiens
ttattttcctacttt

SEQ ID NO: 1445380 - DNA, 15 bp, Homo sapiens
tattttcctactttt

SEQ ID NO: 1445381 - DNA, 15 bp, Homo sapiens
attttcctacttttt

SEQ ID NO: 1445382 - DNA, 15 bp, Homo sapiens
ttttcctactttttt

SEQ ID NO: 1445383 - DNA, 15 bp, Homo sapiens
tttcctacttttttt

SEQ ID NO: 1445384 - DNA, 15 bp, Homo sapiens
ttcctactttttttc

SEQ ID NO: 1445385 - DNA, 15 bp, Homo sapiens
tcctactttttttct

SEQ ID NO: 1445386 - DNA, 15 bp, Homo sapiens
cctactttttttctg

SEQ ID NO: 1445387 - DNA, 15 bp, Homo sapiens
tactttttttctgtg

SEQ ID NO: 1445388 - DNA, 15 bp, Homo sapiens
actttttttctgtgt

SEQ ID NO: 1445389 - DNA, 15 bp, Homo sapiens
ctttttttctgtgtt

SEQ ID NO: 1445390 - DNA, 15 bp, Homo sapiens
tttttttctgtgttc

SEQ ID NO: 1445391 - DNA, 15 bp, Homo sapiens
ttttttctgtgttca

SEQ ID NO: 1445392 - DNA, 15 bp, Homo sapiens
tttttctgtgttcaa

SEQ ID NO: 1445393 - DNA, 15 bp, Homo sapiens
ttttctgtgttcaat

SEQ ID NO: 1445394 - DNA, 15 bp, Homo sapiens
tttctgtgttcaata

SEQ ID NO: 1445395 - DNA, 15 bp, Homo sapiens
ttctgtgttcaataa

SEQ ID NO: 1445396 - DNA, 15 bp, Homo sapiens
tctgtgttcaataaa

SEQ ID NO: 1445397 - DNA, 15 bp, Homo sapiens
ctgtgttcaataaaa

SEQ ID NO: 1445398 - DNA, 15 bp, Homo sapiens
tgtgttcaataaaat

SEQ ID NO: 1445399 - DNA, 15 bp, Homo sapiens
gtgttcaataaaatg

SEQ ID NO: 1445400 - DNA, 15 bp, Homo sapiens
tgttcaataaaatgt

SEQ ID NO: 1445401 - DNA, 15 bp, Homo sapiens
gttcaataaaatgtt

SEQ ID NO: 1445402 - DNA, 15 bp, Homo sapiens
ttcaataaaatgttt

SEQ ID NO: 1445403 - DNA, 15 bp, Homo sapiens
tcaataaaatgttta

SEQ ID NO: 1445404 - DNA, 15 bp, Homo sapiens
caataaaatgtttat

SEQ ID NO: 1445405 - DNA, 15 bp, Homo sapiens
aaatgtttataagat

SEQ ID NO: 1445406 - DNA, 15 bp, Homo sapiens
aatgtttataagatt

SEQ ID NO: 1445407 - DNA, 15 bp, Homo sapiens
atgtttataagattc

SEQ ID NO: 1445408 - DNA, 15 bp, Homo sapiens
tgtttataagattca

SEQ ID NO: 1445409 - DNA, 15 bp, Homo sapiens
gtttataagattcag

SEQ ID NO: 1445410 - DNA, 15 bp, Homo sapiens
tttataagattcagc

SEQ ID NO: 1445411 - DNA, 15 bp, Homo sapiens
ttataagattcagct

SEQ ID NO: 1445412 - DNA, 15 bp, Homo sapiens
tataagattcagctt

SEQ ID NO: 1445413 - DNA, 15 bp, Homo sapiens
ataagattcagcttc

SEQ ID NO: 1445414 - DNA, 15 bp, Homo sapiens
taagattcagcttca

SEQ ID NO: 1445415 - DNA, 15 bp, Homo sapiens
aagattcagcttcaa

SEQ ID NO: 1445416 - DNA, 15 bp, Homo sapiens
agattcagcttcaat

SEQ ID NO: 1445417 - DNA, 15 bp, Homo sapiens
gattcagcttcaatt

SEQ ID NO: 1445418 - DNA, 15 bp, Homo sapiens
attcagcttcaatta

SEQ ID NO: 1445419 - DNA, 15 bp, Homo sapiens
ttcagcttcaattat

SEQ ID NO: 1445420 - DNA, 15 bp, Homo sapiens
tcagcttcaattata

SEQ ID NO: 1445421 - DNA, 15 bp, Homo sapiens
cagcttcaattatat

SEQ ID NO: 1445422 - DNA, 15 bp, Homo sapiens
agcttcaattatatt

SEQ ID NO: 1445423 - DNA, 15 bp, Homo sapiens
gcttcaattatatta

SEQ ID NO: 1445424 - DNA, 15 bp, Homo sapiens
cttcaattatattat

SEQ ID NO: 1445425 - DNA, 15 bp, Homo sapiens
ttcaattatattata

SEQ ID NO: 1445426 - DNA, 15 bp, Homo sapiens
tcaattatattataa

SEQ ID NO: 1445427 - DNA, 15 bp, Homo sapiens
caattatattataac

SEQ ID NO: 1445428 - DNA, 15 bp, Homo sapiens
aattatattataacc

SEQ ID NO: 1445429 - DNA, 15 bp, Homo sapiens
attatattataaccc

SEQ ID NO: 1445430 - DNA, 15 bp, Homo sapiens
ttatattataaccca

SEQ ID NO: 1445431 - DNA, 15 bp, Homo sapiens
tatattataacccat

SEQ ID NO: 1445432 - DNA, 15 bp, Homo sapiens
atattataacccatt

SEQ ID NO: 1445433 - DNA, 15 bp, Homo sapiens
tattataacccattt

SEQ ID NO: 1445434 - DNA, 15 bp, Homo sapiens
attataacccattta

SEQ ID NO: 1445435 - DNA, 15 bp, Homo sapiens
ttataacccatttag

SEQ ID NO: 1445436 - DNA, 15 bp, Homo sapiens
tataacccatttagt

SEQ ID NO: 1445437 - DNA, 15 bp, Homo sapiens
ataacccatttagtg

SEQ ID NO: 1445438 - DNA, 15 bp, Homo sapiens
taacccatttagtgg

SEQ ID NO: 1445439 - DNA, 15 bp, Homo sapiens
aacccatttagtggt

SEQ ID NO: 1445440 - DNA, 15 bp, Homo sapiens
acccatttagtggtg

SEQ ID NO: 1445441 - DNA, 15 bp, Homo sapiens
cccatttagtggtga

SEQ ID NO: 1445442 - DNA, 15 bp, Homo sapiens
ccatttagtggtgaa

SEQ ID NO: 1445443 - DNA, 15 bp, Homo sapiens
catttagtggtgaat

SEQ ID NO: 1445444 - DNA, 15 bp, Homo sapiens
atttagtggtgaatc

SEQ ID NO: 1445445 - DNA, 15 bp, Homo sapiens
tttagtggtgaatca

SEQ ID NO: 1445446 - DNA, 15 bp, Homo sapiens
ttagtggtgaatcag

SEQ ID NO: 1445447 - DNA, 15 bp, Homo sapiens
tagtggtgaatcagg

SEQ ID NO: 1445448 - DNA, 15 bp, Homo sapiens
agtggtgaatcaggg

SEQ ID NO: 1445449 - DNA, 15 bp, Homo sapiens
gtggtgaatcaggga

SEQ ID NO: 1445450 - DNA, 15 bp, Homo sapiens
tggtgaatcagggaa

SEQ ID NO: 1445451 - DNA, 15 bp, Homo sapiens
ggtgaatcagggaag

SEQ ID NO: 1445452 - DNA, 15 bp, Homo sapiens
gtgaatcagggaaga

SEQ ID NO: 1445453 - DNA, 15 bp, Homo sapiens
tgaatcagggaagaa

SEQ ID NO: 1445454 - DNA, 15 bp, Homo sapiens
gaatcagggaagaat

SEQ ID NO: 1445455 - DNA, 15 bp, Homo sapiens
aatcagggaagaatg

SEQ ID NO: 1445456 - DNA, 15 bp, Homo sapiens
atcagggaagaatga

SEQ ID NO: 1445457 - DNA, 15 bp, Homo sapiens
tcagggaagaatgaa

SEQ ID NO: 1445458 - DNA, 15 bp, Homo sapiens
cagggaagaatgaaa

SEQ ID NO: 1445459 - DNA, 15 bp, Homo sapiens
agggaagaatgaaaa

SEQ ID NO: 1445460 - DNA, 15 bp, Homo sapiens
gggaagaatgaaaat

SEQ ID NO: 1445461 - DNA, 15 bp, Homo sapiens
ggaagaatgaaaata

SEQ ID NO: 1445462 - DNA, 15 bp, Homo sapiens
gaagaatgaaaataa

SEQ ID NO: 1445463 - DNA, 15 bp, Homo sapiens
aagaatgaaaataat

SEQ ID NO: 1445464 - DNA, 15 bp, Homo sapiens
agaatgaaaataatt

SEQ ID NO: 1445465 - DNA, 15 bp, Homo sapiens
gaatgaaaataattt

SEQ ID NO: 1445466 - DNA, 15 bp, Homo sapiens
aatgaaaataatttg

SEQ ID NO: 1445467 - DNA, 15 bp, Homo sapiens
atgaaaataatttga

SEQ ID NO: 1445468 - DNA, 15 bp, Homo sapiens
tgaaaataatttgat

SEQ ID NO: 1445469 - DNA, 15 bp, Homo sapiens
gaaaataatttgata

SEQ ID NO: 1445470 - DNA, 15 bp, Homo sapiens
aaaataatttgataa

SEQ ID NO: 1445471 - DNA, 15 bp, Homo sapiens
aaataatttgataac

SEQ ID NO: 1445472 - DNA, 15 bp, Homo sapiens
aataatttgataact

SEQ ID NO: 1445473 - DNA, 15 bp, Homo sapiens
ataatttgataactt

SEQ ID NO: 1445474 - DNA, 15 bp, Homo sapiens
taatttgataacttt

SEQ ID NO: 1445475 - DNA, 15 bp, Homo sapiens
aatttgataactttg

SEQ ID NO: 1445476 - DNA, 15 bp, Homo sapiens
atttgataactttgt

SEQ ID NO: 1445477 - DNA, 15 bp, Homo sapiens
tttgataactttgtt

SEQ ID NO: 1445478 - DNA, 15 bp, Homo sapiens
ttgataactttgttg

SEQ ID NO: 1445479 - DNA, 15 bp, Homo sapiens
tgataactttgttgc

SEQ ID NO: 1445480 - DNA, 15 bp, Homo sapiens
gataactttgttgcc

SEQ ID NO: 1445481 - DNA, 15 bp, Homo sapiens
ataactttgttgcct

SEQ ID NO: 1445482 - DNA, 15 bp, Homo sapiens
taactttgttgcctt

SEQ ID NO: 1445483 - DNA, 15 bp, Homo sapiens
aactttgttgccttg

SEQ ID NO: 1445484 - DNA, 15 bp, Homo sapiens
actttgttgccttgc

SEQ ID NO: 1445485 - DNA, 15 bp, Homo sapiens
ctttgttgccttgca

SEQ ID NO: 1445486 - DNA, 15 bp, Homo sapiens
tttgttgccttgcat

SEQ ID NO: 1445487 - DNA, 15 bp, Homo sapiens
ttgttgccttgcatt

SEQ ID NO: 1445488 - DNA, 15 bp, Homo sapiens
tgttgccttgcattt

SEQ ID NO: 1445489 - DNA, 15 bp, Homo sapiens
gttgccttgcattta

SEQ ID NO: 1445490 - DNA, 15 bp, Homo sapiens
ttgccttgcatttat

SEQ ID NO: 1445491 - DNA, 15 bp, Homo sapiens
tgccttgcatttatt

SEQ ID NO: 1445492 - DNA, 15 bp, Homo sapiens
gccttgcatttattt

SEQ ID NO: 1445493 - DNA, 15 bp, Homo sapiens
ccttgcatttattta

SEQ ID NO: 1445494 - DNA, 15 bp, Homo sapiens
cttgcatttatttaa

SEQ ID NO: 1445495 - DNA, 15 bp, Homo sapiens
ttgcatttatttaaa

SEQ ID NO: 1445496 - DNA, 15 bp, Homo sapiens
tgcatttatttaaaa

SEQ ID NO: 1445497 - DNA, 15 bp, Homo sapiens
gcatttatttaaaaa

SEQ ID NO: 1445498 - DNA, 15 bp, Homo sapiens
catttatttaaaaaa

SEQ ID NO: 1445499 - DNA, 15 bp, Homo sapiens
atttatttaaaaaat

SEQ ID NO: 1445500 - DNA, 15 bp, Homo sapiens
ttatttaaaaaattt

SEQ ID NO: 1445501 - DNA, 15 bp, Homo sapiens
tatttaaaaaatttt

SEQ ID NO: 1445502 - DNA, 15 bp, Homo sapiens
atttaaaaaattttt

SEQ ID NO: 1445503 - DNA, 15 bp, Homo sapiens
taaaaaatttttaat

SEQ ID NO: 1445504 - DNA, 15 bp, Homo sapiens
aaaaaatttttaatt

SEQ ID NO: 1445505 - DNA, 15 bp, Homo sapiens
aaaaatttttaattc

SEQ ID NO: 1445506 - DNA, 15 bp, Homo sapiens
aaaatttttaattct

SEQ ID NO: 1445507 - DNA, 15 bp, Homo sapiens
aaatttttaattcta

SEQ ID NO: 1445508 - DNA, 15 bp, Homo sapiens
aatttttaattctag

SEQ ID NO: 1445509 - DNA, 15 bp, Homo sapiens
atttttaattctagg

SEQ ID NO: 1445510 - DNA, 15 bp, Homo sapiens
tttttaattctaggc

SEQ ID NO: 1445511 - DNA, 15 bp, Homo sapiens
ttttaattctaggct

SEQ ID NO: 1445512 - DNA, 15 bp, Homo sapiens
tttaattctaggcta

SEQ ID NO: 1445513 - DNA, 15 bp, Homo sapiens
ttaattctaggctaa

SEQ ID NO: 1445514 - DNA, 15 bp, Homo sapiens
taattctaggctaaa

SEQ ID NO: 1445515 - DNA, 15 bp, Homo sapiens
aattctaggctaaac

SEQ ID NO: 1445516 - DNA, 15 bp, Homo sapiens
attctaggctaaacc

SEQ ID NO: 1445517 - DNA, 15 bp, Homo sapiens
ttctaggctaaaccc

SEQ ID NO: 1445518 - DNA, 15 bp, Homo sapiens
tctaggctaaaccct

SEQ ID NO: 1445519 - DNA, 15 bp, Homo sapiens
ctaggctaaaccctt

SEQ ID NO: 1445520 - DNA, 15 bp, Homo sapiens
taggctaaacccttt

SEQ ID NO: 1445521 - DNA, 15 bp, Homo sapiens
aggctaaaccctttt

SEQ ID NO: 1445522 - DNA, 15 bp, Homo sapiens
ggctaaacccttttt

SEQ ID NO: 1445523 - DNA, 15 bp, Homo sapiens
gctaaacccttttta

SEQ ID NO: 1445524 - DNA, 15 bp, Homo sapiens
ctaaaccctttttaa

SEQ ID NO: 1445525 - DNA, 15 bp, Homo sapiens
taaaccctttttaaa

SEQ ID NO: 1445526 - DNA, 15 bp, Homo sapiens
aaaccctttttaaat

SEQ ID NO: 1445527 - DNA, 15 bp, Homo sapiens
aaccctttttaaatg

SEQ ID NO: 1445528 - DNA, 15 bp, Homo sapiens
accctttttaaatga

SEQ ID NO: 1445529 - DNA, 15 bp, Homo sapiens
ccctttttaaatgaa

SEQ ID NO: 1445530 - DNA, 15 bp, Homo sapiens
cctttttaaatgaaa

SEQ ID NO: 1445531 - DNA, 15 bp, Homo sapiens
ctttttaaatgaaag

SEQ ID NO: 1445532 - DNA, 15 bp, Homo sapiens
tttttaaatgaaagt

SEQ ID NO: 1445533 - DNA, 15 bp, Homo sapiens
ttttaaatgaaagtt

SEQ ID NO: 1445534 - DNA, 15 bp, Homo sapiens
tttaaatgaaagttt

SEQ ID NO: 1445535 - DNA, 15 bp, Homo sapiens
ttaaatgaaagttta

SEQ ID NO: 1445536 - DNA, 15 bp, Homo sapiens
taaatgaaagtttaa

SEQ ID NO: 1445537 - DNA, 15 bp, Homo sapiens
aaatgaaagtttaac

SEQ ID NO: 1445538 - DNA, 15 bp, Homo sapiens
aatgaaagtttaact

SEQ ID NO: 1445539 - DNA, 15 bp, Homo sapiens
atgaaagtttaactt

SEQ ID NO: 1445540 - DNA, 15 bp, Homo sapiens
tgaaagtttaacttc

SEQ ID NO: 1445541 - DNA, 15 bp, Homo sapiens
gaaagtttaacttct

SEQ ID NO: 1445542 - DNA, 15 bp, Homo sapiens
aaagtttaacttctt

SEQ ID NO: 1445543 - DNA, 15 bp, Homo sapiens
aagtttaacttcttg

SEQ ID NO: 1445544 - DNA, 15 bp, Homo sapiens
agtttaacttcttgt

SEQ ID NO: 1445545 - DNA, 15 bp, Homo sapiens
gtttaacttcttgtg

SEQ ID NO: 1445546 - DNA, 15 bp, Homo sapiens
tttaacttcttgtgt

SEQ ID NO: 1445547 - DNA, 15 bp, Homo sapiens
ttaacttcttgtgtt

SEQ ID NO: 1445548 - DNA, 15 bp, Homo sapiens
taacttcttgtgttt

SEQ ID NO: 1445549 - DNA, 15 bp, Homo sapiens
aacttcttgtgtttt

SEQ ID NO: 1445550 - DNA, 15 bp, Homo sapiens
acttcttgtgttttc

SEQ ID NO: 1445551 - DNA, 15 bp, Homo sapiens
cttcttgtgttttca

SEQ ID NO: 1445552 - DNA, 15 bp, Homo sapiens
ttcttgtgttttcag

SEQ ID NO: 1445553 - DNA, 15 bp, Homo sapiens
tcttgtgttttcaga

SEQ ID NO: 1445554 - DNA, 15 bp, Homo sapiens
cttgtgttttcagat

SEQ ID NO: 1445555 - DNA, 15 bp, Homo sapiens
ttgtgttttcagata

SEQ ID NO: 1445556 - DNA, 15 bp, Homo sapiens
tgtgttttcagatac

SEQ ID NO: 1445557 - DNA, 15 bp, Homo sapiens
gtgttttcagatact

SEQ ID NO: 1445558 - DNA, 15 bp, Homo sapiens
tgttttcagatactg

SEQ ID NO: 1445559 - DNA, 15 bp, Homo sapiens
gttttcagatactga

SEQ ID NO: 1445560 - DNA, 15 bp, Homo sapiens
ttttcagatactgaa

SEQ ID NO: 1445561 - DNA, 15 bp, Homo sapiens
tttcagatactgaat

SEQ ID NO: 1445562 - DNA, 15 bp, Homo sapiens
ttcagatactgaata

SEQ ID NO: 1445563 - DNA, 15 bp, Homo sapiens
tcagatactgaatag

SEQ ID NO: 1445564 - DNA, 15 bp, Homo sapiens
cagatactgaatagc

SEQ ID NO: 1445565 - DNA, 15 bp, Homo sapiens
agatactgaatagct

SEQ ID NO: 1445566 - DNA, 15 bp, Homo sapiens
gatactgaatagcta

SEQ ID NO: 1445567 - DNA, 15 bp, Homo sapiens
atactgaatagctat

SEQ ID NO: 1445568 - DNA, 15 bp, Homo sapiens
tactgaatagctatg

SEQ ID NO: 1445569 - DNA, 15 bp, Homo sapiens
actgaatagctatga

SEQ ID NO: 1445570 - DNA, 15 bp, Homo sapiens
ctgaatagctatgat

SEQ ID NO: 1445571 - DNA, 15 bp, Homo sapiens
tgaatagctatgata

SEQ ID NO: 1445572 - DNA, 15 bp, Homo sapiens
gaatagctatgatac

SEQ ID NO: 1445573 - DNA, 15 bp, Homo sapiens
aatagctatgatacc

SEQ ID NO: 1445574 - DNA, 15 bp, Homo sapiens
atagctatgatacct

SEQ ID NO: 1445575 - DNA, 15 bp, Homo sapiens
tagctatgatacctc

SEQ ID NO: 1445576 - DNA, 15 bp, Homo sapiens
agctatgatacctct

SEQ ID NO: 1445577 - DNA, 15 bp, Homo sapiens
gctatgatacctctt

SEQ ID NO: 1445578 - DNA, 15 bp, Homo sapiens
ctatgatacctcttg

SEQ ID NO: 1445579 - DNA, 15 bp, Homo sapiens
tatgatacctcttgt

SEQ ID NO: 1445580 - DNA, 15 bp, Homo sapiens
atgatacctcttgtg

SEQ ID NO: 1445581 - DNA, 15 bp, Homo sapiens
tgatacctcttgtgt

SEQ ID NO: 1445582 - DNA, 15 bp, Homo sapiens
gatacctcttgtgtt

SEQ ID NO: 1445583 - DNA, 15 bp, Homo sapiens
atacctcttgtgttg

SEQ ID NO: 1445584 - DNA, 15 bp, Homo sapiens
tacctcttgtgttga

SEQ ID NO: 1445585 - DNA, 15 bp, Homo sapiens
acctcttgtgttgag

SEQ ID NO: 1445586 - DNA, 15 bp, Homo sapiens
cctcttgtgttgaga

SEQ ID NO: 1445587 - DNA, 15 bp, Homo sapiens
ctcttgtgttgagaa

SEQ ID NO: 1445588 - DNA, 15 bp, Homo sapiens
tcttgtgttgagaaa

SEQ ID NO: 1445589 - DNA, 15 bp, Homo sapiens
cttgtgttgagaaaa

SEQ ID NO: 1445590 - DNA, 15 bp, Homo sapiens
ttgtgttgagaaaac

SEQ ID NO: 1445591 - DNA, 15 bp, Homo sapiens
tgtgttgagaaaact

SEQ ID NO: 1445592 - DNA, 15 bp, Homo sapiens
gtgttgagaaaactt

SEQ ID NO: 1445593 - DNA, 15 bp, Homo sapiens
tgttgagaaaacttt

SEQ ID NO: 1445594 - DNA, 15 bp, Homo sapiens
gttgagaaaacttta

SEQ ID NO: 1445595 - DNA, 15 bp, Homo sapiens
ttgagaaaactttaa

SEQ ID NO: 1445596 - DNA, 15 bp, Homo sapiens
tgagaaaactttaaa

SEQ ID NO: 1445597 - DNA, 15 bp, Homo sapiens
gagaaaactttaaat

SEQ ID NO: 1445598 - DNA, 15 bp, Homo sapiens
agaaaactttaaatt

SEQ ID NO: 1445599 - DNA, 15 bp, Homo sapiens
gaaaactttaaattt

SEQ ID NO: 1445600 - DNA, 15 bp, Homo sapiens
aaaactttaaatttg

SEQ ID NO: 1445601 - DNA, 15 bp, Homo sapiens
aaactttaaatttgc

SEQ ID NO: 1445602 - DNA, 15 bp, Homo sapiens
aactttaaatttgca

SEQ ID NO: 1445603 - DNA, 15 bp, Homo sapiens
actttaaatttgcat

SEQ ID NO: 1445604 - DNA, 15 bp, Homo sapiens
ctttaaatttgcata

SEQ ID NO: 1445605 - DNA, 15 bp, Homo sapiens
tttaaatttgcataa

SEQ ID NO: 1445606 - DNA, 15 bp, Homo sapiens
ttaaatttgcataat

SEQ ID NO: 1445607 - DNA, 15 bp, Homo sapiens
taaatttgcataatc

SEQ ID NO: 1445608 - DNA, 15 bp, Homo sapiens
aaatttgcataatct

SEQ ID NO: 1445609 - DNA, 15 bp, Homo sapiens
aatttgcataatctg

SEQ ID NO: 1445610 - DNA, 15 bp, Homo sapiens
atttgcataatctga

SEQ ID NO: 1445611 - DNA, 15 bp, Homo sapiens
tttgcataatctgaa

SEQ ID NO: 1445612 - DNA, 15 bp, Homo sapiens
ttgcataatctgaag

SEQ ID NO: 1445613 - DNA, 15 bp, Homo sapiens
tgcataatctgaagt

SEQ ID NO: 1445614 - DNA, 15 bp, Homo sapiens
gcataatctgaagtt

SEQ ID NO: 1445615 - DNA, 15 bp, Homo sapiens
cataatctgaagtta

SEQ ID NO: 1445616 - DNA, 15 bp, Homo sapiens
ataatctgaagttat

SEQ ID NO: 1445617 - DNA, 15 bp, Homo sapiens
taatctgaagttatc

SEQ ID NO: 1445618 - DNA, 15 bp, Homo sapiens
aatctgaagttatct

SEQ ID NO: 1445619 - DNA, 15 bp, Homo sapiens
atctgaagttatctt

SEQ ID NO: 1445620 - DNA, 15 bp, Homo sapiens
tctgaagttatcttt

SEQ ID NO: 1445621 - DNA, 15 bp, Homo sapiens
ctgaagttatctttt

SEQ ID NO: 1445622 - DNA, 15 bp, Homo sapiens
tgaagttatcttttc

SEQ ID NO: 1445623 - DNA, 15 bp, Homo sapiens
gaagttatcttttct

SEQ ID NO: 1445624 - DNA, 15 bp, Homo sapiens
aagttatcttttctt

SEQ ID NO: 1445625 - DNA, 15 bp, Homo sapiens
agttatcttttctta

SEQ ID NO: 1445626 - DNA, 15 bp, Homo sapiens
gttatcttttcttat

SEQ ID NO: 1445627 - DNA, 15 bp, Homo sapiens
ttatcttttcttata

SEQ ID NO: 1445628 - DNA, 15 bp, Homo sapiens
tatcttttcttataa

SEQ ID NO: 1445629 - DNA, 15 bp, Homo sapiens
atcttttcttataaa

SEQ ID NO: 1445630 - DNA, 15 bp, Homo sapiens
tcttttcttataaac

SEQ ID NO: 1445631 - DNA, 15 bp, Homo sapiens
cttttcttataaaca

SEQ ID NO: 1445632 - DNA, 15 bp, Homo sapiens
ttttcttataaacat

SEQ ID NO: 1445633 - DNA, 15 bp, Homo sapiens
tttcttataaacatt

SEQ ID NO: 1445634 - DNA, 15 bp, Homo sapiens
ttcttataaacattt

SEQ ID NO: 1445635 - DNA, 15 bp, Homo sapiens
ataaacattttatta

SEQ ID NO: 1445636 - DNA, 15 bp, Homo sapiens
taaacattttattag

SEQ ID NO: 1445637 - DNA, 15 bp, Homo sapiens
aaacattttattagg

SEQ ID NO: 1445638 - DNA, 15 bp, Homo sapiens
aacattttattaggt

SEQ ID NO: 1445639 - DNA, 15 bp, Homo sapiens
acattttattaggtt

SEQ ID NO: 1445640 - DNA, 15 bp, Homo sapiens
cattttattaggttt

SEQ ID NO: 1445641 - DNA, 15 bp, Homo sapiens
attttattaggttta

SEQ ID NO: 1445642 - DNA, 15 bp, Homo sapiens
ttttattaggtttac

SEQ ID NO: 1445643 - DNA, 15 bp, Homo sapiens
tttattaggtttaca

SEQ ID NO: 1445644 - DNA, 15 bp, Homo sapiens
ttattaggtttacag

SEQ ID NO: 1445645 - DNA, 15 bp, Homo sapiens
tattaggtttacagt

SEQ ID NO: 1445646 - DNA, 15 bp, Homo sapiens
attaggtttacagta

SEQ ID NO: 1445647 - DNA, 15 bp, Homo sapiens
ttaggtttacagtat

SEQ ID NO: 1445648 - DNA, 15 bp, Homo sapiens
taggtttacagtatt

SEQ ID NO: 1445649 - DNA, 15 bp, Homo sapiens
aggtttacagtattg

SEQ ID NO: 1445650 - DNA, 15 bp, Homo sapiens
ggtttacagtattgt

SEQ ID NO: 1445651 - DNA, 15 bp, Homo sapiens
gtttacagtattgtc

SEQ ID NO: 1445652 - DNA, 15 bp, Homo sapiens
tttacagtattgtct

SEQ ID NO: 1445653 - DNA, 15 bp, Homo sapiens
ttacagtattgtctt

SEQ ID NO: 1445654 - DNA, 15 bp, Homo sapiens
tacagtattgtcttt

SEQ ID NO: 1445655 - DNA, 15 bp, Homo sapiens
acagtattgtctttt

SEQ ID NO: 1445656 - DNA, 15 bp, Homo sapiens
cagtattgtcttttt

SEQ ID NO: 1445657 - DNA, 15 bp, Homo sapiens
agtattgtctttttg

SEQ ID NO: 1445658 - DNA, 15 bp, Homo sapiens
gtattgtctttttgt

SEQ ID NO: 1445659 - DNA, 15 bp, Homo sapiens
tattgtctttttgtt

SEQ ID NO: 1445660 - DNA, 15 bp, Homo sapiens
attgtctttttgttt

SEQ ID NO: 1445661 - DNA, 15 bp, Homo sapiens
ttgtctttttgtttt

SEQ ID NO: 1445662 - DNA, 15 bp, Homo sapiens
tgtctttttgttttg

SEQ ID NO: 1445663 - DNA, 15 bp, Homo sapiens
gtctttttgttttgt

SEQ ID NO: 1445664 - DNA, 15 bp, Homo sapiens
tctttttgttttgtt

SEQ ID NO: 1445665 - DNA, 15 bp, Homo sapiens
ctttttgttttgttt

SEQ ID NO: 1445666 - DNA, 15 bp, Homo sapiens
tttgttttgttttta

SEQ ID NO: 1445667 - DNA, 15 bp, Homo sapiens
ttgttttgtttttag

SEQ ID NO: 1445668 - DNA, 15 bp, Homo sapiens
tgttttgtttttagt

SEQ ID NO: 1445669 - DNA, 15 bp, Homo sapiens
gttttgtttttagtg

SEQ ID NO: 1445670 - DNA, 15 bp, Homo sapiens
ttttgtttttagtga

SEQ ID NO: 1445671 - DNA, 15 bp, Homo sapiens
tttgtttttagtgaa

SEQ ID NO: 1445672 - DNA, 15 bp, Homo sapiens
ttgtttttagtgaaa

SEQ ID NO: 1445673 - DNA, 15 bp, Homo sapiens
tgtttttagtgaaaa

SEQ ID NO: 1445674 - DNA, 15 bp, Homo sapiens
gtttttagtgaaaag

SEQ ID NO: 1445675 - DNA, 15 bp, Homo sapiens
tttttagtgaaaagg

SEQ ID NO: 1445676 - DNA, 15 bp, Homo sapiens
ttttagtgaaaagga

SEQ ID NO: 1445677 - DNA, 15 bp, Homo sapiens
tttagtgaaaaggag

SEQ ID NO: 1445678 - DNA, 15 bp, Homo sapiens
ttagtgaaaaggaga

SEQ ID NO: 1445679 - DNA, 15 bp, Homo sapiens
tagtgaaaaggagac

SEQ ID NO: 1445680 - DNA, 15 bp, Homo sapiens
agtgaaaaggagacc

SEQ ID NO: 1445681 - DNA, 15 bp, Homo sapiens
gtgaaaaggagacct

SEQ ID NO: 1445682 - DNA, 15 bp, Homo sapiens
tgaaaaggagacctg

SEQ ID NO: 1445683 - DNA, 15 bp, Homo sapiens
gaaaaggagacctgg

SEQ ID NO: 1445684 - DNA, 15 bp, Homo sapiens
aaaaggagacctgga

SEQ ID NO: 1445685 - DNA, 15 bp, Homo sapiens
aaaggagacctggaa

SEQ ID NO: 1445686 - DNA, 15 bp, Homo sapiens
aaggagacctggaaa

SEQ ID NO: 1445687 - DNA, 15 bp, Homo sapiens
aggagacctggaaaa

SEQ ID NO: 1445688 - DNA, 15 bp, Homo sapiens
ggagacctggaaaac

SEQ ID NO: 1445689 - DNA, 15 bp, Homo sapiens
gagacctggaaaaca

SEQ ID NO: 1445690 - DNA, 15 bp, Homo sapiens
agacctggaaaacag

SEQ ID NO: 1445691 - DNA, 15 bp, Homo sapiens
gacctggaaaacaga

SEQ ID NO: 1445692 - DNA, 15 bp, Homo sapiens
acctggaaaacagaa

SEQ ID NO: 1445693 - DNA, 15 bp, Homo sapiens
cctggaaaacagaat

SEQ ID NO: 1445694 - DNA, 15 bp, Homo sapiens
ctggaaaacagaatc

SEQ ID NO: 1445695 - DNA, 15 bp, Homo sapiens
tggaaaacagaatct

SEQ ID NO: 1445696 - DNA, 15 bp, Homo sapiens
ggaaaacagaatcta

SEQ ID NO: 1445697 - DNA, 15 bp, Homo sapiens
gaaaacagaatctaa

SEQ ID NO: 1445698 - DNA, 15 bp, Homo sapiens
aaaacagaatctaaa

SEQ ID NO: 1445699 - DNA, 15 bp, Homo sapiens
aaacagaatctaaaa

SEQ ID NO: 1445700 - DNA, 15 bp, Homo sapiens
aacagaatctaaaac

SEQ ID NO: 1445701 - DNA, 15 bp, Homo sapiens
acagaatctaaaaca

SEQ ID NO: 1445702 - DNA, 15 bp, Homo sapiens
cagaatctaaaacaa

SEQ ID NO: 1445703 - DNA, 15 bp, Homo sapiens
agaatctaaaacaat

SEQ ID NO: 1445704 - DNA, 15 bp, Homo sapiens
gaatctaaaacaata

SEQ ID NO: 1445705 - DNA, 15 bp, Homo sapiens
aatctaaaacaataa

SEQ ID NO: 1445706 - DNA, 15 bp, Homo sapiens
atctaaaacaataaa

SEQ ID NO: 1445707 - DNA, 15 bp, Homo sapiens
tctaaaacaataaaa

SEQ ID NO: 1445708 - DNA, 15 bp, Homo sapiens
ctaaaacaataaaag

SEQ ID NO: 1445709 - DNA, 15 bp, Homo sapiens
taaaacaataaaaga

SEQ ID NO: 1445710 - DNA, 15 bp, Homo sapiens
aaaacaataaaagag

SEQ ID NO: 1445711 - DNA, 15 bp, Homo sapiens
aaacaataaaagagg

SEQ ID NO: 1445712 - DNA, 15 bp, Homo sapiens
aacaataaaagagga

SEQ ID NO: 1445713 - DNA, 15 bp, Homo sapiens
acaataaaagaggaa

SEQ ID NO: 1445714 - DNA, 15 bp, Homo sapiens
caataaaagaggaaa

SEQ ID NO: 1445715 - DNA, 15 bp, Homo sapiens
aataaaagaggaaaa

SEQ ID NO: 1445716 - DNA, 15 bp, Homo sapiens
ataaaagaggaaaag

SEQ ID NO: 1445717 - DNA, 15 bp, Homo sapiens
taaaagaggaaaaga

SEQ ID NO: 1445718 - DNA, 15 bp, Homo sapiens
aaaagaggaaaagag

SEQ ID NO: 1445719 - DNA, 15 bp, Homo sapiens
aaagaggaaaagaga

SEQ ID NO: 1445720 - DNA, 15 bp, Homo sapiens
aagaggaaaagagaa

SEQ ID NO: 1445721 - DNA, 15 bp, Homo sapiens
agaggaaaagagaaa

SEQ ID NO: 1445722 - DNA, 15 bp, Homo sapiens
gaggaaaagagaaaa

SEQ ID NO: 1445723 - DNA, 15 bp, Homo sapiens
aggaaaagagaaaac

SEQ ID NO: 1445724 - DNA, 15 bp, Homo sapiens
ggaaaagagaaaact

SEQ ID NO: 1445725 - DNA, 15 bp, Homo sapiens
gaaaagagaaaactt

SEQ ID NO: 1445726 - DNA, 15 bp, Homo sapiens
aaaagagaaaacttg

SEQ ID NO: 1445727 - DNA, 15 bp, Homo sapiens
aaagagaaaacttga

SEQ ID NO: 1445728 - DNA, 15 bp, Homo sapiens
aagagaaaacttgag

SEQ ID NO: 1445729 - DNA, 15 bp, Homo sapiens
agagaaaacttgagg

SEQ ID NO: 1445730 - DNA, 15 bp, Homo sapiens
gagaaaacttgagga

SEQ ID NO: 1445731 - DNA, 15 bp, Homo sapiens
agaaaacttgaggat

SEQ ID NO: 1445732 - DNA, 15 bp, Homo sapiens
gaaaacttgaggatc

SEQ ID NO: 1445733 - DNA, 15 bp, Homo sapiens
aaaacttgaggatca

SEQ ID NO: 1445734 - DNA, 15 bp, Homo sapiens
aaacttgaggatcaa

SEQ ID NO: 1445735 - DNA, 15 bp, Homo sapiens
aacttgaggatcaag

SEQ ID NO: 1445736 - DNA, 15 bp, Homo sapiens
acttgaggatcaagt

SEQ ID NO: 1445737 - DNA, 15 bp, Homo sapiens
cttgaggatcaagtc

SEQ ID NO: 1445738 - DNA, 15 bp, Homo sapiens
ttgaggatcaagtcc

SEQ ID NO: 1445739 - DNA, 15 bp, Homo sapiens
tgaggatcaagtcca

SEQ ID NO: 1445740 - DNA, 15 bp, Homo sapiens
gaggatcaagtccaa

SEQ ID NO: 1445741 - DNA, 15 bp, Homo sapiens
aggatcaagtccaac

SEQ ID NO: 1445742 - DNA, 15 bp, Homo sapiens
ggatcaagtccaaca

SEQ ID NO: 1445743 - DNA, 15 bp, Homo sapiens
gatcaagtccaacaa

SEQ ID NO: 1445744 - DNA, 15 bp, Homo sapiens
atcaagtccaacaag

SEQ ID NO: 1445745 - DNA, 15 bp, Homo sapiens
tcaagtccaacaaga

SEQ ID NO: 1445746 - DNA, 15 bp, Homo sapiens
caagtccaacaagat

SEQ ID NO: 1445747 - DNA, 15 bp, Homo sapiens
aagtccaacaagatg

SEQ ID NO: 1445748 - DNA, 15 bp, Homo sapiens
agtccaacaagatgc

SEQ ID NO: 1445749 - DNA, 15 bp, Homo sapiens
gtccaacaagatgct

SEQ ID NO: 1445750 - DNA, 15 bp, Homo sapiens
tccaacaagatgcta

SEQ ID NO: 1445751 - DNA, 15 bp, Homo sapiens
ccaacaagatgctat

SEQ ID NO: 1445752 - DNA, 15 bp, Homo sapiens
caacaagatgctata

SEQ ID NO: 1445753 - DNA, 15 bp, Homo sapiens
aacaagatgctataa

SEQ ID NO: 1445754 - DNA, 15 bp, Homo sapiens
acaagatgctataaa

SEQ ID NO: 1445755 - DNA, 15 bp, Homo sapiens
caagatgctataaaa

SEQ ID NO: 1445756 - DNA, 15 bp, Homo sapiens
aagatgctataaaag

SEQ ID NO: 1445757 - DNA, 15 bp, Homo sapiens
agatgctataaaagt

SEQ ID NO: 1445758 - DNA, 15 bp, Homo sapiens
gatgctataaaagta

SEQ ID NO: 1445759 - DNA, 15 bp, Homo sapiens
atgctataaaagtaa

SEQ ID NO: 1445760 - DNA, 15 bp, Homo sapiens
tgctataaaagtaaa

SEQ ID NO: 1445761 - DNA, 15 bp, Homo sapiens
gctataaaagtaaaa

SEQ ID NO: 1445762 - DNA, 15 bp, Homo sapiens
ctataaaagtaaaag

SEQ ID NO: 1445763 - DNA, 15 bp, Homo sapiens
tataaaagtaaaaga

SEQ ID NO: 1445764 - DNA, 15 bp, Homo sapiens
ataaaagtaaaagaa

SEQ ID NO: 1445765 - DNA, 15 bp, Homo sapiens
taaaagtaaaagaat

SEQ ID NO: 1445766 - DNA, 15 bp, Homo sapiens
aaaagtaaaagaata

SEQ ID NO: 1445767 - DNA, 15 bp, Homo sapiens
aaagtaaaagaatat

SEQ ID NO: 1445768 - DNA, 15 bp, Homo sapiens
aagtaaaagaatata

SEQ ID NO: 1445769 - DNA, 15 bp, Homo sapiens
agtaaaagaatataa

SEQ ID NO: 1445770 - DNA, 15 bp, Homo sapiens
gtaaaagaatataat

SEQ ID NO: 1445771 - DNA, 15 bp, Homo sapiens
taaaagaatataatg

SEQ ID NO: 1445772 - DNA, 15 bp, Homo sapiens
aaaagaatataatgt

SEQ ID NO: 1445773 - DNA, 15 bp, Homo sapiens
aaagaatataatgta

SEQ ID NO: 1445774 - DNA, 15 bp, Homo sapiens
aagaatataatgtaa

SEQ ID NO: 1445775 - DNA, 15 bp, Homo sapiens
agaatataatgtaag

SEQ ID NO: 1445776 - DNA, 15 bp, Homo sapiens
gaatataatgtaagt

SEQ ID NO: 1445777 - DNA, 15 bp, Homo sapiens
aatataatgtaagta

SEQ ID NO: 1445778 - DNA, 15 bp, Homo sapiens
atataatgtaagtaa

SEQ ID NO: 1445779 - DNA, 15 bp, Homo sapiens
tataatgtaagtaaa

SEQ ID NO: 1445780 - DNA, 15 bp, Homo sapiens
ataatgtaagtaaaa

SEQ ID NO: 1445781 - DNA, 15 bp, Homo sapiens
taatgtaagtaaaac

SEQ ID NO: 1445782 - DNA, 15 bp, Homo sapiens
aatgtaagtaaaaca

SEQ ID NO: 1445783 - DNA, 15 bp, Homo sapiens
atgtaagtaaaacat

SEQ ID NO: 1445784 - DNA, 15 bp, Homo sapiens
tgtaagtaaaacatt

SEQ ID NO: 1445785 - DNA, 15 bp, Homo sapiens
gtaagtaaaacattt

SEQ ID NO: 1445786 - DNA, 15 bp, Homo sapiens
taagtaaaacatttt

SEQ ID NO: 1445787 - DNA, 15 bp, Homo sapiens
aagtaaaacattttt

SEQ ID NO: 1445788 - DNA, 15 bp, Homo sapiens
agtaaaacattttta

SEQ ID NO: 1445789 - DNA, 15 bp, Homo sapiens
gtaaaacatttttaa

SEQ ID NO: 1445790 - DNA, 15 bp, Homo sapiens
taaaacatttttaac

SEQ ID NO: 1445791 - DNA, 15 bp, Homo sapiens
aaaacatttttaaca

SEQ ID NO: 1445792 - DNA, 15 bp, Homo sapiens
aaacatttttaacat

SEQ ID NO: 1445793 - DNA, 15 bp, Homo sapiens
aacatttttaacatt

SEQ ID NO: 1445794 - DNA, 15 bp, Homo sapiens
acatttttaacatta

SEQ ID NO: 1445795 - DNA, 15 bp, Homo sapiens
catttttaacattag

SEQ ID NO: 1445796 - DNA, 15 bp, Homo sapiens
atttttaacattagt

SEQ ID NO: 1445797 - DNA, 15 bp, Homo sapiens
tttttaacattagta

SEQ ID NO: 1445798 - DNA, 15 bp, Homo sapiens
ttttaacattagtat

SEQ ID NO: 1445799 - DNA, 15 bp, Homo sapiens
tttaacattagtatg

SEQ ID NO: 1445800 - DNA, 15 bp, Homo sapiens
ttaacattagtatgc

SEQ ID NO: 1445801 - DNA, 15 bp, Homo sapiens
taacattagtatgca

SEQ ID NO: 1445802 - DNA, 15 bp, Homo sapiens
aacattagtatgcaa

SEQ ID NO: 1445803 - DNA, 15 bp, Homo sapiens
acattagtatgcaat

SEQ ID NO: 1445804 - DNA, 15 bp, Homo sapiens
cattagtatgcaata

SEQ ID NO: 1445805 - DNA, 15 bp, Homo sapiens
attagtatgcaatat

SEQ ID NO: 1445806 - DNA, 15 bp, Homo sapiens
ttagtatgcaatatt

SEQ ID NO: 1445807 - DNA, 15 bp, Homo sapiens
tagtatgcaatattg

SEQ ID NO: 1445808 - DNA, 15 bp, Homo sapiens
agtatgcaatattgt

SEQ ID NO: 1445809 - DNA, 15 bp, Homo sapiens
gtatgcaatattgta

SEQ ID NO: 1445810 - DNA, 15 bp, Homo sapiens
tatgcaatattgtac

SEQ ID NO: 1445811 - DNA, 15 bp, Homo sapiens
atgcaatattgtaca

SEQ ID NO: 1445812 - DNA, 15 bp, Homo sapiens
tgcaatattgtacaa

SEQ ID NO: 1445813 - DNA, 15 bp, Homo sapiens
gcaatattgtacaaa

SEQ ID NO: 1445814 - DNA, 15 bp, Homo sapiens
caatattgtacaaag

SEQ ID NO: 1445815 - DNA, 15 bp, Homo sapiens
aatattgtacaaagt

SEQ ID NO: 1445816 - DNA, 15 bp, Homo sapiens
atattgtacaaagta

SEQ ID NO: 1445817 - DNA, 15 bp, Homo sapiens
tattgtacaaagtag

SEQ ID NO: 1445818 - DNA, 15 bp, Homo sapiens
attgtacaaagtagg

SEQ ID NO: 1445819 - DNA, 15 bp, Homo sapiens
ttgtacaaagtagga

SEQ ID NO: 1445820 - DNA, 15 bp, Homo sapiens
tgtacaaagtaggat

SEQ ID NO: 1445821 - DNA, 15 bp, Homo sapiens
gtacaaagtaggata

SEQ ID NO: 1445822 - DNA, 15 bp, Homo sapiens
tacaaagtaggatag

SEQ ID NO: 1445823 - DNA, 15 bp, Homo sapiens
acaaagtaggatagc

SEQ ID NO: 1445824 - DNA, 15 bp, Homo sapiens
caaagtaggatagct

SEQ ID NO: 1445825 - DNA, 15 bp, Homo sapiens
aaagtaggatagcta

SEQ ID NO: 1445826 - DNA, 15 bp, Homo sapiens
aagtaggatagctag

SEQ ID NO: 1445827 - DNA, 15 bp, Homo sapiens
agtaggatagctaga

SEQ ID NO: 1445828 - DNA, 15 bp, Homo sapiens
gtaggatagctagat

SEQ ID NO: 1445829 - DNA, 15 bp, Homo sapiens
taggatagctagatt

SEQ ID NO: 1445830 - DNA, 15 bp, Homo sapiens
aggatagctagattc

SEQ ID NO: 1445831 - DNA, 15 bp, Homo sapiens
ggatagctagattca

SEQ ID NO: 1445832 - DNA, 15 bp, Homo sapiens
gatagctagattcaa

SEQ ID NO: 1445833 - DNA, 15 bp, Homo sapiens
atagctagattcaac

SEQ ID NO: 1445834 - DNA, 15 bp, Homo sapiens
tagctagattcaaca

SEQ ID NO: 1445835 - DNA, 15 bp, Homo sapiens
agctagattcaacaa

SEQ ID NO: 1445836 - DNA, 15 bp, Homo sapiens
gctagattcaacaag

SEQ ID NO: 1445837 - DNA, 15 bp, Homo sapiens
ctagattcaacaagt

SEQ ID NO: 1445838 - DNA, 15 bp, Homo sapiens
tagattcaacaagta

SEQ ID NO: 1445839 - DNA, 15 bp, Homo sapiens
agattcaacaagtaa

SEQ ID NO: 1445840 - DNA, 15 bp, Homo sapiens
gattcaacaagtaat

SEQ ID NO: 1445841 - DNA, 15 bp, Homo sapiens
attcaacaagtaata

SEQ ID NO: 1445842 - DNA, 15 bp, Homo sapiens
ttcaacaagtaatat

SEQ ID NO: 1445843 - DNA, 15 bp, Homo sapiens
tcaacaagtaatatg

SEQ ID NO: 1445844 - DNA, 15 bp, Homo sapiens
caacaagtaatatgg

SEQ ID NO: 1445845 - DNA, 15 bp, Homo sapiens
aacaagtaatatgga

SEQ ID NO: 1445846 - DNA, 15 bp, Homo sapiens
acaagtaatatggat

SEQ ID NO: 1445847 - DNA, 15 bp, Homo sapiens
caagtaatatggatg

SEQ ID NO: 1445848 - DNA, 15 bp, Homo sapiens
aagtaatatggatgt

SEQ ID NO: 1445849 - DNA, 15 bp, Homo sapiens
agtaatatggatgtg

SEQ ID NO: 1445850 - DNA, 15 bp, Homo sapiens
gtaatatggatgtgt

SEQ ID NO: 1445851 - DNA, 15 bp, Homo sapiens
taatatggatgtgtc

SEQ ID NO: 1445852 - DNA, 15 bp, Homo sapiens
aatatggatgtgtct

SEQ ID NO: 1445853 - DNA, 15 bp, Homo sapiens
atatggatgtgtctt

SEQ ID NO: 1445854 - DNA, 15 bp, Homo sapiens
tatggatgtgtcttt

SEQ ID NO: 1445855 - DNA, 15 bp, Homo sapiens
atggatgtgtctttg

SEQ ID NO: 1445856 - DNA, 15 bp, Homo sapiens
tggatgtgtctttgt

SEQ ID NO: 1445857 - DNA, 15 bp, Homo sapiens
ggatgtgtctttgtg

SEQ ID NO: 1445858 - DNA, 15 bp, Homo sapiens
gatgtgtctttgtgc

SEQ ID NO: 1445859 - DNA, 15 bp, Homo sapiens
atgtgtctttgtgca

SEQ ID NO: 1445860 - DNA, 15 bp, Homo sapiens
tgtgtctttgtgcag

SEQ ID NO: 1445861 - DNA, 15 bp, Homo sapiens
gtgtctttgtgcaga

SEQ ID NO: 1445862 - DNA, 15 bp, Homo sapiens
tgtctttgtgcagaa

SEQ ID NO: 1445863 - DNA, 15 bp, Homo sapiens
gtctttgtgcagaat

SEQ ID NO: 1445864 - DNA, 15 bp, Homo sapiens
tctttgtgcagaatt

SEQ ID NO: 1445865 - DNA, 15 bp, Homo sapiens
ctttgtgcagaattt

SEQ ID NO: 1445866 - DNA, 15 bp, Homo sapiens
tttgtgcagaatttg

SEQ ID NO: 1445867 - DNA, 15 bp, Homo sapiens
ttgtgcagaatttgc

SEQ ID NO: 1445868 - DNA, 15 bp, Homo sapiens
tgtgcagaatttgct

SEQ ID NO: 1445869 - DNA, 15 bp, Homo sapiens
gtgcagaatttgctc

SEQ ID NO: 1445870 - DNA, 15 bp, Homo sapiens
tgcagaatttgctca

SEQ ID NO: 1445871 - DNA, 15 bp, Homo sapiens
gcagaatttgctcaa

SEQ ID NO: 1445872 - DNA, 15 bp, Homo sapiens
cagaatttgctcaat

SEQ ID NO: 1445873 - DNA, 15 bp, Homo sapiens
agaatttgctcaatg

SEQ ID NO: 1445874 - DNA, 15 bp, Homo sapiens
gaatttgctcaatgc

SEQ ID NO: 1445875 - DNA, 15 bp, Homo sapiens
aatttgctcaatgct

SEQ ID NO: 1445876 - DNA, 15 bp, Homo sapiens
atttgctcaatgctc

SEQ ID NO: 1445877 - DNA, 15 bp, Homo sapiens
tttgctcaatgctct

SEQ ID NO: 1445878 - DNA, 15 bp, Homo sapiens
ttgctcaatgctctt

SEQ ID NO: 1445879 - DNA, 15 bp, Homo sapiens
tgctcaatgctcttc

SEQ ID NO: 1445880 - DNA, 15 bp, Homo sapiens
gctcaatgctcttca

SEQ ID NO: 1445881 - DNA, 15 bp, Homo sapiens
ctcaatgctcttcag

SEQ ID NO: 1445882 - DNA, 15 bp, Homo sapiens
tcaatgctcttcaga

SEQ ID NO: 1445883 - DNA, 15 bp, Homo sapiens
caatgctcttcagat

SEQ ID NO: 1445884 - DNA, 15 bp, Homo sapiens
aatgctcttcagatg

SEQ ID NO: 1445885 - DNA, 15 bp, Homo sapiens
atgctcttcagatgg

SEQ ID NO: 1445886 - DNA, 15 bp, Homo sapiens
tgctcttcagatgga

SEQ ID NO: 1445887 - DNA, 15 bp, Homo sapiens
gctcttcagatggat

SEQ ID NO: 1445888 - DNA, 15 bp, Homo sapiens
ctcttcagatggatt

SEQ ID NO: 1445889 - DNA, 15 bp, Homo sapiens
tcttcagatggattc

SEQ ID NO: 1445890 - DNA, 15 bp, Homo sapiens
cttcagatggattcg

SEQ ID NO: 1445891 - DNA, 15 bp, Homo sapiens
ttcagatggattcgg

SEQ ID NO: 1445892 - DNA, 15 bp, Homo sapiens
tcagatggattcgga

SEQ ID NO: 1445893 - DNA, 15 bp, Homo sapiens
cagatggattcggat

SEQ ID NO: 1445894 - DNA, 15 bp, Homo sapiens
agatggattcggatg

SEQ ID NO: 1445895 - DNA, 15 bp, Homo sapiens
gatggattcggatga

SEQ ID NO: 1445896 - DNA, 15 bp, Homo sapiens
atggattcggatgaa

SEQ ID NO: 1445897 - DNA, 15 bp, Homo sapiens
tggattcggatgaaa

SEQ ID NO: 1445898 - DNA, 15 bp, Homo sapiens
ggattcggatgaaat

SEQ ID NO: 1445899 - DNA, 15 bp, Homo sapiens
gattcggatgaaatg

SEQ ID NO: 1445900 - DNA, 15 bp, Homo sapiens
attcggatgaaatga

SEQ ID NO: 1445901 - DNA, 15 bp, Homo sapiens
ttcggatgaaatgaa

SEQ ID NO: 1445902 - DNA, 15 bp, Homo sapiens
tcggatgaaatgaaa

SEQ ID NO: 1445903 - DNA, 15 bp, Homo sapiens
cggatgaaatgaaaa

SEQ ID NO: 1445904 - DNA, 15 bp, Homo sapiens
ggatgaaatgaaaaa

SEQ ID NO: 1445905 - DNA, 15 bp, Homo sapiens
gatgaaatgaaaaaa

SEQ ID NO: 1445906 - DNA, 15 bp, Homo sapiens
atgaaatgaaaaaaa

SEQ ID NO: 1445907 - DNA, 15 bp, Homo sapiens
tgaaatgaaaaaaat

SEQ ID NO: 1445908 - DNA, 15 bp, Homo sapiens
gaaatgaaaaaaata

SEQ ID NO: 1445909 - DNA, 15 bp, Homo sapiens
aaatgaaaaaaatac

SEQ ID NO: 1445910 - DNA, 15 bp, Homo sapiens
aatgaaaaaaatact

SEQ ID NO: 1445911 - DNA, 15 bp, Homo sapiens
atgaaaaaaatactt

SEQ ID NO: 1445912 - DNA, 15 bp, Homo sapiens
tgaaaaaaatacttg

SEQ ID NO: 1445913 - DNA, 15 bp, Homo sapiens
gaaaaaaatacttgc

SEQ ID NO: 1445914 - DNA, 15 bp, Homo sapiens
aaaaaaatacttgca

SEQ ID NO: 1445915 - DNA, 15 bp, Homo sapiens
aaaaaatacttgcag

SEQ ID NO: 1445916 - DNA, 15 bp, Homo sapiens
aaaaatacttgcaga

SEQ ID NO: 1445917 - DNA, 15 bp, Homo sapiens
aaaatacttgcagaa

SEQ ID NO: 1445918 - DNA, 15 bp, Homo sapiens
aaatacttgcagaaa

SEQ ID NO: 1445919 - DNA, 15 bp, Homo sapiens
aatacttgcagaaaa

SEQ ID NO: 1445920 - DNA, 15 bp, Homo sapiens
atacttgcagaaaat

SEQ ID NO: 1445921 - DNA, 15 bp, Homo sapiens
tacttgcagaaaata

SEQ ID NO: 1445922 - DNA, 15 bp, Homo sapiens
acttgcagaaaatag

SEQ ID NO: 1445923 - DNA, 15 bp, Homo sapiens
cttgcagaaaatagt

SEQ ID NO: 1445924 - DNA, 15 bp, Homo sapiens
ttgcagaaaatagta

SEQ ID NO: 1445925 - DNA, 15 bp, Homo sapiens
tgcagaaaatagtag

SEQ ID NO: 1445926 - DNA, 15 bp, Homo sapiens
gcagaaaatagtagg

SEQ ID NO: 1445927 - DNA, 15 bp, Homo sapiens
cagaaaatagtagga

SEQ ID NO: 1445928 - DNA, 15 bp, Homo sapiens
agaaaatagtaggaa

SEQ ID NO: 1445929 - DNA, 15 bp, Homo sapiens
gaaaatagtaggaaa

SEQ ID NO: 1445930 - DNA, 15 bp, Homo sapiens
aaaatagtaggaaaa

SEQ ID NO: 1445931 - DNA, 15 bp, Homo sapiens
aaatagtaggaaaat

SEQ ID NO: 1445932 - DNA, 15 bp, Homo sapiens
aatagtaggaaaatt

SEQ ID NO: 1445933 - DNA, 15 bp, Homo sapiens
atagtaggaaaatta

SEQ ID NO: 1445934 - DNA, 15 bp, Homo sapiens
tagtaggaaaattac

SEQ ID NO: 1445935 - DNA, 15 bp, Homo sapiens
agtaggaaaattact

SEQ ID NO: 1445936 - DNA, 15 bp, Homo sapiens
gtaggaaaattactg

SEQ ID NO: 1445937 - DNA, 15 bp, Homo sapiens
taggaaaattactgt

SEQ ID NO: 1445938 - DNA, 15 bp, Homo sapiens
aggaaaattactgtt

SEQ ID NO: 1445939 - DNA, 15 bp, Homo sapiens
ggaaaattactgttt

SEQ ID NO: 1445940 - DNA, 15 bp, Homo sapiens
gaaaattactgtttt

SEQ ID NO: 1445941 - DNA, 15 bp, Homo sapiens
aaaattactgttttg

SEQ ID NO: 1445942 - DNA, 15 bp, Homo sapiens
aaattactgttttgc

SEQ ID NO: 1445943 - DNA, 15 bp, Homo sapiens
aattactgttttgca

SEQ ID NO: 1445944 - DNA, 15 bp, Homo sapiens
attactgttttgcaa

SEQ ID NO: 1445945 - DNA, 15 bp, Homo sapiens
ttactgttttgcaag

SEQ ID NO: 1445946 - DNA, 15 bp, Homo sapiens
tactgttttgcaagt

SEQ ID NO: 1445947 - DNA, 15 bp, Homo sapiens
actgttttgcaagtg

SEQ ID NO: 1445948 - DNA, 15 bp, Homo sapiens
ctgttttgcaagtga

SEQ ID NO: 1445949 - DNA, 15 bp, Homo sapiens
tgttttgcaagtgaa

SEQ ID NO: 1445950 - DNA, 15 bp, Homo sapiens
gttttgcaagtgaat

SEQ ID NO: 1445951 - DNA, 15 bp, Homo sapiens
ttttgcaagtgaatg

SEQ ID NO: 1445952 - DNA, 15 bp, Homo sapiens
tttgcaagtgaatga

SEQ ID NO: 1445953 - DNA, 15 bp, Homo sapiens
ttgcaagtgaatgaa

SEQ ID NO: 1445954 - DNA, 15 bp, Homo sapiens
tgcaagtgaatgaaa

SEQ ID NO: 1445955 - DNA, 15 bp, Homo sapiens
gcaagtgaatgaaaa

SEQ ID NO: 1445956 - DNA, 15 bp, Homo sapiens
aagtgaatgaaaaat

SEQ ID NO: 1445957 - DNA, 15 bp, Homo sapiens
agtgaatgaaaaatc

SEQ ID NO: 1445958 - DNA, 15 bp, Homo sapiens
gtgaatgaaaaatca

SEQ ID NO: 1445959 - DNA, 15 bp, Homo sapiens
tgaatgaaaaatcac

SEQ ID NO: 1445960 - DNA, 15 bp, Homo sapiens
gaatgaaaaatcact

SEQ ID NO: 1445961 - DNA, 15 bp, Homo sapiens
aatgaaaaatcactt

SEQ ID NO: 1445962 - DNA, 15 bp, Homo sapiens
atgaaaaatcactta

SEQ ID NO: 1445963 - DNA, 15 bp, Homo sapiens
tgaaaaatcacttat

SEQ ID NO: 1445964 - DNA, 15 bp, Homo sapiens
gaaaaatcacttata

SEQ ID NO: 1445965 - DNA, 15 bp, Homo sapiens
aaaaatcacttataa

SEQ ID NO: 1445966 - DNA, 15 bp, Homo sapiens
aaaatcacttataag

SEQ ID NO: 1445967 - DNA, 15 bp, Homo sapiens
aaatcacttataagg

SEQ ID NO: 1445968 - DNA, 15 bp, Homo sapiens
aatcacttataaggc

SEQ ID NO: 1445969 - DNA, 15 bp, Homo sapiens
atcacttataaggca

SEQ ID NO: 1445970 - DNA, 15 bp, Homo sapiens
tcacttataaggcaa

SEQ ID NO: 1445971 - DNA, 15 bp, Homo sapiens
cacttataaggcaat

SEQ ID NO: 1445972 - DNA, 15 bp, Homo sapiens
acttataaggcaata

SEQ ID NO: 1445973 - DNA, 15 bp, Homo sapiens
cttataaggcaatat

SEQ ID NO: 1445974 - DNA, 15 bp, Homo sapiens
ttataaggcaatata

SEQ ID NO: 1445975 - DNA, 15 bp, Homo sapiens
tataaggcaatatac

SEQ ID NO: 1445976 - DNA, 15 bp, Homo sapiens
ataaggcaatataca

SEQ ID NO: 1445977 - DNA, 15 bp, Homo sapiens
taaggcaatatacaa

SEQ ID NO: 1445978 - DNA, 15 bp, Homo sapiens
aaggcaatatacaac

SEQ ID NO: 1445979 - DNA, 15 bp, Homo sapiens
aggcaatatacaacc

SEQ ID NO: 1445980 - DNA, 15 bp, Homo sapiens
ggcaatatacaacct

SEQ ID NO: 1445981 - DNA, 15 bp, Homo sapiens
gcaatatacaacctt

SEQ ID NO: 1445982 - DNA, 15 bp, Homo sapiens
caatatacaacctta

SEQ ID NO: 1445983 - DNA, 15 bp, Homo sapiens
aatatacaaccttag

SEQ ID NO: 1445984 - DNA, 15 bp, Homo sapiens
atatacaaccttagt

SEQ ID NO: 1445985 - DNA, 15 bp, Homo sapiens
tatacaaccttagta

SEQ ID NO: 1445986 - DNA, 15 bp, Homo sapiens
atacaaccttagtag

SEQ ID NO: 1445987 - DNA, 15 bp, Homo sapiens
tacaaccttagtaga

SEQ ID NO: 1445988 - DNA, 15 bp, Homo sapiens
acaaccttagtagaa

SEQ ID NO: 1445989 - DNA, 15 bp, Homo sapiens
caaccttagtagaat

SEQ ID NO: 1445990 - DNA, 15 bp, Homo sapiens
aaccttagtagaatt

SEQ ID NO: 1445991 - DNA, 15 bp, Homo sapiens
accttagtagaattg

SEQ ID NO: 1445992 - DNA, 15 bp, Homo sapiens
ccttagtagaattgg

SEQ ID NO: 1445993 - DNA, 15 bp, Homo sapiens
cttagtagaattgga

SEQ ID NO: 1445994 - DNA, 15 bp, Homo sapiens
ttagtagaattggag

SEQ ID NO: 1445995 - DNA, 15 bp, Homo sapiens
tagtagaattggagc

SEQ ID NO: 1445996 - DNA, 15 bp, Homo sapiens
agtagaattggagcg

SEQ ID NO: 1445997 - DNA, 15 bp, Homo sapiens
gtagaattggagcga

SEQ ID NO: 1445998 - DNA, 15 bp, Homo sapiens
tagaattggagcgac

SEQ ID NO: 1445999 - DNA, 15 bp, Homo sapiens
agaattggagcgaca

SEQ ID NO: 1446000 - DNA, 15 bp, Homo sapiens
gaattggagcgacaa

SEQ ID NO: 1446001 - DNA, 15 bp, Homo sapiens
aattggagcgacaac

SEQ ID NO: 1446002 - DNA, 15 bp, Homo sapiens
attggagcgacaact

SEQ ID NO: 1446003 - DNA, 15 bp, Homo sapiens
ttggagcgacaactt

SEQ ID NO: 1446004 - DNA, 15 bp, Homo sapiens
tggagcgacaactta

SEQ ID NO: 1446005 - DNA, 15 bp, Homo sapiens
ggagcgacaacttag

SEQ ID NO: 1446006 - DNA, 15 bp, Homo sapiens
gagcgacaacttaga

SEQ ID NO: 1446007 - DNA, 15 bp, Homo sapiens
agcgacaacttagaa

SEQ ID NO: 1446008 - DNA, 15 bp, Homo sapiens
gcgacaacttagaaa

SEQ ID NO: 1446009 - DNA, 15 bp, Homo sapiens
cgacaacttagaaaa

SEQ ID NO: 1446010 - DNA, 15 bp, Homo sapiens
gacaacttagaaaag

SEQ ID NO: 1446011 - DNA, 15 bp, Homo sapiens
acaacttagaaaaga

SEQ ID NO: 1446012 - DNA, 15 bp, Homo sapiens
caacttagaaaagaa

SEQ ID NO: 1446013 - DNA, 15 bp, Homo sapiens
aacttagaaaagaaa

SEQ ID NO: 1446014 - DNA, 15 bp, Homo sapiens
acttagaaaagaaaa

SEQ ID NO: 1446015 - DNA, 15 bp, Homo sapiens
cttagaaaagaaaat

SEQ ID NO: 1446016 - DNA, 15 bp, Homo sapiens
tagaaaagaaaatga

SEQ ID NO: 1446017 - DNA, 15 bp, Homo sapiens
agaaaagaaaatgag

SEQ ID NO: 1446018 - DNA, 15 bp, Homo sapiens
gaaaagaaaatgaga

SEQ ID NO: 1446019 - DNA, 15 bp, Homo sapiens
aaaagaaaatgagaa

SEQ ID NO: 1446020 - DNA, 15 bp, Homo sapiens
aaagaaaatgagaag

SEQ ID NO: 1446021 - DNA, 15 bp, Homo sapiens
aagaaaatgagaagc

SEQ ID NO: 1446022 - DNA, 15 bp, Homo sapiens
agaaaatgagaagca

SEQ ID NO: 1446023 - DNA, 15 bp, Homo sapiens
gaaaatgagaagcaa

SEQ ID NO: 1446024 - DNA, 15 bp, Homo sapiens
aaaatgagaagcaaa

SEQ ID NO: 1446025 - DNA, 15 bp, Homo sapiens
aaatgagaagcaaaa

SEQ ID NO: 1446026 - DNA, 15 bp, Homo sapiens
aatgagaagcaaaag

SEQ ID NO: 1446027 - DNA, 15 bp, Homo sapiens
atgagaagcaaaaga

SEQ ID NO: 1446028 - DNA, 15 bp, Homo sapiens
tgagaagcaaaagaa

SEQ ID NO: 1446029 - DNA, 15 bp, Homo sapiens
gagaagcaaaagaat

SEQ ID NO: 1446030 - DNA, 15 bp, Homo sapiens
agaagcaaaagaatg

SEQ ID NO: 1446031 - DNA, 15 bp, Homo sapiens
gaagcaaaagaatga

SEQ ID NO: 1446032 - DNA, 15 bp, Homo sapiens
aagcaaaagaatgaa

SEQ ID NO: 1446033 - DNA, 15 bp, Homo sapiens
agcaaaagaatgaat

SEQ ID NO: 1446034 - DNA, 15 bp, Homo sapiens
gcaaaagaatgaatt

SEQ ID NO: 1446035 - DNA, 15 bp, Homo sapiens
caaaagaatgaattg

SEQ ID NO: 1446036 - DNA, 15 bp, Homo sapiens
aaaagaatgaattgt

SEQ ID NO: 1446037 - DNA, 15 bp, Homo sapiens
aaagaatgaattgtt

SEQ ID NO: 1446038 - DNA, 15 bp, Homo sapiens
aagaatgaattgttg

SEQ ID NO: 1446039 - DNA, 15 bp, Homo sapiens
agaatgaattgttgt

SEQ ID NO: 1446040 - DNA, 15 bp, Homo sapiens
gaatgaattgttgtc

SEQ ID NO: 1446041 - DNA, 15 bp, Homo sapiens
aatgaattgttgtca

SEQ ID NO: 1446042 - DNA, 15 bp, Homo sapiens
atgaattgttgtcaa

SEQ ID NO: 1446043 - DNA, 15 bp, Homo sapiens
tgaattgttgtcaat

SEQ ID NO: 1446044 - DNA, 15 bp, Homo sapiens
gaattgttgtcaatg

SEQ ID NO: 1446045 - DNA, 15 bp, Homo sapiens
aattgttgtcaatgg

SEQ ID NO: 1446046 - DNA, 15 bp, Homo sapiens
attgttgtcaatgga

SEQ ID NO: 1446047 - DNA, 15 bp, Homo sapiens
ttgttgtcaatggag

SEQ ID NO: 1446048 - DNA, 15 bp, Homo sapiens
tgttgtcaatggagg

SEQ ID NO: 1446049 - DNA, 15 bp, Homo sapiens
gttgtcaatggaggc

SEQ ID NO: 1446050 - DNA, 15 bp, Homo sapiens
ttgtcaatggaggct

SEQ ID NO: 1446051 - DNA, 15 bp, Homo sapiens
tgtcaatggaggctg

SEQ ID NO: 1446052 - DNA, 15 bp, Homo sapiens
gtcaatggaggctga

SEQ ID NO: 1446053 - DNA, 15 bp, Homo sapiens
tcaatggaggctgaa

SEQ ID NO: 1446054 - DNA, 15 bp, Homo sapiens
caatggaggctgaag

SEQ ID NO: 1446055 - DNA, 15 bp, Homo sapiens
aatggaggctgaagt

SEQ ID NO: 1446056 - DNA, 15 bp, Homo sapiens
atggaggctgaagtt

SEQ ID NO: 1446057 - DNA, 15 bp, Homo sapiens
tggaggctgaagttt

SEQ ID NO: 1446058 - DNA, 15 bp, Homo sapiens
ggaggctgaagtttg

SEQ ID NO: 1446059 - DNA, 15 bp, Homo sapiens
gaggctgaagtttgt

SEQ ID NO: 1446060 - DNA, 15 bp, Homo sapiens
aggctgaagtttgtg

SEQ ID NO: 1446061 - DNA, 15 bp, Homo sapiens
ggctgaagtttgtga

SEQ ID NO: 1446062 - DNA, 15 bp, Homo sapiens
gctgaagtttgtgaa

SEQ ID NO: 1446063 - DNA, 15 bp, Homo sapiens
ctgaagtttgtgaaa

SEQ ID NO: 1446064 - DNA, 15 bp, Homo sapiens
tgaagtttgtgaaaa

SEQ ID NO: 1446065 - DNA, 15 bp, Homo sapiens
gaagtttgtgaaaaa

SEQ ID NO: 1446066 - DNA, 15 bp, Homo sapiens
aagtttgtgaaaaaa

SEQ ID NO: 1446067 - DNA, 15 bp, Homo sapiens
agtttgtgaaaaaat

SEQ ID NO: 1446068 - DNA, 15 bp, Homo sapiens
gtttgtgaaaaaatt

SEQ ID NO: 1446069 - DNA, 15 bp, Homo sapiens
tttgtgaaaaaattg

SEQ ID NO: 1446070 - DNA, 15 bp, Homo sapiens
ttgtgaaaaaattgg

SEQ ID NO: 1446071 - DNA, 15 bp, Homo sapiens
tgtgaaaaaattggg

SEQ ID NO: 1446072 - DNA, 15 bp, Homo sapiens
gtgaaaaaattgggt

SEQ ID NO: 1446073 - DNA, 15 bp, Homo sapiens
tgaaaaaattgggtg

SEQ ID NO: 1446074 - DNA, 15 bp, Homo sapiens
gaaaaaattgggtgt

SEQ ID NO: 1446075 - DNA, 15 bp, Homo sapiens
aaaaaattgggtgtt

SEQ ID NO: 1446076 - DNA, 15 bp, Homo sapiens
aaaaattgggtgttt

SEQ ID NO: 1446077 - DNA, 15 bp, Homo sapiens
aaaattgggtgtttg

SEQ ID NO: 1446078 - DNA, 15 bp, Homo sapiens
aaattgggtgtttgc

SEQ ID NO: 1446079 - DNA, 15 bp, Homo sapiens
aattgggtgtttgca

SEQ ID NO: 1446080 - DNA, 15 bp, Homo sapiens
attgggtgtttgcaa

SEQ ID NO: 1446081 - DNA, 15 bp, Homo sapiens
ttgggtgtttgcaaa

SEQ ID NO: 1446082 - DNA, 15 bp, Homo sapiens
tgggtgtttgcaaag

SEQ ID NO: 1446083 - DNA, 15 bp, Homo sapiens
gggtgtttgcaaaga

SEQ ID NO: 1446084 - DNA, 15 bp, Homo sapiens
ggtgtttgcaaagat

SEQ ID NO: 1446085 - DNA, 15 bp, Homo sapiens
gtgtttgcaaagatt

SEQ ID NO: 1446086 - DNA, 15 bp, Homo sapiens
tgtttgcaaagattt

SEQ ID NO: 1446087 - DNA, 15 bp, Homo sapiens
gtttgcaaagattta

SEQ ID NO: 1446088 - DNA, 15 bp, Homo sapiens
tttgcaaagatttaa

SEQ ID NO: 1446089 - DNA, 15 bp, Homo sapiens
ttgcaaagatttaag

SEQ ID NO: 1446090 - DNA, 15 bp, Homo sapiens
tgcaaagatttaagg

SEQ ID NO: 1446091 - DNA, 15 bp, Homo sapiens
gcaaagatttaaggt

SEQ ID NO: 1446092 - DNA, 15 bp, Homo sapiens
caaagatttaaggta

SEQ ID NO: 1446093 - DNA, 15 bp, Homo sapiens
aaagatttaaggtac

SEQ ID NO: 1446094 - DNA, 15 bp, Homo sapiens
aagatttaaggtaca

SEQ ID NO: 1446095 - DNA, 15 bp, Homo sapiens
agatttaaggtacat

SEQ ID NO: 1446096 - DNA, 15 bp, Homo sapiens
gatttaaggtacatc

SEQ ID NO: 1446097 - DNA, 15 bp, Homo sapiens
atttaaggtacatct

SEQ ID NO: 1446098 - DNA, 15 bp, Homo sapiens
tttaaggtacatctg

SEQ ID NO: 1446099 - DNA, 15 bp, Homo sapiens
ttaaggtacatctga

SEQ ID NO: 1446100 - DNA, 15 bp, Homo sapiens
taaggtacatctgat

SEQ ID NO: 1446101 - DNA, 15 bp, Homo sapiens
aaggtacatctgatt

SEQ ID NO: 1446102 - DNA, 15 bp, Homo sapiens
aggtacatctgattc

SEQ ID NO: 1446103 - DNA, 15 bp, Homo sapiens
ggtacatctgattct

SEQ ID NO: 1446104 - DNA, 15 bp, Homo sapiens
gtacatctgattctt

SEQ ID NO: 1446105 - DNA, 15 bp, Homo sapiens
tacatctgattctta

SEQ ID NO: 1446106 - DNA, 15 bp, Homo sapiens
acatctgattcttat

SEQ ID NO: 1446107 - DNA, 15 bp, Homo sapiens
catctgattcttatt

SEQ ID NO: 1446108 - DNA, 15 bp, Homo sapiens
atctgattcttattt

SEQ ID NO: 1446109 - DNA, 15 bp, Homo sapiens
tctgattcttatttt

SEQ ID NO: 1446110 - DNA, 15 bp, Homo sapiens
ctgattcttattttg

SEQ ID NO: 1446111 - DNA, 15 bp, Homo sapiens
tgattcttattttgc

SEQ ID NO: 1446112 - DNA, 15 bp, Homo sapiens
gattcttattttgct

SEQ ID NO: 1446113 - DNA, 15 bp, Homo sapiens
attcttattttgctt

SEQ ID NO: 1446114 - DNA, 15 bp, Homo sapiens
ttcttattttgcttt

SEQ ID NO: 1446115 - DNA, 15 bp, Homo sapiens
tcttattttgctttt

SEQ ID NO: 1446116 - DNA, 15 bp, Homo sapiens
cttattttgcttttt

SEQ ID NO: 1446117 - DNA, 15 bp, Homo sapiens
ttattttgctttttc

SEQ ID NO: 1446118 - DNA, 15 bp, Homo sapiens
tattttgctttttct

SEQ ID NO: 1446119 - DNA, 15 bp, Homo sapiens
attttgctttttctg

SEQ ID NO: 1446120 - DNA, 15 bp, Homo sapiens
ttttgctttttctga

SEQ ID NO: 1446121 - DNA, 15 bp, Homo sapiens
tttgctttttctgac

SEQ ID NO: 1446122 - DNA, 15 bp, Homo sapiens
ttgctttttctgact

SEQ ID NO: 1446123 - DNA, 15 bp, Homo sapiens
tgctttttctgacta

SEQ ID NO: 1446124 - DNA, 15 bp, Homo sapiens
gctttttctgactat

SEQ ID NO: 1446125 - DNA, 15 bp, Homo sapiens
ctttttctgactatg

SEQ ID NO: 1446126 - DNA, 15 bp, Homo sapiens
tttttctgactatga

SEQ ID NO: 1446127 - DNA, 15 bp, Homo sapiens
ttttctgactatgaa

SEQ ID NO: 1446128 - DNA, 15 bp, Homo sapiens
tttctgactatgaaa

SEQ ID NO: 1446129 - DNA, 15 bp, Homo sapiens
ttctgactatgaaaa

SEQ ID NO: 1446130 - DNA, 15 bp, Homo sapiens
tctgactatgaaaaa

SEQ ID NO: 1446131 - DNA, 15 bp, Homo sapiens
ctgactatgaaaaat

SEQ ID NO: 1446132 - DNA, 15 bp, Homo sapiens
tgactatgaaaaatt

SEQ ID NO: 1446133 - DNA, 15 bp, Homo sapiens
gactatgaaaaattt

SEQ ID NO: 1446134 - DNA, 15 bp, Homo sapiens
actatgaaaaatttc

SEQ ID NO: 1446135 - DNA, 15 bp, Homo sapiens
ctatgaaaaatttca

SEQ ID NO: 1446136 - DNA, 15 bp, Homo sapiens
tatgaaaaatttcaa

SEQ ID NO: 1446137 - DNA, 15 bp, Homo sapiens
atgaaaaatttcaaa

SEQ ID NO: 1446138 - DNA, 15 bp, Homo sapiens
tgaaaaatttcaaat

SEQ ID NO: 1446139 - DNA, 15 bp, Homo sapiens
gaaaaatttcaaata

SEQ ID NO: 1446140 - DNA, 15 bp, Homo sapiens
aaaaatttcaaatat

SEQ ID NO: 1446141 - DNA, 15 bp, Homo sapiens
aaaatttcaaatatg

SEQ ID NO: 1446142 - DNA, 15 bp, Homo sapiens
aaatttcaaatatgc

SEQ ID NO: 1446143 - DNA, 15 bp, Homo sapiens
aatttcaaatatgca

SEQ ID NO: 1446144 - DNA, 15 bp, Homo sapiens
atttcaaatatgcag

SEQ ID NO: 1446145 - DNA, 15 bp, Homo sapiens
tttcaaatatgcaga

SEQ ID NO: 1446146 - DNA, 15 bp, Homo sapiens
ttcaaatatgcagaa

SEQ ID NO: 1446147 - DNA, 15 bp, Homo sapiens
tcaaatatgcagaag

SEQ ID NO: 1446148 - DNA, 15 bp, Homo sapiens
caaatatgcagaaga

SEQ ID NO: 1446149 - DNA, 15 bp, Homo sapiens
aaatatgcagaagat

SEQ ID NO: 1446150 - DNA, 15 bp, Homo sapiens
aatatgcagaagata

SEQ ID NO: 1446151 - DNA, 15 bp, Homo sapiens
atatgcagaagatag

SEQ ID NO: 1446152 - DNA, 15 bp, Homo sapiens
tatgcagaagatagg

SEQ ID NO: 1446153 - DNA, 15 bp, Homo sapiens
atgcagaagatagga

SEQ ID NO: 1446154 - DNA, 15 bp, Homo sapiens
tgcagaagataggat

SEQ ID NO: 1446155 - DNA, 15 bp, Homo sapiens
gcagaagataggatg

SEQ ID NO: 1446156 - DNA, 15 bp, Homo sapiens
cagaagataggatgg

SEQ ID NO: 1446157 - DNA, 15 bp, Homo sapiens
agaagataggatggt

SEQ ID NO: 1446158 - DNA, 15 bp, Homo sapiens
gaagataggatggta

SEQ ID NO: 1446159 - DNA, 15 bp, Homo sapiens
aagataggatggtat

SEQ ID NO: 1446160 - DNA, 15 bp, Homo sapiens
agataggatggtatc

SEQ ID NO: 1446161 - DNA, 15 bp, Homo sapiens
gataggatggtatca

SEQ ID NO: 1446162 - DNA, 15 bp, Homo sapiens
ataggatggtatcaa

SEQ ID NO: 1446163 - DNA, 15 bp, Homo sapiens
taggatggtatcaat

SEQ ID NO: 1446164 - DNA, 15 bp, Homo sapiens
aggatggtatcaata

SEQ ID NO: 1446165 - DNA, 15 bp, Homo sapiens
ggatggtatcaataa

SEQ ID NO: 1446166 - DNA, 15 bp, Homo sapiens
gatggtatcaataat

SEQ ID NO: 1446167 - DNA, 15 bp, Homo sapiens
atggtatcaataatg

SEQ ID NO: 1446168 - DNA, 15 bp, Homo sapiens
tggtatcaataatgc

SEQ ID NO: 1446169 - DNA, 15 bp, Homo sapiens
ggtatcaataatgct

SEQ ID NO: 1446170 - DNA, 15 bp, Homo sapiens
gtatcaataatgctc

SEQ ID NO: 1446171 - DNA, 15 bp, Homo sapiens
tatcaataatgctca

SEQ ID NO: 1446172 - DNA, 15 bp, Homo sapiens
atcaataatgctcat

SEQ ID NO: 1446173 - DNA, 15 bp, Homo sapiens
tcaataatgctcatc

SEQ ID NO: 1446174 - DNA, 15 bp, Homo sapiens
caataatgctcatca

SEQ ID NO: 1446175 - DNA, 15 bp, Homo sapiens
aataatgctcatcac

SEQ ID NO: 1446176 - DNA, 15 bp, Homo sapiens
ataatgctcatcacc

SEQ ID NO: 1446177 - DNA, 15 bp, Homo sapiens
taatgctcatcacct

SEQ ID NO: 1446178 - DNA, 15 bp, Homo sapiens
aatgctcatcacctg

SEQ ID NO: 1446179 - DNA, 15 bp, Homo sapiens
atgctcatcacctga

SEQ ID NO: 1446180 - DNA, 15 bp, Homo sapiens
tgctcatcacctgaa

SEQ ID NO: 1446181 - DNA, 15 bp, Homo sapiens
gctcatcacctgaat

SEQ ID NO: 1446182 - DNA, 15 bp, Homo sapiens
ctcatcacctgaatt

SEQ ID NO: 1446183 - DNA, 15 bp, Homo sapiens
tcatcacctgaatta

SEQ ID NO: 1446184 - DNA, 15 bp, Homo sapiens
catcacctgaattaa

SEQ ID NO: 1446185 - DNA, 15 bp, Homo sapiens
atcacctgaattaat

SEQ ID NO: 1446186 - DNA, 15 bp, Homo sapiens
tcacctgaattaata

SEQ ID NO: 1446187 - DNA, 15 bp, Homo sapiens
cacctgaattaatag

SEQ ID NO: 1446188 - DNA, 15 bp, Homo sapiens
acctgaattaatagt

SEQ ID NO: 1446189 - DNA, 15 bp, Homo sapiens
cctgaattaatagtt

SEQ ID NO: 1446190 - DNA, 15 bp, Homo sapiens
ctgaattaatagtta

SEQ ID NO: 1446191 - DNA, 15 bp, Homo sapiens
tgaattaatagttaa

SEQ ID NO: 1446192 - DNA, 15 bp, Homo sapiens
gaattaatagttaac

SEQ ID NO: 1446193 - DNA, 15 bp, Homo sapiens
aattaatagttaaca

SEQ ID NO: 1446194 - DNA, 15 bp, Homo sapiens
attaatagttaacat

SEQ ID NO: 1446195 - DNA, 15 bp, Homo sapiens
ttaatagttaacatt

SEQ ID NO: 1446196 - DNA, 15 bp, Homo sapiens
taatagttaacattt

SEQ ID NO: 1446197 - DNA, 15 bp, Homo sapiens
aatagttaacattta

SEQ ID NO: 1446198 - DNA, 15 bp, Homo sapiens
atagttaacatttat

SEQ ID NO: 1446199 - DNA, 15 bp, Homo sapiens
tagttaacatttatt

SEQ ID NO: 1446200 - DNA, 15 bp, Homo sapiens
agttaacatttatta

SEQ ID NO: 1446201 - DNA, 15 bp, Homo sapiens
gttaacatttattaa

SEQ ID NO: 1446202 - DNA, 15 bp, Homo sapiens
ttaacatttattaac

SEQ ID NO: 1446203 - DNA, 15 bp, Homo sapiens
taacatttattaaca

SEQ ID NO: 1446204 - DNA, 15 bp, Homo sapiens
aacatttattaacat

SEQ ID NO: 1446205 - DNA, 15 bp, Homo sapiens
acatttattaacatt

SEQ ID NO: 1446206 - DNA, 15 bp, Homo sapiens
catttattaacattt

SEQ ID NO: 1446207 - DNA, 15 bp, Homo sapiens
atttattaacatttt

SEQ ID NO: 1446208 - DNA, 15 bp, Homo sapiens
tttattaacattttg

SEQ ID NO: 1446209 - DNA, 15 bp, Homo sapiens
ttattaacattttgt

SEQ ID NO: 1446210 - DNA, 15 bp, Homo sapiens
tattaacattttgtc

SEQ ID NO: 1446211 - DNA, 15 bp, Homo sapiens
attaacattttgtca

SEQ ID NO: 1446212 - DNA, 15 bp, Homo sapiens
ttaacattttgtcat

SEQ ID NO: 1446213 - DNA, 15 bp, Homo sapiens
taacattttgtcata

SEQ ID NO: 1446214 - DNA, 15 bp, Homo sapiens
aacattttgtcataa

SEQ ID NO: 1446215 - DNA, 15 bp, Homo sapiens
acattttgtcataat

SEQ ID NO: 1446216 - DNA, 15 bp, Homo sapiens
cattttgtcataatt

SEQ ID NO: 1446217 - DNA, 15 bp, Homo sapiens
attttgtcataattg

SEQ ID NO: 1446218 - DNA, 15 bp, Homo sapiens
ttttgtcataattgc

SEQ ID NO: 1446219 - DNA, 15 bp, Homo sapiens
tttgtcataattgct

SEQ ID NO: 1446220 - DNA, 15 bp, Homo sapiens
ttgtcataattgctt

SEQ ID NO: 1446221 - DNA, 15 bp, Homo sapiens
tgtcataattgcttc

SEQ ID NO: 1446222 - DNA, 15 bp, Homo sapiens
gtcataattgcttct

SEQ ID NO: 1446223 - DNA, 15 bp, Homo sapiens
tcataattgcttctt

SEQ ID NO: 1446224 - DNA, 15 bp, Homo sapiens
cataattgcttcttc

SEQ ID NO: 1446225 - DNA, 15 bp, Homo sapiens
ataattgcttcttct

SEQ ID NO: 1446226 - DNA, 15 bp, Homo sapiens
taattgcttcttctg

SEQ ID NO: 1446227 - DNA, 15 bp, Homo sapiens
aattgcttcttctga

SEQ ID NO: 1446228 - DNA, 15 bp, Homo sapiens
attgcttcttctgat

SEQ ID NO: 1446229 - DNA, 15 bp, Homo sapiens
ttgcttcttctgatt

SEQ ID NO: 1446230 - DNA, 15 bp, Homo sapiens
tgcttcttctgattt

SEQ ID NO: 1446231 - DNA, 15 bp, Homo sapiens
gcttcttctgatttt

SEQ ID NO: 1446232 - DNA, 15 bp, Homo sapiens
cttcttctgattttt

SEQ ID NO: 1446233 - DNA, 15 bp, Homo sapiens
ttcttctgatttttg

SEQ ID NO: 1446234 - DNA, 15 bp, Homo sapiens
tcttctgatttttgt

SEQ ID NO: 1446235 - DNA, 15 bp, Homo sapiens
cttctgatttttgtg

SEQ ID NO: 1446236 - DNA, 15 bp, Homo sapiens
ttctgatttttgtgg

SEQ ID NO: 1446237 - DNA, 15 bp, Homo sapiens
tctgatttttgtggg

SEQ ID NO: 1446238 - DNA, 15 bp, Homo sapiens
ctgatttttgtggga

SEQ ID NO: 1446239 - DNA, 15 bp, Homo sapiens
tgatttttgtgggat

SEQ ID NO: 1446240 - DNA, 15 bp, Homo sapiens
gatttttgtgggatg

SEQ ID NO: 1446241 - DNA, 15 bp, Homo sapiens
atttttgtgggatgt

SEQ ID NO: 1446242 - DNA, 15 bp, Homo sapiens
tttttgtgggatgtt

SEQ ID NO: 1446243 - DNA, 15 bp, Homo sapiens
ttttgtgggatgttt

SEQ ID NO: 1446244 - DNA, 15 bp, Homo sapiens
tttgtgggatgtttg

SEQ ID NO: 1446245 - DNA, 15 bp, Homo sapiens
ttgtgggatgtttga

SEQ ID NO: 1446246 - DNA, 15 bp, Homo sapiens
tgtgggatgtttgaa

SEQ ID NO: 1446247 - DNA, 15 bp, Homo sapiens
gtgggatgtttgaat

SEQ ID NO: 1446248 - DNA, 15 bp, Homo sapiens
tgggatgtttgaatt

SEQ ID NO: 1446249 - DNA, 15 bp, Homo sapiens
gggatgtttgaattg

SEQ ID NO: 1446250 - DNA, 15 bp, Homo sapiens
ggatgtttgaattgc

SEQ ID NO: 1446251 - DNA, 15 bp, Homo sapiens
gatgtttgaattgca

SEQ ID NO: 1446252 - DNA, 15 bp, Homo sapiens
atgtttgaattgcag

SEQ ID NO: 1446253 - DNA, 15 bp, Homo sapiens
tgtttgaattgcaga

SEQ ID NO: 1446254 - DNA, 15 bp, Homo sapiens
gtttgaattgcagac

SEQ ID NO: 1446255 - DNA, 15 bp, Homo sapiens
tttgaattgcagaca

SEQ ID NO: 1446256 - DNA, 15 bp, Homo sapiens
ttgaattgcagacat

SEQ ID NO: 1446257 - DNA, 15 bp, Homo sapiens
tgaattgcagacatt

SEQ ID NO: 1446258 - DNA, 15 bp, Homo sapiens
gaattgcagacattc

SEQ ID NO: 1446259 - DNA, 15 bp, Homo sapiens
aattgcagacattcc

SEQ ID NO: 1446260 - DNA, 15 bp, Homo sapiens
attgcagacattcct

SEQ ID NO: 1446261 - DNA, 15 bp, Homo sapiens
ttgcagacattcctc

SEQ ID NO: 1446262 - DNA, 15 bp, Homo sapiens
tgcagacattcctcc

SEQ ID NO: 1446263 - DNA, 15 bp, Homo sapiens
gcagacattcctccc

SEQ ID NO: 1446264 - DNA, 15 bp, Homo sapiens
cagacattcctcccc

SEQ ID NO: 1446265 - DNA, 15 bp, Homo sapiens
agacattcctcccct

SEQ ID NO: 1446266 - DNA, 15 bp, Homo sapiens
gacattcctccccta

SEQ ID NO: 1446267 - DNA, 15 bp, Homo sapiens
acattcctcccctaa

SEQ ID NO: 1446268 - DNA, 15 bp, Homo sapiens
cattcctcccctaaa

SEQ ID NO: 1446269 - DNA, 15 bp, Homo sapiens
attcctcccctaaat

SEQ ID NO: 1446270 - DNA, 15 bp, Homo sapiens
ttcctcccctaaata

SEQ ID NO: 1446271 - DNA, 15 bp, Homo sapiens
tcctcccctaaatat

SEQ ID NO: 1446272 - DNA, 15 bp, Homo sapiens
cctcccctaaatatt

SEQ ID NO: 1446273 - DNA, 15 bp, Homo sapiens
ctcccctaaatattt

SEQ ID NO: 1446274 - DNA, 15 bp, Homo sapiens
tcccctaaatattta

SEQ ID NO: 1446275 - DNA, 15 bp, Homo sapiens
cccctaaatatttaa

SEQ ID NO: 1446276 - DNA, 15 bp, Homo sapiens
ccctaaatatttaat

SEQ ID NO: 1446277 - DNA, 15 bp, Homo sapiens
cctaaatatttaatg

SEQ ID NO: 1446278 - DNA, 15 bp, Homo sapiens
ctaaatatttaatgt

SEQ ID NO: 1446279 - DNA, 15 bp, Homo sapiens
taaatatttaatgta

SEQ ID NO: 1446280 - DNA, 15 bp, Homo sapiens
aaatatttaatgtac

SEQ ID NO: 1446281 - DNA, 15 bp, Homo sapiens
aatatttaatgtacc

SEQ ID NO: 1446282 - DNA, 15 bp, Homo sapiens
ggcaagaatacttca

SEQ ID NO: 1446283 - DNA, 15 bp, Homo sapiens
gcaagaatacttcat

SEQ ID NO: 1446284 - DNA, 15 bp, Homo sapiens
caagaatacttcata

SEQ ID NO: 1446285 - DNA, 15 bp, Homo sapiens
aagaatacttcataa

SEQ ID NO: 1446286 - DNA, 15 bp, Homo sapiens
agaatacttcataag

SEQ ID NO: 1446287 - DNA, 15 bp, Homo sapiens
gaatacttcataagt

SEQ ID NO: 1446288 - DNA, 15 bp, Homo sapiens
aatacttcataagta

SEQ ID NO: 1446289 - DNA, 15 bp, Homo sapiens
atacttcataagtag

SEQ ID NO: 1446290 - DNA, 15 bp, Homo sapiens
tacttcataagtagt

SEQ ID NO: 1446291 - DNA, 15 bp, Homo sapiens
acttcataagtagtg

SEQ ID NO: 1446292 - DNA, 15 bp, Homo sapiens
cttcataagtagtgt

SEQ ID NO: 1446293 - DNA, 15 bp, Homo sapiens
ttcataagtagtgtt

SEQ ID NO: 1446294 - DNA, 15 bp, Homo sapiens
tcataagtagtgttc

SEQ ID NO: 1446295 - DNA, 15 bp, Homo sapiens
cataagtagtgttct

SEQ ID NO: 1446296 - DNA, 15 bp, Homo sapiens
ataagtagtgttcta

SEQ ID NO: 1446297 - DNA, 15 bp, Homo sapiens
taagtagtgttctat

SEQ ID NO: 1446298 - DNA, 15 bp, Homo sapiens
aagtagtgttctata

SEQ ID NO: 1446299 - DNA, 15 bp, Homo sapiens
agtagtgttctatac

SEQ ID NO: 1446300 - DNA, 15 bp, Homo sapiens
gtagtgttctatact

SEQ ID NO: 1446301 - DNA, 15 bp, Homo sapiens
tagtgttctatactt

SEQ ID NO: 1446302 - DNA, 15 bp, Homo sapiens
agtgttctatacttt

SEQ ID NO: 1446303 - DNA, 15 bp, Homo sapiens
gtgttctatacttta

SEQ ID NO: 1446304 - DNA, 15 bp, Homo sapiens
tgttctatactttat

SEQ ID NO: 1446305 - DNA, 15 bp, Homo sapiens
gttctatactttata

SEQ ID NO: 1446306 - DNA, 15 bp, Homo sapiens
ttctatactttatat

SEQ ID NO: 1446307 - DNA, 15 bp, Homo sapiens
tctatactttatatt

SEQ ID NO: 1446308 - DNA, 15 bp, Homo sapiens
ctatactttatattg

SEQ ID NO: 1446309 - DNA, 15 bp, Homo sapiens
tatactttatattgc

SEQ ID NO: 1446310 - DNA, 15 bp, Homo sapiens
atactttatattgca

SEQ ID NO: 1446311 - DNA, 15 bp, Homo sapiens
tactttatattgcat

SEQ ID NO: 1446312 - DNA, 15 bp, Homo sapiens
actttatattgcatc

SEQ ID NO: 1446313 - DNA, 15 bp, Homo sapiens
ctttatattgcatca

SEQ ID NO: 1446314 - DNA, 15 bp, Homo sapiens
tttatattgcatcac

SEQ ID NO: 1446315 - DNA, 15 bp, Homo sapiens
ttatattgcatcact

SEQ ID NO: 1446316 - DNA, 15 bp, Homo sapiens
tatattgcatcactt

SEQ ID NO: 1446317 - DNA, 15 bp, Homo sapiens
atattgcatcacttc

SEQ ID NO: 1446318 - DNA, 15 bp, Homo sapiens
tattgcatcacttca

SEQ ID NO: 1446319 - DNA, 15 bp, Homo sapiens
attgcatcacttcaa

SEQ ID NO: 1446320 - DNA, 15 bp, Homo sapiens
ttgcatcacttcaag

SEQ ID NO: 1446321 - DNA, 15 bp, Homo sapiens
tgcatcacttcaaga

SEQ ID NO: 1446322 - DNA, 15 bp, Homo sapiens
gcatcacttcaagag

SEQ ID NO: 1446323 - DNA, 15 bp, Homo sapiens
catcacttcaagagt

SEQ ID NO: 1446324 - DNA, 15 bp, Homo sapiens
atcacttcaagagta

SEQ ID NO: 1446325 - DNA, 15 bp, Homo sapiens
tcacttcaagagtat

SEQ ID NO: 1446326 - DNA, 15 bp, Homo sapiens
cacttcaagagtatc

SEQ ID NO: 1446327 - DNA, 15 bp, Homo sapiens
acttcaagagtatct

SEQ ID NO: 1446328 - DNA, 15 bp, Homo sapiens
cttcaagagtatctg

SEQ ID NO: 1446329 - DNA, 15 bp, Homo sapiens
ttcaagagtatctgg

SEQ ID NO: 1446330 - DNA, 15 bp, Homo sapiens
tcaagagtatctggt

SEQ ID NO: 1446331 - DNA, 15 bp, Homo sapiens
caagagtatctggtt

SEQ ID NO: 1446332 - DNA, 15 bp, Homo sapiens
aagagtatctggttg

SEQ ID NO: 1446333 - DNA, 15 bp, Homo sapiens
agagtatctggttgt

SEQ ID NO: 1446334 - DNA, 15 bp, Homo sapiens
gagtatctggttgtt

SEQ ID NO: 1446335 - DNA, 15 bp, Homo sapiens
agtatctggttgttc

SEQ ID NO: 1446336 - DNA, 15 bp, Homo sapiens
gtatctggttgttcc

SEQ ID NO: 1446337 - DNA, 15 bp, Homo sapiens
tatctggttgttcca

SEQ ID NO: 1446338 - DNA, 15 bp, Homo sapiens
atctggttgttccat

SEQ ID NO: 1446339 - DNA, 15 bp, Homo sapiens
tctggttgttccatg

SEQ ID NO: 1446340 - DNA, 15 bp, Homo sapiens
ctggttgttccatgt

SEQ ID NO: 1446341 - DNA, 15 bp, Homo sapiens
tggttgttccatgtt

SEQ ID NO: 1446342 - DNA, 15 bp, Homo sapiens
ggttgttccatgttt

SEQ ID NO: 1446343 - DNA, 15 bp, Homo sapiens
gttgttccatgtttt

SEQ ID NO: 1446344 - DNA, 15 bp, Homo sapiens
ttgttccatgttttg

SEQ ID NO: 1446345 - DNA, 15 bp, Homo sapiens
tgttccatgttttgt

SEQ ID NO: 1446346 - DNA, 15 bp, Homo sapiens
gttccatgttttgta

SEQ ID NO: 1446347 - DNA, 15 bp, Homo sapiens
ttccatgttttgtaa

SEQ ID NO: 1446348 - DNA, 15 bp, Homo sapiens
tccatgttttgtaat

SEQ ID NO: 1446349 - DNA, 15 bp, Homo sapiens
ccatgttttgtaatt

SEQ ID NO: 1446350 - DNA, 15 bp, Homo sapiens
catgttttgtaattg

SEQ ID NO: 1446351 - DNA, 15 bp, Homo sapiens
atgttttgtaattga

SEQ ID NO: 1446352 - DNA, 15 bp, Homo sapiens
tgttttgtaattgat

SEQ ID NO: 1446353 - DNA, 15 bp, Homo sapiens
gttttgtaattgatt

SEQ ID NO: 1446354 - DNA, 15 bp, Homo sapiens
ttttgtaattgatta

SEQ ID NO: 1446355 - DNA, 15 bp, Homo sapiens
tttgtaattgattac

SEQ ID NO: 1446356 - DNA, 15 bp, Homo sapiens
ttgtaattgattact

SEQ ID NO: 1446357 - DNA, 15 bp, Homo sapiens
tgtaattgattactc

SEQ ID NO: 1446358 - DNA, 15 bp, Homo sapiens
gtaattgattactct

SEQ ID NO: 1446359 - DNA, 15 bp, Homo sapiens
taattgattactctg

SEQ ID NO: 1446360 - DNA, 15 bp, Homo sapiens
aattgattactctgt

SEQ ID NO: 1446361 - DNA, 15 bp, Homo sapiens
attgattactctgtt

SEQ ID NO: 1446362 - DNA, 15 bp, Homo sapiens
ttgattactctgtta

SEQ ID NO: 1446363 - DNA, 15 bp, Homo sapiens
tgattactctgttaa

SEQ ID NO: 1446364 - DNA, 15 bp, Homo sapiens
gattactctgttaag

SEQ ID NO: 1446365 - DNA, 15 bp, Homo sapiens
attactctgttaagg

SEQ ID NO: 1446366 - DNA, 15 bp, Homo sapiens
ttactctgttaagga

SEQ ID NO: 1446367 - DNA, 15 bp, Homo sapiens
tactctgttaaggaa

SEQ ID NO: 1446368 - DNA, 15 bp, Homo sapiens
actctgttaaggaaa

SEQ ID NO: 1446369 - DNA, 15 bp, Homo sapiens
ctctgttaaggaaaa

SEQ ID NO: 1446370 - DNA, 15 bp, Homo sapiens
tctgttaaggaaaag

SEQ ID NO: 1446371 - DNA, 15 bp, Homo sapiens
ctgttaaggaaaaga

SEQ ID NO: 1446372 - DNA, 15 bp, Homo sapiens
tgttaaggaaaagac

SEQ ID NO: 1446373 - DNA, 15 bp, Homo sapiens
gttaaggaaaagaca

SEQ ID NO: 1446374 - DNA, 15 bp, Homo sapiens
ttaaggaaaagacaa

SEQ ID NO: 1446375 - DNA, 15 bp, Homo sapiens
taaggaaaagacaag

SEQ ID NO: 1446376 - DNA, 15 bp, Homo sapiens
aaggaaaagacaagc

SEQ ID NO: 1446377 - DNA, 15 bp, Homo sapiens
aggaaaagacaagca

SEQ ID NO: 1446378 - DNA, 15 bp, Homo sapiens
ggaaaagacaagcag

SEQ ID NO: 1446379 - DNA, 15 bp, Homo sapiens
gaaaagacaagcaga

SEQ ID NO: 1446380 - DNA, 15 bp, Homo sapiens
aaaagacaagcagac

SEQ ID NO: 1446381 - DNA, 15 bp, Homo sapiens
aaagacaagcagacc

SEQ ID NO: 1446382 - DNA, 15 bp, Homo sapiens
aagacaagcagacca

SEQ ID NO: 1446383 - DNA, 15 bp, Homo sapiens
agacaagcagaccaa

SEQ ID NO: 1446384 - DNA, 15 bp, Homo sapiens
gacaagcagaccaag

SEQ ID NO: 1446385 - DNA, 15 bp, Homo sapiens
acaagcagaccaagt

SEQ ID NO: 1446386 - DNA, 15 bp, Homo sapiens
caagcagaccaagta

SEQ ID NO: 1446387 - DNA, 15 bp, Homo sapiens
aagcagaccaagtat

SEQ ID NO: 1446388 - DNA, 15 bp, Homo sapiens
agcagaccaagtatg

SEQ ID NO: 1446389 - DNA, 15 bp, Homo sapiens
gcagaccaagtatgg

SEQ ID NO: 1446390 - DNA, 15 bp, Homo sapiens
cagaccaagtatggt

SEQ ID NO: 1446391 - DNA, 15 bp, Homo sapiens
agaccaagtatggtg

SEQ ID NO: 1446392 - DNA, 15 bp, Homo sapiens
gaccaagtatggtgg

SEQ ID NO: 1446393 - DNA, 15 bp, Homo sapiens
accaagtatggtggc

SEQ ID NO: 1446394 - DNA, 15 bp, Homo sapiens
ccaagtatggtggct

SEQ ID NO: 1446395 - DNA, 15 bp, Homo sapiens
caagtatggtggctc

SEQ ID NO: 1446396 - DNA, 15 bp, Homo sapiens
aagtatggtggctca

SEQ ID NO: 1446397 - DNA, 15 bp, Homo sapiens
ctcatgcctataatt

SEQ ID NO: 1446398 - DNA, 15 bp, Homo sapiens
tcatgcctataattc

SEQ ID NO: 1446399 - DNA, 15 bp, Homo sapiens
catgcctataattcc

SEQ ID NO: 1446400 - DNA, 15 bp, Homo sapiens
atgcctataattcca

SEQ ID NO: 1446401 - DNA, 15 bp, Homo sapiens
tgcctataattccaa

SEQ ID NO: 1446402 - DNA, 15 bp, Homo sapiens
gcctataattccaac

SEQ ID NO: 1446403 - DNA, 15 bp, Homo sapiens
cctataattccaaca

SEQ ID NO: 1446404 - DNA, 15 bp, Homo sapiens
ctataattccaacat

SEQ ID NO: 1446405 - DNA, 15 bp, Homo sapiens
tataattccaacatt

SEQ ID NO: 1446406 - DNA, 15 bp, Homo sapiens
ataattccaacattt

SEQ ID NO: 1446407 - DNA, 15 bp, Homo sapiens
taattccaacatttt

SEQ ID NO: 1446408 - DNA, 15 bp, Homo sapiens
aattccaacattttg

SEQ ID NO: 1446409 - DNA, 15 bp, Homo sapiens
attccaacattttgg

SEQ ID NO: 1446410 - DNA, 15 bp, Homo sapiens
ttccaacattttgga

SEQ ID NO: 1446411 - DNA, 15 bp, Homo sapiens
tccaacattttggaa

SEQ ID NO: 1446412 - DNA, 15 bp, Homo sapiens
ccaacattttggaag

SEQ ID NO: 1446413 - DNA, 15 bp, Homo sapiens
caacattttggaagg

SEQ ID NO: 1446414 - DNA, 15 bp, Homo sapiens
aacattttggaaggc

SEQ ID NO: 1446415 - DNA, 15 bp, Homo sapiens
acattttggaaggcc

SEQ ID NO: 1446416 - DNA, 15 bp, Homo sapiens
cattttggaaggccc

SEQ ID NO: 1446417 - DNA, 15 bp, Homo sapiens
attttggaaggccca

SEQ ID NO: 1446418 - DNA, 15 bp, Homo sapiens
ttttggaaggcccag

SEQ ID NO: 1446419 - DNA, 15 bp, Homo sapiens
tttggaaggcccagg

SEQ ID NO: 1446420 - DNA, 15 bp, Homo sapiens
ttggaaggcccaggc

SEQ ID NO: 1446421 - DNA, 15 bp, Homo sapiens
tggaaggcccaggca

SEQ ID NO: 1446422 - DNA, 15 bp, Homo sapiens
ggaaggcccaggcag

SEQ ID NO: 1446423 - DNA, 15 bp, Homo sapiens
gaaggcccaggcagg

SEQ ID NO: 1446424 - DNA, 15 bp, Homo sapiens
aaggcccaggcagga

SEQ ID NO: 1446425 - DNA, 15 bp, Homo sapiens
aggcccaggcaggaa

SEQ ID NO: 1446426 - DNA, 15 bp, Homo sapiens
ggcccaggcaggaaa

SEQ ID NO: 1446427 - DNA, 15 bp, Homo sapiens
gcccaggcaggaaaa

SEQ ID NO: 1446428 - DNA, 15 bp, Homo sapiens
cccaggcaggaaaat

SEQ ID NO: 1446429 - DNA, 15 bp, Homo sapiens
ccaggcaggaaaatt

SEQ ID NO: 1446430 - DNA, 15 bp, Homo sapiens
caggcaggaaaattt

SEQ ID NO: 1446431 - DNA, 15 bp, Homo sapiens
aggcaggaaaatttc

SEQ ID NO: 1446432 - DNA, 15 bp, Homo sapiens
ggcaggaaaatttcc

SEQ ID NO: 1446433 - DNA, 15 bp, Homo sapiens
gcaggaaaatttcct

SEQ ID NO: 1446434 - DNA, 15 bp, Homo sapiens
caggaaaatttcctg

SEQ ID NO: 1446435 - DNA, 15 bp, Homo sapiens
aggaaaatttcctga

SEQ ID NO: 1446436 - DNA, 15 bp, Homo sapiens
ggaaaatttcctgag

SEQ ID NO: 1446437 - DNA, 15 bp, Homo sapiens
gaaaatttcctgagc

SEQ ID NO: 1446438 - DNA, 15 bp, Homo sapiens
aaaatttcctgagcc

SEQ ID NO: 1446439 - DNA, 15 bp, Homo sapiens
aaatttcctgagccc

SEQ ID NO: 1446440 - DNA, 15 bp, Homo sapiens
aatttcctgagccca

SEQ ID NO: 1446441 - DNA, 15 bp, Homo sapiens
atttcctgagcccag

SEQ ID NO: 1446442 - DNA, 15 bp, Homo sapiens
tttcctgagcccaga

SEQ ID NO: 1446443 - DNA, 15 bp, Homo sapiens
ttcctgagcccagac

SEQ ID NO: 1446444 - DNA, 15 bp, Homo sapiens
tcctgagcccagacc

SEQ ID NO: 1446445 - DNA, 15 bp, Homo sapiens
cctgagcccagacca

SEQ ID NO: 1446446 - DNA, 15 bp, Homo sapiens
ctgagcccagaccag

SEQ ID NO: 1446447 - DNA, 15 bp, Homo sapiens
tgagcccagaccagc

SEQ ID NO: 1446448 - DNA, 15 bp, Homo sapiens
gagcccagaccagcc

SEQ ID NO: 1446449 - DNA, 15 bp, Homo sapiens
agcccagaccagcct

SEQ ID NO: 1446450 - DNA, 15 bp, Homo sapiens
gcccagaccagccta

SEQ ID NO: 1446451 - DNA, 15 bp, Homo sapiens
cccagaccagcctag

SEQ ID NO: 1446452 - DNA, 15 bp, Homo sapiens
ccagaccagcctagg

SEQ ID NO: 1446453 - DNA, 15 bp, Homo sapiens
cagaccagcctaggc

SEQ ID NO: 1446454 - DNA, 15 bp, Homo sapiens
accagcctaggcaat

SEQ ID NO: 1446455 - DNA, 15 bp, Homo sapiens
ccagcctaggcaata

SEQ ID NO: 1446456 - DNA, 15 bp, Homo sapiens
cagcctaggcaatat

SEQ ID NO: 1446457 - DNA, 15 bp, Homo sapiens
agcctaggcaatata

SEQ ID NO: 1446458 - DNA, 15 bp, Homo sapiens
gcctaggcaatatag

SEQ ID NO: 1446459 - DNA, 15 bp, Homo sapiens
cctaggcaatatagt

SEQ ID NO: 1446460 - DNA, 15 bp, Homo sapiens
ctaggcaatatagtg

SEQ ID NO: 1446461 - DNA, 15 bp, Homo sapiens
taggcaatatagtga

SEQ ID NO: 1446462 - DNA, 15 bp, Homo sapiens
aggcaatatagtgag

SEQ ID NO: 1446463 - DNA, 15 bp, Homo sapiens
ggcaatatagtgaga

SEQ ID NO: 1446464 - DNA, 15 bp, Homo sapiens
gcaatatagtgagac

SEQ ID NO: 1446465 - DNA, 15 bp, Homo sapiens
caatatagtgagact

SEQ ID NO: 1446466 - DNA, 15 bp, Homo sapiens
aatatagtgagactc

SEQ ID NO: 1446467 - DNA, 15 bp, Homo sapiens
atatagtgagactcc

SEQ ID NO: 1446468 - DNA, 15 bp, Homo sapiens
tatagtgagactccg

SEQ ID NO: 1446469 - DNA, 15 bp, Homo sapiens
atagtgagactccgt

SEQ ID NO: 1446470 - DNA, 15 bp, Homo sapiens
tagtgagactccgtc

SEQ ID NO: 1446471 - DNA, 15 bp, Homo sapiens
tgagactccgtctct

SEQ ID NO: 1446472 - DNA, 15 bp, Homo sapiens
gagactccgtctcta

SEQ ID NO: 1446473 - DNA, 15 bp, Homo sapiens
agactccgtctctac

SEQ ID NO: 1446474 - DNA, 15 bp, Homo sapiens
gactccgtctctaca

SEQ ID NO: 1446475 - DNA, 15 bp, Homo sapiens
actccgtctctacaa

SEQ ID NO: 1446476 - DNA, 15 bp, Homo sapiens
ctccgtctctacaaa

SEQ ID NO: 1446477 - DNA, 15 bp, Homo sapiens
tccgtctctacaaaa

SEQ ID NO: 1446478 - DNA, 15 bp, Homo sapiens
ccgtctctacaaaaa

SEQ ID NO: 1446479 - DNA, 15 bp, Homo sapiens
cgtctctacaaaaaa

SEQ ID NO: 1446480 - DNA, 15 bp, Homo sapiens
gtctctacaaaaaat

SEQ ID NO: 1446481 - DNA, 15 bp, Homo sapiens
ctctacaaaaaatgt

SEQ ID NO: 1446482 - DNA, 15 bp, Homo sapiens
tctacaaaaaatgtt

SEQ ID NO: 1446483 - DNA, 15 bp, Homo sapiens
ctacaaaaaatgttt

SEQ ID NO: 1446484 - DNA, 15 bp, Homo sapiens
tacaaaaaatgtttt

SEQ ID NO: 1446485 - DNA, 15 bp, Homo sapiens
acaaaaaatgttttt

SEQ ID NO: 1446486 - DNA, 15 bp, Homo sapiens
caaaaaatgtttttt

SEQ ID NO: 1446487 - DNA, 15 bp, Homo sapiens
aaaaaatgttttttt

SEQ ID NO: 1446488 - DNA, 15 bp, Homo sapiens
aaaaatgtttttttt

SEQ ID NO: 1446489 - DNA, 15 bp, Homo sapiens
aaaatgttttttttt

SEQ ID NO: 1446490 - DNA, 15 bp, Homo sapiens
aaatgtttttttttt

SEQ ID NO: 1446491 - DNA, 15 bp, Homo sapiens
aatgttttttttttt

SEQ ID NO: 1446492 - DNA, 15 bp, Homo sapiens
atgtttttttttttg

SEQ ID NO: 1446493 - DNA, 15 bp, Homo sapiens
tgtttttttttttgt

SEQ ID NO: 1446494 - DNA, 15 bp, Homo sapiens
gtttttttttttgtt

SEQ ID NO: 1446495 - DNA, 15 bp, Homo sapiens
gtttgtttgttttta

SEQ ID NO: 1446496 - DNA, 15 bp, Homo sapiens
tttgtttgtttttaa

SEQ ID NO: 1446497 - DNA, 15 bp, Homo sapiens
ttgtttgtttttaat

SEQ ID NO: 1446498 - DNA, 15 bp, Homo sapiens
tgtttgtttttaatt

SEQ ID NO: 1446499 - DNA, 15 bp, Homo sapiens
gtttgtttttaatta

SEQ ID NO: 1446500 - DNA, 15 bp, Homo sapiens
tttgtttttaattag

SEQ ID NO: 1446501 - DNA, 15 bp, Homo sapiens
ttgtttttaattagc

SEQ ID NO: 1446502 - DNA, 15 bp, Homo sapiens
tgtttttaattagct

SEQ ID NO: 1446503 - DNA, 15 bp, Homo sapiens
gtttttaattagctt

SEQ ID NO: 1446504 - DNA, 15 bp, Homo sapiens
tttttaattagcttg

SEQ ID NO: 1446505 - DNA, 15 bp, Homo sapiens
ttttaattagcttgg

SEQ ID NO: 1446506 - DNA, 15 bp, Homo sapiens
tttaattagcttggt

SEQ ID NO: 1446507 - DNA, 15 bp, Homo sapiens
ttaattagcttggtg

SEQ ID NO: 1446508 - DNA, 15 bp, Homo sapiens
taattagcttggtgt

SEQ ID NO: 1446509 - DNA, 15 bp, Homo sapiens
aattagcttggtgta

SEQ ID NO: 1446510 - DNA, 15 bp, Homo sapiens
attagcttggtgtag

SEQ ID NO: 1446511 - DNA, 15 bp, Homo sapiens
ttagcttggtgtagt

SEQ ID NO: 1446512 - DNA, 15 bp, Homo sapiens
tagcttggtgtagtg

SEQ ID NO: 1446513 - DNA, 15 bp, Homo sapiens
agcttggtgtagtgg

SEQ ID NO: 1446514 - DNA, 15 bp, Homo sapiens
gcttggtgtagtggc

SEQ ID NO: 1446515 - DNA, 15 bp, Homo sapiens
cttggtgtagtggca

SEQ ID NO: 1446516 - DNA, 15 bp, Homo sapiens
ttggtgtagtggcac

SEQ ID NO: 1446517 - DNA, 15 bp, Homo sapiens
tggtgtagtggcaca

SEQ ID NO: 1446518 - DNA, 15 bp, Homo sapiens
ggtgtagtggcacat

SEQ ID NO: 1446519 - DNA, 15 bp, Homo sapiens
gtgtagtggcacatg

SEQ ID NO: 1446520 - DNA, 15 bp, Homo sapiens
tgtagtggcacatgc

SEQ ID NO: 1446521 - DNA, 15 bp, Homo sapiens
gtagtggcacatgct

SEQ ID NO: 1446522 - DNA, 15 bp, Homo sapiens
tagtggcacatgctt

SEQ ID NO: 1446523 - DNA, 15 bp, Homo sapiens
agtggcacatgcttg

SEQ ID NO: 1446524 - DNA, 15 bp, Homo sapiens
taatcccagctacct

SEQ ID NO: 1446525 - DNA, 15 bp, Homo sapiens
aatcccagctacctg

SEQ ID NO: 1446526 - DNA, 15 bp, Homo sapiens
atcccagctacctgg

SEQ ID NO: 1446527 - DNA, 15 bp, Homo sapiens
tcccagctacctggg

SEQ ID NO: 1446528 - DNA, 15 bp, Homo sapiens
cccagctacctggga

SEQ ID NO: 1446529 - DNA, 15 bp, Homo sapiens
ccagctacctgggac

SEQ ID NO: 1446530 - DNA, 15 bp, Homo sapiens
cagctacctgggaca

SEQ ID NO: 1446531 - DNA, 15 bp, Homo sapiens
agctacctgggacat

SEQ ID NO: 1446532 - DNA, 15 bp, Homo sapiens
gctacctgggacatt

SEQ ID NO: 1446533 - DNA, 15 bp, Homo sapiens
ctacctgggacattg

SEQ ID NO: 1446534 - DNA, 15 bp, Homo sapiens
tacctgggacattga

SEQ ID NO: 1446535 - DNA, 15 bp, Homo sapiens
acctgggacattgag

SEQ ID NO: 1446536 - DNA, 15 bp, Homo sapiens
cctgggacattgagg

SEQ ID NO: 1446537 - DNA, 15 bp, Homo sapiens
ctgggacattgaggt

SEQ ID NO: 1446538 - DNA, 15 bp, Homo sapiens
tgggacattgaggtg

SEQ ID NO: 1446539 - DNA, 15 bp, Homo sapiens
gggacattgaggtgg

SEQ ID NO: 1446540 - DNA, 15 bp, Homo sapiens
ggacattgaggtggg

SEQ ID NO: 1446541 - DNA, 15 bp, Homo sapiens
gacattgaggtggga

SEQ ID NO: 1446542 - DNA, 15 bp, Homo sapiens
acattgaggtgggag

SEQ ID NO: 1446543 - DNA, 15 bp, Homo sapiens
cattgaggtgggagg

SEQ ID NO: 1446544 - DNA, 15 bp, Homo sapiens
attgaggtgggagga

SEQ ID NO: 1446545 - DNA, 15 bp, Homo sapiens
tgagcccaggaagtt

SEQ ID NO: 1446546 - DNA, 15 bp, Homo sapiens
gagcccaggaagttg

SEQ ID NO: 1446547 - DNA, 15 bp, Homo sapiens
agcccaggaagttgg

SEQ ID NO: 1446548 - DNA, 15 bp, Homo sapiens
gcccaggaagttggg

SEQ ID NO: 1446549 - DNA, 15 bp, Homo sapiens
cccaggaagttgggg

SEQ ID NO: 1446550 - DNA, 15 bp, Homo sapiens
ccaggaagttggggg

SEQ ID NO: 1446551 - DNA, 15 bp, Homo sapiens
caggaagttgggggc

SEQ ID NO: 1446552 - DNA, 15 bp, Homo sapiens
aggaagttgggggct

SEQ ID NO: 1446553 - DNA, 15 bp, Homo sapiens
ggaagttgggggctg

SEQ ID NO: 1446554 - DNA, 15 bp, Homo sapiens
gaagttgggggctgc

SEQ ID NO: 1446555 - DNA, 15 bp, Homo sapiens
aagttgggggctgca

SEQ ID NO: 1446556 - DNA, 15 bp, Homo sapiens
agttgggggctgcag

SEQ ID NO: 1446557 - DNA, 15 bp, Homo sapiens
gttgggggctgcagt

SEQ ID NO: 1446558 - DNA, 15 bp, Homo sapiens
ttgggggctgcagtg

SEQ ID NO: 1446559 - DNA, 15 bp, Homo sapiens
tgggggctgcagtga

SEQ ID NO: 1446560 - DNA, 15 bp, Homo sapiens
gggggctgcagtgag

SEQ ID NO: 1446561 - DNA, 15 bp, Homo sapiens
agctgtgatcatgtg

SEQ ID NO: 1446562 - DNA, 15 bp, Homo sapiens
gctgtgatcatgtgc

SEQ ID NO: 1446563 - DNA, 15 bp, Homo sapiens
ctgtgatcatgtgcc

SEQ ID NO: 1446564 - DNA, 15 bp, Homo sapiens
tgtgatcatgtgcca

SEQ ID NO: 1446565 - DNA, 15 bp, Homo sapiens
gtgatcatgtgccac

SEQ ID NO: 1446566 - DNA, 15 bp, Homo sapiens
tgatcatgtgccact

SEQ ID NO: 1446567 - DNA, 15 bp, Homo sapiens
gatcatgtgccactg

SEQ ID NO: 1446568 - DNA, 15 bp, Homo sapiens
atcatgtgccactga

SEQ ID NO: 1446569 - DNA, 15 bp, Homo sapiens
tcatgtgccactgat

SEQ ID NO: 1446570 - DNA, 15 bp, Homo sapiens
catgtgccactgatc

SEQ ID NO: 1446571 - DNA, 15 bp, Homo sapiens
atgtgccactgatct

SEQ ID NO: 1446572 - DNA, 15 bp, Homo sapiens
tgtgccactgatctc

SEQ ID NO: 1446573 - DNA, 15 bp, Homo sapiens
gtgccactgatctcc

SEQ ID NO: 1446574 - DNA, 15 bp, Homo sapiens
tgccactgatctcca

SEQ ID NO: 1446575 - DNA, 15 bp, Homo sapiens
gccactgatctccag

SEQ ID NO: 1446576 - DNA, 15 bp, Homo sapiens
ccactgatctccagc

SEQ ID NO: 1446577 - DNA, 15 bp, Homo sapiens
cactgatctccagcc

SEQ ID NO: 1446578 - DNA, 15 bp, Homo sapiens
actgatctccagcct

SEQ ID NO: 1446579 - DNA, 15 bp, Homo sapiens
ctgatctccagccta

SEQ ID NO: 1446580 - DNA, 15 bp, Homo sapiens
tgatctccagcctat

SEQ ID NO: 1446581 - DNA, 15 bp, Homo sapiens
gatctccagcctatg

SEQ ID NO: 1446582 - DNA, 15 bp, Homo sapiens
atctccagcctatgt

SEQ ID NO: 1446583 - DNA, 15 bp, Homo sapiens
tctccagcctatgtg

SEQ ID NO: 1446584 - DNA, 15 bp, Homo sapiens
ctccagcctatgtgc

SEQ ID NO: 1446585 - DNA, 15 bp, Homo sapiens
tccagcctatgtgcc

SEQ ID NO: 1446586 - DNA, 15 bp, Homo sapiens
ccagcctatgtgcct

SEQ ID NO: 1446587 - DNA, 15 bp, Homo sapiens
cagcctatgtgcctg

SEQ ID NO: 1446588 - DNA, 15 bp, Homo sapiens
agcctatgtgcctgt

SEQ ID NO: 1446589 - DNA, 15 bp, Homo sapiens
gcctatgtgcctgta

SEQ ID NO: 1446590 - DNA, 15 bp, Homo sapiens
cctatgtgcctgtat

SEQ ID NO: 1446591 - DNA, 15 bp, Homo sapiens
ctatgtgcctgtata

SEQ ID NO: 1446592 - DNA, 15 bp, Homo sapiens
tatgtgcctgtataa

SEQ ID NO: 1446593 - DNA, 15 bp, Homo sapiens
atgtgcctgtataac

SEQ ID NO: 1446594 - DNA, 15 bp, Homo sapiens
tgtgcctgtataaca

SEQ ID NO: 1446595 - DNA, 15 bp, Homo sapiens
gtgcctgtataacag

SEQ ID NO: 1446596 - DNA, 15 bp, Homo sapiens
tgcctgtataacaga

SEQ ID NO: 1446597 - DNA, 15 bp, Homo sapiens
gcctgtataacagag

SEQ ID NO: 1446598 - DNA, 15 bp, Homo sapiens
cctgtataacagagc

SEQ ID NO: 1446599 - DNA, 15 bp, Homo sapiens
ctgtataacagagcg

SEQ ID NO: 1446600 - DNA, 15 bp, Homo sapiens
tgtataacagagcga

SEQ ID NO: 1446601 - DNA, 15 bp, Homo sapiens
gtataacagagcgag

SEQ ID NO: 1446602 - DNA, 15 bp, Homo sapiens
tataacagagcgagt

SEQ ID NO: 1446603 - DNA, 15 bp, Homo sapiens
ataacagagcgagtc

SEQ ID NO: 1446604 - DNA, 15 bp, Homo sapiens
taacagagcgagtct

SEQ ID NO: 1446605 - DNA, 15 bp, Homo sapiens
aacagagcgagtctc

SEQ ID NO: 1446606 - DNA, 15 bp, Homo sapiens
acagagcgagtctct

SEQ ID NO: 1446607 - DNA, 15 bp, Homo sapiens
cagagcgagtctctc

SEQ ID NO: 1446608 - DNA, 15 bp, Homo sapiens
agagcgagtctctct

SEQ ID NO: 1446609 - DNA, 15 bp, Homo sapiens
gagcgagtctctctc

SEQ ID NO: 1446610 - DNA, 15 bp, Homo sapiens
agcgagtctctctct

SEQ ID NO: 1446611 - DNA, 15 bp, Homo sapiens
gcgagtctctctctt

SEQ ID NO: 1446612 - DNA, 15 bp, Homo sapiens
cgagtctctctctta

SEQ ID NO: 1446613 - DNA, 15 bp, Homo sapiens
gagtctctctcttaa

SEQ ID NO: 1446614 - DNA, 15 bp, Homo sapiens
agtctctctcttaaa

SEQ ID NO: 1446615 - DNA, 15 bp, Homo sapiens
gtctctctcttaaaa

SEQ ID NO: 1446616 - DNA, 15 bp, Homo sapiens
tctctctcttaaaag

SEQ ID NO: 1446617 - DNA, 15 bp, Homo sapiens
ctctctcttaaaaga

SEQ ID NO: 1446618 - DNA, 15 bp, Homo sapiens
tctctcttaaaagaa

SEQ ID NO: 1446619 - DNA, 15 bp, Homo sapiens
ctctcttaaaagaaa

SEQ ID NO: 1446620 - DNA, 15 bp, Homo sapiens
tctcttaaaagaaaa

SEQ ID NO: 1446621 - DNA, 15 bp, Homo sapiens
ctcttaaaagaaaaa

SEQ ID NO: 1446622 - DNA, 15 bp, Homo sapiens
tcttaaaagaaaaaa

SEQ ID NO: 1446623 - DNA, 15 bp, Homo sapiens
cttaaaagaaaaaaa

SEQ ID NO: 1446624 - DNA, 15 bp, Homo sapiens
ttaaaagaaaaaaag

SEQ ID NO: 1446625 - DNA, 15 bp, Homo sapiens
taaaagaaaaaaaga

SEQ ID NO: 1446626 - DNA, 15 bp, Homo sapiens
aaagaaaaaaagaag

SEQ ID NO: 1446627 - DNA, 15 bp, Homo sapiens
aagaaaaaaagaaga

SEQ ID NO: 1446628 - DNA, 15 bp, Homo sapiens
agaaaaaaagaagaa

SEQ ID NO: 1446629 - DNA, 15 bp, Homo sapiens
gaaaaaaagaagaag

SEQ ID NO: 1446630 - DNA, 15 bp, Homo sapiens
gaagaagaagaaaag

SEQ ID NO: 1446631 - DNA, 15 bp, Homo sapiens
aagaagaagaaaaga

SEQ ID NO: 1446632 - DNA, 15 bp, Homo sapiens
agaagaagaaaagat

SEQ ID NO: 1446633 - DNA, 15 bp, Homo sapiens
gaagaagaaaagata

SEQ ID NO: 1446634 - DNA, 15 bp, Homo sapiens
aagaagaaaagataa

SEQ ID NO: 1446635 - DNA, 15 bp, Homo sapiens
agaagaaaagataac

SEQ ID NO: 1446636 - DNA, 15 bp, Homo sapiens
gaagaaaagataacc

SEQ ID NO: 1446637 - DNA, 15 bp, Homo sapiens
aagaaaagataacca

SEQ ID NO: 1446638 - DNA, 15 bp, Homo sapiens
agaaaagataaccat

SEQ ID NO: 1446639 - DNA, 15 bp, Homo sapiens
gaaaagataaccata

SEQ ID NO: 1446640 - DNA, 15 bp, Homo sapiens
aaaagataaccatat

SEQ ID NO: 1446641 - DNA, 15 bp, Homo sapiens
aaagataaccatata

SEQ ID NO: 1446642 - DNA, 15 bp, Homo sapiens
aagataaccatatac

SEQ ID NO: 1446643 - DNA, 15 bp, Homo sapiens
agataaccatatacc

SEQ ID NO: 1446644 - DNA, 15 bp, Homo sapiens
gataaccatatacct

SEQ ID NO: 1446645 - DNA, 15 bp, Homo sapiens
ataaccatatacctc

SEQ ID NO: 1446646 - DNA, 15 bp, Homo sapiens
taaccatatacctcc

SEQ ID NO: 1446647 - DNA, 15 bp, Homo sapiens
aaccatatacctcca

SEQ ID NO: 1446648 - DNA, 15 bp, Homo sapiens
accatatacctccat

SEQ ID NO: 1446649 - DNA, 15 bp, Homo sapiens
ccatatacctccatt

SEQ ID NO: 1446650 - DNA, 15 bp, Homo sapiens
catatacctccatta

SEQ ID NO: 1446651 - DNA, 15 bp, Homo sapiens
atatacctccattat

SEQ ID NO: 1446652 - DNA, 15 bp, Homo sapiens
tatacctccattatt

SEQ ID NO: 1446653 - DNA, 15 bp, Homo sapiens
atacctccattatta

SEQ ID NO: 1446654 - DNA, 15 bp, Homo sapiens
tacctccattattaa

SEQ ID NO: 1446655 - DNA, 15 bp, Homo sapiens
acctccattattaag

SEQ ID NO: 1446656 - DNA, 15 bp, Homo sapiens
cctccattattaagc

SEQ ID NO: 1446657 - DNA, 15 bp, Homo sapiens
ctccattattaagca

SEQ ID NO: 1446658 - DNA, 15 bp, Homo sapiens
tccattattaagcaa

SEQ ID NO: 1446659 - DNA, 15 bp, Homo sapiens
ccattattaagcaat

SEQ ID NO: 1446660 - DNA, 15 bp, Homo sapiens
cattattaagcaatt

SEQ ID NO: 1446661 - DNA, 15 bp, Homo sapiens
attattaagcaattt

SEQ ID NO: 1446662 - DNA, 15 bp, Homo sapiens
ttattaagcaattta

SEQ ID NO: 1446663 - DNA, 15 bp, Homo sapiens
tattaagcaatttag

SEQ ID NO: 1446664 - DNA, 15 bp, Homo sapiens
attaagcaatttagc

SEQ ID NO: 1446665 - DNA, 15 bp, Homo sapiens
ttaagcaatttagct

SEQ ID NO: 1446666 - DNA, 15 bp, Homo sapiens
taagcaatttagcta

SEQ ID NO: 1446667 - DNA, 15 bp, Homo sapiens
aagcaatttagctaa

SEQ ID NO: 1446668 - DNA, 15 bp, Homo sapiens
agcaatttagctaac

SEQ ID NO: 1446669 - DNA, 15 bp, Homo sapiens
gcaatttagctaact

SEQ ID NO: 1446670 - DNA, 15 bp, Homo sapiens
caatttagctaactg

SEQ ID NO: 1446671 - DNA, 15 bp, Homo sapiens
aatttagctaactgg

SEQ ID NO: 1446672 - DNA, 15 bp, Homo sapiens
atttagctaactggt

SEQ ID NO: 1446673 - DNA, 15 bp, Homo sapiens
tttagctaactggtg

SEQ ID NO: 1446674 - DNA, 15 bp, Homo sapiens
ttagctaactggtga

SEQ ID NO: 1446675 - DNA, 15 bp, Homo sapiens
tagctaactggtgat

SEQ ID NO: 1446676 - DNA, 15 bp, Homo sapiens
agctaactggtgata

SEQ ID NO: 1446677 - DNA, 15 bp, Homo sapiens
gctaactggtgatat

SEQ ID NO: 1446678 - DNA, 15 bp, Homo sapiens
ctaactggtgatatt

SEQ ID NO: 1446679 - DNA, 15 bp, Homo sapiens
taactggtgatattt

SEQ ID NO: 1446680 - DNA, 15 bp, Homo sapiens
aactggtgatatttt

SEQ ID NO: 1446681 - DNA, 15 bp, Homo sapiens
actggtgatattttg

SEQ ID NO: 1446682 - DNA, 15 bp, Homo sapiens
ctggtgatattttgg

SEQ ID NO: 1446683 - DNA, 15 bp, Homo sapiens
tggtgatattttggt

SEQ ID NO: 1446684 - DNA, 15 bp, Homo sapiens
ggtgatattttggta

SEQ ID NO: 1446685 - DNA, 15 bp, Homo sapiens
gtgatattttggtac

SEQ ID NO: 1446686 - DNA, 15 bp, Homo sapiens
tgatattttggtacc

SEQ ID NO: 1446687 - DNA, 15 bp, Homo sapiens
gatattttggtacca

SEQ ID NO: 1446688 - DNA, 15 bp, Homo sapiens
atattttggtaccat

SEQ ID NO: 1446689 - DNA, 15 bp, Homo sapiens
tattttggtaccata

SEQ ID NO: 1446690 - DNA, 15 bp, Homo sapiens
attttggtaccatac

SEQ ID NO: 1446691 - DNA, 15 bp, Homo sapiens
ttttggtaccataca

SEQ ID NO: 1446692 - DNA, 15 bp, Homo sapiens
tttggtaccatacaa

SEQ ID NO: 1446693 - DNA, 15 bp, Homo sapiens
ttggtaccatacaaa

SEQ ID NO: 1446694 - DNA, 15 bp, Homo sapiens
tggtaccatacaaat

SEQ ID NO: 1446695 - DNA, 15 bp, Homo sapiens
ggtaccatacaaata

SEQ ID NO: 1446696 - DNA, 15 bp, Homo sapiens
gtaccatacaaataa

SEQ ID NO: 1446697 - DNA, 15 bp, Homo sapiens
taccatacaaataac

SEQ ID NO: 1446698 - DNA, 15 bp, Homo sapiens
accatacaaataaca

SEQ ID NO: 1446699 - DNA, 15 bp, Homo sapiens
ccatacaaataacaa

SEQ ID NO: 1446700 - DNA, 15 bp, Homo sapiens
catacaaataacaaa

SEQ ID NO: 1446701 - DNA, 15 bp, Homo sapiens
atacaaataacaaat

SEQ ID NO: 1446702 - DNA, 15 bp, Homo sapiens
tacaaataacaaatt

SEQ ID NO: 1446703 - DNA, 15 bp, Homo sapiens
acaaataacaaatta

SEQ ID NO: 1446704 - DNA, 15 bp, Homo sapiens
caaataacaaattat

SEQ ID NO: 1446705 - DNA, 15 bp, Homo sapiens
aaataacaaattatt

SEQ ID NO: 1446706 - DNA, 15 bp, Homo sapiens
aataacaaattattt

SEQ ID NO: 1446707 - DNA, 15 bp, Homo sapiens
ataacaaattatttg

SEQ ID NO: 1446708 - DNA, 15 bp, Homo sapiens
taacaaattatttgt

SEQ ID NO: 1446709 - DNA, 15 bp, Homo sapiens
aacaaattatttgtc

SEQ ID NO: 1446710 - DNA, 15 bp, Homo sapiens
acaaattatttgtca

SEQ ID NO: 1446711 - DNA, 15 bp, Homo sapiens
caaattatttgtcag

SEQ ID NO: 1446712 - DNA, 15 bp, Homo sapiens
aaattatttgtcagt

SEQ ID NO: 1446713 - DNA, 15 bp, Homo sapiens
aattatttgtcagtc

SEQ ID NO: 1446714 - DNA, 15 bp, Homo sapiens
attatttgtcagtcc

SEQ ID NO: 1446715 - DNA, 15 bp, Homo sapiens
ttatttgtcagtcct

SEQ ID NO: 1446716 - DNA, 15 bp, Homo sapiens
tatttgtcagtccta

SEQ ID NO: 1446717 - DNA, 15 bp, Homo sapiens
atttgtcagtcctaa

SEQ ID NO: 1446718 - DNA, 15 bp, Homo sapiens
tttgtcagtcctaat

SEQ ID NO: 1446719 - DNA, 15 bp, Homo sapiens
ttgtcagtcctaatg

SEQ ID NO: 1446720 - DNA, 15 bp, Homo sapiens
tgtcagtcctaatga

SEQ ID NO: 1446721 - DNA, 15 bp, Homo sapiens
gtcagtcctaatgat

SEQ ID NO: 1446722 - DNA, 15 bp, Homo sapiens
tcagtcctaatgatt

SEQ ID NO: 1446723 - DNA, 15 bp, Homo sapiens
cagtcctaatgattt

SEQ ID NO: 1446724 - DNA, 15 bp, Homo sapiens
agtcctaatgatttt

SEQ ID NO: 1446725 - DNA, 15 bp, Homo sapiens
gtcctaatgatttta

SEQ ID NO: 1446726 - DNA, 15 bp, Homo sapiens
tcctaatgattttag

SEQ ID NO: 1446727 - DNA, 15 bp, Homo sapiens
cctaatgattttagc

SEQ ID NO: 1446728 - DNA, 15 bp, Homo sapiens
ctaatgattttagca

SEQ ID NO: 1446729 - DNA, 15 bp, Homo sapiens
taatgattttagcat

SEQ ID NO: 1446730 - DNA, 15 bp, Homo sapiens
aatgattttagcatc

SEQ ID NO: 1446731 - DNA, 15 bp, Homo sapiens
atgattttagcatct

SEQ ID NO: 1446732 - DNA, 15 bp, Homo sapiens
tgattttagcatctg

SEQ ID NO: 1446733 - DNA, 15 bp, Homo sapiens
gattttagcatctgc

SEQ ID NO: 1446734 - DNA, 15 bp, Homo sapiens
attttagcatctgct

SEQ ID NO: 1446735 - DNA, 15 bp, Homo sapiens
ttttagcatctgctg

SEQ ID NO: 1446736 - DNA, 15 bp, Homo sapiens
tttagcatctgctga

SEQ ID NO: 1446737 - DNA, 15 bp, Homo sapiens
ttagcatctgctgat

SEQ ID NO: 1446738 - DNA, 15 bp, Homo sapiens
tagcatctgctgatg

SEQ ID NO: 1446739 - DNA, 15 bp, Homo sapiens
agcatctgctgatga

SEQ ID NO: 1446740 - DNA, 15 bp, Homo sapiens
gcatctgctgatgat

SEQ ID NO: 1446741 - DNA, 15 bp, Homo sapiens
catctgctgatgatt

SEQ ID NO: 1446742 - DNA, 15 bp, Homo sapiens
atctgctgatgattg

SEQ ID NO: 1446743 - DNA, 15 bp, Homo sapiens
tctgctgatgattgt

SEQ ID NO: 1446744 - DNA, 15 bp, Homo sapiens
ctgctgatgattgtt

SEQ ID NO: 1446745 - DNA, 15 bp, Homo sapiens
tgctgatgattgttg

SEQ ID NO: 1446746 - DNA, 15 bp, Homo sapiens
gctgatgattgttgc

SEQ ID NO: 1446747 - DNA, 15 bp, Homo sapiens
ctgatgattgttgcc

SEQ ID NO: 1446748 - DNA, 15 bp, Homo sapiens
tgatgattgttgcct

SEQ ID NO: 1446749 - DNA, 15 bp, Homo sapiens
gatgattgttgccta

SEQ ID NO: 1446750 - DNA, 15 bp, Homo sapiens
atgattgttgcctaa

SEQ ID NO: 1446751 - DNA, 15 bp, Homo sapiens
tgattgttgcctaac

SEQ ID NO: 1446752 - DNA, 15 bp, Homo sapiens
gattgttgcctaacc

SEQ ID NO: 1446753 - DNA, 15 bp, Homo sapiens
attgttgcctaaccc

SEQ ID NO: 1446754 - DNA, 15 bp, Homo sapiens
ttgttgcctaaccca

SEQ ID NO: 1446755 - DNA, 15 bp, Homo sapiens
tgttgcctaacccaa

SEQ ID NO: 1446756 - DNA, 15 bp, Homo sapiens
gttgcctaacccaat

SEQ ID NO: 1446757 - DNA, 15 bp, Homo sapiens
ttgcctaacccaatt

SEQ ID NO: 1446758 - DNA, 15 bp, Homo sapiens
tgcctaacccaatta

SEQ ID NO: 1446759 - DNA, 15 bp, Homo sapiens
gcctaacccaattat

SEQ ID NO: 1446760 - DNA, 15 bp, Homo sapiens
cctaacccaattatt

SEQ ID NO: 1446761 - DNA, 15 bp, Homo sapiens
ctaacccaattatta

SEQ ID NO: 1446762 - DNA, 15 bp, Homo sapiens
taacccaattattaa

SEQ ID NO: 1446763 - DNA, 15 bp, Homo sapiens
aacccaattattaaa

SEQ ID NO: 1446764 - DNA, 15 bp, Homo sapiens
acccaattattaaaa

SEQ ID NO: 1446765 - DNA, 15 bp, Homo sapiens
cccaattattaaaag

SEQ ID NO: 1446766 - DNA, 15 bp, Homo sapiens
ccaattattaaaagt

SEQ ID NO: 1446767 - DNA, 15 bp, Homo sapiens
caattattaaaagtt

SEQ ID NO: 1446768 - DNA, 15 bp, Homo sapiens
aattattaaaagttg

SEQ ID NO: 1446769 - DNA, 15 bp, Homo sapiens
attattaaaagttgc

SEQ ID NO: 1446770 - DNA, 15 bp, Homo sapiens
ttattaaaagttgca

SEQ ID NO: 1446771 - DNA, 15 bp, Homo sapiens
tattaaaagttgcaa

SEQ ID NO: 1446772 - DNA, 15 bp, Homo sapiens
attaaaagttgcaaa

SEQ ID NO: 1446773 - DNA, 15 bp, Homo sapiens
ttaaaagttgcaaac

SEQ ID NO: 1446774 - DNA, 15 bp, Homo sapiens
taaaagttgcaaaca

SEQ ID NO: 1446775 - DNA, 15 bp, Homo sapiens
aaaagttgcaaacat

SEQ ID NO: 1446776 - DNA, 15 bp, Homo sapiens
aaagttgcaaacatc

SEQ ID NO: 1446777 - DNA, 15 bp, Homo sapiens
aagttgcaaacatca

SEQ ID NO: 1446778 - DNA, 15 bp, Homo sapiens
agttgcaaacatcat

SEQ ID NO: 1446779 - DNA, 15 bp, Homo sapiens
gttgcaaacatcata

SEQ ID NO: 1446780 - DNA, 15 bp, Homo sapiens
ttgcaaacatcataa

SEQ ID NO: 1446781 - DNA, 15 bp, Homo sapiens
tgcaaacatcataat

SEQ ID NO: 1446782 - DNA, 15 bp, Homo sapiens
gcaaacatcataatt

SEQ ID NO: 1446783 - DNA, 15 bp, Homo sapiens
caaacatcataattt

SEQ ID NO: 1446784 - DNA, 15 bp, Homo sapiens
aaacatcataatttt

SEQ ID NO: 1446785 - DNA, 15 bp, Homo sapiens
aacatcataattttc

SEQ ID NO: 1446786 - DNA, 15 bp, Homo sapiens
acatcataattttct

SEQ ID NO: 1446787 - DNA, 15 bp, Homo sapiens
catcataattttcta

SEQ ID NO: 1446788 - DNA, 15 bp, Homo sapiens
atcataattttctag

SEQ ID NO: 1446789 - DNA, 15 bp, Homo sapiens
tcataattttctagt

SEQ ID NO: 1446790 - DNA, 15 bp, Homo sapiens
cataattttctagtt

SEQ ID NO: 1446791 - DNA, 15 bp, Homo sapiens
ataattttctagtta

SEQ ID NO: 1446792 - DNA, 15 bp, Homo sapiens
taattttctagttat

SEQ ID NO: 1446793 - DNA, 15 bp, Homo sapiens
aattttctagttata

SEQ ID NO: 1446794 - DNA, 15 bp, Homo sapiens
attttctagttatat

SEQ ID NO: 1446795 - DNA, 15 bp, Homo sapiens
ttttctagttatatt

SEQ ID NO: 1446796 - DNA, 15 bp, Homo sapiens
ttctagttatattat

SEQ ID NO: 1446797 - DNA, 15 bp, Homo sapiens
tctagttatattatg

SEQ ID NO: 1446798 - DNA, 15 bp, Homo sapiens
ctagttatattatgc

SEQ ID NO: 1446799 - DNA, 15 bp, Homo sapiens
tagttatattatgca

SEQ ID NO: 1446800 - DNA, 15 bp, Homo sapiens
agttatattatgcac

SEQ ID NO: 1446801 - DNA, 15 bp, Homo sapiens
gttatattatgcact

SEQ ID NO: 1446802 - DNA, 15 bp, Homo sapiens
ttatattatgcactt

SEQ ID NO: 1446803 - DNA, 15 bp, Homo sapiens
tatattatgcactta

SEQ ID NO: 1446804 - DNA, 15 bp, Homo sapiens
atattatgcacttac

SEQ ID NO: 1446805 - DNA, 15 bp, Homo sapiens
tattatgcacttaca

SEQ ID NO: 1446806 - DNA, 15 bp, Homo sapiens
attatgcacttacat

SEQ ID NO: 1446807 - DNA, 15 bp, Homo sapiens
ttatgcacttacatt

SEQ ID NO: 1446808 - DNA, 15 bp, Homo sapiens
tatgcacttacattt

SEQ ID NO: 1446809 - DNA, 15 bp, Homo sapiens
atgcacttacattta

SEQ ID NO: 1446810 - DNA, 15 bp, Homo sapiens
tgcacttacatttat

SEQ ID NO: 1446811 - DNA, 15 bp, Homo sapiens
gcacttacatttatt

SEQ ID NO: 1446812 - DNA, 15 bp, Homo sapiens
cacttacatttatta

SEQ ID NO: 1446813 - DNA, 15 bp, Homo sapiens
acttacatttattaa

SEQ ID NO: 1446814 - DNA, 15 bp, Homo sapiens
cttacatttattaac

SEQ ID NO: 1446815 - DNA, 15 bp, Homo sapiens
ttacatttattaaca

SEQ ID NO: 1446816 - DNA, 15 bp, Homo sapiens
tacatttattaacag

SEQ ID NO: 1446817 - DNA, 15 bp, Homo sapiens
acatttattaacaga

SEQ ID NO: 1446818 - DNA, 15 bp, Homo sapiens
catttattaacagac

SEQ ID NO: 1446819 - DNA, 15 bp, Homo sapiens
atttattaacagaca

SEQ ID NO: 1446820 - DNA, 15 bp, Homo sapiens
tttattaacagacat

SEQ ID NO: 1446821 - DNA, 15 bp, Homo sapiens
ttattaacagacatg

SEQ ID NO: 1446822 - DNA, 15 bp, Homo sapiens
tattaacagacatgc

SEQ ID NO: 1446823 - DNA, 15 bp, Homo sapiens
attaacagacatgct

SEQ ID NO: 1446824 - DNA, 15 bp, Homo sapiens
ttaacagacatgctt

SEQ ID NO: 1446825 - DNA, 15 bp, Homo sapiens
taacagacatgcttt

SEQ ID NO: 1446826 - DNA, 15 bp, Homo sapiens
aacagacatgctttt

SEQ ID NO: 1446827 - DNA, 15 bp, Homo sapiens
acagacatgcttttg

SEQ ID NO: 1446828 - DNA, 15 bp, Homo sapiens
cagacatgcttttgt

SEQ ID NO: 1446829 - DNA, 15 bp, Homo sapiens
agacatgcttttgta

SEQ ID NO: 1446830 - DNA, 15 bp, Homo sapiens
gacatgcttttgtaa

SEQ ID NO: 1446831 - DNA, 15 bp, Homo sapiens
acatgcttttgtaaa

SEQ ID NO: 1446832 - DNA, 15 bp, Homo sapiens
catgcttttgtaaaa

SEQ ID NO: 1446833 - DNA, 15 bp, Homo sapiens
atgcttttgtaaaat

SEQ ID NO: 1446834 - DNA, 15 bp, Homo sapiens
tgcttttgtaaaata

SEQ ID NO: 1446835 - DNA, 15 bp, Homo sapiens
gcttttgtaaaataa

SEQ ID NO: 1446836 - DNA, 15 bp, Homo sapiens
cttttgtaaaataaa

SEQ ID NO: 1446837 - DNA, 15 bp, Homo sapiens
ttttgtaaaataaat

SEQ ID NO: 1446838 - DNA, 15 bp, Homo sapiens
tttgtaaaataaata

SEQ ID NO: 1446839 - DNA, 15 bp, Homo sapiens
ttgtaaaataaatag

SEQ ID NO: 1446840 - DNA, 15 bp, Homo sapiens
tgtaaaataaatagc

SEQ ID NO: 1446841 - DNA, 15 bp, Homo sapiens
gtaaaataaatagcg

SEQ ID NO: 1446842 - DNA, 15 bp, Homo sapiens
taaaataaatagcgt

SEQ ID NO: 1446843 - DNA, 15 bp, Homo sapiens
aaaataaatagcgtt

SEQ ID NO: 1446844 - DNA, 15 bp, Homo sapiens
aaataaatagcgttt

SEQ ID NO: 1446845 - DNA, 15 bp, Homo sapiens
aataaatagcgtttc

SEQ ID NO: 1446846 - DNA, 15 bp, Homo sapiens
ataaatagcgtttcc

SEQ ID NO: 1446847 - DNA, 15 bp, Homo sapiens
taaatagcgtttcct

SEQ ID NO: 1446848 - DNA, 15 bp, Homo sapiens
aaatagcgtttcctc

SEQ ID NO: 1446849 - DNA, 15 bp, Homo sapiens
aatagcgtttcctca

SEQ ID NO: 1446850 - DNA, 15 bp, Homo sapiens
atagcgtttcctcat

SEQ ID NO: 1446851 - DNA, 15 bp, Homo sapiens
tagcgtttcctcatt

SEQ ID NO: 1446852 - DNA, 15 bp, Homo sapiens
agcgtttcctcatta

SEQ ID NO: 1446853 - DNA, 15 bp, Homo sapiens
gcgtttcctcattag

SEQ ID NO: 1446854 - DNA, 15 bp, Homo sapiens
cgtttcctcattagc

SEQ ID NO: 1446855 - DNA, 15 bp, Homo sapiens
gtttcctcattagcc

SEQ ID NO: 1446856 - DNA, 15 bp, Homo sapiens
tttcctcattagccc

SEQ ID NO: 1446857 - DNA, 15 bp, Homo sapiens
ttcctcattagccca

SEQ ID NO: 1446858 - DNA, 15 bp, Homo sapiens
tcctcattagcccag

SEQ ID NO: 1446859 - DNA, 15 bp, Homo sapiens
cctcattagcccagg

SEQ ID NO: 1446860 - DNA, 15 bp, Homo sapiens
ctcattagcccaggc

SEQ ID NO: 1446861 - DNA, 15 bp, Homo sapiens
tcattagcccaggct

SEQ ID NO: 1446862 - DNA, 15 bp, Homo sapiens
cattagcccaggcta

SEQ ID NO: 1446863 - DNA, 15 bp, Homo sapiens
attagcccaggctat

SEQ ID NO: 1446864 - DNA, 15 bp, Homo sapiens
ttagcccaggctatt

SEQ ID NO: 1446865 - DNA, 15 bp, Homo sapiens
tagcccaggctattt

SEQ ID NO: 1446866 - DNA, 15 bp, Homo sapiens
agcccaggctatttg

SEQ ID NO: 1446867 - DNA, 15 bp, Homo sapiens
gcccaggctatttgt

SEQ ID NO: 1446868 - DNA, 15 bp, Homo sapiens
cccaggctatttgtt

SEQ ID NO: 1446869 - DNA, 15 bp, Homo sapiens
ccaggctatttgttt

SEQ ID NO: 1446870 - DNA, 15 bp, Homo sapiens
caggctatttgttta

SEQ ID NO: 1446871 - DNA, 15 bp, Homo sapiens
aggctatttgtttat

SEQ ID NO: 1446872 - DNA, 15 bp, Homo sapiens
ggctatttgtttatc

SEQ ID NO: 1446873 - DNA, 15 bp, Homo sapiens
gctatttgtttatct

SEQ ID NO: 1446874 - DNA, 15 bp, Homo sapiens
ctatttgtttatctt

SEQ ID NO: 1446875 - DNA, 15 bp, Homo sapiens
tatttgtttatcttg

SEQ ID NO: 1446876 - DNA, 15 bp, Homo sapiens
atttgtttatcttga

SEQ ID NO: 1446877 - DNA, 15 bp, Homo sapiens
tttgtttatcttgaa

SEQ ID NO: 1446878 - DNA, 15 bp, Homo sapiens
ttgtttatcttgaag

SEQ ID NO: 1446879 - DNA, 15 bp, Homo sapiens
tgtttatcttgaagt

SEQ ID NO: 1446880 - DNA, 15 bp, Homo sapiens
gtttatcttgaagtt

SEQ ID NO: 1446881 - DNA, 15 bp, Homo sapiens
tttatcttgaagttt

SEQ ID NO: 1446882 - DNA, 15 bp, Homo sapiens
ttatcttgaagttta

SEQ ID NO: 1446883 - DNA, 15 bp, Homo sapiens
tatcttgaagtttag

SEQ ID NO: 1446884 - DNA, 15 bp, Homo sapiens
atcttgaagtttagc

SEQ ID NO: 1446885 - DNA, 15 bp, Homo sapiens
tcttgaagtttagct

SEQ ID NO: 1446886 - DNA, 15 bp, Homo sapiens
cttgaagtttagctc

SEQ ID NO: 1446887 - DNA, 15 bp, Homo sapiens
ttgaagtttagctcc

SEQ ID NO: 1446888 - DNA, 15 bp, Homo sapiens
tgaagtttagctcct

SEQ ID NO: 1446889 - DNA, 15 bp, Homo sapiens
gaagtttagctccta

SEQ ID NO: 1446890 - DNA, 15 bp, Homo sapiens
aagtttagctcctac

SEQ ID NO: 1446891 - DNA, 15 bp, Homo sapiens
agtttagctcctact

SEQ ID NO: 1446892 - DNA, 15 bp, Homo sapiens
gtttagctcctacta

SEQ ID NO: 1446893 - DNA, 15 bp, Homo sapiens
tttagctcctactac

SEQ ID NO: 1446894 - DNA, 15 bp, Homo sapiens
ttagctcctactaca

SEQ ID NO: 1446895 - DNA, 15 bp, Homo sapiens
tagctcctactacaa

SEQ ID NO: 1446896 - DNA, 15 bp, Homo sapiens
agctcctactacaaa

SEQ ID NO: 1446897 - DNA, 15 bp, Homo sapiens
gctcctactacaaag

SEQ ID NO: 1446898 - DNA, 15 bp, Homo sapiens
ctcctactacaaagg

SEQ ID NO: 1446899 - DNA, 15 bp, Homo sapiens
tcctactacaaaggc

SEQ ID NO: 1446900 - DNA, 15 bp, Homo sapiens
cctactacaaaggca

SEQ ID NO: 1446901 - DNA, 15 bp, Homo sapiens
ctactacaaaggcaa

SEQ ID NO: 1446902 - DNA, 15 bp, Homo sapiens
tactacaaaggcaag

SEQ ID NO: 1446903 - DNA, 15 bp, Homo sapiens
actacaaaggcaaga

SEQ ID NO: 1446904 - DNA, 15 bp, Homo sapiens
ctacaaaggcaagat

SEQ ID NO: 1446905 - DNA, 15 bp, Homo sapiens
tacaaaggcaagata

SEQ ID NO: 1446906 - DNA, 15 bp, Homo sapiens
acaaaggcaagataa

SEQ ID NO: 1446907 - DNA, 15 bp, Homo sapiens
caaaggcaagataaa

SEQ ID NO: 1446908 - DNA, 15 bp, Homo sapiens
aaaggcaagataaat

SEQ ID NO: 1446909 - DNA, 15 bp, Homo sapiens
aaggcaagataaatg

SEQ ID NO: 1446910 - DNA, 15 bp, Homo sapiens
aggcaagataaatgc

SEQ ID NO: 1446911 - DNA, 15 bp, Homo sapiens
ggcaagataaatgct

SEQ ID NO: 1446912 - DNA, 15 bp, Homo sapiens
gcaagataaatgctt

SEQ ID NO: 1446913 - DNA, 15 bp, Homo sapiens
caagataaatgcttt

SEQ ID NO: 1446914 - DNA, 15 bp, Homo sapiens
aagataaatgctttt

SEQ ID NO: 1446915 - DNA, 15 bp, Homo sapiens
agataaatgcttttc

SEQ ID NO: 1446916 - DNA, 15 bp, Homo sapiens
gataaatgcttttct

SEQ ID NO: 1446917 - DNA, 15 bp, Homo sapiens
ataaatgcttttctc

SEQ ID NO: 1446918 - DNA, 15 bp, Homo sapiens
taaatgcttttctct

SEQ ID NO: 1446919 - DNA, 15 bp, Homo sapiens
aaatgcttttctctt

SEQ ID NO: 1446920 - DNA, 15 bp, Homo sapiens
aatgcttttctcttt

SEQ ID NO: 1446921 - DNA, 15 bp, Homo sapiens
atgcttttctcttta

SEQ ID NO: 1446922 - DNA, 15 bp, Homo sapiens
tgcttttctctttaa

SEQ ID NO: 1446923 - DNA, 15 bp, Homo sapiens
gcttttctctttaat

SEQ ID NO: 1446924 - DNA, 15 bp, Homo sapiens
cttttctctttaatt

SEQ ID NO: 1446925 - DNA, 15 bp, Homo sapiens
ttttctctttaatta

SEQ ID NO: 1446926 - DNA, 15 bp, Homo sapiens
tttctctttaattac

SEQ ID NO: 1446927 - DNA, 15 bp, Homo sapiens
ttctctttaattacc

SEQ ID NO: 1446928 - DNA, 15 bp, Homo sapiens
tctctttaattacca

SEQ ID NO: 1446929 - DNA, 15 bp, Homo sapiens
ctctttaattaccag

SEQ ID NO: 1446930 - DNA, 15 bp, Homo sapiens
tctttaattaccagt

SEQ ID NO: 1446931 - DNA, 15 bp, Homo sapiens
ctttaattaccagtt

SEQ ID NO: 1446932 - DNA, 15 bp, Homo sapiens
tttaattaccagttt

SEQ ID NO: 1446933 - DNA, 15 bp, Homo sapiens
ttaattaccagtttt

SEQ ID NO: 1446934 - DNA, 15 bp, Homo sapiens
taattaccagttttc

SEQ ID NO: 1446935 - DNA, 15 bp, Homo sapiens
aattaccagttttca

SEQ ID NO: 1446936 - DNA, 15 bp, Homo sapiens
attaccagttttcag

SEQ ID NO: 1446937 - DNA, 15 bp, Homo sapiens
ttaccagttttcaga

SEQ ID NO: 1446938 - DNA, 15 bp, Homo sapiens
taccagttttcagaa

SEQ ID NO: 1446939 - DNA, 15 bp, Homo sapiens
accagttttcagaat

SEQ ID NO: 1446940 - DNA, 15 bp, Homo sapiens
ccagttttcagaata

SEQ ID NO: 1446941 - DNA, 15 bp, Homo sapiens
cagttttcagaatac

SEQ ID NO: 1446942 - DNA, 15 bp, Homo sapiens
agttttcagaataca

SEQ ID NO: 1446943 - DNA, 15 bp, Homo sapiens
gttttcagaatacac

SEQ ID NO: 1446944 - DNA, 15 bp, Homo sapiens
ttttcagaatacaca

SEQ ID NO: 1446945 - DNA, 15 bp, Homo sapiens
tttcagaatacacac

SEQ ID NO: 1446946 - DNA, 15 bp, Homo sapiens
ttcagaatacacact

SEQ ID NO: 1446947 - DNA, 15 bp, Homo sapiens
tcagaatacacactt

SEQ ID NO: 1446948 - DNA, 15 bp, Homo sapiens
cagaatacacacttg

SEQ ID NO: 1446949 - DNA, 15 bp, Homo sapiens
agaatacacacttgg

SEQ ID NO: 1446950 - DNA, 15 bp, Homo sapiens
gaatacacacttggt

SEQ ID NO: 1446951 - DNA, 15 bp, Homo sapiens
aatacacacttggtg

SEQ ID NO: 1446952 - DNA, 15 bp, Homo sapiens
atacacacttggtgt

SEQ ID NO: 1446953 - DNA, 15 bp, Homo sapiens
tacacacttggtgta

SEQ ID NO: 1446954 - DNA, 15 bp, Homo sapiens
acacacttggtgtac

SEQ ID NO: 1446955 - DNA, 15 bp, Homo sapiens
cacacttggtgtact

SEQ ID NO: 1446956 - DNA, 15 bp, Homo sapiens
acacttggtgtactc

SEQ ID NO: 1446957 - DNA, 15 bp, Homo sapiens
cacttggtgtactct

SEQ ID NO: 1446958 - DNA, 15 bp, Homo sapiens
acttggtgtactctg

SEQ ID NO: 1446959 - DNA, 15 bp, Homo sapiens
cttggtgtactctgc

SEQ ID NO: 1446960 - DNA, 15 bp, Homo sapiens
ttggtgtactctgca

SEQ ID NO: 1446961 - DNA, 15 bp, Homo sapiens
tggtgtactctgcac

SEQ ID NO: 1446962 - DNA, 15 bp, Homo sapiens
ggtgtactctgcact

SEQ ID NO: 1446963 - DNA, 15 bp, Homo sapiens
gtgtactctgcacta

SEQ ID NO: 1446964 - DNA, 15 bp, Homo sapiens
tgtactctgcactac

SEQ ID NO: 1446965 - DNA, 15 bp, Homo sapiens
gtactctgcactacc

SEQ ID NO: 1446966 - DNA, 15 bp, Homo sapiens
tactctgcactacct

SEQ ID NO: 1446967 - DNA, 15 bp, Homo sapiens
actctgcactacctg

SEQ ID NO: 1446968 - DNA, 15 bp, Homo sapiens
ctctgcactacctgc

SEQ ID NO: 1446969 - DNA, 15 bp, Homo sapiens
tctgcactacctgct

SEQ ID NO: 1446970 - DNA, 15 bp, Homo sapiens
ctgcactacctgctt

SEQ ID NO: 1446971 - DNA, 15 bp, Homo sapiens
tgcactacctgcttt

SEQ ID NO: 1446972 - DNA, 15 bp, Homo sapiens
gcactacctgctttt

SEQ ID NO: 1446973 - DNA, 15 bp, Homo sapiens
cactacctgcttttt

SEQ ID NO: 1446974 - DNA, 15 bp, Homo sapiens
actacctgctttttt

SEQ ID NO: 1446975 - DNA, 15 bp, Homo sapiens
ctacctgcttttttt

SEQ ID NO: 1446976 - DNA, 15 bp, Homo sapiens
tacctgctttttttg

SEQ ID NO: 1446977 - DNA, 15 bp, Homo sapiens
acctgctttttttgt

SEQ ID NO: 1446978 - DNA, 15 bp, Homo sapiens
cctgctttttttgtc

SEQ ID NO: 1446979 - DNA, 15 bp, Homo sapiens
ctgctttttttgtcc

SEQ ID NO: 1446980 - DNA, 15 bp, Homo sapiens
tgctttttttgtccc

SEQ ID NO: 1446981 - DNA, 15 bp, Homo sapiens
gctttttttgtcccc

SEQ ID NO: 1446982 - DNA, 15 bp, Homo sapiens
ctttttttgtcccct

SEQ ID NO: 1446983 - DNA, 15 bp, Homo sapiens
tttttttgtcccctc

SEQ ID NO: 1446984 - DNA, 15 bp, Homo sapiens
ttttttgtcccctcc

SEQ ID NO: 1446985 - DNA, 15 bp, Homo sapiens
tttttgtcccctccg

SEQ ID NO: 1446986 - DNA, 15 bp, Homo sapiens
ttttgtcccctccgc

SEQ ID NO: 1446987 - DNA, 15 bp, Homo sapiens
tttgtcccctccgct

SEQ ID NO: 1446988 - DNA, 15 bp, Homo sapiens
ttgtcccctccgctt

SEQ ID NO: 1446989 - DNA, 15 bp, Homo sapiens
tgtcccctccgcttt

SEQ ID NO: 1446990 - DNA, 15 bp, Homo sapiens
gtcccctccgctttc

SEQ ID NO: 1446991 - DNA, 15 bp, Homo sapiens
tcccctccgctttct

SEQ ID NO: 1446992 - DNA, 15 bp, Homo sapiens
cccctccgctttctc

SEQ ID NO: 1446993 - DNA, 15 bp, Homo sapiens
ccctccgctttctct

SEQ ID NO: 1446994 - DNA, 15 bp, Homo sapiens
cctccgctttctctt

SEQ ID NO: 1446995 - DNA, 15 bp, Homo sapiens
ctccgctttctcttt

SEQ ID NO: 1446996 - DNA, 15 bp, Homo sapiens
tccgctttctctttt

SEQ ID NO: 1446997 - DNA, 15 bp, Homo sapiens
ccgctttctcttttt

SEQ ID NO: 1446998 - DNA, 15 bp, Homo sapiens
cgctttctctttttt

SEQ ID NO: 1446999 - DNA, 15 bp, Homo sapiens
gctttctctttttta

SEQ ID NO: 1447000 - DNA, 15 bp, Homo sapiens
tttctcttttttaag

SEQ ID NO: 1447001 - DNA, 15 bp, Homo sapiens
ttctcttttttaagt

SEQ ID NO: 1447002 - DNA, 15 bp, Homo sapiens
tctcttttttaagta

SEQ ID NO: 1447003 - DNA, 15 bp, Homo sapiens
ctcttttttaagtat

SEQ ID NO: 1447004 - DNA, 15 bp, Homo sapiens
tcttttttaagtatc

SEQ ID NO: 1447005 - DNA, 15 bp, Homo sapiens
cttttttaagtatca

SEQ ID NO: 1447006 - DNA, 15 bp, Homo sapiens
ttttttaagtatcag

SEQ ID NO: 1447007 - DNA, 15 bp, Homo sapiens
tttttaagtatcaga

SEQ ID NO: 1447008 - DNA, 15 bp, Homo sapiens
ttttaagtatcagat

SEQ ID NO: 1447009 - DNA, 15 bp, Homo sapiens
tttaagtatcagatt

SEQ ID NO: 1447010 - DNA, 15 bp, Homo sapiens
ttaagtatcagatta

SEQ ID NO: 1447011 - DNA, 15 bp, Homo sapiens
taagtatcagattag

SEQ ID NO: 1447012 - DNA, 15 bp, Homo sapiens
aagtatcagattaga

SEQ ID NO: 1447013 - DNA, 15 bp, Homo sapiens
agtatcagattagac

SEQ ID NO: 1447014 - DNA, 15 bp, Homo sapiens
gtatcagattagact

SEQ ID NO: 1447015 - DNA, 15 bp, Homo sapiens
tatcagattagactc

SEQ ID NO: 1447016 - DNA, 15 bp, Homo sapiens
atcagattagactca

SEQ ID NO: 1447017 - DNA, 15 bp, Homo sapiens
tcagattagactcac

SEQ ID NO: 1447018 - DNA, 15 bp, Homo sapiens
cagattagactcaca

SEQ ID NO: 1447019 - DNA, 15 bp, Homo sapiens
agattagactcacag

SEQ ID NO: 1447020 - DNA, 15 bp, Homo sapiens
gattagactcacaga

SEQ ID NO: 1447021 - DNA, 15 bp, Homo sapiens
attagactcacagat

SEQ ID NO: 1447022 - DNA, 15 bp, Homo sapiens
ttagactcacagatt

SEQ ID NO: 1447023 - DNA, 15 bp, Homo sapiens
tagactcacagattt

SEQ ID NO: 1447024 - DNA, 15 bp, Homo sapiens
agactcacagatttt

SEQ ID NO: 1447025 - DNA, 15 bp, Homo sapiens
gactcacagattttt

SEQ ID NO: 1447026 - DNA, 15 bp, Homo sapiens
actcacagattttta

SEQ ID NO: 1447027 - DNA, 15 bp, Homo sapiens
ctcacagatttttaa

SEQ ID NO: 1447028 - DNA, 15 bp, Homo sapiens
tcacagatttttaaa

SEQ ID NO: 1447029 - DNA, 15 bp, Homo sapiens
cacagatttttaaat

SEQ ID NO: 1447030 - DNA, 15 bp, Homo sapiens
acagatttttaaata

SEQ ID NO: 1447031 - DNA, 15 bp, Homo sapiens
cagatttttaaatat

SEQ ID NO: 1447032 - DNA, 15 bp, Homo sapiens
agatttttaaatatt

SEQ ID NO: 1447033 - DNA, 15 bp, Homo sapiens
gatttttaaatattc

SEQ ID NO: 1447034 - DNA, 15 bp, Homo sapiens
atttttaaatattcc

SEQ ID NO: 1447035 - DNA, 15 bp, Homo sapiens
tttttaaatattcca

SEQ ID NO: 1447036 - DNA, 15 bp, Homo sapiens
ttttaaatattccat

SEQ ID NO: 1447037 - DNA, 15 bp, Homo sapiens
tttaaatattccatg

SEQ ID NO: 1447038 - DNA, 15 bp, Homo sapiens
ttaaatattccatgt

SEQ ID NO: 1447039 - DNA, 15 bp, Homo sapiens
taaatattccatgtg

SEQ ID NO: 1447040 - DNA, 15 bp, Homo sapiens
aaatattccatgtgt

SEQ ID NO: 1447041 - DNA, 15 bp, Homo sapiens
aatattccatgtgtt

SEQ ID NO: 1447042 - DNA, 15 bp, Homo sapiens
atattccatgtgttt

SEQ ID NO: 1447043 - DNA, 15 bp, Homo sapiens
tattccatgtgtttt

SEQ ID NO: 1447044 - DNA, 15 bp, Homo sapiens
attccatgtgtttta

SEQ ID NO: 1447045 - DNA, 15 bp, Homo sapiens
ttccatgtgttttag

SEQ ID NO: 1447046 - DNA, 15 bp, Homo sapiens
tccatgtgttttagt

SEQ ID NO: 1447047 - DNA, 15 bp, Homo sapiens
ccatgtgttttagtt

SEQ ID NO: 1447048 - DNA, 15 bp, Homo sapiens
catgtgttttagttg

SEQ ID NO: 1447049 - DNA, 15 bp, Homo sapiens
atgtgttttagttgg

SEQ ID NO: 1447050 - DNA, 15 bp, Homo sapiens
tgtgttttagttgga

SEQ ID NO: 1447051 - DNA, 15 bp, Homo sapiens
gtgttttagttggag

SEQ ID NO: 1447052 - DNA, 15 bp, Homo sapiens
tgttttagttggagt

SEQ ID NO: 1447053 - DNA, 15 bp, Homo sapiens
gttttagttggagtc

SEQ ID NO: 1447054 - DNA, 15 bp, Homo sapiens
ttttagttggagtca

SEQ ID NO: 1447055 - DNA, 15 bp, Homo sapiens
tttagttggagtcat

SEQ ID NO: 1447056 - DNA, 15 bp, Homo sapiens
ttagttggagtcata

SEQ ID NO: 1447057 - DNA, 15 bp, Homo sapiens
tagttggagtcatat

SEQ ID NO: 1447058 - DNA, 15 bp, Homo sapiens
agttggagtcatatt

SEQ ID NO: 1447059 - DNA, 15 bp, Homo sapiens
gttggagtcatattc

SEQ ID NO: 1447060 - DNA, 15 bp, Homo sapiens
ttggagtcatattct

SEQ ID NO: 1447061 - DNA, 15 bp, Homo sapiens
tggagtcatattctt

SEQ ID NO: 1447062 - DNA, 15 bp, Homo sapiens
ggagtcatattcttt

SEQ ID NO: 1447063 - DNA, 15 bp, Homo sapiens
gagtcatattctttt

SEQ ID NO: 1447064 - DNA, 15 bp, Homo sapiens
agtcatattcttttg

SEQ ID NO: 1447065 - DNA, 15 bp, Homo sapiens
gtcatattcttttgt

SEQ ID NO: 1447066 - DNA, 15 bp, Homo sapiens
tcatattcttttgtc

SEQ ID NO: 1447067 - DNA, 15 bp, Homo sapiens
catattcttttgtct

SEQ ID NO: 1447068 - DNA, 15 bp, Homo sapiens
atattcttttgtctc

SEQ ID NO: 1447069 - DNA, 15 bp, Homo sapiens
tattcttttgtctca

SEQ ID NO: 1447070 - DNA, 15 bp, Homo sapiens
attcttttgtctcaa

SEQ ID NO: 1447071 - DNA, 15 bp, Homo sapiens
ttcttttgtctcaac

SEQ ID NO: 1447072 - DNA, 15 bp, Homo sapiens
tcttttgtctcaact

SEQ ID NO: 1447073 - DNA, 15 bp, Homo sapiens
cttttgtctcaactt

SEQ ID NO: 1447074 - DNA, 15 bp, Homo sapiens
ttttgtctcaacttt

SEQ ID NO: 1447075 - DNA, 15 bp, Homo sapiens
tttgtctcaacttta

SEQ ID NO: 1447076 - DNA, 15 bp, Homo sapiens
ttgtctcaactttag

SEQ ID NO: 1447077 - DNA, 15 bp, Homo sapiens
tgtctcaactttagc

SEQ ID NO: 1447078 - DNA, 15 bp, Homo sapiens
gtctcaactttagcc

SEQ ID NO: 1447079 - DNA, 15 bp, Homo sapiens
tctcaactttagcca

SEQ ID NO: 1447080 - DNA, 15 bp, Homo sapiens
ctcaactttagccaa

SEQ ID NO: 1447081 - DNA, 15 bp, Homo sapiens
tcaactttagccaaa

SEQ ID NO: 1447082 - DNA, 15 bp, Homo sapiens
caactttagccaaag

SEQ ID NO: 1447083 - DNA, 15 bp, Homo sapiens
aactttagccaaaga

SEQ ID NO: 1447084 - DNA, 15 bp, Homo sapiens
actttagccaaagag

SEQ ID NO: 1447085 - DNA, 15 bp, Homo sapiens
ctttagccaaagaga

SEQ ID NO: 1447086 - DNA, 15 bp, Homo sapiens
tttagccaaagagag

SEQ ID NO: 1447087 - DNA, 15 bp, Homo sapiens
ttagccaaagagagt

SEQ ID NO: 1447088 - DNA, 15 bp, Homo sapiens
tagccaaagagagtc

SEQ ID NO: 1447089 - DNA, 15 bp, Homo sapiens
agccaaagagagtcc

SEQ ID NO: 1447090 - DNA, 15 bp, Homo sapiens
gccaaagagagtcct

SEQ ID NO: 1447091 - DNA, 15 bp, Homo sapiens
ccaaagagagtcctt

SEQ ID NO: 1447092 - DNA, 15 bp, Homo sapiens
caaagagagtccttt

SEQ ID NO: 1447093 - DNA, 15 bp, Homo sapiens
aaagagagtccttta

SEQ ID NO: 1447094 - DNA, 15 bp, Homo sapiens
aagagagtcctttaa

SEQ ID NO: 1447095 - DNA, 15 bp, Homo sapiens
agagagtcctttaaa

SEQ ID NO: 1447096 - DNA, 15 bp, Homo sapiens
gagagtcctttaaag

SEQ ID NO: 1447097 - DNA, 15 bp, Homo sapiens
agagtcctttaaagt

SEQ ID NO: 1447098 - DNA, 15 bp, Homo sapiens
gagtcctttaaagtt

SEQ ID NO: 1447099 - DNA, 15 bp, Homo sapiens
agtcctttaaagttg

SEQ ID NO: 1447100 - DNA, 15 bp, Homo sapiens
gtcctttaaagttga

SEQ ID NO: 1447101 - DNA, 15 bp, Homo sapiens
tcctttaaagttgac

SEQ ID NO: 1447102 - DNA, 15 bp, Homo sapiens
cctttaaagttgact

SEQ ID NO: 1447103 - DNA, 15 bp, Homo sapiens
ctttaaagttgactc

SEQ ID NO: 1447104 - DNA, 15 bp, Homo sapiens
tttaaagttgactct

SEQ ID NO: 1447105 - DNA, 15 bp, Homo sapiens
ttaaagttgactctt

SEQ ID NO: 1447106 - DNA, 15 bp, Homo sapiens
taaagttgactctta

SEQ ID NO: 1447107 - DNA, 15 bp, Homo sapiens
aaagttgactcttat

SEQ ID NO: 1447108 - DNA, 15 bp, Homo sapiens
aagttgactcttata

SEQ ID NO: 1447109 - DNA, 15 bp, Homo sapiens
agttgactcttatat

SEQ ID NO: 1447110 - DNA, 15 bp, Homo sapiens
gttgactcttatatt

SEQ ID NO: 1447111 - DNA, 15 bp, Homo sapiens
ttgactcttatattg

SEQ ID NO: 1447112 - DNA, 15 bp, Homo sapiens
tgactcttatattgt

SEQ ID NO: 1447113 - DNA, 15 bp, Homo sapiens
gactcttatattgtc

SEQ ID NO: 1447114 - DNA, 15 bp, Homo sapiens
actcttatattgtct

SEQ ID NO: 1447115 - DNA, 15 bp, Homo sapiens
ctcttatattgtctt

SEQ ID NO: 1447116 - DNA, 15 bp, Homo sapiens
tcttatattgtcttg

SEQ ID NO: 1447117 - DNA, 15 bp, Homo sapiens
cttatattgtcttga

SEQ ID NO: 1447118 - DNA, 15 bp, Homo sapiens
ttatattgtcttgac

SEQ ID NO: 1447119 - DNA, 15 bp, Homo sapiens
tatattgtcttgaca

SEQ ID NO: 1447120 - DNA, 15 bp, Homo sapiens
atattgtcttgacaa

SEQ ID NO: 1447121 - DNA, 15 bp, Homo sapiens
tattgtcttgacaaa

SEQ ID NO: 1447122 - DNA, 15 bp, Homo sapiens
attgtcttgacaaaa

SEQ ID NO: 1447123 - DNA, 15 bp, Homo sapiens
ttgtcttgacaaaaa

SEQ ID NO: 1447124 - DNA, 15 bp, Homo sapiens
tgtcttgacaaaaat

SEQ ID NO: 1447125 - DNA, 15 bp, Homo sapiens
gtcttgacaaaaatt

SEQ ID NO: 1447126 - DNA, 15 bp, Homo sapiens
tcttgacaaaaattc

SEQ ID NO: 1447127 - DNA, 15 bp, Homo sapiens
cttgacaaaaattca

SEQ ID NO: 1447128 - DNA, 15 bp, Homo sapiens
ttgacaaaaattcat

SEQ ID NO: 1447129 - DNA, 15 bp, Homo sapiens
tgacaaaaattcatt

SEQ ID NO: 1447130 - DNA, 15 bp, Homo sapiens
gacaaaaattcatta

SEQ ID NO: 1447131 - DNA, 15 bp, Homo sapiens
acaaaaattcattag

SEQ ID NO: 1447132 - DNA, 15 bp, Homo sapiens
caaaaattcattagt

SEQ ID NO: 1447133 - DNA, 15 bp, Homo sapiens
aaaaattcattagtc

SEQ ID NO: 1447134 - DNA, 15 bp, Homo sapiens
aaaattcattagtct

SEQ ID NO: 1447135 - DNA, 15 bp, Homo sapiens
aaattcattagtctt

SEQ ID NO: 1447136 - DNA, 15 bp, Homo sapiens
aattcattagtcttt

SEQ ID NO: 1447137 - DNA, 15 bp, Homo sapiens
attcattagtctttt

SEQ ID NO: 1447138 - DNA, 15 bp, Homo sapiens
ttcattagtcttttg

SEQ ID NO: 1447139 - DNA, 15 bp, Homo sapiens
tcattagtcttttga

SEQ ID NO: 1447140 - DNA, 15 bp, Homo sapiens
cattagtcttttgaa

SEQ ID NO: 1447141 - DNA, 15 bp, Homo sapiens
attagtcttttgaac

SEQ ID NO: 1447142 - DNA, 15 bp, Homo sapiens
ttagtcttttgaacg

SEQ ID NO: 1447143 - DNA, 15 bp, Homo sapiens
tagtcttttgaacga

SEQ ID NO: 1447144 - DNA, 15 bp, Homo sapiens
agtcttttgaacgaa

SEQ ID NO: 1447145 - DNA, 15 bp, Homo sapiens
gtcttttgaacgaag

SEQ ID NO: 1447146 - DNA, 15 bp, Homo sapiens
tcttttgaacgaagc

SEQ ID NO: 1447147 - DNA, 15 bp, Homo sapiens
cttttgaacgaagcc

SEQ ID NO: 1447148 - DNA, 15 bp, Homo sapiens
ttttgaacgaagcct

SEQ ID NO: 1447149 - DNA, 15 bp, Homo sapiens
tttgaacgaagcctc

SEQ ID NO: 1447150 - DNA, 15 bp, Homo sapiens
ttgaacgaagcctca

SEQ ID NO: 1447151 - DNA, 15 bp, Homo sapiens
tgaacgaagcctcaa

SEQ ID NO: 1447152 - DNA, 15 bp, Homo sapiens
gaacgaagcctcaaa

SEQ ID NO: 1447153 - DNA, 15 bp, Homo sapiens
aacgaagcctcaaag

SEQ ID NO: 1447154 - DNA, 15 bp, Homo sapiens
acgaagcctcaaagc

SEQ ID NO: 1447155 - DNA, 15 bp, Homo sapiens
cgaagcctcaaagct

SEQ ID NO: 1447156 - DNA, 15 bp, Homo sapiens
gaagcctcaaagctt

SEQ ID NO: 1447157 - DNA, 15 bp, Homo sapiens
aagcctcaaagcttg

SEQ ID NO: 1447158 - DNA, 15 bp, Homo sapiens
agcctcaaagcttga

SEQ ID NO: 1447159 - DNA, 15 bp, Homo sapiens
gcctcaaagcttgac

SEQ ID NO: 1447160 - DNA, 15 bp, Homo sapiens
cctcaaagcttgact

SEQ ID NO: 1447161 - DNA, 15 bp, Homo sapiens
ctcaaagcttgactt

SEQ ID NO: 1447162 - DNA, 15 bp, Homo sapiens
tcaaagcttgacttg

SEQ ID NO: 1447163 - DNA, 15 bp, Homo sapiens
caaagcttgacttgt

SEQ ID NO: 1447164 - DNA, 15 bp, Homo sapiens
aaagcttgacttgtt

SEQ ID NO: 1447165 - DNA, 15 bp, Homo sapiens
aagcttgacttgttt

SEQ ID NO: 1447166 - DNA, 15 bp, Homo sapiens
agcttgacttgtttt

SEQ ID NO: 1447167 - DNA, 15 bp, Homo sapiens
gcttgacttgttttc

SEQ ID NO: 1447168 - DNA, 15 bp, Homo sapiens
cttgacttgttttct

SEQ ID NO: 1447169 - DNA, 15 bp, Homo sapiens
ttgacttgttttcta

SEQ ID NO: 1447170 - DNA, 15 bp, Homo sapiens
tgacttgttttctag

SEQ ID NO: 1447171 - DNA, 15 bp, Homo sapiens
gacttgttttctagc

SEQ ID NO: 1447172 - DNA, 15 bp, Homo sapiens
acttgttttctagca

SEQ ID NO: 1447173 - DNA, 15 bp, Homo sapiens
cttgttttctagcat

SEQ ID NO: 1447174 - DNA, 15 bp, Homo sapiens
ttgttttctagcata

SEQ ID NO: 1447175 - DNA, 15 bp, Homo sapiens
tgttttctagcataa

SEQ ID NO: 1447176 - DNA, 15 bp, Homo sapiens
gttttctagcataag

SEQ ID NO: 1447177 - DNA, 15 bp, Homo sapiens
ttttctagcataaga

SEQ ID NO: 1447178 - DNA, 15 bp, Homo sapiens
tttctagcataagat

SEQ ID NO: 1447179 - DNA, 15 bp, Homo sapiens
ttctagcataagatg

SEQ ID NO: 1447180 - DNA, 15 bp, Homo sapiens
tctagcataagatgt

SEQ ID NO: 1447181 - DNA, 15 bp, Homo sapiens
ctagcataagatgtc

SEQ ID NO: 1447182 - DNA, 15 bp, Homo sapiens
tagcataagatgtct

SEQ ID NO: 1447183 - DNA, 15 bp, Homo sapiens
agcataagatgtctt

SEQ ID NO: 1447184 - DNA, 15 bp, Homo sapiens
gcataagatgtctta

SEQ ID NO: 1447185 - DNA, 15 bp, Homo sapiens
cataagatgtcttag

SEQ ID NO: 1447186 - DNA, 15 bp, Homo sapiens
ataagatgtcttaga

SEQ ID NO: 1447187 - DNA, 15 bp, Homo sapiens
taagatgtcttagac

SEQ ID NO: 1447188 - DNA, 15 bp, Homo sapiens
aagatgtcttagact

SEQ ID NO: 1447189 - DNA, 15 bp, Homo sapiens
agatgtcttagactt

SEQ ID NO: 1447190 - DNA, 15 bp, Homo sapiens
gatgtcttagactta

SEQ ID NO: 1447191 - DNA, 15 bp, Homo sapiens
atgtcttagacttac

SEQ ID NO: 1447192 - DNA, 15 bp, Homo sapiens
tgtcttagacttacc

SEQ ID NO: 1447193 - DNA, 15 bp, Homo sapiens
gtcttagacttacct

SEQ ID NO: 1447194 - DNA, 15 bp, Homo sapiens
tcttagacttaccta

SEQ ID NO: 1447195 - DNA, 15 bp, Homo sapiens
cttagacttacctac

SEQ ID NO: 1447196 - DNA, 15 bp, Homo sapiens
ttagacttacctaca

SEQ ID NO: 1447197 - DNA, 15 bp, Homo sapiens
tagacttacctacat

SEQ ID NO: 1447198 - DNA, 15 bp, Homo sapiens
agacttacctacata

SEQ ID NO: 1447199 - DNA, 15 bp, Homo sapiens
gacttacctacatac

SEQ ID NO: 1447200 - DNA, 15 bp, Homo sapiens
acttacctacatact

SEQ ID NO: 1447201 - DNA, 15 bp, Homo sapiens
cttacctacatactt

SEQ ID NO: 1447202 - DNA, 15 bp, Homo sapiens
ttacctacatacttc

SEQ ID NO: 1447203 - DNA, 15 bp, Homo sapiens
tacctacatacttca

SEQ ID NO: 1447204 - DNA, 15 bp, Homo sapiens
acctacatacttcat

SEQ ID NO: 1447205 - DNA, 15 bp, Homo sapiens
cctacatacttcatg

SEQ ID NO: 1447206 - DNA, 15 bp, Homo sapiens
ctacatacttcatgc

SEQ ID NO: 1447207 - DNA, 15 bp, Homo sapiens
tacatacttcatgcc

SEQ ID NO: 1447208 - DNA, 15 bp, Homo sapiens
acatacttcatgccc

SEQ ID NO: 1447209 - DNA, 15 bp, Homo sapiens
catacttcatgccca

SEQ ID NO: 1447210 - DNA, 15 bp, Homo sapiens
atacttcatgcccat

SEQ ID NO: 1447211 - DNA, 15 bp, Homo sapiens
tacttcatgcccata

SEQ ID NO: 1447212 - DNA, 15 bp, Homo sapiens
acttcatgcccatac

SEQ ID NO: 1447213 - DNA, 15 bp, Homo sapiens
cttcatgcccatact

SEQ ID NO: 1447214 - DNA, 15 bp, Homo sapiens
ttcatgcccatactt

SEQ ID NO: 1447215 - DNA, 15 bp, Homo sapiens
tcatgcccatacttg

SEQ ID NO: 1447216 - DNA, 15 bp, Homo sapiens
catgcccatacttgg

SEQ ID NO: 1447217 - DNA, 15 bp, Homo sapiens
atgcccatacttgga

SEQ ID NO: 1447218 - DNA, 15 bp, Homo sapiens
tgcccatacttggaa

SEQ ID NO: 1447219 - DNA, 15 bp, Homo sapiens
gcccatacttggaat

SEQ ID NO: 1447220 - DNA, 15 bp, Homo sapiens
cccatacttggaata

SEQ ID NO: 1447221 - DNA, 15 bp, Homo sapiens
ccatacttggaataa

SEQ ID NO: 1447222 - DNA, 15 bp, Homo sapiens
catacttggaataaa

SEQ ID NO: 1447223 - DNA, 15 bp, Homo sapiens
atacttggaataaac

SEQ ID NO: 1447224 - DNA, 15 bp, Homo sapiens
tacttggaataaacc

SEQ ID NO: 1447225 - DNA, 15 bp, Homo sapiens
acttggaataaacca

SEQ ID NO: 1447226 - DNA, 15 bp, Homo sapiens
cttggaataaaccat

SEQ ID NO: 1447227 - DNA, 15 bp, Homo sapiens
ttggaataaaccatt

SEQ ID NO: 1447228 - DNA, 15 bp, Homo sapiens
tggaataaaccattt

SEQ ID NO: 1447229 - DNA, 15 bp, Homo sapiens
ggaataaaccatttc

SEQ ID NO: 1447230 - DNA, 15 bp, Homo sapiens
gaataaaccatttct

SEQ ID NO: 1447231 - DNA, 15 bp, Homo sapiens
aataaaccatttctt

SEQ ID NO: 1447232 - DNA, 15 bp, Homo sapiens
ataaaccatttcttt

SEQ ID NO: 1447233 - DNA, 15 bp, Homo sapiens
taaaccatttcttta

SEQ ID NO: 1447234 - DNA, 15 bp, Homo sapiens
aaaccatttctttaa

SEQ ID NO: 1447235 - DNA, 15 bp, Homo sapiens
aaccatttctttaaa

SEQ ID NO: 1447236 - DNA, 15 bp, Homo sapiens
accatttctttaaag

SEQ ID NO: 1447237 - DNA, 15 bp, Homo sapiens
ccatttctttaaaga

SEQ ID NO: 1447238 - DNA, 15 bp, Homo sapiens
catttctttaaagag

SEQ ID NO: 1447239 - DNA, 15 bp, Homo sapiens
atttctttaaagagc

SEQ ID NO: 1447240 - DNA, 15 bp, Homo sapiens
tttctttaaagagcc

SEQ ID NO: 1447241 - DNA, 15 bp, Homo sapiens
ttctttaaagagccc

SEQ ID NO: 1447242 - DNA, 15 bp, Homo sapiens
tctttaaagagccca

SEQ ID NO: 1447243 - DNA, 15 bp, Homo sapiens
ctttaaagagcccag

SEQ ID NO: 1447244 - DNA, 15 bp, Homo sapiens
tttaaagagcccagg

SEQ ID NO: 1447245 - DNA, 15 bp, Homo sapiens
ttaaagagcccaggt

SEQ ID NO: 1447246 - DNA, 15 bp, Homo sapiens
taaagagcccaggtt

SEQ ID NO: 1447247 - DNA, 15 bp, Homo sapiens
aaagagcccaggttc

SEQ ID NO: 1447248 - DNA, 15 bp, Homo sapiens
aagagcccaggttcc

SEQ ID NO: 1447249 - DNA, 15 bp, Homo sapiens
agagcccaggttcct

SEQ ID NO: 1447250 - DNA, 15 bp, Homo sapiens
gagcccaggttcctt

SEQ ID NO: 1447251 - DNA, 15 bp, Homo sapiens
agcccaggttccttt

SEQ ID NO: 1447252 - DNA, 15 bp, Homo sapiens
gcccaggttcctttt

SEQ ID NO: 1447253 - DNA, 15 bp, Homo sapiens
cccaggttcctttta

SEQ ID NO: 1447254 - DNA, 15 bp, Homo sapiens
ccaggttccttttag

SEQ ID NO: 1447255 - DNA, 15 bp, Homo sapiens
caggttccttttagt

SEQ ID NO: 1447256 - DNA, 15 bp, Homo sapiens
aggttccttttagtg

SEQ ID NO: 1447257 - DNA, 15 bp, Homo sapiens
ggttccttttagtgg

SEQ ID NO: 1447258 - DNA, 15 bp, Homo sapiens
gttccttttagtggg

SEQ ID NO: 1447259 - DNA, 15 bp, Homo sapiens
ttccttttagtgggg

SEQ ID NO: 1447260 - DNA, 15 bp, Homo sapiens
tccttttagtgggga

SEQ ID NO: 1447261 - DNA, 15 bp, Homo sapiens
ccttttagtggggaa

SEQ ID NO: 1447262 - DNA, 15 bp, Homo sapiens
cttttagtggggaag

SEQ ID NO: 1447263 - DNA, 15 bp, Homo sapiens
ttttagtggggaagg

SEQ ID NO: 1447264 - DNA, 15 bp, Homo sapiens
tttagtggggaaggc

SEQ ID NO: 1447265 - DNA, 15 bp, Homo sapiens
ttagtggggaaggca

SEQ ID NO: 1447266 - DNA, 15 bp, Homo sapiens
tagtggggaaggcat

SEQ ID NO: 1447267 - DNA, 15 bp, Homo sapiens
agtggggaaggcatt

SEQ ID NO: 1447268 - DNA, 15 bp, Homo sapiens
gtggggaaggcattt

SEQ ID NO: 1447269 - DNA, 15 bp, Homo sapiens
tggggaaggcattta

SEQ ID NO: 1447270 - DNA, 15 bp, Homo sapiens
ggggaaggcatttag

SEQ ID NO: 1447271 - DNA, 15 bp, Homo sapiens
gggaaggcatttaga

SEQ ID NO: 1447272 - DNA, 15 bp, Homo sapiens
ggaaggcatttagat

SEQ ID NO: 1447273 - DNA, 15 bp, Homo sapiens
gaaggcatttagata

SEQ ID NO: 1447274 - DNA, 15 bp, Homo sapiens
aaggcatttagatac

SEQ ID NO: 1447275 - DNA, 15 bp, Homo sapiens
aggcatttagatacc

SEQ ID NO: 1447276 - DNA, 15 bp, Homo sapiens
ggcatttagatacca

SEQ ID NO: 1447277 - DNA, 15 bp, Homo sapiens
gcatttagataccaa

SEQ ID NO: 1447278 - DNA, 15 bp, Homo sapiens
catttagataccaaa

SEQ ID NO: 1447279 - DNA, 15 bp, Homo sapiens
atttagataccaaaa

SEQ ID NO: 1447280 - DNA, 15 bp, Homo sapiens
tttagataccaaaaa

SEQ ID NO: 1447281 - DNA, 15 bp, Homo sapiens
ttagataccaaaaac

SEQ ID NO: 1447282 - DNA, 15 bp, Homo sapiens
tagataccaaaaact

SEQ ID NO: 1447283 - DNA, 15 bp, Homo sapiens
agataccaaaaactg

SEQ ID NO: 1447284 - DNA, 15 bp, Homo sapiens
gataccaaaaactgg

SEQ ID NO: 1447285 - DNA, 15 bp, Homo sapiens
ataccaaaaactggc

SEQ ID NO: 1447286 - DNA, 15 bp, Homo sapiens
taccaaaaactggcc

SEQ ID NO: 1447287 - DNA, 15 bp, Homo sapiens
accaaaaactggcca

SEQ ID NO: 1447288 - DNA, 15 bp, Homo sapiens
ccaaaaactggccac

SEQ ID NO: 1447289 - DNA, 15 bp, Homo sapiens
caaaaactggccact

SEQ ID NO: 1447290 - DNA, 15 bp, Homo sapiens
aaaaactggccactg

SEQ ID NO: 1447291 - DNA, 15 bp, Homo sapiens
aaaactggccactgg

SEQ ID NO: 1447292 - DNA, 15 bp, Homo sapiens
aaactggccactggg

SEQ ID NO: 1447293 - DNA, 15 bp, Homo sapiens
aactggccactgggc

SEQ ID NO: 1447294 - DNA, 15 bp, Homo sapiens
actggccactgggca

SEQ ID NO: 1447295 - DNA, 15 bp, Homo sapiens
ctggccactgggcat

SEQ ID NO: 1447296 - DNA, 15 bp, Homo sapiens
tggccactgggcatc

SEQ ID NO: 1447297 - DNA, 15 bp, Homo sapiens
ggccactgggcatca

SEQ ID NO: 1447298 - DNA, 15 bp, Homo sapiens
gccactgggcatcat

SEQ ID NO: 1447299 - DNA, 15 bp, Homo sapiens
ccactgggcatcatt

SEQ ID NO: 1447300 - DNA, 15 bp, Homo sapiens
cactgggcatcattg

SEQ ID NO: 1447301 - DNA, 15 bp, Homo sapiens
actgggcatcattgc

SEQ ID NO: 1447302 - DNA, 15 bp, Homo sapiens
ctgggcatcattgct

SEQ ID NO: 1447303 - DNA, 15 bp, Homo sapiens
tgggcatcattgctc

SEQ ID NO: 1447304 - DNA, 15 bp, Homo sapiens
gggcatcattgctct

SEQ ID NO: 1447305 - DNA, 15 bp, Homo sapiens
ggcatcattgctctc

SEQ ID NO: 1447306 - DNA, 15 bp, Homo sapiens
gcatcattgctctca

SEQ ID NO: 1447307 - DNA, 15 bp, Homo sapiens
catcattgctctcag

SEQ ID NO: 1447308 - DNA, 15 bp, Homo sapiens
atcattgctctcaga

SEQ ID NO: 1447309 - DNA, 15 bp, Homo sapiens
tcattgctctcagag

SEQ ID NO: 1447310 - DNA, 15 bp, Homo sapiens
cattgctctcagagt

SEQ ID NO: 1447311 - DNA, 15 bp, Homo sapiens
attgctctcagagta

SEQ ID NO: 1447312 - DNA, 15 bp, Homo sapiens
ttgctctcagagtat

SEQ ID NO: 1447313 - DNA, 15 bp, Homo sapiens
tgctctcagagtatc

SEQ ID NO: 1447314 - DNA, 15 bp, Homo sapiens
gctctcagagtatca

SEQ ID NO: 1447315 - DNA, 15 bp, Homo sapiens
ctctcagagtatcat

SEQ ID NO: 1447316 - DNA, 15 bp, Homo sapiens
tctcagagtatcatt

SEQ ID NO: 1447317 - DNA, 15 bp, Homo sapiens
ctcagagtatcattg

SEQ ID NO: 1447318 - DNA, 15 bp, Homo sapiens
tcagagtatcattgc

SEQ ID NO: 1447319 - DNA, 15 bp, Homo sapiens
cagagtatcattgcc

SEQ ID NO: 1447320 - DNA, 15 bp, Homo sapiens
agagtatcattgcca

SEQ ID NO: 1447321 - DNA, 15 bp, Homo sapiens
gagtatcattgccac

SEQ ID NO: 1447322 - DNA, 15 bp, Homo sapiens
agtatcattgccact

SEQ ID NO: 1447323 - DNA, 15 bp, Homo sapiens
gtatcattgccacta

SEQ ID NO: 1447324 - DNA, 15 bp, Homo sapiens
tatcattgccactag

SEQ ID NO: 1447325 - DNA, 15 bp, Homo sapiens
atcattgccactagt

SEQ ID NO: 1447326 - DNA, 15 bp, Homo sapiens
tcattgccactagtc

SEQ ID NO: 1447327 - DNA, 15 bp, Homo sapiens
cattgccactagtct

SEQ ID NO: 1447328 - DNA, 15 bp, Homo sapiens
attgccactagtctc

SEQ ID NO: 1447329 - DNA, 15 bp, Homo sapiens
ttgccactagtctct

SEQ ID NO: 1447330 - DNA, 15 bp, Homo sapiens
tgccactagtctctc

SEQ ID NO: 1447331 - DNA, 15 bp, Homo sapiens
gccactagtctctca

SEQ ID NO: 1447332 - DNA, 15 bp, Homo sapiens
ccactagtctctcag

SEQ ID NO: 1447333 - DNA, 15 bp, Homo sapiens
cactagtctctcagt

SEQ ID NO: 1447334 - DNA, 15 bp, Homo sapiens
actagtctctcagta

SEQ ID NO: 1447335 - DNA, 15 bp, Homo sapiens
ctagtctctcagtag

SEQ ID NO: 1447336 - DNA, 15 bp, Homo sapiens
tagtctctcagtaga

SEQ ID NO: 1447337 - DNA, 15 bp, Homo sapiens
agtctctcagtagac

SEQ ID NO: 1447338 - DNA, 15 bp, Homo sapiens
gtctctcagtagaca

SEQ ID NO: 1447339 - DNA, 15 bp, Homo sapiens
tctctcagtagacaa

SEQ ID NO: 1447340 - DNA, 15 bp, Homo sapiens
ctctcagtagacaag

SEQ ID NO: 1447341 - DNA, 15 bp, Homo sapiens
tctcagtagacaagt

SEQ ID NO: 1447342 - DNA, 15 bp, Homo sapiens
ctcagtagacaagtt

SEQ ID NO: 1447343 - DNA, 15 bp, Homo sapiens
tcagtagacaagtta

SEQ ID NO: 1447344 - DNA, 15 bp, Homo sapiens
cagtagacaagttag

SEQ ID NO: 1447345 - DNA, 15 bp, Homo sapiens
agtagacaagttaga

SEQ ID NO: 1447346 - DNA, 15 bp, Homo sapiens
gtagacaagttagaa

SEQ ID NO: 1447347 - DNA, 15 bp, Homo sapiens
tagacaagttagaaa

SEQ ID NO: 1447348 - DNA, 15 bp, Homo sapiens
agacaagttagaaaa

SEQ ID NO: 1447349 - DNA, 15 bp, Homo sapiens
gacaagttagaaaaa

SEQ ID NO: 1447350 - DNA, 15 bp, Homo sapiens
acaagttagaaaaat

SEQ ID NO: 1447351 - DNA, 15 bp, Homo sapiens
caagttagaaaaata

SEQ ID NO: 1447352 - DNA, 15 bp, Homo sapiens
aagttagaaaaatat

SEQ ID NO: 1447353 - DNA, 15 bp, Homo sapiens
agttagaaaaatatg

SEQ ID NO: 1447354 - DNA, 15 bp, Homo sapiens
gttagaaaaatatgt

SEQ ID NO: 1447355 - DNA, 15 bp, Homo sapiens
ttagaaaaatatgta

SEQ ID NO: 1447356 - DNA, 15 bp, Homo sapiens
tagaaaaatatgtat

SEQ ID NO: 1447357 - DNA, 15 bp, Homo sapiens
agaaaaatatgtata

SEQ ID NO: 1447358 - DNA, 15 bp, Homo sapiens
gaaaaatatgtatat

SEQ ID NO: 1447359 - DNA, 15 bp, Homo sapiens
aaaaatatgtatata

SEQ ID NO: 1447360 - DNA, 15 bp, Homo sapiens
aaaatatgtatatat

SEQ ID NO: 1447361 - DNA, 15 bp, Homo sapiens
aaatatgtatatatt

SEQ ID NO: 1447362 - DNA, 15 bp, Homo sapiens
aatatgtatatattt

SEQ ID NO: 1447363 - DNA, 15 bp, Homo sapiens
atatgtatatattta

SEQ ID NO: 1447364 - DNA, 15 bp, Homo sapiens
tatgtatatatttaa

SEQ ID NO: 1447365 - DNA, 15 bp, Homo sapiens
atgtatatatttaaa

SEQ ID NO: 1447366 - DNA, 15 bp, Homo sapiens
tgtatatatttaaac

SEQ ID NO: 1447367 - DNA, 15 bp, Homo sapiens
gtatatatttaaacc

SEQ ID NO: 1447368 - DNA, 15 bp, Homo sapiens
tatatatttaaacca

SEQ ID NO: 1447369 - DNA, 15 bp, Homo sapiens
atatatttaaaccat

SEQ ID NO: 1447370 - DNA, 15 bp, Homo sapiens
tatatttaaaccatg

SEQ ID NO: 1447371 - DNA, 15 bp, Homo sapiens
atatttaaaccatga

SEQ ID NO: 1447372 - DNA, 15 bp, Homo sapiens
tatttaaaccatgag

SEQ ID NO: 1447373 - DNA, 15 bp, Homo sapiens
atttaaaccatgagt

SEQ ID NO: 1447374 - DNA, 15 bp, Homo sapiens
tttaaaccatgagtt

SEQ ID NO: 1447375 - DNA, 15 bp, Homo sapiens
ttaaaccatgagttc

SEQ ID NO: 1447376 - DNA, 15 bp, Homo sapiens
taaaccatgagttca

SEQ ID NO: 1447377 - DNA, 15 bp, Homo sapiens
aaaccatgagttcat

SEQ ID NO: 1447378 - DNA, 15 bp, Homo sapiens
aaccatgagttcata

SEQ ID NO: 1447379 - DNA, 15 bp, Homo sapiens
accatgagttcatat

SEQ ID NO: 1447380 - DNA, 15 bp, Homo sapiens
ccatgagttcatatt

SEQ ID NO: 1447381 - DNA, 15 bp, Homo sapiens
catgagttcatattg

SEQ ID NO: 1447382 - DNA, 15 bp, Homo sapiens
atgagttcatattgt

SEQ ID NO: 1447383 - DNA, 15 bp, Homo sapiens
tgagttcatattgtt

SEQ ID NO: 1447384 - DNA, 15 bp, Homo sapiens
gagttcatattgtta

SEQ ID NO: 1447385 - DNA, 15 bp, Homo sapiens
agttcatattgttat

SEQ ID NO: 1447386 - DNA, 15 bp, Homo sapiens
gttcatattgttatt

SEQ ID NO: 1447387 - DNA, 15 bp, Homo sapiens
ttcatattgttattt

SEQ ID NO: 1447388 - DNA, 15 bp, Homo sapiens
tcatattgttatttc

SEQ ID NO: 1447389 - DNA, 15 bp, Homo sapiens
catattgttatttcc

SEQ ID NO: 1447390 - DNA, 15 bp, Homo sapiens
atattgttatttcca

SEQ ID NO: 1447391 - DNA, 15 bp, Homo sapiens
tattgttatttccag

SEQ ID NO: 1447392 - DNA, 15 bp, Homo sapiens
attgttatttccagt

SEQ ID NO: 1447393 - DNA, 15 bp, Homo sapiens
ttgttatttccagtt

SEQ ID NO: 1447394 - DNA, 15 bp, Homo sapiens
tgttatttccagttt

SEQ ID NO: 1447395 - DNA, 15 bp, Homo sapiens
gttatttccagttta

SEQ ID NO: 1447396 - DNA, 15 bp, Homo sapiens
ttatttccagtttaa

SEQ ID NO: 1447397 - DNA, 15 bp, Homo sapiens
tatttccagtttaat

SEQ ID NO: 1447398 - DNA, 15 bp, Homo sapiens
atttccagtttaatt

SEQ ID NO: 1447399 - DNA, 15 bp, Homo sapiens
tttccagtttaatta

SEQ ID NO: 1447400 - DNA, 15 bp, Homo sapiens
ttccagtttaattat

SEQ ID NO: 1447401 - DNA, 15 bp, Homo sapiens
tccagtttaattata

SEQ ID NO: 1447402 - DNA, 15 bp, Homo sapiens
ccagtttaattataa

SEQ ID NO: 1447403 - DNA, 15 bp, Homo sapiens
cagtttaattataac

SEQ ID NO: 1447404 - DNA, 15 bp, Homo sapiens
agtttaattataaca

SEQ ID NO: 1447405 - DNA, 15 bp, Homo sapiens
gtttaattataacat

SEQ ID NO: 1447406 - DNA, 15 bp, Homo sapiens
tttaattataacatt

SEQ ID NO: 1447407 - DNA, 15 bp, Homo sapiens
ttaattataacatta

SEQ ID NO: 1447408 - DNA, 15 bp, Homo sapiens
taattataacattat

SEQ ID NO: 1447409 - DNA, 15 bp, Homo sapiens
aattataacattatg

SEQ ID NO: 1447410 - DNA, 15 bp, Homo sapiens
attataacattatgg

SEQ ID NO: 1447411 - DNA, 15 bp, Homo sapiens
ttataacattatggg

SEQ ID NO: 1447412 - DNA, 15 bp, Homo sapiens
tataacattatgggg

SEQ ID NO: 1447413 - DNA, 15 bp, Homo sapiens
ataacattatggggt

SEQ ID NO: 1447414 - DNA, 15 bp, Homo sapiens
taacattatggggta

SEQ ID NO: 1447415 - DNA, 15 bp, Homo sapiens
aacattatggggtaa

SEQ ID NO: 1447416 - DNA, 15 bp, Homo sapiens
acattatggggtaag

SEQ ID NO: 1447417 - DNA, 15 bp, Homo sapiens
cattatggggtaagt

SEQ ID NO: 1447418 - DNA, 15 bp, Homo sapiens
attatggggtaagta

SEQ ID NO: 1447419 - DNA, 15 bp, Homo sapiens
ttatggggtaagtaa

SEQ ID NO: 1447420 - DNA, 15 bp, Homo sapiens
tatggggtaagtaaa

SEQ ID NO: 1447421 - DNA, 15 bp, Homo sapiens
atggggtaagtaaat

SEQ ID NO: 1447422 - DNA, 15 bp, Homo sapiens
tggggtaagtaaata

SEQ ID NO: 1447423 - DNA, 15 bp, Homo sapiens
ggggtaagtaaatag

SEQ ID NO: 1447424 - DNA, 15 bp, Homo sapiens
gggtaagtaaatagt

SEQ ID NO: 1447425 - DNA, 15 bp, Homo sapiens
ggtaagtaaatagta

SEQ ID NO: 1447426 - DNA, 15 bp, Homo sapiens
gtaagtaaatagtat

SEQ ID NO: 1447427 - DNA, 15 bp, Homo sapiens
taagtaaatagtatc

SEQ ID NO: 1447428 - DNA, 15 bp, Homo sapiens
aagtaaatagtatcg

SEQ ID NO: 1447429 - DNA, 15 bp, Homo sapiens
agtaaatagtatcgg

SEQ ID NO: 1447430 - DNA, 15 bp, Homo sapiens
gtaaatagtatcgga

SEQ ID NO: 1447431 - DNA, 15 bp, Homo sapiens
taaatagtatcggat

SEQ ID NO: 1447432 - DNA, 15 bp, Homo sapiens
aaatagtatcggatt

SEQ ID NO: 1447433 - DNA, 15 bp, Homo sapiens
aatagtatcggattt

SEQ ID NO: 1447434 - DNA, 15 bp, Homo sapiens
atagtatcggatttt

SEQ ID NO: 1447435 - DNA, 15 bp, Homo sapiens
tagtatcggattttt

SEQ ID NO: 1447436 - DNA, 15 bp, Homo sapiens
agtatcggattttta

SEQ ID NO: 1447437 - DNA, 15 bp, Homo sapiens
gtatcggatttttac

SEQ ID NO: 1447438 - DNA, 15 bp, Homo sapiens
tatcggatttttact

SEQ ID NO: 1447439 - DNA, 15 bp, Homo sapiens
atcggatttttacta

SEQ ID NO: 1447440 - DNA, 15 bp, Homo sapiens
tcggatttttactaa

SEQ ID NO: 1447441 - DNA, 15 bp, Homo sapiens
cggatttttactaag

SEQ ID NO: 1447442 - DNA, 15 bp, Homo sapiens
ggatttttactaagc

SEQ ID NO: 1447443 - DNA, 15 bp, Homo sapiens
gatttttactaagct

SEQ ID NO: 1447444 - DNA, 15 bp, Homo sapiens
atttttactaagctt

SEQ ID NO: 1447445 - DNA, 15 bp, Homo sapiens
tttttactaagcttc

SEQ ID NO: 1447446 - DNA, 15 bp, Homo sapiens
ttttactaagcttct

SEQ ID NO: 1447447 - DNA, 15 bp, Homo sapiens
tttactaagcttctt

SEQ ID NO: 1447448 - DNA, 15 bp, Homo sapiens
ttactaagcttcttt

SEQ ID NO: 1447449 - DNA, 15 bp, Homo sapiens
tactaagcttctttg

SEQ ID NO: 1447450 - DNA, 15 bp, Homo sapiens
actaagcttctttga

SEQ ID NO: 1447451 - DNA, 15 bp, Homo sapiens
ctaagcttctttgat

SEQ ID NO: 1447452 - DNA, 15 bp, Homo sapiens
taagcttctttgatt

SEQ ID NO: 1447453 - DNA, 15 bp, Homo sapiens
aagcttctttgattt

SEQ ID NO: 1447454 - DNA, 15 bp, Homo sapiens
agcttctttgatttt

SEQ ID NO: 1447455 - DNA, 15 bp, Homo sapiens
gcttctttgattttg

SEQ ID NO: 1447456 - DNA, 15 bp, Homo sapiens
cttctttgattttgc

SEQ ID NO: 1447457 - DNA, 15 bp, Homo sapiens
ttctttgattttgca

SEQ ID NO: 1447458 - DNA, 15 bp, Homo sapiens
tctttgattttgcac

SEQ ID NO: 1447459 - DNA, 15 bp, Homo sapiens
ctttgattttgcact

SEQ ID NO: 1447460 - DNA, 15 bp, Homo sapiens
tttgattttgcactt

SEQ ID NO: 1447461 - DNA, 15 bp, Homo sapiens
ttgattttgcacttg

SEQ ID NO: 1447462 - DNA, 15 bp, Homo sapiens
tgattttgcacttgt

SEQ ID NO: 1447463 - DNA, 15 bp, Homo sapiens
gattttgcacttgta

SEQ ID NO: 1447464 - DNA, 15 bp, Homo sapiens
attttgcacttgtat

SEQ ID NO: 1447465 - DNA, 15 bp, Homo sapiens
ttttgcacttgtatt

SEQ ID NO: 1447466 - DNA, 15 bp, Homo sapiens
tttgcacttgtattt

SEQ ID NO: 1447467 - DNA, 15 bp, Homo sapiens
ttgcacttgtatttt

SEQ ID NO: 1447468 - DNA, 15 bp, Homo sapiens
tgcacttgtattttt

SEQ ID NO: 1447469 - DNA, 15 bp, Homo sapiens
gcacttgtatttttt

SEQ ID NO: 1447470 - DNA, 15 bp, Homo sapiens
cacttgtattttttt

SEQ ID NO: 1447471 - DNA, 15 bp, Homo sapiens
acttgtatttttttc

SEQ ID NO: 1447472 - DNA, 15 bp, Homo sapiens
cttgtatttttttct

SEQ ID NO: 1447473 - DNA, 15 bp, Homo sapiens
ttgtatttttttctt

SEQ ID NO: 1447474 - DNA, 15 bp, Homo sapiens
tgtatttttttctta

SEQ ID NO: 1447475 - DNA, 15 bp, Homo sapiens
gtatttttttcttac

SEQ ID NO: 1447476 - DNA, 15 bp, Homo sapiens
tatttttttcttaca

SEQ ID NO: 1447477 - DNA, 15 bp, Homo sapiens
atttttttcttacat

SEQ ID NO: 1447478 - DNA, 15 bp, Homo sapiens
tttttttcttacata

SEQ ID NO: 1447479 - DNA, 15 bp, Homo sapiens
ttttttcttacatag

SEQ ID NO: 1447480 - DNA, 15 bp, Homo sapiens
tttttcttacataga

SEQ ID NO: 1447481 - DNA, 15 bp, Homo sapiens
ttttcttacatagaa

SEQ ID NO: 1447482 - DNA, 15 bp, Homo sapiens
tttcttacatagaaa

SEQ ID NO: 1447483 - DNA, 15 bp, Homo sapiens
ttcttacatagaaaa

SEQ ID NO: 1447484 - DNA, 15 bp, Homo sapiens
tcttacatagaaaac

SEQ ID NO: 1447485 - DNA, 15 bp, Homo sapiens
cttacatagaaaacc

SEQ ID NO: 1447486 - DNA, 15 bp, Homo sapiens
ttacatagaaaacct

SEQ ID NO: 1447487 - DNA, 15 bp, Homo sapiens
tacatagaaaacctt

SEQ ID NO: 1447488 - DNA, 15 bp, Homo sapiens
acatagaaaaccttt

SEQ ID NO: 1447489 - DNA, 15 bp, Homo sapiens
catagaaaaccttta

SEQ ID NO: 1447490 - DNA, 15 bp, Homo sapiens
atagaaaacctttat

SEQ ID NO: 1447491 - DNA, 15 bp, Homo sapiens
tagaaaacctttatt

SEQ ID NO: 1447492 - DNA, 15 bp, Homo sapiens
agaaaacctttatta

SEQ ID NO: 1447493 - DNA, 15 bp, Homo sapiens
gaaaacctttattat

SEQ ID NO: 1447494 - DNA, 15 bp, Homo sapiens
aaaacctttattatt

SEQ ID NO: 1447495 - DNA, 15 bp, Homo sapiens
aaacctttattatta

SEQ ID NO: 1447496 - DNA, 15 bp, Homo sapiens
aacctttattattaa

SEQ ID NO: 1447497 - DNA, 15 bp, Homo sapiens
acctttattattaac

SEQ ID NO: 1447498 - DNA, 15 bp, Homo sapiens
cctttattattaaca

SEQ ID NO: 1447499 - DNA, 15 bp, Homo sapiens
ctttattattaacat

SEQ ID NO: 1447500 - DNA, 15 bp, Homo sapiens
tttattattaacatt

SEQ ID NO: 1447501 - DNA, 15 bp, Homo sapiens
ttattattaacatta

SEQ ID NO: 1447502 - DNA, 15 bp, Homo sapiens
tattattaacattaa

SEQ ID NO: 1447503 - DNA, 15 bp, Homo sapiens
attattaacattaaa

SEQ ID NO: 1447504 - DNA, 15 bp, Homo sapiens
ttattaacattaaaa

SEQ ID NO: 1447505 - DNA, 15 bp, Homo sapiens
tattaacattaaaat

SEQ ID NO: 1447506 - DNA, 15 bp, Homo sapiens
attaacattaaaata

SEQ ID NO: 1447507 - DNA, 15 bp, Homo sapiens
ttaacattaaaatat

SEQ ID NO: 1447508 - DNA, 15 bp, Homo sapiens
taacattaaaatatt

SEQ ID NO: 1447509 - DNA, 15 bp, Homo sapiens
aacattaaaatattt

SEQ ID NO: 1447510 - DNA, 15 bp, Homo sapiens
acattaaaatatttg

SEQ ID NO: 1447511 - DNA, 15 bp, Homo sapiens
cattaaaatatttgt

SEQ ID NO: 1447512 - DNA, 15 bp, Homo sapiens
attaaaatatttgtt

SEQ ID NO: 1447513 - DNA, 15 bp, Homo sapiens
ttaaaatatttgttt

SEQ ID NO: 1447514 - DNA, 15 bp, Homo sapiens
taaaatatttgtttt

SEQ ID NO: 1447515 - DNA, 15 bp, Homo sapiens
aaaatatttgtttta

SEQ ID NO: 1447516 - DNA, 15 bp, Homo sapiens
aaatatttgttttat

SEQ ID NO: 1447517 - DNA, 15 bp, Homo sapiens
aatatttgttttatc

SEQ ID NO: 1447518 - DNA, 15 bp, Homo sapiens
atatttgttttatcc

SEQ ID NO: 1447519 - DNA, 15 bp, Homo sapiens
tatttgttttatcct

SEQ ID NO: 1447520 - DNA, 15 bp, Homo sapiens
atttgttttatccta

SEQ ID NO: 1447521 - DNA, 15 bp, Homo sapiens
tttgttttatcctac

SEQ ID NO: 1447522 - DNA, 15 bp, Homo sapiens
ttgttttatcctaca

SEQ ID NO: 1447523 - DNA, 15 bp, Homo sapiens
tgttttatcctacaa

SEQ ID NO: 1447524 - DNA, 15 bp, Homo sapiens
gttttatcctacaat

SEQ ID NO: 1447525 - DNA, 15 bp, Homo sapiens
ttttatcctacaata

SEQ ID NO: 1447526 - DNA, 15 bp, Homo sapiens
tttatcctacaatat

SEQ ID NO: 1447527 - DNA, 15 bp, Homo sapiens
ttatcctacaatata

SEQ ID NO: 1447528 - DNA, 15 bp, Homo sapiens
tatcctacaatatac

SEQ ID NO: 1447529 - DNA, 15 bp, Homo sapiens
atcctacaatataca

SEQ ID NO: 1447530 - DNA, 15 bp, Homo sapiens
tcctacaatatacat

SEQ ID NO: 1447531 - DNA, 15 bp, Homo sapiens
cctacaatatacata

SEQ ID NO: 1447532 - DNA, 15 bp, Homo sapiens
ctacaatatacatac

SEQ ID NO: 1447533 - DNA, 15 bp, Homo sapiens
tacaatatacataca

SEQ ID NO: 1447534 - DNA, 15 bp, Homo sapiens
acaatatacatacaa

SEQ ID NO: 1447535 - DNA, 15 bp, Homo sapiens
caatatacatacaat

SEQ ID NO: 1447536 - DNA, 15 bp, Homo sapiens
aatatacatacaata

SEQ ID NO: 1447537 - DNA, 15 bp, Homo sapiens
atatacatacaataa

SEQ ID NO: 1447538 - DNA, 15 bp, Homo sapiens
tatacatacaataat

SEQ ID NO: 1447539 - DNA, 15 bp, Homo sapiens
atacatacaataatt

SEQ ID NO: 1447540 - DNA, 15 bp, Homo sapiens
tacatacaataattt

SEQ ID NO: 1447541 - DNA, 15 bp, Homo sapiens
acatacaataatttg

SEQ ID NO: 1447542 - DNA, 15 bp, Homo sapiens
catacaataatttga

SEQ ID NO: 1447543 - DNA, 15 bp, Homo sapiens
atacaataatttgaa

SEQ ID NO: 1447544 - DNA, 15 bp, Homo sapiens
tacaataatttgaaa

SEQ ID NO: 1447545 - DNA, 15 bp, Homo sapiens
acaataatttgaaaa

SEQ ID NO: 1447546 - DNA, 15 bp, Homo sapiens
caataatttgaaaaa

SEQ ID NO: 1447547 - DNA, 15 bp, Homo sapiens
aataatttgaaaaat

SEQ ID NO: 1447548 - DNA, 15 bp, Homo sapiens
ataatttgaaaaata

SEQ ID NO: 1447549 - DNA, 15 bp, Homo sapiens
taatttgaaaaataa

SEQ ID NO: 1447550 - DNA, 15 bp, Homo sapiens
aatttgaaaaataat

SEQ ID NO: 1447551 - DNA, 15 bp, Homo sapiens
atttgaaaaataata

SEQ ID NO: 1447552 - DNA, 15 bp, Homo sapiens
tttgaaaaataatac

SEQ ID NO: 1447553 - DNA, 15 bp, Homo sapiens
ttgaaaaataatact

SEQ ID NO: 1447554 - DNA, 15 bp, Homo sapiens
tgaaaaataatactt

SEQ ID NO: 1447555 - DNA, 15 bp, Homo sapiens
gaaaaataatacttg

SEQ ID NO: 1447556 - DNA, 15 bp, Homo sapiens
aaaaataatacttga

SEQ ID NO: 1447557 - DNA, 15 bp, Homo sapiens
aaaataatacttgaa

SEQ ID NO: 1447558 - DNA, 15 bp, Homo sapiens
aaataatacttgaat

SEQ ID NO: 1447559 - DNA, 15 bp, Homo sapiens
aataatacttgaatt

SEQ ID NO: 1447560 - DNA, 15 bp, Homo sapiens
ataatacttgaattg

SEQ ID NO: 1447561 - DNA, 15 bp, Homo sapiens
taatacttgaattga

SEQ ID NO: 1447562 - DNA, 15 bp, Homo sapiens
aatacttgaattgat

SEQ ID NO: 1447563 - DNA, 15 bp, Homo sapiens
atacttgaattgata

SEQ ID NO: 1447564 - DNA, 15 bp, Homo sapiens
tacttgaattgatat

SEQ ID NO: 1447565 - DNA, 15 bp, Homo sapiens
acttgaattgatatt

SEQ ID NO: 1447566 - DNA, 15 bp, Homo sapiens
cttgaattgatatta

SEQ ID NO: 1447567 - DNA, 15 bp, Homo sapiens
ttgaattgatattaa

SEQ ID NO: 1447568 - DNA, 15 bp, Homo sapiens
tgaattgatattaat

SEQ ID NO: 1447569 - DNA, 15 bp, Homo sapiens
gaattgatattaata

SEQ ID NO: 1447570 - DNA, 15 bp, Homo sapiens
aattgatattaatag

SEQ ID NO: 1447571 - DNA, 15 bp, Homo sapiens
attgatattaatagt

SEQ ID NO: 1447572 - DNA, 15 bp, Homo sapiens
ttgatattaatagta

SEQ ID NO: 1447573 - DNA, 15 bp, Homo sapiens
tgatattaatagtaa

SEQ ID NO: 1447574 - DNA, 15 bp, Homo sapiens
gatattaatagtaac

SEQ ID NO: 1447575 - DNA, 15 bp, Homo sapiens
atattaatagtaaca

SEQ ID NO: 1447576 - DNA, 15 bp, Homo sapiens
tattaatagtaacaa

SEQ ID NO: 1447577 - DNA, 15 bp, Homo sapiens
attaatagtaacaac

SEQ ID NO: 1447578 - DNA, 15 bp, Homo sapiens
ttaatagtaacaaca

SEQ ID NO: 1447579 - DNA, 15 bp, Homo sapiens
taatagtaacaacaa

SEQ ID NO: 1447580 - DNA, 15 bp, Homo sapiens
aatagtaacaacaac

SEQ ID NO: 1447581 - DNA, 15 bp, Homo sapiens
atagtaacaacaaca

SEQ ID NO: 1447582 - DNA, 15 bp, Homo sapiens
tagtaacaacaacag

SEQ ID NO: 1447583 - DNA, 15 bp, Homo sapiens
agtaacaacaacagc

SEQ ID NO: 1447584 - DNA, 15 bp, Homo sapiens
gtaacaacaacagca

SEQ ID NO: 1447585 - DNA, 15 bp, Homo sapiens
taacaacaacagcac

SEQ ID NO: 1447586 - DNA, 15 bp, Homo sapiens
aacaacaacagcact

SEQ ID NO: 1447587 - DNA, 15 bp, Homo sapiens
acaacaacagcactg

SEQ ID NO: 1447588 - DNA, 15 bp, Homo sapiens
caacaacagcactgc

SEQ ID NO: 1447589 - DNA, 15 bp, Homo sapiens
aacaacagcactgct

SEQ ID NO: 1447590 - DNA, 15 bp, Homo sapiens
acaacagcactgctg

SEQ ID NO: 1447591 - DNA, 15 bp, Homo sapiens
caacagcactgctgc

SEQ ID NO: 1447592 - DNA, 15 bp, Homo sapiens
aacagcactgctgcc

SEQ ID NO: 1447593 - DNA, 15 bp, Homo sapiens
acagcactgctgcca

SEQ ID NO: 1447594 - DNA, 15 bp, Homo sapiens
cagcactgctgccaa

SEQ ID NO: 1447595 - DNA, 15 bp, Homo sapiens
agcactgctgccaaa

SEQ ID NO: 1447596 - DNA, 15 bp, Homo sapiens
gcactgctgccaaac

SEQ ID NO: 1447597 - DNA, 15 bp, Homo sapiens
cactgctgccaaaca

SEQ ID NO: 1447598 - DNA, 15 bp, Homo sapiens
actgctgccaaacat

SEQ ID NO: 1447599 - DNA, 15 bp, Homo sapiens
ctgctgccaaacata

SEQ ID NO: 1447600 - DNA, 15 bp, Homo sapiens
tgctgccaaacatag

SEQ ID NO: 1447601 - DNA, 15 bp, Homo sapiens
gctgccaaacatagt

SEQ ID NO: 1447602 - DNA, 15 bp, Homo sapiens
ctgccaaacatagtt

SEQ ID NO: 1447603 - DNA, 15 bp, Homo sapiens
tgccaaacatagttt

SEQ ID NO: 1447604 - DNA, 15 bp, Homo sapiens
gccaaacatagttta

SEQ ID NO: 1447605 - DNA, 15 bp, Homo sapiens
ccaaacatagtttaa

SEQ ID NO: 1447606 - DNA, 15 bp, Homo sapiens
caaacatagtttaaa

SEQ ID NO: 1447607 - DNA, 15 bp, Homo sapiens
aaacatagtttaaag

SEQ ID NO: 1447608 - DNA, 15 bp, Homo sapiens
aacatagtttaaagt

SEQ ID NO: 1447609 - DNA, 15 bp, Homo sapiens
acatagtttaaagtt

SEQ ID NO: 1447610 - DNA, 15 bp, Homo sapiens
catagtttaaagttt

SEQ ID NO: 1447611 - DNA, 15 bp, Homo sapiens
atagtttaaagtttt

SEQ ID NO: 1447612 - DNA, 15 bp, Homo sapiens
tagtttaaagtttta

SEQ ID NO: 1447613 - DNA, 15 bp, Homo sapiens
agtttaaagttttat

SEQ ID NO: 1447614 - DNA, 15 bp, Homo sapiens
gtttaaagttttatt

SEQ ID NO: 1447615 - DNA, 15 bp, Homo sapiens
tttaaagttttattt

SEQ ID NO: 1447616 - DNA, 15 bp, Homo sapiens
taaagttttatttca

SEQ ID NO: 1447617 - DNA, 15 bp, Homo sapiens
aaagttttatttcag

SEQ ID NO: 1447618 - DNA, 15 bp, Homo sapiens
aagttttatttcagg

SEQ ID NO: 1447619 - DNA, 15 bp, Homo sapiens
gttttatttcaggtc

SEQ ID NO: 1447620 - DNA, 15 bp, Homo sapiens
ttttatttcaggtct

SEQ ID NO: 1447621 - DNA, 15 bp, Homo sapiens
tttatttcaggtctt

SEQ ID NO: 1447622 - DNA, 15 bp, Homo sapiens
ttatttcaggtctta

SEQ ID NO: 1447623 - DNA, 15 bp, Homo sapiens
tatttcaggtcttat

SEQ ID NO: 1447624 - DNA, 15 bp, Homo sapiens
atttcaggtcttatt

SEQ ID NO: 1447625 - DNA, 15 bp, Homo sapiens
tttcaggtcttattt

SEQ ID NO: 1447626 - DNA, 15 bp, Homo sapiens
ttcaggtcttatttt

SEQ ID NO: 1447627 - DNA, 15 bp, Homo sapiens
tcaggtcttattttc

SEQ ID NO: 1447628 - DNA, 15 bp, Homo sapiens
caggtcttattttct

SEQ ID NO: 1447629 - DNA, 15 bp, Homo sapiens
aggtcttattttctt

SEQ ID NO: 1447630 - DNA, 15 bp, Homo sapiens
ggtcttattttcttc

SEQ ID NO: 1447631 - DNA, 15 bp, Homo sapiens
gtcttattttcttca

SEQ ID NO: 1447632 - DNA, 15 bp, Homo sapiens
tcttattttcttcag

SEQ ID NO: 1447633 - DNA, 15 bp, Homo sapiens
cttattttcttcaga

SEQ ID NO: 1447634 - DNA, 15 bp, Homo sapiens
ttattttcttcagaa

SEQ ID NO: 1447635 - DNA, 15 bp, Homo sapiens
tattttcttcagaat

SEQ ID NO: 1447636 - DNA, 15 bp, Homo sapiens
attttcttcagaata

SEQ ID NO: 1447637 - DNA, 15 bp, Homo sapiens
ttttcttcagaatat

SEQ ID NO: 1447638 - DNA, 15 bp, Homo sapiens
tttcttcagaatata

SEQ ID NO: 1447639 - DNA, 15 bp, Homo sapiens
ttcttcagaatatat

SEQ ID NO: 1447640 - DNA, 15 bp, Homo sapiens
tcttcagaatatatc

SEQ ID NO: 1447641 - DNA, 15 bp, Homo sapiens
cttcagaatatatct

SEQ ID NO: 1447642 - DNA, 15 bp, Homo sapiens
ttcagaatatatctt

SEQ ID NO: 1447643 - DNA, 15 bp, Homo sapiens
tcagaatatatcttg

SEQ ID NO: 1447644 - DNA, 15 bp, Homo sapiens
cagaatatatcttgc

SEQ ID NO: 1447645 - DNA, 15 bp, Homo sapiens
agaatatatcttgct

SEQ ID NO: 1447646 - DNA, 15 bp, Homo sapiens
gaatatatcttgctg

SEQ ID NO: 1447647 - DNA, 15 bp, Homo sapiens
aatatatcttgctga

SEQ ID NO: 1447648 - DNA, 15 bp, Homo sapiens
atatatcttgctgag

SEQ ID NO: 1447649 - DNA, 15 bp, Homo sapiens
tatatcttgctgaga

SEQ ID NO: 1447650 - DNA, 15 bp, Homo sapiens
atatcttgctgagaa

SEQ ID NO: 1447651 - DNA, 15 bp, Homo sapiens
tatcttgctgagaat

SEQ ID NO: 1447652 - DNA, 15 bp, Homo sapiens
atcttgctgagaatg

SEQ ID NO: 1447653 - DNA, 15 bp, Homo sapiens
tcttgctgagaatgt

SEQ ID NO: 1447654 - DNA, 15 bp, Homo sapiens
cttgctgagaatgta

SEQ ID NO: 1447655 - DNA, 15 bp, Homo sapiens
ttgctgagaatgtat

SEQ ID NO: 1447656 - DNA, 15 bp, Homo sapiens
tgctgagaatgtata

SEQ ID NO: 1447657 - DNA, 15 bp, Homo sapiens
gctgagaatgtatag

SEQ ID NO: 1447658 - DNA, 15 bp, Homo sapiens
ctgagaatgtatagg

SEQ ID NO: 1447659 - DNA, 15 bp, Homo sapiens
tgagaatgtataggc

SEQ ID NO: 1447660 - DNA, 15 bp, Homo sapiens
gagaatgtataggca

SEQ ID NO: 1447661 - DNA, 15 bp, Homo sapiens
agaatgtataggcaa

SEQ ID NO: 1447662 - DNA, 15 bp, Homo sapiens
gaatgtataggcaaa

SEQ ID NO: 1447663 - DNA, 15 bp, Homo sapiens
aatgtataggcaaag

SEQ ID NO: 1447664 - DNA, 15 bp, Homo sapiens
atgtataggcaaagt

SEQ ID NO: 1447665 - DNA, 15 bp, Homo sapiens
tgtataggcaaagta

SEQ ID NO: 1447666 - DNA, 15 bp, Homo sapiens
gtataggcaaagtat

SEQ ID NO: 1447667 - DNA, 15 bp, Homo sapiens
tataggcaaagtatt

SEQ ID NO: 1447668 - DNA, 15 bp, Homo sapiens
ataggcaaagtattc

SEQ ID NO: 1447669 - DNA, 15 bp, Homo sapiens
taggcaaagtattct

SEQ ID NO: 1447670 - DNA, 15 bp, Homo sapiens
aggcaaagtattcta

SEQ ID NO: 1447671 - DNA, 15 bp, Homo sapiens
ggcaaagtattctac

SEQ ID NO: 1447672 - DNA, 15 bp, Homo sapiens
gcaaagtattctaca

SEQ ID NO: 1447673 - DNA, 15 bp, Homo sapiens
caaagtattctacac

SEQ ID NO: 1447674 - DNA, 15 bp, Homo sapiens
aaagtattctacact

SEQ ID NO: 1447675 - DNA, 15 bp, Homo sapiens
aagtattctacactt

SEQ ID NO: 1447676 - DNA, 15 bp, Homo sapiens
agtattctacactta

SEQ ID NO: 1447677 - DNA, 15 bp, Homo sapiens
gtattctacacttac

SEQ ID NO: 1447678 - DNA, 15 bp, Homo sapiens
tattctacacttact

SEQ ID NO: 1447679 - DNA, 15 bp, Homo sapiens
attctacacttactt

SEQ ID NO: 1447680 - DNA, 15 bp, Homo sapiens
ttctacacttacttg

SEQ ID NO: 1447681 - DNA, 15 bp, Homo sapiens
tctacacttacttga

SEQ ID NO: 1447682 - DNA, 15 bp, Homo sapiens
ctacacttacttgaa

SEQ ID NO: 1447683 - DNA, 15 bp, Homo sapiens
tacacttacttgaaa

SEQ ID NO: 1447684 - DNA, 15 bp, Homo sapiens
acacttacttgaaat

SEQ ID NO: 1447685 - DNA, 15 bp, Homo sapiens
cacttacttgaaata

SEQ ID NO: 1447686 - DNA, 15 bp, Homo sapiens
acttacttgaaataa

SEQ ID NO: 1447687 - DNA, 15 bp, Homo sapiens
cttacttgaaataat

SEQ ID NO: 1447688 - DNA, 15 bp, Homo sapiens
ttacttgaaataatt

SEQ ID NO: 1447689 - DNA, 15 bp, Homo sapiens
tacttgaaataattg

SEQ ID NO: 1447690 - DNA, 15 bp, Homo sapiens
acttgaaataattgt

SEQ ID NO: 1447691 - DNA, 15 bp, Homo sapiens
cttgaaataattgtc

SEQ ID NO: 1447692 - DNA, 15 bp, Homo sapiens
ttgaaataattgtct

SEQ ID NO: 1447693 - DNA, 15 bp, Homo sapiens
tgaaataattgtctt

SEQ ID NO: 1447694 - DNA, 15 bp, Homo sapiens
gaaataattgtcttc

SEQ ID NO: 1447695 - DNA, 15 bp, Homo sapiens
aaataattgtcttca

SEQ ID NO: 1447696 - DNA, 15 bp, Homo sapiens
aataattgtcttcat

SEQ ID NO: 1447697 - DNA, 15 bp, Homo sapiens
ataattgtcttcatg

SEQ ID NO: 1447698 - DNA, 15 bp, Homo sapiens
taattgtcttcatgc

SEQ ID NO: 1447699 - DNA, 15 bp, Homo sapiens
aattgtcttcatgcg

SEQ ID NO: 1447700 - DNA, 15 bp, Homo sapiens
attgtcttcatgcgg

SEQ ID NO: 1447701 - DNA, 15 bp, Homo sapiens
ttgtcttcatgcggt

SEQ ID NO: 1447702 - DNA, 15 bp, Homo sapiens
tgtcttcatgcggtt

SEQ ID NO: 1447703 - DNA, 15 bp, Homo sapiens
gtcttcatgcggtta

SEQ ID NO: 1447704 - DNA, 15 bp, Homo sapiens
tcttcatgcggttat

SEQ ID NO: 1447705 - DNA, 15 bp, Homo sapiens
cttcatgcggttatg

SEQ ID NO: 1447706 - DNA, 15 bp, Homo sapiens
ttcatgcggttatgt

SEQ ID NO: 1447707 - DNA, 15 bp, Homo sapiens
tcatgcggttatgtt

SEQ ID NO: 1447708 - DNA, 15 bp, Homo sapiens
catgcggttatgtta

SEQ ID NO: 1447709 - DNA, 15 bp, Homo sapiens
atgcggttatgttat

SEQ ID NO: 1447710 - DNA, 15 bp, Homo sapiens
tgcggttatgttata

SEQ ID NO: 1447711 - DNA, 15 bp, Homo sapiens
gcggttatgttatac

SEQ ID NO: 1447712 - DNA, 15 bp, Homo sapiens
cggttatgttataca

SEQ ID NO: 1447713 - DNA, 15 bp, Homo sapiens
ggttatgttatacat

SEQ ID NO: 1447714 - DNA, 15 bp, Homo sapiens
gttatgttatacatt

SEQ ID NO: 1447715 - DNA, 15 bp, Homo sapiens
ttatgttatacattt

SEQ ID NO: 1447716 - DNA, 15 bp, Homo sapiens
tatgttatacatttg

SEQ ID NO: 1447717 - DNA, 15 bp, Homo sapiens
atgttatacatttga

SEQ ID NO: 1447718 - DNA, 15 bp, Homo sapiens
tgttatacatttgat

SEQ ID NO: 1447719 - DNA, 15 bp, Homo sapiens
gttatacatttgata

SEQ ID NO: 1447720 - DNA, 15 bp, Homo sapiens
ttatacatttgatat

SEQ ID NO: 1447721 - DNA, 15 bp, Homo sapiens
tatacatttgatata

SEQ ID NO: 1447722 - DNA, 15 bp, Homo sapiens
atacatttgatatat

SEQ ID NO: 1447723 - DNA, 15 bp, Homo sapiens
tacatttgatatata

SEQ ID NO: 1447724 - DNA, 15 bp, Homo sapiens
acatttgatatatag

SEQ ID NO: 1447725 - DNA, 15 bp, Homo sapiens
catttgatatatagt

SEQ ID NO: 1447726 - DNA, 15 bp, Homo sapiens
atttgatatatagtt

SEQ ID NO: 1447727 - DNA, 15 bp, Homo sapiens
tttgatatatagtta

SEQ ID NO: 1447728 - DNA, 15 bp, Homo sapiens
ttgatatatagttag

SEQ ID NO: 1447729 - DNA, 15 bp, Homo sapiens
tgatatatagttagg

SEQ ID NO: 1447730 - DNA, 15 bp, Homo sapiens
gatatatagttaggc

SEQ ID NO: 1447731 - DNA, 15 bp, Homo sapiens
atatatagttaggct

SEQ ID NO: 1447732 - DNA, 15 bp, Homo sapiens
tatatagttaggctc

SEQ ID NO: 1447733 - DNA, 15 bp, Homo sapiens
atatagttaggctca

SEQ ID NO: 1447734 - DNA, 15 bp, Homo sapiens
tatagttaggctcat

SEQ ID NO: 1447735 - DNA, 15 bp, Homo sapiens
atagttaggctcatt

SEQ ID NO: 1447736 - DNA, 15 bp, Homo sapiens
tagttaggctcattt

SEQ ID NO: 1447737 - DNA, 15 bp, Homo sapiens
agttaggctcatttg

SEQ ID NO: 1447738 - DNA, 15 bp, Homo sapiens
gttaggctcatttgt

SEQ ID NO: 1447739 - DNA, 15 bp, Homo sapiens
ttaggctcatttgtt

SEQ ID NO: 1447740 - DNA, 15 bp, Homo sapiens
taggctcatttgttt

SEQ ID NO: 1447741 - DNA, 15 bp, Homo sapiens
aggctcatttgtttt

SEQ ID NO: 1447742 - DNA, 15 bp, Homo sapiens
ggctcatttgttttt

SEQ ID NO: 1447743 - DNA, 15 bp, Homo sapiens
gctcatttgtttttc

SEQ ID NO: 1447744 - DNA, 15 bp, Homo sapiens
ctcatttgtttttca

SEQ ID NO: 1447745 - DNA, 15 bp, Homo sapiens
tcatttgtttttcat

SEQ ID NO: 1447746 - DNA, 15 bp, Homo sapiens
catttgtttttcatt

SEQ ID NO: 1447747 - DNA, 15 bp, Homo sapiens
atttgtttttcattt

SEQ ID NO: 1447748 - DNA, 15 bp, Homo sapiens
tttgtttttcatttt

SEQ ID NO: 1447749 - DNA, 15 bp, Homo sapiens
ttgtttttcattttt

SEQ ID NO: 1447750 - DNA, 15 bp, Homo sapiens
tgtttttcatttttt

SEQ ID NO: 1447751 - DNA, 15 bp, Homo sapiens
gtttttcattttttt

SEQ ID NO: 1447752 - DNA, 15 bp, Homo sapiens
tttttcatttttttt

SEQ ID NO: 1447753 - DNA, 15 bp, Homo sapiens
ttttcatttttttta

SEQ ID NO: 1447754 - DNA, 15 bp, Homo sapiens
tttcattttttttat

SEQ ID NO: 1447755 - DNA, 15 bp, Homo sapiens
ttcattttttttatt

SEQ ID NO: 1447756 - DNA, 15 bp, Homo sapiens
tcattttttttattt

SEQ ID NO: 1447757 - DNA, 15 bp, Homo sapiens
cattttttttatttt

SEQ ID NO: 1447758 - DNA, 15 bp, Homo sapiens
attttttttatttta

SEQ ID NO: 1447759 - DNA, 15 bp, Homo sapiens
ttttttttattttag

SEQ ID NO: 1447760 - DNA, 15 bp, Homo sapiens
tttttttattttagg

SEQ ID NO: 1447761 - DNA, 15 bp, Homo sapiens
ttttttattttaggg

SEQ ID NO: 1447762 - DNA, 15 bp, Homo sapiens
tttttattttaggga

SEQ ID NO: 1447763 - DNA, 15 bp, Homo sapiens
ttttattttagggat

SEQ ID NO: 1447764 - DNA, 15 bp, Homo sapiens
tttattttagggatt

SEQ ID NO: 1447765 - DNA, 15 bp, Homo sapiens
ttattttagggattt

SEQ ID NO: 1447766 - DNA, 15 bp, Homo sapiens
tattttagggatttt

SEQ ID NO: 1447767 - DNA, 15 bp, Homo sapiens
attttagggattttt

SEQ ID NO: 1447768 - DNA, 15 bp, Homo sapiens
ttttagggatttttt

SEQ ID NO: 1447769 - DNA, 15 bp, Homo sapiens
tttagggattttttt

SEQ ID NO: 1447770 - DNA, 15 bp, Homo sapiens
ttagggatttttttc

SEQ ID NO: 1447771 - DNA, 15 bp, Homo sapiens
tagggatttttttcc

SEQ ID NO: 1447772 - DNA, 15 bp, Homo sapiens
agggatttttttcct

SEQ ID NO: 1447773 - DNA, 15 bp, Homo sapiens
gggatttttttcctt

SEQ ID NO: 1447774 - DNA, 15 bp, Homo sapiens
ggatttttttccttt

SEQ ID NO: 1447775 - DNA, 15 bp, Homo sapiens
gatttttttccttta

SEQ ID NO: 1447776 - DNA, 15 bp, Homo sapiens
atttttttcctttat

SEQ ID NO: 1447777 - DNA, 15 bp, Homo sapiens
tttttttcctttatt

SEQ ID NO: 1447778 - DNA, 15 bp, Homo sapiens
ttttttcctttattg

SEQ ID NO: 1447779 - DNA, 15 bp, Homo sapiens
tttttcctttattga

SEQ ID NO: 1447780 - DNA, 15 bp, Homo sapiens
ttttcctttattgaa

SEQ ID NO: 1447781 - DNA, 15 bp, Homo sapiens
tttcctttattgaat

SEQ ID NO: 1447782 - DNA, 15 bp, Homo sapiens
ttcctttattgaatt

SEQ ID NO: 1447783 - DNA, 15 bp, Homo sapiens
tcctttattgaattt

SEQ ID NO: 1447784 - DNA, 15 bp, Homo sapiens
cctttattgaatttt

SEQ ID NO: 1447785 - DNA, 15 bp, Homo sapiens
ctttattgaatttta

SEQ ID NO: 1447786 - DNA, 15 bp, Homo sapiens
tttattgaattttaa

SEQ ID NO: 1447787 - DNA, 15 bp, Homo sapiens
ttattgaattttaat

SEQ ID NO: 1447788 - DNA, 15 bp, Homo sapiens
tattgaattttaata

SEQ ID NO: 1447789 - DNA, 15 bp, Homo sapiens
attgaattttaatat

SEQ ID NO: 1447790 - DNA, 15 bp, Homo sapiens
ttgaattttaatata

SEQ ID NO: 1447791 - DNA, 15 bp, Homo sapiens
tgaattttaatatat

SEQ ID NO: 1447792 - DNA, 15 bp, Homo sapiens
gaattttaatatata

SEQ ID NO: 1447793 - DNA, 15 bp, Homo sapiens
aattttaatatatac

SEQ ID NO: 1447794 - DNA, 15 bp, Homo sapiens
attttaatatataca

SEQ ID NO: 1447795 - DNA, 15 bp, Homo sapiens
ttttaatatatacaa

SEQ ID NO: 1447796 - DNA, 15 bp, Homo sapiens
tttaatatatacaat

SEQ ID NO: 1447797 - DNA, 15 bp, Homo sapiens
ttaatatatacaata

SEQ ID NO: 1447798 - DNA, 15 bp, Homo sapiens
taatatatacaatat

SEQ ID NO: 1447799 - DNA, 15 bp, Homo sapiens
aatatatacaatatt

SEQ ID NO: 1447800 - DNA, 15 bp, Homo sapiens
atatatacaatattt

SEQ ID NO: 1447801 - DNA, 15 bp, Homo sapiens
tatatacaatattta

SEQ ID NO: 1447802 - DNA, 15 bp, Homo sapiens
atatacaatatttat

SEQ ID NO: 1447803 - DNA, 15 bp, Homo sapiens
tatacaatatttata

SEQ ID NO: 1447804 - DNA, 15 bp, Homo sapiens
atacaatatttatat

SEQ ID NO: 1447805 - DNA, 15 bp, Homo sapiens
tacaatatttatata

SEQ ID NO: 1447806 - DNA, 15 bp, Homo sapiens
acaatatttatatat

SEQ ID NO: 1447807 - DNA, 15 bp, Homo sapiens
caatatttatatatg

SEQ ID NO: 1447808 - DNA, 15 bp, Homo sapiens
aatatttatatatgc

SEQ ID NO: 1447809 - DNA, 15 bp, Homo sapiens
atatttatatatgca

SEQ ID NO: 1447810 - DNA, 15 bp, Homo sapiens
tatttatatatgcaa

SEQ ID NO: 1447811 - DNA, 15 bp, Homo sapiens
atttatatatgcaaa

SEQ ID NO: 1447812 - DNA, 15 bp, Homo sapiens
tttatatatgcaaaa

SEQ ID NO: 1447813 - DNA, 15 bp, Homo sapiens
ttatatatgcaaaat

SEQ ID NO: 1447814 - DNA, 15 bp, Homo sapiens
tatatatgcaaaata

SEQ ID NO: 1447815 - DNA, 15 bp, Homo sapiens
atatatgcaaaatat

SEQ ID NO: 1447816 - DNA, 15 bp, Homo sapiens
tatatgcaaaatatt

SEQ ID NO: 1447817 - DNA, 15 bp, Homo sapiens
tatgcaaaatattta

SEQ ID NO: 1447818 - DNA, 15 bp, Homo sapiens
atgcaaaatatttaa

SEQ ID NO: 1447819 - DNA, 15 bp, Homo sapiens
tgcaaaatatttaat

SEQ ID NO: 1447820 - DNA, 15 bp, Homo sapiens
gcaaaatatttaatc

SEQ ID NO: 1447821 - DNA, 15 bp, Homo sapiens
caaaatatttaatca

SEQ ID NO: 1447822 - DNA, 15 bp, Homo sapiens
aaaatatttaatcag

SEQ ID NO: 1447823 - DNA, 15 bp, Homo sapiens
aaatatttaatcaga

SEQ ID NO: 1447824 - DNA, 15 bp, Homo sapiens
aatatttaatcagag

SEQ ID NO: 1447825 - DNA, 15 bp, Homo sapiens
atatttaatcagaga

SEQ ID NO: 1447826 - DNA, 15 bp, Homo sapiens
tatttaatcagagaa

SEQ ID NO: 1447827 - DNA, 15 bp, Homo sapiens
atttaatcagagaaa

SEQ ID NO: 1447828 - DNA, 15 bp, Homo sapiens
tttaatcagagaaat

SEQ ID NO: 1447829 - DNA, 15 bp, Homo sapiens
ttaatcagagaaatc

SEQ ID NO: 1447830 - DNA, 15 bp, Homo sapiens
taatcagagaaatct

SEQ ID NO: 1447831 - DNA, 15 bp, Homo sapiens
aatcagagaaatctt

SEQ ID NO: 1447832 - DNA, 15 bp, Homo sapiens
atcagagaaatctta

SEQ ID NO: 1447833 - DNA, 15 bp, Homo sapiens
tcagagaaatcttaa

SEQ ID NO: 1447834 - DNA, 15 bp, Homo sapiens
cagagaaatcttaat

SEQ ID NO: 1447835 - DNA, 15 bp, Homo sapiens
agagaaatcttaatt

SEQ ID NO: 1447836 - DNA, 15 bp, Homo sapiens
gagaaatcttaattc

SEQ ID NO: 1447837 - DNA, 15 bp, Homo sapiens
agaaatcttaattct

SEQ ID NO: 1447838 - DNA, 15 bp, Homo sapiens
gaaatcttaattctg

SEQ ID NO: 1447839 - DNA, 15 bp, Homo sapiens
aaatcttaattctgg

SEQ ID NO: 1447840 - DNA, 15 bp, Homo sapiens
aatcttaattctggt

SEQ ID NO: 1447841 - DNA, 15 bp, Homo sapiens
atcttaattctggtc

SEQ ID NO: 1447842 - DNA, 15 bp, Homo sapiens
tcttaattctggtct

SEQ ID NO: 1447843 - DNA, 15 bp, Homo sapiens
cttaattctggtctt

SEQ ID NO: 1447844 - DNA, 15 bp, Homo sapiens
ttaattctggtctta

SEQ ID NO: 1447845 - DNA, 15 bp, Homo sapiens
taattctggtcttac

SEQ ID NO: 1447846 - DNA, 15 bp, Homo sapiens
aattctggtcttacg

SEQ ID NO: 1447847 - DNA, 15 bp, Homo sapiens
attctggtcttacgc

SEQ ID NO: 1447848 - DNA, 15 bp, Homo sapiens
ttctggtcttacgcc

SEQ ID NO: 1447849 - DNA, 15 bp, Homo sapiens
tctggtcttacgcct

SEQ ID NO: 1447850 - DNA, 15 bp, Homo sapiens
ctggtcttacgcctt

SEQ ID NO: 1447851 - DNA, 15 bp, Homo sapiens
tggtcttacgccttt

SEQ ID NO: 1447852 - DNA, 15 bp, Homo sapiens
ggtcttacgcctttc

SEQ ID NO: 1447853 - DNA, 15 bp, Homo sapiens
gtcttacgcctttca

SEQ ID NO: 1447854 - DNA, 15 bp, Homo sapiens
tcttacgcctttcat

SEQ ID NO: 1447855 - DNA, 15 bp, Homo sapiens
cttacgcctttcata

SEQ ID NO: 1447856 - DNA, 15 bp, Homo sapiens
ttacgcctttcatat

SEQ ID NO: 1447857 - DNA, 15 bp, Homo sapiens
tacgcctttcatatt

SEQ ID NO: 1447858 - DNA, 15 bp, Homo sapiens
acgcctttcatatta

SEQ ID NO: 1447859 - DNA, 15 bp, Homo sapiens
cgcctttcatattat

SEQ ID NO: 1447860 - DNA, 15 bp, Homo sapiens
gcctttcatattatt

SEQ ID NO: 1447861 - DNA, 15 bp, Homo sapiens
cctttcatattattc

SEQ ID NO: 1447862 - DNA, 15 bp, Homo sapiens
ctttcatattattct

SEQ ID NO: 1447863 - DNA, 15 bp, Homo sapiens
tttcatattattctg

SEQ ID NO: 1447864 - DNA, 15 bp, Homo sapiens
ttcatattattctgc

SEQ ID NO: 1447865 - DNA, 15 bp, Homo sapiens
tcatattattctgct

SEQ ID NO: 1447866 - DNA, 15 bp, Homo sapiens
catattattctgctc

SEQ ID NO: 1447867 - DNA, 15 bp, Homo sapiens
atattattctgctcc

SEQ ID NO: 1447868 - DNA, 15 bp, Homo sapiens
tattattctgctcca

SEQ ID NO: 1447869 - DNA, 15 bp, Homo sapiens
attattctgctccac

SEQ ID NO: 1447870 - DNA, 15 bp, Homo sapiens
ttattctgctccacc

SEQ ID NO: 1447871 - DNA, 15 bp, Homo sapiens
tattctgctccaccc

SEQ ID NO: 1447872 - DNA, 15 bp, Homo sapiens
attctgctccaccct

SEQ ID NO: 1447873 - DNA, 15 bp, Homo sapiens
ttctgctccaccctc

SEQ ID NO: 1447874 - DNA, 15 bp, Homo sapiens
tctgctccaccctct

SEQ ID NO: 1447875 - DNA, 15 bp, Homo sapiens
ctgctccaccctctg

SEQ ID NO: 1447876 - DNA, 15 bp, Homo sapiens
tgctccaccctctgt

SEQ ID NO: 1447877 - DNA, 15 bp, Homo sapiens
gctccaccctctgta

SEQ ID NO: 1447878 - DNA, 15 bp, Homo sapiens
ctccaccctctgtag

SEQ ID NO: 1447879 - DNA, 15 bp, Homo sapiens
tccaccctctgtagg

SEQ ID NO: 1447880 - DNA, 15 bp, Homo sapiens
ccaccctctgtaggt

SEQ ID NO: 1447881 - DNA, 15 bp, Homo sapiens
caccctctgtaggta

SEQ ID NO: 1447882 - DNA, 15 bp, Homo sapiens
accctctgtaggtaa

SEQ ID NO: 1447883 - DNA, 15 bp, Homo sapiens
ccctctgtaggtaac

SEQ ID NO: 1447884 - DNA, 15 bp, Homo sapiens
cctctgtaggtaact

SEQ ID NO: 1447885 - DNA, 15 bp, Homo sapiens
ctctgtaggtaactt

SEQ ID NO: 1447886 - DNA, 15 bp, Homo sapiens
tctgtaggtaactta

SEQ ID NO: 1447887 - DNA, 15 bp, Homo sapiens
ctgtaggtaacttat

SEQ ID NO: 1447888 - DNA, 15 bp, Homo sapiens
tgtaggtaacttatt

SEQ ID NO: 1447889 - DNA, 15 bp, Homo sapiens
gtaggtaacttatta

SEQ ID NO: 1447890 - DNA, 15 bp, Homo sapiens
taggtaacttattat

SEQ ID NO: 1447891 - DNA, 15 bp, Homo sapiens
aggtaacttattatc

SEQ ID NO: 1447892 - DNA, 15 bp, Homo sapiens
ggtaacttattatct

SEQ ID NO: 1447893 - DNA, 15 bp, Homo sapiens
gtaacttattatctt

SEQ ID NO: 1447894 - DNA, 15 bp, Homo sapiens
taacttattatcttt

SEQ ID NO: 1447895 - DNA, 15 bp, Homo sapiens
aacttattatctttc

SEQ ID NO: 1447896 - DNA, 15 bp, Homo sapiens
acttattatctttct

SEQ ID NO: 1447897 - DNA, 15 bp, Homo sapiens
cttattatctttctc

SEQ ID NO: 1447898 - DNA, 15 bp, Homo sapiens
ttattatctttctca

SEQ ID NO: 1447899 - DNA, 15 bp, Homo sapiens
tattatctttctcat

SEQ ID NO: 1447900 - DNA, 15 bp, Homo sapiens
attatctttctcatg

SEQ ID NO: 1447901 - DNA, 15 bp, Homo sapiens
ttatctttctcatgt

SEQ ID NO: 1447902 - DNA, 15 bp, Homo sapiens
tatctttctcatgtt

SEQ ID NO: 1447903 - DNA, 15 bp, Homo sapiens
atctttctcatgttt

SEQ ID NO: 1447904 - DNA, 15 bp, Homo sapiens
tctttctcatgtttc

SEQ ID NO: 1447905 - DNA, 15 bp, Homo sapiens
ctttctcatgtttcc

SEQ ID NO: 1447906 - DNA, 15 bp, Homo sapiens
tttctcatgtttcct

SEQ ID NO: 1447907 - DNA, 15 bp, Homo sapiens
ttctcatgtttcctt

SEQ ID NO: 1447908 - DNA, 15 bp, Homo sapiens
tctcatgtttccttt

SEQ ID NO: 1447909 - DNA, 15 bp, Homo sapiens
ctcatgtttcctttt

SEQ ID NO: 1447910 - DNA, 15 bp, Homo sapiens
tcatgtttccttttt

SEQ ID NO: 1447911 - DNA, 15 bp, Homo sapiens
catgtttcctttttg

SEQ ID NO: 1447912 - DNA, 15 bp, Homo sapiens
atgtttcctttttgg

SEQ ID NO: 1447913 - DNA, 15 bp, Homo sapiens
tgtttcctttttgga

SEQ ID NO: 1447914 - DNA, 15 bp, Homo sapiens
ttcctttttggaaac

SEQ ID NO: 1447915 - DNA, 15 bp, Homo sapiens
tcctttttggaaaca

SEQ ID NO: 1447916 - DNA, 15 bp, Homo sapiens
cctttttggaaacat

SEQ ID NO: 1447917 - DNA, 15 bp, Homo sapiens
ctttttggaaacata

SEQ ID NO: 1447918 - DNA, 15 bp, Homo sapiens
tttttggaaacataa

SEQ ID NO: 1447919 - DNA, 15 bp, Homo sapiens
ttttggaaacataaa

SEQ ID NO: 1447920 - DNA, 15 bp, Homo sapiens
tttggaaacataaac

SEQ ID NO: 1447921 - DNA, 15 bp, Homo sapiens
ttggaaacataaaca

SEQ ID NO: 1447922 - DNA, 15 bp, Homo sapiens
tggaaacataaacaa

SEQ ID NO: 1447923 - DNA, 15 bp, Homo sapiens
ggaaacataaacaaa

SEQ ID NO: 1447924 - DNA, 15 bp, Homo sapiens
gaaacataaacaaag

SEQ ID NO: 1447925 - DNA, 15 bp, Homo sapiens
aaacataaacaaaga

SEQ ID NO: 1447926 - DNA, 15 bp, Homo sapiens
aacataaacaaagac

SEQ ID NO: 1447927 - DNA, 15 bp, Homo sapiens
acataaacaaagaca

SEQ ID NO: 1447928 - DNA, 15 bp, Homo sapiens
cataaacaaagacaa

SEQ ID NO: 1447929 - DNA, 15 bp, Homo sapiens
ataaacaaagacaag

SEQ ID NO: 1447930 - DNA, 15 bp, Homo sapiens
taaacaaagacaaga

SEQ ID NO: 1447931 - DNA, 15 bp, Homo sapiens
aaacaaagacaagac

SEQ ID NO: 1447932 - DNA, 15 bp, Homo sapiens
aacaaagacaagaca

SEQ ID NO: 1447933 - DNA, 15 bp, Homo sapiens
acaaagacaagacag

SEQ ID NO: 1447934 - DNA, 15 bp, Homo sapiens
caaagacaagacagg

SEQ ID NO: 1447935 - DNA, 15 bp, Homo sapiens
aaagacaagacaggt

SEQ ID NO: 1447936 - DNA, 15 bp, Homo sapiens
aagacaagacaggtt

SEQ ID NO: 1447937 - DNA, 15 bp, Homo sapiens
agacaagacaggtta

SEQ ID NO: 1447938 - DNA, 15 bp, Homo sapiens
gacaagacaggttac

SEQ ID NO: 1447939 - DNA, 15 bp, Homo sapiens
acaagacaggttaca

SEQ ID NO: 1447940 - DNA, 15 bp, Homo sapiens
caagacaggttacat

SEQ ID NO: 1447941 - DNA, 15 bp, Homo sapiens
aagacaggttacatg

SEQ ID NO: 1447942 - DNA, 15 bp, Homo sapiens
agacaggttacatga

SEQ ID NO: 1447943 - DNA, 15 bp, Homo sapiens
gacaggttacatgac

SEQ ID NO: 1447944 - DNA, 15 bp, Homo sapiens
acaggttacatgaca

SEQ ID NO: 1447945 - DNA, 15 bp, Homo sapiens
caggttacatgacat

SEQ ID NO: 1447946 - DNA, 15 bp, Homo sapiens
aggttacatgacatg

SEQ ID NO: 1447947 - DNA, 15 bp, Homo sapiens
ggttacatgacatgt

SEQ ID NO: 1447948 - DNA, 15 bp, Homo sapiens
gttacatgacatgta

SEQ ID NO: 1447949 - DNA, 15 bp, Homo sapiens
ttacatgacatgtat

SEQ ID NO: 1447950 - DNA, 15 bp, Homo sapiens
tacatgacatgtata

SEQ ID NO: 1447951 - DNA, 15 bp, Homo sapiens
acatgacatgtatac

SEQ ID NO: 1447952 - DNA, 15 bp, Homo sapiens
catgacatgtatacc

SEQ ID NO: 1447953 - DNA, 15 bp, Homo sapiens
atgacatgtataccc

SEQ ID NO: 1447954 - DNA, 15 bp, Homo sapiens
tgacatgtataccct

SEQ ID NO: 1447955 - DNA, 15 bp, Homo sapiens
gacatgtataccctt

SEQ ID NO: 1447956 - DNA, 15 bp, Homo sapiens
acatgtatacccttc

SEQ ID NO: 1447957 - DNA, 15 bp, Homo sapiens
catgtatacccttct

SEQ ID NO: 1447958 - DNA, 15 bp, Homo sapiens
atgtatacccttctg

SEQ ID NO: 1447959 - DNA, 15 bp, Homo sapiens
tgtatacccttctgc

SEQ ID NO: 1447960 - DNA, 15 bp, Homo sapiens
gtatacccttctgca

SEQ ID NO: 1447961 - DNA, 15 bp, Homo sapiens
tatacccttctgcac

SEQ ID NO: 1447962 - DNA, 15 bp, Homo sapiens
atacccttctgcacc

SEQ ID NO: 1447963 - DNA, 15 bp, Homo sapiens
tacccttctgcacct

SEQ ID NO: 1447964 - DNA, 15 bp, Homo sapiens
acccttctgcaccta

SEQ ID NO: 1447965 - DNA, 15 bp, Homo sapiens
cccttctgcacctag

SEQ ID NO: 1447966 - DNA, 15 bp, Homo sapiens
ccttctgcacctagt

SEQ ID NO: 1447967 - DNA, 15 bp, Homo sapiens
cttctgcacctagtt

SEQ ID NO: 1447968 - DNA, 15 bp, Homo sapiens
ttctgcacctagttt

SEQ ID NO: 1447969 - DNA, 15 bp, Homo sapiens
tctgcacctagtttt

SEQ ID NO: 1447970 - DNA, 15 bp, Homo sapiens
ctgcacctagtttta

SEQ ID NO: 1447971 - DNA, 15 bp, Homo sapiens
tgcacctagttttat

SEQ ID NO: 1447972 - DNA, 15 bp, Homo sapiens
gcacctagttttata

SEQ ID NO: 1447973 - DNA, 15 bp, Homo sapiens
cacctagttttatac

SEQ ID NO: 1447974 - DNA, 15 bp, Homo sapiens
acctagttttatacc

SEQ ID NO: 1447975 - DNA, 15 bp, Homo sapiens
cctagttttatacct

SEQ ID NO: 1447976 - DNA, 15 bp, Homo sapiens
ctagttttatacctt

SEQ ID NO: 1447977 - DNA, 15 bp, Homo sapiens
tagttttatacctta

SEQ ID NO: 1447978 - DNA, 15 bp, Homo sapiens
agttttataccttac

SEQ ID NO: 1447979 - DNA, 15 bp, Homo sapiens
gttttataccttacc

SEQ ID NO: 1447980 - DNA, 15 bp, Homo sapiens
ttttataccttacct

SEQ ID NO: 1447981 - DNA, 15 bp, Homo sapiens
tttataccttacctt

SEQ ID NO: 1447982 - DNA, 15 bp, Homo sapiens
ttataccttaccttg

SEQ ID NO: 1447983 - DNA, 15 bp, Homo sapiens
tataccttaccttgt

SEQ ID NO: 1447984 - DNA, 15 bp, Homo sapiens
ataccttaccttgta

SEQ ID NO: 1447985 - DNA, 15 bp, Homo sapiens
taccttaccttgtag

SEQ ID NO: 1447986 - DNA, 15 bp, Homo sapiens
accttaccttgtagt

SEQ ID NO: 1447987 - DNA, 15 bp, Homo sapiens
ccttaccttgtagtt

SEQ ID NO: 1447988 - DNA, 15 bp, Homo sapiens
cttaccttgtagttt

SEQ ID NO: 1447989 - DNA, 15 bp, Homo sapiens
ttaccttgtagttta

SEQ ID NO: 1447990 - DNA, 15 bp, Homo sapiens
taccttgtagtttat

SEQ ID NO: 1447991 - DNA, 15 bp, Homo sapiens
accttgtagtttatt

SEQ ID NO: 1447992 - DNA, 15 bp, Homo sapiens
ccttgtagtttattt

SEQ ID NO: 1447993 - DNA, 15 bp, Homo sapiens
cttgtagtttatttt

SEQ ID NO: 1447994 - DNA, 15 bp, Homo sapiens
ttgtagtttattttt

SEQ ID NO: 1447995 - DNA, 15 bp, Homo sapiens
tgtagtttattttta

SEQ ID NO: 1447996 - DNA, 15 bp, Homo sapiens
gtagtttatttttaa

SEQ ID NO: 1447997 - DNA, 15 bp, Homo sapiens
tagtttatttttaag

SEQ ID NO: 1447998 - DNA, 15 bp, Homo sapiens
agtttatttttaagc

SEQ ID NO: 1447999 - DNA, 15 bp, Homo sapiens
gtttatttttaagca

SEQ ID NO: 1448000 - DNA, 15 bp, Homo sapiens
tttatttttaagcat

SEQ ID NO: 1448001 - DNA, 15 bp, Homo sapiens
ttatttttaagcatg

SEQ ID NO: 1448002 - DNA, 15 bp, Homo sapiens
tatttttaagcatgt

SEQ ID NO: 1448003 - DNA, 15 bp, Homo sapiens
atttttaagcatgta

SEQ ID NO: 1448004 - DNA, 15 bp, Homo sapiens
tttttaagcatgtaa

SEQ ID NO: 1448005 - DNA, 15 bp, Homo sapiens
ttttaagcatgtaaa

SEQ ID NO: 1448006 - DNA, 15 bp, Homo sapiens
tttaagcatgtaaat

SEQ ID NO: 1448007 - DNA, 15 bp, Homo sapiens
ttaagcatgtaaatg

SEQ ID NO: 1448008 - DNA, 15 bp, Homo sapiens
taagcatgtaaatgt

SEQ ID NO: 1448009 - DNA, 15 bp, Homo sapiens
aagcatgtaaatgtt

SEQ ID NO: 1448010 - DNA, 15 bp, Homo sapiens
agcatgtaaatgttc

SEQ ID NO: 1448011 - DNA, 15 bp, Homo sapiens
gcatgtaaatgttca

SEQ ID NO: 1448012 - DNA, 15 bp, Homo sapiens
catgtaaatgttcaa

SEQ ID NO: 1448013 - DNA, 15 bp, Homo sapiens
atgtaaatgttcaat

SEQ ID NO: 1448014 - DNA, 15 bp, Homo sapiens
tgtaaatgttcaatg

SEQ ID NO: 1448015 - DNA, 15 bp, Homo sapiens
gtaaatgttcaatgt

SEQ ID NO: 1448016 - DNA, 15 bp, Homo sapiens
taaatgttcaatgtt

SEQ ID NO: 1448017 - DNA, 15 bp, Homo sapiens
aaatgttcaatgttc

SEQ ID NO: 1448018 - DNA, 15 bp, Homo sapiens
aatgttcaatgttca

SEQ ID NO: 1448019 - DNA, 15 bp, Homo sapiens
atgttcaatgttcat

SEQ ID NO: 1448020 - DNA, 15 bp, Homo sapiens
tgttcaatgttcatg

SEQ ID NO: 1448021 - DNA, 15 bp, Homo sapiens
gttcaatgttcatga

SEQ ID NO: 1448022 - DNA, 15 bp, Homo sapiens
ttcaatgttcatgac

SEQ ID NO: 1448023 - DNA, 15 bp, Homo sapiens
tcaatgttcatgact

SEQ ID NO: 1448024 - DNA, 15 bp, Homo sapiens
caatgttcatgacta

SEQ ID NO: 1448025 - DNA, 15 bp, Homo sapiens
aatgttcatgactaa

SEQ ID NO: 1448026 - DNA, 15 bp, Homo sapiens
atgttcatgactaaa

SEQ ID NO: 1448027 - DNA, 15 bp, Homo sapiens
tgttcatgactaaat

SEQ ID NO: 1448028 - DNA, 15 bp, Homo sapiens
gttcatgactaaatt

SEQ ID NO: 1448029 - DNA, 15 bp, Homo sapiens
ttcatgactaaattt

SEQ ID NO: 1448030 - DNA, 15 bp, Homo sapiens
tcatgactaaatttg

SEQ ID NO: 1448031 - DNA, 15 bp, Homo sapiens
catgactaaatttgg

SEQ ID NO: 1448032 - DNA, 15 bp, Homo sapiens
atgactaaatttgga

SEQ ID NO: 1448033 - DNA, 15 bp, Homo sapiens
tgactaaatttggac

SEQ ID NO: 1448034 - DNA, 15 bp, Homo sapiens
gactaaatttggaca

SEQ ID NO: 1448035 - DNA, 15 bp, Homo sapiens
actaaatttggacag

SEQ ID NO: 1448036 - DNA, 15 bp, Homo sapiens
ctaaatttggacagg

SEQ ID NO: 1448037 - DNA, 15 bp, Homo sapiens
taaatttggacagga

SEQ ID NO: 1448038 - DNA, 15 bp, Homo sapiens
aaatttggacaggat

SEQ ID NO: 1448039 - DNA, 15 bp, Homo sapiens
aatttggacaggatc

SEQ ID NO: 1448040 - DNA, 15 bp, Homo sapiens
atttggacaggatca

SEQ ID NO: 1448041 - DNA, 15 bp, Homo sapiens
tttggacaggatcat

SEQ ID NO: 1448042 - DNA, 15 bp, Homo sapiens
ttggacaggatcata

SEQ ID NO: 1448043 - DNA, 15 bp, Homo sapiens
tggacaggatcatag

SEQ ID NO: 1448044 - DNA, 15 bp, Homo sapiens
ggacaggatcatagg

SEQ ID NO: 1448045 - DNA, 15 bp, Homo sapiens
gacaggatcatagga

SEQ ID NO: 1448046 - DNA, 15 bp, Homo sapiens
acaggatcataggaa

SEQ ID NO: 1448047 - DNA, 15 bp, Homo sapiens
caggatcataggaac

SEQ ID NO: 1448048 - DNA, 15 bp, Homo sapiens
aggatcataggaaca

SEQ ID NO: 1448049 - DNA, 15 bp, Homo sapiens
ggatcataggaacac

SEQ ID NO: 1448050 - DNA, 15 bp, Homo sapiens
gatcataggaacaca

SEQ ID NO: 1448051 - DNA, 15 bp, Homo sapiens
atcataggaacacag

SEQ ID NO: 1448052 - DNA, 15 bp, Homo sapiens
tcataggaacacaga

SEQ ID NO: 1448053 - DNA, 15 bp, Homo sapiens
cataggaacacagaa

SEQ ID NO: 1448054 - DNA, 15 bp, Homo sapiens
ataggaacacagaat

SEQ ID NO: 1448055 - DNA, 15 bp, Homo sapiens
taggaacacagaatt

SEQ ID NO: 1448056 - DNA, 15 bp, Homo sapiens
aggaacacagaattc

SEQ ID NO: 1448057 - DNA, 15 bp, Homo sapiens
ggaacacagaattca

SEQ ID NO: 1448058 - DNA, 15 bp, Homo sapiens
gaacacagaattcaa

SEQ ID NO: 1448059 - DNA, 15 bp, Homo sapiens
aacacagaattcaaa

SEQ ID NO: 1448060 - DNA, 15 bp, Homo sapiens
acacagaattcaaag

SEQ ID NO: 1448061 - DNA, 15 bp, Homo sapiens
cacagaattcaaagt

SEQ ID NO: 1448062 - DNA, 15 bp, Homo sapiens
acagaattcaaagtg

SEQ ID NO: 1448063 - DNA, 15 bp, Homo sapiens
cagaattcaaagtga

SEQ ID NO: 1448064 - DNA, 15 bp, Homo sapiens
agaattcaaagtgaa

SEQ ID NO: 1448065 - DNA, 15 bp, Homo sapiens
gaattcaaagtgaaa

SEQ ID NO: 1448066 - DNA, 15 bp, Homo sapiens
aattcaaagtgaaat

SEQ ID NO: 1448067 - DNA, 15 bp, Homo sapiens
attcaaagtgaaatt

SEQ ID NO: 1448068 - DNA, 15 bp, Homo sapiens
ttcaaagtgaaatta

SEQ ID NO: 1448069 - DNA, 15 bp, Homo sapiens
tcaaagtgaaattaa

SEQ ID NO: 1448070 - DNA, 15 bp, Homo sapiens
caaagtgaaattaaa

SEQ ID NO: 1448071 - DNA, 15 bp, Homo sapiens
aaagtgaaattaaaa

SEQ ID NO: 1448072 - DNA, 15 bp, Homo sapiens
aagtgaaattaaaat

SEQ ID NO: 1448073 - DNA, 15 bp, Homo sapiens
agtgaaattaaaatg

SEQ ID NO: 1448074 - DNA, 15 bp, Homo sapiens
gtgaaattaaaatgg

SEQ ID NO: 1448075 - DNA, 15 bp, Homo sapiens
tgaaattaaaatggg

SEQ ID NO: 1448076 - DNA, 15 bp, Homo sapiens
gaaattaaaatgggc

SEQ ID NO: 1448077 - DNA, 15 bp, Homo sapiens
aaattaaaatgggct

SEQ ID NO: 1448078 - DNA, 15 bp, Homo sapiens
aattaaaatgggctt

SEQ ID NO: 1448079 - DNA, 15 bp, Homo sapiens
attaaaatgggcttg

SEQ ID NO: 1448080 - DNA, 15 bp, Homo sapiens
ttaaaatgggcttgg

SEQ ID NO: 1448081 - DNA, 15 bp, Homo sapiens
taaaatgggcttggg

SEQ ID NO: 1448082 - DNA, 15 bp, Homo sapiens
aaaatgggcttgggt

SEQ ID NO: 1448083 - DNA, 15 bp, Homo sapiens
aaatgggcttgggtt

SEQ ID NO: 1448084 - DNA, 15 bp, Homo sapiens
aatgggcttgggttc

SEQ ID NO: 1448085 - DNA, 15 bp, Homo sapiens
atgggcttgggttct

SEQ ID NO: 1448086 - DNA, 15 bp, Homo sapiens
tgggcttgggttctt

SEQ ID NO: 1448087 - DNA, 15 bp, Homo sapiens
gggcttgggttcttt

SEQ ID NO: 1448088 - DNA, 15 bp, Homo sapiens
ggcttgggttcttta

SEQ ID NO: 1448089 - DNA, 15 bp, Homo sapiens
gcttgggttctttac

SEQ ID NO: 1448090 - DNA, 15 bp, Homo sapiens
cttgggttctttact

SEQ ID NO: 1448091 - DNA, 15 bp, Homo sapiens
ttgggttctttactt

SEQ ID NO: 1448092 - DNA, 15 bp, Homo sapiens
tgggttctttacttt

SEQ ID NO: 1448093 - DNA, 15 bp, Homo sapiens
ccatcttcaggtttc

SEQ ID NO: 1448094 - DNA, 15 bp, Homo sapiens
catcttcaggtttca

SEQ ID NO: 1448095 - DNA, 15 bp, Homo sapiens
atcttcaggtttcaa

SEQ ID NO: 1448096 - DNA, 15 bp, Homo sapiens
tcttcaggtttcaaa

SEQ ID NO: 1448097 - DNA, 15 bp, Homo sapiens
cttcaggtttcaaat

SEQ ID NO: 1448098 - DNA, 15 bp, Homo sapiens
ttcaggtttcaaata

SEQ ID NO: 1448099 - DNA, 15 bp, Homo sapiens
tcaggtttcaaataa

SEQ ID NO: 1448100 - DNA, 15 bp, Homo sapiens
caggtttcaaataat

SEQ ID NO: 1448101 - DNA, 15 bp, Homo sapiens
aggtttcaaataatg

SEQ ID NO: 1448102 - DNA, 15 bp, Homo sapiens
ggtttcaaataatgt

SEQ ID NO: 1448103 - DNA, 15 bp, Homo sapiens
gtttcaaataatgtt

SEQ ID NO: 1448104 - DNA, 15 bp, Homo sapiens
tttcaaataatgttg

SEQ ID NO: 1448105 - DNA, 15 bp, Homo sapiens
ttcaaataatgttgt

SEQ ID NO: 1448106 - DNA, 15 bp, Homo sapiens
tcaaataatgttgtc

SEQ ID NO: 1448107 - DNA, 15 bp, Homo sapiens
caaataatgttgtct

SEQ ID NO: 1448108 - DNA, 15 bp, Homo sapiens
aaataatgttgtctt

SEQ ID NO: 1448109 - DNA, 15 bp, Homo sapiens
aataatgttgtcttc

SEQ ID NO: 1448110 - DNA, 15 bp, Homo sapiens
ataatgttgtcttca

SEQ ID NO: 1448111 - DNA, 15 bp, Homo sapiens
taatgttgtcttcag

SEQ ID NO: 1448112 - DNA, 15 bp, Homo sapiens
aatgttgtcttcagg

SEQ ID NO: 1448113 - DNA, 15 bp, Homo sapiens
atgttgtcttcaggg

SEQ ID NO: 1448114 - DNA, 15 bp, Homo sapiens
tgttgtcttcagggc

SEQ ID NO: 1448115 - DNA, 15 bp, Homo sapiens
gttgtcttcagggca

SEQ ID NO: 1448116 - DNA, 15 bp, Homo sapiens
ttgtcttcagggcag

SEQ ID NO: 1448117 - DNA, 15 bp, Homo sapiens
gtcttcagggcaggc

SEQ ID NO: 1448118 - DNA, 15 bp, Homo sapiens
tcttcagggcaggca

SEQ ID NO: 1448119 - DNA, 15 bp, Homo sapiens
cttcagggcaggcag

SEQ ID NO: 1448120 - DNA, 15 bp, Homo sapiens
ttcagggcaggcagt

SEQ ID NO: 1448121 - DNA, 15 bp, Homo sapiens
tcagggcaggcagta

SEQ ID NO: 1448122 - DNA, 15 bp, Homo sapiens
cagggcaggcagtaa

SEQ ID NO: 1448123 - DNA, 15 bp, Homo sapiens
agggcaggcagtaac

SEQ ID NO: 1448124 - DNA, 15 bp, Homo sapiens
gggcaggcagtaaca

SEQ ID NO: 1448125 - DNA, 15 bp, Homo sapiens
ggcaggcagtaacag

SEQ ID NO: 1448126 - DNA, 15 bp, Homo sapiens
gcaggcagtaacaga

SEQ ID NO: 1448127 - DNA, 15 bp, Homo sapiens
caggcagtaacagaa

SEQ ID NO: 1448128 - DNA, 15 bp, Homo sapiens
aggcagtaacagaat

SEQ ID NO: 1448129 - DNA, 15 bp, Homo sapiens
ggcagtaacagaata

SEQ ID NO: 1448130 - DNA, 15 bp, Homo sapiens
gcagtaacagaataa

SEQ ID NO: 1448131 - DNA, 15 bp, Homo sapiens
cagtaacagaataaa

SEQ ID NO: 1448132 - DNA, 15 bp, Homo sapiens
agtaacagaataaaa

SEQ ID NO: 1448133 - DNA, 15 bp, Homo sapiens
gtaacagaataaaag

SEQ ID NO: 1448134 - DNA, 15 bp, Homo sapiens
taacagaataaaaga

SEQ ID NO: 1448135 - DNA, 15 bp, Homo sapiens
aacagaataaaagaa

SEQ ID NO: 1448136 - DNA, 15 bp, Homo sapiens
acagaataaaagaaa

SEQ ID NO: 1448137 - DNA, 15 bp, Homo sapiens
cagaataaaagaaaa

SEQ ID NO: 1448138 - DNA, 15 bp, Homo sapiens
agaataaaagaaaag

SEQ ID NO: 1448139 - DNA, 15 bp, Homo sapiens
gaataaaagaaaagg

SEQ ID NO: 1448140 - DNA, 15 bp, Homo sapiens
aataaaagaaaaggt

SEQ ID NO: 1448141 - DNA, 15 bp, Homo sapiens
ataaaagaaaaggta

SEQ ID NO: 1448142 - DNA, 15 bp, Homo sapiens
taaaagaaaaggtaa

SEQ ID NO: 1448143 - DNA, 15 bp, Homo sapiens
aaaagaaaaggtaaa

SEQ ID NO: 1448144 - DNA, 15 bp, Homo sapiens
aaagaaaaggtaaat

SEQ ID NO: 1448145 - DNA, 15 bp, Homo sapiens
aagaaaaggtaaatt

SEQ ID NO: 1448146 - DNA, 15 bp, Homo sapiens
agaaaaggtaaattc

SEQ ID NO: 1448147 - DNA, 15 bp, Homo sapiens
gaaaaggtaaattca

SEQ ID NO: 1448148 - DNA, 15 bp, Homo sapiens
aaaaggtaaattcat

SEQ ID NO: 1448149 - DNA, 15 bp, Homo sapiens
aaaggtaaattcatc

SEQ ID NO: 1448150 - DNA, 15 bp, Homo sapiens
aaggtaaattcatca

SEQ ID NO: 1448151 - DNA, 15 bp, Homo sapiens
aggtaaattcatcac

SEQ ID NO: 1448152 - DNA, 15 bp, Homo sapiens
ggtaaattcatcacc

SEQ ID NO: 1448153 - DNA, 15 bp, Homo sapiens
gtaaattcatcacct

SEQ ID NO: 1448154 - DNA, 15 bp, Homo sapiens
taaattcatcacctg

SEQ ID NO: 1448155 - DNA, 15 bp, Homo sapiens
aaattcatcacctgt

SEQ ID NO: 1448156 - DNA, 15 bp, Homo sapiens
aattcatcacctgtt

SEQ ID NO: 1448157 - DNA, 15 bp, Homo sapiens
attcatcacctgttt

SEQ ID NO: 1448158 - DNA, 15 bp, Homo sapiens
ttcatcacctgtttg

SEQ ID NO: 1448159 - DNA, 15 bp, Homo sapiens
tcatcacctgtttgc

SEQ ID NO: 1448160 - DNA, 15 bp, Homo sapiens
catcacctgtttgct

SEQ ID NO: 1448161 - DNA, 15 bp, Homo sapiens
atcacctgtttgctg

SEQ ID NO: 1448162 - DNA, 15 bp, Homo sapiens
tcacctgtttgctgc

SEQ ID NO: 1448163 - DNA, 15 bp, Homo sapiens
cacctgtttgctgct

SEQ ID NO: 1448164 - DNA, 15 bp, Homo sapiens
acctgtttgctgcta

SEQ ID NO: 1448165 - DNA, 15 bp, Homo sapiens
cctgtttgctgctac

SEQ ID NO: 1448166 - DNA, 15 bp, Homo sapiens
ctgtttgctgctact

SEQ ID NO: 1448167 - DNA, 15 bp, Homo sapiens
tgtttgctgctactt

SEQ ID NO: 1448168 - DNA, 15 bp, Homo sapiens
gtttgctgctacttt

SEQ ID NO: 1448169 - DNA, 15 bp, Homo sapiens
tttgctgctacttta

SEQ ID NO: 1448170 - DNA, 15 bp, Homo sapiens
ttgctgctactttaa

SEQ ID NO: 1448171 - DNA, 15 bp, Homo sapiens
tgctgctactttaag

SEQ ID NO: 1448172 - DNA, 15 bp, Homo sapiens
gctgctactttaagt

SEQ ID NO: 1448173 - DNA, 15 bp, Homo sapiens
ctgctactttaagtc

SEQ ID NO: 1448174 - DNA, 15 bp, Homo sapiens
tgctactttaagtcc

SEQ ID NO: 1448175 - DNA, 15 bp, Homo sapiens
gctactttaagtcct

SEQ ID NO: 1448176 - DNA, 15 bp, Homo sapiens
ctactttaagtcctg

SEQ ID NO: 1448177 - DNA, 15 bp, Homo sapiens
tactttaagtcctgg

SEQ ID NO: 1448178 - DNA, 15 bp, Homo sapiens
actttaagtcctggt

SEQ ID NO: 1448179 - DNA, 15 bp, Homo sapiens
ctttaagtcctggta

SEQ ID NO: 1448180 - DNA, 15 bp, Homo sapiens
tttaagtcctggtat

SEQ ID NO: 1448181 - DNA, 15 bp, Homo sapiens
ttaagtcctggtatt

SEQ ID NO: 1448182 - DNA, 15 bp, Homo sapiens
taagtcctggtattc

SEQ ID NO: 1448183 - DNA, 15 bp, Homo sapiens
aagtcctggtattct

SEQ ID NO: 1448184 - DNA, 15 bp, Homo sapiens
agtcctggtattcta

SEQ ID NO: 1448185 - DNA, 15 bp, Homo sapiens
gtcctggtattctat

SEQ ID NO: 1448186 - DNA, 15 bp, Homo sapiens
tcctggtattctatt

SEQ ID NO: 1448187 - DNA, 15 bp, Homo sapiens
cctggtattctattg

SEQ ID NO: 1448188 - DNA, 15 bp, Homo sapiens
ctggtattctattgt

SEQ ID NO: 1448189 - DNA, 15 bp, Homo sapiens
tggtattctattgta

SEQ ID NO: 1448190 - DNA, 15 bp, Homo sapiens
ggtattctattgtaa

SEQ ID NO: 1448191 - DNA, 15 bp, Homo sapiens
gtattctattgtaat

SEQ ID NO: 1448192 - DNA, 15 bp, Homo sapiens
tattctattgtaatc

SEQ ID NO: 1448193 - DNA, 15 bp, Homo sapiens
attctattgtaatct

SEQ ID NO: 1448194 - DNA, 15 bp, Homo sapiens
ttctattgtaatctg

SEQ ID NO: 1448195 - DNA, 15 bp, Homo sapiens
tctattgtaatctgc

SEQ ID NO: 1448196 - DNA, 15 bp, Homo sapiens
ctattgtaatctgcc

SEQ ID NO: 1448197 - DNA, 15 bp, Homo sapiens
tattgtaatctgcct

SEQ ID NO: 1448198 - DNA, 15 bp, Homo sapiens
attgtaatctgcctt

SEQ ID NO: 1448199 - DNA, 15 bp, Homo sapiens
ttgtaatctgccttc

SEQ ID NO: 1448200 - DNA, 15 bp, Homo sapiens
tgtaatctgccttct

SEQ ID NO: 1448201 - DNA, 15 bp, Homo sapiens
gtaatctgccttcta

SEQ ID NO: 1448202 - DNA, 15 bp, Homo sapiens
taatctgccttctac

SEQ ID NO: 1448203 - DNA, 15 bp, Homo sapiens
aatctgccttctact

SEQ ID NO: 1448204 - DNA, 15 bp, Homo sapiens
atctgccttctactc

SEQ ID NO: 1448205 - DNA, 15 bp, Homo sapiens
tctgccttctactcc

SEQ ID NO: 1448206 - DNA, 15 bp, Homo sapiens
ctgccttctactcct

SEQ ID NO: 1448207 - DNA, 15 bp, Homo sapiens
tgccttctactcctt

SEQ ID NO: 1448208 - DNA, 15 bp, Homo sapiens
gccttctactccttt

SEQ ID NO: 1448209 - DNA, 15 bp, Homo sapiens
ccttctactcctttg

SEQ ID NO: 1448210 - DNA, 15 bp, Homo sapiens
cttctactcctttgc

SEQ ID NO: 1448211 - DNA, 15 bp, Homo sapiens
ttctactcctttgca

SEQ ID NO: 1448212 - DNA, 15 bp, Homo sapiens
tctactcctttgcaa

SEQ ID NO: 1448213 - DNA, 15 bp, Homo sapiens
ctactcctttgcaaa

SEQ ID NO: 1448214 - DNA, 15 bp, Homo sapiens
tactcctttgcaaag

SEQ ID NO: 1448215 - DNA, 15 bp, Homo sapiens
actcctttgcaaagt

SEQ ID NO: 1448216 - DNA, 15 bp, Homo sapiens
ctcctttgcaaagtc

SEQ ID NO: 1448217 - DNA, 15 bp, Homo sapiens
tcctttgcaaagtcc

SEQ ID NO: 1448218 - DNA, 15 bp, Homo sapiens
cctttgcaaagtcct

SEQ ID NO: 1448219 - DNA, 15 bp, Homo sapiens
ctttgcaaagtcctc

SEQ ID NO: 1448220 - DNA, 15 bp, Homo sapiens
tttgcaaagtcctca

SEQ ID NO: 1448221 - DNA, 15 bp, Homo sapiens
ttgcaaagtcctcaa

SEQ ID NO: 1448222 - DNA, 15 bp, Homo sapiens
tgcaaagtcctcaaa

SEQ ID NO: 1448223 - DNA, 15 bp, Homo sapiens
gcaaagtcctcaaat

SEQ ID NO: 1448224 - DNA, 15 bp, Homo sapiens
caaagtcctcaaatg

SEQ ID NO: 1448225 - DNA, 15 bp, Homo sapiens
aaagtcctcaaatgg

SEQ ID NO: 1448226 - DNA, 15 bp, Homo sapiens
aagtcctcaaatggt

SEQ ID NO: 1448227 - DNA, 15 bp, Homo sapiens
agtcctcaaatggtt

SEQ ID NO: 1448228 - DNA, 15 bp, Homo sapiens
gtcctcaaatggttg

SEQ ID NO: 1448229 - DNA, 15 bp, Homo sapiens
tcctcaaatggttgc

SEQ ID NO: 1448230 - DNA, 15 bp, Homo sapiens
cctcaaatggttgct

SEQ ID NO: 1448231 - DNA, 15 bp, Homo sapiens
ctcaaatggttgctc

SEQ ID NO: 1448232 - DNA, 15 bp, Homo sapiens
tcaaatggttgctcc

SEQ ID NO: 1448233 - DNA, 15 bp, Homo sapiens
caaatggttgctcca

SEQ ID NO: 1448234 - DNA, 15 bp, Homo sapiens
aaatggttgctccat

SEQ ID NO: 1448235 - DNA, 15 bp, Homo sapiens
aatggttgctccatg

SEQ ID NO: 1448236 - DNA, 15 bp, Homo sapiens
atggttgctccatgc

SEQ ID NO: 1448237 - DNA, 15 bp, Homo sapiens
tggttgctccatgca

SEQ ID NO: 1448238 - DNA, 15 bp, Homo sapiens
ggttgctccatgcat

SEQ ID NO: 1448239 - DNA, 15 bp, Homo sapiens
gttgctccatgcatt

SEQ ID NO: 1448240 - DNA, 15 bp, Homo sapiens
ttgctccatgcattt

SEQ ID NO: 1448241 - DNA, 15 bp, Homo sapiens
tgctccatgcattta

SEQ ID NO: 1448242 - DNA, 15 bp, Homo sapiens
gctccatgcatttag

SEQ ID NO: 1448243 - DNA, 15 bp, Homo sapiens
ctccatgcatttagg

SEQ ID NO: 1448244 - DNA, 15 bp, Homo sapiens
tccatgcatttagga

SEQ ID NO: 1448245 - DNA, 15 bp, Homo sapiens
ccatgcatttaggag

SEQ ID NO: 1448246 - DNA, 15 bp, Homo sapiens
catgcatttaggaga

SEQ ID NO: 1448247 - DNA, 15 bp, Homo sapiens
atgcatttaggagag

SEQ ID NO: 1448248 - DNA, 15 bp, Homo sapiens
tgcatttaggagaga

SEQ ID NO: 1448249 - DNA, 15 bp, Homo sapiens
gcatttaggagagag

SEQ ID NO: 1448250 - DNA, 15 bp, Homo sapiens
catttaggagagaga

SEQ ID NO: 1448251 - DNA, 15 bp, Homo sapiens
atttaggagagagaa

SEQ ID NO: 1448252 - DNA, 15 bp, Homo sapiens
tttaggagagagaag

SEQ ID NO: 1448253 - DNA, 15 bp, Homo sapiens
ttaggagagagaaga

SEQ ID NO: 1448254 - DNA, 15 bp, Homo sapiens
taggagagagaagat

SEQ ID NO: 1448255 - DNA, 15 bp, Homo sapiens
aggagagagaagatt

SEQ ID NO: 1448256 - DNA, 15 bp, Homo sapiens
ggagagagaagattg

SEQ ID NO: 1448257 - DNA, 15 bp, Homo sapiens
gagagagaagattga

SEQ ID NO: 1448258 - DNA, 15 bp, Homo sapiens
agagagaagattgaa

SEQ ID NO: 1448259 - DNA, 15 bp, Homo sapiens
gagagaagattgaat

SEQ ID NO: 1448260 - DNA, 15 bp, Homo sapiens
agagaagattgaatg

SEQ ID NO: 1448261 - DNA, 15 bp, Homo sapiens
gagaagattgaatgt

SEQ ID NO: 1448262 - DNA, 15 bp, Homo sapiens
agaagattgaatgta

SEQ ID NO: 1448263 - DNA, 15 bp, Homo sapiens
gaagattgaatgtat

SEQ ID NO: 1448264 - DNA, 15 bp, Homo sapiens
aagattgaatgtatt

SEQ ID NO: 1448265 - DNA, 15 bp, Homo sapiens
agattgaatgtattt

SEQ ID NO: 1448266 - DNA, 15 bp, Homo sapiens
gattgaatgtattta

SEQ ID NO: 1448267 - DNA, 15 bp, Homo sapiens
attgaatgtatttac

SEQ ID NO: 1448268 - DNA, 15 bp, Homo sapiens
ttgaatgtatttact

SEQ ID NO: 1448269 - DNA, 15 bp, Homo sapiens
tgaatgtatttactc

SEQ ID NO: 1448270 - DNA, 15 bp, Homo sapiens
gaatgtatttactcc

SEQ ID NO: 1448271 - DNA, 15 bp, Homo sapiens
aatgtatttactcca

SEQ ID NO: 1448272 - DNA, 15 bp, Homo sapiens
atgtatttactccat

SEQ ID NO: 1448273 - DNA, 15 bp, Homo sapiens
tgtatttactccatt

SEQ ID NO: 1448274 - DNA, 15 bp, Homo sapiens
gtatttactccattg

SEQ ID NO: 1448275 - DNA, 15 bp, Homo sapiens
tatttactccattgt

SEQ ID NO: 1448276 - DNA, 15 bp, Homo sapiens
atttactccattgta

SEQ ID NO: 1448277 - DNA, 15 bp, Homo sapiens
tttactccattgtac

SEQ ID NO: 1448278 - DNA, 15 bp, Homo sapiens
ttactccattgtacc

SEQ ID NO: 1448279 - DNA, 15 bp, Homo sapiens
tactccattgtacct

SEQ ID NO: 1448280 - DNA, 15 bp, Homo sapiens
actccattgtacctg

SEQ ID NO: 1448281 - DNA, 15 bp, Homo sapiens
ctccattgtacctgg

SEQ ID NO: 1448282 - DNA, 15 bp, Homo sapiens
tccattgtacctgga

SEQ ID NO: 1448283 - DNA, 15 bp, Homo sapiens
ccattgtacctggaa

SEQ ID NO: 1448284 - DNA, 15 bp, Homo sapiens
cattgtacctggaac

SEQ ID NO: 1448285 - DNA, 15 bp, Homo sapiens
attgtacctggaacc

SEQ ID NO: 1448286 - DNA, 15 bp, Homo sapiens
ttgtacctggaacca

SEQ ID NO: 1448287 - DNA, 15 bp, Homo sapiens
tgtacctggaaccag

SEQ ID NO: 1448288 - DNA, 15 bp, Homo sapiens
gtacctggaaccaga

SEQ ID NO: 1448289 - DNA, 15 bp, Homo sapiens
tacctggaaccagat

SEQ ID NO: 1448290 - DNA, 15 bp, Homo sapiens
acctggaaccagatg

SEQ ID NO: 1448291 - DNA, 15 bp, Homo sapiens
cctggaaccagatgc

SEQ ID NO: 1448292 - DNA, 15 bp, Homo sapiens
ctggaaccagatgcc

SEQ ID NO: 1448293 - DNA, 15 bp, Homo sapiens
tggaaccagatgccc

SEQ ID NO: 1448294 - DNA, 15 bp, Homo sapiens
ggaaccagatgccct

SEQ ID NO: 1448295 - DNA, 15 bp, Homo sapiens
gaaccagatgccctt

SEQ ID NO: 1448296 - DNA, 15 bp, Homo sapiens
aaccagatgcccttg

SEQ ID NO: 1448297 - DNA, 15 bp, Homo sapiens
accagatgcccttgc

SEQ ID NO: 1448298 - DNA, 15 bp, Homo sapiens
ccagatgcccttgcc

SEQ ID NO: 1448299 - DNA, 15 bp, Homo sapiens
cagatgcccttgccc

SEQ ID NO: 1448300 - DNA, 15 bp, Homo sapiens
agatgcccttgccct

SEQ ID NO: 1448301 - DNA, 15 bp, Homo sapiens
gatgcccttgccctg

SEQ ID NO: 1448302 - DNA, 15 bp, Homo sapiens
atgcccttgccctgc

SEQ ID NO: 1448303 - DNA, 15 bp, Homo sapiens
tgcccttgccctgca

SEQ ID NO: 1448304 - DNA, 15 bp, Homo sapiens
gcccttgccctgcat

SEQ ID NO: 1448305 - DNA, 15 bp, Homo sapiens
cccttgccctgcatc

SEQ ID NO: 1448306 - DNA, 15 bp, Homo sapiens
ccttgccctgcatca

SEQ ID NO: 1448307 - DNA, 15 bp, Homo sapiens
cttgccctgcatcac

SEQ ID NO: 1448308 - DNA, 15 bp, Homo sapiens
ttgccctgcatcacc

SEQ ID NO: 1448309 - DNA, 15 bp, Homo sapiens
tgccctgcatcaccc

SEQ ID NO: 1448310 - DNA, 15 bp, Homo sapiens
gccctgcatcacccc

SEQ ID NO: 1448311 - DNA, 15 bp, Homo sapiens
ccctgcatcacccca

SEQ ID NO: 1448312 - DNA, 15 bp, Homo sapiens
cctgcatcaccccat

SEQ ID NO: 1448313 - DNA, 15 bp, Homo sapiens
ctgcatcaccccatg

SEQ ID NO: 1448314 - DNA, 15 bp, Homo sapiens
tgcatcaccccatgt

SEQ ID NO: 1448315 - DNA, 15 bp, Homo sapiens
gcatcaccccatgtc

SEQ ID NO: 1448316 - DNA, 15 bp, Homo sapiens
catcaccccatgtca

SEQ ID NO: 1448317 - DNA, 15 bp, Homo sapiens
atcaccccatgtcat

SEQ ID NO: 1448318 - DNA, 15 bp, Homo sapiens
tcaccccatgtcatt

SEQ ID NO: 1448319 - DNA, 15 bp, Homo sapiens
caccccatgtcattt

SEQ ID NO: 1448320 - DNA, 15 bp, Homo sapiens
accccatgtcatttc

SEQ ID NO: 1448321 - DNA, 15 bp, Homo sapiens
ccccatgtcatttct

SEQ ID NO: 1448322 - DNA, 15 bp, Homo sapiens
cccatgtcatttctt

SEQ ID NO: 1448323 - DNA, 15 bp, Homo sapiens
ccatgtcatttctta

SEQ ID NO: 1448324 - DNA, 15 bp, Homo sapiens
catgtcatttcttag

SEQ ID NO: 1448325 - DNA, 15 bp, Homo sapiens
atgtcatttcttagc

SEQ ID NO: 1448326 - DNA, 15 bp, Homo sapiens
tgtcatttcttagca

SEQ ID NO: 1448327 - DNA, 15 bp, Homo sapiens
gtcatttcttagcag

SEQ ID NO: 1448328 - DNA, 15 bp, Homo sapiens
tcatttcttagcaga

SEQ ID NO: 1448329 - DNA, 15 bp, Homo sapiens
catttcttagcagag

SEQ ID NO: 1448330 - DNA, 15 bp, Homo sapiens
atttcttagcagagc

SEQ ID NO: 1448331 - DNA, 15 bp, Homo sapiens
tttcttagcagagcc

SEQ ID NO: 1448332 - DNA, 15 bp, Homo sapiens
ttcttagcagagcct

SEQ ID NO: 1448333 - DNA, 15 bp, Homo sapiens
tcttagcagagcctt

SEQ ID NO: 1448334 - DNA, 15 bp, Homo sapiens
cttagcagagccttt

SEQ ID NO: 1448335 - DNA, 15 bp, Homo sapiens
ttagcagagcctttg

SEQ ID NO: 1448336 - DNA, 15 bp, Homo sapiens
tagcagagcctttga

SEQ ID NO: 1448337 - DNA, 15 bp, Homo sapiens
agcagagcctttgag

SEQ ID NO: 1448338 - DNA, 15 bp, Homo sapiens
gcagagcctttgaga

SEQ ID NO: 1448339 - DNA, 15 bp, Homo sapiens
cagagcctttgagat

SEQ ID NO: 1448340 - DNA, 15 bp, Homo sapiens
agagcctttgagatt

SEQ ID NO: 1448341 - DNA, 15 bp, Homo sapiens
gagcctttgagattt

SEQ ID NO: 1448342 - DNA, 15 bp, Homo sapiens
agcctttgagatttt

SEQ ID NO: 1448343 - DNA, 15 bp, Homo sapiens
gcctttgagattttt

SEQ ID NO: 1448344 - DNA, 15 bp, Homo sapiens
cctttgagatttttg

SEQ ID NO: 1448345 - DNA, 15 bp, Homo sapiens
ctttgagatttttgt

SEQ ID NO: 1448346 - DNA, 15 bp, Homo sapiens
tttgagatttttgtg

SEQ ID NO: 1448347 - DNA, 15 bp, Homo sapiens
ttgagatttttgtgt

SEQ ID NO: 1448348 - DNA, 15 bp, Homo sapiens
tgagatttttgtgtg

SEQ ID NO: 1448349 - DNA, 15 bp, Homo sapiens
gagatttttgtgtgt

SEQ ID NO: 1448350 - DNA, 15 bp, Homo sapiens
agatttttgtgtgtg

SEQ ID NO: 1448351 - DNA, 15 bp, Homo sapiens
gatttttgtgtgtgt

SEQ ID NO: 1448352 - DNA, 15 bp, Homo sapiens
atttttgtgtgtgtg

SEQ ID NO: 1448353 - DNA, 15 bp, Homo sapiens
tttttgtgtgtgtgt

SEQ ID NO: 1448354 - DNA, 15 bp, Homo sapiens
tttgtgtgtgtgtgc

SEQ ID NO: 1448355 - DNA, 15 bp, Homo sapiens
ccacattctaggagc

SEQ ID NO: 1448356 - DNA, 15 bp, Homo sapiens
cacattctaggagct

SEQ ID NO: 1448357 - DNA, 15 bp, Homo sapiens
acattctaggagctc

SEQ ID NO: 1448358 - DNA, 15 bp, Homo sapiens
cattctaggagctca

SEQ ID NO: 1448359 - DNA, 15 bp, Homo sapiens
attctaggagctcag

SEQ ID NO: 1448360 - DNA, 15 bp, Homo sapiens
ttctaggagctcagt

SEQ ID NO: 1448361 - DNA, 15 bp, Homo sapiens
tctaggagctcagta

SEQ ID NO: 1448362 - DNA, 15 bp, Homo sapiens
ctaggagctcagtac

SEQ ID NO: 1448363 - DNA, 15 bp, Homo sapiens
taggagctcagtaca

SEQ ID NO: 1448364 - DNA, 15 bp, Homo sapiens
aggagctcagtacat

SEQ ID NO: 1448365 - DNA, 15 bp, Homo sapiens
ggagctcagtacata

SEQ ID NO: 1448366 - DNA, 15 bp, Homo sapiens
gagctcagtacatat

SEQ ID NO: 1448367 - DNA, 15 bp, Homo sapiens
agctcagtacatatt

SEQ ID NO: 1448368 - DNA, 15 bp, Homo sapiens
gctcagtacatattt

SEQ ID NO: 1448369 - DNA, 15 bp, Homo sapiens
ctcagtacatatttg

SEQ ID NO: 1448370 - DNA, 15 bp, Homo sapiens
tcagtacatatttga

SEQ ID NO: 1448371 - DNA, 15 bp, Homo sapiens
cagtacatatttgat

SEQ ID NO: 1448372 - DNA, 15 bp, Homo sapiens
agtacatatttgata

SEQ ID NO: 1448373 - DNA, 15 bp, Homo sapiens
gtacatatttgataa

SEQ ID NO: 1448374 - DNA, 15 bp, Homo sapiens
tacatatttgataaa

SEQ ID NO: 1448375 - DNA, 15 bp, Homo sapiens
acatatttgataaat

SEQ ID NO: 1448376 - DNA, 15 bp, Homo sapiens
catatttgataaatg

SEQ ID NO: 1448377 - DNA, 15 bp, Homo sapiens
atatttgataaatga

SEQ ID NO: 1448378 - DNA, 15 bp, Homo sapiens
tatttgataaatgaa

SEQ ID NO: 1448379 - DNA, 15 bp, Homo sapiens
atttgataaatgaat

SEQ ID NO: 1448380 - DNA, 15 bp, Homo sapiens
tttgataaatgaatg

SEQ ID NO: 1448381 - DNA, 15 bp, Homo sapiens
ttgataaatgaatga

SEQ ID NO: 1448382 - DNA, 15 bp, Homo sapiens
tgataaatgaatgaa

SEQ ID NO: 1448383 - DNA, 15 bp, Homo sapiens
gataaatgaatgaat

SEQ ID NO: 1448384 - DNA, 15 bp, Homo sapiens
ataaatgaatgaatt

SEQ ID NO: 1448385 - DNA, 15 bp, Homo sapiens
taaatgaatgaattg

SEQ ID NO: 1448386 - DNA, 15 bp, Homo sapiens
aaatgaatgaattgt

SEQ ID NO: 1448387 - DNA, 15 bp, Homo sapiens
aatgaatgaattgtt

SEQ ID NO: 1448388 - DNA, 15 bp, Homo sapiens
atgaatgaattgttg

SEQ ID NO: 1448389 - DNA, 15 bp, Homo sapiens
tgaatgaattgttga

SEQ ID NO: 1448390 - DNA, 15 bp, Homo sapiens
gaatgaattgttgag

SEQ ID NO: 1448391 - DNA, 15 bp, Homo sapiens
aatgaattgttgagg

SEQ ID NO: 1448392 - DNA, 15 bp, Homo sapiens
atgaattgttgaggt

SEQ ID NO: 1448393 - DNA, 15 bp, Homo sapiens
tgaattgttgaggtt

SEQ ID NO: 1448394 - DNA, 15 bp, Homo sapiens
gaattgttgaggttg

SEQ ID NO: 1448395 - DNA, 15 bp, Homo sapiens
aattgttgaggttga

SEQ ID NO: 1448396 - DNA, 15 bp, Homo sapiens
attgttgaggttgac

SEQ ID NO: 1448397 - DNA, 15 bp, Homo sapiens
ttgttgaggttgaca

SEQ ID NO: 1448398 - DNA, 15 bp, Homo sapiens
tgttgaggttgacag

SEQ ID NO: 1448399 - DNA, 15 bp, Homo sapiens
gttgaggttgacagt

SEQ ID NO: 1448400 - DNA, 15 bp, Homo sapiens
ttgaggttgacagtt

SEQ ID NO: 1448401 - DNA, 15 bp, Homo sapiens
tgaggttgacagtta

SEQ ID NO: 1448402 - DNA, 15 bp, Homo sapiens
gaggttgacagttac

SEQ ID NO: 1448403 - DNA, 15 bp, Homo sapiens
aggttgacagttacc

SEQ ID NO: 1448404 - DNA, 15 bp, Homo sapiens
ggttgacagttaccc

SEQ ID NO: 1448405 - DNA, 15 bp, Homo sapiens
gttgacagttaccca

SEQ ID NO: 1448406 - DNA, 15 bp, Homo sapiens
ttgacagttacccag

SEQ ID NO: 1448407 - DNA, 15 bp, Homo sapiens
tgacagttacccagg

SEQ ID NO: 1448408 - DNA, 15 bp, Homo sapiens
gacagttacccagga

SEQ ID NO: 1448409 - DNA, 15 bp, Homo sapiens
acagttacccaggac

SEQ ID NO: 1448410 - DNA, 15 bp, Homo sapiens
cagttacccaggact

SEQ ID NO: 1448411 - DNA, 15 bp, Homo sapiens
agttacccaggactg

SEQ ID NO: 1448412 - DNA, 15 bp, Homo sapiens
gttacccaggactgg

SEQ ID NO: 1448413 - DNA, 15 bp, Homo sapiens
ttacccaggactggc

SEQ ID NO: 1448414 - DNA, 15 bp, Homo sapiens
tacccaggactggca

SEQ ID NO: 1448415 - DNA, 15 bp, Homo sapiens
acccaggactggcat

SEQ ID NO: 1448416 - DNA, 15 bp, Homo sapiens
cccaggactggcatt

SEQ ID NO: 1448417 - DNA, 15 bp, Homo sapiens
ccaggactggcatta

SEQ ID NO: 1448418 - DNA, 15 bp, Homo sapiens
caggactggcattag

SEQ ID NO: 1448419 - DNA, 15 bp, Homo sapiens
aggactggcattagg

SEQ ID NO: 1448420 - DNA, 15 bp, Homo sapiens
ggactggcattagga

SEQ ID NO: 1448421 - DNA, 15 bp, Homo sapiens
gactggcattaggaa

SEQ ID NO: 1448422 - DNA, 15 bp, Homo sapiens
actggcattaggaac

SEQ ID NO: 1448423 - DNA, 15 bp, Homo sapiens
ctggcattaggaaca

SEQ ID NO: 1448424 - DNA, 15 bp, Homo sapiens
tggcattaggaacac

SEQ ID NO: 1448425 - DNA, 15 bp, Homo sapiens
ggcattaggaacaca

SEQ ID NO: 1448426 - DNA, 15 bp, Homo sapiens
gcattaggaacacag

SEQ ID NO: 1448427 - DNA, 15 bp, Homo sapiens
cattaggaacacaga

SEQ ID NO: 1448428 - DNA, 15 bp, Homo sapiens
attaggaacacagag

SEQ ID NO: 1448429 - DNA, 15 bp, Homo sapiens
ttaggaacacagagc

SEQ ID NO: 1448430 - DNA, 15 bp, Homo sapiens
taggaacacagagct

SEQ ID NO: 1448431 - DNA, 15 bp, Homo sapiens
aggaacacagagctg

SEQ ID NO: 1448432 - DNA, 15 bp, Homo sapiens
ggaacacagagctga

SEQ ID NO: 1448433 - DNA, 15 bp, Homo sapiens
gaacacagagctgaa

SEQ ID NO: 1448434 - DNA, 15 bp, Homo sapiens
aacacagagctgaag

SEQ ID NO: 1448435 - DNA, 15 bp, Homo sapiens
acacagagctgaaga

SEQ ID NO: 1448436 - DNA, 15 bp, Homo sapiens
cacagagctgaagag

SEQ ID NO: 1448437 - DNA, 15 bp, Homo sapiens
acagagctgaagagc

SEQ ID NO: 1448438 - DNA, 15 bp, Homo sapiens
cagagctgaagagca

SEQ ID NO: 1448439 - DNA, 15 bp, Homo sapiens
agagctgaagagcac

SEQ ID NO: 1448440 - DNA, 15 bp, Homo sapiens
gagctgaagagcacg

SEQ ID NO: 1448441 - DNA, 15 bp, Homo sapiens
agctgaagagcacgt

SEQ ID NO: 1448442 - DNA, 15 bp, Homo sapiens
gctgaagagcacgtt

SEQ ID NO: 1448443 - DNA, 15 bp, Homo sapiens
ctgaagagcacgttt

SEQ ID NO: 1448444 - DNA, 15 bp, Homo sapiens
tgaagagcacgtttt

SEQ ID NO: 1448445 - DNA, 15 bp, Homo sapiens
gaagagcacgttttt

SEQ ID NO: 1448446 - DNA, 15 bp, Homo sapiens
aagagcacgttttta

SEQ ID NO: 1448447 - DNA, 15 bp, Homo sapiens
agagcacgtttttac

SEQ ID NO: 1448448 - DNA, 15 bp, Homo sapiens
gagcacgtttttacc

SEQ ID NO: 1448449 - DNA, 15 bp, Homo sapiens
agcacgtttttaccc

SEQ ID NO: 1448450 - DNA, 15 bp, Homo sapiens
gcacgtttttaccct

SEQ ID NO: 1448451 - DNA, 15 bp, Homo sapiens
cacgtttttaccctc

SEQ ID NO: 1448452 - DNA, 15 bp, Homo sapiens
acgtttttaccctca

SEQ ID NO: 1448453 - DNA, 15 bp, Homo sapiens
cgtttttaccctcaa

SEQ ID NO: 1448454 - DNA, 15 bp, Homo sapiens
gtttttaccctcaag

SEQ ID NO: 1448455 - DNA, 15 bp, Homo sapiens
tttttaccctcaaga

SEQ ID NO: 1448456 - DNA, 15 bp, Homo sapiens
ttttaccctcaagaa

SEQ ID NO: 1448457 - DNA, 15 bp, Homo sapiens
tttaccctcaagaag

SEQ ID NO: 1448458 - DNA, 15 bp, Homo sapiens
ttaccctcaagaagc

SEQ ID NO: 1448459 - DNA, 15 bp, Homo sapiens
taccctcaagaagct

SEQ ID NO: 1448460 - DNA, 15 bp, Homo sapiens
accctcaagaagctt

SEQ ID NO: 1448461 - DNA, 15 bp, Homo sapiens
ccctcaagaagctta

SEQ ID NO: 1448462 - DNA, 15 bp, Homo sapiens
cctcaagaagcttac

SEQ ID NO: 1448463 - DNA, 15 bp, Homo sapiens
ctcaagaagcttaca

SEQ ID NO: 1448464 - DNA, 15 bp, Homo sapiens
tcaagaagcttacag

SEQ ID NO: 1448465 - DNA, 15 bp, Homo sapiens
caagaagcttacagt

SEQ ID NO: 1448466 - DNA, 15 bp, Homo sapiens
aagaagcttacagtc

SEQ ID NO: 1448467 - DNA, 15 bp, Homo sapiens
agaagcttacagtct

SEQ ID NO: 1448468 - DNA, 15 bp, Homo sapiens
gaagcttacagtcta

SEQ ID NO: 1448469 - DNA, 15 bp, Homo sapiens
aagcttacagtctaa

SEQ ID NO: 1448470 - DNA, 15 bp, Homo sapiens
agcttacagtctaac

SEQ ID NO: 1448471 - DNA, 15 bp, Homo sapiens
gcttacagtctaacg

SEQ ID NO: 1448472 - DNA, 15 bp, Homo sapiens
cttacagtctaacga

SEQ ID NO: 1448473 - DNA, 15 bp, Homo sapiens
ttacagtctaacgag

SEQ ID NO: 1448474 - DNA, 15 bp, Homo sapiens
tacagtctaacgagg

SEQ ID NO: 1448475 - DNA, 15 bp, Homo sapiens
acagtctaacgaggg

SEQ ID NO: 1448476 - DNA, 15 bp, Homo sapiens
cagtctaacgaggga

SEQ ID NO: 1448477 - DNA, 15 bp, Homo sapiens
agtctaacgagggaa

SEQ ID NO: 1448478 - DNA, 15 bp, Homo sapiens
gtctaacgagggaac

SEQ ID NO: 1448479 - DNA, 15 bp, Homo sapiens
tctaacgagggaact

SEQ ID NO: 1448480 - DNA, 15 bp, Homo sapiens
ctaacgagggaactt

SEQ ID NO: 1448481 - DNA, 15 bp, Homo sapiens
taacgagggaacttg

SEQ ID NO: 1448482 - DNA, 15 bp, Homo sapiens
aacgagggaacttgc

SEQ ID NO: 1448483 - DNA, 15 bp, Homo sapiens
acgagggaacttgca

SEQ ID NO: 1448484 - DNA, 15 bp, Homo sapiens
cgagggaacttgcac

SEQ ID NO: 1448485 - DNA, 15 bp, Homo sapiens
gagggaacttgcaca

SEQ ID NO: 1448486 - DNA, 15 bp, Homo sapiens
agggaacttgcacaa

SEQ ID NO: 1448487 - DNA, 15 bp, Homo sapiens
gggaacttgcacaaa

SEQ ID NO: 1448488 - DNA, 15 bp, Homo sapiens
ggaacttgcacaaat

SEQ ID NO: 1448489 - DNA, 15 bp, Homo sapiens
gaacttgcacaaata

SEQ ID NO: 1448490 - DNA, 15 bp, Homo sapiens
aacttgcacaaatac

SEQ ID NO: 1448491 - DNA, 15 bp, Homo sapiens
acttgcacaaatact

SEQ ID NO: 1448492 - DNA, 15 bp, Homo sapiens
cttgcacaaatacta

SEQ ID NO: 1448493 - DNA, 15 bp, Homo sapiens
ttgcacaaatactac

SEQ ID NO: 1448494 - DNA, 15 bp, Homo sapiens
tgcacaaatactact

SEQ ID NO: 1448495 - DNA, 15 bp, Homo sapiens
gcacaaatactacta

SEQ ID NO: 1448496 - DNA, 15 bp, Homo sapiens
cacaaatactactat

SEQ ID NO: 1448497 - DNA, 15 bp, Homo sapiens
acaaatactactatc

SEQ ID NO: 1448498 - DNA, 15 bp, Homo sapiens
caaatactactatca

SEQ ID NO: 1448499 - DNA, 15 bp, Homo sapiens
aaatactactatcac

SEQ ID NO: 1448500 - DNA, 15 bp, Homo sapiens
aatactactatcact

SEQ ID NO: 1448501 - DNA, 15 bp, Homo sapiens
atactactatcacta

SEQ ID NO: 1448502 - DNA, 15 bp, Homo sapiens
tactactatcactag

SEQ ID NO: 1448503 - DNA, 15 bp, Homo sapiens
actactatcactagg

SEQ ID NO: 1448504 - DNA, 15 bp, Homo sapiens
ctactatcactaggt

SEQ ID NO: 1448505 - DNA, 15 bp, Homo sapiens
tactatcactaggtg

SEQ ID NO: 1448506 - DNA, 15 bp, Homo sapiens
actatcactaggtgc

SEQ ID NO: 1448507 - DNA, 15 bp, Homo sapiens
ctatcactaggtgcc

SEQ ID NO: 1448508 - DNA, 15 bp, Homo sapiens
tatcactaggtgcct

SEQ ID NO: 1448509 - DNA, 15 bp, Homo sapiens
atcactaggtgcctg

SEQ ID NO: 1448510 - DNA, 15 bp, Homo sapiens
tcactaggtgcctgg

SEQ ID NO: 1448511 - DNA, 15 bp, Homo sapiens
cactaggtgcctggt

SEQ ID NO: 1448512 - DNA, 15 bp, Homo sapiens
actaggtgcctggtt

SEQ ID NO: 1448513 - DNA, 15 bp, Homo sapiens
ctaggtgcctggttg

SEQ ID NO: 1448514 - DNA, 15 bp, Homo sapiens
taggtgcctggttga

SEQ ID NO: 1448515 - DNA, 15 bp, Homo sapiens
aggtgcctggttgaa

SEQ ID NO: 1448516 - DNA, 15 bp, Homo sapiens
ggtgcctggttgaat

SEQ ID NO: 1448517 - DNA, 15 bp, Homo sapiens
gtgcctggttgaatg

SEQ ID NO: 1448518 - DNA, 15 bp, Homo sapiens
tgcctggttgaatgg

SEQ ID NO: 1448519 - DNA, 15 bp, Homo sapiens
gcctggttgaatggc

SEQ ID NO: 1448520 - DNA, 15 bp, Homo sapiens
cctggttgaatggct

SEQ ID NO: 1448521 - DNA, 15 bp, Homo sapiens
ctggttgaatggctt

SEQ ID NO: 1448522 - DNA, 15 bp, Homo sapiens
tggttgaatggctta

SEQ ID NO: 1448523 - DNA, 15 bp, Homo sapiens
ggttgaatggcttaa

SEQ ID NO: 1448524 - DNA, 15 bp, Homo sapiens
gttgaatggcttaag

SEQ ID NO: 1448525 - DNA, 15 bp, Homo sapiens
ttgaatggcttaaga

SEQ ID NO: 1448526 - DNA, 15 bp, Homo sapiens
tgaatggcttaagag

SEQ ID NO: 1448527 - DNA, 15 bp, Homo sapiens
gaatggcttaagaga

SEQ ID NO: 1448528 - DNA, 15 bp, Homo sapiens
aatggcttaagagat

SEQ ID NO: 1448529 - DNA, 15 bp, Homo sapiens
atggcttaagagatg

SEQ ID NO: 1448530 - DNA, 15 bp, Homo sapiens
tggcttaagagatga

SEQ ID NO: 1448531 - DNA, 15 bp, Homo sapiens
ggcttaagagatgat

SEQ ID NO: 1448532 - DNA, 15 bp, Homo sapiens
gcttaagagatgatc

SEQ ID NO: 1448533 - DNA, 15 bp, Homo sapiens
cttaagagatgatca

SEQ ID NO: 1448534 - DNA, 15 bp, Homo sapiens
ttaagagatgatcag

SEQ ID NO: 1448535 - DNA, 15 bp, Homo sapiens
taagagatgatcagg

SEQ ID NO: 1448536 - DNA, 15 bp, Homo sapiens
aagagatgatcaggg

SEQ ID NO: 1448537 - DNA, 15 bp, Homo sapiens
agagatgatcaggga

SEQ ID NO: 1448538 - DNA, 15 bp, Homo sapiens
gagatgatcagggat

SEQ ID NO: 1448539 - DNA, 15 bp, Homo sapiens
agatgatcagggata

SEQ ID NO: 1448540 - DNA, 15 bp, Homo sapiens
gatgatcagggatat

SEQ ID NO: 1448541 - DNA, 15 bp, Homo sapiens
atgatcagggatatt

SEQ ID NO: 1448542 - DNA, 15 bp, Homo sapiens
tgatcagggatattc

SEQ ID NO: 1448543 - DNA, 15 bp, Homo sapiens
gatcagggatattca

SEQ ID NO: 1448544 - DNA, 15 bp, Homo sapiens
atcagggatattcag

SEQ ID NO: 1448545 - DNA, 15 bp, Homo sapiens
tcagggatattcaga

SEQ ID NO: 1448546 - DNA, 15 bp, Homo sapiens
cagggatattcagaa

SEQ ID NO: 1448547 - DNA, 15 bp, Homo sapiens
agggatattcagaag

SEQ ID NO: 1448548 - DNA, 15 bp, Homo sapiens
gggatattcagaagg

SEQ ID NO: 1448549 - DNA, 15 bp, Homo sapiens
ggatattcagaagga

SEQ ID NO: 1448550 - DNA, 15 bp, Homo sapiens
gatattcagaaggat

SEQ ID NO: 1448551 - DNA, 15 bp, Homo sapiens
atattcagaaggata

SEQ ID NO: 1448552 - DNA, 15 bp, Homo sapiens
tattcagaaggatat

SEQ ID NO: 1448553 - DNA, 15 bp, Homo sapiens
attcagaaggatatg

SEQ ID NO: 1448554 - DNA, 15 bp, Homo sapiens
ttcagaaggatatgt

SEQ ID NO: 1448555 - DNA, 15 bp, Homo sapiens
tcagaaggatatgtc

SEQ ID NO: 1448556 - DNA, 15 bp, Homo sapiens
cagaaggatatgtca

SEQ ID NO: 1448557 - DNA, 15 bp, Homo sapiens
agaaggatatgtcag

SEQ ID NO: 1448558 - DNA, 15 bp, Homo sapiens
gaaggatatgtcagg

SEQ ID NO: 1448559 - DNA, 15 bp, Homo sapiens
aaggatatgtcaggc

SEQ ID NO: 1448560 - DNA, 15 bp, Homo sapiens
aggatatgtcaggct

SEQ ID NO: 1448561 - DNA, 15 bp, Homo sapiens
ggatatgtcaggctc

SEQ ID NO: 1448562 - DNA, 15 bp, Homo sapiens
gatatgtcaggctca

SEQ ID NO: 1448563 - DNA, 15 bp, Homo sapiens
atatgtcaggctcag

SEQ ID NO: 1448564 - DNA, 15 bp, Homo sapiens
tatgtcaggctcagc

SEQ ID NO: 1448565 - DNA, 15 bp, Homo sapiens
atgtcaggctcagca

SEQ ID NO: 1448566 - DNA, 15 bp, Homo sapiens
tgtcaggctcagcaa

SEQ ID NO: 1448567 - DNA, 15 bp, Homo sapiens
gtcaggctcagcaat

SEQ ID NO: 1448568 - DNA, 15 bp, Homo sapiens
tcaggctcagcaatg

SEQ ID NO: 1448569 - DNA, 15 bp, Homo sapiens
caggctcagcaatgg

SEQ ID NO: 1448570 - DNA, 15 bp, Homo sapiens
aggctcagcaatggc

SEQ ID NO: 1448571 - DNA, 15 bp, Homo sapiens
ggctcagcaatggca

SEQ ID NO: 1448572 - DNA, 15 bp, Homo sapiens
gctcagcaatggcat

SEQ ID NO: 1448573 - DNA, 15 bp, Homo sapiens
ctcagcaatggcatc

SEQ ID NO: 1448574 - DNA, 15 bp, Homo sapiens
tcagcaatggcatca

SEQ ID NO: 1448575 - DNA, 15 bp, Homo sapiens
cagcaatggcatcac

SEQ ID NO: 1448576 - DNA, 15 bp, Homo sapiens
agcaatggcatcact

SEQ ID NO: 1448577 - DNA, 15 bp, Homo sapiens
gcaatggcatcactt

SEQ ID NO: 1448578 - DNA, 15 bp, Homo sapiens
caatggcatcacttg

SEQ ID NO: 1448579 - DNA, 15 bp, Homo sapiens
aatggcatcacttga

SEQ ID NO: 1448580 - DNA, 15 bp, Homo sapiens
atggcatcacttgag

SEQ ID NO: 1448581 - DNA, 15 bp, Homo sapiens
tggcatcacttgaga

SEQ ID NO: 1448582 - DNA, 15 bp, Homo sapiens
ggcatcacttgagag

SEQ ID NO: 1448583 - DNA, 15 bp, Homo sapiens
gcatcacttgagagc

SEQ ID NO: 1448584 - DNA, 15 bp, Homo sapiens
catcacttgagagca

SEQ ID NO: 1448585 - DNA, 15 bp, Homo sapiens
atcacttgagagcat

SEQ ID NO: 1448586 - DNA, 15 bp, Homo sapiens
tcacttgagagcatc

SEQ ID NO: 1448587 - DNA, 15 bp, Homo sapiens
cacttgagagcatca

SEQ ID NO: 1448588 - DNA, 15 bp, Homo sapiens
acttgagagcatcaa

SEQ ID NO: 1448589 - DNA, 15 bp, Homo sapiens
cttgagagcatcaag

SEQ ID NO: 1448590 - DNA, 15 bp, Homo sapiens
ttgagagcatcaagg

SEQ ID NO: 1448591 - DNA, 15 bp, Homo sapiens
tgagagcatcaaggt

SEQ ID NO: 1448592 - DNA, 15 bp, Homo sapiens
gagagcatcaaggtg

SEQ ID NO: 1448593 - DNA, 15 bp, Homo sapiens
agagcatcaaggtgt

SEQ ID NO: 1448594 - DNA, 15 bp, Homo sapiens
gagcatcaaggtgtt

SEQ ID NO: 1448595 - DNA, 15 bp, Homo sapiens
agcatcaaggtgttt

SEQ ID NO: 1448596 - DNA, 15 bp, Homo sapiens
gcatcaaggtgttta

SEQ ID NO: 1448597 - DNA, 15 bp, Homo sapiens
catcaaggtgtttag

SEQ ID NO: 1448598 - DNA, 15 bp, Homo sapiens
atcaaggtgtttagg

SEQ ID NO: 1448599 - DNA, 15 bp, Homo sapiens
tcaaggtgtttaggg

SEQ ID NO: 1448600 - DNA, 15 bp, Homo sapiens
caaggtgtttaggga

SEQ ID NO: 1448601 - DNA, 15 bp, Homo sapiens
aaggtgtttagggaa

SEQ ID NO: 1448602 - DNA, 15 bp, Homo sapiens
aggtgtttagggaac

SEQ ID NO: 1448603 - DNA, 15 bp, Homo sapiens
ggtgtttagggaact

SEQ ID NO: 1448604 - DNA, 15 bp, Homo sapiens
gtgtttagggaacta

SEQ ID NO: 1448605 - DNA, 15 bp, Homo sapiens
tgtttagggaactac

SEQ ID NO: 1448606 - DNA, 15 bp, Homo sapiens
gtttagggaactaca

SEQ ID NO: 1448607 - DNA, 15 bp, Homo sapiens
tttagggaactacaa

SEQ ID NO: 1448608 - DNA, 15 bp, Homo sapiens
ttagggaactacaag

SEQ ID NO: 1448609 - DNA, 15 bp, Homo sapiens
tagggaactacaaga

SEQ ID NO: 1448610 - DNA, 15 bp, Homo sapiens
agggaactacaagat

SEQ ID NO: 1448611 - DNA, 15 bp, Homo sapiens
gggaactacaagatg

SEQ ID NO: 1448612 - DNA, 15 bp, Homo sapiens
ggaactacaagatgt

SEQ ID NO: 1448613 - DNA, 15 bp, Homo sapiens
gaactacaagatgtt

SEQ ID NO: 1448614 - DNA, 15 bp, Homo sapiens
aactacaagatgttt

SEQ ID NO: 1448615 - DNA, 15 bp, Homo sapiens
actacaagatgtttg

SEQ ID NO: 1448616 - DNA, 15 bp, Homo sapiens
ctacaagatgtttgg

SEQ ID NO: 1448617 - DNA, 15 bp, Homo sapiens
tacaagatgtttggt

SEQ ID NO: 1448618 - DNA, 15 bp, Homo sapiens
acaagatgtttggtt

SEQ ID NO: 1448619 - DNA, 15 bp, Homo sapiens
caagatgtttggttc

SEQ ID NO: 1448620 - DNA, 15 bp, Homo sapiens
aagatgtttggttct

SEQ ID NO: 1448621 - DNA, 15 bp, Homo sapiens
agatgtttggttctg

SEQ ID NO: 1448622 - DNA, 15 bp, Homo sapiens
gatgtttggttctgc

SEQ ID NO: 1448623 - DNA, 15 bp, Homo sapiens
atgtttggttctgct

SEQ ID NO: 1448624 - DNA, 15 bp, Homo sapiens
tgtttggttctgctg

SEQ ID NO: 1448625 - DNA, 15 bp, Homo sapiens
gtttggttctgctgg

SEQ ID NO: 1448626 - DNA, 15 bp, Homo sapiens
tttggttctgctggg

SEQ ID NO: 1448627 - DNA, 15 bp, Homo sapiens
ttggttctgctggga

SEQ ID NO: 1448628 - DNA, 15 bp, Homo sapiens
tggttctgctgggaa

SEQ ID NO: 1448629 - DNA, 15 bp, Homo sapiens
ggttctgctgggaat

SEQ ID NO: 1448630 - DNA, 15 bp, Homo sapiens
gttctgctgggaata

SEQ ID NO: 1448631 - DNA, 15 bp, Homo sapiens
ttctgctgggaataa

SEQ ID NO: 1448632 - DNA, 15 bp, Homo sapiens
tctgctgggaataag

SEQ ID NO: 1448633 - DNA, 15 bp, Homo sapiens
ctgctgggaataaga

SEQ ID NO: 1448634 - DNA, 15 bp, Homo sapiens
tgctgggaataagag

SEQ ID NO: 1448635 - DNA, 15 bp, Homo sapiens
gctgggaataagagt

SEQ ID NO: 1448636 - DNA, 15 bp, Homo sapiens
ctgggaataagagtg

SEQ ID NO: 1448637 - DNA, 15 bp, Homo sapiens
tgggaataagagtga

SEQ ID NO: 1448638 - DNA, 15 bp, Homo sapiens
gggaataagagtgaa

SEQ ID NO: 1448639 - DNA, 15 bp, Homo sapiens
ggaataagagtgaag

SEQ ID NO: 1448640 - DNA, 15 bp, Homo sapiens
gaataagagtgaagg

SEQ ID NO: 1448641 - DNA, 15 bp, Homo sapiens
aataagagtgaaggg

SEQ ID NO: 1448642 - DNA, 15 bp, Homo sapiens
ataagagtgaagggg

SEQ ID NO: 1448643 - DNA, 15 bp, Homo sapiens
taagagtgaaggggg

SEQ ID NO: 1448644 - DNA, 15 bp, Homo sapiens
aagagtgaagggggc

SEQ ID NO: 1448645 - DNA, 15 bp, Homo sapiens
agagtgaagggggct

SEQ ID NO: 1448646 - DNA, 15 bp, Homo sapiens
gagtgaagggggctc

SEQ ID NO: 1448647 - DNA, 15 bp, Homo sapiens
agtgaagggggctcc

SEQ ID NO: 1448648 - DNA, 15 bp, Homo sapiens
gtgaagggggctcca

SEQ ID NO: 1448649 - DNA, 15 bp, Homo sapiens
tgaagggggctccat

SEQ ID NO: 1448650 - DNA, 15 bp, Homo sapiens
gaagggggctccatt

SEQ ID NO: 1448651 - DNA, 15 bp, Homo sapiens
aagggggctccattt

SEQ ID NO: 1448652 - DNA, 15 bp, Homo sapiens
agggggctccatttg

SEQ ID NO: 1448653 - DNA, 15 bp, Homo sapiens
gggggctccatttgg

SEQ ID NO: 1448654 - DNA, 15 bp, Homo sapiens
ggggctccatttgga

SEQ ID NO: 1448655 - DNA, 15 bp, Homo sapiens
gggctccatttggat

SEQ ID NO: 1448656 - DNA, 15 bp, Homo sapiens
ggctccatttggatg

SEQ ID NO: 1448657 - DNA, 15 bp, Homo sapiens
gctccatttggatgc

SEQ ID NO: 1448658 - DNA, 15 bp, Homo sapiens
ctccatttggatgcc

SEQ ID NO: 1448659 - DNA, 15 bp, Homo sapiens
tccatttggatgcct

SEQ ID NO: 1448660 - DNA, 15 bp, Homo sapiens
ccatttggatgcctc

SEQ ID NO: 1448661 - DNA, 15 bp, Homo sapiens
catttggatgcctca

SEQ ID NO: 1448662 - DNA, 15 bp, Homo sapiens
atttggatgcctcat

SEQ ID NO: 1448663 - DNA, 15 bp, Homo sapiens
tttggatgcctcata

SEQ ID NO: 1448664 - DNA, 15 bp, Homo sapiens
ttggatgcctcatac

SEQ ID NO: 1448665 - DNA, 15 bp, Homo sapiens
tggatgcctcataca

SEQ ID NO: 1448666 - DNA, 15 bp, Homo sapiens
ggatgcctcatacac

SEQ ID NO: 1448667 - DNA, 15 bp, Homo sapiens
gatgcctcatacacc

SEQ ID NO: 1448668 - DNA, 15 bp, Homo sapiens
atgcctcatacacca

SEQ ID NO: 1448669 - DNA, 15 bp, Homo sapiens
tgcctcatacaccag

SEQ ID NO: 1448670 - DNA, 15 bp, Homo sapiens
gcctcatacaccagg

SEQ ID NO: 1448671 - DNA, 15 bp, Homo sapiens
cctcatacaccaggt

SEQ ID NO: 1448672 - DNA, 15 bp, Homo sapiens
ctcatacaccaggtg

SEQ ID NO: 1448673 - DNA, 15 bp, Homo sapiens
tcatacaccaggtga

SEQ ID NO: 1448674 - DNA, 15 bp, Homo sapiens
catacaccaggtgag

SEQ ID NO: 1448675 - DNA, 15 bp, Homo sapiens
atacaccaggtgaga

SEQ ID NO: 1448676 - DNA, 15 bp, Homo sapiens
tacaccaggtgagag

SEQ ID NO: 1448677 - DNA, 15 bp, Homo sapiens
acaccaggtgagaga

SEQ ID NO: 1448678 - DNA, 15 bp, Homo sapiens
caccaggtgagagat

SEQ ID NO: 1448679 - DNA, 15 bp, Homo sapiens
accaggtgagagatc

SEQ ID NO: 1448680 - DNA, 15 bp, Homo sapiens
ccaggtgagagatct

SEQ ID NO: 1448681 - DNA, 15 bp, Homo sapiens
caggtgagagatctt

SEQ ID NO: 1448682 - DNA, 15 bp, Homo sapiens
aggtgagagatctta

SEQ ID NO: 1448683 - DNA, 15 bp, Homo sapiens
ggtgagagatcttag

SEQ ID NO: 1448684 - DNA, 15 bp, Homo sapiens
gtgagagatcttaga

SEQ ID NO: 1448685 - DNA, 15 bp, Homo sapiens
tgagagatcttagat

SEQ ID NO: 1448686 - DNA, 15 bp, Homo sapiens
gagagatcttagatt

SEQ ID NO: 1448687 - DNA, 15 bp, Homo sapiens
agagatcttagattt

SEQ ID NO: 1448688 - DNA, 15 bp, Homo sapiens
gagatcttagatttt

SEQ ID NO: 1448689 - DNA, 15 bp, Homo sapiens
agatcttagatttta

SEQ ID NO: 1448690 - DNA, 15 bp, Homo sapiens
gatcttagattttat

SEQ ID NO: 1448691 - DNA, 15 bp, Homo sapiens
atcttagattttatt

SEQ ID NO: 1448692 - DNA, 15 bp, Homo sapiens
tcttagattttattc

SEQ ID NO: 1448693 - DNA, 15 bp, Homo sapiens
cttagattttattcc

SEQ ID NO: 1448694 - DNA, 15 bp, Homo sapiens
ttagattttattcca

SEQ ID NO: 1448695 - DNA, 15 bp, Homo sapiens
tagattttattccac

SEQ ID NO: 1448696 - DNA, 15 bp, Homo sapiens
agattttattccacc

SEQ ID NO: 1448697 - DNA, 15 bp, Homo sapiens
gattttattccacca

SEQ ID NO: 1448698 - DNA, 15 bp, Homo sapiens
attttattccaccag

SEQ ID NO: 1448699 - DNA, 15 bp, Homo sapiens
ttttattccaccagg

SEQ ID NO: 1448700 - DNA, 15 bp, Homo sapiens
tttattccaccagga

SEQ ID NO: 1448701 - DNA, 15 bp, Homo sapiens
ttattccaccaggag

SEQ ID NO: 1448702 - DNA, 15 bp, Homo sapiens
tattccaccaggagg

SEQ ID NO: 1448703 - DNA, 15 bp, Homo sapiens
attccaccaggagga

SEQ ID NO: 1448704 - DNA, 15 bp, Homo sapiens
ttccaccaggaggag

SEQ ID NO: 1448705 - DNA, 15 bp, Homo sapiens
tccaccaggaggaga

SEQ ID NO: 1448706 - DNA, 15 bp, Homo sapiens
ccaccaggaggagaa

SEQ ID NO: 1448707 - DNA, 15 bp, Homo sapiens
caccaggaggagaac

SEQ ID NO: 1448708 - DNA, 15 bp, Homo sapiens
accaggaggagaact

SEQ ID NO: 1448709 - DNA, 15 bp, Homo sapiens
ccaggaggagaacta

SEQ ID NO: 1448710 - DNA, 15 bp, Homo sapiens
caggaggagaactac

SEQ ID NO: 1448711 - DNA, 15 bp, Homo sapiens
aggaggagaactacc

SEQ ID NO: 1448712 - DNA, 15 bp, Homo sapiens
ggaggagaactacca

SEQ ID NO: 1448713 - DNA, 15 bp, Homo sapiens
gaggagaactaccat

SEQ ID NO: 1448714 - DNA, 15 bp, Homo sapiens
aggagaactaccata

SEQ ID NO: 1448715 - DNA, 15 bp, Homo sapiens
ggagaactaccatag

SEQ ID NO: 1448716 - DNA, 15 bp, Homo sapiens
gagaactaccatagg

SEQ ID NO: 1448717 - DNA, 15 bp, Homo sapiens
agaactaccatagga

SEQ ID NO: 1448718 - DNA, 15 bp, Homo sapiens
gaactaccataggat

SEQ ID NO: 1448719 - DNA, 15 bp, Homo sapiens
aactaccataggatt

SEQ ID NO: 1448720 - DNA, 15 bp, Homo sapiens
actaccataggattt

SEQ ID NO: 1448721 - DNA, 15 bp, Homo sapiens
ctaccataggattta

SEQ ID NO: 1448722 - DNA, 15 bp, Homo sapiens
taccataggatttaa

SEQ ID NO: 1448723 - DNA, 15 bp, Homo sapiens
accataggatttaaa

SEQ ID NO: 1448724 - DNA, 15 bp, Homo sapiens
ccataggatttaaaa

SEQ ID NO: 1448725 - DNA, 15 bp, Homo sapiens
cataggatttaaaac

SEQ ID NO: 1448726 - DNA, 15 bp, Homo sapiens
ataggatttaaaaca

SEQ ID NO: 1448727 - DNA, 15 bp, Homo sapiens
taggatttaaaacag

SEQ ID NO: 1448728 - DNA, 15 bp, Homo sapiens
aggatttaaaacaga

SEQ ID NO: 1448729 - DNA, 15 bp, Homo sapiens
ggatttaaaacagaa

SEQ ID NO: 1448730 - DNA, 15 bp, Homo sapiens
gatttaaaacagaaa

SEQ ID NO: 1448731 - DNA, 15 bp, Homo sapiens
atttaaaacagaaat

SEQ ID NO: 1448732 - DNA, 15 bp, Homo sapiens
tttaaaacagaaatg

SEQ ID NO: 1448733 - DNA, 15 bp, Homo sapiens
ttaaaacagaaatga

SEQ ID NO: 1448734 - DNA, 15 bp, Homo sapiens
taaaacagaaatgat

SEQ ID NO: 1448735 - DNA, 15 bp, Homo sapiens
aaaacagaaatgata

SEQ ID NO: 1448736 - DNA, 15 bp, Homo sapiens
aaacagaaatgatat

SEQ ID NO: 1448737 - DNA, 15 bp, Homo sapiens
aacagaaatgatatg

SEQ ID NO: 1448738 - DNA, 15 bp, Homo sapiens
acagaaatgatatgg

SEQ ID NO: 1448739 - DNA, 15 bp, Homo sapiens
cagaaatgatatggt

SEQ ID NO: 1448740 - DNA, 15 bp, Homo sapiens
agaaatgatatggtc

SEQ ID NO: 1448741 - DNA, 15 bp, Homo sapiens
gaaatgatatggtca

SEQ ID NO: 1448742 - DNA, 15 bp, Homo sapiens
aaatgatatggtcaa

SEQ ID NO: 1448743 - DNA, 15 bp, Homo sapiens
aatgatatggtcaaa

SEQ ID NO: 1448744 - DNA, 15 bp, Homo sapiens
atgatatggtcaaac

SEQ ID NO: 1448745 - DNA, 15 bp, Homo sapiens
tgatatggtcaaacc

SEQ ID NO: 1448746 - DNA, 15 bp, Homo sapiens
gatatggtcaaacct

SEQ ID NO: 1448747 - DNA, 15 bp, Homo sapiens
atatggtcaaaccta

SEQ ID NO: 1448748 - DNA, 15 bp, Homo sapiens
tatggtcaaacctac

SEQ ID NO: 1448749 - DNA, 15 bp, Homo sapiens
atggtcaaacctaca

SEQ ID NO: 1448750 - DNA, 15 bp, Homo sapiens
tggtcaaacctacat

SEQ ID NO: 1448751 - DNA, 15 bp, Homo sapiens
ggtcaaacctacatc

SEQ ID NO: 1448752 - DNA, 15 bp, Homo sapiens
gtcaaacctacatct

SEQ ID NO: 1448753 - DNA, 15 bp, Homo sapiens
tcaaacctacatctt

SEQ ID NO: 1448754 - DNA, 15 bp, Homo sapiens
caaacctacatctta

SEQ ID NO: 1448755 - DNA, 15 bp, Homo sapiens
aaacctacatcttag

SEQ ID NO: 1448756 - DNA, 15 bp, Homo sapiens
aacctacatcttagg

SEQ ID NO: 1448757 - DNA, 15 bp, Homo sapiens
acctacatcttagga

SEQ ID NO: 1448758 - DNA, 15 bp, Homo sapiens
cctacatcttaggaa

SEQ ID NO: 1448759 - DNA, 15 bp, Homo sapiens
ctacatcttaggaag

SEQ ID NO: 1448760 - DNA, 15 bp, Homo sapiens
tacatcttaggaaga

SEQ ID NO: 1448761 - DNA, 15 bp, Homo sapiens
acatcttaggaagat

SEQ ID NO: 1448762 - DNA, 15 bp, Homo sapiens
catcttaggaagatc

SEQ ID NO: 1448763 - DNA, 15 bp, Homo sapiens
atcttaggaagatcc

SEQ ID NO: 1448764 - DNA, 15 bp, Homo sapiens
tcttaggaagatccc

SEQ ID NO: 1448765 - DNA, 15 bp, Homo sapiens
cttaggaagatccct

SEQ ID NO: 1448766 - DNA, 15 bp, Homo sapiens
ttaggaagatccctg

SEQ ID NO: 1448767 - DNA, 15 bp, Homo sapiens
taggaagatccctgg

SEQ ID NO: 1448768 - DNA, 15 bp, Homo sapiens
aggaagatccctggg

SEQ ID NO: 1448769 - DNA, 15 bp, Homo sapiens
ggaagatccctgggg

SEQ ID NO: 1448770 - DNA, 15 bp, Homo sapiens
gaagatccctggggt

SEQ ID NO: 1448771 - DNA, 15 bp, Homo sapiens
aagatccctggggtg

SEQ ID NO: 1448772 - DNA, 15 bp, Homo sapiens
agatccctggggtgt

SEQ ID NO: 1448773 - DNA, 15 bp, Homo sapiens
gatccctggggtgtt

SEQ ID NO: 1448774 - DNA, 15 bp, Homo sapiens
atccctggggtgttt

SEQ ID NO: 1448775 - DNA, 15 bp, Homo sapiens
tccctggggtgtttg

SEQ ID NO: 1448776 - DNA, 15 bp, Homo sapiens
ccctggggtgtttgt

SEQ ID NO: 1448777 - DNA, 15 bp, Homo sapiens
cctggggtgtttgta

SEQ ID NO: 1448778 - DNA, 15 bp, Homo sapiens
ctggggtgtttgtat

SEQ ID NO: 1448779 - DNA, 15 bp, Homo sapiens
tggggtgtttgtatg

SEQ ID NO: 1448780 - DNA, 15 bp, Homo sapiens
ggggtgtttgtatgg

SEQ ID NO: 1448781 - DNA, 15 bp, Homo sapiens
gggtgtttgtatggt

SEQ ID NO: 1448782 - DNA, 15 bp, Homo sapiens
ggtgtttgtatggtg

SEQ ID NO: 1448783 - DNA, 15 bp, Homo sapiens
gtgtttgtatggtgg

SEQ ID NO: 1448784 - DNA, 15 bp, Homo sapiens
tgtttgtatggtgga

SEQ ID NO: 1448785 - DNA, 15 bp, Homo sapiens
gtttgtatggtggac

SEQ ID NO: 1448786 - DNA, 15 bp, Homo sapiens
tttgtatggtggact

SEQ ID NO: 1448787 - DNA, 15 bp, Homo sapiens
ttgtatggtggactt

SEQ ID NO: 1448788 - DNA, 15 bp, Homo sapiens
tgtatggtggacttg

SEQ ID NO: 1448789 - DNA, 15 bp, Homo sapiens
gtatggtggacttgc

SEQ ID NO: 1448790 - DNA, 15 bp, Homo sapiens
tatggtggacttgca

SEQ ID NO: 1448791 - DNA, 15 bp, Homo sapiens
atggtggacttgcaa

SEQ ID NO: 1448792 - DNA, 15 bp, Homo sapiens
tggtggacttgcaat

SEQ ID NO: 1448793 - DNA, 15 bp, Homo sapiens
ggtggacttgcaatt

SEQ ID NO: 1448794 - DNA, 15 bp, Homo sapiens
gtggacttgcaattt

SEQ ID NO: 1448795 - DNA, 15 bp, Homo sapiens
tggacttgcaatttg

SEQ ID NO: 1448796 - DNA, 15 bp, Homo sapiens
ggacttgcaatttga

SEQ ID NO: 1448797 - DNA, 15 bp, Homo sapiens
gacttgcaatttgac

SEQ ID NO: 1448798 - DNA, 15 bp, Homo sapiens
acttgcaatttgact

SEQ ID NO: 1448799 - DNA, 15 bp, Homo sapiens
cttgcaatttgacta

SEQ ID NO: 1448800 - DNA, 15 bp, Homo sapiens
ttgcaatttgactaa

SEQ ID NO: 1448801 - DNA, 15 bp, Homo sapiens
tgcaatttgactaat

SEQ ID NO: 1448802 - DNA, 15 bp, Homo sapiens
gcaatttgactaatt

SEQ ID NO: 1448803 - DNA, 15 bp, Homo sapiens
caatttgactaattg

SEQ ID NO: 1448804 - DNA, 15 bp, Homo sapiens
aatttgactaattga

SEQ ID NO: 1448805 - DNA, 15 bp, Homo sapiens
atttgactaattgag

SEQ ID NO: 1448806 - DNA, 15 bp, Homo sapiens
tttgactaattgaga

SEQ ID NO: 1448807 - DNA, 15 bp, Homo sapiens
ttgactaattgagat

SEQ ID NO: 1448808 - DNA, 15 bp, Homo sapiens
tgactaattgagatt

SEQ ID NO: 1448809 - DNA, 15 bp, Homo sapiens
gactaattgagattt

SEQ ID NO: 1448810 - DNA, 15 bp, Homo sapiens
actaattgagatttg

SEQ ID NO: 1448811 - DNA, 15 bp, Homo sapiens
ctaattgagatttgt

SEQ ID NO: 1448812 - DNA, 15 bp, Homo sapiens
taattgagatttgta

SEQ ID NO: 1448813 - DNA, 15 bp, Homo sapiens
aattgagatttgtag

SEQ ID NO: 1448814 - DNA, 15 bp, Homo sapiens
attgagatttgtagg

SEQ ID NO: 1448815 - DNA, 15 bp, Homo sapiens
ttgagatttgtagga

SEQ ID NO: 1448816 - DNA, 15 bp, Homo sapiens
tgagatttgtaggat

SEQ ID NO: 1448817 - DNA, 15 bp, Homo sapiens
gagatttgtaggatg

SEQ ID NO: 1448818 - DNA, 15 bp, Homo sapiens
agatttgtaggatga

SEQ ID NO: 1448819 - DNA, 15 bp, Homo sapiens
gatttgtaggatgat

SEQ ID NO: 1448820 - DNA, 15 bp, Homo sapiens
atttgtaggatgatt

SEQ ID NO: 1448821 - DNA, 15 bp, Homo sapiens
tttgtaggatgattc

SEQ ID NO: 1448822 - DNA, 15 bp, Homo sapiens
ttgtaggatgattct

SEQ ID NO: 1448823 - DNA, 15 bp, Homo sapiens
tgtaggatgattctt

SEQ ID NO: 1448824 - DNA, 15 bp, Homo sapiens
gtaggatgattctta

SEQ ID NO: 1448825 - DNA, 15 bp, Homo sapiens
taggatgattcttaa

SEQ ID NO: 1448826 - DNA, 15 bp, Homo sapiens
aggatgattcttaag

SEQ ID NO: 1448827 - DNA, 15 bp, Homo sapiens
ggatgattcttaaga

SEQ ID NO: 1448828 - DNA, 15 bp, Homo sapiens
gatgattcttaagag

SEQ ID NO: 1448829 - DNA, 15 bp, Homo sapiens
atgattcttaagaga

SEQ ID NO: 1448830 - DNA, 15 bp, Homo sapiens
tgattcttaagagat

SEQ ID NO: 1448831 - DNA, 15 bp, Homo sapiens
attcttaagagatga

SEQ ID NO: 1448832 - DNA, 15 bp, Homo sapiens
ttcttaagagatgat

SEQ ID NO: 1448833 - DNA, 15 bp, Homo sapiens
tcttaagagatgatg

SEQ ID NO: 1448834 - DNA, 15 bp, Homo sapiens
cttaagagatgatga

SEQ ID NO: 1448835 - DNA, 15 bp, Homo sapiens
ttaagagatgatgat

SEQ ID NO: 1448836 - DNA, 15 bp, Homo sapiens
taagagatgatgatg

SEQ ID NO: 1448837 - DNA, 15 bp, Homo sapiens
aagagatgatgatga

SEQ ID NO: 1448838 - DNA, 15 bp, Homo sapiens
agagatgatgatgac

SEQ ID NO: 1448839 - DNA, 15 bp, Homo sapiens
gagatgatgatgacc

SEQ ID NO: 1448840 - DNA, 15 bp, Homo sapiens
agatgatgatgaccc

SEQ ID NO: 1448841 - DNA, 15 bp, Homo sapiens
gatgatgatgaccca

SEQ ID NO: 1448842 - DNA, 15 bp, Homo sapiens
atgatgatgacccag

SEQ ID NO: 1448843 - DNA, 15 bp, Homo sapiens
tgatgatgacccaga

SEQ ID NO: 1448844 - DNA, 15 bp, Homo sapiens
gatgatgacccagac

SEQ ID NO: 1448845 - DNA, 15 bp, Homo sapiens
atgatgacccagact

SEQ ID NO: 1448846 - DNA, 15 bp, Homo sapiens
tgatgacccagactg

SEQ ID NO: 1448847 - DNA, 15 bp, Homo sapiens
gatgacccagactgg

SEQ ID NO: 1448848 - DNA, 15 bp, Homo sapiens
atgacccagactggg

SEQ ID NO: 1448849 - DNA, 15 bp, Homo sapiens
tgacccagactggga

SEQ ID NO: 1448850 - DNA, 15 bp, Homo sapiens
gacccagactgggat

SEQ ID NO: 1448851 - DNA, 15 bp, Homo sapiens
acccagactgggatc

SEQ ID NO: 1448852 - DNA, 15 bp, Homo sapiens
cccagactgggatca

SEQ ID NO: 1448853 - DNA, 15 bp, Homo sapiens
ccagactgggatcac

SEQ ID NO: 1448854 - DNA, 15 bp, Homo sapiens
cagactgggatcact

SEQ ID NO: 1448855 - DNA, 15 bp, Homo sapiens
agactgggatcacta

SEQ ID NO: 1448856 - DNA, 15 bp, Homo sapiens
gactgggatcactat

SEQ ID NO: 1448857 - DNA, 15 bp, Homo sapiens
actgggatcactata

SEQ ID NO: 1448858 - DNA, 15 bp, Homo sapiens
ctgggatcactataa

SEQ ID NO: 1448859 - DNA, 15 bp, Homo sapiens
tgggatcactataat

SEQ ID NO: 1448860 - DNA, 15 bp, Homo sapiens
gggatcactataata

SEQ ID NO: 1448861 - DNA, 15 bp, Homo sapiens
ggatcactataatag

SEQ ID NO: 1448862 - DNA, 15 bp, Homo sapiens
gatcactataataga

SEQ ID NO: 1448863 - DNA, 15 bp, Homo sapiens
atcactataatagag

SEQ ID NO: 1448864 - DNA, 15 bp, Homo sapiens
tcactataatagagt

SEQ ID NO: 1448865 - DNA, 15 bp, Homo sapiens
cactataatagagtt

SEQ ID NO: 1448866 - DNA, 15 bp, Homo sapiens
actataatagagttg

SEQ ID NO: 1448867 - DNA, 15 bp, Homo sapiens
ctataatagagttgg

SEQ ID NO: 1448868 - DNA, 15 bp, Homo sapiens
tataatagagttggt

SEQ ID NO: 1448869 - DNA, 15 bp, Homo sapiens
ataatagagttggta

SEQ ID NO: 1448870 - DNA, 15 bp, Homo sapiens
taatagagttggtaa

SEQ ID NO: 1448871 - DNA, 15 bp, Homo sapiens
aatagagttggtaag

SEQ ID NO: 1448872 - DNA, 15 bp, Homo sapiens
atagagttggtaagg

SEQ ID NO: 1448873 - DNA, 15 bp, Homo sapiens
tagagttggtaagga

SEQ ID NO: 1448874 - DNA, 15 bp, Homo sapiens
agagttggtaaggag

SEQ ID NO: 1448875 - DNA, 15 bp, Homo sapiens
gagttggtaaggagg

SEQ ID NO: 1448876 - DNA, 15 bp, Homo sapiens
agttggtaaggagga

SEQ ID NO: 1448877 - DNA, 15 bp, Homo sapiens
gttggtaaggaggag

SEQ ID NO: 1448878 - DNA, 15 bp, Homo sapiens
ttggtaaggaggaga

SEQ ID NO: 1448879 - DNA, 15 bp, Homo sapiens
tggtaaggaggagaa

SEQ ID NO: 1448880 - DNA, 15 bp, Homo sapiens
ggtaaggaggagaat

SEQ ID NO: 1448881 - DNA, 15 bp, Homo sapiens
gtaaggaggagaatg

SEQ ID NO: 1448882 - DNA, 15 bp, Homo sapiens
taaggaggagaatga

SEQ ID NO: 1448883 - DNA, 15 bp, Homo sapiens
aaggaggagaatgat

SEQ ID NO: 1448884 - DNA, 15 bp, Homo sapiens
aggaggagaatgatt

SEQ ID NO: 1448885 - DNA, 15 bp, Homo sapiens
ggaggagaatgattt

SEQ ID NO: 1448886 - DNA, 15 bp, Homo sapiens
gaggagaatgattta

SEQ ID NO: 1448887 - DNA, 15 bp, Homo sapiens
aggagaatgatttaa

SEQ ID NO: 1448888 - DNA, 15 bp, Homo sapiens
ggagaatgatttaaa

SEQ ID NO: 1448889 - DNA, 15 bp, Homo sapiens
gagaatgatttaaaa

SEQ ID NO: 1448890 - DNA, 15 bp, Homo sapiens
agaatgatttaaaaa

SEQ ID NO: 1448891 - DNA, 15 bp, Homo sapiens
gaatgatttaaaaag

SEQ ID NO: 1448892 - DNA, 15 bp, Homo sapiens
aatgatttaaaaagt

SEQ ID NO: 1448893 - DNA, 15 bp, Homo sapiens
atgatttaaaaagta

SEQ ID NO: 1448894 - DNA, 15 bp, Homo sapiens
tgatttaaaaagtag

SEQ ID NO: 1448895 - DNA, 15 bp, Homo sapiens
gatttaaaaagtagt

SEQ ID NO: 1448896 - DNA, 15 bp, Homo sapiens
atttaaaaagtagtt

SEQ ID NO: 1448897 - DNA, 15 bp, Homo sapiens
tttaaaaagtagttg

SEQ ID NO: 1448898 - DNA, 15 bp, Homo sapiens
ttaaaaagtagttgg

SEQ ID NO: 1448899 - DNA, 15 bp, Homo sapiens
taaaaagtagttgga

SEQ ID NO: 1448900 - DNA, 15 bp, Homo sapiens
aaaaagtagttggaa

SEQ ID NO: 1448901 - DNA, 15 bp, Homo sapiens
aaaagtagttggaag

SEQ ID NO: 1448902 - DNA, 15 bp, Homo sapiens
aaagtagttggaaga

SEQ ID NO: 1448903 - DNA, 15 bp, Homo sapiens
aagtagttggaagaa

SEQ ID NO: 1448904 - DNA, 15 bp, Homo sapiens
agtagttggaagaat

SEQ ID NO: 1448905 - DNA, 15 bp, Homo sapiens
gtagttggaagaatt

SEQ ID NO: 1448906 - DNA, 15 bp, Homo sapiens
tagttggaagaattc

SEQ ID NO: 1448907 - DNA, 15 bp, Homo sapiens
agttggaagaattct

SEQ ID NO: 1448908 - DNA, 15 bp, Homo sapiens
gttggaagaattcta

SEQ ID NO: 1448909 - DNA, 15 bp, Homo sapiens
ttggaagaattctag

SEQ ID NO: 1448910 - DNA, 15 bp, Homo sapiens
tggaagaattctagg

SEQ ID NO: 1448911 - DNA, 15 bp, Homo sapiens
ggaagaattctaggg

SEQ ID NO: 1448912 - DNA, 15 bp, Homo sapiens
gaagaattctaggga

SEQ ID NO: 1448913 - DNA, 15 bp, Homo sapiens
aagaattctagggat

SEQ ID NO: 1448914 - DNA, 15 bp, Homo sapiens
agaattctagggatg

SEQ ID NO: 1448915 - DNA, 15 bp, Homo sapiens
gaattctagggatgg

SEQ ID NO: 1448916 - DNA, 15 bp, Homo sapiens
aattctagggatgga

SEQ ID NO: 1448917 - DNA, 15 bp, Homo sapiens
attctagggatggag

SEQ ID NO: 1448918 - DNA, 15 bp, Homo sapiens
ttctagggatggaga

SEQ ID NO: 1448919 - DNA, 15 bp, Homo sapiens
tctagggatggagat

SEQ ID NO: 1448920 - DNA, 15 bp, Homo sapiens
ctagggatggagata

SEQ ID NO: 1448921 - DNA, 15 bp, Homo sapiens
tagggatggagataa

SEQ ID NO: 1448922 - DNA, 15 bp, Homo sapiens
agggatggagataaa

SEQ ID NO: 1448923 - DNA, 15 bp, Homo sapiens
gggatggagataaac

SEQ ID NO: 1448924 - DNA, 15 bp, Homo sapiens
ggatggagataaaca

SEQ ID NO: 1448925 - DNA, 15 bp, Homo sapiens
gatggagataaacat

SEQ ID NO: 1448926 - DNA, 15 bp, Homo sapiens
atggagataaacatt

SEQ ID NO: 1448927 - DNA, 15 bp, Homo sapiens
tggagataaacattt

SEQ ID NO: 1448928 - DNA, 15 bp, Homo sapiens
ggagataaacatttg

SEQ ID NO: 1448929 - DNA, 15 bp, Homo sapiens
gagataaacatttga

SEQ ID NO: 1448930 - DNA, 15 bp, Homo sapiens
agataaacatttgaa

SEQ ID NO: 1448931 - DNA, 15 bp, Homo sapiens
gataaacatttgaaa

SEQ ID NO: 1448932 - DNA, 15 bp, Homo sapiens
ataaacatttgaaaa

SEQ ID NO: 1448933 - DNA, 15 bp, Homo sapiens
taaacatttgaaaat

SEQ ID NO: 1448934 - DNA, 15 bp, Homo sapiens
aaacatttgaaaatt

SEQ ID NO: 1448935 - DNA, 15 bp, Homo sapiens
aacatttgaaaatta

SEQ ID NO: 1448936 - DNA, 15 bp, Homo sapiens
acatttgaaaattat

SEQ ID NO: 1448937 - DNA, 15 bp, Homo sapiens
catttgaaaattatt

SEQ ID NO: 1448938 - DNA, 15 bp, Homo sapiens
atttgaaaattatta

SEQ ID NO: 1448939 - DNA, 15 bp, Homo sapiens
tttgaaaattattaa

SEQ ID NO: 1448940 - DNA, 15 bp, Homo sapiens
ttgaaaattattaac

SEQ ID NO: 1448941 - DNA, 15 bp, Homo sapiens
tgaaaattattaact

SEQ ID NO: 1448942 - DNA, 15 bp, Homo sapiens
gaaaattattaactt

SEQ ID NO: 1448943 - DNA, 15 bp, Homo sapiens
aaaattattaactta

SEQ ID NO: 1448944 - DNA, 15 bp, Homo sapiens
aaattattaacttat

SEQ ID NO: 1448945 - DNA, 15 bp, Homo sapiens
aattattaacttata

SEQ ID NO: 1448946 - DNA, 15 bp, Homo sapiens
attattaacttatag

SEQ ID NO: 1448947 - DNA, 15 bp, Homo sapiens
ttattaacttatagg

SEQ ID NO: 1448948 - DNA, 15 bp, Homo sapiens
tattaacttataggt

SEQ ID NO: 1448949 - DNA, 15 bp, Homo sapiens
attaacttataggtg

SEQ ID NO: 1448950 - DNA, 15 bp, Homo sapiens
ttaacttataggtgg

SEQ ID NO: 1448951 - DNA, 15 bp, Homo sapiens
taacttataggtggt

SEQ ID NO: 1448952 - DNA, 15 bp, Homo sapiens
aacttataggtggtc

SEQ ID NO: 1448953 - DNA, 15 bp, Homo sapiens
acttataggtggtca

SEQ ID NO: 1448954 - DNA, 15 bp, Homo sapiens
cttataggtggtcat

SEQ ID NO: 1448955 - DNA, 15 bp, Homo sapiens
ttataggtggtcatc

SEQ ID NO: 1448956 - DNA, 15 bp, Homo sapiens
tataggtggtcatca

SEQ ID NO: 1448957 - DNA, 15 bp, Homo sapiens
ataggtggtcatcaa

SEQ ID NO: 1448958 - DNA, 15 bp, Homo sapiens
taggtggtcatcaat

SEQ ID NO: 1448959 - DNA, 15 bp, Homo sapiens
aggtggtcatcaata

SEQ ID NO: 1448960 - DNA, 15 bp, Homo sapiens
ggtggtcatcaatac

SEQ ID NO: 1448961 - DNA, 15 bp, Homo sapiens
gtggtcatcaatacc

SEQ ID NO: 1448962 - DNA, 15 bp, Homo sapiens
tggtcatcaataccc

SEQ ID NO: 1448963 - DNA, 15 bp, Homo sapiens
ggtcatcaataccct

SEQ ID NO: 1448964 - DNA, 15 bp, Homo sapiens
gtcatcaataccctg

SEQ ID NO: 1448965 - DNA, 15 bp, Homo sapiens
tcatcaataccctga

SEQ ID NO: 1448966 - DNA, 15 bp, Homo sapiens
catcaataccctgaa

SEQ ID NO: 1448967 - DNA, 15 bp, Homo sapiens
atcaataccctgaaa

SEQ ID NO: 1448968 - DNA, 15 bp, Homo sapiens
tcaataccctgaaaa

SEQ ID NO: 1448969 - DNA, 15 bp, Homo sapiens
caataccctgaaaat

SEQ ID NO: 1448970 - DNA, 15 bp, Homo sapiens
aataccctgaaaatg

SEQ ID NO: 1448971 - DNA, 15 bp, Homo sapiens
ataccctgaaaatga

SEQ ID NO: 1448972 - DNA, 15 bp, Homo sapiens
taccctgaaaatgac

SEQ ID NO: 1448973 - DNA, 15 bp, Homo sapiens
accctgaaaatgact

SEQ ID NO: 1448974 - DNA, 15 bp, Homo sapiens
ccctgaaaatgactg

SEQ ID NO: 1448975 - DNA, 15 bp, Homo sapiens
cctgaaaatgactgg

SEQ ID NO: 1448976 - DNA, 15 bp, Homo sapiens
ctgaaaatgactggg

SEQ ID NO: 1448977 - DNA, 15 bp, Homo sapiens
tgaaaatgactggga

SEQ ID NO: 1448978 - DNA, 15 bp, Homo sapiens
gaaaatgactgggat

SEQ ID NO: 1448979 - DNA, 15 bp, Homo sapiens
aaaatgactgggatc

SEQ ID NO: 1448980 - DNA, 15 bp, Homo sapiens
aaatgactgggatct

SEQ ID NO: 1448981 - DNA, 15 bp, Homo sapiens
aatgactgggatctc

SEQ ID NO: 1448982 - DNA, 15 bp, Homo sapiens
atgactgggatctca

SEQ ID NO: 1448983 - DNA, 15 bp, Homo sapiens
gactgggatctcaga

SEQ ID NO: 1448984 - DNA, 15 bp, Homo sapiens
actgggatctcagag

SEQ ID NO: 1448985 - DNA, 15 bp, Homo sapiens
ctgggatctcagagg

SEQ ID NO: 1448986 - DNA, 15 bp, Homo sapiens
tgggatctcagagga

SEQ ID NO: 1448987 - DNA, 15 bp, Homo sapiens
gggatctcagaggag

SEQ ID NO: 1448988 - DNA, 15 bp, Homo sapiens
ggatctcagaggaga

SEQ ID NO: 1448989 - DNA, 15 bp, Homo sapiens
gatctcagaggagag

SEQ ID NO: 1448990 - DNA, 15 bp, Homo sapiens
atctcagaggagagt

SEQ ID NO: 1448991 - DNA, 15 bp, Homo sapiens
tctcagaggagagtc

SEQ ID NO: 1448992 - DNA, 15 bp, Homo sapiens
ctcagaggagagtct

SEQ ID NO: 1448993 - DNA, 15 bp, Homo sapiens
cagaggagagtctgg

SEQ ID NO: 1448994 - DNA, 15 bp, Homo sapiens
agaggagagtctgga

SEQ ID NO: 1448995 - DNA, 15 bp, Homo sapiens
gaggagagtctggag

SEQ ID NO: 1448996 - DNA, 15 bp, Homo sapiens
aggagagtctggaga

SEQ ID NO: 1448997 - DNA, 15 bp, Homo sapiens
ggagagtctggagag

SEQ ID NO: 1448998 - DNA, 15 bp, Homo sapiens
gagagtctggagagt

SEQ ID NO: 1448999 - DNA, 15 bp, Homo sapiens
agagtctggagagtt

SEQ ID NO: 1449000 - DNA, 15 bp, Homo sapiens
gagtctggagagttg

SEQ ID NO: 1449001 - DNA, 15 bp, Homo sapiens
agtctggagagttgg

SEQ ID NO: 1449002 - DNA, 15 bp, Homo sapiens
gtctggagagttgga

SEQ ID NO: 1449003 - DNA, 15 bp, Homo sapiens
tctggagagttggaa

SEQ ID NO: 1449004 - DNA, 15 bp, Homo sapiens
ctggagagttggaaa

SEQ ID NO: 1449005 - DNA, 15 bp, Homo sapiens
tggagagttggaaat

SEQ ID NO: 1449006 - DNA, 15 bp, Homo sapiens
ggagagttggaaatg

SEQ ID NO: 1449007 - DNA, 15 bp, Homo sapiens
gagagttggaaatga

SEQ ID NO: 1449008 - DNA, 15 bp, Homo sapiens
agagttggaaatgac

SEQ ID NO: 1449009 - DNA, 15 bp, Homo sapiens
gagttggaaatgaca

SEQ ID NO: 1449010 - DNA, 15 bp, Homo sapiens
agttggaaatgacaa

SEQ ID NO: 1449011 - DNA, 15 bp, Homo sapiens
gttggaaatgacaaa

SEQ ID NO: 1449012 - DNA, 15 bp, Homo sapiens
ttggaaatgacaaag

SEQ ID NO: 1449013 - DNA, 15 bp, Homo sapiens
tggaaatgacaaaga

SEQ ID NO: 1449014 - DNA, 15 bp, Homo sapiens
ggaaatgacaaagac

SEQ ID NO: 1449015 - DNA, 15 bp, Homo sapiens
gaaatgacaaagact

SEQ ID NO: 1449016 - DNA, 15 bp, Homo sapiens
aaatgacaaagacta

SEQ ID NO: 1449017 - DNA, 15 bp, Homo sapiens
aatgacaaagactaa

SEQ ID NO: 1449018 - DNA, 15 bp, Homo sapiens
atgacaaagactaat

SEQ ID NO: 1449019 - DNA, 15 bp, Homo sapiens
tgacaaagactaata

SEQ ID NO: 1449020 - DNA, 15 bp, Homo sapiens
gacaaagactaatat

SEQ ID NO: 1449021 - DNA, 15 bp, Homo sapiens
acaaagactaatatt

SEQ ID NO: 1449022 - DNA, 15 bp, Homo sapiens
caaagactaatattc

SEQ ID NO: 1449023 - DNA, 15 bp, Homo sapiens
aaagactaatattca

SEQ ID NO: 1449024 - DNA, 15 bp, Homo sapiens
aagactaatattcaa

SEQ ID NO: 1449025 - DNA, 15 bp, Homo sapiens
agactaatattcaag

SEQ ID NO: 1449026 - DNA, 15 bp, Homo sapiens
gactaatattcaagg

SEQ ID NO: 1449027 - DNA, 15 bp, Homo sapiens
actaatattcaaggg

SEQ ID NO: 1449028 - DNA, 15 bp, Homo sapiens
ctaatattcaagggg

SEQ ID NO: 1449029 - DNA, 15 bp, Homo sapiens
taatattcaaggggg

SEQ ID NO: 1449030 - DNA, 15 bp, Homo sapiens
aatattcaagggggc

SEQ ID NO: 1449031 - DNA, 15 bp, Homo sapiens
atattcaagggggca

SEQ ID NO: 1449032 - DNA, 15 bp, Homo sapiens
tattcaagggggcag

SEQ ID NO: 1449033 - DNA, 15 bp, Homo sapiens
attcaagggggcagg

SEQ ID NO: 1449034 - DNA, 15 bp, Homo sapiens
ttcaagggggcagga

SEQ ID NO: 1449035 - DNA, 15 bp, Homo sapiens
tcaagggggcaggaa

SEQ ID NO: 1449036 - DNA, 15 bp, Homo sapiens
caagggggcaggaag

SEQ ID NO: 1449037 - DNA, 15 bp, Homo sapiens
aagggggcaggaaga

SEQ ID NO: 1449038 - DNA, 15 bp, Homo sapiens
agggggcaggaagag

SEQ ID NO: 1449039 - DNA, 15 bp, Homo sapiens
gggggcaggaagagg

SEQ ID NO: 1449040 - DNA, 15 bp, Homo sapiens
ggggcaggaagaggg

SEQ ID NO: 1449041 - DNA, 15 bp, Homo sapiens
gggcaggaagaggga

SEQ ID NO: 1449042 - DNA, 15 bp, Homo sapiens
ggcaggaagagggag

SEQ ID NO: 1449043 - DNA, 15 bp, Homo sapiens
gcaggaagagggaga

SEQ ID NO: 1449044 - DNA, 15 bp, Homo sapiens
caggaagagggagag

SEQ ID NO: 1449045 - DNA, 15 bp, Homo sapiens
aggaagagggagagt

SEQ ID NO: 1449046 - DNA, 15 bp, Homo sapiens
ggaagagggagagtt

SEQ ID NO: 1449047 - DNA, 15 bp, Homo sapiens
gaagagggagagttg

SEQ ID NO: 1449048 - DNA, 15 bp, Homo sapiens
aagagggagagttgt

SEQ ID NO: 1449049 - DNA, 15 bp, Homo sapiens
agagggagagttgtt

SEQ ID NO: 1449050 - DNA, 15 bp, Homo sapiens
gagggagagttgttc

SEQ ID NO: 1449051 - DNA, 15 bp, Homo sapiens
agggagagttgttca

SEQ ID NO: 1449052 - DNA, 15 bp, Homo sapiens
gggagagttgttcac

SEQ ID NO: 1449053 - DNA, 15 bp, Homo sapiens
ggagagttgttcaca

SEQ ID NO: 1449054 - DNA, 15 bp, Homo sapiens
gagagttgttcacac

SEQ ID NO: 1449055 - DNA, 15 bp, Homo sapiens
agagttgttcacaca

SEQ ID NO: 1449056 - DNA, 15 bp, Homo sapiens
gagttgttcacacat

SEQ ID NO: 1449057 - DNA, 15 bp, Homo sapiens
agttgttcacacatg

SEQ ID NO: 1449058 - DNA, 15 bp, Homo sapiens
gttgttcacacatga

SEQ ID NO: 1449059 - DNA, 15 bp, Homo sapiens
ttgttcacacatgac

SEQ ID NO: 1449060 - DNA, 15 bp, Homo sapiens
tgttcacacatgaca

SEQ ID NO: 1449061 - DNA, 15 bp, Homo sapiens
gttcacacatgacaa

SEQ ID NO: 1449062 - DNA, 15 bp, Homo sapiens
ttcacacatgacaat

SEQ ID NO: 1449063 - DNA, 15 bp, Homo sapiens
tcacacatgacaata

SEQ ID NO: 1449064 - DNA, 15 bp, Homo sapiens
cacacatgacaatag

SEQ ID NO: 1449065 - DNA, 15 bp, Homo sapiens
acacatgacaatagg

SEQ ID NO: 1449066 - DNA, 15 bp, Homo sapiens
cacatgacaatagga

SEQ ID NO: 1449067 - DNA, 15 bp, Homo sapiens
acatgacaataggaa

SEQ ID NO: 1449068 - DNA, 15 bp, Homo sapiens
catgacaataggaag

SEQ ID NO: 1449069 - DNA, 15 bp, Homo sapiens
atgacaataggaaga

SEQ ID NO: 1449070 - DNA, 15 bp, Homo sapiens
tgacaataggaagaa

SEQ ID NO: 1449071 - DNA, 15 bp, Homo sapiens
gacaataggaagaaa

SEQ ID NO: 1449072 - DNA, 15 bp, Homo sapiens
acaataggaagaaat

SEQ ID NO: 1449073 - DNA, 15 bp, Homo sapiens
caataggaagaaatg

SEQ ID NO: 1449074 - DNA, 15 bp, Homo sapiens
aataggaagaaatgg

SEQ ID NO: 1449075 - DNA, 15 bp, Homo sapiens
ataggaagaaatggc

SEQ ID NO: 1449076 - DNA, 15 bp, Homo sapiens
taggaagaaatggcc

SEQ ID NO: 1449077 - DNA, 15 bp, Homo sapiens
aggaagaaatggcca

SEQ ID NO: 1449078 - DNA, 15 bp, Homo sapiens
ggaagaaatggccat

SEQ ID NO: 1449079 - DNA, 15 bp, Homo sapiens
gaagaaatggccata

SEQ ID NO: 1449080 - DNA, 15 bp, Homo sapiens
aagaaatggccatag

SEQ ID NO: 1449081 - DNA, 15 bp, Homo sapiens
agaaatggccataga

SEQ ID NO: 1449082 - DNA, 15 bp, Homo sapiens
gaaatggccatagag

SEQ ID NO: 1449083 - DNA, 15 bp, Homo sapiens
aaatggccatagagt

SEQ ID NO: 1449084 - DNA, 15 bp, Homo sapiens
aatggccatagagtg

SEQ ID NO: 1449085 - DNA, 15 bp, Homo sapiens
atggccatagagtgt

SEQ ID NO: 1449086 - DNA, 15 bp, Homo sapiens
tggccatagagtgtg

SEQ ID NO: 1449087 - DNA, 15 bp, Homo sapiens
ggccatagagtgtgt

SEQ ID NO: 1449088 - DNA, 15 bp, Homo sapiens
gccatagagtgtgtg

SEQ ID NO: 1449089 - DNA, 15 bp, Homo sapiens
ccatagagtgtgtgg

SEQ ID NO: 1449090 - DNA, 15 bp, Homo sapiens
catagagtgtgtggt

SEQ ID NO: 1449091 - DNA, 15 bp, Homo sapiens
atagagtgtgtggtt

SEQ ID NO: 1449092 - DNA, 15 bp, Homo sapiens
tagagtgtgtggttt

SEQ ID NO: 1449093 - DNA, 15 bp, Homo sapiens
agagtgtgtggtttc

SEQ ID NO: 1449094 - DNA, 15 bp, Homo sapiens
gagtgtgtggtttct

SEQ ID NO: 1449095 - DNA, 15 bp, Homo sapiens
agtgtgtggtttctc

SEQ ID NO: 1449096 - DNA, 15 bp, Homo sapiens
gtgtgtggtttctct

SEQ ID NO: 1449097 - DNA, 15 bp, Homo sapiens
tgtgtggtttctctc

SEQ ID NO: 1449098 - DNA, 15 bp, Homo sapiens
gtgtggtttctctca

SEQ ID NO: 1449099 - DNA, 15 bp, Homo sapiens
tgtggtttctctcaa

SEQ ID NO: 1449100 - DNA, 15 bp, Homo sapiens
gtggtttctctcaag

SEQ ID NO: 1449101 - DNA, 15 bp, Homo sapiens
tggtttctctcaagc

SEQ ID NO: 1449102 - DNA, 15 bp, Homo sapiens
ggtttctctcaagcc

SEQ ID NO: 1449103 - DNA, 15 bp, Homo sapiens
gtttctctcaagcca

SEQ ID NO: 1449104 - DNA, 15 bp, Homo sapiens
tttctctcaagccaa

SEQ ID NO: 1449105 - DNA, 15 bp, Homo sapiens
ttctctcaagccaag

SEQ ID NO: 1449106 - DNA, 15 bp, Homo sapiens
tctctcaagccaagg

SEQ ID NO: 1449107 - DNA, 15 bp, Homo sapiens
ctctcaagccaagga

SEQ ID NO: 1449108 - DNA, 15 bp, Homo sapiens
tctcaagccaaggaa

SEQ ID NO: 1449109 - DNA, 15 bp, Homo sapiens
ctcaagccaaggaat

SEQ ID NO: 1449110 - DNA, 15 bp, Homo sapiens
tcaagccaaggaata

SEQ ID NO: 1449111 - DNA, 15 bp, Homo sapiens
caagccaaggaatag

SEQ ID NO: 1449112 - DNA, 15 bp, Homo sapiens
aagccaaggaataga

SEQ ID NO: 1449113 - DNA, 15 bp, Homo sapiens
agccaaggaatagat

SEQ ID NO: 1449114 - DNA, 15 bp, Homo sapiens
gccaaggaatagatg

SEQ ID NO: 1449115 - DNA, 15 bp, Homo sapiens
ccaaggaatagatgt

SEQ ID NO: 1449116 - DNA, 15 bp, Homo sapiens
caaggaatagatgtt

SEQ ID NO: 1449117 - DNA, 15 bp, Homo sapiens
aaggaatagatgttt

SEQ ID NO: 1449118 - DNA, 15 bp, Homo sapiens
aggaatagatgtttt

SEQ ID NO: 1449119 - DNA, 15 bp, Homo sapiens
ggaatagatgtttta

SEQ ID NO: 1449120 - DNA, 15 bp, Homo sapiens
gaatagatgttttaa

SEQ ID NO: 1449121 - DNA, 15 bp, Homo sapiens
aatagatgttttaag

SEQ ID NO: 1449122 - DNA, 15 bp, Homo sapiens
atagatgttttaaga

SEQ ID NO: 1449123 - DNA, 15 bp, Homo sapiens
tagatgttttaagaa

SEQ ID NO: 1449124 - DNA, 15 bp, Homo sapiens
agatgttttaagaaa

SEQ ID NO: 1449125 - DNA, 15 bp, Homo sapiens
gatgttttaagaaag

SEQ ID NO: 1449126 - DNA, 15 bp, Homo sapiens
atgttttaagaaagg

SEQ ID NO: 1449127 - DNA, 15 bp, Homo sapiens
tgttttaagaaagga

SEQ ID NO: 1449128 - DNA, 15 bp, Homo sapiens
gttttaagaaaggaa

SEQ ID NO: 1449129 - DNA, 15 bp, Homo sapiens
ttttaagaaaggaaa

SEQ ID NO: 1449130 - DNA, 15 bp, Homo sapiens
tttaagaaaggaaaa

SEQ ID NO: 1449131 - DNA, 15 bp, Homo sapiens
ttaagaaaggaaaat

SEQ ID NO: 1449132 - DNA, 15 bp, Homo sapiens
taagaaaggaaaatt

SEQ ID NO: 1449133 - DNA, 15 bp, Homo sapiens
aagaaaggaaaattc

SEQ ID NO: 1449134 - DNA, 15 bp, Homo sapiens
agaaaggaaaattct

SEQ ID NO: 1449135 - DNA, 15 bp, Homo sapiens
gaaaggaaaattctt

SEQ ID NO: 1449136 - DNA, 15 bp, Homo sapiens
aaaggaaaattcttg

SEQ ID NO: 1449137 - DNA, 15 bp, Homo sapiens
aaggaaaattcttgt

SEQ ID NO: 1449138 - DNA, 15 bp, Homo sapiens
aggaaaattcttgtg

SEQ ID NO: 1449139 - DNA, 15 bp, Homo sapiens
ggaaaattcttgtgg

SEQ ID NO: 1449140 - DNA, 15 bp, Homo sapiens
gaaaattcttgtggt

SEQ ID NO: 1449141 - DNA, 15 bp, Homo sapiens
aaaattcttgtggtg

SEQ ID NO: 1449142 - DNA, 15 bp, Homo sapiens
aaattcttgtggtgg

SEQ ID NO: 1449143 - DNA, 15 bp, Homo sapiens
aattcttgtggtggg

SEQ ID NO: 1449144 - DNA, 15 bp, Homo sapiens
attcttgtggtggga

SEQ ID NO: 1449145 - DNA, 15 bp, Homo sapiens
ttcttgtggtgggaa

SEQ ID NO: 1449146 - DNA, 15 bp, Homo sapiens
tcttgtggtgggaag

SEQ ID NO: 1449147 - DNA, 15 bp, Homo sapiens
cttgtggtgggaagc

SEQ ID NO: 1449148 - DNA, 15 bp, Homo sapiens
ttgtggtgggaagca

SEQ ID NO: 1449149 - DNA, 15 bp, Homo sapiens
tgtggtgggaagcag

SEQ ID NO: 1449150 - DNA, 15 bp, Homo sapiens
gtggtgggaagcagt

SEQ ID NO: 1449151 - DNA, 15 bp, Homo sapiens
tggtgggaagcagta

SEQ ID NO: 1449152 - DNA, 15 bp, Homo sapiens
ggtgggaagcagtag

SEQ ID NO: 1449153 - DNA, 15 bp, Homo sapiens
gtgggaagcagtaga

SEQ ID NO: 1449154 - DNA, 15 bp, Homo sapiens
tgggaagcagtagag

SEQ ID NO: 1449155 - DNA, 15 bp, Homo sapiens
gggaagcagtagaga

SEQ ID NO: 1449156 - DNA, 15 bp, Homo sapiens
ggaagcagtagagat

SEQ ID NO: 1449157 - DNA, 15 bp, Homo sapiens
gaagcagtagagatg

SEQ ID NO: 1449158 - DNA, 15 bp, Homo sapiens
aagcagtagagatga

SEQ ID NO: 1449159 - DNA, 15 bp, Homo sapiens
agcagtagagatgac

SEQ ID NO: 1449160 - DNA, 15 bp, Homo sapiens
gcagtagagatgaca

SEQ ID NO: 1449161 - DNA, 15 bp, Homo sapiens
cagtagagatgacag

SEQ ID NO: 1449162 - DNA, 15 bp, Homo sapiens
agtagagatgacaga

SEQ ID NO: 1449163 - DNA, 15 bp, Homo sapiens
gtagagatgacagat

SEQ ID NO: 1449164 - DNA, 15 bp, Homo sapiens
tagagatgacagata

SEQ ID NO: 1449165 - DNA, 15 bp, Homo sapiens
agagatgacagatac

SEQ ID NO: 1449166 - DNA, 15 bp, Homo sapiens
gagatgacagataca

SEQ ID NO: 1449167 - DNA, 15 bp, Homo sapiens
agatgacagatacac

SEQ ID NO: 1449168 - DNA, 15 bp, Homo sapiens
gatgacagatacaca

SEQ ID NO: 1449169 - DNA, 15 bp, Homo sapiens
atgacagatacacat

SEQ ID NO: 1449170 - DNA, 15 bp, Homo sapiens
tgacagatacacatt

SEQ ID NO: 1449171 - DNA, 15 bp, Homo sapiens
gacagatacacatta

SEQ ID NO: 1449172 - DNA, 15 bp, Homo sapiens
acagatacacattaa

SEQ ID NO: 1449173 - DNA, 15 bp, Homo sapiens
cagatacacattaat

SEQ ID NO: 1449174 - DNA, 15 bp, Homo sapiens
agatacacattaatt

SEQ ID NO: 1449175 - DNA, 15 bp, Homo sapiens
gatacacattaattt

SEQ ID NO: 1449176 - DNA, 15 bp, Homo sapiens
atacacattaatttc

SEQ ID NO: 1449177 - DNA, 15 bp, Homo sapiens
tacacattaatttct

SEQ ID NO: 1449178 - DNA, 15 bp, Homo sapiens
acacattaatttctt

SEQ ID NO: 1449179 - DNA, 15 bp, Homo sapiens
cacattaatttcttg

SEQ ID NO: 1449180 - DNA, 15 bp, Homo sapiens
acattaatttcttga

SEQ ID NO: 1449181 - DNA, 15 bp, Homo sapiens
cattaatttcttgag

SEQ ID NO: 1449182 - DNA, 15 bp, Homo sapiens
attaatttcttgaga

SEQ ID NO: 1449183 - DNA, 15 bp, Homo sapiens
ttaatttcttgagat

SEQ ID NO: 1449184 - DNA, 15 bp, Homo sapiens
taatttcttgagatt

SEQ ID NO: 1449185 - DNA, 15 bp, Homo sapiens
aatttcttgagattt

SEQ ID NO: 1449186 - DNA, 15 bp, Homo sapiens
atttcttgagatttc

SEQ ID NO: 1449187 - DNA, 15 bp, Homo sapiens
tttcttgagatttct

SEQ ID NO: 1449188 - DNA, 15 bp, Homo sapiens
ttcttgagatttcta

SEQ ID NO: 1449189 - DNA, 15 bp, Homo sapiens
tcttgagatttctag

SEQ ID NO: 1449190 - DNA, 15 bp, Homo sapiens
cttgagatttctaga

SEQ ID NO: 1449191 - DNA, 15 bp, Homo sapiens
ttgagatttctagat

SEQ ID NO: 1449192 - DNA, 15 bp, Homo sapiens
tgagatttctagatg

SEQ ID NO: 1449193 - DNA, 15 bp, Homo sapiens
gagatttctagatga

SEQ ID NO: 1449194 - DNA, 15 bp, Homo sapiens
agatttctagatgac

SEQ ID NO: 1449195 - DNA, 15 bp, Homo sapiens
gatttctagatgact

SEQ ID NO: 1449196 - DNA, 15 bp, Homo sapiens
atttctagatgacta

SEQ ID NO: 1449197 - DNA, 15 bp, Homo sapiens
tttctagatgactaa

SEQ ID NO: 1449198 - DNA, 15 bp, Homo sapiens
ttctagatgactaaa

SEQ ID NO: 1449199 - DNA, 15 bp, Homo sapiens
tctagatgactaaat

SEQ ID NO: 1449200 - DNA, 15 bp, Homo sapiens
ctagatgactaaatg

SEQ ID NO: 1449201 - DNA, 15 bp, Homo sapiens
tagatgactaaatgg

SEQ ID NO: 1449202 - DNA, 15 bp, Homo sapiens
agatgactaaatggg

SEQ ID NO: 1449203 - DNA, 15 bp, Homo sapiens
gatgactaaatgggc

SEQ ID NO: 1449204 - DNA, 15 bp, Homo sapiens
atgactaaatgggca

SEQ ID NO: 1449205 - DNA, 15 bp, Homo sapiens
tgactaaatgggcag

SEQ ID NO: 1449206 - DNA, 15 bp, Homo sapiens
gactaaatgggcaga

SEQ ID NO: 1449207 - DNA, 15 bp, Homo sapiens
actaaatgggcagat

SEQ ID NO: 1449208 - DNA, 15 bp, Homo sapiens
ctaaatgggcagatg

SEQ ID NO: 1449209 - DNA, 15 bp, Homo sapiens
taaatgggcagatgt

SEQ ID NO: 1449210 - DNA, 15 bp, Homo sapiens
aaatgggcagatgtt

SEQ ID NO: 1449211 - DNA, 15 bp, Homo sapiens
aatgggcagatgttg

SEQ ID NO: 1449212 - DNA, 15 bp, Homo sapiens
atgggcagatgttga

SEQ ID NO: 1449213 - DNA, 15 bp, Homo sapiens
tgggcagatgttgaa

SEQ ID NO: 1449214 - DNA, 15 bp, Homo sapiens
gggcagatgttgaat

SEQ ID NO: 1449215 - DNA, 15 bp, Homo sapiens
ggcagatgttgaatg

SEQ ID NO: 1449216 - DNA, 15 bp, Homo sapiens
gcagatgttgaatga

SEQ ID NO: 1449217 - DNA, 15 bp, Homo sapiens
cagatgttgaatgat

SEQ ID NO: 1449218 - DNA, 15 bp, Homo sapiens
agatgttgaatgata

SEQ ID NO: 1449219 - DNA, 15 bp, Homo sapiens
gatgttgaatgatag

SEQ ID NO: 1449220 - DNA, 15 bp, Homo sapiens
atgttgaatgatagc

SEQ ID NO: 1449221 - DNA, 15 bp, Homo sapiens
tgttgaatgatagct

SEQ ID NO: 1449222 - DNA, 15 bp, Homo sapiens
gttgaatgatagcta

SEQ ID NO: 1449223 - DNA, 15 bp, Homo sapiens
ttgaatgatagctaa

SEQ ID NO: 1449224 - DNA, 15 bp, Homo sapiens
tgaatgatagctaaa

SEQ ID NO: 1449225 - DNA, 15 bp, Homo sapiens
gaatgatagctaaag

SEQ ID NO: 1449226 - DNA, 15 bp, Homo sapiens
aatgatagctaaagg

SEQ ID NO: 1449227 - DNA, 15 bp, Homo sapiens
atgatagctaaagga

SEQ ID NO: 1449228 - DNA, 15 bp, Homo sapiens
tgatagctaaaggag

SEQ ID NO: 1449229 - DNA, 15 bp, Homo sapiens
gatagctaaaggaga

SEQ ID NO: 1449230 - DNA, 15 bp, Homo sapiens
atagctaaaggagaa

SEQ ID NO: 1449231 - DNA, 15 bp, Homo sapiens
tagctaaaggagaac

SEQ ID NO: 1449232 - DNA, 15 bp, Homo sapiens
agctaaaggagaacc

SEQ ID NO: 1449233 - DNA, 15 bp, Homo sapiens
gctaaaggagaaccc

SEQ ID NO: 1449234 - DNA, 15 bp, Homo sapiens
ctaaaggagaaccca

SEQ ID NO: 1449235 - DNA, 15 bp, Homo sapiens
taaaggagaacccag

SEQ ID NO: 1449236 - DNA, 15 bp, Homo sapiens
aaaggagaacccaga

SEQ ID NO: 1449237 - DNA, 15 bp, Homo sapiens
aaggagaacccagaa

SEQ ID NO: 1449238 - DNA, 15 bp, Homo sapiens
aggagaacccagaaa

SEQ ID NO: 1449239 - DNA, 15 bp, Homo sapiens
ggagaacccagaaac

SEQ ID NO: 1449240 - DNA, 15 bp, Homo sapiens
gagaacccagaaaca

SEQ ID NO: 1449241 - DNA, 15 bp, Homo sapiens
agaacccagaaacaa

SEQ ID NO: 1449242 - DNA, 15 bp, Homo sapiens
gaacccagaaacaag

SEQ ID NO: 1449243 - DNA, 15 bp, Homo sapiens
aacccagaaacaagg

SEQ ID NO: 1449244 - DNA, 15 bp, Homo sapiens
acccagaaacaaggg

SEQ ID NO: 1449245 - DNA, 15 bp, Homo sapiens
cccagaaacaaggga

SEQ ID NO: 1449246 - DNA, 15 bp, Homo sapiens
ccagaaacaagggag

SEQ ID NO: 1449247 - DNA, 15 bp, Homo sapiens
cagaaacaagggagg

SEQ ID NO: 1449248 - DNA, 15 bp, Homo sapiens
agaaacaagggaggg

SEQ ID NO: 1449249 - DNA, 15 bp, Homo sapiens
gaaacaagggaggga

SEQ ID NO: 1449250 - DNA, 15 bp, Homo sapiens
aaacaagggagggat

SEQ ID NO: 1449251 - DNA, 15 bp, Homo sapiens
aacaagggagggatt

SEQ ID NO: 1449252 - DNA, 15 bp, Homo sapiens
acaagggagggattt

SEQ ID NO: 1449253 - DNA, 15 bp, Homo sapiens
caagggagggatttt

SEQ ID NO: 1449254 - DNA, 15 bp, Homo sapiens
aagggagggattttg

SEQ ID NO: 1449255 - DNA, 15 bp, Homo sapiens
agggagggattttgt

SEQ ID NO: 1449256 - DNA, 15 bp, Homo sapiens
gggagggattttgtt

SEQ ID NO: 1449257 - DNA, 15 bp, Homo sapiens
ggagggattttgttt

SEQ ID NO: 1449258 - DNA, 15 bp, Homo sapiens
gagggattttgtttt

SEQ ID NO: 1449259 - DNA, 15 bp, Homo sapiens
agggattttgttttt

SEQ ID NO: 1449260 - DNA, 15 bp, Homo sapiens
gggattttgtttttg

SEQ ID NO: 1449261 - DNA, 15 bp, Homo sapiens
ggattttgtttttgt

SEQ ID NO: 1449262 - DNA, 15 bp, Homo sapiens
gattttgtttttgtt

SEQ ID NO: 1449263 - DNA, 15 bp, Homo sapiens
attttgtttttgttt

SEQ ID NO: 1449264 - DNA, 15 bp, Homo sapiens
tgtttttgtttttta

SEQ ID NO: 1449265 - DNA, 15 bp, Homo sapiens
gtttttgttttttaa

SEQ ID NO: 1449266 - DNA, 15 bp, Homo sapiens
ttttgttttttaaaa

SEQ ID NO: 1449267 - DNA, 15 bp, Homo sapiens
tttgttttttaaaaa

SEQ ID NO: 1449268 - DNA, 15 bp, Homo sapiens
ttgttttttaaaaaa

SEQ ID NO: 1449269 - DNA, 15 bp, Homo sapiens
gttttttaaaaaaga

SEQ ID NO: 1449270 - DNA, 15 bp, Homo sapiens
ttttttaaaaaagat

SEQ ID NO: 1449271 - DNA, 15 bp, Homo sapiens
tttttaaaaaagata

SEQ ID NO: 1449272 - DNA, 15 bp, Homo sapiens
ttttaaaaaagatag

SEQ ID NO: 1449273 - DNA, 15 bp, Homo sapiens
tttaaaaaagataga

SEQ ID NO: 1449274 - DNA, 15 bp, Homo sapiens
ttaaaaaagatagac

SEQ ID NO: 1449275 - DNA, 15 bp, Homo sapiens
taaaaaagatagacc

SEQ ID NO: 1449276 - DNA, 15 bp, Homo sapiens
aaaaaagatagacca

SEQ ID NO: 1449277 - DNA, 15 bp, Homo sapiens
aaaaagatagaccat

SEQ ID NO: 1449278 - DNA, 15 bp, Homo sapiens
aaaagatagaccata

SEQ ID NO: 1449279 - DNA, 15 bp, Homo sapiens
aaagatagaccatag

SEQ ID NO: 1449280 - DNA, 15 bp, Homo sapiens
aagatagaccatagc

SEQ ID NO: 1449281 - DNA, 15 bp, Homo sapiens
agatagaccatagca

SEQ ID NO: 1449282 - DNA, 15 bp, Homo sapiens
gatagaccatagcag

SEQ ID NO: 1449283 - DNA, 15 bp, Homo sapiens
atagaccatagcagc

SEQ ID NO: 1449284 - DNA, 15 bp, Homo sapiens
tagaccatagcagct

SEQ ID NO: 1449285 - DNA, 15 bp, Homo sapiens
agaccatagcagctt

SEQ ID NO: 1449286 - DNA, 15 bp, Homo sapiens
gaccatagcagcttc

SEQ ID NO: 1449287 - DNA, 15 bp, Homo sapiens
accatagcagcttca

SEQ ID NO: 1449288 - DNA, 15 bp, Homo sapiens
ccatagcagcttcat

SEQ ID NO: 1449289 - DNA, 15 bp, Homo sapiens
catagcagcttcata

SEQ ID NO: 1449290 - DNA, 15 bp, Homo sapiens
atagcagcttcatag

SEQ ID NO: 1449291 - DNA, 15 bp, Homo sapiens
tagcagcttcataga

SEQ ID NO: 1449292 - DNA, 15 bp, Homo sapiens
agcagcttcatagac

SEQ ID NO: 1449293 - DNA, 15 bp, Homo sapiens
gcagcttcatagact

SEQ ID NO: 1449294 - DNA, 15 bp, Homo sapiens
cagcttcatagactg

SEQ ID NO: 1449295 - DNA, 15 bp, Homo sapiens
agcttcatagactga

SEQ ID NO: 1449296 - DNA, 15 bp, Homo sapiens
gcttcatagactgaa

SEQ ID NO: 1449297 - DNA, 15 bp, Homo sapiens
cttcatagactgaaa

SEQ ID NO: 1449298 - DNA, 15 bp, Homo sapiens
ttcatagactgaaac

SEQ ID NO: 1449299 - DNA, 15 bp, Homo sapiens
tcatagactgaaaca

SEQ ID NO: 1449300 - DNA, 15 bp, Homo sapiens
catagactgaaacaa

SEQ ID NO: 1449301 - DNA, 15 bp, Homo sapiens
atagactgaaacaat

SEQ ID NO: 1449302 - DNA, 15 bp, Homo sapiens
tagactgaaacaata

SEQ ID NO: 1449303 - DNA, 15 bp, Homo sapiens
agactgaaacaataa

SEQ ID NO: 1449304 - DNA, 15 bp, Homo sapiens
gactgaaacaataaa

SEQ ID NO: 1449305 - DNA, 15 bp, Homo sapiens
actgaaacaataaaa

SEQ ID NO: 1449306 - DNA, 15 bp, Homo sapiens
ctgaaacaataaaaa

SEQ ID NO: 1449307 - DNA, 15 bp, Homo sapiens
tgaaacaataaaaaa

SEQ ID NO: 1449308 - DNA, 15 bp, Homo sapiens
gaaacaataaaaaag

SEQ ID NO: 1449309 - DNA, 15 bp, Homo sapiens
aaacaataaaaaagt

SEQ ID NO: 1449310 - DNA, 15 bp, Homo sapiens
aacaataaaaaagtt

SEQ ID NO: 1449311 - DNA, 15 bp, Homo sapiens
acaataaaaaagttg

SEQ ID NO: 1449312 - DNA, 15 bp, Homo sapiens
caataaaaaagttga

SEQ ID NO: 1449313 - DNA, 15 bp, Homo sapiens
aataaaaaagttgaa

SEQ ID NO: 1449314 - DNA, 15 bp, Homo sapiens
ataaaaaagttgaag

SEQ ID NO: 1449315 - DNA, 15 bp, Homo sapiens
taaaaaagttgaagg

SEQ ID NO: 1449316 - DNA, 15 bp, Homo sapiens
aaaaaagttgaaggc

SEQ ID NO: 1449317 - DNA, 15 bp, Homo sapiens
aaaaagttgaaggca

SEQ ID NO: 1449318 - DNA, 15 bp, Homo sapiens
aaaagttgaaggcac

SEQ ID NO: 1449319 - DNA, 15 bp, Homo sapiens
aaagttgaaggcaca

SEQ ID NO: 1449320 - DNA, 15 bp, Homo sapiens
aagttgaaggcacaa

SEQ ID NO: 1449321 - DNA, 15 bp, Homo sapiens
agttgaaggcacaaa

SEQ ID NO: 1449322 - DNA, 15 bp, Homo sapiens
gttgaaggcacaaag

SEQ ID NO: 1449323 - DNA, 15 bp, Homo sapiens
ttgaaggcacaaaga

SEQ ID NO: 1449324 - DNA, 15 bp, Homo sapiens
tgaaggcacaaagaa

SEQ ID NO: 1449325 - DNA, 15 bp, Homo sapiens
gaaggcacaaagaaa

SEQ ID NO: 1449326 - DNA, 15 bp, Homo sapiens
aaggcacaaagaaag

SEQ ID NO: 1449327 - DNA, 15 bp, Homo sapiens
aggcacaaagaaaga

SEQ ID NO: 1449328 - DNA, 15 bp, Homo sapiens
ggcacaaagaaagac

SEQ ID NO: 1449329 - DNA, 15 bp, Homo sapiens
gcacaaagaaagaca

SEQ ID NO: 1449330 - DNA, 15 bp, Homo sapiens
cacaaagaaagacac

SEQ ID NO: 1449331 - DNA, 15 bp, Homo sapiens
acaaagaaagacaca

SEQ ID NO: 1449332 - DNA, 15 bp, Homo sapiens
caaagaaagacacag

SEQ ID NO: 1449333 - DNA, 15 bp, Homo sapiens
aaagaaagacacagg

SEQ ID NO: 1449334 - DNA, 15 bp, Homo sapiens
aagaaagacacaggt

SEQ ID NO: 1449335 - DNA, 15 bp, Homo sapiens
agaaagacacaggtc

SEQ ID NO: 1449336 - DNA, 15 bp, Homo sapiens
gaaagacacaggtcc

SEQ ID NO: 1449337 - DNA, 15 bp, Homo sapiens
aaagacacaggtcct

SEQ ID NO: 1449338 - DNA, 15 bp, Homo sapiens
aagacacaggtcctc

SEQ ID NO: 1449339 - DNA, 15 bp, Homo sapiens
agacacaggtcctct

SEQ ID NO: 1449340 - DNA, 15 bp, Homo sapiens
gacacaggtcctcta

SEQ ID NO: 1449341 - DNA, 15 bp, Homo sapiens
acacaggtcctctaa

SEQ ID NO: 1449342 - DNA, 15 bp, Homo sapiens
cacaggtcctctaac

SEQ ID NO: 1449343 - DNA, 15 bp, Homo sapiens
acaggtcctctaact

SEQ ID NO: 1449344 - DNA, 15 bp, Homo sapiens
caggtcctctaactc

SEQ ID NO: 1449345 - DNA, 15 bp, Homo sapiens
aggtcctctaactcc

SEQ ID NO: 1449346 - DNA, 15 bp, Homo sapiens
ggtcctctaactccc

SEQ ID NO: 1449347 - DNA, 15 bp, Homo sapiens
gtcctctaactccct

SEQ ID NO: 1449348 - DNA, 15 bp, Homo sapiens
tcctctaactccctg

SEQ ID NO: 1449349 - DNA, 15 bp, Homo sapiens
cctctaactccctgc

SEQ ID NO: 1449350 - DNA, 15 bp, Homo sapiens
ctctaactccctgcc

SEQ ID NO: 1449351 - DNA, 15 bp, Homo sapiens
tctaactccctgccc

SEQ ID NO: 1449352 - DNA, 15 bp, Homo sapiens
ctaactccctgccca

SEQ ID NO: 1449353 - DNA, 15 bp, Homo sapiens
taactccctgcccag

SEQ ID NO: 1449354 - DNA, 15 bp, Homo sapiens
aactccctgcccagt

SEQ ID NO: 1449355 - DNA, 15 bp, Homo sapiens
actccctgcccagtg

SEQ ID NO: 1449356 - DNA, 15 bp, Homo sapiens
ctccctgcccagtgc

SEQ ID NO: 1449357 - DNA, 15 bp, Homo sapiens
tccctgcccagtgcc

SEQ ID NO: 1449358 - DNA, 15 bp, Homo sapiens
ccctgcccagtgccc

SEQ ID NO: 1449359 - DNA, 15 bp, Homo sapiens
cctgcccagtgccct

SEQ ID NO: 1449360 - DNA, 15 bp, Homo sapiens
ctgcccagtgccctt

SEQ ID NO: 1449361 - DNA, 15 bp, Homo sapiens
tgcccagtgcccttt

SEQ ID NO: 1449362 - DNA, 15 bp, Homo sapiens
gcccagtgcccttta

SEQ ID NO: 1449363 - DNA, 15 bp, Homo sapiens
cccagtgccctttat

SEQ ID NO: 1449364 - DNA, 15 bp, Homo sapiens
ccagtgccctttatt

SEQ ID NO: 1449365 - DNA, 15 bp, Homo sapiens
cagtgccctttattc

SEQ ID NO: 1449366 - DNA, 15 bp, Homo sapiens
agtgccctttattca

SEQ ID NO: 1449367 - DNA, 15 bp, Homo sapiens
gtgccctttattcat

SEQ ID NO: 1449368 - DNA, 15 bp, Homo sapiens
tgccctttattcata

SEQ ID NO: 1449369 - DNA, 15 bp, Homo sapiens
gccctttattcatat

SEQ ID NO: 1449370 - DNA, 15 bp, Homo sapiens
ccctttattcatatt

SEQ ID NO: 1449371 - DNA, 15 bp, Homo sapiens
cctttattcatattc

SEQ ID NO: 1449372 - DNA, 15 bp, Homo sapiens
ctttattcatattct

SEQ ID NO: 1449373 - DNA, 15 bp, Homo sapiens
tttattcatattctc

SEQ ID NO: 1449374 - DNA, 15 bp, Homo sapiens
ttattcatattctca

SEQ ID NO: 1449375 - DNA, 15 bp, Homo sapiens
tattcatattctcag

SEQ ID NO: 1449376 - DNA, 15 bp, Homo sapiens
attcatattctcagc

SEQ ID NO: 1449377 - DNA, 15 bp, Homo sapiens
ttcatattctcagca

SEQ ID NO: 1449378 - DNA, 15 bp, Homo sapiens
tcatattctcagcac

SEQ ID NO: 1449379 - DNA, 15 bp, Homo sapiens
catattctcagcact

SEQ ID NO: 1449380 - DNA, 15 bp, Homo sapiens
atattctcagcactt

SEQ ID NO: 1449381 - DNA, 15 bp, Homo sapiens
tattctcagcacttg

SEQ ID NO: 1449382 - DNA, 15 bp, Homo sapiens
attctcagcacttgt

SEQ ID NO: 1449383 - DNA, 15 bp, Homo sapiens
ttctcagcacttgta

SEQ ID NO: 1449384 - DNA, 15 bp, Homo sapiens
tctcagcacttgtat

SEQ ID NO: 1449385 - DNA, 15 bp, Homo sapiens
ctcagcacttgtatt

SEQ ID NO: 1449386 - DNA, 15 bp, Homo sapiens
tcagcacttgtattt

SEQ ID NO: 1449387 - DNA, 15 bp, Homo sapiens
cagcacttgtatttc

SEQ ID NO: 1449388 - DNA, 15 bp, Homo sapiens
agcacttgtatttct

SEQ ID NO: 1449389 - DNA, 15 bp, Homo sapiens
gcacttgtatttcta

SEQ ID NO: 1449390 - DNA, 15 bp, Homo sapiens
cacttgtatttctaa

SEQ ID NO: 1449391 - DNA, 15 bp, Homo sapiens
acttgtatttctaag

SEQ ID NO: 1449392 - DNA, 15 bp, Homo sapiens
cttgtatttctaagt

SEQ ID NO: 1449393 - DNA, 15 bp, Homo sapiens
ttgtatttctaagtt

SEQ ID NO: 1449394 - DNA, 15 bp, Homo sapiens
tgtatttctaagttt

SEQ ID NO: 1449395 - DNA, 15 bp, Homo sapiens
gtatttctaagtttt

SEQ ID NO: 1449396 - DNA, 15 bp, Homo sapiens
tatttctaagtttta

SEQ ID NO: 1449397 - DNA, 15 bp, Homo sapiens
atttctaagttttat

SEQ ID NO: 1449398 - DNA, 15 bp, Homo sapiens
tttctaagttttatg

SEQ ID NO: 1449399 - DNA, 15 bp, Homo sapiens
ttctaagttttatgt

SEQ ID NO: 1449400 - DNA, 15 bp, Homo sapiens
tctaagttttatgtt

SEQ ID NO: 1449401 - DNA, 15 bp, Homo sapiens
ctaagttttatgttt

SEQ ID NO: 1449402 - DNA, 15 bp, Homo sapiens
taagttttatgtttg

SEQ ID NO: 1449403 - DNA, 15 bp, Homo sapiens
aagttttatgtttga

SEQ ID NO: 1449404 - DNA, 15 bp, Homo sapiens
agttttatgtttgag

SEQ ID NO: 1449405 - DNA, 15 bp, Homo sapiens
gttttatgtttgagt

SEQ ID NO: 1449406 - DNA, 15 bp, Homo sapiens
ttttatgtttgagtc

SEQ ID NO: 1449407 - DNA, 15 bp, Homo sapiens
tttatgtttgagtct

SEQ ID NO: 1449408 - DNA, 15 bp, Homo sapiens
ttatgtttgagtctt

SEQ ID NO: 1449409 - DNA, 15 bp, Homo sapiens
tatgtttgagtcttc

SEQ ID NO: 1449410 - DNA, 15 bp, Homo sapiens
atgtttgagtcttcg

SEQ ID NO: 1449411 - DNA, 15 bp, Homo sapiens
tgtttgagtcttcgg

SEQ ID NO: 1449412 - DNA, 15 bp, Homo sapiens
gtttgagtcttcggg

SEQ ID NO: 1449413 - DNA, 15 bp, Homo sapiens
tttgagtcttcgggg

SEQ ID NO: 1449414 - DNA, 15 bp, Homo sapiens
ttgagtcttcgggga

SEQ ID NO: 1449415 - DNA, 15 bp, Homo sapiens
tgagtcttcggggat

SEQ ID NO: 1449416 - DNA, 15 bp, Homo sapiens
gagtcttcggggata

SEQ ID NO: 1449417 - DNA, 15 bp, Homo sapiens
agtcttcggggatac

SEQ ID NO: 1449418 - DNA, 15 bp, Homo sapiens
gtcttcggggataca

SEQ ID NO: 1449419 - DNA, 15 bp, Homo sapiens
tcttcggggatacat

SEQ ID NO: 1449420 - DNA, 15 bp, Homo sapiens
cttcggggatacatc

SEQ ID NO: 1449421 - DNA, 15 bp, Homo sapiens
ttcggggatacatca

SEQ ID NO: 1449422 - DNA, 15 bp, Homo sapiens
tcggggatacatcag

SEQ ID NO: 1449423 - DNA, 15 bp, Homo sapiens
cggggatacatcaga

SEQ ID NO: 1449424 - DNA, 15 bp, Homo sapiens
ggggatacatcagag

SEQ ID NO: 1449425 - DNA, 15 bp, Homo sapiens
gggatacatcagagt

SEQ ID NO: 1449426 - DNA, 15 bp, Homo sapiens
ggatacatcagagta

SEQ ID NO: 1449427 - DNA, 15 bp, Homo sapiens
gatacatcagagtag

SEQ ID NO: 1449428 - DNA, 15 bp, Homo sapiens
atacatcagagtagt

SEQ ID NO: 1449429 - DNA, 15 bp, Homo sapiens
tacatcagagtagtc

SEQ ID NO: 1449430 - DNA, 15 bp, Homo sapiens
acatcagagtagtcc

SEQ ID NO: 1449431 - DNA, 15 bp, Homo sapiens
catcagagtagtccc

SEQ ID NO: 1449432 - DNA, 15 bp, Homo sapiens
atcagagtagtcccc

SEQ ID NO: 1449433 - DNA, 15 bp, Homo sapiens
tcagagtagtccccc

SEQ ID NO: 1449434 - DNA, 15 bp, Homo sapiens
cagagtagtccccct

SEQ ID NO: 1449435 - DNA, 15 bp, Homo sapiens
agagtagtccccctt

SEQ ID NO: 1449436 - DNA, 15 bp, Homo sapiens
gagtagtcccccttg

SEQ ID NO: 1449437 - DNA, 15 bp, Homo sapiens
agtagtcccccttgt

SEQ ID NO: 1449438 - DNA, 15 bp, Homo sapiens
gtagtcccccttgtc

SEQ ID NO: 1449439 - DNA, 15 bp, Homo sapiens
tagtcccccttgtct

SEQ ID NO: 1449440 - DNA, 15 bp, Homo sapiens
agtcccccttgtcta

SEQ ID NO: 1449441 - DNA, 15 bp, Homo sapiens
gtcccccttgtctaa

SEQ ID NO: 1449442 - DNA, 15 bp, Homo sapiens
tcccccttgtctaat

SEQ ID NO: 1449443 - DNA, 15 bp, Homo sapiens
cccccttgtctaata

SEQ ID NO: 1449444 - DNA, 15 bp, Homo sapiens
ccccttgtctaataa

SEQ ID NO: 1449445 - DNA, 15 bp, Homo sapiens
cccttgtctaataaa

SEQ ID NO: 1449446 - DNA, 15 bp, Homo sapiens
ccttgtctaataaat

SEQ ID NO: 1449447 - DNA, 15 bp, Homo sapiens
cttgtctaataaatg

SEQ ID NO: 1449448 - DNA, 15 bp, Homo sapiens
ttgtctaataaatgt

SEQ ID NO: 1449449 - DNA, 15 bp, Homo sapiens
tgtctaataaatgtg

SEQ ID NO: 1449450 - DNA, 15 bp, Homo sapiens
gtctaataaatgtgt

SEQ ID NO: 1449451 - DNA, 15 bp, Homo sapiens
tctaataaatgtgtt

SEQ ID NO: 1449452 - DNA, 15 bp, Homo sapiens
ctaataaatgtgttt

SEQ ID NO: 1449453 - DNA, 15 bp, Homo sapiens
taataaatgtgttta

SEQ ID NO: 1449454 - DNA, 15 bp, Homo sapiens
aataaatgtgtttac

SEQ ID NO: 1449455 - DNA, 15 bp, Homo sapiens
ataaatgtgtttaca

SEQ ID NO: 1449456 - DNA, 15 bp, Homo sapiens
taaatgtgtttacat

SEQ ID NO: 1449457 - DNA, 15 bp, Homo sapiens
aaatgtgtttacatt

SEQ ID NO: 1449458 - DNA, 15 bp, Homo sapiens
aatgtgtttacattt

SEQ ID NO: 1449459 - DNA, 15 bp, Homo sapiens
atgtgtttacatttc

SEQ ID NO: 1449460 - DNA, 15 bp, Homo sapiens
tgtgtttacatttcc

SEQ ID NO: 1449461 - DNA, 15 bp, Homo sapiens
gtgtttacatttcct

SEQ ID NO: 1449462 - DNA, 15 bp, Homo sapiens
tgtttacatttcctg

SEQ ID NO: 1449463 - DNA, 15 bp, Homo sapiens
gtttacatttcctgc

SEQ ID NO: 1449464 - DNA, 15 bp, Homo sapiens
tttacatttcctgcc

SEQ ID NO: 1449465 - DNA, 15 bp, Homo sapiens
ttacatttcctgcca

SEQ ID NO: 1449466 - DNA, 15 bp, Homo sapiens
tacatttcctgccat

SEQ ID NO: 1449467 - DNA, 15 bp, Homo sapiens
acatttcctgccata

SEQ ID NO: 1449468 - DNA, 15 bp, Homo sapiens
catttcctgccatac

SEQ ID NO: 1449469 - DNA, 15 bp, Homo sapiens
atttcctgccatacc

SEQ ID NO: 1449470 - DNA, 15 bp, Homo sapiens
tttcctgccatacca

SEQ ID NO: 1449471 - DNA, 15 bp, Homo sapiens
ttcctgccataccag

SEQ ID NO: 1449472 - DNA, 15 bp, Homo sapiens
tcctgccataccaga

SEQ ID NO: 1449473 - DNA, 15 bp, Homo sapiens
cctgccataccagaa

SEQ ID NO: 1449474 - DNA, 15 bp, Homo sapiens
ctgccataccagaaa

SEQ ID NO: 1449475 - DNA, 15 bp, Homo sapiens
tgccataccagaaac

SEQ ID NO: 1449476 - DNA, 15 bp, Homo sapiens
gccataccagaaacc

SEQ ID NO: 1449477 - DNA, 15 bp, Homo sapiens
ccataccagaaaccc

SEQ ID NO: 1449478 - DNA, 15 bp, Homo sapiens
cataccagaaaccct

SEQ ID NO: 1449479 - DNA, 15 bp, Homo sapiens
ataccagaaaccctt

SEQ ID NO: 1449480 - DNA, 15 bp, Homo sapiens
taccagaaacccttc

SEQ ID NO: 1449481 - DNA, 15 bp, Homo sapiens
accagaaacccttct

SEQ ID NO: 1449482 - DNA, 15 bp, Homo sapiens
ccagaaacccttctc

SEQ ID NO: 1449483 - DNA, 15 bp, Homo sapiens
cagaaacccttctca

SEQ ID NO: 1449484 - DNA, 15 bp, Homo sapiens
agaaacccttctcaa

SEQ ID NO: 1449485 - DNA, 15 bp, Homo sapiens
gaaacccttctcaaa

SEQ ID NO: 1449486 - DNA, 15 bp, Homo sapiens
aaacccttctcaaac

SEQ ID NO: 1449487 - DNA, 15 bp, Homo sapiens
aacccttctcaaact

SEQ ID NO: 1449488 - DNA, 15 bp, Homo sapiens
acccttctcaaactt

SEQ ID NO: 1449489 - DNA, 15 bp, Homo sapiens
cccttctcaaacttt

SEQ ID NO: 1449490 - DNA, 15 bp, Homo sapiens
ccttctcaaacttta

SEQ ID NO: 1449491 - DNA, 15 bp, Homo sapiens
cttctcaaactttaa

SEQ ID NO: 1449492 - DNA, 15 bp, Homo sapiens
ttctcaaactttaat

SEQ ID NO: 1449493 - DNA, 15 bp, Homo sapiens
tctcaaactttaatg

SEQ ID NO: 1449494 - DNA, 15 bp, Homo sapiens
ctcaaactttaatga

SEQ ID NO: 1449495 - DNA, 15 bp, Homo sapiens
tcaaactttaatgaa

SEQ ID NO: 1449496 - DNA, 15 bp, Homo sapiens
caaactttaatgaat

SEQ ID NO: 1449497 - DNA, 15 bp, Homo sapiens
aaactttaatgaatt

SEQ ID NO: 1449498 - DNA, 15 bp, Homo sapiens
aactttaatgaattt

SEQ ID NO: 1449499 - DNA, 15 bp, Homo sapiens
actttaatgaatttc

SEQ ID NO: 1449500 - DNA, 15 bp, Homo sapiens
ctttaatgaatttct

SEQ ID NO: 1449501 - DNA, 15 bp, Homo sapiens
tttaatgaatttcta

SEQ ID NO: 1449502 - DNA, 15 bp, Homo sapiens
ttaatgaatttctac

SEQ ID NO: 1449503 - DNA, 15 bp, Homo sapiens
taatgaatttctaca

SEQ ID NO: 1449504 - DNA, 15 bp, Homo sapiens
aatgaatttctacaa

SEQ ID NO: 1449505 - DNA, 15 bp, Homo sapiens
atgaatttctacaag

SEQ ID NO: 1449506 - DNA, 15 bp, Homo sapiens
tgaatttctacaagg

SEQ ID NO: 1449507 - DNA, 15 bp, Homo sapiens
gaatttctacaaggt

SEQ ID NO: 1449508 - DNA, 15 bp, Homo sapiens
aatttctacaaggtg

SEQ ID NO: 1449509 - DNA, 15 bp, Homo sapiens
atttctacaaggtga

SEQ ID NO: 1449510 - DNA, 15 bp, Homo sapiens
tttctacaaggtgag

SEQ ID NO: 1449511 - DNA, 15 bp, Homo sapiens
ttctacaaggtgaga

SEQ ID NO: 1449512 - DNA, 15 bp, Homo sapiens
tctacaaggtgagat

SEQ ID NO: 1449513 - DNA, 15 bp, Homo sapiens
ctacaaggtgagatt

SEQ ID NO: 1449514 - DNA, 15 bp, Homo sapiens
tacaaggtgagatta

SEQ ID NO: 1449515 - DNA, 15 bp, Homo sapiens
acaaggtgagattac

SEQ ID NO: 1449516 - DNA, 15 bp, Homo sapiens
caaggtgagattact

SEQ ID NO: 1449517 - DNA, 15 bp, Homo sapiens
aaggtgagattactt

SEQ ID NO: 1449518 - DNA, 15 bp, Homo sapiens
aggtgagattacttt

SEQ ID NO: 1449519 - DNA, 15 bp, Homo sapiens
ggtgagattacttta

SEQ ID NO: 1449520 - DNA, 15 bp, Homo sapiens
gtgagattactttaa

SEQ ID NO: 1449521 - DNA, 15 bp, Homo sapiens
tgagattactttaat

SEQ ID NO: 1449522 - DNA, 15 bp, Homo sapiens
gagattactttaatg

SEQ ID NO: 1449523 - DNA, 15 bp, Homo sapiens
agattactttaatga

SEQ ID NO: 1449524 - DNA, 15 bp, Homo sapiens
gattactttaatgag

SEQ ID NO: 1449525 - DNA, 15 bp, Homo sapiens
attactttaatgaga

SEQ ID NO: 1449526 - DNA, 15 bp, Homo sapiens
ttactttaatgagaa

SEQ ID NO: 1449527 - DNA, 15 bp, Homo sapiens
tactttaatgagaaa

SEQ ID NO: 1449528 - DNA, 15 bp, Homo sapiens
actttaatgagaaac

SEQ ID NO: 1449529 - DNA, 15 bp, Homo sapiens
ctttaatgagaaacc

SEQ ID NO: 1449530 - DNA, 15 bp, Homo sapiens
tttaatgagaaacca

SEQ ID NO: 1449531 - DNA, 15 bp, Homo sapiens
ttaatgagaaaccaa

SEQ ID NO: 1449532 - DNA, 15 bp, Homo sapiens
taatgagaaaccaac

SEQ ID NO: 1449533 - DNA, 15 bp, Homo sapiens
aatgagaaaccaacc

SEQ ID NO: 1449534 - DNA, 15 bp, Homo sapiens
atgagaaaccaacca

SEQ ID NO: 1449535 - DNA, 15 bp, Homo sapiens
tgagaaaccaaccaa

SEQ ID NO: 1449536 - DNA, 15 bp, Homo sapiens
gagaaaccaaccaag

SEQ ID NO: 1449537 - DNA, 15 bp, Homo sapiens
agaaaccaaccaagg

SEQ ID NO: 1449538 - DNA, 15 bp, Homo sapiens
gaaaccaaccaagga

SEQ ID NO: 1449539 - DNA, 15 bp, Homo sapiens
aaaccaaccaaggaa

SEQ ID NO: 1449540 - DNA, 15 bp, Homo sapiens
aaccaaccaaggaaa

SEQ ID NO: 1449541 - DNA, 15 bp, Homo sapiens
accaaccaaggaaag

SEQ ID NO: 1449542 - DNA, 15 bp, Homo sapiens
ccaaccaaggaaagg

SEQ ID NO: 1449543 - DNA, 15 bp, Homo sapiens
caaccaaggaaagga

SEQ ID NO: 1449544 - DNA, 15 bp, Homo sapiens
aaccaaggaaaggag

SEQ ID NO: 1449545 - DNA, 15 bp, Homo sapiens
accaaggaaaggagt

SEQ ID NO: 1449546 - DNA, 15 bp, Homo sapiens
ccaaggaaaggagta

SEQ ID NO: 1449547 - DNA, 15 bp, Homo sapiens
caaggaaaggagtat

SEQ ID NO: 1449548 - DNA, 15 bp, Homo sapiens
aaggaaaggagtatc

SEQ ID NO: 1449549 - DNA, 15 bp, Homo sapiens
aggaaaggagtatca

SEQ ID NO: 1449550 - DNA, 15 bp, Homo sapiens
ggaaaggagtatcat

SEQ ID NO: 1449551 - DNA, 15 bp, Homo sapiens
gaaaggagtatcatc

SEQ ID NO: 1449552 - DNA, 15 bp, Homo sapiens
aaaggagtatcatct

SEQ ID NO: 1449553 - DNA, 15 bp, Homo sapiens
aaggagtatcatctg

SEQ ID NO: 1449554 - DNA, 15 bp, Homo sapiens
aggagtatcatctgc

SEQ ID NO: 1449555 - DNA, 15 bp, Homo sapiens
ggagtatcatctgca

SEQ ID NO: 1449556 - DNA, 15 bp, Homo sapiens
gagtatcatctgcaa

SEQ ID NO: 1449557 - DNA, 15 bp, Homo sapiens
agtatcatctgcaat

SEQ ID NO: 1449558 - DNA, 15 bp, Homo sapiens
gtatcatctgcaata

SEQ ID NO: 1449559 - DNA, 15 bp, Homo sapiens
tatcatctgcaatat

SEQ ID NO: 1449560 - DNA, 15 bp, Homo sapiens
atcatctgcaatata

SEQ ID NO: 1449561 - DNA, 15 bp, Homo sapiens
tcatctgcaatatac

SEQ ID NO: 1449562 - DNA, 15 bp, Homo sapiens
catctgcaatatact

SEQ ID NO: 1449563 - DNA, 15 bp, Homo sapiens
atctgcaatatactt

SEQ ID NO: 1449564 - DNA, 15 bp, Homo sapiens
tctgcaatatacttt

SEQ ID NO: 1449565 - DNA, 15 bp, Homo sapiens
ctgcaatatactttc

SEQ ID NO: 1449566 - DNA, 15 bp, Homo sapiens
tgcaatatactttca

SEQ ID NO: 1449567 - DNA, 15 bp, Homo sapiens
gcaatatactttcaa

SEQ ID NO: 1449568 - DNA, 15 bp, Homo sapiens
caatatactttcaaa

SEQ ID NO: 1449569 - DNA, 15 bp, Homo sapiens
aatatactttcaaat

SEQ ID NO: 1449570 - DNA, 15 bp, Homo sapiens
atatactttcaaatg

SEQ ID NO: 1449571 - DNA, 15 bp, Homo sapiens
tatactttcaaatgt

SEQ ID NO: 1449572 - DNA, 15 bp, Homo sapiens
atactttcaaatgtt

SEQ ID NO: 1449573 - DNA, 15 bp, Homo sapiens
tactttcaaatgttt

SEQ ID NO: 1449574 - DNA, 15 bp, Homo sapiens
actttcaaatgtttt

SEQ ID NO: 1449575 - DNA, 15 bp, Homo sapiens
ctttcaaatgttttt

SEQ ID NO: 1449576 - DNA, 15 bp, Homo sapiens
tttcaaatgtttttt

SEQ ID NO: 1449577 - DNA, 15 bp, Homo sapiens
ttcaaatgttttttg

SEQ ID NO: 1449578 - DNA, 15 bp, Homo sapiens
tcaaatgttttttgc

SEQ ID NO: 1449579 - DNA, 15 bp, Homo sapiens
caaatgttttttgct

SEQ ID NO: 1449580 - DNA, 15 bp, Homo sapiens
aaatgttttttgctt

SEQ ID NO: 1449581 - DNA, 15 bp, Homo sapiens
aatgttttttgcttg

SEQ ID NO: 1449582 - DNA, 15 bp, Homo sapiens
atgttttttgcttgt

SEQ ID NO: 1449583 - DNA, 15 bp, Homo sapiens
tgttttttgcttgtt

SEQ ID NO: 1449584 - DNA, 15 bp, Homo sapiens
gttttttgcttgttt

SEQ ID NO: 1449585 - DNA, 15 bp, Homo sapiens
ttttttgcttgtttg

SEQ ID NO: 1449586 - DNA, 15 bp, Homo sapiens
tttttgcttgtttgt

SEQ ID NO: 1449587 - DNA, 15 bp, Homo sapiens
ttttgcttgtttgtt

SEQ ID NO: 1449588 - DNA, 15 bp, Homo sapiens
tttgcttgtttgttt

SEQ ID NO: 1449589 - DNA, 15 bp, Homo sapiens
ttgcttgtttgtttc

SEQ ID NO: 1449590 - DNA, 15 bp, Homo sapiens
tgcttgtttgtttct

SEQ ID NO: 1449591 - DNA, 15 bp, Homo sapiens
gcttgtttgtttctt

SEQ ID NO: 1449592 - DNA, 15 bp, Homo sapiens
cttgtttgtttcttg

SEQ ID NO: 1449593 - DNA, 15 bp, Homo sapiens
ttgtttgtttcttgt

SEQ ID NO: 1449594 - DNA, 15 bp, Homo sapiens
tgtttgtttcttgtc

SEQ ID NO: 1449595 - DNA, 15 bp, Homo sapiens
gtttgtttcttgtcc

SEQ ID NO: 1449596 - DNA, 15 bp, Homo sapiens
tttgtttcttgtcca

SEQ ID NO: 1449597 - DNA, 15 bp, Homo sapiens
ttgtttcttgtccag

SEQ ID NO: 1449598 - DNA, 15 bp, Homo sapiens
tgtttcttgtccagc

SEQ ID NO: 1449599 - DNA, 15 bp, Homo sapiens
gtttcttgtccagct

SEQ ID NO: 1449600 - DNA, 15 bp, Homo sapiens
tttcttgtccagcta

SEQ ID NO: 1449601 - DNA, 15 bp, Homo sapiens
ttcttgtccagctaa

SEQ ID NO: 1449602 - DNA, 15 bp, Homo sapiens
tcttgtccagctaaa

SEQ ID NO: 1449603 - DNA, 15 bp, Homo sapiens
cttgtccagctaaaa

SEQ ID NO: 1449604 - DNA, 15 bp, Homo sapiens
ttgtccagctaaaaa

SEQ ID NO: 1449605 - DNA, 15 bp, Homo sapiens
tgtccagctaaaaaa

SEQ ID NO: 1449606 - DNA, 15 bp, Homo sapiens
gtccagctaaaaaaa

SEQ ID NO: 1449607 - DNA, 15 bp, Homo sapiens
tccagctaaaaaaaa

SEQ ID NO: 1449608 - DNA, 15 bp, Homo sapiens
ccagctaaaaaaaaa

SEQ ID NO: 1449609 - DNA, 15 bp, Homo sapiens
cagctaaaaaaaaaa

SEQ ID NO: 1449610 - DNA, 15 bp, Homo sapiens
agctaaaaaaaaaaa

SEQ ID NO: 1449611 - DNA, 15 bp, Homo sapiens
gctaaaaaaaaaaaa

SEQ ID NO: 1449612 - DNA, 15 bp, Homo sapiens
aaaaaaaaaaacaag

SEQ ID NO: 1449613 - DNA, 15 bp, Homo sapiens
aaaaaaaaaacaagc

SEQ ID NO: 1449614 - DNA, 15 bp, Homo sapiens
aaaaaaaaacaagcc

SEQ ID NO: 1449615 - DNA, 15 bp, Homo sapiens
aaaaaaaacaagcca

SEQ ID NO: 1449616 - DNA, 15 bp, Homo sapiens
aaaaaaacaagccat

SEQ ID NO: 1449617 - DNA, 15 bp, Homo sapiens
aaaaaacaagccatt

SEQ ID NO: 1449618 - DNA, 15 bp, Homo sapiens
aaaaacaagccattg

SEQ ID NO: 1449619 - DNA, 15 bp, Homo sapiens
aaaacaagccattgg

SEQ ID NO: 1449620 - DNA, 15 bp, Homo sapiens
aaacaagccattggt

SEQ ID NO: 1449621 - DNA, 15 bp, Homo sapiens
aacaagccattggtc

SEQ ID NO: 1449622 - DNA, 15 bp, Homo sapiens
acaagccattggtcc

SEQ ID NO: 1449623 - DNA, 15 bp, Homo sapiens
caagccattggtcct

SEQ ID NO: 1449624 - DNA, 15 bp, Homo sapiens
aagccattggtccta

SEQ ID NO: 1449625 - DNA, 15 bp, Homo sapiens
agccattggtcctaa

SEQ ID NO: 1449626 - DNA, 15 bp, Homo sapiens
gccattggtcctaac

SEQ ID NO: 1449627 - DNA, 15 bp, Homo sapiens
tacctcgctaaggaa

SEQ ID NO: 1449628 - DNA, 15 bp, Homo sapiens
acctcgctaaggaaa

SEQ ID NO: 1449629 - DNA, 15 bp, Homo sapiens
cctcgctaaggaaaa

SEQ ID NO: 1449630 - DNA, 15 bp, Homo sapiens
ctcgctaaggaaaaa

SEQ ID NO: 1449631 - DNA, 15 bp, Homo sapiens
tcgctaaggaaaaat

SEQ ID NO: 1449632 - DNA, 15 bp, Homo sapiens
cgctaaggaaaaatt

SEQ ID NO: 1449633 - DNA, 15 bp, Homo sapiens
gctaaggaaaaatta

SEQ ID NO: 1449634 - DNA, 15 bp, Homo sapiens
ctaaggaaaaattaa

SEQ ID NO: 1449635 - DNA, 15 bp, Homo sapiens
taaggaaaaattaac

SEQ ID NO: 1449636 - DNA, 15 bp, Homo sapiens
aaggaaaaattaact

SEQ ID NO: 1449637 - DNA, 15 bp, Homo sapiens
aggaaaaattaacta

SEQ ID NO: 1449638 - DNA, 15 bp, Homo sapiens
ggaaaaattaactaa

SEQ ID NO: 1449639 - DNA, 15 bp, Homo sapiens
gaaaaattaactaat

SEQ ID NO: 1449640 - DNA, 15 bp, Homo sapiens
aaaaattaactaatt

SEQ ID NO: 1449641 - DNA, 15 bp, Homo sapiens
aaaattaactaattt

SEQ ID NO: 1449642 - DNA, 15 bp, Homo sapiens
aaattaactaatttt

SEQ ID NO: 1449643 - DNA, 15 bp, Homo sapiens
aattaactaattttt

SEQ ID NO: 1449644 - DNA, 15 bp, Homo sapiens
actaattttttaaaa

SEQ ID NO: 1449645 - DNA, 15 bp, Homo sapiens
ctaattttttaaaaa

SEQ ID NO: 1449646 - DNA, 15 bp, Homo sapiens
ttttttaaaaattta

SEQ ID NO: 1449647 - DNA, 15 bp, Homo sapiens
tttttaaaaatttaa

SEQ ID NO: 1449648 - DNA, 15 bp, Homo sapiens
ttttaaaaatttaat

SEQ ID NO: 1449649 - DNA, 15 bp, Homo sapiens
tttaaaaatttaata

SEQ ID NO: 1449650 - DNA, 15 bp, Homo sapiens
ttaaaaatttaatag

SEQ ID NO: 1449651 - DNA, 15 bp, Homo sapiens
taaaaatttaatagc

SEQ ID NO: 1449652 - DNA, 15 bp, Homo sapiens
aaaaatttaatagcc

SEQ ID NO: 1449653 - DNA, 15 bp, Homo sapiens
aaaatttaatagcct

SEQ ID NO: 1449654 - DNA, 15 bp, Homo sapiens
aaatttaatagcctg

SEQ ID NO: 1449655 - DNA, 15 bp, Homo sapiens
aatttaatagcctgg

SEQ ID NO: 1449656 - DNA, 15 bp, Homo sapiens
atttaatagcctggc

SEQ ID NO: 1449657 - DNA, 15 bp, Homo sapiens
tttaatagcctggca

SEQ ID NO: 1449658 - DNA, 15 bp, Homo sapiens
ttaatagcctggcaa

SEQ ID NO: 1449659 - DNA, 15 bp, Homo sapiens
taatagcctggcaaa

SEQ ID NO: 1449660 - DNA, 15 bp, Homo sapiens
aatagcctggcaaaa

SEQ ID NO: 1449661 - DNA, 15 bp, Homo sapiens
atagcctggcaaaat

SEQ ID NO: 1449662 - DNA, 15 bp, Homo sapiens
tagcctggcaaaatc

SEQ ID NO: 1449663 - DNA, 15 bp, Homo sapiens
agcctggcaaaatca

SEQ ID NO: 1449664 - DNA, 15 bp, Homo sapiens
gcctggcaaaatcaa

SEQ ID NO: 1449665 - DNA, 15 bp, Homo sapiens
cctggcaaaatcaag

SEQ ID NO: 1449666 - DNA, 15 bp, Homo sapiens
ctggcaaaatcaagt

SEQ ID NO: 1449667 - DNA, 15 bp, Homo sapiens
tggcaaaatcaagtg

SEQ ID NO: 1449668 - DNA, 15 bp, Homo sapiens
ggcaaaatcaagtgc

SEQ ID NO: 1449669 - DNA, 15 bp, Homo sapiens
gcaaaatcaagtgcc

SEQ ID NO: 1449670 - DNA, 15 bp, Homo sapiens
caaaatcaagtgcca

SEQ ID NO: 1449671 - DNA, 15 bp, Homo sapiens
aaaatcaagtgccac

SEQ ID NO: 1449672 - DNA, 15 bp, Homo sapiens
aaatcaagtgccacc

SEQ ID NO: 1449673 - DNA, 15 bp, Homo sapiens
aatcaagtgccacca

SEQ ID NO: 1449674 - DNA, 15 bp, Homo sapiens
atcaagtgccaccat

SEQ ID NO: 1449675 - DNA, 15 bp, Homo sapiens
tcaagtgccaccatg

SEQ ID NO: 1449676 - DNA, 15 bp, Homo sapiens
caagtgccaccatgt

SEQ ID NO: 1449677 - DNA, 15 bp, Homo sapiens
aagtgccaccatgta

SEQ ID NO: 1449678 - DNA, 15 bp, Homo sapiens
agtgccaccatgtag

SEQ ID NO: 1449679 - DNA, 15 bp, Homo sapiens
gtgccaccatgtaga

SEQ ID NO: 1449680 - DNA, 15 bp, Homo sapiens
tgccaccatgtagaa

SEQ ID NO: 1449681 - DNA, 15 bp, Homo sapiens
gccaccatgtagaac

SEQ ID NO: 1449682 - DNA, 15 bp, Homo sapiens
ccaccatgtagaaca

SEQ ID NO: 1449683 - DNA, 15 bp, Homo sapiens
caccatgtagaacaa

SEQ ID NO: 1449684 - DNA, 15 bp, Homo sapiens
accatgtagaacaac

SEQ ID NO: 1449685 - DNA, 15 bp, Homo sapiens
ccatgtagaacaaca

SEQ ID NO: 1449686 - DNA, 15 bp, Homo sapiens
catgtagaacaacag

SEQ ID NO: 1449687 - DNA, 15 bp, Homo sapiens
atgtagaacaacagg

SEQ ID NO: 1449688 - DNA, 15 bp, Homo sapiens
tgtagaacaacaggt

SEQ ID NO: 1449689 - DNA, 15 bp, Homo sapiens
gtagaacaacaggtt

SEQ ID NO: 1449690 - DNA, 15 bp, Homo sapiens
tagaacaacaggttc

SEQ ID NO: 1449691 - DNA, 15 bp, Homo sapiens
agaacaacaggttca

SEQ ID NO: 1449692 - DNA, 15 bp, Homo sapiens
gaacaacaggttcat

SEQ ID NO: 1449693 - DNA, 15 bp, Homo sapiens
aacaacaggttcatt

SEQ ID NO: 1449694 - DNA, 15 bp, Homo sapiens
acaacaggttcattt

SEQ ID NO: 1449695 - DNA, 15 bp, Homo sapiens
caacaggttcatttg

SEQ ID NO: 1449696 - DNA, 15 bp, Homo sapiens
aacaggttcatttgg

SEQ ID NO: 1449697 - DNA, 15 bp, Homo sapiens
acaggttcatttggt

SEQ ID NO: 1449698 - DNA, 15 bp, Homo sapiens
caggttcatttggtc

SEQ ID NO: 1449699 - DNA, 15 bp, Homo sapiens
aggttcatttggtcc

SEQ ID NO: 1449700 - DNA, 15 bp, Homo sapiens
ggttcatttggtcct

SEQ ID NO: 1449701 - DNA, 15 bp, Homo sapiens
gttcatttggtcctt

SEQ ID NO: 1449702 - DNA, 15 bp, Homo sapiens
ttcatttggtccttg

SEQ ID NO: 1449703 - DNA, 15 bp, Homo sapiens
tcatttggtccttgc

SEQ ID NO: 1449704 - DNA, 15 bp, Homo sapiens
catttggtccttgct

SEQ ID NO: 1449705 - DNA, 15 bp, Homo sapiens
atttggtccttgctg

SEQ ID NO: 1449706 - DNA, 15 bp, Homo sapiens
tttggtccttgctgg

SEQ ID NO: 1449707 - DNA, 15 bp, Homo sapiens
ttggtccttgctggg

SEQ ID NO: 1449708 - DNA, 15 bp, Homo sapiens
tggtccttgctggga

SEQ ID NO: 1449709 - DNA, 15 bp, Homo sapiens
ggtccttgctgggac

SEQ ID NO: 1449710 - DNA, 15 bp, Homo sapiens
gtccttgctgggact

SEQ ID NO: 1449711 - DNA, 15 bp, Homo sapiens
tccttgctgggactg

SEQ ID NO: 1449712 - DNA, 15 bp, Homo sapiens
ccttgctgggactgt

SEQ ID NO: 1449713 - DNA, 15 bp, Homo sapiens
cttgctgggactgta

SEQ ID NO: 1449714 - DNA, 15 bp, Homo sapiens
ttgctgggactgtaa

SEQ ID NO: 1449715 - DNA, 15 bp, Homo sapiens
tgctgggactgtaaa

SEQ ID NO: 1449716 - DNA, 15 bp, Homo sapiens
gctgggactgtaaac

SEQ ID NO: 1449717 - DNA, 15 bp, Homo sapiens
ctgggactgtaaact

SEQ ID NO: 1449718 - DNA, 15 bp, Homo sapiens
tgggactgtaaactg

SEQ ID NO: 1449719 - DNA, 15 bp, Homo sapiens
gggactgtaaactgt

SEQ ID NO: 1449720 - DNA, 15 bp, Homo sapiens
ggactgtaaactgtt

SEQ ID NO: 1449721 - DNA, 15 bp, Homo sapiens
gactgtaaactgtta

SEQ ID NO: 1449722 - DNA, 15 bp, Homo sapiens
actgtaaactgttaa

SEQ ID NO: 1449723 - DNA, 15 bp, Homo sapiens
ctgtaaactgttaaa

SEQ ID NO: 1449724 - DNA, 15 bp, Homo sapiens
tgtaaactgttaaaa

SEQ ID NO: 1449725 - DNA, 15 bp, Homo sapiens
gtaaactgttaaaaa

SEQ ID NO: 1449726 - DNA, 15 bp, Homo sapiens
taaactgttaaaaac

SEQ ID NO: 1449727 - DNA, 15 bp, Homo sapiens
aaactgttaaaaaca

SEQ ID NO: 1449728 - DNA, 15 bp, Homo sapiens
aactgttaaaaacag

SEQ ID NO: 1449729 - DNA, 15 bp, Homo sapiens
actgttaaaaacagt

SEQ ID NO: 1449730 - DNA, 15 bp, Homo sapiens
ctgttaaaaacagtt

SEQ ID NO: 1449731 - DNA, 15 bp, Homo sapiens
tgttaaaaacagttt

SEQ ID NO: 1449732 - DNA, 15 bp, Homo sapiens
gttaaaaacagtttt

SEQ ID NO: 1449733 - DNA, 15 bp, Homo sapiens
ttaaaaacagttttg

SEQ ID NO: 1449734 - DNA, 15 bp, Homo sapiens
taaaaacagttttgg

SEQ ID NO: 1449735 - DNA, 15 bp, Homo sapiens
aaaaacagttttgga

SEQ ID NO: 1449736 - DNA, 15 bp, Homo sapiens
aaaacagttttggaa

SEQ ID NO: 1449737 - DNA, 15 bp, Homo sapiens
aaacagttttggaag

SEQ ID NO: 1449738 - DNA, 15 bp, Homo sapiens
aacagttttggaagg

SEQ ID NO: 1449739 - DNA, 15 bp, Homo sapiens
acagttttggaaggt

SEQ ID NO: 1449740 - DNA, 15 bp, Homo sapiens
cagttttggaaggtg

SEQ ID NO: 1449741 - DNA, 15 bp, Homo sapiens
agttttggaaggtgg

SEQ ID NO: 1449742 - DNA, 15 bp, Homo sapiens
gttttggaaggtggt

SEQ ID NO: 1449743 - DNA, 15 bp, Homo sapiens
ttttggaaggtggtt

SEQ ID NO: 1449744 - DNA, 15 bp, Homo sapiens
tttggaaggtggttt

SEQ ID NO: 1449745 - DNA, 15 bp, Homo sapiens
ttggaaggtggtttg

SEQ ID NO: 1449746 - DNA, 15 bp, Homo sapiens
tggaaggtggtttga

SEQ ID NO: 1449747 - DNA, 15 bp, Homo sapiens
ggaaggtggtttgac

SEQ ID NO: 1449748 - DNA, 15 bp, Homo sapiens
gaaggtggtttgaca

SEQ ID NO: 1449749 - DNA, 15 bp, Homo sapiens
aaggtggtttgacat

SEQ ID NO: 1449750 - DNA, 15 bp, Homo sapiens
aggtggtttgacatt

SEQ ID NO: 1449751 - DNA, 15 bp, Homo sapiens
ggtggtttgacatta

SEQ ID NO: 1449752 - DNA, 15 bp, Homo sapiens
gtggtttgacattat

SEQ ID NO: 1449753 - DNA, 15 bp, Homo sapiens
tggtttgacattatt

SEQ ID NO: 1449754 - DNA, 15 bp, Homo sapiens
ggtttgacattattt

SEQ ID NO: 1449755 - DNA, 15 bp, Homo sapiens
gtttgacattattta

SEQ ID NO: 1449756 - DNA, 15 bp, Homo sapiens
tttgacattatttag

SEQ ID NO: 1449757 - DNA, 15 bp, Homo sapiens
ttgacattatttagt

SEQ ID NO: 1449758 - DNA, 15 bp, Homo sapiens
tgacattatttagtg

SEQ ID NO: 1449759 - DNA, 15 bp, Homo sapiens
gacattatttagtga

SEQ ID NO: 1449760 - DNA, 15 bp, Homo sapiens
acattatttagtgaa

SEQ ID NO: 1449761 - DNA, 15 bp, Homo sapiens
cattatttagtgaag

SEQ ID NO: 1449762 - DNA, 15 bp, Homo sapiens
attatttagtgaagc

SEQ ID NO: 1449763 - DNA, 15 bp, Homo sapiens
ttatttagtgaagct

SEQ ID NO: 1449764 - DNA, 15 bp, Homo sapiens
tatttagtgaagctg

SEQ ID NO: 1449765 - DNA, 15 bp, Homo sapiens
atttagtgaagctga

SEQ ID NO: 1449766 - DNA, 15 bp, Homo sapiens
tttagtgaagctgaa

SEQ ID NO: 1449767 - DNA, 15 bp, Homo sapiens
ttagtgaagctgaag

SEQ ID NO: 1449768 - DNA, 15 bp, Homo sapiens
tagtgaagctgaaga

SEQ ID NO: 1449769 - DNA, 15 bp, Homo sapiens
agtgaagctgaagat

SEQ ID NO: 1449770 - DNA, 15 bp, Homo sapiens
gtgaagctgaagata

SEQ ID NO: 1449771 - DNA, 15 bp, Homo sapiens
tgaagctgaagatac

SEQ ID NO: 1449772 - DNA, 15 bp, Homo sapiens
gaagctgaagatacc

SEQ ID NO: 1449773 - DNA, 15 bp, Homo sapiens
aagctgaagatacct

SEQ ID NO: 1449774 - DNA, 15 bp, Homo sapiens
agctgaagataccta

SEQ ID NO: 1449775 - DNA, 15 bp, Homo sapiens
gctgaagatacctat

SEQ ID NO: 1449776 - DNA, 15 bp, Homo sapiens
ctgaagatacctata

SEQ ID NO: 1449777 - DNA, 15 bp, Homo sapiens
tgaagatacctatac

SEQ ID NO: 1449778 - DNA, 15 bp, Homo sapiens
gaagatacctatacc

SEQ ID NO: 1449779 - DNA, 15 bp, Homo sapiens
aagatacctataccc

SEQ ID NO: 1449780 - DNA, 15 bp, Homo sapiens
agatacctataccca

SEQ ID NO: 1449781 - DNA, 15 bp, Homo sapiens
gatacctatacccat

SEQ ID NO: 1449782 - DNA, 15 bp, Homo sapiens
atacctatacccatt

SEQ ID NO: 1449783 - DNA, 15 bp, Homo sapiens
tacctatacccatta

SEQ ID NO: 1449784 - DNA, 15 bp, Homo sapiens
acctatacccattac

SEQ ID NO: 1449785 - DNA, 15 bp, Homo sapiens
cctatacccattacc

SEQ ID NO: 1449786 - DNA, 15 bp, Homo sapiens
ctatacccattacct

SEQ ID NO: 1449787 - DNA, 15 bp, Homo sapiens
tatacccattaccta

SEQ ID NO: 1449788 - DNA, 15 bp, Homo sapiens
atacccattacctag

SEQ ID NO: 1449789 - DNA, 15 bp, Homo sapiens
tacccattacctagc

SEQ ID NO: 1449790 - DNA, 15 bp, Homo sapiens
acccattacctagca

SEQ ID NO: 1449791 - DNA, 15 bp, Homo sapiens
cccattacctagcaa

SEQ ID NO: 1449792 - DNA, 15 bp, Homo sapiens
ccattacctagcaat

SEQ ID NO: 1449793 - DNA, 15 bp, Homo sapiens
cattacctagcaatt

SEQ ID NO: 1449794 - DNA, 15 bp, Homo sapiens
attacctagcaattt

SEQ ID NO: 1449795 - DNA, 15 bp, Homo sapiens
ttacctagcaatttc

SEQ ID NO: 1449796 - DNA, 15 bp, Homo sapiens
tacctagcaatttct

SEQ ID NO: 1449797 - DNA, 15 bp, Homo sapiens
acctagcaatttcta

SEQ ID NO: 1449798 - DNA, 15 bp, Homo sapiens
cctagcaatttctag

SEQ ID NO: 1449799 - DNA, 15 bp, Homo sapiens
ctagcaatttctagg

SEQ ID NO: 1449800 - DNA, 15 bp, Homo sapiens
tagcaatttctaggt

SEQ ID NO: 1449801 - DNA, 15 bp, Homo sapiens
agcaatttctaggta

SEQ ID NO: 1449802 - DNA, 15 bp, Homo sapiens
gcaatttctaggtac

SEQ ID NO: 1449803 - DNA, 15 bp, Homo sapiens
caatttctaggtaca

SEQ ID NO: 1449804 - DNA, 15 bp, Homo sapiens
aatttctaggtacag

SEQ ID NO: 1449805 - DNA, 15 bp, Homo sapiens
atttctaggtacaga

SEQ ID NO: 1449806 - DNA, 15 bp, Homo sapiens
tttctaggtacagac

SEQ ID NO: 1449807 - DNA, 15 bp, Homo sapiens
ttctaggtacagacc

SEQ ID NO: 1449808 - DNA, 15 bp, Homo sapiens
tctaggtacagaccc

SEQ ID NO: 1449809 - DNA, 15 bp, Homo sapiens
ctaggtacagaccct

SEQ ID NO: 1449810 - DNA, 15 bp, Homo sapiens
taggtacagacccta

SEQ ID NO: 1449811 - DNA, 15 bp, Homo sapiens
aggtacagaccctac

SEQ ID NO: 1449812 - DNA, 15 bp, Homo sapiens
ggtacagaccctaca

SEQ ID NO: 1449813 - DNA, 15 bp, Homo sapiens
gtacagaccctacag

SEQ ID NO: 1449814 - DNA, 15 bp, Homo sapiens
tacagaccctacaga

SEQ ID NO: 1449815 - DNA, 15 bp, Homo sapiens
acagaccctacagaa

SEQ ID NO: 1449816 - DNA, 15 bp, Homo sapiens
cagaccctacagaaa

SEQ ID NO: 1449817 - DNA, 15 bp, Homo sapiens
agaccctacagaaat

SEQ ID NO: 1449818 - DNA, 15 bp, Homo sapiens
gaccctacagaaatg

SEQ ID NO: 1449819 - DNA, 15 bp, Homo sapiens
accctacagaaatgt

SEQ ID NO: 1449820 - DNA, 15 bp, Homo sapiens
ccctacagaaatgta

SEQ ID NO: 1449821 - DNA, 15 bp, Homo sapiens
cctacagaaatgtat

SEQ ID NO: 1449822 - DNA, 15 bp, Homo sapiens
ctacagaaatgtatg

SEQ ID NO: 1449823 - DNA, 15 bp, Homo sapiens
tacagaaatgtatgc

SEQ ID NO: 1449824 - DNA, 15 bp, Homo sapiens
acagaaatgtatgca

SEQ ID NO: 1449825 - DNA, 15 bp, Homo sapiens
cagaaatgtatgcac

SEQ ID NO: 1449826 - DNA, 15 bp, Homo sapiens
agaaatgtatgcaca

SEQ ID NO: 1449827 - DNA, 15 bp, Homo sapiens
gaaatgtatgcacat

SEQ ID NO: 1449828 - DNA, 15 bp, Homo sapiens
aaatgtatgcacata

SEQ ID NO: 1449829 - DNA, 15 bp, Homo sapiens
aatgtatgcacatat

SEQ ID NO: 1449830 - DNA, 15 bp, Homo sapiens
atgtatgcacatata

SEQ ID NO: 1449831 - DNA, 15 bp, Homo sapiens
tgtatgcacatatac

SEQ ID NO: 1449832 - DNA, 15 bp, Homo sapiens
gtatgcacatataca

SEQ ID NO: 1449833 - DNA, 15 bp, Homo sapiens
tatgcacatatacac

SEQ ID NO: 1449834 - DNA, 15 bp, Homo sapiens
atgcacatatacact

SEQ ID NO: 1449835 - DNA, 15 bp, Homo sapiens
tgcacatatacactg

SEQ ID NO: 1449836 - DNA, 15 bp, Homo sapiens
gcacatatacactgg

SEQ ID NO: 1449837 - DNA, 15 bp, Homo sapiens
cacatatacactggg

SEQ ID NO: 1449838 - DNA, 15 bp, Homo sapiens
acatatacactggga

SEQ ID NO: 1449839 - DNA, 15 bp, Homo sapiens
catatacactgggaa

SEQ ID NO: 1449840 - DNA, 15 bp, Homo sapiens
atatacactgggaaa

SEQ ID NO: 1449841 - DNA, 15 bp, Homo sapiens
tatacactgggaaat

SEQ ID NO: 1449842 - DNA, 15 bp, Homo sapiens
atacactgggaaatc

SEQ ID NO: 1449843 - DNA, 15 bp, Homo sapiens
tacactgggaaatct

SEQ ID NO: 1449844 - DNA, 15 bp, Homo sapiens
acactgggaaatcta

SEQ ID NO: 1449845 - DNA, 15 bp, Homo sapiens
cactgggaaatctaa

SEQ ID NO: 1449846 - DNA, 15 bp, Homo sapiens
actgggaaatctaat

SEQ ID NO: 1449847 - DNA, 15 bp, Homo sapiens
ctgggaaatctaata

SEQ ID NO: 1449848 - DNA, 15 bp, Homo sapiens
tgggaaatctaatac

SEQ ID NO: 1449849 - DNA, 15 bp, Homo sapiens
gggaaatctaatact

SEQ ID NO: 1449850 - DNA, 15 bp, Homo sapiens
ggaaatctaatactc

SEQ ID NO: 1449851 - DNA, 15 bp, Homo sapiens
gaaatctaatactca

SEQ ID NO: 1449852 - DNA, 15 bp, Homo sapiens
aaatctaatactcat

SEQ ID NO: 1449853 - DNA, 15 bp, Homo sapiens
aatctaatactcata

SEQ ID NO: 1449854 - DNA, 15 bp, Homo sapiens
atctaatactcatat

SEQ ID NO: 1449855 - DNA, 15 bp, Homo sapiens
tctaatactcatata

SEQ ID NO: 1449856 - DNA, 15 bp, Homo sapiens
ctaatactcatataa

SEQ ID NO: 1449857 - DNA, 15 bp, Homo sapiens
taatactcatataag

SEQ ID NO: 1449858 - DNA, 15 bp, Homo sapiens
aatactcatataagc

SEQ ID NO: 1449859 - DNA, 15 bp, Homo sapiens
atactcatataagca

SEQ ID NO: 1449860 - DNA, 15 bp, Homo sapiens
tactcatataagcat

SEQ ID NO: 1449861 - DNA, 15 bp, Homo sapiens
actcatataagcata

SEQ ID NO: 1449862 - DNA, 15 bp, Homo sapiens
ctcatataagcatag

SEQ ID NO: 1449863 - DNA, 15 bp, Homo sapiens
tcatataagcatagt

SEQ ID NO: 1449864 - DNA, 15 bp, Homo sapiens
catataagcatagta

SEQ ID NO: 1449865 - DNA, 15 bp, Homo sapiens
atataagcatagtat

SEQ ID NO: 1449866 - DNA, 15 bp, Homo sapiens
tataagcatagtatt

SEQ ID NO: 1449867 - DNA, 15 bp, Homo sapiens
ataagcatagtatta

SEQ ID NO: 1449868 - DNA, 15 bp, Homo sapiens
taagcatagtattag

SEQ ID NO: 1449869 - DNA, 15 bp, Homo sapiens
aagcatagtattagc

SEQ ID NO: 1449870 - DNA, 15 bp, Homo sapiens
agcatagtattagcc

SEQ ID NO: 1449871 - DNA, 15 bp, Homo sapiens
gcatagtattagcca

SEQ ID NO: 1449872 - DNA, 15 bp, Homo sapiens
catagtattagccaa

SEQ ID NO: 1449873 - DNA, 15 bp, Homo sapiens
atagtattagccaaa

SEQ ID NO: 1449874 - DNA, 15 bp, Homo sapiens
tagtattagccaaaa

SEQ ID NO: 1449875 - DNA, 15 bp, Homo sapiens
agtattagccaaaaa

SEQ ID NO: 1449876 - DNA, 15 bp, Homo sapiens
gtattagccaaaaat

SEQ ID NO: 1449877 - DNA, 15 bp, Homo sapiens
tattagccaaaaatg

SEQ ID NO: 1449878 - DNA, 15 bp, Homo sapiens
attagccaaaaatgg

SEQ ID NO: 1449879 - DNA, 15 bp, Homo sapiens
agccaaaaatggaaa

SEQ ID NO: 1449880 - DNA, 15 bp, Homo sapiens
gccaaaaatggaaac

SEQ ID NO: 1449881 - DNA, 15 bp, Homo sapiens
ccaaaaatggaaaca

SEQ ID NO: 1449882 - DNA, 15 bp, Homo sapiens
caaaaatggaaacaa

SEQ ID NO: 1449883 - DNA, 15 bp, Homo sapiens
aaaaatggaaacaac

SEQ ID NO: 1449884 - DNA, 15 bp, Homo sapiens
aaaatggaaacaact

SEQ ID NO: 1449885 - DNA, 15 bp, Homo sapiens
aaatggaaacaactc

SEQ ID NO: 1449886 - DNA, 15 bp, Homo sapiens
aatggaaacaactcc

SEQ ID NO: 1449887 - DNA, 15 bp, Homo sapiens
atggaaacaactcca

SEQ ID NO: 1449888 - DNA, 15 bp, Homo sapiens
tggaaacaactccaa

SEQ ID NO: 1449889 - DNA, 15 bp, Homo sapiens
ggaaacaactccaat

SEQ ID NO: 1449890 - DNA, 15 bp, Homo sapiens
gaaacaactccaata

SEQ ID NO: 1449891 - DNA, 15 bp, Homo sapiens
aaacaactccaatat

SEQ ID NO: 1449892 - DNA, 15 bp, Homo sapiens
aacaactccaatatc

SEQ ID NO: 1449893 - DNA, 15 bp, Homo sapiens
acaactccaatatca

SEQ ID NO: 1449894 - DNA, 15 bp, Homo sapiens
caactccaatatcag

SEQ ID NO: 1449895 - DNA, 15 bp, Homo sapiens
aactccaatatcagt

SEQ ID NO: 1449896 - DNA, 15 bp, Homo sapiens
actccaatatcagtc

SEQ ID NO: 1449897 - DNA, 15 bp, Homo sapiens
ctccaatatcagtca

SEQ ID NO: 1449898 - DNA, 15 bp, Homo sapiens
tccaatatcagtcat

SEQ ID NO: 1449899 - DNA, 15 bp, Homo sapiens
ccaatatcagtcatc

SEQ ID NO: 1449900 - DNA, 15 bp, Homo sapiens
caatatcagtcatca

SEQ ID NO: 1449901 - DNA, 15 bp, Homo sapiens
aatatcagtcatcaa

SEQ ID NO: 1449902 - DNA, 15 bp, Homo sapiens
atatcagtcatcaac

SEQ ID NO: 1449903 - DNA, 15 bp, Homo sapiens
tatcagtcatcaact

SEQ ID NO: 1449904 - DNA, 15 bp, Homo sapiens
atcagtcatcaactg

SEQ ID NO: 1449905 - DNA, 15 bp, Homo sapiens
tcagtcatcaactgg

SEQ ID NO: 1449906 - DNA, 15 bp, Homo sapiens
cagtcatcaactgga

SEQ ID NO: 1449907 - DNA, 15 bp, Homo sapiens
agtcatcaactggat

SEQ ID NO: 1449908 - DNA, 15 bp, Homo sapiens
gtcatcaactggata

SEQ ID NO: 1449909 - DNA, 15 bp, Homo sapiens
tcatcaactggatat

SEQ ID NO: 1449910 - DNA, 15 bp, Homo sapiens
catcaactggatata

SEQ ID NO: 1449911 - DNA, 15 bp, Homo sapiens
atcaactggatatac

SEQ ID NO: 1449912 - DNA, 15 bp, Homo sapiens
tcaactggatatact

SEQ ID NO: 1449913 - DNA, 15 bp, Homo sapiens
caactggatatactg

SEQ ID NO: 1449914 - DNA, 15 bp, Homo sapiens
aactggatatactgt

SEQ ID NO: 1449915 - DNA, 15 bp, Homo sapiens
actggatatactgtg

SEQ ID NO: 1449916 - DNA, 15 bp, Homo sapiens
ctggatatactgtgg

SEQ ID NO: 1449917 - DNA, 15 bp, Homo sapiens
tggatatactgtggt

SEQ ID NO: 1449918 - DNA, 15 bp, Homo sapiens
ggatatactgtggta

SEQ ID NO: 1449919 - DNA, 15 bp, Homo sapiens
gatatactgtggtat

SEQ ID NO: 1449920 - DNA, 15 bp, Homo sapiens
atatactgtggtata

SEQ ID NO: 1449921 - DNA, 15 bp, Homo sapiens
tatactgtggtatat

SEQ ID NO: 1449922 - DNA, 15 bp, Homo sapiens
atactgtggtatatt

SEQ ID NO: 1449923 - DNA, 15 bp, Homo sapiens
tactgtggtatattc

SEQ ID NO: 1449924 - DNA, 15 bp, Homo sapiens
actgtggtatattca

SEQ ID NO: 1449925 - DNA, 15 bp, Homo sapiens
ctgtggtatattcac

SEQ ID NO: 1449926 - DNA, 15 bp, Homo sapiens
tgtggtatattcaca

SEQ ID NO: 1449927 - DNA, 15 bp, Homo sapiens
gtggtatattcacat

SEQ ID NO: 1449928 - DNA, 15 bp, Homo sapiens
tggtatattcacata

SEQ ID NO: 1449929 - DNA, 15 bp, Homo sapiens
ggtatattcacataa

SEQ ID NO: 1449930 - DNA, 15 bp, Homo sapiens
gtatattcacataat

SEQ ID NO: 1449931 - DNA, 15 bp, Homo sapiens
tatattcacataatg

SEQ ID NO: 1449932 - DNA, 15 bp, Homo sapiens
atattcacataatgg

SEQ ID NO: 1449933 - DNA, 15 bp, Homo sapiens
tattcacataatgga

SEQ ID NO: 1449934 - DNA, 15 bp, Homo sapiens
attcacataatggaa

SEQ ID NO: 1449935 - DNA, 15 bp, Homo sapiens
ttcacataatggaac

SEQ ID NO: 1449936 - DNA, 15 bp, Homo sapiens
tcacataatggaact

SEQ ID NO: 1449937 - DNA, 15 bp, Homo sapiens
cacataatggaactc

SEQ ID NO: 1449938 - DNA, 15 bp, Homo sapiens
acataatggaactca

SEQ ID NO: 1449939 - DNA, 15 bp, Homo sapiens
cataatggaactcaa

SEQ ID NO: 1449940 - DNA, 15 bp, Homo sapiens
ataatggaactcaaa

SEQ ID NO: 1449941 - DNA, 15 bp, Homo sapiens
taatggaactcaaaa

SEQ ID NO: 1449942 - DNA, 15 bp, Homo sapiens
aatggaactcaaaat

SEQ ID NO: 1449943 - DNA, 15 bp, Homo sapiens
atggaactcaaaata

SEQ ID NO: 1449944 - DNA, 15 bp, Homo sapiens
tggaactcaaaatac

SEQ ID NO: 1449945 - DNA, 15 bp, Homo sapiens
ggaactcaaaataca

SEQ ID NO: 1449946 - DNA, 15 bp, Homo sapiens
gaactcaaaatacaa

SEQ ID NO: 1449947 - DNA, 15 bp, Homo sapiens
aactcaaaatacaag

SEQ ID NO: 1449948 - DNA, 15 bp, Homo sapiens
actcaaaatacaagt

SEQ ID NO: 1449949 - DNA, 15 bp, Homo sapiens
ctcaaaatacaagtg

SEQ ID NO: 1449950 - DNA, 15 bp, Homo sapiens
tcaaaatacaagtga

SEQ ID NO: 1449951 - DNA, 15 bp, Homo sapiens
caaaatacaagtgaa

SEQ ID NO: 1449952 - DNA, 15 bp, Homo sapiens
aaaatacaagtgaaa

SEQ ID NO: 1449953 - DNA, 15 bp, Homo sapiens
aaatacaagtgaaag

SEQ ID NO: 1449954 - DNA, 15 bp, Homo sapiens
aatacaagtgaaagt

SEQ ID NO: 1449955 - DNA, 15 bp, Homo sapiens
atacaagtgaaagtg

SEQ ID NO: 1449956 - DNA, 15 bp, Homo sapiens
tacaagtgaaagtga

SEQ ID NO: 1449957 - DNA, 15 bp, Homo sapiens
acaagtgaaagtgaa

SEQ ID NO: 1449958 - DNA, 15 bp, Homo sapiens
caagtgaaagtgaag

SEQ ID NO: 1449959 - DNA, 15 bp, Homo sapiens
aagtgaaagtgaaga

SEQ ID NO: 1449960 - DNA, 15 bp, Homo sapiens
agtgaaagtgaagaa

SEQ ID NO: 1449961 - DNA, 15 bp, Homo sapiens
gtgaaagtgaagaaa

SEQ ID NO: 1449962 - DNA, 15 bp, Homo sapiens
tgaaagtgaagaaac

SEQ ID NO: 1449963 - DNA, 15 bp, Homo sapiens
gaaagtgaagaaact

SEQ ID NO: 1449964 - DNA, 15 bp, Homo sapiens
aaagtgaagaaacta

SEQ ID NO: 1449965 - DNA, 15 bp, Homo sapiens
aagtgaagaaactac

SEQ ID NO: 1449966 - DNA, 15 bp, Homo sapiens
agtgaagaaactaca

SEQ ID NO: 1449967 - DNA, 15 bp, Homo sapiens
gtgaagaaactacaa

SEQ ID NO: 1449968 - DNA, 15 bp, Homo sapiens
tgaagaaactacaac

SEQ ID NO: 1449969 - DNA, 15 bp, Homo sapiens
gaagaaactacaact

SEQ ID NO: 1449970 - DNA, 15 bp, Homo sapiens
aagaaactacaacta

SEQ ID NO: 1449971 - DNA, 15 bp, Homo sapiens
agaaactacaactat

SEQ ID NO: 1449972 - DNA, 15 bp, Homo sapiens
gaaactacaactata

SEQ ID NO: 1449973 - DNA, 15 bp, Homo sapiens
aaactacaactatac

SEQ ID NO: 1449974 - DNA, 15 bp, Homo sapiens
aactacaactataca

SEQ ID NO: 1449975 - DNA, 15 bp, Homo sapiens
actacaactatacac

SEQ ID NO: 1449976 - DNA, 15 bp, Homo sapiens
ctacaactatacaca

SEQ ID NO: 1449977 - DNA, 15 bp, Homo sapiens
tacaactatacacaa

SEQ ID NO: 1449978 - DNA, 15 bp, Homo sapiens
acaactatacacaat

SEQ ID NO: 1449979 - DNA, 15 bp, Homo sapiens
caactatacacaatg

SEQ ID NO: 1449980 - DNA, 15 bp, Homo sapiens
aactatacacaatgt

SEQ ID NO: 1449981 - DNA, 15 bp, Homo sapiens
actatacacaatgta

SEQ ID NO: 1449982 - DNA, 15 bp, Homo sapiens
ctatacacaatgtag

SEQ ID NO: 1449983 - DNA, 15 bp, Homo sapiens
tatacacaatgtagt

SEQ ID NO: 1449984 - DNA, 15 bp, Homo sapiens
atacacaatgtagtt

SEQ ID NO: 1449985 - DNA, 15 bp, Homo sapiens
tacacaatgtagttg

SEQ ID NO: 1449986 - DNA, 15 bp, Homo sapiens
acacaatgtagttga

SEQ ID NO: 1449987 - DNA, 15 bp, Homo sapiens
cacaatgtagttgaa

SEQ ID NO: 1449988 - DNA, 15 bp, Homo sapiens
acaatgtagttgaat

SEQ ID NO: 1449989 - DNA, 15 bp, Homo sapiens
caatgtagttgaata

SEQ ID NO: 1449990 - DNA, 15 bp, Homo sapiens
aatgtagttgaatat

SEQ ID NO: 1449991 - DNA, 15 bp, Homo sapiens
atgtagttgaatata

SEQ ID NO: 1449992 - DNA, 15 bp, Homo sapiens
tgtagttgaatatat

SEQ ID NO: 1449993 - DNA, 15 bp, Homo sapiens
gtagttgaatatatg

SEQ ID NO: 1449994 - DNA, 15 bp, Homo sapiens
tagttgaatatatga

SEQ ID NO: 1449995 - DNA, 15 bp, Homo sapiens
agttgaatatatgaa

SEQ ID NO: 1449996 - DNA, 15 bp, Homo sapiens
gttgaatatatgaaa

SEQ ID NO: 1449997 - DNA, 15 bp, Homo sapiens
ttgaatatatgaaac

SEQ ID NO: 1449998 - DNA, 15 bp, Homo sapiens
tgaatatatgaaaca

SEQ ID NO: 1449999 - DNA, 15 bp, Homo sapiens
gaatatatgaaacat

SEQ ID NO: 1450000 - DNA, 15 bp, Homo sapiens
aatatatgaaacatc

SEQ ID NO: 1450001 - DNA, 15 bp, Homo sapiens
atatatgaaacatca

SEQ ID NO: 1450002 - DNA, 15 bp, Homo sapiens
tatatgaaacatcag

SEQ ID NO: 1450003 - DNA, 15 bp, Homo sapiens
atatgaaacatcagg

SEQ ID NO: 1450004 - DNA, 15 bp, Homo sapiens
tatgaaacatcaggt

SEQ ID NO: 1450005 - DNA, 15 bp, Homo sapiens
atgaaacatcaggtt

SEQ ID NO: 1450006 - DNA, 15 bp, Homo sapiens
tgaaacatcaggttg

SEQ ID NO: 1450007 - DNA, 15 bp, Homo sapiens
gaaacatcaggttga

SEQ ID NO: 1450008 - DNA, 15 bp, Homo sapiens
aaacatcaggttgag

SEQ ID NO: 1450009 - DNA, 15 bp, Homo sapiens
aacatcaggttgagc

SEQ ID NO: 1450010 - DNA, 15 bp, Homo sapiens
acatcaggttgagcg

SEQ ID NO: 1450011 - DNA, 15 bp, Homo sapiens
catcaggttgagcga

SEQ ID NO: 1450012 - DNA, 15 bp, Homo sapiens
atcaggttgagcgaa

SEQ ID NO: 1450013 - DNA, 15 bp, Homo sapiens
tcaggttgagcgaaa

SEQ ID NO: 1450014 - DNA, 15 bp, Homo sapiens
caggttgagcgaaaa

SEQ ID NO: 1450015 - DNA, 15 bp, Homo sapiens
aggttgagcgaaaaa

SEQ ID NO: 1450016 - DNA, 15 bp, Homo sapiens
ggttgagcgaaaaaa

SEQ ID NO: 1450017 - DNA, 15 bp, Homo sapiens
gttgagcgaaaaaag

SEQ ID NO: 1450018 - DNA, 15 bp, Homo sapiens
ttgagcgaaaaaagc

SEQ ID NO: 1450019 - DNA, 15 bp, Homo sapiens
tgagcgaaaaaagca

SEQ ID NO: 1450020 - DNA, 15 bp, Homo sapiens
gagcgaaaaaagcaa

SEQ ID NO: 1450021 - DNA, 15 bp, Homo sapiens
agcgaaaaaagcaag

SEQ ID NO: 1450022 - DNA, 15 bp, Homo sapiens
gcgaaaaaagcaaga

SEQ ID NO: 1450023 - DNA, 15 bp, Homo sapiens
cgaaaaaagcaagac

SEQ ID NO: 1450024 - DNA, 15 bp, Homo sapiens
gaaaaaagcaagact

SEQ ID NO: 1450025 - DNA, 15 bp, Homo sapiens
aaaaaagcaagactc

SEQ ID NO: 1450026 - DNA, 15 bp, Homo sapiens
aaaaagcaagactca

SEQ ID NO: 1450027 - DNA, 15 bp, Homo sapiens
aaaagcaagactcaa

SEQ ID NO: 1450028 - DNA, 15 bp, Homo sapiens
aaagcaagactcaaa

SEQ ID NO: 1450029 - DNA, 15 bp, Homo sapiens
aagcaagactcaaaa

SEQ ID NO: 1450030 - DNA, 15 bp, Homo sapiens
agcaagactcaaaag

SEQ ID NO: 1450031 - DNA, 15 bp, Homo sapiens
gcaagactcaaaaga

SEQ ID NO: 1450032 - DNA, 15 bp, Homo sapiens
caagactcaaaagaa

SEQ ID NO: 1450033 - DNA, 15 bp, Homo sapiens
aagactcaaaagaat

SEQ ID NO: 1450034 - DNA, 15 bp, Homo sapiens
agactcaaaagaata

SEQ ID NO: 1450035 - DNA, 15 bp, Homo sapiens
gactcaaaagaatac

SEQ ID NO: 1450036 - DNA, 15 bp, Homo sapiens
actcaaaagaataca

SEQ ID NO: 1450037 - DNA, 15 bp, Homo sapiens
ctcaaaagaatacat

SEQ ID NO: 1450038 - DNA, 15 bp, Homo sapiens
tcaaaagaatacata

SEQ ID NO: 1450039 - DNA, 15 bp, Homo sapiens
caaaagaatacatac

SEQ ID NO: 1450040 - DNA, 15 bp, Homo sapiens
aaaagaatacatact

SEQ ID NO: 1450041 - DNA, 15 bp, Homo sapiens
aaagaatacatactg

SEQ ID NO: 1450042 - DNA, 15 bp, Homo sapiens
aagaatacatactga

SEQ ID NO: 1450043 - DNA, 15 bp, Homo sapiens
agaatacatactgat

SEQ ID NO: 1450044 - DNA, 15 bp, Homo sapiens
gaatacatactgatt

SEQ ID NO: 1450045 - DNA, 15 bp, Homo sapiens
aatacatactgattg

SEQ ID NO: 1450046 - DNA, 15 bp, Homo sapiens
atacatactgattgc

SEQ ID NO: 1450047 - DNA, 15 bp, Homo sapiens
tacatactgattgca

SEQ ID NO: 1450048 - DNA, 15 bp, Homo sapiens
acatactgattgcat

SEQ ID NO: 1450049 - DNA, 15 bp, Homo sapiens
catactgattgcatt

SEQ ID NO: 1450050 - DNA, 15 bp, Homo sapiens
atactgattgcattt

SEQ ID NO: 1450051 - DNA, 15 bp, Homo sapiens
tactgattgcattta

SEQ ID NO: 1450052 - DNA, 15 bp, Homo sapiens
actgattgcatttac

SEQ ID NO: 1450053 - DNA, 15 bp, Homo sapiens
ctgattgcatttact

SEQ ID NO: 1450054 - DNA, 15 bp, Homo sapiens
tgattgcatttactt

SEQ ID NO: 1450055 - DNA, 15 bp, Homo sapiens
gattgcatttacttt

SEQ ID NO: 1450056 - DNA, 15 bp, Homo sapiens
attgcatttacttta

SEQ ID NO: 1450057 - DNA, 15 bp, Homo sapiens
ttgcatttactttaa

SEQ ID NO: 1450058 - DNA, 15 bp, Homo sapiens
tgcatttactttaag

SEQ ID NO: 1450059 - DNA, 15 bp, Homo sapiens
gcatttactttaagg

SEQ ID NO: 1450060 - DNA, 15 bp, Homo sapiens
catttactttaaggt

SEQ ID NO: 1450061 - DNA, 15 bp, Homo sapiens
atttactttaaggtg

SEQ ID NO: 1450062 - DNA, 15 bp, Homo sapiens
tttactttaaggtgg

SEQ ID NO: 1450063 - DNA, 15 bp, Homo sapiens
ttactttaaggtgga

SEQ ID NO: 1450064 - DNA, 15 bp, Homo sapiens
tactttaaggtggaa

SEQ ID NO: 1450065 - DNA, 15 bp, Homo sapiens
actttaaggtggaaa

SEQ ID NO: 1450066 - DNA, 15 bp, Homo sapiens
ctttaaggtggaaag

SEQ ID NO: 1450067 - DNA, 15 bp, Homo sapiens
tttaaggtggaaagc

SEQ ID NO: 1450068 - DNA, 15 bp, Homo sapiens
ttaaggtggaaagca

SEQ ID NO: 1450069 - DNA, 15 bp, Homo sapiens
taaggtggaaagcag

SEQ ID NO: 1450070 - DNA, 15 bp, Homo sapiens
aaggtggaaagcagg

SEQ ID NO: 1450071 - DNA, 15 bp, Homo sapiens
aggtggaaagcaggt

SEQ ID NO: 1450072 - DNA, 15 bp, Homo sapiens
ggtggaaagcaggta

SEQ ID NO: 1450073 - DNA, 15 bp, Homo sapiens
gtggaaagcaggtaa

SEQ ID NO: 1450074 - DNA, 15 bp, Homo sapiens
tggaaagcaggtaaa

SEQ ID NO: 1450075 - DNA, 15 bp, Homo sapiens
ggaaagcaggtaaac

SEQ ID NO: 1450076 - DNA, 15 bp, Homo sapiens
gaaagcaggtaaacc

SEQ ID NO: 1450077 - DNA, 15 bp, Homo sapiens
aaagcaggtaaacca

SEQ ID NO: 1450078 - DNA, 15 bp, Homo sapiens
aagcaggtaaaccac

SEQ ID NO: 1450079 - DNA, 15 bp, Homo sapiens
agcaggtaaaccaca

SEQ ID NO: 1450080 - DNA, 15 bp, Homo sapiens
gcaggtaaaccacag

SEQ ID NO: 1450081 - DNA, 15 bp, Homo sapiens
caggtaaaccacagt

SEQ ID NO: 1450082 - DNA, 15 bp, Homo sapiens
aggtaaaccacagta

SEQ ID NO: 1450083 - DNA, 15 bp, Homo sapiens
ggtaaaccacagtat

SEQ ID NO: 1450084 - DNA, 15 bp, Homo sapiens
gtaaaccacagtatg

SEQ ID NO: 1450085 - DNA, 15 bp, Homo sapiens
taaaccacagtatgt

SEQ ID NO: 1450086 - DNA, 15 bp, Homo sapiens
aaaccacagtatgtt

SEQ ID NO: 1450087 - DNA, 15 bp, Homo sapiens
aaccacagtatgtta

SEQ ID NO: 1450088 - DNA, 15 bp, Homo sapiens
accacagtatgttat

SEQ ID NO: 1450089 - DNA, 15 bp, Homo sapiens
ccacagtatgttatt

SEQ ID NO: 1450090 - DNA, 15 bp, Homo sapiens
cacagtatgttattt

SEQ ID NO: 1450091 - DNA, 15 bp, Homo sapiens
acagtatgttattta

SEQ ID NO: 1450092 - DNA, 15 bp, Homo sapiens
cagtatgttatttag

SEQ ID NO: 1450093 - DNA, 15 bp, Homo sapiens
agtatgttatttagt

SEQ ID NO: 1450094 - DNA, 15 bp, Homo sapiens
gtatgttatttagtg

SEQ ID NO: 1450095 - DNA, 15 bp, Homo sapiens
tatgttatttagtga

SEQ ID NO: 1450096 - DNA, 15 bp, Homo sapiens
atgttatttagtgac

SEQ ID NO: 1450097 - DNA, 15 bp, Homo sapiens
tgttatttagtgaca

SEQ ID NO: 1450098 - DNA, 15 bp, Homo sapiens
gttatttagtgacat

SEQ ID NO: 1450099 - DNA, 15 bp, Homo sapiens
ttatttagtgacata

SEQ ID NO: 1450100 - DNA, 15 bp, Homo sapiens
tatttagtgacataa

SEQ ID NO: 1450101 - DNA, 15 bp, Homo sapiens
atttagtgacataac

SEQ ID NO: 1450102 - DNA, 15 bp, Homo sapiens
tttagtgacataact

SEQ ID NO: 1450103 - DNA, 15 bp, Homo sapiens
ttagtgacataactg

SEQ ID NO: 1450104 - DNA, 15 bp, Homo sapiens
tagtgacataactgg

SEQ ID NO: 1450105 - DNA, 15 bp, Homo sapiens
agtgacataactggt

SEQ ID NO: 1450106 - DNA, 15 bp, Homo sapiens
gtgacataactggtg

SEQ ID NO: 1450107 - DNA, 15 bp, Homo sapiens
tgacataactggtgt

SEQ ID NO: 1450108 - DNA, 15 bp, Homo sapiens
gacataactggtgtt

SEQ ID NO: 1450109 - DNA, 15 bp, Homo sapiens
acataactggtgtta

SEQ ID NO: 1450110 - DNA, 15 bp, Homo sapiens
cataactggtgttaa

SEQ ID NO: 1450111 - DNA, 15 bp, Homo sapiens
ataactggtgttaaa

SEQ ID NO: 1450112 - DNA, 15 bp, Homo sapiens
taactggtgttaaaa

SEQ ID NO: 1450113 - DNA, 15 bp, Homo sapiens
aactggtgttaaaac

SEQ ID NO: 1450114 - DNA, 15 bp, Homo sapiens
actggtgttaaaact

SEQ ID NO: 1450115 - DNA, 15 bp, Homo sapiens
ctggtgttaaaacta

SEQ ID NO: 1450116 - DNA, 15 bp, Homo sapiens
tggtgttaaaactac

SEQ ID NO: 1450117 - DNA, 15 bp, Homo sapiens
ggtgttaaaactaca

SEQ ID NO: 1450118 - DNA, 15 bp, Homo sapiens
gtgttaaaactacaa

SEQ ID NO: 1450119 - DNA, 15 bp, Homo sapiens
tgttaaaactacaaa

SEQ ID NO: 1450120 - DNA, 15 bp, Homo sapiens
gttaaaactacaaag

SEQ ID NO: 1450121 - DNA, 15 bp, Homo sapiens
ttaaaactacaaaga

SEQ ID NO: 1450122 - DNA, 15 bp, Homo sapiens
taaaactacaaagaa

SEQ ID NO: 1450123 - DNA, 15 bp, Homo sapiens
aaaactacaaagaaa

SEQ ID NO: 1450124 - DNA, 15 bp, Homo sapiens
aaactacaaagaaaa

SEQ ID NO: 1450125 - DNA, 15 bp, Homo sapiens
aactacaaagaaaag

SEQ ID NO: 1450126 - DNA, 15 bp, Homo sapiens
actacaaagaaaagc

SEQ ID NO: 1450127 - DNA, 15 bp, Homo sapiens
ctacaaagaaaagca

SEQ ID NO: 1450128 - DNA, 15 bp, Homo sapiens
tacaaagaaaagcaa

SEQ ID NO: 1450129 - DNA, 15 bp, Homo sapiens
acaaagaaaagcaat

SEQ ID NO: 1450130 - DNA, 15 bp, Homo sapiens
caaagaaaagcaatg

SEQ ID NO: 1450131 - DNA, 15 bp, Homo sapiens
aaagaaaagcaatga

SEQ ID NO: 1450132 - DNA, 15 bp, Homo sapiens
aagaaaagcaatgaa

SEQ ID NO: 1450133 - DNA, 15 bp, Homo sapiens
gaaaagcaatgaaat

SEQ ID NO: 1450134 - DNA, 15 bp, Homo sapiens
aaaagcaatgaaata

SEQ ID NO: 1450135 - DNA, 15 bp, Homo sapiens
aaagcaatgaaataa

SEQ ID NO: 1450136 - DNA, 15 bp, Homo sapiens
aagcaatgaaataac

SEQ ID NO: 1450137 - DNA, 15 bp, Homo sapiens
agcaatgaaataact

SEQ ID NO: 1450138 - DNA, 15 bp, Homo sapiens
gcaatgaaataactg

SEQ ID NO: 1450139 - DNA, 15 bp, Homo sapiens
caatgaaataactgc

SEQ ID NO: 1450140 - DNA, 15 bp, Homo sapiens
aatgaaataactgct

SEQ ID NO: 1450141 - DNA, 15 bp, Homo sapiens
atgaaataactgctt

SEQ ID NO: 1450142 - DNA, 15 bp, Homo sapiens
tgaaataactgctta

SEQ ID NO: 1450143 - DNA, 15 bp, Homo sapiens
gaaataactgcttaa

SEQ ID NO: 1450144 - DNA, 15 bp, Homo sapiens
aaataactgcttaat

SEQ ID NO: 1450145 - DNA, 15 bp, Homo sapiens
aataactgcttaata

SEQ ID NO: 1450146 - DNA, 15 bp, Homo sapiens
ataactgcttaataa

SEQ ID NO: 1450147 - DNA, 15 bp, Homo sapiens
taactgcttaataac

SEQ ID NO: 1450148 - DNA, 15 bp, Homo sapiens
aactgcttaataacc

SEQ ID NO: 1450149 - DNA, 15 bp, Homo sapiens
actgcttaataacct

SEQ ID NO: 1450150 - DNA, 15 bp, Homo sapiens
ctgcttaataacctc

SEQ ID NO: 1450151 - DNA, 15 bp, Homo sapiens
tgcttaataacctct

SEQ ID NO: 1450152 - DNA, 15 bp, Homo sapiens
gcttaataacctctc

SEQ ID NO: 1450153 - DNA, 15 bp, Homo sapiens
cttaataacctctcg

SEQ ID NO: 1450154 - DNA, 15 bp, Homo sapiens
ttaataacctctcga

SEQ ID NO: 1450155 - DNA, 15 bp, Homo sapiens
taataacctctcgag

SEQ ID NO: 1450156 - DNA, 15 bp, Homo sapiens
aataacctctcgagt

SEQ ID NO: 1450157 - DNA, 15 bp, Homo sapiens
ataacctctcgagtt

SEQ ID NO: 1450158 - DNA, 15 bp, Homo sapiens
taacctctcgagttt

SEQ ID NO: 1450159 - DNA, 15 bp, Homo sapiens
aacctctcgagtttc

SEQ ID NO: 1450160 - DNA, 15 bp, Homo sapiens
acctctcgagtttct

SEQ ID NO: 1450161 - DNA, 15 bp, Homo sapiens
cctctcgagtttcta

SEQ ID NO: 1450162 - DNA, 15 bp, Homo sapiens
ctctcgagtttctag

SEQ ID NO: 1450163 - DNA, 15 bp, Homo sapiens
tctcgagtttctagg

SEQ ID NO: 1450164 - DNA, 15 bp, Homo sapiens
ctcgagtttctaggg

SEQ ID NO: 1450165 - DNA, 15 bp, Homo sapiens
tcgagtttctagggc

SEQ ID NO: 1450166 - DNA, 15 bp, Homo sapiens
cgagtttctagggcg

SEQ ID NO: 1450167 - DNA, 15 bp, Homo sapiens
gagtttctagggcgc

SEQ ID NO: 1450168 - DNA, 15 bp, Homo sapiens
agtttctagggcgct

SEQ ID NO: 1450169 - DNA, 15 bp, Homo sapiens
gtttctagggcgcta

SEQ ID NO: 1450170 - DNA, 15 bp, Homo sapiens
tttctagggcgctag

SEQ ID NO: 1450171 - DNA, 15 bp, Homo sapiens
ttctagggcgctagc

SEQ ID NO: 1450172 - DNA, 15 bp, Homo sapiens
tctagggcgctagcc

SEQ ID NO: 1450173 - DNA, 15 bp, Homo sapiens
ctagggcgctagcca

SEQ ID NO: 1450174 - DNA, 15 bp, Homo sapiens
tagggcgctagccac

SEQ ID NO: 1450175 - DNA, 15 bp, Homo sapiens
agggcgctagccacg

SEQ ID NO: 1450176 - DNA, 15 bp, Homo sapiens
gggcgctagccacgt

SEQ ID NO: 1450177 - DNA, 15 bp, Homo sapiens
ggcgctagccacgtt

SEQ ID NO: 1450178 - DNA, 15 bp, Homo sapiens
gcgctagccacgttt

SEQ ID NO: 1450179 - DNA, 15 bp, Homo sapiens
cgctagccacgtttt

SEQ ID NO: 1450180 - DNA, 15 bp, Homo sapiens
gctagccacgttttt

SEQ ID NO: 1450181 - DNA, 15 bp, Homo sapiens
ctagccacgtttttt

SEQ ID NO: 1450182 - DNA, 15 bp, Homo sapiens
tagccacgttttttt

SEQ ID NO: 1450183 - DNA, 15 bp, Homo sapiens
agccacgtttttttt

SEQ ID NO: 1450184 - DNA, 15 bp, Homo sapiens
gccacgtttttttta

SEQ ID NO: 1450185 - DNA, 15 bp, Homo sapiens
ccacgttttttttaa

SEQ ID NO: 1450186 - DNA, 15 bp, Homo sapiens
cacgttttttttaac

SEQ ID NO: 1450187 - DNA, 15 bp, Homo sapiens
acgttttttttaacc

SEQ ID NO: 1450188 - DNA, 15 bp, Homo sapiens
cgttttttttaacct

SEQ ID NO: 1450189 - DNA, 15 bp, Homo sapiens
gttttttttaacctt

SEQ ID NO: 1450190 - DNA, 15 bp, Homo sapiens
ttttttttaacctta

SEQ ID NO: 1450191 - DNA, 15 bp, Homo sapiens
tttttttaaccttag

SEQ ID NO: 1450192 - DNA, 15 bp, Homo sapiens
ttttttaaccttagc

SEQ ID NO: 1450193 - DNA, 15 bp, Homo sapiens
tttttaaccttagca

SEQ ID NO: 1450194 - DNA, 15 bp, Homo sapiens
ttttaaccttagcag

SEQ ID NO: 1450195 - DNA, 15 bp, Homo sapiens
tttaaccttagcagt

SEQ ID NO: 1450196 - DNA, 15 bp, Homo sapiens
ttaaccttagcagtt

SEQ ID NO: 1450197 - DNA, 15 bp, Homo sapiens
taaccttagcagttg

SEQ ID NO: 1450198 - DNA, 15 bp, Homo sapiens
aaccttagcagttgt

SEQ ID NO: 1450199 - DNA, 15 bp, Homo sapiens
accttagcagttgtt

SEQ ID NO: 1450200 - DNA, 15 bp, Homo sapiens
ccttagcagttgtta

SEQ ID NO: 1450201 - DNA, 15 bp, Homo sapiens
cttagcagttgttac

SEQ ID NO: 1450202 - DNA, 15 bp, Homo sapiens
ttagcagttgttaca

SEQ ID NO: 1450203 - DNA, 15 bp, Homo sapiens
tagcagttgttacat

SEQ ID NO: 1450204 - DNA, 15 bp, Homo sapiens
agcagttgttacata

SEQ ID NO: 1450205 - DNA, 15 bp, Homo sapiens
gcagttgttacatag

SEQ ID NO: 1450206 - DNA, 15 bp, Homo sapiens
cagttgttacatagg

SEQ ID NO: 1450207 - DNA, 15 bp, Homo sapiens
agttgttacataggt

SEQ ID NO: 1450208 - DNA, 15 bp, Homo sapiens
gttgttacataggtg

SEQ ID NO: 1450209 - DNA, 15 bp, Homo sapiens
ttgttacataggtgt

SEQ ID NO: 1450210 - DNA, 15 bp, Homo sapiens
tgttacataggtgtt

SEQ ID NO: 1450211 - DNA, 15 bp, Homo sapiens
gttacataggtgttc

SEQ ID NO: 1450212 - DNA, 15 bp, Homo sapiens
ttacataggtgttca

SEQ ID NO: 1450213 - DNA, 15 bp, Homo sapiens
tacataggtgttcac

SEQ ID NO: 1450214 - DNA, 15 bp, Homo sapiens
acataggtgttcact

SEQ ID NO: 1450215 - DNA, 15 bp, Homo sapiens
cataggtgttcactc

SEQ ID NO: 1450216 - DNA, 15 bp, Homo sapiens
ataggtgttcactcc

SEQ ID NO: 1450217 - DNA, 15 bp, Homo sapiens
taggtgttcactcca

SEQ ID NO: 1450218 - DNA, 15 bp, Homo sapiens
aggtgttcactccaa

SEQ ID NO: 1450219 - DNA, 15 bp, Homo sapiens
ggtgttcactccaag

SEQ ID NO: 1450220 - DNA, 15 bp, Homo sapiens
gtgttcactccaagt

SEQ ID NO: 1450221 - DNA, 15 bp, Homo sapiens
tgttcactccaagta

SEQ ID NO: 1450222 - DNA, 15 bp, Homo sapiens
gttcactccaagtat

SEQ ID NO: 1450223 - DNA, 15 bp, Homo sapiens
ttcactccaagtatt

SEQ ID NO: 1450224 - DNA, 15 bp, Homo sapiens
tcactccaagtattt

SEQ ID NO: 1450225 - DNA, 15 bp, Homo sapiens
cactccaagtatttg

SEQ ID NO: 1450226 - DNA, 15 bp, Homo sapiens
actccaagtatttgc

SEQ ID NO: 1450227 - DNA, 15 bp, Homo sapiens
ctccaagtatttgct

SEQ ID NO: 1450228 - DNA, 15 bp, Homo sapiens
tccaagtatttgcta

SEQ ID NO: 1450229 - DNA, 15 bp, Homo sapiens
ccaagtatttgctaa

SEQ ID NO: 1450230 - DNA, 15 bp, Homo sapiens
caagtatttgctaaa

SEQ ID NO: 1450231 - DNA, 15 bp, Homo sapiens
aagtatttgctaaaa

SEQ ID NO: 1450232 - DNA, 15 bp, Homo sapiens
agtatttgctaaaat

SEQ ID NO: 1450233 - DNA, 15 bp, Homo sapiens
gtatttgctaaaatg

SEQ ID NO: 1450234 - DNA, 15 bp, Homo sapiens
tatttgctaaaatgt

SEQ ID NO: 1450235 - DNA, 15 bp, Homo sapiens
atttgctaaaatgta

SEQ ID NO: 1450236 - DNA, 15 bp, Homo sapiens
tttgctaaaatgtac

SEQ ID NO: 1450237 - DNA, 15 bp, Homo sapiens
ttgctaaaatgtaca

SEQ ID NO: 1450238 - DNA, 15 bp, Homo sapiens
tgctaaaatgtacac

SEQ ID NO: 1450239 - DNA, 15 bp, Homo sapiens
gctaaaatgtacacc

SEQ ID NO: 1450240 - DNA, 15 bp, Homo sapiens
ctaaaatgtacacct

SEQ ID NO: 1450241 - DNA, 15 bp, Homo sapiens
taaaatgtacacctg

SEQ ID NO: 1450242 - DNA, 15 bp, Homo sapiens
aaaatgtacacctgt

SEQ ID NO: 1450243 - DNA, 15 bp, Homo sapiens
aaatgtacacctgtt

SEQ ID NO: 1450244 - DNA, 15 bp, Homo sapiens
aatgtacacctgtta

SEQ ID NO: 1450245 - DNA, 15 bp, Homo sapiens
atgtacacctgttaa

SEQ ID NO: 1450246 - DNA, 15 bp, Homo sapiens
tgtacacctgttaaa

SEQ ID NO: 1450247 - DNA, 15 bp, Homo sapiens
gtacacctgttaaat

SEQ ID NO: 1450248 - DNA, 15 bp, Homo sapiens
tacacctgttaaatg

SEQ ID NO: 1450249 - DNA, 15 bp, Homo sapiens
acacctgttaaatgt

SEQ ID NO: 1450250 - DNA, 15 bp, Homo sapiens
cacctgttaaatgtg

SEQ ID NO: 1450251 - DNA, 15 bp, Homo sapiens
acctgttaaatgtgc

SEQ ID NO: 1450252 - DNA, 15 bp, Homo sapiens
cctgttaaatgtgct

SEQ ID NO: 1450253 - DNA, 15 bp, Homo sapiens
ctgttaaatgtgctg

SEQ ID NO: 1450254 - DNA, 15 bp, Homo sapiens
tgttaaatgtgctgt

SEQ ID NO: 1450255 - DNA, 15 bp, Homo sapiens
gttaaatgtgctgtt

SEQ ID NO: 1450256 - DNA, 15 bp, Homo sapiens
ttaaatgtgctgttc

SEQ ID NO: 1450257 - DNA, 15 bp, Homo sapiens
taaatgtgctgttct

SEQ ID NO: 1450258 - DNA, 15 bp, Homo sapiens
aaatgtgctgttcta

SEQ ID NO: 1450259 - DNA, 15 bp, Homo sapiens
aatgtgctgttctat

SEQ ID NO: 1450260 - DNA, 15 bp, Homo sapiens
atgtgctgttctata

SEQ ID NO: 1450261 - DNA, 15 bp, Homo sapiens
tgtgctgttctatat

SEQ ID NO: 1450262 - DNA, 15 bp, Homo sapiens
gtgctgttctatatt

SEQ ID NO: 1450263 - DNA, 15 bp, Homo sapiens
tgctgttctatattt

SEQ ID NO: 1450264 - DNA, 15 bp, Homo sapiens
gctgttctatatttg

SEQ ID NO: 1450265 - DNA, 15 bp, Homo sapiens
ctgttctatatttgc

SEQ ID NO: 1450266 - DNA, 15 bp, Homo sapiens
tgttctatatttgct

SEQ ID NO: 1450267 - DNA, 15 bp, Homo sapiens
gttctatatttgcta

SEQ ID NO: 1450268 - DNA, 15 bp, Homo sapiens
ttctatatttgctat

SEQ ID NO: 1450269 - DNA, 15 bp, Homo sapiens
tctatatttgctata

SEQ ID NO: 1450270 - DNA, 15 bp, Homo sapiens
ctatatttgctatat

SEQ ID NO: 1450271 - DNA, 15 bp, Homo sapiens
tatatttgctatatg

SEQ ID NO: 1450272 - DNA, 15 bp, Homo sapiens
atatttgctatatgg

SEQ ID NO: 1450273 - DNA, 15 bp, Homo sapiens
tatttgctatatggt

SEQ ID NO: 1450274 - DNA, 15 bp, Homo sapiens
atttgctatatggtg

SEQ ID NO: 1450275 - DNA, 15 bp, Homo sapiens
tttgctatatggtgc

SEQ ID NO: 1450276 - DNA, 15 bp, Homo sapiens
ttgctatatggtgct

SEQ ID NO: 1450277 - DNA, 15 bp, Homo sapiens
tgctatatggtgcta

SEQ ID NO: 1450278 - DNA, 15 bp, Homo sapiens
gctatatggtgctat

SEQ ID NO: 1450279 - DNA, 15 bp, Homo sapiens
ctatatggtgctata

SEQ ID NO: 1450280 - DNA, 15 bp, Homo sapiens
tatatggtgctataa

SEQ ID NO: 1450281 - DNA, 15 bp, Homo sapiens
atatggtgctataaa

SEQ ID NO: 1450282 - DNA, 15 bp, Homo sapiens
tatggtgctataaaa

SEQ ID NO: 1450283 - DNA, 15 bp, Homo sapiens
atggtgctataaaat

SEQ ID NO: 1450284 - DNA, 15 bp, Homo sapiens
tggtgctataaaatt

SEQ ID NO: 1450285 - DNA, 15 bp, Homo sapiens
ggtgctataaaattt

SEQ ID NO: 1450286 - DNA, 15 bp, Homo sapiens
gtgctataaaatttt

SEQ ID NO: 1450287 - DNA, 15 bp, Homo sapiens
tgctataaaattttt

SEQ ID NO: 1450288 - DNA, 15 bp, Homo sapiens
gctataaaatttttc

SEQ ID NO: 1450289 - DNA, 15 bp, Homo sapiens
ctataaaatttttca

SEQ ID NO: 1450290 - DNA, 15 bp, Homo sapiens
tataaaatttttcaa

SEQ ID NO: 1450291 - DNA, 15 bp, Homo sapiens
ataaaatttttcaaa

SEQ ID NO: 1450292 - DNA, 15 bp, Homo sapiens
taaaatttttcaaat

SEQ ID NO: 1450293 - DNA, 15 bp, Homo sapiens
aaaatttttcaaatg

SEQ ID NO: 1450294 - DNA, 15 bp, Homo sapiens
aaatttttcaaatgt

SEQ ID NO: 1450295 - DNA, 15 bp, Homo sapiens
aatttttcaaatgta

SEQ ID NO: 1450296 - DNA, 15 bp, Homo sapiens
atttttcaaatgtaa

SEQ ID NO: 1450297 - DNA, 15 bp, Homo sapiens
tttttcaaatgtaaa

SEQ ID NO: 1450298 - DNA, 15 bp, Homo sapiens
ttttcaaatgtaaag

SEQ ID NO: 1450299 - DNA, 15 bp, Homo sapiens
tttcaaatgtaaaga

SEQ ID NO: 1450300 - DNA, 15 bp, Homo sapiens
ttcaaatgtaaagag

SEQ ID NO: 1450301 - DNA, 15 bp, Homo sapiens
tcaaatgtaaagagt

SEQ ID NO: 1450302 - DNA, 15 bp, Homo sapiens
caaatgtaaagagtc

SEQ ID NO: 1450303 - DNA, 15 bp, Homo sapiens
aaatgtaaagagtct

SEQ ID NO: 1450304 - DNA, 15 bp, Homo sapiens
aatgtaaagagtcta

SEQ ID NO: 1450305 - DNA, 15 bp, Homo sapiens
atgtaaagagtctat

SEQ ID NO: 1450306 - DNA, 15 bp, Homo sapiens
tgtaaagagtctatg

SEQ ID NO: 1450307 - DNA, 15 bp, Homo sapiens
gtaaagagtctatga

SEQ ID NO: 1450308 - DNA, 15 bp, Homo sapiens
taaagagtctatgag

SEQ ID NO: 1450309 - DNA, 15 bp, Homo sapiens
aaagagtctatgaga

SEQ ID NO: 1450310 - DNA, 15 bp, Homo sapiens
aagagtctatgagat

SEQ ID NO: 1450311 - DNA, 15 bp, Homo sapiens
agagtctatgagatt

SEQ ID NO: 1450312 - DNA, 15 bp, Homo sapiens
gagtctatgagatta

SEQ ID NO: 1450313 - DNA, 15 bp, Homo sapiens
agtctatgagattaa

SEQ ID NO: 1450314 - DNA, 15 bp, Homo sapiens
gtctatgagattaat

SEQ ID NO: 1450315 - DNA, 15 bp, Homo sapiens
tctatgagattaatg

SEQ ID NO: 1450316 - DNA, 15 bp, Homo sapiens
ctatgagattaatgg

SEQ ID NO: 1450317 - DNA, 15 bp, Homo sapiens
tatgagattaatgga

SEQ ID NO: 1450318 - DNA, 15 bp, Homo sapiens
atgagattaatggat

SEQ ID NO: 1450319 - DNA, 15 bp, Homo sapiens
tgagattaatggatt

SEQ ID NO: 1450320 - DNA, 15 bp, Homo sapiens
gagattaatggattc

SEQ ID NO: 1450321 - DNA, 15 bp, Homo sapiens
agattaatggattca

SEQ ID NO: 1450322 - DNA, 15 bp, Homo sapiens
gattaatggattcaa

SEQ ID NO: 1450323 - DNA, 15 bp, Homo sapiens
attaatggattcaat

SEQ ID NO: 1450324 - DNA, 15 bp, Homo sapiens
ttaatggattcaata

SEQ ID NO: 1450325 - DNA, 15 bp, Homo sapiens
taatggattcaatat

SEQ ID NO: 1450326 - DNA, 15 bp, Homo sapiens
aatggattcaatatt

SEQ ID NO: 1450327 - DNA, 15 bp, Homo sapiens
atggattcaatattc

SEQ ID NO: 1450328 - DNA, 15 bp, Homo sapiens
tggattcaatattca

SEQ ID NO: 1450329 - DNA, 15 bp, Homo sapiens
ggattcaatattcac

SEQ ID NO: 1450330 - DNA, 15 bp, Homo sapiens
gattcaatattcacc

SEQ ID NO: 1450331 - DNA, 15 bp, Homo sapiens
attcaatattcacct

SEQ ID NO: 1450332 - DNA, 15 bp, Homo sapiens
ttcaatattcaccta

SEQ ID NO: 1450333 - DNA, 15 bp, Homo sapiens
tcaatattcacctat

SEQ ID NO: 1450334 - DNA, 15 bp, Homo sapiens
caatattcacctatg

SEQ ID NO: 1450335 - DNA, 15 bp, Homo sapiens
aatattcacctatga

SEQ ID NO: 1450336 - DNA, 15 bp, Homo sapiens
atattcacctatgaa

SEQ ID NO: 1450337 - DNA, 15 bp, Homo sapiens
tattcacctatgaaa

SEQ ID NO: 1450338 - DNA, 15 bp, Homo sapiens
attcacctatgaaat

SEQ ID NO: 1450339 - DNA, 15 bp, Homo sapiens
ttcacctatgaaatt

SEQ ID NO: 1450340 - DNA, 15 bp, Homo sapiens
tcacctatgaaattt

SEQ ID NO: 1450341 - DNA, 15 bp, Homo sapiens
cacctatgaaatttg

SEQ ID NO: 1450342 - DNA, 15 bp, Homo sapiens
acctatgaaatttgc

SEQ ID NO: 1450343 - DNA, 15 bp, Homo sapiens
cctatgaaatttgct

SEQ ID NO: 1450344 - DNA, 15 bp, Homo sapiens
ctatgaaatttgcta

SEQ ID NO: 1450345 - DNA, 15 bp, Homo sapiens
tatgaaatttgctat

SEQ ID NO: 1450346 - DNA, 15 bp, Homo sapiens
atgaaatttgctatt

SEQ ID NO: 1450347 - DNA, 15 bp, Homo sapiens
tgaaatttgctatta

SEQ ID NO: 1450348 - DNA, 15 bp, Homo sapiens
gaaatttgctattac

SEQ ID NO: 1450349 - DNA, 15 bp, Homo sapiens
aaatttgctattact

SEQ ID NO: 1450350 - DNA, 15 bp, Homo sapiens
aatttgctattactt

SEQ ID NO: 1450351 - DNA, 15 bp, Homo sapiens
atttgctattacttt

SEQ ID NO: 1450352 - DNA, 15 bp, Homo sapiens
tttgctattactttt

SEQ ID NO: 1450353 - DNA, 15 bp, Homo sapiens
ttgctattacttttt

SEQ ID NO: 1450354 - DNA, 15 bp, Homo sapiens
tgctattactttttg

SEQ ID NO: 1450355 - DNA, 15 bp, Homo sapiens
gctattactttttga

SEQ ID NO: 1450356 - DNA, 15 bp, Homo sapiens
ctattactttttgaa

SEQ ID NO: 1450357 - DNA, 15 bp, Homo sapiens
tattactttttgaat

SEQ ID NO: 1450358 - DNA, 15 bp, Homo sapiens
attactttttgaatt

SEQ ID NO: 1450359 - DNA, 15 bp, Homo sapiens
ttactttttgaattt

SEQ ID NO: 1450360 - DNA, 15 bp, Homo sapiens
tactttttgaattta

SEQ ID NO: 1450361 - DNA, 15 bp, Homo sapiens
actttttgaatttat

SEQ ID NO: 1450362 - DNA, 15 bp, Homo sapiens
ctttttgaatttatt

SEQ ID NO: 1450363 - DNA, 15 bp, Homo sapiens
tttttgaatttatta

SEQ ID NO: 1450364 - DNA, 15 bp, Homo sapiens
ttttgaatttattac

SEQ ID NO: 1450365 - DNA, 15 bp, Homo sapiens
tttgaatttattaca

SEQ ID NO: 1450366 - DNA, 15 bp, Homo sapiens
ttgaatttattacaa

SEQ ID NO: 1450367 - DNA, 15 bp, Homo sapiens
tgaatttattacaaa

SEQ ID NO: 1450368 - DNA, 15 bp, Homo sapiens
gaatttattacaaat

SEQ ID NO: 1450369 - DNA, 15 bp, Homo sapiens
aatttattacaaatg

SEQ ID NO: 1450370 - DNA, 15 bp, Homo sapiens
atttattacaaatga

SEQ ID NO: 1450371 - DNA, 15 bp, Homo sapiens
tttattacaaatgaa

SEQ ID NO: 1450372 - DNA, 15 bp, Homo sapiens
ttattacaaatgaaa

SEQ ID NO: 1450373 - DNA, 15 bp, Homo sapiens
tattacaaatgaaac

SEQ ID NO: 1450374 - DNA, 15 bp, Homo sapiens
attacaaatgaaacc

SEQ ID NO: 1450375 - DNA, 15 bp, Homo sapiens
ttacaaatgaaacca

SEQ ID NO: 1450376 - DNA, 15 bp, Homo sapiens
tacaaatgaaaccat

SEQ ID NO: 1450377 - DNA, 15 bp, Homo sapiens
acaaatgaaaccata

SEQ ID NO: 1450378 - DNA, 15 bp, Homo sapiens
caaatgaaaccataa

SEQ ID NO: 1450379 - DNA, 15 bp, Homo sapiens
aaatgaaaccataag

SEQ ID NO: 1450380 - DNA, 15 bp, Homo sapiens
aatgaaaccataagc

SEQ ID NO: 1450381 - DNA, 15 bp, Homo sapiens
atgaaaccataagct

SEQ ID NO: 1450382 - DNA, 15 bp, Homo sapiens
tgaaaccataagctg

SEQ ID NO: 1450383 - DNA, 15 bp, Homo sapiens
gaaaccataagctgt

SEQ ID NO: 1450384 - DNA, 15 bp, Homo sapiens
aaaccataagctgtg

SEQ ID NO: 1450385 - DNA, 15 bp, Homo sapiens
aaccataagctgtgt

SEQ ID NO: 1450386 - DNA, 15 bp, Homo sapiens
accataagctgtgtc

SEQ ID NO: 1450387 - DNA, 15 bp, Homo sapiens
ccataagctgtgtca

SEQ ID NO: 1450388 - DNA, 15 bp, Homo sapiens
cataagctgtgtcac

SEQ ID NO: 1450389 - DNA, 15 bp, Homo sapiens
ataagctgtgtcaca

SEQ ID NO: 1450390 - DNA, 15 bp, Homo sapiens
taagctgtgtcacat

SEQ ID NO: 1450391 - DNA, 15 bp, Homo sapiens
aagctgtgtcacatt

SEQ ID NO: 1450392 - DNA, 15 bp, Homo sapiens
agctgtgtcacatta

SEQ ID NO: 1450393 - DNA, 15 bp, Homo sapiens
gctgtgtcacattaa

SEQ ID NO: 1450394 - DNA, 15 bp, Homo sapiens
ctgtgtcacattaag

SEQ ID NO: 1450395 - DNA, 15 bp, Homo sapiens
tgtgtcacattaagt

SEQ ID NO: 1450396 - DNA, 15 bp, Homo sapiens
gtgtcacattaagtt

SEQ ID NO: 1450397 - DNA, 15 bp, Homo sapiens
tgtcacattaagtta

SEQ ID NO: 1450398 - DNA, 15 bp, Homo sapiens
gtcacattaagttat

SEQ ID NO: 1450399 - DNA, 15 bp, Homo sapiens
tcacattaagttatc

SEQ ID NO: 1450400 - DNA, 15 bp, Homo sapiens
cacattaagttatca

SEQ ID NO: 1450401 - DNA, 15 bp, Homo sapiens
acattaagttatcat

SEQ ID NO: 1450402 - DNA, 15 bp, Homo sapiens
cattaagttatcatc

SEQ ID NO: 1450403 - DNA, 15 bp, Homo sapiens
attaagttatcatct

SEQ ID NO: 1450404 - DNA, 15 bp, Homo sapiens
ttaagttatcatctg

SEQ ID NO: 1450405 - DNA, 15 bp, Homo sapiens
taagttatcatctga

SEQ ID NO: 1450406 - DNA, 15 bp, Homo sapiens
aagttatcatctgac

SEQ ID NO: 1450407 - DNA, 15 bp, Homo sapiens
agttatcatctgaca

SEQ ID NO: 1450408 - DNA, 15 bp, Homo sapiens
gttatcatctgacat

SEQ ID NO: 1450409 - DNA, 15 bp, Homo sapiens
ttatcatctgacata

SEQ ID NO: 1450410 - DNA, 15 bp, Homo sapiens
tatcatctgacatag

SEQ ID NO: 1450411 - DNA, 15 bp, Homo sapiens
atcatctgacatagc

SEQ ID NO: 1450412 - DNA, 15 bp, Homo sapiens
tcatctgacatagct

SEQ ID NO: 1450413 - DNA, 15 bp, Homo sapiens
catctgacatagcta

SEQ ID NO: 1450414 - DNA, 15 bp, Homo sapiens
atctgacatagctaa

SEQ ID NO: 1450415 - DNA, 15 bp, Homo sapiens
tctgacatagctaat

SEQ ID NO: 1450416 - DNA, 15 bp, Homo sapiens
ctgacatagctaata

SEQ ID NO: 1450417 - DNA, 15 bp, Homo sapiens
tgacatagctaataa

SEQ ID NO: 1450418 - DNA, 15 bp, Homo sapiens
gacatagctaataag

SEQ ID NO: 1450419 - DNA, 15 bp, Homo sapiens
acatagctaataagt

SEQ ID NO: 1450420 - DNA, 15 bp, Homo sapiens
catagctaataagta

SEQ ID NO: 1450421 - DNA, 15 bp, Homo sapiens
atagctaataagtag

SEQ ID NO: 1450422 - DNA, 15 bp, Homo sapiens
tagctaataagtagt

SEQ ID NO: 1450423 - DNA, 15 bp, Homo sapiens
agctaataagtagtt

SEQ ID NO: 1450424 - DNA, 15 bp, Homo sapiens
gctaataagtagtta

SEQ ID NO: 1450425 - DNA, 15 bp, Homo sapiens
ctaataagtagttag

SEQ ID NO: 1450426 - DNA, 15 bp, Homo sapiens
taataagtagttagc

SEQ ID NO: 1450427 - DNA, 15 bp, Homo sapiens
aataagtagttagct

SEQ ID NO: 1450428 - DNA, 15 bp, Homo sapiens
ataagtagttagctc

SEQ ID NO: 1450429 - DNA, 15 bp, Homo sapiens
taagtagttagctcc

SEQ ID NO: 1450430 - DNA, 15 bp, Homo sapiens
aagtagttagctcct

SEQ ID NO: 1450431 - DNA, 15 bp, Homo sapiens
agtagttagctcctt

SEQ ID NO: 1450432 - DNA, 15 bp, Homo sapiens
gtagttagctcctta

SEQ ID NO: 1450433 - DNA, 15 bp, Homo sapiens
tagttagctccttat

SEQ ID NO: 1450434 - DNA, 15 bp, Homo sapiens
agttagctccttatt

SEQ ID NO: 1450435 - DNA, 15 bp, Homo sapiens
gttagctccttattc

SEQ ID NO: 1450436 - DNA, 15 bp, Homo sapiens
ttagctccttattct

SEQ ID NO: 1450437 - DNA, 15 bp, Homo sapiens
tagctccttattcta

SEQ ID NO: 1450438 - DNA, 15 bp, Homo sapiens
agctccttattctac

SEQ ID NO: 1450439 - DNA, 15 bp, Homo sapiens
gctccttattctacc

SEQ ID NO: 1450440 - DNA, 15 bp, Homo sapiens
ctccttattctacca

SEQ ID NO: 1450441 - DNA, 15 bp, Homo sapiens
tccttattctaccag

SEQ ID NO: 1450442 - DNA, 15 bp, Homo sapiens
ccttattctaccagt

SEQ ID NO: 1450443 - DNA, 15 bp, Homo sapiens
cttattctaccagtt

SEQ ID NO: 1450444 - DNA, 15 bp, Homo sapiens
ttattctaccagtta

SEQ ID NO: 1450445 - DNA, 15 bp, Homo sapiens
tattctaccagttac

SEQ ID NO: 1450446 - DNA, 15 bp, Homo sapiens
attctaccagttacc

SEQ ID NO: 1450447 - DNA, 15 bp, Homo sapiens
ttctaccagttacca

SEQ ID NO: 1450448 - DNA, 15 bp, Homo sapiens
tctaccagttaccag

SEQ ID NO: 1450449 - DNA, 15 bp, Homo sapiens
ctaccagttaccagc

SEQ ID NO: 1450450 - DNA, 15 bp, Homo sapiens
taccagttaccagct

SEQ ID NO: 1450451 - DNA, 15 bp, Homo sapiens
accagttaccagcta

SEQ ID NO: 1450452 - DNA, 15 bp, Homo sapiens
ccagttaccagctat

SEQ ID NO: 1450453 - DNA, 15 bp, Homo sapiens
cagttaccagctatg

SEQ ID NO: 1450454 - DNA, 15 bp, Homo sapiens
agttaccagctatgt

SEQ ID NO: 1450455 - DNA, 15 bp, Homo sapiens
gttaccagctatgtg

SEQ ID NO: 1450456 - DNA, 15 bp, Homo sapiens
ttaccagctatgtgg

SEQ ID NO: 1450457 - DNA, 15 bp, Homo sapiens
taccagctatgtggc

SEQ ID NO: 1450458 - DNA, 15 bp, Homo sapiens
accagctatgtggcc

SEQ ID NO: 1450459 - DNA, 15 bp, Homo sapiens
ccagctatgtggcct

SEQ ID NO: 1450460 - DNA, 15 bp, Homo sapiens
cagctatgtggcctt

SEQ ID NO: 1450461 - DNA, 15 bp, Homo sapiens
agctatgtggccttg

SEQ ID NO: 1450462 - DNA, 15 bp, Homo sapiens
gctatgtggccttgg

SEQ ID NO: 1450463 - DNA, 15 bp, Homo sapiens
ctatgtggccttggg

SEQ ID NO: 1450464 - DNA, 15 bp, Homo sapiens
tatgtggccttgggc

SEQ ID NO: 1450465 - DNA, 15 bp, Homo sapiens
atgtggccttgggca

SEQ ID NO: 1450466 - DNA, 15 bp, Homo sapiens
gtggccttgggcaaa

SEQ ID NO: 1450467 - DNA, 15 bp, Homo sapiens
tggccttgggcaaac

SEQ ID NO: 1450468 - DNA, 15 bp, Homo sapiens
ggccttgggcaaact

SEQ ID NO: 1450469 - DNA, 15 bp, Homo sapiens
gccttgggcaaacta

SEQ ID NO: 1450470 - DNA, 15 bp, Homo sapiens
ccttgggcaaactaa

SEQ ID NO: 1450471 - DNA, 15 bp, Homo sapiens
cttgggcaaactaac

SEQ ID NO: 1450472 - DNA, 15 bp, Homo sapiens
ttgggcaaactaacc

SEQ ID NO: 1450473 - DNA, 15 bp, Homo sapiens
tgggcaaactaacct

SEQ ID NO: 1450474 - DNA, 15 bp, Homo sapiens
gggcaaactaacctt

SEQ ID NO: 1450475 - DNA, 15 bp, Homo sapiens
ggcaaactaaccttt

SEQ ID NO: 1450476 - DNA, 15 bp, Homo sapiens
gcaaactaacctttc

SEQ ID NO: 1450477 - DNA, 15 bp, Homo sapiens
caaactaacctttct

SEQ ID NO: 1450478 - DNA, 15 bp, Homo sapiens
aaactaacctttctg

SEQ ID NO: 1450479 - DNA, 15 bp, Homo sapiens
aactaacctttctga

SEQ ID NO: 1450480 - DNA, 15 bp, Homo sapiens
actaacctttctgag

SEQ ID NO: 1450481 - DNA, 15 bp, Homo sapiens
ctaacctttctgagc

SEQ ID NO: 1450482 - DNA, 15 bp, Homo sapiens
taacctttctgagcc

SEQ ID NO: 1450483 - DNA, 15 bp, Homo sapiens
aacctttctgagcct

SEQ ID NO: 1450484 - DNA, 15 bp, Homo sapiens
acctttctgagcctc

SEQ ID NO: 1450485 - DNA, 15 bp, Homo sapiens
cctttctgagcctca

SEQ ID NO: 1450486 - DNA, 15 bp, Homo sapiens
ctttctgagcctcag

SEQ ID NO: 1450487 - DNA, 15 bp, Homo sapiens
tttctgagcctcagt

SEQ ID NO: 1450488 - DNA, 15 bp, Homo sapiens
ttctgagcctcagtt

SEQ ID NO: 1450489 - DNA, 15 bp, Homo sapiens
tgagcctcagtttct

SEQ ID NO: 1450490 - DNA, 15 bp, Homo sapiens
gagcctcagtttcta

SEQ ID NO: 1450491 - DNA, 15 bp, Homo sapiens
agcctcagtttctat

SEQ ID NO: 1450492 - DNA, 15 bp, Homo sapiens
gcctcagtttctata

SEQ ID NO: 1450493 - DNA, 15 bp, Homo sapiens
cctcagtttctataa

SEQ ID NO: 1450494 - DNA, 15 bp, Homo sapiens
ctcagtttctataaa

SEQ ID NO: 1450495 - DNA, 15 bp, Homo sapiens
tcagtttctataaaa

SEQ ID NO: 1450496 - DNA, 15 bp, Homo sapiens
cagtttctataaaat

SEQ ID NO: 1450497 - DNA, 15 bp, Homo sapiens
agtttctataaaatg

SEQ ID NO: 1450498 - DNA, 15 bp, Homo sapiens
gtttctataaaatga

SEQ ID NO: 1450499 - DNA, 15 bp, Homo sapiens
tttctataaaatgag

SEQ ID NO: 1450500 - DNA, 15 bp, Homo sapiens
ttctataaaatgagg

SEQ ID NO: 1450501 - DNA, 15 bp, Homo sapiens
tctataaaatgagga

SEQ ID NO: 1450502 - DNA, 15 bp, Homo sapiens
ctataaaatgaggat

SEQ ID NO: 1450503 - DNA, 15 bp, Homo sapiens
tataaaatgaggata

SEQ ID NO: 1450504 - DNA, 15 bp, Homo sapiens
ataaaatgaggatag

SEQ ID NO: 1450505 - DNA, 15 bp, Homo sapiens
taaaatgaggataga

SEQ ID NO: 1450506 - DNA, 15 bp, Homo sapiens
aaaatgaggatagaa

SEQ ID NO: 1450507 - DNA, 15 bp, Homo sapiens
aaatgaggatagaaa

SEQ ID NO: 1450508 - DNA, 15 bp, Homo sapiens
aatgaggatagaaaa

SEQ ID NO: 1450509 - DNA, 15 bp, Homo sapiens
atgaggatagaaaat

SEQ ID NO: 1450510 - DNA, 15 bp, Homo sapiens
tgaggatagaaaata

SEQ ID NO: 1450511 - DNA, 15 bp, Homo sapiens
gaggatagaaaataa

SEQ ID NO: 1450512 - DNA, 15 bp, Homo sapiens
aggatagaaaataac

SEQ ID NO: 1450513 - DNA, 15 bp, Homo sapiens
ggatagaaaataaca

SEQ ID NO: 1450514 - DNA, 15 bp, Homo sapiens
gatagaaaataacag

SEQ ID NO: 1450515 - DNA, 15 bp, Homo sapiens
atagaaaataacagt

SEQ ID NO: 1450516 - DNA, 15 bp, Homo sapiens
tagaaaataacagta

SEQ ID NO: 1450517 - DNA, 15 bp, Homo sapiens
agaaaataacagtac

SEQ ID NO: 1450518 - DNA, 15 bp, Homo sapiens
gaaaataacagtact

SEQ ID NO: 1450519 - DNA, 15 bp, Homo sapiens
aaaataacagtacta

SEQ ID NO: 1450520 - DNA, 15 bp, Homo sapiens
aaataacagtactaa

SEQ ID NO: 1450521 - DNA, 15 bp, Homo sapiens
aataacagtactaat

SEQ ID NO: 1450522 - DNA, 15 bp, Homo sapiens
ataacagtactaatt

SEQ ID NO: 1450523 - DNA, 15 bp, Homo sapiens
taacagtactaattc

SEQ ID NO: 1450524 - DNA, 15 bp, Homo sapiens
aacagtactaattcc

SEQ ID NO: 1450525 - DNA, 15 bp, Homo sapiens
acagtactaattcca

SEQ ID NO: 1450526 - DNA, 15 bp, Homo sapiens
cagtactaattccag

SEQ ID NO: 1450527 - DNA, 15 bp, Homo sapiens
agtactaattccaga

SEQ ID NO: 1450528 - DNA, 15 bp, Homo sapiens
gtactaattccagag

SEQ ID NO: 1450529 - DNA, 15 bp, Homo sapiens
tactaattccagagt

SEQ ID NO: 1450530 - DNA, 15 bp, Homo sapiens
actaattccagagtt

SEQ ID NO: 1450531 - DNA, 15 bp, Homo sapiens
ctaattccagagttg

SEQ ID NO: 1450532 - DNA, 15 bp, Homo sapiens
taattccagagttgt

SEQ ID NO: 1450533 - DNA, 15 bp, Homo sapiens
aattccagagttgtg

SEQ ID NO: 1450534 - DNA, 15 bp, Homo sapiens
attccagagttgtga

SEQ ID NO: 1450535 - DNA, 15 bp, Homo sapiens
ttccagagttgtgag

SEQ ID NO: 1450536 - DNA, 15 bp, Homo sapiens
tccagagttgtgaga

SEQ ID NO: 1450537 - DNA, 15 bp, Homo sapiens
ccagagttgtgagaa

SEQ ID NO: 1450538 - DNA, 15 bp, Homo sapiens
cagagttgtgagaag

SEQ ID NO: 1450539 - DNA, 15 bp, Homo sapiens
agagttgtgagaagg

SEQ ID NO: 1450540 - DNA, 15 bp, Homo sapiens
gagttgtgagaagga

SEQ ID NO: 1450541 - DNA, 15 bp, Homo sapiens
agttgtgagaaggaa

SEQ ID NO: 1450542 - DNA, 15 bp, Homo sapiens
gttgtgagaaggaaa

SEQ ID NO: 1450543 - DNA, 15 bp, Homo sapiens
ttgtgagaaggaaat

SEQ ID NO: 1450544 - DNA, 15 bp, Homo sapiens
tgtgagaaggaaatg

SEQ ID NO: 1450545 - DNA, 15 bp, Homo sapiens
gtgagaaggaaatga

SEQ ID NO: 1450546 - DNA, 15 bp, Homo sapiens
tgagaaggaaatgag

SEQ ID NO: 1450547 - DNA, 15 bp, Homo sapiens
gagaaggaaatgaga

SEQ ID NO: 1450548 - DNA, 15 bp, Homo sapiens
agaaggaaatgagat

SEQ ID NO: 1450549 - DNA, 15 bp, Homo sapiens
gaaggaaatgagata

SEQ ID NO: 1450550 - DNA, 15 bp, Homo sapiens
aaggaaatgagatat

SEQ ID NO: 1450551 - DNA, 15 bp, Homo sapiens
aggaaatgagatatc

SEQ ID NO: 1450552 - DNA, 15 bp, Homo sapiens
ggaaatgagatatct

SEQ ID NO: 1450553 - DNA, 15 bp, Homo sapiens
gaaatgagatatcta

SEQ ID NO: 1450554 - DNA, 15 bp, Homo sapiens
aaatgagatatctat

SEQ ID NO: 1450555 - DNA, 15 bp, Homo sapiens
aatgagatatctatg

SEQ ID NO: 1450556 - DNA, 15 bp, Homo sapiens
atgagatatctatgt

SEQ ID NO: 1450557 - DNA, 15 bp, Homo sapiens
tgagatatctatgta

SEQ ID NO: 1450558 - DNA, 15 bp, Homo sapiens
agatatctatgtaaa

SEQ ID NO: 1450559 - DNA, 15 bp, Homo sapiens
gatatctatgtaaat

SEQ ID NO: 1450560 - DNA, 15 bp, Homo sapiens
atatctatgtaaata

SEQ ID NO: 1450561 - DNA, 15 bp, Homo sapiens
tatctatgtaaatac

SEQ ID NO: 1450562 - DNA, 15 bp, Homo sapiens
atctatgtaaatact

SEQ ID NO: 1450563 - DNA, 15 bp, Homo sapiens
tctatgtaaatactt

SEQ ID NO: 1450564 - DNA, 15 bp, Homo sapiens
ctatgtaaatacttc

SEQ ID NO: 1450565 - DNA, 15 bp, Homo sapiens
tatgtaaatacttca

SEQ ID NO: 1450566 - DNA, 15 bp, Homo sapiens
atgtaaatacttcaa

SEQ ID NO: 1450567 - DNA, 15 bp, Homo sapiens
tgtaaatacttcaaa

SEQ ID NO: 1450568 - DNA, 15 bp, Homo sapiens
gtaaatacttcaaac

SEQ ID NO: 1450569 - DNA, 15 bp, Homo sapiens
taaatacttcaaaca

SEQ ID NO: 1450570 - DNA, 15 bp, Homo sapiens
aaatacttcaaacag

SEQ ID NO: 1450571 - DNA, 15 bp, Homo sapiens
aatacttcaaacaga

SEQ ID NO: 1450572 - DNA, 15 bp, Homo sapiens
atacttcaaacagaa

SEQ ID NO: 1450573 - DNA, 15 bp, Homo sapiens
tacttcaaacagaac

SEQ ID NO: 1450574 - DNA, 15 bp, Homo sapiens
acttcaaacagaacc

SEQ ID NO: 1450575 - DNA, 15 bp, Homo sapiens
cttcaaacagaacct

SEQ ID NO: 1450576 - DNA, 15 bp, Homo sapiens
ttcaaacagaacctg

SEQ ID NO: 1450577 - DNA, 15 bp, Homo sapiens
tcaaacagaacctgg

SEQ ID NO: 1450578 - DNA, 15 bp, Homo sapiens
caaacagaacctggc

SEQ ID NO: 1450579 - DNA, 15 bp, Homo sapiens
aaacagaacctggca

SEQ ID NO: 1450580 - DNA, 15 bp, Homo sapiens
aacagaacctggcat

SEQ ID NO: 1450581 - DNA, 15 bp, Homo sapiens
acagaacctggcata

SEQ ID NO: 1450582 - DNA, 15 bp, Homo sapiens
cagaacctggcatat

SEQ ID NO: 1450583 - DNA, 15 bp, Homo sapiens
agaacctggcatata

SEQ ID NO: 1450584 - DNA, 15 bp, Homo sapiens
gaacctggcatatag

SEQ ID NO: 1450585 - DNA, 15 bp, Homo sapiens
aacctggcatatagg

SEQ ID NO: 1450586 - DNA, 15 bp, Homo sapiens
acctggcatatagga

SEQ ID NO: 1450587 - DNA, 15 bp, Homo sapiens
cctggcatataggaa

SEQ ID NO: 1450588 - DNA, 15 bp, Homo sapiens
ctggcatataggaaa

SEQ ID NO: 1450589 - DNA, 15 bp, Homo sapiens
tggcatataggaaac

SEQ ID NO: 1450590 - DNA, 15 bp, Homo sapiens
ggcatataggaaaca

SEQ ID NO: 1450591 - DNA, 15 bp, Homo sapiens
gcatataggaaacaa

SEQ ID NO: 1450592 - DNA, 15 bp, Homo sapiens
catataggaaacaat

SEQ ID NO: 1450593 - DNA, 15 bp, Homo sapiens
atataggaaacaatc

SEQ ID NO: 1450594 - DNA, 15 bp, Homo sapiens
tataggaaacaatca

SEQ ID NO: 1450595 - DNA, 15 bp, Homo sapiens
ataggaaacaatcat

SEQ ID NO: 1450596 - DNA, 15 bp, Homo sapiens
taggaaacaatcatt

SEQ ID NO: 1450597 - DNA, 15 bp, Homo sapiens
aggaaacaatcatta

SEQ ID NO: 1450598 - DNA, 15 bp, Homo sapiens
ggaaacaatcattat

SEQ ID NO: 1450599 - DNA, 15 bp, Homo sapiens
gaaacaatcattatg

SEQ ID NO: 1450600 - DNA, 15 bp, Homo sapiens
aaacaatcattatgt

SEQ ID NO: 1450601 - DNA, 15 bp, Homo sapiens
aacaatcattatgtg

SEQ ID NO: 1450602 - DNA, 15 bp, Homo sapiens
acaatcattatgtgt

SEQ ID NO: 1450603 - DNA, 15 bp, Homo sapiens
caatcattatgtgta

SEQ ID NO: 1450604 - DNA, 15 bp, Homo sapiens
aatcattatgtgtaa

SEQ ID NO: 1450605 - DNA, 15 bp, Homo sapiens
atcattatgtgtaac

SEQ ID NO: 1450606 - DNA, 15 bp, Homo sapiens
tcattatgtgtaacc

SEQ ID NO: 1450607 - DNA, 15 bp, Homo sapiens
cattatgtgtaacca

SEQ ID NO: 1450608 - DNA, 15 bp, Homo sapiens
attatgtgtaaccat

SEQ ID NO: 1450609 - DNA, 15 bp, Homo sapiens
ttatgtgtaaccatt

SEQ ID NO: 1450610 - DNA, 15 bp, Homo sapiens
tatgtgtaaccatta

SEQ ID NO: 1450611 - DNA, 15 bp, Homo sapiens
atgtgtaaccattaa

SEQ ID NO: 1450612 - DNA, 15 bp, Homo sapiens
tgtgtaaccattaaa

SEQ ID NO: 1450613 - DNA, 15 bp, Homo sapiens
gtgtaaccattaaat

SEQ ID NO: 1450614 - DNA, 15 bp, Homo sapiens
tgtaaccattaaatg

SEQ ID NO: 1450615 - DNA, 15 bp, Homo sapiens
gtaaccattaaatgg

SEQ ID NO: 1450616 - DNA, 15 bp, Homo sapiens
taaccattaaatggt

SEQ ID NO: 1450617 - DNA, 15 bp, Homo sapiens
aaccattaaatggta

SEQ ID NO: 1450618 - DNA, 15 bp, Homo sapiens
accattaaatggtac

SEQ ID NO: 1450619 - DNA, 15 bp, Homo sapiens
ccattaaatggtact

SEQ ID NO: 1450620 - DNA, 15 bp, Homo sapiens
cattaaatggtactt

SEQ ID NO: 1450621 - DNA, 15 bp, Homo sapiens
attaaatggtacttt

SEQ ID NO: 1450622 - DNA, 15 bp, Homo sapiens
ttaaatggtacttta

SEQ ID NO: 1450623 - DNA, 15 bp, Homo sapiens
taaatggtactttaa

SEQ ID NO: 1450624 - DNA, 15 bp, Homo sapiens
aaatggtactttaag

SEQ ID NO: 1450625 - DNA, 15 bp, Homo sapiens
aatggtactttaaga

SEQ ID NO: 1450626 - DNA, 15 bp, Homo sapiens
atggtactttaagat

SEQ ID NO: 1450627 - DNA, 15 bp, Homo sapiens
tggtactttaagatg

SEQ ID NO: 1450628 - DNA, 15 bp, Homo sapiens
ggtactttaagatga

SEQ ID NO: 1450629 - DNA, 15 bp, Homo sapiens
gtactttaagatgat

SEQ ID NO: 1450630 - DNA, 15 bp, Homo sapiens
tactttaagatgatg

SEQ ID NO: 1450631 - DNA, 15 bp, Homo sapiens
actttaagatgatgt

SEQ ID NO: 1450632 - DNA, 15 bp, Homo sapiens
ctttaagatgatgtt

SEQ ID NO: 1450633 - DNA, 15 bp, Homo sapiens
tttaagatgatgttt

SEQ ID NO: 1450634 - DNA, 15 bp, Homo sapiens
ttaagatgatgttta

SEQ ID NO: 1450635 - DNA, 15 bp, Homo sapiens
taagatgatgtttag

SEQ ID NO: 1450636 - DNA, 15 bp, Homo sapiens
aagatgatgtttaga

SEQ ID NO: 1450637 - DNA, 15 bp, Homo sapiens
agatgatgtttagat

SEQ ID NO: 1450638 - DNA, 15 bp, Homo sapiens
gatgatgtttagata

SEQ ID NO: 1450639 - DNA, 15 bp, Homo sapiens
atgatgtttagatac

SEQ ID NO: 1450640 - DNA, 15 bp, Homo sapiens
tgatgtttagataca

SEQ ID NO: 1450641 - DNA, 15 bp, Homo sapiens
gatgtttagatacat

SEQ ID NO: 1450642 - DNA, 15 bp, Homo sapiens
atgtttagatacatg

SEQ ID NO: 1450643 - DNA, 15 bp, Homo sapiens
tgtttagatacatgc

SEQ ID NO: 1450644 - DNA, 15 bp, Homo sapiens
gtttagatacatgct

SEQ ID NO: 1450645 - DNA, 15 bp, Homo sapiens
tttagatacatgctc

SEQ ID NO: 1450646 - DNA, 15 bp, Homo sapiens
ttagatacatgctcc

SEQ ID NO: 1450647 - DNA, 15 bp, Homo sapiens
tagatacatgctcca

SEQ ID NO: 1450648 - DNA, 15 bp, Homo sapiens
agatacatgctccac

SEQ ID NO: 1450649 - DNA, 15 bp, Homo sapiens
gatacatgctccaca

SEQ ID NO: 1450650 - DNA, 15 bp, Homo sapiens
atacatgctccacat

SEQ ID NO: 1450651 - DNA, 15 bp, Homo sapiens
tacatgctccacatt

SEQ ID NO: 1450652 - DNA, 15 bp, Homo sapiens
acatgctccacatta

SEQ ID NO: 1450653 - DNA, 15 bp, Homo sapiens
catgctccacattaa

SEQ ID NO: 1450654 - DNA, 15 bp, Homo sapiens
atgctccacattaag

SEQ ID NO: 1450655 - DNA, 15 bp, Homo sapiens
tgctccacattaagt

SEQ ID NO: 1450656 - DNA, 15 bp, Homo sapiens
gctccacattaagtg

SEQ ID NO: 1450657 - DNA, 15 bp, Homo sapiens
ctccacattaagtga

SEQ ID NO: 1450658 - DNA, 15 bp, Homo sapiens
tccacattaagtgac

SEQ ID NO: 1450659 - DNA, 15 bp, Homo sapiens
ccacattaagtgacc

SEQ ID NO: 1450660 - DNA, 15 bp, Homo sapiens
cacattaagtgacca

SEQ ID NO: 1450661 - DNA, 15 bp, Homo sapiens
acattaagtgaccaa

SEQ ID NO: 1450662 - DNA, 15 bp, Homo sapiens
cattaagtgaccaat

SEQ ID NO: 1450663 - DNA, 15 bp, Homo sapiens
attaagtgaccaatt

SEQ ID NO: 1450664 - DNA, 15 bp, Homo sapiens
ttaagtgaccaattt

SEQ ID NO: 1450665 - DNA, 15 bp, Homo sapiens
taagtgaccaatttc

SEQ ID NO: 1450666 - DNA, 15 bp, Homo sapiens
aagtgaccaatttca

SEQ ID NO: 1450667 - DNA, 15 bp, Homo sapiens
agtgaccaatttcac

SEQ ID NO: 1450668 - DNA, 15 bp, Homo sapiens
gtgaccaatttcaca

SEQ ID NO: 1450669 - DNA, 15 bp, Homo sapiens
tgaccaatttcacag

SEQ ID NO: 1450670 - DNA, 15 bp, Homo sapiens
gaccaatttcacaga

SEQ ID NO: 1450671 - DNA, 15 bp, Homo sapiens
accaatttcacagaa

SEQ ID NO: 1450672 - DNA, 15 bp, Homo sapiens
ccaatttcacagaag

SEQ ID NO: 1450673 - DNA, 15 bp, Homo sapiens
caatttcacagaagc

SEQ ID NO: 1450674 - DNA, 15 bp, Homo sapiens
aatttcacagaagcc

SEQ ID NO: 1450675 - DNA, 15 bp, Homo sapiens
atttcacagaagcca

SEQ ID NO: 1450676 - DNA, 15 bp, Homo sapiens
tttcacagaagccaa

SEQ ID NO: 1450677 - DNA, 15 bp, Homo sapiens
ttcacagaagccaat

SEQ ID NO: 1450678 - DNA, 15 bp, Homo sapiens
tcacagaagccaatg

SEQ ID NO: 1450679 - DNA, 15 bp, Homo sapiens
cacagaagccaatgt

SEQ ID NO: 1450680 - DNA, 15 bp, Homo sapiens
acagaagccaatgtg

SEQ ID NO: 1450681 - DNA, 15 bp, Homo sapiens
cagaagccaatgtgt

SEQ ID NO: 1450682 - DNA, 15 bp, Homo sapiens
agaagccaatgtgtt

SEQ ID NO: 1450683 - DNA, 15 bp, Homo sapiens
gaagccaatgtgttt

SEQ ID NO: 1450684 - DNA, 15 bp, Homo sapiens
aagccaatgtgtttt

SEQ ID NO: 1450685 - DNA, 15 bp, Homo sapiens
agccaatgtgttttc

SEQ ID NO: 1450686 - DNA, 15 bp, Homo sapiens
gccaatgtgttttca

SEQ ID NO: 1450687 - DNA, 15 bp, Homo sapiens
ccaatgtgttttcac

SEQ ID NO: 1450688 - DNA, 15 bp, Homo sapiens
caatgtgttttcact

SEQ ID NO: 1450689 - DNA, 15 bp, Homo sapiens
aatgtgttttcactg

SEQ ID NO: 1450690 - DNA, 15 bp, Homo sapiens
atgtgttttcactgg

SEQ ID NO: 1450691 - DNA, 15 bp, Homo sapiens
tgtgttttcactggt

SEQ ID NO: 1450692 - DNA, 15 bp, Homo sapiens
gtgttttcactggtt

SEQ ID NO: 1450693 - DNA, 15 bp, Homo sapiens
tgttttcactggtta

SEQ ID NO: 1450694 - DNA, 15 bp, Homo sapiens
gttttcactggttaa

SEQ ID NO: 1450695 - DNA, 15 bp, Homo sapiens
ttttcactggttaaa

SEQ ID NO: 1450696 - DNA, 15 bp, Homo sapiens
tttcactggttaaag

SEQ ID NO: 1450697 - DNA, 15 bp, Homo sapiens
ttcactggttaaagg

SEQ ID NO: 1450698 - DNA, 15 bp, Homo sapiens
tcactggttaaagga

SEQ ID NO: 1450699 - DNA, 15 bp, Homo sapiens
cactggttaaaggag

SEQ ID NO: 1450700 - DNA, 15 bp, Homo sapiens
actggttaaaggaga

SEQ ID NO: 1450701 - DNA, 15 bp, Homo sapiens
ctggttaaaggagat

SEQ ID NO: 1450702 - DNA, 15 bp, Homo sapiens
tggttaaaggagatg

SEQ ID NO: 1450703 - DNA, 15 bp, Homo sapiens
ggttaaaggagatga

SEQ ID NO: 1450704 - DNA, 15 bp, Homo sapiens
gttaaaggagatgat

SEQ ID NO: 1450705 - DNA, 15 bp, Homo sapiens
ttaaaggagatgatg

SEQ ID NO: 1450706 - DNA, 15 bp, Homo sapiens
taaaggagatgatgg

SEQ ID NO: 1450707 - DNA, 15 bp, Homo sapiens
aaaggagatgatggt

SEQ ID NO: 1450708 - DNA, 15 bp, Homo sapiens
aaggagatgatggta

SEQ ID NO: 1450709 - DNA, 15 bp, Homo sapiens
aggagatgatggtac

SEQ ID NO: 1450710 - DNA, 15 bp, Homo sapiens
ggagatgatggtacc

SEQ ID NO: 1450711 - DNA, 15 bp, Homo sapiens
gagatgatggtacct

SEQ ID NO: 1450712 - DNA, 15 bp, Homo sapiens
agatgatggtaccta

SEQ ID NO: 1450713 - DNA, 15 bp, Homo sapiens
gatgatggtacctat

SEQ ID NO: 1450714 - DNA, 15 bp, Homo sapiens
atgatggtacctata

SEQ ID NO: 1450715 - DNA, 15 bp, Homo sapiens
tgatggtacctataa

SEQ ID NO: 1450716 - DNA, 15 bp, Homo sapiens
gatggtacctataac

SEQ ID NO: 1450717 - DNA, 15 bp, Homo sapiens
atggtacctataact

SEQ ID NO: 1450718 - DNA, 15 bp, Homo sapiens
tggtacctataactg

SEQ ID NO: 1450719 - DNA, 15 bp, Homo sapiens
ggtacctataactgc

SEQ ID NO: 1450720 - DNA, 15 bp, Homo sapiens
gtacctataactgca

SEQ ID NO: 1450721 - DNA, 15 bp, Homo sapiens
tacctataactgcaa

SEQ ID NO: 1450722 - DNA, 15 bp, Homo sapiens
acctataactgcaat

SEQ ID NO: 1450723 - DNA, 15 bp, Homo sapiens
cctataactgcaata

SEQ ID NO: 1450724 - DNA, 15 bp, Homo sapiens
ctataactgcaatac

SEQ ID NO: 1450725 - DNA, 15 bp, Homo sapiens
ataactgcaatacta

SEQ ID NO: 1450726 - DNA, 15 bp, Homo sapiens
taactgcaatactaa

SEQ ID NO: 1450727 - DNA, 15 bp, Homo sapiens
aactgcaatactaaa

SEQ ID NO: 1450728 - DNA, 15 bp, Homo sapiens
actgcaatactaaat

SEQ ID NO: 1450729 - DNA, 15 bp, Homo sapiens
ctgcaatactaaatc

SEQ ID NO: 1450730 - DNA, 15 bp, Homo sapiens
tgcaatactaaatca

SEQ ID NO: 1450731 - DNA, 15 bp, Homo sapiens
gcaatactaaatcat

SEQ ID NO: 1450732 - DNA, 15 bp, Homo sapiens
caatactaaatcatg

SEQ ID NO: 1450733 - DNA, 15 bp, Homo sapiens
aatactaaatcatgc

SEQ ID NO: 1450734 - DNA, 15 bp, Homo sapiens
atactaaatcatgca

SEQ ID NO: 1450735 - DNA, 15 bp, Homo sapiens
tactaaatcatgcac

SEQ ID NO: 1450736 - DNA, 15 bp, Homo sapiens
actaaatcatgcaca

SEQ ID NO: 1450737 - DNA, 15 bp, Homo sapiens
ctaaatcatgcacaa

SEQ ID NO: 1450738 - DNA, 15 bp, Homo sapiens
taaatcatgcacaaa

SEQ ID NO: 1450739 - DNA, 15 bp, Homo sapiens
aaatcatgcacaaaa

SEQ ID NO: 1450740 - DNA, 15 bp, Homo sapiens
aatcatgcacaaaag

SEQ ID NO: 1450741 - DNA, 15 bp, Homo sapiens
atcatgcacaaaaga

SEQ ID NO: 1450742 - DNA, 15 bp, Homo sapiens
tcatgcacaaaagac

SEQ ID NO: 1450743 - DNA, 15 bp, Homo sapiens
catgcacaaaagaca

SEQ ID NO: 1450744 - DNA, 15 bp, Homo sapiens
atgcacaaaagacag

SEQ ID NO: 1450745 - DNA, 15 bp, Homo sapiens
tgcacaaaagacagt

SEQ ID NO: 1450746 - DNA, 15 bp, Homo sapiens
gcacaaaagacagtg

SEQ ID NO: 1450747 - DNA, 15 bp, Homo sapiens
cacaaaagacagtgg

SEQ ID NO: 1450748 - DNA, 15 bp, Homo sapiens
acaaaagacagtgga

SEQ ID NO: 1450749 - DNA, 15 bp, Homo sapiens
caaaagacagtggac

SEQ ID NO: 1450750 - DNA, 15 bp, Homo sapiens
aaaagacagtggaca

SEQ ID NO: 1450751 - DNA, 15 bp, Homo sapiens
aaagacagtggacat

SEQ ID NO: 1450752 - DNA, 15 bp, Homo sapiens
aagacagtggacatc

SEQ ID NO: 1450753 - DNA, 15 bp, Homo sapiens
agacagtggacatct

SEQ ID NO: 1450754 - DNA, 15 bp, Homo sapiens
gacagtggacatctt

SEQ ID NO: 1450755 - DNA, 15 bp, Homo sapiens
acagtggacatcttt

SEQ ID NO: 1450756 - DNA, 15 bp, Homo sapiens
cagtggacatctttc

SEQ ID NO: 1450757 - DNA, 15 bp, Homo sapiens
agtggacatctttca

SEQ ID NO: 1450758 - DNA, 15 bp, Homo sapiens
gtggacatctttcac

SEQ ID NO: 1450759 - DNA, 15 bp, Homo sapiens
tggacatctttcaca

SEQ ID NO: 1450760 - DNA, 15 bp, Homo sapiens
ggacatctttcacat

SEQ ID NO: 1450761 - DNA, 15 bp, Homo sapiens
gacatctttcacatc

SEQ ID NO: 1450762 - DNA, 15 bp, Homo sapiens
acatctttcacatca

SEQ ID NO: 1450763 - DNA, 15 bp, Homo sapiens
catctttcacatcac

SEQ ID NO: 1450764 - DNA, 15 bp, Homo sapiens
atctttcacatcact

SEQ ID NO: 1450765 - DNA, 15 bp, Homo sapiens
tctttcacatcactt

SEQ ID NO: 1450766 - DNA, 15 bp, Homo sapiens
ctttcacatcactta

SEQ ID NO: 1450767 - DNA, 15 bp, Homo sapiens
tttcacatcacttac

SEQ ID NO: 1450768 - DNA, 15 bp, Homo sapiens
ttcacatcacttacc

SEQ ID NO: 1450769 - DNA, 15 bp, Homo sapiens
tcacatcacttacca

SEQ ID NO: 1450770 - DNA, 15 bp, Homo sapiens
cacatcacttaccat

SEQ ID NO: 1450771 - DNA, 15 bp, Homo sapiens
acatcacttaccatc

SEQ ID NO: 1450772 - DNA, 15 bp, Homo sapiens
catcacttaccatcc

SEQ ID NO: 1450773 - DNA, 15 bp, Homo sapiens
atcacttaccatcca

SEQ ID NO: 1450774 - DNA, 15 bp, Homo sapiens
tcacttaccatccag

SEQ ID NO: 1450775 - DNA, 15 bp, Homo sapiens
cacttaccatccagt

SEQ ID NO: 1450776 - DNA, 15 bp, Homo sapiens
acttaccatccagtg

SEQ ID NO: 1450777 - DNA, 15 bp, Homo sapiens
cttaccatccagtga

SEQ ID NO: 1450778 - DNA, 15 bp, Homo sapiens
ttaccatccagtgac

SEQ ID NO: 1450779 - DNA, 15 bp, Homo sapiens
taccatccagtgaca

SEQ ID NO: 1450780 - DNA, 15 bp, Homo sapiens
accatccagtgacac

SEQ ID NO: 1450781 - DNA, 15 bp, Homo sapiens
ccatccagtgacacc

SEQ ID NO: 1450782 - DNA, 15 bp, Homo sapiens
catccagtgacacct

SEQ ID NO: 1450783 - DNA, 15 bp, Homo sapiens
atccagtgacacctc

SEQ ID NO: 1450784 - DNA, 15 bp, Homo sapiens
tccagtgacacctcc

SEQ ID NO: 1450785 - DNA, 15 bp, Homo sapiens
ccagtgacacctcca

SEQ ID NO: 1450786 - DNA, 15 bp, Homo sapiens
cagtgacacctccaa

SEQ ID NO: 1450787 - DNA, 15 bp, Homo sapiens
agtgacacctccaat

SEQ ID NO: 1450788 - DNA, 15 bp, Homo sapiens
gtgacacctccaatg

SEQ ID NO: 1450789 - DNA, 15 bp, Homo sapiens
tgacacctccaatga

SEQ ID NO: 1450790 - DNA, 15 bp, Homo sapiens
gacacctccaatgaa

SEQ ID NO: 1450791 - DNA, 15 bp, Homo sapiens
acacctccaatgaac

SEQ ID NO: 1450792 - DNA, 15 bp, Homo sapiens
cacctccaatgaaca

SEQ ID NO: 1450793 - DNA, 15 bp, Homo sapiens
acctccaatgaacag

SEQ ID NO: 1450794 - DNA, 15 bp, Homo sapiens
cctccaatgaacagc

SEQ ID NO: 1450795 - DNA, 15 bp, Homo sapiens
ctccaatgaacagct

SEQ ID NO: 1450796 - DNA, 15 bp, Homo sapiens
tccaatgaacagctg

SEQ ID NO: 1450797 - DNA, 15 bp, Homo sapiens
ccaatgaacagctgg

SEQ ID NO: 1450798 - DNA, 15 bp, Homo sapiens
caatgaacagctggg

SEQ ID NO: 1450799 - DNA, 15 bp, Homo sapiens
aatgaacagctgggt

SEQ ID NO: 1450800 - DNA, 15 bp, Homo sapiens
atgaacagctgggtt

SEQ ID NO: 1450801 - DNA, 15 bp, Homo sapiens
tgaacagctgggttg

SEQ ID NO: 1450802 - DNA, 15 bp, Homo sapiens
gaacagctgggttgc

SEQ ID NO: 1450803 - DNA, 15 bp, Homo sapiens
aacagctgggttgcc

SEQ ID NO: 1450804 - DNA, 15 bp, Homo sapiens
acagctgggttgcca

SEQ ID NO: 1450805 - DNA, 15 bp, Homo sapiens
cagctgggttgccac

SEQ ID NO: 1450806 - DNA, 15 bp, Homo sapiens
agctgggttgccacg

SEQ ID NO: 1450807 - DNA, 15 bp, Homo sapiens
gctgggttgccacgc

SEQ ID NO: 1450808 - DNA, 15 bp, Homo sapiens
ctgggttgccacgct

SEQ ID NO: 1450809 - DNA, 15 bp, Homo sapiens
tgggttgccacgcta

SEQ ID NO: 1450810 - DNA, 15 bp, Homo sapiens
gggttgccacgctat

SEQ ID NO: 1450811 - DNA, 15 bp, Homo sapiens
ggttgccacgctata

SEQ ID NO: 1450812 - DNA, 15 bp, Homo sapiens
gttgccacgctatac

SEQ ID NO: 1450813 - DNA, 15 bp, Homo sapiens
ttgccacgctatact

SEQ ID NO: 1450814 - DNA, 15 bp, Homo sapiens
tgccacgctatactt

SEQ ID NO: 1450815 - DNA, 15 bp, Homo sapiens
gccacgctatacttt

SEQ ID NO: 1450816 - DNA, 15 bp, Homo sapiens
ccacgctatactttt

SEQ ID NO: 1450817 - DNA, 15 bp, Homo sapiens
cacgctatacttttc

SEQ ID NO: 1450818 - DNA, 15 bp, Homo sapiens
acgctatacttttct

SEQ ID NO: 1450819 - DNA, 15 bp, Homo sapiens
cgctatacttttctg

SEQ ID NO: 1450820 - DNA, 15 bp, Homo sapiens
gctatacttttctgc

SEQ ID NO: 1450821 - DNA, 15 bp, Homo sapiens
ctatacttttctgct

SEQ ID NO: 1450822 - DNA, 15 bp, Homo sapiens
tatacttttctgctg

SEQ ID NO: 1450823 - DNA, 15 bp, Homo sapiens
atacttttctgctga

SEQ ID NO: 1450824 - DNA, 15 bp, Homo sapiens
tacttttctgctgaa

SEQ ID NO: 1450825 - DNA, 15 bp, Homo sapiens
acttttctgctgaag

SEQ ID NO: 1450826 - DNA, 15 bp, Homo sapiens
cttttctgctgaagg

SEQ ID NO: 1450827 - DNA, 15 bp, Homo sapiens
ttttctgctgaaggt

SEQ ID NO: 1450828 - DNA, 15 bp, Homo sapiens
tttctgctgaaggtc

SEQ ID NO: 1450829 - DNA, 15 bp, Homo sapiens
ttctgctgaaggtcc

SEQ ID NO: 1450830 - DNA, 15 bp, Homo sapiens
tctgctgaaggtcca

SEQ ID NO: 1450831 - DNA, 15 bp, Homo sapiens
ctgctgaaggtccag

SEQ ID NO: 1450832 - DNA, 15 bp, Homo sapiens
tgctgaaggtccaga

SEQ ID NO: 1450833 - DNA, 15 bp, Homo sapiens
gctgaaggtccagat

SEQ ID NO: 1450834 - DNA, 15 bp, Homo sapiens
ctgaaggtccagatt

SEQ ID NO: 1450835 - DNA, 15 bp, Homo sapiens
tgaaggtccagattc

SEQ ID NO: 1450836 - DNA, 15 bp, Homo sapiens
gaaggtccagattcc

SEQ ID NO: 1450837 - DNA, 15 bp, Homo sapiens
aaggtccagattcct

SEQ ID NO: 1450838 - DNA, 15 bp, Homo sapiens
aggtccagattcctg

SEQ ID NO: 1450839 - DNA, 15 bp, Homo sapiens
ggtccagattcctgc

SEQ ID NO: 1450840 - DNA, 15 bp, Homo sapiens
gtccagattcctgcc

SEQ ID NO: 1450841 - DNA, 15 bp, Homo sapiens
tccagattcctgccc

SEQ ID NO: 1450842 - DNA, 15 bp, Homo sapiens
ccagattcctgcccg

SEQ ID NO: 1450843 - DNA, 15 bp, Homo sapiens
cagattcctgcccga

SEQ ID NO: 1450844 - DNA, 15 bp, Homo sapiens
agattcctgcccgaa

SEQ ID NO: 1450845 - DNA, 15 bp, Homo sapiens
gattcctgcccgaac

SEQ ID NO: 1450846 - DNA, 15 bp, Homo sapiens
attcctgcccgaaca

SEQ ID NO: 1450847 - DNA, 15 bp, Homo sapiens
ttcctgcccgaacag

SEQ ID NO: 1450848 - DNA, 15 bp, Homo sapiens
tcctgcccgaacagc

SEQ ID NO: 1450849 - DNA, 15 bp, Homo sapiens
cctgcccgaacagct

SEQ ID NO: 1450850 - DNA, 15 bp, Homo sapiens
ctgcccgaacagctt

SEQ ID NO: 1450851 - DNA, 15 bp, Homo sapiens
tgcccgaacagctta

SEQ ID NO: 1450852 - DNA, 15 bp, Homo sapiens
gcccgaacagcttac

SEQ ID NO: 1450853 - DNA, 15 bp, Homo sapiens
cccgaacagcttacg

SEQ ID NO: 1450854 - DNA, 15 bp, Homo sapiens
ccgaacagcttacgc

SEQ ID NO: 1450855 - DNA, 15 bp, Homo sapiens
cgaacagcttacgcc

SEQ ID NO: 1450856 - DNA, 15 bp, Homo sapiens
gaacagcttacgcca

SEQ ID NO: 1450857 - DNA, 15 bp, Homo sapiens
aacagcttacgccac

SEQ ID NO: 1450858 - DNA, 15 bp, Homo sapiens
acagcttacgccacc

SEQ ID NO: 1450859 - DNA, 15 bp, Homo sapiens
cagcttacgccacca

SEQ ID NO: 1450860 - DNA, 15 bp, Homo sapiens
agcttacgccaccat

SEQ ID NO: 1450861 - DNA, 15 bp, Homo sapiens
gcttacgccaccatg

SEQ ID NO: 1450862 - DNA, 15 bp, Homo sapiens
cttacgccaccatgg

SEQ ID NO: 1450863 - DNA, 15 bp, Homo sapiens
ttacgccaccatggc

SEQ ID NO: 1450864 - DNA, 15 bp, Homo sapiens
tacgccaccatggct

SEQ ID NO: 1450865 - DNA, 15 bp, Homo sapiens
acgccaccatggctg

SEQ ID NO: 1450866 - DNA, 15 bp, Homo sapiens
cgccaccatggctgc

SEQ ID NO: 1450867 - DNA, 15 bp, Homo sapiens
gccaccatggctgct

SEQ ID NO: 1450868 - DNA, 15 bp, Homo sapiens
ccaccatggctgctt

SEQ ID NO: 1450869 - DNA, 15 bp, Homo sapiens
caccatggctgcttc

SEQ ID NO: 1450870 - DNA, 15 bp, Homo sapiens
accatggctgcttct

SEQ ID NO: 1450871 - DNA, 15 bp, Homo sapiens
ccatggctgcttctt

SEQ ID NO: 1450872 - DNA, 15 bp, Homo sapiens
catggctgcttctta

SEQ ID NO: 1450873 - DNA, 15 bp, Homo sapiens
atggctgcttcttag

SEQ ID NO: 1450874 - DNA, 15 bp, Homo sapiens
tggctgcttcttagc

SEQ ID NO: 1450875 - DNA, 15 bp, Homo sapiens
ggctgcttcttagca

SEQ ID NO: 1450876 - DNA, 15 bp, Homo sapiens
gctgcttcttagcaa

SEQ ID NO: 1450877 - DNA, 15 bp, Homo sapiens
ctgcttcttagcaaa

SEQ ID NO: 1450878 - DNA, 15 bp, Homo sapiens
tgcttcttagcaaat

SEQ ID NO: 1450879 - DNA, 15 bp, Homo sapiens
gcttcttagcaaatt

SEQ ID NO: 1450880 - DNA, 15 bp, Homo sapiens
cttcttagcaaattc

SEQ ID NO: 1450881 - DNA, 15 bp, Homo sapiens
ttcttagcaaattcc

SEQ ID NO: 1450882 - DNA, 15 bp, Homo sapiens
tcttagcaaattccg

SEQ ID NO: 1450883 - DNA, 15 bp, Homo sapiens
cttagcaaattccgc

SEQ ID NO: 1450884 - DNA, 15 bp, Homo sapiens
ttagcaaattccgca

SEQ ID NO: 1450885 - DNA, 15 bp, Homo sapiens
tagcaaattccgcaa

SEQ ID NO: 1450886 - DNA, 15 bp, Homo sapiens
agcaaattccgcaag

SEQ ID NO: 1450887 - DNA, 15 bp, Homo sapiens
gcaaattccgcaagg

SEQ ID NO: 1450888 - DNA, 15 bp, Homo sapiens
caaattccgcaaggt

SEQ ID NO: 1450889 - DNA, 15 bp, Homo sapiens
aaattccgcaaggtc

SEQ ID NO: 1450890 - DNA, 15 bp, Homo sapiens
aattccgcaaggtcc

SEQ ID NO: 1450891 - DNA, 15 bp, Homo sapiens
attccgcaaggtcca

SEQ ID NO: 1450892 - DNA, 15 bp, Homo sapiens
ttccgcaaggtccag

SEQ ID NO: 1450893 - DNA, 15 bp, Homo sapiens
tccgcaaggtccagt

SEQ ID NO: 1450894 - DNA, 15 bp, Homo sapiens
ccgcaaggtccagtg

SEQ ID NO: 1450895 - DNA, 15 bp, Homo sapiens
cgcaaggtccagtga

SEQ ID NO: 1450896 - DNA, 15 bp, Homo sapiens
gcaaggtccagtgac

SEQ ID NO: 1450897 - DNA, 15 bp, Homo sapiens
caaggtccagtgact

SEQ ID NO: 1450898 - DNA, 15 bp, Homo sapiens
aaggtccagtgactc

SEQ ID NO: 1450899 - DNA, 15 bp, Homo sapiens
aggtccagtgactca

SEQ ID NO: 1450900 - DNA, 15 bp, Homo sapiens
ggtccagtgactcaa

SEQ ID NO: 1450901 - DNA, 15 bp, Homo sapiens
gtccagtgactcaaa

SEQ ID NO: 1450902 - DNA, 15 bp, Homo sapiens
tccagtgactcaaaa

SEQ ID NO: 1450903 - DNA, 15 bp, Homo sapiens
ccagtgactcaaaat

SEQ ID NO: 1450904 - DNA, 15 bp, Homo sapiens
cagtgactcaaaatt

SEQ ID NO: 1450905 - DNA, 15 bp, Homo sapiens
agtgactcaaaattt

SEQ ID NO: 1450906 - DNA, 15 bp, Homo sapiens
gtgactcaaaatttc

SEQ ID NO: 1450907 - DNA, 15 bp, Homo sapiens
tgactcaaaatttcc

SEQ ID NO: 1450908 - DNA, 15 bp, Homo sapiens
gactcaaaatttccc

SEQ ID NO: 1450909 - DNA, 15 bp, Homo sapiens
actcaaaatttccct

SEQ ID NO: 1450910 - DNA, 15 bp, Homo sapiens
ctcaaaatttccctc

SEQ ID NO: 1450911 - DNA, 15 bp, Homo sapiens
tcaaaatttccctca

SEQ ID NO: 1450912 - DNA, 15 bp, Homo sapiens
caaaatttccctcaa

SEQ ID NO: 1450913 - DNA, 15 bp, Homo sapiens
aaaatttccctcaaa

SEQ ID NO: 1450914 - DNA, 15 bp, Homo sapiens
aatttccctcaaagt

SEQ ID NO: 1450915 - DNA, 15 bp, Homo sapiens
atttccctcaaagtt

SEQ ID NO: 1450916 - DNA, 15 bp, Homo sapiens
tttccctcaaagttt

SEQ ID NO: 1450917 - DNA, 15 bp, Homo sapiens
ttccctcaaagtttc

SEQ ID NO: 1450918 - DNA, 15 bp, Homo sapiens
tccctcaaagtttcc

SEQ ID NO: 1450919 - DNA, 15 bp, Homo sapiens
ccctcaaagtttcct

SEQ ID NO: 1450920 - DNA, 15 bp, Homo sapiens
cctcaaagtttccta

SEQ ID NO: 1450921 - DNA, 15 bp, Homo sapiens
ctcaaagtttcctac

SEQ ID NO: 1450922 - DNA, 15 bp, Homo sapiens
tcaaagtttcctaca

SEQ ID NO: 1450923 - DNA, 15 bp, Homo sapiens
caaagtttcctacaa

SEQ ID NO: 1450924 - DNA, 15 bp, Homo sapiens
aaagtttcctacaag

SEQ ID NO: 1450925 - DNA, 15 bp, Homo sapiens
aagtttcctacaaga

SEQ ID NO: 1450926 - DNA, 15 bp, Homo sapiens
agtttcctacaagaa

SEQ ID NO: 1450927 - DNA, 15 bp, Homo sapiens
gtttcctacaagaag

SEQ ID NO: 1450928 - DNA, 15 bp, Homo sapiens
tttcctacaagaagt

SEQ ID NO: 1450929 - DNA, 15 bp, Homo sapiens
ttcctacaagaagta

SEQ ID NO: 1450930 - DNA, 15 bp, Homo sapiens
tcctacaagaagtaa

SEQ ID NO: 1450931 - DNA, 15 bp, Homo sapiens
cctacaagaagtaat

SEQ ID NO: 1450932 - DNA, 15 bp, Homo sapiens
ctacaagaagtaata

SEQ ID NO: 1450933 - DNA, 15 bp, Homo sapiens
tacaagaagtaatac

SEQ ID NO: 1450934 - DNA, 15 bp, Homo sapiens
acaagaagtaatacg

SEQ ID NO: 1450935 - DNA, 15 bp, Homo sapiens
caagaagtaatacgt

SEQ ID NO: 1450936 - DNA, 15 bp, Homo sapiens
aagaagtaatacgtt

SEQ ID NO: 1450937 - DNA, 15 bp, Homo sapiens
agaagtaatacgtta

SEQ ID NO: 1450938 - DNA, 15 bp, Homo sapiens
gaagtaatacgttaa

SEQ ID NO: 1450939 - DNA, 15 bp, Homo sapiens
aagtaatacgttaaa

SEQ ID NO: 1450940 - DNA, 15 bp, Homo sapiens
agtaatacgttaaat

SEQ ID NO: 1450941 - DNA, 15 bp, Homo sapiens
gtaatacgttaaata

SEQ ID NO: 1450942 - DNA, 15 bp, Homo sapiens
taatacgttaaataa

SEQ ID NO: 1450943 - DNA, 15 bp, Homo sapiens
aatacgttaaataag

SEQ ID NO: 1450944 - DNA, 15 bp, Homo sapiens
atacgttaaataaga

SEQ ID NO: 1450945 - DNA, 15 bp, Homo sapiens
tacgttaaataagaa

SEQ ID NO: 1450946 - DNA, 15 bp, Homo sapiens
acgttaaataagaaa

SEQ ID NO: 1450947 - DNA, 15 bp, Homo sapiens
cgttaaataagaaaa

SEQ ID NO: 1450948 - DNA, 15 bp, Homo sapiens
gttaaataagaaaat

SEQ ID NO: 1450949 - DNA, 15 bp, Homo sapiens
ttaaataagaaaata

SEQ ID NO: 1450950 - DNA, 15 bp, Homo sapiens
taaataagaaaatat

SEQ ID NO: 1450951 - DNA, 15 bp, Homo sapiens
aaataagaaaatatt

SEQ ID NO: 1450952 - DNA, 15 bp, Homo sapiens
aataagaaaatattt

SEQ ID NO: 1450953 - DNA, 15 bp, Homo sapiens
ataagaaaatattta

SEQ ID NO: 1450954 - DNA, 15 bp, Homo sapiens
taagaaaatatttac

SEQ ID NO: 1450955 - DNA, 15 bp, Homo sapiens
aagaaaatatttact

SEQ ID NO: 1450956 - DNA, 15 bp, Homo sapiens
agaaaatatttactt

SEQ ID NO: 1450957 - DNA, 15 bp, Homo sapiens
gaaaatatttacttt

SEQ ID NO: 1450958 - DNA, 15 bp, Homo sapiens
aaaatatttactttt

SEQ ID NO: 1450959 - DNA, 15 bp, Homo sapiens
aaatatttactttta

SEQ ID NO: 1450960 - DNA, 15 bp, Homo sapiens
aatatttacttttat

SEQ ID NO: 1450961 - DNA, 15 bp, Homo sapiens
atatttacttttata

SEQ ID NO: 1450962 - DNA, 15 bp, Homo sapiens
tatttacttttatac

SEQ ID NO: 1450963 - DNA, 15 bp, Homo sapiens
atttacttttatacc

SEQ ID NO: 1450964 - DNA, 15 bp, Homo sapiens
tttacttttatacct

SEQ ID NO: 1450965 - DNA, 15 bp, Homo sapiens
ttacttttataccta

SEQ ID NO: 1450966 - DNA, 15 bp, Homo sapiens
tacttttatacctaa

SEQ ID NO: 1450967 - DNA, 15 bp, Homo sapiens
acttttatacctaac

SEQ ID NO: 1450968 - DNA, 15 bp, Homo sapiens
cttttatacctaact

SEQ ID NO: 1450969 - DNA, 15 bp, Homo sapiens
ttttatacctaacta

SEQ ID NO: 1450970 - DNA, 15 bp, Homo sapiens
tttatacctaactag

SEQ ID NO: 1450971 - DNA, 15 bp, Homo sapiens
ttatacctaactaga

SEQ ID NO: 1450972 - DNA, 15 bp, Homo sapiens
tatacctaactagat

SEQ ID NO: 1450973 - DNA, 15 bp, Homo sapiens
atacctaactagatt

SEQ ID NO: 1450974 - DNA, 15 bp, Homo sapiens
tacctaactagattg

SEQ ID NO: 1450975 - DNA, 15 bp, Homo sapiens
acctaactagattga

SEQ ID NO: 1450976 - DNA, 15 bp, Homo sapiens
cctaactagattgag

SEQ ID NO: 1450977 - DNA, 15 bp, Homo sapiens
ctaactagattgaga

SEQ ID NO: 1450978 - DNA, 15 bp, Homo sapiens
taactagattgagat

SEQ ID NO: 1450979 - DNA, 15 bp, Homo sapiens
aactagattgagata

SEQ ID NO: 1450980 - DNA, 15 bp, Homo sapiens
actagattgagatat

SEQ ID NO: 1450981 - DNA, 15 bp, Homo sapiens
ctagattgagatatt

SEQ ID NO: 1450982 - DNA, 15 bp, Homo sapiens
tagattgagatattt

SEQ ID NO: 1450983 - DNA, 15 bp, Homo sapiens
agattgagatattta

SEQ ID NO: 1450984 - DNA, 15 bp, Homo sapiens
gattgagatatttaa

SEQ ID NO: 1450985 - DNA, 15 bp, Homo sapiens
attgagatatttaaa

SEQ ID NO: 1450986 - DNA, 15 bp, Homo sapiens
ttgagatatttaaag

SEQ ID NO: 1450987 - DNA, 15 bp, Homo sapiens
tgagatatttaaaga

SEQ ID NO: 1450988 - DNA, 15 bp, Homo sapiens
gagatatttaaagaa

SEQ ID NO: 1450989 - DNA, 15 bp, Homo sapiens
agatatttaaagaaa

SEQ ID NO: 1450990 - DNA, 15 bp, Homo sapiens
gatatttaaagaaac

SEQ ID NO: 1450991 - DNA, 15 bp, Homo sapiens
atatttaaagaaaca

SEQ ID NO: 1450992 - DNA, 15 bp, Homo sapiens
tatttaaagaaacag

SEQ ID NO: 1450993 - DNA, 15 bp, Homo sapiens
atttaaagaaacaga

SEQ ID NO: 1450994 - DNA, 15 bp, Homo sapiens
tttaaagaaacagac

SEQ ID NO: 1450995 - DNA, 15 bp, Homo sapiens
ttaaagaaacagaca

SEQ ID NO: 1450996 - DNA, 15 bp, Homo sapiens
taaagaaacagacat

SEQ ID NO: 1450997 - DNA, 15 bp, Homo sapiens
aaagaaacagacata

SEQ ID NO: 1450998 - DNA, 15 bp, Homo sapiens
aagaaacagacataa

SEQ ID NO: 1450999 - DNA, 15 bp, Homo sapiens
agaaacagacataaa

SEQ ID NO: 1451000 - DNA, 15 bp, Homo sapiens
gaaacagacataaat

SEQ ID NO: 1451001 - DNA, 15 bp, Homo sapiens
aaacagacataaatg

SEQ ID NO: 1451002 - DNA, 15 bp, Homo sapiens
aacagacataaatgt

SEQ ID NO: 1451003 - DNA, 15 bp, Homo sapiens
acagacataaatgta

SEQ ID NO: 1451004 - DNA, 15 bp, Homo sapiens
cagacataaatgtaa

SEQ ID NO: 1451005 - DNA, 15 bp, Homo sapiens
agacataaatgtaat

SEQ ID NO: 1451006 - DNA, 15 bp, Homo sapiens
gacataaatgtaata

SEQ ID NO: 1451007 - DNA, 15 bp, Homo sapiens
acataaatgtaataa

SEQ ID NO: 1451008 - DNA, 15 bp, Homo sapiens
cataaatgtaataag

SEQ ID NO: 1451009 - DNA, 15 bp, Homo sapiens
ataaatgtaataaga

SEQ ID NO: 1451010 - DNA, 15 bp, Homo sapiens
taaatgtaataagaa

SEQ ID NO: 1451011 - DNA, 15 bp, Homo sapiens
aaatgtaataagaaa

SEQ ID NO: 1451012 - DNA, 15 bp, Homo sapiens
aatgtaataagaaac

SEQ ID NO: 1451013 - DNA, 15 bp, Homo sapiens
atgtaataagaaacc

SEQ ID NO: 1451014 - DNA, 15 bp, Homo sapiens
tgtaataagaaacct

SEQ ID NO: 1451015 - DNA, 15 bp, Homo sapiens
gtaataagaaacctc

SEQ ID NO: 1451016 - DNA, 15 bp, Homo sapiens
taataagaaacctcc

SEQ ID NO: 1451017 - DNA, 15 bp, Homo sapiens
aataagaaacctcca

SEQ ID NO: 1451018 - DNA, 15 bp, Homo sapiens
ataagaaacctccaa

SEQ ID NO: 1451019 - DNA, 15 bp, Homo sapiens
taagaaacctccaaa

SEQ ID NO: 1451020 - DNA, 15 bp, Homo sapiens
aagaaacctccaaat

SEQ ID NO: 1451021 - DNA, 15 bp, Homo sapiens
agaaacctccaaata

SEQ ID NO: 1451022 - DNA, 15 bp, Homo sapiens
gaaacctccaaatat

SEQ ID NO: 1451023 - DNA, 15 bp, Homo sapiens
aaacctccaaatatt

SEQ ID NO: 1451024 - DNA, 15 bp, Homo sapiens
aacctccaaatattc

SEQ ID NO: 1451025 - DNA, 15 bp, Homo sapiens
acctccaaatattct

SEQ ID NO: 1451026 - DNA, 15 bp, Homo sapiens
cctccaaatattcta

SEQ ID NO: 1451027 - DNA, 15 bp, Homo sapiens
ctccaaatattctat

SEQ ID NO: 1451028 - DNA, 15 bp, Homo sapiens
tccaaatattctatt

SEQ ID NO: 1451029 - DNA, 15 bp, Homo sapiens
ccaaatattctattt

SEQ ID NO: 1451030 - DNA, 15 bp, Homo sapiens
caaatattctatttt

SEQ ID NO: 1451031 - DNA, 15 bp, Homo sapiens
aaatattctatttta

SEQ ID NO: 1451032 - DNA, 15 bp, Homo sapiens
aatattctattttaa

SEQ ID NO: 1451033 - DNA, 15 bp, Homo sapiens
atattctattttaaa

SEQ ID NO: 1451034 - DNA, 15 bp, Homo sapiens
tattctattttaaat

SEQ ID NO: 1451035 - DNA, 15 bp, Homo sapiens
attctattttaaata

SEQ ID NO: 1451036 - DNA, 15 bp, Homo sapiens
ttctattttaaatag

SEQ ID NO: 1451037 - DNA, 15 bp, Homo sapiens
tctattttaaatagt

SEQ ID NO: 1451038 - DNA, 15 bp, Homo sapiens
ctattttaaatagta

SEQ ID NO: 1451039 - DNA, 15 bp, Homo sapiens
tattttaaatagtaa

SEQ ID NO: 1451040 - DNA, 15 bp, Homo sapiens
attttaaatagtaaa

SEQ ID NO: 1451041 - DNA, 15 bp, Homo sapiens
ttttaaatagtaaat

SEQ ID NO: 1451042 - DNA, 15 bp, Homo sapiens
tttaaatagtaaatt

SEQ ID NO: 1451043 - DNA, 15 bp, Homo sapiens
ttaaatagtaaattt

SEQ ID NO: 1451044 - DNA, 15 bp, Homo sapiens
taaatagtaaattta

SEQ ID NO: 1451045 - DNA, 15 bp, Homo sapiens
aaatagtaaatttat

SEQ ID NO: 1451046 - DNA, 15 bp, Homo sapiens
aatagtaaatttatt

SEQ ID NO: 1451047 - DNA, 15 bp, Homo sapiens
atagtaaatttattc

SEQ ID NO: 1451048 - DNA, 15 bp, Homo sapiens
tagtaaatttattct

SEQ ID NO: 1451049 - DNA, 15 bp, Homo sapiens
agtaaatttattcta

SEQ ID NO: 1451050 - DNA, 15 bp, Homo sapiens
gtaaatttattctaa

SEQ ID NO: 1451051 - DNA, 15 bp, Homo sapiens
taaatttattctaag

SEQ ID NO: 1451052 - DNA, 15 bp, Homo sapiens
aaatttattctaagt

SEQ ID NO: 1451053 - DNA, 15 bp, Homo sapiens
aatttattctaagtt

SEQ ID NO: 1451054 - DNA, 15 bp, Homo sapiens
atttattctaagttg

SEQ ID NO: 1451055 - DNA, 15 bp, Homo sapiens
tttattctaagttgc

SEQ ID NO: 1451056 - DNA, 15 bp, Homo sapiens
ttattctaagttgca

SEQ ID NO: 1451057 - DNA, 15 bp, Homo sapiens
tattctaagttgcaa

SEQ ID NO: 1451058 - DNA, 15 bp, Homo sapiens
attctaagttgcaat

SEQ ID NO: 1451059 - DNA, 15 bp, Homo sapiens
ttctaagttgcaatt

SEQ ID NO: 1451060 - DNA, 15 bp, Homo sapiens
tctaagttgcaattt

SEQ ID NO: 1451061 - DNA, 15 bp, Homo sapiens
ctaagttgcaatttt

SEQ ID NO: 1451062 - DNA, 15 bp, Homo sapiens
taagttgcaattttg

SEQ ID NO: 1451063 - DNA, 15 bp, Homo sapiens
aagttgcaattttgg

SEQ ID NO: 1451064 - DNA, 15 bp, Homo sapiens
agttgcaattttgga

SEQ ID NO: 1451065 - DNA, 15 bp, Homo sapiens
gttgcaattttggaa

SEQ ID NO: 1451066 - DNA, 15 bp, Homo sapiens
ttgcaattttggaaa

SEQ ID NO: 1451067 - DNA, 15 bp, Homo sapiens
tgcaattttggaaaa

SEQ ID NO: 1451068 - DNA, 15 bp, Homo sapiens
gcaattttggaaaat

SEQ ID NO: 1451069 - DNA, 15 bp, Homo sapiens
caattttggaaaatc

SEQ ID NO: 1451070 - DNA, 15 bp, Homo sapiens
aattttggaaaatca

SEQ ID NO: 1451071 - DNA, 15 bp, Homo sapiens
attttggaaaatcag

SEQ ID NO: 1451072 - DNA, 15 bp, Homo sapiens
ttttggaaaatcaga

SEQ ID NO: 1451073 - DNA, 15 bp, Homo sapiens
tttggaaaatcagac

SEQ ID NO: 1451074 - DNA, 15 bp, Homo sapiens
ttggaaaatcagact

SEQ ID NO: 1451075 - DNA, 15 bp, Homo sapiens
tggaaaatcagacta

SEQ ID NO: 1451076 - DNA, 15 bp, Homo sapiens
ggaaaatcagactaa

SEQ ID NO: 1451077 - DNA, 15 bp, Homo sapiens
gaaaatcagactaaa

SEQ ID NO: 1451078 - DNA, 15 bp, Homo sapiens
aaaatcagactaaaa

SEQ ID NO: 1451079 - DNA, 15 bp, Homo sapiens
aaatcagactaaaat

SEQ ID NO: 1451080 - DNA, 15 bp, Homo sapiens
aatcagactaaaatc

SEQ ID NO: 1451081 - DNA, 15 bp, Homo sapiens
atcagactaaaatca

SEQ ID NO: 1451082 - DNA, 15 bp, Homo sapiens
tcagactaaaatcag

SEQ ID NO: 1451083 - DNA, 15 bp, Homo sapiens
cagactaaaatcagc

SEQ ID NO: 1451084 - DNA, 15 bp, Homo sapiens
agactaaaatcagca

SEQ ID NO: 1451085 - DNA, 15 bp, Homo sapiens
gactaaaatcagcaa

SEQ ID NO: 1451086 - DNA, 15 bp, Homo sapiens
actaaaatcagcaaa

SEQ ID NO: 1451087 - DNA, 15 bp, Homo sapiens
ctaaaatcagcaaat

SEQ ID NO: 1451088 - DNA, 15 bp, Homo sapiens
taaaatcagcaaata

SEQ ID NO: 1451089 - DNA, 15 bp, Homo sapiens
aaaatcagcaaatac

SEQ ID NO: 1451090 - DNA, 15 bp, Homo sapiens
aaatcagcaaatact

SEQ ID NO: 1451091 - DNA, 15 bp, Homo sapiens
aatcagcaaatacta

SEQ ID NO: 1451092 - DNA, 15 bp, Homo sapiens
atcagcaaatactaa

SEQ ID NO: 1451093 - DNA, 15 bp, Homo sapiens
tcagcaaatactaat

SEQ ID NO: 1451094 - DNA, 15 bp, Homo sapiens
cagcaaatactaatg

SEQ ID NO: 1451095 - DNA, 15 bp, Homo sapiens
agcaaatactaatgt

SEQ ID NO: 1451096 - DNA, 15 bp, Homo sapiens
gcaaatactaatgtc

SEQ ID NO: 1451097 - DNA, 15 bp, Homo sapiens
caaatactaatgtct

SEQ ID NO: 1451098 - DNA, 15 bp, Homo sapiens
aaatactaatgtcta

SEQ ID NO: 1451099 - DNA, 15 bp, Homo sapiens
aatactaatgtctat

SEQ ID NO: 1451100 - DNA, 15 bp, Homo sapiens
atactaatgtctata

SEQ ID NO: 1451101 - DNA, 15 bp, Homo sapiens
tactaatgtctatat

SEQ ID NO: 1451102 - DNA, 15 bp, Homo sapiens
actaatgtctatatt

SEQ ID NO: 1451103 - DNA, 15 bp, Homo sapiens
ctaatgtctatatta

SEQ ID NO: 1451104 - DNA, 15 bp, Homo sapiens
taatgtctatattac

SEQ ID NO: 1451105 - DNA, 15 bp, Homo sapiens
aatgtctatattaca

SEQ ID NO: 1451106 - DNA, 15 bp, Homo sapiens
atgtctatattacag

SEQ ID NO: 1451107 - DNA, 15 bp, Homo sapiens
tgtctatattacagg

SEQ ID NO: 1451108 - DNA, 15 bp, Homo sapiens
gtctatattacaggg

SEQ ID NO: 1451109 - DNA, 15 bp, Homo sapiens
tctatattacaggga

SEQ ID NO: 1451110 - DNA, 15 bp, Homo sapiens
ctatattacagggaa

SEQ ID NO: 1451111 - DNA, 15 bp, Homo sapiens
tatattacagggaaa

SEQ ID NO: 1451112 - DNA, 15 bp, Homo sapiens
atattacagggaaaa

SEQ ID NO: 1451113 - DNA, 15 bp, Homo sapiens
tattacagggaaaaa

SEQ ID NO: 1451114 - DNA, 15 bp, Homo sapiens
attacagggaaaaac

SEQ ID NO: 1451115 - DNA, 15 bp, Homo sapiens
ttacagggaaaaacc

SEQ ID NO: 1451116 - DNA, 15 bp, Homo sapiens
tacagggaaaaacct

SEQ ID NO: 1451117 - DNA, 15 bp, Homo sapiens
acagggaaaaaccta

SEQ ID NO: 1451118 - DNA, 15 bp, Homo sapiens
cagggaaaaacctag

SEQ ID NO: 1451119 - DNA, 15 bp, Homo sapiens
agggaaaaacctaga

SEQ ID NO: 1451120 - DNA, 15 bp, Homo sapiens
gggaaaaacctagaa

SEQ ID NO: 1451121 - DNA, 15 bp, Homo sapiens
ggaaaaacctagaaa

SEQ ID NO: 1451122 - DNA, 15 bp, Homo sapiens
gaaaaacctagaaaa

SEQ ID NO: 1451123 - DNA, 15 bp, Homo sapiens
aaaaacctagaaaat

SEQ ID NO: 1451124 - DNA, 15 bp, Homo sapiens
aaaacctagaaaatc

SEQ ID NO: 1451125 - DNA, 15 bp, Homo sapiens
aaacctagaaaatct

SEQ ID NO: 1451126 - DNA, 15 bp, Homo sapiens
aacctagaaaatctc

SEQ ID NO: 1451127 - DNA, 15 bp, Homo sapiens
acctagaaaatctca

SEQ ID NO: 1451128 - DNA, 15 bp, Homo sapiens
cctagaaaatctcaa

SEQ ID NO: 1451129 - DNA, 15 bp, Homo sapiens
ctagaaaatctcaaa

SEQ ID NO: 1451130 - DNA, 15 bp, Homo sapiens
tagaaaatctcaaat

SEQ ID NO: 1451131 - DNA, 15 bp, Homo sapiens
agaaaatctcaaatt

SEQ ID NO: 1451132 - DNA, 15 bp, Homo sapiens
gaaaatctcaaatta

SEQ ID NO: 1451133 - DNA, 15 bp, Homo sapiens
aaaatctcaaattag

SEQ ID NO: 1451134 - DNA, 15 bp, Homo sapiens
aaatctcaaattagt

SEQ ID NO: 1451135 - DNA, 15 bp, Homo sapiens
aatctcaaattagtc

SEQ ID NO: 1451136 - DNA, 15 bp, Homo sapiens
atctcaaattagtcc

SEQ ID NO: 1451137 - DNA, 15 bp, Homo sapiens
tctcaaattagtcct

SEQ ID NO: 1451138 - DNA, 15 bp, Homo sapiens
ctcaaattagtcctc

SEQ ID NO: 1451139 - DNA, 15 bp, Homo sapiens
tcaaattagtcctct

SEQ ID NO: 1451140 - DNA, 15 bp, Homo sapiens
caaattagtcctcta

SEQ ID NO: 1451141 - DNA, 15 bp, Homo sapiens
aaattagtcctctag

SEQ ID NO: 1451142 - DNA, 15 bp, Homo sapiens
aattagtcctctagt

SEQ ID NO: 1451143 - DNA, 15 bp, Homo sapiens
attagtcctctagtt

SEQ ID NO: 1451144 - DNA, 15 bp, Homo sapiens
ttagtcctctagttt

SEQ ID NO: 1451145 - DNA, 15 bp, Homo sapiens
tagtcctctagtttg

SEQ ID NO: 1451146 - DNA, 15 bp, Homo sapiens
agtcctctagtttgt

SEQ ID NO: 1451147 - DNA, 15 bp, Homo sapiens
gtcctctagtttgtc

SEQ ID NO: 1451148 - DNA, 15 bp, Homo sapiens
tcctctagtttgtcc

SEQ ID NO: 1451149 - DNA, 15 bp, Homo sapiens
cctctagtttgtcct

SEQ ID NO: 1451150 - DNA, 15 bp, Homo sapiens
ctctagtttgtcctc

SEQ ID NO: 1451151 - DNA, 15 bp, Homo sapiens
tctagtttgtcctct

SEQ ID NO: 1451152 - DNA, 15 bp, Homo sapiens
ctagtttgtcctctc

SEQ ID NO: 1451153 - DNA, 15 bp, Homo sapiens
tagtttgtcctctca

SEQ ID NO: 1451154 - DNA, 15 bp, Homo sapiens
agtttgtcctctcaa

SEQ ID NO: 1451155 - DNA, 15 bp, Homo sapiens
gtttgtcctctcaaa

SEQ ID NO: 1451156 - DNA, 15 bp, Homo sapiens
tttgtcctctcaaat

SEQ ID NO: 1451157 - DNA, 15 bp, Homo sapiens
ttgtcctctcaaatt

SEQ ID NO: 1451158 - DNA, 15 bp, Homo sapiens
tgtcctctcaaattt

SEQ ID NO: 1451159 - DNA, 15 bp, Homo sapiens
gtcctctcaaattta

SEQ ID NO: 1451160 - DNA, 15 bp, Homo sapiens
tcctctcaaatttaa

SEQ ID NO: 1451161 - DNA, 15 bp, Homo sapiens
cctctcaaatttaaa

SEQ ID NO: 1451162 - DNA, 15 bp, Homo sapiens
ctctcaaatttaaaa

SEQ ID NO: 1451163 - DNA, 15 bp, Homo sapiens
tctcaaatttaaaaa

SEQ ID NO: 1451164 - DNA, 15 bp, Homo sapiens
ctcaaatttaaaaat

SEQ ID NO: 1451165 - DNA, 15 bp, Homo sapiens
tcaaatttaaaaata

SEQ ID NO: 1451166 - DNA, 15 bp, Homo sapiens
caaatttaaaaataa

SEQ ID NO: 1451167 - DNA, 15 bp, Homo sapiens
aaatttaaaaataac

SEQ ID NO: 1451168 - DNA, 15 bp, Homo sapiens
aatttaaaaataaca

SEQ ID NO: 1451169 - DNA, 15 bp, Homo sapiens
atttaaaaataacaa

SEQ ID NO: 1451170 - DNA, 15 bp, Homo sapiens
tttaaaaataacaaa

SEQ ID NO: 1451171 - DNA, 15 bp, Homo sapiens
ttaaaaataacaaaa

SEQ ID NO: 1451172 - DNA, 15 bp, Homo sapiens
taaaaataacaaaaa

SEQ ID NO: 1451173 - DNA, 15 bp, Homo sapiens
aaaaataacaaaaaa

SEQ ID NO: 1451174 - DNA, 15 bp, Homo sapiens
aaaataacaaaaaag

SEQ ID NO: 1451175 - DNA, 15 bp, Homo sapiens
aaataacaaaaaagg

SEQ ID NO: 1451176 - DNA, 15 bp, Homo sapiens
aataacaaaaaaggc

SEQ ID NO: 1451177 - DNA, 15 bp, Homo sapiens
ataacaaaaaaggct

SEQ ID NO: 1451178 - DNA, 15 bp, Homo sapiens
taacaaaaaaggctg

SEQ ID NO: 1451179 - DNA, 15 bp, Homo sapiens
aacaaaaaaggctgg

SEQ ID NO: 1451180 - DNA, 15 bp, Homo sapiens
acaaaaaaggctggg

SEQ ID NO: 1451181 - DNA, 15 bp, Homo sapiens
caaaaaaggctgggc

SEQ ID NO: 1451182 - DNA, 15 bp, Homo sapiens
aaaaaaggctgggcg

SEQ ID NO: 1451183 - DNA, 15 bp, Homo sapiens
aaaaaggctgggcgc

SEQ ID NO: 1451184 - DNA, 15 bp, Homo sapiens
aaaaggctgggcgcg

SEQ ID NO: 1451185 - DNA, 15 bp, Homo sapiens
aaaggctgggcgcgg

SEQ ID NO: 1451186 - DNA, 15 bp, Homo sapiens
aaggctgggcgcggt

SEQ ID NO: 1451187 - DNA, 15 bp, Homo sapiens
ggccgaggtgggcga

SEQ ID NO: 1451188 - DNA, 15 bp, Homo sapiens
gccgaggtgggcgaa

SEQ ID NO: 1451189 - DNA, 15 bp, Homo sapiens
ccgaggtgggcgaat

SEQ ID NO: 1451190 - DNA, 15 bp, Homo sapiens
cgaggtgggcgaatc

SEQ ID NO: 1451191 - DNA, 15 bp, Homo sapiens
gaggtgggcgaatca

SEQ ID NO: 1451192 - DNA, 15 bp, Homo sapiens
aggtgggcgaatcac

SEQ ID NO: 1451193 - DNA, 15 bp, Homo sapiens
ggtgggcgaatcacc

SEQ ID NO: 1451194 - DNA, 15 bp, Homo sapiens
gtgggcgaatcacct

SEQ ID NO: 1451195 - DNA, 15 bp, Homo sapiens
tgggcgaatcacctg

SEQ ID NO: 1451196 - DNA, 15 bp, Homo sapiens
gggcgaatcacctga

SEQ ID NO: 1451197 - DNA, 15 bp, Homo sapiens
ggcgaatcacctgag

SEQ ID NO: 1451198 - DNA, 15 bp, Homo sapiens
gcgaatcacctgagg

SEQ ID NO: 1451199 - DNA, 15 bp, Homo sapiens
cgaatcacctgaggt

SEQ ID NO: 1451200 - DNA, 15 bp, Homo sapiens
gaatcacctgaggtc

SEQ ID NO: 1451201 - DNA, 15 bp, Homo sapiens
aatcacctgaggtca

SEQ ID NO: 1451202 - DNA, 15 bp, Homo sapiens
cctgaggtcaggaga

SEQ ID NO: 1451203 - DNA, 15 bp, Homo sapiens
ctgaggtcaggagat

SEQ ID NO: 1451204 - DNA, 15 bp, Homo sapiens
ggtcaggagatcgaa

SEQ ID NO: 1451205 - DNA, 15 bp, Homo sapiens
gtcaggagatcgaaa

SEQ ID NO: 1451206 - DNA, 15 bp, Homo sapiens
tcaggagatcgaaac

SEQ ID NO: 1451207 - DNA, 15 bp, Homo sapiens
caggagatcgaaacc

SEQ ID NO: 1451208 - DNA, 15 bp, Homo sapiens
aggagatcgaaacca

SEQ ID NO: 1451209 - DNA, 15 bp, Homo sapiens
ggagatcgaaaccag

SEQ ID NO: 1451210 - DNA, 15 bp, Homo sapiens
gagatcgaaaccagt

SEQ ID NO: 1451211 - DNA, 15 bp, Homo sapiens
agatcgaaaccagtc

SEQ ID NO: 1451212 - DNA, 15 bp, Homo sapiens
gatcgaaaccagtct

SEQ ID NO: 1451213 - DNA, 15 bp, Homo sapiens
atcgaaaccagtctg

SEQ ID NO: 1451214 - DNA, 15 bp, Homo sapiens
tcgaaaccagtctgg

SEQ ID NO: 1451215 - DNA, 15 bp, Homo sapiens
cgaaaccagtctggc

SEQ ID NO: 1451216 - DNA, 15 bp, Homo sapiens
gaaaccagtctggcc

SEQ ID NO: 1451217 - DNA, 15 bp, Homo sapiens
aaaccagtctggcca

SEQ ID NO: 1451218 - DNA, 15 bp, Homo sapiens
aaccagtctggccaa

SEQ ID NO: 1451219 - DNA, 15 bp, Homo sapiens
accagtctggccaaa

SEQ ID NO: 1451220 - DNA, 15 bp, Homo sapiens
ccagtctggccaaaa

SEQ ID NO: 1451221 - DNA, 15 bp, Homo sapiens
cagtctggccaaaat

SEQ ID NO: 1451222 - DNA, 15 bp, Homo sapiens
agtctggccaaaatg

SEQ ID NO: 1451223 - DNA, 15 bp, Homo sapiens
gtctggccaaaatgg

SEQ ID NO: 1451224 - DNA, 15 bp, Homo sapiens
tctggccaaaatggc

SEQ ID NO: 1451225 - DNA, 15 bp, Homo sapiens
ctggccaaaatggca

SEQ ID NO: 1451226 - DNA, 15 bp, Homo sapiens
tggccaaaatggcaa

SEQ ID NO: 1451227 - DNA, 15 bp, Homo sapiens
ggccaaaatggcaaa

SEQ ID NO: 1451228 - DNA, 15 bp, Homo sapiens
gccaaaatggcaaaa

SEQ ID NO: 1451229 - DNA, 15 bp, Homo sapiens
ccaaaatggcaaaac

SEQ ID NO: 1451230 - DNA, 15 bp, Homo sapiens
caaaatggcaaaacc

SEQ ID NO: 1451231 - DNA, 15 bp, Homo sapiens
aaaatggcaaaaccc

SEQ ID NO: 1451232 - DNA, 15 bp, Homo sapiens
aaatggcaaaacccc

SEQ ID NO: 1451233 - DNA, 15 bp, Homo sapiens
aatggcaaaacccca

SEQ ID NO: 1451234 - DNA, 15 bp, Homo sapiens
gcgtggtggcaggca

SEQ ID NO: 1451235 - DNA, 15 bp, Homo sapiens
cgtggtggcaggcac

SEQ ID NO: 1451236 - DNA, 15 bp, Homo sapiens
gtggtggcaggcacc

SEQ ID NO: 1451237 - DNA, 15 bp, Homo sapiens
aggcacctgtaatcc

SEQ ID NO: 1451238 - DNA, 15 bp, Homo sapiens
ggcacctgtaatccc

SEQ ID NO: 1451239 - DNA, 15 bp, Homo sapiens
gcacctgtaatccca

SEQ ID NO: 1451240 - DNA, 15 bp, Homo sapiens
aggaggctaaggcaa

SEQ ID NO: 1451241 - DNA, 15 bp, Homo sapiens
ggaggctaaggcaaa

SEQ ID NO: 1451242 - DNA, 15 bp, Homo sapiens
gaggctaaggcaaaa

SEQ ID NO: 1451243 - DNA, 15 bp, Homo sapiens
aggctaaggcaaaag

SEQ ID NO: 1451244 - DNA, 15 bp, Homo sapiens
ggctaaggcaaaaga

SEQ ID NO: 1451245 - DNA, 15 bp, Homo sapiens
gctaaggcaaaagaa

SEQ ID NO: 1451246 - DNA, 15 bp, Homo sapiens
ctaaggcaaaagaat

SEQ ID NO: 1451247 - DNA, 15 bp, Homo sapiens
taaggcaaaagaatt

SEQ ID NO: 1451248 - DNA, 15 bp, Homo sapiens
aaggcaaaagaattg

SEQ ID NO: 1451249 - DNA, 15 bp, Homo sapiens
aggcaaaagaattgc

SEQ ID NO: 1451250 - DNA, 15 bp, Homo sapiens
ggcaaaagaattgct

SEQ ID NO: 1451251 - DNA, 15 bp, Homo sapiens
gcaaaagaattgctt

SEQ ID NO: 1451252 - DNA, 15 bp, Homo sapiens
caaaagaattgcttg

SEQ ID NO: 1451253 - DNA, 15 bp, Homo sapiens
aaaagaattgcttga

SEQ ID NO: 1451254 - DNA, 15 bp, Homo sapiens
aaagaattgcttgaa

SEQ ID NO: 1451255 - DNA, 15 bp, Homo sapiens
gaacccaggaagcaa

SEQ ID NO: 1451256 - DNA, 15 bp, Homo sapiens
aacccaggaagcaaa

SEQ ID NO: 1451257 - DNA, 15 bp, Homo sapiens
acccaggaagcaaag

SEQ ID NO: 1451258 - DNA, 15 bp, Homo sapiens
cccaggaagcaaagg

SEQ ID NO: 1451259 - DNA, 15 bp, Homo sapiens
ccaggaagcaaaggt

SEQ ID NO: 1451260 - DNA, 15 bp, Homo sapiens
caggaagcaaaggtt

SEQ ID NO: 1451261 - DNA, 15 bp, Homo sapiens
aggaagcaaaggttg

SEQ ID NO: 1451262 - DNA, 15 bp, Homo sapiens
ggaagcaaaggttgc

SEQ ID NO: 1451263 - DNA, 15 bp, Homo sapiens
gaagcaaaggttgca

SEQ ID NO: 1451264 - DNA, 15 bp, Homo sapiens
aagcaaaggttgcag

SEQ ID NO: 1451265 - DNA, 15 bp, Homo sapiens
agcaaaggttgcagt

SEQ ID NO: 1451266 - DNA, 15 bp, Homo sapiens
gcaaaggttgcagtg

SEQ ID NO: 1451267 - DNA, 15 bp, Homo sapiens
caaaggttgcagtga

SEQ ID NO: 1451268 - DNA, 15 bp, Homo sapiens
aaaggttgcagtgag

SEQ ID NO: 1451269 - DNA, 15 bp, Homo sapiens
cagtgagccgagata

SEQ ID NO: 1451270 - DNA, 15 bp, Homo sapiens
agtgagccgagatag

SEQ ID NO: 1451271 - DNA, 15 bp, Homo sapiens
gtgagccgagatagt

SEQ ID NO: 1451272 - DNA, 15 bp, Homo sapiens
tgagccgagatagtg

SEQ ID NO: 1451273 - DNA, 15 bp, Homo sapiens
gagccgagatagtgc

SEQ ID NO: 1451274 - DNA, 15 bp, Homo sapiens
agccgagatagtgcc

SEQ ID NO: 1451275 - DNA, 15 bp, Homo sapiens
gccgagatagtgccg

SEQ ID NO: 1451276 - DNA, 15 bp, Homo sapiens
ccgagatagtgccgc

SEQ ID NO: 1451277 - DNA, 15 bp, Homo sapiens
cgagatagtgccgct

SEQ ID NO: 1451278 - DNA, 15 bp, Homo sapiens
gagatagtgccgctg

SEQ ID NO: 1451279 - DNA, 15 bp, Homo sapiens
agatagtgccgctgc

SEQ ID NO: 1451280 - DNA, 15 bp, Homo sapiens
gatagtgccgctgca

SEQ ID NO: 1451281 - DNA, 15 bp, Homo sapiens
atagtgccgctgcac

SEQ ID NO: 1451282 - DNA, 15 bp, Homo sapiens
tagtgccgctgcact

SEQ ID NO: 1451283 - DNA, 15 bp, Homo sapiens
agtgccgctgcactc

SEQ ID NO: 1451284 - DNA, 15 bp, Homo sapiens
gtgccgctgcactcc

SEQ ID NO: 1451285 - DNA, 15 bp, Homo sapiens
tgccgctgcactcca

SEQ ID NO: 1451286 - DNA, 15 bp, Homo sapiens
gccgctgcactccag

SEQ ID NO: 1451287 - DNA, 15 bp, Homo sapiens
ctccatctcaaataa

SEQ ID NO: 1451288 - DNA, 15 bp, Homo sapiens
taaataaataaatcc

SEQ ID NO: 1451289 - DNA, 15 bp, Homo sapiens
aaataaataaatcca

SEQ ID NO: 1451290 - DNA, 15 bp, Homo sapiens
aataaataaatccaa

SEQ ID NO: 1451291 - DNA, 15 bp, Homo sapiens
ataaataaatccaaa

SEQ ID NO: 1451292 - DNA, 15 bp, Homo sapiens
taaataaatccaaaa

SEQ ID NO: 1451293 - DNA, 15 bp, Homo sapiens
aaataaatccaaaaa

SEQ ID NO: 1451294 - DNA, 15 bp, Homo sapiens
aataaatccaaaaag

SEQ ID NO: 1451295 - DNA, 15 bp, Homo sapiens
ataaatccaaaaaga

SEQ ID NO: 1451296 - DNA, 15 bp, Homo sapiens
taaatccaaaaagac

SEQ ID NO: 1451297 - DNA, 15 bp, Homo sapiens
atccaaaaagaccta

SEQ ID NO: 1451298 - DNA, 15 bp, Homo sapiens
tccaaaaagacctat

SEQ ID NO: 1451299 - DNA, 15 bp, Homo sapiens
ccaaaaagacctata

SEQ ID NO: 1451300 - DNA, 15 bp, Homo sapiens
caaaaagacctataa

SEQ ID NO: 1451301 - DNA, 15 bp, Homo sapiens
aaaaagacctataaa

SEQ ID NO: 1451302 - DNA, 15 bp, Homo sapiens
aaaagacctataaaa

SEQ ID NO: 1451303 - DNA, 15 bp, Homo sapiens
aaagacctataaaaa

SEQ ID NO: 1451304 - DNA, 15 bp, Homo sapiens
aagacctataaaaaa

SEQ ID NO: 1451305 - DNA, 15 bp, Homo sapiens
agacctataaaaaac

SEQ ID NO: 1451306 - DNA, 15 bp, Homo sapiens
gacctataaaaaact

SEQ ID NO: 1451307 - DNA, 15 bp, Homo sapiens
acctataaaaaactg

SEQ ID NO: 1451308 - DNA, 15 bp, Homo sapiens
cctataaaaaactgc

SEQ ID NO: 1451309 - DNA, 15 bp, Homo sapiens
ctataaaaaactgcc

SEQ ID NO: 1451310 - DNA, 15 bp, Homo sapiens
tataaaaaactgcca

SEQ ID NO: 1451311 - DNA, 15 bp, Homo sapiens
ataaaaaactgccag

SEQ ID NO: 1451312 - DNA, 15 bp, Homo sapiens
taaaaaactgccagt

SEQ ID NO: 1451313 - DNA, 15 bp, Homo sapiens
aaaaaactgccagta

SEQ ID NO: 1451314 - DNA, 15 bp, Homo sapiens
aaaaactgccagtaa

SEQ ID NO: 1451315 - DNA, 15 bp, Homo sapiens
aaaactgccagtaat

SEQ ID NO: 1451316 - DNA, 15 bp, Homo sapiens
aaactgccagtaatg

SEQ ID NO: 1451317 - DNA, 15 bp, Homo sapiens
aactgccagtaatgc

SEQ ID NO: 1451318 - DNA, 15 bp, Homo sapiens
actgccagtaatgca

SEQ ID NO: 1451319 - DNA, 15 bp, Homo sapiens
ctgccagtaatgcat

SEQ ID NO: 1451320 - DNA, 15 bp, Homo sapiens
tgccagtaatgcatc

SEQ ID NO: 1451321 - DNA, 15 bp, Homo sapiens
gccagtaatgcatcc

SEQ ID NO: 1451322 - DNA, 15 bp, Homo sapiens
ccagtaatgcatccc

SEQ ID NO: 1451323 - DNA, 15 bp, Homo sapiens
cagtaatgcatccca

SEQ ID NO: 1451324 - DNA, 15 bp, Homo sapiens
agtaatgcatcccaa

SEQ ID NO: 1451325 - DNA, 15 bp, Homo sapiens
gtaatgcatcccaaa

SEQ ID NO: 1451326 - DNA, 15 bp, Homo sapiens
taatgcatcccaaat

SEQ ID NO: 1451327 - DNA, 15 bp, Homo sapiens
aatgcatcccaaatg

SEQ ID NO: 1451328 - DNA, 15 bp, Homo sapiens
atgcatcccaaatga

SEQ ID NO: 1451329 - DNA, 15 bp, Homo sapiens
tgcatcccaaatgaa

SEQ ID NO: 1451330 - DNA, 15 bp, Homo sapiens
gcatcccaaatgaaa

SEQ ID NO: 1451331 - DNA, 15 bp, Homo sapiens
catcccaaatgaaac

SEQ ID NO: 1451332 - DNA, 15 bp, Homo sapiens
atcccaaatgaaaca

SEQ ID NO: 1451333 - DNA, 15 bp, Homo sapiens
tcccaaatgaaacaa

SEQ ID NO: 1451334 - DNA, 15 bp, Homo sapiens
cccaaatgaaacaaa

SEQ ID NO: 1451335 - DNA, 15 bp, Homo sapiens
ccaaatgaaacaaat

SEQ ID NO: 1451336 - DNA, 15 bp, Homo sapiens
caaatgaaacaaatt

SEQ ID NO: 1451337 - DNA, 15 bp, Homo sapiens
aaatgaaacaaattt

SEQ ID NO: 1451338 - DNA, 15 bp, Homo sapiens
aatgaaacaaatttg

SEQ ID NO: 1451339 - DNA, 15 bp, Homo sapiens
atgaaacaaatttgc

SEQ ID NO: 1451340 - DNA, 15 bp, Homo sapiens
tgaaacaaatttgcc

SEQ ID NO: 1451341 - DNA, 15 bp, Homo sapiens
gaaacaaatttgccc

SEQ ID NO: 1451342 - DNA, 15 bp, Homo sapiens
aaacaaatttgcccc

SEQ ID NO: 1451343 - DNA, 15 bp, Homo sapiens
aacaaatttgcccct

SEQ ID NO: 1451344 - DNA, 15 bp, Homo sapiens
acaaatttgcccctt

SEQ ID NO: 1451345 - DNA, 15 bp, Homo sapiens
caaatttgccccttc

SEQ ID NO: 1451346 - DNA, 15 bp, Homo sapiens
aaatttgccccttct

SEQ ID NO: 1451347 - DNA, 15 bp, Homo sapiens
aatttgccccttctc

SEQ ID NO: 1451348 - DNA, 15 bp, Homo sapiens
atttgccccttctct

SEQ ID NO: 1451349 - DNA, 15 bp, Homo sapiens
tttgccccttctctt

SEQ ID NO: 1451350 - DNA, 15 bp, Homo sapiens
ttgccccttctcttc

SEQ ID NO: 1451351 - DNA, 15 bp, Homo sapiens
tgccccttctcttca

SEQ ID NO: 1451352 - DNA, 15 bp, Homo sapiens
gccccttctcttcag

SEQ ID NO: 1451353 - DNA, 15 bp, Homo sapiens
ccccttctcttcaga

SEQ ID NO: 1451354 - DNA, 15 bp, Homo sapiens
cccttctcttcagaa

SEQ ID NO: 1451355 - DNA, 15 bp, Homo sapiens
ccttctcttcagaag

SEQ ID NO: 1451356 - DNA, 15 bp, Homo sapiens
cttctcttcagaagt

SEQ ID NO: 1451357 - DNA, 15 bp, Homo sapiens
ttctcttcagaagta

SEQ ID NO: 1451358 - DNA, 15 bp, Homo sapiens
tctcttcagaagtag

SEQ ID NO: 1451359 - DNA, 15 bp, Homo sapiens
ctcttcagaagtagc

SEQ ID NO: 1451360 - DNA, 15 bp, Homo sapiens
tcttcagaagtagct

SEQ ID NO: 1451361 - DNA, 15 bp, Homo sapiens
cttcagaagtagctc

SEQ ID NO: 1451362 - DNA, 15 bp, Homo sapiens
ttcagaagtagctca

SEQ ID NO: 1451363 - DNA, 15 bp, Homo sapiens
tcagaagtagctcaa

SEQ ID NO: 1451364 - DNA, 15 bp, Homo sapiens
cagaagtagctcaat

SEQ ID NO: 1451365 - DNA, 15 bp, Homo sapiens
agaagtagctcaatg

SEQ ID NO: 1451366 - DNA, 15 bp, Homo sapiens
gaagtagctcaatgc

SEQ ID NO: 1451367 - DNA, 15 bp, Homo sapiens
aagtagctcaatgct

SEQ ID NO: 1451368 - DNA, 15 bp, Homo sapiens
agtagctcaatgcta

SEQ ID NO: 1451369 - DNA, 15 bp, Homo sapiens
gtagctcaatgctat

SEQ ID NO: 1451370 - DNA, 15 bp, Homo sapiens
tagctcaatgctatt

SEQ ID NO: 1451371 - DNA, 15 bp, Homo sapiens
agctcaatgctattc

SEQ ID NO: 1451372 - DNA, 15 bp, Homo sapiens
gctcaatgctattca

SEQ ID NO: 1451373 - DNA, 15 bp, Homo sapiens
ctcaatgctattcag

SEQ ID NO: 1451374 - DNA, 15 bp, Homo sapiens
tcaatgctattcagt

SEQ ID NO: 1451375 - DNA, 15 bp, Homo sapiens
caatgctattcagta

SEQ ID NO: 1451376 - DNA, 15 bp, Homo sapiens
aatgctattcagtaa

SEQ ID NO: 1451377 - DNA, 15 bp, Homo sapiens
atgctattcagtaat

SEQ ID NO: 1451378 - DNA, 15 bp, Homo sapiens
tgctattcagtaatc

SEQ ID NO: 1451379 - DNA, 15 bp, Homo sapiens
gctattcagtaatcc

SEQ ID NO: 1451380 - DNA, 15 bp, Homo sapiens
ctattcagtaatcca

SEQ ID NO: 1451381 - DNA, 15 bp, Homo sapiens
tattcagtaatccac

SEQ ID NO: 1451382 - DNA, 15 bp, Homo sapiens
attcagtaatccaca

SEQ ID NO: 1451383 - DNA, 15 bp, Homo sapiens
ttcagtaatccacaa

SEQ ID NO: 1451384 - DNA, 15 bp, Homo sapiens
tcagtaatccacaaa

SEQ ID NO: 1451385 - DNA, 15 bp, Homo sapiens
cagtaatccacaaat

SEQ ID NO: 1451386 - DNA, 15 bp, Homo sapiens
agtaatccacaaatt

SEQ ID NO: 1451387 - DNA, 15 bp, Homo sapiens
gtaatccacaaattt

SEQ ID NO: 1451388 - DNA, 15 bp, Homo sapiens
taatccacaaatttt

SEQ ID NO: 1451389 - DNA, 15 bp, Homo sapiens
aatccacaaattttc

SEQ ID NO: 1451390 - DNA, 15 bp, Homo sapiens
atccacaaattttct

SEQ ID NO: 1451391 - DNA, 15 bp, Homo sapiens
tccacaaattttcta

SEQ ID NO: 1451392 - DNA, 15 bp, Homo sapiens
ccacaaattttctaa

SEQ ID NO: 1451393 - DNA, 15 bp, Homo sapiens
cacaaattttctaag

SEQ ID NO: 1451394 - DNA, 15 bp, Homo sapiens
acaaattttctaagt

SEQ ID NO: 1451395 - DNA, 15 bp, Homo sapiens
caaattttctaagta

SEQ ID NO: 1451396 - DNA, 15 bp, Homo sapiens
aaattttctaagtac

SEQ ID NO: 1451397 - DNA, 15 bp, Homo sapiens
aattttctaagtact

SEQ ID NO: 1451398 - DNA, 15 bp, Homo sapiens
attttctaagtacta

SEQ ID NO: 1451399 - DNA, 15 bp, Homo sapiens
ttttctaagtactac

SEQ ID NO: 1451400 - DNA, 15 bp, Homo sapiens
tttctaagtactacg

SEQ ID NO: 1451401 - DNA, 15 bp, Homo sapiens
ttctaagtactacgt

SEQ ID NO: 1451402 - DNA, 15 bp, Homo sapiens
tctaagtactacgtg

SEQ ID NO: 1451403 - DNA, 15 bp, Homo sapiens
ctaagtactacgtgg

SEQ ID NO: 1451404 - DNA, 15 bp, Homo sapiens
taagtactacgtgga

SEQ ID NO: 1451405 - DNA, 15 bp, Homo sapiens
aagtactacgtggat

SEQ ID NO: 1451406 - DNA, 15 bp, Homo sapiens
agtactacgtggatc

SEQ ID NO: 1451407 - DNA, 15 bp, Homo sapiens
gtactacgtggatct

SEQ ID NO: 1451408 - DNA, 15 bp, Homo sapiens
tactacgtggatctc

SEQ ID NO: 1451409 - DNA, 15 bp, Homo sapiens
actacgtggatctcc

SEQ ID NO: 1451410 - DNA, 15 bp, Homo sapiens
ctacgtggatctcca

SEQ ID NO: 1451411 - DNA, 15 bp, Homo sapiens
tacgtggatctccag

SEQ ID NO: 1451412 - DNA, 15 bp, Homo sapiens
acgtggatctccagt

SEQ ID NO: 1451413 - DNA, 15 bp, Homo sapiens
cgtggatctccagtg

SEQ ID NO: 1451414 - DNA, 15 bp, Homo sapiens
gtggatctccagtga

SEQ ID NO: 1451415 - DNA, 15 bp, Homo sapiens
tggatctccagtgat

SEQ ID NO: 1451416 - DNA, 15 bp, Homo sapiens
ggatctccagtgata

SEQ ID NO: 1451417 - DNA, 15 bp, Homo sapiens
gatctccagtgataa

SEQ ID NO: 1451418 - DNA, 15 bp, Homo sapiens
atctccagtgataat

SEQ ID NO: 1451419 - DNA, 15 bp, Homo sapiens
tctccagtgataatg

SEQ ID NO: 1451420 - DNA, 15 bp, Homo sapiens
ctccagtgataatga

SEQ ID NO: 1451421 - DNA, 15 bp, Homo sapiens
tccagtgataatgaa

SEQ ID NO: 1451422 - DNA, 15 bp, Homo sapiens
ccagtgataatgaag

SEQ ID NO: 1451423 - DNA, 15 bp, Homo sapiens
cagtgataatgaaga

SEQ ID NO: 1451424 - DNA, 15 bp, Homo sapiens
agtgataatgaagat

SEQ ID NO: 1451425 - DNA, 15 bp, Homo sapiens
gtgataatgaagatg

SEQ ID NO: 1451426 - DNA, 15 bp, Homo sapiens
tgataatgaagatga

SEQ ID NO: 1451427 - DNA, 15 bp, Homo sapiens
gataatgaagatgag

SEQ ID NO: 1451428 - DNA, 15 bp, Homo sapiens
ataatgaagatgaga

SEQ ID NO: 1451429 - DNA, 15 bp, Homo sapiens
taatgaagatgagag

SEQ ID NO: 1451430 - DNA, 15 bp, Homo sapiens
aatgaagatgagagg

SEQ ID NO: 1451431 - DNA, 15 bp, Homo sapiens
atgaagatgagaggg

SEQ ID NO: 1451432 - DNA, 15 bp, Homo sapiens
tgaagatgagagggt

SEQ ID NO: 1451433 - DNA, 15 bp, Homo sapiens
gaagatgagagggta

SEQ ID NO: 1451434 - DNA, 15 bp, Homo sapiens
aagatgagagggtaa

SEQ ID NO: 1451435 - DNA, 15 bp, Homo sapiens
agatgagagggtaat

SEQ ID NO: 1451436 - DNA, 15 bp, Homo sapiens
gatgagagggtaatg

SEQ ID NO: 1451437 - DNA, 15 bp, Homo sapiens
atgagagggtaatgt

SEQ ID NO: 1451438 - DNA, 15 bp, Homo sapiens
tgagagggtaatgtt

SEQ ID NO: 1451439 - DNA, 15 bp, Homo sapiens
gagagggtaatgttt

SEQ ID NO: 1451440 - DNA, 15 bp, Homo sapiens
agagggtaatgttta

SEQ ID NO: 1451441 - DNA, 15 bp, Homo sapiens
gagggtaatgtttaa

SEQ ID NO: 1451442 - DNA, 15 bp, Homo sapiens
agggtaatgtttaat

SEQ ID NO: 1451443 - DNA, 15 bp, Homo sapiens
gggtaatgtttaatt

SEQ ID NO: 1451444 - DNA, 15 bp, Homo sapiens
ggtaatgtttaattg

SEQ ID NO: 1451445 - DNA, 15 bp, Homo sapiens
gtaatgtttaattga

SEQ ID NO: 1451446 - DNA, 15 bp, Homo sapiens
taatgtttaattgag

SEQ ID NO: 1451447 - DNA, 15 bp, Homo sapiens
aatgtttaattgagc

SEQ ID NO: 1451448 - DNA, 15 bp, Homo sapiens
atgtttaattgagct

SEQ ID NO: 1451449 - DNA, 15 bp, Homo sapiens
tgtttaattgagctc

SEQ ID NO: 1451450 - DNA, 15 bp, Homo sapiens
gtttaattgagctct

SEQ ID NO: 1451451 - DNA, 15 bp, Homo sapiens
tttaattgagctctt

SEQ ID NO: 1451452 - DNA, 15 bp, Homo sapiens
ttaattgagctctta

SEQ ID NO: 1451453 - DNA, 15 bp, Homo sapiens
taattgagctcttac

SEQ ID NO: 1451454 - DNA, 15 bp, Homo sapiens
aattgagctcttact

SEQ ID NO: 1451455 - DNA, 15 bp, Homo sapiens
attgagctcttacta

SEQ ID NO: 1451456 - DNA, 15 bp, Homo sapiens
ttgagctcttactat

SEQ ID NO: 1451457 - DNA, 15 bp, Homo sapiens
tgagctcttactatt

SEQ ID NO: 1451458 - DNA, 15 bp, Homo sapiens
gagctcttactattt

SEQ ID NO: 1451459 - DNA, 15 bp, Homo sapiens
agctcttactattta

SEQ ID NO: 1451460 - DNA, 15 bp, Homo sapiens
gctcttactatttac

SEQ ID NO: 1451461 - DNA, 15 bp, Homo sapiens
ctcttactatttacc

SEQ ID NO: 1451462 - DNA, 15 bp, Homo sapiens
tcttactatttacca

SEQ ID NO: 1451463 - DNA, 15 bp, Homo sapiens
cttactatttaccag

SEQ ID NO: 1451464 - DNA, 15 bp, Homo sapiens
ttactatttaccagg

SEQ ID NO: 1451465 - DNA, 15 bp, Homo sapiens
tactatttaccaggc

SEQ ID NO: 1451466 - DNA, 15 bp, Homo sapiens
actatttaccaggca

SEQ ID NO: 1451467 - DNA, 15 bp, Homo sapiens
ctatttaccaggcaa

SEQ ID NO: 1451468 - DNA, 15 bp, Homo sapiens
tatttaccaggcaat

SEQ ID NO: 1451469 - DNA, 15 bp, Homo sapiens
atttaccaggcaatg

SEQ ID NO: 1451470 - DNA, 15 bp, Homo sapiens
tttaccaggcaatgt

SEQ ID NO: 1451471 - DNA, 15 bp, Homo sapiens
ttaccaggcaatgtg

SEQ ID NO: 1451472 - DNA, 15 bp, Homo sapiens
taccaggcaatgtgc

SEQ ID NO: 1451473 - DNA, 15 bp, Homo sapiens
accaggcaatgtgct

SEQ ID NO: 1451474 - DNA, 15 bp, Homo sapiens
ccaggcaatgtgcta

SEQ ID NO: 1451475 - DNA, 15 bp, Homo sapiens
caggcaatgtgctaa

SEQ ID NO: 1451476 - DNA, 15 bp, Homo sapiens
aggcaatgtgctaaa

SEQ ID NO: 1451477 - DNA, 15 bp, Homo sapiens
ggcaatgtgctaaac

SEQ ID NO: 1451478 - DNA, 15 bp, Homo sapiens
gcaatgtgctaaaca

SEQ ID NO: 1451479 - DNA, 15 bp, Homo sapiens
caatgtgctaaacat

SEQ ID NO: 1451480 - DNA, 15 bp, Homo sapiens
aatgtgctaaacatt

SEQ ID NO: 1451481 - DNA, 15 bp, Homo sapiens
atgtgctaaacatta

SEQ ID NO: 1451482 - DNA, 15 bp, Homo sapiens
tgtgctaaacattaa

SEQ ID NO: 1451483 - DNA, 15 bp, Homo sapiens
gtgctaaacattaat

SEQ ID NO: 1451484 - DNA, 15 bp, Homo sapiens
tgctaaacattaatc

SEQ ID NO: 1451485 - DNA, 15 bp, Homo sapiens
gctaaacattaatca

SEQ ID NO: 1451486 - DNA, 15 bp, Homo sapiens
ctaaacattaatcat

SEQ ID NO: 1451487 - DNA, 15 bp, Homo sapiens
taaacattaatcatg

SEQ ID NO: 1451488 - DNA, 15 bp, Homo sapiens
aaacattaatcatgt

SEQ ID NO: 1451489 - DNA, 15 bp, Homo sapiens
aacattaatcatgta

SEQ ID NO: 1451490 - DNA, 15 bp, Homo sapiens
acattaatcatgtac

SEQ ID NO: 1451491 - DNA, 15 bp, Homo sapiens
cattaatcatgtaca

SEQ ID NO: 1451492 - DNA, 15 bp, Homo sapiens
attaatcatgtacat

SEQ ID NO: 1451493 - DNA, 15 bp, Homo sapiens
ttaatcatgtacatc

SEQ ID NO: 1451494 - DNA, 15 bp, Homo sapiens
taatcatgtacatct

SEQ ID NO: 1451495 - DNA, 15 bp, Homo sapiens
aatcatgtacatcta

SEQ ID NO: 1451496 - DNA, 15 bp, Homo sapiens
atcatgtacatctaa

SEQ ID NO: 1451497 - DNA, 15 bp, Homo sapiens
tcatgtacatctaat

SEQ ID NO: 1451498 - DNA, 15 bp, Homo sapiens
catgtacatctaatt

SEQ ID NO: 1451499 - DNA, 15 bp, Homo sapiens
atgtacatctaatta

SEQ ID NO: 1451500 - DNA, 15 bp, Homo sapiens
tgtacatctaattaa

SEQ ID NO: 1451501 - DNA, 15 bp, Homo sapiens
gtacatctaattaat

SEQ ID NO: 1451502 - DNA, 15 bp, Homo sapiens
tacatctaattaatc

SEQ ID NO: 1451503 - DNA, 15 bp, Homo sapiens
acatctaattaatcc

SEQ ID NO: 1451504 - DNA, 15 bp, Homo sapiens
catctaattaatcca

SEQ ID NO: 1451505 - DNA, 15 bp, Homo sapiens
atctaattaatccac

SEQ ID NO: 1451506 - DNA, 15 bp, Homo sapiens
tctaattaatccaca

SEQ ID NO: 1451507 - DNA, 15 bp, Homo sapiens
ctaattaatccacag

SEQ ID NO: 1451508 - DNA, 15 bp, Homo sapiens
taattaatccacaga

SEQ ID NO: 1451509 - DNA, 15 bp, Homo sapiens
aattaatccacagaa

SEQ ID NO: 1451510 - DNA, 15 bp, Homo sapiens
attaatccacagaat

SEQ ID NO: 1451511 - DNA, 15 bp, Homo sapiens
ttaatccacagaata

SEQ ID NO: 1451512 - DNA, 15 bp, Homo sapiens
taatccacagaataa

SEQ ID NO: 1451513 - DNA, 15 bp, Homo sapiens
aatccacagaataag

SEQ ID NO: 1451514 - DNA, 15 bp, Homo sapiens
atccacagaataagg

SEQ ID NO: 1451515 - DNA, 15 bp, Homo sapiens
tccacagaataaggt

SEQ ID NO: 1451516 - DNA, 15 bp, Homo sapiens
ccacagaataaggta

SEQ ID NO: 1451517 - DNA, 15 bp, Homo sapiens
cacagaataaggtag

SEQ ID NO: 1451518 - DNA, 15 bp, Homo sapiens
acagaataaggtagg

SEQ ID NO: 1451519 - DNA, 15 bp, Homo sapiens
cagaataaggtaggt

SEQ ID NO: 1451520 - DNA, 15 bp, Homo sapiens
agaataaggtaggta

SEQ ID NO: 1451521 - DNA, 15 bp, Homo sapiens
gaataaggtaggtac

SEQ ID NO: 1451522 - DNA, 15 bp, Homo sapiens
aataaggtaggtact

SEQ ID NO: 1451523 - DNA, 15 bp, Homo sapiens
ataaggtaggtacta

SEQ ID NO: 1451524 - DNA, 15 bp, Homo sapiens
taaggtaggtactac

SEQ ID NO: 1451525 - DNA, 15 bp, Homo sapiens
aaggtaggtactact

SEQ ID NO: 1451526 - DNA, 15 bp, Homo sapiens
aggtaggtactactt

SEQ ID NO: 1451527 - DNA, 15 bp, Homo sapiens
ggtaggtactactta

SEQ ID NO: 1451528 - DNA, 15 bp, Homo sapiens
gtaggtactacttat

SEQ ID NO: 1451529 - DNA, 15 bp, Homo sapiens
taggtactacttatt

SEQ ID NO: 1451530 - DNA, 15 bp, Homo sapiens
aggtactacttatta

SEQ ID NO: 1451531 - DNA, 15 bp, Homo sapiens
ggtactacttattaa

SEQ ID NO: 1451532 - DNA, 15 bp, Homo sapiens
gtactacttattaac

SEQ ID NO: 1451533 - DNA, 15 bp, Homo sapiens
tactacttattaact

SEQ ID NO: 1451534 - DNA, 15 bp, Homo sapiens
actacttattaactc

SEQ ID NO: 1451535 - DNA, 15 bp, Homo sapiens
ctacttattaactca

SEQ ID NO: 1451536 - DNA, 15 bp, Homo sapiens
tacttattaactcaa

SEQ ID NO: 1451537 - DNA, 15 bp, Homo sapiens
acttattaactcaat

SEQ ID NO: 1451538 - DNA, 15 bp, Homo sapiens
cttattaactcaatt

SEQ ID NO: 1451539 - DNA, 15 bp, Homo sapiens
ttattaactcaattt

SEQ ID NO: 1451540 - DNA, 15 bp, Homo sapiens
tattaactcaatttt

SEQ ID NO: 1451541 - DNA, 15 bp, Homo sapiens
attaactcaatttta

SEQ ID NO: 1451542 - DNA, 15 bp, Homo sapiens
ttaactcaattttat

SEQ ID NO: 1451543 - DNA, 15 bp, Homo sapiens
taactcaattttata

SEQ ID NO: 1451544 - DNA, 15 bp, Homo sapiens
aactcaattttataa

SEQ ID NO: 1451545 - DNA, 15 bp, Homo sapiens
actcaattttataat

SEQ ID NO: 1451546 - DNA, 15 bp, Homo sapiens
ctcaattttataatt

SEQ ID NO: 1451547 - DNA, 15 bp, Homo sapiens
tcaattttataatta

SEQ ID NO: 1451548 - DNA, 15 bp, Homo sapiens
caattttataattaa

SEQ ID NO: 1451549 - DNA, 15 bp, Homo sapiens
aattttataattaag

SEQ ID NO: 1451550 - DNA, 15 bp, Homo sapiens
attttataattaaga

SEQ ID NO: 1451551 - DNA, 15 bp, Homo sapiens
ttttataattaagaa

SEQ ID NO: 1451552 - DNA, 15 bp, Homo sapiens
tttataattaagaaa

SEQ ID NO: 1451553 - DNA, 15 bp, Homo sapiens
ttataattaagaaat

SEQ ID NO: 1451554 - DNA, 15 bp, Homo sapiens
tataattaagaaatg

SEQ ID NO: 1451555 - DNA, 15 bp, Homo sapiens
ataattaagaaatga

SEQ ID NO: 1451556 - DNA, 15 bp, Homo sapiens
taattaagaaatgaa

SEQ ID NO: 1451557 - DNA, 15 bp, Homo sapiens
aattaagaaatgaag

SEQ ID NO: 1451558 - DNA, 15 bp, Homo sapiens
attaagaaatgaagg

SEQ ID NO: 1451559 - DNA, 15 bp, Homo sapiens
ttaagaaatgaaggc

SEQ ID NO: 1451560 - DNA, 15 bp, Homo sapiens
taagaaatgaaggcc

SEQ ID NO: 1451561 - DNA, 15 bp, Homo sapiens
aagaaatgaaggcca

SEQ ID NO: 1451562 - DNA, 15 bp, Homo sapiens
agaaatgaaggccag

SEQ ID NO: 1451563 - DNA, 15 bp, Homo sapiens
gaaatgaaggccagg

SEQ ID NO: 1451564 - DNA, 15 bp, Homo sapiens
aaatgaaggccaggc

SEQ ID NO: 1451565 - DNA, 15 bp, Homo sapiens
aatgaaggccaggca

SEQ ID NO: 1451566 - DNA, 15 bp, Homo sapiens
atgaaggccaggcat

SEQ ID NO: 1451567 - DNA, 15 bp, Homo sapiens
tgaaggccaggcatg

SEQ ID NO: 1451568 - DNA, 15 bp, Homo sapiens
gaaggccaggcatgg

SEQ ID NO: 1451569 - DNA, 15 bp, Homo sapiens
actttgggaggccgg

SEQ ID NO: 1451570 - DNA, 15 bp, Homo sapiens
ctttgggaggccgga

SEQ ID NO: 1451571 - DNA, 15 bp, Homo sapiens
tttgggaggccggag

SEQ ID NO: 1451572 - DNA, 15 bp, Homo sapiens
ttgggaggccggagg

SEQ ID NO: 1451573 - DNA, 15 bp, Homo sapiens
tgggaggccggaggc

SEQ ID NO: 1451574 - DNA, 15 bp, Homo sapiens
gggaggccggaggca

SEQ ID NO: 1451575 - DNA, 15 bp, Homo sapiens
ggaggccggaggcag

SEQ ID NO: 1451576 - DNA, 15 bp, Homo sapiens
gaggccggaggcagg

SEQ ID NO: 1451577 - DNA, 15 bp, Homo sapiens
aggccggaggcaggt

SEQ ID NO: 1451578 - DNA, 15 bp, Homo sapiens
ggccggaggcaggtg

SEQ ID NO: 1451579 - DNA, 15 bp, Homo sapiens
gccggaggcaggtgg

SEQ ID NO: 1451580 - DNA, 15 bp, Homo sapiens
ccggaggcaggtgga

SEQ ID NO: 1451581 - DNA, 15 bp, Homo sapiens
gaggtcgggagttca

SEQ ID NO: 1451582 - DNA, 15 bp, Homo sapiens
aggtcgggagttcaa

SEQ ID NO: 1451583 - DNA, 15 bp, Homo sapiens
ggtcgggagttcaag

SEQ ID NO: 1451584 - DNA, 15 bp, Homo sapiens
gtcgggagttcaaga

SEQ ID NO: 1451585 - DNA, 15 bp, Homo sapiens
tcgggagttcaagac

SEQ ID NO: 1451586 - DNA, 15 bp, Homo sapiens
agttcaagaccaacc

SEQ ID NO: 1451587 - DNA, 15 bp, Homo sapiens
gttcaagaccaacct

SEQ ID NO: 1451588 - DNA, 15 bp, Homo sapiens
ttcaagaccaacctg

SEQ ID NO: 1451589 - DNA, 15 bp, Homo sapiens
tcaagaccaacctga

SEQ ID NO: 1451590 - DNA, 15 bp, Homo sapiens
caagaccaacctgac

SEQ ID NO: 1451591 - DNA, 15 bp, Homo sapiens
aagaccaacctgacc

SEQ ID NO: 1451592 - DNA, 15 bp, Homo sapiens
agaccaacctgacca

SEQ ID NO: 1451593 - DNA, 15 bp, Homo sapiens
gaccaacctgaccag

SEQ ID NO: 1451594 - DNA, 15 bp, Homo sapiens
accaacctgaccagc

SEQ ID NO: 1451595 - DNA, 15 bp, Homo sapiens
ccaacctgaccagca

SEQ ID NO: 1451596 - DNA, 15 bp, Homo sapiens
caacctgaccagcat

SEQ ID NO: 1451597 - DNA, 15 bp, Homo sapiens
aacctgaccagcatg

SEQ ID NO: 1451598 - DNA, 15 bp, Homo sapiens
acctgaccagcatgg

SEQ ID NO: 1451599 - DNA, 15 bp, Homo sapiens
cctgaccagcatgga

SEQ ID NO: 1451600 - DNA, 15 bp, Homo sapiens
ctgaccagcatggaa

SEQ ID NO: 1451601 - DNA, 15 bp, Homo sapiens
tgaccagcatggaaa

SEQ ID NO: 1451602 - DNA, 15 bp, Homo sapiens
gaccagcatggaaaa

SEQ ID NO: 1451603 - DNA, 15 bp, Homo sapiens
accagcatggaaaaa

SEQ ID NO: 1451604 - DNA, 15 bp, Homo sapiens
ccagcatggaaaaac

SEQ ID NO: 1451605 - DNA, 15 bp, Homo sapiens
cagcatggaaaaacc

SEQ ID NO: 1451606 - DNA, 15 bp, Homo sapiens
agcatggaaaaaccc

SEQ ID NO: 1451607 - DNA, 15 bp, Homo sapiens
gcatggaaaaacccc

SEQ ID NO: 1451608 - DNA, 15 bp, Homo sapiens
catggaaaaacccca

SEQ ID NO: 1451609 - DNA, 15 bp, Homo sapiens
atggaaaaaccccat

SEQ ID NO: 1451610 - DNA, 15 bp, Homo sapiens
tggaaaaaccccatc

SEQ ID NO: 1451611 - DNA, 15 bp, Homo sapiens
ggaaaaaccccatct

SEQ ID NO: 1451612 - DNA, 15 bp, Homo sapiens
gaaaaaccccatctc

SEQ ID NO: 1451613 - DNA, 15 bp, Homo sapiens
aaaaaccccatctct

SEQ ID NO: 1451614 - DNA, 15 bp, Homo sapiens
caaaattagccgggg

SEQ ID NO: 1451615 - DNA, 15 bp, Homo sapiens
aaaattagccggggg

SEQ ID NO: 1451616 - DNA, 15 bp, Homo sapiens
aaattagccgggggt

SEQ ID NO: 1451617 - DNA, 15 bp, Homo sapiens
aattagccgggggtg

SEQ ID NO: 1451618 - DNA, 15 bp, Homo sapiens
attagccgggggtgg

SEQ ID NO: 1451619 - DNA, 15 bp, Homo sapiens
ttagccgggggtggt

SEQ ID NO: 1451620 - DNA, 15 bp, Homo sapiens
tagccgggggtggtg

SEQ ID NO: 1451621 - DNA, 15 bp, Homo sapiens
agccgggggtggtgg

SEQ ID NO: 1451622 - DNA, 15 bp, Homo sapiens
gccgggggtggtggc

SEQ ID NO: 1451623 - DNA, 15 bp, Homo sapiens
ccgggggtggtggca

SEQ ID NO: 1451624 - DNA, 15 bp, Homo sapiens
cgggggtggtggcac

SEQ ID NO: 1451625 - DNA, 15 bp, Homo sapiens
gggggtggtggcaca

SEQ ID NO: 1451626 - DNA, 15 bp, Homo sapiens
ggggtggtggcacat

SEQ ID NO: 1451627 - DNA, 15 bp, Homo sapiens
gggtggtggcacatg

SEQ ID NO: 1451628 - DNA, 15 bp, Homo sapiens
catgcctgtaatcct

SEQ ID NO: 1451629 - DNA, 15 bp, Homo sapiens
atgcctgtaatccta

SEQ ID NO: 1451630 - DNA, 15 bp, Homo sapiens
taatcctagctactc

SEQ ID NO: 1451631 - DNA, 15 bp, Homo sapiens
aatcctagctactcg

SEQ ID NO: 1451632 - DNA, 15 bp, Homo sapiens
atcctagctactcgg

SEQ ID NO: 1451633 - DNA, 15 bp, Homo sapiens
agctactcgggagga

SEQ ID NO: 1451634 - DNA, 15 bp, Homo sapiens
gctactcgggaggag

SEQ ID NO: 1451635 - DNA, 15 bp, Homo sapiens
ctactcgggaggaga

SEQ ID NO: 1451636 - DNA, 15 bp, Homo sapiens
tactcgggaggagaa

SEQ ID NO: 1451637 - DNA, 15 bp, Homo sapiens
actcgggaggagaat

SEQ ID NO: 1451638 - DNA, 15 bp, Homo sapiens
ctcgggaggagaatc

SEQ ID NO: 1451639 - DNA, 15 bp, Homo sapiens
tcgggaggagaatca

SEQ ID NO: 1451640 - DNA, 15 bp, Homo sapiens
cgggaggagaatcac

SEQ ID NO: 1451641 - DNA, 15 bp, Homo sapiens
gggaggagaatcact

SEQ ID NO: 1451642 - DNA, 15 bp, Homo sapiens
ggaggagaatcactt

SEQ ID NO: 1451643 - DNA, 15 bp, Homo sapiens
gaggagaatcacttg

SEQ ID NO: 1451644 - DNA, 15 bp, Homo sapiens
atcacttgaacctga

SEQ ID NO: 1451645 - DNA, 15 bp, Homo sapiens
tcacttgaacctgag

SEQ ID NO: 1451646 - DNA, 15 bp, Homo sapiens
cacttgaacctgagg

SEQ ID NO: 1451647 - DNA, 15 bp, Homo sapiens
acttgaacctgaggg

SEQ ID NO: 1451648 - DNA, 15 bp, Homo sapiens
cttgaacctgagggg

SEQ ID NO: 1451649 - DNA, 15 bp, Homo sapiens
ttgaacctgaggggc

SEQ ID NO: 1451650 - DNA, 15 bp, Homo sapiens
tgaacctgaggggca

SEQ ID NO: 1451651 - DNA, 15 bp, Homo sapiens
gaacctgaggggcag

SEQ ID NO: 1451652 - DNA, 15 bp, Homo sapiens
aacctgaggggcaga

SEQ ID NO: 1451653 - DNA, 15 bp, Homo sapiens
acctgaggggcagag

SEQ ID NO: 1451654 - DNA, 15 bp, Homo sapiens
cctgaggggcagagg

SEQ ID NO: 1451655 - DNA, 15 bp, Homo sapiens
ctgaggggcagaggt

SEQ ID NO: 1451656 - DNA, 15 bp, Homo sapiens
tgaggggcagaggtt

SEQ ID NO: 1451657 - DNA, 15 bp, Homo sapiens
gaggggcagaggttg

SEQ ID NO: 1451658 - DNA, 15 bp, Homo sapiens
aggggcagaggttgc

SEQ ID NO: 1451659 - DNA, 15 bp, Homo sapiens
ggggcagaggttgcg

SEQ ID NO: 1451660 - DNA, 15 bp, Homo sapiens
gggcagaggttgcgg

SEQ ID NO: 1451661 - DNA, 15 bp, Homo sapiens
ggttgcggtgagcca

SEQ ID NO: 1451662 - DNA, 15 bp, Homo sapiens
gttgcggtgagccaa

SEQ ID NO: 1451663 - DNA, 15 bp, Homo sapiens
ttgcggtgagccaag

SEQ ID NO: 1451664 - DNA, 15 bp, Homo sapiens
tgcggtgagccaaga

SEQ ID NO: 1451665 - DNA, 15 bp, Homo sapiens
gcggtgagccaagat

SEQ ID NO: 1451666 - DNA, 15 bp, Homo sapiens
cggtgagccaagatc

SEQ ID NO: 1451667 - DNA, 15 bp, Homo sapiens
ggtgagccaagatcg

SEQ ID NO: 1451668 - DNA, 15 bp, Homo sapiens
tgcactctagcctgc

SEQ ID NO: 1451669 - DNA, 15 bp, Homo sapiens
gcactctagcctgcg

SEQ ID NO: 1451670 - DNA, 15 bp, Homo sapiens
cactctagcctgcgc

SEQ ID NO: 1451671 - DNA, 15 bp, Homo sapiens
actctagcctgcgca

SEQ ID NO: 1451672 - DNA, 15 bp, Homo sapiens
ctctagcctgcgcaa

SEQ ID NO: 1451673 - DNA, 15 bp, Homo sapiens
tctagcctgcgcaac

SEQ ID NO: 1451674 - DNA, 15 bp, Homo sapiens
ctagcctgcgcaaca

SEQ ID NO: 1451675 - DNA, 15 bp, Homo sapiens
tagcctgcgcaacaa

SEQ ID NO: 1451676 - DNA, 15 bp, Homo sapiens
agcctgcgcaacaag

SEQ ID NO: 1451677 - DNA, 15 bp, Homo sapiens
gcctgcgcaacaaga

SEQ ID NO: 1451678 - DNA, 15 bp, Homo sapiens
cctgcgcaacaagaa

SEQ ID NO: 1451679 - DNA, 15 bp, Homo sapiens
ctgcgcaacaagaat

SEQ ID NO: 1451680 - DNA, 15 bp, Homo sapiens
tgcgcaacaagaatg

SEQ ID NO: 1451681 - DNA, 15 bp, Homo sapiens
gcgcaacaagaatga

SEQ ID NO: 1451682 - DNA, 15 bp, Homo sapiens
cgcaacaagaatgag

SEQ ID NO: 1451683 - DNA, 15 bp, Homo sapiens
gcaacaagaatgaga

SEQ ID NO: 1451684 - DNA, 15 bp, Homo sapiens
caacaagaatgagac

SEQ ID NO: 1451685 - DNA, 15 bp, Homo sapiens
aacaagaatgagact

SEQ ID NO: 1451686 - DNA, 15 bp, Homo sapiens
acaagaatgagactc

SEQ ID NO: 1451687 - DNA, 15 bp, Homo sapiens
caagaatgagactcc

SEQ ID NO: 1451688 - DNA, 15 bp, Homo sapiens
aagaatgagactcca

SEQ ID NO: 1451689 - DNA, 15 bp, Homo sapiens
aagaaggcaccaggc

SEQ ID NO: 1451690 - DNA, 15 bp, Homo sapiens
agaaggcaccaggcg

SEQ ID NO: 1451691 - DNA, 15 bp, Homo sapiens
gaaggcaccaggcgt

SEQ ID NO: 1451692 - DNA, 15 bp, Homo sapiens
aaggcaccaggcgtg

SEQ ID NO: 1451693 - DNA, 15 bp, Homo sapiens
aggcaccaggcgtgg

SEQ ID NO: 1451694 - DNA, 15 bp, Homo sapiens
ggcaccaggcgtggt

SEQ ID NO: 1451695 - DNA, 15 bp, Homo sapiens
gcaccaggcgtggtg

SEQ ID NO: 1451696 - DNA, 15 bp, Homo sapiens
caccaggcgtggtgg

SEQ ID NO: 1451697 - DNA, 15 bp, Homo sapiens
aatcccaacaccttg

SEQ ID NO: 1451698 - DNA, 15 bp, Homo sapiens
atcccaacaccttgg

SEQ ID NO: 1451699 - DNA, 15 bp, Homo sapiens
tcccaacaccttggg

SEQ ID NO: 1451700 - DNA, 15 bp, Homo sapiens
cccaacaccttggga

SEQ ID NO: 1451701 - DNA, 15 bp, Homo sapiens
ccaacaccttgggag

SEQ ID NO: 1451702 - DNA, 15 bp, Homo sapiens
caacaccttgggagg

SEQ ID NO: 1451703 - DNA, 15 bp, Homo sapiens
aacaccttgggaggc

SEQ ID NO: 1451704 - DNA, 15 bp, Homo sapiens
acaccttgggaggcc

SEQ ID NO: 1451705 - DNA, 15 bp, Homo sapiens
caccttgggaggcca

SEQ ID NO: 1451706 - DNA, 15 bp, Homo sapiens
accttgggaggccaa

SEQ ID NO: 1451707 - DNA, 15 bp, Homo sapiens
ccttgggaggccaag

SEQ ID NO: 1451708 - DNA, 15 bp, Homo sapiens
cttgggaggccaagg

SEQ ID NO: 1451709 - DNA, 15 bp, Homo sapiens
gtcaggagtttgagg

SEQ ID NO: 1451710 - DNA, 15 bp, Homo sapiens
tcaggagtttgaggc

SEQ ID NO: 1451711 - DNA, 15 bp, Homo sapiens
caggagtttgaggcc

SEQ ID NO: 1451712 - DNA, 15 bp, Homo sapiens
aggagtttgaggcca

SEQ ID NO: 1451713 - DNA, 15 bp, Homo sapiens
ggagtttgaggccag

SEQ ID NO: 1451714 - DNA, 15 bp, Homo sapiens
gagtttgaggccagc

SEQ ID NO: 1451715 - DNA, 15 bp, Homo sapiens
agtttgaggccagcc

SEQ ID NO: 1451716 - DNA, 15 bp, Homo sapiens
gtttgaggccagcct

SEQ ID NO: 1451717 - DNA, 15 bp, Homo sapiens
tttgaggccagcctg

SEQ ID NO: 1451718 - DNA, 15 bp, Homo sapiens
ttgaggccagcctgg

SEQ ID NO: 1451719 - DNA, 15 bp, Homo sapiens
tgaggccagcctggc

SEQ ID NO: 1451720 - DNA, 15 bp, Homo sapiens
aacatggtgaaacct

SEQ ID NO: 1451721 - DNA, 15 bp, Homo sapiens
acatggtgaaacctc

SEQ ID NO: 1451722 - DNA, 15 bp, Homo sapiens
catggtgaaacctcg

SEQ ID NO: 1451723 - DNA, 15 bp, Homo sapiens
atggtgaaacctcgt

SEQ ID NO: 1451724 - DNA, 15 bp, Homo sapiens
tggtgaaacctcgtc

SEQ ID NO: 1451725 - DNA, 15 bp, Homo sapiens
ggtgaaacctcgtct

SEQ ID NO: 1451726 - DNA, 15 bp, Homo sapiens
gtgaaacctcgtctc

SEQ ID NO: 1451727 - DNA, 15 bp, Homo sapiens
tgaaacctcgtctct

SEQ ID NO: 1451728 - DNA, 15 bp, Homo sapiens
cgtctctactaaaac

SEQ ID NO: 1451729 - DNA, 15 bp, Homo sapiens
gtctctactaaaact

SEQ ID NO: 1451730 - DNA, 15 bp, Homo sapiens
tctctactaaaacta

SEQ ID NO: 1451731 - DNA, 15 bp, Homo sapiens
ctctactaaaactac

SEQ ID NO: 1451732 - DNA, 15 bp, Homo sapiens
tgggcatggtggcat

SEQ ID NO: 1451733 - DNA, 15 bp, Homo sapiens
ggcatggtggcatgc

SEQ ID NO: 1451734 - DNA, 15 bp, Homo sapiens
gcatggtggcatgcg

SEQ ID NO: 1451735 - DNA, 15 bp, Homo sapiens
catggtggcatgcgc

SEQ ID NO: 1451736 - DNA, 15 bp, Homo sapiens
atggtggcatgcgcc

SEQ ID NO: 1451737 - DNA, 15 bp, Homo sapiens
atgcgcctgtaatca

SEQ ID NO: 1451738 - DNA, 15 bp, Homo sapiens
tgcgcctgtaatcac

SEQ ID NO: 1451739 - DNA, 15 bp, Homo sapiens
gcgcctgtaatcaca

SEQ ID NO: 1451740 - DNA, 15 bp, Homo sapiens
cgcctgtaatcacag

SEQ ID NO: 1451741 - DNA, 15 bp, Homo sapiens
taatcacagctactt

SEQ ID NO: 1451742 - DNA, 15 bp, Homo sapiens
aatcacagctacttg

SEQ ID NO: 1451743 - DNA, 15 bp, Homo sapiens
atcacagctacttgg

SEQ ID NO: 1451744 - DNA, 15 bp, Homo sapiens
tcacagctacttggg

SEQ ID NO: 1451745 - DNA, 15 bp, Homo sapiens
cacagctacttggga

SEQ ID NO: 1451746 - DNA, 15 bp, Homo sapiens
acagctacttgggag

SEQ ID NO: 1451747 - DNA, 15 bp, Homo sapiens
ggagaatcactggaa

SEQ ID NO: 1451748 - DNA, 15 bp, Homo sapiens
gagaatcactggaac

SEQ ID NO: 1451749 - DNA, 15 bp, Homo sapiens
agaatcactggaacc

SEQ ID NO: 1451750 - DNA, 15 bp, Homo sapiens
gaatcactggaaccg

SEQ ID NO: 1451751 - DNA, 15 bp, Homo sapiens
aatcactggaaccgg

SEQ ID NO: 1451752 - DNA, 15 bp, Homo sapiens
atcactggaaccggg

SEQ ID NO: 1451753 - DNA, 15 bp, Homo sapiens
tcactggaaccgggg

SEQ ID NO: 1451754 - DNA, 15 bp, Homo sapiens
cactggaaccgggga

SEQ ID NO: 1451755 - DNA, 15 bp, Homo sapiens
actggaaccggggag

SEQ ID NO: 1451756 - DNA, 15 bp, Homo sapiens
ctggaaccggggagg

SEQ ID NO: 1451757 - DNA, 15 bp, Homo sapiens
tggaaccggggaggt

SEQ ID NO: 1451758 - DNA, 15 bp, Homo sapiens
ggaaccggggaggtg

SEQ ID NO: 1451759 - DNA, 15 bp, Homo sapiens
ggggaggtggaggtg

SEQ ID NO: 1451760 - DNA, 15 bp, Homo sapiens
gggaggtggaggtgg

SEQ ID NO: 1451761 - DNA, 15 bp, Homo sapiens
ggaggtggaggtggc

SEQ ID NO: 1451762 - DNA, 15 bp, Homo sapiens
gaggtggaggtggca

SEQ ID NO: 1451763 - DNA, 15 bp, Homo sapiens
aggtggaggtggcag

SEQ ID NO: 1451764 - DNA, 15 bp, Homo sapiens
ggtggaggtggcagt

SEQ ID NO: 1451765 - DNA, 15 bp, Homo sapiens
gtggaggtggcagtg

SEQ ID NO: 1451766 - DNA, 15 bp, Homo sapiens
tggaggtggcagtga

SEQ ID NO: 1451767 - DNA, 15 bp, Homo sapiens
ggaggtggcagtgag

SEQ ID NO: 1451768 - DNA, 15 bp, Homo sapiens
gagatcgcgccactt

SEQ ID NO: 1451769 - DNA, 15 bp, Homo sapiens
agatcgcgccacttc

SEQ ID NO: 1451770 - DNA, 15 bp, Homo sapiens
gatcgcgccacttca

SEQ ID NO: 1451771 - DNA, 15 bp, Homo sapiens
atcgcgccacttcac

SEQ ID NO: 1451772 - DNA, 15 bp, Homo sapiens
tcgcgccacttcact

SEQ ID NO: 1451773 - DNA, 15 bp, Homo sapiens
cgcgccacttcactc

SEQ ID NO: 1451774 - DNA, 15 bp, Homo sapiens
gcgccacttcactcc

SEQ ID NO: 1451775 - DNA, 15 bp, Homo sapiens
cgccacttcactcca

SEQ ID NO: 1451776 - DNA, 15 bp, Homo sapiens
gccacttcactccag

SEQ ID NO: 1451777 - DNA, 15 bp, Homo sapiens
gaaactccgtctcag

SEQ ID NO: 1451778 - DNA, 15 bp, Homo sapiens
aaactccgtctcaga

SEQ ID NO: 1451779 - DNA, 15 bp, Homo sapiens
aactccgtctcagaa

SEQ ID NO: 1451780 - DNA, 15 bp, Homo sapiens
actccgtctcagaaa

SEQ ID NO: 1451781 - DNA, 15 bp, Homo sapiens
ctccgtctcagaaaa

SEQ ID NO: 1451782 - DNA, 15 bp, Homo sapiens
tccgtctcagaaaaa

SEQ ID NO: 1451783 - DNA, 15 bp, Homo sapiens
ccgtctcagaaaaaa

SEQ ID NO: 1451784 - DNA, 15 bp, Homo sapiens
cgtctcagaaaaaaa

SEQ ID NO: 1451785 - DNA, 15 bp, Homo sapiens
gtctcagaaaaaaaa

SEQ ID NO: 1451786 - DNA, 15 bp, Homo sapiens
tctcagaaaaaaaaa

SEQ ID NO: 1451787 - DNA, 15 bp, Homo sapiens
ctcagaaaaaaaaaa

SEQ ID NO: 1451788 - DNA, 15 bp, Homo sapiens
tcagaaaaaaaaaaa

SEQ ID NO: 1451789 - DNA, 15 bp, Homo sapiens
aaaaaaaaaaatgaa

SEQ ID NO: 1451790 - DNA, 15 bp, Homo sapiens
aaaaaaaaatgaaat

SEQ ID NO: 1451791 - DNA, 15 bp, Homo sapiens
aaaaaaaatgaaatg

SEQ ID NO: 1451792 - DNA, 15 bp, Homo sapiens
aaaaaaatgaaatga

SEQ ID NO: 1451793 - DNA, 15 bp, Homo sapiens
aaaaaatgaaatgaa

SEQ ID NO: 1451794 - DNA, 15 bp, Homo sapiens
aaaaatgaaatgaag

SEQ ID NO: 1451795 - DNA, 15 bp, Homo sapiens
aaaatgaaatgaagg

SEQ ID NO: 1451796 - DNA, 15 bp, Homo sapiens
aaatgaaatgaaggt

SEQ ID NO: 1451797 - DNA, 15 bp, Homo sapiens
aatgaaatgaaggtt

SEQ ID NO: 1451798 - DNA, 15 bp, Homo sapiens
atgaaatgaaggttc

SEQ ID NO: 1451799 - DNA, 15 bp, Homo sapiens
tgaaatgaaggttcc

SEQ ID NO: 1451800 - DNA, 15 bp, Homo sapiens
gaaatgaaggttcca

SEQ ID NO: 1451801 - DNA, 15 bp, Homo sapiens
aaatgaaggttccaa

SEQ ID NO: 1451802 - DNA, 15 bp, Homo sapiens
aatgaaggttccaaa

SEQ ID NO: 1451803 - DNA, 15 bp, Homo sapiens
atgaaggttccaaag

SEQ ID NO: 1451804 - DNA, 15 bp, Homo sapiens
tgaaggttccaaagt

SEQ ID NO: 1451805 - DNA, 15 bp, Homo sapiens
gaaggttccaaagtt

SEQ ID NO: 1451806 - DNA, 15 bp, Homo sapiens
aaggttccaaagtta

SEQ ID NO: 1451807 - DNA, 15 bp, Homo sapiens
aggttccaaagttaa

SEQ ID NO: 1451808 - DNA, 15 bp, Homo sapiens
ggttccaaagttaaa

SEQ ID NO: 1451809 - DNA, 15 bp, Homo sapiens
gttccaaagttaaat

SEQ ID NO: 1451810 - DNA, 15 bp, Homo sapiens
ttccaaagttaaatg

SEQ ID NO: 1451811 - DNA, 15 bp, Homo sapiens
tccaaagttaaatga

SEQ ID NO: 1451812 - DNA, 15 bp, Homo sapiens
ccaaagttaaatgat

SEQ ID NO: 1451813 - DNA, 15 bp, Homo sapiens
caaagttaaatgatt

SEQ ID NO: 1451814 - DNA, 15 bp, Homo sapiens
aaagttaaatgattt

SEQ ID NO: 1451815 - DNA, 15 bp, Homo sapiens
aagttaaatgatttg

SEQ ID NO: 1451816 - DNA, 15 bp, Homo sapiens
agttaaatgatttgc

SEQ ID NO: 1451817 - DNA, 15 bp, Homo sapiens
gttaaatgatttgcc

SEQ ID NO: 1451818 - DNA, 15 bp, Homo sapiens
ttaaatgatttgccc

SEQ ID NO: 1451819 - DNA, 15 bp, Homo sapiens
taaatgatttgccca

SEQ ID NO: 1451820 - DNA, 15 bp, Homo sapiens
aaatgatttgcccaa

SEQ ID NO: 1451821 - DNA, 15 bp, Homo sapiens
aatgatttgcccaag

SEQ ID NO: 1451822 - DNA, 15 bp, Homo sapiens
atgatttgcccaagc

SEQ ID NO: 1451823 - DNA, 15 bp, Homo sapiens
tgatttgcccaagca

SEQ ID NO: 1451824 - DNA, 15 bp, Homo sapiens
gatttgcccaagcat

SEQ ID NO: 1451825 - DNA, 15 bp, Homo sapiens
atttgcccaagcatg

SEQ ID NO: 1451826 - DNA, 15 bp, Homo sapiens
tttgcccaagcatgg

SEQ ID NO: 1451827 - DNA, 15 bp, Homo sapiens
ttgcccaagcatgga

SEQ ID NO: 1451828 - DNA, 15 bp, Homo sapiens
tgcccaagcatggag

SEQ ID NO: 1451829 - DNA, 15 bp, Homo sapiens
gcccaagcatggaga

SEQ ID NO: 1451830 - DNA, 15 bp, Homo sapiens
cccaagcatggagaa

SEQ ID NO: 1451831 - DNA, 15 bp, Homo sapiens
ccaagcatggagaaa

SEQ ID NO: 1451832 - DNA, 15 bp, Homo sapiens
caagcatggagaaag

SEQ ID NO: 1451833 - DNA, 15 bp, Homo sapiens
aagcatggagaaaga

SEQ ID NO: 1451834 - DNA, 15 bp, Homo sapiens
agcatggagaaagac

SEQ ID NO: 1451835 - DNA, 15 bp, Homo sapiens
gcatggagaaagact

SEQ ID NO: 1451836 - DNA, 15 bp, Homo sapiens
catggagaaagactt

SEQ ID NO: 1451837 - DNA, 15 bp, Homo sapiens
atggagaaagactta

SEQ ID NO: 1451838 - DNA, 15 bp, Homo sapiens
tggagaaagacttaa

SEQ ID NO: 1451839 - DNA, 15 bp, Homo sapiens
ggagaaagacttaac

SEQ ID NO: 1451840 - DNA, 15 bp, Homo sapiens
gagaaagacttaaca

SEQ ID NO: 1451841 - DNA, 15 bp, Homo sapiens
agaaagacttaacaa

SEQ ID NO: 1451842 - DNA, 15 bp, Homo sapiens
gaaagacttaacaaa

SEQ ID NO: 1451843 - DNA, 15 bp, Homo sapiens
aaagacttaacaaaa

SEQ ID NO: 1451844 - DNA, 15 bp, Homo sapiens
aagacttaacaaaat

SEQ ID NO: 1451845 - DNA, 15 bp, Homo sapiens
agacttaacaaaatg

SEQ ID NO: 1451846 - DNA, 15 bp, Homo sapiens
gacttaacaaaatgt

SEQ ID NO: 1451847 - DNA, 15 bp, Homo sapiens
acttaacaaaatgtc

SEQ ID NO: 1451848 - DNA, 15 bp, Homo sapiens
cttaacaaaatgtca

SEQ ID NO: 1451849 - DNA, 15 bp, Homo sapiens
ttaacaaaatgtcaa

SEQ ID NO: 1451850 - DNA, 15 bp, Homo sapiens
taacaaaatgtcaat

SEQ ID NO: 1451851 - DNA, 15 bp, Homo sapiens
aacaaaatgtcaatc

SEQ ID NO: 1451852 - DNA, 15 bp, Homo sapiens
acaaaatgtcaatcc

SEQ ID NO: 1451853 - DNA, 15 bp, Homo sapiens
caaaatgtcaatccc

SEQ ID NO: 1451854 - DNA, 15 bp, Homo sapiens
aaaatgtcaatccct

SEQ ID NO: 1451855 - DNA, 15 bp, Homo sapiens
aaatgtcaatccctt

SEQ ID NO: 1451856 - DNA, 15 bp, Homo sapiens
aatgtcaatcccttt

SEQ ID NO: 1451857 - DNA, 15 bp, Homo sapiens
atgtcaatccctttc

SEQ ID NO: 1451858 - DNA, 15 bp, Homo sapiens
tgtcaatccctttct

SEQ ID NO: 1451859 - DNA, 15 bp, Homo sapiens
gtcaatccctttctc

SEQ ID NO: 1451860 - DNA, 15 bp, Homo sapiens
tcaatccctttctct

SEQ ID NO: 1451861 - DNA, 15 bp, Homo sapiens
caatccctttctctg

SEQ ID NO: 1451862 - DNA, 15 bp, Homo sapiens
aatccctttctctgt

SEQ ID NO: 1451863 - DNA, 15 bp, Homo sapiens
atccctttctctgtg

SEQ ID NO: 1451864 - DNA, 15 bp, Homo sapiens
ccctttctctgtggg

SEQ ID NO: 1451865 - DNA, 15 bp, Homo sapiens
cctttctctgtggga

SEQ ID NO: 1451866 - DNA, 15 bp, Homo sapiens
ctttctctgtgggaa

SEQ ID NO: 1451867 - DNA, 15 bp, Homo sapiens
tttctctgtgggaag

SEQ ID NO: 1451868 - DNA, 15 bp, Homo sapiens
ttctctgtgggaaga

SEQ ID NO: 1451869 - DNA, 15 bp, Homo sapiens
tctctgtgggaagat

SEQ ID NO: 1451870 - DNA, 15 bp, Homo sapiens
ctctgtgggaagata

SEQ ID NO: 1451871 - DNA, 15 bp, Homo sapiens
tctgtgggaagataa

SEQ ID NO: 1451872 - DNA, 15 bp, Homo sapiens
ctgtgggaagataat

SEQ ID NO: 1451873 - DNA, 15 bp, Homo sapiens
tgtgggaagataatg

SEQ ID NO: 1451874 - DNA, 15 bp, Homo sapiens
gtgggaagataatgt

SEQ ID NO: 1451875 - DNA, 15 bp, Homo sapiens
tgggaagataatgtc

SEQ ID NO: 1451876 - DNA, 15 bp, Homo sapiens
gggaagataatgtca

SEQ ID NO: 1451877 - DNA, 15 bp, Homo sapiens
ggaagataatgtcag

SEQ ID NO: 1451878 - DNA, 15 bp, Homo sapiens
gaagataatgtcagg

SEQ ID NO: 1451879 - DNA, 15 bp, Homo sapiens
aagataatgtcaggc

SEQ ID NO: 1451880 - DNA, 15 bp, Homo sapiens
agataatgtcaggct

SEQ ID NO: 1451881 - DNA, 15 bp, Homo sapiens
gataatgtcaggctc

SEQ ID NO: 1451882 - DNA, 15 bp, Homo sapiens
ataatgtcaggctcc

SEQ ID NO: 1451883 - DNA, 15 bp, Homo sapiens
taatgtcaggctccc

SEQ ID NO: 1451884 - DNA, 15 bp, Homo sapiens
aatgtcaggctcccc

SEQ ID NO: 1451885 - DNA, 15 bp, Homo sapiens
atgtcaggctcccct

SEQ ID NO: 1451886 - DNA, 15 bp, Homo sapiens
tgtcaggctccccta

SEQ ID NO: 1451887 - DNA, 15 bp, Homo sapiens
gtcaggctcccctac

SEQ ID NO: 1451888 - DNA, 15 bp, Homo sapiens
tcaggctcccctact

SEQ ID NO: 1451889 - DNA, 15 bp, Homo sapiens
caggctcccctacta

SEQ ID NO: 1451890 - DNA, 15 bp, Homo sapiens
aggctcccctactat

SEQ ID NO: 1451891 - DNA, 15 bp, Homo sapiens
ggctcccctactata

SEQ ID NO: 1451892 - DNA, 15 bp, Homo sapiens
gctcccctactatac

SEQ ID NO: 1451893 - DNA, 15 bp, Homo sapiens
ctcccctactatacc

SEQ ID NO: 1451894 - DNA, 15 bp, Homo sapiens
tcccctactataccc

SEQ ID NO: 1451895 - DNA, 15 bp, Homo sapiens
cccctactataccca

SEQ ID NO: 1451896 - DNA, 15 bp, Homo sapiens
ccctactatacccag

SEQ ID NO: 1451897 - DNA, 15 bp, Homo sapiens
cctactatacccagc

SEQ ID NO: 1451898 - DNA, 15 bp, Homo sapiens
ctactatacccagcc

SEQ ID NO: 1451899 - DNA, 15 bp, Homo sapiens
tactatacccagccc

SEQ ID NO: 1451900 - DNA, 15 bp, Homo sapiens
actatacccagccct

SEQ ID NO: 1451901 - DNA, 15 bp, Homo sapiens
ctatacccagccctg

SEQ ID NO: 1451902 - DNA, 15 bp, Homo sapiens
tatacccagccctgt

SEQ ID NO: 1451903 - DNA, 15 bp, Homo sapiens
atacccagccctgtt

SEQ ID NO: 1451904 - DNA, 15 bp, Homo sapiens
tacccagccctgttt

SEQ ID NO: 1451905 - DNA, 15 bp, Homo sapiens
acccagccctgtttc

SEQ ID NO: 1451906 - DNA, 15 bp, Homo sapiens
cccagccctgtttcc

SEQ ID NO: 1451907 - DNA, 15 bp, Homo sapiens
ccagccctgtttccc

SEQ ID NO: 1451908 - DNA, 15 bp, Homo sapiens
cagccctgtttccct

SEQ ID NO: 1451909 - DNA, 15 bp, Homo sapiens
agccctgtttccctg

SEQ ID NO: 1451910 - DNA, 15 bp, Homo sapiens
gccctgtttccctgg

SEQ ID NO: 1451911 - DNA, 15 bp, Homo sapiens
ccctgtttccctgga

SEQ ID NO: 1451912 - DNA, 15 bp, Homo sapiens
cctgtttccctggaa

SEQ ID NO: 1451913 - DNA, 15 bp, Homo sapiens
ctgtttccctggaaa

SEQ ID NO: 1451914 - DNA, 15 bp, Homo sapiens
tgtttccctggaaac

SEQ ID NO: 1451915 - DNA, 15 bp, Homo sapiens
gtttccctggaaaca

SEQ ID NO: 1451916 - DNA, 15 bp, Homo sapiens
tttccctggaaacac

SEQ ID NO: 1451917 - DNA, 15 bp, Homo sapiens
ttccctggaaacaca

SEQ ID NO: 1451918 - DNA, 15 bp, Homo sapiens
tccctggaaacacac

SEQ ID NO: 1451919 - DNA, 15 bp, Homo sapiens
ccctggaaacacacc

SEQ ID NO: 1451920 - DNA, 15 bp, Homo sapiens
cctggaaacacaccg

SEQ ID NO: 1451921 - DNA, 15 bp, Homo sapiens
ctggaaacacaccgc

SEQ ID NO: 1451922 - DNA, 15 bp, Homo sapiens
tggaaacacaccgca

SEQ ID NO: 1451923 - DNA, 15 bp, Homo sapiens
ggaaacacaccgcac

SEQ ID NO: 1451924 - DNA, 15 bp, Homo sapiens
gaaacacaccgcact

SEQ ID NO: 1451925 - DNA, 15 bp, Homo sapiens
aaacacaccgcacta

SEQ ID NO: 1451926 - DNA, 15 bp, Homo sapiens
aacacaccgcactaa

SEQ ID NO: 1451927 - DNA, 15 bp, Homo sapiens
acacaccgcactaag

SEQ ID NO: 1451928 - DNA, 15 bp, Homo sapiens
cacaccgcactaaga

SEQ ID NO: 1451929 - DNA, 15 bp, Homo sapiens
acaccgcactaagaa

SEQ ID NO: 1451930 - DNA, 15 bp, Homo sapiens
caccgcactaagaaa

SEQ ID NO: 1451931 - DNA, 15 bp, Homo sapiens
accgcactaagaaat

SEQ ID NO: 1451932 - DNA, 15 bp, Homo sapiens
ccgcactaagaaatg

SEQ ID NO: 1451933 - DNA, 15 bp, Homo sapiens
cgcactaagaaatgt

SEQ ID NO: 1451934 - DNA, 15 bp, Homo sapiens
gcactaagaaatgtc

SEQ ID NO: 1451935 - DNA, 15 bp, Homo sapiens
cactaagaaatgtct

SEQ ID NO: 1451936 - DNA, 15 bp, Homo sapiens
actaagaaatgtctg

SEQ ID NO: 1451937 - DNA, 15 bp, Homo sapiens
ctaagaaatgtctga

SEQ ID NO: 1451938 - DNA, 15 bp, Homo sapiens
taagaaatgtctgat

SEQ ID NO: 1451939 - DNA, 15 bp, Homo sapiens
aagaaatgtctgata

SEQ ID NO: 1451940 - DNA, 15 bp, Homo sapiens
agaaatgtctgatat

SEQ ID NO: 1451941 - DNA, 15 bp, Homo sapiens
gaaatgtctgatatg

SEQ ID NO: 1451942 - DNA, 15 bp, Homo sapiens
aaatgtctgatatga

SEQ ID NO: 1451943 - DNA, 15 bp, Homo sapiens
aatgtctgatatgaa

SEQ ID NO: 1451944 - DNA, 15 bp, Homo sapiens
atgtctgatatgaaa

SEQ ID NO: 1451945 - DNA, 15 bp, Homo sapiens
tgtctgatatgaaat

SEQ ID NO: 1451946 - DNA, 15 bp, Homo sapiens
gtctgatatgaaatg

SEQ ID NO: 1451947 - DNA, 15 bp, Homo sapiens
tctgatatgaaatgt

SEQ ID NO: 1451948 - DNA, 15 bp, Homo sapiens
ctgatatgaaatgtc

SEQ ID NO: 1451949 - DNA, 15 bp, Homo sapiens
tgatatgaaatgtca

SEQ ID NO: 1451950 - DNA, 15 bp, Homo sapiens
gatatgaaatgtcag

SEQ ID NO: 1451951 - DNA, 15 bp, Homo sapiens
atatgaaatgtcagc

SEQ ID NO: 1451952 - DNA, 15 bp, Homo sapiens
tatgaaatgtcagca

SEQ ID NO: 1451953 - DNA, 15 bp, Homo sapiens
atgaaatgtcagcaa

SEQ ID NO: 1451954 - DNA, 15 bp, Homo sapiens
tgaaatgtcagcaat

SEQ ID NO: 1451955 - DNA, 15 bp, Homo sapiens
gaaatgtcagcaatg

SEQ ID NO: 1451956 - DNA, 15 bp, Homo sapiens
aaatgtcagcaatgt

SEQ ID NO: 1451957 - DNA, 15 bp, Homo sapiens
aatgtcagcaatgta

SEQ ID NO: 1451958 - DNA, 15 bp, Homo sapiens
atgtcagcaatgtac

SEQ ID NO: 1451959 - DNA, 15 bp, Homo sapiens
tgtcagcaatgtact

SEQ ID NO: 1451960 - DNA, 15 bp, Homo sapiens
gtcagcaatgtacta

SEQ ID NO: 1451961 - DNA, 15 bp, Homo sapiens
tcagcaatgtactat

SEQ ID NO: 1451962 - DNA, 15 bp, Homo sapiens
cagcaatgtactatt

SEQ ID NO: 1451963 - DNA, 15 bp, Homo sapiens
agcaatgtactattc

SEQ ID NO: 1451964 - DNA, 15 bp, Homo sapiens
gcaatgtactattca

SEQ ID NO: 1451965 - DNA, 15 bp, Homo sapiens
caatgtactattcaa

SEQ ID NO: 1451966 - DNA, 15 bp, Homo sapiens
aatgtactattcaaa

SEQ ID NO: 1451967 - DNA, 15 bp, Homo sapiens
atgtactattcaaag

SEQ ID NO: 1451968 - DNA, 15 bp, Homo sapiens
tgtactattcaaagc

SEQ ID NO: 1451969 - DNA, 15 bp, Homo sapiens
gtactattcaaagct

SEQ ID NO: 1451970 - DNA, 15 bp, Homo sapiens
tactattcaaagctg

SEQ ID NO: 1451971 - DNA, 15 bp, Homo sapiens
actattcaaagctgt

SEQ ID NO: 1451972 - DNA, 15 bp, Homo sapiens
ctattcaaagctgtt

SEQ ID NO: 1451973 - DNA, 15 bp, Homo sapiens
tattcaaagctgttt

SEQ ID NO: 1451974 - DNA, 15 bp, Homo sapiens
attcaaagctgttta

SEQ ID NO: 1451975 - DNA, 15 bp, Homo sapiens
ttcaaagctgtttac

SEQ ID NO: 1451976 - DNA, 15 bp, Homo sapiens
tcaaagctgtttact

SEQ ID NO: 1451977 - DNA, 15 bp, Homo sapiens
caaagctgtttactg

SEQ ID NO: 1451978 - DNA, 15 bp, Homo sapiens
aaagctgtttactgt

SEQ ID NO: 1451979 - DNA, 15 bp, Homo sapiens
aagctgtttactgta

SEQ ID NO: 1451980 - DNA, 15 bp, Homo sapiens
agctgtttactgtaa

SEQ ID NO: 1451981 - DNA, 15 bp, Homo sapiens
gctgtttactgtaaa

SEQ ID NO: 1451982 - DNA, 15 bp, Homo sapiens
ctgtttactgtaaaa

SEQ ID NO: 1451983 - DNA, 15 bp, Homo sapiens
tgtttactgtaaaat

SEQ ID NO: 1451984 - DNA, 15 bp, Homo sapiens
gtttactgtaaaatt

SEQ ID NO: 1451985 - DNA, 15 bp, Homo sapiens
tttactgtaaaattg

SEQ ID NO: 1451986 - DNA, 15 bp, Homo sapiens
ttactgtaaaattga

SEQ ID NO: 1451987 - DNA, 15 bp, Homo sapiens
tactgtaaaattgac

SEQ ID NO: 1451988 - DNA, 15 bp, Homo sapiens
actgtaaaattgacc

SEQ ID NO: 1451989 - DNA, 15 bp, Homo sapiens
ctgtaaaattgacct

SEQ ID NO: 1451990 - DNA, 15 bp, Homo sapiens
tgtaaaattgacctc

SEQ ID NO: 1451991 - DNA, 15 bp, Homo sapiens
gtaaaattgacctca

SEQ ID NO: 1451992 - DNA, 15 bp, Homo sapiens
taaaattgacctcaa

SEQ ID NO: 1451993 - DNA, 15 bp, Homo sapiens
aaaattgacctcaaa

SEQ ID NO: 1451994 - DNA, 15 bp, Homo sapiens
aaattgacctcaaat

SEQ ID NO: 1451995 - DNA, 15 bp, Homo sapiens
aattgacctcaaatg

SEQ ID NO: 1451996 - DNA, 15 bp, Homo sapiens
attgacctcaaatga

SEQ ID NO: 1451997 - DNA, 15 bp, Homo sapiens
ttgacctcaaatgat

SEQ ID NO: 1451998 - DNA, 15 bp, Homo sapiens
gacctcaaatgatca

SEQ ID NO: 1451999 - DNA, 15 bp, Homo sapiens
acctcaaatgatcaa

SEQ ID NO: 1452000 - DNA, 15 bp, Homo sapiens
cctcaaatgatcaac

SEQ ID NO: 1452001 - DNA, 15 bp, Homo sapiens
ctcaaatgatcaact

SEQ ID NO: 1452002 - DNA, 15 bp, Homo sapiens
tcaaatgatcaactt

SEQ ID NO: 1452003 - DNA, 15 bp, Homo sapiens
caaatgatcaacttc

SEQ ID NO: 1452004 - DNA, 15 bp, Homo sapiens
aaatgatcaacttca

SEQ ID NO: 1452005 - DNA, 15 bp, Homo sapiens
aatgatcaacttcat

SEQ ID NO: 1452006 - DNA, 15 bp, Homo sapiens
atgatcaacttcatc

SEQ ID NO: 1452007 - DNA, 15 bp, Homo sapiens
tgatcaacttcatct

SEQ ID NO: 1452008 - DNA, 15 bp, Homo sapiens
gatcaacttcatctg

SEQ ID NO: 1452009 - DNA, 15 bp, Homo sapiens
atcaacttcatctgg

SEQ ID NO: 1452010 - DNA, 15 bp, Homo sapiens
tcaacttcatctggc

SEQ ID NO: 1452011 - DNA, 15 bp, Homo sapiens
caacttcatctggca

SEQ ID NO: 1452012 - DNA, 15 bp, Homo sapiens
aacttcatctggcat

SEQ ID NO: 1452013 - DNA, 15 bp, Homo sapiens
acttcatctggcatg

SEQ ID NO: 1452014 - DNA, 15 bp, Homo sapiens
cttcatctggcatgg

SEQ ID NO: 1452015 - DNA, 15 bp, Homo sapiens
ttcatctggcatgga

SEQ ID NO: 1452016 - DNA, 15 bp, Homo sapiens
tcatctggcatggag

SEQ ID NO: 1452017 - DNA, 15 bp, Homo sapiens
catctggcatggagt

SEQ ID NO: 1452018 - DNA, 15 bp, Homo sapiens
atctggcatggagtg

SEQ ID NO: 1452019 - DNA, 15 bp, Homo sapiens
tctggcatggagtgt

SEQ ID NO: 1452020 - DNA, 15 bp, Homo sapiens
ctggcatggagtgtg

SEQ ID NO: 1452021 - DNA, 15 bp, Homo sapiens
tggcatggagtgtgt

SEQ ID NO: 1452022 - DNA, 15 bp, Homo sapiens
ggcatggagtgtgta

SEQ ID NO: 1452023 - DNA, 15 bp, Homo sapiens
gcatggagtgtgtac

SEQ ID NO: 1452024 - DNA, 15 bp, Homo sapiens
catggagtgtgtaca

SEQ ID NO: 1452025 - DNA, 15 bp, Homo sapiens
atggagtgtgtacaa

SEQ ID NO: 1452026 - DNA, 15 bp, Homo sapiens
tggagtgtgtacaat

SEQ ID NO: 1452027 - DNA, 15 bp, Homo sapiens
ggagtgtgtacaatc

SEQ ID NO: 1452028 - DNA, 15 bp, Homo sapiens
gagtgtgtacaatct

SEQ ID NO: 1452029 - DNA, 15 bp, Homo sapiens
agtgtgtacaatctt

SEQ ID NO: 1452030 - DNA, 15 bp, Homo sapiens
gtgtgtacaatcttt

SEQ ID NO: 1452031 - DNA, 15 bp, Homo sapiens
tgtgtacaatctttt

SEQ ID NO: 1452032 - DNA, 15 bp, Homo sapiens
gtgtacaatcttttc

SEQ ID NO: 1452033 - DNA, 15 bp, Homo sapiens
tgtacaatcttttca

SEQ ID NO: 1452034 - DNA, 15 bp, Homo sapiens
gtacaatcttttcac

SEQ ID NO: 1452035 - DNA, 15 bp, Homo sapiens
tacaatcttttcaca

SEQ ID NO: 1452036 - DNA, 15 bp, Homo sapiens
acaatcttttcacac

SEQ ID NO: 1452037 - DNA, 15 bp, Homo sapiens
caatcttttcacaca

SEQ ID NO: 1452038 - DNA, 15 bp, Homo sapiens
aatcttttcacacat

SEQ ID NO: 1452039 - DNA, 15 bp, Homo sapiens
atcttttcacacata

SEQ ID NO: 1452040 - DNA, 15 bp, Homo sapiens
tcttttcacacataa

SEQ ID NO: 1452041 - DNA, 15 bp, Homo sapiens
cttttcacacataat

SEQ ID NO: 1452042 - DNA, 15 bp, Homo sapiens
ttttcacacataatg

SEQ ID NO: 1452043 - DNA, 15 bp, Homo sapiens
tttcacacataatgt

SEQ ID NO: 1452044 - DNA, 15 bp, Homo sapiens
ttcacacataatgta

SEQ ID NO: 1452045 - DNA, 15 bp, Homo sapiens
tcacacataatgtaa

SEQ ID NO: 1452046 - DNA, 15 bp, Homo sapiens
cacacataatgtaac

SEQ ID NO: 1452047 - DNA, 15 bp, Homo sapiens
acacataatgtaaca

SEQ ID NO: 1452048 - DNA, 15 bp, Homo sapiens
cacataatgtaacaa

SEQ ID NO: 1452049 - DNA, 15 bp, Homo sapiens
acataatgtaacaaa

SEQ ID NO: 1452050 - DNA, 15 bp, Homo sapiens
cataatgtaacaaac

SEQ ID NO: 1452051 - DNA, 15 bp, Homo sapiens
ataatgtaacaaaca

SEQ ID NO: 1452052 - DNA, 15 bp, Homo sapiens
taatgtaacaaacaa

SEQ ID NO: 1452053 - DNA, 15 bp, Homo sapiens
aatgtaacaaacaat

SEQ ID NO: 1452054 - DNA, 15 bp, Homo sapiens
atgtaacaaacaata

SEQ ID NO: 1452055 - DNA, 15 bp, Homo sapiens
tgtaacaaacaatag

SEQ ID NO: 1452056 - DNA, 15 bp, Homo sapiens
gtaacaaacaataga

SEQ ID NO: 1452057 - DNA, 15 bp, Homo sapiens
taacaaacaatagaa

SEQ ID NO: 1452058 - DNA, 15 bp, Homo sapiens
aacaaacaatagaaa

SEQ ID NO: 1452059 - DNA, 15 bp, Homo sapiens
acaaacaatagaaaa

SEQ ID NO: 1452060 - DNA, 15 bp, Homo sapiens
caaacaatagaaaat

SEQ ID NO: 1452061 - DNA, 15 bp, Homo sapiens
aaacaatagaaaatg

SEQ ID NO: 1452062 - DNA, 15 bp, Homo sapiens
aacaatagaaaatga

SEQ ID NO: 1452063 - DNA, 15 bp, Homo sapiens
acaatagaaaatgac

SEQ ID NO: 1452064 - DNA, 15 bp, Homo sapiens
caatagaaaatgact

SEQ ID NO: 1452065 - DNA, 15 bp, Homo sapiens
aatagaaaatgacta

SEQ ID NO: 1452066 - DNA, 15 bp, Homo sapiens
atagaaaatgactac

SEQ ID NO: 1452067 - DNA, 15 bp, Homo sapiens
tagaaaatgactact

SEQ ID NO: 1452068 - DNA, 15 bp, Homo sapiens
agaaaatgactacta

SEQ ID NO: 1452069 - DNA, 15 bp, Homo sapiens
gaaaatgactactac

SEQ ID NO: 1452070 - DNA, 15 bp, Homo sapiens
aaaatgactactacc

SEQ ID NO: 1452071 - DNA, 15 bp, Homo sapiens
aaatgactactaccc

SEQ ID NO: 1452072 - DNA, 15 bp, Homo sapiens
aatgactactaccca

SEQ ID NO: 1452073 - DNA, 15 bp, Homo sapiens
atgactactacccat

SEQ ID NO: 1452074 - DNA, 15 bp, Homo sapiens
tgactactacccatg

SEQ ID NO: 1452075 - DNA, 15 bp, Homo sapiens
gactactacccatgc

SEQ ID NO: 1452076 - DNA, 15 bp, Homo sapiens
actactacccatgca

SEQ ID NO: 1452077 - DNA, 15 bp, Homo sapiens
ctactacccatgcaa

SEQ ID NO: 1452078 - DNA, 15 bp, Homo sapiens
tactacccatgcaaa

SEQ ID NO: 1452079 - DNA, 15 bp, Homo sapiens
actacccatgcaaag

SEQ ID NO: 1452080 - DNA, 15 bp, Homo sapiens
ctacccatgcaaagg

SEQ ID NO: 1452081 - DNA, 15 bp, Homo sapiens
tacccatgcaaaggc

SEQ ID NO: 1452082 - DNA, 15 bp, Homo sapiens
acccatgcaaaggca

SEQ ID NO: 1452083 - DNA, 15 bp, Homo sapiens
cccatgcaaaggcaa

SEQ ID NO: 1452084 - DNA, 15 bp, Homo sapiens
ccatgcaaaggcaaa

SEQ ID NO: 1452085 - DNA, 15 bp, Homo sapiens
catgcaaaggcaaag

SEQ ID NO: 1452086 - DNA, 15 bp, Homo sapiens
atgcaaaggcaaagc

SEQ ID NO: 1452087 - DNA, 15 bp, Homo sapiens
tgcaaaggcaaagcc

SEQ ID NO: 1452088 - DNA, 15 bp, Homo sapiens
gcaaaggcaaagcca

SEQ ID NO: 1452089 - DNA, 15 bp, Homo sapiens
caaaggcaaagccat

SEQ ID NO: 1452090 - DNA, 15 bp, Homo sapiens
aaaggcaaagccata

SEQ ID NO: 1452091 - DNA, 15 bp, Homo sapiens
aaggcaaagccatat

SEQ ID NO: 1452092 - DNA, 15 bp, Homo sapiens
aggcaaagccatata

SEQ ID NO: 1452093 - DNA, 15 bp, Homo sapiens
ggcaaagccatataa

SEQ ID NO: 1452094 - DNA, 15 bp, Homo sapiens
gcaaagccatataaa

SEQ ID NO: 1452095 - DNA, 15 bp, Homo sapiens
caaagccatataaag

SEQ ID NO: 1452096 - DNA, 15 bp, Homo sapiens
aaagccatataaagg

SEQ ID NO: 1452097 - DNA, 15 bp, Homo sapiens
aagccatataaagga

SEQ ID NO: 1452098 - DNA, 15 bp, Homo sapiens
agccatataaaggaa

SEQ ID NO: 1452099 - DNA, 15 bp, Homo sapiens
gccatataaaggaaa

SEQ ID NO: 1452100 - DNA, 15 bp, Homo sapiens
ccatataaaggaaac

SEQ ID NO: 1452101 - DNA, 15 bp, Homo sapiens
catataaaggaaaca

SEQ ID NO: 1452102 - DNA, 15 bp, Homo sapiens
atataaaggaaacaa

SEQ ID NO: 1452103 - DNA, 15 bp, Homo sapiens
tataaaggaaacaaa

SEQ ID NO: 1452104 - DNA, 15 bp, Homo sapiens
ataaaggaaacaaaa

SEQ ID NO: 1452105 - DNA, 15 bp, Homo sapiens
taaaggaaacaaaat

SEQ ID NO: 1452106 - DNA, 15 bp, Homo sapiens
aaaggaaacaaaatt

SEQ ID NO: 1452107 - DNA, 15 bp, Homo sapiens
aaggaaacaaaattt

SEQ ID NO: 1452108 - DNA, 15 bp, Homo sapiens
aggaaacaaaatttg

SEQ ID NO: 1452109 - DNA, 15 bp, Homo sapiens
ggaaacaaaatttgt

SEQ ID NO: 1452110 - DNA, 15 bp, Homo sapiens
gaaacaaaatttgtt

SEQ ID NO: 1452111 - DNA, 15 bp, Homo sapiens
aaacaaaatttgttt

SEQ ID NO: 1452112 - DNA, 15 bp, Homo sapiens
aacaaaatttgttta

SEQ ID NO: 1452113 - DNA, 15 bp, Homo sapiens
acaaaatttgtttaa

SEQ ID NO: 1452114 - DNA, 15 bp, Homo sapiens
caaaatttgtttaaa

SEQ ID NO: 1452115 - DNA, 15 bp, Homo sapiens
aaaatttgtttaaat

SEQ ID NO: 1452116 - DNA, 15 bp, Homo sapiens
aaatttgtttaaata

SEQ ID NO: 1452117 - DNA, 15 bp, Homo sapiens
aatttgtttaaataa

SEQ ID NO: 1452118 - DNA, 15 bp, Homo sapiens
atttgtttaaataaa

SEQ ID NO: 1452119 - DNA, 15 bp, Homo sapiens
tttgtttaaataaaa

SEQ ID NO: 1452120 - DNA, 15 bp, Homo sapiens
ttgtttaaataaaag

SEQ ID NO: 1452121 - DNA, 15 bp, Homo sapiens
tgtttaaataaaaga

SEQ ID NO: 1452122 - DNA, 15 bp, Homo sapiens
gtttaaataaaagaa

SEQ ID NO: 1452123 - DNA, 15 bp, Homo sapiens
tttaaataaaagaaa

SEQ ID NO: 1452124 - DNA, 15 bp, Homo sapiens
ttaaataaaagaaat

SEQ ID NO: 1452125 - DNA, 15 bp, Homo sapiens
taaataaaagaaata

SEQ ID NO: 1452126 - DNA, 15 bp, Homo sapiens
aaataaaagaaatag

SEQ ID NO: 1452127 - DNA, 15 bp, Homo sapiens
aataaaagaaataga

SEQ ID NO: 1452128 - DNA, 15 bp, Homo sapiens
ataaaagaaatagaa

SEQ ID NO: 1452129 - DNA, 15 bp, Homo sapiens
taaaagaaatagaag

SEQ ID NO: 1452130 - DNA, 15 bp, Homo sapiens
aaaagaaatagaagc

SEQ ID NO: 1452131 - DNA, 15 bp, Homo sapiens
aaagaaatagaagca

SEQ ID NO: 1452132 - DNA, 15 bp, Homo sapiens
aagaaatagaagcag

SEQ ID NO: 1452133 - DNA, 15 bp, Homo sapiens
agaaatagaagcagg

SEQ ID NO: 1452134 - DNA, 15 bp, Homo sapiens
gaaatagaagcaggc

SEQ ID NO: 1452135 - DNA, 15 bp, Homo sapiens
aaatagaagcaggcc

SEQ ID NO: 1452136 - DNA, 15 bp, Homo sapiens
aatagaagcaggcca

SEQ ID NO: 1452137 - DNA, 15 bp, Homo sapiens
atagaagcaggccag

SEQ ID NO: 1452138 - DNA, 15 bp, Homo sapiens
tagaagcaggccagg

SEQ ID NO: 1452139 - DNA, 15 bp, Homo sapiens
agaagcaggccaggc

SEQ ID NO: 1452140 - DNA, 15 bp, Homo sapiens
gaagcaggccaggca

SEQ ID NO: 1452141 - DNA, 15 bp, Homo sapiens
aagcaggccaggcac

SEQ ID NO: 1452142 - DNA, 15 bp, Homo sapiens
agcaggccaggcacg

SEQ ID NO: 1452143 - DNA, 15 bp, Homo sapiens
gcaggccaggcacgg

SEQ ID NO: 1452144 - DNA, 15 bp, Homo sapiens
caggccaggcacggt

SEQ ID NO: 1452145 - DNA, 15 bp, Homo sapiens
aggccaggcacggtg

SEQ ID NO: 1452146 - DNA, 15 bp, Homo sapiens
ggctcacgcctgtat

SEQ ID NO: 1452147 - DNA, 15 bp, Homo sapiens
gctcacgcctgtatc

SEQ ID NO: 1452148 - DNA, 15 bp, Homo sapiens
ctcacgcctgtatcc

SEQ ID NO: 1452149 - DNA, 15 bp, Homo sapiens
tcacgcctgtatccc

SEQ ID NO: 1452150 - DNA, 15 bp, Homo sapiens
cacgcctgtatccca

SEQ ID NO: 1452151 - DNA, 15 bp, Homo sapiens
acgcctgtatcccag

SEQ ID NO: 1452152 - DNA, 15 bp, Homo sapiens
cgcctgtatcccagc

SEQ ID NO: 1452153 - DNA, 15 bp, Homo sapiens
gcctgtatcccagca

SEQ ID NO: 1452154 - DNA, 15 bp, Homo sapiens
cctgtatcccagcac

SEQ ID NO: 1452155 - DNA, 15 bp, Homo sapiens
ctgtatcccagcact

SEQ ID NO: 1452156 - DNA, 15 bp, Homo sapiens
tgtatcccagcactt

SEQ ID NO: 1452157 - DNA, 15 bp, Homo sapiens
gtatcccagcacttt

SEQ ID NO: 1452158 - DNA, 15 bp, Homo sapiens
ccagcactttggaaa

SEQ ID NO: 1452159 - DNA, 15 bp, Homo sapiens
cagcactttggaaag

SEQ ID NO: 1452160 - DNA, 15 bp, Homo sapiens
agcactttggaaagc

SEQ ID NO: 1452161 - DNA, 15 bp, Homo sapiens
gcactttggaaagcc

SEQ ID NO: 1452162 - DNA, 15 bp, Homo sapiens
cactttggaaagcct

SEQ ID NO: 1452163 - DNA, 15 bp, Homo sapiens
actttggaaagcctg

SEQ ID NO: 1452164 - DNA, 15 bp, Homo sapiens
ctttggaaagcctgg

SEQ ID NO: 1452165 - DNA, 15 bp, Homo sapiens
tttggaaagcctggg

SEQ ID NO: 1452166 - DNA, 15 bp, Homo sapiens
ttggaaagcctgggg

SEQ ID NO: 1452167 - DNA, 15 bp, Homo sapiens
tggaaagcctggggg

SEQ ID NO: 1452168 - DNA, 15 bp, Homo sapiens
ggaaagcctggggga

SEQ ID NO: 1452169 - DNA, 15 bp, Homo sapiens
gaaagcctgggggac

SEQ ID NO: 1452170 - DNA, 15 bp, Homo sapiens
aaagcctgggggacg

SEQ ID NO: 1452171 - DNA, 15 bp, Homo sapiens
aagcctgggggacgg

SEQ ID NO: 1452172 - DNA, 15 bp, Homo sapiens
agcctgggggacgga

SEQ ID NO: 1452173 - DNA, 15 bp, Homo sapiens
gcctgggggacggat

SEQ ID NO: 1452174 - DNA, 15 bp, Homo sapiens
cctgggggacggatc

SEQ ID NO: 1452175 - DNA, 15 bp, Homo sapiens
ctgggggacggatca

SEQ ID NO: 1452176 - DNA, 15 bp, Homo sapiens
tgggggacggatcac

SEQ ID NO: 1452177 - DNA, 15 bp, Homo sapiens
gggggacggatcact

SEQ ID NO: 1452178 - DNA, 15 bp, Homo sapiens
ggggacggatcactt

SEQ ID NO: 1452179 - DNA, 15 bp, Homo sapiens
gggacggatcacttg

SEQ ID NO: 1452180 - DNA, 15 bp, Homo sapiens
ggacggatcacttga

SEQ ID NO: 1452181 - DNA, 15 bp, Homo sapiens
gacggatcacttgaa

SEQ ID NO: 1452182 - DNA, 15 bp, Homo sapiens
acggatcacttgaag

SEQ ID NO: 1452183 - DNA, 15 bp, Homo sapiens
gatcacttgaagtct

SEQ ID NO: 1452184 - DNA, 15 bp, Homo sapiens
atcacttgaagtctg

SEQ ID NO: 1452185 - DNA, 15 bp, Homo sapiens
tcacttgaagtctgg

SEQ ID NO: 1452186 - DNA, 15 bp, Homo sapiens
cacttgaagtctgga

SEQ ID NO: 1452187 - DNA, 15 bp, Homo sapiens
acttgaagtctggag

SEQ ID NO: 1452188 - DNA, 15 bp, Homo sapiens
cttgaagtctggagt

SEQ ID NO: 1452189 - DNA, 15 bp, Homo sapiens
ttgaagtctggagtt

SEQ ID NO: 1452190 - DNA, 15 bp, Homo sapiens
tgaagtctggagttc

SEQ ID NO: 1452191 - DNA, 15 bp, Homo sapiens
gaagtctggagttca

SEQ ID NO: 1452192 - DNA, 15 bp, Homo sapiens
aagtctggagttcaa

SEQ ID NO: 1452193 - DNA, 15 bp, Homo sapiens
agtctggagttcaag

SEQ ID NO: 1452194 - DNA, 15 bp, Homo sapiens
gtctggagttcaaga

SEQ ID NO: 1452195 - DNA, 15 bp, Homo sapiens
tctggagttcaagac

SEQ ID NO: 1452196 - DNA, 15 bp, Homo sapiens
ctggagttcaagacc

SEQ ID NO: 1452197 - DNA, 15 bp, Homo sapiens
tggagttcaagacca

SEQ ID NO: 1452198 - DNA, 15 bp, Homo sapiens
aaaaaaataaaattg

SEQ ID NO: 1452199 - DNA, 15 bp, Homo sapiens
aaaaaataaaattgc

SEQ ID NO: 1452200 - DNA, 15 bp, Homo sapiens
aaaaataaaattgcc

SEQ ID NO: 1452201 - DNA, 15 bp, Homo sapiens
aaaataaaattgccc

SEQ ID NO: 1452202 - DNA, 15 bp, Homo sapiens
aaataaaattgccca

SEQ ID NO: 1452203 - DNA, 15 bp, Homo sapiens
aataaaattgcccat

SEQ ID NO: 1452204 - DNA, 15 bp, Homo sapiens
ataaaattgcccatt

SEQ ID NO: 1452205 - DNA, 15 bp, Homo sapiens
taaaattgcccatta

SEQ ID NO: 1452206 - DNA, 15 bp, Homo sapiens
aaaattgcccattag

SEQ ID NO: 1452207 - DNA, 15 bp, Homo sapiens
aaattgcccattagg

SEQ ID NO: 1452208 - DNA, 15 bp, Homo sapiens
aattgcccattagga

SEQ ID NO: 1452209 - DNA, 15 bp, Homo sapiens
attgcccattaggat

SEQ ID NO: 1452210 - DNA, 15 bp, Homo sapiens
ttgcccattaggata

SEQ ID NO: 1452211 - DNA, 15 bp, Homo sapiens
tgcccattaggataa

SEQ ID NO: 1452212 - DNA, 15 bp, Homo sapiens
gcccattaggataaa

SEQ ID NO: 1452213 - DNA, 15 bp, Homo sapiens
cccattaggataaat

SEQ ID NO: 1452214 - DNA, 15 bp, Homo sapiens
ccattaggataaata

SEQ ID NO: 1452215 - DNA, 15 bp, Homo sapiens
cattaggataaataa

SEQ ID NO: 1452216 - DNA, 15 bp, Homo sapiens
attaggataaataaa

SEQ ID NO: 1452217 - DNA, 15 bp, Homo sapiens
ttaggataaataaaa

SEQ ID NO: 1452218 - DNA, 15 bp, Homo sapiens
taggataaataaaaa

SEQ ID NO: 1452219 - DNA, 15 bp, Homo sapiens
aggataaataaaaag

SEQ ID NO: 1452220 - DNA, 15 bp, Homo sapiens
ggataaataaaaaga

SEQ ID NO: 1452221 - DNA, 15 bp, Homo sapiens
gataaataaaaagac

SEQ ID NO: 1452222 - DNA, 15 bp, Homo sapiens
ataaataaaaagacc

SEQ ID NO: 1452223 - DNA, 15 bp, Homo sapiens
taaataaaaagaccc

SEQ ID NO: 1452224 - DNA, 15 bp, Homo sapiens
aaataaaaagaccca

SEQ ID NO: 1452225 - DNA, 15 bp, Homo sapiens
aataaaaagacccac

SEQ ID NO: 1452226 - DNA, 15 bp, Homo sapiens
ataaaaagacccaca

SEQ ID NO: 1452227 - DNA, 15 bp, Homo sapiens
taaaaagacccacac

SEQ ID NO: 1452228 - DNA, 15 bp, Homo sapiens
aaaaagacccacaca

SEQ ID NO: 1452229 - DNA, 15 bp, Homo sapiens
aaaagacccacacac

SEQ ID NO: 1452230 - DNA, 15 bp, Homo sapiens
aaagacccacacaca

SEQ ID NO: 1452231 - DNA, 15 bp, Homo sapiens
aagacccacacacaa

SEQ ID NO: 1452232 - DNA, 15 bp, Homo sapiens
agacccacacacaaa

SEQ ID NO: 1452233 - DNA, 15 bp, Homo sapiens
gacccacacacaaaa

SEQ ID NO: 1452234 - DNA, 15 bp, Homo sapiens
acccacacacaaaat

SEQ ID NO: 1452235 - DNA, 15 bp, Homo sapiens
cccacacacaaaatt

SEQ ID NO: 1452236 - DNA, 15 bp, Homo sapiens
ccacacacaaaatta

SEQ ID NO: 1452237 - DNA, 15 bp, Homo sapiens
cacacacaaaattat

SEQ ID NO: 1452238 - DNA, 15 bp, Homo sapiens
acacacaaaattatc

SEQ ID NO: 1452239 - DNA, 15 bp, Homo sapiens
cacacaaaattatca

SEQ ID NO: 1452240 - DNA, 15 bp, Homo sapiens
acacaaaattatcat

SEQ ID NO: 1452241 - DNA, 15 bp, Homo sapiens
cacaaaattatcatt

SEQ ID NO: 1452242 - DNA, 15 bp, Homo sapiens
acaaaattatcattg

SEQ ID NO: 1452243 - DNA, 15 bp, Homo sapiens
caaaattatcattgt

SEQ ID NO: 1452244 - DNA, 15 bp, Homo sapiens
aaaattatcattgtg

SEQ ID NO: 1452245 - DNA, 15 bp, Homo sapiens
aaattatcattgtgg

SEQ ID NO: 1452246 - DNA, 15 bp, Homo sapiens
aattatcattgtggc

SEQ ID NO: 1452247 - DNA, 15 bp, Homo sapiens
attatcattgtggca

SEQ ID NO: 1452248 - DNA, 15 bp, Homo sapiens
ttatcattgtggcat

SEQ ID NO: 1452249 - DNA, 15 bp, Homo sapiens
tatcattgtggcatt

SEQ ID NO: 1452250 - DNA, 15 bp, Homo sapiens
atcattgtggcattt

SEQ ID NO: 1452251 - DNA, 15 bp, Homo sapiens
tcattgtggcatttc

SEQ ID NO: 1452252 - DNA, 15 bp, Homo sapiens
cattgtggcatttca

SEQ ID NO: 1452253 - DNA, 15 bp, Homo sapiens
attgtggcatttcag

SEQ ID NO: 1452254 - DNA, 15 bp, Homo sapiens
ttgtggcatttcaga

SEQ ID NO: 1452255 - DNA, 15 bp, Homo sapiens
tgtggcatttcagag

SEQ ID NO: 1452256 - DNA, 15 bp, Homo sapiens
gtggcatttcagagc

SEQ ID NO: 1452257 - DNA, 15 bp, Homo sapiens
tggcatttcagagca

SEQ ID NO: 1452258 - DNA, 15 bp, Homo sapiens
ggcatttcagagcac

SEQ ID NO: 1452259 - DNA, 15 bp, Homo sapiens
gcatttcagagcaca

SEQ ID NO: 1452260 - DNA, 15 bp, Homo sapiens
catttcagagcacag

SEQ ID NO: 1452261 - DNA, 15 bp, Homo sapiens
atttcagagcacaga

SEQ ID NO: 1452262 - DNA, 15 bp, Homo sapiens
tttcagagcacagag

SEQ ID NO: 1452263 - DNA, 15 bp, Homo sapiens
ttcagagcacagaga

SEQ ID NO: 1452264 - DNA, 15 bp, Homo sapiens
tcagagcacagagag

SEQ ID NO: 1452265 - DNA, 15 bp, Homo sapiens
cagagcacagagaga

SEQ ID NO: 1452266 - DNA, 15 bp, Homo sapiens
agagcacagagagaa

SEQ ID NO: 1452267 - DNA, 15 bp, Homo sapiens
gagcacagagagaag

SEQ ID NO: 1452268 - DNA, 15 bp, Homo sapiens
agcacagagagaaga

SEQ ID NO: 1452269 - DNA, 15 bp, Homo sapiens
gcacagagagaagat

SEQ ID NO: 1452270 - DNA, 15 bp, Homo sapiens
cacagagagaagata

SEQ ID NO: 1452271 - DNA, 15 bp, Homo sapiens
acagagagaagatac

SEQ ID NO: 1452272 - DNA, 15 bp, Homo sapiens
cagagagaagatact

SEQ ID NO: 1452273 - DNA, 15 bp, Homo sapiens
agagagaagatactt

SEQ ID NO: 1452274 - DNA, 15 bp, Homo sapiens
gagagaagatactta

SEQ ID NO: 1452275 - DNA, 15 bp, Homo sapiens
agagaagatacttaa

SEQ ID NO: 1452276 - DNA, 15 bp, Homo sapiens
gagaagatacttaaa

SEQ ID NO: 1452277 - DNA, 15 bp, Homo sapiens
agaagatacttaaag

SEQ ID NO: 1452278 - DNA, 15 bp, Homo sapiens
gaagatacttaaagc

SEQ ID NO: 1452279 - DNA, 15 bp, Homo sapiens
aagatacttaaagct

SEQ ID NO: 1452280 - DNA, 15 bp, Homo sapiens
agatacttaaagctt

SEQ ID NO: 1452281 - DNA, 15 bp, Homo sapiens
gatacttaaagcttc

SEQ ID NO: 1452282 - DNA, 15 bp, Homo sapiens
atacttaaagcttct

SEQ ID NO: 1452283 - DNA, 15 bp, Homo sapiens
tacttaaagcttctt

SEQ ID NO: 1452284 - DNA, 15 bp, Homo sapiens
acttaaagcttcttc

SEQ ID NO: 1452285 - DNA, 15 bp, Homo sapiens
cttaaagcttcttct

SEQ ID NO: 1452286 - DNA, 15 bp, Homo sapiens
ttaaagcttcttctg

SEQ ID NO: 1452287 - DNA, 15 bp, Homo sapiens
taaagcttcttctga

SEQ ID NO: 1452288 - DNA, 15 bp, Homo sapiens
aaagcttcttctgag

SEQ ID NO: 1452289 - DNA, 15 bp, Homo sapiens
aagcttcttctgaga

SEQ ID NO: 1452290 - DNA, 15 bp, Homo sapiens
agcttcttctgagag

SEQ ID NO: 1452291 - DNA, 15 bp, Homo sapiens
gcttcttctgagagg

SEQ ID NO: 1452292 - DNA, 15 bp, Homo sapiens
cttcttctgagagga

SEQ ID NO: 1452293 - DNA, 15 bp, Homo sapiens
ttcttctgagaggaa

SEQ ID NO: 1452294 - DNA, 15 bp, Homo sapiens
tcttctgagaggaac

SEQ ID NO: 1452295 - DNA, 15 bp, Homo sapiens
cttctgagaggaaca

SEQ ID NO: 1452296 - DNA, 15 bp, Homo sapiens
ttctgagaggaacag

SEQ ID NO: 1452297 - DNA, 15 bp, Homo sapiens
tctgagaggaacagg

SEQ ID NO: 1452298 - DNA, 15 bp, Homo sapiens
ctgagaggaacagga

SEQ ID NO: 1452299 - DNA, 15 bp, Homo sapiens
tgagaggaacaggac

SEQ ID NO: 1452300 - DNA, 15 bp, Homo sapiens
gagaggaacaggacg

SEQ ID NO: 1452301 - DNA, 15 bp, Homo sapiens
agaggaacaggacgc

SEQ ID NO: 1452302 - DNA, 15 bp, Homo sapiens
gaggaacaggacgca

SEQ ID NO: 1452303 - DNA, 15 bp, Homo sapiens
aggaacaggacgcat

SEQ ID NO: 1452304 - DNA, 15 bp, Homo sapiens
ggaacaggacgcata

SEQ ID NO: 1452305 - DNA, 15 bp, Homo sapiens
gaacaggacgcatac

SEQ ID NO: 1452306 - DNA, 15 bp, Homo sapiens
aacaggacgcataca

SEQ ID NO: 1452307 - DNA, 15 bp, Homo sapiens
acaggacgcatacaa

SEQ ID NO: 1452308 - DNA, 15 bp, Homo sapiens
caggacgcatacaaa

SEQ ID NO: 1452309 - DNA, 15 bp, Homo sapiens
aggacgcatacaaaa

SEQ ID NO: 1452310 - DNA, 15 bp, Homo sapiens
ggacgcatacaaaag

SEQ ID NO: 1452311 - DNA, 15 bp, Homo sapiens
gacgcatacaaaaga

SEQ ID NO: 1452312 - DNA, 15 bp, Homo sapiens
acgcatacaaaagaa

SEQ ID NO: 1452313 - DNA, 15 bp, Homo sapiens
cgcatacaaaagaat

SEQ ID NO: 1452314 - DNA, 15 bp, Homo sapiens
gcatacaaaagaatg

SEQ ID NO: 1452315 - DNA, 15 bp, Homo sapiens
catacaaaagaatgg

SEQ ID NO: 1452316 - DNA, 15 bp, Homo sapiens
atacaaaagaatggg

SEQ ID NO: 1452317 - DNA, 15 bp, Homo sapiens
tacaaaagaatggga

SEQ ID NO: 1452318 - DNA, 15 bp, Homo sapiens
acaaaagaatgggaa

SEQ ID NO: 1452319 - DNA, 15 bp, Homo sapiens
caaaagaatgggaat

SEQ ID NO: 1452320 - DNA, 15 bp, Homo sapiens
aaaagaatgggaatt

SEQ ID NO: 1452321 - DNA, 15 bp, Homo sapiens
aaagaatgggaatta

SEQ ID NO: 1452322 - DNA, 15 bp, Homo sapiens
aagaatgggaattag

SEQ ID NO: 1452323 - DNA, 15 bp, Homo sapiens
agaatgggaattaga

SEQ ID NO: 1452324 - DNA, 15 bp, Homo sapiens
gaatgggaattagac

SEQ ID NO: 1452325 - DNA, 15 bp, Homo sapiens
aatgggaattagact

SEQ ID NO: 1452326 - DNA, 15 bp, Homo sapiens
atgggaattagactg

SEQ ID NO: 1452327 - DNA, 15 bp, Homo sapiens
tgggaattagactgg

SEQ ID NO: 1452328 - DNA, 15 bp, Homo sapiens
gggaattagactggc

SEQ ID NO: 1452329 - DNA, 15 bp, Homo sapiens
ggaattagactggcg

SEQ ID NO: 1452330 - DNA, 15 bp, Homo sapiens
gaattagactggcga

SEQ ID NO: 1452331 - DNA, 15 bp, Homo sapiens
aattagactggcgat

SEQ ID NO: 1452332 - DNA, 15 bp, Homo sapiens
attagactggcgata

SEQ ID NO: 1452333 - DNA, 15 bp, Homo sapiens
ttagactggcgatat

SEQ ID NO: 1452334 - DNA, 15 bp, Homo sapiens
tagactggcgatata

SEQ ID NO: 1452335 - DNA, 15 bp, Homo sapiens
agactggcgatataa

SEQ ID NO: 1452336 - DNA, 15 bp, Homo sapiens
gactggcgatataat

SEQ ID NO: 1452337 - DNA, 15 bp, Homo sapiens
actggcgatataatt

SEQ ID NO: 1452338 - DNA, 15 bp, Homo sapiens
ctggcgatataatta

SEQ ID NO: 1452339 - DNA, 15 bp, Homo sapiens
tggcgatataattaa

SEQ ID NO: 1452340 - DNA, 15 bp, Homo sapiens
ggcgatataattaag

SEQ ID NO: 1452341 - DNA, 15 bp, Homo sapiens
gcgatataattaagc

SEQ ID NO: 1452342 - DNA, 15 bp, Homo sapiens
cgatataattaagca

SEQ ID NO: 1452343 - DNA, 15 bp, Homo sapiens
gatataattaagcaa

SEQ ID NO: 1452344 - DNA, 15 bp, Homo sapiens
atataattaagcaat

SEQ ID NO: 1452345 - DNA, 15 bp, Homo sapiens
tataattaagcaata

SEQ ID NO: 1452346 - DNA, 15 bp, Homo sapiens
ataattaagcaatat

SEQ ID NO: 1452347 - DNA, 15 bp, Homo sapiens
taattaagcaatatt

SEQ ID NO: 1452348 - DNA, 15 bp, Homo sapiens
aattaagcaatattg

SEQ ID NO: 1452349 - DNA, 15 bp, Homo sapiens
attaagcaatattgt

SEQ ID NO: 1452350 - DNA, 15 bp, Homo sapiens
ttaagcaatattgta

SEQ ID NO: 1452351 - DNA, 15 bp, Homo sapiens
taagcaatattgtaa

SEQ ID NO: 1452352 - DNA, 15 bp, Homo sapiens
aagcaatattgtaaa

SEQ ID NO: 1452353 - DNA, 15 bp, Homo sapiens
agcaatattgtaaaa

SEQ ID NO: 1452354 - DNA, 15 bp, Homo sapiens
gcaatattgtaaaag

SEQ ID NO: 1452355 - DNA, 15 bp, Homo sapiens
caatattgtaaaaga

SEQ ID NO: 1452356 - DNA, 15 bp, Homo sapiens
aatattgtaaaagat

SEQ ID NO: 1452357 - DNA, 15 bp, Homo sapiens
atattgtaaaagatc

SEQ ID NO: 1452358 - DNA, 15 bp, Homo sapiens
tattgtaaaagatct

SEQ ID NO: 1452359 - DNA, 15 bp, Homo sapiens
attgtaaaagatcta

SEQ ID NO: 1452360 - DNA, 15 bp, Homo sapiens
ttgtaaaagatctaa

SEQ ID NO: 1452361 - DNA, 15 bp, Homo sapiens
tgtaaaagatctaag

SEQ ID NO: 1452362 - DNA, 15 bp, Homo sapiens
gtaaaagatctaagg

SEQ ID NO: 1452363 - DNA, 15 bp, Homo sapiens
taaaagatctaaggg

SEQ ID NO: 1452364 - DNA, 15 bp, Homo sapiens
aaaagatctaaggga

SEQ ID NO: 1452365 - DNA, 15 bp, Homo sapiens
aaagatctaagggaa

SEQ ID NO: 1452366 - DNA, 15 bp, Homo sapiens
aagatctaagggaaa

SEQ ID NO: 1452367 - DNA, 15 bp, Homo sapiens
agatctaagggaaaa

SEQ ID NO: 1452368 - DNA, 15 bp, Homo sapiens
gatctaagggaaaaa

SEQ ID NO: 1452369 - DNA, 15 bp, Homo sapiens
atctaagggaaaaat

SEQ ID NO: 1452370 - DNA, 15 bp, Homo sapiens
tctaagggaaaaatt

SEQ ID NO: 1452371 - DNA, 15 bp, Homo sapiens
ctaagggaaaaatta

SEQ ID NO: 1452372 - DNA, 15 bp, Homo sapiens
taagggaaaaattat

SEQ ID NO: 1452373 - DNA, 15 bp, Homo sapiens
aagggaaaaattatt

SEQ ID NO: 1452374 - DNA, 15 bp, Homo sapiens
agggaaaaattattt

SEQ ID NO: 1452375 - DNA, 15 bp, Homo sapiens
gggaaaaattatttg

SEQ ID NO: 1452376 - DNA, 15 bp, Homo sapiens
ggaaaaattatttgg

SEQ ID NO: 1452377 - DNA, 15 bp, Homo sapiens
gaaaaattatttgga

SEQ ID NO: 1452378 - DNA, 15 bp, Homo sapiens
aaaaattatttggaa

SEQ ID NO: 1452379 - DNA, 15 bp, Homo sapiens
aaaattatttggaac

SEQ ID NO: 1452380 - DNA, 15 bp, Homo sapiens
aaattatttggaacc

SEQ ID NO: 1452381 - DNA, 15 bp, Homo sapiens
aattatttggaacct

SEQ ID NO: 1452382 - DNA, 15 bp, Homo sapiens
attatttggaaccta

SEQ ID NO: 1452383 - DNA, 15 bp, Homo sapiens
ttatttggaacctag

SEQ ID NO: 1452384 - DNA, 15 bp, Homo sapiens
tatttggaacctaga

SEQ ID NO: 1452385 - DNA, 15 bp, Homo sapiens
atttggaacctagaa

SEQ ID NO: 1452386 - DNA, 15 bp, Homo sapiens
tttggaacctagaat

SEQ ID NO: 1452387 - DNA, 15 bp, Homo sapiens
ttggaacctagaatt

SEQ ID NO: 1452388 - DNA, 15 bp, Homo sapiens
tggaacctagaattt

SEQ ID NO: 1452389 - DNA, 15 bp, Homo sapiens
ggaacctagaatttt

SEQ ID NO: 1452390 - DNA, 15 bp, Homo sapiens
gaacctagaattttt

SEQ ID NO: 1452391 - DNA, 15 bp, Homo sapiens
aacctagaattttta

SEQ ID NO: 1452392 - DNA, 15 bp, Homo sapiens
acctagaatttttag

SEQ ID NO: 1452393 - DNA, 15 bp, Homo sapiens
cctagaatttttagt

SEQ ID NO: 1452394 - DNA, 15 bp, Homo sapiens
ctagaatttttagtc

SEQ ID NO: 1452395 - DNA, 15 bp, Homo sapiens
tagaatttttagtca

SEQ ID NO: 1452396 - DNA, 15 bp, Homo sapiens
agaatttttagtcaa

SEQ ID NO: 1452397 - DNA, 15 bp, Homo sapiens
gaatttttagtcaaa

SEQ ID NO: 1452398 - DNA, 15 bp, Homo sapiens
aatttttagtcaaac

SEQ ID NO: 1452399 - DNA, 15 bp, Homo sapiens
atttttagtcaaact

SEQ ID NO: 1452400 - DNA, 15 bp, Homo sapiens
tttttagtcaaacta

SEQ ID NO: 1452401 - DNA, 15 bp, Homo sapiens
ttttagtcaaactat

SEQ ID NO: 1452402 - DNA, 15 bp, Homo sapiens
tttagtcaaactatg

SEQ ID NO: 1452403 - DNA, 15 bp, Homo sapiens
ttagtcaaactatga

SEQ ID NO: 1452404 - DNA, 15 bp, Homo sapiens
tagtcaaactatgaa

SEQ ID NO: 1452405 - DNA, 15 bp, Homo sapiens
agtcaaactatgaat

SEQ ID NO: 1452406 - DNA, 15 bp, Homo sapiens
gtcaaactatgaatc

SEQ ID NO: 1452407 - DNA, 15 bp, Homo sapiens
tcaaactatgaatca

SEQ ID NO: 1452408 - DNA, 15 bp, Homo sapiens
caaactatgaatcaa

SEQ ID NO: 1452409 - DNA, 15 bp, Homo sapiens
aaactatgaatcaat

SEQ ID NO: 1452410 - DNA, 15 bp, Homo sapiens
aactatgaatcaatt

SEQ ID NO: 1452411 - DNA, 15 bp, Homo sapiens
actatgaatcaattt

SEQ ID NO: 1452412 - DNA, 15 bp, Homo sapiens
ctatgaatcaatttt

SEQ ID NO: 1452413 - DNA, 15 bp, Homo sapiens
tatgaatcaattttg

SEQ ID NO: 1452414 - DNA, 15 bp, Homo sapiens
atgaatcaattttgg

SEQ ID NO: 1452415 - DNA, 15 bp, Homo sapiens
tgaatcaattttggg

SEQ ID NO: 1452416 - DNA, 15 bp, Homo sapiens
gaatcaattttgggg

SEQ ID NO: 1452417 - DNA, 15 bp, Homo sapiens
aatcaattttggggg

SEQ ID NO: 1452418 - DNA, 15 bp, Homo sapiens
atcaattttggggga

SEQ ID NO: 1452419 - DNA, 15 bp, Homo sapiens
tcaattttgggggaa

SEQ ID NO: 1452420 - DNA, 15 bp, Homo sapiens
caattttgggggaag

SEQ ID NO: 1452421 - DNA, 15 bp, Homo sapiens
aattttgggggaaga

SEQ ID NO: 1452422 - DNA, 15 bp, Homo sapiens
attttgggggaagaa

SEQ ID NO: 1452423 - DNA, 15 bp, Homo sapiens
ttttgggggaagaaa

SEQ ID NO: 1452424 - DNA, 15 bp, Homo sapiens
tttgggggaagaaaa

SEQ ID NO: 1452425 - DNA, 15 bp, Homo sapiens
ttgggggaagaaaaa

SEQ ID NO: 1452426 - DNA, 15 bp, Homo sapiens
tgggggaagaaaaaa

SEQ ID NO: 1452427 - DNA, 15 bp, Homo sapiens
gggggaagaaaaaag

SEQ ID NO: 1452428 - DNA, 15 bp, Homo sapiens
ggggaagaaaaaaga

SEQ ID NO: 1452429 - DNA, 15 bp, Homo sapiens
gggaagaaaaaagac

SEQ ID NO: 1452430 - DNA, 15 bp, Homo sapiens
ggaagaaaaaagaca

SEQ ID NO: 1452431 - DNA, 15 bp, Homo sapiens
gaagaaaaaagacat

SEQ ID NO: 1452432 - DNA, 15 bp, Homo sapiens
aagaaaaaagacatt

SEQ ID NO: 1452433 - DNA, 15 bp, Homo sapiens
agaaaaaagacattt

SEQ ID NO: 1452434 - DNA, 15 bp, Homo sapiens
gaaaaaagacatttt

SEQ ID NO: 1452435 - DNA, 15 bp, Homo sapiens
aaaaaagacattttc

SEQ ID NO: 1452436 - DNA, 15 bp, Homo sapiens
aaaaagacattttca

SEQ ID NO: 1452437 - DNA, 15 bp, Homo sapiens
aaaagacattttcat

SEQ ID NO: 1452438 - DNA, 15 bp, Homo sapiens
aaagacattttcata

SEQ ID NO: 1452439 - DNA, 15 bp, Homo sapiens
aagacattttcatat

SEQ ID NO: 1452440 - DNA, 15 bp, Homo sapiens
agacattttcatata

SEQ ID NO: 1452441 - DNA, 15 bp, Homo sapiens
gacattttcatatat

SEQ ID NO: 1452442 - DNA, 15 bp, Homo sapiens
acattttcatatata

SEQ ID NO: 1452443 - DNA, 15 bp, Homo sapiens
cattttcatatatag

SEQ ID NO: 1452444 - DNA, 15 bp, Homo sapiens
attttcatatataga

SEQ ID NO: 1452445 - DNA, 15 bp, Homo sapiens
ttttcatatatagag

SEQ ID NO: 1452446 - DNA, 15 bp, Homo sapiens
tttcatatatagagg

SEQ ID NO: 1452447 - DNA, 15 bp, Homo sapiens
ttcatatatagaggg

SEQ ID NO: 1452448 - DNA, 15 bp, Homo sapiens
tcatatatagagggc

SEQ ID NO: 1452449 - DNA, 15 bp, Homo sapiens
catatatagagggcc

SEQ ID NO: 1452450 - DNA, 15 bp, Homo sapiens
atatatagagggcct

SEQ ID NO: 1452451 - DNA, 15 bp, Homo sapiens
tatatagagggcctt

SEQ ID NO: 1452452 - DNA, 15 bp, Homo sapiens
atatagagggcctta

SEQ ID NO: 1452453 - DNA, 15 bp, Homo sapiens
tatagagggccttaa

SEQ ID NO: 1452454 - DNA, 15 bp, Homo sapiens
atagagggccttaat

SEQ ID NO: 1452455 - DNA, 15 bp, Homo sapiens
tagagggccttaata

SEQ ID NO: 1452456 - DNA, 15 bp, Homo sapiens
agagggccttaatag

SEQ ID NO: 1452457 - DNA, 15 bp, Homo sapiens
gagggccttaatagt

SEQ ID NO: 1452458 - DNA, 15 bp, Homo sapiens
agggccttaatagtc

SEQ ID NO: 1452459 - DNA, 15 bp, Homo sapiens
gggccttaatagtca

SEQ ID NO: 1452460 - DNA, 15 bp, Homo sapiens
ggccttaatagtcac

SEQ ID NO: 1452461 - DNA, 15 bp, Homo sapiens
gccttaatagtcact

SEQ ID NO: 1452462 - DNA, 15 bp, Homo sapiens
ccttaatagtcactg

SEQ ID NO: 1452463 - DNA, 15 bp, Homo sapiens
cttaatagtcactga

SEQ ID NO: 1452464 - DNA, 15 bp, Homo sapiens
ttaatagtcactgaa

SEQ ID NO: 1452465 - DNA, 15 bp, Homo sapiens
taatagtcactgaat

SEQ ID NO: 1452466 - DNA, 15 bp, Homo sapiens
aatagtcactgaatg

SEQ ID NO: 1452467 - DNA, 15 bp, Homo sapiens
atagtcactgaatgt

SEQ ID NO: 1452468 - DNA, 15 bp, Homo sapiens
tagtcactgaatgtg

SEQ ID NO: 1452469 - DNA, 15 bp, Homo sapiens
agtcactgaatgtgt

SEQ ID NO: 1452470 - DNA, 15 bp, Homo sapiens
gtcactgaatgtgta

SEQ ID NO: 1452471 - DNA, 15 bp, Homo sapiens
tcactgaatgtgtac

SEQ ID NO: 1452472 - DNA, 15 bp, Homo sapiens
cactgaatgtgtact

SEQ ID NO: 1452473 - DNA, 15 bp, Homo sapiens
actgaatgtgtacta

SEQ ID NO: 1452474 - DNA, 15 bp, Homo sapiens
ctgaatgtgtactat

SEQ ID NO: 1452475 - DNA, 15 bp, Homo sapiens
tgaatgtgtactata

SEQ ID NO: 1452476 - DNA, 15 bp, Homo sapiens
gaatgtgtactatag

SEQ ID NO: 1452477 - DNA, 15 bp, Homo sapiens
aatgtgtactatagt

SEQ ID NO: 1452478 - DNA, 15 bp, Homo sapiens
atgtgtactatagta

SEQ ID NO: 1452479 - DNA, 15 bp, Homo sapiens
tgtgtactatagtaa

SEQ ID NO: 1452480 - DNA, 15 bp, Homo sapiens
gtgtactatagtaaa

SEQ ID NO: 1452481 - DNA, 15 bp, Homo sapiens
tgtactatagtaaaa

SEQ ID NO: 1452482 - DNA, 15 bp, Homo sapiens
gtactatagtaaaac

SEQ ID NO: 1452483 - DNA, 15 bp, Homo sapiens
tactatagtaaaacc

SEQ ID NO: 1452484 - DNA, 15 bp, Homo sapiens
actatagtaaaacca

SEQ ID NO: 1452485 - DNA, 15 bp, Homo sapiens
ctatagtaaaaccag

SEQ ID NO: 1452486 - DNA, 15 bp, Homo sapiens
tatagtaaaaccaga

SEQ ID NO: 1452487 - DNA, 15 bp, Homo sapiens
atagtaaaaccagaa

SEQ ID NO: 1452488 - DNA, 15 bp, Homo sapiens
tagtaaaaccagaaa

SEQ ID NO: 1452489 - DNA, 15 bp, Homo sapiens
agtaaaaccagaaac

SEQ ID NO: 1452490 - DNA, 15 bp, Homo sapiens
gtaaaaccagaaact

SEQ ID NO: 1452491 - DNA, 15 bp, Homo sapiens
taaaaccagaaacta

SEQ ID NO: 1452492 - DNA, 15 bp, Homo sapiens
aaaaccagaaactac

SEQ ID NO: 1452493 - DNA, 15 bp, Homo sapiens
aaaccagaaactaca

SEQ ID NO: 1452494 - DNA, 15 bp, Homo sapiens
aaccagaaactacat

SEQ ID NO: 1452495 - DNA, 15 bp, Homo sapiens
accagaaactacata

SEQ ID NO: 1452496 - DNA, 15 bp, Homo sapiens
ccagaaactacataa

SEQ ID NO: 1452497 - DNA, 15 bp, Homo sapiens
cagaaactacataaa

SEQ ID NO: 1452498 - DNA, 15 bp, Homo sapiens
agaaactacataaaa

SEQ ID NO: 1452499 - DNA, 15 bp, Homo sapiens
gaaactacataaaag

SEQ ID NO: 1452500 - DNA, 15 bp, Homo sapiens
aaactacataaaaga

SEQ ID NO: 1452501 - DNA, 15 bp, Homo sapiens
aactacataaaagag

SEQ ID NO: 1452502 - DNA, 15 bp, Homo sapiens
actacataaaagagg

SEQ ID NO: 1452503 - DNA, 15 bp, Homo sapiens
ctacataaaagagga

SEQ ID NO: 1452504 - DNA, 15 bp, Homo sapiens
tacataaaagaggaa

SEQ ID NO: 1452505 - DNA, 15 bp, Homo sapiens
acataaaagaggaat

SEQ ID NO: 1452506 - DNA, 15 bp, Homo sapiens
cataaaagaggaatt

SEQ ID NO: 1452507 - DNA, 15 bp, Homo sapiens
ataaaagaggaattt

SEQ ID NO: 1452508 - DNA, 15 bp, Homo sapiens
taaaagaggaatttg

SEQ ID NO: 1452509 - DNA, 15 bp, Homo sapiens
aaaagaggaatttgg

SEQ ID NO: 1452510 - DNA, 15 bp, Homo sapiens
aaagaggaatttggg

SEQ ID NO: 1452511 - DNA, 15 bp, Homo sapiens
aagaggaatttggga

SEQ ID NO: 1452512 - DNA, 15 bp, Homo sapiens
agaggaatttgggag

SEQ ID NO: 1452513 - DNA, 15 bp, Homo sapiens
gaggaatttgggaga

SEQ ID NO: 1452514 - DNA, 15 bp, Homo sapiens
aggaatttgggagat

SEQ ID NO: 1452515 - DNA, 15 bp, Homo sapiens
ggaatttgggagatt

SEQ ID NO: 1452516 - DNA, 15 bp, Homo sapiens
gaatttgggagattc

SEQ ID NO: 1452517 - DNA, 15 bp, Homo sapiens
aatttgggagattca

SEQ ID NO: 1452518 - DNA, 15 bp, Homo sapiens
atttgggagattcag

SEQ ID NO: 1452519 - DNA, 15 bp, Homo sapiens
tttgggagattcagc

SEQ ID NO: 1452520 - DNA, 15 bp, Homo sapiens
ttgggagattcagca

SEQ ID NO: 1452521 - DNA, 15 bp, Homo sapiens
tgggagattcagcaa

SEQ ID NO: 1452522 - DNA, 15 bp, Homo sapiens
gggagattcagcaac

SEQ ID NO: 1452523 - DNA, 15 bp, Homo sapiens
ggagattcagcaacc

SEQ ID NO: 1452524 - DNA, 15 bp, Homo sapiens
gagattcagcaaccc

SEQ ID NO: 1452525 - DNA, 15 bp, Homo sapiens
agattcagcaaccca

SEQ ID NO: 1452526 - DNA, 15 bp, Homo sapiens
gattcagcaacccaa

SEQ ID NO: 1452527 - DNA, 15 bp, Homo sapiens
attcagcaacccaag

SEQ ID NO: 1452528 - DNA, 15 bp, Homo sapiens
ttcagcaacccaaga

SEQ ID NO: 1452529 - DNA, 15 bp, Homo sapiens
tcagcaacccaagag

SEQ ID NO: 1452530 - DNA, 15 bp, Homo sapiens
cagcaacccaagaga

SEQ ID NO: 1452531 - DNA, 15 bp, Homo sapiens
agcaacccaagagaa

SEQ ID NO: 1452532 - DNA, 15 bp, Homo sapiens
gcaacccaagagaat

SEQ ID NO: 1452533 - DNA, 15 bp, Homo sapiens
caacccaagagaata

SEQ ID NO: 1452534 - DNA, 15 bp, Homo sapiens
aacccaagagaataa

SEQ ID NO: 1452535 - DNA, 15 bp, Homo sapiens
acccaagagaataat

SEQ ID NO: 1452536 - DNA, 15 bp, Homo sapiens
cccaagagaataatg

SEQ ID NO: 1452537 - DNA, 15 bp, Homo sapiens
ccaagagaataatga

SEQ ID NO: 1452538 - DNA, 15 bp, Homo sapiens
caagagaataatgaa

SEQ ID NO: 1452539 - DNA, 15 bp, Homo sapiens
aagagaataatgaag

SEQ ID NO: 1452540 - DNA, 15 bp, Homo sapiens
agagaataatgaagt

SEQ ID NO: 1452541 - DNA, 15 bp, Homo sapiens
gagaataatgaagta

SEQ ID NO: 1452542 - DNA, 15 bp, Homo sapiens
agaataatgaagtat

SEQ ID NO: 1452543 - DNA, 15 bp, Homo sapiens
gaataatgaagtatg

SEQ ID NO: 1452544 - DNA, 15 bp, Homo sapiens
aataatgaagtatga

SEQ ID NO: 1452545 - DNA, 15 bp, Homo sapiens
ataatgaagtatgag

SEQ ID NO: 1452546 - DNA, 15 bp, Homo sapiens
taatgaagtatgagg

SEQ ID NO: 1452547 - DNA, 15 bp, Homo sapiens
aatgaagtatgaggg

SEQ ID NO: 1452548 - DNA, 15 bp, Homo sapiens
atgaagtatgagggg

SEQ ID NO: 1452549 - DNA, 15 bp, Homo sapiens
tgaagtatgaggggg

SEQ ID NO: 1452550 - DNA, 15 bp, Homo sapiens
gaagtatgaggggga

SEQ ID NO: 1452551 - DNA, 15 bp, Homo sapiens
aagtatgagggggat

SEQ ID NO: 1452552 - DNA, 15 bp, Homo sapiens
agtatgagggggatg

SEQ ID NO: 1452553 - DNA, 15 bp, Homo sapiens
gtatgagggggatgt

SEQ ID NO: 1452554 - DNA, 15 bp, Homo sapiens
tatgagggggatgtt

SEQ ID NO: 1452555 - DNA, 15 bp, Homo sapiens
atgagggggatgttt

SEQ ID NO: 1452556 - DNA, 15 bp, Homo sapiens
tgagggggatgtttt

SEQ ID NO: 1452557 - DNA, 15 bp, Homo sapiens
gagggggatgttttc

SEQ ID NO: 1452558 - DNA, 15 bp, Homo sapiens
agggggatgttttct

SEQ ID NO: 1452559 - DNA, 15 bp, Homo sapiens
gggggatgttttctc

SEQ ID NO: 1452560 - DNA, 15 bp, Homo sapiens
ggggatgttttctcc

SEQ ID NO: 1452561 - DNA, 15 bp, Homo sapiens
gggatgttttctcct

SEQ ID NO: 1452562 - DNA, 15 bp, Homo sapiens
ggatgttttctcctt

SEQ ID NO: 1452563 - DNA, 15 bp, Homo sapiens
gatgttttctcctta

SEQ ID NO: 1452564 - DNA, 15 bp, Homo sapiens
atgttttctccttag

SEQ ID NO: 1452565 - DNA, 15 bp, Homo sapiens
tgttttctccttagt

SEQ ID NO: 1452566 - DNA, 15 bp, Homo sapiens
gttttctccttagtt

SEQ ID NO: 1452567 - DNA, 15 bp, Homo sapiens
ttttctccttagttc

SEQ ID NO: 1452568 - DNA, 15 bp, Homo sapiens
tttctccttagttct

SEQ ID NO: 1452569 - DNA, 15 bp, Homo sapiens
ttctccttagttctt

SEQ ID NO: 1452570 - DNA, 15 bp, Homo sapiens
tctccttagttcttt

SEQ ID NO: 1452571 - DNA, 15 bp, Homo sapiens
ctccttagttctttt

SEQ ID NO: 1452572 - DNA, 15 bp, Homo sapiens
tccttagttcttttc

SEQ ID NO: 1452573 - DNA, 15 bp, Homo sapiens
ccttagttcttttcc

SEQ ID NO: 1452574 - DNA, 15 bp, Homo sapiens
cttagttcttttccg

SEQ ID NO: 1452575 - DNA, 15 bp, Homo sapiens
ttagttcttttccgt

SEQ ID NO: 1452576 - DNA, 15 bp, Homo sapiens
tagttcttttccgta

SEQ ID NO: 1452577 - DNA, 15 bp, Homo sapiens
agttcttttccgtat

SEQ ID NO: 1452578 - DNA, 15 bp, Homo sapiens
gttcttttccgtatt

SEQ ID NO: 1452579 - DNA, 15 bp, Homo sapiens
ttcttttccgtattt

SEQ ID NO: 1452580 - DNA, 15 bp, Homo sapiens
tcttttccgtatttt

SEQ ID NO: 1452581 - DNA, 15 bp, Homo sapiens
cttttccgtattttt

SEQ ID NO: 1452582 - DNA, 15 bp, Homo sapiens
ttttccgtatttttc

SEQ ID NO: 1452583 - DNA, 15 bp, Homo sapiens
tttccgtatttttca

SEQ ID NO: 1452584 - DNA, 15 bp, Homo sapiens
ttccgtatttttcaa

SEQ ID NO: 1452585 - DNA, 15 bp, Homo sapiens
tccgtatttttcaat

SEQ ID NO: 1452586 - DNA, 15 bp, Homo sapiens
ccgtatttttcaata

SEQ ID NO: 1452587 - DNA, 15 bp, Homo sapiens
cgtatttttcaataa

SEQ ID NO: 1452588 - DNA, 15 bp, Homo sapiens
gtatttttcaataat

SEQ ID NO: 1452589 - DNA, 15 bp, Homo sapiens
tatttttcaataatt

SEQ ID NO: 1452590 - DNA, 15 bp, Homo sapiens
atttttcaataattt

SEQ ID NO: 1452591 - DNA, 15 bp, Homo sapiens
tttttcaataatttg

SEQ ID NO: 1452592 - DNA, 15 bp, Homo sapiens
ttttcaataatttga

SEQ ID NO: 1452593 - DNA, 15 bp, Homo sapiens
tttcaataatttgat

SEQ ID NO: 1452594 - DNA, 15 bp, Homo sapiens
ttcaataatttgata

SEQ ID NO: 1452595 - DNA, 15 bp, Homo sapiens
tcaataatttgataa

SEQ ID NO: 1452596 - DNA, 15 bp, Homo sapiens
caataatttgataat

SEQ ID NO: 1452597 - DNA, 15 bp, Homo sapiens
aataatttgataata

SEQ ID NO: 1452598 - DNA, 15 bp, Homo sapiens
ataatttgataataa

SEQ ID NO: 1452599 - DNA, 15 bp, Homo sapiens
taatttgataataaa

SEQ ID NO: 1452600 - DNA, 15 bp, Homo sapiens
aatttgataataaac

SEQ ID NO: 1452601 - DNA, 15 bp, Homo sapiens
atttgataataaaca

SEQ ID NO: 1452602 - DNA, 15 bp, Homo sapiens
tttgataataaacat

SEQ ID NO: 1452603 - DNA, 15 bp, Homo sapiens
ttgataataaacatg

SEQ ID NO: 1452604 - DNA, 15 bp, Homo sapiens
tgataataaacatgc

SEQ ID NO: 1452605 - DNA, 15 bp, Homo sapiens
gataataaacatgca

SEQ ID NO: 1452606 - DNA, 15 bp, Homo sapiens
ataataaacatgcat

SEQ ID NO: 1452607 - DNA, 15 bp, Homo sapiens
taataaacatgcata

SEQ ID NO: 1452608 - DNA, 15 bp, Homo sapiens
aataaacatgcataa

SEQ ID NO: 1452609 - DNA, 15 bp, Homo sapiens
ataaacatgcataat

SEQ ID NO: 1452610 - DNA, 15 bp, Homo sapiens
taaacatgcataatt

SEQ ID NO: 1452611 - DNA, 15 bp, Homo sapiens
aaacatgcataattt

SEQ ID NO: 1452612 - DNA, 15 bp, Homo sapiens
aacatgcataatttt

SEQ ID NO: 1452613 - DNA, 15 bp, Homo sapiens
acatgcataatttta

SEQ ID NO: 1452614 - DNA, 15 bp, Homo sapiens
catgcataattttat

SEQ ID NO: 1452615 - DNA, 15 bp, Homo sapiens
atgcataattttata

SEQ ID NO: 1452616 - DNA, 15 bp, Homo sapiens
tgcataattttataa

SEQ ID NO: 1452617 - DNA, 15 bp, Homo sapiens
gcataattttataat

SEQ ID NO: 1452618 - DNA, 15 bp, Homo sapiens
cataattttataatt

SEQ ID NO: 1452619 - DNA, 15 bp, Homo sapiens
ataattttataatta

SEQ ID NO: 1452620 - DNA, 15 bp, Homo sapiens
taattttataattaa

SEQ ID NO: 1452621 - DNA, 15 bp, Homo sapiens
aattttataattaaa

SEQ ID NO: 1452622 - DNA, 15 bp, Homo sapiens
ttttataattaaaaa

SEQ ID NO: 1452623 - DNA, 15 bp, Homo sapiens
ataattaaaaaggaa

SEQ ID NO: 1452624 - DNA, 15 bp, Homo sapiens
taattaaaaaggaaa

SEQ ID NO: 1452625 - DNA, 15 bp, Homo sapiens
aattaaaaaggaaat

SEQ ID NO: 1452626 - DNA, 15 bp, Homo sapiens
attaaaaaggaaatt

SEQ ID NO: 1452627 - DNA, 15 bp, Homo sapiens
ttaaaaaggaaatta

SEQ ID NO: 1452628 - DNA, 15 bp, Homo sapiens
taaaaaggaaattaa

SEQ ID NO: 1452629 - DNA, 15 bp, Homo sapiens
aaaaggaaattaatt

SEQ ID NO: 1452630 - DNA, 15 bp, Homo sapiens
aaaggaaattaattt

SEQ ID NO: 1452631 - DNA, 15 bp, Homo sapiens
aaggaaattaatttt

SEQ ID NO: 1452632 - DNA, 15 bp, Homo sapiens
aggaaattaattttg

SEQ ID NO: 1452633 - DNA, 15 bp, Homo sapiens
ggaaattaattttga

SEQ ID NO: 1452634 - DNA, 15 bp, Homo sapiens
gaaattaattttgac

SEQ ID NO: 1452635 - DNA, 15 bp, Homo sapiens
aaattaattttgaca

SEQ ID NO: 1452636 - DNA, 15 bp, Homo sapiens
aattaattttgacaa

SEQ ID NO: 1452637 - DNA, 15 bp, Homo sapiens
attaattttgacaac

SEQ ID NO: 1452638 - DNA, 15 bp, Homo sapiens
ttaattttgacaaca

SEQ ID NO: 1452639 - DNA, 15 bp, Homo sapiens
taattttgacaacat

SEQ ID NO: 1452640 - DNA, 15 bp, Homo sapiens
aattttgacaacatg

SEQ ID NO: 1452641 - DNA, 15 bp, Homo sapiens
attttgacaacatgc

SEQ ID NO: 1452642 - DNA, 15 bp, Homo sapiens
ttttgacaacatgca

SEQ ID NO: 1452643 - DNA, 15 bp, Homo sapiens
tttgacaacatgcaa

SEQ ID NO: 1452644 - DNA, 15 bp, Homo sapiens
ttgacaacatgcaag

SEQ ID NO: 1452645 - DNA, 15 bp, Homo sapiens
tgacaacatgcaagt

SEQ ID NO: 1452646 - DNA, 15 bp, Homo sapiens
gacaacatgcaagtt

SEQ ID NO: 1452647 - DNA, 15 bp, Homo sapiens
acaacatgcaagttc

SEQ ID NO: 1452648 - DNA, 15 bp, Homo sapiens
caacatgcaagttcc

SEQ ID NO: 1452649 - DNA, 15 bp, Homo sapiens
aacatgcaagttcct

SEQ ID NO: 1452650 - DNA, 15 bp, Homo sapiens
acatgcaagttcctg

SEQ ID NO: 1452651 - DNA, 15 bp, Homo sapiens
catgcaagttcctgt

SEQ ID NO: 1452652 - DNA, 15 bp, Homo sapiens
atgcaagttcctgtt

SEQ ID NO: 1452653 - DNA, 15 bp, Homo sapiens
tgcaagttcctgttc

SEQ ID NO: 1452654 - DNA, 15 bp, Homo sapiens
gcaagttcctgttct

SEQ ID NO: 1452655 - DNA, 15 bp, Homo sapiens
caagttcctgttctc

SEQ ID NO: 1452656 - DNA, 15 bp, Homo sapiens
aagttcctgttctca

SEQ ID NO: 1452657 - DNA, 15 bp, Homo sapiens
agttcctgttctcac

SEQ ID NO: 1452658 - DNA, 15 bp, Homo sapiens
gttcctgttctcaca

SEQ ID NO: 1452659 - DNA, 15 bp, Homo sapiens
ttcctgttctcacat

SEQ ID NO: 1452660 - DNA, 15 bp, Homo sapiens
tcctgttctcacata

SEQ ID NO: 1452661 - DNA, 15 bp, Homo sapiens
cctgttctcacatac

SEQ ID NO: 1452662 - DNA, 15 bp, Homo sapiens
ctgttctcacatacc

SEQ ID NO: 1452663 - DNA, 15 bp, Homo sapiens
tgttctcacatacct

SEQ ID NO: 1452664 - DNA, 15 bp, Homo sapiens
gttctcacatacctt

SEQ ID NO: 1452665 - DNA, 15 bp, Homo sapiens
ttctcacatacctta

SEQ ID NO: 1452666 - DNA, 15 bp, Homo sapiens
tctcacataccttat

SEQ ID NO: 1452667 - DNA, 15 bp, Homo sapiens
ctcacataccttata

SEQ ID NO: 1452668 - DNA, 15 bp, Homo sapiens
tcacataccttatag

SEQ ID NO: 1452669 - DNA, 15 bp, Homo sapiens
cacataccttatagt

SEQ ID NO: 1452670 - DNA, 15 bp, Homo sapiens
acataccttatagtg

SEQ ID NO: 1452671 - DNA, 15 bp, Homo sapiens
cataccttatagtgg

SEQ ID NO: 1452672 - DNA, 15 bp, Homo sapiens
ataccttatagtgga

SEQ ID NO: 1452673 - DNA, 15 bp, Homo sapiens
taccttatagtggag

SEQ ID NO: 1452674 - DNA, 15 bp, Homo sapiens
accttatagtggagg

SEQ ID NO: 1452675 - DNA, 15 bp, Homo sapiens
ccttatagtggaggg

SEQ ID NO: 1452676 - DNA, 15 bp, Homo sapiens
cttatagtggaggga

SEQ ID NO: 1452677 - DNA, 15 bp, Homo sapiens
ttatagtggagggac

SEQ ID NO: 1452678 - DNA, 15 bp, Homo sapiens
tatagtggagggaca

SEQ ID NO: 1452679 - DNA, 15 bp, Homo sapiens
atagtggagggacag

SEQ ID NO: 1452680 - DNA, 15 bp, Homo sapiens
tagtggagggacaga

SEQ ID NO: 1452681 - DNA, 15 bp, Homo sapiens
agtggagggacagat

SEQ ID NO: 1452682 - DNA, 15 bp, Homo sapiens
gtggagggacagatt

SEQ ID NO: 1452683 - DNA, 15 bp, Homo sapiens
tggagggacagattg

SEQ ID NO: 1452684 - DNA, 15 bp, Homo sapiens
ggagggacagattgt

SEQ ID NO: 1452685 - DNA, 15 bp, Homo sapiens
gagggacagattgta

SEQ ID NO: 1452686 - DNA, 15 bp, Homo sapiens
agggacagattgtag

SEQ ID NO: 1452687 - DNA, 15 bp, Homo sapiens
gggacagattgtagt

SEQ ID NO: 1452688 - DNA, 15 bp, Homo sapiens
ggacagattgtagtc

SEQ ID NO: 1452689 - DNA, 15 bp, Homo sapiens
gacagattgtagtca

SEQ ID NO: 1452690 - DNA, 15 bp, Homo sapiens
acagattgtagtcaa

SEQ ID NO: 1452691 - DNA, 15 bp, Homo sapiens
cagattgtagtcaaa

SEQ ID NO: 1452692 - DNA, 15 bp, Homo sapiens
agattgtagtcaaat

SEQ ID NO: 1452693 - DNA, 15 bp, Homo sapiens
gattgtagtcaaata

SEQ ID NO: 1452694 - DNA, 15 bp, Homo sapiens
attgtagtcaaataa

SEQ ID NO: 1452695 - DNA, 15 bp, Homo sapiens
ttgtagtcaaataag

SEQ ID NO: 1452696 - DNA, 15 bp, Homo sapiens
tgtagtcaaataagc

SEQ ID NO: 1452697 - DNA, 15 bp, Homo sapiens
gtagtcaaataagca

SEQ ID NO: 1452698 - DNA, 15 bp, Homo sapiens
tagtcaaataagcat

SEQ ID NO: 1452699 - DNA, 15 bp, Homo sapiens
agtcaaataagcata

SEQ ID NO: 1452700 - DNA, 15 bp, Homo sapiens
gtcaaataagcataa

SEQ ID NO: 1452701 - DNA, 15 bp, Homo sapiens
tcaaataagcataat

SEQ ID NO: 1452702 - DNA, 15 bp, Homo sapiens
caaataagcataata

SEQ ID NO: 1452703 - DNA, 15 bp, Homo sapiens
aaataagcataataa

SEQ ID NO: 1452704 - DNA, 15 bp, Homo sapiens
aataagcataataat

SEQ ID NO: 1452705 - DNA, 15 bp, Homo sapiens
ataagcataataata

SEQ ID NO: 1452706 - DNA, 15 bp, Homo sapiens
taagcataataatac

SEQ ID NO: 1452707 - DNA, 15 bp, Homo sapiens
aagcataataataca

SEQ ID NO: 1452708 - DNA, 15 bp, Homo sapiens
agcataataatacat

SEQ ID NO: 1452709 - DNA, 15 bp, Homo sapiens
gcataataatacatg

SEQ ID NO: 1452710 - DNA, 15 bp, Homo sapiens
cataataatacatgc

SEQ ID NO: 1452711 - DNA, 15 bp, Homo sapiens
ataataatacatgca

SEQ ID NO: 1452712 - DNA, 15 bp, Homo sapiens
taataatacatgcaa

SEQ ID NO: 1452713 - DNA, 15 bp, Homo sapiens
aataatacatgcaaa

SEQ ID NO: 1452714 - DNA, 15 bp, Homo sapiens
ataatacatgcaaaa

SEQ ID NO: 1452715 - DNA, 15 bp, Homo sapiens
taatacatgcaaaat

SEQ ID NO: 1452716 - DNA, 15 bp, Homo sapiens
aatacatgcaaaatt

SEQ ID NO: 1452717 - DNA, 15 bp, Homo sapiens
atacatgcaaaatta

SEQ ID NO: 1452718 - DNA, 15 bp, Homo sapiens
tacatgcaaaattac

SEQ ID NO: 1452719 - DNA, 15 bp, Homo sapiens
acatgcaaaattaca

SEQ ID NO: 1452720 - DNA, 15 bp, Homo sapiens
catgcaaaattacaa

SEQ ID NO: 1452721 - DNA, 15 bp, Homo sapiens
atgcaaaattacaaa

SEQ ID NO: 1452722 - DNA, 15 bp, Homo sapiens
tgcaaaattacaaac

SEQ ID NO: 1452723 - DNA, 15 bp, Homo sapiens
gcaaaattacaaact

SEQ ID NO: 1452724 - DNA, 15 bp, Homo sapiens
caaaattacaaactg

SEQ ID NO: 1452725 - DNA, 15 bp, Homo sapiens
aaaattacaaactga

SEQ ID NO: 1452726 - DNA, 15 bp, Homo sapiens
aaattacaaactgag

SEQ ID NO: 1452727 - DNA, 15 bp, Homo sapiens
aattacaaactgagc

SEQ ID NO: 1452728 - DNA, 15 bp, Homo sapiens
attacaaactgagca

SEQ ID NO: 1452729 - DNA, 15 bp, Homo sapiens
ttacaaactgagcat

SEQ ID NO: 1452730 - DNA, 15 bp, Homo sapiens
tacaaactgagcatt

SEQ ID NO: 1452731 - DNA, 15 bp, Homo sapiens
acaaactgagcatta

SEQ ID NO: 1452732 - DNA, 15 bp, Homo sapiens
caaactgagcattac

SEQ ID NO: 1452733 - DNA, 15 bp, Homo sapiens
aaactgagcattact

SEQ ID NO: 1452734 - DNA, 15 bp, Homo sapiens
aactgagcattactc

SEQ ID NO: 1452735 - DNA, 15 bp, Homo sapiens
actgagcattactct

SEQ ID NO: 1452736 - DNA, 15 bp, Homo sapiens
ctgagcattactctg

SEQ ID NO: 1452737 - DNA, 15 bp, Homo sapiens
tgagcattactctga

SEQ ID NO: 1452738 - DNA, 15 bp, Homo sapiens
gagcattactctgaa

SEQ ID NO: 1452739 - DNA, 15 bp, Homo sapiens
agcattactctgaag

SEQ ID NO: 1452740 - DNA, 15 bp, Homo sapiens
gcattactctgaagg

SEQ ID NO: 1452741 - DNA, 15 bp, Homo sapiens
cattactctgaagga

SEQ ID NO: 1452742 - DNA, 15 bp, Homo sapiens
attactctgaaggaa

SEQ ID NO: 1452743 - DNA, 15 bp, Homo sapiens
ttactctgaaggaaa

SEQ ID NO: 1452744 - DNA, 15 bp, Homo sapiens
tactctgaaggaaaa

SEQ ID NO: 1452745 - DNA, 15 bp, Homo sapiens
actctgaaggaaaat

SEQ ID NO: 1452746 - DNA, 15 bp, Homo sapiens
ctctgaaggaaaatt

SEQ ID NO: 1452747 - DNA, 15 bp, Homo sapiens
ctgaaggaaaattac

SEQ ID NO: 1452748 - DNA, 15 bp, Homo sapiens
tgaaggaaaattaca

SEQ ID NO: 1452749 - DNA, 15 bp, Homo sapiens
gaaggaaaattacat

SEQ ID NO: 1452750 - DNA, 15 bp, Homo sapiens
aaggaaaattacata

SEQ ID NO: 1452751 - DNA, 15 bp, Homo sapiens
aggaaaattacataa

SEQ ID NO: 1452752 - DNA, 15 bp, Homo sapiens
ggaaaattacataat

SEQ ID NO: 1452753 - DNA, 15 bp, Homo sapiens
gaaaattacataatt

SEQ ID NO: 1452754 - DNA, 15 bp, Homo sapiens
aaaattacataattc

SEQ ID NO: 1452755 - DNA, 15 bp, Homo sapiens
aaattacataattct

SEQ ID NO: 1452756 - DNA, 15 bp, Homo sapiens
aattacataattcta

SEQ ID NO: 1452757 - DNA, 15 bp, Homo sapiens
attacataattctat

SEQ ID NO: 1452758 - DNA, 15 bp, Homo sapiens
ttacataattctatg

SEQ ID NO: 1452759 - DNA, 15 bp, Homo sapiens
tacataattctatgt

SEQ ID NO: 1452760 - DNA, 15 bp, Homo sapiens
acataattctatgta

SEQ ID NO: 1452761 - DNA, 15 bp, Homo sapiens
cataattctatgtaa

SEQ ID NO: 1452762 - DNA, 15 bp, Homo sapiens
ataattctatgtaag

SEQ ID NO: 1452763 - DNA, 15 bp, Homo sapiens
taattctatgtaagc

SEQ ID NO: 1452764 - DNA, 15 bp, Homo sapiens
aattctatgtaagcc

SEQ ID NO: 1452765 - DNA, 15 bp, Homo sapiens
attctatgtaagcct

SEQ ID NO: 1452766 - DNA, 15 bp, Homo sapiens
ttctatgtaagccta

SEQ ID NO: 1452767 - DNA, 15 bp, Homo sapiens
tctatgtaagcctat

SEQ ID NO: 1452768 - DNA, 15 bp, Homo sapiens
ctatgtaagcctata

SEQ ID NO: 1452769 - DNA, 15 bp, Homo sapiens
tatgtaagcctataa

SEQ ID NO: 1452770 - DNA, 15 bp, Homo sapiens
atgtaagcctataat

SEQ ID NO: 1452771 - DNA, 15 bp, Homo sapiens
tgtaagcctataata

SEQ ID NO: 1452772 - DNA, 15 bp, Homo sapiens
gtaagcctataatac

SEQ ID NO: 1452773 - DNA, 15 bp, Homo sapiens
taagcctataataca

SEQ ID NO: 1452774 - DNA, 15 bp, Homo sapiens
aagcctataatacag

SEQ ID NO: 1452775 - DNA, 15 bp, Homo sapiens
agcctataatacagg

SEQ ID NO: 1452776 - DNA, 15 bp, Homo sapiens
gcctataatacagga

SEQ ID NO: 1452777 - DNA, 15 bp, Homo sapiens
cctataatacaggaa

SEQ ID NO: 1452778 - DNA, 15 bp, Homo sapiens
ctataatacaggaat

SEQ ID NO: 1452779 - DNA, 15 bp, Homo sapiens
tataatacaggaatc

SEQ ID NO: 1452780 - DNA, 15 bp, Homo sapiens
ataatacaggaatct

SEQ ID NO: 1452781 - DNA, 15 bp, Homo sapiens
taatacaggaatctg

SEQ ID NO: 1452782 - DNA, 15 bp, Homo sapiens
aatacaggaatctga

SEQ ID NO: 1452783 - DNA, 15 bp, Homo sapiens
atacaggaatctgac

SEQ ID NO: 1452784 - DNA, 15 bp, Homo sapiens
tacaggaatctgacc

SEQ ID NO: 1452785 - DNA, 15 bp, Homo sapiens
acaggaatctgacct

SEQ ID NO: 1452786 - DNA, 15 bp, Homo sapiens
caggaatctgaccta

SEQ ID NO: 1452787 - DNA, 15 bp, Homo sapiens
aggaatctgacctag

SEQ ID NO: 1452788 - DNA, 15 bp, Homo sapiens
ggaatctgacctaga

SEQ ID NO: 1452789 - DNA, 15 bp, Homo sapiens
gaatctgacctagac

SEQ ID NO: 1452790 - DNA, 15 bp, Homo sapiens
aatctgacctagact

SEQ ID NO: 1452791 - DNA, 15 bp, Homo sapiens
atctgacctagactg

SEQ ID NO: 1452792 - DNA, 15 bp, Homo sapiens
tctgacctagactgg

SEQ ID NO: 1452793 - DNA, 15 bp, Homo sapiens
ctgacctagactggg

SEQ ID NO: 1452794 - DNA, 15 bp, Homo sapiens
tgacctagactgggg

SEQ ID NO: 1452795 - DNA, 15 bp, Homo sapiens
gacctagactgggga

SEQ ID NO: 1452796 - DNA, 15 bp, Homo sapiens
acctagactggggaa

SEQ ID NO: 1452797 - DNA, 15 bp, Homo sapiens
cctagactggggaat

SEQ ID NO: 1452798 - DNA, 15 bp, Homo sapiens
ctagactggggaatc

SEQ ID NO: 1452799 - DNA, 15 bp, Homo sapiens
tagactggggaatca

SEQ ID NO: 1452800 - DNA, 15 bp, Homo sapiens
agactggggaatcag

SEQ ID NO: 1452801 - DNA, 15 bp, Homo sapiens
gactggggaatcaga

SEQ ID NO: 1452802 - DNA, 15 bp, Homo sapiens
actggggaatcagag

SEQ ID NO: 1452803 - DNA, 15 bp, Homo sapiens
ctggggaatcagaga

SEQ ID NO: 1452804 - DNA, 15 bp, Homo sapiens
tggggaatcagagaa

SEQ ID NO: 1452805 - DNA, 15 bp, Homo sapiens
ggggaatcagagaag

SEQ ID NO: 1452806 - DNA, 15 bp, Homo sapiens
gggaatcagagaagg

SEQ ID NO: 1452807 - DNA, 15 bp, Homo sapiens
ggaatcagagaaggc

SEQ ID NO: 1452808 - DNA, 15 bp, Homo sapiens
gaatcagagaaggct

SEQ ID NO: 1452809 - DNA, 15 bp, Homo sapiens
aatcagagaaggctt

SEQ ID NO: 1452810 - DNA, 15 bp, Homo sapiens
agagaaggcttccct

SEQ ID NO: 1452811 - DNA, 15 bp, Homo sapiens
gagaaggcttcccta

SEQ ID NO: 1452812 - DNA, 15 bp, Homo sapiens
agaaggcttccctaa

SEQ ID NO: 1452813 - DNA, 15 bp, Homo sapiens
gaaggcttccctaag

SEQ ID NO: 1452814 - DNA, 15 bp, Homo sapiens
aaggcttccctaagc

SEQ ID NO: 1452815 - DNA, 15 bp, Homo sapiens
aggcttccctaagca

SEQ ID NO: 1452816 - DNA, 15 bp, Homo sapiens
ggcttccctaagcaa

SEQ ID NO: 1452817 - DNA, 15 bp, Homo sapiens
gcttccctaagcaag

SEQ ID NO: 1452818 - DNA, 15 bp, Homo sapiens
cttccctaagcaagt

SEQ ID NO: 1452819 - DNA, 15 bp, Homo sapiens
ttccctaagcaagta

SEQ ID NO: 1452820 - DNA, 15 bp, Homo sapiens
tccctaagcaagtac

SEQ ID NO: 1452821 - DNA, 15 bp, Homo sapiens
ccctaagcaagtacc

SEQ ID NO: 1452822 - DNA, 15 bp, Homo sapiens
cctaagcaagtaccc

SEQ ID NO: 1452823 - DNA, 15 bp, Homo sapiens
ctaagcaagtacccc

SEQ ID NO: 1452824 - DNA, 15 bp, Homo sapiens
taagcaagtacccct

SEQ ID NO: 1452825 - DNA, 15 bp, Homo sapiens
aagcaagtacccctt

SEQ ID NO: 1452826 - DNA, 15 bp, Homo sapiens
agcaagtaccccttg

SEQ ID NO: 1452827 - DNA, 15 bp, Homo sapiens
gcaagtaccccttga

SEQ ID NO: 1452828 - DNA, 15 bp, Homo sapiens
caagtaccccttgaa

SEQ ID NO: 1452829 - DNA, 15 bp, Homo sapiens
aagtaccccttgaac

SEQ ID NO: 1452830 - DNA, 15 bp, Homo sapiens
agtaccccttgaact

SEQ ID NO: 1452831 - DNA, 15 bp, Homo sapiens
gtaccccttgaactt

SEQ ID NO: 1452832 - DNA, 15 bp, Homo sapiens
taccccttgaactta

SEQ ID NO: 1452833 - DNA, 15 bp, Homo sapiens
accccttgaacttag

SEQ ID NO: 1452834 - DNA, 15 bp, Homo sapiens
ccccttgaacttagc

SEQ ID NO: 1452835 - DNA, 15 bp, Homo sapiens
cccttgaacttagct

SEQ ID NO: 1452836 - DNA, 15 bp, Homo sapiens
ccttgaacttagctt

SEQ ID NO: 1452837 - DNA, 15 bp, Homo sapiens
cttgaacttagcttt

SEQ ID NO: 1452838 - DNA, 15 bp, Homo sapiens
ttgaacttagctttg

SEQ ID NO: 1452839 - DNA, 15 bp, Homo sapiens
tgaacttagctttga

SEQ ID NO: 1452840 - DNA, 15 bp, Homo sapiens
gaacttagctttgaa

SEQ ID NO: 1452841 - DNA, 15 bp, Homo sapiens
aacttagctttgaaa

SEQ ID NO: 1452842 - DNA, 15 bp, Homo sapiens
acttagctttgaaac

SEQ ID NO: 1452843 - DNA, 15 bp, Homo sapiens
cttagctttgaaact

SEQ ID NO: 1452844 - DNA, 15 bp, Homo sapiens
ttagctttgaaactg

SEQ ID NO: 1452845 - DNA, 15 bp, Homo sapiens
tagctttgaaactgg

SEQ ID NO: 1452846 - DNA, 15 bp, Homo sapiens
agctttgaaactggg

SEQ ID NO: 1452847 - DNA, 15 bp, Homo sapiens
gctttgaaactggga

SEQ ID NO: 1452848 - DNA, 15 bp, Homo sapiens
ctttgaaactgggaa

SEQ ID NO: 1452849 - DNA, 15 bp, Homo sapiens
tttgaaactgggaaa

SEQ ID NO: 1452850 - DNA, 15 bp, Homo sapiens
ttgaaactgggaaaa

SEQ ID NO: 1452851 - DNA, 15 bp, Homo sapiens
tgaaactgggaaaat

SEQ ID NO: 1452852 - DNA, 15 bp, Homo sapiens
gaaactgggaaaatg

SEQ ID NO: 1452853 - DNA, 15 bp, Homo sapiens
aaactgggaaaatga

SEQ ID NO: 1452854 - DNA, 15 bp, Homo sapiens
aactgggaaaatgag

SEQ ID NO: 1452855 - DNA, 15 bp, Homo sapiens
actgggaaaatgagg

SEQ ID NO: 1452856 - DNA, 15 bp, Homo sapiens
ctgggaaaatgaggc

SEQ ID NO: 1452857 - DNA, 15 bp, Homo sapiens
tgggaaaatgaggca

SEQ ID NO: 1452858 - DNA, 15 bp, Homo sapiens
gggaaaatgaggcaa

SEQ ID NO: 1452859 - DNA, 15 bp, Homo sapiens
ggaaaatgaggcaat

SEQ ID NO: 1452860 - DNA, 15 bp, Homo sapiens
gaaaatgaggcaatg

SEQ ID NO: 1452861 - DNA, 15 bp, Homo sapiens
aaaatgaggcaatgt

SEQ ID NO: 1452862 - DNA, 15 bp, Homo sapiens
aaatgaggcaatgtg

SEQ ID NO: 1452863 - DNA, 15 bp, Homo sapiens
aatgaggcaatgtga

SEQ ID NO: 1452864 - DNA, 15 bp, Homo sapiens
atgaggcaatgtgag

SEQ ID NO: 1452865 - DNA, 15 bp, Homo sapiens
tgaggcaatgtgaga

SEQ ID NO: 1452866 - DNA, 15 bp, Homo sapiens
gaggcaatgtgagat

SEQ ID NO: 1452867 - DNA, 15 bp, Homo sapiens
aggcaatgtgagatg

SEQ ID NO: 1452868 - DNA, 15 bp, Homo sapiens
ggcaatgtgagatga

SEQ ID NO: 1452869 - DNA, 15 bp, Homo sapiens
gcaatgtgagatgaa

SEQ ID NO: 1452870 - DNA, 15 bp, Homo sapiens
caatgtgagatgaag

SEQ ID NO: 1452871 - DNA, 15 bp, Homo sapiens
aatgtgagatgaagc

SEQ ID NO: 1452872 - DNA, 15 bp, Homo sapiens
atgtgagatgaagct

SEQ ID NO: 1452873 - DNA, 15 bp, Homo sapiens
tgtgagatgaagctg

SEQ ID NO: 1452874 - DNA, 15 bp, Homo sapiens
gtgagatgaagctgt

SEQ ID NO: 1452875 - DNA, 15 bp, Homo sapiens
tgagatgaagctgtt

SEQ ID NO: 1452876 - DNA, 15 bp, Homo sapiens
gagatgaagctgtta

SEQ ID NO: 1452877 - DNA, 15 bp, Homo sapiens
agatgaagctgttag

SEQ ID NO: 1452878 - DNA, 15 bp, Homo sapiens
gatgaagctgttaga

SEQ ID NO: 1452879 - DNA, 15 bp, Homo sapiens
atgaagctgttagag

SEQ ID NO: 1452880 - DNA, 15 bp, Homo sapiens
tgaagctgttagagg

SEQ ID NO: 1452881 - DNA, 15 bp, Homo sapiens
gaagctgttagaggt

SEQ ID NO: 1452882 - DNA, 15 bp, Homo sapiens
aagctgttagaggta

SEQ ID NO: 1452883 - DNA, 15 bp, Homo sapiens
agctgttagaggtat

SEQ ID NO: 1452884 - DNA, 15 bp, Homo sapiens
gctgttagaggtatt

SEQ ID NO: 1452885 - DNA, 15 bp, Homo sapiens
ctgttagaggtatta

SEQ ID NO: 1452886 - DNA, 15 bp, Homo sapiens
tgttagaggtattag

SEQ ID NO: 1452887 - DNA, 15 bp, Homo sapiens
gttagaggtattagg

SEQ ID NO: 1452888 - DNA, 15 bp, Homo sapiens
ttagaggtattagga

SEQ ID NO: 1452889 - DNA, 15 bp, Homo sapiens
tagaggtattaggaa

SEQ ID NO: 1452890 - DNA, 15 bp, Homo sapiens
agaggtattaggaat

SEQ ID NO: 1452891 - DNA, 15 bp, Homo sapiens
gaggtattaggaatc

SEQ ID NO: 1452892 - DNA, 15 bp, Homo sapiens
aggtattaggaatca

SEQ ID NO: 1452893 - DNA, 15 bp, Homo sapiens
ggtattaggaatcaa

SEQ ID NO: 1452894 - DNA, 15 bp, Homo sapiens
gtattaggaatcaaa

SEQ ID NO: 1452895 - DNA, 15 bp, Homo sapiens
tattaggaatcaaac

SEQ ID NO: 1452896 - DNA, 15 bp, Homo sapiens
attaggaatcaaacc

SEQ ID NO: 1452897 - DNA, 15 bp, Homo sapiens
ttaggaatcaaacct

SEQ ID NO: 1452898 - DNA, 15 bp, Homo sapiens
taggaatcaaaccta

SEQ ID NO: 1452899 - DNA, 15 bp, Homo sapiens
aggaatcaaacctat

SEQ ID NO: 1452900 - DNA, 15 bp, Homo sapiens
ggaatcaaacctatt

SEQ ID NO: 1452901 - DNA, 15 bp, Homo sapiens
gaatcaaacctattg

SEQ ID NO: 1452902 - DNA, 15 bp, Homo sapiens
aatcaaacctattgg

SEQ ID NO: 1452903 - DNA, 15 bp, Homo sapiens
atcaaacctattggg

SEQ ID NO: 1452904 - DNA, 15 bp, Homo sapiens
tcaaacctattgggg

SEQ ID NO: 1452905 - DNA, 15 bp, Homo sapiens
caaacctattggggc

SEQ ID NO: 1452906 - DNA, 15 bp, Homo sapiens
aaacctattggggcc

SEQ ID NO: 1452907 - DNA, 15 bp, Homo sapiens
aacctattggggcct

SEQ ID NO: 1452908 - DNA, 15 bp, Homo sapiens
acctattggggcctt

SEQ ID NO: 1452909 - DNA, 15 bp, Homo sapiens
cctattggggccttc

SEQ ID NO: 1452910 - DNA, 15 bp, Homo sapiens
ctattggggccttct

SEQ ID NO: 1452911 - DNA, 15 bp, Homo sapiens
tattggggccttcta

SEQ ID NO: 1452912 - DNA, 15 bp, Homo sapiens
attggggccttctag

SEQ ID NO: 1452913 - DNA, 15 bp, Homo sapiens
ttggggccttctagt

SEQ ID NO: 1452914 - DNA, 15 bp, Homo sapiens
tggggccttctagtc

SEQ ID NO: 1452915 - DNA, 15 bp, Homo sapiens
ggggccttctagtcc

SEQ ID NO: 1452916 - DNA, 15 bp, Homo sapiens
gggccttctagtcct

SEQ ID NO: 1452917 - DNA, 15 bp, Homo sapiens
ggccttctagtcctt

SEQ ID NO: 1452918 - DNA, 15 bp, Homo sapiens
gccttctagtcctta

SEQ ID NO: 1452919 - DNA, 15 bp, Homo sapiens
ccttctagtccttag

SEQ ID NO: 1452920 - DNA, 15 bp, Homo sapiens
cttctagtccttagt

SEQ ID NO: 1452921 - DNA, 15 bp, Homo sapiens
ttctagtccttagta

SEQ ID NO: 1452922 - DNA, 15 bp, Homo sapiens
tctagtccttagtag

SEQ ID NO: 1452923 - DNA, 15 bp, Homo sapiens
ctagtccttagtaga

SEQ ID NO: 1452924 - DNA, 15 bp, Homo sapiens
tagtccttagtagag

SEQ ID NO: 1452925 - DNA, 15 bp, Homo sapiens
agtccttagtagaga

SEQ ID NO: 1452926 - DNA, 15 bp, Homo sapiens
gtccttagtagagag

SEQ ID NO: 1452927 - DNA, 15 bp, Homo sapiens
tccttagtagagagt

SEQ ID NO: 1452928 - DNA, 15 bp, Homo sapiens
ccttagtagagagtc

SEQ ID NO: 1452929 - DNA, 15 bp, Homo sapiens
cttagtagagagtct

SEQ ID NO: 1452930 - DNA, 15 bp, Homo sapiens
ttagtagagagtctg

SEQ ID NO: 1452931 - DNA, 15 bp, Homo sapiens
tagtagagagtctgg

SEQ ID NO: 1452932 - DNA, 15 bp, Homo sapiens
agtagagagtctgga

SEQ ID NO: 1452933 - DNA, 15 bp, Homo sapiens
gtagagagtctggac

SEQ ID NO: 1452934 - DNA, 15 bp, Homo sapiens
tagagagtctggact

SEQ ID NO: 1452935 - DNA, 15 bp, Homo sapiens
agagagtctggactt

SEQ ID NO: 1452936 - DNA, 15 bp, Homo sapiens
gagagtctggacttt

SEQ ID NO: 1452937 - DNA, 15 bp, Homo sapiens
agagtctggacttta

SEQ ID NO: 1452938 - DNA, 15 bp, Homo sapiens
gagtctggactttat

SEQ ID NO: 1452939 - DNA, 15 bp, Homo sapiens
agtctggactttatt

SEQ ID NO: 1452940 - DNA, 15 bp, Homo sapiens
gtctggactttattc

SEQ ID NO: 1452941 - DNA, 15 bp, Homo sapiens
tctggactttattct

SEQ ID NO: 1452942 - DNA, 15 bp, Homo sapiens
ctggactttattcta

SEQ ID NO: 1452943 - DNA, 15 bp, Homo sapiens
tggactttattctat

SEQ ID NO: 1452944 - DNA, 15 bp, Homo sapiens
ggactttattctatg

SEQ ID NO: 1452945 - DNA, 15 bp, Homo sapiens
gactttattctatgt

SEQ ID NO: 1452946 - DNA, 15 bp, Homo sapiens
actttattctatgtg

SEQ ID NO: 1452947 - DNA, 15 bp, Homo sapiens
ctttattctatgtgg

SEQ ID NO: 1452948 - DNA, 15 bp, Homo sapiens
tttattctatgtgga

SEQ ID NO: 1452949 - DNA, 15 bp, Homo sapiens
ttattctatgtggaa

SEQ ID NO: 1452950 - DNA, 15 bp, Homo sapiens
tattctatgtggaat

SEQ ID NO: 1452951 - DNA, 15 bp, Homo sapiens
attctatgtggaatg

SEQ ID NO: 1452952 - DNA, 15 bp, Homo sapiens
ttctatgtggaatga

SEQ ID NO: 1452953 - DNA, 15 bp, Homo sapiens
tctatgtggaatgac

SEQ ID NO: 1452954 - DNA, 15 bp, Homo sapiens
ctatgtggaatgaca

SEQ ID NO: 1452955 - DNA, 15 bp, Homo sapiens
tatgtggaatgacag

SEQ ID NO: 1452956 - DNA, 15 bp, Homo sapiens
atgtggaatgacagc

SEQ ID NO: 1452957 - DNA, 15 bp, Homo sapiens
tgtggaatgacagcc

SEQ ID NO: 1452958 - DNA, 15 bp, Homo sapiens
gtggaatgacagcct

SEQ ID NO: 1452959 - DNA, 15 bp, Homo sapiens
tggaatgacagcctc

SEQ ID NO: 1452960 - DNA, 15 bp, Homo sapiens
ggaatgacagcctcc

SEQ ID NO: 1452961 - DNA, 15 bp, Homo sapiens
gaatgacagcctcca

SEQ ID NO: 1452962 - DNA, 15 bp, Homo sapiens
aatgacagcctccag

SEQ ID NO: 1452963 - DNA, 15 bp, Homo sapiens
atgacagcctccagt

SEQ ID NO: 1452964 - DNA, 15 bp, Homo sapiens
tgacagcctccagtg

SEQ ID NO: 1452965 - DNA, 15 bp, Homo sapiens
gacagcctccagtgg

SEQ ID NO: 1452966 - DNA, 15 bp, Homo sapiens
acagcctccagtggg

SEQ ID NO: 1452967 - DNA, 15 bp, Homo sapiens
cagcctccagtgggt

SEQ ID NO: 1452968 - DNA, 15 bp, Homo sapiens
agcctccagtgggtt

SEQ ID NO: 1452969 - DNA, 15 bp, Homo sapiens
gcctccagtgggttt

SEQ ID NO: 1452970 - DNA, 15 bp, Homo sapiens
cctccagtgggtttt

SEQ ID NO: 1452971 - DNA, 15 bp, Homo sapiens
ctccagtgggtttta

SEQ ID NO: 1452972 - DNA, 15 bp, Homo sapiens
tccagtgggttttag

SEQ ID NO: 1452973 - DNA, 15 bp, Homo sapiens
ccagtgggttttagg

SEQ ID NO: 1452974 - DNA, 15 bp, Homo sapiens
cagtgggttttaggc

SEQ ID NO: 1452975 - DNA, 15 bp, Homo sapiens
agtgggttttaggct

SEQ ID NO: 1452976 - DNA, 15 bp, Homo sapiens
gtgggttttaggctg

SEQ ID NO: 1452977 - DNA, 15 bp, Homo sapiens
tgggttttaggctgg

SEQ ID NO: 1452978 - DNA, 15 bp, Homo sapiens
gggttttaggctggc

SEQ ID NO: 1452979 - DNA, 15 bp, Homo sapiens
ggttttaggctggcg

SEQ ID NO: 1452980 - DNA, 15 bp, Homo sapiens
gttttaggctggcgg

SEQ ID NO: 1452981 - DNA, 15 bp, Homo sapiens
ttttaggctggcgga

SEQ ID NO: 1452982 - DNA, 15 bp, Homo sapiens
tttaggctggcggat

SEQ ID NO: 1452983 - DNA, 15 bp, Homo sapiens
ttaggctggcggata

SEQ ID NO: 1452984 - DNA, 15 bp, Homo sapiens
taggctggcggatac

SEQ ID NO: 1452985 - DNA, 15 bp, Homo sapiens
aggctggcggatact

SEQ ID NO: 1452986 - DNA, 15 bp, Homo sapiens
ggctggcggatacta

SEQ ID NO: 1452987 - DNA, 15 bp, Homo sapiens
gctggcggatactac

SEQ ID NO: 1452988 - DNA, 15 bp, Homo sapiens
ctggcggatactaca

SEQ ID NO: 1452989 - DNA, 15 bp, Homo sapiens
tggcggatactacaa

SEQ ID NO: 1452990 - DNA, 15 bp, Homo sapiens
ggcggatactacaat

SEQ ID NO: 1452991 - DNA, 15 bp, Homo sapiens
gcggatactacaatc

SEQ ID NO: 1452992 - DNA, 15 bp, Homo sapiens
cggatactacaatca

SEQ ID NO: 1452993 - DNA, 15 bp, Homo sapiens
ggatactacaatcag

SEQ ID NO: 1452994 - DNA, 15 bp, Homo sapiens
gatactacaatcaga

SEQ ID NO: 1452995 - DNA, 15 bp, Homo sapiens
atactacaatcagat

SEQ ID NO: 1452996 - DNA, 15 bp, Homo sapiens
tactacaatcagatc

SEQ ID NO: 1452997 - DNA, 15 bp, Homo sapiens
actacaatcagatct

SEQ ID NO: 1452998 - DNA, 15 bp, Homo sapiens
ctacaatcagatctg

SEQ ID NO: 1452999 - DNA, 15 bp, Homo sapiens
tacaatcagatctgg

SEQ ID NO: 1453000 - DNA, 15 bp, Homo sapiens
acaatcagatctgga

SEQ ID NO: 1453001 - DNA, 15 bp, Homo sapiens
caatcagatctggaa

SEQ ID NO: 1453002 - DNA, 15 bp, Homo sapiens
aatcagatctggaat

SEQ ID NO: 1453003 - DNA, 15 bp, Homo sapiens
atcagatctggaatg

SEQ ID NO: 1453004 - DNA, 15 bp, Homo sapiens
tcagatctggaatgc

SEQ ID NO: 1453005 - DNA, 15 bp, Homo sapiens
cagatctggaatgca

SEQ ID NO: 1453006 - DNA, 15 bp, Homo sapiens
agatctggaatgcag

SEQ ID NO: 1453007 - DNA, 15 bp, Homo sapiens
gatctggaatgcaga

SEQ ID NO: 1453008 - DNA, 15 bp, Homo sapiens
atctggaatgcagaa

SEQ ID NO: 1453009 - DNA, 15 bp, Homo sapiens
tctggaatgcagaaa

SEQ ID NO: 1453010 - DNA, 15 bp, Homo sapiens
ctggaatgcagaaat

SEQ ID NO: 1453011 - DNA, 15 bp, Homo sapiens
tggaatgcagaaata

SEQ ID NO: 1453012 - DNA, 15 bp, Homo sapiens
ggaatgcagaaatag

SEQ ID NO: 1453013 - DNA, 15 bp, Homo sapiens
gaatgcagaaatagt

SEQ ID NO: 1453014 - DNA, 15 bp, Homo sapiens
aatgcagaaatagta

SEQ ID NO: 1453015 - DNA, 15 bp, Homo sapiens
atgcagaaatagtac

SEQ ID NO: 1453016 - DNA, 15 bp, Homo sapiens
tgcagaaatagtaca

SEQ ID NO: 1453017 - DNA, 15 bp, Homo sapiens
gcagaaatagtacac

SEQ ID NO: 1453018 - DNA, 15 bp, Homo sapiens
cagaaatagtacacc

SEQ ID NO: 1453019 - DNA, 15 bp, Homo sapiens
agaaatagtacacca

SEQ ID NO: 1453020 - DNA, 15 bp, Homo sapiens
gaaatagtacaccag

SEQ ID NO: 1453021 - DNA, 15 bp, Homo sapiens
aaatagtacaccagt

SEQ ID NO: 1453022 - DNA, 15 bp, Homo sapiens
aatagtacaccagtt

SEQ ID NO: 1453023 - DNA, 15 bp, Homo sapiens
atagtacaccagttt

SEQ ID NO: 1453024 - DNA, 15 bp, Homo sapiens
tagtacaccagtttc

SEQ ID NO: 1453025 - DNA, 15 bp, Homo sapiens
agtacaccagtttct

SEQ ID NO: 1453026 - DNA, 15 bp, Homo sapiens
gtacaccagtttctt

SEQ ID NO: 1453027 - DNA, 15 bp, Homo sapiens
tacaccagtttcttt

SEQ ID NO: 1453028 - DNA, 15 bp, Homo sapiens
acaccagtttctttg

SEQ ID NO: 1453029 - DNA, 15 bp, Homo sapiens
caccagtttctttgt

SEQ ID NO: 1453030 - DNA, 15 bp, Homo sapiens
accagtttctttgtg

SEQ ID NO: 1453031 - DNA, 15 bp, Homo sapiens
ccagtttctttgtgg

SEQ ID NO: 1453032 - DNA, 15 bp, Homo sapiens
cagtttctttgtggg

SEQ ID NO: 1453033 - DNA, 15 bp, Homo sapiens
agtttctttgtgggt

SEQ ID NO: 1453034 - DNA, 15 bp, Homo sapiens
gtttctttgtgggta

SEQ ID NO: 1453035 - DNA, 15 bp, Homo sapiens
tttctttgtgggtaa

SEQ ID NO: 1453036 - DNA, 15 bp, Homo sapiens
ttctttgtgggtaaa

SEQ ID NO: 1453037 - DNA, 15 bp, Homo sapiens
tctttgtgggtaaaa

SEQ ID NO: 1453038 - DNA, 15 bp, Homo sapiens
ctttgtgggtaaaag

SEQ ID NO: 1453039 - DNA, 15 bp, Homo sapiens
tttgtgggtaaaagt

SEQ ID NO: 1453040 - DNA, 15 bp, Homo sapiens
ttgtgggtaaaagtc

SEQ ID NO: 1453041 - DNA, 15 bp, Homo sapiens
tgtgggtaaaagtct

SEQ ID NO: 1453042 - DNA, 15 bp, Homo sapiens
gtgggtaaaagtctt

SEQ ID NO: 1453043 - DNA, 15 bp, Homo sapiens
tgggtaaaagtctta

SEQ ID NO: 1453044 - DNA, 15 bp, Homo sapiens
gggtaaaagtcttag

SEQ ID NO: 1453045 - DNA, 15 bp, Homo sapiens
ggtaaaagtcttaga

SEQ ID NO: 1453046 - DNA, 15 bp, Homo sapiens
gtaaaagtcttagag

SEQ ID NO: 1453047 - DNA, 15 bp, Homo sapiens
taaaagtcttagagg

SEQ ID NO: 1453048 - DNA, 15 bp, Homo sapiens
aaaagtcttagaggg

SEQ ID NO: 1453049 - DNA, 15 bp, Homo sapiens
aaagtcttagagggg

SEQ ID NO: 1453050 - DNA, 15 bp, Homo sapiens
aagtcttagagggga

SEQ ID NO: 1453051 - DNA, 15 bp, Homo sapiens
agtcttagaggggag

SEQ ID NO: 1453052 - DNA, 15 bp, Homo sapiens
gtcttagaggggaga

SEQ ID NO: 1453053 - DNA, 15 bp, Homo sapiens
tcttagaggggagaa

SEQ ID NO: 1453054 - DNA, 15 bp, Homo sapiens
cttagaggggagaat

SEQ ID NO: 1453055 - DNA, 15 bp, Homo sapiens
ttagaggggagaata

SEQ ID NO: 1453056 - DNA, 15 bp, Homo sapiens
tagaggggagaatat

SEQ ID NO: 1453057 - DNA, 15 bp, Homo sapiens
agaggggagaatatg

SEQ ID NO: 1453058 - DNA, 15 bp, Homo sapiens
gaggggagaatatga

SEQ ID NO: 1453059 - DNA, 15 bp, Homo sapiens
aggggagaatatgac

SEQ ID NO: 1453060 - DNA, 15 bp, Homo sapiens
ggggagaatatgacc

SEQ ID NO: 1453061 - DNA, 15 bp, Homo sapiens
gggagaatatgacca

SEQ ID NO: 1453062 - DNA, 15 bp, Homo sapiens
ggagaatatgaccaa

SEQ ID NO: 1453063 - DNA, 15 bp, Homo sapiens
gagaatatgaccaac

SEQ ID NO: 1453064 - DNA, 15 bp, Homo sapiens
agaatatgaccaact

SEQ ID NO: 1453065 - DNA, 15 bp, Homo sapiens
gaatatgaccaactg

SEQ ID NO: 1453066 - DNA, 15 bp, Homo sapiens
aatatgaccaactgt

SEQ ID NO: 1453067 - DNA, 15 bp, Homo sapiens
atatgaccaactgta

SEQ ID NO: 1453068 - DNA, 15 bp, Homo sapiens
tatgaccaactgtag

SEQ ID NO: 1453069 - DNA, 15 bp, Homo sapiens
atgaccaactgtagg

SEQ ID NO: 1453070 - DNA, 15 bp, Homo sapiens
tgaccaactgtaggg

SEQ ID NO: 1453071 - DNA, 15 bp, Homo sapiens
gaccaactgtaggga

SEQ ID NO: 1453072 - DNA, 15 bp, Homo sapiens
accaactgtagggag

SEQ ID NO: 1453073 - DNA, 15 bp, Homo sapiens
ccaactgtagggaga

SEQ ID NO: 1453074 - DNA, 15 bp, Homo sapiens
caactgtagggagac

SEQ ID NO: 1453075 - DNA, 15 bp, Homo sapiens
aactgtagggagacc

SEQ ID NO: 1453076 - DNA, 15 bp, Homo sapiens
actgtagggagacct

SEQ ID NO: 1453077 - DNA, 15 bp, Homo sapiens
ctgtagggagacctg

SEQ ID NO: 1453078 - DNA, 15 bp, Homo sapiens
tgtagggagacctgt

SEQ ID NO: 1453079 - DNA, 15 bp, Homo sapiens
gtagggagacctgta

SEQ ID NO: 1453080 - DNA, 15 bp, Homo sapiens
tagggagacctgtaa

SEQ ID NO: 1453081 - DNA, 15 bp, Homo sapiens
agggagacctgtaaa

SEQ ID NO: 1453082 - DNA, 15 bp, Homo sapiens
gggagacctgtaaaa

SEQ ID NO: 1453083 - DNA, 15 bp, Homo sapiens
ggagacctgtaaaaa

SEQ ID NO: 1453084 - DNA, 15 bp, Homo sapiens
gagacctgtaaaaaa

SEQ ID NO: 1453085 - DNA, 15 bp, Homo sapiens
agacctgtaaaaaaa

SEQ ID NO: 1453086 - DNA, 15 bp, Homo sapiens
gacctgtaaaaaaag

SEQ ID NO: 1453087 - DNA, 15 bp, Homo sapiens
acctgtaaaaaaagt

SEQ ID NO: 1453088 - DNA, 15 bp, Homo sapiens
cctgtaaaaaaagtt

SEQ ID NO: 1453089 - DNA, 15 bp, Homo sapiens
ctgtaaaaaaagttt

SEQ ID NO: 1453090 - DNA, 15 bp, Homo sapiens
tgtaaaaaaagttta

SEQ ID NO: 1453091 - DNA, 15 bp, Homo sapiens
gtaaaaaaagtttat

SEQ ID NO: 1453092 - DNA, 15 bp, Homo sapiens
taaaaaaagtttatc

SEQ ID NO: 1453093 - DNA, 15 bp, Homo sapiens
aaaaaaagtttatca

SEQ ID NO: 1453094 - DNA, 15 bp, Homo sapiens
aaaaaagtttatcag

SEQ ID NO: 1453095 - DNA, 15 bp, Homo sapiens
aaaaagtttatcagt

SEQ ID NO: 1453096 - DNA, 15 bp, Homo sapiens
aaaagtttatcagta

SEQ ID NO: 1453097 - DNA, 15 bp, Homo sapiens
aaagtttatcagtag

SEQ ID NO: 1453098 - DNA, 15 bp, Homo sapiens
aagtttatcagtagc

SEQ ID NO: 1453099 - DNA, 15 bp, Homo sapiens
agtttatcagtagct

SEQ ID NO: 1453100 - DNA, 15 bp, Homo sapiens
gtttatcagtagctc

SEQ ID NO: 1453101 - DNA, 15 bp, Homo sapiens
tttatcagtagctca

SEQ ID NO: 1453102 - DNA, 15 bp, Homo sapiens
ttatcagtagctcag

SEQ ID NO: 1453103 - DNA, 15 bp, Homo sapiens
tatcagtagctcaga

SEQ ID NO: 1453104 - DNA, 15 bp, Homo sapiens
atcagtagctcagac

SEQ ID NO: 1453105 - DNA, 15 bp, Homo sapiens
tcagtagctcagacg

SEQ ID NO: 1453106 - DNA, 15 bp, Homo sapiens
cagtagctcagacga

SEQ ID NO: 1453107 - DNA, 15 bp, Homo sapiens
agtagctcagacgag

SEQ ID NO: 1453108 - DNA, 15 bp, Homo sapiens
gtagctcagacgaga

SEQ ID NO: 1453109 - DNA, 15 bp, Homo sapiens
tagctcagacgagat

SEQ ID NO: 1453110 - DNA, 15 bp, Homo sapiens
agctcagacgagata

SEQ ID NO: 1453111 - DNA, 15 bp, Homo sapiens
gctcagacgagataa

SEQ ID NO: 1453112 - DNA, 15 bp, Homo sapiens
ctcagacgagataat

SEQ ID NO: 1453113 - DNA, 15 bp, Homo sapiens
tcagacgagataatg

SEQ ID NO: 1453114 - DNA, 15 bp, Homo sapiens
cagacgagataatgg

SEQ ID NO: 1453115 - DNA, 15 bp, Homo sapiens
agacgagataatggt

SEQ ID NO: 1453116 - DNA, 15 bp, Homo sapiens
gacgagataatggta

SEQ ID NO: 1453117 - DNA, 15 bp, Homo sapiens
acgagataatggtaa

SEQ ID NO: 1453118 - DNA, 15 bp, Homo sapiens
cgagataatggtaac

SEQ ID NO: 1453119 - DNA, 15 bp, Homo sapiens
gagataatggtaact

SEQ ID NO: 1453120 - DNA, 15 bp, Homo sapiens
agataatggtaactt

SEQ ID NO: 1453121 - DNA, 15 bp, Homo sapiens
gataatggtaacttg

SEQ ID NO: 1453122 - DNA, 15 bp, Homo sapiens
ataatggtaacttgg

SEQ ID NO: 1453123 - DNA, 15 bp, Homo sapiens
taatggtaacttgga

SEQ ID NO: 1453124 - DNA, 15 bp, Homo sapiens
aatggtaacttggat

SEQ ID NO: 1453125 - DNA, 15 bp, Homo sapiens
atggtaacttggatt

SEQ ID NO: 1453126 - DNA, 15 bp, Homo sapiens
tggtaacttggatta

SEQ ID NO: 1453127 - DNA, 15 bp, Homo sapiens
ggtaacttggattaa

SEQ ID NO: 1453128 - DNA, 15 bp, Homo sapiens
gtaacttggattaag

SEQ ID NO: 1453129 - DNA, 15 bp, Homo sapiens
taacttggattaaga

SEQ ID NO: 1453130 - DNA, 15 bp, Homo sapiens
aacttggattaagat

SEQ ID NO: 1453131 - DNA, 15 bp, Homo sapiens
acttggattaagata

SEQ ID NO: 1453132 - DNA, 15 bp, Homo sapiens
cttggattaagatag

SEQ ID NO: 1453133 - DNA, 15 bp, Homo sapiens
ttggattaagatagt

SEQ ID NO: 1453134 - DNA, 15 bp, Homo sapiens
tggattaagatagtg

SEQ ID NO: 1453135 - DNA, 15 bp, Homo sapiens
ggattaagatagtgg

SEQ ID NO: 1453136 - DNA, 15 bp, Homo sapiens
gattaagatagtggt

SEQ ID NO: 1453137 - DNA, 15 bp, Homo sapiens
attaagatagtggta

SEQ ID NO: 1453138 - DNA, 15 bp, Homo sapiens
ttaagatagtggtag

SEQ ID NO: 1453139 - DNA, 15 bp, Homo sapiens
taagatagtggtagt

SEQ ID NO: 1453140 - DNA, 15 bp, Homo sapiens
aagatagtggtagta

SEQ ID NO: 1453141 - DNA, 15 bp, Homo sapiens
agatagtggtagtag

SEQ ID NO: 1453142 - DNA, 15 bp, Homo sapiens
gatagtggtagtagt

SEQ ID NO: 1453143 - DNA, 15 bp, Homo sapiens
atagtggtagtagta

SEQ ID NO: 1453144 - DNA, 15 bp, Homo sapiens
tagtggtagtagtaa

SEQ ID NO: 1453145 - DNA, 15 bp, Homo sapiens
agtggtagtagtaac

SEQ ID NO: 1453146 - DNA, 15 bp, Homo sapiens
gtggtagtagtaaca

SEQ ID NO: 1453147 - DNA, 15 bp, Homo sapiens
tggtagtagtaacag

SEQ ID NO: 1453148 - DNA, 15 bp, Homo sapiens
ggtagtagtaacagt

SEQ ID NO: 1453149 - DNA, 15 bp, Homo sapiens
gtagtagtaacagtg

SEQ ID NO: 1453150 - DNA, 15 bp, Homo sapiens
tagtagtaacagtga

SEQ ID NO: 1453151 - DNA, 15 bp, Homo sapiens
agtagtaacagtgaa

SEQ ID NO: 1453152 - DNA, 15 bp, Homo sapiens
gtagtaacagtgaaa

SEQ ID NO: 1453153 - DNA, 15 bp, Homo sapiens
tagtaacagtgaaaa

SEQ ID NO: 1453154 - DNA, 15 bp, Homo sapiens
agtaacagtgaaaaa

SEQ ID NO: 1453155 - DNA, 15 bp, Homo sapiens
gtaacagtgaaaaac

SEQ ID NO: 1453156 - DNA, 15 bp, Homo sapiens
taacagtgaaaaact

SEQ ID NO: 1453157 - DNA, 15 bp, Homo sapiens
aacagtgaaaaacta

SEQ ID NO: 1453158 - DNA, 15 bp, Homo sapiens
acagtgaaaaactag

SEQ ID NO: 1453159 - DNA, 15 bp, Homo sapiens
cagtgaaaaactaga

SEQ ID NO: 1453160 - DNA, 15 bp, Homo sapiens
agtgaaaaactagat

SEQ ID NO: 1453161 - DNA, 15 bp, Homo sapiens
gtgaaaaactagata

SEQ ID NO: 1453162 - DNA, 15 bp, Homo sapiens
tgaaaaactagatac

SEQ ID NO: 1453163 - DNA, 15 bp, Homo sapiens
gaaaaactagataca

SEQ ID NO: 1453164 - DNA, 15 bp, Homo sapiens
aaaaactagatacat

SEQ ID NO: 1453165 - DNA, 15 bp, Homo sapiens
aaaactagatacatt

SEQ ID NO: 1453166 - DNA, 15 bp, Homo sapiens
aaactagatacattt

SEQ ID NO: 1453167 - DNA, 15 bp, Homo sapiens
aactagatacatttg

SEQ ID NO: 1453168 - DNA, 15 bp, Homo sapiens
actagatacatttga

SEQ ID NO: 1453169 - DNA, 15 bp, Homo sapiens
ctagatacatttgaa

SEQ ID NO: 1453170 - DNA, 15 bp, Homo sapiens
tagatacatttgaaa

SEQ ID NO: 1453171 - DNA, 15 bp, Homo sapiens
agatacatttgaaag

SEQ ID NO: 1453172 - DNA, 15 bp, Homo sapiens
gatacatttgaaagc

SEQ ID NO: 1453173 - DNA, 15 bp, Homo sapiens
atacatttgaaagct

SEQ ID NO: 1453174 - DNA, 15 bp, Homo sapiens
tacatttgaaagctt

SEQ ID NO: 1453175 - DNA, 15 bp, Homo sapiens
acatttgaaagcttt

SEQ ID NO: 1453176 - DNA, 15 bp, Homo sapiens
catttgaaagctttt

SEQ ID NO: 1453177 - DNA, 15 bp, Homo sapiens
atttgaaagctttta

SEQ ID NO: 1453178 - DNA, 15 bp, Homo sapiens
tttgaaagcttttag

SEQ ID NO: 1453179 - DNA, 15 bp, Homo sapiens
ttgaaagcttttaga

SEQ ID NO: 1453180 - DNA, 15 bp, Homo sapiens
tgaaagcttttagag

SEQ ID NO: 1453181 - DNA, 15 bp, Homo sapiens
gaaagcttttagagc

SEQ ID NO: 1453182 - DNA, 15 bp, Homo sapiens
aaagcttttagagcc

SEQ ID NO: 1453183 - DNA, 15 bp, Homo sapiens
aagcttttagagcca

SEQ ID NO: 1453184 - DNA, 15 bp, Homo sapiens
agcttttagagccaa

SEQ ID NO: 1453185 - DNA, 15 bp, Homo sapiens
gcttttagagccaaa

SEQ ID NO: 1453186 - DNA, 15 bp, Homo sapiens
cttttagagccaaaa

SEQ ID NO: 1453187 - DNA, 15 bp, Homo sapiens
ttttagagccaaaat

SEQ ID NO: 1453188 - DNA, 15 bp, Homo sapiens
tttagagccaaaata

SEQ ID NO: 1453189 - DNA, 15 bp, Homo sapiens
ttagagccaaaatag

SEQ ID NO: 1453190 - DNA, 15 bp, Homo sapiens
tagagccaaaatagg

SEQ ID NO: 1453191 - DNA, 15 bp, Homo sapiens
agagccaaaatagga

SEQ ID NO: 1453192 - DNA, 15 bp, Homo sapiens
gagccaaaataggag

SEQ ID NO: 1453193 - DNA, 15 bp, Homo sapiens
agccaaaataggagg

SEQ ID NO: 1453194 - DNA, 15 bp, Homo sapiens
gccaaaataggaggc

SEQ ID NO: 1453195 - DNA, 15 bp, Homo sapiens
ccaaaataggaggca

SEQ ID NO: 1453196 - DNA, 15 bp, Homo sapiens
caaaataggaggcag

SEQ ID NO: 1453197 - DNA, 15 bp, Homo sapiens
aaaataggaggcagc

SEQ ID NO: 1453198 - DNA, 15 bp, Homo sapiens
aaataggaggcagct

SEQ ID NO: 1453199 - DNA, 15 bp, Homo sapiens
aataggaggcagctg

SEQ ID NO: 1453200 - DNA, 15 bp, Homo sapiens
ataggaggcagctgt

SEQ ID NO: 1453201 - DNA, 15 bp, Homo sapiens
taggaggcagctgtg

SEQ ID NO: 1453202 - DNA, 15 bp, Homo sapiens
aggaggcagctgtgc

SEQ ID NO: 1453203 - DNA, 15 bp, Homo sapiens
ggaggcagctgtgcc

SEQ ID NO: 1453204 - DNA, 15 bp, Homo sapiens
gaggcagctgtgccc

SEQ ID NO: 1453205 - DNA, 15 bp, Homo sapiens
aggcagctgtgccct

SEQ ID NO: 1453206 - DNA, 15 bp, Homo sapiens
ggcagctgtgccctt

SEQ ID NO: 1453207 - DNA, 15 bp, Homo sapiens
gcagctgtgcccttg

SEQ ID NO: 1453208 - DNA, 15 bp, Homo sapiens
cagctgtgcccttgt

SEQ ID NO: 1453209 - DNA, 15 bp, Homo sapiens
agctgtgcccttgtt

SEQ ID NO: 1453210 - DNA, 15 bp, Homo sapiens
gctgtgcccttgttg

SEQ ID NO: 1453211 - DNA, 15 bp, Homo sapiens
ctgtgcccttgttgt

SEQ ID NO: 1453212 - DNA, 15 bp, Homo sapiens
tgtgcccttgttgtt

SEQ ID NO: 1453213 - DNA, 15 bp, Homo sapiens
gtgcccttgttgtta

SEQ ID NO: 1453214 - DNA, 15 bp, Homo sapiens
tgcccttgttgttac

SEQ ID NO: 1453215 - DNA, 15 bp, Homo sapiens
gcccttgttgttacc

SEQ ID NO: 1453216 - DNA, 15 bp, Homo sapiens
cccttgttgttacca

SEQ ID NO: 1453217 - DNA, 15 bp, Homo sapiens
ccttgttgttaccag

SEQ ID NO: 1453218 - DNA, 15 bp, Homo sapiens
cttgttgttaccagt

SEQ ID NO: 1453219 - DNA, 15 bp, Homo sapiens
ttgttgttaccagtg

SEQ ID NO: 1453220 - DNA, 15 bp, Homo sapiens
tgttgttaccagtgt

SEQ ID NO: 1453221 - DNA, 15 bp, Homo sapiens
gttgttaccagtgtg

SEQ ID NO: 1453222 - DNA, 15 bp, Homo sapiens
ttgttaccagtgtgg

SEQ ID NO: 1453223 - DNA, 15 bp, Homo sapiens
tgttaccagtgtggg

SEQ ID NO: 1453224 - DNA, 15 bp, Homo sapiens
gttaccagtgtggga

SEQ ID NO: 1453225 - DNA, 15 bp, Homo sapiens
ttaccagtgtgggat

SEQ ID NO: 1453226 - DNA, 15 bp, Homo sapiens
taccagtgtgggatc

SEQ ID NO: 1453227 - DNA, 15 bp, Homo sapiens
accagtgtgggatct

SEQ ID NO: 1453228 - DNA, 15 bp, Homo sapiens
ccagtgtgggatctg

SEQ ID NO: 1453229 - DNA, 15 bp, Homo sapiens
cagtgtgggatctga

SEQ ID NO: 1453230 - DNA, 15 bp, Homo sapiens
agtgtgggatctgaa

SEQ ID NO: 1453231 - DNA, 15 bp, Homo sapiens
gtgtgggatctgaac

SEQ ID NO: 1453232 - DNA, 15 bp, Homo sapiens
tgtgggatctgaaca

SEQ ID NO: 1453233 - DNA, 15 bp, Homo sapiens
gtgggatctgaacac

SEQ ID NO: 1453234 - DNA, 15 bp, Homo sapiens
tgggatctgaacaca

SEQ ID NO: 1453235 - DNA, 15 bp, Homo sapiens
gggatctgaacacat

SEQ ID NO: 1453236 - DNA, 15 bp, Homo sapiens
ggatctgaacacatg

SEQ ID NO: 1453237 - DNA, 15 bp, Homo sapiens
gatctgaacacatga

SEQ ID NO: 1453238 - DNA, 15 bp, Homo sapiens
atctgaacacatgac

SEQ ID NO: 1453239 - DNA, 15 bp, Homo sapiens
tctgaacacatgact

SEQ ID NO: 1453240 - DNA, 15 bp, Homo sapiens
ctgaacacatgacta

SEQ ID NO: 1453241 - DNA, 15 bp, Homo sapiens
tgaacacatgactac

SEQ ID NO: 1453242 - DNA, 15 bp, Homo sapiens
gaacacatgactact

SEQ ID NO: 1453243 - DNA, 15 bp, Homo sapiens
aacacatgactactt

SEQ ID NO: 1453244 - DNA, 15 bp, Homo sapiens
acacatgactacttg

SEQ ID NO: 1453245 - DNA, 15 bp, Homo sapiens
cacatgactacttgg

SEQ ID NO: 1453246 - DNA, 15 bp, Homo sapiens
acatgactacttggg

SEQ ID NO: 1453247 - DNA, 15 bp, Homo sapiens
catgactacttgggt

SEQ ID NO: 1453248 - DNA, 15 bp, Homo sapiens
atgactacttgggtt

SEQ ID NO: 1453249 - DNA, 15 bp, Homo sapiens
tgactacttgggttc

SEQ ID NO: 1453250 - DNA, 15 bp, Homo sapiens
gactacttgggttca

SEQ ID NO: 1453251 - DNA, 15 bp, Homo sapiens
actacttgggttcaa

SEQ ID NO: 1453252 - DNA, 15 bp, Homo sapiens
ctacttgggttcaaa

SEQ ID NO: 1453253 - DNA, 15 bp, Homo sapiens
tacttgggttcaaat

SEQ ID NO: 1453254 - DNA, 15 bp, Homo sapiens
acttgggttcaaata

SEQ ID NO: 1453255 - DNA, 15 bp, Homo sapiens
cttgggttcaaatac

SEQ ID NO: 1453256 - DNA, 15 bp, Homo sapiens
ttgggttcaaatact

SEQ ID NO: 1453257 - DNA, 15 bp, Homo sapiens
tgggttcaaatactg

SEQ ID NO: 1453258 - DNA, 15 bp, Homo sapiens
gggttcaaatactga

SEQ ID NO: 1453259 - DNA, 15 bp, Homo sapiens
ggttcaaatactgag

SEQ ID NO: 1453260 - DNA, 15 bp, Homo sapiens
gttcaaatactgagc

SEQ ID NO: 1453261 - DNA, 15 bp, Homo sapiens
ttcaaatactgagca

SEQ ID NO: 1453262 - DNA, 15 bp, Homo sapiens
tcaaatactgagcaa

SEQ ID NO: 1453263 - DNA, 15 bp, Homo sapiens
caaatactgagcaaa

SEQ ID NO: 1453264 - DNA, 15 bp, Homo sapiens
aaatactgagcaaat

SEQ ID NO: 1453265 - DNA, 15 bp, Homo sapiens
aatactgagcaaatt

SEQ ID NO: 1453266 - DNA, 15 bp, Homo sapiens
atactgagcaaatta

SEQ ID NO: 1453267 - DNA, 15 bp, Homo sapiens
tactgagcaaattaa

SEQ ID NO: 1453268 - DNA, 15 bp, Homo sapiens
actgagcaaattaat

SEQ ID NO: 1453269 - DNA, 15 bp, Homo sapiens
ctgagcaaattaatt

SEQ ID NO: 1453270 - DNA, 15 bp, Homo sapiens
tgagcaaattaatta

SEQ ID NO: 1453271 - DNA, 15 bp, Homo sapiens
gagcaaattaattaa

SEQ ID NO: 1453272 - DNA, 15 bp, Homo sapiens
agcaaattaattaac

SEQ ID NO: 1453273 - DNA, 15 bp, Homo sapiens
gcaaattaattaacc

SEQ ID NO: 1453274 - DNA, 15 bp, Homo sapiens
caaattaattaacct

SEQ ID NO: 1453275 - DNA, 15 bp, Homo sapiens
aaattaattaacctc

SEQ ID NO: 1453276 - DNA, 15 bp, Homo sapiens
aattaattaacctct

SEQ ID NO: 1453277 - DNA, 15 bp, Homo sapiens
attaattaacctctc

SEQ ID NO: 1453278 - DNA, 15 bp, Homo sapiens
ttaattaacctctct

SEQ ID NO: 1453279 - DNA, 15 bp, Homo sapiens
taattaacctctctg

SEQ ID NO: 1453280 - DNA, 15 bp, Homo sapiens
aattaacctctctgg

SEQ ID NO: 1453281 - DNA, 15 bp, Homo sapiens
attaacctctctggg

SEQ ID NO: 1453282 - DNA, 15 bp, Homo sapiens
ttaacctctctgggc

SEQ ID NO: 1453283 - DNA, 15 bp, Homo sapiens
taacctctctgggca

SEQ ID NO: 1453284 - DNA, 15 bp, Homo sapiens
aacctctctgggcat

SEQ ID NO: 1453285 - DNA, 15 bp, Homo sapiens
acctctctgggcatc

SEQ ID NO: 1453286 - DNA, 15 bp, Homo sapiens
cctctctgggcatcc

SEQ ID NO: 1453287 - DNA, 15 bp, Homo sapiens
ctctctgggcatccg

SEQ ID NO: 1453288 - DNA, 15 bp, Homo sapiens
tctctgggcatccgt

SEQ ID NO: 1453289 - DNA, 15 bp, Homo sapiens
ctctgggcatccgtt

SEQ ID NO: 1453290 - DNA, 15 bp, Homo sapiens
tctgggcatccgttt

SEQ ID NO: 1453291 - DNA, 15 bp, Homo sapiens
ctgggcatccgtttc

SEQ ID NO: 1453292 - DNA, 15 bp, Homo sapiens
tgggcatccgtttcc

SEQ ID NO: 1453293 - DNA, 15 bp, Homo sapiens
gggcatccgtttcct

SEQ ID NO: 1453294 - DNA, 15 bp, Homo sapiens
ggcatccgtttcctc

SEQ ID NO: 1453295 - DNA, 15 bp, Homo sapiens
gcatccgtttcctct

SEQ ID NO: 1453296 - DNA, 15 bp, Homo sapiens
catccgtttcctctc

SEQ ID NO: 1453297 - DNA, 15 bp, Homo sapiens
atccgtttcctctcc

SEQ ID NO: 1453298 - DNA, 15 bp, Homo sapiens
tccgtttcctctcct

SEQ ID NO: 1453299 - DNA, 15 bp, Homo sapiens
ccgtttcctctcctg

SEQ ID NO: 1453300 - DNA, 15 bp, Homo sapiens
cgtttcctctcctgc

SEQ ID NO: 1453301 - DNA, 15 bp, Homo sapiens
gtttcctctcctgca

SEQ ID NO: 1453302 - DNA, 15 bp, Homo sapiens
tttcctctcctgcaa

SEQ ID NO: 1453303 - DNA, 15 bp, Homo sapiens
ttcctctcctgcaag

SEQ ID NO: 1453304 - DNA, 15 bp, Homo sapiens
tcctctcctgcaaga

SEQ ID NO: 1453305 - DNA, 15 bp, Homo sapiens
cctctcctgcaagac

SEQ ID NO: 1453306 - DNA, 15 bp, Homo sapiens
ctctcctgcaagaca

SEQ ID NO: 1453307 - DNA, 15 bp, Homo sapiens
tctcctgcaagacat

SEQ ID NO: 1453308 - DNA, 15 bp, Homo sapiens
ctcctgcaagacatg

SEQ ID NO: 1453309 - DNA, 15 bp, Homo sapiens
tcctgcaagacatgg

SEQ ID NO: 1453310 - DNA, 15 bp, Homo sapiens
cctgcaagacatgga

SEQ ID NO: 1453311 - DNA, 15 bp, Homo sapiens
ctgcaagacatggat

SEQ ID NO: 1453312 - DNA, 15 bp, Homo sapiens
tgcaagacatggatg

SEQ ID NO: 1453313 - DNA, 15 bp, Homo sapiens
gcaagacatggatga

SEQ ID NO: 1453314 - DNA, 15 bp, Homo sapiens
caagacatggatgat

SEQ ID NO: 1453315 - DNA, 15 bp, Homo sapiens
aagacatggatgata

SEQ ID NO: 1453316 - DNA, 15 bp, Homo sapiens
agacatggatgataa

SEQ ID NO: 1453317 - DNA, 15 bp, Homo sapiens
gacatggatgataat

SEQ ID NO: 1453318 - DNA, 15 bp, Homo sapiens
acatggatgataatg

SEQ ID NO: 1453319 - DNA, 15 bp, Homo sapiens
catggatgataatgg

SEQ ID NO: 1453320 - DNA, 15 bp, Homo sapiens
atggatgataatggt

SEQ ID NO: 1453321 - DNA, 15 bp, Homo sapiens
tggatgataatggtt

SEQ ID NO: 1453322 - DNA, 15 bp, Homo sapiens
ggatgataatggttt

SEQ ID NO: 1453323 - DNA, 15 bp, Homo sapiens
gatgataatggtttc

SEQ ID NO: 1453324 - DNA, 15 bp, Homo sapiens
atgataatggtttct

SEQ ID NO: 1453325 - DNA, 15 bp, Homo sapiens
tgataatggtttcta

SEQ ID NO: 1453326 - DNA, 15 bp, Homo sapiens
gataatggtttctac

SEQ ID NO: 1453327 - DNA, 15 bp, Homo sapiens
ataatggtttctaca

SEQ ID NO: 1453328 - DNA, 15 bp, Homo sapiens
taatggtttctacat

SEQ ID NO: 1453329 - DNA, 15 bp, Homo sapiens
aatggtttctacatt

SEQ ID NO: 1453330 - DNA, 15 bp, Homo sapiens
atggtttctacattc

SEQ ID NO: 1453331 - DNA, 15 bp, Homo sapiens
tggtttctacattca

SEQ ID NO: 1453332 - DNA, 15 bp, Homo sapiens
ggtttctacattcat

SEQ ID NO: 1453333 - DNA, 15 bp, Homo sapiens
gtttctacattcata

SEQ ID NO: 1453334 - DNA, 15 bp, Homo sapiens
tttctacattcatag

SEQ ID NO: 1453335 - DNA, 15 bp, Homo sapiens
ttctacattcatagg

SEQ ID NO: 1453336 - DNA, 15 bp, Homo sapiens
tctacattcataggg

SEQ ID NO: 1453337 - DNA, 15 bp, Homo sapiens
ctacattcatagggt

SEQ ID NO: 1453338 - DNA, 15 bp, Homo sapiens
tacattcatagggtt

SEQ ID NO: 1453339 - DNA, 15 bp, Homo sapiens
acattcatagggttg

SEQ ID NO: 1453340 - DNA, 15 bp, Homo sapiens
cattcatagggttgt

SEQ ID NO: 1453341 - DNA, 15 bp, Homo sapiens
attcatagggttgtt

SEQ ID NO: 1453342 - DNA, 15 bp, Homo sapiens
ttcatagggttgtta

SEQ ID NO: 1453343 - DNA, 15 bp, Homo sapiens
tcatagggttgttat

SEQ ID NO: 1453344 - DNA, 15 bp, Homo sapiens
catagggttgttatg

SEQ ID NO: 1453345 - DNA, 15 bp, Homo sapiens
atagggttgttatga

SEQ ID NO: 1453346 - DNA, 15 bp, Homo sapiens
tagggttgttatgag

SEQ ID NO: 1453347 - DNA, 15 bp, Homo sapiens
agggttgttatgagg

SEQ ID NO: 1453348 - DNA, 15 bp, Homo sapiens
gggttgttatgagga

SEQ ID NO: 1453349 - DNA, 15 bp, Homo sapiens
ggttgttatgaggaa

SEQ ID NO: 1453350 - DNA, 15 bp, Homo sapiens
gttgttatgaggaat

SEQ ID NO: 1453351 - DNA, 15 bp, Homo sapiens
ttgttatgaggaatg

SEQ ID NO: 1453352 - DNA, 15 bp, Homo sapiens
tgttatgaggaatga

SEQ ID NO: 1453353 - DNA, 15 bp, Homo sapiens
gttatgaggaatgaa

SEQ ID NO: 1453354 - DNA, 15 bp, Homo sapiens
ttatgaggaatgaat

SEQ ID NO: 1453355 - DNA, 15 bp, Homo sapiens
tatgaggaatgaatg

SEQ ID NO: 1453356 - DNA, 15 bp, Homo sapiens
atgaggaatgaatga

SEQ ID NO: 1453357 - DNA, 15 bp, Homo sapiens
tgaggaatgaatgaa

SEQ ID NO: 1453358 - DNA, 15 bp, Homo sapiens
gaggaatgaatgaat

SEQ ID NO: 1453359 - DNA, 15 bp, Homo sapiens
ggaatgaatgaatta

SEQ ID NO: 1453360 - DNA, 15 bp, Homo sapiens
atgaatgaattaaaa

SEQ ID NO: 1453361 - DNA, 15 bp, Homo sapiens
tgaatgaattaaaac

SEQ ID NO: 1453362 - DNA, 15 bp, Homo sapiens
gaatgaattaaaact

SEQ ID NO: 1453363 - DNA, 15 bp, Homo sapiens
aatgaattaaaactt

SEQ ID NO: 1453364 - DNA, 15 bp, Homo sapiens
atgaattaaaacttg

SEQ ID NO: 1453365 - DNA, 15 bp, Homo sapiens
tgaattaaaacttgt

SEQ ID NO: 1453366 - DNA, 15 bp, Homo sapiens
gaattaaaacttgta

SEQ ID NO: 1453367 - DNA, 15 bp, Homo sapiens
aattaaaacttgtaa

SEQ ID NO: 1453368 - DNA, 15 bp, Homo sapiens
attaaaacttgtaaa

SEQ ID NO: 1453369 - DNA, 15 bp, Homo sapiens
ttaaaacttgtaaaa

SEQ ID NO: 1453370 - DNA, 15 bp, Homo sapiens
taaaacttgtaaaat

SEQ ID NO: 1453371 - DNA, 15 bp, Homo sapiens
aaaacttgtaaaata

SEQ ID NO: 1453372 - DNA, 15 bp, Homo sapiens
aaacttgtaaaatac

SEQ ID NO: 1453373 - DNA, 15 bp, Homo sapiens
aacttgtaaaatact

SEQ ID NO: 1453374 - DNA, 15 bp, Homo sapiens
acttgtaaaatactt

SEQ ID NO: 1453375 - DNA, 15 bp, Homo sapiens
cttgtaaaatacttt

SEQ ID NO: 1453376 - DNA, 15 bp, Homo sapiens
ttgtaaaatactttg

SEQ ID NO: 1453377 - DNA, 15 bp, Homo sapiens
tgtaaaatactttgg

SEQ ID NO: 1453378 - DNA, 15 bp, Homo sapiens
gtaaaatactttgga

SEQ ID NO: 1453379 - DNA, 15 bp, Homo sapiens
taaaatactttggac

SEQ ID NO: 1453380 - DNA, 15 bp, Homo sapiens
aaaatactttggaca

SEQ ID NO: 1453381 - DNA, 15 bp, Homo sapiens
aaatactttggacag

SEQ ID NO: 1453382 - DNA, 15 bp, Homo sapiens
aatactttggacagt

SEQ ID NO: 1453383 - DNA, 15 bp, Homo sapiens
atactttggacagtg

SEQ ID NO: 1453384 - DNA, 15 bp, Homo sapiens
tactttggacagtgc

SEQ ID NO: 1453385 - DNA, 15 bp, Homo sapiens
actttggacagtgct

SEQ ID NO: 1453386 - DNA, 15 bp, Homo sapiens
ctttggacagtgctt

SEQ ID NO: 1453387 - DNA, 15 bp, Homo sapiens
tttggacagtgcttg

SEQ ID NO: 1453388 - DNA, 15 bp, Homo sapiens
ttggacagtgcttga

SEQ ID NO: 1453389 - DNA, 15 bp, Homo sapiens
tggacagtgcttgac

SEQ ID NO: 1453390 - DNA, 15 bp, Homo sapiens
ggacagtgcttgaca

SEQ ID NO: 1453391 - DNA, 15 bp, Homo sapiens
gacagtgcttgacat

SEQ ID NO: 1453392 - DNA, 15 bp, Homo sapiens
acagtgcttgacata

SEQ ID NO: 1453393 - DNA, 15 bp, Homo sapiens
cagtgcttgacataa

SEQ ID NO: 1453394 - DNA, 15 bp, Homo sapiens
agtgcttgacataaa

SEQ ID NO: 1453395 - DNA, 15 bp, Homo sapiens
gtgcttgacataaaa

SEQ ID NO: 1453396 - DNA, 15 bp, Homo sapiens
tgcttgacataaaac

SEQ ID NO: 1453397 - DNA, 15 bp, Homo sapiens
gcttgacataaaaca

SEQ ID NO: 1453398 - DNA, 15 bp, Homo sapiens
cttgacataaaacaa

SEQ ID NO: 1453399 - DNA, 15 bp, Homo sapiens
ttgacataaaacaag

SEQ ID NO: 1453400 - DNA, 15 bp, Homo sapiens
tgacataaaacaagt

SEQ ID NO: 1453401 - DNA, 15 bp, Homo sapiens
gacataaaacaagtg

SEQ ID NO: 1453402 - DNA, 15 bp, Homo sapiens
acataaaacaagtgc

SEQ ID NO: 1453403 - DNA, 15 bp, Homo sapiens
cataaaacaagtgct

SEQ ID NO: 1453404 - DNA, 15 bp, Homo sapiens
ataaaacaagtgctc

SEQ ID NO: 1453405 - DNA, 15 bp, Homo sapiens
taaaacaagtgctca

SEQ ID NO: 1453406 - DNA, 15 bp, Homo sapiens
aaaacaagtgctcaa

SEQ ID NO: 1453407 - DNA, 15 bp, Homo sapiens
aaacaagtgctcaat

SEQ ID NO: 1453408 - DNA, 15 bp, Homo sapiens
aacaagtgctcaata

SEQ ID NO: 1453409 - DNA, 15 bp, Homo sapiens
acaagtgctcaatac

SEQ ID NO: 1453410 - DNA, 15 bp, Homo sapiens
caagtgctcaataca

SEQ ID NO: 1453411 - DNA, 15 bp, Homo sapiens
aagtgctcaatacat

SEQ ID NO: 1453412 - DNA, 15 bp, Homo sapiens
agtgctcaatacata

SEQ ID NO: 1453413 - DNA, 15 bp, Homo sapiens
gtgctcaatacatat

SEQ ID NO: 1453414 - DNA, 15 bp, Homo sapiens
tgctcaatacatatt

SEQ ID NO: 1453415 - DNA, 15 bp, Homo sapiens
gctcaatacatatta

SEQ ID NO: 1453416 - DNA, 15 bp, Homo sapiens
ctcaatacatattag

SEQ ID NO: 1453417 - DNA, 15 bp, Homo sapiens
tcaatacatattagc

SEQ ID NO: 1453418 - DNA, 15 bp, Homo sapiens
caatacatattagct

SEQ ID NO: 1453419 - DNA, 15 bp, Homo sapiens
aatacatattagcta

SEQ ID NO: 1453420 - DNA, 15 bp, Homo sapiens
atacatattagctat

SEQ ID NO: 1453421 - DNA, 15 bp, Homo sapiens
tacatattagctatt

SEQ ID NO: 1453422 - DNA, 15 bp, Homo sapiens
acatattagctatta

SEQ ID NO: 1453423 - DNA, 15 bp, Homo sapiens
catattagctattat

SEQ ID NO: 1453424 - DNA, 15 bp, Homo sapiens
atattagctattatt

SEQ ID NO: 1453425 - DNA, 15 bp, Homo sapiens
tattagctattattg

SEQ ID NO: 1453426 - DNA, 15 bp, Homo sapiens
attagctattattga

SEQ ID NO: 1453427 - DNA, 15 bp, Homo sapiens
ttagctattattgat

SEQ ID NO: 1453428 - DNA, 15 bp, Homo sapiens
tagctattattgatt

SEQ ID NO: 1453429 - DNA, 15 bp, Homo sapiens
agctattattgatta

SEQ ID NO: 1453430 - DNA, 15 bp, Homo sapiens
gctattattgattat

SEQ ID NO: 1453431 - DNA, 15 bp, Homo sapiens
ctattattgattata

SEQ ID NO: 1453432 - DNA, 15 bp, Homo sapiens
tattattgattatat

SEQ ID NO: 1453433 - DNA, 15 bp, Homo sapiens
attattgattatatt

SEQ ID NO: 1453434 - DNA, 15 bp, Homo sapiens
ttattgattatattg

SEQ ID NO: 1453435 - DNA, 15 bp, Homo sapiens
tattgattatattgc

SEQ ID NO: 1453436 - DNA, 15 bp, Homo sapiens
attgattatattgcc

SEQ ID NO: 1453437 - DNA, 15 bp, Homo sapiens
ttgattatattgccc

SEQ ID NO: 1453438 - DNA, 15 bp, Homo sapiens
tgattatattgccct

SEQ ID NO: 1453439 - DNA, 15 bp, Homo sapiens
gattatattgccctg

SEQ ID NO: 1453440 - DNA, 15 bp, Homo sapiens
attatattgccctgg

SEQ ID NO: 1453441 - DNA, 15 bp, Homo sapiens
ttatattgccctggt

SEQ ID NO: 1453442 - DNA, 15 bp, Homo sapiens
tatattgccctggtc

SEQ ID NO: 1453443 - DNA, 15 bp, Homo sapiens
atattgccctggtca

SEQ ID NO: 1453444 - DNA, 15 bp, Homo sapiens
tattgccctggtcag

SEQ ID NO: 1453445 - DNA, 15 bp, Homo sapiens
attgccctggtcagt

SEQ ID NO: 1453446 - DNA, 15 bp, Homo sapiens
ttgccctggtcagtg

SEQ ID NO: 1453447 - DNA, 15 bp, Homo sapiens
tgccctggtcagtgt

SEQ ID NO: 1453448 - DNA, 15 bp, Homo sapiens
gccctggtcagtgtc

SEQ ID NO: 1453449 - DNA, 15 bp, Homo sapiens
ccctggtcagtgtca

SEQ ID NO: 1453450 - DNA, 15 bp, Homo sapiens
cctggtcagtgtcaa

SEQ ID NO: 1453451 - DNA, 15 bp, Homo sapiens
ctggtcagtgtcaaa

SEQ ID NO: 1453452 - DNA, 15 bp, Homo sapiens
tggtcagtgtcaaac

SEQ ID NO: 1453453 - DNA, 15 bp, Homo sapiens
ggtcagtgtcaaact

SEQ ID NO: 1453454 - DNA, 15 bp, Homo sapiens
gtcagtgtcaaactg

SEQ ID NO: 1453455 - DNA, 15 bp, Homo sapiens
tcagtgtcaaactgc

SEQ ID NO: 1453456 - DNA, 15 bp, Homo sapiens
cagtgtcaaactgca

SEQ ID NO: 1453457 - DNA, 15 bp, Homo sapiens
agtgtcaaactgcat

SEQ ID NO: 1453458 - DNA, 15 bp, Homo sapiens
gtgtcaaactgcata

SEQ ID NO: 1453459 - DNA, 15 bp, Homo sapiens
tgtcaaactgcatat

SEQ ID NO: 1453460 - DNA, 15 bp, Homo sapiens
gtcaaactgcatatg

SEQ ID NO: 1453461 - DNA, 15 bp, Homo sapiens
tcaaactgcatatgg

SEQ ID NO: 1453462 - DNA, 15 bp, Homo sapiens
caaactgcatatggg

SEQ ID NO: 1453463 - DNA, 15 bp, Homo sapiens
aaactgcatatggga

SEQ ID NO: 1453464 - DNA, 15 bp, Homo sapiens
aactgcatatgggag

SEQ ID NO: 1453465 - DNA, 15 bp, Homo sapiens
actgcatatgggaga

SEQ ID NO: 1453466 - DNA, 15 bp, Homo sapiens
ctgcatatgggagat

SEQ ID NO: 1453467 - DNA, 15 bp, Homo sapiens
tgcatatgggagatg

SEQ ID NO: 1453468 - DNA, 15 bp, Homo sapiens
gcatatgggagatga

SEQ ID NO: 1453469 - DNA, 15 bp, Homo sapiens
catatgggagatgag

SEQ ID NO: 1453470 - DNA, 15 bp, Homo sapiens
atatgggagatgaga

SEQ ID NO: 1453471 - DNA, 15 bp, Homo sapiens
tatgggagatgagaa

SEQ ID NO: 1453472 - DNA, 15 bp, Homo sapiens
atgggagatgagaat

SEQ ID NO: 1453473 - DNA, 15 bp, Homo sapiens
tgggagatgagaatg

SEQ ID NO: 1453474 - DNA, 15 bp, Homo sapiens
gggagatgagaatgg

SEQ ID NO: 1453475 - DNA, 15 bp, Homo sapiens
ggagatgagaatggt

SEQ ID NO: 1453476 - DNA, 15 bp, Homo sapiens
gagatgagaatggta

SEQ ID NO: 1453477 - DNA, 15 bp, Homo sapiens
agatgagaatggtaa

SEQ ID NO: 1453478 - DNA, 15 bp, Homo sapiens
gatgagaatggtaac

SEQ ID NO: 1453479 - DNA, 15 bp, Homo sapiens
atgagaatggtaaca

SEQ ID NO: 1453480 - DNA, 15 bp, Homo sapiens
tgagaatggtaacaa

SEQ ID NO: 1453481 - DNA, 15 bp, Homo sapiens
gagaatggtaacaag

SEQ ID NO: 1453482 - DNA, 15 bp, Homo sapiens
agaatggtaacaagg

SEQ ID NO: 1453483 - DNA, 15 bp, Homo sapiens
gaatggtaacaagga

SEQ ID NO: 1453484 - DNA, 15 bp, Homo sapiens
aatggtaacaaggat

SEQ ID NO: 1453485 - DNA, 15 bp, Homo sapiens
atggtaacaaggata

SEQ ID NO: 1453486 - DNA, 15 bp, Homo sapiens
tggtaacaaggataa

SEQ ID NO: 1453487 - DNA, 15 bp, Homo sapiens
ggtaacaaggataac

SEQ ID NO: 1453488 - DNA, 15 bp, Homo sapiens
gtaacaaggataact

SEQ ID NO: 1453489 - DNA, 15 bp, Homo sapiens
taacaaggataactc

SEQ ID NO: 1453490 - DNA, 15 bp, Homo sapiens
aacaaggataactct

SEQ ID NO: 1453491 - DNA, 15 bp, Homo sapiens
acaaggataactctc

SEQ ID NO: 1453492 - DNA, 15 bp, Homo sapiens
caaggataactctca

SEQ ID NO: 1453493 - DNA, 15 bp, Homo sapiens
aaggataactctcac

SEQ ID NO: 1453494 - DNA, 15 bp, Homo sapiens
aggataactctcact

SEQ ID NO: 1453495 - DNA, 15 bp, Homo sapiens
ggataactctcactt

SEQ ID NO: 1453496 - DNA, 15 bp, Homo sapiens
gataactctcacttg

SEQ ID NO: 1453497 - DNA, 15 bp, Homo sapiens
ataactctcacttgc

SEQ ID NO: 1453498 - DNA, 15 bp, Homo sapiens
taactctcacttgca

SEQ ID NO: 1453499 - DNA, 15 bp, Homo sapiens
aactctcacttgcat

SEQ ID NO: 1453500 - DNA, 15 bp, Homo sapiens
actctcacttgcata

SEQ ID NO: 1453501 - DNA, 15 bp, Homo sapiens
ctctcacttgcatat

SEQ ID NO: 1453502 - DNA, 15 bp, Homo sapiens
tctcacttgcatatt

SEQ ID NO: 1453503 - DNA, 15 bp, Homo sapiens
ctcacttgcatattc

SEQ ID NO: 1453504 - DNA, 15 bp, Homo sapiens
tcacttgcatattca

SEQ ID NO: 1453505 - DNA, 15 bp, Homo sapiens
cacttgcatattcaa

SEQ ID NO: 1453506 - DNA, 15 bp, Homo sapiens
acttgcatattcaaa

SEQ ID NO: 1453507 - DNA, 15 bp, Homo sapiens
cttgcatattcaaat

SEQ ID NO: 1453508 - DNA, 15 bp, Homo sapiens
ttgcatattcaaatg

SEQ ID NO: 1453509 - DNA, 15 bp, Homo sapiens
tgcatattcaaatgc

SEQ ID NO: 1453510 - DNA, 15 bp, Homo sapiens
gcatattcaaatgca

SEQ ID NO: 1453511 - DNA, 15 bp, Homo sapiens
catattcaaatgcag

SEQ ID NO: 1453512 - DNA, 15 bp, Homo sapiens
atattcaaatgcagg

SEQ ID NO: 1453513 - DNA, 15 bp, Homo sapiens
tattcaaatgcagga

SEQ ID NO: 1453514 - DNA, 15 bp, Homo sapiens
attcaaatgcaggat

SEQ ID NO: 1453515 - DNA, 15 bp, Homo sapiens
ttcaaatgcaggatg

SEQ ID NO: 1453516 - DNA, 15 bp, Homo sapiens
tcaaatgcaggatgc

SEQ ID NO: 1453517 - DNA, 15 bp, Homo sapiens
caaatgcaggatgct

SEQ ID NO: 1453518 - DNA, 15 bp, Homo sapiens
aaatgcaggatgctg

SEQ ID NO: 1453519 - DNA, 15 bp, Homo sapiens
aatgcaggatgctgc

SEQ ID NO: 1453520 - DNA, 15 bp, Homo sapiens
atgcaggatgctgcc

SEQ ID NO: 1453521 - DNA, 15 bp, Homo sapiens
tgcaggatgctgcca

SEQ ID NO: 1453522 - DNA, 15 bp, Homo sapiens
gcaggatgctgccat

SEQ ID NO: 1453523 - DNA, 15 bp, Homo sapiens
caggatgctgccatt

SEQ ID NO: 1453524 - DNA, 15 bp, Homo sapiens
aggatgctgccattc

SEQ ID NO: 1453525 - DNA, 15 bp, Homo sapiens
ggatgctgccattca

SEQ ID NO: 1453526 - DNA, 15 bp, Homo sapiens
gatgctgccattcac

SEQ ID NO: 1453527 - DNA, 15 bp, Homo sapiens
atgctgccattcact

SEQ ID NO: 1453528 - DNA, 15 bp, Homo sapiens
tgctgccattcactg

SEQ ID NO: 1453529 - DNA, 15 bp, Homo sapiens
gctgccattcactgt

SEQ ID NO: 1453530 - DNA, 15 bp, Homo sapiens
ctgccattcactgtt

SEQ ID NO: 1453531 - DNA, 15 bp, Homo sapiens
tgccattcactgtta

SEQ ID NO: 1453532 - DNA, 15 bp, Homo sapiens
gccattcactgttat

SEQ ID NO: 1453533 - DNA, 15 bp, Homo sapiens
ccattcactgttata

SEQ ID NO: 1453534 - DNA, 15 bp, Homo sapiens
cattcactgttataa

SEQ ID NO: 1453535 - DNA, 15 bp, Homo sapiens
attcactgttataaa

SEQ ID NO: 1453536 - DNA, 15 bp, Homo sapiens
ttcactgttataaaa

SEQ ID NO: 1453537 - DNA, 15 bp, Homo sapiens
tcactgttataaaaa

SEQ ID NO: 1453538 - DNA, 15 bp, Homo sapiens
cactgttataaaaaa

SEQ ID NO: 1453539 - DNA, 15 bp, Homo sapiens
actgttataaaaaac

SEQ ID NO: 1453540 - DNA, 15 bp, Homo sapiens
ctgttataaaaaact

SEQ ID NO: 1453541 - DNA, 15 bp, Homo sapiens
tgttataaaaaactc

SEQ ID NO: 1453542 - DNA, 15 bp, Homo sapiens
gttataaaaaactct

SEQ ID NO: 1453543 - DNA, 15 bp, Homo sapiens
ttataaaaaactctg

SEQ ID NO: 1453544 - DNA, 15 bp, Homo sapiens
tataaaaaactctgg

SEQ ID NO: 1453545 - DNA, 15 bp, Homo sapiens
ataaaaaactctgga

SEQ ID NO: 1453546 - DNA, 15 bp, Homo sapiens
taaaaaactctggaa

SEQ ID NO: 1453547 - DNA, 15 bp, Homo sapiens
aaaaaactctggaag

SEQ ID NO: 1453548 - DNA, 15 bp, Homo sapiens
aaaaactctggaaga

SEQ ID NO: 1453549 - DNA, 15 bp, Homo sapiens
aaaactctggaagag

SEQ ID NO: 1453550 - DNA, 15 bp, Homo sapiens
aaactctggaagaga

SEQ ID NO: 1453551 - DNA, 15 bp, Homo sapiens
aactctggaagagaa

SEQ ID NO: 1453552 - DNA, 15 bp, Homo sapiens
actctggaagagaat

SEQ ID NO: 1453553 - DNA, 15 bp, Homo sapiens
ctctggaagagaatg

SEQ ID NO: 1453554 - DNA, 15 bp, Homo sapiens
tctggaagagaatga

SEQ ID NO: 1453555 - DNA, 15 bp, Homo sapiens
ctggaagagaatgaa

SEQ ID NO: 1453556 - DNA, 15 bp, Homo sapiens
tggaagagaatgaag

SEQ ID NO: 1453557 - DNA, 15 bp, Homo sapiens
ggaagagaatgaagt

SEQ ID NO: 1453558 - DNA, 15 bp, Homo sapiens
gaagagaatgaagtg

SEQ ID NO: 1453559 - DNA, 15 bp, Homo sapiens
aagagaatgaagtga

SEQ ID NO: 1453560 - DNA, 15 bp, Homo sapiens
agagaatgaagtgat

SEQ ID NO: 1453561 - DNA, 15 bp, Homo sapiens
gagaatgaagtgatg

SEQ ID NO: 1453562 - DNA, 15 bp, Homo sapiens
agaatgaagtgatga

SEQ ID NO: 1453563 - DNA, 15 bp, Homo sapiens
gaatgaagtgatgaa

SEQ ID NO: 1453564 - DNA, 15 bp, Homo sapiens
aatgaagtgatgaaa

SEQ ID NO: 1453565 - DNA, 15 bp, Homo sapiens
atgaagtgatgaaaa

SEQ ID NO: 1453566 - DNA, 15 bp, Homo sapiens
tgaagtgatgaaaat

SEQ ID NO: 1453567 - DNA, 15 bp, Homo sapiens
gaagtgatgaaaatt

SEQ ID NO: 1453568 - DNA, 15 bp, Homo sapiens
aagtgatgaaaattg

SEQ ID NO: 1453569 - DNA, 15 bp, Homo sapiens
agtgatgaaaattgt

SEQ ID NO: 1453570 - DNA, 15 bp, Homo sapiens
gtgatgaaaattgta

SEQ ID NO: 1453571 - DNA, 15 bp, Homo sapiens
tgatgaaaattgtaa

SEQ ID NO: 1453572 - DNA, 15 bp, Homo sapiens
gatgaaaattgtaaa

SEQ ID NO: 1453573 - DNA, 15 bp, Homo sapiens
atgaaaattgtaaat

SEQ ID NO: 1453574 - DNA, 15 bp, Homo sapiens
tgaaaattgtaaatt

SEQ ID NO: 1453575 - DNA, 15 bp, Homo sapiens
gaaaattgtaaattt

SEQ ID NO: 1453576 - DNA, 15 bp, Homo sapiens
aaaattgtaaatttg

SEQ ID NO: 1453577 - DNA, 15 bp, Homo sapiens
aaattgtaaatttgg

SEQ ID NO: 1453578 - DNA, 15 bp, Homo sapiens
aattgtaaatttggt

SEQ ID NO: 1453579 - DNA, 15 bp, Homo sapiens
attgtaaatttggtt

SEQ ID NO: 1453580 - DNA, 15 bp, Homo sapiens
ttgtaaatttggttt

SEQ ID NO: 1453581 - DNA, 15 bp, Homo sapiens
tgtaaatttggtttt

SEQ ID NO: 1453582 - DNA, 15 bp, Homo sapiens
gtaaatttggttttg

SEQ ID NO: 1453583 - DNA, 15 bp, Homo sapiens
taaatttggttttga

SEQ ID NO: 1453584 - DNA, 15 bp, Homo sapiens
aaatttggttttgaa

SEQ ID NO: 1453585 - DNA, 15 bp, Homo sapiens
aatttggttttgaac

SEQ ID NO: 1453586 - DNA, 15 bp, Homo sapiens
atttggttttgaaca

SEQ ID NO: 1453587 - DNA, 15 bp, Homo sapiens
tttggttttgaacat

SEQ ID NO: 1453588 - DNA, 15 bp, Homo sapiens
ttggttttgaacatg

SEQ ID NO: 1453589 - DNA, 15 bp, Homo sapiens
tggttttgaacatgt

SEQ ID NO: 1453590 - DNA, 15 bp, Homo sapiens
ggttttgaacatgtg

SEQ ID NO: 1453591 - DNA, 15 bp, Homo sapiens
gttttgaacatgtgg

SEQ ID NO: 1453592 - DNA, 15 bp, Homo sapiens
ttttgaacatgtggg

SEQ ID NO: 1453593 - DNA, 15 bp, Homo sapiens
tttgaacatgtgggt

SEQ ID NO: 1453594 - DNA, 15 bp, Homo sapiens
ttgaacatgtgggtt

SEQ ID NO: 1453595 - DNA, 15 bp, Homo sapiens
tgaacatgtgggttt

SEQ ID NO: 1453596 - DNA, 15 bp, Homo sapiens
gaacatgtgggtttt

SEQ ID NO: 1453597 - DNA, 15 bp, Homo sapiens
aacatgtgggttttt

SEQ ID NO: 1453598 - DNA, 15 bp, Homo sapiens
acatgtgggtttttt

SEQ ID NO: 1453599 - DNA, 15 bp, Homo sapiens
catgtgggttttttg

SEQ ID NO: 1453600 - DNA, 15 bp, Homo sapiens
atgtgggttttttga

SEQ ID NO: 1453601 - DNA, 15 bp, Homo sapiens
tgtgggttttttgag

SEQ ID NO: 1453602 - DNA, 15 bp, Homo sapiens
gtgggttttttgaga

SEQ ID NO: 1453603 - DNA, 15 bp, Homo sapiens
tgggttttttgagat

SEQ ID NO: 1453604 - DNA, 15 bp, Homo sapiens
gggttttttgagata

SEQ ID NO: 1453605 - DNA, 15 bp, Homo sapiens
ggttttttgagatat

SEQ ID NO: 1453606 - DNA, 15 bp, Homo sapiens
gttttttgagatatc

SEQ ID NO: 1453607 - DNA, 15 bp, Homo sapiens
ttttttgagatatct

SEQ ID NO: 1453608 - DNA, 15 bp, Homo sapiens
tttttgagatatcta

SEQ ID NO: 1453609 - DNA, 15 bp, Homo sapiens
ttttgagatatctag

SEQ ID NO: 1453610 - DNA, 15 bp, Homo sapiens
tttgagatatctagg

SEQ ID NO: 1453611 - DNA, 15 bp, Homo sapiens
ttgagatatctaggt

SEQ ID NO: 1453612 - DNA, 15 bp, Homo sapiens
tgagatatctaggtg

SEQ ID NO: 1453613 - DNA, 15 bp, Homo sapiens
gagatatctaggtgg

SEQ ID NO: 1453614 - DNA, 15 bp, Homo sapiens
agatatctaggtgga

SEQ ID NO: 1453615 - DNA, 15 bp, Homo sapiens
gatatctaggtggag

SEQ ID NO: 1453616 - DNA, 15 bp, Homo sapiens
atatctaggtggaga

SEQ ID NO: 1453617 - DNA, 15 bp, Homo sapiens
tatctaggtggagat

SEQ ID NO: 1453618 - DNA, 15 bp, Homo sapiens
atctaggtggagatg

SEQ ID NO: 1453619 - DNA, 15 bp, Homo sapiens
tctaggtggagatgt

SEQ ID NO: 1453620 - DNA, 15 bp, Homo sapiens
ctaggtggagatgtt

SEQ ID NO: 1453621 - DNA, 15 bp, Homo sapiens
taggtggagatgttg

SEQ ID NO: 1453622 - DNA, 15 bp, Homo sapiens
aggtggagatgttga

SEQ ID NO: 1453623 - DNA, 15 bp, Homo sapiens
ggtggagatgttgag

SEQ ID NO: 1453624 - DNA, 15 bp, Homo sapiens
gtggagatgttgaga

SEQ ID NO: 1453625 - DNA, 15 bp, Homo sapiens
tggagatgttgagaa

SEQ ID NO: 1453626 - DNA, 15 bp, Homo sapiens
ggagatgttgagaaa

SEQ ID NO: 1453627 - DNA, 15 bp, Homo sapiens
gagatgttgagaaag

SEQ ID NO: 1453628 - DNA, 15 bp, Homo sapiens
agatgttgagaaagt

SEQ ID NO: 1453629 - DNA, 15 bp, Homo sapiens
gatgttgagaaagtg

SEQ ID NO: 1453630 - DNA, 15 bp, Homo sapiens
atgttgagaaagtga

SEQ ID NO: 1453631 - DNA, 15 bp, Homo sapiens
tgttgagaaagtgat

SEQ ID NO: 1453632 - DNA, 15 bp, Homo sapiens
gttgagaaagtgatt

SEQ ID NO: 1453633 - DNA, 15 bp, Homo sapiens
ttgagaaagtgattg

SEQ ID NO: 1453634 - DNA, 15 bp, Homo sapiens
tgagaaagtgattgg

SEQ ID NO: 1453635 - DNA, 15 bp, Homo sapiens
gagaaagtgattggc

SEQ ID NO: 1453636 - DNA, 15 bp, Homo sapiens
agaaagtgattggct

SEQ ID NO: 1453637 - DNA, 15 bp, Homo sapiens
gaaagtgattggctg

SEQ ID NO: 1453638 - DNA, 15 bp, Homo sapiens
aaagtgattggctgt

SEQ ID NO: 1453639 - DNA, 15 bp, Homo sapiens
aagtgattggctgta

SEQ ID NO: 1453640 - DNA, 15 bp, Homo sapiens
agtgattggctgtat

SEQ ID NO: 1453641 - DNA, 15 bp, Homo sapiens
gtgattggctgtatg

SEQ ID NO: 1453642 - DNA, 15 bp, Homo sapiens
tgattggctgtatga

SEQ ID NO: 1453643 - DNA, 15 bp, Homo sapiens
gattggctgtatgag

SEQ ID NO: 1453644 - DNA, 15 bp, Homo sapiens
attggctgtatgagc

SEQ ID NO: 1453645 - DNA, 15 bp, Homo sapiens
ttggctgtatgagcc

SEQ ID NO: 1453646 - DNA, 15 bp, Homo sapiens
tggctgtatgagcct

SEQ ID NO: 1453647 - DNA, 15 bp, Homo sapiens
ggctgtatgagcctg

SEQ ID NO: 1453648 - DNA, 15 bp, Homo sapiens
gctgtatgagcctgg

SEQ ID NO: 1453649 - DNA, 15 bp, Homo sapiens
ctgtatgagcctgga

SEQ ID NO: 1453650 - DNA, 15 bp, Homo sapiens
tgtatgagcctggag

SEQ ID NO: 1453651 - DNA, 15 bp, Homo sapiens
gtatgagcctggagt

SEQ ID NO: 1453652 - DNA, 15 bp, Homo sapiens
tatgagcctggagtt

SEQ ID NO: 1453653 - DNA, 15 bp, Homo sapiens
atgagcctggagttc

SEQ ID NO: 1453654 - DNA, 15 bp, Homo sapiens
tgagcctggagttcc

SEQ ID NO: 1453655 - DNA, 15 bp, Homo sapiens
gagcctggagttcca

SEQ ID NO: 1453656 - DNA, 15 bp, Homo sapiens
agcctggagttccag

SEQ ID NO: 1453657 - DNA, 15 bp, Homo sapiens
gcctggagttccaga

SEQ ID NO: 1453658 - DNA, 15 bp, Homo sapiens
cctggagttccagaa

SEQ ID NO: 1453659 - DNA, 15 bp, Homo sapiens
ctggagttccagaag

SEQ ID NO: 1453660 - DNA, 15 bp, Homo sapiens
ggagttccagaagag

SEQ ID NO: 1453661 - DNA, 15 bp, Homo sapiens
gagttccagaagagg

SEQ ID NO: 1453662 - DNA, 15 bp, Homo sapiens
agttccagaagaggt

SEQ ID NO: 1453663 - DNA, 15 bp, Homo sapiens
gttccagaagaggtc

SEQ ID NO: 1453664 - DNA, 15 bp, Homo sapiens
ttccagaagaggtca

SEQ ID NO: 1453665 - DNA, 15 bp, Homo sapiens
tccagaagaggtcag

SEQ ID NO: 1453666 - DNA, 15 bp, Homo sapiens
ccagaagaggtcagc

SEQ ID NO: 1453667 - DNA, 15 bp, Homo sapiens
cagaagaggtcagca

SEQ ID NO: 1453668 - DNA, 15 bp, Homo sapiens
agaagaggtcagcag

SEQ ID NO: 1453669 - DNA, 15 bp, Homo sapiens
gaagaggtcagcagg

SEQ ID NO: 1453670 - DNA, 15 bp, Homo sapiens
aagaggtcagcaggg

SEQ ID NO: 1453671 - DNA, 15 bp, Homo sapiens
agaggtcagcagggg

SEQ ID NO: 1453672 - DNA, 15 bp, Homo sapiens
gaggtcagcagggga

SEQ ID NO: 1453673 - DNA, 15 bp, Homo sapiens
aggtcagcaggggag

SEQ ID NO: 1453674 - DNA, 15 bp, Homo sapiens
ggtcagcaggggaga

SEQ ID NO: 1453675 - DNA, 15 bp, Homo sapiens
gtcagcaggggagac

SEQ ID NO: 1453676 - DNA, 15 bp, Homo sapiens
tcagcaggggagaca

SEQ ID NO: 1453677 - DNA, 15 bp, Homo sapiens
cagcaggggagacag

SEQ ID NO: 1453678 - DNA, 15 bp, Homo sapiens
agcaggggagacaga

SEQ ID NO: 1453679 - DNA, 15 bp, Homo sapiens
gcaggggagacagaa

SEQ ID NO: 1453680 - DNA, 15 bp, Homo sapiens
caggggagacagaag

SEQ ID NO: 1453681 - DNA, 15 bp, Homo sapiens
aggggagacagaaga

SEQ ID NO: 1453682 - DNA, 15 bp, Homo sapiens
ggggagacagaagaa

SEQ ID NO: 1453683 - DNA, 15 bp, Homo sapiens
gggagacagaagaag

SEQ ID NO: 1453684 - DNA, 15 bp, Homo sapiens
ggagacagaagaagg

SEQ ID NO: 1453685 - DNA, 15 bp, Homo sapiens
gagacagaagaagga

SEQ ID NO: 1453686 - DNA, 15 bp, Homo sapiens
agacagaagaaggag

SEQ ID NO: 1453687 - DNA, 15 bp, Homo sapiens
gacagaagaaggagc

SEQ ID NO: 1453688 - DNA, 15 bp, Homo sapiens
acagaagaaggagca

SEQ ID NO: 1453689 - DNA, 15 bp, Homo sapiens
cagaagaaggagcag

SEQ ID NO: 1453690 - DNA, 15 bp, Homo sapiens
agaagaaggagcagt

SEQ ID NO: 1453691 - DNA, 15 bp, Homo sapiens
gaagaaggagcagtc

SEQ ID NO: 1453692 - DNA, 15 bp, Homo sapiens
aagaaggagcagtct

SEQ ID NO: 1453693 - DNA, 15 bp, Homo sapiens
agaaggagcagtctg

SEQ ID NO: 1453694 - DNA, 15 bp, Homo sapiens
gaaggagcagtctga

SEQ ID NO: 1453695 - DNA, 15 bp, Homo sapiens
aaggagcagtctgag

SEQ ID NO: 1453696 - DNA, 15 bp, Homo sapiens
aggagcagtctgaga

SEQ ID NO: 1453697 - DNA, 15 bp, Homo sapiens
ggagcagtctgagaa

SEQ ID NO: 1453698 - DNA, 15 bp, Homo sapiens
gagcagtctgagaag

SEQ ID NO: 1453699 - DNA, 15 bp, Homo sapiens
agcagtctgagaagt

SEQ ID NO: 1453700 - DNA, 15 bp, Homo sapiens
gcagtctgagaagta

SEQ ID NO: 1453701 - DNA, 15 bp, Homo sapiens
cagtctgagaagtag

SEQ ID NO: 1453702 - DNA, 15 bp, Homo sapiens
agtctgagaagtagg

SEQ ID NO: 1453703 - DNA, 15 bp, Homo sapiens
gtctgagaagtagga

SEQ ID NO: 1453704 - DNA, 15 bp, Homo sapiens
tctgagaagtaggag

SEQ ID NO: 1453705 - DNA, 15 bp, Homo sapiens
ctgagaagtaggaga

SEQ ID NO: 1453706 - DNA, 15 bp, Homo sapiens
tgagaagtaggagaa

SEQ ID NO: 1453707 - DNA, 15 bp, Homo sapiens
gagaagtaggagaaa

SEQ ID NO: 1453708 - DNA, 15 bp, Homo sapiens
agaagtaggagaaaa

SEQ ID NO: 1453709 - DNA, 15 bp, Homo sapiens
gaagtaggagaaaaa

SEQ ID NO: 1453710 - DNA, 15 bp, Homo sapiens
aagtaggagaaaaaa

SEQ ID NO: 1453711 - DNA, 15 bp, Homo sapiens
agtaggagaaaaaaa

SEQ ID NO: 1453712 - DNA, 15 bp, Homo sapiens
gtaggagaaaaaaac

SEQ ID NO: 1453713 - DNA, 15 bp, Homo sapiens
taggagaaaaaaacc

SEQ ID NO: 1453714 - DNA, 15 bp, Homo sapiens
aggagaaaaaaaccc

SEQ ID NO: 1453715 - DNA, 15 bp, Homo sapiens
ggagaaaaaaaccca

SEQ ID NO: 1453716 - DNA, 15 bp, Homo sapiens
gagaaaaaaacccac

SEQ ID NO: 1453717 - DNA, 15 bp, Homo sapiens
agaaaaaaacccaca

SEQ ID NO: 1453718 - DNA, 15 bp, Homo sapiens
gaaaaaaacccacag

SEQ ID NO: 1453719 - DNA, 15 bp, Homo sapiens
aaaaaaacccacaga

SEQ ID NO: 1453720 - DNA, 15 bp, Homo sapiens
aaaaaacccacagag

SEQ ID NO: 1453721 - DNA, 15 bp, Homo sapiens
aaaaacccacagaga

SEQ ID NO: 1453722 - DNA, 15 bp, Homo sapiens
aaaacccacagagat

SEQ ID NO: 1453723 - DNA, 15 bp, Homo sapiens
aaacccacagagatg

SEQ ID NO: 1453724 - DNA, 15 bp, Homo sapiens
aacccacagagatgt

SEQ ID NO: 1453725 - DNA, 15 bp, Homo sapiens
acccacagagatgtt

SEQ ID NO: 1453726 - DNA, 15 bp, Homo sapiens
cccacagagatgttg

SEQ ID NO: 1453727 - DNA, 15 bp, Homo sapiens
ccacagagatgttgg

SEQ ID NO: 1453728 - DNA, 15 bp, Homo sapiens
cacagagatgttggc

SEQ ID NO: 1453729 - DNA, 15 bp, Homo sapiens
acagagatgttggca

SEQ ID NO: 1453730 - DNA, 15 bp, Homo sapiens
cagagatgttggcac

SEQ ID NO: 1453731 - DNA, 15 bp, Homo sapiens
agagatgttggcaca

SEQ ID NO: 1453732 - DNA, 15 bp, Homo sapiens
gagatgttggcacag

SEQ ID NO: 1453733 - DNA, 15 bp, Homo sapiens
agatgttggcacaga

SEQ ID NO: 1453734 - DNA, 15 bp, Homo sapiens
gatgttggcacagag

SEQ ID NO: 1453735 - DNA, 15 bp, Homo sapiens
atgttggcacagagg

SEQ ID NO: 1453736 - DNA, 15 bp, Homo sapiens
tgttggcacagaggc

SEQ ID NO: 1453737 - DNA, 15 bp, Homo sapiens
gttggcacagaggcc

SEQ ID NO: 1453738 - DNA, 15 bp, Homo sapiens
ttggcacagaggcca

SEQ ID NO: 1453739 - DNA, 15 bp, Homo sapiens
tggcacagaggccaa

SEQ ID NO: 1453740 - DNA, 15 bp, Homo sapiens
ggcacagaggccaag

SEQ ID NO: 1453741 - DNA, 15 bp, Homo sapiens
gcacagaggccaagg

SEQ ID NO: 1453742 - DNA, 15 bp, Homo sapiens
cacagaggccaaggg

SEQ ID NO: 1453743 - DNA, 15 bp, Homo sapiens
acagaggccaaggga

SEQ ID NO: 1453744 - DNA, 15 bp, Homo sapiens
cagaggccaagggaa

SEQ ID NO: 1453745 - DNA, 15 bp, Homo sapiens
agaggccaagggaag

SEQ ID NO: 1453746 - DNA, 15 bp, Homo sapiens
gaggccaagggaaga

SEQ ID NO: 1453747 - DNA, 15 bp, Homo sapiens
aggccaagggaagag

SEQ ID NO: 1453748 - DNA, 15 bp, Homo sapiens
ggccaagggaagaga

SEQ ID NO: 1453749 - DNA, 15 bp, Homo sapiens
gccaagggaagagag

SEQ ID NO: 1453750 - DNA, 15 bp, Homo sapiens
ccaagggaagagaga

SEQ ID NO: 1453751 - DNA, 15 bp, Homo sapiens
caagggaagagagag

SEQ ID NO: 1453752 - DNA, 15 bp, Homo sapiens
aagggaagagagagt

SEQ ID NO: 1453753 - DNA, 15 bp, Homo sapiens
agggaagagagagtt

SEQ ID NO: 1453754 - DNA, 15 bp, Homo sapiens
gggaagagagagttt

SEQ ID NO: 1453755 - DNA, 15 bp, Homo sapiens
ggaagagagagtttt

SEQ ID NO: 1453756 - DNA, 15 bp, Homo sapiens
gaagagagagtttta

SEQ ID NO: 1453757 - DNA, 15 bp, Homo sapiens
aagagagagttttaa

SEQ ID NO: 1453758 - DNA, 15 bp, Homo sapiens
agagagagttttaaa

SEQ ID NO: 1453759 - DNA, 15 bp, Homo sapiens
gagagagttttaaaa

SEQ ID NO: 1453760 - DNA, 15 bp, Homo sapiens
agagagttttaaaaa

SEQ ID NO: 1453761 - DNA, 15 bp, Homo sapiens
gagagttttaaaaac

SEQ ID NO: 1453762 - DNA, 15 bp, Homo sapiens
agagttttaaaaacg

SEQ ID NO: 1453763 - DNA, 15 bp, Homo sapiens
gagttttaaaaacga

SEQ ID NO: 1453764 - DNA, 15 bp, Homo sapiens
agttttaaaaacgaa

SEQ ID NO: 1453765 - DNA, 15 bp, Homo sapiens
gttttaaaaacgaat

SEQ ID NO: 1453766 - DNA, 15 bp, Homo sapiens
ttttaaaaacgaatg

SEQ ID NO: 1453767 - DNA, 15 bp, Homo sapiens
tttaaaaacgaatga

SEQ ID NO: 1453768 - DNA, 15 bp, Homo sapiens
ttaaaaacgaatgaa

SEQ ID NO: 1453769 - DNA, 15 bp, Homo sapiens
taaaaacgaatgaat

SEQ ID NO: 1453770 - DNA, 15 bp, Homo sapiens
aaaaacgaatgaatg

SEQ ID NO: 1453771 - DNA, 15 bp, Homo sapiens
aaaacgaatgaatgg

SEQ ID NO: 1453772 - DNA, 15 bp, Homo sapiens
aaacgaatgaatggt

SEQ ID NO: 1453773 - DNA, 15 bp, Homo sapiens
aacgaatgaatggtc

SEQ ID NO: 1453774 - DNA, 15 bp, Homo sapiens
acgaatgaatggtca

SEQ ID NO: 1453775 - DNA, 15 bp, Homo sapiens
cgaatgaatggtcaa

SEQ ID NO: 1453776 - DNA, 15 bp, Homo sapiens
gaatgaatggtcaac

SEQ ID NO: 1453777 - DNA, 15 bp, Homo sapiens
aatgaatggtcaaca

SEQ ID NO: 1453778 - DNA, 15 bp, Homo sapiens
atgaatggtcaacag

SEQ ID NO: 1453779 - DNA, 15 bp, Homo sapiens
tgaatggtcaacagg

SEQ ID NO: 1453780 - DNA, 15 bp, Homo sapiens
gaatggtcaacaggt

SEQ ID NO: 1453781 - DNA, 15 bp, Homo sapiens
aatggtcaacaggtg

SEQ ID NO: 1453782 - DNA, 15 bp, Homo sapiens
atggtcaacaggtgc

SEQ ID NO: 1453783 - DNA, 15 bp, Homo sapiens
tggtcaacaggtgca

SEQ ID NO: 1453784 - DNA, 15 bp, Homo sapiens
ggtcaacaggtgcaa

SEQ ID NO: 1453785 - DNA, 15 bp, Homo sapiens
gtcaacaggtgcaaa

SEQ ID NO: 1453786 - DNA, 15 bp, Homo sapiens
tcaacaggtgcaaat

SEQ ID NO: 1453787 - DNA, 15 bp, Homo sapiens
caacaggtgcaaata

SEQ ID NO: 1453788 - DNA, 15 bp, Homo sapiens
aacaggtgcaaataa

SEQ ID NO: 1453789 - DNA, 15 bp, Homo sapiens
acaggtgcaaataaa

SEQ ID NO: 1453790 - DNA, 15 bp, Homo sapiens
caggtgcaaataaag

SEQ ID NO: 1453791 - DNA, 15 bp, Homo sapiens
aggtgcaaataaaga

SEQ ID NO: 1453792 - DNA, 15 bp, Homo sapiens
ggtgcaaataaagac

SEQ ID NO: 1453793 - DNA, 15 bp, Homo sapiens
gtgcaaataaagact

SEQ ID NO: 1453794 - DNA, 15 bp, Homo sapiens
tgcaaataaagactg

SEQ ID NO: 1453795 - DNA, 15 bp, Homo sapiens
gcaaataaagactga

SEQ ID NO: 1453796 - DNA, 15 bp, Homo sapiens
caaataaagactgaa

SEQ ID NO: 1453797 - DNA, 15 bp, Homo sapiens
aaataaagactgaaa

SEQ ID NO: 1453798 - DNA, 15 bp, Homo sapiens
aataaagactgaaaa

SEQ ID NO: 1453799 - DNA, 15 bp, Homo sapiens
ataaagactgaaaaa

SEQ ID NO: 1453800 - DNA, 15 bp, Homo sapiens
taaagactgaaaaat

SEQ ID NO: 1453801 - DNA, 15 bp, Homo sapiens
aaagactgaaaaatg

SEQ ID NO: 1453802 - DNA, 15 bp, Homo sapiens
aagactgaaaaatgt

SEQ ID NO: 1453803 - DNA, 15 bp, Homo sapiens
agactgaaaaatgtc

SEQ ID NO: 1453804 - DNA, 15 bp, Homo sapiens
gactgaaaaatgtcc

SEQ ID NO: 1453805 - DNA, 15 bp, Homo sapiens
actgaaaaatgtcca

SEQ ID NO: 1453806 - DNA, 15 bp, Homo sapiens
ctgaaaaatgtccat

SEQ ID NO: 1453807 - DNA, 15 bp, Homo sapiens
tgaaaaatgtccatt

SEQ ID NO: 1453808 - DNA, 15 bp, Homo sapiens
gaaaaatgtccattg

SEQ ID NO: 1453809 - DNA, 15 bp, Homo sapiens
aaaaatgtccattgg

SEQ ID NO: 1453810 - DNA, 15 bp, Homo sapiens
aaaatgtccattgga

SEQ ID NO: 1453811 - DNA, 15 bp, Homo sapiens
aaatgtccattggat

SEQ ID NO: 1453812 - DNA, 15 bp, Homo sapiens
aatgtccattggatt

SEQ ID NO: 1453813 - DNA, 15 bp, Homo sapiens
atgtccattggattt

SEQ ID NO: 1453814 - DNA, 15 bp, Homo sapiens
tgtccattggattta

SEQ ID NO: 1453815 - DNA, 15 bp, Homo sapiens
gtccattggatttag

SEQ ID NO: 1453816 - DNA, 15 bp, Homo sapiens
tccattggatttagc

SEQ ID NO: 1453817 - DNA, 15 bp, Homo sapiens
ccattggatttagca

SEQ ID NO: 1453818 - DNA, 15 bp, Homo sapiens
cattggatttagcag

SEQ ID NO: 1453819 - DNA, 15 bp, Homo sapiens
attggatttagcagc

SEQ ID NO: 1453820 - DNA, 15 bp, Homo sapiens
ttggatttagcagca

SEQ ID NO: 1453821 - DNA, 15 bp, Homo sapiens
tggatttagcagcat

SEQ ID NO: 1453822 - DNA, 15 bp, Homo sapiens
ggatttagcagcatg

SEQ ID NO: 1453823 - DNA, 15 bp, Homo sapiens
gatttagcagcatga

SEQ ID NO: 1453824 - DNA, 15 bp, Homo sapiens
atttagcagcatgat

SEQ ID NO: 1453825 - DNA, 15 bp, Homo sapiens
tttagcagcatgatg

SEQ ID NO: 1453826 - DNA, 15 bp, Homo sapiens
ttagcagcatgatgg

SEQ ID NO: 1453827 - DNA, 15 bp, Homo sapiens
tagcagcatgatggt

SEQ ID NO: 1453828 - DNA, 15 bp, Homo sapiens
agcagcatgatggtg

SEQ ID NO: 1453829 - DNA, 15 bp, Homo sapiens
gcagcatgatggtga

SEQ ID NO: 1453830 - DNA, 15 bp, Homo sapiens
cagcatgatggtgat

SEQ ID NO: 1453831 - DNA, 15 bp, Homo sapiens
agcatgatggtgatt

SEQ ID NO: 1453832 - DNA, 15 bp, Homo sapiens
gcatgatggtgattg

SEQ ID NO: 1453833 - DNA, 15 bp, Homo sapiens
catgatggtgattgg

SEQ ID NO: 1453834 - DNA, 15 bp, Homo sapiens
atgatggtgattggt

SEQ ID NO: 1453835 - DNA, 15 bp, Homo sapiens
tgatggtgattggtg

SEQ ID NO: 1453836 - DNA, 15 bp, Homo sapiens
gatggtgattggtga

SEQ ID NO: 1453837 - DNA, 15 bp, Homo sapiens
atggtgattggtgac

SEQ ID NO: 1453838 - DNA, 15 bp, Homo sapiens
tggtgattggtgacc

SEQ ID NO: 1453839 - DNA, 15 bp, Homo sapiens
ggtgattggtgacct

SEQ ID NO: 1453840 - DNA, 15 bp, Homo sapiens
gtgattggtgacctt

SEQ ID NO: 1453841 - DNA, 15 bp, Homo sapiens
tgattggtgaccttg

SEQ ID NO: 1453842 - DNA, 15 bp, Homo sapiens
gattggtgaccttgg

SEQ ID NO: 1453843 - DNA, 15 bp, Homo sapiens
attggtgaccttggc

SEQ ID NO: 1453844 - DNA, 15 bp, Homo sapiens
ttggtgaccttggca

SEQ ID NO: 1453845 - DNA, 15 bp, Homo sapiens
tggtgaccttggcaa

SEQ ID NO: 1453846 - DNA, 15 bp, Homo sapiens
ggtgaccttggcaag

SEQ ID NO: 1453847 - DNA, 15 bp, Homo sapiens
gtgaccttggcaaga

SEQ ID NO: 1453848 - DNA, 15 bp, Homo sapiens
tgaccttggcaagag

SEQ ID NO: 1453849 - DNA, 15 bp, Homo sapiens
gaccttggcaagagc

SEQ ID NO: 1453850 - DNA, 15 bp, Homo sapiens
accttggcaagagct

SEQ ID NO: 1453851 - DNA, 15 bp, Homo sapiens
ccttggcaagagctg

SEQ ID NO: 1453852 - DNA, 15 bp, Homo sapiens
cttggcaagagctgt

SEQ ID NO: 1453853 - DNA, 15 bp, Homo sapiens
ttggcaagagctgtt

SEQ ID NO: 1453854 - DNA, 15 bp, Homo sapiens
tggcaagagctgttg

SEQ ID NO: 1453855 - DNA, 15 bp, Homo sapiens
ggcaagagctgttgg

SEQ ID NO: 1453856 - DNA, 15 bp, Homo sapiens
gcaagagctgttggt

SEQ ID NO: 1453857 - DNA, 15 bp, Homo sapiens
caagagctgttggtt

SEQ ID NO: 1453858 - DNA, 15 bp, Homo sapiens
aagagctgttggttt

SEQ ID NO: 1453859 - DNA, 15 bp, Homo sapiens
agagctgttggtttg

SEQ ID NO: 1453860 - DNA, 15 bp, Homo sapiens
gagctgttggtttga

SEQ ID NO: 1453861 - DNA, 15 bp, Homo sapiens
agctgttggtttgat

SEQ ID NO: 1453862 - DNA, 15 bp, Homo sapiens
gctgttggtttgata

SEQ ID NO: 1453863 - DNA, 15 bp, Homo sapiens
ctgttggtttgatag

SEQ ID NO: 1453864 - DNA, 15 bp, Homo sapiens
tgttggtttgatagt

SEQ ID NO: 1453865 - DNA, 15 bp, Homo sapiens
gttggtttgatagta

SEQ ID NO: 1453866 - DNA, 15 bp, Homo sapiens
ttggtttgatagtag

SEQ ID NO: 1453867 - DNA, 15 bp, Homo sapiens
tggtttgatagtagc

SEQ ID NO: 1453868 - DNA, 15 bp, Homo sapiens
ggtttgatagtagcc

SEQ ID NO: 1453869 - DNA, 15 bp, Homo sapiens
gtttgatagtagccc

SEQ ID NO: 1453870 - DNA, 15 bp, Homo sapiens
tttgatagtagccca

SEQ ID NO: 1453871 - DNA, 15 bp, Homo sapiens
ttgatagtagcccaa

SEQ ID NO: 1453872 - DNA, 15 bp, Homo sapiens
tgatagtagcccaat

SEQ ID NO: 1453873 - DNA, 15 bp, Homo sapiens
gatagtagcccaatg

SEQ ID NO: 1453874 - DNA, 15 bp, Homo sapiens
atagtagcccaatgt

SEQ ID NO: 1453875 - DNA, 15 bp, Homo sapiens
tagtagcccaatgtt

SEQ ID NO: 1453876 - DNA, 15 bp, Homo sapiens
agtagcccaatgttc

SEQ ID NO: 1453877 - DNA, 15 bp, Homo sapiens
gtagcccaatgttct

SEQ ID NO: 1453878 - DNA, 15 bp, Homo sapiens
tagcccaatgttctt

SEQ ID NO: 1453879 - DNA, 15 bp, Homo sapiens
agcccaatgttcttg

SEQ ID NO: 1453880 - DNA, 15 bp, Homo sapiens
gcccaatgttcttga

SEQ ID NO: 1453881 - DNA, 15 bp, Homo sapiens
cccaatgttcttgat

SEQ ID NO: 1453882 - DNA, 15 bp, Homo sapiens
ccaatgttcttgata

SEQ ID NO: 1453883 - DNA, 15 bp, Homo sapiens
caatgttcttgataa

SEQ ID NO: 1453884 - DNA, 15 bp, Homo sapiens
aatgttcttgataaa

SEQ ID NO: 1453885 - DNA, 15 bp, Homo sapiens
atgttcttgataaat

SEQ ID NO: 1453886 - DNA, 15 bp, Homo sapiens
tgttcttgataaatt

SEQ ID NO: 1453887 - DNA, 15 bp, Homo sapiens
gttcttgataaattt

SEQ ID NO: 1453888 - DNA, 15 bp, Homo sapiens
ttcttgataaatttg

SEQ ID NO: 1453889 - DNA, 15 bp, Homo sapiens
tcttgataaatttgt

SEQ ID NO: 1453890 - DNA, 15 bp, Homo sapiens
cttgataaatttgtt

SEQ ID NO: 1453891 - DNA, 15 bp, Homo sapiens
ttgataaatttgttt

SEQ ID NO: 1453892 - DNA, 15 bp, Homo sapiens
tgataaatttgttta

SEQ ID NO: 1453893 - DNA, 15 bp, Homo sapiens
gataaatttgtttac

SEQ ID NO: 1453894 - DNA, 15 bp, Homo sapiens
ataaatttgtttaca

SEQ ID NO: 1453895 - DNA, 15 bp, Homo sapiens
taaatttgtttacaa

SEQ ID NO: 1453896 - DNA, 15 bp, Homo sapiens
aaatttgtttacaag

SEQ ID NO: 1453897 - DNA, 15 bp, Homo sapiens
aatttgtttacaagt

SEQ ID NO: 1453898 - DNA, 15 bp, Homo sapiens
atttgtttacaagtc

SEQ ID NO: 1453899 - DNA, 15 bp, Homo sapiens
tttgtttacaagtca

SEQ ID NO: 1453900 - DNA, 15 bp, Homo sapiens
ttgtttacaagtcaa

SEQ ID NO: 1453901 - DNA, 15 bp, Homo sapiens
tgtttacaagtcaag

SEQ ID NO: 1453902 - DNA, 15 bp, Homo sapiens
gtttacaagtcaagg

SEQ ID NO: 1453903 - DNA, 15 bp, Homo sapiens
tttacaagtcaaggt

SEQ ID NO: 1453904 - DNA, 15 bp, Homo sapiens
ttacaagtcaaggta

SEQ ID NO: 1453905 - DNA, 15 bp, Homo sapiens
tacaagtcaaggtag

SEQ ID NO: 1453906 - DNA, 15 bp, Homo sapiens
acaagtcaaggtagc

SEQ ID NO: 1453907 - DNA, 15 bp, Homo sapiens
caagtcaaggtagca

SEQ ID NO: 1453908 - DNA, 15 bp, Homo sapiens
aagtcaaggtagcaa

SEQ ID NO: 1453909 - DNA, 15 bp, Homo sapiens
agtcaaggtagcaat

SEQ ID NO: 1453910 - DNA, 15 bp, Homo sapiens
gtcaaggtagcaata

SEQ ID NO: 1453911 - DNA, 15 bp, Homo sapiens
tcaaggtagcaataa

SEQ ID NO: 1453912 - DNA, 15 bp, Homo sapiens
caaggtagcaataaa

SEQ ID NO: 1453913 - DNA, 15 bp, Homo sapiens
aaggtagcaataaag

SEQ ID NO: 1453914 - DNA, 15 bp, Homo sapiens
aggtagcaataaagt

SEQ ID NO: 1453915 - DNA, 15 bp, Homo sapiens
ggtagcaataaagtg

SEQ ID NO: 1453916 - DNA, 15 bp, Homo sapiens
gtagcaataaagtgt

SEQ ID NO: 1453917 - DNA, 15 bp, Homo sapiens
tagcaataaagtgtc

SEQ ID NO: 1453918 - DNA, 15 bp, Homo sapiens
agcaataaagtgtct

SEQ ID NO: 1453919 - DNA, 15 bp, Homo sapiens
gcaataaagtgtcta

SEQ ID NO: 1453920 - DNA, 15 bp, Homo sapiens
caataaagtgtctaa

SEQ ID NO: 1453921 - DNA, 15 bp, Homo sapiens
aataaagtgtctaaa

SEQ ID NO: 1453922 - DNA, 15 bp, Homo sapiens
ataaagtgtctaaag

SEQ ID NO: 1453923 - DNA, 15 bp, Homo sapiens
taaagtgtctaaagt

SEQ ID NO: 1453924 - DNA, 15 bp, Homo sapiens
aaagtgtctaaagtc

SEQ ID NO: 1453925 - DNA, 15 bp, Homo sapiens
aagtgtctaaagtca

SEQ ID NO: 1453926 - DNA, 15 bp, Homo sapiens
agtgtctaaagtcaa

SEQ ID NO: 1453927 - DNA, 15 bp, Homo sapiens
gtgtctaaagtcaat

SEQ ID NO: 1453928 - DNA, 15 bp, Homo sapiens
tgtctaaagtcaatt

SEQ ID NO: 1453929 - DNA, 15 bp, Homo sapiens
gtctaaagtcaattt

SEQ ID NO: 1453930 - DNA, 15 bp, Homo sapiens
tctaaagtcaatttg

SEQ ID NO: 1453931 - DNA, 15 bp, Homo sapiens
ctaaagtcaatttgt

SEQ ID NO: 1453932 - DNA, 15 bp, Homo sapiens
taaagtcaatttgtc

SEQ ID NO: 1453933 - DNA, 15 bp, Homo sapiens
aaagtcaatttgtcc

SEQ ID NO: 1453934 - DNA, 15 bp, Homo sapiens
aagtcaatttgtcca

SEQ ID NO: 1453935 - DNA, 15 bp, Homo sapiens
agtcaatttgtccat

SEQ ID NO: 1453936 - DNA, 15 bp, Homo sapiens
gtcaatttgtccatt

SEQ ID NO: 1453937 - DNA, 15 bp, Homo sapiens
tcaatttgtccattc

SEQ ID NO: 1453938 - DNA, 15 bp, Homo sapiens
caatttgtccattct

SEQ ID NO: 1453939 - DNA, 15 bp, Homo sapiens
aatttgtccattctg

SEQ ID NO: 1453940 - DNA, 15 bp, Homo sapiens
atttgtccattctgt

SEQ ID NO: 1453941 - DNA, 15 bp, Homo sapiens
tttgtccattctgtc

SEQ ID NO: 1453942 - DNA, 15 bp, Homo sapiens
ttgtccattctgtcc

SEQ ID NO: 1453943 - DNA, 15 bp, Homo sapiens
tgtccattctgtcct

SEQ ID NO: 1453944 - DNA, 15 bp, Homo sapiens
gtccattctgtccta

SEQ ID NO: 1453945 - DNA, 15 bp, Homo sapiens
tccattctgtcctag

SEQ ID NO: 1453946 - DNA, 15 bp, Homo sapiens
ccattctgtcctagc

SEQ ID NO: 1453947 - DNA, 15 bp, Homo sapiens
cattctgtcctagca

SEQ ID NO: 1453948 - DNA, 15 bp, Homo sapiens
attctgtcctagcaa

SEQ ID NO: 1453949 - DNA, 15 bp, Homo sapiens
ttctgtcctagcaag

SEQ ID NO: 1453950 - DNA, 15 bp, Homo sapiens
tctgtcctagcaagt

SEQ ID NO: 1453951 - DNA, 15 bp, Homo sapiens
ctgtcctagcaagtg

SEQ ID NO: 1453952 - DNA, 15 bp, Homo sapiens
tgtcctagcaagtgt

SEQ ID NO: 1453953 - DNA, 15 bp, Homo sapiens
gtcctagcaagtgtt

SEQ ID NO: 1453954 - DNA, 15 bp, Homo sapiens
tcctagcaagtgttt

SEQ ID NO: 1453955 - DNA, 15 bp, Homo sapiens
cctagcaagtgtttt

SEQ ID NO: 1453956 - DNA, 15 bp, Homo sapiens
ctagcaagtgttttc

SEQ ID NO: 1453957 - DNA, 15 bp, Homo sapiens
tagcaagtgttttcc

SEQ ID NO: 1453958 - DNA, 15 bp, Homo sapiens
agcaagtgttttcca

SEQ ID NO: 1453959 - DNA, 15 bp, Homo sapiens
gcaagtgttttccat

SEQ ID NO: 1453960 - DNA, 15 bp, Homo sapiens
caagtgttttccatt

SEQ ID NO: 1453961 - DNA, 15 bp, Homo sapiens
aagtgttttccattt

SEQ ID NO: 1453962 - DNA, 15 bp, Homo sapiens
agtgttttccatttc

SEQ ID NO: 1453963 - DNA, 15 bp, Homo sapiens
gtgttttccatttca

SEQ ID NO: 1453964 - DNA, 15 bp, Homo sapiens
tgttttccatttcag

SEQ ID NO: 1453965 - DNA, 15 bp, Homo sapiens
gttttccatttcaga

SEQ ID NO: 1453966 - DNA, 15 bp, Homo sapiens
ttttccatttcagat

SEQ ID NO: 1453967 - DNA, 15 bp, Homo sapiens
tttccatttcagatt

SEQ ID NO: 1453968 - DNA, 15 bp, Homo sapiens
ttccatttcagattc

SEQ ID NO: 1453969 - DNA, 15 bp, Homo sapiens
tccatttcagattct

SEQ ID NO: 1453970 - DNA, 15 bp, Homo sapiens
ccatttcagattctc

SEQ ID NO: 1453971 - DNA, 15 bp, Homo sapiens
catttcagattctct

SEQ ID NO: 1453972 - DNA, 15 bp, Homo sapiens
atttcagattctcta

SEQ ID NO: 1453973 - DNA, 15 bp, Homo sapiens
tttcagattctctac

SEQ ID NO: 1453974 - DNA, 15 bp, Homo sapiens
ttcagattctctact

SEQ ID NO: 1453975 - DNA, 15 bp, Homo sapiens
tcagattctctactt

SEQ ID NO: 1453976 - DNA, 15 bp, Homo sapiens
cagattctctacttc

SEQ ID NO: 1453977 - DNA, 15 bp, Homo sapiens
agattctctacttca

SEQ ID NO: 1453978 - DNA, 15 bp, Homo sapiens
gattctctacttcat

SEQ ID NO: 1453979 - DNA, 15 bp, Homo sapiens
attctctacttcata

SEQ ID NO: 1453980 - DNA, 15 bp, Homo sapiens
ttctctacttcatag

SEQ ID NO: 1453981 - DNA, 15 bp, Homo sapiens
tctctacttcatagc

SEQ ID NO: 1453982 - DNA, 15 bp, Homo sapiens
ctctacttcatagcc

SEQ ID NO: 1453983 - DNA, 15 bp, Homo sapiens
tctacttcatagcca

SEQ ID NO: 1453984 - DNA, 15 bp, Homo sapiens
ctacttcatagccat

SEQ ID NO: 1453985 - DNA, 15 bp, Homo sapiens
tacttcatagccata

SEQ ID NO: 1453986 - DNA, 15 bp, Homo sapiens
acttcatagccatag

SEQ ID NO: 1453987 - DNA, 15 bp, Homo sapiens
cttcatagccatagg

SEQ ID NO: 1453988 - DNA, 15 bp, Homo sapiens
ttcatagccataggt

SEQ ID NO: 1453989 - DNA, 15 bp, Homo sapiens
tcatagccataggtg

SEQ ID NO: 1453990 - DNA, 15 bp, Homo sapiens
catagccataggtgt

SEQ ID NO: 1453991 - DNA, 15 bp, Homo sapiens
atagccataggtgtc

SEQ ID NO: 1453992 - DNA, 15 bp, Homo sapiens
tagccataggtgtct

SEQ ID NO: 1453993 - DNA, 15 bp, Homo sapiens
agccataggtgtctt

SEQ ID NO: 1453994 - DNA, 15 bp, Homo sapiens
gccataggtgtctta

SEQ ID NO: 1453995 - DNA, 15 bp, Homo sapiens
ccataggtgtcttat

SEQ ID NO: 1453996 - DNA, 15 bp, Homo sapiens
cataggtgtcttatt

SEQ ID NO: 1453997 - DNA, 15 bp, Homo sapiens
ataggtgtcttattc

SEQ ID NO: 1453998 - DNA, 15 bp, Homo sapiens
taggtgtcttattcc

SEQ ID NO: 1453999 - DNA, 15 bp, Homo sapiens
aggtgtcttattcct

SEQ ID NO: 1454000 - DNA, 15 bp, Homo sapiens
ggtgtcttattccta

SEQ ID NO: 1454001 - DNA, 15 bp, Homo sapiens
gtgtcttattcctac

SEQ ID NO: 1454002 - DNA, 15 bp, Homo sapiens
tgtcttattcctact

SEQ ID NO: 1454003 - DNA, 15 bp, Homo sapiens
gtcttattcctactt

SEQ ID NO: 1454004 - DNA, 15 bp, Homo sapiens
tcttattcctacttt

SEQ ID NO: 1454005 - DNA, 15 bp, Homo sapiens
cttattcctacttta

SEQ ID NO: 1454006 - DNA, 15 bp, Homo sapiens
ttattcctactttac

SEQ ID NO: 1454007 - DNA, 15 bp, Homo sapiens
tattcctactttaca

SEQ ID NO: 1454008 - DNA, 15 bp, Homo sapiens
attcctactttacag

SEQ ID NO: 1454009 - DNA, 15 bp, Homo sapiens
ttcctactttacagg

SEQ ID NO: 1454010 - DNA, 15 bp, Homo sapiens
tcctactttacaggt

SEQ ID NO: 1454011 - DNA, 15 bp, Homo sapiens
cctactttacaggtc

SEQ ID NO: 1454012 - DNA, 15 bp, Homo sapiens
ctactttacaggtct

SEQ ID NO: 1454013 - DNA, 15 bp, Homo sapiens
tactttacaggtctg

SEQ ID NO: 1454014 - DNA, 15 bp, Homo sapiens
actttacaggtctga

SEQ ID NO: 1454015 - DNA, 15 bp, Homo sapiens
ctttacaggtctgat

SEQ ID NO: 1454016 - DNA, 15 bp, Homo sapiens
tttacaggtctgatt

SEQ ID NO: 1454017 - DNA, 15 bp, Homo sapiens
ttacaggtctgattg

SEQ ID NO: 1454018 - DNA, 15 bp, Homo sapiens
tacaggtctgattgg

SEQ ID NO: 1454019 - DNA, 15 bp, Homo sapiens
caggtctgattggat

SEQ ID NO: 1454020 - DNA, 15 bp, Homo sapiens
aggtctgattggatg

SEQ ID NO: 1454021 - DNA, 15 bp, Homo sapiens
ggtctgattggatgc

SEQ ID NO: 1454022 - DNA, 15 bp, Homo sapiens
gtctgattggatgcc

SEQ ID NO: 1454023 - DNA, 15 bp, Homo sapiens
tctgattggatgcca

SEQ ID NO: 1454024 - DNA, 15 bp, Homo sapiens
ctgattggatgccac

SEQ ID NO: 1454025 - DNA, 15 bp, Homo sapiens
tgattggatgccaca

SEQ ID NO: 1454026 - DNA, 15 bp, Homo sapiens
gattggatgccacag

SEQ ID NO: 1454027 - DNA, 15 bp, Homo sapiens
attggatgccacagg

SEQ ID NO: 1454028 - DNA, 15 bp, Homo sapiens
ttggatgccacagga

SEQ ID NO: 1454029 - DNA, 15 bp, Homo sapiens
tggatgccacaggaa

SEQ ID NO: 1454030 - DNA, 15 bp, Homo sapiens
ggatgccacaggaaa

SEQ ID NO: 1454031 - DNA, 15 bp, Homo sapiens
gatgccacaggaaat

SEQ ID NO: 1454032 - DNA, 15 bp, Homo sapiens
atgccacaggaaatc

SEQ ID NO: 1454033 - DNA, 15 bp, Homo sapiens
tgccacaggaaatca

SEQ ID NO: 1454034 - DNA, 15 bp, Homo sapiens
gccacaggaaatcag

SEQ ID NO: 1454035 - DNA, 15 bp, Homo sapiens
ccacaggaaatcagt

SEQ ID NO: 1454036 - DNA, 15 bp, Homo sapiens
cacaggaaatcagtc

SEQ ID NO: 1454037 - DNA, 15 bp, Homo sapiens
acaggaaatcagtct

SEQ ID NO: 1454038 - DNA, 15 bp, Homo sapiens
caggaaatcagtcta

SEQ ID NO: 1454039 - DNA, 15 bp, Homo sapiens
aggaaatcagtctat

SEQ ID NO: 1454040 - DNA, 15 bp, Homo sapiens
ggaaatcagtctatt

SEQ ID NO: 1454041 - DNA, 15 bp, Homo sapiens
gaaatcagtctattg

SEQ ID NO: 1454042 - DNA, 15 bp, Homo sapiens
aaatcagtctattgg

SEQ ID NO: 1454043 - DNA, 15 bp, Homo sapiens
aatcagtctattggc

SEQ ID NO: 1454044 - DNA, 15 bp, Homo sapiens
tcagtctattggcat

SEQ ID NO: 1454045 - DNA, 15 bp, Homo sapiens
cagtctattggcatg

SEQ ID NO: 1454046 - DNA, 15 bp, Homo sapiens
agtctattggcatgt

SEQ ID NO: 1454047 - DNA, 15 bp, Homo sapiens
gtctattggcatgtg

SEQ ID NO: 1454048 - DNA, 15 bp, Homo sapiens
tctattggcatgtga

SEQ ID NO: 1454049 - DNA, 15 bp, Homo sapiens
ctattggcatgtgat

SEQ ID NO: 1454050 - DNA, 15 bp, Homo sapiens
tattggcatgtgatt

SEQ ID NO: 1454051 - DNA, 15 bp, Homo sapiens
attggcatgtgattg

SEQ ID NO: 1454052 - DNA, 15 bp, Homo sapiens
ttggcatgtgattgg

SEQ ID NO: 1454053 - DNA, 15 bp, Homo sapiens
tggcatgtgattgga

SEQ ID NO: 1454054 - DNA, 15 bp, Homo sapiens
ggcatgtgattggaa

SEQ ID NO: 1454055 - DNA, 15 bp, Homo sapiens
gcatgtgattggaat

SEQ ID NO: 1454056 - DNA, 15 bp, Homo sapiens
catgtgattggaatg

SEQ ID NO: 1454057 - DNA, 15 bp, Homo sapiens
atgtgattggaatgg

SEQ ID NO: 1454058 - DNA, 15 bp, Homo sapiens
tgtgattggaatggg

SEQ ID NO: 1454059 - DNA, 15 bp, Homo sapiens
gtgattggaatgggc

SEQ ID NO: 1454060 - DNA, 15 bp, Homo sapiens
tgattggaatgggca

SEQ ID NO: 1454061 - DNA, 15 bp, Homo sapiens
gattggaatgggcac

SEQ ID NO: 1454062 - DNA, 15 bp, Homo sapiens
attggaatgggcacc

SEQ ID NO: 1454063 - DNA, 15 bp, Homo sapiens
ttggaatgggcacca

SEQ ID NO: 1454064 - DNA, 15 bp, Homo sapiens
tggaatgggcaccac

SEQ ID NO: 1454065 - DNA, 15 bp, Homo sapiens
ggaatgggcaccact

SEQ ID NO: 1454066 - DNA, 15 bp, Homo sapiens
gaatgggcaccactc

SEQ ID NO: 1454067 - DNA, 15 bp, Homo sapiens
aatgggcaccactcc

SEQ ID NO: 1454068 - DNA, 15 bp, Homo sapiens
atgggcaccactcct

SEQ ID NO: 1454069 - DNA, 15 bp, Homo sapiens
tgggcaccactcctg

SEQ ID NO: 1454070 - DNA, 15 bp, Homo sapiens
gggcaccactcctga

SEQ ID NO: 1454071 - DNA, 15 bp, Homo sapiens
ggcaccactcctgaa

SEQ ID NO: 1454072 - DNA, 15 bp, Homo sapiens
gcaccactcctgaag

SEQ ID NO: 1454073 - DNA, 15 bp, Homo sapiens
caccactcctgaagt

SEQ ID NO: 1454074 - DNA, 15 bp, Homo sapiens
accactcctgaagtg

SEQ ID NO: 1454075 - DNA, 15 bp, Homo sapiens
ccactcctgaagtgc

SEQ ID NO: 1454076 - DNA, 15 bp, Homo sapiens
cactcctgaagtgca

SEQ ID NO: 1454077 - DNA, 15 bp, Homo sapiens
actcctgaagtgcac

SEQ ID NO: 1454078 - DNA, 15 bp, Homo sapiens
ctcctgaagtgcact

SEQ ID NO: 1454079 - DNA, 15 bp, Homo sapiens
tcctgaagtgcactc

SEQ ID NO: 1454080 - DNA, 15 bp, Homo sapiens
cctgaagtgcactca

SEQ ID NO: 1454081 - DNA, 15 bp, Homo sapiens
ctgaagtgcactcaa

SEQ ID NO: 1454082 - DNA, 15 bp, Homo sapiens
tgaagtgcactcaat

SEQ ID NO: 1454083 - DNA, 15 bp, Homo sapiens
gaagtgcactcaata

SEQ ID NO: 1454084 - DNA, 15 bp, Homo sapiens
aagtgcactcaatat

SEQ ID NO: 1454085 - DNA, 15 bp, Homo sapiens
agtgcactcaatatt

SEQ ID NO: 1454086 - DNA, 15 bp, Homo sapiens
gtgcactcaatattc

SEQ ID NO: 1454087 - DNA, 15 bp, Homo sapiens
tgcactcaatattcc

SEQ ID NO: 1454088 - DNA, 15 bp, Homo sapiens
gcactcaatattcct

SEQ ID NO: 1454089 - DNA, 15 bp, Homo sapiens
cactcaatattcctc

SEQ ID NO: 1454090 - DNA, 15 bp, Homo sapiens
actcaatattcctcg

SEQ ID NO: 1454091 - DNA, 15 bp, Homo sapiens
tcaatattcctcgaa

SEQ ID NO: 1454092 - DNA, 15 bp, Homo sapiens
attcctcgaaggtca

SEQ ID NO: 1454093 - DNA, 15 bp, Homo sapiens
ttcctcgaaggtcac

SEQ ID NO: 1454094 - DNA, 15 bp, Homo sapiens
tcgaaggtcacacat

SEQ ID NO: 1454095 - DNA, 15 bp, Homo sapiens
cgaaggtcacacatt

SEQ ID NO: 1454096 - DNA, 15 bp, Homo sapiens
gaaggtcacacattt

SEQ ID NO: 1454097 - DNA, 15 bp, Homo sapiens
aaggtcacacatttc

SEQ ID NO: 1454098 - DNA, 15 bp, Homo sapiens
aggtcacacatttct

SEQ ID NO: 1454099 - DNA, 15 bp, Homo sapiens
ggtcacacatttctt

SEQ ID NO: 1454100 - DNA, 15 bp, Homo sapiens
gtcacacatttcttg

SEQ ID NO: 1454101 - DNA, 15 bp, Homo sapiens
tcacacatttcttgt

SEQ ID NO: 1454102 - DNA, 15 bp, Homo sapiens
cacacatttcttgtg

SEQ ID NO: 1454103 - DNA, 15 bp, Homo sapiens
acacatttcttgtga

SEQ ID NO: 1454104 - DNA, 15 bp, Homo sapiens
cacatttcttgtgag

SEQ ID NO: 1454105 - DNA, 15 bp, Homo sapiens
catttcttgtgagga

SEQ ID NO: 1454106 - DNA, 15 bp, Homo sapiens
atttcttgtgaggaa

SEQ ID NO: 1454107 - DNA, 15 bp, Homo sapiens
tttcttgtgaggaac

SEQ ID NO: 1454108 - DNA, 15 bp, Homo sapiens
ttcttgtgaggaacc

SEQ ID NO: 1454109 - DNA, 15 bp, Homo sapiens
tcttgtgaggaacca

SEQ ID NO: 1454110 - DNA, 15 bp, Homo sapiens
cttgtgaggaaccat

SEQ ID NO: 1454111 - DNA, 15 bp, Homo sapiens
ttgtgaggaaccatc

SEQ ID NO: 1454112 - DNA, 15 bp, Homo sapiens
tgtgaggaaccatcg

SEQ ID NO: 1454113 - DNA, 15 bp, Homo sapiens
gtgaggaaccatcgc

SEQ ID NO: 1454114 - DNA, 15 bp, Homo sapiens
tgaggaaccatcgcc

SEQ ID NO: 1454115 - DNA, 15 bp, Homo sapiens
gaggaaccatcgcca

SEQ ID NO: 1454116 - DNA, 15 bp, Homo sapiens
aggaaccatcgccag

SEQ ID NO: 1454117 - DNA, 15 bp, Homo sapiens
ggaaccatcgccagg

SEQ ID NO: 1454118 - DNA, 15 bp, Homo sapiens
gaaccatcgccaggc

SEQ ID NO: 1454119 - DNA, 15 bp, Homo sapiens
aaccatcgccaggcg

SEQ ID NO: 1454120 - DNA, 15 bp, Homo sapiens
accatcgccaggcgt

SEQ ID NO: 1454121 - DNA, 15 bp, Homo sapiens
ccatcgccaggcgtc

SEQ ID NO: 1454122 - DNA, 15 bp, Homo sapiens
catcgccaggcgtcc

SEQ ID NO: 1454123 - DNA, 15 bp, Homo sapiens
atcgccaggcgtcct

SEQ ID NO: 1454124 - DNA, 15 bp, Homo sapiens
tcgccaggcgtcctt

SEQ ID NO: 1454125 - DNA, 15 bp, Homo sapiens
cgccaggcgtccttg

SEQ ID NO: 1454126 - DNA, 15 bp, Homo sapiens
gccaggcgtccttgg

SEQ ID NO: 1454127 - DNA, 15 bp, Homo sapiens
ccaggcgtccttgga

SEQ ID NO: 1454128 - DNA, 15 bp, Homo sapiens
caggcgtccttggaa

SEQ ID NO: 1454129 - DNA, 15 bp, Homo sapiens
aggcgtccttggaaa

SEQ ID NO: 1454130 - DNA, 15 bp, Homo sapiens
ggcgtccttggaaat

SEQ ID NO: 1454131 - DNA, 15 bp, Homo sapiens
gcgtccttggaaatc

SEQ ID NO: 1454132 - DNA, 15 bp, Homo sapiens
cgtccttggaaatct

SEQ ID NO: 1454133 - DNA, 15 bp, Homo sapiens
gtccttggaaatctc

SEQ ID NO: 1454134 - DNA, 15 bp, Homo sapiens
tccttggaaatctcg

SEQ ID NO: 1454135 - DNA, 15 bp, Homo sapiens
ccttggaaatctcgc

SEQ ID NO: 1454136 - DNA, 15 bp, Homo sapiens
cttggaaatctcgcc

SEQ ID NO: 1454137 - DNA, 15 bp, Homo sapiens
ttggaaatctcgcca

SEQ ID NO: 1454138 - DNA, 15 bp, Homo sapiens
tggaaatctcgccaa

SEQ ID NO: 1454139 - DNA, 15 bp, Homo sapiens
ggaaatctcgccaat

SEQ ID NO: 1454140 - DNA, 15 bp, Homo sapiens
gaaatctcgccaata

SEQ ID NO: 1454141 - DNA, 15 bp, Homo sapiens
aaatctcgccaataa

SEQ ID NO: 1454142 - DNA, 15 bp, Homo sapiens
aatctcgccaataac

SEQ ID NO: 1454143 - DNA, 15 bp, Homo sapiens
atctcgccaataact

SEQ ID NO: 1454144 - DNA, 15 bp, Homo sapiens
tctcgccaataactt

SEQ ID NO: 1454145 - DNA, 15 bp, Homo sapiens
ctcgccaataacttt

SEQ ID NO: 1454146 - DNA, 15 bp, Homo sapiens
gccaataactttcct

SEQ ID NO: 1454147 - DNA, 15 bp, Homo sapiens
ccaataactttcctt

SEQ ID NO: 1454148 - DNA, 15 bp, Homo sapiens
caataactttcctta

SEQ ID NO: 1454149 - DNA, 15 bp, Homo sapiens
aataactttccttac

SEQ ID NO: 1454150 - DNA, 15 bp, Homo sapiens
ataactttccttact

SEQ ID NO: 1454151 - DNA, 15 bp, Homo sapiens
taactttccttactg

SEQ ID NO: 1454152 - DNA, 15 bp, Homo sapiens
aactttccttactgc

SEQ ID NO: 1454153 - DNA, 15 bp, Homo sapiens
actttccttactgct

SEQ ID NO: 1454154 - DNA, 15 bp, Homo sapiens
ctttccttactgctc

SEQ ID NO: 1454155 - DNA, 15 bp, Homo sapiens
tttccttactgctca

SEQ ID NO: 1454156 - DNA, 15 bp, Homo sapiens
ttccttactgctcaa

SEQ ID NO: 1454157 - DNA, 15 bp, Homo sapiens
tccttactgctcaaa

SEQ ID NO: 1454158 - DNA, 15 bp, Homo sapiens
ccttactgctcaaac

SEQ ID NO: 1454159 - DNA, 15 bp, Homo sapiens
cttactgctcaaaca

SEQ ID NO: 1454160 - DNA, 15 bp, Homo sapiens
ttactgctcaaacac

SEQ ID NO: 1454161 - DNA, 15 bp, Homo sapiens
tactgctcaaacact

SEQ ID NO: 1454162 - DNA, 15 bp, Homo sapiens
actgctcaaacactc

SEQ ID NO: 1454163 - DNA, 15 bp, Homo sapiens
ctgctcaaacactct

SEQ ID NO: 1454164 - DNA, 15 bp, Homo sapiens
tgctcaaacactctt

SEQ ID NO: 1454165 - DNA, 15 bp, Homo sapiens
gctcaaacactcttg

SEQ ID NO: 1454166 - DNA, 15 bp, Homo sapiens
ctcaaacactcttga

SEQ ID NO: 1454167 - DNA, 15 bp, Homo sapiens
tcaaacactcttgat

SEQ ID NO: 1454168 - DNA, 15 bp, Homo sapiens
caaacactcttgatg

SEQ ID NO: 1454169 - DNA, 15 bp, Homo sapiens
aaacactcttgatgg

SEQ ID NO: 1454170 - DNA, 15 bp, Homo sapiens
aacactcttgatgga

SEQ ID NO: 1454171 - DNA, 15 bp, Homo sapiens
acactcttgatggac

SEQ ID NO: 1454172 - DNA, 15 bp, Homo sapiens
cactcttgatggacc

SEQ ID NO: 1454173 - DNA, 15 bp, Homo sapiens
actcttgatggacct

SEQ ID NO: 1454174 - DNA, 15 bp, Homo sapiens
ctcttgatggacctt

SEQ ID NO: 1454175 - DNA, 15 bp, Homo sapiens
tcttgatggaccttg

SEQ ID NO: 1454176 - DNA, 15 bp, Homo sapiens
cttgatggaccttgg

SEQ ID NO: 1454177 - DNA, 15 bp, Homo sapiens
ttgatggaccttgga

SEQ ID NO: 1454178 - DNA, 15 bp, Homo sapiens
tgatggaccttggac

SEQ ID NO: 1454179 - DNA, 15 bp, Homo sapiens
gatggaccttggaca

SEQ ID NO: 1454180 - DNA, 15 bp, Homo sapiens
atggaccttggacag

SEQ ID NO: 1454181 - DNA, 15 bp, Homo sapiens
tggaccttggacagt

SEQ ID NO: 1454182 - DNA, 15 bp, Homo sapiens
ggaccttggacagtt

SEQ ID NO: 1454183 - DNA, 15 bp, Homo sapiens
gaccttggacagttt

SEQ ID NO: 1454184 - DNA, 15 bp, Homo sapiens
accttggacagtttc

SEQ ID NO: 1454185 - DNA, 15 bp, Homo sapiens
ccttggacagtttct

SEQ ID NO: 1454186 - DNA, 15 bp, Homo sapiens
cttggacagtttcta

SEQ ID NO: 1454187 - DNA, 15 bp, Homo sapiens
ttggacagtttctac

SEQ ID NO: 1454188 - DNA, 15 bp, Homo sapiens
tggacagtttctact

SEQ ID NO: 1454189 - DNA, 15 bp, Homo sapiens
ggacagtttctactg

SEQ ID NO: 1454190 - DNA, 15 bp, Homo sapiens
gacagtttctactgt

SEQ ID NO: 1454191 - DNA, 15 bp, Homo sapiens
acagtttctactgtt

SEQ ID NO: 1454192 - DNA, 15 bp, Homo sapiens
cagtttctactgttt

SEQ ID NO: 1454193 - DNA, 15 bp, Homo sapiens
agtttctactgtttt

SEQ ID NO: 1454194 - DNA, 15 bp, Homo sapiens
gtttctactgttttg

SEQ ID NO: 1454195 - DNA, 15 bp, Homo sapiens
tttctactgttttgt

SEQ ID NO: 1454196 - DNA, 15 bp, Homo sapiens
ttctactgttttgtc

SEQ ID NO: 1454197 - DNA, 15 bp, Homo sapiens
tctactgttttgtca

SEQ ID NO: 1454198 - DNA, 15 bp, Homo sapiens
ctactgttttgtcat

SEQ ID NO: 1454199 - DNA, 15 bp, Homo sapiens
tactgttttgtcata

SEQ ID NO: 1454200 - DNA, 15 bp, Homo sapiens
actgttttgtcatat

SEQ ID NO: 1454201 - DNA, 15 bp, Homo sapiens
ctgttttgtcatatc

SEQ ID NO: 1454202 - DNA, 15 bp, Homo sapiens
tgttttgtcatatct

SEQ ID NO: 1454203 - DNA, 15 bp, Homo sapiens
gttttgtcatatctc

SEQ ID NO: 1454204 - DNA, 15 bp, Homo sapiens
ttttgtcatatctct

SEQ ID NO: 1454205 - DNA, 15 bp, Homo sapiens
tttgtcatatctctt

SEQ ID NO: 1454206 - DNA, 15 bp, Homo sapiens
ttgtcatatctcttc

SEQ ID NO: 1454207 - DNA, 15 bp, Homo sapiens
tgtcatatctcttcc

SEQ ID NO: 1454208 - DNA, 15 bp, Homo sapiens
gtcatatctcttccc

SEQ ID NO: 1454209 - DNA, 15 bp, Homo sapiens
tcatatctcttccca

SEQ ID NO: 1454210 - DNA, 15 bp, Homo sapiens
catatctcttcccac

SEQ ID NO: 1454211 - DNA, 15 bp, Homo sapiens
atatctcttcccacc

SEQ ID NO: 1454212 - DNA, 15 bp, Homo sapiens
tatctcttcccacca

SEQ ID NO: 1454213 - DNA, 15 bp, Homo sapiens
atctcttcccaccaa

SEQ ID NO: 1454214 - DNA, 15 bp, Homo sapiens
tctcttcccaccaac

SEQ ID NO: 1454215 - DNA, 15 bp, Homo sapiens
ctcttcccaccaaca

SEQ ID NO: 1454216 - DNA, 15 bp, Homo sapiens
tcttcccaccaacat

SEQ ID NO: 1454217 - DNA, 15 bp, Homo sapiens
cttcccaccaacatg

SEQ ID NO: 1454218 - DNA, 15 bp, Homo sapiens
ttcccaccaacatgg

SEQ ID NO: 1454219 - DNA, 15 bp, Homo sapiens
tcccaccaacatggt

SEQ ID NO: 1454220 - DNA, 15 bp, Homo sapiens
cccaccaacatggta

SEQ ID NO: 1454221 - DNA, 15 bp, Homo sapiens
ccaccaacatggtaa

SEQ ID NO: 1454222 - DNA, 15 bp, Homo sapiens
caccaacatggtaat

SEQ ID NO: 1454223 - DNA, 15 bp, Homo sapiens
accaacatggtaata

SEQ ID NO: 1454224 - DNA, 15 bp, Homo sapiens
ccaacatggtaatat

SEQ ID NO: 1454225 - DNA, 15 bp, Homo sapiens
caacatggtaatatc

SEQ ID NO: 1454226 - DNA, 15 bp, Homo sapiens
aacatggtaatatct

SEQ ID NO: 1454227 - DNA, 15 bp, Homo sapiens
acatggtaatatctt

SEQ ID NO: 1454228 - DNA, 15 bp, Homo sapiens
catggtaatatcttg

SEQ ID NO: 1454229 - DNA, 15 bp, Homo sapiens
atggtaatatcttgg

SEQ ID NO: 1454230 - DNA, 15 bp, Homo sapiens
tggtaatatcttgga

SEQ ID NO: 1454231 - DNA, 15 bp, Homo sapiens
ggtaatatcttggat

SEQ ID NO: 1454232 - DNA, 15 bp, Homo sapiens
gtaatatcttggatc

SEQ ID NO: 1454233 - DNA, 15 bp, Homo sapiens
taatatcttggatct

SEQ ID NO: 1454234 - DNA, 15 bp, Homo sapiens
aatatcttggatctt

SEQ ID NO: 1454235 - DNA, 15 bp, Homo sapiens
atatcttggatcttt

SEQ ID NO: 1454236 - DNA, 15 bp, Homo sapiens
tatcttggatcttta

SEQ ID NO: 1454237 - DNA, 15 bp, Homo sapiens
atcttggatctttaa

SEQ ID NO: 1454238 - DNA, 15 bp, Homo sapiens
tcttggatctttaaa

SEQ ID NO: 1454239 - DNA, 15 bp, Homo sapiens
cttggatctttaaaa

SEQ ID NO: 1454240 - DNA, 15 bp, Homo sapiens
ttggatctttaaaat

SEQ ID NO: 1454241 - DNA, 15 bp, Homo sapiens
tggatctttaaaatg

SEQ ID NO: 1454242 - DNA, 15 bp, Homo sapiens
ggatctttaaaatga

SEQ ID NO: 1454243 - DNA, 15 bp, Homo sapiens
gatctttaaaatgaa

SEQ ID NO: 1454244 - DNA, 15 bp, Homo sapiens
atctttaaaatgaat

SEQ ID NO: 1454245 - DNA, 15 bp, Homo sapiens
tctttaaaatgaata

SEQ ID NO: 1454246 - DNA, 15 bp, Homo sapiens
ctttaaaatgaatat

SEQ ID NO: 1454247 - DNA, 15 bp, Homo sapiens
tttaaaatgaatatt

SEQ ID NO: 1454248 - DNA, 15 bp, Homo sapiens
ttaaaatgaatatta

SEQ ID NO: 1454249 - DNA, 15 bp, Homo sapiens
taaaatgaatattat

SEQ ID NO: 1454250 - DNA, 15 bp, Homo sapiens
aaaatgaatattata

SEQ ID NO: 1454251 - DNA, 15 bp, Homo sapiens
aaatgaatattataa

SEQ ID NO: 1454252 - DNA, 15 bp, Homo sapiens
aatgaatattataaa

SEQ ID NO: 1454253 - DNA, 15 bp, Homo sapiens
atgaatattataaat

SEQ ID NO: 1454254 - DNA, 15 bp, Homo sapiens
tgaatattataaata

SEQ ID NO: 1454255 - DNA, 15 bp, Homo sapiens
gaatattataaatat

SEQ ID NO: 1454256 - DNA, 15 bp, Homo sapiens
aatattataaatatc

SEQ ID NO: 1454257 - DNA, 15 bp, Homo sapiens
atattataaatatcc

SEQ ID NO: 1454258 - DNA, 15 bp, Homo sapiens
tattataaatatcca

SEQ ID NO: 1454259 - DNA, 15 bp, Homo sapiens
attataaatatccag

SEQ ID NO: 1454260 - DNA, 15 bp, Homo sapiens
ttataaatatccagt

SEQ ID NO: 1454261 - DNA, 15 bp, Homo sapiens
tataaatatccagtc

SEQ ID NO: 1454262 - DNA, 15 bp, Homo sapiens
ataaatatccagtcc

SEQ ID NO: 1454263 - DNA, 15 bp, Homo sapiens
taaatatccagtcct

SEQ ID NO: 1454264 - DNA, 15 bp, Homo sapiens
aaatatccagtccta

SEQ ID NO: 1454265 - DNA, 15 bp, Homo sapiens
aatatccagtcctac

SEQ ID NO: 1454266 - DNA, 15 bp, Homo sapiens
atatccagtcctact

SEQ ID NO: 1454267 - DNA, 15 bp, Homo sapiens
tatccagtcctactt

SEQ ID NO: 1454268 - DNA, 15 bp, Homo sapiens
atccagtcctacttt

SEQ ID NO: 1454269 - DNA, 15 bp, Homo sapiens
tccagtcctactttt

SEQ ID NO: 1454270 - DNA, 15 bp, Homo sapiens
ccagtcctactttta

SEQ ID NO: 1454271 - DNA, 15 bp, Homo sapiens
cagtcctacttttaa

SEQ ID NO: 1454272 - DNA, 15 bp, Homo sapiens
agtcctacttttaat

SEQ ID NO: 1454273 - DNA, 15 bp, Homo sapiens
gtcctacttttaata

SEQ ID NO: 1454274 - DNA, 15 bp, Homo sapiens
tcctacttttaataa

SEQ ID NO: 1454275 - DNA, 15 bp, Homo sapiens
cctacttttaataaa

SEQ ID NO: 1454276 - DNA, 15 bp, Homo sapiens
ctacttttaataaaa

SEQ ID NO: 1454277 - DNA, 15 bp, Homo sapiens
tacttttaataaaat

SEQ ID NO: 1454278 - DNA, 15 bp, Homo sapiens
acttttaataaaatt

SEQ ID NO: 1454279 - DNA, 15 bp, Homo sapiens
cttttaataaaattt

SEQ ID NO: 1454280 - DNA, 15 bp, Homo sapiens
ttttaataaaattta

SEQ ID NO: 1454281 - DNA, 15 bp, Homo sapiens
tttaataaaatttac

SEQ ID NO: 1454282 - DNA, 15 bp, Homo sapiens
ttaataaaatttact

SEQ ID NO: 1454283 - DNA, 15 bp, Homo sapiens
taataaaatttactg

SEQ ID NO: 1454284 - DNA, 15 bp, Homo sapiens
aataaaatttactgg

SEQ ID NO: 1454285 - DNA, 15 bp, Homo sapiens
ataaaatttactgga

SEQ ID NO: 1454286 - DNA, 15 bp, Homo sapiens
taaaatttactggac

SEQ ID NO: 1454287 - DNA, 15 bp, Homo sapiens
aaaatttactggaca

SEQ ID NO: 1454288 - DNA, 15 bp, Homo sapiens
aaatttactggacaa

SEQ ID NO: 1454289 - DNA, 15 bp, Homo sapiens
aatttactggacaat

SEQ ID NO: 1454290 - DNA, 15 bp, Homo sapiens
atttactggacaatg

SEQ ID NO: 1454291 - DNA, 15 bp, Homo sapiens
tttactggacaatgt

SEQ ID NO: 1454292 - DNA, 15 bp, Homo sapiens
ttactggacaatgta

SEQ ID NO: 1454293 - DNA, 15 bp, Homo sapiens
tactggacaatgtac

SEQ ID NO: 1454294 - DNA, 15 bp, Homo sapiens
actggacaatgtaca

SEQ ID NO: 1454295 - DNA, 15 bp, Homo sapiens
ctggacaatgtacag

SEQ ID NO: 1454296 - DNA, 15 bp, Homo sapiens
tggacaatgtacagg

SEQ ID NO: 1454297 - DNA, 15 bp, Homo sapiens
ggacaatgtacagga

SEQ ID NO: 1454298 - DNA, 15 bp, Homo sapiens
gacaatgtacaggaa

SEQ ID NO: 1454299 - DNA, 15 bp, Homo sapiens
acaatgtacaggaat

SEQ ID NO: 1454300 - DNA, 15 bp, Homo sapiens
caatgtacaggaata

SEQ ID NO: 1454301 - DNA, 15 bp, Homo sapiens
aatgtacaggaatat

SEQ ID NO: 1454302 - DNA, 15 bp, Homo sapiens
atgtacaggaatata

SEQ ID NO: 1454303 - DNA, 15 bp, Homo sapiens
tgtacaggaatatag

SEQ ID NO: 1454304 - DNA, 15 bp, Homo sapiens
gtacaggaatatagt

SEQ ID NO: 1454305 - DNA, 15 bp, Homo sapiens
tacaggaatatagtg

SEQ ID NO: 1454306 - DNA, 15 bp, Homo sapiens
acaggaatatagtgt

SEQ ID NO: 1454307 - DNA, 15 bp, Homo sapiens
caggaatatagtgtg

SEQ ID NO: 1454308 - DNA, 15 bp, Homo sapiens
aggaatatagtgtgt

SEQ ID NO: 1454309 - DNA, 15 bp, Homo sapiens
ggaatatagtgtgtt

SEQ ID NO: 1454310 - DNA, 15 bp, Homo sapiens
gaatatagtgtgttg

SEQ ID NO: 1454311 - DNA, 15 bp, Homo sapiens
aatatagtgtgttgc

SEQ ID NO: 1454312 - DNA, 15 bp, Homo sapiens
atatagtgtgttgct

SEQ ID NO: 1454313 - DNA, 15 bp, Homo sapiens
tatagtgtgttgctg

SEQ ID NO: 1454314 - DNA, 15 bp, Homo sapiens
atagtgtgttgctga

SEQ ID NO: 1454315 - DNA, 15 bp, Homo sapiens
tagtgtgttgctgaa

SEQ ID NO: 1454316 - DNA, 15 bp, Homo sapiens
agtgtgttgctgaag

SEQ ID NO: 1454317 - DNA, 15 bp, Homo sapiens
gtgtgttgctgaagg

SEQ ID NO: 1454318 - DNA, 15 bp, Homo sapiens
tgtgttgctgaaggg

SEQ ID NO: 1454319 - DNA, 15 bp, Homo sapiens
gtgttgctgaagggg

SEQ ID NO: 1454320 - DNA, 15 bp, Homo sapiens
tgttgctgaagggga

SEQ ID NO: 1454321 - DNA, 15 bp, Homo sapiens
gttgctgaaggggac

SEQ ID NO: 1454322 - DNA, 15 bp, Homo sapiens
ttgctgaaggggaca

SEQ ID NO: 1454323 - DNA, 15 bp, Homo sapiens
tgctgaaggggacat

SEQ ID NO: 1454324 - DNA, 15 bp, Homo sapiens
gctgaaggggacatt

SEQ ID NO: 1454325 - DNA, 15 bp, Homo sapiens
ctgaaggggacatta

SEQ ID NO: 1454326 - DNA, 15 bp, Homo sapiens
tgaaggggacattat

SEQ ID NO: 1454327 - DNA, 15 bp, Homo sapiens
gaaggggacattata

SEQ ID NO: 1454328 - DNA, 15 bp, Homo sapiens
aaggggacattatag

SEQ ID NO: 1454329 - DNA, 15 bp, Homo sapiens
aggggacattataga

SEQ ID NO: 1454330 - DNA, 15 bp, Homo sapiens
ggggacattatagag

SEQ ID NO: 1454331 - DNA, 15 bp, Homo sapiens
gggacattatagagt

SEQ ID NO: 1454332 - DNA, 15 bp, Homo sapiens
ggacattatagagtt

SEQ ID NO: 1454333 - DNA, 15 bp, Homo sapiens
gacattatagagtta

SEQ ID NO: 1454334 - DNA, 15 bp, Homo sapiens
acattatagagttac

SEQ ID NO: 1454335 - DNA, 15 bp, Homo sapiens
cattatagagttact

SEQ ID NO: 1454336 - DNA, 15 bp, Homo sapiens
attatagagttactg

SEQ ID NO: 1454337 - DNA, 15 bp, Homo sapiens
ttatagagttactgt

SEQ ID NO: 1454338 - DNA, 15 bp, Homo sapiens
tatagagttactgta

SEQ ID NO: 1454339 - DNA, 15 bp, Homo sapiens
atagagttactgtat

SEQ ID NO: 1454340 - DNA, 15 bp, Homo sapiens
tagagttactgtatt

SEQ ID NO: 1454341 - DNA, 15 bp, Homo sapiens
agagttactgtatta

SEQ ID NO: 1454342 - DNA, 15 bp, Homo sapiens
gagttactgtattag

SEQ ID NO: 1454343 - DNA, 15 bp, Homo sapiens
agttactgtattaga

SEQ ID NO: 1454344 - DNA, 15 bp, Homo sapiens
gttactgtattagac

SEQ ID NO: 1454345 - DNA, 15 bp, Homo sapiens
ttactgtattagacc

SEQ ID NO: 1454346 - DNA, 15 bp, Homo sapiens
tactgtattagacct

SEQ ID NO: 1454347 - DNA, 15 bp, Homo sapiens
actgtattagacctc

SEQ ID NO: 1454348 - DNA, 15 bp, Homo sapiens
ctgtattagacctca

SEQ ID NO: 1454349 - DNA, 15 bp, Homo sapiens
tgtattagacctcag

SEQ ID NO: 1454350 - DNA, 15 bp, Homo sapiens
gtattagacctcagc

SEQ ID NO: 1454351 - DNA, 15 bp, Homo sapiens
tattagacctcagcc

SEQ ID NO: 1454352 - DNA, 15 bp, Homo sapiens
attagacctcagcca

SEQ ID NO: 1454353 - DNA, 15 bp, Homo sapiens
ttagacctcagccaa

SEQ ID NO: 1454354 - DNA, 15 bp, Homo sapiens
tagacctcagccaag

SEQ ID NO: 1454355 - DNA, 15 bp, Homo sapiens
agacctcagccaaga

SEQ ID NO: 1454356 - DNA, 15 bp, Homo sapiens
gacctcagccaagat

SEQ ID NO: 1454357 - DNA, 15 bp, Homo sapiens
acctcagccaagatc

SEQ ID NO: 1454358 - DNA, 15 bp, Homo sapiens
cctcagccaagatcc

SEQ ID NO: 1454359 - DNA, 15 bp, Homo sapiens
ctcagccaagatccc

SEQ ID NO: 1454360 - DNA, 15 bp, Homo sapiens
tcagccaagatcccc

SEQ ID NO: 1454361 - DNA, 15 bp, Homo sapiens
cagccaagatcccct

SEQ ID NO: 1454362 - DNA, 15 bp, Homo sapiens
agccaagatccccta

SEQ ID NO: 1454363 - DNA, 15 bp, Homo sapiens
gccaagatcccctag

SEQ ID NO: 1454364 - DNA, 15 bp, Homo sapiens
ccaagatcccctagt

SEQ ID NO: 1454365 - DNA, 15 bp, Homo sapiens
caagatcccctagtt

SEQ ID NO: 1454366 - DNA, 15 bp, Homo sapiens
aagatcccctagttt

SEQ ID NO: 1454367 - DNA, 15 bp, Homo sapiens
agatcccctagtttc

SEQ ID NO: 1454368 - DNA, 15 bp, Homo sapiens
gatcccctagtttcc

SEQ ID NO: 1454369 - DNA, 15 bp, Homo sapiens
atcccctagtttcca

SEQ ID NO: 1454370 - DNA, 15 bp, Homo sapiens
tcccctagtttccag

SEQ ID NO: 1454371 - DNA, 15 bp, Homo sapiens
cccctagtttccagc

SEQ ID NO: 1454372 - DNA, 15 bp, Homo sapiens
ccctagtttccagct

SEQ ID NO: 1454373 - DNA, 15 bp, Homo sapiens
cctagtttccagctt

SEQ ID NO: 1454374 - DNA, 15 bp, Homo sapiens
ctagtttccagcttc

SEQ ID NO: 1454375 - DNA, 15 bp, Homo sapiens
tagtttccagcttcc

SEQ ID NO: 1454376 - DNA, 15 bp, Homo sapiens
agtttccagcttcca

SEQ ID NO: 1454377 - DNA, 15 bp, Homo sapiens
gtttccagcttccag

SEQ ID NO: 1454378 - DNA, 15 bp, Homo sapiens
tttccagcttccagt

SEQ ID NO: 1454379 - DNA, 15 bp, Homo sapiens
ttccagcttccagtg

SEQ ID NO: 1454380 - DNA, 15 bp, Homo sapiens
tccagcttccagtgt

SEQ ID NO: 1454381 - DNA, 15 bp, Homo sapiens
ccagcttccagtgta

SEQ ID NO: 1454382 - DNA, 15 bp, Homo sapiens
cagcttccagtgtaa

SEQ ID NO: 1454383 - DNA, 15 bp, Homo sapiens
agcttccagtgtaaa

SEQ ID NO: 1454384 - DNA, 15 bp, Homo sapiens
gcttccagtgtaaag

SEQ ID NO: 1454385 - DNA, 15 bp, Homo sapiens
cttccagtgtaaagt

SEQ ID NO: 1454386 - DNA, 15 bp, Homo sapiens
ttccagtgtaaagtt

SEQ ID NO: 1454387 - DNA, 15 bp, Homo sapiens
tccagtgtaaagttt

SEQ ID NO: 1454388 - DNA, 15 bp, Homo sapiens
ccagtgtaaagtttt

SEQ ID NO: 1454389 - DNA, 15 bp, Homo sapiens
cagtgtaaagttttt

SEQ ID NO: 1454390 - DNA, 15 bp, Homo sapiens
agtgtaaagttttta

SEQ ID NO: 1454391 - DNA, 15 bp, Homo sapiens
gtgtaaagtttttac

SEQ ID NO: 1454392 - DNA, 15 bp, Homo sapiens
tgtaaagtttttacc

SEQ ID NO: 1454393 - DNA, 15 bp, Homo sapiens
gtaaagtttttacct

SEQ ID NO: 1454394 - DNA, 15 bp, Homo sapiens
taaagtttttacctt

SEQ ID NO: 1454395 - DNA, 15 bp, Homo sapiens
aaagtttttaccttg

SEQ ID NO: 1454396 - DNA, 15 bp, Homo sapiens
aagtttttaccttga

SEQ ID NO: 1454397 - DNA, 15 bp, Homo sapiens
agtttttaccttgac

SEQ ID NO: 1454398 - DNA, 15 bp, Homo sapiens
gtttttaccttgact

SEQ ID NO: 1454399 - DNA, 15 bp, Homo sapiens
tttttaccttgacta

SEQ ID NO: 1454400 - DNA, 15 bp, Homo sapiens
ttttaccttgactat

SEQ ID NO: 1454401 - DNA, 15 bp, Homo sapiens
tttaccttgactata

SEQ ID NO: 1454402 - DNA, 15 bp, Homo sapiens
ttaccttgactataa

SEQ ID NO: 1454403 - DNA, 15 bp, Homo sapiens
taccttgactataaa

SEQ ID NO: 1454404 - DNA, 15 bp, Homo sapiens
accttgactataaaa

SEQ ID NO: 1454405 - DNA, 15 bp, Homo sapiens
ccttgactataaaag

SEQ ID NO: 1454406 - DNA, 15 bp, Homo sapiens
cttgactataaaagg

SEQ ID NO: 1454407 - DNA, 15 bp, Homo sapiens
ttgactataaaaggg

SEQ ID NO: 1454408 - DNA, 15 bp, Homo sapiens
tgactataaaagggc

SEQ ID NO: 1454409 - DNA, 15 bp, Homo sapiens
gactataaaagggct

SEQ ID NO: 1454410 - DNA, 15 bp, Homo sapiens
actataaaagggctt

SEQ ID NO: 1454411 - DNA, 15 bp, Homo sapiens
ctataaaagggcttg

SEQ ID NO: 1454412 - DNA, 15 bp, Homo sapiens
tataaaagggcttga

SEQ ID NO: 1454413 - DNA, 15 bp, Homo sapiens
ataaaagggcttgag

SEQ ID NO: 1454414 - DNA, 15 bp, Homo sapiens
taaaagggcttgagt

SEQ ID NO: 1454415 - DNA, 15 bp, Homo sapiens
aaaagggcttgagta

SEQ ID NO: 1454416 - DNA, 15 bp, Homo sapiens
aaagggcttgagtat

SEQ ID NO: 1454417 - DNA, 15 bp, Homo sapiens
aagggcttgagtatt

SEQ ID NO: 1454418 - DNA, 15 bp, Homo sapiens
agggcttgagtatta

SEQ ID NO: 1454419 - DNA, 15 bp, Homo sapiens
gggcttgagtattag

SEQ ID NO: 1454420 - DNA, 15 bp, Homo sapiens
ggcttgagtattagt

SEQ ID NO: 1454421 - DNA, 15 bp, Homo sapiens
gcttgagtattagta

SEQ ID NO: 1454422 - DNA, 15 bp, Homo sapiens
cttgagtattagtag

SEQ ID NO: 1454423 - DNA, 15 bp, Homo sapiens
ttgagtattagtagg

SEQ ID NO: 1454424 - DNA, 15 bp, Homo sapiens
tgagtattagtagga

SEQ ID NO: 1454425 - DNA, 15 bp, Homo sapiens
gagtattagtaggac

SEQ ID NO: 1454426 - DNA, 15 bp, Homo sapiens
agtattagtaggact

SEQ ID NO: 1454427 - DNA, 15 bp, Homo sapiens
gtattagtaggactc

SEQ ID NO: 1454428 - DNA, 15 bp, Homo sapiens
tattagtaggactca

SEQ ID NO: 1454429 - DNA, 15 bp, Homo sapiens
attagtaggactcat

SEQ ID NO: 1454430 - DNA, 15 bp, Homo sapiens
ttagtaggactcatg

SEQ ID NO: 1454431 - DNA, 15 bp, Homo sapiens
tagtaggactcatgg

SEQ ID NO: 1454432 - DNA, 15 bp, Homo sapiens
agtaggactcatgga

SEQ ID NO: 1454433 - DNA, 15 bp, Homo sapiens
gtaggactcatggat

SEQ ID NO: 1454434 - DNA, 15 bp, Homo sapiens
taggactcatggatt

SEQ ID NO: 1454435 - DNA, 15 bp, Homo sapiens
aggactcatggattt

SEQ ID NO: 1454436 - DNA, 15 bp, Homo sapiens
ggactcatggatttt

SEQ ID NO: 1454437 - DNA, 15 bp, Homo sapiens
gactcatggattttt

SEQ ID NO: 1454438 - DNA, 15 bp, Homo sapiens
actcatggattttta

SEQ ID NO: 1454439 - DNA, 15 bp, Homo sapiens
ctcatggatttttag

SEQ ID NO: 1454440 - DNA, 15 bp, Homo sapiens
tcatggatttttagt

SEQ ID NO: 1454441 - DNA, 15 bp, Homo sapiens
catggatttttagtt

SEQ ID NO: 1454442 - DNA, 15 bp, Homo sapiens
atggatttttagtta

SEQ ID NO: 1454443 - DNA, 15 bp, Homo sapiens
tggatttttagttaa

SEQ ID NO: 1454444 - DNA, 15 bp, Homo sapiens
ggatttttagttaaa

SEQ ID NO: 1454445 - DNA, 15 bp, Homo sapiens
gatttttagttaaat

SEQ ID NO: 1454446 - DNA, 15 bp, Homo sapiens
atttttagttaaatg

SEQ ID NO: 1454447 - DNA, 15 bp, Homo sapiens
tttttagttaaatgt

SEQ ID NO: 1454448 - DNA, 15 bp, Homo sapiens
ttttagttaaatgtc

SEQ ID NO: 1454449 - DNA, 15 bp, Homo sapiens
tttagttaaatgtct

SEQ ID NO: 1454450 - DNA, 15 bp, Homo sapiens
ttagttaaatgtctg

SEQ ID NO: 1454451 - DNA, 15 bp, Homo sapiens
tagttaaatgtctgt

SEQ ID NO: 1454452 - DNA, 15 bp, Homo sapiens
agttaaatgtctgtg

SEQ ID NO: 1454453 - DNA, 15 bp, Homo sapiens
gttaaatgtctgtga

SEQ ID NO: 1454454 - DNA, 15 bp, Homo sapiens
ttaaatgtctgtgat

SEQ ID NO: 1454455 - DNA, 15 bp, Homo sapiens
taaatgtctgtgatg

SEQ ID NO: 1454456 - DNA, 15 bp, Homo sapiens
aaatgtctgtgatgg

SEQ ID NO: 1454457 - DNA, 15 bp, Homo sapiens
aatgtctgtgatgga

SEQ ID NO: 1454458 - DNA, 15 bp, Homo sapiens
atgtctgtgatggag

SEQ ID NO: 1454459 - DNA, 15 bp, Homo sapiens
tgtctgtgatggaga

SEQ ID NO: 1454460 - DNA, 15 bp, Homo sapiens
gtctgtgatggagaa

SEQ ID NO: 1454461 - DNA, 15 bp, Homo sapiens
tctgtgatggagaaa

SEQ ID NO: 1454462 - DNA, 15 bp, Homo sapiens
ctgtgatggagaaaa

SEQ ID NO: 1454463 - DNA, 15 bp, Homo sapiens
tgtgatggagaaaag

SEQ ID NO: 1454464 - DNA, 15 bp, Homo sapiens
gtgatggagaaaaga

SEQ ID NO: 1454465 - DNA, 15 bp, Homo sapiens
tgatggagaaaagat

SEQ ID NO: 1454466 - DNA, 15 bp, Homo sapiens
gatggagaaaagatg

SEQ ID NO: 1454467 - DNA, 15 bp, Homo sapiens
atggagaaaagatgg

SEQ ID NO: 1454468 - DNA, 15 bp, Homo sapiens
tggagaaaagatggc

SEQ ID NO: 1454469 - DNA, 15 bp, Homo sapiens
ggagaaaagatggct

SEQ ID NO: 1454470 - DNA, 15 bp, Homo sapiens
gagaaaagatggctt

SEQ ID NO: 1454471 - DNA, 15 bp, Homo sapiens
agaaaagatggctta

SEQ ID NO: 1454472 - DNA, 15 bp, Homo sapiens
gaaaagatggcttat

SEQ ID NO: 1454473 - DNA, 15 bp, Homo sapiens
aaaagatggcttatg

SEQ ID NO: 1454474 - DNA, 15 bp, Homo sapiens
aaagatggcttatgg

SEQ ID NO: 1454475 - DNA, 15 bp, Homo sapiens
aagatggcttatgga

SEQ ID NO: 1454476 - DNA, 15 bp, Homo sapiens
agatggcttatggat

SEQ ID NO: 1454477 - DNA, 15 bp, Homo sapiens
gatggcttatggatg

SEQ ID NO: 1454478 - DNA, 15 bp, Homo sapiens
atggcttatggatga

SEQ ID NO: 1454479 - DNA, 15 bp, Homo sapiens
tggcttatggatgat

SEQ ID NO: 1454480 - DNA, 15 bp, Homo sapiens
ggcttatggatgatt

SEQ ID NO: 1454481 - DNA, 15 bp, Homo sapiens
gcttatggatgattg

SEQ ID NO: 1454482 - DNA, 15 bp, Homo sapiens
cttatggatgattga

SEQ ID NO: 1454483 - DNA, 15 bp, Homo sapiens
ttatggatgattgag

SEQ ID NO: 1454484 - DNA, 15 bp, Homo sapiens
tatggatgattgagg

SEQ ID NO: 1454485 - DNA, 15 bp, Homo sapiens
atggatgattgaggt

SEQ ID NO: 1454486 - DNA, 15 bp, Homo sapiens
tggatgattgaggtg

SEQ ID NO: 1454487 - DNA, 15 bp, Homo sapiens
ggatgattgaggtgg

SEQ ID NO: 1454488 - DNA, 15 bp, Homo sapiens
gatgattgaggtggg

SEQ ID NO: 1454489 - DNA, 15 bp, Homo sapiens
atgattgaggtggga

SEQ ID NO: 1454490 - DNA, 15 bp, Homo sapiens
tgattgaggtgggaa

SEQ ID NO: 1454491 - DNA, 15 bp, Homo sapiens
gattgaggtgggaaa

SEQ ID NO: 1454492 - DNA, 15 bp, Homo sapiens
attgaggtgggaaaa

SEQ ID NO: 1454493 - DNA, 15 bp, Homo sapiens
ttgaggtgggaaaat

SEQ ID NO: 1454494 - DNA, 15 bp, Homo sapiens
tgaggtgggaaaatg

SEQ ID NO: 1454495 - DNA, 15 bp, Homo sapiens
gaggtgggaaaatga

SEQ ID NO: 1454496 - DNA, 15 bp, Homo sapiens
aggtgggaaaatgag

SEQ ID NO: 1454497 - DNA, 15 bp, Homo sapiens
ggtgggaaaatgagg

SEQ ID NO: 1454498 - DNA, 15 bp, Homo sapiens
gtgggaaaatgagga

SEQ ID NO: 1454499 - DNA, 15 bp, Homo sapiens
tgggaaaatgaggag

SEQ ID NO: 1454500 - DNA, 15 bp, Homo sapiens
gggaaaatgaggaga

SEQ ID NO: 1454501 - DNA, 15 bp, Homo sapiens
ggaaaatgaggagaa

SEQ ID NO: 1454502 - DNA, 15 bp, Homo sapiens
gaaaatgaggagaat

SEQ ID NO: 1454503 - DNA, 15 bp, Homo sapiens
aaaatgaggagaata

SEQ ID NO: 1454504 - DNA, 15 bp, Homo sapiens
aaatgaggagaatag

SEQ ID NO: 1454505 - DNA, 15 bp, Homo sapiens
aatgaggagaatagt

SEQ ID NO: 1454506 - DNA, 15 bp, Homo sapiens
atgaggagaatagta

SEQ ID NO: 1454507 - DNA, 15 bp, Homo sapiens
tgaggagaatagtat

SEQ ID NO: 1454508 - DNA, 15 bp, Homo sapiens
gaggagaatagtatg

SEQ ID NO: 1454509 - DNA, 15 bp, Homo sapiens
aggagaatagtatgc

SEQ ID NO: 1454510 - DNA, 15 bp, Homo sapiens
ggagaatagtatgcc

SEQ ID NO: 1454511 - DNA, 15 bp, Homo sapiens
gagaatagtatgccc

SEQ ID NO: 1454512 - DNA, 15 bp, Homo sapiens
agaatagtatgccct

SEQ ID NO: 1454513 - DNA, 15 bp, Homo sapiens
gaatagtatgccctt

SEQ ID NO: 1454514 - DNA, 15 bp, Homo sapiens
aatagtatgcccttg

SEQ ID NO: 1454515 - DNA, 15 bp, Homo sapiens
atagtatgcccttgg

SEQ ID NO: 1454516 - DNA, 15 bp, Homo sapiens
tagtatgcccttggt

SEQ ID NO: 1454517 - DNA, 15 bp, Homo sapiens
agtatgcccttggtt

SEQ ID NO: 1454518 - DNA, 15 bp, Homo sapiens
gtatgcccttggttt

SEQ ID NO: 1454519 - DNA, 15 bp, Homo sapiens
tatgcccttggtttc

SEQ ID NO: 1454520 - DNA, 15 bp, Homo sapiens
atgcccttggtttct

SEQ ID NO: 1454521 - DNA, 15 bp, Homo sapiens
tgcccttggtttctc

SEQ ID NO: 1454522 - DNA, 15 bp, Homo sapiens
gcccttggtttctca

SEQ ID NO: 1454523 - DNA, 15 bp, Homo sapiens
cccttggtttctcag

SEQ ID NO: 1454524 - DNA, 15 bp, Homo sapiens
ccttggtttctcagc

SEQ ID NO: 1454525 - DNA, 15 bp, Homo sapiens
cttggtttctcagcc

SEQ ID NO: 1454526 - DNA, 15 bp, Homo sapiens
ttggtttctcagcct

SEQ ID NO: 1454527 - DNA, 15 bp, Homo sapiens
tggtttctcagcctt

SEQ ID NO: 1454528 - DNA, 15 bp, Homo sapiens
ggtttctcagcctta

SEQ ID NO: 1454529 - DNA, 15 bp, Homo sapiens
gtttctcagccttat

SEQ ID NO: 1454530 - DNA, 15 bp, Homo sapiens
tttctcagccttatc

SEQ ID NO: 1454531 - DNA, 15 bp, Homo sapiens
ttctcagccttatcc

SEQ ID NO: 1454532 - DNA, 15 bp, Homo sapiens
tctcagccttatccc

SEQ ID NO: 1454533 - DNA, 15 bp, Homo sapiens
ctcagccttatccca

SEQ ID NO: 1454534 - DNA, 15 bp, Homo sapiens
tcagccttatcccat

SEQ ID NO: 1454535 - DNA, 15 bp, Homo sapiens
cagccttatcccatt

SEQ ID NO: 1454536 - DNA, 15 bp, Homo sapiens
agccttatcccatta

SEQ ID NO: 1454537 - DNA, 15 bp, Homo sapiens
gccttatcccattaa

SEQ ID NO: 1454538 - DNA, 15 bp, Homo sapiens
ccttatcccattaat

SEQ ID NO: 1454539 - DNA, 15 bp, Homo sapiens
cttatcccattaatt

SEQ ID NO: 1454540 - DNA, 15 bp, Homo sapiens
ttatcccattaatta

SEQ ID NO: 1454541 - DNA, 15 bp, Homo sapiens
tatcccattaattac

SEQ ID NO: 1454542 - DNA, 15 bp, Homo sapiens
atcccattaattacg

SEQ ID NO: 1454543 - DNA, 15 bp, Homo sapiens
tcccattaattacgc

SEQ ID NO: 1454544 - DNA, 15 bp, Homo sapiens
cccattaattacgct

SEQ ID NO: 1454545 - DNA, 15 bp, Homo sapiens
ccattaattacgctc

SEQ ID NO: 1454546 - DNA, 15 bp, Homo sapiens
cattaattacgctcc

SEQ ID NO: 1454547 - DNA, 15 bp, Homo sapiens
attaattacgctcca

SEQ ID NO: 1454548 - DNA, 15 bp, Homo sapiens
ttaattacgctccaa

SEQ ID NO: 1454549 - DNA, 15 bp, Homo sapiens
taattacgctccaat

SEQ ID NO: 1454550 - DNA, 15 bp, Homo sapiens
aattacgctccaata

SEQ ID NO: 1454551 - DNA, 15 bp, Homo sapiens
attacgctccaatat

SEQ ID NO: 1454552 - DNA, 15 bp, Homo sapiens
ttacgctccaatatt

SEQ ID NO: 1454553 - DNA, 15 bp, Homo sapiens
tacgctccaatatta

SEQ ID NO: 1454554 - DNA, 15 bp, Homo sapiens
acgctccaatattat

SEQ ID NO: 1454555 - DNA, 15 bp, Homo sapiens
cgctccaatattatg

SEQ ID NO: 1454556 - DNA, 15 bp, Homo sapiens
gctccaatattatgg

SEQ ID NO: 1454557 - DNA, 15 bp, Homo sapiens
ctccaatattatgga

SEQ ID NO: 1454558 - DNA, 15 bp, Homo sapiens
tccaatattatggag

SEQ ID NO: 1454559 - DNA, 15 bp, Homo sapiens
ccaatattatggaga

SEQ ID NO: 1454560 - DNA, 15 bp, Homo sapiens
caatattatggagag

SEQ ID NO: 1454561 - DNA, 15 bp, Homo sapiens
aatattatggagaga

SEQ ID NO: 1454562 - DNA, 15 bp, Homo sapiens
atattatggagagag

SEQ ID NO: 1454563 - DNA, 15 bp, Homo sapiens
tattatggagagagg

SEQ ID NO: 1454564 - DNA, 15 bp, Homo sapiens
attatggagagagga

SEQ ID NO: 1454565 - DNA, 15 bp, Homo sapiens
ttatggagagaggaa

SEQ ID NO: 1454566 - DNA, 15 bp, Homo sapiens
tatggagagaggaac

SEQ ID NO: 1454567 - DNA, 15 bp, Homo sapiens
atggagagaggaact

SEQ ID NO: 1454568 - DNA, 15 bp, Homo sapiens
tggagagaggaactg

SEQ ID NO: 1454569 - DNA, 15 bp, Homo sapiens
ggagagaggaactgc

SEQ ID NO: 1454570 - DNA, 15 bp, Homo sapiens
gagagaggaactgca

SEQ ID NO: 1454571 - DNA, 15 bp, Homo sapiens
agagaggaactgcaa

SEQ ID NO: 1454572 - DNA, 15 bp, Homo sapiens
gagaggaactgcaag

SEQ ID NO: 1454573 - DNA, 15 bp, Homo sapiens
agaggaactgcaagt

SEQ ID NO: 1454574 - DNA, 15 bp, Homo sapiens
gaggaactgcaagtt

SEQ ID NO: 1454575 - DNA, 15 bp, Homo sapiens
aggaactgcaagttg

SEQ ID NO: 1454576 - DNA, 15 bp, Homo sapiens
ggaactgcaagttgt

SEQ ID NO: 1454577 - DNA, 15 bp, Homo sapiens
gaactgcaagttgta

SEQ ID NO: 1454578 - DNA, 15 bp, Homo sapiens
aactgcaagttgtag

SEQ ID NO: 1454579 - DNA, 15 bp, Homo sapiens
actgcaagttgtagc

SEQ ID NO: 1454580 - DNA, 15 bp, Homo sapiens
ctgcaagttgtagct

SEQ ID NO: 1454581 - DNA, 15 bp, Homo sapiens
tgcaagttgtagctg

SEQ ID NO: 1454582 - DNA, 15 bp, Homo sapiens
gcaagttgtagctga

SEQ ID NO: 1454583 - DNA, 15 bp, Homo sapiens
caagttgtagctgaa

SEQ ID NO: 1454584 - DNA, 15 bp, Homo sapiens
aagttgtagctgaag

SEQ ID NO: 1454585 - DNA, 15 bp, Homo sapiens
agttgtagctgaaga

SEQ ID NO: 1454586 - DNA, 15 bp, Homo sapiens
gttgtagctgaagag

SEQ ID NO: 1454587 - DNA, 15 bp, Homo sapiens
ttgtagctgaagaga

SEQ ID NO: 1454588 - DNA, 15 bp, Homo sapiens
tgtagctgaagagat

SEQ ID NO: 1454589 - DNA, 15 bp, Homo sapiens
gtagctgaagagatt

SEQ ID NO: 1454590 - DNA, 15 bp, Homo sapiens
tagctgaagagattt

SEQ ID NO: 1454591 - DNA, 15 bp, Homo sapiens
agctgaagagatttt

SEQ ID NO: 1454592 - DNA, 15 bp, Homo sapiens
gctgaagagattttt

SEQ ID NO: 1454593 - DNA, 15 bp, Homo sapiens
ctgaagagatttttt

SEQ ID NO: 1454594 - DNA, 15 bp, Homo sapiens
tgaagagattttttt

SEQ ID NO: 1454595 - DNA, 15 bp, Homo sapiens
gaagagatttttttt

SEQ ID NO: 1454596 - DNA, 15 bp, Homo sapiens
aagagattttttttt

SEQ ID NO: 1454597 - DNA, 15 bp, Homo sapiens
agagatttttttttt

SEQ ID NO: 1454598 - DNA, 15 bp, Homo sapiens
gagattttttttttt

SEQ ID NO: 1454599 - DNA, 15 bp, Homo sapiens
tttttttttggagaa

SEQ ID NO: 1454600 - DNA, 15 bp, Homo sapiens
ttttttttggagaaa

SEQ ID NO: 1454601 - DNA, 15 bp, Homo sapiens
tttttttggagaaat

SEQ ID NO: 1454602 - DNA, 15 bp, Homo sapiens
ttttttggagaaatc

SEQ ID NO: 1454603 - DNA, 15 bp, Homo sapiens
tttttggagaaatct

SEQ ID NO: 1454604 - DNA, 15 bp, Homo sapiens
ttttggagaaatcta

SEQ ID NO: 1454605 - DNA, 15 bp, Homo sapiens
tttggagaaatctag

SEQ ID NO: 1454606 - DNA, 15 bp, Homo sapiens
ttggagaaatctagg

SEQ ID NO: 1454607 - DNA, 15 bp, Homo sapiens
tggagaaatctaggg

SEQ ID NO: 1454608 - DNA, 15 bp, Homo sapiens
ggagaaatctaggga

SEQ ID NO: 1454609 - DNA, 15 bp, Homo sapiens
gagaaatctagggaa

SEQ ID NO: 1454610 - DNA, 15 bp, Homo sapiens
agaaatctagggaaa

SEQ ID NO: 1454611 - DNA, 15 bp, Homo sapiens
gaaatctagggaaat

SEQ ID NO: 1454612 - DNA, 15 bp, Homo sapiens
aaatctagggaaatg

SEQ ID NO: 1454613 - DNA, 15 bp, Homo sapiens
aatctagggaaatgg

SEQ ID NO: 1454614 - DNA, 15 bp, Homo sapiens
atctagggaaatggg

SEQ ID NO: 1454615 - DNA, 15 bp, Homo sapiens
tctagggaaatggga

SEQ ID NO: 1454616 - DNA, 15 bp, Homo sapiens
ctagggaaatgggaa

SEQ ID NO: 1454617 - DNA, 15 bp, Homo sapiens
tagggaaatgggaaa

SEQ ID NO: 1454618 - DNA, 15 bp, Homo sapiens
agggaaatgggaaaa

SEQ ID NO: 1454619 - DNA, 15 bp, Homo sapiens
gggaaatgggaaaaa

SEQ ID NO: 1454620 - DNA, 15 bp, Homo sapiens
ggaaatgggaaaaaa

SEQ ID NO: 1454621 - DNA, 15 bp, Homo sapiens
gaaatgggaaaaaaa

SEQ ID NO: 1454622 - DNA, 15 bp, Homo sapiens
aaatgggaaaaaaag

SEQ ID NO: 1454623 - DNA, 15 bp, Homo sapiens
aatgggaaaaaaagg

SEQ ID NO: 1454624 - DNA, 15 bp, Homo sapiens
atgggaaaaaaaggc

SEQ ID NO: 1454625 - DNA, 15 bp, Homo sapiens
tgggaaaaaaaggca

SEQ ID NO: 1454626 - DNA, 15 bp, Homo sapiens
gggaaaaaaaggcat

SEQ ID NO: 1454627 - DNA, 15 bp, Homo sapiens
ggaaaaaaaggcatt

SEQ ID NO: 1454628 - DNA, 15 bp, Homo sapiens
gaaaaaaaggcattg

SEQ ID NO: 1454629 - DNA, 15 bp, Homo sapiens
aaaaaaaggcattgt

SEQ ID NO: 1454630 - DNA, 15 bp, Homo sapiens
aaaaaaggcattgtc

SEQ ID NO: 1454631 - DNA, 15 bp, Homo sapiens
aaaaaggcattgtcc

SEQ ID NO: 1454632 - DNA, 15 bp, Homo sapiens
aaaaggcattgtcca

SEQ ID NO: 1454633 - DNA, 15 bp, Homo sapiens
aaaggcattgtccag

SEQ ID NO: 1454634 - DNA, 15 bp, Homo sapiens
aaggcattgtccaga

SEQ ID NO: 1454635 - DNA, 15 bp, Homo sapiens
aggcattgtccagat

SEQ ID NO: 1454636 - DNA, 15 bp, Homo sapiens
ggcattgtccagatt

SEQ ID NO: 1454637 - DNA, 15 bp, Homo sapiens
gcattgtccagattg

SEQ ID NO: 1454638 - DNA, 15 bp, Homo sapiens
cattgtccagattgc

SEQ ID NO: 1454639 - DNA, 15 bp, Homo sapiens
attgtccagattgca

SEQ ID NO: 1454640 - DNA, 15 bp, Homo sapiens
ttgtccagattgcaa

SEQ ID NO: 1454641 - DNA, 15 bp, Homo sapiens
tgtccagattgcaac

SEQ ID NO: 1454642 - DNA, 15 bp, Homo sapiens
gtccagattgcaact

SEQ ID NO: 1454643 - DNA, 15 bp, Homo sapiens
tccagattgcaactg

SEQ ID NO: 1454644 - DNA, 15 bp, Homo sapiens
ccagattgcaactgt

SEQ ID NO: 1454645 - DNA, 15 bp, Homo sapiens
cagattgcaactgta

SEQ ID NO: 1454646 - DNA, 15 bp, Homo sapiens
agattgcaactgtaa

SEQ ID NO: 1454647 - DNA, 15 bp, Homo sapiens
gattgcaactgtaag

SEQ ID NO: 1454648 - DNA, 15 bp, Homo sapiens
attgcaactgtaagg

SEQ ID NO: 1454649 - DNA, 15 bp, Homo sapiens
ttgcaactgtaaggg

SEQ ID NO: 1454650 - DNA, 15 bp, Homo sapiens
tgcaactgtaagggc

SEQ ID NO: 1454651 - DNA, 15 bp, Homo sapiens
gcaactgtaagggct

SEQ ID NO: 1454652 - DNA, 15 bp, Homo sapiens
caactgtaagggctc

SEQ ID NO: 1454653 - DNA, 15 bp, Homo sapiens
aactgtaagggctcc

SEQ ID NO: 1454654 - DNA, 15 bp, Homo sapiens
actgtaagggctcca

SEQ ID NO: 1454655 - DNA, 15 bp, Homo sapiens
ctgtaagggctccac

SEQ ID NO: 1454656 - DNA, 15 bp, Homo sapiens
tgtaagggctccact

SEQ ID NO: 1454657 - DNA, 15 bp, Homo sapiens
gtaagggctccacta

SEQ ID NO: 1454658 - DNA, 15 bp, Homo sapiens
taagggctccactat

SEQ ID NO: 1454659 - DNA, 15 bp, Homo sapiens
aagggctccactata

SEQ ID NO: 1454660 - DNA, 15 bp, Homo sapiens
agggctccactatat

SEQ ID NO: 1454661 - DNA, 15 bp, Homo sapiens
gggctccactatatc

SEQ ID NO: 1454662 - DNA, 15 bp, Homo sapiens
ggctccactatatca

SEQ ID NO: 1454663 - DNA, 15 bp, Homo sapiens
gctccactatatcat

SEQ ID NO: 1454664 - DNA, 15 bp, Homo sapiens
ctccactatatcatt

SEQ ID NO: 1454665 - DNA, 15 bp, Homo sapiens
tccactatatcatta

SEQ ID NO: 1454666 - DNA, 15 bp, Homo sapiens
ccactatatcattag

SEQ ID NO: 1454667 - DNA, 15 bp, Homo sapiens
cactatatcattagt

SEQ ID NO: 1454668 - DNA, 15 bp, Homo sapiens
actatatcattagta

SEQ ID NO: 1454669 - DNA, 15 bp, Homo sapiens
ctatatcattagtaa

SEQ ID NO: 1454670 - DNA, 15 bp, Homo sapiens
tatatcattagtaat

SEQ ID NO: 1454671 - DNA, 15 bp, Homo sapiens
atatcattagtaatg

SEQ ID NO: 1454672 - DNA, 15 bp, Homo sapiens
tatcattagtaatgc

SEQ ID NO: 1454673 - DNA, 15 bp, Homo sapiens
atcattagtaatgcc

SEQ ID NO: 1454674 - DNA, 15 bp, Homo sapiens
tcattagtaatgccc

SEQ ID NO: 1454675 - DNA, 15 bp, Homo sapiens
cattagtaatgccca

SEQ ID NO: 1454676 - DNA, 15 bp, Homo sapiens
attagtaatgcccag

SEQ ID NO: 1454677 - DNA, 15 bp, Homo sapiens
ttagtaatgcccaga

SEQ ID NO: 1454678 - DNA, 15 bp, Homo sapiens
tagtaatgcccagag

SEQ ID NO: 1454679 - DNA, 15 bp, Homo sapiens
agtaatgcccagagc

SEQ ID NO: 1454680 - DNA, 15 bp, Homo sapiens
gtaatgcccagagca

SEQ ID NO: 1454681 - DNA, 15 bp, Homo sapiens
taatgcccagagcag

SEQ ID NO: 1454682 - DNA, 15 bp, Homo sapiens
aatgcccagagcagt

SEQ ID NO: 1454683 - DNA, 15 bp, Homo sapiens
atgcccagagcagta

SEQ ID NO: 1454684 - DNA, 15 bp, Homo sapiens
tgcccagagcagtaa

SEQ ID NO: 1454685 - DNA, 15 bp, Homo sapiens
gcccagagcagtaaa

SEQ ID NO: 1454686 - DNA, 15 bp, Homo sapiens
cccagagcagtaaat

SEQ ID NO: 1454687 - DNA, 15 bp, Homo sapiens
ccagagcagtaaata

SEQ ID NO: 1454688 - DNA, 15 bp, Homo sapiens
cagagcagtaaatag

SEQ ID NO: 1454689 - DNA, 15 bp, Homo sapiens
agagcagtaaatagc

SEQ ID NO: 1454690 - DNA, 15 bp, Homo sapiens
gagcagtaaatagca

SEQ ID NO: 1454691 - DNA, 15 bp, Homo sapiens
agcagtaaatagcaa

SEQ ID NO: 1454692 - DNA, 15 bp, Homo sapiens
gcagtaaatagcaaa

SEQ ID NO: 1454693 - DNA, 15 bp, Homo sapiens
cagtaaatagcaaat

SEQ ID NO: 1454694 - DNA, 15 bp, Homo sapiens
agtaaatagcaaata

SEQ ID NO: 1454695 - DNA, 15 bp, Homo sapiens
gtaaatagcaaatat

SEQ ID NO: 1454696 - DNA, 15 bp, Homo sapiens
taaatagcaaatatg

SEQ ID NO: 1454697 - DNA, 15 bp, Homo sapiens
aaatagcaaatatga

SEQ ID NO: 1454698 - DNA, 15 bp, Homo sapiens
aatagcaaatatgac

SEQ ID NO: 1454699 - DNA, 15 bp, Homo sapiens
atagcaaatatgaca

SEQ ID NO: 1454700 - DNA, 15 bp, Homo sapiens
tagcaaatatgacag

SEQ ID NO: 1454701 - DNA, 15 bp, Homo sapiens
agcaaatatgacagg

SEQ ID NO: 1454702 - DNA, 15 bp, Homo sapiens
gcaaatatgacaggc

SEQ ID NO: 1454703 - DNA, 15 bp, Homo sapiens
caaatatgacaggct

SEQ ID NO: 1454704 - DNA, 15 bp, Homo sapiens
aaatatgacaggcta

SEQ ID NO: 1454705 - DNA, 15 bp, Homo sapiens
aatatgacaggctat

SEQ ID NO: 1454706 - DNA, 15 bp, Homo sapiens
atatgacaggctatt

SEQ ID NO: 1454707 - DNA, 15 bp, Homo sapiens
tatgacaggctattg

SEQ ID NO: 1454708 - DNA, 15 bp, Homo sapiens
atgacaggctattgt

SEQ ID NO: 1454709 - DNA, 15 bp, Homo sapiens
tgacaggctattgta

SEQ ID NO: 1454710 - DNA, 15 bp, Homo sapiens
gacaggctattgtag

SEQ ID NO: 1454711 - DNA, 15 bp, Homo sapiens
acaggctattgtaga

SEQ ID NO: 1454712 - DNA, 15 bp, Homo sapiens
caggctattgtagag

SEQ ID NO: 1454713 - DNA, 15 bp, Homo sapiens
aggctattgtagagc

SEQ ID NO: 1454714 - DNA, 15 bp, Homo sapiens
ggctattgtagagct

SEQ ID NO: 1454715 - DNA, 15 bp, Homo sapiens
gctattgtagagctt

SEQ ID NO: 1454716 - DNA, 15 bp, Homo sapiens
ctattgtagagcttg

SEQ ID NO: 1454717 - DNA, 15 bp, Homo sapiens
tattgtagagcttga

SEQ ID NO: 1454718 - DNA, 15 bp, Homo sapiens
attgtagagcttgac

SEQ ID NO: 1454719 - DNA, 15 bp, Homo sapiens
ttgtagagcttgact

SEQ ID NO: 1454720 - DNA, 15 bp, Homo sapiens
tgtagagcttgactt

SEQ ID NO: 1454721 - DNA, 15 bp, Homo sapiens
gtagagcttgacttc

SEQ ID NO: 1454722 - DNA, 15 bp, Homo sapiens
tagagcttgacttca

SEQ ID NO: 1454723 - DNA, 15 bp, Homo sapiens
agagcttgacttcag

SEQ ID NO: 1454724 - DNA, 15 bp, Homo sapiens
gagcttgacttcaga

SEQ ID NO: 1454725 - DNA, 15 bp, Homo sapiens
agcttgacttcagac

SEQ ID NO: 1454726 - DNA, 15 bp, Homo sapiens
gcttgacttcagaca

SEQ ID NO: 1454727 - DNA, 15 bp, Homo sapiens
cttgacttcagacac

SEQ ID NO: 1454728 - DNA, 15 bp, Homo sapiens
ttgacttcagacacc

SEQ ID NO: 1454729 - DNA, 15 bp, Homo sapiens
tgacttcagacacca

SEQ ID NO: 1454730 - DNA, 15 bp, Homo sapiens
gacttcagacaccag

SEQ ID NO: 1454731 - DNA, 15 bp, Homo sapiens
acttcagacaccaga

SEQ ID NO: 1454732 - DNA, 15 bp, Homo sapiens
cttcagacaccagac

SEQ ID NO: 1454733 - DNA, 15 bp, Homo sapiens
ttcagacaccagaca

SEQ ID NO: 1454734 - DNA, 15 bp, Homo sapiens
tcagacaccagacag

SEQ ID NO: 1454735 - DNA, 15 bp, Homo sapiens
cagacaccagacagc

SEQ ID NO: 1454736 - DNA, 15 bp, Homo sapiens
agacaccagacagcc

SEQ ID NO: 1454737 - DNA, 15 bp, Homo sapiens
gacaccagacagcca

SEQ ID NO: 1454738 - DNA, 15 bp, Homo sapiens
acaccagacagccag

SEQ ID NO: 1454739 - DNA, 15 bp, Homo sapiens
caccagacagccaga

SEQ ID NO: 1454740 - DNA, 15 bp, Homo sapiens
accagacagccagag

SEQ ID NO: 1454741 - DNA, 15 bp, Homo sapiens
ccagacagccagagg

SEQ ID NO: 1454742 - DNA, 15 bp, Homo sapiens
cagacagccagaggc

SEQ ID NO: 1454743 - DNA, 15 bp, Homo sapiens
agacagccagaggca

SEQ ID NO: 1454744 - DNA, 15 bp, Homo sapiens
gacagccagaggcac

SEQ ID NO: 1454745 - DNA, 15 bp, Homo sapiens
acagccagaggcact

SEQ ID NO: 1454746 - DNA, 15 bp, Homo sapiens
cagccagaggcactc

SEQ ID NO: 1454747 - DNA, 15 bp, Homo sapiens
agccagaggcactct

SEQ ID NO: 1454748 - DNA, 15 bp, Homo sapiens
gccagaggcactctg

SEQ ID NO: 1454749 - DNA, 15 bp, Homo sapiens
ccagaggcactctgt

SEQ ID NO: 1454750 - DNA, 15 bp, Homo sapiens
cagaggcactctgta

SEQ ID NO: 1454751 - DNA, 15 bp, Homo sapiens
agaggcactctgtag

SEQ ID NO: 1454752 - DNA, 15 bp, Homo sapiens
gaggcactctgtaga

SEQ ID NO: 1454753 - DNA, 15 bp, Homo sapiens
aggcactctgtagat

SEQ ID NO: 1454754 - DNA, 15 bp, Homo sapiens
ggcactctgtagata

SEQ ID NO: 1454755 - DNA, 15 bp, Homo sapiens
gcactctgtagatac

SEQ ID NO: 1454756 - DNA, 15 bp, Homo sapiens
cactctgtagatacc

SEQ ID NO: 1454757 - DNA, 15 bp, Homo sapiens
actctgtagatacct

SEQ ID NO: 1454758 - DNA, 15 bp, Homo sapiens
ctctgtagatacctg

SEQ ID NO: 1454759 - DNA, 15 bp, Homo sapiens
tctgtagatacctgg

SEQ ID NO: 1454760 - DNA, 15 bp, Homo sapiens
ctgtagatacctggc

SEQ ID NO: 1454761 - DNA, 15 bp, Homo sapiens
tgtagatacctggca

SEQ ID NO: 1454762 - DNA, 15 bp, Homo sapiens
gtagatacctggcag

SEQ ID NO: 1454763 - DNA, 15 bp, Homo sapiens
tagatacctggcagt

SEQ ID NO: 1454764 - DNA, 15 bp, Homo sapiens
agatacctggcagta

SEQ ID NO: 1454765 - DNA, 15 bp, Homo sapiens
gatacctggcagtag

SEQ ID NO: 1454766 - DNA, 15 bp, Homo sapiens
atacctggcagtaga

SEQ ID NO: 1454767 - DNA, 15 bp, Homo sapiens
tacctggcagtagat

SEQ ID NO: 1454768 - DNA, 15 bp, Homo sapiens
acctggcagtagatg

SEQ ID NO: 1454769 - DNA, 15 bp, Homo sapiens
cctggcagtagatga

SEQ ID NO: 1454770 - DNA, 15 bp, Homo sapiens
ctggcagtagatgag

SEQ ID NO: 1454771 - DNA, 15 bp, Homo sapiens
tggcagtagatgaga

SEQ ID NO: 1454772 - DNA, 15 bp, Homo sapiens
ggcagtagatgagag

SEQ ID NO: 1454773 - DNA, 15 bp, Homo sapiens
gcagtagatgagaga

SEQ ID NO: 1454774 - DNA, 15 bp, Homo sapiens
cagtagatgagagac

SEQ ID NO: 1454775 - DNA, 15 bp, Homo sapiens
agtagatgagagaca

SEQ ID NO: 1454776 - DNA, 15 bp, Homo sapiens
gtagatgagagacac

SEQ ID NO: 1454777 - DNA, 15 bp, Homo sapiens
tagatgagagacacc

SEQ ID NO: 1454778 - DNA, 15 bp, Homo sapiens
agatgagagacacct

SEQ ID NO: 1454779 - DNA, 15 bp, Homo sapiens
gatgagagacacctg

SEQ ID NO: 1454780 - DNA, 15 bp, Homo sapiens
atgagagacacctgt

SEQ ID NO: 1454781 - DNA, 15 bp, Homo sapiens
tgagagacacctgtg

SEQ ID NO: 1454782 - DNA, 15 bp, Homo sapiens
gagagacacctgtga

SEQ ID NO: 1454783 - DNA, 15 bp, Homo sapiens
agagacacctgtgaa

SEQ ID NO: 1454784 - DNA, 15 bp, Homo sapiens
gagacacctgtgaaa

SEQ ID NO: 1454785 - DNA, 15 bp, Homo sapiens
agacacctgtgaaac

SEQ ID NO: 1454786 - DNA, 15 bp, Homo sapiens
gacacctgtgaaact

SEQ ID NO: 1454787 - DNA, 15 bp, Homo sapiens
acacctgtgaaactg

SEQ ID NO: 1454788 - DNA, 15 bp, Homo sapiens
cacctgtgaaactga

SEQ ID NO: 1454789 - DNA, 15 bp, Homo sapiens
acctgtgaaactgag

SEQ ID NO: 1454790 - DNA, 15 bp, Homo sapiens
cctgtgaaactgagg

SEQ ID NO: 1454791 - DNA, 15 bp, Homo sapiens
ctgtgaaactgaggg

SEQ ID NO: 1454792 - DNA, 15 bp, Homo sapiens
tgtgaaactgagggc

SEQ ID NO: 1454793 - DNA, 15 bp, Homo sapiens
gtgaaactgagggca

SEQ ID NO: 1454794 - DNA, 15 bp, Homo sapiens
tgaaactgagggcag

SEQ ID NO: 1454795 - DNA, 15 bp, Homo sapiens
gaaactgagggcagg

SEQ ID NO: 1454796 - DNA, 15 bp, Homo sapiens
aaactgagggcaggt

SEQ ID NO: 1454797 - DNA, 15 bp, Homo sapiens
aactgagggcaggtc

SEQ ID NO: 1454798 - DNA, 15 bp, Homo sapiens
actgagggcaggtca

SEQ ID NO: 1454799 - DNA, 15 bp, Homo sapiens
ctgagggcaggtcag

SEQ ID NO: 1454800 - DNA, 15 bp, Homo sapiens
tgagggcaggtcagg

SEQ ID NO: 1454801 - DNA, 15 bp, Homo sapiens
gagggcaggtcagga

SEQ ID NO: 1454802 - DNA, 15 bp, Homo sapiens
agggcaggtcaggag

SEQ ID NO: 1454803 - DNA, 15 bp, Homo sapiens
gggcaggtcaggagc

SEQ ID NO: 1454804 - DNA, 15 bp, Homo sapiens
ggcaggtcaggagct

SEQ ID NO: 1454805 - DNA, 15 bp, Homo sapiens
gcaggtcaggagcta

SEQ ID NO: 1454806 - DNA, 15 bp, Homo sapiens
caggtcaggagctag

SEQ ID NO: 1454807 - DNA, 15 bp, Homo sapiens
aggtcaggagctagt

SEQ ID NO: 1454808 - DNA, 15 bp, Homo sapiens
ggtcaggagctagtg

SEQ ID NO: 1454809 - DNA, 15 bp, Homo sapiens
gtcaggagctagtga

SEQ ID NO: 1454810 - DNA, 15 bp, Homo sapiens
tcaggagctagtgaa

SEQ ID NO: 1454811 - DNA, 15 bp, Homo sapiens
caggagctagtgaat

SEQ ID NO: 1454812 - DNA, 15 bp, Homo sapiens
aggagctagtgaatt

SEQ ID NO: 1454813 - DNA, 15 bp, Homo sapiens
ggagctagtgaattt

SEQ ID NO: 1454814 - DNA, 15 bp, Homo sapiens
gagctagtgaatttt

SEQ ID NO: 1454815 - DNA, 15 bp, Homo sapiens
agctagtgaatttta

SEQ ID NO: 1454816 - DNA, 15 bp, Homo sapiens
gctagtgaattttag

SEQ ID NO: 1454817 - DNA, 15 bp, Homo sapiens
ctagtgaattttaga

SEQ ID NO: 1454818 - DNA, 15 bp, Homo sapiens
tagtgaattttagaa

SEQ ID NO: 1454819 - DNA, 15 bp, Homo sapiens
agtgaattttagaag

SEQ ID NO: 1454820 - DNA, 15 bp, Homo sapiens
gtgaattttagaagt

SEQ ID NO: 1454821 - DNA, 15 bp, Homo sapiens
tgaattttagaagta

SEQ ID NO: 1454822 - DNA, 15 bp, Homo sapiens
gaattttagaagtaa

SEQ ID NO: 1454823 - DNA, 15 bp, Homo sapiens
aattttagaagtaac

SEQ ID NO: 1454824 - DNA, 15 bp, Homo sapiens
attttagaagtaaca

SEQ ID NO: 1454825 - DNA, 15 bp, Homo sapiens
ttttagaagtaacat

SEQ ID NO: 1454826 - DNA, 15 bp, Homo sapiens
tttagaagtaacatg

SEQ ID NO: 1454827 - DNA, 15 bp, Homo sapiens
ttagaagtaacatgg

SEQ ID NO: 1454828 - DNA, 15 bp, Homo sapiens
tagaagtaacatggg

SEQ ID NO: 1454829 - DNA, 15 bp, Homo sapiens
agaagtaacatggga

SEQ ID NO: 1454830 - DNA, 15 bp, Homo sapiens
gaagtaacatgggat

SEQ ID NO: 1454831 - DNA, 15 bp, Homo sapiens
aagtaacatgggatt

SEQ ID NO: 1454832 - DNA, 15 bp, Homo sapiens
agtaacatgggattg

SEQ ID NO: 1454833 - DNA, 15 bp, Homo sapiens
gtaacatgggattga

SEQ ID NO: 1454834 - DNA, 15 bp, Homo sapiens
taacatgggattgaa

SEQ ID NO: 1454835 - DNA, 15 bp, Homo sapiens
aacatgggattgaaa

SEQ ID NO: 1454836 - DNA, 15 bp, Homo sapiens
acatgggattgaaag

SEQ ID NO: 1454837 - DNA, 15 bp, Homo sapiens
catgggattgaaagg

SEQ ID NO: 1454838 - DNA, 15 bp, Homo sapiens
atgggattgaaagga

SEQ ID NO: 1454839 - DNA, 15 bp, Homo sapiens
tgggattgaaaggac

SEQ ID NO: 1454840 - DNA, 15 bp, Homo sapiens
gggattgaaaggact

SEQ ID NO: 1454841 - DNA, 15 bp, Homo sapiens
ggattgaaaggacta

SEQ ID NO: 1454842 - DNA, 15 bp, Homo sapiens
gattgaaaggactat

SEQ ID NO: 1454843 - DNA, 15 bp, Homo sapiens
attgaaaggactatt

SEQ ID NO: 1454844 - DNA, 15 bp, Homo sapiens
ttgaaaggactattt

SEQ ID NO: 1454845 - DNA, 15 bp, Homo sapiens
tgaaaggactatttg

SEQ ID NO: 1454846 - DNA, 15 bp, Homo sapiens
gaaaggactatttgg

SEQ ID NO: 1454847 - DNA, 15 bp, Homo sapiens
aaaggactatttggt

SEQ ID NO: 1454848 - DNA, 15 bp, Homo sapiens
aaggactatttggtg

SEQ ID NO: 1454849 - DNA, 15 bp, Homo sapiens
aggactatttggtgg

SEQ ID NO: 1454850 - DNA, 15 bp, Homo sapiens
ggactatttggtggg

SEQ ID NO: 1454851 - DNA, 15 bp, Homo sapiens
gactatttggtggga

SEQ ID NO: 1454852 - DNA, 15 bp, Homo sapiens
actatttggtgggaa

SEQ ID NO: 1454853 - DNA, 15 bp, Homo sapiens
ctatttggtgggaac

SEQ ID NO: 1454854 - DNA, 15 bp, Homo sapiens
tatttggtgggaact

SEQ ID NO: 1454855 - DNA, 15 bp, Homo sapiens
atttggtgggaactt

SEQ ID NO: 1454856 - DNA, 15 bp, Homo sapiens
tttggtgggaacttt

SEQ ID NO: 1454857 - DNA, 15 bp, Homo sapiens
ttggtgggaactttg

SEQ ID NO: 1454858 - DNA, 15 bp, Homo sapiens
tggtgggaactttgg

SEQ ID NO: 1454859 - DNA, 15 bp, Homo sapiens
ggtgggaactttgga

SEQ ID NO: 1454860 - DNA, 15 bp, Homo sapiens
gtgggaactttggaa

SEQ ID NO: 1454861 - DNA, 15 bp, Homo sapiens
tgggaactttggaaa

SEQ ID NO: 1454862 - DNA, 15 bp, Homo sapiens
gggaactttggaaag

SEQ ID NO: 1454863 - DNA, 15 bp, Homo sapiens
ggaactttggaaagg

SEQ ID NO: 1454864 - DNA, 15 bp, Homo sapiens
gaactttggaaaggg

SEQ ID NO: 1454865 - DNA, 15 bp, Homo sapiens
aactttggaaagggt

SEQ ID NO: 1454866 - DNA, 15 bp, Homo sapiens
actttggaaagggtc

SEQ ID NO: 1454867 - DNA, 15 bp, Homo sapiens
ctttggaaagggtca

SEQ ID NO: 1454868 - DNA, 15 bp, Homo sapiens
tttggaaagggtcaa

SEQ ID NO: 1454869 - DNA, 15 bp, Homo sapiens
ttggaaagggtcaaa

SEQ ID NO: 1454870 - DNA, 15 bp, Homo sapiens
tggaaagggtcaaag

SEQ ID NO: 1454871 - DNA, 15 bp, Homo sapiens
ggaaagggtcaaagg

SEQ ID NO: 1454872 - DNA, 15 bp, Homo sapiens
gaaagggtcaaaggt

SEQ ID NO: 1454873 - DNA, 15 bp, Homo sapiens
aaagggtcaaaggtt

SEQ ID NO: 1454874 - DNA, 15 bp, Homo sapiens
aagggtcaaaggttc

SEQ ID NO: 1454875 - DNA, 15 bp, Homo sapiens
agggtcaaaggttct

SEQ ID NO: 1454876 - DNA, 15 bp, Homo sapiens
gggtcaaaggttctg

SEQ ID NO: 1454877 - DNA, 15 bp, Homo sapiens
ggtcaaaggttctgt

SEQ ID NO: 1454878 - DNA, 15 bp, Homo sapiens
gtcaaaggttctgtg

SEQ ID NO: 1454879 - DNA, 15 bp, Homo sapiens
tcaaaggttctgtgt

SEQ ID NO: 1454880 - DNA, 15 bp, Homo sapiens
caaaggttctgtgta

SEQ ID NO: 1454881 - DNA, 15 bp, Homo sapiens
aaaggttctgtgtaa

SEQ ID NO: 1454882 - DNA, 15 bp, Homo sapiens
aaggttctgtgtaag

SEQ ID NO: 1454883 - DNA, 15 bp, Homo sapiens
aggttctgtgtaagc

SEQ ID NO: 1454884 - DNA, 15 bp, Homo sapiens
ggttctgtgtaagca

SEQ ID NO: 1454885 - DNA, 15 bp, Homo sapiens
gttctgtgtaagcaa

SEQ ID NO: 1454886 - DNA, 15 bp, Homo sapiens
ttctgtgtaagcaaa

SEQ ID NO: 1454887 - DNA, 15 bp, Homo sapiens
tctgtgtaagcaaat

SEQ ID NO: 1454888 - DNA, 15 bp, Homo sapiens
ctgtgtaagcaaatt

SEQ ID NO: 1454889 - DNA, 15 bp, Homo sapiens
tgtgtaagcaaatta

SEQ ID NO: 1454890 - DNA, 15 bp, Homo sapiens
gtgtaagcaaattag

SEQ ID NO: 1454891 - DNA, 15 bp, Homo sapiens
tgtaagcaaattagg

SEQ ID NO: 1454892 - DNA, 15 bp, Homo sapiens
gtaagcaaattagga

SEQ ID NO: 1454893 - DNA, 15 bp, Homo sapiens
taagcaaattaggac

SEQ ID NO: 1454894 - DNA, 15 bp, Homo sapiens
aagcaaattaggacg

SEQ ID NO: 1454895 - DNA, 15 bp, Homo sapiens
agcaaattaggacga

SEQ ID NO: 1454896 - DNA, 15 bp, Homo sapiens
gcaaattaggacgat

SEQ ID NO: 1454897 - DNA, 15 bp, Homo sapiens
caaattaggacgatg

SEQ ID NO: 1454898 - DNA, 15 bp, Homo sapiens
aaattaggacgatgg

SEQ ID NO: 1454899 - DNA, 15 bp, Homo sapiens
aattaggacgatggt

SEQ ID NO: 1454900 - DNA, 15 bp, Homo sapiens
attaggacgatggta

SEQ ID NO: 1454901 - DNA, 15 bp, Homo sapiens
ttaggacgatggtaa

SEQ ID NO: 1454902 - DNA, 15 bp, Homo sapiens
taggacgatggtaac

SEQ ID NO: 1454903 - DNA, 15 bp, Homo sapiens
aggacgatggtaact

SEQ ID NO: 1454904 - DNA, 15 bp, Homo sapiens
ggacgatggtaacta

SEQ ID NO: 1454905 - DNA, 15 bp, Homo sapiens
gacgatggtaactac

SEQ ID NO: 1454906 - DNA, 15 bp, Homo sapiens
acgatggtaactaca

SEQ ID NO: 1454907 - DNA, 15 bp, Homo sapiens
cgatggtaactacag

SEQ ID NO: 1454908 - DNA, 15 bp, Homo sapiens
gatggtaactacagt

SEQ ID NO: 1454909 - DNA, 15 bp, Homo sapiens
atggtaactacagtt

SEQ ID NO: 1454910 - DNA, 15 bp, Homo sapiens
tggtaactacagttt

SEQ ID NO: 1454911 - DNA, 15 bp, Homo sapiens
ggtaactacagtttt

SEQ ID NO: 1454912 - DNA, 15 bp, Homo sapiens
gtaactacagtttta

SEQ ID NO: 1454913 - DNA, 15 bp, Homo sapiens
taactacagttttaa

SEQ ID NO: 1454914 - DNA, 15 bp, Homo sapiens
actacagttttaaat

SEQ ID NO: 1454915 - DNA, 15 bp, Homo sapiens
ctacagttttaaatt

SEQ ID NO: 1454916 - DNA, 15 bp, Homo sapiens
tacagttttaaatta

SEQ ID NO: 1454917 - DNA, 15 bp, Homo sapiens
acagttttaaattat

SEQ ID NO: 1454918 - DNA, 15 bp, Homo sapiens
cagttttaaattatt

SEQ ID NO: 1454919 - DNA, 15 bp, Homo sapiens
agttttaaattattg

SEQ ID NO: 1454920 - DNA, 15 bp, Homo sapiens
gttttaaattattgt

SEQ ID NO: 1454921 - DNA, 15 bp, Homo sapiens
ttttaaattattgtt

SEQ ID NO: 1454922 - DNA, 15 bp, Homo sapiens
tttaaattattgtta

SEQ ID NO: 1454923 - DNA, 15 bp, Homo sapiens
taaattattgttaat

SEQ ID NO: 1454924 - DNA, 15 bp, Homo sapiens
aaattattgttaatg

SEQ ID NO: 1454925 - DNA, 15 bp, Homo sapiens
aattattgttaatgt

SEQ ID NO: 1454926 - DNA, 15 bp, Homo sapiens
attattgttaatgta

SEQ ID NO: 1454927 - DNA, 15 bp, Homo sapiens
ttattgttaatgtaa

SEQ ID NO: 1454928 - DNA, 15 bp, Homo sapiens
tattgttaatgtaac

SEQ ID NO: 1454929 - DNA, 15 bp, Homo sapiens
attgttaatgtaact

SEQ ID NO: 1454930 - DNA, 15 bp, Homo sapiens
ttgttaatgtaactt

SEQ ID NO: 1454931 - DNA, 15 bp, Homo sapiens
tgttaatgtaacttt

SEQ ID NO: 1454932 - DNA, 15 bp, Homo sapiens
gttaatgtaacttta

SEQ ID NO: 1454933 - DNA, 15 bp, Homo sapiens
ttaatgtaactttat

SEQ ID NO: 1454934 - DNA, 15 bp, Homo sapiens
taatgtaactttatt

SEQ ID NO: 1454935 - DNA, 15 bp, Homo sapiens
aatgtaactttattt

SEQ ID NO: 1454936 - DNA, 15 bp, Homo sapiens
atgtaactttatttg

SEQ ID NO: 1454937 - DNA, 15 bp, Homo sapiens
tgtaactttatttgt

SEQ ID NO: 1454938 - DNA, 15 bp, Homo sapiens
gtaactttatttgta

SEQ ID NO: 1454939 - DNA, 15 bp, Homo sapiens
taactttatttgtaa

SEQ ID NO: 1454940 - DNA, 15 bp, Homo sapiens
aactttatttgtaac

SEQ ID NO: 1454941 - DNA, 15 bp, Homo sapiens
actttatttgtaact

SEQ ID NO: 1454942 - DNA, 15 bp, Homo sapiens
ctttatttgtaactg

SEQ ID NO: 1454943 - DNA, 15 bp, Homo sapiens
tttatttgtaactgc

SEQ ID NO: 1454944 - DNA, 15 bp, Homo sapiens
ttatttgtaactgct

SEQ ID NO: 1454945 - DNA, 15 bp, Homo sapiens
tatttgtaactgcta

SEQ ID NO: 1454946 - DNA, 15 bp, Homo sapiens
atttgtaactgctag

SEQ ID NO: 1454947 - DNA, 15 bp, Homo sapiens
tttgtaactgctagt

SEQ ID NO: 1454948 - DNA, 15 bp, Homo sapiens
ttgtaactgctagtt

SEQ ID NO: 1454949 - DNA, 15 bp, Homo sapiens
tgtaactgctagttg

SEQ ID NO: 1454950 - DNA, 15 bp, Homo sapiens
gtaactgctagttgt

SEQ ID NO: 1454951 - DNA, 15 bp, Homo sapiens
taactgctagttgtg

SEQ ID NO: 1454952 - DNA, 15 bp, Homo sapiens
aactgctagttgtgc

SEQ ID NO: 1454953 - DNA, 15 bp, Homo sapiens
actgctagttgtgca

SEQ ID NO: 1454954 - DNA, 15 bp, Homo sapiens
ctgctagttgtgcaa

SEQ ID NO: 1454955 - DNA, 15 bp, Homo sapiens
tgctagttgtgcaaa

SEQ ID NO: 1454956 - DNA, 15 bp, Homo sapiens
gctagttgtgcaaat

SEQ ID NO: 1454957 - DNA, 15 bp, Homo sapiens
ctagttgtgcaaatt

SEQ ID NO: 1454958 - DNA, 15 bp, Homo sapiens
tagttgtgcaaattc

SEQ ID NO: 1454959 - DNA, 15 bp, Homo sapiens
agttgtgcaaattca

SEQ ID NO: 1454960 - DNA, 15 bp, Homo sapiens
gttgtgcaaattcag

SEQ ID NO: 1454961 - DNA, 15 bp, Homo sapiens
ttgtgcaaattcaga

SEQ ID NO: 1454962 - DNA, 15 bp, Homo sapiens
tgtgcaaattcagat

SEQ ID NO: 1454963 - DNA, 15 bp, Homo sapiens
gtgcaaattcagatt

SEQ ID NO: 1454964 - DNA, 15 bp, Homo sapiens
tgcaaattcagattg

SEQ ID NO: 1454965 - DNA, 15 bp, Homo sapiens
gcaaattcagattgc

SEQ ID NO: 1454966 - DNA, 15 bp, Homo sapiens
caaattcagattgca

SEQ ID NO: 1454967 - DNA, 15 bp, Homo sapiens
aaattcagattgcat

SEQ ID NO: 1454968 - DNA, 15 bp, Homo sapiens
aattcagattgcatc

SEQ ID NO: 1454969 - DNA, 15 bp, Homo sapiens
attcagattgcatca

SEQ ID NO: 1454970 - DNA, 15 bp, Homo sapiens
ttcagattgcatcat

SEQ ID NO: 1454971 - DNA, 15 bp, Homo sapiens
tcagattgcatcatc

SEQ ID NO: 1454972 - DNA, 15 bp, Homo sapiens
cagattgcatcatca

SEQ ID NO: 1454973 - DNA, 15 bp, Homo sapiens
agattgcatcatcat

SEQ ID NO: 1454974 - DNA, 15 bp, Homo sapiens
gattgcatcatcatt

SEQ ID NO: 1454975 - DNA, 15 bp, Homo sapiens
attgcatcatcattt

SEQ ID NO: 1454976 - DNA, 15 bp, Homo sapiens
ttgcatcatcatttc

SEQ ID NO: 1454977 - DNA, 15 bp, Homo sapiens
tgcatcatcatttca

SEQ ID NO: 1454978 - DNA, 15 bp, Homo sapiens
gcatcatcatttcac

SEQ ID NO: 1454979 - DNA, 15 bp, Homo sapiens
catcatcatttcacc

SEQ ID NO: 1454980 - DNA, 15 bp, Homo sapiens
atcatcatttcaccc

SEQ ID NO: 1454981 - DNA, 15 bp, Homo sapiens
tcatcatttcacccc

SEQ ID NO: 1454982 - DNA, 15 bp, Homo sapiens
catcatttcacccca

SEQ ID NO: 1454983 - DNA, 15 bp, Homo sapiens
atcatttcaccccaa

SEQ ID NO: 1454984 - DNA, 15 bp, Homo sapiens
tcatttcaccccaat

SEQ ID NO: 1454985 - DNA, 15 bp, Homo sapiens
catttcaccccaatt

SEQ ID NO: 1454986 - DNA, 15 bp, Homo sapiens
atttcaccccaattt

SEQ ID NO: 1454987 - DNA, 15 bp, Homo sapiens
tttcaccccaatttt

SEQ ID NO: 1454988 - DNA, 15 bp, Homo sapiens
ttcaccccaattttc

SEQ ID NO: 1454989 - DNA, 15 bp, Homo sapiens
tcaccccaattttcc

SEQ ID NO: 1454990 - DNA, 15 bp, Homo sapiens
caccccaattttcct

SEQ ID NO: 1454991 - DNA, 15 bp, Homo sapiens
accccaattttcctt

SEQ ID NO: 1454992 - DNA, 15 bp, Homo sapiens
ccccaattttcctta

SEQ ID NO: 1454993 - DNA, 15 bp, Homo sapiens
cccaattttccttac

SEQ ID NO: 1454994 - DNA, 15 bp, Homo sapiens
ccaattttccttact

SEQ ID NO: 1454995 - DNA, 15 bp, Homo sapiens
caattttccttactt

SEQ ID NO: 1454996 - DNA, 15 bp, Homo sapiens
aattttccttacttt

SEQ ID NO: 1454997 - DNA, 15 bp, Homo sapiens
attttccttactttt

SEQ ID NO: 1454998 - DNA, 15 bp, Homo sapiens
ttttccttacttttg

SEQ ID NO: 1454999 - DNA, 15 bp, Homo sapiens
tttccttacttttgt

SEQ ID NO: 1455000 - DNA, 15 bp, Homo sapiens
ttccttacttttgta

SEQ ID NO: 1455001 - DNA, 15 bp, Homo sapiens
tccttacttttgtat

SEQ ID NO: 1455002 - DNA, 15 bp, Homo sapiens
ccttacttttgtatt

SEQ ID NO: 1455003 - DNA, 15 bp, Homo sapiens
cttacttttgtattt

SEQ ID NO: 1455004 - DNA, 15 bp, Homo sapiens
ttacttttgtattta

SEQ ID NO: 1455005 - DNA, 15 bp, Homo sapiens
tacttttgtatttat

SEQ ID NO: 1455006 - DNA, 15 bp, Homo sapiens
acttttgtatttatt

SEQ ID NO: 1455007 - DNA, 15 bp, Homo sapiens
cttttgtatttattc

SEQ ID NO: 1455008 - DNA, 15 bp, Homo sapiens
ttttgtatttattct

SEQ ID NO: 1455009 - DNA, 15 bp, Homo sapiens
tttgtatttattctg

SEQ ID NO: 1455010 - DNA, 15 bp, Homo sapiens
ttgtatttattctgc

SEQ ID NO: 1455011 - DNA, 15 bp, Homo sapiens
tgtatttattctgct

SEQ ID NO: 1455012 - DNA, 15 bp, Homo sapiens
gtatttattctgcta

SEQ ID NO: 1455013 - DNA, 15 bp, Homo sapiens
tatttattctgctaa

SEQ ID NO: 1455014 - DNA, 15 bp, Homo sapiens
atttattctgctaac

SEQ ID NO: 1455015 - DNA, 15 bp, Homo sapiens
tttattctgctaact

SEQ ID NO: 1455016 - DNA, 15 bp, Homo sapiens
ttattctgctaactc

SEQ ID NO: 1455017 - DNA, 15 bp, Homo sapiens
tattctgctaactct

SEQ ID NO: 1455018 - DNA, 15 bp, Homo sapiens
attctgctaactctt

SEQ ID NO: 1455019 - DNA, 15 bp, Homo sapiens
ttctgctaactctta

SEQ ID NO: 1455020 - DNA, 15 bp, Homo sapiens
tctgctaactcttaa

SEQ ID NO: 1455021 - DNA, 15 bp, Homo sapiens
ctgctaactcttaat

SEQ ID NO: 1455022 - DNA, 15 bp, Homo sapiens
tgctaactcttaatc

SEQ ID NO: 1455023 - DNA, 15 bp, Homo sapiens
gctaactcttaatct

SEQ ID NO: 1455024 - DNA, 15 bp, Homo sapiens
ctaactcttaatctt

SEQ ID NO: 1455025 - DNA, 15 bp, Homo sapiens
taactcttaatcttg

SEQ ID NO: 1455026 - DNA, 15 bp, Homo sapiens
aactcttaatcttgg

SEQ ID NO: 1455027 - DNA, 15 bp, Homo sapiens
actcttaatcttgga

SEQ ID NO: 1455028 - DNA, 15 bp, Homo sapiens
ctcttaatcttggat

SEQ ID NO: 1455029 - DNA, 15 bp, Homo sapiens
tcttaatcttggatc

SEQ ID NO: 1455030 - DNA, 15 bp, Homo sapiens
cttaatcttggatca

SEQ ID NO: 1455031 - DNA, 15 bp, Homo sapiens
ttaatcttggatcaa

SEQ ID NO: 1455032 - DNA, 15 bp, Homo sapiens
taatcttggatcaac

SEQ ID NO: 1455033 - DNA, 15 bp, Homo sapiens
aatcttggatcaacc

SEQ ID NO: 1455034 - DNA, 15 bp, Homo sapiens
atcttggatcaacct

SEQ ID NO: 1455035 - DNA, 15 bp, Homo sapiens
tcttggatcaaccta

SEQ ID NO: 1455036 - DNA, 15 bp, Homo sapiens
cttggatcaacctaa

SEQ ID NO: 1455037 - DNA, 15 bp, Homo sapiens
ttggatcaacctaat

SEQ ID NO: 1455038 - DNA, 15 bp, Homo sapiens
tggatcaacctaata

SEQ ID NO: 1455039 - DNA, 15 bp, Homo sapiens
ggatcaacctaataa

SEQ ID NO: 1455040 - DNA, 15 bp, Homo sapiens
gatcaacctaataac

SEQ ID NO: 1455041 - DNA, 15 bp, Homo sapiens
atcaacctaataacc

SEQ ID NO: 1455042 - DNA, 15 bp, Homo sapiens
tcaacctaataaccc

SEQ ID NO: 1455043 - DNA, 15 bp, Homo sapiens
caacctaataaccct

SEQ ID NO: 1455044 - DNA, 15 bp, Homo sapiens
aacctaataaccctc

SEQ ID NO: 1455045 - DNA, 15 bp, Homo sapiens
acctaataaccctct

SEQ ID NO: 1455046 - DNA, 15 bp, Homo sapiens
cctaataaccctctt

SEQ ID NO: 1455047 - DNA, 15 bp, Homo sapiens
ctaataaccctcttt

SEQ ID NO: 1455048 - DNA, 15 bp, Homo sapiens
taataaccctctttc

SEQ ID NO: 1455049 - DNA, 15 bp, Homo sapiens
aataaccctctttct

SEQ ID NO: 1455050 - DNA, 15 bp, Homo sapiens
ataaccctctttctc

SEQ ID NO: 1455051 - DNA, 15 bp, Homo sapiens
taaccctctttctct

SEQ ID NO: 1455052 - DNA, 15 bp, Homo sapiens
aaccctctttctcta

SEQ ID NO: 1455053 - DNA, 15 bp, Homo sapiens
accctctttctctac

SEQ ID NO: 1455054 - DNA, 15 bp, Homo sapiens
ccctctttctctacc

SEQ ID NO: 1455055 - DNA, 15 bp, Homo sapiens
cctctttctctaccc

SEQ ID NO: 1455056 - DNA, 15 bp, Homo sapiens
ctctttctctacccc

SEQ ID NO: 1455057 - DNA, 15 bp, Homo sapiens
tctttctctacccct

SEQ ID NO: 1455058 - DNA, 15 bp, Homo sapiens
ctttctctacccctc

SEQ ID NO: 1455059 - DNA, 15 bp, Homo sapiens
tttctctacccctct

SEQ ID NO: 1455060 - DNA, 15 bp, Homo sapiens
ttctctacccctctc

SEQ ID NO: 1455061 - DNA, 15 bp, Homo sapiens
tctctacccctctcg

SEQ ID NO: 1455062 - DNA, 15 bp, Homo sapiens
ctctacccctctcgt

SEQ ID NO: 1455063 - DNA, 15 bp, Homo sapiens
tctacccctctcgtg

SEQ ID NO: 1455064 - DNA, 15 bp, Homo sapiens
ctacccctctcgtgg

SEQ ID NO: 1455065 - DNA, 15 bp, Homo sapiens
tacccctctcgtggc

SEQ ID NO: 1455066 - DNA, 15 bp, Homo sapiens
acccctctcgtggcc

SEQ ID NO: 1455067 - DNA, 15 bp, Homo sapiens
cccctctcgtggcca

SEQ ID NO: 1455068 - DNA, 15 bp, Homo sapiens
ccctctcgtggccat

SEQ ID NO: 1455069 - DNA, 15 bp, Homo sapiens
cctctcgtggccatt

SEQ ID NO: 1455070 - DNA, 15 bp, Homo sapiens
ctctcgtggccattg

SEQ ID NO: 1455071 - DNA, 15 bp, Homo sapiens
tctcgtggccattga

SEQ ID NO: 1455072 - DNA, 15 bp, Homo sapiens
ctcgtggccattgaa

SEQ ID NO: 1455073 - DNA, 15 bp, Homo sapiens
tcgtggccattgaag

SEQ ID NO: 1455074 - DNA, 15 bp, Homo sapiens
cgtggccattgaagg

SEQ ID NO: 1455075 - DNA, 15 bp, Homo sapiens
gtggccattgaaggc

SEQ ID NO: 1455076 - DNA, 15 bp, Homo sapiens
tggccattgaaggct

SEQ ID NO: 1455077 - DNA, 15 bp, Homo sapiens
ggccattgaaggctc

SEQ ID NO: 1455078 - DNA, 15 bp, Homo sapiens
gccattgaaggctct

SEQ ID NO: 1455079 - DNA, 15 bp, Homo sapiens
ccattgaaggctctt

SEQ ID NO: 1455080 - DNA, 15 bp, Homo sapiens
cattgaaggctctta

SEQ ID NO: 1455081 - DNA, 15 bp, Homo sapiens
attgaaggctcttag

SEQ ID NO: 1455082 - DNA, 15 bp, Homo sapiens
ttgaaggctcttagt

SEQ ID NO: 1455083 - DNA, 15 bp, Homo sapiens
tgaaggctcttagtc

SEQ ID NO: 1455084 - DNA, 15 bp, Homo sapiens
gaaggctcttagtca

SEQ ID NO: 1455085 - DNA, 15 bp, Homo sapiens
aaggctcttagtcag

SEQ ID NO: 1455086 - DNA, 15 bp, Homo sapiens
aggctcttagtcagt

SEQ ID NO: 1455087 - DNA, 15 bp, Homo sapiens
ggctcttagtcagtt

SEQ ID NO: 1455088 - DNA, 15 bp, Homo sapiens
gctcttagtcagttt

SEQ ID NO: 1455089 - DNA, 15 bp, Homo sapiens
ctcttagtcagtttg

SEQ ID NO: 1455090 - DNA, 15 bp, Homo sapiens
tcttagtcagtttgt

SEQ ID NO: 1455091 - DNA, 15 bp, Homo sapiens
cttagtcagtttgtg

SEQ ID NO: 1455092 - DNA, 15 bp, Homo sapiens
ttagtcagtttgtgc

SEQ ID NO: 1455093 - DNA, 15 bp, Homo sapiens
tagtcagtttgtgct

SEQ ID NO: 1455094 - DNA, 15 bp, Homo sapiens
agtcagtttgtgctg

SEQ ID NO: 1455095 - DNA, 15 bp, Homo sapiens
gtcagtttgtgctgc

SEQ ID NO: 1455096 - DNA, 15 bp, Homo sapiens
tcagtttgtgctgca

SEQ ID NO: 1455097 - DNA, 15 bp, Homo sapiens
cagtttgtgctgcaa

SEQ ID NO: 1455098 - DNA, 15 bp, Homo sapiens
agtttgtgctgcaat

SEQ ID NO: 1455099 - DNA, 15 bp, Homo sapiens
gtttgtgctgcaata

SEQ ID NO: 1455100 - DNA, 15 bp, Homo sapiens
tttgtgctgcaataa

SEQ ID NO: 1455101 - DNA, 15 bp, Homo sapiens
ttgtgctgcaataac

SEQ ID NO: 1455102 - DNA, 15 bp, Homo sapiens
tgtgctgcaataaca

SEQ ID NO: 1455103 - DNA, 15 bp, Homo sapiens
gtgctgcaataacag

SEQ ID NO: 1455104 - DNA, 15 bp, Homo sapiens
tgctgcaataacagt

SEQ ID NO: 1455105 - DNA, 15 bp, Homo sapiens
gctgcaataacagta

SEQ ID NO: 1455106 - DNA, 15 bp, Homo sapiens
ctgcaataacagtat

SEQ ID NO: 1455107 - DNA, 15 bp, Homo sapiens
tgcaataacagtata

SEQ ID NO: 1455108 - DNA, 15 bp, Homo sapiens
gcaataacagtatac

SEQ ID NO: 1455109 - DNA, 15 bp, Homo sapiens
caataacagtatacc

SEQ ID NO: 1455110 - DNA, 15 bp, Homo sapiens
aataacagtatacca

SEQ ID NO: 1455111 - DNA, 15 bp, Homo sapiens
ataacagtataccac

SEQ ID NO: 1455112 - DNA, 15 bp, Homo sapiens
taacagtataccaca

SEQ ID NO: 1455113 - DNA, 15 bp, Homo sapiens
aacagtataccacag

SEQ ID NO: 1455114 - DNA, 15 bp, Homo sapiens
acagtataccacaga

SEQ ID NO: 1455115 - DNA, 15 bp, Homo sapiens
cagtataccacagaa

SEQ ID NO: 1455116 - DNA, 15 bp, Homo sapiens
agtataccacagaat

SEQ ID NO: 1455117 - DNA, 15 bp, Homo sapiens
gtataccacagaatg

SEQ ID NO: 1455118 - DNA, 15 bp, Homo sapiens
tataccacagaatgg

SEQ ID NO: 1455119 - DNA, 15 bp, Homo sapiens
ataccacagaatggg

SEQ ID NO: 1455120 - DNA, 15 bp, Homo sapiens
taccacagaatgggt

SEQ ID NO: 1455121 - DNA, 15 bp, Homo sapiens
accacagaatgggta

SEQ ID NO: 1455122 - DNA, 15 bp, Homo sapiens
ccacagaatgggtaa

SEQ ID NO: 1455123 - DNA, 15 bp, Homo sapiens
cacagaatgggtaat

SEQ ID NO: 1455124 - DNA, 15 bp, Homo sapiens
acagaatgggtaatt

SEQ ID NO: 1455125 - DNA, 15 bp, Homo sapiens
cagaatgggtaattt

SEQ ID NO: 1455126 - DNA, 15 bp, Homo sapiens
agaatgggtaattta

SEQ ID NO: 1455127 - DNA, 15 bp, Homo sapiens
gaatgggtaatttat

SEQ ID NO: 1455128 - DNA, 15 bp, Homo sapiens
aatgggtaatttata

SEQ ID NO: 1455129 - DNA, 15 bp, Homo sapiens
atgggtaatttataa

SEQ ID NO: 1455130 - DNA, 15 bp, Homo sapiens
tgggtaatttataat

SEQ ID NO: 1455131 - DNA, 15 bp, Homo sapiens
gggtaatttataatg

SEQ ID NO: 1455132 - DNA, 15 bp, Homo sapiens
ggtaatttataatgg

SEQ ID NO: 1455133 - DNA, 15 bp, Homo sapiens
gtaatttataatgga

SEQ ID NO: 1455134 - DNA, 15 bp, Homo sapiens
taatttataatggac

SEQ ID NO: 1455135 - DNA, 15 bp, Homo sapiens
aatttataatggaca

SEQ ID NO: 1455136 - DNA, 15 bp, Homo sapiens
atttataatggacag

SEQ ID NO: 1455137 - DNA, 15 bp, Homo sapiens
tttataatggacaga

SEQ ID NO: 1455138 - DNA, 15 bp, Homo sapiens
ttataatggacagaa

SEQ ID NO: 1455139 - DNA, 15 bp, Homo sapiens
tataatggacagaaa

SEQ ID NO: 1455140 - DNA, 15 bp, Homo sapiens
ataatggacagaaat

SEQ ID NO: 1455141 - DNA, 15 bp, Homo sapiens
taatggacagaaatt

SEQ ID NO: 1455142 - DNA, 15 bp, Homo sapiens
aatggacagaaattt

SEQ ID NO: 1455143 - DNA, 15 bp, Homo sapiens
atggacagaaattta

SEQ ID NO: 1455144 - DNA, 15 bp, Homo sapiens
tggacagaaatttat

SEQ ID NO: 1455145 - DNA, 15 bp, Homo sapiens
ggacagaaatttatt

SEQ ID NO: 1455146 - DNA, 15 bp, Homo sapiens
gacagaaatttattg

SEQ ID NO: 1455147 - DNA, 15 bp, Homo sapiens
acagaaatttattgg

SEQ ID NO: 1455148 - DNA, 15 bp, Homo sapiens
cagaaatttattggc

SEQ ID NO: 1455149 - DNA, 15 bp, Homo sapiens
agaaatttattggct

SEQ ID NO: 1455150 - DNA, 15 bp, Homo sapiens
gaaatttattggctc

SEQ ID NO: 1455151 - DNA, 15 bp, Homo sapiens
aaatttattggctca

SEQ ID NO: 1455152 - DNA, 15 bp, Homo sapiens
aatttattggctcac

SEQ ID NO: 1455153 - DNA, 15 bp, Homo sapiens
atttattggctcaca

SEQ ID NO: 1455154 - DNA, 15 bp, Homo sapiens
tttattggctcacat

SEQ ID NO: 1455155 - DNA, 15 bp, Homo sapiens
ttattggctcacatt

SEQ ID NO: 1455156 - DNA, 15 bp, Homo sapiens
tattggctcacattt

SEQ ID NO: 1455157 - DNA, 15 bp, Homo sapiens
attggctcacatttc

SEQ ID NO: 1455158 - DNA, 15 bp, Homo sapiens
ttggctcacatttct

SEQ ID NO: 1455159 - DNA, 15 bp, Homo sapiens
tggctcacatttctg

SEQ ID NO: 1455160 - DNA, 15 bp, Homo sapiens
ggctcacatttctgg

SEQ ID NO: 1455161 - DNA, 15 bp, Homo sapiens
gctcacatttctggg

SEQ ID NO: 1455162 - DNA, 15 bp, Homo sapiens
ctcacatttctgggg

SEQ ID NO: 1455163 - DNA, 15 bp, Homo sapiens
tcacatttctggggg

SEQ ID NO: 1455164 - DNA, 15 bp, Homo sapiens
cacatttctgggggc

SEQ ID NO: 1455165 - DNA, 15 bp, Homo sapiens
acatttctgggggct

SEQ ID NO: 1455166 - DNA, 15 bp, Homo sapiens
catttctgggggctg

SEQ ID NO: 1455167 - DNA, 15 bp, Homo sapiens
atttctgggggctgg

SEQ ID NO: 1455168 - DNA, 15 bp, Homo sapiens
tttctgggggctggg

SEQ ID NO: 1455169 - DNA, 15 bp, Homo sapiens
ttctgggggctggga

SEQ ID NO: 1455170 - DNA, 15 bp, Homo sapiens
tctgggggctgggag

SEQ ID NO: 1455171 - DNA, 15 bp, Homo sapiens
ctgggggctgggagg

SEQ ID NO: 1455172 - DNA, 15 bp, Homo sapiens
tgggggctgggaggt

SEQ ID NO: 1455173 - DNA, 15 bp, Homo sapiens
gggggctgggaggtc

SEQ ID NO: 1455174 - DNA, 15 bp, Homo sapiens
ggggctgggaggtcc

SEQ ID NO: 1455175 - DNA, 15 bp, Homo sapiens
gggctgggaggtcca

SEQ ID NO: 1455176 - DNA, 15 bp, Homo sapiens
ggctgggaggtccaa

SEQ ID NO: 1455177 - DNA, 15 bp, Homo sapiens
gctgggaggtccaat

SEQ ID NO: 1455178 - DNA, 15 bp, Homo sapiens
ctgggaggtccaata

SEQ ID NO: 1455179 - DNA, 15 bp, Homo sapiens
tgggaggtccaatat

SEQ ID NO: 1455180 - DNA, 15 bp, Homo sapiens
gggaggtccaatatc

SEQ ID NO: 1455181 - DNA, 15 bp, Homo sapiens
ggaggtccaatatca

SEQ ID NO: 1455182 - DNA, 15 bp, Homo sapiens
gaggtccaatatcaa

SEQ ID NO: 1455183 - DNA, 15 bp, Homo sapiens
aggtccaatatcaag

SEQ ID NO: 1455184 - DNA, 15 bp, Homo sapiens
ggtccaatatcaagt

SEQ ID NO: 1455185 - DNA, 15 bp, Homo sapiens
gtccaatatcaagtt

SEQ ID NO: 1455186 - DNA, 15 bp, Homo sapiens
tccaatatcaagttg

SEQ ID NO: 1455187 - DNA, 15 bp, Homo sapiens
ccaatatcaagttgc

SEQ ID NO: 1455188 - DNA, 15 bp, Homo sapiens
caatatcaagttgcc

SEQ ID NO: 1455189 - DNA, 15 bp, Homo sapiens
aatatcaagttgcct

SEQ ID NO: 1455190 - DNA, 15 bp, Homo sapiens
atatcaagttgcctt

SEQ ID NO: 1455191 - DNA, 15 bp, Homo sapiens
tatcaagttgccttt

SEQ ID NO: 1455192 - DNA, 15 bp, Homo sapiens
atcaagttgcctttt

SEQ ID NO: 1455193 - DNA, 15 bp, Homo sapiens
tcaagttgccttttt

SEQ ID NO: 1455194 - DNA, 15 bp, Homo sapiens
caagttgcctttttc

SEQ ID NO: 1455195 - DNA, 15 bp, Homo sapiens
aagttgcctttttct

SEQ ID NO: 1455196 - DNA, 15 bp, Homo sapiens
agttgcctttttctg

SEQ ID NO: 1455197 - DNA, 15 bp, Homo sapiens
gttgcctttttctgc

SEQ ID NO: 1455198 - DNA, 15 bp, Homo sapiens
ttgcctttttctgcg

SEQ ID NO: 1455199 - DNA, 15 bp, Homo sapiens
tgcctttttctgcgt

SEQ ID NO: 1455200 - DNA, 15 bp, Homo sapiens
gcctttttctgcgtc

SEQ ID NO: 1455201 - DNA, 15 bp, Homo sapiens
cctttttctgcgtct

SEQ ID NO: 1455202 - DNA, 15 bp, Homo sapiens
ctttttctgcgtctt

SEQ ID NO: 1455203 - DNA, 15 bp, Homo sapiens
tttttctgcgtctta

SEQ ID NO: 1455204 - DNA, 15 bp, Homo sapiens
ttttctgcgtcttaa

SEQ ID NO: 1455205 - DNA, 15 bp, Homo sapiens
tttctgcgtcttaac

SEQ ID NO: 1455206 - DNA, 15 bp, Homo sapiens
ttctgcgtcttaaca

SEQ ID NO: 1455207 - DNA, 15 bp, Homo sapiens
tctgcgtcttaacat

SEQ ID NO: 1455208 - DNA, 15 bp, Homo sapiens
ctgcgtcttaacatg

SEQ ID NO: 1455209 - DNA, 15 bp, Homo sapiens
tgcgtcttaacatgg

SEQ ID NO: 1455210 - DNA, 15 bp, Homo sapiens
gcgtcttaacatggt

SEQ ID NO: 1455211 - DNA, 15 bp, Homo sapiens
cgtcttaacatggtg

SEQ ID NO: 1455212 - DNA, 15 bp, Homo sapiens
gtcttaacatggtgg

SEQ ID NO: 1455213 - DNA, 15 bp, Homo sapiens
tcttaacatggtgga

SEQ ID NO: 1455214 - DNA, 15 bp, Homo sapiens
cttaacatggtggaa

SEQ ID NO: 1455215 - DNA, 15 bp, Homo sapiens
ttaacatggtggaag

SEQ ID NO: 1455216 - DNA, 15 bp, Homo sapiens
taacatggtggaagg

SEQ ID NO: 1455217 - DNA, 15 bp, Homo sapiens
aacatggtggaaggc

SEQ ID NO: 1455218 - DNA, 15 bp, Homo sapiens
acatggtggaaggca

SEQ ID NO: 1455219 - DNA, 15 bp, Homo sapiens
catggtggaaggcat

SEQ ID NO: 1455220 - DNA, 15 bp, Homo sapiens
atggtggaaggcatt

SEQ ID NO: 1455221 - DNA, 15 bp, Homo sapiens
tggtggaaggcatta

SEQ ID NO: 1455222 - DNA, 15 bp, Homo sapiens
ggtggaaggcattat

SEQ ID NO: 1455223 - DNA, 15 bp, Homo sapiens
gtggaaggcattata

SEQ ID NO: 1455224 - DNA, 15 bp, Homo sapiens
tggaaggcattatat

SEQ ID NO: 1455225 - DNA, 15 bp, Homo sapiens
ggaaggcattatatg

SEQ ID NO: 1455226 - DNA, 15 bp, Homo sapiens
gaaggcattatatga

SEQ ID NO: 1455227 - DNA, 15 bp, Homo sapiens
aaggcattatatgac

SEQ ID NO: 1455228 - DNA, 15 bp, Homo sapiens
aggcattatatgaca

SEQ ID NO: 1455229 - DNA, 15 bp, Homo sapiens
ggcattatatgacaa

SEQ ID NO: 1455230 - DNA, 15 bp, Homo sapiens
gcattatatgacaaa

SEQ ID NO: 1455231 - DNA, 15 bp, Homo sapiens
cattatatgacaaaa

SEQ ID NO: 1455232 - DNA, 15 bp, Homo sapiens
attatatgacaaaag

SEQ ID NO: 1455233 - DNA, 15 bp, Homo sapiens
ttatatgacaaaagg

SEQ ID NO: 1455234 - DNA, 15 bp, Homo sapiens
tatatgacaaaaggg

SEQ ID NO: 1455235 - DNA, 15 bp, Homo sapiens
atatgacaaaagggc

SEQ ID NO: 1455236 - DNA, 15 bp, Homo sapiens
tatgacaaaagggca

SEQ ID NO: 1455237 - DNA, 15 bp, Homo sapiens
atgacaaaagggcaa

SEQ ID NO: 1455238 - DNA, 15 bp, Homo sapiens
tgacaaaagggcaaa

SEQ ID NO: 1455239 - DNA, 15 bp, Homo sapiens
gacaaaagggcaaag

SEQ ID NO: 1455240 - DNA, 15 bp, Homo sapiens
acaaaagggcaaaga

SEQ ID NO: 1455241 - DNA, 15 bp, Homo sapiens
caaaagggcaaagaa

SEQ ID NO: 1455242 - DNA, 15 bp, Homo sapiens
aaaagggcaaagaaa

SEQ ID NO: 1455243 - DNA, 15 bp, Homo sapiens
aaagggcaaagaaag

SEQ ID NO: 1455244 - DNA, 15 bp, Homo sapiens
aagggcaaagaaagg

SEQ ID NO: 1455245 - DNA, 15 bp, Homo sapiens
agggcaaagaaaggg

SEQ ID NO: 1455246 - DNA, 15 bp, Homo sapiens
gggcaaagaaagggt

SEQ ID NO: 1455247 - DNA, 15 bp, Homo sapiens
ggcaaagaaagggtg

SEQ ID NO: 1455248 - DNA, 15 bp, Homo sapiens
gcaaagaaagggtga

SEQ ID NO: 1455249 - DNA, 15 bp, Homo sapiens
caaagaaagggtgag

SEQ ID NO: 1455250 - DNA, 15 bp, Homo sapiens
aaagaaagggtgaga

SEQ ID NO: 1455251 - DNA, 15 bp, Homo sapiens
aagaaagggtgagag

SEQ ID NO: 1455252 - DNA, 15 bp, Homo sapiens
agaaagggtgagaga

SEQ ID NO: 1455253 - DNA, 15 bp, Homo sapiens
gaaagggtgagagag

SEQ ID NO: 1455254 - DNA, 15 bp, Homo sapiens
aaagggtgagagaga

SEQ ID NO: 1455255 - DNA, 15 bp, Homo sapiens
aagggtgagagagag

SEQ ID NO: 1455256 - DNA, 15 bp, Homo sapiens
agggtgagagagagc

SEQ ID NO: 1455257 - DNA, 15 bp, Homo sapiens
gggtgagagagagca

SEQ ID NO: 1455258 - DNA, 15 bp, Homo sapiens
ggtgagagagagcaa

SEQ ID NO: 1455259 - DNA, 15 bp, Homo sapiens
gtgagagagagcaag

SEQ ID NO: 1455260 - DNA, 15 bp, Homo sapiens
tgagagagagcaaga

SEQ ID NO: 1455261 - DNA, 15 bp, Homo sapiens
gagagagagcaagag

SEQ ID NO: 1455262 - DNA, 15 bp, Homo sapiens
agagagagcaagagg

SEQ ID NO: 1455263 - DNA, 15 bp, Homo sapiens
gagagagcaagagga

SEQ ID NO: 1455264 - DNA, 15 bp, Homo sapiens
agagagcaagaggag

SEQ ID NO: 1455265 - DNA, 15 bp, Homo sapiens
gagagcaagaggagg

SEQ ID NO: 1455266 - DNA, 15 bp, Homo sapiens
agagcaagaggaggg

SEQ ID NO: 1455267 - DNA, 15 bp, Homo sapiens
gagcaagaggagggt

SEQ ID NO: 1455268 - DNA, 15 bp, Homo sapiens
agcaagaggagggtg

SEQ ID NO: 1455269 - DNA, 15 bp, Homo sapiens
gcaagaggagggtga

SEQ ID NO: 1455270 - DNA, 15 bp, Homo sapiens
caagaggagggtgag

SEQ ID NO: 1455271 - DNA, 15 bp, Homo sapiens
aagaggagggtgagc

SEQ ID NO: 1455272 - DNA, 15 bp, Homo sapiens
agaggagggtgagct

SEQ ID NO: 1455273 - DNA, 15 bp, Homo sapiens
gaggagggtgagctc

SEQ ID NO: 1455274 - DNA, 15 bp, Homo sapiens
aggagggtgagctca

SEQ ID NO: 1455275 - DNA, 15 bp, Homo sapiens
ggagggtgagctcac

SEQ ID NO: 1455276 - DNA, 15 bp, Homo sapiens
gagggtgagctcact

SEQ ID NO: 1455277 - DNA, 15 bp, Homo sapiens
agggtgagctcactc

SEQ ID NO: 1455278 - DNA, 15 bp, Homo sapiens
gggtgagctcactcc

SEQ ID NO: 1455279 - DNA, 15 bp, Homo sapiens
ggtgagctcactcct

SEQ ID NO: 1455280 - DNA, 15 bp, Homo sapiens
gtgagctcactcctg

SEQ ID NO: 1455281 - DNA, 15 bp, Homo sapiens
tgagctcactcctgt

SEQ ID NO: 1455282 - DNA, 15 bp, Homo sapiens
gagctcactcctgtg

SEQ ID NO: 1455283 - DNA, 15 bp, Homo sapiens
agctcactcctgtga

SEQ ID NO: 1455284 - DNA, 15 bp, Homo sapiens
gctcactcctgtgat

SEQ ID NO: 1455285 - DNA, 15 bp, Homo sapiens
ctcactcctgtgata

SEQ ID NO: 1455286 - DNA, 15 bp, Homo sapiens
tcactcctgtgataa

SEQ ID NO: 1455287 - DNA, 15 bp, Homo sapiens
cactcctgtgataac

SEQ ID NO: 1455288 - DNA, 15 bp, Homo sapiens
actcctgtgataaca

SEQ ID NO: 1455289 - DNA, 15 bp, Homo sapiens
ctcctgtgataacaa

SEQ ID NO: 1455290 - DNA, 15 bp, Homo sapiens
tcctgtgataacaaa

SEQ ID NO: 1455291 - DNA, 15 bp, Homo sapiens
cctgtgataacaaat

SEQ ID NO: 1455292 - DNA, 15 bp, Homo sapiens
ctgtgataacaaatc

SEQ ID NO: 1455293 - DNA, 15 bp, Homo sapiens
tgtgataacaaatcc

SEQ ID NO: 1455294 - DNA, 15 bp, Homo sapiens
gtgataacaaatcca

SEQ ID NO: 1455295 - DNA, 15 bp, Homo sapiens
tgataacaaatccac

SEQ ID NO: 1455296 - DNA, 15 bp, Homo sapiens
gataacaaatccact

SEQ ID NO: 1455297 - DNA, 15 bp, Homo sapiens
ataacaaatccactc

SEQ ID NO: 1455298 - DNA, 15 bp, Homo sapiens
taacaaatccactcc

SEQ ID NO: 1455299 - DNA, 15 bp, Homo sapiens
aacaaatccactccc

SEQ ID NO: 1455300 - DNA, 15 bp, Homo sapiens
acaaatccactccca

SEQ ID NO: 1455301 - DNA, 15 bp, Homo sapiens
caaatccactcccat

SEQ ID NO: 1455302 - DNA, 15 bp, Homo sapiens
aaatccactcccatg

SEQ ID NO: 1455303 - DNA, 15 bp, Homo sapiens
aatccactcccatga

SEQ ID NO: 1455304 - DNA, 15 bp, Homo sapiens
atccactcccatgaa

SEQ ID NO: 1455305 - DNA, 15 bp, Homo sapiens
tccactcccatgaac

SEQ ID NO: 1455306 - DNA, 15 bp, Homo sapiens
ccactcccatgaaca

SEQ ID NO: 1455307 - DNA, 15 bp, Homo sapiens
cactcccatgaacac

SEQ ID NO: 1455308 - DNA, 15 bp, Homo sapiens
actcccatgaacact

SEQ ID NO: 1455309 - DNA, 15 bp, Homo sapiens
ctcccatgaacactt

SEQ ID NO: 1455310 - DNA, 15 bp, Homo sapiens
tcccatgaacacttt

SEQ ID NO: 1455311 - DNA, 15 bp, Homo sapiens
cccatgaacactttc

SEQ ID NO: 1455312 - DNA, 15 bp, Homo sapiens
ccatgaacactttcc

SEQ ID NO: 1455313 - DNA, 15 bp, Homo sapiens
catgaacactttccc

SEQ ID NO: 1455314 - DNA, 15 bp, Homo sapiens
atgaacactttcccc

SEQ ID NO: 1455315 - DNA, 15 bp, Homo sapiens
tgaacactttcccca

SEQ ID NO: 1455316 - DNA, 15 bp, Homo sapiens
gaacactttccccag

SEQ ID NO: 1455317 - DNA, 15 bp, Homo sapiens
aacactttccccaga

SEQ ID NO: 1455318 - DNA, 15 bp, Homo sapiens
acactttccccagat

SEQ ID NO: 1455319 - DNA, 15 bp, Homo sapiens
cactttccccagata

SEQ ID NO: 1455320 - DNA, 15 bp, Homo sapiens
actttccccagataa

SEQ ID NO: 1455321 - DNA, 15 bp, Homo sapiens
ctttccccagataac

SEQ ID NO: 1455322 - DNA, 15 bp, Homo sapiens
tttccccagataact

SEQ ID NO: 1455323 - DNA, 15 bp, Homo sapiens
ttccccagataactg

SEQ ID NO: 1455324 - DNA, 15 bp, Homo sapiens
tccccagataactgc

SEQ ID NO: 1455325 - DNA, 15 bp, Homo sapiens
ccccagataactgca

SEQ ID NO: 1455326 - DNA, 15 bp, Homo sapiens
cccagataactgcat

SEQ ID NO: 1455327 - DNA, 15 bp, Homo sapiens
ccagataactgcatt

SEQ ID NO: 1455328 - DNA, 15 bp, Homo sapiens
cagataactgcatta

SEQ ID NO: 1455329 - DNA, 15 bp, Homo sapiens
agataactgcattag

SEQ ID NO: 1455330 - DNA, 15 bp, Homo sapiens
gataactgcattagt

SEQ ID NO: 1455331 - DNA, 15 bp, Homo sapiens
ataactgcattagtc

SEQ ID NO: 1455332 - DNA, 15 bp, Homo sapiens
taactgcattagtcc

SEQ ID NO: 1455333 - DNA, 15 bp, Homo sapiens
aactgcattagtcca

SEQ ID NO: 1455334 - DNA, 15 bp, Homo sapiens
actgcattagtccat

SEQ ID NO: 1455335 - DNA, 15 bp, Homo sapiens
ctgcattagtccatt

SEQ ID NO: 1455336 - DNA, 15 bp, Homo sapiens
tgcattagtccattc

SEQ ID NO: 1455337 - DNA, 15 bp, Homo sapiens
gcattagtccattca

SEQ ID NO: 1455338 - DNA, 15 bp, Homo sapiens
cattagtccattcat

SEQ ID NO: 1455339 - DNA, 15 bp, Homo sapiens
attagtccattcatg

SEQ ID NO: 1455340 - DNA, 15 bp, Homo sapiens
ttagtccattcatga

SEQ ID NO: 1455341 - DNA, 15 bp, Homo sapiens
tagtccattcatgag

SEQ ID NO: 1455342 - DNA, 15 bp, Homo sapiens
agtccattcatgagg

SEQ ID NO: 1455343 - DNA, 15 bp, Homo sapiens
gtccattcatgaggg

SEQ ID NO: 1455344 - DNA, 15 bp, Homo sapiens
tccattcatgagggt

SEQ ID NO: 1455345 - DNA, 15 bp, Homo sapiens
ccattcatgagggtg

SEQ ID NO: 1455346 - DNA, 15 bp, Homo sapiens
cattcatgagggtgg

SEQ ID NO: 1455347 - DNA, 15 bp, Homo sapiens
attcatgagggtgga

SEQ ID NO: 1455348 - DNA, 15 bp, Homo sapiens
ttcatgagggtggaa

SEQ ID NO: 1455349 - DNA, 15 bp, Homo sapiens
tcatgagggtggaac

SEQ ID NO: 1455350 - DNA, 15 bp, Homo sapiens
catgagggtggaacg

SEQ ID NO: 1455351 - DNA, 15 bp, Homo sapiens
atgagggtggaacgc

SEQ ID NO: 1455352 - DNA, 15 bp, Homo sapiens
tgagggtggaacgct

SEQ ID NO: 1455353 - DNA, 15 bp, Homo sapiens
gagggtggaacgctt

SEQ ID NO: 1455354 - DNA, 15 bp, Homo sapiens
agggtggaacgctta

SEQ ID NO: 1455355 - DNA, 15 bp, Homo sapiens
gggtggaacgcttat

SEQ ID NO: 1455356 - DNA, 15 bp, Homo sapiens
ggtggaacgcttatg

SEQ ID NO: 1455357 - DNA, 15 bp, Homo sapiens
gtggaacgcttatga

SEQ ID NO: 1455358 - DNA, 15 bp, Homo sapiens
tggaacgcttatgac

SEQ ID NO: 1455359 - DNA, 15 bp, Homo sapiens
ggaacgcttatgacc

SEQ ID NO: 1455360 - DNA, 15 bp, Homo sapiens
gaacgcttatgacct

SEQ ID NO: 1455361 - DNA, 15 bp, Homo sapiens
aacgcttatgaccta

SEQ ID NO: 1455362 - DNA, 15 bp, Homo sapiens
acgcttatgacctaa

SEQ ID NO: 1455363 - DNA, 15 bp, Homo sapiens
cgcttatgacctaaa

SEQ ID NO: 1455364 - DNA, 15 bp, Homo sapiens
gcttatgacctaaac

SEQ ID NO: 1455365 - DNA, 15 bp, Homo sapiens
cttatgacctaaaca

SEQ ID NO: 1455366 - DNA, 15 bp, Homo sapiens
ttatgacctaaacac

SEQ ID NO: 1455367 - DNA, 15 bp, Homo sapiens
tatgacctaaacacc

SEQ ID NO: 1455368 - DNA, 15 bp, Homo sapiens
atgacctaaacacct

SEQ ID NO: 1455369 - DNA, 15 bp, Homo sapiens
tgacctaaacacctt

SEQ ID NO: 1455370 - DNA, 15 bp, Homo sapiens
gacctaaacaccttt

SEQ ID NO: 1455371 - DNA, 15 bp, Homo sapiens
acctaaacacctttt

SEQ ID NO: 1455372 - DNA, 15 bp, Homo sapiens
cctaaacacctttta

SEQ ID NO: 1455373 - DNA, 15 bp, Homo sapiens
ctaaacaccttttat

SEQ ID NO: 1455374 - DNA, 15 bp, Homo sapiens
taaacaccttttata

SEQ ID NO: 1455375 - DNA, 15 bp, Homo sapiens
aaacaccttttatat

SEQ ID NO: 1455376 - DNA, 15 bp, Homo sapiens
aacaccttttatatg

SEQ ID NO: 1455377 - DNA, 15 bp, Homo sapiens
acaccttttatatgt

SEQ ID NO: 1455378 - DNA, 15 bp, Homo sapiens
caccttttatatgtt

SEQ ID NO: 1455379 - DNA, 15 bp, Homo sapiens
accttttatatgttc

SEQ ID NO: 1455380 - DNA, 15 bp, Homo sapiens
ccttttatatgttca

SEQ ID NO: 1455381 - DNA, 15 bp, Homo sapiens
cttttatatgttcac

SEQ ID NO: 1455382 - DNA, 15 bp, Homo sapiens
ttttatatgttcacc

SEQ ID NO: 1455383 - DNA, 15 bp, Homo sapiens
tttatatgttcacct

SEQ ID NO: 1455384 - DNA, 15 bp, Homo sapiens
ttatatgttcacctc

SEQ ID NO: 1455385 - DNA, 15 bp, Homo sapiens
tatatgttcacctct

SEQ ID NO: 1455386 - DNA, 15 bp, Homo sapiens
atatgttcacctctc

SEQ ID NO: 1455387 - DNA, 15 bp, Homo sapiens
tatgttcacctctca

SEQ ID NO: 1455388 - DNA, 15 bp, Homo sapiens
atgttcacctctcaa

SEQ ID NO: 1455389 - DNA, 15 bp, Homo sapiens
tgttcacctctcaat

SEQ ID NO: 1455390 - DNA, 15 bp, Homo sapiens
gttcacctctcaata

SEQ ID NO: 1455391 - DNA, 15 bp, Homo sapiens
ttcacctctcaatac

SEQ ID NO: 1455392 - DNA, 15 bp, Homo sapiens
tcacctctcaatacc

SEQ ID NO: 1455393 - DNA, 15 bp, Homo sapiens
cacctctcaatacca

SEQ ID NO: 1455394 - DNA, 15 bp, Homo sapiens
acctctcaataccat

SEQ ID NO: 1455395 - DNA, 15 bp, Homo sapiens
cctctcaataccatc

SEQ ID NO: 1455396 - DNA, 15 bp, Homo sapiens
ctctcaataccatca

SEQ ID NO: 1455397 - DNA, 15 bp, Homo sapiens
tctcaataccatcac

SEQ ID NO: 1455398 - DNA, 15 bp, Homo sapiens
ctcaataccatcacg

SEQ ID NO: 1455399 - DNA, 15 bp, Homo sapiens
tcaataccatcacga

SEQ ID NO: 1455400 - DNA, 15 bp, Homo sapiens
caataccatcacgat

SEQ ID NO: 1455401 - DNA, 15 bp, Homo sapiens
aataccatcacgatg

SEQ ID NO: 1455402 - DNA, 15 bp, Homo sapiens
ataccatcacgatga

SEQ ID NO: 1455403 - DNA, 15 bp, Homo sapiens
taccatcacgatgat

SEQ ID NO: 1455404 - DNA, 15 bp, Homo sapiens
accatcacgatgata

SEQ ID NO: 1455405 - DNA, 15 bp, Homo sapiens
ccatcacgatgataa

SEQ ID NO: 1455406 - DNA, 15 bp, Homo sapiens
catcacgatgataat

SEQ ID NO: 1455407 - DNA, 15 bp, Homo sapiens
atcacgatgataatt

SEQ ID NO: 1455408 - DNA, 15 bp, Homo sapiens
tcacgatgataatta

SEQ ID NO: 1455409 - DNA, 15 bp, Homo sapiens
cacgatgataattaa

SEQ ID NO: 1455410 - DNA, 15 bp, Homo sapiens
acgatgataattaaa

SEQ ID NO: 1455411 - DNA, 15 bp, Homo sapiens
cgatgataattaaat

SEQ ID NO: 1455412 - DNA, 15 bp, Homo sapiens
gatgataattaaatt

SEQ ID NO: 1455413 - DNA, 15 bp, Homo sapiens
atgataattaaattt

SEQ ID NO: 1455414 - DNA, 15 bp, Homo sapiens
tgataattaaatttc

SEQ ID NO: 1455415 - DNA, 15 bp, Homo sapiens
gataattaaatttca

SEQ ID NO: 1455416 - DNA, 15 bp, Homo sapiens
ataattaaatttcaa

SEQ ID NO: 1455417 - DNA, 15 bp, Homo sapiens
taattaaatttcaat

SEQ ID NO: 1455418 - DNA, 15 bp, Homo sapiens
aattaaatttcaata

SEQ ID NO: 1455419 - DNA, 15 bp, Homo sapiens
attaaatttcaatat

SEQ ID NO: 1455420 - DNA, 15 bp, Homo sapiens
ttaaatttcaatatg

SEQ ID NO: 1455421 - DNA, 15 bp, Homo sapiens
taaatttcaatatga

SEQ ID NO: 1455422 - DNA, 15 bp, Homo sapiens
aaatttcaatatgag

SEQ ID NO: 1455423 - DNA, 15 bp, Homo sapiens
aatttcaatatgagt

SEQ ID NO: 1455424 - DNA, 15 bp, Homo sapiens
atttcaatatgagtt

SEQ ID NO: 1455425 - DNA, 15 bp, Homo sapiens
tttcaatatgagttt

SEQ ID NO: 1455426 - DNA, 15 bp, Homo sapiens
ttcaatatgagtttc

SEQ ID NO: 1455427 - DNA, 15 bp, Homo sapiens
tcaatatgagtttcg

SEQ ID NO: 1455428 - DNA, 15 bp, Homo sapiens
caatatgagtttcgg

SEQ ID NO: 1455429 - DNA, 15 bp, Homo sapiens
aatatgagtttcgga

SEQ ID NO: 1455430 - DNA, 15 bp, Homo sapiens
atatgagtttcggag

SEQ ID NO: 1455431 - DNA, 15 bp, Homo sapiens
tatgagtttcggagg

SEQ ID NO: 1455432 - DNA, 15 bp, Homo sapiens
atgagtttcggaggg

SEQ ID NO: 1455433 - DNA, 15 bp, Homo sapiens
tgagtttcggagggg

SEQ ID NO: 1455434 - DNA, 15 bp, Homo sapiens
gagtttcggagggga

SEQ ID NO: 1455435 - DNA, 15 bp, Homo sapiens
agtttcggaggggac

SEQ ID NO: 1455436 - DNA, 15 bp, Homo sapiens
gtttcggaggggaca

SEQ ID NO: 1455437 - DNA, 15 bp, Homo sapiens
tttcggaggggacag

SEQ ID NO: 1455438 - DNA, 15 bp, Homo sapiens
ttcggaggggacaga

SEQ ID NO: 1455439 - DNA, 15 bp, Homo sapiens
tcggaggggacagac

SEQ ID NO: 1455440 - DNA, 15 bp, Homo sapiens
cggaggggacagaca

SEQ ID NO: 1455441 - DNA, 15 bp, Homo sapiens
ggaggggacagacat

SEQ ID NO: 1455442 - DNA, 15 bp, Homo sapiens
gaggggacagacatt

SEQ ID NO: 1455443 - DNA, 15 bp, Homo sapiens
aggggacagacattc

SEQ ID NO: 1455444 - DNA, 15 bp, Homo sapiens
ggggacagacattca

SEQ ID NO: 1455445 - DNA, 15 bp, Homo sapiens
gggacagacattcaa

SEQ ID NO: 1455446 - DNA, 15 bp, Homo sapiens
ggacagacattcaaa

SEQ ID NO: 1455447 - DNA, 15 bp, Homo sapiens
gacagacattcaaac

SEQ ID NO: 1455448 - DNA, 15 bp, Homo sapiens
acagacattcaaacc

SEQ ID NO: 1455449 - DNA, 15 bp, Homo sapiens
cagacattcaaacca

SEQ ID NO: 1455450 - DNA, 15 bp, Homo sapiens
agacattcaaaccat

SEQ ID NO: 1455451 - DNA, 15 bp, Homo sapiens
gacattcaaaccata

SEQ ID NO: 1455452 - DNA, 15 bp, Homo sapiens
acattcaaaccatag

SEQ ID NO: 1455453 - DNA, 15 bp, Homo sapiens
cattcaaaccatagc

SEQ ID NO: 1455454 - DNA, 15 bp, Homo sapiens
attcaaaccatagca

SEQ ID NO: 1455455 - DNA, 15 bp, Homo sapiens
ttcaaaccatagcaa

SEQ ID NO: 1455456 - DNA, 15 bp, Homo sapiens
tcaaaccatagcaag

SEQ ID NO: 1455457 - DNA, 15 bp, Homo sapiens
caaaccatagcaaga

SEQ ID NO: 1455458 - DNA, 15 bp, Homo sapiens
aaaccatagcaagag

SEQ ID NO: 1455459 - DNA, 15 bp, Homo sapiens
aaccatagcaagagt

SEQ ID NO: 1455460 - DNA, 15 bp, Homo sapiens
accatagcaagagtt

SEQ ID NO: 1455461 - DNA, 15 bp, Homo sapiens
ccatagcaagagtta

SEQ ID NO: 1455462 - DNA, 15 bp, Homo sapiens
catagcaagagttat

SEQ ID NO: 1455463 - DNA, 15 bp, Homo sapiens
atagcaagagttatt

SEQ ID NO: 1455464 - DNA, 15 bp, Homo sapiens
tagcaagagttattg

SEQ ID NO: 1455465 - DNA, 15 bp, Homo sapiens
agcaagagttattgg

SEQ ID NO: 1455466 - DNA, 15 bp, Homo sapiens
gcaagagttattgga

SEQ ID NO: 1455467 - DNA, 15 bp, Homo sapiens
caagagttattggag

SEQ ID NO: 1455468 - DNA, 15 bp, Homo sapiens
aagagttattggaga

SEQ ID NO: 1455469 - DNA, 15 bp, Homo sapiens
agagttattggagaa

SEQ ID NO: 1455470 - DNA, 15 bp, Homo sapiens
gagttattggagaaa

SEQ ID NO: 1455471 - DNA, 15 bp, Homo sapiens
agttattggagaaaa

SEQ ID NO: 1455472 - DNA, 15 bp, Homo sapiens
gttattggagaaaaa

SEQ ID NO: 1455473 - DNA, 15 bp, Homo sapiens
ttattggagaaaaat

SEQ ID NO: 1455474 - DNA, 15 bp, Homo sapiens
tattggagaaaaatg

SEQ ID NO: 1455475 - DNA, 15 bp, Homo sapiens
attggagaaaaatgt

SEQ ID NO: 1455476 - DNA, 15 bp, Homo sapiens
ttggagaaaaatgtc

SEQ ID NO: 1455477 - DNA, 15 bp, Homo sapiens
tggagaaaaatgtcg

SEQ ID NO: 1455478 - DNA, 15 bp, Homo sapiens
ggagaaaaatgtcgg

SEQ ID NO: 1455479 - DNA, 15 bp, Homo sapiens
gagaaaaatgtcgga

SEQ ID NO: 1455480 - DNA, 15 bp, Homo sapiens
agaaaaatgtcggag

SEQ ID NO: 1455481 - DNA, 15 bp, Homo sapiens
gaaaaatgtcggaga

SEQ ID NO: 1455482 - DNA, 15 bp, Homo sapiens
aaaaatgtcggagag

SEQ ID NO: 1455483 - DNA, 15 bp, Homo sapiens
aaaatgtcggagagg

SEQ ID NO: 1455484 - DNA, 15 bp, Homo sapiens
aaatgtcggagaggc

SEQ ID NO: 1455485 - DNA, 15 bp, Homo sapiens
aatgtcggagaggcc

SEQ ID NO: 1455486 - DNA, 15 bp, Homo sapiens
atgtcggagaggcct

SEQ ID NO: 1455487 - DNA, 15 bp, Homo sapiens
tgtcggagaggccta

SEQ ID NO: 1455488 - DNA, 15 bp, Homo sapiens
gtcggagaggcctaa

SEQ ID NO: 1455489 - DNA, 15 bp, Homo sapiens
tcggagaggcctaat

SEQ ID NO: 1455490 - DNA, 15 bp, Homo sapiens
cggagaggcctaatc

SEQ ID NO: 1455491 - DNA, 15 bp, Homo sapiens
ggagaggcctaatct

SEQ ID NO: 1455492 - DNA, 15 bp, Homo sapiens
gagaggcctaatctt

SEQ ID NO: 1455493 - DNA, 15 bp, Homo sapiens
agaggcctaatcttt

SEQ ID NO: 1455494 - DNA, 15 bp, Homo sapiens
gaggcctaatctttt

SEQ ID NO: 1455495 - DNA, 15 bp, Homo sapiens
aggcctaatctttta

SEQ ID NO: 1455496 - DNA, 15 bp, Homo sapiens
ggcctaatcttttat

SEQ ID NO: 1455497 - DNA, 15 bp, Homo sapiens
gcctaatcttttata

SEQ ID NO: 1455498 - DNA, 15 bp, Homo sapiens
cctaatcttttatat

SEQ ID NO: 1455499 - DNA, 15 bp, Homo sapiens
ctaatcttttatatt

SEQ ID NO: 1455500 - DNA, 15 bp, Homo sapiens
taatcttttatattt

SEQ ID NO: 1455501 - DNA, 15 bp, Homo sapiens
aatcttttatattta

SEQ ID NO: 1455502 - DNA, 15 bp, Homo sapiens
atcttttatatttaa

SEQ ID NO: 1455503 - DNA, 15 bp, Homo sapiens
tcttttatatttaat

SEQ ID NO: 1455504 - DNA, 15 bp, Homo sapiens
cttttatatttaata

SEQ ID NO: 1455505 - DNA, 15 bp, Homo sapiens
ttttatatttaatag

SEQ ID NO: 1455506 - DNA, 15 bp, Homo sapiens
tttatatttaatagc

SEQ ID NO: 1455507 - DNA, 15 bp, Homo sapiens
ttatatttaatagca

SEQ ID NO: 1455508 - DNA, 15 bp, Homo sapiens
tatatttaatagcat

SEQ ID NO: 1455509 - DNA, 15 bp, Homo sapiens
atatttaatagcatt

SEQ ID NO: 1455510 - DNA, 15 bp, Homo sapiens
tatttaatagcattt

SEQ ID NO: 1455511 - DNA, 15 bp, Homo sapiens
atttaatagcatttc

SEQ ID NO: 1455512 - DNA, 15 bp, Homo sapiens
tttaatagcatttct

SEQ ID NO: 1455513 - DNA, 15 bp, Homo sapiens
ttaatagcatttctt

SEQ ID NO: 1455514 - DNA, 15 bp, Homo sapiens
taatagcatttcttt

SEQ ID NO: 1455515 - DNA, 15 bp, Homo sapiens
aatagcatttctttc

SEQ ID NO: 1455516 - DNA, 15 bp, Homo sapiens
atagcatttctttct

SEQ ID NO: 1455517 - DNA, 15 bp, Homo sapiens
tagcatttctttctt

SEQ ID NO: 1455518 - DNA, 15 bp, Homo sapiens
agcatttctttcttc

SEQ ID NO: 1455519 - DNA, 15 bp, Homo sapiens
gcatttctttcttcc

SEQ ID NO: 1455520 - DNA, 15 bp, Homo sapiens
catttctttcttcct

SEQ ID NO: 1455521 - DNA, 15 bp, Homo sapiens
atttctttcttccta

SEQ ID NO: 1455522 - DNA, 15 bp, Homo sapiens
tttctttcttcctat

SEQ ID NO: 1455523 - DNA, 15 bp, Homo sapiens
ttctttcttcctatt

SEQ ID NO: 1455524 - DNA, 15 bp, Homo sapiens
tctttcttcctatta

SEQ ID NO: 1455525 - DNA, 15 bp, Homo sapiens
ctttcttcctattac

SEQ ID NO: 1455526 - DNA, 15 bp, Homo sapiens
tttcttcctattact

SEQ ID NO: 1455527 - DNA, 15 bp, Homo sapiens
ttcttcctattactc

SEQ ID NO: 1455528 - DNA, 15 bp, Homo sapiens
tcttcctattactct

SEQ ID NO: 1455529 - DNA, 15 bp, Homo sapiens
cttcctattactctc

SEQ ID NO: 1455530 - DNA, 15 bp, Homo sapiens
ttcctattactctca

SEQ ID NO: 1455531 - DNA, 15 bp, Homo sapiens
tcctattactctcat

SEQ ID NO: 1455532 - DNA, 15 bp, Homo sapiens
cctattactctcata

SEQ ID NO: 1455533 - DNA, 15 bp, Homo sapiens
ctattactctcatat

SEQ ID NO: 1455534 - DNA, 15 bp, Homo sapiens
tattactctcatatt

SEQ ID NO: 1455535 - DNA, 15 bp, Homo sapiens
attactctcatatta

SEQ ID NO: 1455536 - DNA, 15 bp, Homo sapiens
ttactctcatattaa

SEQ ID NO: 1455537 - DNA, 15 bp, Homo sapiens
tactctcatattaac

SEQ ID NO: 1455538 - DNA, 15 bp, Homo sapiens
actctcatattaacc

SEQ ID NO: 1455539 - DNA, 15 bp, Homo sapiens
ctctcatattaacct

SEQ ID NO: 1455540 - DNA, 15 bp, Homo sapiens
tctcatattaacctt

SEQ ID NO: 1455541 - DNA, 15 bp, Homo sapiens
ctcatattaaccttc

SEQ ID NO: 1455542 - DNA, 15 bp, Homo sapiens
tcatattaaccttct

SEQ ID NO: 1455543 - DNA, 15 bp, Homo sapiens
catattaaccttctc

SEQ ID NO: 1455544 - DNA, 15 bp, Homo sapiens
atattaaccttctcc

SEQ ID NO: 1455545 - DNA, 15 bp, Homo sapiens
tattaaccttctcct

SEQ ID NO: 1455546 - DNA, 15 bp, Homo sapiens
attaaccttctcctc

SEQ ID NO: 1455547 - DNA, 15 bp, Homo sapiens
ttaaccttctcctca

SEQ ID NO: 1455548 - DNA, 15 bp, Homo sapiens
taaccttctcctcag

SEQ ID NO: 1455549 - DNA, 15 bp, Homo sapiens
aaccttctcctcagg

SEQ ID NO: 1455550 - DNA, 15 bp, Homo sapiens
accttctcctcaggt

SEQ ID NO: 1455551 - DNA, 15 bp, Homo sapiens
ccttctcctcaggtt

SEQ ID NO: 1455552 - DNA, 15 bp, Homo sapiens
cttctcctcaggttc

SEQ ID NO: 1455553 - DNA, 15 bp, Homo sapiens
ttctcctcaggttcc

SEQ ID NO: 1455554 - DNA, 15 bp, Homo sapiens
tctcctcaggttcct

SEQ ID NO: 1455555 - DNA, 15 bp, Homo sapiens
ctcctcaggttcctt

SEQ ID NO: 1455556 - DNA, 15 bp, Homo sapiens
tcctcaggttccttg

SEQ ID NO: 1455557 - DNA, 15 bp, Homo sapiens
cctcaggttccttgg

SEQ ID NO: 1455558 - DNA, 15 bp, Homo sapiens
ctcaggttccttggt

SEQ ID NO: 1455559 - DNA, 15 bp, Homo sapiens
tcaggttccttggtt

SEQ ID NO: 1455560 - DNA, 15 bp, Homo sapiens
caggttccttggttg

SEQ ID NO: 1455561 - DNA, 15 bp, Homo sapiens
aggttccttggttga

SEQ ID NO: 1455562 - DNA, 15 bp, Homo sapiens
ggttccttggttgac

SEQ ID NO: 1455563 - DNA, 15 bp, Homo sapiens
gttccttggttgact

SEQ ID NO: 1455564 - DNA, 15 bp, Homo sapiens
ttccttggttgactt

SEQ ID NO: 1455565 - DNA, 15 bp, Homo sapiens
tccttggttgactta

SEQ ID NO: 1455566 - DNA, 15 bp, Homo sapiens
ccttggttgacttag

SEQ ID NO: 1455567 - DNA, 15 bp, Homo sapiens
cttggttgacttaga

SEQ ID NO: 1455568 - DNA, 15 bp, Homo sapiens
ttggttgacttagaa

SEQ ID NO: 1455569 - DNA, 15 bp, Homo sapiens
tggttgacttagaaa

SEQ ID NO: 1455570 - DNA, 15 bp, Homo sapiens
ggttgacttagaaaa

SEQ ID NO: 1455571 - DNA, 15 bp, Homo sapiens
gttgacttagaaaag

SEQ ID NO: 1455572 - DNA, 15 bp, Homo sapiens
ttgacttagaaaaga

SEQ ID NO: 1455573 - DNA, 15 bp, Homo sapiens
tgacttagaaaagag

SEQ ID NO: 1455574 - DNA, 15 bp, Homo sapiens
gacttagaaaagaga

SEQ ID NO: 1455575 - DNA, 15 bp, Homo sapiens
acttagaaaagagaa

SEQ ID NO: 1455576 - DNA, 15 bp, Homo sapiens
cttagaaaagagaat

SEQ ID NO: 1455577 - DNA, 15 bp, Homo sapiens
ttagaaaagagaatt

SEQ ID NO: 1455578 - DNA, 15 bp, Homo sapiens
tagaaaagagaattg

SEQ ID NO: 1455579 - DNA, 15 bp, Homo sapiens
agaaaagagaattga

SEQ ID NO: 1455580 - DNA, 15 bp, Homo sapiens
gaaaagagaattgat

SEQ ID NO: 1455581 - DNA, 15 bp, Homo sapiens
aaaagagaattgatc

SEQ ID NO: 1455582 - DNA, 15 bp, Homo sapiens
aaagagaattgatct

SEQ ID NO: 1455583 - DNA, 15 bp, Homo sapiens
aagagaattgatctt

SEQ ID NO: 1455584 - DNA, 15 bp, Homo sapiens
agagaattgatcttg

SEQ ID NO: 1455585 - DNA, 15 bp, Homo sapiens
gagaattgatcttgc

SEQ ID NO: 1455586 - DNA, 15 bp, Homo sapiens
agaattgatcttgcc

SEQ ID NO: 1455587 - DNA, 15 bp, Homo sapiens
gaattgatcttgcca

SEQ ID NO: 1455588 - DNA, 15 bp, Homo sapiens
aattgatcttgccat

SEQ ID NO: 1455589 - DNA, 15 bp, Homo sapiens
attgatcttgccatg

SEQ ID NO: 1455590 - DNA, 15 bp, Homo sapiens
ttgatcttgccatgc

SEQ ID NO: 1455591 - DNA, 15 bp, Homo sapiens
tgatcttgccatgca

SEQ ID NO: 1455592 - DNA, 15 bp, Homo sapiens
gatcttgccatgcat

SEQ ID NO: 1455593 - DNA, 15 bp, Homo sapiens
atcttgccatgcatc

SEQ ID NO: 1455594 - DNA, 15 bp, Homo sapiens
tcttgccatgcatcc

SEQ ID NO: 1455595 - DNA, 15 bp, Homo sapiens
cttgccatgcatcca

SEQ ID NO: 1455596 - DNA, 15 bp, Homo sapiens
ttgccatgcatccac

SEQ ID NO: 1455597 - DNA, 15 bp, Homo sapiens
tgccatgcatccacc

SEQ ID NO: 1455598 - DNA, 15 bp, Homo sapiens
gccatgcatccacca

SEQ ID NO: 1455599 - DNA, 15 bp, Homo sapiens
ccatgcatccaccat

SEQ ID NO: 1455600 - DNA, 15 bp, Homo sapiens
catgcatccaccatt

SEQ ID NO: 1455601 - DNA, 15 bp, Homo sapiens
atgcatccaccattt

SEQ ID NO: 1455602 - DNA, 15 bp, Homo sapiens
tgcatccaccatttt

SEQ ID NO: 1455603 - DNA, 15 bp, Homo sapiens
gcatccaccattttc

SEQ ID NO: 1455604 - DNA, 15 bp, Homo sapiens
catccaccattttcc

SEQ ID NO: 1455605 - DNA, 15 bp, Homo sapiens
atccaccattttcct

SEQ ID NO: 1455606 - DNA, 15 bp, Homo sapiens
tccaccattttcctc

SEQ ID NO: 1455607 - DNA, 15 bp, Homo sapiens
ccaccattttcctcc

SEQ ID NO: 1455608 - DNA, 15 bp, Homo sapiens
caccattttcctcct

SEQ ID NO: 1455609 - DNA, 15 bp, Homo sapiens
accattttcctcctt

SEQ ID NO: 1455610 - DNA, 15 bp, Homo sapiens
ccattttcctcctta

SEQ ID NO: 1455611 - DNA, 15 bp, Homo sapiens
cattttcctccttat

SEQ ID NO: 1455612 - DNA, 15 bp, Homo sapiens
attttcctccttatg

SEQ ID NO: 1455613 - DNA, 15 bp, Homo sapiens
ttttcctccttatgt

SEQ ID NO: 1455614 - DNA, 15 bp, Homo sapiens
tttcctccttatgtt

SEQ ID NO: 1455615 - DNA, 15 bp, Homo sapiens
ttcctccttatgttc

SEQ ID NO: 1455616 - DNA, 15 bp, Homo sapiens
tcctccttatgttct

SEQ ID NO: 1455617 - DNA, 15 bp, Homo sapiens
cctccttatgttcta

SEQ ID NO: 1455618 - DNA, 15 bp, Homo sapiens
ctccttatgttctat

SEQ ID NO: 1455619 - DNA, 15 bp, Homo sapiens
tccttatgttctatt

SEQ ID NO: 1455620 - DNA, 15 bp, Homo sapiens
ccttatgttctatta

SEQ ID NO: 1455621 - DNA, 15 bp, Homo sapiens
cttatgttctattag

SEQ ID NO: 1455622 - DNA, 15 bp, Homo sapiens
ttatgttctattagt

SEQ ID NO: 1455623 - DNA, 15 bp, Homo sapiens
tatgttctattagtg

SEQ ID NO: 1455624 - DNA, 15 bp, Homo sapiens
atgttctattagtga

SEQ ID NO: 1455625 - DNA, 15 bp, Homo sapiens
tgttctattagtgac

SEQ ID NO: 1455626 - DNA, 15 bp, Homo sapiens
gttctattagtgacc

SEQ ID NO: 1455627 - DNA, 15 bp, Homo sapiens
ttctattagtgacct

SEQ ID NO: 1455628 - DNA, 15 bp, Homo sapiens
tctattagtgacctt

SEQ ID NO: 1455629 - DNA, 15 bp, Homo sapiens
ctattagtgaccttg

SEQ ID NO: 1455630 - DNA, 15 bp, Homo sapiens
tattagtgaccttgt

SEQ ID NO: 1455631 - DNA, 15 bp, Homo sapiens
attagtgaccttgtt

SEQ ID NO: 1455632 - DNA, 15 bp, Homo sapiens
ttagtgaccttgttt

SEQ ID NO: 1455633 - DNA, 15 bp, Homo sapiens
tagtgaccttgttta

SEQ ID NO: 1455634 - DNA, 15 bp, Homo sapiens
agtgaccttgtttat

SEQ ID NO: 1455635 - DNA, 15 bp, Homo sapiens
gtgaccttgtttatt

SEQ ID NO: 1455636 - DNA, 15 bp, Homo sapiens
tgaccttgtttattg

SEQ ID NO: 1455637 - DNA, 15 bp, Homo sapiens
gaccttgtttattgt

SEQ ID NO: 1455638 - DNA, 15 bp, Homo sapiens
accttgtttattgtc

SEQ ID NO: 1455639 - DNA, 15 bp, Homo sapiens
ccttgtttattgtct

SEQ ID NO: 1455640 - DNA, 15 bp, Homo sapiens
cttgtttattgtctt

SEQ ID NO: 1455641 - DNA, 15 bp, Homo sapiens
ttgtttattgtcttc

SEQ ID NO: 1455642 - DNA, 15 bp, Homo sapiens
tgtttattgtcttct

SEQ ID NO: 1455643 - DNA, 15 bp, Homo sapiens
gtttattgtcttctg

SEQ ID NO: 1455644 - DNA, 15 bp, Homo sapiens
tttattgtcttctgt

SEQ ID NO: 1455645 - DNA, 15 bp, Homo sapiens
ttattgtcttctgta

SEQ ID NO: 1455646 - DNA, 15 bp, Homo sapiens
tattgtcttctgtag

SEQ ID NO: 1455647 - DNA, 15 bp, Homo sapiens
attgtcttctgtagt

SEQ ID NO: 1455648 - DNA, 15 bp, Homo sapiens
ttgtcttctgtagtg

SEQ ID NO: 1455649 - DNA, 15 bp, Homo sapiens
tgtcttctgtagtga

SEQ ID NO: 1455650 - DNA, 15 bp, Homo sapiens
gtcttctgtagtgat

SEQ ID NO: 1455651 - DNA, 15 bp, Homo sapiens
tcttctgtagtgatt

SEQ ID NO: 1455652 - DNA, 15 bp, Homo sapiens
cttctgtagtgatta

SEQ ID NO: 1455653 - DNA, 15 bp, Homo sapiens
ttctgtagtgattaa

SEQ ID NO: 1455654 - DNA, 15 bp, Homo sapiens
tctgtagtgattaag

SEQ ID NO: 1455655 - DNA, 15 bp, Homo sapiens
ctgtagtgattaaga

SEQ ID NO: 1455656 - DNA, 15 bp, Homo sapiens
tgtagtgattaagaa

SEQ ID NO: 1455657 - DNA, 15 bp, Homo sapiens
gtagtgattaagaat

SEQ ID NO: 1455658 - DNA, 15 bp, Homo sapiens
tagtgattaagaata

SEQ ID NO: 1455659 - DNA, 15 bp, Homo sapiens
agtgattaagaatag

SEQ ID NO: 1455660 - DNA, 15 bp, Homo sapiens
gtgattaagaataga

SEQ ID NO: 1455661 - DNA, 15 bp, Homo sapiens
tgattaagaatagaa

SEQ ID NO: 1455662 - DNA, 15 bp, Homo sapiens
gattaagaatagaaa

SEQ ID NO: 1455663 - DNA, 15 bp, Homo sapiens
attaagaatagaaat

SEQ ID NO: 1455664 - DNA, 15 bp, Homo sapiens
ttaagaatagaaatc

SEQ ID NO: 1455665 - DNA, 15 bp, Homo sapiens
taagaatagaaatct

SEQ ID NO: 1455666 - DNA, 15 bp, Homo sapiens
aagaatagaaatctc

SEQ ID NO: 1455667 - DNA, 15 bp, Homo sapiens
agaatagaaatctct

SEQ ID NO: 1455668 - DNA, 15 bp, Homo sapiens
gaatagaaatctctc

SEQ ID NO: 1455669 - DNA, 15 bp, Homo sapiens
aatagaaatctctct

SEQ ID NO: 1455670 - DNA, 15 bp, Homo sapiens
atagaaatctctctt

SEQ ID NO: 1455671 - DNA, 15 bp, Homo sapiens
tagaaatctctcttc

SEQ ID NO: 1455672 - DNA, 15 bp, Homo sapiens
agaaatctctcttcc

SEQ ID NO: 1455673 - DNA, 15 bp, Homo sapiens
gaaatctctcttccc

SEQ ID NO: 1455674 - DNA, 15 bp, Homo sapiens
aaatctctcttcccc

SEQ ID NO: 1455675 - DNA, 15 bp, Homo sapiens
aatctctcttcccca

SEQ ID NO: 1455676 - DNA, 15 bp, Homo sapiens
atctctcttccccat

SEQ ID NO: 1455677 - DNA, 15 bp, Homo sapiens
tctctcttccccatg

SEQ ID NO: 1455678 - DNA, 15 bp, Homo sapiens
ctctcttccccatgt

SEQ ID NO: 1455679 - DNA, 15 bp, Homo sapiens
tctcttccccatgtg

SEQ ID NO: 1455680 - DNA, 15 bp, Homo sapiens
ctcttccccatgtgt

SEQ ID NO: 1455681 - DNA, 15 bp, Homo sapiens
tcttccccatgtgtc

SEQ ID NO: 1455682 - DNA, 15 bp, Homo sapiens
cttccccatgtgtca

SEQ ID NO: 1455683 - DNA, 15 bp, Homo sapiens
ttccccatgtgtcac

SEQ ID NO: 1455684 - DNA, 15 bp, Homo sapiens
tccccatgtgtcaca

SEQ ID NO: 1455685 - DNA, 15 bp, Homo sapiens
ccccatgtgtcacat

SEQ ID NO: 1455686 - DNA, 15 bp, Homo sapiens
cccatgtgtcacata

SEQ ID NO: 1455687 - DNA, 15 bp, Homo sapiens
ccatgtgtcacataa

SEQ ID NO: 1455688 - DNA, 15 bp, Homo sapiens
catgtgtcacataat

SEQ ID NO: 1455689 - DNA, 15 bp, Homo sapiens
atgtgtcacataata

SEQ ID NO: 1455690 - DNA, 15 bp, Homo sapiens
tgtgtcacataatat

SEQ ID NO: 1455691 - DNA, 15 bp, Homo sapiens
gtgtcacataatatt

SEQ ID NO: 1455692 - DNA, 15 bp, Homo sapiens
tgtcacataatattt

SEQ ID NO: 1455693 - DNA, 15 bp, Homo sapiens
gtcacataatattta

SEQ ID NO: 1455694 - DNA, 15 bp, Homo sapiens
tcacataatatttat

SEQ ID NO: 1455695 - DNA, 15 bp, Homo sapiens
cacataatatttatg

SEQ ID NO: 1455696 - DNA, 15 bp, Homo sapiens
acataatatttatgg

SEQ ID NO: 1455697 - DNA, 15 bp, Homo sapiens
cataatatttatgga

SEQ ID NO: 1455698 - DNA, 15 bp, Homo sapiens
ataatatttatggaa

SEQ ID NO: 1455699 - DNA, 15 bp, Homo sapiens
taatatttatggaat

SEQ ID NO: 1455700 - DNA, 15 bp, Homo sapiens
aatatttatggaatt

SEQ ID NO: 1455701 - DNA, 15 bp, Homo sapiens
atatttatggaattt

SEQ ID NO: 1455702 - DNA, 15 bp, Homo sapiens
tatttatggaatttt

SEQ ID NO: 1455703 - DNA, 15 bp, Homo sapiens
atttatggaattttg

SEQ ID NO: 1455704 - DNA, 15 bp, Homo sapiens
tttatggaattttga

SEQ ID NO: 1455705 - DNA, 15 bp, Homo sapiens
ttatggaattttgac

SEQ ID NO: 1455706 - DNA, 15 bp, Homo sapiens
tatggaattttgaca

SEQ ID NO: 1455707 - DNA, 15 bp, Homo sapiens
atggaattttgacaa

SEQ ID NO: 1455708 - DNA, 15 bp, Homo sapiens
tggaattttgacaag

SEQ ID NO: 1455709 - DNA, 15 bp, Homo sapiens
ggaattttgacaaga

SEQ ID NO: 1455710 - DNA, 15 bp, Homo sapiens
gaattttgacaagac

SEQ ID NO: 1455711 - DNA, 15 bp, Homo sapiens
aattttgacaagacc

SEQ ID NO: 1455712 - DNA, 15 bp, Homo sapiens
attttgacaagacct

SEQ ID NO: 1455713 - DNA, 15 bp, Homo sapiens
ttttgacaagacctt

SEQ ID NO: 1455714 - DNA, 15 bp, Homo sapiens
tttgacaagacctta

SEQ ID NO: 1455715 - DNA, 15 bp, Homo sapiens
ttgacaagaccttag

SEQ ID NO: 1455716 - DNA, 15 bp, Homo sapiens
tgacaagaccttagt

SEQ ID NO: 1455717 - DNA, 15 bp, Homo sapiens
gacaagaccttagtg

SEQ ID NO: 1455718 - DNA, 15 bp, Homo sapiens
acaagaccttagtgg

SEQ ID NO: 1455719 - DNA, 15 bp, Homo sapiens
caagaccttagtgga

SEQ ID NO: 1455720 - DNA, 15 bp, Homo sapiens
aagaccttagtggac

SEQ ID NO: 1455721 - DNA, 15 bp, Homo sapiens
agaccttagtggaca

SEQ ID NO: 1455722 - DNA, 15 bp, Homo sapiens
gaccttagtggacaa

SEQ ID NO: 1455723 - DNA, 15 bp, Homo sapiens
accttagtggacaaa

SEQ ID NO: 1455724 - DNA, 15 bp, Homo sapiens
ccttagtggacaaaa

SEQ ID NO: 1455725 - DNA, 15 bp, Homo sapiens
cttagtggacaaaat

SEQ ID NO: 1455726 - DNA, 15 bp, Homo sapiens
ttagtggacaaaatg

SEQ ID NO: 1455727 - DNA, 15 bp, Homo sapiens
tagtggacaaaatgt

SEQ ID NO: 1455728 - DNA, 15 bp, Homo sapiens
agtggacaaaatgtg

SEQ ID NO: 1455729 - DNA, 15 bp, Homo sapiens
gtggacaaaatgtgt

SEQ ID NO: 1455730 - DNA, 15 bp, Homo sapiens
tggacaaaatgtgtc

SEQ ID NO: 1455731 - DNA, 15 bp, Homo sapiens
ggacaaaatgtgtca

SEQ ID NO: 1455732 - DNA, 15 bp, Homo sapiens
gacaaaatgtgtcat

SEQ ID NO: 1455733 - DNA, 15 bp, Homo sapiens
acaaaatgtgtcata

SEQ ID NO: 1455734 - DNA, 15 bp, Homo sapiens
caaaatgtgtcatac

SEQ ID NO: 1455735 - DNA, 15 bp, Homo sapiens
aaaatgtgtcatact

SEQ ID NO: 1455736 - DNA, 15 bp, Homo sapiens
aaatgtgtcatactg

SEQ ID NO: 1455737 - DNA, 15 bp, Homo sapiens
aatgtgtcatactga

SEQ ID NO: 1455738 - DNA, 15 bp, Homo sapiens
atgtgtcatactgaa

SEQ ID NO: 1455739 - DNA, 15 bp, Homo sapiens
tgtgtcatactgaat

SEQ ID NO: 1455740 - DNA, 15 bp, Homo sapiens
gtgtcatactgaatg

SEQ ID NO: 1455741 - DNA, 15 bp, Homo sapiens
tgtcatactgaatga

SEQ ID NO: 1455742 - DNA, 15 bp, Homo sapiens
gtcatactgaatgag

SEQ ID NO: 1455743 - DNA, 15 bp, Homo sapiens
tcatactgaatgagt

SEQ ID NO: 1455744 - DNA, 15 bp, Homo sapiens
catactgaatgagta

SEQ ID NO: 1455745 - DNA, 15 bp, Homo sapiens
atactgaatgagtaa

SEQ ID NO: 1455746 - DNA, 15 bp, Homo sapiens
tactgaatgagtaac

SEQ ID NO: 1455747 - DNA, 15 bp, Homo sapiens
actgaatgagtaaca

SEQ ID NO: 1455748 - DNA, 15 bp, Homo sapiens
ctgaatgagtaacag

SEQ ID NO: 1455749 - DNA, 15 bp, Homo sapiens
tgaatgagtaacagg

SEQ ID NO: 1455750 - DNA, 15 bp, Homo sapiens
gaatgagtaacagga

SEQ ID NO: 1455751 - DNA, 15 bp, Homo sapiens
aatgagtaacaggaa

SEQ ID NO: 1455752 - DNA, 15 bp, Homo sapiens
atgagtaacaggaag

SEQ ID NO: 1455753 - DNA, 15 bp, Homo sapiens
tgagtaacaggaagt

SEQ ID NO: 1455754 - DNA, 15 bp, Homo sapiens
gagtaacaggaagtt

SEQ ID NO: 1455755 - DNA, 15 bp, Homo sapiens
agtaacaggaagttg

SEQ ID NO: 1455756 - DNA, 15 bp, Homo sapiens
gtaacaggaagttga

SEQ ID NO: 1455757 - DNA, 15 bp, Homo sapiens
taacaggaagttgat

SEQ ID NO: 1455758 - DNA, 15 bp, Homo sapiens
aacaggaagttgatg

SEQ ID NO: 1455759 - DNA, 15 bp, Homo sapiens
acaggaagttgatgc

SEQ ID NO: 1455760 - DNA, 15 bp, Homo sapiens
caggaagttgatgca

SEQ ID NO: 1455761 - DNA, 15 bp, Homo sapiens
aggaagttgatgcac

SEQ ID NO: 1455762 - DNA, 15 bp, Homo sapiens
ggaagttgatgcaca

SEQ ID NO: 1455763 - DNA, 15 bp, Homo sapiens
gaagttgatgcacaa

SEQ ID NO: 1455764 - DNA, 15 bp, Homo sapiens
aagttgatgcacaaa

SEQ ID NO: 1455765 - DNA, 15 bp, Homo sapiens
agttgatgcacaaac

SEQ ID NO: 1455766 - DNA, 15 bp, Homo sapiens
gttgatgcacaaaca

SEQ ID NO: 1455767 - DNA, 15 bp, Homo sapiens
ttgatgcacaaacaa

SEQ ID NO: 1455768 - DNA, 15 bp, Homo sapiens
tgatgcacaaacaac

SEQ ID NO: 1455769 - DNA, 15 bp, Homo sapiens
gatgcacaaacaaca

SEQ ID NO: 1455770 - DNA, 15 bp, Homo sapiens
atgcacaaacaacat

SEQ ID NO: 1455771 - DNA, 15 bp, Homo sapiens
tgcacaaacaacatt

SEQ ID NO: 1455772 - DNA, 15 bp, Homo sapiens
gcacaaacaacattc

SEQ ID NO: 1455773 - DNA, 15 bp, Homo sapiens
cacaaacaacattct

SEQ ID NO: 1455774 - DNA, 15 bp, Homo sapiens
acaaacaacattctt

SEQ ID NO: 1455775 - DNA, 15 bp, Homo sapiens
caaacaacattcttg

SEQ ID NO: 1455776 - DNA, 15 bp, Homo sapiens
aaacaacattcttgc

SEQ ID NO: 1455777 - DNA, 15 bp, Homo sapiens
aacaacattcttgca

SEQ ID NO: 1455778 - DNA, 15 bp, Homo sapiens
acaacattcttgcag

SEQ ID NO: 1455779 - DNA, 15 bp, Homo sapiens
caacattcttgcagg

SEQ ID NO: 1455780 - DNA, 15 bp, Homo sapiens
aacattcttgcaggc

SEQ ID NO: 1455781 - DNA, 15 bp, Homo sapiens
acattcttgcaggca

SEQ ID NO: 1455782 - DNA, 15 bp, Homo sapiens
cattcttgcaggcac

SEQ ID NO: 1455783 - DNA, 15 bp, Homo sapiens
attcttgcaggcaca

SEQ ID NO: 1455784 - DNA, 15 bp, Homo sapiens
ttcttgcaggcacag

SEQ ID NO: 1455785 - DNA, 15 bp, Homo sapiens
tcttgcaggcacaga

SEQ ID NO: 1455786 - DNA, 15 bp, Homo sapiens
cttgcaggcacagag

SEQ ID NO: 1455787 - DNA, 15 bp, Homo sapiens
ttgcaggcacagagg

SEQ ID NO: 1455788 - DNA, 15 bp, Homo sapiens
tgcaggcacagagga

SEQ ID NO: 1455789 - DNA, 15 bp, Homo sapiens
gcaggcacagaggaa

SEQ ID NO: 1455790 - DNA, 15 bp, Homo sapiens
caggcacagaggaat

SEQ ID NO: 1455791 - DNA, 15 bp, Homo sapiens
aggcacagaggaata

SEQ ID NO: 1455792 - DNA, 15 bp, Homo sapiens
ggcacagaggaatag

SEQ ID NO: 1455793 - DNA, 15 bp, Homo sapiens
gcacagaggaatagg

SEQ ID NO: 1455794 - DNA, 15 bp, Homo sapiens
cacagaggaataggt

SEQ ID NO: 1455795 - DNA, 15 bp, Homo sapiens
acagaggaataggtc

SEQ ID NO: 1455796 - DNA, 15 bp, Homo sapiens
cagaggaataggtca

SEQ ID NO: 1455797 - DNA, 15 bp, Homo sapiens
agaggaataggtcat

SEQ ID NO: 1455798 - DNA, 15 bp, Homo sapiens
gaggaataggtcatt

SEQ ID NO: 1455799 - DNA, 15 bp, Homo sapiens
aggaataggtcattt

SEQ ID NO: 1455800 - DNA, 15 bp, Homo sapiens
ggaataggtcattta

SEQ ID NO: 1455801 - DNA, 15 bp, Homo sapiens
gaataggtcatttac

SEQ ID NO: 1455802 - DNA, 15 bp, Homo sapiens
aataggtcatttact

SEQ ID NO: 1455803 - DNA, 15 bp, Homo sapiens
ataggtcatttactt

SEQ ID NO: 1455804 - DNA, 15 bp, Homo sapiens
taggtcatttacttg

SEQ ID NO: 1455805 - DNA, 15 bp, Homo sapiens
aggtcatttacttgt

SEQ ID NO: 1455806 - DNA, 15 bp, Homo sapiens
ggtcatttacttgta

SEQ ID NO: 1455807 - DNA, 15 bp, Homo sapiens
gtcatttacttgtat

SEQ ID NO: 1455808 - DNA, 15 bp, Homo sapiens
tcatttacttgtata

SEQ ID NO: 1455809 - DNA, 15 bp, Homo sapiens
catttacttgtatat

SEQ ID NO: 1455810 - DNA, 15 bp, Homo sapiens
atttacttgtatatg

SEQ ID NO: 1455811 - DNA, 15 bp, Homo sapiens
tttacttgtatatga

SEQ ID NO: 1455812 - DNA, 15 bp, Homo sapiens
ttacttgtatatgat

SEQ ID NO: 1455813 - DNA, 15 bp, Homo sapiens
tacttgtatatgatc

SEQ ID NO: 1455814 - DNA, 15 bp, Homo sapiens
acttgtatatgatca

SEQ ID NO: 1455815 - DNA, 15 bp, Homo sapiens
cttgtatatgatcat

SEQ ID NO: 1455816 - DNA, 15 bp, Homo sapiens
ttgtatatgatcatt

SEQ ID NO: 1455817 - DNA, 15 bp, Homo sapiens
tgtatatgatcattg

SEQ ID NO: 1455818 - DNA, 15 bp, Homo sapiens
gtatatgatcattgt

SEQ ID NO: 1455819 - DNA, 15 bp, Homo sapiens
tatatgatcattgtc

SEQ ID NO: 1455820 - DNA, 15 bp, Homo sapiens
atatgatcattgtca

SEQ ID NO: 1455821 - DNA, 15 bp, Homo sapiens
tatgatcattgtcaa

SEQ ID NO: 1455822 - DNA, 15 bp, Homo sapiens
atgatcattgtcaat

SEQ ID NO: 1455823 - DNA, 15 bp, Homo sapiens
tgatcattgtcaatc

SEQ ID NO: 1455824 - DNA, 15 bp, Homo sapiens
gatcattgtcaatca

SEQ ID NO: 1455825 - DNA, 15 bp, Homo sapiens
atcattgtcaatcaa

SEQ ID NO: 1455826 - DNA, 15 bp, Homo sapiens
tcattgtcaatcaat

SEQ ID NO: 1455827 - DNA, 15 bp, Homo sapiens
cattgtcaatcaatc

SEQ ID NO: 1455828 - DNA, 15 bp, Homo sapiens
attgtcaatcaatca

SEQ ID NO: 1455829 - DNA, 15 bp, Homo sapiens
ttgtcaatcaatcat

SEQ ID NO: 1455830 - DNA, 15 bp, Homo sapiens
tgtcaatcaatcatt

SEQ ID NO: 1455831 - DNA, 15 bp, Homo sapiens
gtcaatcaatcattg

SEQ ID NO: 1455832 - DNA, 15 bp, Homo sapiens
tcaatcaatcattgt

SEQ ID NO: 1455833 - DNA, 15 bp, Homo sapiens
caatcaatcattgtc

SEQ ID NO: 1455834 - DNA, 15 bp, Homo sapiens
aatcaatcattgtcc

SEQ ID NO: 1455835 - DNA, 15 bp, Homo sapiens
atcaatcattgtcca

SEQ ID NO: 1455836 - DNA, 15 bp, Homo sapiens
tcaatcattgtccag

SEQ ID NO: 1455837 - DNA, 15 bp, Homo sapiens
caatcattgtccagt

SEQ ID NO: 1455838 - DNA, 15 bp, Homo sapiens
aatcattgtccagtt

SEQ ID NO: 1455839 - DNA, 15 bp, Homo sapiens
atcattgtccagttg

SEQ ID NO: 1455840 - DNA, 15 bp, Homo sapiens
tcattgtccagttgg

SEQ ID NO: 1455841 - DNA, 15 bp, Homo sapiens
cattgtccagttgga

SEQ ID NO: 1455842 - DNA, 15 bp, Homo sapiens
attgtccagttggac

SEQ ID NO: 1455843 - DNA, 15 bp, Homo sapiens
ttgtccagttggacc

SEQ ID NO: 1455844 - DNA, 15 bp, Homo sapiens
tgtccagttggaccc

SEQ ID NO: 1455845 - DNA, 15 bp, Homo sapiens
gtccagttggacccc

SEQ ID NO: 1455846 - DNA, 15 bp, Homo sapiens
tccagttggaccccg

SEQ ID NO: 1455847 - DNA, 15 bp, Homo sapiens
ccagttggaccccga

SEQ ID NO: 1455848 - DNA, 15 bp, Homo sapiens
cagttggaccccgat

SEQ ID NO: 1455849 - DNA, 15 bp, Homo sapiens
agttggaccccgatt

SEQ ID NO: 1455850 - DNA, 15 bp, Homo sapiens
gttggaccccgattc

SEQ ID NO: 1455851 - DNA, 15 bp, Homo sapiens
ttggaccccgattca

SEQ ID NO: 1455852 - DNA, 15 bp, Homo sapiens
tggaccccgattcag

SEQ ID NO: 1455853 - DNA, 15 bp, Homo sapiens
ggaccccgattcagt

SEQ ID NO: 1455854 - DNA, 15 bp, Homo sapiens
gaccccgattcagtt

SEQ ID NO: 1455855 - DNA, 15 bp, Homo sapiens
accccgattcagttt

SEQ ID NO: 1455856 - DNA, 15 bp, Homo sapiens
ccccgattcagttta

SEQ ID NO: 1455857 - DNA, 15 bp, Homo sapiens
cccgattcagtttat

SEQ ID NO: 1455858 - DNA, 15 bp, Homo sapiens
ccgattcagtttatt

SEQ ID NO: 1455859 - DNA, 15 bp, Homo sapiens
cgattcagtttattt

SEQ ID NO: 1455860 - DNA, 15 bp, Homo sapiens
gattcagtttatttt

SEQ ID NO: 1455861 - DNA, 15 bp, Homo sapiens
attcagtttattttt

SEQ ID NO: 1455862 - DNA, 15 bp, Homo sapiens
ttcagtttatttttt

SEQ ID NO: 1455863 - DNA, 15 bp, Homo sapiens
tcagtttattttttg

SEQ ID NO: 1455864 - DNA, 15 bp, Homo sapiens
cagtttattttttgt

SEQ ID NO: 1455865 - DNA, 15 bp, Homo sapiens
agtttattttttgtt

SEQ ID NO: 1455866 - DNA, 15 bp, Homo sapiens
gtttattttttgttt

SEQ ID NO: 1455867 - DNA, 15 bp, Homo sapiens
tttattttttgtttt

SEQ ID NO: 1455868 - DNA, 15 bp, Homo sapiens
ttattttttgttttg

SEQ ID NO: 1455869 - DNA, 15 bp, Homo sapiens
attttttgttttgtt

SEQ ID NO: 1455870 - DNA, 15 bp, Homo sapiens
tttgttttgtttttc

SEQ ID NO: 1455871 - DNA, 15 bp, Homo sapiens
ttgttttgtttttct

SEQ ID NO: 1455872 - DNA, 15 bp, Homo sapiens
tgttttgtttttctc

SEQ ID NO: 1455873 - DNA, 15 bp, Homo sapiens
gttttgtttttctcc

SEQ ID NO: 1455874 - DNA, 15 bp, Homo sapiens
ttttgtttttctcct

SEQ ID NO: 1455875 - DNA, 15 bp, Homo sapiens
tttgtttttctcctt

SEQ ID NO: 1455876 - DNA, 15 bp, Homo sapiens
ttgtttttctccttt

SEQ ID NO: 1455877 - DNA, 15 bp, Homo sapiens
tgtttttctcctttt

SEQ ID NO: 1455878 - DNA, 15 bp, Homo sapiens
gtttttctccttttc

SEQ ID NO: 1455879 - DNA, 15 bp, Homo sapiens
tttttctccttttca

SEQ ID NO: 1455880 - DNA, 15 bp, Homo sapiens
ttttctccttttcac

SEQ ID NO: 1455881 - DNA, 15 bp, Homo sapiens
tttctccttttcaca

SEQ ID NO: 1455882 - DNA, 15 bp, Homo sapiens
ttctccttttcacag

SEQ ID NO: 1455883 - DNA, 15 bp, Homo sapiens
tctccttttcacaga

SEQ ID NO: 1455884 - DNA, 15 bp, Homo sapiens
ctccttttcacagat

SEQ ID NO: 1455885 - DNA, 15 bp, Homo sapiens
tccttttcacagatt

SEQ ID NO: 1455886 - DNA, 15 bp, Homo sapiens
ccttttcacagattc

SEQ ID NO: 1455887 - DNA, 15 bp, Homo sapiens
cttttcacagattct

SEQ ID NO: 1455888 - DNA, 15 bp, Homo sapiens
ttttcacagattcta

SEQ ID NO: 1455889 - DNA, 15 bp, Homo sapiens
tttcacagattctat

SEQ ID NO: 1455890 - DNA, 15 bp, Homo sapiens
ttcacagattctatc

SEQ ID NO: 1455891 - DNA, 15 bp, Homo sapiens
tcacagattctatcc

SEQ ID NO: 1455892 - DNA, 15 bp, Homo sapiens
cacagattctatcca

SEQ ID NO: 1455893 - DNA, 15 bp, Homo sapiens
acagattctatccac

SEQ ID NO: 1455894 - DNA, 15 bp, Homo sapiens
cagattctatccact

SEQ ID NO: 1455895 - DNA, 15 bp, Homo sapiens
agattctatccacta

SEQ ID NO: 1455896 - DNA, 15 bp, Homo sapiens
gattctatccactaa

SEQ ID NO: 1455897 - DNA, 15 bp, Homo sapiens
attctatccactaat

SEQ ID NO: 1455898 - DNA, 15 bp, Homo sapiens
ttctatccactaatt

SEQ ID NO: 1455899 - DNA, 15 bp, Homo sapiens
tctatccactaattt

SEQ ID NO: 1455900 - DNA, 15 bp, Homo sapiens
ctatccactaatttt

SEQ ID NO: 1455901 - DNA, 15 bp, Homo sapiens
tatccactaatttta

SEQ ID NO: 1455902 - DNA, 15 bp, Homo sapiens
atccactaattttaa

SEQ ID NO: 1455903 - DNA, 15 bp, Homo sapiens
tccactaattttaat

SEQ ID NO: 1455904 - DNA, 15 bp, Homo sapiens
ccactaattttaatc

SEQ ID NO: 1455905 - DNA, 15 bp, Homo sapiens
cactaattttaatct

SEQ ID NO: 1455906 - DNA, 15 bp, Homo sapiens
actaattttaatctt

SEQ ID NO: 1455907 - DNA, 15 bp, Homo sapiens
ctaattttaatcttt

SEQ ID NO: 1455908 - DNA, 15 bp, Homo sapiens
taattttaatcttta

SEQ ID NO: 1455909 - DNA, 15 bp, Homo sapiens
aattttaatctttat

SEQ ID NO: 1455910 - DNA, 15 bp, Homo sapiens
attttaatctttatt

SEQ ID NO: 1455911 - DNA, 15 bp, Homo sapiens
ttttaatctttattt

SEQ ID NO: 1455912 - DNA, 15 bp, Homo sapiens
tttaatctttatttt

SEQ ID NO: 1455913 - DNA, 15 bp, Homo sapiens
ttaatctttattttt

SEQ ID NO: 1455914 - DNA, 15 bp, Homo sapiens
taatctttatttttc

SEQ ID NO: 1455915 - DNA, 15 bp, Homo sapiens
aatctttatttttca

SEQ ID NO: 1455916 - DNA, 15 bp, Homo sapiens
atctttatttttcag

SEQ ID NO: 1455917 - DNA, 15 bp, Homo sapiens
tctttatttttcaga

SEQ ID NO: 1455918 - DNA, 15 bp, Homo sapiens
ctttatttttcagaa

SEQ ID NO: 1455919 - DNA, 15 bp, Homo sapiens
tttatttttcagaaa

SEQ ID NO: 1455920 - DNA, 15 bp, Homo sapiens
ttatttttcagaaaa

SEQ ID NO: 1455921 - DNA, 15 bp, Homo sapiens
tatttttcagaaaaa

SEQ ID NO: 1455922 - DNA, 15 bp, Homo sapiens
atttttcagaaaaaa

SEQ ID NO: 1455923 - DNA, 15 bp, Homo sapiens
tttttcagaaaaaaa

SEQ ID NO: 1455924 - DNA, 15 bp, Homo sapiens
ttttcagaaaaaaat

SEQ ID NO: 1455925 - DNA, 15 bp, Homo sapiens
tttcagaaaaaaatg

SEQ ID NO: 1455926 - DNA, 15 bp, Homo sapiens
ttcagaaaaaaatgc

SEQ ID NO: 1455927 - DNA, 15 bp, Homo sapiens
tcagaaaaaaatgct

SEQ ID NO: 1455928 - DNA, 15 bp, Homo sapiens
cagaaaaaaatgctt

SEQ ID NO: 1455929 - DNA, 15 bp, Homo sapiens
agaaaaaaatgcttt

SEQ ID NO: 1455930 - DNA, 15 bp, Homo sapiens
gaaaaaaatgcttta

SEQ ID NO: 1455931 - DNA, 15 bp, Homo sapiens
aaaaaaatgctttat

SEQ ID NO: 1455932 - DNA, 15 bp, Homo sapiens
aaaaaatgctttatc

SEQ ID NO: 1455933 - DNA, 15 bp, Homo sapiens
aaaaatgctttatct

SEQ ID NO: 1455934 - DNA, 15 bp, Homo sapiens
aaaatgctttatctt

SEQ ID NO: 1455935 - DNA, 15 bp, Homo sapiens
aaatgctttatctta

SEQ ID NO: 1455936 - DNA, 15 bp, Homo sapiens
aatgctttatcttat

SEQ ID NO: 1455937 - DNA, 15 bp, Homo sapiens
atgctttatcttatt

SEQ ID NO: 1455938 - DNA, 15 bp, Homo sapiens
tgctttatcttattg

SEQ ID NO: 1455939 - DNA, 15 bp, Homo sapiens
gctttatcttattga

SEQ ID NO: 1455940 - DNA, 15 bp, Homo sapiens
ctttatcttattgaa

SEQ ID NO: 1455941 - DNA, 15 bp, Homo sapiens
tttatcttattgaac

SEQ ID NO: 1455942 - DNA, 15 bp, Homo sapiens
ttatcttattgaacc

SEQ ID NO: 1455943 - DNA, 15 bp, Homo sapiens
tatcttattgaacct

SEQ ID NO: 1455944 - DNA, 15 bp, Homo sapiens
atcttattgaacctc

SEQ ID NO: 1455945 - DNA, 15 bp, Homo sapiens
tcttattgaacctca

SEQ ID NO: 1455946 - DNA, 15 bp, Homo sapiens
cttattgaacctcag

SEQ ID NO: 1455947 - DNA, 15 bp, Homo sapiens
ttattgaacctcaga

SEQ ID NO: 1455948 - DNA, 15 bp, Homo sapiens
tattgaacctcagac

SEQ ID NO: 1455949 - DNA, 15 bp, Homo sapiens
attgaacctcagacc

SEQ ID NO: 1455950 - DNA, 15 bp, Homo sapiens
ttgaacctcagacca

SEQ ID NO: 1455951 - DNA, 15 bp, Homo sapiens
tgaacctcagaccaa

SEQ ID NO: 1455952 - DNA, 15 bp, Homo sapiens
gaacctcagaccaaa

SEQ ID NO: 1455953 - DNA, 15 bp, Homo sapiens
aacctcagaccaaac

SEQ ID NO: 1455954 - DNA, 15 bp, Homo sapiens
acctcagaccaaaca

SEQ ID NO: 1455955 - DNA, 15 bp, Homo sapiens
cctcagaccaaacac

SEQ ID NO: 1455956 - DNA, 15 bp, Homo sapiens
ctcagaccaaacact

SEQ ID NO: 1455957 - DNA, 15 bp, Homo sapiens
tcagaccaaacactt

SEQ ID NO: 1455958 - DNA, 15 bp, Homo sapiens
cagaccaaacacttt

SEQ ID NO: 1455959 - DNA, 15 bp, Homo sapiens
agaccaaacactttg

SEQ ID NO: 1455960 - DNA, 15 bp, Homo sapiens
gaccaaacactttgt

SEQ ID NO: 1455961 - DNA, 15 bp, Homo sapiens
accaaacactttgtt

SEQ ID NO: 1455962 - DNA, 15 bp, Homo sapiens
ccaaacactttgttt

SEQ ID NO: 1455963 - DNA, 15 bp, Homo sapiens
caaacactttgtttt

SEQ ID NO: 1455964 - DNA, 15 bp, Homo sapiens
aaacactttgttttt

SEQ ID NO: 1455965 - DNA, 15 bp, Homo sapiens
aacactttgtttttc

SEQ ID NO: 1455966 - DNA, 15 bp, Homo sapiens
acactttgtttttcg

SEQ ID NO: 1455967 - DNA, 15 bp, Homo sapiens
cactttgtttttcga

SEQ ID NO: 1455968 - DNA, 15 bp, Homo sapiens
actttgtttttcgat

SEQ ID NO: 1455969 - DNA, 15 bp, Homo sapiens
ctttgtttttcgatg

SEQ ID NO: 1455970 - DNA, 15 bp, Homo sapiens
tttgtttttcgatgc

SEQ ID NO: 1455971 - DNA, 15 bp, Homo sapiens
ttgtttttcgatgca

SEQ ID NO: 1455972 - DNA, 15 bp, Homo sapiens
tgtttttcgatgcag

SEQ ID NO: 1455973 - DNA, 15 bp, Homo sapiens
gtttttcgatgcaga

SEQ ID NO: 1455974 - DNA, 15 bp, Homo sapiens
tttttcgatgcagac

SEQ ID NO: 1455975 - DNA, 15 bp, Homo sapiens
ttttcgatgcagact

SEQ ID NO: 1455976 - DNA, 15 bp, Homo sapiens
tttcgatgcagactg

SEQ ID NO: 1455977 - DNA, 15 bp, Homo sapiens
ttcgatgcagactga

SEQ ID NO: 1455978 - DNA, 15 bp, Homo sapiens
tcgatgcagactgag

SEQ ID NO: 1455979 - DNA, 15 bp, Homo sapiens
cgatgcagactgagt

SEQ ID NO: 1455980 - DNA, 15 bp, Homo sapiens
gatgcagactgagtt

SEQ ID NO: 1455981 - DNA, 15 bp, Homo sapiens
atgcagactgagtta

SEQ ID NO: 1455982 - DNA, 15 bp, Homo sapiens
tgcagactgagttat

SEQ ID NO: 1455983 - DNA, 15 bp, Homo sapiens
gcagactgagttatg

SEQ ID NO: 1455984 - DNA, 15 bp, Homo sapiens
cagactgagttatgt

SEQ ID NO: 1455985 - DNA, 15 bp, Homo sapiens
agactgagttatgtt

SEQ ID NO: 1455986 - DNA, 15 bp, Homo sapiens
gactgagttatgttt

SEQ ID NO: 1455987 - DNA, 15 bp, Homo sapiens
actgagttatgttta

SEQ ID NO: 1455988 - DNA, 15 bp, Homo sapiens
ctgagttatgtttaa

SEQ ID NO: 1455989 - DNA, 15 bp, Homo sapiens
tgagttatgtttaag

SEQ ID NO: 1455990 - DNA, 15 bp, Homo sapiens
gagttatgtttaagg

SEQ ID NO: 1455991 - DNA, 15 bp, Homo sapiens
agttatgtttaaggc

SEQ ID NO: 1455992 - DNA, 15 bp, Homo sapiens
gttatgtttaaggct

SEQ ID NO: 1455993 - DNA, 15 bp, Homo sapiens
ttatgtttaaggcta

SEQ ID NO: 1455994 - DNA, 15 bp, Homo sapiens
tatgtttaaggctac

SEQ ID NO: 1455995 - DNA, 15 bp, Homo sapiens
atgtttaaggctaca

SEQ ID NO: 1455996 - DNA, 15 bp, Homo sapiens
tgtttaaggctacat

SEQ ID NO: 1455997 - DNA, 15 bp, Homo sapiens
gtttaaggctacatg

SEQ ID NO: 1455998 - DNA, 15 bp, Homo sapiens
tttaaggctacatga

SEQ ID NO: 1455999 - DNA, 15 bp, Homo sapiens
ttaaggctacatgaa

SEQ ID NO: 1456000 - DNA, 15 bp, Homo sapiens
taaggctacatgaac

SEQ ID NO: 1456001 - DNA, 15 bp, Homo sapiens
aaggctacatgaacc

SEQ ID NO: 1456002 - DNA, 15 bp, Homo sapiens
aggctacatgaaccc

SEQ ID NO: 1456003 - DNA, 15 bp, Homo sapiens
ggctacatgaacccc

SEQ ID NO: 1456004 - DNA, 15 bp, Homo sapiens
gctacatgaacccca

SEQ ID NO: 1456005 - DNA, 15 bp, Homo sapiens
ctacatgaaccccag

SEQ ID NO: 1456006 - DNA, 15 bp, Homo sapiens
tacatgaaccccaga

SEQ ID NO: 1456007 - DNA, 15 bp, Homo sapiens
acatgaaccccagac

SEQ ID NO: 1456008 - DNA, 15 bp, Homo sapiens
catgaaccccagact

SEQ ID NO: 1456009 - DNA, 15 bp, Homo sapiens
atgaaccccagacta

SEQ ID NO: 1456010 - DNA, 15 bp, Homo sapiens
tgaaccccagactag

SEQ ID NO: 1456011 - DNA, 15 bp, Homo sapiens
gaaccccagactagt

SEQ ID NO: 1456012 - DNA, 15 bp, Homo sapiens
aaccccagactagtt

SEQ ID NO: 1456013 - DNA, 15 bp, Homo sapiens
accccagactagttg

SEQ ID NO: 1456014 - DNA, 15 bp, Homo sapiens
ccccagactagttgt

SEQ ID NO: 1456015 - DNA, 15 bp, Homo sapiens
cccagactagttgtt

SEQ ID NO: 1456016 - DNA, 15 bp, Homo sapiens
ccagactagttgttt

SEQ ID NO: 1456017 - DNA, 15 bp, Homo sapiens
cagactagttgtttg

SEQ ID NO: 1456018 - DNA, 15 bp, Homo sapiens
agactagttgtttgc

SEQ ID NO: 1456019 - DNA, 15 bp, Homo sapiens
gactagttgtttgct

SEQ ID NO: 1456020 - DNA, 15 bp, Homo sapiens
actagttgtttgctg

SEQ ID NO: 1456021 - DNA, 15 bp, Homo sapiens
ctagttgtttgctgc

SEQ ID NO: 1456022 - DNA, 15 bp, Homo sapiens
tagttgtttgctgct

SEQ ID NO: 1456023 - DNA, 15 bp, Homo sapiens
agttgtttgctgctc

SEQ ID NO: 1456024 - DNA, 15 bp, Homo sapiens
gttgtttgctgctcc

SEQ ID NO: 1456025 - DNA, 15 bp, Homo sapiens
ttgtttgctgctcct

SEQ ID NO: 1456026 - DNA, 15 bp, Homo sapiens
tgtttgctgctccta

SEQ ID NO: 1456027 - DNA, 15 bp, Homo sapiens
gtttgctgctcctaa

SEQ ID NO: 1456028 - DNA, 15 bp, Homo sapiens
tttgctgctcctaaa

SEQ ID NO: 1456029 - DNA, 15 bp, Homo sapiens
ttgctgctcctaaaa

SEQ ID NO: 1456030 - DNA, 15 bp, Homo sapiens
tgctgctcctaaaac

SEQ ID NO: 1456031 - DNA, 15 bp, Homo sapiens
gctgctcctaaaacc

SEQ ID NO: 1456032 - DNA, 15 bp, Homo sapiens
ctgctcctaaaacct

SEQ ID NO: 1456033 - DNA, 15 bp, Homo sapiens
tgctcctaaaacctt

SEQ ID NO: 1456034 - DNA, 15 bp, Homo sapiens
gctcctaaaaccttc

SEQ ID NO: 1456035 - DNA, 15 bp, Homo sapiens
ctcctaaaaccttcc

SEQ ID NO: 1456036 - DNA, 15 bp, Homo sapiens
tcctaaaaccttccc

SEQ ID NO: 1456037 - DNA, 15 bp, Homo sapiens
cctaaaaccttccct

SEQ ID NO: 1456038 - DNA, 15 bp, Homo sapiens
ctaaaaccttccctg

SEQ ID NO: 1456039 - DNA, 15 bp, Homo sapiens
taaaaccttccctgt

SEQ ID NO: 1456040 - DNA, 15 bp, Homo sapiens
aaaaccttccctgtt

SEQ ID NO: 1456041 - DNA, 15 bp, Homo sapiens
aaaccttccctgttc

SEQ ID NO: 1456042 - DNA, 15 bp, Homo sapiens
aaccttccctgttcc

SEQ ID NO: 1456043 - DNA, 15 bp, Homo sapiens
accttccctgttcct

SEQ ID NO: 1456044 - DNA, 15 bp, Homo sapiens
ccttccctgttcctc

SEQ ID NO: 1456045 - DNA, 15 bp, Homo sapiens
cttccctgttcctca

SEQ ID NO: 1456046 - DNA, 15 bp, Homo sapiens
ttccctgttcctcat

SEQ ID NO: 1456047 - DNA, 15 bp, Homo sapiens
tccctgttcctcata

SEQ ID NO: 1456048 - DNA, 15 bp, Homo sapiens
ccctgttcctcataa

SEQ ID NO: 1456049 - DNA, 15 bp, Homo sapiens
cctgttcctcataat

SEQ ID NO: 1456050 - DNA, 15 bp, Homo sapiens
ctgttcctcataatc

SEQ ID NO: 1456051 - DNA, 15 bp, Homo sapiens
tgttcctcataatca

SEQ ID NO: 1456052 - DNA, 15 bp, Homo sapiens
gttcctcataatcaa

SEQ ID NO: 1456053 - DNA, 15 bp, Homo sapiens
ttcctcataatcaag

SEQ ID NO: 1456054 - DNA, 15 bp, Homo sapiens
tcctcataatcaagt

SEQ ID NO: 1456055 - DNA, 15 bp, Homo sapiens
cctcataatcaagta

SEQ ID NO: 1456056 - DNA, 15 bp, Homo sapiens
ctcataatcaagtaa

SEQ ID NO: 1456057 - DNA, 15 bp, Homo sapiens
tcataatcaagtaaa

SEQ ID NO: 1456058 - DNA, 15 bp, Homo sapiens
cataatcaagtaaac

SEQ ID NO: 1456059 - DNA, 15 bp, Homo sapiens
ataatcaagtaaaca

SEQ ID NO: 1456060 - DNA, 15 bp, Homo sapiens
taatcaagtaaacag

SEQ ID NO: 1456061 - DNA, 15 bp, Homo sapiens
aatcaagtaaacagg

SEQ ID NO: 1456062 - DNA, 15 bp, Homo sapiens
atcaagtaaacaggt

SEQ ID NO: 1456063 - DNA, 15 bp, Homo sapiens
tcaagtaaacaggtc

SEQ ID NO: 1456064 - DNA, 15 bp, Homo sapiens
caagtaaacaggtct

SEQ ID NO: 1456065 - DNA, 15 bp, Homo sapiens
aagtaaacaggtctc

SEQ ID NO: 1456066 - DNA, 15 bp, Homo sapiens
agtaaacaggtctcc

SEQ ID NO: 1456067 - DNA, 15 bp, Homo sapiens
gtaaacaggtctccc

SEQ ID NO: 1456068 - DNA, 15 bp, Homo sapiens
taaacaggtctccct

SEQ ID NO: 1456069 - DNA, 15 bp, Homo sapiens
aaacaggtctccctt

SEQ ID NO: 1456070 - DNA, 15 bp, Homo sapiens
aacaggtctcccttc

SEQ ID NO: 1456071 - DNA, 15 bp, Homo sapiens
acaggtctcccttct

SEQ ID NO: 1456072 - DNA, 15 bp, Homo sapiens
caggtctcccttctt

SEQ ID NO: 1456073 - DNA, 15 bp, Homo sapiens
aggtctcccttctta

SEQ ID NO: 1456074 - DNA, 15 bp, Homo sapiens
ggtctcccttcttag

SEQ ID NO: 1456075 - DNA, 15 bp, Homo sapiens
gtctcccttcttaga

SEQ ID NO: 1456076 - DNA, 15 bp, Homo sapiens
tctcccttcttagaa

SEQ ID NO: 1456077 - DNA, 15 bp, Homo sapiens
ctcccttcttagaag

SEQ ID NO: 1456078 - DNA, 15 bp, Homo sapiens
tcccttcttagaagt

SEQ ID NO: 1456079 - DNA, 15 bp, Homo sapiens
cccttcttagaagta

SEQ ID NO: 1456080 - DNA, 15 bp, Homo sapiens
ccttcttagaagtat

SEQ ID NO: 1456081 - DNA, 15 bp, Homo sapiens
cttcttagaagtatt

SEQ ID NO: 1456082 - DNA, 15 bp, Homo sapiens
ttcttagaagtattt

SEQ ID NO: 1456083 - DNA, 15 bp, Homo sapiens
tcttagaagtatttg

SEQ ID NO: 1456084 - DNA, 15 bp, Homo sapiens
cttagaagtatttga

SEQ ID NO: 1456085 - DNA, 15 bp, Homo sapiens
ttagaagtatttgat

SEQ ID NO: 1456086 - DNA, 15 bp, Homo sapiens
tagaagtatttgatc

SEQ ID NO: 1456087 - DNA, 15 bp, Homo sapiens
agaagtatttgatct

SEQ ID NO: 1456088 - DNA, 15 bp, Homo sapiens
gaagtatttgatctt

SEQ ID NO: 1456089 - DNA, 15 bp, Homo sapiens
aagtatttgatcttc

SEQ ID NO: 1456090 - DNA, 15 bp, Homo sapiens
agtatttgatcttca

SEQ ID NO: 1456091 - DNA, 15 bp, Homo sapiens
gtatttgatcttcaa

SEQ ID NO: 1456092 - DNA, 15 bp, Homo sapiens
tatttgatcttcaaa

SEQ ID NO: 1456093 - DNA, 15 bp, Homo sapiens
atttgatcttcaaaa

SEQ ID NO: 1456094 - DNA, 15 bp, Homo sapiens
tttgatcttcaaaat

SEQ ID NO: 1456095 - DNA, 15 bp, Homo sapiens
ttgatcttcaaaatt

SEQ ID NO: 1456096 - DNA, 15 bp, Homo sapiens
tgatcttcaaaattg

SEQ ID NO: 1456097 - DNA, 15 bp, Homo sapiens
gatcttcaaaattgc

SEQ ID NO: 1456098 - DNA, 15 bp, Homo sapiens
atcttcaaaattgcc

SEQ ID NO: 1456099 - DNA, 15 bp, Homo sapiens
tcttcaaaattgccc

SEQ ID NO: 1456100 - DNA, 15 bp, Homo sapiens
cttcaaaattgccct

SEQ ID NO: 1456101 - DNA, 15 bp, Homo sapiens
ttcaaaattgccctg

SEQ ID NO: 1456102 - DNA, 15 bp, Homo sapiens
tcaaaattgccctgt

SEQ ID NO: 1456103 - DNA, 15 bp, Homo sapiens
caaaattgccctgtg

SEQ ID NO: 1456104 - DNA, 15 bp, Homo sapiens
aaaattgccctgtgg

SEQ ID NO: 1456105 - DNA, 15 bp, Homo sapiens
aaattgccctgtggt

SEQ ID NO: 1456106 - DNA, 15 bp, Homo sapiens
aattgccctgtggta

SEQ ID NO: 1456107 - DNA, 15 bp, Homo sapiens
attgccctgtggtat

SEQ ID NO: 1456108 - DNA, 15 bp, Homo sapiens
ttgccctgtggtata

SEQ ID NO: 1456109 - DNA, 15 bp, Homo sapiens
tgccctgtggtataa

SEQ ID NO: 1456110 - DNA, 15 bp, Homo sapiens
gccctgtggtataaa

SEQ ID NO: 1456111 - DNA, 15 bp, Homo sapiens
ccctgtggtataaat

SEQ ID NO: 1456112 - DNA, 15 bp, Homo sapiens
cctgtggtataaata

SEQ ID NO: 1456113 - DNA, 15 bp, Homo sapiens
ctgtggtataaatag

SEQ ID NO: 1456114 - DNA, 15 bp, Homo sapiens
tgtggtataaatagg

SEQ ID NO: 1456115 - DNA, 15 bp, Homo sapiens
gtggtataaataggg

SEQ ID NO: 1456116 - DNA, 15 bp, Homo sapiens
tggtataaatagggc

SEQ ID NO: 1456117 - DNA, 15 bp, Homo sapiens
ggtataaatagggca

SEQ ID NO: 1456118 - DNA, 15 bp, Homo sapiens
gtataaatagggcag

SEQ ID NO: 1456119 - DNA, 15 bp, Homo sapiens
tataaatagggcagg

SEQ ID NO: 1456120 - DNA, 15 bp, Homo sapiens
ataaatagggcagga

SEQ ID NO: 1456121 - DNA, 15 bp, Homo sapiens
taaatagggcaggaa

SEQ ID NO: 1456122 - DNA, 15 bp, Homo sapiens
aaatagggcaggaat

SEQ ID NO: 1456123 - DNA, 15 bp, Homo sapiens
aatagggcaggaatt

SEQ ID NO: 1456124 - DNA, 15 bp, Homo sapiens
atagggcaggaatta

SEQ ID NO: 1456125 - DNA, 15 bp, Homo sapiens
tagggcaggaattat

SEQ ID NO: 1456126 - DNA, 15 bp, Homo sapiens
agggcaggaattatt

SEQ ID NO: 1456127 - DNA, 15 bp, Homo sapiens
gggcaggaattatta

SEQ ID NO: 1456128 - DNA, 15 bp, Homo sapiens
ggcaggaattattat

SEQ ID NO: 1456129 - DNA, 15 bp, Homo sapiens
gcaggaattattatt

SEQ ID NO: 1456130 - DNA, 15 bp, Homo sapiens
caggaattattatta

SEQ ID NO: 1456131 - DNA, 15 bp, Homo sapiens
aggaattattattat

SEQ ID NO: 1456132 - DNA, 15 bp, Homo sapiens
ggaattattattatc

SEQ ID NO: 1456133 - DNA, 15 bp, Homo sapiens
gaattattattatcc

SEQ ID NO: 1456134 - DNA, 15 bp, Homo sapiens
aattattattatcca

SEQ ID NO: 1456135 - DNA, 15 bp, Homo sapiens
attattattatccat

SEQ ID NO: 1456136 - DNA, 15 bp, Homo sapiens
ttattattatccatt

SEQ ID NO: 1456137 - DNA, 15 bp, Homo sapiens
tattattatccattt

SEQ ID NO: 1456138 - DNA, 15 bp, Homo sapiens
attattatccatttt

SEQ ID NO: 1456139 - DNA, 15 bp, Homo sapiens
ttattatccatttta

SEQ ID NO: 1456140 - DNA, 15 bp, Homo sapiens
tattatccattttac

SEQ ID NO: 1456141 - DNA, 15 bp, Homo sapiens
attatccattttaca

SEQ ID NO: 1456142 - DNA, 15 bp, Homo sapiens
ttatccattttacaa

SEQ ID NO: 1456143 - DNA, 15 bp, Homo sapiens
tatccattttacaaa

SEQ ID NO: 1456144 - DNA, 15 bp, Homo sapiens
atccattttacaaag

SEQ ID NO: 1456145 - DNA, 15 bp, Homo sapiens
tccattttacaaagc

SEQ ID NO: 1456146 - DNA, 15 bp, Homo sapiens
ccattttacaaagca

SEQ ID NO: 1456147 - DNA, 15 bp, Homo sapiens
cattttacaaagcat

SEQ ID NO: 1456148 - DNA, 15 bp, Homo sapiens
attttacaaagcatg

SEQ ID NO: 1456149 - DNA, 15 bp, Homo sapiens
ttttacaaagcatga

SEQ ID NO: 1456150 - DNA, 15 bp, Homo sapiens
tttacaaagcatgaa

SEQ ID NO: 1456151 - DNA, 15 bp, Homo sapiens
ttacaaagcatgaag

SEQ ID NO: 1456152 - DNA, 15 bp, Homo sapiens
tacaaagcatgaaga

SEQ ID NO: 1456153 - DNA, 15 bp, Homo sapiens
acaaagcatgaagat

SEQ ID NO: 1456154 - DNA, 15 bp, Homo sapiens
caaagcatgaagatg

SEQ ID NO: 1456155 - DNA, 15 bp, Homo sapiens
aaagcatgaagatga

SEQ ID NO: 1456156 - DNA, 15 bp, Homo sapiens
aagcatgaagatgag

SEQ ID NO: 1456157 - DNA, 15 bp, Homo sapiens
agcatgaagatgaga

SEQ ID NO: 1456158 - DNA, 15 bp, Homo sapiens
gcatgaagatgagac

SEQ ID NO: 1456159 - DNA, 15 bp, Homo sapiens
catgaagatgagact

SEQ ID NO: 1456160 - DNA, 15 bp, Homo sapiens
atgaagatgagactg

SEQ ID NO: 1456161 - DNA, 15 bp, Homo sapiens
tgaagatgagactga

SEQ ID NO: 1456162 - DNA, 15 bp, Homo sapiens
gaagatgagactgag

SEQ ID NO: 1456163 - DNA, 15 bp, Homo sapiens
aagatgagactgaga

SEQ ID NO: 1456164 - DNA, 15 bp, Homo sapiens
agatgagactgagaa

SEQ ID NO: 1456165 - DNA, 15 bp, Homo sapiens
gatgagactgagaat

SEQ ID NO: 1456166 - DNA, 15 bp, Homo sapiens
atgagactgagaatg

SEQ ID NO: 1456167 - DNA, 15 bp, Homo sapiens
tgagactgagaatgt

SEQ ID NO: 1456168 - DNA, 15 bp, Homo sapiens
gagactgagaatgtt

SEQ ID NO: 1456169 - DNA, 15 bp, Homo sapiens
agactgagaatgttg

SEQ ID NO: 1456170 - DNA, 15 bp, Homo sapiens
gactgagaatgttga

SEQ ID NO: 1456171 - DNA, 15 bp, Homo sapiens
actgagaatgttgaa

SEQ ID NO: 1456172 - DNA, 15 bp, Homo sapiens
ctgagaatgttgaat

SEQ ID NO: 1456173 - DNA, 15 bp, Homo sapiens
tgagaatgttgaata

SEQ ID NO: 1456174 - DNA, 15 bp, Homo sapiens
gagaatgttgaatac

SEQ ID NO: 1456175 - DNA, 15 bp, Homo sapiens
agaatgttgaataca

SEQ ID NO: 1456176 - DNA, 15 bp, Homo sapiens
gaatgttgaatacat

SEQ ID NO: 1456177 - DNA, 15 bp, Homo sapiens
aatgttgaatacatt

SEQ ID NO: 1456178 - DNA, 15 bp, Homo sapiens
atgttgaatacattt

SEQ ID NO: 1456179 - DNA, 15 bp, Homo sapiens
tgttgaatacatttg

SEQ ID NO: 1456180 - DNA, 15 bp, Homo sapiens
gttgaatacatttgc

SEQ ID NO: 1456181 - DNA, 15 bp, Homo sapiens
ttgaatacatttgcc

SEQ ID NO: 1456182 - DNA, 15 bp, Homo sapiens
tgaatacatttgcca

SEQ ID NO: 1456183 - DNA, 15 bp, Homo sapiens
gaatacatttgccat

SEQ ID NO: 1456184 - DNA, 15 bp, Homo sapiens
aatacatttgccata

SEQ ID NO: 1456185 - DNA, 15 bp, Homo sapiens
atacatttgccatag

SEQ ID NO: 1456186 - DNA, 15 bp, Homo sapiens
tacatttgccatagg

SEQ ID NO: 1456187 - DNA, 15 bp, Homo sapiens
acatttgccataggg

SEQ ID NO: 1456188 - DNA, 15 bp, Homo sapiens
catttgccatagggt

SEQ ID NO: 1456189 - DNA, 15 bp, Homo sapiens
atttgccatagggtt

SEQ ID NO: 1456190 - DNA, 15 bp, Homo sapiens
tttgccatagggttt

SEQ ID NO: 1456191 - DNA, 15 bp, Homo sapiens
ttgccatagggttta

SEQ ID NO: 1456192 - DNA, 15 bp, Homo sapiens
tgccatagggtttac

SEQ ID NO: 1456193 - DNA, 15 bp, Homo sapiens
gccatagggtttaca

SEQ ID NO: 1456194 - DNA, 15 bp, Homo sapiens
ccatagggtttacaa

SEQ ID NO: 1456195 - DNA, 15 bp, Homo sapiens
catagggtttacaac

SEQ ID NO: 1456196 - DNA, 15 bp, Homo sapiens
atagggtttacaact

SEQ ID NO: 1456197 - DNA, 15 bp, Homo sapiens
tagggtttacaacta

SEQ ID NO: 1456198 - DNA, 15 bp, Homo sapiens
agggtttacaactag

SEQ ID NO: 1456199 - DNA, 15 bp, Homo sapiens
gggtttacaactagt

SEQ ID NO: 1456200 - DNA, 15 bp, Homo sapiens
ggtttacaactagtc

SEQ ID NO: 1456201 - DNA, 15 bp, Homo sapiens
gtttacaactagtca

SEQ ID NO: 1456202 - DNA, 15 bp, Homo sapiens
tttacaactagtcac

SEQ ID NO: 1456203 - DNA, 15 bp, Homo sapiens
ttacaactagtcaca

SEQ ID NO: 1456204 - DNA, 15 bp, Homo sapiens
tacaactagtcacag

SEQ ID NO: 1456205 - DNA, 15 bp, Homo sapiens
acaactagtcacagg

SEQ ID NO: 1456206 - DNA, 15 bp, Homo sapiens
caactagtcacaggc

SEQ ID NO: 1456207 - DNA, 15 bp, Homo sapiens
aactagtcacaggca

SEQ ID NO: 1456208 - DNA, 15 bp, Homo sapiens
actagtcacaggcag

SEQ ID NO: 1456209 - DNA, 15 bp, Homo sapiens
ctagtcacaggcaga

SEQ ID NO: 1456210 - DNA, 15 bp, Homo sapiens
tagtcacaggcagac

SEQ ID NO: 1456211 - DNA, 15 bp, Homo sapiens
agtcacaggcagaca

SEQ ID NO: 1456212 - DNA, 15 bp, Homo sapiens
gtcacaggcagacat

SEQ ID NO: 1456213 - DNA, 15 bp, Homo sapiens
tcacaggcagacatg

SEQ ID NO: 1456214 - DNA, 15 bp, Homo sapiens
cacaggcagacatgc

SEQ ID NO: 1456215 - DNA, 15 bp, Homo sapiens
acaggcagacatgct

SEQ ID NO: 1456216 - DNA, 15 bp, Homo sapiens
caggcagacatgctc

SEQ ID NO: 1456217 - DNA, 15 bp, Homo sapiens
aggcagacatgctct

SEQ ID NO: 1456218 - DNA, 15 bp, Homo sapiens
ggcagacatgctctt

SEQ ID NO: 1456219 - DNA, 15 bp, Homo sapiens
tttttttctgaaaat

SEQ ID NO: 1456220 - DNA, 15 bp, Homo sapiens
ttttttctgaaaata

SEQ ID NO: 1456221 - DNA, 15 bp, Homo sapiens
tttttctgaaaatat

SEQ ID NO: 1456222 - DNA, 15 bp, Homo sapiens
ttttctgaaaatatc

SEQ ID NO: 1456223 - DNA, 15 bp, Homo sapiens
tttctgaaaatatct

SEQ ID NO: 1456224 - DNA, 15 bp, Homo sapiens
ttctgaaaatatcta

SEQ ID NO: 1456225 - DNA, 15 bp, Homo sapiens
tctgaaaatatctat

SEQ ID NO: 1456226 - DNA, 15 bp, Homo sapiens
ctgaaaatatctatt

SEQ ID NO: 1456227 - DNA, 15 bp, Homo sapiens
tgaaaatatctattc

SEQ ID NO: 1456228 - DNA, 15 bp, Homo sapiens
gaaaatatctattcg

SEQ ID NO: 1456229 - DNA, 15 bp, Homo sapiens
aaaatatctattcgt

SEQ ID NO: 1456230 - DNA, 15 bp, Homo sapiens
aaatatctattcgtt

SEQ ID NO: 1456231 - DNA, 15 bp, Homo sapiens
aatatctattcgttg

SEQ ID NO: 1456232 - DNA, 15 bp, Homo sapiens
atatctattcgttgt

SEQ ID NO: 1456233 - DNA, 15 bp, Homo sapiens
tatctattcgttgtt

SEQ ID NO: 1456234 - DNA, 15 bp, Homo sapiens
atctattcgttgttt

SEQ ID NO: 1456235 - DNA, 15 bp, Homo sapiens
tctattcgttgtttc

SEQ ID NO: 1456236 - DNA, 15 bp, Homo sapiens
ctattcgttgtttca

SEQ ID NO: 1456237 - DNA, 15 bp, Homo sapiens
tattcgttgtttcaa

SEQ ID NO: 1456238 - DNA, 15 bp, Homo sapiens
attcgttgtttcaat

SEQ ID NO: 1456239 - DNA, 15 bp, Homo sapiens
ttcgttgtttcaatt

SEQ ID NO: 1456240 - DNA, 15 bp, Homo sapiens
tcgttgtttcaatta

SEQ ID NO: 1456241 - DNA, 15 bp, Homo sapiens
cgttgtttcaattaa

SEQ ID NO: 1456242 - DNA, 15 bp, Homo sapiens
gttgtttcaattaat

SEQ ID NO: 1456243 - DNA, 15 bp, Homo sapiens
ttgtttcaattaatt

SEQ ID NO: 1456244 - DNA, 15 bp, Homo sapiens
tgtttcaattaattg

SEQ ID NO: 1456245 - DNA, 15 bp, Homo sapiens
gtttcaattaattga

SEQ ID NO: 1456246 - DNA, 15 bp, Homo sapiens
ttcaattaattgatg

SEQ ID NO: 1456247 - DNA, 15 bp, Homo sapiens
tcaattaattgatgg

SEQ ID NO: 1456248 - DNA, 15 bp, Homo sapiens
caattaattgatggt

SEQ ID NO: 1456249 - DNA, 15 bp, Homo sapiens
aattaattgatggtg

SEQ ID NO: 1456250 - DNA, 15 bp, Homo sapiens
attaattgatggtgt

SEQ ID NO: 1456251 - DNA, 15 bp, Homo sapiens
ttaattgatggtgta

SEQ ID NO: 1456252 - DNA, 15 bp, Homo sapiens
taattgatggtgtat

SEQ ID NO: 1456253 - DNA, 15 bp, Homo sapiens
aattgatggtgtata

SEQ ID NO: 1456254 - DNA, 15 bp, Homo sapiens
attgatggtgtatat

SEQ ID NO: 1456255 - DNA, 15 bp, Homo sapiens
ttgatggtgtatatt

SEQ ID NO: 1456256 - DNA, 15 bp, Homo sapiens
tgatggtgtatatta

SEQ ID NO: 1456257 - DNA, 15 bp, Homo sapiens
gatggtgtatattaa

SEQ ID NO: 1456258 - DNA, 15 bp, Homo sapiens
atggtgtatattaag

SEQ ID NO: 1456259 - DNA, 15 bp, Homo sapiens
tggtgtatattaagg

SEQ ID NO: 1456260 - DNA, 15 bp, Homo sapiens
ggtgtatattaagga

SEQ ID NO: 1456261 - DNA, 15 bp, Homo sapiens
gtgtatattaaggat

SEQ ID NO: 1456262 - DNA, 15 bp, Homo sapiens
tgtatattaaggatg

SEQ ID NO: 1456263 - DNA, 15 bp, Homo sapiens
gtatattaaggatgt

SEQ ID NO: 1456264 - DNA, 15 bp, Homo sapiens
tatattaaggatgta

SEQ ID NO: 1456265 - DNA, 15 bp, Homo sapiens
atattaaggatgtag

SEQ ID NO: 1456266 - DNA, 15 bp, Homo sapiens
tattaaggatgtaga

SEQ ID NO: 1456267 - DNA, 15 bp, Homo sapiens
attaaggatgtagaa

SEQ ID NO: 1456268 - DNA, 15 bp, Homo sapiens
ttaaggatgtagaag

SEQ ID NO: 1456269 - DNA, 15 bp, Homo sapiens
taaggatgtagaagg

SEQ ID NO: 1456270 - DNA, 15 bp, Homo sapiens
aaggatgtagaagga

SEQ ID NO: 1456271 - DNA, 15 bp, Homo sapiens
aggatgtagaaggat

SEQ ID NO: 1456272 - DNA, 15 bp, Homo sapiens
ggatgtagaaggatc

SEQ ID NO: 1456273 - DNA, 15 bp, Homo sapiens
gatgtagaaggatct

SEQ ID NO: 1456274 - DNA, 15 bp, Homo sapiens
atgtagaaggatcta

SEQ ID NO: 1456275 - DNA, 15 bp, Homo sapiens
tgtagaaggatctaa

SEQ ID NO: 1456276 - DNA, 15 bp, Homo sapiens
gtagaaggatctaaa

SEQ ID NO: 1456277 - DNA, 15 bp, Homo sapiens
tagaaggatctaaaa

SEQ ID NO: 1456278 - DNA, 15 bp, Homo sapiens
agaaggatctaaaat

SEQ ID NO: 1456279 - DNA, 15 bp, Homo sapiens
gaaggatctaaaatt

SEQ ID NO: 1456280 - DNA, 15 bp, Homo sapiens
aaggatctaaaatta

SEQ ID NO: 1456281 - DNA, 15 bp, Homo sapiens
ggaattgtgggcaat

SEQ ID NO: 1456282 - DNA, 15 bp, Homo sapiens
gaattgtgggcaatt

SEQ ID NO: 1456283 - DNA, 15 bp, Homo sapiens
aattgtgggcaattt

SEQ ID NO: 1456284 - DNA, 15 bp, Homo sapiens
attgtgggcaatttt

SEQ ID NO: 1456285 - DNA, 15 bp, Homo sapiens
ttgtgggcaattttt

SEQ ID NO: 1456286 - DNA, 15 bp, Homo sapiens
tgtgggcaatttttg

SEQ ID NO: 1456287 - DNA, 15 bp, Homo sapiens
gtgggcaatttttgc

SEQ ID NO: 1456288 - DNA, 15 bp, Homo sapiens
tgggcaatttttgcc

SEQ ID NO: 1456289 - DNA, 15 bp, Homo sapiens
tttgccttacatttt

SEQ ID NO: 1456290 - DNA, 15 bp, Homo sapiens
ttgccttacatttta

SEQ ID NO: 1456291 - DNA, 15 bp, Homo sapiens
tgccttacattttat

SEQ ID NO: 1456292 - DNA, 15 bp, Homo sapiens
gccttacattttatt

SEQ ID NO: 1456293 - DNA, 15 bp, Homo sapiens
ccttacattttattt

SEQ ID NO: 1456294 - DNA, 15 bp, Homo sapiens
cttacattttatttt

SEQ ID NO: 1456295 - DNA, 15 bp, Homo sapiens
ttacattttatttta

SEQ ID NO: 1456296 - DNA, 15 bp, Homo sapiens
tacattttattttac

SEQ ID NO: 1456297 - DNA, 15 bp, Homo sapiens
acattttattttact

SEQ ID NO: 1456298 - DNA, 15 bp, Homo sapiens
cattttattttactt

SEQ ID NO: 1456299 - DNA, 15 bp, Homo sapiens
ttttattttactttc

SEQ ID NO: 1456300 - DNA, 15 bp, Homo sapiens
tttattttactttcc

SEQ ID NO: 1456301 - DNA, 15 bp, Homo sapiens
ttattttactttcca

SEQ ID NO: 1456302 - DNA, 15 bp, Homo sapiens
tattttactttccat

SEQ ID NO: 1456303 - DNA, 15 bp, Homo sapiens
attttactttccatt

SEQ ID NO: 1456304 - DNA, 15 bp, Homo sapiens
ttttactttccatta

SEQ ID NO: 1456305 - DNA, 15 bp, Homo sapiens
tttactttccattat

SEQ ID NO: 1456306 - DNA, 15 bp, Homo sapiens
ttactttccattata

SEQ ID NO: 1456307 - DNA, 15 bp, Homo sapiens
tactttccattatat

SEQ ID NO: 1456308 - DNA, 15 bp, Homo sapiens
actttccattatatt

SEQ ID NO: 1456309 - DNA, 15 bp, Homo sapiens
ctttccattatattc

SEQ ID NO: 1456310 - DNA, 15 bp, Homo sapiens
tttccattatattct

SEQ ID NO: 1456311 - DNA, 15 bp, Homo sapiens
ttccattatattcta

SEQ ID NO: 1456312 - DNA, 15 bp, Homo sapiens
tccattatattctat

SEQ ID NO: 1456313 - DNA, 15 bp, Homo sapiens
ccattatattctatg

SEQ ID NO: 1456314 - DNA, 15 bp, Homo sapiens
cattatattctatga

SEQ ID NO: 1456315 - DNA, 15 bp, Homo sapiens
attatattctatgat

SEQ ID NO: 1456316 - DNA, 15 bp, Homo sapiens
ttatattctatgata

SEQ ID NO: 1456317 - DNA, 15 bp, Homo sapiens
tatattctatgataa

SEQ ID NO: 1456318 - DNA, 15 bp, Homo sapiens
atattctatgataaa

SEQ ID NO: 1456319 - DNA, 15 bp, Homo sapiens
tattctatgataaat

SEQ ID NO: 1456320 - DNA, 15 bp, Homo sapiens
attctatgataaata

SEQ ID NO: 1456321 - DNA, 15 bp, Homo sapiens
ttctatgataaatat

SEQ ID NO: 1456322 - DNA, 15 bp, Homo sapiens
tctatgataaatatg

SEQ ID NO: 1456323 - DNA, 15 bp, Homo sapiens
ctatgataaatatgt

SEQ ID NO: 1456324 - DNA, 15 bp, Homo sapiens
tatgataaatatgta

SEQ ID NO: 1456325 - DNA, 15 bp, Homo sapiens
atgataaatatgtat

SEQ ID NO: 1456326 - DNA, 15 bp, Homo sapiens
tgataaatatgtata

SEQ ID NO: 1456327 - DNA, 15 bp, Homo sapiens
gataaatatgtataa

SEQ ID NO: 1456328 - DNA, 15 bp, Homo sapiens
ataaatatgtataat

SEQ ID NO: 1456329 - DNA, 15 bp, Homo sapiens
taaatatgtataatt

SEQ ID NO: 1456330 - DNA, 15 bp, Homo sapiens
aaatatgtataattt

SEQ ID NO: 1456331 - DNA, 15 bp, Homo sapiens
aatatgtataatttt

SEQ ID NO: 1456332 - DNA, 15 bp, Homo sapiens
atatgtataattttt

SEQ ID NO: 1456333 - DNA, 15 bp, Homo sapiens
tatgtataattttta

SEQ ID NO: 1456334 - DNA, 15 bp, Homo sapiens
atgtataatttttaa

SEQ ID NO: 1456335 - DNA, 15 bp, Homo sapiens
tgtataatttttaat

SEQ ID NO: 1456336 - DNA, 15 bp, Homo sapiens
gtataatttttaatc

SEQ ID NO: 1456337 - DNA, 15 bp, Homo sapiens
tataatttttaatct

SEQ ID NO: 1456338 - DNA, 15 bp, Homo sapiens
ataatttttaatctg

SEQ ID NO: 1456339 - DNA, 15 bp, Homo sapiens
taatttttaatctgg

SEQ ID NO: 1456340 - DNA, 15 bp, Homo sapiens
aatttttaatctgga

SEQ ID NO: 1456341 - DNA, 15 bp, Homo sapiens
atttttaatctggaa

SEQ ID NO: 1456342 - DNA, 15 bp, Homo sapiens
tttttaatctggaaa

SEQ ID NO: 1456343 - DNA, 15 bp, Homo sapiens
ttttaatctggaaag

SEQ ID NO: 1456344 - DNA, 15 bp, Homo sapiens
tttaatctggaaagt

SEQ ID NO: 1456345 - DNA, 15 bp, Homo sapiens
ttaatctggaaagta

SEQ ID NO: 1456346 - DNA, 15 bp, Homo sapiens
taatctggaaagtaa

SEQ ID NO: 1456347 - DNA, 15 bp, Homo sapiens
aatctggaaagtaag

SEQ ID NO: 1456348 - DNA, 15 bp, Homo sapiens
atctggaaagtaagc

SEQ ID NO: 1456349 - DNA, 15 bp, Homo sapiens
tctggaaagtaagcc

SEQ ID NO: 1456350 - DNA, 15 bp, Homo sapiens
ctggaaagtaagcct

SEQ ID NO: 1456351 - DNA, 15 bp, Homo sapiens
tggaaagtaagcctt

SEQ ID NO: 1456352 - DNA, 15 bp, Homo sapiens
ggaaagtaagccttt

SEQ ID NO: 1456353 - DNA, 15 bp, Homo sapiens
gaaagtaagcctttt

SEQ ID NO: 1456354 - DNA, 15 bp, Homo sapiens
aaagtaagccttttt

SEQ ID NO: 1456355 - DNA, 15 bp, Homo sapiens
aagtaagcctttttt

SEQ ID NO: 1456356 - DNA, 15 bp, Homo sapiens
agtaagcctttttta

SEQ ID NO: 1456357 - DNA, 15 bp, Homo sapiens
gtaagccttttttaa

SEQ ID NO: 1456358 - DNA, 15 bp, Homo sapiens
taagccttttttaaa

SEQ ID NO: 1456359 - DNA, 15 bp, Homo sapiens
aagccttttttaaaa

SEQ ID NO: 1456360 - DNA, 15 bp, Homo sapiens
agccttttttaaaag

SEQ ID NO: 1456361 - DNA, 15 bp, Homo sapiens
gccttttttaaaaga

SEQ ID NO: 1456362 - DNA, 15 bp, Homo sapiens
ccttttttaaaagat

SEQ ID NO: 1456363 - DNA, 15 bp, Homo sapiens
cttttttaaaagata

SEQ ID NO: 1456364 - DNA, 15 bp, Homo sapiens
ttttttaaaagataa

SEQ ID NO: 1456365 - DNA, 15 bp, Homo sapiens
tttttaaaagataat

SEQ ID NO: 1456366 - DNA, 15 bp, Homo sapiens
ttttaaaagataata

SEQ ID NO: 1456367 - DNA, 15 bp, Homo sapiens
tttaaaagataatat

SEQ ID NO: 1456368 - DNA, 15 bp, Homo sapiens
ttaaaagataatatg

SEQ ID NO: 1456369 - DNA, 15 bp, Homo sapiens
taaaagataatatgc

SEQ ID NO: 1456370 - DNA, 15 bp, Homo sapiens
aaaagataatatgca

SEQ ID NO: 1456371 - DNA, 15 bp, Homo sapiens
aaagataatatgcat

SEQ ID NO: 1456372 - DNA, 15 bp, Homo sapiens
aagataatatgcatt

SEQ ID NO: 1456373 - DNA, 15 bp, Homo sapiens
agataatatgcattc

SEQ ID NO: 1456374 - DNA, 15 bp, Homo sapiens
gataatatgcattca

SEQ ID NO: 1456375 - DNA, 15 bp, Homo sapiens
ataatatgcattcat

SEQ ID NO: 1456376 - DNA, 15 bp, Homo sapiens
taatatgcattcatt

SEQ ID NO: 1456377 - DNA, 15 bp, Homo sapiens
aatatgcattcattc

SEQ ID NO: 1456378 - DNA, 15 bp, Homo sapiens
atatgcattcattct

SEQ ID NO: 1456379 - DNA, 15 bp, Homo sapiens
tatgcattcattcta

SEQ ID NO: 1456380 - DNA, 15 bp, Homo sapiens
atgcattcattctag

SEQ ID NO: 1456381 - DNA, 15 bp, Homo sapiens
tgcattcattctaga

SEQ ID NO: 1456382 - DNA, 15 bp, Homo sapiens
gcattcattctagaa

SEQ ID NO: 1456383 - DNA, 15 bp, Homo sapiens
cattcattctagaat

SEQ ID NO: 1456384 - DNA, 15 bp, Homo sapiens
attcattctagaatt

SEQ ID NO: 1456385 - DNA, 15 bp, Homo sapiens
ttcattctagaattt

SEQ ID NO: 1456386 - DNA, 15 bp, Homo sapiens
tcattctagaatttg

SEQ ID NO: 1456387 - DNA, 15 bp, Homo sapiens
cattctagaatttgt

SEQ ID NO: 1456388 - DNA, 15 bp, Homo sapiens
attctagaatttgtc

SEQ ID NO: 1456389 - DNA, 15 bp, Homo sapiens
ttctagaatttgtca

SEQ ID NO: 1456390 - DNA, 15 bp, Homo sapiens
tctagaatttgtcat

SEQ ID NO: 1456391 - DNA, 15 bp, Homo sapiens
ctagaatttgtcatg

SEQ ID NO: 1456392 - DNA, 15 bp, Homo sapiens
tagaatttgtcatga

SEQ ID NO: 1456393 - DNA, 15 bp, Homo sapiens
agaatttgtcatgaa

SEQ ID NO: 1456394 - DNA, 15 bp, Homo sapiens
gaatttgtcatgaag

SEQ ID NO: 1456395 - DNA, 15 bp, Homo sapiens
aatttgtcatgaaga

SEQ ID NO: 1456396 - DNA, 15 bp, Homo sapiens
atttgtcatgaagaa

SEQ ID NO: 1456397 - DNA, 15 bp, Homo sapiens
tttgtcatgaagaac

SEQ ID NO: 1456398 - DNA, 15 bp, Homo sapiens
ttgtcatgaagaacc

SEQ ID NO: 1456399 - DNA, 15 bp, Homo sapiens
tgtcatgaagaacct

SEQ ID NO: 1456400 - DNA, 15 bp, Homo sapiens
gtcatgaagaacctt

SEQ ID NO: 1456401 - DNA, 15 bp, Homo sapiens
tcatgaagaacctta

SEQ ID NO: 1456402 - DNA, 15 bp, Homo sapiens
catgaagaaccttaa

SEQ ID NO: 1456403 - DNA, 15 bp, Homo sapiens
atgaagaaccttaac

SEQ ID NO: 1456404 - DNA, 15 bp, Homo sapiens
tgaagaaccttaact

SEQ ID NO: 1456405 - DNA, 15 bp, Homo sapiens
gaagaaccttaactt

SEQ ID NO: 1456406 - DNA, 15 bp, Homo sapiens
aagaaccttaactta

SEQ ID NO: 1456407 - DNA, 15 bp, Homo sapiens
agaaccttaacttac

SEQ ID NO: 1456408 - DNA, 15 bp, Homo sapiens
gaaccttaacttaca

SEQ ID NO: 1456409 - DNA, 15 bp, Homo sapiens
aaccttaacttacat

SEQ ID NO: 1456410 - DNA, 15 bp, Homo sapiens
accttaacttacata

SEQ ID NO: 1456411 - DNA, 15 bp, Homo sapiens
ccttaacttacatat

SEQ ID NO: 1456412 - DNA, 15 bp, Homo sapiens
cttaacttacatatc

SEQ ID NO: 1456413 - DNA, 15 bp, Homo sapiens
ttaacttacatatca

SEQ ID NO: 1456414 - DNA, 15 bp, Homo sapiens
taacttacatatcaa

SEQ ID NO: 1456415 - DNA, 15 bp, Homo sapiens
aacttacatatcaac

SEQ ID NO: 1456416 - DNA, 15 bp, Homo sapiens
acttacatatcaact

SEQ ID NO: 1456417 - DNA, 15 bp, Homo sapiens
cttacatatcaactc

SEQ ID NO: 1456418 - DNA, 15 bp, Homo sapiens
tacatatcaactcct

SEQ ID NO: 1456419 - DNA, 15 bp, Homo sapiens
acatatcaactcctg

SEQ ID NO: 1456420 - DNA, 15 bp, Homo sapiens
catatcaactcctgg

SEQ ID NO: 1456421 - DNA, 15 bp, Homo sapiens
atatcaactcctggc

SEQ ID NO: 1456422 - DNA, 15 bp, Homo sapiens
tatcaactcctggcg

SEQ ID NO: 1456423 - DNA, 15 bp, Homo sapiens
atcaactcctggcgt

SEQ ID NO: 1456424 - DNA, 15 bp, Homo sapiens
tcaactcctggcgtt

SEQ ID NO: 1456425 - DNA, 15 bp, Homo sapiens
caactcctggcgtta

SEQ ID NO: 1456426 - DNA, 15 bp, Homo sapiens
aactcctggcgttat

SEQ ID NO: 1456427 - DNA, 15 bp, Homo sapiens
actcctggcgttatg

SEQ ID NO: 1456428 - DNA, 15 bp, Homo sapiens
ctcctggcgttatgg

SEQ ID NO: 1456429 - DNA, 15 bp, Homo sapiens
tcctggcgttatggt

SEQ ID NO: 1456430 - DNA, 15 bp, Homo sapiens
cctggcgttatggtc

SEQ ID NO: 1456431 - DNA, 15 bp, Homo sapiens
ctggcgttatggtct

SEQ ID NO: 1456432 - DNA, 15 bp, Homo sapiens
tggcgttatggtctc

SEQ ID NO: 1456433 - DNA, 15 bp, Homo sapiens
ggcgttatggtctct

SEQ ID NO: 1456434 - DNA, 15 bp, Homo sapiens
gcgttatggtctctt

SEQ ID NO: 1456435 - DNA, 15 bp, Homo sapiens
cgttatggtctctta

SEQ ID NO: 1456436 - DNA, 15 bp, Homo sapiens
gttatggtctcttat

SEQ ID NO: 1456437 - DNA, 15 bp, Homo sapiens
ttatggtctcttata

SEQ ID NO: 1456438 - DNA, 15 bp, Homo sapiens
tatggtctcttataa

SEQ ID NO: 1456439 - DNA, 15 bp, Homo sapiens
atggtctcttataac

SEQ ID NO: 1456440 - DNA, 15 bp, Homo sapiens
tggtctcttataacc

SEQ ID NO: 1456441 - DNA, 15 bp, Homo sapiens
ggtctcttataaccc

SEQ ID NO: 1456442 - DNA, 15 bp, Homo sapiens
gtctcttataacccc

SEQ ID NO: 1456443 - DNA, 15 bp, Homo sapiens
tctcttataacccct

SEQ ID NO: 1456444 - DNA, 15 bp, Homo sapiens
ctcttataacccctg

SEQ ID NO: 1456445 - DNA, 15 bp, Homo sapiens
tcttataacccctgc

SEQ ID NO: 1456446 - DNA, 15 bp, Homo sapiens
cttataacccctgca

SEQ ID NO: 1456447 - DNA, 15 bp, Homo sapiens
ttataacccctgcag

SEQ ID NO: 1456448 - DNA, 15 bp, Homo sapiens
tataacccctgcagt

SEQ ID NO: 1456449 - DNA, 15 bp, Homo sapiens
ataacccctgcagta

SEQ ID NO: 1456450 - DNA, 15 bp, Homo sapiens
taacccctgcagtaa

SEQ ID NO: 1456451 - DNA, 15 bp, Homo sapiens
aacccctgcagtaac

SEQ ID NO: 1456452 - DNA, 15 bp, Homo sapiens
acccctgcagtaaca

SEQ ID NO: 1456453 - DNA, 15 bp, Homo sapiens
cccctgcagtaacat

SEQ ID NO: 1456454 - DNA, 15 bp, Homo sapiens
ccctgcagtaacatt

SEQ ID NO: 1456455 - DNA, 15 bp, Homo sapiens
cctgcagtaacattt

SEQ ID NO: 1456456 - DNA, 15 bp, Homo sapiens
ctgcagtaacatttt

SEQ ID NO: 1456457 - DNA, 15 bp, Homo sapiens
tgcagtaacattttc

SEQ ID NO: 1456458 - DNA, 15 bp, Homo sapiens
gcagtaacattttcc

SEQ ID NO: 1456459 - DNA, 15 bp, Homo sapiens
cagtaacattttccc

SEQ ID NO: 1456460 - DNA, 15 bp, Homo sapiens
agtaacattttccct

SEQ ID NO: 1456461 - DNA, 15 bp, Homo sapiens
gtaacattttccctt

SEQ ID NO: 1456462 - DNA, 15 bp, Homo sapiens
taacattttcccttt

SEQ ID NO: 1456463 - DNA, 15 bp, Homo sapiens
aacattttccctttt

SEQ ID NO: 1456464 - DNA, 15 bp, Homo sapiens
acattttccctttta

SEQ ID NO: 1456465 - DNA, 15 bp, Homo sapiens
cattttcccttttac

SEQ ID NO: 1456466 - DNA, 15 bp, Homo sapiens
attttcccttttact

SEQ ID NO: 1456467 - DNA, 15 bp, Homo sapiens
ttttcccttttactc

SEQ ID NO: 1456468 - DNA, 15 bp, Homo sapiens
tttcccttttactct

SEQ ID NO: 1456469 - DNA, 15 bp, Homo sapiens
ttcccttttactctg

SEQ ID NO: 1456470 - DNA, 15 bp, Homo sapiens
tcccttttactctgg

SEQ ID NO: 1456471 - DNA, 15 bp, Homo sapiens
cccttttactctgga

SEQ ID NO: 1456472 - DNA, 15 bp, Homo sapiens
ccttttactctggaa

SEQ ID NO: 1456473 - DNA, 15 bp, Homo sapiens
cttttactctggaat

SEQ ID NO: 1456474 - DNA, 15 bp, Homo sapiens
ttttactctggaatg

SEQ ID NO: 1456475 - DNA, 15 bp, Homo sapiens
tttactctggaatgg

SEQ ID NO: 1456476 - DNA, 15 bp, Homo sapiens
ttactctggaatggc

SEQ ID NO: 1456477 - DNA, 15 bp, Homo sapiens
tactctggaatggct

SEQ ID NO: 1456478 - DNA, 15 bp, Homo sapiens
actctggaatggctt

SEQ ID NO: 1456479 - DNA, 15 bp, Homo sapiens
ctctggaatggcttt

SEQ ID NO: 1456480 - DNA, 15 bp, Homo sapiens
tctggaatggctttt

SEQ ID NO: 1456481 - DNA, 15 bp, Homo sapiens
ctggaatggctttta

SEQ ID NO: 1456482 - DNA, 15 bp, Homo sapiens
tggaatggcttttat

SEQ ID NO: 1456483 - DNA, 15 bp, Homo sapiens
ggaatggcttttatg

SEQ ID NO: 1456484 - DNA, 15 bp, Homo sapiens
gaatggcttttatgt

SEQ ID NO: 1456485 - DNA, 15 bp, Homo sapiens
aatggcttttatgtg

SEQ ID NO: 1456486 - DNA, 15 bp, Homo sapiens
atggcttttatgtgt

SEQ ID NO: 1456487 - DNA, 15 bp, Homo sapiens
tggcttttatgtgtt

SEQ ID NO: 1456488 - DNA, 15 bp, Homo sapiens
ggcttttatgtgttt

SEQ ID NO: 1456489 - DNA, 15 bp, Homo sapiens
gcttttatgtgttta

SEQ ID NO: 1456490 - DNA, 15 bp, Homo sapiens
cttttatgtgtttag

SEQ ID NO: 1456491 - DNA, 15 bp, Homo sapiens
ttttatgtgtttagg

SEQ ID NO: 1456492 - DNA, 15 bp, Homo sapiens
tttatgtgtttagga

SEQ ID NO: 1456493 - DNA, 15 bp, Homo sapiens
ttatgtgtttaggaa

SEQ ID NO: 1456494 - DNA, 15 bp, Homo sapiens
tatgtgtttaggaat

SEQ ID NO: 1456495 - DNA, 15 bp, Homo sapiens
atgtgtttaggaatt

SEQ ID NO: 1456496 - DNA, 15 bp, Homo sapiens
tgtgtttaggaattt

SEQ ID NO: 1456497 - DNA, 15 bp, Homo sapiens
gtgtttaggaatttt

SEQ ID NO: 1456498 - DNA, 15 bp, Homo sapiens
tgtttaggaattttc

SEQ ID NO: 1456499 - DNA, 15 bp, Homo sapiens
gtttaggaattttct

SEQ ID NO: 1456500 - DNA, 15 bp, Homo sapiens
tttaggaattttctc

SEQ ID NO: 1456501 - DNA, 15 bp, Homo sapiens
ttaggaattttctcc

SEQ ID NO: 1456502 - DNA, 15 bp, Homo sapiens
taggaattttctcct

SEQ ID NO: 1456503 - DNA, 15 bp, Homo sapiens
aggaattttctcctt

SEQ ID NO: 1456504 - DNA, 15 bp, Homo sapiens
ggaattttctccttt

SEQ ID NO: 1456505 - DNA, 15 bp, Homo sapiens
gaattttctcctttg

SEQ ID NO: 1456506 - DNA, 15 bp, Homo sapiens
aattttctcctttgc

SEQ ID NO: 1456507 - DNA, 15 bp, Homo sapiens
attttctcctttgca

SEQ ID NO: 1456508 - DNA, 15 bp, Homo sapiens
ttttctcctttgcaa

SEQ ID NO: 1456509 - DNA, 15 bp, Homo sapiens
tttctcctttgcaac

SEQ ID NO: 1456510 - DNA, 15 bp, Homo sapiens
ttctcctttgcaact

SEQ ID NO: 1456511 - DNA, 15 bp, Homo sapiens
tctcctttgcaactt

SEQ ID NO: 1456512 - DNA, 15 bp, Homo sapiens
ctcctttgcaacttt

SEQ ID NO: 1456513 - DNA, 15 bp, Homo sapiens
tcctttgcaactttg

SEQ ID NO: 1456514 - DNA, 15 bp, Homo sapiens
cctttgcaactttga

SEQ ID NO: 1456515 - DNA, 15 bp, Homo sapiens
ctttgcaactttgag

SEQ ID NO: 1456516 - DNA, 15 bp, Homo sapiens
tttgcaactttgagt

SEQ ID NO: 1456517 - DNA, 15 bp, Homo sapiens
ttgcaactttgagtt

SEQ ID NO: 1456518 - DNA, 15 bp, Homo sapiens
tgcaactttgagttc

SEQ ID NO: 1456519 - DNA, 15 bp, Homo sapiens
gcaactttgagttca

SEQ ID NO: 1456520 - DNA, 15 bp, Homo sapiens
caactttgagttcat

SEQ ID NO: 1456521 - DNA, 15 bp, Homo sapiens
aactttgagttcata

SEQ ID NO: 1456522 - DNA, 15 bp, Homo sapiens
actttgagttcatac

SEQ ID NO: 1456523 - DNA, 15 bp, Homo sapiens
ctttgagttcatacc

SEQ ID NO: 1456524 - DNA, 15 bp, Homo sapiens
tttgagttcatacct

SEQ ID NO: 1456525 - DNA, 15 bp, Homo sapiens
ttgagttcatacctt

SEQ ID NO: 1456526 - DNA, 15 bp, Homo sapiens
tgagttcatacctta

SEQ ID NO: 1456527 - DNA, 15 bp, Homo sapiens
gagttcataccttaa

SEQ ID NO: 1456528 - DNA, 15 bp, Homo sapiens
agttcataccttaaa

SEQ ID NO: 1456529 - DNA, 15 bp, Homo sapiens
gttcataccttaaat

SEQ ID NO: 1456530 - DNA, 15 bp, Homo sapiens
ttcataccttaaatt

SEQ ID NO: 1456531 - DNA, 15 bp, Homo sapiens
tcataccttaaattt

SEQ ID NO: 1456532 - DNA, 15 bp, Homo sapiens
cataccttaaattta

SEQ ID NO: 1456533 - DNA, 15 bp, Homo sapiens
ataccttaaatttag

SEQ ID NO: 1456534 - DNA, 15 bp, Homo sapiens
taccttaaatttaga

SEQ ID NO: 1456535 - DNA, 15 bp, Homo sapiens
accttaaatttagaa

SEQ ID NO: 1456536 - DNA, 15 bp, Homo sapiens
ccttaaatttagaat

SEQ ID NO: 1456537 - DNA, 15 bp, Homo sapiens
cttaaatttagaata

SEQ ID NO: 1456538 - DNA, 15 bp, Homo sapiens
ttaaatttagaatac

SEQ ID NO: 1456539 - DNA, 15 bp, Homo sapiens
taaatttagaataca

SEQ ID NO: 1456540 - DNA, 15 bp, Homo sapiens
aaatttagaatacaa

SEQ ID NO: 1456541 - DNA, 15 bp, Homo sapiens
aatttagaatacaaa

SEQ ID NO: 1456542 - DNA, 15 bp, Homo sapiens
atttagaatacaaaa

SEQ ID NO: 1456543 - DNA, 15 bp, Homo sapiens
tttagaatacaaaac

SEQ ID NO: 1456544 - DNA, 15 bp, Homo sapiens
ttagaatacaaaacc

SEQ ID NO: 1456545 - DNA, 15 bp, Homo sapiens
tagaatacaaaacct

SEQ ID NO: 1456546 - DNA, 15 bp, Homo sapiens
agaatacaaaacctc

SEQ ID NO: 1456547 - DNA, 15 bp, Homo sapiens
gaatacaaaacctcc

SEQ ID NO: 1456548 - DNA, 15 bp, Homo sapiens
aatacaaaacctcct

SEQ ID NO: 1456549 - DNA, 15 bp, Homo sapiens
atacaaaacctcctc

SEQ ID NO: 1456550 - DNA, 15 bp, Homo sapiens
tacaaaacctcctca

SEQ ID NO: 1456551 - DNA, 15 bp, Homo sapiens
acaaaacctcctcag

SEQ ID NO: 1456552 - DNA, 15 bp, Homo sapiens
caaaacctcctcagg

SEQ ID NO: 1456553 - DNA, 15 bp, Homo sapiens
aaaacctcctcagga

SEQ ID NO: 1456554 - DNA, 15 bp, Homo sapiens
aaacctcctcaggat

SEQ ID NO: 1456555 - DNA, 15 bp, Homo sapiens
aacctcctcaggatt

SEQ ID NO: 1456556 - DNA, 15 bp, Homo sapiens
acctcctcaggatta

SEQ ID NO: 1456557 - DNA, 15 bp, Homo sapiens
cctcctcaggattag

SEQ ID NO: 1456558 - DNA, 15 bp, Homo sapiens
ctcctcaggattagg

SEQ ID NO: 1456559 - DNA, 15 bp, Homo sapiens
tcctcaggattaggt

SEQ ID NO: 1456560 - DNA, 15 bp, Homo sapiens
cctcaggattaggtt

SEQ ID NO: 1456561 - DNA, 15 bp, Homo sapiens
ctcaggattaggttt

SEQ ID NO: 1456562 - DNA, 15 bp, Homo sapiens
tcaggattaggtttg

SEQ ID NO: 1456563 - DNA, 15 bp, Homo sapiens
caggattaggtttga

SEQ ID NO: 1456564 - DNA, 15 bp, Homo sapiens
aggattaggtttgag

SEQ ID NO: 1456565 - DNA, 15 bp, Homo sapiens
ggattaggtttgagt

SEQ ID NO: 1456566 - DNA, 15 bp, Homo sapiens
gattaggtttgagtt

SEQ ID NO: 1456567 - DNA, 15 bp, Homo sapiens
attaggtttgagttc

SEQ ID NO: 1456568 - DNA, 15 bp, Homo sapiens
ttaggtttgagttct

SEQ ID NO: 1456569 - DNA, 15 bp, Homo sapiens
taggtttgagttcta

SEQ ID NO: 1456570 - DNA, 15 bp, Homo sapiens
aggtttgagttctaa

SEQ ID NO: 1456571 - DNA, 15 bp, Homo sapiens
ggtttgagttctaac

SEQ ID NO: 1456572 - DNA, 15 bp, Homo sapiens
gtttgagttctaaca

SEQ ID NO: 1456573 - DNA, 15 bp, Homo sapiens
tttgagttctaacag

SEQ ID NO: 1456574 - DNA, 15 bp, Homo sapiens
ttgagttctaacagc

SEQ ID NO: 1456575 - DNA, 15 bp, Homo sapiens
tgagttctaacagca

SEQ ID NO: 1456576 - DNA, 15 bp, Homo sapiens
gagttctaacagcat

SEQ ID NO: 1456577 - DNA, 15 bp, Homo sapiens
agttctaacagcatc

SEQ ID NO: 1456578 - DNA, 15 bp, Homo sapiens
gttctaacagcatcc

SEQ ID NO: 1456579 - DNA, 15 bp, Homo sapiens
ttctaacagcatcca

SEQ ID NO: 1456580 - DNA, 15 bp, Homo sapiens
tctaacagcatccat

SEQ ID NO: 1456581 - DNA, 15 bp, Homo sapiens
ctaacagcatccatc

SEQ ID NO: 1456582 - DNA, 15 bp, Homo sapiens
taacagcatccatct

SEQ ID NO: 1456583 - DNA, 15 bp, Homo sapiens
aacagcatccatctt

SEQ ID NO: 1456584 - DNA, 15 bp, Homo sapiens
acagcatccatcttc

SEQ ID NO: 1456585 - DNA, 15 bp, Homo sapiens
cagcatccatcttct

SEQ ID NO: 1456586 - DNA, 15 bp, Homo sapiens
agcatccatcttctg

SEQ ID NO: 1456587 - DNA, 15 bp, Homo sapiens
gcatccatcttctgt

SEQ ID NO: 1456588 - DNA, 15 bp, Homo sapiens
catccatcttctgta

SEQ ID NO: 1456589 - DNA, 15 bp, Homo sapiens
atccatcttctgtac

SEQ ID NO: 1456590 - DNA, 15 bp, Homo sapiens
tccatcttctgtacc

SEQ ID NO: 1456591 - DNA, 15 bp, Homo sapiens
ccatcttctgtacca

SEQ ID NO: 1456592 - DNA, 15 bp, Homo sapiens
catcttctgtaccac

SEQ ID NO: 1456593 - DNA, 15 bp, Homo sapiens
atcttctgtaccact

SEQ ID NO: 1456594 - DNA, 15 bp, Homo sapiens
tcttctgtaccactt

SEQ ID NO: 1456595 - DNA, 15 bp, Homo sapiens
cttctgtaccacttc

SEQ ID NO: 1456596 - DNA, 15 bp, Homo sapiens
ttctgtaccacttct

SEQ ID NO: 1456597 - DNA, 15 bp, Homo sapiens
tctgtaccacttctt

SEQ ID NO: 1456598 - DNA, 15 bp, Homo sapiens
ctgtaccacttcttc

SEQ ID NO: 1456599 - DNA, 15 bp, Homo sapiens
tgtaccacttcttcc

SEQ ID NO: 1456600 - DNA, 15 bp, Homo sapiens
gtaccacttcttcca

SEQ ID NO: 1456601 - DNA, 15 bp, Homo sapiens
taccacttcttccag

SEQ ID NO: 1456602 - DNA, 15 bp, Homo sapiens
accacttcttccagg

SEQ ID NO: 1456603 - DNA, 15 bp, Homo sapiens
ccacttcttccaggg

SEQ ID NO: 1456604 - DNA, 15 bp, Homo sapiens
cacttcttccagggt

SEQ ID NO: 1456605 - DNA, 15 bp, Homo sapiens
acttcttccagggta

SEQ ID NO: 1456606 - DNA, 15 bp, Homo sapiens
cttcttccagggtat

SEQ ID NO: 1456607 - DNA, 15 bp, Homo sapiens
ttcttccagggtatt

SEQ ID NO: 1456608 - DNA, 15 bp, Homo sapiens
tcttccagggtatta

SEQ ID NO: 1456609 - DNA, 15 bp, Homo sapiens
cttccagggtattaa

SEQ ID NO: 1456610 - DNA, 15 bp, Homo sapiens
ttccagggtattaaa

SEQ ID NO: 1456611 - DNA, 15 bp, Homo sapiens
tccagggtattaaaa

SEQ ID NO: 1456612 - DNA, 15 bp, Homo sapiens
ccagggtattaaaaa

SEQ ID NO: 1456613 - DNA, 15 bp, Homo sapiens
cagggtattaaaaac

SEQ ID NO: 1456614 - DNA, 15 bp, Homo sapiens
agggtattaaaaact

SEQ ID NO: 1456615 - DNA, 15 bp, Homo sapiens
gggtattaaaaactt

SEQ ID NO: 1456616 - DNA, 15 bp, Homo sapiens
ggtattaaaaacttt

SEQ ID NO: 1456617 - DNA, 15 bp, Homo sapiens
gtattaaaaactttg

SEQ ID NO: 1456618 - DNA, 15 bp, Homo sapiens
tattaaaaactttga

SEQ ID NO: 1456619 - DNA, 15 bp, Homo sapiens
attaaaaactttgat

SEQ ID NO: 1456620 - DNA, 15 bp, Homo sapiens
ttaaaaactttgata

SEQ ID NO: 1456621 - DNA, 15 bp, Homo sapiens
taaaaactttgataa

SEQ ID NO: 1456622 - DNA, 15 bp, Homo sapiens
aaaaactttgataaa

SEQ ID NO: 1456623 - DNA, 15 bp, Homo sapiens
aaaactttgataaag

SEQ ID NO: 1456624 - DNA, 15 bp, Homo sapiens
aaactttgataaaga

SEQ ID NO: 1456625 - DNA, 15 bp, Homo sapiens
aactttgataaagac

SEQ ID NO: 1456626 - DNA, 15 bp, Homo sapiens
actttgataaagacc

SEQ ID NO: 1456627 - DNA, 15 bp, Homo sapiens
ctttgataaagacca

SEQ ID NO: 1456628 - DNA, 15 bp, Homo sapiens
tttgataaagaccaa

SEQ ID NO: 1456629 - DNA, 15 bp, Homo sapiens
ttgataaagaccaaa

SEQ ID NO: 1456630 - DNA, 15 bp, Homo sapiens
tgataaagaccaaaa

SEQ ID NO: 1456631 - DNA, 15 bp, Homo sapiens
gataaagaccaaaag

SEQ ID NO: 1456632 - DNA, 15 bp, Homo sapiens
ataaagaccaaaaga

SEQ ID NO: 1456633 - DNA, 15 bp, Homo sapiens
taaagaccaaaagac

SEQ ID NO: 1456634 - DNA, 15 bp, Homo sapiens
aaagaccaaaagaca

SEQ ID NO: 1456635 - DNA, 15 bp, Homo sapiens
aagaccaaaagacag

SEQ ID NO: 1456636 - DNA, 15 bp, Homo sapiens
agaccaaaagacagg

SEQ ID NO: 1456637 - DNA, 15 bp, Homo sapiens
gaccaaaagacaggt

SEQ ID NO: 1456638 - DNA, 15 bp, Homo sapiens
accaaaagacaggta

SEQ ID NO: 1456639 - DNA, 15 bp, Homo sapiens
ccaaaagacaggtat

SEQ ID NO: 1456640 - DNA, 15 bp, Homo sapiens
caaaagacaggtatt

SEQ ID NO: 1456641 - DNA, 15 bp, Homo sapiens
aaaagacaggtattt

SEQ ID NO: 1456642 - DNA, 15 bp, Homo sapiens
aaagacaggtatttc

SEQ ID NO: 1456643 - DNA, 15 bp, Homo sapiens
aagacaggtatttct

SEQ ID NO: 1456644 - DNA, 15 bp, Homo sapiens
agacaggtatttctt

SEQ ID NO: 1456645 - DNA, 15 bp, Homo sapiens
gacaggtatttcttt

SEQ ID NO: 1456646 - DNA, 15 bp, Homo sapiens
acaggtatttctttt

SEQ ID NO: 1456647 - DNA, 15 bp, Homo sapiens
caggtatttctttta

SEQ ID NO: 1456648 - DNA, 15 bp, Homo sapiens
aggtatttcttttag

SEQ ID NO: 1456649 - DNA, 15 bp, Homo sapiens
ggtatttcttttagg

SEQ ID NO: 1456650 - DNA, 15 bp, Homo sapiens
gtatttcttttaggg

SEQ ID NO: 1456651 - DNA, 15 bp, Homo sapiens
tatttcttttaggga

SEQ ID NO: 1456652 - DNA, 15 bp, Homo sapiens
atttcttttagggat

SEQ ID NO: 1456653 - DNA, 15 bp, Homo sapiens
tttcttttagggatg

SEQ ID NO: 1456654 - DNA, 15 bp, Homo sapiens
ttcttttagggatgt

SEQ ID NO: 1456655 - DNA, 15 bp, Homo sapiens
tcttttagggatgta

SEQ ID NO: 1456656 - DNA, 15 bp, Homo sapiens
cttttagggatgtaa

SEQ ID NO: 1456657 - DNA, 15 bp, Homo sapiens
ttttagggatgtaaa

SEQ ID NO: 1456658 - DNA, 15 bp, Homo sapiens
tttagggatgtaaac

SEQ ID NO: 1456659 - DNA, 15 bp, Homo sapiens
ttagggatgtaaacc

SEQ ID NO: 1456660 - DNA, 15 bp, Homo sapiens
tagggatgtaaaccc

SEQ ID NO: 1456661 - DNA, 15 bp, Homo sapiens
agggatgtaaaccct

SEQ ID NO: 1456662 - DNA, 15 bp, Homo sapiens
gggatgtaaacccta

SEQ ID NO: 1456663 - DNA, 15 bp, Homo sapiens
ggatgtaaaccctaa

SEQ ID NO: 1456664 - DNA, 15 bp, Homo sapiens
gatgtaaaccctaag

SEQ ID NO: 1456665 - DNA, 15 bp, Homo sapiens
atgtaaaccctaagg

SEQ ID NO: 1456666 - DNA, 15 bp, Homo sapiens
tgtaaaccctaagga

SEQ ID NO: 1456667 - DNA, 15 bp, Homo sapiens
gtaaaccctaaggac

SEQ ID NO: 1456668 - DNA, 15 bp, Homo sapiens
taaaccctaaggacc

SEQ ID NO: 1456669 - DNA, 15 bp, Homo sapiens
aaaccctaaggacct

SEQ ID NO: 1456670 - DNA, 15 bp, Homo sapiens
aaccctaaggacctt

SEQ ID NO: 1456671 - DNA, 15 bp, Homo sapiens
accctaaggacctta

SEQ ID NO: 1456672 - DNA, 15 bp, Homo sapiens
ccctaaggaccttaa

SEQ ID NO: 1456673 - DNA, 15 bp, Homo sapiens
cctaaggaccttaag

SEQ ID NO: 1456674 - DNA, 15 bp, Homo sapiens
ctaaggaccttaaga

SEQ ID NO: 1456675 - DNA, 15 bp, Homo sapiens
taaggaccttaagat

SEQ ID NO: 1456676 - DNA, 15 bp, Homo sapiens
aaggaccttaagatc

SEQ ID NO: 1456677 - DNA, 15 bp, Homo sapiens
aggaccttaagatcc

SEQ ID NO: 1456678 - DNA, 15 bp, Homo sapiens
ggaccttaagatcct

SEQ ID NO: 1456679 - DNA, 15 bp, Homo sapiens
gaccttaagatccta

SEQ ID NO: 1456680 - DNA, 15 bp, Homo sapiens
accttaagatcctag

SEQ ID NO: 1456681 - DNA, 15 bp, Homo sapiens
ccttaagatcctaga

SEQ ID NO: 1456682 - DNA, 15 bp, Homo sapiens
cttaagatcctagaa

SEQ ID NO: 1456683 - DNA, 15 bp, Homo sapiens
ttaagatcctagaag

SEQ ID NO: 1456684 - DNA, 15 bp, Homo sapiens
taagatcctagaaga

SEQ ID NO: 1456685 - DNA, 15 bp, Homo sapiens
aagatcctagaagat

SEQ ID NO: 1456686 - DNA, 15 bp, Homo sapiens
agatcctagaagatt

SEQ ID NO: 1456687 - DNA, 15 bp, Homo sapiens
gatcctagaagatta

SEQ ID NO: 1456688 - DNA, 15 bp, Homo sapiens
atcctagaagattat

SEQ ID NO: 1456689 - DNA, 15 bp, Homo sapiens
tcctagaagattatt

SEQ ID NO: 1456690 - DNA, 15 bp, Homo sapiens
cctagaagattattc

SEQ ID NO: 1456691 - DNA, 15 bp, Homo sapiens
ctagaagattattct

SEQ ID NO: 1456692 - DNA, 15 bp, Homo sapiens
tagaagattattctt

SEQ ID NO: 1456693 - DNA, 15 bp, Homo sapiens
agaagattattcttg

SEQ ID NO: 1456694 - DNA, 15 bp, Homo sapiens
gaagattattcttgc

SEQ ID NO: 1456695 - DNA, 15 bp, Homo sapiens
aagattattcttgct

SEQ ID NO: 1456696 - DNA, 15 bp, Homo sapiens
agattattcttgctt

SEQ ID NO: 1456697 - DNA, 15 bp, Homo sapiens
gattattcttgcttt

SEQ ID NO: 1456698 - DNA, 15 bp, Homo sapiens
attattcttgctttt

SEQ ID NO: 1456699 - DNA, 15 bp, Homo sapiens
ttattcttgcttttt

SEQ ID NO: 1456700 - DNA, 15 bp, Homo sapiens
attcttgcttttttt

SEQ ID NO: 1456701 - DNA, 15 bp, Homo sapiens
ttcttgctttttttt

SEQ ID NO: 1456702 - DNA, 15 bp, Homo sapiens
gcttttttttttttg

SEQ ID NO: 1456703 - DNA, 15 bp, Homo sapiens
ttttttttttttgtc

SEQ ID NO: 1456704 - DNA, 15 bp, Homo sapiens
tttttttttttgtcg

SEQ ID NO: 1456705 - DNA, 15 bp, Homo sapiens
ttttttttttgtcgt

SEQ ID NO: 1456706 - DNA, 15 bp, Homo sapiens
tttttttttgtcgtt

SEQ ID NO: 1456707 - DNA, 15 bp, Homo sapiens
ttttttttgtcgtta

SEQ ID NO: 1456708 - DNA, 15 bp, Homo sapiens
tttttttgtcgttat

SEQ ID NO: 1456709 - DNA, 15 bp, Homo sapiens
ttttttgtcgttatt

SEQ ID NO: 1456710 - DNA, 15 bp, Homo sapiens
tttttgtcgttattg

SEQ ID NO: 1456711 - DNA, 15 bp, Homo sapiens
ttttgtcgttattgt

SEQ ID NO: 1456712 - DNA, 15 bp, Homo sapiens
tttgtcgttattgtt

SEQ ID NO: 1456713 - DNA, 15 bp, Homo sapiens
ttgtcgttattgttc

SEQ ID NO: 1456714 - DNA, 15 bp, Homo sapiens
tgtcgttattgttct

SEQ ID NO: 1456715 - DNA, 15 bp, Homo sapiens
gtcgttattgttcta

SEQ ID NO: 1456716 - DNA, 15 bp, Homo sapiens
tcgttattgttctac

SEQ ID NO: 1456717 - DNA, 15 bp, Homo sapiens
cgttattgttctaca

SEQ ID NO: 1456718 - DNA, 15 bp, Homo sapiens
gttattgttctacag

SEQ ID NO: 1456719 - DNA, 15 bp, Homo sapiens
ttattgttctacagg

SEQ ID NO: 1456720 - DNA, 15 bp, Homo sapiens
tattgttctacaggt

SEQ ID NO: 1456721 - DNA, 15 bp, Homo sapiens
attgttctacaggta

SEQ ID NO: 1456722 - DNA, 15 bp, Homo sapiens
ttgttctacaggtaa

SEQ ID NO: 1456723 - DNA, 15 bp, Homo sapiens
tgttctacaggtaac

SEQ ID NO: 1456724 - DNA, 15 bp, Homo sapiens
gttctacaggtaact

SEQ ID NO: 1456725 - DNA, 15 bp, Homo sapiens
ttctacaggtaactt

SEQ ID NO: 1456726 - DNA, 15 bp, Homo sapiens
tctacaggtaacttt

SEQ ID NO: 1456727 - DNA, 15 bp, Homo sapiens
ctacaggtaactttc

SEQ ID NO: 1456728 - DNA, 15 bp, Homo sapiens
tacaggtaactttca

SEQ ID NO: 1456729 - DNA, 15 bp, Homo sapiens
acaggtaactttcag

SEQ ID NO: 1456730 - DNA, 15 bp, Homo sapiens
caggtaactttcaga

SEQ ID NO: 1456731 - DNA, 15 bp, Homo sapiens
aggtaactttcagaa

SEQ ID NO: 1456732 - DNA, 15 bp, Homo sapiens
ggtaactttcagaaa

SEQ ID NO: 1456733 - DNA, 15 bp, Homo sapiens
gtaactttcagaaat

SEQ ID NO: 1456734 - DNA, 15 bp, Homo sapiens
taactttcagaaatc

SEQ ID NO: 1456735 - DNA, 15 bp, Homo sapiens
aactttcagaaatca

SEQ ID NO: 1456736 - DNA, 15 bp, Homo sapiens
actttcagaaatcag

SEQ ID NO: 1456737 - DNA, 15 bp, Homo sapiens
ctttcagaaatcagg

SEQ ID NO: 1456738 - DNA, 15 bp, Homo sapiens
tttcagaaatcaggc

SEQ ID NO: 1456739 - DNA, 15 bp, Homo sapiens
ttcagaaatcaggcc

SEQ ID NO: 1456740 - DNA, 15 bp, Homo sapiens
tcagaaatcaggcct

SEQ ID NO: 1456741 - DNA, 15 bp, Homo sapiens
cagaaatcaggcctc

SEQ ID NO: 1456742 - DNA, 15 bp, Homo sapiens
agaaatcaggcctct

SEQ ID NO: 1456743 - DNA, 15 bp, Homo sapiens
gaaatcaggcctctc

SEQ ID NO: 1456744 - DNA, 15 bp, Homo sapiens
aaatcaggcctctcg

SEQ ID NO: 1456745 - DNA, 15 bp, Homo sapiens
aatcaggcctctcgt

SEQ ID NO: 1456746 - DNA, 15 bp, Homo sapiens
atcaggcctctcgtc

SEQ ID NO: 1456747 - DNA, 15 bp, Homo sapiens
tcaggcctctcgtcc

SEQ ID NO: 1456748 - DNA, 15 bp, Homo sapiens
caggcctctcgtccc

SEQ ID NO: 1456749 - DNA, 15 bp, Homo sapiens
aggcctctcgtccct

SEQ ID NO: 1456750 - DNA, 15 bp, Homo sapiens
ggcctctcgtcccta

SEQ ID NO: 1456751 - DNA, 15 bp, Homo sapiens
gcctctcgtccctat

SEQ ID NO: 1456752 - DNA, 15 bp, Homo sapiens
cctctcgtccctatt

SEQ ID NO: 1456753 - DNA, 15 bp, Homo sapiens
ctctcgtccctattc

SEQ ID NO: 1456754 - DNA, 15 bp, Homo sapiens
tctcgtccctattcc

SEQ ID NO: 1456755 - DNA, 15 bp, Homo sapiens
ctcgtccctattcct

SEQ ID NO: 1456756 - DNA, 15 bp, Homo sapiens
tcgtccctattcctt

SEQ ID NO: 1456757 - DNA, 15 bp, Homo sapiens
gtccctattccttct

SEQ ID NO: 1456758 - DNA, 15 bp, Homo sapiens
tccctattccttcta

SEQ ID NO: 1456759 - DNA, 15 bp, Homo sapiens
ccctattccttctat

SEQ ID NO: 1456760 - DNA, 15 bp, Homo sapiens
cctattccttctatt

SEQ ID NO: 1456761 - DNA, 15 bp, Homo sapiens
ctattccttctattc

SEQ ID NO: 1456762 - DNA, 15 bp, Homo sapiens
tattccttctattct

SEQ ID NO: 1456763 - DNA, 15 bp, Homo sapiens
attccttctattcta

SEQ ID NO: 1456764 - DNA, 15 bp, Homo sapiens
ttccttctattctag

SEQ ID NO: 1456765 - DNA, 15 bp, Homo sapiens
tccttctattctagc

SEQ ID NO: 1456766 - DNA, 15 bp, Homo sapiens
ccttctattctagcc

SEQ ID NO: 1456767 - DNA, 15 bp, Homo sapiens
cttctattctagcct

SEQ ID NO: 1456768 - DNA, 15 bp, Homo sapiens
ttctattctagcctt

SEQ ID NO: 1456769 - DNA, 15 bp, Homo sapiens
tctattctagcctta

SEQ ID NO: 1456770 - DNA, 15 bp, Homo sapiens
ctattctagccttat

SEQ ID NO: 1456771 - DNA, 15 bp, Homo sapiens
tattctagccttatt

SEQ ID NO: 1456772 - DNA, 15 bp, Homo sapiens
attctagccttattt

SEQ ID NO: 1456773 - DNA, 15 bp, Homo sapiens
ttctagccttatttc

SEQ ID NO: 1456774 - DNA, 15 bp, Homo sapiens
tctagccttatttct

SEQ ID NO: 1456775 - DNA, 15 bp, Homo sapiens
ctagccttatttctt

SEQ ID NO: 1456776 - DNA, 15 bp, Homo sapiens
tagccttatttctta

SEQ ID NO: 1456777 - DNA, 15 bp, Homo sapiens
agccttatttcttat

SEQ ID NO: 1456778 - DNA, 15 bp, Homo sapiens
gccttatttcttatg

SEQ ID NO: 1456779 - DNA, 15 bp, Homo sapiens
ccttatttcttatga

SEQ ID NO: 1456780 - DNA, 15 bp, Homo sapiens
cttatttcttatgag

SEQ ID NO: 1456781 - DNA, 15 bp, Homo sapiens
ttatttcttatgagg

SEQ ID NO: 1456782 - DNA, 15 bp, Homo sapiens
tatttcttatgagga

SEQ ID NO: 1456783 - DNA, 15 bp, Homo sapiens
atttcttatgaggaa

SEQ ID NO: 1456784 - DNA, 15 bp, Homo sapiens
tttcttatgaggaag

SEQ ID NO: 1456785 - DNA, 15 bp, Homo sapiens
ttcttatgaggaaga

SEQ ID NO: 1456786 - DNA, 15 bp, Homo sapiens
tcttatgaggaagat

SEQ ID NO: 1456787 - DNA, 15 bp, Homo sapiens
cttatgaggaagatc

SEQ ID NO: 1456788 - DNA, 15 bp, Homo sapiens
ttatgaggaagatca

SEQ ID NO: 1456789 - DNA, 15 bp, Homo sapiens
tatgaggaagatcag

SEQ ID NO: 1456790 - DNA, 15 bp, Homo sapiens
atgaggaagatcaga

SEQ ID NO: 1456791 - DNA, 15 bp, Homo sapiens
tgaggaagatcagag

SEQ ID NO: 1456792 - DNA, 15 bp, Homo sapiens
gaggaagatcagagg

SEQ ID NO: 1456793 - DNA, 15 bp, Homo sapiens
aggaagatcagaggc

SEQ ID NO: 1456794 - DNA, 15 bp, Homo sapiens
ggaagatcagaggca

SEQ ID NO: 1456795 - DNA, 15 bp, Homo sapiens
gaagatcagaggcaa

SEQ ID NO: 1456796 - DNA, 15 bp, Homo sapiens
aagatcagaggcaag

SEQ ID NO: 1456797 - DNA, 15 bp, Homo sapiens
agatcagaggcaagg

SEQ ID NO: 1456798 - DNA, 15 bp, Homo sapiens
gatcagaggcaagga

SEQ ID NO: 1456799 - DNA, 15 bp, Homo sapiens
atcagaggcaaggag

SEQ ID NO: 1456800 - DNA, 15 bp, Homo sapiens
tcagaggcaaggagc

SEQ ID NO: 1456801 - DNA, 15 bp, Homo sapiens
cagaggcaaggagca

SEQ ID NO: 1456802 - DNA, 15 bp, Homo sapiens
agaggcaaggagcag

SEQ ID NO: 1456803 - DNA, 15 bp, Homo sapiens
gaggcaaggagcaga

SEQ ID NO: 1456804 - DNA, 15 bp, Homo sapiens
aggcaaggagcagaa

SEQ ID NO: 1456805 - DNA, 15 bp, Homo sapiens
ggcaaggagcagaac

SEQ ID NO: 1456806 - DNA, 15 bp, Homo sapiens
gcaaggagcagaacc

SEQ ID NO: 1456807 - DNA, 15 bp, Homo sapiens
caaggagcagaacct

SEQ ID NO: 1456808 - DNA, 15 bp, Homo sapiens
aaggagcagaaccta

SEQ ID NO: 1456809 - DNA, 15 bp, Homo sapiens
aggagcagaacctag

SEQ ID NO: 1456810 - DNA, 15 bp, Homo sapiens
ggagcagaacctaga

SEQ ID NO: 1456811 - DNA, 15 bp, Homo sapiens
gagcagaacctagaa

SEQ ID NO: 1456812 - DNA, 15 bp, Homo sapiens
agcagaacctagaaa

SEQ ID NO: 1456813 - DNA, 15 bp, Homo sapiens
gcagaacctagaaaa

SEQ ID NO: 1456814 - DNA, 15 bp, Homo sapiens
cagaacctagaaaaa

SEQ ID NO: 1456815 - DNA, 15 bp, Homo sapiens
agaacctagaaaaaa

SEQ ID NO: 1456816 - DNA, 15 bp, Homo sapiens
gaacctagaaaaaac

SEQ ID NO: 1456817 - DNA, 15 bp, Homo sapiens
aacctagaaaaaact

SEQ ID NO: 1456818 - DNA, 15 bp, Homo sapiens
acctagaaaaaactt

SEQ ID NO: 1456819 - DNA, 15 bp, Homo sapiens
cctagaaaaaacttt

SEQ ID NO: 1456820 - DNA, 15 bp, Homo sapiens
ctagaaaaaactttg

SEQ ID NO: 1456821 - DNA, 15 bp, Homo sapiens
tagaaaaaactttgt

SEQ ID NO: 1456822 - DNA, 15 bp, Homo sapiens
agaaaaaactttgtc

SEQ ID NO: 1456823 - DNA, 15 bp, Homo sapiens
gaaaaaactttgtca

SEQ ID NO: 1456824 - DNA, 15 bp, Homo sapiens
aaaaaactttgtcaa

SEQ ID NO: 1456825 - DNA, 15 bp, Homo sapiens
aaaaactttgtcaag

SEQ ID NO: 1456826 - DNA, 15 bp, Homo sapiens
aaaactttgtcaagc

SEQ ID NO: 1456827 - DNA, 15 bp, Homo sapiens
aaactttgtcaagcc

SEQ ID NO: 1456828 - DNA, 15 bp, Homo sapiens
aactttgtcaagcct

SEQ ID NO: 1456829 - DNA, 15 bp, Homo sapiens
ctttgtcaagcctaa

SEQ ID NO: 1456830 - DNA, 15 bp, Homo sapiens
ttgtcaagcctaatg

SEQ ID NO: 1456831 - DNA, 15 bp, Homo sapiens
tgtcaagcctaatga

SEQ ID NO: 1456832 - DNA, 15 bp, Homo sapiens
gtcaagcctaatgaa

SEQ ID NO: 1456833 - DNA, 15 bp, Homo sapiens
tcaagcctaatgaaa

SEQ ID NO: 1456834 - DNA, 15 bp, Homo sapiens
caagcctaatgaaac

SEQ ID NO: 1456835 - DNA, 15 bp, Homo sapiens
agcctaatgaaacca

SEQ ID NO: 1456836 - DNA, 15 bp, Homo sapiens
gcctaatgaaaccaa

SEQ ID NO: 1456837 - DNA, 15 bp, Homo sapiens
cctaatgaaaccaaa

SEQ ID NO: 1456838 - DNA, 15 bp, Homo sapiens
taatgaaaccaaaac

SEQ ID NO: 1456839 - DNA, 15 bp, Homo sapiens
aatgaaaccaaaact

SEQ ID NO: 1456840 - DNA, 15 bp, Homo sapiens
atgaaaccaaaactt

SEQ ID NO: 1456841 - DNA, 15 bp, Homo sapiens
tgaaaccaaaactta

SEQ ID NO: 1456842 - DNA, 15 bp, Homo sapiens
gaaaccaaaacttac

SEQ ID NO: 1456843 - DNA, 15 bp, Homo sapiens
aaaccaaaacttact

SEQ ID NO: 1456844 - DNA, 15 bp, Homo sapiens
aaccaaaacttactt

SEQ ID NO: 1456845 - DNA, 15 bp, Homo sapiens
accaaaacttacttt

SEQ ID NO: 1456846 - DNA, 15 bp, Homo sapiens
ccaaaacttactttt

SEQ ID NO: 1456847 - DNA, 15 bp, Homo sapiens
caaaacttacttttg

SEQ ID NO: 1456848 - DNA, 15 bp, Homo sapiens
aaaacttacttttgg

SEQ ID NO: 1456849 - DNA, 15 bp, Homo sapiens
aaacttacttttgga

SEQ ID NO: 1456850 - DNA, 15 bp, Homo sapiens
aacttacttttggaa

SEQ ID NO: 1456851 - DNA, 15 bp, Homo sapiens
acttacttttggaaa

SEQ ID NO: 1456852 - DNA, 15 bp, Homo sapiens
cttacttttggaaag

SEQ ID NO: 1456853 - DNA, 15 bp, Homo sapiens
ttacttttggaaagt

SEQ ID NO: 1456854 - DNA, 15 bp, Homo sapiens
tacttttggaaagtg

SEQ ID NO: 1456855 - DNA, 15 bp, Homo sapiens
acttttggaaagtgc

SEQ ID NO: 1456856 - DNA, 15 bp, Homo sapiens
cttttggaaagtgca

SEQ ID NO: 1456857 - DNA, 15 bp, Homo sapiens
ttttggaaagtgcaa

SEQ ID NO: 1456858 - DNA, 15 bp, Homo sapiens
tttggaaagtgcaac

SEQ ID NO: 1456859 - DNA, 15 bp, Homo sapiens
ttggaaagtgcaaca

SEQ ID NO: 1456860 - DNA, 15 bp, Homo sapiens
tggaaagtgcaacat

SEQ ID NO: 1456861 - DNA, 15 bp, Homo sapiens
ggaaagtgcaacatc

SEQ ID NO: 1456862 - DNA, 15 bp, Homo sapiens
gaaagtgcaacatca

SEQ ID NO: 1456863 - DNA, 15 bp, Homo sapiens
aaagtgcaacatcat

SEQ ID NO: 1456864 - DNA, 15 bp, Homo sapiens
aagtgcaacatcata

SEQ ID NO: 1456865 - DNA, 15 bp, Homo sapiens
agtgcaacatcatat

SEQ ID NO: 1456866 - DNA, 15 bp, Homo sapiens
gtgcaacatcatatg

SEQ ID NO: 1456867 - DNA, 15 bp, Homo sapiens
tgcaacatcatatgg

SEQ ID NO: 1456868 - DNA, 15 bp, Homo sapiens
gcaacatcatatggc

SEQ ID NO: 1456869 - DNA, 15 bp, Homo sapiens
caacatcatatggca

SEQ ID NO: 1456870 - DNA, 15 bp, Homo sapiens
aacatcatatggcac

SEQ ID NO: 1456871 - DNA, 15 bp, Homo sapiens
acatcatatggcacc

SEQ ID NO: 1456872 - DNA, 15 bp, Homo sapiens
catcatatggcaccc

SEQ ID NO: 1456873 - DNA, 15 bp, Homo sapiens
atcatatggcaccca

SEQ ID NO: 1456874 - DNA, 15 bp, Homo sapiens
tcatatggcacccac

SEQ ID NO: 1456875 - DNA, 15 bp, Homo sapiens
atatggcacccacta

SEQ ID NO: 1456876 - DNA, 15 bp, Homo sapiens
tatggcacccactaa

SEQ ID NO: 1456877 - DNA, 15 bp, Homo sapiens
atggcacccactaaa

SEQ ID NO: 1456878 - DNA, 15 bp, Homo sapiens
tggcacccactaaag

SEQ ID NO: 1456879 - DNA, 15 bp, Homo sapiens
ggcacccactaaaga

SEQ ID NO: 1456880 - DNA, 15 bp, Homo sapiens
gcacccactaaagat

SEQ ID NO: 1456881 - DNA, 15 bp, Homo sapiens
cacccactaaagatg

SEQ ID NO: 1456882 - DNA, 15 bp, Homo sapiens
acccactaaagatga

SEQ ID NO: 1456883 - DNA, 15 bp, Homo sapiens
cccactaaagatgag

SEQ ID NO: 1456884 - DNA, 15 bp, Homo sapiens
ccactaaagatgagt

SEQ ID NO: 1456885 - DNA, 15 bp, Homo sapiens
cactaaagatgagtt

SEQ ID NO: 1456886 - DNA, 15 bp, Homo sapiens
actaaagatgagttt

SEQ ID NO: 1456887 - DNA, 15 bp, Homo sapiens
ctaaagatgagtttg

SEQ ID NO: 1456888 - DNA, 15 bp, Homo sapiens
taaagatgagtttga

SEQ ID NO: 1456889 - DNA, 15 bp, Homo sapiens
aaagatgagtttgac

SEQ ID NO: 1456890 - DNA, 15 bp, Homo sapiens
aagatgagtttgact

SEQ ID NO: 1456891 - DNA, 15 bp, Homo sapiens
agatgagtttgactg

SEQ ID NO: 1456892 - DNA, 15 bp, Homo sapiens
gatgagtttgactgc

SEQ ID NO: 1456893 - DNA, 15 bp, Homo sapiens
atgagtttgactgca

SEQ ID NO: 1456894 - DNA, 15 bp, Homo sapiens
tgagtttgactgcaa

SEQ ID NO: 1456895 - DNA, 15 bp, Homo sapiens
gagtttgactgcaaa

SEQ ID NO: 1456896 - DNA, 15 bp, Homo sapiens
agtttgactgcaaag

SEQ ID NO: 1456897 - DNA, 15 bp, Homo sapiens
gtttgactgcaaagc

SEQ ID NO: 1456898 - DNA, 15 bp, Homo sapiens
tttgactgcaaagcc

SEQ ID NO: 1456899 - DNA, 15 bp, Homo sapiens
ttgactgcaaagcct

SEQ ID NO: 1456900 - DNA, 15 bp, Homo sapiens
tgactgcaaagcctg

SEQ ID NO: 1456901 - DNA, 15 bp, Homo sapiens
gactgcaaagcctgg

SEQ ID NO: 1456902 - DNA, 15 bp, Homo sapiens
actgcaaagcctggg

SEQ ID NO: 1456903 - DNA, 15 bp, Homo sapiens
ctgcaaagcctgggc

SEQ ID NO: 1456904 - DNA, 15 bp, Homo sapiens
tgcaaagcctgggct

SEQ ID NO: 1456905 - DNA, 15 bp, Homo sapiens
gcaaagcctgggctt

SEQ ID NO: 1456906 - DNA, 15 bp, Homo sapiens
caaagcctgggctta

SEQ ID NO: 1456907 - DNA, 15 bp, Homo sapiens
aaagcctgggcttat

SEQ ID NO: 1456908 - DNA, 15 bp, Homo sapiens
aagcctgggcttatt

SEQ ID NO: 1456909 - DNA, 15 bp, Homo sapiens
agcctgggcttattt

SEQ ID NO: 1456910 - DNA, 15 bp, Homo sapiens
gcctgggcttatttc

SEQ ID NO: 1456911 - DNA, 15 bp, Homo sapiens
cctgggcttatttct

SEQ ID NO: 1456912 - DNA, 15 bp, Homo sapiens
ctgggcttatttctc

SEQ ID NO: 1456913 - DNA, 15 bp, Homo sapiens
tgggcttatttctct

SEQ ID NO: 1456914 - DNA, 15 bp, Homo sapiens
gggcttatttctctg

SEQ ID NO: 1456915 - DNA, 15 bp, Homo sapiens
ggcttatttctctga

SEQ ID NO: 1456916 - DNA, 15 bp, Homo sapiens
gcttatttctctgat

SEQ ID NO: 1456917 - DNA, 15 bp, Homo sapiens
cttatttctctgatg

SEQ ID NO: 1456918 - DNA, 15 bp, Homo sapiens
ttatttctctgatgt

SEQ ID NO: 1456919 - DNA, 15 bp, Homo sapiens
tatttctctgatgtt

SEQ ID NO: 1456920 - DNA, 15 bp, Homo sapiens
atttctctgatgttg

SEQ ID NO: 1456921 - DNA, 15 bp, Homo sapiens
tttctctgatgttga

SEQ ID NO: 1456922 - DNA, 15 bp, Homo sapiens
ttctctgatgttgac

SEQ ID NO: 1456923 - DNA, 15 bp, Homo sapiens
tctctgatgttgacc

SEQ ID NO: 1456924 - DNA, 15 bp, Homo sapiens
ctctgatgttgacct

SEQ ID NO: 1456925 - DNA, 15 bp, Homo sapiens
tctgatgttgacctg

SEQ ID NO: 1456926 - DNA, 15 bp, Homo sapiens
ctgatgttgacctgg

SEQ ID NO: 1456927 - DNA, 15 bp, Homo sapiens
tgatgttgacctggt

SEQ ID NO: 1456928 - DNA, 15 bp, Homo sapiens
gatgttgacctggta

SEQ ID NO: 1456929 - DNA, 15 bp, Homo sapiens
atgttgacctggtaa

SEQ ID NO: 1456930 - DNA, 15 bp, Homo sapiens
tgttgacctggtaag

SEQ ID NO: 1456931 - DNA, 15 bp, Homo sapiens
gttgacctggtaagc

SEQ ID NO: 1456932 - DNA, 15 bp, Homo sapiens
ttgacctggtaagca

SEQ ID NO: 1456933 - DNA, 15 bp, Homo sapiens
tgacctggtaagcag

SEQ ID NO: 1456934 - DNA, 15 bp, Homo sapiens
gacctggtaagcagg

SEQ ID NO: 1456935 - DNA, 15 bp, Homo sapiens
acctggtaagcaggt

SEQ ID NO: 1456936 - DNA, 15 bp, Homo sapiens
cctggtaagcaggtg

SEQ ID NO: 1456937 - DNA, 15 bp, Homo sapiens
ctggtaagcaggtgt

SEQ ID NO: 1456938 - DNA, 15 bp, Homo sapiens
tggtaagcaggtgtc

SEQ ID NO: 1456939 - DNA, 15 bp, Homo sapiens
ggtaagcaggtgtct

SEQ ID NO: 1456940 - DNA, 15 bp, Homo sapiens
gtaagcaggtgtcta

SEQ ID NO: 1456941 - DNA, 15 bp, Homo sapiens
taagcaggtgtctat

SEQ ID NO: 1456942 - DNA, 15 bp, Homo sapiens
aagcaggtgtctatt

SEQ ID NO: 1456943 - DNA, 15 bp, Homo sapiens
agcaggtgtctattg

SEQ ID NO: 1456944 - DNA, 15 bp, Homo sapiens
gcaggtgtctattgt

SEQ ID NO: 1456945 - DNA, 15 bp, Homo sapiens
caggtgtctattgtg

SEQ ID NO: 1456946 - DNA, 15 bp, Homo sapiens
aggtgtctattgtgc

SEQ ID NO: 1456947 - DNA, 15 bp, Homo sapiens
ggtgtctattgtgct

SEQ ID NO: 1456948 - DNA, 15 bp, Homo sapiens
gtgtctattgtgctg

SEQ ID NO: 1456949 - DNA, 15 bp, Homo sapiens
tgtctattgtgctga

SEQ ID NO: 1456950 - DNA, 15 bp, Homo sapiens
gtctattgtgctgac

SEQ ID NO: 1456951 - DNA, 15 bp, Homo sapiens
tctattgtgctgacc

SEQ ID NO: 1456952 - DNA, 15 bp, Homo sapiens
ctattgtgctgacca

SEQ ID NO: 1456953 - DNA, 15 bp, Homo sapiens
tattgtgctgaccac

SEQ ID NO: 1456954 - DNA, 15 bp, Homo sapiens
attgtgctgaccact

SEQ ID NO: 1456955 - DNA, 15 bp, Homo sapiens
ttgtgctgaccactt

SEQ ID NO: 1456956 - DNA, 15 bp, Homo sapiens
tgtgctgaccacttt

SEQ ID NO: 1456957 - DNA, 15 bp, Homo sapiens
gtgctgaccactttt

SEQ ID NO: 1456958 - DNA, 15 bp, Homo sapiens
tgctgaccacttttt

SEQ ID NO: 1456959 - DNA, 15 bp, Homo sapiens
gctgaccactttttg

SEQ ID NO: 1456960 - DNA, 15 bp, Homo sapiens
ctgaccactttttgg

SEQ ID NO: 1456961 - DNA, 15 bp, Homo sapiens
tgaccactttttggt

SEQ ID NO: 1456962 - DNA, 15 bp, Homo sapiens
gaccactttttggtt

SEQ ID NO: 1456963 - DNA, 15 bp, Homo sapiens
accactttttggttt

SEQ ID NO: 1456964 - DNA, 15 bp, Homo sapiens
ccactttttggttta

SEQ ID NO: 1456965 - DNA, 15 bp, Homo sapiens
cactttttggtttaa

SEQ ID NO: 1456966 - DNA, 15 bp, Homo sapiens
actttttggtttaaa

SEQ ID NO: 1456967 - DNA, 15 bp, Homo sapiens
ctttttggtttaaaa

SEQ ID NO: 1456968 - DNA, 15 bp, Homo sapiens
tttttggtttaaaag

SEQ ID NO: 1456969 - DNA, 15 bp, Homo sapiens
ttttggtttaaaaga

SEQ ID NO: 1456970 - DNA, 15 bp, Homo sapiens
tttggtttaaaagaa

SEQ ID NO: 1456971 - DNA, 15 bp, Homo sapiens
ttggtttaaaagaaa

SEQ ID NO: 1456972 - DNA, 15 bp, Homo sapiens
tggtttaaaagaaat

SEQ ID NO: 1456973 - DNA, 15 bp, Homo sapiens
ggtttaaaagaaatg

SEQ ID NO: 1456974 - DNA, 15 bp, Homo sapiens
gtttaaaagaaatgg

SEQ ID NO: 1456975 - DNA, 15 bp, Homo sapiens
tttaaaagaaatggt

SEQ ID NO: 1456976 - DNA, 15 bp, Homo sapiens
ttaaaagaaatggtc

SEQ ID NO: 1456977 - DNA, 15 bp, Homo sapiens
taaaagaaatggtct

SEQ ID NO: 1456978 - DNA, 15 bp, Homo sapiens
aaaagaaatggtctt

SEQ ID NO: 1456979 - DNA, 15 bp, Homo sapiens
aaagaaatggtcttt

SEQ ID NO: 1456980 - DNA, 15 bp, Homo sapiens
aagaaatggtctttg

SEQ ID NO: 1456981 - DNA, 15 bp, Homo sapiens
agaaatggtctttgt

SEQ ID NO: 1456982 - DNA, 15 bp, Homo sapiens
gaaatggtctttgtg

SEQ ID NO: 1456983 - DNA, 15 bp, Homo sapiens
aaatggtctttgtgt

SEQ ID NO: 1456984 - DNA, 15 bp, Homo sapiens
aatggtctttgtgta

SEQ ID NO: 1456985 - DNA, 15 bp, Homo sapiens
atggtctttgtgtac

SEQ ID NO: 1456986 - DNA, 15 bp, Homo sapiens
tggtctttgtgtact

SEQ ID NO: 1456987 - DNA, 15 bp, Homo sapiens
ggtctttgtgtacta

SEQ ID NO: 1456988 - DNA, 15 bp, Homo sapiens
gtctttgtgtactaa

SEQ ID NO: 1456989 - DNA, 15 bp, Homo sapiens
tctttgtgtactaag

SEQ ID NO: 1456990 - DNA, 15 bp, Homo sapiens
ctttgtgtactaaga

SEQ ID NO: 1456991 - DNA, 15 bp, Homo sapiens
tttgtgtactaagaa

SEQ ID NO: 1456992 - DNA, 15 bp, Homo sapiens
ttgtgtactaagaat

SEQ ID NO: 1456993 - DNA, 15 bp, Homo sapiens
tgtgtactaagaatt

SEQ ID NO: 1456994 - DNA, 15 bp, Homo sapiens
gtgtactaagaattt

SEQ ID NO: 1456995 - DNA, 15 bp, Homo sapiens
tgtactaagaatttt

SEQ ID NO: 1456996 - DNA, 15 bp, Homo sapiens
gtactaagaattttg

SEQ ID NO: 1456997 - DNA, 15 bp, Homo sapiens
tactaagaattttga

SEQ ID NO: 1456998 - DNA, 15 bp, Homo sapiens
actaagaattttgat

SEQ ID NO: 1456999 - DNA, 15 bp, Homo sapiens
ctaagaattttgata

SEQ ID NO: 1457000 - DNA, 15 bp, Homo sapiens
taagaattttgatat

SEQ ID NO: 1457001 - DNA, 15 bp, Homo sapiens
aagaattttgatatt

SEQ ID NO: 1457002 - DNA, 15 bp, Homo sapiens
agaattttgatattt

SEQ ID NO: 1457003 - DNA, 15 bp, Homo sapiens
gaattttgatattta

SEQ ID NO: 1457004 - DNA, 15 bp, Homo sapiens
aattttgatatttat

SEQ ID NO: 1457005 - DNA, 15 bp, Homo sapiens
attttgatatttatc

SEQ ID NO: 1457006 - DNA, 15 bp, Homo sapiens
ttttgatatttatcc

SEQ ID NO: 1457007 - DNA, 15 bp, Homo sapiens
tttgatatttatcct

SEQ ID NO: 1457008 - DNA, 15 bp, Homo sapiens
ttgatatttatccta

SEQ ID NO: 1457009 - DNA, 15 bp, Homo sapiens
tgatatttatcctac

SEQ ID NO: 1457010 - DNA, 15 bp, Homo sapiens
gatatttatcctacg

SEQ ID NO: 1457011 - DNA, 15 bp, Homo sapiens
atatttatcctacgt

SEQ ID NO: 1457012 - DNA, 15 bp, Homo sapiens
tatttatcctacgtg

SEQ ID NO: 1457013 - DNA, 15 bp, Homo sapiens
atttatcctacgtgc

SEQ ID NO: 1457014 - DNA, 15 bp, Homo sapiens
tttatcctacgtgca

SEQ ID NO: 1457015 - DNA, 15 bp, Homo sapiens
ttatcctacgtgcaa

SEQ ID NO: 1457016 - DNA, 15 bp, Homo sapiens
tatcctacgtgcaat

SEQ ID NO: 1457017 - DNA, 15 bp, Homo sapiens
atcctacgtgcaata

SEQ ID NO: 1457018 - DNA, 15 bp, Homo sapiens
tcctacgtgcaataa

SEQ ID NO: 1457019 - DNA, 15 bp, Homo sapiens
cctacgtgcaataag

SEQ ID NO: 1457020 - DNA, 15 bp, Homo sapiens
ctacgtgcaataaga

SEQ ID NO: 1457021 - DNA, 15 bp, Homo sapiens
tacgtgcaataagaa

SEQ ID NO: 1457022 - DNA, 15 bp, Homo sapiens
acgtgcaataagaag

SEQ ID NO: 1457023 - DNA, 15 bp, Homo sapiens
cgtgcaataagaagc

SEQ ID NO: 1457024 - DNA, 15 bp, Homo sapiens
gtgcaataagaagct

SEQ ID NO: 1457025 - DNA, 15 bp, Homo sapiens
tgcaataagaagctt

SEQ ID NO: 1457026 - DNA, 15 bp, Homo sapiens
gcaataagaagcttt

SEQ ID NO: 1457027 - DNA, 15 bp, Homo sapiens
caataagaagcttta

SEQ ID NO: 1457028 - DNA, 15 bp, Homo sapiens
aataagaagctttaa

SEQ ID NO: 1457029 - DNA, 15 bp, Homo sapiens
ataagaagctttaaa

SEQ ID NO: 1457030 - DNA, 15 bp, Homo sapiens
taagaagctttaaat

SEQ ID NO: 1457031 - DNA, 15 bp, Homo sapiens
aagaagctttaaata

SEQ ID NO: 1457032 - DNA, 15 bp, Homo sapiens
agaagctttaaatag

SEQ ID NO: 1457033 - DNA, 15 bp, Homo sapiens
gaagctttaaatagg

SEQ ID NO: 1457034 - DNA, 15 bp, Homo sapiens
aagctttaaatagga

SEQ ID NO: 1457035 - DNA, 15 bp, Homo sapiens
agctttaaataggag

SEQ ID NO: 1457036 - DNA, 15 bp, Homo sapiens
gctttaaataggaga

SEQ ID NO: 1457037 - DNA, 15 bp, Homo sapiens
ctttaaataggagag

SEQ ID NO: 1457038 - DNA, 15 bp, Homo sapiens
tttaaataggagagt

SEQ ID NO: 1457039 - DNA, 15 bp, Homo sapiens
ttaaataggagagtt

SEQ ID NO: 1457040 - DNA, 15 bp, Homo sapiens
taaataggagagttg

SEQ ID NO: 1457041 - DNA, 15 bp, Homo sapiens
aaataggagagttga

SEQ ID NO: 1457042 - DNA, 15 bp, Homo sapiens
aataggagagttgat

SEQ ID NO: 1457043 - DNA, 15 bp, Homo sapiens
ataggagagttgatc

SEQ ID NO: 1457044 - DNA, 15 bp, Homo sapiens
taggagagttgatca

SEQ ID NO: 1457045 - DNA, 15 bp, Homo sapiens
aggagagttgatcat

SEQ ID NO: 1457046 - DNA, 15 bp, Homo sapiens
ggagagttgatcatt

SEQ ID NO: 1457047 - DNA, 15 bp, Homo sapiens
gagagttgatcatta

SEQ ID NO: 1457048 - DNA, 15 bp, Homo sapiens
agagttgatcattat

SEQ ID NO: 1457049 - DNA, 15 bp, Homo sapiens
gagttgatcattata

SEQ ID NO: 1457050 - DNA, 15 bp, Homo sapiens
agttgatcattatat

SEQ ID NO: 1457051 - DNA, 15 bp, Homo sapiens
gttgatcattatatt

SEQ ID NO: 1457052 - DNA, 15 bp, Homo sapiens
ttgatcattatattt

SEQ ID NO: 1457053 - DNA, 15 bp, Homo sapiens
tgatcattatatttg

SEQ ID NO: 1457054 - DNA, 15 bp, Homo sapiens
gatcattatatttgt

SEQ ID NO: 1457055 - DNA, 15 bp, Homo sapiens
atcattatatttgtg

SEQ ID NO: 1457056 - DNA, 15 bp, Homo sapiens
tcattatatttgtgt

SEQ ID NO: 1457057 - DNA, 15 bp, Homo sapiens
cattatatttgtgtt

SEQ ID NO: 1457058 - DNA, 15 bp, Homo sapiens
attatatttgtgttt

SEQ ID NO: 1457059 - DNA, 15 bp, Homo sapiens
ttatatttgtgtttt

SEQ ID NO: 1457060 - DNA, 15 bp, Homo sapiens
tatatttgtgtttta

SEQ ID NO: 1457061 - DNA, 15 bp, Homo sapiens
atatttgtgttttag

SEQ ID NO: 1457062 - DNA, 15 bp, Homo sapiens
tatttgtgttttaga

SEQ ID NO: 1457063 - DNA, 15 bp, Homo sapiens
atttgtgttttagaa

SEQ ID NO: 1457064 - DNA, 15 bp, Homo sapiens
tttgtgttttagaaa

SEQ ID NO: 1457065 - DNA, 15 bp, Homo sapiens
ttgtgttttagaaat

SEQ ID NO: 1457066 - DNA, 15 bp, Homo sapiens
tgtgttttagaaatg

SEQ ID NO: 1457067 - DNA, 15 bp, Homo sapiens
gtgttttagaaatgt

SEQ ID NO: 1457068 - DNA, 15 bp, Homo sapiens
tgttttagaaatgtc

SEQ ID NO: 1457069 - DNA, 15 bp, Homo sapiens
gttttagaaatgtca

SEQ ID NO: 1457070 - DNA, 15 bp, Homo sapiens
ttttagaaatgtcat

SEQ ID NO: 1457071 - DNA, 15 bp, Homo sapiens
tttagaaatgtcatt

SEQ ID NO: 1457072 - DNA, 15 bp, Homo sapiens
ttagaaatgtcattc

SEQ ID NO: 1457073 - DNA, 15 bp, Homo sapiens
tagaaatgtcattct

SEQ ID NO: 1457074 - DNA, 15 bp, Homo sapiens
agaaatgtcattctg

SEQ ID NO: 1457075 - DNA, 15 bp, Homo sapiens
gaaatgtcattctgg

SEQ ID NO: 1457076 - DNA, 15 bp, Homo sapiens
aaatgtcattctgga

SEQ ID NO: 1457077 - DNA, 15 bp, Homo sapiens
aatgtcattctggaa

SEQ ID NO: 1457078 - DNA, 15 bp, Homo sapiens
atgtcattctggaat

SEQ ID NO: 1457079 - DNA, 15 bp, Homo sapiens
tgtcattctggaatc

SEQ ID NO: 1457080 - DNA, 15 bp, Homo sapiens
gtcattctggaatct

SEQ ID NO: 1457081 - DNA, 15 bp, Homo sapiens
tcattctggaatcta

SEQ ID NO: 1457082 - DNA, 15 bp, Homo sapiens
cattctggaatctac

SEQ ID NO: 1457083 - DNA, 15 bp, Homo sapiens
attctggaatctact

SEQ ID NO: 1457084 - DNA, 15 bp, Homo sapiens
ttctggaatctactg

SEQ ID NO: 1457085 - DNA, 15 bp, Homo sapiens
tctggaatctactga

SEQ ID NO: 1457086 - DNA, 15 bp, Homo sapiens
ctggaatctactgaa

SEQ ID NO: 1457087 - DNA, 15 bp, Homo sapiens
tggaatctactgaag

SEQ ID NO: 1457088 - DNA, 15 bp, Homo sapiens
ggaatctactgaaga

SEQ ID NO: 1457089 - DNA, 15 bp, Homo sapiens
gaatctactgaagag

SEQ ID NO: 1457090 - DNA, 15 bp, Homo sapiens
aatctactgaagagg

SEQ ID NO: 1457091 - DNA, 15 bp, Homo sapiens
atctactgaagagga

SEQ ID NO: 1457092 - DNA, 15 bp, Homo sapiens
tctactgaagaggat

SEQ ID NO: 1457093 - DNA, 15 bp, Homo sapiens
ctactgaagaggatg

SEQ ID NO: 1457094 - DNA, 15 bp, Homo sapiens
tactgaagaggatgg

SEQ ID NO: 1457095 - DNA, 15 bp, Homo sapiens
actgaagaggatgga

SEQ ID NO: 1457096 - DNA, 15 bp, Homo sapiens
ctgaagaggatggat

SEQ ID NO: 1457097 - DNA, 15 bp, Homo sapiens
tgaagaggatggatt

SEQ ID NO: 1457098 - DNA, 15 bp, Homo sapiens
gaagaggatggatta

SEQ ID NO: 1457099 - DNA, 15 bp, Homo sapiens
aagaggatggattat

SEQ ID NO: 1457100 - DNA, 15 bp, Homo sapiens
agaggatggattata

SEQ ID NO: 1457101 - DNA, 15 bp, Homo sapiens
gaggatggattatat

SEQ ID NO: 1457102 - DNA, 15 bp, Homo sapiens
aggatggattatatt

SEQ ID NO: 1457103 - DNA, 15 bp, Homo sapiens
ggatggattatattt

SEQ ID NO: 1457104 - DNA, 15 bp, Homo sapiens
gatggattatatttt

SEQ ID NO: 1457105 - DNA, 15 bp, Homo sapiens
atggattatattttt

SEQ ID NO: 1457106 - DNA, 15 bp, Homo sapiens
tggattatatttttg

SEQ ID NO: 1457107 - DNA, 15 bp, Homo sapiens
ggattatatttttgg

SEQ ID NO: 1457108 - DNA, 15 bp, Homo sapiens
attatatttttggaa

SEQ ID NO: 1457109 - DNA, 15 bp, Homo sapiens
ttatatttttggaag

SEQ ID NO: 1457110 - DNA, 15 bp, Homo sapiens
tatatttttggaagg

SEQ ID NO: 1457111 - DNA, 15 bp, Homo sapiens
atatttttggaaggt

SEQ ID NO: 1457112 - DNA, 15 bp, Homo sapiens
tatttttggaaggtg

SEQ ID NO: 1457113 - DNA, 15 bp, Homo sapiens
atttttggaaggtgg

SEQ ID NO: 1457114 - DNA, 15 bp, Homo sapiens
tttttggaaggtggg

SEQ ID NO: 1457115 - DNA, 15 bp, Homo sapiens
ttttggaaggtggga

SEQ ID NO: 1457116 - DNA, 15 bp, Homo sapiens
tttggaaggtgggag

SEQ ID NO: 1457117 - DNA, 15 bp, Homo sapiens
ttggaaggtgggagg

SEQ ID NO: 1457118 - DNA, 15 bp, Homo sapiens
tggaaggtgggaggc

SEQ ID NO: 1457119 - DNA, 15 bp, Homo sapiens
ggaaggtgggaggca

SEQ ID NO: 1457120 - DNA, 15 bp, Homo sapiens
gaaggtgggaggcag

SEQ ID NO: 1457121 - DNA, 15 bp, Homo sapiens
aaggtgggaggcagg

SEQ ID NO: 1457122 - DNA, 15 bp, Homo sapiens
aggtgggaggcaggt

SEQ ID NO: 1457123 - DNA, 15 bp, Homo sapiens
ggtgggaggcaggtt

SEQ ID NO: 1457124 - DNA, 15 bp, Homo sapiens
gtgggaggcaggttg

SEQ ID NO: 1457125 - DNA, 15 bp, Homo sapiens
tgggaggcaggttgg

SEQ ID NO: 1457126 - DNA, 15 bp, Homo sapiens
gggaggcaggttgga

SEQ ID NO: 1457127 - DNA, 15 bp, Homo sapiens
ggaggcaggttggac

SEQ ID NO: 1457128 - DNA, 15 bp, Homo sapiens
gaggcaggttggact

SEQ ID NO: 1457129 - DNA, 15 bp, Homo sapiens
aggcaggttggactg

SEQ ID NO: 1457130 - DNA, 15 bp, Homo sapiens
ggcaggttggactgg

SEQ ID NO: 1457131 - DNA, 15 bp, Homo sapiens
gcaggttggactggc

SEQ ID NO: 1457132 - DNA, 15 bp, Homo sapiens
caggttggactggca

SEQ ID NO: 1457133 - DNA, 15 bp, Homo sapiens
aggttggactggcat

SEQ ID NO: 1457134 - DNA, 15 bp, Homo sapiens
ggttggactggcata

SEQ ID NO: 1457135 - DNA, 15 bp, Homo sapiens
gttggactggcataa

SEQ ID NO: 1457136 - DNA, 15 bp, Homo sapiens
ttggactggcataaa

SEQ ID NO: 1457137 - DNA, 15 bp, Homo sapiens
tggactggcataaaa

SEQ ID NO: 1457138 - DNA, 15 bp, Homo sapiens
ggactggcataaaaa

SEQ ID NO: 1457139 - DNA, 15 bp, Homo sapiens
gactggcataaaaat

SEQ ID NO: 1457140 - DNA, 15 bp, Homo sapiens
actggcataaaaatt

SEQ ID NO: 1457141 - DNA, 15 bp, Homo sapiens
ctggcataaaaattg

SEQ ID NO: 1457142 - DNA, 15 bp, Homo sapiens
tggcataaaaattga

SEQ ID NO: 1457143 - DNA, 15 bp, Homo sapiens
ggcataaaaattgat

SEQ ID NO: 1457144 - DNA, 15 bp, Homo sapiens
gcataaaaattgatg

SEQ ID NO: 1457145 - DNA, 15 bp, Homo sapiens
cataaaaattgatga

SEQ ID NO: 1457146 - DNA, 15 bp, Homo sapiens
ataaaaattgatgag

SEQ ID NO: 1457147 - DNA, 15 bp, Homo sapiens
taaaaattgatgaga

SEQ ID NO: 1457148 - DNA, 15 bp, Homo sapiens
aaaaattgatgagaa

SEQ ID NO: 1457149 - DNA, 15 bp, Homo sapiens
aaaattgatgagaaa

SEQ ID NO: 1457150 - DNA, 15 bp, Homo sapiens
aaattgatgagaaat

SEQ ID NO: 1457151 - DNA, 15 bp, Homo sapiens
aattgatgagaaatc

SEQ ID NO: 1457152 - DNA, 15 bp, Homo sapiens
attgatgagaaatcc

SEQ ID NO: 1457153 - DNA, 15 bp, Homo sapiens
ttgatgagaaatcca

SEQ ID NO: 1457154 - DNA, 15 bp, Homo sapiens
tgatgagaaatccac

SEQ ID NO: 1457155 - DNA, 15 bp, Homo sapiens
gatgagaaatccact

SEQ ID NO: 1457156 - DNA, 15 bp, Homo sapiens
atgagaaatccactc

SEQ ID NO: 1457157 - DNA, 15 bp, Homo sapiens
tgagaaatccactct

SEQ ID NO: 1457158 - DNA, 15 bp, Homo sapiens
gagaaatccactctg

SEQ ID NO: 1457159 - DNA, 15 bp, Homo sapiens
agaaatccactctgg

SEQ ID NO: 1457160 - DNA, 15 bp, Homo sapiens
gaaatccactctggt

SEQ ID NO: 1457161 - DNA, 15 bp, Homo sapiens
aaatccactctggtt

SEQ ID NO: 1457162 - DNA, 15 bp, Homo sapiens
aatccactctggttc

SEQ ID NO: 1457163 - DNA, 15 bp, Homo sapiens
atccactctggttca

SEQ ID NO: 1457164 - DNA, 15 bp, Homo sapiens
tccactctggttcat

SEQ ID NO: 1457165 - DNA, 15 bp, Homo sapiens
ccactctggttcata

SEQ ID NO: 1457166 - DNA, 15 bp, Homo sapiens
cactctggttcatag

SEQ ID NO: 1457167 - DNA, 15 bp, Homo sapiens
actctggttcatagg

SEQ ID NO: 1457168 - DNA, 15 bp, Homo sapiens
ctctggttcataggt

SEQ ID NO: 1457169 - DNA, 15 bp, Homo sapiens
tctggttcataggtg

SEQ ID NO: 1457170 - DNA, 15 bp, Homo sapiens
ctggttcataggtga

SEQ ID NO: 1457171 - DNA, 15 bp, Homo sapiens
tggttcataggtgag

SEQ ID NO: 1457172 - DNA, 15 bp, Homo sapiens
ggttcataggtgaga

SEQ ID NO: 1457173 - DNA, 15 bp, Homo sapiens
gttcataggtgagag

SEQ ID NO: 1457174 - DNA, 15 bp, Homo sapiens
ttcataggtgagaga

SEQ ID NO: 1457175 - DNA, 15 bp, Homo sapiens
tcataggtgagagag

SEQ ID NO: 1457176 - DNA, 15 bp, Homo sapiens
cataggtgagagagc

SEQ ID NO: 1457177 - DNA, 15 bp, Homo sapiens
ataggtgagagagct

SEQ ID NO: 1457178 - DNA, 15 bp, Homo sapiens
taggtgagagagctt

SEQ ID NO: 1457179 - DNA, 15 bp, Homo sapiens
aggtgagagagctta

SEQ ID NO: 1457180 - DNA, 15 bp, Homo sapiens
ggtgagagagcttat

SEQ ID NO: 1457181 - DNA, 15 bp, Homo sapiens
gtgagagagcttata

SEQ ID NO: 1457182 - DNA, 15 bp, Homo sapiens
tgagagagcttatac

SEQ ID NO: 1457183 - DNA, 15 bp, Homo sapiens
gagagagcttatact

SEQ ID NO: 1457184 - DNA, 15 bp, Homo sapiens
agagagcttatactc

SEQ ID NO: 1457185 - DNA, 15 bp, Homo sapiens
gagagcttatactca

SEQ ID NO: 1457186 - DNA, 15 bp, Homo sapiens
agagcttatactcat

SEQ ID NO: 1457187 - DNA, 15 bp, Homo sapiens
gagcttatactcata

SEQ ID NO: 1457188 - DNA, 15 bp, Homo sapiens
agcttatactcatag

SEQ ID NO: 1457189 - DNA, 15 bp, Homo sapiens
gcttatactcatagg

SEQ ID NO: 1457190 - DNA, 15 bp, Homo sapiens
cttatactcatagga

SEQ ID NO: 1457191 - DNA, 15 bp, Homo sapiens
ttatactcataggat

SEQ ID NO: 1457192 - DNA, 15 bp, Homo sapiens
tatactcataggatt

SEQ ID NO: 1457193 - DNA, 15 bp, Homo sapiens
atactcataggattg

SEQ ID NO: 1457194 - DNA, 15 bp, Homo sapiens
tactcataggattga

SEQ ID NO: 1457195 - DNA, 15 bp, Homo sapiens
actcataggattgat

SEQ ID NO: 1457196 - DNA, 15 bp, Homo sapiens
ctcataggattgatg

SEQ ID NO: 1457197 - DNA, 15 bp, Homo sapiens
tcataggattgatgt

SEQ ID NO: 1457198 - DNA, 15 bp, Homo sapiens
cataggattgatgtc

SEQ ID NO: 1457199 - DNA, 15 bp, Homo sapiens
ataggattgatgtct

SEQ ID NO: 1457200 - DNA, 15 bp, Homo sapiens
taggattgatgtctt

SEQ ID NO: 1457201 - DNA, 15 bp, Homo sapiens
aggattgatgtcttc

SEQ ID NO: 1457202 - DNA, 15 bp, Homo sapiens
ggattgatgtcttcc

SEQ ID NO: 1457203 - DNA, 15 bp, Homo sapiens
gattgatgtcttccc

SEQ ID NO: 1457204 - DNA, 15 bp, Homo sapiens
attgatgtcttccct

SEQ ID NO: 1457205 - DNA, 15 bp, Homo sapiens
ttgatgtcttccctc

SEQ ID NO: 1457206 - DNA, 15 bp, Homo sapiens
tgatgtcttccctcc

SEQ ID NO: 1457207 - DNA, 15 bp, Homo sapiens
gatgtcttccctccc

SEQ ID NO: 1457208 - DNA, 15 bp, Homo sapiens
atgtcttccctccct

SEQ ID NO: 1457209 - DNA, 15 bp, Homo sapiens
tgtcttccctcccta

SEQ ID NO: 1457210 - DNA, 15 bp, Homo sapiens
gtcttccctccctag

SEQ ID NO: 1457211 - DNA, 15 bp, Homo sapiens
tcttccctccctagg

SEQ ID NO: 1457212 - DNA, 15 bp, Homo sapiens
cttccctccctagga

SEQ ID NO: 1457213 - DNA, 15 bp, Homo sapiens
ttccctccctaggaa

SEQ ID NO: 1457214 - DNA, 15 bp, Homo sapiens
tccctccctaggaaa

SEQ ID NO: 1457215 - DNA, 15 bp, Homo sapiens
ccctccctaggaaaa

SEQ ID NO: 1457216 - DNA, 15 bp, Homo sapiens
cctccctaggaaaaa

SEQ ID NO: 1457217 - DNA, 15 bp, Homo sapiens
ctccctaggaaaaag

SEQ ID NO: 1457218 - DNA, 15 bp, Homo sapiens
tccctaggaaaaaga

SEQ ID NO: 1457219 - DNA, 15 bp, Homo sapiens
ccctaggaaaaagat

SEQ ID NO: 1457220 - DNA, 15 bp, Homo sapiens
cctaggaaaaagatg

SEQ ID NO: 1457221 - DNA, 15 bp, Homo sapiens
ctaggaaaaagatgt

SEQ ID NO: 1457222 - DNA, 15 bp, Homo sapiens
taggaaaaagatgtg

SEQ ID NO: 1457223 - DNA, 15 bp, Homo sapiens
aggaaaaagatgtgc

SEQ ID NO: 1457224 - DNA, 15 bp, Homo sapiens
ggaaaaagatgtgca

SEQ ID NO: 1457225 - DNA, 15 bp, Homo sapiens
gaaaaagatgtgcac

SEQ ID NO: 1457226 - DNA, 15 bp, Homo sapiens
aaaaagatgtgcact

SEQ ID NO: 1457227 - DNA, 15 bp, Homo sapiens
aaaagatgtgcactc

SEQ ID NO: 1457228 - DNA, 15 bp, Homo sapiens
aaagatgtgcactca

SEQ ID NO: 1457229 - DNA, 15 bp, Homo sapiens
aagatgtgcactcag

SEQ ID NO: 1457230 - DNA, 15 bp, Homo sapiens
agatgtgcactcagg

SEQ ID NO: 1457231 - DNA, 15 bp, Homo sapiens
gatgtgcactcaggc

SEQ ID NO: 1457232 - DNA, 15 bp, Homo sapiens
atgtgcactcaggcc

SEQ ID NO: 1457233 - DNA, 15 bp, Homo sapiens
tgtgcactcaggcct

SEQ ID NO: 1457234 - DNA, 15 bp, Homo sapiens
gtgcactcaggcctg

SEQ ID NO: 1457235 - DNA, 15 bp, Homo sapiens
tgcactcaggcctga

SEQ ID NO: 1457236 - DNA, 15 bp, Homo sapiens
gcactcaggcctgat

SEQ ID NO: 1457237 - DNA, 15 bp, Homo sapiens
cactcaggcctgatt

SEQ ID NO: 1457238 - DNA, 15 bp, Homo sapiens
actcaggcctgattg

SEQ ID NO: 1457239 - DNA, 15 bp, Homo sapiens
ctcaggcctgattgg

SEQ ID NO: 1457240 - DNA, 15 bp, Homo sapiens
tcaggcctgattgga

SEQ ID NO: 1457241 - DNA, 15 bp, Homo sapiens
caggcctgattggac

SEQ ID NO: 1457242 - DNA, 15 bp, Homo sapiens
aggcctgattggacc

SEQ ID NO: 1457243 - DNA, 15 bp, Homo sapiens
ggcctgattggaccc

SEQ ID NO: 1457244 - DNA, 15 bp, Homo sapiens
gcctgattggacccc

SEQ ID NO: 1457245 - DNA, 15 bp, Homo sapiens
cctgattggacccct

SEQ ID NO: 1457246 - DNA, 15 bp, Homo sapiens
ctgattggacccctt

SEQ ID NO: 1457247 - DNA, 15 bp, Homo sapiens
tgattggaccccttc

SEQ ID NO: 1457248 - DNA, 15 bp, Homo sapiens
gattggaccccttct

SEQ ID NO: 1457249 - DNA, 15 bp, Homo sapiens
attggaccccttctg

SEQ ID NO: 1457250 - DNA, 15 bp, Homo sapiens
ttggaccccttctgg

SEQ ID NO: 1457251 - DNA, 15 bp, Homo sapiens
tggaccccttctggt

SEQ ID NO: 1457252 - DNA, 15 bp, Homo sapiens
ggaccccttctggtc

SEQ ID NO: 1457253 - DNA, 15 bp, Homo sapiens
gaccccttctggtct

SEQ ID NO: 1457254 - DNA, 15 bp, Homo sapiens
accccttctggtctg

SEQ ID NO: 1457255 - DNA, 15 bp, Homo sapiens
ccccttctggtctgc

SEQ ID NO: 1457256 - DNA, 15 bp, Homo sapiens
cccttctggtctgcc

SEQ ID NO: 1457257 - DNA, 15 bp, Homo sapiens
ccttctggtctgcca

SEQ ID NO: 1457258 - DNA, 15 bp, Homo sapiens
cttctggtctgccac

SEQ ID NO: 1457259 - DNA, 15 bp, Homo sapiens
ttctggtctgccaca

SEQ ID NO: 1457260 - DNA, 15 bp, Homo sapiens
tctggtctgccacac

SEQ ID NO: 1457261 - DNA, 15 bp, Homo sapiens
ctggtctgccacact

SEQ ID NO: 1457262 - DNA, 15 bp, Homo sapiens
tggtctgccacacta

SEQ ID NO: 1457263 - DNA, 15 bp, Homo sapiens
ggtctgccacactaa

SEQ ID NO: 1457264 - DNA, 15 bp, Homo sapiens
gtctgccacactaac

SEQ ID NO: 1457265 - DNA, 15 bp, Homo sapiens
tctgccacactaaca

SEQ ID NO: 1457266 - DNA, 15 bp, Homo sapiens
ctgccacactaacac

SEQ ID NO: 1457267 - DNA, 15 bp, Homo sapiens
tgccacactaacaca

SEQ ID NO: 1457268 - DNA, 15 bp, Homo sapiens
gccacactaacacac

SEQ ID NO: 1457269 - DNA, 15 bp, Homo sapiens
ccacactaacacact

SEQ ID NO: 1457270 - DNA, 15 bp, Homo sapiens
cacactaacacactg

SEQ ID NO: 1457271 - DNA, 15 bp, Homo sapiens
acactaacacactga

SEQ ID NO: 1457272 - DNA, 15 bp, Homo sapiens
cactaacacactgaa

SEQ ID NO: 1457273 - DNA, 15 bp, Homo sapiens
actaacacactgaac

SEQ ID NO: 1457274 - DNA, 15 bp, Homo sapiens
ctaacacactgaacc

SEQ ID NO: 1457275 - DNA, 15 bp, Homo sapiens
taacacactgaaccc

SEQ ID NO: 1457276 - DNA, 15 bp, Homo sapiens
aacacactgaaccct

SEQ ID NO: 1457277 - DNA, 15 bp, Homo sapiens
acacactgaaccctg

SEQ ID NO: 1457278 - DNA, 15 bp, Homo sapiens
cacactgaaccctgc

SEQ ID NO: 1457279 - DNA, 15 bp, Homo sapiens
acactgaaccctgct

SEQ ID NO: 1457280 - DNA, 15 bp, Homo sapiens
cactgaaccctgctc

SEQ ID NO: 1457281 - DNA, 15 bp, Homo sapiens
actgaaccctgctca

SEQ ID NO: 1457282 - DNA, 15 bp, Homo sapiens
ctgaaccctgctcat

SEQ ID NO: 1457283 - DNA, 15 bp, Homo sapiens
tgaaccctgctcatg

SEQ ID NO: 1457284 - DNA, 15 bp, Homo sapiens
gaaccctgctcatgg

SEQ ID NO: 1457285 - DNA, 15 bp, Homo sapiens
aaccctgctcatggg

SEQ ID NO: 1457286 - DNA, 15 bp, Homo sapiens
accctgctcatggga

SEQ ID NO: 1457287 - DNA, 15 bp, Homo sapiens
ccctgctcatgggag

SEQ ID NO: 1457288 - DNA, 15 bp, Homo sapiens
cctgctcatgggaga

SEQ ID NO: 1457289 - DNA, 15 bp, Homo sapiens
ctgctcatgggagac

SEQ ID NO: 1457290 - DNA, 15 bp, Homo sapiens
tgctcatgggagaca

SEQ ID NO: 1457291 - DNA, 15 bp, Homo sapiens
gctcatgggagacaa

SEQ ID NO: 1457292 - DNA, 15 bp, Homo sapiens
ctcatgggagacaag

SEQ ID NO: 1457293 - DNA, 15 bp, Homo sapiens
tcatgggagacaagt

SEQ ID NO: 1457294 - DNA, 15 bp, Homo sapiens
catgggagacaagtg

SEQ ID NO: 1457295 - DNA, 15 bp, Homo sapiens
atgggagacaagtga

SEQ ID NO: 1457296 - DNA, 15 bp, Homo sapiens
tgggagacaagtgac

SEQ ID NO: 1457297 - DNA, 15 bp, Homo sapiens
gggagacaagtgaca

SEQ ID NO: 1457298 - DNA, 15 bp, Homo sapiens
ggagacaagtgacag

SEQ ID NO: 1457299 - DNA, 15 bp, Homo sapiens
gagacaagtgacagt

SEQ ID NO: 1457300 - DNA, 15 bp, Homo sapiens
agacaagtgacagta

SEQ ID NO: 1457301 - DNA, 15 bp, Homo sapiens
gacaagtgacagtac

SEQ ID NO: 1457302 - DNA, 15 bp, Homo sapiens
acaagtgacagtaca

SEQ ID NO: 1457303 - DNA, 15 bp, Homo sapiens
caagtgacagtacag

SEQ ID NO: 1457304 - DNA, 15 bp, Homo sapiens
aagtgacagtacagg

SEQ ID NO: 1457305 - DNA, 15 bp, Homo sapiens
agtgacagtacagga

SEQ ID NO: 1457306 - DNA, 15 bp, Homo sapiens
gtgacagtacaggaa

SEQ ID NO: 1457307 - DNA, 15 bp, Homo sapiens
tgacagtacaggaat

SEQ ID NO: 1457308 - DNA, 15 bp, Homo sapiens
gacagtacaggaatt

SEQ ID NO: 1457309 - DNA, 15 bp, Homo sapiens
acagtacaggaattt

SEQ ID NO: 1457310 - DNA, 15 bp, Homo sapiens
cagtacaggaatttg

SEQ ID NO: 1457311 - DNA, 15 bp, Homo sapiens
agtacaggaatttgc

SEQ ID NO: 1457312 - DNA, 15 bp, Homo sapiens
gtacaggaatttgct

SEQ ID NO: 1457313 - DNA, 15 bp, Homo sapiens
tacaggaatttgctc

SEQ ID NO: 1457314 - DNA, 15 bp, Homo sapiens
acaggaatttgctct

SEQ ID NO: 1457315 - DNA, 15 bp, Homo sapiens
caggaatttgctctg

SEQ ID NO: 1457316 - DNA, 15 bp, Homo sapiens
aggaatttgctctgt

SEQ ID NO: 1457317 - DNA, 15 bp, Homo sapiens
ggaatttgctctgtt

SEQ ID NO: 1457318 - DNA, 15 bp, Homo sapiens
gaatttgctctgttt

SEQ ID NO: 1457319 - DNA, 15 bp, Homo sapiens
aatttgctctgtttt

SEQ ID NO: 1457320 - DNA, 15 bp, Homo sapiens
atttgctctgttttt

SEQ ID NO: 1457321 - DNA, 15 bp, Homo sapiens
tttgctctgtttttc

SEQ ID NO: 1457322 - DNA, 15 bp, Homo sapiens
ttgctctgtttttca

SEQ ID NO: 1457323 - DNA, 15 bp, Homo sapiens
tgctctgtttttcac

SEQ ID NO: 1457324 - DNA, 15 bp, Homo sapiens
gctctgtttttcacc

SEQ ID NO: 1457325 - DNA, 15 bp, Homo sapiens
ctctgtttttcacca

SEQ ID NO: 1457326 - DNA, 15 bp, Homo sapiens
tctgtttttcaccat

SEQ ID NO: 1457327 - DNA, 15 bp, Homo sapiens
ctgtttttcaccatc

SEQ ID NO: 1457328 - DNA, 15 bp, Homo sapiens
tgtttttcaccatct

SEQ ID NO: 1457329 - DNA, 15 bp, Homo sapiens
gtttttcaccatctt

SEQ ID NO: 1457330 - DNA, 15 bp, Homo sapiens
tttttcaccatcttt

SEQ ID NO: 1457331 - DNA, 15 bp, Homo sapiens
ttttcaccatctttg

SEQ ID NO: 1457332 - DNA, 15 bp, Homo sapiens
tttcaccatctttga

SEQ ID NO: 1457333 - DNA, 15 bp, Homo sapiens
ttcaccatctttgat

SEQ ID NO: 1457334 - DNA, 15 bp, Homo sapiens
tcaccatctttgatg

SEQ ID NO: 1457335 - DNA, 15 bp, Homo sapiens
caccatctttgatga

SEQ ID NO: 1457336 - DNA, 15 bp, Homo sapiens
accatctttgatgag

SEQ ID NO: 1457337 - DNA, 15 bp, Homo sapiens
ccatctttgatgaga

SEQ ID NO: 1457338 - DNA, 15 bp, Homo sapiens
catctttgatgagac

SEQ ID NO: 1457339 - DNA, 15 bp, Homo sapiens
atctttgatgagacc

SEQ ID NO: 1457340 - DNA, 15 bp, Homo sapiens
tctttgatgagacca

SEQ ID NO: 1457341 - DNA, 15 bp, Homo sapiens
ctttgatgagaccaa

SEQ ID NO: 1457342 - DNA, 15 bp, Homo sapiens
tttgatgagaccaaa

SEQ ID NO: 1457343 - DNA, 15 bp, Homo sapiens
ttgatgagaccaaaa

SEQ ID NO: 1457344 - DNA, 15 bp, Homo sapiens
tgatgagaccaaaag

SEQ ID NO: 1457345 - DNA, 15 bp, Homo sapiens
gatgagaccaaaagc

SEQ ID NO: 1457346 - DNA, 15 bp, Homo sapiens
atgagaccaaaagct

SEQ ID NO: 1457347 - DNA, 15 bp, Homo sapiens
tgagaccaaaagctg

SEQ ID NO: 1457348 - DNA, 15 bp, Homo sapiens
gagaccaaaagctgg

SEQ ID NO: 1457349 - DNA, 15 bp, Homo sapiens
agaccaaaagctggt

SEQ ID NO: 1457350 - DNA, 15 bp, Homo sapiens
gaccaaaagctggta

SEQ ID NO: 1457351 - DNA, 15 bp, Homo sapiens
accaaaagctggtac

SEQ ID NO: 1457352 - DNA, 15 bp, Homo sapiens
ccaaaagctggtact

SEQ ID NO: 1457353 - DNA, 15 bp, Homo sapiens
caaaagctggtactt

SEQ ID NO: 1457354 - DNA, 15 bp, Homo sapiens
aaaagctggtacttc

SEQ ID NO: 1457355 - DNA, 15 bp, Homo sapiens
aaagctggtacttca

SEQ ID NO: 1457356 - DNA, 15 bp, Homo sapiens
aagctggtacttcac

SEQ ID NO: 1457357 - DNA, 15 bp, Homo sapiens
agctggtacttcact

SEQ ID NO: 1457358 - DNA, 15 bp, Homo sapiens
gctggtacttcactg

SEQ ID NO: 1457359 - DNA, 15 bp, Homo sapiens
ctggtacttcactga

SEQ ID NO: 1457360 - DNA, 15 bp, Homo sapiens
tggtacttcactgaa

SEQ ID NO: 1457361 - DNA, 15 bp, Homo sapiens
ggtacttcactgaaa

SEQ ID NO: 1457362 - DNA, 15 bp, Homo sapiens
gtacttcactgaaaa

SEQ ID NO: 1457363 - DNA, 15 bp, Homo sapiens
tacttcactgaaaat

SEQ ID NO: 1457364 - DNA, 15 bp, Homo sapiens
acttcactgaaaata

SEQ ID NO: 1457365 - DNA, 15 bp, Homo sapiens
cttcactgaaaatat

SEQ ID NO: 1457366 - DNA, 15 bp, Homo sapiens
ttcactgaaaatatg

SEQ ID NO: 1457367 - DNA, 15 bp, Homo sapiens
tcactgaaaatatgg

SEQ ID NO: 1457368 - DNA, 15 bp, Homo sapiens
cactgaaaatatgga

SEQ ID NO: 1457369 - DNA, 15 bp, Homo sapiens
actgaaaatatggaa

SEQ ID NO: 1457370 - DNA, 15 bp, Homo sapiens
ctgaaaatatggaaa

SEQ ID NO: 1457371 - DNA, 15 bp, Homo sapiens
tgaaaatatggaaag

SEQ ID NO: 1457372 - DNA, 15 bp, Homo sapiens
gaaaatatggaaaga

SEQ ID NO: 1457373 - DNA, 15 bp, Homo sapiens
aaaatatggaaagaa

SEQ ID NO: 1457374 - DNA, 15 bp, Homo sapiens
aaatatggaaagaaa

SEQ ID NO: 1457375 - DNA, 15 bp, Homo sapiens
aatatggaaagaaac

SEQ ID NO: 1457376 - DNA, 15 bp, Homo sapiens
atatggaaagaaact

SEQ ID NO: 1457377 - DNA, 15 bp, Homo sapiens
tatggaaagaaactg

SEQ ID NO: 1457378 - DNA, 15 bp, Homo sapiens
atggaaagaaactgc

SEQ ID NO: 1457379 - DNA, 15 bp, Homo sapiens
tggaaagaaactgca

SEQ ID NO: 1457380 - DNA, 15 bp, Homo sapiens
ggaaagaaactgcag

SEQ ID NO: 1457381 - DNA, 15 bp, Homo sapiens
gaaagaaactgcagg

SEQ ID NO: 1457382 - DNA, 15 bp, Homo sapiens
aaagaaactgcaggg

SEQ ID NO: 1457383 - DNA, 15 bp, Homo sapiens
aagaaactgcagggc

SEQ ID NO: 1457384 - DNA, 15 bp, Homo sapiens
agaaactgcagggct

SEQ ID NO: 1457385 - DNA, 15 bp, Homo sapiens
gaaactgcagggctc

SEQ ID NO: 1457386 - DNA, 15 bp, Homo sapiens
aaactgcagggctcc

SEQ ID NO: 1457387 - DNA, 15 bp, Homo sapiens
aactgcagggctccc

SEQ ID NO: 1457388 - DNA, 15 bp, Homo sapiens
actgcagggctccct

SEQ ID NO: 1457389 - DNA, 15 bp, Homo sapiens
ctgcagggctccctg

SEQ ID NO: 1457390 - DNA, 15 bp, Homo sapiens
tgcagggctccctgc

SEQ ID NO: 1457391 - DNA, 15 bp, Homo sapiens
gcagggctccctgca

SEQ ID NO: 1457392 - DNA, 15 bp, Homo sapiens
cagggctccctgcaa

SEQ ID NO: 1457393 - DNA, 15 bp, Homo sapiens
agggctccctgcaat

SEQ ID NO: 1457394 - DNA, 15 bp, Homo sapiens
gggctccctgcaata

SEQ ID NO: 1457395 - DNA, 15 bp, Homo sapiens
ggctccctgcaatat

SEQ ID NO: 1457396 - DNA, 15 bp, Homo sapiens
gctccctgcaatatc

SEQ ID NO: 1457397 - DNA, 15 bp, Homo sapiens
ctccctgcaatatcc

SEQ ID NO: 1457398 - DNA, 15 bp, Homo sapiens
tccctgcaatatcca

SEQ ID NO: 1457399 - DNA, 15 bp, Homo sapiens
ccctgcaatatccag

SEQ ID NO: 1457400 - DNA, 15 bp, Homo sapiens
cctgcaatatccaga

SEQ ID NO: 1457401 - DNA, 15 bp, Homo sapiens
ctgcaatatccagat

SEQ ID NO: 1457402 - DNA, 15 bp, Homo sapiens
tgcaatatccagatg

SEQ ID NO: 1457403 - DNA, 15 bp, Homo sapiens
gcaatatccagatgg

SEQ ID NO: 1457404 - DNA, 15 bp, Homo sapiens
caatatccagatgga

SEQ ID NO: 1457405 - DNA, 15 bp, Homo sapiens
aatatccagatggaa

SEQ ID NO: 1457406 - DNA, 15 bp, Homo sapiens
atatccagatggaag

SEQ ID NO: 1457407 - DNA, 15 bp, Homo sapiens
tatccagatggaaga

SEQ ID NO: 1457408 - DNA, 15 bp, Homo sapiens
atccagatggaagat

SEQ ID NO: 1457409 - DNA, 15 bp, Homo sapiens
tccagatggaagatc

SEQ ID NO: 1457410 - DNA, 15 bp, Homo sapiens
ccagatggaagatcc

SEQ ID NO: 1457411 - DNA, 15 bp, Homo sapiens
agatggaagatccca

SEQ ID NO: 1457412 - DNA, 15 bp, Homo sapiens
gatggaagatcccac

SEQ ID NO: 1457413 - DNA, 15 bp, Homo sapiens
atggaagatcccact

SEQ ID NO: 1457414 - DNA, 15 bp, Homo sapiens
tggaagatcccactt

SEQ ID NO: 1457415 - DNA, 15 bp, Homo sapiens
ggaagatcccacttt

SEQ ID NO: 1457416 - DNA, 15 bp, Homo sapiens
gaagatcccactttt

SEQ ID NO: 1457417 - DNA, 15 bp, Homo sapiens
aagatcccactttta

SEQ ID NO: 1457418 - DNA, 15 bp, Homo sapiens
agatcccacttttaa

SEQ ID NO: 1457419 - DNA, 15 bp, Homo sapiens
gatcccacttttaaa

SEQ ID NO: 1457420 - DNA, 15 bp, Homo sapiens
atcccacttttaaag

SEQ ID NO: 1457421 - DNA, 15 bp, Homo sapiens
tcccacttttaaaga

SEQ ID NO: 1457422 - DNA, 15 bp, Homo sapiens
cccacttttaaagag

SEQ ID NO: 1457423 - DNA, 15 bp, Homo sapiens
ccacttttaaagaga

SEQ ID NO: 1457424 - DNA, 15 bp, Homo sapiens
cacttttaaagagaa

SEQ ID NO: 1457425 - DNA, 15 bp, Homo sapiens
acttttaaagagaat

SEQ ID NO: 1457426 - DNA, 15 bp, Homo sapiens
cttttaaagagaatt

SEQ ID NO: 1457427 - DNA, 15 bp, Homo sapiens
ttttaaagagaatta

SEQ ID NO: 1457428 - DNA, 15 bp, Homo sapiens
tttaaagagaattat

SEQ ID NO: 1457429 - DNA, 15 bp, Homo sapiens
ttaaagagaattatc

SEQ ID NO: 1457430 - DNA, 15 bp, Homo sapiens
taaagagaattatcg

SEQ ID NO: 1457431 - DNA, 15 bp, Homo sapiens
aagagaattatcgct

SEQ ID NO: 1457432 - DNA, 15 bp, Homo sapiens
gaattatcgcttcca

SEQ ID NO: 1457433 - DNA, 15 bp, Homo sapiens
attatcgcttccatg

SEQ ID NO: 1457434 - DNA, 15 bp, Homo sapiens
atcgcttccatggta

SEQ ID NO: 1457435 - DNA, 15 bp, Homo sapiens
cgcttccatggtaat

SEQ ID NO: 1457436 - DNA, 15 bp, Homo sapiens
gcttccatggtaata

SEQ ID NO: 1457437 - DNA, 15 bp, Homo sapiens
cttccatggtaatat

SEQ ID NO: 1457438 - DNA, 15 bp, Homo sapiens
ttccatggtaatata

SEQ ID NO: 1457439 - DNA, 15 bp, Homo sapiens
tccatggtaatatat

SEQ ID NO: 1457440 - DNA, 15 bp, Homo sapiens
ccatggtaatatatt

SEQ ID NO: 1457441 - DNA, 15 bp, Homo sapiens
catggtaatatattc

SEQ ID NO: 1457442 - DNA, 15 bp, Homo sapiens
atggtaatatattcc

SEQ ID NO: 1457443 - DNA, 15 bp, Homo sapiens
tggtaatatattcca

SEQ ID NO: 1457444 - DNA, 15 bp, Homo sapiens
ggtaatatattccac

SEQ ID NO: 1457445 - DNA, 15 bp, Homo sapiens
gtaatatattccaca

SEQ ID NO: 1457446 - DNA, 15 bp, Homo sapiens
taatatattccacat

SEQ ID NO: 1457447 - DNA, 15 bp, Homo sapiens
aatatattccacatc

SEQ ID NO: 1457448 - DNA, 15 bp, Homo sapiens
atatattccacatcc

SEQ ID NO: 1457449 - DNA, 15 bp, Homo sapiens
tatattccacatcca

SEQ ID NO: 1457450 - DNA, 15 bp, Homo sapiens
atattccacatccaa

SEQ ID NO: 1457451 - DNA, 15 bp, Homo sapiens
tattccacatccaaa

SEQ ID NO: 1457452 - DNA, 15 bp, Homo sapiens
attccacatccaaac

SEQ ID NO: 1457453 - DNA, 15 bp, Homo sapiens
ttccacatccaaaca

SEQ ID NO: 1457454 - DNA, 15 bp, Homo sapiens
tccacatccaaacat

SEQ ID NO: 1457455 - DNA, 15 bp, Homo sapiens
ccacatccaaacatt

SEQ ID NO: 1457456 - DNA, 15 bp, Homo sapiens
cacatccaaacatta

SEQ ID NO: 1457457 - DNA, 15 bp, Homo sapiens
acatccaaacattat

SEQ ID NO: 1457458 - DNA, 15 bp, Homo sapiens
catccaaacattatc

SEQ ID NO: 1457459 - DNA, 15 bp, Homo sapiens
atccaaacattatca

SEQ ID NO: 1457460 - DNA, 15 bp, Homo sapiens
tccaaacattatcac

SEQ ID NO: 1457461 - DNA, 15 bp, Homo sapiens
ccaaacattatcact

SEQ ID NO: 1457462 - DNA, 15 bp, Homo sapiens
caaacattatcactg

SEQ ID NO: 1457463 - DNA, 15 bp, Homo sapiens
aaacattatcactgt

SEQ ID NO: 1457464 - DNA, 15 bp, Homo sapiens
aacattatcactgtg

SEQ ID NO: 1457465 - DNA, 15 bp, Homo sapiens
acattatcactgtga

SEQ ID NO: 1457466 - DNA, 15 bp, Homo sapiens
cattatcactgtgaa

SEQ ID NO: 1457467 - DNA, 15 bp, Homo sapiens
attatcactgtgaaa

SEQ ID NO: 1457468 - DNA, 15 bp, Homo sapiens
ttatcactgtgaaat

SEQ ID NO: 1457469 - DNA, 15 bp, Homo sapiens
tatcactgtgaaatg

SEQ ID NO: 1457470 - DNA, 15 bp, Homo sapiens
atcactgtgaaatgc

SEQ ID NO: 1457471 - DNA, 15 bp, Homo sapiens
tcactgtgaaatgca

SEQ ID NO: 1457472 - DNA, 15 bp, Homo sapiens
cactgtgaaatgcag

SEQ ID NO: 1457473 - DNA, 15 bp, Homo sapiens
actgtgaaatgcaga

SEQ ID NO: 1457474 - DNA, 15 bp, Homo sapiens
ctgtgaaatgcagat

SEQ ID NO: 1457475 - DNA, 15 bp, Homo sapiens
tgtgaaatgcagatt

SEQ ID NO: 1457476 - DNA, 15 bp, Homo sapiens
gtgaaatgcagattg

SEQ ID NO: 1457477 - DNA, 15 bp, Homo sapiens
tgaaatgcagattgc

SEQ ID NO: 1457478 - DNA, 15 bp, Homo sapiens
gaaatgcagattgca

SEQ ID NO: 1457479 - DNA, 15 bp, Homo sapiens
aaatgcagattgcac

SEQ ID NO: 1457480 - DNA, 15 bp, Homo sapiens
aatgcagattgcact

SEQ ID NO: 1457481 - DNA, 15 bp, Homo sapiens
atgcagattgcactt

SEQ ID NO: 1457482 - DNA, 15 bp, Homo sapiens
tgcagattgcacttt

SEQ ID NO: 1457483 - DNA, 15 bp, Homo sapiens
gcagattgcactttg

SEQ ID NO: 1457484 - DNA, 15 bp, Homo sapiens
cagattgcactttga

SEQ ID NO: 1457485 - DNA, 15 bp, Homo sapiens
agattgcactttgac

SEQ ID NO: 1457486 - DNA, 15 bp, Homo sapiens
gattgcactttgaca

SEQ ID NO: 1457487 - DNA, 15 bp, Homo sapiens
attgcactttgacaa

SEQ ID NO: 1457488 - DNA, 15 bp, Homo sapiens
ttgcactttgacaaa

SEQ ID NO: 1457489 - DNA, 15 bp, Homo sapiens
tgcactttgacaaat

SEQ ID NO: 1457490 - DNA, 15 bp, Homo sapiens
gcactttgacaaatg

SEQ ID NO: 1457491 - DNA, 15 bp, Homo sapiens
cactttgacaaatga

SEQ ID NO: 1457492 - DNA, 15 bp, Homo sapiens
actttgacaaatgag

SEQ ID NO: 1457493 - DNA, 15 bp, Homo sapiens
ctttgacaaatgaga

SEQ ID NO: 1457494 - DNA, 15 bp, Homo sapiens
tttgacaaatgagac

SEQ ID NO: 1457495 - DNA, 15 bp, Homo sapiens
ttgacaaatgagact

SEQ ID NO: 1457496 - DNA, 15 bp, Homo sapiens
tgacaaatgagactt

SEQ ID NO: 1457497 - DNA, 15 bp, Homo sapiens
gacaaatgagacttg

SEQ ID NO: 1457498 - DNA, 15 bp, Homo sapiens
acaaatgagacttga

SEQ ID NO: 1457499 - DNA, 15 bp, Homo sapiens
caaatgagacttgat

SEQ ID NO: 1457500 - DNA, 15 bp, Homo sapiens
aaatgagacttgatc

SEQ ID NO: 1457501 - DNA, 15 bp, Homo sapiens
aatgagacttgatcc

SEQ ID NO: 1457502 - DNA, 15 bp, Homo sapiens
atgagacttgatcca

SEQ ID NO: 1457503 - DNA, 15 bp, Homo sapiens
tgagacttgatccag

SEQ ID NO: 1457504 - DNA, 15 bp, Homo sapiens
gagacttgatccagg

SEQ ID NO: 1457505 - DNA, 15 bp, Homo sapiens
agacttgatccaggg

SEQ ID NO: 1457506 - DNA, 15 bp, Homo sapiens
gacttgatccaggga

SEQ ID NO: 1457507 - DNA, 15 bp, Homo sapiens
acttgatccagggac

SEQ ID NO: 1457508 - DNA, 15 bp, Homo sapiens
cttgatccagggact

SEQ ID NO: 1457509 - DNA, 15 bp, Homo sapiens
ttgatccagggactt

SEQ ID NO: 1457510 - DNA, 15 bp, Homo sapiens
tgatccagggacttg

SEQ ID NO: 1457511 - DNA, 15 bp, Homo sapiens
gatccagggacttga

SEQ ID NO: 1457512 - DNA, 15 bp, Homo sapiens
atccagggacttgaa

SEQ ID NO: 1457513 - DNA, 15 bp, Homo sapiens
tccagggacttgaac

SEQ ID NO: 1457514 - DNA, 15 bp, Homo sapiens
ccagggacttgaaca

SEQ ID NO: 1457515 - DNA, 15 bp, Homo sapiens
cagggacttgaacat

SEQ ID NO: 1457516 - DNA, 15 bp, Homo sapiens
agggacttgaacatt

SEQ ID NO: 1457517 - DNA, 15 bp, Homo sapiens
gggacttgaacattg

SEQ ID NO: 1457518 - DNA, 15 bp, Homo sapiens
ggacttgaacattgt

SEQ ID NO: 1457519 - DNA, 15 bp, Homo sapiens
gacttgaacattgta

SEQ ID NO: 1457520 - DNA, 15 bp, Homo sapiens
acttgaacattgtat

SEQ ID NO: 1457521 - DNA, 15 bp, Homo sapiens
cttgaacattgtatt

SEQ ID NO: 1457522 - DNA, 15 bp, Homo sapiens
ttgaacattgtattt

SEQ ID NO: 1457523 - DNA, 15 bp, Homo sapiens
tgaacattgtattta

SEQ ID NO: 1457524 - DNA, 15 bp, Homo sapiens
gaacattgtatttat

SEQ ID NO: 1457525 - DNA, 15 bp, Homo sapiens
aacattgtatttatt

SEQ ID NO: 1457526 - DNA, 15 bp, Homo sapiens
acattgtatttattt

SEQ ID NO: 1457527 - DNA, 15 bp, Homo sapiens
cattgtatttattta

SEQ ID NO: 1457528 - DNA, 15 bp, Homo sapiens
attgtatttatttag

SEQ ID NO: 1457529 - DNA, 15 bp, Homo sapiens
ttgtatttatttaga

SEQ ID NO: 1457530 - DNA, 15 bp, Homo sapiens
tgtatttatttagag

SEQ ID NO: 1457531 - DNA, 15 bp, Homo sapiens
gtatttatttagagt

SEQ ID NO: 1457532 - DNA, 15 bp, Homo sapiens
tatttatttagagta

SEQ ID NO: 1457533 - DNA, 15 bp, Homo sapiens
atttatttagagtat

SEQ ID NO: 1457534 - DNA, 15 bp, Homo sapiens
tttatttagagtata

SEQ ID NO: 1457535 - DNA, 15 bp, Homo sapiens
ttatttagagtatat

SEQ ID NO: 1457536 - DNA, 15 bp, Homo sapiens
tatttagagtatatc

SEQ ID NO: 1457537 - DNA, 15 bp, Homo sapiens
atttagagtatatct

SEQ ID NO: 1457538 - DNA, 15 bp, Homo sapiens
tttagagtatatctg

SEQ ID NO: 1457539 - DNA, 15 bp, Homo sapiens
ttagagtatatctgt

SEQ ID NO: 1457540 - DNA, 15 bp, Homo sapiens
tagagtatatctgtg

SEQ ID NO: 1457541 - DNA, 15 bp, Homo sapiens
agagtatatctgtgg

SEQ ID NO: 1457542 - DNA, 15 bp, Homo sapiens
gagtatatctgtggg

SEQ ID NO: 1457543 - DNA, 15 bp, Homo sapiens
agtatatctgtggga

SEQ ID NO: 1457544 - DNA, 15 bp, Homo sapiens
gtatatctgtgggag

SEQ ID NO: 1457545 - DNA, 15 bp, Homo sapiens
tatatctgtgggagt

SEQ ID NO: 1457546 - DNA, 15 bp, Homo sapiens
atatctgtgggagtg

SEQ ID NO: 1457547 - DNA, 15 bp, Homo sapiens
tatctgtgggagtgg

SEQ ID NO: 1457548 - DNA, 15 bp, Homo sapiens
atctgtgggagtgga

SEQ ID NO: 1457549 - DNA, 15 bp, Homo sapiens
tctgtgggagtggaa

SEQ ID NO: 1457550 - DNA, 15 bp, Homo sapiens
ctgtgggagtggaat

SEQ ID NO: 1457551 - DNA, 15 bp, Homo sapiens
tgtgggagtggaatc

SEQ ID NO: 1457552 - DNA, 15 bp, Homo sapiens
gtgggagtggaatcc

SEQ ID NO: 1457553 - DNA, 15 bp, Homo sapiens
tgggagtggaatcct

SEQ ID NO: 1457554 - DNA, 15 bp, Homo sapiens
gggagtggaatcctc

SEQ ID NO: 1457555 - DNA, 15 bp, Homo sapiens
ggagtggaatcctca

SEQ ID NO: 1457556 - DNA, 15 bp, Homo sapiens
gagtggaatcctcat

SEQ ID NO: 1457557 - DNA, 15 bp, Homo sapiens
agtggaatcctcata

SEQ ID NO: 1457558 - DNA, 15 bp, Homo sapiens
gtggaatcctcatag

SEQ ID NO: 1457559 - DNA, 15 bp, Homo sapiens
tggaatcctcataga

SEQ ID NO: 1457560 - DNA, 15 bp, Homo sapiens
ggaatcctcatagat

SEQ ID NO: 1457561 - DNA, 15 bp, Homo sapiens
gaatcctcatagatg

SEQ ID NO: 1457562 - DNA, 15 bp, Homo sapiens
aatcctcatagatgt

SEQ ID NO: 1457563 - DNA, 15 bp, Homo sapiens
atcctcatagatgtc

SEQ ID NO: 1457564 - DNA, 15 bp, Homo sapiens
tcctcatagatgtca

SEQ ID NO: 1457565 - DNA, 15 bp, Homo sapiens
cctcatagatgtcag

SEQ ID NO: 1457566 - DNA, 15 bp, Homo sapiens
ctcatagatgtcagt

SEQ ID NO: 1457567 - DNA, 15 bp, Homo sapiens
tcatagatgtcagtt

SEQ ID NO: 1457568 - DNA, 15 bp, Homo sapiens
catagatgtcagttt

SEQ ID NO: 1457569 - DNA, 15 bp, Homo sapiens
atagatgtcagtttt

SEQ ID NO: 1457570 - DNA, 15 bp, Homo sapiens
tagatgtcagttttt

SEQ ID NO: 1457571 - DNA, 15 bp, Homo sapiens
agatgtcagtttttt

SEQ ID NO: 1457572 - DNA, 15 bp, Homo sapiens
gatgtcagttttttt

SEQ ID NO: 1457573 - DNA, 15 bp, Homo sapiens
atgtcagtttttttg

SEQ ID NO: 1457574 - DNA, 15 bp, Homo sapiens
tgtcagtttttttgg

SEQ ID NO: 1457575 - DNA, 15 bp, Homo sapiens
gtcagtttttttggt

SEQ ID NO: 1457576 - DNA, 15 bp, Homo sapiens
tcagtttttttggtg

SEQ ID NO: 1457577 - DNA, 15 bp, Homo sapiens
cagtttttttggtgg

SEQ ID NO: 1457578 - DNA, 15 bp, Homo sapiens
agtttttttggtgga

SEQ ID NO: 1457579 - DNA, 15 bp, Homo sapiens
gtttttttggtggag

SEQ ID NO: 1457580 - DNA, 15 bp, Homo sapiens
tttttttggtggagt

SEQ ID NO: 1457581 - DNA, 15 bp, Homo sapiens
ttttttggtggagtg

SEQ ID NO: 1457582 - DNA, 15 bp, Homo sapiens
tttttggtggagtgg

SEQ ID NO: 1457583 - DNA, 15 bp, Homo sapiens
ttttggtggagtgga

SEQ ID NO: 1457584 - DNA, 15 bp, Homo sapiens
tttggtggagtggag

SEQ ID NO: 1457585 - DNA, 15 bp, Homo sapiens
ttggtggagtggaga

SEQ ID NO: 1457586 - DNA, 15 bp, Homo sapiens
tggtggagtggagag

SEQ ID NO: 1457587 - DNA, 15 bp, Homo sapiens
ggtggagtggagaga

SEQ ID NO: 1457588 - DNA, 15 bp, Homo sapiens
gtggagtggagagaa

SEQ ID NO: 1457589 - DNA, 15 bp, Homo sapiens
tggagtggagagaaa

SEQ ID NO: 1457590 - DNA, 15 bp, Homo sapiens
ggagtggagagaaag

SEQ ID NO: 1457591 - DNA, 15 bp, Homo sapiens
gagtggagagaaaga

SEQ ID NO: 1457592 - DNA, 15 bp, Homo sapiens
agtggagagaaagaa

SEQ ID NO: 1457593 - DNA, 15 bp, Homo sapiens
gtggagagaaagaaa

SEQ ID NO: 1457594 - DNA, 15 bp, Homo sapiens
tggagagaaagaaac

SEQ ID NO: 1457595 - DNA, 15 bp, Homo sapiens
ggagagaaagaaact

SEQ ID NO: 1457596 - DNA, 15 bp, Homo sapiens
gagagaaagaaactt

SEQ ID NO: 1457597 - DNA, 15 bp, Homo sapiens
agagaaagaaactta

SEQ ID NO: 1457598 - DNA, 15 bp, Homo sapiens
gagaaagaaacttat

SEQ ID NO: 1457599 - DNA, 15 bp, Homo sapiens
agaaagaaacttata

SEQ ID NO: 1457600 - DNA, 15 bp, Homo sapiens
gaaagaaacttatat

SEQ ID NO: 1457601 - DNA, 15 bp, Homo sapiens
aaagaaacttatata

SEQ ID NO: 1457602 - DNA, 15 bp, Homo sapiens
aagaaacttatataa

SEQ ID NO: 1457603 - DNA, 15 bp, Homo sapiens
agaaacttatataat

SEQ ID NO: 1457604 - DNA, 15 bp, Homo sapiens
ctctgtgtccttctc

SEQ ID NO: 1457605 - DNA, 15 bp, Homo sapiens
tctgtgtccttctcc

SEQ ID NO: 1457606 - DNA, 15 bp, Homo sapiens
ctgtgtccttctcca

SEQ ID NO: 1457607 - DNA, 15 bp, Homo sapiens
tgtgtccttctccag

SEQ ID NO: 1457608 - DNA, 15 bp, Homo sapiens
gtgtccttctccagc

SEQ ID NO: 1457609 - DNA, 15 bp, Homo sapiens
tgtccttctccagca

SEQ ID NO: 1457610 - DNA, 15 bp, Homo sapiens
gtccttctccagcaa

SEQ ID NO: 1457611 - DNA, 15 bp, Homo sapiens
tccttctccagcaat

SEQ ID NO: 1457612 - DNA, 15 bp, Homo sapiens
ccttctccagcaatc

SEQ ID NO: 1457613 - DNA, 15 bp, Homo sapiens
tctccagcaatcaat

SEQ ID NO: 1457614 - DNA, 15 bp, Homo sapiens
tccagcaatcaatgg

SEQ ID NO: 1457615 - DNA, 15 bp, Homo sapiens
ccagcaatcaatggc

SEQ ID NO: 1457616 - DNA, 15 bp, Homo sapiens
cagcaatcaatggct

SEQ ID NO: 1457617 - DNA, 15 bp, Homo sapiens
agcaatcaatggcta

SEQ ID NO: 1457618 - DNA, 15 bp, Homo sapiens
gcaatcaatggctac

SEQ ID NO: 1457619 - DNA, 15 bp, Homo sapiens
caatcaatggctaca

SEQ ID NO: 1457620 - DNA, 15 bp, Homo sapiens
aatcaatggctacat

SEQ ID NO: 1457621 - DNA, 15 bp, Homo sapiens
atcaatggctacata

SEQ ID NO: 1457622 - DNA, 15 bp, Homo sapiens
tcaatggctacataa

SEQ ID NO: 1457623 - DNA, 15 bp, Homo sapiens
caatggctacataat

SEQ ID NO: 1457624 - DNA, 15 bp, Homo sapiens
aatggctacataatg

SEQ ID NO: 1457625 - DNA, 15 bp, Homo sapiens
atggctacataatgg

SEQ ID NO: 1457626 - DNA, 15 bp, Homo sapiens
tggctacataatgga

SEQ ID NO: 1457627 - DNA, 15 bp, Homo sapiens
ggctacataatggat

SEQ ID NO: 1457628 - DNA, 15 bp, Homo sapiens
gctacataatggata

SEQ ID NO: 1457629 - DNA, 15 bp, Homo sapiens
ctacataatggatac

SEQ ID NO: 1457630 - DNA, 15 bp, Homo sapiens
tacataatggataca

SEQ ID NO: 1457631 - DNA, 15 bp, Homo sapiens
acataatggatacac

SEQ ID NO: 1457632 - DNA, 15 bp, Homo sapiens
cataatggatacact

SEQ ID NO: 1457633 - DNA, 15 bp, Homo sapiens
ataatggatacacta

SEQ ID NO: 1457634 - DNA, 15 bp, Homo sapiens
taatggatacactac

SEQ ID NO: 1457635 - DNA, 15 bp, Homo sapiens
aatggatacactacc

SEQ ID NO: 1457636 - DNA, 15 bp, Homo sapiens
atggatacactacct

SEQ ID NO: 1457637 - DNA, 15 bp, Homo sapiens
tggatacactacctg

SEQ ID NO: 1457638 - DNA, 15 bp, Homo sapiens
ggatacactacctgg

SEQ ID NO: 1457639 - DNA, 15 bp, Homo sapiens
gatacactacctggc

SEQ ID NO: 1457640 - DNA, 15 bp, Homo sapiens
atacactacctggct

SEQ ID NO: 1457641 - DNA, 15 bp, Homo sapiens
tacactacctggctt

SEQ ID NO: 1457642 - DNA, 15 bp, Homo sapiens
acactacctggctta

SEQ ID NO: 1457643 - DNA, 15 bp, Homo sapiens
cactacctggcttag

SEQ ID NO: 1457644 - DNA, 15 bp, Homo sapiens
actacctggcttagt

SEQ ID NO: 1457645 - DNA, 15 bp, Homo sapiens
ctacctggcttagta

SEQ ID NO: 1457646 - DNA, 15 bp, Homo sapiens
tacctggcttagtaa

SEQ ID NO: 1457647 - DNA, 15 bp, Homo sapiens
acctggcttagtaat

SEQ ID NO: 1457648 - DNA, 15 bp, Homo sapiens
cctggcttagtaatg

SEQ ID NO: 1457649 - DNA, 15 bp, Homo sapiens
ctggcttagtaatgg

SEQ ID NO: 1457650 - DNA, 15 bp, Homo sapiens
tggcttagtaatggc

SEQ ID NO: 1457651 - DNA, 15 bp, Homo sapiens
ggcttagtaatggct

SEQ ID NO: 1457652 - DNA, 15 bp, Homo sapiens
gcttagtaatggctc

SEQ ID NO: 1457653 - DNA, 15 bp, Homo sapiens
cttagtaatggctca

SEQ ID NO: 1457654 - DNA, 15 bp, Homo sapiens
ttagtaatggctcag

SEQ ID NO: 1457655 - DNA, 15 bp, Homo sapiens
tagtaatggctcagg

SEQ ID NO: 1457656 - DNA, 15 bp, Homo sapiens
agtaatggctcagga

SEQ ID NO: 1457657 - DNA, 15 bp, Homo sapiens
gtaatggctcaggat

SEQ ID NO: 1457658 - DNA, 15 bp, Homo sapiens
taatggctcaggatc

SEQ ID NO: 1457659 - DNA, 15 bp, Homo sapiens
aatggctcaggatca

SEQ ID NO: 1457660 - DNA, 15 bp, Homo sapiens
atggctcaggatcaa

SEQ ID NO: 1457661 - DNA, 15 bp, Homo sapiens
tggctcaggatcaaa

SEQ ID NO: 1457662 - DNA, 15 bp, Homo sapiens
ggctcaggatcaaag

SEQ ID NO: 1457663 - DNA, 15 bp, Homo sapiens
gctcaggatcaaagg

SEQ ID NO: 1457664 - DNA, 15 bp, Homo sapiens
ctcaggatcaaagga

SEQ ID NO: 1457665 - DNA, 15 bp, Homo sapiens
tcaggatcaaaggat

SEQ ID NO: 1457666 - DNA, 15 bp, Homo sapiens
caggatcaaaggatt

SEQ ID NO: 1457667 - DNA, 15 bp, Homo sapiens
aggatcaaaggattc

SEQ ID NO: 1457668 - DNA, 15 bp, Homo sapiens
aaaggattcgatggt

SEQ ID NO: 1457669 - DNA, 15 bp, Homo sapiens
aaggattcgatggta

SEQ ID NO: 1457670 - DNA, 15 bp, Homo sapiens
aggattcgatggtat

SEQ ID NO: 1457671 - DNA, 15 bp, Homo sapiens
ttcgatggtatctgc

SEQ ID NO: 1457672 - DNA, 15 bp, Homo sapiens
tcgatggtatctgct

SEQ ID NO: 1457673 - DNA, 15 bp, Homo sapiens
cgatggtatctgctc

SEQ ID NO: 1457674 - DNA, 15 bp, Homo sapiens
gatggtatctgctca

SEQ ID NO: 1457675 - DNA, 15 bp, Homo sapiens
atggtatctgctcag

SEQ ID NO: 1457676 - DNA, 15 bp, Homo sapiens
tggtatctgctcagc

SEQ ID NO: 1457677 - DNA, 15 bp, Homo sapiens
ggtatctgctcagca

SEQ ID NO: 1457678 - DNA, 15 bp, Homo sapiens
gtatctgctcagcat

SEQ ID NO: 1457679 - DNA, 15 bp, Homo sapiens
tatctgctcagcatg

SEQ ID NO: 1457680 - DNA, 15 bp, Homo sapiens
atctgctcagcatgg

SEQ ID NO: 1457681 - DNA, 15 bp, Homo sapiens
tctgctcagcatggg

SEQ ID NO: 1457682 - DNA, 15 bp, Homo sapiens
ctgctcagcatgggc

SEQ ID NO: 1457683 - DNA, 15 bp, Homo sapiens
tgctcagcatgggca

SEQ ID NO: 1457684 - DNA, 15 bp, Homo sapiens
gctcagcatgggcag

SEQ ID NO: 1457685 - DNA, 15 bp, Homo sapiens
ctcagcatgggcagc

SEQ ID NO: 1457686 - DNA, 15 bp, Homo sapiens
tcagcatgggcagca

SEQ ID NO: 1457687 - DNA, 15 bp, Homo sapiens
cagcatgggcagcaa

SEQ ID NO: 1457688 - DNA, 15 bp, Homo sapiens
agcatgggcagcaat

SEQ ID NO: 1457689 - DNA, 15 bp, Homo sapiens
gcatgggcagcaatg

SEQ ID NO: 1457690 - DNA, 15 bp, Homo sapiens
catgggcagcaatga

SEQ ID NO: 1457691 - DNA, 15 bp, Homo sapiens
atgggcagcaatgaa

SEQ ID NO: 1457692 - DNA, 15 bp, Homo sapiens
tgggcagcaatgaaa

SEQ ID NO: 1457693 - DNA, 15 bp, Homo sapiens
gggcagcaatgaaaa

SEQ ID NO: 1457694 - DNA, 15 bp, Homo sapiens
ggcagcaatgaaaac

SEQ ID NO: 1457695 - DNA, 15 bp, Homo sapiens
agcaatgaaaacatc

SEQ ID NO: 1457696 - DNA, 15 bp, Homo sapiens
gcaatgaaaacatcc

SEQ ID NO: 1457697 - DNA, 15 bp, Homo sapiens
caatgaaaacatcca

SEQ ID NO: 1457698 - DNA, 15 bp, Homo sapiens
aatgaaaacatccat

SEQ ID NO: 1457699 - DNA, 15 bp, Homo sapiens
atgaaaacatccatt

SEQ ID NO: 1457700 - DNA, 15 bp, Homo sapiens
tgaaaacatccattc

SEQ ID NO: 1457701 - DNA, 15 bp, Homo sapiens
gaaaacatccattct

SEQ ID NO: 1457702 - DNA, 15 bp, Homo sapiens
aaaacatccattcta

SEQ ID NO: 1457703 - DNA, 15 bp, Homo sapiens
aaacatccattctat

SEQ ID NO: 1457704 - DNA, 15 bp, Homo sapiens
aacatccattctatt

SEQ ID NO: 1457705 - DNA, 15 bp, Homo sapiens
acatccattctattc

SEQ ID NO: 1457706 - DNA, 15 bp, Homo sapiens
catccattctattca

SEQ ID NO: 1457707 - DNA, 15 bp, Homo sapiens
atccattctattcat

SEQ ID NO: 1457708 - DNA, 15 bp, Homo sapiens
tccattctattcatt

SEQ ID NO: 1457709 - DNA, 15 bp, Homo sapiens
ccattctattcattt

SEQ ID NO: 1457710 - DNA, 15 bp, Homo sapiens
cattctattcatttc

SEQ ID NO: 1457711 - DNA, 15 bp, Homo sapiens
attctattcatttca

SEQ ID NO: 1457712 - DNA, 15 bp, Homo sapiens
ttctattcatttcag

SEQ ID NO: 1457713 - DNA, 15 bp, Homo sapiens
tctattcatttcagt

SEQ ID NO: 1457714 - DNA, 15 bp, Homo sapiens
ctattcatttcagtg

SEQ ID NO: 1457715 - DNA, 15 bp, Homo sapiens
tattcatttcagtgg

SEQ ID NO: 1457716 - DNA, 15 bp, Homo sapiens
attcatttcagtgga

SEQ ID NO: 1457717 - DNA, 15 bp, Homo sapiens
ttcatttcagtggac

SEQ ID NO: 1457718 - DNA, 15 bp, Homo sapiens
tcatttcagtggaca

SEQ ID NO: 1457719 - DNA, 15 bp, Homo sapiens
catttcagtggacat

SEQ ID NO: 1457720 - DNA, 15 bp, Homo sapiens
atttcagtggacatg

SEQ ID NO: 1457721 - DNA, 15 bp, Homo sapiens
tttcagtggacatgt

SEQ ID NO: 1457722 - DNA, 15 bp, Homo sapiens
ttcagtggacatgtg

SEQ ID NO: 1457723 - DNA, 15 bp, Homo sapiens
tcagtggacatgtgt

SEQ ID NO: 1457724 - DNA, 15 bp, Homo sapiens
cagtggacatgtgtt

SEQ ID NO: 1457725 - DNA, 15 bp, Homo sapiens
agtggacatgtgttc

SEQ ID NO: 1457726 - DNA, 15 bp, Homo sapiens
gtggacatgtgttca

SEQ ID NO: 1457727 - DNA, 15 bp, Homo sapiens
tggacatgtgttcac

SEQ ID NO: 1457728 - DNA, 15 bp, Homo sapiens
ggacatgtgttcact

SEQ ID NO: 1457729 - DNA, 15 bp, Homo sapiens
gacatgtgttcactg

SEQ ID NO: 1457730 - DNA, 15 bp, Homo sapiens
acatgtgttcactgt

SEQ ID NO: 1457731 - DNA, 15 bp, Homo sapiens
catgtgttcactgta

SEQ ID NO: 1457732 - DNA, 15 bp, Homo sapiens
atgtgttcactgtac

SEQ ID NO: 1457733 - DNA, 15 bp, Homo sapiens
tgtgttcactgtacg

SEQ ID NO: 1457734 - DNA, 15 bp, Homo sapiens
gtgttcactgtacga

SEQ ID NO: 1457735 - DNA, 15 bp, Homo sapiens
tgttcactgtacgaa

SEQ ID NO: 1457736 - DNA, 15 bp, Homo sapiens
gttcactgtacgaaa

SEQ ID NO: 1457737 - DNA, 15 bp, Homo sapiens
ttcactgtacgaaaa

SEQ ID NO: 1457738 - DNA, 15 bp, Homo sapiens
tcactgtacgaaaaa

SEQ ID NO: 1457739 - DNA, 15 bp, Homo sapiens
cactgtacgaaaaaa

SEQ ID NO: 1457740 - DNA, 15 bp, Homo sapiens
actgtacgaaaaaaa

SEQ ID NO: 1457741 - DNA, 15 bp, Homo sapiens
tacgaaaaaaagagg

SEQ ID NO: 1457742 - DNA, 15 bp, Homo sapiens
acgaaaaaaagagga

SEQ ID NO: 1457743 - DNA, 15 bp, Homo sapiens
cgaaaaaaagaggag

SEQ ID NO: 1457744 - DNA, 15 bp, Homo sapiens
gaaaaaaagaggagt

SEQ ID NO: 1457745 - DNA, 15 bp, Homo sapiens
aaaaaaagaggagta

SEQ ID NO: 1457746 - DNA, 15 bp, Homo sapiens
aaaaaagaggagtat

SEQ ID NO: 1457747 - DNA, 15 bp, Homo sapiens
aaaaagaggagtata

SEQ ID NO: 1457748 - DNA, 15 bp, Homo sapiens
aaaagaggagtataa

SEQ ID NO: 1457749 - DNA, 15 bp, Homo sapiens
aaagaggagtataaa

SEQ ID NO: 1457750 - DNA, 15 bp, Homo sapiens
aagaggagtataaaa

SEQ ID NO: 1457751 - DNA, 15 bp, Homo sapiens
agaggagtataaaat

SEQ ID NO: 1457752 - DNA, 15 bp, Homo sapiens
gaggagtataaaatg

SEQ ID NO: 1457753 - DNA, 15 bp, Homo sapiens
aggagtataaaatgg

SEQ ID NO: 1457754 - DNA, 15 bp, Homo sapiens
ggagtataaaatggc

SEQ ID NO: 1457755 - DNA, 15 bp, Homo sapiens
gagtataaaatggca

SEQ ID NO: 1457756 - DNA, 15 bp, Homo sapiens
agtataaaatggcac

SEQ ID NO: 1457757 - DNA, 15 bp, Homo sapiens
gtataaaatggcact

SEQ ID NO: 1457758 - DNA, 15 bp, Homo sapiens
tataaaatggcactg

SEQ ID NO: 1457759 - DNA, 15 bp, Homo sapiens
ataaaatggcactgt

SEQ ID NO: 1457760 - DNA, 15 bp, Homo sapiens
taaaatggcactgta

SEQ ID NO: 1457761 - DNA, 15 bp, Homo sapiens
aaaatggcactgtac

SEQ ID NO: 1457762 - DNA, 15 bp, Homo sapiens
aaatggcactgtaca

SEQ ID NO: 1457763 - DNA, 15 bp, Homo sapiens
aatggcactgtacaa

SEQ ID NO: 1457764 - DNA, 15 bp, Homo sapiens
atggcactgtacaat

SEQ ID NO: 1457765 - DNA, 15 bp, Homo sapiens
tggcactgtacaatc

SEQ ID NO: 1457766 - DNA, 15 bp, Homo sapiens
ggcactgtacaatct

SEQ ID NO: 1457767 - DNA, 15 bp, Homo sapiens
gcactgtacaatctc

SEQ ID NO: 1457768 - DNA, 15 bp, Homo sapiens
cactgtacaatctct

SEQ ID NO: 1457769 - DNA, 15 bp, Homo sapiens
actgtacaatctcta

SEQ ID NO: 1457770 - DNA, 15 bp, Homo sapiens
ctgtacaatctctat

SEQ ID NO: 1457771 - DNA, 15 bp, Homo sapiens
tgtacaatctctatc

SEQ ID NO: 1457772 - DNA, 15 bp, Homo sapiens
gtacaatctctatcc

SEQ ID NO: 1457773 - DNA, 15 bp, Homo sapiens
tacaatctctatcca

SEQ ID NO: 1457774 - DNA, 15 bp, Homo sapiens
acaatctctatccag

SEQ ID NO: 1457775 - DNA, 15 bp, Homo sapiens
caatctctatccagg

SEQ ID NO: 1457776 - DNA, 15 bp, Homo sapiens
aatctctatccaggt

SEQ ID NO: 1457777 - DNA, 15 bp, Homo sapiens
atctctatccaggta

SEQ ID NO: 1457778 - DNA, 15 bp, Homo sapiens
tctctatccaggtat

SEQ ID NO: 1457779 - DNA, 15 bp, Homo sapiens
ctctatccaggtatg

SEQ ID NO: 1457780 - DNA, 15 bp, Homo sapiens
tctatccaggtatga

SEQ ID NO: 1457781 - DNA, 15 bp, Homo sapiens
ctatccaggtatgag

SEQ ID NO: 1457782 - DNA, 15 bp, Homo sapiens
tatccaggtatgagc

SEQ ID NO: 1457783 - DNA, 15 bp, Homo sapiens
atccaggtatgagct

SEQ ID NO: 1457784 - DNA, 15 bp, Homo sapiens
tccaggtatgagctt

SEQ ID NO: 1457785 - DNA, 15 bp, Homo sapiens
ccaggtatgagcttg

SEQ ID NO: 1457786 - DNA, 15 bp, Homo sapiens
caggtatgagcttgt

SEQ ID NO: 1457787 - DNA, 15 bp, Homo sapiens
aggtatgagcttgtt

SEQ ID NO: 1457788 - DNA, 15 bp, Homo sapiens
ggtatgagcttgttt

SEQ ID NO: 1457789 - DNA, 15 bp, Homo sapiens
gtatgagcttgtttg

SEQ ID NO: 1457790 - DNA, 15 bp, Homo sapiens
tatgagcttgtttgt

SEQ ID NO: 1457791 - DNA, 15 bp, Homo sapiens
atgagcttgtttgtg

SEQ ID NO: 1457792 - DNA, 15 bp, Homo sapiens
tgagcttgtttgtgc

SEQ ID NO: 1457793 - DNA, 15 bp, Homo sapiens
gagcttgtttgtgct

SEQ ID NO: 1457794 - DNA, 15 bp, Homo sapiens
agcttgtttgtgctc

SEQ ID NO: 1457795 - DNA, 15 bp, Homo sapiens
gcttgtttgtgctct

SEQ ID NO: 1457796 - DNA, 15 bp, Homo sapiens
cttgtttgtgctctt

SEQ ID NO: 1457797 - DNA, 15 bp, Homo sapiens
ttgtttgtgctcttt

SEQ ID NO: 1457798 - DNA, 15 bp, Homo sapiens
tgtttgtgctctttc

SEQ ID NO: 1457799 - DNA, 15 bp, Homo sapiens
gtttgtgctctttct

SEQ ID NO: 1457800 - DNA, 15 bp, Homo sapiens
tttgtgctctttctt

SEQ ID NO: 1457801 - DNA, 15 bp, Homo sapiens
ttgtgctctttcttc

SEQ ID NO: 1457802 - DNA, 15 bp, Homo sapiens
tgtgctctttcttct

SEQ ID NO: 1457803 - DNA, 15 bp, Homo sapiens
gtgctctttcttcta

SEQ ID NO: 1457804 - DNA, 15 bp, Homo sapiens
tgctctttcttctac

SEQ ID NO: 1457805 - DNA, 15 bp, Homo sapiens
gctctttcttctacc

SEQ ID NO: 1457806 - DNA, 15 bp, Homo sapiens
ctctttcttctacct

SEQ ID NO: 1457807 - DNA, 15 bp, Homo sapiens
tctttcttctaccta

SEQ ID NO: 1457808 - DNA, 15 bp, Homo sapiens
ctttcttctacctac

SEQ ID NO: 1457809 - DNA, 15 bp, Homo sapiens
tttcttctacctact

SEQ ID NO: 1457810 - DNA, 15 bp, Homo sapiens
ttcttctacctactc

SEQ ID NO: 1457811 - DNA, 15 bp, Homo sapiens
tcttctacctactct

SEQ ID NO: 1457812 - DNA, 15 bp, Homo sapiens
cttctacctactcta

SEQ ID NO: 1457813 - DNA, 15 bp, Homo sapiens
ttctacctactctat

SEQ ID NO: 1457814 - DNA, 15 bp, Homo sapiens
tctacctactctatt

SEQ ID NO: 1457815 - DNA, 15 bp, Homo sapiens
ctacctactctattt

SEQ ID NO: 1457816 - DNA, 15 bp, Homo sapiens
tacctactctatttg

SEQ ID NO: 1457817 - DNA, 15 bp, Homo sapiens
acctactctatttgt

SEQ ID NO: 1457818 - DNA, 15 bp, Homo sapiens
cctactctatttgtt

SEQ ID NO: 1457819 - DNA, 15 bp, Homo sapiens
ctactctatttgttg

SEQ ID NO: 1457820 - DNA, 15 bp, Homo sapiens
tactctatttgttga

SEQ ID NO: 1457821 - DNA, 15 bp, Homo sapiens
actctatttgttgag

SEQ ID NO: 1457822 - DNA, 15 bp, Homo sapiens
ctctatttgttgagt

SEQ ID NO: 1457823 - DNA, 15 bp, Homo sapiens
tctatttgttgagta

SEQ ID NO: 1457824 - DNA, 15 bp, Homo sapiens
ctatttgttgagtac

SEQ ID NO: 1457825 - DNA, 15 bp, Homo sapiens
tatttgttgagtact

SEQ ID NO: 1457826 - DNA, 15 bp, Homo sapiens
atttgttgagtactt

SEQ ID NO: 1457827 - DNA, 15 bp, Homo sapiens
tttgttgagtactta

SEQ ID NO: 1457828 - DNA, 15 bp, Homo sapiens
ttgttgagtacttac

SEQ ID NO: 1457829 - DNA, 15 bp, Homo sapiens
tgttgagtacttact

SEQ ID NO: 1457830 - DNA, 15 bp, Homo sapiens
gttgagtacttactt

SEQ ID NO: 1457831 - DNA, 15 bp, Homo sapiens
ttgagtacttacttt

SEQ ID NO: 1457832 - DNA, 15 bp, Homo sapiens
tgagtacttacttta

SEQ ID NO: 1457833 - DNA, 15 bp, Homo sapiens
gagtacttactttaa

SEQ ID NO: 1457834 - DNA, 15 bp, Homo sapiens
agtacttactttaaa

SEQ ID NO: 1457835 - DNA, 15 bp, Homo sapiens
gtacttactttaaat

SEQ ID NO: 1457836 - DNA, 15 bp, Homo sapiens
tacttactttaaatg

SEQ ID NO: 1457837 - DNA, 15 bp, Homo sapiens
acttactttaaatgg

SEQ ID NO: 1457838 - DNA, 15 bp, Homo sapiens
cttactttaaatggt

SEQ ID NO: 1457839 - DNA, 15 bp, Homo sapiens
ttactttaaatggtc

SEQ ID NO: 1457840 - DNA, 15 bp, Homo sapiens
tactttaaatggtct

SEQ ID NO: 1457841 - DNA, 15 bp, Homo sapiens
actttaaatggtcta

SEQ ID NO: 1457842 - DNA, 15 bp, Homo sapiens
ctttaaatggtctag

SEQ ID NO: 1457843 - DNA, 15 bp, Homo sapiens
tttaaatggtctagg

SEQ ID NO: 1457844 - DNA, 15 bp, Homo sapiens
ttaaatggtctaggc

SEQ ID NO: 1457845 - DNA, 15 bp, Homo sapiens
taaatggtctaggca

SEQ ID NO: 1457846 - DNA, 15 bp, Homo sapiens
aaatggtctaggcac

SEQ ID NO: 1457847 - DNA, 15 bp, Homo sapiens
aatggtctaggcact

SEQ ID NO: 1457848 - DNA, 15 bp, Homo sapiens
atggtctaggcactg

SEQ ID NO: 1457849 - DNA, 15 bp, Homo sapiens
tggtctaggcactgg

SEQ ID NO: 1457850 - DNA, 15 bp, Homo sapiens
ggtctaggcactggg

SEQ ID NO: 1457851 - DNA, 15 bp, Homo sapiens
gtctaggcactggga

SEQ ID NO: 1457852 - DNA, 15 bp, Homo sapiens
tctaggcactgggaa

SEQ ID NO: 1457853 - DNA, 15 bp, Homo sapiens
ctaggcactgggaac

SEQ ID NO: 1457854 - DNA, 15 bp, Homo sapiens
taggcactgggaaca

SEQ ID NO: 1457855 - DNA, 15 bp, Homo sapiens
aggcactgggaacac

SEQ ID NO: 1457856 - DNA, 15 bp, Homo sapiens
ggcactgggaacaca

SEQ ID NO: 1457857 - DNA, 15 bp, Homo sapiens
gcactgggaacacaa

SEQ ID NO: 1457858 - DNA, 15 bp, Homo sapiens
cactgggaacacaat

SEQ ID NO: 1457859 - DNA, 15 bp, Homo sapiens
actgggaacacaatc

SEQ ID NO: 1457860 - DNA, 15 bp, Homo sapiens
ctgggaacacaatca

SEQ ID NO: 1457861 - DNA, 15 bp, Homo sapiens
tgggaacacaatcag

SEQ ID NO: 1457862 - DNA, 15 bp, Homo sapiens
gggaacacaatcagt

SEQ ID NO: 1457863 - DNA, 15 bp, Homo sapiens
ggaacacaatcagtg

SEQ ID NO: 1457864 - DNA, 15 bp, Homo sapiens
gaacacaatcagtga

SEQ ID NO: 1457865 - DNA, 15 bp, Homo sapiens
aacacaatcagtgat

SEQ ID NO: 1457866 - DNA, 15 bp, Homo sapiens
acacaatcagtgatc

SEQ ID NO: 1457867 - DNA, 15 bp, Homo sapiens
cacaatcagtgatca

SEQ ID NO: 1457868 - DNA, 15 bp, Homo sapiens
acaatcagtgatcaa

SEQ ID NO: 1457869 - DNA, 15 bp, Homo sapiens
caatcagtgatcaaa

SEQ ID NO: 1457870 - DNA, 15 bp, Homo sapiens
aatcagtgatcaaag

SEQ ID NO: 1457871 - DNA, 15 bp, Homo sapiens
atcagtgatcaaagc

SEQ ID NO: 1457872 - DNA, 15 bp, Homo sapiens
tcagtgatcaaagca

SEQ ID NO: 1457873 - DNA, 15 bp, Homo sapiens
cagtgatcaaagcag

SEQ ID NO: 1457874 - DNA, 15 bp, Homo sapiens
agtgatcaaagcaga

SEQ ID NO: 1457875 - DNA, 15 bp, Homo sapiens
gtgatcaaagcagac

SEQ ID NO: 1457876 - DNA, 15 bp, Homo sapiens
tgatcaaagcagaca

SEQ ID NO: 1457877 - DNA, 15 bp, Homo sapiens
gatcaaagcagacaa

SEQ ID NO: 1457878 - DNA, 15 bp, Homo sapiens
atcaaagcagacaag

SEQ ID NO: 1457879 - DNA, 15 bp, Homo sapiens
tcaaagcagacaagc

SEQ ID NO: 1457880 - DNA, 15 bp, Homo sapiens
caaagcagacaagct

SEQ ID NO: 1457881 - DNA, 15 bp, Homo sapiens
aaagcagacaagctc

SEQ ID NO: 1457882 - DNA, 15 bp, Homo sapiens
aagcagacaagctcc

SEQ ID NO: 1457883 - DNA, 15 bp, Homo sapiens
agcagacaagctcca

SEQ ID NO: 1457884 - DNA, 15 bp, Homo sapiens
gcagacaagctccat

SEQ ID NO: 1457885 - DNA, 15 bp, Homo sapiens
cagacaagctccatg

SEQ ID NO: 1457886 - DNA, 15 bp, Homo sapiens
agacaagctccatgc

SEQ ID NO: 1457887 - DNA, 15 bp, Homo sapiens
gacaagctccatgct

SEQ ID NO: 1457888 - DNA, 15 bp, Homo sapiens
acaagctccatgctc

SEQ ID NO: 1457889 - DNA, 15 bp, Homo sapiens
caagctccatgctct

SEQ ID NO: 1457890 - DNA, 15 bp, Homo sapiens
aagctccatgctctt

SEQ ID NO: 1457891 - DNA, 15 bp, Homo sapiens
agctccatgctctta

SEQ ID NO: 1457892 - DNA, 15 bp, Homo sapiens
gctccatgctcttaa

SEQ ID NO: 1457893 - DNA, 15 bp, Homo sapiens
ctccatgctcttaag

SEQ ID NO: 1457894 - DNA, 15 bp, Homo sapiens
tccatgctcttaagt

SEQ ID NO: 1457895 - DNA, 15 bp, Homo sapiens
ccatgctcttaagta

SEQ ID NO: 1457896 - DNA, 15 bp, Homo sapiens
catgctcttaagtaa

SEQ ID NO: 1457897 - DNA, 15 bp, Homo sapiens
atgctcttaagtaat

SEQ ID NO: 1457898 - DNA, 15 bp, Homo sapiens
tgctcttaagtaata

SEQ ID NO: 1457899 - DNA, 15 bp, Homo sapiens
gctcttaagtaatac

SEQ ID NO: 1457900 - DNA, 15 bp, Homo sapiens
ctcttaagtaatact

SEQ ID NO: 1457901 - DNA, 15 bp, Homo sapiens
ttaagtaatactttt

SEQ ID NO: 1457902 - DNA, 15 bp, Homo sapiens
taagtaatacttttt

SEQ ID NO: 1457903 - DNA, 15 bp, Homo sapiens
aagtaatactttttc

SEQ ID NO: 1457904 - DNA, 15 bp, Homo sapiens
agtaatactttttca

SEQ ID NO: 1457905 - DNA, 15 bp, Homo sapiens
gtaatactttttcaa

SEQ ID NO: 1457906 - DNA, 15 bp, Homo sapiens
taatactttttcaaa

SEQ ID NO: 1457907 - DNA, 15 bp, Homo sapiens
aatactttttcaaat

SEQ ID NO: 1457908 - DNA, 15 bp, Homo sapiens
atactttttcaaatg

SEQ ID NO: 1457909 - DNA, 15 bp, Homo sapiens
tactttttcaaatgc

SEQ ID NO: 1457910 - DNA, 15 bp, Homo sapiens
actttttcaaatgct

SEQ ID NO: 1457911 - DNA, 15 bp, Homo sapiens
ctttttcaaatgctt

SEQ ID NO: 1457912 - DNA, 15 bp, Homo sapiens
tttttcaaatgcttt

SEQ ID NO: 1457913 - DNA, 15 bp, Homo sapiens
ttttcaaatgctttt

SEQ ID NO: 1457914 - DNA, 15 bp, Homo sapiens
tttcaaatgcttttt

SEQ ID NO: 1457915 - DNA, 15 bp, Homo sapiens
ttcaaatgcttttta

SEQ ID NO: 1457916 - DNA, 15 bp, Homo sapiens
tcaaatgctttttaa

SEQ ID NO: 1457917 - DNA, 15 bp, Homo sapiens
caaatgctttttaaa

SEQ ID NO: 1457918 - DNA, 15 bp, Homo sapiens
aaatgctttttaaac

SEQ ID NO: 1457919 - DNA, 15 bp, Homo sapiens
aatgctttttaaacc

SEQ ID NO: 1457920 - DNA, 15 bp, Homo sapiens
atgctttttaaacca

SEQ ID NO: 1457921 - DNA, 15 bp, Homo sapiens
tgctttttaaaccat

SEQ ID NO: 1457922 - DNA, 15 bp, Homo sapiens
gctttttaaaccatt

SEQ ID NO: 1457923 - DNA, 15 bp, Homo sapiens
ctttttaaaccattt

SEQ ID NO: 1457924 - DNA, 15 bp, Homo sapiens
tttttaaaccatttg

SEQ ID NO: 1457925 - DNA, 15 bp, Homo sapiens
ttttaaaccatttgt

SEQ ID NO: 1457926 - DNA, 15 bp, Homo sapiens
tttaaaccatttgtt

SEQ ID NO: 1457927 - DNA, 15 bp, Homo sapiens
ttaaaccatttgttc

SEQ ID NO: 1457928 - DNA, 15 bp, Homo sapiens
taaaccatttgttca

SEQ ID NO: 1457929 - DNA, 15 bp, Homo sapiens
aaaccatttgttcaa

SEQ ID NO: 1457930 - DNA, 15 bp, Homo sapiens
aaccatttgttcaaa

SEQ ID NO: 1457931 - DNA, 15 bp, Homo sapiens
accatttgttcaaag

SEQ ID NO: 1457932 - DNA, 15 bp, Homo sapiens
ccatttgttcaaagc

SEQ ID NO: 1457933 - DNA, 15 bp, Homo sapiens
catttgttcaaagca

SEQ ID NO: 1457934 - DNA, 15 bp, Homo sapiens
atttgttcaaagcaa

SEQ ID NO: 1457935 - DNA, 15 bp, Homo sapiens
tttgttcaaagcaaa

SEQ ID NO: 1457936 - DNA, 15 bp, Homo sapiens
ttgttcaaagcaaat

SEQ ID NO: 1457937 - DNA, 15 bp, Homo sapiens
tgttcaaagcaaatg

SEQ ID NO: 1457938 - DNA, 15 bp, Homo sapiens
gttcaaagcaaatga

SEQ ID NO: 1457939 - DNA, 15 bp, Homo sapiens
ttcaaagcaaatgaa

SEQ ID NO: 1457940 - DNA, 15 bp, Homo sapiens
tcaaagcaaatgaac

SEQ ID NO: 1457941 - DNA, 15 bp, Homo sapiens
caaagcaaatgaaca

SEQ ID NO: 1457942 - DNA, 15 bp, Homo sapiens
aaagcaaatgaacaa

SEQ ID NO: 1457943 - DNA, 15 bp, Homo sapiens
aagcaaatgaacaag

SEQ ID NO: 1457944 - DNA, 15 bp, Homo sapiens
agcaaatgaacaaga

SEQ ID NO: 1457945 - DNA, 15 bp, Homo sapiens
gcaaatgaacaagat

SEQ ID NO: 1457946 - DNA, 15 bp, Homo sapiens
caaatgaacaagata

SEQ ID NO: 1457947 - DNA, 15 bp, Homo sapiens
aaatgaacaagataa

SEQ ID NO: 1457948 - DNA, 15 bp, Homo sapiens
aatgaacaagataat

SEQ ID NO: 1457949 - DNA, 15 bp, Homo sapiens
atgaacaagataatt

SEQ ID NO: 1457950 - DNA, 15 bp, Homo sapiens
tgaacaagataattt

SEQ ID NO: 1457951 - DNA, 15 bp, Homo sapiens
gaacaagataatttc

SEQ ID NO: 1457952 - DNA, 15 bp, Homo sapiens
aacaagataatttca

SEQ ID NO: 1457953 - DNA, 15 bp, Homo sapiens
acaagataatttcag

SEQ ID NO: 1457954 - DNA, 15 bp, Homo sapiens
caagataatttcaga

SEQ ID NO: 1457955 - DNA, 15 bp, Homo sapiens
aagataatttcagat

SEQ ID NO: 1457956 - DNA, 15 bp, Homo sapiens
agataatttcagata

SEQ ID NO: 1457957 - DNA, 15 bp, Homo sapiens
gataatttcagatat

SEQ ID NO: 1457958 - DNA, 15 bp, Homo sapiens
ataatttcagatata

SEQ ID NO: 1457959 - DNA, 15 bp, Homo sapiens
taatttcagatatag

SEQ ID NO: 1457960 - DNA, 15 bp, Homo sapiens
aatttcagatataga

SEQ ID NO: 1457961 - DNA, 15 bp, Homo sapiens
atttcagatatagaa

SEQ ID NO: 1457962 - DNA, 15 bp, Homo sapiens
tttcagatatagaaa

SEQ ID NO: 1457963 - DNA, 15 bp, Homo sapiens
ttcagatatagaaaa

SEQ ID NO: 1457964 - DNA, 15 bp, Homo sapiens
tcagatatagaaaaa

SEQ ID NO: 1457965 - DNA, 15 bp, Homo sapiens
cagatatagaaaaat

SEQ ID NO: 1457966 - DNA, 15 bp, Homo sapiens
agatatagaaaaatt

SEQ ID NO: 1457967 - DNA, 15 bp, Homo sapiens
gatatagaaaaattg

SEQ ID NO: 1457968 - DNA, 15 bp, Homo sapiens
atatagaaaaattgc

SEQ ID NO: 1457969 - DNA, 15 bp, Homo sapiens
tatagaaaaattgct

SEQ ID NO: 1457970 - DNA, 15 bp, Homo sapiens
atagaaaaattgcta

SEQ ID NO: 1457971 - DNA, 15 bp, Homo sapiens
tagaaaaattgctaa

SEQ ID NO: 1457972 - DNA, 15 bp, Homo sapiens
agaaaaattgctaaa

SEQ ID NO: 1457973 - DNA, 15 bp, Homo sapiens
gaaaaattgctaaaa

SEQ ID NO: 1457974 - DNA, 15 bp, Homo sapiens
aaaaattgctaaaaa

SEQ ID NO: 1457975 - DNA, 15 bp, Homo sapiens
aaaattgctaaaaag

SEQ ID NO: 1457976 - DNA, 15 bp, Homo sapiens
aaattgctaaaaagg

SEQ ID NO: 1457977 - DNA, 15 bp, Homo sapiens
aattgctaaaaagga

SEQ ID NO: 1457978 - DNA, 15 bp, Homo sapiens
attgctaaaaaggaa

SEQ ID NO: 1457979 - DNA, 15 bp, Homo sapiens
ttgctaaaaaggaaa

SEQ ID NO: 1457980 - DNA, 15 bp, Homo sapiens
tgctaaaaaggaaat

SEQ ID NO: 1457981 - DNA, 15 bp, Homo sapiens
gctaaaaaggaaata

SEQ ID NO: 1457982 - DNA, 15 bp, Homo sapiens
ctaaaaaggaaatag

SEQ ID NO: 1457983 - DNA, 15 bp, Homo sapiens
taaaaaggaaataga

SEQ ID NO: 1457984 - DNA, 15 bp, Homo sapiens
aaaaaggaaatagaa

SEQ ID NO: 1457985 - DNA, 15 bp, Homo sapiens
aaaaggaaatagaac

SEQ ID NO: 1457986 - DNA, 15 bp, Homo sapiens
aaaggaaatagaaca

SEQ ID NO: 1457987 - DNA, 15 bp, Homo sapiens
aaggaaatagaacag

SEQ ID NO: 1457988 - DNA, 15 bp, Homo sapiens
aggaaatagaacaga

SEQ ID NO: 1457989 - DNA, 15 bp, Homo sapiens
ggaaatagaacagaa

SEQ ID NO: 1457990 - DNA, 15 bp, Homo sapiens
gaaatagaacagaat

SEQ ID NO: 1457991 - DNA, 15 bp, Homo sapiens
aaatagaacagaata

SEQ ID NO: 1457992 - DNA, 15 bp, Homo sapiens
aatagaacagaataa

SEQ ID NO: 1457993 - DNA, 15 bp, Homo sapiens
atagaacagaataaa

SEQ ID NO: 1457994 - DNA, 15 bp, Homo sapiens
tagaacagaataaat

SEQ ID NO: 1457995 - DNA, 15 bp, Homo sapiens
agaacagaataaatg

SEQ ID NO: 1457996 - DNA, 15 bp, Homo sapiens
gaacagaataaatgg

SEQ ID NO: 1457997 - DNA, 15 bp, Homo sapiens
aacagaataaatgga

SEQ ID NO: 1457998 - DNA, 15 bp, Homo sapiens
acagaataaatggat

SEQ ID NO: 1457999 - DNA, 15 bp, Homo sapiens
cagaataaatggata

SEQ ID NO: 1458000 - DNA, 15 bp, Homo sapiens
agaataaatggataa

SEQ ID NO: 1458001 - DNA, 15 bp, Homo sapiens
gaataaatggataat

SEQ ID NO: 1458002 - DNA, 15 bp, Homo sapiens
aataaatggataatt

SEQ ID NO: 1458003 - DNA, 15 bp, Homo sapiens
ataaatggataatta

SEQ ID NO: 1458004 - DNA, 15 bp, Homo sapiens
taaatggataattaa

SEQ ID NO: 1458005 - DNA, 15 bp, Homo sapiens
aaatggataattaat

SEQ ID NO: 1458006 - DNA, 15 bp, Homo sapiens
aatggataattaatg

SEQ ID NO: 1458007 - DNA, 15 bp, Homo sapiens
atggataattaatgt

SEQ ID NO: 1458008 - DNA, 15 bp, Homo sapiens
tggataattaatgtc

SEQ ID NO: 1458009 - DNA, 15 bp, Homo sapiens
ggataattaatgtca

SEQ ID NO: 1458010 - DNA, 15 bp, Homo sapiens
gataattaatgtcac

SEQ ID NO: 1458011 - DNA, 15 bp, Homo sapiens
ataattaatgtcaca

SEQ ID NO: 1458012 - DNA, 15 bp, Homo sapiens
taattaatgtcacag

SEQ ID NO: 1458013 - DNA, 15 bp, Homo sapiens
aattaatgtcacagt

SEQ ID NO: 1458014 - DNA, 15 bp, Homo sapiens
attaatgtcacagta

SEQ ID NO: 1458015 - DNA, 15 bp, Homo sapiens
ttaatgtcacagtac

SEQ ID NO: 1458016 - DNA, 15 bp, Homo sapiens
taatgtcacagtact

SEQ ID NO: 1458017 - DNA, 15 bp, Homo sapiens
aatgtcacagtactt

SEQ ID NO: 1458018 - DNA, 15 bp, Homo sapiens
atgtcacagtacttt

SEQ ID NO: 1458019 - DNA, 15 bp, Homo sapiens
tgtcacagtactttc

SEQ ID NO: 1458020 - DNA, 15 bp, Homo sapiens
gtcacagtactttcc

SEQ ID NO: 1458021 - DNA, 15 bp, Homo sapiens
tcacagtactttcct

SEQ ID NO: 1458022 - DNA, 15 bp, Homo sapiens
cacagtactttccta

SEQ ID NO: 1458023 - DNA, 15 bp, Homo sapiens
acagtactttcctag

SEQ ID NO: 1458024 - DNA, 15 bp, Homo sapiens
cagtactttcctagg

SEQ ID NO: 1458025 - DNA, 15 bp, Homo sapiens
agtactttcctaggg

SEQ ID NO: 1458026 - DNA, 15 bp, Homo sapiens
gtactttcctaggga

SEQ ID NO: 1458027 - DNA, 15 bp, Homo sapiens
tactttcctagggaa

SEQ ID NO: 1458028 - DNA, 15 bp, Homo sapiens
actttcctagggaaa

SEQ ID NO: 1458029 - DNA, 15 bp, Homo sapiens
ctttcctagggaaaa

SEQ ID NO: 1458030 - DNA, 15 bp, Homo sapiens
tttcctagggaaaag

SEQ ID NO: 1458031 - DNA, 15 bp, Homo sapiens
ttcctagggaaaagg

SEQ ID NO: 1458032 - DNA, 15 bp, Homo sapiens
tcctagggaaaagga

SEQ ID NO: 1458033 - DNA, 15 bp, Homo sapiens
cctagggaaaaggaa

SEQ ID NO: 1458034 - DNA, 15 bp, Homo sapiens
ctagggaaaaggaat

SEQ ID NO: 1458035 - DNA, 15 bp, Homo sapiens
tagggaaaaggaatt

SEQ ID NO: 1458036 - DNA, 15 bp, Homo sapiens
agggaaaaggaattt

SEQ ID NO: 1458037 - DNA, 15 bp, Homo sapiens
gggaaaaggaattta

SEQ ID NO: 1458038 - DNA, 15 bp, Homo sapiens
ggaaaaggaatttat

SEQ ID NO: 1458039 - DNA, 15 bp, Homo sapiens
aaaaggaatttattc

SEQ ID NO: 1458040 - DNA, 15 bp, Homo sapiens
aaaggaatttattcc

SEQ ID NO: 1458041 - DNA, 15 bp, Homo sapiens
ggaatttattccttt

SEQ ID NO: 1458042 - DNA, 15 bp, Homo sapiens
gaatttattccttta

SEQ ID NO: 1458043 - DNA, 15 bp, Homo sapiens
aatttattcctttat

SEQ ID NO: 1458044 - DNA, 15 bp, Homo sapiens
atttattcctttatc

SEQ ID NO: 1458045 - DNA, 15 bp, Homo sapiens
tttattcctttatca

SEQ ID NO: 1458046 - DNA, 15 bp, Homo sapiens
ttattcctttatcat

SEQ ID NO: 1458047 - DNA, 15 bp, Homo sapiens
tattcctttatcatt

SEQ ID NO: 1458048 - DNA, 15 bp, Homo sapiens
attcctttatcattt

SEQ ID NO: 1458049 - DNA, 15 bp, Homo sapiens
ttcctttatcattta

SEQ ID NO: 1458050 - DNA, 15 bp, Homo sapiens
tcctttatcatttac

SEQ ID NO: 1458051 - DNA, 15 bp, Homo sapiens
cctttatcatttacc

SEQ ID NO: 1458052 - DNA, 15 bp, Homo sapiens
ctttatcatttacca

SEQ ID NO: 1458053 - DNA, 15 bp, Homo sapiens
tttatcatttaccat

SEQ ID NO: 1458054 - DNA, 15 bp, Homo sapiens
ttatcatttaccatc

SEQ ID NO: 1458055 - DNA, 15 bp, Homo sapiens
tatcatttaccatct

SEQ ID NO: 1458056 - DNA, 15 bp, Homo sapiens
atcatttaccatctc

SEQ ID NO: 1458057 - DNA, 15 bp, Homo sapiens
tcatttaccatctca

SEQ ID NO: 1458058 - DNA, 15 bp, Homo sapiens
catttaccatctcaa

SEQ ID NO: 1458059 - DNA, 15 bp, Homo sapiens
atttaccatctcaaa

SEQ ID NO: 1458060 - DNA, 15 bp, Homo sapiens
tttaccatctcaaat

SEQ ID NO: 1458061 - DNA, 15 bp, Homo sapiens
ttaccatctcaaatc

SEQ ID NO: 1458062 - DNA, 15 bp, Homo sapiens
taccatctcaaatcc

SEQ ID NO: 1458063 - DNA, 15 bp, Homo sapiens
accatctcaaatccc

SEQ ID NO: 1458064 - DNA, 15 bp, Homo sapiens
ccatctcaaatccca

SEQ ID NO: 1458065 - DNA, 15 bp, Homo sapiens
catctcaaatcccat

SEQ ID NO: 1458066 - DNA, 15 bp, Homo sapiens
atctcaaatcccata

SEQ ID NO: 1458067 - DNA, 15 bp, Homo sapiens
tctcaaatcccatag

SEQ ID NO: 1458068 - DNA, 15 bp, Homo sapiens
ctcaaatcccatagg

SEQ ID NO: 1458069 - DNA, 15 bp, Homo sapiens
tcaaatcccataggg

SEQ ID NO: 1458070 - DNA, 15 bp, Homo sapiens
caaatcccatagggc

SEQ ID NO: 1458071 - DNA, 15 bp, Homo sapiens
aaatcccatagggca

SEQ ID NO: 1458072 - DNA, 15 bp, Homo sapiens
aatcccatagggcac

SEQ ID NO: 1458073 - DNA, 15 bp, Homo sapiens
atcccatagggcacc

SEQ ID NO: 1458074 - DNA, 15 bp, Homo sapiens
tcccatagggcacca

SEQ ID NO: 1458075 - DNA, 15 bp, Homo sapiens
cccatagggcaccag

SEQ ID NO: 1458076 - DNA, 15 bp, Homo sapiens
ccatagggcaccagt

SEQ ID NO: 1458077 - DNA, 15 bp, Homo sapiens
catagggcaccagta

SEQ ID NO: 1458078 - DNA, 15 bp, Homo sapiens
atagggcaccagtag

SEQ ID NO: 1458079 - DNA, 15 bp, Homo sapiens
tagggcaccagtagt

SEQ ID NO: 1458080 - DNA, 15 bp, Homo sapiens
agggcaccagtagtc

SEQ ID NO: 1458081 - DNA, 15 bp, Homo sapiens
gggcaccagtagtca

SEQ ID NO: 1458082 - DNA, 15 bp, Homo sapiens
ggcaccagtagtcat

SEQ ID NO: 1458083 - DNA, 15 bp, Homo sapiens
gcaccagtagtcatc

SEQ ID NO: 1458084 - DNA, 15 bp, Homo sapiens
caccagtagtcatcc

SEQ ID NO: 1458085 - DNA, 15 bp, Homo sapiens
accagtagtcatcca

SEQ ID NO: 1458086 - DNA, 15 bp, Homo sapiens
ccagtagtcatccaa

SEQ ID NO: 1458087 - DNA, 15 bp, Homo sapiens
cagtagtcatccaaa

SEQ ID NO: 1458088 - DNA, 15 bp, Homo sapiens
agtagtcatccaaag

SEQ ID NO: 1458089 - DNA, 15 bp, Homo sapiens
gtagtcatccaaaga

SEQ ID NO: 1458090 - DNA, 15 bp, Homo sapiens
tagtcatccaaagag

SEQ ID NO: 1458091 - DNA, 15 bp, Homo sapiens
agtcatccaaagagt

SEQ ID NO: 1458092 - DNA, 15 bp, Homo sapiens
gtcatccaaagagtc

SEQ ID NO: 1458093 - DNA, 15 bp, Homo sapiens
tcatccaaagagtca

SEQ ID NO: 1458094 - DNA, 15 bp, Homo sapiens
catccaaagagtcat

SEQ ID NO: 1458095 - DNA, 15 bp, Homo sapiens
atccaaagagtcatt

SEQ ID NO: 1458096 - DNA, 15 bp, Homo sapiens
tccaaagagtcattt

SEQ ID NO: 1458097 - DNA, 15 bp, Homo sapiens
ccaaagagtcatttg

SEQ ID NO: 1458098 - DNA, 15 bp, Homo sapiens
caaagagtcatttgt

SEQ ID NO: 1458099 - DNA, 15 bp, Homo sapiens
gagtcatttgtttat

SEQ ID NO: 1458100 - DNA, 15 bp, Homo sapiens
agtcatttgtttatg

SEQ ID NO: 1458101 - DNA, 15 bp, Homo sapiens
gtcatttgtttatgt

SEQ ID NO: 1458102 - DNA, 15 bp, Homo sapiens
tcatttgtttatgta

SEQ ID NO: 1458103 - DNA, 15 bp, Homo sapiens
catttgtttatgtat

SEQ ID NO: 1458104 - DNA, 15 bp, Homo sapiens
atttgtttatgtatg

SEQ ID NO: 1458105 - DNA, 15 bp, Homo sapiens
tttgtttatgtatgt

SEQ ID NO: 1458106 - DNA, 15 bp, Homo sapiens
ttgtttatgtatgta

SEQ ID NO: 1458107 - DNA, 15 bp, Homo sapiens
tgtttatgtatgtaa

SEQ ID NO: 1458108 - DNA, 15 bp, Homo sapiens
gtttatgtatgtaac

SEQ ID NO: 1458109 - DNA, 15 bp, Homo sapiens
tttatgtatgtaacc

SEQ ID NO: 1458110 - DNA, 15 bp, Homo sapiens
ttatgtatgtaacca

SEQ ID NO: 1458111 - DNA, 15 bp, Homo sapiens
tatgtatgtaaccag

SEQ ID NO: 1458112 - DNA, 15 bp, Homo sapiens
atgtatgtaaccagt

SEQ ID NO: 1458113 - DNA, 15 bp, Homo sapiens
tatgtaaccagtata

SEQ ID NO: 1458114 - DNA, 15 bp, Homo sapiens
atgtaaccagtatat

SEQ ID NO: 1458115 - DNA, 15 bp, Homo sapiens
tgtaaccagtatatt

SEQ ID NO: 1458116 - DNA, 15 bp, Homo sapiens
gtaaccagtatattg

SEQ ID NO: 1458117 - DNA, 15 bp, Homo sapiens
taaccagtatattga

SEQ ID NO: 1458118 - DNA, 15 bp, Homo sapiens
aaccagtatattgat

SEQ ID NO: 1458119 - DNA, 15 bp, Homo sapiens
accagtatattgatt

SEQ ID NO: 1458120 - DNA, 15 bp, Homo sapiens
ccagtatattgatta

SEQ ID NO: 1458121 - DNA, 15 bp, Homo sapiens
cagtatattgattaa

SEQ ID NO: 1458122 - DNA, 15 bp, Homo sapiens
agtatattgattaag

SEQ ID NO: 1458123 - DNA, 15 bp, Homo sapiens
gtatattgattaagc

SEQ ID NO: 1458124 - DNA, 15 bp, Homo sapiens
tatattgattaagca

SEQ ID NO: 1458125 - DNA, 15 bp, Homo sapiens
atattgattaagcac

SEQ ID NO: 1458126 - DNA, 15 bp, Homo sapiens
tattgattaagcact

SEQ ID NO: 1458127 - DNA, 15 bp, Homo sapiens
attgattaagcacta

SEQ ID NO: 1458128 - DNA, 15 bp, Homo sapiens
ttgattaagcactac

SEQ ID NO: 1458129 - DNA, 15 bp, Homo sapiens
tgattaagcactact

SEQ ID NO: 1458130 - DNA, 15 bp, Homo sapiens
gattaagcactactc

SEQ ID NO: 1458131 - DNA, 15 bp, Homo sapiens
attaagcactactca

SEQ ID NO: 1458132 - DNA, 15 bp, Homo sapiens
ttaagcactactcat

SEQ ID NO: 1458133 - DNA, 15 bp, Homo sapiens
taagcactactcata

SEQ ID NO: 1458134 - DNA, 15 bp, Homo sapiens
aagcactactcataa

SEQ ID NO: 1458135 - DNA, 15 bp, Homo sapiens
agcactactcataat

SEQ ID NO: 1458136 - DNA, 15 bp, Homo sapiens
gcactactcataatg

SEQ ID NO: 1458137 - DNA, 15 bp, Homo sapiens
cactactcataatgt

SEQ ID NO: 1458138 - DNA, 15 bp, Homo sapiens
actactcataatgtt

SEQ ID NO: 1458139 - DNA, 15 bp, Homo sapiens
ctactcataatgttg

SEQ ID NO: 1458140 - DNA, 15 bp, Homo sapiens
tactcataatgttga

SEQ ID NO: 1458141 - DNA, 15 bp, Homo sapiens
actcataatgttgat

SEQ ID NO: 1458142 - DNA, 15 bp, Homo sapiens
ctcataatgttgatc

SEQ ID NO: 1458143 - DNA, 15 bp, Homo sapiens
tcataatgttgatca

SEQ ID NO: 1458144 - DNA, 15 bp, Homo sapiens
cataatgttgatcac

SEQ ID NO: 1458145 - DNA, 15 bp, Homo sapiens
ataatgttgatcaca

SEQ ID NO: 1458146 - DNA, 15 bp, Homo sapiens
taatgttgatcacaa

SEQ ID NO: 1458147 - DNA, 15 bp, Homo sapiens
aatgttgatcacaac

SEQ ID NO: 1458148 - DNA, 15 bp, Homo sapiens
atgttgatcacaaca

SEQ ID NO: 1458149 - DNA, 15 bp, Homo sapiens
tgttgatcacaacac

SEQ ID NO: 1458150 - DNA, 15 bp, Homo sapiens
gttgatcacaacaca

SEQ ID NO: 1458151 - DNA, 15 bp, Homo sapiens
ttgatcacaacacaa

SEQ ID NO: 1458152 - DNA, 15 bp, Homo sapiens
tgatcacaacacaat

SEQ ID NO: 1458153 - DNA, 15 bp, Homo sapiens
gatcacaacacaatt

SEQ ID NO: 1458154 - DNA, 15 bp, Homo sapiens
atcacaacacaattt

SEQ ID NO: 1458155 - DNA, 15 bp, Homo sapiens
tcacaacacaatttt

SEQ ID NO: 1458156 - DNA, 15 bp, Homo sapiens
cacaacacaatttta

SEQ ID NO: 1458157 - DNA, 15 bp, Homo sapiens
acaacacaattttat

SEQ ID NO: 1458158 - DNA, 15 bp, Homo sapiens
caacacaattttatt

SEQ ID NO: 1458159 - DNA, 15 bp, Homo sapiens
aacacaattttattt

SEQ ID NO: 1458160 - DNA, 15 bp, Homo sapiens
acacaattttatttt

SEQ ID NO: 1458161 - DNA, 15 bp, Homo sapiens
cacaattttattttg

SEQ ID NO: 1458162 - DNA, 15 bp, Homo sapiens
acaattttattttgg

SEQ ID NO: 1458163 - DNA, 15 bp, Homo sapiens
caattttattttggt

SEQ ID NO: 1458164 - DNA, 15 bp, Homo sapiens
aattttattttggtt

SEQ ID NO: 1458165 - DNA, 15 bp, Homo sapiens
attttattttggttc

SEQ ID NO: 1458166 - DNA, 15 bp, Homo sapiens
ttttattttggttct

SEQ ID NO: 1458167 - DNA, 15 bp, Homo sapiens
tttattttggttctt

SEQ ID NO: 1458168 - DNA, 15 bp, Homo sapiens
ttattttggttcttc

SEQ ID NO: 1458169 - DNA, 15 bp, Homo sapiens
tattttggttcttca

SEQ ID NO: 1458170 - DNA, 15 bp, Homo sapiens
attttggttcttcac

SEQ ID NO: 1458171 - DNA, 15 bp, Homo sapiens
ttttggttcttcact

SEQ ID NO: 1458172 - DNA, 15 bp, Homo sapiens
tttggttcttcactg

SEQ ID NO: 1458173 - DNA, 15 bp, Homo sapiens
ttggttcttcactgt

SEQ ID NO: 1458174 - DNA, 15 bp, Homo sapiens
tggttcttcactgtc

SEQ ID NO: 1458175 - DNA, 15 bp, Homo sapiens
ggttcttcactgtcc

SEQ ID NO: 1458176 - DNA, 15 bp, Homo sapiens
gttcttcactgtccc

SEQ ID NO: 1458177 - DNA, 15 bp, Homo sapiens
ttcttcactgtccct

SEQ ID NO: 1458178 - DNA, 15 bp, Homo sapiens
tcttcactgtccctt

SEQ ID NO: 1458179 - DNA, 15 bp, Homo sapiens
cttcactgtcccttt

SEQ ID NO: 1458180 - DNA, 15 bp, Homo sapiens
ttcactgtcccttta

SEQ ID NO: 1458181 - DNA, 15 bp, Homo sapiens
tcactgtccctttaa

SEQ ID NO: 1458182 - DNA, 15 bp, Homo sapiens
cactgtccctttaaa

SEQ ID NO: 1458183 - DNA, 15 bp, Homo sapiens
actgtccctttaaaa

SEQ ID NO: 1458184 - DNA, 15 bp, Homo sapiens
ctgtccctttaaaat

SEQ ID NO: 1458185 - DNA, 15 bp, Homo sapiens
tgtccctttaaaata

SEQ ID NO: 1458186 - DNA, 15 bp, Homo sapiens
gtccctttaaaatag

SEQ ID NO: 1458187 - DNA, 15 bp, Homo sapiens
tccctttaaaataga

SEQ ID NO: 1458188 - DNA, 15 bp, Homo sapiens
ccctttaaaatagat

SEQ ID NO: 1458189 - DNA, 15 bp, Homo sapiens
cctttaaaatagatt

SEQ ID NO: 1458190 - DNA, 15 bp, Homo sapiens
ctttaaaatagattt

SEQ ID NO: 1458191 - DNA, 15 bp, Homo sapiens
tttaaaatagatttg

SEQ ID NO: 1458192 - DNA, 15 bp, Homo sapiens
ttaaaatagatttgg

SEQ ID NO: 1458193 - DNA, 15 bp, Homo sapiens
taaaatagatttggc

SEQ ID NO: 1458194 - DNA, 15 bp, Homo sapiens
aaaatagatttggcc

SEQ ID NO: 1458195 - DNA, 15 bp, Homo sapiens
aaatagatttggcca

SEQ ID NO: 1458196 - DNA, 15 bp, Homo sapiens
aatagatttggccag

SEQ ID NO: 1458197 - DNA, 15 bp, Homo sapiens
atagatttggccagg

SEQ ID NO: 1458198 - DNA, 15 bp, Homo sapiens
tagatttggccaggt

SEQ ID NO: 1458199 - DNA, 15 bp, Homo sapiens
agatttggccaggtg

SEQ ID NO: 1458200 - DNA, 15 bp, Homo sapiens
gatttggccaggtgc

SEQ ID NO: 1458201 - DNA, 15 bp, Homo sapiens
atttggccaggtgcg

SEQ ID NO: 1458202 - DNA, 15 bp, Homo sapiens
tttggccaggtgcga

SEQ ID NO: 1458203 - DNA, 15 bp, Homo sapiens
ttggccaggtgcgat

SEQ ID NO: 1458204 - DNA, 15 bp, Homo sapiens
tggccaggtgcgatg

SEQ ID NO: 1458205 - DNA, 15 bp, Homo sapiens
ggccaggtgcgatgg

SEQ ID NO: 1458206 - DNA, 15 bp, Homo sapiens
gccaggtgcgatggc

SEQ ID NO: 1458207 - DNA, 15 bp, Homo sapiens
ccaggtgcgatggct

SEQ ID NO: 1458208 - DNA, 15 bp, Homo sapiens
caggtgcgatggctc

SEQ ID NO: 1458209 - DNA, 15 bp, Homo sapiens
aggtgcgatggctca

SEQ ID NO: 1458210 - DNA, 15 bp, Homo sapiens
ggtgcgatggctcac

SEQ ID NO: 1458211 - DNA, 15 bp, Homo sapiens
gtgcgatggctcaca

SEQ ID NO: 1458212 - DNA, 15 bp, Homo sapiens
tgcgatggctcacac

SEQ ID NO: 1458213 - DNA, 15 bp, Homo sapiens
gcgatggctcacact

SEQ ID NO: 1458214 - DNA, 15 bp, Homo sapiens
cgatggctcacactt

SEQ ID NO: 1458215 - DNA, 15 bp, Homo sapiens
gatggctcacacttg

SEQ ID NO: 1458216 - DNA, 15 bp, Homo sapiens
atggctcacacttgt

SEQ ID NO: 1458217 - DNA, 15 bp, Homo sapiens
tcacacttgtaatcc

SEQ ID NO: 1458218 - DNA, 15 bp, Homo sapiens
cacacttgtaatccc

SEQ ID NO: 1458219 - DNA, 15 bp, Homo sapiens
acacttgtaatccca

SEQ ID NO: 1458220 - DNA, 15 bp, Homo sapiens
cacttgtaatcccag

SEQ ID NO: 1458221 - DNA, 15 bp, Homo sapiens
acttgtaatcccagc

SEQ ID NO: 1458222 - DNA, 15 bp, Homo sapiens
tgggaggccaaggtt

SEQ ID NO: 1458223 - DNA, 15 bp, Homo sapiens
gggaggccaaggttg

SEQ ID NO: 1458224 - DNA, 15 bp, Homo sapiens
ggaggccaaggttgg

SEQ ID NO: 1458225 - DNA, 15 bp, Homo sapiens
gaggccaaggttgga

SEQ ID NO: 1458226 - DNA, 15 bp, Homo sapiens
aggccaaggttggag

SEQ ID NO: 1458227 - DNA, 15 bp, Homo sapiens
ggccaaggttggagg

SEQ ID NO: 1458228 - DNA, 15 bp, Homo sapiens
gccaaggttggagga

SEQ ID NO: 1458229 - DNA, 15 bp, Homo sapiens
ccaaggttggaggat

SEQ ID NO: 1458230 - DNA, 15 bp, Homo sapiens
caaggttggaggatt

SEQ ID NO: 1458231 - DNA, 15 bp, Homo sapiens
aaggttggaggattg

SEQ ID NO: 1458232 - DNA, 15 bp, Homo sapiens
aggttggaggattgc

SEQ ID NO: 1458233 - DNA, 15 bp, Homo sapiens
ggttggaggattgct

SEQ ID NO: 1458234 - DNA, 15 bp, Homo sapiens
gttggaggattgctt

SEQ ID NO: 1458235 - DNA, 15 bp, Homo sapiens
ttggaggattgcttg

SEQ ID NO: 1458236 - DNA, 15 bp, Homo sapiens
tggaggattgcttga

SEQ ID NO: 1458237 - DNA, 15 bp, Homo sapiens
ggattgcttgaggcc

SEQ ID NO: 1458238 - DNA, 15 bp, Homo sapiens
attgcttgaggccag

SEQ ID NO: 1458239 - DNA, 15 bp, Homo sapiens
ttgcttgaggccagg

SEQ ID NO: 1458240 - DNA, 15 bp, Homo sapiens
aagaccagcctgggt

SEQ ID NO: 1458241 - DNA, 15 bp, Homo sapiens
agaccagcctgggtg

SEQ ID NO: 1458242 - DNA, 15 bp, Homo sapiens
gaccagcctgggtga

SEQ ID NO: 1458243 - DNA, 15 bp, Homo sapiens
cctgggtgacaaagc

SEQ ID NO: 1458244 - DNA, 15 bp, Homo sapiens
ggtgacaaagcaaga

SEQ ID NO: 1458245 - DNA, 15 bp, Homo sapiens
gtgacaaagcaagac

SEQ ID NO: 1458246 - DNA, 15 bp, Homo sapiens
tgacaaagcaagacc

SEQ ID NO: 1458247 - DNA, 15 bp, Homo sapiens
gacaaagcaagaccc

SEQ ID NO: 1458248 - DNA, 15 bp, Homo sapiens
acaaagcaagacccc

SEQ ID NO: 1458249 - DNA, 15 bp, Homo sapiens
caaagcaagaccccc

SEQ ID NO: 1458250 - DNA, 15 bp, Homo sapiens
aaagcaagaccccca

SEQ ID NO: 1458251 - DNA, 15 bp, Homo sapiens
aagcaagacccccat

SEQ ID NO: 1458252 - DNA, 15 bp, Homo sapiens
agcaagacccccatc

SEQ ID NO: 1458253 - DNA, 15 bp, Homo sapiens
gcaagacccccatct

SEQ ID NO: 1458254 - DNA, 15 bp, Homo sapiens
caagacccccatctc

SEQ ID NO: 1458255 - DNA, 15 bp, Homo sapiens
aagacccccatctct

SEQ ID NO: 1458256 - DNA, 15 bp, Homo sapiens
ctctacaaaaaataa

SEQ ID NO: 1458257 - DNA, 15 bp, Homo sapiens
tctacaaaaaataat

SEQ ID NO: 1458258 - DNA, 15 bp, Homo sapiens
ctacaaaaaataatt

SEQ ID NO: 1458259 - DNA, 15 bp, Homo sapiens
tacaaaaaataatta

SEQ ID NO: 1458260 - DNA, 15 bp, Homo sapiens
acaaaaaataattag

SEQ ID NO: 1458261 - DNA, 15 bp, Homo sapiens
caaaaaataattagc

SEQ ID NO: 1458262 - DNA, 15 bp, Homo sapiens
aaaaaataattagcc

SEQ ID NO: 1458263 - DNA, 15 bp, Homo sapiens
aaaaataattagcca

SEQ ID NO: 1458264 - DNA, 15 bp, Homo sapiens
aaaataattagccag

SEQ ID NO: 1458265 - DNA, 15 bp, Homo sapiens
aaataattagccaga

SEQ ID NO: 1458266 - DNA, 15 bp, Homo sapiens
aataattagccagac

SEQ ID NO: 1458267 - DNA, 15 bp, Homo sapiens
ataattagccagaca

SEQ ID NO: 1458268 - DNA, 15 bp, Homo sapiens
taattagccagacat

SEQ ID NO: 1458269 - DNA, 15 bp, Homo sapiens
attagccagacatgt

SEQ ID NO: 1458270 - DNA, 15 bp, Homo sapiens
ttagccagacatgtg

SEQ ID NO: 1458271 - DNA, 15 bp, Homo sapiens
tagccagacatgtgg

SEQ ID NO: 1458272 - DNA, 15 bp, Homo sapiens
agccagacatgtggt

SEQ ID NO: 1458273 - DNA, 15 bp, Homo sapiens
gccagacatgtggta

SEQ ID NO: 1458274 - DNA, 15 bp, Homo sapiens
ccagacatgtggtat

SEQ ID NO: 1458275 - DNA, 15 bp, Homo sapiens
cagacatgtggtata

SEQ ID NO: 1458276 - DNA, 15 bp, Homo sapiens
agacatgtggtatat

SEQ ID NO: 1458277 - DNA, 15 bp, Homo sapiens
gacatgtggtatata

SEQ ID NO: 1458278 - DNA, 15 bp, Homo sapiens
acatgtggtatatac

SEQ ID NO: 1458279 - DNA, 15 bp, Homo sapiens
catgtggtatatacc

SEQ ID NO: 1458280 - DNA, 15 bp, Homo sapiens
atgtggtatatacct

SEQ ID NO: 1458281 - DNA, 15 bp, Homo sapiens
tgtggtatatacctg

SEQ ID NO: 1458282 - DNA, 15 bp, Homo sapiens
gtggtatatacctgt

SEQ ID NO: 1458283 - DNA, 15 bp, Homo sapiens
tggtatatacctgta

SEQ ID NO: 1458284 - DNA, 15 bp, Homo sapiens
ggtatatacctgtag

SEQ ID NO: 1458285 - DNA, 15 bp, Homo sapiens
gtatatacctgtagt

SEQ ID NO: 1458286 - DNA, 15 bp, Homo sapiens
tatatacctgtagtc

SEQ ID NO: 1458287 - DNA, 15 bp, Homo sapiens
atatacctgtagtcc

SEQ ID NO: 1458288 - DNA, 15 bp, Homo sapiens
tatacctgtagtccc

SEQ ID NO: 1458289 - DNA, 15 bp, Homo sapiens
atacctgtagtccca

SEQ ID NO: 1458290 - DNA, 15 bp, Homo sapiens
tacctgtagtcccag

SEQ ID NO: 1458291 - DNA, 15 bp, Homo sapiens
agtcccagctacttc

SEQ ID NO: 1458292 - DNA, 15 bp, Homo sapiens
gtcccagctacttca

SEQ ID NO: 1458293 - DNA, 15 bp, Homo sapiens
tcccagctacttcac

SEQ ID NO: 1458294 - DNA, 15 bp, Homo sapiens
cccagctacttcacc

SEQ ID NO: 1458295 - DNA, 15 bp, Homo sapiens
ccagctacttcacct

SEQ ID NO: 1458296 - DNA, 15 bp, Homo sapiens
cagctacttcaccta

SEQ ID NO: 1458297 - DNA, 15 bp, Homo sapiens
agctacttcacctac

SEQ ID NO: 1458298 - DNA, 15 bp, Homo sapiens
gctacttcacctact

SEQ ID NO: 1458299 - DNA, 15 bp, Homo sapiens
ctacttcacctactt

SEQ ID NO: 1458300 - DNA, 15 bp, Homo sapiens
tacttcacctacttg

SEQ ID NO: 1458301 - DNA, 15 bp, Homo sapiens
acttcacctacttgg

SEQ ID NO: 1458302 - DNA, 15 bp, Homo sapiens
cttcacctacttggg

SEQ ID NO: 1458303 - DNA, 15 bp, Homo sapiens
ttcacctacttgggt

SEQ ID NO: 1458304 - DNA, 15 bp, Homo sapiens
tcacctacttgggtg

SEQ ID NO: 1458305 - DNA, 15 bp, Homo sapiens
cacctacttgggtgg

SEQ ID NO: 1458306 - DNA, 15 bp, Homo sapiens
acctacttgggtggc

SEQ ID NO: 1458307 - DNA, 15 bp, Homo sapiens
cctacttgggtggct

SEQ ID NO: 1458308 - DNA, 15 bp, Homo sapiens
ctacttgggtggctg

SEQ ID NO: 1458309 - DNA, 15 bp, Homo sapiens
tacttgggtggctga

SEQ ID NO: 1458310 - DNA, 15 bp, Homo sapiens
acttgggtggctgaa

SEQ ID NO: 1458311 - DNA, 15 bp, Homo sapiens
cttgggtggctgaag

SEQ ID NO: 1458312 - DNA, 15 bp, Homo sapiens
ttgggtggctgaagt

SEQ ID NO: 1458313 - DNA, 15 bp, Homo sapiens
tgggtggctgaagtg

SEQ ID NO: 1458314 - DNA, 15 bp, Homo sapiens
gggtggctgaagtgg

SEQ ID NO: 1458315 - DNA, 15 bp, Homo sapiens
ggtggctgaagtgga

SEQ ID NO: 1458316 - DNA, 15 bp, Homo sapiens
gtggctgaagtggaa

SEQ ID NO: 1458317 - DNA, 15 bp, Homo sapiens
tggctgaagtggaag

SEQ ID NO: 1458318 - DNA, 15 bp, Homo sapiens
ggctgaagtggaagg

SEQ ID NO: 1458319 - DNA, 15 bp, Homo sapiens
ctgaagtggaaggat

SEQ ID NO: 1458320 - DNA, 15 bp, Homo sapiens
tgaagtggaaggatt

SEQ ID NO: 1458321 - DNA, 15 bp, Homo sapiens
gaagtggaaggattg

SEQ ID NO: 1458322 - DNA, 15 bp, Homo sapiens
aagtggaaggattgc

SEQ ID NO: 1458323 - DNA, 15 bp, Homo sapiens
agtggaaggattgct

SEQ ID NO: 1458324 - DNA, 15 bp, Homo sapiens
gtggaaggattgctt

SEQ ID NO: 1458325 - DNA, 15 bp, Homo sapiens
tggaaggattgcttg

SEQ ID NO: 1458326 - DNA, 15 bp, Homo sapiens
ggaaggattgcttga

SEQ ID NO: 1458327 - DNA, 15 bp, Homo sapiens
gaaggattgcttgag

SEQ ID NO: 1458328 - DNA, 15 bp, Homo sapiens
aaggattgcttgagc

SEQ ID NO: 1458329 - DNA, 15 bp, Homo sapiens
gagcccaggaggttg

SEQ ID NO: 1458330 - DNA, 15 bp, Homo sapiens
agcccaggaggttga

SEQ ID NO: 1458331 - DNA, 15 bp, Homo sapiens
gcccaggaggttgat

SEQ ID NO: 1458332 - DNA, 15 bp, Homo sapiens
cccaggaggttgatg

SEQ ID NO: 1458333 - DNA, 15 bp, Homo sapiens
ccaggaggttgatgc

SEQ ID NO: 1458334 - DNA, 15 bp, Homo sapiens
caggaggttgatgct

SEQ ID NO: 1458335 - DNA, 15 bp, Homo sapiens
aggaggttgatgctg

SEQ ID NO: 1458336 - DNA, 15 bp, Homo sapiens
ggaggttgatgctgc

SEQ ID NO: 1458337 - DNA, 15 bp, Homo sapiens
gaggttgatgctgca

SEQ ID NO: 1458338 - DNA, 15 bp, Homo sapiens
aggttgatgctgcag

SEQ ID NO: 1458339 - DNA, 15 bp, Homo sapiens
ggttgatgctgcagt

SEQ ID NO: 1458340 - DNA, 15 bp, Homo sapiens
gttgatgctgcagtg

SEQ ID NO: 1458341 - DNA, 15 bp, Homo sapiens
ttgatgctgcagtga

SEQ ID NO: 1458342 - DNA, 15 bp, Homo sapiens
tgatgctgcagtgag

SEQ ID NO: 1458343 - DNA, 15 bp, Homo sapiens
gatgctgcagtgagc

SEQ ID NO: 1458344 - DNA, 15 bp, Homo sapiens
atgctgcagtgagct

SEQ ID NO: 1458345 - DNA, 15 bp, Homo sapiens
tgctgcagtgagcta

SEQ ID NO: 1458346 - DNA, 15 bp, Homo sapiens
gcagtgagctatgaa

SEQ ID NO: 1458347 - DNA, 15 bp, Homo sapiens
cagtgagctatgaaa

SEQ ID NO: 1458348 - DNA, 15 bp, Homo sapiens
agtgagctatgaaag

SEQ ID NO: 1458349 - DNA, 15 bp, Homo sapiens
gtgagctatgaaagt

SEQ ID NO: 1458350 - DNA, 15 bp, Homo sapiens
tgagctatgaaagtg

SEQ ID NO: 1458351 - DNA, 15 bp, Homo sapiens
gagctatgaaagtgc

SEQ ID NO: 1458352 - DNA, 15 bp, Homo sapiens
agctatgaaagtgcc

SEQ ID NO: 1458353 - DNA, 15 bp, Homo sapiens
gctatgaaagtgcca

SEQ ID NO: 1458354 - DNA, 15 bp, Homo sapiens
ctatgaaagtgccac

SEQ ID NO: 1458355 - DNA, 15 bp, Homo sapiens
tatgaaagtgccact

SEQ ID NO: 1458356 - DNA, 15 bp, Homo sapiens
atgaaagtgccactg

SEQ ID NO: 1458357 - DNA, 15 bp, Homo sapiens
tgaaagtgccactgc

SEQ ID NO: 1458358 - DNA, 15 bp, Homo sapiens
gaaagtgccactgca

SEQ ID NO: 1458359 - DNA, 15 bp, Homo sapiens
aaagtgccactgcac

SEQ ID NO: 1458360 - DNA, 15 bp, Homo sapiens
aagtgccactgcact

SEQ ID NO: 1458361 - DNA, 15 bp, Homo sapiens
agtgccactgcactc

SEQ ID NO: 1458362 - DNA, 15 bp, Homo sapiens
gtgccactgcactca

SEQ ID NO: 1458363 - DNA, 15 bp, Homo sapiens
tgccactgcactcaa

SEQ ID NO: 1458364 - DNA, 15 bp, Homo sapiens
gccactgcactcaaa

SEQ ID NO: 1458365 - DNA, 15 bp, Homo sapiens
ccactgcactcaaac

SEQ ID NO: 1458366 - DNA, 15 bp, Homo sapiens
cactgcactcaaact

SEQ ID NO: 1458367 - DNA, 15 bp, Homo sapiens
actgcactcaaactt

SEQ ID NO: 1458368 - DNA, 15 bp, Homo sapiens
ctgcactcaaacttg

SEQ ID NO: 1458369 - DNA, 15 bp, Homo sapiens
tgcactcaaacttgg

SEQ ID NO: 1458370 - DNA, 15 bp, Homo sapiens
gcactcaaacttgga

SEQ ID NO: 1458371 - DNA, 15 bp, Homo sapiens
cactcaaacttggac

SEQ ID NO: 1458372 - DNA, 15 bp, Homo sapiens
actcaaacttggaca

SEQ ID NO: 1458373 - DNA, 15 bp, Homo sapiens
ctcaaacttggacaa

SEQ ID NO: 1458374 - DNA, 15 bp, Homo sapiens
tcaaacttggacaac

SEQ ID NO: 1458375 - DNA, 15 bp, Homo sapiens
caaacttggacaaca

SEQ ID NO: 1458376 - DNA, 15 bp, Homo sapiens
aaacttggacaacag

SEQ ID NO: 1458377 - DNA, 15 bp, Homo sapiens
aacttggacaacaga

SEQ ID NO: 1458378 - DNA, 15 bp, Homo sapiens
acttggacaacagag

SEQ ID NO: 1458379 - DNA, 15 bp, Homo sapiens
cttggacaacagagc

SEQ ID NO: 1458380 - DNA, 15 bp, Homo sapiens
ttggacaacagagca

SEQ ID NO: 1458381 - DNA, 15 bp, Homo sapiens
tggacaacagagcaa

SEQ ID NO: 1458382 - DNA, 15 bp, Homo sapiens
ggacaacagagcaag

SEQ ID NO: 1458383 - DNA, 15 bp, Homo sapiens
gacaacagagcaaga

SEQ ID NO: 1458384 - DNA, 15 bp, Homo sapiens
acaacagagcaagac

SEQ ID NO: 1458385 - DNA, 15 bp, Homo sapiens
tgtctctaaaaaaaa

SEQ ID NO: 1458386 - DNA, 15 bp, Homo sapiens
gtctctaaaaaaaaa

SEQ ID NO: 1458387 - DNA, 15 bp, Homo sapiens
tctctaaaaaaaaaa

SEQ ID NO: 1458388 - DNA, 15 bp, Homo sapiens
ctctaaaaaaaaaaa

SEQ ID NO: 1458389 - DNA, 15 bp, Homo sapiens
ctaaaaaaaaaaaac

SEQ ID NO: 1458390 - DNA, 15 bp, Homo sapiens
taaaaaaaaaaaacc

SEQ ID NO: 1458391 - DNA, 15 bp, Homo sapiens
aaaaaaaaaaaccat

SEQ ID NO: 1458392 - DNA, 15 bp, Homo sapiens
aaaaaaaaaaccatc

SEQ ID NO: 1458393 - DNA, 15 bp, Homo sapiens
aaaaaaaaaccatcc

SEQ ID NO: 1458394 - DNA, 15 bp, Homo sapiens
aaaaaaaaccatcca

SEQ ID NO: 1458395 - DNA, 15 bp, Homo sapiens
aaaaaaaccatccag

SEQ ID NO: 1458396 - DNA, 15 bp, Homo sapiens
aaaaaaccatccagt

SEQ ID NO: 1458397 - DNA, 15 bp, Homo sapiens
aaaaaccatccagtt

SEQ ID NO: 1458398 - DNA, 15 bp, Homo sapiens
aaaaccatccagttt

SEQ ID NO: 1458399 - DNA, 15 bp, Homo sapiens
aaaccatccagttta

SEQ ID NO: 1458400 - DNA, 15 bp, Homo sapiens
aaccatccagtttaa

SEQ ID NO: 1458401 - DNA, 15 bp, Homo sapiens
accatccagtttaat

SEQ ID NO: 1458402 - DNA, 15 bp, Homo sapiens
ccatccagtttaata

SEQ ID NO: 1458403 - DNA, 15 bp, Homo sapiens
catccagtttaatag

SEQ ID NO: 1458404 - DNA, 15 bp, Homo sapiens
atccagtttaatagc

SEQ ID NO: 1458405 - DNA, 15 bp, Homo sapiens
tccagtttaatagcg

SEQ ID NO: 1458406 - DNA, 15 bp, Homo sapiens
ccagtttaatagcgg

SEQ ID NO: 1458407 - DNA, 15 bp, Homo sapiens
cagtttaatagcggg

SEQ ID NO: 1458408 - DNA, 15 bp, Homo sapiens
agtttaatagcgggg

SEQ ID NO: 1458409 - DNA, 15 bp, Homo sapiens
gtttaatagcggggg

SEQ ID NO: 1458410 - DNA, 15 bp, Homo sapiens
tttaatagcgggggt

SEQ ID NO: 1458411 - DNA, 15 bp, Homo sapiens
ttaatagcgggggta

SEQ ID NO: 1458412 - DNA, 15 bp, Homo sapiens
taatagcgggggtaa

SEQ ID NO: 1458413 - DNA, 15 bp, Homo sapiens
aatagcgggggtaaa

SEQ ID NO: 1458414 - DNA, 15 bp, Homo sapiens
atagcgggggtaaac

SEQ ID NO: 1458415 - DNA, 15 bp, Homo sapiens
tagcgggggtaaact

SEQ ID NO: 1458416 - DNA, 15 bp, Homo sapiens
agcgggggtaaactt

SEQ ID NO: 1458417 - DNA, 15 bp, Homo sapiens
gcgggggtaaacttt

SEQ ID NO: 1458418 - DNA, 15 bp, Homo sapiens
cgggggtaaactttc

SEQ ID NO: 1458419 - DNA, 15 bp, Homo sapiens
gggggtaaactttcc

SEQ ID NO: 1458420 - DNA, 15 bp, Homo sapiens
ggggtaaactttcct

SEQ ID NO: 1458421 - DNA, 15 bp, Homo sapiens
gggtaaactttcctt

SEQ ID NO: 1458422 - DNA, 15 bp, Homo sapiens
ggtaaactttcctta

SEQ ID NO: 1458423 - DNA, 15 bp, Homo sapiens
gtaaactttccttat

SEQ ID NO: 1458424 - DNA, 15 bp, Homo sapiens
taaactttccttatt

SEQ ID NO: 1458425 - DNA, 15 bp, Homo sapiens
aaactttccttattt

SEQ ID NO: 1458426 - DNA, 15 bp, Homo sapiens
aactttccttatttc

SEQ ID NO: 1458427 - DNA, 15 bp, Homo sapiens
actttccttatttct

SEQ ID NO: 1458428 - DNA, 15 bp, Homo sapiens
ctttccttatttctt

SEQ ID NO: 1458429 - DNA, 15 bp, Homo sapiens
tttccttatttcttc

SEQ ID NO: 1458430 - DNA, 15 bp, Homo sapiens
ttccttatttcttcg

SEQ ID NO: 1458431 - DNA, 15 bp, Homo sapiens
tccttatttcttcgt

SEQ ID NO: 1458432 - DNA, 15 bp, Homo sapiens
ccttatttcttcgta

SEQ ID NO: 1458433 - DNA, 15 bp, Homo sapiens
cttatttcttcgtaa

SEQ ID NO: 1458434 - DNA, 15 bp, Homo sapiens
ttatttcttcgtaaa

SEQ ID NO: 1458435 - DNA, 15 bp, Homo sapiens
tatttcttcgtaaaa

SEQ ID NO: 1458436 - DNA, 15 bp, Homo sapiens
atttcttcgtaaaaa

SEQ ID NO: 1458437 - DNA, 15 bp, Homo sapiens
tttcttcgtaaaaat

SEQ ID NO: 1458438 - DNA, 15 bp, Homo sapiens
ttcttcgtaaaaatt

SEQ ID NO: 1458439 - DNA, 15 bp, Homo sapiens
tcttcgtaaaaattc

SEQ ID NO: 1458440 - DNA, 15 bp, Homo sapiens
cttcgtaaaaattct

SEQ ID NO: 1458441 - DNA, 15 bp, Homo sapiens
ttcgtaaaaattctg

SEQ ID NO: 1458442 - DNA, 15 bp, Homo sapiens
tcgtaaaaattctga

SEQ ID NO: 1458443 - DNA, 15 bp, Homo sapiens
cgtaaaaattctgat

SEQ ID NO: 1458444 - DNA, 15 bp, Homo sapiens
gtaaaaattctgata

SEQ ID NO: 1458445 - DNA, 15 bp, Homo sapiens
taaaaattctgataa

SEQ ID NO: 1458446 - DNA, 15 bp, Homo sapiens
aaaaattctgataag

SEQ ID NO: 1458447 - DNA, 15 bp, Homo sapiens
aaaattctgataagc

SEQ ID NO: 1458448 - DNA, 15 bp, Homo sapiens
aaattctgataagcc

SEQ ID NO: 1458449 - DNA, 15 bp, Homo sapiens
aattctgataagccc

SEQ ID NO: 1458450 - DNA, 15 bp, Homo sapiens
attctgataagccct

SEQ ID NO: 1458451 - DNA, 15 bp, Homo sapiens
ttctgataagccctg

SEQ ID NO: 1458452 - DNA, 15 bp, Homo sapiens
tctgataagccctgt

SEQ ID NO: 1458453 - DNA, 15 bp, Homo sapiens
ctgataagccctgta

SEQ ID NO: 1458454 - DNA, 15 bp, Homo sapiens
tgataagccctgtaa

SEQ ID NO: 1458455 - DNA, 15 bp, Homo sapiens
gataagccctgtaac

SEQ ID NO: 1458456 - DNA, 15 bp, Homo sapiens
ataagccctgtaact

SEQ ID NO: 1458457 - DNA, 15 bp, Homo sapiens
taagccctgtaactt

SEQ ID NO: 1458458 - DNA, 15 bp, Homo sapiens
aagccctgtaacttt

SEQ ID NO: 1458459 - DNA, 15 bp, Homo sapiens
agccctgtaactttt

SEQ ID NO: 1458460 - DNA, 15 bp, Homo sapiens
gccctgtaacttttc

SEQ ID NO: 1458461 - DNA, 15 bp, Homo sapiens
ccctgtaacttttct

SEQ ID NO: 1458462 - DNA, 15 bp, Homo sapiens
cctgtaacttttctg

SEQ ID NO: 1458463 - DNA, 15 bp, Homo sapiens
ctgtaacttttctgc

SEQ ID NO: 1458464 - DNA, 15 bp, Homo sapiens
tgtaacttttctgct

SEQ ID NO: 1458465 - DNA, 15 bp, Homo sapiens
gtaacttttctgctc

SEQ ID NO: 1458466 - DNA, 15 bp, Homo sapiens
taacttttctgctca

SEQ ID NO: 1458467 - DNA, 15 bp, Homo sapiens
aacttttctgctcac

SEQ ID NO: 1458468 - DNA, 15 bp, Homo sapiens
acttttctgctcacc

SEQ ID NO: 1458469 - DNA, 15 bp, Homo sapiens
cttttctgctcaccc

SEQ ID NO: 1458470 - DNA, 15 bp, Homo sapiens
ttttctgctcaccct

SEQ ID NO: 1458471 - DNA, 15 bp, Homo sapiens
tttctgctcaccctt

SEQ ID NO: 1458472 - DNA, 15 bp, Homo sapiens
ttctgctcaccctta

SEQ ID NO: 1458473 - DNA, 15 bp, Homo sapiens
tctgctcacccttaa

SEQ ID NO: 1458474 - DNA, 15 bp, Homo sapiens
ctgctcacccttaag

SEQ ID NO: 1458475 - DNA, 15 bp, Homo sapiens
tgctcacccttaagt

SEQ ID NO: 1458476 - DNA, 15 bp, Homo sapiens
gctcacccttaagta

SEQ ID NO: 1458477 - DNA, 15 bp, Homo sapiens
ctcacccttaagtaa

SEQ ID NO: 1458478 - DNA, 15 bp, Homo sapiens
tcacccttaagtaat

SEQ ID NO: 1458479 - DNA, 15 bp, Homo sapiens
cacccttaagtaata

SEQ ID NO: 1458480 - DNA, 15 bp, Homo sapiens
acccttaagtaataa

SEQ ID NO: 1458481 - DNA, 15 bp, Homo sapiens
cccttaagtaataaa

SEQ ID NO: 1458482 - DNA, 15 bp, Homo sapiens
ccttaagtaataaac

SEQ ID NO: 1458483 - DNA, 15 bp, Homo sapiens
cttaagtaataaaca

SEQ ID NO: 1458484 - DNA, 15 bp, Homo sapiens
ttaagtaataaacag

SEQ ID NO: 1458485 - DNA, 15 bp, Homo sapiens
taagtaataaacagg

SEQ ID NO: 1458486 - DNA, 15 bp, Homo sapiens
aagtaataaacagga

SEQ ID NO: 1458487 - DNA, 15 bp, Homo sapiens
agtaataaacaggac

SEQ ID NO: 1458488 - DNA, 15 bp, Homo sapiens
gtaataaacaggact

SEQ ID NO: 1458489 - DNA, 15 bp, Homo sapiens
taataaacaggacta

SEQ ID NO: 1458490 - DNA, 15 bp, Homo sapiens
aataaacaggactaa

SEQ ID NO: 1458491 - DNA, 15 bp, Homo sapiens
ataaacaggactaaa

SEQ ID NO: 1458492 - DNA, 15 bp, Homo sapiens
taaacaggactaaag

SEQ ID NO: 1458493 - DNA, 15 bp, Homo sapiens
aaacaggactaaagt

SEQ ID NO: 1458494 - DNA, 15 bp, Homo sapiens
aacaggactaaagtc

SEQ ID NO: 1458495 - DNA, 15 bp, Homo sapiens
acaggactaaagtca

SEQ ID NO: 1458496 - DNA, 15 bp, Homo sapiens
caggactaaagtcac

SEQ ID NO: 1458497 - DNA, 15 bp, Homo sapiens
aggactaaagtcact

SEQ ID NO: 1458498 - DNA, 15 bp, Homo sapiens
ggactaaagtcactt

SEQ ID NO: 1458499 - DNA, 15 bp, Homo sapiens
gactaaagtcacttt

SEQ ID NO: 1458500 - DNA, 15 bp, Homo sapiens
actaaagtcacttta

SEQ ID NO: 1458501 - DNA, 15 bp, Homo sapiens
ctaaagtcactttat

SEQ ID NO: 1458502 - DNA, 15 bp, Homo sapiens
taaagtcactttatg

SEQ ID NO: 1458503 - DNA, 15 bp, Homo sapiens
aaagtcactttatgt

SEQ ID NO: 1458504 - DNA, 15 bp, Homo sapiens
aagtcactttatgtc

SEQ ID NO: 1458505 - DNA, 15 bp, Homo sapiens
agtcactttatgtca

SEQ ID NO: 1458506 - DNA, 15 bp, Homo sapiens
gtcactttatgtcac

SEQ ID NO: 1458507 - DNA, 15 bp, Homo sapiens
tcactttatgtcaca

SEQ ID NO: 1458508 - DNA, 15 bp, Homo sapiens
cactttatgtcacaa

SEQ ID NO: 1458509 - DNA, 15 bp, Homo sapiens
actttatgtcacaaa

SEQ ID NO: 1458510 - DNA, 15 bp, Homo sapiens
ctttatgtcacaaat

SEQ ID NO: 1458511 - DNA, 15 bp, Homo sapiens
tttatgtcacaaata

SEQ ID NO: 1458512 - DNA, 15 bp, Homo sapiens
ttatgtcacaaatac

SEQ ID NO: 1458513 - DNA, 15 bp, Homo sapiens
tatgtcacaaataca

SEQ ID NO: 1458514 - DNA, 15 bp, Homo sapiens
atgtcacaaatacag

SEQ ID NO: 1458515 - DNA, 15 bp, Homo sapiens
tgtcacaaatacagt

SEQ ID NO: 1458516 - DNA, 15 bp, Homo sapiens
gtcacaaatacagtt

SEQ ID NO: 1458517 - DNA, 15 bp, Homo sapiens
tcacaaatacagttc

SEQ ID NO: 1458518 - DNA, 15 bp, Homo sapiens
cacaaatacagttca

SEQ ID NO: 1458519 - DNA, 15 bp, Homo sapiens
acaaatacagttcaa

SEQ ID NO: 1458520 - DNA, 15 bp, Homo sapiens
caaatacagttcaaa

SEQ ID NO: 1458521 - DNA, 15 bp, Homo sapiens
aaatacagttcaaat

SEQ ID NO: 1458522 - DNA, 15 bp, Homo sapiens
aatacagttcaaatc

SEQ ID NO: 1458523 - DNA, 15 bp, Homo sapiens
atacagttcaaatca

SEQ ID NO: 1458524 - DNA, 15 bp, Homo sapiens
tacagttcaaatcag

SEQ ID NO: 1458525 - DNA, 15 bp, Homo sapiens
acagttcaaatcaga

SEQ ID NO: 1458526 - DNA, 15 bp, Homo sapiens
cagttcaaatcagaa

SEQ ID NO: 1458527 - DNA, 15 bp, Homo sapiens
agttcaaatcagaaa

SEQ ID NO: 1458528 - DNA, 15 bp, Homo sapiens
gttcaaatcagaaat

SEQ ID NO: 1458529 - DNA, 15 bp, Homo sapiens
ttcaaatcagaaatt

SEQ ID NO: 1458530 - DNA, 15 bp, Homo sapiens
tcaaatcagaaatta

SEQ ID NO: 1458531 - DNA, 15 bp, Homo sapiens
caaatcagaaattac

SEQ ID NO: 1458532 - DNA, 15 bp, Homo sapiens
aaatcagaaattaca

SEQ ID NO: 1458533 - DNA, 15 bp, Homo sapiens
aatcagaaattacaa

SEQ ID NO: 1458534 - DNA, 15 bp, Homo sapiens
atcagaaattacaat

SEQ ID NO: 1458535 - DNA, 15 bp, Homo sapiens
tcagaaattacaatg

SEQ ID NO: 1458536 - DNA, 15 bp, Homo sapiens
cagaaattacaatgt

SEQ ID NO: 1458537 - DNA, 15 bp, Homo sapiens
agaaattacaatgtc

SEQ ID NO: 1458538 - DNA, 15 bp, Homo sapiens
gaaattacaatgtcc

SEQ ID NO: 1458539 - DNA, 15 bp, Homo sapiens
aaattacaatgtcca

SEQ ID NO: 1458540 - DNA, 15 bp, Homo sapiens
aattacaatgtccat

SEQ ID NO: 1458541 - DNA, 15 bp, Homo sapiens
attacaatgtccatc

SEQ ID NO: 1458542 - DNA, 15 bp, Homo sapiens
ttacaatgtccatcc

SEQ ID NO: 1458543 - DNA, 15 bp, Homo sapiens
tacaatgtccatccc

SEQ ID NO: 1458544 - DNA, 15 bp, Homo sapiens
acaatgtccatccca

SEQ ID NO: 1458545 - DNA, 15 bp, Homo sapiens
caatgtccatcccaa

SEQ ID NO: 1458546 - DNA, 15 bp, Homo sapiens
aatgtccatcccaag

SEQ ID NO: 1458547 - DNA, 15 bp, Homo sapiens
atgtccatcccaaga

SEQ ID NO: 1458548 - DNA, 15 bp, Homo sapiens
tgtccatcccaagat

SEQ ID NO: 1458549 - DNA, 15 bp, Homo sapiens
gtccatcccaagata

SEQ ID NO: 1458550 - DNA, 15 bp, Homo sapiens
tccatcccaagatat

SEQ ID NO: 1458551 - DNA, 15 bp, Homo sapiens
ccatcccaagatatt

SEQ ID NO: 1458552 - DNA, 15 bp, Homo sapiens
catcccaagatatta

SEQ ID NO: 1458553 - DNA, 15 bp, Homo sapiens
atcccaagatattaa

SEQ ID NO: 1458554 - DNA, 15 bp, Homo sapiens
tcccaagatattaat

SEQ ID NO: 1458555 - DNA, 15 bp, Homo sapiens
cccaagatattaatc

SEQ ID NO: 1458556 - DNA, 15 bp, Homo sapiens
ccaagatattaatca

SEQ ID NO: 1458557 - DNA, 15 bp, Homo sapiens
caagatattaatcaa

SEQ ID NO: 1458558 - DNA, 15 bp, Homo sapiens
aagatattaatcaaa

SEQ ID NO: 1458559 - DNA, 15 bp, Homo sapiens
agatattaatcaaaa

SEQ ID NO: 1458560 - DNA, 15 bp, Homo sapiens
gatattaatcaaaat

SEQ ID NO: 1458561 - DNA, 15 bp, Homo sapiens
atattaatcaaaatt

SEQ ID NO: 1458562 - DNA, 15 bp, Homo sapiens
tattaatcaaaattg

SEQ ID NO: 1458563 - DNA, 15 bp, Homo sapiens
attaatcaaaattgt

SEQ ID NO: 1458564 - DNA, 15 bp, Homo sapiens
ttaatcaaaattgta

SEQ ID NO: 1458565 - DNA, 15 bp, Homo sapiens
taatcaaaattgtaa

SEQ ID NO: 1458566 - DNA, 15 bp, Homo sapiens
aatcaaaattgtaaa

SEQ ID NO: 1458567 - DNA, 15 bp, Homo sapiens
atcaaaattgtaaac

SEQ ID NO: 1458568 - DNA, 15 bp, Homo sapiens
tcaaaattgtaaact

SEQ ID NO: 1458569 - DNA, 15 bp, Homo sapiens
caaaattgtaaactt

SEQ ID NO: 1458570 - DNA, 15 bp, Homo sapiens
aaaattgtaaacttg

SEQ ID NO: 1458571 - DNA, 15 bp, Homo sapiens
aaattgtaaacttga

SEQ ID NO: 1458572 - DNA, 15 bp, Homo sapiens
aattgtaaacttgat

SEQ ID NO: 1458573 - DNA, 15 bp, Homo sapiens
attgtaaacttgatt

SEQ ID NO: 1458574 - DNA, 15 bp, Homo sapiens
ttgtaaacttgattt

SEQ ID NO: 1458575 - DNA, 15 bp, Homo sapiens
tgtaaacttgattta

SEQ ID NO: 1458576 - DNA, 15 bp, Homo sapiens
gtaaacttgatttaa

SEQ ID NO: 1458577 - DNA, 15 bp, Homo sapiens
taaacttgatttaac

SEQ ID NO: 1458578 - DNA, 15 bp, Homo sapiens
aaacttgatttaact

SEQ ID NO: 1458579 - DNA, 15 bp, Homo sapiens
aacttgatttaactt

SEQ ID NO: 1458580 - DNA, 15 bp, Homo sapiens
acttgatttaacttc

SEQ ID NO: 1458581 - DNA, 15 bp, Homo sapiens
cttgatttaacttca

SEQ ID NO: 1458582 - DNA, 15 bp, Homo sapiens
ttgatttaacttcaa

SEQ ID NO: 1458583 - DNA, 15 bp, Homo sapiens
tgatttaacttcaat

SEQ ID NO: 1458584 - DNA, 15 bp, Homo sapiens
gatttaacttcaatc

SEQ ID NO: 1458585 - DNA, 15 bp, Homo sapiens
atttaacttcaatct

SEQ ID NO: 1458586 - DNA, 15 bp, Homo sapiens
tttaacttcaatctc

SEQ ID NO: 1458587 - DNA, 15 bp, Homo sapiens
ttaacttcaatctcc

SEQ ID NO: 1458588 - DNA, 15 bp, Homo sapiens
taacttcaatctccc

SEQ ID NO: 1458589 - DNA, 15 bp, Homo sapiens
aacttcaatctcccc

SEQ ID NO: 1458590 - DNA, 15 bp, Homo sapiens
acttcaatctcccct

SEQ ID NO: 1458591 - DNA, 15 bp, Homo sapiens
cttcaatctcccctc

SEQ ID NO: 1458592 - DNA, 15 bp, Homo sapiens
ttcaatctcccctcc

SEQ ID NO: 1458593 - DNA, 15 bp, Homo sapiens
tcaatctcccctcct

SEQ ID NO: 1458594 - DNA, 15 bp, Homo sapiens
caatctcccctcctc

SEQ ID NO: 1458595 - DNA, 15 bp, Homo sapiens
aatctcccctcctcc

SEQ ID NO: 1458596 - DNA, 15 bp, Homo sapiens
atctcccctcctcca

SEQ ID NO: 1458597 - DNA, 15 bp, Homo sapiens
tctcccctcctccaa

SEQ ID NO: 1458598 - DNA, 15 bp, Homo sapiens
ctcccctcctccaac

SEQ ID NO: 1458599 - DNA, 15 bp, Homo sapiens
tcccctcctccaact

SEQ ID NO: 1458600 - DNA, 15 bp, Homo sapiens
cccctcctccaactt

SEQ ID NO: 1458601 - DNA, 15 bp, Homo sapiens
ccctcctccaacttg

SEQ ID NO: 1458602 - DNA, 15 bp, Homo sapiens
cctcctccaacttga

SEQ ID NO: 1458603 - DNA, 15 bp, Homo sapiens
ctcctccaacttgag

SEQ ID NO: 1458604 - DNA, 15 bp, Homo sapiens
tcctccaacttgagc

SEQ ID NO: 1458605 - DNA, 15 bp, Homo sapiens
cctccaacttgagcc

SEQ ID NO: 1458606 - DNA, 15 bp, Homo sapiens
ctccaacttgagcct

SEQ ID NO: 1458607 - DNA, 15 bp, Homo sapiens
tccaacttgagcctg

SEQ ID NO: 1458608 - DNA, 15 bp, Homo sapiens
ccaacttgagcctgc

SEQ ID NO: 1458609 - DNA, 15 bp, Homo sapiens
caacttgagcctgca

SEQ ID NO: 1458610 - DNA, 15 bp, Homo sapiens
aacttgagcctgcat

SEQ ID NO: 1458611 - DNA, 15 bp, Homo sapiens
acttgagcctgcatc

SEQ ID NO: 1458612 - DNA, 15 bp, Homo sapiens
cttgagcctgcatca

SEQ ID NO: 1458613 - DNA, 15 bp, Homo sapiens
ttgagcctgcatcag

SEQ ID NO: 1458614 - DNA, 15 bp, Homo sapiens
tgagcctgcatcagg

SEQ ID NO: 1458615 - DNA, 15 bp, Homo sapiens
gagcctgcatcaggc

SEQ ID NO: 1458616 - DNA, 15 bp, Homo sapiens
agcctgcatcaggct

SEQ ID NO: 1458617 - DNA, 15 bp, Homo sapiens
gcctgcatcaggctg

SEQ ID NO: 1458618 - DNA, 15 bp, Homo sapiens
cctgcatcaggctgg

SEQ ID NO: 1458619 - DNA, 15 bp, Homo sapiens
ctgcatcaggctgga

SEQ ID NO: 1458620 - DNA, 15 bp, Homo sapiens
tgcatcaggctggaa

SEQ ID NO: 1458621 - DNA, 15 bp, Homo sapiens
gcatcaggctggaag

SEQ ID NO: 1458622 - DNA, 15 bp, Homo sapiens
catcaggctggaagt

SEQ ID NO: 1458623 - DNA, 15 bp, Homo sapiens
atcaggctggaagtc

SEQ ID NO: 1458624 - DNA, 15 bp, Homo sapiens
tcaggctggaagtct

SEQ ID NO: 1458625 - DNA, 15 bp, Homo sapiens
caggctggaagtctg

SEQ ID NO: 1458626 - DNA, 15 bp, Homo sapiens
aggctggaagtctgc

SEQ ID NO: 1458627 - DNA, 15 bp, Homo sapiens
ggctggaagtctgca

SEQ ID NO: 1458628 - DNA, 15 bp, Homo sapiens
gctggaagtctgcat

SEQ ID NO: 1458629 - DNA, 15 bp, Homo sapiens
ctggaagtctgcatt

SEQ ID NO: 1458630 - DNA, 15 bp, Homo sapiens
tggaagtctgcattg

SEQ ID NO: 1458631 - DNA, 15 bp, Homo sapiens
ggaagtctgcattgg

SEQ ID NO: 1458632 - DNA, 15 bp, Homo sapiens
gaagtctgcattgga

SEQ ID NO: 1458633 - DNA, 15 bp, Homo sapiens
aagtctgcattggaa

SEQ ID NO: 1458634 - DNA, 15 bp, Homo sapiens
agtctgcattggaaa

SEQ ID NO: 1458635 - DNA, 15 bp, Homo sapiens
gtctgcattggaaaa

SEQ ID NO: 1458636 - DNA, 15 bp, Homo sapiens
tctgcattggaaaag

SEQ ID NO: 1458637 - DNA, 15 bp, Homo sapiens
ctgcattggaaaagg

SEQ ID NO: 1458638 - DNA, 15 bp, Homo sapiens
tgcattggaaaaggg

SEQ ID NO: 1458639 - DNA, 15 bp, Homo sapiens
gcattggaaaaggga

SEQ ID NO: 1458640 - DNA, 15 bp, Homo sapiens
cattggaaaagggag

SEQ ID NO: 1458641 - DNA, 15 bp, Homo sapiens
attggaaaagggaga

SEQ ID NO: 1458642 - DNA, 15 bp, Homo sapiens
ttggaaaagggagac

SEQ ID NO: 1458643 - DNA, 15 bp, Homo sapiens
tggaaaagggagaca

SEQ ID NO: 1458644 - DNA, 15 bp, Homo sapiens
ggaaaagggagacat

SEQ ID NO: 1458645 - DNA, 15 bp, Homo sapiens
gaaaagggagacatg

SEQ ID NO: 1458646 - DNA, 15 bp, Homo sapiens
aaaagggagacatgg

SEQ ID NO: 1458647 - DNA, 15 bp, Homo sapiens
aaagggagacatggt

SEQ ID NO: 1458648 - DNA, 15 bp, Homo sapiens
aagggagacatggtt

SEQ ID NO: 1458649 - DNA, 15 bp, Homo sapiens
agggagacatggttg

SEQ ID NO: 1458650 - DNA, 15 bp, Homo sapiens
gggagacatggttga

SEQ ID NO: 1458651 - DNA, 15 bp, Homo sapiens
ggagacatggttgag

SEQ ID NO: 1458652 - DNA, 15 bp, Homo sapiens
gagacatggttgagt

SEQ ID NO: 1458653 - DNA, 15 bp, Homo sapiens
agacatggttgagtc

SEQ ID NO: 1458654 - DNA, 15 bp, Homo sapiens
gacatggttgagtcc

SEQ ID NO: 1458655 - DNA, 15 bp, Homo sapiens
acatggttgagtcct

SEQ ID NO: 1458656 - DNA, 15 bp, Homo sapiens
catggttgagtcctc

SEQ ID NO: 1458657 - DNA, 15 bp, Homo sapiens
atggttgagtcctct

SEQ ID NO: 1458658 - DNA, 15 bp, Homo sapiens
tggttgagtcctctg

SEQ ID NO: 1458659 - DNA, 15 bp, Homo sapiens
ggttgagtcctctgt

SEQ ID NO: 1458660 - DNA, 15 bp, Homo sapiens
gttgagtcctctgtt

SEQ ID NO: 1458661 - DNA, 15 bp, Homo sapiens
ttgagtcctctgttt

SEQ ID NO: 1458662 - DNA, 15 bp, Homo sapiens
tgagtcctctgtttc

SEQ ID NO: 1458663 - DNA, 15 bp, Homo sapiens
gagtcctctgtttct

SEQ ID NO: 1458664 - DNA, 15 bp, Homo sapiens
agtcctctgtttctg

SEQ ID NO: 1458665 - DNA, 15 bp, Homo sapiens
gtcctctgtttctgt

SEQ ID NO: 1458666 - DNA, 15 bp, Homo sapiens
tcctctgtttctgta

SEQ ID NO: 1458667 - DNA, 15 bp, Homo sapiens
cctctgtttctgtac

SEQ ID NO: 1458668 - DNA, 15 bp, Homo sapiens
ctctgtttctgtacc

SEQ ID NO: 1458669 - DNA, 15 bp, Homo sapiens
tctgtttctgtacct

SEQ ID NO: 1458670 - DNA, 15 bp, Homo sapiens
ctgtttctgtacctt

SEQ ID NO: 1458671 - DNA, 15 bp, Homo sapiens
tgtttctgtaccttg

SEQ ID NO: 1458672 - DNA, 15 bp, Homo sapiens
gtttctgtaccttgt

SEQ ID NO: 1458673 - DNA, 15 bp, Homo sapiens
tttctgtaccttgtg

SEQ ID NO: 1458674 - DNA, 15 bp, Homo sapiens
ttctgtaccttgtga

SEQ ID NO: 1458675 - DNA, 15 bp, Homo sapiens
tctgtaccttgtgat

SEQ ID NO: 1458676 - DNA, 15 bp, Homo sapiens
ctgtaccttgtgatg

SEQ ID NO: 1458677 - DNA, 15 bp, Homo sapiens
tgtaccttgtgatga

SEQ ID NO: 1458678 - DNA, 15 bp, Homo sapiens
gtaccttgtgatgat

SEQ ID NO: 1458679 - DNA, 15 bp, Homo sapiens
taccttgtgatgatc

SEQ ID NO: 1458680 - DNA, 15 bp, Homo sapiens
accttgtgatgatcg

SEQ ID NO: 1458681 - DNA, 15 bp, Homo sapiens
ccttgtgatgatcgt

SEQ ID NO: 1458682 - DNA, 15 bp, Homo sapiens
cttgtgatgatcgtg

SEQ ID NO: 1458683 - DNA, 15 bp, Homo sapiens
ttgtgatgatcgtgc

SEQ ID NO: 1458684 - DNA, 15 bp, Homo sapiens
tgtgatgatcgtgct

SEQ ID NO: 1458685 - DNA, 15 bp, Homo sapiens
gtgatgatcgtgctt

SEQ ID NO: 1458686 - DNA, 15 bp, Homo sapiens
tgatgatcgtgcttc

SEQ ID NO: 1458687 - DNA, 15 bp, Homo sapiens
gatgatcgtgcttcc

SEQ ID NO: 1458688 - DNA, 15 bp, Homo sapiens
atgatcgtgcttccc

SEQ ID NO: 1458689 - DNA, 15 bp, Homo sapiens
tgatcgtgcttcccc

SEQ ID NO: 1458690 - DNA, 15 bp, Homo sapiens
gatcgtgcttcccca

SEQ ID NO: 1458691 - DNA, 15 bp, Homo sapiens
atcgtgcttccccac

SEQ ID NO: 1458692 - DNA, 15 bp, Homo sapiens
tcgtgcttccccaca

SEQ ID NO: 1458693 - DNA, 15 bp, Homo sapiens
cgtgcttccccacaa

SEQ ID NO: 1458694 - DNA, 15 bp, Homo sapiens
gtgcttccccacaac

SEQ ID NO: 1458695 - DNA, 15 bp, Homo sapiens
tgcttccccacaacc

SEQ ID NO: 1458696 - DNA, 15 bp, Homo sapiens
gcttccccacaaccc

SEQ ID NO: 1458697 - DNA, 15 bp, Homo sapiens
cttccccacaacccc

SEQ ID NO: 1458698 - DNA, 15 bp, Homo sapiens
ttccccacaacccct

SEQ ID NO: 1458699 - DNA, 15 bp, Homo sapiens
tccccacaacccctt

SEQ ID NO: 1458700 - DNA, 15 bp, Homo sapiens
ccccacaaccccttt

SEQ ID NO: 1458701 - DNA, 15 bp, Homo sapiens
cccacaaccccttta

SEQ ID NO: 1458702 - DNA, 15 bp, Homo sapiens
ccacaacccctttat

SEQ ID NO: 1458703 - DNA, 15 bp, Homo sapiens
cacaacccctttata

SEQ ID NO: 1458704 - DNA, 15 bp, Homo sapiens
acaacccctttatag

SEQ ID NO: 1458705 - DNA, 15 bp, Homo sapiens
caacccctttatagc

SEQ ID NO: 1458706 - DNA, 15 bp, Homo sapiens
aacccctttatagct

SEQ ID NO: 1458707 - DNA, 15 bp, Homo sapiens
acccctttatagctg

SEQ ID NO: 1458708 - DNA, 15 bp, Homo sapiens
cccctttatagctgc

SEQ ID NO: 1458709 - DNA, 15 bp, Homo sapiens
ccctttatagctgct

SEQ ID NO: 1458710 - DNA, 15 bp, Homo sapiens
cctttatagctgctg

SEQ ID NO: 1458711 - DNA, 15 bp, Homo sapiens
ctttatagctgctgt

SEQ ID NO: 1458712 - DNA, 15 bp, Homo sapiens
tttatagctgctgtt

SEQ ID NO: 1458713 - DNA, 15 bp, Homo sapiens
ttatagctgctgttt

SEQ ID NO: 1458714 - DNA, 15 bp, Homo sapiens
tatagctgctgtttt

SEQ ID NO: 1458715 - DNA, 15 bp, Homo sapiens
tagctgctgttttga

SEQ ID NO: 1458716 - DNA, 15 bp, Homo sapiens
agctgctgttttgaa

SEQ ID NO: 1458717 - DNA, 15 bp, Homo sapiens
gctgctgttttgaac

SEQ ID NO: 1458718 - DNA, 15 bp, Homo sapiens
ctgctgttttgaact

SEQ ID NO: 1458719 - DNA, 15 bp, Homo sapiens
tgctgttttgaactc

SEQ ID NO: 1458720 - DNA, 15 bp, Homo sapiens
gctgttttgaactcc

SEQ ID NO: 1458721 - DNA, 15 bp, Homo sapiens
ctgttttgaactcca

SEQ ID NO: 1458722 - DNA, 15 bp, Homo sapiens
tgttttgaactccaa

SEQ ID NO: 1458723 - DNA, 15 bp, Homo sapiens
gttttgaactccaac

SEQ ID NO: 1458724 - DNA, 15 bp, Homo sapiens
ttttgaactccaaca

SEQ ID NO: 1458725 - DNA, 15 bp, Homo sapiens
tttgaactccaacat

SEQ ID NO: 1458726 - DNA, 15 bp, Homo sapiens
ttgaactccaacatg

SEQ ID NO: 1458727 - DNA, 15 bp, Homo sapiens
tgaactccaacatgg

SEQ ID NO: 1458728 - DNA, 15 bp, Homo sapiens
gaactccaacatgga

SEQ ID NO: 1458729 - DNA, 15 bp, Homo sapiens
aactccaacatggat

SEQ ID NO: 1458730 - DNA, 15 bp, Homo sapiens
actccaacatggata

SEQ ID NO: 1458731 - DNA, 15 bp, Homo sapiens
ctccaacatggatag

SEQ ID NO: 1458732 - DNA, 15 bp, Homo sapiens
tccaacatggatagg

SEQ ID NO: 1458733 - DNA, 15 bp, Homo sapiens
ccaacatggataggt

SEQ ID NO: 1458734 - DNA, 15 bp, Homo sapiens
caacatggataggtt

SEQ ID NO: 1458735 - DNA, 15 bp, Homo sapiens
aacatggataggtta

SEQ ID NO: 1458736 - DNA, 15 bp, Homo sapiens
acatggataggttaa

SEQ ID NO: 1458737 - DNA, 15 bp, Homo sapiens
catggataggttaaa

SEQ ID NO: 1458738 - DNA, 15 bp, Homo sapiens
atggataggttaaag

SEQ ID NO: 1458739 - DNA, 15 bp, Homo sapiens
tggataggttaaagg

SEQ ID NO: 1458740 - DNA, 15 bp, Homo sapiens
ggataggttaaaggt

SEQ ID NO: 1458741 - DNA, 15 bp, Homo sapiens
gataggttaaaggta

SEQ ID NO: 1458742 - DNA, 15 bp, Homo sapiens
ataggttaaaggtaa

SEQ ID NO: 1458743 - DNA, 15 bp, Homo sapiens
taggttaaaggtaag

SEQ ID NO: 1458744 - DNA, 15 bp, Homo sapiens
aggttaaaggtaagg

SEQ ID NO: 1458745 - DNA, 15 bp, Homo sapiens
ggttaaaggtaaggg

SEQ ID NO: 1458746 - DNA, 15 bp, Homo sapiens
gttaaaggtaagggg

SEQ ID NO: 1458747 - DNA, 15 bp, Homo sapiens
ttaaaggtaagggga

SEQ ID NO: 1458748 - DNA, 15 bp, Homo sapiens
taaaggtaaggggat

SEQ ID NO: 1458749 - DNA, 15 bp, Homo sapiens
aaaggtaaggggata

SEQ ID NO: 1458750 - DNA, 15 bp, Homo sapiens
aaggtaaggggataa

SEQ ID NO: 1458751 - DNA, 15 bp, Homo sapiens
aggtaaggggataag

SEQ ID NO: 1458752 - DNA, 15 bp, Homo sapiens
ggtaaggggataaga

SEQ ID NO: 1458753 - DNA, 15 bp, Homo sapiens
gtaaggggataagat

SEQ ID NO: 1458754 - DNA, 15 bp, Homo sapiens
taaggggataagata

SEQ ID NO: 1458755 - DNA, 15 bp, Homo sapiens
aaggggataagatag

SEQ ID NO: 1458756 - DNA, 15 bp, Homo sapiens
aggggataagatagt

SEQ ID NO: 1458757 - DNA, 15 bp, Homo sapiens
ggggataagatagtt

SEQ ID NO: 1458758 - DNA, 15 bp, Homo sapiens
gggataagatagttc

SEQ ID NO: 1458759 - DNA, 15 bp, Homo sapiens
ggataagatagttct

SEQ ID NO: 1458760 - DNA, 15 bp, Homo sapiens
gataagatagttctt

SEQ ID NO: 1458761 - DNA, 15 bp, Homo sapiens
ataagatagttctta

SEQ ID NO: 1458762 - DNA, 15 bp, Homo sapiens
taagatagttcttac

SEQ ID NO: 1458763 - DNA, 15 bp, Homo sapiens
aagatagttcttacc

SEQ ID NO: 1458764 - DNA, 15 bp, Homo sapiens
agatagttcttacct

SEQ ID NO: 1458765 - DNA, 15 bp, Homo sapiens
gatagttcttaccta

SEQ ID NO: 1458766 - DNA, 15 bp, Homo sapiens
atagttcttacctat

SEQ ID NO: 1458767 - DNA, 15 bp, Homo sapiens
tagttcttacctatt

SEQ ID NO: 1458768 - DNA, 15 bp, Homo sapiens
agttcttacctattt

SEQ ID NO: 1458769 - DNA, 15 bp, Homo sapiens
gttcttacctattta

SEQ ID NO: 1458770 - DNA, 15 bp, Homo sapiens
ttcttacctatttac

SEQ ID NO: 1458771 - DNA, 15 bp, Homo sapiens
tcttacctatttaca

SEQ ID NO: 1458772 - DNA, 15 bp, Homo sapiens
cttacctatttacag

SEQ ID NO: 1458773 - DNA, 15 bp, Homo sapiens
ttacctatttacagc

SEQ ID NO: 1458774 - DNA, 15 bp, Homo sapiens
tacctatttacagct

SEQ ID NO: 1458775 - DNA, 15 bp, Homo sapiens
acctatttacagctg

SEQ ID NO: 1458776 - DNA, 15 bp, Homo sapiens
cctatttacagctgg

SEQ ID NO: 1458777 - DNA, 15 bp, Homo sapiens
ctatttacagctggc

SEQ ID NO: 1458778 - DNA, 15 bp, Homo sapiens
tatttacagctggca

SEQ ID NO: 1458779 - DNA, 15 bp, Homo sapiens
atttacagctggcac

SEQ ID NO: 1458780 - DNA, 15 bp, Homo sapiens
tttacagctggcacc

SEQ ID NO: 1458781 - DNA, 15 bp, Homo sapiens
ttacagctggcacca

SEQ ID NO: 1458782 - DNA, 15 bp, Homo sapiens
tacagctggcaccat

SEQ ID NO: 1458783 - DNA, 15 bp, Homo sapiens
acagctggcaccatt

SEQ ID NO: 1458784 - DNA, 15 bp, Homo sapiens
cagctggcaccattg

SEQ ID NO: 1458785 - DNA, 15 bp, Homo sapiens
agctggcaccattgt

SEQ ID NO: 1458786 - DNA, 15 bp, Homo sapiens
gctggcaccattgtt

SEQ ID NO: 1458787 - DNA, 15 bp, Homo sapiens
ctggcaccattgttg

SEQ ID NO: 1458788 - DNA, 15 bp, Homo sapiens
tggcaccattgttgt

SEQ ID NO: 1458789 - DNA, 15 bp, Homo sapiens
ggcaccattgttgta

SEQ ID NO: 1458790 - DNA, 15 bp, Homo sapiens
gcaccattgttgtaa

SEQ ID NO: 1458791 - DNA, 15 bp, Homo sapiens
caccattgttgtaaa

SEQ ID NO: 1458792 - DNA, 15 bp, Homo sapiens
accattgttgtaaac

SEQ ID NO: 1458793 - DNA, 15 bp, Homo sapiens
ccattgttgtaaact

SEQ ID NO: 1458794 - DNA, 15 bp, Homo sapiens
cattgttgtaaacta

SEQ ID NO: 1458795 - DNA, 15 bp, Homo sapiens
attgttgtaaactag

SEQ ID NO: 1458796 - DNA, 15 bp, Homo sapiens
ttgttgtaaactagc

SEQ ID NO: 1458797 - DNA, 15 bp, Homo sapiens
tgttgtaaactagct

SEQ ID NO: 1458798 - DNA, 15 bp, Homo sapiens
gttgtaaactagctt

SEQ ID NO: 1458799 - DNA, 15 bp, Homo sapiens
ttgtaaactagctta

SEQ ID NO: 1458800 - DNA, 15 bp, Homo sapiens
tgtaaactagcttaa

SEQ ID NO: 1458801 - DNA, 15 bp, Homo sapiens
gtaaactagcttaac

SEQ ID NO: 1458802 - DNA, 15 bp, Homo sapiens
taaactagcttaaca

SEQ ID NO: 1458803 - DNA, 15 bp, Homo sapiens
aaactagcttaacac

SEQ ID NO: 1458804 - DNA, 15 bp, Homo sapiens
aactagcttaacact

SEQ ID NO: 1458805 - DNA, 15 bp, Homo sapiens
actagcttaacactg

SEQ ID NO: 1458806 - DNA, 15 bp, Homo sapiens
ctagcttaacactgt

SEQ ID NO: 1458807 - DNA, 15 bp, Homo sapiens
tagcttaacactgtt

SEQ ID NO: 1458808 - DNA, 15 bp, Homo sapiens
agcttaacactgttt

SEQ ID NO: 1458809 - DNA, 15 bp, Homo sapiens
gcttaacactgtttg

SEQ ID NO: 1458810 - DNA, 15 bp, Homo sapiens
cttaacactgtttgt

SEQ ID NO: 1458811 - DNA, 15 bp, Homo sapiens
ttaacactgtttgtg

SEQ ID NO: 1458812 - DNA, 15 bp, Homo sapiens
taacactgtttgtgc

SEQ ID NO: 1458813 - DNA, 15 bp, Homo sapiens
aacactgtttgtgcc

SEQ ID NO: 1458814 - DNA, 15 bp, Homo sapiens
acactgtttgtgcct

SEQ ID NO: 1458815 - DNA, 15 bp, Homo sapiens
cactgtttgtgcctg

SEQ ID NO: 1458816 - DNA, 15 bp, Homo sapiens
actgtttgtgcctgg

SEQ ID NO: 1458817 - DNA, 15 bp, Homo sapiens
ctgtttgtgcctggc

SEQ ID NO: 1458818 - DNA, 15 bp, Homo sapiens
tgtttgtgcctggca

SEQ ID NO: 1458819 - DNA, 15 bp, Homo sapiens
gtttgtgcctggcaa

SEQ ID NO: 1458820 - DNA, 15 bp, Homo sapiens
tttgtgcctggcaat

SEQ ID NO: 1458821 - DNA, 15 bp, Homo sapiens
ttgtgcctggcaata

SEQ ID NO: 1458822 - DNA, 15 bp, Homo sapiens
tgtgcctggcaatac

SEQ ID NO: 1458823 - DNA, 15 bp, Homo sapiens
gtgcctggcaatact

SEQ ID NO: 1458824 - DNA, 15 bp, Homo sapiens
tgcctggcaatactt

SEQ ID NO: 1458825 - DNA, 15 bp, Homo sapiens
gcctggcaatacttg

SEQ ID NO: 1458826 - DNA, 15 bp, Homo sapiens
cctggcaatacttgt

SEQ ID NO: 1458827 - DNA, 15 bp, Homo sapiens
ctggcaatacttgtt

SEQ ID NO: 1458828 - DNA, 15 bp, Homo sapiens
tggcaatacttgttg

SEQ ID NO: 1458829 - DNA, 15 bp, Homo sapiens
ggcaatacttgttga

SEQ ID NO: 1458830 - DNA, 15 bp, Homo sapiens
gcaatacttgttgac

SEQ ID NO: 1458831 - DNA, 15 bp, Homo sapiens
caatacttgttgact

SEQ ID NO: 1458832 - DNA, 15 bp, Homo sapiens
aatacttgttgactc

SEQ ID NO: 1458833 - DNA, 15 bp, Homo sapiens
atacttgttgactct

SEQ ID NO: 1458834 - DNA, 15 bp, Homo sapiens
tacttgttgactctt

SEQ ID NO: 1458835 - DNA, 15 bp, Homo sapiens
acttgttgactcttt

SEQ ID NO: 1458836 - DNA, 15 bp, Homo sapiens
cttgttgactctttc

SEQ ID NO: 1458837 - DNA, 15 bp, Homo sapiens
ttgttgactctttct

SEQ ID NO: 1458838 - DNA, 15 bp, Homo sapiens
tgttgactctttctc

SEQ ID NO: 1458839 - DNA, 15 bp, Homo sapiens
gttgactctttctcc

SEQ ID NO: 1458840 - DNA, 15 bp, Homo sapiens
ttgactctttctcct

SEQ ID NO: 1458841 - DNA, 15 bp, Homo sapiens
tgactctttctcctg

SEQ ID NO: 1458842 - DNA, 15 bp, Homo sapiens
gactctttctcctgc

SEQ ID NO: 1458843 - DNA, 15 bp, Homo sapiens
actctttctcctgca

SEQ ID NO: 1458844 - DNA, 15 bp, Homo sapiens
ctctttctcctgcag

SEQ ID NO: 1458845 - DNA, 15 bp, Homo sapiens
tctttctcctgcagg

SEQ ID NO: 1458846 - DNA, 15 bp, Homo sapiens
ctttctcctgcaggg

SEQ ID NO: 1458847 - DNA, 15 bp, Homo sapiens
tttctcctgcagggc

SEQ ID NO: 1458848 - DNA, 15 bp, Homo sapiens
ttctcctgcagggca

SEQ ID NO: 1458849 - DNA, 15 bp, Homo sapiens
tctcctgcagggcac

SEQ ID NO: 1458850 - DNA, 15 bp, Homo sapiens
ctcctgcagggcact

SEQ ID NO: 1458851 - DNA, 15 bp, Homo sapiens
tcctgcagggcactt

SEQ ID NO: 1458852 - DNA, 15 bp, Homo sapiens
cctgcagggcacttt

SEQ ID NO: 1458853 - DNA, 15 bp, Homo sapiens
ctgcagggcactttc

SEQ ID NO: 1458854 - DNA, 15 bp, Homo sapiens
tgcagggcactttca

SEQ ID NO: 1458855 - DNA, 15 bp, Homo sapiens
gcagggcactttcag

SEQ ID NO: 1458856 - DNA, 15 bp, Homo sapiens
cagggcactttcagg

SEQ ID NO: 1458857 - DNA, 15 bp, Homo sapiens
agggcactttcaggg

SEQ ID NO: 1458858 - DNA, 15 bp, Homo sapiens
gggcactttcaggga

SEQ ID NO: 1458859 - DNA, 15 bp, Homo sapiens
ggcactttcagggaa

SEQ ID NO: 1458860 - DNA, 15 bp, Homo sapiens
gcactttcagggaac

SEQ ID NO: 1458861 - DNA, 15 bp, Homo sapiens
cactttcagggaact

SEQ ID NO: 1458862 - DNA, 15 bp, Homo sapiens
actttcagggaactc

SEQ ID NO: 1458863 - DNA, 15 bp, Homo sapiens
ctttcagggaactct

SEQ ID NO: 1458864 - DNA, 15 bp, Homo sapiens
tttcagggaactctt

SEQ ID NO: 1458865 - DNA, 15 bp, Homo sapiens
ttcagggaactcttt

SEQ ID NO: 1458866 - DNA, 15 bp, Homo sapiens
tcagggaactcttta

SEQ ID NO: 1458867 - DNA, 15 bp, Homo sapiens
cagggaactctttag

SEQ ID NO: 1458868 - DNA, 15 bp, Homo sapiens
agggaactctttaga

SEQ ID NO: 1458869 - DNA, 15 bp, Homo sapiens
gggaactctttagag

SEQ ID NO: 1458870 - DNA, 15 bp, Homo sapiens
ggaactctttagaga

SEQ ID NO: 1458871 - DNA, 15 bp, Homo sapiens
gaactctttagagac

SEQ ID NO: 1458872 - DNA, 15 bp, Homo sapiens
aactctttagagact

SEQ ID NO: 1458873 - DNA, 15 bp, Homo sapiens
actctttagagactc

SEQ ID NO: 1458874 - DNA, 15 bp, Homo sapiens
ctctttagagactcc

SEQ ID NO: 1458875 - DNA, 15 bp, Homo sapiens
tctttagagactccc

SEQ ID NO: 1458876 - DNA, 15 bp, Homo sapiens
ctttagagactccct

SEQ ID NO: 1458877 - DNA, 15 bp, Homo sapiens
tttagagactccctt

SEQ ID NO: 1458878 - DNA, 15 bp, Homo sapiens
ttagagactccctta

SEQ ID NO: 1458879 - DNA, 15 bp, Homo sapiens
tagagactcccttac

SEQ ID NO: 1458880 - DNA, 15 bp, Homo sapiens
agagactcccttacg

SEQ ID NO: 1458881 - DNA, 15 bp, Homo sapiens
gagactcccttacgt

SEQ ID NO: 1458882 - DNA, 15 bp, Homo sapiens
agactcccttacgtg

SEQ ID NO: 1458883 - DNA, 15 bp, Homo sapiens
gactcccttacgtga

SEQ ID NO: 1458884 - DNA, 15 bp, Homo sapiens
actcccttacgtgac

SEQ ID NO: 1458885 - DNA, 15 bp, Homo sapiens
ctcccttacgtgact

SEQ ID NO: 1458886 - DNA, 15 bp, Homo sapiens
tcccttacgtgactg

SEQ ID NO: 1458887 - DNA, 15 bp, Homo sapiens
cccttacgtgactgt

SEQ ID NO: 1458888 - DNA, 15 bp, Homo sapiens
ccttacgtgactgtc

SEQ ID NO: 1458889 - DNA, 15 bp, Homo sapiens
cttacgtgactgtca

SEQ ID NO: 1458890 - DNA, 15 bp, Homo sapiens
ttacgtgactgtcat

SEQ ID NO: 1458891 - DNA, 15 bp, Homo sapiens
tacgtgactgtcatg

SEQ ID NO: 1458892 - DNA, 15 bp, Homo sapiens
acgtgactgtcatga

SEQ ID NO: 1458893 - DNA, 15 bp, Homo sapiens
cgtgactgtcatgaa

SEQ ID NO: 1458894 - DNA, 15 bp, Homo sapiens
gtgactgtcatgaaa

SEQ ID NO: 1458895 - DNA, 15 bp, Homo sapiens
tgactgtcatgaaat

SEQ ID NO: 1458896 - DNA, 15 bp, Homo sapiens
gactgtcatgaaatc

SEQ ID NO: 1458897 - DNA, 15 bp, Homo sapiens
actgtcatgaaatcc

SEQ ID NO: 1458898 - DNA, 15 bp, Homo sapiens
ctgtcatgaaatccc

SEQ ID NO: 1458899 - DNA, 15 bp, Homo sapiens
tgtcatgaaatcccc

SEQ ID NO: 1458900 - DNA, 15 bp, Homo sapiens
gtcatgaaatcccct

SEQ ID NO: 1458901 - DNA, 15 bp, Homo sapiens
tcatgaaatcccctt

SEQ ID NO: 1458902 - DNA, 15 bp, Homo sapiens
catgaaatccccttg

SEQ ID NO: 1458903 - DNA, 15 bp, Homo sapiens
atgaaatccccttga

SEQ ID NO: 1458904 - DNA, 15 bp, Homo sapiens
tgaaatccccttgac

SEQ ID NO: 1458905 - DNA, 15 bp, Homo sapiens
gaaatccccttgaca

SEQ ID NO: 1458906 - DNA, 15 bp, Homo sapiens
aaatccccttgacat

SEQ ID NO: 1458907 - DNA, 15 bp, Homo sapiens
aatccccttgacatg

SEQ ID NO: 1458908 - DNA, 15 bp, Homo sapiens
atccccttgacatga

SEQ ID NO: 1458909 - DNA, 15 bp, Homo sapiens
tccccttgacatgat

SEQ ID NO: 1458910 - DNA, 15 bp, Homo sapiens
ccccttgacatgatt

SEQ ID NO: 1458911 - DNA, 15 bp, Homo sapiens
cccttgacatgattt

SEQ ID NO: 1458912 - DNA, 15 bp, Homo sapiens
ccttgacatgatttc

SEQ ID NO: 1458913 - DNA, 15 bp, Homo sapiens
cttgacatgatttct

SEQ ID NO: 1458914 - DNA, 15 bp, Homo sapiens
ttgacatgatttctt

SEQ ID NO: 1458915 - DNA, 15 bp, Homo sapiens
tgacatgatttcttc

SEQ ID NO: 1458916 - DNA, 15 bp, Homo sapiens
gacatgatttcttcc

SEQ ID NO: 1458917 - DNA, 15 bp, Homo sapiens
acatgatttcttcca

SEQ ID NO: 1458918 - DNA, 15 bp, Homo sapiens
catgatttcttccac

SEQ ID NO: 1458919 - DNA, 15 bp, Homo sapiens
atgatttcttccacc

SEQ ID NO: 1458920 - DNA, 15 bp, Homo sapiens
tgatttcttccacct

SEQ ID NO: 1458921 - DNA, 15 bp, Homo sapiens
gatttcttccacctt

SEQ ID NO: 1458922 - DNA, 15 bp, Homo sapiens
atttcttccaccttt

SEQ ID NO: 1458923 - DNA, 15 bp, Homo sapiens
tttcttccaccttta

SEQ ID NO: 1458924 - DNA, 15 bp, Homo sapiens
ttcttccacctttac

SEQ ID NO: 1458925 - DNA, 15 bp, Homo sapiens
tcttccacctttact

SEQ ID NO: 1458926 - DNA, 15 bp, Homo sapiens
cttccacctttactc

SEQ ID NO: 1458927 - DNA, 15 bp, Homo sapiens
ttccacctttactct

SEQ ID NO: 1458928 - DNA, 15 bp, Homo sapiens
tccacctttactctg

SEQ ID NO: 1458929 - DNA, 15 bp, Homo sapiens
ccacctttactctgg

SEQ ID NO: 1458930 - DNA, 15 bp, Homo sapiens
cacctttactctggg

SEQ ID NO: 1458931 - DNA, 15 bp, Homo sapiens
acctttactctgggt

SEQ ID NO: 1458932 - DNA, 15 bp, Homo sapiens
cctttactctgggtg

SEQ ID NO: 1458933 - DNA, 15 bp, Homo sapiens
ctttactctgggtgg

SEQ ID NO: 1458934 - DNA, 15 bp, Homo sapiens
tttactctgggtggt

SEQ ID NO: 1458935 - DNA, 15 bp, Homo sapiens
ttactctgggtggtc

SEQ ID NO: 1458936 - DNA, 15 bp, Homo sapiens
tactctgggtggtca

SEQ ID NO: 1458937 - DNA, 15 bp, Homo sapiens
actctgggtggtcac

SEQ ID NO: 1458938 - DNA, 15 bp, Homo sapiens
ctctgggtggtcact

SEQ ID NO: 1458939 - DNA, 15 bp, Homo sapiens
tctgggtggtcactt

SEQ ID NO: 1458940 - DNA, 15 bp, Homo sapiens
ctgggtggtcacttg

SEQ ID NO: 1458941 - DNA, 15 bp, Homo sapiens
tgggtggtcacttgt

SEQ ID NO: 1458942 - DNA, 15 bp, Homo sapiens
gggtggtcacttgtg

SEQ ID NO: 1458943 - DNA, 15 bp, Homo sapiens
ggtggtcacttgtga

SEQ ID NO: 1458944 - DNA, 15 bp, Homo sapiens
gtggtcacttgtgac

SEQ ID NO: 1458945 - DNA, 15 bp, Homo sapiens
tggtcacttgtgact

SEQ ID NO: 1458946 - DNA, 15 bp, Homo sapiens
ggtcacttgtgactc

SEQ ID NO: 1458947 - DNA, 15 bp, Homo sapiens
gtcacttgtgactca

SEQ ID NO: 1458948 - DNA, 15 bp, Homo sapiens
tcacttgtgactcat

SEQ ID NO: 1458949 - DNA, 15 bp, Homo sapiens
cacttgtgactcatt

SEQ ID NO: 1458950 - DNA, 15 bp, Homo sapiens
acttgtgactcattt

SEQ ID NO: 1458951 - DNA, 15 bp, Homo sapiens
cttgtgactcatttc

SEQ ID NO: 1458952 - DNA, 15 bp, Homo sapiens
ttgtgactcatttct

SEQ ID NO: 1458953 - DNA, 15 bp, Homo sapiens
tgtgactcatttctc

SEQ ID NO: 1458954 - DNA, 15 bp, Homo sapiens
gtgactcatttctca

SEQ ID NO: 1458955 - DNA, 15 bp, Homo sapiens
tgactcatttctcag

SEQ ID NO: 1458956 - DNA, 15 bp, Homo sapiens
gactcatttctcagc

SEQ ID NO: 1458957 - DNA, 15 bp, Homo sapiens
actcatttctcagcc

SEQ ID NO: 1458958 - DNA, 15 bp, Homo sapiens
ctcatttctcagccc

SEQ ID NO: 1458959 - DNA, 15 bp, Homo sapiens
tcatttctcagccct

SEQ ID NO: 1458960 - DNA, 15 bp, Homo sapiens
catttctcagccctc

SEQ ID NO: 1458961 - DNA, 15 bp, Homo sapiens
atttctcagccctca

SEQ ID NO: 1458962 - DNA, 15 bp, Homo sapiens
tttctcagccctcag

SEQ ID NO: 1458963 - DNA, 15 bp, Homo sapiens
ttctcagccctcagt

SEQ ID NO: 1458964 - DNA, 15 bp, Homo sapiens
tctcagccctcagtg

SEQ ID NO: 1458965 - DNA, 15 bp, Homo sapiens
ctcagccctcagtgt

SEQ ID NO: 1458966 - DNA, 15 bp, Homo sapiens
tcagccctcagtgtt

SEQ ID NO: 1458967 - DNA, 15 bp, Homo sapiens
cagccctcagtgttc

SEQ ID NO: 1458968 - DNA, 15 bp, Homo sapiens
agccctcagtgttca

SEQ ID NO: 1458969 - DNA, 15 bp, Homo sapiens
gccctcagtgttcac

SEQ ID NO: 1458970 - DNA, 15 bp, Homo sapiens
ccctcagtgttcacc

SEQ ID NO: 1458971 - DNA, 15 bp, Homo sapiens
cctcagtgttcacct

SEQ ID NO: 1458972 - DNA, 15 bp, Homo sapiens
ctcagtgttcacctg

SEQ ID NO: 1458973 - DNA, 15 bp, Homo sapiens
tcagtgttcacctgc

SEQ ID NO: 1458974 - DNA, 15 bp, Homo sapiens
cagtgttcacctgca

SEQ ID NO: 1458975 - DNA, 15 bp, Homo sapiens
agtgttcacctgcag

SEQ ID NO: 1458976 - DNA, 15 bp, Homo sapiens
gtgttcacctgcagc

SEQ ID NO: 1458977 - DNA, 15 bp, Homo sapiens
tgttcacctgcagct

SEQ ID NO: 1458978 - DNA, 15 bp, Homo sapiens
gttcacctgcagctt

SEQ ID NO: 1458979 - DNA, 15 bp, Homo sapiens
ttcacctgcagcttc

SEQ ID NO: 1458980 - DNA, 15 bp, Homo sapiens
tcacctgcagcttct

SEQ ID NO: 1458981 - DNA, 15 bp, Homo sapiens
cacctgcagcttctt

SEQ ID NO: 1458982 - DNA, 15 bp, Homo sapiens
acctgcagcttcttg

SEQ ID NO: 1458983 - DNA, 15 bp, Homo sapiens
cctgcagcttcttgt

SEQ ID NO: 1458984 - DNA, 15 bp, Homo sapiens
ctgcagcttcttgtt

SEQ ID NO: 1458985 - DNA, 15 bp, Homo sapiens
tgcagcttcttgttg

SEQ ID NO: 1458986 - DNA, 15 bp, Homo sapiens
gcagcttcttgttgc

SEQ ID NO: 1458987 - DNA, 15 bp, Homo sapiens
cagcttcttgttgct

SEQ ID NO: 1458988 - DNA, 15 bp, Homo sapiens
agcttcttgttgctg

SEQ ID NO: 1458989 - DNA, 15 bp, Homo sapiens
gcttcttgttgctgg

SEQ ID NO: 1458990 - DNA, 15 bp, Homo sapiens
cttcttgttgctggg

SEQ ID NO: 1458991 - DNA, 15 bp, Homo sapiens
ttcttgttgctgggg

SEQ ID NO: 1458992 - DNA, 15 bp, Homo sapiens
tcttgttgctggggt

SEQ ID NO: 1458993 - DNA, 15 bp, Homo sapiens
cttgttgctggggta

SEQ ID NO: 1458994 - DNA, 15 bp, Homo sapiens
ttgttgctggggtaa

SEQ ID NO: 1458995 - DNA, 15 bp, Homo sapiens
tgttgctggggtaac

SEQ ID NO: 1458996 - DNA, 15 bp, Homo sapiens
gttgctggggtaact

SEQ ID NO: 1458997 - DNA, 15 bp, Homo sapiens
ttgctggggtaactt

SEQ ID NO: 1458998 - DNA, 15 bp, Homo sapiens
tgctggggtaacttt

SEQ ID NO: 1458999 - DNA, 15 bp, Homo sapiens
gctggggtaacttta

SEQ ID NO: 1459000 - DNA, 15 bp, Homo sapiens
ctggggtaactttac

SEQ ID NO: 1459001 - DNA, 15 bp, Homo sapiens
tggggtaactttacc

SEQ ID NO: 1459002 - DNA, 15 bp, Homo sapiens
ggggtaactttaccc

SEQ ID NO: 1459003 - DNA, 15 bp, Homo sapiens
gggtaactttaccct

SEQ ID NO: 1459004 - DNA, 15 bp, Homo sapiens
ggtaactttaccctt

SEQ ID NO: 1459005 - DNA, 15 bp, Homo sapiens
gtaactttacccttg

SEQ ID NO: 1459006 - DNA, 15 bp, Homo sapiens
taactttacccttgt

SEQ ID NO: 1459007 - DNA, 15 bp, Homo sapiens
aactttacccttgta

SEQ ID NO: 1459008 - DNA, 15 bp, Homo sapiens
actttacccttgtag

SEQ ID NO: 1459009 - DNA, 15 bp, Homo sapiens
ctttacccttgtagg

SEQ ID NO: 1459010 - DNA, 15 bp, Homo sapiens
tttacccttgtaggc

SEQ ID NO: 1459011 - DNA, 15 bp, Homo sapiens
ttacccttgtaggca

SEQ ID NO: 1459012 - DNA, 15 bp, Homo sapiens
tacccttgtaggcag

SEQ ID NO: 1459013 - DNA, 15 bp, Homo sapiens
acccttgtaggcagc

SEQ ID NO: 1459014 - DNA, 15 bp, Homo sapiens
cccttgtaggcagct

SEQ ID NO: 1459015 - DNA, 15 bp, Homo sapiens
ccttgtaggcagctc

SEQ ID NO: 1459016 - DNA, 15 bp, Homo sapiens
cttgtaggcagctct

SEQ ID NO: 1459017 - DNA, 15 bp, Homo sapiens
ttgtaggcagctcta

SEQ ID NO: 1459018 - DNA, 15 bp, Homo sapiens
tgtaggcagctctag

SEQ ID NO: 1459019 - DNA, 15 bp, Homo sapiens
gtaggcagctctagt

SEQ ID NO: 1459020 - DNA, 15 bp, Homo sapiens
taggcagctctagtg

SEQ ID NO: 1459021 - DNA, 15 bp, Homo sapiens
aggcagctctagtgg

SEQ ID NO: 1459022 - DNA, 15 bp, Homo sapiens
ggcagctctagtgga

SEQ ID NO: 1459023 - DNA, 15 bp, Homo sapiens
gcagctctagtggac

SEQ ID NO: 1459024 - DNA, 15 bp, Homo sapiens
cagctctagtggact

SEQ ID NO: 1459025 - DNA, 15 bp, Homo sapiens
agctctagtggactg

SEQ ID NO: 1459026 - DNA, 15 bp, Homo sapiens
gctctagtggactgg

SEQ ID NO: 1459027 - DNA, 15 bp, Homo sapiens
ctctagtggactgga

SEQ ID NO: 1459028 - DNA, 15 bp, Homo sapiens
tctagtggactggat

SEQ ID NO: 1459029 - DNA, 15 bp, Homo sapiens
ctagtggactggatc

SEQ ID NO: 1459030 - DNA, 15 bp, Homo sapiens
tagtggactggatcc

SEQ ID NO: 1459031 - DNA, 15 bp, Homo sapiens
agtggactggatcca

SEQ ID NO: 1459032 - DNA, 15 bp, Homo sapiens
gtggactggatccag

SEQ ID NO: 1459033 - DNA, 15 bp, Homo sapiens
tggactggatccaga

SEQ ID NO: 1459034 - DNA, 15 bp, Homo sapiens
ggactggatccagag

SEQ ID NO: 1459035 - DNA, 15 bp, Homo sapiens
gactggatccagagg

SEQ ID NO: 1459036 - DNA, 15 bp, Homo sapiens
actggatccagaggg

SEQ ID NO: 1459037 - DNA, 15 bp, Homo sapiens
ctggatccagaggga

SEQ ID NO: 1459038 - DNA, 15 bp, Homo sapiens
tggatccagagggaa

SEQ ID NO: 1459039 - DNA, 15 bp, Homo sapiens
ggatccagagggaac

SEQ ID NO: 1459040 - DNA, 15 bp, Homo sapiens
gatccagagggaact

SEQ ID NO: 1459041 - DNA, 15 bp, Homo sapiens
atccagagggaactc

SEQ ID NO: 1459042 - DNA, 15 bp, Homo sapiens
tccagagggaactca

SEQ ID NO: 1459043 - DNA, 15 bp, Homo sapiens
ccagagggaactcac

SEQ ID NO: 1459044 - DNA, 15 bp, Homo sapiens
cagagggaactcacc

SEQ ID NO: 1459045 - DNA, 15 bp, Homo sapiens
agagggaactcaccc

SEQ ID NO: 1459046 - DNA, 15 bp, Homo sapiens
gagggaactcaccct

SEQ ID NO: 1459047 - DNA, 15 bp, Homo sapiens
agggaactcaccctg

SEQ ID NO: 1459048 - DNA, 15 bp, Homo sapiens
gggaactcaccctga

SEQ ID NO: 1459049 - DNA, 15 bp, Homo sapiens
ggaactcaccctgac

SEQ ID NO: 1459050 - DNA, 15 bp, Homo sapiens
gaactcaccctgact

SEQ ID NO: 1459051 - DNA, 15 bp, Homo sapiens
aactcaccctgactt

SEQ ID NO: 1459052 - DNA, 15 bp, Homo sapiens
actcaccctgactta

SEQ ID NO: 1459053 - DNA, 15 bp, Homo sapiens
ctcaccctgacttat

SEQ ID NO: 1459054 - DNA, 15 bp, Homo sapiens
tcaccctgacttatc

SEQ ID NO: 1459055 - DNA, 15 bp, Homo sapiens
caccctgacttatct

SEQ ID NO: 1459056 - DNA, 15 bp, Homo sapiens
accctgacttatctg

SEQ ID NO: 1459057 - DNA, 15 bp, Homo sapiens
ccctgacttatctgt

SEQ ID NO: 1459058 - DNA, 15 bp, Homo sapiens
cctgacttatctgtt

SEQ ID NO: 1459059 - DNA, 15 bp, Homo sapiens
ctgacttatctgttt

SEQ ID NO: 1459060 - DNA, 15 bp, Homo sapiens
tgacttatctgtttc

SEQ ID NO: 1459061 - DNA, 15 bp, Homo sapiens
gacttatctgtttca

SEQ ID NO: 1459062 - DNA, 15 bp, Homo sapiens
acttatctgtttcac

SEQ ID NO: 1459063 - DNA, 15 bp, Homo sapiens
cttatctgtttcaca

SEQ ID NO: 1459064 - DNA, 15 bp, Homo sapiens
ttatctgtttcacag

SEQ ID NO: 1459065 - DNA, 15 bp, Homo sapiens
tatctgtttcacaga

SEQ ID NO: 1459066 - DNA, 15 bp, Homo sapiens
atctgtttcacagag

SEQ ID NO: 1459067 - DNA, 15 bp, Homo sapiens
tctgtttcacagagt

SEQ ID NO: 1459068 - DNA, 15 bp, Homo sapiens
ctgtttcacagagtc

SEQ ID NO: 1459069 - DNA, 15 bp, Homo sapiens
tgtttcacagagtcc

SEQ ID NO: 1459070 - DNA, 15 bp, Homo sapiens
gtttcacagagtcca

SEQ ID NO: 1459071 - DNA, 15 bp, Homo sapiens
tttcacagagtccac

SEQ ID NO: 1459072 - DNA, 15 bp, Homo sapiens
ttcacagagtccaca

SEQ ID NO: 1459073 - DNA, 15 bp, Homo sapiens
tcacagagtccacat

SEQ ID NO: 1459074 - DNA, 15 bp, Homo sapiens
cacagagtccacatc

SEQ ID NO: 1459075 - DNA, 15 bp, Homo sapiens
acagagtccacatct

SEQ ID NO: 1459076 - DNA, 15 bp, Homo sapiens
cagagtccacatctg

SEQ ID NO: 1459077 - DNA, 15 bp, Homo sapiens
agagtccacatctgg

SEQ ID NO: 1459078 - DNA, 15 bp, Homo sapiens
gagtccacatctggc

SEQ ID NO: 1459079 - DNA, 15 bp, Homo sapiens
agtccacatctggcc

SEQ ID NO: 1459080 - DNA, 15 bp, Homo sapiens
gtccacatctggcca

SEQ ID NO: 1459081 - DNA, 15 bp, Homo sapiens
tccacatctggccaa

SEQ ID NO: 1459082 - DNA, 15 bp, Homo sapiens
ccacatctggccaat

SEQ ID NO: 1459083 - DNA, 15 bp, Homo sapiens
cacatctggccaatg

SEQ ID NO: 1459084 - DNA, 15 bp, Homo sapiens
acatctggccaatgg

SEQ ID NO: 1459085 - DNA, 15 bp, Homo sapiens
catctggccaatggg

SEQ ID NO: 1459086 - DNA, 15 bp, Homo sapiens
atctggccaatggga

SEQ ID NO: 1459087 - DNA, 15 bp, Homo sapiens
tctggccaatgggaa

SEQ ID NO: 1459088 - DNA, 15 bp, Homo sapiens
ctggccaatgggaaa

SEQ ID NO: 1459089 - DNA, 15 bp, Homo sapiens
tggccaatgggaaac

SEQ ID NO: 1459090 - DNA, 15 bp, Homo sapiens
ggccaatgggaaaca

SEQ ID NO: 1459091 - DNA, 15 bp, Homo sapiens
gccaatgggaaacac

SEQ ID NO: 1459092 - DNA, 15 bp, Homo sapiens
ccaatgggaaacaca

SEQ ID NO: 1459093 - DNA, 15 bp, Homo sapiens
caatgggaaacacac

SEQ ID NO: 1459094 - DNA, 15 bp, Homo sapiens
aatgggaaacacacc

SEQ ID NO: 1459095 - DNA, 15 bp, Homo sapiens
atgggaaacacacct

SEQ ID NO: 1459096 - DNA, 15 bp, Homo sapiens
tgggaaacacacctt

SEQ ID NO: 1459097 - DNA, 15 bp, Homo sapiens
gggaaacacaccttt

SEQ ID NO: 1459098 - DNA, 15 bp, Homo sapiens
ggaaacacacctttt

SEQ ID NO: 1459099 - DNA, 15 bp, Homo sapiens
gaaacacaccttttg

SEQ ID NO: 1459100 - DNA, 15 bp, Homo sapiens
aaacacaccttttgc

SEQ ID NO: 1459101 - DNA, 15 bp, Homo sapiens
aacacaccttttgct

SEQ ID NO: 1459102 - DNA, 15 bp, Homo sapiens
acacaccttttgctc

SEQ ID NO: 1459103 - DNA, 15 bp, Homo sapiens
cacaccttttgctca

SEQ ID NO: 1459104 - DNA, 15 bp, Homo sapiens
acaccttttgctcag

SEQ ID NO: 1459105 - DNA, 15 bp, Homo sapiens
caccttttgctcaga

SEQ ID NO: 1459106 - DNA, 15 bp, Homo sapiens
accttttgctcagaa

SEQ ID NO: 1459107 - DNA, 15 bp, Homo sapiens
ccttttgctcagaaa

SEQ ID NO: 1459108 - DNA, 15 bp, Homo sapiens
cttttgctcagaaag

SEQ ID NO: 1459109 - DNA, 15 bp, Homo sapiens
ttttgctcagaaaga

SEQ ID NO: 1459110 - DNA, 15 bp, Homo sapiens
tttgctcagaaagac

SEQ ID NO: 1459111 - DNA, 15 bp, Homo sapiens
ttgctcagaaagacc

SEQ ID NO: 1459112 - DNA, 15 bp, Homo sapiens
tgctcagaaagaccc

SEQ ID NO: 1459113 - DNA, 15 bp, Homo sapiens
gctcagaaagaccct

SEQ ID NO: 1459114 - DNA, 15 bp, Homo sapiens
ctcagaaagaccctg

SEQ ID NO: 1459115 - DNA, 15 bp, Homo sapiens
tcagaaagaccctgg

SEQ ID NO: 1459116 - DNA, 15 bp, Homo sapiens
cagaaagaccctggg

SEQ ID NO: 1459117 - DNA, 15 bp, Homo sapiens
agaaagaccctggga

SEQ ID NO: 1459118 - DNA, 15 bp, Homo sapiens
gaaagaccctgggaa

SEQ ID NO: 1459119 - DNA, 15 bp, Homo sapiens
aaagaccctgggaat

SEQ ID NO: 1459120 - DNA, 15 bp, Homo sapiens
aagaccctgggaatg

SEQ ID NO: 1459121 - DNA, 15 bp, Homo sapiens
agaccctgggaatgt

SEQ ID NO: 1459122 - DNA, 15 bp, Homo sapiens
gaccctgggaatgta

SEQ ID NO: 1459123 - DNA, 15 bp, Homo sapiens
accctgggaatgtag

SEQ ID NO: 1459124 - DNA, 15 bp, Homo sapiens
ccctgggaatgtagg

SEQ ID NO: 1459125 - DNA, 15 bp, Homo sapiens
cctgggaatgtaggt

SEQ ID NO: 1459126 - DNA, 15 bp, Homo sapiens
ctgggaatgtaggtc

SEQ ID NO: 1459127 - DNA, 15 bp, Homo sapiens
tgggaatgtaggtca

SEQ ID NO: 1459128 - DNA, 15 bp, Homo sapiens
gggaatgtaggtcaa

SEQ ID NO: 1459129 - DNA, 15 bp, Homo sapiens
ggaatgtaggtcaat

SEQ ID NO: 1459130 - DNA, 15 bp, Homo sapiens
gaatgtaggtcaatc

SEQ ID NO: 1459131 - DNA, 15 bp, Homo sapiens
aatgtaggtcaatca

SEQ ID NO: 1459132 - DNA, 15 bp, Homo sapiens
atgtaggtcaatcat

SEQ ID NO: 1459133 - DNA, 15 bp, Homo sapiens
tgtaggtcaatcata

SEQ ID NO: 1459134 - DNA, 15 bp, Homo sapiens
gtaggtcaatcataa

SEQ ID NO: 1459135 - DNA, 15 bp, Homo sapiens
taggtcaatcataat

SEQ ID NO: 1459136 - DNA, 15 bp, Homo sapiens
aggtcaatcataatg

SEQ ID NO: 1459137 - DNA, 15 bp, Homo sapiens
ggtcaatcataatgc

SEQ ID NO: 1459138 - DNA, 15 bp, Homo sapiens
gtcaatcataatgca

SEQ ID NO: 1459139 - DNA, 15 bp, Homo sapiens
tcaatcataatgcag

SEQ ID NO: 1459140 - DNA, 15 bp, Homo sapiens
caatcataatgcagt

SEQ ID NO: 1459141 - DNA, 15 bp, Homo sapiens
aatcataatgcagta

SEQ ID NO: 1459142 - DNA, 15 bp, Homo sapiens
atcataatgcagtag

SEQ ID NO: 1459143 - DNA, 15 bp, Homo sapiens
tcataatgcagtagc

SEQ ID NO: 1459144 - DNA, 15 bp, Homo sapiens
cataatgcagtagca

SEQ ID NO: 1459145 - DNA, 15 bp, Homo sapiens
ataatgcagtagcat

SEQ ID NO: 1459146 - DNA, 15 bp, Homo sapiens
taatgcagtagcatt

SEQ ID NO: 1459147 - DNA, 15 bp, Homo sapiens
aatgcagtagcattc

SEQ ID NO: 1459148 - DNA, 15 bp, Homo sapiens
atgcagtagcattct

SEQ ID NO: 1459149 - DNA, 15 bp, Homo sapiens
tgcagtagcattctc

SEQ ID NO: 1459150 - DNA, 15 bp, Homo sapiens
gcagtagcattctcc

SEQ ID NO: 1459151 - DNA, 15 bp, Homo sapiens
cagtagcattctcct

SEQ ID NO: 1459152 - DNA, 15 bp, Homo sapiens
agtagcattctcctg

SEQ ID NO: 1459153 - DNA, 15 bp, Homo sapiens
gtagcattctcctgt

SEQ ID NO: 1459154 - DNA, 15 bp, Homo sapiens
tagcattctcctgtc

SEQ ID NO: 1459155 - DNA, 15 bp, Homo sapiens
agcattctcctgtcc

SEQ ID NO: 1459156 - DNA, 15 bp, Homo sapiens
gcattctcctgtccc

SEQ ID NO: 1459157 - DNA, 15 bp, Homo sapiens
cattctcctgtccca

SEQ ID NO: 1459158 - DNA, 15 bp, Homo sapiens
attctcctgtcccaa

SEQ ID NO: 1459159 - DNA, 15 bp, Homo sapiens
ttctcctgtcccaac

SEQ ID NO: 1459160 - DNA, 15 bp, Homo sapiens
tctcctgtcccaacc

SEQ ID NO: 1459161 - DNA, 15 bp, Homo sapiens
ctcctgtcccaacca

SEQ ID NO: 1459162 - DNA, 15 bp, Homo sapiens
tcctgtcccaaccat

SEQ ID NO: 1459163 - DNA, 15 bp, Homo sapiens
cctgtcccaaccatc

SEQ ID NO: 1459164 - DNA, 15 bp, Homo sapiens
ctgtcccaaccatca

SEQ ID NO: 1459165 - DNA, 15 bp, Homo sapiens
tgtcccaaccatcaa

SEQ ID NO: 1459166 - DNA, 15 bp, Homo sapiens
gtcccaaccatcaaa

SEQ ID NO: 1459167 - DNA, 15 bp, Homo sapiens
tcccaaccatcaaag

SEQ ID NO: 1459168 - DNA, 15 bp, Homo sapiens
cccaaccatcaaaga

SEQ ID NO: 1459169 - DNA, 15 bp, Homo sapiens
ccaaccatcaaagaa

SEQ ID NO: 1459170 - DNA, 15 bp, Homo sapiens
caaccatcaaagaat

SEQ ID NO: 1459171 - DNA, 15 bp, Homo sapiens
aaccatcaaagaatt

SEQ ID NO: 1459172 - DNA, 15 bp, Homo sapiens
accatcaaagaattc

SEQ ID NO: 1459173 - DNA, 15 bp, Homo sapiens
ccatcaaagaattca

SEQ ID NO: 1459174 - DNA, 15 bp, Homo sapiens
catcaaagaattcag

SEQ ID NO: 1459175 - DNA, 15 bp, Homo sapiens
atcaaagaattcagt

SEQ ID NO: 1459176 - DNA, 15 bp, Homo sapiens
tcaaagaattcagtc

SEQ ID NO: 1459177 - DNA, 15 bp, Homo sapiens
caaagaattcagtca

SEQ ID NO: 1459178 - DNA, 15 bp, Homo sapiens
aaagaattcagtcac

SEQ ID NO: 1459179 - DNA, 15 bp, Homo sapiens
aagaattcagtcacc

SEQ ID NO: 1459180 - DNA, 15 bp, Homo sapiens
agaattcagtcaccc

SEQ ID NO: 1459181 - DNA, 15 bp, Homo sapiens
gaattcagtcaccct

SEQ ID NO: 1459182 - DNA, 15 bp, Homo sapiens
aattcagtcaccctg

SEQ ID NO: 1459183 - DNA, 15 bp, Homo sapiens
attcagtcaccctgt

SEQ ID NO: 1459184 - DNA, 15 bp, Homo sapiens
ttcagtcaccctgtt

SEQ ID NO: 1459185 - DNA, 15 bp, Homo sapiens
tcagtcaccctgttt

SEQ ID NO: 1459186 - DNA, 15 bp, Homo sapiens
cagtcaccctgtttc

SEQ ID NO: 1459187 - DNA, 15 bp, Homo sapiens
agtcaccctgtttct

SEQ ID NO: 1459188 - DNA, 15 bp, Homo sapiens
gtcaccctgtttctc

SEQ ID NO: 1459189 - DNA, 15 bp, Homo sapiens
tcaccctgtttctca

SEQ ID NO: 1459190 - DNA, 15 bp, Homo sapiens
caccctgtttctcat

SEQ ID NO: 1459191 - DNA, 15 bp, Homo sapiens
accctgtttctcatc

SEQ ID NO: 1459192 - DNA, 15 bp, Homo sapiens
ccctgtttctcatct

SEQ ID NO: 1459193 - DNA, 15 bp, Homo sapiens
cctgtttctcatctc

SEQ ID NO: 1459194 - DNA, 15 bp, Homo sapiens
ctgtttctcatctcc

SEQ ID NO: 1459195 - DNA, 15 bp, Homo sapiens
gtttctcatctcctg

SEQ ID NO: 1459196 - DNA, 15 bp, Homo sapiens
tttctcatctcctgg

SEQ ID NO: 1459197 - DNA, 15 bp, Homo sapiens
ttctcatctcctggg

SEQ ID NO: 1459198 - DNA, 15 bp, Homo sapiens
tctcatctcctgggg

SEQ ID NO: 1459199 - DNA, 15 bp, Homo sapiens
ctcatctcctggggg

SEQ ID NO: 1459200 - DNA, 15 bp, Homo sapiens
tcatctcctgggggg

SEQ ID NO: 1459201 - DNA, 15 bp, Homo sapiens
catctcctgggggga

SEQ ID NO: 1459202 - DNA, 15 bp, Homo sapiens
atctcctggggggag

SEQ ID NO: 1459203 - DNA, 15 bp, Homo sapiens
tctcctggggggagg

SEQ ID NO: 1459204 - DNA, 15 bp, Homo sapiens
ctcctggggggaggg

SEQ ID NO: 1459205 - DNA, 15 bp, Homo sapiens
tcctggggggagggg

SEQ ID NO: 1459206 - DNA, 15 bp, Homo sapiens
cctggggggagggga

SEQ ID NO: 1459207 - DNA, 15 bp, Homo sapiens
ctggggggaggggag

SEQ ID NO: 1459208 - DNA, 15 bp, Homo sapiens
tggggggaggggagt

SEQ ID NO: 1459209 - DNA, 15 bp, Homo sapiens
ggggggaggggagtg

SEQ ID NO: 1459210 - DNA, 15 bp, Homo sapiens
gggggaggggagtgg

SEQ ID NO: 1459211 - DNA, 15 bp, Homo sapiens
ggggaggggagtggt

SEQ ID NO: 1459212 - DNA, 15 bp, Homo sapiens
gggaggggagtggtc

SEQ ID NO: 1459213 - DNA, 15 bp, Homo sapiens
ggaggggagtggtca

SEQ ID NO: 1459214 - DNA, 15 bp, Homo sapiens
gaggggagtggtcag

SEQ ID NO: 1459215 - DNA, 15 bp, Homo sapiens
aggggagtggtcaga

SEQ ID NO: 1459216 - DNA, 15 bp, Homo sapiens
ggggagtggtcagaa

SEQ ID NO: 1459217 - DNA, 15 bp, Homo sapiens
gggagtggtcagaac

SEQ ID NO: 1459218 - DNA, 15 bp, Homo sapiens
ggagtggtcagaact

SEQ ID NO: 1459219 - DNA, 15 bp, Homo sapiens
gagtggtcagaactc

SEQ ID NO: 1459220 - DNA, 15 bp, Homo sapiens
agtggtcagaactca

SEQ ID NO: 1459221 - DNA, 15 bp, Homo sapiens
gtggtcagaactcaa

SEQ ID NO: 1459222 - DNA, 15 bp, Homo sapiens
tggtcagaactcaat

SEQ ID NO: 1459223 - DNA, 15 bp, Homo sapiens
ggtcagaactcaatc

SEQ ID NO: 1459224 - DNA, 15 bp, Homo sapiens
gtcagaactcaatct

SEQ ID NO: 1459225 - DNA, 15 bp, Homo sapiens
tcagaactcaatctc

SEQ ID NO: 1459226 - DNA, 15 bp, Homo sapiens
cagaactcaatctcc

SEQ ID NO: 1459227 - DNA, 15 bp, Homo sapiens
agaactcaatctcca

SEQ ID NO: 1459228 - DNA, 15 bp, Homo sapiens
gaactcaatctccac

SEQ ID NO: 1459229 - DNA, 15 bp, Homo sapiens
aactcaatctccaca

SEQ ID NO: 1459230 - DNA, 15 bp, Homo sapiens
actcaatctccacaa

SEQ ID NO: 1459231 - DNA, 15 bp, Homo sapiens
ctcaatctccacaac

SEQ ID NO: 1459232 - DNA, 15 bp, Homo sapiens
tcaatctccacaacc

SEQ ID NO: 1459233 - DNA, 15 bp, Homo sapiens
caatctccacaaccc

SEQ ID NO: 1459234 - DNA, 15 bp, Homo sapiens
aatctccacaacccc

SEQ ID NO: 1459235 - DNA, 15 bp, Homo sapiens
atctccacaaccccc

SEQ ID NO: 1459236 - DNA, 15 bp, Homo sapiens
tctccacaaccccca

SEQ ID NO: 1459237 - DNA, 15 bp, Homo sapiens
ctccacaacccccaa

SEQ ID NO: 1459238 - DNA, 15 bp, Homo sapiens
tccacaacccccaac

SEQ ID NO: 1459239 - DNA, 15 bp, Homo sapiens
ccacaacccccaact

SEQ ID NO: 1459240 - DNA, 15 bp, Homo sapiens
cacaacccccaactg

SEQ ID NO: 1459241 - DNA, 15 bp, Homo sapiens
acaacccccaactgt

SEQ ID NO: 1459242 - DNA, 15 bp, Homo sapiens
caacccccaactgta

SEQ ID NO: 1459243 - DNA, 15 bp, Homo sapiens
aacccccaactgtaa

SEQ ID NO: 1459244 - DNA, 15 bp, Homo sapiens
acccccaactgtaag

SEQ ID NO: 1459245 - DNA, 15 bp, Homo sapiens
cccccaactgtaagg

SEQ ID NO: 1459246 - DNA, 15 bp, Homo sapiens
ccccaactgtaaggg

SEQ ID NO: 1459247 - DNA, 15 bp, Homo sapiens
cccaactgtaagggt

SEQ ID NO: 1459248 - DNA, 15 bp, Homo sapiens
ccaactgtaagggtc

SEQ ID NO: 1459249 - DNA, 15 bp, Homo sapiens
caactgtaagggtca

SEQ ID NO: 1459250 - DNA, 15 bp, Homo sapiens
aactgtaagggtcac

SEQ ID NO: 1459251 - DNA, 15 bp, Homo sapiens
actgtaagggtcacg

SEQ ID NO: 1459252 - DNA, 15 bp, Homo sapiens
ctgtaagggtcacgt

SEQ ID NO: 1459253 - DNA, 15 bp, Homo sapiens
tgtaagggtcacgta

SEQ ID NO: 1459254 - DNA, 15 bp, Homo sapiens
gtaagggtcacgtag

SEQ ID NO: 1459255 - DNA, 15 bp, Homo sapiens
taagggtcacgtagc

SEQ ID NO: 1459256 - DNA, 15 bp, Homo sapiens
aagggtcacgtagca

SEQ ID NO: 1459257 - DNA, 15 bp, Homo sapiens
agggtcacgtagcaa

SEQ ID NO: 1459258 - DNA, 15 bp, Homo sapiens
gggtcacgtagcaag

SEQ ID NO: 1459259 - DNA, 15 bp, Homo sapiens
ggtcacgtagcaagc

SEQ ID NO: 1459260 - DNA, 15 bp, Homo sapiens
gtcacgtagcaagca

SEQ ID NO: 1459261 - DNA, 15 bp, Homo sapiens
tcacgtagcaagcac

SEQ ID NO: 1459262 - DNA, 15 bp, Homo sapiens
cacgtagcaagcact

SEQ ID NO: 1459263 - DNA, 15 bp, Homo sapiens
acgtagcaagcactt

SEQ ID NO: 1459264 - DNA, 15 bp, Homo sapiens
cgtagcaagcacttt

SEQ ID NO: 1459265 - DNA, 15 bp, Homo sapiens
gtagcaagcactttg

SEQ ID NO: 1459266 - DNA, 15 bp, Homo sapiens
tagcaagcactttgc

SEQ ID NO: 1459267 - DNA, 15 bp, Homo sapiens
agcaagcactttgca

SEQ ID NO: 1459268 - DNA, 15 bp, Homo sapiens
gcaagcactttgcat

SEQ ID NO: 1459269 - DNA, 15 bp, Homo sapiens
caagcactttgcatt

SEQ ID NO: 1459270 - DNA, 15 bp, Homo sapiens
aagcactttgcattt

SEQ ID NO: 1459271 - DNA, 15 bp, Homo sapiens
agcactttgcatttg

SEQ ID NO: 1459272 - DNA, 15 bp, Homo sapiens
gcactttgcatttga

SEQ ID NO: 1459273 - DNA, 15 bp, Homo sapiens
cactttgcatttgag

SEQ ID NO: 1459274 - DNA, 15 bp, Homo sapiens
actttgcatttgagg

SEQ ID NO: 1459275 - DNA, 15 bp, Homo sapiens
ctttgcatttgaggg

SEQ ID NO: 1459276 - DNA, 15 bp, Homo sapiens
tttgcatttgagggg

SEQ ID NO: 1459277 - DNA, 15 bp, Homo sapiens
ttgcatttgaggggt

SEQ ID NO: 1459278 - DNA, 15 bp, Homo sapiens
tgcatttgaggggtc

SEQ ID NO: 1459279 - DNA, 15 bp, Homo sapiens
gcatttgaggggtcc

SEQ ID NO: 1459280 - DNA, 15 bp, Homo sapiens
catttgaggggtcca

SEQ ID NO: 1459281 - DNA, 15 bp, Homo sapiens
atttgaggggtccaa

SEQ ID NO: 1459282 - DNA, 15 bp, Homo sapiens
tttgaggggtccaaa

SEQ ID NO: 1459283 - DNA, 15 bp, Homo sapiens
ttgaggggtccaaaa

SEQ ID NO: 1459284 - DNA, 15 bp, Homo sapiens
tgaggggtccaaaag

SEQ ID NO: 1459285 - DNA, 15 bp, Homo sapiens
gaggggtccaaaagt

SEQ ID NO: 1459286 - DNA, 15 bp, Homo sapiens
aggggtccaaaagta

SEQ ID NO: 1459287 - DNA, 15 bp, Homo sapiens
ggggtccaaaagtag

SEQ ID NO: 1459288 - DNA, 15 bp, Homo sapiens
gggtccaaaagtagt

SEQ ID NO: 1459289 - DNA, 15 bp, Homo sapiens
ggtccaaaagtagtg

SEQ ID NO: 1459290 - DNA, 15 bp, Homo sapiens
gtccaaaagtagtgg

SEQ ID NO: 1459291 - DNA, 15 bp, Homo sapiens
tccaaaagtagtgga

SEQ ID NO: 1459292 - DNA, 15 bp, Homo sapiens
ccaaaagtagtggaa

SEQ ID NO: 1459293 - DNA, 15 bp, Homo sapiens
caaaagtagtggaac

SEQ ID NO: 1459294 - DNA, 15 bp, Homo sapiens
aaaagtagtggaact

SEQ ID NO: 1459295 - DNA, 15 bp, Homo sapiens
aaagtagtggaacta

SEQ ID NO: 1459296 - DNA, 15 bp, Homo sapiens
aagtagtggaactac

SEQ ID NO: 1459297 - DNA, 15 bp, Homo sapiens
agtagtggaactacc

SEQ ID NO: 1459298 - DNA, 15 bp, Homo sapiens
gtagtggaactacca

SEQ ID NO: 1459299 - DNA, 15 bp, Homo sapiens
tagtggaactaccaa

SEQ ID NO: 1459300 - DNA, 15 bp, Homo sapiens
agtggaactaccaaa

SEQ ID NO: 1459301 - DNA, 15 bp, Homo sapiens
gtggaactaccaaat

SEQ ID NO: 1459302 - DNA, 15 bp, Homo sapiens
tggaactaccaaatt

SEQ ID NO: 1459303 - DNA, 15 bp, Homo sapiens
ggaactaccaaattt

SEQ ID NO: 1459304 - DNA, 15 bp, Homo sapiens
gaactaccaaatttg

SEQ ID NO: 1459305 - DNA, 15 bp, Homo sapiens
aactaccaaatttgg

SEQ ID NO: 1459306 - DNA, 15 bp, Homo sapiens
actaccaaatttggt

SEQ ID NO: 1459307 - DNA, 15 bp, Homo sapiens
ctaccaaatttggta

SEQ ID NO: 1459308 - DNA, 15 bp, Homo sapiens
taccaaatttggtag

SEQ ID NO: 1459309 - DNA, 15 bp, Homo sapiens
accaaatttggtagg

SEQ ID NO: 1459310 - DNA, 15 bp, Homo sapiens
ccaaatttggtaggt

SEQ ID NO: 1459311 - DNA, 15 bp, Homo sapiens
caaatttggtaggtc

SEQ ID NO: 1459312 - DNA, 15 bp, Homo sapiens
aaatttggtaggtct

SEQ ID NO: 1459313 - DNA, 15 bp, Homo sapiens
aatttggtaggtcta

SEQ ID NO: 1459314 - DNA, 15 bp, Homo sapiens
atttggtaggtctac

SEQ ID NO: 1459315 - DNA, 15 bp, Homo sapiens
tttggtaggtctact

SEQ ID NO: 1459316 - DNA, 15 bp, Homo sapiens
ttggtaggtctactc

SEQ ID NO: 1459317 - DNA, 15 bp, Homo sapiens
tggtaggtctactct

SEQ ID NO: 1459318 - DNA, 15 bp, Homo sapiens
ggtaggtctactctg

SEQ ID NO: 1459319 - DNA, 15 bp, Homo sapiens
gtaggtctactctga

SEQ ID NO: 1459320 - DNA, 15 bp, Homo sapiens
taggtctactctgat

SEQ ID NO: 1459321 - DNA, 15 bp, Homo sapiens
aggtctactctgata

SEQ ID NO: 1459322 - DNA, 15 bp, Homo sapiens
ggtctactctgatat

SEQ ID NO: 1459323 - DNA, 15 bp, Homo sapiens
gtctactctgatatt

SEQ ID NO: 1459324 - DNA, 15 bp, Homo sapiens
tctactctgatattt

SEQ ID NO: 1459325 - DNA, 15 bp, Homo sapiens
ctactctgatatttc

SEQ ID NO: 1459326 - DNA, 15 bp, Homo sapiens
tactctgatatttcg

SEQ ID NO: 1459327 - DNA, 15 bp, Homo sapiens
actctgatatttcgc

SEQ ID NO: 1459328 - DNA, 15 bp, Homo sapiens
ctctgatatttcgca

SEQ ID NO: 1459329 - DNA, 15 bp, Homo sapiens
tctgatatttcgcat

SEQ ID NO: 1459330 - DNA, 15 bp, Homo sapiens
ctgatatttcgcata

SEQ ID NO: 1459331 - DNA, 15 bp, Homo sapiens
tgatatttcgcataa

SEQ ID NO: 1459332 - DNA, 15 bp, Homo sapiens
gatatttcgcataaa

SEQ ID NO: 1459333 - DNA, 15 bp, Homo sapiens
atatttcgcataaac

SEQ ID NO: 1459334 - DNA, 15 bp, Homo sapiens
tatttcgcataaacc

SEQ ID NO: 1459335 - DNA, 15 bp, Homo sapiens
atttcgcataaacca

SEQ ID NO: 1459336 - DNA, 15 bp, Homo sapiens
tttcgcataaaccaa

SEQ ID NO: 1459337 - DNA, 15 bp, Homo sapiens
ttcgcataaaccaat

SEQ ID NO: 1459338 - DNA, 15 bp, Homo sapiens
tcgcataaaccaatg

SEQ ID NO: 1459339 - DNA, 15 bp, Homo sapiens
cgcataaaccaatgt

SEQ ID NO: 1459340 - DNA, 15 bp, Homo sapiens
gcataaaccaatgta

SEQ ID NO: 1459341 - DNA, 15 bp, Homo sapiens
cataaaccaatgtat

SEQ ID NO: 1459342 - DNA, 15 bp, Homo sapiens
ataaaccaatgtatc

SEQ ID NO: 1459343 - DNA, 15 bp, Homo sapiens
taaaccaatgtatct

SEQ ID NO: 1459344 - DNA, 15 bp, Homo sapiens
aaaccaatgtatctc

SEQ ID NO: 1459345 - DNA, 15 bp, Homo sapiens
aaccaatgtatctca

SEQ ID NO: 1459346 - DNA, 15 bp, Homo sapiens
accaatgtatctcat

SEQ ID NO: 1459347 - DNA, 15 bp, Homo sapiens
ccaatgtatctcatg

SEQ ID NO: 1459348 - DNA, 15 bp, Homo sapiens
caatgtatctcatgc

SEQ ID NO: 1459349 - DNA, 15 bp, Homo sapiens
aatgtatctcatgct

SEQ ID NO: 1459350 - DNA, 15 bp, Homo sapiens
atgtatctcatgctc

SEQ ID NO: 1459351 - DNA, 15 bp, Homo sapiens
tgtatctcatgctca

SEQ ID NO: 1459352 - DNA, 15 bp, Homo sapiens
gtatctcatgctcat

SEQ ID NO: 1459353 - DNA, 15 bp, Homo sapiens
tatctcatgctcatt

SEQ ID NO: 1459354 - DNA, 15 bp, Homo sapiens
atctcatgctcattt

SEQ ID NO: 1459355 - DNA, 15 bp, Homo sapiens
tctcatgctcatttt

SEQ ID NO: 1459356 - DNA, 15 bp, Homo sapiens
ctcatgctcattttt

SEQ ID NO: 1459357 - DNA, 15 bp, Homo sapiens
tcatgctcatttttt

SEQ ID NO: 1459358 - DNA, 15 bp, Homo sapiens
catgctcatttttta

SEQ ID NO: 1459359 - DNA, 15 bp, Homo sapiens
atgctcattttttag

SEQ ID NO: 1459360 - DNA, 15 bp, Homo sapiens
tgctcattttttagt

SEQ ID NO: 1459361 - DNA, 15 bp, Homo sapiens
gctcattttttagtg

SEQ ID NO: 1459362 - DNA, 15 bp, Homo sapiens
ctcattttttagtga

SEQ ID NO: 1459363 - DNA, 15 bp, Homo sapiens
tcattttttagtgaa

SEQ ID NO: 1459364 - DNA, 15 bp, Homo sapiens
cattttttagtgaaa

SEQ ID NO: 1459365 - DNA, 15 bp, Homo sapiens
attttttagtgaaaa

SEQ ID NO: 1459366 - DNA, 15 bp, Homo sapiens
ttttttagtgaaaag

SEQ ID NO: 1459367 - DNA, 15 bp, Homo sapiens
tttttagtgaaaaga

SEQ ID NO: 1459368 - DNA, 15 bp, Homo sapiens
ttttagtgaaaagaa

SEQ ID NO: 1459369 - DNA, 15 bp, Homo sapiens
tttagtgaaaagaaa

SEQ ID NO: 1459370 - DNA, 15 bp, Homo sapiens
ttagtgaaaagaaat

SEQ ID NO: 1459371 - DNA, 15 bp, Homo sapiens
tagtgaaaagaaata

SEQ ID NO: 1459372 - DNA, 15 bp, Homo sapiens
agtgaaaagaaataa

SEQ ID NO: 1459373 - DNA, 15 bp, Homo sapiens
gtgaaaagaaataat

SEQ ID NO: 1459374 - DNA, 15 bp, Homo sapiens
tgaaaagaaataatt

SEQ ID NO: 1459375 - DNA, 15 bp, Homo sapiens
gaaaagaaataattt

SEQ ID NO: 1459376 - DNA, 15 bp, Homo sapiens
aaaagaaataatttc

SEQ ID NO: 1459377 - DNA, 15 bp, Homo sapiens
aaagaaataatttct

SEQ ID NO: 1459378 - DNA, 15 bp, Homo sapiens
aagaaataatttctg

SEQ ID NO: 1459379 - DNA, 15 bp, Homo sapiens
agaaataatttctgt

SEQ ID NO: 1459380 - DNA, 15 bp, Homo sapiens
gaaataatttctgtt

SEQ ID NO: 1459381 - DNA, 15 bp, Homo sapiens
aaataatttctgttc

SEQ ID NO: 1459382 - DNA, 15 bp, Homo sapiens
aataatttctgttcc

SEQ ID NO: 1459383 - DNA, 15 bp, Homo sapiens
ataatttctgttcct

SEQ ID NO: 1459384 - DNA, 15 bp, Homo sapiens
taatttctgttcctg

SEQ ID NO: 1459385 - DNA, 15 bp, Homo sapiens
aatttctgttcctgt

SEQ ID NO: 1459386 - DNA, 15 bp, Homo sapiens
atttctgttcctgtt

SEQ ID NO: 1459387 - DNA, 15 bp, Homo sapiens
tttctgttcctgttg

SEQ ID NO: 1459388 - DNA, 15 bp, Homo sapiens
ttctgttcctgttgg

SEQ ID NO: 1459389 - DNA, 15 bp, Homo sapiens
tctgttcctgttggt

SEQ ID NO: 1459390 - DNA, 15 bp, Homo sapiens
ctgttcctgttggtt

SEQ ID NO: 1459391 - DNA, 15 bp, Homo sapiens
tgttcctgttggttt

SEQ ID NO: 1459392 - DNA, 15 bp, Homo sapiens
gttcctgttggtttt

SEQ ID NO: 1459393 - DNA, 15 bp, Homo sapiens
ttcctgttggttttt

SEQ ID NO: 1459394 - DNA, 15 bp, Homo sapiens
tcctgttggttttta

SEQ ID NO: 1459395 - DNA, 15 bp, Homo sapiens
cctgttggtttttat

SEQ ID NO: 1459396 - DNA, 15 bp, Homo sapiens
ctgttggtttttata

SEQ ID NO: 1459397 - DNA, 15 bp, Homo sapiens
tgttggtttttataa

SEQ ID NO: 1459398 - DNA, 15 bp, Homo sapiens
gttggtttttataag

SEQ ID NO: 1459399 - DNA, 15 bp, Homo sapiens
ttggtttttataagg

SEQ ID NO: 1459400 - DNA, 15 bp, Homo sapiens
tggtttttataaggt

SEQ ID NO: 1459401 - DNA, 15 bp, Homo sapiens
ggtttttataaggtg

SEQ ID NO: 1459402 - DNA, 15 bp, Homo sapiens
gtttttataaggtgt

SEQ ID NO: 1459403 - DNA, 15 bp, Homo sapiens
tttttataaggtgtt

SEQ ID NO: 1459404 - DNA, 15 bp, Homo sapiens
ttttataaggtgttt

SEQ ID NO: 1459405 - DNA, 15 bp, Homo sapiens
tttataaggtgtttt

SEQ ID NO: 1459406 - DNA, 15 bp, Homo sapiens
ttataaggtgttttt

SEQ ID NO: 1459407 - DNA, 15 bp, Homo sapiens
tataaggtgtttttg

SEQ ID NO: 1459408 - DNA, 15 bp, Homo sapiens
ataaggtgtttttga

SEQ ID NO: 1459409 - DNA, 15 bp, Homo sapiens
taaggtgtttttgag

SEQ ID NO: 1459410 - DNA, 15 bp, Homo sapiens
aaggtgtttttgaga

SEQ ID NO: 1459411 - DNA, 15 bp, Homo sapiens
aggtgtttttgagac

SEQ ID NO: 1459412 - DNA, 15 bp, Homo sapiens
ggtgtttttgagaca

SEQ ID NO: 1459413 - DNA, 15 bp, Homo sapiens
gtgtttttgagacag

SEQ ID NO: 1459414 - DNA, 15 bp, Homo sapiens
tgtttttgagacagt

SEQ ID NO: 1459415 - DNA, 15 bp, Homo sapiens
gtttttgagacagtg

SEQ ID NO: 1459416 - DNA, 15 bp, Homo sapiens
tttttgagacagtgg

SEQ ID NO: 1459417 - DNA, 15 bp, Homo sapiens
ttttgagacagtgga

SEQ ID NO: 1459418 - DNA, 15 bp, Homo sapiens
tttgagacagtggaa

SEQ ID NO: 1459419 - DNA, 15 bp, Homo sapiens
ttgagacagtggaaa

SEQ ID NO: 1459420 - DNA, 15 bp, Homo sapiens
tgagacagtggaaat

SEQ ID NO: 1459421 - DNA, 15 bp, Homo sapiens
gagacagtggaaatg

SEQ ID NO: 1459422 - DNA, 15 bp, Homo sapiens
agacagtggaaatgt

SEQ ID NO: 1459423 - DNA, 15 bp, Homo sapiens
gacagtggaaatgtt

SEQ ID NO: 1459424 - DNA, 15 bp, Homo sapiens
acagtggaaatgtta

SEQ ID NO: 1459425 - DNA, 15 bp, Homo sapiens
cagtggaaatgttac

SEQ ID NO: 1459426 - DNA, 15 bp, Homo sapiens
agtggaaatgttacc

SEQ ID NO: 1459427 - DNA, 15 bp, Homo sapiens
gtggaaatgttacca

SEQ ID NO: 1459428 - DNA, 15 bp, Homo sapiens
tggaaatgttaccat

SEQ ID NO: 1459429 - DNA, 15 bp, Homo sapiens
ggaaatgttaccatc

SEQ ID NO: 1459430 - DNA, 15 bp, Homo sapiens
gaaatgttaccatcc

SEQ ID NO: 1459431 - DNA, 15 bp, Homo sapiens
aaatgttaccatcca

SEQ ID NO: 1459432 - DNA, 15 bp, Homo sapiens
aatgttaccatccaa

SEQ ID NO: 1459433 - DNA, 15 bp, Homo sapiens
atgttaccatccaaa

SEQ ID NO: 1459434 - DNA, 15 bp, Homo sapiens
tgttaccatccaaag

SEQ ID NO: 1459435 - DNA, 15 bp, Homo sapiens
gttaccatccaaagc

SEQ ID NO: 1459436 - DNA, 15 bp, Homo sapiens
ttaccatccaaagct

SEQ ID NO: 1459437 - DNA, 15 bp, Homo sapiens
taccatccaaagctg

SEQ ID NO: 1459438 - DNA, 15 bp, Homo sapiens
accatccaaagctgg

SEQ ID NO: 1459439 - DNA, 15 bp, Homo sapiens
ccatccaaagctgga

SEQ ID NO: 1459440 - DNA, 15 bp, Homo sapiens
catccaaagctggaa

SEQ ID NO: 1459441 - DNA, 15 bp, Homo sapiens
atccaaagctggaat

SEQ ID NO: 1459442 - DNA, 15 bp, Homo sapiens
tccaaagctggaatt

SEQ ID NO: 1459443 - DNA, 15 bp, Homo sapiens
ccaaagctggaattt

SEQ ID NO: 1459444 - DNA, 15 bp, Homo sapiens
caaagctggaatttg

SEQ ID NO: 1459445 - DNA, 15 bp, Homo sapiens
aaagctggaatttgg

SEQ ID NO: 1459446 - DNA, 15 bp, Homo sapiens
aagctggaatttggc

SEQ ID NO: 1459447 - DNA, 15 bp, Homo sapiens
agctggaatttggcg

SEQ ID NO: 1459448 - DNA, 15 bp, Homo sapiens
gctggaatttggcgg

SEQ ID NO: 1459449 - DNA, 15 bp, Homo sapiens
ctggaatttggcggg

SEQ ID NO: 1459450 - DNA, 15 bp, Homo sapiens
tggaatttggcgggt

SEQ ID NO: 1459451 - DNA, 15 bp, Homo sapiens
ggaatttggcgggtg

SEQ ID NO: 1459452 - DNA, 15 bp, Homo sapiens
gaatttggcgggtgg

SEQ ID NO: 1459453 - DNA, 15 bp, Homo sapiens
aatttggcgggtgga

SEQ ID NO: 1459454 - DNA, 15 bp, Homo sapiens
atttggcgggtggaa

SEQ ID NO: 1459455 - DNA, 15 bp, Homo sapiens
tttggcgggtggaat

SEQ ID NO: 1459456 - DNA, 15 bp, Homo sapiens
ttggcgggtggaatg

SEQ ID NO: 1459457 - DNA, 15 bp, Homo sapiens
tggcgggtggaatgc

SEQ ID NO: 1459458 - DNA, 15 bp, Homo sapiens
ggcgggtggaatgcc

SEQ ID NO: 1459459 - DNA, 15 bp, Homo sapiens
gcgggtggaatgcct

SEQ ID NO: 1459460 - DNA, 15 bp, Homo sapiens
cgggtggaatgcctt

SEQ ID NO: 1459461 - DNA, 15 bp, Homo sapiens
gggtggaatgcctta

SEQ ID NO: 1459462 - DNA, 15 bp, Homo sapiens
ggtggaatgccttat

SEQ ID NO: 1459463 - DNA, 15 bp, Homo sapiens
gtggaatgccttatt

SEQ ID NO: 1459464 - DNA, 15 bp, Homo sapiens
tggaatgccttattg

SEQ ID NO: 1459465 - DNA, 15 bp, Homo sapiens
gaatgccttattggc

SEQ ID NO: 1459466 - DNA, 15 bp, Homo sapiens
aatgccttattggcg

SEQ ID NO: 1459467 - DNA, 15 bp, Homo sapiens
ttattggcgagcatc

SEQ ID NO: 1459468 - DNA, 15 bp, Homo sapiens
tattggcgagcatct

SEQ ID NO: 1459469 - DNA, 15 bp, Homo sapiens
attggcgagcatcta

SEQ ID NO: 1459470 - DNA, 15 bp, Homo sapiens
ttggcgagcatctac

SEQ ID NO: 1459471 - DNA, 15 bp, Homo sapiens
tggcgagcatctaca

SEQ ID NO: 1459472 - DNA, 15 bp, Homo sapiens
ggcgagcatctacat

SEQ ID NO: 1459473 - DNA, 15 bp, Homo sapiens
gcgagcatctacatg

SEQ ID NO: 1459474 - DNA, 15 bp, Homo sapiens
cgagcatctacatgc

SEQ ID NO: 1459475 - DNA, 15 bp, Homo sapiens
gagcatctacatgct

SEQ ID NO: 1459476 - DNA, 15 bp, Homo sapiens
agcatctacatgctg

SEQ ID NO: 1459477 - DNA, 15 bp, Homo sapiens
gcatctacatgctgg

SEQ ID NO: 1459478 - DNA, 15 bp, Homo sapiens
catctacatgctggg

SEQ ID NO: 1459479 - DNA, 15 bp, Homo sapiens
atctacatgctggga

SEQ ID NO: 1459480 - DNA, 15 bp, Homo sapiens
tctacatgctgggat

SEQ ID NO: 1459481 - DNA, 15 bp, Homo sapiens
ctacatgctgggatg

SEQ ID NO: 1459482 - DNA, 15 bp, Homo sapiens
tacatgctgggatga

SEQ ID NO: 1459483 - DNA, 15 bp, Homo sapiens
acatgctgggatgag

SEQ ID NO: 1459484 - DNA, 15 bp, Homo sapiens
catgctgggatgagc

SEQ ID NO: 1459485 - DNA, 15 bp, Homo sapiens
atgctgggatgagca

SEQ ID NO: 1459486 - DNA, 15 bp, Homo sapiens
tgctgggatgagcac

SEQ ID NO: 1459487 - DNA, 15 bp, Homo sapiens
gctgggatgagcaca

SEQ ID NO: 1459488 - DNA, 15 bp, Homo sapiens
ctgggatgagcacac

SEQ ID NO: 1459489 - DNA, 15 bp, Homo sapiens
tgggatgagcacact

SEQ ID NO: 1459490 - DNA, 15 bp, Homo sapiens
gggatgagcacactt

SEQ ID NO: 1459491 - DNA, 15 bp, Homo sapiens
ggatgagcacacttt

SEQ ID NO: 1459492 - DNA, 15 bp, Homo sapiens
gatgagcacactttt

SEQ ID NO: 1459493 - DNA, 15 bp, Homo sapiens
atgagcacacttttt

SEQ ID NO: 1459494 - DNA, 15 bp, Homo sapiens
tgagcacactttttc

SEQ ID NO: 1459495 - DNA, 15 bp, Homo sapiens
gagcacactttttct

SEQ ID NO: 1459496 - DNA, 15 bp, Homo sapiens
agcacactttttctg

SEQ ID NO: 1459497 - DNA, 15 bp, Homo sapiens
gcacactttttctgg

SEQ ID NO: 1459498 - DNA, 15 bp, Homo sapiens
cacactttttctggt

SEQ ID NO: 1459499 - DNA, 15 bp, Homo sapiens
acactttttctggtg

SEQ ID NO: 1459500 - DNA, 15 bp, Homo sapiens
cactttttctggtgt

SEQ ID NO: 1459501 - DNA, 15 bp, Homo sapiens
actttttctggtgta

SEQ ID NO: 1459502 - DNA, 15 bp, Homo sapiens
ctttttctggtgtac

SEQ ID NO: 1459503 - DNA, 15 bp, Homo sapiens
tttttctggtgtaca

SEQ ID NO: 1459504 - DNA, 15 bp, Homo sapiens
ttttctggtgtacag

SEQ ID NO: 1459505 - DNA, 15 bp, Homo sapiens
tttctggtgtacagc

SEQ ID NO: 1459506 - DNA, 15 bp, Homo sapiens
ttctggtgtacagca

SEQ ID NO: 1459507 - DNA, 15 bp, Homo sapiens
tctggtgtacagcaa

SEQ ID NO: 1459508 - DNA, 15 bp, Homo sapiens
ctggtgtacagcaat

SEQ ID NO: 1459509 - DNA, 15 bp, Homo sapiens
tggtgtacagcaata

SEQ ID NO: 1459510 - DNA, 15 bp, Homo sapiens
ggtgtacagcaatag

SEQ ID NO: 1459511 - DNA, 15 bp, Homo sapiens
gtgtacagcaatagt

SEQ ID NO: 1459512 - DNA, 15 bp, Homo sapiens
tgtacagcaatagtg

SEQ ID NO: 1459513 - DNA, 15 bp, Homo sapiens
gtacagcaatagtga

SEQ ID NO: 1459514 - DNA, 15 bp, Homo sapiens
tacagcaatagtgag

SEQ ID NO: 1459515 - DNA, 15 bp, Homo sapiens
acagcaatagtgagt

SEQ ID NO: 1459516 - DNA, 15 bp, Homo sapiens
cagcaatagtgagta

SEQ ID NO: 1459517 - DNA, 15 bp, Homo sapiens
agcaatagtgagtag

SEQ ID NO: 1459518 - DNA, 15 bp, Homo sapiens
gcaatagtgagtagc

SEQ ID NO: 1459519 - DNA, 15 bp, Homo sapiens
caatagtgagtagca

SEQ ID NO: 1459520 - DNA, 15 bp, Homo sapiens
aatagtgagtagcaa

SEQ ID NO: 1459521 - DNA, 15 bp, Homo sapiens
atagtgagtagcaat

SEQ ID NO: 1459522 - DNA, 15 bp, Homo sapiens
tagtgagtagcaatg

SEQ ID NO: 1459523 - DNA, 15 bp, Homo sapiens
agtgagtagcaatgt

SEQ ID NO: 1459524 - DNA, 15 bp, Homo sapiens
gtgagtagcaatgtg

SEQ ID NO: 1459525 - DNA, 15 bp, Homo sapiens
tgagtagcaatgtgg

SEQ ID NO: 1459526 - DNA, 15 bp, Homo sapiens
gagtagcaatgtggg

SEQ ID NO: 1459527 - DNA, 15 bp, Homo sapiens
agtagcaatgtgggc

SEQ ID NO: 1459528 - DNA, 15 bp, Homo sapiens
gtagcaatgtgggca

SEQ ID NO: 1459529 - DNA, 15 bp, Homo sapiens
tagcaatgtgggcag

SEQ ID NO: 1459530 - DNA, 15 bp, Homo sapiens
agcaatgtgggcaga

SEQ ID NO: 1459531 - DNA, 15 bp, Homo sapiens
gcaatgtgggcagag

SEQ ID NO: 1459532 - DNA, 15 bp, Homo sapiens
caatgtgggcagagg

SEQ ID NO: 1459533 - DNA, 15 bp, Homo sapiens
aatgtgggcagaggt

SEQ ID NO: 1459534 - DNA, 15 bp, Homo sapiens
atgtgggcagaggtt

SEQ ID NO: 1459535 - DNA, 15 bp, Homo sapiens
tgtgggcagaggttc

SEQ ID NO: 1459536 - DNA, 15 bp, Homo sapiens
gtgggcagaggttcc

SEQ ID NO: 1459537 - DNA, 15 bp, Homo sapiens
tgggcagaggttccc

SEQ ID NO: 1459538 - DNA, 15 bp, Homo sapiens
gggcagaggttccct

SEQ ID NO: 1459539 - DNA, 15 bp, Homo sapiens
ggcagaggttcccta

SEQ ID NO: 1459540 - DNA, 15 bp, Homo sapiens
gcagaggttccctac

SEQ ID NO: 1459541 - DNA, 15 bp, Homo sapiens
cagaggttccctacc

SEQ ID NO: 1459542 - DNA, 15 bp, Homo sapiens
agaggttccctacct

SEQ ID NO: 1459543 - DNA, 15 bp, Homo sapiens
gaggttccctaccta

SEQ ID NO: 1459544 - DNA, 15 bp, Homo sapiens
aggttccctacctac

SEQ ID NO: 1459545 - DNA, 15 bp, Homo sapiens
ggttccctacctact

SEQ ID NO: 1459546 - DNA, 15 bp, Homo sapiens
gttccctacctactc

SEQ ID NO: 1459547 - DNA, 15 bp, Homo sapiens
ttccctacctactca

SEQ ID NO: 1459548 - DNA, 15 bp, Homo sapiens
tccctacctactcag

SEQ ID NO: 1459549 - DNA, 15 bp, Homo sapiens
ccctacctactcagc

SEQ ID NO: 1459550 - DNA, 15 bp, Homo sapiens
cctacctactcagcc

SEQ ID NO: 1459551 - DNA, 15 bp, Homo sapiens
ctacctactcagcct

SEQ ID NO: 1459552 - DNA, 15 bp, Homo sapiens
tacctactcagccta

SEQ ID NO: 1459553 - DNA, 15 bp, Homo sapiens
acctactcagcctac

SEQ ID NO: 1459554 - DNA, 15 bp, Homo sapiens
cctactcagcctact

SEQ ID NO: 1459555 - DNA, 15 bp, Homo sapiens
ctactcagcctactt

SEQ ID NO: 1459556 - DNA, 15 bp, Homo sapiens
tactcagcctacttc

SEQ ID NO: 1459557 - DNA, 15 bp, Homo sapiens
actcagcctacttct

SEQ ID NO: 1459558 - DNA, 15 bp, Homo sapiens
ctcagcctacttctt

SEQ ID NO: 1459559 - DNA, 15 bp, Homo sapiens
tcagcctacttcttt

SEQ ID NO: 1459560 - DNA, 15 bp, Homo sapiens
cagcctacttcttta

SEQ ID NO: 1459561 - DNA, 15 bp, Homo sapiens
agcctacttctttac

SEQ ID NO: 1459562 - DNA, 15 bp, Homo sapiens
gcctacttctttaca

SEQ ID NO: 1459563 - DNA, 15 bp, Homo sapiens
cctacttctttacag

SEQ ID NO: 1459564 - DNA, 15 bp, Homo sapiens
ctacttctttacagc

SEQ ID NO: 1459565 - DNA, 15 bp, Homo sapiens
tacttctttacagct

SEQ ID NO: 1459566 - DNA, 15 bp, Homo sapiens
acttctttacagctt

SEQ ID NO: 1459567 - DNA, 15 bp, Homo sapiens
cttctttacagcttt

SEQ ID NO: 1459568 - DNA, 15 bp, Homo sapiens
ttctttacagctttc

SEQ ID NO: 1459569 - DNA, 15 bp, Homo sapiens
tctttacagctttct

SEQ ID NO: 1459570 - DNA, 15 bp, Homo sapiens
ctttacagctttctt

SEQ ID NO: 1459571 - DNA, 15 bp, Homo sapiens
tttacagctttcttc

SEQ ID NO: 1459572 - DNA, 15 bp, Homo sapiens
ttacagctttcttcc

SEQ ID NO: 1459573 - DNA, 15 bp, Homo sapiens
tacagctttcttcct

SEQ ID NO: 1459574 - DNA, 15 bp, Homo sapiens
acagctttcttcctt

SEQ ID NO: 1459575 - DNA, 15 bp, Homo sapiens
cagctttcttccttt

SEQ ID NO: 1459576 - DNA, 15 bp, Homo sapiens
agctttcttcctttc

SEQ ID NO: 1459577 - DNA, 15 bp, Homo sapiens
gctttcttcctttct

SEQ ID NO: 1459578 - DNA, 15 bp, Homo sapiens
ctttcttcctttctg

SEQ ID NO: 1459579 - DNA, 15 bp, Homo sapiens
tttcttcctttctgg

SEQ ID NO: 1459580 - DNA, 15 bp, Homo sapiens
ttcttcctttctgga

SEQ ID NO: 1459581 - DNA, 15 bp, Homo sapiens
tcttcctttctggaa

SEQ ID NO: 1459582 - DNA, 15 bp, Homo sapiens
cttcctttctggaat

SEQ ID NO: 1459583 - DNA, 15 bp, Homo sapiens
ttcctttctggaatg

SEQ ID NO: 1459584 - DNA, 15 bp, Homo sapiens
tcctttctggaatgg

SEQ ID NO: 1459585 - DNA, 15 bp, Homo sapiens
cctttctggaatggt

SEQ ID NO: 1459586 - DNA, 15 bp, Homo sapiens
ctttctggaatggtt

SEQ ID NO: 1459587 - DNA, 15 bp, Homo sapiens
tttctggaatggttg

SEQ ID NO: 1459588 - DNA, 15 bp, Homo sapiens
ttctggaatggttgc

SEQ ID NO: 1459589 - DNA, 15 bp, Homo sapiens
tctggaatggttgct

SEQ ID NO: 1459590 - DNA, 15 bp, Homo sapiens
ctggaatggttgctt

SEQ ID NO: 1459591 - DNA, 15 bp, Homo sapiens
tggaatggttgcttg

SEQ ID NO: 1459592 - DNA, 15 bp, Homo sapiens
ggaatggttgcttgt

SEQ ID NO: 1459593 - DNA, 15 bp, Homo sapiens
gaatggttgcttgtg

SEQ ID NO: 1459594 - DNA, 15 bp, Homo sapiens
aatggttgcttgtgt

SEQ ID NO: 1459595 - DNA, 15 bp, Homo sapiens
atggttgcttgtgtc

SEQ ID NO: 1459596 - DNA, 15 bp, Homo sapiens
tggttgcttgtgtca

SEQ ID NO: 1459597 - DNA, 15 bp, Homo sapiens
ggttgcttgtgtcag

SEQ ID NO: 1459598 - DNA, 15 bp, Homo sapiens
gttgcttgtgtcagg

SEQ ID NO: 1459599 - DNA, 15 bp, Homo sapiens
ttgcttgtgtcagga

SEQ ID NO: 1459600 - DNA, 15 bp, Homo sapiens
tgcttgtgtcaggaa

SEQ ID NO: 1459601 - DNA, 15 bp, Homo sapiens
gcttgtgtcaggaaa

SEQ ID NO: 1459602 - DNA, 15 bp, Homo sapiens
cttgtgtcaggaaat

SEQ ID NO: 1459603 - DNA, 15 bp, Homo sapiens
ttgtgtcaggaaata

SEQ ID NO: 1459604 - DNA, 15 bp, Homo sapiens
tgtgtcaggaaataa

SEQ ID NO: 1459605 - DNA, 15 bp, Homo sapiens
gtgtcaggaaataaa

SEQ ID NO: 1459606 - DNA, 15 bp, Homo sapiens
tgtcaggaaataaat

SEQ ID NO: 1459607 - DNA, 15 bp, Homo sapiens
gtcaggaaataaata

SEQ ID NO: 1459608 - DNA, 15 bp, Homo sapiens
tcaggaaataaatac

SEQ ID NO: 1459609 - DNA, 15 bp, Homo sapiens
caggaaataaataca

SEQ ID NO: 1459610 - DNA, 15 bp, Homo sapiens
aggaaataaatacaa

SEQ ID NO: 1459611 - DNA, 15 bp, Homo sapiens
ggaaataaatacaag

SEQ ID NO: 1459612 - DNA, 15 bp, Homo sapiens
gaaataaatacaagt

SEQ ID NO: 1459613 - DNA, 15 bp, Homo sapiens
aaataaatacaagtt

SEQ ID NO: 1459614 - DNA, 15 bp, Homo sapiens
aataaatacaagttt

SEQ ID NO: 1459615 - DNA, 15 bp, Homo sapiens
ataaatacaagttta

SEQ ID NO: 1459616 - DNA, 15 bp, Homo sapiens
taaatacaagtttac

SEQ ID NO: 1459617 - DNA, 15 bp, Homo sapiens
aaatacaagtttaca

SEQ ID NO: 1459618 - DNA, 15 bp, Homo sapiens
aatacaagtttacat

SEQ ID NO: 1459619 - DNA, 15 bp, Homo sapiens
atacaagtttacatc

SEQ ID NO: 1459620 - DNA, 15 bp, Homo sapiens
tacaagtttacatca

SEQ ID NO: 1459621 - DNA, 15 bp, Homo sapiens
acaagtttacatcat

SEQ ID NO: 1459622 - DNA, 15 bp, Homo sapiens
caagtttacatcatt

SEQ ID NO: 1459623 - DNA, 15 bp, Homo sapiens
aagtttacatcatta

SEQ ID NO: 1459624 - DNA, 15 bp, Homo sapiens
agtttacatcattat

SEQ ID NO: 1459625 - DNA, 15 bp, Homo sapiens
gtttacatcattatc

SEQ ID NO: 1459626 - DNA, 15 bp, Homo sapiens
tttacatcattatca

SEQ ID NO: 1459627 - DNA, 15 bp, Homo sapiens
ttacatcattatcaa

SEQ ID NO: 1459628 - DNA, 15 bp, Homo sapiens
tacatcattatcaaa

SEQ ID NO: 1459629 - DNA, 15 bp, Homo sapiens
acatcattatcaaat

SEQ ID NO: 1459630 - DNA, 15 bp, Homo sapiens
catcattatcaaatt

SEQ ID NO: 1459631 - DNA, 15 bp, Homo sapiens
atcattatcaaattt

SEQ ID NO: 1459632 - DNA, 15 bp, Homo sapiens
tcattatcaaattta

SEQ ID NO: 1459633 - DNA, 15 bp, Homo sapiens
cattatcaaatttaa

SEQ ID NO: 1459634 - DNA, 15 bp, Homo sapiens
attatcaaatttaaa

SEQ ID NO: 1459635 - DNA, 15 bp, Homo sapiens
ttatcaaatttaaaa

SEQ ID NO: 1459636 - DNA, 15 bp, Homo sapiens
tatcaaatttaaaat

SEQ ID NO: 1459637 - DNA, 15 bp, Homo sapiens
atcaaatttaaaatg

SEQ ID NO: 1459638 - DNA, 15 bp, Homo sapiens
tcaaatttaaaatga

SEQ ID NO: 1459639 - DNA, 15 bp, Homo sapiens
caaatttaaaatgaa

SEQ ID NO: 1459640 - DNA, 15 bp, Homo sapiens
aaatttaaaatgaat

SEQ ID NO: 1459641 - DNA, 15 bp, Homo sapiens
aatttaaaatgaata

SEQ ID NO: 1459642 - DNA, 15 bp, Homo sapiens
atttaaaatgaatat

SEQ ID NO: 1459643 - DNA, 15 bp, Homo sapiens
ttaaaatgaatattg

SEQ ID NO: 1459644 - DNA, 15 bp, Homo sapiens
taaaatgaatattgc

SEQ ID NO: 1459645 - DNA, 15 bp, Homo sapiens
aaaatgaatattgct

SEQ ID NO: 1459646 - DNA, 15 bp, Homo sapiens
aaatgaatattgctg

SEQ ID NO: 1459647 - DNA, 15 bp, Homo sapiens
aatgaatattgctgg

SEQ ID NO: 1459648 - DNA, 15 bp, Homo sapiens
atgaatattgctggt

SEQ ID NO: 1459649 - DNA, 15 bp, Homo sapiens
tgaatattgctggta

SEQ ID NO: 1459650 - DNA, 15 bp, Homo sapiens
gaatattgctggtag

SEQ ID NO: 1459651 - DNA, 15 bp, Homo sapiens
aatattgctggtaga

SEQ ID NO: 1459652 - DNA, 15 bp, Homo sapiens
atattgctggtagaa

SEQ ID NO: 1459653 - DNA, 15 bp, Homo sapiens
tattgctggtagaaa

SEQ ID NO: 1459654 - DNA, 15 bp, Homo sapiens
attgctggtagaaat

SEQ ID NO: 1459655 - DNA, 15 bp, Homo sapiens
ttgctggtagaaatc

SEQ ID NO: 1459656 - DNA, 15 bp, Homo sapiens
tgctggtagaaatca

SEQ ID NO: 1459657 - DNA, 15 bp, Homo sapiens
gctggtagaaatcat

SEQ ID NO: 1459658 - DNA, 15 bp, Homo sapiens
ctggtagaaatcatc

SEQ ID NO: 1459659 - DNA, 15 bp, Homo sapiens
tggtagaaatcatca

SEQ ID NO: 1459660 - DNA, 15 bp, Homo sapiens
ggtagaaatcatcag

SEQ ID NO: 1459661 - DNA, 15 bp, Homo sapiens
gtagaaatcatcaga

SEQ ID NO: 1459662 - DNA, 15 bp, Homo sapiens
tagaaatcatcagag

SEQ ID NO: 1459663 - DNA, 15 bp, Homo sapiens
agaaatcatcagagt

SEQ ID NO: 1459664 - DNA, 15 bp, Homo sapiens
gaaatcatcagagtt

SEQ ID NO: 1459665 - DNA, 15 bp, Homo sapiens
aaatcatcagagttc

SEQ ID NO: 1459666 - DNA, 15 bp, Homo sapiens
aatcatcagagttct

SEQ ID NO: 1459667 - DNA, 15 bp, Homo sapiens
atcatcagagttctc

SEQ ID NO: 1459668 - DNA, 15 bp, Homo sapiens
tcatcagagttctca

SEQ ID NO: 1459669 - DNA, 15 bp, Homo sapiens
catcagagttctcag

SEQ ID NO: 1459670 - DNA, 15 bp, Homo sapiens
atcagagttctcaga

SEQ ID NO: 1459671 - DNA, 15 bp, Homo sapiens
tcagagttctcagag

SEQ ID NO: 1459672 - DNA, 15 bp, Homo sapiens
cagagttctcagagt

SEQ ID NO: 1459673 - DNA, 15 bp, Homo sapiens
agagttctcagagta

SEQ ID NO: 1459674 - DNA, 15 bp, Homo sapiens
gagttctcagagtag

SEQ ID NO: 1459675 - DNA, 15 bp, Homo sapiens
agttctcagagtagg

SEQ ID NO: 1459676 - DNA, 15 bp, Homo sapiens
gttctcagagtaggg

SEQ ID NO: 1459677 - DNA, 15 bp, Homo sapiens
ttctcagagtagggc

SEQ ID NO: 1459678 - DNA, 15 bp, Homo sapiens
tctcagagtagggca

SEQ ID NO: 1459679 - DNA, 15 bp, Homo sapiens
ctcagagtagggcag

SEQ ID NO: 1459680 - DNA, 15 bp, Homo sapiens
tcagagtagggcaga

SEQ ID NO: 1459681 - DNA, 15 bp, Homo sapiens
cagagtagggcagat

SEQ ID NO: 1459682 - DNA, 15 bp, Homo sapiens
agagtagggcagata

SEQ ID NO: 1459683 - DNA, 15 bp, Homo sapiens
gagtagggcagatat

SEQ ID NO: 1459684 - DNA, 15 bp, Homo sapiens
agtagggcagatata

SEQ ID NO: 1459685 - DNA, 15 bp, Homo sapiens
gtagggcagatatac

SEQ ID NO: 1459686 - DNA, 15 bp, Homo sapiens
tagggcagatatact

SEQ ID NO: 1459687 - DNA, 15 bp, Homo sapiens
agggcagatatactt

SEQ ID NO: 1459688 - DNA, 15 bp, Homo sapiens
gggcagatatacttg

SEQ ID NO: 1459689 - DNA, 15 bp, Homo sapiens
ggcagatatacttga

SEQ ID NO: 1459690 - DNA, 15 bp, Homo sapiens
gcagatatacttgaa

SEQ ID NO: 1459691 - DNA, 15 bp, Homo sapiens
cagatatacttgaag

SEQ ID NO: 1459692 - DNA, 15 bp, Homo sapiens
agatatacttgaagc

SEQ ID NO: 1459693 - DNA, 15 bp, Homo sapiens
gatatacttgaagct

SEQ ID NO: 1459694 - DNA, 15 bp, Homo sapiens
atatacttgaagctt

SEQ ID NO: 1459695 - DNA, 15 bp, Homo sapiens
tatacttgaagcttt

SEQ ID NO: 1459696 - DNA, 15 bp, Homo sapiens
atacttgaagctttg

SEQ ID NO: 1459697 - DNA, 15 bp, Homo sapiens
tacttgaagctttga

SEQ ID NO: 1459698 - DNA, 15 bp, Homo sapiens
acttgaagctttgaa

SEQ ID NO: 1459699 - DNA, 15 bp, Homo sapiens
cttgaagctttgaac

SEQ ID NO: 1459700 - DNA, 15 bp, Homo sapiens
ttgaagctttgaaca

SEQ ID NO: 1459701 - DNA, 15 bp, Homo sapiens
tgaagctttgaacac

SEQ ID NO: 1459702 - DNA, 15 bp, Homo sapiens
gaagctttgaacact

SEQ ID NO: 1459703 - DNA, 15 bp, Homo sapiens
aagctttgaacactt

SEQ ID NO: 1459704 - DNA, 15 bp, Homo sapiens
agctttgaacacttt

SEQ ID NO: 1459705 - DNA, 15 bp, Homo sapiens
gctttgaacactttg

SEQ ID NO: 1459706 - DNA, 15 bp, Homo sapiens
ctttgaacactttgt

SEQ ID NO: 1459707 - DNA, 15 bp, Homo sapiens
tttgaacactttgta

SEQ ID NO: 1459708 - DNA, 15 bp, Homo sapiens
ttgaacactttgtac

SEQ ID NO: 1459709 - DNA, 15 bp, Homo sapiens
tgaacactttgtacc

SEQ ID NO: 1459710 - DNA, 15 bp, Homo sapiens
gaacactttgtacct

SEQ ID NO: 1459711 - DNA, 15 bp, Homo sapiens
aacactttgtacctg

SEQ ID NO: 1459712 - DNA, 15 bp, Homo sapiens
acactttgtacctga

SEQ ID NO: 1459713 - DNA, 15 bp, Homo sapiens
cactttgtacctgaa

SEQ ID NO: 1459714 - DNA, 15 bp, Homo sapiens
actttgtacctgaag

SEQ ID NO: 1459715 - DNA, 15 bp, Homo sapiens
ctttgtacctgaagc

SEQ ID NO: 1459716 - DNA, 15 bp, Homo sapiens
tttgtacctgaagct

SEQ ID NO: 1459717 - DNA, 15 bp, Homo sapiens
ttgtacctgaagctc

SEQ ID NO: 1459718 - DNA, 15 bp, Homo sapiens
tgtacctgaagctct

SEQ ID NO: 1459719 - DNA, 15 bp, Homo sapiens
gtacctgaagctcta

SEQ ID NO: 1459720 - DNA, 15 bp, Homo sapiens
tacctgaagctctaa

SEQ ID NO: 1459721 - DNA, 15 bp, Homo sapiens
acctgaagctctaaa

SEQ ID NO: 1459722 - DNA, 15 bp, Homo sapiens
cctgaagctctaaat

SEQ ID NO: 1459723 - DNA, 15 bp, Homo sapiens
ctgaagctctaaata

SEQ ID NO: 1459724 - DNA, 15 bp, Homo sapiens
tgaagctctaaataa

SEQ ID NO: 1459725 - DNA, 15 bp, Homo sapiens
gaagctctaaataat

SEQ ID NO: 1459726 - DNA, 15 bp, Homo sapiens
aagctctaaataatt

SEQ ID NO: 1459727 - DNA, 15 bp, Homo sapiens
agctctaaataattg

SEQ ID NO: 1459728 - DNA, 15 bp, Homo sapiens
gctctaaataattga

SEQ ID NO: 1459729 - DNA, 15 bp, Homo sapiens
ctctaaataattgac

SEQ ID NO: 1459730 - DNA, 15 bp, Homo sapiens
tctaaataattgaca

SEQ ID NO: 1459731 - DNA, 15 bp, Homo sapiens
ctaaataattgacaa

SEQ ID NO: 1459732 - DNA, 15 bp, Homo sapiens
taaataattgacaaa

SEQ ID NO: 1459733 - DNA, 15 bp, Homo sapiens
aaataattgacaaaa

SEQ ID NO: 1459734 - DNA, 15 bp, Homo sapiens
aataattgacaaaaa

SEQ ID NO: 1459735 - DNA, 15 bp, Homo sapiens
ataattgacaaaaaa

SEQ ID NO: 1459736 - DNA, 15 bp, Homo sapiens
taattgacaaaaaaa

SEQ ID NO: 1459737 - DNA, 15 bp, Homo sapiens
aattgacaaaaaaaa

SEQ ID NO: 1459738 - DNA, 15 bp, Homo sapiens
attgacaaaaaaaaa

SEQ ID NO: 1459739 - DNA, 15 bp, Homo sapiens
ttgacaaaaaaaaaa

SEQ ID NO: 1459740 - DNA, 15 bp, Homo sapiens
tgacaaaaaaaaaat

SEQ ID NO: 1459741 - DNA, 15 bp, Homo sapiens
gacaaaaaaaaaata

SEQ ID NO: 1459742 - DNA, 15 bp, Homo sapiens
acaaaaaaaaaatac

SEQ ID NO: 1459743 - DNA, 15 bp, Homo sapiens
caaaaaaaaaatacc

SEQ ID NO: 1459744 - DNA, 15 bp, Homo sapiens
aaaaaaaaaatacca

SEQ ID NO: 1459745 - DNA, 15 bp, Homo sapiens
aaaaaaaataccacc

SEQ ID NO: 1459746 - DNA, 15 bp, Homo sapiens
aaaaaaataccacct

SEQ ID NO: 1459747 - DNA, 15 bp, Homo sapiens
aaaaaataccacctc

SEQ ID NO: 1459748 - DNA, 15 bp, Homo sapiens
aaaaataccacctca

SEQ ID NO: 1459749 - DNA, 15 bp, Homo sapiens
aaaataccacctcat

SEQ ID NO: 1459750 - DNA, 15 bp, Homo sapiens
aaataccacctcatt

SEQ ID NO: 1459751 - DNA, 15 bp, Homo sapiens
aataccacctcattt

SEQ ID NO: 1459752 - DNA, 15 bp, Homo sapiens
ataccacctcatttt

SEQ ID NO: 1459753 - DNA, 15 bp, Homo sapiens
taccacctcattttc

SEQ ID NO: 1459754 - DNA, 15 bp, Homo sapiens
accacctcattttca

SEQ ID NO: 1459755 - DNA, 15 bp, Homo sapiens
ccacctcattttcac

SEQ ID NO: 1459756 - DNA, 15 bp, Homo sapiens
cacctcattttcaca

SEQ ID NO: 1459757 - DNA, 15 bp, Homo sapiens
acctcattttcacaa

SEQ ID NO: 1459758 - DNA, 15 bp, Homo sapiens
cctcattttcacaac

SEQ ID NO: 1459759 - DNA, 15 bp, Homo sapiens
ctcattttcacaact

SEQ ID NO: 1459760 - DNA, 15 bp, Homo sapiens
tcattttcacaactt

SEQ ID NO: 1459761 - DNA, 15 bp, Homo sapiens
cattttcacaacttg

SEQ ID NO: 1459762 - DNA, 15 bp, Homo sapiens
attttcacaacttgg

SEQ ID NO: 1459763 - DNA, 15 bp, Homo sapiens
ttttcacaacttggt

SEQ ID NO: 1459764 - DNA, 15 bp, Homo sapiens
tttcacaacttggta

SEQ ID NO: 1459765 - DNA, 15 bp, Homo sapiens
ttcacaacttggtaa

SEQ ID NO: 1459766 - DNA, 15 bp, Homo sapiens
tcacaacttggtaaa

SEQ ID NO: 1459767 - DNA, 15 bp, Homo sapiens
cacaacttggtaaag

SEQ ID NO: 1459768 - DNA, 15 bp, Homo sapiens
acaacttggtaaagc

SEQ ID NO: 1459769 - DNA, 15 bp, Homo sapiens
caacttggtaaagct

SEQ ID NO: 1459770 - DNA, 15 bp, Homo sapiens
aacttggtaaagctc

SEQ ID NO: 1459771 - DNA, 15 bp, Homo sapiens
acttggtaaagctcg

SEQ ID NO: 1459772 - DNA, 15 bp, Homo sapiens
cttggtaaagctcga

SEQ ID NO: 1459773 - DNA, 15 bp, Homo sapiens
ttggtaaagctcgaa

SEQ ID NO: 1459774 - DNA, 15 bp, Homo sapiens
tggtaaagctcgaag

SEQ ID NO: 1459775 - DNA, 15 bp, Homo sapiens
ggtaaagctcgaaga

SEQ ID NO: 1459776 - DNA, 15 bp, Homo sapiens
gtaaagctcgaagat

SEQ ID NO: 1459777 - DNA, 15 bp, Homo sapiens
taaagctcgaagatc

SEQ ID NO: 1459778 - DNA, 15 bp, Homo sapiens
aaagctcgaagatct

SEQ ID NO: 1459779 - DNA, 15 bp, Homo sapiens
aagctcgaagatctc

SEQ ID NO: 1459780 - DNA, 15 bp, Homo sapiens
agctcgaagatctcc

SEQ ID NO: 1459781 - DNA, 15 bp, Homo sapiens
gctcgaagatctcca

SEQ ID NO: 1459782 - DNA, 15 bp, Homo sapiens
ctcgaagatctccag

SEQ ID NO: 1459783 - DNA, 15 bp, Homo sapiens
tcgaagatctccagt

SEQ ID NO: 1459784 - DNA, 15 bp, Homo sapiens
cgaagatctccagta

SEQ ID NO: 1459785 - DNA, 15 bp, Homo sapiens
gaagatctccagtag

SEQ ID NO: 1459786 - DNA, 15 bp, Homo sapiens
aagatctccagtagc

SEQ ID NO: 1459787 - DNA, 15 bp, Homo sapiens
agatctccagtagca

SEQ ID NO: 1459788 - DNA, 15 bp, Homo sapiens
gatctccagtagcag

SEQ ID NO: 1459789 - DNA, 15 bp, Homo sapiens
atctccagtagcaga

SEQ ID NO: 1459790 - DNA, 15 bp, Homo sapiens
tctccagtagcagat

SEQ ID NO: 1459791 - DNA, 15 bp, Homo sapiens
ctccagtagcagatt

SEQ ID NO: 1459792 - DNA, 15 bp, Homo sapiens
tccagtagcagattt

SEQ ID NO: 1459793 - DNA, 15 bp, Homo sapiens
ccagtagcagatttt

SEQ ID NO: 1459794 - DNA, 15 bp, Homo sapiens
cagtagcagattttg

SEQ ID NO: 1459795 - DNA, 15 bp, Homo sapiens
agtagcagattttgg

SEQ ID NO: 1459796 - DNA, 15 bp, Homo sapiens
gtagcagattttgga

SEQ ID NO: 1459797 - DNA, 15 bp, Homo sapiens
tagcagattttggaa

SEQ ID NO: 1459798 - DNA, 15 bp, Homo sapiens
agcagattttggaat

SEQ ID NO: 1459799 - DNA, 15 bp, Homo sapiens
gcagattttggaatt

SEQ ID NO: 1459800 - DNA, 15 bp, Homo sapiens
cagattttggaattt

SEQ ID NO: 1459801 - DNA, 15 bp, Homo sapiens
agattttggaattta

SEQ ID NO: 1459802 - DNA, 15 bp, Homo sapiens
gattttggaatttaa

SEQ ID NO: 1459803 - DNA, 15 bp, Homo sapiens
attttggaatttaat

SEQ ID NO: 1459804 - DNA, 15 bp, Homo sapiens
ttttggaatttaatg

SEQ ID NO: 1459805 - DNA, 15 bp, Homo sapiens
tttggaatttaatgt

SEQ ID NO: 1459806 - DNA, 15 bp, Homo sapiens
ttggaatttaatgtt

SEQ ID NO: 1459807 - DNA, 15 bp, Homo sapiens
tggaatttaatgttg

SEQ ID NO: 1459808 - DNA, 15 bp, Homo sapiens
ggaatttaatgttga

SEQ ID NO: 1459809 - DNA, 15 bp, Homo sapiens
gaatttaatgttgat

SEQ ID NO: 1459810 - DNA, 15 bp, Homo sapiens
aatttaatgttgatt

SEQ ID NO: 1459811 - DNA, 15 bp, Homo sapiens
atttaatgttgattt

SEQ ID NO: 1459812 - DNA, 15 bp, Homo sapiens
tttaatgttgattta

SEQ ID NO: 1459813 - DNA, 15 bp, Homo sapiens
ttaatgttgatttag

SEQ ID NO: 1459814 - DNA, 15 bp, Homo sapiens
taatgttgatttagt

SEQ ID NO: 1459815 - DNA, 15 bp, Homo sapiens
aatgttgatttagtt

SEQ ID NO: 1459816 - DNA, 15 bp, Homo sapiens
atgttgatttagtta

SEQ ID NO: 1459817 - DNA, 15 bp, Homo sapiens
tgttgatttagttac

SEQ ID NO: 1459818 - DNA, 15 bp, Homo sapiens
gttgatttagttacc

SEQ ID NO: 1459819 - DNA, 15 bp, Homo sapiens
ttgatttagttacca

SEQ ID NO: 1459820 - DNA, 15 bp, Homo sapiens
tgatttagttaccag

SEQ ID NO: 1459821 - DNA, 15 bp, Homo sapiens
gatttagttaccaga

SEQ ID NO: 1459822 - DNA, 15 bp, Homo sapiens
atttagttaccagat

SEQ ID NO: 1459823 - DNA, 15 bp, Homo sapiens
tttagttaccagata

SEQ ID NO: 1459824 - DNA, 15 bp, Homo sapiens
ttagttaccagataa

SEQ ID NO: 1459825 - DNA, 15 bp, Homo sapiens
tagttaccagataac

SEQ ID NO: 1459826 - DNA, 15 bp, Homo sapiens
agttaccagataact

SEQ ID NO: 1459827 - DNA, 15 bp, Homo sapiens
gttaccagataactt

SEQ ID NO: 1459828 - DNA, 15 bp, Homo sapiens
ttaccagataactta

SEQ ID NO: 1459829 - DNA, 15 bp, Homo sapiens
taccagataacttag

SEQ ID NO: 1459830 - DNA, 15 bp, Homo sapiens
accagataacttaga

SEQ ID NO: 1459831 - DNA, 15 bp, Homo sapiens
ccagataacttagaa

SEQ ID NO: 1459832 - DNA, 15 bp, Homo sapiens
cagataacttagaaa

SEQ ID NO: 1459833 - DNA, 15 bp, Homo sapiens
agataacttagaaat

SEQ ID NO: 1459834 - DNA, 15 bp, Homo sapiens
gataacttagaaata

SEQ ID NO: 1459835 - DNA, 15 bp, Homo sapiens
ataacttagaaatac

SEQ ID NO: 1459836 - DNA, 15 bp, Homo sapiens
taacttagaaatact

SEQ ID NO: 1459837 - DNA, 15 bp, Homo sapiens
aacttagaaatacta

SEQ ID NO: 1459838 - DNA, 15 bp, Homo sapiens
acttagaaatactac

SEQ ID NO: 1459839 - DNA, 15 bp, Homo sapiens
cttagaaatactact

SEQ ID NO: 1459840 - DNA, 15 bp, Homo sapiens
ttagaaatactactt

SEQ ID NO: 1459841 - DNA, 15 bp, Homo sapiens
tagaaatactacttg

SEQ ID NO: 1459842 - DNA, 15 bp, Homo sapiens
agaaatactacttgg

SEQ ID NO: 1459843 - DNA, 15 bp, Homo sapiens
gaaatactacttgga

SEQ ID NO: 1459844 - DNA, 15 bp, Homo sapiens
aaatactacttggaa

SEQ ID NO: 1459845 - DNA, 15 bp, Homo sapiens
aatactacttggaag

SEQ ID NO: 1459846 - DNA, 15 bp, Homo sapiens
atactacttggaaga

SEQ ID NO: 1459847 - DNA, 15 bp, Homo sapiens
tactacttggaagag

SEQ ID NO: 1459848 - DNA, 15 bp, Homo sapiens
actacttggaagagt

SEQ ID NO: 1459849 - DNA, 15 bp, Homo sapiens
ctacttggaagagtt

SEQ ID NO: 1459850 - DNA, 15 bp, Homo sapiens
cttggaagagtttgg

SEQ ID NO: 1459851 - DNA, 15 bp, Homo sapiens
ttggaagagtttgga

SEQ ID NO: 1459852 - DNA, 15 bp, Homo sapiens
tggaagagtttggag

SEQ ID NO: 1459853 - DNA, 15 bp, Homo sapiens
ggaagagtttggaga

SEQ ID NO: 1459854 - DNA, 15 bp, Homo sapiens
gaagagtttggagat

SEQ ID NO: 1459855 - DNA, 15 bp, Homo sapiens
aagagtttggagatt

SEQ ID NO: 1459856 - DNA, 15 bp, Homo sapiens
agagtttggagattt

SEQ ID NO: 1459857 - DNA, 15 bp, Homo sapiens
gagtttggagattta

SEQ ID NO: 1459858 - DNA, 15 bp, Homo sapiens
agtttggagatttaa

SEQ ID NO: 1459859 - DNA, 15 bp, Homo sapiens
gtttggagatttaac

SEQ ID NO: 1459860 - DNA, 15 bp, Homo sapiens
tttggagatttaacc

SEQ ID NO: 1459861 - DNA, 15 bp, Homo sapiens
ttggagatttaaccc

SEQ ID NO: 1459862 - DNA, 15 bp, Homo sapiens
tggagatttaaccct

SEQ ID NO: 1459863 - DNA, 15 bp, Homo sapiens
ggagatttaacccta

SEQ ID NO: 1459864 - DNA, 15 bp, Homo sapiens
gagatttaaccctaa

SEQ ID NO: 1459865 - DNA, 15 bp, Homo sapiens
agatttaaccctaaa

SEQ ID NO: 1459866 - DNA, 15 bp, Homo sapiens
gatttaaccctaaac

SEQ ID NO: 1459867 - DNA, 15 bp, Homo sapiens
atttaaccctaaaca

SEQ ID NO: 1459868 - DNA, 15 bp, Homo sapiens
tttaaccctaaacaa

SEQ ID NO: 1459869 - DNA, 15 bp, Homo sapiens
ttaaccctaaacaag

SEQ ID NO: 1459870 - DNA, 15 bp, Homo sapiens
taaccctaaacaagt

SEQ ID NO: 1459871 - DNA, 15 bp, Homo sapiens
aaccctaaacaagta

SEQ ID NO: 1459872 - DNA, 15 bp, Homo sapiens
accctaaacaagtaa

SEQ ID NO: 1459873 - DNA, 15 bp, Homo sapiens
ccctaaacaagtaag

SEQ ID NO: 1459874 - DNA, 15 bp, Homo sapiens
cctaaacaagtaaga

SEQ ID NO: 1459875 - DNA, 15 bp, Homo sapiens
ctaaacaagtaagag

SEQ ID NO: 1459876 - DNA, 15 bp, Homo sapiens
taaacaagtaagaga

SEQ ID NO: 1459877 - DNA, 15 bp, Homo sapiens
aaacaagtaagagag

SEQ ID NO: 1459878 - DNA, 15 bp, Homo sapiens
aacaagtaagagagc

SEQ ID NO: 1459879 - DNA, 15 bp, Homo sapiens
acaagtaagagagcc

SEQ ID NO: 1459880 - DNA, 15 bp, Homo sapiens
caagtaagagagcca

SEQ ID NO: 1459881 - DNA, 15 bp, Homo sapiens
aagtaagagagccac

SEQ ID NO: 1459882 - DNA, 15 bp, Homo sapiens
agtaagagagccact

SEQ ID NO: 1459883 - DNA, 15 bp, Homo sapiens
gtaagagagccactg

SEQ ID NO: 1459884 - DNA, 15 bp, Homo sapiens
taagagagccactgg

SEQ ID NO: 1459885 - DNA, 15 bp, Homo sapiens
aagagagccactggt

SEQ ID NO: 1459886 - DNA, 15 bp, Homo sapiens
agagagccactggtc

SEQ ID NO: 1459887 - DNA, 15 bp, Homo sapiens
gagagccactggtct

SEQ ID NO: 1459888 - DNA, 15 bp, Homo sapiens
agagccactggtcta

SEQ ID NO: 1459889 - DNA, 15 bp, Homo sapiens
gagccactggtctat

SEQ ID NO: 1459890 - DNA, 15 bp, Homo sapiens
agccactggtctatt

SEQ ID NO: 1459891 - DNA, 15 bp, Homo sapiens
gccactggtctattt

SEQ ID NO: 1459892 - DNA, 15 bp, Homo sapiens
ccactggtctattta

SEQ ID NO: 1459893 - DNA, 15 bp, Homo sapiens
cactggtctatttat

SEQ ID NO: 1459894 - DNA, 15 bp, Homo sapiens
actggtctatttatg

SEQ ID NO: 1459895 - DNA, 15 bp, Homo sapiens
ctggtctatttatgt

SEQ ID NO: 1459896 - DNA, 15 bp, Homo sapiens
tggtctatttatgta

SEQ ID NO: 1459897 - DNA, 15 bp, Homo sapiens
ggtctatttatgtac

SEQ ID NO: 1459898 - DNA, 15 bp, Homo sapiens
gtctatttatgtacg

SEQ ID NO: 1459899 - DNA, 15 bp, Homo sapiens
tctatttatgtacgg

SEQ ID NO: 1459900 - DNA, 15 bp, Homo sapiens
ctatttatgtacgga

SEQ ID NO: 1459901 - DNA, 15 bp, Homo sapiens
tatttatgtacggac

SEQ ID NO: 1459902 - DNA, 15 bp, Homo sapiens
atttatgtacggacc

SEQ ID NO: 1459903 - DNA, 15 bp, Homo sapiens
tttatgtacggaccc

SEQ ID NO: 1459904 - DNA, 15 bp, Homo sapiens
ttatgtacggacccc

SEQ ID NO: 1459905 - DNA, 15 bp, Homo sapiens
tatgtacggacccca

SEQ ID NO: 1459906 - DNA, 15 bp, Homo sapiens
atgtacggaccccag

SEQ ID NO: 1459907 - DNA, 15 bp, Homo sapiens
tgtacggaccccagt

SEQ ID NO: 1459908 - DNA, 15 bp, Homo sapiens
gtacggaccccagtt

SEQ ID NO: 1459909 - DNA, 15 bp, Homo sapiens
tacggaccccagttt

SEQ ID NO: 1459910 - DNA, 15 bp, Homo sapiens
acggaccccagtttc

SEQ ID NO: 1459911 - DNA, 15 bp, Homo sapiens
cggaccccagtttct

SEQ ID NO: 1459912 - DNA, 15 bp, Homo sapiens
ggaccccagtttctt

SEQ ID NO: 1459913 - DNA, 15 bp, Homo sapiens
gaccccagtttcttc

SEQ ID NO: 1459914 - DNA, 15 bp, Homo sapiens
accccagtttcttca

SEQ ID NO: 1459915 - DNA, 15 bp, Homo sapiens
ccccagtttcttcag

SEQ ID NO: 1459916 - DNA, 15 bp, Homo sapiens
cccagtttcttcagc

SEQ ID NO: 1459917 - DNA, 15 bp, Homo sapiens
ccagtttcttcagct

SEQ ID NO: 1459918 - DNA, 15 bp, Homo sapiens
cagtttcttcagctg

SEQ ID NO: 1459919 - DNA, 15 bp, Homo sapiens
agtttcttcagctgt

SEQ ID NO: 1459920 - DNA, 15 bp, Homo sapiens
gtttcttcagctgta

SEQ ID NO: 1459921 - DNA, 15 bp, Homo sapiens
tttcttcagctgtaa

SEQ ID NO: 1459922 - DNA, 15 bp, Homo sapiens
ttcttcagctgtaaa

SEQ ID NO: 1459923 - DNA, 15 bp, Homo sapiens
tcttcagctgtaaaa

SEQ ID NO: 1459924 - DNA, 15 bp, Homo sapiens
cttcagctgtaaaat

SEQ ID NO: 1459925 - DNA, 15 bp, Homo sapiens
ttcagctgtaaaatg

SEQ ID NO: 1459926 - DNA, 15 bp, Homo sapiens
tcagctgtaaaatgt

SEQ ID NO: 1459927 - DNA, 15 bp, Homo sapiens
cagctgtaaaatgtg

SEQ ID NO: 1459928 - DNA, 15 bp, Homo sapiens
agctgtaaaatgtga

SEQ ID NO: 1459929 - DNA, 15 bp, Homo sapiens
gctgtaaaatgtgaa

SEQ ID NO: 1459930 - DNA, 15 bp, Homo sapiens
ctgtaaaatgtgaat

SEQ ID NO: 1459931 - DNA, 15 bp, Homo sapiens
tgtaaaatgtgaatc

SEQ ID NO: 1459932 - DNA, 15 bp, Homo sapiens
gtaaaatgtgaatca

SEQ ID NO: 1459933 - DNA, 15 bp, Homo sapiens
taaaatgtgaatcat

SEQ ID NO: 1459934 - DNA, 15 bp, Homo sapiens
aaaatgtgaatcatt

SEQ ID NO: 1459935 - DNA, 15 bp, Homo sapiens
aaatgtgaatcattc

SEQ ID NO: 1459936 - DNA, 15 bp, Homo sapiens
aatgtgaatcattct

SEQ ID NO: 1459937 - DNA, 15 bp, Homo sapiens
atgtgaatcattcta

SEQ ID NO: 1459938 - DNA, 15 bp, Homo sapiens
tgtgaatcattctag

SEQ ID NO: 1459939 - DNA, 15 bp, Homo sapiens
gtgaatcattctagc

SEQ ID NO: 1459940 - DNA, 15 bp, Homo sapiens
tgaatcattctagca

SEQ ID NO: 1459941 - DNA, 15 bp, Homo sapiens
gaatcattctagcac

SEQ ID NO: 1459942 - DNA, 15 bp, Homo sapiens
aatcattctagcacc

SEQ ID NO: 1459943 - DNA, 15 bp, Homo sapiens
atcattctagcacct

SEQ ID NO: 1459944 - DNA, 15 bp, Homo sapiens
tcattctagcacctg

SEQ ID NO: 1459945 - DNA, 15 bp, Homo sapiens
cattctagcacctgt

SEQ ID NO: 1459946 - DNA, 15 bp, Homo sapiens
attctagcacctgtt

SEQ ID NO: 1459947 - DNA, 15 bp, Homo sapiens
ttctagcacctgtta

SEQ ID NO: 1459948 - DNA, 15 bp, Homo sapiens
tctagcacctgttag

SEQ ID NO: 1459949 - DNA, 15 bp, Homo sapiens
ctagcacctgttagg

SEQ ID NO: 1459950 - DNA, 15 bp, Homo sapiens
tagcacctgttagga

SEQ ID NO: 1459951 - DNA, 15 bp, Homo sapiens
agcacctgttaggat

SEQ ID NO: 1459952 - DNA, 15 bp, Homo sapiens
gcacctgttaggatt

SEQ ID NO: 1459953 - DNA, 15 bp, Homo sapiens
cacctgttaggatta

SEQ ID NO: 1459954 - DNA, 15 bp, Homo sapiens
acctgttaggattaa

SEQ ID NO: 1459955 - DNA, 15 bp, Homo sapiens
cctgttaggattaat

SEQ ID NO: 1459956 - DNA, 15 bp, Homo sapiens
ctgttaggattaatt

SEQ ID NO: 1459957 - DNA, 15 bp, Homo sapiens
tgttaggattaatta

SEQ ID NO: 1459958 - DNA, 15 bp, Homo sapiens
gttaggattaattaa

SEQ ID NO: 1459959 - DNA, 15 bp, Homo sapiens
ttaggattaattaaa

SEQ ID NO: 1459960 - DNA, 15 bp, Homo sapiens
taggattaattaaat

SEQ ID NO: 1459961 - DNA, 15 bp, Homo sapiens
aggattaattaaatg

SEQ ID NO: 1459962 - DNA, 15 bp, Homo sapiens
ggattaattaaatga

SEQ ID NO: 1459963 - DNA, 15 bp, Homo sapiens
gattaattaaatgaa

SEQ ID NO: 1459964 - DNA, 15 bp, Homo sapiens
attaattaaatgaac

SEQ ID NO: 1459965 - DNA, 15 bp, Homo sapiens
ttaattaaatgaact

SEQ ID NO: 1459966 - DNA, 15 bp, Homo sapiens
taattaaatgaacta

SEQ ID NO: 1459967 - DNA, 15 bp, Homo sapiens
aattaaatgaactaa

SEQ ID NO: 1459968 - DNA, 15 bp, Homo sapiens
attaaatgaactaat

SEQ ID NO: 1459969 - DNA, 15 bp, Homo sapiens
ttaaatgaactaata

SEQ ID NO: 1459970 - DNA, 15 bp, Homo sapiens
taaatgaactaatac

SEQ ID NO: 1459971 - DNA, 15 bp, Homo sapiens
aaatgaactaataca

SEQ ID NO: 1459972 - DNA, 15 bp, Homo sapiens
aatgaactaatacag

SEQ ID NO: 1459973 - DNA, 15 bp, Homo sapiens
atgaactaatacagt

SEQ ID NO: 1459974 - DNA, 15 bp, Homo sapiens
tgaactaatacagta

SEQ ID NO: 1459975 - DNA, 15 bp, Homo sapiens
gaactaatacagtaa

SEQ ID NO: 1459976 - DNA, 15 bp, Homo sapiens
aactaatacagtaaa

SEQ ID NO: 1459977 - DNA, 15 bp, Homo sapiens
actaatacagtaaaa

SEQ ID NO: 1459978 - DNA, 15 bp, Homo sapiens
ctaatacagtaaaac

SEQ ID NO: 1459979 - DNA, 15 bp, Homo sapiens
taatacagtaaaacg

SEQ ID NO: 1459980 - DNA, 15 bp, Homo sapiens
aatacagtaaaacgt

SEQ ID NO: 1459981 - DNA, 15 bp, Homo sapiens
atacagtaaaacgtt

SEQ ID NO: 1459982 - DNA, 15 bp, Homo sapiens
tacagtaaaacgttg

SEQ ID NO: 1459983 - DNA, 15 bp, Homo sapiens
acagtaaaacgttga

SEQ ID NO: 1459984 - DNA, 15 bp, Homo sapiens
cagtaaaacgttgag

SEQ ID NO: 1459985 - DNA, 15 bp, Homo sapiens
agtaaaacgttgagt

SEQ ID NO: 1459986 - DNA, 15 bp, Homo sapiens
gtaaaacgttgagta

SEQ ID NO: 1459987 - DNA, 15 bp, Homo sapiens
taaaacgttgagtac

SEQ ID NO: 1459988 - DNA, 15 bp, Homo sapiens
aaaacgttgagtaca

SEQ ID NO: 1459989 - DNA, 15 bp, Homo sapiens
aaacgttgagtacag

SEQ ID NO: 1459990 - DNA, 15 bp, Homo sapiens
aacgttgagtacagt

SEQ ID NO: 1459991 - DNA, 15 bp, Homo sapiens
acgttgagtacagtt

SEQ ID NO: 1459992 - DNA, 15 bp, Homo sapiens
cgttgagtacagttc

SEQ ID NO: 1459993 - DNA, 15 bp, Homo sapiens
gttgagtacagttct

SEQ ID NO: 1459994 - DNA, 15 bp, Homo sapiens
ttgagtacagttctt

SEQ ID NO: 1459995 - DNA, 15 bp, Homo sapiens
tgagtacagttcttg

SEQ ID NO: 1459996 - DNA, 15 bp, Homo sapiens
gagtacagttcttgg

SEQ ID NO: 1459997 - DNA, 15 bp, Homo sapiens
agtacagttcttggc

SEQ ID NO: 1459998 - DNA, 15 bp, Homo sapiens
gtacagttcttggca

SEQ ID NO: 1459999 - DNA, 15 bp, Homo sapiens
tacagttcttggcac

SEQ ID NO: 1460000 - DNA, 15 bp, Homo sapiens
acagttcttggcaca

SEQ ID NO: 1460001 - DNA, 15 bp, Homo sapiens
cagttcttggcacat

SEQ ID NO: 1460002 - DNA, 15 bp, Homo sapiens
agttcttggcacatt

SEQ ID NO: 1460003 - DNA, 15 bp, Homo sapiens
gttcttggcacattt

SEQ ID NO: 1460004 - DNA, 15 bp, Homo sapiens
ttcttggcacattta

SEQ ID NO: 1460005 - DNA, 15 bp, Homo sapiens
tcttggcacatttaa

SEQ ID NO: 1460006 - DNA, 15 bp, Homo sapiens
cttggcacatttaaa

SEQ ID NO: 1460007 - DNA, 15 bp, Homo sapiens
ttggcacatttaaac

SEQ ID NO: 1460008 - DNA, 15 bp, Homo sapiens
tggcacatttaaaca

SEQ ID NO: 1460009 - DNA, 15 bp, Homo sapiens
ggcacatttaaacac

SEQ ID NO: 1460010 - DNA, 15 bp, Homo sapiens
gcacatttaaacact

SEQ ID NO: 1460011 - DNA, 15 bp, Homo sapiens
cacatttaaacacta

SEQ ID NO: 1460012 - DNA, 15 bp, Homo sapiens
acatttaaacactaa

SEQ ID NO: 1460013 - DNA, 15 bp, Homo sapiens
ttgcaatccactttg

SEQ ID NO: 1460014 - DNA, 15 bp, Homo sapiens
tgcaatccactttgc

SEQ ID NO: 1460015 - DNA, 15 bp, Homo sapiens
gcaatccactttgct

SEQ ID NO: 1460016 - DNA, 15 bp, Homo sapiens
caatccactttgctc

SEQ ID NO: 1460017 - DNA, 15 bp, Homo sapiens
aatccactttgctct

SEQ ID NO: 1460018 - DNA, 15 bp, Homo sapiens
atccactttgctctt

SEQ ID NO: 1460019 - DNA, 15 bp, Homo sapiens
tccactttgctctta

SEQ ID NO: 1460020 - DNA, 15 bp, Homo sapiens
ccactttgctcttat

SEQ ID NO: 1460021 - DNA, 15 bp, Homo sapiens
cactttgctcttata

SEQ ID NO: 1460022 - DNA, 15 bp, Homo sapiens
actttgctcttatag

SEQ ID NO: 1460023 - DNA, 15 bp, Homo sapiens
ctttgctcttataga

SEQ ID NO: 1460024 - DNA, 15 bp, Homo sapiens
tttgctcttatagat

SEQ ID NO: 1460025 - DNA, 15 bp, Homo sapiens
ttgctcttatagata

SEQ ID NO: 1460026 - DNA, 15 bp, Homo sapiens
tgctcttatagatac

SEQ ID NO: 1460027 - DNA, 15 bp, Homo sapiens
gctcttatagatact

SEQ ID NO: 1460028 - DNA, 15 bp, Homo sapiens
ctcttatagatactg

SEQ ID NO: 1460029 - DNA, 15 bp, Homo sapiens
tcttatagatactgc

SEQ ID NO: 1460030 - DNA, 15 bp, Homo sapiens
cttatagatactgcc

SEQ ID NO: 1460031 - DNA, 15 bp, Homo sapiens
ttatagatactgcct

SEQ ID NO: 1460032 - DNA, 15 bp, Homo sapiens
tatagatactgccta

SEQ ID NO: 1460033 - DNA, 15 bp, Homo sapiens
atagatactgcctag

SEQ ID NO: 1460034 - DNA, 15 bp, Homo sapiens
tagatactgcctaga

SEQ ID NO: 1460035 - DNA, 15 bp, Homo sapiens
agatactgcctagaa

SEQ ID NO: 1460036 - DNA, 15 bp, Homo sapiens
gatactgcctagaaa

SEQ ID NO: 1460037 - DNA, 15 bp, Homo sapiens
atactgcctagaaaa

SEQ ID NO: 1460038 - DNA, 15 bp, Homo sapiens
tactgcctagaaaaa

SEQ ID NO: 1460039 - DNA, 15 bp, Homo sapiens
actgcctagaaaaag

SEQ ID NO: 1460040 - DNA, 15 bp, Homo sapiens
ctgcctagaaaaagt

SEQ ID NO: 1460041 - DNA, 15 bp, Homo sapiens
tgcctagaaaaagtg

SEQ ID NO: 1460042 - DNA, 15 bp, Homo sapiens
gcctagaaaaagtgg

SEQ ID NO: 1460043 - DNA, 15 bp, Homo sapiens
cctagaaaaagtgga

SEQ ID NO: 1460044 - DNA, 15 bp, Homo sapiens
ctagaaaaagtggat

SEQ ID NO: 1460045 - DNA, 15 bp, Homo sapiens
tagaaaaagtggatc

SEQ ID NO: 1460046 - DNA, 15 bp, Homo sapiens
agaaaaagtggatca

SEQ ID NO: 1460047 - DNA, 15 bp, Homo sapiens
gaaaaagtggatcaa

SEQ ID NO: 1460048 - DNA, 15 bp, Homo sapiens
aaaaagtggatcaag

SEQ ID NO: 1460049 - DNA, 15 bp, Homo sapiens
aaaagtggatcaaga

SEQ ID NO: 1460050 - DNA, 15 bp, Homo sapiens
aaagtggatcaagaa

SEQ ID NO: 1460051 - DNA, 15 bp, Homo sapiens
aagtggatcaagaag

SEQ ID NO: 1460052 - DNA, 15 bp, Homo sapiens
agtggatcaagaaga

SEQ ID NO: 1460053 - DNA, 15 bp, Homo sapiens
gtggatcaagaagag

SEQ ID NO: 1460054 - DNA, 15 bp, Homo sapiens
tggatcaagaagagg

SEQ ID NO: 1460055 - DNA, 15 bp, Homo sapiens
ggatcaagaagaggt

SEQ ID NO: 1460056 - DNA, 15 bp, Homo sapiens
gatcaagaagaggtg

SEQ ID NO: 1460057 - DNA, 15 bp, Homo sapiens
atcaagaagaggtgt

SEQ ID NO: 1460058 - DNA, 15 bp, Homo sapiens
tcaagaagaggtgta

SEQ ID NO: 1460059 - DNA, 15 bp, Homo sapiens
caagaagaggtgtat

SEQ ID NO: 1460060 - DNA, 15 bp, Homo sapiens
aagaagaggtgtatt

SEQ ID NO: 1460061 - DNA, 15 bp, Homo sapiens
agaagaggtgtattc

SEQ ID NO: 1460062 - DNA, 15 bp, Homo sapiens
gaagaggtgtattct

SEQ ID NO: 1460063 - DNA, 15 bp, Homo sapiens
aagaggtgtattctc

SEQ ID NO: 1460064 - DNA, 15 bp, Homo sapiens
agaggtgtattctcg

SEQ ID NO: 1460065 - DNA, 15 bp, Homo sapiens
gaggtgtattctcgg

SEQ ID NO: 1460066 - DNA, 15 bp, Homo sapiens
aggtgtattctcggt

SEQ ID NO: 1460067 - DNA, 15 bp, Homo sapiens
ggtgtattctcggtg

SEQ ID NO: 1460068 - DNA, 15 bp, Homo sapiens
gtgtattctcggtgg

SEQ ID NO: 1460069 - DNA, 15 bp, Homo sapiens
tgtattctcggtggt

SEQ ID NO: 1460070 - DNA, 15 bp, Homo sapiens
gtattctcggtggtg

SEQ ID NO: 1460071 - DNA, 15 bp, Homo sapiens
tattctcggtggtgg

SEQ ID NO: 1460072 - DNA, 15 bp, Homo sapiens
attctcggtggtggt

SEQ ID NO: 1460073 - DNA, 15 bp, Homo sapiens
ttctcggtggtggtt

SEQ ID NO: 1460074 - DNA, 15 bp, Homo sapiens
tctcggtggtggttg

SEQ ID NO: 1460075 - DNA, 15 bp, Homo sapiens
ctcggtggtggttgg

SEQ ID NO: 1460076 - DNA, 15 bp, Homo sapiens
tcggtggtggttggg

SEQ ID NO: 1460077 - DNA, 15 bp, Homo sapiens
cggtggtggttggga

SEQ ID NO: 1460078 - DNA, 15 bp, Homo sapiens
ggtggtggttgggag

SEQ ID NO: 1460079 - DNA, 15 bp, Homo sapiens
gtggtggttgggagg

SEQ ID NO: 1460080 - DNA, 15 bp, Homo sapiens
tggtggttgggaggg

SEQ ID NO: 1460081 - DNA, 15 bp, Homo sapiens
ggtggttgggagggc

SEQ ID NO: 1460082 - DNA, 15 bp, Homo sapiens
gtggttgggagggcg

SEQ ID NO: 1460083 - DNA, 15 bp, Homo sapiens
tggttgggagggcgg

SEQ ID NO: 1460084 - DNA, 15 bp, Homo sapiens
ggttgggagggcggg

SEQ ID NO: 1460085 - DNA, 15 bp, Homo sapiens
gttgggagggcgggc

SEQ ID NO: 1460086 - DNA, 15 bp, Homo sapiens
ttgggagggcgggcg

SEQ ID NO: 1460087 - DNA, 15 bp, Homo sapiens
tgggagggcgggcgc

SEQ ID NO: 1460088 - DNA, 15 bp, Homo sapiens
gggagggcgggcgca

SEQ ID NO: 1460089 - DNA, 15 bp, Homo sapiens
ggagggcgggcgcaa

SEQ ID NO: 1460090 - DNA, 15 bp, Homo sapiens
gagggcgggcgcaat

SEQ ID NO: 1460091 - DNA, 15 bp, Homo sapiens
agggcgggcgcaata

SEQ ID NO: 1460092 - DNA, 15 bp, Homo sapiens
gggcgggcgcaatag

SEQ ID NO: 1460093 - DNA, 15 bp, Homo sapiens
ggcgggcgcaatagg

SEQ ID NO: 1460094 - DNA, 15 bp, Homo sapiens
gcgggcgcaatagga

SEQ ID NO: 1460095 - DNA, 15 bp, Homo sapiens
cgggcgcaataggac

SEQ ID NO: 1460096 - DNA, 15 bp, Homo sapiens
gggcgcaataggact

SEQ ID NO: 1460097 - DNA, 15 bp, Homo sapiens
ggcgcaataggactc

SEQ ID NO: 1460098 - DNA, 15 bp, Homo sapiens
gcgcaataggactca

SEQ ID NO: 1460099 - DNA, 15 bp, Homo sapiens
cgcaataggactcaa

SEQ ID NO: 1460100 - DNA, 15 bp, Homo sapiens
gcaataggactcaat

SEQ ID NO: 1460101 - DNA, 15 bp, Homo sapiens
caataggactcaata

SEQ ID NO: 1460102 - DNA, 15 bp, Homo sapiens
aataggactcaataa

SEQ ID NO: 1460103 - DNA, 15 bp, Homo sapiens
ataggactcaataag

SEQ ID NO: 1460104 - DNA, 15 bp, Homo sapiens
taggactcaataagg

SEQ ID NO: 1460105 - DNA, 15 bp, Homo sapiens
aggactcaataaggg

SEQ ID NO: 1460106 - DNA, 15 bp, Homo sapiens
ggactcaataagggg

SEQ ID NO: 1460107 - DNA, 15 bp, Homo sapiens
gactcaataagggga

SEQ ID NO: 1460108 - DNA, 15 bp, Homo sapiens
actcaataaggggaa

SEQ ID NO: 1460109 - DNA, 15 bp, Homo sapiens
ctcaataaggggaag

SEQ ID NO: 1460110 - DNA, 15 bp, Homo sapiens
tcaataaggggaagg

SEQ ID NO: 1460111 - DNA, 15 bp, Homo sapiens
caataaggggaagga

SEQ ID NO: 1460112 - DNA, 15 bp, Homo sapiens
aataaggggaaggag

SEQ ID NO: 1460113 - DNA, 15 bp, Homo sapiens
ataaggggaaggagt

SEQ ID NO: 1460114 - DNA, 15 bp, Homo sapiens
taaggggaaggagta

SEQ ID NO: 1460115 - DNA, 15 bp, Homo sapiens
aaggggaaggagtaa

SEQ ID NO: 1460116 - DNA, 15 bp, Homo sapiens
aggggaaggagtaac

SEQ ID NO: 1460117 - DNA, 15 bp, Homo sapiens
ggggaaggagtaacc

SEQ ID NO: 1460118 - DNA, 15 bp, Homo sapiens
gggaaggagtaaccc

SEQ ID NO: 1460119 - DNA, 15 bp, Homo sapiens
ggaaggagtaaccct

SEQ ID NO: 1460120 - DNA, 15 bp, Homo sapiens
gaaggagtaaccctt

SEQ ID NO: 1460121 - DNA, 15 bp, Homo sapiens
aaggagtaaccctta

SEQ ID NO: 1460122 - DNA, 15 bp, Homo sapiens
aggagtaacccttac

SEQ ID NO: 1460123 - DNA, 15 bp, Homo sapiens
ggagtaacccttacg

SEQ ID NO: 1460124 - DNA, 15 bp, Homo sapiens
gagtaacccttacga

SEQ ID NO: 1460125 - DNA, 15 bp, Homo sapiens
agtaacccttacgaa

SEQ ID NO: 1460126 - DNA, 15 bp, Homo sapiens
gtaacccttacgaaa

SEQ ID NO: 1460127 - DNA, 15 bp, Homo sapiens
taacccttacgaaag

SEQ ID NO: 1460128 - DNA, 15 bp, Homo sapiens
aacccttacgaaaga

SEQ ID NO: 1460129 - DNA, 15 bp, Homo sapiens
acccttacgaaagaa

SEQ ID NO: 1460130 - DNA, 15 bp, Homo sapiens
cccttacgaaagaaa

SEQ ID NO: 1460131 - DNA, 15 bp, Homo sapiens
ccttacgaaagaaaa

SEQ ID NO: 1460132 - DNA, 15 bp, Homo sapiens
cttacgaaagaaaaa

SEQ ID NO: 1460133 - DNA, 15 bp, Homo sapiens
ttacgaaagaaaaac

SEQ ID NO: 1460134 - DNA, 15 bp, Homo sapiens
tacgaaagaaaaaca

SEQ ID NO: 1460135 - DNA, 15 bp, Homo sapiens
acgaaagaaaaacat

SEQ ID NO: 1460136 - DNA, 15 bp, Homo sapiens
cgaaagaaaaacata

SEQ ID NO: 1460137 - DNA, 15 bp, Homo sapiens
gaaagaaaaacataa

SEQ ID NO: 1460138 - DNA, 15 bp, Homo sapiens
aaagaaaaacataag

SEQ ID NO: 1460139 - DNA, 15 bp, Homo sapiens
aagaaaaacataagg

SEQ ID NO: 1460140 - DNA, 15 bp, Homo sapiens
agaaaaacataaggg

SEQ ID NO: 1460141 - DNA, 15 bp, Homo sapiens
gaaaaacataagggc

SEQ ID NO: 1460142 - DNA, 15 bp, Homo sapiens
aaaaacataagggct

SEQ ID NO: 1460143 - DNA, 15 bp, Homo sapiens
aaaacataagggctc

SEQ ID NO: 1460144 - DNA, 15 bp, Homo sapiens
aaacataagggctca

SEQ ID NO: 1460145 - DNA, 15 bp, Homo sapiens
aacataagggctcaa

SEQ ID NO: 1460146 - DNA, 15 bp, Homo sapiens
acataagggctcaaa

SEQ ID NO: 1460147 - DNA, 15 bp, Homo sapiens
cataagggctcaaaa

SEQ ID NO: 1460148 - DNA, 15 bp, Homo sapiens
ataagggctcaaaaa

SEQ ID NO: 1460149 - DNA, 15 bp, Homo sapiens
taagggctcaaaaag

SEQ ID NO: 1460150 - DNA, 15 bp, Homo sapiens
aagggctcaaaaagt

SEQ ID NO: 1460151 - DNA, 15 bp, Homo sapiens
agggctcaaaaagta

SEQ ID NO: 1460152 - DNA, 15 bp, Homo sapiens
gggctcaaaaagtaa

SEQ ID NO: 1460153 - DNA, 15 bp, Homo sapiens
ggctcaaaaagtaaa

SEQ ID NO: 1460154 - DNA, 15 bp, Homo sapiens
gctcaaaaagtaaaa

SEQ ID NO: 1460155 - DNA, 15 bp, Homo sapiens
ctcaaaaagtaaaag

SEQ ID NO: 1460156 - DNA, 15 bp, Homo sapiens
tcaaaaagtaaaaga

SEQ ID NO: 1460157 - DNA, 15 bp, Homo sapiens
caaaaagtaaaagat

SEQ ID NO: 1460158 - DNA, 15 bp, Homo sapiens
aaaaagtaaaagata

SEQ ID NO: 1460159 - DNA, 15 bp, Homo sapiens
aaaagtaaaagataa

SEQ ID NO: 1460160 - DNA, 15 bp, Homo sapiens
aaagtaaaagataac

SEQ ID NO: 1460161 - DNA, 15 bp, Homo sapiens
aagtaaaagataact

SEQ ID NO: 1460162 - DNA, 15 bp, Homo sapiens
agtaaaagataactt

SEQ ID NO: 1460163 - DNA, 15 bp, Homo sapiens
gtaaaagataacttc

SEQ ID NO: 1460164 - DNA, 15 bp, Homo sapiens
taaaagataacttca

SEQ ID NO: 1460165 - DNA, 15 bp, Homo sapiens
aaaagataacttcac

SEQ ID NO: 1460166 - DNA, 15 bp, Homo sapiens
aaagataacttcacc

SEQ ID NO: 1460167 - DNA, 15 bp, Homo sapiens
aagataacttcaccg

SEQ ID NO: 1460168 - DNA, 15 bp, Homo sapiens
agataacttcaccga

SEQ ID NO: 1460169 - DNA, 15 bp, Homo sapiens
gataacttcaccgat

SEQ ID NO: 1460170 - DNA, 15 bp, Homo sapiens
ataacttcaccgata

SEQ ID NO: 1460171 - DNA, 15 bp, Homo sapiens
taacttcaccgatat

SEQ ID NO: 1460172 - DNA, 15 bp, Homo sapiens
aacttcaccgatatc

SEQ ID NO: 1460173 - DNA, 15 bp, Homo sapiens
acttcaccgatatca

SEQ ID NO: 1460174 - DNA, 15 bp, Homo sapiens
cttcaccgatatcaa

SEQ ID NO: 1460175 - DNA, 15 bp, Homo sapiens
ttcaccgatatcaag

SEQ ID NO: 1460176 - DNA, 15 bp, Homo sapiens
tcaccgatatcaagt

SEQ ID NO: 1460177 - DNA, 15 bp, Homo sapiens
caccgatatcaagtt

SEQ ID NO: 1460178 - DNA, 15 bp, Homo sapiens
accgatatcaagttt

SEQ ID NO: 1460179 - DNA, 15 bp, Homo sapiens
ccgatatcaagtttg

SEQ ID NO: 1460180 - DNA, 15 bp, Homo sapiens
cgatatcaagtttga

SEQ ID NO: 1460181 - DNA, 15 bp, Homo sapiens
gatatcaagtttgag

SEQ ID NO: 1460182 - DNA, 15 bp, Homo sapiens
atatcaagtttgagg

SEQ ID NO: 1460183 - DNA, 15 bp, Homo sapiens
tatcaagtttgagga

SEQ ID NO: 1460184 - DNA, 15 bp, Homo sapiens
atcaagtttgaggaa

SEQ ID NO: 1460185 - DNA, 15 bp, Homo sapiens
tcaagtttgaggaat

SEQ ID NO: 1460186 - DNA, 15 bp, Homo sapiens
caagtttgaggaatg

SEQ ID NO: 1460187 - DNA, 15 bp, Homo sapiens
aagtttgaggaatga

SEQ ID NO: 1460188 - DNA, 15 bp, Homo sapiens
agtttgaggaatgat

SEQ ID NO: 1460189 - DNA, 15 bp, Homo sapiens
gtttgaggaatgatt

SEQ ID NO: 1460190 - DNA, 15 bp, Homo sapiens
tttgaggaatgatta

SEQ ID NO: 1460191 - DNA, 15 bp, Homo sapiens
ttgaggaatgattac

SEQ ID NO: 1460192 - DNA, 15 bp, Homo sapiens
tgaggaatgattact

SEQ ID NO: 1460193 - DNA, 15 bp, Homo sapiens
gaggaatgattactt

SEQ ID NO: 1460194 - DNA, 15 bp, Homo sapiens
aggaatgattacttg

SEQ ID NO: 1460195 - DNA, 15 bp, Homo sapiens
ggaatgattacttgc

SEQ ID NO: 1460196 - DNA, 15 bp, Homo sapiens
gaatgattacttgca

SEQ ID NO: 1460197 - DNA, 15 bp, Homo sapiens
aatgattacttgcat

SEQ ID NO: 1460198 - DNA, 15 bp, Homo sapiens
atgattacttgcata

SEQ ID NO: 1460199 - DNA, 15 bp, Homo sapiens
tgattacttgcatat

SEQ ID NO: 1460200 - DNA, 15 bp, Homo sapiens
gattacttgcatatc

SEQ ID NO: 1460201 - DNA, 15 bp, Homo sapiens
attacttgcatatcg

SEQ ID NO: 1460202 - DNA, 15 bp, Homo sapiens
ttacttgcatatcga

SEQ ID NO: 1460203 - DNA, 15 bp, Homo sapiens
tacttgcatatcgat

SEQ ID NO: 1460204 - DNA, 15 bp, Homo sapiens
acttgcatatcgata

SEQ ID NO: 1460205 - DNA, 15 bp, Homo sapiens
cttgcatatcgataa

SEQ ID NO: 1460206 - DNA, 15 bp, Homo sapiens
ttgcatatcgataat

SEQ ID NO: 1460207 - DNA, 15 bp, Homo sapiens
tgcatatcgataatt

SEQ ID NO: 1460208 - DNA, 15 bp, Homo sapiens
gcatatcgataattt

SEQ ID NO: 1460209 - DNA, 15 bp, Homo sapiens
catatcgataatttg

SEQ ID NO: 1460210 - DNA, 15 bp, Homo sapiens
atatcgataatttgg

SEQ ID NO: 1460211 - DNA, 15 bp, Homo sapiens
tatcgataatttgga

SEQ ID NO: 1460212 - DNA, 15 bp, Homo sapiens
atcgataatttggaa

SEQ ID NO: 1460213 - DNA, 15 bp, Homo sapiens
tcgataatttggaac

SEQ ID NO: 1460214 - DNA, 15 bp, Homo sapiens
cgataatttggaact

SEQ ID NO: 1460215 - DNA, 15 bp, Homo sapiens
gataatttggaactt

SEQ ID NO: 1460216 - DNA, 15 bp, Homo sapiens
ataatttggaacttt

SEQ ID NO: 1460217 - DNA, 15 bp, Homo sapiens
taatttggaactttc

SEQ ID NO: 1460218 - DNA, 15 bp, Homo sapiens
aatttggaactttca

SEQ ID NO: 1460219 - DNA, 15 bp, Homo sapiens
atttggaactttcaa

SEQ ID NO: 1460220 - DNA, 15 bp, Homo sapiens
tttggaactttcaaa

SEQ ID NO: 1460221 - DNA, 15 bp, Homo sapiens
ttggaactttcaaag

SEQ ID NO: 1460222 - DNA, 15 bp, Homo sapiens
tggaactttcaaaga

SEQ ID NO: 1460223 - DNA, 15 bp, Homo sapiens
ggaactttcaaagaa

SEQ ID NO: 1460224 - DNA, 15 bp, Homo sapiens
gaactttcaaagaat

SEQ ID NO: 1460225 - DNA, 15 bp, Homo sapiens
aactttcaaagaata

SEQ ID NO: 1460226 - DNA, 15 bp, Homo sapiens
actttcaaagaataa

SEQ ID NO: 1460227 - DNA, 15 bp, Homo sapiens
ctttcaaagaataaa

SEQ ID NO: 1460228 - DNA, 15 bp, Homo sapiens
tttcaaagaataaat

SEQ ID NO: 1460229 - DNA, 15 bp, Homo sapiens
ttcaaagaataaata

SEQ ID NO: 1460230 - DNA, 15 bp, Homo sapiens
tcaaagaataaataa

SEQ ID NO: 1460231 - DNA, 15 bp, Homo sapiens
caaagaataaataat

SEQ ID NO: 1460232 - DNA, 15 bp, Homo sapiens
aaagaataaataatc

SEQ ID NO: 1460233 - DNA, 15 bp, Homo sapiens
aagaataaataatca

SEQ ID NO: 1460234 - DNA, 15 bp, Homo sapiens
agaataaataatcag

SEQ ID NO: 1460235 - DNA, 15 bp, Homo sapiens
gaataaataatcagc

SEQ ID NO: 1460236 - DNA, 15 bp, Homo sapiens
aataaataatcagct

SEQ ID NO: 1460237 - DNA, 15 bp, Homo sapiens
ataaataatcagctc

SEQ ID NO: 1460238 - DNA, 15 bp, Homo sapiens
taaataatcagctca

SEQ ID NO: 1460239 - DNA, 15 bp, Homo sapiens
aaataatcagctcaa

SEQ ID NO: 1460240 - DNA, 15 bp, Homo sapiens
aataatcagctcaaa

SEQ ID NO: 1460241 - DNA, 15 bp, Homo sapiens
ataatcagctcaaag

SEQ ID NO: 1460242 - DNA, 15 bp, Homo sapiens
taatcagctcaaaga

SEQ ID NO: 1460243 - DNA, 15 bp, Homo sapiens
aatcagctcaaagaa

SEQ ID NO: 1460244 - DNA, 15 bp, Homo sapiens
atcagctcaaagaag

SEQ ID NO: 1460245 - DNA, 15 bp, Homo sapiens
tcagctcaaagaagc

SEQ ID NO: 1460246 - DNA, 15 bp, Homo sapiens
cagctcaaagaagcc

SEQ ID NO: 1460247 - DNA, 15 bp, Homo sapiens
agctcaaagaagcct

SEQ ID NO: 1460248 - DNA, 15 bp, Homo sapiens
gctcaaagaagcctg

SEQ ID NO: 1460249 - DNA, 15 bp, Homo sapiens
ctcaaagaagcctgg

SEQ ID NO: 1460250 - DNA, 15 bp, Homo sapiens
tcaaagaagcctggg

SEQ ID NO: 1460251 - DNA, 15 bp, Homo sapiens
caaagaagcctgggt

SEQ ID NO: 1460252 - DNA, 15 bp, Homo sapiens
aaagaagcctgggtc

SEQ ID NO: 1460253 - DNA, 15 bp, Homo sapiens
aagaagcctgggtct

SEQ ID NO: 1460254 - DNA, 15 bp, Homo sapiens
agaagcctgggtctg

SEQ ID NO: 1460255 - DNA, 15 bp, Homo sapiens
gaagcctgggtctgc

SEQ ID NO: 1460256 - DNA, 15 bp, Homo sapiens
aagcctgggtctgca

SEQ ID NO: 1460257 - DNA, 15 bp, Homo sapiens
agcctgggtctgcat

SEQ ID NO: 1460258 - DNA, 15 bp, Homo sapiens
gcctgggtctgcatg

SEQ ID NO: 1460259 - DNA, 15 bp, Homo sapiens
cctgggtctgcatgt

SEQ ID NO: 1460260 - DNA, 15 bp, Homo sapiens
ctgggtctgcatgtc

SEQ ID NO: 1460261 - DNA, 15 bp, Homo sapiens
tgggtctgcatgtct

SEQ ID NO: 1460262 - DNA, 15 bp, Homo sapiens
gggtctgcatgtctt

SEQ ID NO: 1460263 - DNA, 15 bp, Homo sapiens
ggtctgcatgtcttc

SEQ ID NO: 1460264 - DNA, 15 bp, Homo sapiens
gtctgcatgtcttct

SEQ ID NO: 1460265 - DNA, 15 bp, Homo sapiens
tctgcatgtcttctt

SEQ ID NO: 1460266 - DNA, 15 bp, Homo sapiens
ctgcatgtcttcttt

SEQ ID NO: 1460267 - DNA, 15 bp, Homo sapiens
tgcatgtcttctttt

SEQ ID NO: 1460268 - DNA, 15 bp, Homo sapiens
gcatgtcttcttttg

SEQ ID NO: 1460269 - DNA, 15 bp, Homo sapiens
catgtcttcttttgg

SEQ ID NO: 1460270 - DNA, 15 bp, Homo sapiens
atgtcttcttttggc

SEQ ID NO: 1460271 - DNA, 15 bp, Homo sapiens
tgtcttcttttggct

SEQ ID NO: 1460272 - DNA, 15 bp, Homo sapiens
gtcttcttttggctt

SEQ ID NO: 1460273 - DNA, 15 bp, Homo sapiens
tcttcttttggcttc

SEQ ID NO: 1460274 - DNA, 15 bp, Homo sapiens
cttcttttggcttcg

SEQ ID NO: 1460275 - DNA, 15 bp, Homo sapiens
ttcttttggcttcgc

SEQ ID NO: 1460276 - DNA, 15 bp, Homo sapiens
tcttttggcttcgct

SEQ ID NO: 1460277 - DNA, 15 bp, Homo sapiens
cttttggcttcgctt

SEQ ID NO: 1460278 - DNA, 15 bp, Homo sapiens
ttttggcttcgctta

SEQ ID NO: 1460279 - DNA, 15 bp, Homo sapiens
tttggcttcgcttag

SEQ ID NO: 1460280 - DNA, 15 bp, Homo sapiens
ttggcttcgcttagt

SEQ ID NO: 1460281 - DNA, 15 bp, Homo sapiens
tggcttcgcttagtt

SEQ ID NO: 1460282 - DNA, 15 bp, Homo sapiens
ggcttcgcttagttg

SEQ ID NO: 1460283 - DNA, 15 bp, Homo sapiens
gcttcgcttagttgt

SEQ ID NO: 1460284 - DNA, 15 bp, Homo sapiens
cttcgcttagttgta

SEQ ID NO: 1460285 - DNA, 15 bp, Homo sapiens
ttcgcttagttgtat

SEQ ID NO: 1460286 - DNA, 15 bp, Homo sapiens
tcgcttagttgtatg

SEQ ID NO: 1460287 - DNA, 15 bp, Homo sapiens
cgcttagttgtatgt

SEQ ID NO: 1460288 - DNA, 15 bp, Homo sapiens
gcttagttgtatgtc

SEQ ID NO: 1460289 - DNA, 15 bp, Homo sapiens
cttagttgtatgtct

SEQ ID NO: 1460290 - DNA, 15 bp, Homo sapiens
ttagttgtatgtctt

SEQ ID NO: 1460291 - DNA, 15 bp, Homo sapiens
tagttgtatgtcttt

SEQ ID NO: 1460292 - DNA, 15 bp, Homo sapiens
agttgtatgtcttta

SEQ ID NO: 1460293 - DNA, 15 bp, Homo sapiens
gttgtatgtctttat

SEQ ID NO: 1460294 - DNA, 15 bp, Homo sapiens
ttgtatgtctttatt

SEQ ID NO: 1460295 - DNA, 15 bp, Homo sapiens
tgtatgtctttattt

SEQ ID NO: 1460296 - DNA, 15 bp, Homo sapiens
gtatgtctttattta

SEQ ID NO: 1460297 - DNA, 15 bp, Homo sapiens
tatgtctttatttat

SEQ ID NO: 1460298 - DNA, 15 bp, Homo sapiens
atgtctttatttatg

SEQ ID NO: 1460299 - DNA, 15 bp, Homo sapiens
tgtctttatttatga

SEQ ID NO: 1460300 - DNA, 15 bp, Homo sapiens
gtctttatttatgat

SEQ ID NO: 1460301 - DNA, 15 bp, Homo sapiens
tctttatttatgata

SEQ ID NO: 1460302 - DNA, 15 bp, Homo sapiens
ctttatttatgatat

SEQ ID NO: 1460303 - DNA, 15 bp, Homo sapiens
tttatttatgatatg

SEQ ID NO: 1460304 - DNA, 15 bp, Homo sapiens
ttatttatgatatgc

SEQ ID NO: 1460305 - DNA, 15 bp, Homo sapiens
tatttatgatatgcg

SEQ ID NO: 1460306 - DNA, 15 bp, Homo sapiens
atttatgatatgcgt

SEQ ID NO: 1460307 - DNA, 15 bp, Homo sapiens
tttatgatatgcgtt

SEQ ID NO: 1460308 - DNA, 15 bp, Homo sapiens
ttatgatatgcgttc

SEQ ID NO: 1460309 - DNA, 15 bp, Homo sapiens
tatgatatgcgttca

SEQ ID NO: 1460310 - DNA, 15 bp, Homo sapiens
atgatatgcgttcat

SEQ ID NO: 1460311 - DNA, 15 bp, Homo sapiens
tgatatgcgttcatg

SEQ ID NO: 1460312 - DNA, 15 bp, Homo sapiens
gatatgcgttcatga

SEQ ID NO: 1460313 - DNA, 15 bp, Homo sapiens
atatgcgttcatgat

SEQ ID NO: 1460314 - DNA, 15 bp, Homo sapiens
tatgcgttcatgatt

SEQ ID NO: 1460315 - DNA, 15 bp, Homo sapiens
atgcgttcatgattt

SEQ ID NO: 1460316 - DNA, 15 bp, Homo sapiens
tgcgttcatgatttc

SEQ ID NO: 1460317 - DNA, 15 bp, Homo sapiens
gcgttcatgatttct

SEQ ID NO: 1460318 - DNA, 15 bp, Homo sapiens
cgttcatgatttcta

SEQ ID NO: 1460319 - DNA, 15 bp, Homo sapiens
gttcatgatttctag

SEQ ID NO: 1460320 - DNA, 15 bp, Homo sapiens
ttcatgatttctagc

SEQ ID NO: 1460321 - DNA, 15 bp, Homo sapiens
tcatgatttctagcg

SEQ ID NO: 1460322 - DNA, 15 bp, Homo sapiens
catgatttctagcgt

SEQ ID NO: 1460323 - DNA, 15 bp, Homo sapiens
atgatttctagcgtt

SEQ ID NO: 1460324 - DNA, 15 bp, Homo sapiens
tgatttctagcgttc

SEQ ID NO: 1460325 - DNA, 15 bp, Homo sapiens
gatttctagcgttct

SEQ ID NO: 1460326 - DNA, 15 bp, Homo sapiens
atttctagcgttctt

SEQ ID NO: 1460327 - DNA, 15 bp, Homo sapiens
tttctagcgttcttt

SEQ ID NO: 1460328 - DNA, 15 bp, Homo sapiens
ttctagcgttcttta

SEQ ID NO: 1460329 - DNA, 15 bp, Homo sapiens
tctagcgttctttaa

SEQ ID NO: 1460330 - DNA, 15 bp, Homo sapiens
ctagcgttctttaaa

SEQ ID NO: 1460331 - DNA, 15 bp, Homo sapiens
tagcgttctttaaag

SEQ ID NO: 1460332 - DNA, 15 bp, Homo sapiens
agcgttctttaaagt

SEQ ID NO: 1460333 - DNA, 15 bp, Homo sapiens
gcgttctttaaagtt

SEQ ID NO: 1460334 - DNA, 15 bp, Homo sapiens
cgttctttaaagttt

SEQ ID NO: 1460335 - DNA, 15 bp, Homo sapiens
gttctttaaagtttc

SEQ ID NO: 1460336 - DNA, 15 bp, Homo sapiens
tctttaaagtttcct

SEQ ID NO: 1460337 - DNA, 15 bp, Homo sapiens
ctttaaagtttccta

SEQ ID NO: 1460338 - DNA, 15 bp, Homo sapiens
tttaaagtttcctag

SEQ ID NO: 1460339 - DNA, 15 bp, Homo sapiens
ttaaagtttcctagt

SEQ ID NO: 1460340 - DNA, 15 bp, Homo sapiens
taaagtttcctagta

SEQ ID NO: 1460341 - DNA, 15 bp, Homo sapiens
aaagtttcctagtaa

SEQ ID NO: 1460342 - DNA, 15 bp, Homo sapiens
aagtttcctagtaac

SEQ ID NO: 1460343 - DNA, 15 bp, Homo sapiens
agtttcctagtaaca

SEQ ID NO: 1460344 - DNA, 15 bp, Homo sapiens
gtttcctagtaacac

SEQ ID NO: 1460345 - DNA, 15 bp, Homo sapiens
tttcctagtaacacc

SEQ ID NO: 1460346 - DNA, 15 bp, Homo sapiens
ttcctagtaacaccg

SEQ ID NO: 1460347 - DNA, 15 bp, Homo sapiens
tcctagtaacaccga

SEQ ID NO: 1460348 - DNA, 15 bp, Homo sapiens
cctagtaacaccgag

SEQ ID NO: 1460349 - DNA, 15 bp, Homo sapiens
ctagtaacaccgagt

SEQ ID NO: 1460350 - DNA, 15 bp, Homo sapiens
tagtaacaccgagtg

SEQ ID NO: 1460351 - DNA, 15 bp, Homo sapiens
agtaacaccgagtgg

SEQ ID NO: 1460352 - DNA, 15 bp, Homo sapiens
gtaacaccgagtggt

SEQ ID NO: 1460353 - DNA, 15 bp, Homo sapiens
taacaccgagtggtt

SEQ ID NO: 1460354 - DNA, 15 bp, Homo sapiens
aacaccgagtggttt

SEQ ID NO: 1460355 - DNA, 15 bp, Homo sapiens
acaccgagtggtttc

SEQ ID NO: 1460356 - DNA, 15 bp, Homo sapiens
caccgagtggtttct

SEQ ID NO: 1460357 - DNA, 15 bp, Homo sapiens
accgagtggtttcta

SEQ ID NO: 1460358 - DNA, 15 bp, Homo sapiens
ccgagtggtttctag

SEQ ID NO: 1460359 - DNA, 15 bp, Homo sapiens
cgagtggtttctaga

SEQ ID NO: 1460360 - DNA, 15 bp, Homo sapiens
gagtggtttctagaa

SEQ ID NO: 1460361 - DNA, 15 bp, Homo sapiens
agtggtttctagaaa

SEQ ID NO: 1460362 - DNA, 15 bp, Homo sapiens
gtggtttctagaaaa

SEQ ID NO: 1460363 - DNA, 15 bp, Homo sapiens
tggtttctagaaaag

SEQ ID NO: 1460364 - DNA, 15 bp, Homo sapiens
ggtttctagaaaagc

SEQ ID NO: 1460365 - DNA, 15 bp, Homo sapiens
gtttctagaaaagca

SEQ ID NO: 1460366 - DNA, 15 bp, Homo sapiens
tttctagaaaagcag

SEQ ID NO: 1460367 - DNA, 15 bp, Homo sapiens
ttctagaaaagcagc

SEQ ID NO: 1460368 - DNA, 15 bp, Homo sapiens
tctagaaaagcagct

SEQ ID NO: 1460369 - DNA, 15 bp, Homo sapiens
ctagaaaagcagctg

SEQ ID NO: 1460370 - DNA, 15 bp, Homo sapiens
tagaaaagcagctgg

SEQ ID NO: 1460371 - DNA, 15 bp, Homo sapiens
agaaaagcagctggg

SEQ ID NO: 1460372 - DNA, 15 bp, Homo sapiens
gaaaagcagctgggg

SEQ ID NO: 1460373 - DNA, 15 bp, Homo sapiens
aaaagcagctggggg

SEQ ID NO: 1460374 - DNA, 15 bp, Homo sapiens
aaagcagctgggggc

SEQ ID NO: 1460375 - DNA, 15 bp, Homo sapiens
aagcagctgggggca

SEQ ID NO: 1460376 - DNA, 15 bp, Homo sapiens
agcagctgggggcaa

SEQ ID NO: 1460377 - DNA, 15 bp, Homo sapiens
gcagctgggggcaaa

SEQ ID NO: 1460378 - DNA, 15 bp, Homo sapiens
cagctgggggcaaac

SEQ ID NO: 1460379 - DNA, 15 bp, Homo sapiens
agctgggggcaaact

SEQ ID NO: 1460380 - DNA, 15 bp, Homo sapiens
gctgggggcaaactg

SEQ ID NO: 1460381 - DNA, 15 bp, Homo sapiens
ctgggggcaaactgg

SEQ ID NO: 1460382 - DNA, 15 bp, Homo sapiens
tgggggcaaactggt

SEQ ID NO: 1460383 - DNA, 15 bp, Homo sapiens
gggggcaaactggtg

SEQ ID NO: 1460384 - DNA, 15 bp, Homo sapiens
ggggcaaactggtgg

SEQ ID NO: 1460385 - DNA, 15 bp, Homo sapiens
gggcaaactggtggc

SEQ ID NO: 1460386 - DNA, 15 bp, Homo sapiens
ggcaaactggtggct

SEQ ID NO: 1460387 - DNA, 15 bp, Homo sapiens
gcaaactggtggctg

SEQ ID NO: 1460388 - DNA, 15 bp, Homo sapiens
caaactggtggctgt

SEQ ID NO: 1460389 - DNA, 15 bp, Homo sapiens
aaactggtggctgtc

SEQ ID NO: 1460390 - DNA, 15 bp, Homo sapiens
aactggtggctgtcc

SEQ ID NO: 1460391 - DNA, 15 bp, Homo sapiens
actggtggctgtcct

SEQ ID NO: 1460392 - DNA, 15 bp, Homo sapiens
ctggtggctgtcctg

SEQ ID NO: 1460393 - DNA, 15 bp, Homo sapiens
tggtggctgtcctgt

SEQ ID NO: 1460394 - DNA, 15 bp, Homo sapiens
ggtggctgtcctgta

SEQ ID NO: 1460395 - DNA, 15 bp, Homo sapiens
gtggctgtcctgtaa

SEQ ID NO: 1460396 - DNA, 15 bp, Homo sapiens
tggctgtcctgtaag

SEQ ID NO: 1460397 - DNA, 15 bp, Homo sapiens
ggctgtcctgtaaga

SEQ ID NO: 1460398 - DNA, 15 bp, Homo sapiens
gctgtcctgtaagaa

SEQ ID NO: 1460399 - DNA, 15 bp, Homo sapiens
ctgtcctgtaagaat

SEQ ID NO: 1460400 - DNA, 15 bp, Homo sapiens
tgtcctgtaagaata

SEQ ID NO: 1460401 - DNA, 15 bp, Homo sapiens
gtcctgtaagaataa

SEQ ID NO: 1460402 - DNA, 15 bp, Homo sapiens
tcctgtaagaataat

SEQ ID NO: 1460403 - DNA, 15 bp, Homo sapiens
cctgtaagaataatt

SEQ ID NO: 1460404 - DNA, 15 bp, Homo sapiens
ctgtaagaataattc

SEQ ID NO: 1460405 - DNA, 15 bp, Homo sapiens
tgtaagaataattca

SEQ ID NO: 1460406 - DNA, 15 bp, Homo sapiens
gtaagaataattcat

SEQ ID NO: 1460407 - DNA, 15 bp, Homo sapiens
taagaataattcatc

SEQ ID NO: 1460408 - DNA, 15 bp, Homo sapiens
aagaataattcatca

SEQ ID NO: 1460409 - DNA, 15 bp, Homo sapiens
agaataattcatcag

SEQ ID NO: 1460410 - DNA, 15 bp, Homo sapiens
gaataattcatcaga

SEQ ID NO: 1460411 - DNA, 15 bp, Homo sapiens
aataattcatcagac

SEQ ID NO: 1460412 - DNA, 15 bp, Homo sapiens
ataattcatcagaca

SEQ ID NO: 1460413 - DNA, 15 bp, Homo sapiens
taattcatcagacag

SEQ ID NO: 1460414 - DNA, 15 bp, Homo sapiens
aattcatcagacagc

SEQ ID NO: 1460415 - DNA, 15 bp, Homo sapiens
attcatcagacagca

SEQ ID NO: 1460416 - DNA, 15 bp, Homo sapiens
ttcatcagacagcag

SEQ ID NO: 1460417 - DNA, 15 bp, Homo sapiens
tcatcagacagcagt

SEQ ID NO: 1460418 - DNA, 15 bp, Homo sapiens
catcagacagcagtt

SEQ ID NO: 1460419 - DNA, 15 bp, Homo sapiens
atcagacagcagttg

SEQ ID NO: 1460420 - DNA, 15 bp, Homo sapiens
tcagacagcagttgg

SEQ ID NO: 1460421 - DNA, 15 bp, Homo sapiens
cagacagcagttgga

SEQ ID NO: 1460422 - DNA, 15 bp, Homo sapiens
agacagcagttggaa

SEQ ID NO: 1460423 - DNA, 15 bp, Homo sapiens
gacagcagttggaat

SEQ ID NO: 1460424 - DNA, 15 bp, Homo sapiens
acagcagttggaata

SEQ ID NO: 1460425 - DNA, 15 bp, Homo sapiens
cagcagttggaatat

SEQ ID NO: 1460426 - DNA, 15 bp, Homo sapiens
agcagttggaatatt

SEQ ID NO: 1460427 - DNA, 15 bp, Homo sapiens
gcagttggaatattg

SEQ ID NO: 1460428 - DNA, 15 bp, Homo sapiens
cagttggaatattga

SEQ ID NO: 1460429 - DNA, 15 bp, Homo sapiens
agttggaatattgat

SEQ ID NO: 1460430 - DNA, 15 bp, Homo sapiens
gttggaatattgata

SEQ ID NO: 1460431 - DNA, 15 bp, Homo sapiens
ttggaatattgataa

SEQ ID NO: 1460432 - DNA, 15 bp, Homo sapiens
tggaatattgataag

SEQ ID NO: 1460433 - DNA, 15 bp, Homo sapiens
ggaatattgataaga

SEQ ID NO: 1460434 - DNA, 15 bp, Homo sapiens
gaatattgataagaa

SEQ ID NO: 1460435 - DNA, 15 bp, Homo sapiens
aatattgataagaaa

SEQ ID NO: 1460436 - DNA, 15 bp, Homo sapiens
atattgataagaaag

SEQ ID NO: 1460437 - DNA, 15 bp, Homo sapiens
tattgataagaaagc

SEQ ID NO: 1460438 - DNA, 15 bp, Homo sapiens
attgataagaaagcg

SEQ ID NO: 1460439 - DNA, 15 bp, Homo sapiens
ttgataagaaagcgg

SEQ ID NO: 1460440 - DNA, 15 bp, Homo sapiens
tgataagaaagcgga

SEQ ID NO: 1460441 - DNA, 15 bp, Homo sapiens
gataagaaagcggaa

SEQ ID NO: 1460442 - DNA, 15 bp, Homo sapiens
ataagaaagcggaaa

SEQ ID NO: 1460443 - DNA, 15 bp, Homo sapiens
taagaaagcggaaat

SEQ ID NO: 1460444 - DNA, 15 bp, Homo sapiens
aagaaagcggaaatc

SEQ ID NO: 1460445 - DNA, 15 bp, Homo sapiens
agaaagcggaaatca

SEQ ID NO: 1460446 - DNA, 15 bp, Homo sapiens
gaaagcggaaatcaa

SEQ ID NO: 1460447 - DNA, 15 bp, Homo sapiens
aaagcggaaatcaaa

SEQ ID NO: 1460448 - DNA, 15 bp, Homo sapiens
aagcggaaatcaaat

SEQ ID NO: 1460449 - DNA, 15 bp, Homo sapiens
agcggaaatcaaatt

SEQ ID NO: 1460450 - DNA, 15 bp, Homo sapiens
gcggaaatcaaatta

SEQ ID NO: 1460451 - DNA, 15 bp, Homo sapiens
cggaaatcaaattac

SEQ ID NO: 1460452 - DNA, 15 bp, Homo sapiens
aaatcaaattacaag

SEQ ID NO: 1460453 - DNA, 15 bp, Homo sapiens
aatcaaattacaaga

SEQ ID NO: 1460454 - DNA, 15 bp, Homo sapiens
atcaaattacaagaa

SEQ ID NO: 1460455 - DNA, 15 bp, Homo sapiens
tcaaattacaagaaa

SEQ ID NO: 1460456 - DNA, 15 bp, Homo sapiens
caaattacaagaaag

SEQ ID NO: 1460457 - DNA, 15 bp, Homo sapiens
aaattacaagaaagg

SEQ ID NO: 1460458 - DNA, 15 bp, Homo sapiens
aattacaagaaaggg

SEQ ID NO: 1460459 - DNA, 15 bp, Homo sapiens
attacaagaaaggga

SEQ ID NO: 1460460 - DNA, 15 bp, Homo sapiens
ttacaagaaagggaa

SEQ ID NO: 1460461 - DNA, 15 bp, Homo sapiens
tacaagaaagggaaa

SEQ ID NO: 1460462 - DNA, 15 bp, Homo sapiens
acaagaaagggaaag

SEQ ID NO: 1460463 - DNA, 15 bp, Homo sapiens
caagaaagggaaaga

SEQ ID NO: 1460464 - DNA, 15 bp, Homo sapiens
aagaaagggaaagag

SEQ ID NO: 1460465 - DNA, 15 bp, Homo sapiens
agaaagggaaagaga

SEQ ID NO: 1460466 - DNA, 15 bp, Homo sapiens
gaaagggaaagagaa

SEQ ID NO: 1460467 - DNA, 15 bp, Homo sapiens
aaagggaaagagaaa

SEQ ID NO: 1460468 - DNA, 15 bp, Homo sapiens
aagggaaagagaaag

SEQ ID NO: 1460469 - DNA, 15 bp, Homo sapiens
agggaaagagaaagg

SEQ ID NO: 1460470 - DNA, 15 bp, Homo sapiens
gggaaagagaaagga

SEQ ID NO: 1460471 - DNA, 15 bp, Homo sapiens
ggaaagagaaaggaa

SEQ ID NO: 1460472 - DNA, 15 bp, Homo sapiens
gaaagagaaaggaag

SEQ ID NO: 1460473 - DNA, 15 bp, Homo sapiens
aaagagaaaggaaga

SEQ ID NO: 1460474 - DNA, 15 bp, Homo sapiens
aagagaaaggaagag

SEQ ID NO: 1460475 - DNA, 15 bp, Homo sapiens
agagaaaggaagagg

SEQ ID NO: 1460476 - DNA, 15 bp, Homo sapiens
gagaaaggaagaggg

SEQ ID NO: 1460477 - DNA, 15 bp, Homo sapiens
agaaaggaagaggga

SEQ ID NO: 1460478 - DNA, 15 bp, Homo sapiens
gaaaggaagagggag

SEQ ID NO: 1460479 - DNA, 15 bp, Homo sapiens
aaaggaagagggagt

SEQ ID NO: 1460480 - DNA, 15 bp, Homo sapiens
aaggaagagggagtg

SEQ ID NO: 1460481 - DNA, 15 bp, Homo sapiens
aggaagagggagtgg

SEQ ID NO: 1460482 - DNA, 15 bp, Homo sapiens
ggaagagggagtggg

SEQ ID NO: 1460483 - DNA, 15 bp, Homo sapiens
gaagagggagtggga

SEQ ID NO: 1460484 - DNA, 15 bp, Homo sapiens
aagagggagtgggac

SEQ ID NO: 1460485 - DNA, 15 bp, Homo sapiens
agagggagtgggacc

SEQ ID NO: 1460486 - DNA, 15 bp, Homo sapiens
gagggagtgggaccc

SEQ ID NO: 1460487 - DNA, 15 bp, Homo sapiens
agggagtgggaccca

SEQ ID NO: 1460488 - DNA, 15 bp, Homo sapiens
gggagtgggacccag

SEQ ID NO: 1460489 - DNA, 15 bp, Homo sapiens
ggagtgggacccaga

SEQ ID NO: 1460490 - DNA, 15 bp, Homo sapiens
gagtgggacccagag

SEQ ID NO: 1460491 - DNA, 15 bp, Homo sapiens
agtgggacccagaga

SEQ ID NO: 1460492 - DNA, 15 bp, Homo sapiens
gtgggacccagagag

SEQ ID NO: 1460493 - DNA, 15 bp, Homo sapiens
tgggacccagagagc

SEQ ID NO: 1460494 - DNA, 15 bp, Homo sapiens
gggacccagagagct

SEQ ID NO: 1460495 - DNA, 15 bp, Homo sapiens
ggacccagagagctg

SEQ ID NO: 1460496 - DNA, 15 bp, Homo sapiens
gacccagagagctgg

SEQ ID NO: 1460497 - DNA, 15 bp, Homo sapiens
acccagagagctggc

SEQ ID NO: 1460498 - DNA, 15 bp, Homo sapiens
cccagagagctggcg

SEQ ID NO: 1460499 - DNA, 15 bp, Homo sapiens
ccagagagctggcgg

SEQ ID NO: 1460500 - DNA, 15 bp, Homo sapiens
cagagagctggcggg

SEQ ID NO: 1460501 - DNA, 15 bp, Homo sapiens
agagagctggcggga

SEQ ID NO: 1460502 - DNA, 15 bp, Homo sapiens
gagagctggcgggag

SEQ ID NO: 1460503 - DNA, 15 bp, Homo sapiens
agagctggcgggagg

SEQ ID NO: 1460504 - DNA, 15 bp, Homo sapiens
gagctggcgggaggc

SEQ ID NO: 1460505 - DNA, 15 bp, Homo sapiens
agctggcgggaggca

SEQ ID NO: 1460506 - DNA, 15 bp, Homo sapiens
gctggcgggaggcag

SEQ ID NO: 1460507 - DNA, 15 bp, Homo sapiens
ctggcgggaggcagc

SEQ ID NO: 1460508 - DNA, 15 bp, Homo sapiens
tggcgggaggcagcg

SEQ ID NO: 1460509 - DNA, 15 bp, Homo sapiens
ggcgggaggcagcga

SEQ ID NO: 1460510 - DNA, 15 bp, Homo sapiens
gcgggaggcagcgaa

SEQ ID NO: 1460511 - DNA, 15 bp, Homo sapiens
cgggaggcagcgaag

SEQ ID NO: 1460512 - DNA, 15 bp, Homo sapiens
gggaggcagcgaagg

SEQ ID NO: 1460513 - DNA, 15 bp, Homo sapiens
ggaggcagcgaaggg

SEQ ID NO: 1460514 - DNA, 15 bp, Homo sapiens
gaggcagcgaagggg

SEQ ID NO: 1460515 - DNA, 15 bp, Homo sapiens
aggcagcgaagggga

SEQ ID NO: 1460516 - DNA, 15 bp, Homo sapiens
ggcagcgaaggggaa

SEQ ID NO: 1460517 - DNA, 15 bp, Homo sapiens
gcagcgaaggggaaa

SEQ ID NO: 1460518 - DNA, 15 bp, Homo sapiens
cagcgaaggggaaag

SEQ ID NO: 1460519 - DNA, 15 bp, Homo sapiens
agcgaaggggaaagc

SEQ ID NO: 1460520 - DNA, 15 bp, Homo sapiens
gcgaaggggaaagct

SEQ ID NO: 1460521 - DNA, 15 bp, Homo sapiens
cgaaggggaaagctt

SEQ ID NO: 1460522 - DNA, 15 bp, Homo sapiens
gaaggggaaagcttc

SEQ ID NO: 1460523 - DNA, 15 bp, Homo sapiens
aaggggaaagcttca

SEQ ID NO: 1460524 - DNA, 15 bp, Homo sapiens
aggggaaagcttcag

SEQ ID NO: 1460525 - DNA, 15 bp, Homo sapiens
ggggaaagcttcagt

SEQ ID NO: 1460526 - DNA, 15 bp, Homo sapiens
gggaaagcttcagtg

SEQ ID NO: 1460527 - DNA, 15 bp, Homo sapiens
ggaaagcttcagtgc

SEQ ID NO: 1460528 - DNA, 15 bp, Homo sapiens
gaaagcttcagtgca

SEQ ID NO: 1460529 - DNA, 15 bp, Homo sapiens
aaagcttcagtgcac

SEQ ID NO: 1460530 - DNA, 15 bp, Homo sapiens
aagcttcagtgcacg

SEQ ID NO: 1460531 - DNA, 15 bp, Homo sapiens
agcttcagtgcacgc

SEQ ID NO: 1460532 - DNA, 15 bp, Homo sapiens
gcttcagtgcacgca

SEQ ID NO: 1460533 - DNA, 15 bp, Homo sapiens
cttcagtgcacgcat

SEQ ID NO: 1460534 - DNA, 15 bp, Homo sapiens
ttcagtgcacgcata

SEQ ID NO: 1460535 - DNA, 15 bp, Homo sapiens
tcagtgcacgcatag

SEQ ID NO: 1460536 - DNA, 15 bp, Homo sapiens
cagtgcacgcatagc

SEQ ID NO: 1460537 - DNA, 15 bp, Homo sapiens
agtgcacgcatagct

SEQ ID NO: 1460538 - DNA, 15 bp, Homo sapiens
gtgcacgcatagctc

SEQ ID NO: 1460539 - DNA, 15 bp, Homo sapiens
tgcacgcatagctcc

SEQ ID NO: 1460540 - DNA, 15 bp, Homo sapiens
gcacgcatagctcct

SEQ ID NO: 1460541 - DNA, 15 bp, Homo sapiens
cacgcatagctcctg

SEQ ID NO: 1460542 - DNA, 15 bp, Homo sapiens
acgcatagctcctgc

SEQ ID NO: 1460543 - DNA, 15 bp, Homo sapiens
cgcatagctcctgca

SEQ ID NO: 1460544 - DNA, 15 bp, Homo sapiens
gcatagctcctgcac

SEQ ID NO: 1460545 - DNA, 15 bp, Homo sapiens
catagctcctgcaca

SEQ ID NO: 1460546 - DNA, 15 bp, Homo sapiens
atagctcctgcacag

SEQ ID NO: 1460547 - DNA, 15 bp, Homo sapiens
tagctcctgcacagc

SEQ ID NO: 1460548 - DNA, 15 bp, Homo sapiens
agctcctgcacagcg

SEQ ID NO: 1460549 - DNA, 15 bp, Homo sapiens
gctcctgcacagcgg

SEQ ID NO: 1460550 - DNA, 15 bp, Homo sapiens
ctcctgcacagcggc

SEQ ID NO: 1460551 - DNA, 15 bp, Homo sapiens
tcctgcacagcggct

SEQ ID NO: 1460552 - DNA, 15 bp, Homo sapiens
cctgcacagcggctc

SEQ ID NO: 1460553 - DNA, 15 bp, Homo sapiens
ctgcacagcggctcc

SEQ ID NO: 1460554 - DNA, 15 bp, Homo sapiens
tgcacagcggctcct

SEQ ID NO: 1460555 - DNA, 15 bp, Homo sapiens
gcacagcggctcctg

SEQ ID NO: 1460556 - DNA, 15 bp, Homo sapiens
cacagcggctcctgc

SEQ ID NO: 1460557 - DNA, 15 bp, Homo sapiens
acagcggctcctgca

SEQ ID NO: 1460558 - DNA, 15 bp, Homo sapiens
cagcggctcctgcag

SEQ ID NO: 1460559 - DNA, 15 bp, Homo sapiens
agcggctcctgcagc

SEQ ID NO: 1460560 - DNA, 15 bp, Homo sapiens
gcggctcctgcagcc

SEQ ID NO: 1460561 - DNA, 15 bp, Homo sapiens
cggctcctgcagccc

SEQ ID NO: 1460562 - DNA, 15 bp, Homo sapiens
ggctcctgcagcccc

SEQ ID NO: 1460563 - DNA, 15 bp, Homo sapiens
gctcctgcagccccc

SEQ ID NO: 1460564 - DNA, 15 bp, Homo sapiens
ctcctgcagcccccc

SEQ ID NO: 1460565 - DNA, 15 bp, Homo sapiens
tcctgcagcccccca

SEQ ID NO: 1460566 - DNA, 15 bp, Homo sapiens
cctgcagccccccag

SEQ ID NO: 1460567 - DNA, 15 bp, Homo sapiens
ctgcagccccccagg

SEQ ID NO: 1460568 - DNA, 15 bp, Homo sapiens
tgcagccccccagga

SEQ ID NO: 1460569 - DNA, 15 bp, Homo sapiens
gcagccccccaggat

SEQ ID NO: 1460570 - DNA, 15 bp, Homo sapiens
cagccccccaggatg

SEQ ID NO: 1460571 - DNA, 15 bp, Homo sapiens
agccccccaggatgc

SEQ ID NO: 1460572 - DNA, 15 bp, Homo sapiens
gccccccaggatgcg

SEQ ID NO: 1460573 - DNA, 15 bp, Homo sapiens
ccccccaggatgcgc

SEQ ID NO: 1460574 - DNA, 15 bp, Homo sapiens
cccccaggatgcgcc

SEQ ID NO: 1460575 - DNA, 15 bp, Homo sapiens
ccccaggatgcgcct

SEQ ID NO: 1460576 - DNA, 15 bp, Homo sapiens
cccaggatgcgcctg

SEQ ID NO: 1460577 - DNA, 15 bp, Homo sapiens
ccaggatgcgcctga

SEQ ID NO: 1460578 - DNA, 15 bp, Homo sapiens
caggatgcgcctgag

SEQ ID NO: 1460579 - DNA, 15 bp, Homo sapiens
aggatgcgcctgagc

SEQ ID NO: 1460580 - DNA, 15 bp, Homo sapiens
ggatgcgcctgagct

SEQ ID NO: 1460581 - DNA, 15 bp, Homo sapiens
gatgcgcctgagctg

SEQ ID NO: 1460582 - DNA, 15 bp, Homo sapiens
atgcgcctgagctga

SEQ ID NO: 1460583 - DNA, 15 bp, Homo sapiens
tgcgcctgagctgag

SEQ ID NO: 1460584 - DNA, 15 bp, Homo sapiens
gcgcctgagctgagg

SEQ ID NO: 1460585 - DNA, 15 bp, Homo sapiens
cgcctgagctgaggc

SEQ ID NO: 1460586 - DNA, 15 bp, Homo sapiens
gcctgagctgaggct

SEQ ID NO: 1460587 - DNA, 15 bp, Homo sapiens
cctgagctgaggctg

SEQ ID NO: 1460588 - DNA, 15 bp, Homo sapiens
ctgagctgaggctgc

SEQ ID NO: 1460589 - DNA, 15 bp, Homo sapiens
tgagctgaggctgct

SEQ ID NO: 1460590 - DNA, 15 bp, Homo sapiens
gagctgaggctgctt

SEQ ID NO: 1460591 - DNA, 15 bp, Homo sapiens
agctgaggctgcttg

SEQ ID NO: 1460592 - DNA, 15 bp, Homo sapiens
gctgaggctgcttgt

SEQ ID NO: 1460593 - DNA, 15 bp, Homo sapiens
ctgaggctgcttgtg

SEQ ID NO: 1460594 - DNA, 15 bp, Homo sapiens
tgaggctgcttgtgg

SEQ ID NO: 1460595 - DNA, 15 bp, Homo sapiens
gaggctgcttgtggg

SEQ ID NO: 1460596 - DNA, 15 bp, Homo sapiens
aggctgcttgtgggc

SEQ ID NO: 1460597 - DNA, 15 bp, Homo sapiens
ggctgcttgtgggca

SEQ ID NO: 1460598 - DNA, 15 bp, Homo sapiens
gctgcttgtgggcag

SEQ ID NO: 1460599 - DNA, 15 bp, Homo sapiens
ctgcttgtgggcagg

SEQ ID NO: 1460600 - DNA, 15 bp, Homo sapiens
tgcttgtgggcaggc

SEQ ID NO: 1460601 - DNA, 15 bp, Homo sapiens
gcttgtgggcaggcc

SEQ ID NO: 1460602 - DNA, 15 bp, Homo sapiens
cttgtgggcaggccc

SEQ ID NO: 1460603 - DNA, 15 bp, Homo sapiens
ttgtgggcaggccct

SEQ ID NO: 1460604 - DNA, 15 bp, Homo sapiens
tgtgggcaggcccta

SEQ ID NO: 1460605 - DNA, 15 bp, Homo sapiens
gtgggcaggccctag

SEQ ID NO: 1460606 - DNA, 15 bp, Homo sapiens
tgggcaggccctaga

SEQ ID NO: 1460607 - DNA, 15 bp, Homo sapiens
gggcaggccctagag

SEQ ID NO: 1460608 - DNA, 15 bp, Homo sapiens
ggcaggccctagaga

SEQ ID NO: 1460609 - DNA, 15 bp, Homo sapiens
gcaggccctagagag

SEQ ID NO: 1460610 - DNA, 15 bp, Homo sapiens
caggccctagagaga

SEQ ID NO: 1460611 - DNA, 15 bp, Homo sapiens
aggccctagagagag

SEQ ID NO: 1460612 - DNA, 15 bp, Homo sapiens
ggccctagagagagg

SEQ ID NO: 1460613 - DNA, 15 bp, Homo sapiens
gccctagagagaggc

SEQ ID NO: 1460614 - DNA, 15 bp, Homo sapiens
ccctagagagaggca

SEQ ID NO: 1460615 - DNA, 15 bp, Homo sapiens
cctagagagaggcaa

SEQ ID NO: 1460616 - DNA, 15 bp, Homo sapiens
ctagagagaggcaaa

SEQ ID NO: 1460617 - DNA, 15 bp, Homo sapiens
tagagagaggcaaac

SEQ ID NO: 1460618 - DNA, 15 bp, Homo sapiens
agagagaggcaaact

SEQ ID NO: 1460619 - DNA, 15 bp, Homo sapiens
gagagaggcaaactt

SEQ ID NO: 1460620 - DNA, 15 bp, Homo sapiens
agagaggcaaacttt

SEQ ID NO: 1460621 - DNA, 15 bp, Homo sapiens
gagaggcaaactttg

SEQ ID NO: 1460622 - DNA, 15 bp, Homo sapiens
agaggcaaactttga

SEQ ID NO: 1460623 - DNA, 15 bp, Homo sapiens
gaggcaaactttgac

SEQ ID NO: 1460624 - DNA, 15 bp, Homo sapiens
aggcaaactttgact

SEQ ID NO: 1460625 - DNA, 15 bp, Homo sapiens
ggcaaactttgactc

SEQ ID NO: 1460626 - DNA, 15 bp, Homo sapiens
gcaaactttgactcc

SEQ ID NO: 1460627 - DNA, 15 bp, Homo sapiens
caaactttgactcca

SEQ ID NO: 1460628 - DNA, 15 bp, Homo sapiens
aaactttgactccag

SEQ ID NO: 1460629 - DNA, 15 bp, Homo sapiens
aactttgactccagg

SEQ ID NO: 1460630 - DNA, 15 bp, Homo sapiens
actttgactccaggc

SEQ ID NO: 1460631 - DNA, 15 bp, Homo sapiens
ctttgactccaggca

SEQ ID NO: 1460632 - DNA, 15 bp, Homo sapiens
tttgactccaggcac

SEQ ID NO: 1460633 - DNA, 15 bp, Homo sapiens
ttgactccaggcacg

SEQ ID NO: 1460634 - DNA, 15 bp, Homo sapiens
tgactccaggcacgc

SEQ ID NO: 1460635 - DNA, 15 bp, Homo sapiens
gactccaggcacgca

SEQ ID NO: 1460636 - DNA, 15 bp, Homo sapiens
actccaggcacgcag

SEQ ID NO: 1460637 - DNA, 15 bp, Homo sapiens
ctccaggcacgcagc

SEQ ID NO: 1460638 - DNA, 15 bp, Homo sapiens
tccaggcacgcagca

SEQ ID NO: 1460639 - DNA, 15 bp, Homo sapiens
ccaggcacgcagcag

SEQ ID NO: 1460640 - DNA, 15 bp, Homo sapiens
caggcacgcagcagg

SEQ ID NO: 1460641 - DNA, 15 bp, Homo sapiens
aggcacgcagcaggt

SEQ ID NO: 1460642 - DNA, 15 bp, Homo sapiens
ggcacgcagcaggtt

SEQ ID NO: 1460643 - DNA, 15 bp, Homo sapiens
gcacgcagcaggttt

SEQ ID NO: 1460644 - DNA, 15 bp, Homo sapiens
cacgcagcaggttta

SEQ ID NO: 1460645 - DNA, 15 bp, Homo sapiens
acgcagcaggtttaa

SEQ ID NO: 1460646 - DNA, 15 bp, Homo sapiens
cgcagcaggtttaac

SEQ ID NO: 1460647 - DNA, 15 bp, Homo sapiens
gcagcaggtttaact

SEQ ID NO: 1460648 - DNA, 15 bp, Homo sapiens
cagcaggtttaactc

SEQ ID NO: 1460649 - DNA, 15 bp, Homo sapiens
agcaggtttaactcc

SEQ ID NO: 1460650 - DNA, 15 bp, Homo sapiens
gcaggtttaactcct

SEQ ID NO: 1460651 - DNA, 15 bp, Homo sapiens
caggtttaactcctc

SEQ ID NO: 1460652 - DNA, 15 bp, Homo sapiens
aggtttaactcctca

SEQ ID NO: 1460653 - DNA, 15 bp, Homo sapiens
ggtttaactcctcac

SEQ ID NO: 1460654 - DNA, 15 bp, Homo sapiens
gtttaactcctcact

SEQ ID NO: 1460655 - DNA, 15 bp, Homo sapiens
tttaactcctcactg

SEQ ID NO: 1460656 - DNA, 15 bp, Homo sapiens
ttaactcctcactgg

SEQ ID NO: 1460657 - DNA, 15 bp, Homo sapiens
taactcctcactggc

SEQ ID NO: 1460658 - DNA, 15 bp, Homo sapiens
aactcctcactggct

SEQ ID NO: 1460659 - DNA, 15 bp, Homo sapiens
actcctcactggctg

SEQ ID NO: 1460660 - DNA, 15 bp, Homo sapiens
ctcctcactggctgg

SEQ ID NO: 1460661 - DNA, 15 bp, Homo sapiens
tcctcactggctggg

SEQ ID NO: 1460662 - DNA, 15 bp, Homo sapiens
cctcactggctgggt

SEQ ID NO: 1460663 - DNA, 15 bp, Homo sapiens
ctcactggctgggtt

SEQ ID NO: 1460664 - DNA, 15 bp, Homo sapiens
tcactggctgggttc

SEQ ID NO: 1460665 - DNA, 15 bp, Homo sapiens
cactggctgggttct

SEQ ID NO: 1460666 - DNA, 15 bp, Homo sapiens
actggctgggttctg

SEQ ID NO: 1460667 - DNA, 15 bp, Homo sapiens
ctggctgggttctgg

SEQ ID NO: 1460668 - DNA, 15 bp, Homo sapiens
tggctgggttctggg

SEQ ID NO: 1460669 - DNA, 15 bp, Homo sapiens
ggctgggttctggga

SEQ ID NO: 1460670 - DNA, 15 bp, Homo sapiens
gctgggttctgggag

SEQ ID NO: 1460671 - DNA, 15 bp, Homo sapiens
ctgggttctgggagc

SEQ ID NO: 1460672 - DNA, 15 bp, Homo sapiens
tgggttctgggagct

SEQ ID NO: 1460673 - DNA, 15 bp, Homo sapiens
gggttctgggagctc

SEQ ID NO: 1460674 - DNA, 15 bp, Homo sapiens
ggttctgggagctct

SEQ ID NO: 1460675 - DNA, 15 bp, Homo sapiens
gttctgggagctctg

SEQ ID NO: 1460676 - DNA, 15 bp, Homo sapiens
ttctgggagctctgg

SEQ ID NO: 1460677 - DNA, 15 bp, Homo sapiens
tctgggagctctggg

SEQ ID NO: 1460678 - DNA, 15 bp, Homo sapiens
ctgggagctctgggc

SEQ ID NO: 1460679 - DNA, 15 bp, Homo sapiens
tgggagctctgggca

SEQ ID NO: 1460680 - DNA, 15 bp, Homo sapiens
gggagctctgggcac

SEQ ID NO: 1460681 - DNA, 15 bp, Homo sapiens
ggagctctgggcaca

SEQ ID NO: 1460682 - DNA, 15 bp, Homo sapiens
gagctctgggcacac

SEQ ID NO: 1460683 - DNA, 15 bp, Homo sapiens
agctctgggcacaca

SEQ ID NO: 1460684 - DNA, 15 bp, Homo sapiens
gctctgggcacacag

SEQ ID NO: 1460685 - DNA, 15 bp, Homo sapiens
ctctgggcacacagg

SEQ ID NO: 1460686 - DNA, 15 bp, Homo sapiens
tctgggcacacagga

SEQ ID NO: 1460687 - DNA, 15 bp, Homo sapiens
ctgggcacacaggat

SEQ ID NO: 1460688 - DNA, 15 bp, Homo sapiens
tgggcacacaggata

SEQ ID NO: 1460689 - DNA, 15 bp, Homo sapiens
gggcacacaggatag

SEQ ID NO: 1460690 - DNA, 15 bp, Homo sapiens
ggcacacaggatagg

SEQ ID NO: 1460691 - DNA, 15 bp, Homo sapiens
gcacacaggataggc

SEQ ID NO: 1460692 - DNA, 15 bp, Homo sapiens
cacacaggataggca

SEQ ID NO: 1460693 - DNA, 15 bp, Homo sapiens
acacaggataggcac

SEQ ID NO: 1460694 - DNA, 15 bp, Homo sapiens
cacaggataggcacc

SEQ ID NO: 1460695 - DNA, 15 bp, Homo sapiens
acaggataggcacca

SEQ ID NO: 1460696 - DNA, 15 bp, Homo sapiens
caggataggcaccaa

SEQ ID NO: 1460697 - DNA, 15 bp, Homo sapiens
aggataggcaccaag

SEQ ID NO: 1460698 - DNA, 15 bp, Homo sapiens
ggataggcaccaaga

SEQ ID NO: 1460699 - DNA, 15 bp, Homo sapiens
gataggcaccaagaa

SEQ ID NO: 1460700 - DNA, 15 bp, Homo sapiens
ataggcaccaagaac

SEQ ID NO: 1460701 - DNA, 15 bp, Homo sapiens
taggcaccaagaact

SEQ ID NO: 1460702 - DNA, 15 bp, Homo sapiens
aggcaccaagaacta

SEQ ID NO: 1460703 - DNA, 15 bp, Homo sapiens
ggcaccaagaactaa

SEQ ID NO: 1460704 - DNA, 15 bp, Homo sapiens
gcaccaagaactaac

SEQ ID NO: 1460705 - DNA, 15 bp, Homo sapiens
caccaagaactaaca

SEQ ID NO: 1460706 - DNA, 15 bp, Homo sapiens
accaagaactaacac

SEQ ID NO: 1460707 - DNA, 15 bp, Homo sapiens
ccaagaactaacaca

SEQ ID NO: 1460708 - DNA, 15 bp, Homo sapiens
caagaactaacacat

SEQ ID NO: 1460709 - DNA, 15 bp, Homo sapiens
aagaactaacacatc

SEQ ID NO: 1460710 - DNA, 15 bp, Homo sapiens
agaactaacacatcc

SEQ ID NO: 1460711 - DNA, 15 bp, Homo sapiens
gaactaacacatcct

SEQ ID NO: 1460712 - DNA, 15 bp, Homo sapiens
aactaacacatcctg

SEQ ID NO: 1460713 - DNA, 15 bp, Homo sapiens
actaacacatcctgg

SEQ ID NO: 1460714 - DNA, 15 bp, Homo sapiens
ctaacacatcctgga

SEQ ID NO: 1460715 - DNA, 15 bp, Homo sapiens
taacacatcctggag

SEQ ID NO: 1460716 - DNA, 15 bp, Homo sapiens
aacacatcctggagc

SEQ ID NO: 1460717 - DNA, 15 bp, Homo sapiens
acacatcctggagct

SEQ ID NO: 1460718 - DNA, 15 bp, Homo sapiens
cacatcctggagctg

SEQ ID NO: 1460719 - DNA, 15 bp, Homo sapiens
acatcctggagctgc

SEQ ID NO: 1460720 - DNA, 15 bp, Homo sapiens
catcctggagctgcc

SEQ ID NO: 1460721 - DNA, 15 bp, Homo sapiens
atcctggagctgccc

SEQ ID NO: 1460722 - DNA, 15 bp, Homo sapiens
tcctggagctgcccg

SEQ ID NO: 1460723 - DNA, 15 bp, Homo sapiens
cctggagctgcccgg

SEQ ID NO: 1460724 - DNA, 15 bp, Homo sapiens
ctggagctgcccgga

SEQ ID NO: 1460725 - DNA, 15 bp, Homo sapiens
tggagctgcccggag

SEQ ID NO: 1460726 - DNA, 15 bp, Homo sapiens
ggagctgcccggagt

SEQ ID NO: 1460727 - DNA, 15 bp, Homo sapiens
gagctgcccggagtt

SEQ ID NO: 1460728 - DNA, 15 bp, Homo sapiens
agctgcccggagttc

SEQ ID NO: 1460729 - DNA, 15 bp, Homo sapiens
gctgcccggagttcc

SEQ ID NO: 1460730 - DNA, 15 bp, Homo sapiens
ctgcccggagttccg

SEQ ID NO: 1460731 - DNA, 15 bp, Homo sapiens
tgcccggagttccgc

SEQ ID NO: 1460732 - DNA, 15 bp, Homo sapiens
gcccggagttccgct

SEQ ID NO: 1460733 - DNA, 15 bp, Homo sapiens
cccggagttccgctc

SEQ ID NO: 1460734 - DNA, 15 bp, Homo sapiens
ccggagttccgctcc

SEQ ID NO: 1460735 - DNA, 15 bp, Homo sapiens
cggagttccgctcct

SEQ ID NO: 1460736 - DNA, 15 bp, Homo sapiens
ggagttccgctcctg

SEQ ID NO: 1460737 - DNA, 15 bp, Homo sapiens
gagttccgctcctgc

SEQ ID NO: 1460738 - DNA, 15 bp, Homo sapiens
agttccgctcctgcg

SEQ ID NO: 1460739 - DNA, 15 bp, Homo sapiens
gttccgctcctgcgg

SEQ ID NO: 1460740 - DNA, 15 bp, Homo sapiens
ttccgctcctgcggg

SEQ ID NO: 1460741 - DNA, 15 bp, Homo sapiens
tccgctcctgcgggc

SEQ ID NO: 1460742 - DNA, 15 bp, Homo sapiens
ccgctcctgcgggct

SEQ ID NO: 1460743 - DNA, 15 bp, Homo sapiens
cgctcctgcgggctt

SEQ ID NO: 1460744 - DNA, 15 bp, Homo sapiens
gctcctgcgggctta

SEQ ID NO: 1460745 - DNA, 15 bp, Homo sapiens
ctcctgcgggcttag

SEQ ID NO: 1460746 - DNA, 15 bp, Homo sapiens
tcctgcgggcttagc

SEQ ID NO: 1460747 - DNA, 15 bp, Homo sapiens
cctgcgggcttagca

SEQ ID NO: 1460748 - DNA, 15 bp, Homo sapiens
ctgcgggcttagcag

SEQ ID NO: 1460749 - DNA, 15 bp, Homo sapiens
tgcgggcttagcagg

SEQ ID NO: 1460750 - DNA, 15 bp, Homo sapiens
gcgggcttagcagga

SEQ ID NO: 1460751 - DNA, 15 bp, Homo sapiens
cgggcttagcaggaa

SEQ ID NO: 1460752 - DNA, 15 bp, Homo sapiens
gggcttagcaggaaa

SEQ ID NO: 1460753 - DNA, 15 bp, Homo sapiens
ggcttagcaggaaag

SEQ ID NO: 1460754 - DNA, 15 bp, Homo sapiens
gcttagcaggaaagg

SEQ ID NO: 1460755 - DNA, 15 bp, Homo sapiens
cttagcaggaaaggg

SEQ ID NO: 1460756 - DNA, 15 bp, Homo sapiens
ttagcaggaaagggt

SEQ ID NO: 1460757 - DNA, 15 bp, Homo sapiens
tagcaggaaagggtg

SEQ ID NO: 1460758 - DNA, 15 bp, Homo sapiens
agcaggaaagggtgc

SEQ ID NO: 1460759 - DNA, 15 bp, Homo sapiens
gcaggaaagggtgcc

SEQ ID NO: 1460760 - DNA, 15 bp, Homo sapiens
caggaaagggtgcct

SEQ ID NO: 1460761 - DNA, 15 bp, Homo sapiens
aggaaagggtgccta

SEQ ID NO: 1460762 - DNA, 15 bp, Homo sapiens
ggaaagggtgcctaa

SEQ ID NO: 1460763 - DNA, 15 bp, Homo sapiens
gaaagggtgcctaag

SEQ ID NO: 1460764 - DNA, 15 bp, Homo sapiens
aaagggtgcctaagg

SEQ ID NO: 1460765 - DNA, 15 bp, Homo sapiens
aagggtgcctaaggt

SEQ ID NO: 1460766 - DNA, 15 bp, Homo sapiens
agggtgcctaaggtg

SEQ ID NO: 1460767 - DNA, 15 bp, Homo sapiens
gggtgcctaaggtga

SEQ ID NO: 1460768 - DNA, 15 bp, Homo sapiens
ggtgcctaaggtgag

SEQ ID NO: 1460769 - DNA, 15 bp, Homo sapiens
gtgcctaaggtgagt

SEQ ID NO: 1460770 - DNA, 15 bp, Homo sapiens
tgcctaaggtgagtg

SEQ ID NO: 1460771 - DNA, 15 bp, Homo sapiens
gcctaaggtgagtgc

SEQ ID NO: 1460772 - DNA, 15 bp, Homo sapiens
cctaaggtgagtgcc

SEQ ID NO: 1460773 - DNA, 15 bp, Homo sapiens
ctaaggtgagtgccc

SEQ ID NO: 1460774 - DNA, 15 bp, Homo sapiens
taaggtgagtgccca

SEQ ID NO: 1460775 - DNA, 15 bp, Homo sapiens
aaggtgagtgcccac

SEQ ID NO: 1460776 - DNA, 15 bp, Homo sapiens
aggtgagtgcccact

SEQ ID NO: 1460777 - DNA, 15 bp, Homo sapiens
ggtgagtgcccactt

SEQ ID NO: 1460778 - DNA, 15 bp, Homo sapiens
gtgagtgcccacttg

SEQ ID NO: 1460779 - DNA, 15 bp, Homo sapiens
tgagtgcccacttgc

SEQ ID NO: 1460780 - DNA, 15 bp, Homo sapiens
gagtgcccacttgcg

SEQ ID NO: 1460781 - DNA, 15 bp, Homo sapiens
agtgcccacttgcgt

SEQ ID NO: 1460782 - DNA, 15 bp, Homo sapiens
gtgcccacttgcgtc

SEQ ID NO: 1460783 - DNA, 15 bp, Homo sapiens
tgcccacttgcgtcc

SEQ ID NO: 1460784 - DNA, 15 bp, Homo sapiens
gcccacttgcgtccg

SEQ ID NO: 1460785 - DNA, 15 bp, Homo sapiens
cccacttgcgtccga

SEQ ID NO: 1460786 - DNA, 15 bp, Homo sapiens
ccacttgcgtccgat

SEQ ID NO: 1460787 - DNA, 15 bp, Homo sapiens
cacttgcgtccgatc

SEQ ID NO: 1460788 - DNA, 15 bp, Homo sapiens
acttgcgtccgatcc

SEQ ID NO: 1460789 - DNA, 15 bp, Homo sapiens
cttgcgtccgatcct

SEQ ID NO: 1460790 - DNA, 15 bp, Homo sapiens
ttgcgtccgatcctc

SEQ ID NO: 1460791 - DNA, 15 bp, Homo sapiens
tgcgtccgatcctct

SEQ ID NO: 1460792 - DNA, 15 bp, Homo sapiens
gcgtccgatcctctg

SEQ ID NO: 1460793 - DNA, 15 bp, Homo sapiens
cgtccgatcctctgg

SEQ ID NO: 1460794 - DNA, 15 bp, Homo sapiens
gtccgatcctctggg

SEQ ID NO: 1460795 - DNA, 15 bp, Homo sapiens
tccgatcctctgggg

SEQ ID NO: 1460796 - DNA, 15 bp, Homo sapiens
ccgatcctctggggg

SEQ ID NO: 1460797 - DNA, 15 bp, Homo sapiens
cgatcctctgggggc

SEQ ID NO: 1460798 - DNA, 15 bp, Homo sapiens
gatcctctgggggcg

SEQ ID NO: 1460799 - DNA, 15 bp, Homo sapiens
atcctctgggggcga

SEQ ID NO: 1460800 - DNA, 15 bp, Homo sapiens
tcctctgggggcgat

SEQ ID NO: 1460801 - DNA, 15 bp, Homo sapiens
cctctgggggcgatg

SEQ ID NO: 1460802 - DNA, 15 bp, Homo sapiens
ctctgggggcgatgc

SEQ ID NO: 1460803 - DNA, 15 bp, Homo sapiens
tctgggggcgatgca

SEQ ID NO: 1460804 - DNA, 15 bp, Homo sapiens
ctgggggcgatgcag

SEQ ID NO: 1460805 - DNA, 15 bp, Homo sapiens
tgggggcgatgcagg

SEQ ID NO: 1460806 - DNA, 15 bp, Homo sapiens
gggggcgatgcaggg

SEQ ID NO: 1460807 - DNA, 15 bp, Homo sapiens
ggggcgatgcagggt

SEQ ID NO: 1460808 - DNA, 15 bp, Homo sapiens
gggcgatgcagggtc

SEQ ID NO: 1460809 - DNA, 15 bp, Homo sapiens
ggcgatgcagggtcg

SEQ ID NO: 1460810 - DNA, 15 bp, Homo sapiens
gcgatgcagggtcgg

SEQ ID NO: 1460811 - DNA, 15 bp, Homo sapiens
cgatgcagggtcggg

SEQ ID NO: 1460812 - DNA, 15 bp, Homo sapiens
gatgcagggtcgggg

SEQ ID NO: 1460813 - DNA, 15 bp, Homo sapiens
atgcagggtcggggc

SEQ ID NO: 1460814 - DNA, 15 bp, Homo sapiens
tgcagggtcggggcg

SEQ ID NO: 1460815 - DNA, 15 bp, Homo sapiens
gcagggtcggggcgc

SEQ ID NO: 1460816 - DNA, 15 bp, Homo sapiens
cagggtcggggcgcc

SEQ ID NO: 1460817 - DNA, 15 bp, Homo sapiens
agggtcggggcgcct

SEQ ID NO: 1460818 - DNA, 15 bp, Homo sapiens
gggtcggggcgcctc

SEQ ID NO: 1460819 - DNA, 15 bp, Homo sapiens
ggtcggggcgcctca

SEQ ID NO: 1460820 - DNA, 15 bp, Homo sapiens
gtcggggcgcctcag

SEQ ID NO: 1460821 - DNA, 15 bp, Homo sapiens
tcggggcgcctcagt

SEQ ID NO: 1460822 - DNA, 15 bp, Homo sapiens
cggggcgcctcagtg

SEQ ID NO: 1460823 - DNA, 15 bp, Homo sapiens
ggggcgcctcagtgt

SEQ ID NO: 1460824 - DNA, 15 bp, Homo sapiens
gggcgcctcagtgtg

SEQ ID NO: 1460825 - DNA, 15 bp, Homo sapiens
ggcgcctcagtgtgt

SEQ ID NO: 1460826 - DNA, 15 bp, Homo sapiens
gcgcctcagtgtgtc

SEQ ID NO: 1460827 - DNA, 15 bp, Homo sapiens
cgcctcagtgtgtct

SEQ ID NO: 1460828 - DNA, 15 bp, Homo sapiens
gcctcagtgtgtctc

SEQ ID NO: 1460829 - DNA, 15 bp, Homo sapiens
cctcagtgtgtctcg

SEQ ID NO: 1460830 - DNA, 15 bp, Homo sapiens
ctcagtgtgtctcgc

SEQ ID NO: 1460831 - DNA, 15 bp, Homo sapiens
tcagtgtgtctcgct

SEQ ID NO: 1460832 - DNA, 15 bp, Homo sapiens
cagtgtgtctcgctg

SEQ ID NO: 1460833 - DNA, 15 bp, Homo sapiens
agtgtgtctcgctgc

SEQ ID NO: 1460834 - DNA, 15 bp, Homo sapiens
gtgtgtctcgctgct

SEQ ID NO: 1460835 - DNA, 15 bp, Homo sapiens
tgtgtctcgctgctt

SEQ ID NO: 1460836 - DNA, 15 bp, Homo sapiens
gtgtctcgctgcttg

SEQ ID NO: 1460837 - DNA, 15 bp, Homo sapiens
tgtctcgctgcttgt

SEQ ID NO: 1460838 - DNA, 15 bp, Homo sapiens
gtctcgctgcttgtt

SEQ ID NO: 1460839 - DNA, 15 bp, Homo sapiens
tctcgctgcttgttc

SEQ ID NO: 1460840 - DNA, 15 bp, Homo sapiens
ctcgctgcttgttct

SEQ ID NO: 1460841 - DNA, 15 bp, Homo sapiens
tcgctgcttgttctg

SEQ ID NO: 1460842 - DNA, 15 bp, Homo sapiens
cgctgcttgttctgg

SEQ ID NO: 1460843 - DNA, 15 bp, Homo sapiens
gctgcttgttctggt

SEQ ID NO: 1460844 - DNA, 15 bp, Homo sapiens
ctgcttgttctggtt

SEQ ID NO: 1460845 - DNA, 15 bp, Homo sapiens
tgcttgttctggttg

SEQ ID NO: 1460846 - DNA, 15 bp, Homo sapiens
gcttgttctggttgc

SEQ ID NO: 1460847 - DNA, 15 bp, Homo sapiens
cttgttctggttgca

SEQ ID NO: 1460848 - DNA, 15 bp, Homo sapiens
ttgttctggttgcag

SEQ ID NO: 1460849 - DNA, 15 bp, Homo sapiens
tgttctggttgcagt

SEQ ID NO: 1460850 - DNA, 15 bp, Homo sapiens
gttctggttgcagtc

SEQ ID NO: 1460851 - DNA, 15 bp, Homo sapiens
ttctggttgcagtcg

SEQ ID NO: 1460852 - DNA, 15 bp, Homo sapiens
tctggttgcagtcgg

SEQ ID NO: 1460853 - DNA, 15 bp, Homo sapiens
ctggttgcagtcggg

SEQ ID NO: 1460854 - DNA, 15 bp, Homo sapiens
tggttgcagtcggga

SEQ ID NO: 1460855 - DNA, 15 bp, Homo sapiens
ggttgcagtcgggaa

SEQ ID NO: 1460856 - DNA, 15 bp, Homo sapiens
gttgcagtcgggaaa

SEQ ID NO: 1460857 - DNA, 15 bp, Homo sapiens
ttgcagtcgggaaat

SEQ ID NO: 1460858 - DNA, 15 bp, Homo sapiens
tgcagtcgggaaatg

SEQ ID NO: 1460859 - DNA, 15 bp, Homo sapiens
gcagtcgggaaatgt

SEQ ID NO: 1460860 - DNA, 15 bp, Homo sapiens
cagtcgggaaatgtg

SEQ ID NO: 1460861 - DNA, 15 bp, Homo sapiens
agtcgggaaatgtgg

SEQ ID NO: 1460862 - DNA, 15 bp, Homo sapiens
gtcgggaaatgtggg

SEQ ID NO: 1460863 - DNA, 15 bp, Homo sapiens
tcgggaaatgtggga

SEQ ID NO: 1460864 - DNA, 15 bp, Homo sapiens
cgggaaatgtgggac

SEQ ID NO: 1460865 - DNA, 15 bp, Homo sapiens
gggaaatgtgggact

SEQ ID NO: 1460866 - DNA, 15 bp, Homo sapiens
ggaaatgtgggactt

SEQ ID NO: 1460867 - DNA, 15 bp, Homo sapiens
gaaatgtgggacttt

SEQ ID NO: 1460868 - DNA, 15 bp, Homo sapiens
aaatgtgggactttg

SEQ ID NO: 1460869 - DNA, 15 bp, Homo sapiens
aatgtgggactttgg

SEQ ID NO: 1460870 - DNA, 15 bp, Homo sapiens
atgtgggactttggg

SEQ ID NO: 1460871 - DNA, 15 bp, Homo sapiens
tgtgggactttgggg

SEQ ID NO: 1460872 - DNA, 15 bp, Homo sapiens
gtgggactttggggt

SEQ ID NO: 1460873 - DNA, 15 bp, Homo sapiens
tgggactttggggtc

SEQ ID NO: 1460874 - DNA, 15 bp, Homo sapiens
gggactttggggtct

SEQ ID NO: 1460875 - DNA, 15 bp, Homo sapiens
ggactttggggtctt

SEQ ID NO: 1460876 - DNA, 15 bp, Homo sapiens
gactttggggtcttc

SEQ ID NO: 1460877 - DNA, 15 bp, Homo sapiens
actttggggtcttct

SEQ ID NO: 1460878 - DNA, 15 bp, Homo sapiens
ctttggggtcttctc

SEQ ID NO: 1460879 - DNA, 15 bp, Homo sapiens
tttggggtcttctcc

SEQ ID NO: 1460880 - DNA, 15 bp, Homo sapiens
ttggggtcttctcct

SEQ ID NO: 1460881 - DNA, 15 bp, Homo sapiens
tggggtcttctcctt

SEQ ID NO: 1460882 - DNA, 15 bp, Homo sapiens
ggggtcttctccttt

SEQ ID NO: 1460883 - DNA, 15 bp, Homo sapiens
gggtcttctcctttc

SEQ ID NO: 1460884 - DNA, 15 bp, Homo sapiens
ggtcttctcctttct

SEQ ID NO: 1460885 - DNA, 15 bp, Homo sapiens
gtcttctcctttctc

SEQ ID NO: 1460886 - DNA, 15 bp, Homo sapiens
tcttctcctttctcc

SEQ ID NO: 1460887 - DNA, 15 bp, Homo sapiens
cttctcctttctccg

SEQ ID NO: 1460888 - DNA, 15 bp, Homo sapiens
ttctcctttctccgg

SEQ ID NO: 1460889 - DNA, 15 bp, Homo sapiens
tctcctttctccggc

SEQ ID NO: 1460890 - DNA, 15 bp, Homo sapiens
ctcctttctccggct

SEQ ID NO: 1460891 - DNA, 15 bp, Homo sapiens
tcctttctccggctt

SEQ ID NO: 1460892 - DNA, 15 bp, Homo sapiens
cctttctccggcttt

SEQ ID NO: 1460893 - DNA, 15 bp, Homo sapiens
ctttctccggctttc

SEQ ID NO: 1460894 - DNA, 15 bp, Homo sapiens
tttctccggctttct

SEQ ID NO: 1460895 - DNA, 15 bp, Homo sapiens
ttctccggctttctt

SEQ ID NO: 1460896 - DNA, 15 bp, Homo sapiens
tctccggctttcttt

SEQ ID NO: 1460897 - DNA, 15 bp, Homo sapiens
ctccggctttctttt

SEQ ID NO: 1460898 - DNA, 15 bp, Homo sapiens
tccggctttcttttt

SEQ ID NO: 1460899 - DNA, 15 bp, Homo sapiens
ccggctttctttttt

SEQ ID NO: 1460900 - DNA, 15 bp, Homo sapiens
cggctttcttttttc

SEQ ID NO: 1460901 - DNA, 15 bp, Homo sapiens
ggctttcttttttct

SEQ ID NO: 1460902 - DNA, 15 bp, Homo sapiens
gctttcttttttctc

SEQ ID NO: 1460903 - DNA, 15 bp, Homo sapiens
ctttcttttttctcc

SEQ ID NO: 1460904 - DNA, 15 bp, Homo sapiens
tttcttttttctcct

SEQ ID NO: 1460905 - DNA, 15 bp, Homo sapiens
ttcttttttctcctt

SEQ ID NO: 1460906 - DNA, 15 bp, Homo sapiens
tcttttttctccttc

SEQ ID NO: 1460907 - DNA, 15 bp, Homo sapiens
cttttttctccttct

SEQ ID NO: 1460908 - DNA, 15 bp, Homo sapiens
ttttttctccttctt

SEQ ID NO: 1460909 - DNA, 15 bp, Homo sapiens
tttttctccttcttt

SEQ ID NO: 1460910 - DNA, 15 bp, Homo sapiens
ttttctccttctttc

SEQ ID NO: 1460911 - DNA, 15 bp, Homo sapiens
tttctccttctttcc

SEQ ID NO: 1460912 - DNA, 15 bp, Homo sapiens
ttctccttctttcct

SEQ ID NO: 1460913 - DNA, 15 bp, Homo sapiens
tctccttctttcctc

SEQ ID NO: 1460914 - DNA, 15 bp, Homo sapiens
ctccttctttcctct

SEQ ID NO: 1460915 - DNA, 15 bp, Homo sapiens
tccttctttcctctc

SEQ ID NO: 1460916 - DNA, 15 bp, Homo sapiens
ccttctttcctctct

SEQ ID NO: 1460917 - DNA, 15 bp, Homo sapiens
cttctttcctctctg

SEQ ID NO: 1460918 - DNA, 15 bp, Homo sapiens
ttctttcctctctgt

SEQ ID NO: 1460919 - DNA, 15 bp, Homo sapiens
tctttcctctctgtt

SEQ ID NO: 1460920 - DNA, 15 bp, Homo sapiens
ctttcctctctgttt

SEQ ID NO: 1460921 - DNA, 15 bp, Homo sapiens
tcctctctgttttct

SEQ ID NO: 1460922 - DNA, 15 bp, Homo sapiens
cctctctgttttctt

SEQ ID NO: 1460923 - DNA, 15 bp, Homo sapiens
ctctctgttttcttg

SEQ ID NO: 1460924 - DNA, 15 bp, Homo sapiens
tctctgttttcttgt

SEQ ID NO: 1460925 - DNA, 15 bp, Homo sapiens
ctctgttttcttgta

SEQ ID NO: 1460926 - DNA, 15 bp, Homo sapiens
tctgttttcttgtaa

SEQ ID NO: 1460927 - DNA, 15 bp, Homo sapiens
ctgttttcttgtaaa

SEQ ID NO: 1460928 - DNA, 15 bp, Homo sapiens
tgttttcttgtaaat

SEQ ID NO: 1460929 - DNA, 15 bp, Homo sapiens
gttttcttgtaaatt

SEQ ID NO: 1460930 - DNA, 15 bp, Homo sapiens
ttttcttgtaaatta

SEQ ID NO: 1460931 - DNA, 15 bp, Homo sapiens
tttcttgtaaattac

SEQ ID NO: 1460932 - DNA, 15 bp, Homo sapiens
ttcttgtaaattaca

SEQ ID NO: 1460933 - DNA, 15 bp, Homo sapiens
tcttgtaaattacac

SEQ ID NO: 1460934 - DNA, 15 bp, Homo sapiens
cttgtaaattacact

SEQ ID NO: 1460935 - DNA, 15 bp, Homo sapiens
ttgtaaattacactt

SEQ ID NO: 1460936 - DNA, 15 bp, Homo sapiens
tgtaaattacacttc

SEQ ID NO: 1460937 - DNA, 15 bp, Homo sapiens
gtaaattacacttcg

SEQ ID NO: 1460938 - DNA, 15 bp, Homo sapiens
taaattacacttcga

SEQ ID NO: 1460939 - DNA, 15 bp, Homo sapiens
aaattacacttcgac

SEQ ID NO: 1460940 - DNA, 15 bp, Homo sapiens
aattacacttcgact

SEQ ID NO: 1460941 - DNA, 15 bp, Homo sapiens
attacacttcgactt

SEQ ID NO: 1460942 - DNA, 15 bp, Homo sapiens
ttacacttcgacttt

SEQ ID NO: 1460943 - DNA, 15 bp, Homo sapiens
tacacttcgactttc

SEQ ID NO: 1460944 - DNA, 15 bp, Homo sapiens
acacttcgactttca

SEQ ID NO: 1460945 - DNA, 15 bp, Homo sapiens
cacttcgactttcaa

SEQ ID NO: 1460946 - DNA, 15 bp, Homo sapiens
acttcgactttcaaa

SEQ ID NO: 1460947 - DNA, 15 bp, Homo sapiens
cttcgactttcaaaa

SEQ ID NO: 1460948 - DNA, 15 bp, Homo sapiens
ttcgactttcaaaaa

SEQ ID NO: 1460949 - DNA, 15 bp, Homo sapiens
tcgactttcaaaaaa

SEQ ID NO: 1460950 - DNA, 15 bp, Homo sapiens
cgactttcaaaaaaa

SEQ ID NO: 1460951 - DNA, 15 bp, Homo sapiens
gactttcaaaaaaaa

SEQ ID NO: 1460952 - DNA, 15 bp, Homo sapiens
actttcaaaaaaaaa

SEQ ID NO: 1460953 - DNA, 15 bp, Homo sapiens
ctttcaaaaaaaaaa

SEQ ID NO: 1460954 - DNA, 15 bp, Homo sapiens
ttcaaaaaaaaaaat

SEQ ID NO: 1460955 - DNA, 15 bp, Homo sapiens
tcaaaaaaaaaaatg

SEQ ID NO: 1460956 - DNA, 15 bp, Homo sapiens
caaaaaaaaaaatgt

SEQ ID NO: 1460957 - DNA, 15 bp, Homo sapiens
aaaaaaaaaaatgta

SEQ ID NO: 1460958 - DNA, 15 bp, Homo sapiens
aaaaaaaaaatgtag

SEQ ID NO: 1460959 - DNA, 15 bp, Homo sapiens
aaaaaaaaatgtagg

SEQ ID NO: 1460960 - DNA, 15 bp, Homo sapiens
aaaaaaaatgtaggg

SEQ ID NO: 1460961 - DNA, 15 bp, Homo sapiens
aaaaaaatgtagggg

SEQ ID NO: 1460962 - DNA, 15 bp, Homo sapiens
aaaaaatgtagggga

SEQ ID NO: 1460963 - DNA, 15 bp, Homo sapiens
aaaaatgtaggggac

SEQ ID NO: 1460964 - DNA, 15 bp, Homo sapiens
aaaatgtaggggacc

SEQ ID NO: 1460965 - DNA, 15 bp, Homo sapiens
aaatgtaggggaccg

SEQ ID NO: 1460966 - DNA, 15 bp, Homo sapiens
aatgtaggggaccgg

SEQ ID NO: 1460967 - DNA, 15 bp, Homo sapiens
atgtaggggaccggt

SEQ ID NO: 1460968 - DNA, 15 bp, Homo sapiens
tgtaggggaccggtg

SEQ ID NO: 1460969 - DNA, 15 bp, Homo sapiens
gtaggggaccggtgg

SEQ ID NO: 1460970 - DNA, 15 bp, Homo sapiens
taggggaccggtggg

SEQ ID NO: 1460971 - DNA, 15 bp, Homo sapiens
aggggaccggtgggg

SEQ ID NO: 1460972 - DNA, 15 bp, Homo sapiens
ggggaccggtggggt

SEQ ID NO: 1460973 - DNA, 15 bp, Homo sapiens
gggaccggtggggtc

SEQ ID NO: 1460974 - DNA, 15 bp, Homo sapiens
ggaccggtggggtcg

SEQ ID NO: 1460975 - DNA, 15 bp, Homo sapiens
gaccggtggggtcgc

SEQ ID NO: 1460976 - DNA, 15 bp, Homo sapiens
accggtggggtcgct

SEQ ID NO: 1460977 - DNA, 15 bp, Homo sapiens
ccggtggggtcgctg

SEQ ID NO: 1460978 - DNA, 15 bp, Homo sapiens
cggtggggtcgctgg

SEQ ID NO: 1460979 - DNA, 15 bp, Homo sapiens
ggtggggtcgctggg

SEQ ID NO: 1460980 - DNA, 15 bp, Homo sapiens
gtggggtcgctgggg

SEQ ID NO: 1460981 - DNA, 15 bp, Homo sapiens
tggggtcgctggggt

SEQ ID NO: 1460982 - DNA, 15 bp, Homo sapiens
ggggtcgctggggtt

SEQ ID NO: 1460983 - DNA, 15 bp, Homo sapiens
gggtcgctggggttg

SEQ ID NO: 1460984 - DNA, 15 bp, Homo sapiens
ggtcgctggggttgg

SEQ ID NO: 1460985 - DNA, 15 bp, Homo sapiens
gtcgctggggttggg

SEQ ID NO: 1460986 - DNA, 15 bp, Homo sapiens
tcgctggggttgggg

SEQ ID NO: 1460987 - DNA, 15 bp, Homo sapiens
cgctggggttggggg

SEQ ID NO: 1460988 - DNA, 15 bp, Homo sapiens
gctggggttggggga

SEQ ID NO: 1460989 - DNA, 15 bp, Homo sapiens
ctggggttgggggag

SEQ ID NO: 1460990 - DNA, 15 bp, Homo sapiens
tggggttgggggaga

SEQ ID NO: 1460991 - DNA, 15 bp, Homo sapiens
ggggttgggggagag

SEQ ID NO: 1460992 - DNA, 15 bp, Homo sapiens
gggttgggggagaga

SEQ ID NO: 1460993 - DNA, 15 bp, Homo sapiens
ggttgggggagagac

SEQ ID NO: 1460994 - DNA, 15 bp, Homo sapiens
gttgggggagagact

SEQ ID NO: 1460995 - DNA, 15 bp, Homo sapiens
ttgggggagagactg

SEQ ID NO: 1460996 - DNA, 15 bp, Homo sapiens
tgggggagagactga

SEQ ID NO: 1460997 - DNA, 15 bp, Homo sapiens
gggggagagactgaa

SEQ ID NO: 1460998 - DNA, 15 bp, Homo sapiens
ggggagagactgaag

SEQ ID NO: 1460999 - DNA, 15 bp, Homo sapiens
gggagagactgaaga

SEQ ID NO: 1461000 - DNA, 15 bp, Homo sapiens
ggagagactgaagaa

SEQ ID NO: 1461001 - DNA, 15 bp, Homo sapiens
gagagactgaagaaa

SEQ ID NO: 1461002 - DNA, 15 bp, Homo sapiens
agagactgaagaaag

SEQ ID NO: 1461003 - DNA, 15 bp, Homo sapiens
gagactgaagaaagt

SEQ ID NO: 1461004 - DNA, 15 bp, Homo sapiens
agactgaagaaagtg

SEQ ID NO: 1461005 - DNA, 15 bp, Homo sapiens
gactgaagaaagtgc

SEQ ID NO: 1461006 - DNA, 15 bp, Homo sapiens
actgaagaaagtgcg

SEQ ID NO: 1461007 - DNA, 15 bp, Homo sapiens
ctgaagaaagtgcgc

SEQ ID NO: 1461008 - DNA, 15 bp, Homo sapiens
tgaagaaagtgcgcc

SEQ ID NO: 1461009 - DNA, 15 bp, Homo sapiens
gaagaaagtgcgcct

SEQ ID NO: 1461010 - DNA, 15 bp, Homo sapiens
aagaaagtgcgcctg

SEQ ID NO: 1461011 - DNA, 15 bp, Homo sapiens
agaaagtgcgcctgg

SEQ ID NO: 1461012 - DNA, 15 bp, Homo sapiens
gaaagtgcgcctggg

SEQ ID NO: 1461013 - DNA, 15 bp, Homo sapiens
aaagtgcgcctgggc

SEQ ID NO: 1461014 - DNA, 15 bp, Homo sapiens
aagtgcgcctgggcg

SEQ ID NO: 1461015 - DNA, 15 bp, Homo sapiens
agtgcgcctgggcgg

SEQ ID NO: 1461016 - DNA, 15 bp, Homo sapiens
gtgcgcctgggcgga

SEQ ID NO: 1461017 - DNA, 15 bp, Homo sapiens
tgcgcctgggcggag

SEQ ID NO: 1461018 - DNA, 15 bp, Homo sapiens
gcgcctgggcggagg

SEQ ID NO: 1461019 - DNA, 15 bp, Homo sapiens
cgcctgggcggaggc

SEQ ID NO: 1461020 - DNA, 15 bp, Homo sapiens
gcctgggcggaggcg

SEQ ID NO: 1461021 - DNA, 15 bp, Homo sapiens
cctgggcggaggcgg

SEQ ID NO: 1461022 - DNA, 15 bp, Homo sapiens
ctgggcggaggcggc

SEQ ID NO: 1461023 - DNA, 15 bp, Homo sapiens
tgggcggaggcggcg

SEQ ID NO: 1461024 - DNA, 15 bp, Homo sapiens
gggcggaggcggcga

SEQ ID NO: 1461025 - DNA, 15 bp, Homo sapiens
ggcggaggcggcgaa

SEQ ID NO: 1461026 - DNA, 15 bp, Homo sapiens
gcggaggcggcgaag

SEQ ID NO: 1461027 - DNA, 15 bp, Homo sapiens
cggaggcggcgaagg

SEQ ID NO: 1461028 - DNA, 15 bp, Homo sapiens
ggaggcggcgaaggg

SEQ ID NO: 1461029 - DNA, 15 bp, Homo sapiens
gaggcggcgaaggga

SEQ ID NO: 1461030 - DNA, 15 bp, Homo sapiens
aggcggcgaagggaa

SEQ ID NO: 1461031 - DNA, 15 bp, Homo sapiens
gtgtgcatgcgtgcg

SEQ ID NO: 1461032 - DNA, 15 bp, Homo sapiens
tgtgcatgcgtgcgc

SEQ ID NO: 1461033 - DNA, 15 bp, Homo sapiens
gtgcatgcgtgcgcc

SEQ ID NO: 1461034 - DNA, 15 bp, Homo sapiens
tgcatgcgtgcgcct

SEQ ID NO: 1461035 - DNA, 15 bp, Homo sapiens
gcatgcgtgcgcctg

SEQ ID NO: 1461036 - DNA, 15 bp, Homo sapiens
catgcgtgcgcctgt

SEQ ID NO: 1461037 - DNA, 15 bp, Homo sapiens
atgcgtgcgcctgtt

SEQ ID NO: 1461038 - DNA, 15 bp, Homo sapiens
tgcgtgcgcctgttt

SEQ ID NO: 1461039 - DNA, 15 bp, Homo sapiens
gcgtgcgcctgtttg

SEQ ID NO: 1461040 - DNA, 15 bp, Homo sapiens
cgtgcgcctgtttgc

SEQ ID NO: 1461041 - DNA, 15 bp, Homo sapiens
gtgcgcctgtttgca

SEQ ID NO: 1461042 - DNA, 15 bp, Homo sapiens
tgcgcctgtttgcat

SEQ ID NO: 1461043 - DNA, 15 bp, Homo sapiens
gcgcctgtttgcatg

SEQ ID NO: 1461044 - DNA, 15 bp, Homo sapiens
cgcctgtttgcatgt

SEQ ID NO: 1461045 - DNA, 15 bp, Homo sapiens
gcctgtttgcatgtg

SEQ ID NO: 1461046 - DNA, 15 bp, Homo sapiens
cctgtttgcatgtgg

SEQ ID NO: 1461047 - DNA, 15 bp, Homo sapiens
ctgtttgcatgtggg

SEQ ID NO: 1461048 - DNA, 15 bp, Homo sapiens
tgtttgcatgtgggc

SEQ ID NO: 1461049 - DNA, 15 bp, Homo sapiens
gtttgcatgtgggcg

SEQ ID NO: 1461050 - DNA, 15 bp, Homo sapiens
tttgcatgtgggcgt

SEQ ID NO: 1461051 - DNA, 15 bp, Homo sapiens
ttgcatgtgggcgtg

SEQ ID NO: 1461052 - DNA, 15 bp, Homo sapiens
tgcatgtgggcgtgt

SEQ ID NO: 1461053 - DNA, 15 bp, Homo sapiens
gcatgtgggcgtgtg

SEQ ID NO: 1461054 - DNA, 15 bp, Homo sapiens
catgtgggcgtgtgt

SEQ ID NO: 1461055 - DNA, 15 bp, Homo sapiens
atgtgggcgtgtgta

SEQ ID NO: 1461056 - DNA, 15 bp, Homo sapiens
tgtgggcgtgtgtat

SEQ ID NO: 1461057 - DNA, 15 bp, Homo sapiens
gtgggcgtgtgtatg

SEQ ID NO: 1461058 - DNA, 15 bp, Homo sapiens
tgggcgtgtgtatgt

SEQ ID NO: 1461059 - DNA, 15 bp, Homo sapiens
gggcgtgtgtatgtg

SEQ ID NO: 1461060 - DNA, 15 bp, Homo sapiens
ggcgtgtgtatgtgg

SEQ ID NO: 1461061 - DNA, 15 bp, Homo sapiens
gcgtgtgtatgtggg

SEQ ID NO: 1461062 - DNA, 15 bp, Homo sapiens
cgtgtgtatgtgggg

SEQ ID NO: 1461063 - DNA, 15 bp, Homo sapiens
gtgtgtatgtggggt

SEQ ID NO: 1461064 - DNA, 15 bp, Homo sapiens
tgtgtatgtggggtt

SEQ ID NO: 1461065 - DNA, 15 bp, Homo sapiens
gtgtatgtggggttg

SEQ ID NO: 1461066 - DNA, 15 bp, Homo sapiens
tgtatgtggggttgt

SEQ ID NO: 1461067 - DNA, 15 bp, Homo sapiens
gtatgtggggttgtg

SEQ ID NO: 1461068 - DNA, 15 bp, Homo sapiens
tatgtggggttgtgt

SEQ ID NO: 1461069 - DNA, 15 bp, Homo sapiens
atgtggggttgtgtg

SEQ ID NO: 1461070 - DNA, 15 bp, Homo sapiens
tgtggggttgtgtgc

SEQ ID NO: 1461071 - DNA, 15 bp, Homo sapiens
gtggggttgtgtgcg

SEQ ID NO: 1461072 - DNA, 15 bp, Homo sapiens
tggggttgtgtgcgg

SEQ ID NO: 1461073 - DNA, 15 bp, Homo sapiens
ggggttgtgtgcggg

SEQ ID NO: 1461074 - DNA, 15 bp, Homo sapiens
gggttgtgtgcgggt

SEQ ID NO: 1461075 - DNA, 15 bp, Homo sapiens
ggttgtgtgcgggta

SEQ ID NO: 1461076 - DNA, 15 bp, Homo sapiens
gttgtgtgcgggtat

SEQ ID NO: 1461077 - DNA, 15 bp, Homo sapiens
ttgtgtgcgggtatg

SEQ ID NO: 1461078 - DNA, 15 bp, Homo sapiens
tgtgtgcgggtatgc

SEQ ID NO: 1461079 - DNA, 15 bp, Homo sapiens
gtgtgcgggtatgcg

SEQ ID NO: 1461080 - DNA, 15 bp, Homo sapiens
tgtgcgggtatgcgg

SEQ ID NO: 1461081 - DNA, 15 bp, Homo sapiens
gtgcgggtatgcggg

SEQ ID NO: 1461082 - DNA, 15 bp, Homo sapiens
tgcgggtatgcgggc

SEQ ID NO: 1461083 - DNA, 15 bp, Homo sapiens
gcgggtatgcgggcg

SEQ ID NO: 1461084 - DNA, 15 bp, Homo sapiens
cgggtatgcgggcgc

SEQ ID NO: 1461085 - DNA, 15 bp, Homo sapiens
gggtatgcgggcgcc

SEQ ID NO: 1461086 - DNA, 15 bp, Homo sapiens
ggtatgcgggcgcca

SEQ ID NO: 1461087 - DNA, 15 bp, Homo sapiens
gtatgcgggcgccac

SEQ ID NO: 1461088 - DNA, 15 bp, Homo sapiens
tatgcgggcgccacg

SEQ ID NO: 1461089 - DNA, 15 bp, Homo sapiens
atgcgggcgccacgc

SEQ ID NO: 1461090 - DNA, 15 bp, Homo sapiens
tgcgggcgccacgcg

SEQ ID NO: 1461091 - DNA, 15 bp, Homo sapiens
gcgggcgccacgcgc

SEQ ID NO: 1461092 - DNA, 15 bp, Homo sapiens
cgggcgccacgcgct

SEQ ID NO: 1461093 - DNA, 15 bp, Homo sapiens
gggcgccacgcgctt

SEQ ID NO: 1461094 - DNA, 15 bp, Homo sapiens
ggcgccacgcgcttc

SEQ ID NO: 1461095 - DNA, 15 bp, Homo sapiens
gcgccacgcgcttct

SEQ ID NO: 1461096 - DNA, 15 bp, Homo sapiens
cgccacgcgcttctc

SEQ ID NO: 1461097 - DNA, 15 bp, Homo sapiens
gccacgcgcttctcc

SEQ ID NO: 1461098 - DNA, 15 bp, Homo sapiens
ccacgcgcttctcct

SEQ ID NO: 1461099 - DNA, 15 bp, Homo sapiens
cacgcgcttctccta

SEQ ID NO: 1461100 - DNA, 15 bp, Homo sapiens
acgcgcttctcctac

SEQ ID NO: 1461101 - DNA, 15 bp, Homo sapiens
cgcgcttctcctaca

SEQ ID NO: 1461102 - DNA, 15 bp, Homo sapiens
gcgcttctcctacag

SEQ ID NO: 1461103 - DNA, 15 bp, Homo sapiens
cgcttctcctacagg

SEQ ID NO: 1461104 - DNA, 15 bp, Homo sapiens
gcttctcctacaggt

SEQ ID NO: 1461105 - DNA, 15 bp, Homo sapiens
cttctcctacaggtg

SEQ ID NO: 1461106 - DNA, 15 bp, Homo sapiens
ttctcctacaggtga

SEQ ID NO: 1461107 - DNA, 15 bp, Homo sapiens
tctcctacaggtgag

SEQ ID NO: 1461108 - DNA, 15 bp, Homo sapiens
ctcctacaggtgaga

SEQ ID NO: 1461109 - DNA, 15 bp, Homo sapiens
tcctacaggtgagac

SEQ ID NO: 1461110 - DNA, 15 bp, Homo sapiens
cctacaggtgagaca

SEQ ID NO: 1461111 - DNA, 15 bp, Homo sapiens
ctacaggtgagacac

SEQ ID NO: 1461112 - DNA, 15 bp, Homo sapiens
tacaggtgagacacg

SEQ ID NO: 1461113 - DNA, 15 bp, Homo sapiens
acaggtgagacacgc

SEQ ID NO: 1461114 - DNA, 15 bp, Homo sapiens
caggtgagacacgcg

SEQ ID NO: 1461115 - DNA, 15 bp, Homo sapiens
aggtgagacacgcgc

SEQ ID NO: 1461116 - DNA, 15 bp, Homo sapiens
ggtgagacacgcgct

SEQ ID NO: 1461117 - DNA, 15 bp, Homo sapiens
gtgagacacgcgctc

SEQ ID NO: 1461118 - DNA, 15 bp, Homo sapiens
tgagacacgcgctca

SEQ ID NO: 1461119 - DNA, 15 bp, Homo sapiens
gagacacgcgctcag

SEQ ID NO: 1461120 - DNA, 15 bp, Homo sapiens
agacacgcgctcagt

SEQ ID NO: 1461121 - DNA, 15 bp, Homo sapiens
gacacgcgctcagtc

SEQ ID NO: 1461122 - DNA, 15 bp, Homo sapiens
acacgcgctcagtcc

SEQ ID NO: 1461123 - DNA, 15 bp, Homo sapiens
cacgcgctcagtcct

SEQ ID NO: 1461124 - DNA, 15 bp, Homo sapiens
acgcgctcagtcctc

SEQ ID NO: 1461125 - DNA, 15 bp, Homo sapiens
cgcgctcagtcctcg

SEQ ID NO: 1461126 - DNA, 15 bp, Homo sapiens
gcgctcagtcctcga

SEQ ID NO: 1461127 - DNA, 15 bp, Homo sapiens
cgctcagtcctcgag

SEQ ID NO: 1461128 - DNA, 15 bp, Homo sapiens
gctcagtcctcgagc

SEQ ID NO: 1461129 - DNA, 15 bp, Homo sapiens
ctcagtcctcgagcc

SEQ ID NO: 1461130 - DNA, 15 bp, Homo sapiens
tcagtcctcgagccc

SEQ ID NO: 1461131 - DNA, 15 bp, Homo sapiens
cagtcctcgagccca

SEQ ID NO: 1461132 - DNA, 15 bp, Homo sapiens
agtcctcgagcccac

SEQ ID NO: 1461133 - DNA, 15 bp, Homo sapiens
gtcctcgagcccacc

SEQ ID NO: 1461134 - DNA, 15 bp, Homo sapiens
tcctcgagcccacct

SEQ ID NO: 1461135 - DNA, 15 bp, Homo sapiens
cctcgagcccacctt

SEQ ID NO: 1461136 - DNA, 15 bp, Homo sapiens
ctcgagcccaccttc

SEQ ID NO: 1461137 - DNA, 15 bp, Homo sapiens
tcgagcccaccttct

SEQ ID NO: 1461138 - DNA, 15 bp, Homo sapiens
cgagcccaccttctt

SEQ ID NO: 1461139 - DNA, 15 bp, Homo sapiens
gagcccaccttcttt

SEQ ID NO: 1461140 - DNA, 15 bp, Homo sapiens
agcccaccttctttg

SEQ ID NO: 1461141 - DNA, 15 bp, Homo sapiens
gcccaccttctttgg

SEQ ID NO: 1461142 - DNA, 15 bp, Homo sapiens
cccaccttctttggc

SEQ ID NO: 1461143 - DNA, 15 bp, Homo sapiens
ccaccttctttggcc

SEQ ID NO: 1461144 - DNA, 15 bp, Homo sapiens
caccttctttggccc

SEQ ID NO: 1461145 - DNA, 15 bp, Homo sapiens
accttctttggcccc

SEQ ID NO: 1461146 - DNA, 15 bp, Homo sapiens
ccttctttggccccg

SEQ ID NO: 1461147 - DNA, 15 bp, Homo sapiens
cttctttggccccgc

SEQ ID NO: 1461148 - DNA, 15 bp, Homo sapiens
ttctttggccccgcc

SEQ ID NO: 1461149 - DNA, 15 bp, Homo sapiens
tctttggccccgccc

SEQ ID NO: 1461150 - DNA, 15 bp, Homo sapiens
ctttggccccgcccg

SEQ ID NO: 1461151 - DNA, 15 bp, Homo sapiens
tttggccccgcccgc

SEQ ID NO: 1461152 - DNA, 15 bp, Homo sapiens
ttggccccgcccgcc

SEQ ID NO: 1461153 - DNA, 15 bp, Homo sapiens
tggccccgcccgccc

SEQ ID NO: 1461154 - DNA, 15 bp, Homo sapiens
ggccccgcccgccct

SEQ ID NO: 1461155 - DNA, 15 bp, Homo sapiens
gccccgcccgccctt

SEQ ID NO: 1461156 - DNA, 15 bp, Homo sapiens
ccccgcccgcccttc

SEQ ID NO: 1461157 - DNA, 15 bp, Homo sapiens
cccgcccgcccttcg

SEQ ID NO: 1461158 - DNA, 15 bp, Homo sapiens
ccgcccgcccttcgg

SEQ ID NO: 1461159 - DNA, 15 bp, Homo sapiens
cgcccgcccttcgga

SEQ ID NO: 1461160 - DNA, 15 bp, Homo sapiens
gcccgcccttcggaa

SEQ ID NO: 1461161 - DNA, 15 bp, Homo sapiens
cccgcccttcggaag

SEQ ID NO: 1461162 - DNA, 15 bp, Homo sapiens
ccgcccttcggaagc

SEQ ID NO: 1461163 - DNA, 15 bp, Homo sapiens
cgcccttcggaagcg

SEQ ID NO: 1461164 - DNA, 15 bp, Homo sapiens
gcccttcggaagcgc

SEQ ID NO: 1461165 - DNA, 15 bp, Homo sapiens
cccttcggaagcgca

SEQ ID NO: 1461166 - DNA, 15 bp, Homo sapiens
ccttcggaagcgcag

SEQ ID NO: 1461167 - DNA, 15 bp, Homo sapiens
cttcggaagcgcaga

SEQ ID NO: 1461168 - DNA, 15 bp, Homo sapiens
ttcggaagcgcagat

SEQ ID NO: 1461169 - DNA, 15 bp, Homo sapiens
tcggaagcgcagatt

SEQ ID NO: 1461170 - DNA, 15 bp, Homo sapiens
cggaagcgcagattg

SEQ ID NO: 1461171 - DNA, 15 bp, Homo sapiens
ggaagcgcagattgc

SEQ ID NO: 1461172 - DNA, 15 bp, Homo sapiens
gaagcgcagattgct

SEQ ID NO: 1461173 - DNA, 15 bp, Homo sapiens
aagcgcagattgcta

SEQ ID NO: 1461174 - DNA, 15 bp, Homo sapiens
agcgcagattgctat

SEQ ID NO: 1461175 - DNA, 15 bp, Homo sapiens
gcgcagattgctata

SEQ ID NO: 1461176 - DNA, 15 bp, Homo sapiens
cgcagattgctatat

SEQ ID NO: 1461177 - DNA, 15 bp, Homo sapiens
gcagattgctatatt

SEQ ID NO: 1461178 - DNA, 15 bp, Homo sapiens
cagattgctatattt

SEQ ID NO: 1461179 - DNA, 15 bp, Homo sapiens
agattgctatatttg

SEQ ID NO: 1461180 - DNA, 15 bp, Homo sapiens
attgctatatttgac

SEQ ID NO: 1461181 - DNA, 15 bp, Homo sapiens
ttgctatatttgaca

SEQ ID NO: 1461182 - DNA, 15 bp, Homo sapiens
tgctatatttgacag

SEQ ID NO: 1461183 - DNA, 15 bp, Homo sapiens
gctatatttgacagc

SEQ ID NO: 1461184 - DNA, 15 bp, Homo sapiens
ctatatttgacagca

SEQ ID NO: 1461185 - DNA, 15 bp, Homo sapiens
tatatttgacagcac

SEQ ID NO: 1461186 - DNA, 15 bp, Homo sapiens
atatttgacagcaca

SEQ ID NO: 1461187 - DNA, 15 bp, Homo sapiens
tatttgacagcacat

SEQ ID NO: 1461188 - DNA, 15 bp, Homo sapiens
atttgacagcacatc

SEQ ID NO: 1461189 - DNA, 15 bp, Homo sapiens
tttgacagcacatcg

SEQ ID NO: 1461190 - DNA, 15 bp, Homo sapiens
ttgacagcacatcga

SEQ ID NO: 1461191 - DNA, 15 bp, Homo sapiens
tgacagcacatcgaa

SEQ ID NO: 1461192 - DNA, 15 bp, Homo sapiens
gacagcacatcgaag

SEQ ID NO: 1461193 - DNA, 15 bp, Homo sapiens
acagcacatcgaagg

SEQ ID NO: 1461194 - DNA, 15 bp, Homo sapiens
cagcacatcgaaggg

SEQ ID NO: 1461195 - DNA, 15 bp, Homo sapiens
agcacatcgaagggt

SEQ ID NO: 1461196 - DNA, 15 bp, Homo sapiens
gcacatcgaagggtt

SEQ ID NO: 1461197 - DNA, 15 bp, Homo sapiens
cacatcgaagggttt

SEQ ID NO: 1461198 - DNA, 15 bp, Homo sapiens
acatcgaagggtttt

SEQ ID NO: 1461199 - DNA, 15 bp, Homo sapiens
catcgaagggttttg

SEQ ID NO: 1461200 - DNA, 15 bp, Homo sapiens
atcgaagggttttgg

SEQ ID NO: 1461201 - DNA, 15 bp, Homo sapiens
tcgaagggttttggt

SEQ ID NO: 1461202 - DNA, 15 bp, Homo sapiens
cgaagggttttggtt

SEQ ID NO: 1461203 - DNA, 15 bp, Homo sapiens
gaagggttttggttt

SEQ ID NO: 1461204 - DNA, 15 bp, Homo sapiens
aagggttttggtttt

SEQ ID NO: 1461205 - DNA, 15 bp, Homo sapiens
agggttttggttttt

SEQ ID NO: 1461206 - DNA, 15 bp, Homo sapiens
tggtttttttttttc

SEQ ID NO: 1461207 - DNA, 15 bp, Homo sapiens
ggtttttttttttct

SEQ ID NO: 1461208 - DNA, 15 bp, Homo sapiens
gtttttttttttctt

SEQ ID NO: 1461209 - DNA, 15 bp, Homo sapiens
ttttttttcttttcc

SEQ ID NO: 1461210 - DNA, 15 bp, Homo sapiens
tttttttcttttcca

SEQ ID NO: 1461211 - DNA, 15 bp, Homo sapiens
ttttttcttttccac

SEQ ID NO: 1461212 - DNA, 15 bp, Homo sapiens
tttttcttttccaca

SEQ ID NO: 1461213 - DNA, 15 bp, Homo sapiens
ttttcttttccacaa

SEQ ID NO: 1461214 - DNA, 15 bp, Homo sapiens
tttcttttccacaac

SEQ ID NO: 1461215 - DNA, 15 bp, Homo sapiens
ttcttttccacaaca

SEQ ID NO: 1461216 - DNA, 15 bp, Homo sapiens
tcttttccacaacag

SEQ ID NO: 1461217 - DNA, 15 bp, Homo sapiens
cttttccacaacagt

SEQ ID NO: 1461218 - DNA, 15 bp, Homo sapiens
ttttccacaacagtt

SEQ ID NO: 1461219 - DNA, 15 bp, Homo sapiens
tttccacaacagttt

SEQ ID NO: 1461220 - DNA, 15 bp, Homo sapiens
ttccacaacagtttc

SEQ ID NO: 1461221 - DNA, 15 bp, Homo sapiens
tccacaacagtttcc

SEQ ID NO: 1461222 - DNA, 15 bp, Homo sapiens
ccacaacagtttcca

SEQ ID NO: 1461223 - DNA, 15 bp, Homo sapiens
cacaacagtttccaa

SEQ ID NO: 1461224 - DNA, 15 bp, Homo sapiens
acaacagtttccaag

SEQ ID NO: 1461225 - DNA, 15 bp, Homo sapiens
caacagtttccaaga

SEQ ID NO: 1461226 - DNA, 15 bp, Homo sapiens
aacagtttccaagaa

SEQ ID NO: 1461227 - DNA, 15 bp, Homo sapiens
acagtttccaagaat

SEQ ID NO: 1461228 - DNA, 15 bp, Homo sapiens
cagtttccaagaatg

SEQ ID NO: 1461229 - DNA, 15 bp, Homo sapiens
agtttccaagaatgt

SEQ ID NO: 1461230 - DNA, 15 bp, Homo sapiens
gtttccaagaatgta

SEQ ID NO: 1461231 - DNA, 15 bp, Homo sapiens
tttccaagaatgtaa

SEQ ID NO: 1461232 - DNA, 15 bp, Homo sapiens
ttccaagaatgtaaa

SEQ ID NO: 1461233 - DNA, 15 bp, Homo sapiens
tccaagaatgtaaac

SEQ ID NO: 1461234 - DNA, 15 bp, Homo sapiens
ccaagaatgtaaaca

SEQ ID NO: 1461235 - DNA, 15 bp, Homo sapiens
caagaatgtaaacaa

SEQ ID NO: 1461236 - DNA, 15 bp, Homo sapiens
aagaatgtaaacaaa

SEQ ID NO: 1461237 - DNA, 15 bp, Homo sapiens
agaatgtaaacaaac

SEQ ID NO: 1461238 - DNA, 15 bp, Homo sapiens
gaatgtaaacaaact

SEQ ID NO: 1461239 - DNA, 15 bp, Homo sapiens
aatgtaaacaaactg

SEQ ID NO: 1461240 - DNA, 15 bp, Homo sapiens
atgtaaacaaactga

SEQ ID NO: 1461241 - DNA, 15 bp, Homo sapiens
tgtaaacaaactgaa

SEQ ID NO: 1461242 - DNA, 15 bp, Homo sapiens
gtaaacaaactgaag

SEQ ID NO: 1461243 - DNA, 15 bp, Homo sapiens
taaacaaactgaagc

SEQ ID NO: 1461244 - DNA, 15 bp, Homo sapiens
aaacaaactgaagct

SEQ ID NO: 1461245 - DNA, 15 bp, Homo sapiens
aacaaactgaagctg

SEQ ID NO: 1461246 - DNA, 15 bp, Homo sapiens
acaaactgaagctgg

SEQ ID NO: 1461247 - DNA, 15 bp, Homo sapiens
caaactgaagctggg

SEQ ID NO: 1461248 - DNA, 15 bp, Homo sapiens
aaactgaagctggga

SEQ ID NO: 1461249 - DNA, 15 bp, Homo sapiens
aactgaagctgggac

SEQ ID NO: 1461250 - DNA, 15 bp, Homo sapiens
actgaagctgggaca

SEQ ID NO: 1461251 - DNA, 15 bp, Homo sapiens
ctgaagctgggacac

SEQ ID NO: 1461252 - DNA, 15 bp, Homo sapiens
tgaagctgggacacc

SEQ ID NO: 1461253 - DNA, 15 bp, Homo sapiens
gaagctgggacacct

SEQ ID NO: 1461254 - DNA, 15 bp, Homo sapiens
aagctgggacacctg

SEQ ID NO: 1461255 - DNA, 15 bp, Homo sapiens
agctgggacacctgg

SEQ ID NO: 1461256 - DNA, 15 bp, Homo sapiens
gctgggacacctggg

SEQ ID NO: 1461257 - DNA, 15 bp, Homo sapiens
ctgggacacctgggt

SEQ ID NO: 1461258 - DNA, 15 bp, Homo sapiens
tgggacacctgggtt

SEQ ID NO: 1461259 - DNA, 15 bp, Homo sapiens
gggacacctgggtta

SEQ ID NO: 1461260 - DNA, 15 bp, Homo sapiens
ggacacctgggttac

SEQ ID NO: 1461261 - DNA, 15 bp, Homo sapiens
gacacctgggttaca

SEQ ID NO: 1461262 - DNA, 15 bp, Homo sapiens
acacctgggttacaa

SEQ ID NO: 1461263 - DNA, 15 bp, Homo sapiens
cacctgggttacaag

SEQ ID NO: 1461264 - DNA, 15 bp, Homo sapiens
acctgggttacaagt

SEQ ID NO: 1461265 - DNA, 15 bp, Homo sapiens
cctgggttacaagtt

SEQ ID NO: 1461266 - DNA, 15 bp, Homo sapiens
ctgggttacaagtta

SEQ ID NO: 1461267 - DNA, 15 bp, Homo sapiens
tgggttacaagttaa

SEQ ID NO: 1461268 - DNA, 15 bp, Homo sapiens
gggttacaagttaaa

SEQ ID NO: 1461269 - DNA, 15 bp, Homo sapiens
ggttacaagttaaat

SEQ ID NO: 1461270 - DNA, 15 bp, Homo sapiens
gttacaagttaaatg

SEQ ID NO: 1461271 - DNA, 15 bp, Homo sapiens
ttacaagttaaatga

SEQ ID NO: 1461272 - DNA, 15 bp, Homo sapiens
tacaagttaaatgaa

SEQ ID NO: 1461273 - DNA, 15 bp, Homo sapiens
acaagttaaatgaaa

SEQ ID NO: 1461274 - DNA, 15 bp, Homo sapiens
caagttaaatgaaaa

SEQ ID NO: 1461275 - DNA, 15 bp, Homo sapiens
aagttaaatgaaaat

SEQ ID NO: 1461276 - DNA, 15 bp, Homo sapiens
agttaaatgaaaatc

SEQ ID NO: 1461277 - DNA, 15 bp, Homo sapiens
gttaaatgaaaatcc

SEQ ID NO: 1461278 - DNA, 15 bp, Homo sapiens
ttaaatgaaaatccg

SEQ ID NO: 1461279 - DNA, 15 bp, Homo sapiens
taaatgaaaatccgc

SEQ ID NO: 1461280 - DNA, 15 bp, Homo sapiens
aaatgaaaatccgct

SEQ ID NO: 1461281 - DNA, 15 bp, Homo sapiens
aatgaaaatccgctg

SEQ ID NO: 1461282 - DNA, 15 bp, Homo sapiens
atgaaaatccgctgg

SEQ ID NO: 1461283 - DNA, 15 bp, Homo sapiens
tgaaaatccgctggc

SEQ ID NO: 1461284 - DNA, 15 bp, Homo sapiens
gaaaatccgctggct

SEQ ID NO: 1461285 - DNA, 15 bp, Homo sapiens
aaaatccgctggctg

SEQ ID NO: 1461286 - DNA, 15 bp, Homo sapiens
aaatccgctggctgg

SEQ ID NO: 1461287 - DNA, 15 bp, Homo sapiens
aatccgctggctggg

SEQ ID NO: 1461288 - DNA, 15 bp, Homo sapiens
atccgctggctgggt

SEQ ID NO: 1461289 - DNA, 15 bp, Homo sapiens
tccgctggctgggtg

SEQ ID NO: 1461290 - DNA, 15 bp, Homo sapiens
ccgctggctgggtgg

SEQ ID NO: 1461291 - DNA, 15 bp, Homo sapiens
cgctggctgggtggg

SEQ ID NO: 1461292 - DNA, 15 bp, Homo sapiens
gctggctgggtgggg

SEQ ID NO: 1461293 - DNA, 15 bp, Homo sapiens
ctggctgggtggggc

SEQ ID NO: 1461294 - DNA, 15 bp, Homo sapiens
tggctgggtggggcg

SEQ ID NO: 1461295 - DNA, 15 bp, Homo sapiens
ggctgggtggggcgg

SEQ ID NO: 1461296 - DNA, 15 bp, Homo sapiens
gctgggtggggcggg

SEQ ID NO: 1461297 - DNA, 15 bp, Homo sapiens
ctgggtggggcgggg

SEQ ID NO: 1461298 - DNA, 15 bp, Homo sapiens
tgggtggggcgggga

SEQ ID NO: 1461299 - DNA, 15 bp, Homo sapiens
gggtggggcggggag

SEQ ID NO: 1461300 - DNA, 15 bp, Homo sapiens
ggtggggcggggagt

SEQ ID NO: 1461301 - DNA, 15 bp, Homo sapiens
gtggggcggggagtg

SEQ ID NO: 1461302 - DNA, 15 bp, Homo sapiens
tggggcggggagtgc

SEQ ID NO: 1461303 - DNA, 15 bp, Homo sapiens
ggggcggggagtgcg

SEQ ID NO: 1461304 - DNA, 15 bp, Homo sapiens
gggcggggagtgcgc

SEQ ID NO: 1461305 - DNA, 15 bp, Homo sapiens
ggcggggagtgcgca

SEQ ID NO: 1461306 - DNA, 15 bp, Homo sapiens
gcggggagtgcgcac

SEQ ID NO: 1461307 - DNA, 15 bp, Homo sapiens
cggggagtgcgcacc

SEQ ID NO: 1461308 - DNA, 15 bp, Homo sapiens
ggggagtgcgcacca

SEQ ID NO: 1461309 - DNA, 15 bp, Homo sapiens
gggagtgcgcaccag

SEQ ID NO: 1461310 - DNA, 15 bp, Homo sapiens
ggagtgcgcaccagg

SEQ ID NO: 1461311 - DNA, 15 bp, Homo sapiens
gagtgcgcaccagga

SEQ ID NO: 1461312 - DNA, 15 bp, Homo sapiens
agtgcgcaccaggag

SEQ ID NO: 1461313 - DNA, 15 bp, Homo sapiens
gtgcgcaccaggagg

SEQ ID NO: 1461314 - DNA, 15 bp, Homo sapiens
tgcgcaccaggaggc

SEQ ID NO: 1461315 - DNA, 15 bp, Homo sapiens
gcgcaccaggaggcc

SEQ ID NO: 1461316 - DNA, 15 bp, Homo sapiens
cgcaccaggaggccc

SEQ ID NO: 1461317 - DNA, 15 bp, Homo sapiens
gcaccaggaggccct

SEQ ID NO: 1461318 - DNA, 15 bp, Homo sapiens
caccaggaggccctg

SEQ ID NO: 1461319 - DNA, 15 bp, Homo sapiens
accaggaggccctgc

SEQ ID NO: 1461320 - DNA, 15 bp, Homo sapiens
ccaggaggccctgct

SEQ ID NO: 1461321 - DNA, 15 bp, Homo sapiens
caggaggccctgctc

SEQ ID NO: 1461322 - DNA, 15 bp, Homo sapiens
aggaggccctgctca

SEQ ID NO: 1461323 - DNA, 15 bp, Homo sapiens
ggaggccctgctcat

SEQ ID NO: 1461324 - DNA, 15 bp, Homo sapiens
gaggccctgctcatg

SEQ ID NO: 1461325 - DNA, 15 bp, Homo sapiens
aggccctgctcatgg

SEQ ID NO: 1461326 - DNA, 15 bp, Homo sapiens
ggccctgctcatggg

SEQ ID NO: 1461327 - DNA, 15 bp, Homo sapiens
gccctgctcatggga

SEQ ID NO: 1461328 - DNA, 15 bp, Homo sapiens
ccctgctcatgggag

SEQ ID NO: 1461329 - DNA, 15 bp, Homo sapiens
cctgctcatgggagg

SEQ ID NO: 1461330 - DNA, 15 bp, Homo sapiens
ctgctcatgggaggg

SEQ ID NO: 1461331 - DNA, 15 bp, Homo sapiens
tgctcatgggagggg

SEQ ID NO: 1461332 - DNA, 15 bp, Homo sapiens
gctcatgggaggggc

SEQ ID NO: 1461333 - DNA, 15 bp, Homo sapiens
ctcatgggaggggcg

SEQ ID NO: 1461334 - DNA, 15 bp, Homo sapiens
tcatgggaggggcgg

SEQ ID NO: 1461335 - DNA, 15 bp, Homo sapiens
catgggaggggcggt

SEQ ID NO: 1461336 - DNA, 15 bp, Homo sapiens
atgggaggggcggtg

SEQ ID NO: 1461337 - DNA, 15 bp, Homo sapiens
tgggaggggcggtga

SEQ ID NO: 1461338 - DNA, 15 bp, Homo sapiens
gggaggggcggtgac

SEQ ID NO: 1461339 - DNA, 15 bp, Homo sapiens
ggaggggcggtgact

SEQ ID NO: 1461340 - DNA, 15 bp, Homo sapiens
gaggggcggtgactg

SEQ ID NO: 1461341 - DNA, 15 bp, Homo sapiens
aggggcggtgactgg

SEQ ID NO: 1461342 - DNA, 15 bp, Homo sapiens
ggggcggtgactggg

SEQ ID NO: 1461343 - DNA, 15 bp, Homo sapiens
gggcggtgactgggt

SEQ ID NO: 1461344 - DNA, 15 bp, Homo sapiens
ggcggtgactgggtc

SEQ ID NO: 1461345 - DNA, 15 bp, Homo sapiens
gcggtgactgggtcc

SEQ ID NO: 1461346 - DNA, 15 bp, Homo sapiens
cggtgactgggtccc

SEQ ID NO: 1461347 - DNA, 15 bp, Homo sapiens
ggtgactgggtcccc

SEQ ID NO: 1461348 - DNA, 15 bp, Homo sapiens
gtgactgggtcccct

SEQ ID NO: 1461349 - DNA, 15 bp, Homo sapiens
tgactgggtcccctc

SEQ ID NO: 1461350 - DNA, 15 bp, Homo sapiens
gactgggtcccctca

SEQ ID NO: 1461351 - DNA, 15 bp, Homo sapiens
actgggtcccctcac

SEQ ID NO: 1461352 - DNA, 15 bp, Homo sapiens
ctgggtcccctcacg

SEQ ID NO: 1461353 - DNA, 15 bp, Homo sapiens
tgggtcccctcacgc

SEQ ID NO: 1461354 - DNA, 15 bp, Homo sapiens
gggtcccctcacgcc

SEQ ID NO: 1461355 - DNA, 15 bp, Homo sapiens
ggtcccctcacgcca

SEQ ID NO: 1461356 - DNA, 15 bp, Homo sapiens
gtcccctcacgccat

SEQ ID NO: 1461357 - DNA, 15 bp, Homo sapiens
tcccctcacgccatg

SEQ ID NO: 1461358 - DNA, 15 bp, Homo sapiens
cccctcacgccatgc

SEQ ID NO: 1461359 - DNA, 15 bp, Homo sapiens
ccctcacgccatgca

SEQ ID NO: 1461360 - DNA, 15 bp, Homo sapiens
cctcacgccatgcag

SEQ ID NO: 1461361 - DNA, 15 bp, Homo sapiens
ctcacgccatgcagc

SEQ ID NO: 1461362 - DNA, 15 bp, Homo sapiens
tcacgccatgcagcc

SEQ ID NO: 1461363 - DNA, 15 bp, Homo sapiens
cacgccatgcagccg

SEQ ID NO: 1461364 - DNA, 15 bp, Homo sapiens
acgccatgcagccgc

SEQ ID NO: 1461365 - DNA, 15 bp, Homo sapiens
cgccatgcagccgcg

SEQ ID NO: 1461366 - DNA, 15 bp, Homo sapiens
gccatgcagccgcga

SEQ ID NO: 1461367 - DNA, 15 bp, Homo sapiens
ccatgcagccgcgac

SEQ ID NO: 1461368 - DNA, 15 bp, Homo sapiens
catgcagccgcgacc

SEQ ID NO: 1461369 - DNA, 15 bp, Homo sapiens
atgcagccgcgacct

SEQ ID NO: 1461370 - DNA, 15 bp, Homo sapiens
tgcagccgcgacctg

SEQ ID NO: 1461371 - DNA, 15 bp, Homo sapiens
gcagccgcgacctga

SEQ ID NO: 1461372 - DNA, 15 bp, Homo sapiens
cagccgcgacctgac

SEQ ID NO: 1461373 - DNA, 15 bp, Homo sapiens
agccgcgacctgacg

SEQ ID NO: 1461374 - DNA, 15 bp, Homo sapiens
gccgcgacctgacgc

SEQ ID NO: 1461375 - DNA, 15 bp, Homo sapiens
ccgcgacctgacgcc

SEQ ID NO: 1461376 - DNA, 15 bp, Homo sapiens
cgcgacctgacgccc

SEQ ID NO: 1461377 - DNA, 15 bp, Homo sapiens
gcgacctgacgccct

SEQ ID NO: 1461378 - DNA, 15 bp, Homo sapiens
cgacctgacgccctc

SEQ ID NO: 1461379 - DNA, 15 bp, Homo sapiens
gacctgacgccctcc

SEQ ID NO: 1461380 - DNA, 15 bp, Homo sapiens
acctgacgccctccg

SEQ ID NO: 1461381 - DNA, 15 bp, Homo sapiens
cctgacgccctccga

SEQ ID NO: 1461382 - DNA, 15 bp, Homo sapiens
ctgacgccctccgag

SEQ ID NO: 1461383 - DNA, 15 bp, Homo sapiens
tgacgccctccgagt

SEQ ID NO: 1461384 - DNA, 15 bp, Homo sapiens
gacgccctccgagta

SEQ ID NO: 1461385 - DNA, 15 bp, Homo sapiens
acgccctccgagtag

SEQ ID NO: 1461386 - DNA, 15 bp, Homo sapiens
cgccctccgagtagg

SEQ ID NO: 1461387 - DNA, 15 bp, Homo sapiens
gccctccgagtaggg

SEQ ID NO: 1461388 - DNA, 15 bp, Homo sapiens
ccctccgagtaggga

SEQ ID NO: 1461389 - DNA, 15 bp, Homo sapiens
cctccgagtagggac

SEQ ID NO: 1461390 - DNA, 15 bp, Homo sapiens
ctccgagtagggacc

SEQ ID NO: 1461391 - DNA, 15 bp, Homo sapiens
tccgagtagggaccc

SEQ ID NO: 1461392 - DNA, 15 bp, Homo sapiens
ccgagtagggaccca

SEQ ID NO: 1461393 - DNA, 15 bp, Homo sapiens
cgagtagggacccaa

SEQ ID NO: 1461394 - DNA, 15 bp, Homo sapiens
gagtagggacccaaa

SEQ ID NO: 1461395 - DNA, 15 bp, Homo sapiens
agtagggacccaaag

SEQ ID NO: 1461396 - DNA, 15 bp, Homo sapiens
gtagggacccaaagc

SEQ ID NO: 1461397 - DNA, 15 bp, Homo sapiens
tagggacccaaagct

SEQ ID NO: 1461398 - DNA, 15 bp, Homo sapiens
agggacccaaagctt

SEQ ID NO: 1461399 - DNA, 15 bp, Homo sapiens
gggacccaaagctta

SEQ ID NO: 1461400 - DNA, 15 bp, Homo sapiens
ggacccaaagcttag

SEQ ID NO: 1461401 - DNA, 15 bp, Homo sapiens
gacccaaagcttagg

SEQ ID NO: 1461402 - DNA, 15 bp, Homo sapiens
acccaaagcttagga

SEQ ID NO: 1461403 - DNA, 15 bp, Homo sapiens
cccaaagcttaggac

SEQ ID NO: 1461404 - DNA, 15 bp, Homo sapiens
ccaaagcttaggacc

SEQ ID NO: 1461405 - DNA, 15 bp, Homo sapiens
caaagcttaggacca

SEQ ID NO: 1461406 - DNA, 15 bp, Homo sapiens
aaagcttaggaccat

SEQ ID NO: 1461407 - DNA, 15 bp, Homo sapiens
aagcttaggaccatc

SEQ ID NO: 1461408 - DNA, 15 bp, Homo sapiens
agcttaggaccatct

SEQ ID NO: 1461409 - DNA, 15 bp, Homo sapiens
gcttaggaccatctg

SEQ ID NO: 1461410 - DNA, 15 bp, Homo sapiens
cttaggaccatctga

SEQ ID NO: 1461411 - DNA, 15 bp, Homo sapiens
ttaggaccatctgag

SEQ ID NO: 1461412 - DNA, 15 bp, Homo sapiens
taggaccatctgagt

SEQ ID NO: 1461413 - DNA, 15 bp, Homo sapiens
aggaccatctgagtc

SEQ ID NO: 1461414 - DNA, 15 bp, Homo sapiens
ggaccatctgagtca

SEQ ID NO: 1461415 - DNA, 15 bp, Homo sapiens
gaccatctgagtcag

SEQ ID NO: 1461416 - DNA, 15 bp, Homo sapiens
accatctgagtcagt

SEQ ID NO: 1461417 - DNA, 15 bp, Homo sapiens
ccatctgagtcagtc

SEQ ID NO: 1461418 - DNA, 15 bp, Homo sapiens
catctgagtcagtcc

SEQ ID NO: 1461419 - DNA, 15 bp, Homo sapiens
atctgagtcagtccg

SEQ ID NO: 1461420 - DNA, 15 bp, Homo sapiens
tctgagtcagtccga

SEQ ID NO: 1461421 - DNA, 15 bp, Homo sapiens
ctgagtcagtccgag

SEQ ID NO: 1461422 - DNA, 15 bp, Homo sapiens
tgagtcagtccgaga

SEQ ID NO: 1461423 - DNA, 15 bp, Homo sapiens
gagtcagtccgagag

SEQ ID NO: 1461424 - DNA, 15 bp, Homo sapiens
agtcagtccgagagc

SEQ ID NO: 1461425 - DNA, 15 bp, Homo sapiens
gtcagtccgagagcg

SEQ ID NO: 1461426 - DNA, 15 bp, Homo sapiens
tcagtccgagagcgg

SEQ ID NO: 1461427 - DNA, 15 bp, Homo sapiens
cagtccgagagcgga

SEQ ID NO: 1461428 - DNA, 15 bp, Homo sapiens
agtccgagagcggag

SEQ ID NO: 1461429 - DNA, 15 bp, Homo sapiens
gtccgagagcggagg

SEQ ID NO: 1461430 - DNA, 15 bp, Homo sapiens
tccgagagcggagga

SEQ ID NO: 1461431 - DNA, 15 bp, Homo sapiens
ccgagagcggaggag

SEQ ID NO: 1461432 - DNA, 15 bp, Homo sapiens
cgagagcggaggagg

SEQ ID NO: 1461433 - DNA, 15 bp, Homo sapiens
gagagcggaggagga

SEQ ID NO: 1461434 - DNA, 15 bp, Homo sapiens
agagcggaggaggaa

SEQ ID NO: 1461435 - DNA, 15 bp, Homo sapiens
gagcggaggaggaag

SEQ ID NO: 1461436 - DNA, 15 bp, Homo sapiens
agcggaggaggaagg

SEQ ID NO: 1461437 - DNA, 15 bp, Homo sapiens
gcggaggaggaagga

SEQ ID NO: 1461438 - DNA, 15 bp, Homo sapiens
cggaggaggaaggac

SEQ ID NO: 1461439 - DNA, 15 bp, Homo sapiens
ggaggaggaaggact

SEQ ID NO: 1461440 - DNA, 15 bp, Homo sapiens
gaggaggaaggactc

SEQ ID NO: 1461441 - DNA, 15 bp, Homo sapiens
aggaggaaggactct

SEQ ID NO: 1461442 - DNA, 15 bp, Homo sapiens
ggaggaaggactctc

SEQ ID NO: 1461443 - DNA, 15 bp, Homo sapiens
gaggaaggactctcc

SEQ ID NO: 1461444 - DNA, 15 bp, Homo sapiens
aggaaggactctccg

SEQ ID NO: 1461445 - DNA, 15 bp, Homo sapiens
ggaaggactctccgc

SEQ ID NO: 1461446 - DNA, 15 bp, Homo sapiens
gaaggactctccgca

SEQ ID NO: 1461447 - DNA, 15 bp, Homo sapiens
aaggactctccgcag

SEQ ID NO: 1461448 - DNA, 15 bp, Homo sapiens
aggactctccgcagt

SEQ ID NO: 1461449 - DNA, 15 bp, Homo sapiens
ggactctccgcagtg

SEQ ID NO: 1461450 - DNA, 15 bp, Homo sapiens
gactctccgcagtgc

SEQ ID NO: 1461451 - DNA, 15 bp, Homo sapiens
actctccgcagtgct

SEQ ID NO: 1461452 - DNA, 15 bp, Homo sapiens
ctctccgcagtgctg

SEQ ID NO: 1461453 - DNA, 15 bp, Homo sapiens
tctccgcagtgctgc

SEQ ID NO: 1461454 - DNA, 15 bp, Homo sapiens
ctccgcagtgctgca

SEQ ID NO: 1461455 - DNA, 15 bp, Homo sapiens
tccgcagtgctgcaa

SEQ ID NO: 1461456 - DNA, 15 bp, Homo sapiens
ccgcagtgctgcaaa

SEQ ID NO: 1461457 - DNA, 15 bp, Homo sapiens
cgcagtgctgcaaac

SEQ ID NO: 1461458 - DNA, 15 bp, Homo sapiens
gcagtgctgcaaaca

SEQ ID NO: 1461459 - DNA, 15 bp, Homo sapiens
cagtgctgcaaacac

SEQ ID NO: 1461460 - DNA, 15 bp, Homo sapiens
agtgctgcaaacacc

SEQ ID NO: 1461461 - DNA, 15 bp, Homo sapiens
gtgctgcaaacaccc

SEQ ID NO: 1461462 - DNA, 15 bp, Homo sapiens
tgctgcaaacacccg

SEQ ID NO: 1461463 - DNA, 15 bp, Homo sapiens
gctgcaaacacccgc

SEQ ID NO: 1461464 - DNA, 15 bp, Homo sapiens
ctgcaaacacccgca

SEQ ID NO: 1461465 - DNA, 15 bp, Homo sapiens
tgcaaacacccgcat

SEQ ID NO: 1461466 - DNA, 15 bp, Homo sapiens
gcaaacacccgcata

SEQ ID NO: 1461467 - DNA, 15 bp, Homo sapiens
caaacacccgcatac

SEQ ID NO: 1461468 - DNA, 15 bp, Homo sapiens
aaacacccgcatact

SEQ ID NO: 1461469 - DNA, 15 bp, Homo sapiens
aacacccgcatactt

SEQ ID NO: 1461470 - DNA, 15 bp, Homo sapiens
acacccgcatacttt

SEQ ID NO: 1461471 - DNA, 15 bp, Homo sapiens
cacccgcatactttt

SEQ ID NO: 1461472 - DNA, 15 bp, Homo sapiens
acccgcatacttttc

SEQ ID NO: 1461473 - DNA, 15 bp, Homo sapiens
cccgcatacttttcc

SEQ ID NO: 1461474 - DNA, 15 bp, Homo sapiens
ccgcatacttttccc

SEQ ID NO: 1461475 - DNA, 15 bp, Homo sapiens
cgcatacttttccca

SEQ ID NO: 1461476 - DNA, 15 bp, Homo sapiens
gcatacttttcccag

SEQ ID NO: 1461477 - DNA, 15 bp, Homo sapiens
catacttttcccaga

SEQ ID NO: 1461478 - DNA, 15 bp, Homo sapiens
atacttttcccagat

SEQ ID NO: 1461479 - DNA, 15 bp, Homo sapiens
tacttttcccagatc

SEQ ID NO: 1461480 - DNA, 15 bp, Homo sapiens
acttttcccagatct

SEQ ID NO: 1461481 - DNA, 15 bp, Homo sapiens
cttttcccagatctc

SEQ ID NO: 1461482 - DNA, 15 bp, Homo sapiens
ttttcccagatctct

SEQ ID NO: 1461483 - DNA, 15 bp, Homo sapiens
tttcccagatctctg

SEQ ID NO: 1461484 - DNA, 15 bp, Homo sapiens
ttcccagatctctgc

SEQ ID NO: 1461485 - DNA, 15 bp, Homo sapiens
tcccagatctctgcc

SEQ ID NO: 1461486 - DNA, 15 bp, Homo sapiens
cccagatctctgccc

SEQ ID NO: 1461487 - DNA, 15 bp, Homo sapiens
ccagatctctgcccc

SEQ ID NO: 1461488 - DNA, 15 bp, Homo sapiens
cagatctctgccccg

SEQ ID NO: 1461489 - DNA, 15 bp, Homo sapiens
agatctctgccccgc

SEQ ID NO: 1461490 - DNA, 15 bp, Homo sapiens
gatctctgccccgcc

SEQ ID NO: 1461491 - DNA, 15 bp, Homo sapiens
atctctgccccgccc

SEQ ID NO: 1461492 - DNA, 15 bp, Homo sapiens
tctctgccccgccct

SEQ ID NO: 1461493 - DNA, 15 bp, Homo sapiens
ctctgccccgccctc

SEQ ID NO: 1461494 - DNA, 15 bp, Homo sapiens
tctgccccgccctcc

SEQ ID NO: 1461495 - DNA, 15 bp, Homo sapiens
ctgccccgccctccc

SEQ ID NO: 1461496 - DNA, 15 bp, Homo sapiens
tgccccgccctcccc

SEQ ID NO: 1461497 - DNA, 15 bp, Homo sapiens
gccccgccctcccca

SEQ ID NO: 1461498 - DNA, 15 bp, Homo sapiens
ccccgccctccccat

SEQ ID NO: 1461499 - DNA, 15 bp, Homo sapiens
cccgccctccccatc

SEQ ID NO: 1461500 - DNA, 15 bp, Homo sapiens
ccgccctccccatcc

SEQ ID NO: 1461501 - DNA, 15 bp, Homo sapiens
cgccctccccatcct

SEQ ID NO: 1461502 - DNA, 15 bp, Homo sapiens
gccctccccatcctg

SEQ ID NO: 1461503 - DNA, 15 bp, Homo sapiens
ccctccccatcctga

SEQ ID NO: 1461504 - DNA, 15 bp, Homo sapiens
cctccccatcctgaa

SEQ ID NO: 1461505 - DNA, 15 bp, Homo sapiens
ctccccatcctgaag

SEQ ID NO: 1461506 - DNA, 15 bp, Homo sapiens
tccccatcctgaagc

SEQ ID NO: 1461507 - DNA, 15 bp, Homo sapiens
ccccatcctgaagcc

SEQ ID NO: 1461508 - DNA, 15 bp, Homo sapiens
cccatcctgaagccc

SEQ ID NO: 1461509 - DNA, 15 bp, Homo sapiens
ccatcctgaagcccc

SEQ ID NO: 1461510 - DNA, 15 bp, Homo sapiens
catcctgaagccccg

SEQ ID NO: 1461511 - DNA, 15 bp, Homo sapiens
atcctgaagccccgc

SEQ ID NO: 1461512 - DNA, 15 bp, Homo sapiens
tcctgaagccccgcc

SEQ ID NO: 1461513 - DNA, 15 bp, Homo sapiens
cctgaagccccgcct

SEQ ID NO: 1461514 - DNA, 15 bp, Homo sapiens
ctgaagccccgcctc

SEQ ID NO: 1461515 - DNA, 15 bp, Homo sapiens
tgaagccccgcctcc

SEQ ID NO: 1461516 - DNA, 15 bp, Homo sapiens
gaagccccgcctcca

SEQ ID NO: 1461517 - DNA, 15 bp, Homo sapiens
aagccccgcctccaa

SEQ ID NO: 1461518 - DNA, 15 bp, Homo sapiens
agccccgcctccaag

SEQ ID NO: 1461519 - DNA, 15 bp, Homo sapiens
gccccgcctccaagt

SEQ ID NO: 1461520 - DNA, 15 bp, Homo sapiens
ccccgcctccaagtg

SEQ ID NO: 1461521 - DNA, 15 bp, Homo sapiens
cccgcctccaagtgc

SEQ ID NO: 1461522 - DNA, 15 bp, Homo sapiens
ccgcctccaagtgct

SEQ ID NO: 1461523 - DNA, 15 bp, Homo sapiens
cgcctccaagtgctc

SEQ ID NO: 1461524 - DNA, 15 bp, Homo sapiens
gcctccaagtgctcc

SEQ ID NO: 1461525 - DNA, 15 bp, Homo sapiens
cctccaagtgctccc

SEQ ID NO: 1461526 - DNA, 15 bp, Homo sapiens
ctccaagtgctcccc

SEQ ID NO: 1461527 - DNA, 15 bp, Homo sapiens
tccaagtgctcccca

SEQ ID NO: 1461528 - DNA, 15 bp, Homo sapiens
ccaagtgctccccag

SEQ ID NO: 1461529 - DNA, 15 bp, Homo sapiens
caagtgctccccaga

SEQ ID NO: 1461530 - DNA, 15 bp, Homo sapiens
aagtgctccccagac

SEQ ID NO: 1461531 - DNA, 15 bp, Homo sapiens
agtgctccccagacc

SEQ ID NO: 1461532 - DNA, 15 bp, Homo sapiens
gtgctccccagaccg

SEQ ID NO: 1461533 - DNA, 15 bp, Homo sapiens
tgctccccagaccgg

SEQ ID NO: 1461534 - DNA, 15 bp, Homo sapiens
gctccccagaccggt

SEQ ID NO: 1461535 - DNA, 15 bp, Homo sapiens
ctccccagaccggtc

SEQ ID NO: 1461536 - DNA, 15 bp, Homo sapiens
tccccagaccggtca

SEQ ID NO: 1461537 - DNA, 15 bp, Homo sapiens
ccccagaccggtcag

SEQ ID NO: 1461538 - DNA, 15 bp, Homo sapiens
cccagaccggtcagt

SEQ ID NO: 1461539 - DNA, 15 bp, Homo sapiens
ccagaccggtcagtg

SEQ ID NO: 1461540 - DNA, 15 bp, Homo sapiens
cagaccggtcagtga

SEQ ID NO: 1461541 - DNA, 15 bp, Homo sapiens
agaccggtcagtgag

SEQ ID NO: 1461542 - DNA, 15 bp, Homo sapiens
gaccggtcagtgagg

SEQ ID NO: 1461543 - DNA, 15 bp, Homo sapiens
accggtcagtgaggc

SEQ ID NO: 1461544 - DNA, 15 bp, Homo sapiens
ccggtcagtgaggcc

SEQ ID NO: 1461545 - DNA, 15 bp, Homo sapiens
cggtcagtgaggccc

SEQ ID NO: 1461546 - DNA, 15 bp, Homo sapiens
ggtcagtgaggccca

SEQ ID NO: 1461547 - DNA, 15 bp, Homo sapiens
gtcagtgaggcccag

SEQ ID NO: 1461548 - DNA, 15 bp, Homo sapiens
tcagtgaggcccagc

SEQ ID NO: 1461549 - DNA, 15 bp, Homo sapiens
cagtgaggcccagct

SEQ ID NO: 1461550 - DNA, 15 bp, Homo sapiens
agtgaggcccagctg

SEQ ID NO: 1461551 - DNA, 15 bp, Homo sapiens
gtgaggcccagctga

SEQ ID NO: 1461552 - DNA, 15 bp, Homo sapiens
tgaggcccagctgag

SEQ ID NO: 1461553 - DNA, 15 bp, Homo sapiens
gaggcccagctgagc

SEQ ID NO: 1461554 - DNA, 15 bp, Homo sapiens
aggcccagctgagct

SEQ ID NO: 1461555 - DNA, 15 bp, Homo sapiens
ggcccagctgagctc

SEQ ID NO: 1461556 - DNA, 15 bp, Homo sapiens
gcccagctgagctcc

SEQ ID NO: 1461557 - DNA, 15 bp, Homo sapiens
cccagctgagctccc

SEQ ID NO: 1461558 - DNA, 15 bp, Homo sapiens
ccagctgagctccct

SEQ ID NO: 1461559 - DNA, 15 bp, Homo sapiens
cagctgagctccctc

SEQ ID NO: 1461560 - DNA, 15 bp, Homo sapiens
agctgagctccctcg

SEQ ID NO: 1461561 - DNA, 15 bp, Homo sapiens
gctgagctccctcga

SEQ ID NO: 1461562 - DNA, 15 bp, Homo sapiens
ctgagctccctcgag

SEQ ID NO: 1461563 - DNA, 15 bp, Homo sapiens
tgagctccctcgagt

SEQ ID NO: 1461564 - DNA, 15 bp, Homo sapiens
gagctccctcgagtg

SEQ ID NO: 1461565 - DNA, 15 bp, Homo sapiens
agctccctcgagtgt

SEQ ID NO: 1461566 - DNA, 15 bp, Homo sapiens
gctccctcgagtgtc

SEQ ID NO: 1461567 - DNA, 15 bp, Homo sapiens
ctccctcgagtgtcg

SEQ ID NO: 1461568 - DNA, 15 bp, Homo sapiens
tccctcgagtgtcgg

SEQ ID NO: 1461569 - DNA, 15 bp, Homo sapiens
ccctcgagtgtcggg

SEQ ID NO: 1461570 - DNA, 15 bp, Homo sapiens
cctcgagtgtcgggc

SEQ ID NO: 1461571 - DNA, 15 bp, Homo sapiens
ctcgagtgtcgggca

SEQ ID NO: 1461572 - DNA, 15 bp, Homo sapiens
tcgagtgtcgggcaa

SEQ ID NO: 1461573 - DNA, 15 bp, Homo sapiens
cgagtgtcgggcaaa

SEQ ID NO: 1461574 - DNA, 15 bp, Homo sapiens
gagtgtcgggcaaat

SEQ ID NO: 1461575 - DNA, 15 bp, Homo sapiens
agtgtcgggcaaatg

SEQ ID NO: 1461576 - DNA, 15 bp, Homo sapiens
gtgtcgggcaaatgc

SEQ ID NO: 1461577 - DNA, 15 bp, Homo sapiens
tgtcgggcaaatgcc

SEQ ID NO: 1461578 - DNA, 15 bp, Homo sapiens
gtcgggcaaatgcca

SEQ ID NO: 1461579 - DNA, 15 bp, Homo sapiens
tcgggcaaatgccag

SEQ ID NO: 1461580 - DNA, 15 bp, Homo sapiens
cgggcaaatgccagg

SEQ ID NO: 1461581 - DNA, 15 bp, Homo sapiens
gggcaaatgccaggg

SEQ ID NO: 1461582 - DNA, 15 bp, Homo sapiens
ggcaaatgccagggc

SEQ ID NO: 1461583 - DNA, 15 bp, Homo sapiens
gcaaatgccagggca

SEQ ID NO: 1461584 - DNA, 15 bp, Homo sapiens
caaatgccagggcag

SEQ ID NO: 1461585 - DNA, 15 bp, Homo sapiens
aaatgccagggcagt

SEQ ID NO: 1461586 - DNA, 15 bp, Homo sapiens
aatgccagggcagtc

SEQ ID NO: 1461587 - DNA, 15 bp, Homo sapiens
atgccagggcagtcc

SEQ ID NO: 1461588 - DNA, 15 bp, Homo sapiens
tgccagggcagtccc

SEQ ID NO: 1461589 - DNA, 15 bp, Homo sapiens
gccagggcagtccct

SEQ ID NO: 1461590 - DNA, 15 bp, Homo sapiens
ccagggcagtccctg

SEQ ID NO: 1461591 - DNA, 15 bp, Homo sapiens
cagggcagtccctgg

SEQ ID NO: 1461592 - DNA, 15 bp, Homo sapiens
agggcagtccctggc

SEQ ID NO: 1461593 - DNA, 15 bp, Homo sapiens
gggcagtccctggcc

SEQ ID NO: 1461594 - DNA, 15 bp, Homo sapiens
ggcagtccctggccc

SEQ ID NO: 1461595 - DNA, 15 bp, Homo sapiens
gcagtccctggccct

SEQ ID NO: 1461596 - DNA, 15 bp, Homo sapiens
cagtccctggccctg

SEQ ID NO: 1461597 - DNA, 15 bp, Homo sapiens
agtccctggccctgt

SEQ ID NO: 1461598 - DNA, 15 bp, Homo sapiens
gtccctggccctgtg

SEQ ID NO: 1461599 - DNA, 15 bp, Homo sapiens
tccctggccctgtgt

SEQ ID NO: 1461600 - DNA, 15 bp, Homo sapiens
ccctggccctgtgtg

SEQ ID NO: 1461601 - DNA, 15 bp, Homo sapiens
cctggccctgtgtga

SEQ ID NO: 1461602 - DNA, 15 bp, Homo sapiens
ctggccctgtgtgat

SEQ ID NO: 1461603 - DNA, 15 bp, Homo sapiens
tggccctgtgtgatg

SEQ ID NO: 1461604 - DNA, 15 bp, Homo sapiens
ggccctgtgtgatgg

SEQ ID NO: 1461605 - DNA, 15 bp, Homo sapiens
gccctgtgtgatggg

SEQ ID NO: 1461606 - DNA, 15 bp, Homo sapiens
ccctgtgtgatggga

SEQ ID NO: 1461607 - DNA, 15 bp, Homo sapiens
cctgtgtgatgggat

SEQ ID NO: 1461608 - DNA, 15 bp, Homo sapiens
ctgtgtgatgggatg

SEQ ID NO: 1461609 - DNA, 15 bp, Homo sapiens
tgtgtgatgggatgc

SEQ ID NO: 1461610 - DNA, 15 bp, Homo sapiens
gtgtgatgggatgca

SEQ ID NO: 1461611 - DNA, 15 bp, Homo sapiens
tgtgatgggatgcag

SEQ ID NO: 1461612 - DNA, 15 bp, Homo sapiens
gtgatgggatgcaga

SEQ ID NO: 1461613 - DNA, 15 bp, Homo sapiens
tgatgggatgcagac

SEQ ID NO: 1461614 - DNA, 15 bp, Homo sapiens
gatgggatgcagact

SEQ ID NO: 1461615 - DNA, 15 bp, Homo sapiens
atgggatgcagactc

SEQ ID NO: 1461616 - DNA, 15 bp, Homo sapiens
tgggatgcagactct

SEQ ID NO: 1461617 - DNA, 15 bp, Homo sapiens
gggatgcagactctc

SEQ ID NO: 1461618 - DNA, 15 bp, Homo sapiens
ggatgcagactctcg

SEQ ID NO: 1461619 - DNA, 15 bp, Homo sapiens
gatgcagactctcgg

SEQ ID NO: 1461620 - DNA, 15 bp, Homo sapiens
atgcagactctcggg

SEQ ID NO: 1461621 - DNA, 15 bp, Homo sapiens
tgcagactctcgggt

SEQ ID NO: 1461622 - DNA, 15 bp, Homo sapiens
gcagactctcgggtc

SEQ ID NO: 1461623 - DNA, 15 bp, Homo sapiens
cagactctcgggtcc

SEQ ID NO: 1461624 - DNA, 15 bp, Homo sapiens
agactctcgggtcct

SEQ ID NO: 1461625 - DNA, 15 bp, Homo sapiens
gactctcgggtcctg

SEQ ID NO: 1461626 - DNA, 15 bp, Homo sapiens
actctcgggtcctgt

SEQ ID NO: 1461627 - DNA, 15 bp, Homo sapiens
ctctcgggtcctgtc

SEQ ID NO: 1461628 - DNA, 15 bp, Homo sapiens
tctcgggtcctgtcc

SEQ ID NO: 1461629 - DNA, 15 bp, Homo sapiens
ctcgggtcctgtcca

SEQ ID NO: 1461630 - DNA, 15 bp, Homo sapiens
tcgggtcctgtccaa

SEQ ID NO: 1461631 - DNA, 15 bp, Homo sapiens
cgggtcctgtccaag

SEQ ID NO: 1461632 - DNA, 15 bp, Homo sapiens
gggtcctgtccaagg

SEQ ID NO: 1461633 - DNA, 15 bp, Homo sapiens
ggtcctgtccaagga

SEQ ID NO: 1461634 - DNA, 15 bp, Homo sapiens
gtcctgtccaaggat

SEQ ID NO: 1461635 - DNA, 15 bp, Homo sapiens
tcctgtccaaggatt

SEQ ID NO: 1461636 - DNA, 15 bp, Homo sapiens
cctgtccaaggattg

SEQ ID NO: 1461637 - DNA, 15 bp, Homo sapiens
ctgtccaaggattgc

SEQ ID NO: 1461638 - DNA, 15 bp, Homo sapiens
tgtccaaggattgcc

SEQ ID NO: 1461639 - DNA, 15 bp, Homo sapiens
gtccaaggattgcca

SEQ ID NO: 1461640 - DNA, 15 bp, Homo sapiens
tccaaggattgccaa

SEQ ID NO: 1461641 - DNA, 15 bp, Homo sapiens
ccaaggattgccaat

SEQ ID NO: 1461642 - DNA, 15 bp, Homo sapiens
caaggattgccaatt

SEQ ID NO: 1461643 - DNA, 15 bp, Homo sapiens
aaggattgccaatta

SEQ ID NO: 1461644 - DNA, 15 bp, Homo sapiens
aggattgccaattat

SEQ ID NO: 1461645 - DNA, 15 bp, Homo sapiens
ggattgccaattatg

SEQ ID NO: 1461646 - DNA, 15 bp, Homo sapiens
gattgccaattatgc

SEQ ID NO: 1461647 - DNA, 15 bp, Homo sapiens
attgccaattatgcg

SEQ ID NO: 1461648 - DNA, 15 bp, Homo sapiens
ttgccaattatgcgt

SEQ ID NO: 1461649 - DNA, 15 bp, Homo sapiens
tgccaattatgcgtc

SEQ ID NO: 1461650 - DNA, 15 bp, Homo sapiens
gccaattatgcgtcc

SEQ ID NO: 1461651 - DNA, 15 bp, Homo sapiens
ccaattatgcgtcca

SEQ ID NO: 1461652 - DNA, 15 bp, Homo sapiens
caattatgcgtccaa

SEQ ID NO: 1461653 - DNA, 15 bp, Homo sapiens
aattatgcgtccaac

SEQ ID NO: 1461654 - DNA, 15 bp, Homo sapiens
attatgcgtccaacc

SEQ ID NO: 1461655 - DNA, 15 bp, Homo sapiens
ttatgcgtccaaccc

SEQ ID NO: 1461656 - DNA, 15 bp, Homo sapiens
tatgcgtccaaccct

SEQ ID NO: 1461657 - DNA, 15 bp, Homo sapiens
atgcgtccaaccctc

SEQ ID NO: 1461658 - DNA, 15 bp, Homo sapiens
tgcgtccaaccctcc

SEQ ID NO: 1461659 - DNA, 15 bp, Homo sapiens
gcgtccaaccctcct

SEQ ID NO: 1461660 - DNA, 15 bp, Homo sapiens
cgtccaaccctcctc

SEQ ID NO: 1461661 - DNA, 15 bp, Homo sapiens
gtccaaccctcctca

SEQ ID NO: 1461662 - DNA, 15 bp, Homo sapiens
tccaaccctcctcag

SEQ ID NO: 1461663 - DNA, 15 bp, Homo sapiens
ccaaccctcctcaga

SEQ ID NO: 1461664 - DNA, 15 bp, Homo sapiens
caaccctcctcagat

SEQ ID NO: 1461665 - DNA, 15 bp, Homo sapiens
aaccctcctcagatc

SEQ ID NO: 1461666 - DNA, 15 bp, Homo sapiens
accctcctcagatct

SEQ ID NO: 1461667 - DNA, 15 bp, Homo sapiens
ccctcctcagatctc

SEQ ID NO: 1461668 - DNA, 15 bp, Homo sapiens
cctcctcagatctct

SEQ ID NO: 1461669 - DNA, 15 bp, Homo sapiens
ctcctcagatctctc

SEQ ID NO: 1461670 - DNA, 15 bp, Homo sapiens
tcctcagatctctct

SEQ ID NO: 1461671 - DNA, 15 bp, Homo sapiens
cctcagatctctcta

SEQ ID NO: 1461672 - DNA, 15 bp, Homo sapiens
ctcagatctctctaa

SEQ ID NO: 1461673 - DNA, 15 bp, Homo sapiens
tcagatctctctaaa

SEQ ID NO: 1461674 - DNA, 15 bp, Homo sapiens
cagatctctctaaag

SEQ ID NO: 1461675 - DNA, 15 bp, Homo sapiens
agatctctctaaagg

SEQ ID NO: 1461676 - DNA, 15 bp, Homo sapiens
gatctctctaaagga

SEQ ID NO: 1461677 - DNA, 15 bp, Homo sapiens
atctctctaaaggaa

SEQ ID NO: 1461678 - DNA, 15 bp, Homo sapiens
tctctctaaaggaaa

SEQ ID NO: 1461679 - DNA, 15 bp, Homo sapiens
ctctctaaaggaaaa

SEQ ID NO: 1461680 - DNA, 15 bp, Homo sapiens
tctctaaaggaaaac

SEQ ID NO: 1461681 - DNA, 15 bp, Homo sapiens
ctctaaaggaaaact

SEQ ID NO: 1461682 - DNA, 15 bp, Homo sapiens
tctaaaggaaaactt

SEQ ID NO: 1461683 - DNA, 15 bp, Homo sapiens
ctaaaggaaaacttg

SEQ ID NO: 1461684 - DNA, 15 bp, Homo sapiens
taaaggaaaacttgt

SEQ ID NO: 1461685 - DNA, 15 bp, Homo sapiens
aaaggaaaacttgtc

SEQ ID NO: 1461686 - DNA, 15 bp, Homo sapiens
aaggaaaacttgtca

SEQ ID NO: 1461687 - DNA, 15 bp, Homo sapiens
aggaaaacttgtcac

SEQ ID NO: 1461688 - DNA, 15 bp, Homo sapiens
ggaaaacttgtcaca

SEQ ID NO: 1461689 - DNA, 15 bp, Homo sapiens
gaaaacttgtcacac

SEQ ID NO: 1461690 - DNA, 15 bp, Homo sapiens
aaaacttgtcacacg

SEQ ID NO: 1461691 - DNA, 15 bp, Homo sapiens
aaacttgtcacacgg

SEQ ID NO: 1461692 - DNA, 15 bp, Homo sapiens
aacttgtcacacgga

SEQ ID NO: 1461693 - DNA, 15 bp, Homo sapiens
acttgtcacacggac

SEQ ID NO: 1461694 - DNA, 15 bp, Homo sapiens
cttgtcacacggacg

SEQ ID NO: 1461695 - DNA, 15 bp, Homo sapiens
ttgtcacacggacgc

SEQ ID NO: 1461696 - DNA, 15 bp, Homo sapiens
tgtcacacggacgca

SEQ ID NO: 1461697 - DNA, 15 bp, Homo sapiens
gtcacacggacgcat

SEQ ID NO: 1461698 - DNA, 15 bp, Homo sapiens
tcacacggacgcatc

SEQ ID NO: 1461699 - DNA, 15 bp, Homo sapiens
cacacggacgcatct

SEQ ID NO: 1461700 - DNA, 15 bp, Homo sapiens
acacggacgcatctt

SEQ ID NO: 1461701 - DNA, 15 bp, Homo sapiens
cacggacgcatcttc

SEQ ID NO: 1461702 - DNA, 15 bp, Homo sapiens
acggacgcatcttcc

SEQ ID NO: 1461703 - DNA, 15 bp, Homo sapiens
cggacgcatcttccc

SEQ ID NO: 1461704 - DNA, 15 bp, Homo sapiens
ggacgcatcttcccg

SEQ ID NO: 1461705 - DNA, 15 bp, Homo sapiens
gacgcatcttcccgt

SEQ ID NO: 1461706 - DNA, 15 bp, Homo sapiens
acgcatcttcccgtg

SEQ ID NO: 1461707 - DNA, 15 bp, Homo sapiens
cgcatcttcccgtgt

SEQ ID NO: 1461708 - DNA, 15 bp, Homo sapiens
gcatcttcccgtgtg

SEQ ID NO: 1461709 - DNA, 15 bp, Homo sapiens
catcttcccgtgtga

SEQ ID NO: 1461710 - DNA, 15 bp, Homo sapiens
atcttcccgtgtgaa

SEQ ID NO: 1461711 - DNA, 15 bp, Homo sapiens
tcttcccgtgtgaag

SEQ ID NO: 1461712 - DNA, 15 bp, Homo sapiens
cttcccgtgtgaagc

SEQ ID NO: 1461713 - DNA, 15 bp, Homo sapiens
ttcccgtgtgaagca

SEQ ID NO: 1461714 - DNA, 15 bp, Homo sapiens
tcccgtgtgaagcag

SEQ ID NO: 1461715 - DNA, 15 bp, Homo sapiens
cccgtgtgaagcagt

SEQ ID NO: 1461716 - DNA, 15 bp, Homo sapiens
ccgtgtgaagcagtc

SEQ ID NO: 1461717 - DNA, 15 bp, Homo sapiens
cgtgtgaagcagtca

SEQ ID NO: 1461718 - DNA, 15 bp, Homo sapiens
gtgtgaagcagtcac

SEQ ID NO: 1461719 - DNA, 15 bp, Homo sapiens
tgtgaagcagtcact

SEQ ID NO: 1461720 - DNA, 15 bp, Homo sapiens
gtgaagcagtcactc

SEQ ID NO: 1461721 - DNA, 15 bp, Homo sapiens
tgaagcagtcactcg

SEQ ID NO: 1461722 - DNA, 15 bp, Homo sapiens
gaagcagtcactcgt

SEQ ID NO: 1461723 - DNA, 15 bp, Homo sapiens
aagcagtcactcgtc

SEQ ID NO: 1461724 - DNA, 15 bp, Homo sapiens
agcagtcactcgtca

SEQ ID NO: 1461725 - DNA, 15 bp, Homo sapiens
gcagtcactcgtcat

SEQ ID NO: 1461726 - DNA, 15 bp, Homo sapiens
cagtcactcgtcatt

SEQ ID NO: 1461727 - DNA, 15 bp, Homo sapiens
agtcactcgtcattt

SEQ ID NO: 1461728 - DNA, 15 bp, Homo sapiens
gtcactcgtcatttc

SEQ ID NO: 1461729 - DNA, 15 bp, Homo sapiens
tcactcgtcatttca

SEQ ID NO: 1461730 - DNA, 15 bp, Homo sapiens
cactcgtcatttcag

SEQ ID NO: 1461731 - DNA, 15 bp, Homo sapiens
actcgtcatttcagg

SEQ ID NO: 1461732 - DNA, 15 bp, Homo sapiens
ctcgtcatttcagga

SEQ ID NO: 1461733 - DNA, 15 bp, Homo sapiens
tcgtcatttcaggaa

SEQ ID NO: 1461734 - DNA, 15 bp, Homo sapiens
cgtcatttcaggaag

SEQ ID NO: 1461735 - DNA, 15 bp, Homo sapiens
gtcatttcaggaagg

SEQ ID NO: 1461736 - DNA, 15 bp, Homo sapiens
tcatttcaggaaggg

SEQ ID NO: 1461737 - DNA, 15 bp, Homo sapiens
catttcaggaaggga

SEQ ID NO: 1461738 - DNA, 15 bp, Homo sapiens
atttcaggaagggaa

SEQ ID NO: 1461739 - DNA, 15 bp, Homo sapiens
tttcaggaagggaag

SEQ ID NO: 1461740 - DNA, 15 bp, Homo sapiens
ttcaggaagggaagg

SEQ ID NO: 1461741 - DNA, 15 bp, Homo sapiens
tcaggaagggaaggc

SEQ ID NO: 1461742 - DNA, 15 bp, Homo sapiens
caggaagggaaggcc

SEQ ID NO: 1461743 - DNA, 15 bp, Homo sapiens
aggaagggaaggcct

SEQ ID NO: 1461744 - DNA, 15 bp, Homo sapiens
ggaagggaaggccta

SEQ ID NO: 1461745 - DNA, 15 bp, Homo sapiens
gaagggaaggcctaa

SEQ ID NO: 1461746 - DNA, 15 bp, Homo sapiens
aagggaaggcctaat

SEQ ID NO: 1461747 - DNA, 15 bp, Homo sapiens
agggaaggcctaatc

SEQ ID NO: 1461748 - DNA, 15 bp, Homo sapiens
gggaaggcctaatcc

SEQ ID NO: 1461749 - DNA, 15 bp, Homo sapiens
ggaaggcctaatcct

SEQ ID NO: 1461750 - DNA, 15 bp, Homo sapiens
gaaggcctaatccta

SEQ ID NO: 1461751 - DNA, 15 bp, Homo sapiens
aaggcctaatcctag

SEQ ID NO: 1461752 - DNA, 15 bp, Homo sapiens
aggcctaatcctaga

SEQ ID NO: 1461753 - DNA, 15 bp, Homo sapiens
ggcctaatcctagag

SEQ ID NO: 1461754 - DNA, 15 bp, Homo sapiens
gcctaatcctagagg

SEQ ID NO: 1461755 - DNA, 15 bp, Homo sapiens
cctaatcctagaggc

SEQ ID NO: 1461756 - DNA, 15 bp, Homo sapiens
ctaatcctagaggct

SEQ ID NO: 1461757 - DNA, 15 bp, Homo sapiens
taatcctagaggctt

SEQ ID NO: 1461758 - DNA, 15 bp, Homo sapiens
aatcctagaggcttg

SEQ ID NO: 1461759 - DNA, 15 bp, Homo sapiens
atcctagaggcttgg

SEQ ID NO: 1461760 - DNA, 15 bp, Homo sapiens
tcctagaggcttggc

SEQ ID NO: 1461761 - DNA, 15 bp, Homo sapiens
cctagaggcttggcc

SEQ ID NO: 1461762 - DNA, 15 bp, Homo sapiens
ctagaggcttggccc

SEQ ID NO: 1461763 - DNA, 15 bp, Homo sapiens
tagaggcttggccca

SEQ ID NO: 1461764 - DNA, 15 bp, Homo sapiens
agaggcttggcccaa

SEQ ID NO: 1461765 - DNA, 15 bp, Homo sapiens
gaggcttggcccaaa

SEQ ID NO: 1461766 - DNA, 15 bp, Homo sapiens
aggcttggcccaaaa

SEQ ID NO: 1461767 - DNA, 15 bp, Homo sapiens
ggcttggcccaaaaa

SEQ ID NO: 1461768 - DNA, 15 bp, Homo sapiens
gcttggcccaaaaag

SEQ ID NO: 1461769 - DNA, 15 bp, Homo sapiens
cttggcccaaaaagg

SEQ ID NO: 1461770 - DNA, 15 bp, Homo sapiens
ttggcccaaaaaggg

SEQ ID NO: 1461771 - DNA, 15 bp, Homo sapiens
tggcccaaaaagggg

SEQ ID NO: 1461772 - DNA, 15 bp, Homo sapiens
ggcccaaaaaggggt

SEQ ID NO: 1461773 - DNA, 15 bp, Homo sapiens
gcccaaaaaggggtg

SEQ ID NO: 1461774 - DNA, 15 bp, Homo sapiens
cccaaaaaggggtgt

SEQ ID NO: 1461775 - DNA, 15 bp, Homo sapiens
ccaaaaaggggtgtt

SEQ ID NO: 1461776 - DNA, 15 bp, Homo sapiens
caaaaaggggtgttt

SEQ ID NO: 1461777 - DNA, 15 bp, Homo sapiens
aaaaaggggtgtttc

SEQ ID NO: 1461778 - DNA, 15 bp, Homo sapiens
aaaaggggtgtttca

SEQ ID NO: 1461779 - DNA, 15 bp, Homo sapiens
aaaggggtgtttcat

SEQ ID NO: 1461780 - DNA, 15 bp, Homo sapiens
aaggggtgtttcatt

SEQ ID NO: 1461781 - DNA, 15 bp, Homo sapiens
aggggtgtttcattg

SEQ ID NO: 1461782 - DNA, 15 bp, Homo sapiens
ggggtgtttcattga

SEQ ID NO: 1461783 - DNA, 15 bp, Homo sapiens
gggtgtttcattgac

SEQ ID NO: 1461784 - DNA, 15 bp, Homo sapiens
ggtgtttcattgaca

SEQ ID NO: 1461785 - DNA, 15 bp, Homo sapiens
gtgtttcattgacaa

SEQ ID NO: 1461786 - DNA, 15 bp, Homo sapiens
tgtttcattgacaat

SEQ ID NO: 1461787 - DNA, 15 bp, Homo sapiens
gtttcattgacaatg

SEQ ID NO: 1461788 - DNA, 15 bp, Homo sapiens
tttcattgacaatgc

SEQ ID NO: 1461789 - DNA, 15 bp, Homo sapiens
ttcattgacaatgcc

SEQ ID NO: 1461790 - DNA, 15 bp, Homo sapiens
tcattgacaatgcct

SEQ ID NO: 1461791 - DNA, 15 bp, Homo sapiens
cattgacaatgcctg

SEQ ID NO: 1461792 - DNA, 15 bp, Homo sapiens
attgacaatgcctga

SEQ ID NO: 1461793 - DNA, 15 bp, Homo sapiens
ttgacaatgcctgag

SEQ ID NO: 1461794 - DNA, 15 bp, Homo sapiens
tgacaatgcctgagt

SEQ ID NO: 1461795 - DNA, 15 bp, Homo sapiens
gacaatgcctgagtg

SEQ ID NO: 1461796 - DNA, 15 bp, Homo sapiens
acaatgcctgagtga

SEQ ID NO: 1461797 - DNA, 15 bp, Homo sapiens
caatgcctgagtgag

SEQ ID NO: 1461798 - DNA, 15 bp, Homo sapiens
aatgcctgagtgagt

SEQ ID NO: 1461799 - DNA, 15 bp, Homo sapiens
atgcctgagtgagtg

SEQ ID NO: 1461800 - DNA, 15 bp, Homo sapiens
tgcctgagtgagtga

SEQ ID NO: 1461801 - DNA, 15 bp, Homo sapiens
gcctgagtgagtgaa

SEQ ID NO: 1461802 - DNA, 15 bp, Homo sapiens
cctgagtgagtgaat

SEQ ID NO: 1461803 - DNA, 15 bp, Homo sapiens
ctgagtgagtgaatg

SEQ ID NO: 1461804 - DNA, 15 bp, Homo sapiens
tgagtgagtgaatga

SEQ ID NO: 1461805 - DNA, 15 bp, Homo sapiens
gagtgagtgaatgaa

SEQ ID NO: 1461806 - DNA, 15 bp, Homo sapiens
agtgagtgaatgaat

SEQ ID NO: 1461807 - DNA, 15 bp, Homo sapiens
gtgagtgaatgaatg

SEQ ID NO: 1461808 - DNA, 15 bp, Homo sapiens
tgagtgaatgaatga

SEQ ID NO: 1461809 - DNA, 15 bp, Homo sapiens
gagtgaatgaatgaa

SEQ ID NO: 1461810 - DNA, 15 bp, Homo sapiens
agtgaatgaatgaat

SEQ ID NO: 1461811 - DNA, 15 bp, Homo sapiens
gtgaatgaatgaatg

SEQ ID NO: 1461812 - DNA, 15 bp, Homo sapiens
tgaatgaatgaatga

SEQ ID NO: 1461813 - DNA, 15 bp, Homo sapiens
atgaatgaatgaaat

SEQ ID NO: 1461814 - DNA, 15 bp, Homo sapiens
tgaatgaatgaaata

SEQ ID NO: 1461815 - DNA, 15 bp, Homo sapiens
gaatgaatgaaatac

SEQ ID NO: 1461816 - DNA, 15 bp, Homo sapiens
aatgaatgaaataca

SEQ ID NO: 1461817 - DNA, 15 bp, Homo sapiens
atgaatgaaatacag

SEQ ID NO: 1461818 - DNA, 15 bp, Homo sapiens
tgaatgaaatacagt

SEQ ID NO: 1461819 - DNA, 15 bp, Homo sapiens
gaatgaaatacagtg

SEQ ID NO: 1461820 - DNA, 15 bp, Homo sapiens
aatgaaatacagtgt

SEQ ID NO: 1461821 - DNA, 15 bp, Homo sapiens
atgaaatacagtgta

SEQ ID NO: 1461822 - DNA, 15 bp, Homo sapiens
tgaaatacagtgtaa

SEQ ID NO: 1461823 - DNA, 15 bp, Homo sapiens
gaaatacagtgtaat

SEQ ID NO: 1461824 - DNA, 15 bp, Homo sapiens
aaatacagtgtaatt

SEQ ID NO: 1461825 - DNA, 15 bp, Homo sapiens
aatacagtgtaattc

SEQ ID NO: 1461826 - DNA, 15 bp, Homo sapiens
atacagtgtaattca

SEQ ID NO: 1461827 - DNA, 15 bp, Homo sapiens
tacagtgtaattcat

SEQ ID NO: 1461828 - DNA, 15 bp, Homo sapiens
acagtgtaattcatg

SEQ ID NO: 1461829 - DNA, 15 bp, Homo sapiens
cagtgtaattcatgt

SEQ ID NO: 1461830 - DNA, 15 bp, Homo sapiens
agtgtaattcatgta

SEQ ID NO: 1461831 - DNA, 15 bp, Homo sapiens
gtgtaattcatgtag

SEQ ID NO: 1461832 - DNA, 15 bp, Homo sapiens
tgtaattcatgtagc

SEQ ID NO: 1461833 - DNA, 15 bp, Homo sapiens
gtaattcatgtagca

SEQ ID NO: 1461834 - DNA, 15 bp, Homo sapiens
taattcatgtagcaa

SEQ ID NO: 1461835 - DNA, 15 bp, Homo sapiens
aattcatgtagcaat

SEQ ID NO: 1461836 - DNA, 15 bp, Homo sapiens
attcatgtagcaata

SEQ ID NO: 1461837 - DNA, 15 bp, Homo sapiens
ttcatgtagcaataa

SEQ ID NO: 1461838 - DNA, 15 bp, Homo sapiens
tcatgtagcaataac

SEQ ID NO: 1461839 - DNA, 15 bp, Homo sapiens
catgtagcaataacc

SEQ ID NO: 1461840 - DNA, 15 bp, Homo sapiens
atgtagcaataacca

SEQ ID NO: 1461841 - DNA, 15 bp, Homo sapiens
tgtagcaataaccag

SEQ ID NO: 1461842 - DNA, 15 bp, Homo sapiens
gtagcaataaccagt

SEQ ID NO: 1461843 - DNA, 15 bp, Homo sapiens
tagcaataaccagtg

SEQ ID NO: 1461844 - DNA, 15 bp, Homo sapiens
agcaataaccagtga

SEQ ID NO: 1461845 - DNA, 15 bp, Homo sapiens
gcaataaccagtgaa

SEQ ID NO: 1461846 - DNA, 15 bp, Homo sapiens
caataaccagtgaat

SEQ ID NO: 1461847 - DNA, 15 bp, Homo sapiens
aataaccagtgaatg

SEQ ID NO: 1461848 - DNA, 15 bp, Homo sapiens
ataaccagtgaatgg

SEQ ID NO: 1461849 - DNA, 15 bp, Homo sapiens
taaccagtgaatgga

SEQ ID NO: 1461850 - DNA, 15 bp, Homo sapiens
accagtgaatggatg

SEQ ID NO: 1461851 - DNA, 15 bp, Homo sapiens
ccagtgaatggatgg

SEQ ID NO: 1461852 - DNA, 15 bp, Homo sapiens
cagtgaatggatgga

SEQ ID NO: 1461853 - DNA, 15 bp, Homo sapiens
agtgaatggatggat

SEQ ID NO: 1461854 - DNA, 15 bp, Homo sapiens
gtgaatggatggata

SEQ ID NO: 1461855 - DNA, 15 bp, Homo sapiens
tgaatggatggatag

SEQ ID NO: 1461856 - DNA, 15 bp, Homo sapiens
gaatggatggatagc

SEQ ID NO: 1461857 - DNA, 15 bp, Homo sapiens
aatggatggatagca

SEQ ID NO: 1461858 - DNA, 15 bp, Homo sapiens
atggatggatagcaa

SEQ ID NO: 1461859 - DNA, 15 bp, Homo sapiens
tggatggatagcaaa

SEQ ID NO: 1461860 - DNA, 15 bp, Homo sapiens
ggatggatagcaaaa

SEQ ID NO: 1461861 - DNA, 15 bp, Homo sapiens
gatggatagcaaaat

SEQ ID NO: 1461862 - DNA, 15 bp, Homo sapiens
atggatagcaaaatg

SEQ ID NO: 1461863 - DNA, 15 bp, Homo sapiens
tggatagcaaaatga

SEQ ID NO: 1461864 - DNA, 15 bp, Homo sapiens
ggatagcaaaatgac

SEQ ID NO: 1461865 - DNA, 15 bp, Homo sapiens
gatagcaaaatgact

SEQ ID NO: 1461866 - DNA, 15 bp, Homo sapiens
atagcaaaatgactc

SEQ ID NO: 1461867 - DNA, 15 bp, Homo sapiens
tagcaaaatgactcc

SEQ ID NO: 1461868 - DNA, 15 bp, Homo sapiens
agcaaaatgactccc

SEQ ID NO: 1461869 - DNA, 15 bp, Homo sapiens
gcaaaatgactccca

SEQ ID NO: 1461870 - DNA, 15 bp, Homo sapiens
caaaatgactcccag

SEQ ID NO: 1461871 - DNA, 15 bp, Homo sapiens
aaaatgactcccagg

SEQ ID NO: 1461872 - DNA, 15 bp, Homo sapiens
aaatgactcccagga

SEQ ID NO: 1461873 - DNA, 15 bp, Homo sapiens
aatgactcccaggag

SEQ ID NO: 1461874 - DNA, 15 bp, Homo sapiens
atgactcccaggagg

SEQ ID NO: 1461875 - DNA, 15 bp, Homo sapiens
tgactcccaggaggt

SEQ ID NO: 1461876 - DNA, 15 bp, Homo sapiens
gactcccaggaggtt

SEQ ID NO: 1461877 - DNA, 15 bp, Homo sapiens
actcccaggaggtta

SEQ ID NO: 1461878 - DNA, 15 bp, Homo sapiens
ctcccaggaggttac

SEQ ID NO: 1461879 - DNA, 15 bp, Homo sapiens
tcccaggaggttaca

SEQ ID NO: 1461880 - DNA, 15 bp, Homo sapiens
cccaggaggttacag

SEQ ID NO: 1461881 - DNA, 15 bp, Homo sapiens
ccaggaggttacaga

SEQ ID NO: 1461882 - DNA, 15 bp, Homo sapiens
caggaggttacagag

SEQ ID NO: 1461883 - DNA, 15 bp, Homo sapiens
aggaggttacagagc

SEQ ID NO: 1461884 - DNA, 15 bp, Homo sapiens
ggaggttacagagca

SEQ ID NO: 1461885 - DNA, 15 bp, Homo sapiens
gaggttacagagcat

SEQ ID NO: 1461886 - DNA, 15 bp, Homo sapiens
aggttacagagcata

SEQ ID NO: 1461887 - DNA, 15 bp, Homo sapiens
ggttacagagcatac

SEQ ID NO: 1461888 - DNA, 15 bp, Homo sapiens
gttacagagcatact

SEQ ID NO: 1461889 - DNA, 15 bp, Homo sapiens
ttacagagcatactt

SEQ ID NO: 1461890 - DNA, 15 bp, Homo sapiens
tacagagcatacttt

SEQ ID NO: 1461891 - DNA, 15 bp, Homo sapiens
acagagcatacttta

SEQ ID NO: 1461892 - DNA, 15 bp, Homo sapiens
cagagcatactttaa

SEQ ID NO: 1461893 - DNA, 15 bp, Homo sapiens
agagcatactttaag

SEQ ID NO: 1461894 - DNA, 15 bp, Homo sapiens
gagcatactttaagg

SEQ ID NO: 1461895 - DNA, 15 bp, Homo sapiens
agcatactttaaggt

SEQ ID NO: 1461896 - DNA, 15 bp, Homo sapiens
gcatactttaaggtt

SEQ ID NO: 1461897 - DNA, 15 bp, Homo sapiens
catactttaaggtta

SEQ ID NO: 1461898 - DNA, 15 bp, Homo sapiens
atactttaaggttag

SEQ ID NO: 1461899 - DNA, 15 bp, Homo sapiens
tactttaaggttaga

SEQ ID NO: 1461900 - DNA, 15 bp, Homo sapiens
actttaaggttagac

SEQ ID NO: 1461901 - DNA, 15 bp, Homo sapiens
ctttaaggttagact

SEQ ID NO: 1461902 - DNA, 15 bp, Homo sapiens
tttaaggttagacta

SEQ ID NO: 1461903 - DNA, 15 bp, Homo sapiens
ttaaggttagactaa

SEQ ID NO: 1461904 - DNA, 15 bp, Homo sapiens
taaggttagactaag

SEQ ID NO: 1461905 - DNA, 15 bp, Homo sapiens
aaggttagactaagg

SEQ ID NO: 1461906 - DNA, 15 bp, Homo sapiens
aggttagactaaggc

SEQ ID NO: 1461907 - DNA, 15 bp, Homo sapiens
ggttagactaaggcg

SEQ ID NO: 1461908 - DNA, 15 bp, Homo sapiens
gttagactaaggcgc

SEQ ID NO: 1461909 - DNA, 15 bp, Homo sapiens
ttagactaaggcgcg

SEQ ID NO: 1461910 - DNA, 15 bp, Homo sapiens
tagactaaggcgcgc

SEQ ID NO: 1461911 - DNA, 15 bp, Homo sapiens
agactaaggcgcgca

SEQ ID NO: 1461912 - DNA, 15 bp, Homo sapiens
gactaaggcgcgcac

SEQ ID NO: 1461913 - DNA, 15 bp, Homo sapiens
actaaggcgcgcacg

SEQ ID NO: 1461914 - DNA, 15 bp, Homo sapiens
ctaaggcgcgcacgg

SEQ ID NO: 1461915 - DNA, 15 bp, Homo sapiens
taaggcgcgcacgga

SEQ ID NO: 1461916 - DNA, 15 bp, Homo sapiens
aaggcgcgcacggat

SEQ ID NO: 1461917 - DNA, 15 bp, Homo sapiens
aggcgcgcacggatt

SEQ ID NO: 1461918 - DNA, 15 bp, Homo sapiens
ggcgcgcacggattc

SEQ ID NO: 1461919 - DNA, 15 bp, Homo sapiens
gcgcgcacggattcg

SEQ ID NO: 1461920 - DNA, 15 bp, Homo sapiens
cgcgcacggattcgc

SEQ ID NO: 1461921 - DNA, 15 bp, Homo sapiens
gcgcacggattcgct

SEQ ID NO: 1461922 - DNA, 15 bp, Homo sapiens
cgcacggattcgctg

SEQ ID NO: 1461923 - DNA, 15 bp, Homo sapiens
gcacggattcgctgt

SEQ ID NO: 1461924 - DNA, 15 bp, Homo sapiens
cacggattcgctgtc

SEQ ID NO: 1461925 - DNA, 15 bp, Homo sapiens
acggattcgctgtcc

SEQ ID NO: 1461926 - DNA, 15 bp, Homo sapiens
cggattcgctgtccc

SEQ ID NO: 1461927 - DNA, 15 bp, Homo sapiens
ggattcgctgtcccc

SEQ ID NO: 1461928 - DNA, 15 bp, Homo sapiens
gattcgctgtcccca

SEQ ID NO: 1461929 - DNA, 15 bp, Homo sapiens
attcgctgtccccag

SEQ ID NO: 1461930 - DNA, 15 bp, Homo sapiens
ttcgctgtccccagt

SEQ ID NO: 1461931 - DNA, 15 bp, Homo sapiens
tcgctgtccccagtt

SEQ ID NO: 1461932 - DNA, 15 bp, Homo sapiens
cgctgtccccagttt

SEQ ID NO: 1461933 - DNA, 15 bp, Homo sapiens
gctgtccccagtttt

SEQ ID NO: 1461934 - DNA, 15 bp, Homo sapiens
ctgtccccagttttc

SEQ ID NO: 1461935 - DNA, 15 bp, Homo sapiens
tgtccccagttttcc

SEQ ID NO: 1461936 - DNA, 15 bp, Homo sapiens
gtccccagttttcct

SEQ ID NO: 1461937 - DNA, 15 bp, Homo sapiens
tccccagttttcctg

SEQ ID NO: 1461938 - DNA, 15 bp, Homo sapiens
ccccagttttcctga

SEQ ID NO: 1461939 - DNA, 15 bp, Homo sapiens
cccagttttcctgag

SEQ ID NO: 1461940 - DNA, 15 bp, Homo sapiens
ccagttttcctgaga

SEQ ID NO: 1461941 - DNA, 15 bp, Homo sapiens
cagttttcctgagaa

SEQ ID NO: 1461942 - DNA, 15 bp, Homo sapiens
agttttcctgagaag

SEQ ID NO: 1461943 - DNA, 15 bp, Homo sapiens
gttttcctgagaagt

SEQ ID NO: 1461944 - DNA, 15 bp, Homo sapiens
ttttcctgagaagtt

SEQ ID NO: 1461945 - DNA, 15 bp, Homo sapiens
tttcctgagaagttt

SEQ ID NO: 1461946 - DNA, 15 bp, Homo sapiens
ttcctgagaagttta

SEQ ID NO: 1461947 - DNA, 15 bp, Homo sapiens
tcctgagaagtttag

SEQ ID NO: 1461948 - DNA, 15 bp, Homo sapiens
cctgagaagtttagg

SEQ ID NO: 1461949 - DNA, 15 bp, Homo sapiens
ctgagaagtttagga

SEQ ID NO: 1461950 - DNA, 15 bp, Homo sapiens
tgagaagtttaggaa

SEQ ID NO: 1461951 - DNA, 15 bp, Homo sapiens
gagaagtttaggaag

SEQ ID NO: 1461952 - DNA, 15 bp, Homo sapiens
agaagtttaggaaga

SEQ ID NO: 1461953 - DNA, 15 bp, Homo sapiens
gaagtttaggaagag

SEQ ID NO: 1461954 - DNA, 15 bp, Homo sapiens
aagtttaggaagagt

SEQ ID NO: 1461955 - DNA, 15 bp, Homo sapiens
agtttaggaagagta

SEQ ID NO: 1461956 - DNA, 15 bp, Homo sapiens
gtttaggaagagtac

SEQ ID NO: 1461957 - DNA, 15 bp, Homo sapiens
tttaggaagagtact

SEQ ID NO: 1461958 - DNA, 15 bp, Homo sapiens
ttaggaagagtactc

SEQ ID NO: 1461959 - DNA, 15 bp, Homo sapiens
taggaagagtactcg

SEQ ID NO: 1461960 - DNA, 15 bp, Homo sapiens
aggaagagtactcgg

SEQ ID NO: 1461961 - DNA, 15 bp, Homo sapiens
ggaagagtactcggg

SEQ ID NO: 1461962 - DNA, 15 bp, Homo sapiens
gaagagtactcgggt

SEQ ID NO: 1461963 - DNA, 15 bp, Homo sapiens
aagagtactcgggta

SEQ ID NO: 1461964 - DNA, 15 bp, Homo sapiens
agagtactcgggtac

SEQ ID NO: 1461965 - DNA, 15 bp, Homo sapiens
gagtactcgggtact

SEQ ID NO: 1461966 - DNA, 15 bp, Homo sapiens
agtactcgggtactc

SEQ ID NO: 1461967 - DNA, 15 bp, Homo sapiens
gtactcgggtactcc

SEQ ID NO: 1461968 - DNA, 15 bp, Homo sapiens
tactcgggtactccc

SEQ ID NO: 1461969 - DNA, 15 bp, Homo sapiens
actcgggtactccca

SEQ ID NO: 1461970 - DNA, 15 bp, Homo sapiens
ctcgggtactcccac

SEQ ID NO: 1461971 - DNA, 15 bp, Homo sapiens
tcgggtactcccacc

SEQ ID NO: 1461972 - DNA, 15 bp, Homo sapiens
cgggtactcccacca

SEQ ID NO: 1461973 - DNA, 15 bp, Homo sapiens
gggtactcccaccac

SEQ ID NO: 1461974 - DNA, 15 bp, Homo sapiens
ggtactcccaccact

SEQ ID NO: 1461975 - DNA, 15 bp, Homo sapiens
gtactcccaccactc

SEQ ID NO: 1461976 - DNA, 15 bp, Homo sapiens
tactcccaccactcg

SEQ ID NO: 1461977 - DNA, 15 bp, Homo sapiens
actcccaccactcgg

SEQ ID NO: 1461978 - DNA, 15 bp, Homo sapiens
ctcccaccactcgga

SEQ ID NO: 1461979 - DNA, 15 bp, Homo sapiens
tcccaccactcggag

SEQ ID NO: 1461980 - DNA, 15 bp, Homo sapiens
cccaccactcggagt

SEQ ID NO: 1461981 - DNA, 15 bp, Homo sapiens
ccaccactcggagta

SEQ ID NO: 1461982 - DNA, 15 bp, Homo sapiens
caccactcggagtac

SEQ ID NO: 1461983 - DNA, 15 bp, Homo sapiens
accactcggagtacc

SEQ ID NO: 1461984 - DNA, 15 bp, Homo sapiens
ccactcggagtaccc

SEQ ID NO: 1461985 - DNA, 15 bp, Homo sapiens
cactcggagtacccg

SEQ ID NO: 1461986 - DNA, 15 bp, Homo sapiens
actcggagtacccga

SEQ ID NO: 1461987 - DNA, 15 bp, Homo sapiens
ctcggagtacccgag

SEQ ID NO: 1461988 - DNA, 15 bp, Homo sapiens
tcggagtacccgagc

SEQ ID NO: 1461989 - DNA, 15 bp, Homo sapiens
cggagtacccgagcc

SEQ ID NO: 1461990 - DNA, 15 bp, Homo sapiens
ggagtacccgagccc

SEQ ID NO: 1461991 - DNA, 15 bp, Homo sapiens
gagtacccgagcccg

SEQ ID NO: 1461992 - DNA, 15 bp, Homo sapiens
agtacccgagcccgg

SEQ ID NO: 1461993 - DNA, 15 bp, Homo sapiens
gtacccgagcccggc

SEQ ID NO: 1461994 - DNA, 15 bp, Homo sapiens
tacccgagcccggca

SEQ ID NO: 1461995 - DNA, 15 bp, Homo sapiens
acccgagcccggcaa

SEQ ID NO: 1461996 - DNA, 15 bp, Homo sapiens
cccgagcccggcaag

SEQ ID NO: 1461997 - DNA, 15 bp, Homo sapiens
ccgagcccggcaaga

SEQ ID NO: 1461998 - DNA, 15 bp, Homo sapiens
cgagcccggcaagag

SEQ ID NO: 1461999 - DNA, 15 bp, Homo sapiens
gagcccggcaagagg

SEQ ID NO: 1462000 - DNA, 15 bp, Homo sapiens
agcccggcaagagga

SEQ ID NO: 1462001 - DNA, 15 bp, Homo sapiens
gcccggcaagaggag

SEQ ID NO: 1462002 - DNA, 15 bp, Homo sapiens
cccggcaagaggagc

SEQ ID NO: 1462003 - DNA, 15 bp, Homo sapiens
ccggcaagaggagct

SEQ ID NO: 1462004 - DNA, 15 bp, Homo sapiens
cggcaagaggagctc

SEQ ID NO: 1462005 - DNA, 15 bp, Homo sapiens
ggcaagaggagctct

SEQ ID NO: 1462006 - DNA, 15 bp, Homo sapiens
gcaagaggagctctc

SEQ ID NO: 1462007 - DNA, 15 bp, Homo sapiens
caagaggagctctca

SEQ ID NO: 1462008 - DNA, 15 bp, Homo sapiens
aagaggagctctcac

SEQ ID NO: 1462009 - DNA, 15 bp, Homo sapiens
agaggagctctcact

SEQ ID NO: 1462010 - DNA, 15 bp, Homo sapiens
gaggagctctcactt

SEQ ID NO: 1462011 - DNA, 15 bp, Homo sapiens
aggagctctcacttc

SEQ ID NO: 1462012 - DNA, 15 bp, Homo sapiens
ggagctctcacttct

SEQ ID NO: 1462013 - DNA, 15 bp, Homo sapiens
gagctctcacttcta

SEQ ID NO: 1462014 - DNA, 15 bp, Homo sapiens
agctctcacttctag

SEQ ID NO: 1462015 - DNA, 15 bp, Homo sapiens
gctctcacttctagc

SEQ ID NO: 1462016 - DNA, 15 bp, Homo sapiens
ctctcacttctagct

SEQ ID NO: 1462017 - DNA, 15 bp, Homo sapiens
tctcacttctagctc

SEQ ID NO: 1462018 - DNA, 15 bp, Homo sapiens
ctcacttctagctct

SEQ ID NO: 1462019 - DNA, 15 bp, Homo sapiens
tcacttctagctctg

SEQ ID NO: 1462020 - DNA, 15 bp, Homo sapiens
cacttctagctctgc

SEQ ID NO: 1462021 - DNA, 15 bp, Homo sapiens
acttctagctctgca

SEQ ID NO: 1462022 - DNA, 15 bp, Homo sapiens
cttctagctctgcac

SEQ ID NO: 1462023 - DNA, 15 bp, Homo sapiens
ttctagctctgcact

SEQ ID NO: 1462024 - DNA, 15 bp, Homo sapiens
tctagctctgcactg

SEQ ID NO: 1462025 - DNA, 15 bp, Homo sapiens
ctagctctgcactga

SEQ ID NO: 1462026 - DNA, 15 bp, Homo sapiens
tagctctgcactgag

SEQ ID NO: 1462027 - DNA, 15 bp, Homo sapiens
agctctgcactgagg

SEQ ID NO: 1462028 - DNA, 15 bp, Homo sapiens
gctctgcactgagga

SEQ ID NO: 1462029 - DNA, 15 bp, Homo sapiens
ctctgcactgaggat

SEQ ID NO: 1462030 - DNA, 15 bp, Homo sapiens
tctgcactgaggatt

SEQ ID NO: 1462031 - DNA, 15 bp, Homo sapiens
ctgcactgaggattg

SEQ ID NO: 1462032 - DNA, 15 bp, Homo sapiens
tgcactgaggattgt

SEQ ID NO: 1462033 - DNA, 15 bp, Homo sapiens
gcactgaggattgta

SEQ ID NO: 1462034 - DNA, 15 bp, Homo sapiens
cactgaggattgtaa

SEQ ID NO: 1462035 - DNA, 15 bp, Homo sapiens
actgaggattgtaaa

SEQ ID NO: 1462036 - DNA, 15 bp, Homo sapiens
ctgaggattgtaaat

SEQ ID NO: 1462037 - DNA, 15 bp, Homo sapiens
tgaggattgtaaatg

SEQ ID NO: 1462038 - DNA, 15 bp, Homo sapiens
gaggattgtaaatgg

SEQ ID NO: 1462039 - DNA, 15 bp, Homo sapiens
aggattgtaaatggc

SEQ ID NO: 1462040 - DNA, 15 bp, Homo sapiens
ggattgtaaatggcc

SEQ ID NO: 1462041 - DNA, 15 bp, Homo sapiens
gattgtaaatggccc

SEQ ID NO: 1462042 - DNA, 15 bp, Homo sapiens
attgtaaatggcccc

SEQ ID NO: 1462043 - DNA, 15 bp, Homo sapiens
ttgtaaatggccccg

SEQ ID NO: 1462044 - DNA, 15 bp, Homo sapiens
tgtaaatggccccgg

SEQ ID NO: 1462045 - DNA, 15 bp, Homo sapiens
gtaaatggccccggg

SEQ ID NO: 1462046 - DNA, 15 bp, Homo sapiens
taaatggccccgggg

SEQ ID NO: 1462047 - DNA, 15 bp, Homo sapiens
aaatggccccgggga

SEQ ID NO: 1462048 - DNA, 15 bp, Homo sapiens
aatggccccggggag

SEQ ID NO: 1462049 - DNA, 15 bp, Homo sapiens
atggccccggggagg

SEQ ID NO: 1462050 - DNA, 15 bp, Homo sapiens
tggccccggggaggg

SEQ ID NO: 1462051 - DNA, 15 bp, Homo sapiens
ggccccggggagggg

SEQ ID NO: 1462052 - DNA, 15 bp, Homo sapiens
gccccggggagggga

SEQ ID NO: 1462053 - DNA, 15 bp, Homo sapiens
ccccggggaggggag

SEQ ID NO: 1462054 - DNA, 15 bp, Homo sapiens
cccggggaggggagc

SEQ ID NO: 1462055 - DNA, 15 bp, Homo sapiens
ccggggaggggagct

SEQ ID NO: 1462056 - DNA, 15 bp, Homo sapiens
cggggaggggagctg

SEQ ID NO: 1462057 - DNA, 15 bp, Homo sapiens
ggggaggggagctgc

SEQ ID NO: 1462058 - DNA, 15 bp, Homo sapiens
gggaggggagctgca

SEQ ID NO: 1462059 - DNA, 15 bp, Homo sapiens
ggaggggagctgcag

SEQ ID NO: 1462060 - DNA, 15 bp, Homo sapiens
gaggggagctgcagt

SEQ ID NO: 1462061 - DNA, 15 bp, Homo sapiens
aggggagctgcagtc

SEQ ID NO: 1462062 - DNA, 15 bp, Homo sapiens
ggggagctgcagtct

SEQ ID NO: 1462063 - DNA, 15 bp, Homo sapiens
gggagctgcagtctc

SEQ ID NO: 1462064 - DNA, 15 bp, Homo sapiens
ggagctgcagtctct

SEQ ID NO: 1462065 - DNA, 15 bp, Homo sapiens
gagctgcagtctctc

SEQ ID NO: 1462066 - DNA, 15 bp, Homo sapiens
agctgcagtctctct

SEQ ID NO: 1462067 - DNA, 15 bp, Homo sapiens
gctgcagtctctctc

SEQ ID NO: 1462068 - DNA, 15 bp, Homo sapiens
ctgcagtctctctcc

SEQ ID NO: 1462069 - DNA, 15 bp, Homo sapiens
tgcagtctctctccc

SEQ ID NO: 1462070 - DNA, 15 bp, Homo sapiens
gcagtctctctccca

SEQ ID NO: 1462071 - DNA, 15 bp, Homo sapiens
cagtctctctcccac

SEQ ID NO: 1462072 - DNA, 15 bp, Homo sapiens
agtctctctcccact

SEQ ID NO: 1462073 - DNA, 15 bp, Homo sapiens
gtctctctcccactc

SEQ ID NO: 1462074 - DNA, 15 bp, Homo sapiens
tctctctcccactca

SEQ ID NO: 1462075 - DNA, 15 bp, Homo sapiens
ctctctcccactcat

SEQ ID NO: 1462076 - DNA, 15 bp, Homo sapiens
tctctcccactcata

SEQ ID NO: 1462077 - DNA, 15 bp, Homo sapiens
ctctcccactcatag

SEQ ID NO: 1462078 - DNA, 15 bp, Homo sapiens
tctcccactcatagg

SEQ ID NO: 1462079 - DNA, 15 bp, Homo sapiens
ctcccactcatagga

SEQ ID NO: 1462080 - DNA, 15 bp, Homo sapiens
tcccactcataggaa

SEQ ID NO: 1462081 - DNA, 15 bp, Homo sapiens
cccactcataggaac

SEQ ID NO: 1462082 - DNA, 15 bp, Homo sapiens
ccactcataggaacc

SEQ ID NO: 1462083 - DNA, 15 bp, Homo sapiens
cactcataggaaccc

SEQ ID NO: 1462084 - DNA, 15 bp, Homo sapiens
actcataggaaccct

SEQ ID NO: 1462085 - DNA, 15 bp, Homo sapiens
ctcataggaaccctc

SEQ ID NO: 1462086 - DNA, 15 bp, Homo sapiens
tcataggaaccctcg

SEQ ID NO: 1462087 - DNA, 15 bp, Homo sapiens
cataggaaccctcga

SEQ ID NO: 1462088 - DNA, 15 bp, Homo sapiens
ataggaaccctcgag

SEQ ID NO: 1462089 - DNA, 15 bp, Homo sapiens
taggaaccctcgagt

SEQ ID NO: 1462090 - DNA, 15 bp, Homo sapiens
aggaaccctcgagtc

SEQ ID NO: 1462091 - DNA, 15 bp, Homo sapiens
ggaaccctcgagtcc

SEQ ID NO: 1462092 - DNA, 15 bp, Homo sapiens
gaaccctcgagtcca

SEQ ID NO: 1462093 - DNA, 15 bp, Homo sapiens
aaccctcgagtccat

SEQ ID NO: 1462094 - DNA, 15 bp, Homo sapiens
accctcgagtccata

SEQ ID NO: 1462095 - DNA, 15 bp, Homo sapiens
ccctcgagtccatac

SEQ ID NO: 1462096 - DNA, 15 bp, Homo sapiens
cctcgagtccataca

SEQ ID NO: 1462097 - DNA, 15 bp, Homo sapiens
ctcgagtccatacac

SEQ ID NO: 1462098 - DNA, 15 bp, Homo sapiens
tcgagtccatacaca

SEQ ID NO: 1462099 - DNA, 15 bp, Homo sapiens
cgagtccatacacac

SEQ ID NO: 1462100 - DNA, 15 bp, Homo sapiens
gagtccatacacacc

SEQ ID NO: 1462101 - DNA, 15 bp, Homo sapiens
agtccatacacaccc

SEQ ID NO: 1462102 - DNA, 15 bp, Homo sapiens
gtccatacacacccc

SEQ ID NO: 1462103 - DNA, 15 bp, Homo sapiens
tccatacacaccccg

SEQ ID NO: 1462104 - DNA, 15 bp, Homo sapiens
ccatacacaccccgg

SEQ ID NO: 1462105 - DNA, 15 bp, Homo sapiens
catacacaccccggg

SEQ ID NO: 1462106 - DNA, 15 bp, Homo sapiens
atacacaccccggga

SEQ ID NO: 1462107 - DNA, 15 bp, Homo sapiens
tacacaccccgggac

SEQ ID NO: 1462108 - DNA, 15 bp, Homo sapiens
acacaccccgggacc

SEQ ID NO: 1462109 - DNA, 15 bp, Homo sapiens
cacaccccgggaccc

SEQ ID NO: 1462110 - DNA, 15 bp, Homo sapiens
acaccccgggaccca

SEQ ID NO: 1462111 - DNA, 15 bp, Homo sapiens
caccccgggacccag

SEQ ID NO: 1462112 - DNA, 15 bp, Homo sapiens
accccgggacccagg

SEQ ID NO: 1462113 - DNA, 15 bp, Homo sapiens
ccccgggacccagga

SEQ ID NO: 1462114 - DNA, 15 bp, Homo sapiens
cccgggacccaggac

SEQ ID NO: 1462115 - DNA, 15 bp, Homo sapiens
ccgggacccaggacc

SEQ ID NO: 1462116 - DNA, 15 bp, Homo sapiens
cgggacccaggacct

SEQ ID NO: 1462117 - DNA, 15 bp, Homo sapiens
gggacccaggacctc

SEQ ID NO: 1462118 - DNA, 15 bp, Homo sapiens
ggacccaggacctca

SEQ ID NO: 1462119 - DNA, 15 bp, Homo sapiens
gacccaggacctcag

SEQ ID NO: 1462120 - DNA, 15 bp, Homo sapiens
acccaggacctcagg

SEQ ID NO: 1462121 - DNA, 15 bp, Homo sapiens
cccaggacctcaggg

SEQ ID NO: 1462122 - DNA, 15 bp, Homo sapiens
ccaggacctcaggga

SEQ ID NO: 1462123 - DNA, 15 bp, Homo sapiens
caggacctcagggat

SEQ ID NO: 1462124 - DNA, 15 bp, Homo sapiens
aggacctcagggatg

SEQ ID NO: 1462125 - DNA, 15 bp, Homo sapiens
ggacctcagggatga

SEQ ID NO: 1462126 - DNA, 15 bp, Homo sapiens
gacctcagggatgag

SEQ ID NO: 1462127 - DNA, 15 bp, Homo sapiens
acctcagggatgagg

SEQ ID NO: 1462128 - DNA, 15 bp, Homo sapiens
cctcagggatgagga

SEQ ID NO: 1462129 - DNA, 15 bp, Homo sapiens
ctcagggatgaggag

SEQ ID NO: 1462130 - DNA, 15 bp, Homo sapiens
tcagggatgaggagc

SEQ ID NO: 1462131 - DNA, 15 bp, Homo sapiens
cagggatgaggagcc

SEQ ID NO: 1462132 - DNA, 15 bp, Homo sapiens
agggatgaggagccc

SEQ ID NO: 1462133 - DNA, 15 bp, Homo sapiens
gggatgaggagccct

SEQ ID NO: 1462134 - DNA, 15 bp, Homo sapiens
ggatgaggagcccta

SEQ ID NO: 1462135 - DNA, 15 bp, Homo sapiens
gatgaggagccctag

SEQ ID NO: 1462136 - DNA, 15 bp, Homo sapiens
atgaggagccctaga

SEQ ID NO: 1462137 - DNA, 15 bp, Homo sapiens
tgaggagccctagag

SEQ ID NO: 1462138 - DNA, 15 bp, Homo sapiens
gaggagccctagagg

SEQ ID NO: 1462139 - DNA, 15 bp, Homo sapiens
aggagccctagaggg

SEQ ID NO: 1462140 - DNA, 15 bp, Homo sapiens
ggagccctagagggg

SEQ ID NO: 1462141 - DNA, 15 bp, Homo sapiens
gagccctagaggggc

SEQ ID NO: 1462142 - DNA, 15 bp, Homo sapiens
agccctagaggggca

SEQ ID NO: 1462143 - DNA, 15 bp, Homo sapiens
gccctagaggggcac

SEQ ID NO: 1462144 - DNA, 15 bp, Homo sapiens
ccctagaggggcacg

SEQ ID NO: 1462145 - DNA, 15 bp, Homo sapiens
cctagaggggcacgt

SEQ ID NO: 1462146 - DNA, 15 bp, Homo sapiens
ctagaggggcacgtg

SEQ ID NO: 1462147 - DNA, 15 bp, Homo sapiens
tagaggggcacgtgg

SEQ ID NO: 1462148 - DNA, 15 bp, Homo sapiens
agaggggcacgtggg

SEQ ID NO: 1462149 - DNA, 15 bp, Homo sapiens
gaggggcacgtggga

SEQ ID NO: 1462150 - DNA, 15 bp, Homo sapiens
aggggcacgtgggag

SEQ ID NO: 1462151 - DNA, 15 bp, Homo sapiens
ggggcacgtgggagc

SEQ ID NO: 1462152 - DNA, 15 bp, Homo sapiens
gggcacgtgggagcc

SEQ ID NO: 1462153 - DNA, 15 bp, Homo sapiens
ggcacgtgggagccc

SEQ ID NO: 1462154 - DNA, 15 bp, Homo sapiens
gcacgtgggagcccc

SEQ ID NO: 1462155 - DNA, 15 bp, Homo sapiens
cacgtgggagccccg

SEQ ID NO: 1462156 - DNA, 15 bp, Homo sapiens
acgtgggagccccgg

SEQ ID NO: 1462157 - DNA, 15 bp, Homo sapiens
cgtgggagccccgga

SEQ ID NO: 1462158 - DNA, 15 bp, Homo sapiens
gtgggagccccggaa

SEQ ID NO: 1462159 - DNA, 15 bp, Homo sapiens
tgggagccccggaac

SEQ ID NO: 1462160 - DNA, 15 bp, Homo sapiens
gggagccccggaacc

SEQ ID NO: 1462161 - DNA, 15 bp, Homo sapiens
ggagccccggaaccc

SEQ ID NO: 1462162 - DNA, 15 bp, Homo sapiens
gagccccggaacccg

SEQ ID NO: 1462163 - DNA, 15 bp, Homo sapiens
agccccggaacccga

SEQ ID NO: 1462164 - DNA, 15 bp, Homo sapiens
gccccggaacccgac

SEQ ID NO: 1462165 - DNA, 15 bp, Homo sapiens
ccccggaacccgact

SEQ ID NO: 1462166 - DNA, 15 bp, Homo sapiens
cccggaacccgactc

SEQ ID NO: 1462167 - DNA, 15 bp, Homo sapiens
ccggaacccgactca

SEQ ID NO: 1462168 - DNA, 15 bp, Homo sapiens
cggaacccgactcag

SEQ ID NO: 1462169 - DNA, 15 bp, Homo sapiens
ggaacccgactcagg

SEQ ID NO: 1462170 - DNA, 15 bp, Homo sapiens
gaacccgactcaggc

SEQ ID NO: 1462171 - DNA, 15 bp, Homo sapiens
aacccgactcaggcc

SEQ ID NO: 1462172 - DNA, 15 bp, Homo sapiens
acccgactcaggcca

SEQ ID NO: 1462173 - DNA, 15 bp, Homo sapiens
cccgactcaggccac

SEQ ID NO: 1462174 - DNA, 15 bp, Homo sapiens
ccgactcaggccacg

SEQ ID NO: 1462175 - DNA, 15 bp, Homo sapiens
cgactcaggccacgg

SEQ ID NO: 1462176 - DNA, 15 bp, Homo sapiens
gactcaggccacggg

SEQ ID NO: 1462177 - DNA, 15 bp, Homo sapiens
actcaggccacgggt

SEQ ID NO: 1462178 - DNA, 15 bp, Homo sapiens
ctcaggccacgggtc

SEQ ID NO: 1462179 - DNA, 15 bp, Homo sapiens
tcaggccacgggtca

SEQ ID NO: 1462180 - DNA, 15 bp, Homo sapiens
caggccacgggtcag

SEQ ID NO: 1462181 - DNA, 15 bp, Homo sapiens
aggccacgggtcagg

SEQ ID NO: 1462182 - DNA, 15 bp, Homo sapiens
ggccacgggtcaggg

SEQ ID NO: 1462183 - DNA, 15 bp, Homo sapiens
gccacgggtcaggga

SEQ ID NO: 1462184 - DNA, 15 bp, Homo sapiens
ccacgggtcagggac

SEQ ID NO: 1462185 - DNA, 15 bp, Homo sapiens
cacgggtcagggaca

SEQ ID NO: 1462186 - DNA, 15 bp, Homo sapiens
acgggtcagggacaa

SEQ ID NO: 1462187 - DNA, 15 bp, Homo sapiens
cgggtcagggacaaa

SEQ ID NO: 1462188 - DNA, 15 bp, Homo sapiens
gggtcagggacaaag

SEQ ID NO: 1462189 - DNA, 15 bp, Homo sapiens
ggtcagggacaaagc

SEQ ID NO: 1462190 - DNA, 15 bp, Homo sapiens
gtcagggacaaagcg

SEQ ID NO: 1462191 - DNA, 15 bp, Homo sapiens
tcagggacaaagcgg

SEQ ID NO: 1462192 - DNA, 15 bp, Homo sapiens
cagggacaaagcgga

SEQ ID NO: 1462193 - DNA, 15 bp, Homo sapiens
agggacaaagcggag

SEQ ID NO: 1462194 - DNA, 15 bp, Homo sapiens
gggacaaagcggagg

SEQ ID NO: 1462195 - DNA, 15 bp, Homo sapiens
cctttctggctgaat

SEQ ID NO: 1462196 - DNA, 15 bp, Homo sapiens
ctttctggctgaatg

SEQ ID NO: 1462197 - DNA, 15 bp, Homo sapiens
tttctggctgaatga

SEQ ID NO: 1462198 - DNA, 15 bp, Homo sapiens
ttctggctgaatgag

SEQ ID NO: 1462199 - DNA, 15 bp, Homo sapiens
tctggctgaatgagg

SEQ ID NO: 1462200 - DNA, 15 bp, Homo sapiens
ctggctgaatgagga

SEQ ID NO: 1462201 - DNA, 15 bp, Homo sapiens
tggctgaatgaggag

SEQ ID NO: 1462202 - DNA, 15 bp, Homo sapiens
ggctgaatgaggagc

SEQ ID NO: 1462203 - DNA, 15 bp, Homo sapiens
gctgaatgaggagca

SEQ ID NO: 1462204 - DNA, 15 bp, Homo sapiens
ctgaatgaggagcaa

SEQ ID NO: 1462205 - DNA, 15 bp, Homo sapiens
tgaatgaggagcaat

SEQ ID NO: 1462206 - DNA, 15 bp, Homo sapiens
gaatgaggagcaatg

SEQ ID NO: 1462207 - DNA, 15 bp, Homo sapiens
aatgaggagcaatgt

SEQ ID NO: 1462208 - DNA, 15 bp, Homo sapiens
atgaggagcaatgtg

SEQ ID NO: 1462209 - DNA, 15 bp, Homo sapiens
tgaggagcaatgtgg

SEQ ID NO: 1462210 - DNA, 15 bp, Homo sapiens
gaggagcaatgtggc

SEQ ID NO: 1462211 - DNA, 15 bp, Homo sapiens
aggagcaatgtggct

SEQ ID NO: 1462212 - DNA, 15 bp, Homo sapiens
ggagcaatgtggctg

SEQ ID NO: 1462213 - DNA, 15 bp, Homo sapiens
gagcaatgtggctgg

SEQ ID NO: 1462214 - DNA, 15 bp, Homo sapiens
agcaatgtggctggg

SEQ ID NO: 1462215 - DNA, 15 bp, Homo sapiens
gcaatgtggctgggg

SEQ ID NO: 1462216 - DNA, 15 bp, Homo sapiens
caatgtggctggggt

SEQ ID NO: 1462217 - DNA, 15 bp, Homo sapiens
aatgtggctggggtg

SEQ ID NO: 1462218 - DNA, 15 bp, Homo sapiens
atgtggctggggtgt

SEQ ID NO: 1462219 - DNA, 15 bp, Homo sapiens
tgtggctggggtgtg

SEQ ID NO: 1462220 - DNA, 15 bp, Homo sapiens
gtggctggggtgtgc

SEQ ID NO: 1462221 - DNA, 15 bp, Homo sapiens
tggctggggtgtgcg

SEQ ID NO: 1462222 - DNA, 15 bp, Homo sapiens
ggctggggtgtgcgg

SEQ ID NO: 1462223 - DNA, 15 bp, Homo sapiens
gctggggtgtgcggg

SEQ ID NO: 1462224 - DNA, 15 bp, Homo sapiens
ctggggtgtgcgggt

SEQ ID NO: 1462225 - DNA, 15 bp, Homo sapiens
tggggtgtgcgggtt

SEQ ID NO: 1462226 - DNA, 15 bp, Homo sapiens
ggggtgtgcgggttt

SEQ ID NO: 1462227 - DNA, 15 bp, Homo sapiens
gggtgtgcgggtttc

SEQ ID NO: 1462228 - DNA, 15 bp, Homo sapiens
ggtgtgcgggtttct

SEQ ID NO: 1462229 - DNA, 15 bp, Homo sapiens
gtgtgcgggtttctg

SEQ ID NO: 1462230 - DNA, 15 bp, Homo sapiens
tgtgcgggtttctgg

SEQ ID NO: 1462231 - DNA, 15 bp, Homo sapiens
gtgcgggtttctggt

SEQ ID NO: 1462232 - DNA, 15 bp, Homo sapiens
tgcgggtttctggtg

SEQ ID NO: 1462233 - DNA, 15 bp, Homo sapiens
gcgggtttctggtga

SEQ ID NO: 1462234 - DNA, 15 bp, Homo sapiens
cgggtttctggtgag

SEQ ID NO: 1462235 - DNA, 15 bp, Homo sapiens
gggtttctggtgagg

SEQ ID NO: 1462236 - DNA, 15 bp, Homo sapiens
ggtttctggtgaggt

SEQ ID NO: 1462237 - DNA, 15 bp, Homo sapiens
gtttctggtgaggtc

SEQ ID NO: 1462238 - DNA, 15 bp, Homo sapiens
tttctggtgaggtcc

SEQ ID NO: 1462239 - DNA, 15 bp, Homo sapiens
ttctggtgaggtccg

SEQ ID NO: 1462240 - DNA, 15 bp, Homo sapiens
tctggtgaggtccgg

SEQ ID NO: 1462241 - DNA, 15 bp, Homo sapiens
ctggtgaggtccggg

SEQ ID NO: 1462242 - DNA, 15 bp, Homo sapiens
tggtgaggtccgggt

SEQ ID NO: 1462243 - DNA, 15 bp, Homo sapiens
ggtgaggtccgggtg

SEQ ID NO: 1462244 - DNA, 15 bp, Homo sapiens
gtgaggtccgggtgg

SEQ ID NO: 1462245 - DNA, 15 bp, Homo sapiens
tgaggtccgggtggg

SEQ ID NO: 1462246 - DNA, 15 bp, Homo sapiens
gaggtccgggtggga

SEQ ID NO: 1462247 - DNA, 15 bp, Homo sapiens
aggtccgggtgggaa

SEQ ID NO: 1462248 - DNA, 15 bp, Homo sapiens
ggtccgggtgggaag

SEQ ID NO: 1462249 - DNA, 15 bp, Homo sapiens
gtccgggtgggaagc

SEQ ID NO: 1462250 - DNA, 15 bp, Homo sapiens
tccgggtgggaagcc

SEQ ID NO: 1462251 - DNA, 15 bp, Homo sapiens
ccgggtgggaagccg

SEQ ID NO: 1462252 - DNA, 15 bp, Homo sapiens
cgggtgggaagccgt

SEQ ID NO: 1462253 - DNA, 15 bp, Homo sapiens
gggtgggaagccgtc

SEQ ID NO: 1462254 - DNA, 15 bp, Homo sapiens
ggtgggaagccgtct

SEQ ID NO: 1462255 - DNA, 15 bp, Homo sapiens
gtgggaagccgtctc

SEQ ID NO: 1462256 - DNA, 15 bp, Homo sapiens
tgggaagccgtctct

SEQ ID NO: 1462257 - DNA, 15 bp, Homo sapiens
gggaagccgtctctc

SEQ ID NO: 1462258 - DNA, 15 bp, Homo sapiens
ggaagccgtctctcc

SEQ ID NO: 1462259 - DNA, 15 bp, Homo sapiens
gaagccgtctctccg

SEQ ID NO: 1462260 - DNA, 15 bp, Homo sapiens
aagccgtctctccgc

SEQ ID NO: 1462261 - DNA, 15 bp, Homo sapiens
agccgtctctccgca

SEQ ID NO: 1462262 - DNA, 15 bp, Homo sapiens
gccgtctctccgcat

SEQ ID NO: 1462263 - DNA, 15 bp, Homo sapiens
ccgtctctccgcatt

SEQ ID NO: 1462264 - DNA, 15 bp, Homo sapiens
cgtctctccgcattc

SEQ ID NO: 1462265 - DNA, 15 bp, Homo sapiens
gtctctccgcattct

SEQ ID NO: 1462266 - DNA, 15 bp, Homo sapiens
tctctccgcattctc

SEQ ID NO: 1462267 - DNA, 15 bp, Homo sapiens
ctctccgcattctcc

SEQ ID NO: 1462268 - DNA, 15 bp, Homo sapiens
tctccgcattctcct

SEQ ID NO: 1462269 - DNA, 15 bp, Homo sapiens
ctccgcattctcctg

SEQ ID NO: 1462270 - DNA, 15 bp, Homo sapiens
tccgcattctcctga

SEQ ID NO: 1462271 - DNA, 15 bp, Homo sapiens
ccgcattctcctgaa

SEQ ID NO: 1462272 - DNA, 15 bp, Homo sapiens
cgcattctcctgaaa

SEQ ID NO: 1462273 - DNA, 15 bp, Homo sapiens
gcattctcctgaaag

SEQ ID NO: 1462274 - DNA, 15 bp, Homo sapiens
cattctcctgaaagc

SEQ ID NO: 1462275 - DNA, 15 bp, Homo sapiens
attctcctgaaagct

SEQ ID NO: 1462276 - DNA, 15 bp, Homo sapiens
ttctcctgaaagctc

SEQ ID NO: 1462277 - DNA, 15 bp, Homo sapiens
tctcctgaaagctct

SEQ ID NO: 1462278 - DNA, 15 bp, Homo sapiens
ctcctgaaagctctg

SEQ ID NO: 1462279 - DNA, 15 bp, Homo sapiens
tcctgaaagctctgt

SEQ ID NO: 1462280 - DNA, 15 bp, Homo sapiens
cctgaaagctctgtt

SEQ ID NO: 1462281 - DNA, 15 bp, Homo sapiens
ctgaaagctctgttg

SEQ ID NO: 1462282 - DNA, 15 bp, Homo sapiens
tgaaagctctgttgt

SEQ ID NO: 1462283 - DNA, 15 bp, Homo sapiens
gaaagctctgttgta

SEQ ID NO: 1462284 - DNA, 15 bp, Homo sapiens
aaagctctgttgtag

SEQ ID NO: 1462285 - DNA, 15 bp, Homo sapiens
aagctctgttgtagt

SEQ ID NO: 1462286 - DNA, 15 bp, Homo sapiens
agctctgttgtagtt

SEQ ID NO: 1462287 - DNA, 15 bp, Homo sapiens
gctctgttgtagttt

SEQ ID NO: 1462288 - DNA, 15 bp, Homo sapiens
ctctgttgtagtttg

SEQ ID NO: 1462289 - DNA, 15 bp, Homo sapiens
tctgttgtagtttga

SEQ ID NO: 1462290 - DNA, 15 bp, Homo sapiens
ctgttgtagtttgaa

SEQ ID NO: 1462291 - DNA, 15 bp, Homo sapiens
tgttgtagtttgaag

SEQ ID NO: 1462292 - DNA, 15 bp, Homo sapiens
gttgtagtttgaagg

SEQ ID NO: 1462293 - DNA, 15 bp, Homo sapiens
ttgtagtttgaaggt

SEQ ID NO: 1462294 - DNA, 15 bp, Homo sapiens
tgtagtttgaaggtc

SEQ ID NO: 1462295 - DNA, 15 bp, Homo sapiens
gtagtttgaaggtcg

SEQ ID NO: 1462296 - DNA, 15 bp, Homo sapiens
tagtttgaaggtcgg

SEQ ID NO: 1462297 - DNA, 15 bp, Homo sapiens
agtttgaaggtcggt

SEQ ID NO: 1462298 - DNA, 15 bp, Homo sapiens
gtttgaaggtcggta

SEQ ID NO: 1462299 - DNA, 15 bp, Homo sapiens
tttgaaggtcggtag

SEQ ID NO: 1462300 - DNA, 15 bp, Homo sapiens
ttgaaggtcggtaga

SEQ ID NO: 1462301 - DNA, 15 bp, Homo sapiens
tgaaggtcggtagag

SEQ ID NO: 1462302 - DNA, 15 bp, Homo sapiens
gaaggtcggtagagc

SEQ ID NO: 1462303 - DNA, 15 bp, Homo sapiens
aaggtcggtagagcc

SEQ ID NO: 1462304 - DNA, 15 bp, Homo sapiens
aggtcggtagagcct

SEQ ID NO: 1462305 - DNA, 15 bp, Homo sapiens
ggtcggtagagcctg

SEQ ID NO: 1462306 - DNA, 15 bp, Homo sapiens
gtcggtagagcctgg

SEQ ID NO: 1462307 - DNA, 15 bp, Homo sapiens
tcggtagagcctggg

SEQ ID NO: 1462308 - DNA, 15 bp, Homo sapiens
cggtagagcctgggc

SEQ ID NO: 1462309 - DNA, 15 bp, Homo sapiens
ggtagagcctgggct

SEQ ID NO: 1462310 - DNA, 15 bp, Homo sapiens
gtagagcctgggctg

SEQ ID NO: 1462311 - DNA, 15 bp, Homo sapiens
tagagcctgggctga

SEQ ID NO: 1462312 - DNA, 15 bp, Homo sapiens
agagcctgggctgaa

SEQ ID NO: 1462313 - DNA, 15 bp, Homo sapiens
gagcctgggctgaaa

SEQ ID NO: 1462314 - DNA, 15 bp, Homo sapiens
agcctgggctgaaaa

SEQ ID NO: 1462315 - DNA, 15 bp, Homo sapiens
gcctgggctgaaaag

SEQ ID NO: 1462316 - DNA, 15 bp, Homo sapiens
cctgggctgaaaagg

SEQ ID NO: 1462317 - DNA, 15 bp, Homo sapiens
ctgggctgaaaagga

SEQ ID NO: 1462318 - DNA, 15 bp, Homo sapiens
tgggctgaaaaggaa

SEQ ID NO: 1462319 - DNA, 15 bp, Homo sapiens
gggctgaaaaggaaa

SEQ ID NO: 1462320 - DNA, 15 bp, Homo sapiens
ggctgaaaaggaaac

SEQ ID NO: 1462321 - DNA, 15 bp, Homo sapiens
gctgaaaaggaaaca

SEQ ID NO: 1462322 - DNA, 15 bp, Homo sapiens
ctgaaaaggaaacaa

SEQ ID NO: 1462323 - DNA, 15 bp, Homo sapiens
tgaaaaggaaacaat

SEQ ID NO: 1462324 - DNA, 15 bp, Homo sapiens
gaaaaggaaacaatt

SEQ ID NO: 1462325 - DNA, 15 bp, Homo sapiens
aaaaggaaacaattt

SEQ ID NO: 1462326 - DNA, 15 bp, Homo sapiens
aaaggaaacaatttg

SEQ ID NO: 1462327 - DNA, 15 bp, Homo sapiens
aaggaaacaatttgg

SEQ ID NO: 1462328 - DNA, 15 bp, Homo sapiens
aggaaacaatttggg

SEQ ID NO: 1462329 - DNA, 15 bp, Homo sapiens
ggaaacaatttgggg

SEQ ID NO: 1462330 - DNA, 15 bp, Homo sapiens
gaaacaatttggggt

SEQ ID NO: 1462331 - DNA, 15 bp, Homo sapiens
aaacaatttggggtt

SEQ ID NO: 1462332 - DNA, 15 bp, Homo sapiens
aacaatttggggttt

SEQ ID NO: 1462333 - DNA, 15 bp, Homo sapiens
acaatttggggtttg

SEQ ID NO: 1462334 - DNA, 15 bp, Homo sapiens
caatttggggtttga

SEQ ID NO: 1462335 - DNA, 15 bp, Homo sapiens
aatttggggtttgaa

SEQ ID NO: 1462336 - DNA, 15 bp, Homo sapiens
atttggggtttgaaa

SEQ ID NO: 1462337 - DNA, 15 bp, Homo sapiens
tttggggtttgaaag

SEQ ID NO: 1462338 - DNA, 15 bp, Homo sapiens
ttggggtttgaaagg

SEQ ID NO: 1462339 - DNA, 15 bp, Homo sapiens
tggggtttgaaagga

SEQ ID NO: 1462340 - DNA, 15 bp, Homo sapiens
ggggtttgaaaggat

SEQ ID NO: 1462341 - DNA, 15 bp, Homo sapiens
gggtttgaaaggatg

SEQ ID NO: 1462342 - DNA, 15 bp, Homo sapiens
ggtttgaaaggatgt

SEQ ID NO: 1462343 - DNA, 15 bp, Homo sapiens
gtttgaaaggatgta

SEQ ID NO: 1462344 - DNA, 15 bp, Homo sapiens
tttgaaaggatgtaa

SEQ ID NO: 1462345 - DNA, 15 bp, Homo sapiens
ttgaaaggatgtaat

SEQ ID NO: 1462346 - DNA, 15 bp, Homo sapiens
tgaaaggatgtaatt

SEQ ID NO: 1462347 - DNA, 15 bp, Homo sapiens
gaaaggatgtaattc

SEQ ID NO: 1462348 - DNA, 15 bp, Homo sapiens
aaaggatgtaattca

SEQ ID NO: 1462349 - DNA, 15 bp, Homo sapiens
aaggatgtaattcat

SEQ ID NO: 1462350 - DNA, 15 bp, Homo sapiens
aggatgtaattcatt

SEQ ID NO: 1462351 - DNA, 15 bp, Homo sapiens
ggatgtaattcattc

SEQ ID NO: 1462352 - DNA, 15 bp, Homo sapiens
gatgtaattcattct

SEQ ID NO: 1462353 - DNA, 15 bp, Homo sapiens
atgtaattcattctt

SEQ ID NO: 1462354 - DNA, 15 bp, Homo sapiens
tgtaattcattcttc

SEQ ID NO: 1462355 - DNA, 15 bp, Homo sapiens
gtaattcattcttcc

SEQ ID NO: 1462356 - DNA, 15 bp, Homo sapiens
taattcattcttcct

SEQ ID NO: 1462357 - DNA, 15 bp, Homo sapiens
aattcattcttcctt

SEQ ID NO: 1462358 - DNA, 15 bp, Homo sapiens
attcattcttccttt

SEQ ID NO: 1462359 - DNA, 15 bp, Homo sapiens
ttcattcttcctttc

SEQ ID NO: 1462360 - DNA, 15 bp, Homo sapiens
tcattcttcctttcc

SEQ ID NO: 1462361 - DNA, 15 bp, Homo sapiens
cattcttcctttccc

SEQ ID NO: 1462362 - DNA, 15 bp, Homo sapiens
attcttcctttcccg

SEQ ID NO: 1462363 - DNA, 15 bp, Homo sapiens
ttcttcctttcccgt

SEQ ID NO: 1462364 - DNA, 15 bp, Homo sapiens
tcttcctttcccgtt

SEQ ID NO: 1462365 - DNA, 15 bp, Homo sapiens
cttcctttcccgtta

SEQ ID NO: 1462366 - DNA, 15 bp, Homo sapiens
ttcctttcccgttaa

SEQ ID NO: 1462367 - DNA, 15 bp, Homo sapiens
tcctttcccgttaac

SEQ ID NO: 1462368 - DNA, 15 bp, Homo sapiens
cctttcccgttaacc

SEQ ID NO: 1462369 - DNA, 15 bp, Homo sapiens
ctttcccgttaacct

SEQ ID NO: 1462370 - DNA, 15 bp, Homo sapiens
tttcccgttaacctc

SEQ ID NO: 1462371 - DNA, 15 bp, Homo sapiens
ttcccgttaacctct

SEQ ID NO: 1462372 - DNA, 15 bp, Homo sapiens
tcccgttaacctctt

SEQ ID NO: 1462373 - DNA, 15 bp, Homo sapiens
cccgttaacctcttt

SEQ ID NO: 1462374 - DNA, 15 bp, Homo sapiens
ccgttaacctctttc

SEQ ID NO: 1462375 - DNA, 15 bp, Homo sapiens
cgttaacctctttcc

SEQ ID NO: 1462376 - DNA, 15 bp, Homo sapiens
gttaacctctttcct

SEQ ID NO: 1462377 - DNA, 15 bp, Homo sapiens
ttaacctctttcctc

SEQ ID NO: 1462378 - DNA, 15 bp, Homo sapiens
taacctctttcctct

SEQ ID NO: 1462379 - DNA, 15 bp, Homo sapiens
aacctctttcctctc

SEQ ID NO: 1462380 - DNA, 15 bp, Homo sapiens
acctctttcctctct

SEQ ID NO: 1462381 - DNA, 15 bp, Homo sapiens
cctctttcctctctg

SEQ ID NO: 1462382 - DNA, 15 bp, Homo sapiens
ctctttcctctctgg

SEQ ID NO: 1462383 - DNA, 15 bp, Homo sapiens
tctttcctctctgga

SEQ ID NO: 1462384 - DNA, 15 bp, Homo sapiens
ctttcctctctggaa

SEQ ID NO: 1462385 - DNA, 15 bp, Homo sapiens
tttcctctctggaaa

SEQ ID NO: 1462386 - DNA, 15 bp, Homo sapiens
ttcctctctggaaag

SEQ ID NO: 1462387 - DNA, 15 bp, Homo sapiens
tcctctctggaaagc

SEQ ID NO: 1462388 - DNA, 15 bp, Homo sapiens
cctctctggaaagca

SEQ ID NO: 1462389 - DNA, 15 bp, Homo sapiens
ctctctggaaagcac

SEQ ID NO: 1462390 - DNA, 15 bp, Homo sapiens
tctctggaaagcacg

SEQ ID NO: 1462391 - DNA, 15 bp, Homo sapiens
ctctggaaagcacgt

SEQ ID NO: 1462392 - DNA, 15 bp, Homo sapiens
tctggaaagcacgtg

SEQ ID NO: 1462393 - DNA, 15 bp, Homo sapiens
ctggaaagcacgtgg

SEQ ID NO: 1462394 - DNA, 15 bp, Homo sapiens
tggaaagcacgtgga

SEQ ID NO: 1462395 - DNA, 15 bp, Homo sapiens
ggaaagcacgtggaa

SEQ ID NO: 1462396 - DNA, 15 bp, Homo sapiens
gaaagcacgtggaaa

SEQ ID NO: 1462397 - DNA, 15 bp, Homo sapiens
aaagcacgtggaaac

SEQ ID NO: 1462398 - DNA, 15 bp, Homo sapiens
aagcacgtggaaacg

SEQ ID NO: 1462399 - DNA, 15 bp, Homo sapiens
agcacgtggaaacgc

SEQ ID NO: 1462400 - DNA, 15 bp, Homo sapiens
gcacgtggaaacgct

SEQ ID NO: 1462401 - DNA, 15 bp, Homo sapiens
cacgtggaaacgctg

SEQ ID NO: 1462402 - DNA, 15 bp, Homo sapiens
acgtggaaacgctga

SEQ ID NO: 1462403 - DNA, 15 bp, Homo sapiens
cgtggaaacgctgaa

SEQ ID NO: 1462404 - DNA, 15 bp, Homo sapiens
gtggaaacgctgaag

SEQ ID NO: 1462405 - DNA, 15 bp, Homo sapiens
tggaaacgctgaagg

SEQ ID NO: 1462406 - DNA, 15 bp, Homo sapiens
ggaaacgctgaaggg

SEQ ID NO: 1462407 - DNA, 15 bp, Homo sapiens
gaaacgctgaaggga

SEQ ID NO: 1462408 - DNA, 15 bp, Homo sapiens
aaacgctgaagggag

SEQ ID NO: 1462409 - DNA, 15 bp, Homo sapiens
aacgctgaagggagg

SEQ ID NO: 1462410 - DNA, 15 bp, Homo sapiens
acgctgaagggagga

SEQ ID NO: 1462411 - DNA, 15 bp, Homo sapiens
cgctgaagggaggag

SEQ ID NO: 1462412 - DNA, 15 bp, Homo sapiens
gctgaagggaggagt

SEQ ID NO: 1462413 - DNA, 15 bp, Homo sapiens
ctgaagggaggagtg

SEQ ID NO: 1462414 - DNA, 15 bp, Homo sapiens
tgaagggaggagtga

SEQ ID NO: 1462415 - DNA, 15 bp, Homo sapiens
gaagggaggagtgag

SEQ ID NO: 1462416 - DNA, 15 bp, Homo sapiens
aagggaggagtgaga

SEQ ID NO: 1462417 - DNA, 15 bp, Homo sapiens
agggaggagtgagag

SEQ ID NO: 1462418 - DNA, 15 bp, Homo sapiens
gggaggagtgagagg

SEQ ID NO: 1462419 - DNA, 15 bp, Homo sapiens
ggaggagtgagaggg

SEQ ID NO: 1462420 - DNA, 15 bp, Homo sapiens
gaggagtgagagggc

SEQ ID NO: 1462421 - DNA, 15 bp, Homo sapiens
aggagtgagagggca

SEQ ID NO: 1462422 - DNA, 15 bp, Homo sapiens
ggagtgagagggcag

SEQ ID NO: 1462423 - DNA, 15 bp, Homo sapiens
gagtgagagggcagg

SEQ ID NO: 1462424 - DNA, 15 bp, Homo sapiens
agtgagagggcaggc

SEQ ID NO: 1462425 - DNA, 15 bp, Homo sapiens
gtgagagggcaggca

SEQ ID NO: 1462426 - DNA, 15 bp, Homo sapiens
tgagagggcaggcag

SEQ ID NO: 1462427 - DNA, 15 bp, Homo sapiens
gagagggcaggcagc

SEQ ID NO: 1462428 - DNA, 15 bp, Homo sapiens
agagggcaggcagcc

SEQ ID NO: 1462429 - DNA, 15 bp, Homo sapiens
gagggcaggcagcct

SEQ ID NO: 1462430 - DNA, 15 bp, Homo sapiens
agggcaggcagcctg

SEQ ID NO: 1462431 - DNA, 15 bp, Homo sapiens
gggcaggcagcctgc

SEQ ID NO: 1462432 - DNA, 15 bp, Homo sapiens
ggcaggcagcctgcc

SEQ ID NO: 1462433 - DNA, 15 bp, Homo sapiens
gcaggcagcctgccg

SEQ ID NO: 1462434 - DNA, 15 bp, Homo sapiens
caggcagcctgccgc

SEQ ID NO: 1462435 - DNA, 15 bp, Homo sapiens
aggcagcctgccgcg

SEQ ID NO: 1462436 - DNA, 15 bp, Homo sapiens
ggcagcctgccgcgg

SEQ ID NO: 1462437 - DNA, 15 bp, Homo sapiens
gcagcctgccgcggg

SEQ ID NO: 1462438 - DNA, 15 bp, Homo sapiens
cagcctgccgcgggg

SEQ ID NO: 1462439 - DNA, 15 bp, Homo sapiens
agcctgccgcgggga

SEQ ID NO: 1462440 - DNA, 15 bp, Homo sapiens
gcctgccgcggggag

SEQ ID NO: 1462441 - DNA, 15 bp, Homo sapiens
cctgccgcggggagg

SEQ ID NO: 1462442 - DNA, 15 bp, Homo sapiens
ctgccgcggggagga

SEQ ID NO: 1462443 - DNA, 15 bp, Homo sapiens
tgccgcggggaggaa

SEQ ID NO: 1462444 - DNA, 15 bp, Homo sapiens
gccgcggggaggaaa

SEQ ID NO: 1462445 - DNA, 15 bp, Homo sapiens
ccgcggggaggaaag

SEQ ID NO: 1462446 - DNA, 15 bp, Homo sapiens
cgcggggaggaaagg

SEQ ID NO: 1462447 - DNA, 15 bp, Homo sapiens
gcggggaggaaaggg

SEQ ID NO: 1462448 - DNA, 15 bp, Homo sapiens
cggggaggaaagggt

SEQ ID NO: 1462449 - DNA, 15 bp, Homo sapiens
ggggaggaaagggtt

SEQ ID NO: 1462450 - DNA, 15 bp, Homo sapiens
gggaggaaagggtta

SEQ ID NO: 1462451 - DNA, 15 bp, Homo sapiens
ggaggaaagggttaa

SEQ ID NO: 1462452 - DNA, 15 bp, Homo sapiens
gaggaaagggttaag

SEQ ID NO: 1462453 - DNA, 15 bp, Homo sapiens
aggaaagggttaagc

SEQ ID NO: 1462454 - DNA, 15 bp, Homo sapiens
ggaaagggttaagcc

SEQ ID NO: 1462455 - DNA, 15 bp, Homo sapiens
gaaagggttaagcct

SEQ ID NO: 1462456 - DNA, 15 bp, Homo sapiens
aaagggttaagcctg

SEQ ID NO: 1462457 - DNA, 15 bp, Homo sapiens
aagggttaagcctga

SEQ ID NO: 1462458 - DNA, 15 bp, Homo sapiens
agggttaagcctgat

SEQ ID NO: 1462459 - DNA, 15 bp, Homo sapiens
gggttaagcctgatt

SEQ ID NO: 1462460 - DNA, 15 bp, Homo sapiens
ggttaagcctgattt

SEQ ID NO: 1462461 - DNA, 15 bp, Homo sapiens
gttaagcctgatttc

SEQ ID NO: 1462462 - DNA, 15 bp, Homo sapiens
ttaagcctgatttct

SEQ ID NO: 1462463 - DNA, 15 bp, Homo sapiens
taagcctgatttctt

SEQ ID NO: 1462464 - DNA, 15 bp, Homo sapiens
aagcctgatttcttt

SEQ ID NO: 1462465 - DNA, 15 bp, Homo sapiens
agcctgatttctttt

SEQ ID NO: 1462466 - DNA, 15 bp, Homo sapiens
gcctgatttctttta

SEQ ID NO: 1462467 - DNA, 15 bp, Homo sapiens
cctgatttcttttaa

SEQ ID NO: 1462468 - DNA, 15 bp, Homo sapiens
ctgatttcttttaat

SEQ ID NO: 1462469 - DNA, 15 bp, Homo sapiens
tgatttcttttaatt

SEQ ID NO: 1462470 - DNA, 15 bp, Homo sapiens
gatttcttttaattg

SEQ ID NO: 1462471 - DNA, 15 bp, Homo sapiens
atttcttttaattga

SEQ ID NO: 1462472 - DNA, 15 bp, Homo sapiens
tttcttttaattgaa

SEQ ID NO: 1462473 - DNA, 15 bp, Homo sapiens
ttcttttaattgaac

SEQ ID NO: 1462474 - DNA, 15 bp, Homo sapiens
tcttttaattgaact

SEQ ID NO: 1462475 - DNA, 15 bp, Homo sapiens
cttttaattgaactc

SEQ ID NO: 1462476 - DNA, 15 bp, Homo sapiens
ttttaattgaactcc

SEQ ID NO: 1462477 - DNA, 15 bp, Homo sapiens
tttaattgaactcca

SEQ ID NO: 1462478 - DNA, 15 bp, Homo sapiens
ttaattgaactccag

SEQ ID NO: 1462479 - DNA, 15 bp, Homo sapiens
taattgaactccaga

SEQ ID NO: 1462480 - DNA, 15 bp, Homo sapiens
aattgaactccagaa

SEQ ID NO: 1462481 - DNA, 15 bp, Homo sapiens
attgaactccagaac

SEQ ID NO: 1462482 - DNA, 15 bp, Homo sapiens
ttgaactccagaact

SEQ ID NO: 1462483 - DNA, 15 bp, Homo sapiens
tgaactccagaactg

SEQ ID NO: 1462484 - DNA, 15 bp, Homo sapiens
gaactccagaactgg

SEQ ID NO: 1462485 - DNA, 15 bp, Homo sapiens
aactccagaactggt

SEQ ID NO: 1462486 - DNA, 15 bp, Homo sapiens
actccagaactggtg

SEQ ID NO: 1462487 - DNA, 15 bp, Homo sapiens
ctccagaactggtgg

SEQ ID NO: 1462488 - DNA, 15 bp, Homo sapiens
tccagaactggtggc

SEQ ID NO: 1462489 - DNA, 15 bp, Homo sapiens
ccagaactggtggcc

SEQ ID NO: 1462490 - DNA, 15 bp, Homo sapiens
cagaactggtggccc

SEQ ID NO: 1462491 - DNA, 15 bp, Homo sapiens
agaactggtggcccc

SEQ ID NO: 1462492 - DNA, 15 bp, Homo sapiens
gaactggtggcccca

SEQ ID NO: 1462493 - DNA, 15 bp, Homo sapiens
aactggtggccccag

SEQ ID NO: 1462494 - DNA, 15 bp, Homo sapiens
actggtggccccagg

SEQ ID NO: 1462495 - DNA, 15 bp, Homo sapiens
ctggtggccccaggc

SEQ ID NO: 1462496 - DNA, 15 bp, Homo sapiens
tggtggccccaggca

SEQ ID NO: 1462497 - DNA, 15 bp, Homo sapiens
ggtggccccaggcaa

SEQ ID NO: 1462498 - DNA, 15 bp, Homo sapiens
gtggccccaggcaaa

SEQ ID NO: 1462499 - DNA, 15 bp, Homo sapiens
tggccccaggcaaag

SEQ ID NO: 1462500 - DNA, 15 bp, Homo sapiens
ggccccaggcaaagg

SEQ ID NO: 1462501 - DNA, 15 bp, Homo sapiens
gccccaggcaaaggg

SEQ ID NO: 1462502 - DNA, 15 bp, Homo sapiens
ccccaggcaaagggg

SEQ ID NO: 1462503 - DNA, 15 bp, Homo sapiens
cccaggcaaaggggg

SEQ ID NO: 1462504 - DNA, 15 bp, Homo sapiens
ccaggcaaagggggg

SEQ ID NO: 1462505 - DNA, 15 bp, Homo sapiens
caggcaaaggggggg

SEQ ID NO: 1462506 - DNA, 15 bp, Homo sapiens
aggcaaaggggggga

SEQ ID NO: 1462507 - DNA, 15 bp, Homo sapiens
ggcaaagggggggac

SEQ ID NO: 1462508 - DNA, 15 bp, Homo sapiens
gcaaagggggggact

SEQ ID NO: 1462509 - DNA, 15 bp, Homo sapiens
caaagggggggactg

SEQ ID NO: 1462510 - DNA, 15 bp, Homo sapiens
aaagggggggactga

SEQ ID NO: 1462511 - DNA, 15 bp, Homo sapiens
aagggggggactgac

SEQ ID NO: 1462512 - DNA, 15 bp, Homo sapiens
agggggggactgacc

SEQ ID NO: 1462513 - DNA, 15 bp, Homo sapiens
gggggggactgaccc

SEQ ID NO: 1462514 - DNA, 15 bp, Homo sapiens
ggggggactgacccc

SEQ ID NO: 1462515 - DNA, 15 bp, Homo sapiens
gggggactgaccccg

SEQ ID NO: 1462516 - DNA, 15 bp, Homo sapiens
ggggactgaccccgc

SEQ ID NO: 1462517 - DNA, 15 bp, Homo sapiens
gggactgaccccgct

SEQ ID NO: 1462518 - DNA, 15 bp, Homo sapiens
ggactgaccccgcta

SEQ ID NO: 1462519 - DNA, 15 bp, Homo sapiens
gactgaccccgctag

SEQ ID NO: 1462520 - DNA, 15 bp, Homo sapiens
actgaccccgctagc

SEQ ID NO: 1462521 - DNA, 15 bp, Homo sapiens
ctgaccccgctagcg

SEQ ID NO: 1462522 - DNA, 15 bp, Homo sapiens
tgaccccgctagcgg

SEQ ID NO: 1462523 - DNA, 15 bp, Homo sapiens
gaccccgctagcggt

SEQ ID NO: 1462524 - DNA, 15 bp, Homo sapiens
accccgctagcggta

SEQ ID NO: 1462525 - DNA, 15 bp, Homo sapiens
ccccgctagcggtaa

SEQ ID NO: 1462526 - DNA, 15 bp, Homo sapiens
cccgctagcggtaac

SEQ ID NO: 1462527 - DNA, 15 bp, Homo sapiens
ccgctagcggtaacc

SEQ ID NO: 1462528 - DNA, 15 bp, Homo sapiens
cgctagcggtaacca

SEQ ID NO: 1462529 - DNA, 15 bp, Homo sapiens
gctagcggtaaccag

SEQ ID NO: 1462530 - DNA, 15 bp, Homo sapiens
ctagcggtaaccaga

SEQ ID NO: 1462531 - DNA, 15 bp, Homo sapiens
tagcggtaaccagat

SEQ ID NO: 1462532 - DNA, 15 bp, Homo sapiens
agcggtaaccagatg

SEQ ID NO: 1462533 - DNA, 15 bp, Homo sapiens
gcggtaaccagatgt

SEQ ID NO: 1462534 - DNA, 15 bp, Homo sapiens
cggtaaccagatgtg

SEQ ID NO: 1462535 - DNA, 15 bp, Homo sapiens
ggtaaccagatgtgg

SEQ ID NO: 1462536 - DNA, 15 bp, Homo sapiens
gtaaccagatgtggc

SEQ ID NO: 1462537 - DNA, 15 bp, Homo sapiens
taaccagatgtggcg

SEQ ID NO: 1462538 - DNA, 15 bp, Homo sapiens
aaccagatgtggcgg

SEQ ID NO: 1462539 - DNA, 15 bp, Homo sapiens
accagatgtggcggt

SEQ ID NO: 1462540 - DNA, 15 bp, Homo sapiens
ccagatgtggcggtc

SEQ ID NO: 1462541 - DNA, 15 bp, Homo sapiens
cagatgtggcggtcc

SEQ ID NO: 1462542 - DNA, 15 bp, Homo sapiens
agatgtggcggtccc

SEQ ID NO: 1462543 - DNA, 15 bp, Homo sapiens
gatgtggcggtccca

SEQ ID NO: 1462544 - DNA, 15 bp, Homo sapiens
atgtggcggtcccag

SEQ ID NO: 1462545 - DNA, 15 bp, Homo sapiens
tgtggcggtcccagg

SEQ ID NO: 1462546 - DNA, 15 bp, Homo sapiens
gtggcggtcccaggg

SEQ ID NO: 1462547 - DNA, 15 bp, Homo sapiens
tggcggtcccagggg

SEQ ID NO: 1462548 - DNA, 15 bp, Homo sapiens
ggcggtcccagggga

SEQ ID NO: 1462549 - DNA, 15 bp, Homo sapiens
gcggtcccaggggag

SEQ ID NO: 1462550 - DNA, 15 bp, Homo sapiens
cggtcccaggggagc

SEQ ID NO: 1462551 - DNA, 15 bp, Homo sapiens
ggtcccaggggagcc

SEQ ID NO: 1462552 - DNA, 15 bp, Homo sapiens
gtcccaggggagccc

SEQ ID NO: 1462553 - DNA, 15 bp, Homo sapiens
tcccaggggagcccc

SEQ ID NO: 1462554 - DNA, 15 bp, Homo sapiens
cccaggggagccccg

SEQ ID NO: 1462555 - DNA, 15 bp, Homo sapiens
ccaggggagccccgg

SEQ ID NO: 1462556 - DNA, 15 bp, Homo sapiens
caggggagccccgga

SEQ ID NO: 1462557 - DNA, 15 bp, Homo sapiens
aggggagccccggag

SEQ ID NO: 1462558 - DNA, 15 bp, Homo sapiens
ggggagccccggagc

SEQ ID NO: 1462559 - DNA, 15 bp, Homo sapiens
gggagccccggagca

SEQ ID NO: 1462560 - DNA, 15 bp, Homo sapiens
ggagccccggagcag

SEQ ID NO: 1462561 - DNA, 15 bp, Homo sapiens
gagccccggagcaga

SEQ ID NO: 1462562 - DNA, 15 bp, Homo sapiens
agccccggagcagac

SEQ ID NO: 1462563 - DNA, 15 bp, Homo sapiens
gccccggagcagacc

SEQ ID NO: 1462564 - DNA, 15 bp, Homo sapiens
ccccggagcagaccc

SEQ ID NO: 1462565 - DNA, 15 bp, Homo sapiens
cccggagcagacccc

SEQ ID NO: 1462566 - DNA, 15 bp, Homo sapiens
ccggagcagacccct

SEQ ID NO: 1462567 - DNA, 15 bp, Homo sapiens
cggagcagacccctg

SEQ ID NO: 1462568 - DNA, 15 bp, Homo sapiens
ggagcagacccctgg

SEQ ID NO: 1462569 - DNA, 15 bp, Homo sapiens
gagcagacccctgga

SEQ ID NO: 1462570 - DNA, 15 bp, Homo sapiens
agcagacccctggat

SEQ ID NO: 1462571 - DNA, 15 bp, Homo sapiens
gcagacccctggatt

SEQ ID NO: 1462572 - DNA, 15 bp, Homo sapiens
agacccctggattga

SEQ ID NO: 1462573 - DNA, 15 bp, Homo sapiens
gacccctggattgag

SEQ ID NO: 1462574 - DNA, 15 bp, Homo sapiens
acccctggattgaga

SEQ ID NO: 1462575 - DNA, 15 bp, Homo sapiens
cccctggattgagaa

SEQ ID NO: 1462576 - DNA, 15 bp, Homo sapiens
ccctggattgagaag

SEQ ID NO: 1462577 - DNA, 15 bp, Homo sapiens
cctggattgagaagc

SEQ ID NO: 1462578 - DNA, 15 bp, Homo sapiens
ctggattgagaagca

SEQ ID NO: 1462579 - DNA, 15 bp, Homo sapiens
tggattgagaagcag

SEQ ID NO: 1462580 - DNA, 15 bp, Homo sapiens
ggattgagaagcaga

SEQ ID NO: 1462581 - DNA, 15 bp, Homo sapiens
gattgagaagcagac

SEQ ID NO: 1462582 - DNA, 15 bp, Homo sapiens
attgagaagcagaca

SEQ ID NO: 1462583 - DNA, 15 bp, Homo sapiens
ttgagaagcagacag

SEQ ID NO: 1462584 - DNA, 15 bp, Homo sapiens
tgagaagcagacagg

SEQ ID NO: 1462585 - DNA, 15 bp, Homo sapiens
gagaagcagacagga

SEQ ID NO: 1462586 - DNA, 15 bp, Homo sapiens
agaagcagacaggag

SEQ ID NO: 1462587 - DNA, 15 bp, Homo sapiens
gaagcagacaggagc

SEQ ID NO: 1462588 - DNA, 15 bp, Homo sapiens
aagcagacaggagcg

SEQ ID NO: 1462589 - DNA, 15 bp, Homo sapiens
agcagacaggagcgg

SEQ ID NO: 1462590 - DNA, 15 bp, Homo sapiens
gcagacaggagcggg

SEQ ID NO: 1462591 - DNA, 15 bp, Homo sapiens
cagacaggagcgggg

SEQ ID NO: 1462592 - DNA, 15 bp, Homo sapiens
agacaggagcggggg

SEQ ID NO: 1462593 - DNA, 15 bp, Homo sapiens
gacaggagcgggggg

SEQ ID NO: 1462594 - DNA, 15 bp, Homo sapiens
acaggagcgggggga

SEQ ID NO: 1462595 - DNA, 15 bp, Homo sapiens
caggagcggggggag

SEQ ID NO: 1462596 - DNA, 15 bp, Homo sapiens
aggagcggggggagt

SEQ ID NO: 1462597 - DNA, 15 bp, Homo sapiens
ggagcggggggagtc

SEQ ID NO: 1462598 - DNA, 15 bp, Homo sapiens
gagcggggggagtca

SEQ ID NO: 1462599 - DNA, 15 bp, Homo sapiens
agcggggggagtcag

SEQ ID NO: 1462600 - DNA, 15 bp, Homo sapiens
gcggggggagtcagc

SEQ ID NO: 1462601 - DNA, 15 bp, Homo sapiens
cggggggagtcagcc

SEQ ID NO: 1462602 - DNA, 15 bp, Homo sapiens
ggggggagtcagccc

SEQ ID NO: 1462603 - DNA, 15 bp, Homo sapiens
gggggagtcagcccg

SEQ ID NO: 1462604 - DNA, 15 bp, Homo sapiens
ggggagtcagcccgg

SEQ ID NO: 1462605 - DNA, 15 bp, Homo sapiens
gggagtcagcccggc

SEQ ID NO: 1462606 - DNA, 15 bp, Homo sapiens
ggagtcagcccggcc

SEQ ID NO: 1462607 - DNA, 15 bp, Homo sapiens
gagtcagcccggccc

SEQ ID NO: 1462608 - DNA, 15 bp, Homo sapiens
agtcagcccggcccc

SEQ ID NO: 1462609 - DNA, 15 bp, Homo sapiens
gtcagcccggccccc

SEQ ID NO: 1462610 - DNA, 15 bp, Homo sapiens
tcagcccggccccca

SEQ ID NO: 1462611 - DNA, 15 bp, Homo sapiens
cagcccggcccccat

SEQ ID NO: 1462612 - DNA, 15 bp, Homo sapiens
agcccggcccccatc

SEQ ID NO: 1462613 - DNA, 15 bp, Homo sapiens
gcccggcccccatcc

SEQ ID NO: 1462614 - DNA, 15 bp, Homo sapiens
cccggcccccatccc

SEQ ID NO: 1462615 - DNA, 15 bp, Homo sapiens
ccggcccccatccca

SEQ ID NO: 1462616 - DNA, 15 bp, Homo sapiens
cggcccccatcccac

SEQ ID NO: 1462617 - DNA, 15 bp, Homo sapiens
ggcccccatcccacc

SEQ ID NO: 1462618 - DNA, 15 bp, Homo sapiens
gcccccatcccacca

SEQ ID NO: 1462619 - DNA, 15 bp, Homo sapiens
cccccatcccaccat

SEQ ID NO: 1462620 - DNA, 15 bp, Homo sapiens
ccccatcccaccatc

SEQ ID NO: 1462621 - DNA, 15 bp, Homo sapiens
cccatcccaccatcc

SEQ ID NO: 1462622 - DNA, 15 bp, Homo sapiens
ccatcccaccatcca

SEQ ID NO: 1462623 - DNA, 15 bp, Homo sapiens
catcccaccatccac

SEQ ID NO: 1462624 - DNA, 15 bp, Homo sapiens
atcccaccatccacc

SEQ ID NO: 1462625 - DNA, 15 bp, Homo sapiens
tcccaccatccaccc

SEQ ID NO: 1462626 - DNA, 15 bp, Homo sapiens
cccaccatccacccc

SEQ ID NO: 1462627 - DNA, 15 bp, Homo sapiens
ccaccatccacccca

SEQ ID NO: 1462628 - DNA, 15 bp, Homo sapiens
caccatccaccccac

SEQ ID NO: 1462629 - DNA, 15 bp, Homo sapiens
accatccaccccacc

SEQ ID NO: 1462630 - DNA, 15 bp, Homo sapiens
ccatccaccccaccc

SEQ ID NO: 1462631 - DNA, 15 bp, Homo sapiens
catccaccccacccc

SEQ ID NO: 1462632 - DNA, 15 bp, Homo sapiens
atccaccccaccccc

SEQ ID NO: 1462633 - DNA, 15 bp, Homo sapiens
tccaccccaccccca

SEQ ID NO: 1462634 - DNA, 15 bp, Homo sapiens
ccaccccacccccac

SEQ ID NO: 1462635 - DNA, 15 bp, Homo sapiens
accccacccccaccc

SEQ ID NO: 1462636 - DNA, 15 bp, Homo sapiens
ccccacccccacccc

SEQ ID NO: 1462637 - DNA, 15 bp, Homo sapiens
cccacccccaccccc

SEQ ID NO: 1462638 - DNA, 15 bp, Homo sapiens
ccacccccaccccca

SEQ ID NO: 1462639 - DNA, 15 bp, Homo sapiens
cacccccacccccaa

SEQ ID NO: 1462640 - DNA, 15 bp, Homo sapiens
acccccacccccaac

SEQ ID NO: 1462641 - DNA, 15 bp, Homo sapiens
cccccacccccaaca

SEQ ID NO: 1462642 - DNA, 15 bp, Homo sapiens
ccccacccccaacac

SEQ ID NO: 1462643 - DNA, 15 bp, Homo sapiens
cccacccccaacacg

SEQ ID NO: 1462644 - DNA, 15 bp, Homo sapiens
ccacccccaacacgc

SEQ ID NO: 1462645 - DNA, 15 bp, Homo sapiens
cacccccaacacgca

SEQ ID NO: 1462646 - DNA, 15 bp, Homo sapiens
acccccaacacgcac

SEQ ID NO: 1462647 - DNA, 15 bp, Homo sapiens
cccccaacacgcaca

SEQ ID NO: 1462648 - DNA, 15 bp, Homo sapiens
ccccaacacgcacac

SEQ ID NO: 1462649 - DNA, 15 bp, Homo sapiens
cccaacacgcacacc

SEQ ID NO: 1462650 - DNA, 15 bp, Homo sapiens
ccaacacgcacacca

SEQ ID NO: 1462651 - DNA, 15 bp, Homo sapiens
caacacgcacaccaa

SEQ ID NO: 1462652 - DNA, 15 bp, Homo sapiens
aacacgcacaccaag

SEQ ID NO: 1462653 - DNA, 15 bp, Homo sapiens
acacgcacaccaagt

SEQ ID NO: 1462654 - DNA, 15 bp, Homo sapiens
cacgcacaccaagtc

SEQ ID NO: 1462655 - DNA, 15 bp, Homo sapiens
acgcacaccaagtct

SEQ ID NO: 1462656 - DNA, 15 bp, Homo sapiens
cgcacaccaagtctc

SEQ ID NO: 1462657 - DNA, 15 bp, Homo sapiens
gcacaccaagtctca

SEQ ID NO: 1462658 - DNA, 15 bp, Homo sapiens
cacaccaagtctcaa

SEQ ID NO: 1462659 - DNA, 15 bp, Homo sapiens
acaccaagtctcaat

SEQ ID NO: 1462660 - DNA, 15 bp, Homo sapiens
caccaagtctcaatt

SEQ ID NO: 1462661 - DNA, 15 bp, Homo sapiens
accaagtctcaattg

SEQ ID NO: 1462662 - DNA, 15 bp, Homo sapiens
ccaagtctcaattgc

SEQ ID NO: 1462663 - DNA, 15 bp, Homo sapiens
caagtctcaattgct

SEQ ID NO: 1462664 - DNA, 15 bp, Homo sapiens
aagtctcaattgctg

SEQ ID NO: 1462665 - DNA, 15 bp, Homo sapiens
agtctcaattgctgg

SEQ ID NO: 1462666 - DNA, 15 bp, Homo sapiens
gtctcaattgctggc

SEQ ID NO: 1462667 - DNA, 15 bp, Homo sapiens
tctcaattgctggca

SEQ ID NO: 1462668 - DNA, 15 bp, Homo sapiens
ctcaattgctggcag

SEQ ID NO: 1462669 - DNA, 15 bp, Homo sapiens
tcaattgctggcagg

SEQ ID NO: 1462670 - DNA, 15 bp, Homo sapiens
caattgctggcaggc

SEQ ID NO: 1462671 - DNA, 15 bp, Homo sapiens
aattgctggcaggct

SEQ ID NO: 1462672 - DNA, 15 bp, Homo sapiens
attgctggcaggctg

SEQ ID NO: 1462673 - DNA, 15 bp, Homo sapiens
ttgctggcaggctgc

SEQ ID NO: 1462674 - DNA, 15 bp, Homo sapiens
tgctggcaggctgca

SEQ ID NO: 1462675 - DNA, 15 bp, Homo sapiens
gctggcaggctgcac

SEQ ID NO: 1462676 - DNA, 15 bp, Homo sapiens
ctggcaggctgcacc

SEQ ID NO: 1462677 - DNA, 15 bp, Homo sapiens
tggcaggctgcaccc

SEQ ID NO: 1462678 - DNA, 15 bp, Homo sapiens
ggcaggctgcacccg

SEQ ID NO: 1462679 - DNA, 15 bp, Homo sapiens
gcaggctgcacccgc

SEQ ID NO: 1462680 - DNA, 15 bp, Homo sapiens
caggctgcacccgcc

SEQ ID NO: 1462681 - DNA, 15 bp, Homo sapiens
aggctgcacccgcca

SEQ ID NO: 1462682 - DNA, 15 bp, Homo sapiens
ggctgcacccgccac

SEQ ID NO: 1462683 - DNA, 15 bp, Homo sapiens
gctgcacccgccact

SEQ ID NO: 1462684 - DNA, 15 bp, Homo sapiens
ctgcacccgccactc

SEQ ID NO: 1462685 - DNA, 15 bp, Homo sapiens
tgcacccgccactcc

SEQ ID NO: 1462686 - DNA, 15 bp, Homo sapiens
gcacccgccactcca

SEQ ID NO: 1462687 - DNA, 15 bp, Homo sapiens
cacccgccactccag

SEQ ID NO: 1462688 - DNA, 15 bp, Homo sapiens
acccgccactccagg

SEQ ID NO: 1462689 - DNA, 15 bp, Homo sapiens
cccgccactccaggt

SEQ ID NO: 1462690 - DNA, 15 bp, Homo sapiens
ccgccactccaggtc

SEQ ID NO: 1462691 - DNA, 15 bp, Homo sapiens
cgccactccaggtct

SEQ ID NO: 1462692 - DNA, 15 bp, Homo sapiens
gccactccaggtctg

SEQ ID NO: 1462693 - DNA, 15 bp, Homo sapiens
ccactccaggtctgg

SEQ ID NO: 1462694 - DNA, 15 bp, Homo sapiens
cactccaggtctggt

SEQ ID NO: 1462695 - DNA, 15 bp, Homo sapiens
actccaggtctggtc

SEQ ID NO: 1462696 - DNA, 15 bp, Homo sapiens
ctccaggtctggtca

SEQ ID NO: 1462697 - DNA, 15 bp, Homo sapiens
tccaggtctggtcac

SEQ ID NO: 1462698 - DNA, 15 bp, Homo sapiens
ccaggtctggtcacg

SEQ ID NO: 1462699 - DNA, 15 bp, Homo sapiens
caggtctggtcacgt

SEQ ID NO: 1462700 - DNA, 15 bp, Homo sapiens
aggtctggtcacgtt

SEQ ID NO: 1462701 - DNA, 15 bp, Homo sapiens
ggtctggtcacgttc

SEQ ID NO: 1462702 - DNA, 15 bp, Homo sapiens
gtctggtcacgttca

SEQ ID NO: 1462703 - DNA, 15 bp, Homo sapiens
tctggtcacgttcag

SEQ ID NO: 1462704 - DNA, 15 bp, Homo sapiens
ctggtcacgttcaga

SEQ ID NO: 1462705 - DNA, 15 bp, Homo sapiens
tggtcacgttcagac

SEQ ID NO: 1462706 - DNA, 15 bp, Homo sapiens
ggtcacgttcagacc

SEQ ID NO: 1462707 - DNA, 15 bp, Homo sapiens
gtcacgttcagaccc

SEQ ID NO: 1462708 - DNA, 15 bp, Homo sapiens
tcacgttcagacccg

SEQ ID NO: 1462709 - DNA, 15 bp, Homo sapiens
cacgttcagacccgt

SEQ ID NO: 1462710 - DNA, 15 bp, Homo sapiens
acgttcagacccgtg

SEQ ID NO: 1462711 - DNA, 15 bp, Homo sapiens
cgttcagacccgtgt

SEQ ID NO: 1462712 - DNA, 15 bp, Homo sapiens
gttcagacccgtgtc

SEQ ID NO: 1462713 - DNA, 15 bp, Homo sapiens
ttcagacccgtgtct

SEQ ID NO: 1462714 - DNA, 15 bp, Homo sapiens
tcagacccgtgtctg

SEQ ID NO: 1462715 - DNA, 15 bp, Homo sapiens
cagacccgtgtctgt

SEQ ID NO: 1462716 - DNA, 15 bp, Homo sapiens
agacccgtgtctgta

SEQ ID NO: 1462717 - DNA, 15 bp, Homo sapiens
gacccgtgtctgtat

SEQ ID NO: 1462718 - DNA, 15 bp, Homo sapiens
acccgtgtctgtatt

SEQ ID NO: 1462719 - DNA, 15 bp, Homo sapiens
cccgtgtctgtattc

SEQ ID NO: 1462720 - DNA, 15 bp, Homo sapiens
ccgtgtctgtattcg

SEQ ID NO: 1462721 - DNA, 15 bp, Homo sapiens
cgtgtctgtattcga

SEQ ID NO: 1462722 - DNA, 15 bp, Homo sapiens
gtgtctgtattcgaa

SEQ ID NO: 1462723 - DNA, 15 bp, Homo sapiens
tgtctgtattcgaac

SEQ ID NO: 1462724 - DNA, 15 bp, Homo sapiens
gtctgtattcgaacc

SEQ ID NO: 1462725 - DNA, 15 bp, Homo sapiens
tctgtattcgaaccc

SEQ ID NO: 1462726 - DNA, 15 bp, Homo sapiens
ctgtattcgaaccca

SEQ ID NO: 1462727 - DNA, 15 bp, Homo sapiens
tgtattcgaacccaa

SEQ ID NO: 1462728 - DNA, 15 bp, Homo sapiens
gtattcgaacccaaa

SEQ ID NO: 1462729 - DNA, 15 bp, Homo sapiens
tattcgaacccaaaa

SEQ ID NO: 1462730 - DNA, 15 bp, Homo sapiens
attcgaacccaaaat

SEQ ID NO: 1462731 - DNA, 15 bp, Homo sapiens
ttcgaacccaaaatt

SEQ ID NO: 1462732 - DNA, 15 bp, Homo sapiens
tcgaacccaaaattg

SEQ ID NO: 1462733 - DNA, 15 bp, Homo sapiens
cgaacccaaaattgg

SEQ ID NO: 1462734 - DNA, 15 bp, Homo sapiens
gaacccaaaattgga

SEQ ID NO: 1462735 - DNA, 15 bp, Homo sapiens
aacccaaaattggag

SEQ ID NO: 1462736 - DNA, 15 bp, Homo sapiens
acccaaaattggagc

SEQ ID NO: 1462737 - DNA, 15 bp, Homo sapiens
cccaaaattggagcc

SEQ ID NO: 1462738 - DNA, 15 bp, Homo sapiens
ccaaaattggagccg

SEQ ID NO: 1462739 - DNA, 15 bp, Homo sapiens
caaaattggagccga

SEQ ID NO: 1462740 - DNA, 15 bp, Homo sapiens
aaaattggagccgaa

SEQ ID NO: 1462741 - DNA, 15 bp, Homo sapiens
aaattggagccgaat

SEQ ID NO: 1462742 - DNA, 15 bp, Homo sapiens
aattggagccgaatt

SEQ ID NO: 1462743 - DNA, 15 bp, Homo sapiens
attggagccgaattg

SEQ ID NO: 1462744 - DNA, 15 bp, Homo sapiens
ttggagccgaattga

SEQ ID NO: 1462745 - DNA, 15 bp, Homo sapiens
tggagccgaattgat

SEQ ID NO: 1462746 - DNA, 15 bp, Homo sapiens
ggagccgaattgatg

SEQ ID NO: 1462747 - DNA, 15 bp, Homo sapiens
gagccgaattgatga

SEQ ID NO: 1462748 - DNA, 15 bp, Homo sapiens
agccgaattgatgag

SEQ ID NO: 1462749 - DNA, 15 bp, Homo sapiens
gccgaattgatgaga

SEQ ID NO: 1462750 - DNA, 15 bp, Homo sapiens
ccgaattgatgagac

SEQ ID NO: 1462751 - DNA, 15 bp, Homo sapiens
cgaattgatgagact

SEQ ID NO: 1462752 - DNA, 15 bp, Homo sapiens
gaattgatgagacta

SEQ ID NO: 1462753 - DNA, 15 bp, Homo sapiens
aattgatgagactaa

SEQ ID NO: 1462754 - DNA, 15 bp, Homo sapiens
attgatgagactaat

SEQ ID NO: 1462755 - DNA, 15 bp, Homo sapiens
ttgatgagactaatt

SEQ ID NO: 1462756 - DNA, 15 bp, Homo sapiens
tgatgagactaattt

SEQ ID NO: 1462757 - DNA, 15 bp, Homo sapiens
gatgagactaatttc

SEQ ID NO: 1462758 - DNA, 15 bp, Homo sapiens
atgagactaatttct

SEQ ID NO: 1462759 - DNA, 15 bp, Homo sapiens
tgagactaatttcta

SEQ ID NO: 1462760 - DNA, 15 bp, Homo sapiens
gagactaatttctag

SEQ ID NO: 1462761 - DNA, 15 bp, Homo sapiens
agactaatttctaga

SEQ ID NO: 1462762 - DNA, 15 bp, Homo sapiens
gactaatttctagag

SEQ ID NO: 1462763 - DNA, 15 bp, Homo sapiens
actaatttctagaga

SEQ ID NO: 1462764 - DNA, 15 bp, Homo sapiens
ctaatttctagagag

SEQ ID NO: 1462765 - DNA, 15 bp, Homo sapiens
taatttctagagagg

SEQ ID NO: 1462766 - DNA, 15 bp, Homo sapiens
aatttctagagaggg

SEQ ID NO: 1462767 - DNA, 15 bp, Homo sapiens
atttctagagaggga

SEQ ID NO: 1462768 - DNA, 15 bp, Homo sapiens
tttctagagagggag

SEQ ID NO: 1462769 - DNA, 15 bp, Homo sapiens
ttctagagagggagg

SEQ ID NO: 1462770 - DNA, 15 bp, Homo sapiens
tctagagagggaggg

SEQ ID NO: 1462771 - DNA, 15 bp, Homo sapiens
ctagagagggagggg

SEQ ID NO: 1462772 - DNA, 15 bp, Homo sapiens
tagagagggaggggg

SEQ ID NO: 1462773 - DNA, 15 bp, Homo sapiens
agagagggaggggga

SEQ ID NO: 1462774 - DNA, 15 bp, Homo sapiens
gagagggagggggag

SEQ ID NO: 1462775 - DNA, 15 bp, Homo sapiens
agagggagggggagg

SEQ ID NO: 1462776 - DNA, 15 bp, Homo sapiens
gagggagggggaggg

SEQ ID NO: 1462777 - DNA, 15 bp, Homo sapiens
agggagggggaggga

SEQ ID NO: 1462778 - DNA, 15 bp, Homo sapiens
gggagggggagggag

SEQ ID NO: 1462779 - DNA, 15 bp, Homo sapiens
ggagggggagggagg

SEQ ID NO: 1462780 - DNA, 15 bp, Homo sapiens
gagggggagggaggg

SEQ ID NO: 1462781 - DNA, 15 bp, Homo sapiens
agggggagggaggga

SEQ ID NO: 1462782 - DNA, 15 bp, Homo sapiens
gggggagggagggag

SEQ ID NO: 1462783 - DNA, 15 bp, Homo sapiens
ggggagggagggaga

SEQ ID NO: 1462784 - DNA, 15 bp, Homo sapiens
gggagggagggagac

SEQ ID NO: 1462785 - DNA, 15 bp, Homo sapiens
ggagggagggagacg

SEQ ID NO: 1462786 - DNA, 15 bp, Homo sapiens
gagggagggagacga

SEQ ID NO: 1462787 - DNA, 15 bp, Homo sapiens
agggagggagacgag

SEQ ID NO: 1462788 - DNA, 15 bp, Homo sapiens
gggagggagacgagt

SEQ ID NO: 1462789 - DNA, 15 bp, Homo sapiens
ggagggagacgagtg

SEQ ID NO: 1462790 - DNA, 15 bp, Homo sapiens
gagggagacgagtga

SEQ ID NO: 1462791 - DNA, 15 bp, Homo sapiens
agggagacgagtgag

SEQ ID NO: 1462792 - DNA, 15 bp, Homo sapiens
gggagacgagtgagc

SEQ ID NO: 1462793 - DNA, 15 bp, Homo sapiens
ggagacgagtgagct

SEQ ID NO: 1462794 - DNA, 15 bp, Homo sapiens
gagacgagtgagctc

SEQ ID NO: 1462795 - DNA, 15 bp, Homo sapiens
agacgagtgagctct

SEQ ID NO: 1462796 - DNA, 15 bp, Homo sapiens
gacgagtgagctctc

SEQ ID NO: 1462797 - DNA, 15 bp, Homo sapiens
acgagtgagctctcg

SEQ ID NO: 1462798 - DNA, 15 bp, Homo sapiens
cgagtgagctctcgg

SEQ ID NO: 1462799 - DNA, 15 bp, Homo sapiens
gagtgagctctcggg

SEQ ID NO: 1462800 - DNA, 15 bp, Homo sapiens
agtgagctctcgggc

SEQ ID NO: 1462801 - DNA, 15 bp, Homo sapiens
gtgagctctcgggct

SEQ ID NO: 1462802 - DNA, 15 bp, Homo sapiens
tgagctctcgggctc

SEQ ID NO: 1462803 - DNA, 15 bp, Homo sapiens
gagctctcgggctca

SEQ ID NO: 1462804 - DNA, 15 bp, Homo sapiens
agctctcgggctcaa

SEQ ID NO: 1462805 - DNA, 15 bp, Homo sapiens
gctctcgggctcaat

SEQ ID NO: 1462806 - DNA, 15 bp, Homo sapiens
ctctcgggctcaatt

SEQ ID NO: 1462807 - DNA, 15 bp, Homo sapiens
tctcgggctcaattg

SEQ ID NO: 1462808 - DNA, 15 bp, Homo sapiens
ctcgggctcaattgc

SEQ ID NO: 1462809 - DNA, 15 bp, Homo sapiens
tcgggctcaattgct

SEQ ID NO: 1462810 - DNA, 15 bp, Homo sapiens
cgggctcaattgctc

SEQ ID NO: 1462811 - DNA, 15 bp, Homo sapiens
gggctcaattgctcc

SEQ ID NO: 1462812 - DNA, 15 bp, Homo sapiens
ggctcaattgctcct

SEQ ID NO: 1462813 - DNA, 15 bp, Homo sapiens
gctcaattgctcctg

SEQ ID NO: 1462814 - DNA, 15 bp, Homo sapiens
ctcaattgctcctga

SEQ ID NO: 1462815 - DNA, 15 bp, Homo sapiens
tcaattgctcctgaa

SEQ ID NO: 1462816 - DNA, 15 bp, Homo sapiens
caattgctcctgaag

SEQ ID NO: 1462817 - DNA, 15 bp, Homo sapiens
aattgctcctgaaga

SEQ ID NO: 1462818 - DNA, 15 bp, Homo sapiens
attgctcctgaagaa

SEQ ID NO: 1462819 - DNA, 15 bp, Homo sapiens
ttgctcctgaagaaa

SEQ ID NO: 1462820 - DNA, 15 bp, Homo sapiens
tgctcctgaagaaat

SEQ ID NO: 1462821 - DNA, 15 bp, Homo sapiens
gctcctgaagaaata

SEQ ID NO: 1462822 - DNA, 15 bp, Homo sapiens
ctcctgaagaaataa

SEQ ID NO: 1462823 - DNA, 15 bp, Homo sapiens
tcctgaagaaataaa

SEQ ID NO: 1462824 - DNA, 15 bp, Homo sapiens
cctgaagaaataaag

SEQ ID NO: 1462825 - DNA, 15 bp, Homo sapiens
ctgaagaaataaaga

SEQ ID NO: 1462826 - DNA, 15 bp, Homo sapiens
tgaagaaataaagaa

SEQ ID NO: 1462827 - DNA, 15 bp, Homo sapiens
gaagaaataaagaat

SEQ ID NO: 1462828 - DNA, 15 bp, Homo sapiens
aagaaataaagaatt

SEQ ID NO: 1462829 - DNA, 15 bp, Homo sapiens
agaaataaagaatta

SEQ ID NO: 1462830 - DNA, 15 bp, Homo sapiens
gaaataaagaattaa

SEQ ID NO: 1462831 - DNA, 15 bp, Homo sapiens
aaataaagaattaat

SEQ ID NO: 1462832 - DNA, 15 bp, Homo sapiens
aataaagaattaata

SEQ ID NO: 1462833 - DNA, 15 bp, Homo sapiens
ataaagaattaataa

SEQ ID NO: 1462834 - DNA, 15 bp, Homo sapiens
taaagaattaataag

SEQ ID NO: 1462835 - DNA, 15 bp, Homo sapiens
aaagaattaataagt

SEQ ID NO: 1462836 - DNA, 15 bp, Homo sapiens
aagaattaataagtc

SEQ ID NO: 1462837 - DNA, 15 bp, Homo sapiens
agaattaataagtca

SEQ ID NO: 1462838 - DNA, 15 bp, Homo sapiens
gaattaataagtcac

SEQ ID NO: 1462839 - DNA, 15 bp, Homo sapiens
aattaataagtcacc

SEQ ID NO: 1462840 - DNA, 15 bp, Homo sapiens
attaataagtcacct

SEQ ID NO: 1462841 - DNA, 15 bp, Homo sapiens
ttaataagtcacctt

SEQ ID NO: 1462842 - DNA, 15 bp, Homo sapiens
taataagtcaccttt

SEQ ID NO: 1462843 - DNA, 15 bp, Homo sapiens
aataagtcacctttt

SEQ ID NO: 1462844 - DNA, 15 bp, Homo sapiens
ataagtcaccttttt

SEQ ID NO: 1462845 - DNA, 15 bp, Homo sapiens
taagtcacctttttt

SEQ ID NO: 1462846 - DNA, 15 bp, Homo sapiens
aagtcaccttttttc

SEQ ID NO: 1462847 - DNA, 15 bp, Homo sapiens
agtcaccttttttcg

SEQ ID NO: 1462848 - DNA, 15 bp, Homo sapiens
gtcaccttttttcgc

SEQ ID NO: 1462849 - DNA, 15 bp, Homo sapiens
tcaccttttttcgcc

SEQ ID NO: 1462850 - DNA, 15 bp, Homo sapiens
caccttttttcgcct

SEQ ID NO: 1462851 - DNA, 15 bp, Homo sapiens
accttttttcgcctc

SEQ ID NO: 1462852 - DNA, 15 bp, Homo sapiens
ccttttttcgcctct

SEQ ID NO: 1462853 - DNA, 15 bp, Homo sapiens
cttttttcgcctctg

SEQ ID NO: 1462854 - DNA, 15 bp, Homo sapiens
ttttttcgcctctgt

SEQ ID NO: 1462855 - DNA, 15 bp, Homo sapiens
tttttcgcctctgtg

SEQ ID NO: 1462856 - DNA, 15 bp, Homo sapiens
ttttcgcctctgtgg

SEQ ID NO: 1462857 - DNA, 15 bp, Homo sapiens
tttcgcctctgtgga

SEQ ID NO: 1462858 - DNA, 15 bp, Homo sapiens
ttcgcctctgtggac

SEQ ID NO: 1462859 - DNA, 15 bp, Homo sapiens
tcgcctctgtggaca

SEQ ID NO: 1462860 - DNA, 15 bp, Homo sapiens
cgcctctgtggacac

SEQ ID NO: 1462861 - DNA, 15 bp, Homo sapiens
gcctctgtggacacc

SEQ ID NO: 1462862 - DNA, 15 bp, Homo sapiens
cctctgtggacaccc

SEQ ID NO: 1462863 - DNA, 15 bp, Homo sapiens
ctctgtggacaccct

SEQ ID NO: 1462864 - DNA, 15 bp, Homo sapiens
tctgtggacaccctt

SEQ ID NO: 1462865 - DNA, 15 bp, Homo sapiens
ctgtggacacccttt

SEQ ID NO: 1462866 - DNA, 15 bp, Homo sapiens
tgtggacaccctttt

SEQ ID NO: 1462867 - DNA, 15 bp, Homo sapiens
gtggacacccttttg

SEQ ID NO: 1462868 - DNA, 15 bp, Homo sapiens
tggacacccttttga

SEQ ID NO: 1462869 - DNA, 15 bp, Homo sapiens
ggacacccttttgaa

SEQ ID NO: 1462870 - DNA, 15 bp, Homo sapiens
gacacccttttgaaa

SEQ ID NO: 1462871 - DNA, 15 bp, Homo sapiens
acacccttttgaaat

SEQ ID NO: 1462872 - DNA, 15 bp, Homo sapiens
cacccttttgaaatt

SEQ ID NO: 1462873 - DNA, 15 bp, Homo sapiens
acccttttgaaattt

SEQ ID NO: 1462874 - DNA, 15 bp, Homo sapiens
cccttttgaaatttt

SEQ ID NO: 1462875 - DNA, 15 bp, Homo sapiens
ccttttgaaattttt

SEQ ID NO: 1462876 - DNA, 15 bp, Homo sapiens
cttttgaaatttttt

SEQ ID NO: 1462877 - DNA, 15 bp, Homo sapiens
ttttgaaattttttc

SEQ ID NO: 1462878 - DNA, 15 bp, Homo sapiens
tttgaaattttttct

SEQ ID NO: 1462879 - DNA, 15 bp, Homo sapiens
ttgaaattttttctt

SEQ ID NO: 1462880 - DNA, 15 bp, Homo sapiens
tgaaattttttcttc

SEQ ID NO: 1462881 - DNA, 15 bp, Homo sapiens
gaaattttttcttcc

SEQ ID NO: 1462882 - DNA, 15 bp, Homo sapiens
aaattttttcttcca

SEQ ID NO: 1462883 - DNA, 15 bp, Homo sapiens
aattttttcttccaa

SEQ ID NO: 1462884 - DNA, 15 bp, Homo sapiens
attttttcttccaat

SEQ ID NO: 1462885 - DNA, 15 bp, Homo sapiens
ttttttcttccaatt

SEQ ID NO: 1462886 - DNA, 15 bp, Homo sapiens
tttttcttccaattg

SEQ ID NO: 1462887 - DNA, 15 bp, Homo sapiens
ttttcttccaattga

SEQ ID NO: 1462888 - DNA, 15 bp, Homo sapiens
tttcttccaattgac

SEQ ID NO: 1462889 - DNA, 15 bp, Homo sapiens
ttcttccaattgact

SEQ ID NO: 1462890 - DNA, 15 bp, Homo sapiens
tcttccaattgactt

SEQ ID NO: 1462891 - DNA, 15 bp, Homo sapiens
cttccaattgacttg

SEQ ID NO: 1462892 - DNA, 15 bp, Homo sapiens
ttccaattgacttgg

SEQ ID NO: 1462893 - DNA, 15 bp, Homo sapiens
tccaattgacttgga

SEQ ID NO: 1462894 - DNA, 15 bp, Homo sapiens
ccaattgacttggat

SEQ ID NO: 1462895 - DNA, 15 bp, Homo sapiens
caattgacttggatc

SEQ ID NO: 1462896 - DNA, 15 bp, Homo sapiens
aattgacttggatct

SEQ ID NO: 1462897 - DNA, 15 bp, Homo sapiens
attgacttggatctc

SEQ ID NO: 1462898 - DNA, 15 bp, Homo sapiens
ttgacttggatctcc

SEQ ID NO: 1462899 - DNA, 15 bp, Homo sapiens
tgacttggatctcct

SEQ ID NO: 1462900 - DNA, 15 bp, Homo sapiens
gacttggatctcctc

SEQ ID NO: 1462901 - DNA, 15 bp, Homo sapiens
acttggatctcctct

SEQ ID NO: 1462902 - DNA, 15 bp, Homo sapiens
cttggatctcctctg

SEQ ID NO: 1462903 - DNA, 15 bp, Homo sapiens
ttggatctcctctgg

SEQ ID NO: 1462904 - DNA, 15 bp, Homo sapiens
tggatctcctctgga

SEQ ID NO: 1462905 - DNA, 15 bp, Homo sapiens
ggatctcctctggat

SEQ ID NO: 1462906 - DNA, 15 bp, Homo sapiens
gatctcctctggatt

SEQ ID NO: 1462907 - DNA, 15 bp, Homo sapiens
atctcctctggattt

SEQ ID NO: 1462908 - DNA, 15 bp, Homo sapiens
tctcctctggatttt

SEQ ID NO: 1462909 - DNA, 15 bp, Homo sapiens
ctcctctggattttt

SEQ ID NO: 1462910 - DNA, 15 bp, Homo sapiens
tcctctggatttttt

SEQ ID NO: 1462911 - DNA, 15 bp, Homo sapiens
cctctggattttttt

SEQ ID NO: 1462912 - DNA, 15 bp, Homo sapiens
ctctggatttttttt

SEQ ID NO: 1462913 - DNA, 15 bp, Homo sapiens
tctggattttttttc

SEQ ID NO: 1462914 - DNA, 15 bp, Homo sapiens
ctggattttttttcc

SEQ ID NO: 1462915 - DNA, 15 bp, Homo sapiens
tggattttttttccc

SEQ ID NO: 1462916 - DNA, 15 bp, Homo sapiens
ggattttttttccct

SEQ ID NO: 1462917 - DNA, 15 bp, Homo sapiens
gattttttttccctc

SEQ ID NO: 1462918 - DNA, 15 bp, Homo sapiens
attttttttccctct

SEQ ID NO: 1462919 - DNA, 15 bp, Homo sapiens
ttttttttccctctt

SEQ ID NO: 1462920 - DNA, 15 bp, Homo sapiens
tttttttccctcttt

SEQ ID NO: 1462921 - DNA, 15 bp, Homo sapiens
ttttttccctctttc

SEQ ID NO: 1462922 - DNA, 15 bp, Homo sapiens
tttttccctctttcc

SEQ ID NO: 1462923 - DNA, 15 bp, Homo sapiens
ttttccctctttccc

SEQ ID NO: 1462924 - DNA, 15 bp, Homo sapiens
tttccctctttcccc

SEQ ID NO: 1462925 - DNA, 15 bp, Homo sapiens
ttccctctttccccc

SEQ ID NO: 1462926 - DNA, 15 bp, Homo sapiens
tccctctttcccccg

SEQ ID NO: 1462927 - DNA, 15 bp, Homo sapiens
ccctctttcccccgt

SEQ ID NO: 1462928 - DNA, 15 bp, Homo sapiens
cctctttcccccgtc

SEQ ID NO: 1462929 - DNA, 15 bp, Homo sapiens
ctctttcccccgtcg

SEQ ID NO: 1462930 - DNA, 15 bp, Homo sapiens
tctttcccccgtcgg

SEQ ID NO: 1462931 - DNA, 15 bp, Homo sapiens
ctttcccccgtcgga

SEQ ID NO: 1462932 - DNA, 15 bp, Homo sapiens
tttcccccgtcggac

SEQ ID NO: 1462933 - DNA, 15 bp, Homo sapiens
ttcccccgtcggact

SEQ ID NO: 1462934 - DNA, 15 bp, Homo sapiens
tcccccgtcggactc

SEQ ID NO: 1462935 - DNA, 15 bp, Homo sapiens
cccccgtcggactct

SEQ ID NO: 1462936 - DNA, 15 bp, Homo sapiens
ccccgtcggactctt

SEQ ID NO: 1462937 - DNA, 15 bp, Homo sapiens
cccgtcggactctta

SEQ ID NO: 1462938 - DNA, 15 bp, Homo sapiens
ccgtcggactcttaa

SEQ ID NO: 1462939 - DNA, 15 bp, Homo sapiens
cgtcggactcttaaa

SEQ ID NO: 1462940 - DNA, 15 bp, Homo sapiens
gtcggactcttaaat

SEQ ID NO: 1462941 - DNA, 15 bp, Homo sapiens
tcggactcttaaata

SEQ ID NO: 1462942 - DNA, 15 bp, Homo sapiens
cggactcttaaataa

SEQ ID NO: 1462943 - DNA, 15 bp, Homo sapiens
ggactcttaaataaa

SEQ ID NO: 1462944 - DNA, 15 bp, Homo sapiens
gactcttaaataaaa

SEQ ID NO: 1462945 - DNA, 15 bp, Homo sapiens
actcttaaataaaag

SEQ ID NO: 1462946 - DNA, 15 bp, Homo sapiens
ctcttaaataaaagt

SEQ ID NO: 1462947 - DNA, 15 bp, Homo sapiens
tcttaaataaaagtg

SEQ ID NO: 1462948 - DNA, 15 bp, Homo sapiens
cttaaataaaagtga

SEQ ID NO: 1462949 - DNA, 15 bp, Homo sapiens
ttaaataaaagtgag

SEQ ID NO: 1462950 - DNA, 15 bp, Homo sapiens
taaataaaagtgagc

SEQ ID NO: 1462951 - DNA, 15 bp, Homo sapiens
aaataaaagtgagca

SEQ ID NO: 1462952 - DNA, 15 bp, Homo sapiens
aataaaagtgagcaa

SEQ ID NO: 1462953 - DNA, 15 bp, Homo sapiens
ataaaagtgagcaag

SEQ ID NO: 1462954 - DNA, 15 bp, Homo sapiens
taaaagtgagcaagt

SEQ ID NO: 1462955 - DNA, 15 bp, Homo sapiens
aaaagtgagcaagtc

SEQ ID NO: 1462956 - DNA, 15 bp, Homo sapiens
aaagtgagcaagtcc

SEQ ID NO: 1462957 - DNA, 15 bp, Homo sapiens
aagtgagcaagtcca

SEQ ID NO: 1462958 - DNA, 15 bp, Homo sapiens
agtgagcaagtccaa

SEQ ID NO: 1462959 - DNA, 15 bp, Homo sapiens
gtgagcaagtccaaa

SEQ ID NO: 1462960 - DNA, 15 bp, Homo sapiens
tgagcaagtccaaag

SEQ ID NO: 1462961 - DNA, 15 bp, Homo sapiens
gagcaagtccaaagc

SEQ ID NO: 1462962 - DNA, 15 bp, Homo sapiens
agcaagtccaaagcg

SEQ ID NO: 1462963 - DNA, 15 bp, Homo sapiens
gcaagtccaaagcgt

SEQ ID NO: 1462964 - DNA, 15 bp, Homo sapiens
caagtccaaagcgtg

SEQ ID NO: 1462965 - DNA, 15 bp, Homo sapiens
aagtccaaagcgtgg

SEQ ID NO: 1462966 - DNA, 15 bp, Homo sapiens
agtccaaagcgtggt

SEQ ID NO: 1462967 - DNA, 15 bp, Homo sapiens
gtccaaagcgtggtc

SEQ ID NO: 1462968 - DNA, 15 bp, Homo sapiens
tccaaagcgtggtcc

SEQ ID NO: 1462969 - DNA, 15 bp, Homo sapiens
ccaaagcgtggtccg

SEQ ID NO: 1462970 - DNA, 15 bp, Homo sapiens
caaagcgtggtccgg

SEQ ID NO: 1462971 - DNA, 15 bp, Homo sapiens
aaagcgtggtccgga

SEQ ID NO: 1462972 - DNA, 15 bp, Homo sapiens
aagcgtggtccggag

SEQ ID NO: 1462973 - DNA, 15 bp, Homo sapiens
agcgtggtccggaga

SEQ ID NO: 1462974 - DNA, 15 bp, Homo sapiens
gcgtggtccggagag

SEQ ID NO: 1462975 - DNA, 15 bp, Homo sapiens
cgtggtccggagagc

SEQ ID NO: 1462976 - DNA, 15 bp, Homo sapiens
gtggtccggagagcg

SEQ ID NO: 1462977 - DNA, 15 bp, Homo sapiens
tggtccggagagcgt

SEQ ID NO: 1462978 - DNA, 15 bp, Homo sapiens
ggtccggagagcgtg

SEQ ID NO: 1462979 - DNA, 15 bp, Homo sapiens
gtccggagagcgtgg

SEQ ID NO: 1462980 - DNA, 15 bp, Homo sapiens
tccggagagcgtgga

SEQ ID NO: 1462981 - DNA, 15 bp, Homo sapiens
ccggagagcgtggac

SEQ ID NO: 1462982 - DNA, 15 bp, Homo sapiens
cggagagcgtggaca

SEQ ID NO: 1462983 - DNA, 15 bp, Homo sapiens
ggagagcgtggacaa

SEQ ID NO: 1462984 - DNA, 15 bp, Homo sapiens
gagagcgtggacaag

SEQ ID NO: 1462985 - DNA, 15 bp, Homo sapiens
agagcgtggacaagg

SEQ ID NO: 1462986 - DNA, 15 bp, Homo sapiens
gagcgtggacaaggt

SEQ ID NO: 1462987 - DNA, 15 bp, Homo sapiens
agcgtggacaaggta

SEQ ID NO: 1462988 - DNA, 15 bp, Homo sapiens
gcgtggacaaggtaa

SEQ ID NO: 1462989 - DNA, 15 bp, Homo sapiens
cgtggacaaggtaac

SEQ ID NO: 1462990 - DNA, 15 bp, Homo sapiens
gtggacaaggtaacc

SEQ ID NO: 1462991 - DNA, 15 bp, Homo sapiens
tggacaaggtaacct

SEQ ID NO: 1462992 - DNA, 15 bp, Homo sapiens
caaggtaacctgttt

SEQ ID NO: 1462993 - DNA, 15 bp, Homo sapiens
aaggtaacctgtttt

SEQ ID NO: 1462994 - DNA, 15 bp, Homo sapiens
aggtaacctgttttg

SEQ ID NO: 1462995 - DNA, 15 bp, Homo sapiens
ggtaacctgttttgg

SEQ ID NO: 1462996 - DNA, 15 bp, Homo sapiens
gtaacctgttttgga

SEQ ID NO: 1462997 - DNA, 15 bp, Homo sapiens
taacctgttttggat

SEQ ID NO: 1462998 - DNA, 15 bp, Homo sapiens
aacctgttttggatg

SEQ ID NO: 1462999 - DNA, 15 bp, Homo sapiens
acctgttttggatgt

SEQ ID NO: 1463000 - DNA, 15 bp, Homo sapiens
cctgttttggatgtc

SEQ ID NO: 1463001 - DNA, 15 bp, Homo sapiens
ctgttttggatgtcc

SEQ ID NO: 1463002 - DNA, 15 bp, Homo sapiens
tgttttggatgtccg

SEQ ID NO: 1463003 - DNA, 15 bp, Homo sapiens
gttttggatgtccgg

SEQ ID NO: 1463004 - DNA, 15 bp, Homo sapiens
ttttggatgtccggg

SEQ ID NO: 1463005 - DNA, 15 bp, Homo sapiens
tttggatgtccggga

SEQ ID NO: 1463006 - DNA, 15 bp, Homo sapiens
ttggatgtccgggag

SEQ ID NO: 1463007 - DNA, 15 bp, Homo sapiens
tggatgtccgggaga

SEQ ID NO: 1463008 - DNA, 15 bp, Homo sapiens
ggatgtccgggagaa

SEQ ID NO: 1463009 - DNA, 15 bp, Homo sapiens
gatgtccgggagaag

SEQ ID NO: 1463010 - DNA, 15 bp, Homo sapiens
atgtccgggagaagg

SEQ ID NO: 1463011 - DNA, 15 bp, Homo sapiens
tgtccgggagaaggg

SEQ ID NO: 1463012 - DNA, 15 bp, Homo sapiens
gtccgggagaaggga

SEQ ID NO: 1463013 - DNA, 15 bp, Homo sapiens
tccgggagaagggag

SEQ ID NO: 1463014 - DNA, 15 bp, Homo sapiens
ccgggagaagggagt

SEQ ID NO: 1463015 - DNA, 15 bp, Homo sapiens
cgggagaagggagtc

SEQ ID NO: 1463016 - DNA, 15 bp, Homo sapiens
gggagaagggagtcc

SEQ ID NO: 1463017 - DNA, 15 bp, Homo sapiens
ggagaagggagtccg

SEQ ID NO: 1463018 - DNA, 15 bp, Homo sapiens
gagaagggagtccgg

SEQ ID NO: 1463019 - DNA, 15 bp, Homo sapiens
agaagggagtccggc

SEQ ID NO: 1463020 - DNA, 15 bp, Homo sapiens
gaagggagtccggcc

SEQ ID NO: 1463021 - DNA, 15 bp, Homo sapiens
aagggagtccggccg

SEQ ID NO: 1463022 - DNA, 15 bp, Homo sapiens
agggagtccggccga

SEQ ID NO: 1463023 - DNA, 15 bp, Homo sapiens
gggagtccggccgaa

SEQ ID NO: 1463024 - DNA, 15 bp, Homo sapiens
ggagtccggccgaaa

SEQ ID NO: 1463025 - DNA, 15 bp, Homo sapiens
gagtccggccgaaag

SEQ ID NO: 1463026 - DNA, 15 bp, Homo sapiens
agtccggccgaaagg

SEQ ID NO: 1463027 - DNA, 15 bp, Homo sapiens
gtccggccgaaaggg

SEQ ID NO: 1463028 - DNA, 15 bp, Homo sapiens
tccggccgaaagggc

SEQ ID NO: 1463029 - DNA, 15 bp, Homo sapiens
ccggccgaaagggcc

SEQ ID NO: 1463030 - DNA, 15 bp, Homo sapiens
cggccgaaagggccc

SEQ ID NO: 1463031 - DNA, 15 bp, Homo sapiens
ggccgaaagggccca

SEQ ID NO: 1463032 - DNA, 15 bp, Homo sapiens
gccgaaagggcccag

SEQ ID NO: 1463033 - DNA, 15 bp, Homo sapiens
ccgaaagggcccagc

SEQ ID NO: 1463034 - DNA, 15 bp, Homo sapiens
cgaaagggcccagcc

SEQ ID NO: 1463035 - DNA, 15 bp, Homo sapiens
gaaagggcccagccc

SEQ ID NO: 1463036 - DNA, 15 bp, Homo sapiens
aaagggcccagcccc

SEQ ID NO: 1463037 - DNA, 15 bp, Homo sapiens
aagggcccagcccct

SEQ ID NO: 1463038 - DNA, 15 bp, Homo sapiens
agggcccagcccctc

SEQ ID NO: 1463039 - DNA, 15 bp, Homo sapiens
gggcccagcccctcg

SEQ ID NO: 1463040 - DNA, 15 bp, Homo sapiens
ggcccagcccctcga

SEQ ID NO: 1463041 - DNA, 15 bp, Homo sapiens
gcccagcccctcgag

SEQ ID NO: 1463042 - DNA, 15 bp, Homo sapiens
cccagcccctcgagg

SEQ ID NO: 1463043 - DNA, 15 bp, Homo sapiens
ccagcccctcgaggc

SEQ ID NO: 1463044 - DNA, 15 bp, Homo sapiens
cagcccctcgaggct

SEQ ID NO: 1463045 - DNA, 15 bp, Homo sapiens
agcccctcgaggctg

SEQ ID NO: 1463046 - DNA, 15 bp, Homo sapiens
gcccctcgaggctgc

SEQ ID NO: 1463047 - DNA, 15 bp, Homo sapiens
cccctcgaggctgct

SEQ ID NO: 1463048 - DNA, 15 bp, Homo sapiens
ccctcgaggctgctc

SEQ ID NO: 1463049 - DNA, 15 bp, Homo sapiens
cctcgaggctgctcc

SEQ ID NO: 1463050 - DNA, 15 bp, Homo sapiens
ctcgaggctgctcca

SEQ ID NO: 1463051 - DNA, 15 bp, Homo sapiens
tcgaggctgctccaa

SEQ ID NO: 1463052 - DNA, 15 bp, Homo sapiens
cgaggctgctccaac

SEQ ID NO: 1463053 - DNA, 15 bp, Homo sapiens
gaggctgctccaact

SEQ ID NO: 1463054 - DNA, 15 bp, Homo sapiens
aggctgctccaactg

SEQ ID NO: 1463055 - DNA, 15 bp, Homo sapiens
ggctgctccaactgg

SEQ ID NO: 1463056 - DNA, 15 bp, Homo sapiens
gctgctccaactggg

SEQ ID NO: 1463057 - DNA, 15 bp, Homo sapiens
ctgctccaactgggg

SEQ ID NO: 1463058 - DNA, 15 bp, Homo sapiens
tgctccaactggggc

SEQ ID NO: 1463059 - DNA, 15 bp, Homo sapiens
gctccaactggggcg

SEQ ID NO: 1463060 - DNA, 15 bp, Homo sapiens
ctccaactggggcgc

SEQ ID NO: 1463061 - DNA, 15 bp, Homo sapiens
tccaactggggcgcg

SEQ ID NO: 1463062 - DNA, 15 bp, Homo sapiens
ccaactggggcgcgc

SEQ ID NO: 1463063 - DNA, 15 bp, Homo sapiens
caactggggcgcgcg

SEQ ID NO: 1463064 - DNA, 15 bp, Homo sapiens
aactggggcgcgcgg

SEQ ID NO: 1463065 - DNA, 15 bp, Homo sapiens
actggggcgcgcggc

SEQ ID NO: 1463066 - DNA, 15 bp, Homo sapiens
ctggggcgcgcggcg

SEQ ID NO: 1463067 - DNA, 15 bp, Homo sapiens
tggggcgcgcggcgg

SEQ ID NO: 1463068 - DNA, 15 bp, Homo sapiens
ggggcgcgcggcggc

SEQ ID NO: 1463069 - DNA, 15 bp, Homo sapiens
gggcgcgcggcggcc

SEQ ID NO: 1463070 - DNA, 15 bp, Homo sapiens
ggcgcgcggcggccc

SEQ ID NO: 1463071 - DNA, 15 bp, Homo sapiens
gcgcgcggcggccca

SEQ ID NO: 1463072 - DNA, 15 bp, Homo sapiens
cgcgcggcggcccag

SEQ ID NO: 1463073 - DNA, 15 bp, Homo sapiens
gcgcggcggcccagg

SEQ ID NO: 1463074 - DNA, 15 bp, Homo sapiens
cgcggcggcccagga

SEQ ID NO: 1463075 - DNA, 15 bp, Homo sapiens
gcggcggcccaggag

SEQ ID NO: 1463076 - DNA, 15 bp, Homo sapiens
cggcggcccaggagg

SEQ ID NO: 1463077 - DNA, 15 bp, Homo sapiens
ggcggcccaggaggg

SEQ ID NO: 1463078 - DNA, 15 bp, Homo sapiens
gcggcccaggaggga

SEQ ID NO: 1463079 - DNA, 15 bp, Homo sapiens
cggcccaggagggag

SEQ ID NO: 1463080 - DNA, 15 bp, Homo sapiens
ggcccaggagggagg

SEQ ID NO: 1463081 - DNA, 15 bp, Homo sapiens
gcccaggagggaggc

SEQ ID NO: 1463082 - DNA, 15 bp, Homo sapiens
cccaggagggaggcg

SEQ ID NO: 1463083 - DNA, 15 bp, Homo sapiens
ccaggagggaggcgg

SEQ ID NO: 1463084 - DNA, 15 bp, Homo sapiens
caggagggaggcggg

SEQ ID NO: 1463085 - DNA, 15 bp, Homo sapiens
aggagggaggcgggg

SEQ ID NO: 1463086 - DNA, 15 bp, Homo sapiens
ggagggaggcgggga

SEQ ID NO: 1463087 - DNA, 15 bp, Homo sapiens
gagggaggcggggag

SEQ ID NO: 1463088 - DNA, 15 bp, Homo sapiens
agggaggcggggagg

SEQ ID NO: 1463089 - DNA, 15 bp, Homo sapiens
gggaggcggggaggt

SEQ ID NO: 1463090 - DNA, 15 bp, Homo sapiens
ggaggcggggaggtc

SEQ ID NO: 1463091 - DNA, 15 bp, Homo sapiens
gaggcggggaggtct

SEQ ID NO: 1463092 - DNA, 15 bp, Homo sapiens
aggcggggaggtctc

SEQ ID NO: 1463093 - DNA, 15 bp, Homo sapiens
ggcggggaggtctcc

SEQ ID NO: 1463094 - DNA, 15 bp, Homo sapiens
gcggggaggtctccg

SEQ ID NO: 1463095 - DNA, 15 bp, Homo sapiens
cggggaggtctccgg

SEQ ID NO: 1463096 - DNA, 15 bp, Homo sapiens
ggggaggtctccggg

SEQ ID NO: 1463097 - DNA, 15 bp, Homo sapiens
gggaggtctccgggt

SEQ ID NO: 1463098 - DNA, 15 bp, Homo sapiens
ggaggtctccgggtt

SEQ ID NO: 1463099 - DNA, 15 bp, Homo sapiens
gaggtctccgggttg

SEQ ID NO: 1463100 - DNA, 15 bp, Homo sapiens
aggtctccgggttgg

SEQ ID NO: 1463101 - DNA, 15 bp, Homo sapiens
ggtctccgggttggg

SEQ ID NO: 1463102 - DNA, 15 bp, Homo sapiens
gtctccgggttgggc

SEQ ID NO: 1463103 - DNA, 15 bp, Homo sapiens
tctccgggttgggcc

SEQ ID NO: 1463104 - DNA, 15 bp, Homo sapiens
ctccgggttgggccg

SEQ ID NO: 1463105 - DNA, 15 bp, Homo sapiens
tccgggttgggccgg

SEQ ID NO: 1463106 - DNA, 15 bp, Homo sapiens
ccgggttgggccggg

SEQ ID NO: 1463107 - DNA, 15 bp, Homo sapiens
cgggttgggccgggg

SEQ ID NO: 1463108 - DNA, 15 bp, Homo sapiens
gggttgggccgggga

SEQ ID NO: 1463109 - DNA, 15 bp, Homo sapiens
ggttgggccggggaa

SEQ ID NO: 1463110 - DNA, 15 bp, Homo sapiens
gttgggccggggaac

SEQ ID NO: 1463111 - DNA, 15 bp, Homo sapiens
ttgggccggggaacg

SEQ ID NO: 1463112 - DNA, 15 bp, Homo sapiens
tgggccggggaacgc

SEQ ID NO: 1463113 - DNA, 15 bp, Homo sapiens
gggccggggaacgcc

SEQ ID NO: 1463114 - DNA, 15 bp, Homo sapiens
ggccggggaacgccg

SEQ ID NO: 1463115 - DNA, 15 bp, Homo sapiens
gccggggaacgccgg

SEQ ID NO: 1463116 - DNA, 15 bp, Homo sapiens
ccggggaacgccggc

SEQ ID NO: 1463117 - DNA, 15 bp, Homo sapiens
cggggaacgccggcc

SEQ ID NO: 1463118 - DNA, 15 bp, Homo sapiens
ggggaacgccggcct

SEQ ID NO: 1463119 - DNA, 15 bp, Homo sapiens
gggaacgccggcctc

SEQ ID NO: 1463120 - DNA, 15 bp, Homo sapiens
ggaacgccggcctcc

SEQ ID NO: 1463121 - DNA, 15 bp, Homo sapiens
gaacgccggcctcca

SEQ ID NO: 1463122 - DNA, 15 bp, Homo sapiens
aacgccggcctccag

SEQ ID NO: 1463123 - DNA, 15 bp, Homo sapiens
acgccggcctccagg

SEQ ID NO: 1463124 - DNA, 15 bp, Homo sapiens
cgccggcctccaggc

SEQ ID NO: 1463125 - DNA, 15 bp, Homo sapiens
gccggcctccaggct

SEQ ID NO: 1463126 - DNA, 15 bp, Homo sapiens
ccggcctccaggctg

SEQ ID NO: 1463127 - DNA, 15 bp, Homo sapiens
cggcctccaggctgg

SEQ ID NO: 1463128 - DNA, 15 bp, Homo sapiens
ggcctccaggctggg

SEQ ID NO: 1463129 - DNA, 15 bp, Homo sapiens
gcctccaggctgggt

SEQ ID NO: 1463130 - DNA, 15 bp, Homo sapiens
cctccaggctgggta

SEQ ID NO: 1463131 - DNA, 15 bp, Homo sapiens
ctccaggctgggtag

SEQ ID NO: 1463132 - DNA, 15 bp, Homo sapiens
tccaggctgggtagg

SEQ ID NO: 1463133 - DNA, 15 bp, Homo sapiens
ccaggctgggtaggg

SEQ ID NO: 1463134 - DNA, 15 bp, Homo sapiens
caggctgggtaggga

SEQ ID NO: 1463135 - DNA, 15 bp, Homo sapiens
aggctgggtagggag

SEQ ID NO: 1463136 - DNA, 15 bp, Homo sapiens
ggctgggtagggagg

SEQ ID NO: 1463137 - DNA, 15 bp, Homo sapiens
gctgggtagggagga

SEQ ID NO: 1463138 - DNA, 15 bp, Homo sapiens
ctgggtagggaggac

SEQ ID NO: 1463139 - DNA, 15 bp, Homo sapiens
tgggtagggaggacg

SEQ ID NO: 1463140 - DNA, 15 bp, Homo sapiens
gggtagggaggacgg

SEQ ID NO: 1463141 - DNA, 15 bp, Homo sapiens
ggtagggaggacggt

SEQ ID NO: 1463142 - DNA, 15 bp, Homo sapiens
gtagggaggacggtc

SEQ ID NO: 1463143 - DNA, 15 bp, Homo sapiens
tagggaggacggtcc

SEQ ID NO: 1463144 - DNA, 15 bp, Homo sapiens
agggaggacggtcca

SEQ ID NO: 1463145 - DNA, 15 bp, Homo sapiens
gggaggacggtccag

SEQ ID NO: 1463146 - DNA, 15 bp, Homo sapiens
ggaggacggtccaga

SEQ ID NO: 1463147 - DNA, 15 bp, Homo sapiens
gaggacggtccagag

SEQ ID NO: 1463148 - DNA, 15 bp, Homo sapiens
aggacggtccagagc

SEQ ID NO: 1463149 - DNA, 15 bp, Homo sapiens
ggacggtccagagcg

SEQ ID NO: 1463150 - DNA, 15 bp, Homo sapiens
gacggtccagagcgc

SEQ ID NO: 1463151 - DNA, 15 bp, Homo sapiens
acggtccagagcgcg

SEQ ID NO: 1463152 - DNA, 15 bp, Homo sapiens
cggtccagagcgcgg

SEQ ID NO: 1463153 - DNA, 15 bp, Homo sapiens
ggtccagagcgcggg

SEQ ID NO: 1463154 - DNA, 15 bp, Homo sapiens
gtccagagcgcgggc

SEQ ID NO: 1463155 - DNA, 15 bp, Homo sapiens
tccagagcgcgggcc

SEQ ID NO: 1463156 - DNA, 15 bp, Homo sapiens
ccagagcgcgggcct

SEQ ID NO: 1463157 - DNA, 15 bp, Homo sapiens
cagagcgcgggcctc

SEQ ID NO: 1463158 - DNA, 15 bp, Homo sapiens
agagcgcgggcctcc

SEQ ID NO: 1463159 - DNA, 15 bp, Homo sapiens
gagcgcgggcctccg

SEQ ID NO: 1463160 - DNA, 15 bp, Homo sapiens
agcgcgggcctccgg

SEQ ID NO: 1463161 - DNA, 15 bp, Homo sapiens
gcgcgggcctccggg

SEQ ID NO: 1463162 - DNA, 15 bp, Homo sapiens
cgcgggcctccgggt

SEQ ID NO: 1463163 - DNA, 15 bp, Homo sapiens
gcgggcctccgggtc

SEQ ID NO: 1463164 - DNA, 15 bp, Homo sapiens
cgggcctccgggtct

SEQ ID NO: 1463165 - DNA, 15 bp, Homo sapiens
gggcctccgggtctc

SEQ ID NO: 1463166 - DNA, 15 bp, Homo sapiens
ggcctccgggtctca

SEQ ID NO: 1463167 - DNA, 15 bp, Homo sapiens
gcctccgggtctcac

SEQ ID NO: 1463168 - DNA, 15 bp, Homo sapiens
cctccgggtctcacc

SEQ ID NO: 1463169 - DNA, 15 bp, Homo sapiens
ctccgggtctcaccc

SEQ ID NO: 1463170 - DNA, 15 bp, Homo sapiens
tccgggtctcacccc

SEQ ID NO: 1463171 - DNA, 15 bp, Homo sapiens
ccgggtctcaccccg

SEQ ID NO: 1463172 - DNA, 15 bp, Homo sapiens
cgggtctcaccccgg

SEQ ID NO: 1463173 - DNA, 15 bp, Homo sapiens
gggtctcaccccggg

SEQ ID NO: 1463174 - DNA, 15 bp, Homo sapiens
ggtctcaccccggga

SEQ ID NO: 1463175 - DNA, 15 bp, Homo sapiens
gtctcaccccgggaa

SEQ ID NO: 1463176 - DNA, 15 bp, Homo sapiens
tctcaccccgggaaa

SEQ ID NO: 1463177 - DNA, 15 bp, Homo sapiens
ctcaccccgggaaaa

SEQ ID NO: 1463178 - DNA, 15 bp, Homo sapiens
tcaccccgggaaaag

SEQ ID NO: 1463179 - DNA, 15 bp, Homo sapiens
caccccgggaaaagt

SEQ ID NO: 1463180 - DNA, 15 bp, Homo sapiens
accccgggaaaagtc

SEQ ID NO: 1463181 - DNA, 15 bp, Homo sapiens
ccccgggaaaagtct

SEQ ID NO: 1463182 - DNA, 15 bp, Homo sapiens
cccgggaaaagtctg

SEQ ID NO: 1463183 - DNA, 15 bp, Homo sapiens
ccgggaaaagtctgg

SEQ ID NO: 1463184 - DNA, 15 bp, Homo sapiens
cgggaaaagtctggg

SEQ ID NO: 1463185 - DNA, 15 bp, Homo sapiens
gggaaaagtctgggt

SEQ ID NO: 1463186 - DNA, 15 bp, Homo sapiens
ggaaaagtctgggtc

SEQ ID NO: 1463187 - DNA, 15 bp, Homo sapiens
gaaaagtctgggtct

SEQ ID NO: 1463188 - DNA, 15 bp, Homo sapiens
aaaagtctgggtctg

SEQ ID NO: 1463189 - DNA, 15 bp, Homo sapiens
aaagtctgggtctgc

SEQ ID NO: 1463190 - DNA, 15 bp, Homo sapiens
aagtctgggtctgct

SEQ ID NO: 1463191 - DNA, 15 bp, Homo sapiens
agtctgggtctgctc

SEQ ID NO: 1463192 - DNA, 15 bp, Homo sapiens
tctgggtctgctctg

SEQ ID NO: 1463193 - DNA, 15 bp, Homo sapiens
ctgggtctgctctgc

SEQ ID NO: 1463194 - DNA, 15 bp, Homo sapiens
tgggtctgctctgcg

SEQ ID NO: 1463195 - DNA, 15 bp, Homo sapiens
gggtctgctctgcgc

SEQ ID NO: 1463196 - DNA, 15 bp, Homo sapiens
ggtctgctctgcgct

SEQ ID NO: 1463197 - DNA, 15 bp, Homo sapiens
gtctgctctgcgctg

SEQ ID NO: 1463198 - DNA, 15 bp, Homo sapiens
tctgctctgcgctgt

SEQ ID NO: 1463199 - DNA, 15 bp, Homo sapiens
ctgctctgcgctgtt

SEQ ID NO: 1463200 - DNA, 15 bp, Homo sapiens
tgctctgcgctgttg

SEQ ID NO: 1463201 - DNA, 15 bp, Homo sapiens
gctctgcgctgttgc

SEQ ID NO: 1463202 - DNA, 15 bp, Homo sapiens
ctctgcgctgttgcg

SEQ ID NO: 1463203 - DNA, 15 bp, Homo sapiens
tctgcgctgttgcgt

SEQ ID NO: 1463204 - DNA, 15 bp, Homo sapiens
ctgcgctgttgcgtg

SEQ ID NO: 1463205 - DNA, 15 bp, Homo sapiens
tgcgctgttgcgtgc

SEQ ID NO: 1463206 - DNA, 15 bp, Homo sapiens
gcgctgttgcgtgct

SEQ ID NO: 1463207 - DNA, 15 bp, Homo sapiens
cgctgttgcgtgctg

SEQ ID NO: 1463208 - DNA, 15 bp, Homo sapiens
gctgttgcgtgctgc

SEQ ID NO: 1463209 - DNA, 15 bp, Homo sapiens
ctgttgcgtgctgcg

SEQ ID NO: 1463210 - DNA, 15 bp, Homo sapiens
tgttgcgtgctgcgc

SEQ ID NO: 1463211 - DNA, 15 bp, Homo sapiens
gttgcgtgctgcgct

SEQ ID NO: 1463212 - DNA, 15 bp, Homo sapiens
ttgcgtgctgcgctc

SEQ ID NO: 1463213 - DNA, 15 bp, Homo sapiens
tgcgtgctgcgctcc

SEQ ID NO: 1463214 - DNA, 15 bp, Homo sapiens
gcgtgctgcgctcct

SEQ ID NO: 1463215 - DNA, 15 bp, Homo sapiens
cgtgctgcgctcctg

SEQ ID NO: 1463216 - DNA, 15 bp, Homo sapiens
gtgctgcgctcctgg

SEQ ID NO: 1463217 - DNA, 15 bp, Homo sapiens
tgctgcgctcctggg

SEQ ID NO: 1463218 - DNA, 15 bp, Homo sapiens
gctgcgctcctggga

SEQ ID NO: 1463219 - DNA, 15 bp, Homo sapiens
ctgcgctcctgggac

SEQ ID NO: 1463220 - DNA, 15 bp, Homo sapiens
tgcgctcctgggacc

SEQ ID NO: 1463221 - DNA, 15 bp, Homo sapiens
gcgctcctgggacct

SEQ ID NO: 1463222 - DNA, 15 bp, Homo sapiens
cgctcctgggacctg

SEQ ID NO: 1463223 - DNA, 15 bp, Homo sapiens
gctcctgggacctgc

SEQ ID NO: 1463224 - DNA, 15 bp, Homo sapiens
ctcctgggacctgct

SEQ ID NO: 1463225 - DNA, 15 bp, Homo sapiens
tcctgggacctgctg

SEQ ID NO: 1463226 - DNA, 15 bp, Homo sapiens
cctgggacctgctga

SEQ ID NO: 1463227 - DNA, 15 bp, Homo sapiens
ctgggacctgctgac

SEQ ID NO: 1463228 - DNA, 15 bp, Homo sapiens
tgggacctgctgact

SEQ ID NO: 1463229 - DNA, 15 bp, Homo sapiens
gggacctgctgactg

SEQ ID NO: 1463230 - DNA, 15 bp, Homo sapiens
ggacctgctgactgt

SEQ ID NO: 1463231 - DNA, 15 bp, Homo sapiens
gacctgctgactgtc

SEQ ID NO: 1463232 - DNA, 15 bp, Homo sapiens
acctgctgactgtcc

SEQ ID NO: 1463233 - DNA, 15 bp, Homo sapiens
cctgctgactgtcct

SEQ ID NO: 1463234 - DNA, 15 bp, Homo sapiens
ctgctgactgtccta

SEQ ID NO: 1463235 - DNA, 15 bp, Homo sapiens
tgctgactgtcctag

SEQ ID NO: 1463236 - DNA, 15 bp, Homo sapiens
gctgactgtcctaga

SEQ ID NO: 1463237 - DNA, 15 bp, Homo sapiens
ctgactgtcctagag

SEQ ID NO: 1463238 - DNA, 15 bp, Homo sapiens
tgactgtcctagagg

SEQ ID NO: 1463239 - DNA, 15 bp, Homo sapiens
gactgtcctagaggg

SEQ ID NO: 1463240 - DNA, 15 bp, Homo sapiens
actgtcctagaggga

SEQ ID NO: 1463241 - DNA, 15 bp, Homo sapiens
ctgtcctagagggaa

SEQ ID NO: 1463242 - DNA, 15 bp, Homo sapiens
tgtcctagagggaac

SEQ ID NO: 1463243 - DNA, 15 bp, Homo sapiens
gtcctagagggaacg

SEQ ID NO: 1463244 - DNA, 15 bp, Homo sapiens
tcctagagggaacgt

SEQ ID NO: 1463245 - DNA, 15 bp, Homo sapiens
cctagagggaacgtc

SEQ ID NO: 1463246 - DNA, 15 bp, Homo sapiens
ctagagggaacgtcc

SEQ ID NO: 1463247 - DNA, 15 bp, Homo sapiens
tagagggaacgtccc

SEQ ID NO: 1463248 - DNA, 15 bp, Homo sapiens
agagggaacgtcccg

SEQ ID NO: 1463249 - DNA, 15 bp, Homo sapiens
gagggaacgtcccgc

SEQ ID NO: 1463250 - DNA, 15 bp, Homo sapiens
agggaacgtcccgcg

SEQ ID NO: 1463251 - DNA, 15 bp, Homo sapiens
gggaacgtcccgcgg

SEQ ID NO: 1463252 - DNA, 15 bp, Homo sapiens
ggaacgtcccgcggt

SEQ ID NO: 1463253 - DNA, 15 bp, Homo sapiens
gaacgtcccgcggta

SEQ ID NO: 1463254 - DNA, 15 bp, Homo sapiens
aacgtcccgcggtag

SEQ ID NO: 1463255 - DNA, 15 bp, Homo sapiens
acgtcccgcggtagt

SEQ ID NO: 1463256 - DNA, 15 bp, Homo sapiens
cgtcccgcggtagtg

SEQ ID NO: 1463257 - DNA, 15 bp, Homo sapiens
gtcccgcggtagtgt

SEQ ID NO: 1463258 - DNA, 15 bp, Homo sapiens
tcccgcggtagtgtc

SEQ ID NO: 1463259 - DNA, 15 bp, Homo sapiens
cccgcggtagtgtca

SEQ ID NO: 1463260 - DNA, 15 bp, Homo sapiens
ccgcggtagtgtcag

SEQ ID NO: 1463261 - DNA, 15 bp, Homo sapiens
cgcggtagtgtcagt

SEQ ID NO: 1463262 - DNA, 15 bp, Homo sapiens
gcggtagtgtcagtt

SEQ ID NO: 1463263 - DNA, 15 bp, Homo sapiens
cggtagtgtcagttc

SEQ ID NO: 1463264 - DNA, 15 bp, Homo sapiens
ggtagtgtcagttcc

SEQ ID NO: 1463265 - DNA, 15 bp, Homo sapiens
gtagtgtcagttccc

SEQ ID NO: 1463266 - DNA, 15 bp, Homo sapiens
tagtgtcagttccct

SEQ ID NO: 1463267 - DNA, 15 bp, Homo sapiens
agtgtcagttccctg

SEQ ID NO: 1463268 - DNA, 15 bp, Homo sapiens
gtgtcagttccctgg

SEQ ID NO: 1463269 - DNA, 15 bp, Homo sapiens
tgtcagttccctggg

SEQ ID NO: 1463270 - DNA, 15 bp, Homo sapiens
gtcagttccctgggg

SEQ ID NO: 1463271 - DNA, 15 bp, Homo sapiens
tcagttccctgggga

SEQ ID NO: 1463272 - DNA, 15 bp, Homo sapiens
cagttccctggggac

SEQ ID NO: 1463273 - DNA, 15 bp, Homo sapiens
agttccctggggacc

SEQ ID NO: 1463274 - DNA, 15 bp, Homo sapiens
gttccctggggacca

SEQ ID NO: 1463275 - DNA, 15 bp, Homo sapiens
ttccctggggaccag

SEQ ID NO: 1463276 - DNA, 15 bp, Homo sapiens
tccctggggaccagg

SEQ ID NO: 1463277 - DNA, 15 bp, Homo sapiens
ccctggggaccagga

SEQ ID NO: 1463278 - DNA, 15 bp, Homo sapiens
cctggggaccaggaa

SEQ ID NO: 1463279 - DNA, 15 bp, Homo sapiens
ctggggaccaggaag

SEQ ID NO: 1463280 - DNA, 15 bp, Homo sapiens
tggggaccaggaagg

SEQ ID NO: 1463281 - DNA, 15 bp, Homo sapiens
ggggaccaggaaggg

SEQ ID NO: 1463282 - DNA, 15 bp, Homo sapiens
gggaccaggaagggc

SEQ ID NO: 1463283 - DNA, 15 bp, Homo sapiens
ggaccaggaagggcg

SEQ ID NO: 1463284 - DNA, 15 bp, Homo sapiens
gaccaggaagggcga

SEQ ID NO: 1463285 - DNA, 15 bp, Homo sapiens
accaggaagggcgac

SEQ ID NO: 1463286 - DNA, 15 bp, Homo sapiens
ccaggaagggcgact

SEQ ID NO: 1463287 - DNA, 15 bp, Homo sapiens
caggaagggcgactc

SEQ ID NO: 1463288 - DNA, 15 bp, Homo sapiens
aggaagggcgactct

SEQ ID NO: 1463289 - DNA, 15 bp, Homo sapiens
ggaagggcgactctt

SEQ ID NO: 1463290 - DNA, 15 bp, Homo sapiens
gaagggcgactcttg

SEQ ID NO: 1463291 - DNA, 15 bp, Homo sapiens
aagggcgactcttgc

SEQ ID NO: 1463292 - DNA, 15 bp, Homo sapiens
agggcgactcttgcc

SEQ ID NO: 1463293 - DNA, 15 bp, Homo sapiens
gggcgactcttgcct

SEQ ID NO: 1463294 - DNA, 15 bp, Homo sapiens
ggcgactcttgcctg

SEQ ID NO: 1463295 - DNA, 15 bp, Homo sapiens
gcgactcttgcctgg

SEQ ID NO: 1463296 - DNA, 15 bp, Homo sapiens
cgactcttgcctggg

SEQ ID NO: 1463297 - DNA, 15 bp, Homo sapiens
gactcttgcctggga

SEQ ID NO: 1463298 - DNA, 15 bp, Homo sapiens
actcttgcctgggag

SEQ ID NO: 1463299 - DNA, 15 bp, Homo sapiens
ctcttgcctgggagt

SEQ ID NO: 1463300 - DNA, 15 bp, Homo sapiens
tcttgcctgggagtc

SEQ ID NO: 1463301 - DNA, 15 bp, Homo sapiens
cttgcctgggagtca

SEQ ID NO: 1463302 - DNA, 15 bp, Homo sapiens
ttgcctgggagtcag

SEQ ID NO: 1463303 - DNA, 15 bp, Homo sapiens
tgcctgggagtcagt

SEQ ID NO: 1463304 - DNA, 15 bp, Homo sapiens
gcctgggagtcagtg

SEQ ID NO: 1463305 - DNA, 15 bp, Homo sapiens
cctgggagtcagtgc

SEQ ID NO: 1463306 - DNA, 15 bp, Homo sapiens
ctgggagtcagtgct

SEQ ID NO: 1463307 - DNA, 15 bp, Homo sapiens
tgggagtcagtgctt

SEQ ID NO: 1463308 - DNA, 15 bp, Homo sapiens
gggagtcagtgcttg

SEQ ID NO: 1463309 - DNA, 15 bp, Homo sapiens
ggagtcagtgcttgg

SEQ ID NO: 1463310 - DNA, 15 bp, Homo sapiens
gagtcagtgcttggg

SEQ ID NO: 1463311 - DNA, 15 bp, Homo sapiens
agtcagtgcttgggc

SEQ ID NO: 1463312 - DNA, 15 bp, Homo sapiens
gtcagtgcttgggcc

SEQ ID NO: 1463313 - DNA, 15 bp, Homo sapiens
tcagtgcttgggccg

SEQ ID NO: 1463314 - DNA, 15 bp, Homo sapiens
cagtgcttgggccgt

SEQ ID NO: 1463315 - DNA, 15 bp, Homo sapiens
agtgcttgggccgtc

SEQ ID NO: 1463316 - DNA, 15 bp, Homo sapiens
gtgcttgggccgtcg

SEQ ID NO: 1463317 - DNA, 15 bp, Homo sapiens
tgcttgggccgtcgg

SEQ ID NO: 1463318 - DNA, 15 bp, Homo sapiens
gcttgggccgtcggg

SEQ ID NO: 1463319 - DNA, 15 bp, Homo sapiens
cttgggccgtcgggt

SEQ ID NO: 1463320 - DNA, 15 bp, Homo sapiens
ttgggccgtcgggtc

SEQ ID NO: 1463321 - DNA, 15 bp, Homo sapiens
tgggccgtcgggtcc

SEQ ID NO: 1463322 - DNA, 15 bp, Homo sapiens
gggccgtcgggtccg

SEQ ID NO: 1463323 - DNA, 15 bp, Homo sapiens
ggccgtcgggtccgg

SEQ ID NO: 1463324 - DNA, 15 bp, Homo sapiens
gccgtcgggtccggg

SEQ ID NO: 1463325 - DNA, 15 bp, Homo sapiens
ccgtcgggtccgggt

SEQ ID NO: 1463326 - DNA, 15 bp, Homo sapiens
cgtcgggtccgggta

SEQ ID NO: 1463327 - DNA, 15 bp, Homo sapiens
gtcgggtccgggtaa

SEQ ID NO: 1463328 - DNA, 15 bp, Homo sapiens
tcgggtccgggtaag

SEQ ID NO: 1463329 - DNA, 15 bp, Homo sapiens
cgggtccgggtaagc

SEQ ID NO: 1463330 - DNA, 15 bp, Homo sapiens
gggtccgggtaagcg

SEQ ID NO: 1463331 - DNA, 15 bp, Homo sapiens
ggtccgggtaagcgc

SEQ ID NO: 1463332 - DNA, 15 bp, Homo sapiens
gtccgggtaagcgct

SEQ ID NO: 1463333 - DNA, 15 bp, Homo sapiens
tccgggtaagcgctg

SEQ ID NO: 1463334 - DNA, 15 bp, Homo sapiens
ccgggtaagcgctgg

SEQ ID NO: 1463335 - DNA, 15 bp, Homo sapiens
cgggtaagcgctggg

SEQ ID NO: 1463336 - DNA, 15 bp, Homo sapiens
gggtaagcgctgggg

SEQ ID NO: 1463337 - DNA, 15 bp, Homo sapiens
ggtaagcgctggggg

SEQ ID NO: 1463338 - DNA, 15 bp, Homo sapiens
gtaagcgctgggggt

SEQ ID NO: 1463339 - DNA, 15 bp, Homo sapiens
taagcgctgggggtt

SEQ ID NO: 1463340 - DNA, 15 bp, Homo sapiens
aagcgctgggggttt

SEQ ID NO: 1463341 - DNA, 15 bp, Homo sapiens
agcgctgggggtttg

SEQ ID NO: 1463342 - DNA, 15 bp, Homo sapiens
gcgctgggggtttgg

SEQ ID NO: 1463343 - DNA, 15 bp, Homo sapiens
cgctgggggtttggc

SEQ ID NO: 1463344 - DNA, 15 bp, Homo sapiens
gctgggggtttggct

SEQ ID NO: 1463345 - DNA, 15 bp, Homo sapiens
ctgggggtttggctc

SEQ ID NO: 1463346 - DNA, 15 bp, Homo sapiens
tgggggtttggctcg

SEQ ID NO: 1463347 - DNA, 15 bp, Homo sapiens
gggggtttggctcga

SEQ ID NO: 1463348 - DNA, 15 bp, Homo sapiens
ggggtttggctcgag

SEQ ID NO: 1463349 - DNA, 15 bp, Homo sapiens
gggtttggctcgaga

SEQ ID NO: 1463350 - DNA, 15 bp, Homo sapiens
ggtttggctcgagaa

SEQ ID NO: 1463351 - DNA, 15 bp, Homo sapiens
gtttggctcgagaag

SEQ ID NO: 1463352 - DNA, 15 bp, Homo sapiens
tttggctcgagaaga

SEQ ID NO: 1463353 - DNA, 15 bp, Homo sapiens
ttggctcgagaagat

SEQ ID NO: 1463354 - DNA, 15 bp, Homo sapiens
tggctcgagaagatg

SEQ ID NO: 1463355 - DNA, 15 bp, Homo sapiens
ggctcgagaagatgc

SEQ ID NO: 1463356 - DNA, 15 bp, Homo sapiens
gctcgagaagatgcg

SEQ ID NO: 1463357 - DNA, 15 bp, Homo sapiens
ctcgagaagatgcgg

SEQ ID NO: 1463358 - DNA, 15 bp, Homo sapiens
tcgagaagatgcgga

SEQ ID NO: 1463359 - DNA, 15 bp, Homo sapiens
cgagaagatgcggat

SEQ ID NO: 1463360 - DNA, 15 bp, Homo sapiens
gagaagatgcggata

SEQ ID NO: 1463361 - DNA, 15 bp, Homo sapiens
agaagatgcggatag

SEQ ID NO: 1463362 - DNA, 15 bp, Homo sapiens
gaagatgcggatagg

SEQ ID NO: 1463363 - DNA, 15 bp, Homo sapiens
aagatgcggataggt

SEQ ID NO: 1463364 - DNA, 15 bp, Homo sapiens
agatgcggataggtg

SEQ ID NO: 1463365 - DNA, 15 bp, Homo sapiens
gatgcggataggtgg

SEQ ID NO: 1463366 - DNA, 15 bp, Homo sapiens
atgcggataggtggc

SEQ ID NO: 1463367 - DNA, 15 bp, Homo sapiens
tgcggataggtggcc

SEQ ID NO: 1463368 - DNA, 15 bp, Homo sapiens
gcggataggtggcct

SEQ ID NO: 1463369 - DNA, 15 bp, Homo sapiens
cggataggtggccta

SEQ ID NO: 1463370 - DNA, 15 bp, Homo sapiens
ggataggtggcctag

SEQ ID NO: 1463371 - DNA, 15 bp, Homo sapiens
gataggtggcctagg

SEQ ID NO: 1463372 - DNA, 15 bp, Homo sapiens
ataggtggcctaggg

SEQ ID NO: 1463373 - DNA, 15 bp, Homo sapiens
taggtggcctagggc

SEQ ID NO: 1463374 - DNA, 15 bp, Homo sapiens
aggtggcctagggcg

SEQ ID NO: 1463375 - DNA, 15 bp, Homo sapiens
ggtggcctagggcgc

SEQ ID NO: 1463376 - DNA, 15 bp, Homo sapiens
gtggcctagggcgcc

SEQ ID NO: 1463377 - DNA, 15 bp, Homo sapiens
tggcctagggcgccg

SEQ ID NO: 1463378 - DNA, 15 bp, Homo sapiens
ggcctagggcgccgc

SEQ ID NO: 1463379 - DNA, 15 bp, Homo sapiens
gcctagggcgccgcg

SEQ ID NO: 1463380 - DNA, 15 bp, Homo sapiens
cctagggcgccgcgg

SEQ ID NO: 1463381 - DNA, 15 bp, Homo sapiens
ctagggcgccgcgga

SEQ ID NO: 1463382 - DNA, 15 bp, Homo sapiens
tagggcgccgcggat

SEQ ID NO: 1463383 - DNA, 15 bp, Homo sapiens
agggcgccgcggatc

SEQ ID NO: 1463384 - DNA, 15 bp, Homo sapiens
gggcgccgcggatct

SEQ ID NO: 1463385 - DNA, 15 bp, Homo sapiens
ggcgccgcggatctc

SEQ ID NO: 1463386 - DNA, 15 bp, Homo sapiens
gcgccgcggatctcc

SEQ ID NO: 1463387 - DNA, 15 bp, Homo sapiens
cgccgcggatctccg

SEQ ID NO: 1463388 - DNA, 15 bp, Homo sapiens
gccgcggatctccgc

SEQ ID NO: 1463389 - DNA, 15 bp, Homo sapiens
ccgcggatctccgcc

SEQ ID NO: 1463390 - DNA, 15 bp, Homo sapiens
cgcggatctccgccc

SEQ ID NO: 1463391 - DNA, 15 bp, Homo sapiens
gcggatctccgccct

SEQ ID NO: 1463392 - DNA, 15 bp, Homo sapiens
cggatctccgccctc

SEQ ID NO: 1463393 - DNA, 15 bp, Homo sapiens
ggatctccgccctct

SEQ ID NO: 1463394 - DNA, 15 bp, Homo sapiens
gatctccgccctctg

SEQ ID NO: 1463395 - DNA, 15 bp, Homo sapiens
atctccgccctctgc

SEQ ID NO: 1463396 - DNA, 15 bp, Homo sapiens
tctccgccctctgcg

SEQ ID NO: 1463397 - DNA, 15 bp, Homo sapiens
ctccgccctctgcgg

SEQ ID NO: 1463398 - DNA, 15 bp, Homo sapiens
tccgccctctgcggg

SEQ ID NO: 1463399 - DNA, 15 bp, Homo sapiens
ccgccctctgcgggc

SEQ ID NO: 1463400 - DNA, 15 bp, Homo sapiens
cgccctctgcgggca

SEQ ID NO: 1463401 - DNA, 15 bp, Homo sapiens
gccctctgcgggcac

SEQ ID NO: 1463402 - DNA, 15 bp, Homo sapiens
ccctctgcgggcacc

SEQ ID NO: 1463403 - DNA, 15 bp, Homo sapiens
cctctgcgggcaccg

SEQ ID NO: 1463404 - DNA, 15 bp, Homo sapiens
ctctgcgggcaccgg

SEQ ID NO: 1463405 - DNA, 15 bp, Homo sapiens
tctgcgggcaccggg

SEQ ID NO: 1463406 - DNA, 15 bp, Homo sapiens
ctgcgggcaccggga

SEQ ID NO: 1463407 - DNA, 15 bp, Homo sapiens
tgcgggcaccgggag

SEQ ID NO: 1463408 - DNA, 15 bp, Homo sapiens
gcgggcaccgggagc

SEQ ID NO: 1463409 - DNA, 15 bp, Homo sapiens
cgggcaccgggagcc

SEQ ID NO: 1463410 - DNA, 15 bp, Homo sapiens
gggcaccgggagccc

SEQ ID NO: 1463411 - DNA, 15 bp, Homo sapiens
ggcaccgggagccca

SEQ ID NO: 1463412 - DNA, 15 bp, Homo sapiens
gcaccgggagcccag

SEQ ID NO: 1463413 - DNA, 15 bp, Homo sapiens
caccgggagcccagg

SEQ ID NO: 1463414 - DNA, 15 bp, Homo sapiens
accgggagcccaggg

SEQ ID NO: 1463415 - DNA, 15 bp, Homo sapiens
ccgggagcccagggt

SEQ ID NO: 1463416 - DNA, 15 bp, Homo sapiens
cgggagcccagggtc

SEQ ID NO: 1463417 - DNA, 15 bp, Homo sapiens
gggagcccagggtcg

SEQ ID NO: 1463418 - DNA, 15 bp, Homo sapiens
ggagcccagggtcga

SEQ ID NO: 1463419 - DNA, 15 bp, Homo sapiens
gagcccagggtcgag

SEQ ID NO: 1463420 - DNA, 15 bp, Homo sapiens
agcccagggtcgagg

SEQ ID NO: 1463421 - DNA, 15 bp, Homo sapiens
gcccagggtcgaggc

SEQ ID NO: 1463422 - DNA, 15 bp, Homo sapiens
cccagggtcgaggcg

SEQ ID NO: 1463423 - DNA, 15 bp, Homo sapiens
ccagggtcgaggcgc

SEQ ID NO: 1463424 - DNA, 15 bp, Homo sapiens
cagggtcgaggcgcg

SEQ ID NO: 1463425 - DNA, 15 bp, Homo sapiens
agggtcgaggcgcgc

SEQ ID NO: 1463426 - DNA, 15 bp, Homo sapiens
gggtcgaggcgcgcc

SEQ ID NO: 1463427 - DNA, 15 bp, Homo sapiens
ggtcgaggcgcgccg

SEQ ID NO: 1463428 - DNA, 15 bp, Homo sapiens
gtcgaggcgcgccgc

SEQ ID NO: 1463429 - DNA, 15 bp, Homo sapiens
tcgaggcgcgccgcc

SEQ ID NO: 1463430 - DNA, 15 bp, Homo sapiens
cgaggcgcgccgccc

SEQ ID NO: 1463431 - DNA, 15 bp, Homo sapiens
gaggcgcgccgcccc

SEQ ID NO: 1463432 - DNA, 15 bp, Homo sapiens
aggcgcgccgccccg

SEQ ID NO: 1463433 - DNA, 15 bp, Homo sapiens
ggcgcgccgccccga

SEQ ID NO: 1463434 - DNA, 15 bp, Homo sapiens
gcgcgccgccccgag

SEQ ID NO: 1463435 - DNA, 15 bp, Homo sapiens
cgcgccgccccgagg

SEQ ID NO: 1463436 - DNA, 15 bp, Homo sapiens
gcgccgccccgaggg

SEQ ID NO: 1463437 - DNA, 15 bp, Homo sapiens
cgccgccccgagggg

SEQ ID NO: 1463438 - DNA, 15 bp, Homo sapiens
gccgccccgaggggc

SEQ ID NO: 1463439 - DNA, 15 bp, Homo sapiens
ccgccccgaggggcc

SEQ ID NO: 1463440 - DNA, 15 bp, Homo sapiens
cgccccgaggggccc

SEQ ID NO: 1463441 - DNA, 15 bp, Homo sapiens
gccccgaggggcccc

SEQ ID NO: 1463442 - DNA, 15 bp, Homo sapiens
ccccgaggggcccct

SEQ ID NO: 1463443 - DNA, 15 bp, Homo sapiens
cccgaggggcccctt

SEQ ID NO: 1463444 - DNA, 15 bp, Homo sapiens
ccgaggggccccttc

SEQ ID NO: 1463445 - DNA, 15 bp, Homo sapiens
cgaggggccccttct

SEQ ID NO: 1463446 - DNA, 15 bp, Homo sapiens
gaggggccccttctc

SEQ ID NO: 1463447 - DNA, 15 bp, Homo sapiens
aggggccccttctcc

SEQ ID NO: 1463448 - DNA, 15 bp, Homo sapiens
ggggccccttctcct

SEQ ID NO: 1463449 - DNA, 15 bp, Homo sapiens
gggccccttctccta

SEQ ID NO: 1463450 - DNA, 15 bp, Homo sapiens
ggccccttctcctaa

SEQ ID NO: 1463451 - DNA, 15 bp, Homo sapiens
gccccttctcctaac

SEQ ID NO: 1463452 - DNA, 15 bp, Homo sapiens
ccccttctcctaaca

SEQ ID NO: 1463453 - DNA, 15 bp, Homo sapiens
cccttctcctaacaa

SEQ ID NO: 1463454 - DNA, 15 bp, Homo sapiens
ccttctcctaacaat

SEQ ID NO: 1463455 - DNA, 15 bp, Homo sapiens
cttctcctaacaatg

SEQ ID NO: 1463456 - DNA, 15 bp, Homo sapiens
ttctcctaacaatgc

SEQ ID NO: 1463457 - DNA, 15 bp, Homo sapiens
tctcctaacaatgcg

SEQ ID NO: 1463458 - DNA, 15 bp, Homo sapiens
ctcctaacaatgcgc

SEQ ID NO: 1463459 - DNA, 15 bp, Homo sapiens
tcctaacaatgcgcc

SEQ ID NO: 1463460 - DNA, 15 bp, Homo sapiens
cctaacaatgcgccc

SEQ ID NO: 1463461 - DNA, 15 bp, Homo sapiens
ctaacaatgcgcccg

SEQ ID NO: 1463462 - DNA, 15 bp, Homo sapiens
taacaatgcgcccgg

SEQ ID NO: 1463463 - DNA, 15 bp, Homo sapiens
aacaatgcgcccgga

SEQ ID NO: 1463464 - DNA, 15 bp, Homo sapiens
acaatgcgcccggaa

SEQ ID NO: 1463465 - DNA, 15 bp, Homo sapiens
caatgcgcccggaat

SEQ ID NO: 1463466 - DNA, 15 bp, Homo sapiens
aatgcgcccggaatg

SEQ ID NO: 1463467 - DNA, 15 bp, Homo sapiens
atgcgcccggaatgg

SEQ ID NO: 1463468 - DNA, 15 bp, Homo sapiens
tgcgcccggaatgga

SEQ ID NO: 1463469 - DNA, 15 bp, Homo sapiens
gcgcccggaatggag

SEQ ID NO: 1463470 - DNA, 15 bp, Homo sapiens
cgcccggaatggagt

SEQ ID NO: 1463471 - DNA, 15 bp, Homo sapiens
gcccggaatggagtc

SEQ ID NO: 1463472 - DNA, 15 bp, Homo sapiens
cccggaatggagtcc

SEQ ID NO: 1463473 - DNA, 15 bp, Homo sapiens
ccggaatggagtccg

SEQ ID NO: 1463474 - DNA, 15 bp, Homo sapiens
cggaatggagtccgc

SEQ ID NO: 1463475 - DNA, 15 bp, Homo sapiens
ggaatggagtccgcg

SEQ ID NO: 1463476 - DNA, 15 bp, Homo sapiens
gaatggagtccgcgc

SEQ ID NO: 1463477 - DNA, 15 bp, Homo sapiens
aatggagtccgcgcc

SEQ ID NO: 1463478 - DNA, 15 bp, Homo sapiens
atggagtccgcgccc

SEQ ID NO: 1463479 - DNA, 15 bp, Homo sapiens
tggagtccgcgccct

SEQ ID NO: 1463480 - DNA, 15 bp, Homo sapiens
ggagtccgcgccctg

SEQ ID NO: 1463481 - DNA, 15 bp, Homo sapiens
gagtccgcgccctga

SEQ ID NO: 1463482 - DNA, 15 bp, Homo sapiens
agtccgcgccctgac

SEQ ID NO: 1463483 - DNA, 15 bp, Homo sapiens
gtccgcgccctgaca

SEQ ID NO: 1463484 - DNA, 15 bp, Homo sapiens
tccgcgccctgacag

SEQ ID NO: 1463485 - DNA, 15 bp, Homo sapiens
ccgcgccctgacagc

SEQ ID NO: 1463486 - DNA, 15 bp, Homo sapiens
cgcgccctgacagcg

SEQ ID NO: 1463487 - DNA, 15 bp, Homo sapiens
gcgccctgacagcgc

SEQ ID NO: 1463488 - DNA, 15 bp, Homo sapiens
cgccctgacagcgcg

SEQ ID NO: 1463489 - DNA, 15 bp, Homo sapiens
gccctgacagcgcgg

SEQ ID NO: 1463490 - DNA, 15 bp, Homo sapiens
ccctgacagcgcggg

SEQ ID NO: 1463491 - DNA, 15 bp, Homo sapiens
cctgacagcgcgggt

SEQ ID NO: 1463492 - DNA, 15 bp, Homo sapiens
ctgacagcgcgggtc

SEQ ID NO: 1463493 - DNA, 15 bp, Homo sapiens
tgacagcgcgggtca

SEQ ID NO: 1463494 - DNA, 15 bp, Homo sapiens
gacagcgcgggtcag

SEQ ID NO: 1463495 - DNA, 15 bp, Homo sapiens
acagcgcgggtcagc

SEQ ID NO: 1463496 - DNA, 15 bp, Homo sapiens
cagcgcgggtcagcc

SEQ ID NO: 1463497 - DNA, 15 bp, Homo sapiens
agcgcgggtcagccc

SEQ ID NO: 1463498 - DNA, 15 bp, Homo sapiens
gcgcgggtcagcccg

SEQ ID NO: 1463499 - DNA, 15 bp, Homo sapiens
cgcgggtcagcccga

SEQ ID NO: 1463500 - DNA, 15 bp, Homo sapiens
gcgggtcagcccgaa

SEQ ID NO: 1463501 - DNA, 15 bp, Homo sapiens
cgggtcagcccgaaa

SEQ ID NO: 1463502 - DNA, 15 bp, Homo sapiens
gggtcagcccgaaac

SEQ ID NO: 1463503 - DNA, 15 bp, Homo sapiens
ggtcagcccgaaacc

SEQ ID NO: 1463504 - DNA, 15 bp, Homo sapiens
gtcagcccgaaaccg

SEQ ID NO: 1463505 - DNA, 15 bp, Homo sapiens
tcagcccgaaaccgc

SEQ ID NO: 1463506 - DNA, 15 bp, Homo sapiens
cagcccgaaaccgcc

SEQ ID NO: 1463507 - DNA, 15 bp, Homo sapiens
agcccgaaaccgccc

SEQ ID NO: 1463508 - DNA, 15 bp, Homo sapiens
gcccgaaaccgccca

SEQ ID NO: 1463509 - DNA, 15 bp, Homo sapiens
cccgaaaccgcccag

SEQ ID NO: 1463510 - DNA, 15 bp, Homo sapiens
ccgaaaccgcccaga

SEQ ID NO: 1463511 - DNA, 15 bp, Homo sapiens
cgaaaccgcccagaa

SEQ ID NO: 1463512 - DNA, 15 bp, Homo sapiens
gaaaccgcccagaat

SEQ ID NO: 1463513 - DNA, 15 bp, Homo sapiens
aaaccgcccagaatc

SEQ ID NO: 1463514 - DNA, 15 bp, Homo sapiens
aaccgcccagaatcc

SEQ ID NO: 1463515 - DNA, 15 bp, Homo sapiens
accgcccagaatccg

SEQ ID NO: 1463516 - DNA, 15 bp, Homo sapiens
ccgcccagaatccgc

SEQ ID NO: 1463517 - DNA, 15 bp, Homo sapiens
cgcccagaatccgct

SEQ ID NO: 1463518 - DNA, 15 bp, Homo sapiens
gcccagaatccgctt

SEQ ID NO: 1463519 - DNA, 15 bp, Homo sapiens
cccagaatccgcttc

SEQ ID NO: 1463520 - DNA, 15 bp, Homo sapiens
ccagaatccgcttcg

SEQ ID NO: 1463521 - DNA, 15 bp, Homo sapiens
cagaatccgcttcga

SEQ ID NO: 1463522 - DNA, 15 bp, Homo sapiens
agaatccgcttcgat

SEQ ID NO: 1463523 - DNA, 15 bp, Homo sapiens
gaatccgcttcgatg

SEQ ID NO: 1463524 - DNA, 15 bp, Homo sapiens
aatccgcttcgatga

SEQ ID NO: 1463525 - DNA, 15 bp, Homo sapiens
atccgcttcgatgag

SEQ ID NO: 1463526 - DNA, 15 bp, Homo sapiens
tccgcttcgatgagt

SEQ ID NO: 1463527 - DNA, 15 bp, Homo sapiens
ccgcttcgatgagtg

SEQ ID NO: 1463528 - DNA, 15 bp, Homo sapiens
cgcttcgatgagtgg

SEQ ID NO: 1463529 - DNA, 15 bp, Homo sapiens
gcttcgatgagtggg

SEQ ID NO: 1463530 - DNA, 15 bp, Homo sapiens
cttcgatgagtgggt

SEQ ID NO: 1463531 - DNA, 15 bp, Homo sapiens
ttcgatgagtgggtg

SEQ ID NO: 1463532 - DNA, 15 bp, Homo sapiens
tcgatgagtgggtga

SEQ ID NO: 1463533 - DNA, 15 bp, Homo sapiens
cgatgagtgggtgag

SEQ ID NO: 1463534 - DNA, 15 bp, Homo sapiens
gatgagtgggtgagc

SEQ ID NO: 1463535 - DNA, 15 bp, Homo sapiens
atgagtgggtgagcc

SEQ ID NO: 1463536 - DNA, 15 bp, Homo sapiens
tgagtgggtgagccg

SEQ ID NO: 1463537 - DNA, 15 bp, Homo sapiens
gagtgggtgagccgc

SEQ ID NO: 1463538 - DNA, 15 bp, Homo sapiens
agtgggtgagccgct

SEQ ID NO: 1463539 - DNA, 15 bp, Homo sapiens
gtgggtgagccgctc

SEQ ID NO: 1463540 - DNA, 15 bp, Homo sapiens
tgggtgagccgctct

SEQ ID NO: 1463541 - DNA, 15 bp, Homo sapiens
gggtgagccgctctg

SEQ ID NO: 1463542 - DNA, 15 bp, Homo sapiens
ggtgagccgctctgg

SEQ ID NO: 1463543 - DNA, 15 bp, Homo sapiens
gtgagccgctctggg

SEQ ID NO: 1463544 - DNA, 15 bp, Homo sapiens
tgagccgctctggga

SEQ ID NO: 1463545 - DNA, 15 bp, Homo sapiens
gagccgctctgggag

SEQ ID NO: 1463546 - DNA, 15 bp, Homo sapiens
agccgctctgggagt

SEQ ID NO: 1463547 - DNA, 15 bp, Homo sapiens
gccgctctgggagtc

SEQ ID NO: 1463548 - DNA, 15 bp, Homo sapiens
ccgctctgggagtct

SEQ ID NO: 1463549 - DNA, 15 bp, Homo sapiens
cgctctgggagtctg

SEQ ID NO: 1463550 - DNA, 15 bp, Homo sapiens
gctctgggagtctgc

SEQ ID NO: 1463551 - DNA, 15 bp, Homo sapiens
ctctgggagtctgcc

SEQ ID NO: 1463552 - DNA, 15 bp, Homo sapiens
tctgggagtctgccg

SEQ ID NO: 1463553 - DNA, 15 bp, Homo sapiens
ctgggagtctgccgc

SEQ ID NO: 1463554 - DNA, 15 bp, Homo sapiens
tgggagtctgccgcg

SEQ ID NO: 1463555 - DNA, 15 bp, Homo sapiens
gggagtctgccgcgt

SEQ ID NO: 1463556 - DNA, 15 bp, Homo sapiens
ggagtctgccgcgtc

SEQ ID NO: 1463557 - DNA, 15 bp, Homo sapiens
gagtctgccgcgtct

SEQ ID NO: 1463558 - DNA, 15 bp, Homo sapiens
agtctgccgcgtctc

SEQ ID NO: 1463559 - DNA, 15 bp, Homo sapiens
gtctgccgcgtctcg

SEQ ID NO: 1463560 - DNA, 15 bp, Homo sapiens
tctgccgcgtctcgg

SEQ ID NO: 1463561 - DNA, 15 bp, Homo sapiens
ctgccgcgtctcggc

SEQ ID NO: 1463562 - DNA, 15 bp, Homo sapiens
tgccgcgtctcggca

SEQ ID NO: 1463563 - DNA, 15 bp, Homo sapiens
gccgcgtctcggcag

SEQ ID NO: 1463564 - DNA, 15 bp, Homo sapiens
ccgcgtctcggcagc

SEQ ID NO: 1463565 - DNA, 15 bp, Homo sapiens
cgcgtctcggcagcg

SEQ ID NO: 1463566 - DNA, 15 bp, Homo sapiens
gcgtctcggcagcgg

SEQ ID NO: 1463567 - DNA, 15 bp, Homo sapiens
cgtctcggcagcgga

SEQ ID NO: 1463568 - DNA, 15 bp, Homo sapiens
gtctcggcagcggag

SEQ ID NO: 1463569 - DNA, 15 bp, Homo sapiens
tctcggcagcggagg

SEQ ID NO: 1463570 - DNA, 15 bp, Homo sapiens
ctcggcagcggaggg

SEQ ID NO: 1463571 - DNA, 15 bp, Homo sapiens
tcggcagcggagggc

SEQ ID NO: 1463572 - DNA, 15 bp, Homo sapiens
cggcagcggagggcc

SEQ ID NO: 1463573 - DNA, 15 bp, Homo sapiens
ggcagcggagggcct

SEQ ID NO: 1463574 - DNA, 15 bp, Homo sapiens
gcagcggagggcctg

SEQ ID NO: 1463575 - DNA, 15 bp, Homo sapiens
cagcggagggcctga

SEQ ID NO: 1463576 - DNA, 15 bp, Homo sapiens
agcggagggcctgag

SEQ ID NO: 1463577 - DNA, 15 bp, Homo sapiens
gcggagggcctgagt

SEQ ID NO: 1463578 - DNA, 15 bp, Homo sapiens
cggagggcctgagtg

SEQ ID NO: 1463579 - DNA, 15 bp, Homo sapiens
ggagggcctgagtgg

SEQ ID NO: 1463580 - DNA, 15 bp, Homo sapiens
gagggcctgagtgga

SEQ ID NO: 1463581 - DNA, 15 bp, Homo sapiens
agggcctgagtggaa

SEQ ID NO: 1463582 - DNA, 15 bp, Homo sapiens
gggcctgagtggaaa

SEQ ID NO: 1463583 - DNA, 15 bp, Homo sapiens
ggcctgagtggaaaa

SEQ ID NO: 1463584 - DNA, 15 bp, Homo sapiens
gcctgagtggaaaaa

SEQ ID NO: 1463585 - DNA, 15 bp, Homo sapiens
cctgagtggaaaaat

SEQ ID NO: 1463586 - DNA, 15 bp, Homo sapiens
ctgagtggaaaaatt

SEQ ID NO: 1463587 - DNA, 15 bp, Homo sapiens
tgagtggaaaaattc

SEQ ID NO: 1463588 - DNA, 15 bp, Homo sapiens
gagtggaaaaattct

SEQ ID NO: 1463589 - DNA, 15 bp, Homo sapiens
agtggaaaaattctt

SEQ ID NO: 1463590 - DNA, 15 bp, Homo sapiens
gtggaaaaattctta

SEQ ID NO: 1463591 - DNA, 15 bp, Homo sapiens
tggaaaaattcttat

SEQ ID NO: 1463592 - DNA, 15 bp, Homo sapiens
ggaaaaattcttatt

SEQ ID NO: 1463593 - DNA, 15 bp, Homo sapiens
gaaaaattcttattg

SEQ ID NO: 1463594 - DNA, 15 bp, Homo sapiens
aaaaattcttattgg

SEQ ID NO: 1463595 - DNA, 15 bp, Homo sapiens
aaaattcttattgga

SEQ ID NO: 1463596 - DNA, 15 bp, Homo sapiens
aaattcttattggat

SEQ ID NO: 1463597 - DNA, 15 bp, Homo sapiens
aattcttattggatg

SEQ ID NO: 1463598 - DNA, 15 bp, Homo sapiens
attcttattggatgc

SEQ ID NO: 1463599 - DNA, 15 bp, Homo sapiens
ttcttattggatgca

SEQ ID NO: 1463600 - DNA, 15 bp, Homo sapiens
tcttattggatgcac

SEQ ID NO: 1463601 - DNA, 15 bp, Homo sapiens
cttattggatgcact

SEQ ID NO: 1463602 - DNA, 15 bp, Homo sapiens
ttattggatgcactt

SEQ ID NO: 1463603 - DNA, 15 bp, Homo sapiens
tattggatgcacttt

SEQ ID NO: 1463604 - DNA, 15 bp, Homo sapiens
attggatgcactttt

SEQ ID NO: 1463605 - DNA, 15 bp, Homo sapiens
ttggatgcacttttt

SEQ ID NO: 1463606 - DNA, 15 bp, Homo sapiens
tggatgcacttttta

SEQ ID NO: 1463607 - DNA, 15 bp, Homo sapiens
ggatgcactttttaa

SEQ ID NO: 1463608 - DNA, 15 bp, Homo sapiens
gatgcactttttaat

SEQ ID NO: 1463609 - DNA, 15 bp, Homo sapiens
atgcactttttaatg

SEQ ID NO: 1463610 - DNA, 15 bp, Homo sapiens
tgcactttttaatgg

SEQ ID NO: 1463611 - DNA, 15 bp, Homo sapiens
gcactttttaatggt

SEQ ID NO: 1463612 - DNA, 15 bp, Homo sapiens
cactttttaatggtt

SEQ ID NO: 1463613 - DNA, 15 bp, Homo sapiens
actttttaatggttg

SEQ ID NO: 1463614 - DNA, 15 bp, Homo sapiens
ctttttaatggttgg

SEQ ID NO: 1463615 - DNA, 15 bp, Homo sapiens
tttttaatggttggt

SEQ ID NO: 1463616 - DNA, 15 bp, Homo sapiens
ttttaatggttggtt

SEQ ID NO: 1463617 - DNA, 15 bp, Homo sapiens
tttaatggttggttt

SEQ ID NO: 1463618 - DNA, 15 bp, Homo sapiens
ttaatggttggtttg

SEQ ID NO: 1463619 - DNA, 15 bp, Homo sapiens
taatggttggtttgc

SEQ ID NO: 1463620 - DNA, 15 bp, Homo sapiens
aatggttggtttgcc

SEQ ID NO: 1463621 - DNA, 15 bp, Homo sapiens
atggttggtttgcct

SEQ ID NO: 1463622 - DNA, 15 bp, Homo sapiens
tggttggtttgcctc

SEQ ID NO: 1463623 - DNA, 15 bp, Homo sapiens
ggttggtttgcctcg

SEQ ID NO: 1463624 - DNA, 15 bp, Homo sapiens
gttggtttgcctcgg

SEQ ID NO: 1463625 - DNA, 15 bp, Homo sapiens
ttggtttgcctcggt

SEQ ID NO: 1463626 - DNA, 15 bp, Homo sapiens
tggtttgcctcggtt

SEQ ID NO: 1463627 - DNA, 15 bp, Homo sapiens
ggtttgcctcggttt

SEQ ID NO: 1463628 - DNA, 15 bp, Homo sapiens
gtttgcctcggtttt

SEQ ID NO: 1463629 - DNA, 15 bp, Homo sapiens
tttgcctcggttttc

SEQ ID NO: 1463630 - DNA, 15 bp, Homo sapiens
ttgcctcggttttcg

SEQ ID NO: 1463631 - DNA, 15 bp, Homo sapiens
tgcctcggttttcgt

SEQ ID NO: 1463632 - DNA, 15 bp, Homo sapiens
gcctcggttttcgtc

SEQ ID NO: 1463633 - DNA, 15 bp, Homo sapiens
cctcggttttcgtcc

SEQ ID NO: 1463634 - DNA, 15 bp, Homo sapiens
ctcggttttcgtccg

SEQ ID NO: 1463635 - DNA, 15 bp, Homo sapiens
tcggttttcgtccga

SEQ ID NO: 1463636 - DNA, 15 bp, Homo sapiens
cggttttcgtccgag

SEQ ID NO: 1463637 - DNA, 15 bp, Homo sapiens
ggttttcgtccgagt

SEQ ID NO: 1463638 - DNA, 15 bp, Homo sapiens
gttttcgtccgagtc

SEQ ID NO: 1463639 - DNA, 15 bp, Homo sapiens
ttttcgtccgagtct

SEQ ID NO: 1463640 - DNA, 15 bp, Homo sapiens
tttcgtccgagtctt

SEQ ID NO: 1463641 - DNA, 15 bp, Homo sapiens
ttcgtccgagtcttc

SEQ ID NO: 1463642 - DNA, 15 bp, Homo sapiens
tcgtccgagtcttcc

SEQ ID NO: 1463643 - DNA, 15 bp, Homo sapiens
cgtccgagtcttccc

SEQ ID NO: 1463644 - DNA, 15 bp, Homo sapiens
gtccgagtcttcccc

SEQ ID NO: 1463645 - DNA, 15 bp, Homo sapiens
tccgagtcttccccg

SEQ ID NO: 1463646 - DNA, 15 bp, Homo sapiens
ccgagtcttccccgg

SEQ ID NO: 1463647 - DNA, 15 bp, Homo sapiens
cgagtcttccccggc

SEQ ID NO: 1463648 - DNA, 15 bp, Homo sapiens
gagtcttccccggca

SEQ ID NO: 1463649 - DNA, 15 bp, Homo sapiens
agtcttccccggcag

SEQ ID NO: 1463650 - DNA, 15 bp, Homo sapiens
gtcttccccggcagt

SEQ ID NO: 1463651 - DNA, 15 bp, Homo sapiens
tcttccccggcagta

SEQ ID NO: 1463652 - DNA, 15 bp, Homo sapiens
cttccccggcagtag

SEQ ID NO: 1463653 - DNA, 15 bp, Homo sapiens
ttccccggcagtagg

SEQ ID NO: 1463654 - DNA, 15 bp, Homo sapiens
tccccggcagtaggc

SEQ ID NO: 1463655 - DNA, 15 bp, Homo sapiens
ccccggcagtaggcg

SEQ ID NO: 1463656 - DNA, 15 bp, Homo sapiens
cccggcagtaggcgc

SEQ ID NO: 1463657 - DNA, 15 bp, Homo sapiens
ccggcagtaggcgct

SEQ ID NO: 1463658 - DNA, 15 bp, Homo sapiens
cggcagtaggcgctg

SEQ ID NO: 1463659 - DNA, 15 bp, Homo sapiens
ggcagtaggcgctgg

SEQ ID NO: 1463660 - DNA, 15 bp, Homo sapiens
gcagtaggcgctggg

SEQ ID NO: 1463661 - DNA, 15 bp, Homo sapiens
cagtaggcgctgggt

SEQ ID NO: 1463662 - DNA, 15 bp, Homo sapiens
agtaggcgctgggtt

SEQ ID NO: 1463663 - DNA, 15 bp, Homo sapiens
gtaggcgctgggtta

SEQ ID NO: 1463664 - DNA, 15 bp, Homo sapiens
taggcgctgggttac

SEQ ID NO: 1463665 - DNA, 15 bp, Homo sapiens
aggcgctgggttacc

SEQ ID NO: 1463666 - DNA, 15 bp, Homo sapiens
ggcgctgggttaccc

SEQ ID NO: 1463667 - DNA, 15 bp, Homo sapiens
gcgctgggttacccg

SEQ ID NO: 1463668 - DNA, 15 bp, Homo sapiens
cgctgggttacccgc

SEQ ID NO: 1463669 - DNA, 15 bp, Homo sapiens
gctgggttacccgca

SEQ ID NO: 1463670 - DNA, 15 bp, Homo sapiens
ctgggttacccgcag

SEQ ID NO: 1463671 - DNA, 15 bp, Homo sapiens
tgggttacccgcagc

SEQ ID NO: 1463672 - DNA, 15 bp, Homo sapiens
gggttacccgcagcc

SEQ ID NO: 1463673 - DNA, 15 bp, Homo sapiens
ggttacccgcagccc

SEQ ID NO: 1463674 - DNA, 15 bp, Homo sapiens
gttacccgcagccct

SEQ ID NO: 1463675 - DNA, 15 bp, Homo sapiens
ttacccgcagcccta

SEQ ID NO: 1463676 - DNA, 15 bp, Homo sapiens
tacccgcagccctag

SEQ ID NO: 1463677 - DNA, 15 bp, Homo sapiens
acccgcagccctagc

SEQ ID NO: 1463678 - DNA, 15 bp, Homo sapiens
cccgcagccctagcc

SEQ ID NO: 1463679 - DNA, 15 bp, Homo sapiens
ccgcagccctagcca

SEQ ID NO: 1463680 - DNA, 15 bp, Homo sapiens
cgcagccctagccaa

SEQ ID NO: 1463681 - DNA, 15 bp, Homo sapiens
gcagccctagccaac

SEQ ID NO: 1463682 - DNA, 15 bp, Homo sapiens
cagccctagccaact

SEQ ID NO: 1463683 - DNA, 15 bp, Homo sapiens
agccctagccaactc

SEQ ID NO: 1463684 - DNA, 15 bp, Homo sapiens
gccctagccaactct

SEQ ID NO: 1463685 - DNA, 15 bp, Homo sapiens
ccctagccaactctc

SEQ ID NO: 1463686 - DNA, 15 bp, Homo sapiens
cctagccaactctcc

SEQ ID NO: 1463687 - DNA, 15 bp, Homo sapiens
ctagccaactctccc

SEQ ID NO: 1463688 - DNA, 15 bp, Homo sapiens
tagccaactctccct

SEQ ID NO: 1463689 - DNA, 15 bp, Homo sapiens
agccaactctccctc

SEQ ID NO: 1463690 - DNA, 15 bp, Homo sapiens
gccaactctccctcc

SEQ ID NO: 1463691 - DNA, 15 bp, Homo sapiens
ccaactctccctcca

SEQ ID NO: 1463692 - DNA, 15 bp, Homo sapiens
caactctccctccat

SEQ ID NO: 1463693 - DNA, 15 bp, Homo sapiens
aactctccctccata

SEQ ID NO: 1463694 - DNA, 15 bp, Homo sapiens
actctccctccatac

SEQ ID NO: 1463695 - DNA, 15 bp, Homo sapiens
ctctccctccatacc

SEQ ID NO: 1463696 - DNA, 15 bp, Homo sapiens
tctccctccataccc

SEQ ID NO: 1463697 - DNA, 15 bp, Homo sapiens
ctccctccatacccc

SEQ ID NO: 1463698 - DNA, 15 bp, Homo sapiens
tccctccataccccc

SEQ ID NO: 1463699 - DNA, 15 bp, Homo sapiens
ccctccatacccccc

SEQ ID NO: 1463700 - DNA, 15 bp, Homo sapiens
cctccataccccccc

SEQ ID NO: 1463701 - DNA, 15 bp, Homo sapiens
ctccataccccccct

SEQ ID NO: 1463702 - DNA, 15 bp, Homo sapiens
tccatacccccccta

SEQ ID NO: 1463703 - DNA, 15 bp, Homo sapiens
ccataccccccctac

SEQ ID NO: 1463704 - DNA, 15 bp, Homo sapiens
cataccccccctacc

SEQ ID NO: 1463705 - DNA, 15 bp, Homo sapiens
ataccccccctaccc

SEQ ID NO: 1463706 - DNA, 15 bp, Homo sapiens
taccccccctacccc

SEQ ID NO: 1463707 - DNA, 15 bp, Homo sapiens
accccccctacccca

SEQ ID NO: 1463708 - DNA, 15 bp, Homo sapiens
ccccccctaccccac

SEQ ID NO: 1463709 - DNA, 15 bp, Homo sapiens
cccccctaccccacc

SEQ ID NO: 1463710 - DNA, 15 bp, Homo sapiens
ccccctaccccaccc

SEQ ID NO: 1463711 - DNA, 15 bp, Homo sapiens
cccctaccccacccc

SEQ ID NO: 1463712 - DNA, 15 bp, Homo sapiens
ccctaccccaccccc

SEQ ID NO: 1463713 - DNA, 15 bp, Homo sapiens
cctaccccaccccca

SEQ ID NO: 1463714 - DNA, 15 bp, Homo sapiens
ctaccccacccccaa

SEQ ID NO: 1463715 - DNA, 15 bp, Homo sapiens
taccccacccccaaa

SEQ ID NO: 1463716 - DNA, 15 bp, Homo sapiens
accccacccccaaaa

SEQ ID NO: 1463717 - DNA, 15 bp, Homo sapiens
ccccacccccaaaaa

SEQ ID NO: 1463718 - DNA, 15 bp, Homo sapiens
cccacccccaaaaag

SEQ ID NO: 1463719 - DNA, 15 bp, Homo sapiens
ccacccccaaaaagt

SEQ ID NO: 1463720 - DNA, 15 bp, Homo sapiens
cacccccaaaaagtt

SEQ ID NO: 1463721 - DNA, 15 bp, Homo sapiens
acccccaaaaagttt

SEQ ID NO: 1463722 - DNA, 15 bp, Homo sapiens
cccccaaaaagtttg

SEQ ID NO: 1463723 - DNA, 15 bp, Homo sapiens
ccccaaaaagtttgt

SEQ ID NO: 1463724 - DNA, 15 bp, Homo sapiens
cccaaaaagtttgtc

SEQ ID NO: 1463725 - DNA, 15 bp, Homo sapiens
ccaaaaagtttgtct

SEQ ID NO: 1463726 - DNA, 15 bp, Homo sapiens
caaaaagtttgtctc

SEQ ID NO: 1463727 - DNA, 15 bp, Homo sapiens
aaaaagtttgtctcc

SEQ ID NO: 1463728 - DNA, 15 bp, Homo sapiens
aaaagtttgtctccg

SEQ ID NO: 1463729 - DNA, 15 bp, Homo sapiens
aaagtttgtctccgg

SEQ ID NO: 1463730 - DNA, 15 bp, Homo sapiens
aagtttgtctccggc

SEQ ID NO: 1463731 - DNA, 15 bp, Homo sapiens
agtttgtctccggct

SEQ ID NO: 1463732 - DNA, 15 bp, Homo sapiens
gtttgtctccggctg

SEQ ID NO: 1463733 - DNA, 15 bp, Homo sapiens
tttgtctccggctgg

SEQ ID NO: 1463734 - DNA, 15 bp, Homo sapiens
ttgtctccggctgga

SEQ ID NO: 1463735 - DNA, 15 bp, Homo sapiens
tgtctccggctggaa

SEQ ID NO: 1463736 - DNA, 15 bp, Homo sapiens
gtctccggctggaaa

SEQ ID NO: 1463737 - DNA, 15 bp, Homo sapiens
tctccggctggaaaa

SEQ ID NO: 1463738 - DNA, 15 bp, Homo sapiens
ctccggctggaaaaa

SEQ ID NO: 1463739 - DNA, 15 bp, Homo sapiens
tccggctggaaaaag

SEQ ID NO: 1463740 - DNA, 15 bp, Homo sapiens
ccggctggaaaaagc

SEQ ID NO: 1463741 - DNA, 15 bp, Homo sapiens
cggctggaaaaagca

SEQ ID NO: 1463742 - DNA, 15 bp, Homo sapiens
ggctggaaaaagcat

SEQ ID NO: 1463743 - DNA, 15 bp, Homo sapiens
gctggaaaaagcatt

SEQ ID NO: 1463744 - DNA, 15 bp, Homo sapiens
ctggaaaaagcatta

SEQ ID NO: 1463745 - DNA, 15 bp, Homo sapiens
tggaaaaagcattaa

SEQ ID NO: 1463746 - DNA, 15 bp, Homo sapiens
ggaaaaagcattaat

SEQ ID NO: 1463747 - DNA, 15 bp, Homo sapiens
gaaaaagcattaatg

SEQ ID NO: 1463748 - DNA, 15 bp, Homo sapiens
aaaaagcattaatga

SEQ ID NO: 1463749 - DNA, 15 bp, Homo sapiens
aaaagcattaatgaa

SEQ ID NO: 1463750 - DNA, 15 bp, Homo sapiens
aaagcattaatgaac

SEQ ID NO: 1463751 - DNA, 15 bp, Homo sapiens
aagcattaatgaacg

SEQ ID NO: 1463752 - DNA, 15 bp, Homo sapiens
agcattaatgaacgt

SEQ ID NO: 1463753 - DNA, 15 bp, Homo sapiens
gcattaatgaacgta

SEQ ID NO: 1463754 - DNA, 15 bp, Homo sapiens
cattaatgaacgtat

SEQ ID NO: 1463755 - DNA, 15 bp, Homo sapiens
attaatgaacgtatc

SEQ ID NO: 1463756 - DNA, 15 bp, Homo sapiens
ttaatgaacgtatct

SEQ ID NO: 1463757 - DNA, 15 bp, Homo sapiens
taatgaacgtatctg

SEQ ID NO: 1463758 - DNA, 15 bp, Homo sapiens
aatgaacgtatctgt

SEQ ID NO: 1463759 - DNA, 15 bp, Homo sapiens
atgaacgtatctgtg

SEQ ID NO: 1463760 - DNA, 15 bp, Homo sapiens
tgaacgtatctgtgg

SEQ ID NO: 1463761 - DNA, 15 bp, Homo sapiens
gaacgtatctgtggg

SEQ ID NO: 1463762 - DNA, 15 bp, Homo sapiens
aacgtatctgtggga

SEQ ID NO: 1463763 - DNA, 15 bp, Homo sapiens
acgtatctgtgggaa

SEQ ID NO: 1463764 - DNA, 15 bp, Homo sapiens
cgtatctgtgggaag

SEQ ID NO: 1463765 - DNA, 15 bp, Homo sapiens
gtatctgtgggaaga

SEQ ID NO: 1463766 - DNA, 15 bp, Homo sapiens
tatctgtgggaagaa

SEQ ID NO: 1463767 - DNA, 15 bp, Homo sapiens
atctgtgggaagaaa

SEQ ID NO: 1463768 - DNA, 15 bp, Homo sapiens
tctgtgggaagaaac

SEQ ID NO: 1463769 - DNA, 15 bp, Homo sapiens
ctgtgggaagaaacg

SEQ ID NO: 1463770 - DNA, 15 bp, Homo sapiens
tgtgggaagaaacgg

SEQ ID NO: 1463771 - DNA, 15 bp, Homo sapiens
gtgggaagaaacgga

SEQ ID NO: 1463772 - DNA, 15 bp, Homo sapiens
tgggaagaaacggaa

SEQ ID NO: 1463773 - DNA, 15 bp, Homo sapiens
gggaagaaacggaaa

SEQ ID NO: 1463774 - DNA, 15 bp, Homo sapiens
ggaagaaacggaaag

SEQ ID NO: 1463775 - DNA, 15 bp, Homo sapiens
gaagaaacggaaagt

SEQ ID NO: 1463776 - DNA, 15 bp, Homo sapiens
aagaaacggaaagtg

SEQ ID NO: 1463777 - DNA, 15 bp, Homo sapiens
agaaacggaaagtga

SEQ ID NO: 1463778 - DNA, 15 bp, Homo sapiens
gaaacggaaagtgaa

SEQ ID NO: 1463779 - DNA, 15 bp, Homo sapiens
aaacggaaagtgaat

SEQ ID NO: 1463780 - DNA, 15 bp, Homo sapiens
aacggaaagtgaatg

SEQ ID NO: 1463781 - DNA, 15 bp, Homo sapiens
acggaaagtgaatga

SEQ ID NO: 1463782 - DNA, 15 bp, Homo sapiens
cggaaagtgaatgag

SEQ ID NO: 1463783 - DNA, 15 bp, Homo sapiens
ggaaagtgaatgagt

SEQ ID NO: 1463784 - DNA, 15 bp, Homo sapiens
gaaagtgaatgagtc

SEQ ID NO: 1463785 - DNA, 15 bp, Homo sapiens
aaagtgaatgagtca

SEQ ID NO: 1463786 - DNA, 15 bp, Homo sapiens
aagtgaatgagtcag

SEQ ID NO: 1463787 - DNA, 15 bp, Homo sapiens
agtgaatgagtcagg

SEQ ID NO: 1463788 - DNA, 15 bp, Homo sapiens
gtgaatgagtcagga

SEQ ID NO: 1463789 - DNA, 15 bp, Homo sapiens
tgaatgagtcaggag

SEQ ID NO: 1463790 - DNA, 15 bp, Homo sapiens
gaatgagtcaggagg

SEQ ID NO: 1463791 - DNA, 15 bp, Homo sapiens
aatgagtcaggaggg

SEQ ID NO: 1463792 - DNA, 15 bp, Homo sapiens
atgagtcaggagggc

SEQ ID NO: 1463793 - DNA, 15 bp, Homo sapiens
tgagtcaggagggcc

SEQ ID NO: 1463794 - DNA, 15 bp, Homo sapiens
gagtcaggagggcca

SEQ ID NO: 1463795 - DNA, 15 bp, Homo sapiens
agtcaggagggccac

SEQ ID NO: 1463796 - DNA, 15 bp, Homo sapiens
gtcaggagggccacc

SEQ ID NO: 1463797 - DNA, 15 bp, Homo sapiens
tcaggagggccacct

SEQ ID NO: 1463798 - DNA, 15 bp, Homo sapiens
caggagggccacctt

SEQ ID NO: 1463799 - DNA, 15 bp, Homo sapiens
aggagggccaccttc

SEQ ID NO: 1463800 - DNA, 15 bp, Homo sapiens
ggagggccaccttcg

SEQ ID NO: 1463801 - DNA, 15 bp, Homo sapiens
gagggccaccttcgg

SEQ ID NO: 1463802 - DNA, 15 bp, Homo sapiens
agggccaccttcggc

SEQ ID NO: 1463803 - DNA, 15 bp, Homo sapiens
gggccaccttcggcc

SEQ ID NO: 1463804 - DNA, 15 bp, Homo sapiens
ggccaccttcggcca

SEQ ID NO: 1463805 - DNA, 15 bp, Homo sapiens
gccaccttcggccaa

SEQ ID NO: 1463806 - DNA, 15 bp, Homo sapiens
ccaccttcggccaac

SEQ ID NO: 1463807 - DNA, 15 bp, Homo sapiens
caccttcggccaacc

SEQ ID NO: 1463808 - DNA, 15 bp, Homo sapiens
accttcggccaaccg

SEQ ID NO: 1463809 - DNA, 15 bp, Homo sapiens
ccttcggccaaccgc

SEQ ID NO: 1463810 - DNA, 15 bp, Homo sapiens
cttcggccaaccgcc

SEQ ID NO: 1463811 - DNA, 15 bp, Homo sapiens
ttcggccaaccgcct

SEQ ID NO: 1463812 - DNA, 15 bp, Homo sapiens
tcggccaaccgcctc

SEQ ID NO: 1463813 - DNA, 15 bp, Homo sapiens
cggccaaccgcctca

SEQ ID NO: 1463814 - DNA, 15 bp, Homo sapiens
ggccaaccgcctcag

SEQ ID NO: 1463815 - DNA, 15 bp, Homo sapiens
gccaaccgcctcagg

SEQ ID NO: 1463816 - DNA, 15 bp, Homo sapiens
ccaaccgcctcagga

SEQ ID NO: 1463817 - DNA, 15 bp, Homo sapiens
caaccgcctcaggaa

SEQ ID NO: 1463818 - DNA, 15 bp, Homo sapiens
aaccgcctcaggaaa

SEQ ID NO: 1463819 - DNA, 15 bp, Homo sapiens
accgcctcaggaaaa

SEQ ID NO: 1463820 - DNA, 15 bp, Homo sapiens
ccgcctcaggaaaag

SEQ ID NO: 1463821 - DNA, 15 bp, Homo sapiens
cgcctcaggaaaagc

SEQ ID NO: 1463822 - DNA, 15 bp, Homo sapiens
gcctcaggaaaagca

SEQ ID NO: 1463823 - DNA, 15 bp, Homo sapiens
cctcaggaaaagcaa

SEQ ID NO: 1463824 - DNA, 15 bp, Homo sapiens
ctcaggaaaagcaaa

SEQ ID NO: 1463825 - DNA, 15 bp, Homo sapiens
tcaggaaaagcaaag

SEQ ID NO: 1463826 - DNA, 15 bp, Homo sapiens
caggaaaagcaaaga

SEQ ID NO: 1463827 - DNA, 15 bp, Homo sapiens
aggaaaagcaaagaa

SEQ ID NO: 1463828 - DNA, 15 bp, Homo sapiens
ggaaaagcaaagaag

SEQ ID NO: 1463829 - DNA, 15 bp, Homo sapiens
gaaaagcaaagaagc

SEQ ID NO: 1463830 - DNA, 15 bp, Homo sapiens
aaaagcaaagaagcc

SEQ ID NO: 1463831 - DNA, 15 bp, Homo sapiens
aaagcaaagaagcca

SEQ ID NO: 1463832 - DNA, 15 bp, Homo sapiens
aagcaaagaagccaa

SEQ ID NO: 1463833 - DNA, 15 bp, Homo sapiens
agcaaagaagccaaa

SEQ ID NO: 1463834 - DNA, 15 bp, Homo sapiens
gcaaagaagccaaag

SEQ ID NO: 1463835 - DNA, 15 bp, Homo sapiens
caaagaagccaaagg

SEQ ID NO: 1463836 - DNA, 15 bp, Homo sapiens
aaagaagccaaaggt

SEQ ID NO: 1463837 - DNA, 15 bp, Homo sapiens
aagaagccaaaggtc

SEQ ID NO: 1463838 - DNA, 15 bp, Homo sapiens
agaagccaaaggtct

SEQ ID NO: 1463839 - DNA, 15 bp, Homo sapiens
gaagccaaaggtctt

SEQ ID NO: 1463840 - DNA, 15 bp, Homo sapiens
aagccaaaggtcttt

SEQ ID NO: 1463841 - DNA, 15 bp, Homo sapiens
agccaaaggtctttg

SEQ ID NO: 1463842 - DNA, 15 bp, Homo sapiens
gccaaaggtctttgg

SEQ ID NO: 1463843 - DNA, 15 bp, Homo sapiens
ccaaaggtctttggc

SEQ ID NO: 1463844 - DNA, 15 bp, Homo sapiens
caaaggtctttggct

SEQ ID NO: 1463845 - DNA, 15 bp, Homo sapiens
aaaggtctttggctt

SEQ ID NO: 1463846 - DNA, 15 bp, Homo sapiens
aaggtctttggcttt

SEQ ID NO: 1463847 - DNA, 15 bp, Homo sapiens
aggtctttggctttg

SEQ ID NO: 1463848 - DNA, 15 bp, Homo sapiens
ggtctttggctttgg

SEQ ID NO: 1463849 - DNA, 15 bp, Homo sapiens
gtctttggctttgga

SEQ ID NO: 1463850 - DNA, 15 bp, Homo sapiens
tctttggctttggat

SEQ ID NO: 1463851 - DNA, 15 bp, Homo sapiens
ctttggctttggatt

SEQ ID NO: 1463852 - DNA, 15 bp, Homo sapiens
tttggctttggattt

SEQ ID NO: 1463853 - DNA, 15 bp, Homo sapiens
ttggctttggatttt

SEQ ID NO: 1463854 - DNA, 15 bp, Homo sapiens
tggctttggattttg

SEQ ID NO: 1463855 - DNA, 15 bp, Homo sapiens
ggctttggattttgg

SEQ ID NO: 1463856 - DNA, 15 bp, Homo sapiens
gctttggattttggg

SEQ ID NO: 1463857 - DNA, 15 bp, Homo sapiens
ctttggattttgggg

SEQ ID NO: 1463858 - DNA, 15 bp, Homo sapiens
tttggattttggggg

SEQ ID NO: 1463859 - DNA, 15 bp, Homo sapiens
ttggattttggggga

SEQ ID NO: 1463860 - DNA, 15 bp, Homo sapiens
tggattttgggggaa

SEQ ID NO: 1463861 - DNA, 15 bp, Homo sapiens
ggattttgggggaag

SEQ ID NO: 1463862 - DNA, 15 bp, Homo sapiens
gattttgggggaagg

SEQ ID NO: 1463863 - DNA, 15 bp, Homo sapiens
attttgggggaaggt

SEQ ID NO: 1463864 - DNA, 15 bp, Homo sapiens
ttttgggggaaggtg

SEQ ID NO: 1463865 - DNA, 15 bp, Homo sapiens
tttgggggaaggtga

SEQ ID NO: 1463866 - DNA, 15 bp, Homo sapiens
ttgggggaaggtgat

SEQ ID NO: 1463867 - DNA, 15 bp, Homo sapiens
tgggggaaggtgatg

SEQ ID NO: 1463868 - DNA, 15 bp, Homo sapiens
gggggaaggtgatgg

SEQ ID NO: 1463869 - DNA, 15 bp, Homo sapiens
ggggaaggtgatggg

SEQ ID NO: 1463870 - DNA, 15 bp, Homo sapiens
gggaaggtgatgggg

SEQ ID NO: 1463871 - DNA, 15 bp, Homo sapiens
ggaaggtgatggggg

SEQ ID NO: 1463872 - DNA, 15 bp, Homo sapiens
gaaggtgatgggggg

SEQ ID NO: 1463873 - DNA, 15 bp, Homo sapiens
aaggtgatgggggga

SEQ ID NO: 1463874 - DNA, 15 bp, Homo sapiens
aggtgatggggggag

SEQ ID NO: 1463875 - DNA, 15 bp, Homo sapiens
ggtgatggggggagg

SEQ ID NO: 1463876 - DNA, 15 bp, Homo sapiens
gtgatggggggaggt

SEQ ID NO: 1463877 - DNA, 15 bp, Homo sapiens
tgatggggggaggtt

SEQ ID NO: 1463878 - DNA, 15 bp, Homo sapiens
gatggggggaggttc

SEQ ID NO: 1463879 - DNA, 15 bp, Homo sapiens
atggggggaggttca

SEQ ID NO: 1463880 - DNA, 15 bp, Homo sapiens
tggggggaggttcag

SEQ ID NO: 1463881 - DNA, 15 bp, Homo sapiens
ggggggaggttcaga

SEQ ID NO: 1463882 - DNA, 15 bp, Homo sapiens
gggggaggttcagac

SEQ ID NO: 1463883 - DNA, 15 bp, Homo sapiens
ggggaggttcagact

SEQ ID NO: 1463884 - DNA, 15 bp, Homo sapiens
gggaggttcagactt

SEQ ID NO: 1463885 - DNA, 15 bp, Homo sapiens
ggaggttcagacttc

SEQ ID NO: 1463886 - DNA, 15 bp, Homo sapiens
gaggttcagacttcg

SEQ ID NO: 1463887 - DNA, 15 bp, Homo sapiens
aggttcagacttcgg

SEQ ID NO: 1463888 - DNA, 15 bp, Homo sapiens
ggttcagacttcggg

SEQ ID NO: 1463889 - DNA, 15 bp, Homo sapiens
gttcagacttcggga

SEQ ID NO: 1463890 - DNA, 15 bp, Homo sapiens
ttcagacttcgggaa

SEQ ID NO: 1463891 - DNA, 15 bp, Homo sapiens
tcagacttcgggaat

SEQ ID NO: 1463892 - DNA, 15 bp, Homo sapiens
cagacttcgggaatc

SEQ ID NO: 1463893 - DNA, 15 bp, Homo sapiens
agacttcgggaatca

SEQ ID NO: 1463894 - DNA, 15 bp, Homo sapiens
gacttcgggaatcag

SEQ ID NO: 1463895 - DNA, 15 bp, Homo sapiens
acttcgggaatcagg

SEQ ID NO: 1463896 - DNA, 15 bp, Homo sapiens
cttcgggaatcaggg

SEQ ID NO: 1463897 - DNA, 15 bp, Homo sapiens
ttcgggaatcagggc

SEQ ID NO: 1463898 - DNA, 15 bp, Homo sapiens
tcgggaatcagggcg

SEQ ID NO: 1463899 - DNA, 15 bp, Homo sapiens
cgggaatcagggcgc

SEQ ID NO: 1463900 - DNA, 15 bp, Homo sapiens
gggaatcagggcgcg

SEQ ID NO: 1463901 - DNA, 15 bp, Homo sapiens
ggaatcagggcgcgg

SEQ ID NO: 1463902 - DNA, 15 bp, Homo sapiens
gaatcagggcgcgga

SEQ ID NO: 1463903 - DNA, 15 bp, Homo sapiens
aatcagggcgcggac

SEQ ID NO: 1463904 - DNA, 15 bp, Homo sapiens
atcagggcgcggacg

SEQ ID NO: 1463905 - DNA, 15 bp, Homo sapiens
tcagggcgcggacgc

SEQ ID NO: 1463906 - DNA, 15 bp, Homo sapiens
cagggcgcggacgct

SEQ ID NO: 1463907 - DNA, 15 bp, Homo sapiens
agggcgcggacgctg

SEQ ID NO: 1463908 - DNA, 15 bp, Homo sapiens
gggcgcggacgctgg

SEQ ID NO: 1463909 - DNA, 15 bp, Homo sapiens
ggcgcggacgctggg

SEQ ID NO: 1463910 - DNA, 15 bp, Homo sapiens
gcgcggacgctgggc

SEQ ID NO: 1463911 - DNA, 15 bp, Homo sapiens
cgcggacgctgggcg

SEQ ID NO: 1463912 - DNA, 15 bp, Homo sapiens
gcggacgctgggcgt

SEQ ID NO: 1463913 - DNA, 15 bp, Homo sapiens
cggacgctgggcgtg

SEQ ID NO: 1463914 - DNA, 15 bp, Homo sapiens
ggacgctgggcgtgg

SEQ ID NO: 1463915 - DNA, 15 bp, Homo sapiens
gacgctgggcgtgga

SEQ ID NO: 1463916 - DNA, 15 bp, Homo sapiens
acgctgggcgtggac

SEQ ID NO: 1463917 - DNA, 15 bp, Homo sapiens
cgctgggcgtggacc

SEQ ID NO: 1463918 - DNA, 15 bp, Homo sapiens
gctgggcgtggaccc

SEQ ID NO: 1463919 - DNA, 15 bp, Homo sapiens
ctgggcgtggacccc

SEQ ID NO: 1463920 - DNA, 15 bp, Homo sapiens
tgggcgtggaccccg

SEQ ID NO: 1463921 - DNA, 15 bp, Homo sapiens
gggcgtggaccccgt

SEQ ID NO: 1463922 - DNA, 15 bp, Homo sapiens
ggcgtggaccccgtc

SEQ ID NO: 1463923 - DNA, 15 bp, Homo sapiens
gcgtggaccccgtca

SEQ ID NO: 1463924 - DNA, 15 bp, Homo sapiens
cgtggaccccgtcat

SEQ ID NO: 1463925 - DNA, 15 bp, Homo sapiens
gtggaccccgtcatt

SEQ ID NO: 1463926 - DNA, 15 bp, Homo sapiens
tggaccccgtcattg

SEQ ID NO: 1463927 - DNA, 15 bp, Homo sapiens
ggaccccgtcattgt

SEQ ID NO: 1463928 - DNA, 15 bp, Homo sapiens
gaccccgtcattgtt

SEQ ID NO: 1463929 - DNA, 15 bp, Homo sapiens
accccgtcattgttc

SEQ ID NO: 1463930 - DNA, 15 bp, Homo sapiens
ccccgtcattgttcc

SEQ ID NO: 1463931 - DNA, 15 bp, Homo sapiens
cccgtcattgttccc

SEQ ID NO: 1463932 - DNA, 15 bp, Homo sapiens
ccgtcattgttcccg

SEQ ID NO: 1463933 - DNA, 15 bp, Homo sapiens
cgtcattgttcccgg

SEQ ID NO: 1463934 - DNA, 15 bp, Homo sapiens
gtcattgttcccggc

SEQ ID NO: 1463935 - DNA, 15 bp, Homo sapiens
tcattgttcccggct

SEQ ID NO: 1463936 - DNA, 15 bp, Homo sapiens
cattgttcccggcta

SEQ ID NO: 1463937 - DNA, 15 bp, Homo sapiens
attgttcccggctag

SEQ ID NO: 1463938 - DNA, 15 bp, Homo sapiens
ttgttcccggctagc

SEQ ID NO: 1463939 - DNA, 15 bp, Homo sapiens
tgttcccggctagct

SEQ ID NO: 1463940 - DNA, 15 bp, Homo sapiens
gttcccggctagctc

SEQ ID NO: 1463941 - DNA, 15 bp, Homo sapiens
ttcccggctagctct

SEQ ID NO: 1463942 - DNA, 15 bp, Homo sapiens
tcccggctagctctt

SEQ ID NO: 1463943 - DNA, 15 bp, Homo sapiens
cccggctagctctta

SEQ ID NO: 1463944 - DNA, 15 bp, Homo sapiens
ccggctagctcttat

SEQ ID NO: 1463945 - DNA, 15 bp, Homo sapiens
cggctagctcttatc

SEQ ID NO: 1463946 - DNA, 15 bp, Homo sapiens
ggctagctcttatct

SEQ ID NO: 1463947 - DNA, 15 bp, Homo sapiens
gctagctcttatctc

SEQ ID NO: 1463948 - DNA, 15 bp, Homo sapiens
ctagctcttatctcc

SEQ ID NO: 1463949 - DNA, 15 bp, Homo sapiens
tagctcttatctccc

SEQ ID NO: 1463950 - DNA, 15 bp, Homo sapiens
agctcttatctccca

SEQ ID NO: 1463951 - DNA, 15 bp, Homo sapiens
gctcttatctcccag

SEQ ID NO: 1463952 - DNA, 15 bp, Homo sapiens
ctcttatctcccagg

SEQ ID NO: 1463953 - DNA, 15 bp, Homo sapiens
tcttatctcccagga

SEQ ID NO: 1463954 - DNA, 15 bp, Homo sapiens
cttatctcccaggag

SEQ ID NO: 1463955 - DNA, 15 bp, Homo sapiens
ttatctcccaggagc

SEQ ID NO: 1463956 - DNA, 15 bp, Homo sapiens
tatctcccaggagca

SEQ ID NO: 1463957 - DNA, 15 bp, Homo sapiens
atctcccaggagcaa

SEQ ID NO: 1463958 - DNA, 15 bp, Homo sapiens
tctcccaggagcaag

SEQ ID NO: 1463959 - DNA, 15 bp, Homo sapiens
ctcccaggagcaagt

SEQ ID NO: 1463960 - DNA, 15 bp, Homo sapiens
tcccaggagcaagta

SEQ ID NO: 1463961 - DNA, 15 bp, Homo sapiens
cccaggagcaagtat

SEQ ID NO: 1463962 - DNA, 15 bp, Homo sapiens
ccaggagcaagtatc

SEQ ID NO: 1463963 - DNA, 15 bp, Homo sapiens
caggagcaagtatcc

SEQ ID NO: 1463964 - DNA, 15 bp, Homo sapiens
aggagcaagtatcct

SEQ ID NO: 1463965 - DNA, 15 bp, Homo sapiens
ggagcaagtatcctg

SEQ ID NO: 1463966 - DNA, 15 bp, Homo sapiens
gagcaagtatcctgt

SEQ ID NO: 1463967 - DNA, 15 bp, Homo sapiens
agcaagtatcctgtg

SEQ ID NO: 1463968 - DNA, 15 bp, Homo sapiens
gcaagtatcctgtgt

SEQ ID NO: 1463969 - DNA, 15 bp, Homo sapiens
caagtatcctgtgtg

SEQ ID NO: 1463970 - DNA, 15 bp, Homo sapiens
aagtatcctgtgtgc

SEQ ID NO: 1463971 - DNA, 15 bp, Homo sapiens
agtatcctgtgtgcg

SEQ ID NO: 1463972 - DNA, 15 bp, Homo sapiens
gtatcctgtgtgcgc

SEQ ID NO: 1463973 - DNA, 15 bp, Homo sapiens
tatcctgtgtgcgca

SEQ ID NO: 1463974 - DNA, 15 bp, Homo sapiens
atcctgtgtgcgcag

SEQ ID NO: 1463975 - DNA, 15 bp, Homo sapiens
tcctgtgtgcgcagc

SEQ ID NO: 1463976 - DNA, 15 bp, Homo sapiens
cctgtgtgcgcagcg

SEQ ID NO: 1463977 - DNA, 15 bp, Homo sapiens
ctgtgtgcgcagcgc

SEQ ID NO: 1463978 - DNA, 15 bp, Homo sapiens
tgtgtgcgcagcgca

SEQ ID NO: 1463979 - DNA, 15 bp, Homo sapiens
gtgtgcgcagcgcat

SEQ ID NO: 1463980 - DNA, 15 bp, Homo sapiens
tgtgcgcagcgcatg

SEQ ID NO: 1463981 - DNA, 15 bp, Homo sapiens
gtgcgcagcgcatga

SEQ ID NO: 1463982 - DNA, 15 bp, Homo sapiens
tgcgcagcgcatgaa

SEQ ID NO: 1463983 - DNA, 15 bp, Homo sapiens
gcgcagcgcatgaat

SEQ ID NO: 1463984 - DNA, 15 bp, Homo sapiens
cgcagcgcatgaatg

SEQ ID NO: 1463985 - DNA, 15 bp, Homo sapiens
gcagcgcatgaatgt

SEQ ID NO: 1463986 - DNA, 15 bp, Homo sapiens
cagcgcatgaatgtg

SEQ ID NO: 1463987 - DNA, 15 bp, Homo sapiens
agcgcatgaatgtgt

SEQ ID NO: 1463988 - DNA, 15 bp, Homo sapiens
gcgcatgaatgtgtc

SEQ ID NO: 1463989 - DNA, 15 bp, Homo sapiens
cgcatgaatgtgtct

SEQ ID NO: 1463990 - DNA, 15 bp, Homo sapiens
gcatgaatgtgtctg

SEQ ID NO: 1463991 - DNA, 15 bp, Homo sapiens
catgaatgtgtctgg

SEQ ID NO: 1463992 - DNA, 15 bp, Homo sapiens
atgaatgtgtctggg

SEQ ID NO: 1463993 - DNA, 15 bp, Homo sapiens
tgaatgtgtctgggc

SEQ ID NO: 1463994 - DNA, 15 bp, Homo sapiens
gaatgtgtctgggca

SEQ ID NO: 1463995 - DNA, 15 bp, Homo sapiens
aatgtgtctgggcat

SEQ ID NO: 1463996 - DNA, 15 bp, Homo sapiens
atgtgtctgggcatc

SEQ ID NO: 1463997 - DNA, 15 bp, Homo sapiens
tgtgtctgggcatct

SEQ ID NO: 1463998 - DNA, 15 bp, Homo sapiens
gtgtctgggcatctc

SEQ ID NO: 1463999 - DNA, 15 bp, Homo sapiens
tgtctgggcatctcc

SEQ ID NO: 1464000 - DNA, 15 bp, Homo sapiens
gtctgggcatctccg

SEQ ID NO: 1464001 - DNA, 15 bp, Homo sapiens
tctgggcatctccgc

SEQ ID NO: 1464002 - DNA, 15 bp, Homo sapiens
ctgggcatctccgcg

SEQ ID NO: 1464003 - DNA, 15 bp, Homo sapiens
tgggcatctccgcgt

SEQ ID NO: 1464004 - DNA, 15 bp, Homo sapiens
gggcatctccgcgta

SEQ ID NO: 1464005 - DNA, 15 bp, Homo sapiens
ggcatctccgcgtat

SEQ ID NO: 1464006 - DNA, 15 bp, Homo sapiens
gcatctccgcgtata

SEQ ID NO: 1464007 - DNA, 15 bp, Homo sapiens
catctccgcgtatat

SEQ ID NO: 1464008 - DNA, 15 bp, Homo sapiens
atctccgcgtatatt

SEQ ID NO: 1464009 - DNA, 15 bp, Homo sapiens
tctccgcgtatattt

SEQ ID NO: 1464010 - DNA, 15 bp, Homo sapiens
ctccgcgtatattta

SEQ ID NO: 1464011 - DNA, 15 bp, Homo sapiens
tccgcgtatatttat

SEQ ID NO: 1464012 - DNA, 15 bp, Homo sapiens
ccgcgtatatttata

SEQ ID NO: 1464013 - DNA, 15 bp, Homo sapiens
cgcgtatatttatat

SEQ ID NO: 1464014 - DNA, 15 bp, Homo sapiens
gcgtatatttatata

SEQ ID NO: 1464015 - DNA, 15 bp, Homo sapiens
cgtatatttatatag

SEQ ID NO: 1464016 - DNA, 15 bp, Homo sapiens
gtatatttatatagt

SEQ ID NO: 1464017 - DNA, 15 bp, Homo sapiens
tatatttatatagtg

SEQ ID NO: 1464018 - DNA, 15 bp, Homo sapiens
atatttatatagtgt

SEQ ID NO: 1464019 - DNA, 15 bp, Homo sapiens
tatttatatagtgtg

SEQ ID NO: 1464020 - DNA, 15 bp, Homo sapiens
atttatatagtgtgt

SEQ ID NO: 1464021 - DNA, 15 bp, Homo sapiens
tttatatagtgtgtg

SEQ ID NO: 1464022 - DNA, 15 bp, Homo sapiens
ttatatagtgtgtga

SEQ ID NO: 1464023 - DNA, 15 bp, Homo sapiens
tatatagtgtgtgat

SEQ ID NO: 1464024 - DNA, 15 bp, Homo sapiens
atatagtgtgtgatg

SEQ ID NO: 1464025 - DNA, 15 bp, Homo sapiens
tatagtgtgtgatgc

SEQ ID NO: 1464026 - DNA, 15 bp, Homo sapiens
atagtgtgtgatgcg

SEQ ID NO: 1464027 - DNA, 15 bp, Homo sapiens
tagtgtgtgatgcga

SEQ ID NO: 1464028 - DNA, 15 bp, Homo sapiens
agtgtgtgatgcgaa

SEQ ID NO: 1464029 - DNA, 15 bp, Homo sapiens
gtgtgtgatgcgaaa

SEQ ID NO: 1464030 - DNA, 15 bp, Homo sapiens
tgtgtgatgcgaaaa

SEQ ID NO: 1464031 - DNA, 15 bp, Homo sapiens
gtgtgatgcgaaaag

SEQ ID NO: 1464032 - DNA, 15 bp, Homo sapiens
tgtgatgcgaaaagc

SEQ ID NO: 1464033 - DNA, 15 bp, Homo sapiens
gtgatgcgaaaagca

SEQ ID NO: 1464034 - DNA, 15 bp, Homo sapiens
tgatgcgaaaagcag

SEQ ID NO: 1464035 - DNA, 15 bp, Homo sapiens
gatgcgaaaagcagg

SEQ ID NO: 1464036 - DNA, 15 bp, Homo sapiens
atgcgaaaagcagga

SEQ ID NO: 1464037 - DNA, 15 bp, Homo sapiens
tgcgaaaagcaggac

SEQ ID NO: 1464038 - DNA, 15 bp, Homo sapiens
gcgaaaagcaggacc

SEQ ID NO: 1464039 - DNA, 15 bp, Homo sapiens
cgaaaagcaggacca

SEQ ID NO: 1464040 - DNA, 15 bp, Homo sapiens
gaaaagcaggaccag

SEQ ID NO: 1464041 - DNA, 15 bp, Homo sapiens
aaaagcaggaccagc

SEQ ID NO: 1464042 - DNA, 15 bp, Homo sapiens
aaagcaggaccagca

SEQ ID NO: 1464043 - DNA, 15 bp, Homo sapiens
aagcaggaccagcag

SEQ ID NO: 1464044 - DNA, 15 bp, Homo sapiens
agcaggaccagcagg

SEQ ID NO: 1464045 - DNA, 15 bp, Homo sapiens
gcaggaccagcaggg

SEQ ID NO: 1464046 - DNA, 15 bp, Homo sapiens
caggaccagcagggg

SEQ ID NO: 1464047 - DNA, 15 bp, Homo sapiens
aggaccagcagggga

SEQ ID NO: 1464048 - DNA, 15 bp, Homo sapiens
ggaccagcaggggag

SEQ ID NO: 1464049 - DNA, 15 bp, Homo sapiens
gaccagcaggggagg

SEQ ID NO: 1464050 - DNA, 15 bp, Homo sapiens
accagcaggggagga

SEQ ID NO: 1464051 - DNA, 15 bp, Homo sapiens
ccagcaggggaggaa

SEQ ID NO: 1464052 - DNA, 15 bp, Homo sapiens
cagcaggggaggaag

SEQ ID NO: 1464053 - DNA, 15 bp, Homo sapiens
agcaggggaggaaga

SEQ ID NO: 1464054 - DNA, 15 bp, Homo sapiens
gcaggggaggaagag

SEQ ID NO: 1464055 - DNA, 15 bp, Homo sapiens
caggggaggaagagg

SEQ ID NO: 1464056 - DNA, 15 bp, Homo sapiens
aggggaggaagaggg

SEQ ID NO: 1464057 - DNA, 15 bp, Homo sapiens
ggggaggaagagggg

SEQ ID NO: 1464058 - DNA, 15 bp, Homo sapiens
gggaggaagaggggg

SEQ ID NO: 1464059 - DNA, 15 bp, Homo sapiens
ggaggaagagggggt

SEQ ID NO: 1464060 - DNA, 15 bp, Homo sapiens
gaggaagagggggtg

SEQ ID NO: 1464061 - DNA, 15 bp, Homo sapiens
aggaagagggggtgt

SEQ ID NO: 1464062 - DNA, 15 bp, Homo sapiens
ggaagagggggtgtg

SEQ ID NO: 1464063 - DNA, 15 bp, Homo sapiens
gaagagggggtgtgg

SEQ ID NO: 1464064 - DNA, 15 bp, Homo sapiens
aagagggggtgtggg

SEQ ID NO: 1464065 - DNA, 15 bp, Homo sapiens
agagggggtgtgggg

SEQ ID NO: 1464066 - DNA, 15 bp, Homo sapiens
gagggggtgtggggg

SEQ ID NO: 1464067 - DNA, 15 bp, Homo sapiens
agggggtgtgggggg

SEQ ID NO: 1464068 - DNA, 15 bp, Homo sapiens
gggggtgtggggggg

SEQ ID NO: 1464069 - DNA, 15 bp, Homo sapiens
ggggtgtgggggggg

SEQ ID NO: 1464070 - DNA, 15 bp, Homo sapiens
gggtgtgggggggga

SEQ ID NO: 1464071 - DNA, 15 bp, Homo sapiens
ggtgtggggggggag

SEQ ID NO: 1464072 - DNA, 15 bp, Homo sapiens
gtgtggggggggagg

SEQ ID NO: 1464073 - DNA, 15 bp, Homo sapiens
tgtggggggggaggg

SEQ ID NO: 1464074 - DNA, 15 bp, Homo sapiens
gtggggggggaggga

SEQ ID NO: 1464075 - DNA, 15 bp, Homo sapiens
tggggggggagggaa

SEQ ID NO: 1464076 - DNA, 15 bp, Homo sapiens
ggggggggagggaag

SEQ ID NO: 1464077 - DNA, 15 bp, Homo sapiens
gggggggagggaaga

SEQ ID NO: 1464078 - DNA, 15 bp, Homo sapiens
ggggggagggaagac

SEQ ID NO: 1464079 - DNA, 15 bp, Homo sapiens
gggggagggaagacg

SEQ ID NO: 1464080 - DNA, 15 bp, Homo sapiens
ggggagggaagacga

SEQ ID NO: 1464081 - DNA, 15 bp, Homo sapiens
gggagggaagacgag

SEQ ID NO: 1464082 - DNA, 15 bp, Homo sapiens
ggagggaagacgagg

SEQ ID NO: 1464083 - DNA, 15 bp, Homo sapiens
gagggaagacgaggg

SEQ ID NO: 1464084 - DNA, 15 bp, Homo sapiens
agggaagacgaggga

SEQ ID NO: 1464085 - DNA, 15 bp, Homo sapiens
gggaagacgagggag

SEQ ID NO: 1464086 - DNA, 15 bp, Homo sapiens
ggaagacgagggaga

SEQ ID NO: 1464087 - DNA, 15 bp, Homo sapiens
gaagacgagggagag

SEQ ID NO: 1464088 - DNA, 15 bp, Homo sapiens
aagacgagggagagc

SEQ ID NO: 1464089 - DNA, 15 bp, Homo sapiens
agacgagggagagca

SEQ ID NO: 1464090 - DNA, 15 bp, Homo sapiens
gacgagggagagcag

SEQ ID NO: 1464091 - DNA, 15 bp, Homo sapiens
acgagggagagcaga

SEQ ID NO: 1464092 - DNA, 15 bp, Homo sapiens
cgagggagagcagag

SEQ ID NO: 1464093 - DNA, 15 bp, Homo sapiens
gagggagagcagagg

SEQ ID NO: 1464094 - DNA, 15 bp, Homo sapiens
agggagagcagaggg

SEQ ID NO: 1464095 - DNA, 15 bp, Homo sapiens
gggagagcagagggg

SEQ ID NO: 1464096 - DNA, 15 bp, Homo sapiens
ggagagcagagggga

SEQ ID NO: 1464097 - DNA, 15 bp, Homo sapiens
gagagcagaggggag

SEQ ID NO: 1464098 - DNA, 15 bp, Homo sapiens
agagcagaggggaga

SEQ ID NO: 1464099 - DNA, 15 bp, Homo sapiens
gcagaggggagagaa

SEQ ID NO: 1464100 - DNA, 15 bp, Homo sapiens
cagaggggagagaag

SEQ ID NO: 1464101 - DNA, 15 bp, Homo sapiens
agaggggagagaaga

SEQ ID NO: 1464102 - DNA, 15 bp, Homo sapiens
gaggggagagaagag

SEQ ID NO: 1464103 - DNA, 15 bp, Homo sapiens
aggggagagaagaga

SEQ ID NO: 1464104 - DNA, 15 bp, Homo sapiens
ggggagagaagagag

SEQ ID NO: 1464105 - DNA, 15 bp, Homo sapiens
gggagagaagagaga

SEQ ID NO: 1464106 - DNA, 15 bp, Homo sapiens
ggagagaagagagag

SEQ ID NO: 1464107 - DNA, 15 bp, Homo sapiens
gagagaagagagagg

SEQ ID NO: 1464108 - DNA, 15 bp, Homo sapiens
agagaagagagagga

SEQ ID NO: 1464109 - DNA, 15 bp, Homo sapiens
gagaagagagaggag

SEQ ID NO: 1464110 - DNA, 15 bp, Homo sapiens
agaagagagaggaga

SEQ ID NO: 1464111 - DNA, 15 bp, Homo sapiens
gaagagagaggagag

SEQ ID NO: 1464112 - DNA, 15 bp, Homo sapiens
aagagagaggagagc

SEQ ID NO: 1464113 - DNA, 15 bp, Homo sapiens
agagagaggagagct

SEQ ID NO: 1464114 - DNA, 15 bp, Homo sapiens
gagagaggagagctc

SEQ ID NO: 1464115 - DNA, 15 bp, Homo sapiens
agagaggagagctcg

SEQ ID NO: 1464116 - DNA, 15 bp, Homo sapiens
gagaggagagctcga

SEQ ID NO: 1464117 - DNA, 15 bp, Homo sapiens
agaggagagctcgag

SEQ ID NO: 1464118 - DNA, 15 bp, Homo sapiens
gaggagagctcgagg

SEQ ID NO: 1464119 - DNA, 15 bp, Homo sapiens
aggagagctcgaggc

SEQ ID NO: 1464120 - DNA, 15 bp, Homo sapiens
ggagagctcgaggcg

SEQ ID NO: 1464121 - DNA, 15 bp, Homo sapiens
gagagctcgaggcga

SEQ ID NO: 1464122 - DNA, 15 bp, Homo sapiens
agagctcgaggcgag

SEQ ID NO: 1464123 - DNA, 15 bp, Homo sapiens
gagctcgaggcgaga

SEQ ID NO: 1464124 - DNA, 15 bp, Homo sapiens
agctcgaggcgagag

SEQ ID NO: 1464125 - DNA, 15 bp, Homo sapiens
gctcgaggcgagaga

SEQ ID NO: 1464126 - DNA, 15 bp, Homo sapiens
ctcgaggcgagagag

SEQ ID NO: 1464127 - DNA, 15 bp, Homo sapiens
tcgaggcgagagaga

SEQ ID NO: 1464128 - DNA, 15 bp, Homo sapiens
cgaggcgagagagag

SEQ ID NO: 1464129 - DNA, 15 bp, Homo sapiens
gaggcgagagagaga

SEQ ID NO: 1464130 - DNA, 15 bp, Homo sapiens
aggcgagagagagag

SEQ ID NO: 1464131 - DNA, 15 bp, Homo sapiens
ggcgagagagagaga

SEQ ID NO: 1464132 - DNA, 15 bp, Homo sapiens
gcccccaaagtggag

SEQ ID NO: 1464133 - DNA, 15 bp, Homo sapiens
cccccaaagtggagc

SEQ ID NO: 1464134 - DNA, 15 bp, Homo sapiens
ccccaaagtggagcc

SEQ ID NO: 1464135 - DNA, 15 bp, Homo sapiens
cccaaagtggagccc

SEQ ID NO: 1464136 - DNA, 15 bp, Homo sapiens
ccaaagtggagcccc

SEQ ID NO: 1464137 - DNA, 15 bp, Homo sapiens
caaagtggagccccg

SEQ ID NO: 1464138 - DNA, 15 bp, Homo sapiens
aaagtggagccccgg

SEQ ID NO: 1464139 - DNA, 15 bp, Homo sapiens
aagtggagccccggc

SEQ ID NO: 1464140 - DNA, 15 bp, Homo sapiens
agtggagccccggcc

SEQ ID NO: 1464141 - DNA, 15 bp, Homo sapiens
gtggagccccggccc

SEQ ID NO: 1464142 - DNA, 15 bp, Homo sapiens
tggagccccggcccc

SEQ ID NO: 1464143 - DNA, 15 bp, Homo sapiens
ggagccccggccccc

SEQ ID NO: 1464144 - DNA, 15 bp, Homo sapiens
gagccccggcccccc

SEQ ID NO: 1464145 - DNA, 15 bp, Homo sapiens
agccccggcccccct

SEQ ID NO: 1464146 - DNA, 15 bp, Homo sapiens
gccccggcccccctc

SEQ ID NO: 1464147 - DNA, 15 bp, Homo sapiens
ccccggcccccctcc

SEQ ID NO: 1464148 - DNA, 15 bp, Homo sapiens
cccggcccccctccc

SEQ ID NO: 1464149 - DNA, 15 bp, Homo sapiens
ccggcccccctccca

SEQ ID NO: 1464150 - DNA, 15 bp, Homo sapiens
cggcccccctcccac

SEQ ID NO: 1464151 - DNA, 15 bp, Homo sapiens
ggcccccctcccacc

SEQ ID NO: 1464152 - DNA, 15 bp, Homo sapiens
gcccccctcccacct

SEQ ID NO: 1464153 - DNA, 15 bp, Homo sapiens
cccccctcccacctc

SEQ ID NO: 1464154 - DNA, 15 bp, Homo sapiens
ccccctcccacctcg

SEQ ID NO: 1464155 - DNA, 15 bp, Homo sapiens
cccctcccacctcgc

SEQ ID NO: 1464156 - DNA, 15 bp, Homo sapiens
ccctcccacctcgct

SEQ ID NO: 1464157 - DNA, 15 bp, Homo sapiens
cctcccacctcgctg

SEQ ID NO: 1464158 - DNA, 15 bp, Homo sapiens
ctcccacctcgctgc

SEQ ID NO: 1464159 - DNA, 15 bp, Homo sapiens
tcccacctcgctgcc

SEQ ID NO: 1464160 - DNA, 15 bp, Homo sapiens
cccacctcgctgccc

SEQ ID NO: 1464161 - DNA, 15 bp, Homo sapiens
ccacctcgctgcccg

SEQ ID NO: 1464162 - DNA, 15 bp, Homo sapiens
cacctcgctgcccgc

SEQ ID NO: 1464163 - DNA, 15 bp, Homo sapiens
acctcgctgcccgcc

SEQ ID NO: 1464164 - DNA, 15 bp, Homo sapiens
cctcgctgcccgccg

SEQ ID NO: 1464165 - DNA, 15 bp, Homo sapiens
ctcgctgcccgccgg

SEQ ID NO: 1464166 - DNA, 15 bp, Homo sapiens
tcgctgcccgccggg

SEQ ID NO: 1464167 - DNA, 15 bp, Homo sapiens
cgctgcccgccgggg

SEQ ID NO: 1464168 - DNA, 15 bp, Homo sapiens
gctgcccgccggggc

SEQ ID NO: 1464169 - DNA, 15 bp, Homo sapiens
ctgcccgccggggct

SEQ ID NO: 1464170 - DNA, 15 bp, Homo sapiens
tgcccgccggggctg

SEQ ID NO: 1464171 - DNA, 15 bp, Homo sapiens
gcccgccggggctgc

SEQ ID NO: 1464172 - DNA, 15 bp, Homo sapiens
cccgccggggctgca

SEQ ID NO: 1464173 - DNA, 15 bp, Homo sapiens
ccgccggggctgcag

SEQ ID NO: 1464174 - DNA, 15 bp, Homo sapiens
cgccggggctgcagg

SEQ ID NO: 1464175 - DNA, 15 bp, Homo sapiens
gccggggctgcagga

SEQ ID NO: 1464176 - DNA, 15 bp, Homo sapiens
ccggggctgcaggag

SEQ ID NO: 1464177 - DNA, 15 bp, Homo sapiens
cggggctgcaggagg

SEQ ID NO: 1464178 - DNA, 15 bp, Homo sapiens
ggggctgcaggaggg

SEQ ID NO: 1464179 - DNA, 15 bp, Homo sapiens
gggctgcaggagggg

SEQ ID NO: 1464180 - DNA, 15 bp, Homo sapiens
ggctgcaggagggga

SEQ ID NO: 1464181 - DNA, 15 bp, Homo sapiens
gctgcaggaggggac

SEQ ID NO: 1464182 - DNA, 15 bp, Homo sapiens
ctgcaggaggggacg

SEQ ID NO: 1464183 - DNA, 15 bp, Homo sapiens
tgcaggaggggacgg

SEQ ID NO: 1464184 - DNA, 15 bp, Homo sapiens
gcaggaggggacggc

SEQ ID NO: 1464185 - DNA, 15 bp, Homo sapiens
caggaggggacggcg

SEQ ID NO: 1464186 - DNA, 15 bp, Homo sapiens
aggaggggacggcgg

SEQ ID NO: 1464187 - DNA, 15 bp, Homo sapiens
ggaggggacggcggg

SEQ ID NO: 1464188 - DNA, 15 bp, Homo sapiens
gaggggacggcggga

SEQ ID NO: 1464189 - DNA, 15 bp, Homo sapiens
aggggacggcgggaa

SEQ ID NO: 1464190 - DNA, 15 bp, Homo sapiens
ggggacggcgggaaa

SEQ ID NO: 1464191 - DNA, 15 bp, Homo sapiens
gggacggcgggaaac

SEQ ID NO: 1464192 - DNA, 15 bp, Homo sapiens
ggacggcgggaaacc

SEQ ID NO: 1464193 - DNA, 15 bp, Homo sapiens
gacggcgggaaaccg

SEQ ID NO: 1464194 - DNA, 15 bp, Homo sapiens
acggcgggaaaccgg

SEQ ID NO: 1464195 - DNA, 15 bp, Homo sapiens
cggcgggaaaccggg

SEQ ID NO: 1464196 - DNA, 15 bp, Homo sapiens
ggcgggaaaccgggg

SEQ ID NO: 1464197 - DNA, 15 bp, Homo sapiens
gcgggaaaccggggg

SEQ ID NO: 1464198 - DNA, 15 bp, Homo sapiens
cgggaaaccggggga

SEQ ID NO: 1464199 - DNA, 15 bp, Homo sapiens
gggaaaccgggggac

SEQ ID NO: 1464200 - DNA, 15 bp, Homo sapiens
ggaaaccgggggacc

SEQ ID NO: 1464201 - DNA, 15 bp, Homo sapiens
gaaaccgggggaccc

SEQ ID NO: 1464202 - DNA, 15 bp, Homo sapiens
aaaccgggggacccc

SEQ ID NO: 1464203 - DNA, 15 bp, Homo sapiens
aaccgggggacccca

SEQ ID NO: 1464204 - DNA, 15 bp, Homo sapiens
accgggggaccccag

SEQ ID NO: 1464205 - DNA, 15 bp, Homo sapiens
ccgggggaccccagg

SEQ ID NO: 1464206 - DNA, 15 bp, Homo sapiens
cgggggaccccaggg

SEQ ID NO: 1464207 - DNA, 15 bp, Homo sapiens
gggggaccccagggt

SEQ ID NO: 1464208 - DNA, 15 bp, Homo sapiens
ggggaccccagggta

SEQ ID NO: 1464209 - DNA, 15 bp, Homo sapiens
gggaccccagggtac

SEQ ID NO: 1464210 - DNA, 15 bp, Homo sapiens
ggaccccagggtacg

SEQ ID NO: 1464211 - DNA, 15 bp, Homo sapiens
gaccccagggtacgg

SEQ ID NO: 1464212 - DNA, 15 bp, Homo sapiens
accccagggtacgga

SEQ ID NO: 1464213 - DNA, 15 bp, Homo sapiens
ccccagggtacggaa

SEQ ID NO: 1464214 - DNA, 15 bp, Homo sapiens
cccagggtacggaac

SEQ ID NO: 1464215 - DNA, 15 bp, Homo sapiens
ccagggtacggaacg

SEQ ID NO: 1464216 - DNA, 15 bp, Homo sapiens
cagggtacggaacgg

SEQ ID NO: 1464217 - DNA, 15 bp, Homo sapiens
agggtacggaacgga

SEQ ID NO: 1464218 - DNA, 15 bp, Homo sapiens
gggtacggaacggag

SEQ ID NO: 1464219 - DNA, 15 bp, Homo sapiens
ggtacggaacggagt

SEQ ID NO: 1464220 - DNA, 15 bp, Homo sapiens
gtacggaacggagtc

SEQ ID NO: 1464221 - DNA, 15 bp, Homo sapiens
tacggaacggagtca

SEQ ID NO: 1464222 - DNA, 15 bp, Homo sapiens
acggaacggagtcaa

SEQ ID NO: 1464223 - DNA, 15 bp, Homo sapiens
cggaacggagtcaag

SEQ ID NO: 1464224 - DNA, 15 bp, Homo sapiens
ggaacggagtcaagg

SEQ ID NO: 1464225 - DNA, 15 bp, Homo sapiens
gaacggagtcaaggg

SEQ ID NO: 1464226 - DNA, 15 bp, Homo sapiens
aacggagtcaagggc

SEQ ID NO: 1464227 - DNA, 15 bp, Homo sapiens
acggagtcaagggcg

SEQ ID NO: 1464228 - DNA, 15 bp, Homo sapiens
cggagtcaagggcga

SEQ ID NO: 1464229 - DNA, 15 bp, Homo sapiens
ggagtcaagggcgag

SEQ ID NO: 1464230 - DNA, 15 bp, Homo sapiens
gagtcaagggcgaga

SEQ ID NO: 1464231 - DNA, 15 bp, Homo sapiens
agtcaagggcgagag

SEQ ID NO: 1464232 - DNA, 15 bp, Homo sapiens
gtcaagggcgagaga

SEQ ID NO: 1464233 - DNA, 15 bp, Homo sapiens
tcaagggcgagagac

SEQ ID NO: 1464234 - DNA, 15 bp, Homo sapiens
caagggcgagagacc

SEQ ID NO: 1464235 - DNA, 15 bp, Homo sapiens
aagggcgagagacct

SEQ ID NO: 1464236 - DNA, 15 bp, Homo sapiens
agggcgagagacctc

SEQ ID NO: 1464237 - DNA, 15 bp, Homo sapiens
gggcgagagacctcg

SEQ ID NO: 1464238 - DNA, 15 bp, Homo sapiens
ggcgagagacctcgg

SEQ ID NO: 1464239 - DNA, 15 bp, Homo sapiens
gcgagagacctcggg

SEQ ID NO: 1464240 - DNA, 15 bp, Homo sapiens
cgagagacctcgggg

SEQ ID NO: 1464241 - DNA, 15 bp, Homo sapiens
gagagacctcggggt

SEQ ID NO: 1464242 - DNA, 15 bp, Homo sapiens
agagacctcggggtc

SEQ ID NO: 1464243 - DNA, 15 bp, Homo sapiens
gagacctcggggtcc

SEQ ID NO: 1464244 - DNA, 15 bp, Homo sapiens
agacctcggggtcca

SEQ ID NO: 1464245 - DNA, 15 bp, Homo sapiens
gacctcggggtccac

SEQ ID NO: 1464246 - DNA, 15 bp, Homo sapiens
acctcggggtccacc

SEQ ID NO: 1464247 - DNA, 15 bp, Homo sapiens
cctcggggtccacca

SEQ ID NO: 1464248 - DNA, 15 bp, Homo sapiens
ctcggggtccaccac

SEQ ID NO: 1464249 - DNA, 15 bp, Homo sapiens
tcggggtccaccact

SEQ ID NO: 1464250 - DNA, 15 bp, Homo sapiens
cggggtccaccactc

SEQ ID NO: 1464251 - DNA, 15 bp, Homo sapiens
ggggtccaccactcc

SEQ ID NO: 1464252 - DNA, 15 bp, Homo sapiens
gggtccaccactccc

SEQ ID NO: 1464253 - DNA, 15 bp, Homo sapiens
ggtccaccactccca

SEQ ID NO: 1464254 - DNA, 15 bp, Homo sapiens
gtccaccactcccac

SEQ ID NO: 1464255 - DNA, 15 bp, Homo sapiens
tccaccactcccacc

SEQ ID NO: 1464256 - DNA, 15 bp, Homo sapiens
ccaccactcccaccg

SEQ ID NO: 1464257 - DNA, 15 bp, Homo sapiens
caccactcccaccga

SEQ ID NO: 1464258 - DNA, 15 bp, Homo sapiens
accactcccaccgac

SEQ ID NO: 1464259 - DNA, 15 bp, Homo sapiens
ccactcccaccgaca

SEQ ID NO: 1464260 - DNA, 15 bp, Homo sapiens
cactcccaccgacac

SEQ ID NO: 1464261 - DNA, 15 bp, Homo sapiens
actcccaccgacacc

SEQ ID NO: 1464262 - DNA, 15 bp, Homo sapiens
ctcccaccgacaccc

SEQ ID NO: 1464263 - DNA, 15 bp, Homo sapiens
tcccaccgacacccg

SEQ ID NO: 1464264 - DNA, 15 bp, Homo sapiens
cccaccgacacccgg

SEQ ID NO: 1464265 - DNA, 15 bp, Homo sapiens
ccaccgacacccggg

SEQ ID NO: 1464266 - DNA, 15 bp, Homo sapiens
caccgacacccgggg

SEQ ID NO: 1464267 - DNA, 15 bp, Homo sapiens
accgacacccggggc

SEQ ID NO: 1464268 - DNA, 15 bp, Homo sapiens
ccgacacccggggct

SEQ ID NO: 1464269 - DNA, 15 bp, Homo sapiens
cgacacccggggctc

SEQ ID NO: 1464270 - DNA, 15 bp, Homo sapiens
gacacccggggctcc

SEQ ID NO: 1464271 - DNA, 15 bp, Homo sapiens
acacccggggctccc

SEQ ID NO: 1464272 - DNA, 15 bp, Homo sapiens
cacccggggctcccg

SEQ ID NO: 1464273 - DNA, 15 bp, Homo sapiens
acccggggctcccgt

SEQ ID NO: 1464274 - DNA, 15 bp, Homo sapiens
cccggggctcccgtg

SEQ ID NO: 1464275 - DNA, 15 bp, Homo sapiens
ccggggctcccgtgg

SEQ ID NO: 1464276 - DNA, 15 bp, Homo sapiens
cggggctcccgtggc

SEQ ID NO: 1464277 - DNA, 15 bp, Homo sapiens
ggggctcccgtggcc

SEQ ID NO: 1464278 - DNA, 15 bp, Homo sapiens
gggctcccgtggccc

SEQ ID NO: 1464279 - DNA, 15 bp, Homo sapiens
ggctcccgtggcccc

SEQ ID NO: 1464280 - DNA, 15 bp, Homo sapiens
gctcccgtggcccca

SEQ ID NO: 1464281 - DNA, 15 bp, Homo sapiens
ctcccgtggccccag

SEQ ID NO: 1464282 - DNA, 15 bp, Homo sapiens
tcccgtggccccagc

SEQ ID NO: 1464283 - DNA, 15 bp, Homo sapiens
cccgtggccccagcg

SEQ ID NO: 1464284 - DNA, 15 bp, Homo sapiens
ccgtggccccagcgc

SEQ ID NO: 1464285 - DNA, 15 bp, Homo sapiens
cgtggccccagcgct

SEQ ID NO: 1464286 - DNA, 15 bp, Homo sapiens
gtggccccagcgcta

SEQ ID NO: 1464287 - DNA, 15 bp, Homo sapiens
tggccccagcgctag

SEQ ID NO: 1464288 - DNA, 15 bp, Homo sapiens
ggccccagcgctagg

SEQ ID NO: 1464289 - DNA, 15 bp, Homo sapiens
gccccagcgctaggc

SEQ ID NO: 1464290 - DNA, 15 bp, Homo sapiens
ccccagcgctaggca

SEQ ID NO: 1464291 - DNA, 15 bp, Homo sapiens
cccagcgctaggcac

SEQ ID NO: 1464292 - DNA, 15 bp, Homo sapiens
ccagcgctaggcact

SEQ ID NO: 1464293 - DNA, 15 bp, Homo sapiens
cagcgctaggcactg

SEQ ID NO: 1464294 - DNA, 15 bp, Homo sapiens
agcgctaggcactgg

SEQ ID NO: 1464295 - DNA, 15 bp, Homo sapiens
gcgctaggcactggg

SEQ ID NO: 1464296 - DNA, 15 bp, Homo sapiens
cgctaggcactgggc

SEQ ID NO: 1464297 - DNA, 15 bp, Homo sapiens
gctaggcactgggct

SEQ ID NO: 1464298 - DNA, 15 bp, Homo sapiens
ctaggcactgggctt

SEQ ID NO: 1464299 - DNA, 15 bp, Homo sapiens
taggcactgggcttc

SEQ ID NO: 1464300 - DNA, 15 bp, Homo sapiens
aggcactgggcttcc

SEQ ID NO: 1464301 - DNA, 15 bp, Homo sapiens
ggcactgggcttcct

SEQ ID NO: 1464302 - DNA, 15 bp, Homo sapiens
gcactgggcttcctc

SEQ ID NO: 1464303 - DNA, 15 bp, Homo sapiens
cactgggcttcctct

SEQ ID NO: 1464304 - DNA, 15 bp, Homo sapiens
actgggcttcctctc

SEQ ID NO: 1464305 - DNA, 15 bp, Homo sapiens
ctgggcttcctctcc

SEQ ID NO: 1464306 - DNA, 15 bp, Homo sapiens
tgggcttcctctccg

SEQ ID NO: 1464307 - DNA, 15 bp, Homo sapiens
gggcttcctctccgc

SEQ ID NO: 1464308 - DNA, 15 bp, Homo sapiens
ggcttcctctccgca

SEQ ID NO: 1464309 - DNA, 15 bp, Homo sapiens
gcttcctctccgcag

SEQ ID NO: 1464310 - DNA, 15 bp, Homo sapiens
cttcctctccgcaga

SEQ ID NO: 1464311 - DNA, 15 bp, Homo sapiens
ttcctctccgcagag

SEQ ID NO: 1464312 - DNA, 15 bp, Homo sapiens
tcctctccgcagagg

SEQ ID NO: 1464313 - DNA, 15 bp, Homo sapiens
cctctccgcagaggc

SEQ ID NO: 1464314 - DNA, 15 bp, Homo sapiens
ctctccgcagaggcg

SEQ ID NO: 1464315 - DNA, 15 bp, Homo sapiens
tctccgcagaggcgg

SEQ ID NO: 1464316 - DNA, 15 bp, Homo sapiens
ctccgcagaggcgga

SEQ ID NO: 1464317 - DNA, 15 bp, Homo sapiens
tccgcagaggcggaa

SEQ ID NO: 1464318 - DNA, 15 bp, Homo sapiens
ccgcagaggcggaac

SEQ ID NO: 1464319 - DNA, 15 bp, Homo sapiens
cgcagaggcggaaca

SEQ ID NO: 1464320 - DNA, 15 bp, Homo sapiens
gcagaggcggaacac

SEQ ID NO: 1464321 - DNA, 15 bp, Homo sapiens
cagaggcggaacacg

SEQ ID NO: 1464322 - DNA, 15 bp, Homo sapiens
agaggcggaacacgg

SEQ ID NO: 1464323 - DNA, 15 bp, Homo sapiens
gaggcggaacacggc

SEQ ID NO: 1464324 - DNA, 15 bp, Homo sapiens
aggcggaacacggcg

SEQ ID NO: 1464325 - DNA, 15 bp, Homo sapiens
ggcggaacacggcgg

SEQ ID NO: 1464326 - DNA, 15 bp, Homo sapiens
gcggaacacggcggg

SEQ ID NO: 1464327 - DNA, 15 bp, Homo sapiens
cggaacacggcgggg

SEQ ID NO: 1464328 - DNA, 15 bp, Homo sapiens
ggaacacggcggggg

SEQ ID NO: 1464329 - DNA, 15 bp, Homo sapiens
gaacacggcgggggc

SEQ ID NO: 1464330 - DNA, 15 bp, Homo sapiens
aacacggcgggggcg

SEQ ID NO: 1464331 - DNA, 15 bp, Homo sapiens
acacggcgggggcgg

SEQ ID NO: 1464332 - DNA, 15 bp, Homo sapiens
cacggcgggggcggg

SEQ ID NO: 1464333 - DNA, 15 bp, Homo sapiens
acggcgggggcgggg

SEQ ID NO: 1464334 - DNA, 15 bp, Homo sapiens
cggcgggggcggggg

SEQ ID NO: 1464335 - DNA, 15 bp, Homo sapiens
ggcgggggcgggggc

SEQ ID NO: 1464336 - DNA, 15 bp, Homo sapiens
gcgggggcgggggct

SEQ ID NO: 1464337 - DNA, 15 bp, Homo sapiens
cgggggcgggggctg

SEQ ID NO: 1464338 - DNA, 15 bp, Homo sapiens
gggggcgggggctgc

SEQ ID NO: 1464339 - DNA, 15 bp, Homo sapiens
ggggcgggggctgca

SEQ ID NO: 1464340 - DNA, 15 bp, Homo sapiens
gggcgggggctgcag

SEQ ID NO: 1464341 - DNA, 15 bp, Homo sapiens
ggcgggggctgcagt

SEQ ID NO: 1464342 - DNA, 15 bp, Homo sapiens
gcgggggctgcagtc

SEQ ID NO: 1464343 - DNA, 15 bp, Homo sapiens
cgggggctgcagtcg

SEQ ID NO: 1464344 - DNA, 15 bp, Homo sapiens
gggggctgcagtcgc

SEQ ID NO: 1464345 - DNA, 15 bp, Homo sapiens
ggggctgcagtcgcc

SEQ ID NO: 1464346 - DNA, 15 bp, Homo sapiens
gggctgcagtcgccc

SEQ ID NO: 1464347 - DNA, 15 bp, Homo sapiens
ggctgcagtcgcccg

SEQ ID NO: 1464348 - DNA, 15 bp, Homo sapiens
gctgcagtcgcccgg

SEQ ID NO: 1464349 - DNA, 15 bp, Homo sapiens
ctgcagtcgcccggg

SEQ ID NO: 1464350 - DNA, 15 bp, Homo sapiens
tgcagtcgcccgggc

SEQ ID NO: 1464351 - DNA, 15 bp, Homo sapiens
gcagtcgcccgggct

SEQ ID NO: 1464352 - DNA, 15 bp, Homo sapiens
cagtcgcccgggctc

SEQ ID NO: 1464353 - DNA, 15 bp, Homo sapiens
agtcgcccgggctcg

SEQ ID NO: 1464354 - DNA, 15 bp, Homo sapiens
gtcgcccgggctcgg

SEQ ID NO: 1464355 - DNA, 15 bp, Homo sapiens
tcgcccgggctcggg

SEQ ID NO: 1464356 - DNA, 15 bp, Homo sapiens
cgcccgggctcgggt

SEQ ID NO: 1464357 - DNA, 15 bp, Homo sapiens
gcccgggctcgggtc

SEQ ID NO: 1464358 - DNA, 15 bp, Homo sapiens
cccgggctcgggtcc

SEQ ID NO: 1464359 - DNA, 15 bp, Homo sapiens
ccgggctcgggtccc

SEQ ID NO: 1464360 - DNA, 15 bp, Homo sapiens
cgggctcgggtccct

SEQ ID NO: 1464361 - DNA, 15 bp, Homo sapiens
gggctcgggtccctg

SEQ ID NO: 1464362 - DNA, 15 bp, Homo sapiens
ggctcgggtccctgc

SEQ ID NO: 1464363 - DNA, 15 bp, Homo sapiens
gctcgggtccctgcc

SEQ ID NO: 1464364 - DNA, 15 bp, Homo sapiens
ctcgggtccctgcct

SEQ ID NO: 1464365 - DNA, 15 bp, Homo sapiens
tcgggtccctgcctg

SEQ ID NO: 1464366 - DNA, 15 bp, Homo sapiens
cgggtccctgcctgg

SEQ ID NO: 1464367 - DNA, 15 bp, Homo sapiens
gggtccctgcctggt

SEQ ID NO: 1464368 - DNA, 15 bp, Homo sapiens
ggtccctgcctggtg

SEQ ID NO: 1464369 - DNA, 15 bp, Homo sapiens
gtccctgcctggtgg

SEQ ID NO: 1464370 - DNA, 15 bp, Homo sapiens
tccctgcctggtggg

SEQ ID NO: 1464371 - DNA, 15 bp, Homo sapiens
ccctgcctggtgggc

SEQ ID NO: 1464372 - DNA, 15 bp, Homo sapiens
cctgcctggtgggcc

SEQ ID NO: 1464373 - DNA, 15 bp, Homo sapiens
ctgcctggtgggccc

SEQ ID NO: 1464374 - DNA, 15 bp, Homo sapiens
tgcctggtgggccct

SEQ ID NO: 1464375 - DNA, 15 bp, Homo sapiens
gcctggtgggccctg

SEQ ID NO: 1464376 - DNA, 15 bp, Homo sapiens
cctggtgggccctgg

SEQ ID NO: 1464377 - DNA, 15 bp, Homo sapiens
ctggtgggccctggg

SEQ ID NO: 1464378 - DNA, 15 bp, Homo sapiens
tggtgggccctgggg

SEQ ID NO: 1464379 - DNA, 15 bp, Homo sapiens
ggtgggccctggggt

SEQ ID NO: 1464380 - DNA, 15 bp, Homo sapiens
gtgggccctggggtg

SEQ ID NO: 1464381 - DNA, 15 bp, Homo sapiens
tgggccctggggtgg

SEQ ID NO: 1464382 - DNA, 15 bp, Homo sapiens
gggccctggggtggg

SEQ ID NO: 1464383 - DNA, 15 bp, Homo sapiens
ggccctggggtgggt

SEQ ID NO: 1464384 - DNA, 15 bp, Homo sapiens
gccctggggtgggta

SEQ ID NO: 1464385 - DNA, 15 bp, Homo sapiens
ccctggggtgggtaa

SEQ ID NO: 1464386 - DNA, 15 bp, Homo sapiens
cctggggtgggtaag

SEQ ID NO: 1464387 - DNA, 15 bp, Homo sapiens
ctggggtgggtaagt

SEQ ID NO: 1464388 - DNA, 15 bp, Homo sapiens
tggggtgggtaagtg

SEQ ID NO: 1464389 - DNA, 15 bp, Homo sapiens
ggggtgggtaagtgg

SEQ ID NO: 1464390 - DNA, 15 bp, Homo sapiens
gggtgggtaagtggc

SEQ ID NO: 1464391 - DNA, 15 bp, Homo sapiens
ggtgggtaagtggcc

SEQ ID NO: 1464392 - DNA, 15 bp, Homo sapiens
gtgggtaagtggcct

SEQ ID NO: 1464393 - DNA, 15 bp, Homo sapiens
tgggtaagtggcctc

SEQ ID NO: 1464394 - DNA, 15 bp, Homo sapiens
gggtaagtggcctcg

SEQ ID NO: 1464395 - DNA, 15 bp, Homo sapiens
ggtaagtggcctcgt

SEQ ID NO: 1464396 - DNA, 15 bp, Homo sapiens
gtaagtggcctcgtt

SEQ ID NO: 1464397 - DNA, 15 bp, Homo sapiens
taagtggcctcgttg

SEQ ID NO: 1464398 - DNA, 15 bp, Homo sapiens
aagtggcctcgttgc

SEQ ID NO: 1464399 - DNA, 15 bp, Homo sapiens
agtggcctcgttgca

SEQ ID NO: 1464400 - DNA, 15 bp, Homo sapiens
gtggcctcgttgcac

SEQ ID NO: 1464401 - DNA, 15 bp, Homo sapiens
tggcctcgttgcacg

SEQ ID NO: 1464402 - DNA, 15 bp, Homo sapiens
ggcctcgttgcacga

SEQ ID NO: 1464403 - DNA, 15 bp, Homo sapiens
gcctcgttgcacgag

SEQ ID NO: 1464404 - DNA, 15 bp, Homo sapiens
cctcgttgcacgagg

SEQ ID NO: 1464405 - DNA, 15 bp, Homo sapiens
ctcgttgcacgaggg

SEQ ID NO: 1464406 - DNA, 15 bp, Homo sapiens
tcgttgcacgagggt

SEQ ID NO: 1464407 - DNA, 15 bp, Homo sapiens
cgttgcacgagggta

SEQ ID NO: 1464408 - DNA, 15 bp, Homo sapiens
gttgcacgagggtag

SEQ ID NO: 1464409 - DNA, 15 bp, Homo sapiens
ttgcacgagggtagg

SEQ ID NO: 1464410 - DNA, 15 bp, Homo sapiens
tgcacgagggtaggg

SEQ ID NO: 1464411 - DNA, 15 bp, Homo sapiens
gcacgagggtagggg

SEQ ID NO: 1464412 - DNA, 15 bp, Homo sapiens
cacgagggtaggggt

SEQ ID NO: 1464413 - DNA, 15 bp, Homo sapiens
acgagggtaggggtg

SEQ ID NO: 1464414 - DNA, 15 bp, Homo sapiens
cgagggtaggggtgc

SEQ ID NO: 1464415 - DNA, 15 bp, Homo sapiens
gagggtaggggtgca

SEQ ID NO: 1464416 - DNA, 15 bp, Homo sapiens
agggtaggggtgcaa

SEQ ID NO: 1464417 - DNA, 15 bp, Homo sapiens
gggtaggggtgcaag

SEQ ID NO: 1464418 - DNA, 15 bp, Homo sapiens
ggtaggggtgcaagt

SEQ ID NO: 1464419 - DNA, 15 bp, Homo sapiens
gtaggggtgcaagtg

SEQ ID NO: 1464420 - DNA, 15 bp, Homo sapiens
taggggtgcaagtga

SEQ ID NO: 1464421 - DNA, 15 bp, Homo sapiens
aggggtgcaagtgag

SEQ ID NO: 1464422 - DNA, 15 bp, Homo sapiens
ggggtgcaagtgagt

SEQ ID NO: 1464423 - DNA, 15 bp, Homo sapiens
gggtgcaagtgagtg

SEQ ID NO: 1464424 - DNA, 15 bp, Homo sapiens
ggtgcaagtgagtgt

SEQ ID NO: 1464425 - DNA, 15 bp, Homo sapiens
gtgcaagtgagtgtg

SEQ ID NO: 1464426 - DNA, 15 bp, Homo sapiens
tgcaagtgagtgtgt

SEQ ID NO: 1464427 - DNA, 15 bp, Homo sapiens
gcaagtgagtgtgtc

SEQ ID NO: 1464428 - DNA, 15 bp, Homo sapiens
caagtgagtgtgtcg

SEQ ID NO: 1464429 - DNA, 15 bp, Homo sapiens
aagtgagtgtgtcgg

SEQ ID NO: 1464430 - DNA, 15 bp, Homo sapiens
agtgagtgtgtcggg

SEQ ID NO: 1464431 - DNA, 15 bp, Homo sapiens
gtgagtgtgtcgggg

SEQ ID NO: 1464432 - DNA, 15 bp, Homo sapiens
tgagtgtgtcggggg

SEQ ID NO: 1464433 - DNA, 15 bp, Homo sapiens
gagtgtgtcggggga

SEQ ID NO: 1464434 - DNA, 15 bp, Homo sapiens
agtgtgtcgggggat

SEQ ID NO: 1464435 - DNA, 15 bp, Homo sapiens
gtgtgtcgggggatc

SEQ ID NO: 1464436 - DNA, 15 bp, Homo sapiens
tgtgtcgggggatct

SEQ ID NO: 1464437 - DNA, 15 bp, Homo sapiens
gtgtcgggggatcta

SEQ ID NO: 1464438 - DNA, 15 bp, Homo sapiens
tgtcgggggatctat

SEQ ID NO: 1464439 - DNA, 15 bp, Homo sapiens
gtcgggggatctatc

SEQ ID NO: 1464440 - DNA, 15 bp, Homo sapiens
tcgggggatctatct

SEQ ID NO: 1464441 - DNA, 15 bp, Homo sapiens
cgggggatctatctg

SEQ ID NO: 1464442 - DNA, 15 bp, Homo sapiens
gggggatctatctga

SEQ ID NO: 1464443 - DNA, 15 bp, Homo sapiens
ggggatctatctgag

SEQ ID NO: 1464444 - DNA, 15 bp, Homo sapiens
gggatctatctgagc

SEQ ID NO: 1464445 - DNA, 15 bp, Homo sapiens
ggatctatctgagcg

SEQ ID NO: 1464446 - DNA, 15 bp, Homo sapiens
gatctatctgagcgg

SEQ ID NO: 1464447 - DNA, 15 bp, Homo sapiens
atctatctgagcggg

SEQ ID NO: 1464448 - DNA, 15 bp, Homo sapiens
tctatctgagcgggc

SEQ ID NO: 1464449 - DNA, 15 bp, Homo sapiens
ctatctgagcgggct

SEQ ID NO: 1464450 - DNA, 15 bp, Homo sapiens
tatctgagcgggctc

SEQ ID NO: 1464451 - DNA, 15 bp, Homo sapiens
atctgagcgggctcc

SEQ ID NO: 1464452 - DNA, 15 bp, Homo sapiens
tctgagcgggctcct

SEQ ID NO: 1464453 - DNA, 15 bp, Homo sapiens
ctgagcgggctcctc

SEQ ID NO: 1464454 - DNA, 15 bp, Homo sapiens
tgagcgggctcctcc

SEQ ID NO: 1464455 - DNA, 15 bp, Homo sapiens
gagcgggctcctcca

SEQ ID NO: 1464456 - DNA, 15 bp, Homo sapiens
agcgggctcctccag

SEQ ID NO: 1464457 - DNA, 15 bp, Homo sapiens
gcgggctcctccaga

SEQ ID NO: 1464458 - DNA, 15 bp, Homo sapiens
cgggctcctccagat

SEQ ID NO: 1464459 - DNA, 15 bp, Homo sapiens
gggctcctccagatg

SEQ ID NO: 1464460 - DNA, 15 bp, Homo sapiens
ggctcctccagatgg

SEQ ID NO: 1464461 - DNA, 15 bp, Homo sapiens
gctcctccagatgga

SEQ ID NO: 1464462 - DNA, 15 bp, Homo sapiens
ctcctccagatggaa

SEQ ID NO: 1464463 - DNA, 15 bp, Homo sapiens
tcctccagatggaag

SEQ ID NO: 1464464 - DNA, 15 bp, Homo sapiens
cctccagatggaagc

SEQ ID NO: 1464465 - DNA, 15 bp, Homo sapiens
ctccagatggaagcc

SEQ ID NO: 1464466 - DNA, 15 bp, Homo sapiens
tccagatggaagccc

SEQ ID NO: 1464467 - DNA, 15 bp, Homo sapiens
ccagatggaagcccc

SEQ ID NO: 1464468 - DNA, 15 bp, Homo sapiens
cagatggaagcccct

SEQ ID NO: 1464469 - DNA, 15 bp, Homo sapiens
agatggaagcccctg

SEQ ID NO: 1464470 - DNA, 15 bp, Homo sapiens
gatggaagcccctgt

SEQ ID NO: 1464471 - DNA, 15 bp, Homo sapiens
atggaagcccctgtt

SEQ ID NO: 1464472 - DNA, 15 bp, Homo sapiens
tggaagcccctgttt

SEQ ID NO: 1464473 - DNA, 15 bp, Homo sapiens
ggaagcccctgttta

SEQ ID NO: 1464474 - DNA, 15 bp, Homo sapiens
gaagcccctgtttac

SEQ ID NO: 1464475 - DNA, 15 bp, Homo sapiens
aagcccctgtttaca

SEQ ID NO: 1464476 - DNA, 15 bp, Homo sapiens
agcccctgtttacat

SEQ ID NO: 1464477 - DNA, 15 bp, Homo sapiens
gcccctgtttacatg

SEQ ID NO: 1464478 - DNA, 15 bp, Homo sapiens
cccctgtttacatgt

SEQ ID NO: 1464479 - DNA, 15 bp, Homo sapiens
ccctgtttacatgtc

SEQ ID NO: 1464480 - DNA, 15 bp, Homo sapiens
cctgtttacatgtca

SEQ ID NO: 1464481 - DNA, 15 bp, Homo sapiens
ctgtttacatgtcag

SEQ ID NO: 1464482 - DNA, 15 bp, Homo sapiens
tgtttacatgtcagc

SEQ ID NO: 1464483 - DNA, 15 bp, Homo sapiens
gtttacatgtcagcg

SEQ ID NO: 1464484 - DNA, 15 bp, Homo sapiens
tttacatgtcagcgc

SEQ ID NO: 1464485 - DNA, 15 bp, Homo sapiens
ttacatgtcagcgct

SEQ ID NO: 1464486 - DNA, 15 bp, Homo sapiens
tacatgtcagcgctt

SEQ ID NO: 1464487 - DNA, 15 bp, Homo sapiens
acatgtcagcgcttt

SEQ ID NO: 1464488 - DNA, 15 bp, Homo sapiens
catgtcagcgctttc

SEQ ID NO: 1464489 - DNA, 15 bp, Homo sapiens
atgtcagcgctttcc

SEQ ID NO: 1464490 - DNA, 15 bp, Homo sapiens
tgtcagcgctttccc

SEQ ID NO: 1464491 - DNA, 15 bp, Homo sapiens
gtcagcgctttccct

SEQ ID NO: 1464492 - DNA, 15 bp, Homo sapiens
tcagcgctttccctt

SEQ ID NO: 1464493 - DNA, 15 bp, Homo sapiens
cagcgctttcccttc

SEQ ID NO: 1464494 - DNA, 15 bp, Homo sapiens
agcgctttcccttcc

SEQ ID NO: 1464495 - DNA, 15 bp, Homo sapiens
gcgctttcccttcct

SEQ ID NO: 1464496 - DNA, 15 bp, Homo sapiens
cgctttcccttcctc

SEQ ID NO: 1464497 - DNA, 15 bp, Homo sapiens
gctttcccttcctct

SEQ ID NO: 1464498 - DNA, 15 bp, Homo sapiens
ctttcccttcctctc

SEQ ID NO: 1464499 - DNA, 15 bp, Homo sapiens
tttcccttcctctcg

SEQ ID NO: 1464500 - DNA, 15 bp, Homo sapiens
ttcccttcctctcgg

SEQ ID NO: 1464501 - DNA, 15 bp, Homo sapiens
tcccttcctctcggc

SEQ ID NO: 1464502 - DNA, 15 bp, Homo sapiens
cccttcctctcggca

SEQ ID NO: 1464503 - DNA, 15 bp, Homo sapiens
ccttcctctcggcac

SEQ ID NO: 1464504 - DNA, 15 bp, Homo sapiens
cttcctctcggcact

SEQ ID NO: 1464505 - DNA, 15 bp, Homo sapiens
ttcctctcggcactc

SEQ ID NO: 1464506 - DNA, 15 bp, Homo sapiens
tcctctcggcactca

SEQ ID NO: 1464507 - DNA, 15 bp, Homo sapiens
cctctcggcactcag

SEQ ID NO: 1464508 - DNA, 15 bp, Homo sapiens
ctctcggcactcagt

SEQ ID NO: 1464509 - DNA, 15 bp, Homo sapiens
tctcggcactcagtc

SEQ ID NO: 1464510 - DNA, 15 bp, Homo sapiens
ctcggcactcagtcg

SEQ ID NO: 1464511 - DNA, 15 bp, Homo sapiens
tcggcactcagtcgc

SEQ ID NO: 1464512 - DNA, 15 bp, Homo sapiens
cggcactcagtcgcc

SEQ ID NO: 1464513 - DNA, 15 bp, Homo sapiens
ggcactcagtcgccc

SEQ ID NO: 1464514 - DNA, 15 bp, Homo sapiens
gcactcagtcgcccg

SEQ ID NO: 1464515 - DNA, 15 bp, Homo sapiens
cactcagtcgcccgg

SEQ ID NO: 1464516 - DNA, 15 bp, Homo sapiens
actcagtcgcccggc

SEQ ID NO: 1464517 - DNA, 15 bp, Homo sapiens
ctcagtcgcccggct

SEQ ID NO: 1464518 - DNA, 15 bp, Homo sapiens
tcagtcgcccggctc

SEQ ID NO: 1464519 - DNA, 15 bp, Homo sapiens
cagtcgcccggctct

SEQ ID NO: 1464520 - DNA, 15 bp, Homo sapiens
agtcgcccggctcta

SEQ ID NO: 1464521 - DNA, 15 bp, Homo sapiens
gtcgcccggctctag

SEQ ID NO: 1464522 - DNA, 15 bp, Homo sapiens
tcgcccggctctagg

SEQ ID NO: 1464523 - DNA, 15 bp, Homo sapiens
cgcccggctctaggc

SEQ ID NO: 1464524 - DNA, 15 bp, Homo sapiens
gcccggctctaggcg

SEQ ID NO: 1464525 - DNA, 15 bp, Homo sapiens
cccggctctaggcgc

SEQ ID NO: 1464526 - DNA, 15 bp, Homo sapiens
ccggctctaggcgct

SEQ ID NO: 1464527 - DNA, 15 bp, Homo sapiens
cggctctaggcgctg

SEQ ID NO: 1464528 - DNA, 15 bp, Homo sapiens
ggctctaggcgctgg

SEQ ID NO: 1464529 - DNA, 15 bp, Homo sapiens
gctctaggcgctgga

SEQ ID NO: 1464530 - DNA, 15 bp, Homo sapiens
ctctaggcgctggag

SEQ ID NO: 1464531 - DNA, 15 bp, Homo sapiens
tctaggcgctggaga

SEQ ID NO: 1464532 - DNA, 15 bp, Homo sapiens
ctaggcgctggagag

SEQ ID NO: 1464533 - DNA, 15 bp, Homo sapiens
taggcgctggagagc

SEQ ID NO: 1464534 - DNA, 15 bp, Homo sapiens
aggcgctggagagcc

SEQ ID NO: 1464535 - DNA, 15 bp, Homo sapiens
ggcgctggagagccg

SEQ ID NO: 1464536 - DNA, 15 bp, Homo sapiens
gcgctggagagccgc

SEQ ID NO: 1464537 - DNA, 15 bp, Homo sapiens
cgctggagagccgcc

SEQ ID NO: 1464538 - DNA, 15 bp, Homo sapiens
gctggagagccgccg

SEQ ID NO: 1464539 - DNA, 15 bp, Homo sapiens
ctggagagccgccgg

SEQ ID NO: 1464540 - DNA, 15 bp, Homo sapiens
tggagagccgccggc

SEQ ID NO: 1464541 - DNA, 15 bp, Homo sapiens
ggagagccgccggct

SEQ ID NO: 1464542 - DNA, 15 bp, Homo sapiens
gagagccgccggctc

SEQ ID NO: 1464543 - DNA, 15 bp, Homo sapiens
agagccgccggctcc

SEQ ID NO: 1464544 - DNA, 15 bp, Homo sapiens
gagccgccggctccg

SEQ ID NO: 1464545 - DNA, 15 bp, Homo sapiens
agccgccggctccgc

SEQ ID NO: 1464546 - DNA, 15 bp, Homo sapiens
gccgccggctccgcg

SEQ ID NO: 1464547 - DNA, 15 bp, Homo sapiens
ccgccggctccgcgg

SEQ ID NO: 1464548 - DNA, 15 bp, Homo sapiens
cgccggctccgcggg

SEQ ID NO: 1464549 - DNA, 15 bp, Homo sapiens
gccggctccgcggga

SEQ ID NO: 1464550 - DNA, 15 bp, Homo sapiens
ccggctccgcgggac

SEQ ID NO: 1464551 - DNA, 15 bp, Homo sapiens
cggctccgcgggact

SEQ ID NO: 1464552 - DNA, 15 bp, Homo sapiens
ggctccgcgggactc

SEQ ID NO: 1464553 - DNA, 15 bp, Homo sapiens
gctccgcgggactcc

SEQ ID NO: 1464554 - DNA, 15 bp, Homo sapiens
ctccgcgggactcct

SEQ ID NO: 1464555 - DNA, 15 bp, Homo sapiens
tccgcgggactcctg

SEQ ID NO: 1464556 - DNA, 15 bp, Homo sapiens
ccgcgggactcctgg

SEQ ID NO: 1464557 - DNA, 15 bp, Homo sapiens
cgcgggactcctggg

SEQ ID NO: 1464558 - DNA, 15 bp, Homo sapiens
gcgggactcctgggc

SEQ ID NO: 1464559 - DNA, 15 bp, Homo sapiens
cgggactcctgggcc

SEQ ID NO: 1464560 - DNA, 15 bp, Homo sapiens
gggactcctgggccg

SEQ ID NO: 1464561 - DNA, 15 bp, Homo sapiens
ggactcctgggccgg

SEQ ID NO: 1464562 - DNA, 15 bp, Homo sapiens
gactcctgggccggc

SEQ ID NO: 1464563 - DNA, 15 bp, Homo sapiens
actcctgggccggcc

SEQ ID NO: 1464564 - DNA, 15 bp, Homo sapiens
ctcctgggccggcct

SEQ ID NO: 1464565 - DNA, 15 bp, Homo sapiens
tcctgggccggcctc

SEQ ID NO: 1464566 - DNA, 15 bp, Homo sapiens
cctgggccggcctcg

SEQ ID NO: 1464567 - DNA, 15 bp, Homo sapiens
ctgggccggcctcgc

SEQ ID NO: 1464568 - DNA, 15 bp, Homo sapiens
tgggccggcctcgcc

SEQ ID NO: 1464569 - DNA, 15 bp, Homo sapiens
gggccggcctcgccg

SEQ ID NO: 1464570 - DNA, 15 bp, Homo sapiens
ggccggcctcgccgc

SEQ ID NO: 1464571 - DNA, 15 bp, Homo sapiens
gccggcctcgccgcc

SEQ ID NO: 1464572 - DNA, 15 bp, Homo sapiens
ccggcctcgccgcct

SEQ ID NO: 1464573 - DNA, 15 bp, Homo sapiens
cggcctcgccgcctc

SEQ ID NO: 1464574 - DNA, 15 bp, Homo sapiens
ggcctcgccgcctct

SEQ ID NO: 1464575 - DNA, 15 bp, Homo sapiens
gcctcgccgcctctc

SEQ ID NO: 1464576 - DNA, 15 bp, Homo sapiens
cctcgccgcctctcc

SEQ ID NO: 1464577 - DNA, 15 bp, Homo sapiens
ctcgccgcctctccg

SEQ ID NO: 1464578 - DNA, 15 bp, Homo sapiens
tcgccgcctctccgg

SEQ ID NO: 1464579 - DNA, 15 bp, Homo sapiens
cgccgcctctccggc

SEQ ID NO: 1464580 - DNA, 15 bp, Homo sapiens
gccgcctctccggcg

SEQ ID NO: 1464581 - DNA, 15 bp, Homo sapiens
ccgcctctccggcgg

SEQ ID NO: 1464582 - DNA, 15 bp, Homo sapiens
cgcctctccggcggg

SEQ ID NO: 1464583 - DNA, 15 bp, Homo sapiens
gcctctccggcgggg

SEQ ID NO: 1464584 - DNA, 15 bp, Homo sapiens
cctctccggcgggga

SEQ ID NO: 1464585 - DNA, 15 bp, Homo sapiens
ctctccggcggggaa

SEQ ID NO: 1464586 - DNA, 15 bp, Homo sapiens
tctccggcggggaac

SEQ ID NO: 1464587 - DNA, 15 bp, Homo sapiens
ctccggcggggaacc

SEQ ID NO: 1464588 - DNA, 15 bp, Homo sapiens
tccggcggggaacct

SEQ ID NO: 1464589 - DNA, 15 bp, Homo sapiens
ccggcggggaacctt

SEQ ID NO: 1464590 - DNA, 15 bp, Homo sapiens
cggcggggaaccttc

SEQ ID NO: 1464591 - DNA, 15 bp, Homo sapiens
ggcggggaaccttcc

SEQ ID NO: 1464592 - DNA, 15 bp, Homo sapiens
gcggggaaccttccc

SEQ ID NO: 1464593 - DNA, 15 bp, Homo sapiens
cggggaaccttcccc

SEQ ID NO: 1464594 - DNA, 15 bp, Homo sapiens
ggggaaccttcccca

SEQ ID NO: 1464595 - DNA, 15 bp, Homo sapiens
gggaaccttccccag

SEQ ID NO: 1464596 - DNA, 15 bp, Homo sapiens
ggaaccttccccagc

SEQ ID NO: 1464597 - DNA, 15 bp, Homo sapiens
gaaccttccccagcc

SEQ ID NO: 1464598 - DNA, 15 bp, Homo sapiens
aaccttccccagccc

SEQ ID NO: 1464599 - DNA, 15 bp, Homo sapiens
accttccccagcccc

SEQ ID NO: 1464600 - DNA, 15 bp, Homo sapiens
ccttccccagccccc

SEQ ID NO: 1464601 - DNA, 15 bp, Homo sapiens
cttccccagcccccg

SEQ ID NO: 1464602 - DNA, 15 bp, Homo sapiens
ttccccagcccccgt

SEQ ID NO: 1464603 - DNA, 15 bp, Homo sapiens
tccccagcccccgtc

SEQ ID NO: 1464604 - DNA, 15 bp, Homo sapiens
ccccagcccccgtcc

SEQ ID NO: 1464605 - DNA, 15 bp, Homo sapiens
cccagcccccgtccg

SEQ ID NO: 1464606 - DNA, 15 bp, Homo sapiens
ccagcccccgtccgc

SEQ ID NO: 1464607 - DNA, 15 bp, Homo sapiens
cagcccccgtccgca

SEQ ID NO: 1464608 - DNA, 15 bp, Homo sapiens
agcccccgtccgcac

SEQ ID NO: 1464609 - DNA, 15 bp, Homo sapiens
gcccccgtccgcaca

SEQ ID NO: 1464610 - DNA, 15 bp, Homo sapiens
cccccgtccgcacag

SEQ ID NO: 1464611 - DNA, 15 bp, Homo sapiens
ccccgtccgcacaga

SEQ ID NO: 1464612 - DNA, 15 bp, Homo sapiens
cccgtccgcacagat

SEQ ID NO: 1464613 - DNA, 15 bp, Homo sapiens
ccgtccgcacagatc

SEQ ID NO: 1464614 - DNA, 15 bp, Homo sapiens
cgtccgcacagatcc

SEQ ID NO: 1464615 - DNA, 15 bp, Homo sapiens
gtccgcacagatccc

SEQ ID NO: 1464616 - DNA, 15 bp, Homo sapiens
tccgcacagatccct

SEQ ID NO: 1464617 - DNA, 15 bp, Homo sapiens
ccgcacagatcccta

SEQ ID NO: 1464618 - DNA, 15 bp, Homo sapiens
cgcacagatccctag

SEQ ID NO: 1464619 - DNA, 15 bp, Homo sapiens
gcacagatccctagc

SEQ ID NO: 1464620 - DNA, 15 bp, Homo sapiens
cacagatccctagcg

SEQ ID NO: 1464621 - DNA, 15 bp, Homo sapiens
acagatccctagcgc

SEQ ID NO: 1464622 - DNA, 15 bp, Homo sapiens
cagatccctagcgcc

SEQ ID NO: 1464623 - DNA, 15 bp, Homo sapiens
agatccctagcgccc

SEQ ID NO: 1464624 - DNA, 15 bp, Homo sapiens
gatccctagcgcccc

SEQ ID NO: 1464625 - DNA, 15 bp, Homo sapiens
atccctagcgccccg

SEQ ID NO: 1464626 - DNA, 15 bp, Homo sapiens
tccctagcgccccga

SEQ ID NO: 1464627 - DNA, 15 bp, Homo sapiens
ccctagcgccccgag

SEQ ID NO: 1464628 - DNA, 15 bp, Homo sapiens
cctagcgccccgagc

SEQ ID NO: 1464629 - DNA, 15 bp, Homo sapiens
ctagcgccccgagcc

SEQ ID NO: 1464630 - DNA, 15 bp, Homo sapiens
tagcgccccgagccc

SEQ ID NO: 1464631 - DNA, 15 bp, Homo sapiens
agcgccccgagcccc

SEQ ID NO: 1464632 - DNA, 15 bp, Homo sapiens
gcgccccgagccccc

SEQ ID NO: 1464633 - DNA, 15 bp, Homo sapiens
cgccccgagcccccg

SEQ ID NO: 1464634 - DNA, 15 bp, Homo sapiens
gccccgagcccccgc

SEQ ID NO: 1464635 - DNA, 15 bp, Homo sapiens
ccccgagcccccgcc

SEQ ID NO: 1464636 - DNA, 15 bp, Homo sapiens
cccgagcccccgccc

SEQ ID NO: 1464637 - DNA, 15 bp, Homo sapiens
ccgagcccccgccct

SEQ ID NO: 1464638 - DNA, 15 bp, Homo sapiens
cgagcccccgccctt

SEQ ID NO: 1464639 - DNA, 15 bp, Homo sapiens
gagcccccgcccttc

SEQ ID NO: 1464640 - DNA, 15 bp, Homo sapiens
agcccccgcccttcg

SEQ ID NO: 1464641 - DNA, 15 bp, Homo sapiens
gcccccgcccttcgc

SEQ ID NO: 1464642 - DNA, 15 bp, Homo sapiens
cccccgcccttcgcg

SEQ ID NO: 1464643 - DNA, 15 bp, Homo sapiens
ccccgcccttcgcgc

SEQ ID NO: 1464644 - DNA, 15 bp, Homo sapiens
cccgcccttcgcgcc

SEQ ID NO: 1464645 - DNA, 15 bp, Homo sapiens
ccgcccttcgcgcct

SEQ ID NO: 1464646 - DNA, 15 bp, Homo sapiens
cgcccttcgcgccta

SEQ ID NO: 1464647 - DNA, 15 bp, Homo sapiens
gcccttcgcgcctag

SEQ ID NO: 1464648 - DNA, 15 bp, Homo sapiens
cccttcgcgcctagg

SEQ ID NO: 1464649 - DNA, 15 bp, Homo sapiens
ccttcgcgcctaggc

SEQ ID NO: 1464650 - DNA, 15 bp, Homo sapiens
cttcgcgcctaggcg

SEQ ID NO: 1464651 - DNA, 15 bp, Homo sapiens
ttcgcgcctaggcgt

SEQ ID NO: 1464652 - DNA, 15 bp, Homo sapiens
tcgcgcctaggcgtg

SEQ ID NO: 1464653 - DNA, 15 bp, Homo sapiens
cgcgcctaggcgtgc

SEQ ID NO: 1464654 - DNA, 15 bp, Homo sapiens
gcgcctaggcgtgcg

SEQ ID NO: 1464655 - DNA, 15 bp, Homo sapiens
cgcctaggcgtgcgc

SEQ ID NO: 1464656 - DNA, 15 bp, Homo sapiens
gcctaggcgtgcgcc

SEQ ID NO: 1464657 - DNA, 15 bp, Homo sapiens
cctaggcgtgcgccg

SEQ ID NO: 1464658 - DNA, 15 bp, Homo sapiens
ctaggcgtgcgccgg

SEQ ID NO: 1464659 - DNA, 15 bp, Homo sapiens
taggcgtgcgccggc

SEQ ID NO: 1464660 - DNA, 15 bp, Homo sapiens
aggcgtgcgccggct

SEQ ID NO: 1464661 - DNA, 15 bp, Homo sapiens
ggcgtgcgccggctc

SEQ ID NO: 1464662 - DNA, 15 bp, Homo sapiens
gcgtgcgccggctcc

SEQ ID NO: 1464663 - DNA, 15 bp, Homo sapiens
cgtgcgccggctcca

SEQ ID NO: 1464664 - DNA, 15 bp, Homo sapiens
gtgcgccggctccag

SEQ ID NO: 1464665 - DNA, 15 bp, Homo sapiens
tgcgccggctccagg

SEQ ID NO: 1464666 - DNA, 15 bp, Homo sapiens
gcgccggctccagga

SEQ ID NO: 1464667 - DNA, 15 bp, Homo sapiens
cgccggctccaggac

SEQ ID NO: 1464668 - DNA, 15 bp, Homo sapiens
gccggctccaggacc

SEQ ID NO: 1464669 - DNA, 15 bp, Homo sapiens
ccggctccaggacca

SEQ ID NO: 1464670 - DNA, 15 bp, Homo sapiens
cggctccaggaccag

SEQ ID NO: 1464671 - DNA, 15 bp, Homo sapiens
ggctccaggaccagg

SEQ ID NO: 1464672 - DNA, 15 bp, Homo sapiens
gctccaggaccaggg

SEQ ID NO: 1464673 - DNA, 15 bp, Homo sapiens
ctccaggaccagggc

SEQ ID NO: 1464674 - DNA, 15 bp, Homo sapiens
tccaggaccagggct

SEQ ID NO: 1464675 - DNA, 15 bp, Homo sapiens
ccaggaccagggctc

SEQ ID NO: 1464676 - DNA, 15 bp, Homo sapiens
caggaccagggctcc

SEQ ID NO: 1464677 - DNA, 15 bp, Homo sapiens
aggaccagggctcct

SEQ ID NO: 1464678 - DNA, 15 bp, Homo sapiens
ggaccagggctcctg

SEQ ID NO: 1464679 - DNA, 15 bp, Homo sapiens
gaccagggctcctgg

SEQ ID NO: 1464680 - DNA, 15 bp, Homo sapiens
accagggctcctgga

SEQ ID NO: 1464681 - DNA, 15 bp, Homo sapiens
ccagggctcctggag

SEQ ID NO: 1464682 - DNA, 15 bp, Homo sapiens
cagggctcctggagc

SEQ ID NO: 1464683 - DNA, 15 bp, Homo sapiens
agggctcctggagct

SEQ ID NO: 1464684 - DNA, 15 bp, Homo sapiens
gggctcctggagctg

SEQ ID NO: 1464685 - DNA, 15 bp, Homo sapiens
ggctcctggagctgt

SEQ ID NO: 1464686 - DNA, 15 bp, Homo sapiens
gctcctggagctgtc

SEQ ID NO: 1464687 - DNA, 15 bp, Homo sapiens
ctcctggagctgtcg

SEQ ID NO: 1464688 - DNA, 15 bp, Homo sapiens
tcctggagctgtcgc

SEQ ID NO: 1464689 - DNA, 15 bp, Homo sapiens
cctggagctgtcgcc

SEQ ID NO: 1464690 - DNA, 15 bp, Homo sapiens
ctggagctgtcgcct

SEQ ID NO: 1464691 - DNA, 15 bp, Homo sapiens
tggagctgtcgcctc

SEQ ID NO: 1464692 - DNA, 15 bp, Homo sapiens
ggagctgtcgcctcc

SEQ ID NO: 1464693 - DNA, 15 bp, Homo sapiens
gagctgtcgcctccg

SEQ ID NO: 1464694 - DNA, 15 bp, Homo sapiens
agctgtcgcctccga

SEQ ID NO: 1464695 - DNA, 15 bp, Homo sapiens
gctgtcgcctccgaa

SEQ ID NO: 1464696 - DNA, 15 bp, Homo sapiens
ctgtcgcctccgaaa

SEQ ID NO: 1464697 - DNA, 15 bp, Homo sapiens
tgtcgcctccgaaag

SEQ ID NO: 1464698 - DNA, 15 bp, Homo sapiens
gtcgcctccgaaagg

SEQ ID NO: 1464699 - DNA, 15 bp, Homo sapiens
tcgcctccgaaaggg

SEQ ID NO: 1464700 - DNA, 15 bp, Homo sapiens
cgcctccgaaagggt

SEQ ID NO: 1464701 - DNA, 15 bp, Homo sapiens
gcctccgaaagggtc

SEQ ID NO: 1464702 - DNA, 15 bp, Homo sapiens
cctccgaaagggtcc

SEQ ID NO: 1464703 - DNA, 15 bp, Homo sapiens
ctccgaaagggtcct

SEQ ID NO: 1464704 - DNA, 15 bp, Homo sapiens
tccgaaagggtcctg

SEQ ID NO: 1464705 - DNA, 15 bp, Homo sapiens
ccgaaagggtcctgc

SEQ ID NO: 1464706 - DNA, 15 bp, Homo sapiens
cgaaagggtcctgcg

SEQ ID NO: 1464707 - DNA, 15 bp, Homo sapiens
gaaagggtcctgcgt

SEQ ID NO: 1464708 - DNA, 15 bp, Homo sapiens
aaagggtcctgcgtc

SEQ ID NO: 1464709 - DNA, 15 bp, Homo sapiens
aagggtcctgcgtcc

SEQ ID NO: 1464710 - DNA, 15 bp, Homo sapiens
agggtcctgcgtcct

SEQ ID NO: 1464711 - DNA, 15 bp, Homo sapiens
gggtcctgcgtcctt

SEQ ID NO: 1464712 - DNA, 15 bp, Homo sapiens
ggtcctgcgtccttc

SEQ ID NO: 1464713 - DNA, 15 bp, Homo sapiens
gtcctgcgtccttcg

SEQ ID NO: 1464714 - DNA, 15 bp, Homo sapiens
tcctgcgtccttcgg

SEQ ID NO: 1464715 - DNA, 15 bp, Homo sapiens
cctgcgtccttcgga

SEQ ID NO: 1464716 - DNA, 15 bp, Homo sapiens
ctgcgtccttcggag

SEQ ID NO: 1464717 - DNA, 15 bp, Homo sapiens
tgcgtccttcggagc

SEQ ID NO: 1464718 - DNA, 15 bp, Homo sapiens
gcgtccttcggagcc

SEQ ID NO: 1464719 - DNA, 15 bp, Homo sapiens
cgtccttcggagccg

SEQ ID NO: 1464720 - DNA, 15 bp, Homo sapiens
gtccttcggagccgc

SEQ ID NO: 1464721 - DNA, 15 bp, Homo sapiens
tccttcggagccgcc

SEQ ID NO: 1464722 - DNA, 15 bp, Homo sapiens
ccttcggagccgcct

SEQ ID NO: 1464723 - DNA, 15 bp, Homo sapiens
cttcggagccgcctc

SEQ ID NO: 1464724 - DNA, 15 bp, Homo sapiens
ttcggagccgcctcc

SEQ ID NO: 1464725 - DNA, 15 bp, Homo sapiens
tcggagccgcctccg

SEQ ID NO: 1464726 - DNA, 15 bp, Homo sapiens
cggagccgcctccgt

SEQ ID NO: 1464727 - DNA, 15 bp, Homo sapiens
ggagccgcctccgtt

SEQ ID NO: 1464728 - DNA, 15 bp, Homo sapiens
gagccgcctccgttg

SEQ ID NO: 1464729 - DNA, 15 bp, Homo sapiens
agccgcctccgttgc

SEQ ID NO: 1464730 - DNA, 15 bp, Homo sapiens
gccgcctccgttgca

SEQ ID NO: 1464731 - DNA, 15 bp, Homo sapiens
ccgcctccgttgcag

SEQ ID NO: 1464732 - DNA, 15 bp, Homo sapiens
cgcctccgttgcagg

SEQ ID NO: 1464733 - DNA, 15 bp, Homo sapiens
gcctccgttgcaggg

SEQ ID NO: 1464734 - DNA, 15 bp, Homo sapiens
cctccgttgcagggg

SEQ ID NO: 1464735 - DNA, 15 bp, Homo sapiens
ctccgttgcaggggc

SEQ ID NO: 1464736 - DNA, 15 bp, Homo sapiens
tccgttgcaggggcc

SEQ ID NO: 1464737 - DNA, 15 bp, Homo sapiens
ccgttgcaggggccg

SEQ ID NO: 1464738 - DNA, 15 bp, Homo sapiens
cgttgcaggggccgg

SEQ ID NO: 1464739 - DNA, 15 bp, Homo sapiens
gttgcaggggccggc

SEQ ID NO: 1464740 - DNA, 15 bp, Homo sapiens
ttgcaggggccggct

SEQ ID NO: 1464741 - DNA, 15 bp, Homo sapiens
tgcaggggccggctg

SEQ ID NO: 1464742 - DNA, 15 bp, Homo sapiens
gcaggggccggctgt

SEQ ID NO: 1464743 - DNA, 15 bp, Homo sapiens
caggggccggctgtg

SEQ ID NO: 1464744 - DNA, 15 bp, Homo sapiens
aggggccggctgtga

SEQ ID NO: 1464745 - DNA, 15 bp, Homo sapiens
ggggccggctgtgag

SEQ ID NO: 1464746 - DNA, 15 bp, Homo sapiens
gggccggctgtgagc

SEQ ID NO: 1464747 - DNA, 15 bp, Homo sapiens
ggccggctgtgagcc

SEQ ID NO: 1464748 - DNA, 15 bp, Homo sapiens
gccggctgtgagccc

SEQ ID NO: 1464749 - DNA, 15 bp, Homo sapiens
ccggctgtgagcccg

SEQ ID NO: 1464750 - DNA, 15 bp, Homo sapiens
cggctgtgagcccgc

SEQ ID NO: 1464751 - DNA, 15 bp, Homo sapiens
ggctgtgagcccgcg

SEQ ID NO: 1464752 - DNA, 15 bp, Homo sapiens
gctgtgagcccgcgc

SEQ ID NO: 1464753 - DNA, 15 bp, Homo sapiens
ctgtgagcccgcgcc

SEQ ID NO: 1464754 - DNA, 15 bp, Homo sapiens
tgtgagcccgcgccc

SEQ ID NO: 1464755 - DNA, 15 bp, Homo sapiens
gtgagcccgcgcccc

SEQ ID NO: 1464756 - DNA, 15 bp, Homo sapiens
tgagcccgcgccccg

SEQ ID NO: 1464757 - DNA, 15 bp, Homo sapiens
gagcccgcgccccgc

SEQ ID NO: 1464758 - DNA, 15 bp, Homo sapiens
agcccgcgccccgcg

SEQ ID NO: 1464759 - DNA, 15 bp, Homo sapiens
gcccgcgccccgcgc

SEQ ID NO: 1464760 - DNA, 15 bp, Homo sapiens
cccgcgccccgcgcc

SEQ ID NO: 1464761 - DNA, 15 bp, Homo sapiens
ccgcgccccgcgccc

SEQ ID NO: 1464762 - DNA, 15 bp, Homo sapiens
cgcgccccgcgcccg

SEQ ID NO: 1464763 - DNA, 15 bp, Homo sapiens
gcgccccgcgcccgc

SEQ ID NO: 1464764 - DNA, 15 bp, Homo sapiens
cgccccgcgcccgcc

SEQ ID NO: 1464765 - DNA, 15 bp, Homo sapiens
gccccgcgcccgccc

SEQ ID NO: 1464766 - DNA, 15 bp, Homo sapiens
ccccgcgcccgcccg

SEQ ID NO: 1464767 - DNA, 15 bp, Homo sapiens
cccgcgcccgcccgg

SEQ ID NO: 1464768 - DNA, 15 bp, Homo sapiens
ccgcgcccgcccggc

SEQ ID NO: 1464769 - DNA, 15 bp, Homo sapiens
cgcgcccgcccggcc

SEQ ID NO: 1464770 - DNA, 15 bp, Homo sapiens
gcgcccgcccggcca

SEQ ID NO: 1464771 - DNA, 15 bp, Homo sapiens
cgcccgcccggccat

SEQ ID NO: 1464772 - DNA, 15 bp, Homo sapiens
gcccgcccggccatt

SEQ ID NO: 1464773 - DNA, 15 bp, Homo sapiens
cccgcccggccattc

SEQ ID NO: 1464774 - DNA, 15 bp, Homo sapiens
ccgcccggccattcc

SEQ ID NO: 1464775 - DNA, 15 bp, Homo sapiens
cgcccggccattccc

SEQ ID NO: 1464776 - DNA, 15 bp, Homo sapiens
gcccggccattccca

SEQ ID NO: 1464777 - DNA, 15 bp, Homo sapiens
cccggccattcccac

SEQ ID NO: 1464778 - DNA, 15 bp, Homo sapiens
ccggccattcccacc

SEQ ID NO: 1464779 - DNA, 15 bp, Homo sapiens
cggccattcccaccc

SEQ ID NO: 1464780 - DNA, 15 bp, Homo sapiens
ggccattcccacccc

SEQ ID NO: 1464781 - DNA, 15 bp, Homo sapiens
gccattcccacccca

SEQ ID NO: 1464782 - DNA, 15 bp, Homo sapiens
ccattcccaccccag

SEQ ID NO: 1464783 - DNA, 15 bp, Homo sapiens
cattcccaccccagc

SEQ ID NO: 1464784 - DNA, 15 bp, Homo sapiens
attcccaccccagcc

SEQ ID NO: 1464785 - DNA, 15 bp, Homo sapiens
ttcccaccccagccg

SEQ ID NO: 1464786 - DNA, 15 bp, Homo sapiens
tcccaccccagccgc

SEQ ID NO: 1464787 - DNA, 15 bp, Homo sapiens
cccaccccagccgcc

SEQ ID NO: 1464788 - DNA, 15 bp, Homo sapiens
ccaccccagccgccg

SEQ ID NO: 1464789 - DNA, 15 bp, Homo sapiens
caccccagccgccgc

SEQ ID NO: 1464790 - DNA, 15 bp, Homo sapiens
accccagccgccgcc

SEQ ID NO: 1464791 - DNA, 15 bp, Homo sapiens
ccccagccgccgccg

SEQ ID NO: 1464792 - DNA, 15 bp, Homo sapiens
cccagccgccgccgc

SEQ ID NO: 1464793 - DNA, 15 bp, Homo sapiens
ccagccgccgccgcc

SEQ ID NO: 1464794 - DNA, 15 bp, Homo sapiens
cagccgccgccgcca

SEQ ID NO: 1464795 - DNA, 15 bp, Homo sapiens
agccgccgccgccaa

SEQ ID NO: 1464796 - DNA, 15 bp, Homo sapiens
gccgccgccgccaag

SEQ ID NO: 1464797 - DNA, 15 bp, Homo sapiens
ccgccgccgccaagc

SEQ ID NO: 1464798 - DNA, 15 bp, Homo sapiens
cgccgccgccaagcc

SEQ ID NO: 1464799 - DNA, 15 bp, Homo sapiens
gccgccgccaagcct

SEQ ID NO: 1464800 - DNA, 15 bp, Homo sapiens
ccgccgccaagcctg

SEQ ID NO: 1464801 - DNA, 15 bp, Homo sapiens
cgccgccaagcctgg

SEQ ID NO: 1464802 - DNA, 15 bp, Homo sapiens
gccgccaagcctggg

SEQ ID NO: 1464803 - DNA, 15 bp, Homo sapiens
ccgccaagcctgggt

SEQ ID NO: 1464804 - DNA, 15 bp, Homo sapiens
cgccaagcctgggtc

SEQ ID NO: 1464805 - DNA, 15 bp, Homo sapiens
gccaagcctgggtct

SEQ ID NO: 1464806 - DNA, 15 bp, Homo sapiens
ccaagcctgggtcta

SEQ ID NO: 1464807 - DNA, 15 bp, Homo sapiens
caagcctgggtctag

SEQ ID NO: 1464808 - DNA, 15 bp, Homo sapiens
aagcctgggtctagg

SEQ ID NO: 1464809 - DNA, 15 bp, Homo sapiens
agcctgggtctaggt

SEQ ID NO: 1464810 - DNA, 15 bp, Homo sapiens
gcctgggtctaggtt

SEQ ID NO: 1464811 - DNA, 15 bp, Homo sapiens
cctgggtctaggttg

SEQ ID NO: 1464812 - DNA, 15 bp, Homo sapiens
ctgggtctaggttgc

SEQ ID NO: 1464813 - DNA, 15 bp, Homo sapiens
tgggtctaggttgca

SEQ ID NO: 1464814 - DNA, 15 bp, Homo sapiens
gggtctaggttgcaa

SEQ ID NO: 1464815 - DNA, 15 bp, Homo sapiens
ggtctaggttgcaaa

SEQ ID NO: 1464816 - DNA, 15 bp, Homo sapiens
gtctaggttgcaaag

SEQ ID NO: 1464817 - DNA, 15 bp, Homo sapiens
tctaggttgcaaagt

SEQ ID NO: 1464818 - DNA, 15 bp, Homo sapiens
ctaggttgcaaagtg

SEQ ID NO: 1464819 - DNA, 15 bp, Homo sapiens
taggttgcaaagtgc

SEQ ID NO: 1464820 - DNA, 15 bp, Homo sapiens
aggttgcaaagtgca

SEQ ID NO: 1464821 - DNA, 15 bp, Homo sapiens
ggttgcaaagtgcaa

SEQ ID NO: 1464822 - DNA, 15 bp, Homo sapiens
gttgcaaagtgcaac

SEQ ID NO: 1464823 - DNA, 15 bp, Homo sapiens
ttgcaaagtgcaacc

SEQ ID NO: 1464824 - DNA, 15 bp, Homo sapiens
tgcaaagtgcaaccc

SEQ ID NO: 1464825 - DNA, 15 bp, Homo sapiens
gcaaagtgcaaccca

SEQ ID NO: 1464826 - DNA, 15 bp, Homo sapiens
caaagtgcaacccag

SEQ ID NO: 1464827 - DNA, 15 bp, Homo sapiens
aaagtgcaacccagg

SEQ ID NO: 1464828 - DNA, 15 bp, Homo sapiens
aagtgcaacccaggc

SEQ ID NO: 1464829 - DNA, 15 bp, Homo sapiens
agtgcaacccaggcg

SEQ ID NO: 1464830 - DNA, 15 bp, Homo sapiens
gtgcaacccaggcgg

SEQ ID NO: 1464831 - DNA, 15 bp, Homo sapiens
tgcaacccaggcgga

SEQ ID NO: 1464832 - DNA, 15 bp, Homo sapiens
gcaacccaggcggaa

SEQ ID NO: 1464833 - DNA, 15 bp, Homo sapiens
caacccaggcggaaa

SEQ ID NO: 1464834 - DNA, 15 bp, Homo sapiens
aacccaggcggaaag

SEQ ID NO: 1464835 - DNA, 15 bp, Homo sapiens
acccaggcggaaagg

SEQ ID NO: 1464836 - DNA, 15 bp, Homo sapiens
cccaggcggaaaggt

SEQ ID NO: 1464837 - DNA, 15 bp, Homo sapiens
ccaggcggaaaggtg

SEQ ID NO: 1464838 - DNA, 15 bp, Homo sapiens
caggcggaaaggtga

SEQ ID NO: 1464839 - DNA, 15 bp, Homo sapiens
aggcggaaaggtgag

SEQ ID NO: 1464840 - DNA, 15 bp, Homo sapiens
ggcggaaaggtgagg

SEQ ID NO: 1464841 - DNA, 15 bp, Homo sapiens
gcggaaaggtgaggg

SEQ ID NO: 1464842 - DNA, 15 bp, Homo sapiens
cggaaaggtgagggt

SEQ ID NO: 1464843 - DNA, 15 bp, Homo sapiens
ggaaaggtgagggtt

SEQ ID NO: 1464844 - DNA, 15 bp, Homo sapiens
gaaaggtgagggttt

SEQ ID NO: 1464845 - DNA, 15 bp, Homo sapiens
aaaggtgagggtttg

SEQ ID NO: 1464846 - DNA, 15 bp, Homo sapiens
aaggtgagggtttgg

SEQ ID NO: 1464847 - DNA, 15 bp, Homo sapiens
aggtgagggtttggg

SEQ ID NO: 1464848 - DNA, 15 bp, Homo sapiens
ggtgagggtttgggt

SEQ ID NO: 1464849 - DNA, 15 bp, Homo sapiens
gtgagggtttgggtt

SEQ ID NO: 1464850 - DNA, 15 bp, Homo sapiens
tgagggtttgggttc

SEQ ID NO: 1464851 - DNA, 15 bp, Homo sapiens
gagggtttgggttcg

SEQ ID NO: 1464852 - DNA, 15 bp, Homo sapiens
agggtttgggttcgc

SEQ ID NO: 1464853 - DNA, 15 bp, Homo sapiens
gggtttgggttcgcg

SEQ ID NO: 1464854 - DNA, 15 bp, Homo sapiens
ggtttgggttcgcgt

SEQ ID NO: 1464855 - DNA, 15 bp, Homo sapiens
gtttgggttcgcgtc

SEQ ID NO: 1464856 - DNA, 15 bp, Homo sapiens
tttgggttcgcgtct

SEQ ID NO: 1464857 - DNA, 15 bp, Homo sapiens
ttgggttcgcgtctc

SEQ ID NO: 1464858 - DNA, 15 bp, Homo sapiens
tgggttcgcgtctca

SEQ ID NO: 1464859 - DNA, 15 bp, Homo sapiens
gggttcgcgtctcac

SEQ ID NO: 1464860 - DNA, 15 bp, Homo sapiens
ggttcgcgtctcact

SEQ ID NO: 1464861 - DNA, 15 bp, Homo sapiens
gttcgcgtctcactt

SEQ ID NO: 1464862 - DNA, 15 bp, Homo sapiens
ttcgcgtctcacttc

SEQ ID NO: 1464863 - DNA, 15 bp, Homo sapiens
tcgcgtctcacttca

SEQ ID NO: 1464864 - DNA, 15 bp, Homo sapiens
cgcgtctcacttcag

SEQ ID NO: 1464865 - DNA, 15 bp, Homo sapiens
gcgtctcacttcaga

SEQ ID NO: 1464866 - DNA, 15 bp, Homo sapiens
cgtctcacttcagaa

SEQ ID NO: 1464867 - DNA, 15 bp, Homo sapiens
gtctcacttcagaaa

SEQ ID NO: 1464868 - DNA, 15 bp, Homo sapiens
tctcacttcagaaaa

SEQ ID NO: 1464869 - DNA, 15 bp, Homo sapiens
ctcacttcagaaaag

SEQ ID NO: 1464870 - DNA, 15 bp, Homo sapiens
tcacttcagaaaagt

SEQ ID NO: 1464871 - DNA, 15 bp, Homo sapiens
cacttcagaaaagtt

SEQ ID NO: 1464872 - DNA, 15 bp, Homo sapiens
acttcagaaaagttg

SEQ ID NO: 1464873 - DNA, 15 bp, Homo sapiens
cttcagaaaagttga

SEQ ID NO: 1464874 - DNA, 15 bp, Homo sapiens
ttcagaaaagttgac

SEQ ID NO: 1464875 - DNA, 15 bp, Homo sapiens
tcagaaaagttgact

SEQ ID NO: 1464876 - DNA, 15 bp, Homo sapiens
cagaaaagttgactg

SEQ ID NO: 1464877 - DNA, 15 bp, Homo sapiens
agaaaagttgactgc

SEQ ID NO: 1464878 - DNA, 15 bp, Homo sapiens
gaaaagttgactgct

SEQ ID NO: 1464879 - DNA, 15 bp, Homo sapiens
aaaagttgactgctg

SEQ ID NO: 1464880 - DNA, 15 bp, Homo sapiens
aaagttgactgctgt

SEQ ID NO: 1464881 - DNA, 15 bp, Homo sapiens
aagttgactgctgtc

SEQ ID NO: 1464882 - DNA, 15 bp, Homo sapiens
agttgactgctgtct

SEQ ID NO: 1464883 - DNA, 15 bp, Homo sapiens
gttgactgctgtctc

SEQ ID NO: 1464884 - DNA, 15 bp, Homo sapiens
ttgactgctgtctct

SEQ ID NO: 1464885 - DNA, 15 bp, Homo sapiens
tgactgctgtctctg

SEQ ID NO: 1464886 - DNA, 15 bp, Homo sapiens
gactgctgtctctga

SEQ ID NO: 1464887 - DNA, 15 bp, Homo sapiens
actgctgtctctgaa

SEQ ID NO: 1464888 - DNA, 15 bp, Homo sapiens
ctgctgtctctgaaa

SEQ ID NO: 1464889 - DNA, 15 bp, Homo sapiens
tgctgtctctgaaag

SEQ ID NO: 1464890 - DNA, 15 bp, Homo sapiens
gctgtctctgaaagg

SEQ ID NO: 1464891 - DNA, 15 bp, Homo sapiens
ctgtctctgaaaggg

SEQ ID NO: 1464892 - DNA, 15 bp, Homo sapiens
tgtctctgaaagggt

SEQ ID NO: 1464893 - DNA, 15 bp, Homo sapiens
gtctctgaaagggtt

SEQ ID NO: 1464894 - DNA, 15 bp, Homo sapiens
tctctgaaagggttc

SEQ ID NO: 1464895 - DNA, 15 bp, Homo sapiens
ctctgaaagggttcg

SEQ ID NO: 1464896 - DNA, 15 bp, Homo sapiens
tctgaaagggttcgc

SEQ ID NO: 1464897 - DNA, 15 bp, Homo sapiens
ctgaaagggttcgcc

SEQ ID NO: 1464898 - DNA, 15 bp, Homo sapiens
tgaaagggttcgcca

SEQ ID NO: 1464899 - DNA, 15 bp, Homo sapiens
gaaagggttcgccaa

SEQ ID NO: 1464900 - DNA, 15 bp, Homo sapiens
aaagggttcgccaag

SEQ ID NO: 1464901 - DNA, 15 bp, Homo sapiens
aagggttcgccaagt

SEQ ID NO: 1464902 - DNA, 15 bp, Homo sapiens
agggttcgccaagta

SEQ ID NO: 1464903 - DNA, 15 bp, Homo sapiens
gggttcgccaagtag

SEQ ID NO: 1464904 - DNA, 15 bp, Homo sapiens
ggttcgccaagtagg

SEQ ID NO: 1464905 - DNA, 15 bp, Homo sapiens
gttcgccaagtaggg

SEQ ID NO: 1464906 - DNA, 15 bp, Homo sapiens
ttcgccaagtagggc

SEQ ID NO: 1464907 - DNA, 15 bp, Homo sapiens
tcgccaagtagggcc

SEQ ID NO: 1464908 - DNA, 15 bp, Homo sapiens
cgccaagtagggcca

SEQ ID NO: 1464909 - DNA, 15 bp, Homo sapiens
gccaagtagggccag

SEQ ID NO: 1464910 - DNA, 15 bp, Homo sapiens
ccaagtagggccagg

SEQ ID NO: 1464911 - DNA, 15 bp, Homo sapiens
caagtagggccagga

SEQ ID NO: 1464912 - DNA, 15 bp, Homo sapiens
aagtagggccaggag

SEQ ID NO: 1464913 - DNA, 15 bp, Homo sapiens
agtagggccaggagc

SEQ ID NO: 1464914 - DNA, 15 bp, Homo sapiens
gtagggccaggagca

SEQ ID NO: 1464915 - DNA, 15 bp, Homo sapiens
tagggccaggagcag

SEQ ID NO: 1464916 - DNA, 15 bp, Homo sapiens
agggccaggagcaga

SEQ ID NO: 1464917 - DNA, 15 bp, Homo sapiens
gggccaggagcagag

SEQ ID NO: 1464918 - DNA, 15 bp, Homo sapiens
ggccaggagcagaga

SEQ ID NO: 1464919 - DNA, 15 bp, Homo sapiens
gccaggagcagagag

SEQ ID NO: 1464920 - DNA, 15 bp, Homo sapiens
ccaggagcagagagg

SEQ ID NO: 1464921 - DNA, 15 bp, Homo sapiens
caggagcagagagga

SEQ ID NO: 1464922 - DNA, 15 bp, Homo sapiens
aggagcagagaggag

SEQ ID NO: 1464923 - DNA, 15 bp, Homo sapiens
ggagcagagaggagg

SEQ ID NO: 1464924 - DNA, 15 bp, Homo sapiens
gagcagagaggaggg

SEQ ID NO: 1464925 - DNA, 15 bp, Homo sapiens
agcagagaggaggga

SEQ ID NO: 1464926 - DNA, 15 bp, Homo sapiens
gcagagaggagggac

SEQ ID NO: 1464927 - DNA, 15 bp, Homo sapiens
cagagaggagggaca

SEQ ID NO: 1464928 - DNA, 15 bp, Homo sapiens
agagaggagggacac

SEQ ID NO: 1464929 - DNA, 15 bp, Homo sapiens
gagaggagggacacc

SEQ ID NO: 1464930 - DNA, 15 bp, Homo sapiens
agaggagggacaccc

SEQ ID NO: 1464931 - DNA, 15 bp, Homo sapiens
gaggagggacacccc

SEQ ID NO: 1464932 - DNA, 15 bp, Homo sapiens
aggagggacaccccc

SEQ ID NO: 1464933 - DNA, 15 bp, Homo sapiens
ggagggacaccccct

SEQ ID NO: 1464934 - DNA, 15 bp, Homo sapiens
gagggacacccccta

SEQ ID NO: 1464935 - DNA, 15 bp, Homo sapiens
agggacaccccctaa

SEQ ID NO: 1464936 - DNA, 15 bp, Homo sapiens
gggacaccccctaac

SEQ ID NO: 1464937 - DNA, 15 bp, Homo sapiens
ggacaccccctaacg

SEQ ID NO: 1464938 - DNA, 15 bp, Homo sapiens
gacaccccctaacgt

SEQ ID NO: 1464939 - DNA, 15 bp, Homo sapiens
acaccccctaacgtg

SEQ ID NO: 1464940 - DNA, 15 bp, Homo sapiens
caccccctaacgtga

SEQ ID NO: 1464941 - DNA, 15 bp, Homo sapiens
accccctaacgtgac

SEQ ID NO: 1464942 - DNA, 15 bp, Homo sapiens
ccccctaacgtgacg

SEQ ID NO: 1464943 - DNA, 15 bp, Homo sapiens
cccctaacgtgacgg

SEQ ID NO: 1464944 - DNA, 15 bp, Homo sapiens
ccctaacgtgacggg

SEQ ID NO: 1464945 - DNA, 15 bp, Homo sapiens
cctaacgtgacgggc

SEQ ID NO: 1464946 - DNA, 15 bp, Homo sapiens
ctaacgtgacgggcc

SEQ ID NO: 1464947 - DNA, 15 bp, Homo sapiens
taacgtgacgggcct

SEQ ID NO: 1464948 - DNA, 15 bp, Homo sapiens
aacgtgacgggcctt

SEQ ID NO: 1464949 - DNA, 15 bp, Homo sapiens
acgtgacgggcctta

SEQ ID NO: 1464950 - DNA, 15 bp, Homo sapiens
cgtgacgggccttag

SEQ ID NO: 1464951 - DNA, 15 bp, Homo sapiens
gtgacgggccttaga

SEQ ID NO: 1464952 - DNA, 15 bp, Homo sapiens
tgacgggccttagag

SEQ ID NO: 1464953 - DNA, 15 bp, Homo sapiens
gacgggccttagagg

SEQ ID NO: 1464954 - DNA, 15 bp, Homo sapiens
acgggccttagagga

SEQ ID NO: 1464955 - DNA, 15 bp, Homo sapiens
cgggccttagaggac

SEQ ID NO: 1464956 - DNA, 15 bp, Homo sapiens
gggccttagaggacc

SEQ ID NO: 1464957 - DNA, 15 bp, Homo sapiens
ggccttagaggacct

SEQ ID NO: 1464958 - DNA, 15 bp, Homo sapiens
gccttagaggaccta

SEQ ID NO: 1464959 - DNA, 15 bp, Homo sapiens
ccttagaggacctag

SEQ ID NO: 1464960 - DNA, 15 bp, Homo sapiens
cttagaggacctagg

SEQ ID NO: 1464961 - DNA, 15 bp, Homo sapiens
ttagaggacctaggg

SEQ ID NO: 1464962 - DNA, 15 bp, Homo sapiens
tagaggacctagggg

SEQ ID NO: 1464963 - DNA, 15 bp, Homo sapiens
agaggacctagggga

SEQ ID NO: 1464964 - DNA, 15 bp, Homo sapiens
gaggacctaggggaa

SEQ ID NO: 1464965 - DNA, 15 bp, Homo sapiens
aggacctaggggaat

SEQ ID NO: 1464966 - DNA, 15 bp, Homo sapiens
ggacctaggggaatg

SEQ ID NO: 1464967 - DNA, 15 bp, Homo sapiens
gacctaggggaatga

SEQ ID NO: 1464968 - DNA, 15 bp, Homo sapiens
acctaggggaatgaa

SEQ ID NO: 1464969 - DNA, 15 bp, Homo sapiens
cctaggggaatgaat

SEQ ID NO: 1464970 - DNA, 15 bp, Homo sapiens
ctaggggaatgaatg

SEQ ID NO: 1464971 - DNA, 15 bp, Homo sapiens
taggggaatgaatgg

SEQ ID NO: 1464972 - DNA, 15 bp, Homo sapiens
aggggaatgaatggg

SEQ ID NO: 1464973 - DNA, 15 bp, Homo sapiens
ggggaatgaatggga

SEQ ID NO: 1464974 - DNA, 15 bp, Homo sapiens
gggaatgaatgggac

SEQ ID NO: 1464975 - DNA, 15 bp, Homo sapiens
ggaatgaatgggacc

SEQ ID NO: 1464976 - DNA, 15 bp, Homo sapiens
gaatgaatgggacca

SEQ ID NO: 1464977 - DNA, 15 bp, Homo sapiens
aatgaatgggaccag

SEQ ID NO: 1464978 - DNA, 15 bp, Homo sapiens
atgaatgggaccagg

SEQ ID NO: 1464979 - DNA, 15 bp, Homo sapiens
tgaatgggaccaggg

SEQ ID NO: 1464980 - DNA, 15 bp, Homo sapiens
gaatgggaccagggg

SEQ ID NO: 1464981 - DNA, 15 bp, Homo sapiens
aatgggaccaggggt

SEQ ID NO: 1464982 - DNA, 15 bp, Homo sapiens
atgggaccaggggtt

SEQ ID NO: 1464983 - DNA, 15 bp, Homo sapiens
tgggaccaggggtta

SEQ ID NO: 1464984 - DNA, 15 bp, Homo sapiens
gggaccaggggttag

SEQ ID NO: 1464985 - DNA, 15 bp, Homo sapiens
ggaccaggggttagc

SEQ ID NO: 1464986 - DNA, 15 bp, Homo sapiens
gaccaggggttagct

SEQ ID NO: 1464987 - DNA, 15 bp, Homo sapiens
accaggggttagctt

SEQ ID NO: 1464988 - DNA, 15 bp, Homo sapiens
ccaggggttagcttc

SEQ ID NO: 1464989 - DNA, 15 bp, Homo sapiens
caggggttagcttcg

SEQ ID NO: 1464990 - DNA, 15 bp, Homo sapiens
aggggttagcttcga

SEQ ID NO: 1464991 - DNA, 15 bp, Homo sapiens
ggggttagcttcgag

SEQ ID NO: 1464992 - DNA, 15 bp, Homo sapiens
gggttagcttcgagg

SEQ ID NO: 1464993 - DNA, 15 bp, Homo sapiens
ggttagcttcgaggc

SEQ ID NO: 1464994 - DNA, 15 bp, Homo sapiens
gttagcttcgaggct

SEQ ID NO: 1464995 - DNA, 15 bp, Homo sapiens
ttagcttcgaggctg

SEQ ID NO: 1464996 - DNA, 15 bp, Homo sapiens
tagcttcgaggctgc

SEQ ID NO: 1464997 - DNA, 15 bp, Homo sapiens
agcttcgaggctgcc

SEQ ID NO: 1464998 - DNA, 15 bp, Homo sapiens
gcttcgaggctgccg

SEQ ID NO: 1464999 - DNA, 15 bp, Homo sapiens
cttcgaggctgccgc

SEQ ID NO: 1465000 - DNA, 15 bp, Homo sapiens
ttcgaggctgccgcg

SEQ ID NO: 1465001 - DNA, 15 bp, Homo sapiens
tcgaggctgccgcgc

SEQ ID NO: 1465002 - DNA, 15 bp, Homo sapiens
cgaggctgccgcgca

SEQ ID NO: 1465003 - DNA, 15 bp, Homo sapiens
gaggctgccgcgcaa

SEQ ID NO: 1465004 - DNA, 15 bp, Homo sapiens
aggctgccgcgcaac

SEQ ID NO: 1465005 - DNA, 15 bp, Homo sapiens
ggctgccgcgcaaca

SEQ ID NO: 1465006 - DNA, 15 bp, Homo sapiens
gctgccgcgcaacac

SEQ ID NO: 1465007 - DNA, 15 bp, Homo sapiens
ctgccgcgcaacacc

SEQ ID NO: 1465008 - DNA, 15 bp, Homo sapiens
tgccgcgcaacacca

SEQ ID NO: 1465009 - DNA, 15 bp, Homo sapiens
gccgcgcaacaccaa

SEQ ID NO: 1465010 - DNA, 15 bp, Homo sapiens
ccgcgcaacaccaag

SEQ ID NO: 1465011 - DNA, 15 bp, Homo sapiens
cgcgcaacaccaagc

SEQ ID NO: 1465012 - DNA, 15 bp, Homo sapiens
gcgcaacaccaagcg

SEQ ID NO: 1465013 - DNA, 15 bp, Homo sapiens
cgcaacaccaagcgg

SEQ ID NO: 1465014 - DNA, 15 bp, Homo sapiens
gcaacaccaagcggg

SEQ ID NO: 1465015 - DNA, 15 bp, Homo sapiens
caacaccaagcggga

SEQ ID NO: 1465016 - DNA, 15 bp, Homo sapiens
aacaccaagcgggag

SEQ ID NO: 1465017 - DNA, 15 bp, Homo sapiens
acaccaagcgggagt

SEQ ID NO: 1465018 - DNA, 15 bp, Homo sapiens
caccaagcgggagtc

SEQ ID NO: 1465019 - DNA, 15 bp, Homo sapiens
accaagcgggagtct

SEQ ID NO: 1465020 - DNA, 15 bp, Homo sapiens
ccaagcgggagtctg

SEQ ID NO: 1465021 - DNA, 15 bp, Homo sapiens
caagcgggagtctgt

SEQ ID NO: 1465022 - DNA, 15 bp, Homo sapiens
aagcgggagtctgtc

SEQ ID NO: 1465023 - DNA, 15 bp, Homo sapiens
agcgggagtctgtct

SEQ ID NO: 1465024 - DNA, 15 bp, Homo sapiens
gcgggagtctgtctg

SEQ ID NO: 1465025 - DNA, 15 bp, Homo sapiens
cgggagtctgtctgg

SEQ ID NO: 1465026 - DNA, 15 bp, Homo sapiens
gggagtctgtctgga

SEQ ID NO: 1465027 - DNA, 15 bp, Homo sapiens
ggagtctgtctggaa

SEQ ID NO: 1465028 - DNA, 15 bp, Homo sapiens
gagtctgtctggaaa

SEQ ID NO: 1465029 - DNA, 15 bp, Homo sapiens
agtctgtctggaaaa

SEQ ID NO: 1465030 - DNA, 15 bp, Homo sapiens
gtctgtctggaaaaa

SEQ ID NO: 1465031 - DNA, 15 bp, Homo sapiens
tctgtctggaaaaac

SEQ ID NO: 1465032 - DNA, 15 bp, Homo sapiens
ctgtctggaaaaact

SEQ ID NO: 1465033 - DNA, 15 bp, Homo sapiens
tgtctggaaaaacta

SEQ ID NO: 1465034 - DNA, 15 bp, Homo sapiens
gtctggaaaaactat

SEQ ID NO: 1465035 - DNA, 15 bp, Homo sapiens
tctggaaaaactatt

SEQ ID NO: 1465036 - DNA, 15 bp, Homo sapiens
ctggaaaaactatta

SEQ ID NO: 1465037 - DNA, 15 bp, Homo sapiens
tggaaaaactattag

SEQ ID NO: 1465038 - DNA, 15 bp, Homo sapiens
ggaaaaactattagg

SEQ ID NO: 1465039 - DNA, 15 bp, Homo sapiens
gaaaaactattaggc

SEQ ID NO: 1465040 - DNA, 15 bp, Homo sapiens
aaaaactattaggct

SEQ ID NO: 1465041 - DNA, 15 bp, Homo sapiens
aaaactattaggctg

SEQ ID NO: 1465042 - DNA, 15 bp, Homo sapiens
aaactattaggctgg

SEQ ID NO: 1465043 - DNA, 15 bp, Homo sapiens
aactattaggctggc

SEQ ID NO: 1465044 - DNA, 15 bp, Homo sapiens
actattaggctggcg

SEQ ID NO: 1465045 - DNA, 15 bp, Homo sapiens
ctattaggctggcga

SEQ ID NO: 1465046 - DNA, 15 bp, Homo sapiens
tattaggctggcgag

SEQ ID NO: 1465047 - DNA, 15 bp, Homo sapiens
attaggctggcgagg

SEQ ID NO: 1465048 - DNA, 15 bp, Homo sapiens
ttaggctggcgaggt

SEQ ID NO: 1465049 - DNA, 15 bp, Homo sapiens
taggctggcgaggtg

SEQ ID NO: 1465050 - DNA, 15 bp, Homo sapiens
aggctggcgaggtgg

SEQ ID NO: 1465051 - DNA, 15 bp, Homo sapiens
ggctggcgaggtggg

SEQ ID NO: 1465052 - DNA, 15 bp, Homo sapiens
ctggcgaggtgggga

SEQ ID NO: 1465053 - DNA, 15 bp, Homo sapiens
tggcgaggtggggac

SEQ ID NO: 1465054 - DNA, 15 bp, Homo sapiens
ggcgaggtggggact

SEQ ID NO: 1465055 - DNA, 15 bp, Homo sapiens
gcgaggtggggactg

SEQ ID NO: 1465056 - DNA, 15 bp, Homo sapiens
cgaggtggggactgg

SEQ ID NO: 1465057 - DNA, 15 bp, Homo sapiens
gaggtggggactggc

SEQ ID NO: 1465058 - DNA, 15 bp, Homo sapiens
aggtggggactggca

SEQ ID NO: 1465059 - DNA, 15 bp, Homo sapiens
ggtggggactggcag

SEQ ID NO: 1465060 - DNA, 15 bp, Homo sapiens
gtggggactggcaga

SEQ ID NO: 1465061 - DNA, 15 bp, Homo sapiens
tggggactggcagag

SEQ ID NO: 1465062 - DNA, 15 bp, Homo sapiens
ggggactggcagagc

SEQ ID NO: 1465063 - DNA, 15 bp, Homo sapiens
gggactggcagagcc

SEQ ID NO: 1465064 - DNA, 15 bp, Homo sapiens
ggactggcagagccc

SEQ ID NO: 1465065 - DNA, 15 bp, Homo sapiens
gactggcagagcccg

SEQ ID NO: 1465066 - DNA, 15 bp, Homo sapiens
actggcagagcccgc

SEQ ID NO: 1465067 - DNA, 15 bp, Homo sapiens
ctggcagagcccgcc

SEQ ID NO: 1465068 - DNA, 15 bp, Homo sapiens
tggcagagcccgcca

SEQ ID NO: 1465069 - DNA, 15 bp, Homo sapiens
ggcagagcccgccat

SEQ ID NO: 1465070 - DNA, 15 bp, Homo sapiens
gcagagcccgccatt

SEQ ID NO: 1465071 - DNA, 15 bp, Homo sapiens
cagagcccgccattc

SEQ ID NO: 1465072 - DNA, 15 bp, Homo sapiens
agagcccgccattcc

SEQ ID NO: 1465073 - DNA, 15 bp, Homo sapiens
gagcccgccattccc

SEQ ID NO: 1465074 - DNA, 15 bp, Homo sapiens
agcccgccattcccc

SEQ ID NO: 1465075 - DNA, 15 bp, Homo sapiens
gcccgccattcccca

SEQ ID NO: 1465076 - DNA, 15 bp, Homo sapiens
cccgccattccccag

SEQ ID NO: 1465077 - DNA, 15 bp, Homo sapiens
ccgccattccccaga

SEQ ID NO: 1465078 - DNA, 15 bp, Homo sapiens
cgccattccccagaa

SEQ ID NO: 1465079 - DNA, 15 bp, Homo sapiens
gccattccccagaac

SEQ ID NO: 1465080 - DNA, 15 bp, Homo sapiens
ccattccccagaacc

SEQ ID NO: 1465081 - DNA, 15 bp, Homo sapiens
cattccccagaaccc

SEQ ID NO: 1465082 - DNA, 15 bp, Homo sapiens
attccccagaacccg

SEQ ID NO: 1465083 - DNA, 15 bp, Homo sapiens
ttccccagaacccga

SEQ ID NO: 1465084 - DNA, 15 bp, Homo sapiens
tccccagaacccgaa

SEQ ID NO: 1465085 - DNA, 15 bp, Homo sapiens
ccccagaacccgaaa

SEQ ID NO: 1465086 - DNA, 15 bp, Homo sapiens
cccagaacccgaaag

SEQ ID NO: 1465087 - DNA, 15 bp, Homo sapiens
ccagaacccgaaaga

SEQ ID NO: 1465088 - DNA, 15 bp, Homo sapiens
cagaacccgaaagaa

SEQ ID NO: 1465089 - DNA, 15 bp, Homo sapiens
agaacccgaaagaat

SEQ ID NO: 1465090 - DNA, 15 bp, Homo sapiens
gaacccgaaagaatc

SEQ ID NO: 1465091 - DNA, 15 bp, Homo sapiens
aacccgaaagaatcg

SEQ ID NO: 1465092 - DNA, 15 bp, Homo sapiens
acccgaaagaatcga

SEQ ID NO: 1465093 - DNA, 15 bp, Homo sapiens
cccgaaagaatcgac

SEQ ID NO: 1465094 - DNA, 15 bp, Homo sapiens
ccgaaagaatcgact

SEQ ID NO: 1465095 - DNA, 15 bp, Homo sapiens
cgaaagaatcgactc

SEQ ID NO: 1465096 - DNA, 15 bp, Homo sapiens
gaaagaatcgactcc

SEQ ID NO: 1465097 - DNA, 15 bp, Homo sapiens
aaagaatcgactccc

SEQ ID NO: 1465098 - DNA, 15 bp, Homo sapiens
aagaatcgactccct

SEQ ID NO: 1465099 - DNA, 15 bp, Homo sapiens
agaatcgactccctg

SEQ ID NO: 1465100 - DNA, 15 bp, Homo sapiens
gaatcgactccctgc

SEQ ID NO: 1465101 - DNA, 15 bp, Homo sapiens
aatcgactccctgct

SEQ ID NO: 1465102 - DNA, 15 bp, Homo sapiens
atcgactccctgctc

SEQ ID NO: 1465103 - DNA, 15 bp, Homo sapiens
tcgactccctgctca

SEQ ID NO: 1465104 - DNA, 15 bp, Homo sapiens
cgactccctgctcag

SEQ ID NO: 1465105 - DNA, 15 bp, Homo sapiens
gactccctgctcagg

SEQ ID NO: 1465106 - DNA, 15 bp, Homo sapiens
actccctgctcaggg

SEQ ID NO: 1465107 - DNA, 15 bp, Homo sapiens
ctccctgctcagggc

SEQ ID NO: 1465108 - DNA, 15 bp, Homo sapiens
tccctgctcagggct

SEQ ID NO: 1465109 - DNA, 15 bp, Homo sapiens
ccctgctcagggctc

SEQ ID NO: 1465110 - DNA, 15 bp, Homo sapiens
cctgctcagggctca

SEQ ID NO: 1465111 - DNA, 15 bp, Homo sapiens
ctgctcagggctcag

SEQ ID NO: 1465112 - DNA, 15 bp, Homo sapiens
tgctcagggctcagc

SEQ ID NO: 1465113 - DNA, 15 bp, Homo sapiens
gctcagggctcagca

SEQ ID NO: 1465114 - DNA, 15 bp, Homo sapiens
ctcagggctcagcaa

SEQ ID NO: 1465115 - DNA, 15 bp, Homo sapiens
tcagggctcagcaag

SEQ ID NO: 1465116 - DNA, 15 bp, Homo sapiens
cagggctcagcaaga

SEQ ID NO: 1465117 - DNA, 15 bp, Homo sapiens
agggctcagcaagag

SEQ ID NO: 1465118 - DNA, 15 bp, Homo sapiens
gggctcagcaagaga

SEQ ID NO: 1465119 - DNA, 15 bp, Homo sapiens
ggctcagcaagagaa

SEQ ID NO: 1465120 - DNA, 15 bp, Homo sapiens
gctcagcaagagaag

SEQ ID NO: 1465121 - DNA, 15 bp, Homo sapiens
ctcagcaagagaagg

SEQ ID NO: 1465122 - DNA, 15 bp, Homo sapiens
tcagcaagagaaggc

SEQ ID NO: 1465123 - DNA, 15 bp, Homo sapiens
cagcaagagaaggct

SEQ ID NO: 1465124 - DNA, 15 bp, Homo sapiens
agcaagagaaggcta

SEQ ID NO: 1465125 - DNA, 15 bp, Homo sapiens
gcaagagaaggctaa

SEQ ID NO: 1465126 - DNA, 15 bp, Homo sapiens
caagagaaggctaag

SEQ ID NO: 1465127 - DNA, 15 bp, Homo sapiens
aagagaaggctaaga

SEQ ID NO: 1465128 - DNA, 15 bp, Homo sapiens
agagaaggctaagat

SEQ ID NO: 1465129 - DNA, 15 bp, Homo sapiens
gagaaggctaagatg

SEQ ID NO: 1465130 - DNA, 15 bp, Homo sapiens
agaaggctaagatgt

SEQ ID NO: 1465131 - DNA, 15 bp, Homo sapiens
gaaggctaagatgtt

SEQ ID NO: 1465132 - DNA, 15 bp, Homo sapiens
aaggctaagatgttg

SEQ ID NO: 1465133 - DNA, 15 bp, Homo sapiens
aggctaagatgttgg

SEQ ID NO: 1465134 - DNA, 15 bp, Homo sapiens
ggctaagatgttggg

SEQ ID NO: 1465135 - DNA, 15 bp, Homo sapiens
gctaagatgttgggc

SEQ ID NO: 1465136 - DNA, 15 bp, Homo sapiens
ctaagatgttgggct

SEQ ID NO: 1465137 - DNA, 15 bp, Homo sapiens
taagatgttgggctc

SEQ ID NO: 1465138 - DNA, 15 bp, Homo sapiens
aagatgttgggctca

SEQ ID NO: 1465139 - DNA, 15 bp, Homo sapiens
agatgttgggctcag

SEQ ID NO: 1465140 - DNA, 15 bp, Homo sapiens
gatgttgggctcaga

SEQ ID NO: 1465141 - DNA, 15 bp, Homo sapiens
atgttgggctcagag

SEQ ID NO: 1465142 - DNA, 15 bp, Homo sapiens
tgttgggctcagaga

SEQ ID NO: 1465143 - DNA, 15 bp, Homo sapiens
gttgggctcagagaa

SEQ ID NO: 1465144 - DNA, 15 bp, Homo sapiens
ttgggctcagagaat

SEQ ID NO: 1465145 - DNA, 15 bp, Homo sapiens
tgggctcagagaatt

SEQ ID NO: 1465146 - DNA, 15 bp, Homo sapiens
gggctcagagaattc

SEQ ID NO: 1465147 - DNA, 15 bp, Homo sapiens
ggctcagagaattca

SEQ ID NO: 1465148 - DNA, 15 bp, Homo sapiens
gctcagagaattcaa

SEQ ID NO: 1465149 - DNA, 15 bp, Homo sapiens
ctcagagaattcaag

SEQ ID NO: 1465150 - DNA, 15 bp, Homo sapiens
tcagagaattcaaga

SEQ ID NO: 1465151 - DNA, 15 bp, Homo sapiens
cagagaattcaagag

SEQ ID NO: 1465152 - DNA, 15 bp, Homo sapiens
agagaattcaagaga

SEQ ID NO: 1465153 - DNA, 15 bp, Homo sapiens
gagaattcaagagat

SEQ ID NO: 1465154 - DNA, 15 bp, Homo sapiens
agaattcaagagatt

SEQ ID NO: 1465155 - DNA, 15 bp, Homo sapiens
gaattcaagagattt

SEQ ID NO: 1465156 - DNA, 15 bp, Homo sapiens
aattcaagagatttt

SEQ ID NO: 1465157 - DNA, 15 bp, Homo sapiens
attcaagagattttt

SEQ ID NO: 1465158 - DNA, 15 bp, Homo sapiens
ttcaagagattttta

SEQ ID NO: 1465159 - DNA, 15 bp, Homo sapiens
tcaagagatttttat

SEQ ID NO: 1465160 - DNA, 15 bp, Homo sapiens
caagagatttttatc

SEQ ID NO: 1465161 - DNA, 15 bp, Homo sapiens
aagagatttttatct

SEQ ID NO: 1465162 - DNA, 15 bp, Homo sapiens
agagatttttatctt

SEQ ID NO: 1465163 - DNA, 15 bp, Homo sapiens
gagatttttatcttc

SEQ ID NO: 1465164 - DNA, 15 bp, Homo sapiens
agatttttatcttct

SEQ ID NO: 1465165 - DNA, 15 bp, Homo sapiens
gatttttatcttctg

SEQ ID NO: 1465166 - DNA, 15 bp, Homo sapiens
atttttatcttctgg

SEQ ID NO: 1465167 - DNA, 15 bp, Homo sapiens
tttttatcttctggg

SEQ ID NO: 1465168 - DNA, 15 bp, Homo sapiens
ttttatcttctgggt

SEQ ID NO: 1465169 - DNA, 15 bp, Homo sapiens
tttatcttctgggtg

SEQ ID NO: 1465170 - DNA, 15 bp, Homo sapiens
ttatcttctgggtgg

SEQ ID NO: 1465171 - DNA, 15 bp, Homo sapiens
tatcttctgggtggg

SEQ ID NO: 1465172 - DNA, 15 bp, Homo sapiens
atcttctgggtgggg

SEQ ID NO: 1465173 - DNA, 15 bp, Homo sapiens
tcttctgggtggggt

SEQ ID NO: 1465174 - DNA, 15 bp, Homo sapiens
cttctgggtggggtc

SEQ ID NO: 1465175 - DNA, 15 bp, Homo sapiens
ttctgggtggggtcg

SEQ ID NO: 1465176 - DNA, 15 bp, Homo sapiens
tctgggtggggtcgt

SEQ ID NO: 1465177 - DNA, 15 bp, Homo sapiens
ctgggtggggtcgtg

SEQ ID NO: 1465178 - DNA, 15 bp, Homo sapiens
tgggtggggtcgtgg

SEQ ID NO: 1465179 - DNA, 15 bp, Homo sapiens
gggtggggtcgtggt

SEQ ID NO: 1465180 - DNA, 15 bp, Homo sapiens
ggtggggtcgtggtt

SEQ ID NO: 1465181 - DNA, 15 bp, Homo sapiens
gtggggtcgtggttt

SEQ ID NO: 1465182 - DNA, 15 bp, Homo sapiens
tggggtcgtggtttt

SEQ ID NO: 1465183 - DNA, 15 bp, Homo sapiens
ggggtcgtggttttt

SEQ ID NO: 1465184 - DNA, 15 bp, Homo sapiens
gggtcgtggttttta

SEQ ID NO: 1465185 - DNA, 15 bp, Homo sapiens
ggtcgtggtttttat

SEQ ID NO: 1465186 - DNA, 15 bp, Homo sapiens
gtcgtggtttttatt

SEQ ID NO: 1465187 - DNA, 15 bp, Homo sapiens
tcgtggtttttattt

SEQ ID NO: 1465188 - DNA, 15 bp, Homo sapiens
cgtggtttttatttt

SEQ ID NO: 1465189 - DNA, 15 bp, Homo sapiens
gtggtttttattttc

SEQ ID NO: 1465190 - DNA, 15 bp, Homo sapiens
tggtttttattttct

SEQ ID NO: 1465191 - DNA, 15 bp, Homo sapiens
ggtttttattttcta

SEQ ID NO: 1465192 - DNA, 15 bp, Homo sapiens
gtttttattttctaa

SEQ ID NO: 1465193 - DNA, 15 bp, Homo sapiens
tttttattttctaag

SEQ ID NO: 1465194 - DNA, 15 bp, Homo sapiens
ttttattttctaagt

SEQ ID NO: 1465195 - DNA, 15 bp, Homo sapiens
tttattttctaagtt

SEQ ID NO: 1465196 - DNA, 15 bp, Homo sapiens
ttattttctaagttt

SEQ ID NO: 1465197 - DNA, 15 bp, Homo sapiens
tattttctaagtttt

SEQ ID NO: 1465198 - DNA, 15 bp, Homo sapiens
attttctaagttttt

SEQ ID NO: 1465199 - DNA, 15 bp, Homo sapiens
ttttctaagtttttt

SEQ ID NO: 1465200 - DNA, 15 bp, Homo sapiens
tttctaagttttttt

SEQ ID NO: 1465201 - DNA, 15 bp, Homo sapiens
ttctaagtttttttt

SEQ ID NO: 1465202 - DNA, 15 bp, Homo sapiens
tctaagtttttttta

SEQ ID NO: 1465203 - DNA, 15 bp, Homo sapiens
ctaagttttttttat

SEQ ID NO: 1465204 - DNA, 15 bp, Homo sapiens
taagttttttttatg

SEQ ID NO: 1465205 - DNA, 15 bp, Homo sapiens
aagttttttttatga

SEQ ID NO: 1465206 - DNA, 15 bp, Homo sapiens
agttttttttatgaa

SEQ ID NO: 1465207 - DNA, 15 bp, Homo sapiens
gttttttttatgaaa

SEQ ID NO: 1465208 - DNA, 15 bp, Homo sapiens
ttttttttatgaaag

SEQ ID NO: 1465209 - DNA, 15 bp, Homo sapiens
tttttttatgaaagt

SEQ ID NO: 1465210 - DNA, 15 bp, Homo sapiens
ttttttatgaaagtt

SEQ ID NO: 1465211 - DNA, 15 bp, Homo sapiens
tttttatgaaagttt

SEQ ID NO: 1465212 - DNA, 15 bp, Homo sapiens
ttttatgaaagtttg

SEQ ID NO: 1465213 - DNA, 15 bp, Homo sapiens
tttatgaaagtttga

SEQ ID NO: 1465214 - DNA, 15 bp, Homo sapiens
ttatgaaagtttgaa

SEQ ID NO: 1465215 - DNA, 15 bp, Homo sapiens
tatgaaagtttgaaa

SEQ ID NO: 1465216 - DNA, 15 bp, Homo sapiens
atgaaagtttgaaat

SEQ ID NO: 1465217 - DNA, 15 bp, Homo sapiens
tgaaagtttgaaata

SEQ ID NO: 1465218 - DNA, 15 bp, Homo sapiens
gaaagtttgaaatat

SEQ ID NO: 1465219 - DNA, 15 bp, Homo sapiens
aaagtttgaaatatg

SEQ ID NO: 1465220 - DNA, 15 bp, Homo sapiens
aagtttgaaatatgc

SEQ ID NO: 1465221 - DNA, 15 bp, Homo sapiens
agtttgaaatatgct

SEQ ID NO: 1465222 - DNA, 15 bp, Homo sapiens
gtttgaaatatgctg

SEQ ID NO: 1465223 - DNA, 15 bp, Homo sapiens
tttgaaatatgctga

SEQ ID NO: 1465224 - DNA, 15 bp, Homo sapiens
ttgaaatatgctgac

SEQ ID NO: 1465225 - DNA, 15 bp, Homo sapiens
tgaaatatgctgact

SEQ ID NO: 1465226 - DNA, 15 bp, Homo sapiens
gaaatatgctgactt

SEQ ID NO: 1465227 - DNA, 15 bp, Homo sapiens
aaatatgctgactta

SEQ ID NO: 1465228 - DNA, 15 bp, Homo sapiens
aatatgctgacttag

SEQ ID NO: 1465229 - DNA, 15 bp, Homo sapiens
atatgctgacttagg

SEQ ID NO: 1465230 - DNA, 15 bp, Homo sapiens
tatgctgacttaggt

SEQ ID NO: 1465231 - DNA, 15 bp, Homo sapiens
gacttctgtcctcaa

SEQ ID NO: 1465232 - DNA, 15 bp, Homo sapiens
acttctgtcctcaag

SEQ ID NO: 1465233 - DNA, 15 bp, Homo sapiens
cttctgtcctcaaga

SEQ ID NO: 1465234 - DNA, 15 bp, Homo sapiens
ttctgtcctcaagaa

SEQ ID NO: 1465235 - DNA, 15 bp, Homo sapiens
tctgtcctcaagaag

SEQ ID NO: 1465236 - DNA, 15 bp, Homo sapiens
ctgtcctcaagaagg

SEQ ID NO: 1465237 - DNA, 15 bp, Homo sapiens
tgtcctcaagaaggt

SEQ ID NO: 1465238 - DNA, 15 bp, Homo sapiens
gtcctcaagaaggtg

SEQ ID NO: 1465239 - DNA, 15 bp, Homo sapiens
tcctcaagaaggtgt

SEQ ID NO: 1465240 - DNA, 15 bp, Homo sapiens
cctcaagaaggtgtt

SEQ ID NO: 1465241 - DNA, 15 bp, Homo sapiens
ctcaagaaggtgttg

SEQ ID NO: 1465242 - DNA, 15 bp, Homo sapiens
tcaagaaggtgttgc

SEQ ID NO: 1465243 - DNA, 15 bp, Homo sapiens
caagaaggtgttgct

SEQ ID NO: 1465244 - DNA, 15 bp, Homo sapiens
aagaaggtgttgctg

SEQ ID NO: 1465245 - DNA, 15 bp, Homo sapiens
agaaggtgttgctgc

SEQ ID NO: 1465246 - DNA, 15 bp, Homo sapiens
gaaggtgttgctgcc

SEQ ID NO: 1465247 - DNA, 15 bp, Homo sapiens
aaggtgttgctgcct

SEQ ID NO: 1465248 - DNA, 15 bp, Homo sapiens
aggtgttgctgcctc

SEQ ID NO: 1465249 - DNA, 15 bp, Homo sapiens
ggtgttgctgcctcc

SEQ ID NO: 1465250 - DNA, 15 bp, Homo sapiens
gtgttgctgcctccc

SEQ ID NO: 1465251 - DNA, 15 bp, Homo sapiens
tgttgctgcctccct

SEQ ID NO: 1465252 - DNA, 15 bp, Homo sapiens
gttgctgcctccctc

SEQ ID NO: 1465253 - DNA, 15 bp, Homo sapiens
ttgctgcctccctct

SEQ ID NO: 1465254 - DNA, 15 bp, Homo sapiens
tgctgcctccctcta

SEQ ID NO: 1465255 - DNA, 15 bp, Homo sapiens
gctgcctccctctac

SEQ ID NO: 1465256 - DNA, 15 bp, Homo sapiens
ctgcctccctctacc

SEQ ID NO: 1465257 - DNA, 15 bp, Homo sapiens
tgcctccctctacca

SEQ ID NO: 1465258 - DNA, 15 bp, Homo sapiens
gcctccctctaccac

SEQ ID NO: 1465259 - DNA, 15 bp, Homo sapiens
cctccctctaccaca

SEQ ID NO: 1465260 - DNA, 15 bp, Homo sapiens
ctccctctaccacac

SEQ ID NO: 1465261 - DNA, 15 bp, Homo sapiens
tccctctaccacaca

SEQ ID NO: 1465262 - DNA, 15 bp, Homo sapiens
ccctctaccacacac

SEQ ID NO: 1465263 - DNA, 15 bp, Homo sapiens
cctctaccacacaca

SEQ ID NO: 1465264 - DNA, 15 bp, Homo sapiens
ctctaccacacacac

SEQ ID NO: 1465265 - DNA, 15 bp, Homo sapiens
tctaccacacacacc

SEQ ID NO: 1465266 - DNA, 15 bp, Homo sapiens
ctaccacacacacct

SEQ ID NO: 1465267 - DNA, 15 bp, Homo sapiens
taccacacacacctt

SEQ ID NO: 1465268 - DNA, 15 bp, Homo sapiens
accacacacaccttg

SEQ ID NO: 1465269 - DNA, 15 bp, Homo sapiens
ccacacacaccttgt

SEQ ID NO: 1465270 - DNA, 15 bp, Homo sapiens
cacacacaccttgta

SEQ ID NO: 1465271 - DNA, 15 bp, Homo sapiens
acacacaccttgtaa

SEQ ID NO: 1465272 - DNA, 15 bp, Homo sapiens
cacacaccttgtaat

SEQ ID NO: 1465273 - DNA, 15 bp, Homo sapiens
acacaccttgtaatc

SEQ ID NO: 1465274 - DNA, 15 bp, Homo sapiens
cacaccttgtaatct

SEQ ID NO: 1465275 - DNA, 15 bp, Homo sapiens
acaccttgtaatctc

SEQ ID NO: 1465276 - DNA, 15 bp, Homo sapiens
caccttgtaatctcc

SEQ ID NO: 1465277 - DNA, 15 bp, Homo sapiens
accttgtaatctcca

SEQ ID NO: 1465278 - DNA, 15 bp, Homo sapiens
ccttgtaatctccat

SEQ ID NO: 1465279 - DNA, 15 bp, Homo sapiens
cttgtaatctccatg

SEQ ID NO: 1465280 - DNA, 15 bp, Homo sapiens
ttgtaatctccatgt

SEQ ID NO: 1465281 - DNA, 15 bp, Homo sapiens
tgtaatctccatgtc

SEQ ID NO: 1465282 - DNA, 15 bp, Homo sapiens
gtaatctccatgtca

SEQ ID NO: 1465283 - DNA, 15 bp, Homo sapiens
taatctccatgtcac

SEQ ID NO: 1465284 - DNA, 15 bp, Homo sapiens
aatctccatgtcacc

SEQ ID NO: 1465285 - DNA, 15 bp, Homo sapiens
atctccatgtcacct

SEQ ID NO: 1465286 - DNA, 15 bp, Homo sapiens
tctccatgtcacctg

SEQ ID NO: 1465287 - DNA, 15 bp, Homo sapiens
ctccatgtcacctgg

SEQ ID NO: 1465288 - DNA, 15 bp, Homo sapiens
tccatgtcacctgga

SEQ ID NO: 1465289 - DNA, 15 bp, Homo sapiens
ccatgtcacctggat

SEQ ID NO: 1465290 - DNA, 15 bp, Homo sapiens
catgtcacctggatt

SEQ ID NO: 1465291 - DNA, 15 bp, Homo sapiens
atgtcacctggattc

SEQ ID NO: 1465292 - DNA, 15 bp, Homo sapiens
tgtcacctggattca

SEQ ID NO: 1465293 - DNA, 15 bp, Homo sapiens
gtcacctggattcac

SEQ ID NO: 1465294 - DNA, 15 bp, Homo sapiens
tcacctggattcaca

SEQ ID NO: 1465295 - DNA, 15 bp, Homo sapiens
cacctggattcacaa

SEQ ID NO: 1465296 - DNA, 15 bp, Homo sapiens
acctggattcacaag

SEQ ID NO: 1465297 - DNA, 15 bp, Homo sapiens
cctggattcacaaga

SEQ ID NO: 1465298 - DNA, 15 bp, Homo sapiens
ctggattcacaagaa

SEQ ID NO: 1465299 - DNA, 15 bp, Homo sapiens
tggattcacaagaac

SEQ ID NO: 1465300 - DNA, 15 bp, Homo sapiens
ggattcacaagaact

SEQ ID NO: 1465301 - DNA, 15 bp, Homo sapiens
gattcacaagaactc

SEQ ID NO: 1465302 - DNA, 15 bp, Homo sapiens
attcacaagaactcc

SEQ ID NO: 1465303 - DNA, 15 bp, Homo sapiens
ttcacaagaactcca

SEQ ID NO: 1465304 - DNA, 15 bp, Homo sapiens
tcacaagaactccag

SEQ ID NO: 1465305 - DNA, 15 bp, Homo sapiens
cacaagaactccaga

SEQ ID NO: 1465306 - DNA, 15 bp, Homo sapiens
acaagaactccagac

SEQ ID NO: 1465307 - DNA, 15 bp, Homo sapiens
caagaactccagaca

SEQ ID NO: 1465308 - DNA, 15 bp, Homo sapiens
aagaactccagacaa

SEQ ID NO: 1465309 - DNA, 15 bp, Homo sapiens
agaactccagacaag

SEQ ID NO: 1465310 - DNA, 15 bp, Homo sapiens
gaactccagacaaga

SEQ ID NO: 1465311 - DNA, 15 bp, Homo sapiens
aactccagacaagat

SEQ ID NO: 1465312 - DNA, 15 bp, Homo sapiens
actccagacaagatg

SEQ ID NO: 1465313 - DNA, 15 bp, Homo sapiens
ctccagacaagatgg

SEQ ID NO: 1465314 - DNA, 15 bp, Homo sapiens
tccagacaagatggc

SEQ ID NO: 1465315 - DNA, 15 bp, Homo sapiens
ccagacaagatggcc

SEQ ID NO: 1465316 - DNA, 15 bp, Homo sapiens
cagacaagatggcct

SEQ ID NO: 1465317 - DNA, 15 bp, Homo sapiens
agacaagatggcctc

SEQ ID NO: 1465318 - DNA, 15 bp, Homo sapiens
gacaagatggcctct

SEQ ID NO: 1465319 - DNA, 15 bp, Homo sapiens
acaagatggcctctg

SEQ ID NO: 1465320 - DNA, 15 bp, Homo sapiens
caagatggcctctgt

SEQ ID NO: 1465321 - DNA, 15 bp, Homo sapiens
aagatggcctctgtc

SEQ ID NO: 1465322 - DNA, 15 bp, Homo sapiens
agatggcctctgtct

SEQ ID NO: 1465323 - DNA, 15 bp, Homo sapiens
gatggcctctgtcta

SEQ ID NO: 1465324 - DNA, 15 bp, Homo sapiens
atggcctctgtctat

SEQ ID NO: 1465325 - DNA, 15 bp, Homo sapiens
tggcctctgtctatt

SEQ ID NO: 1465326 - DNA, 15 bp, Homo sapiens
ggcctctgtctattg

SEQ ID NO: 1465327 - DNA, 15 bp, Homo sapiens
gcctctgtctattga

SEQ ID NO: 1465328 - DNA, 15 bp, Homo sapiens
cctctgtctattgat

SEQ ID NO: 1465329 - DNA, 15 bp, Homo sapiens
ctctgtctattgatc

SEQ ID NO: 1465330 - DNA, 15 bp, Homo sapiens
tctgtctattgatct

SEQ ID NO: 1465331 - DNA, 15 bp, Homo sapiens
ctgtctattgatctg

SEQ ID NO: 1465332 - DNA, 15 bp, Homo sapiens
tgtctattgatctgt

SEQ ID NO: 1465333 - DNA, 15 bp, Homo sapiens
gtctattgatctgtc

SEQ ID NO: 1465334 - DNA, 15 bp, Homo sapiens
tctattgatctgtcc

SEQ ID NO: 1465335 - DNA, 15 bp, Homo sapiens
ctattgatctgtccc

SEQ ID NO: 1465336 - DNA, 15 bp, Homo sapiens
tattgatctgtcccc

SEQ ID NO: 1465337 - DNA, 15 bp, Homo sapiens
attgatctgtccccg

SEQ ID NO: 1465338 - DNA, 15 bp, Homo sapiens
ttgatctgtccccgt

SEQ ID NO: 1465339 - DNA, 15 bp, Homo sapiens
tgatctgtccccgtg

SEQ ID NO: 1465340 - DNA, 15 bp, Homo sapiens
gatctgtccccgtga

SEQ ID NO: 1465341 - DNA, 15 bp, Homo sapiens
atctgtccccgtgac

SEQ ID NO: 1465342 - DNA, 15 bp, Homo sapiens
tctgtccccgtgacc

SEQ ID NO: 1465343 - DNA, 15 bp, Homo sapiens
ctgtccccgtgacca

SEQ ID NO: 1465344 - DNA, 15 bp, Homo sapiens
tgtccccgtgaccac

SEQ ID NO: 1465345 - DNA, 15 bp, Homo sapiens
gtccccgtgaccaca

SEQ ID NO: 1465346 - DNA, 15 bp, Homo sapiens
tccccgtgaccacac

SEQ ID NO: 1465347 - DNA, 15 bp, Homo sapiens
ccccgtgaccacaca

SEQ ID NO: 1465348 - DNA, 15 bp, Homo sapiens
cccgtgaccacacag

SEQ ID NO: 1465349 - DNA, 15 bp, Homo sapiens
ccgtgaccacacaga

SEQ ID NO: 1465350 - DNA, 15 bp, Homo sapiens
cgtgaccacacagaa

SEQ ID NO: 1465351 - DNA, 15 bp, Homo sapiens
gtgaccacacagaat

SEQ ID NO: 1465352 - DNA, 15 bp, Homo sapiens
tgaccacacagaatt

SEQ ID NO: 1465353 - DNA, 15 bp, Homo sapiens
gaccacacagaattg

SEQ ID NO: 1465354 - DNA, 15 bp, Homo sapiens
accacacagaattgc

SEQ ID NO: 1465355 - DNA, 15 bp, Homo sapiens
ccacacagaattgct

SEQ ID NO: 1465356 - DNA, 15 bp, Homo sapiens
cacacagaattgctc

SEQ ID NO: 1465357 - DNA, 15 bp, Homo sapiens
acacagaattgctcc

SEQ ID NO: 1465358 - DNA, 15 bp, Homo sapiens
cacagaattgctccc

SEQ ID NO: 1465359 - DNA, 15 bp, Homo sapiens
acagaattgctcccc

SEQ ID NO: 1465360 - DNA, 15 bp, Homo sapiens
cagaattgctcccct

SEQ ID NO: 1465361 - DNA, 15 bp, Homo sapiens
agaattgctcccctc

SEQ ID NO: 1465362 - DNA, 15 bp, Homo sapiens
gaattgctcccctca

SEQ ID NO: 1465363 - DNA, 15 bp, Homo sapiens
aattgctcccctcag

SEQ ID NO: 1465364 - DNA, 15 bp, Homo sapiens
attgctcccctcagg

SEQ ID NO: 1465365 - DNA, 15 bp, Homo sapiens
ttgctcccctcaggt

SEQ ID NO: 1465366 - DNA, 15 bp, Homo sapiens
tgctcccctcaggtg

SEQ ID NO: 1465367 - DNA, 15 bp, Homo sapiens
gctcccctcaggtgg

SEQ ID NO: 1465368 - DNA, 15 bp, Homo sapiens
ctcccctcaggtggt

SEQ ID NO: 1465369 - DNA, 15 bp, Homo sapiens
tcccctcaggtggtt

SEQ ID NO: 1465370 - DNA, 15 bp, Homo sapiens
cccctcaggtggtta

SEQ ID NO: 1465371 - DNA, 15 bp, Homo sapiens
ccctcaggtggttac

SEQ ID NO: 1465372 - DNA, 15 bp, Homo sapiens
cctcaggtggttacc

SEQ ID NO: 1465373 - DNA, 15 bp, Homo sapiens
ctcaggtggttacca

SEQ ID NO: 1465374 - DNA, 15 bp, Homo sapiens
tcaggtggttaccaa

SEQ ID NO: 1465375 - DNA, 15 bp, Homo sapiens
caggtggttaccaag

SEQ ID NO: 1465376 - DNA, 15 bp, Homo sapiens
aggtggttaccaagt

SEQ ID NO: 1465377 - DNA, 15 bp, Homo sapiens
ggtggttaccaagtg

SEQ ID NO: 1465378 - DNA, 15 bp, Homo sapiens
gtggttaccaagtgg

SEQ ID NO: 1465379 - DNA, 15 bp, Homo sapiens
tggttaccaagtgga

SEQ ID NO: 1465380 - DNA, 15 bp, Homo sapiens
ggttaccaagtggaa

SEQ ID NO: 1465381 - DNA, 15 bp, Homo sapiens
gttaccaagtggaat

SEQ ID NO: 1465382 - DNA, 15 bp, Homo sapiens
ttaccaagtggaatc

SEQ ID NO: 1465383 - DNA, 15 bp, Homo sapiens
taccaagtggaatcc

SEQ ID NO: 1465384 - DNA, 15 bp, Homo sapiens
accaagtggaatcct

SEQ ID NO: 1465385 - DNA, 15 bp, Homo sapiens
ccaagtggaatcctg

SEQ ID NO: 1465386 - DNA, 15 bp, Homo sapiens
caagtggaatcctgt

SEQ ID NO: 1465387 - DNA, 15 bp, Homo sapiens
aagtggaatcctgtt

SEQ ID NO: 1465388 - DNA, 15 bp, Homo sapiens
agtggaatcctgttt

SEQ ID NO: 1465389 - DNA, 15 bp, Homo sapiens
gtggaatcctgtttt

SEQ ID NO: 1465390 - DNA, 15 bp, Homo sapiens
tggaatcctgttttg

SEQ ID NO: 1465391 - DNA, 15 bp, Homo sapiens
ggaatcctgttttgt

SEQ ID NO: 1465392 - DNA, 15 bp, Homo sapiens
gaatcctgttttgtg

SEQ ID NO: 1465393 - DNA, 15 bp, Homo sapiens
aatcctgttttgtgt

SEQ ID NO: 1465394 - DNA, 15 bp, Homo sapiens
atcctgttttgtgtg

SEQ ID NO: 1465395 - DNA, 15 bp, Homo sapiens
tcctgttttgtgtgt

SEQ ID NO: 1465396 - DNA, 15 bp, Homo sapiens
cctgttttgtgtgtg

SEQ ID NO: 1465397 - DNA, 15 bp, Homo sapiens
ctgttttgtgtgtga

SEQ ID NO: 1465398 - DNA, 15 bp, Homo sapiens
tgttttgtgtgtgaa

SEQ ID NO: 1465399 - DNA, 15 bp, Homo sapiens
gttttgtgtgtgaat

SEQ ID NO: 1465400 - DNA, 15 bp, Homo sapiens
ttttgtgtgtgaata

SEQ ID NO: 1465401 - DNA, 15 bp, Homo sapiens
tttgtgtgtgaataa

SEQ ID NO: 1465402 - DNA, 15 bp, Homo sapiens
ttgtgtgtgaataat

SEQ ID NO: 1465403 - DNA, 15 bp, Homo sapiens
tgtgtgtgaataatt

SEQ ID NO: 1465404 - DNA, 15 bp, Homo sapiens
gtgtgtgaataattt

SEQ ID NO: 1465405 - DNA, 15 bp, Homo sapiens
tgtgtgaataatttc

SEQ ID NO: 1465406 - DNA, 15 bp, Homo sapiens
gtgtgaataatttcc

SEQ ID NO: 1465407 - DNA, 15 bp, Homo sapiens
tgtgaataatttcca

SEQ ID NO: 1465408 - DNA, 15 bp, Homo sapiens
gtgaataatttccac

SEQ ID NO: 1465409 - DNA, 15 bp, Homo sapiens
tgaataatttccacc

SEQ ID NO: 1465410 - DNA, 15 bp, Homo sapiens
gaataatttccacca

SEQ ID NO: 1465411 - DNA, 15 bp, Homo sapiens
aataatttccaccaa

SEQ ID NO: 1465412 - DNA, 15 bp, Homo sapiens
ataatttccaccaaa

SEQ ID NO: 1465413 - DNA, 15 bp, Homo sapiens
taatttccaccaaaa

SEQ ID NO: 1465414 - DNA, 15 bp, Homo sapiens
aatttccaccaaaag

SEQ ID NO: 1465415 - DNA, 15 bp, Homo sapiens
atttccaccaaaagg

SEQ ID NO: 1465416 - DNA, 15 bp, Homo sapiens
tttccaccaaaaggc

SEQ ID NO: 1465417 - DNA, 15 bp, Homo sapiens
ttccaccaaaaggct

SEQ ID NO: 1465418 - DNA, 15 bp, Homo sapiens
tccaccaaaaggctt

SEQ ID NO: 1465419 - DNA, 15 bp, Homo sapiens
ccaccaaaaggcttc

SEQ ID NO: 1465420 - DNA, 15 bp, Homo sapiens
caccaaaaggcttcc

SEQ ID NO: 1465421 - DNA, 15 bp, Homo sapiens
accaaaaggcttcct

SEQ ID NO: 1465422 - DNA, 15 bp, Homo sapiens
ccaaaaggcttcctt

SEQ ID NO: 1465423 - DNA, 15 bp, Homo sapiens
caaaaggcttccttc

SEQ ID NO: 1465424 - DNA, 15 bp, Homo sapiens
aaaaggcttccttcc

SEQ ID NO: 1465425 - DNA, 15 bp, Homo sapiens
aaaggcttccttcca

SEQ ID NO: 1465426 - DNA, 15 bp, Homo sapiens
aaggcttccttccag

SEQ ID NO: 1465427 - DNA, 15 bp, Homo sapiens
aggcttccttccagt

SEQ ID NO: 1465428 - DNA, 15 bp, Homo sapiens
ggcttccttccagtt

SEQ ID NO: 1465429 - DNA, 15 bp, Homo sapiens
gcttccttccagttc

SEQ ID NO: 1465430 - DNA, 15 bp, Homo sapiens
cttccttccagttcc

SEQ ID NO: 1465431 - DNA, 15 bp, Homo sapiens
ttccttccagttcca

SEQ ID NO: 1465432 - DNA, 15 bp, Homo sapiens
tccttccagttccac

SEQ ID NO: 1465433 - DNA, 15 bp, Homo sapiens
ccttccagttccact

SEQ ID NO: 1465434 - DNA, 15 bp, Homo sapiens
cttccagttccactg

SEQ ID NO: 1465435 - DNA, 15 bp, Homo sapiens
ttccagttccactgc

SEQ ID NO: 1465436 - DNA, 15 bp, Homo sapiens
tccagttccactgcc

SEQ ID NO: 1465437 - DNA, 15 bp, Homo sapiens
ccagttccactgcca

SEQ ID NO: 1465438 - DNA, 15 bp, Homo sapiens
cagttccactgccat

SEQ ID NO: 1465439 - DNA, 15 bp, Homo sapiens
agttccactgccatc

SEQ ID NO: 1465440 - DNA, 15 bp, Homo sapiens
gttccactgccatcc

SEQ ID NO: 1465441 - DNA, 15 bp, Homo sapiens
ttccactgccatcca

SEQ ID NO: 1465442 - DNA, 15 bp, Homo sapiens
tccactgccatccaa

SEQ ID NO: 1465443 - DNA, 15 bp, Homo sapiens
ccactgccatccaaa

SEQ ID NO: 1465444 - DNA, 15 bp, Homo sapiens
cactgccatccaaat

SEQ ID NO: 1465445 - DNA, 15 bp, Homo sapiens
actgccatccaaatt

SEQ ID NO: 1465446 - DNA, 15 bp, Homo sapiens
ctgccatccaaattt

SEQ ID NO: 1465447 - DNA, 15 bp, Homo sapiens
tgccatccaaattta

SEQ ID NO: 1465448 - DNA, 15 bp, Homo sapiens
gccatccaaatttaa

SEQ ID NO: 1465449 - DNA, 15 bp, Homo sapiens
ccatccaaatttaag

SEQ ID NO: 1465450 - DNA, 15 bp, Homo sapiens
catccaaatttaagt

SEQ ID NO: 1465451 - DNA, 15 bp, Homo sapiens
atccaaatttaagtt

SEQ ID NO: 1465452 - DNA, 15 bp, Homo sapiens
tccaaatttaagttt

SEQ ID NO: 1465453 - DNA, 15 bp, Homo sapiens
ccaaatttaagttta

SEQ ID NO: 1465454 - DNA, 15 bp, Homo sapiens
caaatttaagtttat

SEQ ID NO: 1465455 - DNA, 15 bp, Homo sapiens
aaatttaagtttata

SEQ ID NO: 1465456 - DNA, 15 bp, Homo sapiens
aatttaagtttatag

SEQ ID NO: 1465457 - DNA, 15 bp, Homo sapiens
atttaagtttatagg

SEQ ID NO: 1465458 - DNA, 15 bp, Homo sapiens
tttaagtttataggt

SEQ ID NO: 1465459 - DNA, 15 bp, Homo sapiens
ttaagtttataggtt

SEQ ID NO: 1465460 - DNA, 15 bp, Homo sapiens
taagtttataggttg

SEQ ID NO: 1465461 - DNA, 15 bp, Homo sapiens
aagtttataggttgg

SEQ ID NO: 1465462 - DNA, 15 bp, Homo sapiens
agtttataggttggc

SEQ ID NO: 1465463 - DNA, 15 bp, Homo sapiens
gtttataggttggca

SEQ ID NO: 1465464 - DNA, 15 bp, Homo sapiens
tttataggttggcaa

SEQ ID NO: 1465465 - DNA, 15 bp, Homo sapiens
ttataggttggcaac

SEQ ID NO: 1465466 - DNA, 15 bp, Homo sapiens
tataggttggcaact

SEQ ID NO: 1465467 - DNA, 15 bp, Homo sapiens
ataggttggcaactt

SEQ ID NO: 1465468 - DNA, 15 bp, Homo sapiens
taggttggcaacttt

SEQ ID NO: 1465469 - DNA, 15 bp, Homo sapiens
aggttggcaacttta

SEQ ID NO: 1465470 - DNA, 15 bp, Homo sapiens
ggttggcaactttaa

SEQ ID NO: 1465471 - DNA, 15 bp, Homo sapiens
gttggcaactttaaa

SEQ ID NO: 1465472 - DNA, 15 bp, Homo sapiens
ttggcaactttaaag

SEQ ID NO: 1465473 - DNA, 15 bp, Homo sapiens
tggcaactttaaagc

SEQ ID NO: 1465474 - DNA, 15 bp, Homo sapiens
ggcaactttaaagct

SEQ ID NO: 1465475 - DNA, 15 bp, Homo sapiens
gcaactttaaagctt

SEQ ID NO: 1465476 - DNA, 15 bp, Homo sapiens
caactttaaagcttt

SEQ ID NO: 1465477 - DNA, 15 bp, Homo sapiens
aactttaaagcttta

SEQ ID NO: 1465478 - DNA, 15 bp, Homo sapiens
actttaaagctttag

SEQ ID NO: 1465479 - DNA, 15 bp, Homo sapiens
ctttaaagctttaga

SEQ ID NO: 1465480 - DNA, 15 bp, Homo sapiens
tttaaagctttagag

SEQ ID NO: 1465481 - DNA, 15 bp, Homo sapiens
ttaaagctttagaga

SEQ ID NO: 1465482 - DNA, 15 bp, Homo sapiens
taaagctttagagag

SEQ ID NO: 1465483 - DNA, 15 bp, Homo sapiens
aaagctttagagagt

SEQ ID NO: 1465484 - DNA, 15 bp, Homo sapiens
aagctttagagagtg

SEQ ID NO: 1465485 - DNA, 15 bp, Homo sapiens
agctttagagagtgt

SEQ ID NO: 1465486 - DNA, 15 bp, Homo sapiens
gctttagagagtgtt

SEQ ID NO: 1465487 - DNA, 15 bp, Homo sapiens
ctttagagagtgttt

SEQ ID NO: 1465488 - DNA, 15 bp, Homo sapiens
tttagagagtgttta

SEQ ID NO: 1465489 - DNA, 15 bp, Homo sapiens
ttagagagtgtttag

SEQ ID NO: 1465490 - DNA, 15 bp, Homo sapiens
tagagagtgtttagc

SEQ ID NO: 1465491 - DNA, 15 bp, Homo sapiens
agagagtgtttagct

SEQ ID NO: 1465492 - DNA, 15 bp, Homo sapiens
gagagtgtttagctt

SEQ ID NO: 1465493 - DNA, 15 bp, Homo sapiens
agagtgtttagcttg

SEQ ID NO: 1465494 - DNA, 15 bp, Homo sapiens
gagtgtttagcttga

SEQ ID NO: 1465495 - DNA, 15 bp, Homo sapiens
agtgtttagcttgaa

SEQ ID NO: 1465496 - DNA, 15 bp, Homo sapiens
gtgtttagcttgaat

SEQ ID NO: 1465497 - DNA, 15 bp, Homo sapiens
tgtttagcttgaatt

SEQ ID NO: 1465498 - DNA, 15 bp, Homo sapiens
gtttagcttgaattt

SEQ ID NO: 1465499 - DNA, 15 bp, Homo sapiens
tttagcttgaatttc

SEQ ID NO: 1465500 - DNA, 15 bp, Homo sapiens
ttagcttgaatttct

SEQ ID NO: 1465501 - DNA, 15 bp, Homo sapiens
tagcttgaatttctc

SEQ ID NO: 1465502 - DNA, 15 bp, Homo sapiens
agcttgaatttctca

SEQ ID NO: 1465503 - DNA, 15 bp, Homo sapiens
gcttgaatttctcac

SEQ ID NO: 1465504 - DNA, 15 bp, Homo sapiens
cttgaatttctcact

SEQ ID NO: 1465505 - DNA, 15 bp, Homo sapiens
ttgaatttctcactt

SEQ ID NO: 1465506 - DNA, 15 bp, Homo sapiens
tgaatttctcacttt

SEQ ID NO: 1465507 - DNA, 15 bp, Homo sapiens
gaatttctcacttta

SEQ ID NO: 1465508 - DNA, 15 bp, Homo sapiens
aatttctcactttat

SEQ ID NO: 1465509 - DNA, 15 bp, Homo sapiens
atttctcactttatg

SEQ ID NO: 1465510 - DNA, 15 bp, Homo sapiens
tttctcactttatgg

SEQ ID NO: 1465511 - DNA, 15 bp, Homo sapiens
ttctcactttatggg

SEQ ID NO: 1465512 - DNA, 15 bp, Homo sapiens
tctcactttatgggt

SEQ ID NO: 1465513 - DNA, 15 bp, Homo sapiens
ctcactttatgggtg

SEQ ID NO: 1465514 - DNA, 15 bp, Homo sapiens
tcactttatgggtgg

SEQ ID NO: 1465515 - DNA, 15 bp, Homo sapiens
cactttatgggtggg

SEQ ID NO: 1465516 - DNA, 15 bp, Homo sapiens
actttatgggtgggg

SEQ ID NO: 1465517 - DNA, 15 bp, Homo sapiens
ctttatgggtgggga

SEQ ID NO: 1465518 - DNA, 15 bp, Homo sapiens
tttatgggtggggaa

SEQ ID NO: 1465519 - DNA, 15 bp, Homo sapiens
ttatgggtggggaaa

SEQ ID NO: 1465520 - DNA, 15 bp, Homo sapiens
tatgggtggggaaac

SEQ ID NO: 1465521 - DNA, 15 bp, Homo sapiens
atgggtggggaaact

SEQ ID NO: 1465522 - DNA, 15 bp, Homo sapiens
tgggtggggaaactg

SEQ ID NO: 1465523 - DNA, 15 bp, Homo sapiens
gggtggggaaactga

SEQ ID NO: 1465524 - DNA, 15 bp, Homo sapiens
tggggaaactgaggt

SEQ ID NO: 1465525 - DNA, 15 bp, Homo sapiens
ggggaaactgaggtc

SEQ ID NO: 1465526 - DNA, 15 bp, Homo sapiens
gggaaactgaggtct

SEQ ID NO: 1465527 - DNA, 15 bp, Homo sapiens
ggaaactgaggtcta

SEQ ID NO: 1465528 - DNA, 15 bp, Homo sapiens
gaaactgaggtctag

SEQ ID NO: 1465529 - DNA, 15 bp, Homo sapiens
aaactgaggtctagg

SEQ ID NO: 1465530 - DNA, 15 bp, Homo sapiens
aactgaggtctaggt

SEQ ID NO: 1465531 - DNA, 15 bp, Homo sapiens
actgaggtctaggtt

SEQ ID NO: 1465532 - DNA, 15 bp, Homo sapiens
ctgaggtctaggttg

SEQ ID NO: 1465533 - DNA, 15 bp, Homo sapiens
tgaggtctaggttgt

SEQ ID NO: 1465534 - DNA, 15 bp, Homo sapiens
gaggtctaggttgtt

SEQ ID NO: 1465535 - DNA, 15 bp, Homo sapiens
aggtctaggttgtta

SEQ ID NO: 1465536 - DNA, 15 bp, Homo sapiens
ggtctaggttgttaa

SEQ ID NO: 1465537 - DNA, 15 bp, Homo sapiens
gtctaggttgttaaa

SEQ ID NO: 1465538 - DNA, 15 bp, Homo sapiens
tctaggttgttaaat

SEQ ID NO: 1465539 - DNA, 15 bp, Homo sapiens
ctaggttgttaaatg

SEQ ID NO: 1465540 - DNA, 15 bp, Homo sapiens
taggttgttaaatga

SEQ ID NO: 1465541 - DNA, 15 bp, Homo sapiens
aggttgttaaatgaa

SEQ ID NO: 1465542 - DNA, 15 bp, Homo sapiens
ggttgttaaatgaat

SEQ ID NO: 1465543 - DNA, 15 bp, Homo sapiens
gttgttaaatgaatt

SEQ ID NO: 1465544 - DNA, 15 bp, Homo sapiens
ttgttaaatgaattg

SEQ ID NO: 1465545 - DNA, 15 bp, Homo sapiens
tgttaaatgaattgt

SEQ ID NO: 1465546 - DNA, 15 bp, Homo sapiens
gttaaatgaattgtc

SEQ ID NO: 1465547 - DNA, 15 bp, Homo sapiens
ttaaatgaattgtcc

SEQ ID NO: 1465548 - DNA, 15 bp, Homo sapiens
taaatgaattgtcca

SEQ ID NO: 1465549 - DNA, 15 bp, Homo sapiens
aaatgaattgtccaa

SEQ ID NO: 1465550 - DNA, 15 bp, Homo sapiens
aatgaattgtccaag

SEQ ID NO: 1465551 - DNA, 15 bp, Homo sapiens
atgaattgtccaaga

SEQ ID NO: 1465552 - DNA, 15 bp, Homo sapiens
tgaattgtccaagat

SEQ ID NO: 1465553 - DNA, 15 bp, Homo sapiens
gaattgtccaagatc

SEQ ID NO: 1465554 - DNA, 15 bp, Homo sapiens
aattgtccaagatca

SEQ ID NO: 1465555 - DNA, 15 bp, Homo sapiens
attgtccaagatcat

SEQ ID NO: 1465556 - DNA, 15 bp, Homo sapiens
ttgtccaagatcata

SEQ ID NO: 1465557 - DNA, 15 bp, Homo sapiens
tgtccaagatcatac

SEQ ID NO: 1465558 - DNA, 15 bp, Homo sapiens
gtccaagatcataca

SEQ ID NO: 1465559 - DNA, 15 bp, Homo sapiens
tccaagatcatacag

SEQ ID NO: 1465560 - DNA, 15 bp, Homo sapiens
ccaagatcatacagc

SEQ ID NO: 1465561 - DNA, 15 bp, Homo sapiens
caagatcatacagct

SEQ ID NO: 1465562 - DNA, 15 bp, Homo sapiens
aagatcatacagcta

SEQ ID NO: 1465563 - DNA, 15 bp, Homo sapiens
agatcatacagctaa

SEQ ID NO: 1465564 - DNA, 15 bp, Homo sapiens
gatcatacagctaac

SEQ ID NO: 1465565 - DNA, 15 bp, Homo sapiens
atcatacagctaact

SEQ ID NO: 1465566 - DNA, 15 bp, Homo sapiens
tcatacagctaacta

SEQ ID NO: 1465567 - DNA, 15 bp, Homo sapiens
catacagctaactac

SEQ ID NO: 1465568 - DNA, 15 bp, Homo sapiens
atacagctaactacc

SEQ ID NO: 1465569 - DNA, 15 bp, Homo sapiens
tacagctaactacca

SEQ ID NO: 1465570 - DNA, 15 bp, Homo sapiens
acagctaactaccaa

SEQ ID NO: 1465571 - DNA, 15 bp, Homo sapiens
cagctaactaccaac

SEQ ID NO: 1465572 - DNA, 15 bp, Homo sapiens
agctaactaccaaca

SEQ ID NO: 1465573 - DNA, 15 bp, Homo sapiens
gctaactaccaacag

SEQ ID NO: 1465574 - DNA, 15 bp, Homo sapiens
ctaactaccaacaga

SEQ ID NO: 1465575 - DNA, 15 bp, Homo sapiens
taactaccaacagag

SEQ ID NO: 1465576 - DNA, 15 bp, Homo sapiens
aactaccaacagagt

SEQ ID NO: 1465577 - DNA, 15 bp, Homo sapiens
actaccaacagagtc

SEQ ID NO: 1465578 - DNA, 15 bp, Homo sapiens
ctaccaacagagtca

SEQ ID NO: 1465579 - DNA, 15 bp, Homo sapiens
taccaacagagtcat

SEQ ID NO: 1465580 - DNA, 15 bp, Homo sapiens
accaacagagtcata

SEQ ID NO: 1465581 - DNA, 15 bp, Homo sapiens
ccaacagagtcatag

SEQ ID NO: 1465582 - DNA, 15 bp, Homo sapiens
caacagagtcatagt

SEQ ID NO: 1465583 - DNA, 15 bp, Homo sapiens
aacagagtcatagtg

SEQ ID NO: 1465584 - DNA, 15 bp, Homo sapiens
acagagtcatagtga

SEQ ID NO: 1465585 - DNA, 15 bp, Homo sapiens
cagagtcatagtgaa

SEQ ID NO: 1465586 - DNA, 15 bp, Homo sapiens
agagtcatagtgaaa

SEQ ID NO: 1465587 - DNA, 15 bp, Homo sapiens
gagtcatagtgaaag

SEQ ID NO: 1465588 - DNA, 15 bp, Homo sapiens
agtcatagtgaaagt

SEQ ID NO: 1465589 - DNA, 15 bp, Homo sapiens
gtcatagtgaaagtt

SEQ ID NO: 1465590 - DNA, 15 bp, Homo sapiens
tcatagtgaaagttc

SEQ ID NO: 1465591 - DNA, 15 bp, Homo sapiens
catagtgaaagttca

SEQ ID NO: 1465592 - DNA, 15 bp, Homo sapiens
atagtgaaagttcag

SEQ ID NO: 1465593 - DNA, 15 bp, Homo sapiens
tagtgaaagttcagg

SEQ ID NO: 1465594 - DNA, 15 bp, Homo sapiens
agtgaaagttcaggg

SEQ ID NO: 1465595 - DNA, 15 bp, Homo sapiens
gtgaaagttcagggc

SEQ ID NO: 1465596 - DNA, 15 bp, Homo sapiens
tgaaagttcagggct

SEQ ID NO: 1465597 - DNA, 15 bp, Homo sapiens
gaaagttcagggctc

SEQ ID NO: 1465598 - DNA, 15 bp, Homo sapiens
aaagttcagggctct

SEQ ID NO: 1465599 - DNA, 15 bp, Homo sapiens
aagttcagggctctg

SEQ ID NO: 1465600 - DNA, 15 bp, Homo sapiens
agttcagggctctgc

SEQ ID NO: 1465601 - DNA, 15 bp, Homo sapiens
gttcagggctctgca

SEQ ID NO: 1465602 - DNA, 15 bp, Homo sapiens
ttcagggctctgcac

SEQ ID NO: 1465603 - DNA, 15 bp, Homo sapiens
tcagggctctgcacc

SEQ ID NO: 1465604 - DNA, 15 bp, Homo sapiens
cagggctctgcaccc

SEQ ID NO: 1465605 - DNA, 15 bp, Homo sapiens
agggctctgcaccct

SEQ ID NO: 1465606 - DNA, 15 bp, Homo sapiens
gggctctgcaccctt

SEQ ID NO: 1465607 - DNA, 15 bp, Homo sapiens
ggctctgcaccctta

SEQ ID NO: 1465608 - DNA, 15 bp, Homo sapiens
gctctgcacccttag

SEQ ID NO: 1465609 - DNA, 15 bp, Homo sapiens
ctctgcacccttagg

SEQ ID NO: 1465610 - DNA, 15 bp, Homo sapiens
tctgcacccttaggc

SEQ ID NO: 1465611 - DNA, 15 bp, Homo sapiens
ctgcacccttaggcc

SEQ ID NO: 1465612 - DNA, 15 bp, Homo sapiens
tgcacccttaggcca

SEQ ID NO: 1465613 - DNA, 15 bp, Homo sapiens
gcacccttaggccag

SEQ ID NO: 1465614 - DNA, 15 bp, Homo sapiens
cacccttaggccagt

SEQ ID NO: 1465615 - DNA, 15 bp, Homo sapiens
acccttaggccagtg

SEQ ID NO: 1465616 - DNA, 15 bp, Homo sapiens
cccttaggccagtgt

SEQ ID NO: 1465617 - DNA, 15 bp, Homo sapiens
ccttaggccagtgtt

SEQ ID NO: 1465618 - DNA, 15 bp, Homo sapiens
cttaggccagtgttc

SEQ ID NO: 1465619 - DNA, 15 bp, Homo sapiens
ttaggccagtgttct

SEQ ID NO: 1465620 - DNA, 15 bp, Homo sapiens
taggccagtgttctt

SEQ ID NO: 1465621 - DNA, 15 bp, Homo sapiens
aggccagtgttcttt

SEQ ID NO: 1465622 - DNA, 15 bp, Homo sapiens
ggccagtgttctttc

SEQ ID NO: 1465623 - DNA, 15 bp, Homo sapiens
gccagtgttctttcc

SEQ ID NO: 1465624 - DNA, 15 bp, Homo sapiens
ccagtgttctttcca

SEQ ID NO: 1465625 - DNA, 15 bp, Homo sapiens
cagtgttctttccac

SEQ ID NO: 1465626 - DNA, 15 bp, Homo sapiens
agtgttctttccact

SEQ ID NO: 1465627 - DNA, 15 bp, Homo sapiens
gtgttctttccacta

SEQ ID NO: 1465628 - DNA, 15 bp, Homo sapiens
tgttctttccactat

SEQ ID NO: 1465629 - DNA, 15 bp, Homo sapiens
gttctttccactata

SEQ ID NO: 1465630 - DNA, 15 bp, Homo sapiens
ttctttccactatac

SEQ ID NO: 1465631 - DNA, 15 bp, Homo sapiens
tctttccactatacc

SEQ ID NO: 1465632 - DNA, 15 bp, Homo sapiens
ctttccactatacca

SEQ ID NO: 1465633 - DNA, 15 bp, Homo sapiens
tttccactataccat

SEQ ID NO: 1465634 - DNA, 15 bp, Homo sapiens
ttccactataccatg

SEQ ID NO: 1465635 - DNA, 15 bp, Homo sapiens
tccactataccatga

SEQ ID NO: 1465636 - DNA, 15 bp, Homo sapiens
ccactataccatgaa

SEQ ID NO: 1465637 - DNA, 15 bp, Homo sapiens
cactataccatgaaa

SEQ ID NO: 1465638 - DNA, 15 bp, Homo sapiens
actataccatgaaaa

SEQ ID NO: 1465639 - DNA, 15 bp, Homo sapiens
ctataccatgaaaat

SEQ ID NO: 1465640 - DNA, 15 bp, Homo sapiens
tataccatgaaaata

SEQ ID NO: 1465641 - DNA, 15 bp, Homo sapiens
ataccatgaaaatat

SEQ ID NO: 1465642 - DNA, 15 bp, Homo sapiens
taccatgaaaatatc

SEQ ID NO: 1465643 - DNA, 15 bp, Homo sapiens
accatgaaaatatca

SEQ ID NO: 1465644 - DNA, 15 bp, Homo sapiens
ccatgaaaatatcat

SEQ ID NO: 1465645 - DNA, 15 bp, Homo sapiens
catgaaaatatcatt

SEQ ID NO: 1465646 - DNA, 15 bp, Homo sapiens
atgaaaatatcattt

SEQ ID NO: 1465647 - DNA, 15 bp, Homo sapiens
tgaaaatatcatttg

SEQ ID NO: 1465648 - DNA, 15 bp, Homo sapiens
gaaaatatcatttgc

SEQ ID NO: 1465649 - DNA, 15 bp, Homo sapiens
aaaatatcatttgct

SEQ ID NO: 1465650 - DNA, 15 bp, Homo sapiens
aaatatcatttgctt

SEQ ID NO: 1465651 - DNA, 15 bp, Homo sapiens
aatatcatttgcttt

SEQ ID NO: 1465652 - DNA, 15 bp, Homo sapiens
atatcatttgctttt

SEQ ID NO: 1465653 - DNA, 15 bp, Homo sapiens
tatcatttgcttttg

SEQ ID NO: 1465654 - DNA, 15 bp, Homo sapiens
atcatttgcttttgt

SEQ ID NO: 1465655 - DNA, 15 bp, Homo sapiens
tcatttgcttttgtt

SEQ ID NO: 1465656 - DNA, 15 bp, Homo sapiens
catttgcttttgtta

SEQ ID NO: 1465657 - DNA, 15 bp, Homo sapiens
atttgcttttgttac

SEQ ID NO: 1465658 - DNA, 15 bp, Homo sapiens
tttgcttttgttaca

SEQ ID NO: 1465659 - DNA, 15 bp, Homo sapiens
ttgcttttgttacat

SEQ ID NO: 1465660 - DNA, 15 bp, Homo sapiens
tgcttttgttacatt

SEQ ID NO: 1465661 - DNA, 15 bp, Homo sapiens
gcttttgttacattt

SEQ ID NO: 1465662 - DNA, 15 bp, Homo sapiens
cttttgttacatttt

SEQ ID NO: 1465663 - DNA, 15 bp, Homo sapiens
ttttgttacattttt

SEQ ID NO: 1465664 - DNA, 15 bp, Homo sapiens
tttgttacattttta

SEQ ID NO: 1465665 - DNA, 15 bp, Homo sapiens
ttgttacatttttat

SEQ ID NO: 1465666 - DNA, 15 bp, Homo sapiens
tgttacatttttatg

SEQ ID NO: 1465667 - DNA, 15 bp, Homo sapiens
gttacatttttatga

SEQ ID NO: 1465668 - DNA, 15 bp, Homo sapiens
ttacatttttatgaa

SEQ ID NO: 1465669 - DNA, 15 bp, Homo sapiens
tacatttttatgaat

SEQ ID NO: 1465670 - DNA, 15 bp, Homo sapiens
acatttttatgaatt

SEQ ID NO: 1465671 - DNA, 15 bp, Homo sapiens
catttttatgaatta

SEQ ID NO: 1465672 - DNA, 15 bp, Homo sapiens
atttttatgaattat

SEQ ID NO: 1465673 - DNA, 15 bp, Homo sapiens
tttttatgaattata

SEQ ID NO: 1465674 - DNA, 15 bp, Homo sapiens
ttttatgaattatag

SEQ ID NO: 1465675 - DNA, 15 bp, Homo sapiens
tttatgaattataga

SEQ ID NO: 1465676 - DNA, 15 bp, Homo sapiens
ttatgaattatagaa

SEQ ID NO: 1465677 - DNA, 15 bp, Homo sapiens
tatgaattatagaat

SEQ ID NO: 1465678 - DNA, 15 bp, Homo sapiens
atgaattatagaatc

SEQ ID NO: 1465679 - DNA, 15 bp, Homo sapiens
tgaattatagaatcg

SEQ ID NO: 1465680 - DNA, 15 bp, Homo sapiens
gaattatagaatcgt

SEQ ID NO: 1465681 - DNA, 15 bp, Homo sapiens
aattatagaatcgtg

SEQ ID NO: 1465682 - DNA, 15 bp, Homo sapiens
attatagaatcgtgg

SEQ ID NO: 1465683 - DNA, 15 bp, Homo sapiens
ttatagaatcgtgga

SEQ ID NO: 1465684 - DNA, 15 bp, Homo sapiens
tatagaatcgtggag

SEQ ID NO: 1465685 - DNA, 15 bp, Homo sapiens
atagaatcgtggagg

SEQ ID NO: 1465686 - DNA, 15 bp, Homo sapiens
tagaatcgtggaggc

SEQ ID NO: 1465687 - DNA, 15 bp, Homo sapiens
agaatcgtggaggca

SEQ ID NO: 1465688 - DNA, 15 bp, Homo sapiens
gaatcgtggaggcag

SEQ ID NO: 1465689 - DNA, 15 bp, Homo sapiens
aatcgtggaggcagt

SEQ ID NO: 1465690 - DNA, 15 bp, Homo sapiens
atcgtggaggcagtg

SEQ ID NO: 1465691 - DNA, 15 bp, Homo sapiens
tcgtggaggcagtgt

SEQ ID NO: 1465692 - DNA, 15 bp, Homo sapiens
cgtggaggcagtgtg

SEQ ID NO: 1465693 - DNA, 15 bp, Homo sapiens
gtggaggcagtgtgt

SEQ ID NO: 1465694 - DNA, 15 bp, Homo sapiens
tggaggcagtgtgtg

SEQ ID NO: 1465695 - DNA, 15 bp, Homo sapiens
ggaggcagtgtgtgt

SEQ ID NO: 1465696 - DNA, 15 bp, Homo sapiens
gaggcagtgtgtgta

SEQ ID NO: 1465697 - DNA, 15 bp, Homo sapiens
aggcagtgtgtgtat

SEQ ID NO: 1465698 - DNA, 15 bp, Homo sapiens
ggcagtgtgtgtatg

SEQ ID NO: 1465699 - DNA, 15 bp, Homo sapiens
gcagtgtgtgtatgt

SEQ ID NO: 1465700 - DNA, 15 bp, Homo sapiens
cagtgtgtgtatgtg

SEQ ID NO: 1465701 - DNA, 15 bp, Homo sapiens
agtgtgtgtatgtgt

SEQ ID NO: 1465702 - DNA, 15 bp, Homo sapiens
gtgtgtgtatgtgtt

SEQ ID NO: 1465703 - DNA, 15 bp, Homo sapiens
tgtgtgtatgtgttt

SEQ ID NO: 1465704 - DNA, 15 bp, Homo sapiens
gtgtgtatgtgtttg

SEQ ID NO: 1465705 - DNA, 15 bp, Homo sapiens
tgtgtatgtgtttgc

SEQ ID NO: 1465706 - DNA, 15 bp, Homo sapiens
gtgtatgtgtttgcg

SEQ ID NO: 1465707 - DNA, 15 bp, Homo sapiens
tgtatgtgtttgcgt

SEQ ID NO: 1465708 - DNA, 15 bp, Homo sapiens
gtatgtgtttgcgtg

SEQ ID NO: 1465709 - DNA, 15 bp, Homo sapiens
tatgtgtttgcgtgt

SEQ ID NO: 1465710 - DNA, 15 bp, Homo sapiens
atgtgtttgcgtgtg

SEQ ID NO: 1465711 - DNA, 15 bp, Homo sapiens
tgtgtttgcgtgtgt

SEQ ID NO: 1465712 - DNA, 15 bp, Homo sapiens
gtgtttgcgtgtgtg

SEQ ID NO: 1465713 - DNA, 15 bp, Homo sapiens
tgtttgcgtgtgtgt

SEQ ID NO: 1465714 - DNA, 15 bp, Homo sapiens
gtttgcgtgtgtgtg

SEQ ID NO: 1465715 - DNA, 15 bp, Homo sapiens
tttgcgtgtgtgtgt

SEQ ID NO: 1465716 - DNA, 15 bp, Homo sapiens
ttgcgtgtgtgtgtg

SEQ ID NO: 1465717 - DNA, 15 bp, Homo sapiens
tgcgtgtgtgtgtgt

SEQ ID NO: 1465718 - DNA, 15 bp, Homo sapiens
gcgtgtgtgtgtgtg

SEQ ID NO: 1465719 - DNA, 15 bp, Homo sapiens
cgtgtgtgtgtgtgt

SEQ ID NO: 1465720 - DNA, 15 bp, Homo sapiens
gtgtgtgtgtgagag

SEQ ID NO: 1465721 - DNA, 15 bp, Homo sapiens
tgtgtgtgtgagaga

SEQ ID NO: 1465722 - DNA, 15 bp, Homo sapiens
gtgtgtgtgagagag

SEQ ID NO: 1465723 - DNA, 15 bp, Homo sapiens
tgtgtgtgagagaga

SEQ ID NO: 1465724 - DNA, 15 bp, Homo sapiens
gtgtgtgagagagag

SEQ ID NO: 1465725 - DNA, 15 bp, Homo sapiens
tgtgtgagagagaga

SEQ ID NO: 1465726 - DNA, 15 bp, Homo sapiens
gtgtgagagagagag

SEQ ID NO: 1465727 - DNA, 15 bp, Homo sapiens
tgtgagagagagaga

SEQ ID NO: 1465728 - DNA, 15 bp, Homo sapiens
gtgagagagagagag

SEQ ID NO: 1465729 - DNA, 15 bp, Homo sapiens
tgagagagagagaga

SEQ ID NO: 1465730 - DNA, 15 bp, Homo sapiens
agagagagagagaag

SEQ ID NO: 1465731 - DNA, 15 bp, Homo sapiens
gagagagagagaagt

SEQ ID NO: 1465732 - DNA, 15 bp, Homo sapiens
agagagagagaagtc

SEQ ID NO: 1465733 - DNA, 15 bp, Homo sapiens
gagagagagaagtct

SEQ ID NO: 1465734 - DNA, 15 bp, Homo sapiens
agagagagaagtctt

SEQ ID NO: 1465735 - DNA, 15 bp, Homo sapiens
gagagagaagtcttt

SEQ ID NO: 1465736 - DNA, 15 bp, Homo sapiens
agagagaagtcttta

SEQ ID NO: 1465737 - DNA, 15 bp, Homo sapiens
gagagaagtctttaa

SEQ ID NO: 1465738 - DNA, 15 bp, Homo sapiens
agagaagtctttaaa

SEQ ID NO: 1465739 - DNA, 15 bp, Homo sapiens
gagaagtctttaaaa

SEQ ID NO: 1465740 - DNA, 15 bp, Homo sapiens
agaagtctttaaaag

SEQ ID NO: 1465741 - DNA, 15 bp, Homo sapiens
gaagtctttaaaaga

SEQ ID NO: 1465742 - DNA, 15 bp, Homo sapiens
aagtctttaaaagaa

SEQ ID NO: 1465743 - DNA, 15 bp, Homo sapiens
agtctttaaaagaaa

SEQ ID NO: 1465744 - DNA, 15 bp, Homo sapiens
gtctttaaaagaaaa

SEQ ID NO: 1465745 - DNA, 15 bp, Homo sapiens
tctttaaaagaaaaa

SEQ ID NO: 1465746 - DNA, 15 bp, Homo sapiens
ctttaaaagaaaaat

SEQ ID NO: 1465747 - DNA, 15 bp, Homo sapiens
tttaaaagaaaaatc

SEQ ID NO: 1465748 - DNA, 15 bp, Homo sapiens
ttaaaagaaaaatca

SEQ ID NO: 1465749 - DNA, 15 bp, Homo sapiens
taaaagaaaaatcat

SEQ ID NO: 1465750 - DNA, 15 bp, Homo sapiens
aaaagaaaaatcata

SEQ ID NO: 1465751 - DNA, 15 bp, Homo sapiens
aaagaaaaatcataa

SEQ ID NO: 1465752 - DNA, 15 bp, Homo sapiens
aagaaaaatcataaa

SEQ ID NO: 1465753 - DNA, 15 bp, Homo sapiens
agaaaaatcataaag

SEQ ID NO: 1465754 - DNA, 15 bp, Homo sapiens
gaaaaatcataaaga

SEQ ID NO: 1465755 - DNA, 15 bp, Homo sapiens
aaaaatcataaagaa

SEQ ID NO: 1465756 - DNA, 15 bp, Homo sapiens
aaaatcataaagaat

SEQ ID NO: 1465757 - DNA, 15 bp, Homo sapiens
aaatcataaagaatt

SEQ ID NO: 1465758 - DNA, 15 bp, Homo sapiens
aatcataaagaattt

SEQ ID NO: 1465759 - DNA, 15 bp, Homo sapiens
atcataaagaatttg

SEQ ID NO: 1465760 - DNA, 15 bp, Homo sapiens
tcataaagaatttgg

SEQ ID NO: 1465761 - DNA, 15 bp, Homo sapiens
cataaagaatttggc

SEQ ID NO: 1465762 - DNA, 15 bp, Homo sapiens
ataaagaatttggca

SEQ ID NO: 1465763 - DNA, 15 bp, Homo sapiens
taaagaatttggcac

SEQ ID NO: 1465764 - DNA, 15 bp, Homo sapiens
aaagaatttggcact

SEQ ID NO: 1465765 - DNA, 15 bp, Homo sapiens
aagaatttggcactt

SEQ ID NO: 1465766 - DNA, 15 bp, Homo sapiens
agaatttggcacttt

SEQ ID NO: 1465767 - DNA, 15 bp, Homo sapiens
gaatttggcacttta

SEQ ID NO: 1465768 - DNA, 15 bp, Homo sapiens
aatttggcactttac

SEQ ID NO: 1465769 - DNA, 15 bp, Homo sapiens
atttggcactttaca

SEQ ID NO: 1465770 - DNA, 15 bp, Homo sapiens
tttggcactttacac

SEQ ID NO: 1465771 - DNA, 15 bp, Homo sapiens
ttggcactttacact

SEQ ID NO: 1465772 - DNA, 15 bp, Homo sapiens
tggcactttacacta

SEQ ID NO: 1465773 - DNA, 15 bp, Homo sapiens
ggcactttacactaa

SEQ ID NO: 1465774 - DNA, 15 bp, Homo sapiens
gcactttacactaaa

SEQ ID NO: 1465775 - DNA, 15 bp, Homo sapiens
cactttacactaaag

SEQ ID NO: 1465776 - DNA, 15 bp, Homo sapiens
actttacactaaaga

SEQ ID NO: 1465777 - DNA, 15 bp, Homo sapiens
ctttacactaaagac

SEQ ID NO: 1465778 - DNA, 15 bp, Homo sapiens
tttacactaaagaca

SEQ ID NO: 1465779 - DNA, 15 bp, Homo sapiens
ttacactaaagacac

SEQ ID NO: 1465780 - DNA, 15 bp, Homo sapiens
tacactaaagacacc

SEQ ID NO: 1465781 - DNA, 15 bp, Homo sapiens
acactaaagacacct

SEQ ID NO: 1465782 - DNA, 15 bp, Homo sapiens
cactaaagacacctc

SEQ ID NO: 1465783 - DNA, 15 bp, Homo sapiens
actaaagacacctct

SEQ ID NO: 1465784 - DNA, 15 bp, Homo sapiens
ctaaagacacctctg

SEQ ID NO: 1465785 - DNA, 15 bp, Homo sapiens
taaagacacctctgg

SEQ ID NO: 1465786 - DNA, 15 bp, Homo sapiens
aaagacacctctggt

SEQ ID NO: 1465787 - DNA, 15 bp, Homo sapiens
aagacacctctggta

SEQ ID NO: 1465788 - DNA, 15 bp, Homo sapiens
agacacctctggtat

SEQ ID NO: 1465789 - DNA, 15 bp, Homo sapiens
gacacctctggtatt

SEQ ID NO: 1465790 - DNA, 15 bp, Homo sapiens
acacctctggtattt

SEQ ID NO: 1465791 - DNA, 15 bp, Homo sapiens
cacctctggtattta

SEQ ID NO: 1465792 - DNA, 15 bp, Homo sapiens
acctctggtatttaa

SEQ ID NO: 1465793 - DNA, 15 bp, Homo sapiens
cctctggtatttaat

SEQ ID NO: 1465794 - DNA, 15 bp, Homo sapiens
ctctggtatttaatg

SEQ ID NO: 1465795 - DNA, 15 bp, Homo sapiens
tctggtatttaatga

SEQ ID NO: 1465796 - DNA, 15 bp, Homo sapiens
ctggtatttaatgaa

SEQ ID NO: 1465797 - DNA, 15 bp, Homo sapiens
tggtatttaatgaaa

SEQ ID NO: 1465798 - DNA, 15 bp, Homo sapiens
ggtatttaatgaaaa

SEQ ID NO: 1465799 - DNA, 15 bp, Homo sapiens
gtatttaatgaaaaa

SEQ ID NO: 1465800 - DNA, 15 bp, Homo sapiens
tatttaatgaaaaat

SEQ ID NO: 1465801 - DNA, 15 bp, Homo sapiens
atttaatgaaaaata

SEQ ID NO: 1465802 - DNA, 15 bp, Homo sapiens
tttaatgaaaaataa

SEQ ID NO: 1465803 - DNA, 15 bp, Homo sapiens
ttaatgaaaaataaa

SEQ ID NO: 1465804 - DNA, 15 bp, Homo sapiens
taatgaaaaataaat

SEQ ID NO: 1465805 - DNA, 15 bp, Homo sapiens
aatgaaaaataaata

SEQ ID NO: 1465806 - DNA, 15 bp, Homo sapiens
atgaaaaataaataa

SEQ ID NO: 1465807 - DNA, 15 bp, Homo sapiens
tgaaaaataaataaa

SEQ ID NO: 1465808 - DNA, 15 bp, Homo sapiens
gaaaaataaataaaa

SEQ ID NO: 1465809 - DNA, 15 bp, Homo sapiens
aaaataaataaaatt

SEQ ID NO: 1465810 - DNA, 15 bp, Homo sapiens
aaataaataaaattg

SEQ ID NO: 1465811 - DNA, 15 bp, Homo sapiens
aataaataaaattgt

SEQ ID NO: 1465812 - DNA, 15 bp, Homo sapiens
ataaataaaattgta

SEQ ID NO: 1465813 - DNA, 15 bp, Homo sapiens
taaataaaattgtat

SEQ ID NO: 1465814 - DNA, 15 bp, Homo sapiens
aaataaaattgtatc

SEQ ID NO: 1465815 - DNA, 15 bp, Homo sapiens
aataaaattgtatca

SEQ ID NO: 1465816 - DNA, 15 bp, Homo sapiens
ataaaattgtatcac

SEQ ID NO: 1465817 - DNA, 15 bp, Homo sapiens
taaaattgtatcact

SEQ ID NO: 1465818 - DNA, 15 bp, Homo sapiens
aaaattgtatcacta

SEQ ID NO: 1465819 - DNA, 15 bp, Homo sapiens
aaattgtatcactac

SEQ ID NO: 1465820 - DNA, 15 bp, Homo sapiens
aattgtatcactacc

SEQ ID NO: 1465821 - DNA, 15 bp, Homo sapiens
attgtatcactacca

SEQ ID NO: 1465822 - DNA, 15 bp, Homo sapiens
ttgtatcactaccat

SEQ ID NO: 1465823 - DNA, 15 bp, Homo sapiens
tgtatcactaccatc

SEQ ID NO: 1465824 - DNA, 15 bp, Homo sapiens
gtatcactaccatct

SEQ ID NO: 1465825 - DNA, 15 bp, Homo sapiens
tatcactaccatctt

SEQ ID NO: 1465826 - DNA, 15 bp, Homo sapiens
atcactaccatcttg

SEQ ID NO: 1465827 - DNA, 15 bp, Homo sapiens
tcactaccatcttga

SEQ ID NO: 1465828 - DNA, 15 bp, Homo sapiens
cactaccatcttgaa

SEQ ID NO: 1465829 - DNA, 15 bp, Homo sapiens
actaccatcttgaat

SEQ ID NO: 1465830 - DNA, 15 bp, Homo sapiens
ctaccatcttgaatt

SEQ ID NO: 1465831 - DNA, 15 bp, Homo sapiens
taccatcttgaatta

SEQ ID NO: 1465832 - DNA, 15 bp, Homo sapiens
accatcttgaattat

SEQ ID NO: 1465833 - DNA, 15 bp, Homo sapiens
ccatcttgaattatt

SEQ ID NO: 1465834 - DNA, 15 bp, Homo sapiens
catcttgaattattt

SEQ ID NO: 1465835 - DNA, 15 bp, Homo sapiens
atcttgaattatttt

SEQ ID NO: 1465836 - DNA, 15 bp, Homo sapiens
tcttgaattattttt

SEQ ID NO: 1465837 - DNA, 15 bp, Homo sapiens
cttgaattattttta

SEQ ID NO: 1465838 - DNA, 15 bp, Homo sapiens
ttgaattatttttat

SEQ ID NO: 1465839 - DNA, 15 bp, Homo sapiens
tgaattatttttatc

SEQ ID NO: 1465840 - DNA, 15 bp, Homo sapiens
gaattatttttatcc

SEQ ID NO: 1465841 - DNA, 15 bp, Homo sapiens
aattatttttatcct

SEQ ID NO: 1465842 - DNA, 15 bp, Homo sapiens
attatttttatcctt

SEQ ID NO: 1465843 - DNA, 15 bp, Homo sapiens
ttatttttatcctta

SEQ ID NO: 1465844 - DNA, 15 bp, Homo sapiens
tatttttatccttaa

SEQ ID NO: 1465845 - DNA, 15 bp, Homo sapiens
atttttatccttaaa

SEQ ID NO: 1465846 - DNA, 15 bp, Homo sapiens
tttttatccttaaag

SEQ ID NO: 1465847 - DNA, 15 bp, Homo sapiens
ttttatccttaaaga

SEQ ID NO: 1465848 - DNA, 15 bp, Homo sapiens
tttatccttaaagaa

SEQ ID NO: 1465849 - DNA, 15 bp, Homo sapiens
ttatccttaaagaaa

SEQ ID NO: 1465850 - DNA, 15 bp, Homo sapiens
tatccttaaagaaaa

SEQ ID NO: 1465851 - DNA, 15 bp, Homo sapiens
atccttaaagaaaag

SEQ ID NO: 1465852 - DNA, 15 bp, Homo sapiens
tccttaaagaaaaga

SEQ ID NO: 1465853 - DNA, 15 bp, Homo sapiens
ccttaaagaaaagaa

SEQ ID NO: 1465854 - DNA, 15 bp, Homo sapiens
cttaaagaaaagaag

SEQ ID NO: 1465855 - DNA, 15 bp, Homo sapiens
ttaaagaaaagaaga

SEQ ID NO: 1465856 - DNA, 15 bp, Homo sapiens
taaagaaaagaagaa

SEQ ID NO: 1465857 - DNA, 15 bp, Homo sapiens
aaagaaaagaagaaa

SEQ ID NO: 1465858 - DNA, 15 bp, Homo sapiens
aagaaaagaagaaat

SEQ ID NO: 1465859 - DNA, 15 bp, Homo sapiens
agaaaagaagaaatt

SEQ ID NO: 1465860 - DNA, 15 bp, Homo sapiens
gaaaagaagaaattc

SEQ ID NO: 1465861 - DNA, 15 bp, Homo sapiens
aaaagaagaaattcc

SEQ ID NO: 1465862 - DNA, 15 bp, Homo sapiens
aaagaagaaattcca

SEQ ID NO: 1465863 - DNA, 15 bp, Homo sapiens
aagaagaaattccaa

SEQ ID NO: 1465864 - DNA, 15 bp, Homo sapiens
agaagaaattccaaa

SEQ ID NO: 1465865 - DNA, 15 bp, Homo sapiens
gaagaaattccaaat

SEQ ID NO: 1465866 - DNA, 15 bp, Homo sapiens
aagaaattccaaatt

SEQ ID NO: 1465867 - DNA, 15 bp, Homo sapiens
agaaattccaaattt

SEQ ID NO: 1465868 - DNA, 15 bp, Homo sapiens
gaaattccaaatttt

SEQ ID NO: 1465869 - DNA, 15 bp, Homo sapiens
aaattccaaattttt

SEQ ID NO: 1465870 - DNA, 15 bp, Homo sapiens
aattccaaatttttg

SEQ ID NO: 1465871 - DNA, 15 bp, Homo sapiens
attccaaatttttgg

SEQ ID NO: 1465872 - DNA, 15 bp, Homo sapiens
ttccaaatttttgga

SEQ ID NO: 1465873 - DNA, 15 bp, Homo sapiens
tccaaatttttggat

SEQ ID NO: 1465874 - DNA, 15 bp, Homo sapiens
ccaaatttttggata

SEQ ID NO: 1465875 - DNA, 15 bp, Homo sapiens
caaatttttggatag

SEQ ID NO: 1465876 - DNA, 15 bp, Homo sapiens
aaatttttggataga

SEQ ID NO: 1465877 - DNA, 15 bp, Homo sapiens
aatttttggatagaa

SEQ ID NO: 1465878 - DNA, 15 bp, Homo sapiens
atttttggatagaat

SEQ ID NO: 1465879 - DNA, 15 bp, Homo sapiens
tttttggatagaatt

SEQ ID NO: 1465880 - DNA, 15 bp, Homo sapiens
ttttggatagaattt

SEQ ID NO: 1465881 - DNA, 15 bp, Homo sapiens
tttggatagaatttt

SEQ ID NO: 1465882 - DNA, 15 bp, Homo sapiens
ttggatagaattttt

SEQ ID NO: 1465883 - DNA, 15 bp, Homo sapiens
tggatagaattttta

SEQ ID NO: 1465884 - DNA, 15 bp, Homo sapiens
ggatagaatttttat

SEQ ID NO: 1465885 - DNA, 15 bp, Homo sapiens
gatagaatttttata

SEQ ID NO: 1465886 - DNA, 15 bp, Homo sapiens
atagaatttttatac

SEQ ID NO: 1465887 - DNA, 15 bp, Homo sapiens
tagaatttttataca

SEQ ID NO: 1465888 - DNA, 15 bp, Homo sapiens
agaatttttatacaa

SEQ ID NO: 1465889 - DNA, 15 bp, Homo sapiens
gaatttttatacaac

SEQ ID NO: 1465890 - DNA, 15 bp, Homo sapiens
aatttttatacaact

SEQ ID NO: 1465891 - DNA, 15 bp, Homo sapiens
atttttatacaactg

SEQ ID NO: 1465892 - DNA, 15 bp, Homo sapiens
tttttatacaactgt

SEQ ID NO: 1465893 - DNA, 15 bp, Homo sapiens
ttttatacaactgtt

SEQ ID NO: 1465894 - DNA, 15 bp, Homo sapiens
tttatacaactgttt

SEQ ID NO: 1465895 - DNA, 15 bp, Homo sapiens
ttatacaactgtttt

SEQ ID NO: 1465896 - DNA, 15 bp, Homo sapiens
tatacaactgttttc

SEQ ID NO: 1465897 - DNA, 15 bp, Homo sapiens
atacaactgttttcc

SEQ ID NO: 1465898 - DNA, 15 bp, Homo sapiens
tacaactgttttcca

SEQ ID NO: 1465899 - DNA, 15 bp, Homo sapiens
acaactgttttccaa

SEQ ID NO: 1465900 - DNA, 15 bp, Homo sapiens
caactgttttccaaa

SEQ ID NO: 1465901 - DNA, 15 bp, Homo sapiens
aactgttttccaaaa

SEQ ID NO: 1465902 - DNA, 15 bp, Homo sapiens
actgttttccaaaat

SEQ ID NO: 1465903 - DNA, 15 bp, Homo sapiens
ctgttttccaaaata

SEQ ID NO: 1465904 - DNA, 15 bp, Homo sapiens
tgttttccaaaataa

SEQ ID NO: 1465905 - DNA, 15 bp, Homo sapiens
gttttccaaaataag

SEQ ID NO: 1465906 - DNA, 15 bp, Homo sapiens
ttttccaaaataagt

SEQ ID NO: 1465907 - DNA, 15 bp, Homo sapiens
tttccaaaataagtc

SEQ ID NO: 1465908 - DNA, 15 bp, Homo sapiens
ttccaaaataagtcc

SEQ ID NO: 1465909 - DNA, 15 bp, Homo sapiens
tccaaaataagtcct

SEQ ID NO: 1465910 - DNA, 15 bp, Homo sapiens
ccaaaataagtcctt

SEQ ID NO: 1465911 - DNA, 15 bp, Homo sapiens
caaaataagtccttc

SEQ ID NO: 1465912 - DNA, 15 bp, Homo sapiens
aaaataagtccttct

SEQ ID NO: 1465913 - DNA, 15 bp, Homo sapiens
aaataagtccttctt

SEQ ID NO: 1465914 - DNA, 15 bp, Homo sapiens
aataagtccttcttt

SEQ ID NO: 1465915 - DNA, 15 bp, Homo sapiens
ataagtccttctttt

SEQ ID NO: 1465916 - DNA, 15 bp, Homo sapiens
taagtccttcttttc

SEQ ID NO: 1465917 - DNA, 15 bp, Homo sapiens
aagtccttcttttcc

SEQ ID NO: 1465918 - DNA, 15 bp, Homo sapiens
agtccttcttttcca

SEQ ID NO: 1465919 - DNA, 15 bp, Homo sapiens
gtccttcttttccag

SEQ ID NO: 1465920 - DNA, 15 bp, Homo sapiens
tccttcttttccagc

SEQ ID NO: 1465921 - DNA, 15 bp, Homo sapiens
ccttcttttccagca

SEQ ID NO: 1465922 - DNA, 15 bp, Homo sapiens
cttcttttccagcag

SEQ ID NO: 1465923 - DNA, 15 bp, Homo sapiens
ttcttttccagcaga

SEQ ID NO: 1465924 - DNA, 15 bp, Homo sapiens
tcttttccagcagac

SEQ ID NO: 1465925 - DNA, 15 bp, Homo sapiens
cttttccagcagaca

SEQ ID NO: 1465926 - DNA, 15 bp, Homo sapiens
ttttccagcagacaa

SEQ ID NO: 1465927 - DNA, 15 bp, Homo sapiens
tttccagcagacaaa

SEQ ID NO: 1465928 - DNA, 15 bp, Homo sapiens
ttccagcagacaaag

SEQ ID NO: 1465929 - DNA, 15 bp, Homo sapiens
tccagcagacaaagt

SEQ ID NO: 1465930 - DNA, 15 bp, Homo sapiens
ccagcagacaaagta

SEQ ID NO: 1465931 - DNA, 15 bp, Homo sapiens
cagcagacaaagtaa

SEQ ID NO: 1465932 - DNA, 15 bp, Homo sapiens
agcagacaaagtaaa

SEQ ID NO: 1465933 - DNA, 15 bp, Homo sapiens
gcagacaaagtaaac

SEQ ID NO: 1465934 - DNA, 15 bp, Homo sapiens
cagacaaagtaaaca

SEQ ID NO: 1465935 - DNA, 15 bp, Homo sapiens
agacaaagtaaacag

SEQ ID NO: 1465936 - DNA, 15 bp, Homo sapiens
gacaaagtaaacagt

SEQ ID NO: 1465937 - DNA, 15 bp, Homo sapiens
acaaagtaaacagtc

SEQ ID NO: 1465938 - DNA, 15 bp, Homo sapiens
caaagtaaacagtct

SEQ ID NO: 1465939 - DNA, 15 bp, Homo sapiens
aaagtaaacagtctc

SEQ ID NO: 1465940 - DNA, 15 bp, Homo sapiens
aagtaaacagtctcc

SEQ ID NO: 1465941 - DNA, 15 bp, Homo sapiens
agtaaacagtctcca

SEQ ID NO: 1465942 - DNA, 15 bp, Homo sapiens
gtaaacagtctccat

SEQ ID NO: 1465943 - DNA, 15 bp, Homo sapiens
taaacagtctccatt

SEQ ID NO: 1465944 - DNA, 15 bp, Homo sapiens
aaacagtctccatta

SEQ ID NO: 1465945 - DNA, 15 bp, Homo sapiens
aacagtctccattac

SEQ ID NO: 1465946 - DNA, 15 bp, Homo sapiens
acagtctccattaca

SEQ ID NO: 1465947 - DNA, 15 bp, Homo sapiens
cagtctccattacaa

SEQ ID NO: 1465948 - DNA, 15 bp, Homo sapiens
agtctccattacaag

SEQ ID NO: 1465949 - DNA, 15 bp, Homo sapiens
gtctccattacaagg

SEQ ID NO: 1465950 - DNA, 15 bp, Homo sapiens
tctccattacaagga

SEQ ID NO: 1465951 - DNA, 15 bp, Homo sapiens
ctccattacaaggag

SEQ ID NO: 1465952 - DNA, 15 bp, Homo sapiens
tccattacaaggaga

SEQ ID NO: 1465953 - DNA, 15 bp, Homo sapiens
ccattacaaggagac

SEQ ID NO: 1465954 - DNA, 15 bp, Homo sapiens
cattacaaggagaca

SEQ ID NO: 1465955 - DNA, 15 bp, Homo sapiens
attacaaggagacaa

SEQ ID NO: 1465956 - DNA, 15 bp, Homo sapiens
ttacaaggagacaac

SEQ ID NO: 1465957 - DNA, 15 bp, Homo sapiens
tacaaggagacaacc

SEQ ID NO: 1465958 - DNA, 15 bp, Homo sapiens
acaaggagacaacca

SEQ ID NO: 1465959 - DNA, 15 bp, Homo sapiens
caaggagacaaccaa

SEQ ID NO: 1465960 - DNA, 15 bp, Homo sapiens
aaggagacaaccaaa

SEQ ID NO: 1465961 - DNA, 15 bp, Homo sapiens
aggagacaaccaaaa

SEQ ID NO: 1465962 - DNA, 15 bp, Homo sapiens
ggagacaaccaaaaa

SEQ ID NO: 1465963 - DNA, 15 bp, Homo sapiens
gagacaaccaaaaat

SEQ ID NO: 1465964 - DNA, 15 bp, Homo sapiens
agacaaccaaaaata

SEQ ID NO: 1465965 - DNA, 15 bp, Homo sapiens
gacaaccaaaaatat

SEQ ID NO: 1465966 - DNA, 15 bp, Homo sapiens
acaaccaaaaatata

SEQ ID NO: 1465967 - DNA, 15 bp, Homo sapiens
caaccaaaaatatag

SEQ ID NO: 1465968 - DNA, 15 bp, Homo sapiens
aaccaaaaatatagt

SEQ ID NO: 1465969 - DNA, 15 bp, Homo sapiens
accaaaaatatagta

SEQ ID NO: 1465970 - DNA, 15 bp, Homo sapiens
ccaaaaatatagtag

SEQ ID NO: 1465971 - DNA, 15 bp, Homo sapiens
caaaaatatagtagt

SEQ ID NO: 1465972 - DNA, 15 bp, Homo sapiens
aaaaatatagtagtt

SEQ ID NO: 1465973 - DNA, 15 bp, Homo sapiens
aaaatatagtagttt

SEQ ID NO: 1465974 - DNA, 15 bp, Homo sapiens
aaatatagtagttta

SEQ ID NO: 1465975 - DNA, 15 bp, Homo sapiens
aatatagtagtttac

SEQ ID NO: 1465976 - DNA, 15 bp, Homo sapiens
atatagtagtttact

SEQ ID NO: 1465977 - DNA, 15 bp, Homo sapiens
tatagtagtttactg

SEQ ID NO: 1465978 - DNA, 15 bp, Homo sapiens
atagtagtttactga

SEQ ID NO: 1465979 - DNA, 15 bp, Homo sapiens
tagtagtttactgaa

SEQ ID NO: 1465980 - DNA, 15 bp, Homo sapiens
agtagtttactgaaa

SEQ ID NO: 1465981 - DNA, 15 bp, Homo sapiens
gtagtttactgaaat

SEQ ID NO: 1465982 - DNA, 15 bp, Homo sapiens
tagtttactgaaata

SEQ ID NO: 1465983 - DNA, 15 bp, Homo sapiens
agtttactgaaatac

SEQ ID NO: 1465984 - DNA, 15 bp, Homo sapiens
gtttactgaaatacc

SEQ ID NO: 1465985 - DNA, 15 bp, Homo sapiens
tttactgaaataccc

SEQ ID NO: 1465986 - DNA, 15 bp, Homo sapiens
ttactgaaataccca

SEQ ID NO: 1465987 - DNA, 15 bp, Homo sapiens
tactgaaatacccag

SEQ ID NO: 1465988 - DNA, 15 bp, Homo sapiens
actgaaatacccagg

SEQ ID NO: 1465989 - DNA, 15 bp, Homo sapiens
ctgaaatacccaggc

SEQ ID NO: 1465990 - DNA, 15 bp, Homo sapiens
tgaaatacccaggcc

SEQ ID NO: 1465991 - DNA, 15 bp, Homo sapiens
gaaatacccaggccc

SEQ ID NO: 1465992 - DNA, 15 bp, Homo sapiens
aaatacccaggccct

SEQ ID NO: 1465993 - DNA, 15 bp, Homo sapiens
aatacccaggccctt

SEQ ID NO: 1465994 - DNA, 15 bp, Homo sapiens
atacccaggcccttc

SEQ ID NO: 1465995 - DNA, 15 bp, Homo sapiens
tacccaggcccttct

SEQ ID NO: 1465996 - DNA, 15 bp, Homo sapiens
acccaggcccttcta

SEQ ID NO: 1465997 - DNA, 15 bp, Homo sapiens
cccaggcccttctac

SEQ ID NO: 1465998 - DNA, 15 bp, Homo sapiens
ccaggcccttctaca

SEQ ID NO: 1465999 - DNA, 15 bp, Homo sapiens
caggcccttctacag

SEQ ID NO: 1466000 - DNA, 15 bp, Homo sapiens
aggcccttctacaga

SEQ ID NO: 1466001 - DNA, 15 bp, Homo sapiens
ggcccttctacagat

SEQ ID NO: 1466002 - DNA, 15 bp, Homo sapiens
gcccttctacagatc

SEQ ID NO: 1466003 - DNA, 15 bp, Homo sapiens
cccttctacagatca

SEQ ID NO: 1466004 - DNA, 15 bp, Homo sapiens
ccttctacagatcat

SEQ ID NO: 1466005 - DNA, 15 bp, Homo sapiens
cttctacagatcatg

SEQ ID NO: 1466006 - DNA, 15 bp, Homo sapiens
ttctacagatcatgg

SEQ ID NO: 1466007 - DNA, 15 bp, Homo sapiens
tctacagatcatggg

SEQ ID NO: 1466008 - DNA, 15 bp, Homo sapiens
ctacagatcatgggc

SEQ ID NO: 1466009 - DNA, 15 bp, Homo sapiens
tacagatcatgggca

SEQ ID NO: 1466010 - DNA, 15 bp, Homo sapiens
acagatcatgggcag

SEQ ID NO: 1466011 - DNA, 15 bp, Homo sapiens
cagatcatgggcagg

SEQ ID NO: 1466012 - DNA, 15 bp, Homo sapiens
agatcatgggcaggt

SEQ ID NO: 1466013 - DNA, 15 bp, Homo sapiens
gatcatgggcaggta

SEQ ID NO: 1466014 - DNA, 15 bp, Homo sapiens
atcatgggcaggtag

SEQ ID NO: 1466015 - DNA, 15 bp, Homo sapiens
tcatgggcaggtaga

SEQ ID NO: 1466016 - DNA, 15 bp, Homo sapiens
catgggcaggtagac

SEQ ID NO: 1466017 - DNA, 15 bp, Homo sapiens
atgggcaggtagaca

SEQ ID NO: 1466018 - DNA, 15 bp, Homo sapiens
tgggcaggtagacag

SEQ ID NO: 1466019 - DNA, 15 bp, Homo sapiens
gggcaggtagacaga

SEQ ID NO: 1466020 - DNA, 15 bp, Homo sapiens
ggcaggtagacagac

SEQ ID NO: 1466021 - DNA, 15 bp, Homo sapiens
gcaggtagacagacg

SEQ ID NO: 1466022 - DNA, 15 bp, Homo sapiens
caggtagacagacgg

SEQ ID NO: 1466023 - DNA, 15 bp, Homo sapiens
aggtagacagacgga

SEQ ID NO: 1466024 - DNA, 15 bp, Homo sapiens
ggtagacagacggaa

SEQ ID NO: 1466025 - DNA, 15 bp, Homo sapiens
gtagacagacggaat

SEQ ID NO: 1466026 - DNA, 15 bp, Homo sapiens
tagacagacggaatt

SEQ ID NO: 1466027 - DNA, 15 bp, Homo sapiens
agacagacggaattc

SEQ ID NO: 1466028 - DNA, 15 bp, Homo sapiens
gacagacggaattct

SEQ ID NO: 1466029 - DNA, 15 bp, Homo sapiens
acagacggaattctt

SEQ ID NO: 1466030 - DNA, 15 bp, Homo sapiens
cagacggaattctta

SEQ ID NO: 1466031 - DNA, 15 bp, Homo sapiens
agacggaattcttat

SEQ ID NO: 1466032 - DNA, 15 bp, Homo sapiens
gacggaattcttatt

SEQ ID NO: 1466033 - DNA, 15 bp, Homo sapiens
acggaattcttattt

SEQ ID NO: 1466034 - DNA, 15 bp, Homo sapiens
cggaattcttatttc

SEQ ID NO: 1466035 - DNA, 15 bp, Homo sapiens
ggaattcttatttca

SEQ ID NO: 1466036 - DNA, 15 bp, Homo sapiens
gaattcttatttcag

SEQ ID NO: 1466037 - DNA, 15 bp, Homo sapiens
aattcttatttcagc

SEQ ID NO: 1466038 - DNA, 15 bp, Homo sapiens
attcttatttcagct

SEQ ID NO: 1466039 - DNA, 15 bp, Homo sapiens
ttcttatttcagctc

SEQ ID NO: 1466040 - DNA, 15 bp, Homo sapiens
tcttatttcagctcc

SEQ ID NO: 1466041 - DNA, 15 bp, Homo sapiens
cttatttcagctcct

SEQ ID NO: 1466042 - DNA, 15 bp, Homo sapiens
ttatttcagctcctt

SEQ ID NO: 1466043 - DNA, 15 bp, Homo sapiens
tatttcagctccttt

SEQ ID NO: 1466044 - DNA, 15 bp, Homo sapiens
atttcagctccttta

SEQ ID NO: 1466045 - DNA, 15 bp, Homo sapiens
tttcagctcctttaa

SEQ ID NO: 1466046 - DNA, 15 bp, Homo sapiens
ttcagctcctttaat

SEQ ID NO: 1466047 - DNA, 15 bp, Homo sapiens
tcagctcctttaata

SEQ ID NO: 1466048 - DNA, 15 bp, Homo sapiens
cagctcctttaataa

SEQ ID NO: 1466049 - DNA, 15 bp, Homo sapiens
agctcctttaataat

SEQ ID NO: 1466050 - DNA, 15 bp, Homo sapiens
gctcctttaataatg

SEQ ID NO: 1466051 - DNA, 15 bp, Homo sapiens
ctcctttaataatgg

SEQ ID NO: 1466052 - DNA, 15 bp, Homo sapiens
tcctttaataatgga

SEQ ID NO: 1466053 - DNA, 15 bp, Homo sapiens
cctttaataatggaa

SEQ ID NO: 1466054 - DNA, 15 bp, Homo sapiens
ctttaataatggaat

SEQ ID NO: 1466055 - DNA, 15 bp, Homo sapiens
tttaataatggaata

SEQ ID NO: 1466056 - DNA, 15 bp, Homo sapiens
ttaataatggaatat

SEQ ID NO: 1466057 - DNA, 15 bp, Homo sapiens
taataatggaatatt

SEQ ID NO: 1466058 - DNA, 15 bp, Homo sapiens
aataatggaatattg

SEQ ID NO: 1466059 - DNA, 15 bp, Homo sapiens
ataatggaatattgg

SEQ ID NO: 1466060 - DNA, 15 bp, Homo sapiens
taatggaatattgga

SEQ ID NO: 1466061 - DNA, 15 bp, Homo sapiens
aatggaatattggac

SEQ ID NO: 1466062 - DNA, 15 bp, Homo sapiens
atggaatattggact

SEQ ID NO: 1466063 - DNA, 15 bp, Homo sapiens
tggaatattggacta

SEQ ID NO: 1466064 - DNA, 15 bp, Homo sapiens
ggaatattggactat

SEQ ID NO: 1466065 - DNA, 15 bp, Homo sapiens
gaatattggactatt

SEQ ID NO: 1466066 - DNA, 15 bp, Homo sapiens
aatattggactattt

SEQ ID NO: 1466067 - DNA, 15 bp, Homo sapiens
atattggactattta

SEQ ID NO: 1466068 - DNA, 15 bp, Homo sapiens
tattggactatttaa

SEQ ID NO: 1466069 - DNA, 15 bp, Homo sapiens
attggactatttaaa

SEQ ID NO: 1466070 - DNA, 15 bp, Homo sapiens
ttggactatttaaat

SEQ ID NO: 1466071 - DNA, 15 bp, Homo sapiens
tggactatttaaata

SEQ ID NO: 1466072 - DNA, 15 bp, Homo sapiens
ggactatttaaataa

SEQ ID NO: 1466073 - DNA, 15 bp, Homo sapiens
gactatttaaataaa

SEQ ID NO: 1466074 - DNA, 15 bp, Homo sapiens
actatttaaataaaa

SEQ ID NO: 1466075 - DNA, 15 bp, Homo sapiens
ctatttaaataaaat

SEQ ID NO: 1466076 - DNA, 15 bp, Homo sapiens
tatttaaataaaatc

SEQ ID NO: 1466077 - DNA, 15 bp, Homo sapiens
tttaaataaaatcta

SEQ ID NO: 1466078 - DNA, 15 bp, Homo sapiens
ttaaataaaatctat

SEQ ID NO: 1466079 - DNA, 15 bp, Homo sapiens
taaataaaatctatt

SEQ ID NO: 1466080 - DNA, 15 bp, Homo sapiens
aaataaaatctatta

SEQ ID NO: 1466081 - DNA, 15 bp, Homo sapiens
aataaaatctattag

SEQ ID NO: 1466082 - DNA, 15 bp, Homo sapiens
ataaaatctattaga

SEQ ID NO: 1466083 - DNA, 15 bp, Homo sapiens
taaaatctattagaa

SEQ ID NO: 1466084 - DNA, 15 bp, Homo sapiens
aaaatctattagaag

SEQ ID NO: 1466085 - DNA, 15 bp, Homo sapiens
aaatctattagaagg

SEQ ID NO: 1466086 - DNA, 15 bp, Homo sapiens
aatctattagaaggc

SEQ ID NO: 1466087 - DNA, 15 bp, Homo sapiens
atctattagaaggca

SEQ ID NO: 1466088 - DNA, 15 bp, Homo sapiens
tctattagaaggcat

SEQ ID NO: 1466089 - DNA, 15 bp, Homo sapiens
ctattagaaggcatc

SEQ ID NO: 1466090 - DNA, 15 bp, Homo sapiens
tattagaaggcatct

SEQ ID NO: 1466091 - DNA, 15 bp, Homo sapiens
attagaaggcatctt

SEQ ID NO: 1466092 - DNA, 15 bp, Homo sapiens
ttagaaggcatctta

SEQ ID NO: 1466093 - DNA, 15 bp, Homo sapiens
tagaaggcatcttat

SEQ ID NO: 1466094 - DNA, 15 bp, Homo sapiens
agaaggcatcttatg

SEQ ID NO: 1466095 - DNA, 15 bp, Homo sapiens
gaaggcatcttatgg

SEQ ID NO: 1466096 - DNA, 15 bp, Homo sapiens
aaggcatcttatgga

SEQ ID NO: 1466097 - DNA, 15 bp, Homo sapiens
aggcatcttatggat

SEQ ID NO: 1466098 - DNA, 15 bp, Homo sapiens
ggcatcttatggatc

SEQ ID NO: 1466099 - DNA, 15 bp, Homo sapiens
gcatcttatggatcc

SEQ ID NO: 1466100 - DNA, 15 bp, Homo sapiens
catcttatggatcca

SEQ ID NO: 1466101 - DNA, 15 bp, Homo sapiens
atcttatggatccat

SEQ ID NO: 1466102 - DNA, 15 bp, Homo sapiens
tcttatggatccatc

SEQ ID NO: 1466103 - DNA, 15 bp, Homo sapiens
cttatggatccatca

SEQ ID NO: 1466104 - DNA, 15 bp, Homo sapiens
ttatggatccatcag

SEQ ID NO: 1466105 - DNA, 15 bp, Homo sapiens
tatggatccatcaga

SEQ ID NO: 1466106 - DNA, 15 bp, Homo sapiens
atggatccatcagac

SEQ ID NO: 1466107 - DNA, 15 bp, Homo sapiens
tggatccatcagact

SEQ ID NO: 1466108 - DNA, 15 bp, Homo sapiens
ggatccatcagactg

SEQ ID NO: 1466109 - DNA, 15 bp, Homo sapiens
gatccatcagactgt

SEQ ID NO: 1466110 - DNA, 15 bp, Homo sapiens
atccatcagactgtg

SEQ ID NO: 1466111 - DNA, 15 bp, Homo sapiens
tccatcagactgtgt

SEQ ID NO: 1466112 - DNA, 15 bp, Homo sapiens
ccatcagactgtgtc

SEQ ID NO: 1466113 - DNA, 15 bp, Homo sapiens
catcagactgtgtca

SEQ ID NO: 1466114 - DNA, 15 bp, Homo sapiens
atcagactgtgtcat

SEQ ID NO: 1466115 - DNA, 15 bp, Homo sapiens
tcagactgtgtcata

SEQ ID NO: 1466116 - DNA, 15 bp, Homo sapiens
cagactgtgtcataa

SEQ ID NO: 1466117 - DNA, 15 bp, Homo sapiens
agactgtgtcataag

SEQ ID NO: 1466118 - DNA, 15 bp, Homo sapiens
gactgtgtcataagt

SEQ ID NO: 1466119 - DNA, 15 bp, Homo sapiens
actgtgtcataagta

SEQ ID NO: 1466120 - DNA, 15 bp, Homo sapiens
ctgtgtcataagtag

SEQ ID NO: 1466121 - DNA, 15 bp, Homo sapiens
tgtgtcataagtagg

SEQ ID NO: 1466122 - DNA, 15 bp, Homo sapiens
gtgtcataagtaggt

SEQ ID NO: 1466123 - DNA, 15 bp, Homo sapiens
tgtcataagtaggtc

SEQ ID NO: 1466124 - DNA, 15 bp, Homo sapiens
gtcataagtaggtct

SEQ ID NO: 1466125 - DNA, 15 bp, Homo sapiens
tcataagtaggtctt

SEQ ID NO: 1466126 - DNA, 15 bp, Homo sapiens
cataagtaggtcttg

SEQ ID NO: 1466127 - DNA, 15 bp, Homo sapiens
ataagtaggtcttga

SEQ ID NO: 1466128 - DNA, 15 bp, Homo sapiens
taagtaggtcttgaa

SEQ ID NO: 1466129 - DNA, 15 bp, Homo sapiens
aagtaggtcttgaat

SEQ ID NO: 1466130 - DNA, 15 bp, Homo sapiens
agtaggtcttgaata

SEQ ID NO: 1466131 - DNA, 15 bp, Homo sapiens
gtaggtcttgaataa

SEQ ID NO: 1466132 - DNA, 15 bp, Homo sapiens
taggtcttgaataac

SEQ ID NO: 1466133 - DNA, 15 bp, Homo sapiens
aggtcttgaataaca

SEQ ID NO: 1466134 - DNA, 15 bp, Homo sapiens
ggtcttgaataacaa

SEQ ID NO: 1466135 - DNA, 15 bp, Homo sapiens
gtcttgaataacaat

SEQ ID NO: 1466136 - DNA, 15 bp, Homo sapiens
tcttgaataacaatt

SEQ ID NO: 1466137 - DNA, 15 bp, Homo sapiens
cttgaataacaattg

SEQ ID NO: 1466138 - DNA, 15 bp, Homo sapiens
ttgaataacaattgc

SEQ ID NO: 1466139 - DNA, 15 bp, Homo sapiens
tgaataacaattgca

SEQ ID NO: 1466140 - DNA, 15 bp, Homo sapiens
gaataacaattgcat

SEQ ID NO: 1466141 - DNA, 15 bp, Homo sapiens
aataacaattgcatt

SEQ ID NO: 1466142 - DNA, 15 bp, Homo sapiens
ataacaattgcatta

SEQ ID NO: 1466143 - DNA, 15 bp, Homo sapiens
taacaattgcattaa

SEQ ID NO: 1466144 - DNA, 15 bp, Homo sapiens
aacaattgcattaaa

SEQ ID NO: 1466145 - DNA, 15 bp, Homo sapiens
acaattgcattaaaa

SEQ ID NO: 1466146 - DNA, 15 bp, Homo sapiens
caattgcattaaaaa

SEQ ID NO: 1466147 - DNA, 15 bp, Homo sapiens
aattgcattaaaaaa

SEQ ID NO: 1466148 - DNA, 15 bp, Homo sapiens
attgcattaaaaaag

SEQ ID NO: 1466149 - DNA, 15 bp, Homo sapiens
ttgcattaaaaaaga

SEQ ID NO: 1466150 - DNA, 15 bp, Homo sapiens
tgcattaaaaaagat

SEQ ID NO: 1466151 - DNA, 15 bp, Homo sapiens
gcattaaaaaagatt

SEQ ID NO: 1466152 - DNA, 15 bp, Homo sapiens
cattaaaaaagattt

SEQ ID NO: 1466153 - DNA, 15 bp, Homo sapiens
attaaaaaagatttg

SEQ ID NO: 1466154 - DNA, 15 bp, Homo sapiens
ttaaaaaagatttgg

SEQ ID NO: 1466155 - DNA, 15 bp, Homo sapiens
taaaaaagatttggg

SEQ ID NO: 1466156 - DNA, 15 bp, Homo sapiens
aaaaaagatttggga

SEQ ID NO: 1466157 - DNA, 15 bp, Homo sapiens
aaaaagatttgggat

SEQ ID NO: 1466158 - DNA, 15 bp, Homo sapiens
aaaagatttgggatt

SEQ ID NO: 1466159 - DNA, 15 bp, Homo sapiens
aaagatttgggattt

SEQ ID NO: 1466160 - DNA, 15 bp, Homo sapiens
aagatttgggatttt

SEQ ID NO: 1466161 - DNA, 15 bp, Homo sapiens
agatttgggattttc

SEQ ID NO: 1466162 - DNA, 15 bp, Homo sapiens
gatttgggattttca

SEQ ID NO: 1466163 - DNA, 15 bp, Homo sapiens
atttgggattttcat

SEQ ID NO: 1466164 - DNA, 15 bp, Homo sapiens
tttgggattttcatg

SEQ ID NO: 1466165 - DNA, 15 bp, Homo sapiens
ttgggattttcatgt

SEQ ID NO: 1466166 - DNA, 15 bp, Homo sapiens
tgggattttcatgtc

SEQ ID NO: 1466167 - DNA, 15 bp, Homo sapiens
gggattttcatgtct

SEQ ID NO: 1466168 - DNA, 15 bp, Homo sapiens
ggattttcatgtctc

SEQ ID NO: 1466169 - DNA, 15 bp, Homo sapiens
gattttcatgtctct

SEQ ID NO: 1466170 - DNA, 15 bp, Homo sapiens
attttcatgtctctt

SEQ ID NO: 1466171 - DNA, 15 bp, Homo sapiens
ttttcatgtctcttt

SEQ ID NO: 1466172 - DNA, 15 bp, Homo sapiens
tttcatgtctctttc

SEQ ID NO: 1466173 - DNA, 15 bp, Homo sapiens
ttcatgtctctttct

SEQ ID NO: 1466174 - DNA, 15 bp, Homo sapiens
tcatgtctctttctg

SEQ ID NO: 1466175 - DNA, 15 bp, Homo sapiens
catgtctctttctgt

SEQ ID NO: 1466176 - DNA, 15 bp, Homo sapiens
atgtctctttctgtt

SEQ ID NO: 1466177 - DNA, 15 bp, Homo sapiens
tgtctctttctgttt

SEQ ID NO: 1466178 - DNA, 15 bp, Homo sapiens
gtctctttctgtttg

SEQ ID NO: 1466179 - DNA, 15 bp, Homo sapiens
tctctttctgtttgg

SEQ ID NO: 1466180 - DNA, 15 bp, Homo sapiens
ctctttctgtttggg

SEQ ID NO: 1466181 - DNA, 15 bp, Homo sapiens
tctttctgtttgggg

SEQ ID NO: 1466182 - DNA, 15 bp, Homo sapiens
ctttctgtttggggt

SEQ ID NO: 1466183 - DNA, 15 bp, Homo sapiens
tttctgtttggggtt

SEQ ID NO: 1466184 - DNA, 15 bp, Homo sapiens
ttctgtttggggtta

SEQ ID NO: 1466185 - DNA, 15 bp, Homo sapiens
tctgtttggggttaa

SEQ ID NO: 1466186 - DNA, 15 bp, Homo sapiens
ctgtttggggttaaa

SEQ ID NO: 1466187 - DNA, 15 bp, Homo sapiens
tgtttggggttaaac

SEQ ID NO: 1466188 - DNA, 15 bp, Homo sapiens
gtttggggttaaaca

SEQ ID NO: 1466189 - DNA, 15 bp, Homo sapiens
tttggggttaaacag

SEQ ID NO: 1466190 - DNA, 15 bp, Homo sapiens
ttggggttaaacagt

SEQ ID NO: 1466191 - DNA, 15 bp, Homo sapiens
tggggttaaacagtt

SEQ ID NO: 1466192 - DNA, 15 bp, Homo sapiens
ggggttaaacagtta

SEQ ID NO: 1466193 - DNA, 15 bp, Homo sapiens
gggttaaacagttaa

SEQ ID NO: 1466194 - DNA, 15 bp, Homo sapiens
ggttaaacagttaac

SEQ ID NO: 1466195 - DNA, 15 bp, Homo sapiens
gttaaacagttaact

SEQ ID NO: 1466196 - DNA, 15 bp, Homo sapiens
ttaaacagttaactt

SEQ ID NO: 1466197 - DNA, 15 bp, Homo sapiens
taaacagttaacttg

SEQ ID NO: 1466198 - DNA, 15 bp, Homo sapiens
aaacagttaacttgg

SEQ ID NO: 1466199 - DNA, 15 bp, Homo sapiens
aacagttaacttggc

SEQ ID NO: 1466200 - DNA, 15 bp, Homo sapiens
acagttaacttggca

SEQ ID NO: 1466201 - DNA, 15 bp, Homo sapiens
cagttaacttggcat

SEQ ID NO: 1466202 - DNA, 15 bp, Homo sapiens
agttaacttggcatt

SEQ ID NO: 1466203 - DNA, 15 bp, Homo sapiens
gttaacttggcattt

SEQ ID NO: 1466204 - DNA, 15 bp, Homo sapiens
ttaacttggcatttg

SEQ ID NO: 1466205 - DNA, 15 bp, Homo sapiens
taacttggcatttgt

SEQ ID NO: 1466206 - DNA, 15 bp, Homo sapiens
aacttggcatttgtt

SEQ ID NO: 1466207 - DNA, 15 bp, Homo sapiens
acttggcatttgttt

SEQ ID NO: 1466208 - DNA, 15 bp, Homo sapiens
cttggcatttgttta

SEQ ID NO: 1466209 - DNA, 15 bp, Homo sapiens
ttggcatttgtttaa

SEQ ID NO: 1466210 - DNA, 15 bp, Homo sapiens
tggcatttgtttaaa

SEQ ID NO: 1466211 - DNA, 15 bp, Homo sapiens
ggcatttgtttaaaa

SEQ ID NO: 1466212 - DNA, 15 bp, Homo sapiens
gcatttgtttaaaaa

SEQ ID NO: 1466213 - DNA, 15 bp, Homo sapiens
catttgtttaaaaaa

SEQ ID NO: 1466214 - DNA, 15 bp, Homo sapiens
atttgtttaaaaaac

SEQ ID NO: 1466215 - DNA, 15 bp, Homo sapiens
tttgtttaaaaaaca

SEQ ID NO: 1466216 - DNA, 15 bp, Homo sapiens
ttgtttaaaaaacag

SEQ ID NO: 1466217 - DNA, 15 bp, Homo sapiens
tgtttaaaaaacagt

SEQ ID NO: 1466218 - DNA, 15 bp, Homo sapiens
gtttaaaaaacagtt

SEQ ID NO: 1466219 - DNA, 15 bp, Homo sapiens
tttaaaaaacagttg

SEQ ID NO: 1466220 - DNA, 15 bp, Homo sapiens
ttaaaaaacagttga

SEQ ID NO: 1466221 - DNA, 15 bp, Homo sapiens
taaaaaacagttgat

SEQ ID NO: 1466222 - DNA, 15 bp, Homo sapiens
aaaaaacagttgatt

SEQ ID NO: 1466223 - DNA, 15 bp, Homo sapiens
aaaaacagttgattt

SEQ ID NO: 1466224 - DNA, 15 bp, Homo sapiens
aaaacagttgattta

SEQ ID NO: 1466225 - DNA, 15 bp, Homo sapiens
aaacagttgatttaa

SEQ ID NO: 1466226 - DNA, 15 bp, Homo sapiens
aacagttgatttaaa

SEQ ID NO: 1466227 - DNA, 15 bp, Homo sapiens
acagttgatttaaac

SEQ ID NO: 1466228 - DNA, 15 bp, Homo sapiens
cagttgatttaaacc

SEQ ID NO: 1466229 - DNA, 15 bp, Homo sapiens
agttgatttaaacca

SEQ ID NO: 1466230 - DNA, 15 bp, Homo sapiens
gttgatttaaaccaa

SEQ ID NO: 1466231 - DNA, 15 bp, Homo sapiens
ttgatttaaaccaag

SEQ ID NO: 1466232 - DNA, 15 bp, Homo sapiens
tgatttaaaccaagc

SEQ ID NO: 1466233 - DNA, 15 bp, Homo sapiens
gatttaaaccaagcc

SEQ ID NO: 1466234 - DNA, 15 bp, Homo sapiens
atttaaaccaagcct

SEQ ID NO: 1466235 - DNA, 15 bp, Homo sapiens
tttaaaccaagcctc

SEQ ID NO: 1466236 - DNA, 15 bp, Homo sapiens
ttaaaccaagcctct

SEQ ID NO: 1466237 - DNA, 15 bp, Homo sapiens
taaaccaagcctctt

SEQ ID NO: 1466238 - DNA, 15 bp, Homo sapiens
aaaccaagcctcttt

SEQ ID NO: 1466239 - DNA, 15 bp, Homo sapiens
aaccaagcctctttc

SEQ ID NO: 1466240 - DNA, 15 bp, Homo sapiens
accaagcctctttct

SEQ ID NO: 1466241 - DNA, 15 bp, Homo sapiens
ccaagcctctttcta

SEQ ID NO: 1466242 - DNA, 15 bp, Homo sapiens
caagcctctttctag

SEQ ID NO: 1466243 - DNA, 15 bp, Homo sapiens
aagcctctttctagg

SEQ ID NO: 1466244 - DNA, 15 bp, Homo sapiens
agcctctttctaggt

SEQ ID NO: 1466245 - DNA, 15 bp, Homo sapiens
gcctctttctaggta

SEQ ID NO: 1466246 - DNA, 15 bp, Homo sapiens
cctctttctaggtat

SEQ ID NO: 1466247 - DNA, 15 bp, Homo sapiens
ctctttctaggtata

SEQ ID NO: 1466248 - DNA, 15 bp, Homo sapiens
tctttctaggtatat

SEQ ID NO: 1466249 - DNA, 15 bp, Homo sapiens
ctttctaggtatata

SEQ ID NO: 1466250 - DNA, 15 bp, Homo sapiens
tttctaggtatatag

SEQ ID NO: 1466251 - DNA, 15 bp, Homo sapiens
ttctaggtatatagc

SEQ ID NO: 1466252 - DNA, 15 bp, Homo sapiens
tctaggtatatagca

SEQ ID NO: 1466253 - DNA, 15 bp, Homo sapiens
ctaggtatatagcat

SEQ ID NO: 1466254 - DNA, 15 bp, Homo sapiens
taggtatatagcatt

SEQ ID NO: 1466255 - DNA, 15 bp, Homo sapiens
aggtatatagcatta

SEQ ID NO: 1466256 - DNA, 15 bp, Homo sapiens
ggtatatagcattag

SEQ ID NO: 1466257 - DNA, 15 bp, Homo sapiens
gtatatagcattagt

SEQ ID NO: 1466258 - DNA, 15 bp, Homo sapiens
tatatagcattagtc

SEQ ID NO: 1466259 - DNA, 15 bp, Homo sapiens
atatagcattagtct

SEQ ID NO: 1466260 - DNA, 15 bp, Homo sapiens
tatagcattagtcta

SEQ ID NO: 1466261 - DNA, 15 bp, Homo sapiens
atagcattagtctaa

SEQ ID NO: 1466262 - DNA, 15 bp, Homo sapiens
tagcattagtctaat

SEQ ID NO: 1466263 - DNA, 15 bp, Homo sapiens
agcattagtctaatg

SEQ ID NO: 1466264 - DNA, 15 bp, Homo sapiens
gcattagtctaatgc

SEQ ID NO: 1466265 - DNA, 15 bp, Homo sapiens
cattagtctaatgcc

SEQ ID NO: 1466266 - DNA, 15 bp, Homo sapiens
attagtctaatgcca

SEQ ID NO: 1466267 - DNA, 15 bp, Homo sapiens
ttagtctaatgccag

SEQ ID NO: 1466268 - DNA, 15 bp, Homo sapiens
tagtctaatgccagt

SEQ ID NO: 1466269 - DNA, 15 bp, Homo sapiens
agtctaatgccagta

SEQ ID NO: 1466270 - DNA, 15 bp, Homo sapiens
gtctaatgccagtac

SEQ ID NO: 1466271 - DNA, 15 bp, Homo sapiens
tctaatgccagtact

SEQ ID NO: 1466272 - DNA, 15 bp, Homo sapiens
ctaatgccagtacta

SEQ ID NO: 1466273 - DNA, 15 bp, Homo sapiens
taatgccagtactaa

SEQ ID NO: 1466274 - DNA, 15 bp, Homo sapiens
aatgccagtactaag

SEQ ID NO: 1466275 - DNA, 15 bp, Homo sapiens
atgccagtactaagt

SEQ ID NO: 1466276 - DNA, 15 bp, Homo sapiens
tgccagtactaagtt

SEQ ID NO: 1466277 - DNA, 15 bp, Homo sapiens
gccagtactaagtta

SEQ ID NO: 1466278 - DNA, 15 bp, Homo sapiens
ccagtactaagttac

SEQ ID NO: 1466279 - DNA, 15 bp, Homo sapiens
cagtactaagttacc

SEQ ID NO: 1466280 - DNA, 15 bp, Homo sapiens
agtactaagttaccc

SEQ ID NO: 1466281 - DNA, 15 bp, Homo sapiens
gtactaagttacccc

SEQ ID NO: 1466282 - DNA, 15 bp, Homo sapiens
tactaagttaccccc

SEQ ID NO: 1466283 - DNA, 15 bp, Homo sapiens
actaagttaccccca

SEQ ID NO: 1466284 - DNA, 15 bp, Homo sapiens
ctaagttacccccag

SEQ ID NO: 1466285 - DNA, 15 bp, Homo sapiens
taagttacccccagc

SEQ ID NO: 1466286 - DNA, 15 bp, Homo sapiens
aagttacccccagcc

SEQ ID NO: 1466287 - DNA, 15 bp, Homo sapiens
agttacccccagcca

SEQ ID NO: 1466288 - DNA, 15 bp, Homo sapiens
gttacccccagccaa

SEQ ID NO: 1466289 - DNA, 15 bp, Homo sapiens
ttacccccagccaaa

SEQ ID NO: 1466290 - DNA, 15 bp, Homo sapiens
tacccccagccaaaa

SEQ ID NO: 1466291 - DNA, 15 bp, Homo sapiens
acccccagccaaaaa

SEQ ID NO: 1466292 - DNA, 15 bp, Homo sapiens
cccccagccaaaaaa

SEQ ID NO: 1466293 - DNA, 15 bp, Homo sapiens
ccccagccaaaaaaa

SEQ ID NO: 1466294 - DNA, 15 bp, Homo sapiens
cccagccaaaaaaat

SEQ ID NO: 1466295 - DNA, 15 bp, Homo sapiens
ccagccaaaaaaata

SEQ ID NO: 1466296 - DNA, 15 bp, Homo sapiens
cagccaaaaaaatag

SEQ ID NO: 1466297 - DNA, 15 bp, Homo sapiens
agccaaaaaaataga

SEQ ID NO: 1466298 - DNA, 15 bp, Homo sapiens
gccaaaaaaatagaa

SEQ ID NO: 1466299 - DNA, 15 bp, Homo sapiens
ccaaaaaaatagaaa

SEQ ID NO: 1466300 - DNA, 15 bp, Homo sapiens
caaaaaaatagaaag

SEQ ID NO: 1466301 - DNA, 15 bp, Homo sapiens
aaaaaaatagaaaga

SEQ ID NO: 1466302 - DNA, 15 bp, Homo sapiens
aaaaaatagaaagaa

SEQ ID NO: 1466303 - DNA, 15 bp, Homo sapiens
aaaaatagaaagaaa

SEQ ID NO: 1466304 - DNA, 15 bp, Homo sapiens
aaaatagaaagaaag

SEQ ID NO: 1466305 - DNA, 15 bp, Homo sapiens
aaatagaaagaaaga

SEQ ID NO: 1466306 - DNA, 15 bp, Homo sapiens
aatagaaagaaagaa

SEQ ID NO: 1466307 - DNA, 15 bp, Homo sapiens
atagaaagaaagaaa

SEQ ID NO: 1466308 - DNA, 15 bp, Homo sapiens
tagaaagaaagaaaa

SEQ ID NO: 1466309 - DNA, 15 bp, Homo sapiens
agaaagaaagaaaag

SEQ ID NO: 1466310 - DNA, 15 bp, Homo sapiens
aaagaaagaaaagag

SEQ ID NO: 1466311 - DNA, 15 bp, Homo sapiens
aagaaagaaaagagt

SEQ ID NO: 1466312 - DNA, 15 bp, Homo sapiens
agaaagaaaagagtt

SEQ ID NO: 1466313 - DNA, 15 bp, Homo sapiens
gaaagaaaagagttg

SEQ ID NO: 1466314 - DNA, 15 bp, Homo sapiens
aaagaaaagagttgg

SEQ ID NO: 1466315 - DNA, 15 bp, Homo sapiens
aagaaaagagttggg

SEQ ID NO: 1466316 - DNA, 15 bp, Homo sapiens
agaaaagagttggga

SEQ ID NO: 1466317 - DNA, 15 bp, Homo sapiens
gaaaagagttgggaa

SEQ ID NO: 1466318 - DNA, 15 bp, Homo sapiens
aaaagagttgggaaa

SEQ ID NO: 1466319 - DNA, 15 bp, Homo sapiens
aaagagttgggaaaa

SEQ ID NO: 1466320 - DNA, 15 bp, Homo sapiens
aagagttgggaaaat

SEQ ID NO: 1466321 - DNA, 15 bp, Homo sapiens
agagttgggaaaatt

SEQ ID NO: 1466322 - DNA, 15 bp, Homo sapiens
gagttgggaaaattt

SEQ ID NO: 1466323 - DNA, 15 bp, Homo sapiens
agttgggaaaatttt

SEQ ID NO: 1466324 - DNA, 15 bp, Homo sapiens
gttgggaaaattttt

SEQ ID NO: 1466325 - DNA, 15 bp, Homo sapiens
ttgggaaaattttta

SEQ ID NO: 1466326 - DNA, 15 bp, Homo sapiens
tgggaaaatttttat

SEQ ID NO: 1466327 - DNA, 15 bp, Homo sapiens
gggaaaatttttata

SEQ ID NO: 1466328 - DNA, 15 bp, Homo sapiens
ggaaaatttttatat

SEQ ID NO: 1466329 - DNA, 15 bp, Homo sapiens
gaaaatttttatatt

SEQ ID NO: 1466330 - DNA, 15 bp, Homo sapiens
aaaatttttatattg

SEQ ID NO: 1466331 - DNA, 15 bp, Homo sapiens
aaatttttatattga

SEQ ID NO: 1466332 - DNA, 15 bp, Homo sapiens
aatttttatattgat

SEQ ID NO: 1466333 - DNA, 15 bp, Homo sapiens
atttttatattgata

SEQ ID NO: 1466334 - DNA, 15 bp, Homo sapiens
tttttatattgatag

SEQ ID NO: 1466335 - DNA, 15 bp, Homo sapiens
ttttatattgatagt

SEQ ID NO: 1466336 - DNA, 15 bp, Homo sapiens
tttatattgatagtt

SEQ ID NO: 1466337 - DNA, 15 bp, Homo sapiens
ttatattgatagttt

SEQ ID NO: 1466338 - DNA, 15 bp, Homo sapiens
tatattgatagtttt

SEQ ID NO: 1466339 - DNA, 15 bp, Homo sapiens
atattgatagttttt

SEQ ID NO: 1466340 - DNA, 15 bp, Homo sapiens
tattgatagtttttt

SEQ ID NO: 1466341 - DNA, 15 bp, Homo sapiens
attgatagttttttt

SEQ ID NO: 1466342 - DNA, 15 bp, Homo sapiens
ttgatagtttttttg

SEQ ID NO: 1466343 - DNA, 15 bp, Homo sapiens
tgatagtttttttgt

SEQ ID NO: 1466344 - DNA, 15 bp, Homo sapiens
gatagtttttttgtt

SEQ ID NO: 1466345 - DNA, 15 bp, Homo sapiens
atagtttttttgttc

SEQ ID NO: 1466346 - DNA, 15 bp, Homo sapiens
tagtttttttgttct

SEQ ID NO: 1466347 - DNA, 15 bp, Homo sapiens
agtttttttgttctg

SEQ ID NO: 1466348 - DNA, 15 bp, Homo sapiens
gtttttttgttctgt

SEQ ID NO: 1466349 - DNA, 15 bp, Homo sapiens
tttttttgttctgta

SEQ ID NO: 1466350 - DNA, 15 bp, Homo sapiens
ttttttgttctgtac

SEQ ID NO: 1466351 - DNA, 15 bp, Homo sapiens
tttttgttctgtact

SEQ ID NO: 1466352 - DNA, 15 bp, Homo sapiens
ttttgttctgtactt

SEQ ID NO: 1466353 - DNA, 15 bp, Homo sapiens
tttgttctgtactta

SEQ ID NO: 1466354 - DNA, 15 bp, Homo sapiens
ttgttctgtacttaa

SEQ ID NO: 1466355 - DNA, 15 bp, Homo sapiens
tgttctgtacttaaa

SEQ ID NO: 1466356 - DNA, 15 bp, Homo sapiens
gttctgtacttaaaa

SEQ ID NO: 1466357 - DNA, 15 bp, Homo sapiens
ttctgtacttaaaac

SEQ ID NO: 1466358 - DNA, 15 bp, Homo sapiens
tctgtacttaaaaca

SEQ ID NO: 1466359 - DNA, 15 bp, Homo sapiens
ctgtacttaaaacat

SEQ ID NO: 1466360 - DNA, 15 bp, Homo sapiens
tgtacttaaaacatt

SEQ ID NO: 1466361 - DNA, 15 bp, Homo sapiens
gtacttaaaacattc

SEQ ID NO: 1466362 - DNA, 15 bp, Homo sapiens
tacttaaaacattcc

SEQ ID NO: 1466363 - DNA, 15 bp, Homo sapiens
acttaaaacattcct

SEQ ID NO: 1466364 - DNA, 15 bp, Homo sapiens
cttaaaacattcctt

SEQ ID NO: 1466365 - DNA, 15 bp, Homo sapiens
ttaaaacattccttt

SEQ ID NO: 1466366 - DNA, 15 bp, Homo sapiens
taaaacattcctttt

SEQ ID NO: 1466367 - DNA, 15 bp, Homo sapiens
aaaacattcctttta

SEQ ID NO: 1466368 - DNA, 15 bp, Homo sapiens
aaacattccttttaa

SEQ ID NO: 1466369 - DNA, 15 bp, Homo sapiens
aacattccttttaag

SEQ ID NO: 1466370 - DNA, 15 bp, Homo sapiens
acattccttttaagt

SEQ ID NO: 1466371 - DNA, 15 bp, Homo sapiens
cattccttttaagtc

SEQ ID NO: 1466372 - DNA, 15 bp, Homo sapiens
attccttttaagtct

SEQ ID NO: 1466373 - DNA, 15 bp, Homo sapiens
ttccttttaagtcta

SEQ ID NO: 1466374 - DNA, 15 bp, Homo sapiens
tccttttaagtctat

SEQ ID NO: 1466375 - DNA, 15 bp, Homo sapiens
ccttttaagtctata

SEQ ID NO: 1466376 - DNA, 15 bp, Homo sapiens
cttttaagtctatat

SEQ ID NO: 1466377 - DNA, 15 bp, Homo sapiens
ttttaagtctatatt

SEQ ID NO: 1466378 - DNA, 15 bp, Homo sapiens
tttaagtctatattt

SEQ ID NO: 1466379 - DNA, 15 bp, Homo sapiens
ttaagtctatatttt

SEQ ID NO: 1466380 - DNA, 15 bp, Homo sapiens
taagtctatattttg

SEQ ID NO: 1466381 - DNA, 15 bp, Homo sapiens
aagtctatattttgc

SEQ ID NO: 1466382 - DNA, 15 bp, Homo sapiens
agtctatattttgct

SEQ ID NO: 1466383 - DNA, 15 bp, Homo sapiens
gtctatattttgctt

SEQ ID NO: 1466384 - DNA, 15 bp, Homo sapiens
tctatattttgcttg

SEQ ID NO: 1466385 - DNA, 15 bp, Homo sapiens
ctatattttgcttgt

SEQ ID NO: 1466386 - DNA, 15 bp, Homo sapiens
tatattttgcttgtt

SEQ ID NO: 1466387 - DNA, 15 bp, Homo sapiens
atattttgcttgttg

SEQ ID NO: 1466388 - DNA, 15 bp, Homo sapiens
tattttgcttgttgt

SEQ ID NO: 1466389 - DNA, 15 bp, Homo sapiens
attttgcttgttgtt

SEQ ID NO: 1466390 - DNA, 15 bp, Homo sapiens
ttttgcttgttgttt

SEQ ID NO: 1466391 - DNA, 15 bp, Homo sapiens
tttgcttgttgtttt

SEQ ID NO: 1466392 - DNA, 15 bp, Homo sapiens
ttgcttgttgttttg

SEQ ID NO: 1466393 - DNA, 15 bp, Homo sapiens
tgcttgttgttttgt

SEQ ID NO: 1466394 - DNA, 15 bp, Homo sapiens
gcttgttgttttgta

SEQ ID NO: 1466395 - DNA, 15 bp, Homo sapiens
cttgttgttttgtaa

SEQ ID NO: 1466396 - DNA, 15 bp, Homo sapiens
ttgttgttttgtaac

SEQ ID NO: 1466397 - DNA, 15 bp, Homo sapiens
tgttgttttgtaacg

SEQ ID NO: 1466398 - DNA, 15 bp, Homo sapiens
gttgttttgtaacga

SEQ ID NO: 1466399 - DNA, 15 bp, Homo sapiens
ttgttttgtaacgaa

SEQ ID NO: 1466400 - DNA, 15 bp, Homo sapiens
tgttttgtaacgaat

SEQ ID NO: 1466401 - DNA, 15 bp, Homo sapiens
gttttgtaacgaatt

SEQ ID NO: 1466402 - DNA, 15 bp, Homo sapiens
ttttgtaacgaatta

SEQ ID NO: 1466403 - DNA, 15 bp, Homo sapiens
tttgtaacgaattaa

SEQ ID NO: 1466404 - DNA, 15 bp, Homo sapiens
ttgtaacgaattaag

SEQ ID NO: 1466405 - DNA, 15 bp, Homo sapiens
tgtaacgaattaagt

SEQ ID NO: 1466406 - DNA, 15 bp, Homo sapiens
gtaacgaattaagta

SEQ ID NO: 1466407 - DNA, 15 bp, Homo sapiens
taacgaattaagtag

SEQ ID NO: 1466408 - DNA, 15 bp, Homo sapiens
aacgaattaagtagg

SEQ ID NO: 1466409 - DNA, 15 bp, Homo sapiens
acgaattaagtaggc

SEQ ID NO: 1466410 - DNA, 15 bp, Homo sapiens
cgaattaagtaggct

SEQ ID NO: 1466411 - DNA, 15 bp, Homo sapiens
gaattaagtaggcta

SEQ ID NO: 1466412 - DNA, 15 bp, Homo sapiens
aattaagtaggctaa

SEQ ID NO: 1466413 - DNA, 15 bp, Homo sapiens
attaagtaggctaag

SEQ ID NO: 1466414 - DNA, 15 bp, Homo sapiens
ttaagtaggctaagg

SEQ ID NO: 1466415 - DNA, 15 bp, Homo sapiens
taagtaggctaaggg

SEQ ID NO: 1466416 - DNA, 15 bp, Homo sapiens
aagtaggctaaggga

SEQ ID NO: 1466417 - DNA, 15 bp, Homo sapiens
agtaggctaagggac

SEQ ID NO: 1466418 - DNA, 15 bp, Homo sapiens
gtaggctaagggaca

SEQ ID NO: 1466419 - DNA, 15 bp, Homo sapiens
taggctaagggacat

SEQ ID NO: 1466420 - DNA, 15 bp, Homo sapiens
aggctaagggacatt

SEQ ID NO: 1466421 - DNA, 15 bp, Homo sapiens
ggctaagggacattg

SEQ ID NO: 1466422 - DNA, 15 bp, Homo sapiens
gctaagggacattgt

SEQ ID NO: 1466423 - DNA, 15 bp, Homo sapiens
ctaagggacattgtc

SEQ ID NO: 1466424 - DNA, 15 bp, Homo sapiens
taagggacattgtct

SEQ ID NO: 1466425 - DNA, 15 bp, Homo sapiens
aagggacattgtctg

SEQ ID NO: 1466426 - DNA, 15 bp, Homo sapiens
agggacattgtctgt

SEQ ID NO: 1466427 - DNA, 15 bp, Homo sapiens
gggacattgtctgtt

SEQ ID NO: 1466428 - DNA, 15 bp, Homo sapiens
ggacattgtctgtta

SEQ ID NO: 1466429 - DNA, 15 bp, Homo sapiens
gacattgtctgttac

SEQ ID NO: 1466430 - DNA, 15 bp, Homo sapiens
acattgtctgttacg

SEQ ID NO: 1466431 - DNA, 15 bp, Homo sapiens
cattgtctgttacgt

SEQ ID NO: 1466432 - DNA, 15 bp, Homo sapiens
attgtctgttacgta

SEQ ID NO: 1466433 - DNA, 15 bp, Homo sapiens
ttgtctgttacgtac

SEQ ID NO: 1466434 - DNA, 15 bp, Homo sapiens
tgtctgttacgtaca

SEQ ID NO: 1466435 - DNA, 15 bp, Homo sapiens
gtctgttacgtacac

SEQ ID NO: 1466436 - DNA, 15 bp, Homo sapiens
tctgttacgtacaca

SEQ ID NO: 1466437 - DNA, 15 bp, Homo sapiens
ctgttacgtacacac

SEQ ID NO: 1466438 - DNA, 15 bp, Homo sapiens
tgttacgtacacaca

SEQ ID NO: 1466439 - DNA, 15 bp, Homo sapiens
gttacgtacacacaa

SEQ ID NO: 1466440 - DNA, 15 bp, Homo sapiens
ttacgtacacacaaa

SEQ ID NO: 1466441 - DNA, 15 bp, Homo sapiens
tacgtacacacaaac

SEQ ID NO: 1466442 - DNA, 15 bp, Homo sapiens
acgtacacacaaaca

SEQ ID NO: 1466443 - DNA, 15 bp, Homo sapiens
cgtacacacaaacac

SEQ ID NO: 1466444 - DNA, 15 bp, Homo sapiens
gtacacacaaacaca

SEQ ID NO: 1466445 - DNA, 15 bp, Homo sapiens
acacaaacacacacc

SEQ ID NO: 1466446 - DNA, 15 bp, Homo sapiens
cacaaacacacacct

SEQ ID NO: 1466447 - DNA, 15 bp, Homo sapiens
acaaacacacaccta

SEQ ID NO: 1466448 - DNA, 15 bp, Homo sapiens
caaacacacacctac

SEQ ID NO: 1466449 - DNA, 15 bp, Homo sapiens
aaacacacacctaca

SEQ ID NO: 1466450 - DNA, 15 bp, Homo sapiens
aacacacacctacac

SEQ ID NO: 1466451 - DNA, 15 bp, Homo sapiens
acacacacctacaca

SEQ ID NO: 1466452 - DNA, 15 bp, Homo sapiens
cacacacctacacac

SEQ ID NO: 1466453 - DNA, 15 bp, Homo sapiens
acacacctacacaca

SEQ ID NO: 1466454 - DNA, 15 bp, Homo sapiens
cacacctacacacac

SEQ ID NO: 1466455 - DNA, 15 bp, Homo sapiens
acacctacacacaca

SEQ ID NO: 1466456 - DNA, 15 bp, Homo sapiens
cacctacacacacaa

SEQ ID NO: 1466457 - DNA, 15 bp, Homo sapiens
acctacacacacaat

SEQ ID NO: 1466458 - DNA, 15 bp, Homo sapiens
cctacacacacaatc

SEQ ID NO: 1466459 - DNA, 15 bp, Homo sapiens
ctacacacacaatct

SEQ ID NO: 1466460 - DNA, 15 bp, Homo sapiens
tacacacacaatctc

SEQ ID NO: 1466461 - DNA, 15 bp, Homo sapiens
cacacacaatctcat

SEQ ID NO: 1466462 - DNA, 15 bp, Homo sapiens
acacacaatctcata

SEQ ID NO: 1466463 - DNA, 15 bp, Homo sapiens
cacacaatctcataa

SEQ ID NO: 1466464 - DNA, 15 bp, Homo sapiens
acacaatctcataaa

SEQ ID NO: 1466465 - DNA, 15 bp, Homo sapiens
cacaatctcataaaa

SEQ ID NO: 1466466 - DNA, 15 bp, Homo sapiens
acaatctcataaaac

SEQ ID NO: 1466467 - DNA, 15 bp, Homo sapiens
caatctcataaaacc

SEQ ID NO: 1466468 - DNA, 15 bp, Homo sapiens
aatctcataaaacct

SEQ ID NO: 1466469 - DNA, 15 bp, Homo sapiens
atctcataaaacctt

SEQ ID NO: 1466470 - DNA, 15 bp, Homo sapiens
tctcataaaaccttc

SEQ ID NO: 1466471 - DNA, 15 bp, Homo sapiens
ctcataaaaccttca

SEQ ID NO: 1466472 - DNA, 15 bp, Homo sapiens
tcataaaaccttcaa

SEQ ID NO: 1466473 - DNA, 15 bp, Homo sapiens
cataaaaccttcaac

SEQ ID NO: 1466474 - DNA, 15 bp, Homo sapiens
ataaaaccttcaacc

SEQ ID NO: 1466475 - DNA, 15 bp, Homo sapiens
taaaaccttcaacca

SEQ ID NO: 1466476 - DNA, 15 bp, Homo sapiens
aaaaccttcaaccag

SEQ ID NO: 1466477 - DNA, 15 bp, Homo sapiens
aaaccttcaaccagc

SEQ ID NO: 1466478 - DNA, 15 bp, Homo sapiens
aaccttcaaccagcc

SEQ ID NO: 1466479 - DNA, 15 bp, Homo sapiens
accttcaaccagcca

SEQ ID NO: 1466480 - DNA, 15 bp, Homo sapiens
ccttcaaccagccac

SEQ ID NO: 1466481 - DNA, 15 bp, Homo sapiens
cttcaaccagccaca

SEQ ID NO: 1466482 - DNA, 15 bp, Homo sapiens
ttcaaccagccacaa

SEQ ID NO: 1466483 - DNA, 15 bp, Homo sapiens
tcaaccagccacaat

SEQ ID NO: 1466484 - DNA, 15 bp, Homo sapiens
caaccagccacaata

SEQ ID NO: 1466485 - DNA, 15 bp, Homo sapiens
aaccagccacaatag

SEQ ID NO: 1466486 - DNA, 15 bp, Homo sapiens
accagccacaatagc

SEQ ID NO: 1466487 - DNA, 15 bp, Homo sapiens
ccagccacaatagct

SEQ ID NO: 1466488 - DNA, 15 bp, Homo sapiens
cagccacaatagctt

SEQ ID NO: 1466489 - DNA, 15 bp, Homo sapiens
agccacaatagcttt

SEQ ID NO: 1466490 - DNA, 15 bp, Homo sapiens
gccacaatagctttt

SEQ ID NO: 1466491 - DNA, 15 bp, Homo sapiens
ccacaatagcttttt

SEQ ID NO: 1466492 - DNA, 15 bp, Homo sapiens
cacaatagctttttt

SEQ ID NO: 1466493 - DNA, 15 bp, Homo sapiens
acaatagcttttttc

SEQ ID NO: 1466494 - DNA, 15 bp, Homo sapiens
caatagcttttttcg

SEQ ID NO: 1466495 - DNA, 15 bp, Homo sapiens
aatagcttttttcgt

SEQ ID NO: 1466496 - DNA, 15 bp, Homo sapiens
atagcttttttcgta

SEQ ID NO: 1466497 - DNA, 15 bp, Homo sapiens
tagcttttttcgtaa

SEQ ID NO: 1466498 - DNA, 15 bp, Homo sapiens
agcttttttcgtaat

SEQ ID NO: 1466499 - DNA, 15 bp, Homo sapiens
gcttttttcgtaatc

SEQ ID NO: 1466500 - DNA, 15 bp, Homo sapiens
cttttttcgtaatct

SEQ ID NO: 1466501 - DNA, 15 bp, Homo sapiens
ttttttcgtaatctc

SEQ ID NO: 1466502 - DNA, 15 bp, Homo sapiens
tttttcgtaatctca

SEQ ID NO: 1466503 - DNA, 15 bp, Homo sapiens
ttttcgtaatctcag

SEQ ID NO: 1466504 - DNA, 15 bp, Homo sapiens
tttcgtaatctcaga

SEQ ID NO: 1466505 - DNA, 15 bp, Homo sapiens
ttcgtaatctcagag

SEQ ID NO: 1466506 - DNA, 15 bp, Homo sapiens
tcgtaatctcagagt

SEQ ID NO: 1466507 - DNA, 15 bp, Homo sapiens
cgtaatctcagagtt

SEQ ID NO: 1466508 - DNA, 15 bp, Homo sapiens
gtaatctcagagtta

SEQ ID NO: 1466509 - DNA, 15 bp, Homo sapiens
taatctcagagttat

SEQ ID NO: 1466510 - DNA, 15 bp, Homo sapiens
aatctcagagttata

SEQ ID NO: 1466511 - DNA, 15 bp, Homo sapiens
atctcagagttatac

SEQ ID NO: 1466512 - DNA, 15 bp, Homo sapiens
tctcagagttataca

SEQ ID NO: 1466513 - DNA, 15 bp, Homo sapiens
ctcagagttatacag

SEQ ID NO: 1466514 - DNA, 15 bp, Homo sapiens
tcagagttatacagg

SEQ ID NO: 1466515 - DNA, 15 bp, Homo sapiens
cagagttatacaggt

SEQ ID NO: 1466516 - DNA, 15 bp, Homo sapiens
agagttatacaggtg

SEQ ID NO: 1466517 - DNA, 15 bp, Homo sapiens
gagttatacaggtgt

SEQ ID NO: 1466518 - DNA, 15 bp, Homo sapiens
agttatacaggtgtc

SEQ ID NO: 1466519 - DNA, 15 bp, Homo sapiens
gttatacaggtgtct

SEQ ID NO: 1466520 - DNA, 15 bp, Homo sapiens
ttatacaggtgtctt

SEQ ID NO: 1466521 - DNA, 15 bp, Homo sapiens
tatacaggtgtcttt

SEQ ID NO: 1466522 - DNA, 15 bp, Homo sapiens
atacaggtgtctttt

SEQ ID NO: 1466523 - DNA, 15 bp, Homo sapiens
tacaggtgtcttttc

SEQ ID NO: 1466524 - DNA, 15 bp, Homo sapiens
acaggtgtcttttcc

SEQ ID NO: 1466525 - DNA, 15 bp, Homo sapiens
caggtgtcttttcct

SEQ ID NO: 1466526 - DNA, 15 bp, Homo sapiens
aggtgtcttttcctc

SEQ ID NO: 1466527 - DNA, 15 bp, Homo sapiens
ggtgtcttttcctct

SEQ ID NO: 1466528 - DNA, 15 bp, Homo sapiens
gtgtcttttcctctg

SEQ ID NO: 1466529 - DNA, 15 bp, Homo sapiens
tgtcttttcctctgc

SEQ ID NO: 1466530 - DNA, 15 bp, Homo sapiens
gtcttttcctctgca

SEQ ID NO: 1466531 - DNA, 15 bp, Homo sapiens
tcttttcctctgcag

SEQ ID NO: 1466532 - DNA, 15 bp, Homo sapiens
cttttcctctgcaga

SEQ ID NO: 1466533 - DNA, 15 bp, Homo sapiens
ttttcctctgcagaa

SEQ ID NO: 1466534 - DNA, 15 bp, Homo sapiens
tttcctctgcagaag

SEQ ID NO: 1466535 - DNA, 15 bp, Homo sapiens
ttcctctgcagaaga

SEQ ID NO: 1466536 - DNA, 15 bp, Homo sapiens
tcctctgcagaagac

SEQ ID NO: 1466537 - DNA, 15 bp, Homo sapiens
cctctgcagaagact

SEQ ID NO: 1466538 - DNA, 15 bp, Homo sapiens
ctctgcagaagacta

SEQ ID NO: 1466539 - DNA, 15 bp, Homo sapiens
tctgcagaagactac

SEQ ID NO: 1466540 - DNA, 15 bp, Homo sapiens
ctgcagaagactaca

SEQ ID NO: 1466541 - DNA, 15 bp, Homo sapiens
tgcagaagactacac

SEQ ID NO: 1466542 - DNA, 15 bp, Homo sapiens
gcagaagactacacc

SEQ ID NO: 1466543 - DNA, 15 bp, Homo sapiens
cagaagactacaccc

SEQ ID NO: 1466544 - DNA, 15 bp, Homo sapiens
agaagactacaccct

SEQ ID NO: 1466545 - DNA, 15 bp, Homo sapiens
gaagactacaccctg

SEQ ID NO: 1466546 - DNA, 15 bp, Homo sapiens
aagactacaccctgt

SEQ ID NO: 1466547 - DNA, 15 bp, Homo sapiens
agactacaccctgtt

SEQ ID NO: 1466548 - DNA, 15 bp, Homo sapiens
gactacaccctgttt

SEQ ID NO: 1466549 - DNA, 15 bp, Homo sapiens
actacaccctgtttc

SEQ ID NO: 1466550 - DNA, 15 bp, Homo sapiens
ctacaccctgtttca

SEQ ID NO: 1466551 - DNA, 15 bp, Homo sapiens
tacaccctgtttcaa

SEQ ID NO: 1466552 - DNA, 15 bp, Homo sapiens
acaccctgtttcaat

SEQ ID NO: 1466553 - DNA, 15 bp, Homo sapiens
caccctgtttcaatt

SEQ ID NO: 1466554 - DNA, 15 bp, Homo sapiens
accctgtttcaattt

SEQ ID NO: 1466555 - DNA, 15 bp, Homo sapiens
ccctgtttcaatttc

SEQ ID NO: 1466556 - DNA, 15 bp, Homo sapiens
cctgtttcaatttct

SEQ ID NO: 1466557 - DNA, 15 bp, Homo sapiens
ctgtttcaatttctg

SEQ ID NO: 1466558 - DNA, 15 bp, Homo sapiens
tgtttcaatttctgt

SEQ ID NO: 1466559 - DNA, 15 bp, Homo sapiens
gtttcaatttctgtt

SEQ ID NO: 1466560 - DNA, 15 bp, Homo sapiens
tttcaatttctgttg

SEQ ID NO: 1466561 - DNA, 15 bp, Homo sapiens
ttcaatttctgttgc

SEQ ID NO: 1466562 - DNA, 15 bp, Homo sapiens
tcaatttctgttgct

SEQ ID NO: 1466563 - DNA, 15 bp, Homo sapiens
caatttctgttgctt

SEQ ID NO: 1466564 - DNA, 15 bp, Homo sapiens
aatttctgttgcttt

SEQ ID NO: 1466565 - DNA, 15 bp, Homo sapiens
atttctgttgcttta

SEQ ID NO: 1466566 - DNA, 15 bp, Homo sapiens
tttctgttgctttaa

SEQ ID NO: 1466567 - DNA, 15 bp, Homo sapiens
ttctgttgctttaat

SEQ ID NO: 1466568 - DNA, 15 bp, Homo sapiens
tctgttgctttaatg

SEQ ID NO: 1466569 - DNA, 15 bp, Homo sapiens
ctgttgctttaatga

SEQ ID NO: 1466570 - DNA, 15 bp, Homo sapiens
tgttgctttaatgat

SEQ ID NO: 1466571 - DNA, 15 bp, Homo sapiens
gttgctttaatgatt

SEQ ID NO: 1466572 - DNA, 15 bp, Homo sapiens
ttgctttaatgattt

SEQ ID NO: 1466573 - DNA, 15 bp, Homo sapiens
tgctttaatgatttc

SEQ ID NO: 1466574 - DNA, 15 bp, Homo sapiens
gctttaatgatttca

SEQ ID NO: 1466575 - DNA, 15 bp, Homo sapiens
ctttaatgatttcat

SEQ ID NO: 1466576 - DNA, 15 bp, Homo sapiens
tttaatgatttcata

SEQ ID NO: 1466577 - DNA, 15 bp, Homo sapiens
ttaatgatttcatat

SEQ ID NO: 1466578 - DNA, 15 bp, Homo sapiens
taatgatttcatatc

SEQ ID NO: 1466579 - DNA, 15 bp, Homo sapiens
aatgatttcatatct

SEQ ID NO: 1466580 - DNA, 15 bp, Homo sapiens
atgatttcatatcta

SEQ ID NO: 1466581 - DNA, 15 bp, Homo sapiens
tgatttcatatctat

SEQ ID NO: 1466582 - DNA, 15 bp, Homo sapiens
gatttcatatctata

SEQ ID NO: 1466583 - DNA, 15 bp, Homo sapiens
atttcatatctatag

SEQ ID NO: 1466584 - DNA, 15 bp, Homo sapiens
tttcatatctatagc

SEQ ID NO: 1466585 - DNA, 15 bp, Homo sapiens
ttcatatctatagcg

SEQ ID NO: 1466586 - DNA, 15 bp, Homo sapiens
tcatatctatagcgt

SEQ ID NO: 1466587 - DNA, 15 bp, Homo sapiens
catatctatagcgtt

SEQ ID NO: 1466588 - DNA, 15 bp, Homo sapiens
atatctatagcgttc

SEQ ID NO: 1466589 - DNA, 15 bp, Homo sapiens
tatctatagcgttct

SEQ ID NO: 1466590 - DNA, 15 bp, Homo sapiens
atctatagcgttctt

SEQ ID NO: 1466591 - DNA, 15 bp, Homo sapiens
tctatagcgttcttc

SEQ ID NO: 1466592 - DNA, 15 bp, Homo sapiens
ctatagcgttcttcc

SEQ ID NO: 1466593 - DNA, 15 bp, Homo sapiens
tatagcgttcttccc

SEQ ID NO: 1466594 - DNA, 15 bp, Homo sapiens
atagcgttcttccca

SEQ ID NO: 1466595 - DNA, 15 bp, Homo sapiens
tagcgttcttcccat

SEQ ID NO: 1466596 - DNA, 15 bp, Homo sapiens
agcgttcttcccatt

SEQ ID NO: 1466597 - DNA, 15 bp, Homo sapiens
gcgttcttcccatta

SEQ ID NO: 1466598 - DNA, 15 bp, Homo sapiens
cgttcttcccattat

SEQ ID NO: 1466599 - DNA, 15 bp, Homo sapiens
gttcttcccattatg

SEQ ID NO: 1466600 - DNA, 15 bp, Homo sapiens
ttcttcccattatgt

SEQ ID NO: 1466601 - DNA, 15 bp, Homo sapiens
tcttcccattatgta

SEQ ID NO: 1466602 - DNA, 15 bp, Homo sapiens
cttcccattatgtat

SEQ ID NO: 1466603 - DNA, 15 bp, Homo sapiens
ttcccattatgtatt

SEQ ID NO: 1466604 - DNA, 15 bp, Homo sapiens
tcccattatgtatta

SEQ ID NO: 1466605 - DNA, 15 bp, Homo sapiens
cccattatgtattaa

SEQ ID NO: 1466606 - DNA, 15 bp, Homo sapiens
ccattatgtattaat

SEQ ID NO: 1466607 - DNA, 15 bp, Homo sapiens
cattatgtattaatt

SEQ ID NO: 1466608 - DNA, 15 bp, Homo sapiens
attatgtattaattg

SEQ ID NO: 1466609 - DNA, 15 bp, Homo sapiens
ttatgtattaattga

SEQ ID NO: 1466610 - DNA, 15 bp, Homo sapiens
tatgtattaattgat

SEQ ID NO: 1466611 - DNA, 15 bp, Homo sapiens
atgtattaattgatc

SEQ ID NO: 1466612 - DNA, 15 bp, Homo sapiens
tgtattaattgatcc

SEQ ID NO: 1466613 - DNA, 15 bp, Homo sapiens
gtattaattgatcca

SEQ ID NO: 1466614 - DNA, 15 bp, Homo sapiens
attaattgatccatg

SEQ ID NO: 1466615 - DNA, 15 bp, Homo sapiens
ttaattgatccatgg

SEQ ID NO: 1466616 - DNA, 15 bp, Homo sapiens
taattgatccatggg

SEQ ID NO: 1466617 - DNA, 15 bp, Homo sapiens
aattgatccatggga

SEQ ID NO: 1466618 - DNA, 15 bp, Homo sapiens
attgatccatgggat

SEQ ID NO: 1466619 - DNA, 15 bp, Homo sapiens
ttgatccatgggatg

SEQ ID NO: 1466620 - DNA, 15 bp, Homo sapiens
tgatccatgggatga

SEQ ID NO: 1466621 - DNA, 15 bp, Homo sapiens
gatccatgggatgat

SEQ ID NO: 1466622 - DNA, 15 bp, Homo sapiens
atccatgggatgata

SEQ ID NO: 1466623 - DNA, 15 bp, Homo sapiens
tccatgggatgatat

SEQ ID NO: 1466624 - DNA, 15 bp, Homo sapiens
ccatgggatgatatc

SEQ ID NO: 1466625 - DNA, 15 bp, Homo sapiens
catgggatgatatca

SEQ ID NO: 1466626 - DNA, 15 bp, Homo sapiens
atgggatgatatcat

SEQ ID NO: 1466627 - DNA, 15 bp, Homo sapiens
tgggatgatatcatt

SEQ ID NO: 1466628 - DNA, 15 bp, Homo sapiens
gggatgatatcatta

SEQ ID NO: 1466629 - DNA, 15 bp, Homo sapiens
ggatgatatcattaa

SEQ ID NO: 1466630 - DNA, 15 bp, Homo sapiens
gatgatatcattaag

SEQ ID NO: 1466631 - DNA, 15 bp, Homo sapiens
atgatatcattaagt

SEQ ID NO: 1466632 - DNA, 15 bp, Homo sapiens
tgatatcattaagtg

SEQ ID NO: 1466633 - DNA, 15 bp, Homo sapiens
gatatcattaagtga

SEQ ID NO: 1466634 - DNA, 15 bp, Homo sapiens
atatcattaagtgat

SEQ ID NO: 1466635 - DNA, 15 bp, Homo sapiens
tatcattaagtgatg

SEQ ID NO: 1466636 - DNA, 15 bp, Homo sapiens
atcattaagtgatgt

SEQ ID NO: 1466637 - DNA, 15 bp, Homo sapiens
tcattaagtgatgtc

SEQ ID NO: 1466638 - DNA, 15 bp, Homo sapiens
cattaagtgatgtca

SEQ ID NO: 1466639 - DNA, 15 bp, Homo sapiens
attaagtgatgtcac

SEQ ID NO: 1466640 - DNA, 15 bp, Homo sapiens
ttaagtgatgtcact

SEQ ID NO: 1466641 - DNA, 15 bp, Homo sapiens
taagtgatgtcactc

SEQ ID NO: 1466642 - DNA, 15 bp, Homo sapiens
aagtgatgtcactct

SEQ ID NO: 1466643 - DNA, 15 bp, Homo sapiens
agtgatgtcactctt

SEQ ID NO: 1466644 - DNA, 15 bp, Homo sapiens
gtgatgtcactcttt

SEQ ID NO: 1466645 - DNA, 15 bp, Homo sapiens
tgatgtcactctttg

SEQ ID NO: 1466646 - DNA, 15 bp, Homo sapiens
gatgtcactctttgt

SEQ ID NO: 1466647 - DNA, 15 bp, Homo sapiens
atgtcactctttgtg

SEQ ID NO: 1466648 - DNA, 15 bp, Homo sapiens
tgtcactctttgtgt

SEQ ID NO: 1466649 - DNA, 15 bp, Homo sapiens
gtcactctttgtgta

SEQ ID NO: 1466650 - DNA, 15 bp, Homo sapiens
tcactctttgtgtat

SEQ ID NO: 1466651 - DNA, 15 bp, Homo sapiens
cactctttgtgtatt

SEQ ID NO: 1466652 - DNA, 15 bp, Homo sapiens
actctttgtgtatta

SEQ ID NO: 1466653 - DNA, 15 bp, Homo sapiens
ctctttgtgtattac

SEQ ID NO: 1466654 - DNA, 15 bp, Homo sapiens
tctttgtgtattaca

SEQ ID NO: 1466655 - DNA, 15 bp, Homo sapiens
ctttgtgtattacag

SEQ ID NO: 1466656 - DNA, 15 bp, Homo sapiens
tttgtgtattacagt

SEQ ID NO: 1466657 - DNA, 15 bp, Homo sapiens
ttgtgtattacagtt

SEQ ID NO: 1466658 - DNA, 15 bp, Homo sapiens
tgtgtattacagttc

SEQ ID NO: 1466659 - DNA, 15 bp, Homo sapiens
gtgtattacagttct

SEQ ID NO: 1466660 - DNA, 15 bp, Homo sapiens
tgtattacagttctg

SEQ ID NO: 1466661 - DNA, 15 bp, Homo sapiens
gtattacagttctgc

SEQ ID NO: 1466662 - DNA, 15 bp, Homo sapiens
tattacagttctgcc

SEQ ID NO: 1466663 - DNA, 15 bp, Homo sapiens
attacagttctgcca

SEQ ID NO: 1466664 - DNA, 15 bp, Homo sapiens
ttacagttctgccac

SEQ ID NO: 1466665 - DNA, 15 bp, Homo sapiens
tacagttctgccact

SEQ ID NO: 1466666 - DNA, 15 bp, Homo sapiens
acagttctgccactg

SEQ ID NO: 1466667 - DNA, 15 bp, Homo sapiens
cagttctgccactga

SEQ ID NO: 1466668 - DNA, 15 bp, Homo sapiens
agttctgccactgac

SEQ ID NO: 1466669 - DNA, 15 bp, Homo sapiens
gttctgccactgacc

SEQ ID NO: 1466670 - DNA, 15 bp, Homo sapiens
ttctgccactgacct

SEQ ID NO: 1466671 - DNA, 15 bp, Homo sapiens
tctgccactgacctg

SEQ ID NO: 1466672 - DNA, 15 bp, Homo sapiens
ctgccactgacctga

SEQ ID NO: 1466673 - DNA, 15 bp, Homo sapiens
tgccactgacctgat

SEQ ID NO: 1466674 - DNA, 15 bp, Homo sapiens
gccactgacctgata

SEQ ID NO: 1466675 - DNA, 15 bp, Homo sapiens
ccactgacctgatag

SEQ ID NO: 1466676 - DNA, 15 bp, Homo sapiens
cactgacctgataga

SEQ ID NO: 1466677 - DNA, 15 bp, Homo sapiens
actgacctgatagac

SEQ ID NO: 1466678 - DNA, 15 bp, Homo sapiens
ctgacctgatagacc

SEQ ID NO: 1466679 - DNA, 15 bp, Homo sapiens
tgacctgatagaccc

SEQ ID NO: 1466680 - DNA, 15 bp, Homo sapiens
gacctgatagaccca

SEQ ID NO: 1466681 - DNA, 15 bp, Homo sapiens
acctgatagacccac

SEQ ID NO: 1466682 - DNA, 15 bp, Homo sapiens
cctgatagacccacc

SEQ ID NO: 1466683 - DNA, 15 bp, Homo sapiens
ctgatagacccacca

SEQ ID NO: 1466684 - DNA, 15 bp, Homo sapiens
tgatagacccaccat

SEQ ID NO: 1466685 - DNA, 15 bp, Homo sapiens
gatagacccaccatc

SEQ ID NO: 1466686 - DNA, 15 bp, Homo sapiens
atagacccaccatca

SEQ ID NO: 1466687 - DNA, 15 bp, Homo sapiens
tagacccaccatcag

SEQ ID NO: 1466688 - DNA, 15 bp, Homo sapiens
agacccaccatcagt

SEQ ID NO: 1466689 - DNA, 15 bp, Homo sapiens
gacccaccatcagtt

SEQ ID NO: 1466690 - DNA, 15 bp, Homo sapiens
acccaccatcagttg

SEQ ID NO: 1466691 - DNA, 15 bp, Homo sapiens
cccaccatcagttgc

SEQ ID NO: 1466692 - DNA, 15 bp, Homo sapiens
ccaccatcagttgcc

SEQ ID NO: 1466693 - DNA, 15 bp, Homo sapiens
caccatcagttgcct

SEQ ID NO: 1466694 - DNA, 15 bp, Homo sapiens
accatcagttgcctg

SEQ ID NO: 1466695 - DNA, 15 bp, Homo sapiens
ccatcagttgcctgt

SEQ ID NO: 1466696 - DNA, 15 bp, Homo sapiens
catcagttgcctgtg

SEQ ID NO: 1466697 - DNA, 15 bp, Homo sapiens
atcagttgcctgtgc

SEQ ID NO: 1466698 - DNA, 15 bp, Homo sapiens
tcagttgcctgtgca

SEQ ID NO: 1466699 - DNA, 15 bp, Homo sapiens
cagttgcctgtgcac

SEQ ID NO: 1466700 - DNA, 15 bp, Homo sapiens
agttgcctgtgcact

SEQ ID NO: 1466701 - DNA, 15 bp, Homo sapiens
gttgcctgtgcactg

SEQ ID NO: 1466702 - DNA, 15 bp, Homo sapiens
ttgcctgtgcactga

SEQ ID NO: 1466703 - DNA, 15 bp, Homo sapiens
tgcctgtgcactgag

SEQ ID NO: 1466704 - DNA, 15 bp, Homo sapiens
gcctgtgcactgaga

SEQ ID NO: 1466705 - DNA, 15 bp, Homo sapiens
cctgtgcactgagat

SEQ ID NO: 1466706 - DNA, 15 bp, Homo sapiens
ctgtgcactgagatg

SEQ ID NO: 1466707 - DNA, 15 bp, Homo sapiens
tgtgcactgagatgt

SEQ ID NO: 1466708 - DNA, 15 bp, Homo sapiens
gtgcactgagatgtt

SEQ ID NO: 1466709 - DNA, 15 bp, Homo sapiens
tgcactgagatgttt

SEQ ID NO: 1466710 - DNA, 15 bp, Homo sapiens
gcactgagatgtttc

SEQ ID NO: 1466711 - DNA, 15 bp, Homo sapiens
cactgagatgtttcc

SEQ ID NO: 1466712 - DNA, 15 bp, Homo sapiens
actgagatgtttccc

SEQ ID NO: 1466713 - DNA, 15 bp, Homo sapiens
ctgagatgtttcccc

SEQ ID NO: 1466714 - DNA, 15 bp, Homo sapiens
tgagatgtttcccca

SEQ ID NO: 1466715 - DNA, 15 bp, Homo sapiens
gagatgtttccccag

SEQ ID NO: 1466716 - DNA, 15 bp, Homo sapiens
agatgtttccccaga

SEQ ID NO: 1466717 - DNA, 15 bp, Homo sapiens
gatgtttccccagag

SEQ ID NO: 1466718 - DNA, 15 bp, Homo sapiens
atgtttccccagagg

SEQ ID NO: 1466719 - DNA, 15 bp, Homo sapiens
tgtttccccagaggc

SEQ ID NO: 1466720 - DNA, 15 bp, Homo sapiens
gtttccccagaggct

SEQ ID NO: 1466721 - DNA, 15 bp, Homo sapiens
tttccccagaggcta

SEQ ID NO: 1466722 - DNA, 15 bp, Homo sapiens
ttccccagaggctat

SEQ ID NO: 1466723 - DNA, 15 bp, Homo sapiens
tccccagaggctatg

SEQ ID NO: 1466724 - DNA, 15 bp, Homo sapiens
ccccagaggctatgg

SEQ ID NO: 1466725 - DNA, 15 bp, Homo sapiens
cccagaggctatgga

SEQ ID NO: 1466726 - DNA, 15 bp, Homo sapiens
ccagaggctatggat

SEQ ID NO: 1466727 - DNA, 15 bp, Homo sapiens
cagaggctatggata

SEQ ID NO: 1466728 - DNA, 15 bp, Homo sapiens
agaggctatggatag

SEQ ID NO: 1466729 - DNA, 15 bp, Homo sapiens
gaggctatggatagg

SEQ ID NO: 1466730 - DNA, 15 bp, Homo sapiens
aggctatggataggg

SEQ ID NO: 1466731 - DNA, 15 bp, Homo sapiens
ggctatggatagggt

SEQ ID NO: 1466732 - DNA, 15 bp, Homo sapiens
gctatggatagggtt

SEQ ID NO: 1466733 - DNA, 15 bp, Homo sapiens
ctatggatagggtta

SEQ ID NO: 1466734 - DNA, 15 bp, Homo sapiens
tatggatagggttat

SEQ ID NO: 1466735 - DNA, 15 bp, Homo sapiens
atggatagggttata

SEQ ID NO: 1466736 - DNA, 15 bp, Homo sapiens
tggatagggttatat

SEQ ID NO: 1466737 - DNA, 15 bp, Homo sapiens
ggatagggttatatg

SEQ ID NO: 1466738 - DNA, 15 bp, Homo sapiens
gatagggttatatgt

SEQ ID NO: 1466739 - DNA, 15 bp, Homo sapiens
atagggttatatgtc

SEQ ID NO: 1466740 - DNA, 15 bp, Homo sapiens
tagggttatatgtcc

SEQ ID NO: 1466741 - DNA, 15 bp, Homo sapiens
agggttatatgtccc

SEQ ID NO: 1466742 - DNA, 15 bp, Homo sapiens
gggttatatgtcccc

SEQ ID NO: 1466743 - DNA, 15 bp, Homo sapiens
ggttatatgtcccca

SEQ ID NO: 1466744 - DNA, 15 bp, Homo sapiens
gttatatgtccccac

SEQ ID NO: 1466745 - DNA, 15 bp, Homo sapiens
ttatatgtccccaca

SEQ ID NO: 1466746 - DNA, 15 bp, Homo sapiens
tatatgtccccacac

SEQ ID NO: 1466747 - DNA, 15 bp, Homo sapiens
atatgtccccacact

SEQ ID NO: 1466748 - DNA, 15 bp, Homo sapiens
tatgtccccacacta

SEQ ID NO: 1466749 - DNA, 15 bp, Homo sapiens
atgtccccacactat

SEQ ID NO: 1466750 - DNA, 15 bp, Homo sapiens
tgtccccacactatc

SEQ ID NO: 1466751 - DNA, 15 bp, Homo sapiens
gtccccacactatct

SEQ ID NO: 1466752 - DNA, 15 bp, Homo sapiens
tccccacactatctg

SEQ ID NO: 1466753 - DNA, 15 bp, Homo sapiens
ccccacactatctgc

SEQ ID NO: 1466754 - DNA, 15 bp, Homo sapiens
cccacactatctgca

SEQ ID NO: 1466755 - DNA, 15 bp, Homo sapiens
ccacactatctgcag

SEQ ID NO: 1466756 - DNA, 15 bp, Homo sapiens
cacactatctgcagg

SEQ ID NO: 1466757 - DNA, 15 bp, Homo sapiens
acactatctgcaggg

SEQ ID NO: 1466758 - DNA, 15 bp, Homo sapiens
cactatctgcagggc

SEQ ID NO: 1466759 - DNA, 15 bp, Homo sapiens
actatctgcagggcc

SEQ ID NO: 1466760 - DNA, 15 bp, Homo sapiens
ctatctgcagggcca

SEQ ID NO: 1466761 - DNA, 15 bp, Homo sapiens
tatctgcagggccaa

SEQ ID NO: 1466762 - DNA, 15 bp, Homo sapiens
atctgcagggccaat

SEQ ID NO: 1466763 - DNA, 15 bp, Homo sapiens
tctgcagggccaata

SEQ ID NO: 1466764 - DNA, 15 bp, Homo sapiens
ctgcagggccaatat

SEQ ID NO: 1466765 - DNA, 15 bp, Homo sapiens
tgcagggccaatata

SEQ ID NO: 1466766 - DNA, 15 bp, Homo sapiens
gcagggccaatatag

SEQ ID NO: 1466767 - DNA, 15 bp, Homo sapiens
cagggccaatatagt

SEQ ID NO: 1466768 - DNA, 15 bp, Homo sapiens
agggccaatatagtg

SEQ ID NO: 1466769 - DNA, 15 bp, Homo sapiens
gggccaatatagtgc

SEQ ID NO: 1466770 - DNA, 15 bp, Homo sapiens
ggccaatatagtgca

SEQ ID NO: 1466771 - DNA, 15 bp, Homo sapiens
gccaatatagtgcaa

SEQ ID NO: 1466772 - DNA, 15 bp, Homo sapiens
ccaatatagtgcaaa

SEQ ID NO: 1466773 - DNA, 15 bp, Homo sapiens
caatatagtgcaaat

SEQ ID NO: 1466774 - DNA, 15 bp, Homo sapiens
aatatagtgcaaatc

SEQ ID NO: 1466775 - DNA, 15 bp, Homo sapiens
atatagtgcaaatct

SEQ ID NO: 1466776 - DNA, 15 bp, Homo sapiens
tatagtgcaaatctg

SEQ ID NO: 1466777 - DNA, 15 bp, Homo sapiens
atagtgcaaatctga

SEQ ID NO: 1466778 - DNA, 15 bp, Homo sapiens
tagtgcaaatctgac

SEQ ID NO: 1466779 - DNA, 15 bp, Homo sapiens
agtgcaaatctgaca

SEQ ID NO: 1466780 - DNA, 15 bp, Homo sapiens
gtgcaaatctgacaa

SEQ ID NO: 1466781 - DNA, 15 bp, Homo sapiens
tgcaaatctgacaaa

SEQ ID NO: 1466782 - DNA, 15 bp, Homo sapiens
gcaaatctgacaaaa

SEQ ID NO: 1466783 - DNA, 15 bp, Homo sapiens
caaatctgacaaaat

SEQ ID NO: 1466784 - DNA, 15 bp, Homo sapiens
aaatctgacaaaatt

SEQ ID NO: 1466785 - DNA, 15 bp, Homo sapiens
aatctgacaaaattt

SEQ ID NO: 1466786 - DNA, 15 bp, Homo sapiens
atctgacaaaattta

SEQ ID NO: 1466787 - DNA, 15 bp, Homo sapiens
tctgacaaaatttag

SEQ ID NO: 1466788 - DNA, 15 bp, Homo sapiens
ctgacaaaatttagg

SEQ ID NO: 1466789 - DNA, 15 bp, Homo sapiens
tgacaaaatttaggt

SEQ ID NO: 1466790 - DNA, 15 bp, Homo sapiens
gacaaaatttaggta

SEQ ID NO: 1466791 - DNA, 15 bp, Homo sapiens
acaaaatttaggtaa

SEQ ID NO: 1466792 - DNA, 15 bp, Homo sapiens
caaaatttaggtaat

SEQ ID NO: 1466793 - DNA, 15 bp, Homo sapiens
aaaatttaggtaatc

SEQ ID NO: 1466794 - DNA, 15 bp, Homo sapiens
aaatttaggtaatct

SEQ ID NO: 1466795 - DNA, 15 bp, Homo sapiens
aatttaggtaatcta

SEQ ID NO: 1466796 - DNA, 15 bp, Homo sapiens
atttaggtaatctat

SEQ ID NO: 1466797 - DNA, 15 bp, Homo sapiens
tttaggtaatctatg

SEQ ID NO: 1466798 - DNA, 15 bp, Homo sapiens
ttaggtaatctatgg

SEQ ID NO: 1466799 - DNA, 15 bp, Homo sapiens
taggtaatctatgga

SEQ ID NO: 1466800 - DNA, 15 bp, Homo sapiens
aggtaatctatggaa

SEQ ID NO: 1466801 - DNA, 15 bp, Homo sapiens
ggtaatctatggaat

SEQ ID NO: 1466802 - DNA, 15 bp, Homo sapiens
gtaatctatggaata

SEQ ID NO: 1466803 - DNA, 15 bp, Homo sapiens
taatctatggaataa

SEQ ID NO: 1466804 - DNA, 15 bp, Homo sapiens
aatctatggaataaa

SEQ ID NO: 1466805 - DNA, 15 bp, Homo sapiens
atctatggaataaac

SEQ ID NO: 1466806 - DNA, 15 bp, Homo sapiens
tctatggaataaacc

SEQ ID NO: 1466807 - DNA, 15 bp, Homo sapiens
ctatggaataaacct

SEQ ID NO: 1466808 - DNA, 15 bp, Homo sapiens
tatggaataaacctt

SEQ ID NO: 1466809 - DNA, 15 bp, Homo sapiens
atggaataaaccttt

SEQ ID NO: 1466810 - DNA, 15 bp, Homo sapiens
tggaataaacctttc

SEQ ID NO: 1466811 - DNA, 15 bp, Homo sapiens
ggaataaacctttcc

SEQ ID NO: 1466812 - DNA, 15 bp, Homo sapiens
gaataaacctttcct

SEQ ID NO: 1466813 - DNA, 15 bp, Homo sapiens
aataaacctttcctg

SEQ ID NO: 1466814 - DNA, 15 bp, Homo sapiens
ataaacctttcctgt

SEQ ID NO: 1466815 - DNA, 15 bp, Homo sapiens
taaacctttcctgtg

SEQ ID NO: 1466816 - DNA, 15 bp, Homo sapiens
aaacctttcctgtgc

SEQ ID NO: 1466817 - DNA, 15 bp, Homo sapiens
aacctttcctgtgca

SEQ ID NO: 1466818 - DNA, 15 bp, Homo sapiens
acctttcctgtgcaa

SEQ ID NO: 1466819 - DNA, 15 bp, Homo sapiens
cctttcctgtgcaaa

SEQ ID NO: 1466820 - DNA, 15 bp, Homo sapiens
ctttcctgtgcaaag

SEQ ID NO: 1466821 - DNA, 15 bp, Homo sapiens
tttcctgtgcaaagc

SEQ ID NO: 1466822 - DNA, 15 bp, Homo sapiens
ttcctgtgcaaagct

SEQ ID NO: 1466823 - DNA, 15 bp, Homo sapiens
tcctgtgcaaagcta

SEQ ID NO: 1466824 - DNA, 15 bp, Homo sapiens
cctgtgcaaagctag

SEQ ID NO: 1466825 - DNA, 15 bp, Homo sapiens
ctgtgcaaagctagc

SEQ ID NO: 1466826 - DNA, 15 bp, Homo sapiens
tgtgcaaagctagct

SEQ ID NO: 1466827 - DNA, 15 bp, Homo sapiens
gtgcaaagctagctg

SEQ ID NO: 1466828 - DNA, 15 bp, Homo sapiens
tgcaaagctagctgg

SEQ ID NO: 1466829 - DNA, 15 bp, Homo sapiens
gcaaagctagctggc

SEQ ID NO: 1466830 - DNA, 15 bp, Homo sapiens
caaagctagctggcc

SEQ ID NO: 1466831 - DNA, 15 bp, Homo sapiens
aaagctagctggcct

SEQ ID NO: 1466832 - DNA, 15 bp, Homo sapiens
aagctagctggcctt

SEQ ID NO: 1466833 - DNA, 15 bp, Homo sapiens
agctagctggcctta

SEQ ID NO: 1466834 - DNA, 15 bp, Homo sapiens
gctagctggccttat

SEQ ID NO: 1466835 - DNA, 15 bp, Homo sapiens
ctagctggccttatg

SEQ ID NO: 1466836 - DNA, 15 bp, Homo sapiens
tagctggccttatgg

SEQ ID NO: 1466837 - DNA, 15 bp, Homo sapiens
agctggccttatggg

SEQ ID NO: 1466838 - DNA, 15 bp, Homo sapiens
gctggccttatggga

SEQ ID NO: 1466839 - DNA, 15 bp, Homo sapiens
ctggccttatgggaa

SEQ ID NO: 1466840 - DNA, 15 bp, Homo sapiens
tggccttatgggaat

SEQ ID NO: 1466841 - DNA, 15 bp, Homo sapiens
ggccttatgggaatt

SEQ ID NO: 1466842 - DNA, 15 bp, Homo sapiens
gccttatgggaattg

SEQ ID NO: 1466843 - DNA, 15 bp, Homo sapiens
ccttatgggaattgg

SEQ ID NO: 1466844 - DNA, 15 bp, Homo sapiens
cttatgggaattggt

SEQ ID NO: 1466845 - DNA, 15 bp, Homo sapiens
ttatgggaattggtg

SEQ ID NO: 1466846 - DNA, 15 bp, Homo sapiens
tatgggaattggtgg

SEQ ID NO: 1466847 - DNA, 15 bp, Homo sapiens
atgggaattggtggt

SEQ ID NO: 1466848 - DNA, 15 bp, Homo sapiens
tgggaattggtggta

SEQ ID NO: 1466849 - DNA, 15 bp, Homo sapiens
gggaattggtggtac

SEQ ID NO: 1466850 - DNA, 15 bp, Homo sapiens
ggaattggtggtacc

SEQ ID NO: 1466851 - DNA, 15 bp, Homo sapiens
gaattggtggtacct

SEQ ID NO: 1466852 - DNA, 15 bp, Homo sapiens
aattggtggtacctc

SEQ ID NO: 1466853 - DNA, 15 bp, Homo sapiens
attggtggtacctca

SEQ ID NO: 1466854 - DNA, 15 bp, Homo sapiens
ttggtggtacctcag

SEQ ID NO: 1466855 - DNA, 15 bp, Homo sapiens
tggtggtacctcagt

SEQ ID NO: 1466856 - DNA, 15 bp, Homo sapiens
ggtggtacctcagtc

SEQ ID NO: 1466857 - DNA, 15 bp, Homo sapiens
gtggtacctcagtct

SEQ ID NO: 1466858 - DNA, 15 bp, Homo sapiens
tggtacctcagtctc

SEQ ID NO: 1466859 - DNA, 15 bp, Homo sapiens
ggtacctcagtctca

SEQ ID NO: 1466860 - DNA, 15 bp, Homo sapiens
gtacctcagtctcag

SEQ ID NO: 1466861 - DNA, 15 bp, Homo sapiens
tacctcagtctcagg

SEQ ID NO: 1466862 - DNA, 15 bp, Homo sapiens
acctcagtctcaggg

SEQ ID NO: 1466863 - DNA, 15 bp, Homo sapiens
cctcagtctcagggg

SEQ ID NO: 1466864 - DNA, 15 bp, Homo sapiens
ctcagtctcaggggc

SEQ ID NO: 1466865 - DNA, 15 bp, Homo sapiens
tcagtctcaggggca

SEQ ID NO: 1466866 - DNA, 15 bp, Homo sapiens
cagtctcaggggcat

SEQ ID NO: 1466867 - DNA, 15 bp, Homo sapiens
agtctcaggggcatc

SEQ ID NO: 1466868 - DNA, 15 bp, Homo sapiens
gtctcaggggcatca

SEQ ID NO: 1466869 - DNA, 15 bp, Homo sapiens
tctcaggggcatcat

SEQ ID NO: 1466870 - DNA, 15 bp, Homo sapiens
ctcaggggcatcata

SEQ ID NO: 1466871 - DNA, 15 bp, Homo sapiens
tcaggggcatcataa

SEQ ID NO: 1466872 - DNA, 15 bp, Homo sapiens
caggggcatcataaa

SEQ ID NO: 1466873 - DNA, 15 bp, Homo sapiens
aggggcatcataaac

SEQ ID NO: 1466874 - DNA, 15 bp, Homo sapiens
ggggcatcataaact

SEQ ID NO: 1466875 - DNA, 15 bp, Homo sapiens
gggcatcataaactg

SEQ ID NO: 1466876 - DNA, 15 bp, Homo sapiens
ggcatcataaactga

SEQ ID NO: 1466877 - DNA, 15 bp, Homo sapiens
gcatcataaactgac

SEQ ID NO: 1466878 - DNA, 15 bp, Homo sapiens
catcataaactgacc

SEQ ID NO: 1466879 - DNA, 15 bp, Homo sapiens
atcataaactgacca

SEQ ID NO: 1466880 - DNA, 15 bp, Homo sapiens
tcataaactgaccaa

SEQ ID NO: 1466881 - DNA, 15 bp, Homo sapiens
cataaactgaccaac

SEQ ID NO: 1466882 - DNA, 15 bp, Homo sapiens
ataaactgaccaacc

SEQ ID NO: 1466883 - DNA, 15 bp, Homo sapiens
taaactgaccaacca

SEQ ID NO: 1466884 - DNA, 15 bp, Homo sapiens
aaactgaccaaccat

SEQ ID NO: 1466885 - DNA, 15 bp, Homo sapiens
aactgaccaaccata

SEQ ID NO: 1466886 - DNA, 15 bp, Homo sapiens
actgaccaaccatat

SEQ ID NO: 1466887 - DNA, 15 bp, Homo sapiens
ctgaccaaccatatg

SEQ ID NO: 1466888 - DNA, 15 bp, Homo sapiens
tgaccaaccatatga

SEQ ID NO: 1466889 - DNA, 15 bp, Homo sapiens
gaccaaccatatgaa

SEQ ID NO: 1466890 - DNA, 15 bp, Homo sapiens
accaaccatatgaag

SEQ ID NO: 1466891 - DNA, 15 bp, Homo sapiens
ccaaccatatgaagg

SEQ ID NO: 1466892 - DNA, 15 bp, Homo sapiens
caaccatatgaaggt

SEQ ID NO: 1466893 - DNA, 15 bp, Homo sapiens
aaccatatgaaggtg

SEQ ID NO: 1466894 - DNA, 15 bp, Homo sapiens
accatatgaaggtga

SEQ ID NO: 1466895 - DNA, 15 bp, Homo sapiens
ccatatgaaggtgat

SEQ ID NO: 1466896 - DNA, 15 bp, Homo sapiens
catatgaaggtgatt

SEQ ID NO: 1466897 - DNA, 15 bp, Homo sapiens
atatgaaggtgattg

SEQ ID NO: 1466898 - DNA, 15 bp, Homo sapiens
tatgaaggtgattgc

SEQ ID NO: 1466899 - DNA, 15 bp, Homo sapiens
atgaaggtgattgca

SEQ ID NO: 1466900 - DNA, 15 bp, Homo sapiens
tgaaggtgattgcat

SEQ ID NO: 1466901 - DNA, 15 bp, Homo sapiens
gaaggtgattgcatg

SEQ ID NO: 1466902 - DNA, 15 bp, Homo sapiens
aaggtgattgcatgt

SEQ ID NO: 1466903 - DNA, 15 bp, Homo sapiens
aggtgattgcatgtc

SEQ ID NO: 1466904 - DNA, 15 bp, Homo sapiens
ggtgattgcatgtct

SEQ ID NO: 1466905 - DNA, 15 bp, Homo sapiens
gtgattgcatgtctg

SEQ ID NO: 1466906 - DNA, 15 bp, Homo sapiens
tgattgcatgtctgt

SEQ ID NO: 1466907 - DNA, 15 bp, Homo sapiens
gattgcatgtctgtt

SEQ ID NO: 1466908 - DNA, 15 bp, Homo sapiens
attgcatgtctgtta

SEQ ID NO: 1466909 - DNA, 15 bp, Homo sapiens
ttgcatgtctgttag

SEQ ID NO: 1466910 - DNA, 15 bp, Homo sapiens
tgcatgtctgttagg

SEQ ID NO: 1466911 - DNA, 15 bp, Homo sapiens
gcatgtctgttaggc

SEQ ID NO: 1466912 - DNA, 15 bp, Homo sapiens
catgtctgttaggca

SEQ ID NO: 1466913 - DNA, 15 bp, Homo sapiens
atgtctgttaggcag

SEQ ID NO: 1466914 - DNA, 15 bp, Homo sapiens
tgtctgttaggcagg

SEQ ID NO: 1466915 - DNA, 15 bp, Homo sapiens
gtctgttaggcaggg

SEQ ID NO: 1466916 - DNA, 15 bp, Homo sapiens
tctgttaggcaggga

SEQ ID NO: 1466917 - DNA, 15 bp, Homo sapiens
ctgttaggcagggac

SEQ ID NO: 1466918 - DNA, 15 bp, Homo sapiens
tgttaggcagggact

SEQ ID NO: 1466919 - DNA, 15 bp, Homo sapiens
gttaggcagggacta

SEQ ID NO: 1466920 - DNA, 15 bp, Homo sapiens
ttaggcagggactaa

SEQ ID NO: 1466921 - DNA, 15 bp, Homo sapiens
taggcagggactaaa

SEQ ID NO: 1466922 - DNA, 15 bp, Homo sapiens
aggcagggactaaac

SEQ ID NO: 1466923 - DNA, 15 bp, Homo sapiens
ggcagggactaaact

SEQ ID NO: 1466924 - DNA, 15 bp, Homo sapiens
gcagggactaaacta

SEQ ID NO: 1466925 - DNA, 15 bp, Homo sapiens
cagggactaaactat

SEQ ID NO: 1466926 - DNA, 15 bp, Homo sapiens
agggactaaactatg

SEQ ID NO: 1466927 - DNA, 15 bp, Homo sapiens
gggactaaactatgt

SEQ ID NO: 1466928 - DNA, 15 bp, Homo sapiens
ggactaaactatgtt

SEQ ID NO: 1466929 - DNA, 15 bp, Homo sapiens
gactaaactatgttc

SEQ ID NO: 1466930 - DNA, 15 bp, Homo sapiens
actaaactatgttct

SEQ ID NO: 1466931 - DNA, 15 bp, Homo sapiens
ctaaactatgttctg

SEQ ID NO: 1466932 - DNA, 15 bp, Homo sapiens
taaactatgttctgt

SEQ ID NO: 1466933 - DNA, 15 bp, Homo sapiens
aaactatgttctgtg

SEQ ID NO: 1466934 - DNA, 15 bp, Homo sapiens
aactatgttctgtga

SEQ ID NO: 1466935 - DNA, 15 bp, Homo sapiens
actatgttctgtgaa

SEQ ID NO: 1466936 - DNA, 15 bp, Homo sapiens
ctatgttctgtgaag

SEQ ID NO: 1466937 - DNA, 15 bp, Homo sapiens
tatgttctgtgaaga

SEQ ID NO: 1466938 - DNA, 15 bp, Homo sapiens
atgttctgtgaagat

SEQ ID NO: 1466939 - DNA, 15 bp, Homo sapiens
tgttctgtgaagata

SEQ ID NO: 1466940 - DNA, 15 bp, Homo sapiens
gttctgtgaagatag

SEQ ID NO: 1466941 - DNA, 15 bp, Homo sapiens
ttctgtgaagataga

SEQ ID NO: 1466942 - DNA, 15 bp, Homo sapiens
tctgtgaagatagaa

SEQ ID NO: 1466943 - DNA, 15 bp, Homo sapiens
ctgtgaagatagaac

SEQ ID NO: 1466944 - DNA, 15 bp, Homo sapiens
tgtgaagatagaacc

SEQ ID NO: 1466945 - DNA, 15 bp, Homo sapiens
gtgaagatagaaccc

SEQ ID NO: 1466946 - DNA, 15 bp, Homo sapiens
tgaagatagaacccc

SEQ ID NO: 1466947 - DNA, 15 bp, Homo sapiens
gaagatagaacccca

SEQ ID NO: 1466948 - DNA, 15 bp, Homo sapiens
aagatagaaccccaa

SEQ ID NO: 1466949 - DNA, 15 bp, Homo sapiens
agatagaaccccaat

SEQ ID NO: 1466950 - DNA, 15 bp, Homo sapiens
gatagaaccccaatg

SEQ ID NO: 1466951 - DNA, 15 bp, Homo sapiens
atagaaccccaatgg

SEQ ID NO: 1466952 - DNA, 15 bp, Homo sapiens
tagaaccccaatggc

SEQ ID NO: 1466953 - DNA, 15 bp, Homo sapiens
agaaccccaatggca

SEQ ID NO: 1466954 - DNA, 15 bp, Homo sapiens
gaaccccaatggcaa

SEQ ID NO: 1466955 - DNA, 15 bp, Homo sapiens
aaccccaatggcaaa

SEQ ID NO: 1466956 - DNA, 15 bp, Homo sapiens
accccaatggcaaaa

SEQ ID NO: 1466957 - DNA, 15 bp, Homo sapiens
ccccaatggcaaaag

SEQ ID NO: 1466958 - DNA, 15 bp, Homo sapiens
cccaatggcaaaagg

SEQ ID NO: 1466959 - DNA, 15 bp, Homo sapiens
ccaatggcaaaaggg

SEQ ID NO: 1466960 - DNA, 15 bp, Homo sapiens
caatggcaaaagggc

SEQ ID NO: 1466961 - DNA, 15 bp, Homo sapiens
aatggcaaaagggct

SEQ ID NO: 1466962 - DNA, 15 bp, Homo sapiens
atggcaaaagggctc

SEQ ID NO: 1466963 - DNA, 15 bp, Homo sapiens
tggcaaaagggctct

SEQ ID NO: 1466964 - DNA, 15 bp, Homo sapiens
ggcaaaagggctctg

SEQ ID NO: 1466965 - DNA, 15 bp, Homo sapiens
gcaaaagggctctgc

SEQ ID NO: 1466966 - DNA, 15 bp, Homo sapiens
caaaagggctctgcc

SEQ ID NO: 1466967 - DNA, 15 bp, Homo sapiens
aaaagggctctgcca

SEQ ID NO: 1466968 - DNA, 15 bp, Homo sapiens
aaagggctctgccag

SEQ ID NO: 1466969 - DNA, 15 bp, Homo sapiens
aagggctctgccagg

SEQ ID NO: 1466970 - DNA, 15 bp, Homo sapiens
agggctctgccagga

SEQ ID NO: 1466971 - DNA, 15 bp, Homo sapiens
gggctctgccaggag

SEQ ID NO: 1466972 - DNA, 15 bp, Homo sapiens
ggctctgccaggaga

SEQ ID NO: 1466973 - DNA, 15 bp, Homo sapiens
gctctgccaggagat

SEQ ID NO: 1466974 - DNA, 15 bp, Homo sapiens
ctctgccaggagatc

SEQ ID NO: 1466975 - DNA, 15 bp, Homo sapiens
tctgccaggagatct

SEQ ID NO: 1466976 - DNA, 15 bp, Homo sapiens
ctgccaggagatcta

SEQ ID NO: 1466977 - DNA, 15 bp, Homo sapiens
tgccaggagatctag

SEQ ID NO: 1466978 - DNA, 15 bp, Homo sapiens
gccaggagatctagc

SEQ ID NO: 1466979 - DNA, 15 bp, Homo sapiens
ccaggagatctagcg

SEQ ID NO: 1466980 - DNA, 15 bp, Homo sapiens
caggagatctagcga

SEQ ID NO: 1466981 - DNA, 15 bp, Homo sapiens
aggagatctagcgag

SEQ ID NO: 1466982 - DNA, 15 bp, Homo sapiens
ggagatctagcgaga

SEQ ID NO: 1466983 - DNA, 15 bp, Homo sapiens
gagatctagcgagaa

SEQ ID NO: 1466984 - DNA, 15 bp, Homo sapiens
agatctagcgagaag

SEQ ID NO: 1466985 - DNA, 15 bp, Homo sapiens
gatctagcgagaaga

SEQ ID NO: 1466986 - DNA, 15 bp, Homo sapiens
atctagcgagaagat

SEQ ID NO: 1466987 - DNA, 15 bp, Homo sapiens
tctagcgagaagata

SEQ ID NO: 1466988 - DNA, 15 bp, Homo sapiens
ctagcgagaagataa

SEQ ID NO: 1466989 - DNA, 15 bp, Homo sapiens
tagcgagaagataag

SEQ ID NO: 1466990 - DNA, 15 bp, Homo sapiens
agcgagaagataagc

SEQ ID NO: 1466991 - DNA, 15 bp, Homo sapiens
gcgagaagataagcc

SEQ ID NO: 1466992 - DNA, 15 bp, Homo sapiens
cgagaagataagcca

SEQ ID NO: 1466993 - DNA, 15 bp, Homo sapiens
gagaagataagccac

SEQ ID NO: 1466994 - DNA, 15 bp, Homo sapiens
agaagataagccaca

SEQ ID NO: 1466995 - DNA, 15 bp, Homo sapiens
gaagataagccacat

SEQ ID NO: 1466996 - DNA, 15 bp, Homo sapiens
aagataagccacata

SEQ ID NO: 1466997 - DNA, 15 bp, Homo sapiens
agataagccacatat

SEQ ID NO: 1466998 - DNA, 15 bp, Homo sapiens
gataagccacatatg

SEQ ID NO: 1466999 - DNA, 15 bp, Homo sapiens
ataagccacatatgt

SEQ ID NO: 1467000 - DNA, 15 bp, Homo sapiens
taagccacatatgtg

SEQ ID NO: 1467001 - DNA, 15 bp, Homo sapiens
aagccacatatgtgt

SEQ ID NO: 1467002 - DNA, 15 bp, Homo sapiens
agccacatatgtgtg

SEQ ID NO: 1467003 - DNA, 15 bp, Homo sapiens
gccacatatgtgtgc

SEQ ID NO: 1467004 - DNA, 15 bp, Homo sapiens
ccacatatgtgtgcc

SEQ ID NO: 1467005 - DNA, 15 bp, Homo sapiens
cacatatgtgtgccc

SEQ ID NO: 1467006 - DNA, 15 bp, Homo sapiens
acatatgtgtgccct

SEQ ID NO: 1467007 - DNA, 15 bp, Homo sapiens
catatgtgtgccctg

SEQ ID NO: 1467008 - DNA, 15 bp, Homo sapiens
atatgtgtgccctgc

SEQ ID NO: 1467009 - DNA, 15 bp, Homo sapiens
tatgtgtgccctgca

SEQ ID NO: 1467010 - DNA, 15 bp, Homo sapiens
atgtgtgccctgcag

SEQ ID NO: 1467011 - DNA, 15 bp, Homo sapiens
tgtgtgccctgcaga

SEQ ID NO: 1467012 - DNA, 15 bp, Homo sapiens
gtgtgccctgcagag

SEQ ID NO: 1467013 - DNA, 15 bp, Homo sapiens
tgtgccctgcagagc

SEQ ID NO: 1467014 - DNA, 15 bp, Homo sapiens
gtgccctgcagagca

SEQ ID NO: 1467015 - DNA, 15 bp, Homo sapiens
tgccctgcagagcac

SEQ ID NO: 1467016 - DNA, 15 bp, Homo sapiens
gccctgcagagcaca

SEQ ID NO: 1467017 - DNA, 15 bp, Homo sapiens
ccctgcagagcacag

SEQ ID NO: 1467018 - DNA, 15 bp, Homo sapiens
cctgcagagcacagc

SEQ ID NO: 1467019 - DNA, 15 bp, Homo sapiens
ctgcagagcacagca

SEQ ID NO: 1467020 - DNA, 15 bp, Homo sapiens
tgcagagcacagcaa

SEQ ID NO: 1467021 - DNA, 15 bp, Homo sapiens
gcagagcacagcaag

SEQ ID NO: 1467022 - DNA, 15 bp, Homo sapiens
cagagcacagcaagt

SEQ ID NO: 1467023 - DNA, 15 bp, Homo sapiens
agagcacagcaagtg

SEQ ID NO: 1467024 - DNA, 15 bp, Homo sapiens
gagcacagcaagtgt

SEQ ID NO: 1467025 - DNA, 15 bp, Homo sapiens
agcacagcaagtgtt

SEQ ID NO: 1467026 - DNA, 15 bp, Homo sapiens
gcacagcaagtgtta

SEQ ID NO: 1467027 - DNA, 15 bp, Homo sapiens
cacagcaagtgttac

SEQ ID NO: 1467028 - DNA, 15 bp, Homo sapiens
acagcaagtgttacc

SEQ ID NO: 1467029 - DNA, 15 bp, Homo sapiens
cagcaagtgttacca

SEQ ID NO: 1467030 - DNA, 15 bp, Homo sapiens
agcaagtgttaccat

SEQ ID NO: 1467031 - DNA, 15 bp, Homo sapiens
gcaagtgttaccata

SEQ ID NO: 1467032 - DNA, 15 bp, Homo sapiens
caagtgttaccatag

SEQ ID NO: 1467033 - DNA, 15 bp, Homo sapiens
aagtgttaccatagc

SEQ ID NO: 1467034 - DNA, 15 bp, Homo sapiens
agtgttaccatagcc

SEQ ID NO: 1467035 - DNA, 15 bp, Homo sapiens
gtgttaccatagccc

SEQ ID NO: 1467036 - DNA, 15 bp, Homo sapiens
tgttaccatagccct

SEQ ID NO: 1467037 - DNA, 15 bp, Homo sapiens
gttaccatagccctg

SEQ ID NO: 1467038 - DNA, 15 bp, Homo sapiens
ttaccatagccctga

SEQ ID NO: 1467039 - DNA, 15 bp, Homo sapiens
taccatagccctgag

SEQ ID NO: 1467040 - DNA, 15 bp, Homo sapiens
accatagccctgaga

SEQ ID NO: 1467041 - DNA, 15 bp, Homo sapiens
ccatagccctgagaa

SEQ ID NO: 1467042 - DNA, 15 bp, Homo sapiens
catagccctgagaaa

SEQ ID NO: 1467043 - DNA, 15 bp, Homo sapiens
atagccctgagaaaa

SEQ ID NO: 1467044 - DNA, 15 bp, Homo sapiens
tagccctgagaaaag

SEQ ID NO: 1467045 - DNA, 15 bp, Homo sapiens
agccctgagaaaaga

SEQ ID NO: 1467046 - DNA, 15 bp, Homo sapiens
gccctgagaaaagaa

SEQ ID NO: 1467047 - DNA, 15 bp, Homo sapiens
ccctgagaaaagaaa

SEQ ID NO: 1467048 - DNA, 15 bp, Homo sapiens
cctgagaaaagaaag

SEQ ID NO: 1467049 - DNA, 15 bp, Homo sapiens
ctgagaaaagaaagg

SEQ ID NO: 1467050 - DNA, 15 bp, Homo sapiens
tgagaaaagaaagga

SEQ ID NO: 1467051 - DNA, 15 bp, Homo sapiens
gagaaaagaaaggat

SEQ ID NO: 1467052 - DNA, 15 bp, Homo sapiens
agaaaagaaaggatg

SEQ ID NO: 1467053 - DNA, 15 bp, Homo sapiens
gaaaagaaaggatga

SEQ ID NO: 1467054 - DNA, 15 bp, Homo sapiens
aaaagaaaggatgat

SEQ ID NO: 1467055 - DNA, 15 bp, Homo sapiens
aaagaaaggatgatt

SEQ ID NO: 1467056 - DNA, 15 bp, Homo sapiens
aagaaaggatgattt

SEQ ID NO: 1467057 - DNA, 15 bp, Homo sapiens
agaaaggatgatttg

SEQ ID NO: 1467058 - DNA, 15 bp, Homo sapiens
gaaaggatgatttga

SEQ ID NO: 1467059 - DNA, 15 bp, Homo sapiens
aaaggatgatttgaa

SEQ ID NO: 1467060 - DNA, 15 bp, Homo sapiens
aaggatgatttgaac

SEQ ID NO: 1467061 - DNA, 15 bp, Homo sapiens
aggatgatttgaact

SEQ ID NO: 1467062 - DNA, 15 bp, Homo sapiens
ggatgatttgaactg

SEQ ID NO: 1467063 - DNA, 15 bp, Homo sapiens
gatgatttgaactgg

SEQ ID NO: 1467064 - DNA, 15 bp, Homo sapiens
atgatttgaactgga

SEQ ID NO: 1467065 - DNA, 15 bp, Homo sapiens
tgatttgaactggag

SEQ ID NO: 1467066 - DNA, 15 bp, Homo sapiens
gatttgaactggaga

SEQ ID NO: 1467067 - DNA, 15 bp, Homo sapiens
atttgaactggagag

SEQ ID NO: 1467068 - DNA, 15 bp, Homo sapiens
tttgaactggagaga

SEQ ID NO: 1467069 - DNA, 15 bp, Homo sapiens
ttgaactggagagac

SEQ ID NO: 1467070 - DNA, 15 bp, Homo sapiens
tgaactggagagaca

SEQ ID NO: 1467071 - DNA, 15 bp, Homo sapiens
gaactggagagacag

SEQ ID NO: 1467072 - DNA, 15 bp, Homo sapiens
aactggagagacaga

SEQ ID NO: 1467073 - DNA, 15 bp, Homo sapiens
actggagagacagac

SEQ ID NO: 1467074 - DNA, 15 bp, Homo sapiens
ctggagagacagaca

SEQ ID NO: 1467075 - DNA, 15 bp, Homo sapiens
tggagagacagacaa

SEQ ID NO: 1467076 - DNA, 15 bp, Homo sapiens
ggagagacagacaaa

SEQ ID NO: 1467077 - DNA, 15 bp, Homo sapiens
gagagacagacaaag

SEQ ID NO: 1467078 - DNA, 15 bp, Homo sapiens
agagacagacaaaga

SEQ ID NO: 1467079 - DNA, 15 bp, Homo sapiens
gagacagacaaagac

SEQ ID NO: 1467080 - DNA, 15 bp, Homo sapiens
agacagacaaagacc

SEQ ID NO: 1467081 - DNA, 15 bp, Homo sapiens
gacagacaaagacct

SEQ ID NO: 1467082 - DNA, 15 bp, Homo sapiens
acagacaaagacctc

SEQ ID NO: 1467083 - DNA, 15 bp, Homo sapiens
cagacaaagacctca

SEQ ID NO: 1467084 - DNA, 15 bp, Homo sapiens
agacaaagacctcat

SEQ ID NO: 1467085 - DNA, 15 bp, Homo sapiens
gacaaagacctcatg

SEQ ID NO: 1467086 - DNA, 15 bp, Homo sapiens
acaaagacctcatga

SEQ ID NO: 1467087 - DNA, 15 bp, Homo sapiens
caaagacctcatgat

SEQ ID NO: 1467088 - DNA, 15 bp, Homo sapiens
aaagacctcatgata

SEQ ID NO: 1467089 - DNA, 15 bp, Homo sapiens
aagacctcatgataa

SEQ ID NO: 1467090 - DNA, 15 bp, Homo sapiens
agacctcatgataat

SEQ ID NO: 1467091 - DNA, 15 bp, Homo sapiens
gacctcatgataata

SEQ ID NO: 1467092 - DNA, 15 bp, Homo sapiens
acctcatgataatag

SEQ ID NO: 1467093 - DNA, 15 bp, Homo sapiens
cctcatgataatagt

SEQ ID NO: 1467094 - DNA, 15 bp, Homo sapiens
ctcatgataatagtt

SEQ ID NO: 1467095 - DNA, 15 bp, Homo sapiens
tcatgataatagttg

SEQ ID NO: 1467096 - DNA, 15 bp, Homo sapiens
catgataatagttgt

SEQ ID NO: 1467097 - DNA, 15 bp, Homo sapiens
atgataatagttgtt

SEQ ID NO: 1467098 - DNA, 15 bp, Homo sapiens
tgataatagttgttt

SEQ ID NO: 1467099 - DNA, 15 bp, Homo sapiens
gataatagttgttta

SEQ ID NO: 1467100 - DNA, 15 bp, Homo sapiens
ataatagttgtttat

SEQ ID NO: 1467101 - DNA, 15 bp, Homo sapiens
taatagttgtttatg

SEQ ID NO: 1467102 - DNA, 15 bp, Homo sapiens
aatagttgtttatgt

SEQ ID NO: 1467103 - DNA, 15 bp, Homo sapiens
atagttgtttatgta

SEQ ID NO: 1467104 - DNA, 15 bp, Homo sapiens
tagttgtttatgtag

SEQ ID NO: 1467105 - DNA, 15 bp, Homo sapiens
agttgtttatgtagt

SEQ ID NO: 1467106 - DNA, 15 bp, Homo sapiens
gttgtttatgtagtc

SEQ ID NO: 1467107 - DNA, 15 bp, Homo sapiens
ttgtttatgtagtcc

SEQ ID NO: 1467108 - DNA, 15 bp, Homo sapiens
tgtttatgtagtccc

SEQ ID NO: 1467109 - DNA, 15 bp, Homo sapiens
gtttatgtagtccct

SEQ ID NO: 1467110 - DNA, 15 bp, Homo sapiens
tttatgtagtccctt

SEQ ID NO: 1467111 - DNA, 15 bp, Homo sapiens
ttatgtagtcccttt

SEQ ID NO: 1467112 - DNA, 15 bp, Homo sapiens
tatgtagtccctttc

SEQ ID NO: 1467113 - DNA, 15 bp, Homo sapiens
atgtagtccctttca

SEQ ID NO: 1467114 - DNA, 15 bp, Homo sapiens
tgtagtccctttcat

SEQ ID NO: 1467115 - DNA, 15 bp, Homo sapiens
gtagtccctttcata

SEQ ID NO: 1467116 - DNA, 15 bp, Homo sapiens
tagtccctttcataa

SEQ ID NO: 1467117 - DNA, 15 bp, Homo sapiens
agtccctttcataaa

SEQ ID NO: 1467118 - DNA, 15 bp, Homo sapiens
gtccctttcataaat

SEQ ID NO: 1467119 - DNA, 15 bp, Homo sapiens
tccctttcataaatc

SEQ ID NO: 1467120 - DNA, 15 bp, Homo sapiens
ccctttcataaatct

SEQ ID NO: 1467121 - DNA, 15 bp, Homo sapiens
cctttcataaatctc

SEQ ID NO: 1467122 - DNA, 15 bp, Homo sapiens
ctttcataaatctct

SEQ ID NO: 1467123 - DNA, 15 bp, Homo sapiens
tttcataaatctctt

SEQ ID NO: 1467124 - DNA, 15 bp, Homo sapiens
ttcataaatctcttc

SEQ ID NO: 1467125 - DNA, 15 bp, Homo sapiens
tcataaatctcttca

SEQ ID NO: 1467126 - DNA, 15 bp, Homo sapiens
cataaatctcttcac

SEQ ID NO: 1467127 - DNA, 15 bp, Homo sapiens
ataaatctcttcaca

SEQ ID NO: 1467128 - DNA, 15 bp, Homo sapiens
taaatctcttcacag

SEQ ID NO: 1467129 - DNA, 15 bp, Homo sapiens
aaatctcttcacaga

SEQ ID NO: 1467130 - DNA, 15 bp, Homo sapiens
aatctcttcacagat

SEQ ID NO: 1467131 - DNA, 15 bp, Homo sapiens
atctcttcacagatc

SEQ ID NO: 1467132 - DNA, 15 bp, Homo sapiens
tctcttcacagatca

SEQ ID NO: 1467133 - DNA, 15 bp, Homo sapiens
ctcttcacagatcat

SEQ ID NO: 1467134 - DNA, 15 bp, Homo sapiens
tcttcacagatcata

SEQ ID NO: 1467135 - DNA, 15 bp, Homo sapiens
cttcacagatcatac

SEQ ID NO: 1467136 - DNA, 15 bp, Homo sapiens
ttcacagatcataca

SEQ ID NO: 1467137 - DNA, 15 bp, Homo sapiens
tcacagatcatacag

SEQ ID NO: 1467138 - DNA, 15 bp, Homo sapiens
cacagatcatacagt

SEQ ID NO: 1467139 - DNA, 15 bp, Homo sapiens
acagatcatacagtc

SEQ ID NO: 1467140 - DNA, 15 bp, Homo sapiens
cagatcatacagtcc

SEQ ID NO: 1467141 - DNA, 15 bp, Homo sapiens
agatcatacagtccc

SEQ ID NO: 1467142 - DNA, 15 bp, Homo sapiens
gatcatacagtccct

SEQ ID NO: 1467143 - DNA, 15 bp, Homo sapiens
atcatacagtccctc

SEQ ID NO: 1467144 - DNA, 15 bp, Homo sapiens
tcatacagtccctcc

SEQ ID NO: 1467145 - DNA, 15 bp, Homo sapiens
catacagtccctcca

SEQ ID NO: 1467146 - DNA, 15 bp, Homo sapiens
atacagtccctccac

SEQ ID NO: 1467147 - DNA, 15 bp, Homo sapiens
tacagtccctccaca

SEQ ID NO: 1467148 - DNA, 15 bp, Homo sapiens
acagtccctccacag

SEQ ID NO: 1467149 - DNA, 15 bp, Homo sapiens
cagtccctccacaga

SEQ ID NO: 1467150 - DNA, 15 bp, Homo sapiens
agtccctccacagat

SEQ ID NO: 1467151 - DNA, 15 bp, Homo sapiens
gtccctccacagatc

SEQ ID NO: 1467152 - DNA, 15 bp, Homo sapiens
tccctccacagatca

SEQ ID NO: 1467153 - DNA, 15 bp, Homo sapiens
ccctccacagatcac

SEQ ID NO: 1467154 - DNA, 15 bp, Homo sapiens
cctccacagatcact

SEQ ID NO: 1467155 - DNA, 15 bp, Homo sapiens
ctccacagatcactg

SEQ ID NO: 1467156 - DNA, 15 bp, Homo sapiens
tccacagatcactgg

SEQ ID NO: 1467157 - DNA, 15 bp, Homo sapiens
ccacagatcactggc

SEQ ID NO: 1467158 - DNA, 15 bp, Homo sapiens
cacagatcactggcc

SEQ ID NO: 1467159 - DNA, 15 bp, Homo sapiens
acagatcactggccc

SEQ ID NO: 1467160 - DNA, 15 bp, Homo sapiens
cagatcactggccca

SEQ ID NO: 1467161 - DNA, 15 bp, Homo sapiens
agatcactggcccac

SEQ ID NO: 1467162 - DNA, 15 bp, Homo sapiens
gatcactggcccaca

SEQ ID NO: 1467163 - DNA, 15 bp, Homo sapiens
atcactggcccacac

SEQ ID NO: 1467164 - DNA, 15 bp, Homo sapiens
tcactggcccacaca

SEQ ID NO: 1467165 - DNA, 15 bp, Homo sapiens
cactggcccacacac

SEQ ID NO: 1467166 - DNA, 15 bp, Homo sapiens
actggcccacacact

SEQ ID NO: 1467167 - DNA, 15 bp, Homo sapiens
ctggcccacacactc

SEQ ID NO: 1467168 - DNA, 15 bp, Homo sapiens
tggcccacacactct

SEQ ID NO: 1467169 - DNA, 15 bp, Homo sapiens
ggcccacacactctt

SEQ ID NO: 1467170 - DNA, 15 bp, Homo sapiens
gcccacacactcttg

SEQ ID NO: 1467171 - DNA, 15 bp, Homo sapiens
cccacacactcttgc

SEQ ID NO: 1467172 - DNA, 15 bp, Homo sapiens
ccacacactcttgca

SEQ ID NO: 1467173 - DNA, 15 bp, Homo sapiens
cacacactcttgcat

SEQ ID NO: 1467174 - DNA, 15 bp, Homo sapiens
acacactcttgcatc

SEQ ID NO: 1467175 - DNA, 15 bp, Homo sapiens
cacactcttgcatcc

SEQ ID NO: 1467176 - DNA, 15 bp, Homo sapiens
acactcttgcatccc

SEQ ID NO: 1467177 - DNA, 15 bp, Homo sapiens
cactcttgcatccca

SEQ ID NO: 1467178 - DNA, 15 bp, Homo sapiens
actcttgcatcccat

SEQ ID NO: 1467179 - DNA, 15 bp, Homo sapiens
ctcttgcatcccatt

SEQ ID NO: 1467180 - DNA, 15 bp, Homo sapiens
tcttgcatcccattc

SEQ ID NO: 1467181 - DNA, 15 bp, Homo sapiens
cttgcatcccattct

SEQ ID NO: 1467182 - DNA, 15 bp, Homo sapiens
ttgcatcccattctc

SEQ ID NO: 1467183 - DNA, 15 bp, Homo sapiens
tgcatcccattctca

SEQ ID NO: 1467184 - DNA, 15 bp, Homo sapiens
gcatcccattctcac

SEQ ID NO: 1467185 - DNA, 15 bp, Homo sapiens
catcccattctcaca

SEQ ID NO: 1467186 - DNA, 15 bp, Homo sapiens
atcccattctcacag

SEQ ID NO: 1467187 - DNA, 15 bp, Homo sapiens
tcccattctcacagt

SEQ ID NO: 1467188 - DNA, 15 bp, Homo sapiens
cccattctcacagta

SEQ ID NO: 1467189 - DNA, 15 bp, Homo sapiens
ccattctcacagtag

SEQ ID NO: 1467190 - DNA, 15 bp, Homo sapiens
cattctcacagtagc

SEQ ID NO: 1467191 - DNA, 15 bp, Homo sapiens
attctcacagtagcc

SEQ ID NO: 1467192 - DNA, 15 bp, Homo sapiens
ttctcacagtagccc

SEQ ID NO: 1467193 - DNA, 15 bp, Homo sapiens
tctcacagtagccct

SEQ ID NO: 1467194 - DNA, 15 bp, Homo sapiens
ctcacagtagcccta

SEQ ID NO: 1467195 - DNA, 15 bp, Homo sapiens
tcacagtagccctat

SEQ ID NO: 1467196 - DNA, 15 bp, Homo sapiens
cacagtagccctatg

SEQ ID NO: 1467197 - DNA, 15 bp, Homo sapiens
acagtagccctatgg

SEQ ID NO: 1467198 - DNA, 15 bp, Homo sapiens
cagtagccctatggg

SEQ ID NO: 1467199 - DNA, 15 bp, Homo sapiens
agtagccctatggga

SEQ ID NO: 1467200 - DNA, 15 bp, Homo sapiens
gtagccctatgggag

SEQ ID NO: 1467201 - DNA, 15 bp, Homo sapiens
tagccctatgggaga

SEQ ID NO: 1467202 - DNA, 15 bp, Homo sapiens
agccctatgggagat

SEQ ID NO: 1467203 - DNA, 15 bp, Homo sapiens
gccctatgggagata

SEQ ID NO: 1467204 - DNA, 15 bp, Homo sapiens
ccctatgggagataa

SEQ ID NO: 1467205 - DNA, 15 bp, Homo sapiens
cctatgggagataat

SEQ ID NO: 1467206 - DNA, 15 bp, Homo sapiens
ctatgggagataata

SEQ ID NO: 1467207 - DNA, 15 bp, Homo sapiens
tatgggagataatac

SEQ ID NO: 1467208 - DNA, 15 bp, Homo sapiens
atgggagataatacc

SEQ ID NO: 1467209 - DNA, 15 bp, Homo sapiens
tgggagataatacca

SEQ ID NO: 1467210 - DNA, 15 bp, Homo sapiens
gggagataataccat

SEQ ID NO: 1467211 - DNA, 15 bp, Homo sapiens
ggagataataccatg

SEQ ID NO: 1467212 - DNA, 15 bp, Homo sapiens
gagataataccatga

SEQ ID NO: 1467213 - DNA, 15 bp, Homo sapiens
agataataccatgat

SEQ ID NO: 1467214 - DNA, 15 bp, Homo sapiens
gataataccatgatg

SEQ ID NO: 1467215 - DNA, 15 bp, Homo sapiens
ataataccatgatgt

SEQ ID NO: 1467216 - DNA, 15 bp, Homo sapiens
taataccatgatgtc

SEQ ID NO: 1467217 - DNA, 15 bp, Homo sapiens
aataccatgatgtct

SEQ ID NO: 1467218 - DNA, 15 bp, Homo sapiens
ataccatgatgtctc

SEQ ID NO: 1467219 - DNA, 15 bp, Homo sapiens
taccatgatgtctct

SEQ ID NO: 1467220 - DNA, 15 bp, Homo sapiens
accatgatgtctcta

SEQ ID NO: 1467221 - DNA, 15 bp, Homo sapiens
ccatgatgtctctac

SEQ ID NO: 1467222 - DNA, 15 bp, Homo sapiens
catgatgtctctact

SEQ ID NO: 1467223 - DNA, 15 bp, Homo sapiens
atgatgtctctactt

SEQ ID NO: 1467224 - DNA, 15 bp, Homo sapiens
tgatgtctctacttc

SEQ ID NO: 1467225 - DNA, 15 bp, Homo sapiens
gatgtctctacttca

SEQ ID NO: 1467226 - DNA, 15 bp, Homo sapiens
atgtctctacttcat

SEQ ID NO: 1467227 - DNA, 15 bp, Homo sapiens
tgtctctacttcata

SEQ ID NO: 1467228 - DNA, 15 bp, Homo sapiens
gtctctacttcatat

SEQ ID NO: 1467229 - DNA, 15 bp, Homo sapiens
tctctacttcatatg

SEQ ID NO: 1467230 - DNA, 15 bp, Homo sapiens
ctctacttcatatgg

SEQ ID NO: 1467231 - DNA, 15 bp, Homo sapiens
tctacttcatatgga

SEQ ID NO: 1467232 - DNA, 15 bp, Homo sapiens
ctacttcatatggaa

SEQ ID NO: 1467233 - DNA, 15 bp, Homo sapiens
tacttcatatggaag

SEQ ID NO: 1467234 - DNA, 15 bp, Homo sapiens
acttcatatggaaga

SEQ ID NO: 1467235 - DNA, 15 bp, Homo sapiens
cttcatatggaagaa

SEQ ID NO: 1467236 - DNA, 15 bp, Homo sapiens
ttcatatggaagaag

SEQ ID NO: 1467237 - DNA, 15 bp, Homo sapiens
tcatatggaagaagt

SEQ ID NO: 1467238 - DNA, 15 bp, Homo sapiens
catatggaagaagtt

SEQ ID NO: 1467239 - DNA, 15 bp, Homo sapiens
atatggaagaagtta

SEQ ID NO: 1467240 - DNA, 15 bp, Homo sapiens
tatggaagaagttaa

SEQ ID NO: 1467241 - DNA, 15 bp, Homo sapiens
atggaagaagttaaa

SEQ ID NO: 1467242 - DNA, 15 bp, Homo sapiens
tggaagaagttaaag

SEQ ID NO: 1467243 - DNA, 15 bp, Homo sapiens
ggaagaagttaaagt

SEQ ID NO: 1467244 - DNA, 15 bp, Homo sapiens
gaagaagttaaagtt

SEQ ID NO: 1467245 - DNA, 15 bp, Homo sapiens
aagaagttaaagttc

SEQ ID NO: 1467246 - DNA, 15 bp, Homo sapiens
agaagttaaagttca

SEQ ID NO: 1467247 - DNA, 15 bp, Homo sapiens
gaagttaaagttcag

SEQ ID NO: 1467248 - DNA, 15 bp, Homo sapiens
aagttaaagttcaga

SEQ ID NO: 1467249 - DNA, 15 bp, Homo sapiens
agttaaagttcagag

SEQ ID NO: 1467250 - DNA, 15 bp, Homo sapiens
gttaaagttcagagg

SEQ ID NO: 1467251 - DNA, 15 bp, Homo sapiens
ttaaagttcagagga

SEQ ID NO: 1467252 - DNA, 15 bp, Homo sapiens
taaagttcagaggag

SEQ ID NO: 1467253 - DNA, 15 bp, Homo sapiens
aaagttcagaggagt

SEQ ID NO: 1467254 - DNA, 15 bp, Homo sapiens
aagttcagaggagtg

SEQ ID NO: 1467255 - DNA, 15 bp, Homo sapiens
agttcagaggagtga

SEQ ID NO: 1467256 - DNA, 15 bp, Homo sapiens
gttcagaggagtgag

SEQ ID NO: 1467257 - DNA, 15 bp, Homo sapiens
ttcagaggagtgagg

SEQ ID NO: 1467258 - DNA, 15 bp, Homo sapiens
tcagaggagtgaggt

SEQ ID NO: 1467259 - DNA, 15 bp, Homo sapiens
cagaggagtgaggta

SEQ ID NO: 1467260 - DNA, 15 bp, Homo sapiens
agaggagtgaggtaa

SEQ ID NO: 1467261 - DNA, 15 bp, Homo sapiens
gaggagtgaggtaac

SEQ ID NO: 1467262 - DNA, 15 bp, Homo sapiens
aggagtgaggtaact

SEQ ID NO: 1467263 - DNA, 15 bp, Homo sapiens
ggagtgaggtaactt

SEQ ID NO: 1467264 - DNA, 15 bp, Homo sapiens
gagtgaggtaacttg

SEQ ID NO: 1467265 - DNA, 15 bp, Homo sapiens
agtgaggtaacttgc

SEQ ID NO: 1467266 - DNA, 15 bp, Homo sapiens
gtgaggtaacttgcc

SEQ ID NO: 1467267 - DNA, 15 bp, Homo sapiens
tgaggtaacttgccc

SEQ ID NO: 1467268 - DNA, 15 bp, Homo sapiens
gaggtaacttgccca

SEQ ID NO: 1467269 - DNA, 15 bp, Homo sapiens
aggtaacttgcccaa

SEQ ID NO: 1467270 - DNA, 15 bp, Homo sapiens
ggtaacttgcccaag

SEQ ID NO: 1467271 - DNA, 15 bp, Homo sapiens
taacttgcccaagag

SEQ ID NO: 1467272 - DNA, 15 bp, Homo sapiens
aacttgcccaagagt

SEQ ID NO: 1467273 - DNA, 15 bp, Homo sapiens
acttgcccaagagta

SEQ ID NO: 1467274 - DNA, 15 bp, Homo sapiens
cttgcccaagagtat

SEQ ID NO: 1467275 - DNA, 15 bp, Homo sapiens
ttgcccaagagtata

SEQ ID NO: 1467276 - DNA, 15 bp, Homo sapiens
tgcccaagagtataa

SEQ ID NO: 1467277 - DNA, 15 bp, Homo sapiens
gcccaagagtataac

SEQ ID NO: 1467278 - DNA, 15 bp, Homo sapiens
cccaagagtataact

SEQ ID NO: 1467279 - DNA, 15 bp, Homo sapiens
ccaagagtataacta

SEQ ID NO: 1467280 - DNA, 15 bp, Homo sapiens
caagagtataactaa

SEQ ID NO: 1467281 - DNA, 15 bp, Homo sapiens
aagagtataactaac

SEQ ID NO: 1467282 - DNA, 15 bp, Homo sapiens
agagtataactaaca

SEQ ID NO: 1467283 - DNA, 15 bp, Homo sapiens
gagtataactaacag

SEQ ID NO: 1467284 - DNA, 15 bp, Homo sapiens
agtataactaacagg

SEQ ID NO: 1467285 - DNA, 15 bp, Homo sapiens
gtataactaacaggg

SEQ ID NO: 1467286 - DNA, 15 bp, Homo sapiens
tataactaacagggg

SEQ ID NO: 1467287 - DNA, 15 bp, Homo sapiens
ataactaacagggga

SEQ ID NO: 1467288 - DNA, 15 bp, Homo sapiens
taactaacaggggac

SEQ ID NO: 1467289 - DNA, 15 bp, Homo sapiens
aactaacaggggaca

SEQ ID NO: 1467290 - DNA, 15 bp, Homo sapiens
actaacaggggacag

SEQ ID NO: 1467291 - DNA, 15 bp, Homo sapiens
ctaacaggggacaga

SEQ ID NO: 1467292 - DNA, 15 bp, Homo sapiens
taacaggggacagat

SEQ ID NO: 1467293 - DNA, 15 bp, Homo sapiens
aacaggggacagatc

SEQ ID NO: 1467294 - DNA, 15 bp, Homo sapiens
acaggggacagatct

SEQ ID NO: 1467295 - DNA, 15 bp, Homo sapiens
caggggacagatctg

SEQ ID NO: 1467296 - DNA, 15 bp, Homo sapiens
aggggacagatctgg

SEQ ID NO: 1467297 - DNA, 15 bp, Homo sapiens
ggggacagatctggg

SEQ ID NO: 1467298 - DNA, 15 bp, Homo sapiens
gggacagatctgggt

SEQ ID NO: 1467299 - DNA, 15 bp, Homo sapiens
ggacagatctgggtt

SEQ ID NO: 1467300 - DNA, 15 bp, Homo sapiens
gacagatctgggttt

SEQ ID NO: 1467301 - DNA, 15 bp, Homo sapiens
acagatctgggtttc

SEQ ID NO: 1467302 - DNA, 15 bp, Homo sapiens
cagatctgggtttca

SEQ ID NO: 1467303 - DNA, 15 bp, Homo sapiens
agatctgggtttcaa

SEQ ID NO: 1467304 - DNA, 15 bp, Homo sapiens
gatctgggtttcaag

SEQ ID NO: 1467305 - DNA, 15 bp, Homo sapiens
atctgggtttcaagc

SEQ ID NO: 1467306 - DNA, 15 bp, Homo sapiens
tctgggtttcaagcc

SEQ ID NO: 1467307 - DNA, 15 bp, Homo sapiens
ctgggtttcaagccc

SEQ ID NO: 1467308 - DNA, 15 bp, Homo sapiens
tgggtttcaagccca

SEQ ID NO: 1467309 - DNA, 15 bp, Homo sapiens
gggtttcaagcccag

SEQ ID NO: 1467310 - DNA, 15 bp, Homo sapiens
ggtttcaagcccagt

SEQ ID NO: 1467311 - DNA, 15 bp, Homo sapiens
gtttcaagcccagtg

SEQ ID NO: 1467312 - DNA, 15 bp, Homo sapiens
tttcaagcccagtgt

SEQ ID NO: 1467313 - DNA, 15 bp, Homo sapiens
ttcaagcccagtgtt

SEQ ID NO: 1467314 - DNA, 15 bp, Homo sapiens
tcaagcccagtgttt

SEQ ID NO: 1467315 - DNA, 15 bp, Homo sapiens
caagcccagtgtttc

SEQ ID NO: 1467316 - DNA, 15 bp, Homo sapiens
aagcccagtgtttct

SEQ ID NO: 1467317 - DNA, 15 bp, Homo sapiens
agcccagtgtttctc

SEQ ID NO: 1467318 - DNA, 15 bp, Homo sapiens
gcccagtgtttctca

SEQ ID NO: 1467319 - DNA, 15 bp, Homo sapiens
cccagtgtttctcat

SEQ ID NO: 1467320 - DNA, 15 bp, Homo sapiens
ccagtgtttctcatt

SEQ ID NO: 1467321 - DNA, 15 bp, Homo sapiens
cagtgtttctcattc

SEQ ID NO: 1467322 - DNA, 15 bp, Homo sapiens
agtgtttctcattcc

SEQ ID NO: 1467323 - DNA, 15 bp, Homo sapiens
gtgtttctcattcct

SEQ ID NO: 1467324 - DNA, 15 bp, Homo sapiens
tgtttctcattcctg

SEQ ID NO: 1467325 - DNA, 15 bp, Homo sapiens
gtttctcattcctga

SEQ ID NO: 1467326 - DNA, 15 bp, Homo sapiens
tttctcattcctgat

SEQ ID NO: 1467327 - DNA, 15 bp, Homo sapiens
ttctcattcctgatt

SEQ ID NO: 1467328 - DNA, 15 bp, Homo sapiens
tctcattcctgattc

SEQ ID NO: 1467329 - DNA, 15 bp, Homo sapiens
ctcattcctgattcc

SEQ ID NO: 1467330 - DNA, 15 bp, Homo sapiens
tcattcctgattcct

SEQ ID NO: 1467331 - DNA, 15 bp, Homo sapiens
cattcctgattcctg

SEQ ID NO: 1467332 - DNA, 15 bp, Homo sapiens
attcctgattcctgc

SEQ ID NO: 1467333 - DNA, 15 bp, Homo sapiens
ttcctgattcctgct

SEQ ID NO: 1467334 - DNA, 15 bp, Homo sapiens
tcctgattcctgctt

SEQ ID NO: 1467335 - DNA, 15 bp, Homo sapiens
cctgattcctgcttt

SEQ ID NO: 1467336 - DNA, 15 bp, Homo sapiens
ctgattcctgctttt

SEQ ID NO: 1467337 - DNA, 15 bp, Homo sapiens
tgattcctgctttta

SEQ ID NO: 1467338 - DNA, 15 bp, Homo sapiens
gattcctgcttttac

SEQ ID NO: 1467339 - DNA, 15 bp, Homo sapiens
attcctgcttttact

SEQ ID NO: 1467340 - DNA, 15 bp, Homo sapiens
ttcctgcttttacta

SEQ ID NO: 1467341 - DNA, 15 bp, Homo sapiens
tcctgcttttactac

SEQ ID NO: 1467342 - DNA, 15 bp, Homo sapiens
cctgcttttactaca

SEQ ID NO: 1467343 - DNA, 15 bp, Homo sapiens
ctgcttttactacac

SEQ ID NO: 1467344 - DNA, 15 bp, Homo sapiens
tgcttttactacaca

SEQ ID NO: 1467345 - DNA, 15 bp, Homo sapiens
gcttttactacacac

SEQ ID NO: 1467346 - DNA, 15 bp, Homo sapiens
cttttactacacaca

SEQ ID NO: 1467347 - DNA, 15 bp, Homo sapiens
ttttactacacacac

SEQ ID NO: 1467348 - DNA, 15 bp, Homo sapiens
tttactacacacact

SEQ ID NO: 1467349 - DNA, 15 bp, Homo sapiens
ttactacacacactg

SEQ ID NO: 1467350 - DNA, 15 bp, Homo sapiens
tactacacacactgg

SEQ ID NO: 1467351 - DNA, 15 bp, Homo sapiens
actacacacactggc

SEQ ID NO: 1467352 - DNA, 15 bp, Homo sapiens
ctacacacactggcc

SEQ ID NO: 1467353 - DNA, 15 bp, Homo sapiens
tacacacactggcca

SEQ ID NO: 1467354 - DNA, 15 bp, Homo sapiens
acacacactggccac

SEQ ID NO: 1467355 - DNA, 15 bp, Homo sapiens
cacacactggccaca

SEQ ID NO: 1467356 - DNA, 15 bp, Homo sapiens
acacactggccacac

SEQ ID NO: 1467357 - DNA, 15 bp, Homo sapiens
cacactggccacact

SEQ ID NO: 1467358 - DNA, 15 bp, Homo sapiens
acactggccacactg

SEQ ID NO: 1467359 - DNA, 15 bp, Homo sapiens
cactggccacactgc

SEQ ID NO: 1467360 - DNA, 15 bp, Homo sapiens
actggccacactgcc

SEQ ID NO: 1467361 - DNA, 15 bp, Homo sapiens
ctggccacactgcct

SEQ ID NO: 1467362 - DNA, 15 bp, Homo sapiens
tggccacactgcctc

SEQ ID NO: 1467363 - DNA, 15 bp, Homo sapiens
ggccacactgcctct

SEQ ID NO: 1467364 - DNA, 15 bp, Homo sapiens
gccacactgcctctt

SEQ ID NO: 1467365 - DNA, 15 bp, Homo sapiens
ccacactgcctcttg

SEQ ID NO: 1467366 - DNA, 15 bp, Homo sapiens
cacactgcctcttgg

SEQ ID NO: 1467367 - DNA, 15 bp, Homo sapiens
acactgcctcttggc

SEQ ID NO: 1467368 - DNA, 15 bp, Homo sapiens
cactgcctcttggca

SEQ ID NO: 1467369 - DNA, 15 bp, Homo sapiens
actgcctcttggcac

SEQ ID NO: 1467370 - DNA, 15 bp, Homo sapiens
ctgcctcttggcaca

SEQ ID NO: 1467371 - DNA, 15 bp, Homo sapiens
tgcctcttggcacag

SEQ ID NO: 1467372 - DNA, 15 bp, Homo sapiens
gcctcttggcacagg

SEQ ID NO: 1467373 - DNA, 15 bp, Homo sapiens
cctcttggcacaggt

SEQ ID NO: 1467374 - DNA, 15 bp, Homo sapiens
ctcttggcacaggtg

SEQ ID NO: 1467375 - DNA, 15 bp, Homo sapiens
tcttggcacaggtgg

SEQ ID NO: 1467376 - DNA, 15 bp, Homo sapiens
cttggcacaggtgga

SEQ ID NO: 1467377 - DNA, 15 bp, Homo sapiens
ttggcacaggtggat

SEQ ID NO: 1467378 - DNA, 15 bp, Homo sapiens
tggcacaggtggatc

SEQ ID NO: 1467379 - DNA, 15 bp, Homo sapiens
ggcacaggtggatct

SEQ ID NO: 1467380 - DNA, 15 bp, Homo sapiens
gcacaggtggatcta

SEQ ID NO: 1467381 - DNA, 15 bp, Homo sapiens
cacaggtggatctaa

SEQ ID NO: 1467382 - DNA, 15 bp, Homo sapiens
acaggtggatctaag

SEQ ID NO: 1467383 - DNA, 15 bp, Homo sapiens
caggtggatctaagc

SEQ ID NO: 1467384 - DNA, 15 bp, Homo sapiens
aggtggatctaagcc

SEQ ID NO: 1467385 - DNA, 15 bp, Homo sapiens
ggtggatctaagcct

SEQ ID NO: 1467386 - DNA, 15 bp, Homo sapiens
gtggatctaagcctg

SEQ ID NO: 1467387 - DNA, 15 bp, Homo sapiens
tggatctaagcctgg

SEQ ID NO: 1467388 - DNA, 15 bp, Homo sapiens
ggatctaagcctggc

SEQ ID NO: 1467389 - DNA, 15 bp, Homo sapiens
gatctaagcctggcc

SEQ ID NO: 1467390 - DNA, 15 bp, Homo sapiens
atctaagcctggcct

SEQ ID NO: 1467391 - DNA, 15 bp, Homo sapiens
tctaagcctggcctt

SEQ ID NO: 1467392 - DNA, 15 bp, Homo sapiens
ctaagcctggccttg

SEQ ID NO: 1467393 - DNA, 15 bp, Homo sapiens
taagcctggccttga

SEQ ID NO: 1467394 - DNA, 15 bp, Homo sapiens
aagcctggccttgaa

SEQ ID NO: 1467395 - DNA, 15 bp, Homo sapiens
agcctggccttgaaa

SEQ ID NO: 1467396 - DNA, 15 bp, Homo sapiens
gcctggccttgaaag

SEQ ID NO: 1467397 - DNA, 15 bp, Homo sapiens
cctggccttgaaaga

SEQ ID NO: 1467398 - DNA, 15 bp, Homo sapiens
ctggccttgaaagat

SEQ ID NO: 1467399 - DNA, 15 bp, Homo sapiens
tggccttgaaagata

SEQ ID NO: 1467400 - DNA, 15 bp, Homo sapiens
ggccttgaaagatag

SEQ ID NO: 1467401 - DNA, 15 bp, Homo sapiens
gccttgaaagatagg

SEQ ID NO: 1467402 - DNA, 15 bp, Homo sapiens
ccttgaaagataggt

SEQ ID NO: 1467403 - DNA, 15 bp, Homo sapiens
cttgaaagataggta

SEQ ID NO: 1467404 - DNA, 15 bp, Homo sapiens
ttgaaagataggtag

SEQ ID NO: 1467405 - DNA, 15 bp, Homo sapiens
tgaaagataggtagg

SEQ ID NO: 1467406 - DNA, 15 bp, Homo sapiens
gaaagataggtaggt

SEQ ID NO: 1467407 - DNA, 15 bp, Homo sapiens
aaagataggtaggtc

SEQ ID NO: 1467408 - DNA, 15 bp, Homo sapiens
aagataggtaggtct

SEQ ID NO: 1467409 - DNA, 15 bp, Homo sapiens
agataggtaggtctt

SEQ ID NO: 1467410 - DNA, 15 bp, Homo sapiens
gataggtaggtcttg

SEQ ID NO: 1467411 - DNA, 15 bp, Homo sapiens
ataggtaggtcttgc

SEQ ID NO: 1467412 - DNA, 15 bp, Homo sapiens
taggtaggtcttgca

SEQ ID NO: 1467413 - DNA, 15 bp, Homo sapiens
aggtaggtcttgcat

SEQ ID NO: 1467414 - DNA, 15 bp, Homo sapiens
ggtaggtcttgcata

SEQ ID NO: 1467415 - DNA, 15 bp, Homo sapiens
gtaggtcttgcatag

SEQ ID NO: 1467416 - DNA, 15 bp, Homo sapiens
taggtcttgcatagg

SEQ ID NO: 1467417 - DNA, 15 bp, Homo sapiens
aggtcttgcatagga

SEQ ID NO: 1467418 - DNA, 15 bp, Homo sapiens
ggtcttgcataggaa

SEQ ID NO: 1467419 - DNA, 15 bp, Homo sapiens
gtcttgcataggaaa

SEQ ID NO: 1467420 - DNA, 15 bp, Homo sapiens
tcttgcataggaaac

SEQ ID NO: 1467421 - DNA, 15 bp, Homo sapiens
cttgcataggaaact

SEQ ID NO: 1467422 - DNA, 15 bp, Homo sapiens
ttgcataggaaacta

SEQ ID NO: 1467423 - DNA, 15 bp, Homo sapiens
tgcataggaaactat

SEQ ID NO: 1467424 - DNA, 15 bp, Homo sapiens
gcataggaaactatg

SEQ ID NO: 1467425 - DNA, 15 bp, Homo sapiens
cataggaaactatgg

SEQ ID NO: 1467426 - DNA, 15 bp, Homo sapiens
ataggaaactatggt

SEQ ID NO: 1467427 - DNA, 15 bp, Homo sapiens
taggaaactatggta

SEQ ID NO: 1467428 - DNA, 15 bp, Homo sapiens
aggaaactatggtaa

SEQ ID NO: 1467429 - DNA, 15 bp, Homo sapiens
ggaaactatggtaaa

SEQ ID NO: 1467430 - DNA, 15 bp, Homo sapiens
gaaactatggtaaag

SEQ ID NO: 1467431 - DNA, 15 bp, Homo sapiens
aaactatggtaaagg

SEQ ID NO: 1467432 - DNA, 15 bp, Homo sapiens
aactatggtaaaggg

SEQ ID NO: 1467433 - DNA, 15 bp, Homo sapiens
actatggtaaagggc

SEQ ID NO: 1467434 - DNA, 15 bp, Homo sapiens
ctatggtaaagggct

SEQ ID NO: 1467435 - DNA, 15 bp, Homo sapiens
tatggtaaagggctt

SEQ ID NO: 1467436 - DNA, 15 bp, Homo sapiens
atggtaaagggcttt

SEQ ID NO: 1467437 - DNA, 15 bp, Homo sapiens
tggtaaagggctttc

SEQ ID NO: 1467438 - DNA, 15 bp, Homo sapiens
ggtaaagggctttct

SEQ ID NO: 1467439 - DNA, 15 bp, Homo sapiens
gtaaagggctttcta

SEQ ID NO: 1467440 - DNA, 15 bp, Homo sapiens
taaagggctttctag

SEQ ID NO: 1467441 - DNA, 15 bp, Homo sapiens
aaagggctttctagg

SEQ ID NO: 1467442 - DNA, 15 bp, Homo sapiens
aagggctttctagga

SEQ ID NO: 1467443 - DNA, 15 bp, Homo sapiens
agggctttctaggag

SEQ ID NO: 1467444 - DNA, 15 bp, Homo sapiens
gggctttctaggaga

SEQ ID NO: 1467445 - DNA, 15 bp, Homo sapiens
ggctttctaggagag

SEQ ID NO: 1467446 - DNA, 15 bp, Homo sapiens
gctttctaggagagt

SEQ ID NO: 1467447 - DNA, 15 bp, Homo sapiens
ctttctaggagagtg

SEQ ID NO: 1467448 - DNA, 15 bp, Homo sapiens
tttctaggagagtgg

SEQ ID NO: 1467449 - DNA, 15 bp, Homo sapiens
ttctaggagagtgga

SEQ ID NO: 1467450 - DNA, 15 bp, Homo sapiens
tctaggagagtggag

SEQ ID NO: 1467451 - DNA, 15 bp, Homo sapiens
ctaggagagtggagg

SEQ ID NO: 1467452 - DNA, 15 bp, Homo sapiens
taggagagtggaggg

SEQ ID NO: 1467453 - DNA, 15 bp, Homo sapiens
aggagagtggagggt

SEQ ID NO: 1467454 - DNA, 15 bp, Homo sapiens
ggagagtggagggta

SEQ ID NO: 1467455 - DNA, 15 bp, Homo sapiens
gagagtggagggtac

SEQ ID NO: 1467456 - DNA, 15 bp, Homo sapiens
agagtggagggtact

SEQ ID NO: 1467457 - DNA, 15 bp, Homo sapiens
gagtggagggtactt

SEQ ID NO: 1467458 - DNA, 15 bp, Homo sapiens
agtggagggtacttt

SEQ ID NO: 1467459 - DNA, 15 bp, Homo sapiens
gtggagggtactttg

SEQ ID NO: 1467460 - DNA, 15 bp, Homo sapiens
tggagggtactttgg

SEQ ID NO: 1467461 - DNA, 15 bp, Homo sapiens
ggagggtactttggg

SEQ ID NO: 1467462 - DNA, 15 bp, Homo sapiens
gagggtactttgggg

SEQ ID NO: 1467463 - DNA, 15 bp, Homo sapiens
agggtactttgggga

SEQ ID NO: 1467464 - DNA, 15 bp, Homo sapiens
gggtactttggggag

SEQ ID NO: 1467465 - DNA, 15 bp, Homo sapiens
ggtactttggggagg

SEQ ID NO: 1467466 - DNA, 15 bp, Homo sapiens
gtactttggggagga

SEQ ID NO: 1467467 - DNA, 15 bp, Homo sapiens
tactttggggaggaa

SEQ ID NO: 1467468 - DNA, 15 bp, Homo sapiens
actttggggaggaaa

SEQ ID NO: 1467469 - DNA, 15 bp, Homo sapiens
ctttggggaggaaag

SEQ ID NO: 1467470 - DNA, 15 bp, Homo sapiens
tttggggaggaaagt

SEQ ID NO: 1467471 - DNA, 15 bp, Homo sapiens
ttggggaggaaagtg

SEQ ID NO: 1467472 - DNA, 15 bp, Homo sapiens
tggggaggaaagtgt

SEQ ID NO: 1467473 - DNA, 15 bp, Homo sapiens
ggggaggaaagtgta

SEQ ID NO: 1467474 - DNA, 15 bp, Homo sapiens
gggaggaaagtgtac

SEQ ID NO: 1467475 - DNA, 15 bp, Homo sapiens
ggaggaaagtgtaca

SEQ ID NO: 1467476 - DNA, 15 bp, Homo sapiens
gaggaaagtgtacag

SEQ ID NO: 1467477 - DNA, 15 bp, Homo sapiens
aggaaagtgtacagg

SEQ ID NO: 1467478 - DNA, 15 bp, Homo sapiens
ggaaagtgtacaggt

SEQ ID NO: 1467479 - DNA, 15 bp, Homo sapiens
gaaagtgtacaggtg

SEQ ID NO: 1467480 - DNA, 15 bp, Homo sapiens
aaagtgtacaggtga

SEQ ID NO: 1467481 - DNA, 15 bp, Homo sapiens
aagtgtacaggtgat

SEQ ID NO: 1467482 - DNA, 15 bp, Homo sapiens
agtgtacaggtgatg

SEQ ID NO: 1467483 - DNA, 15 bp, Homo sapiens
gtgtacaggtgatgg

SEQ ID NO: 1467484 - DNA, 15 bp, Homo sapiens
tgtacaggtgatgga

SEQ ID NO: 1467485 - DNA, 15 bp, Homo sapiens
gtacaggtgatggag

SEQ ID NO: 1467486 - DNA, 15 bp, Homo sapiens
tacaggtgatggaga

SEQ ID NO: 1467487 - DNA, 15 bp, Homo sapiens
acaggtgatggagag

SEQ ID NO: 1467488 - DNA, 15 bp, Homo sapiens
caggtgatggagagg

SEQ ID NO: 1467489 - DNA, 15 bp, Homo sapiens
aggtgatggagagga

SEQ ID NO: 1467490 - DNA, 15 bp, Homo sapiens
ggtgatggagaggat

SEQ ID NO: 1467491 - DNA, 15 bp, Homo sapiens
gtgatggagaggatg

SEQ ID NO: 1467492 - DNA, 15 bp, Homo sapiens
tgatggagaggatgg

SEQ ID NO: 1467493 - DNA, 15 bp, Homo sapiens
gatggagaggatggg

SEQ ID NO: 1467494 - DNA, 15 bp, Homo sapiens
atggagaggatggga

SEQ ID NO: 1467495 - DNA, 15 bp, Homo sapiens
tggagaggatgggag

SEQ ID NO: 1467496 - DNA, 15 bp, Homo sapiens
ggagaggatgggagt

SEQ ID NO: 1467497 - DNA, 15 bp, Homo sapiens
gagaggatgggagtg

SEQ ID NO: 1467498 - DNA, 15 bp, Homo sapiens
agaggatgggagtgg

SEQ ID NO: 1467499 - DNA, 15 bp, Homo sapiens
gaggatgggagtgga

SEQ ID NO: 1467500 - DNA, 15 bp, Homo sapiens
aggatgggagtggaa

SEQ ID NO: 1467501 - DNA, 15 bp, Homo sapiens
ggatgggagtggaaa

SEQ ID NO: 1467502 - DNA, 15 bp, Homo sapiens
gatgggagtggaaag

SEQ ID NO: 1467503 - DNA, 15 bp, Homo sapiens
atgggagtggaaaga

SEQ ID NO: 1467504 - DNA, 15 bp, Homo sapiens
tgggagtggaaagac

SEQ ID NO: 1467505 - DNA, 15 bp, Homo sapiens
gggagtggaaagact

SEQ ID NO: 1467506 - DNA, 15 bp, Homo sapiens
ggagtggaaagactg

SEQ ID NO: 1467507 - DNA, 15 bp, Homo sapiens
gagtggaaagactga

SEQ ID NO: 1467508 - DNA, 15 bp, Homo sapiens
agtggaaagactgaa

SEQ ID NO: 1467509 - DNA, 15 bp, Homo sapiens
caatattttaggaaa

SEQ ID NO: 1467510 - DNA, 15 bp, Homo sapiens
aatattttaggaaag

SEQ ID NO: 1467511 - DNA, 15 bp, Homo sapiens
atattttaggaaagg

SEQ ID NO: 1467512 - DNA, 15 bp, Homo sapiens
tattttaggaaaggt

SEQ ID NO: 1467513 - DNA, 15 bp, Homo sapiens
attttaggaaaggtc

SEQ ID NO: 1467514 - DNA, 15 bp, Homo sapiens
ttttaggaaaggtca

SEQ ID NO: 1467515 - DNA, 15 bp, Homo sapiens
tttaggaaaggtcat

SEQ ID NO: 1467516 - DNA, 15 bp, Homo sapiens
ttaggaaaggtcata

SEQ ID NO: 1467517 - DNA, 15 bp, Homo sapiens
taggaaaggtcatat

SEQ ID NO: 1467518 - DNA, 15 bp, Homo sapiens
aggaaaggtcatatt

SEQ ID NO: 1467519 - DNA, 15 bp, Homo sapiens
ggaaaggtcatattg

SEQ ID NO: 1467520 - DNA, 15 bp, Homo sapiens
gaaaggtcatattgc

SEQ ID NO: 1467521 - DNA, 15 bp, Homo sapiens
aaaggtcatattgct

SEQ ID NO: 1467522 - DNA, 15 bp, Homo sapiens
aaggtcatattgctg

SEQ ID NO: 1467523 - DNA, 15 bp, Homo sapiens
aggtcatattgctgt

SEQ ID NO: 1467524 - DNA, 15 bp, Homo sapiens
ggtcatattgctgtc

SEQ ID NO: 1467525 - DNA, 15 bp, Homo sapiens
gtcatattgctgtct

SEQ ID NO: 1467526 - DNA, 15 bp, Homo sapiens
tcatattgctgtctt

SEQ ID NO: 1467527 - DNA, 15 bp, Homo sapiens
catattgctgtcttt

SEQ ID NO: 1467528 - DNA, 15 bp, Homo sapiens
atattgctgtctttc

SEQ ID NO: 1467529 - DNA, 15 bp, Homo sapiens
tattgctgtctttca

SEQ ID NO: 1467530 - DNA, 15 bp, Homo sapiens
attgctgtctttcac

SEQ ID NO: 1467531 - DNA, 15 bp, Homo sapiens
ttgctgtctttcacg

SEQ ID NO: 1467532 - DNA, 15 bp, Homo sapiens
tgctgtctttcacgg

SEQ ID NO: 1467533 - DNA, 15 bp, Homo sapiens
gctgtctttcacggt

SEQ ID NO: 1467534 - DNA, 15 bp, Homo sapiens
ctgtctttcacggta

SEQ ID NO: 1467535 - DNA, 15 bp, Homo sapiens
tgtctttcacggtac

SEQ ID NO: 1467536 - DNA, 15 bp, Homo sapiens
gtctttcacggtaca

SEQ ID NO: 1467537 - DNA, 15 bp, Homo sapiens
tctttcacggtacac

SEQ ID NO: 1467538 - DNA, 15 bp, Homo sapiens
ctttcacggtacact

SEQ ID NO: 1467539 - DNA, 15 bp, Homo sapiens
tttcacggtacactg

SEQ ID NO: 1467540 - DNA, 15 bp, Homo sapiens
ttcacggtacactgc

SEQ ID NO: 1467541 - DNA, 15 bp, Homo sapiens
tcacggtacactgca

SEQ ID NO: 1467542 - DNA, 15 bp, Homo sapiens
cacggtacactgcac

SEQ ID NO: 1467543 - DNA, 15 bp, Homo sapiens
acggtacactgcaca

SEQ ID NO: 1467544 - DNA, 15 bp, Homo sapiens
cggtacactgcacaa

SEQ ID NO: 1467545 - DNA, 15 bp, Homo sapiens
ggtacactgcacaac

SEQ ID NO: 1467546 - DNA, 15 bp, Homo sapiens
gtacactgcacaacc

SEQ ID NO: 1467547 - DNA, 15 bp, Homo sapiens
tacactgcacaacca

SEQ ID NO: 1467548 - DNA, 15 bp, Homo sapiens
acactgcacaaccaa

SEQ ID NO: 1467549 - DNA, 15 bp, Homo sapiens
cactgcacaaccaag

SEQ ID NO: 1467550 - DNA, 15 bp, Homo sapiens
actgcacaaccaagt

SEQ ID NO: 1467551 - DNA, 15 bp, Homo sapiens
ctgcacaaccaagta

SEQ ID NO: 1467552 - DNA, 15 bp, Homo sapiens
tgcacaaccaagtat

SEQ ID NO: 1467553 - DNA, 15 bp, Homo sapiens
gcacaaccaagtatg

SEQ ID NO: 1467554 - DNA, 15 bp, Homo sapiens
cacaaccaagtatga

SEQ ID NO: 1467555 - DNA, 15 bp, Homo sapiens
acaaccaagtatgat

SEQ ID NO: 1467556 - DNA, 15 bp, Homo sapiens
caaccaagtatgatt

SEQ ID NO: 1467557 - DNA, 15 bp, Homo sapiens
aaccaagtatgatta

SEQ ID NO: 1467558 - DNA, 15 bp, Homo sapiens
accaagtatgattat

SEQ ID NO: 1467559 - DNA, 15 bp, Homo sapiens
ccaagtatgattatg

SEQ ID NO: 1467560 - DNA, 15 bp, Homo sapiens
caagtatgattatgt

SEQ ID NO: 1467561 - DNA, 15 bp, Homo sapiens
aagtatgattatgtg

SEQ ID NO: 1467562 - DNA, 15 bp, Homo sapiens
agtatgattatgtga

SEQ ID NO: 1467563 - DNA, 15 bp, Homo sapiens
gtatgattatgtgac

SEQ ID NO: 1467564 - DNA, 15 bp, Homo sapiens
tatgattatgtgacc

SEQ ID NO: 1467565 - DNA, 15 bp, Homo sapiens
atgattatgtgacca

SEQ ID NO: 1467566 - DNA, 15 bp, Homo sapiens
tgattatgtgaccag

SEQ ID NO: 1467567 - DNA, 15 bp, Homo sapiens
gattatgtgaccaga

SEQ ID NO: 1467568 - DNA, 15 bp, Homo sapiens
attatgtgaccagaa

SEQ ID NO: 1467569 - DNA, 15 bp, Homo sapiens
ttatgtgaccagaag

SEQ ID NO: 1467570 - DNA, 15 bp, Homo sapiens
tatgtgaccagaagt

SEQ ID NO: 1467571 - DNA, 15 bp, Homo sapiens
atgtgaccagaagtg

SEQ ID NO: 1467572 - DNA, 15 bp, Homo sapiens
tgtgaccagaagtga

SEQ ID NO: 1467573 - DNA, 15 bp, Homo sapiens
gtgaccagaagtgaa

SEQ ID NO: 1467574 - DNA, 15 bp, Homo sapiens
tgaccagaagtgaag

SEQ ID NO: 1467575 - DNA, 15 bp, Homo sapiens
gaccagaagtgaagg

SEQ ID NO: 1467576 - DNA, 15 bp, Homo sapiens
accagaagtgaaggg

SEQ ID NO: 1467577 - DNA, 15 bp, Homo sapiens
ccagaagtgaaggga

SEQ ID NO: 1467578 - DNA, 15 bp, Homo sapiens
cagaagtgaagggaa

SEQ ID NO: 1467579 - DNA, 15 bp, Homo sapiens
agaagtgaagggaag

SEQ ID NO: 1467580 - DNA, 15 bp, Homo sapiens
gaagtgaagggaagg

SEQ ID NO: 1467581 - DNA, 15 bp, Homo sapiens
aagtgaagggaagga

SEQ ID NO: 1467582 - DNA, 15 bp, Homo sapiens
agtgaagggaaggag

SEQ ID NO: 1467583 - DNA, 15 bp, Homo sapiens
gtgaagggaaggaga

SEQ ID NO: 1467584 - DNA, 15 bp, Homo sapiens
tgaagggaaggagaa

SEQ ID NO: 1467585 - DNA, 15 bp, Homo sapiens
gaagggaaggagaac

SEQ ID NO: 1467586 - DNA, 15 bp, Homo sapiens
aagggaaggagaaca

SEQ ID NO: 1467587 - DNA, 15 bp, Homo sapiens
agggaaggagaacat

SEQ ID NO: 1467588 - DNA, 15 bp, Homo sapiens
gggaaggagaacatt

SEQ ID NO: 1467589 - DNA, 15 bp, Homo sapiens
ggaaggagaacattt

SEQ ID NO: 1467590 - DNA, 15 bp, Homo sapiens
gaaggagaacatttg

SEQ ID NO: 1467591 - DNA, 15 bp, Homo sapiens
aaggagaacatttgc

SEQ ID NO: 1467592 - DNA, 15 bp, Homo sapiens
aggagaacatttgcc

SEQ ID NO: 1467593 - DNA, 15 bp, Homo sapiens
ggagaacatttgccc

SEQ ID NO: 1467594 - DNA, 15 bp, Homo sapiens
gagaacatttgccca

SEQ ID NO: 1467595 - DNA, 15 bp, Homo sapiens
agaacatttgcccat

SEQ ID NO: 1467596 - DNA, 15 bp, Homo sapiens
gaacatttgcccata

SEQ ID NO: 1467597 - DNA, 15 bp, Homo sapiens
aacatttgcccatat

SEQ ID NO: 1467598 - DNA, 15 bp, Homo sapiens
acatttgcccatatt

SEQ ID NO: 1467599 - DNA, 15 bp, Homo sapiens
catttgcccatattc

SEQ ID NO: 1467600 - DNA, 15 bp, Homo sapiens
atttgcccatattct

SEQ ID NO: 1467601 - DNA, 15 bp, Homo sapiens
tttgcccatattcta

SEQ ID NO: 1467602 - DNA, 15 bp, Homo sapiens
ttgcccatattctac

SEQ ID NO: 1467603 - DNA, 15 bp, Homo sapiens
tgcccatattctacc

SEQ ID NO: 1467604 - DNA, 15 bp, Homo sapiens
gcccatattctaccc

SEQ ID NO: 1467605 - DNA, 15 bp, Homo sapiens
cccatattctaccca

SEQ ID NO: 1467606 - DNA, 15 bp, Homo sapiens
ccatattctacccac

SEQ ID NO: 1467607 - DNA, 15 bp, Homo sapiens
catattctacccaca

SEQ ID NO: 1467608 - DNA, 15 bp, Homo sapiens
atattctacccacac

SEQ ID NO: 1467609 - DNA, 15 bp, Homo sapiens
tattctacccacact

SEQ ID NO: 1467610 - DNA, 15 bp, Homo sapiens
attctacccacactg

SEQ ID NO: 1467611 - DNA, 15 bp, Homo sapiens
ttctacccacactga

SEQ ID NO: 1467612 - DNA, 15 bp, Homo sapiens
tctacccacactgaa

SEQ ID NO: 1467613 - DNA, 15 bp, Homo sapiens
ctacccacactgaag

SEQ ID NO: 1467614 - DNA, 15 bp, Homo sapiens
tacccacactgaagt

SEQ ID NO: 1467615 - DNA, 15 bp, Homo sapiens
acccacactgaagta

SEQ ID NO: 1467616 - DNA, 15 bp, Homo sapiens
cccacactgaagtag

SEQ ID NO: 1467617 - DNA, 15 bp, Homo sapiens
ccacactgaagtagc

SEQ ID NO: 1467618 - DNA, 15 bp, Homo sapiens
cacactgaagtagct

SEQ ID NO: 1467619 - DNA, 15 bp, Homo sapiens
acactgaagtagctc

SEQ ID NO: 1467620 - DNA, 15 bp, Homo sapiens
cactgaagtagctca

SEQ ID NO: 1467621 - DNA, 15 bp, Homo sapiens
actgaagtagctcaa

SEQ ID NO: 1467622 - DNA, 15 bp, Homo sapiens
ctgaagtagctcaaa

SEQ ID NO: 1467623 - DNA, 15 bp, Homo sapiens
tgaagtagctcaaaa

SEQ ID NO: 1467624 - DNA, 15 bp, Homo sapiens
gaagtagctcaaaaa

SEQ ID NO: 1467625 - DNA, 15 bp, Homo sapiens
aagtagctcaaaaat

SEQ ID NO: 1467626 - DNA, 15 bp, Homo sapiens
agtagctcaaaaatg

SEQ ID NO: 1467627 - DNA, 15 bp, Homo sapiens
gtagctcaaaaatga

SEQ ID NO: 1467628 - DNA, 15 bp, Homo sapiens
tagctcaaaaatgaa

SEQ ID NO: 1467629 - DNA, 15 bp, Homo sapiens
agctcaaaaatgaag

SEQ ID NO: 1467630 - DNA, 15 bp, Homo sapiens
gctcaaaaatgaaga

SEQ ID NO: 1467631 - DNA, 15 bp, Homo sapiens
ctcaaaaatgaagag

SEQ ID NO: 1467632 - DNA, 15 bp, Homo sapiens
tcaaaaatgaagaga

SEQ ID NO: 1467633 - DNA, 15 bp, Homo sapiens
caaaaatgaagagat

SEQ ID NO: 1467634 - DNA, 15 bp, Homo sapiens
aaaaatgaagagatg

SEQ ID NO: 1467635 - DNA, 15 bp, Homo sapiens
aaaatgaagagatga

SEQ ID NO: 1467636 - DNA, 15 bp, Homo sapiens
aaatgaagagatgaa

SEQ ID NO: 1467637 - DNA, 15 bp, Homo sapiens
aatgaagagatgaag

SEQ ID NO: 1467638 - DNA, 15 bp, Homo sapiens
atgaagagatgaaga

SEQ ID NO: 1467639 - DNA, 15 bp, Homo sapiens
tgaagagatgaagaa

SEQ ID NO: 1467640 - DNA, 15 bp, Homo sapiens
gaagagatgaagaaa

SEQ ID NO: 1467641 - DNA, 15 bp, Homo sapiens
aagagatgaagaaag

SEQ ID NO: 1467642 - DNA, 15 bp, Homo sapiens
agagatgaagaaagg

SEQ ID NO: 1467643 - DNA, 15 bp, Homo sapiens
gagatgaagaaagga

SEQ ID NO: 1467644 - DNA, 15 bp, Homo sapiens
agatgaagaaaggaa

SEQ ID NO: 1467645 - DNA, 15 bp, Homo sapiens
gatgaagaaaggaaa

SEQ ID NO: 1467646 - DNA, 15 bp, Homo sapiens
atgaagaaaggaaaa

SEQ ID NO: 1467647 - DNA, 15 bp, Homo sapiens
tgaagaaaggaaaat

SEQ ID NO: 1467648 - DNA, 15 bp, Homo sapiens
gaagaaaggaaaatg

SEQ ID NO: 1467649 - DNA, 15 bp, Homo sapiens
gaaaggaaaatggag

SEQ ID NO: 1467650 - DNA, 15 bp, Homo sapiens
aaaggaaaatggagt

SEQ ID NO: 1467651 - DNA, 15 bp, Homo sapiens
aaggaaaatggagtt

SEQ ID NO: 1467652 - DNA, 15 bp, Homo sapiens
aggaaaatggagttg

SEQ ID NO: 1467653 - DNA, 15 bp, Homo sapiens
ggaaaatggagttga

SEQ ID NO: 1467654 - DNA, 15 bp, Homo sapiens
gaaaatggagttgac

SEQ ID NO: 1467655 - DNA, 15 bp, Homo sapiens
aaaatggagttgacc

SEQ ID NO: 1467656 - DNA, 15 bp, Homo sapiens
aaatggagttgacca

SEQ ID NO: 1467657 - DNA, 15 bp, Homo sapiens
aatggagttgaccat

SEQ ID NO: 1467658 - DNA, 15 bp, Homo sapiens
atggagttgaccatt

SEQ ID NO: 1467659 - DNA, 15 bp, Homo sapiens
tggagttgaccattt

SEQ ID NO: 1467660 - DNA, 15 bp, Homo sapiens
ggagttgaccatttc

SEQ ID NO: 1467661 - DNA, 15 bp, Homo sapiens
gagttgaccatttcc

SEQ ID NO: 1467662 - DNA, 15 bp, Homo sapiens
agttgaccatttcca

SEQ ID NO: 1467663 - DNA, 15 bp, Homo sapiens
gttgaccatttccat

SEQ ID NO: 1467664 - DNA, 15 bp, Homo sapiens
ttgaccatttccatt

SEQ ID NO: 1467665 - DNA, 15 bp, Homo sapiens
tgaccatttccattt

SEQ ID NO: 1467666 - DNA, 15 bp, Homo sapiens
gaccatttccattta

SEQ ID NO: 1467667 - DNA, 15 bp, Homo sapiens
accatttccatttaa

SEQ ID NO: 1467668 - DNA, 15 bp, Homo sapiens
ccatttccatttaag

SEQ ID NO: 1467669 - DNA, 15 bp, Homo sapiens
catttccatttaagt

SEQ ID NO: 1467670 - DNA, 15 bp, Homo sapiens
atttccatttaagtg

SEQ ID NO: 1467671 - DNA, 15 bp, Homo sapiens
tttccatttaagtgc

SEQ ID NO: 1467672 - DNA, 15 bp, Homo sapiens
ttccatttaagtgct

SEQ ID NO: 1467673 - DNA, 15 bp, Homo sapiens
tccatttaagtgctc

SEQ ID NO: 1467674 - DNA, 15 bp, Homo sapiens
ccatttaagtgctca

SEQ ID NO: 1467675 - DNA, 15 bp, Homo sapiens
catttaagtgctcat

SEQ ID NO: 1467676 - DNA, 15 bp, Homo sapiens
atttaagtgctcatt

SEQ ID NO: 1467677 - DNA, 15 bp, Homo sapiens
tttaagtgctcattc

SEQ ID NO: 1467678 - DNA, 15 bp, Homo sapiens
ttaagtgctcattca

SEQ ID NO: 1467679 - DNA, 15 bp, Homo sapiens
taagtgctcattcag

SEQ ID NO: 1467680 - DNA, 15 bp, Homo sapiens
aagtgctcattcaga

SEQ ID NO: 1467681 - DNA, 15 bp, Homo sapiens
agtgctcattcagac

SEQ ID NO: 1467682 - DNA, 15 bp, Homo sapiens
gtgctcattcagaca

SEQ ID NO: 1467683 - DNA, 15 bp, Homo sapiens
tgctcattcagacat

SEQ ID NO: 1467684 - DNA, 15 bp, Homo sapiens
gctcattcagacatt

SEQ ID NO: 1467685 - DNA, 15 bp, Homo sapiens
ctcattcagacattt

SEQ ID NO: 1467686 - DNA, 15 bp, Homo sapiens
tcattcagacattta

SEQ ID NO: 1467687 - DNA, 15 bp, Homo sapiens
cattcagacatttag

SEQ ID NO: 1467688 - DNA, 15 bp, Homo sapiens
attcagacatttagt

SEQ ID NO: 1467689 - DNA, 15 bp, Homo sapiens
ttcagacatttagta

SEQ ID NO: 1467690 - DNA, 15 bp, Homo sapiens
tcagacatttagtat

SEQ ID NO: 1467691 - DNA, 15 bp, Homo sapiens
cagacatttagtatt

SEQ ID NO: 1467692 - DNA, 15 bp, Homo sapiens
agacatttagtatta

SEQ ID NO: 1467693 - DNA, 15 bp, Homo sapiens
gacatttagtattaa

SEQ ID NO: 1467694 - DNA, 15 bp, Homo sapiens
acatttagtattaaa

SEQ ID NO: 1467695 - DNA, 15 bp, Homo sapiens
catttagtattaaaa

SEQ ID NO: 1467696 - DNA, 15 bp, Homo sapiens
atttagtattaaaat

SEQ ID NO: 1467697 - DNA, 15 bp, Homo sapiens
tttagtattaaaatg

SEQ ID NO: 1467698 - DNA, 15 bp, Homo sapiens
ttagtattaaaatga

SEQ ID NO: 1467699 - DNA, 15 bp, Homo sapiens
tagtattaaaatgat

SEQ ID NO: 1467700 - DNA, 15 bp, Homo sapiens
agtattaaaatgatg

SEQ ID NO: 1467701 - DNA, 15 bp, Homo sapiens
gtattaaaatgatga

SEQ ID NO: 1467702 - DNA, 15 bp, Homo sapiens
tattaaaatgatgaa

SEQ ID NO: 1467703 - DNA, 15 bp, Homo sapiens
attaaaatgatgaac

SEQ ID NO: 1467704 - DNA, 15 bp, Homo sapiens
ttaaaatgatgaact

SEQ ID NO: 1467705 - DNA, 15 bp, Homo sapiens
taaaatgatgaactt

SEQ ID NO: 1467706 - DNA, 15 bp, Homo sapiens
aaaatgatgaacttc

SEQ ID NO: 1467707 - DNA, 15 bp, Homo sapiens
aaatgatgaacttct

SEQ ID NO: 1467708 - DNA, 15 bp, Homo sapiens
aatgatgaacttctt

SEQ ID NO: 1467709 - DNA, 15 bp, Homo sapiens
atgatgaacttcttt

SEQ ID NO: 1467710 - DNA, 15 bp, Homo sapiens
tgatgaacttctttt

SEQ ID NO: 1467711 - DNA, 15 bp, Homo sapiens
gatgaacttcttttg

SEQ ID NO: 1467712 - DNA, 15 bp, Homo sapiens
atgaacttcttttgc

SEQ ID NO: 1467713 - DNA, 15 bp, Homo sapiens
tgaacttcttttgca

SEQ ID NO: 1467714 - DNA, 15 bp, Homo sapiens
aacttcttttgcaat

SEQ ID NO: 1467715 - DNA, 15 bp, Homo sapiens
acttcttttgcaatc

SEQ ID NO: 1467716 - DNA, 15 bp, Homo sapiens
cttcttttgcaatct

SEQ ID NO: 1467717 - DNA, 15 bp, Homo sapiens
ttcttttgcaatctt

SEQ ID NO: 1467718 - DNA, 15 bp, Homo sapiens
tcttttgcaatcttt

SEQ ID NO: 1467719 - DNA, 15 bp, Homo sapiens
cttttgcaatctttt

SEQ ID NO: 1467720 - DNA, 15 bp, Homo sapiens
ttttgcaatcttttt

SEQ ID NO: 1467721 - DNA, 15 bp, Homo sapiens
tttgcaatcttttta

SEQ ID NO: 1467722 - DNA, 15 bp, Homo sapiens
ttgcaatctttttat

SEQ ID NO: 1467723 - DNA, 15 bp, Homo sapiens
tgcaatctttttatt

SEQ ID NO: 1467724 - DNA, 15 bp, Homo sapiens
gcaatctttttattg

SEQ ID NO: 1467725 - DNA, 15 bp, Homo sapiens
caatctttttattga

SEQ ID NO: 1467726 - DNA, 15 bp, Homo sapiens
aatctttttattgaa

SEQ ID NO: 1467727 - DNA, 15 bp, Homo sapiens
atctttttattgaac

SEQ ID NO: 1467728 - DNA, 15 bp, Homo sapiens
tctttttattgaacg

SEQ ID NO: 1467729 - DNA, 15 bp, Homo sapiens
ctttttattgaacgc

SEQ ID NO: 1467730 - DNA, 15 bp, Homo sapiens
tttttattgaacgca

SEQ ID NO: 1467731 - DNA, 15 bp, Homo sapiens
ttttattgaacgcat

SEQ ID NO: 1467732 - DNA, 15 bp, Homo sapiens
tttattgaacgcatt

SEQ ID NO: 1467733 - DNA, 15 bp, Homo sapiens
ttattgaacgcattg

SEQ ID NO: 1467734 - DNA, 15 bp, Homo sapiens
tattgaacgcattga

SEQ ID NO: 1467735 - DNA, 15 bp, Homo sapiens
attgaacgcattgaa

SEQ ID NO: 1467736 - DNA, 15 bp, Homo sapiens
ttgaacgcattgaac

SEQ ID NO: 1467737 - DNA, 15 bp, Homo sapiens
tgaacgcattgaact

SEQ ID NO: 1467738 - DNA, 15 bp, Homo sapiens
gaacgcattgaacta

SEQ ID NO: 1467739 - DNA, 15 bp, Homo sapiens
aacgcattgaactag

SEQ ID NO: 1467740 - DNA, 15 bp, Homo sapiens
acgcattgaactagg

SEQ ID NO: 1467741 - DNA, 15 bp, Homo sapiens
cgcattgaactaggt

SEQ ID NO: 1467742 - DNA, 15 bp, Homo sapiens
gcattgaactaggta

SEQ ID NO: 1467743 - DNA, 15 bp, Homo sapiens
cattgaactaggtat

SEQ ID NO: 1467744 - DNA, 15 bp, Homo sapiens
attgaactaggtatt

SEQ ID NO: 1467745 - DNA, 15 bp, Homo sapiens
ttgaactaggtatta

SEQ ID NO: 1467746 - DNA, 15 bp, Homo sapiens
tgaactaggtattag

SEQ ID NO: 1467747 - DNA, 15 bp, Homo sapiens
gaactaggtattagg

SEQ ID NO: 1467748 - DNA, 15 bp, Homo sapiens
aactaggtattaggg

SEQ ID NO: 1467749 - DNA, 15 bp, Homo sapiens
actaggtattagggt

SEQ ID NO: 1467750 - DNA, 15 bp, Homo sapiens
ctaggtattagggtg

SEQ ID NO: 1467751 - DNA, 15 bp, Homo sapiens
taggtattagggtgt

SEQ ID NO: 1467752 - DNA, 15 bp, Homo sapiens
aggtattagggtgtt

SEQ ID NO: 1467753 - DNA, 15 bp, Homo sapiens
ggtattagggtgtta

SEQ ID NO: 1467754 - DNA, 15 bp, Homo sapiens
gtattagggtgttat

SEQ ID NO: 1467755 - DNA, 15 bp, Homo sapiens
tattagggtgttatc

SEQ ID NO: 1467756 - DNA, 15 bp, Homo sapiens
attagggtgttatcc

SEQ ID NO: 1467757 - DNA, 15 bp, Homo sapiens
ttagggtgttatcct

SEQ ID NO: 1467758 - DNA, 15 bp, Homo sapiens
tagggtgttatcctt

SEQ ID NO: 1467759 - DNA, 15 bp, Homo sapiens
agggtgttatccttg

SEQ ID NO: 1467760 - DNA, 15 bp, Homo sapiens
gggtgttatccttgg

SEQ ID NO: 1467761 - DNA, 15 bp, Homo sapiens
ggtgttatccttggc

SEQ ID NO: 1467762 - DNA, 15 bp, Homo sapiens
gtgttatccttggcc

SEQ ID NO: 1467763 - DNA, 15 bp, Homo sapiens
tgttatccttggcca

SEQ ID NO: 1467764 - DNA, 15 bp, Homo sapiens
gttatccttggccaa

SEQ ID NO: 1467765 - DNA, 15 bp, Homo sapiens
ttatccttggccaac

SEQ ID NO: 1467766 - DNA, 15 bp, Homo sapiens
tatccttggccaaca

SEQ ID NO: 1467767 - DNA, 15 bp, Homo sapiens
atccttggccaacag

SEQ ID NO: 1467768 - DNA, 15 bp, Homo sapiens
tccttggccaacaga

SEQ ID NO: 1467769 - DNA, 15 bp, Homo sapiens
ccttggccaacagaa

SEQ ID NO: 1467770 - DNA, 15 bp, Homo sapiens
cttggccaacagaat

SEQ ID NO: 1467771 - DNA, 15 bp, Homo sapiens
ttggccaacagaatt

SEQ ID NO: 1467772 - DNA, 15 bp, Homo sapiens
tggccaacagaattg

SEQ ID NO: 1467773 - DNA, 15 bp, Homo sapiens
ggccaacagaattgg

SEQ ID NO: 1467774 - DNA, 15 bp, Homo sapiens
gccaacagaattggg

SEQ ID NO: 1467775 - DNA, 15 bp, Homo sapiens
ccaacagaattggga

SEQ ID NO: 1467776 - DNA, 15 bp, Homo sapiens
caacagaattgggat

SEQ ID NO: 1467777 - DNA, 15 bp, Homo sapiens
aacagaattgggatt

SEQ ID NO: 1467778 - DNA, 15 bp, Homo sapiens
acagaattgggattt

SEQ ID NO: 1467779 - DNA, 15 bp, Homo sapiens
cagaattgggatttc

SEQ ID NO: 1467780 - DNA, 15 bp, Homo sapiens
agaattgggatttca

SEQ ID NO: 1467781 - DNA, 15 bp, Homo sapiens
gaattgggatttcaa

SEQ ID NO: 1467782 - DNA, 15 bp, Homo sapiens
aattgggatttcaaa

SEQ ID NO: 1467783 - DNA, 15 bp, Homo sapiens
attgggatttcaaag

SEQ ID NO: 1467784 - DNA, 15 bp, Homo sapiens
ttgggatttcaaagt

SEQ ID NO: 1467785 - DNA, 15 bp, Homo sapiens
tgggatttcaaagtt

SEQ ID NO: 1467786 - DNA, 15 bp, Homo sapiens
gggatttcaaagttc

SEQ ID NO: 1467787 - DNA, 15 bp, Homo sapiens
ggatttcaaagttca

SEQ ID NO: 1467788 - DNA, 15 bp, Homo sapiens
gatttcaaagttcat

SEQ ID NO: 1467789 - DNA, 15 bp, Homo sapiens
atttcaaagttcatg

SEQ ID NO: 1467790 - DNA, 15 bp, Homo sapiens
tttcaaagttcatga

SEQ ID NO: 1467791 - DNA, 15 bp, Homo sapiens
ttcaaagttcatgag

SEQ ID NO: 1467792 - DNA, 15 bp, Homo sapiens
tcaaagttcatgagg

SEQ ID NO: 1467793 - DNA, 15 bp, Homo sapiens
caaagttcatgaggc

SEQ ID NO: 1467794 - DNA, 15 bp, Homo sapiens
aaagttcatgaggcc

SEQ ID NO: 1467795 - DNA, 15 bp, Homo sapiens
aagttcatgaggccg

SEQ ID NO: 1467796 - DNA, 15 bp, Homo sapiens
agttcatgaggccga

SEQ ID NO: 1467797 - DNA, 15 bp, Homo sapiens
gttcatgaggccgaa

SEQ ID NO: 1467798 - DNA, 15 bp, Homo sapiens
ttcatgaggccgaac

SEQ ID NO: 1467799 - DNA, 15 bp, Homo sapiens
tcatgaggccgaaca

SEQ ID NO: 1467800 - DNA, 15 bp, Homo sapiens
catgaggccgaacat

SEQ ID NO: 1467801 - DNA, 15 bp, Homo sapiens
atgaggccgaacatt

SEQ ID NO: 1467802 - DNA, 15 bp, Homo sapiens
tgaggccgaacattg

SEQ ID NO: 1467803 - DNA, 15 bp, Homo sapiens
gaggccgaacattga

SEQ ID NO: 1467804 - DNA, 15 bp, Homo sapiens
aggccgaacattgaa

SEQ ID NO: 1467805 - DNA, 15 bp, Homo sapiens
ggccgaacattgaac

SEQ ID NO: 1467806 - DNA, 15 bp, Homo sapiens
gccgaacattgaact

SEQ ID NO: 1467807 - DNA, 15 bp, Homo sapiens
ccgaacattgaactg

SEQ ID NO: 1467808 - DNA, 15 bp, Homo sapiens
cgaacattgaactgc

SEQ ID NO: 1467809 - DNA, 15 bp, Homo sapiens
gaacattgaactgct

SEQ ID NO: 1467810 - DNA, 15 bp, Homo sapiens
aacattgaactgctc

SEQ ID NO: 1467811 - DNA, 15 bp, Homo sapiens
acattgaactgctca

SEQ ID NO: 1467812 - DNA, 15 bp, Homo sapiens
cattgaactgctcaa

SEQ ID NO: 1467813 - DNA, 15 bp, Homo sapiens
attgaactgctcaaa

SEQ ID NO: 1467814 - DNA, 15 bp, Homo sapiens
ttgaactgctcaaac

SEQ ID NO: 1467815 - DNA, 15 bp, Homo sapiens
tgaactgctcaaaca

SEQ ID NO: 1467816 - DNA, 15 bp, Homo sapiens
gaactgctcaaacac

SEQ ID NO: 1467817 - DNA, 15 bp, Homo sapiens
aactgctcaaacact

SEQ ID NO: 1467818 - DNA, 15 bp, Homo sapiens
actgctcaaacacta

SEQ ID NO: 1467819 - DNA, 15 bp, Homo sapiens
ctgctcaaacactag

SEQ ID NO: 1467820 - DNA, 15 bp, Homo sapiens
tgctcaaacactagt

SEQ ID NO: 1467821 - DNA, 15 bp, Homo sapiens
gctcaaacactagtc

SEQ ID NO: 1467822 - DNA, 15 bp, Homo sapiens
ctcaaacactagtct

SEQ ID NO: 1467823 - DNA, 15 bp, Homo sapiens
tcaaacactagtctg

SEQ ID NO: 1467824 - DNA, 15 bp, Homo sapiens
caaacactagtctgt

SEQ ID NO: 1467825 - DNA, 15 bp, Homo sapiens
aaacactagtctgta

SEQ ID NO: 1467826 - DNA, 15 bp, Homo sapiens
aacactagtctgtag

SEQ ID NO: 1467827 - DNA, 15 bp, Homo sapiens
acactagtctgtagt

SEQ ID NO: 1467828 - DNA, 15 bp, Homo sapiens
cactagtctgtagtt

SEQ ID NO: 1467829 - DNA, 15 bp, Homo sapiens
actagtctgtagttc

SEQ ID NO: 1467830 - DNA, 15 bp, Homo sapiens
ctagtctgtagttcc

SEQ ID NO: 1467831 - DNA, 15 bp, Homo sapiens
tagtctgtagttcct

SEQ ID NO: 1467832 - DNA, 15 bp, Homo sapiens
agtctgtagttccta

SEQ ID NO: 1467833 - DNA, 15 bp, Homo sapiens
gtctgtagttcctag

SEQ ID NO: 1467834 - DNA, 15 bp, Homo sapiens
tctgtagttcctagg

SEQ ID NO: 1467835 - DNA, 15 bp, Homo sapiens
ctgtagttcctaggg

SEQ ID NO: 1467836 - DNA, 15 bp, Homo sapiens
tgtagttcctaggga

SEQ ID NO: 1467837 - DNA, 15 bp, Homo sapiens
gtagttcctagggac

SEQ ID NO: 1467838 - DNA, 15 bp, Homo sapiens
tagttcctagggacc

SEQ ID NO: 1467839 - DNA, 15 bp, Homo sapiens
agttcctagggacca

SEQ ID NO: 1467840 - DNA, 15 bp, Homo sapiens
gttcctagggaccac

SEQ ID NO: 1467841 - DNA, 15 bp, Homo sapiens
ttcctagggaccaca

SEQ ID NO: 1467842 - DNA, 15 bp, Homo sapiens
tcctagggaccacaa

SEQ ID NO: 1467843 - DNA, 15 bp, Homo sapiens
cctagggaccacaat

SEQ ID NO: 1467844 - DNA, 15 bp, Homo sapiens
ctagggaccacaatc

SEQ ID NO: 1467845 - DNA, 15 bp, Homo sapiens
tagggaccacaatct

SEQ ID NO: 1467846 - DNA, 15 bp, Homo sapiens
agggaccacaatcta

SEQ ID NO: 1467847 - DNA, 15 bp, Homo sapiens
gggaccacaatctag

SEQ ID NO: 1467848 - DNA, 15 bp, Homo sapiens
ggaccacaatctagc

SEQ ID NO: 1467849 - DNA, 15 bp, Homo sapiens
gaccacaatctagct

SEQ ID NO: 1467850 - DNA, 15 bp, Homo sapiens
accacaatctagcta

SEQ ID NO: 1467851 - DNA, 15 bp, Homo sapiens
ccacaatctagctaa

SEQ ID NO: 1467852 - DNA, 15 bp, Homo sapiens
cacaatctagctaag

SEQ ID NO: 1467853 - DNA, 15 bp, Homo sapiens
acaatctagctaaga

SEQ ID NO: 1467854 - DNA, 15 bp, Homo sapiens
caatctagctaagat

SEQ ID NO: 1467855 - DNA, 15 bp, Homo sapiens
aatctagctaagatc

SEQ ID NO: 1467856 - DNA, 15 bp, Homo sapiens
atctagctaagatca

SEQ ID NO: 1467857 - DNA, 15 bp, Homo sapiens
tctagctaagatcag

SEQ ID NO: 1467858 - DNA, 15 bp, Homo sapiens
ctagctaagatcagc

SEQ ID NO: 1467859 - DNA, 15 bp, Homo sapiens
tagctaagatcagcc

SEQ ID NO: 1467860 - DNA, 15 bp, Homo sapiens
agctaagatcagccc

SEQ ID NO: 1467861 - DNA, 15 bp, Homo sapiens
gctaagatcagccct

SEQ ID NO: 1467862 - DNA, 15 bp, Homo sapiens
ctaagatcagcccta

SEQ ID NO: 1467863 - DNA, 15 bp, Homo sapiens
taagatcagccctac

SEQ ID NO: 1467864 - DNA, 15 bp, Homo sapiens
aagatcagccctact

SEQ ID NO: 1467865 - DNA, 15 bp, Homo sapiens
agatcagccctactg

SEQ ID NO: 1467866 - DNA, 15 bp, Homo sapiens
gatcagccctactgc

SEQ ID NO: 1467867 - DNA, 15 bp, Homo sapiens
atcagccctactgct

SEQ ID NO: 1467868 - DNA, 15 bp, Homo sapiens
tcagccctactgctt

SEQ ID NO: 1467869 - DNA, 15 bp, Homo sapiens
cagccctactgcttt

SEQ ID NO: 1467870 - DNA, 15 bp, Homo sapiens
agccctactgctttt

SEQ ID NO: 1467871 - DNA, 15 bp, Homo sapiens
gccctactgcttttt

SEQ ID NO: 1467872 - DNA, 15 bp, Homo sapiens
ccctactgctttttc

SEQ ID NO: 1467873 - DNA, 15 bp, Homo sapiens
cctactgctttttct

SEQ ID NO: 1467874 - DNA, 15 bp, Homo sapiens
ctactgctttttctc

SEQ ID NO: 1467875 - DNA, 15 bp, Homo sapiens
tactgctttttctcc

SEQ ID NO: 1467876 - DNA, 15 bp, Homo sapiens
actgctttttctcca

SEQ ID NO: 1467877 - DNA, 15 bp, Homo sapiens
ctgctttttctccat

SEQ ID NO: 1467878 - DNA, 15 bp, Homo sapiens
tgctttttctccatg

SEQ ID NO: 1467879 - DNA, 15 bp, Homo sapiens
gctttttctccatga

SEQ ID NO: 1467880 - DNA, 15 bp, Homo sapiens
ctttttctccatgac

SEQ ID NO: 1467881 - DNA, 15 bp, Homo sapiens
tttttctccatgaca

SEQ ID NO: 1467882 - DNA, 15 bp, Homo sapiens
ttttctccatgacaa

SEQ ID NO: 1467883 - DNA, 15 bp, Homo sapiens
tttctccatgacaac

SEQ ID NO: 1467884 - DNA, 15 bp, Homo sapiens
ttctccatgacaaca

SEQ ID NO: 1467885 - DNA, 15 bp, Homo sapiens
tctccatgacaacaa

SEQ ID NO: 1467886 - DNA, 15 bp, Homo sapiens
ctccatgacaacaaa

SEQ ID NO: 1467887 - DNA, 15 bp, Homo sapiens
tccatgacaacaaat

SEQ ID NO: 1467888 - DNA, 15 bp, Homo sapiens
ccatgacaacaaatc

SEQ ID NO: 1467889 - DNA, 15 bp, Homo sapiens
catgacaacaaatca

SEQ ID NO: 1467890 - DNA, 15 bp, Homo sapiens
atgacaacaaatcac

SEQ ID NO: 1467891 - DNA, 15 bp, Homo sapiens
tgacaacaaatcacc

SEQ ID NO: 1467892 - DNA, 15 bp, Homo sapiens
gacaacaaatcacca

SEQ ID NO: 1467893 - DNA, 15 bp, Homo sapiens
acaacaaatcaccac

SEQ ID NO: 1467894 - DNA, 15 bp, Homo sapiens
caacaaatcaccacc

SEQ ID NO: 1467895 - DNA, 15 bp, Homo sapiens
aacaaatcaccacca

SEQ ID NO: 1467896 - DNA, 15 bp, Homo sapiens
acaaatcaccaccaa

SEQ ID NO: 1467897 - DNA, 15 bp, Homo sapiens
caaatcaccaccaag

SEQ ID NO: 1467898 - DNA, 15 bp, Homo sapiens
aaatcaccaccaaga

SEQ ID NO: 1467899 - DNA, 15 bp, Homo sapiens
aatcaccaccaagac

SEQ ID NO: 1467900 - DNA, 15 bp, Homo sapiens
atcaccaccaagacc

SEQ ID NO: 1467901 - DNA, 15 bp, Homo sapiens
tcaccaccaagaccg

SEQ ID NO: 1467902 - DNA, 15 bp, Homo sapiens
caccaccaagaccga

SEQ ID NO: 1467903 - DNA, 15 bp, Homo sapiens
accaccaagaccgag

SEQ ID NO: 1467904 - DNA, 15 bp, Homo sapiens
ccaccaagaccgaga

SEQ ID NO: 1467905 - DNA, 15 bp, Homo sapiens
caccaagaccgagat

SEQ ID NO: 1467906 - DNA, 15 bp, Homo sapiens
accaagaccgagatg

SEQ ID NO: 1467907 - DNA, 15 bp, Homo sapiens
ccaagaccgagatgc

SEQ ID NO: 1467908 - DNA, 15 bp, Homo sapiens
caagaccgagatgct

SEQ ID NO: 1467909 - DNA, 15 bp, Homo sapiens
aagaccgagatgctg

SEQ ID NO: 1467910 - DNA, 15 bp, Homo sapiens
agaccgagatgctgt

SEQ ID NO: 1467911 - DNA, 15 bp, Homo sapiens
gaccgagatgctgta

SEQ ID NO: 1467912 - DNA, 15 bp, Homo sapiens
accgagatgctgtat

SEQ ID NO: 1467913 - DNA, 15 bp, Homo sapiens
ccgagatgctgtatt

SEQ ID NO: 1467914 - DNA, 15 bp, Homo sapiens
cgagatgctgtattg

SEQ ID NO: 1467915 - DNA, 15 bp, Homo sapiens
gagatgctgtattga

SEQ ID NO: 1467916 - DNA, 15 bp, Homo sapiens
agatgctgtattgaa

SEQ ID NO: 1467917 - DNA, 15 bp, Homo sapiens
gatgctgtattgaaa

SEQ ID NO: 1467918 - DNA, 15 bp, Homo sapiens
atgctgtattgaaag

SEQ ID NO: 1467919 - DNA, 15 bp, Homo sapiens
tgctgtattgaaaga

SEQ ID NO: 1467920 - DNA, 15 bp, Homo sapiens
gctgtattgaaagag

SEQ ID NO: 1467921 - DNA, 15 bp, Homo sapiens
ctgtattgaaagagc

SEQ ID NO: 1467922 - DNA, 15 bp, Homo sapiens
tgtattgaaagagca

SEQ ID NO: 1467923 - DNA, 15 bp, Homo sapiens
gtattgaaagagcat

SEQ ID NO: 1467924 - DNA, 15 bp, Homo sapiens
tattgaaagagcatg

SEQ ID NO: 1467925 - DNA, 15 bp, Homo sapiens
attgaaagagcatgc

SEQ ID NO: 1467926 - DNA, 15 bp, Homo sapiens
ttgaaagagcatgct

SEQ ID NO: 1467927 - DNA, 15 bp, Homo sapiens
tgaaagagcatgctg

SEQ ID NO: 1467928 - DNA, 15 bp, Homo sapiens
gaaagagcatgctgt

SEQ ID NO: 1467929 - DNA, 15 bp, Homo sapiens
aaagagcatgctgtg

SEQ ID NO: 1467930 - DNA, 15 bp, Homo sapiens
aagagcatgctgtgt

SEQ ID NO: 1467931 - DNA, 15 bp, Homo sapiens
agagcatgctgtgtt

SEQ ID NO: 1467932 - DNA, 15 bp, Homo sapiens
gagcatgctgtgttt

SEQ ID NO: 1467933 - DNA, 15 bp, Homo sapiens
agcatgctgtgtttt

SEQ ID NO: 1467934 - DNA, 15 bp, Homo sapiens
gcatgctgtgttttt

SEQ ID NO: 1467935 - DNA, 15 bp, Homo sapiens
catgctgtgtttttc

SEQ ID NO: 1467936 - DNA, 15 bp, Homo sapiens
atgctgtgtttttcc

SEQ ID NO: 1467937 - DNA, 15 bp, Homo sapiens
tgctgtgtttttcca

SEQ ID NO: 1467938 - DNA, 15 bp, Homo sapiens
gctgtgtttttccac

SEQ ID NO: 1467939 - DNA, 15 bp, Homo sapiens
ctgtgtttttccaca

SEQ ID NO: 1467940 - DNA, 15 bp, Homo sapiens
tgtgtttttccacac

SEQ ID NO: 1467941 - DNA, 15 bp, Homo sapiens
gtgtttttccacact

SEQ ID NO: 1467942 - DNA, 15 bp, Homo sapiens
tgtttttccacacta

SEQ ID NO: 1467943 - DNA, 15 bp, Homo sapiens
gtttttccacactaa

SEQ ID NO: 1467944 - DNA, 15 bp, Homo sapiens
tttttccacactaac

SEQ ID NO: 1467945 - DNA, 15 bp, Homo sapiens
ttttccacactaaca

SEQ ID NO: 1467946 - DNA, 15 bp, Homo sapiens
tttccacactaacac

SEQ ID NO: 1467947 - DNA, 15 bp, Homo sapiens
ttccacactaacacc

SEQ ID NO: 1467948 - DNA, 15 bp, Homo sapiens
tccacactaacacca

SEQ ID NO: 1467949 - DNA, 15 bp, Homo sapiens
ccacactaacaccac

SEQ ID NO: 1467950 - DNA, 15 bp, Homo sapiens
cacactaacaccaca

SEQ ID NO: 1467951 - DNA, 15 bp, Homo sapiens
acactaacaccacag

SEQ ID NO: 1467952 - DNA, 15 bp, Homo sapiens
cactaacaccacaga

SEQ ID NO: 1467953 - DNA, 15 bp, Homo sapiens
actaacaccacagag

SEQ ID NO: 1467954 - DNA, 15 bp, Homo sapiens
ctaacaccacagagt

SEQ ID NO: 1467955 - DNA, 15 bp, Homo sapiens
taacaccacagagtg

SEQ ID NO: 1467956 - DNA, 15 bp, Homo sapiens
aacaccacagagtga

SEQ ID NO: 1467957 - DNA, 15 bp, Homo sapiens
acaccacagagtgaa

SEQ ID NO: 1467958 - DNA, 15 bp, Homo sapiens
caccacagagtgaag

SEQ ID NO: 1467959 - DNA, 15 bp, Homo sapiens
accacagagtgaagg

SEQ ID NO: 1467960 - DNA, 15 bp, Homo sapiens
ccacagagtgaaggt

SEQ ID NO: 1467961 - DNA, 15 bp, Homo sapiens
cacagagtgaaggta

SEQ ID NO: 1467962 - DNA, 15 bp, Homo sapiens
acagagtgaaggtaa

SEQ ID NO: 1467963 - DNA, 15 bp, Homo sapiens
cagagtgaaggtaaa

SEQ ID NO: 1467964 - DNA, 15 bp, Homo sapiens
agagtgaaggtaaag

SEQ ID NO: 1467965 - DNA, 15 bp, Homo sapiens
gagtgaaggtaaaga

SEQ ID NO: 1467966 - DNA, 15 bp, Homo sapiens
agtgaaggtaaagag

SEQ ID NO: 1467967 - DNA, 15 bp, Homo sapiens
gtgaaggtaaagaga

SEQ ID NO: 1467968 - DNA, 15 bp, Homo sapiens
tgaaggtaaagagat

SEQ ID NO: 1467969 - DNA, 15 bp, Homo sapiens
gaaggtaaagagatt

SEQ ID NO: 1467970 - DNA, 15 bp, Homo sapiens
aaggtaaagagatta

SEQ ID NO: 1467971 - DNA, 15 bp, Homo sapiens
aggtaaagagattag

SEQ ID NO: 1467972 - DNA, 15 bp, Homo sapiens
ggtaaagagattaga

SEQ ID NO: 1467973 - DNA, 15 bp, Homo sapiens
gtaaagagattagag

SEQ ID NO: 1467974 - DNA, 15 bp, Homo sapiens
taaagagattagaga

SEQ ID NO: 1467975 - DNA, 15 bp, Homo sapiens
aaagagattagagag

SEQ ID NO: 1467976 - DNA, 15 bp, Homo sapiens
aagagattagagagc

SEQ ID NO: 1467977 - DNA, 15 bp, Homo sapiens
agagattagagagca

SEQ ID NO: 1467978 - DNA, 15 bp, Homo sapiens
gagattagagagcat

SEQ ID NO: 1467979 - DNA, 15 bp, Homo sapiens
agattagagagcatc

SEQ ID NO: 1467980 - DNA, 15 bp, Homo sapiens
gattagagagcatct

SEQ ID NO: 1467981 - DNA, 15 bp, Homo sapiens
attagagagcatctc

SEQ ID NO: 1467982 - DNA, 15 bp, Homo sapiens
ttagagagcatctca

SEQ ID NO: 1467983 - DNA, 15 bp, Homo sapiens
tagagagcatctcaa

SEQ ID NO: 1467984 - DNA, 15 bp, Homo sapiens
agagagcatctcaaa

SEQ ID NO: 1467985 - DNA, 15 bp, Homo sapiens
gagagcatctcaaat

SEQ ID NO: 1467986 - DNA, 15 bp, Homo sapiens
agagcatctcaaatt

SEQ ID NO: 1467987 - DNA, 15 bp, Homo sapiens
gagcatctcaaattt

SEQ ID NO: 1467988 - DNA, 15 bp, Homo sapiens
agcatctcaaattta

SEQ ID NO: 1467989 - DNA, 15 bp, Homo sapiens
gcatctcaaatttat

SEQ ID NO: 1467990 - DNA, 15 bp, Homo sapiens
catctcaaatttata

SEQ ID NO: 1467991 - DNA, 15 bp, Homo sapiens
tcaaatttatatttc

SEQ ID NO: 1467992 - DNA, 15 bp, Homo sapiens
caaatttatatttca

SEQ ID NO: 1467993 - DNA, 15 bp, Homo sapiens
aaatttatatttcaa

SEQ ID NO: 1467994 - DNA, 15 bp, Homo sapiens
aatttatatttcaaa

SEQ ID NO: 1467995 - DNA, 15 bp, Homo sapiens
tttatatttcaaatt

SEQ ID NO: 1467996 - DNA, 15 bp, Homo sapiens
ttatatttcaaatta

SEQ ID NO: 1467997 - DNA, 15 bp, Homo sapiens
tatatttcaaattat

SEQ ID NO: 1467998 - DNA, 15 bp, Homo sapiens
atatttcaaattatg

SEQ ID NO: 1467999 - DNA, 15 bp, Homo sapiens
tatttcaaattatga

SEQ ID NO: 1468000 - DNA, 15 bp, Homo sapiens
atttcaaattatgaa

SEQ ID NO: 1468001 - DNA, 15 bp, Homo sapiens
tttcaaattatgaag

SEQ ID NO: 1468002 - DNA, 15 bp, Homo sapiens
ttcaaattatgaaga

SEQ ID NO: 1468003 - DNA, 15 bp, Homo sapiens
tcaaattatgaagaa

SEQ ID NO: 1468004 - DNA, 15 bp, Homo sapiens
caaattatgaagaac

SEQ ID NO: 1468005 - DNA, 15 bp, Homo sapiens
aaattatgaagaaca

SEQ ID NO: 1468006 - DNA, 15 bp, Homo sapiens
aattatgaagaacat

SEQ ID NO: 1468007 - DNA, 15 bp, Homo sapiens
attatgaagaacatc

SEQ ID NO: 1468008 - DNA, 15 bp, Homo sapiens
ttatgaagaacatct

SEQ ID NO: 1468009 - DNA, 15 bp, Homo sapiens
tatgaagaacatctg

SEQ ID NO: 1468010 - DNA, 15 bp, Homo sapiens
atgaagaacatctga

SEQ ID NO: 1468011 - DNA, 15 bp, Homo sapiens
tgaagaacatctgac

SEQ ID NO: 1468012 - DNA, 15 bp, Homo sapiens
gaagaacatctgaca

SEQ ID NO: 1468013 - DNA, 15 bp, Homo sapiens
aagaacatctgacac

SEQ ID NO: 1468014 - DNA, 15 bp, Homo sapiens
agaacatctgacaca

SEQ ID NO: 1468015 - DNA, 15 bp, Homo sapiens
gaacatctgacacaa

SEQ ID NO: 1468016 - DNA, 15 bp, Homo sapiens
aacatctgacacaat

SEQ ID NO: 1468017 - DNA, 15 bp, Homo sapiens
acatctgacacaatg

SEQ ID NO: 1468018 - DNA, 15 bp, Homo sapiens
catctgacacaatga

SEQ ID NO: 1468019 - DNA, 15 bp, Homo sapiens
atctgacacaatgaa

SEQ ID NO: 1468020 - DNA, 15 bp, Homo sapiens
tctgacacaatgaaa

SEQ ID NO: 1468021 - DNA, 15 bp, Homo sapiens
ctgacacaatgaaag

SEQ ID NO: 1468022 - DNA, 15 bp, Homo sapiens
tgacacaatgaaagc

SEQ ID NO: 1468023 - DNA, 15 bp, Homo sapiens
gacacaatgaaagca

SEQ ID NO: 1468024 - DNA, 15 bp, Homo sapiens
acacaatgaaagcaa

SEQ ID NO: 1468025 - DNA, 15 bp, Homo sapiens
cacaatgaaagcaaa

SEQ ID NO: 1468026 - DNA, 15 bp, Homo sapiens
acaatgaaagcaaat

SEQ ID NO: 1468027 - DNA, 15 bp, Homo sapiens
caatgaaagcaaatg

SEQ ID NO: 1468028 - DNA, 15 bp, Homo sapiens
aatgaaagcaaatgc

SEQ ID NO: 1468029 - DNA, 15 bp, Homo sapiens
atgaaagcaaatgca

SEQ ID NO: 1468030 - DNA, 15 bp, Homo sapiens
tgaaagcaaatgcag

SEQ ID NO: 1468031 - DNA, 15 bp, Homo sapiens
gaaagcaaatgcagc

SEQ ID NO: 1468032 - DNA, 15 bp, Homo sapiens
aaagcaaatgcagcc

SEQ ID NO: 1468033 - DNA, 15 bp, Homo sapiens
aagcaaatgcagcct

SEQ ID NO: 1468034 - DNA, 15 bp, Homo sapiens
agcaaatgcagcctt

SEQ ID NO: 1468035 - DNA, 15 bp, Homo sapiens
gcaaatgcagccttg

SEQ ID NO: 1468036 - DNA, 15 bp, Homo sapiens
caaatgcagccttgc

SEQ ID NO: 1468037 - DNA, 15 bp, Homo sapiens
aaatgcagccttgca

SEQ ID NO: 1468038 - DNA, 15 bp, Homo sapiens
aatgcagccttgcag

SEQ ID NO: 1468039 - DNA, 15 bp, Homo sapiens
atgcagccttgcaga

SEQ ID NO: 1468040 - DNA, 15 bp, Homo sapiens
tgcagccttgcagaa

SEQ ID NO: 1468041 - DNA, 15 bp, Homo sapiens
gcagccttgcagaaa

SEQ ID NO: 1468042 - DNA, 15 bp, Homo sapiens
cagccttgcagaaaa

SEQ ID NO: 1468043 - DNA, 15 bp, Homo sapiens
agccttgcagaaaat

SEQ ID NO: 1468044 - DNA, 15 bp, Homo sapiens
gccttgcagaaaatt

SEQ ID NO: 1468045 - DNA, 15 bp, Homo sapiens
ccttgcagaaaattt

SEQ ID NO: 1468046 - DNA, 15 bp, Homo sapiens
cttgcagaaaattta

SEQ ID NO: 1468047 - DNA, 15 bp, Homo sapiens
ttgcagaaaatttat

SEQ ID NO: 1468048 - DNA, 15 bp, Homo sapiens
tgcagaaaatttatt

SEQ ID NO: 1468049 - DNA, 15 bp, Homo sapiens
gcagaaaatttattt

SEQ ID NO: 1468050 - DNA, 15 bp, Homo sapiens
cagaaaatttatttg

SEQ ID NO: 1468051 - DNA, 15 bp, Homo sapiens
agaaaatttatttgt

SEQ ID NO: 1468052 - DNA, 15 bp, Homo sapiens
gaaaatttatttgtc

SEQ ID NO: 1468053 - DNA, 15 bp, Homo sapiens
aaaatttatttgtct

SEQ ID NO: 1468054 - DNA, 15 bp, Homo sapiens
aaatttatttgtcta

SEQ ID NO: 1468055 - DNA, 15 bp, Homo sapiens
aatttatttgtctat

SEQ ID NO: 1468056 - DNA, 15 bp, Homo sapiens
atttatttgtctatc

SEQ ID NO: 1468057 - DNA, 15 bp, Homo sapiens
tttatttgtctatct

SEQ ID NO: 1468058 - DNA, 15 bp, Homo sapiens
ttatttgtctatctt

SEQ ID NO: 1468059 - DNA, 15 bp, Homo sapiens
tatttgtctatcttt

SEQ ID NO: 1468060 - DNA, 15 bp, Homo sapiens
atttgtctatctttg

SEQ ID NO: 1468061 - DNA, 15 bp, Homo sapiens
tttgtctatctttgt

SEQ ID NO: 1468062 - DNA, 15 bp, Homo sapiens
ttgtctatctttgtg

SEQ ID NO: 1468063 - DNA, 15 bp, Homo sapiens
tgtctatctttgtga

SEQ ID NO: 1468064 - DNA, 15 bp, Homo sapiens
gtctatctttgtgat

SEQ ID NO: 1468065 - DNA, 15 bp, Homo sapiens
tctatctttgtgatg

SEQ ID NO: 1468066 - DNA, 15 bp, Homo sapiens
ctatctttgtgatgt

SEQ ID NO: 1468067 - DNA, 15 bp, Homo sapiens
tatctttgtgatgtt

SEQ ID NO: 1468068 - DNA, 15 bp, Homo sapiens
atctttgtgatgttg

SEQ ID NO: 1468069 - DNA, 15 bp, Homo sapiens
tctttgtgatgttgg

SEQ ID NO: 1468070 - DNA, 15 bp, Homo sapiens
ctttgtgatgttgga

SEQ ID NO: 1468071 - DNA, 15 bp, Homo sapiens
tttgtgatgttggat

SEQ ID NO: 1468072 - DNA, 15 bp, Homo sapiens
ttgtgatgttggatt

SEQ ID NO: 1468073 - DNA, 15 bp, Homo sapiens
tgtgatgttggattg

SEQ ID NO: 1468074 - DNA, 15 bp, Homo sapiens
gtgatgttggattgt

SEQ ID NO: 1468075 - DNA, 15 bp, Homo sapiens
tgatgttggattgta

SEQ ID NO: 1468076 - DNA, 15 bp, Homo sapiens
gatgttggattgtat

SEQ ID NO: 1468077 - DNA, 15 bp, Homo sapiens
atgttggattgtata

SEQ ID NO: 1468078 - DNA, 15 bp, Homo sapiens
tgttggattgtataa

SEQ ID NO: 1468079 - DNA, 15 bp, Homo sapiens
gttggattgtataaa

SEQ ID NO: 1468080 - DNA, 15 bp, Homo sapiens
ttggattgtataaag

SEQ ID NO: 1468081 - DNA, 15 bp, Homo sapiens
tggattgtataaagg

SEQ ID NO: 1468082 - DNA, 15 bp, Homo sapiens
ggattgtataaaggg

SEQ ID NO: 1468083 - DNA, 15 bp, Homo sapiens
gattgtataaagggt

SEQ ID NO: 1468084 - DNA, 15 bp, Homo sapiens
attgtataaagggtt

SEQ ID NO: 1468085 - DNA, 15 bp, Homo sapiens
ttgtataaagggttt

SEQ ID NO: 1468086 - DNA, 15 bp, Homo sapiens
tgtataaagggtttg

SEQ ID NO: 1468087 - DNA, 15 bp, Homo sapiens
gtataaagggtttgg

SEQ ID NO: 1468088 - DNA, 15 bp, Homo sapiens
tataaagggtttgga

SEQ ID NO: 1468089 - DNA, 15 bp, Homo sapiens
ataaagggtttggac

SEQ ID NO: 1468090 - DNA, 15 bp, Homo sapiens
taaagggtttggaca

SEQ ID NO: 1468091 - DNA, 15 bp, Homo sapiens
aaagggtttggacat

SEQ ID NO: 1468092 - DNA, 15 bp, Homo sapiens
aagggtttggacata

SEQ ID NO: 1468093 - DNA, 15 bp, Homo sapiens
agggtttggacatac

SEQ ID NO: 1468094 - DNA, 15 bp, Homo sapiens
gggtttggacatact

SEQ ID NO: 1468095 - DNA, 15 bp, Homo sapiens
ggtttggacatactc

SEQ ID NO: 1468096 - DNA, 15 bp, Homo sapiens
gtttggacatactca

SEQ ID NO: 1468097 - DNA, 15 bp, Homo sapiens
tttggacatactcat

SEQ ID NO: 1468098 - DNA, 15 bp, Homo sapiens
ttggacatactcatt

SEQ ID NO: 1468099 - DNA, 15 bp, Homo sapiens
tggacatactcattg

SEQ ID NO: 1468100 - DNA, 15 bp, Homo sapiens
ggacatactcattgt

SEQ ID NO: 1468101 - DNA, 15 bp, Homo sapiens
gacatactcattgtc

SEQ ID NO: 1468102 - DNA, 15 bp, Homo sapiens
acatactcattgtcc

SEQ ID NO: 1468103 - DNA, 15 bp, Homo sapiens
catactcattgtcct

SEQ ID NO: 1468104 - DNA, 15 bp, Homo sapiens
atactcattgtccta

SEQ ID NO: 1468105 - DNA, 15 bp, Homo sapiens
tactcattgtcctac

SEQ ID NO: 1468106 - DNA, 15 bp, Homo sapiens
actcattgtcctacc

SEQ ID NO: 1468107 - DNA, 15 bp, Homo sapiens
ctcattgtcctacca

SEQ ID NO: 1468108 - DNA, 15 bp, Homo sapiens
tcattgtcctaccac

SEQ ID NO: 1468109 - DNA, 15 bp, Homo sapiens
cattgtcctaccacc

SEQ ID NO: 1468110 - DNA, 15 bp, Homo sapiens
attgtcctaccacct

SEQ ID NO: 1468111 - DNA, 15 bp, Homo sapiens
ttgtcctaccacctt

SEQ ID NO: 1468112 - DNA, 15 bp, Homo sapiens
tgtcctaccacctta

SEQ ID NO: 1468113 - DNA, 15 bp, Homo sapiens
gtcctaccaccttaa

SEQ ID NO: 1468114 - DNA, 15 bp, Homo sapiens
tcctaccaccttaac

SEQ ID NO: 1468115 - DNA, 15 bp, Homo sapiens
cctaccaccttaact

SEQ ID NO: 1468116 - DNA, 15 bp, Homo sapiens
ctaccaccttaacta

SEQ ID NO: 1468117 - DNA, 15 bp, Homo sapiens
taccaccttaactac

SEQ ID NO: 1468118 - DNA, 15 bp, Homo sapiens
accaccttaactaca

SEQ ID NO: 1468119 - DNA, 15 bp, Homo sapiens
ccaccttaactacat

SEQ ID NO: 1468120 - DNA, 15 bp, Homo sapiens
caccttaactacata

SEQ ID NO: 1468121 - DNA, 15 bp, Homo sapiens
accttaactacataa

SEQ ID NO: 1468122 - DNA, 15 bp, Homo sapiens
ccttaactacataaa

SEQ ID NO: 1468123 - DNA, 15 bp, Homo sapiens
cttaactacataaaa

SEQ ID NO: 1468124 - DNA, 15 bp, Homo sapiens
ttaactacataaaaa

SEQ ID NO: 1468125 - DNA, 15 bp, Homo sapiens
taactacataaaaaa

SEQ ID NO: 1468126 - DNA, 15 bp, Homo sapiens
aactacataaaaaaa

SEQ ID NO: 1468127 - DNA, 15 bp, Homo sapiens
actacataaaaaaat

SEQ ID NO: 1468128 - DNA, 15 bp, Homo sapiens
ctacataaaaaaata

SEQ ID NO: 1468129 - DNA, 15 bp, Homo sapiens
tacataaaaaaatat

SEQ ID NO: 1468130 - DNA, 15 bp, Homo sapiens
acataaaaaaatata

SEQ ID NO: 1468131 - DNA, 15 bp, Homo sapiens
cataaaaaaatataa

SEQ ID NO: 1468132 - DNA, 15 bp, Homo sapiens
ataaaaaaatataat

SEQ ID NO: 1468133 - DNA, 15 bp, Homo sapiens
taaaaaaatataatc

SEQ ID NO: 1468134 - DNA, 15 bp, Homo sapiens
aaaaaaatataatct

SEQ ID NO: 1468135 - DNA, 15 bp, Homo sapiens
aaaaaatataatctc

SEQ ID NO: 1468136 - DNA, 15 bp, Homo sapiens
aaaaatataatctct

SEQ ID NO: 1468137 - DNA, 15 bp, Homo sapiens
aaaatataatctctt

SEQ ID NO: 1468138 - DNA, 15 bp, Homo sapiens
aaatataatctcttc

SEQ ID NO: 1468139 - DNA, 15 bp, Homo sapiens
aatataatctcttca

SEQ ID NO: 1468140 - DNA, 15 bp, Homo sapiens
atataatctcttcag

SEQ ID NO: 1468141 - DNA, 15 bp, Homo sapiens
tataatctcttcagc

SEQ ID NO: 1468142 - DNA, 15 bp, Homo sapiens
ataatctcttcagct

SEQ ID NO: 1468143 - DNA, 15 bp, Homo sapiens
taatctcttcagcta

SEQ ID NO: 1468144 - DNA, 15 bp, Homo sapiens
aatctcttcagctac

SEQ ID NO: 1468145 - DNA, 15 bp, Homo sapiens
atctcttcagctact

SEQ ID NO: 1468146 - DNA, 15 bp, Homo sapiens
tctcttcagctacta

SEQ ID NO: 1468147 - DNA, 15 bp, Homo sapiens
ctcttcagctactaa

SEQ ID NO: 1468148 - DNA, 15 bp, Homo sapiens
tcttcagctactaag

SEQ ID NO: 1468149 - DNA, 15 bp, Homo sapiens
cttcagctactaagt

SEQ ID NO: 1468150 - DNA, 15 bp, Homo sapiens
ttcagctactaagtt

SEQ ID NO: 1468151 - DNA, 15 bp, Homo sapiens
tcagctactaagttt

SEQ ID NO: 1468152 - DNA, 15 bp, Homo sapiens
cagctactaagtttc

SEQ ID NO: 1468153 - DNA, 15 bp, Homo sapiens
agctactaagtttct

SEQ ID NO: 1468154 - DNA, 15 bp, Homo sapiens
gctactaagtttctg

SEQ ID NO: 1468155 - DNA, 15 bp, Homo sapiens
ctactaagtttctga

SEQ ID NO: 1468156 - DNA, 15 bp, Homo sapiens
tactaagtttctgat

SEQ ID NO: 1468157 - DNA, 15 bp, Homo sapiens
actaagtttctgatt

SEQ ID NO: 1468158 - DNA, 15 bp, Homo sapiens
ctaagtttctgattt

SEQ ID NO: 1468159 - DNA, 15 bp, Homo sapiens
taagtttctgatttt

SEQ ID NO: 1468160 - DNA, 15 bp, Homo sapiens
aagtttctgattttg

SEQ ID NO: 1468161 - DNA, 15 bp, Homo sapiens
agtttctgattttgc

SEQ ID NO: 1468162 - DNA, 15 bp, Homo sapiens
gtttctgattttgca

SEQ ID NO: 1468163 - DNA, 15 bp, Homo sapiens
tttctgattttgcat

SEQ ID NO: 1468164 - DNA, 15 bp, Homo sapiens
ttctgattttgcatt

SEQ ID NO: 1468165 - DNA, 15 bp, Homo sapiens
tctgattttgcattt

SEQ ID NO: 1468166 - DNA, 15 bp, Homo sapiens
ctgattttgcatttg

SEQ ID NO: 1468167 - DNA, 15 bp, Homo sapiens
tgattttgcatttga

SEQ ID NO: 1468168 - DNA, 15 bp, Homo sapiens
gattttgcatttgat

SEQ ID NO: 1468169 - DNA, 15 bp, Homo sapiens
attttgcatttgata

SEQ ID NO: 1468170 - DNA, 15 bp, Homo sapiens
ttttgcatttgatat

SEQ ID NO: 1468171 - DNA, 15 bp, Homo sapiens
tttgcatttgatatg

SEQ ID NO: 1468172 - DNA, 15 bp, Homo sapiens
ttgcatttgatatgg

SEQ ID NO: 1468173 - DNA, 15 bp, Homo sapiens
tgcatttgatatggg

SEQ ID NO: 1468174 - DNA, 15 bp, Homo sapiens
gcatttgatatggga

SEQ ID NO: 1468175 - DNA, 15 bp, Homo sapiens
catttgatatgggag

SEQ ID NO: 1468176 - DNA, 15 bp, Homo sapiens
atttgatatgggagc

SEQ ID NO: 1468177 - DNA, 15 bp, Homo sapiens
tttgatatgggagca

SEQ ID NO: 1468178 - DNA, 15 bp, Homo sapiens
ttgatatgggagcaa

SEQ ID NO: 1468179 - DNA, 15 bp, Homo sapiens
tgatatgggagcaat

SEQ ID NO: 1468180 - DNA, 15 bp, Homo sapiens
gatatgggagcaata

SEQ ID NO: 1468181 - DNA, 15 bp, Homo sapiens
atatgggagcaatag

SEQ ID NO: 1468182 - DNA, 15 bp, Homo sapiens
tatgggagcaatagt

SEQ ID NO: 1468183 - DNA, 15 bp, Homo sapiens
atgggagcaatagta

SEQ ID NO: 1468184 - DNA, 15 bp, Homo sapiens
tgggagcaatagtat

SEQ ID NO: 1468185 - DNA, 15 bp, Homo sapiens
gggagcaatagtatt

SEQ ID NO: 1468186 - DNA, 15 bp, Homo sapiens
ggagcaatagtattt

SEQ ID NO: 1468187 - DNA, 15 bp, Homo sapiens
gagcaatagtatttt

SEQ ID NO: 1468188 - DNA, 15 bp, Homo sapiens
agcaatagtatttta

SEQ ID NO: 1468189 - DNA, 15 bp, Homo sapiens
gcaatagtattttat

SEQ ID NO: 1468190 - DNA, 15 bp, Homo sapiens
caatagtattttatt

SEQ ID NO: 1468191 - DNA, 15 bp, Homo sapiens
aatagtattttattg

SEQ ID NO: 1468192 - DNA, 15 bp, Homo sapiens
atagtattttattgg

SEQ ID NO: 1468193 - DNA, 15 bp, Homo sapiens
tagtattttattggg

SEQ ID NO: 1468194 - DNA, 15 bp, Homo sapiens
agtattttattgggc

SEQ ID NO: 1468195 - DNA, 15 bp, Homo sapiens
gtattttattgggct

SEQ ID NO: 1468196 - DNA, 15 bp, Homo sapiens
tattttattgggcta

SEQ ID NO: 1468197 - DNA, 15 bp, Homo sapiens
attttattgggctac

SEQ ID NO: 1468198 - DNA, 15 bp, Homo sapiens
ttttattgggctaca

SEQ ID NO: 1468199 - DNA, 15 bp, Homo sapiens
tttattgggctacac

SEQ ID NO: 1468200 - DNA, 15 bp, Homo sapiens
ttattgggctacaca

SEQ ID NO: 1468201 - DNA, 15 bp, Homo sapiens
tattgggctacacaa

SEQ ID NO: 1468202 - DNA, 15 bp, Homo sapiens
attgggctacacaag

SEQ ID NO: 1468203 - DNA, 15 bp, Homo sapiens
ttgggctacacaagg

SEQ ID NO: 1468204 - DNA, 15 bp, Homo sapiens
tgggctacacaaggt

SEQ ID NO: 1468205 - DNA, 15 bp, Homo sapiens
gggctacacaaggtt

SEQ ID NO: 1468206 - DNA, 15 bp, Homo sapiens
ggctacacaaggttc

SEQ ID NO: 1468207 - DNA, 15 bp, Homo sapiens
gctacacaaggttcc

SEQ ID NO: 1468208 - DNA, 15 bp, Homo sapiens
ctacacaaggttcca

SEQ ID NO: 1468209 - DNA, 15 bp, Homo sapiens
tacacaaggttccaa

SEQ ID NO: 1468210 - DNA, 15 bp, Homo sapiens
acacaaggttccaaa

SEQ ID NO: 1468211 - DNA, 15 bp, Homo sapiens
cacaaggttccaaaa

SEQ ID NO: 1468212 - DNA, 15 bp, Homo sapiens
acaaggttccaaaat

SEQ ID NO: 1468213 - DNA, 15 bp, Homo sapiens
caaggttccaaaatc

SEQ ID NO: 1468214 - DNA, 15 bp, Homo sapiens
aaggttccaaaatct

SEQ ID NO: 1468215 - DNA, 15 bp, Homo sapiens
aggttccaaaatctc

SEQ ID NO: 1468216 - DNA, 15 bp, Homo sapiens
ggttccaaaatctct

SEQ ID NO: 1468217 - DNA, 15 bp, Homo sapiens
gttccaaaatctctc

SEQ ID NO: 1468218 - DNA, 15 bp, Homo sapiens
ttccaaaatctctct

SEQ ID NO: 1468219 - DNA, 15 bp, Homo sapiens
tccaaaatctctctt

SEQ ID NO: 1468220 - DNA, 15 bp, Homo sapiens
ccaaaatctctcttt

SEQ ID NO: 1468221 - DNA, 15 bp, Homo sapiens
caaaatctctctttt

SEQ ID NO: 1468222 - DNA, 15 bp, Homo sapiens
aaaatctctcttttg

SEQ ID NO: 1468223 - DNA, 15 bp, Homo sapiens
aaatctctcttttga

SEQ ID NO: 1468224 - DNA, 15 bp, Homo sapiens
aatctctcttttgaa

SEQ ID NO: 1468225 - DNA, 15 bp, Homo sapiens
atctctcttttgaag

SEQ ID NO: 1468226 - DNA, 15 bp, Homo sapiens
tctctcttttgaaga

SEQ ID NO: 1468227 - DNA, 15 bp, Homo sapiens
ctctcttttgaagat

SEQ ID NO: 1468228 - DNA, 15 bp, Homo sapiens
tctcttttgaagata

SEQ ID NO: 1468229 - DNA, 15 bp, Homo sapiens
ctcttttgaagatat

SEQ ID NO: 1468230 - DNA, 15 bp, Homo sapiens
tcttttgaagatatt

SEQ ID NO: 1468231 - DNA, 15 bp, Homo sapiens
cttttgaagatattc

SEQ ID NO: 1468232 - DNA, 15 bp, Homo sapiens
ttttgaagatattca

SEQ ID NO: 1468233 - DNA, 15 bp, Homo sapiens
tttgaagatattcat

SEQ ID NO: 1468234 - DNA, 15 bp, Homo sapiens
ttgaagatattcatg

SEQ ID NO: 1468235 - DNA, 15 bp, Homo sapiens
tgaagatattcatgt

SEQ ID NO: 1468236 - DNA, 15 bp, Homo sapiens
gaagatattcatgtg

SEQ ID NO: 1468237 - DNA, 15 bp, Homo sapiens
aagatattcatgtgt

SEQ ID NO: 1468238 - DNA, 15 bp, Homo sapiens
agatattcatgtgta

SEQ ID NO: 1468239 - DNA, 15 bp, Homo sapiens
gatattcatgtgtag

SEQ ID NO: 1468240 - DNA, 15 bp, Homo sapiens
atattcatgtgtagg

SEQ ID NO: 1468241 - DNA, 15 bp, Homo sapiens
tattcatgtgtagga

SEQ ID NO: 1468242 - DNA, 15 bp, Homo sapiens
attcatgtgtaggaa

SEQ ID NO: 1468243 - DNA, 15 bp, Homo sapiens
ttcatgtgtaggaaa

SEQ ID NO: 1468244 - DNA, 15 bp, Homo sapiens
tcatgtgtaggaaac

SEQ ID NO: 1468245 - DNA, 15 bp, Homo sapiens
catgtgtaggaaact

SEQ ID NO: 1468246 - DNA, 15 bp, Homo sapiens
atgtgtaggaaactc

SEQ ID NO: 1468247 - DNA, 15 bp, Homo sapiens
tgtgtaggaaactct

SEQ ID NO: 1468248 - DNA, 15 bp, Homo sapiens
gtgtaggaaactctg

SEQ ID NO: 1468249 - DNA, 15 bp, Homo sapiens
tgtaggaaactctgt

SEQ ID NO: 1468250 - DNA, 15 bp, Homo sapiens
gtaggaaactctgta

SEQ ID NO: 1468251 - DNA, 15 bp, Homo sapiens
taggaaactctgtaa

SEQ ID NO: 1468252 - DNA, 15 bp, Homo sapiens
aggaaactctgtaac

SEQ ID NO: 1468253 - DNA, 15 bp, Homo sapiens
ggaaactctgtaaca

SEQ ID NO: 1468254 - DNA, 15 bp, Homo sapiens
gaaactctgtaacag

SEQ ID NO: 1468255 - DNA, 15 bp, Homo sapiens
aaactctgtaacaga

SEQ ID NO: 1468256 - DNA, 15 bp, Homo sapiens
aactctgtaacagat

SEQ ID NO: 1468257 - DNA, 15 bp, Homo sapiens
actctgtaacagata

SEQ ID NO: 1468258 - DNA, 15 bp, Homo sapiens
ctctgtaacagatat

SEQ ID NO: 1468259 - DNA, 15 bp, Homo sapiens
tctgtaacagatata

SEQ ID NO: 1468260 - DNA, 15 bp, Homo sapiens
ctgtaacagatatag

SEQ ID NO: 1468261 - DNA, 15 bp, Homo sapiens
tgtaacagatatagc

SEQ ID NO: 1468262 - DNA, 15 bp, Homo sapiens
gtaacagatatagct

SEQ ID NO: 1468263 - DNA, 15 bp, Homo sapiens
taacagatatagctc

SEQ ID NO: 1468264 - DNA, 15 bp, Homo sapiens
aacagatatagctct

SEQ ID NO: 1468265 - DNA, 15 bp, Homo sapiens
acagatatagctctt

SEQ ID NO: 1468266 - DNA, 15 bp, Homo sapiens
cagatatagctcttg

SEQ ID NO: 1468267 - DNA, 15 bp, Homo sapiens
agatatagctcttgc

SEQ ID NO: 1468268 - DNA, 15 bp, Homo sapiens
gatatagctcttgca

SEQ ID NO: 1468269 - DNA, 15 bp, Homo sapiens
atatagctcttgcac

SEQ ID NO: 1468270 - DNA, 15 bp, Homo sapiens
tatagctcttgcaca

SEQ ID NO: 1468271 - DNA, 15 bp, Homo sapiens
atagctcttgcacaa

SEQ ID NO: 1468272 - DNA, 15 bp, Homo sapiens
tagctcttgcacaat

SEQ ID NO: 1468273 - DNA, 15 bp, Homo sapiens
agctcttgcacaatt

SEQ ID NO: 1468274 - DNA, 15 bp, Homo sapiens
gctcttgcacaattt

SEQ ID NO: 1468275 - DNA, 15 bp, Homo sapiens
ctcttgcacaatttt

SEQ ID NO: 1468276 - DNA, 15 bp, Homo sapiens
tcttgcacaattttt

SEQ ID NO: 1468277 - DNA, 15 bp, Homo sapiens
cttgcacaattttta

SEQ ID NO: 1468278 - DNA, 15 bp, Homo sapiens
ttgcacaatttttag

SEQ ID NO: 1468279 - DNA, 15 bp, Homo sapiens
tgcacaatttttagg

SEQ ID NO: 1468280 - DNA, 15 bp, Homo sapiens
gcacaatttttagga

SEQ ID NO: 1468281 - DNA, 15 bp, Homo sapiens
cacaatttttaggag

SEQ ID NO: 1468282 - DNA, 15 bp, Homo sapiens
acaatttttaggaga

SEQ ID NO: 1468283 - DNA, 15 bp, Homo sapiens
caatttttaggagaa

SEQ ID NO: 1468284 - DNA, 15 bp, Homo sapiens
aatttttaggagaag

SEQ ID NO: 1468285 - DNA, 15 bp, Homo sapiens
atttttaggagaaga

SEQ ID NO: 1468286 - DNA, 15 bp, Homo sapiens
tttttaggagaagag

SEQ ID NO: 1468287 - DNA, 15 bp, Homo sapiens
ttttaggagaagaga

SEQ ID NO: 1468288 - DNA, 15 bp, Homo sapiens
tttaggagaagagat

SEQ ID NO: 1468289 - DNA, 15 bp, Homo sapiens
ttaggagaagagatt

SEQ ID NO: 1468290 - DNA, 15 bp, Homo sapiens
taggagaagagattt

SEQ ID NO: 1468291 - DNA, 15 bp, Homo sapiens
aggagaagagatttg

SEQ ID NO: 1468292 - DNA, 15 bp, Homo sapiens
ggagaagagatttgg

SEQ ID NO: 1468293 - DNA, 15 bp, Homo sapiens
gagaagagatttggg

SEQ ID NO: 1468294 - DNA, 15 bp, Homo sapiens
agaagagatttggga

SEQ ID NO: 1468295 - DNA, 15 bp, Homo sapiens
gaagagatttgggaa

SEQ ID NO: 1468296 - DNA, 15 bp, Homo sapiens
aagagatttgggaaa

SEQ ID NO: 1468297 - DNA, 15 bp, Homo sapiens
agagatttgggaaac

SEQ ID NO: 1468298 - DNA, 15 bp, Homo sapiens
gagatttgggaaact

SEQ ID NO: 1468299 - DNA, 15 bp, Homo sapiens
agatttgggaaactt

SEQ ID NO: 1468300 - DNA, 15 bp, Homo sapiens
gatttgggaaacttt

SEQ ID NO: 1468301 - DNA, 15 bp, Homo sapiens
atttgggaaacttta

SEQ ID NO: 1468302 - DNA, 15 bp, Homo sapiens
tttgggaaactttat

SEQ ID NO: 1468303 - DNA, 15 bp, Homo sapiens
ttgggaaactttatc

SEQ ID NO: 1468304 - DNA, 15 bp, Homo sapiens
tgggaaactttatca

SEQ ID NO: 1468305 - DNA, 15 bp, Homo sapiens
gggaaactttatcag

SEQ ID NO: 1468306 - DNA, 15 bp, Homo sapiens
ggaaactttatcagt

SEQ ID NO: 1468307 - DNA, 15 bp, Homo sapiens
gaaactttatcagtt

SEQ ID NO: 1468308 - DNA, 15 bp, Homo sapiens
aaactttatcagttt

SEQ ID NO: 1468309 - DNA, 15 bp, Homo sapiens
aactttatcagtttt

SEQ ID NO: 1468310 - DNA, 15 bp, Homo sapiens
actttatcagttttt

SEQ ID NO: 1468311 - DNA, 15 bp, Homo sapiens
ctttatcagtttttc

SEQ ID NO: 1468312 - DNA, 15 bp, Homo sapiens
tttatcagtttttct

SEQ ID NO: 1468313 - DNA, 15 bp, Homo sapiens
ttatcagtttttctc

SEQ ID NO: 1468314 - DNA, 15 bp, Homo sapiens
tatcagtttttctca

SEQ ID NO: 1468315 - DNA, 15 bp, Homo sapiens
atcagtttttctcaa

SEQ ID NO: 1468316 - DNA, 15 bp, Homo sapiens
tcagtttttctcaac

SEQ ID NO: 1468317 - DNA, 15 bp, Homo sapiens
cagtttttctcaacc

SEQ ID NO: 1468318 - DNA, 15 bp, Homo sapiens
agtttttctcaacct

SEQ ID NO: 1468319 - DNA, 15 bp, Homo sapiens
gtttttctcaacctt

SEQ ID NO: 1468320 - DNA, 15 bp, Homo sapiens
tttttctcaaccttt

SEQ ID NO: 1468321 - DNA, 15 bp, Homo sapiens
ttttctcaacctttt

SEQ ID NO: 1468322 - DNA, 15 bp, Homo sapiens
tttctcaaccttttt

SEQ ID NO: 1468323 - DNA, 15 bp, Homo sapiens
ttctcaaccttttta

SEQ ID NO: 1468324 - DNA, 15 bp, Homo sapiens
tctcaacctttttaa

SEQ ID NO: 1468325 - DNA, 15 bp, Homo sapiens
ctcaacctttttaac

SEQ ID NO: 1468326 - DNA, 15 bp, Homo sapiens
tcaacctttttaact

SEQ ID NO: 1468327 - DNA, 15 bp, Homo sapiens
caacctttttaactc

SEQ ID NO: 1468328 - DNA, 15 bp, Homo sapiens
aacctttttaactct

SEQ ID NO: 1468329 - DNA, 15 bp, Homo sapiens
acctttttaactcta

SEQ ID NO: 1468330 - DNA, 15 bp, Homo sapiens
cctttttaactctat

SEQ ID NO: 1468331 - DNA, 15 bp, Homo sapiens
ctttttaactctatc

SEQ ID NO: 1468332 - DNA, 15 bp, Homo sapiens
tttttaactctatct

SEQ ID NO: 1468333 - DNA, 15 bp, Homo sapiens
ttttaactctatctt

SEQ ID NO: 1468334 - DNA, 15 bp, Homo sapiens
tttaactctatctta

SEQ ID NO: 1468335 - DNA, 15 bp, Homo sapiens
ttaactctatcttaa

SEQ ID NO: 1468336 - DNA, 15 bp, Homo sapiens
taactctatcttaaa

SEQ ID NO: 1468337 - DNA, 15 bp, Homo sapiens
aactctatcttaaag

SEQ ID NO: 1468338 - DNA, 15 bp, Homo sapiens
actctatcttaaagt

SEQ ID NO: 1468339 - DNA, 15 bp, Homo sapiens
ctctatcttaaagtc

SEQ ID NO: 1468340 - DNA, 15 bp, Homo sapiens
tctatcttaaagtcc

SEQ ID NO: 1468341 - DNA, 15 bp, Homo sapiens
ctatcttaaagtcca

SEQ ID NO: 1468342 - DNA, 15 bp, Homo sapiens
tatcttaaagtccaa

SEQ ID NO: 1468343 - DNA, 15 bp, Homo sapiens
atcttaaagtccaag

SEQ ID NO: 1468344 - DNA, 15 bp, Homo sapiens
tcttaaagtccaagg

SEQ ID NO: 1468345 - DNA, 15 bp, Homo sapiens
cttaaagtccaagga

SEQ ID NO: 1468346 - DNA, 15 bp, Homo sapiens
ttaaagtccaaggaa

SEQ ID NO: 1468347 - DNA, 15 bp, Homo sapiens
taaagtccaaggaaa

SEQ ID NO: 1468348 - DNA, 15 bp, Homo sapiens
aaagtccaaggaaag

SEQ ID NO: 1468349 - DNA, 15 bp, Homo sapiens
aagtccaaggaaagt

SEQ ID NO: 1468350 - DNA, 15 bp, Homo sapiens
agtccaaggaaagtg

SEQ ID NO: 1468351 - DNA, 15 bp, Homo sapiens
gtccaaggaaagtga

SEQ ID NO: 1468352 - DNA, 15 bp, Homo sapiens
tccaaggaaagtgaa

SEQ ID NO: 1468353 - DNA, 15 bp, Homo sapiens
ccaaggaaagtgaaa

SEQ ID NO: 1468354 - DNA, 15 bp, Homo sapiens
caaggaaagtgaaag

SEQ ID NO: 1468355 - DNA, 15 bp, Homo sapiens
aaggaaagtgaaaga

SEQ ID NO: 1468356 - DNA, 15 bp, Homo sapiens
aggaaagtgaaagat

SEQ ID NO: 1468357 - DNA, 15 bp, Homo sapiens
ggaaagtgaaagatt

SEQ ID NO: 1468358 - DNA, 15 bp, Homo sapiens
gaaagtgaaagatta

SEQ ID NO: 1468359 - DNA, 15 bp, Homo sapiens
aaagtgaaagattaa

SEQ ID NO: 1468360 - DNA, 15 bp, Homo sapiens
aagtgaaagattaag

SEQ ID NO: 1468361 - DNA, 15 bp, Homo sapiens
agtgaaagattaaga

SEQ ID NO: 1468362 - DNA, 15 bp, Homo sapiens
gtgaaagattaagaa

SEQ ID NO: 1468363 - DNA, 15 bp, Homo sapiens
tgaaagattaagaaa

SEQ ID NO: 1468364 - DNA, 15 bp, Homo sapiens
gaaagattaagaaaa

SEQ ID NO: 1468365 - DNA, 15 bp, Homo sapiens
aagattaagaaaact

SEQ ID NO: 1468366 - DNA, 15 bp, Homo sapiens
agattaagaaaactt

SEQ ID NO: 1468367 - DNA, 15 bp, Homo sapiens
gattaagaaaacttt

SEQ ID NO: 1468368 - DNA, 15 bp, Homo sapiens
attaagaaaactttc

SEQ ID NO: 1468369 - DNA, 15 bp, Homo sapiens
ttaagaaaactttcc

SEQ ID NO: 1468370 - DNA, 15 bp, Homo sapiens
taagaaaactttcct

SEQ ID NO: 1468371 - DNA, 15 bp, Homo sapiens
aagaaaactttcctt

SEQ ID NO: 1468372 - DNA, 15 bp, Homo sapiens
agaaaactttcctta

SEQ ID NO: 1468373 - DNA, 15 bp, Homo sapiens
gaaaactttccttat

SEQ ID NO: 1468374 - DNA, 15 bp, Homo sapiens
aaaactttccttatc

SEQ ID NO: 1468375 - DNA, 15 bp, Homo sapiens
aaactttccttatca

SEQ ID NO: 1468376 - DNA, 15 bp, Homo sapiens
aactttccttatcag

SEQ ID NO: 1468377 - DNA, 15 bp, Homo sapiens
actttccttatcagg

SEQ ID NO: 1468378 - DNA, 15 bp, Homo sapiens
ctttccttatcaggg

SEQ ID NO: 1468379 - DNA, 15 bp, Homo sapiens
tttccttatcagggc

SEQ ID NO: 1468380 - DNA, 15 bp, Homo sapiens
ttccttatcagggct

SEQ ID NO: 1468381 - DNA, 15 bp, Homo sapiens
tccttatcagggctg

SEQ ID NO: 1468382 - DNA, 15 bp, Homo sapiens
ccttatcagggctgt

SEQ ID NO: 1468383 - DNA, 15 bp, Homo sapiens
cttatcagggctgtc

SEQ ID NO: 1468384 - DNA, 15 bp, Homo sapiens
ttatcagggctgtcc

SEQ ID NO: 1468385 - DNA, 15 bp, Homo sapiens
tatcagggctgtcca

SEQ ID NO: 1468386 - DNA, 15 bp, Homo sapiens
atcagggctgtccaa

SEQ ID NO: 1468387 - DNA, 15 bp, Homo sapiens
tcagggctgtccaac

SEQ ID NO: 1468388 - DNA, 15 bp, Homo sapiens
cagggctgtccaaca

SEQ ID NO: 1468389 - DNA, 15 bp, Homo sapiens
agggctgtccaacag

SEQ ID NO: 1468390 - DNA, 15 bp, Homo sapiens
gggctgtccaacaga

SEQ ID NO: 1468391 - DNA, 15 bp, Homo sapiens
ggctgtccaacagaa

SEQ ID NO: 1468392 - DNA, 15 bp, Homo sapiens
gctgtccaacagaac

SEQ ID NO: 1468393 - DNA, 15 bp, Homo sapiens
ctgtccaacagaact

SEQ ID NO: 1468394 - DNA, 15 bp, Homo sapiens
tgtccaacagaactt

SEQ ID NO: 1468395 - DNA, 15 bp, Homo sapiens
gtccaacagaacttt

SEQ ID NO: 1468396 - DNA, 15 bp, Homo sapiens
tccaacagaactttc

SEQ ID NO: 1468397 - DNA, 15 bp, Homo sapiens
ccaacagaactttct

SEQ ID NO: 1468398 - DNA, 15 bp, Homo sapiens
caacagaactttcta

SEQ ID NO: 1468399 - DNA, 15 bp, Homo sapiens
aacagaactttctac

SEQ ID NO: 1468400 - DNA, 15 bp, Homo sapiens
acagaactttctaca

SEQ ID NO: 1468401 - DNA, 15 bp, Homo sapiens
cagaactttctacaa

SEQ ID NO: 1468402 - DNA, 15 bp, Homo sapiens
agaactttctacaaa

SEQ ID NO: 1468403 - DNA, 15 bp, Homo sapiens
gaactttctacaaac

SEQ ID NO: 1468404 - DNA, 15 bp, Homo sapiens
aactttctacaaaca

SEQ ID NO: 1468405 - DNA, 15 bp, Homo sapiens
actttctacaaacat

SEQ ID NO: 1468406 - DNA, 15 bp, Homo sapiens
ctttctacaaacatg

SEQ ID NO: 1468407 - DNA, 15 bp, Homo sapiens
tttctacaaacatgg

SEQ ID NO: 1468408 - DNA, 15 bp, Homo sapiens
ttctacaaacatgga

SEQ ID NO: 1468409 - DNA, 15 bp, Homo sapiens
tctacaaacatggaa

SEQ ID NO: 1468410 - DNA, 15 bp, Homo sapiens
ctacaaacatggaaa

SEQ ID NO: 1468411 - DNA, 15 bp, Homo sapiens
tacaaacatggaaat

SEQ ID NO: 1468412 - DNA, 15 bp, Homo sapiens
acaaacatggaaatg

SEQ ID NO: 1468413 - DNA, 15 bp, Homo sapiens
caaacatggaaatgt

SEQ ID NO: 1468414 - DNA, 15 bp, Homo sapiens
aaacatggaaatgtc

SEQ ID NO: 1468415 - DNA, 15 bp, Homo sapiens
aacatggaaatgtcc

SEQ ID NO: 1468416 - DNA, 15 bp, Homo sapiens
acatggaaatgtcct

SEQ ID NO: 1468417 - DNA, 15 bp, Homo sapiens
catggaaatgtcctg

SEQ ID NO: 1468418 - DNA, 15 bp, Homo sapiens
tggaaatgtcctgtt

SEQ ID NO: 1468419 - DNA, 15 bp, Homo sapiens
ggaaatgtcctgttc

SEQ ID NO: 1468420 - DNA, 15 bp, Homo sapiens
gaaatgtcctgttct

SEQ ID NO: 1468421 - DNA, 15 bp, Homo sapiens
aaatgtcctgttctg

SEQ ID NO: 1468422 - DNA, 15 bp, Homo sapiens
aatgtcctgttctgc

SEQ ID NO: 1468423 - DNA, 15 bp, Homo sapiens
atgtcctgttctgca

SEQ ID NO: 1468424 - DNA, 15 bp, Homo sapiens
tgtcctgttctgcac

SEQ ID NO: 1468425 - DNA, 15 bp, Homo sapiens
gtcctgttctgcact

SEQ ID NO: 1468426 - DNA, 15 bp, Homo sapiens
tcctgttctgcactg

SEQ ID NO: 1468427 - DNA, 15 bp, Homo sapiens
cctgttctgcactgt

SEQ ID NO: 1468428 - DNA, 15 bp, Homo sapiens
ctgttctgcactgtt

SEQ ID NO: 1468429 - DNA, 15 bp, Homo sapiens
tgttctgcactgttc

SEQ ID NO: 1468430 - DNA, 15 bp, Homo sapiens
gttctgcactgttca

SEQ ID NO: 1468431 - DNA, 15 bp, Homo sapiens
ttctgcactgttcac

SEQ ID NO: 1468432 - DNA, 15 bp, Homo sapiens
tctgcactgttcact

SEQ ID NO: 1468433 - DNA, 15 bp, Homo sapiens
ctgcactgttcacta

SEQ ID NO: 1468434 - DNA, 15 bp, Homo sapiens
tgcactgttcactat

SEQ ID NO: 1468435 - DNA, 15 bp, Homo sapiens
gcactgttcactatg

SEQ ID NO: 1468436 - DNA, 15 bp, Homo sapiens
cactgttcactatgg

SEQ ID NO: 1468437 - DNA, 15 bp, Homo sapiens
actgttcactatggt

SEQ ID NO: 1468438 - DNA, 15 bp, Homo sapiens
ctgttcactatggta

SEQ ID NO: 1468439 - DNA, 15 bp, Homo sapiens
tgttcactatggtag

SEQ ID NO: 1468440 - DNA, 15 bp, Homo sapiens
gttcactatggtagc

SEQ ID NO: 1468441 - DNA, 15 bp, Homo sapiens
ttcactatggtagcc

SEQ ID NO: 1468442 - DNA, 15 bp, Homo sapiens
tcactatggtagcca

SEQ ID NO: 1468443 - DNA, 15 bp, Homo sapiens
cactatggtagccac

SEQ ID NO: 1468444 - DNA, 15 bp, Homo sapiens
actatggtagccact

SEQ ID NO: 1468445 - DNA, 15 bp, Homo sapiens
ctatggtagccactg

SEQ ID NO: 1468446 - DNA, 15 bp, Homo sapiens
tatggtagccactgt

SEQ ID NO: 1468447 - DNA, 15 bp, Homo sapiens
atggtagccactgta

SEQ ID NO: 1468448 - DNA, 15 bp, Homo sapiens
tggtagccactgtac

SEQ ID NO: 1468449 - DNA, 15 bp, Homo sapiens
ggtagccactgtact

SEQ ID NO: 1468450 - DNA, 15 bp, Homo sapiens
gtagccactgtactc

SEQ ID NO: 1468451 - DNA, 15 bp, Homo sapiens
tagccactgtactct

SEQ ID NO: 1468452 - DNA, 15 bp, Homo sapiens
agccactgtactctc

SEQ ID NO: 1468453 - DNA, 15 bp, Homo sapiens
gccactgtactctct

SEQ ID NO: 1468454 - DNA, 15 bp, Homo sapiens
ccactgtactctcta

SEQ ID NO: 1468455 - DNA, 15 bp, Homo sapiens
cactgtactctctat

SEQ ID NO: 1468456 - DNA, 15 bp, Homo sapiens
actgtactctctatt

SEQ ID NO: 1468457 - DNA, 15 bp, Homo sapiens
ctgtactctctattt

SEQ ID NO: 1468458 - DNA, 15 bp, Homo sapiens
tgtactctctatttg

SEQ ID NO: 1468459 - DNA, 15 bp, Homo sapiens
gtactctctatttga

SEQ ID NO: 1468460 - DNA, 15 bp, Homo sapiens
tactctctatttgag

SEQ ID NO: 1468461 - DNA, 15 bp, Homo sapiens
actctctatttgagt

SEQ ID NO: 1468462 - DNA, 15 bp, Homo sapiens
ctctctatttgagtg

SEQ ID NO: 1468463 - DNA, 15 bp, Homo sapiens
tctctatttgagtgg

SEQ ID NO: 1468464 - DNA, 15 bp, Homo sapiens
ctctatttgagtggc

SEQ ID NO: 1468465 - DNA, 15 bp, Homo sapiens
tctatttgagtggct

SEQ ID NO: 1468466 - DNA, 15 bp, Homo sapiens
ctatttgagtggcta

SEQ ID NO: 1468467 - DNA, 15 bp, Homo sapiens
tatttgagtggctat

SEQ ID NO: 1468468 - DNA, 15 bp, Homo sapiens
atttgagtggctatt

SEQ ID NO: 1468469 - DNA, 15 bp, Homo sapiens
tttgagtggctattg

SEQ ID NO: 1468470 - DNA, 15 bp, Homo sapiens
ttgagtggctattga

SEQ ID NO: 1468471 - DNA, 15 bp, Homo sapiens
tgagtggctattgag

SEQ ID NO: 1468472 - DNA, 15 bp, Homo sapiens
gagtggctattgagt

SEQ ID NO: 1468473 - DNA, 15 bp, Homo sapiens
agtggctattgagta

SEQ ID NO: 1468474 - DNA, 15 bp, Homo sapiens
gtggctattgagtat

SEQ ID NO: 1468475 - DNA, 15 bp, Homo sapiens
tggctattgagtatt

SEQ ID NO: 1468476 - DNA, 15 bp, Homo sapiens
ggctattgagtattt

SEQ ID NO: 1468477 - DNA, 15 bp, Homo sapiens
gctattgagtatttg

SEQ ID NO: 1468478 - DNA, 15 bp, Homo sapiens
ctattgagtatttga

SEQ ID NO: 1468479 - DNA, 15 bp, Homo sapiens
tattgagtatttgaa

SEQ ID NO: 1468480 - DNA, 15 bp, Homo sapiens
attgagtatttgaaa

SEQ ID NO: 1468481 - DNA, 15 bp, Homo sapiens
ttgagtatttgaaat

SEQ ID NO: 1468482 - DNA, 15 bp, Homo sapiens
tgagtatttgaaata

SEQ ID NO: 1468483 - DNA, 15 bp, Homo sapiens
gagtatttgaaatat

SEQ ID NO: 1468484 - DNA, 15 bp, Homo sapiens
agtatttgaaatatg

SEQ ID NO: 1468485 - DNA, 15 bp, Homo sapiens
gtatttgaaatatgg

SEQ ID NO: 1468486 - DNA, 15 bp, Homo sapiens
tatttgaaatatggc

SEQ ID NO: 1468487 - DNA, 15 bp, Homo sapiens
atttgaaatatggct

SEQ ID NO: 1468488 - DNA, 15 bp, Homo sapiens
tttgaaatatggcta

SEQ ID NO: 1468489 - DNA, 15 bp, Homo sapiens
ttgaaatatggctag

SEQ ID NO: 1468490 - DNA, 15 bp, Homo sapiens
tgaaatatggctaga

SEQ ID NO: 1468491 - DNA, 15 bp, Homo sapiens
gaaatatggctagag

SEQ ID NO: 1468492 - DNA, 15 bp, Homo sapiens
aaatatggctagaga

SEQ ID NO: 1468493 - DNA, 15 bp, Homo sapiens
aatatggctagagaa

SEQ ID NO: 1468494 - DNA, 15 bp, Homo sapiens
atatggctagagaaa

SEQ ID NO: 1468495 - DNA, 15 bp, Homo sapiens
tatggctagagaaag

SEQ ID NO: 1468496 - DNA, 15 bp, Homo sapiens
atggctagagaaagg

SEQ ID NO: 1468497 - DNA, 15 bp, Homo sapiens
tggctagagaaagga

SEQ ID NO: 1468498 - DNA, 15 bp, Homo sapiens
ggctagagaaaggaa

SEQ ID NO: 1468499 - DNA, 15 bp, Homo sapiens
gctagagaaaggaaa

SEQ ID NO: 1468500 - DNA, 15 bp, Homo sapiens
ctagagaaaggaaat

SEQ ID NO: 1468501 - DNA, 15 bp, Homo sapiens
tagagaaaggaaatg

SEQ ID NO: 1468502 - DNA, 15 bp, Homo sapiens
agagaaaggaaatgt

SEQ ID NO: 1468503 - DNA, 15 bp, Homo sapiens
gagaaaggaaatgta

SEQ ID NO: 1468504 - DNA, 15 bp, Homo sapiens
agaaaggaaatgtaa

SEQ ID NO: 1468505 - DNA, 15 bp, Homo sapiens
gaaaggaaatgtaaa

SEQ ID NO: 1468506 - DNA, 15 bp, Homo sapiens
aaaggaaatgtaaaa

SEQ ID NO: 1468507 - DNA, 15 bp, Homo sapiens
aaggaaatgtaaaat

SEQ ID NO: 1468508 - DNA, 15 bp, Homo sapiens
aggaaatgtaaaatt

SEQ ID NO: 1468509 - DNA, 15 bp, Homo sapiens
ggaaatgtaaaattg

SEQ ID NO: 1468510 - DNA, 15 bp, Homo sapiens
gaaatgtaaaattgt

SEQ ID NO: 1468511 - DNA, 15 bp, Homo sapiens
aaatgtaaaattgtg

SEQ ID NO: 1468512 - DNA, 15 bp, Homo sapiens
aatgtaaaattgtgt

SEQ ID NO: 1468513 - DNA, 15 bp, Homo sapiens
atgtaaaattgtgtt

SEQ ID NO: 1468514 - DNA, 15 bp, Homo sapiens
tgtaaaattgtgttc

SEQ ID NO: 1468515 - DNA, 15 bp, Homo sapiens
gtaaaattgtgttct

SEQ ID NO: 1468516 - DNA, 15 bp, Homo sapiens
taaaattgtgttctt

SEQ ID NO: 1468517 - DNA, 15 bp, Homo sapiens
aaaattgtgttcttt

SEQ ID NO: 1468518 - DNA, 15 bp, Homo sapiens
aaattgtgttctttt

SEQ ID NO: 1468519 - DNA, 15 bp, Homo sapiens
ttgtgttcttttttc

SEQ ID NO: 1468520 - DNA, 15 bp, Homo sapiens
tgtgttcttttttca

SEQ ID NO: 1468521 - DNA, 15 bp, Homo sapiens
gtgttcttttttcat

SEQ ID NO: 1468522 - DNA, 15 bp, Homo sapiens
tgttcttttttcatt

SEQ ID NO: 1468523 - DNA, 15 bp, Homo sapiens
gttcttttttcatta

SEQ ID NO: 1468524 - DNA, 15 bp, Homo sapiens
ttcttttttcattaa

SEQ ID NO: 1468525 - DNA, 15 bp, Homo sapiens
tcttttttcattaag

SEQ ID NO: 1468526 - DNA, 15 bp, Homo sapiens
cttttttcattaagt

SEQ ID NO: 1468527 - DNA, 15 bp, Homo sapiens
ttttttcattaagtc

SEQ ID NO: 1468528 - DNA, 15 bp, Homo sapiens
tttttcattaagtca

SEQ ID NO: 1468529 - DNA, 15 bp, Homo sapiens
ttttcattaagtcaa

SEQ ID NO: 1468530 - DNA, 15 bp, Homo sapiens
tttcattaagtcaat

SEQ ID NO: 1468531 - DNA, 15 bp, Homo sapiens
ttcattaagtcaatt

SEQ ID NO: 1468532 - DNA, 15 bp, Homo sapiens
tcattaagtcaatta

SEQ ID NO: 1468533 - DNA, 15 bp, Homo sapiens
cattaagtcaattaa

SEQ ID NO: 1468534 - DNA, 15 bp, Homo sapiens
attaagtcaattaag

SEQ ID NO: 1468535 - DNA, 15 bp, Homo sapiens
ttaagtcaattaagt

SEQ ID NO: 1468536 - DNA, 15 bp, Homo sapiens
taagtcaattaagtt

SEQ ID NO: 1468537 - DNA, 15 bp, Homo sapiens
aagtcaattaagttt

SEQ ID NO: 1468538 - DNA, 15 bp, Homo sapiens
agtcaattaagttta

SEQ ID NO: 1468539 - DNA, 15 bp, Homo sapiens
gtcaattaagtttaa

SEQ ID NO: 1468540 - DNA, 15 bp, Homo sapiens
tcaattaagtttaat

SEQ ID NO: 1468541 - DNA, 15 bp, Homo sapiens
caattaagtttaatt

SEQ ID NO: 1468542 - DNA, 15 bp, Homo sapiens
aattaagtttaatta

SEQ ID NO: 1468543 - DNA, 15 bp, Homo sapiens
attaagtttaattag

SEQ ID NO: 1468544 - DNA, 15 bp, Homo sapiens
ttaagtttaattagt

SEQ ID NO: 1468545 - DNA, 15 bp, Homo sapiens
taagtttaattagtt

SEQ ID NO: 1468546 - DNA, 15 bp, Homo sapiens
aagtttaattagttg

SEQ ID NO: 1468547 - DNA, 15 bp, Homo sapiens
agtttaattagttga

SEQ ID NO: 1468548 - DNA, 15 bp, Homo sapiens
gtttaattagttgat

SEQ ID NO: 1468549 - DNA, 15 bp, Homo sapiens
tttaattagttgatt

SEQ ID NO: 1468550 - DNA, 15 bp, Homo sapiens
ttaattagttgatta

SEQ ID NO: 1468551 - DNA, 15 bp, Homo sapiens
taattagttgattaa

SEQ ID NO: 1468552 - DNA, 15 bp, Homo sapiens
aattagttgattaat

SEQ ID NO: 1468553 - DNA, 15 bp, Homo sapiens
attagttgattaatc

SEQ ID NO: 1468554 - DNA, 15 bp, Homo sapiens
ttagttgattaatct

SEQ ID NO: 1468555 - DNA, 15 bp, Homo sapiens
tagttgattaatcta

SEQ ID NO: 1468556 - DNA, 15 bp, Homo sapiens
agttgattaatctaa

SEQ ID NO: 1468557 - DNA, 15 bp, Homo sapiens
gttgattaatctaat

SEQ ID NO: 1468558 - DNA, 15 bp, Homo sapiens
ttgattaatctaatt

SEQ ID NO: 1468559 - DNA, 15 bp, Homo sapiens
tgattaatctaatta

SEQ ID NO: 1468560 - DNA, 15 bp, Homo sapiens
gattaatctaattaa

SEQ ID NO: 1468561 - DNA, 15 bp, Homo sapiens
attaatctaattaat

SEQ ID NO: 1468562 - DNA, 15 bp, Homo sapiens
ttaatctaattaatt

SEQ ID NO: 1468563 - DNA, 15 bp, Homo sapiens
taatctaattaatta

SEQ ID NO: 1468564 - DNA, 15 bp, Homo sapiens
aatctaattaattaa

SEQ ID NO: 1468565 - DNA, 15 bp, Homo sapiens
atctaattaattaaa

SEQ ID NO: 1468566 - DNA, 15 bp, Homo sapiens
tctaattaattaaat

SEQ ID NO: 1468567 - DNA, 15 bp, Homo sapiens
ctaattaattaaata

SEQ ID NO: 1468568 - DNA, 15 bp, Homo sapiens
taattaattaaatat

SEQ ID NO: 1468569 - DNA, 15 bp, Homo sapiens
aattaattaaatatg

SEQ ID NO: 1468570 - DNA, 15 bp, Homo sapiens
attaattaaatatgg

SEQ ID NO: 1468571 - DNA, 15 bp, Homo sapiens
ttaattaaatatggt

SEQ ID NO: 1468572 - DNA, 15 bp, Homo sapiens
taattaaatatggtt

SEQ ID NO: 1468573 - DNA, 15 bp, Homo sapiens
aattaaatatggtta

SEQ ID NO: 1468574 - DNA, 15 bp, Homo sapiens
attaaatatggttag

SEQ ID NO: 1468575 - DNA, 15 bp, Homo sapiens
ttaaatatggttaga

SEQ ID NO: 1468576 - DNA, 15 bp, Homo sapiens
taaatatggttagaa

SEQ ID NO: 1468577 - DNA, 15 bp, Homo sapiens
aaatatggttagaag

SEQ ID NO: 1468578 - DNA, 15 bp, Homo sapiens
aatatggttagaagc

SEQ ID NO: 1468579 - DNA, 15 bp, Homo sapiens
atatggttagaagct

SEQ ID NO: 1468580 - DNA, 15 bp, Homo sapiens
tatggttagaagcta

SEQ ID NO: 1468581 - DNA, 15 bp, Homo sapiens
atggttagaagctac

SEQ ID NO: 1468582 - DNA, 15 bp, Homo sapiens
tggttagaagctacc

SEQ ID NO: 1468583 - DNA, 15 bp, Homo sapiens
ggttagaagctacca

SEQ ID NO: 1468584 - DNA, 15 bp, Homo sapiens
gttagaagctaccat

SEQ ID NO: 1468585 - DNA, 15 bp, Homo sapiens
ttagaagctaccata

SEQ ID NO: 1468586 - DNA, 15 bp, Homo sapiens
tagaagctaccatag

SEQ ID NO: 1468587 - DNA, 15 bp, Homo sapiens
agaagctaccatagt

SEQ ID NO: 1468588 - DNA, 15 bp, Homo sapiens
gaagctaccatagtg

SEQ ID NO: 1468589 - DNA, 15 bp, Homo sapiens
aagctaccatagtgg

SEQ ID NO: 1468590 - DNA, 15 bp, Homo sapiens
agctaccatagtggg

SEQ ID NO: 1468591 - DNA, 15 bp, Homo sapiens
gctaccatagtgggc

SEQ ID NO: 1468592 - DNA, 15 bp, Homo sapiens
ctaccatagtgggca

SEQ ID NO: 1468593 - DNA, 15 bp, Homo sapiens
taccatagtgggcag

SEQ ID NO: 1468594 - DNA, 15 bp, Homo sapiens
accatagtgggcagt

SEQ ID NO: 1468595 - DNA, 15 bp, Homo sapiens
ccatagtgggcagta

SEQ ID NO: 1468596 - DNA, 15 bp, Homo sapiens
catagtgggcagtac

SEQ ID NO: 1468597 - DNA, 15 bp, Homo sapiens
atagtgggcagtaca

SEQ ID NO: 1468598 - DNA, 15 bp, Homo sapiens
tagtgggcagtacaa

SEQ ID NO: 1468599 - DNA, 15 bp, Homo sapiens
agtgggcagtacaag

SEQ ID NO: 1468600 - DNA, 15 bp, Homo sapiens
gtgggcagtacaaga

SEQ ID NO: 1468601 - DNA, 15 bp, Homo sapiens
tgggcagtacaagac

SEQ ID NO: 1468602 - DNA, 15 bp, Homo sapiens
gggcagtacaagact

SEQ ID NO: 1468603 - DNA, 15 bp, Homo sapiens
ggcagtacaagactg

SEQ ID NO: 1468604 - DNA, 15 bp, Homo sapiens
gcagtacaagactgc

SEQ ID NO: 1468605 - DNA, 15 bp, Homo sapiens
cagtacaagactgca

SEQ ID NO: 1468606 - DNA, 15 bp, Homo sapiens
agtacaagactgcat

SEQ ID NO: 1468607 - DNA, 15 bp, Homo sapiens
gtacaagactgcatc

SEQ ID NO: 1468608 - DNA, 15 bp, Homo sapiens
tacaagactgcatca

SEQ ID NO: 1468609 - DNA, 15 bp, Homo sapiens
acaagactgcatcat

SEQ ID NO: 1468610 - DNA, 15 bp, Homo sapiens
caagactgcatcatt

SEQ ID NO: 1468611 - DNA, 15 bp, Homo sapiens
aagactgcatcattc

SEQ ID NO: 1468612 - DNA, 15 bp, Homo sapiens
agactgcatcattca

SEQ ID NO: 1468613 - DNA, 15 bp, Homo sapiens
gactgcatcattcaa

SEQ ID NO: 1468614 - DNA, 15 bp, Homo sapiens
actgcatcattcaag

SEQ ID NO: 1468615 - DNA, 15 bp, Homo sapiens
ctgcatcattcaagt

SEQ ID NO: 1468616 - DNA, 15 bp, Homo sapiens
tgcatcattcaagtt

SEQ ID NO: 1468617 - DNA, 15 bp, Homo sapiens
gcatcattcaagtta

SEQ ID NO: 1468618 - DNA, 15 bp, Homo sapiens
catcattcaagttaa

SEQ ID NO: 1468619 - DNA, 15 bp, Homo sapiens
atcattcaagttaaa

SEQ ID NO: 1468620 - DNA, 15 bp, Homo sapiens
tcattcaagttaaaa

SEQ ID NO: 1468621 - DNA, 15 bp, Homo sapiens
cattcaagttaaaaa

SEQ ID NO: 1468622 - DNA, 15 bp, Homo sapiens
attcaagttaaaaac

SEQ ID NO: 1468623 - DNA, 15 bp, Homo sapiens
ttcaagttaaaaaca

SEQ ID NO: 1468624 - DNA, 15 bp, Homo sapiens
tcaagttaaaaacat

SEQ ID NO: 1468625 - DNA, 15 bp, Homo sapiens
caagttaaaaacatc

SEQ ID NO: 1468626 - DNA, 15 bp, Homo sapiens
aagttaaaaacatca

SEQ ID NO: 1468627 - DNA, 15 bp, Homo sapiens
agttaaaaacatcat

SEQ ID NO: 1468628 - DNA, 15 bp, Homo sapiens
gttaaaaacatcatc

SEQ ID NO: 1468629 - DNA, 15 bp, Homo sapiens
ttaaaaacatcatct

SEQ ID NO: 1468630 - DNA, 15 bp, Homo sapiens
taaaaacatcatctt

SEQ ID NO: 1468631 - DNA, 15 bp, Homo sapiens
aaaaacatcatcttg

SEQ ID NO: 1468632 - DNA, 15 bp, Homo sapiens
aaaacatcatcttga

SEQ ID NO: 1468633 - DNA, 15 bp, Homo sapiens
aaacatcatcttgaa

SEQ ID NO: 1468634 - DNA, 15 bp, Homo sapiens
aacatcatcttgaaa

SEQ ID NO: 1468635 - DNA, 15 bp, Homo sapiens
acatcatcttgaaat

SEQ ID NO: 1468636 - DNA, 15 bp, Homo sapiens
catcatcttgaaatc

SEQ ID NO: 1468637 - DNA, 15 bp, Homo sapiens
atcatcttgaaatct

SEQ ID NO: 1468638 - DNA, 15 bp, Homo sapiens
tcatcttgaaatctg

SEQ ID NO: 1468639 - DNA, 15 bp, Homo sapiens
catcttgaaatctga

SEQ ID NO: 1468640 - DNA, 15 bp, Homo sapiens
atcttgaaatctgaa

SEQ ID NO: 1468641 - DNA, 15 bp, Homo sapiens
tcttgaaatctgaat

SEQ ID NO: 1468642 - DNA, 15 bp, Homo sapiens
cttgaaatctgaatt

SEQ ID NO: 1468643 - DNA, 15 bp, Homo sapiens
ttgaaatctgaattc

SEQ ID NO: 1468644 - DNA, 15 bp, Homo sapiens
tgaaatctgaattca

SEQ ID NO: 1468645 - DNA, 15 bp, Homo sapiens
gaaatctgaattcag

SEQ ID NO: 1468646 - DNA, 15 bp, Homo sapiens
aaatctgaattcagt

SEQ ID NO: 1468647 - DNA, 15 bp, Homo sapiens
aatctgaattcagtc

SEQ ID NO: 1468648 - DNA, 15 bp, Homo sapiens
atctgaattcagtca

SEQ ID NO: 1468649 - DNA, 15 bp, Homo sapiens
tctgaattcagtcag

SEQ ID NO: 1468650 - DNA, 15 bp, Homo sapiens
ctgaattcagtcaga

SEQ ID NO: 1468651 - DNA, 15 bp, Homo sapiens
tgaattcagtcagag

SEQ ID NO: 1468652 - DNA, 15 bp, Homo sapiens
gaattcagtcagagg

SEQ ID NO: 1468653 - DNA, 15 bp, Homo sapiens
aattcagtcagaggg

SEQ ID NO: 1468654 - DNA, 15 bp, Homo sapiens
attcagtcagagggg

SEQ ID NO: 1468655 - DNA, 15 bp, Homo sapiens
ttcagtcagaggggc

SEQ ID NO: 1468656 - DNA, 15 bp, Homo sapiens
tcagtcagaggggca

SEQ ID NO: 1468657 - DNA, 15 bp, Homo sapiens
cagtcagaggggcat

SEQ ID NO: 1468658 - DNA, 15 bp, Homo sapiens
agtcagaggggcata

SEQ ID NO: 1468659 - DNA, 15 bp, Homo sapiens
gtcagaggggcatat

SEQ ID NO: 1468660 - DNA, 15 bp, Homo sapiens
tcagaggggcatatt

SEQ ID NO: 1468661 - DNA, 15 bp, Homo sapiens
cagaggggcatattt

SEQ ID NO: 1468662 - DNA, 15 bp, Homo sapiens
agaggggcatattta

SEQ ID NO: 1468663 - DNA, 15 bp, Homo sapiens
gaggggcatatttac

SEQ ID NO: 1468664 - DNA, 15 bp, Homo sapiens
aggggcatatttaca

SEQ ID NO: 1468665 - DNA, 15 bp, Homo sapiens
ggggcatatttacac

SEQ ID NO: 1468666 - DNA, 15 bp, Homo sapiens
gggcatatttacacg

SEQ ID NO: 1468667 - DNA, 15 bp, Homo sapiens
ggcatatttacacgg

SEQ ID NO: 1468668 - DNA, 15 bp, Homo sapiens
gcatatttacacgga

SEQ ID NO: 1468669 - DNA, 15 bp, Homo sapiens
catatttacacggat

SEQ ID NO: 1468670 - DNA, 15 bp, Homo sapiens
atatttacacggatt

SEQ ID NO: 1468671 - DNA, 15 bp, Homo sapiens
tatttacacggatta

SEQ ID NO: 1468672 - DNA, 15 bp, Homo sapiens
atttacacggattat

SEQ ID NO: 1468673 - DNA, 15 bp, Homo sapiens
tttacacggattatt

SEQ ID NO: 1468674 - DNA, 15 bp, Homo sapiens
ttacacggattattt

SEQ ID NO: 1468675 - DNA, 15 bp, Homo sapiens
tacacggattatttt

SEQ ID NO: 1468676 - DNA, 15 bp, Homo sapiens
acacggattattttg

SEQ ID NO: 1468677 - DNA, 15 bp, Homo sapiens
cacggattattttga

SEQ ID NO: 1468678 - DNA, 15 bp, Homo sapiens
acggattattttgat

SEQ ID NO: 1468679 - DNA, 15 bp, Homo sapiens
cggattattttgatc

SEQ ID NO: 1468680 - DNA, 15 bp, Homo sapiens
ggattattttgatct

SEQ ID NO: 1468681 - DNA, 15 bp, Homo sapiens
gattattttgatctg

SEQ ID NO: 1468682 - DNA, 15 bp, Homo sapiens
attattttgatctga

SEQ ID NO: 1468683 - DNA, 15 bp, Homo sapiens
ttattttgatctgag

SEQ ID NO: 1468684 - DNA, 15 bp, Homo sapiens
tattttgatctgagt

SEQ ID NO: 1468685 - DNA, 15 bp, Homo sapiens
attttgatctgagtc

SEQ ID NO: 1468686 - DNA, 15 bp, Homo sapiens
ttttgatctgagtca

SEQ ID NO: 1468687 - DNA, 15 bp, Homo sapiens
tttgatctgagtcag

SEQ ID NO: 1468688 - DNA, 15 bp, Homo sapiens
ttgatctgagtcagc

SEQ ID NO: 1468689 - DNA, 15 bp, Homo sapiens
tgatctgagtcagca

SEQ ID NO: 1468690 - DNA, 15 bp, Homo sapiens
gatctgagtcagcaa

SEQ ID NO: 1468691 - DNA, 15 bp, Homo sapiens
atctgagtcagcaat

SEQ ID NO: 1468692 - DNA, 15 bp, Homo sapiens
tctgagtcagcaatg

SEQ ID NO: 1468693 - DNA, 15 bp, Homo sapiens
ctgagtcagcaatgt

SEQ ID NO: 1468694 - DNA, 15 bp, Homo sapiens
tgagtcagcaatgtg

SEQ ID NO: 1468695 - DNA, 15 bp, Homo sapiens
gagtcagcaatgtgt

SEQ ID NO: 1468696 - DNA, 15 bp, Homo sapiens
agtcagcaatgtgtt

SEQ ID NO: 1468697 - DNA, 15 bp, Homo sapiens
gtcagcaatgtgttg

SEQ ID NO: 1468698 - DNA, 15 bp, Homo sapiens
tcagcaatgtgttgt

SEQ ID NO: 1468699 - DNA, 15 bp, Homo sapiens
cagcaatgtgttgtc

SEQ ID NO: 1468700 - DNA, 15 bp, Homo sapiens
agcaatgtgttgtcc

SEQ ID NO: 1468701 - DNA, 15 bp, Homo sapiens
gcaatgtgttgtcca

SEQ ID NO: 1468702 - DNA, 15 bp, Homo sapiens
caatgtgttgtccac

SEQ ID NO: 1468703 - DNA, 15 bp, Homo sapiens
aatgtgttgtccaca

SEQ ID NO: 1468704 - DNA, 15 bp, Homo sapiens
atgtgttgtccacat

SEQ ID NO: 1468705 - DNA, 15 bp, Homo sapiens
tgtgttgtccacatg

SEQ ID NO: 1468706 - DNA, 15 bp, Homo sapiens
gtgttgtccacatgg

SEQ ID NO: 1468707 - DNA, 15 bp, Homo sapiens
tgttgtccacatgga

SEQ ID NO: 1468708 - DNA, 15 bp, Homo sapiens
gttgtccacatggag

SEQ ID NO: 1468709 - DNA, 15 bp, Homo sapiens
ttgtccacatggaga

SEQ ID NO: 1468710 - DNA, 15 bp, Homo sapiens
tgtccacatggagac

SEQ ID NO: 1468711 - DNA, 15 bp, Homo sapiens
gtccacatggagact

SEQ ID NO: 1468712 - DNA, 15 bp, Homo sapiens
tccacatggagacta

SEQ ID NO: 1468713 - DNA, 15 bp, Homo sapiens
ccacatggagactaa

SEQ ID NO: 1468714 - DNA, 15 bp, Homo sapiens
cacatggagactaac

SEQ ID NO: 1468715 - DNA, 15 bp, Homo sapiens
acatggagactaaca

SEQ ID NO: 1468716 - DNA, 15 bp, Homo sapiens
catggagactaacac

SEQ ID NO: 1468717 - DNA, 15 bp, Homo sapiens
atggagactaacact

SEQ ID NO: 1468718 - DNA, 15 bp, Homo sapiens
tggagactaacactt

SEQ ID NO: 1468719 - DNA, 15 bp, Homo sapiens
ggagactaacacttc

SEQ ID NO: 1468720 - DNA, 15 bp, Homo sapiens
gagactaacacttcc

SEQ ID NO: 1468721 - DNA, 15 bp, Homo sapiens
agactaacacttcca

SEQ ID NO: 1468722 - DNA, 15 bp, Homo sapiens
gactaacacttccat

SEQ ID NO: 1468723 - DNA, 15 bp, Homo sapiens
actaacacttccatt

SEQ ID NO: 1468724 - DNA, 15 bp, Homo sapiens
ctaacacttccattt

SEQ ID NO: 1468725 - DNA, 15 bp, Homo sapiens
taacacttccattta

SEQ ID NO: 1468726 - DNA, 15 bp, Homo sapiens
aacacttccatttat

SEQ ID NO: 1468727 - DNA, 15 bp, Homo sapiens
acacttccatttatt

SEQ ID NO: 1468728 - DNA, 15 bp, Homo sapiens
cacttccatttattc

SEQ ID NO: 1468729 - DNA, 15 bp, Homo sapiens
acttccatttattct

SEQ ID NO: 1468730 - DNA, 15 bp, Homo sapiens
cttccatttattctt

SEQ ID NO: 1468731 - DNA, 15 bp, Homo sapiens
ttccatttattctta

SEQ ID NO: 1468732 - DNA, 15 bp, Homo sapiens
tccatttattcttat

SEQ ID NO: 1468733 - DNA, 15 bp, Homo sapiens
ccatttattcttatg

SEQ ID NO: 1468734 - DNA, 15 bp, Homo sapiens
catttattcttatga

SEQ ID NO: 1468735 - DNA, 15 bp, Homo sapiens
atttattcttatgac

SEQ ID NO: 1468736 - DNA, 15 bp, Homo sapiens
tttattcttatgact

SEQ ID NO: 1468737 - DNA, 15 bp, Homo sapiens
ttattcttatgacta

SEQ ID NO: 1468738 - DNA, 15 bp, Homo sapiens
tattcttatgactaa

SEQ ID NO: 1468739 - DNA, 15 bp, Homo sapiens
attcttatgactaac

SEQ ID NO: 1468740 - DNA, 15 bp, Homo sapiens
ttcttatgactaaca

SEQ ID NO: 1468741 - DNA, 15 bp, Homo sapiens
tcttatgactaacat

SEQ ID NO: 1468742 - DNA, 15 bp, Homo sapiens
cttatgactaacatt

SEQ ID NO: 1468743 - DNA, 15 bp, Homo sapiens
ttatgactaacatta

SEQ ID NO: 1468744 - DNA, 15 bp, Homo sapiens
tatgactaacattaa

SEQ ID NO: 1468745 - DNA, 15 bp, Homo sapiens
atgactaacattaaa

SEQ ID NO: 1468746 - DNA, 15 bp, Homo sapiens
tgactaacattaaag

SEQ ID NO: 1468747 - DNA, 15 bp, Homo sapiens
gactaacattaaagc

SEQ ID NO: 1468748 - DNA, 15 bp, Homo sapiens
actaacattaaagca

SEQ ID NO: 1468749 - DNA, 15 bp, Homo sapiens
ctaacattaaagcaa

SEQ ID NO: 1468750 - DNA, 15 bp, Homo sapiens
taacattaaagcaaa

SEQ ID NO: 1468751 - DNA, 15 bp, Homo sapiens
aacattaaagcaaag

SEQ ID NO: 1468752 - DNA, 15 bp, Homo sapiens
acattaaagcaaagc

SEQ ID NO: 1468753 - DNA, 15 bp, Homo sapiens
cattaaagcaaagca

SEQ ID NO: 1468754 - DNA, 15 bp, Homo sapiens
attaaagcaaagcaa

SEQ ID NO: 1468755 - DNA, 15 bp, Homo sapiens
ttaaagcaaagcaaa

SEQ ID NO: 1468756 - DNA, 15 bp, Homo sapiens
taaagcaaagcaaaa

SEQ ID NO: 1468757 - DNA, 15 bp, Homo sapiens
aaagcaaagcaaaat

SEQ ID NO: 1468758 - DNA, 15 bp, Homo sapiens
aagcaaagcaaaatg

SEQ ID NO: 1468759 - DNA, 15 bp, Homo sapiens
agcaaagcaaaatga

SEQ ID NO: 1468760 - DNA, 15 bp, Homo sapiens
gcaaagcaaaatgaa

SEQ ID NO: 1468761 - DNA, 15 bp, Homo sapiens
caaagcaaaatgaaa

SEQ ID NO: 1468762 - DNA, 15 bp, Homo sapiens
aaagcaaaatgaaaa

SEQ ID NO: 1468763 - DNA, 15 bp, Homo sapiens
aagcaaaatgaaaag

SEQ ID NO: 1468764 - DNA, 15 bp, Homo sapiens
agcaaaatgaaaagt

SEQ ID NO: 1468765 - DNA, 15 bp, Homo sapiens
gcaaaatgaaaagtg

SEQ ID NO: 1468766 - DNA, 15 bp, Homo sapiens
caaaatgaaaagtga

SEQ ID NO: 1468767 - DNA, 15 bp, Homo sapiens
aaaatgaaaagtgaa

SEQ ID NO: 1468768 - DNA, 15 bp, Homo sapiens
aaatgaaaagtgaat

SEQ ID NO: 1468769 - DNA, 15 bp, Homo sapiens
aatgaaaagtgaatg

SEQ ID NO: 1468770 - DNA, 15 bp, Homo sapiens
atgaaaagtgaatgt

SEQ ID NO: 1468771 - DNA, 15 bp, Homo sapiens
tgaaaagtgaatgtt

SEQ ID NO: 1468772 - DNA, 15 bp, Homo sapiens
gaaaagtgaatgttc

SEQ ID NO: 1468773 - DNA, 15 bp, Homo sapiens
aaaagtgaatgttca

SEQ ID NO: 1468774 - DNA, 15 bp, Homo sapiens
aaagtgaatgttcag

SEQ ID NO: 1468775 - DNA, 15 bp, Homo sapiens
aagtgaatgttcagc

SEQ ID NO: 1468776 - DNA, 15 bp, Homo sapiens
agtgaatgttcagca

SEQ ID NO: 1468777 - DNA, 15 bp, Homo sapiens
gtgaatgttcagcat

SEQ ID NO: 1468778 - DNA, 15 bp, Homo sapiens
tgaatgttcagcatt

SEQ ID NO: 1468779 - DNA, 15 bp, Homo sapiens
gaatgttcagcatta

SEQ ID NO: 1468780 - DNA, 15 bp, Homo sapiens
aatgttcagcattat

SEQ ID NO: 1468781 - DNA, 15 bp, Homo sapiens
atgttcagcattatc

SEQ ID NO: 1468782 - DNA, 15 bp, Homo sapiens
tgttcagcattatca

SEQ ID NO: 1468783 - DNA, 15 bp, Homo sapiens
gttcagcattatcat

SEQ ID NO: 1468784 - DNA, 15 bp, Homo sapiens
ttcagcattatcatg

SEQ ID NO: 1468785 - DNA, 15 bp, Homo sapiens
tcagcattatcatgt

SEQ ID NO: 1468786 - DNA, 15 bp, Homo sapiens
cagcattatcatgtt

SEQ ID NO: 1468787 - DNA, 15 bp, Homo sapiens
agcattatcatgttg

SEQ ID NO: 1468788 - DNA, 15 bp, Homo sapiens
gcattatcatgttgg

SEQ ID NO: 1468789 - DNA, 15 bp, Homo sapiens
cattatcatgttggc

SEQ ID NO: 1468790 - DNA, 15 bp, Homo sapiens
attatcatgttggcc

SEQ ID NO: 1468791 - DNA, 15 bp, Homo sapiens
ttatcatgttggcct

SEQ ID NO: 1468792 - DNA, 15 bp, Homo sapiens
tatcatgttggcctg

SEQ ID NO: 1468793 - DNA, 15 bp, Homo sapiens
atcatgttggcctgg

SEQ ID NO: 1468794 - DNA, 15 bp, Homo sapiens
tcatgttggcctggg

SEQ ID NO: 1468795 - DNA, 15 bp, Homo sapiens
catgttggcctgggg

SEQ ID NO: 1468796 - DNA, 15 bp, Homo sapiens
atgttggcctggggc

SEQ ID NO: 1468797 - DNA, 15 bp, Homo sapiens
tgttggcctggggct

SEQ ID NO: 1468798 - DNA, 15 bp, Homo sapiens
gttggcctggggctg

SEQ ID NO: 1468799 - DNA, 15 bp, Homo sapiens
ttggcctggggctgg

SEQ ID NO: 1468800 - DNA, 15 bp, Homo sapiens
tggcctggggctgga

SEQ ID NO: 1468801 - DNA, 15 bp, Homo sapiens
ggcctggggctggag

SEQ ID NO: 1468802 - DNA, 15 bp, Homo sapiens
gcctggggctggagc

SEQ ID NO: 1468803 - DNA, 15 bp, Homo sapiens
cctggggctggagct

SEQ ID NO: 1468804 - DNA, 15 bp, Homo sapiens
ctggggctggagcta

SEQ ID NO: 1468805 - DNA, 15 bp, Homo sapiens
tggggctggagctaa

SEQ ID NO: 1468806 - DNA, 15 bp, Homo sapiens
ggggctggagctaag

SEQ ID NO: 1468807 - DNA, 15 bp, Homo sapiens
gggctggagctaagt

SEQ ID NO: 1468808 - DNA, 15 bp, Homo sapiens
ggctggagctaagtt

SEQ ID NO: 1468809 - DNA, 15 bp, Homo sapiens
gctggagctaagttt

SEQ ID NO: 1468810 - DNA, 15 bp, Homo sapiens
ctggagctaagtttt

SEQ ID NO: 1468811 - DNA, 15 bp, Homo sapiens
tggagctaagttttc

SEQ ID NO: 1468812 - DNA, 15 bp, Homo sapiens
ggagctaagttttct

SEQ ID NO: 1468813 - DNA, 15 bp, Homo sapiens
gagctaagttttcta

SEQ ID NO: 1468814 - DNA, 15 bp, Homo sapiens
agctaagttttctat

SEQ ID NO: 1468815 - DNA, 15 bp, Homo sapiens
gctaagttttctatc

SEQ ID NO: 1468816 - DNA, 15 bp, Homo sapiens
ctaagttttctatcc

SEQ ID NO: 1468817 - DNA, 15 bp, Homo sapiens
taagttttctatccc

SEQ ID NO: 1468818 - DNA, 15 bp, Homo sapiens
aagttttctatcccg

SEQ ID NO: 1468819 - DNA, 15 bp, Homo sapiens
agttttctatcccgt

SEQ ID NO: 1468820 - DNA, 15 bp, Homo sapiens
gttttctatcccgtc

SEQ ID NO: 1468821 - DNA, 15 bp, Homo sapiens
ttttctatcccgtct

SEQ ID NO: 1468822 - DNA, 15 bp, Homo sapiens
tttctatcccgtctc

SEQ ID NO: 1468823 - DNA, 15 bp, Homo sapiens
ttctatcccgtctcc

SEQ ID NO: 1468824 - DNA, 15 bp, Homo sapiens
tctatcccgtctcct

SEQ ID NO: 1468825 - DNA, 15 bp, Homo sapiens
ctatcccgtctcctg

SEQ ID NO: 1468826 - DNA, 15 bp, Homo sapiens
tatcccgtctcctgg

SEQ ID NO: 1468827 - DNA, 15 bp, Homo sapiens
atcccgtctcctggc

SEQ ID NO: 1468828 - DNA, 15 bp, Homo sapiens
tcccgtctcctggct

SEQ ID NO: 1468829 - DNA, 15 bp, Homo sapiens
cccgtctcctggctt

SEQ ID NO: 1468830 - DNA, 15 bp, Homo sapiens
ccgtctcctggcttc

SEQ ID NO: 1468831 - DNA, 15 bp, Homo sapiens
cgtctcctggcttca

SEQ ID NO: 1468832 - DNA, 15 bp, Homo sapiens
gtctcctggcttcat

SEQ ID NO: 1468833 - DNA, 15 bp, Homo sapiens
tctcctggcttcatc

SEQ ID NO: 1468834 - DNA, 15 bp, Homo sapiens
ctcctggcttcatca

SEQ ID NO: 1468835 - DNA, 15 bp, Homo sapiens
tcctggcttcatcat

SEQ ID NO: 1468836 - DNA, 15 bp, Homo sapiens
cctggcttcatcatc

SEQ ID NO: 1468837 - DNA, 15 bp, Homo sapiens
ctggcttcatcatca

SEQ ID NO: 1468838 - DNA, 15 bp, Homo sapiens
tggcttcatcatcaa

SEQ ID NO: 1468839 - DNA, 15 bp, Homo sapiens
ggcttcatcatcaat

SEQ ID NO: 1468840 - DNA, 15 bp, Homo sapiens
gcttcatcatcaatt

SEQ ID NO: 1468841 - DNA, 15 bp, Homo sapiens
cttcatcatcaattc

SEQ ID NO: 1468842 - DNA, 15 bp, Homo sapiens
ttcatcatcaattct

SEQ ID NO: 1468843 - DNA, 15 bp, Homo sapiens
tcatcatcaattctc

SEQ ID NO: 1468844 - DNA, 15 bp, Homo sapiens
catcatcaattctct

SEQ ID NO: 1468845 - DNA, 15 bp, Homo sapiens
atcatcaattctctg

SEQ ID NO: 1468846 - DNA, 15 bp, Homo sapiens
tcatcaattctctgc

SEQ ID NO: 1468847 - DNA, 15 bp, Homo sapiens
catcaattctctgct

SEQ ID NO: 1468848 - DNA, 15 bp, Homo sapiens
atcaattctctgctg

SEQ ID NO: 1468849 - DNA, 15 bp, Homo sapiens
tcaattctctgctga

SEQ ID NO: 1468850 - DNA, 15 bp, Homo sapiens
caattctctgctgac

SEQ ID NO: 1468851 - DNA, 15 bp, Homo sapiens
aattctctgctgacc

SEQ ID NO: 1468852 - DNA, 15 bp, Homo sapiens
attctctgctgacct

SEQ ID NO: 1468853 - DNA, 15 bp, Homo sapiens
ttctctgctgacctt

SEQ ID NO: 1468854 - DNA, 15 bp, Homo sapiens
tctctgctgaccttt

SEQ ID NO: 1468855 - DNA, 15 bp, Homo sapiens
ctctgctgaccttta

SEQ ID NO: 1468856 - DNA, 15 bp, Homo sapiens
tctgctgacctttaa

SEQ ID NO: 1468857 - DNA, 15 bp, Homo sapiens
ctgctgacctttaag

SEQ ID NO: 1468858 - DNA, 15 bp, Homo sapiens
tgctgacctttaaga

SEQ ID NO: 1468859 - DNA, 15 bp, Homo sapiens
gctgacctttaagaa

SEQ ID NO: 1468860 - DNA, 15 bp, Homo sapiens
ctgacctttaagaat

SEQ ID NO: 1468861 - DNA, 15 bp, Homo sapiens
tgacctttaagaatg

SEQ ID NO: 1468862 - DNA, 15 bp, Homo sapiens
gacctttaagaatgt

SEQ ID NO: 1468863 - DNA, 15 bp, Homo sapiens
acctttaagaatgta

SEQ ID NO: 1468864 - DNA, 15 bp, Homo sapiens
cctttaagaatgtaa

SEQ ID NO: 1468865 - DNA, 15 bp, Homo sapiens
ctttaagaatgtaat

SEQ ID NO: 1468866 - DNA, 15 bp, Homo sapiens
tttaagaatgtaata

SEQ ID NO: 1468867 - DNA, 15 bp, Homo sapiens
ttaagaatgtaatac

SEQ ID NO: 1468868 - DNA, 15 bp, Homo sapiens
taagaatgtaatact

SEQ ID NO: 1468869 - DNA, 15 bp, Homo sapiens
aagaatgtaatactt

SEQ ID NO: 1468870 - DNA, 15 bp, Homo sapiens
agaatgtaatacttt

SEQ ID NO: 1468871 - DNA, 15 bp, Homo sapiens
gaatgtaatacttta

SEQ ID NO: 1468872 - DNA, 15 bp, Homo sapiens
aatgtaatactttat

SEQ ID NO: 1468873 - DNA, 15 bp, Homo sapiens
atgtaatactttatt

SEQ ID NO: 1468874 - DNA, 15 bp, Homo sapiens
tgtaatactttattt

SEQ ID NO: 1468875 - DNA, 15 bp, Homo sapiens
gtaatactttatttc

SEQ ID NO: 1468876 - DNA, 15 bp, Homo sapiens
taatactttatttcc

SEQ ID NO: 1468877 - DNA, 15 bp, Homo sapiens
aatactttatttccc

SEQ ID NO: 1468878 - DNA, 15 bp, Homo sapiens
atactttatttccct

SEQ ID NO: 1468879 - DNA, 15 bp, Homo sapiens
tactttatttccctt

SEQ ID NO: 1468880 - DNA, 15 bp, Homo sapiens
actttatttcccttt

SEQ ID NO: 1468881 - DNA, 15 bp, Homo sapiens
ctttatttccctttt

SEQ ID NO: 1468882 - DNA, 15 bp, Homo sapiens
tttatttccctttta

SEQ ID NO: 1468883 - DNA, 15 bp, Homo sapiens
ttatttcccttttat

SEQ ID NO: 1468884 - DNA, 15 bp, Homo sapiens
tatttcccttttatc

SEQ ID NO: 1468885 - DNA, 15 bp, Homo sapiens
atttcccttttatca

SEQ ID NO: 1468886 - DNA, 15 bp, Homo sapiens
tttcccttttatcaa

SEQ ID NO: 1468887 - DNA, 15 bp, Homo sapiens
ttcccttttatcaaa

SEQ ID NO: 1468888 - DNA, 15 bp, Homo sapiens
tcccttttatcaaat

SEQ ID NO: 1468889 - DNA, 15 bp, Homo sapiens
cccttttatcaaatg

SEQ ID NO: 1468890 - DNA, 15 bp, Homo sapiens
ccttttatcaaatga

SEQ ID NO: 1468891 - DNA, 15 bp, Homo sapiens
cttttatcaaatgag

SEQ ID NO: 1468892 - DNA, 15 bp, Homo sapiens
ttttatcaaatgagg

SEQ ID NO: 1468893 - DNA, 15 bp, Homo sapiens
tttatcaaatgaggg

SEQ ID NO: 1468894 - DNA, 15 bp, Homo sapiens
ttatcaaatgagggc

SEQ ID NO: 1468895 - DNA, 15 bp, Homo sapiens
tatcaaatgagggca

SEQ ID NO: 1468896 - DNA, 15 bp, Homo sapiens
atcaaatgagggcat

SEQ ID NO: 1468897 - DNA, 15 bp, Homo sapiens
tcaaatgagggcatt

SEQ ID NO: 1468898 - DNA, 15 bp, Homo sapiens
caaatgagggcattt

SEQ ID NO: 1468899 - DNA, 15 bp, Homo sapiens
aaatgagggcatttg

SEQ ID NO: 1468900 - DNA, 15 bp, Homo sapiens
aatgagggcatttgg

SEQ ID NO: 1468901 - DNA, 15 bp, Homo sapiens
atgagggcatttgga

SEQ ID NO: 1468902 - DNA, 15 bp, Homo sapiens
tgagggcatttggaa

SEQ ID NO: 1468903 - DNA, 15 bp, Homo sapiens
gagggcatttggaat

SEQ ID NO: 1468904 - DNA, 15 bp, Homo sapiens
agggcatttggaatt

SEQ ID NO: 1468905 - DNA, 15 bp, Homo sapiens
gggcatttggaattt

SEQ ID NO: 1468906 - DNA, 15 bp, Homo sapiens
ggcatttggaattta

SEQ ID NO: 1468907 - DNA, 15 bp, Homo sapiens
gcatttggaatttat

SEQ ID NO: 1468908 - DNA, 15 bp, Homo sapiens
catttggaatttatc

SEQ ID NO: 1468909 - DNA, 15 bp, Homo sapiens
atttggaatttatca

SEQ ID NO: 1468910 - DNA, 15 bp, Homo sapiens
tttggaatttatcaa

SEQ ID NO: 1468911 - DNA, 15 bp, Homo sapiens
ttggaatttatcaaa

SEQ ID NO: 1468912 - DNA, 15 bp, Homo sapiens
tggaatttatcaaaa

SEQ ID NO: 1468913 - DNA, 15 bp, Homo sapiens
ggaatttatcaaaag

SEQ ID NO: 1468914 - DNA, 15 bp, Homo sapiens
gaatttatcaaaagg

SEQ ID NO: 1468915 - DNA, 15 bp, Homo sapiens
aatttatcaaaagga

SEQ ID NO: 1468916 - DNA, 15 bp, Homo sapiens
atttatcaaaaggat

SEQ ID NO: 1468917 - DNA, 15 bp, Homo sapiens
tttatcaaaaggata

SEQ ID NO: 1468918 - DNA, 15 bp, Homo sapiens
ttatcaaaaggatag

SEQ ID NO: 1468919 - DNA, 15 bp, Homo sapiens
tatcaaaaggatagt

SEQ ID NO: 1468920 - DNA, 15 bp, Homo sapiens
atcaaaaggatagtc

SEQ ID NO: 1468921 - DNA, 15 bp, Homo sapiens
tcaaaaggatagtca

SEQ ID NO: 1468922 - DNA, 15 bp, Homo sapiens
caaaaggatagtcac

SEQ ID NO: 1468923 - DNA, 15 bp, Homo sapiens
aaaaggatagtcacg

SEQ ID NO: 1468924 - DNA, 15 bp, Homo sapiens
aaaggatagtcacga

SEQ ID NO: 1468925 - DNA, 15 bp, Homo sapiens
aaggatagtcacgaa

SEQ ID NO: 1468926 - DNA, 15 bp, Homo sapiens
aggatagtcacgaat

SEQ ID NO: 1468927 - DNA, 15 bp, Homo sapiens
ggatagtcacgaatc

SEQ ID NO: 1468928 - DNA, 15 bp, Homo sapiens
gatagtcacgaatca

SEQ ID NO: 1468929 - DNA, 15 bp, Homo sapiens
atagtcacgaatcat

SEQ ID NO: 1468930 - DNA, 15 bp, Homo sapiens
tagtcacgaatcatg

SEQ ID NO: 1468931 - DNA, 15 bp, Homo sapiens
agtcacgaatcatga

SEQ ID NO: 1468932 - DNA, 15 bp, Homo sapiens
gtcacgaatcatgat

SEQ ID NO: 1468933 - DNA, 15 bp, Homo sapiens
tcacgaatcatgatc

SEQ ID NO: 1468934 - DNA, 15 bp, Homo sapiens
cacgaatcatgatcg

SEQ ID NO: 1468935 - DNA, 15 bp, Homo sapiens
acgaatcatgatcga

SEQ ID NO: 1468936 - DNA, 15 bp, Homo sapiens
cgaatcatgatcgaa

SEQ ID NO: 1468937 - DNA, 15 bp, Homo sapiens
gaatcatgatcgaat

SEQ ID NO: 1468938 - DNA, 15 bp, Homo sapiens
aatcatgatcgaatg

SEQ ID NO: 1468939 - DNA, 15 bp, Homo sapiens
atcatgatcgaatgt

SEQ ID NO: 1468940 - DNA, 15 bp, Homo sapiens
tcatgatcgaatgtt

SEQ ID NO: 1468941 - DNA, 15 bp, Homo sapiens
catgatcgaatgttt

SEQ ID NO: 1468942 - DNA, 15 bp, Homo sapiens
atgatcgaatgttta

SEQ ID NO: 1468943 - DNA, 15 bp, Homo sapiens
tgatcgaatgtttat

SEQ ID NO: 1468944 - DNA, 15 bp, Homo sapiens
gatcgaatgtttatt

SEQ ID NO: 1468945 - DNA, 15 bp, Homo sapiens
atcgaatgtttattg

SEQ ID NO: 1468946 - DNA, 15 bp, Homo sapiens
tcgaatgtttattgg

SEQ ID NO: 1468947 - DNA, 15 bp, Homo sapiens
cgaatgtttattggg

SEQ ID NO: 1468948 - DNA, 15 bp, Homo sapiens
gaatgtttattgggc

SEQ ID NO: 1468949 - DNA, 15 bp, Homo sapiens
aatgtttattgggct

SEQ ID NO: 1468950 - DNA, 15 bp, Homo sapiens
atgtttattgggctt

SEQ ID NO: 1468951 - DNA, 15 bp, Homo sapiens
tgtttattgggctta

SEQ ID NO: 1468952 - DNA, 15 bp, Homo sapiens
gtttattgggcttat

SEQ ID NO: 1468953 - DNA, 15 bp, Homo sapiens
tttattgggcttatc

SEQ ID NO: 1468954 - DNA, 15 bp, Homo sapiens
ttattgggcttatca

SEQ ID NO: 1468955 - DNA, 15 bp, Homo sapiens
tattgggcttatcaa

SEQ ID NO: 1468956 - DNA, 15 bp, Homo sapiens
attgggcttatcaaa

SEQ ID NO: 1468957 - DNA, 15 bp, Homo sapiens
ttgggcttatcaaag

SEQ ID NO: 1468958 - DNA, 15 bp, Homo sapiens
tgggcttatcaaaga

SEQ ID NO: 1468959 - DNA, 15 bp, Homo sapiens
gggcttatcaaagaa

SEQ ID NO: 1468960 - DNA, 15 bp, Homo sapiens
ggcttatcaaagaaa

SEQ ID NO: 1468961 - DNA, 15 bp, Homo sapiens
gcttatcaaagaaag

SEQ ID NO: 1468962 - DNA, 15 bp, Homo sapiens
cttatcaaagaaagg

SEQ ID NO: 1468963 - DNA, 15 bp, Homo sapiens
ttatcaaagaaaggt

SEQ ID NO: 1468964 - DNA, 15 bp, Homo sapiens
tatcaaagaaaggta

SEQ ID NO: 1468965 - DNA, 15 bp, Homo sapiens
atcaaagaaaggtat

SEQ ID NO: 1468966 - DNA, 15 bp, Homo sapiens
tcaaagaaaggtatg

SEQ ID NO: 1468967 - DNA, 15 bp, Homo sapiens
caaagaaaggtatgg

SEQ ID NO: 1468968 - DNA, 15 bp, Homo sapiens
aaagaaaggtatggg

SEQ ID NO: 1468969 - DNA, 15 bp, Homo sapiens
aagaaaggtatgggc

SEQ ID NO: 1468970 - DNA, 15 bp, Homo sapiens
agaaaggtatgggct

SEQ ID NO: 1468971 - DNA, 15 bp, Homo sapiens
gaaaggtatgggctt

SEQ ID NO: 1468972 - DNA, 15 bp, Homo sapiens
aaaggtatgggcttt

SEQ ID NO: 1468973 - DNA, 15 bp, Homo sapiens
aaggtatgggctttg

SEQ ID NO: 1468974 - DNA, 15 bp, Homo sapiens
aggtatgggctttgc

SEQ ID NO: 1468975 - DNA, 15 bp, Homo sapiens
ggtatgggctttgcc

SEQ ID NO: 1468976 - DNA, 15 bp, Homo sapiens
gtatgggctttgccc

SEQ ID NO: 1468977 - DNA, 15 bp, Homo sapiens
tatgggctttgccct

SEQ ID NO: 1468978 - DNA, 15 bp, Homo sapiens
atgggctttgcccta

SEQ ID NO: 1468979 - DNA, 15 bp, Homo sapiens
tgggctttgccctat

SEQ ID NO: 1468980 - DNA, 15 bp, Homo sapiens
gggctttgccctata

SEQ ID NO: 1468981 - DNA, 15 bp, Homo sapiens
ggctttgccctatac

SEQ ID NO: 1468982 - DNA, 15 bp, Homo sapiens
gctttgccctatacc

SEQ ID NO: 1468983 - DNA, 15 bp, Homo sapiens
ctttgccctatacct

SEQ ID NO: 1468984 - DNA, 15 bp, Homo sapiens
tttgccctatacctt

SEQ ID NO: 1468985 - DNA, 15 bp, Homo sapiens
ttgccctataccttt

SEQ ID NO: 1468986 - DNA, 15 bp, Homo sapiens
tgccctatacctttt

SEQ ID NO: 1468987 - DNA, 15 bp, Homo sapiens
gccctataccttttc

SEQ ID NO: 1468988 - DNA, 15 bp, Homo sapiens
ccctataccttttca

SEQ ID NO: 1468989 - DNA, 15 bp, Homo sapiens
cctataccttttcat

SEQ ID NO: 1468990 - DNA, 15 bp, Homo sapiens
ctataccttttcatt

SEQ ID NO: 1468991 - DNA, 15 bp, Homo sapiens
tataccttttcattg

SEQ ID NO: 1468992 - DNA, 15 bp, Homo sapiens
ataccttttcattga

SEQ ID NO: 1468993 - DNA, 15 bp, Homo sapiens
taccttttcattgaa

SEQ ID NO: 1468994 - DNA, 15 bp, Homo sapiens
accttttcattgaaa

SEQ ID NO: 1468995 - DNA, 15 bp, Homo sapiens
ccttttcattgaaaa

SEQ ID NO: 1468996 - DNA, 15 bp, Homo sapiens
cttttcattgaaaaa

SEQ ID NO: 1468997 - DNA, 15 bp, Homo sapiens
ttttcattgaaaaat

SEQ ID NO: 1468998 - DNA, 15 bp, Homo sapiens
tttcattgaaaaata

SEQ ID NO: 1468999 - DNA, 15 bp, Homo sapiens
ttcattgaaaaataa

SEQ ID NO: 1469000 - DNA, 15 bp, Homo sapiens
tcattgaaaaataat

SEQ ID NO: 1469001 - DNA, 15 bp, Homo sapiens
cattgaaaaataatc

SEQ ID NO: 1469002 - DNA, 15 bp, Homo sapiens
attgaaaaataatct

SEQ ID NO: 1469003 - DNA, 15 bp, Homo sapiens
ttgaaaaataatctt

SEQ ID NO: 1469004 - DNA, 15 bp, Homo sapiens
tgaaaaataatcttg

SEQ ID NO: 1469005 - DNA, 15 bp, Homo sapiens
gaaaaataatcttgg

SEQ ID NO: 1469006 - DNA, 15 bp, Homo sapiens
aaaaataatcttggc

SEQ ID NO: 1469007 - DNA, 15 bp, Homo sapiens
aaaataatcttggcc

SEQ ID NO: 1469008 - DNA, 15 bp, Homo sapiens
aaataatcttggcca

SEQ ID NO: 1469009 - DNA, 15 bp, Homo sapiens
aataatcttggccaa

SEQ ID NO: 1469010 - DNA, 15 bp, Homo sapiens
ataatcttggccaaa

SEQ ID NO: 1469011 - DNA, 15 bp, Homo sapiens
taatcttggccaaaa

SEQ ID NO: 1469012 - DNA, 15 bp, Homo sapiens
aatcttggccaaaag

SEQ ID NO: 1469013 - DNA, 15 bp, Homo sapiens
atcttggccaaaagg

SEQ ID NO: 1469014 - DNA, 15 bp, Homo sapiens
tcttggccaaaagga

SEQ ID NO: 1469015 - DNA, 15 bp, Homo sapiens
cttggccaaaaggaa

SEQ ID NO: 1469016 - DNA, 15 bp, Homo sapiens
tggccaaaaggaatc

SEQ ID NO: 1469017 - DNA, 15 bp, Homo sapiens
ggccaaaaggaatcc

SEQ ID NO: 1469018 - DNA, 15 bp, Homo sapiens
gccaaaaggaatccc

SEQ ID NO: 1469019 - DNA, 15 bp, Homo sapiens
ccaaaaggaatccct

SEQ ID NO: 1469020 - DNA, 15 bp, Homo sapiens
caaaaggaatcccta

SEQ ID NO: 1469021 - DNA, 15 bp, Homo sapiens
aaaaggaatccctat

SEQ ID NO: 1469022 - DNA, 15 bp, Homo sapiens
aaaggaatccctatt

SEQ ID NO: 1469023 - DNA, 15 bp, Homo sapiens
aaggaatccctatta

SEQ ID NO: 1469024 - DNA, 15 bp, Homo sapiens
aggaatccctattat

SEQ ID NO: 1469025 - DNA, 15 bp, Homo sapiens
ggaatccctattata

SEQ ID NO: 1469026 - DNA, 15 bp, Homo sapiens
gaatccctattatac

SEQ ID NO: 1469027 - DNA, 15 bp, Homo sapiens
aatccctattataca

SEQ ID NO: 1469028 - DNA, 15 bp, Homo sapiens
atccctattatacat

SEQ ID NO: 1469029 - DNA, 15 bp, Homo sapiens
tccctattatacata

SEQ ID NO: 1469030 - DNA, 15 bp, Homo sapiens
ccctattatacataa

SEQ ID NO: 1469031 - DNA, 15 bp, Homo sapiens
cctattatacataat

SEQ ID NO: 1469032 - DNA, 15 bp, Homo sapiens
ctattatacataatg

SEQ ID NO: 1469033 - DNA, 15 bp, Homo sapiens
tattatacataatgg

SEQ ID NO: 1469034 - DNA, 15 bp, Homo sapiens
attatacataatggc

SEQ ID NO: 1469035 - DNA, 15 bp, Homo sapiens
ttatacataatggcg

SEQ ID NO: 1469036 - DNA, 15 bp, Homo sapiens
tatacataatggcga

SEQ ID NO: 1469037 - DNA, 15 bp, Homo sapiens
atacataatggcgat

SEQ ID NO: 1469038 - DNA, 15 bp, Homo sapiens
tacataatggcgatt

SEQ ID NO: 1469039 - DNA, 15 bp, Homo sapiens
acataatggcgattt

SEQ ID NO: 1469040 - DNA, 15 bp, Homo sapiens
cataatggcgatttc

SEQ ID NO: 1469041 - DNA, 15 bp, Homo sapiens
ataatggcgatttca

SEQ ID NO: 1469042 - DNA, 15 bp, Homo sapiens
taatggcgatttcag

SEQ ID NO: 1469043 - DNA, 15 bp, Homo sapiens
aatggcgatttcagt

SEQ ID NO: 1469044 - DNA, 15 bp, Homo sapiens
atggcgatttcagtt

SEQ ID NO: 1469045 - DNA, 15 bp, Homo sapiens
tggcgatttcagttt

SEQ ID NO: 1469046 - DNA, 15 bp, Homo sapiens
ggcgatttcagtttc

SEQ ID NO: 1469047 - DNA, 15 bp, Homo sapiens
gcgatttcagtttct

SEQ ID NO: 1469048 - DNA, 15 bp, Homo sapiens
cgatttcagtttctc

SEQ ID NO: 1469049 - DNA, 15 bp, Homo sapiens
gatttcagtttctcc

SEQ ID NO: 1469050 - DNA, 15 bp, Homo sapiens
atttcagtttctcca

SEQ ID NO: 1469051 - DNA, 15 bp, Homo sapiens
tttcagtttctccat

SEQ ID NO: 1469052 - DNA, 15 bp, Homo sapiens
ttcagtttctccatt

SEQ ID NO: 1469053 - DNA, 15 bp, Homo sapiens
tcagtttctccattt

SEQ ID NO: 1469054 - DNA, 15 bp, Homo sapiens
cagtttctccatttg

SEQ ID NO: 1469055 - DNA, 15 bp, Homo sapiens
agtttctccatttgc

SEQ ID NO: 1469056 - DNA, 15 bp, Homo sapiens
gtttctccatttgca

SEQ ID NO: 1469057 - DNA, 15 bp, Homo sapiens
tttctccatttgcaa

SEQ ID NO: 1469058 - DNA, 15 bp, Homo sapiens
ttctccatttgcaaa

SEQ ID NO: 1469059 - DNA, 15 bp, Homo sapiens
tctccatttgcaaaa

SEQ ID NO: 1469060 - DNA, 15 bp, Homo sapiens
ctccatttgcaaaat

SEQ ID NO: 1469061 - DNA, 15 bp, Homo sapiens
tccatttgcaaaata

SEQ ID NO: 1469062 - DNA, 15 bp, Homo sapiens
ccatttgcaaaatac

SEQ ID NO: 1469063 - DNA, 15 bp, Homo sapiens
catttgcaaaatact

SEQ ID NO: 1469064 - DNA, 15 bp, Homo sapiens
atttgcaaaatactg

SEQ ID NO: 1469065 - DNA, 15 bp, Homo sapiens
tttgcaaaatactgg

SEQ ID NO: 1469066 - DNA, 15 bp, Homo sapiens
ttgcaaaatactggc

SEQ ID NO: 1469067 - DNA, 15 bp, Homo sapiens
tgcaaaatactggca

SEQ ID NO: 1469068 - DNA, 15 bp, Homo sapiens
gcaaaatactggcat

SEQ ID NO: 1469069 - DNA, 15 bp, Homo sapiens
caaaatactggcatt

SEQ ID NO: 1469070 - DNA, 15 bp, Homo sapiens
aaaatactggcattg

SEQ ID NO: 1469071 - DNA, 15 bp, Homo sapiens
aaatactggcattgt

SEQ ID NO: 1469072 - DNA, 15 bp, Homo sapiens
aatactggcattgta

SEQ ID NO: 1469073 - DNA, 15 bp, Homo sapiens
atactggcattgtac

SEQ ID NO: 1469074 - DNA, 15 bp, Homo sapiens
tactggcattgtact

SEQ ID NO: 1469075 - DNA, 15 bp, Homo sapiens
actggcattgtactt

SEQ ID NO: 1469076 - DNA, 15 bp, Homo sapiens
ctggcattgtacttg

SEQ ID NO: 1469077 - DNA, 15 bp, Homo sapiens
tggcattgtacttgc

SEQ ID NO: 1469078 - DNA, 15 bp, Homo sapiens
ggcattgtacttgct

SEQ ID NO: 1469079 - DNA, 15 bp, Homo sapiens
gcattgtacttgctt

SEQ ID NO: 1469080 - DNA, 15 bp, Homo sapiens
cattgtacttgctta

SEQ ID NO: 1469081 - DNA, 15 bp, Homo sapiens
attgtacttgcttat

SEQ ID NO: 1469082 - DNA, 15 bp, Homo sapiens
ttgtacttgcttatt

SEQ ID NO: 1469083 - DNA, 15 bp, Homo sapiens
tgtacttgcttattt

SEQ ID NO: 1469084 - DNA, 15 bp, Homo sapiens
gtacttgcttatttt

SEQ ID NO: 1469085 - DNA, 15 bp, Homo sapiens
tacttgcttattttt

SEQ ID NO: 1469086 - DNA, 15 bp, Homo sapiens
acttgcttattttta

SEQ ID NO: 1469087 - DNA, 15 bp, Homo sapiens
cttgcttatttttaa

SEQ ID NO: 1469088 - DNA, 15 bp, Homo sapiens
ttgcttatttttaag

SEQ ID NO: 1469089 - DNA, 15 bp, Homo sapiens
tgcttatttttaagg

SEQ ID NO: 1469090 - DNA, 15 bp, Homo sapiens
gcttatttttaaggt

SEQ ID NO: 1469091 - DNA, 15 bp, Homo sapiens
cttatttttaaggtc

SEQ ID NO: 1469092 - DNA, 15 bp, Homo sapiens
ttatttttaaggtca

SEQ ID NO: 1469093 - DNA, 15 bp, Homo sapiens
tatttttaaggtcat

SEQ ID NO: 1469094 - DNA, 15 bp, Homo sapiens
atttttaaggtcatt

SEQ ID NO: 1469095 - DNA, 15 bp, Homo sapiens
tttttaaggtcattt

SEQ ID NO: 1469096 - DNA, 15 bp, Homo sapiens
ttttaaggtcatttt

SEQ ID NO: 1469097 - DNA, 15 bp, Homo sapiens
tttaaggtcattttt

SEQ ID NO: 1469098 - DNA, 15 bp, Homo sapiens
ttaaggtcattttta

SEQ ID NO: 1469099 - DNA, 15 bp, Homo sapiens
taaggtcatttttag

SEQ ID NO: 1469100 - DNA, 15 bp, Homo sapiens
aaggtcatttttagc

SEQ ID NO: 1469101 - DNA, 15 bp, Homo sapiens
aggtcatttttagct

SEQ ID NO: 1469102 - DNA, 15 bp, Homo sapiens
ggtcatttttagctc

SEQ ID NO: 1469103 - DNA, 15 bp, Homo sapiens
gtcatttttagctct

SEQ ID NO: 1469104 - DNA, 15 bp, Homo sapiens
tcatttttagctcta

SEQ ID NO: 1469105 - DNA, 15 bp, Homo sapiens
catttttagctctaa

SEQ ID NO: 1469106 - DNA, 15 bp, Homo sapiens
atttttagctctaat

SEQ ID NO: 1469107 - DNA, 15 bp, Homo sapiens
tttttagctctaatg

SEQ ID NO: 1469108 - DNA, 15 bp, Homo sapiens
ttttagctctaatgc

SEQ ID NO: 1469109 - DNA, 15 bp, Homo sapiens
tttagctctaatgct

SEQ ID NO: 1469110 - DNA, 15 bp, Homo sapiens
ttagctctaatgctt

SEQ ID NO: 1469111 - DNA, 15 bp, Homo sapiens
tagctctaatgcttt

SEQ ID NO: 1469112 - DNA, 15 bp, Homo sapiens
agctctaatgcttta

SEQ ID NO: 1469113 - DNA, 15 bp, Homo sapiens
gctctaatgctttat

SEQ ID NO: 1469114 - DNA, 15 bp, Homo sapiens
ctctaatgctttatg

SEQ ID NO: 1469115 - DNA, 15 bp, Homo sapiens
ctaatgctttatgcc

SEQ ID NO: 1469116 - DNA, 15 bp, Homo sapiens
taatgctttatgcca

SEQ ID NO: 1469117 - DNA, 15 bp, Homo sapiens
aatgctttatgccac

SEQ ID NO: 1469118 - DNA, 15 bp, Homo sapiens
atgctttatgccacc

SEQ ID NO: 1469119 - DNA, 15 bp, Homo sapiens
tgctttatgccacca

SEQ ID NO: 1469120 - DNA, 15 bp, Homo sapiens
gctttatgccaccat

SEQ ID NO: 1469121 - DNA, 15 bp, Homo sapiens
ctttatgccaccatg

SEQ ID NO: 1469122 - DNA, 15 bp, Homo sapiens
tttatgccaccatga

SEQ ID NO: 1469123 - DNA, 15 bp, Homo sapiens
ttatgccaccatgaa

SEQ ID NO: 1469124 - DNA, 15 bp, Homo sapiens
tatgccaccatgaaa

SEQ ID NO: 1469125 - DNA, 15 bp, Homo sapiens
atgccaccatgaaaa

SEQ ID NO: 1469126 - DNA, 15 bp, Homo sapiens
tgccaccatgaaaat

SEQ ID NO: 1469127 - DNA, 15 bp, Homo sapiens
gccaccatgaaaata

SEQ ID NO: 1469128 - DNA, 15 bp, Homo sapiens
ccaccatgaaaatat

SEQ ID NO: 1469129 - DNA, 15 bp, Homo sapiens
caccatgaaaatatg

SEQ ID NO: 1469130 - DNA, 15 bp, Homo sapiens
accatgaaaatatga

SEQ ID NO: 1469131 - DNA, 15 bp, Homo sapiens
ccatgaaaatatgat

SEQ ID NO: 1469132 - DNA, 15 bp, Homo sapiens
catgaaaatatgatt

SEQ ID NO: 1469133 - DNA, 15 bp, Homo sapiens
atgaaaatatgattt

SEQ ID NO: 1469134 - DNA, 15 bp, Homo sapiens
tgaaaatatgatttc

SEQ ID NO: 1469135 - DNA, 15 bp, Homo sapiens
gaaaatatgatttcc

SEQ ID NO: 1469136 - DNA, 15 bp, Homo sapiens
aaaatatgatttcct

SEQ ID NO: 1469137 - DNA, 15 bp, Homo sapiens
aaatatgatttccta

SEQ ID NO: 1469138 - DNA, 15 bp, Homo sapiens
aatatgatttcctat

SEQ ID NO: 1469139 - DNA, 15 bp, Homo sapiens
atatgatttcctatt

SEQ ID NO: 1469140 - DNA, 15 bp, Homo sapiens
tatgatttcctatta

SEQ ID NO: 1469141 - DNA, 15 bp, Homo sapiens
atgatttcctattag

SEQ ID NO: 1469142 - DNA, 15 bp, Homo sapiens
tgatttcctattagg

SEQ ID NO: 1469143 - DNA, 15 bp, Homo sapiens
gatttcctattaggt

SEQ ID NO: 1469144 - DNA, 15 bp, Homo sapiens
atttcctattaggta

SEQ ID NO: 1469145 - DNA, 15 bp, Homo sapiens
tttcctattaggtag

SEQ ID NO: 1469146 - DNA, 15 bp, Homo sapiens
ttcctattaggtaga

SEQ ID NO: 1469147 - DNA, 15 bp, Homo sapiens
tcctattaggtagag

SEQ ID NO: 1469148 - DNA, 15 bp, Homo sapiens
cctattaggtagagc

SEQ ID NO: 1469149 - DNA, 15 bp, Homo sapiens
ctattaggtagagct

SEQ ID NO: 1469150 - DNA, 15 bp, Homo sapiens
tattaggtagagctc

SEQ ID NO: 1469151 - DNA, 15 bp, Homo sapiens
attaggtagagctcc

SEQ ID NO: 1469152 - DNA, 15 bp, Homo sapiens
ttaggtagagctcca

SEQ ID NO: 1469153 - DNA, 15 bp, Homo sapiens
taggtagagctccat

SEQ ID NO: 1469154 - DNA, 15 bp, Homo sapiens
aggtagagctccata

SEQ ID NO: 1469155 - DNA, 15 bp, Homo sapiens
ggtagagctccatac

SEQ ID NO: 1469156 - DNA, 15 bp, Homo sapiens
gtagagctccatact

SEQ ID NO: 1469157 - DNA, 15 bp, Homo sapiens
tagagctccatacta

SEQ ID NO: 1469158 - DNA, 15 bp, Homo sapiens
agagctccatactat

SEQ ID NO: 1469159 - DNA, 15 bp, Homo sapiens
gagctccatactatt

SEQ ID NO: 1469160 - DNA, 15 bp, Homo sapiens
agctccatactatta

SEQ ID NO: 1469161 - DNA, 15 bp, Homo sapiens
gctccatactattaa

SEQ ID NO: 1469162 - DNA, 15 bp, Homo sapiens
ctccatactattaac

SEQ ID NO: 1469163 - DNA, 15 bp, Homo sapiens
tccatactattaaca

SEQ ID NO: 1469164 - DNA, 15 bp, Homo sapiens
ccatactattaacag

SEQ ID NO: 1469165 - DNA, 15 bp, Homo sapiens
catactattaacaga

SEQ ID NO: 1469166 - DNA, 15 bp, Homo sapiens
atactattaacagat

SEQ ID NO: 1469167 - DNA, 15 bp, Homo sapiens
tactattaacagatg

SEQ ID NO: 1469168 - DNA, 15 bp, Homo sapiens
actattaacagatgg

SEQ ID NO: 1469169 - DNA, 15 bp, Homo sapiens
ctattaacagatggt

SEQ ID NO: 1469170 - DNA, 15 bp, Homo sapiens
tattaacagatggtt

SEQ ID NO: 1469171 - DNA, 15 bp, Homo sapiens
attaacagatggttt

SEQ ID NO: 1469172 - DNA, 15 bp, Homo sapiens
ttaacagatggtttg

SEQ ID NO: 1469173 - DNA, 15 bp, Homo sapiens
taacagatggtttgc

SEQ ID NO: 1469174 - DNA, 15 bp, Homo sapiens
aacagatggtttgct

SEQ ID NO: 1469175 - DNA, 15 bp, Homo sapiens
acagatggtttgctt

SEQ ID NO: 1469176 - DNA, 15 bp, Homo sapiens
cagatggtttgcttt

SEQ ID NO: 1469177 - DNA, 15 bp, Homo sapiens
agatggtttgctttt

SEQ ID NO: 1469178 - DNA, 15 bp, Homo sapiens
gatggtttgcttttc

SEQ ID NO: 1469179 - DNA, 15 bp, Homo sapiens
atggtttgcttttct

SEQ ID NO: 1469180 - DNA, 15 bp, Homo sapiens
tggtttgcttttcta

SEQ ID NO: 1469181 - DNA, 15 bp, Homo sapiens
ggtttgcttttctag

SEQ ID NO: 1469182 - DNA, 15 bp, Homo sapiens
gtttgcttttctagt

SEQ ID NO: 1469183 - DNA, 15 bp, Homo sapiens
tttgcttttctagtt

SEQ ID NO: 1469184 - DNA, 15 bp, Homo sapiens
ttgcttttctagttc

SEQ ID NO: 1469185 - DNA, 15 bp, Homo sapiens
tgcttttctagttcc

SEQ ID NO: 1469186 - DNA, 15 bp, Homo sapiens
gcttttctagttccc

SEQ ID NO: 1469187 - DNA, 15 bp, Homo sapiens
cttttctagttccca

SEQ ID NO: 1469188 - DNA, 15 bp, Homo sapiens
ttttctagttcccag

SEQ ID NO: 1469189 - DNA, 15 bp, Homo sapiens
tttctagttcccaga

SEQ ID NO: 1469190 - DNA, 15 bp, Homo sapiens
ttctagttcccagat

SEQ ID NO: 1469191 - DNA, 15 bp, Homo sapiens
tctagttcccagatc

SEQ ID NO: 1469192 - DNA, 15 bp, Homo sapiens
ctagttcccagatcc

SEQ ID NO: 1469193 - DNA, 15 bp, Homo sapiens
tagttcccagatccc

SEQ ID NO: 1469194 - DNA, 15 bp, Homo sapiens
agttcccagatccct

SEQ ID NO: 1469195 - DNA, 15 bp, Homo sapiens
gttcccagatcccta

SEQ ID NO: 1469196 - DNA, 15 bp, Homo sapiens
ttcccagatccctat

SEQ ID NO: 1469197 - DNA, 15 bp, Homo sapiens
tcccagatccctata

SEQ ID NO: 1469198 - DNA, 15 bp, Homo sapiens
cccagatccctataa

SEQ ID NO: 1469199 - DNA, 15 bp, Homo sapiens
ccagatccctataac

SEQ ID NO: 1469200 - DNA, 15 bp, Homo sapiens
cagatccctataacc

SEQ ID NO: 1469201 - DNA, 15 bp, Homo sapiens
agatccctataaccg

SEQ ID NO: 1469202 - DNA, 15 bp, Homo sapiens
gatccctataaccgt

SEQ ID NO: 1469203 - DNA, 15 bp, Homo sapiens
atccctataaccgtt

SEQ ID NO: 1469204 - DNA, 15 bp, Homo sapiens
tccctataaccgttt

SEQ ID NO: 1469205 - DNA, 15 bp, Homo sapiens
ccctataaccgtttg

SEQ ID NO: 1469206 - DNA, 15 bp, Homo sapiens
cctataaccgtttgt

SEQ ID NO: 1469207 - DNA, 15 bp, Homo sapiens
ctataaccgtttgta

SEQ ID NO: 1469208 - DNA, 15 bp, Homo sapiens
tataaccgtttgtaa

SEQ ID NO: 1469209 - DNA, 15 bp, Homo sapiens
ataaccgtttgtaat

SEQ ID NO: 1469210 - DNA, 15 bp, Homo sapiens
taaccgtttgtaata

SEQ ID NO: 1469211 - DNA, 15 bp, Homo sapiens
aaccgtttgtaatat

SEQ ID NO: 1469212 - DNA, 15 bp, Homo sapiens
accgtttgtaatatt

SEQ ID NO: 1469213 - DNA, 15 bp, Homo sapiens
ccgtttgtaatattt

SEQ ID NO: 1469214 - DNA, 15 bp, Homo sapiens
cgtttgtaatatttc

SEQ ID NO: 1469215 - DNA, 15 bp, Homo sapiens
gtttgtaatatttct

SEQ ID NO: 1469216 - DNA, 15 bp, Homo sapiens
tttgtaatatttctt

SEQ ID NO: 1469217 - DNA, 15 bp, Homo sapiens
ttgtaatatttcttc

SEQ ID NO: 1469218 - DNA, 15 bp, Homo sapiens
tgtaatatttcttct

SEQ ID NO: 1469219 - DNA, 15 bp, Homo sapiens
gtaatatttcttctt

SEQ ID NO: 1469220 - DNA, 15 bp, Homo sapiens
taatatttcttctta

SEQ ID NO: 1469221 - DNA, 15 bp, Homo sapiens
aatatttcttcttaa

SEQ ID NO: 1469222 - DNA, 15 bp, Homo sapiens
atatttcttcttaag

SEQ ID NO: 1469223 - DNA, 15 bp, Homo sapiens
tatttcttcttaagt

SEQ ID NO: 1469224 - DNA, 15 bp, Homo sapiens
atttcttcttaagta

SEQ ID NO: 1469225 - DNA, 15 bp, Homo sapiens
tttcttcttaagtat

SEQ ID NO: 1469226 - DNA, 15 bp, Homo sapiens
ttcttcttaagtata

SEQ ID NO: 1469227 - DNA, 15 bp, Homo sapiens
tcttcttaagtataa

SEQ ID NO: 1469228 - DNA, 15 bp, Homo sapiens
cttcttaagtataaa

SEQ ID NO: 1469229 - DNA, 15 bp, Homo sapiens
ttcttaagtataaat

SEQ ID NO: 1469230 - DNA, 15 bp, Homo sapiens
tcttaagtataaatg

SEQ ID NO: 1469231 - DNA, 15 bp, Homo sapiens
cttaagtataaatgt

SEQ ID NO: 1469232 - DNA, 15 bp, Homo sapiens
ttaagtataaatgtg

SEQ ID NO: 1469233 - DNA, 15 bp, Homo sapiens
taagtataaatgtga

SEQ ID NO: 1469234 - DNA, 15 bp, Homo sapiens
aagtataaatgtgaa

SEQ ID NO: 1469235 - DNA, 15 bp, Homo sapiens
agtataaatgtgaac

SEQ ID NO: 1469236 - DNA, 15 bp, Homo sapiens
gtataaatgtgaaca

SEQ ID NO: 1469237 - DNA, 15 bp, Homo sapiens
tataaatgtgaacaa

SEQ ID NO: 1469238 - DNA, 15 bp, Homo sapiens
ataaatgtgaacaaa

SEQ ID NO: 1469239 - DNA, 15 bp, Homo sapiens
taaatgtgaacaaag

SEQ ID NO: 1469240 - DNA, 15 bp, Homo sapiens
aaatgtgaacaaagc

SEQ ID NO: 1469241 - DNA, 15 bp, Homo sapiens
aatgtgaacaaagca

SEQ ID NO: 1469242 - DNA, 15 bp, Homo sapiens
atgtgaacaaagcac

SEQ ID NO: 1469243 - DNA, 15 bp, Homo sapiens
tgtgaacaaagcact

SEQ ID NO: 1469244 - DNA, 15 bp, Homo sapiens
gtgaacaaagcactt

SEQ ID NO: 1469245 - DNA, 15 bp, Homo sapiens
tgaacaaagcacttt

SEQ ID NO: 1469246 - DNA, 15 bp, Homo sapiens
gaacaaagcacttta

SEQ ID NO: 1469247 - DNA, 15 bp, Homo sapiens
aacaaagcactttaa

SEQ ID NO: 1469248 - DNA, 15 bp, Homo sapiens
acaaagcactttaat

SEQ ID NO: 1469249 - DNA, 15 bp, Homo sapiens
caaagcactttaatt

SEQ ID NO: 1469250 - DNA, 15 bp, Homo sapiens
aaagcactttaattt

SEQ ID NO: 1469251 - DNA, 15 bp, Homo sapiens
aagcactttaattta

SEQ ID NO: 1469252 - DNA, 15 bp, Homo sapiens
agcactttaatttag

SEQ ID NO: 1469253 - DNA, 15 bp, Homo sapiens
gcactttaatttagc

SEQ ID NO: 1469254 - DNA, 15 bp, Homo sapiens
cactttaatttagca

SEQ ID NO: 1469255 - DNA, 15 bp, Homo sapiens
actttaatttagcaa

SEQ ID NO: 1469256 - DNA, 15 bp, Homo sapiens
ctttaatttagcaaa

SEQ ID NO: 1469257 - DNA, 15 bp, Homo sapiens
tttaatttagcaaat

SEQ ID NO: 1469258 - DNA, 15 bp, Homo sapiens
ttaatttagcaaata

SEQ ID NO: 1469259 - DNA, 15 bp, Homo sapiens
taatttagcaaataa

SEQ ID NO: 1469260 - DNA, 15 bp, Homo sapiens
aatttagcaaataac

SEQ ID NO: 1469261 - DNA, 15 bp, Homo sapiens
atttagcaaataacc

SEQ ID NO: 1469262 - DNA, 15 bp, Homo sapiens
tttagcaaataacca

SEQ ID NO: 1469263 - DNA, 15 bp, Homo sapiens
ttagcaaataaccag

SEQ ID NO: 1469264 - DNA, 15 bp, Homo sapiens
tagcaaataaccagc

SEQ ID NO: 1469265 - DNA, 15 bp, Homo sapiens
agcaaataaccagct

SEQ ID NO: 1469266 - DNA, 15 bp, Homo sapiens
gcaaataaccagcta

SEQ ID NO: 1469267 - DNA, 15 bp, Homo sapiens
caaataaccagctaa

SEQ ID NO: 1469268 - DNA, 15 bp, Homo sapiens
aaataaccagctaaa

SEQ ID NO: 1469269 - DNA, 15 bp, Homo sapiens
aataaccagctaaag

SEQ ID NO: 1469270 - DNA, 15 bp, Homo sapiens
ataaccagctaaagt

SEQ ID NO: 1469271 - DNA, 15 bp, Homo sapiens
taaccagctaaagtg

SEQ ID NO: 1469272 - DNA, 15 bp, Homo sapiens
aaccagctaaagtgg

SEQ ID NO: 1469273 - DNA, 15 bp, Homo sapiens
accagctaaagtggt

SEQ ID NO: 1469274 - DNA, 15 bp, Homo sapiens
ccagctaaagtggta

SEQ ID NO: 1469275 - DNA, 15 bp, Homo sapiens
cagctaaagtggtag

SEQ ID NO: 1469276 - DNA, 15 bp, Homo sapiens
agctaaagtggtagt

SEQ ID NO: 1469277 - DNA, 15 bp, Homo sapiens
gctaaagtggtagtc

SEQ ID NO: 1469278 - DNA, 15 bp, Homo sapiens
ctaaagtggtagtct

SEQ ID NO: 1469279 - DNA, 15 bp, Homo sapiens
taaagtggtagtctt

SEQ ID NO: 1469280 - DNA, 15 bp, Homo sapiens
aaagtggtagtcttt

SEQ ID NO: 1469281 - DNA, 15 bp, Homo sapiens
aagtggtagtctttg

SEQ ID NO: 1469282 - DNA, 15 bp, Homo sapiens
agtggtagtctttgt

SEQ ID NO: 1469283 - DNA, 15 bp, Homo sapiens
gtggtagtctttgtc

SEQ ID NO: 1469284 - DNA, 15 bp, Homo sapiens
tggtagtctttgtct

SEQ ID NO: 1469285 - DNA, 15 bp, Homo sapiens
ggtagtctttgtctt

SEQ ID NO: 1469286 - DNA, 15 bp, Homo sapiens
gtagtctttgtcttt

SEQ ID NO: 1469287 - DNA, 15 bp, Homo sapiens
tagtctttgtctttt

SEQ ID NO: 1469288 - DNA, 15 bp, Homo sapiens
agtctttgtcttttt

SEQ ID NO: 1469289 - DNA, 15 bp, Homo sapiens
gtctttgtctttttt

SEQ ID NO: 1469290 - DNA, 15 bp, Homo sapiens
tctttgtcttttttt

SEQ ID NO: 1469291 - DNA, 15 bp, Homo sapiens
ctttgtcttttttta

SEQ ID NO: 1469292 - DNA, 15 bp, Homo sapiens
tttgtctttttttaa

SEQ ID NO: 1469293 - DNA, 15 bp, Homo sapiens
ttgtctttttttaaa

SEQ ID NO: 1469294 - DNA, 15 bp, Homo sapiens
tgtctttttttaaaa

SEQ ID NO: 1469295 - DNA, 15 bp, Homo sapiens
gtctttttttaaaaa

SEQ ID NO: 1469296 - DNA, 15 bp, Homo sapiens
aaaaaaattttattt

SEQ ID NO: 1469297 - DNA, 15 bp, Homo sapiens
aaaaaattttatttt

SEQ ID NO: 1469298 - DNA, 15 bp, Homo sapiens
aaaaattttatttta

SEQ ID NO: 1469299 - DNA, 15 bp, Homo sapiens
aaaattttattttaa

SEQ ID NO: 1469300 - DNA, 15 bp, Homo sapiens
aaattttattttaaa

SEQ ID NO: 1469301 - DNA, 15 bp, Homo sapiens
aattttattttaaaa

SEQ ID NO: 1469302 - DNA, 15 bp, Homo sapiens
attttattttaaaac

SEQ ID NO: 1469303 - DNA, 15 bp, Homo sapiens
ttttattttaaaact

SEQ ID NO: 1469304 - DNA, 15 bp, Homo sapiens
tttattttaaaactt

SEQ ID NO: 1469305 - DNA, 15 bp, Homo sapiens
ttattttaaaactta

SEQ ID NO: 1469306 - DNA, 15 bp, Homo sapiens
tattttaaaacttac

SEQ ID NO: 1469307 - DNA, 15 bp, Homo sapiens
attttaaaacttact

SEQ ID NO: 1469308 - DNA, 15 bp, Homo sapiens
ttttaaaacttacta

SEQ ID NO: 1469309 - DNA, 15 bp, Homo sapiens
tttaaaacttactag

SEQ ID NO: 1469310 - DNA, 15 bp, Homo sapiens
ttaaaacttactagt

SEQ ID NO: 1469311 - DNA, 15 bp, Homo sapiens
taaaacttactagtt

SEQ ID NO: 1469312 - DNA, 15 bp, Homo sapiens
aaaacttactagtta

SEQ ID NO: 1469313 - DNA, 15 bp, Homo sapiens
aaacttactagttag

SEQ ID NO: 1469314 - DNA, 15 bp, Homo sapiens
aacttactagttaga

SEQ ID NO: 1469315 - DNA, 15 bp, Homo sapiens
acttactagttagac

SEQ ID NO: 1469316 - DNA, 15 bp, Homo sapiens
cttactagttagact

SEQ ID NO: 1469317 - DNA, 15 bp, Homo sapiens
ttactagttagactg

SEQ ID NO: 1469318 - DNA, 15 bp, Homo sapiens
tactagttagactgg

SEQ ID NO: 1469319 - DNA, 15 bp, Homo sapiens
actagttagactggt

SEQ ID NO: 1469320 - DNA, 15 bp, Homo sapiens
ctagttagactggta

SEQ ID NO: 1469321 - DNA, 15 bp, Homo sapiens
tagttagactggtag

SEQ ID NO: 1469322 - DNA, 15 bp, Homo sapiens
agttagactggtagt

SEQ ID NO: 1469323 - DNA, 15 bp, Homo sapiens
gttagactggtagtc

SEQ ID NO: 1469324 - DNA, 15 bp, Homo sapiens
ttagactggtagtcc

SEQ ID NO: 1469325 - DNA, 15 bp, Homo sapiens
tagactggtagtcct

SEQ ID NO: 1469326 - DNA, 15 bp, Homo sapiens
agactggtagtcctt

SEQ ID NO: 1469327 - DNA, 15 bp, Homo sapiens
gactggtagtccttg

SEQ ID NO: 1469328 - DNA, 15 bp, Homo sapiens
actggtagtccttga

SEQ ID NO: 1469329 - DNA, 15 bp, Homo sapiens
ctggtagtccttgaa

SEQ ID NO: 1469330 - DNA, 15 bp, Homo sapiens
tggtagtccttgaaa

SEQ ID NO: 1469331 - DNA, 15 bp, Homo sapiens
ggtagtccttgaaag

SEQ ID NO: 1469332 - DNA, 15 bp, Homo sapiens
gtagtccttgaaagc

SEQ ID NO: 1469333 - DNA, 15 bp, Homo sapiens
tagtccttgaaagcc

SEQ ID NO: 1469334 - DNA, 15 bp, Homo sapiens
agtccttgaaagcca

SEQ ID NO: 1469335 - DNA, 15 bp, Homo sapiens
gtccttgaaagccaa

SEQ ID NO: 1469336 - DNA, 15 bp, Homo sapiens
tccttgaaagccaat

SEQ ID NO: 1469337 - DNA, 15 bp, Homo sapiens
ccttgaaagccaatt

SEQ ID NO: 1469338 - DNA, 15 bp, Homo sapiens
cttgaaagccaattt

SEQ ID NO: 1469339 - DNA, 15 bp, Homo sapiens
ttgaaagccaatttc

SEQ ID NO: 1469340 - DNA, 15 bp, Homo sapiens
tgaaagccaatttct

SEQ ID NO: 1469341 - DNA, 15 bp, Homo sapiens
gaaagccaatttctc

SEQ ID NO: 1469342 - DNA, 15 bp, Homo sapiens
aaagccaatttctct

SEQ ID NO: 1469343 - DNA, 15 bp, Homo sapiens
aagccaatttctctc

SEQ ID NO: 1469344 - DNA, 15 bp, Homo sapiens
agccaatttctctcc

SEQ ID NO: 1469345 - DNA, 15 bp, Homo sapiens
gccaatttctctcca

SEQ ID NO: 1469346 - DNA, 15 bp, Homo sapiens
ccaatttctctccaa

SEQ ID NO: 1469347 - DNA, 15 bp, Homo sapiens
caatttctctccaat

SEQ ID NO: 1469348 - DNA, 15 bp, Homo sapiens
aatttctctccaatg

SEQ ID NO: 1469349 - DNA, 15 bp, Homo sapiens
atttctctccaatga

SEQ ID NO: 1469350 - DNA, 15 bp, Homo sapiens
tttctctccaatgag

SEQ ID NO: 1469351 - DNA, 15 bp, Homo sapiens
ttctctccaatgagt

SEQ ID NO: 1469352 - DNA, 15 bp, Homo sapiens
tctctccaatgagta

SEQ ID NO: 1469353 - DNA, 15 bp, Homo sapiens
ctctccaatgagtat

SEQ ID NO: 1469354 - DNA, 15 bp, Homo sapiens
tctccaatgagtatt

SEQ ID NO: 1469355 - DNA, 15 bp, Homo sapiens
ctccaatgagtattc

SEQ ID NO: 1469356 - DNA, 15 bp, Homo sapiens
tccaatgagtattcc

SEQ ID NO: 1469357 - DNA, 15 bp, Homo sapiens
ccaatgagtattccc

SEQ ID NO: 1469358 - DNA, 15 bp, Homo sapiens
caatgagtattccct

SEQ ID NO: 1469359 - DNA, 15 bp, Homo sapiens
aatgagtattcccta

SEQ ID NO: 1469360 - DNA, 15 bp, Homo sapiens
atgagtattccctag

SEQ ID NO: 1469361 - DNA, 15 bp, Homo sapiens
tgagtattccctagg

SEQ ID NO: 1469362 - DNA, 15 bp, Homo sapiens
gagtattccctaggt

SEQ ID NO: 1469363 - DNA, 15 bp, Homo sapiens
agtattccctaggtt

SEQ ID NO: 1469364 - DNA, 15 bp, Homo sapiens
gtattccctaggttt

SEQ ID NO: 1469365 - DNA, 15 bp, Homo sapiens
tattccctaggtttg

SEQ ID NO: 1469366 - DNA, 15 bp, Homo sapiens
attccctaggtttgt

SEQ ID NO: 1469367 - DNA, 15 bp, Homo sapiens
ttccctaggtttgta

SEQ ID NO: 1469368 - DNA, 15 bp, Homo sapiens
tccctaggtttgtat

SEQ ID NO: 1469369 - DNA, 15 bp, Homo sapiens
ccctaggtttgtatt

SEQ ID NO: 1469370 - DNA, 15 bp, Homo sapiens
cctaggtttgtattc

SEQ ID NO: 1469371 - DNA, 15 bp, Homo sapiens
ctaggtttgtattca

SEQ ID NO: 1469372 - DNA, 15 bp, Homo sapiens
taggtttgtattcaa

SEQ ID NO: 1469373 - DNA, 15 bp, Homo sapiens
aggtttgtattcaac

SEQ ID NO: 1469374 - DNA, 15 bp, Homo sapiens
ggtttgtattcaaca

SEQ ID NO: 1469375 - DNA, 15 bp, Homo sapiens
gtttgtattcaacac

SEQ ID NO: 1469376 - DNA, 15 bp, Homo sapiens
tttgtattcaacaca

SEQ ID NO: 1469377 - DNA, 15 bp, Homo sapiens
ttgtattcaacacag

SEQ ID NO: 1469378 - DNA, 15 bp, Homo sapiens
tgtattcaacacagt

SEQ ID NO: 1469379 - DNA, 15 bp, Homo sapiens
gtattcaacacagtt

SEQ ID NO: 1469380 - DNA, 15 bp, Homo sapiens
tattcaacacagttt

SEQ ID NO: 1469381 - DNA, 15 bp, Homo sapiens
attcaacacagtttg

SEQ ID NO: 1469382 - DNA, 15 bp, Homo sapiens
ttcaacacagtttgg

SEQ ID NO: 1469383 - DNA, 15 bp, Homo sapiens
tcaacacagtttggt

SEQ ID NO: 1469384 - DNA, 15 bp, Homo sapiens
caacacagtttggtc

SEQ ID NO: 1469385 - DNA, 15 bp, Homo sapiens
aacacagtttggtcg

SEQ ID NO: 1469386 - DNA, 15 bp, Homo sapiens
acacagtttggtcgt

SEQ ID NO: 1469387 - DNA, 15 bp, Homo sapiens
cacagtttggtcgtt

SEQ ID NO: 1469388 - DNA, 15 bp, Homo sapiens
acagtttggtcgttt

SEQ ID NO: 1469389 - DNA, 15 bp, Homo sapiens
cagtttggtcgtttg

SEQ ID NO: 1469390 - DNA, 15 bp, Homo sapiens
agtttggtcgtttgt

SEQ ID NO: 1469391 - DNA, 15 bp, Homo sapiens
gtttggtcgtttgtc

SEQ ID NO: 1469392 - DNA, 15 bp, Homo sapiens
tttggtcgtttgtcc

SEQ ID NO: 1469393 - DNA, 15 bp, Homo sapiens
ttggtcgtttgtcct

SEQ ID NO: 1469394 - DNA, 15 bp, Homo sapiens
tggtcgtttgtcctc

SEQ ID NO: 1469395 - DNA, 15 bp, Homo sapiens
ggtcgtttgtcctct

SEQ ID NO: 1469396 - DNA, 15 bp, Homo sapiens
gtcgtttgtcctctc

SEQ ID NO: 1469397 - DNA, 15 bp, Homo sapiens
tcgtttgtcctctcc

SEQ ID NO: 1469398 - DNA, 15 bp, Homo sapiens
cgtttgtcctctcca

SEQ ID NO: 1469399 - DNA, 15 bp, Homo sapiens
gtttgtcctctccaa

SEQ ID NO: 1469400 - DNA, 15 bp, Homo sapiens
tttgtcctctccaaa

SEQ ID NO: 1469401 - DNA, 15 bp, Homo sapiens
ttgtcctctccaaat

SEQ ID NO: 1469402 - DNA, 15 bp, Homo sapiens
tgtcctctccaaatc

SEQ ID NO: 1469403 - DNA, 15 bp, Homo sapiens
gtcctctccaaatct

SEQ ID NO: 1469404 - DNA, 15 bp, Homo sapiens
tcctctccaaatctc

SEQ ID NO: 1469405 - DNA, 15 bp, Homo sapiens
cctctccaaatctca

SEQ ID NO: 1469406 - DNA, 15 bp, Homo sapiens
ctctccaaatctcat

SEQ ID NO: 1469407 - DNA, 15 bp, Homo sapiens
tctccaaatctcatg

SEQ ID NO: 1469408 - DNA, 15 bp, Homo sapiens
ctccaaatctcatgt

SEQ ID NO: 1469409 - DNA, 15 bp, Homo sapiens
tccaaatctcatgtt

SEQ ID NO: 1469410 - DNA, 15 bp, Homo sapiens
aatctcatgttgaag

SEQ ID NO: 1469411 - DNA, 15 bp, Homo sapiens
atctcatgttgaagt

SEQ ID NO: 1469412 - DNA, 15 bp, Homo sapiens
tctcatgttgaagta

SEQ ID NO: 1469413 - DNA, 15 bp, Homo sapiens
ctcatgttgaagtat

SEQ ID NO: 1469414 - DNA, 15 bp, Homo sapiens
tcatgttgaagtatg

SEQ ID NO: 1469415 - DNA, 15 bp, Homo sapiens
catgttgaagtatga

SEQ ID NO: 1469416 - DNA, 15 bp, Homo sapiens
atgttgaagtatgat

SEQ ID NO: 1469417 - DNA, 15 bp, Homo sapiens
tgttgaagtatgatt

SEQ ID NO: 1469418 - DNA, 15 bp, Homo sapiens
gttgaagtatgattc

SEQ ID NO: 1469419 - DNA, 15 bp, Homo sapiens
ttgaagtatgattcg

SEQ ID NO: 1469420 - DNA, 15 bp, Homo sapiens
tgaagtatgattcgc

SEQ ID NO: 1469421 - DNA, 15 bp, Homo sapiens
gaagtatgattcgca

SEQ ID NO: 1469422 - DNA, 15 bp, Homo sapiens
aagtatgattcgcag

SEQ ID NO: 1469423 - DNA, 15 bp, Homo sapiens
agtatgattcgcagt

SEQ ID NO: 1469424 - DNA, 15 bp, Homo sapiens
gtatgattcgcagtg

SEQ ID NO: 1469425 - DNA, 15 bp, Homo sapiens
tatgattcgcagtgt

SEQ ID NO: 1469426 - DNA, 15 bp, Homo sapiens
atgattcgcagtgtt

SEQ ID NO: 1469427 - DNA, 15 bp, Homo sapiens
tgattcgcagtgttg

SEQ ID NO: 1469428 - DNA, 15 bp, Homo sapiens
gattcgcagtgttgg

SEQ ID NO: 1469429 - DNA, 15 bp, Homo sapiens
attcgcagtgttgga

SEQ ID NO: 1469430 - DNA, 15 bp, Homo sapiens
ttcgcagtgttggag

SEQ ID NO: 1469431 - DNA, 15 bp, Homo sapiens
tcgcagtgttggagg

SEQ ID NO: 1469432 - DNA, 15 bp, Homo sapiens
cgcagtgttggaggt

SEQ ID NO: 1469433 - DNA, 15 bp, Homo sapiens
gcagtgttggaggtg

SEQ ID NO: 1469434 - DNA, 15 bp, Homo sapiens
cagtgttggaggtgg

SEQ ID NO: 1469435 - DNA, 15 bp, Homo sapiens
agtgttggaggtggg

SEQ ID NO: 1469436 - DNA, 15 bp, Homo sapiens
gtgttggaggtgggg

SEQ ID NO: 1469437 - DNA, 15 bp, Homo sapiens
tgttggaggtggggc

SEQ ID NO: 1469438 - DNA, 15 bp, Homo sapiens
gttggaggtggggcc

SEQ ID NO: 1469439 - DNA, 15 bp, Homo sapiens
ttggaggtggggcct

SEQ ID NO: 1469440 - DNA, 15 bp, Homo sapiens
gcctggtgggaggtg

SEQ ID NO: 1469441 - DNA, 15 bp, Homo sapiens
cctggtgggaggtga

SEQ ID NO: 1469442 - DNA, 15 bp, Homo sapiens
ctggtgggaggtgat

SEQ ID NO: 1469443 - DNA, 15 bp, Homo sapiens
tggtgggaggtgatt

SEQ ID NO: 1469444 - DNA, 15 bp, Homo sapiens
ggtgggaggtgatta

SEQ ID NO: 1469445 - DNA, 15 bp, Homo sapiens
gtgggaggtgattag

SEQ ID NO: 1469446 - DNA, 15 bp, Homo sapiens
tgggaggtgattaga

SEQ ID NO: 1469447 - DNA, 15 bp, Homo sapiens
gggaggtgattagat

SEQ ID NO: 1469448 - DNA, 15 bp, Homo sapiens
ggaggtgattagatc

SEQ ID NO: 1469449 - DNA, 15 bp, Homo sapiens
gaggtgattagatca

SEQ ID NO: 1469450 - DNA, 15 bp, Homo sapiens
aggtgattagatcat

SEQ ID NO: 1469451 - DNA, 15 bp, Homo sapiens
ggtgattagatcatg

SEQ ID NO: 1469452 - DNA, 15 bp, Homo sapiens
gtgattagatcatgg

SEQ ID NO: 1469453 - DNA, 15 bp, Homo sapiens
tgattagatcatggg

SEQ ID NO: 1469454 - DNA, 15 bp, Homo sapiens
gattagatcatgggg

SEQ ID NO: 1469455 - DNA, 15 bp, Homo sapiens
attagatcatggggg

SEQ ID NO: 1469456 - DNA, 15 bp, Homo sapiens
ttagatcatgggggg

SEQ ID NO: 1469457 - DNA, 15 bp, Homo sapiens
tagatcatggggggc

SEQ ID NO: 1469458 - DNA, 15 bp, Homo sapiens
agatcatggggggca

SEQ ID NO: 1469459 - DNA, 15 bp, Homo sapiens
gatcatggggggcag

SEQ ID NO: 1469460 - DNA, 15 bp, Homo sapiens
atcatggggggcaga

SEQ ID NO: 1469461 - DNA, 15 bp, Homo sapiens
tcatggggggcagat

SEQ ID NO: 1469462 - DNA, 15 bp, Homo sapiens
catggggggcagatc

SEQ ID NO: 1469463 - DNA, 15 bp, Homo sapiens
atggggggcagatcc

SEQ ID NO: 1469464 - DNA, 15 bp, Homo sapiens
tggggggcagatccc

SEQ ID NO: 1469465 - DNA, 15 bp, Homo sapiens
ggggggcagatccct

SEQ ID NO: 1469466 - DNA, 15 bp, Homo sapiens
gggggcagatccctg

SEQ ID NO: 1469467 - DNA, 15 bp, Homo sapiens
ggggcagatccctgg

SEQ ID NO: 1469468 - DNA, 15 bp, Homo sapiens
gggcagatccctggt

SEQ ID NO: 1469469 - DNA, 15 bp, Homo sapiens
ggcagatccctggtg

SEQ ID NO: 1469470 - DNA, 15 bp, Homo sapiens
gcagatccctggtga

SEQ ID NO: 1469471 - DNA, 15 bp, Homo sapiens
cagatccctggtgaa

SEQ ID NO: 1469472 - DNA, 15 bp, Homo sapiens
agatccctggtgaag

SEQ ID NO: 1469473 - DNA, 15 bp, Homo sapiens
gatccctggtgaagg

SEQ ID NO: 1469474 - DNA, 15 bp, Homo sapiens
atccctggtgaagga

SEQ ID NO: 1469475 - DNA, 15 bp, Homo sapiens
tccctggtgaaggaa

SEQ ID NO: 1469476 - DNA, 15 bp, Homo sapiens
ccctggtgaaggaat

SEQ ID NO: 1469477 - DNA, 15 bp, Homo sapiens
cctggtgaaggaatt

SEQ ID NO: 1469478 - DNA, 15 bp, Homo sapiens
ctggtgaaggaatta

SEQ ID NO: 1469479 - DNA, 15 bp, Homo sapiens
tggtgaaggaattag

SEQ ID NO: 1469480 - DNA, 15 bp, Homo sapiens
ggtgaaggaattagt

SEQ ID NO: 1469481 - DNA, 15 bp, Homo sapiens
gtgaaggaattagtg

SEQ ID NO: 1469482 - DNA, 15 bp, Homo sapiens
tgaaggaattagtgt

SEQ ID NO: 1469483 - DNA, 15 bp, Homo sapiens
gaaggaattagtgtc

SEQ ID NO: 1469484 - DNA, 15 bp, Homo sapiens
aaggaattagtgtca

SEQ ID NO: 1469485 - DNA, 15 bp, Homo sapiens
aggaattagtgtcat

SEQ ID NO: 1469486 - DNA, 15 bp, Homo sapiens
ggaattagtgtcatc

SEQ ID NO: 1469487 - DNA, 15 bp, Homo sapiens
gaattagtgtcatct

SEQ ID NO: 1469488 - DNA, 15 bp, Homo sapiens
aattagtgtcatctc

SEQ ID NO: 1469489 - DNA, 15 bp, Homo sapiens
attagtgtcatctct

SEQ ID NO: 1469490 - DNA, 15 bp, Homo sapiens
ttagtgtcatctctg

SEQ ID NO: 1469491 - DNA, 15 bp, Homo sapiens
tagtgtcatctctgg

SEQ ID NO: 1469492 - DNA, 15 bp, Homo sapiens
agtgtcatctctggg

SEQ ID NO: 1469493 - DNA, 15 bp, Homo sapiens
gtgtcatctctgggc

SEQ ID NO: 1469494 - DNA, 15 bp, Homo sapiens
tgtcatctctgggcg

SEQ ID NO: 1469495 - DNA, 15 bp, Homo sapiens
gtcatctctgggcga

SEQ ID NO: 1469496 - DNA, 15 bp, Homo sapiens
tcatctctgggcgag

SEQ ID NO: 1469497 - DNA, 15 bp, Homo sapiens
catctctgggcgaga

SEQ ID NO: 1469498 - DNA, 15 bp, Homo sapiens
atctctgggcgagaa

SEQ ID NO: 1469499 - DNA, 15 bp, Homo sapiens
tctctgggcgagaag

SEQ ID NO: 1469500 - DNA, 15 bp, Homo sapiens
ctctgggcgagaagt

SEQ ID NO: 1469501 - DNA, 15 bp, Homo sapiens
tctgggcgagaagtg

SEQ ID NO: 1469502 - DNA, 15 bp, Homo sapiens
ctgggcgagaagtga

SEQ ID NO: 1469503 - DNA, 15 bp, Homo sapiens
tgggcgagaagtgag

SEQ ID NO: 1469504 - DNA, 15 bp, Homo sapiens
gggcgagaagtgagt

SEQ ID NO: 1469505 - DNA, 15 bp, Homo sapiens
ggcgagaagtgagtt

SEQ ID NO: 1469506 - DNA, 15 bp, Homo sapiens
gcgagaagtgagttc

SEQ ID NO: 1469507 - DNA, 15 bp, Homo sapiens
cgagaagtgagttct

SEQ ID NO: 1469508 - DNA, 15 bp, Homo sapiens
gagaagtgagttctg

SEQ ID NO: 1469509 - DNA, 15 bp, Homo sapiens
agaagtgagttctgg

SEQ ID NO: 1469510 - DNA, 15 bp, Homo sapiens
gaagtgagttctggc

SEQ ID NO: 1469511 - DNA, 15 bp, Homo sapiens
aagtgagttctggct

SEQ ID NO: 1469512 - DNA, 15 bp, Homo sapiens
agtgagttctggctc

SEQ ID NO: 1469513 - DNA, 15 bp, Homo sapiens
gtgagttctggctca

SEQ ID NO: 1469514 - DNA, 15 bp, Homo sapiens
tgagttctggctcag

SEQ ID NO: 1469515 - DNA, 15 bp, Homo sapiens
gagttctggctcagt

SEQ ID NO: 1469516 - DNA, 15 bp, Homo sapiens
agttctggctcagtt

SEQ ID NO: 1469517 - DNA, 15 bp, Homo sapiens
gttctggctcagtta

SEQ ID NO: 1469518 - DNA, 15 bp, Homo sapiens
ttctggctcagttag

SEQ ID NO: 1469519 - DNA, 15 bp, Homo sapiens
tctggctcagttagc

SEQ ID NO: 1469520 - DNA, 15 bp, Homo sapiens
ctggctcagttagct

SEQ ID NO: 1469521 - DNA, 15 bp, Homo sapiens
tggctcagttagctc

SEQ ID NO: 1469522 - DNA, 15 bp, Homo sapiens
ggctcagttagctcg

SEQ ID NO: 1469523 - DNA, 15 bp, Homo sapiens
gctcagttagctcgc

SEQ ID NO: 1469524 - DNA, 15 bp, Homo sapiens
ctcagttagctcgcc

SEQ ID NO: 1469525 - DNA, 15 bp, Homo sapiens
tcagttagctcgcct

SEQ ID NO: 1469526 - DNA, 15 bp, Homo sapiens
cagttagctcgcctg

SEQ ID NO: 1469527 - DNA, 15 bp, Homo sapiens
agttagctcgcctga

SEQ ID NO: 1469528 - DNA, 15 bp, Homo sapiens
gttagctcgcctgag

SEQ ID NO: 1469529 - DNA, 15 bp, Homo sapiens
ttagctcgcctgaga

SEQ ID NO: 1469530 - DNA, 15 bp, Homo sapiens
tagctcgcctgagat

SEQ ID NO: 1469531 - DNA, 15 bp, Homo sapiens
agctcgcctgagatc

SEQ ID NO: 1469532 - DNA, 15 bp, Homo sapiens
gctcgcctgagatct

SEQ ID NO: 1469533 - DNA, 15 bp, Homo sapiens
ctcgcctgagatctg

SEQ ID NO: 1469534 - DNA, 15 bp, Homo sapiens
tcgcctgagatctgg

SEQ ID NO: 1469535 - DNA, 15 bp, Homo sapiens
cgcctgagatctggt

SEQ ID NO: 1469536 - DNA, 15 bp, Homo sapiens
gcctgagatctggtt

SEQ ID NO: 1469537 - DNA, 15 bp, Homo sapiens
cctgagatctggttg

SEQ ID NO: 1469538 - DNA, 15 bp, Homo sapiens
ctgagatctggttgt

SEQ ID NO: 1469539 - DNA, 15 bp, Homo sapiens
tgagatctggttgtt

SEQ ID NO: 1469540 - DNA, 15 bp, Homo sapiens
gagatctggttgtta

SEQ ID NO: 1469541 - DNA, 15 bp, Homo sapiens
agatctggttgttaa

SEQ ID NO: 1469542 - DNA, 15 bp, Homo sapiens
gatctggttgttaaa

SEQ ID NO: 1469543 - DNA, 15 bp, Homo sapiens
atctggttgttaaaa

SEQ ID NO: 1469544 - DNA, 15 bp, Homo sapiens
tctggttgttaaaag

SEQ ID NO: 1469545 - DNA, 15 bp, Homo sapiens
ctggttgttaaaaga

SEQ ID NO: 1469546 - DNA, 15 bp, Homo sapiens
tggttgttaaaagag

SEQ ID NO: 1469547 - DNA, 15 bp, Homo sapiens
ggttgttaaaagagt

SEQ ID NO: 1469548 - DNA, 15 bp, Homo sapiens
gttgttaaaagagtc

SEQ ID NO: 1469549 - DNA, 15 bp, Homo sapiens
ttgttaaaagagtct

SEQ ID NO: 1469550 - DNA, 15 bp, Homo sapiens
tgttaaaagagtctg

SEQ ID NO: 1469551 - DNA, 15 bp, Homo sapiens
gttaaaagagtctgg

SEQ ID NO: 1469552 - DNA, 15 bp, Homo sapiens
ttaaaagagtctggg

SEQ ID NO: 1469553 - DNA, 15 bp, Homo sapiens
taaaagagtctggga

SEQ ID NO: 1469554 - DNA, 15 bp, Homo sapiens
aaaagagtctgggac

SEQ ID NO: 1469555 - DNA, 15 bp, Homo sapiens
aaagagtctgggacc

SEQ ID NO: 1469556 - DNA, 15 bp, Homo sapiens
aagagtctgggacct

SEQ ID NO: 1469557 - DNA, 15 bp, Homo sapiens
agagtctgggacctc

SEQ ID NO: 1469558 - DNA, 15 bp, Homo sapiens
gagtctgggacctcc

SEQ ID NO: 1469559 - DNA, 15 bp, Homo sapiens
agtctgggacctcct

SEQ ID NO: 1469560 - DNA, 15 bp, Homo sapiens
gtctgggacctcctc

SEQ ID NO: 1469561 - DNA, 15 bp, Homo sapiens
tctgggacctcctcc

SEQ ID NO: 1469562 - DNA, 15 bp, Homo sapiens
ctgggacctcctcct

SEQ ID NO: 1469563 - DNA, 15 bp, Homo sapiens
tgggacctcctcctt

SEQ ID NO: 1469564 - DNA, 15 bp, Homo sapiens
gggacctcctccttc

SEQ ID NO: 1469565 - DNA, 15 bp, Homo sapiens
ggacctcctccttct

SEQ ID NO: 1469566 - DNA, 15 bp, Homo sapiens
gacctcctccttctc

SEQ ID NO: 1469567 - DNA, 15 bp, Homo sapiens
acctcctccttctct

SEQ ID NO: 1469568 - DNA, 15 bp, Homo sapiens
cctcctccttctctc

SEQ ID NO: 1469569 - DNA, 15 bp, Homo sapiens
ctcctccttctctct

SEQ ID NO: 1469570 - DNA, 15 bp, Homo sapiens
tcctccttctctctc

SEQ ID NO: 1469571 - DNA, 15 bp, Homo sapiens
cctccttctctctct

SEQ ID NO: 1469572 - DNA, 15 bp, Homo sapiens
ctccttctctctctt

SEQ ID NO: 1469573 - DNA, 15 bp, Homo sapiens
tccttctctctcttg

SEQ ID NO: 1469574 - DNA, 15 bp, Homo sapiens
ccttctctctcttgc

SEQ ID NO: 1469575 - DNA, 15 bp, Homo sapiens
cttctctctcttgct

SEQ ID NO: 1469576 - DNA, 15 bp, Homo sapiens
ttctctctcttgctc

SEQ ID NO: 1469577 - DNA, 15 bp, Homo sapiens
tctctctcttgctcc

SEQ ID NO: 1469578 - DNA, 15 bp, Homo sapiens
ctctcttgctcctgc

SEQ ID NO: 1469579 - DNA, 15 bp, Homo sapiens
tctcttgctcctgct

SEQ ID NO: 1469580 - DNA, 15 bp, Homo sapiens
ctcttgctcctgctc

SEQ ID NO: 1469581 - DNA, 15 bp, Homo sapiens
tcttgctcctgctct

SEQ ID NO: 1469582 - DNA, 15 bp, Homo sapiens
cttgctcctgctctt

SEQ ID NO: 1469583 - DNA, 15 bp, Homo sapiens
ttgctcctgctcttg

SEQ ID NO: 1469584 - DNA, 15 bp, Homo sapiens
tgctcctgctcttgc

SEQ ID NO: 1469585 - DNA, 15 bp, Homo sapiens
gctcctgctcttgct

SEQ ID NO: 1469586 - DNA, 15 bp, Homo sapiens
ctcctgctcttgcta

SEQ ID NO: 1469587 - DNA, 15 bp, Homo sapiens
tcctgctcttgctat

SEQ ID NO: 1469588 - DNA, 15 bp, Homo sapiens
cctgctcttgctatg

SEQ ID NO: 1469589 - DNA, 15 bp, Homo sapiens
ctgctcttgctatgt

SEQ ID NO: 1469590 - DNA, 15 bp, Homo sapiens
tgctcttgctatgtg

SEQ ID NO: 1469591 - DNA, 15 bp, Homo sapiens
gctcttgctatgtga

SEQ ID NO: 1469592 - DNA, 15 bp, Homo sapiens
ctcttgctatgtgac

SEQ ID NO: 1469593 - DNA, 15 bp, Homo sapiens
tcttgctatgtgaca

SEQ ID NO: 1469594 - DNA, 15 bp, Homo sapiens
cttgctatgtgacac

SEQ ID NO: 1469595 - DNA, 15 bp, Homo sapiens
ttgctatgtgacacg

SEQ ID NO: 1469596 - DNA, 15 bp, Homo sapiens
tgctatgtgacacgc

SEQ ID NO: 1469597 - DNA, 15 bp, Homo sapiens
gctatgtgacacgct

SEQ ID NO: 1469598 - DNA, 15 bp, Homo sapiens
ctatgtgacacgctg

SEQ ID NO: 1469599 - DNA, 15 bp, Homo sapiens
tatgtgacacgctgg

SEQ ID NO: 1469600 - DNA, 15 bp, Homo sapiens
atgtgacacgctggc

SEQ ID NO: 1469601 - DNA, 15 bp, Homo sapiens
tgtgacacgctggct

SEQ ID NO: 1469602 - DNA, 15 bp, Homo sapiens
gtgacacgctggctc

SEQ ID NO: 1469603 - DNA, 15 bp, Homo sapiens
tgacacgctggctcc

SEQ ID NO: 1469604 - DNA, 15 bp, Homo sapiens
gacacgctggctccc

SEQ ID NO: 1469605 - DNA, 15 bp, Homo sapiens
acacgctggctcccc

SEQ ID NO: 1469606 - DNA, 15 bp, Homo sapiens
cacgctggctcccca

SEQ ID NO: 1469607 - DNA, 15 bp, Homo sapiens
acgctggctccccat

SEQ ID NO: 1469608 - DNA, 15 bp, Homo sapiens
cgctggctccccatt

SEQ ID NO: 1469609 - DNA, 15 bp, Homo sapiens
gctggctccccattc

SEQ ID NO: 1469610 - DNA, 15 bp, Homo sapiens
ctggctccccattca

SEQ ID NO: 1469611 - DNA, 15 bp, Homo sapiens
tggctccccattcac

SEQ ID NO: 1469612 - DNA, 15 bp, Homo sapiens
ggctccccattcact

SEQ ID NO: 1469613 - DNA, 15 bp, Homo sapiens
gctccccattcactt

SEQ ID NO: 1469614 - DNA, 15 bp, Homo sapiens
ctccccattcacttt

SEQ ID NO: 1469615 - DNA, 15 bp, Homo sapiens
tccccattcactttc

SEQ ID NO: 1469616 - DNA, 15 bp, Homo sapiens
ccccattcactttcc

SEQ ID NO: 1469617 - DNA, 15 bp, Homo sapiens
cccattcactttcca

SEQ ID NO: 1469618 - DNA, 15 bp, Homo sapiens
ccattcactttccac

SEQ ID NO: 1469619 - DNA, 15 bp, Homo sapiens
cattcactttccacc

SEQ ID NO: 1469620 - DNA, 15 bp, Homo sapiens
attcactttccacca

SEQ ID NO: 1469621 - DNA, 15 bp, Homo sapiens
ttcactttccaccac

SEQ ID NO: 1469622 - DNA, 15 bp, Homo sapiens
tcactttccaccaca

SEQ ID NO: 1469623 - DNA, 15 bp, Homo sapiens
cactttccaccacaa

SEQ ID NO: 1469624 - DNA, 15 bp, Homo sapiens
actttccaccacaat

SEQ ID NO: 1469625 - DNA, 15 bp, Homo sapiens
ctttccaccacaatt

SEQ ID NO: 1469626 - DNA, 15 bp, Homo sapiens
tttccaccacaattg

SEQ ID NO: 1469627 - DNA, 15 bp, Homo sapiens
ttccaccacaattgt

SEQ ID NO: 1469628 - DNA, 15 bp, Homo sapiens
tccaccacaattgta

SEQ ID NO: 1469629 - DNA, 15 bp, Homo sapiens
ccaccacaattgtat

SEQ ID NO: 1469630 - DNA, 15 bp, Homo sapiens
caccacaattgtatg

SEQ ID NO: 1469631 - DNA, 15 bp, Homo sapiens
accacaattgtatgc

SEQ ID NO: 1469632 - DNA, 15 bp, Homo sapiens
ccacaattgtatgct

SEQ ID NO: 1469633 - DNA, 15 bp, Homo sapiens
cacaattgtatgctt

SEQ ID NO: 1469634 - DNA, 15 bp, Homo sapiens
acaattgtatgcttt

SEQ ID NO: 1469635 - DNA, 15 bp, Homo sapiens
caattgtatgctttc

SEQ ID NO: 1469636 - DNA, 15 bp, Homo sapiens
aattgtatgctttct

SEQ ID NO: 1469637 - DNA, 15 bp, Homo sapiens
attgtatgctttctg

SEQ ID NO: 1469638 - DNA, 15 bp, Homo sapiens
ttgtatgctttctga

SEQ ID NO: 1469639 - DNA, 15 bp, Homo sapiens
tgtatgctttctgag

SEQ ID NO: 1469640 - DNA, 15 bp, Homo sapiens
gtatgctttctgagg

SEQ ID NO: 1469641 - DNA, 15 bp, Homo sapiens
tatgctttctgaggc

SEQ ID NO: 1469642 - DNA, 15 bp, Homo sapiens
atgctttctgaggcc

SEQ ID NO: 1469643 - DNA, 15 bp, Homo sapiens
tgctttctgaggcct

SEQ ID NO: 1469644 - DNA, 15 bp, Homo sapiens
gctttctgaggcctc

SEQ ID NO: 1469645 - DNA, 15 bp, Homo sapiens
ctttctgaggcctca

SEQ ID NO: 1469646 - DNA, 15 bp, Homo sapiens
tttctgaggcctcat

SEQ ID NO: 1469647 - DNA, 15 bp, Homo sapiens
ttctgaggcctcatc

SEQ ID NO: 1469648 - DNA, 15 bp, Homo sapiens
tctgaggcctcatca

SEQ ID NO: 1469649 - DNA, 15 bp, Homo sapiens
ctgaggcctcatcag

SEQ ID NO: 1469650 - DNA, 15 bp, Homo sapiens
tgaggcctcatcaga

SEQ ID NO: 1469651 - DNA, 15 bp, Homo sapiens
gaggcctcatcagaa

SEQ ID NO: 1469652 - DNA, 15 bp, Homo sapiens
aggcctcatcagaag

SEQ ID NO: 1469653 - DNA, 15 bp, Homo sapiens
ggcctcatcagaagc

SEQ ID NO: 1469654 - DNA, 15 bp, Homo sapiens
gcctcatcagaagca

SEQ ID NO: 1469655 - DNA, 15 bp, Homo sapiens
cctcatcagaagcag

SEQ ID NO: 1469656 - DNA, 15 bp, Homo sapiens
ctcatcagaagcaga

SEQ ID NO: 1469657 - DNA, 15 bp, Homo sapiens
tcatcagaagcagat

SEQ ID NO: 1469658 - DNA, 15 bp, Homo sapiens
catcagaagcagatg

SEQ ID NO: 1469659 - DNA, 15 bp, Homo sapiens
atcagaagcagatgc

SEQ ID NO: 1469660 - DNA, 15 bp, Homo sapiens
agaagcagatgctgg

SEQ ID NO: 1469661 - DNA, 15 bp, Homo sapiens
gaagcagatgctggc

SEQ ID NO: 1469662 - DNA, 15 bp, Homo sapiens
aagcagatgctggca

SEQ ID NO: 1469663 - DNA, 15 bp, Homo sapiens
agcagatgctggcac

SEQ ID NO: 1469664 - DNA, 15 bp, Homo sapiens
gcagatgctggcacc

SEQ ID NO: 1469665 - DNA, 15 bp, Homo sapiens
cagatgctggcacca

SEQ ID NO: 1469666 - DNA, 15 bp, Homo sapiens
agatgctggcaccat

SEQ ID NO: 1469667 - DNA, 15 bp, Homo sapiens
gatgctggcaccatg

SEQ ID NO: 1469668 - DNA, 15 bp, Homo sapiens
atgctggcaccatgc

SEQ ID NO: 1469669 - DNA, 15 bp, Homo sapiens
tgctggcaccatgct

SEQ ID NO: 1469670 - DNA, 15 bp, Homo sapiens
gctggcaccatgctt

SEQ ID NO: 1469671 - DNA, 15 bp, Homo sapiens
ctggcaccatgcttt

SEQ ID NO: 1469672 - DNA, 15 bp, Homo sapiens
tggcaccatgctttc

SEQ ID NO: 1469673 - DNA, 15 bp, Homo sapiens
ggcaccatgctttct

SEQ ID NO: 1469674 - DNA, 15 bp, Homo sapiens
gcaccatgctttctg

SEQ ID NO: 1469675 - DNA, 15 bp, Homo sapiens
caccatgctttctgt

SEQ ID NO: 1469676 - DNA, 15 bp, Homo sapiens
accatgctttctgta

SEQ ID NO: 1469677 - DNA, 15 bp, Homo sapiens
ccatgctttctgtac

SEQ ID NO: 1469678 - DNA, 15 bp, Homo sapiens
catgctttctgtaca

SEQ ID NO: 1469679 - DNA, 15 bp, Homo sapiens
atgctttctgtacag

SEQ ID NO: 1469680 - DNA, 15 bp, Homo sapiens
tgctttctgtacagc

SEQ ID NO: 1469681 - DNA, 15 bp, Homo sapiens
gctttctgtacagcc

SEQ ID NO: 1469682 - DNA, 15 bp, Homo sapiens
ctttctgtacagcct

SEQ ID NO: 1469683 - DNA, 15 bp, Homo sapiens
tttctgtacagcctg

SEQ ID NO: 1469684 - DNA, 15 bp, Homo sapiens
ttctgtacagcctgc

SEQ ID NO: 1469685 - DNA, 15 bp, Homo sapiens
tctgtacagcctgca

SEQ ID NO: 1469686 - DNA, 15 bp, Homo sapiens
ctgtacagcctgcag

SEQ ID NO: 1469687 - DNA, 15 bp, Homo sapiens
tgtacagcctgcaga

SEQ ID NO: 1469688 - DNA, 15 bp, Homo sapiens
gtacagcctgcagaa

SEQ ID NO: 1469689 - DNA, 15 bp, Homo sapiens
tacagcctgcagaac

SEQ ID NO: 1469690 - DNA, 15 bp, Homo sapiens
acagcctgcagaacc

SEQ ID NO: 1469691 - DNA, 15 bp, Homo sapiens
cagcctgcagaacca

SEQ ID NO: 1469692 - DNA, 15 bp, Homo sapiens
agcctgcagaaccat

SEQ ID NO: 1469693 - DNA, 15 bp, Homo sapiens
gcctgcagaaccatg

SEQ ID NO: 1469694 - DNA, 15 bp, Homo sapiens
cctgcagaaccatga

SEQ ID NO: 1469695 - DNA, 15 bp, Homo sapiens
ctgcagaaccatgag

SEQ ID NO: 1469696 - DNA, 15 bp, Homo sapiens
tgcagaaccatgagc

SEQ ID NO: 1469697 - DNA, 15 bp, Homo sapiens
gcagaaccatgagca

SEQ ID NO: 1469698 - DNA, 15 bp, Homo sapiens
cagaaccatgagcac

SEQ ID NO: 1469699 - DNA, 15 bp, Homo sapiens
agaaccatgagcacc

SEQ ID NO: 1469700 - DNA, 15 bp, Homo sapiens
gaaccatgagcacca

SEQ ID NO: 1469701 - DNA, 15 bp, Homo sapiens
aaccatgagcaccat

SEQ ID NO: 1469702 - DNA, 15 bp, Homo sapiens
accatgagcaccatg

SEQ ID NO: 1469703 - DNA, 15 bp, Homo sapiens
ccatgagcaccatga

SEQ ID NO: 1469704 - DNA, 15 bp, Homo sapiens
catgagcaccatgag

SEQ ID NO: 1469705 - DNA, 15 bp, Homo sapiens
atgagcaccatgagc

SEQ ID NO: 1469706 - DNA, 15 bp, Homo sapiens
tgagcaccatgagcc

SEQ ID NO: 1469707 - DNA, 15 bp, Homo sapiens
gagcaccatgagcca

SEQ ID NO: 1469708 - DNA, 15 bp, Homo sapiens
agcaccatgagccaa

SEQ ID NO: 1469709 - DNA, 15 bp, Homo sapiens
gcaccatgagccaaa

SEQ ID NO: 1469710 - DNA, 15 bp, Homo sapiens
caccatgagccaaat

SEQ ID NO: 1469711 - DNA, 15 bp, Homo sapiens
accatgagccaaata

SEQ ID NO: 1469712 - DNA, 15 bp, Homo sapiens
ccatgagccaaataa

SEQ ID NO: 1469713 - DNA, 15 bp, Homo sapiens
catgagccaaataaa

SEQ ID NO: 1469714 - DNA, 15 bp, Homo sapiens
atgagccaaataaac

SEQ ID NO: 1469715 - DNA, 15 bp, Homo sapiens
tgagccaaataaacc

SEQ ID NO: 1469716 - DNA, 15 bp, Homo sapiens
gagccaaataaacct

SEQ ID NO: 1469717 - DNA, 15 bp, Homo sapiens
agccaaataaacctc

SEQ ID NO: 1469718 - DNA, 15 bp, Homo sapiens
gccaaataaacctct

SEQ ID NO: 1469719 - DNA, 15 bp, Homo sapiens
ccaaataaacctctt

SEQ ID NO: 1469720 - DNA, 15 bp, Homo sapiens
caaataaacctcttt

SEQ ID NO: 1469721 - DNA, 15 bp, Homo sapiens
aaataaacctctttt

SEQ ID NO: 1469722 - DNA, 15 bp, Homo sapiens
aataaacctcttttc

SEQ ID NO: 1469723 - DNA, 15 bp, Homo sapiens
ataaacctcttttct

SEQ ID NO: 1469724 - DNA, 15 bp, Homo sapiens
ctttataaattacct

SEQ ID NO: 1469725 - DNA, 15 bp, Homo sapiens
tttataaattaccta

SEQ ID NO: 1469726 - DNA, 15 bp, Homo sapiens
ttataaattacctag

SEQ ID NO: 1469727 - DNA, 15 bp, Homo sapiens
tataaattacctagc

SEQ ID NO: 1469728 - DNA, 15 bp, Homo sapiens
ataaattacctagcc

SEQ ID NO: 1469729 - DNA, 15 bp, Homo sapiens
taaattacctagcct

SEQ ID NO: 1469730 - DNA, 15 bp, Homo sapiens
aaattacctagcctc

SEQ ID NO: 1469731 - DNA, 15 bp, Homo sapiens
aattacctagcctca

SEQ ID NO: 1469732 - DNA, 15 bp, Homo sapiens
attacctagcctcag

SEQ ID NO: 1469733 - DNA, 15 bp, Homo sapiens
ttacctagcctcaga

SEQ ID NO: 1469734 - DNA, 15 bp, Homo sapiens
tacctagcctcagat

SEQ ID NO: 1469735 - DNA, 15 bp, Homo sapiens
acctagcctcagata

SEQ ID NO: 1469736 - DNA, 15 bp, Homo sapiens
cctagcctcagatat

SEQ ID NO: 1469737 - DNA, 15 bp, Homo sapiens
ctagcctcagatatt

SEQ ID NO: 1469738 - DNA, 15 bp, Homo sapiens
tagcctcagatattc

SEQ ID NO: 1469739 - DNA, 15 bp, Homo sapiens
agcctcagatattcc

SEQ ID NO: 1469740 - DNA, 15 bp, Homo sapiens
gcctcagatattccg

SEQ ID NO: 1469741 - DNA, 15 bp, Homo sapiens
cctcagatattccgt

SEQ ID NO: 1469742 - DNA, 15 bp, Homo sapiens
ctcagatattccgtt

SEQ ID NO: 1469743 - DNA, 15 bp, Homo sapiens
tcagatattccgtta

SEQ ID NO: 1469744 - DNA, 15 bp, Homo sapiens
cagatattccgttat

SEQ ID NO: 1469745 - DNA, 15 bp, Homo sapiens
agatattccgttata

SEQ ID NO: 1469746 - DNA, 15 bp, Homo sapiens
gatattccgttatag

SEQ ID NO: 1469747 - DNA, 15 bp, Homo sapiens
atattccgttatagc

SEQ ID NO: 1469748 - DNA, 15 bp, Homo sapiens
tattccgttatagct

SEQ ID NO: 1469749 - DNA, 15 bp, Homo sapiens
attccgttatagcta

SEQ ID NO: 1469750 - DNA, 15 bp, Homo sapiens
ttccgttatagctac

SEQ ID NO: 1469751 - DNA, 15 bp, Homo sapiens
tccgttatagctaca

SEQ ID NO: 1469752 - DNA, 15 bp, Homo sapiens
ccgttatagctacag

SEQ ID NO: 1469753 - DNA, 15 bp, Homo sapiens
cgttatagctacaga

SEQ ID NO: 1469754 - DNA, 15 bp, Homo sapiens
gttatagctacagaa

SEQ ID NO: 1469755 - DNA, 15 bp, Homo sapiens
ttatagctacagaaa

SEQ ID NO: 1469756 - DNA, 15 bp, Homo sapiens
tatagctacagaaaa

SEQ ID NO: 1469757 - DNA, 15 bp, Homo sapiens
atagctacagaaaat

SEQ ID NO: 1469758 - DNA, 15 bp, Homo sapiens
tagctacagaaaatg

SEQ ID NO: 1469759 - DNA, 15 bp, Homo sapiens
agctacagaaaatgg

SEQ ID NO: 1469760 - DNA, 15 bp, Homo sapiens
gctacagaaaatgga

SEQ ID NO: 1469761 - DNA, 15 bp, Homo sapiens
ctacagaaaatggat

SEQ ID NO: 1469762 - DNA, 15 bp, Homo sapiens
tacagaaaatggatt

SEQ ID NO: 1469763 - DNA, 15 bp, Homo sapiens
acagaaaatggatta

SEQ ID NO: 1469764 - DNA, 15 bp, Homo sapiens
cagaaaatggattaa

SEQ ID NO: 1469765 - DNA, 15 bp, Homo sapiens
agaaaatggattaag

SEQ ID NO: 1469766 - DNA, 15 bp, Homo sapiens
gaaaatggattaagc

SEQ ID NO: 1469767 - DNA, 15 bp, Homo sapiens
aaaatggattaagct

SEQ ID NO: 1469768 - DNA, 15 bp, Homo sapiens
aaatggattaagcta

SEQ ID NO: 1469769 - DNA, 15 bp, Homo sapiens
aatggattaagctag

SEQ ID NO: 1469770 - DNA, 15 bp, Homo sapiens
atggattaagctagt

SEQ ID NO: 1469771 - DNA, 15 bp, Homo sapiens
tggattaagctagtg

SEQ ID NO: 1469772 - DNA, 15 bp, Homo sapiens
ggattaagctagtgc

SEQ ID NO: 1469773 - DNA, 15 bp, Homo sapiens
gattaagctagtgct

SEQ ID NO: 1469774 - DNA, 15 bp, Homo sapiens
attaagctagtgctg

SEQ ID NO: 1469775 - DNA, 15 bp, Homo sapiens
ttaagctagtgctgt

SEQ ID NO: 1469776 - DNA, 15 bp, Homo sapiens
taagctagtgctgtt

SEQ ID NO: 1469777 - DNA, 15 bp, Homo sapiens
aagctagtgctgttc

SEQ ID NO: 1469778 - DNA, 15 bp, Homo sapiens
agctagtgctgttct

SEQ ID NO: 1469779 - DNA, 15 bp, Homo sapiens
gctagtgctgttcta

SEQ ID NO: 1469780 - DNA, 15 bp, Homo sapiens
ctagtgctgttctat

SEQ ID NO: 1469781 - DNA, 15 bp, Homo sapiens
tagtgctgttctatg

SEQ ID NO: 1469782 - DNA, 15 bp, Homo sapiens
agtgctgttctatgg

SEQ ID NO: 1469783 - DNA, 15 bp, Homo sapiens
gtgctgttctatggt

SEQ ID NO: 1469784 - DNA, 15 bp, Homo sapiens
tgctgttctatggta

SEQ ID NO: 1469785 - DNA, 15 bp, Homo sapiens
gctgttctatggtac

SEQ ID NO: 1469786 - DNA, 15 bp, Homo sapiens
ctgttctatggtaca

SEQ ID NO: 1469787 - DNA, 15 bp, Homo sapiens
tgttctatggtacac

SEQ ID NO: 1469788 - DNA, 15 bp, Homo sapiens
gttctatggtacact

SEQ ID NO: 1469789 - DNA, 15 bp, Homo sapiens
ttctatggtacactg

SEQ ID NO: 1469790 - DNA, 15 bp, Homo sapiens
tctatggtacactgt

SEQ ID NO: 1469791 - DNA, 15 bp, Homo sapiens
ctatggtacactgta

SEQ ID NO: 1469792 - DNA, 15 bp, Homo sapiens
tatggtacactgtat

SEQ ID NO: 1469793 - DNA, 15 bp, Homo sapiens
atggtacactgtatt

SEQ ID NO: 1469794 - DNA, 15 bp, Homo sapiens
tggtacactgtatta

SEQ ID NO: 1469795 - DNA, 15 bp, Homo sapiens
ggtacactgtattag

SEQ ID NO: 1469796 - DNA, 15 bp, Homo sapiens
gtacactgtattagt

SEQ ID NO: 1469797 - DNA, 15 bp, Homo sapiens
tacactgtattagtc

SEQ ID NO: 1469798 - DNA, 15 bp, Homo sapiens
acactgtattagtct

SEQ ID NO: 1469799 - DNA, 15 bp, Homo sapiens
cactgtattagtctg

SEQ ID NO: 1469800 - DNA, 15 bp, Homo sapiens
actgtattagtctgt

SEQ ID NO: 1469801 - DNA, 15 bp, Homo sapiens
ctgtattagtctgtt

SEQ ID NO: 1469802 - DNA, 15 bp, Homo sapiens
tgtattagtctgttt

SEQ ID NO: 1469803 - DNA, 15 bp, Homo sapiens
gtattagtctgtttt

SEQ ID NO: 1469804 - DNA, 15 bp, Homo sapiens
tattagtctgttttc

SEQ ID NO: 1469805 - DNA, 15 bp, Homo sapiens
attagtctgttttca

SEQ ID NO: 1469806 - DNA, 15 bp, Homo sapiens
ttagtctgttttcac

SEQ ID NO: 1469807 - DNA, 15 bp, Homo sapiens
tagtctgttttcaca

SEQ ID NO: 1469808 - DNA, 15 bp, Homo sapiens
agtctgttttcacat

SEQ ID NO: 1469809 - DNA, 15 bp, Homo sapiens
gtctgttttcacatt

SEQ ID NO: 1469810 - DNA, 15 bp, Homo sapiens
tctgttttcacattg

SEQ ID NO: 1469811 - DNA, 15 bp, Homo sapiens
ctgttttcacattgc

SEQ ID NO: 1469812 - DNA, 15 bp, Homo sapiens
tgttttcacattgct

SEQ ID NO: 1469813 - DNA, 15 bp, Homo sapiens
gttttcacattgctg

SEQ ID NO: 1469814 - DNA, 15 bp, Homo sapiens
ttttcacattgctgg

SEQ ID NO: 1469815 - DNA, 15 bp, Homo sapiens
tttcacattgctggt

SEQ ID NO: 1469816 - DNA, 15 bp, Homo sapiens
ttcacattgctggta

SEQ ID NO: 1469817 - DNA, 15 bp, Homo sapiens
tcacattgctggtaa

SEQ ID NO: 1469818 - DNA, 15 bp, Homo sapiens
cacattgctggtaaa

SEQ ID NO: 1469819 - DNA, 15 bp, Homo sapiens
acattgctggtaaag

SEQ ID NO: 1469820 - DNA, 15 bp, Homo sapiens
cattgctggtaaaga

SEQ ID NO: 1469821 - DNA, 15 bp, Homo sapiens
attgctggtaaagat

SEQ ID NO: 1469822 - DNA, 15 bp, Homo sapiens
ttgctggtaaagata

SEQ ID NO: 1469823 - DNA, 15 bp, Homo sapiens
tgctggtaaagatat

SEQ ID NO: 1469824 - DNA, 15 bp, Homo sapiens
gctggtaaagatata

SEQ ID NO: 1469825 - DNA, 15 bp, Homo sapiens
ctggtaaagatatac

SEQ ID NO: 1469826 - DNA, 15 bp, Homo sapiens
tggtaaagatatacc

SEQ ID NO: 1469827 - DNA, 15 bp, Homo sapiens
ggtaaagatataccc

SEQ ID NO: 1469828 - DNA, 15 bp, Homo sapiens
gtaaagatatacccg

SEQ ID NO: 1469829 - DNA, 15 bp, Homo sapiens
taaagatatacccga

SEQ ID NO: 1469830 - DNA, 15 bp, Homo sapiens
aaagatatacccgag

SEQ ID NO: 1469831 - DNA, 15 bp, Homo sapiens
aagatatacccgaga

SEQ ID NO: 1469832 - DNA, 15 bp, Homo sapiens
agatatacccgagat

SEQ ID NO: 1469833 - DNA, 15 bp, Homo sapiens
gatatacccgagatg

SEQ ID NO: 1469834 - DNA, 15 bp, Homo sapiens
atatacccgagatgg

SEQ ID NO: 1469835 - DNA, 15 bp, Homo sapiens
tatacccgagatggg

SEQ ID NO: 1469836 - DNA, 15 bp, Homo sapiens
atacccgagatgggg

SEQ ID NO: 1469837 - DNA, 15 bp, Homo sapiens
tacccgagatggggc

SEQ ID NO: 1469838 - DNA, 15 bp, Homo sapiens
acccgagatggggca

SEQ ID NO: 1469839 - DNA, 15 bp, Homo sapiens
cccgagatggggcaa

SEQ ID NO: 1469840 - DNA, 15 bp, Homo sapiens
ccgagatggggcaat

SEQ ID NO: 1469841 - DNA, 15 bp, Homo sapiens
cgagatggggcaatt

SEQ ID NO: 1469842 - DNA, 15 bp, Homo sapiens
gagatggggcaattt

SEQ ID NO: 1469843 - DNA, 15 bp, Homo sapiens
agatggggcaattta

SEQ ID NO: 1469844 - DNA, 15 bp, Homo sapiens
gatggggcaatttat

SEQ ID NO: 1469845 - DNA, 15 bp, Homo sapiens
atggggcaatttata

SEQ ID NO: 1469846 - DNA, 15 bp, Homo sapiens
tggggcaatttataa

SEQ ID NO: 1469847 - DNA, 15 bp, Homo sapiens
ggggcaatttataaa

SEQ ID NO: 1469848 - DNA, 15 bp, Homo sapiens
gggcaatttataaaa

SEQ ID NO: 1469849 - DNA, 15 bp, Homo sapiens
ggcaatttataaaag

SEQ ID NO: 1469850 - DNA, 15 bp, Homo sapiens
gcaatttataaaaga

SEQ ID NO: 1469851 - DNA, 15 bp, Homo sapiens
caatttataaaagaa

SEQ ID NO: 1469852 - DNA, 15 bp, Homo sapiens
aatttataaaagaaa

SEQ ID NO: 1469853 - DNA, 15 bp, Homo sapiens
atttataaaagaaag

SEQ ID NO: 1469854 - DNA, 15 bp, Homo sapiens
tttataaaagaaaga

SEQ ID NO: 1469855 - DNA, 15 bp, Homo sapiens
ttataaaagaaagaa

SEQ ID NO: 1469856 - DNA, 15 bp, Homo sapiens
tataaaagaaagaaa

SEQ ID NO: 1469857 - DNA, 15 bp, Homo sapiens
ataaaagaaagaaag

SEQ ID NO: 1469858 - DNA, 15 bp, Homo sapiens
taaaagaaagaaaga

SEQ ID NO: 1469859 - DNA, 15 bp, Homo sapiens
aaaagaaagaaagag

SEQ ID NO: 1469860 - DNA, 15 bp, Homo sapiens
aaagaaagaaagagg

SEQ ID NO: 1469861 - DNA, 15 bp, Homo sapiens
aagaaagaaagaggt

SEQ ID NO: 1469862 - DNA, 15 bp, Homo sapiens
agaaagaaagaggtt

SEQ ID NO: 1469863 - DNA, 15 bp, Homo sapiens
gaaagaaagaggttt

SEQ ID NO: 1469864 - DNA, 15 bp, Homo sapiens
aaagaaagaggttta

SEQ ID NO: 1469865 - DNA, 15 bp, Homo sapiens
aagaaagaggtttat

SEQ ID NO: 1469866 - DNA, 15 bp, Homo sapiens
agaaagaggtttatt

SEQ ID NO: 1469867 - DNA, 15 bp, Homo sapiens
gaaagaggtttattg

SEQ ID NO: 1469868 - DNA, 15 bp, Homo sapiens
aaagaggtttattgg

SEQ ID NO: 1469869 - DNA, 15 bp, Homo sapiens
aagaggtttattgga

SEQ ID NO: 1469870 - DNA, 15 bp, Homo sapiens
agaggtttattggac

SEQ ID NO: 1469871 - DNA, 15 bp, Homo sapiens
gaggtttattggact

SEQ ID NO: 1469872 - DNA, 15 bp, Homo sapiens
aggtttattggactt

SEQ ID NO: 1469873 - DNA, 15 bp, Homo sapiens
ggtttattggactta

SEQ ID NO: 1469874 - DNA, 15 bp, Homo sapiens
gtttattggacttac

SEQ ID NO: 1469875 - DNA, 15 bp, Homo sapiens
tttattggacttaca

SEQ ID NO: 1469876 - DNA, 15 bp, Homo sapiens
ttattggacttacag

SEQ ID NO: 1469877 - DNA, 15 bp, Homo sapiens
tattggacttacagt

SEQ ID NO: 1469878 - DNA, 15 bp, Homo sapiens
attggacttacagtt

SEQ ID NO: 1469879 - DNA, 15 bp, Homo sapiens
ttggacttacagttc

SEQ ID NO: 1469880 - DNA, 15 bp, Homo sapiens
tggacttacagttcc

SEQ ID NO: 1469881 - DNA, 15 bp, Homo sapiens
ggacttacagttcca

SEQ ID NO: 1469882 - DNA, 15 bp, Homo sapiens
gacttacagttccac

SEQ ID NO: 1469883 - DNA, 15 bp, Homo sapiens
acttacagttccaca

SEQ ID NO: 1469884 - DNA, 15 bp, Homo sapiens
cttacagttccacat

SEQ ID NO: 1469885 - DNA, 15 bp, Homo sapiens
ttacagttccacatg

SEQ ID NO: 1469886 - DNA, 15 bp, Homo sapiens
tacagttccacatgg

SEQ ID NO: 1469887 - DNA, 15 bp, Homo sapiens
acagttccacatggc

SEQ ID NO: 1469888 - DNA, 15 bp, Homo sapiens
cagttccacatggct

SEQ ID NO: 1469889 - DNA, 15 bp, Homo sapiens
agttccacatggcta

SEQ ID NO: 1469890 - DNA, 15 bp, Homo sapiens
gttccacatggctag

SEQ ID NO: 1469891 - DNA, 15 bp, Homo sapiens
ttccacatggctagg

SEQ ID NO: 1469892 - DNA, 15 bp, Homo sapiens
tccacatggctaggg

SEQ ID NO: 1469893 - DNA, 15 bp, Homo sapiens
ccacatggctaggga

SEQ ID NO: 1469894 - DNA, 15 bp, Homo sapiens
cacatggctagggag

SEQ ID NO: 1469895 - DNA, 15 bp, Homo sapiens
acatggctagggagg

SEQ ID NO: 1469896 - DNA, 15 bp, Homo sapiens
catggctagggaggc

SEQ ID NO: 1469897 - DNA, 15 bp, Homo sapiens
atggctagggaggct

SEQ ID NO: 1469898 - DNA, 15 bp, Homo sapiens
tggctagggaggctt

SEQ ID NO: 1469899 - DNA, 15 bp, Homo sapiens
ggctagggaggcttc

SEQ ID NO: 1469900 - DNA, 15 bp, Homo sapiens
gctagggaggcttca

SEQ ID NO: 1469901 - DNA, 15 bp, Homo sapiens
ctagggaggcttcac

SEQ ID NO: 1469902 - DNA, 15 bp, Homo sapiens
tagggaggcttcaca

SEQ ID NO: 1469903 - DNA, 15 bp, Homo sapiens
agggaggcttcacaa

SEQ ID NO: 1469904 - DNA, 15 bp, Homo sapiens
gggaggcttcacaat

SEQ ID NO: 1469905 - DNA, 15 bp, Homo sapiens
ggaggcttcacaatc

SEQ ID NO: 1469906 - DNA, 15 bp, Homo sapiens
gaggcttcacaatca

SEQ ID NO: 1469907 - DNA, 15 bp, Homo sapiens
aggcttcacaatcat

SEQ ID NO: 1469908 - DNA, 15 bp, Homo sapiens
ggcttcacaatcatg

SEQ ID NO: 1469909 - DNA, 15 bp, Homo sapiens
gcttcacaatcatgg

SEQ ID NO: 1469910 - DNA, 15 bp, Homo sapiens
cttcacaatcatggc

SEQ ID NO: 1469911 - DNA, 15 bp, Homo sapiens
ttcacaatcatggcg

SEQ ID NO: 1469912 - DNA, 15 bp, Homo sapiens
tcacaatcatggcgg

SEQ ID NO: 1469913 - DNA, 15 bp, Homo sapiens
cacaatcatggcgga

SEQ ID NO: 1469914 - DNA, 15 bp, Homo sapiens
acaatcatggcggaa

SEQ ID NO: 1469915 - DNA, 15 bp, Homo sapiens
caatcatggcggaag

SEQ ID NO: 1469916 - DNA, 15 bp, Homo sapiens
aatcatggcggaagg

SEQ ID NO: 1469917 - DNA, 15 bp, Homo sapiens
atcatggcggaaggc

SEQ ID NO: 1469918 - DNA, 15 bp, Homo sapiens
tcatggcggaaggca

SEQ ID NO: 1469919 - DNA, 15 bp, Homo sapiens
catggcggaaggcaa

SEQ ID NO: 1469920 - DNA, 15 bp, Homo sapiens
atggcggaaggcaag

SEQ ID NO: 1469921 - DNA, 15 bp, Homo sapiens
tggcggaaggcaagg

SEQ ID NO: 1469922 - DNA, 15 bp, Homo sapiens
ggcggaaggcaagga

SEQ ID NO: 1469923 - DNA, 15 bp, Homo sapiens
gcggaaggcaaggag

SEQ ID NO: 1469924 - DNA, 15 bp, Homo sapiens
cggaaggcaaggagg

SEQ ID NO: 1469925 - DNA, 15 bp, Homo sapiens
ggaaggcaaggagga

SEQ ID NO: 1469926 - DNA, 15 bp, Homo sapiens
gaaggcaaggaggag

SEQ ID NO: 1469927 - DNA, 15 bp, Homo sapiens
aaggcaaggaggaga

SEQ ID NO: 1469928 - DNA, 15 bp, Homo sapiens
aggcaaggaggagaa

SEQ ID NO: 1469929 - DNA, 15 bp, Homo sapiens
ggcaaggaggagaaa

SEQ ID NO: 1469930 - DNA, 15 bp, Homo sapiens
gcaaggaggagaaag

SEQ ID NO: 1469931 - DNA, 15 bp, Homo sapiens
caaggaggagaaagt

SEQ ID NO: 1469932 - DNA, 15 bp, Homo sapiens
aaggaggagaaagtc

SEQ ID NO: 1469933 - DNA, 15 bp, Homo sapiens
aggaggagaaagtca

SEQ ID NO: 1469934 - DNA, 15 bp, Homo sapiens
ggaggagaaagtcac

SEQ ID NO: 1469935 - DNA, 15 bp, Homo sapiens
gaggagaaagtcaca

SEQ ID NO: 1469936 - DNA, 15 bp, Homo sapiens
aggagaaagtcacac

SEQ ID NO: 1469937 - DNA, 15 bp, Homo sapiens
ggagaaagtcacacc

SEQ ID NO: 1469938 - DNA, 15 bp, Homo sapiens
gagaaagtcacacct

SEQ ID NO: 1469939 - DNA, 15 bp, Homo sapiens
agaaagtcacacctt

SEQ ID NO: 1469940 - DNA, 15 bp, Homo sapiens
gaaagtcacacctta

SEQ ID NO: 1469941 - DNA, 15 bp, Homo sapiens
aaagtcacaccttac

SEQ ID NO: 1469942 - DNA, 15 bp, Homo sapiens
aagtcacaccttaca

SEQ ID NO: 1469943 - DNA, 15 bp, Homo sapiens
agtcacaccttacac

SEQ ID NO: 1469944 - DNA, 15 bp, Homo sapiens
gtcacaccttacacg

SEQ ID NO: 1469945 - DNA, 15 bp, Homo sapiens
tcacaccttacacgg

SEQ ID NO: 1469946 - DNA, 15 bp, Homo sapiens
cacaccttacacgga

SEQ ID NO: 1469947 - DNA, 15 bp, Homo sapiens
acaccttacacggat

SEQ ID NO: 1469948 - DNA, 15 bp, Homo sapiens
caccttacacggatg

SEQ ID NO: 1469949 - DNA, 15 bp, Homo sapiens
accttacacggatgg

SEQ ID NO: 1469950 - DNA, 15 bp, Homo sapiens
ccttacacggatggc

SEQ ID NO: 1469951 - DNA, 15 bp, Homo sapiens
cttacacggatggca

SEQ ID NO: 1469952 - DNA, 15 bp, Homo sapiens
ttacacggatggcag

SEQ ID NO: 1469953 - DNA, 15 bp, Homo sapiens
tacacggatggcagc

SEQ ID NO: 1469954 - DNA, 15 bp, Homo sapiens
acacggatggcagca

SEQ ID NO: 1469955 - DNA, 15 bp, Homo sapiens
cacggatggcagcag

SEQ ID NO: 1469956 - DNA, 15 bp, Homo sapiens
acggatggcagcagg

SEQ ID NO: 1469957 - DNA, 15 bp, Homo sapiens
cggatggcagcaggc

SEQ ID NO: 1469958 - DNA, 15 bp, Homo sapiens
ggatggcagcaggca

SEQ ID NO: 1469959 - DNA, 15 bp, Homo sapiens
gatggcagcaggcaa

SEQ ID NO: 1469960 - DNA, 15 bp, Homo sapiens
atggcagcaggcaaa

SEQ ID NO: 1469961 - DNA, 15 bp, Homo sapiens
tggcagcaggcaaaa

SEQ ID NO: 1469962 - DNA, 15 bp, Homo sapiens
ggcagcaggcaaaaa

SEQ ID NO: 1469963 - DNA, 15 bp, Homo sapiens
gcagcaggcaaaaag

SEQ ID NO: 1469964 - DNA, 15 bp, Homo sapiens
cagcaggcaaaaaga

SEQ ID NO: 1469965 - DNA, 15 bp, Homo sapiens
agcaggcaaaaagag

SEQ ID NO: 1469966 - DNA, 15 bp, Homo sapiens
gcaggcaaaaagaga

SEQ ID NO: 1469967 - DNA, 15 bp, Homo sapiens
caggcaaaaagagag

SEQ ID NO: 1469968 - DNA, 15 bp, Homo sapiens
aggcaaaaagagagc

SEQ ID NO: 1469969 - DNA, 15 bp, Homo sapiens
ggcaaaaagagagct

SEQ ID NO: 1469970 - DNA, 15 bp, Homo sapiens
gcaaaaagagagctt

SEQ ID NO: 1469971 - DNA, 15 bp, Homo sapiens
caaaaagagagcttg

SEQ ID NO: 1469972 - DNA, 15 bp, Homo sapiens
aaaaagagagcttgt

SEQ ID NO: 1469973 - DNA, 15 bp, Homo sapiens
aaaagagagcttgtt

SEQ ID NO: 1469974 - DNA, 15 bp, Homo sapiens
aaagagagcttgttt

SEQ ID NO: 1469975 - DNA, 15 bp, Homo sapiens
aagagagcttgttta

SEQ ID NO: 1469976 - DNA, 15 bp, Homo sapiens
agagagcttgtttaa

SEQ ID NO: 1469977 - DNA, 15 bp, Homo sapiens
gagagcttgtttaaa

SEQ ID NO: 1469978 - DNA, 15 bp, Homo sapiens
agagcttgtttaaaa

SEQ ID NO: 1469979 - DNA, 15 bp, Homo sapiens
gagcttgtttaaaaa

SEQ ID NO: 1469980 - DNA, 15 bp, Homo sapiens
agcttgtttaaaaac

SEQ ID NO: 1469981 - DNA, 15 bp, Homo sapiens
gcttgtttaaaaacc

SEQ ID NO: 1469982 - DNA, 15 bp, Homo sapiens
cttgtttaaaaacca

SEQ ID NO: 1469983 - DNA, 15 bp, Homo sapiens
ttgtttaaaaaccat

SEQ ID NO: 1469984 - DNA, 15 bp, Homo sapiens
tgtttaaaaaccatc

SEQ ID NO: 1469985 - DNA, 15 bp, Homo sapiens
gtttaaaaaccatca

SEQ ID NO: 1469986 - DNA, 15 bp, Homo sapiens
tttaaaaaccatcag

SEQ ID NO: 1469987 - DNA, 15 bp, Homo sapiens
ttaaaaaccatcaga

SEQ ID NO: 1469988 - DNA, 15 bp, Homo sapiens
taaaaaccatcagat

SEQ ID NO: 1469989 - DNA, 15 bp, Homo sapiens
aaaaaccatcagatg

SEQ ID NO: 1469990 - DNA, 15 bp, Homo sapiens
aaaaccatcagatgt

SEQ ID NO: 1469991 - DNA, 15 bp, Homo sapiens
aaaccatcagatgtc

SEQ ID NO: 1469992 - DNA, 15 bp, Homo sapiens
aaccatcagatgtca

SEQ ID NO: 1469993 - DNA, 15 bp, Homo sapiens
accatcagatgtcat

SEQ ID NO: 1469994 - DNA, 15 bp, Homo sapiens
ccatcagatgtcatg

SEQ ID NO: 1469995 - DNA, 15 bp, Homo sapiens
catcagatgtcatga

SEQ ID NO: 1469996 - DNA, 15 bp, Homo sapiens
atcagatgtcatgaa

SEQ ID NO: 1469997 - DNA, 15 bp, Homo sapiens
tcagatgtcatgaaa

SEQ ID NO: 1469998 - DNA, 15 bp, Homo sapiens
cagatgtcatgaaac

SEQ ID NO: 1469999 - DNA, 15 bp, Homo sapiens
agatgtcatgaaacc

SEQ ID NO: 1470000 - DNA, 15 bp, Homo sapiens
gatgtcatgaaaccc

SEQ ID NO: 1470001 - DNA, 15 bp, Homo sapiens
atgtcatgaaaccca

SEQ ID NO: 1470002 - DNA, 15 bp, Homo sapiens
tgtcatgaaacccat

SEQ ID NO: 1470003 - DNA, 15 bp, Homo sapiens
gtcatgaaacccatt

SEQ ID NO: 1470004 - DNA, 15 bp, Homo sapiens
tcatgaaacccattc

SEQ ID NO: 1470005 - DNA, 15 bp, Homo sapiens
catgaaacccattca

SEQ ID NO: 1470006 - DNA, 15 bp, Homo sapiens
atgaaacccattcac

SEQ ID NO: 1470007 - DNA, 15 bp, Homo sapiens
tgaaacccattcact

SEQ ID NO: 1470008 - DNA, 15 bp, Homo sapiens
gaaacccattcacta

SEQ ID NO: 1470009 - DNA, 15 bp, Homo sapiens
aaacccattcactat

SEQ ID NO: 1470010 - DNA, 15 bp, Homo sapiens
aacccattcactatc

SEQ ID NO: 1470011 - DNA, 15 bp, Homo sapiens
acccattcactatca

SEQ ID NO: 1470012 - DNA, 15 bp, Homo sapiens
cccattcactatcat

SEQ ID NO: 1470013 - DNA, 15 bp, Homo sapiens
ccattcactatcatg

SEQ ID NO: 1470014 - DNA, 15 bp, Homo sapiens
cattcactatcatga

SEQ ID NO: 1470015 - DNA, 15 bp, Homo sapiens
attcactatcatgag

SEQ ID NO: 1470016 - DNA, 15 bp, Homo sapiens
ttcactatcatgaga

SEQ ID NO: 1470017 - DNA, 15 bp, Homo sapiens
tcactatcatgagaa

SEQ ID NO: 1470018 - DNA, 15 bp, Homo sapiens
cactatcatgagaac

SEQ ID NO: 1470019 - DNA, 15 bp, Homo sapiens
actatcatgagaaca

SEQ ID NO: 1470020 - DNA, 15 bp, Homo sapiens
ctatcatgagaacag

SEQ ID NO: 1470021 - DNA, 15 bp, Homo sapiens
tatcatgagaacagc

SEQ ID NO: 1470022 - DNA, 15 bp, Homo sapiens
atcatgagaacagca

SEQ ID NO: 1470023 - DNA, 15 bp, Homo sapiens
tcatgagaacagcac

SEQ ID NO: 1470024 - DNA, 15 bp, Homo sapiens
catgagaacagcaca

SEQ ID NO: 1470025 - DNA, 15 bp, Homo sapiens
atgagaacagcacag

SEQ ID NO: 1470026 - DNA, 15 bp, Homo sapiens
tgagaacagcacagg

SEQ ID NO: 1470027 - DNA, 15 bp, Homo sapiens
gagaacagcacagga

SEQ ID NO: 1470028 - DNA, 15 bp, Homo sapiens
agaacagcacaggaa

SEQ ID NO: 1470029 - DNA, 15 bp, Homo sapiens
gaacagcacaggaaa

SEQ ID NO: 1470030 - DNA, 15 bp, Homo sapiens
aacagcacaggaaag

SEQ ID NO: 1470031 - DNA, 15 bp, Homo sapiens
acagcacaggaaaga

SEQ ID NO: 1470032 - DNA, 15 bp, Homo sapiens
cagcacaggaaagac

SEQ ID NO: 1470033 - DNA, 15 bp, Homo sapiens
agcacaggaaagacc

SEQ ID NO: 1470034 - DNA, 15 bp, Homo sapiens
gcacaggaaagaccc

SEQ ID NO: 1470035 - DNA, 15 bp, Homo sapiens
cacaggaaagaccca

SEQ ID NO: 1470036 - DNA, 15 bp, Homo sapiens
acaggaaagacccac

SEQ ID NO: 1470037 - DNA, 15 bp, Homo sapiens
caggaaagacccacc

SEQ ID NO: 1470038 - DNA, 15 bp, Homo sapiens
aggaaagacccaccc

SEQ ID NO: 1470039 - DNA, 15 bp, Homo sapiens
ggaaagacccacccc

SEQ ID NO: 1470040 - DNA, 15 bp, Homo sapiens
gaaagacccaccccc

SEQ ID NO: 1470041 - DNA, 15 bp, Homo sapiens
aaagacccaccccca

SEQ ID NO: 1470042 - DNA, 15 bp, Homo sapiens
aagacccacccccag

SEQ ID NO: 1470043 - DNA, 15 bp, Homo sapiens
agacccacccccaga

SEQ ID NO: 1470044 - DNA, 15 bp, Homo sapiens
gacccacccccagaa

SEQ ID NO: 1470045 - DNA, 15 bp, Homo sapiens
acccacccccagaat

SEQ ID NO: 1470046 - DNA, 15 bp, Homo sapiens
cccacccccagaatt

SEQ ID NO: 1470047 - DNA, 15 bp, Homo sapiens
ccacccccagaattc

SEQ ID NO: 1470048 - DNA, 15 bp, Homo sapiens
cacccccagaattca

SEQ ID NO: 1470049 - DNA, 15 bp, Homo sapiens
acccccagaattcaa

SEQ ID NO: 1470050 - DNA, 15 bp, Homo sapiens
cccccagaattcaat

SEQ ID NO: 1470051 - DNA, 15 bp, Homo sapiens
ccccagaattcaatc

SEQ ID NO: 1470052 - DNA, 15 bp, Homo sapiens
cccagaattcaatca

SEQ ID NO: 1470053 - DNA, 15 bp, Homo sapiens
ccagaattcaatcat

SEQ ID NO: 1470054 - DNA, 15 bp, Homo sapiens
cagaattcaatcatc

SEQ ID NO: 1470055 - DNA, 15 bp, Homo sapiens
agaattcaatcatct

SEQ ID NO: 1470056 - DNA, 15 bp, Homo sapiens
gaattcaatcatctc

SEQ ID NO: 1470057 - DNA, 15 bp, Homo sapiens
aattcaatcatctcc

SEQ ID NO: 1470058 - DNA, 15 bp, Homo sapiens
attcaatcatctccc

SEQ ID NO: 1470059 - DNA, 15 bp, Homo sapiens
ttcaatcatctccca

SEQ ID NO: 1470060 - DNA, 15 bp, Homo sapiens
tcaatcatctcccac

SEQ ID NO: 1470061 - DNA, 15 bp, Homo sapiens
caatcatctcccacc

SEQ ID NO: 1470062 - DNA, 15 bp, Homo sapiens
aatcatctcccacca

SEQ ID NO: 1470063 - DNA, 15 bp, Homo sapiens
atcatctcccaccag

SEQ ID NO: 1470064 - DNA, 15 bp, Homo sapiens
tcatctcccaccagg

SEQ ID NO: 1470065 - DNA, 15 bp, Homo sapiens
catctcccaccaggt

SEQ ID NO: 1470066 - DNA, 15 bp, Homo sapiens
atctcccaccaggtc

SEQ ID NO: 1470067 - DNA, 15 bp, Homo sapiens
tctcccaccaggtcc

SEQ ID NO: 1470068 - DNA, 15 bp, Homo sapiens
ctcccaccaggtccc

SEQ ID NO: 1470069 - DNA, 15 bp, Homo sapiens
tcccaccaggtccct

SEQ ID NO: 1470070 - DNA, 15 bp, Homo sapiens
cccaccaggtccctc

SEQ ID NO: 1470071 - DNA, 15 bp, Homo sapiens
ccaccaggtccctcc

SEQ ID NO: 1470072 - DNA, 15 bp, Homo sapiens
caccaggtccctccc

SEQ ID NO: 1470073 - DNA, 15 bp, Homo sapiens
accaggtccctcccg

SEQ ID NO: 1470074 - DNA, 15 bp, Homo sapiens
ccaggtccctcccgc

SEQ ID NO: 1470075 - DNA, 15 bp, Homo sapiens
caggtccctcccgca

SEQ ID NO: 1470076 - DNA, 15 bp, Homo sapiens
aggtccctcccgcaa

SEQ ID NO: 1470077 - DNA, 15 bp, Homo sapiens
ggtccctcccgcaac

SEQ ID NO: 1470078 - DNA, 15 bp, Homo sapiens
gtccctcccgcaaca

SEQ ID NO: 1470079 - DNA, 15 bp, Homo sapiens
tccctcccgcaacat

SEQ ID NO: 1470080 - DNA, 15 bp, Homo sapiens
ccctcccgcaacatg

SEQ ID NO: 1470081 - DNA, 15 bp, Homo sapiens
cctcccgcaacatgt

SEQ ID NO: 1470082 - DNA, 15 bp, Homo sapiens
ctcccgcaacatgtg

SEQ ID NO: 1470083 - DNA, 15 bp, Homo sapiens
tcccgcaacatgtgg

SEQ ID NO: 1470084 - DNA, 15 bp, Homo sapiens
cccgcaacatgtggg

SEQ ID NO: 1470085 - DNA, 15 bp, Homo sapiens
ccgcaacatgtggga

SEQ ID NO: 1470086 - DNA, 15 bp, Homo sapiens
cgcaacatgtgggag

SEQ ID NO: 1470087 - DNA, 15 bp, Homo sapiens
gcaacatgtgggagt

SEQ ID NO: 1470088 - DNA, 15 bp, Homo sapiens
caacatgtgggagtt

SEQ ID NO: 1470089 - DNA, 15 bp, Homo sapiens
aacatgtgggagtta

SEQ ID NO: 1470090 - DNA, 15 bp, Homo sapiens
acatgtgggagttat

SEQ ID NO: 1470091 - DNA, 15 bp, Homo sapiens
catgtgggagttatg

SEQ ID NO: 1470092 - DNA, 15 bp, Homo sapiens
atgtgggagttatgg

SEQ ID NO: 1470093 - DNA, 15 bp, Homo sapiens
tgtgggagttatggg

SEQ ID NO: 1470094 - DNA, 15 bp, Homo sapiens
gtgggagttatggga

SEQ ID NO: 1470095 - DNA, 15 bp, Homo sapiens
tgggagttatgggag

SEQ ID NO: 1470096 - DNA, 15 bp, Homo sapiens
gggagttatgggagc

SEQ ID NO: 1470097 - DNA, 15 bp, Homo sapiens
ggagttatgggagct

SEQ ID NO: 1470098 - DNA, 15 bp, Homo sapiens
gagttatgggagctt

SEQ ID NO: 1470099 - DNA, 15 bp, Homo sapiens
agttatgggagcttt

SEQ ID NO: 1470100 - DNA, 15 bp, Homo sapiens
gttatgggagctttg

SEQ ID NO: 1470101 - DNA, 15 bp, Homo sapiens
ttatgggagctttgg

SEQ ID NO: 1470102 - DNA, 15 bp, Homo sapiens
tatgggagctttggg

SEQ ID NO: 1470103 - DNA, 15 bp, Homo sapiens
atgggagctttgggt

SEQ ID NO: 1470104 - DNA, 15 bp, Homo sapiens
tgggagctttgggtg

SEQ ID NO: 1470105 - DNA, 15 bp, Homo sapiens
gggagctttgggtgg

SEQ ID NO: 1470106 - DNA, 15 bp, Homo sapiens
ggagctttgggtggg

SEQ ID NO: 1470107 - DNA, 15 bp, Homo sapiens
gagctttgggtgggg

SEQ ID NO: 1470108 - DNA, 15 bp, Homo sapiens
agctttgggtgggga

SEQ ID NO: 1470109 - DNA, 15 bp, Homo sapiens
gctttgggtggggac

SEQ ID NO: 1470110 - DNA, 15 bp, Homo sapiens
ctttgggtggggaca

SEQ ID NO: 1470111 - DNA, 15 bp, Homo sapiens
tttgggtggggacac

SEQ ID NO: 1470112 - DNA, 15 bp, Homo sapiens
ttgggtggggacaca

SEQ ID NO: 1470113 - DNA, 15 bp, Homo sapiens
tgggtggggacacag

SEQ ID NO: 1470114 - DNA, 15 bp, Homo sapiens
gggtggggacacaga

SEQ ID NO: 1470115 - DNA, 15 bp, Homo sapiens
ggtggggacacagag

SEQ ID NO: 1470116 - DNA, 15 bp, Homo sapiens
gtggggacacagagc

SEQ ID NO: 1470117 - DNA, 15 bp, Homo sapiens
tggggacacagagcc

SEQ ID NO: 1470118 - DNA, 15 bp, Homo sapiens
ggggacacagagcca

SEQ ID NO: 1470119 - DNA, 15 bp, Homo sapiens
gggacacagagccaa

SEQ ID NO: 1470120 - DNA, 15 bp, Homo sapiens
ggacacagagccaaa

SEQ ID NO: 1470121 - DNA, 15 bp, Homo sapiens
gacacagagccaaaa

SEQ ID NO: 1470122 - DNA, 15 bp, Homo sapiens
acacagagccaaaac

SEQ ID NO: 1470123 - DNA, 15 bp, Homo sapiens
cacagagccaaaaca

SEQ ID NO: 1470124 - DNA, 15 bp, Homo sapiens
acagagccaaaacat

SEQ ID NO: 1470125 - DNA, 15 bp, Homo sapiens
cagagccaaaacata

SEQ ID NO: 1470126 - DNA, 15 bp, Homo sapiens
agagccaaaacatat

SEQ ID NO: 1470127 - DNA, 15 bp, Homo sapiens
gagccaaaacatatc

SEQ ID NO: 1470128 - DNA, 15 bp, Homo sapiens
agccaaaacatatca

SEQ ID NO: 1470129 - DNA, 15 bp, Homo sapiens
gccaaaacatatcat

SEQ ID NO: 1470130 - DNA, 15 bp, Homo sapiens
ccaaaacatatcata

SEQ ID NO: 1470131 - DNA, 15 bp, Homo sapiens
caaaacatatcatac

SEQ ID NO: 1470132 - DNA, 15 bp, Homo sapiens
aaaacatatcataca

SEQ ID NO: 1470133 - DNA, 15 bp, Homo sapiens
aaacatatcatacac

SEQ ID NO: 1470134 - DNA, 15 bp, Homo sapiens
aacatatcatacact

SEQ ID NO: 1470135 - DNA, 15 bp, Homo sapiens
acatatcatacactt

SEQ ID NO: 1470136 - DNA, 15 bp, Homo sapiens
catatcatacacttt

SEQ ID NO: 1470137 - DNA, 15 bp, Homo sapiens
atatcatacactttc

SEQ ID NO: 1470138 - DNA, 15 bp, Homo sapiens
tatcatacactttcc

SEQ ID NO: 1470139 - DNA, 15 bp, Homo sapiens
atcatacactttcca

SEQ ID NO: 1470140 - DNA, 15 bp, Homo sapiens
tcatacactttccaa

SEQ ID NO: 1470141 - DNA, 15 bp, Homo sapiens
catacactttccaaa

SEQ ID NO: 1470142 - DNA, 15 bp, Homo sapiens
atacactttccaaag

SEQ ID NO: 1470143 - DNA, 15 bp, Homo sapiens
tacactttccaaaga

SEQ ID NO: 1470144 - DNA, 15 bp, Homo sapiens
acactttccaaagat

SEQ ID NO: 1470145 - DNA, 15 bp, Homo sapiens
cactttccaaagatc

SEQ ID NO: 1470146 - DNA, 15 bp, Homo sapiens
actttccaaagatct

SEQ ID NO: 1470147 - DNA, 15 bp, Homo sapiens
ctttccaaagatcta

SEQ ID NO: 1470148 - DNA, 15 bp, Homo sapiens
tttccaaagatctat

SEQ ID NO: 1470149 - DNA, 15 bp, Homo sapiens
ttccaaagatctata

SEQ ID NO: 1470150 - DNA, 15 bp, Homo sapiens
tccaaagatctatat

SEQ ID NO: 1470151 - DNA, 15 bp, Homo sapiens
ccaaagatctatatc

SEQ ID NO: 1470152 - DNA, 15 bp, Homo sapiens
caaagatctatatcc

SEQ ID NO: 1470153 - DNA, 15 bp, Homo sapiens
aaagatctatatcct

SEQ ID NO: 1470154 - DNA, 15 bp, Homo sapiens
aagatctatatcctt

SEQ ID NO: 1470155 - DNA, 15 bp, Homo sapiens
agatctatatccttg

SEQ ID NO: 1470156 - DNA, 15 bp, Homo sapiens
gatctatatccttga

SEQ ID NO: 1470157 - DNA, 15 bp, Homo sapiens
atctatatccttgat

SEQ ID NO: 1470158 - DNA, 15 bp, Homo sapiens
tctatatccttgata

SEQ ID NO: 1470159 - DNA, 15 bp, Homo sapiens
ctatatccttgatat

SEQ ID NO: 1470160 - DNA, 15 bp, Homo sapiens
tatatccttgatatc

SEQ ID NO: 1470161 - DNA, 15 bp, Homo sapiens
atatccttgatatcc

SEQ ID NO: 1470162 - DNA, 15 bp, Homo sapiens
tatccttgatatcct

SEQ ID NO: 1470163 - DNA, 15 bp, Homo sapiens
atccttgatatcctg

SEQ ID NO: 1470164 - DNA, 15 bp, Homo sapiens
tccttgatatcctga

SEQ ID NO: 1470165 - DNA, 15 bp, Homo sapiens
ccttgatatcctgag

SEQ ID NO: 1470166 - DNA, 15 bp, Homo sapiens
cttgatatcctgaga

SEQ ID NO: 1470167 - DNA, 15 bp, Homo sapiens
ttgatatcctgagac

SEQ ID NO: 1470168 - DNA, 15 bp, Homo sapiens
tgatatcctgagaca

SEQ ID NO: 1470169 - DNA, 15 bp, Homo sapiens
gatatcctgagacat

SEQ ID NO: 1470170 - DNA, 15 bp, Homo sapiens
atatcctgagacatg

SEQ ID NO: 1470171 - DNA, 15 bp, Homo sapiens
tatcctgagacatga

SEQ ID NO: 1470172 - DNA, 15 bp, Homo sapiens
atcctgagacatgaa

SEQ ID NO: 1470173 - DNA, 15 bp, Homo sapiens
tcctgagacatgaag

SEQ ID NO: 1470174 - DNA, 15 bp, Homo sapiens
cctgagacatgaagc

SEQ ID NO: 1470175 - DNA, 15 bp, Homo sapiens
ctgagacatgaagca

SEQ ID NO: 1470176 - DNA, 15 bp, Homo sapiens
tgagacatgaagcaa

SEQ ID NO: 1470177 - DNA, 15 bp, Homo sapiens
gagacatgaagcaat

SEQ ID NO: 1470178 - DNA, 15 bp, Homo sapiens
agacatgaagcaatt

SEQ ID NO: 1470179 - DNA, 15 bp, Homo sapiens
gacatgaagcaattt

SEQ ID NO: 1470180 - DNA, 15 bp, Homo sapiens
acatgaagcaatttc

SEQ ID NO: 1470181 - DNA, 15 bp, Homo sapiens
catgaagcaatttct

SEQ ID NO: 1470182 - DNA, 15 bp, Homo sapiens
atgaagcaatttctc

SEQ ID NO: 1470183 - DNA, 15 bp, Homo sapiens
tgaagcaatttctct

SEQ ID NO: 1470184 - DNA, 15 bp, Homo sapiens
gaagcaatttctctc

SEQ ID NO: 1470185 - DNA, 15 bp, Homo sapiens
aagcaatttctctct

SEQ ID NO: 1470186 - DNA, 15 bp, Homo sapiens
agcaatttctctcta

SEQ ID NO: 1470187 - DNA, 15 bp, Homo sapiens
gcaatttctctctac

SEQ ID NO: 1470188 - DNA, 15 bp, Homo sapiens
caatttctctctacc

SEQ ID NO: 1470189 - DNA, 15 bp, Homo sapiens
aatttctctctaccc

SEQ ID NO: 1470190 - DNA, 15 bp, Homo sapiens
atttctctctaccct

SEQ ID NO: 1470191 - DNA, 15 bp, Homo sapiens
tttctctctaccctt

SEQ ID NO: 1470192 - DNA, 15 bp, Homo sapiens
ttctctctacccttc

SEQ ID NO: 1470193 - DNA, 15 bp, Homo sapiens
tctctctacccttca

SEQ ID NO: 1470194 - DNA, 15 bp, Homo sapiens
ctctctacccttcat

SEQ ID NO: 1470195 - DNA, 15 bp, Homo sapiens
tctctacccttcata

SEQ ID NO: 1470196 - DNA, 15 bp, Homo sapiens
ctctacccttcatac

SEQ ID NO: 1470197 - DNA, 15 bp, Homo sapiens
tctacccttcatact

SEQ ID NO: 1470198 - DNA, 15 bp, Homo sapiens
ctacccttcatactt

SEQ ID NO: 1470199 - DNA, 15 bp, Homo sapiens
tacccttcatacttc

SEQ ID NO: 1470200 - DNA, 15 bp, Homo sapiens
acccttcatacttct

SEQ ID NO: 1470201 - DNA, 15 bp, Homo sapiens
cccttcatacttctc

SEQ ID NO: 1470202 - DNA, 15 bp, Homo sapiens
ccttcatacttctca

SEQ ID NO: 1470203 - DNA, 15 bp, Homo sapiens
cttcatacttctcac

SEQ ID NO: 1470204 - DNA, 15 bp, Homo sapiens
ttcatacttctcacc

SEQ ID NO: 1470205 - DNA, 15 bp, Homo sapiens
tcatacttctcaccc

SEQ ID NO: 1470206 - DNA, 15 bp, Homo sapiens
catacttctcaccca

SEQ ID NO: 1470207 - DNA, 15 bp, Homo sapiens
atacttctcacccat

SEQ ID NO: 1470208 - DNA, 15 bp, Homo sapiens
tacttctcacccatg

SEQ ID NO: 1470209 - DNA, 15 bp, Homo sapiens
acttctcacccatgg

SEQ ID NO: 1470210 - DNA, 15 bp, Homo sapiens
cttctcacccatgga

SEQ ID NO: 1470211 - DNA, 15 bp, Homo sapiens
ttctcacccatggat

SEQ ID NO: 1470212 - DNA, 15 bp, Homo sapiens
tctcacccatggata

SEQ ID NO: 1470213 - DNA, 15 bp, Homo sapiens
ctcacccatggataa

SEQ ID NO: 1470214 - DNA, 15 bp, Homo sapiens
tcacccatggataat

SEQ ID NO: 1470215 - DNA, 15 bp, Homo sapiens
cacccatggataata

SEQ ID NO: 1470216 - DNA, 15 bp, Homo sapiens
acccatggataatag

SEQ ID NO: 1470217 - DNA, 15 bp, Homo sapiens
cccatggataataga

SEQ ID NO: 1470218 - DNA, 15 bp, Homo sapiens
ccatggataatagaa

SEQ ID NO: 1470219 - DNA, 15 bp, Homo sapiens
catggataatagaaa

SEQ ID NO: 1470220 - DNA, 15 bp, Homo sapiens
atggataatagaaat

SEQ ID NO: 1470221 - DNA, 15 bp, Homo sapiens
tggataatagaaata

SEQ ID NO: 1470222 - DNA, 15 bp, Homo sapiens
ggataatagaaatat

SEQ ID NO: 1470223 - DNA, 15 bp, Homo sapiens
gataatagaaatata

SEQ ID NO: 1470224 - DNA, 15 bp, Homo sapiens
ataatagaaatatat

SEQ ID NO: 1470225 - DNA, 15 bp, Homo sapiens
taatagaaatatatt

SEQ ID NO: 1470226 - DNA, 15 bp, Homo sapiens
aatagaaatatattg

SEQ ID NO: 1470227 - DNA, 15 bp, Homo sapiens
atagaaatatattgc

SEQ ID NO: 1470228 - DNA, 15 bp, Homo sapiens
tagaaatatattgcc

SEQ ID NO: 1470229 - DNA, 15 bp, Homo sapiens
agaaatatattgcct

SEQ ID NO: 1470230 - DNA, 15 bp, Homo sapiens
gaaatatattgcctg

SEQ ID NO: 1470231 - DNA, 15 bp, Homo sapiens
aaatatattgcctgc

SEQ ID NO: 1470232 - DNA, 15 bp, Homo sapiens
aatatattgcctgct

SEQ ID NO: 1470233 - DNA, 15 bp, Homo sapiens
atatattgcctgcta

SEQ ID NO: 1470234 - DNA, 15 bp, Homo sapiens
tatattgcctgctac

SEQ ID NO: 1470235 - DNA, 15 bp, Homo sapiens
atattgcctgctaca

SEQ ID NO: 1470236 - DNA, 15 bp, Homo sapiens
tattgcctgctacac

SEQ ID NO: 1470237 - DNA, 15 bp, Homo sapiens
attgcctgctacacc

SEQ ID NO: 1470238 - DNA, 15 bp, Homo sapiens
ttgcctgctacacct

SEQ ID NO: 1470239 - DNA, 15 bp, Homo sapiens
tgcctgctacacctc

SEQ ID NO: 1470240 - DNA, 15 bp, Homo sapiens
gcctgctacacctcc

SEQ ID NO: 1470241 - DNA, 15 bp, Homo sapiens
cctgctacacctcct

SEQ ID NO: 1470242 - DNA, 15 bp, Homo sapiens
ctgctacacctcctg

SEQ ID NO: 1470243 - DNA, 15 bp, Homo sapiens
tgctacacctcctgt

SEQ ID NO: 1470244 - DNA, 15 bp, Homo sapiens
gctacacctcctgtg

SEQ ID NO: 1470245 - DNA, 15 bp, Homo sapiens
ctacacctcctgtgg

SEQ ID NO: 1470246 - DNA, 15 bp, Homo sapiens
tacacctcctgtggt

SEQ ID NO: 1470247 - DNA, 15 bp, Homo sapiens
acacctcctgtggtt

SEQ ID NO: 1470248 - DNA, 15 bp, Homo sapiens
cacctcctgtggttt

SEQ ID NO: 1470249 - DNA, 15 bp, Homo sapiens
acctcctgtggtttt

SEQ ID NO: 1470250 - DNA, 15 bp, Homo sapiens
cctcctgtggtttta

SEQ ID NO: 1470251 - DNA, 15 bp, Homo sapiens
ctcctgtggttttag

SEQ ID NO: 1470252 - DNA, 15 bp, Homo sapiens
tcctgtggttttaga

SEQ ID NO: 1470253 - DNA, 15 bp, Homo sapiens
cctgtggttttagaa

SEQ ID NO: 1470254 - DNA, 15 bp, Homo sapiens
ctgtggttttagaat

SEQ ID NO: 1470255 - DNA, 15 bp, Homo sapiens
tgtggttttagaatc

SEQ ID NO: 1470256 - DNA, 15 bp, Homo sapiens
gtggttttagaatca

SEQ ID NO: 1470257 - DNA, 15 bp, Homo sapiens
tggttttagaatcac

SEQ ID NO: 1470258 - DNA, 15 bp, Homo sapiens
ggttttagaatcact

SEQ ID NO: 1470259 - DNA, 15 bp, Homo sapiens
gttttagaatcactg

SEQ ID NO: 1470260 - DNA, 15 bp, Homo sapiens
ttttagaatcactgt

SEQ ID NO: 1470261 - DNA, 15 bp, Homo sapiens
tttagaatcactgtg

SEQ ID NO: 1470262 - DNA, 15 bp, Homo sapiens
ttagaatcactgtga

SEQ ID NO: 1470263 - DNA, 15 bp, Homo sapiens
tagaatcactgtgag

SEQ ID NO: 1470264 - DNA, 15 bp, Homo sapiens
agaatcactgtgagg

SEQ ID NO: 1470265 - DNA, 15 bp, Homo sapiens
gaatcactgtgagga

SEQ ID NO: 1470266 - DNA, 15 bp, Homo sapiens
aatcactgtgaggaa

SEQ ID NO: 1470267 - DNA, 15 bp, Homo sapiens
atcactgtgaggaat

SEQ ID NO: 1470268 - DNA, 15 bp, Homo sapiens
tcactgtgaggaata

SEQ ID NO: 1470269 - DNA, 15 bp, Homo sapiens
cactgtgaggaataa

SEQ ID NO: 1470270 - DNA, 15 bp, Homo sapiens
actgtgaggaataaa

SEQ ID NO: 1470271 - DNA, 15 bp, Homo sapiens
ctgtgaggaataaat

SEQ ID NO: 1470272 - DNA, 15 bp, Homo sapiens
tgtgaggaataaata

SEQ ID NO: 1470273 - DNA, 15 bp, Homo sapiens
gtgaggaataaatac

SEQ ID NO: 1470274 - DNA, 15 bp, Homo sapiens
tgaggaataaatacc

SEQ ID NO: 1470275 - DNA, 15 bp, Homo sapiens
gaggaataaataccc

SEQ ID NO: 1470276 - DNA, 15 bp, Homo sapiens
aggaataaatacccc

SEQ ID NO: 1470277 - DNA, 15 bp, Homo sapiens
ggaataaatacccca

SEQ ID NO: 1470278 - DNA, 15 bp, Homo sapiens
gaataaataccccag

SEQ ID NO: 1470279 - DNA, 15 bp, Homo sapiens
aataaataccccagg

SEQ ID NO: 1470280 - DNA, 15 bp, Homo sapiens
ataaataccccaggc

SEQ ID NO: 1470281 - DNA, 15 bp, Homo sapiens
taaataccccaggct

SEQ ID NO: 1470282 - DNA, 15 bp, Homo sapiens
aaataccccaggctt

SEQ ID NO: 1470283 - DNA, 15 bp, Homo sapiens
aataccccaggcttt

SEQ ID NO: 1470284 - DNA, 15 bp, Homo sapiens
ataccccaggctttc

SEQ ID NO: 1470285 - DNA, 15 bp, Homo sapiens
taccccaggctttct

SEQ ID NO: 1470286 - DNA, 15 bp, Homo sapiens
accccaggctttctc

SEQ ID NO: 1470287 - DNA, 15 bp, Homo sapiens
ccccaggctttctca

SEQ ID NO: 1470288 - DNA, 15 bp, Homo sapiens
cccaggctttctcat

SEQ ID NO: 1470289 - DNA, 15 bp, Homo sapiens
ccaggctttctcatg

SEQ ID NO: 1470290 - DNA, 15 bp, Homo sapiens
caggctttctcatgg

SEQ ID NO: 1470291 - DNA, 15 bp, Homo sapiens
aggctttctcatggg

SEQ ID NO: 1470292 - DNA, 15 bp, Homo sapiens
ggctttctcatgggg

SEQ ID NO: 1470293 - DNA, 15 bp, Homo sapiens
gctttctcatgggga

SEQ ID NO: 1470294 - DNA, 15 bp, Homo sapiens
ctttctcatggggag

SEQ ID NO: 1470295 - DNA, 15 bp, Homo sapiens
tttctcatggggaga

SEQ ID NO: 1470296 - DNA, 15 bp, Homo sapiens
ttctcatggggagat

SEQ ID NO: 1470297 - DNA, 15 bp, Homo sapiens
tctcatggggagatc

SEQ ID NO: 1470298 - DNA, 15 bp, Homo sapiens
ctcatggggagatct

SEQ ID NO: 1470299 - DNA, 15 bp, Homo sapiens
tcatggggagatctg

SEQ ID NO: 1470300 - DNA, 15 bp, Homo sapiens
catggggagatctga

SEQ ID NO: 1470301 - DNA, 15 bp, Homo sapiens
atggggagatctgac

SEQ ID NO: 1470302 - DNA, 15 bp, Homo sapiens
tggggagatctgact

SEQ ID NO: 1470303 - DNA, 15 bp, Homo sapiens
ggggagatctgactt

SEQ ID NO: 1470304 - DNA, 15 bp, Homo sapiens
gggagatctgacttc

SEQ ID NO: 1470305 - DNA, 15 bp, Homo sapiens
ggagatctgacttca

SEQ ID NO: 1470306 - DNA, 15 bp, Homo sapiens
gagatctgacttcat

SEQ ID NO: 1470307 - DNA, 15 bp, Homo sapiens
agatctgacttcatt

SEQ ID NO: 1470308 - DNA, 15 bp, Homo sapiens
gatctgacttcatta

SEQ ID NO: 1470309 - DNA, 15 bp, Homo sapiens
atctgacttcattac

SEQ ID NO: 1470310 - DNA, 15 bp, Homo sapiens
tctgacttcattact

SEQ ID NO: 1470311 - DNA, 15 bp, Homo sapiens
ctgacttcattactg

SEQ ID NO: 1470312 - DNA, 15 bp, Homo sapiens
tgacttcattactga

SEQ ID NO: 1470313 - DNA, 15 bp, Homo sapiens
gacttcattactgag

SEQ ID NO: 1470314 - DNA, 15 bp, Homo sapiens
acttcattactgagg

SEQ ID NO: 1470315 - DNA, 15 bp, Homo sapiens
cttcattactgaggt

SEQ ID NO: 1470316 - DNA, 15 bp, Homo sapiens
ttcattactgaggtc

SEQ ID NO: 1470317 - DNA, 15 bp, Homo sapiens
tcattactgaggtct

SEQ ID NO: 1470318 - DNA, 15 bp, Homo sapiens
cattactgaggtctc

SEQ ID NO: 1470319 - DNA, 15 bp, Homo sapiens
attactgaggtctcg

SEQ ID NO: 1470320 - DNA, 15 bp, Homo sapiens
ttactgaggtctcgc

SEQ ID NO: 1470321 - DNA, 15 bp, Homo sapiens
tactgaggtctcgct

SEQ ID NO: 1470322 - DNA, 15 bp, Homo sapiens
actgaggtctcgcta

SEQ ID NO: 1470323 - DNA, 15 bp, Homo sapiens
ctgaggtctcgctaa

SEQ ID NO: 1470324 - DNA, 15 bp, Homo sapiens
tgaggtctcgctaat

SEQ ID NO: 1470325 - DNA, 15 bp, Homo sapiens
gaggtctcgctaatg

SEQ ID NO: 1470326 - DNA, 15 bp, Homo sapiens
aggtctcgctaatga

SEQ ID NO: 1470327 - DNA, 15 bp, Homo sapiens
ggtctcgctaatgag

SEQ ID NO: 1470328 - DNA, 15 bp, Homo sapiens
gtctcgctaatgagc

SEQ ID NO: 1470329 - DNA, 15 bp, Homo sapiens
tctcgctaatgagca

SEQ ID NO: 1470330 - DNA, 15 bp, Homo sapiens
ctcgctaatgagcag

SEQ ID NO: 1470331 - DNA, 15 bp, Homo sapiens
tcgctaatgagcaga

SEQ ID NO: 1470332 - DNA, 15 bp, Homo sapiens
cgctaatgagcagac

SEQ ID NO: 1470333 - DNA, 15 bp, Homo sapiens
gctaatgagcagacc

SEQ ID NO: 1470334 - DNA, 15 bp, Homo sapiens
ctaatgagcagacct

SEQ ID NO: 1470335 - DNA, 15 bp, Homo sapiens
taatgagcagaccta

SEQ ID NO: 1470336 - DNA, 15 bp, Homo sapiens
aatgagcagacctat

SEQ ID NO: 1470337 - DNA, 15 bp, Homo sapiens
atgagcagacctata

SEQ ID NO: 1470338 - DNA, 15 bp, Homo sapiens
tgagcagacctatag

SEQ ID NO: 1470339 - DNA, 15 bp, Homo sapiens
gagcagacctatagc

SEQ ID NO: 1470340 - DNA, 15 bp, Homo sapiens
agcagacctatagca

SEQ ID NO: 1470341 - DNA, 15 bp, Homo sapiens
gcagacctatagcag

SEQ ID NO: 1470342 - DNA, 15 bp, Homo sapiens
cagacctatagcagc

SEQ ID NO: 1470343 - DNA, 15 bp, Homo sapiens
agacctatagcagct

SEQ ID NO: 1470344 - DNA, 15 bp, Homo sapiens
gacctatagcagctt

SEQ ID NO: 1470345 - DNA, 15 bp, Homo sapiens
acctatagcagcttt

SEQ ID NO: 1470346 - DNA, 15 bp, Homo sapiens
cctatagcagctttt

SEQ ID NO: 1470347 - DNA, 15 bp, Homo sapiens
ctatagcagcttttt

SEQ ID NO: 1470348 - DNA, 15 bp, Homo sapiens
tatagcagctttttc

SEQ ID NO: 1470349 - DNA, 15 bp, Homo sapiens
atagcagctttttct

SEQ ID NO: 1470350 - DNA, 15 bp, Homo sapiens
tagcagctttttctt

SEQ ID NO: 1470351 - DNA, 15 bp, Homo sapiens
agcagctttttcttt

SEQ ID NO: 1470352 - DNA, 15 bp, Homo sapiens
gcagctttttctttg

SEQ ID NO: 1470353 - DNA, 15 bp, Homo sapiens
cagctttttctttgg

SEQ ID NO: 1470354 - DNA, 15 bp, Homo sapiens
agctttttctttgga

SEQ ID NO: 1470355 - DNA, 15 bp, Homo sapiens
gctttttctttggaa

SEQ ID NO: 1470356 - DNA, 15 bp, Homo sapiens
ctttttctttggaag

SEQ ID NO: 1470357 - DNA, 15 bp, Homo sapiens
tttttctttggaagt

SEQ ID NO: 1470358 - DNA, 15 bp, Homo sapiens
ttttctttggaagtc

SEQ ID NO: 1470359 - DNA, 15 bp, Homo sapiens
tttctttggaagtct

SEQ ID NO: 1470360 - DNA, 15 bp, Homo sapiens
ttctttggaagtctt

SEQ ID NO: 1470361 - DNA, 15 bp, Homo sapiens
tctttggaagtcttc

SEQ ID NO: 1470362 - DNA, 15 bp, Homo sapiens
ctttggaagtcttca

SEQ ID NO: 1470363 - DNA, 15 bp, Homo sapiens
tttggaagtcttcag

SEQ ID NO: 1470364 - DNA, 15 bp, Homo sapiens
ttggaagtcttcagg

SEQ ID NO: 1470365 - DNA, 15 bp, Homo sapiens
tggaagtcttcaggt

SEQ ID NO: 1470366 - DNA, 15 bp, Homo sapiens
ggaagtcttcaggta

SEQ ID NO: 1470367 - DNA, 15 bp, Homo sapiens
gaagtcttcaggtac

SEQ ID NO: 1470368 - DNA, 15 bp, Homo sapiens
aagtcttcaggtaca

SEQ ID NO: 1470369 - DNA, 15 bp, Homo sapiens
agtcttcaggtacac

SEQ ID NO: 1470370 - DNA, 15 bp, Homo sapiens
gtcttcaggtacaca

SEQ ID NO: 1470371 - DNA, 15 bp, Homo sapiens
tcttcaggtacacat

SEQ ID NO: 1470372 - DNA, 15 bp, Homo sapiens
cttcaggtacacatc

SEQ ID NO: 1470373 - DNA, 15 bp, Homo sapiens
ttcaggtacacatca

SEQ ID NO: 1470374 - DNA, 15 bp, Homo sapiens
tcaggtacacatcat

SEQ ID NO: 1470375 - DNA, 15 bp, Homo sapiens
caggtacacatcatt

SEQ ID NO: 1470376 - DNA, 15 bp, Homo sapiens
aggtacacatcattg

SEQ ID NO: 1470377 - DNA, 15 bp, Homo sapiens
ggtacacatcattgc

SEQ ID NO: 1470378 - DNA, 15 bp, Homo sapiens
gtacacatcattgcg

SEQ ID NO: 1470379 - DNA, 15 bp, Homo sapiens
tacacatcattgcga

SEQ ID NO: 1470380 - DNA, 15 bp, Homo sapiens
acacatcattgcgaa

SEQ ID NO: 1470381 - DNA, 15 bp, Homo sapiens
cacatcattgcgaag

SEQ ID NO: 1470382 - DNA, 15 bp, Homo sapiens
acatcattgcgaagg

SEQ ID NO: 1470383 - DNA, 15 bp, Homo sapiens
catcattgcgaaggt

SEQ ID NO: 1470384 - DNA, 15 bp, Homo sapiens
atcattgcgaaggtc

SEQ ID NO: 1470385 - DNA, 15 bp, Homo sapiens
tcattgcgaaggtca

SEQ ID NO: 1470386 - DNA, 15 bp, Homo sapiens
cattgcgaaggtcaa

SEQ ID NO: 1470387 - DNA, 15 bp, Homo sapiens
attgcgaaggtcaat

SEQ ID NO: 1470388 - DNA, 15 bp, Homo sapiens
ttgcgaaggtcaatc

SEQ ID NO: 1470389 - DNA, 15 bp, Homo sapiens
tgcgaaggtcaatcc

SEQ ID NO: 1470390 - DNA, 15 bp, Homo sapiens
gcgaaggtcaatcct

SEQ ID NO: 1470391 - DNA, 15 bp, Homo sapiens
cgaaggtcaatcctg

SEQ ID NO: 1470392 - DNA, 15 bp, Homo sapiens
gaaggtcaatcctgt

SEQ ID NO: 1470393 - DNA, 15 bp, Homo sapiens
aaggtcaatcctgtg

SEQ ID NO: 1470394 - DNA, 15 bp, Homo sapiens
aggtcaatcctgtgt

SEQ ID NO: 1470395 - DNA, 15 bp, Homo sapiens
ggtcaatcctgtgtc

SEQ ID NO: 1470396 - DNA, 15 bp, Homo sapiens
gtcaatcctgtgtcc

SEQ ID NO: 1470397 - DNA, 15 bp, Homo sapiens
tcaatcctgtgtcca

SEQ ID NO: 1470398 - DNA, 15 bp, Homo sapiens
caatcctgtgtccat

SEQ ID NO: 1470399 - DNA, 15 bp, Homo sapiens
aatcctgtgtccatc

SEQ ID NO: 1470400 - DNA, 15 bp, Homo sapiens
atcctgtgtccatca

SEQ ID NO: 1470401 - DNA, 15 bp, Homo sapiens
tcctgtgtccatcac

SEQ ID NO: 1470402 - DNA, 15 bp, Homo sapiens
cctgtgtccatcact

SEQ ID NO: 1470403 - DNA, 15 bp, Homo sapiens
ctgtgtccatcactg

SEQ ID NO: 1470404 - DNA, 15 bp, Homo sapiens
tgtgtccatcactga

SEQ ID NO: 1470405 - DNA, 15 bp, Homo sapiens
gtgtccatcactgaa

SEQ ID NO: 1470406 - DNA, 15 bp, Homo sapiens
tgtccatcactgaat

SEQ ID NO: 1470407 - DNA, 15 bp, Homo sapiens
gtccatcactgaatg

SEQ ID NO: 1470408 - DNA, 15 bp, Homo sapiens
tccatcactgaatgg

SEQ ID NO: 1470409 - DNA, 15 bp, Homo sapiens
ccatcactgaatggc

SEQ ID NO: 1470410 - DNA, 15 bp, Homo sapiens
catcactgaatggca

SEQ ID NO: 1470411 - DNA, 15 bp, Homo sapiens
atcactgaatggcat

SEQ ID NO: 1470412 - DNA, 15 bp, Homo sapiens
tcactgaatggcata

SEQ ID NO: 1470413 - DNA, 15 bp, Homo sapiens
cactgaatggcataa

SEQ ID NO: 1470414 - DNA, 15 bp, Homo sapiens
actgaatggcataaa

SEQ ID NO: 1470415 - DNA, 15 bp, Homo sapiens
ctgaatggcataaat

SEQ ID NO: 1470416 - DNA, 15 bp, Homo sapiens
tgaatggcataaatt

SEQ ID NO: 1470417 - DNA, 15 bp, Homo sapiens
gaatggcataaattt

SEQ ID NO: 1470418 - DNA, 15 bp, Homo sapiens
aatggcataaatttg

SEQ ID NO: 1470419 - DNA, 15 bp, Homo sapiens
atggcataaatttgt

SEQ ID NO: 1470420 - DNA, 15 bp, Homo sapiens
tggcataaatttgtg

SEQ ID NO: 1470421 - DNA, 15 bp, Homo sapiens
ggcataaatttgtga

SEQ ID NO: 1470422 - DNA, 15 bp, Homo sapiens
gcataaatttgtgag

SEQ ID NO: 1470423 - DNA, 15 bp, Homo sapiens
cataaatttgtgagg

SEQ ID NO: 1470424 - DNA, 15 bp, Homo sapiens
ataaatttgtgaggt

SEQ ID NO: 1470425 - DNA, 15 bp, Homo sapiens
taaatttgtgaggtg

SEQ ID NO: 1470426 - DNA, 15 bp, Homo sapiens
aaatttgtgaggtga

SEQ ID NO: 1470427 - DNA, 15 bp, Homo sapiens
aatttgtgaggtgaa

SEQ ID NO: 1470428 - DNA, 15 bp, Homo sapiens
atttgtgaggtgaac

SEQ ID NO: 1470429 - DNA, 15 bp, Homo sapiens
tttgtgaggtgaact

SEQ ID NO: 1470430 - DNA, 15 bp, Homo sapiens
ttgtgaggtgaactg

SEQ ID NO: 1470431 - DNA, 15 bp, Homo sapiens
tgtgaggtgaactgt

SEQ ID NO: 1470432 - DNA, 15 bp, Homo sapiens
gtgaggtgaactgtt

SEQ ID NO: 1470433 - DNA, 15 bp, Homo sapiens
tgaggtgaactgttt

SEQ ID NO: 1470434 - DNA, 15 bp, Homo sapiens
gaggtgaactgttta

SEQ ID NO: 1470435 - DNA, 15 bp, Homo sapiens
aggtgaactgtttaa

SEQ ID NO: 1470436 - DNA, 15 bp, Homo sapiens
ggtgaactgtttaaa

SEQ ID NO: 1470437 - DNA, 15 bp, Homo sapiens
gtgaactgtttaaaa

SEQ ID NO: 1470438 - DNA, 15 bp, Homo sapiens
tgaactgtttaaaac

SEQ ID NO: 1470439 - DNA, 15 bp, Homo sapiens
gaactgtttaaaaca

SEQ ID NO: 1470440 - DNA, 15 bp, Homo sapiens
aactgtttaaaacaa

SEQ ID NO: 1470441 - DNA, 15 bp, Homo sapiens
actgtttaaaacaaa

SEQ ID NO: 1470442 - DNA, 15 bp, Homo sapiens
ctgtttaaaacaaag

SEQ ID NO: 1470443 - DNA, 15 bp, Homo sapiens
tgtttaaaacaaaga

SEQ ID NO: 1470444 - DNA, 15 bp, Homo sapiens
gtttaaaacaaagat

SEQ ID NO: 1470445 - DNA, 15 bp, Homo sapiens
tttaaaacaaagatg

SEQ ID NO: 1470446 - DNA, 15 bp, Homo sapiens
ttaaaacaaagatgg

SEQ ID NO: 1470447 - DNA, 15 bp, Homo sapiens
taaaacaaagatggg

SEQ ID NO: 1470448 - DNA, 15 bp, Homo sapiens
aaaacaaagatgggc

SEQ ID NO: 1470449 - DNA, 15 bp, Homo sapiens
aaacaaagatgggca

SEQ ID NO: 1470450 - DNA, 15 bp, Homo sapiens
aacaaagatgggcag

SEQ ID NO: 1470451 - DNA, 15 bp, Homo sapiens
acaaagatgggcaga

SEQ ID NO: 1470452 - DNA, 15 bp, Homo sapiens
caaagatgggcagac

SEQ ID NO: 1470453 - DNA, 15 bp, Homo sapiens
aaagatgggcagact

SEQ ID NO: 1470454 - DNA, 15 bp, Homo sapiens
aagatgggcagactc

SEQ ID NO: 1470455 - DNA, 15 bp, Homo sapiens
agatgggcagactcc

SEQ ID NO: 1470456 - DNA, 15 bp, Homo sapiens
gatgggcagactcct

SEQ ID NO: 1470457 - DNA, 15 bp, Homo sapiens
atgggcagactcctc

SEQ ID NO: 1470458 - DNA, 15 bp, Homo sapiens
tgggcagactcctct

SEQ ID NO: 1470459 - DNA, 15 bp, Homo sapiens
gggcagactcctctc

SEQ ID NO: 1470460 - DNA, 15 bp, Homo sapiens
ggcagactcctctca

SEQ ID NO: 1470461 - DNA, 15 bp, Homo sapiens
gcagactcctctcag

SEQ ID NO: 1470462 - DNA, 15 bp, Homo sapiens
cagactcctctcaga

SEQ ID NO: 1470463 - DNA, 15 bp, Homo sapiens
agactcctctcagaa

SEQ ID NO: 1470464 - DNA, 15 bp, Homo sapiens
gactcctctcagaaa

SEQ ID NO: 1470465 - DNA, 15 bp, Homo sapiens
actcctctcagaaaa

SEQ ID NO: 1470466 - DNA, 15 bp, Homo sapiens
ctcctctcagaaaat

SEQ ID NO: 1470467 - DNA, 15 bp, Homo sapiens
tcctctcagaaaatg

SEQ ID NO: 1470468 - DNA, 15 bp, Homo sapiens
cctctcagaaaatga

SEQ ID NO: 1470469 - DNA, 15 bp, Homo sapiens
ctctcagaaaatgag

SEQ ID NO: 1470470 - DNA, 15 bp, Homo sapiens
tctcagaaaatgagg

SEQ ID NO: 1470471 - DNA, 15 bp, Homo sapiens
ctcagaaaatgaggc

SEQ ID NO: 1470472 - DNA, 15 bp, Homo sapiens
tcagaaaatgaggcc

SEQ ID NO: 1470473 - DNA, 15 bp, Homo sapiens
cagaaaatgaggcca

SEQ ID NO: 1470474 - DNA, 15 bp, Homo sapiens
agaaaatgaggccat

SEQ ID NO: 1470475 - DNA, 15 bp, Homo sapiens
gaaaatgaggccatg

SEQ ID NO: 1470476 - DNA, 15 bp, Homo sapiens
aaaatgaggccatgt

SEQ ID NO: 1470477 - DNA, 15 bp, Homo sapiens
aaatgaggccatgtt

SEQ ID NO: 1470478 - DNA, 15 bp, Homo sapiens
aatgaggccatgttc

SEQ ID NO: 1470479 - DNA, 15 bp, Homo sapiens
atgaggccatgttcc

SEQ ID NO: 1470480 - DNA, 15 bp, Homo sapiens
tgaggccatgttcct

SEQ ID NO: 1470481 - DNA, 15 bp, Homo sapiens
gaggccatgttccta

SEQ ID NO: 1470482 - DNA, 15 bp, Homo sapiens
aggccatgttcctag

SEQ ID NO: 1470483 - DNA, 15 bp, Homo sapiens
ggccatgttcctaga

SEQ ID NO: 1470484 - DNA, 15 bp, Homo sapiens
gccatgttcctagag

SEQ ID NO: 1470485 - DNA, 15 bp, Homo sapiens
ccatgttcctagagg

SEQ ID NO: 1470486 - DNA, 15 bp, Homo sapiens
catgttcctagaggt

SEQ ID NO: 1470487 - DNA, 15 bp, Homo sapiens
atgttcctagaggtc

SEQ ID NO: 1470488 - DNA, 15 bp, Homo sapiens
tgttcctagaggtcc

SEQ ID NO: 1470489 - DNA, 15 bp, Homo sapiens
gttcctagaggtcca

SEQ ID NO: 1470490 - DNA, 15 bp, Homo sapiens
ttcctagaggtccaa

SEQ ID NO: 1470491 - DNA, 15 bp, Homo sapiens
tcctagaggtccaac

SEQ ID NO: 1470492 - DNA, 15 bp, Homo sapiens
cctagaggtccaact

SEQ ID NO: 1470493 - DNA, 15 bp, Homo sapiens
ctagaggtccaactc

SEQ ID NO: 1470494 - DNA, 15 bp, Homo sapiens
tagaggtccaactct

SEQ ID NO: 1470495 - DNA, 15 bp, Homo sapiens
agaggtccaactcta

SEQ ID NO: 1470496 - DNA, 15 bp, Homo sapiens
gaggtccaactctat

SEQ ID NO: 1470497 - DNA, 15 bp, Homo sapiens
aggtccaactctatg

SEQ ID NO: 1470498 - DNA, 15 bp, Homo sapiens
ggtccaactctatgt

SEQ ID NO: 1470499 - DNA, 15 bp, Homo sapiens
gtccaactctatgta

SEQ ID NO: 1470500 - DNA, 15 bp, Homo sapiens
tccaactctatgtaa

SEQ ID NO: 1470501 - DNA, 15 bp, Homo sapiens
ccaactctatgtaat

SEQ ID NO: 1470502 - DNA, 15 bp, Homo sapiens
caactctatgtaatg

SEQ ID NO: 1470503 - DNA, 15 bp, Homo sapiens
aactctatgtaatgg

SEQ ID NO: 1470504 - DNA, 15 bp, Homo sapiens
actctatgtaatggt

SEQ ID NO: 1470505 - DNA, 15 bp, Homo sapiens
ctctatgtaatggtc

SEQ ID NO: 1470506 - DNA, 15 bp, Homo sapiens
tctatgtaatggtct

SEQ ID NO: 1470507 - DNA, 15 bp, Homo sapiens
ctatgtaatggtctt

SEQ ID NO: 1470508 - DNA, 15 bp, Homo sapiens
tatgtaatggtctta

SEQ ID NO: 1470509 - DNA, 15 bp, Homo sapiens
atgtaatggtcttag

SEQ ID NO: 1470510 - DNA, 15 bp, Homo sapiens
tgtaatggtcttagg

SEQ ID NO: 1470511 - DNA, 15 bp, Homo sapiens
gtaatggtcttaggg

SEQ ID NO: 1470512 - DNA, 15 bp, Homo sapiens
taatggtcttagggg

SEQ ID NO: 1470513 - DNA, 15 bp, Homo sapiens
aatggtcttaggggt

SEQ ID NO: 1470514 - DNA, 15 bp, Homo sapiens
atggtcttaggggtg

SEQ ID NO: 1470515 - DNA, 15 bp, Homo sapiens
tggtcttaggggtga

SEQ ID NO: 1470516 - DNA, 15 bp, Homo sapiens
ggtcttaggggtgat

SEQ ID NO: 1470517 - DNA, 15 bp, Homo sapiens
gtcttaggggtgatg

SEQ ID NO: 1470518 - DNA, 15 bp, Homo sapiens
tcttaggggtgatga

SEQ ID NO: 1470519 - DNA, 15 bp, Homo sapiens
cttaggggtgatgaa

SEQ ID NO: 1470520 - DNA, 15 bp, Homo sapiens
ttaggggtgatgaag

SEQ ID NO: 1470521 - DNA, 15 bp, Homo sapiens
taggggtgatgaagc

SEQ ID NO: 1470522 - DNA, 15 bp, Homo sapiens
aggggtgatgaagca

SEQ ID NO: 1470523 - DNA, 15 bp, Homo sapiens
ggggtgatgaagcac

SEQ ID NO: 1470524 - DNA, 15 bp, Homo sapiens
gggtgatgaagcact

SEQ ID NO: 1470525 - DNA, 15 bp, Homo sapiens
ggtgatgaagcactg

SEQ ID NO: 1470526 - DNA, 15 bp, Homo sapiens
gtgatgaagcactgt

SEQ ID NO: 1470527 - DNA, 15 bp, Homo sapiens
tgatgaagcactgta

SEQ ID NO: 1470528 - DNA, 15 bp, Homo sapiens
gatgaagcactgtag

SEQ ID NO: 1470529 - DNA, 15 bp, Homo sapiens
atgaagcactgtagt

SEQ ID NO: 1470530 - DNA, 15 bp, Homo sapiens
tgaagcactgtagtc

SEQ ID NO: 1470531 - DNA, 15 bp, Homo sapiens
gaagcactgtagtcc

SEQ ID NO: 1470532 - DNA, 15 bp, Homo sapiens
aagcactgtagtcct

SEQ ID NO: 1470533 - DNA, 15 bp, Homo sapiens
agcactgtagtcctg

SEQ ID NO: 1470534 - DNA, 15 bp, Homo sapiens
gcactgtagtcctgc

SEQ ID NO: 1470535 - DNA, 15 bp, Homo sapiens
cactgtagtcctgct

SEQ ID NO: 1470536 - DNA, 15 bp, Homo sapiens
actgtagtcctgctt

SEQ ID NO: 1470537 - DNA, 15 bp, Homo sapiens
ctgtagtcctgcttc

SEQ ID NO: 1470538 - DNA, 15 bp, Homo sapiens
tgtagtcctgcttct

SEQ ID NO: 1470539 - DNA, 15 bp, Homo sapiens
gtagtcctgcttctc

SEQ ID NO: 1470540 - DNA, 15 bp, Homo sapiens
tagtcctgcttctca

SEQ ID NO: 1470541 - DNA, 15 bp, Homo sapiens
agtcctgcttctcac

SEQ ID NO: 1470542 - DNA, 15 bp, Homo sapiens
gtcctgcttctcact

SEQ ID NO: 1470543 - DNA, 15 bp, Homo sapiens
tcctgcttctcactc

SEQ ID NO: 1470544 - DNA, 15 bp, Homo sapiens
cctgcttctcactca

SEQ ID NO: 1470545 - DNA, 15 bp, Homo sapiens
ctgcttctcactcat

SEQ ID NO: 1470546 - DNA, 15 bp, Homo sapiens
tgcttctcactcata

SEQ ID NO: 1470547 - DNA, 15 bp, Homo sapiens
gcttctcactcatac

SEQ ID NO: 1470548 - DNA, 15 bp, Homo sapiens
cttctcactcatacc

SEQ ID NO: 1470549 - DNA, 15 bp, Homo sapiens
ttctcactcatacct

SEQ ID NO: 1470550 - DNA, 15 bp, Homo sapiens
tctcactcatacctg

SEQ ID NO: 1470551 - DNA, 15 bp, Homo sapiens
ctcactcatacctgc

SEQ ID NO: 1470552 - DNA, 15 bp, Homo sapiens
tcactcatacctgcc

SEQ ID NO: 1470553 - DNA, 15 bp, Homo sapiens
cactcatacctgccc

SEQ ID NO: 1470554 - DNA, 15 bp, Homo sapiens
actcatacctgccct

SEQ ID NO: 1470555 - DNA, 15 bp, Homo sapiens
ctcatacctgccctc

SEQ ID NO: 1470556 - DNA, 15 bp, Homo sapiens
tcatacctgccctcc

SEQ ID NO: 1470557 - DNA, 15 bp, Homo sapiens
catacctgccctcca

SEQ ID NO: 1470558 - DNA, 15 bp, Homo sapiens
atacctgccctccag

SEQ ID NO: 1470559 - DNA, 15 bp, Homo sapiens
tacctgccctccaga

SEQ ID NO: 1470560 - DNA, 15 bp, Homo sapiens
acctgccctccagaa

SEQ ID NO: 1470561 - DNA, 15 bp, Homo sapiens
cctgccctccagaaa

SEQ ID NO: 1470562 - DNA, 15 bp, Homo sapiens
ctgccctccagaaag

SEQ ID NO: 1470563 - DNA, 15 bp, Homo sapiens
tgccctccagaaagg

SEQ ID NO: 1470564 - DNA, 15 bp, Homo sapiens
gccctccagaaagga

SEQ ID NO: 1470565 - DNA, 15 bp, Homo sapiens
ccctccagaaaggat

SEQ ID NO: 1470566 - DNA, 15 bp, Homo sapiens
cctccagaaaggata

SEQ ID NO: 1470567 - DNA, 15 bp, Homo sapiens
ctccagaaaggataa

SEQ ID NO: 1470568 - DNA, 15 bp, Homo sapiens
tccagaaaggataaa

SEQ ID NO: 1470569 - DNA, 15 bp, Homo sapiens
ccagaaaggataaaa

SEQ ID NO: 1470570 - DNA, 15 bp, Homo sapiens
cagaaaggataaaat

SEQ ID NO: 1470571 - DNA, 15 bp, Homo sapiens
agaaaggataaaatt

SEQ ID NO: 1470572 - DNA, 15 bp, Homo sapiens
gaaaggataaaatta

SEQ ID NO: 1470573 - DNA, 15 bp, Homo sapiens
aaaggataaaattat

SEQ ID NO: 1470574 - DNA, 15 bp, Homo sapiens
aaggataaaattata

SEQ ID NO: 1470575 - DNA, 15 bp, Homo sapiens
aggataaaattataa

SEQ ID NO: 1470576 - DNA, 15 bp, Homo sapiens
ggataaaattataaa

SEQ ID NO: 1470577 - DNA, 15 bp, Homo sapiens
gataaaattataaat

SEQ ID NO: 1470578 - DNA, 15 bp, Homo sapiens
ataaaattataaatg

SEQ ID NO: 1470579 - DNA, 15 bp, Homo sapiens
taaaattataaatgt

SEQ ID NO: 1470580 - DNA, 15 bp, Homo sapiens
aaaattataaatgtc

SEQ ID NO: 1470581 - DNA, 15 bp, Homo sapiens
aaattataaatgtcc

SEQ ID NO: 1470582 - DNA, 15 bp, Homo sapiens
aattataaatgtcca

SEQ ID NO: 1470583 - DNA, 15 bp, Homo sapiens
attataaatgtccaa

SEQ ID NO: 1470584 - DNA, 15 bp, Homo sapiens
ttataaatgtccaat

SEQ ID NO: 1470585 - DNA, 15 bp, Homo sapiens
tataaatgtccaatt

SEQ ID NO: 1470586 - DNA, 15 bp, Homo sapiens
ataaatgtccaatta

SEQ ID NO: 1470587 - DNA, 15 bp, Homo sapiens
taaatgtccaattag

SEQ ID NO: 1470588 - DNA, 15 bp, Homo sapiens
aaatgtccaattaga

SEQ ID NO: 1470589 - DNA, 15 bp, Homo sapiens
aatgtccaattagag

SEQ ID NO: 1470590 - DNA, 15 bp, Homo sapiens
atgtccaattagagt

SEQ ID NO: 1470591 - DNA, 15 bp, Homo sapiens
tgtccaattagagtc

SEQ ID NO: 1470592 - DNA, 15 bp, Homo sapiens
gtccaattagagtct

SEQ ID NO: 1470593 - DNA, 15 bp, Homo sapiens
tccaattagagtctt

SEQ ID NO: 1470594 - DNA, 15 bp, Homo sapiens
ccaattagagtcttt

SEQ ID NO: 1470595 - DNA, 15 bp, Homo sapiens
caattagagtcttta

SEQ ID NO: 1470596 - DNA, 15 bp, Homo sapiens
aattagagtctttat

SEQ ID NO: 1470597 - DNA, 15 bp, Homo sapiens
attagagtctttatt

SEQ ID NO: 1470598 - DNA, 15 bp, Homo sapiens
ttagagtctttatta

SEQ ID NO: 1470599 - DNA, 15 bp, Homo sapiens
tagagtctttattag

SEQ ID NO: 1470600 - DNA, 15 bp, Homo sapiens
agagtctttattagt

SEQ ID NO: 1470601 - DNA, 15 bp, Homo sapiens
gagtctttattagtc

SEQ ID NO: 1470602 - DNA, 15 bp, Homo sapiens
agtctttattagtct

SEQ ID NO: 1470603 - DNA, 15 bp, Homo sapiens
gtctttattagtctc

SEQ ID NO: 1470604 - DNA, 15 bp, Homo sapiens
tctttattagtctct

SEQ ID NO: 1470605 - DNA, 15 bp, Homo sapiens
ctttattagtctctt

SEQ ID NO: 1470606 - DNA, 15 bp, Homo sapiens
tttattagtctcttc

SEQ ID NO: 1470607 - DNA, 15 bp, Homo sapiens
ttattagtctcttcc

SEQ ID NO: 1470608 - DNA, 15 bp, Homo sapiens
tattagtctcttcct

SEQ ID NO: 1470609 - DNA, 15 bp, Homo sapiens
attagtctcttccta

SEQ ID NO: 1470610 - DNA, 15 bp, Homo sapiens
ttagtctcttcctat

SEQ ID NO: 1470611 - DNA, 15 bp, Homo sapiens
tagtctcttcctatg

SEQ ID NO: 1470612 - DNA, 15 bp, Homo sapiens
agtctcttcctatgt

SEQ ID NO: 1470613 - DNA, 15 bp, Homo sapiens
gtctcttcctatgta

SEQ ID NO: 1470614 - DNA, 15 bp, Homo sapiens
tctcttcctatgtag

SEQ ID NO: 1470615 - DNA, 15 bp, Homo sapiens
ctcttcctatgtaga

SEQ ID NO: 1470616 - DNA, 15 bp, Homo sapiens
tcttcctatgtagaa

SEQ ID NO: 1470617 - DNA, 15 bp, Homo sapiens
cttcctatgtagaat

SEQ ID NO: 1470618 - DNA, 15 bp, Homo sapiens
ttcctatgtagaatt

SEQ ID NO: 1470619 - DNA, 15 bp, Homo sapiens
tcctatgtagaattt

SEQ ID NO: 1470620 - DNA, 15 bp, Homo sapiens
cctatgtagaattta

SEQ ID NO: 1470621 - DNA, 15 bp, Homo sapiens
ctatgtagaatttat

SEQ ID NO: 1470622 - DNA, 15 bp, Homo sapiens
tatgtagaatttatc

SEQ ID NO: 1470623 - DNA, 15 bp, Homo sapiens
atgtagaatttatca

SEQ ID NO: 1470624 - DNA, 15 bp, Homo sapiens
tgtagaatttatcaa

SEQ ID NO: 1470625 - DNA, 15 bp, Homo sapiens
gtagaatttatcaat

SEQ ID NO: 1470626 - DNA, 15 bp, Homo sapiens
tagaatttatcaata

SEQ ID NO: 1470627 - DNA, 15 bp, Homo sapiens
agaatttatcaatag

SEQ ID NO: 1470628 - DNA, 15 bp, Homo sapiens
gaatttatcaatagt

SEQ ID NO: 1470629 - DNA, 15 bp, Homo sapiens
aatttatcaatagtt

SEQ ID NO: 1470630 - DNA, 15 bp, Homo sapiens
atttatcaatagttt

SEQ ID NO: 1470631 - DNA, 15 bp, Homo sapiens
tttatcaatagtttg

SEQ ID NO: 1470632 - DNA, 15 bp, Homo sapiens
ttatcaatagtttga

SEQ ID NO: 1470633 - DNA, 15 bp, Homo sapiens
tatcaatagtttgac

SEQ ID NO: 1470634 - DNA, 15 bp, Homo sapiens
atcaatagtttgaca

SEQ ID NO: 1470635 - DNA, 15 bp, Homo sapiens
tcaatagtttgacag

SEQ ID NO: 1470636 - DNA, 15 bp, Homo sapiens
caatagtttgacagt

SEQ ID NO: 1470637 - DNA, 15 bp, Homo sapiens
aatagtttgacagtt

SEQ ID NO: 1470638 - DNA, 15 bp, Homo sapiens
atagtttgacagttc

SEQ ID NO: 1470639 - DNA, 15 bp, Homo sapiens
tagtttgacagttct

SEQ ID NO: 1470640 - DNA, 15 bp, Homo sapiens
agtttgacagttctg

SEQ ID NO: 1470641 - DNA, 15 bp, Homo sapiens
gtttgacagttctgc

SEQ ID NO: 1470642 - DNA, 15 bp, Homo sapiens
tttgacagttctgca

SEQ ID NO: 1470643 - DNA, 15 bp, Homo sapiens
ttgacagttctgcag

SEQ ID NO: 1470644 - DNA, 15 bp, Homo sapiens
tgacagttctgcagc

SEQ ID NO: 1470645 - DNA, 15 bp, Homo sapiens
gacagttctgcagct

SEQ ID NO: 1470646 - DNA, 15 bp, Homo sapiens
acagttctgcagctc

SEQ ID NO: 1470647 - DNA, 15 bp, Homo sapiens
cagttctgcagctca

SEQ ID NO: 1470648 - DNA, 15 bp, Homo sapiens
agttctgcagctcat

SEQ ID NO: 1470649 - DNA, 15 bp, Homo sapiens
gttctgcagctcatg

SEQ ID NO: 1470650 - DNA, 15 bp, Homo sapiens
ttctgcagctcatgc

SEQ ID NO: 1470651 - DNA, 15 bp, Homo sapiens
tctgcagctcatgca

SEQ ID NO: 1470652 - DNA, 15 bp, Homo sapiens
ctgcagctcatgcat

SEQ ID NO: 1470653 - DNA, 15 bp, Homo sapiens
tgcagctcatgcatt

SEQ ID NO: 1470654 - DNA, 15 bp, Homo sapiens
gcagctcatgcattt

SEQ ID NO: 1470655 - DNA, 15 bp, Homo sapiens
cagctcatgcatttt

SEQ ID NO: 1470656 - DNA, 15 bp, Homo sapiens
agctcatgcattttc

SEQ ID NO: 1470657 - DNA, 15 bp, Homo sapiens
gctcatgcattttca

SEQ ID NO: 1470658 - DNA, 15 bp, Homo sapiens
ctcatgcattttcag

SEQ ID NO: 1470659 - DNA, 15 bp, Homo sapiens
tcatgcattttcaga

SEQ ID NO: 1470660 - DNA, 15 bp, Homo sapiens
catgcattttcagaa

SEQ ID NO: 1470661 - DNA, 15 bp, Homo sapiens
atgcattttcagaaa

SEQ ID NO: 1470662 - DNA, 15 bp, Homo sapiens
tgcattttcagaaaa

SEQ ID NO: 1470663 - DNA, 15 bp, Homo sapiens
gcattttcagaaaaa

SEQ ID NO: 1470664 - DNA, 15 bp, Homo sapiens
cattttcagaaaaat

SEQ ID NO: 1470665 - DNA, 15 bp, Homo sapiens
attttcagaaaaatc

SEQ ID NO: 1470666 - DNA, 15 bp, Homo sapiens
ttttcagaaaaatcc

SEQ ID NO: 1470667 - DNA, 15 bp, Homo sapiens
tttcagaaaaatcct

SEQ ID NO: 1470668 - DNA, 15 bp, Homo sapiens
ttcagaaaaatcctt

SEQ ID NO: 1470669 - DNA, 15 bp, Homo sapiens
tcagaaaaatccttc

SEQ ID NO: 1470670 - DNA, 15 bp, Homo sapiens
cagaaaaatccttct

SEQ ID NO: 1470671 - DNA, 15 bp, Homo sapiens
agaaaaatccttctt

SEQ ID NO: 1470672 - DNA, 15 bp, Homo sapiens
gaaaaatccttcttc

SEQ ID NO: 1470673 - DNA, 15 bp, Homo sapiens
aaaaatccttcttca

SEQ ID NO: 1470674 - DNA, 15 bp, Homo sapiens
aaaatccttcttcag

SEQ ID NO: 1470675 - DNA, 15 bp, Homo sapiens
aaatccttcttcagt

SEQ ID NO: 1470676 - DNA, 15 bp, Homo sapiens
aatccttcttcagtt

SEQ ID NO: 1470677 - DNA, 15 bp, Homo sapiens
atccttcttcagttt

SEQ ID NO: 1470678 - DNA, 15 bp, Homo sapiens
tccttcttcagttta

SEQ ID NO: 1470679 - DNA, 15 bp, Homo sapiens
ccttcttcagtttaa

SEQ ID NO: 1470680 - DNA, 15 bp, Homo sapiens
cttcttcagtttaaa

SEQ ID NO: 1470681 - DNA, 15 bp, Homo sapiens
ttcttcagtttaaaa

SEQ ID NO: 1470682 - DNA, 15 bp, Homo sapiens
tcttcagtttaaaac

SEQ ID NO: 1470683 - DNA, 15 bp, Homo sapiens
cttcagtttaaaaca

SEQ ID NO: 1470684 - DNA, 15 bp, Homo sapiens
ttcagtttaaaacat

SEQ ID NO: 1470685 - DNA, 15 bp, Homo sapiens
tcagtttaaaacatt

SEQ ID NO: 1470686 - DNA, 15 bp, Homo sapiens
cagtttaaaacattc

SEQ ID NO: 1470687 - DNA, 15 bp, Homo sapiens
agtttaaaacattcc

SEQ ID NO: 1470688 - DNA, 15 bp, Homo sapiens
gtttaaaacattcca

SEQ ID NO: 1470689 - DNA, 15 bp, Homo sapiens
tttaaaacattccac

SEQ ID NO: 1470690 - DNA, 15 bp, Homo sapiens
ttaaaacattccacc

SEQ ID NO: 1470691 - DNA, 15 bp, Homo sapiens
taaaacattccacca

SEQ ID NO: 1470692 - DNA, 15 bp, Homo sapiens
aaaacattccaccat

SEQ ID NO: 1470693 - DNA, 15 bp, Homo sapiens
aaacattccaccatt

SEQ ID NO: 1470694 - DNA, 15 bp, Homo sapiens
aacattccaccattg

SEQ ID NO: 1470695 - DNA, 15 bp, Homo sapiens
acattccaccattgt

SEQ ID NO: 1470696 - DNA, 15 bp, Homo sapiens
cattccaccattgtt

SEQ ID NO: 1470697 - DNA, 15 bp, Homo sapiens
attccaccattgttt

SEQ ID NO: 1470698 - DNA, 15 bp, Homo sapiens
ttccaccattgtttt

SEQ ID NO: 1470699 - DNA, 15 bp, Homo sapiens
tccaccattgttttt

SEQ ID NO: 1470700 - DNA, 15 bp, Homo sapiens
ccaccattgtttttt

SEQ ID NO: 1470701 - DNA, 15 bp, Homo sapiens
caccattgttttttg

SEQ ID NO: 1470702 - DNA, 15 bp, Homo sapiens
accattgttttttgt

SEQ ID NO: 1470703 - DNA, 15 bp, Homo sapiens
ccattgttttttgtt

SEQ ID NO: 1470704 - DNA, 15 bp, Homo sapiens
cattgttttttgttg

SEQ ID NO: 1470705 - DNA, 15 bp, Homo sapiens
attgttttttgttgt

SEQ ID NO: 1470706 - DNA, 15 bp, Homo sapiens
ttgttttttgttgtt

SEQ ID NO: 1470707 - DNA, 15 bp, Homo sapiens
tgttttttgttgttg

SEQ ID NO: 1470708 - DNA, 15 bp, Homo sapiens
gttttttgttgttgt

SEQ ID NO: 1470709 - DNA, 15 bp, Homo sapiens
tttttgttgttgttt

SEQ ID NO: 1470710 - DNA, 15 bp, Homo sapiens
ttttgttgttgtttt

SEQ ID NO: 1470711 - DNA, 15 bp, Homo sapiens
tttgttgttgttttt

SEQ ID NO: 1470712 - DNA, 15 bp, Homo sapiens
ttgttgttgtttttt

SEQ ID NO: 1470713 - DNA, 15 bp, Homo sapiens
tgttgttgttttttc

SEQ ID NO: 1470714 - DNA, 15 bp, Homo sapiens
gttgttgttttttca

SEQ ID NO: 1470715 - DNA, 15 bp, Homo sapiens
ttgttgttttttcaa

SEQ ID NO: 1470716 - DNA, 15 bp, Homo sapiens
tgttgttttttcaaa

SEQ ID NO: 1470717 - DNA, 15 bp, Homo sapiens
gttgttttttcaaat

SEQ ID NO: 1470718 - DNA, 15 bp, Homo sapiens
ttgttttttcaaatt

SEQ ID NO: 1470719 - DNA, 15 bp, Homo sapiens
tgttttttcaaattg

SEQ ID NO: 1470720 - DNA, 15 bp, Homo sapiens
gttttttcaaattgc

SEQ ID NO: 1470721 - DNA, 15 bp, Homo sapiens
ttttttcaaattgca

SEQ ID NO: 1470722 - DNA, 15 bp, Homo sapiens
tttttcaaattgcat

SEQ ID NO: 1470723 - DNA, 15 bp, Homo sapiens
ttttcaaattgcatt

SEQ ID NO: 1470724 - DNA, 15 bp, Homo sapiens
tttcaaattgcattg

SEQ ID NO: 1470725 - DNA, 15 bp, Homo sapiens
ttcaaattgcattgg

SEQ ID NO: 1470726 - DNA, 15 bp, Homo sapiens
tcaaattgcattggg

SEQ ID NO: 1470727 - DNA, 15 bp, Homo sapiens
caaattgcattggga

SEQ ID NO: 1470728 - DNA, 15 bp, Homo sapiens
aaattgcattgggaa

SEQ ID NO: 1470729 - DNA, 15 bp, Homo sapiens
aattgcattgggaag

SEQ ID NO: 1470730 - DNA, 15 bp, Homo sapiens
attgcattgggaaga

SEQ ID NO: 1470731 - DNA, 15 bp, Homo sapiens
ttgcattgggaagaa

SEQ ID NO: 1470732 - DNA, 15 bp, Homo sapiens
tgcattgggaagaag

SEQ ID NO: 1470733 - DNA, 15 bp, Homo sapiens
gcattgggaagaagg

SEQ ID NO: 1470734 - DNA, 15 bp, Homo sapiens
cattgggaagaaggt

SEQ ID NO: 1470735 - DNA, 15 bp, Homo sapiens
attgggaagaaggta

SEQ ID NO: 1470736 - DNA, 15 bp, Homo sapiens
ttgggaagaaggtaa

SEQ ID NO: 1470737 - DNA, 15 bp, Homo sapiens
tgggaagaaggtaag

SEQ ID NO: 1470738 - DNA, 15 bp, Homo sapiens
gggaagaaggtaagg

SEQ ID NO: 1470739 - DNA, 15 bp, Homo sapiens
ggaagaaggtaagga

SEQ ID NO: 1470740 - DNA, 15 bp, Homo sapiens
gaagaaggtaaggag

SEQ ID NO: 1470741 - DNA, 15 bp, Homo sapiens
aagaaggtaaggagt

SEQ ID NO: 1470742 - DNA, 15 bp, Homo sapiens
agaaggtaaggagta

SEQ ID NO: 1470743 - DNA, 15 bp, Homo sapiens
gaaggtaaggagtat

SEQ ID NO: 1470744 - DNA, 15 bp, Homo sapiens
aaggtaaggagtatg

SEQ ID NO: 1470745 - DNA, 15 bp, Homo sapiens
aggtaaggagtatgt

SEQ ID NO: 1470746 - DNA, 15 bp, Homo sapiens
ggtaaggagtatgta

SEQ ID NO: 1470747 - DNA, 15 bp, Homo sapiens
gtaaggagtatgtat

SEQ ID NO: 1470748 - DNA, 15 bp, Homo sapiens
taaggagtatgtata

SEQ ID NO: 1470749 - DNA, 15 bp, Homo sapiens
aaggagtatgtatag

SEQ ID NO: 1470750 - DNA, 15 bp, Homo sapiens
aggagtatgtataga

SEQ ID NO: 1470751 - DNA, 15 bp, Homo sapiens
ggagtatgtatagaa

SEQ ID NO: 1470752 - DNA, 15 bp, Homo sapiens
gagtatgtatagaat

SEQ ID NO: 1470753 - DNA, 15 bp, Homo sapiens
agtatgtatagaata

SEQ ID NO: 1470754 - DNA, 15 bp, Homo sapiens
gtatgtatagaatac

SEQ ID NO: 1470755 - DNA, 15 bp, Homo sapiens
tatgtatagaataca

SEQ ID NO: 1470756 - DNA, 15 bp, Homo sapiens
atgtatagaatacaa

SEQ ID NO: 1470757 - DNA, 15 bp, Homo sapiens
tgtatagaatacaat

SEQ ID NO: 1470758 - DNA, 15 bp, Homo sapiens
gtatagaatacaatt

SEQ ID NO: 1470759 - DNA, 15 bp, Homo sapiens
tatagaatacaattc

SEQ ID NO: 1470760 - DNA, 15 bp, Homo sapiens
atagaatacaattct

SEQ ID NO: 1470761 - DNA, 15 bp, Homo sapiens
tagaatacaattctg

SEQ ID NO: 1470762 - DNA, 15 bp, Homo sapiens
agaatacaattctgt

SEQ ID NO: 1470763 - DNA, 15 bp, Homo sapiens
gaatacaattctgtg

SEQ ID NO: 1470764 - DNA, 15 bp, Homo sapiens
aatacaattctgtga

SEQ ID NO: 1470765 - DNA, 15 bp, Homo sapiens
atacaattctgtgaa

SEQ ID NO: 1470766 - DNA, 15 bp, Homo sapiens
tacaattctgtgaac

SEQ ID NO: 1470767 - DNA, 15 bp, Homo sapiens
acaattctgtgaaca

SEQ ID NO: 1470768 - DNA, 15 bp, Homo sapiens
caattctgtgaacaa

SEQ ID NO: 1470769 - DNA, 15 bp, Homo sapiens
aattctgtgaacaaa

SEQ ID NO: 1470770 - DNA, 15 bp, Homo sapiens
attctgtgaacaaag

SEQ ID NO: 1470771 - DNA, 15 bp, Homo sapiens
ttctgtgaacaaagt

SEQ ID NO: 1470772 - DNA, 15 bp, Homo sapiens
tctgtgaacaaagtg

SEQ ID NO: 1470773 - DNA, 15 bp, Homo sapiens
ctgtgaacaaagtga

SEQ ID NO: 1470774 - DNA, 15 bp, Homo sapiens
tgtgaacaaagtgag

SEQ ID NO: 1470775 - DNA, 15 bp, Homo sapiens
gtgaacaaagtgagt

SEQ ID NO: 1470776 - DNA, 15 bp, Homo sapiens
tgaacaaagtgagtg

SEQ ID NO: 1470777 - DNA, 15 bp, Homo sapiens
gaacaaagtgagtga

SEQ ID NO: 1470778 - DNA, 15 bp, Homo sapiens
aacaaagtgagtgag

SEQ ID NO: 1470779 - DNA, 15 bp, Homo sapiens
acaaagtgagtgagt

SEQ ID NO: 1470780 - DNA, 15 bp, Homo sapiens
caaagtgagtgagtt

SEQ ID NO: 1470781 - DNA, 15 bp, Homo sapiens
aaagtgagtgagtta

SEQ ID NO: 1470782 - DNA, 15 bp, Homo sapiens
aagtgagtgagttac

SEQ ID NO: 1470783 - DNA, 15 bp, Homo sapiens
agtgagtgagttact

SEQ ID NO: 1470784 - DNA, 15 bp, Homo sapiens
gtgagtgagttactt

SEQ ID NO: 1470785 - DNA, 15 bp, Homo sapiens
tgagtgagttacttg

SEQ ID NO: 1470786 - DNA, 15 bp, Homo sapiens
gagtgagttacttgc

SEQ ID NO: 1470787 - DNA, 15 bp, Homo sapiens
agtgagttacttgct

SEQ ID NO: 1470788 - DNA, 15 bp, Homo sapiens
gtgagttacttgctc

SEQ ID NO: 1470789 - DNA, 15 bp, Homo sapiens
tgagttacttgctcc

SEQ ID NO: 1470790 - DNA, 15 bp, Homo sapiens
gagttacttgctcct

SEQ ID NO: 1470791 - DNA, 15 bp, Homo sapiens
agttacttgctcctt

SEQ ID NO: 1470792 - DNA, 15 bp, Homo sapiens
gttacttgctccttg

SEQ ID NO: 1470793 - DNA, 15 bp, Homo sapiens
ttacttgctccttga

SEQ ID NO: 1470794 - DNA, 15 bp, Homo sapiens
tacttgctccttgag

SEQ ID NO: 1470795 - DNA, 15 bp, Homo sapiens
acttgctccttgagg

SEQ ID NO: 1470796 - DNA, 15 bp, Homo sapiens
cttgctccttgaggg

SEQ ID NO: 1470797 - DNA, 15 bp, Homo sapiens
ttgctccttgagggc

SEQ ID NO: 1470798 - DNA, 15 bp, Homo sapiens
tgctccttgagggca

SEQ ID NO: 1470799 - DNA, 15 bp, Homo sapiens
gctccttgagggcag

SEQ ID NO: 1470800 - DNA, 15 bp, Homo sapiens
ctccttgagggcaga

SEQ ID NO: 1470801 - DNA, 15 bp, Homo sapiens
tccttgagggcagaa

SEQ ID NO: 1470802 - DNA, 15 bp, Homo sapiens
ccttgagggcagaaa

SEQ ID NO: 1470803 - DNA, 15 bp, Homo sapiens
cttgagggcagaaac

SEQ ID NO: 1470804 - DNA, 15 bp, Homo sapiens
ttgagggcagaaact

SEQ ID NO: 1470805 - DNA, 15 bp, Homo sapiens
tgagggcagaaactc

SEQ ID NO: 1470806 - DNA, 15 bp, Homo sapiens
gagggcagaaactct

SEQ ID NO: 1470807 - DNA, 15 bp, Homo sapiens
agggcagaaactctg

SEQ ID NO: 1470808 - DNA, 15 bp, Homo sapiens
gggcagaaactctgg

SEQ ID NO: 1470809 - DNA, 15 bp, Homo sapiens
ggcagaaactctggc

SEQ ID NO: 1470810 - DNA, 15 bp, Homo sapiens
gcagaaactctggcc

SEQ ID NO: 1470811 - DNA, 15 bp, Homo sapiens
cagaaactctggcca

SEQ ID NO: 1470812 - DNA, 15 bp, Homo sapiens
agaaactctggccat

SEQ ID NO: 1470813 - DNA, 15 bp, Homo sapiens
gaaactctggccatt

SEQ ID NO: 1470814 - DNA, 15 bp, Homo sapiens
aaactctggccattt

SEQ ID NO: 1470815 - DNA, 15 bp, Homo sapiens
aactctggccatttg

SEQ ID NO: 1470816 - DNA, 15 bp, Homo sapiens
actctggccatttgt

SEQ ID NO: 1470817 - DNA, 15 bp, Homo sapiens
ctctggccatttgtc

SEQ ID NO: 1470818 - DNA, 15 bp, Homo sapiens
tctggccatttgtcc

SEQ ID NO: 1470819 - DNA, 15 bp, Homo sapiens
ctggccatttgtcct

SEQ ID NO: 1470820 - DNA, 15 bp, Homo sapiens
tggccatttgtcctc

SEQ ID NO: 1470821 - DNA, 15 bp, Homo sapiens
ggccatttgtcctca

SEQ ID NO: 1470822 - DNA, 15 bp, Homo sapiens
gccatttgtcctcaa

SEQ ID NO: 1470823 - DNA, 15 bp, Homo sapiens
ccatttgtcctcaag

SEQ ID NO: 1470824 - DNA, 15 bp, Homo sapiens
catttgtcctcaagt

SEQ ID NO: 1470825 - DNA, 15 bp, Homo sapiens
atttgtcctcaagtc

SEQ ID NO: 1470826 - DNA, 15 bp, Homo sapiens
tttgtcctcaagtcc

SEQ ID NO: 1470827 - DNA, 15 bp, Homo sapiens
ttgtcctcaagtcct

SEQ ID NO: 1470828 - DNA, 15 bp, Homo sapiens
tgtcctcaagtcctc

SEQ ID NO: 1470829 - DNA, 15 bp, Homo sapiens
gtcctcaagtcctca

SEQ ID NO: 1470830 - DNA, 15 bp, Homo sapiens
tcctcaagtcctcag

SEQ ID NO: 1470831 - DNA, 15 bp, Homo sapiens
cctcaagtcctcagt

SEQ ID NO: 1470832 - DNA, 15 bp, Homo sapiens
ctcaagtcctcagtg

SEQ ID NO: 1470833 - DNA, 15 bp, Homo sapiens
tcaagtcctcagtgc

SEQ ID NO: 1470834 - DNA, 15 bp, Homo sapiens
caagtcctcagtgcc

SEQ ID NO: 1470835 - DNA, 15 bp, Homo sapiens
aagtcctcagtgcct

SEQ ID NO: 1470836 - DNA, 15 bp, Homo sapiens
agtcctcagtgcctg

SEQ ID NO: 1470837 - DNA, 15 bp, Homo sapiens
gtcctcagtgcctga

SEQ ID NO: 1470838 - DNA, 15 bp, Homo sapiens
tcctcagtgcctgac

SEQ ID NO: 1470839 - DNA, 15 bp, Homo sapiens
cctcagtgcctgaca

SEQ ID NO: 1470840 - DNA, 15 bp, Homo sapiens
ctcagtgcctgacac

SEQ ID NO: 1470841 - DNA, 15 bp, Homo sapiens
tcagtgcctgacaca

SEQ ID NO: 1470842 - DNA, 15 bp, Homo sapiens
cagtgcctgacacat

SEQ ID NO: 1470843 - DNA, 15 bp, Homo sapiens
agtgcctgacacata

SEQ ID NO: 1470844 - DNA, 15 bp, Homo sapiens
gtgcctgacacatat

SEQ ID NO: 1470845 - DNA, 15 bp, Homo sapiens
tgcctgacacatatc

SEQ ID NO: 1470846 - DNA, 15 bp, Homo sapiens
gcctgacacatatcc

SEQ ID NO: 1470847 - DNA, 15 bp, Homo sapiens
cctgacacatatcca

SEQ ID NO: 1470848 - DNA, 15 bp, Homo sapiens
ctgacacatatccat

SEQ ID NO: 1470849 - DNA, 15 bp, Homo sapiens
tgacacatatccatg

SEQ ID NO: 1470850 - DNA, 15 bp, Homo sapiens
gacacatatccatgt

SEQ ID NO: 1470851 - DNA, 15 bp, Homo sapiens
acacatatccatgta

SEQ ID NO: 1470852 - DNA, 15 bp, Homo sapiens
cacatatccatgtat

SEQ ID NO: 1470853 - DNA, 15 bp, Homo sapiens
acatatccatgtatt

SEQ ID NO: 1470854 - DNA, 15 bp, Homo sapiens
catatccatgtatta

SEQ ID NO: 1470855 - DNA, 15 bp, Homo sapiens
atatccatgtattaa

SEQ ID NO: 1470856 - DNA, 15 bp, Homo sapiens
tatccatgtattaat

SEQ ID NO: 1470857 - DNA, 15 bp, Homo sapiens
atccatgtattaatt

SEQ ID NO: 1470858 - DNA, 15 bp, Homo sapiens
tccatgtattaattg

SEQ ID NO: 1470859 - DNA, 15 bp, Homo sapiens
ccatgtattaattga

SEQ ID NO: 1470860 - DNA, 15 bp, Homo sapiens
catgtattaattgag

SEQ ID NO: 1470861 - DNA, 15 bp, Homo sapiens
atgtattaattgagc

SEQ ID NO: 1470862 - DNA, 15 bp, Homo sapiens
tgtattaattgagct

SEQ ID NO: 1470863 - DNA, 15 bp, Homo sapiens
gtattaattgagctg

SEQ ID NO: 1470864 - DNA, 15 bp, Homo sapiens
tattaattgagctgc

SEQ ID NO: 1470865 - DNA, 15 bp, Homo sapiens
attaattgagctgct

SEQ ID NO: 1470866 - DNA, 15 bp, Homo sapiens
ttaattgagctgctt

SEQ ID NO: 1470867 - DNA, 15 bp, Homo sapiens
taattgagctgcttc

SEQ ID NO: 1470868 - DNA, 15 bp, Homo sapiens
aattgagctgcttct

SEQ ID NO: 1470869 - DNA, 15 bp, Homo sapiens
attgagctgcttcta

SEQ ID NO: 1470870 - DNA, 15 bp, Homo sapiens
ttgagctgcttctat

SEQ ID NO: 1470871 - DNA, 15 bp, Homo sapiens
tgagctgcttctatg

SEQ ID NO: 1470872 - DNA, 15 bp, Homo sapiens
gagctgcttctatgt

SEQ ID NO: 1470873 - DNA, 15 bp, Homo sapiens
agctgcttctatgtg

SEQ ID NO: 1470874 - DNA, 15 bp, Homo sapiens
gctgcttctatgtgc

SEQ ID NO: 1470875 - DNA, 15 bp, Homo sapiens
ctgcttctatgtgcc

SEQ ID NO: 1470876 - DNA, 15 bp, Homo sapiens
tgcttctatgtgcca

SEQ ID NO: 1470877 - DNA, 15 bp, Homo sapiens
gcttctatgtgccag

SEQ ID NO: 1470878 - DNA, 15 bp, Homo sapiens
cttctatgtgccagg

SEQ ID NO: 1470879 - DNA, 15 bp, Homo sapiens
ttctatgtgccaggt

SEQ ID NO: 1470880 - DNA, 15 bp, Homo sapiens
tctatgtgccaggtg

SEQ ID NO: 1470881 - DNA, 15 bp, Homo sapiens
ctatgtgccaggtgc

SEQ ID NO: 1470882 - DNA, 15 bp, Homo sapiens
tatgtgccaggtgct

SEQ ID NO: 1470883 - DNA, 15 bp, Homo sapiens
atgtgccaggtgctg

SEQ ID NO: 1470884 - DNA, 15 bp, Homo sapiens
tgtgccaggtgctgg

SEQ ID NO: 1470885 - DNA, 15 bp, Homo sapiens
gtgccaggtgctgga

SEQ ID NO: 1470886 - DNA, 15 bp, Homo sapiens
tgccaggtgctggag

SEQ ID NO: 1470887 - DNA, 15 bp, Homo sapiens
gccaggtgctggagt

SEQ ID NO: 1470888 - DNA, 15 bp, Homo sapiens
ccaggtgctggagta

SEQ ID NO: 1470889 - DNA, 15 bp, Homo sapiens
caggtgctggagtac

SEQ ID NO: 1470890 - DNA, 15 bp, Homo sapiens
aggtgctggagtaca

SEQ ID NO: 1470891 - DNA, 15 bp, Homo sapiens
ggtgctggagtacag

SEQ ID NO: 1470892 - DNA, 15 bp, Homo sapiens
gtgctggagtacagc

SEQ ID NO: 1470893 - DNA, 15 bp, Homo sapiens
tgctggagtacagca

SEQ ID NO: 1470894 - DNA, 15 bp, Homo sapiens
gctggagtacagcag

SEQ ID NO: 1470895 - DNA, 15 bp, Homo sapiens
ctggagtacagcagt

SEQ ID NO: 1470896 - DNA, 15 bp, Homo sapiens
tggagtacagcagta

SEQ ID NO: 1470897 - DNA, 15 bp, Homo sapiens
ggagtacagcagtaa

SEQ ID NO: 1470898 - DNA, 15 bp, Homo sapiens
gagtacagcagtaaa

SEQ ID NO: 1470899 - DNA, 15 bp, Homo sapiens
agtacagcagtaaag

SEQ ID NO: 1470900 - DNA, 15 bp, Homo sapiens
gtacagcagtaaagc

SEQ ID NO: 1470901 - DNA, 15 bp, Homo sapiens
tacagcagtaaagca

SEQ ID NO: 1470902 - DNA, 15 bp, Homo sapiens
acagcagtaaagcag

SEQ ID NO: 1470903 - DNA, 15 bp, Homo sapiens
cagcagtaaagcaga

SEQ ID NO: 1470904 - DNA, 15 bp, Homo sapiens
agcagtaaagcagac

SEQ ID NO: 1470905 - DNA, 15 bp, Homo sapiens
gcagtaaagcagaca

SEQ ID NO: 1470906 - DNA, 15 bp, Homo sapiens
cagtaaagcagacag

SEQ ID NO: 1470907 - DNA, 15 bp, Homo sapiens
agtaaagcagacagg

SEQ ID NO: 1470908 - DNA, 15 bp, Homo sapiens
gtaaagcagacaggt

SEQ ID NO: 1470909 - DNA, 15 bp, Homo sapiens
taaagcagacaggta

SEQ ID NO: 1470910 - DNA, 15 bp, Homo sapiens
aaagcagacaggtat

SEQ ID NO: 1470911 - DNA, 15 bp, Homo sapiens
aagcagacaggtata

SEQ ID NO: 1470912 - DNA, 15 bp, Homo sapiens
agcagacaggtatag

SEQ ID NO: 1470913 - DNA, 15 bp, Homo sapiens
gcagacaggtatagt

SEQ ID NO: 1470914 - DNA, 15 bp, Homo sapiens
cagacaggtatagtt

SEQ ID NO: 1470915 - DNA, 15 bp, Homo sapiens
agacaggtatagttc

SEQ ID NO: 1470916 - DNA, 15 bp, Homo sapiens
gacaggtatagttcc

SEQ ID NO: 1470917 - DNA, 15 bp, Homo sapiens
acaggtatagttcct

SEQ ID NO: 1470918 - DNA, 15 bp, Homo sapiens
caggtatagttcctc

SEQ ID NO: 1470919 - DNA, 15 bp, Homo sapiens
aggtatagttcctcc

SEQ ID NO: 1470920 - DNA, 15 bp, Homo sapiens
ggtatagttcctcct

SEQ ID NO: 1470921 - DNA, 15 bp, Homo sapiens
gtatagttcctcctt

SEQ ID NO: 1470922 - DNA, 15 bp, Homo sapiens
tatagttcctccttg

SEQ ID NO: 1470923 - DNA, 15 bp, Homo sapiens
atagttcctccttgg

SEQ ID NO: 1470924 - DNA, 15 bp, Homo sapiens
tagttcctccttgga

SEQ ID NO: 1470925 - DNA, 15 bp, Homo sapiens
agttcctccttggac

SEQ ID NO: 1470926 - DNA, 15 bp, Homo sapiens
gttcctccttggaca

SEQ ID NO: 1470927 - DNA, 15 bp, Homo sapiens
ttcctccttggacag

SEQ ID NO: 1470928 - DNA, 15 bp, Homo sapiens
tcctccttggacaga

SEQ ID NO: 1470929 - DNA, 15 bp, Homo sapiens
cctccttggacagag

SEQ ID NO: 1470930 - DNA, 15 bp, Homo sapiens
ctccttggacagagg

SEQ ID NO: 1470931 - DNA, 15 bp, Homo sapiens
tccttggacagaggt

SEQ ID NO: 1470932 - DNA, 15 bp, Homo sapiens
ccttggacagaggta

SEQ ID NO: 1470933 - DNA, 15 bp, Homo sapiens
cttggacagaggtaa

SEQ ID NO: 1470934 - DNA, 15 bp, Homo sapiens
ttggacagaggtaat

SEQ ID NO: 1470935 - DNA, 15 bp, Homo sapiens
tggacagaggtaata

SEQ ID NO: 1470936 - DNA, 15 bp, Homo sapiens
ggacagaggtaatag

SEQ ID NO: 1470937 - DNA, 15 bp, Homo sapiens
gacagaggtaatagt

SEQ ID NO: 1470938 - DNA, 15 bp, Homo sapiens
acagaggtaatagtc

SEQ ID NO: 1470939 - DNA, 15 bp, Homo sapiens
cagaggtaatagtca

SEQ ID NO: 1470940 - DNA, 15 bp, Homo sapiens
agaggtaatagtcaa

SEQ ID NO: 1470941 - DNA, 15 bp, Homo sapiens
gaggtaatagtcaag

SEQ ID NO: 1470942 - DNA, 15 bp, Homo sapiens
aggtaatagtcaagg

SEQ ID NO: 1470943 - DNA, 15 bp, Homo sapiens
ggtaatagtcaaggc

SEQ ID NO: 1470944 - DNA, 15 bp, Homo sapiens
gtaatagtcaaggca

SEQ ID NO: 1470945 - DNA, 15 bp, Homo sapiens
taatagtcaaggcaa

SEQ ID NO: 1470946 - DNA, 15 bp, Homo sapiens
aatagtcaaggcaaa

SEQ ID NO: 1470947 - DNA, 15 bp, Homo sapiens
atagtcaaggcaaaa

SEQ ID NO: 1470948 - DNA, 15 bp, Homo sapiens
tagtcaaggcaaaaa

SEQ ID NO: 1470949 - DNA, 15 bp, Homo sapiens
agtcaaggcaaaaaa

SEQ ID NO: 1470950 - DNA, 15 bp, Homo sapiens
gtcaaggcaaaaaaa

SEQ ID NO: 1470951 - DNA, 15 bp, Homo sapiens
tcaaggcaaaaaaaa

SEQ ID NO: 1470952 - DNA, 15 bp, Homo sapiens
caaggcaaaaaaaaa

SEQ ID NO: 1470953 - DNA, 15 bp, Homo sapiens
aaggcaaaaaaaaaa

SEQ ID NO: 1470954 - DNA, 15 bp, Homo sapiens
aggcaaaaaaaaaaa

SEQ ID NO: 1470955 - DNA, 15 bp, Homo sapiens
ggcaaaaaaaaaaaa

SEQ ID NO: 1470956 - DNA, 15 bp, Homo sapiens
gcaaaaaaaaaaaac

SEQ ID NO: 1470957 - DNA, 15 bp, Homo sapiens
caaaaaaaaaaaaca

SEQ ID NO: 1470958 - DNA, 15 bp, Homo sapiens
aaaaaaaaaaaacag

SEQ ID NO: 1470959 - DNA, 15 bp, Homo sapiens
aaaaaaaaaacagtt

SEQ ID NO: 1470960 - DNA, 15 bp, Homo sapiens
aaaaaaaaacagtta

SEQ ID NO: 1470961 - DNA, 15 bp, Homo sapiens
aaaaaaaacagttat

SEQ ID NO: 1470962 - DNA, 15 bp, Homo sapiens
aaaaaaacagttatt

SEQ ID NO: 1470963 - DNA, 15 bp, Homo sapiens
aaaaaacagttattg

SEQ ID NO: 1470964 - DNA, 15 bp, Homo sapiens
aaaaacagttattga

SEQ ID NO: 1470965 - DNA, 15 bp, Homo sapiens
aaaacagttattgag

SEQ ID NO: 1470966 - DNA, 15 bp, Homo sapiens
aaacagttattgagc

SEQ ID NO: 1470967 - DNA, 15 bp, Homo sapiens
aacagttattgagct

SEQ ID NO: 1470968 - DNA, 15 bp, Homo sapiens
acagttattgagctt

SEQ ID NO: 1470969 - DNA, 15 bp, Homo sapiens
cagttattgagcttg

SEQ ID NO: 1470970 - DNA, 15 bp, Homo sapiens
agttattgagcttgt

SEQ ID NO: 1470971 - DNA, 15 bp, Homo sapiens
gttattgagcttgtt

SEQ ID NO: 1470972 - DNA, 15 bp, Homo sapiens
ttattgagcttgttg

SEQ ID NO: 1470973 - DNA, 15 bp, Homo sapiens
tattgagcttgttgt

SEQ ID NO: 1470974 - DNA, 15 bp, Homo sapiens
attgagcttgttgtt

SEQ ID NO: 1470975 - DNA, 15 bp, Homo sapiens
ttgagcttgttgtta

SEQ ID NO: 1470976 - DNA, 15 bp, Homo sapiens
tgagcttgttgttat

SEQ ID NO: 1470977 - DNA, 15 bp, Homo sapiens
gagcttgttgttata

SEQ ID NO: 1470978 - DNA, 15 bp, Homo sapiens
agcttgttgttataa

SEQ ID NO: 1470979 - DNA, 15 bp, Homo sapiens
gcttgttgttataag

SEQ ID NO: 1470980 - DNA, 15 bp, Homo sapiens
cttgttgttataagt

SEQ ID NO: 1470981 - DNA, 15 bp, Homo sapiens
ttgttgttataagtg

SEQ ID NO: 1470982 - DNA, 15 bp, Homo sapiens
tgttgttataagtgc

SEQ ID NO: 1470983 - DNA, 15 bp, Homo sapiens
gttgttataagtgca

SEQ ID NO: 1470984 - DNA, 15 bp, Homo sapiens
ttgttataagtgcaa

SEQ ID NO: 1470985 - DNA, 15 bp, Homo sapiens
tgttataagtgcaaa

SEQ ID NO: 1470986 - DNA, 15 bp, Homo sapiens
gttataagtgcaaag

SEQ ID NO: 1470987 - DNA, 15 bp, Homo sapiens
ttataagtgcaaagg

SEQ ID NO: 1470988 - DNA, 15 bp, Homo sapiens
tataagtgcaaaggg

SEQ ID NO: 1470989 - DNA, 15 bp, Homo sapiens
ataagtgcaaagggt

SEQ ID NO: 1470990 - DNA, 15 bp, Homo sapiens
taagtgcaaagggtt

SEQ ID NO: 1470991 - DNA, 15 bp, Homo sapiens
aagtgcaaagggttc

SEQ ID NO: 1470992 - DNA, 15 bp, Homo sapiens
agtgcaaagggttct

SEQ ID NO: 1470993 - DNA, 15 bp, Homo sapiens
gtgcaaagggttcta

SEQ ID NO: 1470994 - DNA, 15 bp, Homo sapiens
tgcaaagggttctat

SEQ ID NO: 1470995 - DNA, 15 bp, Homo sapiens
gcaaagggttctatg

SEQ ID NO: 1470996 - DNA, 15 bp, Homo sapiens
caaagggttctatga

SEQ ID NO: 1470997 - DNA, 15 bp, Homo sapiens
aaagggttctatgaa

SEQ ID NO: 1470998 - DNA, 15 bp, Homo sapiens
aagggttctatgaaa

SEQ ID NO: 1470999 - DNA, 15 bp, Homo sapiens
agggttctatgaaag

SEQ ID NO: 1471000 - DNA, 15 bp, Homo sapiens
gggttctatgaaagg

SEQ ID NO: 1471001 - DNA, 15 bp, Homo sapiens
ggttctatgaaaggg

SEQ ID NO: 1471002 - DNA, 15 bp, Homo sapiens
gttctatgaaagggg

SEQ ID NO: 1471003 - DNA, 15 bp, Homo sapiens
ttctatgaaagggga

SEQ ID NO: 1471004 - DNA, 15 bp, Homo sapiens
tctatgaaaggggaa

SEQ ID NO: 1471005 - DNA, 15 bp, Homo sapiens
ctatgaaaggggaag

SEQ ID NO: 1471006 - DNA, 15 bp, Homo sapiens
tatgaaaggggaagt

SEQ ID NO: 1471007 - DNA, 15 bp, Homo sapiens
atgaaaggggaagta

SEQ ID NO: 1471008 - DNA, 15 bp, Homo sapiens
tgaaaggggaagtat

SEQ ID NO: 1471009 - DNA, 15 bp, Homo sapiens
gaaaggggaagtatg

SEQ ID NO: 1471010 - DNA, 15 bp, Homo sapiens
aaaggggaagtatgg

SEQ ID NO: 1471011 - DNA, 15 bp, Homo sapiens
aaggggaagtatggg

SEQ ID NO: 1471012 - DNA, 15 bp, Homo sapiens
aggggaagtatgggg

SEQ ID NO: 1471013 - DNA, 15 bp, Homo sapiens
ggggaagtatggggt

SEQ ID NO: 1471014 - DNA, 15 bp, Homo sapiens
gggaagtatggggtg

SEQ ID NO: 1471015 - DNA, 15 bp, Homo sapiens
ggaagtatggggtgc

SEQ ID NO: 1471016 - DNA, 15 bp, Homo sapiens
gaagtatggggtgcc

SEQ ID NO: 1471017 - DNA, 15 bp, Homo sapiens
aagtatggggtgcct

SEQ ID NO: 1471018 - DNA, 15 bp, Homo sapiens
agtatggggtgcctc

SEQ ID NO: 1471019 - DNA, 15 bp, Homo sapiens
gtatggggtgcctcg

SEQ ID NO: 1471020 - DNA, 15 bp, Homo sapiens
tatggggtgcctcgg

SEQ ID NO: 1471021 - DNA, 15 bp, Homo sapiens
atggggtgcctcggg

SEQ ID NO: 1471022 - DNA, 15 bp, Homo sapiens
tggggtgcctcggga

SEQ ID NO: 1471023 - DNA, 15 bp, Homo sapiens
ggggtgcctcgggag

SEQ ID NO: 1471024 - DNA, 15 bp, Homo sapiens
gggtgcctcgggagg

SEQ ID NO: 1471025 - DNA, 15 bp, Homo sapiens
ggtgcctcgggaggg

SEQ ID NO: 1471026 - DNA, 15 bp, Homo sapiens
gtgcctcgggagggc

SEQ ID NO: 1471027 - DNA, 15 bp, Homo sapiens
tgcctcgggagggca

SEQ ID NO: 1471028 - DNA, 15 bp, Homo sapiens
gcctcgggagggcac

SEQ ID NO: 1471029 - DNA, 15 bp, Homo sapiens
cctcgggagggcaca

SEQ ID NO: 1471030 - DNA, 15 bp, Homo sapiens
ctcgggagggcacaa

SEQ ID NO: 1471031 - DNA, 15 bp, Homo sapiens
tcgggagggcacaac

SEQ ID NO: 1471032 - DNA, 15 bp, Homo sapiens
cgggagggcacaacg

SEQ ID NO: 1471033 - DNA, 15 bp, Homo sapiens
gggagggcacaacgt

SEQ ID NO: 1471034 - DNA, 15 bp, Homo sapiens
ggagggcacaacgtg

SEQ ID NO: 1471035 - DNA, 15 bp, Homo sapiens
gagggcacaacgtgg

SEQ ID NO: 1471036 - DNA, 15 bp, Homo sapiens
agggcacaacgtggg

SEQ ID NO: 1471037 - DNA, 15 bp, Homo sapiens
gggcacaacgtgggg

SEQ ID NO: 1471038 - DNA, 15 bp, Homo sapiens
ggcacaacgtgggga

SEQ ID NO: 1471039 - DNA, 15 bp, Homo sapiens
gcacaacgtggggac

SEQ ID NO: 1471040 - DNA, 15 bp, Homo sapiens
cacaacgtggggacc

SEQ ID NO: 1471041 - DNA, 15 bp, Homo sapiens
acaacgtggggacct

SEQ ID NO: 1471042 - DNA, 15 bp, Homo sapiens
caacgtggggaccta

SEQ ID NO: 1471043 - DNA, 15 bp, Homo sapiens
aacgtggggacctaa

SEQ ID NO: 1471044 - DNA, 15 bp, Homo sapiens
acgtggggacctaac

SEQ ID NO: 1471045 - DNA, 15 bp, Homo sapiens
cgtggggacctaacc

SEQ ID NO: 1471046 - DNA, 15 bp, Homo sapiens
gtggggacctaacct

SEQ ID NO: 1471047 - DNA, 15 bp, Homo sapiens
tggggacctaaccta

SEQ ID NO: 1471048 - DNA, 15 bp, Homo sapiens
ggggacctaacctag

SEQ ID NO: 1471049 - DNA, 15 bp, Homo sapiens
gggacctaacctagt

SEQ ID NO: 1471050 - DNA, 15 bp, Homo sapiens
ggacctaacctagtc

SEQ ID NO: 1471051 - DNA, 15 bp, Homo sapiens
gacctaacctagtct

SEQ ID NO: 1471052 - DNA, 15 bp, Homo sapiens
acctaacctagtctc

SEQ ID NO: 1471053 - DNA, 15 bp, Homo sapiens
cctaacctagtctca

SEQ ID NO: 1471054 - DNA, 15 bp, Homo sapiens
ctaacctagtctcag

SEQ ID NO: 1471055 - DNA, 15 bp, Homo sapiens
taacctagtctcaga

SEQ ID NO: 1471056 - DNA, 15 bp, Homo sapiens
aacctagtctcagag

SEQ ID NO: 1471057 - DNA, 15 bp, Homo sapiens
acctagtctcagagg

SEQ ID NO: 1471058 - DNA, 15 bp, Homo sapiens
cctagtctcagaggt

SEQ ID NO: 1471059 - DNA, 15 bp, Homo sapiens
ctagtctcagaggtc

SEQ ID NO: 1471060 - DNA, 15 bp, Homo sapiens
tagtctcagaggtca

SEQ ID NO: 1471061 - DNA, 15 bp, Homo sapiens
agtctcagaggtcaa

SEQ ID NO: 1471062 - DNA, 15 bp, Homo sapiens
gtctcagaggtcaaa

SEQ ID NO: 1471063 - DNA, 15 bp, Homo sapiens
tctcagaggtcaaag

SEQ ID NO: 1471064 - DNA, 15 bp, Homo sapiens
ctcagaggtcaaagg

SEQ ID NO: 1471065 - DNA, 15 bp, Homo sapiens
tcagaggtcaaaggc

SEQ ID NO: 1471066 - DNA, 15 bp, Homo sapiens
cagaggtcaaaggct

SEQ ID NO: 1471067 - DNA, 15 bp, Homo sapiens
agaggtcaaaggctt

SEQ ID NO: 1471068 - DNA, 15 bp, Homo sapiens
gaggtcaaaggcttc

SEQ ID NO: 1471069 - DNA, 15 bp, Homo sapiens
aggtcaaaggcttcc

SEQ ID NO: 1471070 - DNA, 15 bp, Homo sapiens
ggtcaaaggcttcct

SEQ ID NO: 1471071 - DNA, 15 bp, Homo sapiens
gtcaaaggcttcctt

SEQ ID NO: 1471072 - DNA, 15 bp, Homo sapiens
tcaaaggcttcctta

SEQ ID NO: 1471073 - DNA, 15 bp, Homo sapiens
caaaggcttccttaa

SEQ ID NO: 1471074 - DNA, 15 bp, Homo sapiens
aaaggcttccttaag

SEQ ID NO: 1471075 - DNA, 15 bp, Homo sapiens
aaggcttccttaagg

SEQ ID NO: 1471076 - DNA, 15 bp, Homo sapiens
aggcttccttaagga

SEQ ID NO: 1471077 - DNA, 15 bp, Homo sapiens
ggcttccttaaggaa

SEQ ID NO: 1471078 - DNA, 15 bp, Homo sapiens
gcttccttaaggaag

SEQ ID NO: 1471079 - DNA, 15 bp, Homo sapiens
cttccttaaggaagt

SEQ ID NO: 1471080 - DNA, 15 bp, Homo sapiens
ttccttaaggaagtg

SEQ ID NO: 1471081 - DNA, 15 bp, Homo sapiens
tccttaaggaagtga

SEQ ID NO: 1471082 - DNA, 15 bp, Homo sapiens
ccttaaggaagtgac

SEQ ID NO: 1471083 - DNA, 15 bp, Homo sapiens
cttaaggaagtgaca

SEQ ID NO: 1471084 - DNA, 15 bp, Homo sapiens
ttaaggaagtgacat

SEQ ID NO: 1471085 - DNA, 15 bp, Homo sapiens
taaggaagtgacatt

SEQ ID NO: 1471086 - DNA, 15 bp, Homo sapiens
aaggaagtgacattt

SEQ ID NO: 1471087 - DNA, 15 bp, Homo sapiens
aggaagtgacattta

SEQ ID NO: 1471088 - DNA, 15 bp, Homo sapiens
ggaagtgacatttag

SEQ ID NO: 1471089 - DNA, 15 bp, Homo sapiens
gaagtgacatttagg

SEQ ID NO: 1471090 - DNA, 15 bp, Homo sapiens
aagtgacatttaggc

SEQ ID NO: 1471091 - DNA, 15 bp, Homo sapiens
agtgacatttaggcc

SEQ ID NO: 1471092 - DNA, 15 bp, Homo sapiens
gtgacatttaggccg

SEQ ID NO: 1471093 - DNA, 15 bp, Homo sapiens
tgacatttaggccga

SEQ ID NO: 1471094 - DNA, 15 bp, Homo sapiens
gacatttaggccgaa

SEQ ID NO: 1471095 - DNA, 15 bp, Homo sapiens
acatttaggccgaac

SEQ ID NO: 1471096 - DNA, 15 bp, Homo sapiens
catttaggccgaacc

SEQ ID NO: 1471097 - DNA, 15 bp, Homo sapiens
atttaggccgaaccc

SEQ ID NO: 1471098 - DNA, 15 bp, Homo sapiens
tttaggccgaaccct

SEQ ID NO: 1471099 - DNA, 15 bp, Homo sapiens
ttaggccgaaccctg

SEQ ID NO: 1471100 - DNA, 15 bp, Homo sapiens
taggccgaaccctga

SEQ ID NO: 1471101 - DNA, 15 bp, Homo sapiens
aggccgaaccctgaa

SEQ ID NO: 1471102 - DNA, 15 bp, Homo sapiens
ggccgaaccctgaaa

SEQ ID NO: 1471103 - DNA, 15 bp, Homo sapiens
gccgaaccctgaaag

SEQ ID NO: 1471104 - DNA, 15 bp, Homo sapiens
ccgaaccctgaaaga

SEQ ID NO: 1471105 - DNA, 15 bp, Homo sapiens
cgaaccctgaaagat

SEQ ID NO: 1471106 - DNA, 15 bp, Homo sapiens
gaaccctgaaagata

SEQ ID NO: 1471107 - DNA, 15 bp, Homo sapiens
aaccctgaaagataa

SEQ ID NO: 1471108 - DNA, 15 bp, Homo sapiens
accctgaaagataag

SEQ ID NO: 1471109 - DNA, 15 bp, Homo sapiens
ccctgaaagataagc

SEQ ID NO: 1471110 - DNA, 15 bp, Homo sapiens
cctgaaagataagcc

SEQ ID NO: 1471111 - DNA, 15 bp, Homo sapiens
ctgaaagataagcct

SEQ ID NO: 1471112 - DNA, 15 bp, Homo sapiens
tgaaagataagcctc

SEQ ID NO: 1471113 - DNA, 15 bp, Homo sapiens
gaaagataagcctcg

SEQ ID NO: 1471114 - DNA, 15 bp, Homo sapiens
aaagataagcctcgg

SEQ ID NO: 1471115 - DNA, 15 bp, Homo sapiens
aagataagcctcgga

SEQ ID NO: 1471116 - DNA, 15 bp, Homo sapiens
agataagcctcggag

SEQ ID NO: 1471117 - DNA, 15 bp, Homo sapiens
gataagcctcggagt

SEQ ID NO: 1471118 - DNA, 15 bp, Homo sapiens
ataagcctcggagtc

SEQ ID NO: 1471119 - DNA, 15 bp, Homo sapiens
taagcctcggagtca

SEQ ID NO: 1471120 - DNA, 15 bp, Homo sapiens
aagcctcggagtcag

SEQ ID NO: 1471121 - DNA, 15 bp, Homo sapiens
agcctcggagtcagt

SEQ ID NO: 1471122 - DNA, 15 bp, Homo sapiens
gcctcggagtcagta

SEQ ID NO: 1471123 - DNA, 15 bp, Homo sapiens
cctcggagtcagtat

SEQ ID NO: 1471124 - DNA, 15 bp, Homo sapiens
ctcggagtcagtatg

SEQ ID NO: 1471125 - DNA, 15 bp, Homo sapiens
tcggagtcagtatga

SEQ ID NO: 1471126 - DNA, 15 bp, Homo sapiens
cggagtcagtatgaa

SEQ ID NO: 1471127 - DNA, 15 bp, Homo sapiens
ggagtcagtatgaaa

SEQ ID NO: 1471128 - DNA, 15 bp, Homo sapiens
gagtcagtatgaaag

SEQ ID NO: 1471129 - DNA, 15 bp, Homo sapiens
agtcagtatgaaaga

SEQ ID NO: 1471130 - DNA, 15 bp, Homo sapiens
gtcagtatgaaagag

SEQ ID NO: 1471131 - DNA, 15 bp, Homo sapiens
tcagtatgaaagaga

SEQ ID NO: 1471132 - DNA, 15 bp, Homo sapiens
cagtatgaaagagaa

SEQ ID NO: 1471133 - DNA, 15 bp, Homo sapiens
agtatgaaagagaac

SEQ ID NO: 1471134 - DNA, 15 bp, Homo sapiens
gtatgaaagagaaca

SEQ ID NO: 1471135 - DNA, 15 bp, Homo sapiens
tatgaaagagaacag

SEQ ID NO: 1471136 - DNA, 15 bp, Homo sapiens
atgaaagagaacagg

SEQ ID NO: 1471137 - DNA, 15 bp, Homo sapiens
tgaaagagaacaggc

SEQ ID NO: 1471138 - DNA, 15 bp, Homo sapiens
gaaagagaacaggcc

SEQ ID NO: 1471139 - DNA, 15 bp, Homo sapiens
aaagagaacaggcct

SEQ ID NO: 1471140 - DNA, 15 bp, Homo sapiens
aagagaacaggcctt

SEQ ID NO: 1471141 - DNA, 15 bp, Homo sapiens
agagaacaggccttc

SEQ ID NO: 1471142 - DNA, 15 bp, Homo sapiens
gagaacaggccttcc

SEQ ID NO: 1471143 - DNA, 15 bp, Homo sapiens
agaacaggccttcca

SEQ ID NO: 1471144 - DNA, 15 bp, Homo sapiens
gaacaggccttccaa

SEQ ID NO: 1471145 - DNA, 15 bp, Homo sapiens
aacaggccttccaat

SEQ ID NO: 1471146 - DNA, 15 bp, Homo sapiens
acaggccttccaata

SEQ ID NO: 1471147 - DNA, 15 bp, Homo sapiens
caggccttccaataa

SEQ ID NO: 1471148 - DNA, 15 bp, Homo sapiens
aggccttccaataag

SEQ ID NO: 1471149 - DNA, 15 bp, Homo sapiens
ggccttccaataagt

SEQ ID NO: 1471150 - DNA, 15 bp, Homo sapiens
gccttccaataagtc

SEQ ID NO: 1471151 - DNA, 15 bp, Homo sapiens
ccttccaataagtct

SEQ ID NO: 1471152 - DNA, 15 bp, Homo sapiens
cttccaataagtctt

SEQ ID NO: 1471153 - DNA, 15 bp, Homo sapiens
ttccaataagtcttt

SEQ ID NO: 1471154 - DNA, 15 bp, Homo sapiens
tccaataagtcttta

SEQ ID NO: 1471155 - DNA, 15 bp, Homo sapiens
ccaataagtctttac

SEQ ID NO: 1471156 - DNA, 15 bp, Homo sapiens
caataagtctttact

SEQ ID NO: 1471157 - DNA, 15 bp, Homo sapiens
aataagtctttactg

SEQ ID NO: 1471158 - DNA, 15 bp, Homo sapiens
ataagtctttactgg

SEQ ID NO: 1471159 - DNA, 15 bp, Homo sapiens
taagtctttactgga

SEQ ID NO: 1471160 - DNA, 15 bp, Homo sapiens
aagtctttactggat

SEQ ID NO: 1471161 - DNA, 15 bp, Homo sapiens
agtctttactggatg

SEQ ID NO: 1471162 - DNA, 15 bp, Homo sapiens
gtctttactggatga

SEQ ID NO: 1471163 - DNA, 15 bp, Homo sapiens
tctttactggatgag

SEQ ID NO: 1471164 - DNA, 15 bp, Homo sapiens
ctttactggatgagt

SEQ ID NO: 1471165 - DNA, 15 bp, Homo sapiens
tttactggatgagtg

SEQ ID NO: 1471166 - DNA, 15 bp, Homo sapiens
ttactggatgagtga

SEQ ID NO: 1471167 - DNA, 15 bp, Homo sapiens
tactggatgagtgaa

SEQ ID NO: 1471168 - DNA, 15 bp, Homo sapiens
actggatgagtgaat

SEQ ID NO: 1471169 - DNA, 15 bp, Homo sapiens
ctggatgagtgaatg

SEQ ID NO: 1471170 - DNA, 15 bp, Homo sapiens
tggatgagtgaatga

SEQ ID NO: 1471171 - DNA, 15 bp, Homo sapiens
ggatgagtgaatgaa

SEQ ID NO: 1471172 - DNA, 15 bp, Homo sapiens
gatgagtgaatgaat

SEQ ID NO: 1471173 - DNA, 15 bp, Homo sapiens
atgagtgaatgaatg

SEQ ID NO: 1471174 - DNA, 15 bp, Homo sapiens
agtgaatgaatgaaa

SEQ ID NO: 1471175 - DNA, 15 bp, Homo sapiens
gtgaatgaatgaaat

SEQ ID NO: 1471176 - DNA, 15 bp, Homo sapiens
tgaatgaatgaaatg

SEQ ID NO: 1471177 - DNA, 15 bp, Homo sapiens
gaatgaatgaaatgg

SEQ ID NO: 1471178 - DNA, 15 bp, Homo sapiens
aatgaatgaaatggc

SEQ ID NO: 1471179 - DNA, 15 bp, Homo sapiens
atgaatgaaatggcc

SEQ ID NO: 1471180 - DNA, 15 bp, Homo sapiens
tgaatgaaatggcca

SEQ ID NO: 1471181 - DNA, 15 bp, Homo sapiens
gaatgaaatggccac

SEQ ID NO: 1471182 - DNA, 15 bp, Homo sapiens
aatgaaatggccacc

SEQ ID NO: 1471183 - DNA, 15 bp, Homo sapiens
atgaaatggccaccc

SEQ ID NO: 1471184 - DNA, 15 bp, Homo sapiens
tgaaatggccacccg

SEQ ID NO: 1471185 - DNA, 15 bp, Homo sapiens
gaaatggccacccgg

SEQ ID NO: 1471186 - DNA, 15 bp, Homo sapiens
aaatggccacccggg

SEQ ID NO: 1471187 - DNA, 15 bp, Homo sapiens
aatggccacccgggg

SEQ ID NO: 1471188 - DNA, 15 bp, Homo sapiens
atggccacccggggc

SEQ ID NO: 1471189 - DNA, 15 bp, Homo sapiens
tggccacccggggca

SEQ ID NO: 1471190 - DNA, 15 bp, Homo sapiens
ggccacccggggcat

SEQ ID NO: 1471191 - DNA, 15 bp, Homo sapiens
gccacccggggcatt

SEQ ID NO: 1471192 - DNA, 15 bp, Homo sapiens
ccacccggggcattg

SEQ ID NO: 1471193 - DNA, 15 bp, Homo sapiens
cacccggggcattgc

SEQ ID NO: 1471194 - DNA, 15 bp, Homo sapiens
acccggggcattgct

SEQ ID NO: 1471195 - DNA, 15 bp, Homo sapiens
cccggggcattgcta

SEQ ID NO: 1471196 - DNA, 15 bp, Homo sapiens
ccggggcattgctaa

SEQ ID NO: 1471197 - DNA, 15 bp, Homo sapiens
cggggcattgctaaa

SEQ ID NO: 1471198 - DNA, 15 bp, Homo sapiens
ggggcattgctaaat

SEQ ID NO: 1471199 - DNA, 15 bp, Homo sapiens
gggcattgctaaatt

SEQ ID NO: 1471200 - DNA, 15 bp, Homo sapiens
ggcattgctaaatta

SEQ ID NO: 1471201 - DNA, 15 bp, Homo sapiens
gcattgctaaattaa

SEQ ID NO: 1471202 - DNA, 15 bp, Homo sapiens
cattgctaaattaag

SEQ ID NO: 1471203 - DNA, 15 bp, Homo sapiens
attgctaaattaagt

SEQ ID NO: 1471204 - DNA, 15 bp, Homo sapiens
ttgctaaattaagta

SEQ ID NO: 1471205 - DNA, 15 bp, Homo sapiens
tgctaaattaagtac

SEQ ID NO: 1471206 - DNA, 15 bp, Homo sapiens
gctaaattaagtacc

SEQ ID NO: 1471207 - DNA, 15 bp, Homo sapiens
ctaaattaagtacct

SEQ ID NO: 1471208 - DNA, 15 bp, Homo sapiens
taaattaagtacctt

SEQ ID NO: 1471209 - DNA, 15 bp, Homo sapiens
aaattaagtaccttg

SEQ ID NO: 1471210 - DNA, 15 bp, Homo sapiens
aattaagtaccttga

SEQ ID NO: 1471211 - DNA, 15 bp, Homo sapiens
attaagtaccttgag

SEQ ID NO: 1471212 - DNA, 15 bp, Homo sapiens
ttaagtaccttgagc

SEQ ID NO: 1471213 - DNA, 15 bp, Homo sapiens
taagtaccttgagct

SEQ ID NO: 1471214 - DNA, 15 bp, Homo sapiens
aagtaccttgagctt

SEQ ID NO: 1471215 - DNA, 15 bp, Homo sapiens
agtaccttgagctta

SEQ ID NO: 1471216 - DNA, 15 bp, Homo sapiens
gtaccttgagcttag

SEQ ID NO: 1471217 - DNA, 15 bp, Homo sapiens
taccttgagcttagt

SEQ ID NO: 1471218 - DNA, 15 bp, Homo sapiens
accttgagcttagtc

SEQ ID NO: 1471219 - DNA, 15 bp, Homo sapiens
ccttgagcttagtca

SEQ ID NO: 1471220 - DNA, 15 bp, Homo sapiens
cttgagcttagtcat

SEQ ID NO: 1471221 - DNA, 15 bp, Homo sapiens
ttgagcttagtcatc

SEQ ID NO: 1471222 - DNA, 15 bp, Homo sapiens
tgagcttagtcatcc

SEQ ID NO: 1471223 - DNA, 15 bp, Homo sapiens
gagcttagtcatcct

SEQ ID NO: 1471224 - DNA, 15 bp, Homo sapiens
agcttagtcatccta

SEQ ID NO: 1471225 - DNA, 15 bp, Homo sapiens
gcttagtcatcctaa

SEQ ID NO: 1471226 - DNA, 15 bp, Homo sapiens
cttagtcatcctaac

SEQ ID NO: 1471227 - DNA, 15 bp, Homo sapiens
ttagtcatcctaacc

SEQ ID NO: 1471228 - DNA, 15 bp, Homo sapiens
tagtcatcctaacca

SEQ ID NO: 1471229 - DNA, 15 bp, Homo sapiens
agtcatcctaaccat

SEQ ID NO: 1471230 - DNA, 15 bp, Homo sapiens
gtcatcctaaccata

SEQ ID NO: 1471231 - DNA, 15 bp, Homo sapiens
tcatcctaaccatag

SEQ ID NO: 1471232 - DNA, 15 bp, Homo sapiens
catcctaaccatagt

SEQ ID NO: 1471233 - DNA, 15 bp, Homo sapiens
atcctaaccatagtc

SEQ ID NO: 1471234 - DNA, 15 bp, Homo sapiens
tcctaaccatagtcc

SEQ ID NO: 1471235 - DNA, 15 bp, Homo sapiens
cctaaccatagtccc

SEQ ID NO: 1471236 - DNA, 15 bp, Homo sapiens
ctaaccatagtcccc

SEQ ID NO: 1471237 - DNA, 15 bp, Homo sapiens
taaccatagtccccc

SEQ ID NO: 1471238 - DNA, 15 bp, Homo sapiens
aaccatagtcccccc

SEQ ID NO: 1471239 - DNA, 15 bp, Homo sapiens
accatagtcccccca

SEQ ID NO: 1471240 - DNA, 15 bp, Homo sapiens
ccatagtccccccag

SEQ ID NO: 1471241 - DNA, 15 bp, Homo sapiens
catagtccccccagg

SEQ ID NO: 1471242 - DNA, 15 bp, Homo sapiens
atagtccccccaggc

SEQ ID NO: 1471243 - DNA, 15 bp, Homo sapiens
tagtccccccaggca

SEQ ID NO: 1471244 - DNA, 15 bp, Homo sapiens
agtccccccaggcat

SEQ ID NO: 1471245 - DNA, 15 bp, Homo sapiens
gtccccccaggcatt

SEQ ID NO: 1471246 - DNA, 15 bp, Homo sapiens
tccccccaggcatta

SEQ ID NO: 1471247 - DNA, 15 bp, Homo sapiens
ccccccaggcattat

SEQ ID NO: 1471248 - DNA, 15 bp, Homo sapiens
cccccaggcattatc

SEQ ID NO: 1471249 - DNA, 15 bp, Homo sapiens
ccccaggcattatct

SEQ ID NO: 1471250 - DNA, 15 bp, Homo sapiens
cccaggcattatctg

SEQ ID NO: 1471251 - DNA, 15 bp, Homo sapiens
ccaggcattatctgt

SEQ ID NO: 1471252 - DNA, 15 bp, Homo sapiens
caggcattatctgtg

SEQ ID NO: 1471253 - DNA, 15 bp, Homo sapiens
aggcattatctgtgt

SEQ ID NO: 1471254 - DNA, 15 bp, Homo sapiens
ggcattatctgtgtg

SEQ ID NO: 1471255 - DNA, 15 bp, Homo sapiens
gcattatctgtgtgg

SEQ ID NO: 1471256 - DNA, 15 bp, Homo sapiens
cattatctgtgtggc

SEQ ID NO: 1471257 - DNA, 15 bp, Homo sapiens
attatctgtgtggcc

SEQ ID NO: 1471258 - DNA, 15 bp, Homo sapiens
ttatctgtgtggcca

SEQ ID NO: 1471259 - DNA, 15 bp, Homo sapiens
tatctgtgtggccat

SEQ ID NO: 1471260 - DNA, 15 bp, Homo sapiens
atctgtgtggccata

SEQ ID NO: 1471261 - DNA, 15 bp, Homo sapiens
tctgtgtggccataa

SEQ ID NO: 1471262 - DNA, 15 bp, Homo sapiens
ctgtgtggccataag

SEQ ID NO: 1471263 - DNA, 15 bp, Homo sapiens
tgtgtggccataagc

SEQ ID NO: 1471264 - DNA, 15 bp, Homo sapiens
gtgtggccataagcc

SEQ ID NO: 1471265 - DNA, 15 bp, Homo sapiens
tgtggccataagcca

SEQ ID NO: 1471266 - DNA, 15 bp, Homo sapiens
gtggccataagccat

SEQ ID NO: 1471267 - DNA, 15 bp, Homo sapiens
tggccataagccatt

SEQ ID NO: 1471268 - DNA, 15 bp, Homo sapiens
ggccataagccattt

SEQ ID NO: 1471269 - DNA, 15 bp, Homo sapiens
gccataagccatttt

SEQ ID NO: 1471270 - DNA, 15 bp, Homo sapiens
ccataagccattttc

SEQ ID NO: 1471271 - DNA, 15 bp, Homo sapiens
cataagccattttct

SEQ ID NO: 1471272 - DNA, 15 bp, Homo sapiens
ataagccattttctt

SEQ ID NO: 1471273 - DNA, 15 bp, Homo sapiens
taagccattttctta

SEQ ID NO: 1471274 - DNA, 15 bp, Homo sapiens
aagccattttcttag

SEQ ID NO: 1471275 - DNA, 15 bp, Homo sapiens
agccattttcttagc

SEQ ID NO: 1471276 - DNA, 15 bp, Homo sapiens
gccattttcttagcc

SEQ ID NO: 1471277 - DNA, 15 bp, Homo sapiens
ccattttcttagcca

SEQ ID NO: 1471278 - DNA, 15 bp, Homo sapiens
cattttcttagccac

SEQ ID NO: 1471279 - DNA, 15 bp, Homo sapiens
attttcttagccact

SEQ ID NO: 1471280 - DNA, 15 bp, Homo sapiens
ttttcttagccactc

SEQ ID NO: 1471281 - DNA, 15 bp, Homo sapiens
tttcttagccactct

SEQ ID NO: 1471282 - DNA, 15 bp, Homo sapiens
ttcttagccactctc

SEQ ID NO: 1471283 - DNA, 15 bp, Homo sapiens
tcttagccactctct

SEQ ID NO: 1471284 - DNA, 15 bp, Homo sapiens
cttagccactctctt

SEQ ID NO: 1471285 - DNA, 15 bp, Homo sapiens
ttagccactctcttc

SEQ ID NO: 1471286 - DNA, 15 bp, Homo sapiens
tagccactctcttct

SEQ ID NO: 1471287 - DNA, 15 bp, Homo sapiens
agccactctcttctt

SEQ ID NO: 1471288 - DNA, 15 bp, Homo sapiens
gccactctcttcttc

SEQ ID NO: 1471289 - DNA, 15 bp, Homo sapiens
ccactctcttcttca

SEQ ID NO: 1471290 - DNA, 15 bp, Homo sapiens
cactctcttcttcag

SEQ ID NO: 1471291 - DNA, 15 bp, Homo sapiens
actctcttcttcagt

SEQ ID NO: 1471292 - DNA, 15 bp, Homo sapiens
ctctcttcttcagta

SEQ ID NO: 1471293 - DNA, 15 bp, Homo sapiens
tctcttcttcagtaa

SEQ ID NO: 1471294 - DNA, 15 bp, Homo sapiens
ctcttcttcagtaaa

SEQ ID NO: 1471295 - DNA, 15 bp, Homo sapiens
tcttcttcagtaaag

SEQ ID NO: 1471296 - DNA, 15 bp, Homo sapiens
cttcttcagtaaagg

SEQ ID NO: 1471297 - DNA, 15 bp, Homo sapiens
ttcttcagtaaaggc

SEQ ID NO: 1471298 - DNA, 15 bp, Homo sapiens
tcttcagtaaaggca

SEQ ID NO: 1471299 - DNA, 15 bp, Homo sapiens
cttcagtaaaggcaa

SEQ ID NO: 1471300 - DNA, 15 bp, Homo sapiens
ttcagtaaaggcaag

SEQ ID NO: 1471301 - DNA, 15 bp, Homo sapiens
tcagtaaaggcaagt

SEQ ID NO: 1471302 - DNA, 15 bp, Homo sapiens
cagtaaaggcaagta

SEQ ID NO: 1471303 - DNA, 15 bp, Homo sapiens
agtaaaggcaagtag

SEQ ID NO: 1471304 - DNA, 15 bp, Homo sapiens
gtaaaggcaagtaga

SEQ ID NO: 1471305 - DNA, 15 bp, Homo sapiens
taaaggcaagtagag

SEQ ID NO: 1471306 - DNA, 15 bp, Homo sapiens
aaaggcaagtagagt

SEQ ID NO: 1471307 - DNA, 15 bp, Homo sapiens
aaggcaagtagagtg

SEQ ID NO: 1471308 - DNA, 15 bp, Homo sapiens
aggcaagtagagtgt

SEQ ID NO: 1471309 - DNA, 15 bp, Homo sapiens
ggcaagtagagtgta

SEQ ID NO: 1471310 - DNA, 15 bp, Homo sapiens
gcaagtagagtgtaa

SEQ ID NO: 1471311 - DNA, 15 bp, Homo sapiens
caagtagagtgtaat

SEQ ID NO: 1471312 - DNA, 15 bp, Homo sapiens
aagtagagtgtaatg

SEQ ID NO: 1471313 - DNA, 15 bp, Homo sapiens
agtagagtgtaatga

SEQ ID NO: 1471314 - DNA, 15 bp, Homo sapiens
gtagagtgtaatgaa

SEQ ID NO: 1471315 - DNA, 15 bp, Homo sapiens
tagagtgtaatgaag

SEQ ID NO: 1471316 - DNA, 15 bp, Homo sapiens
agagtgtaatgaaga

SEQ ID NO: 1471317 - DNA, 15 bp, Homo sapiens
gagtgtaatgaagaa

SEQ ID NO: 1471318 - DNA, 15 bp, Homo sapiens
agtgtaatgaagaat

SEQ ID NO: 1471319 - DNA, 15 bp, Homo sapiens
gtgtaatgaagaata

SEQ ID NO: 1471320 - DNA, 15 bp, Homo sapiens
tgtaatgaagaatac

SEQ ID NO: 1471321 - DNA, 15 bp, Homo sapiens
gtaatgaagaatact

SEQ ID NO: 1471322 - DNA, 15 bp, Homo sapiens
aatgaagaatactgt

SEQ ID NO: 1471323 - DNA, 15 bp, Homo sapiens
atgaagaatactgtg

SEQ ID NO: 1471324 - DNA, 15 bp, Homo sapiens
tgaagaatactgtga

SEQ ID NO: 1471325 - DNA, 15 bp, Homo sapiens
gaagaatactgtgag

SEQ ID NO: 1471326 - DNA, 15 bp, Homo sapiens
aagaatactgtgaga

SEQ ID NO: 1471327 - DNA, 15 bp, Homo sapiens
agaatactgtgagag

SEQ ID NO: 1471328 - DNA, 15 bp, Homo sapiens
gaatactgtgagagg

SEQ ID NO: 1471329 - DNA, 15 bp, Homo sapiens
aatactgtgagagga

SEQ ID NO: 1471330 - DNA, 15 bp, Homo sapiens
atactgtgagaggac

SEQ ID NO: 1471331 - DNA, 15 bp, Homo sapiens
tactgtgagaggaca

SEQ ID NO: 1471332 - DNA, 15 bp, Homo sapiens
actgtgagaggacaa

SEQ ID NO: 1471333 - DNA, 15 bp, Homo sapiens
ctgtgagaggacaat

SEQ ID NO: 1471334 - DNA, 15 bp, Homo sapiens
tgtgagaggacaatt

SEQ ID NO: 1471335 - DNA, 15 bp, Homo sapiens
gtgagaggacaatta

SEQ ID NO: 1471336 - DNA, 15 bp, Homo sapiens
tgagaggacaattac

SEQ ID NO: 1471337 - DNA, 15 bp, Homo sapiens
gagaggacaattacc

SEQ ID NO: 1471338 - DNA, 15 bp, Homo sapiens
agaggacaattacct

SEQ ID NO: 1471339 - DNA, 15 bp, Homo sapiens
gaggacaattacctt

SEQ ID NO: 1471340 - DNA, 15 bp, Homo sapiens
aggacaattacctta

SEQ ID NO: 1471341 - DNA, 15 bp, Homo sapiens
ggacaattaccttag

SEQ ID NO: 1471342 - DNA, 15 bp, Homo sapiens
gacaattaccttaga

SEQ ID NO: 1471343 - DNA, 15 bp, Homo sapiens
acaattaccttagaa

SEQ ID NO: 1471344 - DNA, 15 bp, Homo sapiens
caattaccttagaag

SEQ ID NO: 1471345 - DNA, 15 bp, Homo sapiens
aattaccttagaagg

SEQ ID NO: 1471346 - DNA, 15 bp, Homo sapiens
attaccttagaaggc

SEQ ID NO: 1471347 - DNA, 15 bp, Homo sapiens
ttaccttagaaggca

SEQ ID NO: 1471348 - DNA, 15 bp, Homo sapiens
taccttagaaggcat

SEQ ID NO: 1471349 - DNA, 15 bp, Homo sapiens
accttagaaggcatt

SEQ ID NO: 1471350 - DNA, 15 bp, Homo sapiens
ccttagaaggcatta

SEQ ID NO: 1471351 - DNA, 15 bp, Homo sapiens
cttagaaggcattat

SEQ ID NO: 1471352 - DNA, 15 bp, Homo sapiens
ttagaaggcattatc

SEQ ID NO: 1471353 - DNA, 15 bp, Homo sapiens
tagaaggcattatca

SEQ ID NO: 1471354 - DNA, 15 bp, Homo sapiens
agaaggcattatcag

SEQ ID NO: 1471355 - DNA, 15 bp, Homo sapiens
gaaggcattatcaga

SEQ ID NO: 1471356 - DNA, 15 bp, Homo sapiens
aaggcattatcagac

SEQ ID NO: 1471357 - DNA, 15 bp, Homo sapiens
aggcattatcagact

SEQ ID NO: 1471358 - DNA, 15 bp, Homo sapiens
ggcattatcagacta

SEQ ID NO: 1471359 - DNA, 15 bp, Homo sapiens
gcattatcagactaa

SEQ ID NO: 1471360 - DNA, 15 bp, Homo sapiens
cattatcagactaat

SEQ ID NO: 1471361 - DNA, 15 bp, Homo sapiens
attatcagactaatg

SEQ ID NO: 1471362 - DNA, 15 bp, Homo sapiens
ttatcagactaatgt

SEQ ID NO: 1471363 - DNA, 15 bp, Homo sapiens
tatcagactaatgtt

SEQ ID NO: 1471364 - DNA, 15 bp, Homo sapiens
atcagactaatgttt

SEQ ID NO: 1471365 - DNA, 15 bp, Homo sapiens
tcagactaatgtttt

SEQ ID NO: 1471366 - DNA, 15 bp, Homo sapiens
cagactaatgtttta

SEQ ID NO: 1471367 - DNA, 15 bp, Homo sapiens
agactaatgttttac

SEQ ID NO: 1471368 - DNA, 15 bp, Homo sapiens
gactaatgttttact

SEQ ID NO: 1471369 - DNA, 15 bp, Homo sapiens
actaatgttttactg

SEQ ID NO: 1471370 - DNA, 15 bp, Homo sapiens
ctaatgttttactga

SEQ ID NO: 1471371 - DNA, 15 bp, Homo sapiens
taatgttttactgag

SEQ ID NO: 1471372 - DNA, 15 bp, Homo sapiens
aatgttttactgagt

SEQ ID NO: 1471373 - DNA, 15 bp, Homo sapiens
atgttttactgagtg

SEQ ID NO: 1471374 - DNA, 15 bp, Homo sapiens
tgttttactgagtgc

SEQ ID NO: 1471375 - DNA, 15 bp, Homo sapiens
gttttactgagtgca

SEQ ID NO: 1471376 - DNA, 15 bp, Homo sapiens
ttttactgagtgcat

SEQ ID NO: 1471377 - DNA, 15 bp, Homo sapiens
tttactgagtgcata

SEQ ID NO: 1471378 - DNA, 15 bp, Homo sapiens
ttactgagtgcatag

SEQ ID NO: 1471379 - DNA, 15 bp, Homo sapiens
tactgagtgcataga

SEQ ID NO: 1471380 - DNA, 15 bp, Homo sapiens
actgagtgcatagag

SEQ ID NO: 1471381 - DNA, 15 bp, Homo sapiens
ctgagtgcatagagt

SEQ ID NO: 1471382 - DNA, 15 bp, Homo sapiens
tgagtgcatagagta

SEQ ID NO: 1471383 - DNA, 15 bp, Homo sapiens
gagtgcatagagtac

SEQ ID NO: 1471384 - DNA, 15 bp, Homo sapiens
agtgcatagagtaca

SEQ ID NO: 1471385 - DNA, 15 bp, Homo sapiens
gtgcatagagtacat

SEQ ID NO: 1471386 - DNA, 15 bp, Homo sapiens
tgcatagagtacata

SEQ ID NO: 1471387 - DNA, 15 bp, Homo sapiens
gcatagagtacatat

SEQ ID NO: 1471388 - DNA, 15 bp, Homo sapiens
catagagtacatatc

SEQ ID NO: 1471389 - DNA, 15 bp, Homo sapiens
atagagtacatatct

SEQ ID NO: 1471390 - DNA, 15 bp, Homo sapiens
tagagtacatatcta

SEQ ID NO: 1471391 - DNA, 15 bp, Homo sapiens
agagtacatatctat

SEQ ID NO: 1471392 - DNA, 15 bp, Homo sapiens
gagtacatatctata

SEQ ID NO: 1471393 - DNA, 15 bp, Homo sapiens
agtacatatctatag

SEQ ID NO: 1471394 - DNA, 15 bp, Homo sapiens
gtacatatctatagg

SEQ ID NO: 1471395 - DNA, 15 bp, Homo sapiens
tacatatctataggt

SEQ ID NO: 1471396 - DNA, 15 bp, Homo sapiens
acatatctataggtt

SEQ ID NO: 1471397 - DNA, 15 bp, Homo sapiens
catatctataggtta

SEQ ID NO: 1471398 - DNA, 15 bp, Homo sapiens
atatctataggttaa

SEQ ID NO: 1471399 - DNA, 15 bp, Homo sapiens
tatctataggttaat

SEQ ID NO: 1471400 - DNA, 15 bp, Homo sapiens
atctataggttaata

SEQ ID NO: 1471401 - DNA, 15 bp, Homo sapiens
tctataggttaatat

SEQ ID NO: 1471402 - DNA, 15 bp, Homo sapiens
ctataggttaatatg

SEQ ID NO: 1471403 - DNA, 15 bp, Homo sapiens
tataggttaatatgc

SEQ ID NO: 1471404 - DNA, 15 bp, Homo sapiens
ataggttaatatgcc

SEQ ID NO: 1471405 - DNA, 15 bp, Homo sapiens
taggttaatatgcct

SEQ ID NO: 1471406 - DNA, 15 bp, Homo sapiens
aggttaatatgcctt

SEQ ID NO: 1471407 - DNA, 15 bp, Homo sapiens
ggttaatatgccttt

SEQ ID NO: 1471408 - DNA, 15 bp, Homo sapiens
gttaatatgccttta

SEQ ID NO: 1471409 - DNA, 15 bp, Homo sapiens
ttaatatgcctttac

SEQ ID NO: 1471410 - DNA, 15 bp, Homo sapiens
taatatgcctttact

SEQ ID NO: 1471411 - DNA, 15 bp, Homo sapiens
aatatgcctttacta

SEQ ID NO: 1471412 - DNA, 15 bp, Homo sapiens
atatgcctttactat

SEQ ID NO: 1471413 - DNA, 15 bp, Homo sapiens
tatgcctttactatg

SEQ ID NO: 1471414 - DNA, 15 bp, Homo sapiens
atgcctttactatgc

SEQ ID NO: 1471415 - DNA, 15 bp, Homo sapiens
tgcctttactatgca

SEQ ID NO: 1471416 - DNA, 15 bp, Homo sapiens
gcctttactatgcaa

SEQ ID NO: 1471417 - DNA, 15 bp, Homo sapiens
cctttactatgcaat

SEQ ID NO: 1471418 - DNA, 15 bp, Homo sapiens
ctttactatgcaatg

SEQ ID NO: 1471419 - DNA, 15 bp, Homo sapiens
tttactatgcaatgc

SEQ ID NO: 1471420 - DNA, 15 bp, Homo sapiens
ttactatgcaatgca

SEQ ID NO: 1471421 - DNA, 15 bp, Homo sapiens
tactatgcaatgcat

SEQ ID NO: 1471422 - DNA, 15 bp, Homo sapiens
actatgcaatgcatc

SEQ ID NO: 1471423 - DNA, 15 bp, Homo sapiens
ctatgcaatgcatcc

SEQ ID NO: 1471424 - DNA, 15 bp, Homo sapiens
tatgcaatgcatcca

SEQ ID NO: 1471425 - DNA, 15 bp, Homo sapiens
atgcaatgcatccag

SEQ ID NO: 1471426 - DNA, 15 bp, Homo sapiens
tgcaatgcatccaga

SEQ ID NO: 1471427 - DNA, 15 bp, Homo sapiens
gcaatgcatccagaa

SEQ ID NO: 1471428 - DNA, 15 bp, Homo sapiens
caatgcatccagaaa

SEQ ID NO: 1471429 - DNA, 15 bp, Homo sapiens
aatgcatccagaaat

SEQ ID NO: 1471430 - DNA, 15 bp, Homo sapiens
atgcatccagaaatt

SEQ ID NO: 1471431 - DNA, 15 bp, Homo sapiens
tgcatccagaaattt

SEQ ID NO: 1471432 - DNA, 15 bp, Homo sapiens
gcatccagaaatttc

SEQ ID NO: 1471433 - DNA, 15 bp, Homo sapiens
catccagaaatttca

SEQ ID NO: 1471434 - DNA, 15 bp, Homo sapiens
atccagaaatttcaa

SEQ ID NO: 1471435 - DNA, 15 bp, Homo sapiens
tccagaaatttcaaa

SEQ ID NO: 1471436 - DNA, 15 bp, Homo sapiens
ccagaaatttcaaag

SEQ ID NO: 1471437 - DNA, 15 bp, Homo sapiens
cagaaatttcaaagt

SEQ ID NO: 1471438 - DNA, 15 bp, Homo sapiens
agaaatttcaaagtc

SEQ ID NO: 1471439 - DNA, 15 bp, Homo sapiens
gaaatttcaaagtca

SEQ ID NO: 1471440 - DNA, 15 bp, Homo sapiens
aaatttcaaagtcaa

SEQ ID NO: 1471441 - DNA, 15 bp, Homo sapiens
aatttcaaagtcaag

SEQ ID NO: 1471442 - DNA, 15 bp, Homo sapiens
atttcaaagtcaaga

SEQ ID NO: 1471443 - DNA, 15 bp, Homo sapiens
tttcaaagtcaagaa

SEQ ID NO: 1471444 - DNA, 15 bp, Homo sapiens
ttcaaagtcaagaag

SEQ ID NO: 1471445 - DNA, 15 bp, Homo sapiens
tcaaagtcaagaaga

SEQ ID NO: 1471446 - DNA, 15 bp, Homo sapiens
caaagtcaagaagat

SEQ ID NO: 1471447 - DNA, 15 bp, Homo sapiens
aaagtcaagaagatt

SEQ ID NO: 1471448 - DNA, 15 bp, Homo sapiens
aagtcaagaagattc

SEQ ID NO: 1471449 - DNA, 15 bp, Homo sapiens
agtcaagaagattct

SEQ ID NO: 1471450 - DNA, 15 bp, Homo sapiens
gtcaagaagattcta

SEQ ID NO: 1471451 - DNA, 15 bp, Homo sapiens
tcaagaagattctag

SEQ ID NO: 1471452 - DNA, 15 bp, Homo sapiens
caagaagattctagg

SEQ ID NO: 1471453 - DNA, 15 bp, Homo sapiens
aagaagattctagga

SEQ ID NO: 1471454 - DNA, 15 bp, Homo sapiens
agaagattctaggag

SEQ ID NO: 1471455 - DNA, 15 bp, Homo sapiens
gaagattctaggagg

SEQ ID NO: 1471456 - DNA, 15 bp, Homo sapiens
aagattctaggaggc

SEQ ID NO: 1471457 - DNA, 15 bp, Homo sapiens
agattctaggaggct

SEQ ID NO: 1471458 - DNA, 15 bp, Homo sapiens
gattctaggaggctg

SEQ ID NO: 1471459 - DNA, 15 bp, Homo sapiens
attctaggaggctga

SEQ ID NO: 1471460 - DNA, 15 bp, Homo sapiens
ttctaggaggctgaa

SEQ ID NO: 1471461 - DNA, 15 bp, Homo sapiens
tctaggaggctgaat

SEQ ID NO: 1471462 - DNA, 15 bp, Homo sapiens
ctaggaggctgaatt

SEQ ID NO: 1471463 - DNA, 15 bp, Homo sapiens
taggaggctgaattc

SEQ ID NO: 1471464 - DNA, 15 bp, Homo sapiens
aggaggctgaattcc

SEQ ID NO: 1471465 - DNA, 15 bp, Homo sapiens
ggaggctgaattcca

SEQ ID NO: 1471466 - DNA, 15 bp, Homo sapiens
gaggctgaattccac

SEQ ID NO: 1471467 - DNA, 15 bp, Homo sapiens
aggctgaattccacc

SEQ ID NO: 1471468 - DNA, 15 bp, Homo sapiens
ggctgaattccacct

SEQ ID NO: 1471469 - DNA, 15 bp, Homo sapiens
gctgaattccacctt

SEQ ID NO: 1471470 - DNA, 15 bp, Homo sapiens
ctgaattccaccttt

SEQ ID NO: 1471471 - DNA, 15 bp, Homo sapiens
tgaattccaccttta

SEQ ID NO: 1471472 - DNA, 15 bp, Homo sapiens
gaattccacctttag

SEQ ID NO: 1471473 - DNA, 15 bp, Homo sapiens
aattccacctttaga

SEQ ID NO: 1471474 - DNA, 15 bp, Homo sapiens
attccacctttagaa

SEQ ID NO: 1471475 - DNA, 15 bp, Homo sapiens
ttccacctttagaaa

SEQ ID NO: 1471476 - DNA, 15 bp, Homo sapiens
tccacctttagaaat

SEQ ID NO: 1471477 - DNA, 15 bp, Homo sapiens
ccacctttagaaatc

SEQ ID NO: 1471478 - DNA, 15 bp, Homo sapiens
cacctttagaaatct

SEQ ID NO: 1471479 - DNA, 15 bp, Homo sapiens
acctttagaaatctc

SEQ ID NO: 1471480 - DNA, 15 bp, Homo sapiens
cctttagaaatctca

SEQ ID NO: 1471481 - DNA, 15 bp, Homo sapiens
ctttagaaatctcag

SEQ ID NO: 1471482 - DNA, 15 bp, Homo sapiens
tttagaaatctcagc

SEQ ID NO: 1471483 - DNA, 15 bp, Homo sapiens
ttagaaatctcagct

SEQ ID NO: 1471484 - DNA, 15 bp, Homo sapiens
tagaaatctcagcta

SEQ ID NO: 1471485 - DNA, 15 bp, Homo sapiens
agaaatctcagctat

SEQ ID NO: 1471486 - DNA, 15 bp, Homo sapiens
gaaatctcagctatg

SEQ ID NO: 1471487 - DNA, 15 bp, Homo sapiens
aaatctcagctatga

SEQ ID NO: 1471488 - DNA, 15 bp, Homo sapiens
aatctcagctatgaa

SEQ ID NO: 1471489 - DNA, 15 bp, Homo sapiens
atctcagctatgaaa

SEQ ID NO: 1471490 - DNA, 15 bp, Homo sapiens
tctcagctatgaaag

SEQ ID NO: 1471491 - DNA, 15 bp, Homo sapiens
ctcagctatgaaagc

SEQ ID NO: 1471492 - DNA, 15 bp, Homo sapiens
tcagctatgaaagct

SEQ ID NO: 1471493 - DNA, 15 bp, Homo sapiens
cagctatgaaagctc

SEQ ID NO: 1471494 - DNA, 15 bp, Homo sapiens
agctatgaaagctct

SEQ ID NO: 1471495 - DNA, 15 bp, Homo sapiens
gctatgaaagctctg

SEQ ID NO: 1471496 - DNA, 15 bp, Homo sapiens
ctatgaaagctctgg

SEQ ID NO: 1471497 - DNA, 15 bp, Homo sapiens
tatgaaagctctggg

SEQ ID NO: 1471498 - DNA, 15 bp, Homo sapiens
atgaaagctctgggt

SEQ ID NO: 1471499 - DNA, 15 bp, Homo sapiens
tgaaagctctgggtt

SEQ ID NO: 1471500 - DNA, 15 bp, Homo sapiens
gaaagctctgggttt

SEQ ID NO: 1471501 - DNA, 15 bp, Homo sapiens
aaagctctgggtttc

SEQ ID NO: 1471502 - DNA, 15 bp, Homo sapiens
aagctctgggtttca

SEQ ID NO: 1471503 - DNA, 15 bp, Homo sapiens
agctctgggtttcaa

SEQ ID NO: 1471504 - DNA, 15 bp, Homo sapiens
gctctgggtttcaac

SEQ ID NO: 1471505 - DNA, 15 bp, Homo sapiens
ctctgggtttcaact

SEQ ID NO: 1471506 - DNA, 15 bp, Homo sapiens
tctgggtttcaactt

SEQ ID NO: 1471507 - DNA, 15 bp, Homo sapiens
ctgggtttcaacttg

SEQ ID NO: 1471508 - DNA, 15 bp, Homo sapiens
tgggtttcaacttga

SEQ ID NO: 1471509 - DNA, 15 bp, Homo sapiens
gggtttcaacttgat

SEQ ID NO: 1471510 - DNA, 15 bp, Homo sapiens
ggtttcaacttgata

SEQ ID NO: 1471511 - DNA, 15 bp, Homo sapiens
gtttcaacttgatat

SEQ ID NO: 1471512 - DNA, 15 bp, Homo sapiens
tttcaacttgatata

SEQ ID NO: 1471513 - DNA, 15 bp, Homo sapiens
ttcaacttgatataa

SEQ ID NO: 1471514 - DNA, 15 bp, Homo sapiens
tcaacttgatataac

SEQ ID NO: 1471515 - DNA, 15 bp, Homo sapiens
caacttgatataact

SEQ ID NO: 1471516 - DNA, 15 bp, Homo sapiens
cttgatataactctt

SEQ ID NO: 1471517 - DNA, 15 bp, Homo sapiens
ttgatataactcttc

SEQ ID NO: 1471518 - DNA, 15 bp, Homo sapiens
tgatataactcttca

SEQ ID NO: 1471519 - DNA, 15 bp, Homo sapiens
gatataactcttcac

SEQ ID NO: 1471520 - DNA, 15 bp, Homo sapiens
atataactcttcact

SEQ ID NO: 1471521 - DNA, 15 bp, Homo sapiens
tataactcttcactg

SEQ ID NO: 1471522 - DNA, 15 bp, Homo sapiens
ataactcttcactgg

SEQ ID NO: 1471523 - DNA, 15 bp, Homo sapiens
taactcttcactggc

SEQ ID NO: 1471524 - DNA, 15 bp, Homo sapiens
aactcttcactggcc

SEQ ID NO: 1471525 - DNA, 15 bp, Homo sapiens
actcttcactggcca

SEQ ID NO: 1471526 - DNA, 15 bp, Homo sapiens
ctcttcactggccag

SEQ ID NO: 1471527 - DNA, 15 bp, Homo sapiens
tcttcactggccaga

SEQ ID NO: 1471528 - DNA, 15 bp, Homo sapiens
cttcactggccagaa

SEQ ID NO: 1471529 - DNA, 15 bp, Homo sapiens
ttcactggccagaaa

SEQ ID NO: 1471530 - DNA, 15 bp, Homo sapiens
tcactggccagaaaa

SEQ ID NO: 1471531 - DNA, 15 bp, Homo sapiens
cactggccagaaaaa

SEQ ID NO: 1471532 - DNA, 15 bp, Homo sapiens
actggccagaaaaaa

SEQ ID NO: 1471533 - DNA, 15 bp, Homo sapiens
ctggccagaaaaaaa

SEQ ID NO: 1471534 - DNA, 15 bp, Homo sapiens
tggccagaaaaaaaa

SEQ ID NO: 1471535 - DNA, 15 bp, Homo sapiens
ggccagaaaaaaaaa

SEQ ID NO: 1471536 - DNA, 15 bp, Homo sapiens
gccagaaaaaaaaaa

SEQ ID NO: 1471537 - DNA, 15 bp, Homo sapiens
aaaaaaaaaaaaacg

SEQ ID NO: 1471538 - DNA, 15 bp, Homo sapiens
aaaaaaaaaaaacgg

SEQ ID NO: 1471539 - DNA, 15 bp, Homo sapiens
aaaaaaaaaaacggc

SEQ ID NO: 1471540 - DNA, 15 bp, Homo sapiens
aaaaaaaaaacggca

SEQ ID NO: 1471541 - DNA, 15 bp, Homo sapiens
aaaaaaaaacggcaa

SEQ ID NO: 1471542 - DNA, 15 bp, Homo sapiens
aaaaaaaacggcaac

SEQ ID NO: 1471543 - DNA, 15 bp, Homo sapiens
aaaaaaacggcaact

SEQ ID NO: 1471544 - DNA, 15 bp, Homo sapiens
aaaaaacggcaactc

SEQ ID NO: 1471545 - DNA, 15 bp, Homo sapiens
aaaaacggcaactct

SEQ ID NO: 1471546 - DNA, 15 bp, Homo sapiens
aaaacggcaactctt

SEQ ID NO: 1471547 - DNA, 15 bp, Homo sapiens
aaacggcaactcttt

SEQ ID NO: 1471548 - DNA, 15 bp, Homo sapiens
aacggcaactctttg

SEQ ID NO: 1471549 - DNA, 15 bp, Homo sapiens
acggcaactctttgg

SEQ ID NO: 1471550 - DNA, 15 bp, Homo sapiens
cggcaactctttggc

SEQ ID NO: 1471551 - DNA, 15 bp, Homo sapiens
ggcaactctttggca

SEQ ID NO: 1471552 - DNA, 15 bp, Homo sapiens
gcaactctttggcaa

SEQ ID NO: 1471553 - DNA, 15 bp, Homo sapiens
caactctttggcaaa

SEQ ID NO: 1471554 - DNA, 15 bp, Homo sapiens
aactctttggcaaat

SEQ ID NO: 1471555 - DNA, 15 bp, Homo sapiens
actctttggcaaata

SEQ ID NO: 1471556 - DNA, 15 bp, Homo sapiens
ctctttggcaaatag

SEQ ID NO: 1471557 - DNA, 15 bp, Homo sapiens
tctttggcaaataga

SEQ ID NO: 1471558 - DNA, 15 bp, Homo sapiens
ctttggcaaatagag

SEQ ID NO: 1471559 - DNA, 15 bp, Homo sapiens
tttggcaaatagagc

SEQ ID NO: 1471560 - DNA, 15 bp, Homo sapiens
ttggcaaatagagct

SEQ ID NO: 1471561 - DNA, 15 bp, Homo sapiens
tggcaaatagagctc

SEQ ID NO: 1471562 - DNA, 15 bp, Homo sapiens
ggcaaatagagctct

SEQ ID NO: 1471563 - DNA, 15 bp, Homo sapiens
gcaaatagagctctg

SEQ ID NO: 1471564 - DNA, 15 bp, Homo sapiens
caaatagagctctgg

SEQ ID NO: 1471565 - DNA, 15 bp, Homo sapiens
aaatagagctctgga

SEQ ID NO: 1471566 - DNA, 15 bp, Homo sapiens
aatagagctctggaa

SEQ ID NO: 1471567 - DNA, 15 bp, Homo sapiens
atagagctctggaag

SEQ ID NO: 1471568 - DNA, 15 bp, Homo sapiens
tagagctctggaaga

SEQ ID NO: 1471569 - DNA, 15 bp, Homo sapiens
agagctctggaagat

SEQ ID NO: 1471570 - DNA, 15 bp, Homo sapiens
gagctctggaagatg

SEQ ID NO: 1471571 - DNA, 15 bp, Homo sapiens
agctctggaagatgc

SEQ ID NO: 1471572 - DNA, 15 bp, Homo sapiens
gctctggaagatgcg

SEQ ID NO: 1471573 - DNA, 15 bp, Homo sapiens
ctctggaagatgcgc

SEQ ID NO: 1471574 - DNA, 15 bp, Homo sapiens
tctggaagatgcgct

SEQ ID NO: 1471575 - DNA, 15 bp, Homo sapiens
ctggaagatgcgctg

SEQ ID NO: 1471576 - DNA, 15 bp, Homo sapiens
tggaagatgcgctgg

SEQ ID NO: 1471577 - DNA, 15 bp, Homo sapiens
ggaagatgcgctggc

SEQ ID NO: 1471578 - DNA, 15 bp, Homo sapiens
gaagatgcgctggct

SEQ ID NO: 1471579 - DNA, 15 bp, Homo sapiens
aagatgcgctggctg

SEQ ID NO: 1471580 - DNA, 15 bp, Homo sapiens
agatgcgctggctgg

SEQ ID NO: 1471581 - DNA, 15 bp, Homo sapiens
gatgcgctggctggc

SEQ ID NO: 1471582 - DNA, 15 bp, Homo sapiens
atgcgctggctggcg

SEQ ID NO: 1471583 - DNA, 15 bp, Homo sapiens
tgcgctggctggcgc

SEQ ID NO: 1471584 - DNA, 15 bp, Homo sapiens
gcgctggctggcgcc

SEQ ID NO: 1471585 - DNA, 15 bp, Homo sapiens
cgctggctggcgccg

SEQ ID NO: 1471586 - DNA, 15 bp, Homo sapiens
gctggctggcgccga

SEQ ID NO: 1471587 - DNA, 15 bp, Homo sapiens
ctggctggcgccgac

SEQ ID NO: 1471588 - DNA, 15 bp, Homo sapiens
tggctggcgccgaca

SEQ ID NO: 1471589 - DNA, 15 bp, Homo sapiens
ggctggcgccgacat

SEQ ID NO: 1471590 - DNA, 15 bp, Homo sapiens
gctggcgccgacata

SEQ ID NO: 1471591 - DNA, 15 bp, Homo sapiens
ctggcgccgacataa

SEQ ID NO: 1471592 - DNA, 15 bp, Homo sapiens
tggcgccgacataaa

SEQ ID NO: 1471593 - DNA, 15 bp, Homo sapiens
ggcgccgacataaac

SEQ ID NO: 1471594 - DNA, 15 bp, Homo sapiens
gcgccgacataaact

SEQ ID NO: 1471595 - DNA, 15 bp, Homo sapiens
cgccgacataaactg

SEQ ID NO: 1471596 - DNA, 15 bp, Homo sapiens
gccgacataaactgc

SEQ ID NO: 1471597 - DNA, 15 bp, Homo sapiens
ccgacataaactgct

SEQ ID NO: 1471598 - DNA, 15 bp, Homo sapiens
cgacataaactgcta

SEQ ID NO: 1471599 - DNA, 15 bp, Homo sapiens
gacataaactgctat

SEQ ID NO: 1471600 - DNA, 15 bp, Homo sapiens
acataaactgctatc

SEQ ID NO: 1471601 - DNA, 15 bp, Homo sapiens
cataaactgctatcc

SEQ ID NO: 1471602 - DNA, 15 bp, Homo sapiens
ataaactgctatcct

SEQ ID NO: 1471603 - DNA, 15 bp, Homo sapiens
taaactgctatcctg

SEQ ID NO: 1471604 - DNA, 15 bp, Homo sapiens
aaactgctatcctga

SEQ ID NO: 1471605 - DNA, 15 bp, Homo sapiens
aactgctatcctgat

SEQ ID NO: 1471606 - DNA, 15 bp, Homo sapiens
actgctatcctgatc

SEQ ID NO: 1471607 - DNA, 15 bp, Homo sapiens
ctgctatcctgatct

SEQ ID NO: 1471608 - DNA, 15 bp, Homo sapiens
tgctatcctgatctc

SEQ ID NO: 1471609 - DNA, 15 bp, Homo sapiens
gctatcctgatctcc

SEQ ID NO: 1471610 - DNA, 15 bp, Homo sapiens
ctatcctgatctcca

SEQ ID NO: 1471611 - DNA, 15 bp, Homo sapiens
tatcctgatctccat

SEQ ID NO: 1471612 - DNA, 15 bp, Homo sapiens
atcctgatctccatc

SEQ ID NO: 1471613 - DNA, 15 bp, Homo sapiens
tcctgatctccatca

SEQ ID NO: 1471614 - DNA, 15 bp, Homo sapiens
cctgatctccatcaa

SEQ ID NO: 1471615 - DNA, 15 bp, Homo sapiens
ctgatctccatcaaa

SEQ ID NO: 1471616 - DNA, 15 bp, Homo sapiens
tgatctccatcaaag

SEQ ID NO: 1471617 - DNA, 15 bp, Homo sapiens
gatctccatcaaaga

SEQ ID NO: 1471618 - DNA, 15 bp, Homo sapiens
atctccatcaaagat

SEQ ID NO: 1471619 - DNA, 15 bp, Homo sapiens
tctccatcaaagatg

SEQ ID NO: 1471620 - DNA, 15 bp, Homo sapiens
ctccatcaaagatgt

SEQ ID NO: 1471621 - DNA, 15 bp, Homo sapiens
tccatcaaagatgtg

SEQ ID NO: 1471622 - DNA, 15 bp, Homo sapiens
ccatcaaagatgtgg

SEQ ID NO: 1471623 - DNA, 15 bp, Homo sapiens
catcaaagatgtggg

SEQ ID NO: 1471624 - DNA, 15 bp, Homo sapiens
atcaaagatgtgggc

SEQ ID NO: 1471625 - DNA, 15 bp, Homo sapiens
tcaaagatgtgggcc

SEQ ID NO: 1471626 - DNA, 15 bp, Homo sapiens
caaagatgtgggcct

SEQ ID NO: 1471627 - DNA, 15 bp, Homo sapiens
aaagatgtgggcctt

SEQ ID NO: 1471628 - DNA, 15 bp, Homo sapiens
aagatgtgggccttc

SEQ ID NO: 1471629 - DNA, 15 bp, Homo sapiens
agatgtgggccttct

SEQ ID NO: 1471630 - DNA, 15 bp, Homo sapiens
gatgtgggccttctc

SEQ ID NO: 1471631 - DNA, 15 bp, Homo sapiens
atgtgggccttctca

SEQ ID NO: 1471632 - DNA, 15 bp, Homo sapiens
tgtgggccttctcat

SEQ ID NO: 1471633 - DNA, 15 bp, Homo sapiens
gtgggccttctcatg

SEQ ID NO: 1471634 - DNA, 15 bp, Homo sapiens
tgggccttctcatgc

SEQ ID NO: 1471635 - DNA, 15 bp, Homo sapiens
gggccttctcatgct

SEQ ID NO: 1471636 - DNA, 15 bp, Homo sapiens
ggccttctcatgctg

SEQ ID NO: 1471637 - DNA, 15 bp, Homo sapiens
gccttctcatgctgc

SEQ ID NO: 1471638 - DNA, 15 bp, Homo sapiens
ccttctcatgctgca

SEQ ID NO: 1471639 - DNA, 15 bp, Homo sapiens
cttctcatgctgcag

SEQ ID NO: 1471640 - DNA, 15 bp, Homo sapiens
ttctcatgctgcagt

SEQ ID NO: 1471641 - DNA, 15 bp, Homo sapiens
tctcatgctgcagtt

SEQ ID NO: 1471642 - DNA, 15 bp, Homo sapiens
ctcatgctgcagttt

SEQ ID NO: 1471643 - DNA, 15 bp, Homo sapiens
tcatgctgcagtttc

SEQ ID NO: 1471644 - DNA, 15 bp, Homo sapiens
catgctgcagtttcc

SEQ ID NO: 1471645 - DNA, 15 bp, Homo sapiens
atgctgcagtttcct

SEQ ID NO: 1471646 - DNA, 15 bp, Homo sapiens
tgctgcagtttcctc

SEQ ID NO: 1471647 - DNA, 15 bp, Homo sapiens
gctgcagtttcctca

SEQ ID NO: 1471648 - DNA, 15 bp, Homo sapiens
ctgcagtttcctcaa

SEQ ID NO: 1471649 - DNA, 15 bp, Homo sapiens
tgcagtttcctcaac

SEQ ID NO: 1471650 - DNA, 15 bp, Homo sapiens
gcagtttcctcaact

SEQ ID NO: 1471651 - DNA, 15 bp, Homo sapiens
cagtttcctcaactg

SEQ ID NO: 1471652 - DNA, 15 bp, Homo sapiens
agtttcctcaactgc

SEQ ID NO: 1471653 - DNA, 15 bp, Homo sapiens
gtttcctcaactgca

SEQ ID NO: 1471654 - DNA, 15 bp, Homo sapiens
tttcctcaactgcag

SEQ ID NO: 1471655 - DNA, 15 bp, Homo sapiens
ttcctcaactgcaga

SEQ ID NO: 1471656 - DNA, 15 bp, Homo sapiens
tcctcaactgcagaa

SEQ ID NO: 1471657 - DNA, 15 bp, Homo sapiens
cctcaactgcagaac

SEQ ID NO: 1471658 - DNA, 15 bp, Homo sapiens
ctcaactgcagaaca

SEQ ID NO: 1471659 - DNA, 15 bp, Homo sapiens
tcaactgcagaacag

SEQ ID NO: 1471660 - DNA, 15 bp, Homo sapiens
caactgcagaacagg

SEQ ID NO: 1471661 - DNA, 15 bp, Homo sapiens
aactgcagaacaggg

SEQ ID NO: 1471662 - DNA, 15 bp, Homo sapiens
actgcagaacaggga

SEQ ID NO: 1471663 - DNA, 15 bp, Homo sapiens
ctgcagaacagggag

SEQ ID NO: 1471664 - DNA, 15 bp, Homo sapiens
tgcagaacagggaga

SEQ ID NO: 1471665 - DNA, 15 bp, Homo sapiens
gcagaacagggagat

SEQ ID NO: 1471666 - DNA, 15 bp, Homo sapiens
cagaacagggagatt

SEQ ID NO: 1471667 - DNA, 15 bp, Homo sapiens
agaacagggagattc

SEQ ID NO: 1471668 - DNA, 15 bp, Homo sapiens
gaacagggagattct

SEQ ID NO: 1471669 - DNA, 15 bp, Homo sapiens
aacagggagattctt

SEQ ID NO: 1471670 - DNA, 15 bp, Homo sapiens
acagggagattcttc

SEQ ID NO: 1471671 - DNA, 15 bp, Homo sapiens
tgtcttcctcactgt

SEQ ID NO: 1471672 - DNA, 15 bp, Homo sapiens
gtcttcctcactgtg

SEQ ID NO: 1471673 - DNA, 15 bp, Homo sapiens
tcttcctcactgtgt

SEQ ID NO: 1471674 - DNA, 15 bp, Homo sapiens
cttcctcactgtgta

SEQ ID NO: 1471675 - DNA, 15 bp, Homo sapiens
ttcctcactgtgtat

SEQ ID NO: 1471676 - DNA, 15 bp, Homo sapiens
tcctcactgtgtatc

SEQ ID NO: 1471677 - DNA, 15 bp, Homo sapiens
cctcactgtgtatct

SEQ ID NO: 1471678 - DNA, 15 bp, Homo sapiens
ctcactgtgtatctg

SEQ ID NO: 1471679 - DNA, 15 bp, Homo sapiens
tcactgtgtatctgc

SEQ ID NO: 1471680 - DNA, 15 bp, Homo sapiens
cactgtgtatctgcg

SEQ ID NO: 1471681 - DNA, 15 bp, Homo sapiens
actgtgtatctgcgt

SEQ ID NO: 1471682 - DNA, 15 bp, Homo sapiens
ctgtgtatctgcgtg

SEQ ID NO: 1471683 - DNA, 15 bp, Homo sapiens
tgtgtatctgcgtgg

SEQ ID NO: 1471684 - DNA, 15 bp, Homo sapiens
gtgtatctgcgtggt

SEQ ID NO: 1471685 - DNA, 15 bp, Homo sapiens
tgtatctgcgtggta

SEQ ID NO: 1471686 - DNA, 15 bp, Homo sapiens
gtatctgcgtggtag

SEQ ID NO: 1471687 - DNA, 15 bp, Homo sapiens
tatctgcgtggtaga

SEQ ID NO: 1471688 - DNA, 15 bp, Homo sapiens
atctgcgtggtagaa

SEQ ID NO: 1471689 - DNA, 15 bp, Homo sapiens
tctgcgtggtagaaa

SEQ ID NO: 1471690 - DNA, 15 bp, Homo sapiens
ctgcgtggtagaaag

SEQ ID NO: 1471691 - DNA, 15 bp, Homo sapiens
tgcgtggtagaaaga

SEQ ID NO: 1471692 - DNA, 15 bp, Homo sapiens
gcgtggtagaaagag

SEQ ID NO: 1471693 - DNA, 15 bp, Homo sapiens
cgtggtagaaagagg

SEQ ID NO: 1471694 - DNA, 15 bp, Homo sapiens
gtggtagaaagaggg

SEQ ID NO: 1471695 - DNA, 15 bp, Homo sapiens
tggtagaaagagggc

SEQ ID NO: 1471696 - DNA, 15 bp, Homo sapiens
ggtagaaagagggca

SEQ ID NO: 1471697 - DNA, 15 bp, Homo sapiens
gtagaaagagggcaa

SEQ ID NO: 1471698 - DNA, 15 bp, Homo sapiens
tagaaagagggcaag

SEQ ID NO: 1471699 - DNA, 15 bp, Homo sapiens
agaaagagggcaagc

SEQ ID NO: 1471700 - DNA, 15 bp, Homo sapiens
gaaagagggcaagct

SEQ ID NO: 1471701 - DNA, 15 bp, Homo sapiens
aaagagggcaagcta

SEQ ID NO: 1471702 - DNA, 15 bp, Homo sapiens
aagagggcaagctag

SEQ ID NO: 1471703 - DNA, 15 bp, Homo sapiens
agagggcaagctagc

SEQ ID NO: 1471704 - DNA, 15 bp, Homo sapiens
gagggcaagctagct

SEQ ID NO: 1471705 - DNA, 15 bp, Homo sapiens
agggcaagctagctc

SEQ ID NO: 1471706 - DNA, 15 bp, Homo sapiens
gggcaagctagctct

SEQ ID NO: 1471707 - DNA, 15 bp, Homo sapiens
ggcaagctagctctc

SEQ ID NO: 1471708 - DNA, 15 bp, Homo sapiens
gcaagctagctctct

SEQ ID NO: 1471709 - DNA, 15 bp, Homo sapiens
caagctagctctctt

SEQ ID NO: 1471710 - DNA, 15 bp, Homo sapiens
aagctagctctcttg

SEQ ID NO: 1471711 - DNA, 15 bp, Homo sapiens
agctagctctcttgg

SEQ ID NO: 1471712 - DNA, 15 bp, Homo sapiens
gctagctctcttggg

SEQ ID NO: 1471713 - DNA, 15 bp, Homo sapiens
ctagctctcttgggt

SEQ ID NO: 1471714 - DNA, 15 bp, Homo sapiens
tagctctcttgggtc

SEQ ID NO: 1471715 - DNA, 15 bp, Homo sapiens
agctctcttgggtcc

SEQ ID NO: 1471716 - DNA, 15 bp, Homo sapiens
gctctcttgggtcct

SEQ ID NO: 1471717 - DNA, 15 bp, Homo sapiens
ctctcttgggtcctc

SEQ ID NO: 1471718 - DNA, 15 bp, Homo sapiens
tctcttgggtcctct

SEQ ID NO: 1471719 - DNA, 15 bp, Homo sapiens
ctcttgggtcctctt

SEQ ID NO: 1471720 - DNA, 15 bp, Homo sapiens
tcttgggtcctcttt

SEQ ID NO: 1471721 - DNA, 15 bp, Homo sapiens
cttgggtcctcttta

SEQ ID NO: 1471722 - DNA, 15 bp, Homo sapiens
ttgggtcctctttat

SEQ ID NO: 1471723 - DNA, 15 bp, Homo sapiens
tgggtcctctttatt

SEQ ID NO: 1471724 - DNA, 15 bp, Homo sapiens
gggtcctctttatta

SEQ ID NO: 1471725 - DNA, 15 bp, Homo sapiens
ggtcctctttattag

SEQ ID NO: 1471726 - DNA, 15 bp, Homo sapiens
gtcctctttattagg

SEQ ID NO: 1471727 - DNA, 15 bp, Homo sapiens
tcctctttattaggg

SEQ ID NO: 1471728 - DNA, 15 bp, Homo sapiens
cctctttattagggt

SEQ ID NO: 1471729 - DNA, 15 bp, Homo sapiens
ctctttattagggta

SEQ ID NO: 1471730 - DNA, 15 bp, Homo sapiens
tctttattagggtac

SEQ ID NO: 1471731 - DNA, 15 bp, Homo sapiens
ctttattagggtact

SEQ ID NO: 1471732 - DNA, 15 bp, Homo sapiens
tttattagggtacta

SEQ ID NO: 1471733 - DNA, 15 bp, Homo sapiens
ttattagggtactaa

SEQ ID NO: 1471734 - DNA, 15 bp, Homo sapiens
tattagggtactaat

SEQ ID NO: 1471735 - DNA, 15 bp, Homo sapiens
attagggtactaatc

SEQ ID NO: 1471736 - DNA, 15 bp, Homo sapiens
ttagggtactaatcc

SEQ ID NO: 1471737 - DNA, 15 bp, Homo sapiens
tagggtactaatccc

SEQ ID NO: 1471738 - DNA, 15 bp, Homo sapiens
agggtactaatcccg

SEQ ID NO: 1471739 - DNA, 15 bp, Homo sapiens
gggtactaatcccgc

SEQ ID NO: 1471740 - DNA, 15 bp, Homo sapiens
ggtactaatcccgct

SEQ ID NO: 1471741 - DNA, 15 bp, Homo sapiens
gtactaatcccgctc

SEQ ID NO: 1471742 - DNA, 15 bp, Homo sapiens
tactaatcccgctct

SEQ ID NO: 1471743 - DNA, 15 bp, Homo sapiens
actaatcccgctctg

SEQ ID NO: 1471744 - DNA, 15 bp, Homo sapiens
ctaatcccgctctga

SEQ ID NO: 1471745 - DNA, 15 bp, Homo sapiens
taatcccgctctgaa

SEQ ID NO: 1471746 - DNA, 15 bp, Homo sapiens
aatcccgctctgaag

SEQ ID NO: 1471747 - DNA, 15 bp, Homo sapiens
atcccgctctgaagg

SEQ ID NO: 1471748 - DNA, 15 bp, Homo sapiens
tcccgctctgaaggc

SEQ ID NO: 1471749 - DNA, 15 bp, Homo sapiens
cccgctctgaaggct

SEQ ID NO: 1471750 - DNA, 15 bp, Homo sapiens
ccgctctgaaggctc

SEQ ID NO: 1471751 - DNA, 15 bp, Homo sapiens
cgctctgaaggctcc

SEQ ID NO: 1471752 - DNA, 15 bp, Homo sapiens
gctctgaaggctcca

SEQ ID NO: 1471753 - DNA, 15 bp, Homo sapiens
ctctgaaggctccac

SEQ ID NO: 1471754 - DNA, 15 bp, Homo sapiens
tctgaaggctccacc

SEQ ID NO: 1471755 - DNA, 15 bp, Homo sapiens
ctgaaggctccacct

SEQ ID NO: 1471756 - DNA, 15 bp, Homo sapiens
tgaaggctccacctc

SEQ ID NO: 1471757 - DNA, 15 bp, Homo sapiens
gaaggctccacctcc

SEQ ID NO: 1471758 - DNA, 15 bp, Homo sapiens
aaggctccacctcca

SEQ ID NO: 1471759 - DNA, 15 bp, Homo sapiens
aggctccacctccac

SEQ ID NO: 1471760 - DNA, 15 bp, Homo sapiens
ggctccacctccacg

SEQ ID NO: 1471761 - DNA, 15 bp, Homo sapiens
gctccacctccacga

SEQ ID NO: 1471762 - DNA, 15 bp, Homo sapiens
ctccacctccacgat

SEQ ID NO: 1471763 - DNA, 15 bp, Homo sapiens
tccacctccacgatc

SEQ ID NO: 1471764 - DNA, 15 bp, Homo sapiens
ccacctccacgatca

SEQ ID NO: 1471765 - DNA, 15 bp, Homo sapiens
cacctccacgatcaa

SEQ ID NO: 1471766 - DNA, 15 bp, Homo sapiens
acctccacgatcaaa

SEQ ID NO: 1471767 - DNA, 15 bp, Homo sapiens
cctccacgatcaaat

SEQ ID NO: 1471768 - DNA, 15 bp, Homo sapiens
ctccacgatcaaatc

SEQ ID NO: 1471769 - DNA, 15 bp, Homo sapiens
tccacgatcaaatca

SEQ ID NO: 1471770 - DNA, 15 bp, Homo sapiens
ccacgatcaaatcac

SEQ ID NO: 1471771 - DNA, 15 bp, Homo sapiens
cacgatcaaatcacc

SEQ ID NO: 1471772 - DNA, 15 bp, Homo sapiens
acgatcaaatcaccc

SEQ ID NO: 1471773 - DNA, 15 bp, Homo sapiens
cgatcaaatcacccc

SEQ ID NO: 1471774 - DNA, 15 bp, Homo sapiens
gatcaaatcaccccc

SEQ ID NO: 1471775 - DNA, 15 bp, Homo sapiens
atcaaatcaccccct

SEQ ID NO: 1471776 - DNA, 15 bp, Homo sapiens
tcaaatcaccccctg

SEQ ID NO: 1471777 - DNA, 15 bp, Homo sapiens
caaatcaccccctga

SEQ ID NO: 1471778 - DNA, 15 bp, Homo sapiens
aaatcaccccctgaa

SEQ ID NO: 1471779 - DNA, 15 bp, Homo sapiens
aatcaccccctgaag

SEQ ID NO: 1471780 - DNA, 15 bp, Homo sapiens
atcaccccctgaaga

SEQ ID NO: 1471781 - DNA, 15 bp, Homo sapiens
tcaccccctgaagat

SEQ ID NO: 1471782 - DNA, 15 bp, Homo sapiens
caccccctgaagatc

SEQ ID NO: 1471783 - DNA, 15 bp, Homo sapiens
accccctgaagatcc

SEQ ID NO: 1471784 - DNA, 15 bp, Homo sapiens
ccccctgaagatccc

SEQ ID NO: 1471785 - DNA, 15 bp, Homo sapiens
cccctgaagatccca

SEQ ID NO: 1471786 - DNA, 15 bp, Homo sapiens
ccctgaagatcccac

SEQ ID NO: 1471787 - DNA, 15 bp, Homo sapiens
cctgaagatcccacc

SEQ ID NO: 1471788 - DNA, 15 bp, Homo sapiens
ctgaagatcccacct

SEQ ID NO: 1471789 - DNA, 15 bp, Homo sapiens
tgaagatcccacctc

SEQ ID NO: 1471790 - DNA, 15 bp, Homo sapiens
gaagatcccacctcc

SEQ ID NO: 1471791 - DNA, 15 bp, Homo sapiens
aagatcccacctcct

SEQ ID NO: 1471792 - DNA, 15 bp, Homo sapiens
agatcccacctccta

SEQ ID NO: 1471793 - DNA, 15 bp, Homo sapiens
gatcccacctcctat

SEQ ID NO: 1471794 - DNA, 15 bp, Homo sapiens
atcccacctcctata

SEQ ID NO: 1471795 - DNA, 15 bp, Homo sapiens
tcccacctcctatac

SEQ ID NO: 1471796 - DNA, 15 bp, Homo sapiens
cccacctcctatacc

SEQ ID NO: 1471797 - DNA, 15 bp, Homo sapiens
ccacctcctatacca

SEQ ID NO: 1471798 - DNA, 15 bp, Homo sapiens
cacctcctataccat

SEQ ID NO: 1471799 - DNA, 15 bp, Homo sapiens
acctcctataccatc

SEQ ID NO: 1471800 - DNA, 15 bp, Homo sapiens
cctcctataccatca

SEQ ID NO: 1471801 - DNA, 15 bp, Homo sapiens
ctcctataccatcac

SEQ ID NO: 1471802 - DNA, 15 bp, Homo sapiens
tcctataccatcaca

SEQ ID NO: 1471803 - DNA, 15 bp, Homo sapiens
cctataccatcacat

SEQ ID NO: 1471804 - DNA, 15 bp, Homo sapiens
ctataccatcacatt

SEQ ID NO: 1471805 - DNA, 15 bp, Homo sapiens
tataccatcacattg

SEQ ID NO: 1471806 - DNA, 15 bp, Homo sapiens
ataccatcacattgt

SEQ ID NO: 1471807 - DNA, 15 bp, Homo sapiens
taccatcacattgtc

SEQ ID NO: 1471808 - DNA, 15 bp, Homo sapiens
accatcacattgtcc

SEQ ID NO: 1471809 - DNA, 15 bp, Homo sapiens
ccatcacattgtccg

SEQ ID NO: 1471810 - DNA, 15 bp, Homo sapiens
catcacattgtccgt

SEQ ID NO: 1471811 - DNA, 15 bp, Homo sapiens
atcacattgtccgtt

SEQ ID NO: 1471812 - DNA, 15 bp, Homo sapiens
tcacattgtccgtta

SEQ ID NO: 1471813 - DNA, 15 bp, Homo sapiens
cacattgtccgttag

SEQ ID NO: 1471814 - DNA, 15 bp, Homo sapiens
acattgtccgttagg

SEQ ID NO: 1471815 - DNA, 15 bp, Homo sapiens
cattgtccgttagga

SEQ ID NO: 1471816 - DNA, 15 bp, Homo sapiens
attgtccgttaggat

SEQ ID NO: 1471817 - DNA, 15 bp, Homo sapiens
ttgtccgttaggatt

SEQ ID NO: 1471818 - DNA, 15 bp, Homo sapiens
tgtccgttaggattt

SEQ ID NO: 1471819 - DNA, 15 bp, Homo sapiens
gtccgttaggattta

SEQ ID NO: 1471820 - DNA, 15 bp, Homo sapiens
tccgttaggatttaa

SEQ ID NO: 1471821 - DNA, 15 bp, Homo sapiens
ccgttaggatttaat

SEQ ID NO: 1471822 - DNA, 15 bp, Homo sapiens
cgttaggatttaatg

SEQ ID NO: 1471823 - DNA, 15 bp, Homo sapiens
gttaggatttaatgt

SEQ ID NO: 1471824 - DNA, 15 bp, Homo sapiens
ttaggatttaatgta

SEQ ID NO: 1471825 - DNA, 15 bp, Homo sapiens
taggatttaatgtat

SEQ ID NO: 1471826 - DNA, 15 bp, Homo sapiens
aggatttaatgtatg

SEQ ID NO: 1471827 - DNA, 15 bp, Homo sapiens
ggatttaatgtatga

SEQ ID NO: 1471828 - DNA, 15 bp, Homo sapiens
gatttaatgtatgag

SEQ ID NO: 1471829 - DNA, 15 bp, Homo sapiens
atttaatgtatgagt

SEQ ID NO: 1471830 - DNA, 15 bp, Homo sapiens
tttaatgtatgagtc

SEQ ID NO: 1471831 - DNA, 15 bp, Homo sapiens
ttaatgtatgagtct

SEQ ID NO: 1471832 - DNA, 15 bp, Homo sapiens
taatgtatgagtctg

SEQ ID NO: 1471833 - DNA, 15 bp, Homo sapiens
aatgtatgagtctgg

SEQ ID NO: 1471834 - DNA, 15 bp, Homo sapiens
atgtatgagtctggg

SEQ ID NO: 1471835 - DNA, 15 bp, Homo sapiens
tgtatgagtctgggg

SEQ ID NO: 1471836 - DNA, 15 bp, Homo sapiens
gtatgagtctgggga

SEQ ID NO: 1471837 - DNA, 15 bp, Homo sapiens
tatgagtctggggag

SEQ ID NO: 1471838 - DNA, 15 bp, Homo sapiens
atgagtctggggagg

SEQ ID NO: 1471839 - DNA, 15 bp, Homo sapiens
tgagtctggggaggg

SEQ ID NO: 1471840 - DNA, 15 bp, Homo sapiens
gagtctggggaggga

SEQ ID NO: 1471841 - DNA, 15 bp, Homo sapiens
agtctggggagggac

SEQ ID NO: 1471842 - DNA, 15 bp, Homo sapiens
gtctggggagggaca

SEQ ID NO: 1471843 - DNA, 15 bp, Homo sapiens
tctggggagggacac

SEQ ID NO: 1471844 - DNA, 15 bp, Homo sapiens
ctggggagggacaca

SEQ ID NO: 1471845 - DNA, 15 bp, Homo sapiens
tggggagggacacaa

SEQ ID NO: 1471846 - DNA, 15 bp, Homo sapiens
ggggagggacacaaa

SEQ ID NO: 1471847 - DNA, 15 bp, Homo sapiens
gggagggacacaaac

SEQ ID NO: 1471848 - DNA, 15 bp, Homo sapiens
ggagggacacaaaca

SEQ ID NO: 1471849 - DNA, 15 bp, Homo sapiens
gagggacacaaacac

SEQ ID NO: 1471850 - DNA, 15 bp, Homo sapiens
agggacacaaacact

SEQ ID NO: 1471851 - DNA, 15 bp, Homo sapiens
gggacacaaacactc

SEQ ID NO: 1471852 - DNA, 15 bp, Homo sapiens
ggacacaaacactca

SEQ ID NO: 1471853 - DNA, 15 bp, Homo sapiens
gacacaaacactcac

SEQ ID NO: 1471854 - DNA, 15 bp, Homo sapiens
acacaaacactcact

SEQ ID NO: 1471855 - DNA, 15 bp, Homo sapiens
cacaaacactcactc

SEQ ID NO: 1471856 - DNA, 15 bp, Homo sapiens
acaaacactcactcc

SEQ ID NO: 1471857 - DNA, 15 bp, Homo sapiens
caaacactcactcca

SEQ ID NO: 1471858 - DNA, 15 bp, Homo sapiens
aaacactcactccat

SEQ ID NO: 1471859 - DNA, 15 bp, Homo sapiens
aacactcactccata

SEQ ID NO: 1471860 - DNA, 15 bp, Homo sapiens
acactcactccataa

SEQ ID NO: 1471861 - DNA, 15 bp, Homo sapiens
cactcactccataac

SEQ ID NO: 1471862 - DNA, 15 bp, Homo sapiens
actcactccataaca

SEQ ID NO: 1471863 - DNA, 15 bp, Homo sapiens
ctcactccataacaa

SEQ ID NO: 1471864 - DNA, 15 bp, Homo sapiens
tcactccataacaac

SEQ ID NO: 1471865 - DNA, 15 bp, Homo sapiens
cactccataacaaca

SEQ ID NO: 1471866 - DNA, 15 bp, Homo sapiens
actccataacaacat

SEQ ID NO: 1471867 - DNA, 15 bp, Homo sapiens
ctccataacaacatg

SEQ ID NO: 1471868 - DNA, 15 bp, Homo sapiens
tccataacaacatga

SEQ ID NO: 1471869 - DNA, 15 bp, Homo sapiens
ccataacaacatgac

SEQ ID NO: 1471870 - DNA, 15 bp, Homo sapiens
cataacaacatgaca

SEQ ID NO: 1471871 - DNA, 15 bp, Homo sapiens
ataacaacatgacag

SEQ ID NO: 1471872 - DNA, 15 bp, Homo sapiens
taacaacatgacagc

SEQ ID NO: 1471873 - DNA, 15 bp, Homo sapiens
aacaacatgacagct

SEQ ID NO: 1471874 - DNA, 15 bp, Homo sapiens
acaacatgacagctg

SEQ ID NO: 1471875 - DNA, 15 bp, Homo sapiens
caacatgacagctgg

SEQ ID NO: 1471876 - DNA, 15 bp, Homo sapiens
aacatgacagctggc

SEQ ID NO: 1471877 - DNA, 15 bp, Homo sapiens
acatgacagctggca

SEQ ID NO: 1471878 - DNA, 15 bp, Homo sapiens
catgacagctggcac

SEQ ID NO: 1471879 - DNA, 15 bp, Homo sapiens
atgacagctggcacc

SEQ ID NO: 1471880 - DNA, 15 bp, Homo sapiens
tgacagctggcacca

SEQ ID NO: 1471881 - DNA, 15 bp, Homo sapiens
gacagctggcaccat

SEQ ID NO: 1471882 - DNA, 15 bp, Homo sapiens
acagctggcaccatg

SEQ ID NO: 1471883 - DNA, 15 bp, Homo sapiens
cagctggcaccatgg

SEQ ID NO: 1471884 - DNA, 15 bp, Homo sapiens
gctggcaccatggca

SEQ ID NO: 1471885 - DNA, 15 bp, Homo sapiens
ctggcaccatggcac

SEQ ID NO: 1471886 - DNA, 15 bp, Homo sapiens
tggcaccatggcaca

SEQ ID NO: 1471887 - DNA, 15 bp, Homo sapiens
ggcaccatggcacaa

SEQ ID NO: 1471888 - DNA, 15 bp, Homo sapiens
gcaccatggcacaat

SEQ ID NO: 1471889 - DNA, 15 bp, Homo sapiens
caccatggcacaatt

SEQ ID NO: 1471890 - DNA, 15 bp, Homo sapiens
accatggcacaatta

SEQ ID NO: 1471891 - DNA, 15 bp, Homo sapiens
ccatggcacaattaa

SEQ ID NO: 1471892 - DNA, 15 bp, Homo sapiens
catggcacaattaaa

SEQ ID NO: 1471893 - DNA, 15 bp, Homo sapiens
atggcacaattaaag

SEQ ID NO: 1471894 - DNA, 15 bp, Homo sapiens
tggcacaattaaaga

SEQ ID NO: 1471895 - DNA, 15 bp, Homo sapiens
ggcacaattaaagag

SEQ ID NO: 1471896 - DNA, 15 bp, Homo sapiens
gcacaattaaagaga

SEQ ID NO: 1471897 - DNA, 15 bp, Homo sapiens
cacaattaaagagaa

SEQ ID NO: 1471898 - DNA, 15 bp, Homo sapiens
acaattaaagagaag

SEQ ID NO: 1471899 - DNA, 15 bp, Homo sapiens
caattaaagagaaga

SEQ ID NO: 1471900 - DNA, 15 bp, Homo sapiens
aattaaagagaagag

SEQ ID NO: 1471901 - DNA, 15 bp, Homo sapiens
attaaagagaagaga

SEQ ID NO: 1471902 - DNA, 15 bp, Homo sapiens
ttaaagagaagagag

SEQ ID NO: 1471903 - DNA, 15 bp, Homo sapiens
taaagagaagagagg

SEQ ID NO: 1471904 - DNA, 15 bp, Homo sapiens
aaagagaagagagga

SEQ ID NO: 1471905 - DNA, 15 bp, Homo sapiens
aagagaagagaggag

SEQ ID NO: 1471906 - DNA, 15 bp, Homo sapiens
agagaagagaggagc

SEQ ID NO: 1471907 - DNA, 15 bp, Homo sapiens
gagaagagaggagca

SEQ ID NO: 1471908 - DNA, 15 bp, Homo sapiens
agaagagaggagcaa

SEQ ID NO: 1471909 - DNA, 15 bp, Homo sapiens
gaagagaggagcaag

SEQ ID NO: 1471910 - DNA, 15 bp, Homo sapiens
aagagaggagcaagt

SEQ ID NO: 1471911 - DNA, 15 bp, Homo sapiens
agagaggagcaagtg

SEQ ID NO: 1471912 - DNA, 15 bp, Homo sapiens
gagaggagcaagtgg

SEQ ID NO: 1471913 - DNA, 15 bp, Homo sapiens
agaggagcaagtggg

SEQ ID NO: 1471914 - DNA, 15 bp, Homo sapiens
gaggagcaagtgggg

SEQ ID NO: 1471915 - DNA, 15 bp, Homo sapiens
aggagcaagtggggg

SEQ ID NO: 1471916 - DNA, 15 bp, Homo sapiens
ggagcaagtgggggc

SEQ ID NO: 1471917 - DNA, 15 bp, Homo sapiens
gagcaagtgggggct

SEQ ID NO: 1471918 - DNA, 15 bp, Homo sapiens
agcaagtgggggctc

SEQ ID NO: 1471919 - DNA, 15 bp, Homo sapiens
gcaagtgggggctca

SEQ ID NO: 1471920 - DNA, 15 bp, Homo sapiens
caagtgggggctcag

SEQ ID NO: 1471921 - DNA, 15 bp, Homo sapiens
aagtgggggctcagg

SEQ ID NO: 1471922 - DNA, 15 bp, Homo sapiens
agtgggggctcaggc

SEQ ID NO: 1471923 - DNA, 15 bp, Homo sapiens
gtgggggctcaggca

SEQ ID NO: 1471924 - DNA, 15 bp, Homo sapiens
tgggggctcaggcag

SEQ ID NO: 1471925 - DNA, 15 bp, Homo sapiens
gggggctcaggcagt

SEQ ID NO: 1471926 - DNA, 15 bp, Homo sapiens
ggggctcaggcagtg

SEQ ID NO: 1471927 - DNA, 15 bp, Homo sapiens
gggctcaggcagtgt

SEQ ID NO: 1471928 - DNA, 15 bp, Homo sapiens
ggctcaggcagtgta

SEQ ID NO: 1471929 - DNA, 15 bp, Homo sapiens
gctcaggcagtgtag

SEQ ID NO: 1471930 - DNA, 15 bp, Homo sapiens
ctcaggcagtgtagg

SEQ ID NO: 1471931 - DNA, 15 bp, Homo sapiens
tcaggcagtgtaggc

SEQ ID NO: 1471932 - DNA, 15 bp, Homo sapiens
caggcagtgtaggcg

SEQ ID NO: 1471933 - DNA, 15 bp, Homo sapiens
aggcagtgtaggcgg

SEQ ID NO: 1471934 - DNA, 15 bp, Homo sapiens
ggcagtgtaggcggg

SEQ ID NO: 1471935 - DNA, 15 bp, Homo sapiens
gcagtgtaggcggga

SEQ ID NO: 1471936 - DNA, 15 bp, Homo sapiens
cagtgtaggcgggat

SEQ ID NO: 1471937 - DNA, 15 bp, Homo sapiens
agtgtaggcgggatg

SEQ ID NO: 1471938 - DNA, 15 bp, Homo sapiens
gtgtaggcgggatgg

SEQ ID NO: 1471939 - DNA, 15 bp, Homo sapiens
tgtaggcgggatgga

SEQ ID NO: 1471940 - DNA, 15 bp, Homo sapiens
gtaggcgggatggaa

SEQ ID NO: 1471941 - DNA, 15 bp, Homo sapiens
taggcgggatggaag

SEQ ID NO: 1471942 - DNA, 15 bp, Homo sapiens
aggcgggatggaagc

SEQ ID NO: 1471943 - DNA, 15 bp, Homo sapiens
ggcgggatggaagct

SEQ ID NO: 1471944 - DNA, 15 bp, Homo sapiens
gcgggatggaagctc

SEQ ID NO: 1471945 - DNA, 15 bp, Homo sapiens
cgggatggaagctcc

SEQ ID NO: 1471946 - DNA, 15 bp, Homo sapiens
gggatggaagctccc

SEQ ID NO: 1471947 - DNA, 15 bp, Homo sapiens
ggatggaagctccct

SEQ ID NO: 1471948 - DNA, 15 bp, Homo sapiens
gatggaagctccctg

SEQ ID NO: 1471949 - DNA, 15 bp, Homo sapiens
atggaagctccctgt

SEQ ID NO: 1471950 - DNA, 15 bp, Homo sapiens
tggaagctccctgtg

SEQ ID NO: 1471951 - DNA, 15 bp, Homo sapiens
ggaagctccctgtgg

SEQ ID NO: 1471952 - DNA, 15 bp, Homo sapiens
gaagctccctgtggg

SEQ ID NO: 1471953 - DNA, 15 bp, Homo sapiens
aagctccctgtgggc

SEQ ID NO: 1471954 - DNA, 15 bp, Homo sapiens
agctccctgtgggct

SEQ ID NO: 1471955 - DNA, 15 bp, Homo sapiens
gctccctgtgggctt

SEQ ID NO: 1471956 - DNA, 15 bp, Homo sapiens
ctccctgtgggcttg

SEQ ID NO: 1471957 - DNA, 15 bp, Homo sapiens
tccctgtgggcttgg

SEQ ID NO: 1471958 - DNA, 15 bp, Homo sapiens
ccctgtgggcttgga

SEQ ID NO: 1471959 - DNA, 15 bp, Homo sapiens
cctgtgggcttggac

SEQ ID NO: 1471960 - DNA, 15 bp, Homo sapiens
ctgtgggcttggact

SEQ ID NO: 1471961 - DNA, 15 bp, Homo sapiens
tgtgggcttggactc

SEQ ID NO: 1471962 - DNA, 15 bp, Homo sapiens
gtgggcttggactca

SEQ ID NO: 1471963 - DNA, 15 bp, Homo sapiens
tgggcttggactcat

SEQ ID NO: 1471964 - DNA, 15 bp, Homo sapiens
gggcttggactcatg

SEQ ID NO: 1471965 - DNA, 15 bp, Homo sapiens
ggcttggactcatgt

SEQ ID NO: 1471966 - DNA, 15 bp, Homo sapiens
gcttggactcatgta

SEQ ID NO: 1471967 - DNA, 15 bp, Homo sapiens
cttggactcatgtag

SEQ ID NO: 1471968 - DNA, 15 bp, Homo sapiens
ttggactcatgtagg

SEQ ID NO: 1471969 - DNA, 15 bp, Homo sapiens
tggactcatgtagga

SEQ ID NO: 1471970 - DNA, 15 bp, Homo sapiens
ggactcatgtaggag

SEQ ID NO: 1471971 - DNA, 15 bp, Homo sapiens
gactcatgtaggagg

SEQ ID NO: 1471972 - DNA, 15 bp, Homo sapiens
actcatgtaggaggg

SEQ ID NO: 1471973 - DNA, 15 bp, Homo sapiens
ctcatgtaggagggc

SEQ ID NO: 1471974 - DNA, 15 bp, Homo sapiens
tcatgtaggagggct

SEQ ID NO: 1471975 - DNA, 15 bp, Homo sapiens
catgtaggagggctt

SEQ ID NO: 1471976 - DNA, 15 bp, Homo sapiens
atgtaggagggcttc

SEQ ID NO: 1471977 - DNA, 15 bp, Homo sapiens
tgtaggagggcttca

SEQ ID NO: 1471978 - DNA, 15 bp, Homo sapiens
gtaggagggcttcat

SEQ ID NO: 1471979 - DNA, 15 bp, Homo sapiens
taggagggcttcatg

SEQ ID NO: 1471980 - DNA, 15 bp, Homo sapiens
aggagggcttcatgg

SEQ ID NO: 1471981 - DNA, 15 bp, Homo sapiens
ggagggcttcatgga

SEQ ID NO: 1471982 - DNA, 15 bp, Homo sapiens
gagggcttcatggag

SEQ ID NO: 1471983 - DNA, 15 bp, Homo sapiens
agggcttcatggagg

SEQ ID NO: 1471984 - DNA, 15 bp, Homo sapiens
gggcttcatggagga

SEQ ID NO: 1471985 - DNA, 15 bp, Homo sapiens
ggcttcatggaggag

SEQ ID NO: 1471986 - DNA, 15 bp, Homo sapiens
gcttcatggaggagg

SEQ ID NO: 1471987 - DNA, 15 bp, Homo sapiens
cttcatggaggaggt

SEQ ID NO: 1471988 - DNA, 15 bp, Homo sapiens
ttcatggaggaggta

SEQ ID NO: 1471989 - DNA, 15 bp, Homo sapiens
tcatggaggaggtac

SEQ ID NO: 1471990 - DNA, 15 bp, Homo sapiens
catggaggaggtaca

SEQ ID NO: 1471991 - DNA, 15 bp, Homo sapiens
atggaggaggtacat

SEQ ID NO: 1471992 - DNA, 15 bp, Homo sapiens
tggaggaggtacatt

SEQ ID NO: 1471993 - DNA, 15 bp, Homo sapiens
ggaggaggtacattg

SEQ ID NO: 1471994 - DNA, 15 bp, Homo sapiens
gaggaggtacattgt

SEQ ID NO: 1471995 - DNA, 15 bp, Homo sapiens
aggaggtacattgtg

SEQ ID NO: 1471996 - DNA, 15 bp, Homo sapiens
ggaggtacattgtgg

SEQ ID NO: 1471997 - DNA, 15 bp, Homo sapiens
gaggtacattgtggt

SEQ ID NO: 1471998 - DNA, 15 bp, Homo sapiens
aggtacattgtggtg

SEQ ID NO: 1471999 - DNA, 15 bp, Homo sapiens
ggtacattgtggtgc

SEQ ID NO: 1472000 - DNA, 15 bp, Homo sapiens
gtacattgtggtgca

SEQ ID NO: 1472001 - DNA, 15 bp, Homo sapiens
tacattgtggtgcag

SEQ ID NO: 1472002 - DNA, 15 bp, Homo sapiens
acattgtggtgcagg

SEQ ID NO: 1472003 - DNA, 15 bp, Homo sapiens
cattgtggtgcagga

SEQ ID NO: 1472004 - DNA, 15 bp, Homo sapiens
attgtggtgcaggaa

SEQ ID NO: 1472005 - DNA, 15 bp, Homo sapiens
ttgtggtgcaggaag

SEQ ID NO: 1472006 - DNA, 15 bp, Homo sapiens
tgtggtgcaggaagg

SEQ ID NO: 1472007 - DNA, 15 bp, Homo sapiens
gtggtgcaggaaggc

SEQ ID NO: 1472008 - DNA, 15 bp, Homo sapiens
tggtgcaggaaggcc

SEQ ID NO: 1472009 - DNA, 15 bp, Homo sapiens
ggtgcaggaaggccc

SEQ ID NO: 1472010 - DNA, 15 bp, Homo sapiens
gtgcaggaaggccca

SEQ ID NO: 1472011 - DNA, 15 bp, Homo sapiens
tgcaggaaggcccat

SEQ ID NO: 1472012 - DNA, 15 bp, Homo sapiens
gcaggaaggcccatc

SEQ ID NO: 1472013 - DNA, 15 bp, Homo sapiens
caggaaggcccatct

SEQ ID NO: 1472014 - DNA, 15 bp, Homo sapiens
aggaaggcccatctc

SEQ ID NO: 1472015 - DNA, 15 bp, Homo sapiens
ggaaggcccatctcc

SEQ ID NO: 1472016 - DNA, 15 bp, Homo sapiens
gaaggcccatctcca

SEQ ID NO: 1472017 - DNA, 15 bp, Homo sapiens
aaggcccatctccat

SEQ ID NO: 1472018 - DNA, 15 bp, Homo sapiens
aggcccatctccatg

SEQ ID NO: 1472019 - DNA, 15 bp, Homo sapiens
ggcccatctccatgg

SEQ ID NO: 1472020 - DNA, 15 bp, Homo sapiens
gcccatctccatggg

SEQ ID NO: 1472021 - DNA, 15 bp, Homo sapiens
cccatctccatgggt

SEQ ID NO: 1472022 - DNA, 15 bp, Homo sapiens
ccatctccatgggtg

SEQ ID NO: 1472023 - DNA, 15 bp, Homo sapiens
catctccatgggtgt

SEQ ID NO: 1472024 - DNA, 15 bp, Homo sapiens
atctccatgggtgtc

SEQ ID NO: 1472025 - DNA, 15 bp, Homo sapiens
tctccatgggtgtct

SEQ ID NO: 1472026 - DNA, 15 bp, Homo sapiens
ctccatgggtgtcta

SEQ ID NO: 1472027 - DNA, 15 bp, Homo sapiens
tccatgggtgtctac

SEQ ID NO: 1472028 - DNA, 15 bp, Homo sapiens
ccatgggtgtctacg

SEQ ID NO: 1472029 - DNA, 15 bp, Homo sapiens
catgggtgtctacgt

SEQ ID NO: 1472030 - DNA, 15 bp, Homo sapiens
atgggtgtctacgtc

SEQ ID NO: 1472031 - DNA, 15 bp, Homo sapiens
tgggtgtctacgtct

SEQ ID NO: 1472032 - DNA, 15 bp, Homo sapiens
gggtgtctacgtctc

SEQ ID NO: 1472033 - DNA, 15 bp, Homo sapiens
ggtgtctacgtctcc

SEQ ID NO: 1472034 - DNA, 15 bp, Homo sapiens
gtgtctacgtctcca

SEQ ID NO: 1472035 - DNA, 15 bp, Homo sapiens
tgtctacgtctccag

SEQ ID NO: 1472036 - DNA, 15 bp, Homo sapiens
gtctacgtctccagg

SEQ ID NO: 1472037 - DNA, 15 bp, Homo sapiens
tctacgtctccaggt

SEQ ID NO: 1472038 - DNA, 15 bp, Homo sapiens
ctacgtctccaggtg

SEQ ID NO: 1472039 - DNA, 15 bp, Homo sapiens
tacgtctccaggtga

SEQ ID NO: 1472040 - DNA, 15 bp, Homo sapiens
acgtctccaggtgat

SEQ ID NO: 1472041 - DNA, 15 bp, Homo sapiens
cgtctccaggtgatg

SEQ ID NO: 1472042 - DNA, 15 bp, Homo sapiens
gtctccaggtgatga

SEQ ID NO: 1472043 - DNA, 15 bp, Homo sapiens
tctccaggtgatgag

SEQ ID NO: 1472044 - DNA, 15 bp, Homo sapiens
ctccaggtgatgagt

SEQ ID NO: 1472045 - DNA, 15 bp, Homo sapiens
tccaggtgatgagtc

SEQ ID NO: 1472046 - DNA, 15 bp, Homo sapiens
ccaggtgatgagtca

SEQ ID NO: 1472047 - DNA, 15 bp, Homo sapiens
caggtgatgagtcaa

SEQ ID NO: 1472048 - DNA, 15 bp, Homo sapiens
aggtgatgagtcaat

SEQ ID NO: 1472049 - DNA, 15 bp, Homo sapiens
ggtgatgagtcaatg

SEQ ID NO: 1472050 - DNA, 15 bp, Homo sapiens
gtgatgagtcaatgt

SEQ ID NO: 1472051 - DNA, 15 bp, Homo sapiens
tgatgagtcaatgtc

SEQ ID NO: 1472052 - DNA, 15 bp, Homo sapiens
gatgagtcaatgtct

SEQ ID NO: 1472053 - DNA, 15 bp, Homo sapiens
atgagtcaatgtctt

SEQ ID NO: 1472054 - DNA, 15 bp, Homo sapiens
tgagtcaatgtcttt

SEQ ID NO: 1472055 - DNA, 15 bp, Homo sapiens
gagtcaatgtctttg

SEQ ID NO: 1472056 - DNA, 15 bp, Homo sapiens
agtcaatgtctttgc

SEQ ID NO: 1472057 - DNA, 15 bp, Homo sapiens
gtcaatgtctttgca

SEQ ID NO: 1472058 - DNA, 15 bp, Homo sapiens
tcaatgtctttgcaa

SEQ ID NO: 1472059 - DNA, 15 bp, Homo sapiens
caatgtctttgcaaa

SEQ ID NO: 1472060 - DNA, 15 bp, Homo sapiens
aatgtctttgcaaac

SEQ ID NO: 1472061 - DNA, 15 bp, Homo sapiens
atgtctttgcaaaca

SEQ ID NO: 1472062 - DNA, 15 bp, Homo sapiens
tgtctttgcaaacat

SEQ ID NO: 1472063 - DNA, 15 bp, Homo sapiens
gtctttgcaaacatc

SEQ ID NO: 1472064 - DNA, 15 bp, Homo sapiens
tctttgcaaacatca

SEQ ID NO: 1472065 - DNA, 15 bp, Homo sapiens
ctttgcaaacatcag

SEQ ID NO: 1472066 - DNA, 15 bp, Homo sapiens
tttgcaaacatcaga

SEQ ID NO: 1472067 - DNA, 15 bp, Homo sapiens
ttgcaaacatcagaa

SEQ ID NO: 1472068 - DNA, 15 bp, Homo sapiens
tgcaaacatcagaaa

SEQ ID NO: 1472069 - DNA, 15 bp, Homo sapiens
gcaaacatcagaaac

SEQ ID NO: 1472070 - DNA, 15 bp, Homo sapiens
caaacatcagaaacc

SEQ ID NO: 1472071 - DNA, 15 bp, Homo sapiens
aaacatcagaaaccc

SEQ ID NO: 1472072 - DNA, 15 bp, Homo sapiens
aacatcagaaaccca

SEQ ID NO: 1472073 - DNA, 15 bp, Homo sapiens
acatcagaaacccaa

SEQ ID NO: 1472074 - DNA, 15 bp, Homo sapiens
catcagaaacccaag

SEQ ID NO: 1472075 - DNA, 15 bp, Homo sapiens
atcagaaacccaaga

SEQ ID NO: 1472076 - DNA, 15 bp, Homo sapiens
tcagaaacccaagaa

SEQ ID NO: 1472077 - DNA, 15 bp, Homo sapiens
cagaaacccaagaag

SEQ ID NO: 1472078 - DNA, 15 bp, Homo sapiens
agaaacccaagaagc

SEQ ID NO: 1472079 - DNA, 15 bp, Homo sapiens
gaaacccaagaagca

SEQ ID NO: 1472080 - DNA, 15 bp, Homo sapiens
aaacccaagaagcat

SEQ ID NO: 1472081 - DNA, 15 bp, Homo sapiens
aacccaagaagcatg

SEQ ID NO: 1472082 - DNA, 15 bp, Homo sapiens
acccaagaagcatgg

SEQ ID NO: 1472083 - DNA, 15 bp, Homo sapiens
cccaagaagcatggt

SEQ ID NO: 1472084 - DNA, 15 bp, Homo sapiens
ccaagaagcatggtg

SEQ ID NO: 1472085 - DNA, 15 bp, Homo sapiens
caagaagcatggtga

SEQ ID NO: 1472086 - DNA, 15 bp, Homo sapiens
aagaagcatggtgag

SEQ ID NO: 1472087 - DNA, 15 bp, Homo sapiens
agaagcatggtgagc

SEQ ID NO: 1472088 - DNA, 15 bp, Homo sapiens
gaagcatggtgagca

SEQ ID NO: 1472089 - DNA, 15 bp, Homo sapiens
aagcatggtgagcag

SEQ ID NO: 1472090 - DNA, 15 bp, Homo sapiens
agcatggtgagcagg

SEQ ID NO: 1472091 - DNA, 15 bp, Homo sapiens
gcatggtgagcagga

SEQ ID NO: 1472092 - DNA, 15 bp, Homo sapiens
catggtgagcaggaa

SEQ ID NO: 1472093 - DNA, 15 bp, Homo sapiens
atggtgagcaggaac

SEQ ID NO: 1472094 - DNA, 15 bp, Homo sapiens
tggtgagcaggaaca

SEQ ID NO: 1472095 - DNA, 15 bp, Homo sapiens
ggtgagcaggaacac

SEQ ID NO: 1472096 - DNA, 15 bp, Homo sapiens
gtgagcaggaacact

SEQ ID NO: 1472097 - DNA, 15 bp, Homo sapiens
tgagcaggaacacta

SEQ ID NO: 1472098 - DNA, 15 bp, Homo sapiens
gagcaggaacactat

SEQ ID NO: 1472099 - DNA, 15 bp, Homo sapiens
agcaggaacactatg

SEQ ID NO: 1472100 - DNA, 15 bp, Homo sapiens
gcaggaacactatgg

SEQ ID NO: 1472101 - DNA, 15 bp, Homo sapiens
caggaacactatggg

SEQ ID NO: 1472102 - DNA, 15 bp, Homo sapiens
aggaacactatgggt

SEQ ID NO: 1472103 - DNA, 15 bp, Homo sapiens
ggaacactatgggta

SEQ ID NO: 1472104 - DNA, 15 bp, Homo sapiens
gaacactatgggtaa

SEQ ID NO: 1472105 - DNA, 15 bp, Homo sapiens
aacactatgggtaat

SEQ ID NO: 1472106 - DNA, 15 bp, Homo sapiens
acactatgggtaatc

SEQ ID NO: 1472107 - DNA, 15 bp, Homo sapiens
cactatgggtaatct

SEQ ID NO: 1472108 - DNA, 15 bp, Homo sapiens
actatgggtaatctt

SEQ ID NO: 1472109 - DNA, 15 bp, Homo sapiens
ctatgggtaatctta

SEQ ID NO: 1472110 - DNA, 15 bp, Homo sapiens
tatgggtaatcttag

SEQ ID NO: 1472111 - DNA, 15 bp, Homo sapiens
atgggtaatcttagg

SEQ ID NO: 1472112 - DNA, 15 bp, Homo sapiens
tgggtaatcttagga

SEQ ID NO: 1472113 - DNA, 15 bp, Homo sapiens
gggtaatcttaggaa

SEQ ID NO: 1472114 - DNA, 15 bp, Homo sapiens
ggtaatcttaggaaa

SEQ ID NO: 1472115 - DNA, 15 bp, Homo sapiens
gtaatcttaggaaat

SEQ ID NO: 1472116 - DNA, 15 bp, Homo sapiens
taatcttaggaaatt

SEQ ID NO: 1472117 - DNA, 15 bp, Homo sapiens
aatcttaggaaattt

SEQ ID NO: 1472118 - DNA, 15 bp, Homo sapiens
atcttaggaaatttg

SEQ ID NO: 1472119 - DNA, 15 bp, Homo sapiens
tcttaggaaatttgt

SEQ ID NO: 1472120 - DNA, 15 bp, Homo sapiens
cttaggaaatttgtg

SEQ ID NO: 1472121 - DNA, 15 bp, Homo sapiens
ttaggaaatttgtgc

SEQ ID NO: 1472122 - DNA, 15 bp, Homo sapiens
taggaaatttgtgca

SEQ ID NO: 1472123 - DNA, 15 bp, Homo sapiens
aggaaatttgtgcac

SEQ ID NO: 1472124 - DNA, 15 bp, Homo sapiens
ggaaatttgtgcaca

SEQ ID NO: 1472125 - DNA, 15 bp, Homo sapiens
gaaatttgtgcacaa

SEQ ID NO: 1472126 - DNA, 15 bp, Homo sapiens
aaatttgtgcacaag

SEQ ID NO: 1472127 - DNA, 15 bp, Homo sapiens
aatttgtgcacaagg

SEQ ID NO: 1472128 - DNA, 15 bp, Homo sapiens
atttgtgcacaagga

SEQ ID NO: 1472129 - DNA, 15 bp, Homo sapiens
tttgtgcacaaggat

SEQ ID NO: 1472130 - DNA, 15 bp, Homo sapiens
ttgtgcacaaggatg

SEQ ID NO: 1472131 - DNA, 15 bp, Homo sapiens
tgtgcacaaggatgg

SEQ ID NO: 1472132 - DNA, 15 bp, Homo sapiens
gtgcacaaggatgga

SEQ ID NO: 1472133 - DNA, 15 bp, Homo sapiens
tgcacaaggatggag

SEQ ID NO: 1472134 - DNA, 15 bp, Homo sapiens
gcacaaggatggaga

SEQ ID NO: 1472135 - DNA, 15 bp, Homo sapiens
cacaaggatggagac

SEQ ID NO: 1472136 - DNA, 15 bp, Homo sapiens
acaaggatggagaca

SEQ ID NO: 1472137 - DNA, 15 bp, Homo sapiens
caaggatggagacat

SEQ ID NO: 1472138 - DNA, 15 bp, Homo sapiens
aaggatggagacatt

SEQ ID NO: 1472139 - DNA, 15 bp, Homo sapiens
aggatggagacattc

SEQ ID NO: 1472140 - DNA, 15 bp, Homo sapiens
ggatggagacattcc

SEQ ID NO: 1472141 - DNA, 15 bp, Homo sapiens
gatggagacattcca

SEQ ID NO: 1472142 - DNA, 15 bp, Homo sapiens
atggagacattccag

SEQ ID NO: 1472143 - DNA, 15 bp, Homo sapiens
tggagacattccaga

SEQ ID NO: 1472144 - DNA, 15 bp, Homo sapiens
ggagacattccagaa

SEQ ID NO: 1472145 - DNA, 15 bp, Homo sapiens
gagacattccagaaa

SEQ ID NO: 1472146 - DNA, 15 bp, Homo sapiens
agacattccagaaaa

SEQ ID NO: 1472147 - DNA, 15 bp, Homo sapiens
gacattccagaaaaa

SEQ ID NO: 1472148 - DNA, 15 bp, Homo sapiens
acattccagaaaaag

SEQ ID NO: 1472149 - DNA, 15 bp, Homo sapiens
cattccagaaaaaga

SEQ ID NO: 1472150 - DNA, 15 bp, Homo sapiens
attccagaaaaagaa

SEQ ID NO: 1472151 - DNA, 15 bp, Homo sapiens
ttccagaaaaagaaa

SEQ ID NO: 1472152 - DNA, 15 bp, Homo sapiens
tccagaaaaagaaat

SEQ ID NO: 1472153 - DNA, 15 bp, Homo sapiens
ccagaaaaagaaata

SEQ ID NO: 1472154 - DNA, 15 bp, Homo sapiens
cagaaaaagaaataa

SEQ ID NO: 1472155 - DNA, 15 bp, Homo sapiens
agaaaaagaaataaa

SEQ ID NO: 1472156 - DNA, 15 bp, Homo sapiens
gaaaaagaaataaaa

SEQ ID NO: 1472157 - DNA, 15 bp, Homo sapiens
aaaaagaaataaaag

SEQ ID NO: 1472158 - DNA, 15 bp, Homo sapiens
aaaagaaataaaaga

SEQ ID NO: 1472159 - DNA, 15 bp, Homo sapiens
aaagaaataaaagag

SEQ ID NO: 1472160 - DNA, 15 bp, Homo sapiens
aagaaataaaagagg

SEQ ID NO: 1472161 - DNA, 15 bp, Homo sapiens
agaaataaaagaggt

SEQ ID NO: 1472162 - DNA, 15 bp, Homo sapiens
gaaataaaagaggtg

SEQ ID NO: 1472163 - DNA, 15 bp, Homo sapiens
aaataaaagaggtgc

SEQ ID NO: 1472164 - DNA, 15 bp, Homo sapiens
aataaaagaggtgca

SEQ ID NO: 1472165 - DNA, 15 bp, Homo sapiens
ataaaagaggtgcat

SEQ ID NO: 1472166 - DNA, 15 bp, Homo sapiens
taaaagaggtgcatt

SEQ ID NO: 1472167 - DNA, 15 bp, Homo sapiens
aaaagaggtgcattc

SEQ ID NO: 1472168 - DNA, 15 bp, Homo sapiens
aaagaggtgcattcc

SEQ ID NO: 1472169 - DNA, 15 bp, Homo sapiens
aagaggtgcattcct

SEQ ID NO: 1472170 - DNA, 15 bp, Homo sapiens
agaggtgcattcctg

SEQ ID NO: 1472171 - DNA, 15 bp, Homo sapiens
gaggtgcattcctgc

SEQ ID NO: 1472172 - DNA, 15 bp, Homo sapiens
aggtgcattcctgct

SEQ ID NO: 1472173 - DNA, 15 bp, Homo sapiens
ggtgcattcctgctg

SEQ ID NO: 1472174 - DNA, 15 bp, Homo sapiens
gtgcattcctgctgc

SEQ ID NO: 1472175 - DNA, 15 bp, Homo sapiens
tgcattcctgctgcc

SEQ ID NO: 1472176 - DNA, 15 bp, Homo sapiens
gcattcctgctgcca

SEQ ID NO: 1472177 - DNA, 15 bp, Homo sapiens
cattcctgctgccat

SEQ ID NO: 1472178 - DNA, 15 bp, Homo sapiens
attcctgctgccata

SEQ ID NO: 1472179 - DNA, 15 bp, Homo sapiens
ttcctgctgccatat

SEQ ID NO: 1472180 - DNA, 15 bp, Homo sapiens
tcctgctgccatata

SEQ ID NO: 1472181 - DNA, 15 bp, Homo sapiens
cctgctgccatatat

SEQ ID NO: 1472182 - DNA, 15 bp, Homo sapiens
ctgctgccatatatg

SEQ ID NO: 1472183 - DNA, 15 bp, Homo sapiens
tgctgccatatatgt

SEQ ID NO: 1472184 - DNA, 15 bp, Homo sapiens
gctgccatatatgtg

SEQ ID NO: 1472185 - DNA, 15 bp, Homo sapiens
ctgccatatatgtgc

SEQ ID NO: 1472186 - DNA, 15 bp, Homo sapiens
tgccatatatgtgct

SEQ ID NO: 1472187 - DNA, 15 bp, Homo sapiens
gccatatatgtgctg

SEQ ID NO: 1472188 - DNA, 15 bp, Homo sapiens
ccatatatgtgctga

SEQ ID NO: 1472189 - DNA, 15 bp, Homo sapiens
catatatgtgctgag

SEQ ID NO: 1472190 - DNA, 15 bp, Homo sapiens
atatatgtgctgagc

SEQ ID NO: 1472191 - DNA, 15 bp, Homo sapiens
tatatgtgctgagcc

SEQ ID NO: 1472192 - DNA, 15 bp, Homo sapiens
atatgtgctgagccc

SEQ ID NO: 1472193 - DNA, 15 bp, Homo sapiens
tatgtgctgagcccc

SEQ ID NO: 1472194 - DNA, 15 bp, Homo sapiens
atgtgctgagcccca

SEQ ID NO: 1472195 - DNA, 15 bp, Homo sapiens
tgtgctgagccccat

SEQ ID NO: 1472196 - DNA, 15 bp, Homo sapiens
gtgctgagccccatg

SEQ ID NO: 1472197 - DNA, 15 bp, Homo sapiens
tgctgagccccatga

SEQ ID NO: 1472198 - DNA, 15 bp, Homo sapiens
gctgagccccatgaa

SEQ ID NO: 1472199 - DNA, 15 bp, Homo sapiens
ctgagccccatgaag

SEQ ID NO: 1472200 - DNA, 15 bp, Homo sapiens
tgagccccatgaagc

SEQ ID NO: 1472201 - DNA, 15 bp, Homo sapiens
gagccccatgaagca

SEQ ID NO: 1472202 - DNA, 15 bp, Homo sapiens
agccccatgaagcag

SEQ ID NO: 1472203 - DNA, 15 bp, Homo sapiens
gccccatgaagcagt

SEQ ID NO: 1472204 - DNA, 15 bp, Homo sapiens
ccccatgaagcagtg

SEQ ID NO: 1472205 - DNA, 15 bp, Homo sapiens
cccatgaagcagtga

SEQ ID NO: 1472206 - DNA, 15 bp, Homo sapiens
ccatgaagcagtgac

SEQ ID NO: 1472207 - DNA, 15 bp, Homo sapiens
catgaagcagtgaca

SEQ ID NO: 1472208 - DNA, 15 bp, Homo sapiens
atgaagcagtgacat

SEQ ID NO: 1472209 - DNA, 15 bp, Homo sapiens
tgaagcagtgacata

SEQ ID NO: 1472210 - DNA, 15 bp, Homo sapiens
gaagcagtgacatat

SEQ ID NO: 1472211 - DNA, 15 bp, Homo sapiens
aagcagtgacatatg

SEQ ID NO: 1472212 - DNA, 15 bp, Homo sapiens
agcagtgacatatgg

SEQ ID NO: 1472213 - DNA, 15 bp, Homo sapiens
gcagtgacatatggg

SEQ ID NO: 1472214 - DNA, 15 bp, Homo sapiens
cagtgacatatggga

SEQ ID NO: 1472215 - DNA, 15 bp, Homo sapiens
agtgacatatgggaa

SEQ ID NO: 1472216 - DNA, 15 bp, Homo sapiens
gtgacatatgggaaa

SEQ ID NO: 1472217 - DNA, 15 bp, Homo sapiens
tgacatatgggaaag

SEQ ID NO: 1472218 - DNA, 15 bp, Homo sapiens
gacatatgggaaaga

SEQ ID NO: 1472219 - DNA, 15 bp, Homo sapiens
acatatgggaaagaa

SEQ ID NO: 1472220 - DNA, 15 bp, Homo sapiens
catatgggaaagaaa

SEQ ID NO: 1472221 - DNA, 15 bp, Homo sapiens
atatgggaaagaaag

SEQ ID NO: 1472222 - DNA, 15 bp, Homo sapiens
tatgggaaagaaagg

SEQ ID NO: 1472223 - DNA, 15 bp, Homo sapiens
atgggaaagaaaggg

SEQ ID NO: 1472224 - DNA, 15 bp, Homo sapiens
tgggaaagaaagggg

SEQ ID NO: 1472225 - DNA, 15 bp, Homo sapiens
gggaaagaaagggga

SEQ ID NO: 1472226 - DNA, 15 bp, Homo sapiens
ggaaagaaaggggaa

SEQ ID NO: 1472227 - DNA, 15 bp, Homo sapiens
gaaagaaaggggaag

SEQ ID NO: 1472228 - DNA, 15 bp, Homo sapiens
aaagaaaggggaaga

SEQ ID NO: 1472229 - DNA, 15 bp, Homo sapiens
aagaaaggggaagaa

SEQ ID NO: 1472230 - DNA, 15 bp, Homo sapiens
agaaaggggaagaag

SEQ ID NO: 1472231 - DNA, 15 bp, Homo sapiens
gaaaggggaagaagg

SEQ ID NO: 1472232 - DNA, 15 bp, Homo sapiens
aaaggggaagaagga

SEQ ID NO: 1472233 - DNA, 15 bp, Homo sapiens
ggggaagaaggagga

SEQ ID NO: 1472234 - DNA, 15 bp, Homo sapiens
gggaagaaggaggat

SEQ ID NO: 1472235 - DNA, 15 bp, Homo sapiens
ggaagaaggaggata

SEQ ID NO: 1472236 - DNA, 15 bp, Homo sapiens
gaagaaggaggatag

SEQ ID NO: 1472237 - DNA, 15 bp, Homo sapiens
aagaaggaggatagg

SEQ ID NO: 1472238 - DNA, 15 bp, Homo sapiens
agaaggaggataggt

SEQ ID NO: 1472239 - DNA, 15 bp, Homo sapiens
gaaggaggataggta

SEQ ID NO: 1472240 - DNA, 15 bp, Homo sapiens
aaggaggataggtat

SEQ ID NO: 1472241 - DNA, 15 bp, Homo sapiens
aggaggataggtata

SEQ ID NO: 1472242 - DNA, 15 bp, Homo sapiens
ggaggataggtatag

SEQ ID NO: 1472243 - DNA, 15 bp, Homo sapiens
gaggataggtataga

SEQ ID NO: 1472244 - DNA, 15 bp, Homo sapiens
aggataggtatagaa

SEQ ID NO: 1472245 - DNA, 15 bp, Homo sapiens
ggataggtatagaaa

SEQ ID NO: 1472246 - DNA, 15 bp, Homo sapiens
gataggtatagaaaa

SEQ ID NO: 1472247 - DNA, 15 bp, Homo sapiens
ataggtatagaaaaa

SEQ ID NO: 1472248 - DNA, 15 bp, Homo sapiens
taggtatagaaaaac

SEQ ID NO: 1472249 - DNA, 15 bp, Homo sapiens
aggtatagaaaaacc

SEQ ID NO: 1472250 - DNA, 15 bp, Homo sapiens
ggtatagaaaaaccc

SEQ ID NO: 1472251 - DNA, 15 bp, Homo sapiens
gtatagaaaaaccct

SEQ ID NO: 1472252 - DNA, 15 bp, Homo sapiens
tatagaaaaaccctg

SEQ ID NO: 1472253 - DNA, 15 bp, Homo sapiens
atagaaaaaccctgc

SEQ ID NO: 1472254 - DNA, 15 bp, Homo sapiens
tagaaaaaccctgct

SEQ ID NO: 1472255 - DNA, 15 bp, Homo sapiens
agaaaaaccctgctt

SEQ ID NO: 1472256 - DNA, 15 bp, Homo sapiens
gaaaaaccctgcttg

SEQ ID NO: 1472257 - DNA, 15 bp, Homo sapiens
aaaaaccctgcttga

SEQ ID NO: 1472258 - DNA, 15 bp, Homo sapiens
aaaaccctgcttgag

SEQ ID NO: 1472259 - DNA, 15 bp, Homo sapiens
aaaccctgcttgaga

SEQ ID NO: 1472260 - DNA, 15 bp, Homo sapiens
aaccctgcttgagat

SEQ ID NO: 1472261 - DNA, 15 bp, Homo sapiens
accctgcttgagatt

SEQ ID NO: 1472262 - DNA, 15 bp, Homo sapiens
ccctgcttgagattc

SEQ ID NO: 1472263 - DNA, 15 bp, Homo sapiens
cctgcttgagattcc

SEQ ID NO: 1472264 - DNA, 15 bp, Homo sapiens
ctgcttgagattcca

SEQ ID NO: 1472265 - DNA, 15 bp, Homo sapiens
tgcttgagattccaa

SEQ ID NO: 1472266 - DNA, 15 bp, Homo sapiens
gcttgagattccaaa

SEQ ID NO: 1472267 - DNA, 15 bp, Homo sapiens
cttgagattccaaaa

SEQ ID NO: 1472268 - DNA, 15 bp, Homo sapiens
ttgagattccaaaag

SEQ ID NO: 1472269 - DNA, 15 bp, Homo sapiens
tgagattccaaaagt

SEQ ID NO: 1472270 - DNA, 15 bp, Homo sapiens
gagattccaaaagta

SEQ ID NO: 1472271 - DNA, 15 bp, Homo sapiens
agattccaaaagtag

SEQ ID NO: 1472272 - DNA, 15 bp, Homo sapiens
gattccaaaagtaga

SEQ ID NO: 1472273 - DNA, 15 bp, Homo sapiens
attccaaaagtagat

SEQ ID NO: 1472274 - DNA, 15 bp, Homo sapiens
ttccaaaagtagatc

SEQ ID NO: 1472275 - DNA, 15 bp, Homo sapiens
tccaaaagtagatca

SEQ ID NO: 1472276 - DNA, 15 bp, Homo sapiens
ccaaaagtagatcaa

SEQ ID NO: 1472277 - DNA, 15 bp, Homo sapiens
caaaagtagatcaat

SEQ ID NO: 1472278 - DNA, 15 bp, Homo sapiens
aaaagtagatcaatg

SEQ ID NO: 1472279 - DNA, 15 bp, Homo sapiens
aaagtagatcaatgc

SEQ ID NO: 1472280 - DNA, 15 bp, Homo sapiens
aagtagatcaatgca

SEQ ID NO: 1472281 - DNA, 15 bp, Homo sapiens
agtagatcaatgcaa

SEQ ID NO: 1472282 - DNA, 15 bp, Homo sapiens
gtagatcaatgcaac

SEQ ID NO: 1472283 - DNA, 15 bp, Homo sapiens
tagatcaatgcaacc

SEQ ID NO: 1472284 - DNA, 15 bp, Homo sapiens
agatcaatgcaaccc

SEQ ID NO: 1472285 - DNA, 15 bp, Homo sapiens
gatcaatgcaaccca

SEQ ID NO: 1472286 - DNA, 15 bp, Homo sapiens
atcaatgcaacccat

SEQ ID NO: 1472287 - DNA, 15 bp, Homo sapiens
tcaatgcaacccatt

SEQ ID NO: 1472288 - DNA, 15 bp, Homo sapiens
caatgcaacccattt

SEQ ID NO: 1472289 - DNA, 15 bp, Homo sapiens
aatgcaacccatttg

SEQ ID NO: 1472290 - DNA, 15 bp, Homo sapiens
atgcaacccatttgt

SEQ ID NO: 1472291 - DNA, 15 bp, Homo sapiens
tgcaacccatttgtt

SEQ ID NO: 1472292 - DNA, 15 bp, Homo sapiens
gcaacccatttgttc

SEQ ID NO: 1472293 - DNA, 15 bp, Homo sapiens
caacccatttgttct

SEQ ID NO: 1472294 - DNA, 15 bp, Homo sapiens
aacccatttgttctt

SEQ ID NO: 1472295 - DNA, 15 bp, Homo sapiens
acccatttgttcttt

SEQ ID NO: 1472296 - DNA, 15 bp, Homo sapiens
cccatttgttctttc

SEQ ID NO: 1472297 - DNA, 15 bp, Homo sapiens
ccatttgttctttca

SEQ ID NO: 1472298 - DNA, 15 bp, Homo sapiens
catttgttctttcat

SEQ ID NO: 1472299 - DNA, 15 bp, Homo sapiens
atttgttctttcatt

SEQ ID NO: 1472300 - DNA, 15 bp, Homo sapiens
tttgttctttcatta

SEQ ID NO: 1472301 - DNA, 15 bp, Homo sapiens
ttgttctttcattaa

SEQ ID NO: 1472302 - DNA, 15 bp, Homo sapiens
tgttctttcattaat

SEQ ID NO: 1472303 - DNA, 15 bp, Homo sapiens
gttctttcattaatg

SEQ ID NO: 1472304 - DNA, 15 bp, Homo sapiens
ttctttcattaatgt

SEQ ID NO: 1472305 - DNA, 15 bp, Homo sapiens
tctttcattaatgta

SEQ ID NO: 1472306 - DNA, 15 bp, Homo sapiens
ctttcattaatgtaa

SEQ ID NO: 1472307 - DNA, 15 bp, Homo sapiens
tttcattaatgtaat

SEQ ID NO: 1472308 - DNA, 15 bp, Homo sapiens
ttcattaatgtaatc

SEQ ID NO: 1472309 - DNA, 15 bp, Homo sapiens
tcattaatgtaatca

SEQ ID NO: 1472310 - DNA, 15 bp, Homo sapiens
cattaatgtaatcat

SEQ ID NO: 1472311 - DNA, 15 bp, Homo sapiens
attaatgtaatcatc

SEQ ID NO: 1472312 - DNA, 15 bp, Homo sapiens
ttaatgtaatcatcc

SEQ ID NO: 1472313 - DNA, 15 bp, Homo sapiens
taatgtaatcatcct

SEQ ID NO: 1472314 - DNA, 15 bp, Homo sapiens
aatgtaatcatcctt

SEQ ID NO: 1472315 - DNA, 15 bp, Homo sapiens
atgtaatcatccttt

SEQ ID NO: 1472316 - DNA, 15 bp, Homo sapiens
tgtaatcatccttta

SEQ ID NO: 1472317 - DNA, 15 bp, Homo sapiens
gtaatcatcctttat

SEQ ID NO: 1472318 - DNA, 15 bp, Homo sapiens
taatcatcctttatt

SEQ ID NO: 1472319 - DNA, 15 bp, Homo sapiens
aatcatcctttattg

SEQ ID NO: 1472320 - DNA, 15 bp, Homo sapiens
atcatcctttattga

SEQ ID NO: 1472321 - DNA, 15 bp, Homo sapiens
tcatcctttattgaa

SEQ ID NO: 1472322 - DNA, 15 bp, Homo sapiens
catcctttattgaat

SEQ ID NO: 1472323 - DNA, 15 bp, Homo sapiens
atcctttattgaata

SEQ ID NO: 1472324 - DNA, 15 bp, Homo sapiens
tcctttattgaatac

SEQ ID NO: 1472325 - DNA, 15 bp, Homo sapiens
cctttattgaatacc

SEQ ID NO: 1472326 - DNA, 15 bp, Homo sapiens
ctttattgaatacct

SEQ ID NO: 1472327 - DNA, 15 bp, Homo sapiens
tttattgaataccta

SEQ ID NO: 1472328 - DNA, 15 bp, Homo sapiens
ttattgaatacctac

SEQ ID NO: 1472329 - DNA, 15 bp, Homo sapiens
tattgaatacctact

SEQ ID NO: 1472330 - DNA, 15 bp, Homo sapiens
attgaatacctacta

SEQ ID NO: 1472331 - DNA, 15 bp, Homo sapiens
ttgaatacctactat

SEQ ID NO: 1472332 - DNA, 15 bp, Homo sapiens
tgaatacctactatc

SEQ ID NO: 1472333 - DNA, 15 bp, Homo sapiens
gaatacctactatcc

SEQ ID NO: 1472334 - DNA, 15 bp, Homo sapiens
aatacctactatcct

SEQ ID NO: 1472335 - DNA, 15 bp, Homo sapiens
atacctactatcctg

SEQ ID NO: 1472336 - DNA, 15 bp, Homo sapiens
tacctactatcctgg

SEQ ID NO: 1472337 - DNA, 15 bp, Homo sapiens
acctactatcctggg

SEQ ID NO: 1472338 - DNA, 15 bp, Homo sapiens
cctactatcctgggc

SEQ ID NO: 1472339 - DNA, 15 bp, Homo sapiens
ctactatcctgggca

SEQ ID NO: 1472340 - DNA, 15 bp, Homo sapiens
tactatcctgggcag

SEQ ID NO: 1472341 - DNA, 15 bp, Homo sapiens
actatcctgggcagt

SEQ ID NO: 1472342 - DNA, 15 bp, Homo sapiens
ctatcctgggcagtg

SEQ ID NO: 1472343 - DNA, 15 bp, Homo sapiens
tatcctgggcagtgt

SEQ ID NO: 1472344 - DNA, 15 bp, Homo sapiens
atcctgggcagtgtg

SEQ ID NO: 1472345 - DNA, 15 bp, Homo sapiens
tcctgggcagtgtgc

SEQ ID NO: 1472346 - DNA, 15 bp, Homo sapiens
cctgggcagtgtgcc

SEQ ID NO: 1472347 - DNA, 15 bp, Homo sapiens
ctgggcagtgtgcca

SEQ ID NO: 1472348 - DNA, 15 bp, Homo sapiens
tgggcagtgtgccaa

SEQ ID NO: 1472349 - DNA, 15 bp, Homo sapiens
gggcagtgtgccaaa

SEQ ID NO: 1472350 - DNA, 15 bp, Homo sapiens
ggcagtgtgccaaat

SEQ ID NO: 1472351 - DNA, 15 bp, Homo sapiens
gcagtgtgccaaatt

SEQ ID NO: 1472352 - DNA, 15 bp, Homo sapiens
cagtgtgccaaattg

SEQ ID NO: 1472353 - DNA, 15 bp, Homo sapiens
agtgtgccaaattga

SEQ ID NO: 1472354 - DNA, 15 bp, Homo sapiens
gtgtgccaaattgag

SEQ ID NO: 1472355 - DNA, 15 bp, Homo sapiens
tgtgccaaattgaga

SEQ ID NO: 1472356 - DNA, 15 bp, Homo sapiens
gtgccaaattgagaa

SEQ ID NO: 1472357 - DNA, 15 bp, Homo sapiens
tgccaaattgagaat

SEQ ID NO: 1472358 - DNA, 15 bp, Homo sapiens
gccaaattgagaatg

SEQ ID NO: 1472359 - DNA, 15 bp, Homo sapiens
ccaaattgagaatgc

SEQ ID NO: 1472360 - DNA, 15 bp, Homo sapiens
caaattgagaatgca

SEQ ID NO: 1472361 - DNA, 15 bp, Homo sapiens
aaattgagaatgcaa

SEQ ID NO: 1472362 - DNA, 15 bp, Homo sapiens
aattgagaatgcaat

SEQ ID NO: 1472363 - DNA, 15 bp, Homo sapiens
attgagaatgcaatt

SEQ ID NO: 1472364 - DNA, 15 bp, Homo sapiens
ttgagaatgcaatta

SEQ ID NO: 1472365 - DNA, 15 bp, Homo sapiens
tgagaatgcaattat

SEQ ID NO: 1472366 - DNA, 15 bp, Homo sapiens
gagaatgcaattatg

SEQ ID NO: 1472367 - DNA, 15 bp, Homo sapiens
agaatgcaattatgc

SEQ ID NO: 1472368 - DNA, 15 bp, Homo sapiens
gaatgcaattatgca

SEQ ID NO: 1472369 - DNA, 15 bp, Homo sapiens
aatgcaattatgcat

SEQ ID NO: 1472370 - DNA, 15 bp, Homo sapiens
atgcaattatgcata

SEQ ID NO: 1472371 - DNA, 15 bp, Homo sapiens
tgcaattatgcataa

SEQ ID NO: 1472372 - DNA, 15 bp, Homo sapiens
gcaattatgcataag

SEQ ID NO: 1472373 - DNA, 15 bp, Homo sapiens
caattatgcataaga

SEQ ID NO: 1472374 - DNA, 15 bp, Homo sapiens
aattatgcataagac

SEQ ID NO: 1472375 - DNA, 15 bp, Homo sapiens
attatgcataagaca

SEQ ID NO: 1472376 - DNA, 15 bp, Homo sapiens
ttatgcataagacat

SEQ ID NO: 1472377 - DNA, 15 bp, Homo sapiens
tatgcataagacatg

SEQ ID NO: 1472378 - DNA, 15 bp, Homo sapiens
atgcataagacatgg

SEQ ID NO: 1472379 - DNA, 15 bp, Homo sapiens
tgcataagacatggt

SEQ ID NO: 1472380 - DNA, 15 bp, Homo sapiens
gcataagacatggtc

SEQ ID NO: 1472381 - DNA, 15 bp, Homo sapiens
cataagacatggtcc

SEQ ID NO: 1472382 - DNA, 15 bp, Homo sapiens
ataagacatggtccc

SEQ ID NO: 1472383 - DNA, 15 bp, Homo sapiens
taagacatggtccct

SEQ ID NO: 1472384 - DNA, 15 bp, Homo sapiens
aagacatggtccctg

SEQ ID NO: 1472385 - DNA, 15 bp, Homo sapiens
agacatggtccctgt

SEQ ID NO: 1472386 - DNA, 15 bp, Homo sapiens
gacatggtccctgtc

SEQ ID NO: 1472387 - DNA, 15 bp, Homo sapiens
acatggtccctgtct

SEQ ID NO: 1472388 - DNA, 15 bp, Homo sapiens
catggtccctgtctt

SEQ ID NO: 1472389 - DNA, 15 bp, Homo sapiens
atggtccctgtcttt

SEQ ID NO: 1472390 - DNA, 15 bp, Homo sapiens
tggtccctgtctttg

SEQ ID NO: 1472391 - DNA, 15 bp, Homo sapiens
ggtccctgtctttga

SEQ ID NO: 1472392 - DNA, 15 bp, Homo sapiens
gtccctgtctttgat

SEQ ID NO: 1472393 - DNA, 15 bp, Homo sapiens
tccctgtctttgatg

SEQ ID NO: 1472394 - DNA, 15 bp, Homo sapiens
ccctgtctttgatga

SEQ ID NO: 1472395 - DNA, 15 bp, Homo sapiens
cctgtctttgatgaa

SEQ ID NO: 1472396 - DNA, 15 bp, Homo sapiens
ctgtctttgatgaat

SEQ ID NO: 1472397 - DNA, 15 bp, Homo sapiens
tgtctttgatgaatt

SEQ ID NO: 1472398 - DNA, 15 bp, Homo sapiens
gtctttgatgaattt

SEQ ID NO: 1472399 - DNA, 15 bp, Homo sapiens
tctttgatgaattta

SEQ ID NO: 1472400 - DNA, 15 bp, Homo sapiens
ctttgatgaatttaa

SEQ ID NO: 1472401 - DNA, 15 bp, Homo sapiens
tttgatgaatttaag

SEQ ID NO: 1472402 - DNA, 15 bp, Homo sapiens
ttgatgaatttaaga

SEQ ID NO: 1472403 - DNA, 15 bp, Homo sapiens
tgatgaatttaagat

SEQ ID NO: 1472404 - DNA, 15 bp, Homo sapiens
gatgaatttaagatc

SEQ ID NO: 1472405 - DNA, 15 bp, Homo sapiens
atgaatttaagatcc

SEQ ID NO: 1472406 - DNA, 15 bp, Homo sapiens
tgaatttaagatcct

SEQ ID NO: 1472407 - DNA, 15 bp, Homo sapiens
gaatttaagatcctc

SEQ ID NO: 1472408 - DNA, 15 bp, Homo sapiens
aatttaagatcctct

SEQ ID NO: 1472409 - DNA, 15 bp, Homo sapiens
atttaagatcctctg

SEQ ID NO: 1472410 - DNA, 15 bp, Homo sapiens
tttaagatcctctga

SEQ ID NO: 1472411 - DNA, 15 bp, Homo sapiens
ttaagatcctctgaa

SEQ ID NO: 1472412 - DNA, 15 bp, Homo sapiens
taagatcctctgaag

SEQ ID NO: 1472413 - DNA, 15 bp, Homo sapiens
aagatcctctgaagg

SEQ ID NO: 1472414 - DNA, 15 bp, Homo sapiens
agatcctctgaagga

SEQ ID NO: 1472415 - DNA, 15 bp, Homo sapiens
gatcctctgaaggaa

SEQ ID NO: 1472416 - DNA, 15 bp, Homo sapiens
atcctctgaaggaaa

SEQ ID NO: 1472417 - DNA, 15 bp, Homo sapiens
tcctctgaaggaaag

SEQ ID NO: 1472418 - DNA, 15 bp, Homo sapiens
cctctgaaggaaaga

SEQ ID NO: 1472419 - DNA, 15 bp, Homo sapiens
ctctgaaggaaagag

SEQ ID NO: 1472420 - DNA, 15 bp, Homo sapiens
tctgaaggaaagagg

SEQ ID NO: 1472421 - DNA, 15 bp, Homo sapiens
ctgaaggaaagaggt

SEQ ID NO: 1472422 - DNA, 15 bp, Homo sapiens
tgaaggaaagaggtg

SEQ ID NO: 1472423 - DNA, 15 bp, Homo sapiens
gaaggaaagaggtgt

SEQ ID NO: 1472424 - DNA, 15 bp, Homo sapiens
aaggaaagaggtgta

SEQ ID NO: 1472425 - DNA, 15 bp, Homo sapiens
aggaaagaggtgtaa

SEQ ID NO: 1472426 - DNA, 15 bp, Homo sapiens
ggaaagaggtgtaaa

SEQ ID NO: 1472427 - DNA, 15 bp, Homo sapiens
gaaagaggtgtaaat

SEQ ID NO: 1472428 - DNA, 15 bp, Homo sapiens
aaagaggtgtaaatg

SEQ ID NO: 1472429 - DNA, 15 bp, Homo sapiens
aagaggtgtaaatga

SEQ ID NO: 1472430 - DNA, 15 bp, Homo sapiens
agaggtgtaaatgaa

SEQ ID NO: 1472431 - DNA, 15 bp, Homo sapiens
gaggtgtaaatgaac

SEQ ID NO: 1472432 - DNA, 15 bp, Homo sapiens
aggtgtaaatgaaca

SEQ ID NO: 1472433 - DNA, 15 bp, Homo sapiens
ggtgtaaatgaacac

SEQ ID NO: 1472434 - DNA, 15 bp, Homo sapiens
gtgtaaatgaacact

SEQ ID NO: 1472435 - DNA, 15 bp, Homo sapiens
tgtaaatgaacactc

SEQ ID NO: 1472436 - DNA, 15 bp, Homo sapiens
gtaaatgaacactca

SEQ ID NO: 1472437 - DNA, 15 bp, Homo sapiens
taaatgaacactcac

SEQ ID NO: 1472438 - DNA, 15 bp, Homo sapiens
aaatgaacactcaca

SEQ ID NO: 1472439 - DNA, 15 bp, Homo sapiens
aatgaacactcacac

SEQ ID NO: 1472440 - DNA, 15 bp, Homo sapiens
atgaacactcacact

SEQ ID NO: 1472441 - DNA, 15 bp, Homo sapiens
tgaacactcacacta

SEQ ID NO: 1472442 - DNA, 15 bp, Homo sapiens
gaacactcacactaa

SEQ ID NO: 1472443 - DNA, 15 bp, Homo sapiens
aacactcacactaaa

SEQ ID NO: 1472444 - DNA, 15 bp, Homo sapiens
acactcacactaaaa

SEQ ID NO: 1472445 - DNA, 15 bp, Homo sapiens
cactcacactaaaaa

SEQ ID NO: 1472446 - DNA, 15 bp, Homo sapiens
actcacactaaaaac

SEQ ID NO: 1472447 - DNA, 15 bp, Homo sapiens
ctcacactaaaaaca

SEQ ID NO: 1472448 - DNA, 15 bp, Homo sapiens
tcacactaaaaacaa

SEQ ID NO: 1472449 - DNA, 15 bp, Homo sapiens
cacactaaaaacaag

SEQ ID NO: 1472450 - DNA, 15 bp, Homo sapiens
acactaaaaacaagt

SEQ ID NO: 1472451 - DNA, 15 bp, Homo sapiens
cactaaaaacaagtg

SEQ ID NO: 1472452 - DNA, 15 bp, Homo sapiens
actaaaaacaagtgc

SEQ ID NO: 1472453 - DNA, 15 bp, Homo sapiens
ctaaaaacaagtgct

SEQ ID NO: 1472454 - DNA, 15 bp, Homo sapiens
taaaaacaagtgctt

SEQ ID NO: 1472455 - DNA, 15 bp, Homo sapiens
aaaaacaagtgcttt

SEQ ID NO: 1472456 - DNA, 15 bp, Homo sapiens
aaaacaagtgctttc

SEQ ID NO: 1472457 - DNA, 15 bp, Homo sapiens
aaacaagtgctttca

SEQ ID NO: 1472458 - DNA, 15 bp, Homo sapiens
aacaagtgctttcat

SEQ ID NO: 1472459 - DNA, 15 bp, Homo sapiens
acaagtgctttcatg

SEQ ID NO: 1472460 - DNA, 15 bp, Homo sapiens
caagtgctttcatgg

SEQ ID NO: 1472461 - DNA, 15 bp, Homo sapiens
aagtgctttcatggt

SEQ ID NO: 1472462 - DNA, 15 bp, Homo sapiens
agtgctttcatggtg

SEQ ID NO: 1472463 - DNA, 15 bp, Homo sapiens
gtgctttcatggtgc

SEQ ID NO: 1472464 - DNA, 15 bp, Homo sapiens
tgctttcatggtgct

SEQ ID NO: 1472465 - DNA, 15 bp, Homo sapiens
gctttcatggtgcta

SEQ ID NO: 1472466 - DNA, 15 bp, Homo sapiens
ctttcatggtgctag

SEQ ID NO: 1472467 - DNA, 15 bp, Homo sapiens
tttcatggtgctagg

SEQ ID NO: 1472468 - DNA, 15 bp, Homo sapiens
ttcatggtgctaggt

SEQ ID NO: 1472469 - DNA, 15 bp, Homo sapiens
tcatggtgctaggtg

SEQ ID NO: 1472470 - DNA, 15 bp, Homo sapiens
catggtgctaggtgc

SEQ ID NO: 1472471 - DNA, 15 bp, Homo sapiens
atggtgctaggtgca

SEQ ID NO: 1472472 - DNA, 15 bp, Homo sapiens
tggtgctaggtgcaa

SEQ ID NO: 1472473 - DNA, 15 bp, Homo sapiens
ggtgctaggtgcaaa

SEQ ID NO: 1472474 - DNA, 15 bp, Homo sapiens
gtgctaggtgcaaaa

SEQ ID NO: 1472475 - DNA, 15 bp, Homo sapiens
tgctaggtgcaaaac

SEQ ID NO: 1472476 - DNA, 15 bp, Homo sapiens
gctaggtgcaaaaca

SEQ ID NO: 1472477 - DNA, 15 bp, Homo sapiens
ctaggtgcaaaacat

SEQ ID NO: 1472478 - DNA, 15 bp, Homo sapiens
taggtgcaaaacatc

SEQ ID NO: 1472479 - DNA, 15 bp, Homo sapiens
aggtgcaaaacatca

SEQ ID NO: 1472480 - DNA, 15 bp, Homo sapiens
ggtgcaaaacatcac

SEQ ID NO: 1472481 - DNA, 15 bp, Homo sapiens
gtgcaaaacatcaca

SEQ ID NO: 1472482 - DNA, 15 bp, Homo sapiens
tgcaaaacatcacaa

SEQ ID NO: 1472483 - DNA, 15 bp, Homo sapiens
gcaaaacatcacaaa

SEQ ID NO: 1472484 - DNA, 15 bp, Homo sapiens
caaaacatcacaaaa

SEQ ID NO: 1472485 - DNA, 15 bp, Homo sapiens
aaaacatcacaaaaa

SEQ ID NO: 1472486 - DNA, 15 bp, Homo sapiens
aaacatcacaaaaac

SEQ ID NO: 1472487 - DNA, 15 bp, Homo sapiens
aacatcacaaaaacc

SEQ ID NO: 1472488 - DNA, 15 bp, Homo sapiens
acatcacaaaaaccc

SEQ ID NO: 1472489 - DNA, 15 bp, Homo sapiens
catcacaaaaaccca

SEQ ID NO: 1472490 - DNA, 15 bp, Homo sapiens
atcacaaaaacccaa

SEQ ID NO: 1472491 - DNA, 15 bp, Homo sapiens
tcacaaaaacccaac

SEQ ID NO: 1472492 - DNA, 15 bp, Homo sapiens
cacaaaaacccaacc

SEQ ID NO: 1472493 - DNA, 15 bp, Homo sapiens
acaaaaacccaacca

SEQ ID NO: 1472494 - DNA, 15 bp, Homo sapiens
caaaaacccaaccac

SEQ ID NO: 1472495 - DNA, 15 bp, Homo sapiens
aaaaacccaaccaca

SEQ ID NO: 1472496 - DNA, 15 bp, Homo sapiens
aaaacccaaccacag

SEQ ID NO: 1472497 - DNA, 15 bp, Homo sapiens
aaacccaaccacagg

SEQ ID NO: 1472498 - DNA, 15 bp, Homo sapiens
aacccaaccacagga

SEQ ID NO: 1472499 - DNA, 15 bp, Homo sapiens
acccaaccacaggag

SEQ ID NO: 1472500 - DNA, 15 bp, Homo sapiens
cccaaccacaggagc

SEQ ID NO: 1472501 - DNA, 15 bp, Homo sapiens
ccaaccacaggagca

SEQ ID NO: 1472502 - DNA, 15 bp, Homo sapiens
caaccacaggagcaa

SEQ ID NO: 1472503 - DNA, 15 bp, Homo sapiens
aaccacaggagcaac

SEQ ID NO: 1472504 - DNA, 15 bp, Homo sapiens
accacaggagcaacc

SEQ ID NO: 1472505 - DNA, 15 bp, Homo sapiens
ccacaggagcaacca

SEQ ID NO: 1472506 - DNA, 15 bp, Homo sapiens
cacaggagcaaccag

SEQ ID NO: 1472507 - DNA, 15 bp, Homo sapiens
acaggagcaaccagc

SEQ ID NO: 1472508 - DNA, 15 bp, Homo sapiens
caggagcaaccagct

SEQ ID NO: 1472509 - DNA, 15 bp, Homo sapiens
aggagcaaccagctc

SEQ ID NO: 1472510 - DNA, 15 bp, Homo sapiens
ggagcaaccagctct

SEQ ID NO: 1472511 - DNA, 15 bp, Homo sapiens
gagcaaccagctcta

SEQ ID NO: 1472512 - DNA, 15 bp, Homo sapiens
agcaaccagctctac

SEQ ID NO: 1472513 - DNA, 15 bp, Homo sapiens
gcaaccagctctact

SEQ ID NO: 1472514 - DNA, 15 bp, Homo sapiens
caaccagctctactg

SEQ ID NO: 1472515 - DNA, 15 bp, Homo sapiens
aaccagctctactgg

SEQ ID NO: 1472516 - DNA, 15 bp, Homo sapiens
accagctctactgga

SEQ ID NO: 1472517 - DNA, 15 bp, Homo sapiens
ccagctctactggaa

SEQ ID NO: 1472518 - DNA, 15 bp, Homo sapiens
cagctctactggaaa

SEQ ID NO: 1472519 - DNA, 15 bp, Homo sapiens
agctctactggaaag

SEQ ID NO: 1472520 - DNA, 15 bp, Homo sapiens
gctctactggaaaga

SEQ ID NO: 1472521 - DNA, 15 bp, Homo sapiens
ctctactggaaagac

SEQ ID NO: 1472522 - DNA, 15 bp, Homo sapiens
tctactggaaagacc

SEQ ID NO: 1472523 - DNA, 15 bp, Homo sapiens
ctactggaaagaccc

SEQ ID NO: 1472524 - DNA, 15 bp, Homo sapiens
tactggaaagaccca

SEQ ID NO: 1472525 - DNA, 15 bp, Homo sapiens
actggaaagacccaa

SEQ ID NO: 1472526 - DNA, 15 bp, Homo sapiens
ctggaaagacccaac

SEQ ID NO: 1472527 - DNA, 15 bp, Homo sapiens
tggaaagacccaaca

SEQ ID NO: 1472528 - DNA, 15 bp, Homo sapiens
ggaaagacccaacag

SEQ ID NO: 1472529 - DNA, 15 bp, Homo sapiens
gaaagacccaacaga

SEQ ID NO: 1472530 - DNA, 15 bp, Homo sapiens
aaagacccaacagag

SEQ ID NO: 1472531 - DNA, 15 bp, Homo sapiens
aagacccaacagagt

SEQ ID NO: 1472532 - DNA, 15 bp, Homo sapiens
agacccaacagagtc

SEQ ID NO: 1472533 - DNA, 15 bp, Homo sapiens
gacccaacagagtca

SEQ ID NO: 1472534 - DNA, 15 bp, Homo sapiens
acccaacagagtcag

SEQ ID NO: 1472535 - DNA, 15 bp, Homo sapiens
cccaacagagtcagg

SEQ ID NO: 1472536 - DNA, 15 bp, Homo sapiens
ccaacagagtcagga

SEQ ID NO: 1472537 - DNA, 15 bp, Homo sapiens
caacagagtcaggaa

SEQ ID NO: 1472538 - DNA, 15 bp, Homo sapiens
aacagagtcaggaac

SEQ ID NO: 1472539 - DNA, 15 bp, Homo sapiens
acagagtcaggaaca

SEQ ID NO: 1472540 - DNA, 15 bp, Homo sapiens
cagagtcaggaacag

SEQ ID NO: 1472541 - DNA, 15 bp, Homo sapiens
agagtcaggaacaga

SEQ ID NO: 1472542 - DNA, 15 bp, Homo sapiens
gagtcaggaacagat

SEQ ID NO: 1472543 - DNA, 15 bp, Homo sapiens
agtcaggaacagatt

SEQ ID NO: 1472544 - DNA, 15 bp, Homo sapiens
gtcaggaacagattt

SEQ ID NO: 1472545 - DNA, 15 bp, Homo sapiens
tcaggaacagattta

SEQ ID NO: 1472546 - DNA, 15 bp, Homo sapiens
caggaacagatttat

SEQ ID NO: 1472547 - DNA, 15 bp, Homo sapiens
aggaacagatttata

SEQ ID NO: 1472548 - DNA, 15 bp, Homo sapiens
ggaacagatttatag

SEQ ID NO: 1472549 - DNA, 15 bp, Homo sapiens
gaacagatttataga

SEQ ID NO: 1472550 - DNA, 15 bp, Homo sapiens
aacagatttatagag

SEQ ID NO: 1472551 - DNA, 15 bp, Homo sapiens
acagatttatagagg

SEQ ID NO: 1472552 - DNA, 15 bp, Homo sapiens
cagatttatagagga

SEQ ID NO: 1472553 - DNA, 15 bp, Homo sapiens
agatttatagaggag

SEQ ID NO: 1472554 - DNA, 15 bp, Homo sapiens
gatttatagaggagg

SEQ ID NO: 1472555 - DNA, 15 bp, Homo sapiens
atttatagaggagga

SEQ ID NO: 1472556 - DNA, 15 bp, Homo sapiens
tttatagaggaggag

SEQ ID NO: 1472557 - DNA, 15 bp, Homo sapiens
ttatagaggaggagg

SEQ ID NO: 1472558 - DNA, 15 bp, Homo sapiens
tatagaggaggagga

SEQ ID NO: 1472559 - DNA, 15 bp, Homo sapiens
atagaggaggaggaa

SEQ ID NO: 1472560 - DNA, 15 bp, Homo sapiens
tagaggaggaggaac

SEQ ID NO: 1472561 - DNA, 15 bp, Homo sapiens
agaggaggaggaaca

SEQ ID NO: 1472562 - DNA, 15 bp, Homo sapiens
gaggaggaggaacaa

SEQ ID NO: 1472563 - DNA, 15 bp, Homo sapiens
gaggaggaacaatgg

SEQ ID NO: 1472564 - DNA, 15 bp, Homo sapiens
aggaggaacaatgga

SEQ ID NO: 1472565 - DNA, 15 bp, Homo sapiens
ggaggaacaatggag

SEQ ID NO: 1472566 - DNA, 15 bp, Homo sapiens
gaggaacaatggagt

SEQ ID NO: 1472567 - DNA, 15 bp, Homo sapiens
aggaacaatggagtt

SEQ ID NO: 1472568 - DNA, 15 bp, Homo sapiens
ggaacaatggagttg

SEQ ID NO: 1472569 - DNA, 15 bp, Homo sapiens
gaacaatggagttga

SEQ ID NO: 1472570 - DNA, 15 bp, Homo sapiens
aacaatggagttgat

SEQ ID NO: 1472571 - DNA, 15 bp, Homo sapiens
acaatggagttgatt

SEQ ID NO: 1472572 - DNA, 15 bp, Homo sapiens
caatggagttgattt

SEQ ID NO: 1472573 - DNA, 15 bp, Homo sapiens
aatggagttgatttt

SEQ ID NO: 1472574 - DNA, 15 bp, Homo sapiens
atggagttgattttt

SEQ ID NO: 1472575 - DNA, 15 bp, Homo sapiens
tggagttgatttttt

SEQ ID NO: 1472576 - DNA, 15 bp, Homo sapiens
ggagttgattttttt

SEQ ID NO: 1472577 - DNA, 15 bp, Homo sapiens
gagttgatttttttt

SEQ ID NO: 1472578 - DNA, 15 bp, Homo sapiens
agttgattttttttt

SEQ ID NO: 1472579 - DNA, 15 bp, Homo sapiens
gttgatttttttttt

SEQ ID NO: 1472580 - DNA, 15 bp, Homo sapiens
ttgattttttttttt

SEQ ID NO: 1472581 - DNA, 15 bp, Homo sapiens
tgagacggagtttca

SEQ ID NO: 1472582 - DNA, 15 bp, Homo sapiens
ttcactcttgtcgct

SEQ ID NO: 1472583 - DNA, 15 bp, Homo sapiens
tcactcttgtcgctc

SEQ ID NO: 1472584 - DNA, 15 bp, Homo sapiens
cactcttgtcgctca

SEQ ID NO: 1472585 - DNA, 15 bp, Homo sapiens
actcttgtcgctcag

SEQ ID NO: 1472586 - DNA, 15 bp, Homo sapiens
ctcttgtcgctcagg

SEQ ID NO: 1472587 - DNA, 15 bp, Homo sapiens
tcttgtcgctcaggc

SEQ ID NO: 1472588 - DNA, 15 bp, Homo sapiens
cttgtcgctcaggct

SEQ ID NO: 1472589 - DNA, 15 bp, Homo sapiens
ttgtcgctcaggctg

SEQ ID NO: 1472590 - DNA, 15 bp, Homo sapiens
gctcaggctggagta

SEQ ID NO: 1472591 - DNA, 15 bp, Homo sapiens
ctcaggctggagtat

SEQ ID NO: 1472592 - DNA, 15 bp, Homo sapiens
tcaggctggagtata

SEQ ID NO: 1472593 - DNA, 15 bp, Homo sapiens
caggctggagtatag

SEQ ID NO: 1472594 - DNA, 15 bp, Homo sapiens
aggctggagtatagt

SEQ ID NO: 1472595 - DNA, 15 bp, Homo sapiens
ggctggagtatagtg

SEQ ID NO: 1472596 - DNA, 15 bp, Homo sapiens
gctggagtatagtgg

SEQ ID NO: 1472597 - DNA, 15 bp, Homo sapiens
ctggagtatagtggc

SEQ ID NO: 1472598 - DNA, 15 bp, Homo sapiens
tggagtatagtggcg

SEQ ID NO: 1472599 - DNA, 15 bp, Homo sapiens
ggagtatagtggcgc

SEQ ID NO: 1472600 - DNA, 15 bp, Homo sapiens
gagtatagtggcgcc

SEQ ID NO: 1472601 - DNA, 15 bp, Homo sapiens
agtatagtggcgcca

SEQ ID NO: 1472602 - DNA, 15 bp, Homo sapiens
gtatagtggcgccat

SEQ ID NO: 1472603 - DNA, 15 bp, Homo sapiens
tatagtggcgccatc

SEQ ID NO: 1472604 - DNA, 15 bp, Homo sapiens
atagtggcgccatct

SEQ ID NO: 1472605 - DNA, 15 bp, Homo sapiens
tagtggcgccatctg

SEQ ID NO: 1472606 - DNA, 15 bp, Homo sapiens
agtggcgccatctgg

SEQ ID NO: 1472607 - DNA, 15 bp, Homo sapiens
gtggcgccatctggg

SEQ ID NO: 1472608 - DNA, 15 bp, Homo sapiens
tggcgccatctgggc

SEQ ID NO: 1472609 - DNA, 15 bp, Homo sapiens
ggcgccatctgggct

SEQ ID NO: 1472610 - DNA, 15 bp, Homo sapiens
gcgccatctgggctc

SEQ ID NO: 1472611 - DNA, 15 bp, Homo sapiens
cgccatctgggctca

SEQ ID NO: 1472612 - DNA, 15 bp, Homo sapiens
gccatctgggctcac

SEQ ID NO: 1472613 - DNA, 15 bp, Homo sapiens
ccatctgggctcact

SEQ ID NO: 1472614 - DNA, 15 bp, Homo sapiens
atctgggctcactgt

SEQ ID NO: 1472615 - DNA, 15 bp, Homo sapiens
tctgggctcactgta

SEQ ID NO: 1472616 - DNA, 15 bp, Homo sapiens
ctgggctcactgtaa

SEQ ID NO: 1472617 - DNA, 15 bp, Homo sapiens
tgggctcactgtaac

SEQ ID NO: 1472618 - DNA, 15 bp, Homo sapiens
gggctcactgtaacc

SEQ ID NO: 1472619 - DNA, 15 bp, Homo sapiens
ctcactgtaacctct

SEQ ID NO: 1472620 - DNA, 15 bp, Homo sapiens
tcactgtaacctctg

SEQ ID NO: 1472621 - DNA, 15 bp, Homo sapiens
cactgtaacctctgc

SEQ ID NO: 1472622 - DNA, 15 bp, Homo sapiens
gtgcccaccaccact

SEQ ID NO: 1472623 - DNA, 15 bp, Homo sapiens
tgcccaccaccactc

SEQ ID NO: 1472624 - DNA, 15 bp, Homo sapiens
gcccaccaccactcc

SEQ ID NO: 1472625 - DNA, 15 bp, Homo sapiens
cccaccaccactcca

SEQ ID NO: 1472626 - DNA, 15 bp, Homo sapiens
ccaccaccactccag

SEQ ID NO: 1472627 - DNA, 15 bp, Homo sapiens
caccaccactccagg

SEQ ID NO: 1472628 - DNA, 15 bp, Homo sapiens
accaccactccaggc

SEQ ID NO: 1472629 - DNA, 15 bp, Homo sapiens
ccaccactccaggct

SEQ ID NO: 1472630 - DNA, 15 bp, Homo sapiens
caccactccaggcta

SEQ ID NO: 1472631 - DNA, 15 bp, Homo sapiens
accactccaggctaa

SEQ ID NO: 1472632 - DNA, 15 bp, Homo sapiens
ccactccaggctaag

SEQ ID NO: 1472633 - DNA, 15 bp, Homo sapiens
cactccaggctaagt

SEQ ID NO: 1472634 - DNA, 15 bp, Homo sapiens
actccaggctaagtt

SEQ ID NO: 1472635 - DNA, 15 bp, Homo sapiens
ctccaggctaagttg

SEQ ID NO: 1472636 - DNA, 15 bp, Homo sapiens
tccaggctaagttgt

SEQ ID NO: 1472637 - DNA, 15 bp, Homo sapiens
ccaggctaagttgtt

SEQ ID NO: 1472638 - DNA, 15 bp, Homo sapiens
caggctaagttgttt

SEQ ID NO: 1472639 - DNA, 15 bp, Homo sapiens
aggctaagttgtttg

SEQ ID NO: 1472640 - DNA, 15 bp, Homo sapiens
ggctaagttgtttgt

SEQ ID NO: 1472641 - DNA, 15 bp, Homo sapiens
gctaagttgtttgta

SEQ ID NO: 1472642 - DNA, 15 bp, Homo sapiens
ctaagttgtttgtat

SEQ ID NO: 1472643 - DNA, 15 bp, Homo sapiens
taagttgtttgtatt

SEQ ID NO: 1472644 - DNA, 15 bp, Homo sapiens
aagttgtttgtattt

SEQ ID NO: 1472645 - DNA, 15 bp, Homo sapiens
agttgtttgtatttt

SEQ ID NO: 1472646 - DNA, 15 bp, Homo sapiens
gttgtttgtattttt

SEQ ID NO: 1472647 - DNA, 15 bp, Homo sapiens
ttgtttgtattttta

SEQ ID NO: 1472648 - DNA, 15 bp, Homo sapiens
tgtttgtatttttag

SEQ ID NO: 1472649 - DNA, 15 bp, Homo sapiens
gtttgtatttttagt

SEQ ID NO: 1472650 - DNA, 15 bp, Homo sapiens
ggcaggctggtctcg

SEQ ID NO: 1472651 - DNA, 15 bp, Homo sapiens
gcaggctggtctcga

SEQ ID NO: 1472652 - DNA, 15 bp, Homo sapiens
ggtctcgaactcttt

SEQ ID NO: 1472653 - DNA, 15 bp, Homo sapiens
gtctcgaactcttta

SEQ ID NO: 1472654 - DNA, 15 bp, Homo sapiens
tctcgaactctttac

SEQ ID NO: 1472655 - DNA, 15 bp, Homo sapiens
ctcgaactctttacc

SEQ ID NO: 1472656 - DNA, 15 bp, Homo sapiens
tcgaactctttacct

SEQ ID NO: 1472657 - DNA, 15 bp, Homo sapiens
cgaactctttacctc

SEQ ID NO: 1472658 - DNA, 15 bp, Homo sapiens
gaactctttacctca

SEQ ID NO: 1472659 - DNA, 15 bp, Homo sapiens
aactctttacctcag

SEQ ID NO: 1472660 - DNA, 15 bp, Homo sapiens
actctttacctcagg

SEQ ID NO: 1472661 - DNA, 15 bp, Homo sapiens
ctctttacctcaggt

SEQ ID NO: 1472662 - DNA, 15 bp, Homo sapiens
tctttacctcaggtg

SEQ ID NO: 1472663 - DNA, 15 bp, Homo sapiens
ctttacctcaggtga

SEQ ID NO: 1472664 - DNA, 15 bp, Homo sapiens
tttacctcaggtgat

SEQ ID NO: 1472665 - DNA, 15 bp, Homo sapiens
ttacctcaggtgatc

SEQ ID NO: 1472666 - DNA, 15 bp, Homo sapiens
tacctcaggtgatcc

SEQ ID NO: 1472667 - DNA, 15 bp, Homo sapiens
accgtgcctggcctg

SEQ ID NO: 1472668 - DNA, 15 bp, Homo sapiens
ccgtgcctggcctgg

SEQ ID NO: 1472669 - DNA, 15 bp, Homo sapiens
cgtgcctggcctgga

SEQ ID NO: 1472670 - DNA, 15 bp, Homo sapiens
gtgcctggcctggag

SEQ ID NO: 1472671 - DNA, 15 bp, Homo sapiens
tgcctggcctggagt

SEQ ID NO: 1472672 - DNA, 15 bp, Homo sapiens
gcctggcctggagtt

SEQ ID NO: 1472673 - DNA, 15 bp, Homo sapiens
cctggcctggagttg

SEQ ID NO: 1472674 - DNA, 15 bp, Homo sapiens
ctggcctggagttga

SEQ ID NO: 1472675 - DNA, 15 bp, Homo sapiens
tggcctggagttgat

SEQ ID NO: 1472676 - DNA, 15 bp, Homo sapiens
ggcctggagttgatt

SEQ ID NO: 1472677 - DNA, 15 bp, Homo sapiens
gcctggagttgattt

SEQ ID NO: 1472678 - DNA, 15 bp, Homo sapiens
cctggagttgatttt

SEQ ID NO: 1472679 - DNA, 15 bp, Homo sapiens
ctggagttgattttg

SEQ ID NO: 1472680 - DNA, 15 bp, Homo sapiens
tggagttgattttga

SEQ ID NO: 1472681 - DNA, 15 bp, Homo sapiens
ggagttgattttgaa

SEQ ID NO: 1472682 - DNA, 15 bp, Homo sapiens
gagttgattttgaac

SEQ ID NO: 1472683 - DNA, 15 bp, Homo sapiens
agttgattttgaaca

SEQ ID NO: 1472684 - DNA, 15 bp, Homo sapiens
gttgattttgaacat

SEQ ID NO: 1472685 - DNA, 15 bp, Homo sapiens
ttgattttgaacatg

SEQ ID NO: 1472686 - DNA, 15 bp, Homo sapiens
tgattttgaacatga

SEQ ID NO: 1472687 - DNA, 15 bp, Homo sapiens
gattttgaacatgac

SEQ ID NO: 1472688 - DNA, 15 bp, Homo sapiens
attttgaacatgact

SEQ ID NO: 1472689 - DNA, 15 bp, Homo sapiens
ttttgaacatgactc

SEQ ID NO: 1472690 - DNA, 15 bp, Homo sapiens
tttgaacatgactca

SEQ ID NO: 1472691 - DNA, 15 bp, Homo sapiens
ttgaacatgactcag

SEQ ID NO: 1472692 - DNA, 15 bp, Homo sapiens
tgaacatgactcaga

SEQ ID NO: 1472693 - DNA, 15 bp, Homo sapiens
gaacatgactcagaa

SEQ ID NO: 1472694 - DNA, 15 bp, Homo sapiens
aacatgactcagaat

SEQ ID NO: 1472695 - DNA, 15 bp, Homo sapiens
acatgactcagaatt

SEQ ID NO: 1472696 - DNA, 15 bp, Homo sapiens
catgactcagaattt

SEQ ID NO: 1472697 - DNA, 15 bp, Homo sapiens
atgactcagaattta

SEQ ID NO: 1472698 - DNA, 15 bp, Homo sapiens
tgactcagaatttac

SEQ ID NO: 1472699 - DNA, 15 bp, Homo sapiens
gactcagaatttacc

SEQ ID NO: 1472700 - DNA, 15 bp, Homo sapiens
actcagaatttacca

SEQ ID NO: 1472701 - DNA, 15 bp, Homo sapiens
ctcagaatttaccag

SEQ ID NO: 1472702 - DNA, 15 bp, Homo sapiens
tcagaatttaccaga

SEQ ID NO: 1472703 - DNA, 15 bp, Homo sapiens
cagaatttaccagac

SEQ ID NO: 1472704 - DNA, 15 bp, Homo sapiens
agaatttaccagaca

SEQ ID NO: 1472705 - DNA, 15 bp, Homo sapiens
gaatttaccagacag

SEQ ID NO: 1472706 - DNA, 15 bp, Homo sapiens
aatttaccagacagg

SEQ ID NO: 1472707 - DNA, 15 bp, Homo sapiens
atttaccagacaggg

SEQ ID NO: 1472708 - DNA, 15 bp, Homo sapiens
tttaccagacagggt

SEQ ID NO: 1472709 - DNA, 15 bp, Homo sapiens
ttaccagacagggta

SEQ ID NO: 1472710 - DNA, 15 bp, Homo sapiens
taccagacagggtat

SEQ ID NO: 1472711 - DNA, 15 bp, Homo sapiens
accagacagggtatt

SEQ ID NO: 1472712 - DNA, 15 bp, Homo sapiens
ccagacagggtattc

SEQ ID NO: 1472713 - DNA, 15 bp, Homo sapiens
cagacagggtattcc

SEQ ID NO: 1472714 - DNA, 15 bp, Homo sapiens
agacagggtattcca

SEQ ID NO: 1472715 - DNA, 15 bp, Homo sapiens
gacagggtattccag

SEQ ID NO: 1472716 - DNA, 15 bp, Homo sapiens
acagggtattccagg

SEQ ID NO: 1472717 - DNA, 15 bp, Homo sapiens
cagggtattccaggg

SEQ ID NO: 1472718 - DNA, 15 bp, Homo sapiens
agggtattccaggga

SEQ ID NO: 1472719 - DNA, 15 bp, Homo sapiens
gggtattccagggag

SEQ ID NO: 1472720 - DNA, 15 bp, Homo sapiens
ggtattccagggaga

SEQ ID NO: 1472721 - DNA, 15 bp, Homo sapiens
gtattccagggagag

SEQ ID NO: 1472722 - DNA, 15 bp, Homo sapiens
tattccagggagagg

SEQ ID NO: 1472723 - DNA, 15 bp, Homo sapiens
attccagggagaggg

SEQ ID NO: 1472724 - DNA, 15 bp, Homo sapiens
ttccagggagaggga

SEQ ID NO: 1472725 - DNA, 15 bp, Homo sapiens
tccagggagagggac

SEQ ID NO: 1472726 - DNA, 15 bp, Homo sapiens
ccagggagagggacc

SEQ ID NO: 1472727 - DNA, 15 bp, Homo sapiens
cagggagagggacca

SEQ ID NO: 1472728 - DNA, 15 bp, Homo sapiens
agggagagggaccag

SEQ ID NO: 1472729 - DNA, 15 bp, Homo sapiens
gggagagggaccagc

SEQ ID NO: 1472730 - DNA, 15 bp, Homo sapiens
ggagagggaccagca

SEQ ID NO: 1472731 - DNA, 15 bp, Homo sapiens
gagagggaccagcac

SEQ ID NO: 1472732 - DNA, 15 bp, Homo sapiens
agagggaccagcacg

SEQ ID NO: 1472733 - DNA, 15 bp, Homo sapiens
gagggaccagcacgg

SEQ ID NO: 1472734 - DNA, 15 bp, Homo sapiens
agggaccagcacgga

SEQ ID NO: 1472735 - DNA, 15 bp, Homo sapiens
gggaccagcacggaa

SEQ ID NO: 1472736 - DNA, 15 bp, Homo sapiens
ggaccagcacggaaa

SEQ ID NO: 1472737 - DNA, 15 bp, Homo sapiens
gaccagcacggaaag

SEQ ID NO: 1472738 - DNA, 15 bp, Homo sapiens
accagcacggaaagg

SEQ ID NO: 1472739 - DNA, 15 bp, Homo sapiens
ccagcacggaaaggg

SEQ ID NO: 1472740 - DNA, 15 bp, Homo sapiens
cagcacggaaagggt

SEQ ID NO: 1472741 - DNA, 15 bp, Homo sapiens
agcacggaaagggtg

SEQ ID NO: 1472742 - DNA, 15 bp, Homo sapiens
gcacggaaagggtgt

SEQ ID NO: 1472743 - DNA, 15 bp, Homo sapiens
cacggaaagggtgtg

SEQ ID NO: 1472744 - DNA, 15 bp, Homo sapiens
acggaaagggtgtga

SEQ ID NO: 1472745 - DNA, 15 bp, Homo sapiens
cggaaagggtgtgaa

SEQ ID NO: 1472746 - DNA, 15 bp, Homo sapiens
ggaaagggtgtgaac

SEQ ID NO: 1472747 - DNA, 15 bp, Homo sapiens
gaaagggtgtgaaca

SEQ ID NO: 1472748 - DNA, 15 bp, Homo sapiens
aaagggtgtgaacat

SEQ ID NO: 1472749 - DNA, 15 bp, Homo sapiens
aagggtgtgaacatg

SEQ ID NO: 1472750 - DNA, 15 bp, Homo sapiens
agggtgtgaacatgg

SEQ ID NO: 1472751 - DNA, 15 bp, Homo sapiens
gggtgtgaacatggg

SEQ ID NO: 1472752 - DNA, 15 bp, Homo sapiens
ggtgtgaacatggga

SEQ ID NO: 1472753 - DNA, 15 bp, Homo sapiens
gtgtgaacatgggat

SEQ ID NO: 1472754 - DNA, 15 bp, Homo sapiens
tgtgaacatgggatg

SEQ ID NO: 1472755 - DNA, 15 bp, Homo sapiens
gtgaacatgggatgg

SEQ ID NO: 1472756 - DNA, 15 bp, Homo sapiens
tgaacatgggatggt

SEQ ID NO: 1472757 - DNA, 15 bp, Homo sapiens
gaacatgggatggtg

SEQ ID NO: 1472758 - DNA, 15 bp, Homo sapiens
aacatgggatggtgc

SEQ ID NO: 1472759 - DNA, 15 bp, Homo sapiens
acatgggatggtgcc

SEQ ID NO: 1472760 - DNA, 15 bp, Homo sapiens
catgggatggtgcca

SEQ ID NO: 1472761 - DNA, 15 bp, Homo sapiens
atgggatggtgccag

SEQ ID NO: 1472762 - DNA, 15 bp, Homo sapiens
tgggatggtgccagg

SEQ ID NO: 1472763 - DNA, 15 bp, Homo sapiens
gggatggtgccaggc

SEQ ID NO: 1472764 - DNA, 15 bp, Homo sapiens
ggatggtgccaggcc

SEQ ID NO: 1472765 - DNA, 15 bp, Homo sapiens
gatggtgccaggcca

SEQ ID NO: 1472766 - DNA, 15 bp, Homo sapiens
atggtgccaggccag

SEQ ID NO: 1472767 - DNA, 15 bp, Homo sapiens
tggtgccaggccagt

SEQ ID NO: 1472768 - DNA, 15 bp, Homo sapiens
ggtgccaggccagtg

SEQ ID NO: 1472769 - DNA, 15 bp, Homo sapiens
gtgccaggccagtga

SEQ ID NO: 1472770 - DNA, 15 bp, Homo sapiens
tgccaggccagtgag

SEQ ID NO: 1472771 - DNA, 15 bp, Homo sapiens
gccaggccagtgaga

SEQ ID NO: 1472772 - DNA, 15 bp, Homo sapiens
ccaggccagtgagag

SEQ ID NO: 1472773 - DNA, 15 bp, Homo sapiens
caggccagtgagagt

SEQ ID NO: 1472774 - DNA, 15 bp, Homo sapiens
aggccagtgagagtg

SEQ ID NO: 1472775 - DNA, 15 bp, Homo sapiens
ggccagtgagagtgc

SEQ ID NO: 1472776 - DNA, 15 bp, Homo sapiens
gccagtgagagtgcc

SEQ ID NO: 1472777 - DNA, 15 bp, Homo sapiens
ccagtgagagtgcca

SEQ ID NO: 1472778 - DNA, 15 bp, Homo sapiens
cagtgagagtgccac

SEQ ID NO: 1472779 - DNA, 15 bp, Homo sapiens
agtgagagtgccacg

SEQ ID NO: 1472780 - DNA, 15 bp, Homo sapiens
gtgagagtgccacgg

SEQ ID NO: 1472781 - DNA, 15 bp, Homo sapiens
tgagagtgccacgga

SEQ ID NO: 1472782 - DNA, 15 bp, Homo sapiens
gagagtgccacggat

SEQ ID NO: 1472783 - DNA, 15 bp, Homo sapiens
agagtgccacggata

SEQ ID NO: 1472784 - DNA, 15 bp, Homo sapiens
gagtgccacggatat

SEQ ID NO: 1472785 - DNA, 15 bp, Homo sapiens
agtgccacggatatg

SEQ ID NO: 1472786 - DNA, 15 bp, Homo sapiens
gtgccacggatatgg

SEQ ID NO: 1472787 - DNA, 15 bp, Homo sapiens
tgccacggatatggg

SEQ ID NO: 1472788 - DNA, 15 bp, Homo sapiens
gccacggatatgggg

SEQ ID NO: 1472789 - DNA, 15 bp, Homo sapiens
ccacggatatggggc

SEQ ID NO: 1472790 - DNA, 15 bp, Homo sapiens
cacggatatggggca

SEQ ID NO: 1472791 - DNA, 15 bp, Homo sapiens
acggatatggggcag

SEQ ID NO: 1472792 - DNA, 15 bp, Homo sapiens
cggatatggggcagc

SEQ ID NO: 1472793 - DNA, 15 bp, Homo sapiens
ggatatggggcagca

SEQ ID NO: 1472794 - DNA, 15 bp, Homo sapiens
gatatggggcagcag

SEQ ID NO: 1472795 - DNA, 15 bp, Homo sapiens
atatggggcagcagg

SEQ ID NO: 1472796 - DNA, 15 bp, Homo sapiens
tatggggcagcaggt

SEQ ID NO: 1472797 - DNA, 15 bp, Homo sapiens
atggggcagcaggtg

SEQ ID NO: 1472798 - DNA, 15 bp, Homo sapiens
tggggcagcaggtga

SEQ ID NO: 1472799 - DNA, 15 bp, Homo sapiens
ggggcagcaggtgag

SEQ ID NO: 1472800 - DNA, 15 bp, Homo sapiens
gggcagcaggtgagg

SEQ ID NO: 1472801 - DNA, 15 bp, Homo sapiens
ggcagcaggtgagga

SEQ ID NO: 1472802 - DNA, 15 bp, Homo sapiens
gcagcaggtgaggag

SEQ ID NO: 1472803 - DNA, 15 bp, Homo sapiens
cagcaggtgaggagg

SEQ ID NO: 1472804 - DNA, 15 bp, Homo sapiens
agcaggtgaggaggc

SEQ ID NO: 1472805 - DNA, 15 bp, Homo sapiens
gcaggtgaggaggca

SEQ ID NO: 1472806 - DNA, 15 bp, Homo sapiens
caggtgaggaggcag

SEQ ID NO: 1472807 - DNA, 15 bp, Homo sapiens
aggtgaggaggcagg

SEQ ID NO: 1472808 - DNA, 15 bp, Homo sapiens
ggtgaggaggcagga

SEQ ID NO: 1472809 - DNA, 15 bp, Homo sapiens
gtgaggaggcaggac

SEQ ID NO: 1472810 - DNA, 15 bp, Homo sapiens
tgaggaggcaggaca

SEQ ID NO: 1472811 - DNA, 15 bp, Homo sapiens
gaggaggcaggacac

SEQ ID NO: 1472812 - DNA, 15 bp, Homo sapiens
aggaggcaggacaca

SEQ ID NO: 1472813 - DNA, 15 bp, Homo sapiens
ggaggcaggacacag

SEQ ID NO: 1472814 - DNA, 15 bp, Homo sapiens
gaggcaggacacagg

SEQ ID NO: 1472815 - DNA, 15 bp, Homo sapiens
aggcaggacacaggt

SEQ ID NO: 1472816 - DNA, 15 bp, Homo sapiens
ggcaggacacaggtg

SEQ ID NO: 1472817 - DNA, 15 bp, Homo sapiens
gcaggacacaggtga

SEQ ID NO: 1472818 - DNA, 15 bp, Homo sapiens
caggacacaggtgag

SEQ ID NO: 1472819 - DNA, 15 bp, Homo sapiens
aggacacaggtgagg

SEQ ID NO: 1472820 - DNA, 15 bp, Homo sapiens
ggacacaggtgaggc

SEQ ID NO: 1472821 - DNA, 15 bp, Homo sapiens
gacacaggtgaggcc

SEQ ID NO: 1472822 - DNA, 15 bp, Homo sapiens
acacaggtgaggcct

SEQ ID NO: 1472823 - DNA, 15 bp, Homo sapiens
cacaggtgaggcctg

SEQ ID NO: 1472824 - DNA, 15 bp, Homo sapiens
acaggtgaggcctga

SEQ ID NO: 1472825 - DNA, 15 bp, Homo sapiens
caggtgaggcctgac

SEQ ID NO: 1472826 - DNA, 15 bp, Homo sapiens
aggtgaggcctgacc

SEQ ID NO: 1472827 - DNA, 15 bp, Homo sapiens
ggtgaggcctgaccc

SEQ ID NO: 1472828 - DNA, 15 bp, Homo sapiens
gtgaggcctgacccc

SEQ ID NO: 1472829 - DNA, 15 bp, Homo sapiens
tgaggcctgacccca

SEQ ID NO: 1472830 - DNA, 15 bp, Homo sapiens
gaggcctgaccccag

SEQ ID NO: 1472831 - DNA, 15 bp, Homo sapiens
aggcctgaccccaga

SEQ ID NO: 1472832 - DNA, 15 bp, Homo sapiens
ggcctgaccccagaa

SEQ ID NO: 1472833 - DNA, 15 bp, Homo sapiens
gcctgaccccagaaa

SEQ ID NO: 1472834 - DNA, 15 bp, Homo sapiens
cctgaccccagaaag

SEQ ID NO: 1472835 - DNA, 15 bp, Homo sapiens
ctgaccccagaaagc

SEQ ID NO: 1472836 - DNA, 15 bp, Homo sapiens
tgaccccagaaagcc

SEQ ID NO: 1472837 - DNA, 15 bp, Homo sapiens
gaccccagaaagcct

SEQ ID NO: 1472838 - DNA, 15 bp, Homo sapiens
accccagaaagccta

SEQ ID NO: 1472839 - DNA, 15 bp, Homo sapiens
ccccagaaagcctat

SEQ ID NO: 1472840 - DNA, 15 bp, Homo sapiens
cccagaaagcctatt

SEQ ID NO: 1472841 - DNA, 15 bp, Homo sapiens
ccagaaagcctattg

SEQ ID NO: 1472842 - DNA, 15 bp, Homo sapiens
cagaaagcctattgt

SEQ ID NO: 1472843 - DNA, 15 bp, Homo sapiens
agaaagcctattgtg

SEQ ID NO: 1472844 - DNA, 15 bp, Homo sapiens
gaaagcctattgtgc

SEQ ID NO: 1472845 - DNA, 15 bp, Homo sapiens
aaagcctattgtgcc

SEQ ID NO: 1472846 - DNA, 15 bp, Homo sapiens
aagcctattgtgcca

SEQ ID NO: 1472847 - DNA, 15 bp, Homo sapiens
agcctattgtgccag

SEQ ID NO: 1472848 - DNA, 15 bp, Homo sapiens
gcctattgtgccagg

SEQ ID NO: 1472849 - DNA, 15 bp, Homo sapiens
cctattgtgccaggc

SEQ ID NO: 1472850 - DNA, 15 bp, Homo sapiens
ctattgtgccaggct

SEQ ID NO: 1472851 - DNA, 15 bp, Homo sapiens
tattgtgccaggcta

SEQ ID NO: 1472852 - DNA, 15 bp, Homo sapiens
attgtgccaggctat

SEQ ID NO: 1472853 - DNA, 15 bp, Homo sapiens
ttgtgccaggctata

SEQ ID NO: 1472854 - DNA, 15 bp, Homo sapiens
tgtgccaggctatag

SEQ ID NO: 1472855 - DNA, 15 bp, Homo sapiens
gtgccaggctatagg

SEQ ID NO: 1472856 - DNA, 15 bp, Homo sapiens
tgccaggctataggg

SEQ ID NO: 1472857 - DNA, 15 bp, Homo sapiens
gccaggctataggga

SEQ ID NO: 1472858 - DNA, 15 bp, Homo sapiens
ccaggctatagggaa

SEQ ID NO: 1472859 - DNA, 15 bp, Homo sapiens
caggctatagggaat

SEQ ID NO: 1472860 - DNA, 15 bp, Homo sapiens
aggctatagggaatt

SEQ ID NO: 1472861 - DNA, 15 bp, Homo sapiens
ggctatagggaattt

SEQ ID NO: 1472862 - DNA, 15 bp, Homo sapiens
gctatagggaatttg

SEQ ID NO: 1472863 - DNA, 15 bp, Homo sapiens
ctatagggaatttgg

SEQ ID NO: 1472864 - DNA, 15 bp, Homo sapiens
tatagggaatttggg

SEQ ID NO: 1472865 - DNA, 15 bp, Homo sapiens
atagggaatttgggt

SEQ ID NO: 1472866 - DNA, 15 bp, Homo sapiens
tagggaatttgggtt

SEQ ID NO: 1472867 - DNA, 15 bp, Homo sapiens
agggaatttgggttt

SEQ ID NO: 1472868 - DNA, 15 bp, Homo sapiens
gggaatttgggtttt

SEQ ID NO: 1472869 - DNA, 15 bp, Homo sapiens
ggaatttgggttttc

SEQ ID NO: 1472870 - DNA, 15 bp, Homo sapiens
gaatttgggttttct

SEQ ID NO: 1472871 - DNA, 15 bp, Homo sapiens
aatttgggttttctg

SEQ ID NO: 1472872 - DNA, 15 bp, Homo sapiens
atttgggttttctgt

SEQ ID NO: 1472873 - DNA, 15 bp, Homo sapiens
tttgggttttctgtt

SEQ ID NO: 1472874 - DNA, 15 bp, Homo sapiens
ttgggttttctgttg

SEQ ID NO: 1472875 - DNA, 15 bp, Homo sapiens
tgggttttctgttgt

SEQ ID NO: 1472876 - DNA, 15 bp, Homo sapiens
gggttttctgttgtc

SEQ ID NO: 1472877 - DNA, 15 bp, Homo sapiens
ggttttctgttgtca

SEQ ID NO: 1472878 - DNA, 15 bp, Homo sapiens
gttttctgttgtcaa

SEQ ID NO: 1472879 - DNA, 15 bp, Homo sapiens
ttttctgttgtcaat

SEQ ID NO: 1472880 - DNA, 15 bp, Homo sapiens
tttctgttgtcaatg

SEQ ID NO: 1472881 - DNA, 15 bp, Homo sapiens
ttctgttgtcaatga

SEQ ID NO: 1472882 - DNA, 15 bp, Homo sapiens
tctgttgtcaatgat

SEQ ID NO: 1472883 - DNA, 15 bp, Homo sapiens
ctgttgtcaatgatg

SEQ ID NO: 1472884 - DNA, 15 bp, Homo sapiens
tgttgtcaatgatgg

SEQ ID NO: 1472885 - DNA, 15 bp, Homo sapiens
gttgtcaatgatggg

SEQ ID NO: 1472886 - DNA, 15 bp, Homo sapiens
ttgtcaatgatggga

SEQ ID NO: 1472887 - DNA, 15 bp, Homo sapiens
tgtcaatgatgggaa

SEQ ID NO: 1472888 - DNA, 15 bp, Homo sapiens
gtcaatgatgggaaa

SEQ ID NO: 1472889 - DNA, 15 bp, Homo sapiens
tcaatgatgggaaaa

SEQ ID NO: 1472890 - DNA, 15 bp, Homo sapiens
caatgatgggaaaat

SEQ ID NO: 1472891 - DNA, 15 bp, Homo sapiens
aatgatgggaaaatc

SEQ ID NO: 1472892 - DNA, 15 bp, Homo sapiens
atgatgggaaaatca

SEQ ID NO: 1472893 - DNA, 15 bp, Homo sapiens
tgatgggaaaatcag

SEQ ID NO: 1472894 - DNA, 15 bp, Homo sapiens
gatgggaaaatcagt

SEQ ID NO: 1472895 - DNA, 15 bp, Homo sapiens
atgggaaaatcagtg

SEQ ID NO: 1472896 - DNA, 15 bp, Homo sapiens
tgggaaaatcagtgc

SEQ ID NO: 1472897 - DNA, 15 bp, Homo sapiens
gggaaaatcagtgca

SEQ ID NO: 1472898 - DNA, 15 bp, Homo sapiens
ggaaaatcagtgcag

SEQ ID NO: 1472899 - DNA, 15 bp, Homo sapiens
gaaaatcagtgcagg

SEQ ID NO: 1472900 - DNA, 15 bp, Homo sapiens
aaaatcagtgcaggt

SEQ ID NO: 1472901 - DNA, 15 bp, Homo sapiens
aaatcagtgcaggtt

SEQ ID NO: 1472902 - DNA, 15 bp, Homo sapiens
aatcagtgcaggttt

SEQ ID NO: 1472903 - DNA, 15 bp, Homo sapiens
atcagtgcaggtttc

SEQ ID NO: 1472904 - DNA, 15 bp, Homo sapiens
tcagtgcaggtttcc

SEQ ID NO: 1472905 - DNA, 15 bp, Homo sapiens
cagtgcaggtttcca

SEQ ID NO: 1472906 - DNA, 15 bp, Homo sapiens
agtgcaggtttccag

SEQ ID NO: 1472907 - DNA, 15 bp, Homo sapiens
gtgcaggtttccaga

SEQ ID NO: 1472908 - DNA, 15 bp, Homo sapiens
tgcaggtttccagaa

SEQ ID NO: 1472909 - DNA, 15 bp, Homo sapiens
gcaggtttccagaag

SEQ ID NO: 1472910 - DNA, 15 bp, Homo sapiens
caggtttccagaaga

SEQ ID NO: 1472911 - DNA, 15 bp, Homo sapiens
aggtttccagaagag

SEQ ID NO: 1472912 - DNA, 15 bp, Homo sapiens
ggtttccagaagagg

SEQ ID NO: 1472913 - DNA, 15 bp, Homo sapiens
gtttccagaagagga

SEQ ID NO: 1472914 - DNA, 15 bp, Homo sapiens
tttccagaagaggat

SEQ ID NO: 1472915 - DNA, 15 bp, Homo sapiens
ttccagaagaggatg

SEQ ID NO: 1472916 - DNA, 15 bp, Homo sapiens
tccagaagaggatgt

SEQ ID NO: 1472917 - DNA, 15 bp, Homo sapiens
ccagaagaggatgtg

SEQ ID NO: 1472918 - DNA, 15 bp, Homo sapiens
cagaagaggatgtga

SEQ ID NO: 1472919 - DNA, 15 bp, Homo sapiens
agaagaggatgtgac

SEQ ID NO: 1472920 - DNA, 15 bp, Homo sapiens
gaagaggatgtgaca

SEQ ID NO: 1472921 - DNA, 15 bp, Homo sapiens
aagaggatgtgacaa

SEQ ID NO: 1472922 - DNA, 15 bp, Homo sapiens
agaggatgtgacaac

SEQ ID NO: 1472923 - DNA, 15 bp, Homo sapiens
gaggatgtgacaact

SEQ ID NO: 1472924 - DNA, 15 bp, Homo sapiens
aggatgtgacaactc

SEQ ID NO: 1472925 - DNA, 15 bp, Homo sapiens
ggatgtgacaactca

SEQ ID NO: 1472926 - DNA, 15 bp, Homo sapiens
gatgtgacaactcac

SEQ ID NO: 1472927 - DNA, 15 bp, Homo sapiens
atgtgacaactcaca

SEQ ID NO: 1472928 - DNA, 15 bp, Homo sapiens
tgtgacaactcacat

SEQ ID NO: 1472929 - DNA, 15 bp, Homo sapiens
gtgacaactcacatt

SEQ ID NO: 1472930 - DNA, 15 bp, Homo sapiens
acaactcacattttg

SEQ ID NO: 1472931 - DNA, 15 bp, Homo sapiens
caactcacattttgt

SEQ ID NO: 1472932 - DNA, 15 bp, Homo sapiens
aactcacattttgtt

SEQ ID NO: 1472933 - DNA, 15 bp, Homo sapiens
actcacattttgttc

SEQ ID NO: 1472934 - DNA, 15 bp, Homo sapiens
ctcacattttgttca

SEQ ID NO: 1472935 - DNA, 15 bp, Homo sapiens
tcacattttgttcaa

SEQ ID NO: 1472936 - DNA, 15 bp, Homo sapiens
cacattttgttcaat

SEQ ID NO: 1472937 - DNA, 15 bp, Homo sapiens
acattttgttcaatt

SEQ ID NO: 1472938 - DNA, 15 bp, Homo sapiens
cattttgttcaattg

SEQ ID NO: 1472939 - DNA, 15 bp, Homo sapiens
attttgttcaattga

SEQ ID NO: 1472940 - DNA, 15 bp, Homo sapiens
ttttgttcaattgag

SEQ ID NO: 1472941 - DNA, 15 bp, Homo sapiens
tttgttcaattgagt

SEQ ID NO: 1472942 - DNA, 15 bp, Homo sapiens
ttgttcaattgagtt

SEQ ID NO: 1472943 - DNA, 15 bp, Homo sapiens
tgttcaattgagtta

SEQ ID NO: 1472944 - DNA, 15 bp, Homo sapiens
gttcaattgagttaa

SEQ ID NO: 1472945 - DNA, 15 bp, Homo sapiens
ttcaattgagttaaa

SEQ ID NO: 1472946 - DNA, 15 bp, Homo sapiens
tcaattgagttaaat

SEQ ID NO: 1472947 - DNA, 15 bp, Homo sapiens
caattgagttaaata

SEQ ID NO: 1472948 - DNA, 15 bp, Homo sapiens
aattgagttaaataa

SEQ ID NO: 1472949 - DNA, 15 bp, Homo sapiens
attgagttaaataag

SEQ ID NO: 1472950 - DNA, 15 bp, Homo sapiens
ttgagttaaataagc

SEQ ID NO: 1472951 - DNA, 15 bp, Homo sapiens
tgagttaaataagca

SEQ ID NO: 1472952 - DNA, 15 bp, Homo sapiens
gagttaaataagcac

SEQ ID NO: 1472953 - DNA, 15 bp, Homo sapiens
agttaaataagcact

SEQ ID NO: 1472954 - DNA, 15 bp, Homo sapiens
gttaaataagcactt

SEQ ID NO: 1472955 - DNA, 15 bp, Homo sapiens
ttaaataagcactta

SEQ ID NO: 1472956 - DNA, 15 bp, Homo sapiens
taaataagcacttat

SEQ ID NO: 1472957 - DNA, 15 bp, Homo sapiens
aaataagcacttata

SEQ ID NO: 1472958 - DNA, 15 bp, Homo sapiens
aataagcacttatag

SEQ ID NO: 1472959 - DNA, 15 bp, Homo sapiens
ataagcacttataga

SEQ ID NO: 1472960 - DNA, 15 bp, Homo sapiens
taagcacttatagag

SEQ ID NO: 1472961 - DNA, 15 bp, Homo sapiens
aagcacttatagagt

SEQ ID NO: 1472962 - DNA, 15 bp, Homo sapiens
agcacttatagagtg

SEQ ID NO: 1472963 - DNA, 15 bp, Homo sapiens
gcacttatagagtgt

SEQ ID NO: 1472964 - DNA, 15 bp, Homo sapiens
cacttatagagtgtc

SEQ ID NO: 1472965 - DNA, 15 bp, Homo sapiens
acttatagagtgtct

SEQ ID NO: 1472966 - DNA, 15 bp, Homo sapiens
cttatagagtgtcta

SEQ ID NO: 1472967 - DNA, 15 bp, Homo sapiens
ttatagagtgtctac

SEQ ID NO: 1472968 - DNA, 15 bp, Homo sapiens
tatagagtgtctacc

SEQ ID NO: 1472969 - DNA, 15 bp, Homo sapiens
atagagtgtctacca

SEQ ID NO: 1472970 - DNA, 15 bp, Homo sapiens
tagagtgtctaccac

SEQ ID NO: 1472971 - DNA, 15 bp, Homo sapiens
agagtgtctaccaca

SEQ ID NO: 1472972 - DNA, 15 bp, Homo sapiens
gagtgtctaccacat

SEQ ID NO: 1472973 - DNA, 15 bp, Homo sapiens
agtgtctaccacatg

SEQ ID NO: 1472974 - DNA, 15 bp, Homo sapiens
gtgtctaccacatgc

SEQ ID NO: 1472975 - DNA, 15 bp, Homo sapiens
tgtctaccacatgca

SEQ ID NO: 1472976 - DNA, 15 bp, Homo sapiens
gtctaccacatgcag

SEQ ID NO: 1472977 - DNA, 15 bp, Homo sapiens
tctaccacatgcaga

SEQ ID NO: 1472978 - DNA, 15 bp, Homo sapiens
ctaccacatgcagaa

SEQ ID NO: 1472979 - DNA, 15 bp, Homo sapiens
taccacatgcagaac

SEQ ID NO: 1472980 - DNA, 15 bp, Homo sapiens
accacatgcagaaca

SEQ ID NO: 1472981 - DNA, 15 bp, Homo sapiens
ccacatgcagaacac

SEQ ID NO: 1472982 - DNA, 15 bp, Homo sapiens
cacatgcagaacact

SEQ ID NO: 1472983 - DNA, 15 bp, Homo sapiens
acatgcagaacactc

SEQ ID NO: 1472984 - DNA, 15 bp, Homo sapiens
catgcagaacactca

SEQ ID NO: 1472985 - DNA, 15 bp, Homo sapiens
atgcagaacactcac

SEQ ID NO: 1472986 - DNA, 15 bp, Homo sapiens
tgcagaacactcact

SEQ ID NO: 1472987 - DNA, 15 bp, Homo sapiens
gcagaacactcactg

SEQ ID NO: 1472988 - DNA, 15 bp, Homo sapiens
cagaacactcactga

SEQ ID NO: 1472989 - DNA, 15 bp, Homo sapiens
agaacactcactgaa

SEQ ID NO: 1472990 - DNA, 15 bp, Homo sapiens
gaacactcactgaat

SEQ ID NO: 1472991 - DNA, 15 bp, Homo sapiens
aacactcactgaatc

SEQ ID NO: 1472992 - DNA, 15 bp, Homo sapiens
acactcactgaatcg

SEQ ID NO: 1472993 - DNA, 15 bp, Homo sapiens
cactcactgaatcga

SEQ ID NO: 1472994 - DNA, 15 bp, Homo sapiens
actcactgaatcgag

SEQ ID NO: 1472995 - DNA, 15 bp, Homo sapiens
ctcactgaatcgagt

SEQ ID NO: 1472996 - DNA, 15 bp, Homo sapiens
tcactgaatcgagta

SEQ ID NO: 1472997 - DNA, 15 bp, Homo sapiens
cactgaatcgagtat

SEQ ID NO: 1472998 - DNA, 15 bp, Homo sapiens
actgaatcgagtatg

SEQ ID NO: 1472999 - DNA, 15 bp, Homo sapiens
ctgaatcgagtatgg

SEQ ID NO: 1473000 - DNA, 15 bp, Homo sapiens
tgaatcgagtatgga

SEQ ID NO: 1473001 - DNA, 15 bp, Homo sapiens
gaatcgagtatggat

SEQ ID NO: 1473002 - DNA, 15 bp, Homo sapiens
aatcgagtatggatg

SEQ ID NO: 1473003 - DNA, 15 bp, Homo sapiens
atcgagtatggatga

SEQ ID NO: 1473004 - DNA, 15 bp, Homo sapiens
tcgagtatggatgat

SEQ ID NO: 1473005 - DNA, 15 bp, Homo sapiens
cgagtatggatgata

SEQ ID NO: 1473006 - DNA, 15 bp, Homo sapiens
gagtatggatgatac

SEQ ID NO: 1473007 - DNA, 15 bp, Homo sapiens
agtatggatgataca

SEQ ID NO: 1473008 - DNA, 15 bp, Homo sapiens
gtatggatgatacaa

SEQ ID NO: 1473009 - DNA, 15 bp, Homo sapiens
tatggatgatacaaa

SEQ ID NO: 1473010 - DNA, 15 bp, Homo sapiens
atggatgatacaaag

SEQ ID NO: 1473011 - DNA, 15 bp, Homo sapiens
tggatgatacaaaga

SEQ ID NO: 1473012 - DNA, 15 bp, Homo sapiens
ggatgatacaaagaa

SEQ ID NO: 1473013 - DNA, 15 bp, Homo sapiens
gatgatacaaagaaa

SEQ ID NO: 1473014 - DNA, 15 bp, Homo sapiens
atgatacaaagaaaa

SEQ ID NO: 1473015 - DNA, 15 bp, Homo sapiens
tgatacaaagaaaaa

SEQ ID NO: 1473016 - DNA, 15 bp, Homo sapiens
gatacaaagaaaaat

SEQ ID NO: 1473017 - DNA, 15 bp, Homo sapiens
atacaaagaaaaatc

SEQ ID NO: 1473018 - DNA, 15 bp, Homo sapiens
tacaaagaaaaatct

SEQ ID NO: 1473019 - DNA, 15 bp, Homo sapiens
acaaagaaaaatcta

SEQ ID NO: 1473020 - DNA, 15 bp, Homo sapiens
caaagaaaaatctat

SEQ ID NO: 1473021 - DNA, 15 bp, Homo sapiens
aaagaaaaatctatc

SEQ ID NO: 1473022 - DNA, 15 bp, Homo sapiens
aagaaaaatctatcc

SEQ ID NO: 1473023 - DNA, 15 bp, Homo sapiens
agaaaaatctatccc

SEQ ID NO: 1473024 - DNA, 15 bp, Homo sapiens
gaaaaatctatccca

SEQ ID NO: 1473025 - DNA, 15 bp, Homo sapiens
aaaaatctatcccaa

SEQ ID NO: 1473026 - DNA, 15 bp, Homo sapiens
aaaatctatcccaag

SEQ ID NO: 1473027 - DNA, 15 bp, Homo sapiens
aaatctatcccaagc

SEQ ID NO: 1473028 - DNA, 15 bp, Homo sapiens
aatctatcccaagcc

SEQ ID NO: 1473029 - DNA, 15 bp, Homo sapiens
atctatcccaagccc

SEQ ID NO: 1473030 - DNA, 15 bp, Homo sapiens
tctatcccaagccct

SEQ ID NO: 1473031 - DNA, 15 bp, Homo sapiens
ctatcccaagccctc

SEQ ID NO: 1473032 - DNA, 15 bp, Homo sapiens
tatcccaagccctcc

SEQ ID NO: 1473033 - DNA, 15 bp, Homo sapiens
atcccaagccctcct

SEQ ID NO: 1473034 - DNA, 15 bp, Homo sapiens
tcccaagccctcctg

SEQ ID NO: 1473035 - DNA, 15 bp, Homo sapiens
cccaagccctcctgc

SEQ ID NO: 1473036 - DNA, 15 bp, Homo sapiens
ccaagccctcctgcc

SEQ ID NO: 1473037 - DNA, 15 bp, Homo sapiens
caagccctcctgcct

SEQ ID NO: 1473038 - DNA, 15 bp, Homo sapiens
aagccctcctgccta

SEQ ID NO: 1473039 - DNA, 15 bp, Homo sapiens
agccctcctgcctac

SEQ ID NO: 1473040 - DNA, 15 bp, Homo sapiens
gccctcctgcctaca

SEQ ID NO: 1473041 - DNA, 15 bp, Homo sapiens
ccctcctgcctacac

SEQ ID NO: 1473042 - DNA, 15 bp, Homo sapiens
cctcctgcctacact

SEQ ID NO: 1473043 - DNA, 15 bp, Homo sapiens
ctcctgcctacactg

SEQ ID NO: 1473044 - DNA, 15 bp, Homo sapiens
tcctgcctacactgc

SEQ ID NO: 1473045 - DNA, 15 bp, Homo sapiens
cctgcctacactgcc

SEQ ID NO: 1473046 - DNA, 15 bp, Homo sapiens
ctgcctacactgcct

SEQ ID NO: 1473047 - DNA, 15 bp, Homo sapiens
tgcctacactgcctg

SEQ ID NO: 1473048 - DNA, 15 bp, Homo sapiens
gcctacactgcctga

SEQ ID NO: 1473049 - DNA, 15 bp, Homo sapiens
cctacactgcctgag

SEQ ID NO: 1473050 - DNA, 15 bp, Homo sapiens
ctacactgcctgagc

SEQ ID NO: 1473051 - DNA, 15 bp, Homo sapiens
tacactgcctgagcc

SEQ ID NO: 1473052 - DNA, 15 bp, Homo sapiens
acactgcctgagcct

SEQ ID NO: 1473053 - DNA, 15 bp, Homo sapiens
cactgcctgagcctc

SEQ ID NO: 1473054 - DNA, 15 bp, Homo sapiens
actgcctgagcctca

SEQ ID NO: 1473055 - DNA, 15 bp, Homo sapiens
ctgcctgagcctcat

SEQ ID NO: 1473056 - DNA, 15 bp, Homo sapiens
tgcctgagcctcatg

SEQ ID NO: 1473057 - DNA, 15 bp, Homo sapiens
gcctgagcctcatgg

SEQ ID NO: 1473058 - DNA, 15 bp, Homo sapiens
cctgagcctcatggg

SEQ ID NO: 1473059 - DNA, 15 bp, Homo sapiens
ctgagcctcatggga

SEQ ID NO: 1473060 - DNA, 15 bp, Homo sapiens
tgagcctcatgggac

SEQ ID NO: 1473061 - DNA, 15 bp, Homo sapiens
gagcctcatgggacc

SEQ ID NO: 1473062 - DNA, 15 bp, Homo sapiens
agcctcatgggaccc

SEQ ID NO: 1473063 - DNA, 15 bp, Homo sapiens
gcctcatgggaccct

SEQ ID NO: 1473064 - DNA, 15 bp, Homo sapiens
cctcatgggacccta

SEQ ID NO: 1473065 - DNA, 15 bp, Homo sapiens
ctcatgggaccctaa

SEQ ID NO: 1473066 - DNA, 15 bp, Homo sapiens
tcatgggaccctaaa

SEQ ID NO: 1473067 - DNA, 15 bp, Homo sapiens
catgggaccctaaat

SEQ ID NO: 1473068 - DNA, 15 bp, Homo sapiens
atgggaccctaaata

SEQ ID NO: 1473069 - DNA, 15 bp, Homo sapiens
tgggaccctaaataa

SEQ ID NO: 1473070 - DNA, 15 bp, Homo sapiens
gggaccctaaataag

SEQ ID NO: 1473071 - DNA, 15 bp, Homo sapiens
ggaccctaaataagt

SEQ ID NO: 1473072 - DNA, 15 bp, Homo sapiens
gaccctaaataagtt

SEQ ID NO: 1473073 - DNA, 15 bp, Homo sapiens
accctaaataagttt

SEQ ID NO: 1473074 - DNA, 15 bp, Homo sapiens
ccctaaataagtttg

SEQ ID NO: 1473075 - DNA, 15 bp, Homo sapiens
cctaaataagtttgg

SEQ ID NO: 1473076 - DNA, 15 bp, Homo sapiens
ctaaataagtttggt

SEQ ID NO: 1473077 - DNA, 15 bp, Homo sapiens
taaataagtttggta

SEQ ID NO: 1473078 - DNA, 15 bp, Homo sapiens
aaataagtttggtaa

SEQ ID NO: 1473079 - DNA, 15 bp, Homo sapiens
aataagtttggtaag

SEQ ID NO: 1473080 - DNA, 15 bp, Homo sapiens
ataagtttggtaagg

SEQ ID NO: 1473081 - DNA, 15 bp, Homo sapiens
taagtttggtaagga

SEQ ID NO: 1473082 - DNA, 15 bp, Homo sapiens
aagtttggtaaggaa

SEQ ID NO: 1473083 - DNA, 15 bp, Homo sapiens
agtttggtaaggaat

SEQ ID NO: 1473084 - DNA, 15 bp, Homo sapiens
gtttggtaaggaatg

SEQ ID NO: 1473085 - DNA, 15 bp, Homo sapiens
tttggtaaggaatga

SEQ ID NO: 1473086 - DNA, 15 bp, Homo sapiens
ttggtaaggaatgag

SEQ ID NO: 1473087 - DNA, 15 bp, Homo sapiens
tggtaaggaatgagt

SEQ ID NO: 1473088 - DNA, 15 bp, Homo sapiens
ggtaaggaatgagtg

SEQ ID NO: 1473089 - DNA, 15 bp, Homo sapiens
gtaaggaatgagtgg

SEQ ID NO: 1473090 - DNA, 15 bp, Homo sapiens
taaggaatgagtggt

SEQ ID NO: 1473091 - DNA, 15 bp, Homo sapiens
aaggaatgagtggtg

SEQ ID NO: 1473092 - DNA, 15 bp, Homo sapiens
aggaatgagtggtga

SEQ ID NO: 1473093 - DNA, 15 bp, Homo sapiens
ggaatgagtggtgag

SEQ ID NO: 1473094 - DNA, 15 bp, Homo sapiens
gaatgagtggtgaga

SEQ ID NO: 1473095 - DNA, 15 bp, Homo sapiens
aatgagtggtgagaa

SEQ ID NO: 1473096 - DNA, 15 bp, Homo sapiens
atgagtggtgagaaa

SEQ ID NO: 1473097 - DNA, 15 bp, Homo sapiens
tgagtggtgagaaag

SEQ ID NO: 1473098 - DNA, 15 bp, Homo sapiens
agtggtgagaaaggg

SEQ ID NO: 1473099 - DNA, 15 bp, Homo sapiens
gtggtgagaaagggt

SEQ ID NO: 1473100 - DNA, 15 bp, Homo sapiens
tggtgagaaagggtg

SEQ ID NO: 1473101 - DNA, 15 bp, Homo sapiens
ggtgagaaagggtga

SEQ ID NO: 1473102 - DNA, 15 bp, Homo sapiens
gtgagaaagggtgag

SEQ ID NO: 1473103 - DNA, 15 bp, Homo sapiens
tgagaaagggtgagg

SEQ ID NO: 1473104 - DNA, 15 bp, Homo sapiens
gagaaagggtgagga

SEQ ID NO: 1473105 - DNA, 15 bp, Homo sapiens
agaaagggtgaggag

SEQ ID NO: 1473106 - DNA, 15 bp, Homo sapiens
gaaagggtgaggaga

SEQ ID NO: 1473107 - DNA, 15 bp, Homo sapiens
aaagggtgaggagaa

SEQ ID NO: 1473108 - DNA, 15 bp, Homo sapiens
aagggtgaggagaaa

SEQ ID NO: 1473109 - DNA, 15 bp, Homo sapiens
agggtgaggagaaac

SEQ ID NO: 1473110 - DNA, 15 bp, Homo sapiens
gggtgaggagaaaca

SEQ ID NO: 1473111 - DNA, 15 bp, Homo sapiens
ggtgaggagaaacaa

SEQ ID NO: 1473112 - DNA, 15 bp, Homo sapiens
gtgaggagaaacaag

SEQ ID NO: 1473113 - DNA, 15 bp, Homo sapiens
tgaggagaaacaaga

SEQ ID NO: 1473114 - DNA, 15 bp, Homo sapiens
gaggagaaacaagag

SEQ ID NO: 1473115 - DNA, 15 bp, Homo sapiens
aggagaaacaagagc

SEQ ID NO: 1473116 - DNA, 15 bp, Homo sapiens
ggagaaacaagagca

SEQ ID NO: 1473117 - DNA, 15 bp, Homo sapiens
gagaaacaagagcac

SEQ ID NO: 1473118 - DNA, 15 bp, Homo sapiens
agaaacaagagcaca

SEQ ID NO: 1473119 - DNA, 15 bp, Homo sapiens
gaaacaagagcacac

SEQ ID NO: 1473120 - DNA, 15 bp, Homo sapiens
aaacaagagcacaca

SEQ ID NO: 1473121 - DNA, 15 bp, Homo sapiens
aacaagagcacacat

SEQ ID NO: 1473122 - DNA, 15 bp, Homo sapiens
acaagagcacacatc

SEQ ID NO: 1473123 - DNA, 15 bp, Homo sapiens
caagagcacacatcg

SEQ ID NO: 1473124 - DNA, 15 bp, Homo sapiens
aagagcacacatcgt

SEQ ID NO: 1473125 - DNA, 15 bp, Homo sapiens
agagcacacatcgtc

SEQ ID NO: 1473126 - DNA, 15 bp, Homo sapiens
gagcacacatcgtct

SEQ ID NO: 1473127 - DNA, 15 bp, Homo sapiens
agcacacatcgtctt

SEQ ID NO: 1473128 - DNA, 15 bp, Homo sapiens
gcacacatcgtcttg

SEQ ID NO: 1473129 - DNA, 15 bp, Homo sapiens
cacacatcgtcttga

SEQ ID NO: 1473130 - DNA, 15 bp, Homo sapiens
acacatcgtcttgat

SEQ ID NO: 1473131 - DNA, 15 bp, Homo sapiens
cacatcgtcttgata

SEQ ID NO: 1473132 - DNA, 15 bp, Homo sapiens
acatcgtcttgatac

SEQ ID NO: 1473133 - DNA, 15 bp, Homo sapiens
catcgtcttgatacg

SEQ ID NO: 1473134 - DNA, 15 bp, Homo sapiens
atcgtcttgatacgg

SEQ ID NO: 1473135 - DNA, 15 bp, Homo sapiens
tcgtcttgatacggg

SEQ ID NO: 1473136 - DNA, 15 bp, Homo sapiens
cgtcttgatacggga

SEQ ID NO: 1473137 - DNA, 15 bp, Homo sapiens
gtcttgatacgggat

SEQ ID NO: 1473138 - DNA, 15 bp, Homo sapiens
tcttgatacgggatc

SEQ ID NO: 1473139 - DNA, 15 bp, Homo sapiens
cttgatacgggatct

SEQ ID NO: 1473140 - DNA, 15 bp, Homo sapiens
ttgatacgggatcta

SEQ ID NO: 1473141 - DNA, 15 bp, Homo sapiens
tgatacgggatctaa

SEQ ID NO: 1473142 - DNA, 15 bp, Homo sapiens
gatacgggatctaaa

SEQ ID NO: 1473143 - DNA, 15 bp, Homo sapiens
atacgggatctaaat

SEQ ID NO: 1473144 - DNA, 15 bp, Homo sapiens
tacgggatctaaatg

SEQ ID NO: 1473145 - DNA, 15 bp, Homo sapiens
acgggatctaaatgg

SEQ ID NO: 1473146 - DNA, 15 bp, Homo sapiens
cgggatctaaatggg

SEQ ID NO: 1473147 - DNA, 15 bp, Homo sapiens
gggatctaaatgggt

SEQ ID NO: 1473148 - DNA, 15 bp, Homo sapiens
ggatctaaatgggtg

SEQ ID NO: 1473149 - DNA, 15 bp, Homo sapiens
gatctaaatgggtgc

SEQ ID NO: 1473150 - DNA, 15 bp, Homo sapiens
atctaaatgggtgca

SEQ ID NO: 1473151 - DNA, 15 bp, Homo sapiens
tctaaatgggtgcat

SEQ ID NO: 1473152 - DNA, 15 bp, Homo sapiens
ctaaatgggtgcatg

SEQ ID NO: 1473153 - DNA, 15 bp, Homo sapiens
taaatgggtgcatgg

SEQ ID NO: 1473154 - DNA, 15 bp, Homo sapiens
aaatgggtgcatggt

SEQ ID NO: 1473155 - DNA, 15 bp, Homo sapiens
aatgggtgcatggtt

SEQ ID NO: 1473156 - DNA, 15 bp, Homo sapiens
atgggtgcatggttc

SEQ ID NO: 1473157 - DNA, 15 bp, Homo sapiens
tgggtgcatggttct

SEQ ID NO: 1473158 - DNA, 15 bp, Homo sapiens
gggtgcatggttcta

SEQ ID NO: 1473159 - DNA, 15 bp, Homo sapiens
ggtgcatggttctag

SEQ ID NO: 1473160 - DNA, 15 bp, Homo sapiens
gtgcatggttctagg

SEQ ID NO: 1473161 - DNA, 15 bp, Homo sapiens
tgcatggttctagga

SEQ ID NO: 1473162 - DNA, 15 bp, Homo sapiens
gcatggttctaggag

SEQ ID NO: 1473163 - DNA, 15 bp, Homo sapiens
catggttctaggaga

SEQ ID NO: 1473164 - DNA, 15 bp, Homo sapiens
atggttctaggagag

SEQ ID NO: 1473165 - DNA, 15 bp, Homo sapiens
tggttctaggagagg

SEQ ID NO: 1473166 - DNA, 15 bp, Homo sapiens
ggttctaggagaggc

SEQ ID NO: 1473167 - DNA, 15 bp, Homo sapiens
gttctaggagaggca

SEQ ID NO: 1473168 - DNA, 15 bp, Homo sapiens
ttctaggagaggcac

SEQ ID NO: 1473169 - DNA, 15 bp, Homo sapiens
tctaggagaggcaca

SEQ ID NO: 1473170 - DNA, 15 bp, Homo sapiens
ctaggagaggcacaa

SEQ ID NO: 1473171 - DNA, 15 bp, Homo sapiens
taggagaggcacaag

SEQ ID NO: 1473172 - DNA, 15 bp, Homo sapiens
aggagaggcacaagg

SEQ ID NO: 1473173 - DNA, 15 bp, Homo sapiens
ggagaggcacaaggg

SEQ ID NO: 1473174 - DNA, 15 bp, Homo sapiens
gagaggcacaagggt

SEQ ID NO: 1473175 - DNA, 15 bp, Homo sapiens
agaggcacaagggtt

SEQ ID NO: 1473176 - DNA, 15 bp, Homo sapiens
gaggcacaagggttt

SEQ ID NO: 1473177 - DNA, 15 bp, Homo sapiens
aggcacaagggttta

SEQ ID NO: 1473178 - DNA, 15 bp, Homo sapiens
ggcacaagggtttat

SEQ ID NO: 1473179 - DNA, 15 bp, Homo sapiens
gcacaagggtttatg

SEQ ID NO: 1473180 - DNA, 15 bp, Homo sapiens
cacaagggtttatgg

SEQ ID NO: 1473181 - DNA, 15 bp, Homo sapiens
acaagggtttatgga

SEQ ID NO: 1473182 - DNA, 15 bp, Homo sapiens
caagggtttatggag

SEQ ID NO: 1473183 - DNA, 15 bp, Homo sapiens
aagggtttatggagg

SEQ ID NO: 1473184 - DNA, 15 bp, Homo sapiens
agggtttatggaggt

SEQ ID NO: 1473185 - DNA, 15 bp, Homo sapiens
gggtttatggaggta

SEQ ID NO: 1473186 - DNA, 15 bp, Homo sapiens
ggtttatggaggtag

SEQ ID NO: 1473187 - DNA, 15 bp, Homo sapiens
gtttatggaggtaga

SEQ ID NO: 1473188 - DNA, 15 bp, Homo sapiens
tttatggaggtagag

SEQ ID NO: 1473189 - DNA, 15 bp, Homo sapiens
ttatggaggtagaga

SEQ ID NO: 1473190 - DNA, 15 bp, Homo sapiens
tatggaggtagagat

SEQ ID NO: 1473191 - DNA, 15 bp, Homo sapiens
atggaggtagagatt

SEQ ID NO: 1473192 - DNA, 15 bp, Homo sapiens
tggaggtagagattc

SEQ ID NO: 1473193 - DNA, 15 bp, Homo sapiens
ggaggtagagattcc

SEQ ID NO: 1473194 - DNA, 15 bp, Homo sapiens
gaggtagagattccc

SEQ ID NO: 1473195 - DNA, 15 bp, Homo sapiens
aggtagagattccca

SEQ ID NO: 1473196 - DNA, 15 bp, Homo sapiens
ggtagagattcccag

SEQ ID NO: 1473197 - DNA, 15 bp, Homo sapiens
gtagagattcccagt

SEQ ID NO: 1473198 - DNA, 15 bp, Homo sapiens
tagagattcccagtg

SEQ ID NO: 1473199 - DNA, 15 bp, Homo sapiens
agagattcccagtgt

SEQ ID NO: 1473200 - DNA, 15 bp, Homo sapiens
gagattcccagtgtc

SEQ ID NO: 1473201 - DNA, 15 bp, Homo sapiens
agattcccagtgtcc

SEQ ID NO: 1473202 - DNA, 15 bp, Homo sapiens
gattcccagtgtccc

SEQ ID NO: 1473203 - DNA, 15 bp, Homo sapiens
attcccagtgtccca

SEQ ID NO: 1473204 - DNA, 15 bp, Homo sapiens
ttcccagtgtcccag

SEQ ID NO: 1473205 - DNA, 15 bp, Homo sapiens
tcccagtgtcccaga

SEQ ID NO: 1473206 - DNA, 15 bp, Homo sapiens
cccagtgtcccagat

SEQ ID NO: 1473207 - DNA, 15 bp, Homo sapiens
ccagtgtcccagatt

SEQ ID NO: 1473208 - DNA, 15 bp, Homo sapiens
cagtgtcccagattt

SEQ ID NO: 1473209 - DNA, 15 bp, Homo sapiens
agtgtcccagatttg

SEQ ID NO: 1473210 - DNA, 15 bp, Homo sapiens
gtgtcccagatttgt

SEQ ID NO: 1473211 - DNA, 15 bp, Homo sapiens
tgtcccagatttgtt

SEQ ID NO: 1473212 - DNA, 15 bp, Homo sapiens
gtcccagatttgttt

SEQ ID NO: 1473213 - DNA, 15 bp, Homo sapiens
tcccagatttgtttc

SEQ ID NO: 1473214 - DNA, 15 bp, Homo sapiens
cccagatttgtttct

SEQ ID NO: 1473215 - DNA, 15 bp, Homo sapiens
ccagatttgtttctt

SEQ ID NO: 1473216 - DNA, 15 bp, Homo sapiens
cagatttgtttcttc

SEQ ID NO: 1473217 - DNA, 15 bp, Homo sapiens
agatttgtttcttca

SEQ ID NO: 1473218 - DNA, 15 bp, Homo sapiens
gatttgtttcttcac

SEQ ID NO: 1473219 - DNA, 15 bp, Homo sapiens
atttgtttcttcact

SEQ ID NO: 1473220 - DNA, 15 bp, Homo sapiens
tttgtttcttcactc

SEQ ID NO: 1473221 - DNA, 15 bp, Homo sapiens
ttgtttcttcactct

SEQ ID NO: 1473222 - DNA, 15 bp, Homo sapiens
tgtttcttcactctc

SEQ ID NO: 1473223 - DNA, 15 bp, Homo sapiens
gtttcttcactctca

SEQ ID NO: 1473224 - DNA, 15 bp, Homo sapiens
tttcttcactctcag

SEQ ID NO: 1473225 - DNA, 15 bp, Homo sapiens
ttcttcactctcagg

SEQ ID NO: 1473226 - DNA, 15 bp, Homo sapiens
tcttcactctcaggt

SEQ ID NO: 1473227 - DNA, 15 bp, Homo sapiens
cttcactctcaggtc

SEQ ID NO: 1473228 - DNA, 15 bp, Homo sapiens
ttcactctcaggtca

SEQ ID NO: 1473229 - DNA, 15 bp, Homo sapiens
tcactctcaggtcaa

SEQ ID NO: 1473230 - DNA, 15 bp, Homo sapiens
cactctcaggtcaaa

SEQ ID NO: 1473231 - DNA, 15 bp, Homo sapiens
actctcaggtcaaag

SEQ ID NO: 1473232 - DNA, 15 bp, Homo sapiens
ctctcaggtcaaagc

SEQ ID NO: 1473233 - DNA, 15 bp, Homo sapiens
tctcaggtcaaagca

SEQ ID NO: 1473234 - DNA, 15 bp, Homo sapiens
ctcaggtcaaagcag

SEQ ID NO: 1473235 - DNA, 15 bp, Homo sapiens
tcaggtcaaagcagg

SEQ ID NO: 1473236 - DNA, 15 bp, Homo sapiens
caggtcaaagcaggc

SEQ ID NO: 1473237 - DNA, 15 bp, Homo sapiens
aggtcaaagcaggcc

SEQ ID NO: 1473238 - DNA, 15 bp, Homo sapiens
ggtcaaagcaggcct

SEQ ID NO: 1473239 - DNA, 15 bp, Homo sapiens
gtcaaagcaggcctt

SEQ ID NO: 1473240 - DNA, 15 bp, Homo sapiens
tcaaagcaggcctta

SEQ ID NO: 1473241 - DNA, 15 bp, Homo sapiens
caaagcaggccttat

SEQ ID NO: 1473242 - DNA, 15 bp, Homo sapiens
aaagcaggccttatt

SEQ ID NO: 1473243 - DNA, 15 bp, Homo sapiens
aagcaggccttattt

SEQ ID NO: 1473244 - DNA, 15 bp, Homo sapiens
agcaggccttattta

SEQ ID NO: 1473245 - DNA, 15 bp, Homo sapiens
gcaggccttatttag

SEQ ID NO: 1473246 - DNA, 15 bp, Homo sapiens
caggccttatttagg

SEQ ID NO: 1473247 - DNA, 15 bp, Homo sapiens
aggccttatttagga

SEQ ID NO: 1473248 - DNA, 15 bp, Homo sapiens
ggccttatttaggag

SEQ ID NO: 1473249 - DNA, 15 bp, Homo sapiens
gccttatttaggagg

SEQ ID NO: 1473250 - DNA, 15 bp, Homo sapiens
ccttatttaggaggc

SEQ ID NO: 1473251 - DNA, 15 bp, Homo sapiens
cttatttaggaggcc

SEQ ID NO: 1473252 - DNA, 15 bp, Homo sapiens
ttatttaggaggccc

SEQ ID NO: 1473253 - DNA, 15 bp, Homo sapiens
tatttaggaggccca

SEQ ID NO: 1473254 - DNA, 15 bp, Homo sapiens
atttaggaggcccag

SEQ ID NO: 1473255 - DNA, 15 bp, Homo sapiens
tttaggaggcccagt

SEQ ID NO: 1473256 - DNA, 15 bp, Homo sapiens
ttaggaggcccagtc

SEQ ID NO: 1473257 - DNA, 15 bp, Homo sapiens
taggaggcccagtca

SEQ ID NO: 1473258 - DNA, 15 bp, Homo sapiens
aggaggcccagtcat

SEQ ID NO: 1473259 - DNA, 15 bp, Homo sapiens
ggaggcccagtcatt

SEQ ID NO: 1473260 - DNA, 15 bp, Homo sapiens
gaggcccagtcattc

SEQ ID NO: 1473261 - DNA, 15 bp, Homo sapiens
aggcccagtcattcc

SEQ ID NO: 1473262 - DNA, 15 bp, Homo sapiens
ggcccagtcattcct

SEQ ID NO: 1473263 - DNA, 15 bp, Homo sapiens
gcccagtcattcctc

SEQ ID NO: 1473264 - DNA, 15 bp, Homo sapiens
cccagtcattcctca

SEQ ID NO: 1473265 - DNA, 15 bp, Homo sapiens
ccagtcattcctcat

SEQ ID NO: 1473266 - DNA, 15 bp, Homo sapiens
cagtcattcctcatt

SEQ ID NO: 1473267 - DNA, 15 bp, Homo sapiens
agtcattcctcattt

SEQ ID NO: 1473268 - DNA, 15 bp, Homo sapiens
gtcattcctcatttc

SEQ ID NO: 1473269 - DNA, 15 bp, Homo sapiens
tcattcctcatttcc

SEQ ID NO: 1473270 - DNA, 15 bp, Homo sapiens
cattcctcatttccc

SEQ ID NO: 1473271 - DNA, 15 bp, Homo sapiens
attcctcatttccct

SEQ ID NO: 1473272 - DNA, 15 bp, Homo sapiens
ttcctcatttccctt

SEQ ID NO: 1473273 - DNA, 15 bp, Homo sapiens
tcctcatttcccttc

SEQ ID NO: 1473274 - DNA, 15 bp, Homo sapiens
cctcatttcccttcc

SEQ ID NO: 1473275 - DNA, 15 bp, Homo sapiens
ctcatttcccttcct

SEQ ID NO: 1473276 - DNA, 15 bp, Homo sapiens
tcatttcccttcctt

SEQ ID NO: 1473277 - DNA, 15 bp, Homo sapiens
catttcccttccttg

SEQ ID NO: 1473278 - DNA, 15 bp, Homo sapiens
atttcccttccttgg

SEQ ID NO: 1473279 - DNA, 15 bp, Homo sapiens
tttcccttccttggt

SEQ ID NO: 1473280 - DNA, 15 bp, Homo sapiens
ttcccttccttggta

SEQ ID NO: 1473281 - DNA, 15 bp, Homo sapiens
tcccttccttggtaa

SEQ ID NO: 1473282 - DNA, 15 bp, Homo sapiens
cccttccttggtaat

SEQ ID NO: 1473283 - DNA, 15 bp, Homo sapiens
ccttccttggtaata

SEQ ID NO: 1473284 - DNA, 15 bp, Homo sapiens
cttccttggtaatat

SEQ ID NO: 1473285 - DNA, 15 bp, Homo sapiens
ttccttggtaatatc

SEQ ID NO: 1473286 - DNA, 15 bp, Homo sapiens
tccttggtaatatca

SEQ ID NO: 1473287 - DNA, 15 bp, Homo sapiens
ccttggtaatatcac

SEQ ID NO: 1473288 - DNA, 15 bp, Homo sapiens
cttggtaatatcact

SEQ ID NO: 1473289 - DNA, 15 bp, Homo sapiens
ttggtaatatcacta

SEQ ID NO: 1473290 - DNA, 15 bp, Homo sapiens
tggtaatatcactac

SEQ ID NO: 1473291 - DNA, 15 bp, Homo sapiens
ggtaatatcactacg

SEQ ID NO: 1473292 - DNA, 15 bp, Homo sapiens
gtaatatcactacga

SEQ ID NO: 1473293 - DNA, 15 bp, Homo sapiens
taatatcactacgat

SEQ ID NO: 1473294 - DNA, 15 bp, Homo sapiens
aatatcactacgatt

SEQ ID NO: 1473295 - DNA, 15 bp, Homo sapiens
atatcactacgattc

SEQ ID NO: 1473296 - DNA, 15 bp, Homo sapiens
tatcactacgattct

SEQ ID NO: 1473297 - DNA, 15 bp, Homo sapiens
atcactacgattctc

SEQ ID NO: 1473298 - DNA, 15 bp, Homo sapiens
tcactacgattctct

SEQ ID NO: 1473299 - DNA, 15 bp, Homo sapiens
cactacgattctctc

SEQ ID NO: 1473300 - DNA, 15 bp, Homo sapiens
actacgattctctct

SEQ ID NO: 1473301 - DNA, 15 bp, Homo sapiens
ctacgattctctctc

SEQ ID NO: 1473302 - DNA, 15 bp, Homo sapiens
tacgattctctctcc

SEQ ID NO: 1473303 - DNA, 15 bp, Homo sapiens
acgattctctctcct

SEQ ID NO: 1473304 - DNA, 15 bp, Homo sapiens
cgattctctctcctc

SEQ ID NO: 1473305 - DNA, 15 bp, Homo sapiens
gattctctctcctcc

SEQ ID NO: 1473306 - DNA, 15 bp, Homo sapiens
attctctctcctccc

SEQ ID NO: 1473307 - DNA, 15 bp, Homo sapiens
ttctctctcctccca

SEQ ID NO: 1473308 - DNA, 15 bp, Homo sapiens
tctctctcctcccac

SEQ ID NO: 1473309 - DNA, 15 bp, Homo sapiens
ctctctcctcccact

SEQ ID NO: 1473310 - DNA, 15 bp, Homo sapiens
tctctcctcccactg

SEQ ID NO: 1473311 - DNA, 15 bp, Homo sapiens
ctctcctcccactgg

SEQ ID NO: 1473312 - DNA, 15 bp, Homo sapiens
tctcctcccactggc

SEQ ID NO: 1473313 - DNA, 15 bp, Homo sapiens
ctcctcccactggcc

SEQ ID NO: 1473314 - DNA, 15 bp, Homo sapiens
tcctcccactggcca

SEQ ID NO: 1473315 - DNA, 15 bp, Homo sapiens
cctcccactggccaa

SEQ ID NO: 1473316 - DNA, 15 bp, Homo sapiens
ctcccactggccaaa

SEQ ID NO: 1473317 - DNA, 15 bp, Homo sapiens
tcccactggccaaag

SEQ ID NO: 1473318 - DNA, 15 bp, Homo sapiens
cccactggccaaagt

SEQ ID NO: 1473319 - DNA, 15 bp, Homo sapiens
ccactggccaaagtg

SEQ ID NO: 1473320 - DNA, 15 bp, Homo sapiens
cactggccaaagtgt

SEQ ID NO: 1473321 - DNA, 15 bp, Homo sapiens
actggccaaagtgtt

SEQ ID NO: 1473322 - DNA, 15 bp, Homo sapiens
ctggccaaagtgttt

SEQ ID NO: 1473323 - DNA, 15 bp, Homo sapiens
tggccaaagtgtttg

SEQ ID NO: 1473324 - DNA, 15 bp, Homo sapiens
ggccaaagtgtttga

SEQ ID NO: 1473325 - DNA, 15 bp, Homo sapiens
gccaaagtgtttgat

SEQ ID NO: 1473326 - DNA, 15 bp, Homo sapiens
ccaaagtgtttgatt

SEQ ID NO: 1473327 - DNA, 15 bp, Homo sapiens
caaagtgtttgatta

SEQ ID NO: 1473328 - DNA, 15 bp, Homo sapiens
aaagtgtttgattaa

SEQ ID NO: 1473329 - DNA, 15 bp, Homo sapiens
aagtgtttgattaag

SEQ ID NO: 1473330 - DNA, 15 bp, Homo sapiens
agtgtttgattaagc

SEQ ID NO: 1473331 - DNA, 15 bp, Homo sapiens
gtgtttgattaagcc

SEQ ID NO: 1473332 - DNA, 15 bp, Homo sapiens
tgtttgattaagcct

SEQ ID NO: 1473333 - DNA, 15 bp, Homo sapiens
gtttgattaagcctg

SEQ ID NO: 1473334 - DNA, 15 bp, Homo sapiens
tttgattaagcctgc

SEQ ID NO: 1473335 - DNA, 15 bp, Homo sapiens
ttgattaagcctgca

SEQ ID NO: 1473336 - DNA, 15 bp, Homo sapiens
tgattaagcctgcag

SEQ ID NO: 1473337 - DNA, 15 bp, Homo sapiens
gattaagcctgcaga

SEQ ID NO: 1473338 - DNA, 15 bp, Homo sapiens
attaagcctgcagag

SEQ ID NO: 1473339 - DNA, 15 bp, Homo sapiens
ttaagcctgcagaga

SEQ ID NO: 1473340 - DNA, 15 bp, Homo sapiens
taagcctgcagagaa

SEQ ID NO: 1473341 - DNA, 15 bp, Homo sapiens
aagcctgcagagaat

SEQ ID NO: 1473342 - DNA, 15 bp, Homo sapiens
agcctgcagagaatg

SEQ ID NO: 1473343 - DNA, 15 bp, Homo sapiens
gcctgcagagaatga

SEQ ID NO: 1473344 - DNA, 15 bp, Homo sapiens
cctgcagagaatgat

SEQ ID NO: 1473345 - DNA, 15 bp, Homo sapiens
ctgcagagaatgatg

SEQ ID NO: 1473346 - DNA, 15 bp, Homo sapiens
tgcagagaatgatgg

SEQ ID NO: 1473347 - DNA, 15 bp, Homo sapiens
gcagagaatgatggg

SEQ ID NO: 1473348 - DNA, 15 bp, Homo sapiens
cagagaatgatgggg

SEQ ID NO: 1473349 - DNA, 15 bp, Homo sapiens
agagaatgatggggt

SEQ ID NO: 1473350 - DNA, 15 bp, Homo sapiens
gagaatgatggggtt

SEQ ID NO: 1473351 - DNA, 15 bp, Homo sapiens
agaatgatggggttc

SEQ ID NO: 1473352 - DNA, 15 bp, Homo sapiens
gaatgatggggttca

SEQ ID NO: 1473353 - DNA, 15 bp, Homo sapiens
aatgatggggttcag

SEQ ID NO: 1473354 - DNA, 15 bp, Homo sapiens
atgatggggttcagt

SEQ ID NO: 1473355 - DNA, 15 bp, Homo sapiens
tgatggggttcagta

SEQ ID NO: 1473356 - DNA, 15 bp, Homo sapiens
gatggggttcagtaa

SEQ ID NO: 1473357 - DNA, 15 bp, Homo sapiens
atggggttcagtaag

SEQ ID NO: 1473358 - DNA, 15 bp, Homo sapiens
tggggttcagtaaga

SEQ ID NO: 1473359 - DNA, 15 bp, Homo sapiens
ggggttcagtaagaa

SEQ ID NO: 1473360 - DNA, 15 bp, Homo sapiens
gggttcagtaagaat

SEQ ID NO: 1473361 - DNA, 15 bp, Homo sapiens
ggttcagtaagaatg

SEQ ID NO: 1473362 - DNA, 15 bp, Homo sapiens
gttcagtaagaatgc

SEQ ID NO: 1473363 - DNA, 15 bp, Homo sapiens
ttcagtaagaatgcc

SEQ ID NO: 1473364 - DNA, 15 bp, Homo sapiens
tcagtaagaatgcca

SEQ ID NO: 1473365 - DNA, 15 bp, Homo sapiens
gtaagaatgccagca

SEQ ID NO: 1473366 - DNA, 15 bp, Homo sapiens
taagaatgccagcaa

SEQ ID NO: 1473367 - DNA, 15 bp, Homo sapiens
aagaatgccagcaaa

SEQ ID NO: 1473368 - DNA, 15 bp, Homo sapiens
agaatgccagcaaag

SEQ ID NO: 1473369 - DNA, 15 bp, Homo sapiens
gaatgccagcaaaga

SEQ ID NO: 1473370 - DNA, 15 bp, Homo sapiens
aatgccagcaaagag

SEQ ID NO: 1473371 - DNA, 15 bp, Homo sapiens
atgccagcaaagaga

SEQ ID NO: 1473372 - DNA, 15 bp, Homo sapiens
tgccagcaaagagac

SEQ ID NO: 1473373 - DNA, 15 bp, Homo sapiens
gccagcaaagagacg

SEQ ID NO: 1473374 - DNA, 15 bp, Homo sapiens
ccagcaaagagacgg

SEQ ID NO: 1473375 - DNA, 15 bp, Homo sapiens
cagcaaagagacggc

SEQ ID NO: 1473376 - DNA, 15 bp, Homo sapiens
agcaaagagacggca

SEQ ID NO: 1473377 - DNA, 15 bp, Homo sapiens
gcaaagagacggcat

SEQ ID NO: 1473378 - DNA, 15 bp, Homo sapiens
caaagagacggcata

SEQ ID NO: 1473379 - DNA, 15 bp, Homo sapiens
aaagagacggcataa

SEQ ID NO: 1473380 - DNA, 15 bp, Homo sapiens
aagagacggcataaa

SEQ ID NO: 1473381 - DNA, 15 bp, Homo sapiens
agagacggcataaaa

SEQ ID NO: 1473382 - DNA, 15 bp, Homo sapiens
gagacggcataaaag

SEQ ID NO: 1473383 - DNA, 15 bp, Homo sapiens
agacggcataaaagc

SEQ ID NO: 1473384 - DNA, 15 bp, Homo sapiens
gacggcataaaagcc

SEQ ID NO: 1473385 - DNA, 15 bp, Homo sapiens
acggcataaaagcca

SEQ ID NO: 1473386 - DNA, 15 bp, Homo sapiens
cggcataaaagccac

SEQ ID NO: 1473387 - DNA, 15 bp, Homo sapiens
ggcataaaagccacc

SEQ ID NO: 1473388 - DNA, 15 bp, Homo sapiens
gcataaaagccaccc

SEQ ID NO: 1473389 - DNA, 15 bp, Homo sapiens
cataaaagccaccca

SEQ ID NO: 1473390 - DNA, 15 bp, Homo sapiens
ataaaagccacccag

SEQ ID NO: 1473391 - DNA, 15 bp, Homo sapiens
taaaagccacccaga

SEQ ID NO: 1473392 - DNA, 15 bp, Homo sapiens
aaaagccacccagaa

SEQ ID NO: 1473393 - DNA, 15 bp, Homo sapiens
aaagccacccagaat

SEQ ID NO: 1473394 - DNA, 15 bp, Homo sapiens
aagccacccagaatg

SEQ ID NO: 1473395 - DNA, 15 bp, Homo sapiens
agccacccagaatgg

SEQ ID NO: 1473396 - DNA, 15 bp, Homo sapiens
gccacccagaatggg

SEQ ID NO: 1473397 - DNA, 15 bp, Homo sapiens
ccacccagaatgggg

SEQ ID NO: 1473398 - DNA, 15 bp, Homo sapiens
cacccagaatggggc

SEQ ID NO: 1473399 - DNA, 15 bp, Homo sapiens
acccagaatggggct

SEQ ID NO: 1473400 - DNA, 15 bp, Homo sapiens
cccagaatggggctg

SEQ ID NO: 1473401 - DNA, 15 bp, Homo sapiens
ccagaatggggctga

SEQ ID NO: 1473402 - DNA, 15 bp, Homo sapiens
cagaatggggctgac

SEQ ID NO: 1473403 - DNA, 15 bp, Homo sapiens
agaatggggctgaca

SEQ ID NO: 1473404 - DNA, 15 bp, Homo sapiens
gaatggggctgacag

SEQ ID NO: 1473405 - DNA, 15 bp, Homo sapiens
aatggggctgacagc

SEQ ID NO: 1473406 - DNA, 15 bp, Homo sapiens
atggggctgacagcg

SEQ ID NO: 1473407 - DNA, 15 bp, Homo sapiens
tggggctgacagcgt

SEQ ID NO: 1473408 - DNA, 15 bp, Homo sapiens
ggggctgacagcgtg

SEQ ID NO: 1473409 - DNA, 15 bp, Homo sapiens
gggctgacagcgtgg

SEQ ID NO: 1473410 - DNA, 15 bp, Homo sapiens
ggctgacagcgtggc

SEQ ID NO: 1473411 - DNA, 15 bp, Homo sapiens
gctgacagcgtggcc

SEQ ID NO: 1473412 - DNA, 15 bp, Homo sapiens
ctgacagcgtggcct

SEQ ID NO: 1473413 - DNA, 15 bp, Homo sapiens
tgacagcgtggcctc

SEQ ID NO: 1473414 - DNA, 15 bp, Homo sapiens
gacagcgtggcctct

SEQ ID NO: 1473415 - DNA, 15 bp, Homo sapiens
acagcgtggcctctt

SEQ ID NO: 1473416 - DNA, 15 bp, Homo sapiens
cagcgtggcctcttg

SEQ ID NO: 1473417 - DNA, 15 bp, Homo sapiens
agcgtggcctcttga

SEQ ID NO: 1473418 - DNA, 15 bp, Homo sapiens
gcgtggcctcttgat

SEQ ID NO: 1473419 - DNA, 15 bp, Homo sapiens
cgtggcctcttgata

SEQ ID NO: 1473420 - DNA, 15 bp, Homo sapiens
gtggcctcttgatag

SEQ ID NO: 1473421 - DNA, 15 bp, Homo sapiens
tggcctcttgatagt

SEQ ID NO: 1473422 - DNA, 15 bp, Homo sapiens
ggcctcttgatagtc

SEQ ID NO: 1473423 - DNA, 15 bp, Homo sapiens
gcctcttgatagtcc

SEQ ID NO: 1473424 - DNA, 15 bp, Homo sapiens
cctcttgatagtccc

SEQ ID NO: 1473425 - DNA, 15 bp, Homo sapiens
ctcttgatagtcccc

SEQ ID NO: 1473426 - DNA, 15 bp, Homo sapiens
tcttgatagtccccc

SEQ ID NO: 1473427 - DNA, 15 bp, Homo sapiens
cttgatagtccccca

SEQ ID NO: 1473428 - DNA, 15 bp, Homo sapiens
ttgatagtcccccat

SEQ ID NO: 1473429 - DNA, 15 bp, Homo sapiens
tgatagtcccccatg

SEQ ID NO: 1473430 - DNA, 15 bp, Homo sapiens
gatagtcccccatgc

SEQ ID NO: 1473431 - DNA, 15 bp, Homo sapiens
atagtcccccatgct

SEQ ID NO: 1473432 - DNA, 15 bp, Homo sapiens
tagtcccccatgctc

SEQ ID NO: 1473433 - DNA, 15 bp, Homo sapiens
agtcccccatgctct

SEQ ID NO: 1473434 - DNA, 15 bp, Homo sapiens
gtcccccatgctctg

SEQ ID NO: 1473435 - DNA, 15 bp, Homo sapiens
tcccccatgctctgt

SEQ ID NO: 1473436 - DNA, 15 bp, Homo sapiens
cccccatgctctgtc

SEQ ID NO: 1473437 - DNA, 15 bp, Homo sapiens
ccccatgctctgtcc

SEQ ID NO: 1473438 - DNA, 15 bp, Homo sapiens
cccatgctctgtcca

SEQ ID NO: 1473439 - DNA, 15 bp, Homo sapiens
ccatgctctgtccag

SEQ ID NO: 1473440 - DNA, 15 bp, Homo sapiens
catgctctgtccagg

SEQ ID NO: 1473441 - DNA, 15 bp, Homo sapiens
atgctctgtccaggg

SEQ ID NO: 1473442 - DNA, 15 bp, Homo sapiens
tgctctgtccagggg

SEQ ID NO: 1473443 - DNA, 15 bp, Homo sapiens
gctctgtccaggggg

SEQ ID NO: 1473444 - DNA, 15 bp, Homo sapiens
ctctgtccaggggga

SEQ ID NO: 1473445 - DNA, 15 bp, Homo sapiens
tctgtccagggggag

SEQ ID NO: 1473446 - DNA, 15 bp, Homo sapiens
ctgtccagggggagg

SEQ ID NO: 1473447 - DNA, 15 bp, Homo sapiens
tgtccagggggagga

SEQ ID NO: 1473448 - DNA, 15 bp, Homo sapiens
gtccagggggaggat

SEQ ID NO: 1473449 - DNA, 15 bp, Homo sapiens
tccagggggaggatg

SEQ ID NO: 1473450 - DNA, 15 bp, Homo sapiens
ccagggggaggatgc

SEQ ID NO: 1473451 - DNA, 15 bp, Homo sapiens
cagggggaggatgct

SEQ ID NO: 1473452 - DNA, 15 bp, Homo sapiens
agggggaggatgcta

SEQ ID NO: 1473453 - DNA, 15 bp, Homo sapiens
gggggaggatgctag

SEQ ID NO: 1473454 - DNA, 15 bp, Homo sapiens
ggggaggatgctagg

SEQ ID NO: 1473455 - DNA, 15 bp, Homo sapiens
gggaggatgctaggc

SEQ ID NO: 1473456 - DNA, 15 bp, Homo sapiens
ggaggatgctaggct

SEQ ID NO: 1473457 - DNA, 15 bp, Homo sapiens
gaggatgctaggctg

SEQ ID NO: 1473458 - DNA, 15 bp, Homo sapiens
aggatgctaggctga

SEQ ID NO: 1473459 - DNA, 15 bp, Homo sapiens
ggatgctaggctgag

SEQ ID NO: 1473460 - DNA, 15 bp, Homo sapiens
gatgctaggctgaga

SEQ ID NO: 1473461 - DNA, 15 bp, Homo sapiens
atgctaggctgagac

SEQ ID NO: 1473462 - DNA, 15 bp, Homo sapiens
tgctaggctgagact

SEQ ID NO: 1473463 - DNA, 15 bp, Homo sapiens
gctaggctgagactc

SEQ ID NO: 1473464 - DNA, 15 bp, Homo sapiens
ctaggctgagactct

SEQ ID NO: 1473465 - DNA, 15 bp, Homo sapiens
taggctgagactcta

SEQ ID NO: 1473466 - DNA, 15 bp, Homo sapiens
aggctgagactctag

SEQ ID NO: 1473467 - DNA, 15 bp, Homo sapiens
ggctgagactctagg

SEQ ID NO: 1473468 - DNA, 15 bp, Homo sapiens
gctgagactctaggt

SEQ ID NO: 1473469 - DNA, 15 bp, Homo sapiens
ctgagactctaggtg

SEQ ID NO: 1473470 - DNA, 15 bp, Homo sapiens
tgagactctaggtgt

SEQ ID NO: 1473471 - DNA, 15 bp, Homo sapiens
gagactctaggtgtt

SEQ ID NO: 1473472 - DNA, 15 bp, Homo sapiens
agactctaggtgttc

SEQ ID NO: 1473473 - DNA, 15 bp, Homo sapiens
gactctaggtgttct

SEQ ID NO: 1473474 - DNA, 15 bp, Homo sapiens
actctaggtgttctc

SEQ ID NO: 1473475 - DNA, 15 bp, Homo sapiens
ctctaggtgttctcg

SEQ ID NO: 1473476 - DNA, 15 bp, Homo sapiens
tctaggtgttctcgt

SEQ ID NO: 1473477 - DNA, 15 bp, Homo sapiens
ctaggtgttctcgta

SEQ ID NO: 1473478 - DNA, 15 bp, Homo sapiens
taggtgttctcgtag

SEQ ID NO: 1473479 - DNA, 15 bp, Homo sapiens
aggtgttctcgtagt

SEQ ID NO: 1473480 - DNA, 15 bp, Homo sapiens
ggtgttctcgtagtt

SEQ ID NO: 1473481 - DNA, 15 bp, Homo sapiens
gtgttctcgtagttt

SEQ ID NO: 1473482 - DNA, 15 bp, Homo sapiens
tgttctcgtagtttc

SEQ ID NO: 1473483 - DNA, 15 bp, Homo sapiens
gttctcgtagtttcg

SEQ ID NO: 1473484 - DNA, 15 bp, Homo sapiens
ttctcgtagtttcga

SEQ ID NO: 1473485 - DNA, 15 bp, Homo sapiens
tctcgtagtttcgat

SEQ ID NO: 1473486 - DNA, 15 bp, Homo sapiens
ctcgtagtttcgata

SEQ ID NO: 1473487 - DNA, 15 bp, Homo sapiens
tcgtagtttcgataa

SEQ ID NO: 1473488 - DNA, 15 bp, Homo sapiens
cgtagtttcgataaa

SEQ ID NO: 1473489 - DNA, 15 bp, Homo sapiens
gtagtttcgataaaa

SEQ ID NO: 1473490 - DNA, 15 bp, Homo sapiens
tagtttcgataaaaa

SEQ ID NO: 1473491 - DNA, 15 bp, Homo sapiens
agtttcgataaaaac

SEQ ID NO: 1473492 - DNA, 15 bp, Homo sapiens
gtttcgataaaaact

SEQ ID NO: 1473493 - DNA, 15 bp, Homo sapiens
tttcgataaaaacta

SEQ ID NO: 1473494 - DNA, 15 bp, Homo sapiens
ttcgataaaaactat

SEQ ID NO: 1473495 - DNA, 15 bp, Homo sapiens
tcgataaaaactata

SEQ ID NO: 1473496 - DNA, 15 bp, Homo sapiens
cgataaaaactataa

SEQ ID NO: 1473497 - DNA, 15 bp, Homo sapiens
gataaaaactataat

SEQ ID NO: 1473498 - DNA, 15 bp, Homo sapiens
ataaaaactataatt

SEQ ID NO: 1473499 - DNA, 15 bp, Homo sapiens
taaaaactataattg

SEQ ID NO: 1473500 - DNA, 15 bp, Homo sapiens
aaaaactataattga

SEQ ID NO: 1473501 - DNA, 15 bp, Homo sapiens
aaaactataattgac

SEQ ID NO: 1473502 - DNA, 15 bp, Homo sapiens
aaactataattgacc

SEQ ID NO: 1473503 - DNA, 15 bp, Homo sapiens
aactataattgacca

SEQ ID NO: 1473504 - DNA, 15 bp, Homo sapiens
actataattgaccac

SEQ ID NO: 1473505 - DNA, 15 bp, Homo sapiens
ctataattgaccacc

SEQ ID NO: 1473506 - DNA, 15 bp, Homo sapiens
tataattgaccacca

SEQ ID NO: 1473507 - DNA, 15 bp, Homo sapiens
ataattgaccaccac

SEQ ID NO: 1473508 - DNA, 15 bp, Homo sapiens
taattgaccaccaca

SEQ ID NO: 1473509 - DNA, 15 bp, Homo sapiens
aattgaccaccacaa

SEQ ID NO: 1473510 - DNA, 15 bp, Homo sapiens
attgaccaccacaag

SEQ ID NO: 1473511 - DNA, 15 bp, Homo sapiens
ttgaccaccacaagt

SEQ ID NO: 1473512 - DNA, 15 bp, Homo sapiens
tgaccaccacaagta

SEQ ID NO: 1473513 - DNA, 15 bp, Homo sapiens
gaccaccacaagtac

SEQ ID NO: 1473514 - DNA, 15 bp, Homo sapiens
accaccacaagtacc

SEQ ID NO: 1473515 - DNA, 15 bp, Homo sapiens
ccaccacaagtacca

SEQ ID NO: 1473516 - DNA, 15 bp, Homo sapiens
caccacaagtaccag

SEQ ID NO: 1473517 - DNA, 15 bp, Homo sapiens
accacaagtaccagt

SEQ ID NO: 1473518 - DNA, 15 bp, Homo sapiens
ccacaagtaccagtg

SEQ ID NO: 1473519 - DNA, 15 bp, Homo sapiens
cacaagtaccagtgg

SEQ ID NO: 1473520 - DNA, 15 bp, Homo sapiens
acaagtaccagtgga

SEQ ID NO: 1473521 - DNA, 15 bp, Homo sapiens
caagtaccagtggat

SEQ ID NO: 1473522 - DNA, 15 bp, Homo sapiens
aagtaccagtggatg

SEQ ID NO: 1473523 - DNA, 15 bp, Homo sapiens
agtaccagtggatgt

SEQ ID NO: 1473524 - DNA, 15 bp, Homo sapiens
gtaccagtggatgtg

SEQ ID NO: 1473525 - DNA, 15 bp, Homo sapiens
taccagtggatgtgt

SEQ ID NO: 1473526 - DNA, 15 bp, Homo sapiens
accagtggatgtgtg

SEQ ID NO: 1473527 - DNA, 15 bp, Homo sapiens
ccagtggatgtgtga

SEQ ID NO: 1473528 - DNA, 15 bp, Homo sapiens
cagtggatgtgtgag

SEQ ID NO: 1473529 - DNA, 15 bp, Homo sapiens
agtggatgtgtgagg

SEQ ID NO: 1473530 - DNA, 15 bp, Homo sapiens
gtggatgtgtgaggg

SEQ ID NO: 1473531 - DNA, 15 bp, Homo sapiens
tggatgtgtgagggt

SEQ ID NO: 1473532 - DNA, 15 bp, Homo sapiens
ggatgtgtgagggtg

SEQ ID NO: 1473533 - DNA, 15 bp, Homo sapiens
gatgtgtgagggtga

SEQ ID NO: 1473534 - DNA, 15 bp, Homo sapiens
atgtgtgagggtgag

SEQ ID NO: 1473535 - DNA, 15 bp, Homo sapiens
tgtgtgagggtgagg

SEQ ID NO: 1473536 - DNA, 15 bp, Homo sapiens
gtgtgagggtgaggg

SEQ ID NO: 1473537 - DNA, 15 bp, Homo sapiens
tgtgagggtgagggg

SEQ ID NO: 1473538 - DNA, 15 bp, Homo sapiens
gtgagggtgagggga

SEQ ID NO: 1473539 - DNA, 15 bp, Homo sapiens
tgagggtgaggggag

SEQ ID NO: 1473540 - DNA, 15 bp, Homo sapiens
gagggtgaggggaga

SEQ ID NO: 1473541 - DNA, 15 bp, Homo sapiens
agggtgaggggagag

SEQ ID NO: 1473542 - DNA, 15 bp, Homo sapiens
gggtgaggggagagc

SEQ ID NO: 1473543 - DNA, 15 bp, Homo sapiens
ggtgaggggagagct

SEQ ID NO: 1473544 - DNA, 15 bp, Homo sapiens
gtgaggggagagctg

SEQ ID NO: 1473545 - DNA, 15 bp, Homo sapiens
tgaggggagagctga

SEQ ID NO: 1473546 - DNA, 15 bp, Homo sapiens
gaggggagagctgaa

SEQ ID NO: 1473547 - DNA, 15 bp, Homo sapiens
aggggagagctgaag

SEQ ID NO: 1473548 - DNA, 15 bp, Homo sapiens
ggggagagctgaaga

SEQ ID NO: 1473549 - DNA, 15 bp, Homo sapiens
gggagagctgaagat

SEQ ID NO: 1473550 - DNA, 15 bp, Homo sapiens
ggagagctgaagatg

SEQ ID NO: 1473551 - DNA, 15 bp, Homo sapiens
gagagctgaagatga

SEQ ID NO: 1473552 - DNA, 15 bp, Homo sapiens
agagctgaagatgag

SEQ ID NO: 1473553 - DNA, 15 bp, Homo sapiens
gagctgaagatgagt

SEQ ID NO: 1473554 - DNA, 15 bp, Homo sapiens
agctgaagatgagta

SEQ ID NO: 1473555 - DNA, 15 bp, Homo sapiens
gctgaagatgagtag

SEQ ID NO: 1473556 - DNA, 15 bp, Homo sapiens
ctgaagatgagtagt

SEQ ID NO: 1473557 - DNA, 15 bp, Homo sapiens
tgaagatgagtagtt

SEQ ID NO: 1473558 - DNA, 15 bp, Homo sapiens
gaagatgagtagttt

SEQ ID NO: 1473559 - DNA, 15 bp, Homo sapiens
aagatgagtagtttg

SEQ ID NO: 1473560 - DNA, 15 bp, Homo sapiens
agatgagtagtttgt

SEQ ID NO: 1473561 - DNA, 15 bp, Homo sapiens
gatgagtagtttgtt

SEQ ID NO: 1473562 - DNA, 15 bp, Homo sapiens
atgagtagtttgttc

SEQ ID NO: 1473563 - DNA, 15 bp, Homo sapiens
tgagtagtttgttct

SEQ ID NO: 1473564 - DNA, 15 bp, Homo sapiens
gagtagtttgttctg

SEQ ID NO: 1473565 - DNA, 15 bp, Homo sapiens
agtagtttgttctga

SEQ ID NO: 1473566 - DNA, 15 bp, Homo sapiens
gtagtttgttctgat

SEQ ID NO: 1473567 - DNA, 15 bp, Homo sapiens
tagtttgttctgatt

SEQ ID NO: 1473568 - DNA, 15 bp, Homo sapiens
agtttgttctgattt

SEQ ID NO: 1473569 - DNA, 15 bp, Homo sapiens
gtttgttctgatttc

SEQ ID NO: 1473570 - DNA, 15 bp, Homo sapiens
tttgttctgatttca

SEQ ID NO: 1473571 - DNA, 15 bp, Homo sapiens
ttgttctgatttcag

SEQ ID NO: 1473572 - DNA, 15 bp, Homo sapiens
tgttctgatttcagt

SEQ ID NO: 1473573 - DNA, 15 bp, Homo sapiens
gttctgatttcagtt

SEQ ID NO: 1473574 - DNA, 15 bp, Homo sapiens
ttctgatttcagttt

SEQ ID NO: 1473575 - DNA, 15 bp, Homo sapiens
tctgatttcagttta

SEQ ID NO: 1473576 - DNA, 15 bp, Homo sapiens
ctgatttcagtttat

SEQ ID NO: 1473577 - DNA, 15 bp, Homo sapiens
tgatttcagtttatt

SEQ ID NO: 1473578 - DNA, 15 bp, Homo sapiens
gatttcagtttattt

SEQ ID NO: 1473579 - DNA, 15 bp, Homo sapiens
atttcagtttatttt

SEQ ID NO: 1473580 - DNA, 15 bp, Homo sapiens
tttcagtttattttg

SEQ ID NO: 1473581 - DNA, 15 bp, Homo sapiens
ttcagtttattttgg

SEQ ID NO: 1473582 - DNA, 15 bp, Homo sapiens
tcagtttattttggg

SEQ ID NO: 1473583 - DNA, 15 bp, Homo sapiens
cagtttattttgggc

SEQ ID NO: 1473584 - DNA, 15 bp, Homo sapiens
agtttattttgggct

SEQ ID NO: 1473585 - DNA, 15 bp, Homo sapiens
gtttattttgggctc

SEQ ID NO: 1473586 - DNA, 15 bp, Homo sapiens
tttattttgggctct

SEQ ID NO: 1473587 - DNA, 15 bp, Homo sapiens
ttattttgggctctt

SEQ ID NO: 1473588 - DNA, 15 bp, Homo sapiens
tattttgggctcttc

SEQ ID NO: 1473589 - DNA, 15 bp, Homo sapiens
attttgggctcttct

SEQ ID NO: 1473590 - DNA, 15 bp, Homo sapiens
ttttgggctcttcta

SEQ ID NO: 1473591 - DNA, 15 bp, Homo sapiens
tttgggctcttctag

SEQ ID NO: 1473592 - DNA, 15 bp, Homo sapiens
ttgggctcttctagc

SEQ ID NO: 1473593 - DNA, 15 bp, Homo sapiens
tgggctcttctagcc

SEQ ID NO: 1473594 - DNA, 15 bp, Homo sapiens
gggctcttctagcct

SEQ ID NO: 1473595 - DNA, 15 bp, Homo sapiens
ggctcttctagcctc

SEQ ID NO: 1473596 - DNA, 15 bp, Homo sapiens
gctcttctagcctca

SEQ ID NO: 1473597 - DNA, 15 bp, Homo sapiens
ctcttctagcctcaa

SEQ ID NO: 1473598 - DNA, 15 bp, Homo sapiens
tcttctagcctcaag

SEQ ID NO: 1473599 - DNA, 15 bp, Homo sapiens
cttctagcctcaagt

SEQ ID NO: 1473600 - DNA, 15 bp, Homo sapiens
ttctagcctcaagtc

SEQ ID NO: 1473601 - DNA, 15 bp, Homo sapiens
tctagcctcaagtct

SEQ ID NO: 1473602 - DNA, 15 bp, Homo sapiens
ctagcctcaagtctg

SEQ ID NO: 1473603 - DNA, 15 bp, Homo sapiens
tagcctcaagtctgt

SEQ ID NO: 1473604 - DNA, 15 bp, Homo sapiens
agcctcaagtctgtg

SEQ ID NO: 1473605 - DNA, 15 bp, Homo sapiens
gcctcaagtctgtgt

SEQ ID NO: 1473606 - DNA, 15 bp, Homo sapiens
cctcaagtctgtgtt

SEQ ID NO: 1473607 - DNA, 15 bp, Homo sapiens
ctcaagtctgtgttc

SEQ ID NO: 1473608 - DNA, 15 bp, Homo sapiens
tcaagtctgtgttca

SEQ ID NO: 1473609 - DNA, 15 bp, Homo sapiens
caagtctgtgttcag

SEQ ID NO: 1473610 - DNA, 15 bp, Homo sapiens
aagtctgtgttcagc

SEQ ID NO: 1473611 - DNA, 15 bp, Homo sapiens
agtctgtgttcagct

SEQ ID NO: 1473612 - DNA, 15 bp, Homo sapiens
gtctgtgttcagcta

SEQ ID NO: 1473613 - DNA, 15 bp, Homo sapiens
tctgtgttcagctaa

SEQ ID NO: 1473614 - DNA, 15 bp, Homo sapiens
ctgtgttcagctaaa

SEQ ID NO: 1473615 - DNA, 15 bp, Homo sapiens
tgtgttcagctaaag

SEQ ID NO: 1473616 - DNA, 15 bp, Homo sapiens
gtgttcagctaaaga

SEQ ID NO: 1473617 - DNA, 15 bp, Homo sapiens
tgttcagctaaagat

SEQ ID NO: 1473618 - DNA, 15 bp, Homo sapiens
gttcagctaaagata

SEQ ID NO: 1473619 - DNA, 15 bp, Homo sapiens
ttcagctaaagatat

SEQ ID NO: 1473620 - DNA, 15 bp, Homo sapiens
tcagctaaagatata

SEQ ID NO: 1473621 - DNA, 15 bp, Homo sapiens
cagctaaagatatat

SEQ ID NO: 1473622 - DNA, 15 bp, Homo sapiens
agctaaagatatatg

SEQ ID NO: 1473623 - DNA, 15 bp, Homo sapiens
gctaaagatatatgg

SEQ ID NO: 1473624 - DNA, 15 bp, Homo sapiens
ctaaagatatatggc

SEQ ID NO: 1473625 - DNA, 15 bp, Homo sapiens
taaagatatatggct

SEQ ID NO: 1473626 - DNA, 15 bp, Homo sapiens
aaagatatatggctg

SEQ ID NO: 1473627 - DNA, 15 bp, Homo sapiens
aagatatatggctgc

SEQ ID NO: 1473628 - DNA, 15 bp, Homo sapiens
agatatatggctgca

SEQ ID NO: 1473629 - DNA, 15 bp, Homo sapiens
gatatatggctgcat

SEQ ID NO: 1473630 - DNA, 15 bp, Homo sapiens
atatatggctgcata

SEQ ID NO: 1473631 - DNA, 15 bp, Homo sapiens
tatatggctgcatag

SEQ ID NO: 1473632 - DNA, 15 bp, Homo sapiens
atatggctgcatagg

SEQ ID NO: 1473633 - DNA, 15 bp, Homo sapiens
tatggctgcataggc

SEQ ID NO: 1473634 - DNA, 15 bp, Homo sapiens
atggctgcataggca

SEQ ID NO: 1473635 - DNA, 15 bp, Homo sapiens
tggctgcataggcaa

SEQ ID NO: 1473636 - DNA, 15 bp, Homo sapiens
ggctgcataggcaaa

SEQ ID NO: 1473637 - DNA, 15 bp, Homo sapiens
gctgcataggcaaag

SEQ ID NO: 1473638 - DNA, 15 bp, Homo sapiens
ctgcataggcaaagg

SEQ ID NO: 1473639 - DNA, 15 bp, Homo sapiens
tgcataggcaaaggg

SEQ ID NO: 1473640 - DNA, 15 bp, Homo sapiens
gcataggcaaaggga

SEQ ID NO: 1473641 - DNA, 15 bp, Homo sapiens
cataggcaaagggac

SEQ ID NO: 1473642 - DNA, 15 bp, Homo sapiens
ataggcaaagggacc

SEQ ID NO: 1473643 - DNA, 15 bp, Homo sapiens
taggcaaagggacct

SEQ ID NO: 1473644 - DNA, 15 bp, Homo sapiens
aggcaaagggacctg

SEQ ID NO: 1473645 - DNA, 15 bp, Homo sapiens
ggcaaagggacctgt

SEQ ID NO: 1473646 - DNA, 15 bp, Homo sapiens
gcaaagggacctgtt

SEQ ID NO: 1473647 - DNA, 15 bp, Homo sapiens
caaagggacctgtta

SEQ ID NO: 1473648 - DNA, 15 bp, Homo sapiens
aaagggacctgttag

SEQ ID NO: 1473649 - DNA, 15 bp, Homo sapiens
aagggacctgttagg

SEQ ID NO: 1473650 - DNA, 15 bp, Homo sapiens
agggacctgttaggt

SEQ ID NO: 1473651 - DNA, 15 bp, Homo sapiens
gggacctgttaggtg

SEQ ID NO: 1473652 - DNA, 15 bp, Homo sapiens
ggacctgttaggtga

SEQ ID NO: 1473653 - DNA, 15 bp, Homo sapiens
gacctgttaggtgag

SEQ ID NO: 1473654 - DNA, 15 bp, Homo sapiens
acctgttaggtgagc

SEQ ID NO: 1473655 - DNA, 15 bp, Homo sapiens
cctgttaggtgagcc

SEQ ID NO: 1473656 - DNA, 15 bp, Homo sapiens
ctgttaggtgagcct

SEQ ID NO: 1473657 - DNA, 15 bp, Homo sapiens
tgttaggtgagcctg

SEQ ID NO: 1473658 - DNA, 15 bp, Homo sapiens
gttaggtgagcctga

SEQ ID NO: 1473659 - DNA, 15 bp, Homo sapiens
ttaggtgagcctgaa

SEQ ID NO: 1473660 - DNA, 15 bp, Homo sapiens
taggtgagcctgaag

SEQ ID NO: 1473661 - DNA, 15 bp, Homo sapiens
aggtgagcctgaagg

SEQ ID NO: 1473662 - DNA, 15 bp, Homo sapiens
ggtgagcctgaaggt

SEQ ID NO: 1473663 - DNA, 15 bp, Homo sapiens
gtgagcctgaaggtg

SEQ ID NO: 1473664 - DNA, 15 bp, Homo sapiens
tgagcctgaaggtga

SEQ ID NO: 1473665 - DNA, 15 bp, Homo sapiens
gagcctgaaggtgat

SEQ ID NO: 1473666 - DNA, 15 bp, Homo sapiens
agcctgaaggtgatt

SEQ ID NO: 1473667 - DNA, 15 bp, Homo sapiens
gcctgaaggtgattc

SEQ ID NO: 1473668 - DNA, 15 bp, Homo sapiens
cctgaaggtgattct

SEQ ID NO: 1473669 - DNA, 15 bp, Homo sapiens
ctgaaggtgattctt

SEQ ID NO: 1473670 - DNA, 15 bp, Homo sapiens
tgaaggtgattcttg

SEQ ID NO: 1473671 - DNA, 15 bp, Homo sapiens
gaaggtgattcttgc

SEQ ID NO: 1473672 - DNA, 15 bp, Homo sapiens
aaggtgattcttgca

SEQ ID NO: 1473673 - DNA, 15 bp, Homo sapiens
aggtgattcttgcat

SEQ ID NO: 1473674 - DNA, 15 bp, Homo sapiens
ggtgattcttgcata

SEQ ID NO: 1473675 - DNA, 15 bp, Homo sapiens
gtgattcttgcataa

SEQ ID NO: 1473676 - DNA, 15 bp, Homo sapiens
tgattcttgcataat

SEQ ID NO: 1473677 - DNA, 15 bp, Homo sapiens
gattcttgcataatt

SEQ ID NO: 1473678 - DNA, 15 bp, Homo sapiens
attcttgcataattc

SEQ ID NO: 1473679 - DNA, 15 bp, Homo sapiens
ttcttgcataattct

SEQ ID NO: 1473680 - DNA, 15 bp, Homo sapiens
tcttgcataattctc

SEQ ID NO: 1473681 - DNA, 15 bp, Homo sapiens
cttgcataattctca

SEQ ID NO: 1473682 - DNA, 15 bp, Homo sapiens
ttgcataattctcag

SEQ ID NO: 1473683 - DNA, 15 bp, Homo sapiens
tgcataattctcaga

SEQ ID NO: 1473684 - DNA, 15 bp, Homo sapiens
gcataattctcagaa

SEQ ID NO: 1473685 - DNA, 15 bp, Homo sapiens
cataattctcagaaa

SEQ ID NO: 1473686 - DNA, 15 bp, Homo sapiens
ataattctcagaaac

SEQ ID NO: 1473687 - DNA, 15 bp, Homo sapiens
taattctcagaaact

SEQ ID NO: 1473688 - DNA, 15 bp, Homo sapiens
aattctcagaaactc

SEQ ID NO: 1473689 - DNA, 15 bp, Homo sapiens
attctcagaaactca

SEQ ID NO: 1473690 - DNA, 15 bp, Homo sapiens
ttctcagaaactcaa

SEQ ID NO: 1473691 - DNA, 15 bp, Homo sapiens
tctcagaaactcaat

SEQ ID NO: 1473692 - DNA, 15 bp, Homo sapiens
ctcagaaactcaatc

SEQ ID NO: 1473693 - DNA, 15 bp, Homo sapiens
tcagaaactcaatca

SEQ ID NO: 1473694 - DNA, 15 bp, Homo sapiens
cagaaactcaatcaa

SEQ ID NO: 1473695 - DNA, 15 bp, Homo sapiens
agaaactcaatcaag

SEQ ID NO: 1473696 - DNA, 15 bp, Homo sapiens
gaaactcaatcaagg

SEQ ID NO: 1473697 - DNA, 15 bp, Homo sapiens
aaactcaatcaaggt

SEQ ID NO: 1473698 - DNA, 15 bp, Homo sapiens
aactcaatcaaggtc

SEQ ID NO: 1473699 - DNA, 15 bp, Homo sapiens
actcaatcaaggtct

SEQ ID NO: 1473700 - DNA, 15 bp, Homo sapiens
ctcaatcaaggtctt

SEQ ID NO: 1473701 - DNA, 15 bp, Homo sapiens
tcaatcaaggtcttc

SEQ ID NO: 1473702 - DNA, 15 bp, Homo sapiens
caatcaaggtcttcc

SEQ ID NO: 1473703 - DNA, 15 bp, Homo sapiens
aatcaaggtcttcct

SEQ ID NO: 1473704 - DNA, 15 bp, Homo sapiens
atcaaggtcttcctg

SEQ ID NO: 1473705 - DNA, 15 bp, Homo sapiens
tcaaggtcttcctgt

SEQ ID NO: 1473706 - DNA, 15 bp, Homo sapiens
caaggtcttcctgta

SEQ ID NO: 1473707 - DNA, 15 bp, Homo sapiens
aaggtcttcctgtat

SEQ ID NO: 1473708 - DNA, 15 bp, Homo sapiens
aggtcttcctgtatc

SEQ ID NO: 1473709 - DNA, 15 bp, Homo sapiens
ggtcttcctgtatct

SEQ ID NO: 1473710 - DNA, 15 bp, Homo sapiens
gtcttcctgtatctc

SEQ ID NO: 1473711 - DNA, 15 bp, Homo sapiens
tcttcctgtatctcc

SEQ ID NO: 1473712 - DNA, 15 bp, Homo sapiens
cttcctgtatctccc

SEQ ID NO: 1473713 - DNA, 15 bp, Homo sapiens
ttcctgtatctcccg

SEQ ID NO: 1473714 - DNA, 15 bp, Homo sapiens
tcctgtatctcccgc

SEQ ID NO: 1473715 - DNA, 15 bp, Homo sapiens
cctgtatctcccgct

SEQ ID NO: 1473716 - DNA, 15 bp, Homo sapiens
ctgtatctcccgctt

SEQ ID NO: 1473717 - DNA, 15 bp, Homo sapiens
tgtatctcccgcttc

SEQ ID NO: 1473718 - DNA, 15 bp, Homo sapiens
gtatctcccgcttcc

SEQ ID NO: 1473719 - DNA, 15 bp, Homo sapiens
tatctcccgcttcct

SEQ ID NO: 1473720 - DNA, 15 bp, Homo sapiens
atctcccgcttcctc

SEQ ID NO: 1473721 - DNA, 15 bp, Homo sapiens
tctcccgcttcctcc

SEQ ID NO: 1473722 - DNA, 15 bp, Homo sapiens
ctcccgcttcctccc

SEQ ID NO: 1473723 - DNA, 15 bp, Homo sapiens
tcccgcttcctcccc

SEQ ID NO: 1473724 - DNA, 15 bp, Homo sapiens
cccgcttcctcccct

SEQ ID NO: 1473725 - DNA, 15 bp, Homo sapiens
ccgcttcctcccctt

SEQ ID NO: 1473726 - DNA, 15 bp, Homo sapiens
cgcttcctccccttt

SEQ ID NO: 1473727 - DNA, 15 bp, Homo sapiens
gcttcctcccctttc

SEQ ID NO: 1473728 - DNA, 15 bp, Homo sapiens
cttcctcccctttct

SEQ ID NO: 1473729 - DNA, 15 bp, Homo sapiens
ttcctcccctttctc

SEQ ID NO: 1473730 - DNA, 15 bp, Homo sapiens
tcctcccctttctcc

SEQ ID NO: 1473731 - DNA, 15 bp, Homo sapiens
cctcccctttctcct

SEQ ID NO: 1473732 - DNA, 15 bp, Homo sapiens
ctcccctttctcctg

SEQ ID NO: 1473733 - DNA, 15 bp, Homo sapiens
tcccctttctcctgc

SEQ ID NO: 1473734 - DNA, 15 bp, Homo sapiens
cccctttctcctgcc

SEQ ID NO: 1473735 - DNA, 15 bp, Homo sapiens
ccctttctcctgcct

SEQ ID NO: 1473736 - DNA, 15 bp, Homo sapiens
cctttctcctgcctc

SEQ ID NO: 1473737 - DNA, 15 bp, Homo sapiens
ctttctcctgcctcc

SEQ ID NO: 1473738 - DNA, 15 bp, Homo sapiens
tttctcctgcctcca

SEQ ID NO: 1473739 - DNA, 15 bp, Homo sapiens
ttctcctgcctccaa

SEQ ID NO: 1473740 - DNA, 15 bp, Homo sapiens
tctcctgcctccaac

SEQ ID NO: 1473741 - DNA, 15 bp, Homo sapiens
ctcctgcctccaacc

SEQ ID NO: 1473742 - DNA, 15 bp, Homo sapiens
tcctgcctccaacct

SEQ ID NO: 1473743 - DNA, 15 bp, Homo sapiens
cctgcctccaacctg

SEQ ID NO: 1473744 - DNA, 15 bp, Homo sapiens
ctgcctccaacctgc

SEQ ID NO: 1473745 - DNA, 15 bp, Homo sapiens
tgcctccaacctgca

SEQ ID NO: 1473746 - DNA, 15 bp, Homo sapiens
gcctccaacctgcac

SEQ ID NO: 1473747 - DNA, 15 bp, Homo sapiens
cctccaacctgcaca

SEQ ID NO: 1473748 - DNA, 15 bp, Homo sapiens
ctccaacctgcacat

SEQ ID NO: 1473749 - DNA, 15 bp, Homo sapiens
tccaacctgcacatg

SEQ ID NO: 1473750 - DNA, 15 bp, Homo sapiens
ccaacctgcacatgt

SEQ ID NO: 1473751 - DNA, 15 bp, Homo sapiens
caacctgcacatgtc

SEQ ID NO: 1473752 - DNA, 15 bp, Homo sapiens
aacctgcacatgtca

SEQ ID NO: 1473753 - DNA, 15 bp, Homo sapiens
acctgcacatgtcag

SEQ ID NO: 1473754 - DNA, 15 bp, Homo sapiens
cctgcacatgtcagt

SEQ ID NO: 1473755 - DNA, 15 bp, Homo sapiens
ctgcacatgtcagtg

SEQ ID NO: 1473756 - DNA, 15 bp, Homo sapiens
tgcacatgtcagtgc

SEQ ID NO: 1473757 - DNA, 15 bp, Homo sapiens
gcacatgtcagtgca

SEQ ID NO: 1473758 - DNA, 15 bp, Homo sapiens
cacatgtcagtgcat

SEQ ID NO: 1473759 - DNA, 15 bp, Homo sapiens
acatgtcagtgcatc

SEQ ID NO: 1473760 - DNA, 15 bp, Homo sapiens
catgtcagtgcatcc

SEQ ID NO: 1473761 - DNA, 15 bp, Homo sapiens
atgtcagtgcatcca

SEQ ID NO: 1473762 - DNA, 15 bp, Homo sapiens
tgtcagtgcatccac

SEQ ID NO: 1473763 - DNA, 15 bp, Homo sapiens
gtcagtgcatccaca

SEQ ID NO: 1473764 - DNA, 15 bp, Homo sapiens
tcagtgcatccacat

SEQ ID NO: 1473765 - DNA, 15 bp, Homo sapiens
cagtgcatccacatg

SEQ ID NO: 1473766 - DNA, 15 bp, Homo sapiens
agtgcatccacatgc

SEQ ID NO: 1473767 - DNA, 15 bp, Homo sapiens
gtgcatccacatgca

SEQ ID NO: 1473768 - DNA, 15 bp, Homo sapiens
tgcatccacatgcac

SEQ ID NO: 1473769 - DNA, 15 bp, Homo sapiens
gcatccacatgcaca

SEQ ID NO: 1473770 - DNA, 15 bp, Homo sapiens
catccacatgcacac

SEQ ID NO: 1473771 - DNA, 15 bp, Homo sapiens
atccacatgcacaca

SEQ ID NO: 1473772 - DNA, 15 bp, Homo sapiens
tccacatgcacacac

SEQ ID NO: 1473773 - DNA, 15 bp, Homo sapiens
ccacatgcacacaca

SEQ ID NO: 1473774 - DNA, 15 bp, Homo sapiens
acatgcacacacatt

SEQ ID NO: 1473775 - DNA, 15 bp, Homo sapiens
catgcacacacattc

SEQ ID NO: 1473776 - DNA, 15 bp, Homo sapiens
atgcacacacattca

SEQ ID NO: 1473777 - DNA, 15 bp, Homo sapiens
tgcacacacattcaa

SEQ ID NO: 1473778 - DNA, 15 bp, Homo sapiens
gcacacacattcaag

SEQ ID NO: 1473779 - DNA, 15 bp, Homo sapiens
cacacacattcaagc

SEQ ID NO: 1473780 - DNA, 15 bp, Homo sapiens
acacacattcaagca

SEQ ID NO: 1473781 - DNA, 15 bp, Homo sapiens
cacacattcaagcag

SEQ ID NO: 1473782 - DNA, 15 bp, Homo sapiens
acacattcaagcagg

SEQ ID NO: 1473783 - DNA, 15 bp, Homo sapiens
cacattcaagcagga

SEQ ID NO: 1473784 - DNA, 15 bp, Homo sapiens
acattcaagcaggac

SEQ ID NO: 1473785 - DNA, 15 bp, Homo sapiens
cattcaagcaggaca

SEQ ID NO: 1473786 - DNA, 15 bp, Homo sapiens
attcaagcaggacat

SEQ ID NO: 1473787 - DNA, 15 bp, Homo sapiens
ttcaagcaggacata

SEQ ID NO: 1473788 - DNA, 15 bp, Homo sapiens
tcaagcaggacataa

SEQ ID NO: 1473789 - DNA, 15 bp, Homo sapiens
caagcaggacataag

SEQ ID NO: 1473790 - DNA, 15 bp, Homo sapiens
aagcaggacataagg

SEQ ID NO: 1473791 - DNA, 15 bp, Homo sapiens
agcaggacataaggc

SEQ ID NO: 1473792 - DNA, 15 bp, Homo sapiens
gcaggacataaggcg

SEQ ID NO: 1473793 - DNA, 15 bp, Homo sapiens
caggacataaggcgg

SEQ ID NO: 1473794 - DNA, 15 bp, Homo sapiens
aggacataaggcggc

SEQ ID NO: 1473795 - DNA, 15 bp, Homo sapiens
ggacataaggcggcc

SEQ ID NO: 1473796 - DNA, 15 bp, Homo sapiens
gacataaggcggccg

SEQ ID NO: 1473797 - DNA, 15 bp, Homo sapiens
acataaggcggccgg

SEQ ID NO: 1473798 - DNA, 15 bp, Homo sapiens
cataaggcggccggc

SEQ ID NO: 1473799 - DNA, 15 bp, Homo sapiens
ataaggcggccggcc

SEQ ID NO: 1473800 - DNA, 15 bp, Homo sapiens
taaggcggccggccg

SEQ ID NO: 1473801 - DNA, 15 bp, Homo sapiens
aaggcggccggccgg

SEQ ID NO: 1473802 - DNA, 15 bp, Homo sapiens
aggcggccggccggt

SEQ ID NO: 1473803 - DNA, 15 bp, Homo sapiens
ggcggccggccggtc

SEQ ID NO: 1473804 - DNA, 15 bp, Homo sapiens
gcggccggccggtcc

SEQ ID NO: 1473805 - DNA, 15 bp, Homo sapiens
cggccggccggtcca

SEQ ID NO: 1473806 - DNA, 15 bp, Homo sapiens
ggccggccggtccac

SEQ ID NO: 1473807 - DNA, 15 bp, Homo sapiens
gccggccggtccact

SEQ ID NO: 1473808 - DNA, 15 bp, Homo sapiens
ccggccggtccactt

SEQ ID NO: 1473809 - DNA, 15 bp, Homo sapiens
cggccggtccacttc

SEQ ID NO: 1473810 - DNA, 15 bp, Homo sapiens
ggccggtccacttca

SEQ ID NO: 1473811 - DNA, 15 bp, Homo sapiens
gccggtccacttcag

SEQ ID NO: 1473812 - DNA, 15 bp, Homo sapiens
ccggtccacttcaga

SEQ ID NO: 1473813 - DNA, 15 bp, Homo sapiens
cggtccacttcagat

SEQ ID NO: 1473814 - DNA, 15 bp, Homo sapiens
ggtccacttcagatc

SEQ ID NO: 1473815 - DNA, 15 bp, Homo sapiens
gtccacttcagatca

SEQ ID NO: 1473816 - DNA, 15 bp, Homo sapiens
tccacttcagatcat

SEQ ID NO: 1473817 - DNA, 15 bp, Homo sapiens
ccacttcagatcata

SEQ ID NO: 1473818 - DNA, 15 bp, Homo sapiens
cacttcagatcataa

SEQ ID NO: 1473819 - DNA, 15 bp, Homo sapiens
acttcagatcataac

SEQ ID NO: 1473820 - DNA, 15 bp, Homo sapiens
cttcagatcataacc

SEQ ID NO: 1473821 - DNA, 15 bp, Homo sapiens
ttcagatcataacca

SEQ ID NO: 1473822 - DNA, 15 bp, Homo sapiens
tcagatcataaccaa

SEQ ID NO: 1473823 - DNA, 15 bp, Homo sapiens
cagatcataaccaaa

SEQ ID NO: 1473824 - DNA, 15 bp, Homo sapiens
agatcataaccaaaa

SEQ ID NO: 1473825 - DNA, 15 bp, Homo sapiens
gatcataaccaaaag

SEQ ID NO: 1473826 - DNA, 15 bp, Homo sapiens
atcataaccaaaagt

SEQ ID NO: 1473827 - DNA, 15 bp, Homo sapiens
tcataaccaaaagtc

SEQ ID NO: 1473828 - DNA, 15 bp, Homo sapiens
cataaccaaaagtct

SEQ ID NO: 1473829 - DNA, 15 bp, Homo sapiens
ataaccaaaagtctt

SEQ ID NO: 1473830 - DNA, 15 bp, Homo sapiens
taaccaaaagtcttg

SEQ ID NO: 1473831 - DNA, 15 bp, Homo sapiens
aaccaaaagtcttgg

SEQ ID NO: 1473832 - DNA, 15 bp, Homo sapiens
accaaaagtcttggc

SEQ ID NO: 1473833 - DNA, 15 bp, Homo sapiens
ccaaaagtcttggcc

SEQ ID NO: 1473834 - DNA, 15 bp, Homo sapiens
caaaagtcttggccc

SEQ ID NO: 1473835 - DNA, 15 bp, Homo sapiens
aaaagtcttggcccc

SEQ ID NO: 1473836 - DNA, 15 bp, Homo sapiens
aaagtcttggcccct

SEQ ID NO: 1473837 - DNA, 15 bp, Homo sapiens
aagtcttggcccctc

SEQ ID NO: 1473838 - DNA, 15 bp, Homo sapiens
agtcttggcccctca

SEQ ID NO: 1473839 - DNA, 15 bp, Homo sapiens
gtcttggcccctcac

SEQ ID NO: 1473840 - DNA, 15 bp, Homo sapiens
tcttggcccctcacc

SEQ ID NO: 1473841 - DNA, 15 bp, Homo sapiens
cttggcccctcacca

SEQ ID NO: 1473842 - DNA, 15 bp, Homo sapiens
ttggcccctcaccac

SEQ ID NO: 1473843 - DNA, 15 bp, Homo sapiens
tggcccctcaccact

SEQ ID NO: 1473844 - DNA, 15 bp, Homo sapiens
ggcccctcaccactc

SEQ ID NO: 1473845 - DNA, 15 bp, Homo sapiens
gcccctcaccactca

SEQ ID NO: 1473846 - DNA, 15 bp, Homo sapiens
cccctcaccactcac

SEQ ID NO: 1473847 - DNA, 15 bp, Homo sapiens
ccctcaccactcacc

SEQ ID NO: 1473848 - DNA, 15 bp, Homo sapiens
cctcaccactcacct

SEQ ID NO: 1473849 - DNA, 15 bp, Homo sapiens
ctcaccactcacctg

SEQ ID NO: 1473850 - DNA, 15 bp, Homo sapiens
tcaccactcacctgt

SEQ ID NO: 1473851 - DNA, 15 bp, Homo sapiens
caccactcacctgtc

SEQ ID NO: 1473852 - DNA, 15 bp, Homo sapiens
accactcacctgtca

SEQ ID NO: 1473853 - DNA, 15 bp, Homo sapiens
ccactcacctgtcag

SEQ ID NO: 1473854 - DNA, 15 bp, Homo sapiens
cactcacctgtcagc

SEQ ID NO: 1473855 - DNA, 15 bp, Homo sapiens
actcacctgtcagcc

SEQ ID NO: 1473856 - DNA, 15 bp, Homo sapiens
ctcacctgtcagcct

SEQ ID NO: 1473857 - DNA, 15 bp, Homo sapiens
tcacctgtcagcctc

SEQ ID NO: 1473858 - DNA, 15 bp, Homo sapiens
cacctgtcagcctca

SEQ ID NO: 1473859 - DNA, 15 bp, Homo sapiens
acctgtcagcctcag

SEQ ID NO: 1473860 - DNA, 15 bp, Homo sapiens
cctgtcagcctcagg

SEQ ID NO: 1473861 - DNA, 15 bp, Homo sapiens
ctgtcagcctcaggc

SEQ ID NO: 1473862 - DNA, 15 bp, Homo sapiens
tgtcagcctcaggca

SEQ ID NO: 1473863 - DNA, 15 bp, Homo sapiens
gtcagcctcaggcag

SEQ ID NO: 1473864 - DNA, 15 bp, Homo sapiens
tcagcctcaggcagc

SEQ ID NO: 1473865 - DNA, 15 bp, Homo sapiens
cagcctcaggcagcc

SEQ ID NO: 1473866 - DNA, 15 bp, Homo sapiens
agcctcaggcagcca

SEQ ID NO: 1473867 - DNA, 15 bp, Homo sapiens
gcctcaggcagccag

SEQ ID NO: 1473868 - DNA, 15 bp, Homo sapiens
cctcaggcagccagg

SEQ ID NO: 1473869 - DNA, 15 bp, Homo sapiens
ctcaggcagccaggg

SEQ ID NO: 1473870 - DNA, 15 bp, Homo sapiens
tcaggcagccaggga

SEQ ID NO: 1473871 - DNA, 15 bp, Homo sapiens
caggcagccagggac

SEQ ID NO: 1473872 - DNA, 15 bp, Homo sapiens
aggcagccagggacc

SEQ ID NO: 1473873 - DNA, 15 bp, Homo sapiens
ggcagccagggaccc

SEQ ID NO: 1473874 - DNA, 15 bp, Homo sapiens
gcagccagggaccca

SEQ ID NO: 1473875 - DNA, 15 bp, Homo sapiens
cagccagggacccag

SEQ ID NO: 1473876 - DNA, 15 bp, Homo sapiens
agccagggacccagc

SEQ ID NO: 1473877 - DNA, 15 bp, Homo sapiens
gccagggacccagca

SEQ ID NO: 1473878 - DNA, 15 bp, Homo sapiens
ccagggacccagcat

SEQ ID NO: 1473879 - DNA, 15 bp, Homo sapiens
cagggacccagcatg

SEQ ID NO: 1473880 - DNA, 15 bp, Homo sapiens
agggacccagcatgg

SEQ ID NO: 1473881 - DNA, 15 bp, Homo sapiens
gggacccagcatggg

SEQ ID NO: 1473882 - DNA, 15 bp, Homo sapiens
ggacccagcatggga

SEQ ID NO: 1473883 - DNA, 15 bp, Homo sapiens
gacccagcatgggag

SEQ ID NO: 1473884 - DNA, 15 bp, Homo sapiens
acccagcatgggagg

SEQ ID NO: 1473885 - DNA, 15 bp, Homo sapiens
cccagcatgggaggc

SEQ ID NO: 1473886 - DNA, 15 bp, Homo sapiens
ccagcatgggaggca

SEQ ID NO: 1473887 - DNA, 15 bp, Homo sapiens
cagcatgggaggcac

SEQ ID NO: 1473888 - DNA, 15 bp, Homo sapiens
agcatgggaggcaca

SEQ ID NO: 1473889 - DNA, 15 bp, Homo sapiens
gcatgggaggcacac

SEQ ID NO: 1473890 - DNA, 15 bp, Homo sapiens
catgggaggcacacc

SEQ ID NO: 1473891 - DNA, 15 bp, Homo sapiens
atgggaggcacacct

SEQ ID NO: 1473892 - DNA, 15 bp, Homo sapiens
tgggaggcacacctc

SEQ ID NO: 1473893 - DNA, 15 bp, Homo sapiens
gggaggcacacctca

SEQ ID NO: 1473894 - DNA, 15 bp, Homo sapiens
ggaggcacacctcat

SEQ ID NO: 1473895 - DNA, 15 bp, Homo sapiens
gaggcacacctcatg

SEQ ID NO: 1473896 - DNA, 15 bp, Homo sapiens
aggcacacctcatga

SEQ ID NO: 1473897 - DNA, 15 bp, Homo sapiens
ggcacacctcatgag

SEQ ID NO: 1473898 - DNA, 15 bp, Homo sapiens
gcacacctcatgaga

SEQ ID NO: 1473899 - DNA, 15 bp, Homo sapiens
cacacctcatgagaa

SEQ ID NO: 1473900 - DNA, 15 bp, Homo sapiens
acacctcatgagaac

SEQ ID NO: 1473901 - DNA, 15 bp, Homo sapiens
cacctcatgagaact

SEQ ID NO: 1473902 - DNA, 15 bp, Homo sapiens
acctcatgagaacta

SEQ ID NO: 1473903 - DNA, 15 bp, Homo sapiens
cctcatgagaactac

SEQ ID NO: 1473904 - DNA, 15 bp, Homo sapiens
ctcatgagaactacc

SEQ ID NO: 1473905 - DNA, 15 bp, Homo sapiens
tcatgagaactaccc

SEQ ID NO: 1473906 - DNA, 15 bp, Homo sapiens
catgagaactacccc

SEQ ID NO: 1473907 - DNA, 15 bp, Homo sapiens
atgagaactacccca

SEQ ID NO: 1473908 - DNA, 15 bp, Homo sapiens
tgagaactaccccaa

SEQ ID NO: 1473909 - DNA, 15 bp, Homo sapiens
gagaactaccccaat

SEQ ID NO: 1473910 - DNA, 15 bp, Homo sapiens
agaactaccccaatg

SEQ ID NO: 1473911 - DNA, 15 bp, Homo sapiens
gaactaccccaatgc

SEQ ID NO: 1473912 - DNA, 15 bp, Homo sapiens
aactaccccaatgct

SEQ ID NO: 1473913 - DNA, 15 bp, Homo sapiens
actaccccaatgctc

SEQ ID NO: 1473914 - DNA, 15 bp, Homo sapiens
ctaccccaatgctca

SEQ ID NO: 1473915 - DNA, 15 bp, Homo sapiens
taccccaatgctcaa

SEQ ID NO: 1473916 - DNA, 15 bp, Homo sapiens
accccaatgctcaag

SEQ ID NO: 1473917 - DNA, 15 bp, Homo sapiens
ccccaatgctcaagt

SEQ ID NO: 1473918 - DNA, 15 bp, Homo sapiens
cccaatgctcaagtg

SEQ ID NO: 1473919 - DNA, 15 bp, Homo sapiens
ccaatgctcaagtgc

SEQ ID NO: 1473920 - DNA, 15 bp, Homo sapiens
caatgctcaagtgcc

SEQ ID NO: 1473921 - DNA, 15 bp, Homo sapiens
aatgctcaagtgccc

SEQ ID NO: 1473922 - DNA, 15 bp, Homo sapiens
atgctcaagtgcccg

SEQ ID NO: 1473923 - DNA, 15 bp, Homo sapiens
tgctcaagtgcccgc

SEQ ID NO: 1473924 - DNA, 15 bp, Homo sapiens
gctcaagtgcccgca

SEQ ID NO: 1473925 - DNA, 15 bp, Homo sapiens
ctcaagtgcccgcaa

SEQ ID NO: 1473926 - DNA, 15 bp, Homo sapiens
tcaagtgcccgcaaa

SEQ ID NO: 1473927 - DNA, 15 bp, Homo sapiens
caagtgcccgcaaat

SEQ ID NO: 1473928 - DNA, 15 bp, Homo sapiens
aagtgcccgcaaatg

SEQ ID NO: 1473929 - DNA, 15 bp, Homo sapiens
agtgcccgcaaatgc

SEQ ID NO: 1473930 - DNA, 15 bp, Homo sapiens
gtgcccgcaaatgcc

SEQ ID NO: 1473931 - DNA, 15 bp, Homo sapiens
tgcccgcaaatgccc

SEQ ID NO: 1473932 - DNA, 15 bp, Homo sapiens
gcccgcaaatgccca

SEQ ID NO: 1473933 - DNA, 15 bp, Homo sapiens
cccgcaaatgcccac

SEQ ID NO: 1473934 - DNA, 15 bp, Homo sapiens
ccgcaaatgcccaca

SEQ ID NO: 1473935 - DNA, 15 bp, Homo sapiens
cgcaaatgcccacaa

SEQ ID NO: 1473936 - DNA, 15 bp, Homo sapiens
gcaaatgcccacaaa

SEQ ID NO: 1473937 - DNA, 15 bp, Homo sapiens
caaatgcccacaaac

SEQ ID NO: 1473938 - DNA, 15 bp, Homo sapiens
aaatgcccacaaacc

SEQ ID NO: 1473939 - DNA, 15 bp, Homo sapiens
aatgcccacaaaccc

SEQ ID NO: 1473940 - DNA, 15 bp, Homo sapiens
atgcccacaaaccct

SEQ ID NO: 1473941 - DNA, 15 bp, Homo sapiens
tgcccacaaaccctt

SEQ ID NO: 1473942 - DNA, 15 bp, Homo sapiens
gcccacaaaccctta

SEQ ID NO: 1473943 - DNA, 15 bp, Homo sapiens
cccacaaacccttaa

SEQ ID NO: 1473944 - DNA, 15 bp, Homo sapiens
ccacaaacccttaaa

SEQ ID NO: 1473945 - DNA, 15 bp, Homo sapiens
cacaaacccttaaat

SEQ ID NO: 1473946 - DNA, 15 bp, Homo sapiens
acaaacccttaaatg

SEQ ID NO: 1473947 - DNA, 15 bp, Homo sapiens
caaacccttaaatgt

SEQ ID NO: 1473948 - DNA, 15 bp, Homo sapiens
aaacccttaaatgtg

SEQ ID NO: 1473949 - DNA, 15 bp, Homo sapiens
aacccttaaatgtgt

SEQ ID NO: 1473950 - DNA, 15 bp, Homo sapiens
acccttaaatgtgtc

SEQ ID NO: 1473951 - DNA, 15 bp, Homo sapiens
cccttaaatgtgtct

SEQ ID NO: 1473952 - DNA, 15 bp, Homo sapiens
ccttaaatgtgtcta

SEQ ID NO: 1473953 - DNA, 15 bp, Homo sapiens
cttaaatgtgtctag

SEQ ID NO: 1473954 - DNA, 15 bp, Homo sapiens
ttaaatgtgtctagg

SEQ ID NO: 1473955 - DNA, 15 bp, Homo sapiens
taaatgtgtctagga

SEQ ID NO: 1473956 - DNA, 15 bp, Homo sapiens
aaatgtgtctaggaa

SEQ ID NO: 1473957 - DNA, 15 bp, Homo sapiens
aatgtgtctaggaac

SEQ ID NO: 1473958 - DNA, 15 bp, Homo sapiens
atgtgtctaggaacc

SEQ ID NO: 1473959 - DNA, 15 bp, Homo sapiens
tgtgtctaggaacct

SEQ ID NO: 1473960 - DNA, 15 bp, Homo sapiens
gtgtctaggaacctt

SEQ ID NO: 1473961 - DNA, 15 bp, Homo sapiens
tgtctaggaaccttt

SEQ ID NO: 1473962 - DNA, 15 bp, Homo sapiens
gtctaggaacctttc

SEQ ID NO: 1473963 - DNA, 15 bp, Homo sapiens
tctaggaacctttca

SEQ ID NO: 1473964 - DNA, 15 bp, Homo sapiens
ctaggaacctttcac

SEQ ID NO: 1473965 - DNA, 15 bp, Homo sapiens
taggaacctttcacc

SEQ ID NO: 1473966 - DNA, 15 bp, Homo sapiens
aggaacctttcacca

SEQ ID NO: 1473967 - DNA, 15 bp, Homo sapiens
ggaacctttcaccaa

SEQ ID NO: 1473968 - DNA, 15 bp, Homo sapiens
gaacctttcaccaac

SEQ ID NO: 1473969 - DNA, 15 bp, Homo sapiens
aacctttcaccaact

SEQ ID NO: 1473970 - DNA, 15 bp, Homo sapiens
acctttcaccaactg

SEQ ID NO: 1473971 - DNA, 15 bp, Homo sapiens
ctttcaccaactgaa

SEQ ID NO: 1473972 - DNA, 15 bp, Homo sapiens
tttcaccaactgaag

SEQ ID NO: 1473973 - DNA, 15 bp, Homo sapiens
ttcaccaactgaagc

SEQ ID NO: 1473974 - DNA, 15 bp, Homo sapiens
tcaccaactgaagcc

SEQ ID NO: 1473975 - DNA, 15 bp, Homo sapiens
caccaactgaagcct

SEQ ID NO: 1473976 - DNA, 15 bp, Homo sapiens
accaactgaagcctg

SEQ ID NO: 1473977 - DNA, 15 bp, Homo sapiens
ccaactgaagcctga

SEQ ID NO: 1473978 - DNA, 15 bp, Homo sapiens
caactgaagcctgac

SEQ ID NO: 1473979 - DNA, 15 bp, Homo sapiens
aactgaagcctgact

SEQ ID NO: 1473980 - DNA, 15 bp, Homo sapiens
actgaagcctgactg

SEQ ID NO: 1473981 - DNA, 15 bp, Homo sapiens
ctgaagcctgactgc

SEQ ID NO: 1473982 - DNA, 15 bp, Homo sapiens
tgaagcctgactgca

SEQ ID NO: 1473983 - DNA, 15 bp, Homo sapiens
gaagcctgactgcaa

SEQ ID NO: 1473984 - DNA, 15 bp, Homo sapiens
aagcctgactgcaag

SEQ ID NO: 1473985 - DNA, 15 bp, Homo sapiens
agcctgactgcaaga

SEQ ID NO: 1473986 - DNA, 15 bp, Homo sapiens
gcctgactgcaagat

SEQ ID NO: 1473987 - DNA, 15 bp, Homo sapiens
cctgactgcaagatg

SEQ ID NO: 1473988 - DNA, 15 bp, Homo sapiens
ctgactgcaagatga

SEQ ID NO: 1473989 - DNA, 15 bp, Homo sapiens
tgactgcaagatgaa

SEQ ID NO: 1473990 - DNA, 15 bp, Homo sapiens
gactgcaagatgaag

SEQ ID NO: 1473991 - DNA, 15 bp, Homo sapiens
actgcaagatgaagg

SEQ ID NO: 1473992 - DNA, 15 bp, Homo sapiens
ctgcaagatgaagga

SEQ ID NO: 1473993 - DNA, 15 bp, Homo sapiens
tgcaagatgaaggaa

SEQ ID NO: 1473994 - DNA, 15 bp, Homo sapiens
gcaagatgaaggaag

SEQ ID NO: 1473995 - DNA, 15 bp, Homo sapiens
caagatgaaggaagg

SEQ ID NO: 1473996 - DNA, 15 bp, Homo sapiens
aagatgaaggaagga

SEQ ID NO: 1473997 - DNA, 15 bp, Homo sapiens
agatgaaggaaggac

SEQ ID NO: 1473998 - DNA, 15 bp, Homo sapiens
gatgaaggaaggacc

SEQ ID NO: 1473999 - DNA, 15 bp, Homo sapiens
atgaaggaaggacct

SEQ ID NO: 1474000 - DNA, 15 bp, Homo sapiens
tgaaggaaggacctt

SEQ ID NO: 1474001 - DNA, 15 bp, Homo sapiens
gaaggaaggaccttt

SEQ ID NO: 1474002 - DNA, 15 bp, Homo sapiens
aaggaaggacctttg

SEQ ID NO: 1474003 - DNA, 15 bp, Homo sapiens
aggaaggacctttgg

SEQ ID NO: 1474004 - DNA, 15 bp, Homo sapiens
ggaaggacctttgga

SEQ ID NO: 1474005 - DNA, 15 bp, Homo sapiens
gaaggacctttggaa

SEQ ID NO: 1474006 - DNA, 15 bp, Homo sapiens
aaggacctttggaat

SEQ ID NO: 1474007 - DNA, 15 bp, Homo sapiens
aggacctttggaatg

SEQ ID NO: 1474008 - DNA, 15 bp, Homo sapiens
ggacctttggaatgt

SEQ ID NO: 1474009 - DNA, 15 bp, Homo sapiens
gacctttggaatgta

SEQ ID NO: 1474010 - DNA, 15 bp, Homo sapiens
acctttggaatgtaa

SEQ ID NO: 1474011 - DNA, 15 bp, Homo sapiens
cctttggaatgtaat

SEQ ID NO: 1474012 - DNA, 15 bp, Homo sapiens
ctttggaatgtaata

SEQ ID NO: 1474013 - DNA, 15 bp, Homo sapiens
tttggaatgtaataa

SEQ ID NO: 1474014 - DNA, 15 bp, Homo sapiens
ttggaatgtaataaa

SEQ ID NO: 1474015 - DNA, 15 bp, Homo sapiens
tggaatgtaataaat

SEQ ID NO: 1474016 - DNA, 15 bp, Homo sapiens
ggaatgtaataaatg

SEQ ID NO: 1474017 - DNA, 15 bp, Homo sapiens
gaatgtaataaatga

SEQ ID NO: 1474018 - DNA, 15 bp, Homo sapiens
aatgtaataaatgat

SEQ ID NO: 1474019 - DNA, 15 bp, Homo sapiens
atgtaataaatgatt

SEQ ID NO: 1474020 - DNA, 15 bp, Homo sapiens
tgtaataaatgattt

SEQ ID NO: 1474021 - DNA, 15 bp, Homo sapiens
gtaataaatgatttc

SEQ ID NO: 1474022 - DNA, 15 bp, Homo sapiens
taataaatgatttct

SEQ ID NO: 1474023 - DNA, 15 bp, Homo sapiens
aataaatgatttcta

SEQ ID NO: 1474024 - DNA, 15 bp, Homo sapiens
ataaatgatttctaa

SEQ ID NO: 1474025 - DNA, 15 bp, Homo sapiens
taaatgatttctaaa

SEQ ID NO: 1474026 - DNA, 15 bp, Homo sapiens
aaatgatttctaaaa

SEQ ID NO: 1474027 - DNA, 15 bp, Homo sapiens
aatgatttctaaaaa

SEQ ID NO: 1474028 - DNA, 15 bp, Homo sapiens
atgatttctaaaaag

SEQ ID NO: 1474029 - DNA, 15 bp, Homo sapiens
tgatttctaaaaaga

SEQ ID NO: 1474030 - DNA, 15 bp, Homo sapiens
gatttctaaaaagac

SEQ ID NO: 1474031 - DNA, 15 bp, Homo sapiens
atttctaaaaagaca

SEQ ID NO: 1474032 - DNA, 15 bp, Homo sapiens
tttctaaaaagacat

SEQ ID NO: 1474033 - DNA, 15 bp, Homo sapiens
ttctaaaaagacatc

SEQ ID NO: 1474034 - DNA, 15 bp, Homo sapiens
tctaaaaagacatct

SEQ ID NO: 1474035 - DNA, 15 bp, Homo sapiens
ctaaaaagacatctc

SEQ ID NO: 1474036 - DNA, 15 bp, Homo sapiens
taaaaagacatctca

SEQ ID NO: 1474037 - DNA, 15 bp, Homo sapiens
aaaaagacatctcat

SEQ ID NO: 1474038 - DNA, 15 bp, Homo sapiens
aaaagacatctcatc

SEQ ID NO: 1474039 - DNA, 15 bp, Homo sapiens
aaagacatctcatca

SEQ ID NO: 1474040 - DNA, 15 bp, Homo sapiens
aagacatctcatcat

SEQ ID NO: 1474041 - DNA, 15 bp, Homo sapiens
agacatctcatcatc

SEQ ID NO: 1474042 - DNA, 15 bp, Homo sapiens
gacatctcatcatcc

SEQ ID NO: 1474043 - DNA, 15 bp, Homo sapiens
acatctcatcatcct

SEQ ID NO: 1474044 - DNA, 15 bp, Homo sapiens
catctcatcatcctt

SEQ ID NO: 1474045 - DNA, 15 bp, Homo sapiens
atctcatcatccttt

SEQ ID NO: 1474046 - DNA, 15 bp, Homo sapiens
tctcatcatcctttc

SEQ ID NO: 1474047 - DNA, 15 bp, Homo sapiens
ctcatcatcctttct

SEQ ID NO: 1474048 - DNA, 15 bp, Homo sapiens
tcatcatcctttctt

SEQ ID NO: 1474049 - DNA, 15 bp, Homo sapiens
catcatcctttcttt

SEQ ID NO: 1474050 - DNA, 15 bp, Homo sapiens
atcatcctttctttc

SEQ ID NO: 1474051 - DNA, 15 bp, Homo sapiens
tcatcctttctttca

SEQ ID NO: 1474052 - DNA, 15 bp, Homo sapiens
catcctttctttcat

SEQ ID NO: 1474053 - DNA, 15 bp, Homo sapiens
atcctttctttcatt

SEQ ID NO: 1474054 - DNA, 15 bp, Homo sapiens
tcctttctttcattc

SEQ ID NO: 1474055 - DNA, 15 bp, Homo sapiens
cctttctttcattct

SEQ ID NO: 1474056 - DNA, 15 bp, Homo sapiens
ctttctttcattctc

SEQ ID NO: 1474057 - DNA, 15 bp, Homo sapiens
tttctttcattctct

SEQ ID NO: 1474058 - DNA, 15 bp, Homo sapiens
ttctttcattctctc

SEQ ID NO: 1474059 - DNA, 15 bp, Homo sapiens
tctttcattctctct

SEQ ID NO: 1474060 - DNA, 15 bp, Homo sapiens
ctttcattctctctc

SEQ ID NO: 1474061 - DNA, 15 bp, Homo sapiens
tttcattctctctcc

SEQ ID NO: 1474062 - DNA, 15 bp, Homo sapiens
ttcattctctctccc

SEQ ID NO: 1474063 - DNA, 15 bp, Homo sapiens
tcattctctctccct

SEQ ID NO: 1474064 - DNA, 15 bp, Homo sapiens
cattctctctccctc

SEQ ID NO: 1474065 - DNA, 15 bp, Homo sapiens
attctctctccctct

SEQ ID NO: 1474066 - DNA, 15 bp, Homo sapiens
ttctctctccctctc

SEQ ID NO: 1474067 - DNA, 15 bp, Homo sapiens
tctctctccctctct

SEQ ID NO: 1474068 - DNA, 15 bp, Homo sapiens
ctctctccctctctc

SEQ ID NO: 1474069 - DNA, 15 bp, Homo sapiens
tctctccctctctct

SEQ ID NO: 1474070 - DNA, 15 bp, Homo sapiens
ctctccctctctctc

SEQ ID NO: 1474071 - DNA, 15 bp, Homo sapiens
tctccctctctctct

SEQ ID NO: 1474072 - DNA, 15 bp, Homo sapiens
ctccctctctctctc

SEQ ID NO: 1474073 - DNA, 15 bp, Homo sapiens
tctctctctctctgt

SEQ ID NO: 1474074 - DNA, 15 bp, Homo sapiens
ctctctctctctgtg

SEQ ID NO: 1474075 - DNA, 15 bp, Homo sapiens
tctctctctctgtgt

SEQ ID NO: 1474076 - DNA, 15 bp, Homo sapiens
ctctctctctgtgtg

SEQ ID NO: 1474077 - DNA, 15 bp, Homo sapiens
tctctctctgtgtgt

SEQ ID NO: 1474078 - DNA, 15 bp, Homo sapiens
ctctctctgtgtgtg

SEQ ID NO: 1474079 - DNA, 15 bp, Homo sapiens
tctctctgtgtgtgt

SEQ ID NO: 1474080 - DNA, 15 bp, Homo sapiens
ctctctgtgtgtgtg

SEQ ID NO: 1474081 - DNA, 15 bp, Homo sapiens
tctctgtgtgtgtgt

SEQ ID NO: 1474082 - DNA, 15 bp, Homo sapiens
ctctgtgtgtgtgtg

SEQ ID NO: 1474083 - DNA, 15 bp, Homo sapiens
ctgtgtgtgtgtgtt

SEQ ID NO: 1474084 - DNA, 15 bp, Homo sapiens
gtgtgtttgtgtgtg

SEQ ID NO: 1474085 - DNA, 15 bp, Homo sapiens
gtttgtgtgtgtgtg

SEQ ID NO: 1474086 - DNA, 15 bp, Homo sapiens
tgtgtgtgtgtctga

SEQ ID NO: 1474087 - DNA, 15 bp, Homo sapiens
gtgtgtgtgtctgag

SEQ ID NO: 1474088 - DNA, 15 bp, Homo sapiens
tgtgtgtgtctgagt

SEQ ID NO: 1474089 - DNA, 15 bp, Homo sapiens
gtgtgtgtctgagtt

SEQ ID NO: 1474090 - DNA, 15 bp, Homo sapiens
tgtgtgtctgagttg

SEQ ID NO: 1474091 - DNA, 15 bp, Homo sapiens
gtgtgtctgagttgc

SEQ ID NO: 1474092 - DNA, 15 bp, Homo sapiens
tgtgtctgagttgcc

SEQ ID NO: 1474093 - DNA, 15 bp, Homo sapiens
gtgtctgagttgcct

SEQ ID NO: 1474094 - DNA, 15 bp, Homo sapiens
tgtctgagttgcctc

SEQ ID NO: 1474095 - DNA, 15 bp, Homo sapiens
gtctgagttgcctca

SEQ ID NO: 1474096 - DNA, 15 bp, Homo sapiens
tctgagttgcctcag

SEQ ID NO: 1474097 - DNA, 15 bp, Homo sapiens
ctgagttgcctcagg

SEQ ID NO: 1474098 - DNA, 15 bp, Homo sapiens
tgagttgcctcaggg

SEQ ID NO: 1474099 - DNA, 15 bp, Homo sapiens
gagttgcctcagggc

SEQ ID NO: 1474100 - DNA, 15 bp, Homo sapiens
agttgcctcagggct

SEQ ID NO: 1474101 - DNA, 15 bp, Homo sapiens
gttgcctcagggctg

SEQ ID NO: 1474102 - DNA, 15 bp, Homo sapiens
ttgcctcagggctgg

SEQ ID NO: 1474103 - DNA, 15 bp, Homo sapiens
tgcctcagggctggt

SEQ ID NO: 1474104 - DNA, 15 bp, Homo sapiens
gcctcagggctggtg

SEQ ID NO: 1474105 - DNA, 15 bp, Homo sapiens
cctcagggctggtgg

SEQ ID NO: 1474106 - DNA, 15 bp, Homo sapiens
ctcagggctggtggt

SEQ ID NO: 1474107 - DNA, 15 bp, Homo sapiens
tcagggctggtggtt

SEQ ID NO: 1474108 - DNA, 15 bp, Homo sapiens
cagggctggtggttt

SEQ ID NO: 1474109 - DNA, 15 bp, Homo sapiens
agggctggtggtttc

SEQ ID NO: 1474110 - DNA, 15 bp, Homo sapiens
gggctggtggtttca

SEQ ID NO: 1474111 - DNA, 15 bp, Homo sapiens
ggctggtggtttcaa

SEQ ID NO: 1474112 - DNA, 15 bp, Homo sapiens
gctggtggtttcaaa

SEQ ID NO: 1474113 - DNA, 15 bp, Homo sapiens
ctggtggtttcaaaa

SEQ ID NO: 1474114 - DNA, 15 bp, Homo sapiens
tggtggtttcaaaac

SEQ ID NO: 1474115 - DNA, 15 bp, Homo sapiens
ggtggtttcaaaact

SEQ ID NO: 1474116 - DNA, 15 bp, Homo sapiens
gtggtttcaaaacta

SEQ ID NO: 1474117 - DNA, 15 bp, Homo sapiens
tggtttcaaaactag

SEQ ID NO: 1474118 - DNA, 15 bp, Homo sapiens
ggtttcaaaactagc

SEQ ID NO: 1474119 - DNA, 15 bp, Homo sapiens
gtttcaaaactagca

SEQ ID NO: 1474120 - DNA, 15 bp, Homo sapiens
tttcaaaactagcag

SEQ ID NO: 1474121 - DNA, 15 bp, Homo sapiens
ttcaaaactagcagc

SEQ ID NO: 1474122 - DNA, 15 bp, Homo sapiens
tcaaaactagcagct

SEQ ID NO: 1474123 - DNA, 15 bp, Homo sapiens
caaaactagcagctg

SEQ ID NO: 1474124 - DNA, 15 bp, Homo sapiens
aaaactagcagctgc

SEQ ID NO: 1474125 - DNA, 15 bp, Homo sapiens
aaactagcagctgca

SEQ ID NO: 1474126 - DNA, 15 bp, Homo sapiens
aactagcagctgcaa

SEQ ID NO: 1474127 - DNA, 15 bp, Homo sapiens
actagcagctgcaaa

SEQ ID NO: 1474128 - DNA, 15 bp, Homo sapiens
ctagcagctgcaaac

SEQ ID NO: 1474129 - DNA, 15 bp, Homo sapiens
tagcagctgcaaact

SEQ ID NO: 1474130 - DNA, 15 bp, Homo sapiens
agcagctgcaaactt

SEQ ID NO: 1474131 - DNA, 15 bp, Homo sapiens
gcagctgcaaactta

SEQ ID NO: 1474132 - DNA, 15 bp, Homo sapiens
cagctgcaaacttat

SEQ ID NO: 1474133 - DNA, 15 bp, Homo sapiens
agctgcaaacttatg

SEQ ID NO: 1474134 - DNA, 15 bp, Homo sapiens
gctgcaaacttatga

SEQ ID NO: 1474135 - DNA, 15 bp, Homo sapiens
ctgcaaacttatgaa

SEQ ID NO: 1474136 - DNA, 15 bp, Homo sapiens
tgcaaacttatgaag

SEQ ID NO: 1474137 - DNA, 15 bp, Homo sapiens
gcaaacttatgaagg

SEQ ID NO: 1474138 - DNA, 15 bp, Homo sapiens
caaacttatgaaggg

SEQ ID NO: 1474139 - DNA, 15 bp, Homo sapiens
aaacttatgaaggga

SEQ ID NO: 1474140 - DNA, 15 bp, Homo sapiens
aacttatgaagggaa

SEQ ID NO: 1474141 - DNA, 15 bp, Homo sapiens
acttatgaagggaaa

SEQ ID NO: 1474142 - DNA, 15 bp, Homo sapiens
cttatgaagggaaaa

SEQ ID NO: 1474143 - DNA, 15 bp, Homo sapiens
ttatgaagggaaaaa

SEQ ID NO: 1474144 - DNA, 15 bp, Homo sapiens
tatgaagggaaaaaa

SEQ ID NO: 1474145 - DNA, 15 bp, Homo sapiens
atgaagggaaaaaaa

SEQ ID NO: 1474146 - DNA, 15 bp, Homo sapiens
tgaagggaaaaaaaa

SEQ ID NO: 1474147 - DNA, 15 bp, Homo sapiens
gaagggaaaaaaaaa

SEQ ID NO: 1474148 - DNA, 15 bp, Homo sapiens
aagggaaaaaaaaac

SEQ ID NO: 1474149 - DNA, 15 bp, Homo sapiens
agggaaaaaaaaacc

SEQ ID NO: 1474150 - DNA, 15 bp, Homo sapiens
gggaaaaaaaaaccc

SEQ ID NO: 1474151 - DNA, 15 bp, Homo sapiens
ggaaaaaaaaaccca

SEQ ID NO: 1474152 - DNA, 15 bp, Homo sapiens
gaaaaaaaaacccaa

SEQ ID NO: 1474153 - DNA, 15 bp, Homo sapiens
aaaaaaaaacccaaa

SEQ ID NO: 1474154 - DNA, 15 bp, Homo sapiens
aaaaaaaacccaaac

SEQ ID NO: 1474155 - DNA, 15 bp, Homo sapiens
aaaaacccaaaccac

SEQ ID NO: 1474156 - DNA, 15 bp, Homo sapiens
aaaacccaaaccaca

SEQ ID NO: 1474157 - DNA, 15 bp, Homo sapiens
aaacccaaaccacaa

SEQ ID NO: 1474158 - DNA, 15 bp, Homo sapiens
aacccaaaccacaaa

SEQ ID NO: 1474159 - DNA, 15 bp, Homo sapiens
acccaaaccacaaaa

SEQ ID NO: 1474160 - DNA, 15 bp, Homo sapiens
cccaaaccacaaaac

SEQ ID NO: 1474161 - DNA, 15 bp, Homo sapiens
ccaaaccacaaaacc

SEQ ID NO: 1474162 - DNA, 15 bp, Homo sapiens
caaaccacaaaaccc

SEQ ID NO: 1474163 - DNA, 15 bp, Homo sapiens
aaaccacaaaacccc

SEQ ID NO: 1474164 - DNA, 15 bp, Homo sapiens
aaccacaaaaccccg

SEQ ID NO: 1474165 - DNA, 15 bp, Homo sapiens
accacaaaaccccgt

SEQ ID NO: 1474166 - DNA, 15 bp, Homo sapiens
ccacaaaaccccgtc

SEQ ID NO: 1474167 - DNA, 15 bp, Homo sapiens
cacaaaaccccgtct

SEQ ID NO: 1474168 - DNA, 15 bp, Homo sapiens
acaaaaccccgtctt

SEQ ID NO: 1474169 - DNA, 15 bp, Homo sapiens
caaaaccccgtcttg

SEQ ID NO: 1474170 - DNA, 15 bp, Homo sapiens
aaaaccccgtcttgt

SEQ ID NO: 1474171 - DNA, 15 bp, Homo sapiens
aaaccccgtcttgtg

SEQ ID NO: 1474172 - DNA, 15 bp, Homo sapiens
aaccccgtcttgtga

SEQ ID NO: 1474173 - DNA, 15 bp, Homo sapiens
accccgtcttgtgaa

SEQ ID NO: 1474174 - DNA, 15 bp, Homo sapiens
ccccgtcttgtgaaa

SEQ ID NO: 1474175 - DNA, 15 bp, Homo sapiens
cccgtcttgtgaaaa

SEQ ID NO: 1474176 - DNA, 15 bp, Homo sapiens
ccgtcttgtgaaaac

SEQ ID NO: 1474177 - DNA, 15 bp, Homo sapiens
cgtcttgtgaaaact

SEQ ID NO: 1474178 - DNA, 15 bp, Homo sapiens
gtcttgtgaaaactg

SEQ ID NO: 1474179 - DNA, 15 bp, Homo sapiens
tcttgtgaaaactgt

SEQ ID NO: 1474180 - DNA, 15 bp, Homo sapiens
cttgtgaaaactgtg

SEQ ID NO: 1474181 - DNA, 15 bp, Homo sapiens
ttgtgaaaactgtgt

SEQ ID NO: 1474182 - DNA, 15 bp, Homo sapiens
tgtgaaaactgtgtg

SEQ ID NO: 1474183 - DNA, 15 bp, Homo sapiens
gtgaaaactgtgtgc

SEQ ID NO: 1474184 - DNA, 15 bp, Homo sapiens
tgaaaactgtgtgcc

SEQ ID NO: 1474185 - DNA, 15 bp, Homo sapiens
gaaaactgtgtgcca

SEQ ID NO: 1474186 - DNA, 15 bp, Homo sapiens
aaaactgtgtgccag

SEQ ID NO: 1474187 - DNA, 15 bp, Homo sapiens
aaactgtgtgccagt

SEQ ID NO: 1474188 - DNA, 15 bp, Homo sapiens
aactgtgtgccagtc

SEQ ID NO: 1474189 - DNA, 15 bp, Homo sapiens
actgtgtgccagtct

SEQ ID NO: 1474190 - DNA, 15 bp, Homo sapiens
ctgtgtgccagtcta

SEQ ID NO: 1474191 - DNA, 15 bp, Homo sapiens
tgtgtgccagtctaa

SEQ ID NO: 1474192 - DNA, 15 bp, Homo sapiens
gtgtgccagtctaaa

SEQ ID NO: 1474193 - DNA, 15 bp, Homo sapiens
tgtgccagtctaaaa

SEQ ID NO: 1474194 - DNA, 15 bp, Homo sapiens
gtgccagtctaaaag

SEQ ID NO: 1474195 - DNA, 15 bp, Homo sapiens
tgccagtctaaaagt

SEQ ID NO: 1474196 - DNA, 15 bp, Homo sapiens
gccagtctaaaagtg

SEQ ID NO: 1474197 - DNA, 15 bp, Homo sapiens
ccagtctaaaagtgg

SEQ ID NO: 1474198 - DNA, 15 bp, Homo sapiens
cagtctaaaagtggc

SEQ ID NO: 1474199 - DNA, 15 bp, Homo sapiens
agtctaaaagtggca

SEQ ID NO: 1474200 - DNA, 15 bp, Homo sapiens
gtctaaaagtggcag

SEQ ID NO: 1474201 - DNA, 15 bp, Homo sapiens
tctaaaagtggcagt

SEQ ID NO: 1474202 - DNA, 15 bp, Homo sapiens
ctaaaagtggcagtc

SEQ ID NO: 1474203 - DNA, 15 bp, Homo sapiens
taaaagtggcagtcc

SEQ ID NO: 1474204 - DNA, 15 bp, Homo sapiens
aaaagtggcagtccg

SEQ ID NO: 1474205 - DNA, 15 bp, Homo sapiens
aaagtggcagtccgt

SEQ ID NO: 1474206 - DNA, 15 bp, Homo sapiens
aagtggcagtccgtg

SEQ ID NO: 1474207 - DNA, 15 bp, Homo sapiens
agtggcagtccgtgc

SEQ ID NO: 1474208 - DNA, 15 bp, Homo sapiens
gtggcagtccgtgca

SEQ ID NO: 1474209 - DNA, 15 bp, Homo sapiens
tggcagtccgtgcag

SEQ ID NO: 1474210 - DNA, 15 bp, Homo sapiens
ggcagtccgtgcagg

SEQ ID NO: 1474211 - DNA, 15 bp, Homo sapiens
gcagtccgtgcagga

SEQ ID NO: 1474212 - DNA, 15 bp, Homo sapiens
cagtccgtgcaggag

SEQ ID NO: 1474213 - DNA, 15 bp, Homo sapiens
agtccgtgcaggaga

SEQ ID NO: 1474214 - DNA, 15 bp, Homo sapiens
gtccgtgcaggagaa

SEQ ID NO: 1474215 - DNA, 15 bp, Homo sapiens
tccgtgcaggagaaa

SEQ ID NO: 1474216 - DNA, 15 bp, Homo sapiens
ccgtgcaggagaaaa

SEQ ID NO: 1474217 - DNA, 15 bp, Homo sapiens
cgtgcaggagaaaaa

SEQ ID NO: 1474218 - DNA, 15 bp, Homo sapiens
gtgcaggagaaaaag

SEQ ID NO: 1474219 - DNA, 15 bp, Homo sapiens
tgcaggagaaaaagc

SEQ ID NO: 1474220 - DNA, 15 bp, Homo sapiens
gcaggagaaaaagcc

SEQ ID NO: 1474221 - DNA, 15 bp, Homo sapiens
caggagaaaaagcct

SEQ ID NO: 1474222 - DNA, 15 bp, Homo sapiens
aggagaaaaagcctg

SEQ ID NO: 1474223 - DNA, 15 bp, Homo sapiens
ggagaaaaagcctgt

SEQ ID NO: 1474224 - DNA, 15 bp, Homo sapiens
gagaaaaagcctgtc

SEQ ID NO: 1474225 - DNA, 15 bp, Homo sapiens
agaaaaagcctgtca

SEQ ID NO: 1474226 - DNA, 15 bp, Homo sapiens
gaaaaagcctgtcaa

SEQ ID NO: 1474227 - DNA, 15 bp, Homo sapiens
aaaaagcctgtcaac

SEQ ID NO: 1474228 - DNA, 15 bp, Homo sapiens
aaaagcctgtcaacg

SEQ ID NO: 1474229 - DNA, 15 bp, Homo sapiens
aaagcctgtcaacgt

SEQ ID NO: 1474230 - DNA, 15 bp, Homo sapiens
aagcctgtcaacgtt

SEQ ID NO: 1474231 - DNA, 15 bp, Homo sapiens
agcctgtcaacgttc

SEQ ID NO: 1474232 - DNA, 15 bp, Homo sapiens
gcctgtcaacgttca

SEQ ID NO: 1474233 - DNA, 15 bp, Homo sapiens
cctgtcaacgttcag

SEQ ID NO: 1474234 - DNA, 15 bp, Homo sapiens
ctgtcaacgttcagg

SEQ ID NO: 1474235 - DNA, 15 bp, Homo sapiens
tgtcaacgttcaggg

SEQ ID NO: 1474236 - DNA, 15 bp, Homo sapiens
gtcaacgttcagggc

SEQ ID NO: 1474237 - DNA, 15 bp, Homo sapiens
tcaacgttcagggca

SEQ ID NO: 1474238 - DNA, 15 bp, Homo sapiens
caacgttcagggcag

SEQ ID NO: 1474239 - DNA, 15 bp, Homo sapiens
aacgttcagggcaga

SEQ ID NO: 1474240 - DNA, 15 bp, Homo sapiens
acgttcagggcagaa

SEQ ID NO: 1474241 - DNA, 15 bp, Homo sapiens
cgttcagggcagaag

SEQ ID NO: 1474242 - DNA, 15 bp, Homo sapiens
gttcagggcagaagc

SEQ ID NO: 1474243 - DNA, 15 bp, Homo sapiens
ttcagggcagaagca

SEQ ID NO: 1474244 - DNA, 15 bp, Homo sapiens
tcagggcagaagcag

SEQ ID NO: 1474245 - DNA, 15 bp, Homo sapiens
cagggcagaagcagg

SEQ ID NO: 1474246 - DNA, 15 bp, Homo sapiens
agggcagaagcaggc

SEQ ID NO: 1474247 - DNA, 15 bp, Homo sapiens
ggcagaagcaggcag

SEQ ID NO: 1474248 - DNA, 15 bp, Homo sapiens
gcagaagcaggcagt

SEQ ID NO: 1474249 - DNA, 15 bp, Homo sapiens
cagaagcaggcagtg

SEQ ID NO: 1474250 - DNA, 15 bp, Homo sapiens
agaagcaggcagtgt

SEQ ID NO: 1474251 - DNA, 15 bp, Homo sapiens
gaagcaggcagtgtg

SEQ ID NO: 1474252 - DNA, 15 bp, Homo sapiens
aagcaggcagtgtga

SEQ ID NO: 1474253 - DNA, 15 bp, Homo sapiens
agcaggcagtgtgag

SEQ ID NO: 1474254 - DNA, 15 bp, Homo sapiens
gcaggcagtgtgaga

SEQ ID NO: 1474255 - DNA, 15 bp, Homo sapiens
caggcagtgtgagat

SEQ ID NO: 1474256 - DNA, 15 bp, Homo sapiens
aggcagtgtgagatc

SEQ ID NO: 1474257 - DNA, 15 bp, Homo sapiens
ggcagtgtgagatca

SEQ ID NO: 1474258 - DNA, 15 bp, Homo sapiens
gcagtgtgagatcac

SEQ ID NO: 1474259 - DNA, 15 bp, Homo sapiens
cagtgtgagatcaca

SEQ ID NO: 1474260 - DNA, 15 bp, Homo sapiens
agtgtgagatcacag

SEQ ID NO: 1474261 - DNA, 15 bp, Homo sapiens
gtgtgagatcacagc

SEQ ID NO: 1474262 - DNA, 15 bp, Homo sapiens
tgtgagatcacagct

SEQ ID NO: 1474263 - DNA, 15 bp, Homo sapiens
gtgagatcacagctg

SEQ ID NO: 1474264 - DNA, 15 bp, Homo sapiens
tgagatcacagctgg

SEQ ID NO: 1474265 - DNA, 15 bp, Homo sapiens
gagatcacagctggc

SEQ ID NO: 1474266 - DNA, 15 bp, Homo sapiens
agatcacagctggct

SEQ ID NO: 1474267 - DNA, 15 bp, Homo sapiens
gatcacagctggctc

SEQ ID NO: 1474268 - DNA, 15 bp, Homo sapiens
atcacagctggctct

SEQ ID NO: 1474269 - DNA, 15 bp, Homo sapiens
tcacagctggctctt

SEQ ID NO: 1474270 - DNA, 15 bp, Homo sapiens
cacagctggctcttg

SEQ ID NO: 1474271 - DNA, 15 bp, Homo sapiens
acagctggctcttga

SEQ ID NO: 1474272 - DNA, 15 bp, Homo sapiens
cagctggctcttgac

SEQ ID NO: 1474273 - DNA, 15 bp, Homo sapiens
agctggctcttgaca

SEQ ID NO: 1474274 - DNA, 15 bp, Homo sapiens
gctggctcttgacag

SEQ ID NO: 1474275 - DNA, 15 bp, Homo sapiens
ctggctcttgacagt

SEQ ID NO: 1474276 - DNA, 15 bp, Homo sapiens
tggctcttgacagtg

SEQ ID NO: 1474277 - DNA, 15 bp, Homo sapiens
ggctcttgacagtga

SEQ ID NO: 1474278 - DNA, 15 bp, Homo sapiens
gctcttgacagtgag

SEQ ID NO: 1474279 - DNA, 15 bp, Homo sapiens
ctcttgacagtgagg

SEQ ID NO: 1474280 - DNA, 15 bp, Homo sapiens
tcttgacagtgagga

SEQ ID NO: 1474281 - DNA, 15 bp, Homo sapiens
cttgacagtgaggag

SEQ ID NO: 1474282 - DNA, 15 bp, Homo sapiens
ttgacagtgaggagg

SEQ ID NO: 1474283 - DNA, 15 bp, Homo sapiens
tgacagtgaggagga

SEQ ID NO: 1474284 - DNA, 15 bp, Homo sapiens
gacagtgaggaggaa

SEQ ID NO: 1474285 - DNA, 15 bp, Homo sapiens
acagtgaggaggaat

SEQ ID NO: 1474286 - DNA, 15 bp, Homo sapiens
cagtgaggaggaatt

SEQ ID NO: 1474287 - DNA, 15 bp, Homo sapiens
agtgaggaggaattc

SEQ ID NO: 1474288 - DNA, 15 bp, Homo sapiens
gtgaggaggaattca

SEQ ID NO: 1474289 - DNA, 15 bp, Homo sapiens
tgaggaggaattcaa

SEQ ID NO: 1474290 - DNA, 15 bp, Homo sapiens
gaggaggaattcaaa

SEQ ID NO: 1474291 - DNA, 15 bp, Homo sapiens
aggaggaattcaaat

SEQ ID NO: 1474292 - DNA, 15 bp, Homo sapiens
ggaggaattcaaatg

SEQ ID NO: 1474293 - DNA, 15 bp, Homo sapiens
gaggaattcaaatgt

SEQ ID NO: 1474294 - DNA, 15 bp, Homo sapiens
aggaattcaaatgtg

SEQ ID NO: 1474295 - DNA, 15 bp, Homo sapiens
ggaattcaaatgtgt

SEQ ID NO: 1474296 - DNA, 15 bp, Homo sapiens
gaattcaaatgtgtc

SEQ ID NO: 1474297 - DNA, 15 bp, Homo sapiens
aattcaaatgtgtcc

SEQ ID NO: 1474298 - DNA, 15 bp, Homo sapiens
attcaaatgtgtcct

SEQ ID NO: 1474299 - DNA, 15 bp, Homo sapiens
ttcaaatgtgtcctg

SEQ ID NO: 1474300 - DNA, 15 bp, Homo sapiens
tcaaatgtgtcctgg

SEQ ID NO: 1474301 - DNA, 15 bp, Homo sapiens
caaatgtgtcctggg

SEQ ID NO: 1474302 - DNA, 15 bp, Homo sapiens
aaatgtgtcctgggc

SEQ ID NO: 1474303 - DNA, 15 bp, Homo sapiens
aatgtgtcctgggca

SEQ ID NO: 1474304 - DNA, 15 bp, Homo sapiens
atgtgtcctgggcat

SEQ ID NO: 1474305 - DNA, 15 bp, Homo sapiens
tgtgtcctgggcatg

SEQ ID NO: 1474306 - DNA, 15 bp, Homo sapiens
gtgtcctgggcatgg

SEQ ID NO: 1474307 - DNA, 15 bp, Homo sapiens
tgtcctgggcatggg

SEQ ID NO: 1474308 - DNA, 15 bp, Homo sapiens
gtcctgggcatgggg

SEQ ID NO: 1474309 - DNA, 15 bp, Homo sapiens
tcctgggcatgggga

SEQ ID NO: 1474310 - DNA, 15 bp, Homo sapiens
cctgggcatggggac

SEQ ID NO: 1474311 - DNA, 15 bp, Homo sapiens
ctgggcatggggaca

SEQ ID NO: 1474312 - DNA, 15 bp, Homo sapiens
tgggcatggggacag

SEQ ID NO: 1474313 - DNA, 15 bp, Homo sapiens
gggcatggggacagt

SEQ ID NO: 1474314 - DNA, 15 bp, Homo sapiens
ggcatggggacagta

SEQ ID NO: 1474315 - DNA, 15 bp, Homo sapiens
gcatggggacagtag

SEQ ID NO: 1474316 - DNA, 15 bp, Homo sapiens
catggggacagtagg

SEQ ID NO: 1474317 - DNA, 15 bp, Homo sapiens
atggggacagtaggg

SEQ ID NO: 1474318 - DNA, 15 bp, Homo sapiens
tggggacagtagggg

SEQ ID NO: 1474319 - DNA, 15 bp, Homo sapiens
ggggacagtagggga

SEQ ID NO: 1474320 - DNA, 15 bp, Homo sapiens
gggacagtaggggac

SEQ ID NO: 1474321 - DNA, 15 bp, Homo sapiens
ggacagtaggggaca

SEQ ID NO: 1474322 - DNA, 15 bp, Homo sapiens
gacagtaggggacaa

SEQ ID NO: 1474323 - DNA, 15 bp, Homo sapiens
acagtaggggacaag

SEQ ID NO: 1474324 - DNA, 15 bp, Homo sapiens
cagtaggggacaagg

SEQ ID NO: 1474325 - DNA, 15 bp, Homo sapiens
agtaggggacaagga

SEQ ID NO: 1474326 - DNA, 15 bp, Homo sapiens
gtaggggacaaggac

SEQ ID NO: 1474327 - DNA, 15 bp, Homo sapiens
taggggacaaggaca

SEQ ID NO: 1474328 - DNA, 15 bp, Homo sapiens
aggggacaaggacaa

SEQ ID NO: 1474329 - DNA, 15 bp, Homo sapiens
ggggacaaggacaag

SEQ ID NO: 1474330 - DNA, 15 bp, Homo sapiens
gggacaaggacaagg

SEQ ID NO: 1474331 - DNA, 15 bp, Homo sapiens
ggacaaggacaaggc

SEQ ID NO: 1474332 - DNA, 15 bp, Homo sapiens
gacaaggacaaggca

SEQ ID NO: 1474333 - DNA, 15 bp, Homo sapiens
acaaggacaaggcag

SEQ ID NO: 1474334 - DNA, 15 bp, Homo sapiens
caaggacaaggcaga

SEQ ID NO: 1474335 - DNA, 15 bp, Homo sapiens
aaggacaaggcagaa

SEQ ID NO: 1474336 - DNA, 15 bp, Homo sapiens
aggacaaggcagaag

SEQ ID NO: 1474337 - DNA, 15 bp, Homo sapiens
ggacaaggcagaaga

SEQ ID NO: 1474338 - DNA, 15 bp, Homo sapiens
gacaaggcagaagag

SEQ ID NO: 1474339 - DNA, 15 bp, Homo sapiens
acaaggcagaagaga

SEQ ID NO: 1474340 - DNA, 15 bp, Homo sapiens
caaggcagaagagaa

SEQ ID NO: 1474341 - DNA, 15 bp, Homo sapiens
aaggcagaagagaag

SEQ ID NO: 1474342 - DNA, 15 bp, Homo sapiens
aggcagaagagaagc

SEQ ID NO: 1474343 - DNA, 15 bp, Homo sapiens
ggcagaagagaagcc

SEQ ID NO: 1474344 - DNA, 15 bp, Homo sapiens
gcagaagagaagccg

SEQ ID NO: 1474345 - DNA, 15 bp, Homo sapiens
cagaagagaagccgg

SEQ ID NO: 1474346 - DNA, 15 bp, Homo sapiens
agaagagaagccgga

SEQ ID NO: 1474347 - DNA, 15 bp, Homo sapiens
gaagagaagccggag

SEQ ID NO: 1474348 - DNA, 15 bp, Homo sapiens
aagagaagccggagg

SEQ ID NO: 1474349 - DNA, 15 bp, Homo sapiens
agagaagccggaggg

SEQ ID NO: 1474350 - DNA, 15 bp, Homo sapiens
gagaagccggagggg

SEQ ID NO: 1474351 - DNA, 15 bp, Homo sapiens
agaagccggagggga

SEQ ID NO: 1474352 - DNA, 15 bp, Homo sapiens
gaagccggaggggac

SEQ ID NO: 1474353 - DNA, 15 bp, Homo sapiens
aagccggaggggact

SEQ ID NO: 1474354 - DNA, 15 bp, Homo sapiens
agccggaggggactg

SEQ ID NO: 1474355 - DNA, 15 bp, Homo sapiens
gccggaggggactga

SEQ ID NO: 1474356 - DNA, 15 bp, Homo sapiens
ccggaggggactgag

SEQ ID NO: 1474357 - DNA, 15 bp, Homo sapiens
cggaggggactgagg

SEQ ID NO: 1474358 - DNA, 15 bp, Homo sapiens
ggaggggactgagga

SEQ ID NO: 1474359 - DNA, 15 bp, Homo sapiens
gaggggactgaggag

SEQ ID NO: 1474360 - DNA, 15 bp, Homo sapiens
aggggactgaggagt

SEQ ID NO: 1474361 - DNA, 15 bp, Homo sapiens
ggggactgaggagtc

SEQ ID NO: 1474362 - DNA, 15 bp, Homo sapiens
gggactgaggagtcc

SEQ ID NO: 1474363 - DNA, 15 bp, Homo sapiens
ggactgaggagtcca

SEQ ID NO: 1474364 - DNA, 15 bp, Homo sapiens
gactgaggagtccag

SEQ ID NO: 1474365 - DNA, 15 bp, Homo sapiens
actgaggagtccaga

SEQ ID NO: 1474366 - DNA, 15 bp, Homo sapiens
ctgaggagtccagat

SEQ ID NO: 1474367 - DNA, 15 bp, Homo sapiens
tgaggagtccagatc

SEQ ID NO: 1474368 - DNA, 15 bp, Homo sapiens
gaggagtccagatcc

SEQ ID NO: 1474369 - DNA, 15 bp, Homo sapiens
aggagtccagatcct

SEQ ID NO: 1474370 - DNA, 15 bp, Homo sapiens
ggagtccagatcctg

SEQ ID NO: 1474371 - DNA, 15 bp, Homo sapiens
gagtccagatcctgg

SEQ ID NO: 1474372 - DNA, 15 bp, Homo sapiens
agtccagatcctggc

SEQ ID NO: 1474373 - DNA, 15 bp, Homo sapiens
gtccagatcctggct

SEQ ID NO: 1474374 - DNA, 15 bp, Homo sapiens
tccagatcctggctg

SEQ ID NO: 1474375 - DNA, 15 bp, Homo sapiens
ccagatcctggctgg

SEQ ID NO: 1474376 - DNA, 15 bp, Homo sapiens
cagatcctggctggc

SEQ ID NO: 1474377 - DNA, 15 bp, Homo sapiens
agatcctggctggcc

SEQ ID NO: 1474378 - DNA, 15 bp, Homo sapiens
gatcctggctggcca

SEQ ID NO: 1474379 - DNA, 15 bp, Homo sapiens
atcctggctggccag

SEQ ID NO: 1474380 - DNA, 15 bp, Homo sapiens
tcctggctggccagg

SEQ ID NO: 1474381 - DNA, 15 bp, Homo sapiens
cctggctggccaggg

SEQ ID NO: 1474382 - DNA, 15 bp, Homo sapiens
ctggctggccagggg

SEQ ID NO: 1474383 - DNA, 15 bp, Homo sapiens
tggctggccagggga

SEQ ID NO: 1474384 - DNA, 15 bp, Homo sapiens
ggctggccaggggag

SEQ ID NO: 1474385 - DNA, 15 bp, Homo sapiens
gctggccaggggagg

SEQ ID NO: 1474386 - DNA, 15 bp, Homo sapiens
ctggccaggggaggc

SEQ ID NO: 1474387 - DNA, 15 bp, Homo sapiens
tggccaggggaggcc

SEQ ID NO: 1474388 - DNA, 15 bp, Homo sapiens
ggccaggggaggcct

SEQ ID NO: 1474389 - DNA, 15 bp, Homo sapiens
gccaggggaggcctc

SEQ ID NO: 1474390 - DNA, 15 bp, Homo sapiens
ccaggggaggcctct

SEQ ID NO: 1474391 - DNA, 15 bp, Homo sapiens
caggggaggcctctc

SEQ ID NO: 1474392 - DNA, 15 bp, Homo sapiens
aggggaggcctctct

SEQ ID NO: 1474393 - DNA, 15 bp, Homo sapiens
ggggaggcctctctg

SEQ ID NO: 1474394 - DNA, 15 bp, Homo sapiens
gggaggcctctctgg

SEQ ID NO: 1474395 - DNA, 15 bp, Homo sapiens
ggaggcctctctgga

SEQ ID NO: 1474396 - DNA, 15 bp, Homo sapiens
gaggcctctctggaa

SEQ ID NO: 1474397 - DNA, 15 bp, Homo sapiens
aggcctctctggaat

SEQ ID NO: 1474398 - DNA, 15 bp, Homo sapiens
ggcctctctggaatg

SEQ ID NO: 1474399 - DNA, 15 bp, Homo sapiens
gcctctctggaatgg

SEQ ID NO: 1474400 - DNA, 15 bp, Homo sapiens
cctctctggaatggc

SEQ ID NO: 1474401 - DNA, 15 bp, Homo sapiens
ctctctggaatggct

SEQ ID NO: 1474402 - DNA, 15 bp, Homo sapiens
tctctggaatggctc

SEQ ID NO: 1474403 - DNA, 15 bp, Homo sapiens
ctctggaatggctcc

SEQ ID NO: 1474404 - DNA, 15 bp, Homo sapiens
tctggaatggctccg

SEQ ID NO: 1474405 - DNA, 15 bp, Homo sapiens
ctggaatggctccgt

SEQ ID NO: 1474406 - DNA, 15 bp, Homo sapiens
tggaatggctccgtg

SEQ ID NO: 1474407 - DNA, 15 bp, Homo sapiens
ggaatggctccgtgc

SEQ ID NO: 1474408 - DNA, 15 bp, Homo sapiens
gaatggctccgtgct

SEQ ID NO: 1474409 - DNA, 15 bp, Homo sapiens
aatggctccgtgctt

SEQ ID NO: 1474410 - DNA, 15 bp, Homo sapiens
atggctccgtgcttc

SEQ ID NO: 1474411 - DNA, 15 bp, Homo sapiens
tggctccgtgcttca

SEQ ID NO: 1474412 - DNA, 15 bp, Homo sapiens
ggctccgtgcttcag

SEQ ID NO: 1474413 - DNA, 15 bp, Homo sapiens
gctccgtgcttcagc

SEQ ID NO: 1474414 - DNA, 15 bp, Homo sapiens
ctccgtgcttcagct

SEQ ID NO: 1474415 - DNA, 15 bp, Homo sapiens
tccgtgcttcagctg

SEQ ID NO: 1474416 - DNA, 15 bp, Homo sapiens
ccgtgcttcagctga

SEQ ID NO: 1474417 - DNA, 15 bp, Homo sapiens
cgtgcttcagctgag

SEQ ID NO: 1474418 - DNA, 15 bp, Homo sapiens
gtgcttcagctgagc

SEQ ID NO: 1474419 - DNA, 15 bp, Homo sapiens
tgcttcagctgagcc

SEQ ID NO: 1474420 - DNA, 15 bp, Homo sapiens
gcttcagctgagccc

SEQ ID NO: 1474421 - DNA, 15 bp, Homo sapiens
cttcagctgagccct

SEQ ID NO: 1474422 - DNA, 15 bp, Homo sapiens
ttcagctgagccctc

SEQ ID NO: 1474423 - DNA, 15 bp, Homo sapiens
tcagctgagccctct

SEQ ID NO: 1474424 - DNA, 15 bp, Homo sapiens
cagctgagccctctg

SEQ ID NO: 1474425 - DNA, 15 bp, Homo sapiens
agctgagccctctga

SEQ ID NO: 1474426 - DNA, 15 bp, Homo sapiens
gctgagccctctgaa

SEQ ID NO: 1474427 - DNA, 15 bp, Homo sapiens
ctgagccctctgaaa

SEQ ID NO: 1474428 - DNA, 15 bp, Homo sapiens
tgagccctctgaaaa

SEQ ID NO: 1474429 - DNA, 15 bp, Homo sapiens
gagccctctgaaaaa

SEQ ID NO: 1474430 - DNA, 15 bp, Homo sapiens
agccctctgaaaaat

SEQ ID NO: 1474431 - DNA, 15 bp, Homo sapiens
gccctctgaaaaatt

SEQ ID NO: 1474432 - DNA, 15 bp, Homo sapiens
ccctctgaaaaattc

SEQ ID NO: 1474433 - DNA, 15 bp, Homo sapiens
cctctgaaaaattca

SEQ ID NO: 1474434 - DNA, 15 bp, Homo sapiens
ctctgaaaaattcag

SEQ ID NO: 1474435 - DNA, 15 bp, Homo sapiens
tctgaaaaattcagc

SEQ ID NO: 1474436 - DNA, 15 bp, Homo sapiens
ctgaaaaattcagct

SEQ ID NO: 1474437 - DNA, 15 bp, Homo sapiens
tgaaaaattcagctt

SEQ ID NO: 1474438 - DNA, 15 bp, Homo sapiens
gaaaaattcagcttc

SEQ ID NO: 1474439 - DNA, 15 bp, Homo sapiens
aaaaattcagcttcc

SEQ ID NO: 1474440 - DNA, 15 bp, Homo sapiens
aaaattcagcttccc

SEQ ID NO: 1474441 - DNA, 15 bp, Homo sapiens
aaattcagcttccca

SEQ ID NO: 1474442 - DNA, 15 bp, Homo sapiens
aattcagcttcccag

SEQ ID NO: 1474443 - DNA, 15 bp, Homo sapiens
attcagcttcccaga

SEQ ID NO: 1474444 - DNA, 15 bp, Homo sapiens
ttcagcttcccagat

SEQ ID NO: 1474445 - DNA, 15 bp, Homo sapiens
tcagcttcccagatg

SEQ ID NO: 1474446 - DNA, 15 bp, Homo sapiens
cagcttcccagatgc

SEQ ID NO: 1474447 - DNA, 15 bp, Homo sapiens
agcttcccagatgca

SEQ ID NO: 1474448 - DNA, 15 bp, Homo sapiens
gcttcccagatgcaa

SEQ ID NO: 1474449 - DNA, 15 bp, Homo sapiens
cttcccagatgcaaa

SEQ ID NO: 1474450 - DNA, 15 bp, Homo sapiens
ttcccagatgcaaat

SEQ ID NO: 1474451 - DNA, 15 bp, Homo sapiens
tcccagatgcaaatc

SEQ ID NO: 1474452 - DNA, 15 bp, Homo sapiens
cccagatgcaaatca

SEQ ID NO: 1474453 - DNA, 15 bp, Homo sapiens
ccagatgcaaatcag

SEQ ID NO: 1474454 - DNA, 15 bp, Homo sapiens
cagatgcaaatcaga

SEQ ID NO: 1474455 - DNA, 15 bp, Homo sapiens
agatgcaaatcagac

SEQ ID NO: 1474456 - DNA, 15 bp, Homo sapiens
gatgcaaatcagacc

SEQ ID NO: 1474457 - DNA, 15 bp, Homo sapiens
atgcaaatcagacca

SEQ ID NO: 1474458 - DNA, 15 bp, Homo sapiens
tgcaaatcagaccag

SEQ ID NO: 1474459 - DNA, 15 bp, Homo sapiens
gcaaatcagaccagc

SEQ ID NO: 1474460 - DNA, 15 bp, Homo sapiens
caaatcagaccagct

SEQ ID NO: 1474461 - DNA, 15 bp, Homo sapiens
aaatcagaccagctg

SEQ ID NO: 1474462 - DNA, 15 bp, Homo sapiens
aatcagaccagctgc

SEQ ID NO: 1474463 - DNA, 15 bp, Homo sapiens
atcagaccagctgct

SEQ ID NO: 1474464 - DNA, 15 bp, Homo sapiens
tcagaccagctgcta

SEQ ID NO: 1474465 - DNA, 15 bp, Homo sapiens
cagaccagctgctac

SEQ ID NO: 1474466 - DNA, 15 bp, Homo sapiens
agaccagctgctact

SEQ ID NO: 1474467 - DNA, 15 bp, Homo sapiens
gaccagctgctacta

SEQ ID NO: 1474468 - DNA, 15 bp, Homo sapiens
accagctgctactat

SEQ ID NO: 1474469 - DNA, 15 bp, Homo sapiens
ccagctgctactatc

SEQ ID NO: 1474470 - DNA, 15 bp, Homo sapiens
cagctgctactatca

SEQ ID NO: 1474471 - DNA, 15 bp, Homo sapiens
agctgctactatcac

SEQ ID NO: 1474472 - DNA, 15 bp, Homo sapiens
gctgctactatcaca

SEQ ID NO: 1474473 - DNA, 15 bp, Homo sapiens
ctgctactatcacat

SEQ ID NO: 1474474 - DNA, 15 bp, Homo sapiens
tgctactatcacatt

SEQ ID NO: 1474475 - DNA, 15 bp, Homo sapiens
gctactatcacatta

SEQ ID NO: 1474476 - DNA, 15 bp, Homo sapiens
ctactatcacattac

SEQ ID NO: 1474477 - DNA, 15 bp, Homo sapiens
tactatcacattact

SEQ ID NO: 1474478 - DNA, 15 bp, Homo sapiens
actatcacattactg

SEQ ID NO: 1474479 - DNA, 15 bp, Homo sapiens
ctatcacattactga

SEQ ID NO: 1474480 - DNA, 15 bp, Homo sapiens
tatcacattactgag

SEQ ID NO: 1474481 - DNA, 15 bp, Homo sapiens
atcacattactgagt

SEQ ID NO: 1474482 - DNA, 15 bp, Homo sapiens
tcacattactgagtc

SEQ ID NO: 1474483 - DNA, 15 bp, Homo sapiens
cacattactgagtct

SEQ ID NO: 1474484 - DNA, 15 bp, Homo sapiens
acattactgagtctt

SEQ ID NO: 1474485 - DNA, 15 bp, Homo sapiens
cattactgagtcttc

SEQ ID NO: 1474486 - DNA, 15 bp, Homo sapiens
attactgagtcttct

SEQ ID NO: 1474487 - DNA, 15 bp, Homo sapiens
ttactgagtcttctt

SEQ ID NO: 1474488 - DNA, 15 bp, Homo sapiens
tactgagtcttcttc

SEQ ID NO: 1474489 - DNA, 15 bp, Homo sapiens
actgagtcttcttcc

SEQ ID NO: 1474490 - DNA, 15 bp, Homo sapiens
ctgagtcttcttcca

SEQ ID NO: 1474491 - DNA, 15 bp, Homo sapiens
tgagtcttcttccag

SEQ ID NO: 1474492 - DNA, 15 bp, Homo sapiens
gagtcttcttccaga

SEQ ID NO: 1474493 - DNA, 15 bp, Homo sapiens
agtcttcttccagaa

SEQ ID NO: 1474494 - DNA, 15 bp, Homo sapiens
gtcttcttccagaac

SEQ ID NO: 1474495 - DNA, 15 bp, Homo sapiens
tcttcttccagaacc

SEQ ID NO: 1474496 - DNA, 15 bp, Homo sapiens
cttcttccagaaccc

SEQ ID NO: 1474497 - DNA, 15 bp, Homo sapiens
ttcttccagaacccc

SEQ ID NO: 1474498 - DNA, 15 bp, Homo sapiens
tcttccagaaccccc

SEQ ID NO: 1474499 - DNA, 15 bp, Homo sapiens
cttccagaacccccg

SEQ ID NO: 1474500 - DNA, 15 bp, Homo sapiens
ttccagaacccccga

SEQ ID NO: 1474501 - DNA, 15 bp, Homo sapiens
tccagaacccccgag

SEQ ID NO: 1474502 - DNA, 15 bp, Homo sapiens
ccagaacccccgagg

SEQ ID NO: 1474503 - DNA, 15 bp, Homo sapiens
cagaacccccgaggt

SEQ ID NO: 1474504 - DNA, 15 bp, Homo sapiens
agaacccccgaggtc

SEQ ID NO: 1474505 - DNA, 15 bp, Homo sapiens
gaacccccgaggtcc

SEQ ID NO: 1474506 - DNA, 15 bp, Homo sapiens
aacccccgaggtccg

SEQ ID NO: 1474507 - DNA, 15 bp, Homo sapiens
acccccgaggtccgg

SEQ ID NO: 1474508 - DNA, 15 bp, Homo sapiens
cccccgaggtccggt

SEQ ID NO: 1474509 - DNA, 15 bp, Homo sapiens
ccccgaggtccggtc

SEQ ID NO: 1474510 - DNA, 15 bp, Homo sapiens
cccgaggtccggtct

SEQ ID NO: 1474511 - DNA, 15 bp, Homo sapiens
ccgaggtccggtctc

SEQ ID NO: 1474512 - DNA, 15 bp, Homo sapiens
cgaggtccggtctcc

SEQ ID NO: 1474513 - DNA, 15 bp, Homo sapiens
gaggtccggtctccc

SEQ ID NO: 1474514 - DNA, 15 bp, Homo sapiens
aggtccggtctcccc

SEQ ID NO: 1474515 - DNA, 15 bp, Homo sapiens
ggtccggtctcccct

SEQ ID NO: 1474516 - DNA, 15 bp, Homo sapiens
gtccggtctcccctc

SEQ ID NO: 1474517 - DNA, 15 bp, Homo sapiens
tccggtctcccctct

SEQ ID NO: 1474518 - DNA, 15 bp, Homo sapiens
ccggtctcccctctc

SEQ ID NO: 1474519 - DNA, 15 bp, Homo sapiens
cggtctcccctctcc

SEQ ID NO: 1474520 - DNA, 15 bp, Homo sapiens
ggtctcccctctcca

SEQ ID NO: 1474521 - DNA, 15 bp, Homo sapiens
gtctcccctctccat

SEQ ID NO: 1474522 - DNA, 15 bp, Homo sapiens
tctcccctctccatc

SEQ ID NO: 1474523 - DNA, 15 bp, Homo sapiens
ctcccctctccatcc

SEQ ID NO: 1474524 - DNA, 15 bp, Homo sapiens
tcccctctccatcca

SEQ ID NO: 1474525 - DNA, 15 bp, Homo sapiens
cccctctccatccac

SEQ ID NO: 1474526 - DNA, 15 bp, Homo sapiens
ccctctccatccact

SEQ ID NO: 1474527 - DNA, 15 bp, Homo sapiens
cctctccatccactc

SEQ ID NO: 1474528 - DNA, 15 bp, Homo sapiens
ctctccatccactca

SEQ ID NO: 1474529 - DNA, 15 bp, Homo sapiens
tctccatccactcag

SEQ ID NO: 1474530 - DNA, 15 bp, Homo sapiens
ctccatccactcaga

SEQ ID NO: 1474531 - DNA, 15 bp, Homo sapiens
tccatccactcagaa

SEQ ID NO: 1474532 - DNA, 15 bp, Homo sapiens
ccatccactcagaag

SEQ ID NO: 1474533 - DNA, 15 bp, Homo sapiens
catccactcagaagc

SEQ ID NO: 1474534 - DNA, 15 bp, Homo sapiens
atccactcagaagct

SEQ ID NO: 1474535 - DNA, 15 bp, Homo sapiens
tccactcagaagctt

SEQ ID NO: 1474536 - DNA, 15 bp, Homo sapiens
ccactcagaagcttc

SEQ ID NO: 1474537 - DNA, 15 bp, Homo sapiens
cactcagaagcttct

SEQ ID NO: 1474538 - DNA, 15 bp, Homo sapiens
actcagaagcttctg

SEQ ID NO: 1474539 - DNA, 15 bp, Homo sapiens
ctcagaagcttctga

SEQ ID NO: 1474540 - DNA, 15 bp, Homo sapiens
tcagaagcttctgaa

SEQ ID NO: 1474541 - DNA, 15 bp, Homo sapiens
cagaagcttctgaag

SEQ ID NO: 1474542 - DNA, 15 bp, Homo sapiens
agaagcttctgaagc

SEQ ID NO: 1474543 - DNA, 15 bp, Homo sapiens
gaagcttctgaagca

SEQ ID NO: 1474544 - DNA, 15 bp, Homo sapiens
aagcttctgaagcat

SEQ ID NO: 1474545 - DNA, 15 bp, Homo sapiens
agcttctgaagcatg

SEQ ID NO: 1474546 - DNA, 15 bp, Homo sapiens
gcttctgaagcatga

SEQ ID NO: 1474547 - DNA, 15 bp, Homo sapiens
cttctgaagcatgac

SEQ ID NO: 1474548 - DNA, 15 bp, Homo sapiens
ttctgaagcatgact

SEQ ID NO: 1474549 - DNA, 15 bp, Homo sapiens
tctgaagcatgactg

SEQ ID NO: 1474550 - DNA, 15 bp, Homo sapiens
ctgaagcatgactgg

SEQ ID NO: 1474551 - DNA, 15 bp, Homo sapiens
tgaagcatgactggc

SEQ ID NO: 1474552 - DNA, 15 bp, Homo sapiens
gaagcatgactggca

SEQ ID NO: 1474553 - DNA, 15 bp, Homo sapiens
aagcatgactggcag

SEQ ID NO: 1474554 - DNA, 15 bp, Homo sapiens
agcatgactggcaga

SEQ ID NO: 1474555 - DNA, 15 bp, Homo sapiens
gcatgactggcagac

SEQ ID NO: 1474556 - DNA, 15 bp, Homo sapiens
catgactggcagaca

SEQ ID NO: 1474557 - DNA, 15 bp, Homo sapiens
atgactggcagacat

SEQ ID NO: 1474558 - DNA, 15 bp, Homo sapiens
tgactggcagacata

SEQ ID NO: 1474559 - DNA, 15 bp, Homo sapiens
gactggcagacataa

SEQ ID NO: 1474560 - DNA, 15 bp, Homo sapiens
actggcagacataaa

SEQ ID NO: 1474561 - DNA, 15 bp, Homo sapiens
ctggcagacataaat

SEQ ID NO: 1474562 - DNA, 15 bp, Homo sapiens
tggcagacataaatc

SEQ ID NO: 1474563 - DNA, 15 bp, Homo sapiens
ggcagacataaatct

SEQ ID NO: 1474564 - DNA, 15 bp, Homo sapiens
gcagacataaatctc

SEQ ID NO: 1474565 - DNA, 15 bp, Homo sapiens
cagacataaatctcc

SEQ ID NO: 1474566 - DNA, 15 bp, Homo sapiens
agacataaatctccc

SEQ ID NO: 1474567 - DNA, 15 bp, Homo sapiens
gacataaatctcccc

SEQ ID NO: 1474568 - DNA, 15 bp, Homo sapiens
acataaatctccccc

SEQ ID NO: 1474569 - DNA, 15 bp, Homo sapiens
cataaatctccccca

SEQ ID NO: 1474570 - DNA, 15 bp, Homo sapiens
ataaatctcccccaa

SEQ ID NO: 1474571 - DNA, 15 bp, Homo sapiens
taaatctcccccaac

SEQ ID NO: 1474572 - DNA, 15 bp, Homo sapiens
aaatctcccccaacc

SEQ ID NO: 1474573 - DNA, 15 bp, Homo sapiens
aatctcccccaaccg

SEQ ID NO: 1474574 - DNA, 15 bp, Homo sapiens
atctcccccaaccgc

SEQ ID NO: 1474575 - DNA, 15 bp, Homo sapiens
tctcccccaaccgct

SEQ ID NO: 1474576 - DNA, 15 bp, Homo sapiens
ctcccccaaccgctg

SEQ ID NO: 1474577 - DNA, 15 bp, Homo sapiens
tcccccaaccgctgg

SEQ ID NO: 1474578 - DNA, 15 bp, Homo sapiens
cccccaaccgctggc

SEQ ID NO: 1474579 - DNA, 15 bp, Homo sapiens
ccccaaccgctggct

SEQ ID NO: 1474580 - DNA, 15 bp, Homo sapiens
cccaaccgctggctc

SEQ ID NO: 1474581 - DNA, 15 bp, Homo sapiens
ccaaccgctggctca

SEQ ID NO: 1474582 - DNA, 15 bp, Homo sapiens
caaccgctggctcag

SEQ ID NO: 1474583 - DNA, 15 bp, Homo sapiens
aaccgctggctcagc

SEQ ID NO: 1474584 - DNA, 15 bp, Homo sapiens
accgctggctcagcc

SEQ ID NO: 1474585 - DNA, 15 bp, Homo sapiens
ccgctggctcagccc

SEQ ID NO: 1474586 - DNA, 15 bp, Homo sapiens
cgctggctcagcccc

SEQ ID NO: 1474587 - DNA, 15 bp, Homo sapiens
gctggctcagccccc

SEQ ID NO: 1474588 - DNA, 15 bp, Homo sapiens
ctggctcagcccccc

SEQ ID NO: 1474589 - DNA, 15 bp, Homo sapiens
tggctcagcccccct

SEQ ID NO: 1474590 - DNA, 15 bp, Homo sapiens
ggctcagcccccctg

SEQ ID NO: 1474591 - DNA, 15 bp, Homo sapiens
gctcagcccccctgc

SEQ ID NO: 1474592 - DNA, 15 bp, Homo sapiens
ctcagcccccctgcc

SEQ ID NO: 1474593 - DNA, 15 bp, Homo sapiens
tcagcccccctgccc

SEQ ID NO: 1474594 - DNA, 15 bp, Homo sapiens
cagcccccctgccct

SEQ ID NO: 1474595 - DNA, 15 bp, Homo sapiens
agcccccctgccctc

SEQ ID NO: 1474596 - DNA, 15 bp, Homo sapiens
gcccccctgccctcc

SEQ ID NO: 1474597 - DNA, 15 bp, Homo sapiens
cccccctgccctccc

SEQ ID NO: 1474598 - DNA, 15 bp, Homo sapiens
ccccctgccctcccc

SEQ ID NO: 1474599 - DNA, 15 bp, Homo sapiens
cccctgccctcccct

SEQ ID NO: 1474600 - DNA, 15 bp, Homo sapiens
ccctgccctcccctg

SEQ ID NO: 1474601 - DNA, 15 bp, Homo sapiens
cctgccctcccctga

SEQ ID NO: 1474602 - DNA, 15 bp, Homo sapiens
ctgccctcccctgaa

SEQ ID NO: 1474603 - DNA, 15 bp, Homo sapiens
tgccctcccctgaag

SEQ ID NO: 1474604 - DNA, 15 bp, Homo sapiens
gccctcccctgaagc

SEQ ID NO: 1474605 - DNA, 15 bp, Homo sapiens
ccctcccctgaagct

SEQ ID NO: 1474606 - DNA, 15 bp, Homo sapiens
cctcccctgaagctg

SEQ ID NO: 1474607 - DNA, 15 bp, Homo sapiens
ctcccctgaagctga

SEQ ID NO: 1474608 - DNA, 15 bp, Homo sapiens
tcccctgaagctgac

SEQ ID NO: 1474609 - DNA, 15 bp, Homo sapiens
cccctgaagctgaca

SEQ ID NO: 1474610 - DNA, 15 bp, Homo sapiens
ccctgaagctgacac

SEQ ID NO: 1474611 - DNA, 15 bp, Homo sapiens
cctgaagctgacacc

SEQ ID NO: 1474612 - DNA, 15 bp, Homo sapiens
ctgaagctgacaccc

SEQ ID NO: 1474613 - DNA, 15 bp, Homo sapiens
tgaagctgacaccca

SEQ ID NO: 1474614 - DNA, 15 bp, Homo sapiens
gaagctgacacccac

SEQ ID NO: 1474615 - DNA, 15 bp, Homo sapiens
aagctgacacccacc

SEQ ID NO: 1474616 - DNA, 15 bp, Homo sapiens
agctgacacccaccc

SEQ ID NO: 1474617 - DNA, 15 bp, Homo sapiens
gctgacacccaccca

SEQ ID NO: 1474618 - DNA, 15 bp, Homo sapiens
ctgacacccacccat

SEQ ID NO: 1474619 - DNA, 15 bp, Homo sapiens
tgacacccacccatg

SEQ ID NO: 1474620 - DNA, 15 bp, Homo sapiens
gacacccacccatgc

SEQ ID NO: 1474621 - DNA, 15 bp, Homo sapiens
acacccacccatgct

SEQ ID NO: 1474622 - DNA, 15 bp, Homo sapiens
cacccacccatgctc

SEQ ID NO: 1474623 - DNA, 15 bp, Homo sapiens
acccacccatgctcc

SEQ ID NO: 1474624 - DNA, 15 bp, Homo sapiens
cccacccatgctccc

SEQ ID NO: 1474625 - DNA, 15 bp, Homo sapiens
ccacccatgctcccc

SEQ ID NO: 1474626 - DNA, 15 bp, Homo sapiens
cacccatgctcccct

SEQ ID NO: 1474627 - DNA, 15 bp, Homo sapiens
acccatgctcccctg

SEQ ID NO: 1474628 - DNA, 15 bp, Homo sapiens
cccatgctcccctgt

SEQ ID NO: 1474629 - DNA, 15 bp, Homo sapiens
ccatgctcccctgtg

SEQ ID NO: 1474630 - DNA, 15 bp, Homo sapiens
catgctcccctgtgt

SEQ ID NO: 1474631 - DNA, 15 bp, Homo sapiens
atgctcccctgtgta

SEQ ID NO: 1474632 - DNA, 15 bp, Homo sapiens
tgctcccctgtgtag

SEQ ID NO: 1474633 - DNA, 15 bp, Homo sapiens
gctcccctgtgtagg

SEQ ID NO: 1474634 - DNA, 15 bp, Homo sapiens
ctcccctgtgtaggc

SEQ ID NO: 1474635 - DNA, 15 bp, Homo sapiens
tcccctgtgtaggct

SEQ ID NO: 1474636 - DNA, 15 bp, Homo sapiens
cccctgtgtaggctc

SEQ ID NO: 1474637 - DNA, 15 bp, Homo sapiens
ccctgtgtaggctca

SEQ ID NO: 1474638 - DNA, 15 bp, Homo sapiens
cctgtgtaggctcac

SEQ ID NO: 1474639 - DNA, 15 bp, Homo sapiens
ctgtgtaggctcacc

SEQ ID NO: 1474640 - DNA, 15 bp, Homo sapiens
tgtgtaggctcacct

SEQ ID NO: 1474641 - DNA, 15 bp, Homo sapiens
gtgtaggctcacctt

SEQ ID NO: 1474642 - DNA, 15 bp, Homo sapiens
tgtaggctcaccttt

SEQ ID NO: 1474643 - DNA, 15 bp, Homo sapiens
gtaggctcacctttc

SEQ ID NO: 1474644 - DNA, 15 bp, Homo sapiens
taggctcacctttca

SEQ ID NO: 1474645 - DNA, 15 bp, Homo sapiens
aggctcacctttcag

SEQ ID NO: 1474646 - DNA, 15 bp, Homo sapiens
ggctcacctttcaga

SEQ ID NO: 1474647 - DNA, 15 bp, Homo sapiens
gctcacctttcagaa

SEQ ID NO: 1474648 - DNA, 15 bp, Homo sapiens
ctcacctttcagaac

SEQ ID NO: 1474649 - DNA, 15 bp, Homo sapiens
tcacctttcagaaca

SEQ ID NO: 1474650 - DNA, 15 bp, Homo sapiens
cacctttcagaacac

SEQ ID NO: 1474651 - DNA, 15 bp, Homo sapiens
acctttcagaacact

SEQ ID NO: 1474652 - DNA, 15 bp, Homo sapiens
cctttcagaacactc

SEQ ID NO: 1474653 - DNA, 15 bp, Homo sapiens
ctttcagaacactcc

SEQ ID NO: 1474654 - DNA, 15 bp, Homo sapiens
tttcagaacactccc

SEQ ID NO: 1474655 - DNA, 15 bp, Homo sapiens
ttcagaacactcccg

SEQ ID NO: 1474656 - DNA, 15 bp, Homo sapiens
tcagaacactcccga

SEQ ID NO: 1474657 - DNA, 15 bp, Homo sapiens
cagaacactcccgat

SEQ ID NO: 1474658 - DNA, 15 bp, Homo sapiens
agaacactcccgatt

SEQ ID NO: 1474659 - DNA, 15 bp, Homo sapiens
gaacactcccgatta

SEQ ID NO: 1474660 - DNA, 15 bp, Homo sapiens
aacactcccgattac

SEQ ID NO: 1474661 - DNA, 15 bp, Homo sapiens
acactcccgattaca

SEQ ID NO: 1474662 - DNA, 15 bp, Homo sapiens
cactcccgattacac

SEQ ID NO: 1474663 - DNA, 15 bp, Homo sapiens
actcccgattacaca

SEQ ID NO: 1474664 - DNA, 15 bp, Homo sapiens
ctcccgattacacat

SEQ ID NO: 1474665 - DNA, 15 bp, Homo sapiens
tcccgattacacatt

SEQ ID NO: 1474666 - DNA, 15 bp, Homo sapiens
cccgattacacatta

SEQ ID NO: 1474667 - DNA, 15 bp, Homo sapiens
ccgattacacattaa

SEQ ID NO: 1474668 - DNA, 15 bp, Homo sapiens
cgattacacattaag

SEQ ID NO: 1474669 - DNA, 15 bp, Homo sapiens
gattacacattaaga

SEQ ID NO: 1474670 - DNA, 15 bp, Homo sapiens
attacacattaagac

SEQ ID NO: 1474671 - DNA, 15 bp, Homo sapiens
ttacacattaagacg

SEQ ID NO: 1474672 - DNA, 15 bp, Homo sapiens
tacacattaagacgc

SEQ ID NO: 1474673 - DNA, 15 bp, Homo sapiens
acacattaagacgct

SEQ ID NO: 1474674 - DNA, 15 bp, Homo sapiens
cacattaagacgctg

SEQ ID NO: 1474675 - DNA, 15 bp, Homo sapiens
acattaagacgctgc

SEQ ID NO: 1474676 - DNA, 15 bp, Homo sapiens
cattaagacgctgcc

SEQ ID NO: 1474677 - DNA, 15 bp, Homo sapiens
attaagacgctgccc

SEQ ID NO: 1474678 - DNA, 15 bp, Homo sapiens
ttaagacgctgcccc

SEQ ID NO: 1474679 - DNA, 15 bp, Homo sapiens
taagacgctgcccca

SEQ ID NO: 1474680 - DNA, 15 bp, Homo sapiens
aagacgctgccccaa

SEQ ID NO: 1474681 - DNA, 15 bp, Homo sapiens
agacgctgccccaac

SEQ ID NO: 1474682 - DNA, 15 bp, Homo sapiens
gacgctgccccaacc

SEQ ID NO: 1474683 - DNA, 15 bp, Homo sapiens
acgctgccccaaccc

SEQ ID NO: 1474684 - DNA, 15 bp, Homo sapiens
cgctgccccaaccca

SEQ ID NO: 1474685 - DNA, 15 bp, Homo sapiens
gctgccccaacccag

SEQ ID NO: 1474686 - DNA, 15 bp, Homo sapiens
ctgccccaacccagc

SEQ ID NO: 1474687 - DNA, 15 bp, Homo sapiens
tgccccaacccagcc

SEQ ID NO: 1474688 - DNA, 15 bp, Homo sapiens
gccccaacccagccc

SEQ ID NO: 1474689 - DNA, 15 bp, Homo sapiens
ccccaacccagcccc

SEQ ID NO: 1474690 - DNA, 15 bp, Homo sapiens
cccaacccagcccca

SEQ ID NO: 1474691 - DNA, 15 bp, Homo sapiens
ccaacccagccccag

SEQ ID NO: 1474692 - DNA, 15 bp, Homo sapiens
caacccagccccaga

SEQ ID NO: 1474693 - DNA, 15 bp, Homo sapiens
aacccagccccagac

SEQ ID NO: 1474694 - DNA, 15 bp, Homo sapiens
acccagccccagact

SEQ ID NO: 1474695 - DNA, 15 bp, Homo sapiens
cccagccccagactc

SEQ ID NO: 1474696 - DNA, 15 bp, Homo sapiens
ccagccccagactcc

SEQ ID NO: 1474697 - DNA, 15 bp, Homo sapiens
cagccccagactcct

SEQ ID NO: 1474698 - DNA, 15 bp, Homo sapiens
agccccagactccta

SEQ ID NO: 1474699 - DNA, 15 bp, Homo sapiens
gccccagactcctac

SEQ ID NO: 1474700 - DNA, 15 bp, Homo sapiens
ccccagactcctact

SEQ ID NO: 1474701 - DNA, 15 bp, Homo sapiens
cccagactcctactc

SEQ ID NO: 1474702 - DNA, 15 bp, Homo sapiens
ccagactcctactct

SEQ ID NO: 1474703 - DNA, 15 bp, Homo sapiens
cagactcctactcta

SEQ ID NO: 1474704 - DNA, 15 bp, Homo sapiens
agactcctactctat

SEQ ID NO: 1474705 - DNA, 15 bp, Homo sapiens
gactcctactctatg

SEQ ID NO: 1474706 - DNA, 15 bp, Homo sapiens
actcctactctatgg

SEQ ID NO: 1474707 - DNA, 15 bp, Homo sapiens
ctcctactctatggc

SEQ ID NO: 1474708 - DNA, 15 bp, Homo sapiens
tcctactctatggct

SEQ ID NO: 1474709 - DNA, 15 bp, Homo sapiens
cctactctatggcta

SEQ ID NO: 1474710 - DNA, 15 bp, Homo sapiens
ctactctatggctag

SEQ ID NO: 1474711 - DNA, 15 bp, Homo sapiens
tactctatggctagt

SEQ ID NO: 1474712 - DNA, 15 bp, Homo sapiens
actctatggctagtt

SEQ ID NO: 1474713 - DNA, 15 bp, Homo sapiens
ctctatggctagttt

SEQ ID NO: 1474714 - DNA, 15 bp, Homo sapiens
tctatggctagtttc

SEQ ID NO: 1474715 - DNA, 15 bp, Homo sapiens
ctatggctagtttca

SEQ ID NO: 1474716 - DNA, 15 bp, Homo sapiens
tatggctagtttcaa

SEQ ID NO: 1474717 - DNA, 15 bp, Homo sapiens
atggctagtttcaac

SEQ ID NO: 1474718 - DNA, 15 bp, Homo sapiens
tggctagtttcaacc

SEQ ID NO: 1474719 - DNA, 15 bp, Homo sapiens
ggctagtttcaacct

SEQ ID NO: 1474720 - DNA, 15 bp, Homo sapiens
gctagtttcaaccta

SEQ ID NO: 1474721 - DNA, 15 bp, Homo sapiens
ctagtttcaacctac

SEQ ID NO: 1474722 - DNA, 15 bp, Homo sapiens
tagtttcaacctaca

SEQ ID NO: 1474723 - DNA, 15 bp, Homo sapiens
agtttcaacctacaa

SEQ ID NO: 1474724 - DNA, 15 bp, Homo sapiens
gtttcaacctacaac

SEQ ID NO: 1474725 - DNA, 15 bp, Homo sapiens
tttcaacctacaact

SEQ ID NO: 1474726 - DNA, 15 bp, Homo sapiens
ttcaacctacaactc

SEQ ID NO: 1474727 - DNA, 15 bp, Homo sapiens
tcaacctacaactca

SEQ ID NO: 1474728 - DNA, 15 bp, Homo sapiens
caacctacaactcaa

SEQ ID NO: 1474729 - DNA, 15 bp, Homo sapiens
aacctacaactcaat

SEQ ID NO: 1474730 - DNA, 15 bp, Homo sapiens
acctacaactcaatc

SEQ ID NO: 1474731 - DNA, 15 bp, Homo sapiens
cctacaactcaatcc

SEQ ID NO: 1474732 - DNA, 15 bp, Homo sapiens
ctacaactcaatcca

SEQ ID NO: 1474733 - DNA, 15 bp, Homo sapiens
tacaactcaatccag

SEQ ID NO: 1474734 - DNA, 15 bp, Homo sapiens
acaactcaatccagg

SEQ ID NO: 1474735 - DNA, 15 bp, Homo sapiens
caactcaatccaggg

SEQ ID NO: 1474736 - DNA, 15 bp, Homo sapiens
aactcaatccagggg

SEQ ID NO: 1474737 - DNA, 15 bp, Homo sapiens
actcaatccaggggt

SEQ ID NO: 1474738 - DNA, 15 bp, Homo sapiens
ctcaatccaggggtg

SEQ ID NO: 1474739 - DNA, 15 bp, Homo sapiens
tcaatccaggggtgc

SEQ ID NO: 1474740 - DNA, 15 bp, Homo sapiens
caatccaggggtgca

SEQ ID NO: 1474741 - DNA, 15 bp, Homo sapiens
aatccaggggtgcag

SEQ ID NO: 1474742 - DNA, 15 bp, Homo sapiens
atccaggggtgcagg

SEQ ID NO: 1474743 - DNA, 15 bp, Homo sapiens
tccaggggtgcaggg

SEQ ID NO: 1474744 - DNA, 15 bp, Homo sapiens
ccaggggtgcagggg

SEQ ID NO: 1474745 - DNA, 15 bp, Homo sapiens
caggggtgcaggggg

SEQ ID NO: 1474746 - DNA, 15 bp, Homo sapiens
aggggtgcagggggc

SEQ ID NO: 1474747 - DNA, 15 bp, Homo sapiens
ggggtgcagggggct

SEQ ID NO: 1474748 - DNA, 15 bp, Homo sapiens
gggtgcagggggctg

SEQ ID NO: 1474749 - DNA, 15 bp, Homo sapiens
ggtgcagggggctgg

SEQ ID NO: 1474750 - DNA, 15 bp, Homo sapiens
gtgcagggggctggg

SEQ ID NO: 1474751 - DNA, 15 bp, Homo sapiens
tgcagggggctgggg

SEQ ID NO: 1474752 - DNA, 15 bp, Homo sapiens
gcagggggctggggg

SEQ ID NO: 1474753 - DNA, 15 bp, Homo sapiens
cagggggctgggggt

SEQ ID NO: 1474754 - DNA, 15 bp, Homo sapiens
agggggctgggggtg

SEQ ID NO: 1474755 - DNA, 15 bp, Homo sapiens
gggggctgggggtgc

SEQ ID NO: 1474756 - DNA, 15 bp, Homo sapiens
ggggctgggggtgca

SEQ ID NO: 1474757 - DNA, 15 bp, Homo sapiens
gggctgggggtgcaa

SEQ ID NO: 1474758 - DNA, 15 bp, Homo sapiens
ggctgggggtgcaac

SEQ ID NO: 1474759 - DNA, 15 bp, Homo sapiens
gctgggggtgcaacc

SEQ ID NO: 1474760 - DNA, 15 bp, Homo sapiens
ctgggggtgcaaccg

SEQ ID NO: 1474761 - DNA, 15 bp, Homo sapiens
tgggggtgcaaccgg

SEQ ID NO: 1474762 - DNA, 15 bp, Homo sapiens
gggggtgcaaccggg

SEQ ID NO: 1474763 - DNA, 15 bp, Homo sapiens
ggggtgcaaccggga

SEQ ID NO: 1474764 - DNA, 15 bp, Homo sapiens
gggtgcaaccgggaa

SEQ ID NO: 1474765 - DNA, 15 bp, Homo sapiens
ggtgcaaccgggaag

SEQ ID NO: 1474766 - DNA, 15 bp, Homo sapiens
gtgcaaccgggaagc

SEQ ID NO: 1474767 - DNA, 15 bp, Homo sapiens
tgcaaccgggaagcc

SEQ ID NO: 1474768 - DNA, 15 bp, Homo sapiens
gcaaccgggaagccc

SEQ ID NO: 1474769 - DNA, 15 bp, Homo sapiens
caaccgggaagccca

SEQ ID NO: 1474770 - DNA, 15 bp, Homo sapiens
aaccgggaagcccaa

SEQ ID NO: 1474771 - DNA, 15 bp, Homo sapiens
accgggaagcccaag

SEQ ID NO: 1474772 - DNA, 15 bp, Homo sapiens
ccgggaagcccaagg

SEQ ID NO: 1474773 - DNA, 15 bp, Homo sapiens
cgggaagcccaaggg

SEQ ID NO: 1474774 - DNA, 15 bp, Homo sapiens
gggaagcccaaggga

SEQ ID NO: 1474775 - DNA, 15 bp, Homo sapiens
ggaagcccaagggaa

SEQ ID NO: 1474776 - DNA, 15 bp, Homo sapiens
gaagcccaagggaag

SEQ ID NO: 1474777 - DNA, 15 bp, Homo sapiens
aagcccaagggaaga

SEQ ID NO: 1474778 - DNA, 15 bp, Homo sapiens
agcccaagggaagat

SEQ ID NO: 1474779 - DNA, 15 bp, Homo sapiens
gcccaagggaagatc

SEQ ID NO: 1474780 - DNA, 15 bp, Homo sapiens
cccaagggaagatcc

SEQ ID NO: 1474781 - DNA, 15 bp, Homo sapiens
ccaagggaagatcca

SEQ ID NO: 1474782 - DNA, 15 bp, Homo sapiens
caagggaagatccac

SEQ ID NO: 1474783 - DNA, 15 bp, Homo sapiens
aagggaagatccact

SEQ ID NO: 1474784 - DNA, 15 bp, Homo sapiens
agggaagatccactt

SEQ ID NO: 1474785 - DNA, 15 bp, Homo sapiens
gggaagatccacttg

SEQ ID NO: 1474786 - DNA, 15 bp, Homo sapiens
ggaagatccacttgg

SEQ ID NO: 1474787 - DNA, 15 bp, Homo sapiens
gaagatccacttgga

SEQ ID NO: 1474788 - DNA, 15 bp, Homo sapiens
aagatccacttggag

SEQ ID NO: 1474789 - DNA, 15 bp, Homo sapiens
agatccacttggaga

SEQ ID NO: 1474790 - DNA, 15 bp, Homo sapiens
gatccacttggagag

SEQ ID NO: 1474791 - DNA, 15 bp, Homo sapiens
atccacttggagaga

SEQ ID NO: 1474792 - DNA, 15 bp, Homo sapiens
tccacttggagagaa

SEQ ID NO: 1474793 - DNA, 15 bp, Homo sapiens
ccacttggagagaat

SEQ ID NO: 1474794 - DNA, 15 bp, Homo sapiens
cacttggagagaatg

SEQ ID NO: 1474795 - DNA, 15 bp, Homo sapiens
acttggagagaatga

SEQ ID NO: 1474796 - DNA, 15 bp, Homo sapiens
cttggagagaatgag

SEQ ID NO: 1474797 - DNA, 15 bp, Homo sapiens
ttggagagaatgagg

SEQ ID NO: 1474798 - DNA, 15 bp, Homo sapiens
tggagagaatgaggg

SEQ ID NO: 1474799 - DNA, 15 bp, Homo sapiens
ggagagaatgagggt

SEQ ID NO: 1474800 - DNA, 15 bp, Homo sapiens
gagagaatgagggtc

SEQ ID NO: 1474801 - DNA, 15 bp, Homo sapiens
agagaatgagggtcc

SEQ ID NO: 1474802 - DNA, 15 bp, Homo sapiens
gagaatgagggtcct

SEQ ID NO: 1474803 - DNA, 15 bp, Homo sapiens
agaatgagggtcctg

SEQ ID NO: 1474804 - DNA, 15 bp, Homo sapiens
gaatgagggtcctgc

SEQ ID NO: 1474805 - DNA, 15 bp, Homo sapiens
aatgagggtcctgcc

SEQ ID NO: 1474806 - DNA, 15 bp, Homo sapiens
atgagggtcctgcct

SEQ ID NO: 1474807 - DNA, 15 bp, Homo sapiens
tgagggtcctgcctg

SEQ ID NO: 1474808 - DNA, 15 bp, Homo sapiens
gagggtcctgcctgg

SEQ ID NO: 1474809 - DNA, 15 bp, Homo sapiens
agggtcctgcctggc

SEQ ID NO: 1474810 - DNA, 15 bp, Homo sapiens
gggtcctgcctggcc

SEQ ID NO: 1474811 - DNA, 15 bp, Homo sapiens
ggtcctgcctggccc

SEQ ID NO: 1474812 - DNA, 15 bp, Homo sapiens
gtcctgcctggcccc

SEQ ID NO: 1474813 - DNA, 15 bp, Homo sapiens
tcctgcctggcccca

SEQ ID NO: 1474814 - DNA, 15 bp, Homo sapiens
cctgcctggccccaa

SEQ ID NO: 1474815 - DNA, 15 bp, Homo sapiens
ctgcctggccccaag

SEQ ID NO: 1474816 - DNA, 15 bp, Homo sapiens
tgcctggccccaagg

SEQ ID NO: 1474817 - DNA, 15 bp, Homo sapiens
gcctggccccaaggc

SEQ ID NO: 1474818 - DNA, 15 bp, Homo sapiens
cctggccccaaggct

SEQ ID NO: 1474819 - DNA, 15 bp, Homo sapiens
ctggccccaaggctg

SEQ ID NO: 1474820 - DNA, 15 bp, Homo sapiens
tggccccaaggctgg

SEQ ID NO: 1474821 - DNA, 15 bp, Homo sapiens
ggccccaaggctgga

SEQ ID NO: 1474822 - DNA, 15 bp, Homo sapiens
gccccaaggctggac

SEQ ID NO: 1474823 - DNA, 15 bp, Homo sapiens
ccccaaggctggaca

SEQ ID NO: 1474824 - DNA, 15 bp, Homo sapiens
cccaaggctggacag

SEQ ID NO: 1474825 - DNA, 15 bp, Homo sapiens
ccaaggctggacaga

SEQ ID NO: 1474826 - DNA, 15 bp, Homo sapiens
caaggctggacagag

SEQ ID NO: 1474827 - DNA, 15 bp, Homo sapiens
aaggctggacagagg

SEQ ID NO: 1474828 - DNA, 15 bp, Homo sapiens
aggctggacagagga

SEQ ID NO: 1474829 - DNA, 15 bp, Homo sapiens
ggctggacagaggaa

SEQ ID NO: 1474830 - DNA, 15 bp, Homo sapiens
gctggacagaggaaa

SEQ ID NO: 1474831 - DNA, 15 bp, Homo sapiens
ctggacagaggaaat

SEQ ID NO: 1474832 - DNA, 15 bp, Homo sapiens
tggacagaggaaatc

SEQ ID NO: 1474833 - DNA, 15 bp, Homo sapiens
ggacagaggaaatcc

SEQ ID NO: 1474834 - DNA, 15 bp, Homo sapiens
gacagaggaaatcct

SEQ ID NO: 1474835 - DNA, 15 bp, Homo sapiens
acagaggaaatcctc

SEQ ID NO: 1474836 - DNA, 15 bp, Homo sapiens
cagaggaaatcctca

SEQ ID NO: 1474837 - DNA, 15 bp, Homo sapiens
agaggaaatcctcag

SEQ ID NO: 1474838 - DNA, 15 bp, Homo sapiens
gaggaaatcctcagg

SEQ ID NO: 1474839 - DNA, 15 bp, Homo sapiens
aggaaatcctcaggt

SEQ ID NO: 1474840 - DNA, 15 bp, Homo sapiens
ggaaatcctcaggtg

SEQ ID NO: 1474841 - DNA, 15 bp, Homo sapiens
gaaatcctcaggtgt

SEQ ID NO: 1474842 - DNA, 15 bp, Homo sapiens
aaatcctcaggtgtc

SEQ ID NO: 1474843 - DNA, 15 bp, Homo sapiens
aatcctcaggtgtca

SEQ ID NO: 1474844 - DNA, 15 bp, Homo sapiens
atcctcaggtgtcat

SEQ ID NO: 1474845 - DNA, 15 bp, Homo sapiens
tcctcaggtgtcatc

SEQ ID NO: 1474846 - DNA, 15 bp, Homo sapiens
cctcaggtgtcatca

SEQ ID NO: 1474847 - DNA, 15 bp, Homo sapiens
ctcaggtgtcatcaa

SEQ ID NO: 1474848 - DNA, 15 bp, Homo sapiens
tcaggtgtcatcaaa

SEQ ID NO: 1474849 - DNA, 15 bp, Homo sapiens
caggtgtcatcaaag

SEQ ID NO: 1474850 - DNA, 15 bp, Homo sapiens
aggtgtcatcaaaga

SEQ ID NO: 1474851 - DNA, 15 bp, Homo sapiens
ggtgtcatcaaagat

SEQ ID NO: 1474852 - DNA, 15 bp, Homo sapiens
gtgtcatcaaagatg

SEQ ID NO: 1474853 - DNA, 15 bp, Homo sapiens
tgtcatcaaagatga

SEQ ID NO: 1474854 - DNA, 15 bp, Homo sapiens
gtcatcaaagatgaa

SEQ ID NO: 1474855 - DNA, 15 bp, Homo sapiens
tcatcaaagatgaag

SEQ ID NO: 1474856 - DNA, 15 bp, Homo sapiens
catcaaagatgaaga

SEQ ID NO: 1474857 - DNA, 15 bp, Homo sapiens
atcaaagatgaagac

SEQ ID NO: 1474858 - DNA, 15 bp, Homo sapiens
tcaaagatgaagact

SEQ ID NO: 1474859 - DNA, 15 bp, Homo sapiens
caaagatgaagactg

SEQ ID NO: 1474860 - DNA, 15 bp, Homo sapiens
aaagatgaagactgg

SEQ ID NO: 1474861 - DNA, 15 bp, Homo sapiens
aagatgaagactgga

SEQ ID NO: 1474862 - DNA, 15 bp, Homo sapiens
agatgaagactggag

SEQ ID NO: 1474863 - DNA, 15 bp, Homo sapiens
gatgaagactggaga

SEQ ID NO: 1474864 - DNA, 15 bp, Homo sapiens
atgaagactggagaa

SEQ ID NO: 1474865 - DNA, 15 bp, Homo sapiens
tgaagactggagaag

SEQ ID NO: 1474866 - DNA, 15 bp, Homo sapiens
gaagactggagaagg

SEQ ID NO: 1474867 - DNA, 15 bp, Homo sapiens
aagactggagaagga

SEQ ID NO: 1474868 - DNA, 15 bp, Homo sapiens
agactggagaaggag

SEQ ID NO: 1474869 - DNA, 15 bp, Homo sapiens
gactggagaaggaga

SEQ ID NO: 1474870 - DNA, 15 bp, Homo sapiens
actggagaaggagag

SEQ ID NO: 1474871 - DNA, 15 bp, Homo sapiens
ctggagaaggagagt

SEQ ID NO: 1474872 - DNA, 15 bp, Homo sapiens
tggagaaggagagtt

SEQ ID NO: 1474873 - DNA, 15 bp, Homo sapiens
ggagaaggagagttc

SEQ ID NO: 1474874 - DNA, 15 bp, Homo sapiens
gagaaggagagttcc

SEQ ID NO: 1474875 - DNA, 15 bp, Homo sapiens
agaaggagagttcct

SEQ ID NO: 1474876 - DNA, 15 bp, Homo sapiens
gaaggagagttcctg

SEQ ID NO: 1474877 - DNA, 15 bp, Homo sapiens
aaggagagttcctgg

SEQ ID NO: 1474878 - DNA, 15 bp, Homo sapiens
aggagagttcctgga

SEQ ID NO: 1474879 - DNA, 15 bp, Homo sapiens
ggagagttcctggag

SEQ ID NO: 1474880 - DNA, 15 bp, Homo sapiens
gagagttcctggagg

SEQ ID NO: 1474881 - DNA, 15 bp, Homo sapiens
agagttcctggaggg

SEQ ID NO: 1474882 - DNA, 15 bp, Homo sapiens
gagttcctggaggga

SEQ ID NO: 1474883 - DNA, 15 bp, Homo sapiens
agttcctggagggac

SEQ ID NO: 1474884 - DNA, 15 bp, Homo sapiens
gttcctggagggaca

SEQ ID NO: 1474885 - DNA, 15 bp, Homo sapiens
ttcctggagggacac

SEQ ID NO: 1474886 - DNA, 15 bp, Homo sapiens
tcctggagggacact

SEQ ID NO: 1474887 - DNA, 15 bp, Homo sapiens
cctggagggacacta

SEQ ID NO: 1474888 - DNA, 15 bp, Homo sapiens
ctggagggacactaa

SEQ ID NO: 1474889 - DNA, 15 bp, Homo sapiens
tggagggacactaac

SEQ ID NO: 1474890 - DNA, 15 bp, Homo sapiens
ggagggacactaacc

SEQ ID NO: 1474891 - DNA, 15 bp, Homo sapiens
gagggacactaacca

SEQ ID NO: 1474892 - DNA, 15 bp, Homo sapiens
agggacactaaccag

SEQ ID NO: 1474893 - DNA, 15 bp, Homo sapiens
gggacactaaccagc

SEQ ID NO: 1474894 - DNA, 15 bp, Homo sapiens
ggacactaaccagcc

SEQ ID NO: 1474895 - DNA, 15 bp, Homo sapiens
gacactaaccagcct

SEQ ID NO: 1474896 - DNA, 15 bp, Homo sapiens
acactaaccagcctg

SEQ ID NO: 1474897 - DNA, 15 bp, Homo sapiens
cactaaccagcctgg

SEQ ID NO: 1474898 - DNA, 15 bp, Homo sapiens
actaaccagcctggc

SEQ ID NO: 1474899 - DNA, 15 bp, Homo sapiens
ctaaccagcctggct

SEQ ID NO: 1474900 - DNA, 15 bp, Homo sapiens
taaccagcctggcta

SEQ ID NO: 1474901 - DNA, 15 bp, Homo sapiens
aaccagcctggctat

SEQ ID NO: 1474902 - DNA, 15 bp, Homo sapiens
accagcctggctatt

SEQ ID NO: 1474903 - DNA, 15 bp, Homo sapiens
ccagcctggctattt

SEQ ID NO: 1474904 - DNA, 15 bp, Homo sapiens
cagcctggctatttc

SEQ ID NO: 1474905 - DNA, 15 bp, Homo sapiens
agcctggctatttct

SEQ ID NO: 1474906 - DNA, 15 bp, Homo sapiens
gcctggctatttctc

SEQ ID NO: 1474907 - DNA, 15 bp, Homo sapiens
cctggctatttctcc

SEQ ID NO: 1474908 - DNA, 15 bp, Homo sapiens
ctggctatttctcct

SEQ ID NO: 1474909 - DNA, 15 bp, Homo sapiens
tggctatttctcctg

SEQ ID NO: 1474910 - DNA, 15 bp, Homo sapiens
ggctatttctcctgc

SEQ ID NO: 1474911 - DNA, 15 bp, Homo sapiens
gctatttctcctgcc

SEQ ID NO: 1474912 - DNA, 15 bp, Homo sapiens
ctatttctcctgcca

SEQ ID NO: 1474913 - DNA, 15 bp, Homo sapiens
tatttctcctgccac

SEQ ID NO: 1474914 - DNA, 15 bp, Homo sapiens
atttctcctgccacc

SEQ ID NO: 1474915 - DNA, 15 bp, Homo sapiens
tttctcctgccaccc

SEQ ID NO: 1474916 - DNA, 15 bp, Homo sapiens
ttctcctgccaccct

SEQ ID NO: 1474917 - DNA, 15 bp, Homo sapiens
tctcctgccaccctc

SEQ ID NO: 1474918 - DNA, 15 bp, Homo sapiens
ctcctgccaccctcc

SEQ ID NO: 1474919 - DNA, 15 bp, Homo sapiens
tcctgccaccctccc

SEQ ID NO: 1474920 - DNA, 15 bp, Homo sapiens
cctgccaccctccca

SEQ ID NO: 1474921 - DNA, 15 bp, Homo sapiens
ctgccaccctcccac

SEQ ID NO: 1474922 - DNA, 15 bp, Homo sapiens
tgccaccctcccacc

SEQ ID NO: 1474923 - DNA, 15 bp, Homo sapiens
gccaccctcccaccc

SEQ ID NO: 1474924 - DNA, 15 bp, Homo sapiens
ccaccctcccacccc

SEQ ID NO: 1474925 - DNA, 15 bp, Homo sapiens
caccctcccaccccc

SEQ ID NO: 1474926 - DNA, 15 bp, Homo sapiens
accctcccacccccc

SEQ ID NO: 1474927 - DNA, 15 bp, Homo sapiens
ccctcccacccccct

SEQ ID NO: 1474928 - DNA, 15 bp, Homo sapiens
cctcccaccccccta

SEQ ID NO: 1474929 - DNA, 15 bp, Homo sapiens
ctcccacccccctac

SEQ ID NO: 1474930 - DNA, 15 bp, Homo sapiens
tcccacccccctacc

SEQ ID NO: 1474931 - DNA, 15 bp, Homo sapiens
cccacccccctaccc

SEQ ID NO: 1474932 - DNA, 15 bp, Homo sapiens
ccacccccctacccc

SEQ ID NO: 1474933 - DNA, 15 bp, Homo sapiens
cacccccctaccccc

SEQ ID NO: 1474934 - DNA, 15 bp, Homo sapiens
acccccctaccccca

SEQ ID NO: 1474935 - DNA, 15 bp, Homo sapiens
cccccctacccccac

SEQ ID NO: 1474936 - DNA, 15 bp, Homo sapiens
ccccctacccccacc

SEQ ID NO: 1474937 - DNA, 15 bp, Homo sapiens
cccctacccccaccc

SEQ ID NO: 1474938 - DNA, 15 bp, Homo sapiens
ccctacccccacccc

SEQ ID NO: 1474939 - DNA, 15 bp, Homo sapiens
cctacccccaccccc

SEQ ID NO: 1474940 - DNA, 15 bp, Homo sapiens
ctacccccacccccg

SEQ ID NO: 1474941 - DNA, 15 bp, Homo sapiens
tacccccacccccgc

SEQ ID NO: 1474942 - DNA, 15 bp, Homo sapiens
acccccacccccgcc

SEQ ID NO: 1474943 - DNA, 15 bp, Homo sapiens
cccccacccccgcct

SEQ ID NO: 1474944 - DNA, 15 bp, Homo sapiens
ccccacccccgccta

SEQ ID NO: 1474945 - DNA, 15 bp, Homo sapiens
cccacccccgcctaa

SEQ ID NO: 1474946 - DNA, 15 bp, Homo sapiens
ccacccccgcctaag

SEQ ID NO: 1474947 - DNA, 15 bp, Homo sapiens
cacccccgcctaagc

SEQ ID NO: 1474948 - DNA, 15 bp, Homo sapiens
acccccgcctaagct

SEQ ID NO: 1474949 - DNA, 15 bp, Homo sapiens
cccccgcctaagctc

SEQ ID NO: 1474950 - DNA, 15 bp, Homo sapiens
ccccgcctaagctcc

SEQ ID NO: 1474951 - DNA, 15 bp, Homo sapiens
cccgcctaagctcca

SEQ ID NO: 1474952 - DNA, 15 bp, Homo sapiens
ccgcctaagctccat

SEQ ID NO: 1474953 - DNA, 15 bp, Homo sapiens
cgcctaagctccata

SEQ ID NO: 1474954 - DNA, 15 bp, Homo sapiens
gcctaagctccatac

SEQ ID NO: 1474955 - DNA, 15 bp, Homo sapiens
cctaagctccatacc

SEQ ID NO: 1474956 - DNA, 15 bp, Homo sapiens
ctaagctccatacca

SEQ ID NO: 1474957 - DNA, 15 bp, Homo sapiens
taagctccataccaa

SEQ ID NO: 1474958 - DNA, 15 bp, Homo sapiens
aagctccataccaat

SEQ ID NO: 1474959 - DNA, 15 bp, Homo sapiens
agctccataccaatg

SEQ ID NO: 1474960 - DNA, 15 bp, Homo sapiens
gctccataccaatgg

SEQ ID NO: 1474961 - DNA, 15 bp, Homo sapiens
ctccataccaatggc

SEQ ID NO: 1474962 - DNA, 15 bp, Homo sapiens
tccataccaatggcc

SEQ ID NO: 1474963 - DNA, 15 bp, Homo sapiens
ccataccaatggcct

SEQ ID NO: 1474964 - DNA, 15 bp, Homo sapiens
cataccaatggcctc

SEQ ID NO: 1474965 - DNA, 15 bp, Homo sapiens
ataccaatggcctct

SEQ ID NO: 1474966 - DNA, 15 bp, Homo sapiens
taccaatggcctctg

SEQ ID NO: 1474967 - DNA, 15 bp, Homo sapiens
accaatggcctctgg

SEQ ID NO: 1474968 - DNA, 15 bp, Homo sapiens
ccaatggcctctggc

SEQ ID NO: 1474969 - DNA, 15 bp, Homo sapiens
caatggcctctggcc

SEQ ID NO: 1474970 - DNA, 15 bp, Homo sapiens
aatggcctctggcca

SEQ ID NO: 1474971 - DNA, 15 bp, Homo sapiens
atggcctctggccag

SEQ ID NO: 1474972 - DNA, 15 bp, Homo sapiens
tggcctctggccaga

SEQ ID NO: 1474973 - DNA, 15 bp, Homo sapiens
ggcctctggccagaa

SEQ ID NO: 1474974 - DNA, 15 bp, Homo sapiens
gcctctggccagaac

SEQ ID NO: 1474975 - DNA, 15 bp, Homo sapiens
cctctggccagaaca

SEQ ID NO: 1474976 - DNA, 15 bp, Homo sapiens
ctctggccagaacaa

SEQ ID NO: 1474977 - DNA, 15 bp, Homo sapiens
tctggccagaacaaa

SEQ ID NO: 1474978 - DNA, 15 bp, Homo sapiens
ctggccagaacaaag

SEQ ID NO: 1474979 - DNA, 15 bp, Homo sapiens
tggccagaacaaagt

SEQ ID NO: 1474980 - DNA, 15 bp, Homo sapiens
ggccagaacaaagtg

SEQ ID NO: 1474981 - DNA, 15 bp, Homo sapiens
gccagaacaaagtgg

SEQ ID NO: 1474982 - DNA, 15 bp, Homo sapiens
agaacaaagtggata

SEQ ID NO: 1474983 - DNA, 15 bp, Homo sapiens
gaacaaagtggatac

SEQ ID NO: 1474984 - DNA, 15 bp, Homo sapiens
aacaaagtggatact

SEQ ID NO: 1474985 - DNA, 15 bp, Homo sapiens
acaaagtggatactt

SEQ ID NO: 1474986 - DNA, 15 bp, Homo sapiens
caaagtggatacttg

SEQ ID NO: 1474987 - DNA, 15 bp, Homo sapiens
aaagtggatacttga

SEQ ID NO: 1474988 - DNA, 15 bp, Homo sapiens
aagtggatacttgag

SEQ ID NO: 1474989 - DNA, 15 bp, Homo sapiens
agtggatacttgagt

SEQ ID NO: 1474990 - DNA, 15 bp, Homo sapiens
gtggatacttgagtc

SEQ ID NO: 1474991 - DNA, 15 bp, Homo sapiens
tggatacttgagtca

SEQ ID NO: 1474992 - DNA, 15 bp, Homo sapiens
ggatacttgagtcac

SEQ ID NO: 1474993 - DNA, 15 bp, Homo sapiens
gatacttgagtcact

SEQ ID NO: 1474994 - DNA, 15 bp, Homo sapiens
atacttgagtcactt

SEQ ID NO: 1474995 - DNA, 15 bp, Homo sapiens
tacttgagtcacttg

SEQ ID NO: 1474996 - DNA, 15 bp, Homo sapiens
acttgagtcacttgg

SEQ ID NO: 1474997 - DNA, 15 bp, Homo sapiens
cttgagtcacttggc

SEQ ID NO: 1474998 - DNA, 15 bp, Homo sapiens
ttgagtcacttggct

SEQ ID NO: 1474999 - DNA, 15 bp, Homo sapiens
tgagtcacttggcta

SEQ ID NO: 1475000 - DNA, 15 bp, Homo sapiens
gagtcacttggctag

SEQ ID NO: 1475001 - DNA, 15 bp, Homo sapiens
agtcacttggctaga

SEQ ID NO: 1475002 - DNA, 15 bp, Homo sapiens
gtcacttggctagat

SEQ ID NO: 1475003 - DNA, 15 bp, Homo sapiens
tcacttggctagata

SEQ ID NO: 1475004 - DNA, 15 bp, Homo sapiens
cacttggctagatag

SEQ ID NO: 1475005 - DNA, 15 bp, Homo sapiens
acttggctagatagt

SEQ ID NO: 1475006 - DNA, 15 bp, Homo sapiens
cttggctagatagtt

SEQ ID NO: 1475007 - DNA, 15 bp, Homo sapiens
ttggctagatagttg

SEQ ID NO: 1475008 - DNA, 15 bp, Homo sapiens
tggctagatagttgg

SEQ ID NO: 1475009 - DNA, 15 bp, Homo sapiens
ggctagatagttggg

SEQ ID NO: 1475010 - DNA, 15 bp, Homo sapiens
gctagatagttgggc

SEQ ID NO: 1475011 - DNA, 15 bp, Homo sapiens
ctagatagttgggcg

SEQ ID NO: 1475012 - DNA, 15 bp, Homo sapiens
tagatagttgggcgg

SEQ ID NO: 1475013 - DNA, 15 bp, Homo sapiens
agatagttgggcggt

SEQ ID NO: 1475014 - DNA, 15 bp, Homo sapiens
gatagttgggcggtg

SEQ ID NO: 1475015 - DNA, 15 bp, Homo sapiens
atagttgggcggtgc

SEQ ID NO: 1475016 - DNA, 15 bp, Homo sapiens
tagttgggcggtgcc

SEQ ID NO: 1475017 - DNA, 15 bp, Homo sapiens
agttgggcggtgccc

SEQ ID NO: 1475018 - DNA, 15 bp, Homo sapiens
gttgggcggtgccct

SEQ ID NO: 1475019 - DNA, 15 bp, Homo sapiens
ttgggcggtgccctc

SEQ ID NO: 1475020 - DNA, 15 bp, Homo sapiens
tgggcggtgccctct

SEQ ID NO: 1475021 - DNA, 15 bp, Homo sapiens
gggcggtgccctctt

SEQ ID NO: 1475022 - DNA, 15 bp, Homo sapiens
ggcggtgccctcttt

SEQ ID NO: 1475023 - DNA, 15 bp, Homo sapiens
gcggtgccctctttt

SEQ ID NO: 1475024 - DNA, 15 bp, Homo sapiens
cggtgccctcttttg

SEQ ID NO: 1475025 - DNA, 15 bp, Homo sapiens
ggtgccctcttttgt

SEQ ID NO: 1475026 - DNA, 15 bp, Homo sapiens
gtgccctcttttgta

SEQ ID NO: 1475027 - DNA, 15 bp, Homo sapiens
tgccctcttttgtat

SEQ ID NO: 1475028 - DNA, 15 bp, Homo sapiens
gccctcttttgtata

SEQ ID NO: 1475029 - DNA, 15 bp, Homo sapiens
ccctcttttgtatag

SEQ ID NO: 1475030 - DNA, 15 bp, Homo sapiens
cctcttttgtatagg

SEQ ID NO: 1475031 - DNA, 15 bp, Homo sapiens
ctcttttgtatagga

SEQ ID NO: 1475032 - DNA, 15 bp, Homo sapiens
tcttttgtataggaa

SEQ ID NO: 1475033 - DNA, 15 bp, Homo sapiens
cttttgtataggaaa

SEQ ID NO: 1475034 - DNA, 15 bp, Homo sapiens
ttttgtataggaaag

SEQ ID NO: 1475035 - DNA, 15 bp, Homo sapiens
tttgtataggaaagg

SEQ ID NO: 1475036 - DNA, 15 bp, Homo sapiens
ttgtataggaaaggc

SEQ ID NO: 1475037 - DNA, 15 bp, Homo sapiens
tgtataggaaaggca

SEQ ID NO: 1475038 - DNA, 15 bp, Homo sapiens
gtataggaaaggcag

SEQ ID NO: 1475039 - DNA, 15 bp, Homo sapiens
tataggaaaggcagg

SEQ ID NO: 1475040 - DNA, 15 bp, Homo sapiens
ataggaaaggcaggc

SEQ ID NO: 1475041 - DNA, 15 bp, Homo sapiens
taggaaaggcaggcc

SEQ ID NO: 1475042 - DNA, 15 bp, Homo sapiens
aggaaaggcaggcca

SEQ ID NO: 1475043 - DNA, 15 bp, Homo sapiens
ggaaaggcaggccat

SEQ ID NO: 1475044 - DNA, 15 bp, Homo sapiens
gaaaggcaggccatc

SEQ ID NO: 1475045 - DNA, 15 bp, Homo sapiens
aaaggcaggccatcc

SEQ ID NO: 1475046 - DNA, 15 bp, Homo sapiens
aaggcaggccatcca

SEQ ID NO: 1475047 - DNA, 15 bp, Homo sapiens
aggcaggccatccat

SEQ ID NO: 1475048 - DNA, 15 bp, Homo sapiens
ggcaggccatccata

SEQ ID NO: 1475049 - DNA, 15 bp, Homo sapiens
gcaggccatccatag

SEQ ID NO: 1475050 - DNA, 15 bp, Homo sapiens
caggccatccatagg

SEQ ID NO: 1475051 - DNA, 15 bp, Homo sapiens
aggccatccataggc

SEQ ID NO: 1475052 - DNA, 15 bp, Homo sapiens
ggccatccataggcc

SEQ ID NO: 1475053 - DNA, 15 bp, Homo sapiens
gccatccataggccc

SEQ ID NO: 1475054 - DNA, 15 bp, Homo sapiens
ccatccataggccca

SEQ ID NO: 1475055 - DNA, 15 bp, Homo sapiens
catccataggcccac

SEQ ID NO: 1475056 - DNA, 15 bp, Homo sapiens
atccataggcccaca

SEQ ID NO: 1475057 - DNA, 15 bp, Homo sapiens
tccataggcccacag

SEQ ID NO: 1475058 - DNA, 15 bp, Homo sapiens
ccataggcccacaga

SEQ ID NO: 1475059 - DNA, 15 bp, Homo sapiens
cataggcccacagac

SEQ ID NO: 1475060 - DNA, 15 bp, Homo sapiens
ataggcccacagaca

SEQ ID NO: 1475061 - DNA, 15 bp, Homo sapiens
taggcccacagacag

SEQ ID NO: 1475062 - DNA, 15 bp, Homo sapiens
aggcccacagacaga

SEQ ID NO: 1475063 - DNA, 15 bp, Homo sapiens
ggcccacagacagag

SEQ ID NO: 1475064 - DNA, 15 bp, Homo sapiens
gcccacagacagaga

SEQ ID NO: 1475065 - DNA, 15 bp, Homo sapiens
cccacagacagagac

SEQ ID NO: 1475066 - DNA, 15 bp, Homo sapiens
ccacagacagagaca

SEQ ID NO: 1475067 - DNA, 15 bp, Homo sapiens
cacagacagagacag

SEQ ID NO: 1475068 - DNA, 15 bp, Homo sapiens
acagacagagacaga

SEQ ID NO: 1475069 - DNA, 15 bp, Homo sapiens
cagacagagacagag

SEQ ID NO: 1475070 - DNA, 15 bp, Homo sapiens
agacagagacagagg

SEQ ID NO: 1475071 - DNA, 15 bp, Homo sapiens
gacagagacagagga

SEQ ID NO: 1475072 - DNA, 15 bp, Homo sapiens
acagagacagaggag

SEQ ID NO: 1475073 - DNA, 15 bp, Homo sapiens
cagagacagaggagg

SEQ ID NO: 1475074 - DNA, 15 bp, Homo sapiens
agagacagaggaggc

SEQ ID NO: 1475075 - DNA, 15 bp, Homo sapiens
gagacagaggaggcc

SEQ ID NO: 1475076 - DNA, 15 bp, Homo sapiens
agacagaggaggcca

SEQ ID NO: 1475077 - DNA, 15 bp, Homo sapiens
gacagaggaggccaa

SEQ ID NO: 1475078 - DNA, 15 bp, Homo sapiens
acagaggaggccaag

SEQ ID NO: 1475079 - DNA, 15 bp, Homo sapiens
cagaggaggccaagc

SEQ ID NO: 1475080 - DNA, 15 bp, Homo sapiens
agaggaggccaagcc

SEQ ID NO: 1475081 - DNA, 15 bp, Homo sapiens
gaggaggccaagccc

SEQ ID NO: 1475082 - DNA, 15 bp, Homo sapiens
aggaggccaagcccc

SEQ ID NO: 1475083 - DNA, 15 bp, Homo sapiens
ggaggccaagcccca

SEQ ID NO: 1475084 - DNA, 15 bp, Homo sapiens
gaggccaagccccag

SEQ ID NO: 1475085 - DNA, 15 bp, Homo sapiens
aggccaagccccaga

SEQ ID NO: 1475086 - DNA, 15 bp, Homo sapiens
ggccaagccccagag

SEQ ID NO: 1475087 - DNA, 15 bp, Homo sapiens
gccaagccccagaga

SEQ ID NO: 1475088 - DNA, 15 bp, Homo sapiens
ccaagccccagagac

SEQ ID NO: 1475089 - DNA, 15 bp, Homo sapiens
caagccccagagacc

SEQ ID NO: 1475090 - DNA, 15 bp, Homo sapiens
aagccccagagacca

SEQ ID NO: 1475091 - DNA, 15 bp, Homo sapiens
agccccagagaccac

SEQ ID NO: 1475092 - DNA, 15 bp, Homo sapiens
gccccagagaccaca

SEQ ID NO: 1475093 - DNA, 15 bp, Homo sapiens
ccccagagaccacag

SEQ ID NO: 1475094 - DNA, 15 bp, Homo sapiens
cccagagaccacagt

SEQ ID NO: 1475095 - DNA, 15 bp, Homo sapiens
ccagagaccacagtg

SEQ ID NO: 1475096 - DNA, 15 bp, Homo sapiens
cagagaccacagtgg

SEQ ID NO: 1475097 - DNA, 15 bp, Homo sapiens
agagaccacagtgga

SEQ ID NO: 1475098 - DNA, 15 bp, Homo sapiens
gagaccacagtggaa

SEQ ID NO: 1475099 - DNA, 15 bp, Homo sapiens
agaccacagtggaac

SEQ ID NO: 1475100 - DNA, 15 bp, Homo sapiens
gaccacagtggaaca

SEQ ID NO: 1475101 - DNA, 15 bp, Homo sapiens
accacagtggaacaa

SEQ ID NO: 1475102 - DNA, 15 bp, Homo sapiens
ccacagtggaacaag

SEQ ID NO: 1475103 - DNA, 15 bp, Homo sapiens
cacagtggaacaagt

SEQ ID NO: 1475104 - DNA, 15 bp, Homo sapiens
acagtggaacaagtg

SEQ ID NO: 1475105 - DNA, 15 bp, Homo sapiens
cagtggaacaagtgt

SEQ ID NO: 1475106 - DNA, 15 bp, Homo sapiens
agtggaacaagtgtc

SEQ ID NO: 1475107 - DNA, 15 bp, Homo sapiens
gtggaacaagtgtct

SEQ ID NO: 1475108 - DNA, 15 bp, Homo sapiens
tggaacaagtgtctt

SEQ ID NO: 1475109 - DNA, 15 bp, Homo sapiens
ggaacaagtgtcttg

SEQ ID NO: 1475110 - DNA, 15 bp, Homo sapiens
gaacaagtgtcttgg

SEQ ID NO: 1475111 - DNA, 15 bp, Homo sapiens
aacaagtgtcttggg

SEQ ID NO: 1475112 - DNA, 15 bp, Homo sapiens
acaagtgtcttgggg

SEQ ID NO: 1475113 - DNA, 15 bp, Homo sapiens
caagtgtcttggggt

SEQ ID NO: 1475114 - DNA, 15 bp, Homo sapiens
aagtgtcttggggtg

SEQ ID NO: 1475115 - DNA, 15 bp, Homo sapiens
agtgtcttggggtgc

SEQ ID NO: 1475116 - DNA, 15 bp, Homo sapiens
gtgtcttggggtgct

SEQ ID NO: 1475117 - DNA, 15 bp, Homo sapiens
tgtcttggggtgctt

SEQ ID NO: 1475118 - DNA, 15 bp, Homo sapiens
gtcttggggtgcttt

SEQ ID NO: 1475119 - DNA, 15 bp, Homo sapiens
tcttggggtgctttg

SEQ ID NO: 1475120 - DNA, 15 bp, Homo sapiens
cttggggtgctttgc

SEQ ID NO: 1475121 - DNA, 15 bp, Homo sapiens
ttggggtgctttgcc

SEQ ID NO: 1475122 - DNA, 15 bp, Homo sapiens
tggggtgctttgccc

SEQ ID NO: 1475123 - DNA, 15 bp, Homo sapiens
ggggtgctttgccca

SEQ ID NO: 1475124 - DNA, 15 bp, Homo sapiens
gggtgctttgcccat

SEQ ID NO: 1475125 - DNA, 15 bp, Homo sapiens
ggtgctttgcccata

SEQ ID NO: 1475126 - DNA, 15 bp, Homo sapiens
gtgctttgcccatag

SEQ ID NO: 1475127 - DNA, 15 bp, Homo sapiens
tgctttgcccatagg

SEQ ID NO: 1475128 - DNA, 15 bp, Homo sapiens
gctttgcccataggt

SEQ ID NO: 1475129 - DNA, 15 bp, Homo sapiens
ctttgcccataggtg

SEQ ID NO: 1475130 - DNA, 15 bp, Homo sapiens
tttgcccataggtgc

SEQ ID NO: 1475131 - DNA, 15 bp, Homo sapiens
ttgcccataggtgca

SEQ ID NO: 1475132 - DNA, 15 bp, Homo sapiens
tgcccataggtgcag

SEQ ID NO: 1475133 - DNA, 15 bp, Homo sapiens
gcccataggtgcagc

SEQ ID NO: 1475134 - DNA, 15 bp, Homo sapiens
cccataggtgcagct

SEQ ID NO: 1475135 - DNA, 15 bp, Homo sapiens
ccataggtgcagctt

SEQ ID NO: 1475136 - DNA, 15 bp, Homo sapiens
cataggtgcagctta

SEQ ID NO: 1475137 - DNA, 15 bp, Homo sapiens
ataggtgcagcttaa

SEQ ID NO: 1475138 - DNA, 15 bp, Homo sapiens
taggtgcagcttaat

SEQ ID NO: 1475139 - DNA, 15 bp, Homo sapiens
aggtgcagcttaatg

SEQ ID NO: 1475140 - DNA, 15 bp, Homo sapiens
ggtgcagcttaatga

SEQ ID NO: 1475141 - DNA, 15 bp, Homo sapiens
gtgcagcttaatgaa

SEQ ID NO: 1475142 - DNA, 15 bp, Homo sapiens
tgcagcttaatgaag

SEQ ID NO: 1475143 - DNA, 15 bp, Homo sapiens
gcagcttaatgaagg

SEQ ID NO: 1475144 - DNA, 15 bp, Homo sapiens
cagcttaatgaagga

SEQ ID NO: 1475145 - DNA, 15 bp, Homo sapiens
agcttaatgaaggac

SEQ ID NO: 1475146 - DNA, 15 bp, Homo sapiens
gcttaatgaaggaca

SEQ ID NO: 1475147 - DNA, 15 bp, Homo sapiens
cttaatgaaggacag

SEQ ID NO: 1475148 - DNA, 15 bp, Homo sapiens
ttaatgaaggacagc

SEQ ID NO: 1475149 - DNA, 15 bp, Homo sapiens
taatgaaggacagcc

SEQ ID NO: 1475150 - DNA, 15 bp, Homo sapiens
atgaaggacagccag

SEQ ID NO: 1475151 - DNA, 15 bp, Homo sapiens
tgaaggacagccaga

SEQ ID NO: 1475152 - DNA, 15 bp, Homo sapiens
gaaggacagccagag

SEQ ID NO: 1475153 - DNA, 15 bp, Homo sapiens
aaggacagccagagg

SEQ ID NO: 1475154 - DNA, 15 bp, Homo sapiens
aggacagccagagga

SEQ ID NO: 1475155 - DNA, 15 bp, Homo sapiens
ggacagccagaggac

SEQ ID NO: 1475156 - DNA, 15 bp, Homo sapiens
gacagccagaggaca

SEQ ID NO: 1475157 - DNA, 15 bp, Homo sapiens
acagccagaggacac

SEQ ID NO: 1475158 - DNA, 15 bp, Homo sapiens
cagccagaggacacg

SEQ ID NO: 1475159 - DNA, 15 bp, Homo sapiens
agccagaggacacgg

SEQ ID NO: 1475160 - DNA, 15 bp, Homo sapiens
gccagaggacacggt

SEQ ID NO: 1475161 - DNA, 15 bp, Homo sapiens
ccagaggacacggtt

SEQ ID NO: 1475162 - DNA, 15 bp, Homo sapiens
cagaggacacggttg

SEQ ID NO: 1475163 - DNA, 15 bp, Homo sapiens
agaggacacggttgt

SEQ ID NO: 1475164 - DNA, 15 bp, Homo sapiens
gaggacacggttgta

SEQ ID NO: 1475165 - DNA, 15 bp, Homo sapiens
aggacacggttgtaa

SEQ ID NO: 1475166 - DNA, 15 bp, Homo sapiens
ggacacggttgtaaa

SEQ ID NO: 1475167 - DNA, 15 bp, Homo sapiens
gacacggttgtaaaa

SEQ ID NO: 1475168 - DNA, 15 bp, Homo sapiens
acacggttgtaaaaa

SEQ ID NO: 1475169 - DNA, 15 bp, Homo sapiens
cacggttgtaaaaac

SEQ ID NO: 1475170 - DNA, 15 bp, Homo sapiens
acggttgtaaaaaca

SEQ ID NO: 1475171 - DNA, 15 bp, Homo sapiens
cggttgtaaaaacag

SEQ ID NO: 1475172 - DNA, 15 bp, Homo sapiens
ggttgtaaaaacagg

SEQ ID NO: 1475173 - DNA, 15 bp, Homo sapiens
gttgtaaaaacaggg

SEQ ID NO: 1475174 - DNA, 15 bp, Homo sapiens
ttgtaaaaacagggc

SEQ ID NO: 1475175 - DNA, 15 bp, Homo sapiens
tgtaaaaacagggca

SEQ ID NO: 1475176 - DNA, 15 bp, Homo sapiens
gtaaaaacagggcag

SEQ ID NO: 1475177 - DNA, 15 bp, Homo sapiens
taaaaacagggcagc

SEQ ID NO: 1475178 - DNA, 15 bp, Homo sapiens
aaaaacagggcagca

SEQ ID NO: 1475179 - DNA, 15 bp, Homo sapiens
aaaacagggcagcag

SEQ ID NO: 1475180 - DNA, 15 bp, Homo sapiens
aaacagggcagcaga

SEQ ID NO: 1475181 - DNA, 15 bp, Homo sapiens
aacagggcagcagaa

SEQ ID NO: 1475182 - DNA, 15 bp, Homo sapiens
acagggcagcagaaa

SEQ ID NO: 1475183 - DNA, 15 bp, Homo sapiens
cagggcagcagaaat

SEQ ID NO: 1475184 - DNA, 15 bp, Homo sapiens
agggcagcagaaatc

SEQ ID NO: 1475185 - DNA, 15 bp, Homo sapiens
gggcagcagaaatct

SEQ ID NO: 1475186 - DNA, 15 bp, Homo sapiens
ggcagcagaaatcta

SEQ ID NO: 1475187 - DNA, 15 bp, Homo sapiens
gcagcagaaatctat

SEQ ID NO: 1475188 - DNA, 15 bp, Homo sapiens
cagcagaaatctatg

SEQ ID NO: 1475189 - DNA, 15 bp, Homo sapiens
agcagaaatctatgt

SEQ ID NO: 1475190 - DNA, 15 bp, Homo sapiens
gcagaaatctatgtg

SEQ ID NO: 1475191 - DNA, 15 bp, Homo sapiens
cagaaatctatgtga

SEQ ID NO: 1475192 - DNA, 15 bp, Homo sapiens
agaaatctatgtgaa

SEQ ID NO: 1475193 - DNA, 15 bp, Homo sapiens
gaaatctatgtgaat

SEQ ID NO: 1475194 - DNA, 15 bp, Homo sapiens
aaatctatgtgaata

SEQ ID NO: 1475195 - DNA, 15 bp, Homo sapiens
aatctatgtgaatat

SEQ ID NO: 1475196 - DNA, 15 bp, Homo sapiens
atctatgtgaatatt

SEQ ID NO: 1475197 - DNA, 15 bp, Homo sapiens
tctatgtgaatatta

SEQ ID NO: 1475198 - DNA, 15 bp, Homo sapiens
ctatgtgaatattat

SEQ ID NO: 1475199 - DNA, 15 bp, Homo sapiens
tatgtgaatattata

SEQ ID NO: 1475200 - DNA, 15 bp, Homo sapiens
atgtgaatattataa

SEQ ID NO: 1475201 - DNA, 15 bp, Homo sapiens
tgtgaatattataag

SEQ ID NO: 1475202 - DNA, 15 bp, Homo sapiens
gtgaatattataagt

SEQ ID NO: 1475203 - DNA, 15 bp, Homo sapiens
tgaatattataagta

SEQ ID NO: 1475204 - DNA, 15 bp, Homo sapiens
gaatattataagtat

SEQ ID NO: 1475205 - DNA, 15 bp, Homo sapiens
aatattataagtatt

SEQ ID NO: 1475206 - DNA, 15 bp, Homo sapiens
atattataagtattt

SEQ ID NO: 1475207 - DNA, 15 bp, Homo sapiens
tattataagtatttg

SEQ ID NO: 1475208 - DNA, 15 bp, Homo sapiens
attataagtatttga

SEQ ID NO: 1475209 - DNA, 15 bp, Homo sapiens
ttataagtatttgag

SEQ ID NO: 1475210 - DNA, 15 bp, Homo sapiens
tataagtatttgagg

SEQ ID NO: 1475211 - DNA, 15 bp, Homo sapiens
ataagtatttgagga

SEQ ID NO: 1475212 - DNA, 15 bp, Homo sapiens
taagtatttgaggag

SEQ ID NO: 1475213 - DNA, 15 bp, Homo sapiens
aagtatttgaggaga

SEQ ID NO: 1475214 - DNA, 15 bp, Homo sapiens
agtatttgaggagaa

SEQ ID NO: 1475215 - DNA, 15 bp, Homo sapiens
gtatttgaggagaag

SEQ ID NO: 1475216 - DNA, 15 bp, Homo sapiens
tatttgaggagaagc

SEQ ID NO: 1475217 - DNA, 15 bp, Homo sapiens
atttgaggagaagca

SEQ ID NO: 1475218 - DNA, 15 bp, Homo sapiens
tttgaggagaagcaa

SEQ ID NO: 1475219 - DNA, 15 bp, Homo sapiens
ttgaggagaagcaaa

SEQ ID NO: 1475220 - DNA, 15 bp, Homo sapiens
tgaggagaagcaaag

SEQ ID NO: 1475221 - DNA, 15 bp, Homo sapiens
gaggagaagcaaagt

SEQ ID NO: 1475222 - DNA, 15 bp, Homo sapiens
aggagaagcaaagtt

SEQ ID NO: 1475223 - DNA, 15 bp, Homo sapiens
ggagaagcaaagtta

SEQ ID NO: 1475224 - DNA, 15 bp, Homo sapiens
gagaagcaaagttag

SEQ ID NO: 1475225 - DNA, 15 bp, Homo sapiens
agaagcaaagttagt

SEQ ID NO: 1475226 - DNA, 15 bp, Homo sapiens
gaagcaaagttagtg

SEQ ID NO: 1475227 - DNA, 15 bp, Homo sapiens
aagcaaagttagtga

SEQ ID NO: 1475228 - DNA, 15 bp, Homo sapiens
agcaaagttagtgaa

SEQ ID NO: 1475229 - DNA, 15 bp, Homo sapiens
gcaaagttagtgaag

SEQ ID NO: 1475230 - DNA, 15 bp, Homo sapiens
caaagttagtgaagt

SEQ ID NO: 1475231 - DNA, 15 bp, Homo sapiens
aaagttagtgaagtg

SEQ ID NO: 1475232 - DNA, 15 bp, Homo sapiens
aagttagtgaagtga

SEQ ID NO: 1475233 - DNA, 15 bp, Homo sapiens
agttagtgaagtgat

SEQ ID NO: 1475234 - DNA, 15 bp, Homo sapiens
gttagtgaagtgatc

SEQ ID NO: 1475235 - DNA, 15 bp, Homo sapiens
ttagtgaagtgatca

SEQ ID NO: 1475236 - DNA, 15 bp, Homo sapiens
tagtgaagtgatcaa

SEQ ID NO: 1475237 - DNA, 15 bp, Homo sapiens
agtgaagtgatcaaa

SEQ ID NO: 1475238 - DNA, 15 bp, Homo sapiens
gtgaagtgatcaaaa

SEQ ID NO: 1475239 - DNA, 15 bp, Homo sapiens
tgaagtgatcaaaac

SEQ ID NO: 1475240 - DNA, 15 bp, Homo sapiens
gaagtgatcaaaacg

SEQ ID NO: 1475241 - DNA, 15 bp, Homo sapiens
aagtgatcaaaacgg

SEQ ID NO: 1475242 - DNA, 15 bp, Homo sapiens
agtgatcaaaacgga

SEQ ID NO: 1475243 - DNA, 15 bp, Homo sapiens
gtgatcaaaacggaa

SEQ ID NO: 1475244 - DNA, 15 bp, Homo sapiens
tgatcaaaacggaat

SEQ ID NO: 1475245 - DNA, 15 bp, Homo sapiens
gatcaaaacggaatg

SEQ ID NO: 1475246 - DNA, 15 bp, Homo sapiens
atcaaaacggaatgg

SEQ ID NO: 1475247 - DNA, 15 bp, Homo sapiens
tcaaaacggaatggg

SEQ ID NO: 1475248 - DNA, 15 bp, Homo sapiens
caaaacggaatgggg

SEQ ID NO: 1475249 - DNA, 15 bp, Homo sapiens
aaaacggaatggggt

SEQ ID NO: 1475250 - DNA, 15 bp, Homo sapiens
aaacggaatggggtt

SEQ ID NO: 1475251 - DNA, 15 bp, Homo sapiens
aacggaatggggtta

SEQ ID NO: 1475252 - DNA, 15 bp, Homo sapiens
acggaatggggttaa

SEQ ID NO: 1475253 - DNA, 15 bp, Homo sapiens
cggaatggggttaat

SEQ ID NO: 1475254 - DNA, 15 bp, Homo sapiens
ggaatggggttaatg

SEQ ID NO: 1475255 - DNA, 15 bp, Homo sapiens
gaatggggttaatga

SEQ ID NO: 1475256 - DNA, 15 bp, Homo sapiens
aatggggttaatgac

SEQ ID NO: 1475257 - DNA, 15 bp, Homo sapiens
atggggttaatgaca

SEQ ID NO: 1475258 - DNA, 15 bp, Homo sapiens
tggggttaatgacag

SEQ ID NO: 1475259 - DNA, 15 bp, Homo sapiens
ggggttaatgacaga

SEQ ID NO: 1475260 - DNA, 15 bp, Homo sapiens
gggttaatgacagaa

SEQ ID NO: 1475261 - DNA, 15 bp, Homo sapiens
ggttaatgacagaac

SEQ ID NO: 1475262 - DNA, 15 bp, Homo sapiens
gttaatgacagaacg

SEQ ID NO: 1475263 - DNA, 15 bp, Homo sapiens
ttaatgacagaacgc

SEQ ID NO: 1475264 - DNA, 15 bp, Homo sapiens
taatgacagaacgct

SEQ ID NO: 1475265 - DNA, 15 bp, Homo sapiens
aatgacagaacgctt

SEQ ID NO: 1475266 - DNA, 15 bp, Homo sapiens
atgacagaacgcttc

SEQ ID NO: 1475267 - DNA, 15 bp, Homo sapiens
tgacagaacgcttca

SEQ ID NO: 1475268 - DNA, 15 bp, Homo sapiens
gacagaacgcttcaa

SEQ ID NO: 1475269 - DNA, 15 bp, Homo sapiens
acagaacgcttcaag

SEQ ID NO: 1475270 - DNA, 15 bp, Homo sapiens
cagaacgcttcaagg

SEQ ID NO: 1475271 - DNA, 15 bp, Homo sapiens
agaacgcttcaagga

SEQ ID NO: 1475272 - DNA, 15 bp, Homo sapiens
gaacgcttcaaggag

SEQ ID NO: 1475273 - DNA, 15 bp, Homo sapiens
aacgcttcaaggagg

SEQ ID NO: 1475274 - DNA, 15 bp, Homo sapiens
acgcttcaaggagga

SEQ ID NO: 1475275 - DNA, 15 bp, Homo sapiens
cgcttcaaggaggaa

SEQ ID NO: 1475276 - DNA, 15 bp, Homo sapiens
gcttcaaggaggaag

SEQ ID NO: 1475277 - DNA, 15 bp, Homo sapiens
cttcaaggaggaagt

SEQ ID NO: 1475278 - DNA, 15 bp, Homo sapiens
ttcaaggaggaagtt

SEQ ID NO: 1475279 - DNA, 15 bp, Homo sapiens
tcaaggaggaagtta

SEQ ID NO: 1475280 - DNA, 15 bp, Homo sapiens
caaggaggaagttaa

SEQ ID NO: 1475281 - DNA, 15 bp, Homo sapiens
aaggaggaagttaag

SEQ ID NO: 1475282 - DNA, 15 bp, Homo sapiens
aggaggaagttaagt

SEQ ID NO: 1475283 - DNA, 15 bp, Homo sapiens
ggaggaagttaagtt

SEQ ID NO: 1475284 - DNA, 15 bp, Homo sapiens
gaggaagttaagttc

SEQ ID NO: 1475285 - DNA, 15 bp, Homo sapiens
aggaagttaagttct

SEQ ID NO: 1475286 - DNA, 15 bp, Homo sapiens
ggaagttaagttctg

SEQ ID NO: 1475287 - DNA, 15 bp, Homo sapiens
gaagttaagttctga

SEQ ID NO: 1475288 - DNA, 15 bp, Homo sapiens
aagttaagttctgaa

SEQ ID NO: 1475289 - DNA, 15 bp, Homo sapiens
agttaagttctgaag

SEQ ID NO: 1475290 - DNA, 15 bp, Homo sapiens
gttaagttctgaagg

SEQ ID NO: 1475291 - DNA, 15 bp, Homo sapiens
ttaagttctgaagga

SEQ ID NO: 1475292 - DNA, 15 bp, Homo sapiens
taagttctgaaggag

SEQ ID NO: 1475293 - DNA, 15 bp, Homo sapiens
aagttctgaaggagg

SEQ ID NO: 1475294 - DNA, 15 bp, Homo sapiens
agttctgaaggaggg

SEQ ID NO: 1475295 - DNA, 15 bp, Homo sapiens
gttctgaaggagggg

SEQ ID NO: 1475296 - DNA, 15 bp, Homo sapiens
ttctgaaggagggga

SEQ ID NO: 1475297 - DNA, 15 bp, Homo sapiens
cttcttccttctcag

SEQ ID NO: 1475298 - DNA, 15 bp, Homo sapiens
ttcttccttctcagg

SEQ ID NO: 1475299 - DNA, 15 bp, Homo sapiens
tcttccttctcaggt

SEQ ID NO: 1475300 - DNA, 15 bp, Homo sapiens
cttccttctcaggtg

SEQ ID NO: 1475301 - DNA, 15 bp, Homo sapiens
ttccttctcaggtgg

SEQ ID NO: 1475302 - DNA, 15 bp, Homo sapiens
tccttctcaggtgga

SEQ ID NO: 1475303 - DNA, 15 bp, Homo sapiens
ccttctcaggtggag

SEQ ID NO: 1475304 - DNA, 15 bp, Homo sapiens
cttctcaggtggagt

SEQ ID NO: 1475305 - DNA, 15 bp, Homo sapiens
ttctcaggtggagta

SEQ ID NO: 1475306 - DNA, 15 bp, Homo sapiens
tctcaggtggagtag

SEQ ID NO: 1475307 - DNA, 15 bp, Homo sapiens
ctcaggtggagtagt

SEQ ID NO: 1475308 - DNA, 15 bp, Homo sapiens
tcaggtggagtagtt

SEQ ID NO: 1475309 - DNA, 15 bp, Homo sapiens
caggtggagtagtta

SEQ ID NO: 1475310 - DNA, 15 bp, Homo sapiens
aggtggagtagttaa

SEQ ID NO: 1475311 - DNA, 15 bp, Homo sapiens
ggtggagtagttaat

SEQ ID NO: 1475312 - DNA, 15 bp, Homo sapiens
gtggagtagttaatt

SEQ ID NO: 1475313 - DNA, 15 bp, Homo sapiens
tggagtagttaattt

SEQ ID NO: 1475314 - DNA, 15 bp, Homo sapiens
ggagtagttaatttt

SEQ ID NO: 1475315 - DNA, 15 bp, Homo sapiens
gagtagttaatttta

SEQ ID NO: 1475316 - DNA, 15 bp, Homo sapiens
agtagttaattttac

SEQ ID NO: 1475317 - DNA, 15 bp, Homo sapiens
gtagttaattttaca

SEQ ID NO: 1475318 - DNA, 15 bp, Homo sapiens
tagttaattttacaa

SEQ ID NO: 1475319 - DNA, 15 bp, Homo sapiens
agttaattttacaag

SEQ ID NO: 1475320 - DNA, 15 bp, Homo sapiens
gttaattttacaagt

SEQ ID NO: 1475321 - DNA, 15 bp, Homo sapiens
ttaattttacaagtg

SEQ ID NO: 1475322 - DNA, 15 bp, Homo sapiens
taattttacaagtgc

SEQ ID NO: 1475323 - DNA, 15 bp, Homo sapiens
aattttacaagtgct

SEQ ID NO: 1475324 - DNA, 15 bp, Homo sapiens
attttacaagtgctt

SEQ ID NO: 1475325 - DNA, 15 bp, Homo sapiens
ttttacaagtgcttc

SEQ ID NO: 1475326 - DNA, 15 bp, Homo sapiens
tttacaagtgcttcg

SEQ ID NO: 1475327 - DNA, 15 bp, Homo sapiens
ttacaagtgcttcga

SEQ ID NO: 1475328 - DNA, 15 bp, Homo sapiens
tacaagtgcttcgag

SEQ ID NO: 1475329 - DNA, 15 bp, Homo sapiens
acaagtgcttcgaga

SEQ ID NO: 1475330 - DNA, 15 bp, Homo sapiens
caagtgcttcgagag

SEQ ID NO: 1475331 - DNA, 15 bp, Homo sapiens
aagtgcttcgagagg

SEQ ID NO: 1475332 - DNA, 15 bp, Homo sapiens
agtgcttcgagaggt

SEQ ID NO: 1475333 - DNA, 15 bp, Homo sapiens
gtgcttcgagaggtc

SEQ ID NO: 1475334 - DNA, 15 bp, Homo sapiens
tgcttcgagaggtcc

SEQ ID NO: 1475335 - DNA, 15 bp, Homo sapiens
gcttcgagaggtcct

SEQ ID NO: 1475336 - DNA, 15 bp, Homo sapiens
cttcgagaggtcctg

SEQ ID NO: 1475337 - DNA, 15 bp, Homo sapiens
ttcgagaggtcctga

SEQ ID NO: 1475338 - DNA, 15 bp, Homo sapiens
tcgagaggtcctgag

SEQ ID NO: 1475339 - DNA, 15 bp, Homo sapiens
cgagaggtcctgagg

SEQ ID NO: 1475340 - DNA, 15 bp, Homo sapiens
gagaggtcctgagga

SEQ ID NO: 1475341 - DNA, 15 bp, Homo sapiens
agaggtcctgaggaa

SEQ ID NO: 1475342 - DNA, 15 bp, Homo sapiens
gaggtcctgaggaaa

SEQ ID NO: 1475343 - DNA, 15 bp, Homo sapiens
aggtcctgaggaaaa

SEQ ID NO: 1475344 - DNA, 15 bp, Homo sapiens
ggtcctgaggaaaag

SEQ ID NO: 1475345 - DNA, 15 bp, Homo sapiens
gtcctgaggaaaagg

SEQ ID NO: 1475346 - DNA, 15 bp, Homo sapiens
tcctgaggaaaaggc

SEQ ID NO: 1475347 - DNA, 15 bp, Homo sapiens
cctgaggaaaaggca

SEQ ID NO: 1475348 - DNA, 15 bp, Homo sapiens
ctgaggaaaaggcac

SEQ ID NO: 1475349 - DNA, 15 bp, Homo sapiens
tgaggaaaaggcaca

SEQ ID NO: 1475350 - DNA, 15 bp, Homo sapiens
gaggaaaaggcacat

SEQ ID NO: 1475351 - DNA, 15 bp, Homo sapiens
aggaaaaggcacatg

SEQ ID NO: 1475352 - DNA, 15 bp, Homo sapiens
ggaaaaggcacatgc

SEQ ID NO: 1475353 - DNA, 15 bp, Homo sapiens
gaaaaggcacatgcc

SEQ ID NO: 1475354 - DNA, 15 bp, Homo sapiens
aaaaggcacatgcca

SEQ ID NO: 1475355 - DNA, 15 bp, Homo sapiens
aaaggcacatgccat

SEQ ID NO: 1475356 - DNA, 15 bp, Homo sapiens
aaggcacatgccatc

SEQ ID NO: 1475357 - DNA, 15 bp, Homo sapiens
ggcacatgccatcat

SEQ ID NO: 1475358 - DNA, 15 bp, Homo sapiens
gcacatgccatcatg

SEQ ID NO: 1475359 - DNA, 15 bp, Homo sapiens
cacatgccatcatgt

SEQ ID NO: 1475360 - DNA, 15 bp, Homo sapiens
acatgccatcatgtc

SEQ ID NO: 1475361 - DNA, 15 bp, Homo sapiens
catgccatcatgtcc

SEQ ID NO: 1475362 - DNA, 15 bp, Homo sapiens
atgccatcatgtcct

SEQ ID NO: 1475363 - DNA, 15 bp, Homo sapiens
tgccatcatgtcctc

SEQ ID NO: 1475364 - DNA, 15 bp, Homo sapiens
gccatcatgtcctct

SEQ ID NO: 1475365 - DNA, 15 bp, Homo sapiens
ccatcatgtcctctc

SEQ ID NO: 1475366 - DNA, 15 bp, Homo sapiens
catcatgtcctctcc

SEQ ID NO: 1475367 - DNA, 15 bp, Homo sapiens
atcatgtcctctccc

SEQ ID NO: 1475368 - DNA, 15 bp, Homo sapiens
tcatgtcctctcccc

SEQ ID NO: 1475369 - DNA, 15 bp, Homo sapiens
catgtcctctccccg

SEQ ID NO: 1475370 - DNA, 15 bp, Homo sapiens
atgtcctctccccgt

SEQ ID NO: 1475371 - DNA, 15 bp, Homo sapiens
tgtcctctccccgtg

SEQ ID NO: 1475372 - DNA, 15 bp, Homo sapiens
gtcctctccccgtga

SEQ ID NO: 1475373 - DNA, 15 bp, Homo sapiens
tcctctccccgtgaa

SEQ ID NO: 1475374 - DNA, 15 bp, Homo sapiens
cctctccccgtgaaa

SEQ ID NO: 1475375 - DNA, 15 bp, Homo sapiens
ctctccccgtgaaag

SEQ ID NO: 1475376 - DNA, 15 bp, Homo sapiens
tctccccgtgaaaga

SEQ ID NO: 1475377 - DNA, 15 bp, Homo sapiens
ctccccgtgaaagaa

SEQ ID NO: 1475378 - DNA, 15 bp, Homo sapiens
tccccgtgaaagaag

SEQ ID NO: 1475379 - DNA, 15 bp, Homo sapiens
ccccgtgaaagaagt

SEQ ID NO: 1475380 - DNA, 15 bp, Homo sapiens
cccgtgaaagaagtt

SEQ ID NO: 1475381 - DNA, 15 bp, Homo sapiens
ccgtgaaagaagttc

SEQ ID NO: 1475382 - DNA, 15 bp, Homo sapiens
cgtgaaagaagttca

SEQ ID NO: 1475383 - DNA, 15 bp, Homo sapiens
gtgaaagaagttcat

SEQ ID NO: 1475384 - DNA, 15 bp, Homo sapiens
tgaaagaagttcata

SEQ ID NO: 1475385 - DNA, 15 bp, Homo sapiens
gaaagaagttcataa

SEQ ID NO: 1475386 - DNA, 15 bp, Homo sapiens
aaagaagttcataat

SEQ ID NO: 1475387 - DNA, 15 bp, Homo sapiens
aagaagttcataata

SEQ ID NO: 1475388 - DNA, 15 bp, Homo sapiens
agaagttcataataa

SEQ ID NO: 1475389 - DNA, 15 bp, Homo sapiens
gaagttcataataat

SEQ ID NO: 1475390 - DNA, 15 bp, Homo sapiens
aagttcataataatc

SEQ ID NO: 1475391 - DNA, 15 bp, Homo sapiens
agttcataataatct

SEQ ID NO: 1475392 - DNA, 15 bp, Homo sapiens
gttcataataatctg

SEQ ID NO: 1475393 - DNA, 15 bp, Homo sapiens
ttcataataatctgt

SEQ ID NO: 1475394 - DNA, 15 bp, Homo sapiens
tcataataatctgtg

SEQ ID NO: 1475395 - DNA, 15 bp, Homo sapiens
cataataatctgtgc

SEQ ID NO: 1475396 - DNA, 15 bp, Homo sapiens
ataataatctgtgca

SEQ ID NO: 1475397 - DNA, 15 bp, Homo sapiens
taataatctgtgcaa

SEQ ID NO: 1475398 - DNA, 15 bp, Homo sapiens
aataatctgtgcaaa

SEQ ID NO: 1475399 - DNA, 15 bp, Homo sapiens
ataatctgtgcaaaa

SEQ ID NO: 1475400 - DNA, 15 bp, Homo sapiens
taatctgtgcaaaac

SEQ ID NO: 1475401 - DNA, 15 bp, Homo sapiens
aatctgtgcaaaaca

SEQ ID NO: 1475402 - DNA, 15 bp, Homo sapiens
atctgtgcaaaacag

SEQ ID NO: 1475403 - DNA, 15 bp, Homo sapiens
tctgtgcaaaacagc

SEQ ID NO: 1475404 - DNA, 15 bp, Homo sapiens
ctgtgcaaaacagca

SEQ ID NO: 1475405 - DNA, 15 bp, Homo sapiens
tgtgcaaaacagcac

SEQ ID NO: 1475406 - DNA, 15 bp, Homo sapiens
gtgcaaaacagcacc

SEQ ID NO: 1475407 - DNA, 15 bp, Homo sapiens
tgcaaaacagcacct

SEQ ID NO: 1475408 - DNA, 15 bp, Homo sapiens
gcaaaacagcacctt

SEQ ID NO: 1475409 - DNA, 15 bp, Homo sapiens
caaaacagcaccttt

SEQ ID NO: 1475410 - DNA, 15 bp, Homo sapiens
aaaacagcacctttg

SEQ ID NO: 1475411 - DNA, 15 bp, Homo sapiens
aaacagcacctttgg

SEQ ID NO: 1475412 - DNA, 15 bp, Homo sapiens
aacagcacctttgga

SEQ ID NO: 1475413 - DNA, 15 bp, Homo sapiens
acagcacctttggat

SEQ ID NO: 1475414 - DNA, 15 bp, Homo sapiens
cagcacctttggata

SEQ ID NO: 1475415 - DNA, 15 bp, Homo sapiens
agcacctttggataa

SEQ ID NO: 1475416 - DNA, 15 bp, Homo sapiens
gcacctttggataag

SEQ ID NO: 1475417 - DNA, 15 bp, Homo sapiens
cacctttggataagt

SEQ ID NO: 1475418 - DNA, 15 bp, Homo sapiens
acctttggataagtt

SEQ ID NO: 1475419 - DNA, 15 bp, Homo sapiens
cctttggataagttc

SEQ ID NO: 1475420 - DNA, 15 bp, Homo sapiens
ctttggataagttca

SEQ ID NO: 1475421 - DNA, 15 bp, Homo sapiens
tttggataagttcaa

SEQ ID NO: 1475422 - DNA, 15 bp, Homo sapiens
ttggataagttcaat

SEQ ID NO: 1475423 - DNA, 15 bp, Homo sapiens
tggataagttcaatg

SEQ ID NO: 1475424 - DNA, 15 bp, Homo sapiens
ggataagttcaatgt

SEQ ID NO: 1475425 - DNA, 15 bp, Homo sapiens
gataagttcaatgtg

SEQ ID NO: 1475426 - DNA, 15 bp, Homo sapiens
ataagttcaatgtgg

SEQ ID NO: 1475427 - DNA, 15 bp, Homo sapiens
taagttcaatgtggc

SEQ ID NO: 1475428 - DNA, 15 bp, Homo sapiens
aagttcaatgtggct

SEQ ID NO: 1475429 - DNA, 15 bp, Homo sapiens
agttcaatgtggcta

SEQ ID NO: 1475430 - DNA, 15 bp, Homo sapiens
gttcaatgtggctat

SEQ ID NO: 1475431 - DNA, 15 bp, Homo sapiens
ttcaatgtggctata

SEQ ID NO: 1475432 - DNA, 15 bp, Homo sapiens
tcaatgtggctatat

SEQ ID NO: 1475433 - DNA, 15 bp, Homo sapiens
caatgtggctatata

SEQ ID NO: 1475434 - DNA, 15 bp, Homo sapiens
aatgtggctatatat

SEQ ID NO: 1475435 - DNA, 15 bp, Homo sapiens
atgtggctatatata

SEQ ID NO: 1475436 - DNA, 15 bp, Homo sapiens
tgtggctatatatag

SEQ ID NO: 1475437 - DNA, 15 bp, Homo sapiens
gtggctatatataga

SEQ ID NO: 1475438 - DNA, 15 bp, Homo sapiens
tggctatatatagac

SEQ ID NO: 1475439 - DNA, 15 bp, Homo sapiens
ggctatatatagacg

SEQ ID NO: 1475440 - DNA, 15 bp, Homo sapiens
gctatatatagacgc

SEQ ID NO: 1475441 - DNA, 15 bp, Homo sapiens
ctatatatagacgct

SEQ ID NO: 1475442 - DNA, 15 bp, Homo sapiens
tatatatagacgctt

SEQ ID NO: 1475443 - DNA, 15 bp, Homo sapiens
atatatagacgcttg

SEQ ID NO: 1475444 - DNA, 15 bp, Homo sapiens
tatatagacgcttgg

SEQ ID NO: 1475445 - DNA, 15 bp, Homo sapiens
atatagacgcttggc

SEQ ID NO: 1475446 - DNA, 15 bp, Homo sapiens
tatagacgcttggcc

SEQ ID NO: 1475447 - DNA, 15 bp, Homo sapiens
atagacgcttggccg

SEQ ID NO: 1475448 - DNA, 15 bp, Homo sapiens
tagacgcttggccgt

SEQ ID NO: 1475449 - DNA, 15 bp, Homo sapiens
agacgcttggccgtt

SEQ ID NO: 1475450 - DNA, 15 bp, Homo sapiens
gacgcttggccgttt

SEQ ID NO: 1475451 - DNA, 15 bp, Homo sapiens
acgcttggccgtttc

SEQ ID NO: 1475452 - DNA, 15 bp, Homo sapiens
cgcttggccgtttcc

SEQ ID NO: 1475453 - DNA, 15 bp, Homo sapiens
gcttggccgtttcct

SEQ ID NO: 1475454 - DNA, 15 bp, Homo sapiens
cttggccgtttcctg

SEQ ID NO: 1475455 - DNA, 15 bp, Homo sapiens
ttggccgtttcctgt

SEQ ID NO: 1475456 - DNA, 15 bp, Homo sapiens
tggccgtttcctgtt

SEQ ID NO: 1475457 - DNA, 15 bp, Homo sapiens
ggccgtttcctgttg

SEQ ID NO: 1475458 - DNA, 15 bp, Homo sapiens
gccgtttcctgttgc

SEQ ID NO: 1475459 - DNA, 15 bp, Homo sapiens
ccgtttcctgttgct

SEQ ID NO: 1475460 - DNA, 15 bp, Homo sapiens
cgtttcctgttgctc

SEQ ID NO: 1475461 - DNA, 15 bp, Homo sapiens
gtttcctgttgctct

SEQ ID NO: 1475462 - DNA, 15 bp, Homo sapiens
tttcctgttgctctt

SEQ ID NO: 1475463 - DNA, 15 bp, Homo sapiens
ttcctgttgctcttg

SEQ ID NO: 1475464 - DNA, 15 bp, Homo sapiens
tcctgttgctcttgc

SEQ ID NO: 1475465 - DNA, 15 bp, Homo sapiens
cctgttgctcttgca

SEQ ID NO: 1475466 - DNA, 15 bp, Homo sapiens
ctgttgctcttgcag

SEQ ID NO: 1475467 - DNA, 15 bp, Homo sapiens
tgttgctcttgcagc

SEQ ID NO: 1475468 - DNA, 15 bp, Homo sapiens
gttgctcttgcagct

SEQ ID NO: 1475469 - DNA, 15 bp, Homo sapiens
ttgctcttgcagctt

SEQ ID NO: 1475470 - DNA, 15 bp, Homo sapiens
tgctcttgcagcttg

SEQ ID NO: 1475471 - DNA, 15 bp, Homo sapiens
gctcttgcagcttgc

SEQ ID NO: 1475472 - DNA, 15 bp, Homo sapiens
ctcttgcagcttgca

SEQ ID NO: 1475473 - DNA, 15 bp, Homo sapiens
tcttgcagcttgcac

SEQ ID NO: 1475474 - DNA, 15 bp, Homo sapiens
cttgcagcttgcaca

SEQ ID NO: 1475475 - DNA, 15 bp, Homo sapiens
ttgcagcttgcacag

SEQ ID NO: 1475476 - DNA, 15 bp, Homo sapiens
tgcagcttgcacagg

SEQ ID NO: 1475477 - DNA, 15 bp, Homo sapiens
gcagcttgcacaggt

SEQ ID NO: 1475478 - DNA, 15 bp, Homo sapiens
cagcttgcacaggtt

SEQ ID NO: 1475479 - DNA, 15 bp, Homo sapiens
agcttgcacaggttt

SEQ ID NO: 1475480 - DNA, 15 bp, Homo sapiens
gcttgcacaggtttg

SEQ ID NO: 1475481 - DNA, 15 bp, Homo sapiens
cttgcacaggtttga

SEQ ID NO: 1475482 - DNA, 15 bp, Homo sapiens
ttgcacaggtttgaa

SEQ ID NO: 1475483 - DNA, 15 bp, Homo sapiens
tgcacaggtttgaag

SEQ ID NO: 1475484 - DNA, 15 bp, Homo sapiens
gcacaggtttgaagg

SEQ ID NO: 1475485 - DNA, 15 bp, Homo sapiens
cacaggtttgaaggt

SEQ ID NO: 1475486 - DNA, 15 bp, Homo sapiens
acaggtttgaaggta

SEQ ID NO: 1475487 - DNA, 15 bp, Homo sapiens
caggtttgaaggtag

SEQ ID NO: 1475488 - DNA, 15 bp, Homo sapiens
aggtttgaaggtagg

SEQ ID NO: 1475489 - DNA, 15 bp, Homo sapiens
ggtttgaaggtaggg

SEQ ID NO: 1475490 - DNA, 15 bp, Homo sapiens
gtttgaaggtagggt

SEQ ID NO: 1475491 - DNA, 15 bp, Homo sapiens
tttgaaggtagggtg

SEQ ID NO: 1475492 - DNA, 15 bp, Homo sapiens
ttgaaggtagggtga

SEQ ID NO: 1475493 - DNA, 15 bp, Homo sapiens
tgaaggtagggtgag

SEQ ID NO: 1475494 - DNA, 15 bp, Homo sapiens
gaaggtagggtgagg

SEQ ID NO: 1475495 - DNA, 15 bp, Homo sapiens
aaggtagggtgaggc

SEQ ID NO: 1475496 - DNA, 15 bp, Homo sapiens
aggtagggtgaggct

SEQ ID NO: 1475497 - DNA, 15 bp, Homo sapiens
ggtagggtgaggctg

SEQ ID NO: 1475498 - DNA, 15 bp, Homo sapiens
gtagggtgaggctgt

SEQ ID NO: 1475499 - DNA, 15 bp, Homo sapiens
tagggtgaggctgtg

SEQ ID NO: 1475500 - DNA, 15 bp, Homo sapiens
agggtgaggctgtga

SEQ ID NO: 1475501 - DNA, 15 bp, Homo sapiens
gggtgaggctgtgac

SEQ ID NO: 1475502 - DNA, 15 bp, Homo sapiens
ggtgaggctgtgacc

SEQ ID NO: 1475503 - DNA, 15 bp, Homo sapiens
gtgaggctgtgacca

SEQ ID NO: 1475504 - DNA, 15 bp, Homo sapiens
tgaggctgtgaccat

SEQ ID NO: 1475505 - DNA, 15 bp, Homo sapiens
gaggctgtgaccata

SEQ ID NO: 1475506 - DNA, 15 bp, Homo sapiens
aggctgtgaccataa

SEQ ID NO: 1475507 - DNA, 15 bp, Homo sapiens
ggctgtgaccataag

SEQ ID NO: 1475508 - DNA, 15 bp, Homo sapiens
gctgtgaccataagc

SEQ ID NO: 1475509 - DNA, 15 bp, Homo sapiens
ctgtgaccataagcc

SEQ ID NO: 1475510 - DNA, 15 bp, Homo sapiens
tgtgaccataagcca

SEQ ID NO: 1475511 - DNA, 15 bp, Homo sapiens
gtgaccataagccac

SEQ ID NO: 1475512 - DNA, 15 bp, Homo sapiens
tgaccataagccaca

SEQ ID NO: 1475513 - DNA, 15 bp, Homo sapiens
gaccataagccacac

SEQ ID NO: 1475514 - DNA, 15 bp, Homo sapiens
accataagccacacg

SEQ ID NO: 1475515 - DNA, 15 bp, Homo sapiens
ccataagccacacgg

SEQ ID NO: 1475516 - DNA, 15 bp, Homo sapiens
cataagccacacggt

SEQ ID NO: 1475517 - DNA, 15 bp, Homo sapiens
ataagccacacggtg

SEQ ID NO: 1475518 - DNA, 15 bp, Homo sapiens
taagccacacggtga

SEQ ID NO: 1475519 - DNA, 15 bp, Homo sapiens
aagccacacggtgac

SEQ ID NO: 1475520 - DNA, 15 bp, Homo sapiens
agccacacggtgaca

SEQ ID NO: 1475521 - DNA, 15 bp, Homo sapiens
gccacacggtgacat

SEQ ID NO: 1475522 - DNA, 15 bp, Homo sapiens
ccacacggtgacatg

SEQ ID NO: 1475523 - DNA, 15 bp, Homo sapiens
cacacggtgacatgt

SEQ ID NO: 1475524 - DNA, 15 bp, Homo sapiens
acacggtgacatgta

SEQ ID NO: 1475525 - DNA, 15 bp, Homo sapiens
cacggtgacatgtac

SEQ ID NO: 1475526 - DNA, 15 bp, Homo sapiens
acggtgacatgtaca

SEQ ID NO: 1475527 - DNA, 15 bp, Homo sapiens
cggtgacatgtacat

SEQ ID NO: 1475528 - DNA, 15 bp, Homo sapiens
ggtgacatgtacatt

SEQ ID NO: 1475529 - DNA, 15 bp, Homo sapiens
gtgacatgtacatta

SEQ ID NO: 1475530 - DNA, 15 bp, Homo sapiens
tgacatgtacattag

SEQ ID NO: 1475531 - DNA, 15 bp, Homo sapiens
gacatgtacattagc

SEQ ID NO: 1475532 - DNA, 15 bp, Homo sapiens
acatgtacattagcc

SEQ ID NO: 1475533 - DNA, 15 bp, Homo sapiens
catgtacattagcca

SEQ ID NO: 1475534 - DNA, 15 bp, Homo sapiens
atgtacattagccat

SEQ ID NO: 1475535 - DNA, 15 bp, Homo sapiens
tgtacattagccatg

SEQ ID NO: 1475536 - DNA, 15 bp, Homo sapiens
gtacattagccatgc

SEQ ID NO: 1475537 - DNA, 15 bp, Homo sapiens
tacattagccatgcc

SEQ ID NO: 1475538 - DNA, 15 bp, Homo sapiens
acattagccatgccc

SEQ ID NO: 1475539 - DNA, 15 bp, Homo sapiens
cattagccatgccct

SEQ ID NO: 1475540 - DNA, 15 bp, Homo sapiens
attagccatgccctc

SEQ ID NO: 1475541 - DNA, 15 bp, Homo sapiens
ttagccatgccctct

SEQ ID NO: 1475542 - DNA, 15 bp, Homo sapiens
tagccatgccctctg

SEQ ID NO: 1475543 - DNA, 15 bp, Homo sapiens
agccatgccctctgc

SEQ ID NO: 1475544 - DNA, 15 bp, Homo sapiens
gccatgccctctgct

SEQ ID NO: 1475545 - DNA, 15 bp, Homo sapiens
ccatgccctctgctt

SEQ ID NO: 1475546 - DNA, 15 bp, Homo sapiens
catgccctctgcttc

SEQ ID NO: 1475547 - DNA, 15 bp, Homo sapiens
atgccctctgcttcc

SEQ ID NO: 1475548 - DNA, 15 bp, Homo sapiens
tgccctctgcttcct

SEQ ID NO: 1475549 - DNA, 15 bp, Homo sapiens
gccctctgcttcctg

SEQ ID NO: 1475550 - DNA, 15 bp, Homo sapiens
ccctctgcttcctgt

SEQ ID NO: 1475551 - DNA, 15 bp, Homo sapiens
cctctgcttcctgtg

SEQ ID NO: 1475552 - DNA, 15 bp, Homo sapiens
ctctgcttcctgtgc

SEQ ID NO: 1475553 - DNA, 15 bp, Homo sapiens
tctgcttcctgtgct

SEQ ID NO: 1475554 - DNA, 15 bp, Homo sapiens
ctgcttcctgtgctg

SEQ ID NO: 1475555 - DNA, 15 bp, Homo sapiens
tgcttcctgtgctgc

SEQ ID NO: 1475556 - DNA, 15 bp, Homo sapiens
gcttcctgtgctgct

SEQ ID NO: 1475557 - DNA, 15 bp, Homo sapiens
cttcctgtgctgctt

SEQ ID NO: 1475558 - DNA, 15 bp, Homo sapiens
ttcctgtgctgctta

SEQ ID NO: 1475559 - DNA, 15 bp, Homo sapiens
tcctgtgctgcttat

SEQ ID NO: 1475560 - DNA, 15 bp, Homo sapiens
cctgtgctgcttatg

SEQ ID NO: 1475561 - DNA, 15 bp, Homo sapiens
ctgtgctgcttatga

SEQ ID NO: 1475562 - DNA, 15 bp, Homo sapiens
tgtgctgcttatgac

SEQ ID NO: 1475563 - DNA, 15 bp, Homo sapiens
gtgctgcttatgacc

SEQ ID NO: 1475564 - DNA, 15 bp, Homo sapiens
tgctgcttatgacct

SEQ ID NO: 1475565 - DNA, 15 bp, Homo sapiens
gctgcttatgacctg

SEQ ID NO: 1475566 - DNA, 15 bp, Homo sapiens
ctgcttatgacctgg

SEQ ID NO: 1475567 - DNA, 15 bp, Homo sapiens
tgcttatgacctggg

SEQ ID NO: 1475568 - DNA, 15 bp, Homo sapiens
gcttatgacctgggc

SEQ ID NO: 1475569 - DNA, 15 bp, Homo sapiens
cttatgacctgggct

SEQ ID NO: 1475570 - DNA, 15 bp, Homo sapiens
ttatgacctgggctg

SEQ ID NO: 1475571 - DNA, 15 bp, Homo sapiens
tatgacctgggctgg

SEQ ID NO: 1475572 - DNA, 15 bp, Homo sapiens
atgacctgggctgga

SEQ ID NO: 1475573 - DNA, 15 bp, Homo sapiens
tgacctgggctggac

SEQ ID NO: 1475574 - DNA, 15 bp, Homo sapiens
gacctgggctggact

SEQ ID NO: 1475575 - DNA, 15 bp, Homo sapiens
acctgggctggacta

SEQ ID NO: 1475576 - DNA, 15 bp, Homo sapiens
cctgggctggactaa

SEQ ID NO: 1475577 - DNA, 15 bp, Homo sapiens
ctgggctggactaac

SEQ ID NO: 1475578 - DNA, 15 bp, Homo sapiens
tgggctggactaacc

SEQ ID NO: 1475579 - DNA, 15 bp, Homo sapiens
gggctggactaaccc

SEQ ID NO: 1475580 - DNA, 15 bp, Homo sapiens
ggctggactaacccc

SEQ ID NO: 1475581 - DNA, 15 bp, Homo sapiens
gctggactaacccca

SEQ ID NO: 1475582 - DNA, 15 bp, Homo sapiens
ctggactaaccccag

SEQ ID NO: 1475583 - DNA, 15 bp, Homo sapiens
tggactaaccccagc

SEQ ID NO: 1475584 - DNA, 15 bp, Homo sapiens
ggactaaccccagca

SEQ ID NO: 1475585 - DNA, 15 bp, Homo sapiens
gactaaccccagcac

SEQ ID NO: 1475586 - DNA, 15 bp, Homo sapiens
actaaccccagcact

SEQ ID NO: 1475587 - DNA, 15 bp, Homo sapiens
ctaaccccagcactg

SEQ ID NO: 1475588 - DNA, 15 bp, Homo sapiens
taaccccagcactgc

SEQ ID NO: 1475589 - DNA, 15 bp, Homo sapiens
aaccccagcactgct

SEQ ID NO: 1475590 - DNA, 15 bp, Homo sapiens
accccagcactgctc

SEQ ID NO: 1475591 - DNA, 15 bp, Homo sapiens
ccccagcactgctca

SEQ ID NO: 1475592 - DNA, 15 bp, Homo sapiens
cccagcactgctcag

SEQ ID NO: 1475593 - DNA, 15 bp, Homo sapiens
ccagcactgctcagg

SEQ ID NO: 1475594 - DNA, 15 bp, Homo sapiens
cagcactgctcaggg

SEQ ID NO: 1475595 - DNA, 15 bp, Homo sapiens
agcactgctcagggg

SEQ ID NO: 1475596 - DNA, 15 bp, Homo sapiens
gcactgctcaggggc

SEQ ID NO: 1475597 - DNA, 15 bp, Homo sapiens
cactgctcaggggca

SEQ ID NO: 1475598 - DNA, 15 bp, Homo sapiens
actgctcaggggcag

SEQ ID NO: 1475599 - DNA, 15 bp, Homo sapiens
ctgctcaggggcagg

SEQ ID NO: 1475600 - DNA, 15 bp, Homo sapiens
tgctcaggggcaggg

SEQ ID NO: 1475601 - DNA, 15 bp, Homo sapiens
gctcaggggcaggga

SEQ ID NO: 1475602 - DNA, 15 bp, Homo sapiens
ctcaggggcagggag

SEQ ID NO: 1475603 - DNA, 15 bp, Homo sapiens
tcaggggcagggagc

SEQ ID NO: 1475604 - DNA, 15 bp, Homo sapiens
caggggcagggagcc

SEQ ID NO: 1475605 - DNA, 15 bp, Homo sapiens
aggggcagggagccc

SEQ ID NO: 1475606 - DNA, 15 bp, Homo sapiens
ggggcagggagccct

SEQ ID NO: 1475607 - DNA, 15 bp, Homo sapiens
gggcagggagccctt

SEQ ID NO: 1475608 - DNA, 15 bp, Homo sapiens
ggcagggagccctta

SEQ ID NO: 1475609 - DNA, 15 bp, Homo sapiens
gcagggagcccttag

SEQ ID NO: 1475610 - DNA, 15 bp, Homo sapiens
cagggagcccttagg

SEQ ID NO: 1475611 - DNA, 15 bp, Homo sapiens
agggagcccttagga

SEQ ID NO: 1475612 - DNA, 15 bp, Homo sapiens
gggagcccttaggac

SEQ ID NO: 1475613 - DNA, 15 bp, Homo sapiens
ggagcccttaggacc

SEQ ID NO: 1475614 - DNA, 15 bp, Homo sapiens
gagcccttaggacct

SEQ ID NO: 1475615 - DNA, 15 bp, Homo sapiens
agcccttaggaccta

SEQ ID NO: 1475616 - DNA, 15 bp, Homo sapiens
gcccttaggacctaa

SEQ ID NO: 1475617 - DNA, 15 bp, Homo sapiens
cccttaggacctaaa

SEQ ID NO: 1475618 - DNA, 15 bp, Homo sapiens
ccttaggacctaaat

SEQ ID NO: 1475619 - DNA, 15 bp, Homo sapiens
cttaggacctaaatg

SEQ ID NO: 1475620 - DNA, 15 bp, Homo sapiens
ttaggacctaaatgt

SEQ ID NO: 1475621 - DNA, 15 bp, Homo sapiens
taggacctaaatgtg

SEQ ID NO: 1475622 - DNA, 15 bp, Homo sapiens
aggacctaaatgtgg

SEQ ID NO: 1475623 - DNA, 15 bp, Homo sapiens
ggacctaaatgtggg

SEQ ID NO: 1475624 - DNA, 15 bp, Homo sapiens
gacctaaatgtgggg

SEQ ID NO: 1475625 - DNA, 15 bp, Homo sapiens
acctaaatgtggggg

SEQ ID NO: 1475626 - DNA, 15 bp, Homo sapiens
cctaaatgtgggggg

SEQ ID NO: 1475627 - DNA, 15 bp, Homo sapiens
ctaaatgtggggggg

SEQ ID NO: 1475628 - DNA, 15 bp, Homo sapiens
taaatgtgggggggt

SEQ ID NO: 1475629 - DNA, 15 bp, Homo sapiens
aaatgtgggggggtt

SEQ ID NO: 1475630 - DNA, 15 bp, Homo sapiens
aatgtgggggggttg

SEQ ID NO: 1475631 - DNA, 15 bp, Homo sapiens
atgtgggggggttgg

SEQ ID NO: 1475632 - DNA, 15 bp, Homo sapiens
tgtgggggggttggt

SEQ ID NO: 1475633 - DNA, 15 bp, Homo sapiens
gtgggggggttggtg

SEQ ID NO: 1475634 - DNA, 15 bp, Homo sapiens
tgggggggttggtga

SEQ ID NO: 1475635 - DNA, 15 bp, Homo sapiens
gggggggttggtgag

SEQ ID NO: 1475636 - DNA, 15 bp, Homo sapiens
ggggggttggtgagt

SEQ ID NO: 1475637 - DNA, 15 bp, Homo sapiens
gggggttggtgagtt

SEQ ID NO: 1475638 - DNA, 15 bp, Homo sapiens
ggggttggtgagttt

SEQ ID NO: 1475639 - DNA, 15 bp, Homo sapiens
gggttggtgagtttg

SEQ ID NO: 1475640 - DNA, 15 bp, Homo sapiens
ggttggtgagtttgc

SEQ ID NO: 1475641 - DNA, 15 bp, Homo sapiens
gttggtgagtttgct

SEQ ID NO: 1475642 - DNA, 15 bp, Homo sapiens
ttggtgagtttgctc

SEQ ID NO: 1475643 - DNA, 15 bp, Homo sapiens
tggtgagtttgctct

SEQ ID NO: 1475644 - DNA, 15 bp, Homo sapiens
ggtgagtttgctctc

SEQ ID NO: 1475645 - DNA, 15 bp, Homo sapiens
gtgagtttgctctca

SEQ ID NO: 1475646 - DNA, 15 bp, Homo sapiens
tgagtttgctctcat

SEQ ID NO: 1475647 - DNA, 15 bp, Homo sapiens
gagtttgctctcatc

SEQ ID NO: 1475648 - DNA, 15 bp, Homo sapiens
agtttgctctcatct

SEQ ID NO: 1475649 - DNA, 15 bp, Homo sapiens
gtttgctctcatctt

SEQ ID NO: 1475650 - DNA, 15 bp, Homo sapiens
tttgctctcatcttc

SEQ ID NO: 1475651 - DNA, 15 bp, Homo sapiens
ttgctctcatcttct

SEQ ID NO: 1475652 - DNA, 15 bp, Homo sapiens
tgctctcatcttctc

SEQ ID NO: 1475653 - DNA, 15 bp, Homo sapiens
gctctcatcttctct

SEQ ID NO: 1475654 - DNA, 15 bp, Homo sapiens
ctctcatcttctctg

SEQ ID NO: 1475655 - DNA, 15 bp, Homo sapiens
tctcatcttctctga

SEQ ID NO: 1475656 - DNA, 15 bp, Homo sapiens
ctcatcttctctgag

SEQ ID NO: 1475657 - DNA, 15 bp, Homo sapiens
tcatcttctctgagc

SEQ ID NO: 1475658 - DNA, 15 bp, Homo sapiens
catcttctctgagca

SEQ ID NO: 1475659 - DNA, 15 bp, Homo sapiens
atcttctctgagcac

SEQ ID NO: 1475660 - DNA, 15 bp, Homo sapiens
tcttctctgagcaca

SEQ ID NO: 1475661 - DNA, 15 bp, Homo sapiens
cttctctgagcacag

SEQ ID NO: 1475662 - DNA, 15 bp, Homo sapiens
ttctctgagcacagg

SEQ ID NO: 1475663 - DNA, 15 bp, Homo sapiens
tctctgagcacaggt

SEQ ID NO: 1475664 - DNA, 15 bp, Homo sapiens
ctctgagcacaggtt

SEQ ID NO: 1475665 - DNA, 15 bp, Homo sapiens
tctgagcacaggttg

SEQ ID NO: 1475666 - DNA, 15 bp, Homo sapiens
ctgagcacaggttgc

SEQ ID NO: 1475667 - DNA, 15 bp, Homo sapiens
tgagcacaggttgcc

SEQ ID NO: 1475668 - DNA, 15 bp, Homo sapiens
gagcacaggttgcct

SEQ ID NO: 1475669 - DNA, 15 bp, Homo sapiens
agcacaggttgcctg

SEQ ID NO: 1475670 - DNA, 15 bp, Homo sapiens
gcacaggttgcctgg

SEQ ID NO: 1475671 - DNA, 15 bp, Homo sapiens
cacaggttgcctggc

SEQ ID NO: 1475672 - DNA, 15 bp, Homo sapiens
acaggttgcctggct

SEQ ID NO: 1475673 - DNA, 15 bp, Homo sapiens
caggttgcctggctg

SEQ ID NO: 1475674 - DNA, 15 bp, Homo sapiens
aggttgcctggctgc

SEQ ID NO: 1475675 - DNA, 15 bp, Homo sapiens
ggttgcctggctgca

SEQ ID NO: 1475676 - DNA, 15 bp, Homo sapiens
gttgcctggctgcag

SEQ ID NO: 1475677 - DNA, 15 bp, Homo sapiens
ttgcctggctgcaga

SEQ ID NO: 1475678 - DNA, 15 bp, Homo sapiens
tgcctggctgcagat

SEQ ID NO: 1475679 - DNA, 15 bp, Homo sapiens
gcctggctgcagata

SEQ ID NO: 1475680 - DNA, 15 bp, Homo sapiens
cctggctgcagatag

SEQ ID NO: 1475681 - DNA, 15 bp, Homo sapiens
ctggctgcagataga

SEQ ID NO: 1475682 - DNA, 15 bp, Homo sapiens
tggctgcagatagat

SEQ ID NO: 1475683 - DNA, 15 bp, Homo sapiens
ggctgcagatagatg

SEQ ID NO: 1475684 - DNA, 15 bp, Homo sapiens
gctgcagatagatgg

SEQ ID NO: 1475685 - DNA, 15 bp, Homo sapiens
ctgcagatagatggt

SEQ ID NO: 1475686 - DNA, 15 bp, Homo sapiens
tgcagatagatggtg

SEQ ID NO: 1475687 - DNA, 15 bp, Homo sapiens
gcagatagatggtgc

SEQ ID NO: 1475688 - DNA, 15 bp, Homo sapiens
cagatagatggtgca

SEQ ID NO: 1475689 - DNA, 15 bp, Homo sapiens
agatagatggtgcaa

SEQ ID NO: 1475690 - DNA, 15 bp, Homo sapiens
gatagatggtgcaaa

SEQ ID NO: 1475691 - DNA, 15 bp, Homo sapiens
atagatggtgcaaaa

SEQ ID NO: 1475692 - DNA, 15 bp, Homo sapiens
tagatggtgcaaaac

SEQ ID NO: 1475693 - DNA, 15 bp, Homo sapiens
agatggtgcaaaaca

SEQ ID NO: 1475694 - DNA, 15 bp, Homo sapiens
gatggtgcaaaacac

SEQ ID NO: 1475695 - DNA, 15 bp, Homo sapiens
atggtgcaaaacaca

SEQ ID NO: 1475696 - DNA, 15 bp, Homo sapiens
tggtgcaaaacacac

SEQ ID NO: 1475697 - DNA, 15 bp, Homo sapiens
ggtgcaaaacacacc

SEQ ID NO: 1475698 - DNA, 15 bp, Homo sapiens
gtgcaaaacacacca

SEQ ID NO: 1475699 - DNA, 15 bp, Homo sapiens
tgcaaaacacaccag

SEQ ID NO: 1475700 - DNA, 15 bp, Homo sapiens
gcaaaacacaccagc

SEQ ID NO: 1475701 - DNA, 15 bp, Homo sapiens
caaaacacaccagcg

SEQ ID NO: 1475702 - DNA, 15 bp, Homo sapiens
aaaacacaccagcga

SEQ ID NO: 1475703 - DNA, 15 bp, Homo sapiens
aaacacaccagcgag

SEQ ID NO: 1475704 - DNA, 15 bp, Homo sapiens
aacacaccagcgagc

SEQ ID NO: 1475705 - DNA, 15 bp, Homo sapiens
acacaccagcgagcc

SEQ ID NO: 1475706 - DNA, 15 bp, Homo sapiens
cacaccagcgagcca

SEQ ID NO: 1475707 - DNA, 15 bp, Homo sapiens
acaccagcgagccag

SEQ ID NO: 1475708 - DNA, 15 bp, Homo sapiens
caccagcgagccagt

SEQ ID NO: 1475709 - DNA, 15 bp, Homo sapiens
accagcgagccagtg

SEQ ID NO: 1475710 - DNA, 15 bp, Homo sapiens
ccagcgagccagtgt

SEQ ID NO: 1475711 - DNA, 15 bp, Homo sapiens
cagcgagccagtgtg

SEQ ID NO: 1475712 - DNA, 15 bp, Homo sapiens
agcgagccagtgtgc

SEQ ID NO: 1475713 - DNA, 15 bp, Homo sapiens
gcgagccagtgtgct

SEQ ID NO: 1475714 - DNA, 15 bp, Homo sapiens
cgagccagtgtgctt

SEQ ID NO: 1475715 - DNA, 15 bp, Homo sapiens
gagccagtgtgcttg

SEQ ID NO: 1475716 - DNA, 15 bp, Homo sapiens
agccagtgtgcttgt

SEQ ID NO: 1475717 - DNA, 15 bp, Homo sapiens
gccagtgtgcttgtc

SEQ ID NO: 1475718 - DNA, 15 bp, Homo sapiens
ccagtgtgcttgtct

SEQ ID NO: 1475719 - DNA, 15 bp, Homo sapiens
cagtgtgcttgtcta

SEQ ID NO: 1475720 - DNA, 15 bp, Homo sapiens
agtgtgcttgtctaa

SEQ ID NO: 1475721 - DNA, 15 bp, Homo sapiens
gtgtgcttgtctaac

SEQ ID NO: 1475722 - DNA, 15 bp, Homo sapiens
tgtgcttgtctaacg

SEQ ID NO: 1475723 - DNA, 15 bp, Homo sapiens
gtgcttgtctaacgg

SEQ ID NO: 1475724 - DNA, 15 bp, Homo sapiens
tgcttgtctaacggt

SEQ ID NO: 1475725 - DNA, 15 bp, Homo sapiens
gcttgtctaacggtc

SEQ ID NO: 1475726 - DNA, 15 bp, Homo sapiens
cttgtctaacggtct

SEQ ID NO: 1475727 - DNA, 15 bp, Homo sapiens
ttgtctaacggtctg

SEQ ID NO: 1475728 - DNA, 15 bp, Homo sapiens
tgtctaacggtctgc

SEQ ID NO: 1475729 - DNA, 15 bp, Homo sapiens
gtctaacggtctgct

SEQ ID NO: 1475730 - DNA, 15 bp, Homo sapiens
tctaacggtctgctc

SEQ ID NO: 1475731 - DNA, 15 bp, Homo sapiens
ctaacggtctgctcg

SEQ ID NO: 1475732 - DNA, 15 bp, Homo sapiens
taacggtctgctcgt

SEQ ID NO: 1475733 - DNA, 15 bp, Homo sapiens
aacggtctgctcgtg

SEQ ID NO: 1475734 - DNA, 15 bp, Homo sapiens
acggtctgctcgtgt

SEQ ID NO: 1475735 - DNA, 15 bp, Homo sapiens
cggtctgctcgtgta

SEQ ID NO: 1475736 - DNA, 15 bp, Homo sapiens
ggtctgctcgtgtaa

SEQ ID NO: 1475737 - DNA, 15 bp, Homo sapiens
gtctgctcgtgtaac

SEQ ID NO: 1475738 - DNA, 15 bp, Homo sapiens
tctgctcgtgtaact

SEQ ID NO: 1475739 - DNA, 15 bp, Homo sapiens
ctgctcgtgtaactt

SEQ ID NO: 1475740 - DNA, 15 bp, Homo sapiens
tgctcgtgtaacttt

SEQ ID NO: 1475741 - DNA, 15 bp, Homo sapiens
gctcgtgtaactttt

SEQ ID NO: 1475742 - DNA, 15 bp, Homo sapiens
ctcgtgtaacttttg

SEQ ID NO: 1475743 - DNA, 15 bp, Homo sapiens
tcgtgtaacttttgc

SEQ ID NO: 1475744 - DNA, 15 bp, Homo sapiens
cgtgtaacttttgca

SEQ ID NO: 1475745 - DNA, 15 bp, Homo sapiens
gtgtaacttttgcac

SEQ ID NO: 1475746 - DNA, 15 bp, Homo sapiens
tgtaacttttgcacc

SEQ ID NO: 1475747 - DNA, 15 bp, Homo sapiens
gtaacttttgcacca

SEQ ID NO: 1475748 - DNA, 15 bp, Homo sapiens
taacttttgcaccac

SEQ ID NO: 1475749 - DNA, 15 bp, Homo sapiens
aacttttgcaccaca

SEQ ID NO: 1475750 - DNA, 15 bp, Homo sapiens
acttttgcaccacaa

SEQ ID NO: 1475751 - DNA, 15 bp, Homo sapiens
cttttgcaccacaaa

SEQ ID NO: 1475752 - DNA, 15 bp, Homo sapiens
ttttgcaccacaaaa

SEQ ID NO: 1475753 - DNA, 15 bp, Homo sapiens
tttgcaccacaaaac

SEQ ID NO: 1475754 - DNA, 15 bp, Homo sapiens
ttgcaccacaaaaca

SEQ ID NO: 1475755 - DNA, 15 bp, Homo sapiens
tgcaccacaaaacaa

SEQ ID NO: 1475756 - DNA, 15 bp, Homo sapiens
gcaccacaaaacaag

SEQ ID NO: 1475757 - DNA, 15 bp, Homo sapiens
caccacaaaacaaga

SEQ ID NO: 1475758 - DNA, 15 bp, Homo sapiens
accacaaaacaagag

SEQ ID NO: 1475759 - DNA, 15 bp, Homo sapiens
ccacaaaacaagagg

SEQ ID NO: 1475760 - DNA, 15 bp, Homo sapiens
cacaaaacaagaggt

SEQ ID NO: 1475761 - DNA, 15 bp, Homo sapiens
acaaaacaagaggtc

SEQ ID NO: 1475762 - DNA, 15 bp, Homo sapiens
caaaacaagaggtca

SEQ ID NO: 1475763 - DNA, 15 bp, Homo sapiens
aaaacaagaggtcaa

SEQ ID NO: 1475764 - DNA, 15 bp, Homo sapiens
aaacaagaggtcaag

SEQ ID NO: 1475765 - DNA, 15 bp, Homo sapiens
aacaagaggtcaagt

SEQ ID NO: 1475766 - DNA, 15 bp, Homo sapiens
acaagaggtcaagta

SEQ ID NO: 1475767 - DNA, 15 bp, Homo sapiens
caagaggtcaagtat

SEQ ID NO: 1475768 - DNA, 15 bp, Homo sapiens
aagaggtcaagtatg

SEQ ID NO: 1475769 - DNA, 15 bp, Homo sapiens
agaggtcaagtatga

SEQ ID NO: 1475770 - DNA, 15 bp, Homo sapiens
gaggtcaagtatgaa

SEQ ID NO: 1475771 - DNA, 15 bp, Homo sapiens
aggtcaagtatgaaa

SEQ ID NO: 1475772 - DNA, 15 bp, Homo sapiens
ggtcaagtatgaaag

SEQ ID NO: 1475773 - DNA, 15 bp, Homo sapiens
gtcaagtatgaaagg

SEQ ID NO: 1475774 - DNA, 15 bp, Homo sapiens
tcaagtatgaaaggg

SEQ ID NO: 1475775 - DNA, 15 bp, Homo sapiens
caagtatgaaagggt

SEQ ID NO: 1475776 - DNA, 15 bp, Homo sapiens
aagtatgaaagggtg

SEQ ID NO: 1475777 - DNA, 15 bp, Homo sapiens
agtatgaaagggtgg

SEQ ID NO: 1475778 - DNA, 15 bp, Homo sapiens
gtatgaaagggtggt

SEQ ID NO: 1475779 - DNA, 15 bp, Homo sapiens
tatgaaagggtggtt

SEQ ID NO: 1475780 - DNA, 15 bp, Homo sapiens
atgaaagggtggtta

SEQ ID NO: 1475781 - DNA, 15 bp, Homo sapiens
tgaaagggtggttaa

SEQ ID NO: 1475782 - DNA, 15 bp, Homo sapiens
gaaagggtggttaac

SEQ ID NO: 1475783 - DNA, 15 bp, Homo sapiens
aaagggtggttaaca

SEQ ID NO: 1475784 - DNA, 15 bp, Homo sapiens
aagggtggttaacaa

SEQ ID NO: 1475785 - DNA, 15 bp, Homo sapiens
agggtggttaacaaa

SEQ ID NO: 1475786 - DNA, 15 bp, Homo sapiens
gggtggttaacaaat

SEQ ID NO: 1475787 - DNA, 15 bp, Homo sapiens
ggtggttaacaaatt

SEQ ID NO: 1475788 - DNA, 15 bp, Homo sapiens
gtggttaacaaattg

SEQ ID NO: 1475789 - DNA, 15 bp, Homo sapiens
tggttaacaaattga

SEQ ID NO: 1475790 - DNA, 15 bp, Homo sapiens
ggttaacaaattgag

SEQ ID NO: 1475791 - DNA, 15 bp, Homo sapiens
gttaacaaattgagc

SEQ ID NO: 1475792 - DNA, 15 bp, Homo sapiens
ttaacaaattgagca

SEQ ID NO: 1475793 - DNA, 15 bp, Homo sapiens
taacaaattgagcag

SEQ ID NO: 1475794 - DNA, 15 bp, Homo sapiens
aacaaattgagcagc

SEQ ID NO: 1475795 - DNA, 15 bp, Homo sapiens
acaaattgagcagcc

SEQ ID NO: 1475796 - DNA, 15 bp, Homo sapiens
caaattgagcagccc

SEQ ID NO: 1475797 - DNA, 15 bp, Homo sapiens
aaattgagcagccct

SEQ ID NO: 1475798 - DNA, 15 bp, Homo sapiens
aattgagcagccctt

SEQ ID NO: 1475799 - DNA, 15 bp, Homo sapiens
attgagcagcccttt

SEQ ID NO: 1475800 - DNA, 15 bp, Homo sapiens
ttgagcagccctttt

SEQ ID NO: 1475801 - DNA, 15 bp, Homo sapiens
tgagcagcccttttt

SEQ ID NO: 1475802 - DNA, 15 bp, Homo sapiens
gagcagccctttttt

SEQ ID NO: 1475803 - DNA, 15 bp, Homo sapiens
agcagcccttttttt

SEQ ID NO: 1475804 - DNA, 15 bp, Homo sapiens
gcagccctttttttt

SEQ ID NO: 1475805 - DNA, 15 bp, Homo sapiens
cagcccttttttttt

SEQ ID NO: 1475806 - DNA, 15 bp, Homo sapiens
agccctttttttttt

SEQ ID NO: 1475807 - DNA, 15 bp, Homo sapiens
gcccttttttttttc

SEQ ID NO: 1475808 - DNA, 15 bp, Homo sapiens
cccttttttttttct

SEQ ID NO: 1475809 - DNA, 15 bp, Homo sapiens
ccttttttttttctg

SEQ ID NO: 1475810 - DNA, 15 bp, Homo sapiens
cttttttttttctgt

SEQ ID NO: 1475811 - DNA, 15 bp, Homo sapiens
tttttttttctgtta

SEQ ID NO: 1475812 - DNA, 15 bp, Homo sapiens
ttttttttctgttaa

SEQ ID NO: 1475813 - DNA, 15 bp, Homo sapiens
tttttttctgttaaa

SEQ ID NO: 1475814 - DNA, 15 bp, Homo sapiens
ttttttctgttaaag

SEQ ID NO: 1475815 - DNA, 15 bp, Homo sapiens
tttttctgttaaagg

SEQ ID NO: 1475816 - DNA, 15 bp, Homo sapiens
ttttctgttaaaggg

SEQ ID NO: 1475817 - DNA, 15 bp, Homo sapiens
tttctgttaaagggg

SEQ ID NO: 1475818 - DNA, 15 bp, Homo sapiens
ttctgttaaaggggc

SEQ ID NO: 1475819 - DNA, 15 bp, Homo sapiens
tctgttaaaggggcc

SEQ ID NO: 1475820 - DNA, 15 bp, Homo sapiens
ctgttaaaggggccg

SEQ ID NO: 1475821 - DNA, 15 bp, Homo sapiens
tgttaaaggggccgt

SEQ ID NO: 1475822 - DNA, 15 bp, Homo sapiens
gttaaaggggccgtg

SEQ ID NO: 1475823 - DNA, 15 bp, Homo sapiens
ttaaaggggccgtgt

SEQ ID NO: 1475824 - DNA, 15 bp, Homo sapiens
taaaggggccgtgtc

SEQ ID NO: 1475825 - DNA, 15 bp, Homo sapiens
aaaggggccgtgtca

SEQ ID NO: 1475826 - DNA, 15 bp, Homo sapiens
aaggggccgtgtcag

SEQ ID NO: 1475827 - DNA, 15 bp, Homo sapiens
aggggccgtgtcaga

SEQ ID NO: 1475828 - DNA, 15 bp, Homo sapiens
ggggccgtgtcagaa

SEQ ID NO: 1475829 - DNA, 15 bp, Homo sapiens
gggccgtgtcagaaa

SEQ ID NO: 1475830 - DNA, 15 bp, Homo sapiens
ggccgtgtcagaaaa

SEQ ID NO: 1475831 - DNA, 15 bp, Homo sapiens
gccgtgtcagaaaaa

SEQ ID NO: 1475832 - DNA, 15 bp, Homo sapiens
ccgtgtcagaaaaaa

SEQ ID NO: 1475833 - DNA, 15 bp, Homo sapiens
cgtgtcagaaaaaac

SEQ ID NO: 1475834 - DNA, 15 bp, Homo sapiens
gtgtcagaaaaaaca

SEQ ID NO: 1475835 - DNA, 15 bp, Homo sapiens
tgtcagaaaaaacaa

SEQ ID NO: 1475836 - DNA, 15 bp, Homo sapiens
gtcagaaaaaacaaa

SEQ ID NO: 1475837 - DNA, 15 bp, Homo sapiens
tcagaaaaaacaaac

SEQ ID NO: 1475838 - DNA, 15 bp, Homo sapiens
cagaaaaaacaaaca

SEQ ID NO: 1475839 - DNA, 15 bp, Homo sapiens
agaaaaaacaaacaa

SEQ ID NO: 1475840 - DNA, 15 bp, Homo sapiens
gaaaaaacaaacaaa

SEQ ID NO: 1475841 - DNA, 15 bp, Homo sapiens
aacaaacaaaaaaca

SEQ ID NO: 1475842 - DNA, 15 bp, Homo sapiens
acaaacaaaaaacaa

SEQ ID NO: 1475843 - DNA, 15 bp, Homo sapiens
caaacaaaaaacaaa

SEQ ID NO: 1475844 - DNA, 15 bp, Homo sapiens
aaacaaaaaacaaaa

SEQ ID NO: 1475845 - DNA, 15 bp, Homo sapiens
aacaaaaaacaaaaa

SEQ ID NO: 1475846 - DNA, 15 bp, Homo sapiens
acaaaaaacaaaaac

SEQ ID NO: 1475847 - DNA, 15 bp, Homo sapiens
caaaaaacaaaaaca

SEQ ID NO: 1475848 - DNA, 15 bp, Homo sapiens
aacaaaacaaaaaac

SEQ ID NO: 1475849 - DNA, 15 bp, Homo sapiens
acaaaacaaaaaaca

SEQ ID NO: 1475850 - DNA, 15 bp, Homo sapiens
caaaacaaaaaacaa

SEQ ID NO: 1475851 - DNA, 15 bp, Homo sapiens
acaaaaaacaaaaat

SEQ ID NO: 1475852 - DNA, 15 bp, Homo sapiens
caaaaaacaaaaata

SEQ ID NO: 1475853 - DNA, 15 bp, Homo sapiens
aaaaaacaaaaataa

SEQ ID NO: 1475854 - DNA, 15 bp, Homo sapiens
aaaaacaaaaataaa

SEQ ID NO: 1475855 - DNA, 15 bp, Homo sapiens
aaaacaaaaataaaa

SEQ ID NO: 1475856 - DNA, 15 bp, Homo sapiens
aaacaaaaataaaac

SEQ ID NO: 1475857 - DNA, 15 bp, Homo sapiens
aacaaaaataaaaca

SEQ ID NO: 1475858 - DNA, 15 bp, Homo sapiens
acaaaaataaaacaa

SEQ ID NO: 1475859 - DNA, 15 bp, Homo sapiens
caaaaataaaacaaa

SEQ ID NO: 1475860 - DNA, 15 bp, Homo sapiens
aaaaataaaacaaaa

SEQ ID NO: 1475861 - DNA, 15 bp, Homo sapiens
aataaaacaaaaaac

SEQ ID NO: 1475862 - DNA, 15 bp, Homo sapiens
ataaaacaaaaaaca

SEQ ID NO: 1475863 - DNA, 15 bp, Homo sapiens
caaacaaaaaaaccc

SEQ ID NO: 1475864 - DNA, 15 bp, Homo sapiens
aaacaaaaaaaccct

SEQ ID NO: 1475865 - DNA, 15 bp, Homo sapiens
aacaaaaaaaccctt

SEQ ID NO: 1475866 - DNA, 15 bp, Homo sapiens
acaaaaaaacccttc

SEQ ID NO: 1475867 - DNA, 15 bp, Homo sapiens
caaaaaaacccttcc

SEQ ID NO: 1475868 - DNA, 15 bp, Homo sapiens
aaaaaaacccttcct

SEQ ID NO: 1475869 - DNA, 15 bp, Homo sapiens
aaaaaacccttcctg

SEQ ID NO: 1475870 - DNA, 15 bp, Homo sapiens
aaaaacccttcctga

SEQ ID NO: 1475871 - DNA, 15 bp, Homo sapiens
aaaacccttcctgag

SEQ ID NO: 1475872 - DNA, 15 bp, Homo sapiens
aaacccttcctgagt

SEQ ID NO: 1475873 - DNA, 15 bp, Homo sapiens
aacccttcctgagtg

SEQ ID NO: 1475874 - DNA, 15 bp, Homo sapiens
acccttcctgagtga

SEQ ID NO: 1475875 - DNA, 15 bp, Homo sapiens
cccttcctgagtgaa

SEQ ID NO: 1475876 - DNA, 15 bp, Homo sapiens
ccttcctgagtgaac

SEQ ID NO: 1475877 - DNA, 15 bp, Homo sapiens
cttcctgagtgaact

SEQ ID NO: 1475878 - DNA, 15 bp, Homo sapiens
ttcctgagtgaactt

SEQ ID NO: 1475879 - DNA, 15 bp, Homo sapiens
tcctgagtgaacttg

SEQ ID NO: 1475880 - DNA, 15 bp, Homo sapiens
cctgagtgaacttgc

SEQ ID NO: 1475881 - DNA, 15 bp, Homo sapiens
ctgagtgaacttgca

SEQ ID NO: 1475882 - DNA, 15 bp, Homo sapiens
tgagtgaacttgcat

SEQ ID NO: 1475883 - DNA, 15 bp, Homo sapiens
gagtgaacttgcatg

SEQ ID NO: 1475884 - DNA, 15 bp, Homo sapiens
agtgaacttgcatga

SEQ ID NO: 1475885 - DNA, 15 bp, Homo sapiens
gtgaacttgcatgaa

SEQ ID NO: 1475886 - DNA, 15 bp, Homo sapiens
tgaacttgcatgaaa

SEQ ID NO: 1475887 - DNA, 15 bp, Homo sapiens
gaacttgcatgaaaa

SEQ ID NO: 1475888 - DNA, 15 bp, Homo sapiens
aacttgcatgaaaaa

SEQ ID NO: 1475889 - DNA, 15 bp, Homo sapiens
acttgcatgaaaaat

SEQ ID NO: 1475890 - DNA, 15 bp, Homo sapiens
cttgcatgaaaaatc

SEQ ID NO: 1475891 - DNA, 15 bp, Homo sapiens
ttgcatgaaaaatca

SEQ ID NO: 1475892 - DNA, 15 bp, Homo sapiens
tgcatgaaaaatcat

SEQ ID NO: 1475893 - DNA, 15 bp, Homo sapiens
gcatgaaaaatcatt

SEQ ID NO: 1475894 - DNA, 15 bp, Homo sapiens
catgaaaaatcattt

SEQ ID NO: 1475895 - DNA, 15 bp, Homo sapiens
atgaaaaatcatttg

SEQ ID NO: 1475896 - DNA, 15 bp, Homo sapiens
tgaaaaatcatttgg

SEQ ID NO: 1475897 - DNA, 15 bp, Homo sapiens
gaaaaatcatttggc

SEQ ID NO: 1475898 - DNA, 15 bp, Homo sapiens
aaaaatcatttggca

SEQ ID NO: 1475899 - DNA, 15 bp, Homo sapiens
aaaatcatttggcaa

SEQ ID NO: 1475900 - DNA, 15 bp, Homo sapiens
aaatcatttggcaaa

SEQ ID NO: 1475901 - DNA, 15 bp, Homo sapiens
aatcatttggcaaaa

SEQ ID NO: 1475902 - DNA, 15 bp, Homo sapiens
atcatttggcaaaac

SEQ ID NO: 1475903 - DNA, 15 bp, Homo sapiens
tcatttggcaaaacc

SEQ ID NO: 1475904 - DNA, 15 bp, Homo sapiens
catttggcaaaaccc

SEQ ID NO: 1475905 - DNA, 15 bp, Homo sapiens
atttggcaaaaccca

SEQ ID NO: 1475906 - DNA, 15 bp, Homo sapiens
tttggcaaaacccaa

SEQ ID NO: 1475907 - DNA, 15 bp, Homo sapiens
ttggcaaaacccaaa

SEQ ID NO: 1475908 - DNA, 15 bp, Homo sapiens
tggcaaaacccaaag

SEQ ID NO: 1475909 - DNA, 15 bp, Homo sapiens
ggcaaaacccaaagt

SEQ ID NO: 1475910 - DNA, 15 bp, Homo sapiens
gcaaaacccaaagtt

SEQ ID NO: 1475911 - DNA, 15 bp, Homo sapiens
caaaacccaaagttc

SEQ ID NO: 1475912 - DNA, 15 bp, Homo sapiens
aaaacccaaagttca

SEQ ID NO: 1475913 - DNA, 15 bp, Homo sapiens
aaacccaaagttcat

SEQ ID NO: 1475914 - DNA, 15 bp, Homo sapiens
aacccaaagttcata

SEQ ID NO: 1475915 - DNA, 15 bp, Homo sapiens
acccaaagttcatag

SEQ ID NO: 1475916 - DNA, 15 bp, Homo sapiens
cccaaagttcatagc

SEQ ID NO: 1475917 - DNA, 15 bp, Homo sapiens
ccaaagttcatagcc

SEQ ID NO: 1475918 - DNA, 15 bp, Homo sapiens
caaagttcatagcca

SEQ ID NO: 1475919 - DNA, 15 bp, Homo sapiens
aaagttcatagccat

SEQ ID NO: 1475920 - DNA, 15 bp, Homo sapiens
aagttcatagccatg

SEQ ID NO: 1475921 - DNA, 15 bp, Homo sapiens
agttcatagccatgt

SEQ ID NO: 1475922 - DNA, 15 bp, Homo sapiens
gttcatagccatgtg

SEQ ID NO: 1475923 - DNA, 15 bp, Homo sapiens
ttcatagccatgtgc

SEQ ID NO: 1475924 - DNA, 15 bp, Homo sapiens
tcatagccatgtgct

SEQ ID NO: 1475925 - DNA, 15 bp, Homo sapiens
catagccatgtgctg

SEQ ID NO: 1475926 - DNA, 15 bp, Homo sapiens
atagccatgtgctga

SEQ ID NO: 1475927 - DNA, 15 bp, Homo sapiens
tagccatgtgctgaa

SEQ ID NO: 1475928 - DNA, 15 bp, Homo sapiens
agccatgtgctgaaa

SEQ ID NO: 1475929 - DNA, 15 bp, Homo sapiens
gccatgtgctgaaaa

SEQ ID NO: 1475930 - DNA, 15 bp, Homo sapiens
ccatgtgctgaaaag

SEQ ID NO: 1475931 - DNA, 15 bp, Homo sapiens
catgtgctgaaaagc

SEQ ID NO: 1475932 - DNA, 15 bp, Homo sapiens
atgtgctgaaaagcc

SEQ ID NO: 1475933 - DNA, 15 bp, Homo sapiens
tgctgaaaagccatc

SEQ ID NO: 1475934 - DNA, 15 bp, Homo sapiens
gctgaaaagccatca

SEQ ID NO: 1475935 - DNA, 15 bp, Homo sapiens
ctgaaaagccatcat

SEQ ID NO: 1475936 - DNA, 15 bp, Homo sapiens
tgaaaagccatcatg

SEQ ID NO: 1475937 - DNA, 15 bp, Homo sapiens
gaaaagccatcatgc

SEQ ID NO: 1475938 - DNA, 15 bp, Homo sapiens
aaaagccatcatgct

SEQ ID NO: 1475939 - DNA, 15 bp, Homo sapiens
aaagccatcatgcta

SEQ ID NO: 1475940 - DNA, 15 bp, Homo sapiens
aagccatcatgctag

SEQ ID NO: 1475941 - DNA, 15 bp, Homo sapiens
agccatcatgctaga

SEQ ID NO: 1475942 - DNA, 15 bp, Homo sapiens
gccatcatgctagaa

SEQ ID NO: 1475943 - DNA, 15 bp, Homo sapiens
ccatcatgctagaaa

SEQ ID NO: 1475944 - DNA, 15 bp, Homo sapiens
catcatgctagaaac

SEQ ID NO: 1475945 - DNA, 15 bp, Homo sapiens
atcatgctagaaacg

SEQ ID NO: 1475946 - DNA, 15 bp, Homo sapiens
tcatgctagaaacgg

SEQ ID NO: 1475947 - DNA, 15 bp, Homo sapiens
catgctagaaacggt

SEQ ID NO: 1475948 - DNA, 15 bp, Homo sapiens
atgctagaaacggtc

SEQ ID NO: 1475949 - DNA, 15 bp, Homo sapiens
tgctagaaacggtca

SEQ ID NO: 1475950 - DNA, 15 bp, Homo sapiens
gctagaaacggtcat

SEQ ID NO: 1475951 - DNA, 15 bp, Homo sapiens
ctagaaacggtcatc

SEQ ID NO: 1475952 - DNA, 15 bp, Homo sapiens
tagaaacggtcatcg

SEQ ID NO: 1475953 - DNA, 15 bp, Homo sapiens
agaaacggtcatcgt

SEQ ID NO: 1475954 - DNA, 15 bp, Homo sapiens
gaaacggtcatcgtg

SEQ ID NO: 1475955 - DNA, 15 bp, Homo sapiens
aaacggtcatcgtga

SEQ ID NO: 1475956 - DNA, 15 bp, Homo sapiens
aacggtcatcgtgat

SEQ ID NO: 1475957 - DNA, 15 bp, Homo sapiens
acggtcatcgtgatt

SEQ ID NO: 1475958 - DNA, 15 bp, Homo sapiens
cggtcatcgtgattt

SEQ ID NO: 1475959 - DNA, 15 bp, Homo sapiens
ggtcatcgtgatttg

SEQ ID NO: 1475960 - DNA, 15 bp, Homo sapiens
gtcatcgtgatttga

SEQ ID NO: 1475961 - DNA, 15 bp, Homo sapiens
tcatcgtgatttgac

SEQ ID NO: 1475962 - DNA, 15 bp, Homo sapiens
catcgtgatttgacc

SEQ ID NO: 1475963 - DNA, 15 bp, Homo sapiens
atcgtgatttgacct

SEQ ID NO: 1475964 - DNA, 15 bp, Homo sapiens
tcgtgatttgacctc

SEQ ID NO: 1475965 - DNA, 15 bp, Homo sapiens
cgtgatttgacctca

SEQ ID NO: 1475966 - DNA, 15 bp, Homo sapiens
gtgatttgacctcag

SEQ ID NO: 1475967 - DNA, 15 bp, Homo sapiens
tgatttgacctcaga

SEQ ID NO: 1475968 - DNA, 15 bp, Homo sapiens
gatttgacctcagaa

SEQ ID NO: 1475969 - DNA, 15 bp, Homo sapiens
atttgacctcagaac

SEQ ID NO: 1475970 - DNA, 15 bp, Homo sapiens
tttgacctcagaacc

SEQ ID NO: 1475971 - DNA, 15 bp, Homo sapiens
ttgacctcagaaccg

SEQ ID NO: 1475972 - DNA, 15 bp, Homo sapiens
tgacctcagaaccgt

SEQ ID NO: 1475973 - DNA, 15 bp, Homo sapiens
gacctcagaaccgtc

SEQ ID NO: 1475974 - DNA, 15 bp, Homo sapiens
acctcagaaccgtct

SEQ ID NO: 1475975 - DNA, 15 bp, Homo sapiens
cctcagaaccgtctc

SEQ ID NO: 1475976 - DNA, 15 bp, Homo sapiens
ctcagaaccgtctcc

SEQ ID NO: 1475977 - DNA, 15 bp, Homo sapiens
tcagaaccgtctcct

SEQ ID NO: 1475978 - DNA, 15 bp, Homo sapiens
cagaaccgtctccta

SEQ ID NO: 1475979 - DNA, 15 bp, Homo sapiens
agaaccgtctcctat

SEQ ID NO: 1475980 - DNA, 15 bp, Homo sapiens
gaaccgtctcctatt

SEQ ID NO: 1475981 - DNA, 15 bp, Homo sapiens
aaccgtctcctattt

SEQ ID NO: 1475982 - DNA, 15 bp, Homo sapiens
accgtctcctatttt

SEQ ID NO: 1475983 - DNA, 15 bp, Homo sapiens
ccgtctcctatttta

SEQ ID NO: 1475984 - DNA, 15 bp, Homo sapiens
cgtctcctattttaa

SEQ ID NO: 1475985 - DNA, 15 bp, Homo sapiens
gtctcctattttaag

SEQ ID NO: 1475986 - DNA, 15 bp, Homo sapiens
tctcctattttaaga

SEQ ID NO: 1475987 - DNA, 15 bp, Homo sapiens
ctcctattttaagat

SEQ ID NO: 1475988 - DNA, 15 bp, Homo sapiens
tcctattttaagatt

SEQ ID NO: 1475989 - DNA, 15 bp, Homo sapiens
cctattttaagattt

SEQ ID NO: 1475990 - DNA, 15 bp, Homo sapiens
ctattttaagatttc

SEQ ID NO: 1475991 - DNA, 15 bp, Homo sapiens
tattttaagatttca

SEQ ID NO: 1475992 - DNA, 15 bp, Homo sapiens
attttaagatttcaa

SEQ ID NO: 1475993 - DNA, 15 bp, Homo sapiens
ttttaagatttcaaa

SEQ ID NO: 1475994 - DNA, 15 bp, Homo sapiens
tttaagatttcaaaa

SEQ ID NO: 1475995 - DNA, 15 bp, Homo sapiens
ttaagatttcaaaat

SEQ ID NO: 1475996 - DNA, 15 bp, Homo sapiens
taagatttcaaaatg

SEQ ID NO: 1475997 - DNA, 15 bp, Homo sapiens
aagatttcaaaatgc

SEQ ID NO: 1475998 - DNA, 15 bp, Homo sapiens
agatttcaaaatgct

SEQ ID NO: 1475999 - DNA, 15 bp, Homo sapiens
gatttcaaaatgctt

SEQ ID NO: 1476000 - DNA, 15 bp, Homo sapiens
atttcaaaatgctta

SEQ ID NO: 1476001 - DNA, 15 bp, Homo sapiens
tttcaaaatgcttaa

SEQ ID NO: 1476002 - DNA, 15 bp, Homo sapiens
ttcaaaatgcttaag

SEQ ID NO: 1476003 - DNA, 15 bp, Homo sapiens
tcaaaatgcttaagt

SEQ ID NO: 1476004 - DNA, 15 bp, Homo sapiens
caaaatgcttaagta

SEQ ID NO: 1476005 - DNA, 15 bp, Homo sapiens
aaaatgcttaagtag

SEQ ID NO: 1476006 - DNA, 15 bp, Homo sapiens
aaatgcttaagtaga

SEQ ID NO: 1476007 - DNA, 15 bp, Homo sapiens
aatgcttaagtagat

SEQ ID NO: 1476008 - DNA, 15 bp, Homo sapiens
atgcttaagtagatg

SEQ ID NO: 1476009 - DNA, 15 bp, Homo sapiens
tgcttaagtagatgg

SEQ ID NO: 1476010 - DNA, 15 bp, Homo sapiens
gcttaagtagatggg

SEQ ID NO: 1476011 - DNA, 15 bp, Homo sapiens
cttaagtagatgggg

SEQ ID NO: 1476012 - DNA, 15 bp, Homo sapiens
ttaagtagatggggc

SEQ ID NO: 1476013 - DNA, 15 bp, Homo sapiens
taagtagatggggcg

SEQ ID NO: 1476014 - DNA, 15 bp, Homo sapiens
aagtagatggggcgc

SEQ ID NO: 1476015 - DNA, 15 bp, Homo sapiens
agtagatggggcgca

SEQ ID NO: 1476016 - DNA, 15 bp, Homo sapiens
gtagatggggcgcag

SEQ ID NO: 1476017 - DNA, 15 bp, Homo sapiens
tagatggggcgcagc

SEQ ID NO: 1476018 - DNA, 15 bp, Homo sapiens
agatggggcgcagcg

SEQ ID NO: 1476019 - DNA, 15 bp, Homo sapiens
gatggggcgcagcgg

SEQ ID NO: 1476020 - DNA, 15 bp, Homo sapiens
atggggcgcagcggc

SEQ ID NO: 1476021 - DNA, 15 bp, Homo sapiens
tggggcgcagcggct

SEQ ID NO: 1476022 - DNA, 15 bp, Homo sapiens
ggggcgcagcggctc

SEQ ID NO: 1476023 - DNA, 15 bp, Homo sapiens
gggcgcagcggctca

SEQ ID NO: 1476024 - DNA, 15 bp, Homo sapiens
ggcgcagcggctcag

SEQ ID NO: 1476025 - DNA, 15 bp, Homo sapiens
gcgcagcggctcagg

SEQ ID NO: 1476026 - DNA, 15 bp, Homo sapiens
cgcagcggctcaggc

SEQ ID NO: 1476027 - DNA, 15 bp, Homo sapiens
gcagcggctcaggcc

SEQ ID NO: 1476028 - DNA, 15 bp, Homo sapiens
cagcggctcaggcct

SEQ ID NO: 1476029 - DNA, 15 bp, Homo sapiens
agcggctcaggcctg

SEQ ID NO: 1476030 - DNA, 15 bp, Homo sapiens
gcggctcaggcctgt

SEQ ID NO: 1476031 - DNA, 15 bp, Homo sapiens
cggctcaggcctgta

SEQ ID NO: 1476032 - DNA, 15 bp, Homo sapiens
caggcctgtaatcca

SEQ ID NO: 1476033 - DNA, 15 bp, Homo sapiens
aggcctgtaatccag

SEQ ID NO: 1476034 - DNA, 15 bp, Homo sapiens
ggcctgtaatccagc

SEQ ID NO: 1476035 - DNA, 15 bp, Homo sapiens
tgggaggcggaggcg

SEQ ID NO: 1476036 - DNA, 15 bp, Homo sapiens
gggaggcggaggcgg

SEQ ID NO: 1476037 - DNA, 15 bp, Homo sapiens
ggaggcggaggcggg

SEQ ID NO: 1476038 - DNA, 15 bp, Homo sapiens
gaggcggaggcgggc

SEQ ID NO: 1476039 - DNA, 15 bp, Homo sapiens
aggcggaggcgggca

SEQ ID NO: 1476040 - DNA, 15 bp, Homo sapiens
ggcggaggcgggcaa

SEQ ID NO: 1476041 - DNA, 15 bp, Homo sapiens
gcggaggcgggcaaa

SEQ ID NO: 1476042 - DNA, 15 bp, Homo sapiens
cggaggcgggcaaat

SEQ ID NO: 1476043 - DNA, 15 bp, Homo sapiens
ggaggcgggcaaatc

SEQ ID NO: 1476044 - DNA, 15 bp, Homo sapiens
gaggcgggcaaatca

SEQ ID NO: 1476045 - DNA, 15 bp, Homo sapiens
aggcgggcaaatcac

SEQ ID NO: 1476046 - DNA, 15 bp, Homo sapiens
ggcgggcaaatcact

SEQ ID NO: 1476047 - DNA, 15 bp, Homo sapiens
gcgggcaaatcactt

SEQ ID NO: 1476048 - DNA, 15 bp, Homo sapiens
cgggcaaatcacttg

SEQ ID NO: 1476049 - DNA, 15 bp, Homo sapiens
gggcaaatcacttga

SEQ ID NO: 1476050 - DNA, 15 bp, Homo sapiens
ggcaaatcacttgag

SEQ ID NO: 1476051 - DNA, 15 bp, Homo sapiens
gcaaatcacttgagg

SEQ ID NO: 1476052 - DNA, 15 bp, Homo sapiens
caaatcacttgaggt

SEQ ID NO: 1476053 - DNA, 15 bp, Homo sapiens
aaatcacttgaggtc

SEQ ID NO: 1476054 - DNA, 15 bp, Homo sapiens
aatcacttgaggtca

SEQ ID NO: 1476055 - DNA, 15 bp, Homo sapiens
acatggcaaaacctt

SEQ ID NO: 1476056 - DNA, 15 bp, Homo sapiens
catggcaaaaccttg

SEQ ID NO: 1476057 - DNA, 15 bp, Homo sapiens
atggcaaaaccttgt

SEQ ID NO: 1476058 - DNA, 15 bp, Homo sapiens
tggcaaaaccttgtc

SEQ ID NO: 1476059 - DNA, 15 bp, Homo sapiens
ggcaaaaccttgtct

SEQ ID NO: 1476060 - DNA, 15 bp, Homo sapiens
gcaaaaccttgtctc

SEQ ID NO: 1476061 - DNA, 15 bp, Homo sapiens
caaaaccttgtctct

SEQ ID NO: 1476062 - DNA, 15 bp, Homo sapiens
aaaaccttgtctcta

SEQ ID NO: 1476063 - DNA, 15 bp, Homo sapiens
aaaccttgtctctaa

SEQ ID NO: 1476064 - DNA, 15 bp, Homo sapiens
aaccttgtctctaat

SEQ ID NO: 1476065 - DNA, 15 bp, Homo sapiens
accttgtctctaata

SEQ ID NO: 1476066 - DNA, 15 bp, Homo sapiens
ccttgtctctaataa

SEQ ID NO: 1476067 - DNA, 15 bp, Homo sapiens
cttgtctctaataaa

SEQ ID NO: 1476068 - DNA, 15 bp, Homo sapiens
ttgtctctaataaaa

SEQ ID NO: 1476069 - DNA, 15 bp, Homo sapiens
tacaaaaattagctt

SEQ ID NO: 1476070 - DNA, 15 bp, Homo sapiens
acaaaaattagctta

SEQ ID NO: 1476071 - DNA, 15 bp, Homo sapiens
caaaaattagcttag

SEQ ID NO: 1476072 - DNA, 15 bp, Homo sapiens
aaaaattagcttagt

SEQ ID NO: 1476073 - DNA, 15 bp, Homo sapiens
aaaattagcttagtg

SEQ ID NO: 1476074 - DNA, 15 bp, Homo sapiens
aaattagcttagtgt

SEQ ID NO: 1476075 - DNA, 15 bp, Homo sapiens
aattagcttagtgtg

SEQ ID NO: 1476076 - DNA, 15 bp, Homo sapiens
attagcttagtgtgg

SEQ ID NO: 1476077 - DNA, 15 bp, Homo sapiens
ttagcttagtgtggt

SEQ ID NO: 1476078 - DNA, 15 bp, Homo sapiens
tagcttagtgtggtg

SEQ ID NO: 1476079 - DNA, 15 bp, Homo sapiens
agcttagtgtggtgg

SEQ ID NO: 1476080 - DNA, 15 bp, Homo sapiens
gcttagtgtggtggc

SEQ ID NO: 1476081 - DNA, 15 bp, Homo sapiens
cttagtgtggtggca

SEQ ID NO: 1476082 - DNA, 15 bp, Homo sapiens
ttagtgtggtggcac

SEQ ID NO: 1476083 - DNA, 15 bp, Homo sapiens
tagtgtggtggcaca

SEQ ID NO: 1476084 - DNA, 15 bp, Homo sapiens
agtgtggtggcacac

SEQ ID NO: 1476085 - DNA, 15 bp, Homo sapiens
gtgtggtggcacacg

SEQ ID NO: 1476086 - DNA, 15 bp, Homo sapiens
tgtggtggcacacgc

SEQ ID NO: 1476087 - DNA, 15 bp, Homo sapiens
cacacgcctgtaatt

SEQ ID NO: 1476088 - DNA, 15 bp, Homo sapiens
acacgcctgtaattc

SEQ ID NO: 1476089 - DNA, 15 bp, Homo sapiens
cctgtaattccagcc

SEQ ID NO: 1476090 - DNA, 15 bp, Homo sapiens
ctgtaattccagcca

SEQ ID NO: 1476091 - DNA, 15 bp, Homo sapiens
tgtaattccagccac

SEQ ID NO: 1476092 - DNA, 15 bp, Homo sapiens
gtaattccagccact

SEQ ID NO: 1476093 - DNA, 15 bp, Homo sapiens
taattccagccactt

SEQ ID NO: 1476094 - DNA, 15 bp, Homo sapiens
aattccagccacttc

SEQ ID NO: 1476095 - DNA, 15 bp, Homo sapiens
attccagccacttcg

SEQ ID NO: 1476096 - DNA, 15 bp, Homo sapiens
ttccagccacttcgg

SEQ ID NO: 1476097 - DNA, 15 bp, Homo sapiens
tccagccacttcgga

SEQ ID NO: 1476098 - DNA, 15 bp, Homo sapiens
ccagccacttcggag

SEQ ID NO: 1476099 - DNA, 15 bp, Homo sapiens
cagccacttcggagg

SEQ ID NO: 1476100 - DNA, 15 bp, Homo sapiens
agccacttcggaggc

SEQ ID NO: 1476101 - DNA, 15 bp, Homo sapiens
gccacttcggaggct

SEQ ID NO: 1476102 - DNA, 15 bp, Homo sapiens
ccacttcggaggctg

SEQ ID NO: 1476103 - DNA, 15 bp, Homo sapiens
cacttcggaggctga

SEQ ID NO: 1476104 - DNA, 15 bp, Homo sapiens
acttcggaggctgag

SEQ ID NO: 1476105 - DNA, 15 bp, Homo sapiens
cttcggaggctgagg

SEQ ID NO: 1476106 - DNA, 15 bp, Homo sapiens
ttcggaggctgaggc

SEQ ID NO: 1476107 - DNA, 15 bp, Homo sapiens
tcggaggctgaggca

SEQ ID NO: 1476108 - DNA, 15 bp, Homo sapiens
cggaggctgaggcag

SEQ ID NO: 1476109 - DNA, 15 bp, Homo sapiens
caggagaatcacttc

SEQ ID NO: 1476110 - DNA, 15 bp, Homo sapiens
aggagaatcacttcg

SEQ ID NO: 1476111 - DNA, 15 bp, Homo sapiens
ggagaatcacttcga

SEQ ID NO: 1476112 - DNA, 15 bp, Homo sapiens
gagaatcacttcgaa

SEQ ID NO: 1476113 - DNA, 15 bp, Homo sapiens
agaatcacttcgaac

SEQ ID NO: 1476114 - DNA, 15 bp, Homo sapiens
gaatcacttcgaacc

SEQ ID NO: 1476115 - DNA, 15 bp, Homo sapiens
aatcacttcgaaccg

SEQ ID NO: 1476116 - DNA, 15 bp, Homo sapiens
atcacttcgaaccgg

SEQ ID NO: 1476117 - DNA, 15 bp, Homo sapiens
tcacttcgaaccggg

SEQ ID NO: 1476118 - DNA, 15 bp, Homo sapiens
cacttcgaaccggga

SEQ ID NO: 1476119 - DNA, 15 bp, Homo sapiens
acttcgaaccgggag

SEQ ID NO: 1476120 - DNA, 15 bp, Homo sapiens
cttcgaaccgggagg

SEQ ID NO: 1476121 - DNA, 15 bp, Homo sapiens
ttcgaaccgggaggc

SEQ ID NO: 1476122 - DNA, 15 bp, Homo sapiens
tcgaaccgggaggcg

SEQ ID NO: 1476123 - DNA, 15 bp, Homo sapiens
cgaaccgggaggcgg

SEQ ID NO: 1476124 - DNA, 15 bp, Homo sapiens
agatcgtgccactgt

SEQ ID NO: 1476125 - DNA, 15 bp, Homo sapiens
gatcgtgccactgtg

SEQ ID NO: 1476126 - DNA, 15 bp, Homo sapiens
atcgtgccactgtgc

SEQ ID NO: 1476127 - DNA, 15 bp, Homo sapiens
tcgtgccactgtgct

SEQ ID NO: 1476128 - DNA, 15 bp, Homo sapiens
cgtgccactgtgctc

SEQ ID NO: 1476129 - DNA, 15 bp, Homo sapiens
gtgccactgtgctcc

SEQ ID NO: 1476130 - DNA, 15 bp, Homo sapiens
tgccactgtgctcca

SEQ ID NO: 1476131 - DNA, 15 bp, Homo sapiens
gccactgtgctccag

SEQ ID NO: 1476132 - DNA, 15 bp, Homo sapiens
ccactgtgctccagg

SEQ ID NO: 1476133 - DNA, 15 bp, Homo sapiens
cactgtgctccaggc

SEQ ID NO: 1476134 - DNA, 15 bp, Homo sapiens
actgtgctccaggct

SEQ ID NO: 1476135 - DNA, 15 bp, Homo sapiens
ctgtgctccaggctg

SEQ ID NO: 1476136 - DNA, 15 bp, Homo sapiens
tgtgctccaggctgg

SEQ ID NO: 1476137 - DNA, 15 bp, Homo sapiens
gtgctccaggctggt

SEQ ID NO: 1476138 - DNA, 15 bp, Homo sapiens
tgctccaggctggtg

SEQ ID NO: 1476139 - DNA, 15 bp, Homo sapiens
gctccaggctggtgg

SEQ ID NO: 1476140 - DNA, 15 bp, Homo sapiens
ctccaggctggtgga

SEQ ID NO: 1476141 - DNA, 15 bp, Homo sapiens
tccaggctggtggac

SEQ ID NO: 1476142 - DNA, 15 bp, Homo sapiens
ccaggctggtggaca

SEQ ID NO: 1476143 - DNA, 15 bp, Homo sapiens
caggctggtggacag

SEQ ID NO: 1476144 - DNA, 15 bp, Homo sapiens
aggctggtggacaga

SEQ ID NO: 1476145 - DNA, 15 bp, Homo sapiens
ggctggtggacagag

SEQ ID NO: 1476146 - DNA, 15 bp, Homo sapiens
gctggtggacagagc

SEQ ID NO: 1476147 - DNA, 15 bp, Homo sapiens
ctggtggacagagcg

SEQ ID NO: 1476148 - DNA, 15 bp, Homo sapiens
tggtggacagagcga

SEQ ID NO: 1476149 - DNA, 15 bp, Homo sapiens
ggtggacagagcgag

SEQ ID NO: 1476150 - DNA, 15 bp, Homo sapiens
gtggacagagcgaga

SEQ ID NO: 1476151 - DNA, 15 bp, Homo sapiens
tggacagagcgagac

SEQ ID NO: 1476152 - DNA, 15 bp, Homo sapiens
ggacagagcgagact

SEQ ID NO: 1476153 - DNA, 15 bp, Homo sapiens
ctcaaaaaaaaaaag

SEQ ID NO: 1476154 - DNA, 15 bp, Homo sapiens
tcaaaaaaaaaaaga

SEQ ID NO: 1476155 - DNA, 15 bp, Homo sapiens
caaaaaaaaaaagaa

SEQ ID NO: 1476156 - DNA, 15 bp, Homo sapiens
aaagaaaagaaacaa

SEQ ID NO: 1476157 - DNA, 15 bp, Homo sapiens
aagaaaagaaacaaa

SEQ ID NO: 1476158 - DNA, 15 bp, Homo sapiens
agaaaagaaacaaaa

SEQ ID NO: 1476159 - DNA, 15 bp, Homo sapiens
gaaaagaaacaaaaa

SEQ ID NO: 1476160 - DNA, 15 bp, Homo sapiens
aaaagaaacaaaaat

SEQ ID NO: 1476161 - DNA, 15 bp, Homo sapiens
aaagaaacaaaaatt

SEQ ID NO: 1476162 - DNA, 15 bp, Homo sapiens
aagaaacaaaaattg

SEQ ID NO: 1476163 - DNA, 15 bp, Homo sapiens
agaaacaaaaattgc

SEQ ID NO: 1476164 - DNA, 15 bp, Homo sapiens
gaaacaaaaattgct

SEQ ID NO: 1476165 - DNA, 15 bp, Homo sapiens
aacaaaaattgctta

SEQ ID NO: 1476166 - DNA, 15 bp, Homo sapiens
acaaaaattgcttaa

SEQ ID NO: 1476167 - DNA, 15 bp, Homo sapiens
caaaaattgcttaac

SEQ ID NO: 1476168 - DNA, 15 bp, Homo sapiens
aaaaattgcttaact

SEQ ID NO: 1476169 - DNA, 15 bp, Homo sapiens
aaaattgcttaacta

SEQ ID NO: 1476170 - DNA, 15 bp, Homo sapiens
aaattgcttaactag

SEQ ID NO: 1476171 - DNA, 15 bp, Homo sapiens
aattgcttaactaga

SEQ ID NO: 1476172 - DNA, 15 bp, Homo sapiens
attgcttaactagac

SEQ ID NO: 1476173 - DNA, 15 bp, Homo sapiens
ttgcttaactagaca

SEQ ID NO: 1476174 - DNA, 15 bp, Homo sapiens
tgcttaactagacat

SEQ ID NO: 1476175 - DNA, 15 bp, Homo sapiens
gcttaactagacatg

SEQ ID NO: 1476176 - DNA, 15 bp, Homo sapiens
cttaactagacatgt

SEQ ID NO: 1476177 - DNA, 15 bp, Homo sapiens
ttaactagacatgtc

SEQ ID NO: 1476178 - DNA, 15 bp, Homo sapiens
taactagacatgtca

SEQ ID NO: 1476179 - DNA, 15 bp, Homo sapiens
aactagacatgtcat

SEQ ID NO: 1476180 - DNA, 15 bp, Homo sapiens
actagacatgtcatg

SEQ ID NO: 1476181 - DNA, 15 bp, Homo sapiens
ctagacatgtcatgc

SEQ ID NO: 1476182 - DNA, 15 bp, Homo sapiens
tagacatgtcatgca

SEQ ID NO: 1476183 - DNA, 15 bp, Homo sapiens
agacatgtcatgcaa

SEQ ID NO: 1476184 - DNA, 15 bp, Homo sapiens
gacatgtcatgcaat

SEQ ID NO: 1476185 - DNA, 15 bp, Homo sapiens
acatgtcatgcaatt

SEQ ID NO: 1476186 - DNA, 15 bp, Homo sapiens
catgtcatgcaattt

SEQ ID NO: 1476187 - DNA, 15 bp, Homo sapiens
atgtcatgcaatttt

SEQ ID NO: 1476188 - DNA, 15 bp, Homo sapiens
tgtcatgcaattttg

SEQ ID NO: 1476189 - DNA, 15 bp, Homo sapiens
gtcatgcaattttgg

SEQ ID NO: 1476190 - DNA, 15 bp, Homo sapiens
tcatgcaattttgga

SEQ ID NO: 1476191 - DNA, 15 bp, Homo sapiens
catgcaattttggag

SEQ ID NO: 1476192 - DNA, 15 bp, Homo sapiens
atgcaattttggaga

SEQ ID NO: 1476193 - DNA, 15 bp, Homo sapiens
tgcaattttggagaa

SEQ ID NO: 1476194 - DNA, 15 bp, Homo sapiens
gcaattttggagaag

SEQ ID NO: 1476195 - DNA, 15 bp, Homo sapiens
caattttggagaaga

SEQ ID NO: 1476196 - DNA, 15 bp, Homo sapiens
aattttggagaagag

SEQ ID NO: 1476197 - DNA, 15 bp, Homo sapiens
attttggagaagaga

SEQ ID NO: 1476198 - DNA, 15 bp, Homo sapiens
ttttggagaagagat

SEQ ID NO: 1476199 - DNA, 15 bp, Homo sapiens
tttggagaagagatg

SEQ ID NO: 1476200 - DNA, 15 bp, Homo sapiens
ttggagaagagatga

SEQ ID NO: 1476201 - DNA, 15 bp, Homo sapiens
tggagaagagatgag

SEQ ID NO: 1476202 - DNA, 15 bp, Homo sapiens
ggagaagagatgagt

SEQ ID NO: 1476203 - DNA, 15 bp, Homo sapiens
gagaagagatgagtg

SEQ ID NO: 1476204 - DNA, 15 bp, Homo sapiens
agaagagatgagtgg

SEQ ID NO: 1476205 - DNA, 15 bp, Homo sapiens
gaagagatgagtggt

SEQ ID NO: 1476206 - DNA, 15 bp, Homo sapiens
aagagatgagtggta

SEQ ID NO: 1476207 - DNA, 15 bp, Homo sapiens
agagatgagtggtaa

SEQ ID NO: 1476208 - DNA, 15 bp, Homo sapiens
gagatgagtggtaaa

SEQ ID NO: 1476209 - DNA, 15 bp, Homo sapiens
agatgagtggtaaat

SEQ ID NO: 1476210 - DNA, 15 bp, Homo sapiens
gatgagtggtaaatg

SEQ ID NO: 1476211 - DNA, 15 bp, Homo sapiens
atgagtggtaaatgt

SEQ ID NO: 1476212 - DNA, 15 bp, Homo sapiens
tgagtggtaaatgtg

SEQ ID NO: 1476213 - DNA, 15 bp, Homo sapiens
gagtggtaaatgtga

SEQ ID NO: 1476214 - DNA, 15 bp, Homo sapiens
agtggtaaatgtgac

SEQ ID NO: 1476215 - DNA, 15 bp, Homo sapiens
gtggtaaatgtgact

SEQ ID NO: 1476216 - DNA, 15 bp, Homo sapiens
tggtaaatgtgactc

SEQ ID NO: 1476217 - DNA, 15 bp, Homo sapiens
ggtaaatgtgactcc

SEQ ID NO: 1476218 - DNA, 15 bp, Homo sapiens
gtaaatgtgactcca

SEQ ID NO: 1476219 - DNA, 15 bp, Homo sapiens
taaatgtgactccag

SEQ ID NO: 1476220 - DNA, 15 bp, Homo sapiens
aaatgtgactccagc

SEQ ID NO: 1476221 - DNA, 15 bp, Homo sapiens
aatgtgactccagct

SEQ ID NO: 1476222 - DNA, 15 bp, Homo sapiens
atgtgactccagctt

SEQ ID NO: 1476223 - DNA, 15 bp, Homo sapiens
tgtgactccagcttt

SEQ ID NO: 1476224 - DNA, 15 bp, Homo sapiens
gtgactccagcttta

SEQ ID NO: 1476225 - DNA, 15 bp, Homo sapiens
tgactccagctttac

SEQ ID NO: 1476226 - DNA, 15 bp, Homo sapiens
gactccagctttact

SEQ ID NO: 1476227 - DNA, 15 bp, Homo sapiens
actccagctttacta

SEQ ID NO: 1476228 - DNA, 15 bp, Homo sapiens
ctccagctttactaa

SEQ ID NO: 1476229 - DNA, 15 bp, Homo sapiens
tccagctttactaaa

SEQ ID NO: 1476230 - DNA, 15 bp, Homo sapiens
ccagctttactaaac

SEQ ID NO: 1476231 - DNA, 15 bp, Homo sapiens
cagctttactaaaca

SEQ ID NO: 1476232 - DNA, 15 bp, Homo sapiens
agctttactaaacag

SEQ ID NO: 1476233 - DNA, 15 bp, Homo sapiens
gctttactaaacagt

SEQ ID NO: 1476234 - DNA, 15 bp, Homo sapiens
ctttactaaacagtg

SEQ ID NO: 1476235 - DNA, 15 bp, Homo sapiens
tttactaaacagtga

SEQ ID NO: 1476236 - DNA, 15 bp, Homo sapiens
ttactaaacagtgaa

SEQ ID NO: 1476237 - DNA, 15 bp, Homo sapiens
tactaaacagtgaaa

SEQ ID NO: 1476238 - DNA, 15 bp, Homo sapiens
actaaacagtgaaat

SEQ ID NO: 1476239 - DNA, 15 bp, Homo sapiens
ctaaacagtgaaata

SEQ ID NO: 1476240 - DNA, 15 bp, Homo sapiens
taaacagtgaaataa

SEQ ID NO: 1476241 - DNA, 15 bp, Homo sapiens
aaacagtgaaataaa

SEQ ID NO: 1476242 - DNA, 15 bp, Homo sapiens
aacagtgaaataaat

SEQ ID NO: 1476243 - DNA, 15 bp, Homo sapiens
acagtgaaataaatt

SEQ ID NO: 1476244 - DNA, 15 bp, Homo sapiens
cagtgaaataaatta

SEQ ID NO: 1476245 - DNA, 15 bp, Homo sapiens
agtgaaataaattaa

SEQ ID NO: 1476246 - DNA, 15 bp, Homo sapiens
gtgaaataaattaag

SEQ ID NO: 1476247 - DNA, 15 bp, Homo sapiens
tgaaataaattaagg

SEQ ID NO: 1476248 - DNA, 15 bp, Homo sapiens
gaaataaattaaggc

SEQ ID NO: 1476249 - DNA, 15 bp, Homo sapiens
aaataaattaaggca

SEQ ID NO: 1476250 - DNA, 15 bp, Homo sapiens
aataaattaaggcac

SEQ ID NO: 1476251 - DNA, 15 bp, Homo sapiens
ataaattaaggcacc

SEQ ID NO: 1476252 - DNA, 15 bp, Homo sapiens
taaattaaggcacca

SEQ ID NO: 1476253 - DNA, 15 bp, Homo sapiens
aaattaaggcaccaa

SEQ ID NO: 1476254 - DNA, 15 bp, Homo sapiens
aattaaggcaccaaa

SEQ ID NO: 1476255 - DNA, 15 bp, Homo sapiens
attaaggcaccaaag

SEQ ID NO: 1476256 - DNA, 15 bp, Homo sapiens
ttaaggcaccaaagc

SEQ ID NO: 1476257 - DNA, 15 bp, Homo sapiens
taaggcaccaaagca

SEQ ID NO: 1476258 - DNA, 15 bp, Homo sapiens
aaggcaccaaagcat

SEQ ID NO: 1476259 - DNA, 15 bp, Homo sapiens
aggcaccaaagcatg

SEQ ID NO: 1476260 - DNA, 15 bp, Homo sapiens
ggcaccaaagcatgc

SEQ ID NO: 1476261 - DNA, 15 bp, Homo sapiens
gcaccaaagcatgct

SEQ ID NO: 1476262 - DNA, 15 bp, Homo sapiens
caccaaagcatgctg

SEQ ID NO: 1476263 - DNA, 15 bp, Homo sapiens
accaaagcatgctga

SEQ ID NO: 1476264 - DNA, 15 bp, Homo sapiens
ccaaagcatgctgag

SEQ ID NO: 1476265 - DNA, 15 bp, Homo sapiens
caaagcatgctgagc

SEQ ID NO: 1476266 - DNA, 15 bp, Homo sapiens
aaagcatgctgagcc

SEQ ID NO: 1476267 - DNA, 15 bp, Homo sapiens
aagcatgctgagcct

SEQ ID NO: 1476268 - DNA, 15 bp, Homo sapiens
agcatgctgagcctt

SEQ ID NO: 1476269 - DNA, 15 bp, Homo sapiens
gcatgctgagccttg

SEQ ID NO: 1476270 - DNA, 15 bp, Homo sapiens
catgctgagccttgt

SEQ ID NO: 1476271 - DNA, 15 bp, Homo sapiens
atgctgagccttgtc

SEQ ID NO: 1476272 - DNA, 15 bp, Homo sapiens
tgctgagccttgtct

SEQ ID NO: 1476273 - DNA, 15 bp, Homo sapiens
gctgagccttgtcta

SEQ ID NO: 1476274 - DNA, 15 bp, Homo sapiens
ctgagccttgtctaa

SEQ ID NO: 1476275 - DNA, 15 bp, Homo sapiens
tgagccttgtctaaa

SEQ ID NO: 1476276 - DNA, 15 bp, Homo sapiens
gagccttgtctaaaa

SEQ ID NO: 1476277 - DNA, 15 bp, Homo sapiens
agccttgtctaaaat

SEQ ID NO: 1476278 - DNA, 15 bp, Homo sapiens
gccttgtctaaaatc

SEQ ID NO: 1476279 - DNA, 15 bp, Homo sapiens
ccttgtctaaaatcc

SEQ ID NO: 1476280 - DNA, 15 bp, Homo sapiens
cttgtctaaaatcct

SEQ ID NO: 1476281 - DNA, 15 bp, Homo sapiens
ttgtctaaaatccta

SEQ ID NO: 1476282 - DNA, 15 bp, Homo sapiens
gtctaaaatcctata

SEQ ID NO: 1476283 - DNA, 15 bp, Homo sapiens
tctaaaatcctatag

SEQ ID NO: 1476284 - DNA, 15 bp, Homo sapiens
ctaaaatcctatagc

SEQ ID NO: 1476285 - DNA, 15 bp, Homo sapiens
taaaatcctatagca

SEQ ID NO: 1476286 - DNA, 15 bp, Homo sapiens
aaaatcctatagcag

SEQ ID NO: 1476287 - DNA, 15 bp, Homo sapiens
aaatcctatagcaga

SEQ ID NO: 1476288 - DNA, 15 bp, Homo sapiens
aatcctatagcagaa

SEQ ID NO: 1476289 - DNA, 15 bp, Homo sapiens
atcctatagcagaag

SEQ ID NO: 1476290 - DNA, 15 bp, Homo sapiens
tcctatagcagaaga

SEQ ID NO: 1476291 - DNA, 15 bp, Homo sapiens
cctatagcagaagag

SEQ ID NO: 1476292 - DNA, 15 bp, Homo sapiens
ctatagcagaagagg

SEQ ID NO: 1476293 - DNA, 15 bp, Homo sapiens
tatagcagaagaggc

SEQ ID NO: 1476294 - DNA, 15 bp, Homo sapiens
atagcagaagaggcc

SEQ ID NO: 1476295 - DNA, 15 bp, Homo sapiens
tagcagaagaggcca

SEQ ID NO: 1476296 - DNA, 15 bp, Homo sapiens
agcagaagaggccag

SEQ ID NO: 1476297 - DNA, 15 bp, Homo sapiens
gcagaagaggccaga

SEQ ID NO: 1476298 - DNA, 15 bp, Homo sapiens
cagaagaggccagaa

SEQ ID NO: 1476299 - DNA, 15 bp, Homo sapiens
agaagaggccagaaa

SEQ ID NO: 1476300 - DNA, 15 bp, Homo sapiens
gaagaggccagaaaa

SEQ ID NO: 1476301 - DNA, 15 bp, Homo sapiens
aagaggccagaaaaa

SEQ ID NO: 1476302 - DNA, 15 bp, Homo sapiens
agaggccagaaaaaa

SEQ ID NO: 1476303 - DNA, 15 bp, Homo sapiens
gaggccagaaaaaaa

SEQ ID NO: 1476304 - DNA, 15 bp, Homo sapiens
aggccagaaaaaaat

SEQ ID NO: 1476305 - DNA, 15 bp, Homo sapiens
ggccagaaaaaaatt

SEQ ID NO: 1476306 - DNA, 15 bp, Homo sapiens
gccagaaaaaaattc

SEQ ID NO: 1476307 - DNA, 15 bp, Homo sapiens
ccagaaaaaaattca

SEQ ID NO: 1476308 - DNA, 15 bp, Homo sapiens
cagaaaaaaattcac

SEQ ID NO: 1476309 - DNA, 15 bp, Homo sapiens
agaaaaaaattcact

SEQ ID NO: 1476310 - DNA, 15 bp, Homo sapiens
gaaaaaaattcactg

SEQ ID NO: 1476311 - DNA, 15 bp, Homo sapiens
aaaaaaattcactgg

SEQ ID NO: 1476312 - DNA, 15 bp, Homo sapiens
aaaaaattcactggt

SEQ ID NO: 1476313 - DNA, 15 bp, Homo sapiens
aaaaattcactggtt

SEQ ID NO: 1476314 - DNA, 15 bp, Homo sapiens
aaaattcactggttc

SEQ ID NO: 1476315 - DNA, 15 bp, Homo sapiens
aaattcactggttcc

SEQ ID NO: 1476316 - DNA, 15 bp, Homo sapiens
aattcactggttccc

SEQ ID NO: 1476317 - DNA, 15 bp, Homo sapiens
attcactggttccct

SEQ ID NO: 1476318 - DNA, 15 bp, Homo sapiens
ttcactggttccctt

SEQ ID NO: 1476319 - DNA, 15 bp, Homo sapiens
tcactggttcccttc

SEQ ID NO: 1476320 - DNA, 15 bp, Homo sapiens
cactggttcccttct

SEQ ID NO: 1476321 - DNA, 15 bp, Homo sapiens
actggttcccttctt

SEQ ID NO: 1476322 - DNA, 15 bp, Homo sapiens
ctggttcccttcttt

SEQ ID NO: 1476323 - DNA, 15 bp, Homo sapiens
tggttcccttctttc

SEQ ID NO: 1476324 - DNA, 15 bp, Homo sapiens
ggttcccttctttct

SEQ ID NO: 1476325 - DNA, 15 bp, Homo sapiens
gttcccttctttctc

SEQ ID NO: 1476326 - DNA, 15 bp, Homo sapiens
ttcccttctttctcc

SEQ ID NO: 1476327 - DNA, 15 bp, Homo sapiens
tcccttctttctcca

SEQ ID NO: 1476328 - DNA, 15 bp, Homo sapiens
cccttctttctccat

SEQ ID NO: 1476329 - DNA, 15 bp, Homo sapiens
ccttctttctccatc

SEQ ID NO: 1476330 - DNA, 15 bp, Homo sapiens
cttctttctccatcc

SEQ ID NO: 1476331 - DNA, 15 bp, Homo sapiens
ttctttctccatcca

SEQ ID NO: 1476332 - DNA, 15 bp, Homo sapiens
tctttctccatccat

SEQ ID NO: 1476333 - DNA, 15 bp, Homo sapiens
ctttctccatccatt

SEQ ID NO: 1476334 - DNA, 15 bp, Homo sapiens
tttctccatccattc

SEQ ID NO: 1476335 - DNA, 15 bp, Homo sapiens
ttctccatccattca

SEQ ID NO: 1476336 - DNA, 15 bp, Homo sapiens
tctccatccattcag

SEQ ID NO: 1476337 - DNA, 15 bp, Homo sapiens
ctccatccattcagc

SEQ ID NO: 1476338 - DNA, 15 bp, Homo sapiens
tccatccattcagcc

SEQ ID NO: 1476339 - DNA, 15 bp, Homo sapiens
ccatccattcagcca

SEQ ID NO: 1476340 - DNA, 15 bp, Homo sapiens
catccattcagccaa

SEQ ID NO: 1476341 - DNA, 15 bp, Homo sapiens
atccattcagccaat

SEQ ID NO: 1476342 - DNA, 15 bp, Homo sapiens
tccattcagccaatc

SEQ ID NO: 1476343 - DNA, 15 bp, Homo sapiens
ccattcagccaatca

SEQ ID NO: 1476344 - DNA, 15 bp, Homo sapiens
cattcagccaatcag

SEQ ID NO: 1476345 - DNA, 15 bp, Homo sapiens
attcagccaatcagt

SEQ ID NO: 1476346 - DNA, 15 bp, Homo sapiens
ttcagccaatcagta

SEQ ID NO: 1476347 - DNA, 15 bp, Homo sapiens
tcagccaatcagtac

SEQ ID NO: 1476348 - DNA, 15 bp, Homo sapiens
cagccaatcagtacc

SEQ ID NO: 1476349 - DNA, 15 bp, Homo sapiens
agccaatcagtacca

SEQ ID NO: 1476350 - DNA, 15 bp, Homo sapiens
gccaatcagtaccag

SEQ ID NO: 1476351 - DNA, 15 bp, Homo sapiens
ccaatcagtaccaga

SEQ ID NO: 1476352 - DNA, 15 bp, Homo sapiens
caatcagtaccagat

SEQ ID NO: 1476353 - DNA, 15 bp, Homo sapiens
aatcagtaccagatt

SEQ ID NO: 1476354 - DNA, 15 bp, Homo sapiens
atcagtaccagatta

SEQ ID NO: 1476355 - DNA, 15 bp, Homo sapiens
tcagtaccagattat

SEQ ID NO: 1476356 - DNA, 15 bp, Homo sapiens
cagtaccagattatt

SEQ ID NO: 1476357 - DNA, 15 bp, Homo sapiens
agtaccagattattc

SEQ ID NO: 1476358 - DNA, 15 bp, Homo sapiens
gtaccagattattct

SEQ ID NO: 1476359 - DNA, 15 bp, Homo sapiens
taccagattattctc

SEQ ID NO: 1476360 - DNA, 15 bp, Homo sapiens
accagattattctcc

SEQ ID NO: 1476361 - DNA, 15 bp, Homo sapiens
ccagattattctcca

SEQ ID NO: 1476362 - DNA, 15 bp, Homo sapiens
cagattattctccag

SEQ ID NO: 1476363 - DNA, 15 bp, Homo sapiens
agattattctccagc

SEQ ID NO: 1476364 - DNA, 15 bp, Homo sapiens
gattattctccagct

SEQ ID NO: 1476365 - DNA, 15 bp, Homo sapiens
attattctccagcta

SEQ ID NO: 1476366 - DNA, 15 bp, Homo sapiens
ttattctccagctat

SEQ ID NO: 1476367 - DNA, 15 bp, Homo sapiens
tattctccagctatc

SEQ ID NO: 1476368 - DNA, 15 bp, Homo sapiens
attctccagctatct

SEQ ID NO: 1476369 - DNA, 15 bp, Homo sapiens
ttctccagctatctt

SEQ ID NO: 1476370 - DNA, 15 bp, Homo sapiens
tctccagctatcttc

SEQ ID NO: 1476371 - DNA, 15 bp, Homo sapiens
ctccagctatcttcc

SEQ ID NO: 1476372 - DNA, 15 bp, Homo sapiens
tccagctatcttccc

SEQ ID NO: 1476373 - DNA, 15 bp, Homo sapiens
ccagctatcttcccc

SEQ ID NO: 1476374 - DNA, 15 bp, Homo sapiens
cagctatcttccccc

SEQ ID NO: 1476375 - DNA, 15 bp, Homo sapiens
agctatcttcccccc

SEQ ID NO: 1476376 - DNA, 15 bp, Homo sapiens
gctatcttcccccct

SEQ ID NO: 1476377 - DNA, 15 bp, Homo sapiens
ctatcttcccccctt

SEQ ID NO: 1476378 - DNA, 15 bp, Homo sapiens
tatcttccccccttc

SEQ ID NO: 1476379 - DNA, 15 bp, Homo sapiens
atcttccccccttct

SEQ ID NO: 1476380 - DNA, 15 bp, Homo sapiens
tcttccccccttctc

SEQ ID NO: 1476381 - DNA, 15 bp, Homo sapiens
cttccccccttctca

SEQ ID NO: 1476382 - DNA, 15 bp, Homo sapiens
ttccccccttctcat

SEQ ID NO: 1476383 - DNA, 15 bp, Homo sapiens
tccccccttctcatc

SEQ ID NO: 1476384 - DNA, 15 bp, Homo sapiens
ccccccttctcatct

SEQ ID NO: 1476385 - DNA, 15 bp, Homo sapiens
cccccttctcatcta

SEQ ID NO: 1476386 - DNA, 15 bp, Homo sapiens
ccccttctcatctag

SEQ ID NO: 1476387 - DNA, 15 bp, Homo sapiens
cccttctcatctagg

SEQ ID NO: 1476388 - DNA, 15 bp, Homo sapiens
ccttctcatctagga

SEQ ID NO: 1476389 - DNA, 15 bp, Homo sapiens
cttctcatctaggac

SEQ ID NO: 1476390 - DNA, 15 bp, Homo sapiens
ttctcatctaggaca

SEQ ID NO: 1476391 - DNA, 15 bp, Homo sapiens
tctcatctaggacat

SEQ ID NO: 1476392 - DNA, 15 bp, Homo sapiens
ctcatctaggacatc

SEQ ID NO: 1476393 - DNA, 15 bp, Homo sapiens
tcatctaggacatct

SEQ ID NO: 1476394 - DNA, 15 bp, Homo sapiens
catctaggacatcta

SEQ ID NO: 1476395 - DNA, 15 bp, Homo sapiens
atctaggacatctaa

SEQ ID NO: 1476396 - DNA, 15 bp, Homo sapiens
tctaggacatctaag

SEQ ID NO: 1476397 - DNA, 15 bp, Homo sapiens
ctaggacatctaagg

SEQ ID NO: 1476398 - DNA, 15 bp, Homo sapiens
taggacatctaaggt

SEQ ID NO: 1476399 - DNA, 15 bp, Homo sapiens
aggacatctaaggta

SEQ ID NO: 1476400 - DNA, 15 bp, Homo sapiens
ggacatctaaggtag

SEQ ID NO: 1476401 - DNA, 15 bp, Homo sapiens
gacatctaaggtaga

SEQ ID NO: 1476402 - DNA, 15 bp, Homo sapiens
acatctaaggtagaa

SEQ ID NO: 1476403 - DNA, 15 bp, Homo sapiens
catctaaggtagaac

SEQ ID NO: 1476404 - DNA, 15 bp, Homo sapiens
atctaaggtagaacc

SEQ ID NO: 1476405 - DNA, 15 bp, Homo sapiens
tctaaggtagaaccg

SEQ ID NO: 1476406 - DNA, 15 bp, Homo sapiens
ctaaggtagaaccgt

SEQ ID NO: 1476407 - DNA, 15 bp, Homo sapiens
taaggtagaaccgtg

SEQ ID NO: 1476408 - DNA, 15 bp, Homo sapiens
aaggtagaaccgtgc

SEQ ID NO: 1476409 - DNA, 15 bp, Homo sapiens
aggtagaaccgtgca

SEQ ID NO: 1476410 - DNA, 15 bp, Homo sapiens
ggtagaaccgtgcat

SEQ ID NO: 1476411 - DNA, 15 bp, Homo sapiens
gtagaaccgtgcatc

SEQ ID NO: 1476412 - DNA, 15 bp, Homo sapiens
tagaaccgtgcatct

SEQ ID NO: 1476413 - DNA, 15 bp, Homo sapiens
agaaccgtgcatctt

SEQ ID NO: 1476414 - DNA, 15 bp, Homo sapiens
gaaccgtgcatctta

SEQ ID NO: 1476415 - DNA, 15 bp, Homo sapiens
aaccgtgcatcttaa

SEQ ID NO: 1476416 - DNA, 15 bp, Homo sapiens
accgtgcatcttaaa

SEQ ID NO: 1476417 - DNA, 15 bp, Homo sapiens
ccgtgcatcttaaaa

SEQ ID NO: 1476418 - DNA, 15 bp, Homo sapiens
cgtgcatcttaaaaa

SEQ ID NO: 1476419 - DNA, 15 bp, Homo sapiens
gtgcatcttaaaaaa

SEQ ID NO: 1476420 - DNA, 15 bp, Homo sapiens
tgcatcttaaaaaag

SEQ ID NO: 1476421 - DNA, 15 bp, Homo sapiens
gcatcttaaaaaagc

SEQ ID NO: 1476422 - DNA, 15 bp, Homo sapiens
catcttaaaaaagct

SEQ ID NO: 1476423 - DNA, 15 bp, Homo sapiens
atcttaaaaaagctt

SEQ ID NO: 1476424 - DNA, 15 bp, Homo sapiens
tcttaaaaaagcttt

SEQ ID NO: 1476425 - DNA, 15 bp, Homo sapiens
cttaaaaaagctttt

SEQ ID NO: 1476426 - DNA, 15 bp, Homo sapiens
ttaaaaaagcttttc

SEQ ID NO: 1476427 - DNA, 15 bp, Homo sapiens
taaaaaagcttttca

SEQ ID NO: 1476428 - DNA, 15 bp, Homo sapiens
aaaaaagcttttcag

SEQ ID NO: 1476429 - DNA, 15 bp, Homo sapiens
aaaaagcttttcagg

SEQ ID NO: 1476430 - DNA, 15 bp, Homo sapiens
aaaagcttttcagga

SEQ ID NO: 1476431 - DNA, 15 bp, Homo sapiens
aaagcttttcaggaa

SEQ ID NO: 1476432 - DNA, 15 bp, Homo sapiens
aagcttttcaggaaa

SEQ ID NO: 1476433 - DNA, 15 bp, Homo sapiens
agcttttcaggaaat

SEQ ID NO: 1476434 - DNA, 15 bp, Homo sapiens
gcttttcaggaaatt

SEQ ID NO: 1476435 - DNA, 15 bp, Homo sapiens
cttttcaggaaattc

SEQ ID NO: 1476436 - DNA, 15 bp, Homo sapiens
ttttcaggaaattct

SEQ ID NO: 1476437 - DNA, 15 bp, Homo sapiens
tttcaggaaattctg

SEQ ID NO: 1476438 - DNA, 15 bp, Homo sapiens
ttcaggaaattctga

SEQ ID NO: 1476439 - DNA, 15 bp, Homo sapiens
tcaggaaattctgat

SEQ ID NO: 1476440 - DNA, 15 bp, Homo sapiens
caggaaattctgatg

SEQ ID NO: 1476441 - DNA, 15 bp, Homo sapiens
aggaaattctgatgg

SEQ ID NO: 1476442 - DNA, 15 bp, Homo sapiens
ggaaattctgatggg

SEQ ID NO: 1476443 - DNA, 15 bp, Homo sapiens
gaaattctgatgggc

SEQ ID NO: 1476444 - DNA, 15 bp, Homo sapiens
aaattctgatgggca

SEQ ID NO: 1476445 - DNA, 15 bp, Homo sapiens
aattctgatgggcag

SEQ ID NO: 1476446 - DNA, 15 bp, Homo sapiens
attctgatgggcaga

SEQ ID NO: 1476447 - DNA, 15 bp, Homo sapiens
ttctgatgggcagac

SEQ ID NO: 1476448 - DNA, 15 bp, Homo sapiens
tctgatgggcagaca

SEQ ID NO: 1476449 - DNA, 15 bp, Homo sapiens
ctgatgggcagacag

SEQ ID NO: 1476450 - DNA, 15 bp, Homo sapiens
tgatgggcagacaga

SEQ ID NO: 1476451 - DNA, 15 bp, Homo sapiens
gatgggcagacagaa

SEQ ID NO: 1476452 - DNA, 15 bp, Homo sapiens
atgggcagacagaac

SEQ ID NO: 1476453 - DNA, 15 bp, Homo sapiens
tgggcagacagaacc

SEQ ID NO: 1476454 - DNA, 15 bp, Homo sapiens
gggcagacagaacca

SEQ ID NO: 1476455 - DNA, 15 bp, Homo sapiens
ggcagacagaaccaa

SEQ ID NO: 1476456 - DNA, 15 bp, Homo sapiens
gcagacagaaccaac

SEQ ID NO: 1476457 - DNA, 15 bp, Homo sapiens
cagacagaaccaacg

SEQ ID NO: 1476458 - DNA, 15 bp, Homo sapiens
agacagaaccaacgt

SEQ ID NO: 1476459 - DNA, 15 bp, Homo sapiens
gacagaaccaacgtg

SEQ ID NO: 1476460 - DNA, 15 bp, Homo sapiens
acagaaccaacgtga

SEQ ID NO: 1476461 - DNA, 15 bp, Homo sapiens
cagaaccaacgtgag

SEQ ID NO: 1476462 - DNA, 15 bp, Homo sapiens
agaaccaacgtgagt

SEQ ID NO: 1476463 - DNA, 15 bp, Homo sapiens
gaaccaacgtgagtc

SEQ ID NO: 1476464 - DNA, 15 bp, Homo sapiens
aaccaacgtgagtct

SEQ ID NO: 1476465 - DNA, 15 bp, Homo sapiens
accaacgtgagtcta

SEQ ID NO: 1476466 - DNA, 15 bp, Homo sapiens
ccaacgtgagtctat

SEQ ID NO: 1476467 - DNA, 15 bp, Homo sapiens
caacgtgagtctatg

SEQ ID NO: 1476468 - DNA, 15 bp, Homo sapiens
aacgtgagtctatgt

SEQ ID NO: 1476469 - DNA, 15 bp, Homo sapiens
acgtgagtctatgtc

SEQ ID NO: 1476470 - DNA, 15 bp, Homo sapiens
cgtgagtctatgtca

SEQ ID NO: 1476471 - DNA, 15 bp, Homo sapiens
gtgagtctatgtcat

SEQ ID NO: 1476472 - DNA, 15 bp, Homo sapiens
tgagtctatgtcatt

SEQ ID NO: 1476473 - DNA, 15 bp, Homo sapiens
gagtctatgtcattt

SEQ ID NO: 1476474 - DNA, 15 bp, Homo sapiens
agtctatgtcatttt

SEQ ID NO: 1476475 - DNA, 15 bp, Homo sapiens
gtctatgtcattttg

SEQ ID NO: 1476476 - DNA, 15 bp, Homo sapiens
tctatgtcattttga

SEQ ID NO: 1476477 - DNA, 15 bp, Homo sapiens
ctatgtcattttgac

SEQ ID NO: 1476478 - DNA, 15 bp, Homo sapiens
tatgtcattttgact

SEQ ID NO: 1476479 - DNA, 15 bp, Homo sapiens
atgtcattttgactc

SEQ ID NO: 1476480 - DNA, 15 bp, Homo sapiens
tgtcattttgactct

SEQ ID NO: 1476481 - DNA, 15 bp, Homo sapiens
gtcattttgactctc

SEQ ID NO: 1476482 - DNA, 15 bp, Homo sapiens
tcattttgactctca

SEQ ID NO: 1476483 - DNA, 15 bp, Homo sapiens
cattttgactctcat

SEQ ID NO: 1476484 - DNA, 15 bp, Homo sapiens
attttgactctcatg

SEQ ID NO: 1476485 - DNA, 15 bp, Homo sapiens
ttttgactctcatgt

SEQ ID NO: 1476486 - DNA, 15 bp, Homo sapiens
tttgactctcatgtt

SEQ ID NO: 1476487 - DNA, 15 bp, Homo sapiens
ttgactctcatgttc

SEQ ID NO: 1476488 - DNA, 15 bp, Homo sapiens
tgactctcatgttct

SEQ ID NO: 1476489 - DNA, 15 bp, Homo sapiens
gactctcatgttcta

SEQ ID NO: 1476490 - DNA, 15 bp, Homo sapiens
actctcatgttctat

SEQ ID NO: 1476491 - DNA, 15 bp, Homo sapiens
ctctcatgttctata

SEQ ID NO: 1476492 - DNA, 15 bp, Homo sapiens
tctcatgttctatat

SEQ ID NO: 1476493 - DNA, 15 bp, Homo sapiens
ctcatgttctatatg

SEQ ID NO: 1476494 - DNA, 15 bp, Homo sapiens
tcatgttctatatgg

SEQ ID NO: 1476495 - DNA, 15 bp, Homo sapiens
catgttctatatggg

SEQ ID NO: 1476496 - DNA, 15 bp, Homo sapiens
atgttctatatgggc

SEQ ID NO: 1476497 - DNA, 15 bp, Homo sapiens
tgttctatatgggct

SEQ ID NO: 1476498 - DNA, 15 bp, Homo sapiens
gttctatatgggctg

SEQ ID NO: 1476499 - DNA, 15 bp, Homo sapiens
ttctatatgggctgc

SEQ ID NO: 1476500 - DNA, 15 bp, Homo sapiens
tctatatgggctgct

SEQ ID NO: 1476501 - DNA, 15 bp, Homo sapiens
ctatatgggctgcta

SEQ ID NO: 1476502 - DNA, 15 bp, Homo sapiens
tatatgggctgctaa

SEQ ID NO: 1476503 - DNA, 15 bp, Homo sapiens
atatgggctgctaaa

SEQ ID NO: 1476504 - DNA, 15 bp, Homo sapiens
tatgggctgctaaat

SEQ ID NO: 1476505 - DNA, 15 bp, Homo sapiens
atgggctgctaaata

SEQ ID NO: 1476506 - DNA, 15 bp, Homo sapiens
tgggctgctaaataa

SEQ ID NO: 1476507 - DNA, 15 bp, Homo sapiens
gggctgctaaataaa

SEQ ID NO: 1476508 - DNA, 15 bp, Homo sapiens
ggctgctaaataaaa

SEQ ID NO: 1476509 - DNA, 15 bp, Homo sapiens
gctgctaaataaaaa

SEQ ID NO: 1476510 - DNA, 15 bp, Homo sapiens
ctgctaaataaaaac

SEQ ID NO: 1476511 - DNA, 15 bp, Homo sapiens
tgctaaataaaaact

SEQ ID NO: 1476512 - DNA, 15 bp, Homo sapiens
gctaaataaaaactt

SEQ ID NO: 1476513 - DNA, 15 bp, Homo sapiens
ctaaataaaaacttt

SEQ ID NO: 1476514 - DNA, 15 bp, Homo sapiens
taaataaaaactttg

SEQ ID NO: 1476515 - DNA, 15 bp, Homo sapiens
aaataaaaactttga

SEQ ID NO: 1476516 - DNA, 15 bp, Homo sapiens
aataaaaactttgaa

SEQ ID NO: 1476517 - DNA, 15 bp, Homo sapiens
ataaaaactttgaaa

SEQ ID NO: 1476518 - DNA, 15 bp, Homo sapiens
taaaaactttgaaag

SEQ ID NO: 1476519 - DNA, 15 bp, Homo sapiens
aaaaactttgaaagt

SEQ ID NO: 1476520 - DNA, 15 bp, Homo sapiens
aaaactttgaaagtc

SEQ ID NO: 1476521 - DNA, 15 bp, Homo sapiens
aaactttgaaagtct

SEQ ID NO: 1476522 - DNA, 15 bp, Homo sapiens
aactttgaaagtctt

SEQ ID NO: 1476523 - DNA, 15 bp, Homo sapiens
actttgaaagtcttt

SEQ ID NO: 1476524 - DNA, 15 bp, Homo sapiens
ctttgaaagtctttc

SEQ ID NO: 1476525 - DNA, 15 bp, Homo sapiens
tttgaaagtctttca

SEQ ID NO: 1476526 - DNA, 15 bp, Homo sapiens
ttgaaagtctttcat

SEQ ID NO: 1476527 - DNA, 15 bp, Homo sapiens
tgaaagtctttcatg

SEQ ID NO: 1476528 - DNA, 15 bp, Homo sapiens
gaaagtctttcatgt

SEQ ID NO: 1476529 - DNA, 15 bp, Homo sapiens
aaagtctttcatgtg

SEQ ID NO: 1476530 - DNA, 15 bp, Homo sapiens
aagtctttcatgtga

SEQ ID NO: 1476531 - DNA, 15 bp, Homo sapiens
agtctttcatgtgac

SEQ ID NO: 1476532 - DNA, 15 bp, Homo sapiens
gtctttcatgtgaca

SEQ ID NO: 1476533 - DNA, 15 bp, Homo sapiens
tctttcatgtgacaa

SEQ ID NO: 1476534 - DNA, 15 bp, Homo sapiens
ctttcatgtgacaaa

SEQ ID NO: 1476535 - DNA, 15 bp, Homo sapiens
tttcatgtgacaaat

SEQ ID NO: 1476536 - DNA, 15 bp, Homo sapiens
ttcatgtgacaaata

SEQ ID NO: 1476537 - DNA, 15 bp, Homo sapiens
tcatgtgacaaatag

SEQ ID NO: 1476538 - DNA, 15 bp, Homo sapiens
catgtgacaaatagt

SEQ ID NO: 1476539 - DNA, 15 bp, Homo sapiens
atgtgacaaatagtt

SEQ ID NO: 1476540 - DNA, 15 bp, Homo sapiens
tgtgacaaatagttt

SEQ ID NO: 1476541 - DNA, 15 bp, Homo sapiens
gtgacaaatagtttt

SEQ ID NO: 1476542 - DNA, 15 bp, Homo sapiens
tgacaaatagttttg

SEQ ID NO: 1476543 - DNA, 15 bp, Homo sapiens
gacaaatagttttgg

SEQ ID NO: 1476544 - DNA, 15 bp, Homo sapiens
acaaatagttttgga

SEQ ID NO: 1476545 - DNA, 15 bp, Homo sapiens
caaatagttttggag

SEQ ID NO: 1476546 - DNA, 15 bp, Homo sapiens
aaatagttttggagt

SEQ ID NO: 1476547 - DNA, 15 bp, Homo sapiens
aatagttttggagtg

SEQ ID NO: 1476548 - DNA, 15 bp, Homo sapiens
atagttttggagtgc

SEQ ID NO: 1476549 - DNA, 15 bp, Homo sapiens
tagttttggagtgca

SEQ ID NO: 1476550 - DNA, 15 bp, Homo sapiens
agttttggagtgcat

SEQ ID NO: 1476551 - DNA, 15 bp, Homo sapiens
gttttggagtgcata

SEQ ID NO: 1476552 - DNA, 15 bp, Homo sapiens
ttttggagtgcatac

SEQ ID NO: 1476553 - DNA, 15 bp, Homo sapiens
tttggagtgcatact

SEQ ID NO: 1476554 - DNA, 15 bp, Homo sapiens
ttggagtgcatactc

SEQ ID NO: 1476555 - DNA, 15 bp, Homo sapiens
tggagtgcatactct

SEQ ID NO: 1476556 - DNA, 15 bp, Homo sapiens
ggagtgcatactctg

SEQ ID NO: 1476557 - DNA, 15 bp, Homo sapiens
gagtgcatactctgc

SEQ ID NO: 1476558 - DNA, 15 bp, Homo sapiens
agtgcatactctgcc

SEQ ID NO: 1476559 - DNA, 15 bp, Homo sapiens
gtgcatactctgcca

SEQ ID NO: 1476560 - DNA, 15 bp, Homo sapiens
tgcatactctgccag

SEQ ID NO: 1476561 - DNA, 15 bp, Homo sapiens
gcatactctgccagg

SEQ ID NO: 1476562 - DNA, 15 bp, Homo sapiens
catactctgccaggc

SEQ ID NO: 1476563 - DNA, 15 bp, Homo sapiens
atactctgccaggca

SEQ ID NO: 1476564 - DNA, 15 bp, Homo sapiens
tactctgccaggcat

SEQ ID NO: 1476565 - DNA, 15 bp, Homo sapiens
actctgccaggcatt

SEQ ID NO: 1476566 - DNA, 15 bp, Homo sapiens
ctctgccaggcattg

SEQ ID NO: 1476567 - DNA, 15 bp, Homo sapiens
tctgccaggcattgt

SEQ ID NO: 1476568 - DNA, 15 bp, Homo sapiens
ctgccaggcattgtg

SEQ ID NO: 1476569 - DNA, 15 bp, Homo sapiens
tgccaggcattgtgc

SEQ ID NO: 1476570 - DNA, 15 bp, Homo sapiens
gccaggcattgtgct

SEQ ID NO: 1476571 - DNA, 15 bp, Homo sapiens
ccaggcattgtgcta

SEQ ID NO: 1476572 - DNA, 15 bp, Homo sapiens
caggcattgtgctaa

SEQ ID NO: 1476573 - DNA, 15 bp, Homo sapiens
aggcattgtgctaag

SEQ ID NO: 1476574 - DNA, 15 bp, Homo sapiens
ggcattgtgctaagt

SEQ ID NO: 1476575 - DNA, 15 bp, Homo sapiens
gcattgtgctaagtc

SEQ ID NO: 1476576 - DNA, 15 bp, Homo sapiens
cattgtgctaagtcc

SEQ ID NO: 1476577 - DNA, 15 bp, Homo sapiens
attgtgctaagtcct

SEQ ID NO: 1476578 - DNA, 15 bp, Homo sapiens
ttgtgctaagtcctt

SEQ ID NO: 1476579 - DNA, 15 bp, Homo sapiens
tgtgctaagtccttg

SEQ ID NO: 1476580 - DNA, 15 bp, Homo sapiens
gtgctaagtccttgg

SEQ ID NO: 1476581 - DNA, 15 bp, Homo sapiens
tgctaagtccttggg

SEQ ID NO: 1476582 - DNA, 15 bp, Homo sapiens
gctaagtccttgggg

SEQ ID NO: 1476583 - DNA, 15 bp, Homo sapiens
ctaagtccttgggga

SEQ ID NO: 1476584 - DNA, 15 bp, Homo sapiens
taagtccttggggac

SEQ ID NO: 1476585 - DNA, 15 bp, Homo sapiens
aagtccttggggaca

SEQ ID NO: 1476586 - DNA, 15 bp, Homo sapiens
agtccttggggacac

SEQ ID NO: 1476587 - DNA, 15 bp, Homo sapiens
gtccttggggacaca

SEQ ID NO: 1476588 - DNA, 15 bp, Homo sapiens
tccttggggacacag

SEQ ID NO: 1476589 - DNA, 15 bp, Homo sapiens
ccttggggacacagg

SEQ ID NO: 1476590 - DNA, 15 bp, Homo sapiens
cttggggacacaggt

SEQ ID NO: 1476591 - DNA, 15 bp, Homo sapiens
ttggggacacaggtg

SEQ ID NO: 1476592 - DNA, 15 bp, Homo sapiens
tggggacacaggtga

SEQ ID NO: 1476593 - DNA, 15 bp, Homo sapiens
ggggacacaggtgaa

SEQ ID NO: 1476594 - DNA, 15 bp, Homo sapiens
gggacacaggtgaac

SEQ ID NO: 1476595 - DNA, 15 bp, Homo sapiens
ggacacaggtgaaca

SEQ ID NO: 1476596 - DNA, 15 bp, Homo sapiens
gacacaggtgaacaa

SEQ ID NO: 1476597 - DNA, 15 bp, Homo sapiens
acacaggtgaacaaa

SEQ ID NO: 1476598 - DNA, 15 bp, Homo sapiens
cacaggtgaacaaaa

SEQ ID NO: 1476599 - DNA, 15 bp, Homo sapiens
acaggtgaacaaaac

SEQ ID NO: 1476600 - DNA, 15 bp, Homo sapiens
caggtgaacaaaaca

SEQ ID NO: 1476601 - DNA, 15 bp, Homo sapiens
aggtgaacaaaacag

SEQ ID NO: 1476602 - DNA, 15 bp, Homo sapiens
ggtgaacaaaacaga

SEQ ID NO: 1476603 - DNA, 15 bp, Homo sapiens
gtgaacaaaacagag

SEQ ID NO: 1476604 - DNA, 15 bp, Homo sapiens
tgaacaaaacagagg

SEQ ID NO: 1476605 - DNA, 15 bp, Homo sapiens
gaacaaaacagagga

SEQ ID NO: 1476606 - DNA, 15 bp, Homo sapiens
aacaaaacagaggaa

SEQ ID NO: 1476607 - DNA, 15 bp, Homo sapiens
acaaaacagaggaag

SEQ ID NO: 1476608 - DNA, 15 bp, Homo sapiens
caaaacagaggaaga

SEQ ID NO: 1476609 - DNA, 15 bp, Homo sapiens
aaaacagaggaagac

SEQ ID NO: 1476610 - DNA, 15 bp, Homo sapiens
aaacagaggaagacc

SEQ ID NO: 1476611 - DNA, 15 bp, Homo sapiens
aacagaggaagaccc

SEQ ID NO: 1476612 - DNA, 15 bp, Homo sapiens
acagaggaagaccct

SEQ ID NO: 1476613 - DNA, 15 bp, Homo sapiens
cagaggaagaccctg

SEQ ID NO: 1476614 - DNA, 15 bp, Homo sapiens
agaggaagaccctgc

SEQ ID NO: 1476615 - DNA, 15 bp, Homo sapiens
gaggaagaccctgcc

SEQ ID NO: 1476616 - DNA, 15 bp, Homo sapiens
aggaagaccctgcct

SEQ ID NO: 1476617 - DNA, 15 bp, Homo sapiens
ggaagaccctgcctc

SEQ ID NO: 1476618 - DNA, 15 bp, Homo sapiens
agaccctgcctccat

SEQ ID NO: 1476619 - DNA, 15 bp, Homo sapiens
gaccctgcctccatt

SEQ ID NO: 1476620 - DNA, 15 bp, Homo sapiens
accctgcctccattg

SEQ ID NO: 1476621 - DNA, 15 bp, Homo sapiens
ccctgcctccattga

SEQ ID NO: 1476622 - DNA, 15 bp, Homo sapiens
cctgcctccattgag

SEQ ID NO: 1476623 - DNA, 15 bp, Homo sapiens
ctgcctccattgagt

SEQ ID NO: 1476624 - DNA, 15 bp, Homo sapiens
tgcctccattgagtg

SEQ ID NO: 1476625 - DNA, 15 bp, Homo sapiens
gcctccattgagtgt

SEQ ID NO: 1476626 - DNA, 15 bp, Homo sapiens
cctccattgagtgta

SEQ ID NO: 1476627 - DNA, 15 bp, Homo sapiens
ctccattgagtgtag

SEQ ID NO: 1476628 - DNA, 15 bp, Homo sapiens
tccattgagtgtagt

SEQ ID NO: 1476629 - DNA, 15 bp, Homo sapiens
ccattgagtgtagtc

SEQ ID NO: 1476630 - DNA, 15 bp, Homo sapiens
cattgagtgtagtcc

SEQ ID NO: 1476631 - DNA, 15 bp, Homo sapiens
attgagtgtagtcca

SEQ ID NO: 1476632 - DNA, 15 bp, Homo sapiens
ttgagtgtagtccaa

SEQ ID NO: 1476633 - DNA, 15 bp, Homo sapiens
tgagtgtagtccaat

SEQ ID NO: 1476634 - DNA, 15 bp, Homo sapiens
gagtgtagtccaatg

SEQ ID NO: 1476635 - DNA, 15 bp, Homo sapiens
agtgtagtccaatgg

SEQ ID NO: 1476636 - DNA, 15 bp, Homo sapiens
gtgtagtccaatggg

SEQ ID NO: 1476637 - DNA, 15 bp, Homo sapiens
tgtagtccaatggga

SEQ ID NO: 1476638 - DNA, 15 bp, Homo sapiens
gtagtccaatgggag

SEQ ID NO: 1476639 - DNA, 15 bp, Homo sapiens
tagtccaatgggaga

SEQ ID NO: 1476640 - DNA, 15 bp, Homo sapiens
agtccaatgggagag

SEQ ID NO: 1476641 - DNA, 15 bp, Homo sapiens
gtccaatgggagagc

SEQ ID NO: 1476642 - DNA, 15 bp, Homo sapiens
tccaatgggagagcg

SEQ ID NO: 1476643 - DNA, 15 bp, Homo sapiens
ccaatgggagagcga

SEQ ID NO: 1476644 - DNA, 15 bp, Homo sapiens
caatgggagagcgac

SEQ ID NO: 1476645 - DNA, 15 bp, Homo sapiens
aatgggagagcgaca

SEQ ID NO: 1476646 - DNA, 15 bp, Homo sapiens
atgggagagcgacac

SEQ ID NO: 1476647 - DNA, 15 bp, Homo sapiens
tgggagagcgacaca

SEQ ID NO: 1476648 - DNA, 15 bp, Homo sapiens
gggagagcgacacaa

SEQ ID NO: 1476649 - DNA, 15 bp, Homo sapiens
ggagagcgacacaaa

SEQ ID NO: 1476650 - DNA, 15 bp, Homo sapiens
gagagcgacacaaat

SEQ ID NO: 1476651 - DNA, 15 bp, Homo sapiens
agagcgacacaaatc

SEQ ID NO: 1476652 - DNA, 15 bp, Homo sapiens
gagcgacacaaatca

SEQ ID NO: 1476653 - DNA, 15 bp, Homo sapiens
agcgacacaaatcac

SEQ ID NO: 1476654 - DNA, 15 bp, Homo sapiens
gcgacacaaatcaca

SEQ ID NO: 1476655 - DNA, 15 bp, Homo sapiens
cgacacaaatcacac

SEQ ID NO: 1476656 - DNA, 15 bp, Homo sapiens
gacacaaatcacact

SEQ ID NO: 1476657 - DNA, 15 bp, Homo sapiens
acacaaatcacactt

SEQ ID NO: 1476658 - DNA, 15 bp, Homo sapiens
cacaaatcacacttt

SEQ ID NO: 1476659 - DNA, 15 bp, Homo sapiens
acaaatcacactttt

SEQ ID NO: 1476660 - DNA, 15 bp, Homo sapiens
caaatcacacttttg

SEQ ID NO: 1476661 - DNA, 15 bp, Homo sapiens
aaatcacacttttgc

SEQ ID NO: 1476662 - DNA, 15 bp, Homo sapiens
aatcacacttttgca

SEQ ID NO: 1476663 - DNA, 15 bp, Homo sapiens
atcacacttttgcat

SEQ ID NO: 1476664 - DNA, 15 bp, Homo sapiens
tcacacttttgcata

SEQ ID NO: 1476665 - DNA, 15 bp, Homo sapiens
cacacttttgcatag

SEQ ID NO: 1476666 - DNA, 15 bp, Homo sapiens
acacttttgcatagg

SEQ ID NO: 1476667 - DNA, 15 bp, Homo sapiens
cacttttgcataggt

SEQ ID NO: 1476668 - DNA, 15 bp, Homo sapiens
acttttgcataggtg

SEQ ID NO: 1476669 - DNA, 15 bp, Homo sapiens
cttttgcataggtga

SEQ ID NO: 1476670 - DNA, 15 bp, Homo sapiens
ttttgcataggtgaa

SEQ ID NO: 1476671 - DNA, 15 bp, Homo sapiens
tttgcataggtgaat

SEQ ID NO: 1476672 - DNA, 15 bp, Homo sapiens
ttgcataggtgaata

SEQ ID NO: 1476673 - DNA, 15 bp, Homo sapiens
tgcataggtgaatat

SEQ ID NO: 1476674 - DNA, 15 bp, Homo sapiens
gcataggtgaatatc

SEQ ID NO: 1476675 - DNA, 15 bp, Homo sapiens
cataggtgaatatct

SEQ ID NO: 1476676 - DNA, 15 bp, Homo sapiens
ataggtgaatatcta

SEQ ID NO: 1476677 - DNA, 15 bp, Homo sapiens
taggtgaatatctaa

SEQ ID NO: 1476678 - DNA, 15 bp, Homo sapiens
aggtgaatatctaat

SEQ ID NO: 1476679 - DNA, 15 bp, Homo sapiens
ggtgaatatctaatt

SEQ ID NO: 1476680 - DNA, 15 bp, Homo sapiens
gtgaatatctaatta

SEQ ID NO: 1476681 - DNA, 15 bp, Homo sapiens
tgaatatctaattat

SEQ ID NO: 1476682 - DNA, 15 bp, Homo sapiens
gaatatctaattata

SEQ ID NO: 1476683 - DNA, 15 bp, Homo sapiens
aatatctaattatac

SEQ ID NO: 1476684 - DNA, 15 bp, Homo sapiens
atatctaattataca

SEQ ID NO: 1476685 - DNA, 15 bp, Homo sapiens
tatctaattatacat

SEQ ID NO: 1476686 - DNA, 15 bp, Homo sapiens
atctaattatacatg

SEQ ID NO: 1476687 - DNA, 15 bp, Homo sapiens
tctaattatacatgt

SEQ ID NO: 1476688 - DNA, 15 bp, Homo sapiens
ctaattatacatgtg

SEQ ID NO: 1476689 - DNA, 15 bp, Homo sapiens
taattatacatgtgg

SEQ ID NO: 1476690 - DNA, 15 bp, Homo sapiens
aattatacatgtggt

SEQ ID NO: 1476691 - DNA, 15 bp, Homo sapiens
attatacatgtggta

SEQ ID NO: 1476692 - DNA, 15 bp, Homo sapiens
ttatacatgtggtag

SEQ ID NO: 1476693 - DNA, 15 bp, Homo sapiens
tatacatgtggtagg

SEQ ID NO: 1476694 - DNA, 15 bp, Homo sapiens
atacatgtggtaggt

SEQ ID NO: 1476695 - DNA, 15 bp, Homo sapiens
tacatgtggtaggta

SEQ ID NO: 1476696 - DNA, 15 bp, Homo sapiens
acatgtggtaggtat

SEQ ID NO: 1476697 - DNA, 15 bp, Homo sapiens
catgtggtaggtatt

SEQ ID NO: 1476698 - DNA, 15 bp, Homo sapiens
atgtggtaggtatta

SEQ ID NO: 1476699 - DNA, 15 bp, Homo sapiens
tgtggtaggtattat

SEQ ID NO: 1476700 - DNA, 15 bp, Homo sapiens
gtggtaggtattatg

SEQ ID NO: 1476701 - DNA, 15 bp, Homo sapiens
tggtaggtattatga

SEQ ID NO: 1476702 - DNA, 15 bp, Homo sapiens
ggtaggtattatgaa

SEQ ID NO: 1476703 - DNA, 15 bp, Homo sapiens
gtaggtattatgaag

SEQ ID NO: 1476704 - DNA, 15 bp, Homo sapiens
taggtattatgaaga

SEQ ID NO: 1476705 - DNA, 15 bp, Homo sapiens
aggtattatgaagaa

SEQ ID NO: 1476706 - DNA, 15 bp, Homo sapiens
ggtattatgaagaaa

SEQ ID NO: 1476707 - DNA, 15 bp, Homo sapiens
gtattatgaagaaaa

SEQ ID NO: 1476708 - DNA, 15 bp, Homo sapiens
tattatgaagaaaaa

SEQ ID NO: 1476709 - DNA, 15 bp, Homo sapiens
attatgaagaaaaac

SEQ ID NO: 1476710 - DNA, 15 bp, Homo sapiens
ttatgaagaaaaact

SEQ ID NO: 1476711 - DNA, 15 bp, Homo sapiens
tatgaagaaaaacta

SEQ ID NO: 1476712 - DNA, 15 bp, Homo sapiens
atgaagaaaaactag

SEQ ID NO: 1476713 - DNA, 15 bp, Homo sapiens
tgaagaaaaactaga

SEQ ID NO: 1476714 - DNA, 15 bp, Homo sapiens
gaagaaaaactagag

SEQ ID NO: 1476715 - DNA, 15 bp, Homo sapiens
aagaaaaactagagt

SEQ ID NO: 1476716 - DNA, 15 bp, Homo sapiens
agaaaaactagagtg

SEQ ID NO: 1476717 - DNA, 15 bp, Homo sapiens
gaaaaactagagtgc

SEQ ID NO: 1476718 - DNA, 15 bp, Homo sapiens
aaaaactagagtgct

SEQ ID NO: 1476719 - DNA, 15 bp, Homo sapiens
aaaactagagtgctc

SEQ ID NO: 1476720 - DNA, 15 bp, Homo sapiens
aaactagagtgctct

SEQ ID NO: 1476721 - DNA, 15 bp, Homo sapiens
aactagagtgctctg

SEQ ID NO: 1476722 - DNA, 15 bp, Homo sapiens
actagagtgctctga

SEQ ID NO: 1476723 - DNA, 15 bp, Homo sapiens
ctagagtgctctgag

SEQ ID NO: 1476724 - DNA, 15 bp, Homo sapiens
tagagtgctctgaga

SEQ ID NO: 1476725 - DNA, 15 bp, Homo sapiens
agagtgctctgagaa

SEQ ID NO: 1476726 - DNA, 15 bp, Homo sapiens
gagtgctctgagaaa

SEQ ID NO: 1476727 - DNA, 15 bp, Homo sapiens
gtgctctgagaaaga

SEQ ID NO: 1476728 - DNA, 15 bp, Homo sapiens
tgctctgagaaagac

SEQ ID NO: 1476729 - DNA, 15 bp, Homo sapiens
gctctgagaaagacg

SEQ ID NO: 1476730 - DNA, 15 bp, Homo sapiens
ctctgagaaagacgt

SEQ ID NO: 1476731 - DNA, 15 bp, Homo sapiens
tctgagaaagacgtt

SEQ ID NO: 1476732 - DNA, 15 bp, Homo sapiens
ctgagaaagacgtta

SEQ ID NO: 1476733 - DNA, 15 bp, Homo sapiens
tgagaaagacgttaa

SEQ ID NO: 1476734 - DNA, 15 bp, Homo sapiens
gagaaagacgttaag

SEQ ID NO: 1476735 - DNA, 15 bp, Homo sapiens
agaaagacgttaagg

SEQ ID NO: 1476736 - DNA, 15 bp, Homo sapiens
gaaagacgttaaggc

SEQ ID NO: 1476737 - DNA, 15 bp, Homo sapiens
aaagacgttaaggcc

SEQ ID NO: 1476738 - DNA, 15 bp, Homo sapiens
aagacgttaaggccg

SEQ ID NO: 1476739 - DNA, 15 bp, Homo sapiens
agacgttaaggccgg

SEQ ID NO: 1476740 - DNA, 15 bp, Homo sapiens
gacgttaaggccgga

SEQ ID NO: 1476741 - DNA, 15 bp, Homo sapiens
acgttaaggccggat

SEQ ID NO: 1476742 - DNA, 15 bp, Homo sapiens
cgttaaggccggata

SEQ ID NO: 1476743 - DNA, 15 bp, Homo sapiens
gttaaggccggatag

SEQ ID NO: 1476744 - DNA, 15 bp, Homo sapiens
ttaaggccggataga

SEQ ID NO: 1476745 - DNA, 15 bp, Homo sapiens
taaggccggatagat

SEQ ID NO: 1476746 - DNA, 15 bp, Homo sapiens
aaggccggatagata

SEQ ID NO: 1476747 - DNA, 15 bp, Homo sapiens
aggccggatagatac

SEQ ID NO: 1476748 - DNA, 15 bp, Homo sapiens
ggccggatagataca

SEQ ID NO: 1476749 - DNA, 15 bp, Homo sapiens
gccggatagatacaa

SEQ ID NO: 1476750 - DNA, 15 bp, Homo sapiens
ccggatagatacaag

SEQ ID NO: 1476751 - DNA, 15 bp, Homo sapiens
cggatagatacaagc

SEQ ID NO: 1476752 - DNA, 15 bp, Homo sapiens
ggatagatacaagcc

SEQ ID NO: 1476753 - DNA, 15 bp, Homo sapiens
gatagatacaagcct

SEQ ID NO: 1476754 - DNA, 15 bp, Homo sapiens
atagatacaagcctg

SEQ ID NO: 1476755 - DNA, 15 bp, Homo sapiens
tagatacaagcctgg

SEQ ID NO: 1476756 - DNA, 15 bp, Homo sapiens
agatacaagcctggg

SEQ ID NO: 1476757 - DNA, 15 bp, Homo sapiens
gatacaagcctggga

SEQ ID NO: 1476758 - DNA, 15 bp, Homo sapiens
atacaagcctgggat

SEQ ID NO: 1476759 - DNA, 15 bp, Homo sapiens
tacaagcctgggatt

SEQ ID NO: 1476760 - DNA, 15 bp, Homo sapiens
acaagcctgggattg

SEQ ID NO: 1476761 - DNA, 15 bp, Homo sapiens
caagcctgggattgg

SEQ ID NO: 1476762 - DNA, 15 bp, Homo sapiens
aagcctgggattgga

SEQ ID NO: 1476763 - DNA, 15 bp, Homo sapiens
agcctgggattggag

SEQ ID NO: 1476764 - DNA, 15 bp, Homo sapiens
gcctgggattggaga

SEQ ID NO: 1476765 - DNA, 15 bp, Homo sapiens
cctgggattggagaa

SEQ ID NO: 1476766 - DNA, 15 bp, Homo sapiens
ctgggattggagaag

SEQ ID NO: 1476767 - DNA, 15 bp, Homo sapiens
tgggattggagaagt

SEQ ID NO: 1476768 - DNA, 15 bp, Homo sapiens
gggattggagaagtc

SEQ ID NO: 1476769 - DNA, 15 bp, Homo sapiens
ggattggagaagtca

SEQ ID NO: 1476770 - DNA, 15 bp, Homo sapiens
gattggagaagtcaa

SEQ ID NO: 1476771 - DNA, 15 bp, Homo sapiens
attggagaagtcaag

SEQ ID NO: 1476772 - DNA, 15 bp, Homo sapiens
ttggagaagtcaagg

SEQ ID NO: 1476773 - DNA, 15 bp, Homo sapiens
tggagaagtcaagga

SEQ ID NO: 1476774 - DNA, 15 bp, Homo sapiens
ggagaagtcaaggaa

SEQ ID NO: 1476775 - DNA, 15 bp, Homo sapiens
gagaagtcaaggaaa

SEQ ID NO: 1476776 - DNA, 15 bp, Homo sapiens
agaagtcaaggaaag

SEQ ID NO: 1476777 - DNA, 15 bp, Homo sapiens
gaagtcaaggaaagc

SEQ ID NO: 1476778 - DNA, 15 bp, Homo sapiens
aagtcaaggaaagcc

SEQ ID NO: 1476779 - DNA, 15 bp, Homo sapiens
agtcaaggaaagccc

SEQ ID NO: 1476780 - DNA, 15 bp, Homo sapiens
gtcaaggaaagcccc

SEQ ID NO: 1476781 - DNA, 15 bp, Homo sapiens
tcaaggaaagcccca

SEQ ID NO: 1476782 - DNA, 15 bp, Homo sapiens
caaggaaagccccac

SEQ ID NO: 1476783 - DNA, 15 bp, Homo sapiens
aaggaaagccccact

SEQ ID NO: 1476784 - DNA, 15 bp, Homo sapiens
aggaaagccccactt

SEQ ID NO: 1476785 - DNA, 15 bp, Homo sapiens
ggaaagccccacttt

SEQ ID NO: 1476786 - DNA, 15 bp, Homo sapiens
gaaagccccactttt

SEQ ID NO: 1476787 - DNA, 15 bp, Homo sapiens
aaagccccacttttt

SEQ ID NO: 1476788 - DNA, 15 bp, Homo sapiens
aagccccactttttt

SEQ ID NO: 1476789 - DNA, 15 bp, Homo sapiens
agccccactttttta

SEQ ID NO: 1476790 - DNA, 15 bp, Homo sapiens
gccccacttttttac

SEQ ID NO: 1476791 - DNA, 15 bp, Homo sapiens
ccccacttttttaca

SEQ ID NO: 1476792 - DNA, 15 bp, Homo sapiens
cccacttttttacat

SEQ ID NO: 1476793 - DNA, 15 bp, Homo sapiens
ccacttttttacatg

SEQ ID NO: 1476794 - DNA, 15 bp, Homo sapiens
cacttttttacatga

SEQ ID NO: 1476795 - DNA, 15 bp, Homo sapiens
acttttttacatgac

SEQ ID NO: 1476796 - DNA, 15 bp, Homo sapiens
cttttttacatgaca

SEQ ID NO: 1476797 - DNA, 15 bp, Homo sapiens
ttttttacatgacat

SEQ ID NO: 1476798 - DNA, 15 bp, Homo sapiens
tttttacatgacatt

SEQ ID NO: 1476799 - DNA, 15 bp, Homo sapiens
ttttacatgacattt

SEQ ID NO: 1476800 - DNA, 15 bp, Homo sapiens
tttacatgacattta

SEQ ID NO: 1476801 - DNA, 15 bp, Homo sapiens
ttacatgacatttac

SEQ ID NO: 1476802 - DNA, 15 bp, Homo sapiens
tacatgacatttaca

SEQ ID NO: 1476803 - DNA, 15 bp, Homo sapiens
acatgacatttacac

SEQ ID NO: 1476804 - DNA, 15 bp, Homo sapiens
catgacatttacaca

SEQ ID NO: 1476805 - DNA, 15 bp, Homo sapiens
atgacatttacacaa

SEQ ID NO: 1476806 - DNA, 15 bp, Homo sapiens
tgacatttacacaaa

SEQ ID NO: 1476807 - DNA, 15 bp, Homo sapiens
gacatttacacaaaa

SEQ ID NO: 1476808 - DNA, 15 bp, Homo sapiens
acatttacacaaaaa

SEQ ID NO: 1476809 - DNA, 15 bp, Homo sapiens
catttacacaaaaat

SEQ ID NO: 1476810 - DNA, 15 bp, Homo sapiens
atttacacaaaaatg

SEQ ID NO: 1476811 - DNA, 15 bp, Homo sapiens
tttacacaaaaatga

SEQ ID NO: 1476812 - DNA, 15 bp, Homo sapiens
ttacacaaaaatgat

SEQ ID NO: 1476813 - DNA, 15 bp, Homo sapiens
tacacaaaaatgatt

SEQ ID NO: 1476814 - DNA, 15 bp, Homo sapiens
acacaaaaatgatta

SEQ ID NO: 1476815 - DNA, 15 bp, Homo sapiens
cacaaaaatgattaa

SEQ ID NO: 1476816 - DNA, 15 bp, Homo sapiens
acaaaaatgattaag

SEQ ID NO: 1476817 - DNA, 15 bp, Homo sapiens
caaaaatgattaaga

SEQ ID NO: 1476818 - DNA, 15 bp, Homo sapiens
aaaaatgattaagat

SEQ ID NO: 1476819 - DNA, 15 bp, Homo sapiens
aaaatgattaagatg

SEQ ID NO: 1476820 - DNA, 15 bp, Homo sapiens
aaatgattaagatga

SEQ ID NO: 1476821 - DNA, 15 bp, Homo sapiens
aatgattaagatgag

SEQ ID NO: 1476822 - DNA, 15 bp, Homo sapiens
atgattaagatgaga

SEQ ID NO: 1476823 - DNA, 15 bp, Homo sapiens
tgattaagatgagag

SEQ ID NO: 1476824 - DNA, 15 bp, Homo sapiens
gattaagatgagagg

SEQ ID NO: 1476825 - DNA, 15 bp, Homo sapiens
attaagatgagagga

SEQ ID NO: 1476826 - DNA, 15 bp, Homo sapiens
ttaagatgagaggaa

SEQ ID NO: 1476827 - DNA, 15 bp, Homo sapiens
taagatgagaggaat

SEQ ID NO: 1476828 - DNA, 15 bp, Homo sapiens
aagatgagaggaata

SEQ ID NO: 1476829 - DNA, 15 bp, Homo sapiens
agatgagaggaatat

SEQ ID NO: 1476830 - DNA, 15 bp, Homo sapiens
gatgagaggaatatg

SEQ ID NO: 1476831 - DNA, 15 bp, Homo sapiens
atgagaggaatatgc

SEQ ID NO: 1476832 - DNA, 15 bp, Homo sapiens
tgagaggaatatgct

SEQ ID NO: 1476833 - DNA, 15 bp, Homo sapiens
gagaggaatatgctt

SEQ ID NO: 1476834 - DNA, 15 bp, Homo sapiens
agaggaatatgcttc

SEQ ID NO: 1476835 - DNA, 15 bp, Homo sapiens
gaggaatatgcttcg

SEQ ID NO: 1476836 - DNA, 15 bp, Homo sapiens
aggaatatgcttcgt

SEQ ID NO: 1476837 - DNA, 15 bp, Homo sapiens
ggaatatgcttcgtt

SEQ ID NO: 1476838 - DNA, 15 bp, Homo sapiens
gaatatgcttcgttg

SEQ ID NO: 1476839 - DNA, 15 bp, Homo sapiens
aatatgcttcgttgc

SEQ ID NO: 1476840 - DNA, 15 bp, Homo sapiens
atatgcttcgttgct

SEQ ID NO: 1476841 - DNA, 15 bp, Homo sapiens
tatgcttcgttgctt

SEQ ID NO: 1476842 - DNA, 15 bp, Homo sapiens
atgcttcgttgcttc

SEQ ID NO: 1476843 - DNA, 15 bp, Homo sapiens
tgcttcgttgcttcc

SEQ ID NO: 1476844 - DNA, 15 bp, Homo sapiens
gcttcgttgcttcca

SEQ ID NO: 1476845 - DNA, 15 bp, Homo sapiens
cttcgttgcttccaa

SEQ ID NO: 1476846 - DNA, 15 bp, Homo sapiens
ttcgttgcttccaac

SEQ ID NO: 1476847 - DNA, 15 bp, Homo sapiens
tcgttgcttccaaca

SEQ ID NO: 1476848 - DNA, 15 bp, Homo sapiens
cgttgcttccaacac

SEQ ID NO: 1476849 - DNA, 15 bp, Homo sapiens
gttgcttccaacaca

SEQ ID NO: 1476850 - DNA, 15 bp, Homo sapiens
ttgcttccaacacat

SEQ ID NO: 1476851 - DNA, 15 bp, Homo sapiens
tgcttccaacacata

SEQ ID NO: 1476852 - DNA, 15 bp, Homo sapiens
gcttccaacacataa

SEQ ID NO: 1476853 - DNA, 15 bp, Homo sapiens
cttccaacacataac

SEQ ID NO: 1476854 - DNA, 15 bp, Homo sapiens
ttccaacacataacc

SEQ ID NO: 1476855 - DNA, 15 bp, Homo sapiens
tccaacacataacca

SEQ ID NO: 1476856 - DNA, 15 bp, Homo sapiens
ccaacacataaccaa

SEQ ID NO: 1476857 - DNA, 15 bp, Homo sapiens
caacacataaccaaa

SEQ ID NO: 1476858 - DNA, 15 bp, Homo sapiens
aacacataaccaaag

SEQ ID NO: 1476859 - DNA, 15 bp, Homo sapiens
acacataaccaaagc

SEQ ID NO: 1476860 - DNA, 15 bp, Homo sapiens
cacataaccaaagca

SEQ ID NO: 1476861 - DNA, 15 bp, Homo sapiens
acataaccaaagcaa

SEQ ID NO: 1476862 - DNA, 15 bp, Homo sapiens
cataaccaaagcaag

SEQ ID NO: 1476863 - DNA, 15 bp, Homo sapiens
ataaccaaagcaagt

SEQ ID NO: 1476864 - DNA, 15 bp, Homo sapiens
taaccaaagcaagtt

SEQ ID NO: 1476865 - DNA, 15 bp, Homo sapiens
aaccaaagcaagtta

SEQ ID NO: 1476866 - DNA, 15 bp, Homo sapiens
accaaagcaagttat

SEQ ID NO: 1476867 - DNA, 15 bp, Homo sapiens
ccaaagcaagttatg

SEQ ID NO: 1476868 - DNA, 15 bp, Homo sapiens
caaagcaagttatga

SEQ ID NO: 1476869 - DNA, 15 bp, Homo sapiens
aaagcaagttatgat

SEQ ID NO: 1476870 - DNA, 15 bp, Homo sapiens
aagcaagttatgatt

SEQ ID NO: 1476871 - DNA, 15 bp, Homo sapiens
agcaagttatgattc

SEQ ID NO: 1476872 - DNA, 15 bp, Homo sapiens
gcaagttatgattct

SEQ ID NO: 1476873 - DNA, 15 bp, Homo sapiens
caagttatgattcta

SEQ ID NO: 1476874 - DNA, 15 bp, Homo sapiens
aagttatgattctaa

SEQ ID NO: 1476875 - DNA, 15 bp, Homo sapiens
agttatgattctaaa

SEQ ID NO: 1476876 - DNA, 15 bp, Homo sapiens
gttatgattctaaaa

SEQ ID NO: 1476877 - DNA, 15 bp, Homo sapiens
ttatgattctaaaaa

SEQ ID NO: 1476878 - DNA, 15 bp, Homo sapiens
tatgattctaaaaaa

SEQ ID NO: 1476879 - DNA, 15 bp, Homo sapiens
atgattctaaaaaac

SEQ ID NO: 1476880 - DNA, 15 bp, Homo sapiens
tgattctaaaaaacc

SEQ ID NO: 1476881 - DNA, 15 bp, Homo sapiens
gattctaaaaaacca

SEQ ID NO: 1476882 - DNA, 15 bp, Homo sapiens
attctaaaaaaccaa

SEQ ID NO: 1476883 - DNA, 15 bp, Homo sapiens
ttctaaaaaaccaac

SEQ ID NO: 1476884 - DNA, 15 bp, Homo sapiens
tctaaaaaaccaact

SEQ ID NO: 1476885 - DNA, 15 bp, Homo sapiens
ctaaaaaaccaacta

SEQ ID NO: 1476886 - DNA, 15 bp, Homo sapiens
taaaaaaccaactag

SEQ ID NO: 1476887 - DNA, 15 bp, Homo sapiens
aaaaaaccaactagt

SEQ ID NO: 1476888 - DNA, 15 bp, Homo sapiens
aaaaaccaactagtt

SEQ ID NO: 1476889 - DNA, 15 bp, Homo sapiens
aaaaccaactagtta

SEQ ID NO: 1476890 - DNA, 15 bp, Homo sapiens
aaaccaactagttac

SEQ ID NO: 1476891 - DNA, 15 bp, Homo sapiens
aaccaactagttacc

SEQ ID NO: 1476892 - DNA, 15 bp, Homo sapiens
accaactagttacca

SEQ ID NO: 1476893 - DNA, 15 bp, Homo sapiens
ccaactagttaccaa

SEQ ID NO: 1476894 - DNA, 15 bp, Homo sapiens
caactagttaccaaa

SEQ ID NO: 1476895 - DNA, 15 bp, Homo sapiens
aactagttaccaaaa

SEQ ID NO: 1476896 - DNA, 15 bp, Homo sapiens
actagttaccaaaaa

SEQ ID NO: 1476897 - DNA, 15 bp, Homo sapiens
ctagttaccaaaaaa

SEQ ID NO: 1476898 - DNA, 15 bp, Homo sapiens
tagttaccaaaaaag

SEQ ID NO: 1476899 - DNA, 15 bp, Homo sapiens
agttaccaaaaaaga

SEQ ID NO: 1476900 - DNA, 15 bp, Homo sapiens
gttaccaaaaaagaa

SEQ ID NO: 1476901 - DNA, 15 bp, Homo sapiens
ttaccaaaaaagaaa

SEQ ID NO: 1476902 - DNA, 15 bp, Homo sapiens
taccaaaaaagaaag

SEQ ID NO: 1476903 - DNA, 15 bp, Homo sapiens
accaaaaaagaaaga

SEQ ID NO: 1476904 - DNA, 15 bp, Homo sapiens
ccaaaaaagaaagaa

SEQ ID NO: 1476905 - DNA, 15 bp, Homo sapiens
caaaaaagaaagaaa

SEQ ID NO: 1476906 - DNA, 15 bp, Homo sapiens
aaagaaagaaaaaag

SEQ ID NO: 1476907 - DNA, 15 bp, Homo sapiens
aagaaagaaaaaagt

SEQ ID NO: 1476908 - DNA, 15 bp, Homo sapiens
agaaagaaaaaagta

SEQ ID NO: 1476909 - DNA, 15 bp, Homo sapiens
gaaagaaaaaagtaa

SEQ ID NO: 1476910 - DNA, 15 bp, Homo sapiens
aaagaaaaaagtaaa

SEQ ID NO: 1476911 - DNA, 15 bp, Homo sapiens
agaaaaaagtaaatg

SEQ ID NO: 1476912 - DNA, 15 bp, Homo sapiens
gaaaaaagtaaatga

SEQ ID NO: 1476913 - DNA, 15 bp, Homo sapiens
aaaaaagtaaatgat

SEQ ID NO: 1476914 - DNA, 15 bp, Homo sapiens
aaaaagtaaatgatc

SEQ ID NO: 1476915 - DNA, 15 bp, Homo sapiens
aaaagtaaatgatct

SEQ ID NO: 1476916 - DNA, 15 bp, Homo sapiens
aaagtaaatgatctc

SEQ ID NO: 1476917 - DNA, 15 bp, Homo sapiens
aagtaaatgatctct

SEQ ID NO: 1476918 - DNA, 15 bp, Homo sapiens
agtaaatgatctctt

SEQ ID NO: 1476919 - DNA, 15 bp, Homo sapiens
gtaaatgatctcttg

SEQ ID NO: 1476920 - DNA, 15 bp, Homo sapiens
taaatgatctcttgg

SEQ ID NO: 1476921 - DNA, 15 bp, Homo sapiens
aaatgatctcttggg

SEQ ID NO: 1476922 - DNA, 15 bp, Homo sapiens
aatgatctcttgggc

SEQ ID NO: 1476923 - DNA, 15 bp, Homo sapiens
atgatctcttgggct

SEQ ID NO: 1476924 - DNA, 15 bp, Homo sapiens
tgatctcttgggctt

SEQ ID NO: 1476925 - DNA, 15 bp, Homo sapiens
gatctcttgggcttg

SEQ ID NO: 1476926 - DNA, 15 bp, Homo sapiens
atctcttgggcttga

SEQ ID NO: 1476927 - DNA, 15 bp, Homo sapiens
tctcttgggcttgac

SEQ ID NO: 1476928 - DNA, 15 bp, Homo sapiens
ctcttgggcttgaca

SEQ ID NO: 1476929 - DNA, 15 bp, Homo sapiens
tcttgggcttgacat

SEQ ID NO: 1476930 - DNA, 15 bp, Homo sapiens
cttgggcttgacatg

SEQ ID NO: 1476931 - DNA, 15 bp, Homo sapiens
ttgggcttgacatgc

SEQ ID NO: 1476932 - DNA, 15 bp, Homo sapiens
tgggcttgacatgcc

SEQ ID NO: 1476933 - DNA, 15 bp, Homo sapiens
gggcttgacatgccc

SEQ ID NO: 1476934 - DNA, 15 bp, Homo sapiens
ggcttgacatgccct

SEQ ID NO: 1476935 - DNA, 15 bp, Homo sapiens
gcttgacatgccctt

SEQ ID NO: 1476936 - DNA, 15 bp, Homo sapiens
cttgacatgcccttg

SEQ ID NO: 1476937 - DNA, 15 bp, Homo sapiens
ttgacatgcccttgt

SEQ ID NO: 1476938 - DNA, 15 bp, Homo sapiens
tgacatgcccttgtt

SEQ ID NO: 1476939 - DNA, 15 bp, Homo sapiens
gacatgcccttgttt

SEQ ID NO: 1476940 - DNA, 15 bp, Homo sapiens
acatgcccttgtttt

SEQ ID NO: 1476941 - DNA, 15 bp, Homo sapiens
catgcccttgttttg

SEQ ID NO: 1476942 - DNA, 15 bp, Homo sapiens
atgcccttgttttgc

SEQ ID NO: 1476943 - DNA, 15 bp, Homo sapiens
tgcccttgttttgcc

SEQ ID NO: 1476944 - DNA, 15 bp, Homo sapiens
gcccttgttttgccc

SEQ ID NO: 1476945 - DNA, 15 bp, Homo sapiens
cccttgttttgccca

SEQ ID NO: 1476946 - DNA, 15 bp, Homo sapiens
ccttgttttgcccag

SEQ ID NO: 1476947 - DNA, 15 bp, Homo sapiens
cttgttttgcccaga

SEQ ID NO: 1476948 - DNA, 15 bp, Homo sapiens
ttgttttgcccagag

SEQ ID NO: 1476949 - DNA, 15 bp, Homo sapiens
tgttttgcccagaga

SEQ ID NO: 1476950 - DNA, 15 bp, Homo sapiens
gttttgcccagagaa

SEQ ID NO: 1476951 - DNA, 15 bp, Homo sapiens
ttttgcccagagaag

SEQ ID NO: 1476952 - DNA, 15 bp, Homo sapiens
tttgcccagagaagc

SEQ ID NO: 1476953 - DNA, 15 bp, Homo sapiens
ttgcccagagaagca

SEQ ID NO: 1476954 - DNA, 15 bp, Homo sapiens
tgcccagagaagcac

SEQ ID NO: 1476955 - DNA, 15 bp, Homo sapiens
gcccagagaagcaca

SEQ ID NO: 1476956 - DNA, 15 bp, Homo sapiens
cccagagaagcacac

SEQ ID NO: 1476957 - DNA, 15 bp, Homo sapiens
ccagagaagcacact

SEQ ID NO: 1476958 - DNA, 15 bp, Homo sapiens
cagagaagcacactt

SEQ ID NO: 1476959 - DNA, 15 bp, Homo sapiens
agagaagcacacttc

SEQ ID NO: 1476960 - DNA, 15 bp, Homo sapiens
gagaagcacacttcc

SEQ ID NO: 1476961 - DNA, 15 bp, Homo sapiens
agaagcacacttcct

SEQ ID NO: 1476962 - DNA, 15 bp, Homo sapiens
gaagcacacttcctt

SEQ ID NO: 1476963 - DNA, 15 bp, Homo sapiens
aagcacacttccttt

SEQ ID NO: 1476964 - DNA, 15 bp, Homo sapiens
agcacacttcctttt

SEQ ID NO: 1476965 - DNA, 15 bp, Homo sapiens
gcacacttcctttta

SEQ ID NO: 1476966 - DNA, 15 bp, Homo sapiens
cacacttccttttac

SEQ ID NO: 1476967 - DNA, 15 bp, Homo sapiens
acacttccttttaca

SEQ ID NO: 1476968 - DNA, 15 bp, Homo sapiens
cacttccttttacaa

SEQ ID NO: 1476969 - DNA, 15 bp, Homo sapiens
acttccttttacaat

SEQ ID NO: 1476970 - DNA, 15 bp, Homo sapiens
cttccttttacaatt

SEQ ID NO: 1476971 - DNA, 15 bp, Homo sapiens
ttccttttacaattg

SEQ ID NO: 1476972 - DNA, 15 bp, Homo sapiens
tccttttacaattgt

SEQ ID NO: 1476973 - DNA, 15 bp, Homo sapiens
ccttttacaattgtt

SEQ ID NO: 1476974 - DNA, 15 bp, Homo sapiens
cttttacaattgttt

SEQ ID NO: 1476975 - DNA, 15 bp, Homo sapiens
ttttacaattgtttg

SEQ ID NO: 1476976 - DNA, 15 bp, Homo sapiens
tttacaattgtttgg

SEQ ID NO: 1476977 - DNA, 15 bp, Homo sapiens
ttacaattgtttggg

SEQ ID NO: 1476978 - DNA, 15 bp, Homo sapiens
tacaattgtttggga

SEQ ID NO: 1476979 - DNA, 15 bp, Homo sapiens
acaattgtttgggag

SEQ ID NO: 1476980 - DNA, 15 bp, Homo sapiens
caattgtttgggagg

SEQ ID NO: 1476981 - DNA, 15 bp, Homo sapiens
aattgtttgggaggt

SEQ ID NO: 1476982 - DNA, 15 bp, Homo sapiens
attgtttgggaggtt

SEQ ID NO: 1476983 - DNA, 15 bp, Homo sapiens
ttgtttgggaggttt

SEQ ID NO: 1476984 - DNA, 15 bp, Homo sapiens
tgtttgggaggtttg

SEQ ID NO: 1476985 - DNA, 15 bp, Homo sapiens
gtttgggaggtttgt

SEQ ID NO: 1476986 - DNA, 15 bp, Homo sapiens
tttgggaggtttgtg

SEQ ID NO: 1476987 - DNA, 15 bp, Homo sapiens
ttgggaggtttgtgg

SEQ ID NO: 1476988 - DNA, 15 bp, Homo sapiens
tgggaggtttgtggc

SEQ ID NO: 1476989 - DNA, 15 bp, Homo sapiens
gggaggtttgtggca

SEQ ID NO: 1476990 - DNA, 15 bp, Homo sapiens
ggaggtttgtggcag

SEQ ID NO: 1476991 - DNA, 15 bp, Homo sapiens
gaggtttgtggcaga

SEQ ID NO: 1476992 - DNA, 15 bp, Homo sapiens
aggtttgtggcagag

SEQ ID NO: 1476993 - DNA, 15 bp, Homo sapiens
ggtttgtggcagaga

SEQ ID NO: 1476994 - DNA, 15 bp, Homo sapiens
gtttgtggcagagaa

SEQ ID NO: 1476995 - DNA, 15 bp, Homo sapiens
tttgtggcagagaaa

SEQ ID NO: 1476996 - DNA, 15 bp, Homo sapiens
ttgtggcagagaaag

SEQ ID NO: 1476997 - DNA, 15 bp, Homo sapiens
tgtggcagagaaaga

SEQ ID NO: 1476998 - DNA, 15 bp, Homo sapiens
gtggcagagaaagag

SEQ ID NO: 1476999 - DNA, 15 bp, Homo sapiens
tggcagagaaagaga

SEQ ID NO: 1477000 - DNA, 15 bp, Homo sapiens
ggcagagaaagagag

SEQ ID NO: 1477001 - DNA, 15 bp, Homo sapiens
gcagagaaagagagg

SEQ ID NO: 1477002 - DNA, 15 bp, Homo sapiens
cagagaaagagagga

SEQ ID NO: 1477003 - DNA, 15 bp, Homo sapiens
agagaaagagaggaa

SEQ ID NO: 1477004 - DNA, 15 bp, Homo sapiens
gagaaagagaggaaa

SEQ ID NO: 1477005 - DNA, 15 bp, Homo sapiens
agaaagagaggaaaa

SEQ ID NO: 1477006 - DNA, 15 bp, Homo sapiens
gaaagagaggaaaaa

SEQ ID NO: 1477007 - DNA, 15 bp, Homo sapiens
aaagagaggaaaaat

SEQ ID NO: 1477008 - DNA, 15 bp, Homo sapiens
aagagaggaaaaatc

SEQ ID NO: 1477009 - DNA, 15 bp, Homo sapiens
agagaggaaaaatca

SEQ ID NO: 1477010 - DNA, 15 bp, Homo sapiens
gagaggaaaaatcag

SEQ ID NO: 1477011 - DNA, 15 bp, Homo sapiens
agaggaaaaatcaga

SEQ ID NO: 1477012 - DNA, 15 bp, Homo sapiens
gaggaaaaatcagat

SEQ ID NO: 1477013 - DNA, 15 bp, Homo sapiens
aggaaaaatcagatc

SEQ ID NO: 1477014 - DNA, 15 bp, Homo sapiens
ggaaaaatcagatct

SEQ ID NO: 1477015 - DNA, 15 bp, Homo sapiens
gaaaaatcagatcta

SEQ ID NO: 1477016 - DNA, 15 bp, Homo sapiens
aaaaatcagatctag

SEQ ID NO: 1477017 - DNA, 15 bp, Homo sapiens
aaaatcagatctaga

SEQ ID NO: 1477018 - DNA, 15 bp, Homo sapiens
aaatcagatctagag

SEQ ID NO: 1477019 - DNA, 15 bp, Homo sapiens
aatcagatctagaga

SEQ ID NO: 1477020 - DNA, 15 bp, Homo sapiens
atcagatctagagaa

SEQ ID NO: 1477021 - DNA, 15 bp, Homo sapiens
tcagatctagagaag

SEQ ID NO: 1477022 - DNA, 15 bp, Homo sapiens
cagatctagagaagt

SEQ ID NO: 1477023 - DNA, 15 bp, Homo sapiens
agatctagagaagta

SEQ ID NO: 1477024 - DNA, 15 bp, Homo sapiens
gatctagagaagtag

SEQ ID NO: 1477025 - DNA, 15 bp, Homo sapiens
atctagagaagtaga

SEQ ID NO: 1477026 - DNA, 15 bp, Homo sapiens
tctagagaagtagag

SEQ ID NO: 1477027 - DNA, 15 bp, Homo sapiens
ctagagaagtagagt

SEQ ID NO: 1477028 - DNA, 15 bp, Homo sapiens
tagagaagtagagtc

SEQ ID NO: 1477029 - DNA, 15 bp, Homo sapiens
agagaagtagagtcc

SEQ ID NO: 1477030 - DNA, 15 bp, Homo sapiens
gagaagtagagtcct

SEQ ID NO: 1477031 - DNA, 15 bp, Homo sapiens
agaagtagagtcctt

SEQ ID NO: 1477032 - DNA, 15 bp, Homo sapiens
gaagtagagtccttc

SEQ ID NO: 1477033 - DNA, 15 bp, Homo sapiens
aagtagagtccttca

SEQ ID NO: 1477034 - DNA, 15 bp, Homo sapiens
agtagagtccttcag

SEQ ID NO: 1477035 - DNA, 15 bp, Homo sapiens
gtagagtccttcagc

SEQ ID NO: 1477036 - DNA, 15 bp, Homo sapiens
tagagtccttcagcg

SEQ ID NO: 1477037 - DNA, 15 bp, Homo sapiens
agagtccttcagcga

SEQ ID NO: 1477038 - DNA, 15 bp, Homo sapiens
gagtccttcagcgac

SEQ ID NO: 1477039 - DNA, 15 bp, Homo sapiens
agtccttcagcgact

SEQ ID NO: 1477040 - DNA, 15 bp, Homo sapiens
gtccttcagcgactt

SEQ ID NO: 1477041 - DNA, 15 bp, Homo sapiens
tccttcagcgacttg

SEQ ID NO: 1477042 - DNA, 15 bp, Homo sapiens
ccttcagcgacttgc

SEQ ID NO: 1477043 - DNA, 15 bp, Homo sapiens
cttcagcgacttgca

SEQ ID NO: 1477044 - DNA, 15 bp, Homo sapiens
ttcagcgacttgcaa

SEQ ID NO: 1477045 - DNA, 15 bp, Homo sapiens
tcagcgacttgcaat

SEQ ID NO: 1477046 - DNA, 15 bp, Homo sapiens
cagcgacttgcaata

SEQ ID NO: 1477047 - DNA, 15 bp, Homo sapiens
agcgacttgcaatag

SEQ ID NO: 1477048 - DNA, 15 bp, Homo sapiens
gcgacttgcaatagt

SEQ ID NO: 1477049 - DNA, 15 bp, Homo sapiens
cgacttgcaatagtg

SEQ ID NO: 1477050 - DNA, 15 bp, Homo sapiens
gacttgcaatagtgg

SEQ ID NO: 1477051 - DNA, 15 bp, Homo sapiens
acttgcaatagtggc

SEQ ID NO: 1477052 - DNA, 15 bp, Homo sapiens
cttgcaatagtggct

SEQ ID NO: 1477053 - DNA, 15 bp, Homo sapiens
ttgcaatagtggctc

SEQ ID NO: 1477054 - DNA, 15 bp, Homo sapiens
tgcaatagtggctct

SEQ ID NO: 1477055 - DNA, 15 bp, Homo sapiens
gcaatagtggctctt

SEQ ID NO: 1477056 - DNA, 15 bp, Homo sapiens
caatagtggctctta

SEQ ID NO: 1477057 - DNA, 15 bp, Homo sapiens
aatagtggctcttac

SEQ ID NO: 1477058 - DNA, 15 bp, Homo sapiens
atagtggctcttact

SEQ ID NO: 1477059 - DNA, 15 bp, Homo sapiens
tagtggctcttacta

SEQ ID NO: 1477060 - DNA, 15 bp, Homo sapiens
agtggctcttactaa

SEQ ID NO: 1477061 - DNA, 15 bp, Homo sapiens
gtggctcttactaaa

SEQ ID NO: 1477062 - DNA, 15 bp, Homo sapiens
tggctcttactaaag

SEQ ID NO: 1477063 - DNA, 15 bp, Homo sapiens
ggctcttactaaagc

SEQ ID NO: 1477064 - DNA, 15 bp, Homo sapiens
gctcttactaaagca

SEQ ID NO: 1477065 - DNA, 15 bp, Homo sapiens
ctcttactaaagcat

SEQ ID NO: 1477066 - DNA, 15 bp, Homo sapiens
tcttactaaagcatc

SEQ ID NO: 1477067 - DNA, 15 bp, Homo sapiens
cttactaaagcatct

SEQ ID NO: 1477068 - DNA, 15 bp, Homo sapiens
ttactaaagcatctc

SEQ ID NO: 1477069 - DNA, 15 bp, Homo sapiens
tactaaagcatctca

SEQ ID NO: 1477070 - DNA, 15 bp, Homo sapiens
actaaagcatctcat

SEQ ID NO: 1477071 - DNA, 15 bp, Homo sapiens
ctaaagcatctcatt

SEQ ID NO: 1477072 - DNA, 15 bp, Homo sapiens
taaagcatctcattg

SEQ ID NO: 1477073 - DNA, 15 bp, Homo sapiens
aaagcatctcattgc

SEQ ID NO: 1477074 - DNA, 15 bp, Homo sapiens
aagcatctcattgct

SEQ ID NO: 1477075 - DNA, 15 bp, Homo sapiens
agcatctcattgctt

SEQ ID NO: 1477076 - DNA, 15 bp, Homo sapiens
gcatctcattgcttc

SEQ ID NO: 1477077 - DNA, 15 bp, Homo sapiens
catctcattgcttct

SEQ ID NO: 1477078 - DNA, 15 bp, Homo sapiens
atctcattgcttctc

SEQ ID NO: 1477079 - DNA, 15 bp, Homo sapiens
tctcattgcttctca

SEQ ID NO: 1477080 - DNA, 15 bp, Homo sapiens
ctcattgcttctcaa

SEQ ID NO: 1477081 - DNA, 15 bp, Homo sapiens
tcattgcttctcaaa

SEQ ID NO: 1477082 - DNA, 15 bp, Homo sapiens
cattgcttctcaaat

SEQ ID NO: 1477083 - DNA, 15 bp, Homo sapiens
attgcttctcaaatg

SEQ ID NO: 1477084 - DNA, 15 bp, Homo sapiens
ttgcttctcaaatgt

SEQ ID NO: 1477085 - DNA, 15 bp, Homo sapiens
tgcttctcaaatgtg

SEQ ID NO: 1477086 - DNA, 15 bp, Homo sapiens
gcttctcaaatgtgt

SEQ ID NO: 1477087 - DNA, 15 bp, Homo sapiens
cttctcaaatgtgtc

SEQ ID NO: 1477088 - DNA, 15 bp, Homo sapiens
ttctcaaatgtgtcc

SEQ ID NO: 1477089 - DNA, 15 bp, Homo sapiens
tctcaaatgtgtcca

SEQ ID NO: 1477090 - DNA, 15 bp, Homo sapiens
ctcaaatgtgtccaa

SEQ ID NO: 1477091 - DNA, 15 bp, Homo sapiens
tcaaatgtgtccaag

SEQ ID NO: 1477092 - DNA, 15 bp, Homo sapiens
caaatgtgtccaagg

SEQ ID NO: 1477093 - DNA, 15 bp, Homo sapiens
aaatgtgtccaaggg

SEQ ID NO: 1477094 - DNA, 15 bp, Homo sapiens
aatgtgtccaaggga

SEQ ID NO: 1477095 - DNA, 15 bp, Homo sapiens
atgtgtccaagggat

SEQ ID NO: 1477096 - DNA, 15 bp, Homo sapiens
tgtgtccaagggatg

SEQ ID NO: 1477097 - DNA, 15 bp, Homo sapiens
gtgtccaagggatgc

SEQ ID NO: 1477098 - DNA, 15 bp, Homo sapiens
tgtccaagggatgct

SEQ ID NO: 1477099 - DNA, 15 bp, Homo sapiens
gtccaagggatgctc

SEQ ID NO: 1477100 - DNA, 15 bp, Homo sapiens
tccaagggatgctca

SEQ ID NO: 1477101 - DNA, 15 bp, Homo sapiens
ccaagggatgctcaa

SEQ ID NO: 1477102 - DNA, 15 bp, Homo sapiens
caagggatgctcaaa

SEQ ID NO: 1477103 - DNA, 15 bp, Homo sapiens
aagggatgctcaaag

SEQ ID NO: 1477104 - DNA, 15 bp, Homo sapiens
agggatgctcaaagc

SEQ ID NO: 1477105 - DNA, 15 bp, Homo sapiens
gggatgctcaaagct

SEQ ID NO: 1477106 - DNA, 15 bp, Homo sapiens
ggatgctcaaagctg

SEQ ID NO: 1477107 - DNA, 15 bp, Homo sapiens
gatgctcaaagctgc

SEQ ID NO: 1477108 - DNA, 15 bp, Homo sapiens
atgctcaaagctgct

SEQ ID NO: 1477109 - DNA, 15 bp, Homo sapiens
tgctcaaagctgctt

SEQ ID NO: 1477110 - DNA, 15 bp, Homo sapiens
gctcaaagctgcttt

SEQ ID NO: 1477111 - DNA, 15 bp, Homo sapiens
ctcaaagctgctttc

SEQ ID NO: 1477112 - DNA, 15 bp, Homo sapiens
tcaaagctgctttct

SEQ ID NO: 1477113 - DNA, 15 bp, Homo sapiens
caaagctgctttctc

SEQ ID NO: 1477114 - DNA, 15 bp, Homo sapiens
aaagctgctttctca

SEQ ID NO: 1477115 - DNA, 15 bp, Homo sapiens
aagctgctttctcaa

SEQ ID NO: 1477116 - DNA, 15 bp, Homo sapiens
agctgctttctcaaa

SEQ ID NO: 1477117 - DNA, 15 bp, Homo sapiens
gctgctttctcaaaa

SEQ ID NO: 1477118 - DNA, 15 bp, Homo sapiens
ctgctttctcaaaac

SEQ ID NO: 1477119 - DNA, 15 bp, Homo sapiens
tgctttctcaaaaca

SEQ ID NO: 1477120 - DNA, 15 bp, Homo sapiens
gctttctcaaaacag

SEQ ID NO: 1477121 - DNA, 15 bp, Homo sapiens
ctttctcaaaacagg

SEQ ID NO: 1477122 - DNA, 15 bp, Homo sapiens
tttctcaaaacagga

SEQ ID NO: 1477123 - DNA, 15 bp, Homo sapiens
ttctcaaaacaggat

SEQ ID NO: 1477124 - DNA, 15 bp, Homo sapiens
tctcaaaacaggatt

SEQ ID NO: 1477125 - DNA, 15 bp, Homo sapiens
ctcaaaacaggattc

SEQ ID NO: 1477126 - DNA, 15 bp, Homo sapiens
tcaaaacaggattct

SEQ ID NO: 1477127 - DNA, 15 bp, Homo sapiens
caaaacaggattctg

SEQ ID NO: 1477128 - DNA, 15 bp, Homo sapiens
aaaacaggattctgt

SEQ ID NO: 1477129 - DNA, 15 bp, Homo sapiens
aaacaggattctgtg

SEQ ID NO: 1477130 - DNA, 15 bp, Homo sapiens
aacaggattctgtgt

SEQ ID NO: 1477131 - DNA, 15 bp, Homo sapiens
acaggattctgtgtt

SEQ ID NO: 1477132 - DNA, 15 bp, Homo sapiens
caggattctgtgttc

SEQ ID NO: 1477133 - DNA, 15 bp, Homo sapiens
aggattctgtgttca

SEQ ID NO: 1477134 - DNA, 15 bp, Homo sapiens
ggattctgtgttcaa

SEQ ID NO: 1477135 - DNA, 15 bp, Homo sapiens
gattctgtgttcaac

SEQ ID NO: 1477136 - DNA, 15 bp, Homo sapiens
attctgtgttcaact

SEQ ID NO: 1477137 - DNA, 15 bp, Homo sapiens
ttctgtgttcaactg

SEQ ID NO: 1477138 - DNA, 15 bp, Homo sapiens
tctgtgttcaactga

SEQ ID NO: 1477139 - DNA, 15 bp, Homo sapiens
ctgtgttcaactgag

SEQ ID NO: 1477140 - DNA, 15 bp, Homo sapiens
tgtgttcaactgagt

SEQ ID NO: 1477141 - DNA, 15 bp, Homo sapiens
gtgttcaactgagtg

SEQ ID NO: 1477142 - DNA, 15 bp, Homo sapiens
tgttcaactgagtgt

SEQ ID NO: 1477143 - DNA, 15 bp, Homo sapiens
gttcaactgagtgtg

SEQ ID NO: 1477144 - DNA, 15 bp, Homo sapiens
ttcaactgagtgtgg

SEQ ID NO: 1477145 - DNA, 15 bp, Homo sapiens
tcaactgagtgtggg

SEQ ID NO: 1477146 - DNA, 15 bp, Homo sapiens
caactgagtgtggga

SEQ ID NO: 1477147 - DNA, 15 bp, Homo sapiens
aactgagtgtgggaa

SEQ ID NO: 1477148 - DNA, 15 bp, Homo sapiens
actgagtgtgggaaa

SEQ ID NO: 1477149 - DNA, 15 bp, Homo sapiens
ctgagtgtgggaaat

SEQ ID NO: 1477150 - DNA, 15 bp, Homo sapiens
tgagtgtgggaaatt

SEQ ID NO: 1477151 - DNA, 15 bp, Homo sapiens
gagtgtgggaaattc

SEQ ID NO: 1477152 - DNA, 15 bp, Homo sapiens
agtgtgggaaattca

SEQ ID NO: 1477153 - DNA, 15 bp, Homo sapiens
gtgtgggaaattcaa

SEQ ID NO: 1477154 - DNA, 15 bp, Homo sapiens
tgtgggaaattcaaa

SEQ ID NO: 1477155 - DNA, 15 bp, Homo sapiens
gtgggaaattcaaag

SEQ ID NO: 1477156 - DNA, 15 bp, Homo sapiens
tgggaaattcaaagg

SEQ ID NO: 1477157 - DNA, 15 bp, Homo sapiens
gggaaattcaaagga

SEQ ID NO: 1477158 - DNA, 15 bp, Homo sapiens
gtgagagccacaaca

SEQ ID NO: 1477159 - DNA, 15 bp, Homo sapiens
tgagagccacaacaa

SEQ ID NO: 1477160 - DNA, 15 bp, Homo sapiens
gagagccacaacaat

SEQ ID NO: 1477161 - DNA, 15 bp, Homo sapiens
agagccacaacaatg

SEQ ID NO: 1477162 - DNA, 15 bp, Homo sapiens
gagccacaacaatgg

SEQ ID NO: 1477163 - DNA, 15 bp, Homo sapiens
agccacaacaatgga

SEQ ID NO: 1477164 - DNA, 15 bp, Homo sapiens
gccacaacaatggag

SEQ ID NO: 1477165 - DNA, 15 bp, Homo sapiens
ccacaacaatggaga

SEQ ID NO: 1477166 - DNA, 15 bp, Homo sapiens
cacaacaatggagaa

SEQ ID NO: 1477167 - DNA, 15 bp, Homo sapiens
acaacaatggagaaa

SEQ ID NO: 1477168 - DNA, 15 bp, Homo sapiens
caacaatggagaaag

SEQ ID NO: 1477169 - DNA, 15 bp, Homo sapiens
aacaatggagaaagt

SEQ ID NO: 1477170 - DNA, 15 bp, Homo sapiens
acaatggagaaagtg

SEQ ID NO: 1477171 - DNA, 15 bp, Homo sapiens
caatggagaaagtgc

SEQ ID NO: 1477172 - DNA, 15 bp, Homo sapiens
aatggagaaagtgcc

SEQ ID NO: 1477173 - DNA, 15 bp, Homo sapiens
atggagaaagtgcca

SEQ ID NO: 1477174 - DNA, 15 bp, Homo sapiens
tggagaaagtgccac

SEQ ID NO: 1477175 - DNA, 15 bp, Homo sapiens
ggagaaagtgccaca

SEQ ID NO: 1477176 - DNA, 15 bp, Homo sapiens
gagaaagtgccacag

SEQ ID NO: 1477177 - DNA, 15 bp, Homo sapiens
agaaagtgccacagt

SEQ ID NO: 1477178 - DNA, 15 bp, Homo sapiens
gaaagtgccacagtc

SEQ ID NO: 1477179 - DNA, 15 bp, Homo sapiens
aaagtgccacagtca

SEQ ID NO: 1477180 - DNA, 15 bp, Homo sapiens
aagtgccacagtcaa

SEQ ID NO: 1477181 - DNA, 15 bp, Homo sapiens
agtgccacagtcaag

SEQ ID NO: 1477182 - DNA, 15 bp, Homo sapiens
gtgccacagtcaagc

SEQ ID NO: 1477183 - DNA, 15 bp, Homo sapiens
tgccacagtcaagcc

SEQ ID NO: 1477184 - DNA, 15 bp, Homo sapiens
gccacagtcaagcct

SEQ ID NO: 1477185 - DNA, 15 bp, Homo sapiens
ccacagtcaagcctt

SEQ ID NO: 1477186 - DNA, 15 bp, Homo sapiens
cacagtcaagccttt

SEQ ID NO: 1477187 - DNA, 15 bp, Homo sapiens
acagtcaagcctttg

SEQ ID NO: 1477188 - DNA, 15 bp, Homo sapiens
cagtcaagcctttgt

SEQ ID NO: 1477189 - DNA, 15 bp, Homo sapiens
agtcaagcctttgtg

SEQ ID NO: 1477190 - DNA, 15 bp, Homo sapiens
gtcaagcctttgtgt

SEQ ID NO: 1477191 - DNA, 15 bp, Homo sapiens
tcaagcctttgtgtc

SEQ ID NO: 1477192 - DNA, 15 bp, Homo sapiens
caagcctttgtgtcc

SEQ ID NO: 1477193 - DNA, 15 bp, Homo sapiens
aagcctttgtgtccc

SEQ ID NO: 1477194 - DNA, 15 bp, Homo sapiens
agcctttgtgtcccc

SEQ ID NO: 1477195 - DNA, 15 bp, Homo sapiens
gcctttgtgtcccct

SEQ ID NO: 1477196 - DNA, 15 bp, Homo sapiens
cctttgtgtcccctt

SEQ ID NO: 1477197 - DNA, 15 bp, Homo sapiens
ctttgtgtccccttc

SEQ ID NO: 1477198 - DNA, 15 bp, Homo sapiens
tttgtgtccccttct

SEQ ID NO: 1477199 - DNA, 15 bp, Homo sapiens
ttgtgtccccttctc

SEQ ID NO: 1477200 - DNA, 15 bp, Homo sapiens
tgtgtccccttctcc

SEQ ID NO: 1477201 - DNA, 15 bp, Homo sapiens
gtgtccccttctcct

SEQ ID NO: 1477202 - DNA, 15 bp, Homo sapiens
tgtccccttctcctt

SEQ ID NO: 1477203 - DNA, 15 bp, Homo sapiens
gtccccttctccttc

SEQ ID NO: 1477204 - DNA, 15 bp, Homo sapiens
tccccttctccttct

SEQ ID NO: 1477205 - DNA, 15 bp, Homo sapiens
ccccttctccttctt

SEQ ID NO: 1477206 - DNA, 15 bp, Homo sapiens
cccttctccttcttg

SEQ ID NO: 1477207 - DNA, 15 bp, Homo sapiens
ccttctccttcttgc

SEQ ID NO: 1477208 - DNA, 15 bp, Homo sapiens
cttctccttcttgct

SEQ ID NO: 1477209 - DNA, 15 bp, Homo sapiens
ttctccttcttgctg

SEQ ID NO: 1477210 - DNA, 15 bp, Homo sapiens
tctccttcttgctgt

SEQ ID NO: 1477211 - DNA, 15 bp, Homo sapiens
ctccttcttgctgtg

SEQ ID NO: 1477212 - DNA, 15 bp, Homo sapiens
tccttcttgctgtgt

SEQ ID NO: 1477213 - DNA, 15 bp, Homo sapiens
ccttcttgctgtgtg

SEQ ID NO: 1477214 - DNA, 15 bp, Homo sapiens
cttcttgctgtgtga

SEQ ID NO: 1477215 - DNA, 15 bp, Homo sapiens
ttcttgctgtgtgat

SEQ ID NO: 1477216 - DNA, 15 bp, Homo sapiens
tcttgctgtgtgatc

SEQ ID NO: 1477217 - DNA, 15 bp, Homo sapiens
cttgctgtgtgatct

SEQ ID NO: 1477218 - DNA, 15 bp, Homo sapiens
ttgctgtgtgatctg

SEQ ID NO: 1477219 - DNA, 15 bp, Homo sapiens
tgctgtgtgatctgc

SEQ ID NO: 1477220 - DNA, 15 bp, Homo sapiens
gctgtgtgatctgca

SEQ ID NO: 1477221 - DNA, 15 bp, Homo sapiens
ctgtgtgatctgcag

SEQ ID NO: 1477222 - DNA, 15 bp, Homo sapiens
tgtgtgatctgcaga

SEQ ID NO: 1477223 - DNA, 15 bp, Homo sapiens
gtgtgatctgcagag

SEQ ID NO: 1477224 - DNA, 15 bp, Homo sapiens
tgtgatctgcagagg

SEQ ID NO: 1477225 - DNA, 15 bp, Homo sapiens
gtgatctgcagagga

SEQ ID NO: 1477226 - DNA, 15 bp, Homo sapiens
tgatctgcagaggag

SEQ ID NO: 1477227 - DNA, 15 bp, Homo sapiens
gatctgcagaggagg

SEQ ID NO: 1477228 - DNA, 15 bp, Homo sapiens
atctgcagaggaggg

SEQ ID NO: 1477229 - DNA, 15 bp, Homo sapiens
tctgcagaggagggg

SEQ ID NO: 1477230 - DNA, 15 bp, Homo sapiens
ctgcagaggagggga

SEQ ID NO: 1477231 - DNA, 15 bp, Homo sapiens
tgcagaggaggggat

SEQ ID NO: 1477232 - DNA, 15 bp, Homo sapiens
gcagaggaggggata

SEQ ID NO: 1477233 - DNA, 15 bp, Homo sapiens
cagaggaggggataa

SEQ ID NO: 1477234 - DNA, 15 bp, Homo sapiens
agaggaggggataaa

SEQ ID NO: 1477235 - DNA, 15 bp, Homo sapiens
gaggaggggataaaa

SEQ ID NO: 1477236 - DNA, 15 bp, Homo sapiens
aggaggggataaaag

SEQ ID NO: 1477237 - DNA, 15 bp, Homo sapiens
ggaggggataaaagg

SEQ ID NO: 1477238 - DNA, 15 bp, Homo sapiens
gaggggataaaaggc

SEQ ID NO: 1477239 - DNA, 15 bp, Homo sapiens
aggggataaaaggct

SEQ ID NO: 1477240 - DNA, 15 bp, Homo sapiens
ggggataaaaggctc

SEQ ID NO: 1477241 - DNA, 15 bp, Homo sapiens
gggataaaaggctca

SEQ ID NO: 1477242 - DNA, 15 bp, Homo sapiens
ggataaaaggctcat

SEQ ID NO: 1477243 - DNA, 15 bp, Homo sapiens
gataaaaggctcatc

SEQ ID NO: 1477244 - DNA, 15 bp, Homo sapiens
ataaaaggctcatct

SEQ ID NO: 1477245 - DNA, 15 bp, Homo sapiens
taaaaggctcatctg

SEQ ID NO: 1477246 - DNA, 15 bp, Homo sapiens
aaaaggctcatctga

SEQ ID NO: 1477247 - DNA, 15 bp, Homo sapiens
aaaggctcatctgag

SEQ ID NO: 1477248 - DNA, 15 bp, Homo sapiens
aaggctcatctgagg

SEQ ID NO: 1477249 - DNA, 15 bp, Homo sapiens
aggctcatctgaggt

SEQ ID NO: 1477250 - DNA, 15 bp, Homo sapiens
ggctcatctgaggtc

SEQ ID NO: 1477251 - DNA, 15 bp, Homo sapiens
gctcatctgaggtcc

SEQ ID NO: 1477252 - DNA, 15 bp, Homo sapiens
ctcatctgaggtcct

SEQ ID NO: 1477253 - DNA, 15 bp, Homo sapiens
tcatctgaggtcctg

SEQ ID NO: 1477254 - DNA, 15 bp, Homo sapiens
catctgaggtcctgg

SEQ ID NO: 1477255 - DNA, 15 bp, Homo sapiens
atctgaggtcctggc

SEQ ID NO: 1477256 - DNA, 15 bp, Homo sapiens
tctgaggtcctggct

SEQ ID NO: 1477257 - DNA, 15 bp, Homo sapiens
ctgaggtcctggctg

SEQ ID NO: 1477258 - DNA, 15 bp, Homo sapiens
tgaggtcctggctgg

SEQ ID NO: 1477259 - DNA, 15 bp, Homo sapiens
gaggtcctggctggc

SEQ ID NO: 1477260 - DNA, 15 bp, Homo sapiens
aggtcctggctggct

SEQ ID NO: 1477261 - DNA, 15 bp, Homo sapiens
ggtcctggctggctc

SEQ ID NO: 1477262 - DNA, 15 bp, Homo sapiens
gtcctggctggctct

SEQ ID NO: 1477263 - DNA, 15 bp, Homo sapiens
tcctggctggctctc

SEQ ID NO: 1477264 - DNA, 15 bp, Homo sapiens
cctggctggctctct

SEQ ID NO: 1477265 - DNA, 15 bp, Homo sapiens
ctggctggctctctg

SEQ ID NO: 1477266 - DNA, 15 bp, Homo sapiens
tggctggctctctgt

SEQ ID NO: 1477267 - DNA, 15 bp, Homo sapiens
ggctggctctctgtg

SEQ ID NO: 1477268 - DNA, 15 bp, Homo sapiens
gctggctctctgtga

SEQ ID NO: 1477269 - DNA, 15 bp, Homo sapiens
ctggctctctgtgac

SEQ ID NO: 1477270 - DNA, 15 bp, Homo sapiens
tggctctctgtgacc

SEQ ID NO: 1477271 - DNA, 15 bp, Homo sapiens
ggctctctgtgacca

SEQ ID NO: 1477272 - DNA, 15 bp, Homo sapiens
gctctctgtgaccag

SEQ ID NO: 1477273 - DNA, 15 bp, Homo sapiens
ctctctgtgaccaga

SEQ ID NO: 1477274 - DNA, 15 bp, Homo sapiens
tctctgtgaccagaa

SEQ ID NO: 1477275 - DNA, 15 bp, Homo sapiens
ctctgtgaccagaaa

SEQ ID NO: 1477276 - DNA, 15 bp, Homo sapiens
tctgtgaccagaaag

SEQ ID NO: 1477277 - DNA, 15 bp, Homo sapiens
ctgtgaccagaaagt

SEQ ID NO: 1477278 - DNA, 15 bp, Homo sapiens
tgtgaccagaaagtc

SEQ ID NO: 1477279 - DNA, 15 bp, Homo sapiens
gtgaccagaaagtcc

SEQ ID NO: 1477280 - DNA, 15 bp, Homo sapiens
tgaccagaaagtccc

SEQ ID NO: 1477281 - DNA, 15 bp, Homo sapiens
gaccagaaagtccct

SEQ ID NO: 1477282 - DNA, 15 bp, Homo sapiens
accagaaagtccctg

SEQ ID NO: 1477283 - DNA, 15 bp, Homo sapiens
ccagaaagtccctga

SEQ ID NO: 1477284 - DNA, 15 bp, Homo sapiens
cagaaagtccctgag

SEQ ID NO: 1477285 - DNA, 15 bp, Homo sapiens
agaaagtccctgagc

SEQ ID NO: 1477286 - DNA, 15 bp, Homo sapiens
gaaagtccctgagcc

SEQ ID NO: 1477287 - DNA, 15 bp, Homo sapiens
aaagtccctgagcca

SEQ ID NO: 1477288 - DNA, 15 bp, Homo sapiens
aagtccctgagccaa

SEQ ID NO: 1477289 - DNA, 15 bp, Homo sapiens
agtccctgagccaat

SEQ ID NO: 1477290 - DNA, 15 bp, Homo sapiens
gtccctgagccaatg

SEQ ID NO: 1477291 - DNA, 15 bp, Homo sapiens
tccctgagccaatga

SEQ ID NO: 1477292 - DNA, 15 bp, Homo sapiens
ccctgagccaatgaa

SEQ ID NO: 1477293 - DNA, 15 bp, Homo sapiens
cctgagccaatgaag

SEQ ID NO: 1477294 - DNA, 15 bp, Homo sapiens
ctgagccaatgaagt

SEQ ID NO: 1477295 - DNA, 15 bp, Homo sapiens
tgagccaatgaagtg

SEQ ID NO: 1477296 - DNA, 15 bp, Homo sapiens
gagccaatgaagtgt

SEQ ID NO: 1477297 - DNA, 15 bp, Homo sapiens
agccaatgaagtgtt

SEQ ID NO: 1477298 - DNA, 15 bp, Homo sapiens
gccaatgaagtgtta

SEQ ID NO: 1477299 - DNA, 15 bp, Homo sapiens
ccaatgaagtgttaa

SEQ ID NO: 1477300 - DNA, 15 bp, Homo sapiens
caatgaagtgttaat

SEQ ID NO: 1477301 - DNA, 15 bp, Homo sapiens
aatgaagtgttaatg

SEQ ID NO: 1477302 - DNA, 15 bp, Homo sapiens
atgaagtgttaatgc

SEQ ID NO: 1477303 - DNA, 15 bp, Homo sapiens
tgaagtgttaatgcc

SEQ ID NO: 1477304 - DNA, 15 bp, Homo sapiens
gaagtgttaatgcct

SEQ ID NO: 1477305 - DNA, 15 bp, Homo sapiens
aagtgttaatgcctt

SEQ ID NO: 1477306 - DNA, 15 bp, Homo sapiens
agtgttaatgccttt

SEQ ID NO: 1477307 - DNA, 15 bp, Homo sapiens
gtgttaatgcctttg

SEQ ID NO: 1477308 - DNA, 15 bp, Homo sapiens
tgttaatgcctttgc

SEQ ID NO: 1477309 - DNA, 15 bp, Homo sapiens
gttaatgcctttgcc

SEQ ID NO: 1477310 - DNA, 15 bp, Homo sapiens
ttaatgcctttgccc

SEQ ID NO: 1477311 - DNA, 15 bp, Homo sapiens
taatgcctttgcccc

SEQ ID NO: 1477312 - DNA, 15 bp, Homo sapiens
aatgcctttgcccct

SEQ ID NO: 1477313 - DNA, 15 bp, Homo sapiens
atgcctttgcccctc

SEQ ID NO: 1477314 - DNA, 15 bp, Homo sapiens
tgcctttgcccctcc

SEQ ID NO: 1477315 - DNA, 15 bp, Homo sapiens
gcctttgcccctccc

SEQ ID NO: 1477316 - DNA, 15 bp, Homo sapiens
cctttgcccctcccc

SEQ ID NO: 1477317 - DNA, 15 bp, Homo sapiens
ctttgcccctccccc

SEQ ID NO: 1477318 - DNA, 15 bp, Homo sapiens
tttgcccctcccccc

SEQ ID NO: 1477319 - DNA, 15 bp, Homo sapiens
ttgcccctccccccg

SEQ ID NO: 1477320 - DNA, 15 bp, Homo sapiens
tgcccctccccccga

SEQ ID NO: 1477321 - DNA, 15 bp, Homo sapiens
gcccctccccccgat

SEQ ID NO: 1477322 - DNA, 15 bp, Homo sapiens
cccctccccccgatt

SEQ ID NO: 1477323 - DNA, 15 bp, Homo sapiens
ccctccccccgattc

SEQ ID NO: 1477324 - DNA, 15 bp, Homo sapiens
cctccccccgattcc

SEQ ID NO: 1477325 - DNA, 15 bp, Homo sapiens
ctccccccgattcct

SEQ ID NO: 1477326 - DNA, 15 bp, Homo sapiens
tccccccgattcctg

SEQ ID NO: 1477327 - DNA, 15 bp, Homo sapiens
ccccccgattcctgc

SEQ ID NO: 1477328 - DNA, 15 bp, Homo sapiens
cccccgattcctgct

SEQ ID NO: 1477329 - DNA, 15 bp, Homo sapiens
ccccgattcctgctc

SEQ ID NO: 1477330 - DNA, 15 bp, Homo sapiens
cccgattcctgctca

SEQ ID NO: 1477331 - DNA, 15 bp, Homo sapiens
ccgattcctgctcag

SEQ ID NO: 1477332 - DNA, 15 bp, Homo sapiens
cgattcctgctcagt

SEQ ID NO: 1477333 - DNA, 15 bp, Homo sapiens
gattcctgctcagtt

SEQ ID NO: 1477334 - DNA, 15 bp, Homo sapiens
attcctgctcagttc

SEQ ID NO: 1477335 - DNA, 15 bp, Homo sapiens
ttcctgctcagttca

SEQ ID NO: 1477336 - DNA, 15 bp, Homo sapiens
tcctgctcagttcac

SEQ ID NO: 1477337 - DNA, 15 bp, Homo sapiens
cctgctcagttcacg

SEQ ID NO: 1477338 - DNA, 15 bp, Homo sapiens
ctgctcagttcacgg

SEQ ID NO: 1477339 - DNA, 15 bp, Homo sapiens
tgctcagttcacggc

SEQ ID NO: 1477340 - DNA, 15 bp, Homo sapiens
gctcagttcacggct

SEQ ID NO: 1477341 - DNA, 15 bp, Homo sapiens
ctcagttcacggctt

SEQ ID NO: 1477342 - DNA, 15 bp, Homo sapiens
tcagttcacggcttt

SEQ ID NO: 1477343 - DNA, 15 bp, Homo sapiens
cagttcacggctttc

SEQ ID NO: 1477344 - DNA, 15 bp, Homo sapiens
agttcacggctttcc

SEQ ID NO: 1477345 - DNA, 15 bp, Homo sapiens
gttcacggctttcct

SEQ ID NO: 1477346 - DNA, 15 bp, Homo sapiens
ttcacggctttcctg

SEQ ID NO: 1477347 - DNA, 15 bp, Homo sapiens
tcacggctttcctgt

SEQ ID NO: 1477348 - DNA, 15 bp, Homo sapiens
cacggctttcctgtc

SEQ ID NO: 1477349 - DNA, 15 bp, Homo sapiens
acggctttcctgtcc

SEQ ID NO: 1477350 - DNA, 15 bp, Homo sapiens
cggctttcctgtcct

SEQ ID NO: 1477351 - DNA, 15 bp, Homo sapiens
ggctttcctgtcctc

SEQ ID NO: 1477352 - DNA, 15 bp, Homo sapiens
gctttcctgtcctct

SEQ ID NO: 1477353 - DNA, 15 bp, Homo sapiens
ctttcctgtcctctg

SEQ ID NO: 1477354 - DNA, 15 bp, Homo sapiens
tttcctgtcctctga

SEQ ID NO: 1477355 - DNA, 15 bp, Homo sapiens
ttcctgtcctctgaa

SEQ ID NO: 1477356 - DNA, 15 bp, Homo sapiens
tcctgtcctctgaaa

SEQ ID NO: 1477357 - DNA, 15 bp, Homo sapiens
cctgtcctctgaaat

SEQ ID NO: 1477358 - DNA, 15 bp, Homo sapiens
ctgtcctctgaaatc

SEQ ID NO: 1477359 - DNA, 15 bp, Homo sapiens
tgtcctctgaaatcc

SEQ ID NO: 1477360 - DNA, 15 bp, Homo sapiens
gtcctctgaaatccc

SEQ ID NO: 1477361 - DNA, 15 bp, Homo sapiens
tcctctgaaatccct

SEQ ID NO: 1477362 - DNA, 15 bp, Homo sapiens
cctctgaaatccctt

SEQ ID NO: 1477363 - DNA, 15 bp, Homo sapiens
ctctgaaatcccttc

SEQ ID NO: 1477364 - DNA, 15 bp, Homo sapiens
tctgaaatcccttcc

SEQ ID NO: 1477365 - DNA, 15 bp, Homo sapiens
ctgaaatcccttcct

SEQ ID NO: 1477366 - DNA, 15 bp, Homo sapiens
tgaaatcccttcctt

SEQ ID NO: 1477367 - DNA, 15 bp, Homo sapiens
gaaatcccttccttg

SEQ ID NO: 1477368 - DNA, 15 bp, Homo sapiens
aaatcccttccttgg

SEQ ID NO: 1477369 - DNA, 15 bp, Homo sapiens
aatcccttccttggt

SEQ ID NO: 1477370 - DNA, 15 bp, Homo sapiens
atcccttccttggta

SEQ ID NO: 1477371 - DNA, 15 bp, Homo sapiens
tcccttccttggtag

SEQ ID NO: 1477372 - DNA, 15 bp, Homo sapiens
cccttccttggtagc

SEQ ID NO: 1477373 - DNA, 15 bp, Homo sapiens
ccttccttggtagcc

SEQ ID NO: 1477374 - DNA, 15 bp, Homo sapiens
cttccttggtagcca

SEQ ID NO: 1477375 - DNA, 15 bp, Homo sapiens
ttccttggtagccag

SEQ ID NO: 1477376 - DNA, 15 bp, Homo sapiens
tccttggtagccagt

SEQ ID NO: 1477377 - DNA, 15 bp, Homo sapiens
ccttggtagccagtt

SEQ ID NO: 1477378 - DNA, 15 bp, Homo sapiens
cttggtagccagttg

SEQ ID NO: 1477379 - DNA, 15 bp, Homo sapiens
ttggtagccagttgc

SEQ ID NO: 1477380 - DNA, 15 bp, Homo sapiens
tggtagccagttgca

SEQ ID NO: 1477381 - DNA, 15 bp, Homo sapiens
ggtagccagttgcac

SEQ ID NO: 1477382 - DNA, 15 bp, Homo sapiens
gtagccagttgcacc

SEQ ID NO: 1477383 - DNA, 15 bp, Homo sapiens
tagccagttgcacca

SEQ ID NO: 1477384 - DNA, 15 bp, Homo sapiens
agccagttgcaccac

SEQ ID NO: 1477385 - DNA, 15 bp, Homo sapiens
gccagttgcaccacc

SEQ ID NO: 1477386 - DNA, 15 bp, Homo sapiens
ccagttgcaccacct

SEQ ID NO: 1477387 - DNA, 15 bp, Homo sapiens
cagttgcaccacctc

SEQ ID NO: 1477388 - DNA, 15 bp, Homo sapiens
agttgcaccacctct

SEQ ID NO: 1477389 - DNA, 15 bp, Homo sapiens
gttgcaccacctctt

SEQ ID NO: 1477390 - DNA, 15 bp, Homo sapiens
ttgcaccacctcttt

SEQ ID NO: 1477391 - DNA, 15 bp, Homo sapiens
tgcaccacctcttta

SEQ ID NO: 1477392 - DNA, 15 bp, Homo sapiens
gcaccacctctttac

SEQ ID NO: 1477393 - DNA, 15 bp, Homo sapiens
caccacctctttact

SEQ ID NO: 1477394 - DNA, 15 bp, Homo sapiens
accacctctttactt

SEQ ID NO: 1477395 - DNA, 15 bp, Homo sapiens
ccacctctttacttc

SEQ ID NO: 1477396 - DNA, 15 bp, Homo sapiens
cacctctttacttca

SEQ ID NO: 1477397 - DNA, 15 bp, Homo sapiens
acctctttacttcaa

SEQ ID NO: 1477398 - DNA, 15 bp, Homo sapiens
cctctttacttcaag

SEQ ID NO: 1477399 - DNA, 15 bp, Homo sapiens
ctctttacttcaagt

SEQ ID NO: 1477400 - DNA, 15 bp, Homo sapiens
tctttacttcaagtt

SEQ ID NO: 1477401 - DNA, 15 bp, Homo sapiens
ctttacttcaagttc

SEQ ID NO: 1477402 - DNA, 15 bp, Homo sapiens
tttacttcaagttct

SEQ ID NO: 1477403 - DNA, 15 bp, Homo sapiens
ttacttcaagttctg

SEQ ID NO: 1477404 - DNA, 15 bp, Homo sapiens
tacttcaagttctgc

SEQ ID NO: 1477405 - DNA, 15 bp, Homo sapiens
acttcaagttctgcc

SEQ ID NO: 1477406 - DNA, 15 bp, Homo sapiens
cttcaagttctgcca

SEQ ID NO: 1477407 - DNA, 15 bp, Homo sapiens
ttcaagttctgccac

SEQ ID NO: 1477408 - DNA, 15 bp, Homo sapiens
tcaagttctgccacc

SEQ ID NO: 1477409 - DNA, 15 bp, Homo sapiens
caagttctgccacct

SEQ ID NO: 1477410 - DNA, 15 bp, Homo sapiens
aagttctgccacctt

SEQ ID NO: 1477411 - DNA, 15 bp, Homo sapiens
agttctgccaccttc

SEQ ID NO: 1477412 - DNA, 15 bp, Homo sapiens
gttctgccaccttct

SEQ ID NO: 1477413 - DNA, 15 bp, Homo sapiens
ttctgccaccttctc

SEQ ID NO: 1477414 - DNA, 15 bp, Homo sapiens
tctgccaccttctcc

SEQ ID NO: 1477415 - DNA, 15 bp, Homo sapiens
ctgccaccttctcct

SEQ ID NO: 1477416 - DNA, 15 bp, Homo sapiens
tgccaccttctcctg

SEQ ID NO: 1477417 - DNA, 15 bp, Homo sapiens
gccaccttctcctga

SEQ ID NO: 1477418 - DNA, 15 bp, Homo sapiens
ccaccttctcctgag

SEQ ID NO: 1477419 - DNA, 15 bp, Homo sapiens
caccttctcctgagg

SEQ ID NO: 1477420 - DNA, 15 bp, Homo sapiens
accttctcctgaggc

SEQ ID NO: 1477421 - DNA, 15 bp, Homo sapiens
ccttctcctgaggca

SEQ ID NO: 1477422 - DNA, 15 bp, Homo sapiens
cttctcctgaggcaa

SEQ ID NO: 1477423 - DNA, 15 bp, Homo sapiens
ttctcctgaggcaat

SEQ ID NO: 1477424 - DNA, 15 bp, Homo sapiens
tctcctgaggcaatg

SEQ ID NO: 1477425 - DNA, 15 bp, Homo sapiens
ctcctgaggcaatgg

SEQ ID NO: 1477426 - DNA, 15 bp, Homo sapiens
tcctgaggcaatggc

SEQ ID NO: 1477427 - DNA, 15 bp, Homo sapiens
cctgaggcaatggct

SEQ ID NO: 1477428 - DNA, 15 bp, Homo sapiens
ctgaggcaatggctc

SEQ ID NO: 1477429 - DNA, 15 bp, Homo sapiens
tgaggcaatggctcc

SEQ ID NO: 1477430 - DNA, 15 bp, Homo sapiens
gaggcaatggctccc

SEQ ID NO: 1477431 - DNA, 15 bp, Homo sapiens
aggcaatggctccct

SEQ ID NO: 1477432 - DNA, 15 bp, Homo sapiens
ggcaatggctccctt

SEQ ID NO: 1477433 - DNA, 15 bp, Homo sapiens
gcaatggctcccttg

SEQ ID NO: 1477434 - DNA, 15 bp, Homo sapiens
caatggctcccttgc

SEQ ID NO: 1477435 - DNA, 15 bp, Homo sapiens
aatggctcccttgct

SEQ ID NO: 1477436 - DNA, 15 bp, Homo sapiens
atggctcccttgctt

SEQ ID NO: 1477437 - DNA, 15 bp, Homo sapiens
tggctcccttgcttg

SEQ ID NO: 1477438 - DNA, 15 bp, Homo sapiens
ggctcccttgcttgg

SEQ ID NO: 1477439 - DNA, 15 bp, Homo sapiens
gctcccttgcttggt

SEQ ID NO: 1477440 - DNA, 15 bp, Homo sapiens
ctcccttgcttggtt

SEQ ID NO: 1477441 - DNA, 15 bp, Homo sapiens
tcccttgcttggttg

SEQ ID NO: 1477442 - DNA, 15 bp, Homo sapiens
cccttgcttggttgg

SEQ ID NO: 1477443 - DNA, 15 bp, Homo sapiens
ccttgcttggttggt

SEQ ID NO: 1477444 - DNA, 15 bp, Homo sapiens
cttgcttggttggtt

SEQ ID NO: 1477445 - DNA, 15 bp, Homo sapiens
ttgcttggttggttt

SEQ ID NO: 1477446 - DNA, 15 bp, Homo sapiens
tgcttggttggtttc

SEQ ID NO: 1477447 - DNA, 15 bp, Homo sapiens
gcttggttggtttct

SEQ ID NO: 1477448 - DNA, 15 bp, Homo sapiens
cttggttggtttctg

SEQ ID NO: 1477449 - DNA, 15 bp, Homo sapiens
ttggttggtttctgg

SEQ ID NO: 1477450 - DNA, 15 bp, Homo sapiens
tggttggtttctggg

SEQ ID NO: 1477451 - DNA, 15 bp, Homo sapiens
ggttggtttctggga

SEQ ID NO: 1477452 - DNA, 15 bp, Homo sapiens
gttggtttctgggat

SEQ ID NO: 1477453 - DNA, 15 bp, Homo sapiens
ttggtttctgggatg

SEQ ID NO: 1477454 - DNA, 15 bp, Homo sapiens
tggtttctgggatgc

SEQ ID NO: 1477455 - DNA, 15 bp, Homo sapiens
ggtttctgggatgct

SEQ ID NO: 1477456 - DNA, 15 bp, Homo sapiens
gtttctgggatgctg

SEQ ID NO: 1477457 - DNA, 15 bp, Homo sapiens
tttctgggatgctga

SEQ ID NO: 1477458 - DNA, 15 bp, Homo sapiens
ttctgggatgctgag

SEQ ID NO: 1477459 - DNA, 15 bp, Homo sapiens
tctgggatgctgagt

SEQ ID NO: 1477460 - DNA, 15 bp, Homo sapiens
ctgggatgctgagtg

SEQ ID NO: 1477461 - DNA, 15 bp, Homo sapiens
tgggatgctgagtgg

SEQ ID NO: 1477462 - DNA, 15 bp, Homo sapiens
gggatgctgagtggg

SEQ ID NO: 1477463 - DNA, 15 bp, Homo sapiens
ggatgctgagtgggg

SEQ ID NO: 1477464 - DNA, 15 bp, Homo sapiens
gatgctgagtggggg

SEQ ID NO: 1477465 - DNA, 15 bp, Homo sapiens
atgctgagtggggga

SEQ ID NO: 1477466 - DNA, 15 bp, Homo sapiens
tgctgagtgggggag

SEQ ID NO: 1477467 - DNA, 15 bp, Homo sapiens
gctgagtgggggagg

SEQ ID NO: 1477468 - DNA, 15 bp, Homo sapiens
ctgagtgggggaggc

SEQ ID NO: 1477469 - DNA, 15 bp, Homo sapiens
tgagtgggggaggct

SEQ ID NO: 1477470 - DNA, 15 bp, Homo sapiens
gagtgggggaggctg

SEQ ID NO: 1477471 - DNA, 15 bp, Homo sapiens
agtgggggaggctgg

SEQ ID NO: 1477472 - DNA, 15 bp, Homo sapiens
gtgggggaggctggg

SEQ ID NO: 1477473 - DNA, 15 bp, Homo sapiens
tgggggaggctgggg

SEQ ID NO: 1477474 - DNA, 15 bp, Homo sapiens
gggggaggctgggga

SEQ ID NO: 1477475 - DNA, 15 bp, Homo sapiens
ggggaggctggggaa

SEQ ID NO: 1477476 - DNA, 15 bp, Homo sapiens
gggaggctggggaag

SEQ ID NO: 1477477 - DNA, 15 bp, Homo sapiens
ggaggctggggaagc

SEQ ID NO: 1477478 - DNA, 15 bp, Homo sapiens
gaggctggggaagct

SEQ ID NO: 1477479 - DNA, 15 bp, Homo sapiens
aggctggggaagctt

SEQ ID NO: 1477480 - DNA, 15 bp, Homo sapiens
ggctggggaagcttg

SEQ ID NO: 1477481 - DNA, 15 bp, Homo sapiens
gctggggaagcttgt

SEQ ID NO: 1477482 - DNA, 15 bp, Homo sapiens
ctggggaagcttgtg

SEQ ID NO: 1477483 - DNA, 15 bp, Homo sapiens
tggggaagcttgtgc

SEQ ID NO: 1477484 - DNA, 15 bp, Homo sapiens
ggggaagcttgtgcc

SEQ ID NO: 1477485 - DNA, 15 bp, Homo sapiens
gggaagcttgtgcct

SEQ ID NO: 1477486 - DNA, 15 bp, Homo sapiens
ggaagcttgtgcctg

SEQ ID NO: 1477487 - DNA, 15 bp, Homo sapiens
gaagcttgtgcctgg

SEQ ID NO: 1477488 - DNA, 15 bp, Homo sapiens
aagcttgtgcctgga

SEQ ID NO: 1477489 - DNA, 15 bp, Homo sapiens
agcttgtgcctggac

SEQ ID NO: 1477490 - DNA, 15 bp, Homo sapiens
gcttgtgcctggact

SEQ ID NO: 1477491 - DNA, 15 bp, Homo sapiens
cttgtgcctggactg

SEQ ID NO: 1477492 - DNA, 15 bp, Homo sapiens
ttgtgcctggactgt

SEQ ID NO: 1477493 - DNA, 15 bp, Homo sapiens
tgtgcctggactgtc

SEQ ID NO: 1477494 - DNA, 15 bp, Homo sapiens
gtgcctggactgtct

SEQ ID NO: 1477495 - DNA, 15 bp, Homo sapiens
tgcctggactgtctc

SEQ ID NO: 1477496 - DNA, 15 bp, Homo sapiens
gcctggactgtctcg

SEQ ID NO: 1477497 - DNA, 15 bp, Homo sapiens
cctggactgtctcgg

SEQ ID NO: 1477498 - DNA, 15 bp, Homo sapiens
ctggactgtctcggg

SEQ ID NO: 1477499 - DNA, 15 bp, Homo sapiens
tggactgtctcggga

SEQ ID NO: 1477500 - DNA, 15 bp, Homo sapiens
ggactgtctcgggag

SEQ ID NO: 1477501 - DNA, 15 bp, Homo sapiens
gactgtctcgggagc

SEQ ID NO: 1477502 - DNA, 15 bp, Homo sapiens
actgtctcgggagct

SEQ ID NO: 1477503 - DNA, 15 bp, Homo sapiens
ctgtctcgggagctc

SEQ ID NO: 1477504 - DNA, 15 bp, Homo sapiens
tgtctcgggagctcc

SEQ ID NO: 1477505 - DNA, 15 bp, Homo sapiens
gtctcgggagctccc

SEQ ID NO: 1477506 - DNA, 15 bp, Homo sapiens
tctcgggagctccca

SEQ ID NO: 1477507 - DNA, 15 bp, Homo sapiens
ctcgggagctcccag

SEQ ID NO: 1477508 - DNA, 15 bp, Homo sapiens
tcgggagctcccagt

SEQ ID NO: 1477509 - DNA, 15 bp, Homo sapiens
cgggagctcccagtg

SEQ ID NO: 1477510 - DNA, 15 bp, Homo sapiens
gggagctcccagtga

SEQ ID NO: 1477511 - DNA, 15 bp, Homo sapiens
ggagctcccagtgac

SEQ ID NO: 1477512 - DNA, 15 bp, Homo sapiens
gagctcccagtgacg

SEQ ID NO: 1477513 - DNA, 15 bp, Homo sapiens
agctcccagtgacgg

SEQ ID NO: 1477514 - DNA, 15 bp, Homo sapiens
gctcccagtgacggt

SEQ ID NO: 1477515 - DNA, 15 bp, Homo sapiens
ctcccagtgacggtg

SEQ ID NO: 1477516 - DNA, 15 bp, Homo sapiens
tcccagtgacggtga

SEQ ID NO: 1477517 - DNA, 15 bp, Homo sapiens
cccagtgacggtgac

SEQ ID NO: 1477518 - DNA, 15 bp, Homo sapiens
ccagtgacggtgaca

SEQ ID NO: 1477519 - DNA, 15 bp, Homo sapiens
cagtgacggtgacaa

SEQ ID NO: 1477520 - DNA, 15 bp, Homo sapiens
agtgacggtgacaat

SEQ ID NO: 1477521 - DNA, 15 bp, Homo sapiens
gtgacggtgacaatg

SEQ ID NO: 1477522 - DNA, 15 bp, Homo sapiens
tgacggtgacaatgc

SEQ ID NO: 1477523 - DNA, 15 bp, Homo sapiens
gacggtgacaatgca

SEQ ID NO: 1477524 - DNA, 15 bp, Homo sapiens
acggtgacaatgcac

SEQ ID NO: 1477525 - DNA, 15 bp, Homo sapiens
cggtgacaatgcact

SEQ ID NO: 1477526 - DNA, 15 bp, Homo sapiens
ggtgacaatgcactg

SEQ ID NO: 1477527 - DNA, 15 bp, Homo sapiens
gtgacaatgcactgc

SEQ ID NO: 1477528 - DNA, 15 bp, Homo sapiens
tgacaatgcactgct

SEQ ID NO: 1477529 - DNA, 15 bp, Homo sapiens
gacaatgcactgctt

SEQ ID NO: 1477530 - DNA, 15 bp, Homo sapiens
acaatgcactgcttc

SEQ ID NO: 1477531 - DNA, 15 bp, Homo sapiens
caatgcactgcttcc

SEQ ID NO: 1477532 - DNA, 15 bp, Homo sapiens
aatgcactgcttcca

SEQ ID NO: 1477533 - DNA, 15 bp, Homo sapiens
atgcactgcttccat

SEQ ID NO: 1477534 - DNA, 15 bp, Homo sapiens
tgcactgcttccatt

SEQ ID NO: 1477535 - DNA, 15 bp, Homo sapiens
gcactgcttccattt

SEQ ID NO: 1477536 - DNA, 15 bp, Homo sapiens
cactgcttccatttg

SEQ ID NO: 1477537 - DNA, 15 bp, Homo sapiens
actgcttccatttgt

SEQ ID NO: 1477538 - DNA, 15 bp, Homo sapiens
ctgcttccatttgta

SEQ ID NO: 1477539 - DNA, 15 bp, Homo sapiens
tgcttccatttgtaa

SEQ ID NO: 1477540 - DNA, 15 bp, Homo sapiens
gcttccatttgtaaa

SEQ ID NO: 1477541 - DNA, 15 bp, Homo sapiens
cttccatttgtaaat

SEQ ID NO: 1477542 - DNA, 15 bp, Homo sapiens
ttccatttgtaaatg

SEQ ID NO: 1477543 - DNA, 15 bp, Homo sapiens
tccatttgtaaatgc

SEQ ID NO: 1477544 - DNA, 15 bp, Homo sapiens
ccatttgtaaatgcc

SEQ ID NO: 1477545 - DNA, 15 bp, Homo sapiens
catttgtaaatgcca

SEQ ID NO: 1477546 - DNA, 15 bp, Homo sapiens
atttgtaaatgccat

SEQ ID NO: 1477547 - DNA, 15 bp, Homo sapiens
tttgtaaatgccatg

SEQ ID NO: 1477548 - DNA, 15 bp, Homo sapiens
ttgtaaatgccatgt

SEQ ID NO: 1477549 - DNA, 15 bp, Homo sapiens
tgtaaatgccatgtg

SEQ ID NO: 1477550 - DNA, 15 bp, Homo sapiens
gtaaatgccatgtgc

SEQ ID NO: 1477551 - DNA, 15 bp, Homo sapiens
taaatgccatgtgct

SEQ ID NO: 1477552 - DNA, 15 bp, Homo sapiens
aaatgccatgtgctt

SEQ ID NO: 1477553 - DNA, 15 bp, Homo sapiens
aatgccatgtgcttt

SEQ ID NO: 1477554 - DNA, 15 bp, Homo sapiens
atgccatgtgctttc

SEQ ID NO: 1477555 - DNA, 15 bp, Homo sapiens
tgccatgtgctttcc

SEQ ID NO: 1477556 - DNA, 15 bp, Homo sapiens
gccatgtgctttcca

SEQ ID NO: 1477557 - DNA, 15 bp, Homo sapiens
ccatgtgctttccag

SEQ ID NO: 1477558 - DNA, 15 bp, Homo sapiens
catgtgctttccaga

SEQ ID NO: 1477559 - DNA, 15 bp, Homo sapiens
atgtgctttccagaa

SEQ ID NO: 1477560 - DNA, 15 bp, Homo sapiens
tgtgctttccagaat

SEQ ID NO: 1477561 - DNA, 15 bp, Homo sapiens
gtgctttccagaatg

SEQ ID NO: 1477562 - DNA, 15 bp, Homo sapiens
tgctttccagaatgc

SEQ ID NO: 1477563 - DNA, 15 bp, Homo sapiens
gctttccagaatgct

SEQ ID NO: 1477564 - DNA, 15 bp, Homo sapiens
ctttccagaatgctt

SEQ ID NO: 1477565 - DNA, 15 bp, Homo sapiens
tttccagaatgcttt

SEQ ID NO: 1477566 - DNA, 15 bp, Homo sapiens
ttccagaatgctttt

SEQ ID NO: 1477567 - DNA, 15 bp, Homo sapiens
tccagaatgcttttg

SEQ ID NO: 1477568 - DNA, 15 bp, Homo sapiens
ccagaatgcttttga

SEQ ID NO: 1477569 - DNA, 15 bp, Homo sapiens
cagaatgcttttgag

SEQ ID NO: 1477570 - DNA, 15 bp, Homo sapiens
agaatgcttttgagg

SEQ ID NO: 1477571 - DNA, 15 bp, Homo sapiens
gaatgcttttgagga

SEQ ID NO: 1477572 - DNA, 15 bp, Homo sapiens
aatgcttttgaggac

SEQ ID NO: 1477573 - DNA, 15 bp, Homo sapiens
atgcttttgaggacc

SEQ ID NO: 1477574 - DNA, 15 bp, Homo sapiens
tgcttttgaggacct

SEQ ID NO: 1477575 - DNA, 15 bp, Homo sapiens
gcttttgaggacctt

SEQ ID NO: 1477576 - DNA, 15 bp, Homo sapiens
cttttgaggacctta

SEQ ID NO: 1477577 - DNA, 15 bp, Homo sapiens
ttttgaggaccttat

SEQ ID NO: 1477578 - DNA, 15 bp, Homo sapiens
tttgaggaccttatt

SEQ ID NO: 1477579 - DNA, 15 bp, Homo sapiens
ttgaggaccttattg

SEQ ID NO: 1477580 - DNA, 15 bp, Homo sapiens
tgaggaccttattgt

SEQ ID NO: 1477581 - DNA, 15 bp, Homo sapiens
gaggaccttattgtt

SEQ ID NO: 1477582 - DNA, 15 bp, Homo sapiens
aggaccttattgtta

SEQ ID NO: 1477583 - DNA, 15 bp, Homo sapiens
ggaccttattgttat

SEQ ID NO: 1477584 - DNA, 15 bp, Homo sapiens
gaccttattgttatt

SEQ ID NO: 1477585 - DNA, 15 bp, Homo sapiens
accttattgttattt

SEQ ID NO: 1477586 - DNA, 15 bp, Homo sapiens
ccttattgttatttc

SEQ ID NO: 1477587 - DNA, 15 bp, Homo sapiens
cttattgttatttca

SEQ ID NO: 1477588 - DNA, 15 bp, Homo sapiens
ttattgttatttcat

SEQ ID NO: 1477589 - DNA, 15 bp, Homo sapiens
tattgttatttcatc

SEQ ID NO: 1477590 - DNA, 15 bp, Homo sapiens
attgttatttcatct

SEQ ID NO: 1477591 - DNA, 15 bp, Homo sapiens
ttgttatttcatcta

SEQ ID NO: 1477592 - DNA, 15 bp, Homo sapiens
tgttatttcatctaa

SEQ ID NO: 1477593 - DNA, 15 bp, Homo sapiens
gttatttcatctaag

SEQ ID NO: 1477594 - DNA, 15 bp, Homo sapiens
ttatttcatctaagc

SEQ ID NO: 1477595 - DNA, 15 bp, Homo sapiens
tatttcatctaagct

SEQ ID NO: 1477596 - DNA, 15 bp, Homo sapiens
atttcatctaagctt

SEQ ID NO: 1477597 - DNA, 15 bp, Homo sapiens
tttcatctaagcttc

SEQ ID NO: 1477598 - DNA, 15 bp, Homo sapiens
ttcatctaagcttca

SEQ ID NO: 1477599 - DNA, 15 bp, Homo sapiens
tcatctaagcttcaa

SEQ ID NO: 1477600 - DNA, 15 bp, Homo sapiens
catctaagcttcaaa

SEQ ID NO: 1477601 - DNA, 15 bp, Homo sapiens
atctaagcttcaaac

SEQ ID NO: 1477602 - DNA, 15 bp, Homo sapiens
tctaagcttcaaaca

SEQ ID NO: 1477603 - DNA, 15 bp, Homo sapiens
ctaagcttcaaacat

SEQ ID NO: 1477604 - DNA, 15 bp, Homo sapiens
taagcttcaaacata

SEQ ID NO: 1477605 - DNA, 15 bp, Homo sapiens
aagcttcaaacatag

SEQ ID NO: 1477606 - DNA, 15 bp, Homo sapiens
agcttcaaacatagc

SEQ ID NO: 1477607 - DNA, 15 bp, Homo sapiens
gcttcaaacatagca

SEQ ID NO: 1477608 - DNA, 15 bp, Homo sapiens
cttcaaacatagcat

SEQ ID NO: 1477609 - DNA, 15 bp, Homo sapiens
ttcaaacatagcatc

SEQ ID NO: 1477610 - DNA, 15 bp, Homo sapiens
tcaaacatagcatcg

SEQ ID NO: 1477611 - DNA, 15 bp, Homo sapiens
caaacatagcatcgt

SEQ ID NO: 1477612 - DNA, 15 bp, Homo sapiens
aaacatagcatcgtt

SEQ ID NO: 1477613 - DNA, 15 bp, Homo sapiens
aacatagcatcgttc

SEQ ID NO: 1477614 - DNA, 15 bp, Homo sapiens
acatagcatcgttcc

SEQ ID NO: 1477615 - DNA, 15 bp, Homo sapiens
catagcatcgttcct

SEQ ID NO: 1477616 - DNA, 15 bp, Homo sapiens
atagcatcgttccta

SEQ ID NO: 1477617 - DNA, 15 bp, Homo sapiens
tagcatcgttcctac

SEQ ID NO: 1477618 - DNA, 15 bp, Homo sapiens
agcatcgttcctacc

SEQ ID NO: 1477619 - DNA, 15 bp, Homo sapiens
gcatcgttcctacca

SEQ ID NO: 1477620 - DNA, 15 bp, Homo sapiens
catcgttcctaccat

SEQ ID NO: 1477621 - DNA, 15 bp, Homo sapiens
atcgttcctaccata

SEQ ID NO: 1477622 - DNA, 15 bp, Homo sapiens
tcgttcctaccatat

SEQ ID NO: 1477623 - DNA, 15 bp, Homo sapiens
cgttcctaccatatt

SEQ ID NO: 1477624 - DNA, 15 bp, Homo sapiens
gttcctaccatattt

SEQ ID NO: 1477625 - DNA, 15 bp, Homo sapiens
ttcctaccatattta

SEQ ID NO: 1477626 - DNA, 15 bp, Homo sapiens
tcctaccatatttaa

SEQ ID NO: 1477627 - DNA, 15 bp, Homo sapiens
cctaccatatttaat

SEQ ID NO: 1477628 - DNA, 15 bp, Homo sapiens
ctaccatatttaatt

SEQ ID NO: 1477629 - DNA, 15 bp, Homo sapiens
taccatatttaattc

SEQ ID NO: 1477630 - DNA, 15 bp, Homo sapiens
accatatttaattca

SEQ ID NO: 1477631 - DNA, 15 bp, Homo sapiens
ccatatttaattcag

SEQ ID NO: 1477632 - DNA, 15 bp, Homo sapiens
catatttaattcaga

SEQ ID NO: 1477633 - DNA, 15 bp, Homo sapiens
atatttaattcagac

SEQ ID NO: 1477634 - DNA, 15 bp, Homo sapiens
tatttaattcagact

SEQ ID NO: 1477635 - DNA, 15 bp, Homo sapiens
atttaattcagactc

SEQ ID NO: 1477636 - DNA, 15 bp, Homo sapiens
tttaattcagactct

SEQ ID NO: 1477637 - DNA, 15 bp, Homo sapiens
ttaattcagactctt

SEQ ID NO: 1477638 - DNA, 15 bp, Homo sapiens
taattcagactcttt

SEQ ID NO: 1477639 - DNA, 15 bp, Homo sapiens
aattcagactctttt

SEQ ID NO: 1477640 - DNA, 15 bp, Homo sapiens
attcagactcttttc

SEQ ID NO: 1477641 - DNA, 15 bp, Homo sapiens
ttcagactcttttct

SEQ ID NO: 1477642 - DNA, 15 bp, Homo sapiens
tcagactcttttctc

SEQ ID NO: 1477643 - DNA, 15 bp, Homo sapiens
cagactcttttctcc

SEQ ID NO: 1477644 - DNA, 15 bp, Homo sapiens
agactcttttctcct

SEQ ID NO: 1477645 - DNA, 15 bp, Homo sapiens
gactcttttctcctt

SEQ ID NO: 1477646 - DNA, 15 bp, Homo sapiens
actcttttctccttt

SEQ ID NO: 1477647 - DNA, 15 bp, Homo sapiens
ctcttttctcctttc

SEQ ID NO: 1477648 - DNA, 15 bp, Homo sapiens
tcttttctcctttcc

SEQ ID NO: 1477649 - DNA, 15 bp, Homo sapiens
cttttctcctttcct

SEQ ID NO: 1477650 - DNA, 15 bp, Homo sapiens
ttttctcctttcctg

SEQ ID NO: 1477651 - DNA, 15 bp, Homo sapiens
tttctcctttcctgt

SEQ ID NO: 1477652 - DNA, 15 bp, Homo sapiens
ttctcctttcctgtc

SEQ ID NO: 1477653 - DNA, 15 bp, Homo sapiens
tctcctttcctgtcg

SEQ ID NO: 1477654 - DNA, 15 bp, Homo sapiens
ctcctttcctgtcgt

SEQ ID NO: 1477655 - DNA, 15 bp, Homo sapiens
tcctttcctgtcgtc

SEQ ID NO: 1477656 - DNA, 15 bp, Homo sapiens
cctttcctgtcgtca

SEQ ID NO: 1477657 - DNA, 15 bp, Homo sapiens
ctttcctgtcgtcac

SEQ ID NO: 1477658 - DNA, 15 bp, Homo sapiens
tttcctgtcgtcact

SEQ ID NO: 1477659 - DNA, 15 bp, Homo sapiens
ttcctgtcgtcactt

SEQ ID NO: 1477660 - DNA, 15 bp, Homo sapiens
tcctgtcgtcacttc

SEQ ID NO: 1477661 - DNA, 15 bp, Homo sapiens
cctgtcgtcacttcc

SEQ ID NO: 1477662 - DNA, 15 bp, Homo sapiens
ctgtcgtcacttccc

SEQ ID NO: 1477663 - DNA, 15 bp, Homo sapiens
tgtcgtcacttcccc

SEQ ID NO: 1477664 - DNA, 15 bp, Homo sapiens
gtcgtcacttcccca

SEQ ID NO: 1477665 - DNA, 15 bp, Homo sapiens
tcgtcacttccccat

SEQ ID NO: 1477666 - DNA, 15 bp, Homo sapiens
cgtcacttccccatc

SEQ ID NO: 1477667 - DNA, 15 bp, Homo sapiens
gtcacttccccatct

SEQ ID NO: 1477668 - DNA, 15 bp, Homo sapiens
tcacttccccatctg

SEQ ID NO: 1477669 - DNA, 15 bp, Homo sapiens
cacttccccatctgt

SEQ ID NO: 1477670 - DNA, 15 bp, Homo sapiens
acttccccatctgtg

SEQ ID NO: 1477671 - DNA, 15 bp, Homo sapiens
cttccccatctgtgt

SEQ ID NO: 1477672 - DNA, 15 bp, Homo sapiens
ttccccatctgtgtg

SEQ ID NO: 1477673 - DNA, 15 bp, Homo sapiens
tccccatctgtgtgc

SEQ ID NO: 1477674 - DNA, 15 bp, Homo sapiens
ccccatctgtgtgca

SEQ ID NO: 1477675 - DNA, 15 bp, Homo sapiens
cccatctgtgtgcac

SEQ ID NO: 1477676 - DNA, 15 bp, Homo sapiens
ccatctgtgtgcaca

SEQ ID NO: 1477677 - DNA, 15 bp, Homo sapiens
catctgtgtgcacag

SEQ ID NO: 1477678 - DNA, 15 bp, Homo sapiens
atctgtgtgcacagc

SEQ ID NO: 1477679 - DNA, 15 bp, Homo sapiens
tctgtgtgcacagcc

SEQ ID NO: 1477680 - DNA, 15 bp, Homo sapiens
ctgtgtgcacagcct

SEQ ID NO: 1477681 - DNA, 15 bp, Homo sapiens
tgtgtgcacagcctg

SEQ ID NO: 1477682 - DNA, 15 bp, Homo sapiens
gtgtgcacagcctgt

SEQ ID NO: 1477683 - DNA, 15 bp, Homo sapiens
tgtgcacagcctgtg

SEQ ID NO: 1477684 - DNA, 15 bp, Homo sapiens
gtgcacagcctgtgt

SEQ ID NO: 1477685 - DNA, 15 bp, Homo sapiens
tgcacagcctgtgtt

SEQ ID NO: 1477686 - DNA, 15 bp, Homo sapiens
gcacagcctgtgttt

SEQ ID NO: 1477687 - DNA, 15 bp, Homo sapiens
cacagcctgtgttta

SEQ ID NO: 1477688 - DNA, 15 bp, Homo sapiens
acagcctgtgtttac

SEQ ID NO: 1477689 - DNA, 15 bp, Homo sapiens
cagcctgtgtttaca

SEQ ID NO: 1477690 - DNA, 15 bp, Homo sapiens
agcctgtgtttacac

SEQ ID NO: 1477691 - DNA, 15 bp, Homo sapiens
gcctgtgtttacaca

SEQ ID NO: 1477692 - DNA, 15 bp, Homo sapiens
cctgtgtttacacag

SEQ ID NO: 1477693 - DNA, 15 bp, Homo sapiens
ctgtgtttacacagc

SEQ ID NO: 1477694 - DNA, 15 bp, Homo sapiens
tgtgtttacacagca

SEQ ID NO: 1477695 - DNA, 15 bp, Homo sapiens
gtgtttacacagcag

SEQ ID NO: 1477696 - DNA, 15 bp, Homo sapiens
tgtttacacagcagg

SEQ ID NO: 1477697 - DNA, 15 bp, Homo sapiens
gtttacacagcaggt

SEQ ID NO: 1477698 - DNA, 15 bp, Homo sapiens
tttacacagcaggtt

SEQ ID NO: 1477699 - DNA, 15 bp, Homo sapiens
ttacacagcaggttt

SEQ ID NO: 1477700 - DNA, 15 bp, Homo sapiens
tacacagcaggtttg

SEQ ID NO: 1477701 - DNA, 15 bp, Homo sapiens
acacagcaggtttgc

SEQ ID NO: 1477702 - DNA, 15 bp, Homo sapiens
cacagcaggtttgcc

SEQ ID NO: 1477703 - DNA, 15 bp, Homo sapiens
acagcaggtttgccg

SEQ ID NO: 1477704 - DNA, 15 bp, Homo sapiens
cagcaggtttgccgc

SEQ ID NO: 1477705 - DNA, 15 bp, Homo sapiens
agcaggtttgccgca

SEQ ID NO: 1477706 - DNA, 15 bp, Homo sapiens
gcaggtttgccgcag

SEQ ID NO: 1477707 - DNA, 15 bp, Homo sapiens
caggtttgccgcagc

SEQ ID NO: 1477708 - DNA, 15 bp, Homo sapiens
aggtttgccgcagct

SEQ ID NO: 1477709 - DNA, 15 bp, Homo sapiens
ggtttgccgcagcta

SEQ ID NO: 1477710 - DNA, 15 bp, Homo sapiens
gtttgccgcagctac

SEQ ID NO: 1477711 - DNA, 15 bp, Homo sapiens
tttgccgcagctact

SEQ ID NO: 1477712 - DNA, 15 bp, Homo sapiens
ttgccgcagctactc

SEQ ID NO: 1477713 - DNA, 15 bp, Homo sapiens
tgccgcagctactca

SEQ ID NO: 1477714 - DNA, 15 bp, Homo sapiens
gccgcagctactcac

SEQ ID NO: 1477715 - DNA, 15 bp, Homo sapiens
ccgcagctactcact

SEQ ID NO: 1477716 - DNA, 15 bp, Homo sapiens
cgcagctactcactt

SEQ ID NO: 1477717 - DNA, 15 bp, Homo sapiens
gcagctactcacttg

SEQ ID NO: 1477718 - DNA, 15 bp, Homo sapiens
cagctactcacttgt

SEQ ID NO: 1477719 - DNA, 15 bp, Homo sapiens
agctactcacttgtc

SEQ ID NO: 1477720 - DNA, 15 bp, Homo sapiens
gctactcacttgtcc

SEQ ID NO: 1477721 - DNA, 15 bp, Homo sapiens
ctactcacttgtcca

SEQ ID NO: 1477722 - DNA, 15 bp, Homo sapiens
tactcacttgtccag

SEQ ID NO: 1477723 - DNA, 15 bp, Homo sapiens
actcacttgtccagg

SEQ ID NO: 1477724 - DNA, 15 bp, Homo sapiens
ctcacttgtccaggg

SEQ ID NO: 1477725 - DNA, 15 bp, Homo sapiens
tcacttgtccagggt

SEQ ID NO: 1477726 - DNA, 15 bp, Homo sapiens
cacttgtccagggtt

SEQ ID NO: 1477727 - DNA, 15 bp, Homo sapiens
acttgtccagggtta

SEQ ID NO: 1477728 - DNA, 15 bp, Homo sapiens
cttgtccagggttac

SEQ ID NO: 1477729 - DNA, 15 bp, Homo sapiens
ttgtccagggttacc

SEQ ID NO: 1477730 - DNA, 15 bp, Homo sapiens
tgtccagggttacca

SEQ ID NO: 1477731 - DNA, 15 bp, Homo sapiens
gtccagggttaccat

SEQ ID NO: 1477732 - DNA, 15 bp, Homo sapiens
tccagggttaccatg

SEQ ID NO: 1477733 - DNA, 15 bp, Homo sapiens
ccagggttaccatgc

SEQ ID NO: 1477734 - DNA, 15 bp, Homo sapiens
cagggttaccatgca

SEQ ID NO: 1477735 - DNA, 15 bp, Homo sapiens
agggttaccatgcat

SEQ ID NO: 1477736 - DNA, 15 bp, Homo sapiens
gggttaccatgcata

SEQ ID NO: 1477737 - DNA, 15 bp, Homo sapiens
ggttaccatgcatat

SEQ ID NO: 1477738 - DNA, 15 bp, Homo sapiens
gttaccatgcatatt

SEQ ID NO: 1477739 - DNA, 15 bp, Homo sapiens
ttaccatgcatattc

SEQ ID NO: 1477740 - DNA, 15 bp, Homo sapiens
taccatgcatattcc

SEQ ID NO: 1477741 - DNA, 15 bp, Homo sapiens
accatgcatattccc

SEQ ID NO: 1477742 - DNA, 15 bp, Homo sapiens
ccatgcatattccca

SEQ ID NO: 1477743 - DNA, 15 bp, Homo sapiens
catgcatattcccat

SEQ ID NO: 1477744 - DNA, 15 bp, Homo sapiens
atgcatattcccata

SEQ ID NO: 1477745 - DNA, 15 bp, Homo sapiens
tgcatattcccataa

SEQ ID NO: 1477746 - DNA, 15 bp, Homo sapiens
gcatattcccataat

SEQ ID NO: 1477747 - DNA, 15 bp, Homo sapiens
catattcccataata

SEQ ID NO: 1477748 - DNA, 15 bp, Homo sapiens
atattcccataataa

SEQ ID NO: 1477749 - DNA, 15 bp, Homo sapiens
tattcccataataat

SEQ ID NO: 1477750 - DNA, 15 bp, Homo sapiens
attcccataataatc

SEQ ID NO: 1477751 - DNA, 15 bp, Homo sapiens
ttcccataataatct

SEQ ID NO: 1477752 - DNA, 15 bp, Homo sapiens
tcccataataatctg

SEQ ID NO: 1477753 - DNA, 15 bp, Homo sapiens
cccataataatctgc

SEQ ID NO: 1477754 - DNA, 15 bp, Homo sapiens
ccataataatctgcg

SEQ ID NO: 1477755 - DNA, 15 bp, Homo sapiens
cataataatctgcgt

SEQ ID NO: 1477756 - DNA, 15 bp, Homo sapiens
ataataatctgcgtt

SEQ ID NO: 1477757 - DNA, 15 bp, Homo sapiens
taataatctgcgttt

SEQ ID NO: 1477758 - DNA, 15 bp, Homo sapiens
aataatctgcgtttc

SEQ ID NO: 1477759 - DNA, 15 bp, Homo sapiens
ataatctgcgtttca

SEQ ID NO: 1477760 - DNA, 15 bp, Homo sapiens
taatctgcgtttcac

SEQ ID NO: 1477761 - DNA, 15 bp, Homo sapiens
aatctgcgtttcacc

SEQ ID NO: 1477762 - DNA, 15 bp, Homo sapiens
atctgcgtttcaccc

SEQ ID NO: 1477763 - DNA, 15 bp, Homo sapiens
tctgcgtttcaccca

SEQ ID NO: 1477764 - DNA, 15 bp, Homo sapiens
ctgcgtttcacccat

SEQ ID NO: 1477765 - DNA, 15 bp, Homo sapiens
tgcgtttcacccatt

SEQ ID NO: 1477766 - DNA, 15 bp, Homo sapiens
gcgtttcacccattt

SEQ ID NO: 1477767 - DNA, 15 bp, Homo sapiens
cgtttcacccattta

SEQ ID NO: 1477768 - DNA, 15 bp, Homo sapiens
gtttcacccatttag

SEQ ID NO: 1477769 - DNA, 15 bp, Homo sapiens
tttcacccatttagc

SEQ ID NO: 1477770 - DNA, 15 bp, Homo sapiens
ttcacccatttagct

SEQ ID NO: 1477771 - DNA, 15 bp, Homo sapiens
tcacccatttagctc

SEQ ID NO: 1477772 - DNA, 15 bp, Homo sapiens
cacccatttagctca

SEQ ID NO: 1477773 - DNA, 15 bp, Homo sapiens
acccatttagctcac

SEQ ID NO: 1477774 - DNA, 15 bp, Homo sapiens
cccatttagctcact

SEQ ID NO: 1477775 - DNA, 15 bp, Homo sapiens
ccatttagctcactg

SEQ ID NO: 1477776 - DNA, 15 bp, Homo sapiens
catttagctcactgt

SEQ ID NO: 1477777 - DNA, 15 bp, Homo sapiens
atttagctcactgta

SEQ ID NO: 1477778 - DNA, 15 bp, Homo sapiens
tttagctcactgtag

SEQ ID NO: 1477779 - DNA, 15 bp, Homo sapiens
ttagctcactgtaga

SEQ ID NO: 1477780 - DNA, 15 bp, Homo sapiens
tagctcactgtagaa

SEQ ID NO: 1477781 - DNA, 15 bp, Homo sapiens
agctcactgtagaaa

SEQ ID NO: 1477782 - DNA, 15 bp, Homo sapiens
gctcactgtagaaac

SEQ ID NO: 1477783 - DNA, 15 bp, Homo sapiens
ctcactgtagaaact

SEQ ID NO: 1477784 - DNA, 15 bp, Homo sapiens
tcactgtagaaactt

SEQ ID NO: 1477785 - DNA, 15 bp, Homo sapiens
cactgtagaaactta

SEQ ID NO: 1477786 - DNA, 15 bp, Homo sapiens
actgtagaaacttag

SEQ ID NO: 1477787 - DNA, 15 bp, Homo sapiens
ctgtagaaacttagc

SEQ ID NO: 1477788 - DNA, 15 bp, Homo sapiens
tgtagaaacttagcc

SEQ ID NO: 1477789 - DNA, 15 bp, Homo sapiens
gtagaaacttagcca

SEQ ID NO: 1477790 - DNA, 15 bp, Homo sapiens
tagaaacttagccag

SEQ ID NO: 1477791 - DNA, 15 bp, Homo sapiens
agaaacttagccagt

SEQ ID NO: 1477792 - DNA, 15 bp, Homo sapiens
gaaacttagccagtt

SEQ ID NO: 1477793 - DNA, 15 bp, Homo sapiens
aaacttagccagttc

SEQ ID NO: 1477794 - DNA, 15 bp, Homo sapiens
aacttagccagttcc

SEQ ID NO: 1477795 - DNA, 15 bp, Homo sapiens
acttagccagttcca

SEQ ID NO: 1477796 - DNA, 15 bp, Homo sapiens
cttagccagttccat

SEQ ID NO: 1477797 - DNA, 15 bp, Homo sapiens
ttagccagttccatg

SEQ ID NO: 1477798 - DNA, 15 bp, Homo sapiens
tagccagttccatgg

SEQ ID NO: 1477799 - DNA, 15 bp, Homo sapiens
agccagttccatgga

SEQ ID NO: 1477800 - DNA, 15 bp, Homo sapiens
gccagttccatggag

SEQ ID NO: 1477801 - DNA, 15 bp, Homo sapiens
ccagttccatggagg

SEQ ID NO: 1477802 - DNA, 15 bp, Homo sapiens
cagttccatggagga

SEQ ID NO: 1477803 - DNA, 15 bp, Homo sapiens
agttccatggaggaa

SEQ ID NO: 1477804 - DNA, 15 bp, Homo sapiens
gttccatggaggaaa

SEQ ID NO: 1477805 - DNA, 15 bp, Homo sapiens
ttccatggaggaaaa

SEQ ID NO: 1477806 - DNA, 15 bp, Homo sapiens
tccatggaggaaaag

SEQ ID NO: 1477807 - DNA, 15 bp, Homo sapiens
ccatggaggaaaagt

SEQ ID NO: 1477808 - DNA, 15 bp, Homo sapiens
catggaggaaaagtc

SEQ ID NO: 1477809 - DNA, 15 bp, Homo sapiens
atggaggaaaagtcc

SEQ ID NO: 1477810 - DNA, 15 bp, Homo sapiens
tggaggaaaagtccc

SEQ ID NO: 1477811 - DNA, 15 bp, Homo sapiens
ggaggaaaagtccca

SEQ ID NO: 1477812 - DNA, 15 bp, Homo sapiens
gaggaaaagtcccac

SEQ ID NO: 1477813 - DNA, 15 bp, Homo sapiens
aggaaaagtcccaca

SEQ ID NO: 1477814 - DNA, 15 bp, Homo sapiens
ggaaaagtcccacaa

SEQ ID NO: 1477815 - DNA, 15 bp, Homo sapiens
gaaaagtcccacaat

SEQ ID NO: 1477816 - DNA, 15 bp, Homo sapiens
aaaagtcccacaatt

SEQ ID NO: 1477817 - DNA, 15 bp, Homo sapiens
aaagtcccacaattc

SEQ ID NO: 1477818 - DNA, 15 bp, Homo sapiens
aagtcccacaattct

SEQ ID NO: 1477819 - DNA, 15 bp, Homo sapiens
agtcccacaattctc

SEQ ID NO: 1477820 - DNA, 15 bp, Homo sapiens
gtcccacaattctcc

SEQ ID NO: 1477821 - DNA, 15 bp, Homo sapiens
tcccacaattctcct

SEQ ID NO: 1477822 - DNA, 15 bp, Homo sapiens
cccacaattctccta

SEQ ID NO: 1477823 - DNA, 15 bp, Homo sapiens
ccacaattctcctaa

SEQ ID NO: 1477824 - DNA, 15 bp, Homo sapiens
cacaattctcctaat

SEQ ID NO: 1477825 - DNA, 15 bp, Homo sapiens
acaattctcctaatc

SEQ ID NO: 1477826 - DNA, 15 bp, Homo sapiens
caattctcctaatct

SEQ ID NO: 1477827 - DNA, 15 bp, Homo sapiens
aattctcctaatctc

SEQ ID NO: 1477828 - DNA, 15 bp, Homo sapiens
attctcctaatctca

SEQ ID NO: 1477829 - DNA, 15 bp, Homo sapiens
ttctcctaatctcat

SEQ ID NO: 1477830 - DNA, 15 bp, Homo sapiens
tctcctaatctcata

SEQ ID NO: 1477831 - DNA, 15 bp, Homo sapiens
ctcctaatctcatag

SEQ ID NO: 1477832 - DNA, 15 bp, Homo sapiens
tcctaatctcatagt

SEQ ID NO: 1477833 - DNA, 15 bp, Homo sapiens
cctaatctcatagtc

SEQ ID NO: 1477834 - DNA, 15 bp, Homo sapiens
ctaatctcatagtca

SEQ ID NO: 1477835 - DNA, 15 bp, Homo sapiens
taatctcatagtcat

SEQ ID NO: 1477836 - DNA, 15 bp, Homo sapiens
aatctcatagtcatc

SEQ ID NO: 1477837 - DNA, 15 bp, Homo sapiens
atctcatagtcatca

SEQ ID NO: 1477838 - DNA, 15 bp, Homo sapiens
tctcatagtcatcaa

SEQ ID NO: 1477839 - DNA, 15 bp, Homo sapiens
ctcatagtcatcaac

SEQ ID NO: 1477840 - DNA, 15 bp, Homo sapiens
tcatagtcatcaaca

SEQ ID NO: 1477841 - DNA, 15 bp, Homo sapiens
catagtcatcaacaa

SEQ ID NO: 1477842 - DNA, 15 bp, Homo sapiens
atagtcatcaacaac

SEQ ID NO: 1477843 - DNA, 15 bp, Homo sapiens
tagtcatcaacaacg

SEQ ID NO: 1477844 - DNA, 15 bp, Homo sapiens
agtcatcaacaacgc

SEQ ID NO: 1477845 - DNA, 15 bp, Homo sapiens
gtcatcaacaacgcc

SEQ ID NO: 1477846 - DNA, 15 bp, Homo sapiens
tcatcaacaacgcca

SEQ ID NO: 1477847 - DNA, 15 bp, Homo sapiens
catcaacaacgccat

SEQ ID NO: 1477848 - DNA, 15 bp, Homo sapiens
atcaacaacgccatt

SEQ ID NO: 1477849 - DNA, 15 bp, Homo sapiens
tcaacaacgccatta

SEQ ID NO: 1477850 - DNA, 15 bp, Homo sapiens
caacaacgccattaa

SEQ ID NO: 1477851 - DNA, 15 bp, Homo sapiens
aacaacgccattaaa

SEQ ID NO: 1477852 - DNA, 15 bp, Homo sapiens
acaacgccattaaaa

SEQ ID NO: 1477853 - DNA, 15 bp, Homo sapiens
caacgccattaaaat

SEQ ID NO: 1477854 - DNA, 15 bp, Homo sapiens
aacgccattaaaatg

SEQ ID NO: 1477855 - DNA, 15 bp, Homo sapiens
acgccattaaaatga

SEQ ID NO: 1477856 - DNA, 15 bp, Homo sapiens
cgccattaaaatgat

SEQ ID NO: 1477857 - DNA, 15 bp, Homo sapiens
gccattaaaatgatg

SEQ ID NO: 1477858 - DNA, 15 bp, Homo sapiens
ccattaaaatgatgg

SEQ ID NO: 1477859 - DNA, 15 bp, Homo sapiens
cattaaaatgatggc

SEQ ID NO: 1477860 - DNA, 15 bp, Homo sapiens
attaaaatgatggca

SEQ ID NO: 1477861 - DNA, 15 bp, Homo sapiens
ttaaaatgatggcat

SEQ ID NO: 1477862 - DNA, 15 bp, Homo sapiens
taaaatgatggcatc

SEQ ID NO: 1477863 - DNA, 15 bp, Homo sapiens
aaaatgatggcatca

SEQ ID NO: 1477864 - DNA, 15 bp, Homo sapiens
aaatgatggcatcat

SEQ ID NO: 1477865 - DNA, 15 bp, Homo sapiens
aatgatggcatcatt

SEQ ID NO: 1477866 - DNA, 15 bp, Homo sapiens
atgatggcatcattt

SEQ ID NO: 1477867 - DNA, 15 bp, Homo sapiens
tgatggcatcatttt

SEQ ID NO: 1477868 - DNA, 15 bp, Homo sapiens
gatggcatcattttt

SEQ ID NO: 1477869 - DNA, 15 bp, Homo sapiens
atggcatcatttttc

SEQ ID NO: 1477870 - DNA, 15 bp, Homo sapiens
tggcatcatttttcc

SEQ ID NO: 1477871 - DNA, 15 bp, Homo sapiens
ggcatcatttttcca

SEQ ID NO: 1477872 - DNA, 15 bp, Homo sapiens
gcatcatttttccat

SEQ ID NO: 1477873 - DNA, 15 bp, Homo sapiens
catcatttttccata

SEQ ID NO: 1477874 - DNA, 15 bp, Homo sapiens
atcatttttccatag

SEQ ID NO: 1477875 - DNA, 15 bp, Homo sapiens
tcatttttccataga

SEQ ID NO: 1477876 - DNA, 15 bp, Homo sapiens
catttttccatagac

SEQ ID NO: 1477877 - DNA, 15 bp, Homo sapiens
atttttccatagaca

SEQ ID NO: 1477878 - DNA, 15 bp, Homo sapiens
tttttccatagacat

SEQ ID NO: 1477879 - DNA, 15 bp, Homo sapiens
ttttccatagacata

SEQ ID NO: 1477880 - DNA, 15 bp, Homo sapiens
tttccatagacatat

SEQ ID NO: 1477881 - DNA, 15 bp, Homo sapiens
ttccatagacatatt

SEQ ID NO: 1477882 - DNA, 15 bp, Homo sapiens
tccatagacatattc

SEQ ID NO: 1477883 - DNA, 15 bp, Homo sapiens
ccatagacatattcc

SEQ ID NO: 1477884 - DNA, 15 bp, Homo sapiens
catagacatattcct

SEQ ID NO: 1477885 - DNA, 15 bp, Homo sapiens
atagacatattcctg

SEQ ID NO: 1477886 - DNA, 15 bp, Homo sapiens
tagacatattcctgg

SEQ ID NO: 1477887 - DNA, 15 bp, Homo sapiens
agacatattcctggc

SEQ ID NO: 1477888 - DNA, 15 bp, Homo sapiens
gacatattcctggct

SEQ ID NO: 1477889 - DNA, 15 bp, Homo sapiens
acatattcctggctt

SEQ ID NO: 1477890 - DNA, 15 bp, Homo sapiens
catattcctggcttt

SEQ ID NO: 1477891 - DNA, 15 bp, Homo sapiens
atattcctggctttt

SEQ ID NO: 1477892 - DNA, 15 bp, Homo sapiens
tattcctggctttta

SEQ ID NO: 1477893 - DNA, 15 bp, Homo sapiens
attcctggcttttat

SEQ ID NO: 1477894 - DNA, 15 bp, Homo sapiens
ttcctggcttttatc

SEQ ID NO: 1477895 - DNA, 15 bp, Homo sapiens
tcctggcttttatca

SEQ ID NO: 1477896 - DNA, 15 bp, Homo sapiens
cctggcttttatcaa

SEQ ID NO: 1477897 - DNA, 15 bp, Homo sapiens
ctggcttttatcaac

SEQ ID NO: 1477898 - DNA, 15 bp, Homo sapiens
tggcttttatcaaca

SEQ ID NO: 1477899 - DNA, 15 bp, Homo sapiens
ggcttttatcaacag

SEQ ID NO: 1477900 - DNA, 15 bp, Homo sapiens
gcttttatcaacagt

SEQ ID NO: 1477901 - DNA, 15 bp, Homo sapiens
cttttatcaacagtg

SEQ ID NO: 1477902 - DNA, 15 bp, Homo sapiens
ttttatcaacagtgc

SEQ ID NO: 1477903 - DNA, 15 bp, Homo sapiens
tttatcaacagtgcc

SEQ ID NO: 1477904 - DNA, 15 bp, Homo sapiens
ttatcaacagtgccc

SEQ ID NO: 1477905 - DNA, 15 bp, Homo sapiens
tatcaacagtgccca

SEQ ID NO: 1477906 - DNA, 15 bp, Homo sapiens
atcaacagtgcccag

SEQ ID NO: 1477907 - DNA, 15 bp, Homo sapiens
tcaacagtgcccagc

SEQ ID NO: 1477908 - DNA, 15 bp, Homo sapiens
caacagtgcccagca

SEQ ID NO: 1477909 - DNA, 15 bp, Homo sapiens
aacagtgcccagcac

SEQ ID NO: 1477910 - DNA, 15 bp, Homo sapiens
acagtgcccagcaca

SEQ ID NO: 1477911 - DNA, 15 bp, Homo sapiens
cagtgcccagcacat

SEQ ID NO: 1477912 - DNA, 15 bp, Homo sapiens
agtgcccagcacata

SEQ ID NO: 1477913 - DNA, 15 bp, Homo sapiens
gtgcccagcacatag

SEQ ID NO: 1477914 - DNA, 15 bp, Homo sapiens
tgcccagcacataga

SEQ ID NO: 1477915 - DNA, 15 bp, Homo sapiens
gcccagcacatagaa

SEQ ID NO: 1477916 - DNA, 15 bp, Homo sapiens
cccagcacatagaag

SEQ ID NO: 1477917 - DNA, 15 bp, Homo sapiens
ccagcacatagaaga

SEQ ID NO: 1477918 - DNA, 15 bp, Homo sapiens
cagcacatagaagat

SEQ ID NO: 1477919 - DNA, 15 bp, Homo sapiens
agcacatagaagata

SEQ ID NO: 1477920 - DNA, 15 bp, Homo sapiens
gcacatagaagatat

SEQ ID NO: 1477921 - DNA, 15 bp, Homo sapiens
cacatagaagatatc

SEQ ID NO: 1477922 - DNA, 15 bp, Homo sapiens
acatagaagatatcc

SEQ ID NO: 1477923 - DNA, 15 bp, Homo sapiens
atagaagatatccaa

SEQ ID NO: 1477924 - DNA, 15 bp, Homo sapiens
tagaagatatccaat

SEQ ID NO: 1477925 - DNA, 15 bp, Homo sapiens
agaagatatccaata

SEQ ID NO: 1477926 - DNA, 15 bp, Homo sapiens
gaagatatccaataa

SEQ ID NO: 1477927 - DNA, 15 bp, Homo sapiens
aagatatccaataaa

SEQ ID NO: 1477928 - DNA, 15 bp, Homo sapiens
agatatccaataaat

SEQ ID NO: 1477929 - DNA, 15 bp, Homo sapiens
gatatccaataaata

SEQ ID NO: 1477930 - DNA, 15 bp, Homo sapiens
atatccaataaatat

SEQ ID NO: 1477931 - DNA, 15 bp, Homo sapiens
tatccaataaatatt

SEQ ID NO: 1477932 - DNA, 15 bp, Homo sapiens
atccaataaatattt

SEQ ID NO: 1477933 - DNA, 15 bp, Homo sapiens
tccaataaatatttg

SEQ ID NO: 1477934 - DNA, 15 bp, Homo sapiens
ccaataaatatttgc

SEQ ID NO: 1477935 - DNA, 15 bp, Homo sapiens
caataaatatttgct

SEQ ID NO: 1477936 - DNA, 15 bp, Homo sapiens
aataaatatttgcta

SEQ ID NO: 1477937 - DNA, 15 bp, Homo sapiens
ataaatatttgctaa

SEQ ID NO: 1477938 - DNA, 15 bp, Homo sapiens
taaatatttgctaaa

SEQ ID NO: 1477939 - DNA, 15 bp, Homo sapiens
aaatatttgctaaat

SEQ ID NO: 1477940 - DNA, 15 bp, Homo sapiens
aatatttgctaaatt

SEQ ID NO: 1477941 - DNA, 15 bp, Homo sapiens
atatttgctaaatta

SEQ ID NO: 1477942 - DNA, 15 bp, Homo sapiens
tatttgctaaattaa

SEQ ID NO: 1477943 - DNA, 15 bp, Homo sapiens
atttgctaaattaat

SEQ ID NO: 1477944 - DNA, 15 bp, Homo sapiens
tttgctaaattaatg

SEQ ID NO: 1477945 - DNA, 15 bp, Homo sapiens
ttgctaaattaatga

SEQ ID NO: 1477946 - DNA, 15 bp, Homo sapiens
tgctaaattaatgaa

SEQ ID NO: 1477947 - DNA, 15 bp, Homo sapiens
gctaaattaatgaat

SEQ ID NO: 1477948 - DNA, 15 bp, Homo sapiens
ctaaattaatgaatg

SEQ ID NO: 1477949 - DNA, 15 bp, Homo sapiens
taaattaatgaatgc

SEQ ID NO: 1477950 - DNA, 15 bp, Homo sapiens
aaattaatgaatgca

SEQ ID NO: 1477951 - DNA, 15 bp, Homo sapiens
aattaatgaatgcat

SEQ ID NO: 1477952 - DNA, 15 bp, Homo sapiens
attaatgaatgcatc

SEQ ID NO: 1477953 - DNA, 15 bp, Homo sapiens
ttaatgaatgcatca

SEQ ID NO: 1477954 - DNA, 15 bp, Homo sapiens
taatgaatgcatcag

SEQ ID NO: 1477955 - DNA, 15 bp, Homo sapiens
aatgaatgcatcagt

SEQ ID NO: 1477956 - DNA, 15 bp, Homo sapiens
atgaatgcatcagtg

SEQ ID NO: 1477957 - DNA, 15 bp, Homo sapiens
tgaatgcatcagtga

SEQ ID NO: 1477958 - DNA, 15 bp, Homo sapiens
gaatgcatcagtgaa

SEQ ID NO: 1477959 - DNA, 15 bp, Homo sapiens
aatgcatcagtgaat

SEQ ID NO: 1477960 - DNA, 15 bp, Homo sapiens
atgcatcagtgaatg

SEQ ID NO: 1477961 - DNA, 15 bp, Homo sapiens
tgcatcagtgaatga

SEQ ID NO: 1477962 - DNA, 15 bp, Homo sapiens
gcatcagtgaatgag

SEQ ID NO: 1477963 - DNA, 15 bp, Homo sapiens
catcagtgaatgagt

SEQ ID NO: 1477964 - DNA, 15 bp, Homo sapiens
atcagtgaatgagtg

SEQ ID NO: 1477965 - DNA, 15 bp, Homo sapiens
tcagtgaatgagtgt

SEQ ID NO: 1477966 - DNA, 15 bp, Homo sapiens
cagtgaatgagtgtt

SEQ ID NO: 1477967 - DNA, 15 bp, Homo sapiens
agtgaatgagtgttc

SEQ ID NO: 1477968 - DNA, 15 bp, Homo sapiens
gtgaatgagtgttct

SEQ ID NO: 1477969 - DNA, 15 bp, Homo sapiens
tgaatgagtgttctt

SEQ ID NO: 1477970 - DNA, 15 bp, Homo sapiens
gaatgagtgttcttt

SEQ ID NO: 1477971 - DNA, 15 bp, Homo sapiens
aatgagtgttctttt

SEQ ID NO: 1477972 - DNA, 15 bp, Homo sapiens
atgagtgttcttttg

SEQ ID NO: 1477973 - DNA, 15 bp, Homo sapiens
tgagtgttcttttgt

SEQ ID NO: 1477974 - DNA, 15 bp, Homo sapiens
gagtgttcttttgtg

SEQ ID NO: 1477975 - DNA, 15 bp, Homo sapiens
agtgttcttttgtgt

SEQ ID NO: 1477976 - DNA, 15 bp, Homo sapiens
gtgttcttttgtgtg

SEQ ID NO: 1477977 - DNA, 15 bp, Homo sapiens
tgttcttttgtgtga

SEQ ID NO: 1477978 - DNA, 15 bp, Homo sapiens
gttcttttgtgtgac

SEQ ID NO: 1477979 - DNA, 15 bp, Homo sapiens
ttcttttgtgtgaca

SEQ ID NO: 1477980 - DNA, 15 bp, Homo sapiens
tcttttgtgtgacaa

SEQ ID NO: 1477981 - DNA, 15 bp, Homo sapiens
cttttgtgtgacaaa

SEQ ID NO: 1477982 - DNA, 15 bp, Homo sapiens
ttttgtgtgacaaat

SEQ ID NO: 1477983 - DNA, 15 bp, Homo sapiens
tttgtgtgacaaatc

SEQ ID NO: 1477984 - DNA, 15 bp, Homo sapiens
ttgtgtgacaaatct

SEQ ID NO: 1477985 - DNA, 15 bp, Homo sapiens
tgtgtgacaaatctg

SEQ ID NO: 1477986 - DNA, 15 bp, Homo sapiens
gtgtgacaaatctgt

SEQ ID NO: 1477987 - DNA, 15 bp, Homo sapiens
tgtgacaaatctgtt

SEQ ID NO: 1477988 - DNA, 15 bp, Homo sapiens
gtgacaaatctgttt

SEQ ID NO: 1477989 - DNA, 15 bp, Homo sapiens
tgacaaatctgtttt

SEQ ID NO: 1477990 - DNA, 15 bp, Homo sapiens
gacaaatctgtttta

SEQ ID NO: 1477991 - DNA, 15 bp, Homo sapiens
acaaatctgttttat

SEQ ID NO: 1477992 - DNA, 15 bp, Homo sapiens
caaatctgttttatg

SEQ ID NO: 1477993 - DNA, 15 bp, Homo sapiens
aaatctgttttatgg

SEQ ID NO: 1477994 - DNA, 15 bp, Homo sapiens
aatctgttttatggc

SEQ ID NO: 1477995 - DNA, 15 bp, Homo sapiens
atctgttttatggcc

SEQ ID NO: 1477996 - DNA, 15 bp, Homo sapiens
tctgttttatggccc

SEQ ID NO: 1477997 - DNA, 15 bp, Homo sapiens
ctgttttatggcccc

SEQ ID NO: 1477998 - DNA, 15 bp, Homo sapiens
tgttttatggcccca

SEQ ID NO: 1477999 - DNA, 15 bp, Homo sapiens
gttttatggccccat

SEQ ID NO: 1478000 - DNA, 15 bp, Homo sapiens
ttttatggccccatt

SEQ ID NO: 1478001 - DNA, 15 bp, Homo sapiens
tttatggccccattg

SEQ ID NO: 1478002 - DNA, 15 bp, Homo sapiens
ttatggccccattgt

SEQ ID NO: 1478003 - DNA, 15 bp, Homo sapiens
tatggccccattgtg

SEQ ID NO: 1478004 - DNA, 15 bp, Homo sapiens
atggccccattgtga

SEQ ID NO: 1478005 - DNA, 15 bp, Homo sapiens
tggccccattgtgag

SEQ ID NO: 1478006 - DNA, 15 bp, Homo sapiens
ggccccattgtgaga

SEQ ID NO: 1478007 - DNA, 15 bp, Homo sapiens
gccccattgtgagac

SEQ ID NO: 1478008 - DNA, 15 bp, Homo sapiens
ccccattgtgagaca

SEQ ID NO: 1478009 - DNA, 15 bp, Homo sapiens
cccattgtgagacaa

SEQ ID NO: 1478010 - DNA, 15 bp, Homo sapiens
ccattgtgagacaag

SEQ ID NO: 1478011 - DNA, 15 bp, Homo sapiens
cattgtgagacaaga

SEQ ID NO: 1478012 - DNA, 15 bp, Homo sapiens
attgtgagacaagac

SEQ ID NO: 1478013 - DNA, 15 bp, Homo sapiens
ttgtgagacaagaca

SEQ ID NO: 1478014 - DNA, 15 bp, Homo sapiens
tgtgagacaagacat

SEQ ID NO: 1478015 - DNA, 15 bp, Homo sapiens
gtgagacaagacatg

SEQ ID NO: 1478016 - DNA, 15 bp, Homo sapiens
tgagacaagacatgt

SEQ ID NO: 1478017 - DNA, 15 bp, Homo sapiens
gagacaagacatgtt

SEQ ID NO: 1478018 - DNA, 15 bp, Homo sapiens
agacaagacatgtta

SEQ ID NO: 1478019 - DNA, 15 bp, Homo sapiens
gacaagacatgttaa

SEQ ID NO: 1478020 - DNA, 15 bp, Homo sapiens
acaagacatgttaaa

SEQ ID NO: 1478021 - DNA, 15 bp, Homo sapiens
caagacatgttaaag

SEQ ID NO: 1478022 - DNA, 15 bp, Homo sapiens
aagacatgttaaaga

SEQ ID NO: 1478023 - DNA, 15 bp, Homo sapiens
agacatgttaaagaa

SEQ ID NO: 1478024 - DNA, 15 bp, Homo sapiens
gacatgttaaagaaa

SEQ ID NO: 1478025 - DNA, 15 bp, Homo sapiens
acatgttaaagaaat

SEQ ID NO: 1478026 - DNA, 15 bp, Homo sapiens
catgttaaagaaata

SEQ ID NO: 1478027 - DNA, 15 bp, Homo sapiens
atgttaaagaaatat

SEQ ID NO: 1478028 - DNA, 15 bp, Homo sapiens
tgttaaagaaatatc

SEQ ID NO: 1478029 - DNA, 15 bp, Homo sapiens
gttaaagaaatatcc

SEQ ID NO: 1478030 - DNA, 15 bp, Homo sapiens
ttaaagaaatatcca

SEQ ID NO: 1478031 - DNA, 15 bp, Homo sapiens
taaagaaatatccag

SEQ ID NO: 1478032 - DNA, 15 bp, Homo sapiens
aaagaaatatccaga

SEQ ID NO: 1478033 - DNA, 15 bp, Homo sapiens
aagaaatatccagag

SEQ ID NO: 1478034 - DNA, 15 bp, Homo sapiens
agaaatatccagagt

SEQ ID NO: 1478035 - DNA, 15 bp, Homo sapiens
gaaatatccagagtg

SEQ ID NO: 1478036 - DNA, 15 bp, Homo sapiens
aaatatccagagtga

SEQ ID NO: 1478037 - DNA, 15 bp, Homo sapiens
aatatccagagtgac

SEQ ID NO: 1478038 - DNA, 15 bp, Homo sapiens
atatccagagtgacc

SEQ ID NO: 1478039 - DNA, 15 bp, Homo sapiens
tatccagagtgacct

SEQ ID NO: 1478040 - DNA, 15 bp, Homo sapiens
atccagagtgacctt

SEQ ID NO: 1478041 - DNA, 15 bp, Homo sapiens
tccagagtgaccttt

SEQ ID NO: 1478042 - DNA, 15 bp, Homo sapiens
ccagagtgacctttg

SEQ ID NO: 1478043 - DNA, 15 bp, Homo sapiens
cagagtgacctttgc

SEQ ID NO: 1478044 - DNA, 15 bp, Homo sapiens
agagtgacctttgca

SEQ ID NO: 1478045 - DNA, 15 bp, Homo sapiens
gagtgacctttgcat

SEQ ID NO: 1478046 - DNA, 15 bp, Homo sapiens
agtgacctttgcatg

SEQ ID NO: 1478047 - DNA, 15 bp, Homo sapiens
gtgacctttgcatgt

SEQ ID NO: 1478048 - DNA, 15 bp, Homo sapiens
tgacctttgcatgtt

SEQ ID NO: 1478049 - DNA, 15 bp, Homo sapiens
gacctttgcatgttt

SEQ ID NO: 1478050 - DNA, 15 bp, Homo sapiens
acctttgcatgtttc

SEQ ID NO: 1478051 - DNA, 15 bp, Homo sapiens
cctttgcatgtttcg

SEQ ID NO: 1478052 - DNA, 15 bp, Homo sapiens
ctttgcatgtttcga

SEQ ID NO: 1478053 - DNA, 15 bp, Homo sapiens
tttgcatgtttcgag

SEQ ID NO: 1478054 - DNA, 15 bp, Homo sapiens
ttgcatgtttcgagg

SEQ ID NO: 1478055 - DNA, 15 bp, Homo sapiens
tgcatgtttcgagga

SEQ ID NO: 1478056 - DNA, 15 bp, Homo sapiens
gcatgtttcgaggag

SEQ ID NO: 1478057 - DNA, 15 bp, Homo sapiens
catgtttcgaggagc

SEQ ID NO: 1478058 - DNA, 15 bp, Homo sapiens
atgtttcgaggagca

SEQ ID NO: 1478059 - DNA, 15 bp, Homo sapiens
tgtttcgaggagcac

SEQ ID NO: 1478060 - DNA, 15 bp, Homo sapiens
gtttcgaggagcaca

SEQ ID NO: 1478061 - DNA, 15 bp, Homo sapiens
tttcgaggagcacat

SEQ ID NO: 1478062 - DNA, 15 bp, Homo sapiens
ttcgaggagcacata

SEQ ID NO: 1478063 - DNA, 15 bp, Homo sapiens
tcgaggagcacatag

SEQ ID NO: 1478064 - DNA, 15 bp, Homo sapiens
cgaggagcacatagt

SEQ ID NO: 1478065 - DNA, 15 bp, Homo sapiens
gaggagcacatagtc

SEQ ID NO: 1478066 - DNA, 15 bp, Homo sapiens
aggagcacatagtct

SEQ ID NO: 1478067 - DNA, 15 bp, Homo sapiens
ggagcacatagtctg

SEQ ID NO: 1478068 - DNA, 15 bp, Homo sapiens
gagcacatagtctgg

SEQ ID NO: 1478069 - DNA, 15 bp, Homo sapiens
agcacatagtctggt

SEQ ID NO: 1478070 - DNA, 15 bp, Homo sapiens
gcacatagtctggtc

SEQ ID NO: 1478071 - DNA, 15 bp, Homo sapiens
cacatagtctggtca

SEQ ID NO: 1478072 - DNA, 15 bp, Homo sapiens
acatagtctggtcac

SEQ ID NO: 1478073 - DNA, 15 bp, Homo sapiens
catagtctggtcacc

SEQ ID NO: 1478074 - DNA, 15 bp, Homo sapiens
atagtctggtcacca

SEQ ID NO: 1478075 - DNA, 15 bp, Homo sapiens
tagtctggtcaccaa

SEQ ID NO: 1478076 - DNA, 15 bp, Homo sapiens
agtctggtcaccaaa

SEQ ID NO: 1478077 - DNA, 15 bp, Homo sapiens
gtctggtcaccaaac

SEQ ID NO: 1478078 - DNA, 15 bp, Homo sapiens
tctggtcaccaaaca

SEQ ID NO: 1478079 - DNA, 15 bp, Homo sapiens
ctggtcaccaaacac

SEQ ID NO: 1478080 - DNA, 15 bp, Homo sapiens
tggtcaccaaacaca

SEQ ID NO: 1478081 - DNA, 15 bp, Homo sapiens
ggtcaccaaacacaa

SEQ ID NO: 1478082 - DNA, 15 bp, Homo sapiens
gtcaccaaacacaag

SEQ ID NO: 1478083 - DNA, 15 bp, Homo sapiens
tcaccaaacacaagt

SEQ ID NO: 1478084 - DNA, 15 bp, Homo sapiens
caccaaacacaagtg

SEQ ID NO: 1478085 - DNA, 15 bp, Homo sapiens
accaaacacaagtgt

SEQ ID NO: 1478086 - DNA, 15 bp, Homo sapiens
ccaaacacaagtgtc

SEQ ID NO: 1478087 - DNA, 15 bp, Homo sapiens
caaacacaagtgtcc

SEQ ID NO: 1478088 - DNA, 15 bp, Homo sapiens
aaacacaagtgtcca

SEQ ID NO: 1478089 - DNA, 15 bp, Homo sapiens
aacacaagtgtccac

SEQ ID NO: 1478090 - DNA, 15 bp, Homo sapiens
acacaagtgtccaca

SEQ ID NO: 1478091 - DNA, 15 bp, Homo sapiens
cacaagtgtccacag

SEQ ID NO: 1478092 - DNA, 15 bp, Homo sapiens
acaagtgtccacagc

SEQ ID NO: 1478093 - DNA, 15 bp, Homo sapiens
caagtgtccacagcc

SEQ ID NO: 1478094 - DNA, 15 bp, Homo sapiens
aagtgtccacagcct

SEQ ID NO: 1478095 - DNA, 15 bp, Homo sapiens
agtgtccacagcctg

SEQ ID NO: 1478096 - DNA, 15 bp, Homo sapiens
gtgtccacagcctgt

SEQ ID NO: 1478097 - DNA, 15 bp, Homo sapiens
tgtccacagcctgtg

SEQ ID NO: 1478098 - DNA, 15 bp, Homo sapiens
gtccacagcctgtgc

SEQ ID NO: 1478099 - DNA, 15 bp, Homo sapiens
tccacagcctgtgct

SEQ ID NO: 1478100 - DNA, 15 bp, Homo sapiens
ccacagcctgtgctc

SEQ ID NO: 1478101 - DNA, 15 bp, Homo sapiens
cacagcctgtgctct

SEQ ID NO: 1478102 - DNA, 15 bp, Homo sapiens
acagcctgtgctctc

SEQ ID NO: 1478103 - DNA, 15 bp, Homo sapiens
cagcctgtgctctcc

SEQ ID NO: 1478104 - DNA, 15 bp, Homo sapiens
agcctgtgctctcca

SEQ ID NO: 1478105 - DNA, 15 bp, Homo sapiens
gcctgtgctctccaa

SEQ ID NO: 1478106 - DNA, 15 bp, Homo sapiens
cctgtgctctccaag

SEQ ID NO: 1478107 - DNA, 15 bp, Homo sapiens
ctgtgctctccaaga

SEQ ID NO: 1478108 - DNA, 15 bp, Homo sapiens
tgtgctctccaagat

SEQ ID NO: 1478109 - DNA, 15 bp, Homo sapiens
gtgctctccaagatg

SEQ ID NO: 1478110 - DNA, 15 bp, Homo sapiens
tgctctccaagatgg

SEQ ID NO: 1478111 - DNA, 15 bp, Homo sapiens
gctctccaagatggt

SEQ ID NO: 1478112 - DNA, 15 bp, Homo sapiens
ctctccaagatggta

SEQ ID NO: 1478113 - DNA, 15 bp, Homo sapiens
tctccaagatggtaa

SEQ ID NO: 1478114 - DNA, 15 bp, Homo sapiens
ctccaagatggtaac

SEQ ID NO: 1478115 - DNA, 15 bp, Homo sapiens
tccaagatggtaacc

SEQ ID NO: 1478116 - DNA, 15 bp, Homo sapiens
ccaagatggtaacca

SEQ ID NO: 1478117 - DNA, 15 bp, Homo sapiens
caagatggtaaccac

SEQ ID NO: 1478118 - DNA, 15 bp, Homo sapiens
aagatggtaaccact

SEQ ID NO: 1478119 - DNA, 15 bp, Homo sapiens
agatggtaaccactc

SEQ ID NO: 1478120 - DNA, 15 bp, Homo sapiens
gatggtaaccactca

SEQ ID NO: 1478121 - DNA, 15 bp, Homo sapiens
atggtaaccactcat

SEQ ID NO: 1478122 - DNA, 15 bp, Homo sapiens
tggtaaccactcata

SEQ ID NO: 1478123 - DNA, 15 bp, Homo sapiens
ggtaaccactcataa

SEQ ID NO: 1478124 - DNA, 15 bp, Homo sapiens
gtaaccactcataac

SEQ ID NO: 1478125 - DNA, 15 bp, Homo sapiens
taaccactcataaca

SEQ ID NO: 1478126 - DNA, 15 bp, Homo sapiens
aaccactcataacat

SEQ ID NO: 1478127 - DNA, 15 bp, Homo sapiens
accactcataacatg

SEQ ID NO: 1478128 - DNA, 15 bp, Homo sapiens
ccactcataacatgt

SEQ ID NO: 1478129 - DNA, 15 bp, Homo sapiens
cactcataacatgtg

SEQ ID NO: 1478130 - DNA, 15 bp, Homo sapiens
actcataacatgtgg

SEQ ID NO: 1478131 - DNA, 15 bp, Homo sapiens
ctcataacatgtggc

SEQ ID NO: 1478132 - DNA, 15 bp, Homo sapiens
tcataacatgtggct

SEQ ID NO: 1478133 - DNA, 15 bp, Homo sapiens
cataacatgtggctt

SEQ ID NO: 1478134 - DNA, 15 bp, Homo sapiens
ataacatgtggcttt

SEQ ID NO: 1478135 - DNA, 15 bp, Homo sapiens
taacatgtggctttt

SEQ ID NO: 1478136 - DNA, 15 bp, Homo sapiens
aacatgtggcttttt

SEQ ID NO: 1478137 - DNA, 15 bp, Homo sapiens
acatgtggcttttta

SEQ ID NO: 1478138 - DNA, 15 bp, Homo sapiens
catgtggctttttaa

SEQ ID NO: 1478139 - DNA, 15 bp, Homo sapiens
atgtggctttttaaa

SEQ ID NO: 1478140 - DNA, 15 bp, Homo sapiens
tgtggctttttaaat

SEQ ID NO: 1478141 - DNA, 15 bp, Homo sapiens
gtggctttttaaatt

SEQ ID NO: 1478142 - DNA, 15 bp, Homo sapiens
tggctttttaaattc

SEQ ID NO: 1478143 - DNA, 15 bp, Homo sapiens
ggctttttaaattca

SEQ ID NO: 1478144 - DNA, 15 bp, Homo sapiens
gctttttaaattcaa

SEQ ID NO: 1478145 - DNA, 15 bp, Homo sapiens
ctttttaaattcaaa

SEQ ID NO: 1478146 - DNA, 15 bp, Homo sapiens
tttttaaattcaaat

SEQ ID NO: 1478147 - DNA, 15 bp, Homo sapiens
ttttaaattcaaatg

SEQ ID NO: 1478148 - DNA, 15 bp, Homo sapiens
tttaaattcaaatga

SEQ ID NO: 1478149 - DNA, 15 bp, Homo sapiens
ttaaattcaaatgaa

SEQ ID NO: 1478150 - DNA, 15 bp, Homo sapiens
taaattcaaatgaac

SEQ ID NO: 1478151 - DNA, 15 bp, Homo sapiens
aaattcaaatgaact

SEQ ID NO: 1478152 - DNA, 15 bp, Homo sapiens
aattcaaatgaacta

SEQ ID NO: 1478153 - DNA, 15 bp, Homo sapiens
attcaaatgaactaa

SEQ ID NO: 1478154 - DNA, 15 bp, Homo sapiens
ttcaaatgaactaaa

SEQ ID NO: 1478155 - DNA, 15 bp, Homo sapiens
tcaaatgaactaaag

SEQ ID NO: 1478156 - DNA, 15 bp, Homo sapiens
caaatgaactaaagt

SEQ ID NO: 1478157 - DNA, 15 bp, Homo sapiens
aaatgaactaaagtt

SEQ ID NO: 1478158 - DNA, 15 bp, Homo sapiens
aatgaactaaagttg

SEQ ID NO: 1478159 - DNA, 15 bp, Homo sapiens
atgaactaaagttga

SEQ ID NO: 1478160 - DNA, 15 bp, Homo sapiens
tgaactaaagttgac

SEQ ID NO: 1478161 - DNA, 15 bp, Homo sapiens
gaactaaagttgact

SEQ ID NO: 1478162 - DNA, 15 bp, Homo sapiens
aactaaagttgacta

SEQ ID NO: 1478163 - DNA, 15 bp, Homo sapiens
actaaagttgactaa

SEQ ID NO: 1478164 - DNA, 15 bp, Homo sapiens
ctaaagttgactaaa

SEQ ID NO: 1478165 - DNA, 15 bp, Homo sapiens
taaagttgactaaaa

SEQ ID NO: 1478166 - DNA, 15 bp, Homo sapiens
aaagttgactaaaat

SEQ ID NO: 1478167 - DNA, 15 bp, Homo sapiens
aagttgactaaaatt

SEQ ID NO: 1478168 - DNA, 15 bp, Homo sapiens
agttgactaaaatta

SEQ ID NO: 1478169 - DNA, 15 bp, Homo sapiens
gttgactaaaattaa

SEQ ID NO: 1478170 - DNA, 15 bp, Homo sapiens
ttgactaaaattaaa

SEQ ID NO: 1478171 - DNA, 15 bp, Homo sapiens
tgactaaaattaaaa

SEQ ID NO: 1478172 - DNA, 15 bp, Homo sapiens
gactaaaattaaaaa

SEQ ID NO: 1478173 - DNA, 15 bp, Homo sapiens
actaaaattaaaaat

SEQ ID NO: 1478174 - DNA, 15 bp, Homo sapiens
ctaaaattaaaaatt

SEQ ID NO: 1478175 - DNA, 15 bp, Homo sapiens
taaaattaaaaattc

SEQ ID NO: 1478176 - DNA, 15 bp, Homo sapiens
aaattaaaaattcag

SEQ ID NO: 1478177 - DNA, 15 bp, Homo sapiens
aattaaaaattcagt

SEQ ID NO: 1478178 - DNA, 15 bp, Homo sapiens
attaaaaattcagtt

SEQ ID NO: 1478179 - DNA, 15 bp, Homo sapiens
ttaaaaattcagttc

SEQ ID NO: 1478180 - DNA, 15 bp, Homo sapiens
taaaaattcagttcc

SEQ ID NO: 1478181 - DNA, 15 bp, Homo sapiens
aaaaattcagttcct

SEQ ID NO: 1478182 - DNA, 15 bp, Homo sapiens
aaaattcagttcctc

SEQ ID NO: 1478183 - DNA, 15 bp, Homo sapiens
aaattcagttcctca

SEQ ID NO: 1478184 - DNA, 15 bp, Homo sapiens
aattcagttcctcag

SEQ ID NO: 1478185 - DNA, 15 bp, Homo sapiens
attcagttcctcagt

SEQ ID NO: 1478186 - DNA, 15 bp, Homo sapiens
ttcagttcctcagtc

SEQ ID NO: 1478187 - DNA, 15 bp, Homo sapiens
tcagttcctcagtca

SEQ ID NO: 1478188 - DNA, 15 bp, Homo sapiens
ttcctcagtcacacc

SEQ ID NO: 1478189 - DNA, 15 bp, Homo sapiens
tcctcagtcacacca

SEQ ID NO: 1478190 - DNA, 15 bp, Homo sapiens
cctcagtcacaccag

SEQ ID NO: 1478191 - DNA, 15 bp, Homo sapiens
ctcagtcacaccaga

SEQ ID NO: 1478192 - DNA, 15 bp, Homo sapiens
tcagtcacaccagac

SEQ ID NO: 1478193 - DNA, 15 bp, Homo sapiens
cagtcacaccagaca

SEQ ID NO: 1478194 - DNA, 15 bp, Homo sapiens
agtcacaccagacac

SEQ ID NO: 1478195 - DNA, 15 bp, Homo sapiens
gtcacaccagacaca

SEQ ID NO: 1478196 - DNA, 15 bp, Homo sapiens
tcacaccagacacat

SEQ ID NO: 1478197 - DNA, 15 bp, Homo sapiens
cacaccagacacatt

SEQ ID NO: 1478198 - DNA, 15 bp, Homo sapiens
acaccagacacattt

SEQ ID NO: 1478199 - DNA, 15 bp, Homo sapiens
caccagacacatttc

SEQ ID NO: 1478200 - DNA, 15 bp, Homo sapiens
accagacacatttca

SEQ ID NO: 1478201 - DNA, 15 bp, Homo sapiens
ccagacacatttcaa

SEQ ID NO: 1478202 - DNA, 15 bp, Homo sapiens
cagacacatttcaag

SEQ ID NO: 1478203 - DNA, 15 bp, Homo sapiens
agacacatttcaagt

SEQ ID NO: 1478204 - DNA, 15 bp, Homo sapiens
gacacatttcaagtc

SEQ ID NO: 1478205 - DNA, 15 bp, Homo sapiens
acacatttcaagtcc

SEQ ID NO: 1478206 - DNA, 15 bp, Homo sapiens
cacatttcaagtcct

SEQ ID NO: 1478207 - DNA, 15 bp, Homo sapiens
acatttcaagtcctc

SEQ ID NO: 1478208 - DNA, 15 bp, Homo sapiens
catttcaagtcctca

SEQ ID NO: 1478209 - DNA, 15 bp, Homo sapiens
atttcaagtcctcaa

SEQ ID NO: 1478210 - DNA, 15 bp, Homo sapiens
tttcaagtcctcaat

SEQ ID NO: 1478211 - DNA, 15 bp, Homo sapiens
ttcaagtcctcaata

SEQ ID NO: 1478212 - DNA, 15 bp, Homo sapiens
tcaagtcctcaatag

SEQ ID NO: 1478213 - DNA, 15 bp, Homo sapiens
caagtcctcaatagc

SEQ ID NO: 1478214 - DNA, 15 bp, Homo sapiens
aagtcctcaatagcc

SEQ ID NO: 1478215 - DNA, 15 bp, Homo sapiens
agtcctcaatagcct

SEQ ID NO: 1478216 - DNA, 15 bp, Homo sapiens
gtcctcaatagcctc

SEQ ID NO: 1478217 - DNA, 15 bp, Homo sapiens
tcctcaatagcctca

SEQ ID NO: 1478218 - DNA, 15 bp, Homo sapiens
cctcaatagcctcac

SEQ ID NO: 1478219 - DNA, 15 bp, Homo sapiens
ctcaatagcctcaca

SEQ ID NO: 1478220 - DNA, 15 bp, Homo sapiens
tcaatagcctcacaa

SEQ ID NO: 1478221 - DNA, 15 bp, Homo sapiens
caatagcctcacaag

SEQ ID NO: 1478222 - DNA, 15 bp, Homo sapiens
aatagcctcacaagg

SEQ ID NO: 1478223 - DNA, 15 bp, Homo sapiens
atagcctcacaaggc

SEQ ID NO: 1478224 - DNA, 15 bp, Homo sapiens
tagcctcacaaggcg

SEQ ID NO: 1478225 - DNA, 15 bp, Homo sapiens
agcctcacaaggcga

SEQ ID NO: 1478226 - DNA, 15 bp, Homo sapiens
gcctcacaaggcgag

SEQ ID NO: 1478227 - DNA, 15 bp, Homo sapiens
cctcacaaggcgagt

SEQ ID NO: 1478228 - DNA, 15 bp, Homo sapiens
ctcacaaggcgagtt

SEQ ID NO: 1478229 - DNA, 15 bp, Homo sapiens
tcacaaggcgagttg

SEQ ID NO: 1478230 - DNA, 15 bp, Homo sapiens
cacaaggcgagttgc

SEQ ID NO: 1478231 - DNA, 15 bp, Homo sapiens
acaaggcgagttgct

SEQ ID NO: 1478232 - DNA, 15 bp, Homo sapiens
caaggcgagttgctt

SEQ ID NO: 1478233 - DNA, 15 bp, Homo sapiens
aaggcgagttgcttc

SEQ ID NO: 1478234 - DNA, 15 bp, Homo sapiens
aggcgagttgcttct

SEQ ID NO: 1478235 - DNA, 15 bp, Homo sapiens
ggcgagttgcttctg

SEQ ID NO: 1478236 - DNA, 15 bp, Homo sapiens
gcgagttgcttctgc

SEQ ID NO: 1478237 - DNA, 15 bp, Homo sapiens
cgagttgcttctgca

SEQ ID NO: 1478238 - DNA, 15 bp, Homo sapiens
gagttgcttctgcat

SEQ ID NO: 1478239 - DNA, 15 bp, Homo sapiens
agttgcttctgcatt

SEQ ID NO: 1478240 - DNA, 15 bp, Homo sapiens
gttgcttctgcattg

SEQ ID NO: 1478241 - DNA, 15 bp, Homo sapiens
ttgcttctgcattgc

SEQ ID NO: 1478242 - DNA, 15 bp, Homo sapiens
tgcttctgcattgca

SEQ ID NO: 1478243 - DNA, 15 bp, Homo sapiens
gcttctgcattgcat

SEQ ID NO: 1478244 - DNA, 15 bp, Homo sapiens
cttctgcattgcatg

SEQ ID NO: 1478245 - DNA, 15 bp, Homo sapiens
ttctgcattgcatgg

SEQ ID NO: 1478246 - DNA, 15 bp, Homo sapiens
tctgcattgcatggt

SEQ ID NO: 1478247 - DNA, 15 bp, Homo sapiens
ctgcattgcatggtg

SEQ ID NO: 1478248 - DNA, 15 bp, Homo sapiens
tgcattgcatggtgc

SEQ ID NO: 1478249 - DNA, 15 bp, Homo sapiens
gcattgcatggtgca

SEQ ID NO: 1478250 - DNA, 15 bp, Homo sapiens
cattgcatggtgcag

SEQ ID NO: 1478251 - DNA, 15 bp, Homo sapiens
attgcatggtgcaga

SEQ ID NO: 1478252 - DNA, 15 bp, Homo sapiens
ttgcatggtgcagat

SEQ ID NO: 1478253 - DNA, 15 bp, Homo sapiens
tgcatggtgcagatt

SEQ ID NO: 1478254 - DNA, 15 bp, Homo sapiens
gcatggtgcagattt

SEQ ID NO: 1478255 - DNA, 15 bp, Homo sapiens
catggtgcagatttt

SEQ ID NO: 1478256 - DNA, 15 bp, Homo sapiens
atggtgcagatttta

SEQ ID NO: 1478257 - DNA, 15 bp, Homo sapiens
tggtgcagattttag

SEQ ID NO: 1478258 - DNA, 15 bp, Homo sapiens
ggtgcagattttaga

SEQ ID NO: 1478259 - DNA, 15 bp, Homo sapiens
gtgcagattttagaa

SEQ ID NO: 1478260 - DNA, 15 bp, Homo sapiens
tgcagattttagaac

SEQ ID NO: 1478261 - DNA, 15 bp, Homo sapiens
gcagattttagaaca

SEQ ID NO: 1478262 - DNA, 15 bp, Homo sapiens
cagattttagaacag

SEQ ID NO: 1478263 - DNA, 15 bp, Homo sapiens
agattttagaacagt

SEQ ID NO: 1478264 - DNA, 15 bp, Homo sapiens
gattttagaacagtg

SEQ ID NO: 1478265 - DNA, 15 bp, Homo sapiens
attttagaacagtgc

SEQ ID NO: 1478266 - DNA, 15 bp, Homo sapiens
ttttagaacagtgcc

SEQ ID NO: 1478267 - DNA, 15 bp, Homo sapiens
tttagaacagtgcca

SEQ ID NO: 1478268 - DNA, 15 bp, Homo sapiens
ttagaacagtgccag

SEQ ID NO: 1478269 - DNA, 15 bp, Homo sapiens
tagaacagtgccagc

SEQ ID NO: 1478270 - DNA, 15 bp, Homo sapiens
agaacagtgccagcg

SEQ ID NO: 1478271 - DNA, 15 bp, Homo sapiens
gaacagtgccagcgt

SEQ ID NO: 1478272 - DNA, 15 bp, Homo sapiens
aacagtgccagcgtc

SEQ ID NO: 1478273 - DNA, 15 bp, Homo sapiens
acagtgccagcgtca

SEQ ID NO: 1478274 - DNA, 15 bp, Homo sapiens
cagtgccagcgtcac

SEQ ID NO: 1478275 - DNA, 15 bp, Homo sapiens
agtgccagcgtcaca

SEQ ID NO: 1478276 - DNA, 15 bp, Homo sapiens
gtgccagcgtcacag

SEQ ID NO: 1478277 - DNA, 15 bp, Homo sapiens
tgccagcgtcacagt

SEQ ID NO: 1478278 - DNA, 15 bp, Homo sapiens
gccagcgtcacagtc

SEQ ID NO: 1478279 - DNA, 15 bp, Homo sapiens
ccagcgtcacagtca

SEQ ID NO: 1478280 - DNA, 15 bp, Homo sapiens
cagcgtcacagtcat

SEQ ID NO: 1478281 - DNA, 15 bp, Homo sapiens
agcgtcacagtcatc

SEQ ID NO: 1478282 - DNA, 15 bp, Homo sapiens
gcgtcacagtcatct

SEQ ID NO: 1478283 - DNA, 15 bp, Homo sapiens
cgtcacagtcatctc

SEQ ID NO: 1478284 - DNA, 15 bp, Homo sapiens
gtcacagtcatctcc

SEQ ID NO: 1478285 - DNA, 15 bp, Homo sapiens
tcacagtcatctccc

SEQ ID NO: 1478286 - DNA, 15 bp, Homo sapiens
cacagtcatctcccc

SEQ ID NO: 1478287 - DNA, 15 bp, Homo sapiens
acagtcatctcccct

SEQ ID NO: 1478288 - DNA, 15 bp, Homo sapiens
cagtcatctcccctg

SEQ ID NO: 1478289 - DNA, 15 bp, Homo sapiens
agtcatctcccctgg

SEQ ID NO: 1478290 - DNA, 15 bp, Homo sapiens
gtcatctcccctgga

SEQ ID NO: 1478291 - DNA, 15 bp, Homo sapiens
tcatctcccctggac

SEQ ID NO: 1478292 - DNA, 15 bp, Homo sapiens
catctcccctggacc

SEQ ID NO: 1478293 - DNA, 15 bp, Homo sapiens
atctcccctggacca

SEQ ID NO: 1478294 - DNA, 15 bp, Homo sapiens
tctcccctggaccaa

SEQ ID NO: 1478295 - DNA, 15 bp, Homo sapiens
ctcccctggaccaaa

SEQ ID NO: 1478296 - DNA, 15 bp, Homo sapiens
tcccctggaccaaat

SEQ ID NO: 1478297 - DNA, 15 bp, Homo sapiens
cccctggaccaaatc

SEQ ID NO: 1478298 - DNA, 15 bp, Homo sapiens
ccctggaccaaatca

SEQ ID NO: 1478299 - DNA, 15 bp, Homo sapiens
cctggaccaaatcag

SEQ ID NO: 1478300 - DNA, 15 bp, Homo sapiens
ctggaccaaatcaga

SEQ ID NO: 1478301 - DNA, 15 bp, Homo sapiens
tggaccaaatcagag

SEQ ID NO: 1478302 - DNA, 15 bp, Homo sapiens
ggaccaaatcagaga

SEQ ID NO: 1478303 - DNA, 15 bp, Homo sapiens
gaccaaatcagagaa

SEQ ID NO: 1478304 - DNA, 15 bp, Homo sapiens
accaaatcagagaat

SEQ ID NO: 1478305 - DNA, 15 bp, Homo sapiens
ccaaatcagagaatt

SEQ ID NO: 1478306 - DNA, 15 bp, Homo sapiens
caaatcagagaattc

SEQ ID NO: 1478307 - DNA, 15 bp, Homo sapiens
aaatcagagaattca

SEQ ID NO: 1478308 - DNA, 15 bp, Homo sapiens
aatcagagaattcaa

SEQ ID NO: 1478309 - DNA, 15 bp, Homo sapiens
atcagagaattcaac

SEQ ID NO: 1478310 - DNA, 15 bp, Homo sapiens
tcagagaattcaact

SEQ ID NO: 1478311 - DNA, 15 bp, Homo sapiens
cagagaattcaactt

SEQ ID NO: 1478312 - DNA, 15 bp, Homo sapiens
agagaattcaacttc

SEQ ID NO: 1478313 - DNA, 15 bp, Homo sapiens
gagaattcaacttct

SEQ ID NO: 1478314 - DNA, 15 bp, Homo sapiens
agaattcaacttctt

SEQ ID NO: 1478315 - DNA, 15 bp, Homo sapiens
gaattcaacttcttt

SEQ ID NO: 1478316 - DNA, 15 bp, Homo sapiens
aattcaacttctttc

SEQ ID NO: 1478317 - DNA, 15 bp, Homo sapiens
attcaacttctttct

SEQ ID NO: 1478318 - DNA, 15 bp, Homo sapiens
ttcaacttctttcta

SEQ ID NO: 1478319 - DNA, 15 bp, Homo sapiens
tcaacttctttctat

SEQ ID NO: 1478320 - DNA, 15 bp, Homo sapiens
caacttctttctatg

SEQ ID NO: 1478321 - DNA, 15 bp, Homo sapiens
aacttctttctatgg

SEQ ID NO: 1478322 - DNA, 15 bp, Homo sapiens
acttctttctatgga

SEQ ID NO: 1478323 - DNA, 15 bp, Homo sapiens
cttctttctatggaa

SEQ ID NO: 1478324 - DNA, 15 bp, Homo sapiens
ttctttctatggaaa

SEQ ID NO: 1478325 - DNA, 15 bp, Homo sapiens
tctttctatggaaat

SEQ ID NO: 1478326 - DNA, 15 bp, Homo sapiens
ctttctatggaaatg

SEQ ID NO: 1478327 - DNA, 15 bp, Homo sapiens
tttctatggaaatga

SEQ ID NO: 1478328 - DNA, 15 bp, Homo sapiens
ttctatggaaatgaa

SEQ ID NO: 1478329 - DNA, 15 bp, Homo sapiens
tctatggaaatgaat

SEQ ID NO: 1478330 - DNA, 15 bp, Homo sapiens
ctatggaaatgaata

SEQ ID NO: 1478331 - DNA, 15 bp, Homo sapiens
tatggaaatgaataa

SEQ ID NO: 1478332 - DNA, 15 bp, Homo sapiens
atggaaatgaataag

SEQ ID NO: 1478333 - DNA, 15 bp, Homo sapiens
tggaaatgaataaga

SEQ ID NO: 1478334 - DNA, 15 bp, Homo sapiens
ggaaatgaataagaa

SEQ ID NO: 1478335 - DNA, 15 bp, Homo sapiens
gaaatgaataagaag

SEQ ID NO: 1478336 - DNA, 15 bp, Homo sapiens
aaatgaataagaagt

SEQ ID NO: 1478337 - DNA, 15 bp, Homo sapiens
aatgaataagaagtt

SEQ ID NO: 1478338 - DNA, 15 bp, Homo sapiens
atgaataagaagttt

SEQ ID NO: 1478339 - DNA, 15 bp, Homo sapiens
tgaataagaagttta

SEQ ID NO: 1478340 - DNA, 15 bp, Homo sapiens
gaataagaagtttag

SEQ ID NO: 1478341 - DNA, 15 bp, Homo sapiens
aataagaagtttagg

SEQ ID NO: 1478342 - DNA, 15 bp, Homo sapiens
ataagaagtttaggt

SEQ ID NO: 1478343 - DNA, 15 bp, Homo sapiens
taagaagtttaggta

SEQ ID NO: 1478344 - DNA, 15 bp, Homo sapiens
aagaagtttaggtaa

SEQ ID NO: 1478345 - DNA, 15 bp, Homo sapiens
agaagtttaggtaaa

SEQ ID NO: 1478346 - DNA, 15 bp, Homo sapiens
gaagtttaggtaaag

SEQ ID NO: 1478347 - DNA, 15 bp, Homo sapiens
aagtttaggtaaagg

SEQ ID NO: 1478348 - DNA, 15 bp, Homo sapiens
agtttaggtaaaggt

SEQ ID NO: 1478349 - DNA, 15 bp, Homo sapiens
gtttaggtaaaggtt

SEQ ID NO: 1478350 - DNA, 15 bp, Homo sapiens
tttaggtaaaggttt

SEQ ID NO: 1478351 - DNA, 15 bp, Homo sapiens
ttaggtaaaggtttt

SEQ ID NO: 1478352 - DNA, 15 bp, Homo sapiens
taggtaaaggttttt

SEQ ID NO: 1478353 - DNA, 15 bp, Homo sapiens
aggtaaaggtttttg

SEQ ID NO: 1478354 - DNA, 15 bp, Homo sapiens
ggtaaaggtttttgt

SEQ ID NO: 1478355 - DNA, 15 bp, Homo sapiens
gtaaaggtttttgtt

SEQ ID NO: 1478356 - DNA, 15 bp, Homo sapiens
taaaggtttttgttt

SEQ ID NO: 1478357 - DNA, 15 bp, Homo sapiens
aaaggtttttgtttc

SEQ ID NO: 1478358 - DNA, 15 bp, Homo sapiens
aaggtttttgtttct

SEQ ID NO: 1478359 - DNA, 15 bp, Homo sapiens
aggtttttgtttctt

SEQ ID NO: 1478360 - DNA, 15 bp, Homo sapiens
ggtttttgtttcttg

SEQ ID NO: 1478361 - DNA, 15 bp, Homo sapiens
gtttttgtttcttga

SEQ ID NO: 1478362 - DNA, 15 bp, Homo sapiens
tttttgtttcttgat

SEQ ID NO: 1478363 - DNA, 15 bp, Homo sapiens
ttttgtttcttgatc

SEQ ID NO: 1478364 - DNA, 15 bp, Homo sapiens
tttgtttcttgatcc

SEQ ID NO: 1478365 - DNA, 15 bp, Homo sapiens
ttgtttcttgatcct

SEQ ID NO: 1478366 - DNA, 15 bp, Homo sapiens
tgtttcttgatcctg

SEQ ID NO: 1478367 - DNA, 15 bp, Homo sapiens
gtttcttgatcctga

SEQ ID NO: 1478368 - DNA, 15 bp, Homo sapiens
tttcttgatcctgat

SEQ ID NO: 1478369 - DNA, 15 bp, Homo sapiens
ttcttgatcctgatt

SEQ ID NO: 1478370 - DNA, 15 bp, Homo sapiens
tcttgatcctgattt

SEQ ID NO: 1478371 - DNA, 15 bp, Homo sapiens
cttgatcctgatttt

SEQ ID NO: 1478372 - DNA, 15 bp, Homo sapiens
ttgatcctgatttta

SEQ ID NO: 1478373 - DNA, 15 bp, Homo sapiens
tgatcctgattttat

SEQ ID NO: 1478374 - DNA, 15 bp, Homo sapiens
gatcctgattttatt

SEQ ID NO: 1478375 - DNA, 15 bp, Homo sapiens
atcctgattttattt

SEQ ID NO: 1478376 - DNA, 15 bp, Homo sapiens
tcctgattttatttt

SEQ ID NO: 1478377 - DNA, 15 bp, Homo sapiens
cctgattttatttta

SEQ ID NO: 1478378 - DNA, 15 bp, Homo sapiens
ctgattttattttaa

SEQ ID NO: 1478379 - DNA, 15 bp, Homo sapiens
tgattttattttaag

SEQ ID NO: 1478380 - DNA, 15 bp, Homo sapiens
gattttattttaaga

SEQ ID NO: 1478381 - DNA, 15 bp, Homo sapiens
attttattttaagat

SEQ ID NO: 1478382 - DNA, 15 bp, Homo sapiens
ttttattttaagatt

SEQ ID NO: 1478383 - DNA, 15 bp, Homo sapiens
tttattttaagattg

SEQ ID NO: 1478384 - DNA, 15 bp, Homo sapiens
ttattttaagattga

SEQ ID NO: 1478385 - DNA, 15 bp, Homo sapiens
tattttaagattgat

SEQ ID NO: 1478386 - DNA, 15 bp, Homo sapiens
attttaagattgatg

SEQ ID NO: 1478387 - DNA, 15 bp, Homo sapiens
ttttaagattgatgc

SEQ ID NO: 1478388 - DNA, 15 bp, Homo sapiens
tttaagattgatgct

SEQ ID NO: 1478389 - DNA, 15 bp, Homo sapiens
ttaagattgatgctg

SEQ ID NO: 1478390 - DNA, 15 bp, Homo sapiens
taagattgatgctga

SEQ ID NO: 1478391 - DNA, 15 bp, Homo sapiens
aagattgatgctgac

SEQ ID NO: 1478392 - DNA, 15 bp, Homo sapiens
agattgatgctgacg

SEQ ID NO: 1478393 - DNA, 15 bp, Homo sapiens
gattgatgctgacga

SEQ ID NO: 1478394 - DNA, 15 bp, Homo sapiens
attgatgctgacgag

SEQ ID NO: 1478395 - DNA, 15 bp, Homo sapiens
ttgatgctgacgagt

SEQ ID NO: 1478396 - DNA, 15 bp, Homo sapiens
tgatgctgacgagta

SEQ ID NO: 1478397 - DNA, 15 bp, Homo sapiens
gatgctgacgagtat

SEQ ID NO: 1478398 - DNA, 15 bp, Homo sapiens
atgctgacgagtatg

SEQ ID NO: 1478399 - DNA, 15 bp, Homo sapiens
tgctgacgagtatgc

SEQ ID NO: 1478400 - DNA, 15 bp, Homo sapiens
gctgacgagtatgca

SEQ ID NO: 1478401 - DNA, 15 bp, Homo sapiens
ctgacgagtatgcat

SEQ ID NO: 1478402 - DNA, 15 bp, Homo sapiens
tgacgagtatgcatt

SEQ ID NO: 1478403 - DNA, 15 bp, Homo sapiens
gacgagtatgcattt

SEQ ID NO: 1478404 - DNA, 15 bp, Homo sapiens
acgagtatgcatttg

SEQ ID NO: 1478405 - DNA, 15 bp, Homo sapiens
cgagtatgcatttgt

SEQ ID NO: 1478406 - DNA, 15 bp, Homo sapiens
gagtatgcatttgtt

SEQ ID NO: 1478407 - DNA, 15 bp, Homo sapiens
agtatgcatttgttg

SEQ ID NO: 1478408 - DNA, 15 bp, Homo sapiens
gtatgcatttgttgg

SEQ ID NO: 1478409 - DNA, 15 bp, Homo sapiens
tatgcatttgttggt

SEQ ID NO: 1478410 - DNA, 15 bp, Homo sapiens
atgcatttgttggtt

SEQ ID NO: 1478411 - DNA, 15 bp, Homo sapiens
tgcatttgttggttt

SEQ ID NO: 1478412 - DNA, 15 bp, Homo sapiens
gcatttgttggtttt

SEQ ID NO: 1478413 - DNA, 15 bp, Homo sapiens
catttgttggtttta

SEQ ID NO: 1478414 - DNA, 15 bp, Homo sapiens
atttgttggttttac

SEQ ID NO: 1478415 - DNA, 15 bp, Homo sapiens
tttgttggttttacg

SEQ ID NO: 1478416 - DNA, 15 bp, Homo sapiens
ttgttggttttacgt

SEQ ID NO: 1478417 - DNA, 15 bp, Homo sapiens
tgttggttttacgtg

SEQ ID NO: 1478418 - DNA, 15 bp, Homo sapiens
gttggttttacgtgg

SEQ ID NO: 1478419 - DNA, 15 bp, Homo sapiens
ttggttttacgtgga

SEQ ID NO: 1478420 - DNA, 15 bp, Homo sapiens
tggttttacgtggaa

SEQ ID NO: 1478421 - DNA, 15 bp, Homo sapiens
ggttttacgtggaat

SEQ ID NO: 1478422 - DNA, 15 bp, Homo sapiens
gttttacgtggaatc

SEQ ID NO: 1478423 - DNA, 15 bp, Homo sapiens
ttttacgtggaatcg

SEQ ID NO: 1478424 - DNA, 15 bp, Homo sapiens
tttacgtggaatcgt

SEQ ID NO: 1478425 - DNA, 15 bp, Homo sapiens
ttacgtggaatcgtc

SEQ ID NO: 1478426 - DNA, 15 bp, Homo sapiens
tacgtggaatcgtca

SEQ ID NO: 1478427 - DNA, 15 bp, Homo sapiens
acgtggaatcgtcag

SEQ ID NO: 1478428 - DNA, 15 bp, Homo sapiens
cgtggaatcgtcagc

SEQ ID NO: 1478429 - DNA, 15 bp, Homo sapiens
gtggaatcgtcagca

SEQ ID NO: 1478430 - DNA, 15 bp, Homo sapiens
tggaatcgtcagcac

SEQ ID NO: 1478431 - DNA, 15 bp, Homo sapiens
ggaatcgtcagcaca

SEQ ID NO: 1478432 - DNA, 15 bp, Homo sapiens
gaatcgtcagcacat

SEQ ID NO: 1478433 - DNA, 15 bp, Homo sapiens
aatcgtcagcacatt

SEQ ID NO: 1478434 - DNA, 15 bp, Homo sapiens
atcgtcagcacattt

SEQ ID NO: 1478435 - DNA, 15 bp, Homo sapiens
tcgtcagcacatttt

SEQ ID NO: 1478436 - DNA, 15 bp, Homo sapiens
cgtcagcacatttta

SEQ ID NO: 1478437 - DNA, 15 bp, Homo sapiens
gtcagcacattttac

SEQ ID NO: 1478438 - DNA, 15 bp, Homo sapiens
tcagcacattttaca

SEQ ID NO: 1478439 - DNA, 15 bp, Homo sapiens
cagcacattttacag

SEQ ID NO: 1478440 - DNA, 15 bp, Homo sapiens
agcacattttacagg

SEQ ID NO: 1478441 - DNA, 15 bp, Homo sapiens
gcacattttacaggc

SEQ ID NO: 1478442 - DNA, 15 bp, Homo sapiens
cacattttacaggcc

SEQ ID NO: 1478443 - DNA, 15 bp, Homo sapiens
acattttacaggcca

SEQ ID NO: 1478444 - DNA, 15 bp, Homo sapiens
cattttacaggccat

SEQ ID NO: 1478445 - DNA, 15 bp, Homo sapiens
attttacaggccatt

SEQ ID NO: 1478446 - DNA, 15 bp, Homo sapiens
ttttacaggccattc

SEQ ID NO: 1478447 - DNA, 15 bp, Homo sapiens
tttacaggccattca

SEQ ID NO: 1478448 - DNA, 15 bp, Homo sapiens
ttacaggccattcag

SEQ ID NO: 1478449 - DNA, 15 bp, Homo sapiens
tacaggccattcagg

SEQ ID NO: 1478450 - DNA, 15 bp, Homo sapiens
acaggccattcaggc

SEQ ID NO: 1478451 - DNA, 15 bp, Homo sapiens
caggccattcaggct

SEQ ID NO: 1478452 - DNA, 15 bp, Homo sapiens
aggccattcaggctg

SEQ ID NO: 1478453 - DNA, 15 bp, Homo sapiens
ggccattcaggctga

SEQ ID NO: 1478454 - DNA, 15 bp, Homo sapiens
gccattcaggctgat

SEQ ID NO: 1478455 - DNA, 15 bp, Homo sapiens
ccattcaggctgatg

SEQ ID NO: 1478456 - DNA, 15 bp, Homo sapiens
cattcaggctgatgt

SEQ ID NO: 1478457 - DNA, 15 bp, Homo sapiens
attcaggctgatgtt

SEQ ID NO: 1478458 - DNA, 15 bp, Homo sapiens
ttcaggctgatgtta

SEQ ID NO: 1478459 - DNA, 15 bp, Homo sapiens
tcaggctgatgttat

SEQ ID NO: 1478460 - DNA, 15 bp, Homo sapiens
caggctgatgttata

SEQ ID NO: 1478461 - DNA, 15 bp, Homo sapiens
aggctgatgttatac

SEQ ID NO: 1478462 - DNA, 15 bp, Homo sapiens
ggctgatgttatacc

SEQ ID NO: 1478463 - DNA, 15 bp, Homo sapiens
gctgatgttatacct

SEQ ID NO: 1478464 - DNA, 15 bp, Homo sapiens
ctgatgttatacctg

SEQ ID NO: 1478465 - DNA, 15 bp, Homo sapiens
tgatgttatacctga

SEQ ID NO: 1478466 - DNA, 15 bp, Homo sapiens
gatgttatacctgag

SEQ ID NO: 1478467 - DNA, 15 bp, Homo sapiens
atgttatacctgaga

SEQ ID NO: 1478468 - DNA, 15 bp, Homo sapiens
tgttatacctgagag

SEQ ID NO: 1478469 - DNA, 15 bp, Homo sapiens
gttatacctgagagc

SEQ ID NO: 1478470 - DNA, 15 bp, Homo sapiens
ttatacctgagagca

SEQ ID NO: 1478471 - DNA, 15 bp, Homo sapiens
tatacctgagagcat

SEQ ID NO: 1478472 - DNA, 15 bp, Homo sapiens
atacctgagagcatt

SEQ ID NO: 1478473 - DNA, 15 bp, Homo sapiens
tacctgagagcattt

SEQ ID NO: 1478474 - DNA, 15 bp, Homo sapiens
acctgagagcatttc

SEQ ID NO: 1478475 - DNA, 15 bp, Homo sapiens
cctgagagcatttct

SEQ ID NO: 1478476 - DNA, 15 bp, Homo sapiens
ctgagagcatttctg

SEQ ID NO: 1478477 - DNA, 15 bp, Homo sapiens
tgagagcatttctgg

SEQ ID NO: 1478478 - DNA, 15 bp, Homo sapiens
gagagcatttctggt

SEQ ID NO: 1478479 - DNA, 15 bp, Homo sapiens
agagcatttctggtt

SEQ ID NO: 1478480 - DNA, 15 bp, Homo sapiens
gagcatttctggttc

SEQ ID NO: 1478481 - DNA, 15 bp, Homo sapiens
agcatttctggttca

SEQ ID NO: 1478482 - DNA, 15 bp, Homo sapiens
gcatttctggttcat

SEQ ID NO: 1478483 - DNA, 15 bp, Homo sapiens
catttctggttcatg

SEQ ID NO: 1478484 - DNA, 15 bp, Homo sapiens
atttctggttcatga

SEQ ID NO: 1478485 - DNA, 15 bp, Homo sapiens
tttctggttcatgat

SEQ ID NO: 1478486 - DNA, 15 bp, Homo sapiens
ttctggttcatgatt

SEQ ID NO: 1478487 - DNA, 15 bp, Homo sapiens
tctggttcatgatta

SEQ ID NO: 1478488 - DNA, 15 bp, Homo sapiens
ctggttcatgattaa

SEQ ID NO: 1478489 - DNA, 15 bp, Homo sapiens
tggttcatgattaaa

SEQ ID NO: 1478490 - DNA, 15 bp, Homo sapiens
ggttcatgattaaaa

SEQ ID NO: 1478491 - DNA, 15 bp, Homo sapiens
gttcatgattaaaag

SEQ ID NO: 1478492 - DNA, 15 bp, Homo sapiens
ttcatgattaaaaga

SEQ ID NO: 1478493 - DNA, 15 bp, Homo sapiens
tcatgattaaaagaa

SEQ ID NO: 1478494 - DNA, 15 bp, Homo sapiens
catgattaaaagaag

SEQ ID NO: 1478495 - DNA, 15 bp, Homo sapiens
atgattaaaagaagc

SEQ ID NO: 1478496 - DNA, 15 bp, Homo sapiens
tgattaaaagaagca

SEQ ID NO: 1478497 - DNA, 15 bp, Homo sapiens
gattaaaagaagcaa

SEQ ID NO: 1478498 - DNA, 15 bp, Homo sapiens
attaaaagaagcaag

SEQ ID NO: 1478499 - DNA, 15 bp, Homo sapiens
ttaaaagaagcaaga

SEQ ID NO: 1478500 - DNA, 15 bp, Homo sapiens
taaaagaagcaagag

SEQ ID NO: 1478501 - DNA, 15 bp, Homo sapiens
aaaagaagcaagagg

SEQ ID NO: 1478502 - DNA, 15 bp, Homo sapiens
aaagaagcaagagga

SEQ ID NO: 1478503 - DNA, 15 bp, Homo sapiens
aagaagcaagaggac

SEQ ID NO: 1478504 - DNA, 15 bp, Homo sapiens
agaagcaagaggacc

SEQ ID NO: 1478505 - DNA, 15 bp, Homo sapiens
gaagcaagaggacca

SEQ ID NO: 1478506 - DNA, 15 bp, Homo sapiens
aagcaagaggaccac

SEQ ID NO: 1478507 - DNA, 15 bp, Homo sapiens
agcaagaggaccaca

SEQ ID NO: 1478508 - DNA, 15 bp, Homo sapiens
gcaagaggaccacaa

SEQ ID NO: 1478509 - DNA, 15 bp, Homo sapiens
caagaggaccacaag

SEQ ID NO: 1478510 - DNA, 15 bp, Homo sapiens
aagaggaccacaagg

SEQ ID NO: 1478511 - DNA, 15 bp, Homo sapiens
agaggaccacaaggt

SEQ ID NO: 1478512 - DNA, 15 bp, Homo sapiens
gaggaccacaaggtt

SEQ ID NO: 1478513 - DNA, 15 bp, Homo sapiens
aggaccacaaggttc

SEQ ID NO: 1478514 - DNA, 15 bp, Homo sapiens
ggaccacaaggttcc

SEQ ID NO: 1478515 - DNA, 15 bp, Homo sapiens
gaccacaaggttccc

SEQ ID NO: 1478516 - DNA, 15 bp, Homo sapiens
accacaaggttcccc

SEQ ID NO: 1478517 - DNA, 15 bp, Homo sapiens
ccacaaggttcccca

SEQ ID NO: 1478518 - DNA, 15 bp, Homo sapiens
cacaaggttccccat

SEQ ID NO: 1478519 - DNA, 15 bp, Homo sapiens
acaaggttccccatg

SEQ ID NO: 1478520 - DNA, 15 bp, Homo sapiens
caaggttccccatgg

SEQ ID NO: 1478521 - DNA, 15 bp, Homo sapiens
aaggttccccatgga

SEQ ID NO: 1478522 - DNA, 15 bp, Homo sapiens
aggttccccatggac

SEQ ID NO: 1478523 - DNA, 15 bp, Homo sapiens
ggttccccatggaca

SEQ ID NO: 1478524 - DNA, 15 bp, Homo sapiens
gttccccatggacat

SEQ ID NO: 1478525 - DNA, 15 bp, Homo sapiens
ttccccatggacatt

SEQ ID NO: 1478526 - DNA, 15 bp, Homo sapiens
tccccatggacattt

SEQ ID NO: 1478527 - DNA, 15 bp, Homo sapiens
ccccatggacatttt

SEQ ID NO: 1478528 - DNA, 15 bp, Homo sapiens
cccatggacattttg

SEQ ID NO: 1478529 - DNA, 15 bp, Homo sapiens
ccatggacattttgc

SEQ ID NO: 1478530 - DNA, 15 bp, Homo sapiens
catggacattttgct

SEQ ID NO: 1478531 - DNA, 15 bp, Homo sapiens
atggacattttgctc

SEQ ID NO: 1478532 - DNA, 15 bp, Homo sapiens
tggacattttgctct

SEQ ID NO: 1478533 - DNA, 15 bp, Homo sapiens
ggacattttgctctc

SEQ ID NO: 1478534 - DNA, 15 bp, Homo sapiens
gacattttgctctca

SEQ ID NO: 1478535 - DNA, 15 bp, Homo sapiens
acattttgctctcac

SEQ ID NO: 1478536 - DNA, 15 bp, Homo sapiens
cattttgctctcaca

SEQ ID NO: 1478537 - DNA, 15 bp, Homo sapiens
attttgctctcacag

SEQ ID NO: 1478538 - DNA, 15 bp, Homo sapiens
ttttgctctcacagt

SEQ ID NO: 1478539 - DNA, 15 bp, Homo sapiens
tttgctctcacagtt

SEQ ID NO: 1478540 - DNA, 15 bp, Homo sapiens
ttgctctcacagttt

SEQ ID NO: 1478541 - DNA, 15 bp, Homo sapiens
tgctctcacagtttc

SEQ ID NO: 1478542 - DNA, 15 bp, Homo sapiens
gctctcacagtttcc

SEQ ID NO: 1478543 - DNA, 15 bp, Homo sapiens
ctctcacagtttccc

SEQ ID NO: 1478544 - DNA, 15 bp, Homo sapiens
tctcacagtttccca

SEQ ID NO: 1478545 - DNA, 15 bp, Homo sapiens
ctcacagtttcccaa

SEQ ID NO: 1478546 - DNA, 15 bp, Homo sapiens
tcacagtttcccaag

SEQ ID NO: 1478547 - DNA, 15 bp, Homo sapiens
cacagtttcccaaga

SEQ ID NO: 1478548 - DNA, 15 bp, Homo sapiens
acagtttcccaagag

SEQ ID NO: 1478549 - DNA, 15 bp, Homo sapiens
cagtttcccaagaga

SEQ ID NO: 1478550 - DNA, 15 bp, Homo sapiens
agtttcccaagagag

SEQ ID NO: 1478551 - DNA, 15 bp, Homo sapiens
gtttcccaagagaga

SEQ ID NO: 1478552 - DNA, 15 bp, Homo sapiens
tttcccaagagagaa

SEQ ID NO: 1478553 - DNA, 15 bp, Homo sapiens
ttcccaagagagaaa

SEQ ID NO: 1478554 - DNA, 15 bp, Homo sapiens
tcccaagagagaaag

SEQ ID NO: 1478555 - DNA, 15 bp, Homo sapiens
cccaagagagaaagg

SEQ ID NO: 1478556 - DNA, 15 bp, Homo sapiens
ccaagagagaaaggt

SEQ ID NO: 1478557 - DNA, 15 bp, Homo sapiens
caagagagaaaggtt

SEQ ID NO: 1478558 - DNA, 15 bp, Homo sapiens
aagagagaaaggttt

SEQ ID NO: 1478559 - DNA, 15 bp, Homo sapiens
agagagaaaggtttg

SEQ ID NO: 1478560 - DNA, 15 bp, Homo sapiens
gagagaaaggtttga

SEQ ID NO: 1478561 - DNA, 15 bp, Homo sapiens
agagaaaggtttgag

SEQ ID NO: 1478562 - DNA, 15 bp, Homo sapiens
gagaaaggtttgaga

SEQ ID NO: 1478563 - DNA, 15 bp, Homo sapiens
agaaaggtttgagaa

SEQ ID NO: 1478564 - DNA, 15 bp, Homo sapiens
gaaaggtttgagaag

SEQ ID NO: 1478565 - DNA, 15 bp, Homo sapiens
aaaggtttgagaagg

SEQ ID NO: 1478566 - DNA, 15 bp, Homo sapiens
aggtttgagaaggtt

SEQ ID NO: 1478567 - DNA, 15 bp, Homo sapiens
ggtttgagaaggttg

SEQ ID NO: 1478568 - DNA, 15 bp, Homo sapiens
gtttgagaaggttgg

SEQ ID NO: 1478569 - DNA, 15 bp, Homo sapiens
tttgagaaggttggc

SEQ ID NO: 1478570 - DNA, 15 bp, Homo sapiens
ttgagaaggttggct

SEQ ID NO: 1478571 - DNA, 15 bp, Homo sapiens
tgagaaggttggctt

SEQ ID NO: 1478572 - DNA, 15 bp, Homo sapiens
gagaaggttggcttc

SEQ ID NO: 1478573 - DNA, 15 bp, Homo sapiens
agaaggttggcttca

SEQ ID NO: 1478574 - DNA, 15 bp, Homo sapiens
gaaggttggcttcac

SEQ ID NO: 1478575 - DNA, 15 bp, Homo sapiens
aaggttggcttcact

SEQ ID NO: 1478576 - DNA, 15 bp, Homo sapiens
aggttggcttcactg

SEQ ID NO: 1478577 - DNA, 15 bp, Homo sapiens
ggttggcttcactgg

SEQ ID NO: 1478578 - DNA, 15 bp, Homo sapiens
gttggcttcactggc

SEQ ID NO: 1478579 - DNA, 15 bp, Homo sapiens
ttggcttcactggct

SEQ ID NO: 1478580 - DNA, 15 bp, Homo sapiens
tggcttcactggctt

SEQ ID NO: 1478581 - DNA, 15 bp, Homo sapiens
ggcttcactggcttc

SEQ ID NO: 1478582 - DNA, 15 bp, Homo sapiens
gcttcactggcttca

SEQ ID NO: 1478583 - DNA, 15 bp, Homo sapiens
cttcactggcttcat

SEQ ID NO: 1478584 - DNA, 15 bp, Homo sapiens
ttcactggcttcatt

SEQ ID NO: 1478585 - DNA, 15 bp, Homo sapiens
tcactggcttcattg

SEQ ID NO: 1478586 - DNA, 15 bp, Homo sapiens
cactggcttcattga

SEQ ID NO: 1478587 - DNA, 15 bp, Homo sapiens
actggcttcattgac

SEQ ID NO: 1478588 - DNA, 15 bp, Homo sapiens
ctggcttcattgact

SEQ ID NO: 1478589 - DNA, 15 bp, Homo sapiens
tggcttcattgactt

SEQ ID NO: 1478590 - DNA, 15 bp, Homo sapiens
ggcttcattgacttt

SEQ ID NO: 1478591 - DNA, 15 bp, Homo sapiens
gcttcattgactttg

SEQ ID NO: 1478592 - DNA, 15 bp, Homo sapiens
cttcattgactttgg

SEQ ID NO: 1478593 - DNA, 15 bp, Homo sapiens
ttcattgactttggg

SEQ ID NO: 1478594 - DNA, 15 bp, Homo sapiens
tcattgactttgggt

SEQ ID NO: 1478595 - DNA, 15 bp, Homo sapiens
cattgactttgggtt

SEQ ID NO: 1478596 - DNA, 15 bp, Homo sapiens
attgactttgggttt

SEQ ID NO: 1478597 - DNA, 15 bp, Homo sapiens
ttgactttgggtttc

SEQ ID NO: 1478598 - DNA, 15 bp, Homo sapiens
tgactttgggtttct

SEQ ID NO: 1478599 - DNA, 15 bp, Homo sapiens
gactttgggtttctc

SEQ ID NO: 1478600 - DNA, 15 bp, Homo sapiens
actttgggtttctca

SEQ ID NO: 1478601 - DNA, 15 bp, Homo sapiens
ctttgggtttctcat

SEQ ID NO: 1478602 - DNA, 15 bp, Homo sapiens
tttgggtttctcatg

SEQ ID NO: 1478603 - DNA, 15 bp, Homo sapiens
ttgggtttctcatga

SEQ ID NO: 1478604 - DNA, 15 bp, Homo sapiens
gggtttctcatgaac

SEQ ID NO: 1478605 - DNA, 15 bp, Homo sapiens
ggtttctcatgaaca

SEQ ID NO: 1478606 - DNA, 15 bp, Homo sapiens
gtttctcatgaacat

SEQ ID NO: 1478607 - DNA, 15 bp, Homo sapiens
tttctcatgaacatc

SEQ ID NO: 1478608 - DNA, 15 bp, Homo sapiens
ttctcatgaacatca

SEQ ID NO: 1478609 - DNA, 15 bp, Homo sapiens
tctcatgaacatcac

SEQ ID NO: 1478610 - DNA, 15 bp, Homo sapiens
ctcatgaacatcacc

SEQ ID NO: 1478611 - DNA, 15 bp, Homo sapiens
tcatgaacatcacca

SEQ ID NO: 1478612 - DNA, 15 bp, Homo sapiens
catgaacatcaccaa

SEQ ID NO: 1478613 - DNA, 15 bp, Homo sapiens
atgaacatcaccaac

SEQ ID NO: 1478614 - DNA, 15 bp, Homo sapiens
tgaacatcaccaacc

SEQ ID NO: 1478615 - DNA, 15 bp, Homo sapiens
gaacatcaccaacct

SEQ ID NO: 1478616 - DNA, 15 bp, Homo sapiens
aacatcaccaaccta

SEQ ID NO: 1478617 - DNA, 15 bp, Homo sapiens
acatcaccaacctat

SEQ ID NO: 1478618 - DNA, 15 bp, Homo sapiens
catcaccaacctata

SEQ ID NO: 1478619 - DNA, 15 bp, Homo sapiens
atcaccaacctataa

SEQ ID NO: 1478620 - DNA, 15 bp, Homo sapiens
tcaccaacctataat

SEQ ID NO: 1478621 - DNA, 15 bp, Homo sapiens
caccaacctataatg

SEQ ID NO: 1478622 - DNA, 15 bp, Homo sapiens
accaacctataatga

SEQ ID NO: 1478623 - DNA, 15 bp, Homo sapiens
ccaacctataatgaa

SEQ ID NO: 1478624 - DNA, 15 bp, Homo sapiens
caacctataatgaac

SEQ ID NO: 1478625 - DNA, 15 bp, Homo sapiens
aacctataatgaaca

SEQ ID NO: 1478626 - DNA, 15 bp, Homo sapiens
acctataatgaacat

SEQ ID NO: 1478627 - DNA, 15 bp, Homo sapiens
cctataatgaacatg

SEQ ID NO: 1478628 - DNA, 15 bp, Homo sapiens
ctataatgaacatgg

SEQ ID NO: 1478629 - DNA, 15 bp, Homo sapiens
tataatgaacatggg

SEQ ID NO: 1478630 - DNA, 15 bp, Homo sapiens
ataatgaacatggga

SEQ ID NO: 1478631 - DNA, 15 bp, Homo sapiens
taatgaacatgggag

SEQ ID NO: 1478632 - DNA, 15 bp, Homo sapiens
aatgaacatgggaga

SEQ ID NO: 1478633 - DNA, 15 bp, Homo sapiens
atgaacatgggagat

SEQ ID NO: 1478634 - DNA, 15 bp, Homo sapiens
tgaacatgggagatc

SEQ ID NO: 1478635 - DNA, 15 bp, Homo sapiens
gaacatgggagatct

SEQ ID NO: 1478636 - DNA, 15 bp, Homo sapiens
aacatgggagatctc

SEQ ID NO: 1478637 - DNA, 15 bp, Homo sapiens
acatgggagatctca

SEQ ID NO: 1478638 - DNA, 15 bp, Homo sapiens
catgggagatctcaa

SEQ ID NO: 1478639 - DNA, 15 bp, Homo sapiens
atgggagatctcaat

SEQ ID NO: 1478640 - DNA, 15 bp, Homo sapiens
tgggagatctcaatc

SEQ ID NO: 1478641 - DNA, 15 bp, Homo sapiens
gggagatctcaatca

SEQ ID NO: 1478642 - DNA, 15 bp, Homo sapiens
ggagatctcaatcac

SEQ ID NO: 1478643 - DNA, 15 bp, Homo sapiens
gagatctcaatcaca

SEQ ID NO: 1478644 - DNA, 15 bp, Homo sapiens
agatctcaatcacac

SEQ ID NO: 1478645 - DNA, 15 bp, Homo sapiens
gatctcaatcacaca

SEQ ID NO: 1478646 - DNA, 15 bp, Homo sapiens
atctcaatcacacag

SEQ ID NO: 1478647 - DNA, 15 bp, Homo sapiens
tctcaatcacacaga

SEQ ID NO: 1478648 - DNA, 15 bp, Homo sapiens
ctcaatcacacagaa

SEQ ID NO: 1478649 - DNA, 15 bp, Homo sapiens
tcaatcacacagaaa

SEQ ID NO: 1478650 - DNA, 15 bp, Homo sapiens
caatcacacagaaaa

SEQ ID NO: 1478651 - DNA, 15 bp, Homo sapiens
aatcacacagaaaac

SEQ ID NO: 1478652 - DNA, 15 bp, Homo sapiens
atcacacagaaaacc

SEQ ID NO: 1478653 - DNA, 15 bp, Homo sapiens
tcacacagaaaacca

SEQ ID NO: 1478654 - DNA, 15 bp, Homo sapiens
cacacagaaaaccag

SEQ ID NO: 1478655 - DNA, 15 bp, Homo sapiens
acacagaaaaccagg

SEQ ID NO: 1478656 - DNA, 15 bp, Homo sapiens
cacagaaaaccaggt

SEQ ID NO: 1478657 - DNA, 15 bp, Homo sapiens
acagaaaaccaggtg

SEQ ID NO: 1478658 - DNA, 15 bp, Homo sapiens
cagaaaaccaggtgg

SEQ ID NO: 1478659 - DNA, 15 bp, Homo sapiens
agaaaaccaggtgga

SEQ ID NO: 1478660 - DNA, 15 bp, Homo sapiens
gaaaaccaggtggaa

SEQ ID NO: 1478661 - DNA, 15 bp, Homo sapiens
aaaaccaggtggaag

SEQ ID NO: 1478662 - DNA, 15 bp, Homo sapiens
aaaccaggtggaagt

SEQ ID NO: 1478663 - DNA, 15 bp, Homo sapiens
aaccaggtggaagta

SEQ ID NO: 1478664 - DNA, 15 bp, Homo sapiens
accaggtggaagtag

SEQ ID NO: 1478665 - DNA, 15 bp, Homo sapiens
ccaggtggaagtagc

SEQ ID NO: 1478666 - DNA, 15 bp, Homo sapiens
caggtggaagtagca

SEQ ID NO: 1478667 - DNA, 15 bp, Homo sapiens
aggtggaagtagcag

SEQ ID NO: 1478668 - DNA, 15 bp, Homo sapiens
ggtggaagtagcagt

SEQ ID NO: 1478669 - DNA, 15 bp, Homo sapiens
gtggaagtagcagtg

SEQ ID NO: 1478670 - DNA, 15 bp, Homo sapiens
tggaagtagcagtgc

SEQ ID NO: 1478671 - DNA, 15 bp, Homo sapiens
ggaagtagcagtgcg

SEQ ID NO: 1478672 - DNA, 15 bp, Homo sapiens
gaagtagcagtgcga

SEQ ID NO: 1478673 - DNA, 15 bp, Homo sapiens
aagtagcagtgcgag

SEQ ID NO: 1478674 - DNA, 15 bp, Homo sapiens
agtagcagtgcgaga

SEQ ID NO: 1478675 - DNA, 15 bp, Homo sapiens
gtagcagtgcgagaa

SEQ ID NO: 1478676 - DNA, 15 bp, Homo sapiens
tagcagtgcgagaac

SEQ ID NO: 1478677 - DNA, 15 bp, Homo sapiens
agcagtgcgagaact

SEQ ID NO: 1478678 - DNA, 15 bp, Homo sapiens
gcagtgcgagaactg

SEQ ID NO: 1478679 - DNA, 15 bp, Homo sapiens
cagtgcgagaactgg

SEQ ID NO: 1478680 - DNA, 15 bp, Homo sapiens
agtgcgagaactggg

SEQ ID NO: 1478681 - DNA, 15 bp, Homo sapiens
gtgcgagaactggga

SEQ ID NO: 1478682 - DNA, 15 bp, Homo sapiens
tgcgagaactgggag

SEQ ID NO: 1478683 - DNA, 15 bp, Homo sapiens
gcgagaactgggagc

SEQ ID NO: 1478684 - DNA, 15 bp, Homo sapiens
cgagaactgggagcc

SEQ ID NO: 1478685 - DNA, 15 bp, Homo sapiens
gagaactgggagcca

SEQ ID NO: 1478686 - DNA, 15 bp, Homo sapiens
agaactgggagccat

SEQ ID NO: 1478687 - DNA, 15 bp, Homo sapiens
gaactgggagccatc

SEQ ID NO: 1478688 - DNA, 15 bp, Homo sapiens
aactgggagccatct

SEQ ID NO: 1478689 - DNA, 15 bp, Homo sapiens
actgggagccatctg

SEQ ID NO: 1478690 - DNA, 15 bp, Homo sapiens
ctgggagccatctgg

SEQ ID NO: 1478691 - DNA, 15 bp, Homo sapiens
tgggagccatctgga

SEQ ID NO: 1478692 - DNA, 15 bp, Homo sapiens
gggagccatctggac

SEQ ID NO: 1478693 - DNA, 15 bp, Homo sapiens
ggagccatctggaca

SEQ ID NO: 1478694 - DNA, 15 bp, Homo sapiens
gagccatctggacat

SEQ ID NO: 1478695 - DNA, 15 bp, Homo sapiens
agccatctggacatg

SEQ ID NO: 1478696 - DNA, 15 bp, Homo sapiens
gccatctggacatgg

SEQ ID NO: 1478697 - DNA, 15 bp, Homo sapiens
ccatctggacatggt

SEQ ID NO: 1478698 - DNA, 15 bp, Homo sapiens
catctggacatggtg

SEQ ID NO: 1478699 - DNA, 15 bp, Homo sapiens
atctggacatggtgg

SEQ ID NO: 1478700 - DNA, 15 bp, Homo sapiens
tctggacatggtggc

SEQ ID NO: 1478701 - DNA, 15 bp, Homo sapiens
ctggacatggtggct

SEQ ID NO: 1478702 - DNA, 15 bp, Homo sapiens
tggacatggtggctc

SEQ ID NO: 1478703 - DNA, 15 bp, Homo sapiens
ggacatggtggctca

SEQ ID NO: 1478704 - DNA, 15 bp, Homo sapiens
gacatggtggctcat

SEQ ID NO: 1478705 - DNA, 15 bp, Homo sapiens
acatggtggctcatg

SEQ ID NO: 1478706 - DNA, 15 bp, Homo sapiens
tggtggctcatgccc

SEQ ID NO: 1478707 - DNA, 15 bp, Homo sapiens
ggtggctcatgcccg

SEQ ID NO: 1478708 - DNA, 15 bp, Homo sapiens
gtggctcatgcccgt

SEQ ID NO: 1478709 - DNA, 15 bp, Homo sapiens
tggctcatgcccgta

SEQ ID NO: 1478710 - DNA, 15 bp, Homo sapiens
ggctcatgcccgtaa

SEQ ID NO: 1478711 - DNA, 15 bp, Homo sapiens
gctcatgcccgtaat

SEQ ID NO: 1478712 - DNA, 15 bp, Homo sapiens
ctcatgcccgtaatc

SEQ ID NO: 1478713 - DNA, 15 bp, Homo sapiens
tcatgcccgtaatcc

SEQ ID NO: 1478714 - DNA, 15 bp, Homo sapiens
catgcccgtaatcct

SEQ ID NO: 1478715 - DNA, 15 bp, Homo sapiens
atgcccgtaatccta

SEQ ID NO: 1478716 - DNA, 15 bp, Homo sapiens
tgcccgtaatcctat

SEQ ID NO: 1478717 - DNA, 15 bp, Homo sapiens
gcccgtaatcctatc

SEQ ID NO: 1478718 - DNA, 15 bp, Homo sapiens
cccgtaatcctatca

SEQ ID NO: 1478719 - DNA, 15 bp, Homo sapiens
ccgtaatcctatcac

SEQ ID NO: 1478720 - DNA, 15 bp, Homo sapiens
cgtaatcctatcact

SEQ ID NO: 1478721 - DNA, 15 bp, Homo sapiens
gtaatcctatcactt

SEQ ID NO: 1478722 - DNA, 15 bp, Homo sapiens
taatcctatcacttt

SEQ ID NO: 1478723 - DNA, 15 bp, Homo sapiens
aatcctatcactttg

SEQ ID NO: 1478724 - DNA, 15 bp, Homo sapiens
atcctatcactttgg

SEQ ID NO: 1478725 - DNA, 15 bp, Homo sapiens
tcctatcactttggg

SEQ ID NO: 1478726 - DNA, 15 bp, Homo sapiens
cctatcactttggga

SEQ ID NO: 1478727 - DNA, 15 bp, Homo sapiens
ctatcactttgggag

SEQ ID NO: 1478728 - DNA, 15 bp, Homo sapiens
tatcactttgggagg

SEQ ID NO: 1478729 - DNA, 15 bp, Homo sapiens
tcactttgggaggcc

SEQ ID NO: 1478730 - DNA, 15 bp, Homo sapiens
ccaaggcaagaggac

SEQ ID NO: 1478731 - DNA, 15 bp, Homo sapiens
caaggcaagaggacc

SEQ ID NO: 1478732 - DNA, 15 bp, Homo sapiens
aaggcaagaggacca

SEQ ID NO: 1478733 - DNA, 15 bp, Homo sapiens
aggcaagaggaccac

SEQ ID NO: 1478734 - DNA, 15 bp, Homo sapiens
ggcaagaggaccacc

SEQ ID NO: 1478735 - DNA, 15 bp, Homo sapiens
gcaagaggaccacct

SEQ ID NO: 1478736 - DNA, 15 bp, Homo sapiens
caagaggaccacctg

SEQ ID NO: 1478737 - DNA, 15 bp, Homo sapiens
aagaggaccacctga

SEQ ID NO: 1478738 - DNA, 15 bp, Homo sapiens
agaggaccacctgaa

SEQ ID NO: 1478739 - DNA, 15 bp, Homo sapiens
gaggaccacctgaag

SEQ ID NO: 1478740 - DNA, 15 bp, Homo sapiens
aggaccacctgaagc

SEQ ID NO: 1478741 - DNA, 15 bp, Homo sapiens
ggaccacctgaagca

SEQ ID NO: 1478742 - DNA, 15 bp, Homo sapiens
gaccacctgaagcaa

SEQ ID NO: 1478743 - DNA, 15 bp, Homo sapiens
accacctgaagcaag

SEQ ID NO: 1478744 - DNA, 15 bp, Homo sapiens
ccacctgaagcaagg

SEQ ID NO: 1478745 - DNA, 15 bp, Homo sapiens
cacctgaagcaagga

SEQ ID NO: 1478746 - DNA, 15 bp, Homo sapiens
acctgaagcaaggag

SEQ ID NO: 1478747 - DNA, 15 bp, Homo sapiens
cctgaagcaaggagt

SEQ ID NO: 1478748 - DNA, 15 bp, Homo sapiens
ctgaagcaaggagtt

SEQ ID NO: 1478749 - DNA, 15 bp, Homo sapiens
tgaagcaaggagttc

SEQ ID NO: 1478750 - DNA, 15 bp, Homo sapiens
gaagcaaggagttca

SEQ ID NO: 1478751 - DNA, 15 bp, Homo sapiens
aagcaaggagttcaa

SEQ ID NO: 1478752 - DNA, 15 bp, Homo sapiens
agcaaggagttcaag

SEQ ID NO: 1478753 - DNA, 15 bp, Homo sapiens
gcaaggagttcaaga

SEQ ID NO: 1478754 - DNA, 15 bp, Homo sapiens
caaggagttcaagac

SEQ ID NO: 1478755 - DNA, 15 bp, Homo sapiens
aaggagttcaagacc

SEQ ID NO: 1478756 - DNA, 15 bp, Homo sapiens
caagaccagcctagg

SEQ ID NO: 1478757 - DNA, 15 bp, Homo sapiens
aagaccagcctaggc

SEQ ID NO: 1478758 - DNA, 15 bp, Homo sapiens
agcctaggcaacata

SEQ ID NO: 1478759 - DNA, 15 bp, Homo sapiens
gcctaggcaacatag

SEQ ID NO: 1478760 - DNA, 15 bp, Homo sapiens
cctaggcaacatagt

SEQ ID NO: 1478761 - DNA, 15 bp, Homo sapiens
ctaggcaacatagta

SEQ ID NO: 1478762 - DNA, 15 bp, Homo sapiens
taggcaacatagtaa

SEQ ID NO: 1478763 - DNA, 15 bp, Homo sapiens
aggcaacatagtaag

SEQ ID NO: 1478764 - DNA, 15 bp, Homo sapiens
caacatagtaagacc

SEQ ID NO: 1478765 - DNA, 15 bp, Homo sapiens
aacatagtaagaccc

SEQ ID NO: 1478766 - DNA, 15 bp, Homo sapiens
acatagtaagaccct

SEQ ID NO: 1478767 - DNA, 15 bp, Homo sapiens
catagtaagaccctg

SEQ ID NO: 1478768 - DNA, 15 bp, Homo sapiens
atagtaagaccctgt

SEQ ID NO: 1478769 - DNA, 15 bp, Homo sapiens
tagtaagaccctgtc

SEQ ID NO: 1478770 - DNA, 15 bp, Homo sapiens
gtctctacaaaaaat

SEQ ID NO: 1478771 - DNA, 15 bp, Homo sapiens
ctctacaaaaaataa

SEQ ID NO: 1478772 - DNA, 15 bp, Homo sapiens
tctacaaaaaataaa

SEQ ID NO: 1478773 - DNA, 15 bp, Homo sapiens
ctacaaaaaataaag

SEQ ID NO: 1478774 - DNA, 15 bp, Homo sapiens
tacaaaaaataaaga

SEQ ID NO: 1478775 - DNA, 15 bp, Homo sapiens
acaaaaaataaagaa

SEQ ID NO: 1478776 - DNA, 15 bp, Homo sapiens
caaaaaataaagaat

SEQ ID NO: 1478777 - DNA, 15 bp, Homo sapiens
aaaaaataaagaata

SEQ ID NO: 1478778 - DNA, 15 bp, Homo sapiens
aaaaataaagaataa

SEQ ID NO: 1478779 - DNA, 15 bp, Homo sapiens
aaaataaagaataaa

SEQ ID NO: 1478780 - DNA, 15 bp, Homo sapiens
aaataaagaataaaa

SEQ ID NO: 1478781 - DNA, 15 bp, Homo sapiens
aataaagaataaaaa

SEQ ID NO: 1478782 - DNA, 15 bp, Homo sapiens
ataaagaataaaaaa

SEQ ID NO: 1478783 - DNA, 15 bp, Homo sapiens
taaagaataaaaaaa

SEQ ID NO: 1478784 - DNA, 15 bp, Homo sapiens
aaagaataaaaaaat

SEQ ID NO: 1478785 - DNA, 15 bp, Homo sapiens
aagaataaaaaaata

SEQ ID NO: 1478786 - DNA, 15 bp, Homo sapiens
agaataaaaaaataa

SEQ ID NO: 1478787 - DNA, 15 bp, Homo sapiens
gaataaaaaaataaa

SEQ ID NO: 1478788 - DNA, 15 bp, Homo sapiens
aataaaaaaataaat

SEQ ID NO: 1478789 - DNA, 15 bp, Homo sapiens
ataaaaaaataaatt

SEQ ID NO: 1478790 - DNA, 15 bp, Homo sapiens
taaaaaaataaatta

SEQ ID NO: 1478791 - DNA, 15 bp, Homo sapiens
aaaaaaataaattag

SEQ ID NO: 1478792 - DNA, 15 bp, Homo sapiens
aaaaaataaattagc

SEQ ID NO: 1478793 - DNA, 15 bp, Homo sapiens
aaaaataaattagct

SEQ ID NO: 1478794 - DNA, 15 bp, Homo sapiens
aataaattagctggc

SEQ ID NO: 1478795 - DNA, 15 bp, Homo sapiens
ataaattagctggca

SEQ ID NO: 1478796 - DNA, 15 bp, Homo sapiens
taaattagctggcat

SEQ ID NO: 1478797 - DNA, 15 bp, Homo sapiens
aaattagctggcatg

SEQ ID NO: 1478798 - DNA, 15 bp, Homo sapiens
aattagctggcatgg

SEQ ID NO: 1478799 - DNA, 15 bp, Homo sapiens
attagctggcatggt

SEQ ID NO: 1478800 - DNA, 15 bp, Homo sapiens
ttagctggcatggtg

SEQ ID NO: 1478801 - DNA, 15 bp, Homo sapiens
tagctggcatggtgg

SEQ ID NO: 1478802 - DNA, 15 bp, Homo sapiens
agctggcatggtggt

SEQ ID NO: 1478803 - DNA, 15 bp, Homo sapiens
gctggcatggtggtg

SEQ ID NO: 1478804 - DNA, 15 bp, Homo sapiens
ctggcatggtggtgt

SEQ ID NO: 1478805 - DNA, 15 bp, Homo sapiens
tggcatggtggtgtg

SEQ ID NO: 1478806 - DNA, 15 bp, Homo sapiens
ggcatggtggtgtgt

SEQ ID NO: 1478807 - DNA, 15 bp, Homo sapiens
gcatggtggtgtgtg

SEQ ID NO: 1478808 - DNA, 15 bp, Homo sapiens
catggtggtgtgtgc

SEQ ID NO: 1478809 - DNA, 15 bp, Homo sapiens
atggtggtgtgtgcc

SEQ ID NO: 1478810 - DNA, 15 bp, Homo sapiens
tggtggtgtgtgcct

SEQ ID NO: 1478811 - DNA, 15 bp, Homo sapiens
ggtggtgtgtgcctg

SEQ ID NO: 1478812 - DNA, 15 bp, Homo sapiens
gtggtgtgtgcctgt

SEQ ID NO: 1478813 - DNA, 15 bp, Homo sapiens
tggtgtgtgcctgta

SEQ ID NO: 1478814 - DNA, 15 bp, Homo sapiens
gtgtgtgcctgtagt

SEQ ID NO: 1478815 - DNA, 15 bp, Homo sapiens
gtgtgcctgtagtct

SEQ ID NO: 1478816 - DNA, 15 bp, Homo sapiens
tgtgcctgtagtctc

SEQ ID NO: 1478817 - DNA, 15 bp, Homo sapiens
gtgcctgtagtctca

SEQ ID NO: 1478818 - DNA, 15 bp, Homo sapiens
tgcctgtagtctcag

SEQ ID NO: 1478819 - DNA, 15 bp, Homo sapiens
tctcagctacttggt

SEQ ID NO: 1478820 - DNA, 15 bp, Homo sapiens
ctcagctacttggta

SEQ ID NO: 1478821 - DNA, 15 bp, Homo sapiens
tcagctacttggtac

SEQ ID NO: 1478822 - DNA, 15 bp, Homo sapiens
cagctacttggtact

SEQ ID NO: 1478823 - DNA, 15 bp, Homo sapiens
agctacttggtactt

SEQ ID NO: 1478824 - DNA, 15 bp, Homo sapiens
gctacttggtactta

SEQ ID NO: 1478825 - DNA, 15 bp, Homo sapiens
ctacttggtacttag

SEQ ID NO: 1478826 - DNA, 15 bp, Homo sapiens
tacttggtacttagg

SEQ ID NO: 1478827 - DNA, 15 bp, Homo sapiens
acttggtacttagga

SEQ ID NO: 1478828 - DNA, 15 bp, Homo sapiens
cttggtacttaggag

SEQ ID NO: 1478829 - DNA, 15 bp, Homo sapiens
ttggtacttaggagg

SEQ ID NO: 1478830 - DNA, 15 bp, Homo sapiens
tggtacttaggaggc

SEQ ID NO: 1478831 - DNA, 15 bp, Homo sapiens
ggtacttaggaggct

SEQ ID NO: 1478832 - DNA, 15 bp, Homo sapiens
gtacttaggaggctg

SEQ ID NO: 1478833 - DNA, 15 bp, Homo sapiens
taggaggctgaggta

SEQ ID NO: 1478834 - DNA, 15 bp, Homo sapiens
aggaggctgaggtag

SEQ ID NO: 1478835 - DNA, 15 bp, Homo sapiens
ggaggctgaggtagg

SEQ ID NO: 1478836 - DNA, 15 bp, Homo sapiens
gaggctgaggtagga

SEQ ID NO: 1478837 - DNA, 15 bp, Homo sapiens
aggctgaggtaggag

SEQ ID NO: 1478838 - DNA, 15 bp, Homo sapiens
ggctgaggtaggagg

SEQ ID NO: 1478839 - DNA, 15 bp, Homo sapiens
tgaggtaggaggatt

SEQ ID NO: 1478840 - DNA, 15 bp, Homo sapiens
gaggtaggaggattc

SEQ ID NO: 1478841 - DNA, 15 bp, Homo sapiens
aggtaggaggattcc

SEQ ID NO: 1478842 - DNA, 15 bp, Homo sapiens
ggtaggaggattcct

SEQ ID NO: 1478843 - DNA, 15 bp, Homo sapiens
gtaggaggattcctt

SEQ ID NO: 1478844 - DNA, 15 bp, Homo sapiens
taggaggattccttg

SEQ ID NO: 1478845 - DNA, 15 bp, Homo sapiens
aggaggattccttgg

SEQ ID NO: 1478846 - DNA, 15 bp, Homo sapiens
ggaggattccttggg

SEQ ID NO: 1478847 - DNA, 15 bp, Homo sapiens
gaggattccttgggc

SEQ ID NO: 1478848 - DNA, 15 bp, Homo sapiens
aggattccttgggcc

SEQ ID NO: 1478849 - DNA, 15 bp, Homo sapiens
ggattccttgggccc

SEQ ID NO: 1478850 - DNA, 15 bp, Homo sapiens
gattccttgggccca

SEQ ID NO: 1478851 - DNA, 15 bp, Homo sapiens
attccttgggcccaa

SEQ ID NO: 1478852 - DNA, 15 bp, Homo sapiens
ttccttgggcccaaa

SEQ ID NO: 1478853 - DNA, 15 bp, Homo sapiens
tccttgggcccaaaa

SEQ ID NO: 1478854 - DNA, 15 bp, Homo sapiens
ccttgggcccaaaag

SEQ ID NO: 1478855 - DNA, 15 bp, Homo sapiens
cttgggcccaaaagt

SEQ ID NO: 1478856 - DNA, 15 bp, Homo sapiens
ttgggcccaaaagtt

SEQ ID NO: 1478857 - DNA, 15 bp, Homo sapiens
tgggcccaaaagttt

SEQ ID NO: 1478858 - DNA, 15 bp, Homo sapiens
gggcccaaaagtttg

SEQ ID NO: 1478859 - DNA, 15 bp, Homo sapiens
ggcccaaaagtttga

SEQ ID NO: 1478860 - DNA, 15 bp, Homo sapiens
gcccaaaagtttgag

SEQ ID NO: 1478861 - DNA, 15 bp, Homo sapiens
cccaaaagtttgagg

SEQ ID NO: 1478862 - DNA, 15 bp, Homo sapiens
ccaaaagtttgaggc

SEQ ID NO: 1478863 - DNA, 15 bp, Homo sapiens
caaaagtttgaggct

SEQ ID NO: 1478864 - DNA, 15 bp, Homo sapiens
aaaagtttgaggctg

SEQ ID NO: 1478865 - DNA, 15 bp, Homo sapiens
aaagtttgaggctgc

SEQ ID NO: 1478866 - DNA, 15 bp, Homo sapiens
aagtttgaggctgca

SEQ ID NO: 1478867 - DNA, 15 bp, Homo sapiens
agtgagccgtgatca

SEQ ID NO: 1478868 - DNA, 15 bp, Homo sapiens
gtgagccgtgatcat

SEQ ID NO: 1478869 - DNA, 15 bp, Homo sapiens
tgagccgtgatcatg

SEQ ID NO: 1478870 - DNA, 15 bp, Homo sapiens
gagccgtgatcatgc

SEQ ID NO: 1478871 - DNA, 15 bp, Homo sapiens
agccgtgatcatgcc

SEQ ID NO: 1478872 - DNA, 15 bp, Homo sapiens
gccgtgatcatgcca

SEQ ID NO: 1478873 - DNA, 15 bp, Homo sapiens
ccgtgatcatgccac

SEQ ID NO: 1478874 - DNA, 15 bp, Homo sapiens
cgtgatcatgccact

SEQ ID NO: 1478875 - DNA, 15 bp, Homo sapiens
catgccactgcactt

SEQ ID NO: 1478876 - DNA, 15 bp, Homo sapiens
atgccactgcacttc

SEQ ID NO: 1478877 - DNA, 15 bp, Homo sapiens
tgccactgcacttca

SEQ ID NO: 1478878 - DNA, 15 bp, Homo sapiens
gccactgcacttcag

SEQ ID NO: 1478879 - DNA, 15 bp, Homo sapiens
acttcagcctgggca

SEQ ID NO: 1478880 - DNA, 15 bp, Homo sapiens
cttcagcctgggcaa

SEQ ID NO: 1478881 - DNA, 15 bp, Homo sapiens
ttcagcctgggcaac

SEQ ID NO: 1478882 - DNA, 15 bp, Homo sapiens
ctgggcaacatggca

SEQ ID NO: 1478883 - DNA, 15 bp, Homo sapiens
tgggcaacatggcaa

SEQ ID NO: 1478884 - DNA, 15 bp, Homo sapiens
gggcaacatggcaag

SEQ ID NO: 1478885 - DNA, 15 bp, Homo sapiens
ggcaacatggcaaga

SEQ ID NO: 1478886 - DNA, 15 bp, Homo sapiens
gcaacatggcaagac

SEQ ID NO: 1478887 - DNA, 15 bp, Homo sapiens
caacatggcaagacc

SEQ ID NO: 1478888 - DNA, 15 bp, Homo sapiens
aacatggcaagacca

SEQ ID NO: 1478889 - DNA, 15 bp, Homo sapiens
acatggcaagaccat

SEQ ID NO: 1478890 - DNA, 15 bp, Homo sapiens
catggcaagaccatg

SEQ ID NO: 1478891 - DNA, 15 bp, Homo sapiens
atggcaagaccatgt

SEQ ID NO: 1478892 - DNA, 15 bp, Homo sapiens
tggcaagaccatgtc

SEQ ID NO: 1478893 - DNA, 15 bp, Homo sapiens
ggcaagaccatgtct

SEQ ID NO: 1478894 - DNA, 15 bp, Homo sapiens
gcaagaccatgtctc

SEQ ID NO: 1478895 - DNA, 15 bp, Homo sapiens
caagaccatgtctct

SEQ ID NO: 1478896 - DNA, 15 bp, Homo sapiens
agaccatgtctctaa

SEQ ID NO: 1478897 - DNA, 15 bp, Homo sapiens
gaccatgtctctaaa

SEQ ID NO: 1478898 - DNA, 15 bp, Homo sapiens
accatgtctctaaaa

SEQ ID NO: 1478899 - DNA, 15 bp, Homo sapiens
ccatgtctctaaaaa

SEQ ID NO: 1478900 - DNA, 15 bp, Homo sapiens
catgtctctaaaaaa

SEQ ID NO: 1478901 - DNA, 15 bp, Homo sapiens
atgtctctaaaaaaa

SEQ ID NO: 1478902 - DNA, 15 bp, Homo sapiens
tgtctctaaaaaaaa

SEQ ID NO: 1478903 - DNA, 15 bp, Homo sapiens
gtctctaaaaaaaaa

SEQ ID NO: 1478904 - DNA, 15 bp, Homo sapiens
tctctaaaaaaaaaa

SEQ ID NO: 1478905 - DNA, 15 bp, Homo sapiens
ctctaaaaaaaaaaa

SEQ ID NO: 1478906 - DNA, 15 bp, Homo sapiens
aaaaaaaaaaagaac

SEQ ID NO: 1478907 - DNA, 15 bp, Homo sapiens
aaaaaaaaaagaact

SEQ ID NO: 1478908 - DNA, 15 bp, Homo sapiens
aaaaaaaaagaactt

SEQ ID NO: 1478909 - DNA, 15 bp, Homo sapiens
aaaaaaaagaacttg

SEQ ID NO: 1478910 - DNA, 15 bp, Homo sapiens
aaaaaaagaacttga

SEQ ID NO: 1478911 - DNA, 15 bp, Homo sapiens
aaaaaagaacttgac

SEQ ID NO: 1478912 - DNA, 15 bp, Homo sapiens
aaaaagaacttgacc

SEQ ID NO: 1478913 - DNA, 15 bp, Homo sapiens
aaaagaacttgacca

SEQ ID NO: 1478914 - DNA, 15 bp, Homo sapiens
aaagaacttgaccac

SEQ ID NO: 1478915 - DNA, 15 bp, Homo sapiens
aagaacttgaccact

SEQ ID NO: 1478916 - DNA, 15 bp, Homo sapiens
agaacttgaccactt

SEQ ID NO: 1478917 - DNA, 15 bp, Homo sapiens
gaacttgaccacttg

SEQ ID NO: 1478918 - DNA, 15 bp, Homo sapiens
aacttgaccacttgg

SEQ ID NO: 1478919 - DNA, 15 bp, Homo sapiens
acttgaccacttggc

SEQ ID NO: 1478920 - DNA, 15 bp, Homo sapiens
cttgaccacttggca

SEQ ID NO: 1478921 - DNA, 15 bp, Homo sapiens
ttgaccacttggcag

SEQ ID NO: 1478922 - DNA, 15 bp, Homo sapiens
tgaccacttggcagg

SEQ ID NO: 1478923 - DNA, 15 bp, Homo sapiens
gaccacttggcaggc

SEQ ID NO: 1478924 - DNA, 15 bp, Homo sapiens
accacttggcaggct

SEQ ID NO: 1478925 - DNA, 15 bp, Homo sapiens
ccacttggcaggctt

SEQ ID NO: 1478926 - DNA, 15 bp, Homo sapiens
cacttggcaggcttt

SEQ ID NO: 1478927 - DNA, 15 bp, Homo sapiens
acttggcaggctttg

SEQ ID NO: 1478928 - DNA, 15 bp, Homo sapiens
cttggcaggctttga

SEQ ID NO: 1478929 - DNA, 15 bp, Homo sapiens
ttggcaggctttgac

SEQ ID NO: 1478930 - DNA, 15 bp, Homo sapiens
tggcaggctttgaca

SEQ ID NO: 1478931 - DNA, 15 bp, Homo sapiens
ggcaggctttgacaa

SEQ ID NO: 1478932 - DNA, 15 bp, Homo sapiens
gcaggctttgacaat

SEQ ID NO: 1478933 - DNA, 15 bp, Homo sapiens
caggctttgacaatg

SEQ ID NO: 1478934 - DNA, 15 bp, Homo sapiens
aggctttgacaatgg

SEQ ID NO: 1478935 - DNA, 15 bp, Homo sapiens
ggctttgacaatgga

SEQ ID NO: 1478936 - DNA, 15 bp, Homo sapiens
gctttgacaatggat

SEQ ID NO: 1478937 - DNA, 15 bp, Homo sapiens
ctttgacaatggatc

SEQ ID NO: 1478938 - DNA, 15 bp, Homo sapiens
tttgacaatggatcc

SEQ ID NO: 1478939 - DNA, 15 bp, Homo sapiens
ttgacaatggatcct

SEQ ID NO: 1478940 - DNA, 15 bp, Homo sapiens
tgacaatggatcctg

SEQ ID NO: 1478941 - DNA, 15 bp, Homo sapiens
gacaatggatcctga

SEQ ID NO: 1478942 - DNA, 15 bp, Homo sapiens
acaatggatcctgag

SEQ ID NO: 1478943 - DNA, 15 bp, Homo sapiens
caatggatcctgagg

SEQ ID NO: 1478944 - DNA, 15 bp, Homo sapiens
aatggatcctgagga

SEQ ID NO: 1478945 - DNA, 15 bp, Homo sapiens
atggatcctgaggaa

SEQ ID NO: 1478946 - DNA, 15 bp, Homo sapiens
tggatcctgaggaaa

SEQ ID NO: 1478947 - DNA, 15 bp, Homo sapiens
ggatcctgaggaaaa

SEQ ID NO: 1478948 - DNA, 15 bp, Homo sapiens
gatcctgaggaaaat

SEQ ID NO: 1478949 - DNA, 15 bp, Homo sapiens
atcctgaggaaaatg

SEQ ID NO: 1478950 - DNA, 15 bp, Homo sapiens
tcctgaggaaaatgg

SEQ ID NO: 1478951 - DNA, 15 bp, Homo sapiens
cctgaggaaaatgga

SEQ ID NO: 1478952 - DNA, 15 bp, Homo sapiens
ctgaggaaaatggaa

SEQ ID NO: 1478953 - DNA, 15 bp, Homo sapiens
tgaggaaaatggaac

SEQ ID NO: 1478954 - DNA, 15 bp, Homo sapiens
gaggaaaatggaact

SEQ ID NO: 1478955 - DNA, 15 bp, Homo sapiens
aggaaaatggaactg

SEQ ID NO: 1478956 - DNA, 15 bp, Homo sapiens
ggaaaatggaactga

SEQ ID NO: 1478957 - DNA, 15 bp, Homo sapiens
gaaaatggaactgaa

SEQ ID NO: 1478958 - DNA, 15 bp, Homo sapiens
aaaatggaactgaac

SEQ ID NO: 1478959 - DNA, 15 bp, Homo sapiens
aaatggaactgaacg

SEQ ID NO: 1478960 - DNA, 15 bp, Homo sapiens
aatggaactgaacgg

SEQ ID NO: 1478961 - DNA, 15 bp, Homo sapiens
atggaactgaacggg

SEQ ID NO: 1478962 - DNA, 15 bp, Homo sapiens
tggaactgaacggga

SEQ ID NO: 1478963 - DNA, 15 bp, Homo sapiens
ggaactgaacgggac

SEQ ID NO: 1478964 - DNA, 15 bp, Homo sapiens
gaactgaacgggaca

SEQ ID NO: 1478965 - DNA, 15 bp, Homo sapiens
aactgaacgggacaa

SEQ ID NO: 1478966 - DNA, 15 bp, Homo sapiens
actgaacgggacaaa

SEQ ID NO: 1478967 - DNA, 15 bp, Homo sapiens
ctgaacgggacaaag

SEQ ID NO: 1478968 - DNA, 15 bp, Homo sapiens
tgaacgggacaaagg

SEQ ID NO: 1478969 - DNA, 15 bp, Homo sapiens
gaacgggacaaagga

SEQ ID NO: 1478970 - DNA, 15 bp, Homo sapiens
aacgggacaaaggag

SEQ ID NO: 1478971 - DNA, 15 bp, Homo sapiens
acgggacaaaggagc

SEQ ID NO: 1478972 - DNA, 15 bp, Homo sapiens
cgggacaaaggagct

SEQ ID NO: 1478973 - DNA, 15 bp, Homo sapiens
gggacaaaggagctc

SEQ ID NO: 1478974 - DNA, 15 bp, Homo sapiens
ggacaaaggagctca

SEQ ID NO: 1478975 - DNA, 15 bp, Homo sapiens
gacaaaggagctcag

SEQ ID NO: 1478976 - DNA, 15 bp, Homo sapiens
acaaaggagctcaga

SEQ ID NO: 1478977 - DNA, 15 bp, Homo sapiens
caaaggagctcagaa

SEQ ID NO: 1478978 - DNA, 15 bp, Homo sapiens
aaaggagctcagaaa

SEQ ID NO: 1478979 - DNA, 15 bp, Homo sapiens
aaggagctcagaaat

SEQ ID NO: 1478980 - DNA, 15 bp, Homo sapiens
aggagctcagaaatt

SEQ ID NO: 1478981 - DNA, 15 bp, Homo sapiens
ggagctcagaaattt

SEQ ID NO: 1478982 - DNA, 15 bp, Homo sapiens
gagctcagaaatttt

SEQ ID NO: 1478983 - DNA, 15 bp, Homo sapiens
agctcagaaattttt

SEQ ID NO: 1478984 - DNA, 15 bp, Homo sapiens
gctcagaaatttttg

SEQ ID NO: 1478985 - DNA, 15 bp, Homo sapiens
ctcagaaatttttga

SEQ ID NO: 1478986 - DNA, 15 bp, Homo sapiens
tcagaaatttttgag

SEQ ID NO: 1478987 - DNA, 15 bp, Homo sapiens
cagaaatttttgagg

SEQ ID NO: 1478988 - DNA, 15 bp, Homo sapiens
agaaatttttgaggc

SEQ ID NO: 1478989 - DNA, 15 bp, Homo sapiens
gaaatttttgaggcg

SEQ ID NO: 1478990 - DNA, 15 bp, Homo sapiens
aaatttttgaggcgg

SEQ ID NO: 1478991 - DNA, 15 bp, Homo sapiens
aatttttgaggcggt

SEQ ID NO: 1478992 - DNA, 15 bp, Homo sapiens
atttttgaggcggtt

SEQ ID NO: 1478993 - DNA, 15 bp, Homo sapiens
tttttgaggcggttt

SEQ ID NO: 1478994 - DNA, 15 bp, Homo sapiens
ttttgaggcggtttg

SEQ ID NO: 1478995 - DNA, 15 bp, Homo sapiens
tttgaggcggtttgg

SEQ ID NO: 1478996 - DNA, 15 bp, Homo sapiens
ttgaggcggtttggg

SEQ ID NO: 1478997 - DNA, 15 bp, Homo sapiens
tgaggcggtttggga

SEQ ID NO: 1478998 - DNA, 15 bp, Homo sapiens
gaggcggtttgggac

SEQ ID NO: 1478999 - DNA, 15 bp, Homo sapiens
aggcggtttgggaca

SEQ ID NO: 1479000 - DNA, 15 bp, Homo sapiens
ggcggtttgggacat

SEQ ID NO: 1479001 - DNA, 15 bp, Homo sapiens
gcggtttgggacatc

SEQ ID NO: 1479002 - DNA, 15 bp, Homo sapiens
cggtttgggacatct

SEQ ID NO: 1479003 - DNA, 15 bp, Homo sapiens
ggtttgggacatctc

SEQ ID NO: 1479004 - DNA, 15 bp, Homo sapiens
gtttgggacatctca

SEQ ID NO: 1479005 - DNA, 15 bp, Homo sapiens
tttgggacatctcag

SEQ ID NO: 1479006 - DNA, 15 bp, Homo sapiens
ttgggacatctcagg

SEQ ID NO: 1479007 - DNA, 15 bp, Homo sapiens
tgggacatctcaggg

SEQ ID NO: 1479008 - DNA, 15 bp, Homo sapiens
gggacatctcagggc

SEQ ID NO: 1479009 - DNA, 15 bp, Homo sapiens
ggacatctcagggca

SEQ ID NO: 1479010 - DNA, 15 bp, Homo sapiens
gacatctcagggcat

SEQ ID NO: 1479011 - DNA, 15 bp, Homo sapiens
acatctcagggcatg

SEQ ID NO: 1479012 - DNA, 15 bp, Homo sapiens
catctcagggcatgt

SEQ ID NO: 1479013 - DNA, 15 bp, Homo sapiens
atctcagggcatgtc

SEQ ID NO: 1479014 - DNA, 15 bp, Homo sapiens
tctcagggcatgtcc

SEQ ID NO: 1479015 - DNA, 15 bp, Homo sapiens
ctcagggcatgtcca

SEQ ID NO: 1479016 - DNA, 15 bp, Homo sapiens
tcagggcatgtccac

SEQ ID NO: 1479017 - DNA, 15 bp, Homo sapiens
cagggcatgtccacc

SEQ ID NO: 1479018 - DNA, 15 bp, Homo sapiens
agggcatgtccacct

SEQ ID NO: 1479019 - DNA, 15 bp, Homo sapiens
gggcatgtccacctg

SEQ ID NO: 1479020 - DNA, 15 bp, Homo sapiens
ggcatgtccacctgg

SEQ ID NO: 1479021 - DNA, 15 bp, Homo sapiens
gcatgtccacctggt

SEQ ID NO: 1479022 - DNA, 15 bp, Homo sapiens
catgtccacctggta

SEQ ID NO: 1479023 - DNA, 15 bp, Homo sapiens
atgtccacctggtag

SEQ ID NO: 1479024 - DNA, 15 bp, Homo sapiens
tgtccacctggtagg

SEQ ID NO: 1479025 - DNA, 15 bp, Homo sapiens
gtccacctggtaggt

SEQ ID NO: 1479026 - DNA, 15 bp, Homo sapiens
tccacctggtaggtt

SEQ ID NO: 1479027 - DNA, 15 bp, Homo sapiens
ccacctggtaggtta

SEQ ID NO: 1479028 - DNA, 15 bp, Homo sapiens
cacctggtaggttaa

SEQ ID NO: 1479029 - DNA, 15 bp, Homo sapiens
acctggtaggttaat

SEQ ID NO: 1479030 - DNA, 15 bp, Homo sapiens
cctggtaggttaatt

SEQ ID NO: 1479031 - DNA, 15 bp, Homo sapiens
ctggtaggttaatta

SEQ ID NO: 1479032 - DNA, 15 bp, Homo sapiens
tggtaggttaattat

SEQ ID NO: 1479033 - DNA, 15 bp, Homo sapiens
ggtaggttaattatc

SEQ ID NO: 1479034 - DNA, 15 bp, Homo sapiens
gtaggttaattatcc

SEQ ID NO: 1479035 - DNA, 15 bp, Homo sapiens
taggttaattatcca

SEQ ID NO: 1479036 - DNA, 15 bp, Homo sapiens
aggttaattatccat

SEQ ID NO: 1479037 - DNA, 15 bp, Homo sapiens
ggttaattatccatt

SEQ ID NO: 1479038 - DNA, 15 bp, Homo sapiens
gttaattatccattt

SEQ ID NO: 1479039 - DNA, 15 bp, Homo sapiens
ttaattatccatttc

SEQ ID NO: 1479040 - DNA, 15 bp, Homo sapiens
taattatccatttcc

SEQ ID NO: 1479041 - DNA, 15 bp, Homo sapiens
aattatccatttccc

SEQ ID NO: 1479042 - DNA, 15 bp, Homo sapiens
attatccatttccca

SEQ ID NO: 1479043 - DNA, 15 bp, Homo sapiens
ttatccatttcccac

SEQ ID NO: 1479044 - DNA, 15 bp, Homo sapiens
tatccatttcccaca

SEQ ID NO: 1479045 - DNA, 15 bp, Homo sapiens
atccatttcccacaa

SEQ ID NO: 1479046 - DNA, 15 bp, Homo sapiens
tccatttcccacaag

SEQ ID NO: 1479047 - DNA, 15 bp, Homo sapiens
ccatttcccacaagt

SEQ ID NO: 1479048 - DNA, 15 bp, Homo sapiens
catttcccacaagtt

SEQ ID NO: 1479049 - DNA, 15 bp, Homo sapiens
atttcccacaagttt

SEQ ID NO: 1479050 - DNA, 15 bp, Homo sapiens
tttcccacaagtttt

SEQ ID NO: 1479051 - DNA, 15 bp, Homo sapiens
ttcccacaagttttt

SEQ ID NO: 1479052 - DNA, 15 bp, Homo sapiens
tcccacaagttttta

SEQ ID NO: 1479053 - DNA, 15 bp, Homo sapiens
cccacaagtttttat

SEQ ID NO: 1479054 - DNA, 15 bp, Homo sapiens
ccacaagtttttata

SEQ ID NO: 1479055 - DNA, 15 bp, Homo sapiens
cacaagtttttataa

SEQ ID NO: 1479056 - DNA, 15 bp, Homo sapiens
acaagtttttataat

SEQ ID NO: 1479057 - DNA, 15 bp, Homo sapiens
caagtttttataatg

SEQ ID NO: 1479058 - DNA, 15 bp, Homo sapiens
aagtttttataatgt

SEQ ID NO: 1479059 - DNA, 15 bp, Homo sapiens
agtttttataatgtg

SEQ ID NO: 1479060 - DNA, 15 bp, Homo sapiens
gtttttataatgtgg

SEQ ID NO: 1479061 - DNA, 15 bp, Homo sapiens
tttttataatgtgga

SEQ ID NO: 1479062 - DNA, 15 bp, Homo sapiens
ttttataatgtggag

SEQ ID NO: 1479063 - DNA, 15 bp, Homo sapiens
tttataatgtggaga

SEQ ID NO: 1479064 - DNA, 15 bp, Homo sapiens
ttataatgtggagat

SEQ ID NO: 1479065 - DNA, 15 bp, Homo sapiens
tataatgtggagatt

SEQ ID NO: 1479066 - DNA, 15 bp, Homo sapiens
ataatgtggagattg

SEQ ID NO: 1479067 - DNA, 15 bp, Homo sapiens
taatgtggagattga

SEQ ID NO: 1479068 - DNA, 15 bp, Homo sapiens
aatgtggagattgag

SEQ ID NO: 1479069 - DNA, 15 bp, Homo sapiens
atgtggagattgagc

SEQ ID NO: 1479070 - DNA, 15 bp, Homo sapiens
tgtggagattgagcc

SEQ ID NO: 1479071 - DNA, 15 bp, Homo sapiens
gtggagattgagcct

SEQ ID NO: 1479072 - DNA, 15 bp, Homo sapiens
tggagattgagcctc

SEQ ID NO: 1479073 - DNA, 15 bp, Homo sapiens
ggagattgagcctcc

SEQ ID NO: 1479074 - DNA, 15 bp, Homo sapiens
gagattgagcctccc

SEQ ID NO: 1479075 - DNA, 15 bp, Homo sapiens
agattgagcctccct

SEQ ID NO: 1479076 - DNA, 15 bp, Homo sapiens
gattgagcctccctg

SEQ ID NO: 1479077 - DNA, 15 bp, Homo sapiens
attgagcctccctgc

SEQ ID NO: 1479078 - DNA, 15 bp, Homo sapiens
ttgagcctccctgcc

SEQ ID NO: 1479079 - DNA, 15 bp, Homo sapiens
tgagcctccctgccc

SEQ ID NO: 1479080 - DNA, 15 bp, Homo sapiens
gagcctccctgccct

SEQ ID NO: 1479081 - DNA, 15 bp, Homo sapiens
agcctccctgccctg

SEQ ID NO: 1479082 - DNA, 15 bp, Homo sapiens
gcctccctgccctga

SEQ ID NO: 1479083 - DNA, 15 bp, Homo sapiens
cctccctgccctgaa

SEQ ID NO: 1479084 - DNA, 15 bp, Homo sapiens
ctccctgccctgaag

SEQ ID NO: 1479085 - DNA, 15 bp, Homo sapiens
tccctgccctgaaga

SEQ ID NO: 1479086 - DNA, 15 bp, Homo sapiens
ccctgccctgaagac

SEQ ID NO: 1479087 - DNA, 15 bp, Homo sapiens
ctgccctgaagacac

SEQ ID NO: 1479088 - DNA, 15 bp, Homo sapiens
tgccctgaagacaca

SEQ ID NO: 1479089 - DNA, 15 bp, Homo sapiens
gccctgaagacacat

SEQ ID NO: 1479090 - DNA, 15 bp, Homo sapiens
ccctgaagacacatg

SEQ ID NO: 1479091 - DNA, 15 bp, Homo sapiens
cctgaagacacatgt

SEQ ID NO: 1479092 - DNA, 15 bp, Homo sapiens
ctgaagacacatgtc

SEQ ID NO: 1479093 - DNA, 15 bp, Homo sapiens
tgaagacacatgtcc

SEQ ID NO: 1479094 - DNA, 15 bp, Homo sapiens
gaagacacatgtcct

SEQ ID NO: 1479095 - DNA, 15 bp, Homo sapiens
aagacacatgtcctt

SEQ ID NO: 1479096 - DNA, 15 bp, Homo sapiens
agacacatgtccttg

SEQ ID NO: 1479097 - DNA, 15 bp, Homo sapiens
gacacatgtccttga

SEQ ID NO: 1479098 - DNA, 15 bp, Homo sapiens
acacatgtccttgag

SEQ ID NO: 1479099 - DNA, 15 bp, Homo sapiens
cacatgtccttgaga

SEQ ID NO: 1479100 - DNA, 15 bp, Homo sapiens
acatgtccttgagac

SEQ ID NO: 1479101 - DNA, 15 bp, Homo sapiens
catgtccttgagaca

SEQ ID NO: 1479102 - DNA, 15 bp, Homo sapiens
atgtccttgagacag

SEQ ID NO: 1479103 - DNA, 15 bp, Homo sapiens
tgtccttgagacaga

SEQ ID NO: 1479104 - DNA, 15 bp, Homo sapiens
gtccttgagacagac

SEQ ID NO: 1479105 - DNA, 15 bp, Homo sapiens
tccttgagacagaca

SEQ ID NO: 1479106 - DNA, 15 bp, Homo sapiens
ccttgagacagacag

SEQ ID NO: 1479107 - DNA, 15 bp, Homo sapiens
cttgagacagacaga

SEQ ID NO: 1479108 - DNA, 15 bp, Homo sapiens
ttgagacagacagac

SEQ ID NO: 1479109 - DNA, 15 bp, Homo sapiens
tgagacagacagaca

SEQ ID NO: 1479110 - DNA, 15 bp, Homo sapiens
gagacagacagacag

SEQ ID NO: 1479111 - DNA, 15 bp, Homo sapiens
agacagacagacagg

SEQ ID NO: 1479112 - DNA, 15 bp, Homo sapiens
gacagacagacaggc

SEQ ID NO: 1479113 - DNA, 15 bp, Homo sapiens
acagacagacaggca

SEQ ID NO: 1479114 - DNA, 15 bp, Homo sapiens
cagacagacaggcat

SEQ ID NO: 1479115 - DNA, 15 bp, Homo sapiens
agacagacaggcatg

SEQ ID NO: 1479116 - DNA, 15 bp, Homo sapiens
gacagacaggcatgg

SEQ ID NO: 1479117 - DNA, 15 bp, Homo sapiens
acagacaggcatggc

SEQ ID NO: 1479118 - DNA, 15 bp, Homo sapiens
cagacaggcatggct

SEQ ID NO: 1479119 - DNA, 15 bp, Homo sapiens
agacaggcatggctc

SEQ ID NO: 1479120 - DNA, 15 bp, Homo sapiens
gacaggcatggctct

SEQ ID NO: 1479121 - DNA, 15 bp, Homo sapiens
acaggcatggctctg

SEQ ID NO: 1479122 - DNA, 15 bp, Homo sapiens
caggcatggctctgt

SEQ ID NO: 1479123 - DNA, 15 bp, Homo sapiens
aggcatggctctgtt

SEQ ID NO: 1479124 - DNA, 15 bp, Homo sapiens
ggcatggctctgttg

SEQ ID NO: 1479125 - DNA, 15 bp, Homo sapiens
gcatggctctgttgg

SEQ ID NO: 1479126 - DNA, 15 bp, Homo sapiens
catggctctgttggg

SEQ ID NO: 1479127 - DNA, 15 bp, Homo sapiens
atggctctgttgggc

SEQ ID NO: 1479128 - DNA, 15 bp, Homo sapiens
tggctctgttgggca

SEQ ID NO: 1479129 - DNA, 15 bp, Homo sapiens
ggctctgttgggcaa

SEQ ID NO: 1479130 - DNA, 15 bp, Homo sapiens
gctctgttgggcaag

SEQ ID NO: 1479131 - DNA, 15 bp, Homo sapiens
ctctgttgggcaagg

SEQ ID NO: 1479132 - DNA, 15 bp, Homo sapiens
tctgttgggcaaggt

SEQ ID NO: 1479133 - DNA, 15 bp, Homo sapiens
ctgttgggcaaggtt

SEQ ID NO: 1479134 - DNA, 15 bp, Homo sapiens
tgttgggcaaggttg

SEQ ID NO: 1479135 - DNA, 15 bp, Homo sapiens
gttgggcaaggttgg

SEQ ID NO: 1479136 - DNA, 15 bp, Homo sapiens
ttgggcaaggttggc

SEQ ID NO: 1479137 - DNA, 15 bp, Homo sapiens
tgggcaaggttggca

SEQ ID NO: 1479138 - DNA, 15 bp, Homo sapiens
gggcaaggttggcac

SEQ ID NO: 1479139 - DNA, 15 bp, Homo sapiens
ggcaaggttggcacc

SEQ ID NO: 1479140 - DNA, 15 bp, Homo sapiens
gcaaggttggcacct

SEQ ID NO: 1479141 - DNA, 15 bp, Homo sapiens
caaggttggcacctc

SEQ ID NO: 1479142 - DNA, 15 bp, Homo sapiens
aaggttggcacctcc

SEQ ID NO: 1479143 - DNA, 15 bp, Homo sapiens
aggttggcacctcca

SEQ ID NO: 1479144 - DNA, 15 bp, Homo sapiens
ggttggcacctccag

SEQ ID NO: 1479145 - DNA, 15 bp, Homo sapiens
gttggcacctccaga

SEQ ID NO: 1479146 - DNA, 15 bp, Homo sapiens
ttggcacctccagaa

SEQ ID NO: 1479147 - DNA, 15 bp, Homo sapiens
tggcacctccagaag

SEQ ID NO: 1479148 - DNA, 15 bp, Homo sapiens
ggcacctccagaagc

SEQ ID NO: 1479149 - DNA, 15 bp, Homo sapiens
gcacctccagaagct

SEQ ID NO: 1479150 - DNA, 15 bp, Homo sapiens
cacctccagaagctt

SEQ ID NO: 1479151 - DNA, 15 bp, Homo sapiens
acctccagaagcttc

SEQ ID NO: 1479152 - DNA, 15 bp, Homo sapiens
cctccagaagcttcc

SEQ ID NO: 1479153 - DNA, 15 bp, Homo sapiens
ctccagaagcttcca

SEQ ID NO: 1479154 - DNA, 15 bp, Homo sapiens
tccagaagcttccaa

SEQ ID NO: 1479155 - DNA, 15 bp, Homo sapiens
ccagaagcttccaag

SEQ ID NO: 1479156 - DNA, 15 bp, Homo sapiens
cagaagcttccaaga

SEQ ID NO: 1479157 - DNA, 15 bp, Homo sapiens
agaagcttccaagaa

SEQ ID NO: 1479158 - DNA, 15 bp, Homo sapiens
gaagcttccaagaat

SEQ ID NO: 1479159 - DNA, 15 bp, Homo sapiens
aagcttccaagaata

SEQ ID NO: 1479160 - DNA, 15 bp, Homo sapiens
agcttccaagaatag

SEQ ID NO: 1479161 - DNA, 15 bp, Homo sapiens
gcttccaagaataga

SEQ ID NO: 1479162 - DNA, 15 bp, Homo sapiens
cttccaagaatagaa

SEQ ID NO: 1479163 - DNA, 15 bp, Homo sapiens
ttccaagaatagaac

SEQ ID NO: 1479164 - DNA, 15 bp, Homo sapiens
tccaagaatagaaca

SEQ ID NO: 1479165 - DNA, 15 bp, Homo sapiens
ccaagaatagaacac

SEQ ID NO: 1479166 - DNA, 15 bp, Homo sapiens
caagaatagaacact

SEQ ID NO: 1479167 - DNA, 15 bp, Homo sapiens
aagaatagaacacta

SEQ ID NO: 1479168 - DNA, 15 bp, Homo sapiens
agaatagaacactaa

SEQ ID NO: 1479169 - DNA, 15 bp, Homo sapiens
gaatagaacactaac

SEQ ID NO: 1479170 - DNA, 15 bp, Homo sapiens
aatagaacactaact

SEQ ID NO: 1479171 - DNA, 15 bp, Homo sapiens
atagaacactaactg

SEQ ID NO: 1479172 - DNA, 15 bp, Homo sapiens
tagaacactaactgt

SEQ ID NO: 1479173 - DNA, 15 bp, Homo sapiens
agaacactaactgtc

SEQ ID NO: 1479174 - DNA, 15 bp, Homo sapiens
gaacactaactgtcc

SEQ ID NO: 1479175 - DNA, 15 bp, Homo sapiens
aacactaactgtccc

SEQ ID NO: 1479176 - DNA, 15 bp, Homo sapiens
acactaactgtccct

SEQ ID NO: 1479177 - DNA, 15 bp, Homo sapiens
cactaactgtccctt

SEQ ID NO: 1479178 - DNA, 15 bp, Homo sapiens
actaactgtccctta

SEQ ID NO: 1479179 - DNA, 15 bp, Homo sapiens
ctaactgtcccttat

SEQ ID NO: 1479180 - DNA, 15 bp, Homo sapiens
taactgtcccttatg

SEQ ID NO: 1479181 - DNA, 15 bp, Homo sapiens
aactgtcccttatgg

SEQ ID NO: 1479182 - DNA, 15 bp, Homo sapiens
actgtcccttatgga

SEQ ID NO: 1479183 - DNA, 15 bp, Homo sapiens
ctgtcccttatggag

SEQ ID NO: 1479184 - DNA, 15 bp, Homo sapiens
tgtcccttatggagt

SEQ ID NO: 1479185 - DNA, 15 bp, Homo sapiens
gtcccttatggagta

SEQ ID NO: 1479186 - DNA, 15 bp, Homo sapiens
tcccttatggagtaa

SEQ ID NO: 1479187 - DNA, 15 bp, Homo sapiens
cccttatggagtaac

SEQ ID NO: 1479188 - DNA, 15 bp, Homo sapiens
ccttatggagtaact

SEQ ID NO: 1479189 - DNA, 15 bp, Homo sapiens
cttatggagtaacta

SEQ ID NO: 1479190 - DNA, 15 bp, Homo sapiens
ttatggagtaactaa

SEQ ID NO: 1479191 - DNA, 15 bp, Homo sapiens
tatggagtaactaaa

SEQ ID NO: 1479192 - DNA, 15 bp, Homo sapiens
atggagtaactaaac

SEQ ID NO: 1479193 - DNA, 15 bp, Homo sapiens
tggagtaactaaacc

SEQ ID NO: 1479194 - DNA, 15 bp, Homo sapiens
ggagtaactaaacca

SEQ ID NO: 1479195 - DNA, 15 bp, Homo sapiens
gagtaactaaaccag

SEQ ID NO: 1479196 - DNA, 15 bp, Homo sapiens
agtaactaaaccagt

SEQ ID NO: 1479197 - DNA, 15 bp, Homo sapiens
gtaactaaaccagtc

SEQ ID NO: 1479198 - DNA, 15 bp, Homo sapiens
taactaaaccagtcc

SEQ ID NO: 1479199 - DNA, 15 bp, Homo sapiens
aactaaaccagtccc

SEQ ID NO: 1479200 - DNA, 15 bp, Homo sapiens
actaaaccagtccca

SEQ ID NO: 1479201 - DNA, 15 bp, Homo sapiens
ctaaaccagtcccaa

SEQ ID NO: 1479202 - DNA, 15 bp, Homo sapiens
taaaccagtcccaag

SEQ ID NO: 1479203 - DNA, 15 bp, Homo sapiens
aaaccagtcccaagc

SEQ ID NO: 1479204 - DNA, 15 bp, Homo sapiens
aaccagtcccaagcc

SEQ ID NO: 1479205 - DNA, 15 bp, Homo sapiens
accagtcccaagccc

SEQ ID NO: 1479206 - DNA, 15 bp, Homo sapiens
ccagtcccaagcccc

SEQ ID NO: 1479207 - DNA, 15 bp, Homo sapiens
cagtcccaagccccc

SEQ ID NO: 1479208 - DNA, 15 bp, Homo sapiens
agtcccaagccccca

SEQ ID NO: 1479209 - DNA, 15 bp, Homo sapiens
gtcccaagcccccag

SEQ ID NO: 1479210 - DNA, 15 bp, Homo sapiens
tcccaagcccccagg

SEQ ID NO: 1479211 - DNA, 15 bp, Homo sapiens
cccaagcccccagga

SEQ ID NO: 1479212 - DNA, 15 bp, Homo sapiens
ccaagcccccaggaa

SEQ ID NO: 1479213 - DNA, 15 bp, Homo sapiens
caagcccccaggaac

SEQ ID NO: 1479214 - DNA, 15 bp, Homo sapiens
aagcccccaggaact

SEQ ID NO: 1479215 - DNA, 15 bp, Homo sapiens
agcccccaggaactg

SEQ ID NO: 1479216 - DNA, 15 bp, Homo sapiens
gcccccaggaactgt

SEQ ID NO: 1479217 - DNA, 15 bp, Homo sapiens
cccccaggaactgtc

SEQ ID NO: 1479218 - DNA, 15 bp, Homo sapiens
ccccaggaactgtcc

SEQ ID NO: 1479219 - DNA, 15 bp, Homo sapiens
cccaggaactgtccg

SEQ ID NO: 1479220 - DNA, 15 bp, Homo sapiens
ccaggaactgtccgt

SEQ ID NO: 1479221 - DNA, 15 bp, Homo sapiens
caggaactgtccgtg

SEQ ID NO: 1479222 - DNA, 15 bp, Homo sapiens
aggaactgtccgtgg

SEQ ID NO: 1479223 - DNA, 15 bp, Homo sapiens
ggaactgtccgtggg

SEQ ID NO: 1479224 - DNA, 15 bp, Homo sapiens
gaactgtccgtgggt

SEQ ID NO: 1479225 - DNA, 15 bp, Homo sapiens
aactgtccgtgggtt

SEQ ID NO: 1479226 - DNA, 15 bp, Homo sapiens
actgtccgtgggttt

SEQ ID NO: 1479227 - DNA, 15 bp, Homo sapiens
ctgtccgtgggtttt

SEQ ID NO: 1479228 - DNA, 15 bp, Homo sapiens
tgtccgtgggtttta

SEQ ID NO: 1479229 - DNA, 15 bp, Homo sapiens
gtccgtgggttttag

SEQ ID NO: 1479230 - DNA, 15 bp, Homo sapiens
tccgtgggttttagc

SEQ ID NO: 1479231 - DNA, 15 bp, Homo sapiens
ccgtgggttttagct

SEQ ID NO: 1479232 - DNA, 15 bp, Homo sapiens
cgtgggttttagctg

SEQ ID NO: 1479233 - DNA, 15 bp, Homo sapiens
gtgggttttagctgg

SEQ ID NO: 1479234 - DNA, 15 bp, Homo sapiens
tgggttttagctggg

SEQ ID NO: 1479235 - DNA, 15 bp, Homo sapiens
gggttttagctgggt

SEQ ID NO: 1479236 - DNA, 15 bp, Homo sapiens
ggttttagctgggtt

SEQ ID NO: 1479237 - DNA, 15 bp, Homo sapiens
gttttagctgggttt

SEQ ID NO: 1479238 - DNA, 15 bp, Homo sapiens
ttttagctgggtttt

SEQ ID NO: 1479239 - DNA, 15 bp, Homo sapiens
tttagctgggttttc

SEQ ID NO: 1479240 - DNA, 15 bp, Homo sapiens
ttagctgggttttct

SEQ ID NO: 1479241 - DNA, 15 bp, Homo sapiens
tagctgggttttctg

SEQ ID NO: 1479242 - DNA, 15 bp, Homo sapiens
agctgggttttctgc

SEQ ID NO: 1479243 - DNA, 15 bp, Homo sapiens
gctgggttttctgct

SEQ ID NO: 1479244 - DNA, 15 bp, Homo sapiens
ctgggttttctgctc

SEQ ID NO: 1479245 - DNA, 15 bp, Homo sapiens
tgggttttctgctca

SEQ ID NO: 1479246 - DNA, 15 bp, Homo sapiens
gggttttctgctcag

SEQ ID NO: 1479247 - DNA, 15 bp, Homo sapiens
ggttttctgctcagc

SEQ ID NO: 1479248 - DNA, 15 bp, Homo sapiens
gttttctgctcagct

SEQ ID NO: 1479249 - DNA, 15 bp, Homo sapiens
ttttctgctcagcta

SEQ ID NO: 1479250 - DNA, 15 bp, Homo sapiens
tttctgctcagctag

SEQ ID NO: 1479251 - DNA, 15 bp, Homo sapiens
ttctgctcagctagc

SEQ ID NO: 1479252 - DNA, 15 bp, Homo sapiens
tctgctcagctagct

SEQ ID NO: 1479253 - DNA, 15 bp, Homo sapiens
ctgctcagctagctt

SEQ ID NO: 1479254 - DNA, 15 bp, Homo sapiens
tgctcagctagcttt

SEQ ID NO: 1479255 - DNA, 15 bp, Homo sapiens
gctcagctagcttta

SEQ ID NO: 1479256 - DNA, 15 bp, Homo sapiens
ctcagctagctttac

SEQ ID NO: 1479257 - DNA, 15 bp, Homo sapiens
tcagctagctttact

SEQ ID NO: 1479258 - DNA, 15 bp, Homo sapiens
cagctagctttactg

SEQ ID NO: 1479259 - DNA, 15 bp, Homo sapiens
agctagctttactga

SEQ ID NO: 1479260 - DNA, 15 bp, Homo sapiens
gctagctttactgag

SEQ ID NO: 1479261 - DNA, 15 bp, Homo sapiens
ctagctttactgagc

SEQ ID NO: 1479262 - DNA, 15 bp, Homo sapiens
tagctttactgagct

SEQ ID NO: 1479263 - DNA, 15 bp, Homo sapiens
agctttactgagctt

SEQ ID NO: 1479264 - DNA, 15 bp, Homo sapiens
gctttactgagcttg

SEQ ID NO: 1479265 - DNA, 15 bp, Homo sapiens
ctttactgagcttga

SEQ ID NO: 1479266 - DNA, 15 bp, Homo sapiens
tttactgagcttgac

SEQ ID NO: 1479267 - DNA, 15 bp, Homo sapiens
ttactgagcttgaca

SEQ ID NO: 1479268 - DNA, 15 bp, Homo sapiens
tactgagcttgacaa

SEQ ID NO: 1479269 - DNA, 15 bp, Homo sapiens
actgagcttgacaaa

SEQ ID NO: 1479270 - DNA, 15 bp, Homo sapiens
ctgagcttgacaaag

SEQ ID NO: 1479271 - DNA, 15 bp, Homo sapiens
tgagcttgacaaaga

SEQ ID NO: 1479272 - DNA, 15 bp, Homo sapiens
gagcttgacaaagaa

SEQ ID NO: 1479273 - DNA, 15 bp, Homo sapiens
agcttgacaaagaaa

SEQ ID NO: 1479274 - DNA, 15 bp, Homo sapiens
gcttgacaaagaaaa

SEQ ID NO: 1479275 - DNA, 15 bp, Homo sapiens
cttgacaaagaaaac

SEQ ID NO: 1479276 - DNA, 15 bp, Homo sapiens
ttgacaaagaaaaca

SEQ ID NO: 1479277 - DNA, 15 bp, Homo sapiens
tgacaaagaaaacat

SEQ ID NO: 1479278 - DNA, 15 bp, Homo sapiens
gacaaagaaaacatc

SEQ ID NO: 1479279 - DNA, 15 bp, Homo sapiens
acaaagaaaacatct

SEQ ID NO: 1479280 - DNA, 15 bp, Homo sapiens
caaagaaaacatctc

SEQ ID NO: 1479281 - DNA, 15 bp, Homo sapiens
aaagaaaacatctcc

SEQ ID NO: 1479282 - DNA, 15 bp, Homo sapiens
aagaaaacatctcca

SEQ ID NO: 1479283 - DNA, 15 bp, Homo sapiens
agaaaacatctccag

SEQ ID NO: 1479284 - DNA, 15 bp, Homo sapiens
gaaaacatctccagg

SEQ ID NO: 1479285 - DNA, 15 bp, Homo sapiens
aaaacatctccaggt

SEQ ID NO: 1479286 - DNA, 15 bp, Homo sapiens
aaacatctccaggta

SEQ ID NO: 1479287 - DNA, 15 bp, Homo sapiens
aacatctccaggtaa

SEQ ID NO: 1479288 - DNA, 15 bp, Homo sapiens
acatctccaggtaaa

SEQ ID NO: 1479289 - DNA, 15 bp, Homo sapiens
catctccaggtaaac

SEQ ID NO: 1479290 - DNA, 15 bp, Homo sapiens
atctccaggtaaacc

SEQ ID NO: 1479291 - DNA, 15 bp, Homo sapiens
tctccaggtaaaccc

SEQ ID NO: 1479292 - DNA, 15 bp, Homo sapiens
ctccaggtaaaccca

SEQ ID NO: 1479293 - DNA, 15 bp, Homo sapiens
tccaggtaaacccaa

SEQ ID NO: 1479294 - DNA, 15 bp, Homo sapiens
ccaggtaaacccaat

SEQ ID NO: 1479295 - DNA, 15 bp, Homo sapiens
caggtaaacccaatg

SEQ ID NO: 1479296 - DNA, 15 bp, Homo sapiens
aggtaaacccaatga

SEQ ID NO: 1479297 - DNA, 15 bp, Homo sapiens
ggtaaacccaatgaa

SEQ ID NO: 1479298 - DNA, 15 bp, Homo sapiens
gtaaacccaatgaaa

SEQ ID NO: 1479299 - DNA, 15 bp, Homo sapiens
taaacccaatgaaat

SEQ ID NO: 1479300 - DNA, 15 bp, Homo sapiens
aaacccaatgaaatg

SEQ ID NO: 1479301 - DNA, 15 bp, Homo sapiens
aacccaatgaaatgt

SEQ ID NO: 1479302 - DNA, 15 bp, Homo sapiens
acccaatgaaatgtt

SEQ ID NO: 1479303 - DNA, 15 bp, Homo sapiens
cccaatgaaatgttt

SEQ ID NO: 1479304 - DNA, 15 bp, Homo sapiens
ccaatgaaatgtttt

SEQ ID NO: 1479305 - DNA, 15 bp, Homo sapiens
caatgaaatgttttc

SEQ ID NO: 1479306 - DNA, 15 bp, Homo sapiens
aatgaaatgttttct

SEQ ID NO: 1479307 - DNA, 15 bp, Homo sapiens
atgaaatgttttctt

SEQ ID NO: 1479308 - DNA, 15 bp, Homo sapiens
tgaaatgttttcttt

SEQ ID NO: 1479309 - DNA, 15 bp, Homo sapiens
gaaatgttttctttg

SEQ ID NO: 1479310 - DNA, 15 bp, Homo sapiens
aaatgttttctttgg

SEQ ID NO: 1479311 - DNA, 15 bp, Homo sapiens
aatgttttctttgga

SEQ ID NO: 1479312 - DNA, 15 bp, Homo sapiens
atgttttctttggag

SEQ ID NO: 1479313 - DNA, 15 bp, Homo sapiens
tgttttctttggagg

SEQ ID NO: 1479314 - DNA, 15 bp, Homo sapiens
gttttctttggagga

SEQ ID NO: 1479315 - DNA, 15 bp, Homo sapiens
ttttctttggaggac

SEQ ID NO: 1479316 - DNA, 15 bp, Homo sapiens
tttctttggaggacc

SEQ ID NO: 1479317 - DNA, 15 bp, Homo sapiens
ttctttggaggacca

SEQ ID NO: 1479318 - DNA, 15 bp, Homo sapiens
tctttggaggaccac

SEQ ID NO: 1479319 - DNA, 15 bp, Homo sapiens
ctttggaggaccaca

SEQ ID NO: 1479320 - DNA, 15 bp, Homo sapiens
tttggaggaccacag

SEQ ID NO: 1479321 - DNA, 15 bp, Homo sapiens
ttggaggaccacagc

SEQ ID NO: 1479322 - DNA, 15 bp, Homo sapiens
tggaggaccacagca

SEQ ID NO: 1479323 - DNA, 15 bp, Homo sapiens
ggaggaccacagcag

SEQ ID NO: 1479324 - DNA, 15 bp, Homo sapiens
gaggaccacagcagg

SEQ ID NO: 1479325 - DNA, 15 bp, Homo sapiens
aggaccacagcagga

SEQ ID NO: 1479326 - DNA, 15 bp, Homo sapiens
ggaccacagcaggac

SEQ ID NO: 1479327 - DNA, 15 bp, Homo sapiens
gaccacagcaggact

SEQ ID NO: 1479328 - DNA, 15 bp, Homo sapiens
accacagcaggactt

SEQ ID NO: 1479329 - DNA, 15 bp, Homo sapiens
ccacagcaggacttg

SEQ ID NO: 1479330 - DNA, 15 bp, Homo sapiens
cacagcaggacttgt

SEQ ID NO: 1479331 - DNA, 15 bp, Homo sapiens
acagcaggacttgtt

SEQ ID NO: 1479332 - DNA, 15 bp, Homo sapiens
cagcaggacttgttc

SEQ ID NO: 1479333 - DNA, 15 bp, Homo sapiens
agcaggacttgttca

SEQ ID NO: 1479334 - DNA, 15 bp, Homo sapiens
gcaggacttgttcac

SEQ ID NO: 1479335 - DNA, 15 bp, Homo sapiens
caggacttgttcaca

SEQ ID NO: 1479336 - DNA, 15 bp, Homo sapiens
aggacttgttcacaa

SEQ ID NO: 1479337 - DNA, 15 bp, Homo sapiens
ggacttgttcacaaa

SEQ ID NO: 1479338 - DNA, 15 bp, Homo sapiens
gacttgttcacaaaa

SEQ ID NO: 1479339 - DNA, 15 bp, Homo sapiens
acttgttcacaaaat

SEQ ID NO: 1479340 - DNA, 15 bp, Homo sapiens
cttgttcacaaaata

SEQ ID NO: 1479341 - DNA, 15 bp, Homo sapiens
ttgttcacaaaatat

SEQ ID NO: 1479342 - DNA, 15 bp, Homo sapiens
tgttcacaaaatatc

SEQ ID NO: 1479343 - DNA, 15 bp, Homo sapiens
gttcacaaaatatct

SEQ ID NO: 1479344 - DNA, 15 bp, Homo sapiens
ttcacaaaatatcta

SEQ ID NO: 1479345 - DNA, 15 bp, Homo sapiens
tcacaaaatatctac

SEQ ID NO: 1479346 - DNA, 15 bp, Homo sapiens
cacaaaatatctact

SEQ ID NO: 1479347 - DNA, 15 bp, Homo sapiens
acaaaatatctactt

SEQ ID NO: 1479348 - DNA, 15 bp, Homo sapiens
caaaatatctacttt

SEQ ID NO: 1479349 - DNA, 15 bp, Homo sapiens
aaaatatctactttt

SEQ ID NO: 1479350 - DNA, 15 bp, Homo sapiens
aaatatctacttttc

SEQ ID NO: 1479351 - DNA, 15 bp, Homo sapiens
aatatctacttttcc

SEQ ID NO: 1479352 - DNA, 15 bp, Homo sapiens
atatctacttttcct

SEQ ID NO: 1479353 - DNA, 15 bp, Homo sapiens
tatctacttttcctg

SEQ ID NO: 1479354 - DNA, 15 bp, Homo sapiens
atctacttttcctgt

SEQ ID NO: 1479355 - DNA, 15 bp, Homo sapiens
tctacttttcctgta

SEQ ID NO: 1479356 - DNA, 15 bp, Homo sapiens
ctacttttcctgtag

SEQ ID NO: 1479357 - DNA, 15 bp, Homo sapiens
tacttttcctgtaga

SEQ ID NO: 1479358 - DNA, 15 bp, Homo sapiens
acttttcctgtagat

SEQ ID NO: 1479359 - DNA, 15 bp, Homo sapiens
cttttcctgtagatg

SEQ ID NO: 1479360 - DNA, 15 bp, Homo sapiens
ttttcctgtagatgg

SEQ ID NO: 1479361 - DNA, 15 bp, Homo sapiens
tttcctgtagatgga

SEQ ID NO: 1479362 - DNA, 15 bp, Homo sapiens
ttcctgtagatggat

SEQ ID NO: 1479363 - DNA, 15 bp, Homo sapiens
tcctgtagatggatg

SEQ ID NO: 1479364 - DNA, 15 bp, Homo sapiens
cctgtagatggatgc

SEQ ID NO: 1479365 - DNA, 15 bp, Homo sapiens
ctgtagatggatgcc

SEQ ID NO: 1479366 - DNA, 15 bp, Homo sapiens
tgtagatggatgccg

SEQ ID NO: 1479367 - DNA, 15 bp, Homo sapiens
gtagatggatgccgg

SEQ ID NO: 1479368 - DNA, 15 bp, Homo sapiens
tagatggatgccggg

SEQ ID NO: 1479369 - DNA, 15 bp, Homo sapiens
agatggatgccggga

SEQ ID NO: 1479370 - DNA, 15 bp, Homo sapiens
gatggatgccgggag

SEQ ID NO: 1479371 - DNA, 15 bp, Homo sapiens
atggatgccgggaga

SEQ ID NO: 1479372 - DNA, 15 bp, Homo sapiens
tggatgccgggagac

SEQ ID NO: 1479373 - DNA, 15 bp, Homo sapiens
ggatgccgggagaca

SEQ ID NO: 1479374 - DNA, 15 bp, Homo sapiens
gatgccgggagacag

SEQ ID NO: 1479375 - DNA, 15 bp, Homo sapiens
atgccgggagacagg

SEQ ID NO: 1479376 - DNA, 15 bp, Homo sapiens
tgccgggagacagga

SEQ ID NO: 1479377 - DNA, 15 bp, Homo sapiens
gccgggagacaggag

SEQ ID NO: 1479378 - DNA, 15 bp, Homo sapiens
ccgggagacaggaga

SEQ ID NO: 1479379 - DNA, 15 bp, Homo sapiens
cgggagacaggagac

SEQ ID NO: 1479380 - DNA, 15 bp, Homo sapiens
gggagacaggagacc

SEQ ID NO: 1479381 - DNA, 15 bp, Homo sapiens
ggagacaggagaccc

SEQ ID NO: 1479382 - DNA, 15 bp, Homo sapiens
gagacaggagacccc

SEQ ID NO: 1479383 - DNA, 15 bp, Homo sapiens
agacaggagacccct

SEQ ID NO: 1479384 - DNA, 15 bp, Homo sapiens
gacaggagacccctg

SEQ ID NO: 1479385 - DNA, 15 bp, Homo sapiens
acaggagacccctgt

SEQ ID NO: 1479386 - DNA, 15 bp, Homo sapiens
caggagacccctgtg

SEQ ID NO: 1479387 - DNA, 15 bp, Homo sapiens
aggagacccctgtgc

SEQ ID NO: 1479388 - DNA, 15 bp, Homo sapiens
ggagacccctgtgct

SEQ ID NO: 1479389 - DNA, 15 bp, Homo sapiens
gagacccctgtgctg

SEQ ID NO: 1479390 - DNA, 15 bp, Homo sapiens
agacccctgtgctgg

SEQ ID NO: 1479391 - DNA, 15 bp, Homo sapiens
gacccctgtgctgga

SEQ ID NO: 1479392 - DNA, 15 bp, Homo sapiens
acccctgtgctggac

SEQ ID NO: 1479393 - DNA, 15 bp, Homo sapiens
cccctgtgctggact

SEQ ID NO: 1479394 - DNA, 15 bp, Homo sapiens
ccctgtgctggactg

SEQ ID NO: 1479395 - DNA, 15 bp, Homo sapiens
cctgtgctggactgt

SEQ ID NO: 1479396 - DNA, 15 bp, Homo sapiens
ctgtgctggactgtc

SEQ ID NO: 1479397 - DNA, 15 bp, Homo sapiens
tgtgctggactgtcc

SEQ ID NO: 1479398 - DNA, 15 bp, Homo sapiens
gtgctggactgtcca

SEQ ID NO: 1479399 - DNA, 15 bp, Homo sapiens
tgctggactgtccag

SEQ ID NO: 1479400 - DNA, 15 bp, Homo sapiens
gctggactgtccagg

SEQ ID NO: 1479401 - DNA, 15 bp, Homo sapiens
ctggactgtccaggc

SEQ ID NO: 1479402 - DNA, 15 bp, Homo sapiens
tggactgtccaggct

SEQ ID NO: 1479403 - DNA, 15 bp, Homo sapiens
ggactgtccaggctt

SEQ ID NO: 1479404 - DNA, 15 bp, Homo sapiens
gactgtccaggctta

SEQ ID NO: 1479405 - DNA, 15 bp, Homo sapiens
actgtccaggcttag

SEQ ID NO: 1479406 - DNA, 15 bp, Homo sapiens
ctgtccaggcttagc

SEQ ID NO: 1479407 - DNA, 15 bp, Homo sapiens
tgtccaggcttagca

SEQ ID NO: 1479408 - DNA, 15 bp, Homo sapiens
gtccaggcttagcac

SEQ ID NO: 1479409 - DNA, 15 bp, Homo sapiens
tccaggcttagcact

SEQ ID NO: 1479410 - DNA, 15 bp, Homo sapiens
ccaggcttagcactc

SEQ ID NO: 1479411 - DNA, 15 bp, Homo sapiens
caggcttagcactcc

SEQ ID NO: 1479412 - DNA, 15 bp, Homo sapiens
aggcttagcactcca

SEQ ID NO: 1479413 - DNA, 15 bp, Homo sapiens
ggcttagcactccag

SEQ ID NO: 1479414 - DNA, 15 bp, Homo sapiens
gcttagcactccagt

SEQ ID NO: 1479415 - DNA, 15 bp, Homo sapiens
cttagcactccagtc

SEQ ID NO: 1479416 - DNA, 15 bp, Homo sapiens
ttagcactccagtca

SEQ ID NO: 1479417 - DNA, 15 bp, Homo sapiens
tagcactccagtcaa

SEQ ID NO: 1479418 - DNA, 15 bp, Homo sapiens
agcactccagtcaag

SEQ ID NO: 1479419 - DNA, 15 bp, Homo sapiens
gcactccagtcaagc

SEQ ID NO: 1479420 - DNA, 15 bp, Homo sapiens
cactccagtcaagca

SEQ ID NO: 1479421 - DNA, 15 bp, Homo sapiens
actccagtcaagcag

SEQ ID NO: 1479422 - DNA, 15 bp, Homo sapiens
ctccagtcaagcagg

SEQ ID NO: 1479423 - DNA, 15 bp, Homo sapiens
tccagtcaagcagga

SEQ ID NO: 1479424 - DNA, 15 bp, Homo sapiens
ccagtcaagcaggat

SEQ ID NO: 1479425 - DNA, 15 bp, Homo sapiens
cagtcaagcaggatg

SEQ ID NO: 1479426 - DNA, 15 bp, Homo sapiens
agtcaagcaggatgt

SEQ ID NO: 1479427 - DNA, 15 bp, Homo sapiens
gtcaagcaggatgta

SEQ ID NO: 1479428 - DNA, 15 bp, Homo sapiens
tcaagcaggatgtag

SEQ ID NO: 1479429 - DNA, 15 bp, Homo sapiens
caagcaggatgtagg

SEQ ID NO: 1479430 - DNA, 15 bp, Homo sapiens
aagcaggatgtaggc

SEQ ID NO: 1479431 - DNA, 15 bp, Homo sapiens
agcaggatgtaggcc

SEQ ID NO: 1479432 - DNA, 15 bp, Homo sapiens
gcaggatgtaggcca

SEQ ID NO: 1479433 - DNA, 15 bp, Homo sapiens
caggatgtaggccag

SEQ ID NO: 1479434 - DNA, 15 bp, Homo sapiens
aggatgtaggccagc

SEQ ID NO: 1479435 - DNA, 15 bp, Homo sapiens
ggatgtaggccagcc

SEQ ID NO: 1479436 - DNA, 15 bp, Homo sapiens
gatgtaggccagccc

SEQ ID NO: 1479437 - DNA, 15 bp, Homo sapiens
atgtaggccagccct

SEQ ID NO: 1479438 - DNA, 15 bp, Homo sapiens
tgtaggccagccctg

SEQ ID NO: 1479439 - DNA, 15 bp, Homo sapiens
gtaggccagccctgt

SEQ ID NO: 1479440 - DNA, 15 bp, Homo sapiens
taggccagccctgtc

SEQ ID NO: 1479441 - DNA, 15 bp, Homo sapiens
aggccagccctgtca

SEQ ID NO: 1479442 - DNA, 15 bp, Homo sapiens
ggccagccctgtcag

SEQ ID NO: 1479443 - DNA, 15 bp, Homo sapiens
gccagccctgtcagt

SEQ ID NO: 1479444 - DNA, 15 bp, Homo sapiens
ccagccctgtcagtg

SEQ ID NO: 1479445 - DNA, 15 bp, Homo sapiens
cagccctgtcagtga

SEQ ID NO: 1479446 - DNA, 15 bp, Homo sapiens
agccctgtcagtgac

SEQ ID NO: 1479447 - DNA, 15 bp, Homo sapiens
gccctgtcagtgact

SEQ ID NO: 1479448 - DNA, 15 bp, Homo sapiens
ccctgtcagtgactg

SEQ ID NO: 1479449 - DNA, 15 bp, Homo sapiens
cctgtcagtgactgt

SEQ ID NO: 1479450 - DNA, 15 bp, Homo sapiens
ctgtcagtgactgtc

SEQ ID NO: 1479451 - DNA, 15 bp, Homo sapiens
tgtcagtgactgtct

SEQ ID NO: 1479452 - DNA, 15 bp, Homo sapiens
gtcagtgactgtctc

SEQ ID NO: 1479453 - DNA, 15 bp, Homo sapiens
tcagtgactgtctcc

SEQ ID NO: 1479454 - DNA, 15 bp, Homo sapiens
cagtgactgtctcca

SEQ ID NO: 1479455 - DNA, 15 bp, Homo sapiens
agtgactgtctccag

SEQ ID NO: 1479456 - DNA, 15 bp, Homo sapiens
gtgactgtctccagg

SEQ ID NO: 1479457 - DNA, 15 bp, Homo sapiens
tgactgtctccaggg

SEQ ID NO: 1479458 - DNA, 15 bp, Homo sapiens
gactgtctccagggt

SEQ ID NO: 1479459 - DNA, 15 bp, Homo sapiens
actgtctccagggta

SEQ ID NO: 1479460 - DNA, 15 bp, Homo sapiens
ctgtctccagggtag

SEQ ID NO: 1479461 - DNA, 15 bp, Homo sapiens
tgtctccagggtagc

SEQ ID NO: 1479462 - DNA, 15 bp, Homo sapiens
gtctccagggtagct

SEQ ID NO: 1479463 - DNA, 15 bp, Homo sapiens
tctccagggtagctg

SEQ ID NO: 1479464 - DNA, 15 bp, Homo sapiens
ctccagggtagctgc

SEQ ID NO: 1479465 - DNA, 15 bp, Homo sapiens
tccagggtagctgcc

SEQ ID NO: 1479466 - DNA, 15 bp, Homo sapiens
ccagggtagctgcca

SEQ ID NO: 1479467 - DNA, 15 bp, Homo sapiens
cagggtagctgccaa

SEQ ID NO: 1479468 - DNA, 15 bp, Homo sapiens
agggtagctgccaat

SEQ ID NO: 1479469 - DNA, 15 bp, Homo sapiens
gggtagctgccaatg

SEQ ID NO: 1479470 - DNA, 15 bp, Homo sapiens
ggtagctgccaatgg

SEQ ID NO: 1479471 - DNA, 15 bp, Homo sapiens
gtagctgccaatgga

SEQ ID NO: 1479472 - DNA, 15 bp, Homo sapiens
tagctgccaatggag

SEQ ID NO: 1479473 - DNA, 15 bp, Homo sapiens
agctgccaatggagg

SEQ ID NO: 1479474 - DNA, 15 bp, Homo sapiens
gctgccaatggaggg

SEQ ID NO: 1479475 - DNA, 15 bp, Homo sapiens
ctgccaatggaggga

SEQ ID NO: 1479476 - DNA, 15 bp, Homo sapiens
tgccaatggagggac

SEQ ID NO: 1479477 - DNA, 15 bp, Homo sapiens
gccaatggagggacc

SEQ ID NO: 1479478 - DNA, 15 bp, Homo sapiens
ccaatggagggacca

SEQ ID NO: 1479479 - DNA, 15 bp, Homo sapiens
caatggagggaccag

SEQ ID NO: 1479480 - DNA, 15 bp, Homo sapiens
aatggagggaccagc

SEQ ID NO: 1479481 - DNA, 15 bp, Homo sapiens
atggagggaccagct

SEQ ID NO: 1479482 - DNA, 15 bp, Homo sapiens
tggagggaccagctg

SEQ ID NO: 1479483 - DNA, 15 bp, Homo sapiens
ggagggaccagctgt

SEQ ID NO: 1479484 - DNA, 15 bp, Homo sapiens
gagggaccagctgtg

SEQ ID NO: 1479485 - DNA, 15 bp, Homo sapiens
agggaccagctgtgc

SEQ ID NO: 1479486 - DNA, 15 bp, Homo sapiens
gggaccagctgtgca

SEQ ID NO: 1479487 - DNA, 15 bp, Homo sapiens
ggaccagctgtgcac

SEQ ID NO: 1479488 - DNA, 15 bp, Homo sapiens
gaccagctgtgcacc

SEQ ID NO: 1479489 - DNA, 15 bp, Homo sapiens
accagctgtgcacca

SEQ ID NO: 1479490 - DNA, 15 bp, Homo sapiens
ccagctgtgcaccag

SEQ ID NO: 1479491 - DNA, 15 bp, Homo sapiens
cagctgtgcaccaga

SEQ ID NO: 1479492 - DNA, 15 bp, Homo sapiens
agctgtgcaccagag

SEQ ID NO: 1479493 - DNA, 15 bp, Homo sapiens
gctgtgcaccagaga

SEQ ID NO: 1479494 - DNA, 15 bp, Homo sapiens
ctgtgcaccagagag

SEQ ID NO: 1479495 - DNA, 15 bp, Homo sapiens
tgtgcaccagagagg

SEQ ID NO: 1479496 - DNA, 15 bp, Homo sapiens
gtgcaccagagaggg

SEQ ID NO: 1479497 - DNA, 15 bp, Homo sapiens
tgcaccagagaggga

SEQ ID NO: 1479498 - DNA, 15 bp, Homo sapiens
gcaccagagagggag

SEQ ID NO: 1479499 - DNA, 15 bp, Homo sapiens
caccagagagggagt

SEQ ID NO: 1479500 - DNA, 15 bp, Homo sapiens
accagagagggagtc

SEQ ID NO: 1479501 - DNA, 15 bp, Homo sapiens
ccagagagggagtct

SEQ ID NO: 1479502 - DNA, 15 bp, Homo sapiens
cagagagggagtctg

SEQ ID NO: 1479503 - DNA, 15 bp, Homo sapiens
agagagggagtctga

SEQ ID NO: 1479504 - DNA, 15 bp, Homo sapiens
gagagggagtctgag

SEQ ID NO: 1479505 - DNA, 15 bp, Homo sapiens
agagggagtctgagc

SEQ ID NO: 1479506 - DNA, 15 bp, Homo sapiens
gagggagtctgagct

SEQ ID NO: 1479507 - DNA, 15 bp, Homo sapiens
agggagtctgagctc

SEQ ID NO: 1479508 - DNA, 15 bp, Homo sapiens
gggagtctgagctct

SEQ ID NO: 1479509 - DNA, 15 bp, Homo sapiens
ggagtctgagctctg

SEQ ID NO: 1479510 - DNA, 15 bp, Homo sapiens
gagtctgagctctgt

SEQ ID NO: 1479511 - DNA, 15 bp, Homo sapiens
agtctgagctctgtg

SEQ ID NO: 1479512 - DNA, 15 bp, Homo sapiens
gtctgagctctgtga

SEQ ID NO: 1479513 - DNA, 15 bp, Homo sapiens
tctgagctctgtgat

SEQ ID NO: 1479514 - DNA, 15 bp, Homo sapiens
ctgagctctgtgatg

SEQ ID NO: 1479515 - DNA, 15 bp, Homo sapiens
tgagctctgtgatga

SEQ ID NO: 1479516 - DNA, 15 bp, Homo sapiens
gagctctgtgatgag

SEQ ID NO: 1479517 - DNA, 15 bp, Homo sapiens
agctctgtgatgaga

SEQ ID NO: 1479518 - DNA, 15 bp, Homo sapiens
gctctgtgatgagag

SEQ ID NO: 1479519 - DNA, 15 bp, Homo sapiens
ctctgtgatgagagg

SEQ ID NO: 1479520 - DNA, 15 bp, Homo sapiens
tctgtgatgagagga

SEQ ID NO: 1479521 - DNA, 15 bp, Homo sapiens
ctgtgatgagaggat

SEQ ID NO: 1479522 - DNA, 15 bp, Homo sapiens
tgtgatgagaggatg

SEQ ID NO: 1479523 - DNA, 15 bp, Homo sapiens
gtgatgagaggatgc

SEQ ID NO: 1479524 - DNA, 15 bp, Homo sapiens
tgatgagaggatgct

SEQ ID NO: 1479525 - DNA, 15 bp, Homo sapiens
gatgagaggatgctt

SEQ ID NO: 1479526 - DNA, 15 bp, Homo sapiens
atgagaggatgcttg

SEQ ID NO: 1479527 - DNA, 15 bp, Homo sapiens
tgagaggatgcttgg

SEQ ID NO: 1479528 - DNA, 15 bp, Homo sapiens
gagaggatgcttggc

SEQ ID NO: 1479529 - DNA, 15 bp, Homo sapiens
agaggatgcttggct

SEQ ID NO: 1479530 - DNA, 15 bp, Homo sapiens
gaggatgcttggctc

SEQ ID NO: 1479531 - DNA, 15 bp, Homo sapiens
aggatgcttggctcc

SEQ ID NO: 1479532 - DNA, 15 bp, Homo sapiens
ggatgcttggctcct

SEQ ID NO: 1479533 - DNA, 15 bp, Homo sapiens
gatgcttggctcctc

SEQ ID NO: 1479534 - DNA, 15 bp, Homo sapiens
atgcttggctcctcg

SEQ ID NO: 1479535 - DNA, 15 bp, Homo sapiens
tgcttggctcctcgt

SEQ ID NO: 1479536 - DNA, 15 bp, Homo sapiens
gcttggctcctcgtg

SEQ ID NO: 1479537 - DNA, 15 bp, Homo sapiens
cttggctcctcgtgt

SEQ ID NO: 1479538 - DNA, 15 bp, Homo sapiens
ttggctcctcgtgta

SEQ ID NO: 1479539 - DNA, 15 bp, Homo sapiens
tggctcctcgtgtag

SEQ ID NO: 1479540 - DNA, 15 bp, Homo sapiens
ggctcctcgtgtaga

SEQ ID NO: 1479541 - DNA, 15 bp, Homo sapiens
gctcctcgtgtagag

SEQ ID NO: 1479542 - DNA, 15 bp, Homo sapiens
ctcctcgtgtagaga

SEQ ID NO: 1479543 - DNA, 15 bp, Homo sapiens
tcctcgtgtagagac

SEQ ID NO: 1479544 - DNA, 15 bp, Homo sapiens
cctcgtgtagagacc

SEQ ID NO: 1479545 - DNA, 15 bp, Homo sapiens
ctcgtgtagagacca

SEQ ID NO: 1479546 - DNA, 15 bp, Homo sapiens
tcgtgtagagaccag

SEQ ID NO: 1479547 - DNA, 15 bp, Homo sapiens
cgtgtagagaccagg

SEQ ID NO: 1479548 - DNA, 15 bp, Homo sapiens
gtgtagagaccaggc

SEQ ID NO: 1479549 - DNA, 15 bp, Homo sapiens
tgtagagaccaggct

SEQ ID NO: 1479550 - DNA, 15 bp, Homo sapiens
gtagagaccaggctg

SEQ ID NO: 1479551 - DNA, 15 bp, Homo sapiens
tagagaccaggctgt

SEQ ID NO: 1479552 - DNA, 15 bp, Homo sapiens
agagaccaggctgtc

SEQ ID NO: 1479553 - DNA, 15 bp, Homo sapiens
gagaccaggctgtcc

SEQ ID NO: 1479554 - DNA, 15 bp, Homo sapiens
agaccaggctgtcct

SEQ ID NO: 1479555 - DNA, 15 bp, Homo sapiens
gaccaggctgtcctc

SEQ ID NO: 1479556 - DNA, 15 bp, Homo sapiens
accaggctgtcctca

SEQ ID NO: 1479557 - DNA, 15 bp, Homo sapiens
ccaggctgtcctcag

SEQ ID NO: 1479558 - DNA, 15 bp, Homo sapiens
caggctgtcctcagt

SEQ ID NO: 1479559 - DNA, 15 bp, Homo sapiens
aggctgtcctcagtt

SEQ ID NO: 1479560 - DNA, 15 bp, Homo sapiens
ggctgtcctcagttc

SEQ ID NO: 1479561 - DNA, 15 bp, Homo sapiens
gctgtcctcagttcc

SEQ ID NO: 1479562 - DNA, 15 bp, Homo sapiens
ctgtcctcagttccc

SEQ ID NO: 1479563 - DNA, 15 bp, Homo sapiens
tgtcctcagttcccc

SEQ ID NO: 1479564 - DNA, 15 bp, Homo sapiens
gtcctcagttcccct

SEQ ID NO: 1479565 - DNA, 15 bp, Homo sapiens
tcctcagttcccctg

SEQ ID NO: 1479566 - DNA, 15 bp, Homo sapiens
cctcagttcccctga

SEQ ID NO: 1479567 - DNA, 15 bp, Homo sapiens
ctcagttcccctgat

SEQ ID NO: 1479568 - DNA, 15 bp, Homo sapiens
tcagttcccctgatt

SEQ ID NO: 1479569 - DNA, 15 bp, Homo sapiens
cagttcccctgattc

SEQ ID NO: 1479570 - DNA, 15 bp, Homo sapiens
agttcccctgattcc

SEQ ID NO: 1479571 - DNA, 15 bp, Homo sapiens
gttcccctgattccc

SEQ ID NO: 1479572 - DNA, 15 bp, Homo sapiens
ttcccctgattccct

SEQ ID NO: 1479573 - DNA, 15 bp, Homo sapiens
tcccctgattccctt

SEQ ID NO: 1479574 - DNA, 15 bp, Homo sapiens
cccctgattcccttt

SEQ ID NO: 1479575 - DNA, 15 bp, Homo sapiens
ccctgattcccttta

SEQ ID NO: 1479576 - DNA, 15 bp, Homo sapiens
cctgattccctttag

SEQ ID NO: 1479577 - DNA, 15 bp, Homo sapiens
ctgattccctttaga

SEQ ID NO: 1479578 - DNA, 15 bp, Homo sapiens
tgattccctttagaa

SEQ ID NO: 1479579 - DNA, 15 bp, Homo sapiens
gattccctttagaag

SEQ ID NO: 1479580 - DNA, 15 bp, Homo sapiens
attccctttagaagg

SEQ ID NO: 1479581 - DNA, 15 bp, Homo sapiens
ttccctttagaaggg

SEQ ID NO: 1479582 - DNA, 15 bp, Homo sapiens
tccctttagaaggga

SEQ ID NO: 1479583 - DNA, 15 bp, Homo sapiens
ccctttagaagggag

SEQ ID NO: 1479584 - DNA, 15 bp, Homo sapiens
cctttagaagggaga

SEQ ID NO: 1479585 - DNA, 15 bp, Homo sapiens
ctttagaagggagag

SEQ ID NO: 1479586 - DNA, 15 bp, Homo sapiens
tttagaagggagagc

SEQ ID NO: 1479587 - DNA, 15 bp, Homo sapiens
ttagaagggagagca

SEQ ID NO: 1479588 - DNA, 15 bp, Homo sapiens
tagaagggagagcaa

SEQ ID NO: 1479589 - DNA, 15 bp, Homo sapiens
agaagggagagcaaa

SEQ ID NO: 1479590 - DNA, 15 bp, Homo sapiens
gaagggagagcaaag

SEQ ID NO: 1479591 - DNA, 15 bp, Homo sapiens
aagggagagcaaaga

SEQ ID NO: 1479592 - DNA, 15 bp, Homo sapiens
agggagagcaaagat

SEQ ID NO: 1479593 - DNA, 15 bp, Homo sapiens
gggagagcaaagatg

SEQ ID NO: 1479594 - DNA, 15 bp, Homo sapiens
ggagagcaaagatga

SEQ ID NO: 1479595 - DNA, 15 bp, Homo sapiens
gagagcaaagatgac

SEQ ID NO: 1479596 - DNA, 15 bp, Homo sapiens
agagcaaagatgaca

SEQ ID NO: 1479597 - DNA, 15 bp, Homo sapiens
gagcaaagatgacaa

SEQ ID NO: 1479598 - DNA, 15 bp, Homo sapiens
agcaaagatgacaat

SEQ ID NO: 1479599 - DNA, 15 bp, Homo sapiens
gcaaagatgacaatc

SEQ ID NO: 1479600 - DNA, 15 bp, Homo sapiens
caaagatgacaatca

SEQ ID NO: 1479601 - DNA, 15 bp, Homo sapiens
aaagatgacaatcaa

SEQ ID NO: 1479602 - DNA, 15 bp, Homo sapiens
aagatgacaatcaat

SEQ ID NO: 1479603 - DNA, 15 bp, Homo sapiens
agatgacaatcaatg

SEQ ID NO: 1479604 - DNA, 15 bp, Homo sapiens
gatgacaatcaatgg

SEQ ID NO: 1479605 - DNA, 15 bp, Homo sapiens
atgacaatcaatggg

SEQ ID NO: 1479606 - DNA, 15 bp, Homo sapiens
tgacaatcaatgggg

SEQ ID NO: 1479607 - DNA, 15 bp, Homo sapiens
gacaatcaatggggc

SEQ ID NO: 1479608 - DNA, 15 bp, Homo sapiens
acaatcaatggggcc

SEQ ID NO: 1479609 - DNA, 15 bp, Homo sapiens
caatcaatggggcca

SEQ ID NO: 1479610 - DNA, 15 bp, Homo sapiens
aatcaatggggccat

SEQ ID NO: 1479611 - DNA, 15 bp, Homo sapiens
atcaatggggccatg

SEQ ID NO: 1479612 - DNA, 15 bp, Homo sapiens
tcaatggggccatga

SEQ ID NO: 1479613 - DNA, 15 bp, Homo sapiens
caatggggccatgaa

SEQ ID NO: 1479614 - DNA, 15 bp, Homo sapiens
aatggggccatgaag

SEQ ID NO: 1479615 - DNA, 15 bp, Homo sapiens
atggggccatgaagc

SEQ ID NO: 1479616 - DNA, 15 bp, Homo sapiens
tggggccatgaagct

SEQ ID NO: 1479617 - DNA, 15 bp, Homo sapiens
ggggccatgaagctc

SEQ ID NO: 1479618 - DNA, 15 bp, Homo sapiens
gggccatgaagctca

SEQ ID NO: 1479619 - DNA, 15 bp, Homo sapiens
ggccatgaagctcat

SEQ ID NO: 1479620 - DNA, 15 bp, Homo sapiens
gccatgaagctcatg

SEQ ID NO: 1479621 - DNA, 15 bp, Homo sapiens
ccatgaagctcatga

SEQ ID NO: 1479622 - DNA, 15 bp, Homo sapiens
catgaagctcatgaa

SEQ ID NO: 1479623 - DNA, 15 bp, Homo sapiens
atgaagctcatgaac

SEQ ID NO: 1479624 - DNA, 15 bp, Homo sapiens
tgaagctcatgaaca

SEQ ID NO: 1479625 - DNA, 15 bp, Homo sapiens
gaagctcatgaacac

SEQ ID NO: 1479626 - DNA, 15 bp, Homo sapiens
aagctcatgaacact

SEQ ID NO: 1479627 - DNA, 15 bp, Homo sapiens
agctcatgaacactg

SEQ ID NO: 1479628 - DNA, 15 bp, Homo sapiens
gctcatgaacactga

SEQ ID NO: 1479629 - DNA, 15 bp, Homo sapiens
ctcatgaacactgag

SEQ ID NO: 1479630 - DNA, 15 bp, Homo sapiens
tcatgaacactgagt

SEQ ID NO: 1479631 - DNA, 15 bp, Homo sapiens
catgaacactgagtt

SEQ ID NO: 1479632 - DNA, 15 bp, Homo sapiens
atgaacactgagtta

SEQ ID NO: 1479633 - DNA, 15 bp, Homo sapiens
tgaacactgagttat

SEQ ID NO: 1479634 - DNA, 15 bp, Homo sapiens
gaacactgagttatc

SEQ ID NO: 1479635 - DNA, 15 bp, Homo sapiens
aacactgagttatct

SEQ ID NO: 1479636 - DNA, 15 bp, Homo sapiens
acactgagttatctg

SEQ ID NO: 1479637 - DNA, 15 bp, Homo sapiens
cactgagttatctga

SEQ ID NO: 1479638 - DNA, 15 bp, Homo sapiens
actgagttatctgag

SEQ ID NO: 1479639 - DNA, 15 bp, Homo sapiens
ctgagttatctgagc

SEQ ID NO: 1479640 - DNA, 15 bp, Homo sapiens
tgagttatctgagct

SEQ ID NO: 1479641 - DNA, 15 bp, Homo sapiens
gagttatctgagctt

SEQ ID NO: 1479642 - DNA, 15 bp, Homo sapiens
agttatctgagctta

SEQ ID NO: 1479643 - DNA, 15 bp, Homo sapiens
gttatctgagcttac

SEQ ID NO: 1479644 - DNA, 15 bp, Homo sapiens
ttatctgagcttact

SEQ ID NO: 1479645 - DNA, 15 bp, Homo sapiens
tatctgagcttactc

SEQ ID NO: 1479646 - DNA, 15 bp, Homo sapiens
atctgagcttactcg

SEQ ID NO: 1479647 - DNA, 15 bp, Homo sapiens
tctgagcttactcgt

SEQ ID NO: 1479648 - DNA, 15 bp, Homo sapiens
ctgagcttactcgta

SEQ ID NO: 1479649 - DNA, 15 bp, Homo sapiens
tgagcttactcgtag

SEQ ID NO: 1479650 - DNA, 15 bp, Homo sapiens
gagcttactcgtaga

SEQ ID NO: 1479651 - DNA, 15 bp, Homo sapiens
agcttactcgtagac

SEQ ID NO: 1479652 - DNA, 15 bp, Homo sapiens
gcttactcgtagaca

SEQ ID NO: 1479653 - DNA, 15 bp, Homo sapiens
cttactcgtagacag

SEQ ID NO: 1479654 - DNA, 15 bp, Homo sapiens
ttactcgtagacaga

SEQ ID NO: 1479655 - DNA, 15 bp, Homo sapiens
tactcgtagacagag

SEQ ID NO: 1479656 - DNA, 15 bp, Homo sapiens
actcgtagacagagt

SEQ ID NO: 1479657 - DNA, 15 bp, Homo sapiens
ctcgtagacagagtg

SEQ ID NO: 1479658 - DNA, 15 bp, Homo sapiens
tcgtagacagagtgg

SEQ ID NO: 1479659 - DNA, 15 bp, Homo sapiens
cgtagacagagtggc

SEQ ID NO: 1479660 - DNA, 15 bp, Homo sapiens
gtagacagagtggcc

SEQ ID NO: 1479661 - DNA, 15 bp, Homo sapiens
tagacagagtggcca

SEQ ID NO: 1479662 - DNA, 15 bp, Homo sapiens
agacagagtggccat

SEQ ID NO: 1479663 - DNA, 15 bp, Homo sapiens
gacagagtggccata

SEQ ID NO: 1479664 - DNA, 15 bp, Homo sapiens
acagagtggccatat

SEQ ID NO: 1479665 - DNA, 15 bp, Homo sapiens
cagagtggccatata

SEQ ID NO: 1479666 - DNA, 15 bp, Homo sapiens
agagtggccatataa

SEQ ID NO: 1479667 - DNA, 15 bp, Homo sapiens
gagtggccatataat

SEQ ID NO: 1479668 - DNA, 15 bp, Homo sapiens
agtggccatataatg

SEQ ID NO: 1479669 - DNA, 15 bp, Homo sapiens
gtggccatataatgc

SEQ ID NO: 1479670 - DNA, 15 bp, Homo sapiens
tggccatataatgca

SEQ ID NO: 1479671 - DNA, 15 bp, Homo sapiens
ggccatataatgcat

SEQ ID NO: 1479672 - DNA, 15 bp, Homo sapiens
gccatataatgcatc

SEQ ID NO: 1479673 - DNA, 15 bp, Homo sapiens
ccatataatgcatca

SEQ ID NO: 1479674 - DNA, 15 bp, Homo sapiens
catataatgcatcaa

SEQ ID NO: 1479675 - DNA, 15 bp, Homo sapiens
atataatgcatcaac

SEQ ID NO: 1479676 - DNA, 15 bp, Homo sapiens
tataatgcatcaaca

SEQ ID NO: 1479677 - DNA, 15 bp, Homo sapiens
ataatgcatcaacaa

SEQ ID NO: 1479678 - DNA, 15 bp, Homo sapiens
taatgcatcaacaaa

SEQ ID NO: 1479679 - DNA, 15 bp, Homo sapiens
aatgcatcaacaaaa

SEQ ID NO: 1479680 - DNA, 15 bp, Homo sapiens
atgcatcaacaaaag

SEQ ID NO: 1479681 - DNA, 15 bp, Homo sapiens
tgcatcaacaaaagt

SEQ ID NO: 1479682 - DNA, 15 bp, Homo sapiens
gcatcaacaaaagtg

SEQ ID NO: 1479683 - DNA, 15 bp, Homo sapiens
catcaacaaaagtgg

SEQ ID NO: 1479684 - DNA, 15 bp, Homo sapiens
atcaacaaaagtggg

SEQ ID NO: 1479685 - DNA, 15 bp, Homo sapiens
tcaacaaaagtggga

SEQ ID NO: 1479686 - DNA, 15 bp, Homo sapiens
caacaaaagtgggat

SEQ ID NO: 1479687 - DNA, 15 bp, Homo sapiens
aacaaaagtgggata

SEQ ID NO: 1479688 - DNA, 15 bp, Homo sapiens
acaaaagtgggataa

SEQ ID NO: 1479689 - DNA, 15 bp, Homo sapiens
caaaagtgggataat

SEQ ID NO: 1479690 - DNA, 15 bp, Homo sapiens
aaaagtgggataatt

SEQ ID NO: 1479691 - DNA, 15 bp, Homo sapiens
aaagtgggataattt

SEQ ID NO: 1479692 - DNA, 15 bp, Homo sapiens
aagtgggataatttt

SEQ ID NO: 1479693 - DNA, 15 bp, Homo sapiens
agtgggataattttg

SEQ ID NO: 1479694 - DNA, 15 bp, Homo sapiens
gtgggataattttga

SEQ ID NO: 1479695 - DNA, 15 bp, Homo sapiens
tgggataattttgag

SEQ ID NO: 1479696 - DNA, 15 bp, Homo sapiens
gggataattttgagc

SEQ ID NO: 1479697 - DNA, 15 bp, Homo sapiens
ggataattttgagcg

SEQ ID NO: 1479698 - DNA, 15 bp, Homo sapiens
gataattttgagcgg

SEQ ID NO: 1479699 - DNA, 15 bp, Homo sapiens
ataattttgagcggg

SEQ ID NO: 1479700 - DNA, 15 bp, Homo sapiens
taattttgagcggga

SEQ ID NO: 1479701 - DNA, 15 bp, Homo sapiens
aattttgagcgggat

SEQ ID NO: 1479702 - DNA, 15 bp, Homo sapiens
attttgagcgggata

SEQ ID NO: 1479703 - DNA, 15 bp, Homo sapiens
ttttgagcgggataa

SEQ ID NO: 1479704 - DNA, 15 bp, Homo sapiens
tttgagcgggataag

SEQ ID NO: 1479705 - DNA, 15 bp, Homo sapiens
ttgagcgggataagc

SEQ ID NO: 1479706 - DNA, 15 bp, Homo sapiens
tgagcgggataagca

SEQ ID NO: 1479707 - DNA, 15 bp, Homo sapiens
gagcgggataagcat

SEQ ID NO: 1479708 - DNA, 15 bp, Homo sapiens
agcgggataagcatt

SEQ ID NO: 1479709 - DNA, 15 bp, Homo sapiens
gcgggataagcattt

SEQ ID NO: 1479710 - DNA, 15 bp, Homo sapiens
cgggataagcatttc

SEQ ID NO: 1479711 - DNA, 15 bp, Homo sapiens
gggataagcatttcc

SEQ ID NO: 1479712 - DNA, 15 bp, Homo sapiens
ggataagcatttcct

SEQ ID NO: 1479713 - DNA, 15 bp, Homo sapiens
gataagcatttcctg

SEQ ID NO: 1479714 - DNA, 15 bp, Homo sapiens
ataagcatttcctgg

SEQ ID NO: 1479715 - DNA, 15 bp, Homo sapiens
taagcatttcctgga

SEQ ID NO: 1479716 - DNA, 15 bp, Homo sapiens
aagcatttcctggaa

SEQ ID NO: 1479717 - DNA, 15 bp, Homo sapiens
agcatttcctggaac

SEQ ID NO: 1479718 - DNA, 15 bp, Homo sapiens
gcatttcctggaaca

SEQ ID NO: 1479719 - DNA, 15 bp, Homo sapiens
catttcctggaacaa

SEQ ID NO: 1479720 - DNA, 15 bp, Homo sapiens
atttcctggaacaac

SEQ ID NO: 1479721 - DNA, 15 bp, Homo sapiens
tttcctggaacaaca

SEQ ID NO: 1479722 - DNA, 15 bp, Homo sapiens
ttcctggaacaacag

SEQ ID NO: 1479723 - DNA, 15 bp, Homo sapiens
tcctggaacaacagc

SEQ ID NO: 1479724 - DNA, 15 bp, Homo sapiens
cctggaacaacagca

SEQ ID NO: 1479725 - DNA, 15 bp, Homo sapiens
ctggaacaacagcat

SEQ ID NO: 1479726 - DNA, 15 bp, Homo sapiens
tggaacaacagcata

SEQ ID NO: 1479727 - DNA, 15 bp, Homo sapiens
ggaacaacagcataa

SEQ ID NO: 1479728 - DNA, 15 bp, Homo sapiens
gaacaacagcataaa

SEQ ID NO: 1479729 - DNA, 15 bp, Homo sapiens
aacaacagcataaag

SEQ ID NO: 1479730 - DNA, 15 bp, Homo sapiens
acaacagcataaagc

SEQ ID NO: 1479731 - DNA, 15 bp, Homo sapiens
caacagcataaagcg

SEQ ID NO: 1479732 - DNA, 15 bp, Homo sapiens
aacagcataaagcgg

SEQ ID NO: 1479733 - DNA, 15 bp, Homo sapiens
acagcataaagcgga

SEQ ID NO: 1479734 - DNA, 15 bp, Homo sapiens
cagcataaagcggaa

SEQ ID NO: 1479735 - DNA, 15 bp, Homo sapiens
agcataaagcggaac

SEQ ID NO: 1479736 - DNA, 15 bp, Homo sapiens
gcataaagcggaact

SEQ ID NO: 1479737 - DNA, 15 bp, Homo sapiens
cataaagcggaactg

SEQ ID NO: 1479738 - DNA, 15 bp, Homo sapiens
ataaagcggaactgt

SEQ ID NO: 1479739 - DNA, 15 bp, Homo sapiens
taaagcggaactgtt

SEQ ID NO: 1479740 - DNA, 15 bp, Homo sapiens
aaagcggaactgttc

SEQ ID NO: 1479741 - DNA, 15 bp, Homo sapiens
aagcggaactgttcc

SEQ ID NO: 1479742 - DNA, 15 bp, Homo sapiens
agcggaactgttcca

SEQ ID NO: 1479743 - DNA, 15 bp, Homo sapiens
gcggaactgttccag

SEQ ID NO: 1479744 - DNA, 15 bp, Homo sapiens
cggaactgttccagg

SEQ ID NO: 1479745 - DNA, 15 bp, Homo sapiens
ggaactgttccaggt

SEQ ID NO: 1479746 - DNA, 15 bp, Homo sapiens
gaactgttccaggta

SEQ ID NO: 1479747 - DNA, 15 bp, Homo sapiens
aactgttccaggtaa

SEQ ID NO: 1479748 - DNA, 15 bp, Homo sapiens
actgttccaggtaaa

SEQ ID NO: 1479749 - DNA, 15 bp, Homo sapiens
ctgttccaggtaaag

SEQ ID NO: 1479750 - DNA, 15 bp, Homo sapiens
tgttccaggtaaagg

SEQ ID NO: 1479751 - DNA, 15 bp, Homo sapiens
gttccaggtaaaggg

SEQ ID NO: 1479752 - DNA, 15 bp, Homo sapiens
ttccaggtaaagggg

SEQ ID NO: 1479753 - DNA, 15 bp, Homo sapiens
tccaggtaaaggggc

SEQ ID NO: 1479754 - DNA, 15 bp, Homo sapiens
ccaggtaaaggggct

SEQ ID NO: 1479755 - DNA, 15 bp, Homo sapiens
caggtaaaggggctg

SEQ ID NO: 1479756 - DNA, 15 bp, Homo sapiens
aggtaaaggggctgt

SEQ ID NO: 1479757 - DNA, 15 bp, Homo sapiens
ggtaaaggggctgta

SEQ ID NO: 1479758 - DNA, 15 bp, Homo sapiens
gtaaaggggctgtag

SEQ ID NO: 1479759 - DNA, 15 bp, Homo sapiens
taaaggggctgtaga

SEQ ID NO: 1479760 - DNA, 15 bp, Homo sapiens
aaaggggctgtagaa

SEQ ID NO: 1479761 - DNA, 15 bp, Homo sapiens
aaggggctgtagaat

SEQ ID NO: 1479762 - DNA, 15 bp, Homo sapiens
aggggctgtagaatc

SEQ ID NO: 1479763 - DNA, 15 bp, Homo sapiens
ggggctgtagaatca

SEQ ID NO: 1479764 - DNA, 15 bp, Homo sapiens
gggctgtagaatcac

SEQ ID NO: 1479765 - DNA, 15 bp, Homo sapiens
ggctgtagaatcact

SEQ ID NO: 1479766 - DNA, 15 bp, Homo sapiens
gctgtagaatcactc

SEQ ID NO: 1479767 - DNA, 15 bp, Homo sapiens
ctgtagaatcactcc

SEQ ID NO: 1479768 - DNA, 15 bp, Homo sapiens
tgtagaatcactcca

SEQ ID NO: 1479769 - DNA, 15 bp, Homo sapiens
gtagaatcactccac

SEQ ID NO: 1479770 - DNA, 15 bp, Homo sapiens
tagaatcactccact

SEQ ID NO: 1479771 - DNA, 15 bp, Homo sapiens
agaatcactccacta

SEQ ID NO: 1479772 - DNA, 15 bp, Homo sapiens
gaatcactccactaa

SEQ ID NO: 1479773 - DNA, 15 bp, Homo sapiens
aatcactccactaat

SEQ ID NO: 1479774 - DNA, 15 bp, Homo sapiens
atcactccactaata

SEQ ID NO: 1479775 - DNA, 15 bp, Homo sapiens
tcactccactaatag

SEQ ID NO: 1479776 - DNA, 15 bp, Homo sapiens
cactccactaataga

SEQ ID NO: 1479777 - DNA, 15 bp, Homo sapiens
actccactaatagat

SEQ ID NO: 1479778 - DNA, 15 bp, Homo sapiens
ctccactaatagatt

SEQ ID NO: 1479779 - DNA, 15 bp, Homo sapiens
tccactaatagattt

SEQ ID NO: 1479780 - DNA, 15 bp, Homo sapiens
ccactaatagatttt

SEQ ID NO: 1479781 - DNA, 15 bp, Homo sapiens
cactaatagatttta

SEQ ID NO: 1479782 - DNA, 15 bp, Homo sapiens
actaatagattttag

SEQ ID NO: 1479783 - DNA, 15 bp, Homo sapiens
ctaatagattttagg

SEQ ID NO: 1479784 - DNA, 15 bp, Homo sapiens
taatagattttaggg

SEQ ID NO: 1479785 - DNA, 15 bp, Homo sapiens
aatagattttagggt

SEQ ID NO: 1479786 - DNA, 15 bp, Homo sapiens
atagattttagggtt

SEQ ID NO: 1479787 - DNA, 15 bp, Homo sapiens
tagattttagggttg

SEQ ID NO: 1479788 - DNA, 15 bp, Homo sapiens
agattttagggttga

SEQ ID NO: 1479789 - DNA, 15 bp, Homo sapiens
gattttagggttgaa

SEQ ID NO: 1479790 - DNA, 15 bp, Homo sapiens
attttagggttgaag

SEQ ID NO: 1479791 - DNA, 15 bp, Homo sapiens
ttttagggttgaaga

SEQ ID NO: 1479792 - DNA, 15 bp, Homo sapiens
tttagggttgaagac

SEQ ID NO: 1479793 - DNA, 15 bp, Homo sapiens
ttagggttgaagacc

SEQ ID NO: 1479794 - DNA, 15 bp, Homo sapiens
tagggttgaagacct

SEQ ID NO: 1479795 - DNA, 15 bp, Homo sapiens
agggttgaagacctg

SEQ ID NO: 1479796 - DNA, 15 bp, Homo sapiens
gggttgaagacctgg

SEQ ID NO: 1479797 - DNA, 15 bp, Homo sapiens
ggttgaagacctgga

SEQ ID NO: 1479798 - DNA, 15 bp, Homo sapiens
gttgaagacctggaa

SEQ ID NO: 1479799 - DNA, 15 bp, Homo sapiens
ttgaagacctggaag

SEQ ID NO: 1479800 - DNA, 15 bp, Homo sapiens
tgaagacctggaagg

SEQ ID NO: 1479801 - DNA, 15 bp, Homo sapiens
gaagacctggaaggg

SEQ ID NO: 1479802 - DNA, 15 bp, Homo sapiens
aagacctggaaggga

SEQ ID NO: 1479803 - DNA, 15 bp, Homo sapiens
agacctggaagggat

SEQ ID NO: 1479804 - DNA, 15 bp, Homo sapiens
gacctggaagggatc

SEQ ID NO: 1479805 - DNA, 15 bp, Homo sapiens
acctggaagggatct

SEQ ID NO: 1479806 - DNA, 15 bp, Homo sapiens
cctggaagggatctt

SEQ ID NO: 1479807 - DNA, 15 bp, Homo sapiens
ctggaagggatctta

SEQ ID NO: 1479808 - DNA, 15 bp, Homo sapiens
tggaagggatcttac

SEQ ID NO: 1479809 - DNA, 15 bp, Homo sapiens
ggaagggatcttacg

SEQ ID NO: 1479810 - DNA, 15 bp, Homo sapiens
gaagggatcttacgg

SEQ ID NO: 1479811 - DNA, 15 bp, Homo sapiens
aagggatcttacgga

SEQ ID NO: 1479812 - DNA, 15 bp, Homo sapiens
agggatcttacggat

SEQ ID NO: 1479813 - DNA, 15 bp, Homo sapiens
gggatcttacggatc

SEQ ID NO: 1479814 - DNA, 15 bp, Homo sapiens
ggatcttacggatca

SEQ ID NO: 1479815 - DNA, 15 bp, Homo sapiens
gatcttacggatcat

SEQ ID NO: 1479816 - DNA, 15 bp, Homo sapiens
atcttacggatcatg

SEQ ID NO: 1479817 - DNA, 15 bp, Homo sapiens
tcttacggatcatgt

SEQ ID NO: 1479818 - DNA, 15 bp, Homo sapiens
cttacggatcatgta

SEQ ID NO: 1479819 - DNA, 15 bp, Homo sapiens
ttacggatcatgtag

SEQ ID NO: 1479820 - DNA, 15 bp, Homo sapiens
tacggatcatgtagc

SEQ ID NO: 1479821 - DNA, 15 bp, Homo sapiens
acggatcatgtagct

SEQ ID NO: 1479822 - DNA, 15 bp, Homo sapiens
cggatcatgtagctc

SEQ ID NO: 1479823 - DNA, 15 bp, Homo sapiens
ggatcatgtagctca

SEQ ID NO: 1479824 - DNA, 15 bp, Homo sapiens
gatcatgtagctcag

SEQ ID NO: 1479825 - DNA, 15 bp, Homo sapiens
atcatgtagctcagt

SEQ ID NO: 1479826 - DNA, 15 bp, Homo sapiens
tcatgtagctcagtc

SEQ ID NO: 1479827 - DNA, 15 bp, Homo sapiens
catgtagctcagtcc

SEQ ID NO: 1479828 - DNA, 15 bp, Homo sapiens
atgtagctcagtcct

SEQ ID NO: 1479829 - DNA, 15 bp, Homo sapiens
tgtagctcagtcctt

SEQ ID NO: 1479830 - DNA, 15 bp, Homo sapiens
gtagctcagtccttt

SEQ ID NO: 1479831 - DNA, 15 bp, Homo sapiens
tagctcagtcctttt

SEQ ID NO: 1479832 - DNA, 15 bp, Homo sapiens
agctcagtcctttta

SEQ ID NO: 1479833 - DNA, 15 bp, Homo sapiens
gctcagtccttttat

SEQ ID NO: 1479834 - DNA, 15 bp, Homo sapiens
ctcagtccttttatg

SEQ ID NO: 1479835 - DNA, 15 bp, Homo sapiens
tcagtccttttatgt

SEQ ID NO: 1479836 - DNA, 15 bp, Homo sapiens
cagtccttttatgta

SEQ ID NO: 1479837 - DNA, 15 bp, Homo sapiens
agtccttttatgtag

SEQ ID NO: 1479838 - DNA, 15 bp, Homo sapiens
gtccttttatgtagt

SEQ ID NO: 1479839 - DNA, 15 bp, Homo sapiens
tccttttatgtagta

SEQ ID NO: 1479840 - DNA, 15 bp, Homo sapiens
ccttttatgtagtag

SEQ ID NO: 1479841 - DNA, 15 bp, Homo sapiens
cttttatgtagtagg

SEQ ID NO: 1479842 - DNA, 15 bp, Homo sapiens
ttttatgtagtaggt

SEQ ID NO: 1479843 - DNA, 15 bp, Homo sapiens
tttatgtagtaggta

SEQ ID NO: 1479844 - DNA, 15 bp, Homo sapiens
ttatgtagtaggtaa

SEQ ID NO: 1479845 - DNA, 15 bp, Homo sapiens
tatgtagtaggtaaa

SEQ ID NO: 1479846 - DNA, 15 bp, Homo sapiens
atgtagtaggtaaag

SEQ ID NO: 1479847 - DNA, 15 bp, Homo sapiens
tgtagtaggtaaaga

SEQ ID NO: 1479848 - DNA, 15 bp, Homo sapiens
gtagtaggtaaagaa

SEQ ID NO: 1479849 - DNA, 15 bp, Homo sapiens
tagtaggtaaagaaa

SEQ ID NO: 1479850 - DNA, 15 bp, Homo sapiens
agtaggtaaagaaat

SEQ ID NO: 1479851 - DNA, 15 bp, Homo sapiens
gtaggtaaagaaata

SEQ ID NO: 1479852 - DNA, 15 bp, Homo sapiens
taggtaaagaaataa

SEQ ID NO: 1479853 - DNA, 15 bp, Homo sapiens
aggtaaagaaataag

SEQ ID NO: 1479854 - DNA, 15 bp, Homo sapiens
ggtaaagaaataagc

SEQ ID NO: 1479855 - DNA, 15 bp, Homo sapiens
gtaaagaaataagcc

SEQ ID NO: 1479856 - DNA, 15 bp, Homo sapiens
taaagaaataagccc

SEQ ID NO: 1479857 - DNA, 15 bp, Homo sapiens
aaagaaataagccca

SEQ ID NO: 1479858 - DNA, 15 bp, Homo sapiens
aagaaataagcccag

SEQ ID NO: 1479859 - DNA, 15 bp, Homo sapiens
agaaataagcccaga

SEQ ID NO: 1479860 - DNA, 15 bp, Homo sapiens
gaaataagcccagag

SEQ ID NO: 1479861 - DNA, 15 bp, Homo sapiens
aaataagcccagaga

SEQ ID NO: 1479862 - DNA, 15 bp, Homo sapiens
aataagcccagagag

SEQ ID NO: 1479863 - DNA, 15 bp, Homo sapiens
ataagcccagagaga

SEQ ID NO: 1479864 - DNA, 15 bp, Homo sapiens
taagcccagagagat

SEQ ID NO: 1479865 - DNA, 15 bp, Homo sapiens
aagcccagagagata

SEQ ID NO: 1479866 - DNA, 15 bp, Homo sapiens
agcccagagagataa

SEQ ID NO: 1479867 - DNA, 15 bp, Homo sapiens
gcccagagagataaa

SEQ ID NO: 1479868 - DNA, 15 bp, Homo sapiens
cccagagagataaag

SEQ ID NO: 1479869 - DNA, 15 bp, Homo sapiens
ccagagagataaagt

SEQ ID NO: 1479870 - DNA, 15 bp, Homo sapiens
cagagagataaagtg

SEQ ID NO: 1479871 - DNA, 15 bp, Homo sapiens
agagagataaagtgc

SEQ ID NO: 1479872 - DNA, 15 bp, Homo sapiens
gagagataaagtgcc

SEQ ID NO: 1479873 - DNA, 15 bp, Homo sapiens
agagataaagtgcct

SEQ ID NO: 1479874 - DNA, 15 bp, Homo sapiens
gagataaagtgcctt

SEQ ID NO: 1479875 - DNA, 15 bp, Homo sapiens
agataaagtgccttt

SEQ ID NO: 1479876 - DNA, 15 bp, Homo sapiens
gataaagtgcctttt

SEQ ID NO: 1479877 - DNA, 15 bp, Homo sapiens
ataaagtgccttttc

SEQ ID NO: 1479878 - DNA, 15 bp, Homo sapiens
taaagtgccttttct

SEQ ID NO: 1479879 - DNA, 15 bp, Homo sapiens
aaagtgccttttctg

SEQ ID NO: 1479880 - DNA, 15 bp, Homo sapiens
aagtgccttttctgt

SEQ ID NO: 1479881 - DNA, 15 bp, Homo sapiens
gtgccttttctgtac

SEQ ID NO: 1479882 - DNA, 15 bp, Homo sapiens
tgccttttctgtact

SEQ ID NO: 1479883 - DNA, 15 bp, Homo sapiens
gccttttctgtacta

SEQ ID NO: 1479884 - DNA, 15 bp, Homo sapiens
ccttttctgtactat

SEQ ID NO: 1479885 - DNA, 15 bp, Homo sapiens
cttttctgtactata

SEQ ID NO: 1479886 - DNA, 15 bp, Homo sapiens
ttttctgtactataa

SEQ ID NO: 1479887 - DNA, 15 bp, Homo sapiens
tttctgtactataat

SEQ ID NO: 1479888 - DNA, 15 bp, Homo sapiens
ttctgtactataatt

SEQ ID NO: 1479889 - DNA, 15 bp, Homo sapiens
tctgtactataattt

SEQ ID NO: 1479890 - DNA, 15 bp, Homo sapiens
ctgtactataatttg

SEQ ID NO: 1479891 - DNA, 15 bp, Homo sapiens
tgtactataatttgt

SEQ ID NO: 1479892 - DNA, 15 bp, Homo sapiens
gtactataatttgtg

SEQ ID NO: 1479893 - DNA, 15 bp, Homo sapiens
tactataatttgtga

SEQ ID NO: 1479894 - DNA, 15 bp, Homo sapiens
actataatttgtgaa

SEQ ID NO: 1479895 - DNA, 15 bp, Homo sapiens
ctataatttgtgaat

SEQ ID NO: 1479896 - DNA, 15 bp, Homo sapiens
tataatttgtgaatt

SEQ ID NO: 1479897 - DNA, 15 bp, Homo sapiens
ataatttgtgaatta

SEQ ID NO: 1479898 - DNA, 15 bp, Homo sapiens
taatttgtgaattat

SEQ ID NO: 1479899 - DNA, 15 bp, Homo sapiens
aatttgtgaattata

SEQ ID NO: 1479900 - DNA, 15 bp, Homo sapiens
atttgtgaattataa

SEQ ID NO: 1479901 - DNA, 15 bp, Homo sapiens
tttgtgaattataat

SEQ ID NO: 1479902 - DNA, 15 bp, Homo sapiens
ttgtgaattataata

SEQ ID NO: 1479903 - DNA, 15 bp, Homo sapiens
tgtgaattataataa

SEQ ID NO: 1479904 - DNA, 15 bp, Homo sapiens
gtgaattataataag

SEQ ID NO: 1479905 - DNA, 15 bp, Homo sapiens
tgaattataataaga

SEQ ID NO: 1479906 - DNA, 15 bp, Homo sapiens
gaattataataagat

SEQ ID NO: 1479907 - DNA, 15 bp, Homo sapiens
aattataataagatg

SEQ ID NO: 1479908 - DNA, 15 bp, Homo sapiens
attataataagatga

SEQ ID NO: 1479909 - DNA, 15 bp, Homo sapiens
ttataataagatgat

SEQ ID NO: 1479910 - DNA, 15 bp, Homo sapiens
tataataagatgatt

SEQ ID NO: 1479911 - DNA, 15 bp, Homo sapiens
ataataagatgatta

SEQ ID NO: 1479912 - DNA, 15 bp, Homo sapiens
taataagatgattac

SEQ ID NO: 1479913 - DNA, 15 bp, Homo sapiens
aataagatgattaca

SEQ ID NO: 1479914 - DNA, 15 bp, Homo sapiens
ataagatgattacat

SEQ ID NO: 1479915 - DNA, 15 bp, Homo sapiens
taagatgattacatt

SEQ ID NO: 1479916 - DNA, 15 bp, Homo sapiens
aagatgattacattt

SEQ ID NO: 1479917 - DNA, 15 bp, Homo sapiens
agatgattacattta

SEQ ID NO: 1479918 - DNA, 15 bp, Homo sapiens
gatgattacatttag

SEQ ID NO: 1479919 - DNA, 15 bp, Homo sapiens
atgattacatttagg

SEQ ID NO: 1479920 - DNA, 15 bp, Homo sapiens
tgattacatttaggg

SEQ ID NO: 1479921 - DNA, 15 bp, Homo sapiens
gattacatttaggga

SEQ ID NO: 1479922 - DNA, 15 bp, Homo sapiens
attacatttagggag

SEQ ID NO: 1479923 - DNA, 15 bp, Homo sapiens
ttacatttagggagg

SEQ ID NO: 1479924 - DNA, 15 bp, Homo sapiens
tacatttagggaggg

SEQ ID NO: 1479925 - DNA, 15 bp, Homo sapiens
acatttagggagggc

SEQ ID NO: 1479926 - DNA, 15 bp, Homo sapiens
catttagggagggct

SEQ ID NO: 1479927 - DNA, 15 bp, Homo sapiens
atttagggagggctt

SEQ ID NO: 1479928 - DNA, 15 bp, Homo sapiens
tttagggagggctta

SEQ ID NO: 1479929 - DNA, 15 bp, Homo sapiens
ttagggagggcttac

SEQ ID NO: 1479930 - DNA, 15 bp, Homo sapiens
tagggagggcttact

SEQ ID NO: 1479931 - DNA, 15 bp, Homo sapiens
agggagggcttacta

SEQ ID NO: 1479932 - DNA, 15 bp, Homo sapiens
gggagggcttactat

SEQ ID NO: 1479933 - DNA, 15 bp, Homo sapiens
ggagggcttactatg

SEQ ID NO: 1479934 - DNA, 15 bp, Homo sapiens
gagggcttactatgt

SEQ ID NO: 1479935 - DNA, 15 bp, Homo sapiens
agggcttactatgtg

SEQ ID NO: 1479936 - DNA, 15 bp, Homo sapiens
gggcttactatgtga

SEQ ID NO: 1479937 - DNA, 15 bp, Homo sapiens
ggcttactatgtgat

SEQ ID NO: 1479938 - DNA, 15 bp, Homo sapiens
gcttactatgtgata

SEQ ID NO: 1479939 - DNA, 15 bp, Homo sapiens
cttactatgtgatag

SEQ ID NO: 1479940 - DNA, 15 bp, Homo sapiens
ttactatgtgatagg

SEQ ID NO: 1479941 - DNA, 15 bp, Homo sapiens
tactatgtgataggc

SEQ ID NO: 1479942 - DNA, 15 bp, Homo sapiens
actatgtgataggca

SEQ ID NO: 1479943 - DNA, 15 bp, Homo sapiens
ctatgtgataggcat

SEQ ID NO: 1479944 - DNA, 15 bp, Homo sapiens
tatgtgataggcatg

SEQ ID NO: 1479945 - DNA, 15 bp, Homo sapiens
atgtgataggcatga

SEQ ID NO: 1479946 - DNA, 15 bp, Homo sapiens
tgtgataggcatgag

SEQ ID NO: 1479947 - DNA, 15 bp, Homo sapiens
gtgataggcatgagt

SEQ ID NO: 1479948 - DNA, 15 bp, Homo sapiens
tgataggcatgagtt

SEQ ID NO: 1479949 - DNA, 15 bp, Homo sapiens
gataggcatgagtta

SEQ ID NO: 1479950 - DNA, 15 bp, Homo sapiens
ataggcatgagttag

SEQ ID NO: 1479951 - DNA, 15 bp, Homo sapiens
taggcatgagttaga

SEQ ID NO: 1479952 - DNA, 15 bp, Homo sapiens
aggcatgagttagaa

SEQ ID NO: 1479953 - DNA, 15 bp, Homo sapiens
ggcatgagttagaac

SEQ ID NO: 1479954 - DNA, 15 bp, Homo sapiens
gcatgagttagaaca

SEQ ID NO: 1479955 - DNA, 15 bp, Homo sapiens
catgagttagaacac

SEQ ID NO: 1479956 - DNA, 15 bp, Homo sapiens
atgagttagaacact

SEQ ID NO: 1479957 - DNA, 15 bp, Homo sapiens
tgagttagaacacta

SEQ ID NO: 1479958 - DNA, 15 bp, Homo sapiens
gagttagaacactat

SEQ ID NO: 1479959 - DNA, 15 bp, Homo sapiens
agttagaacactatt

SEQ ID NO: 1479960 - DNA, 15 bp, Homo sapiens
gttagaacactatta

SEQ ID NO: 1479961 - DNA, 15 bp, Homo sapiens
ttagaacactattat

SEQ ID NO: 1479962 - DNA, 15 bp, Homo sapiens
tagaacactattatt

SEQ ID NO: 1479963 - DNA, 15 bp, Homo sapiens
agaacactattatta

SEQ ID NO: 1479964 - DNA, 15 bp, Homo sapiens
gaacactattattat

SEQ ID NO: 1479965 - DNA, 15 bp, Homo sapiens
aacactattattatc

SEQ ID NO: 1479966 - DNA, 15 bp, Homo sapiens
acactattattatcg

SEQ ID NO: 1479967 - DNA, 15 bp, Homo sapiens
cactattattatcgc

SEQ ID NO: 1479968 - DNA, 15 bp, Homo sapiens
actattattatcgct

SEQ ID NO: 1479969 - DNA, 15 bp, Homo sapiens
ctattattatcgcta

SEQ ID NO: 1479970 - DNA, 15 bp, Homo sapiens
tattattatcgctag

SEQ ID NO: 1479971 - DNA, 15 bp, Homo sapiens
attattatcgctagt

SEQ ID NO: 1479972 - DNA, 15 bp, Homo sapiens
ttattatcgctagtt

SEQ ID NO: 1479973 - DNA, 15 bp, Homo sapiens
tattatcgctagttt

SEQ ID NO: 1479974 - DNA, 15 bp, Homo sapiens
attatcgctagtttt

SEQ ID NO: 1479975 - DNA, 15 bp, Homo sapiens
ttatcgctagttttc

SEQ ID NO: 1479976 - DNA, 15 bp, Homo sapiens
tatcgctagttttcc

SEQ ID NO: 1479977 - DNA, 15 bp, Homo sapiens
atcgctagttttcca

SEQ ID NO: 1479978 - DNA, 15 bp, Homo sapiens
tcgctagttttccaa

SEQ ID NO: 1479979 - DNA, 15 bp, Homo sapiens
cgctagttttccaaa

SEQ ID NO: 1479980 - DNA, 15 bp, Homo sapiens
gctagttttccaaaa

SEQ ID NO: 1479981 - DNA, 15 bp, Homo sapiens
ctagttttccaaaaa

SEQ ID NO: 1479982 - DNA, 15 bp, Homo sapiens
tagttttccaaaaag

SEQ ID NO: 1479983 - DNA, 15 bp, Homo sapiens
agttttccaaaaagg

SEQ ID NO: 1479984 - DNA, 15 bp, Homo sapiens
gttttccaaaaagga

SEQ ID NO: 1479985 - DNA, 15 bp, Homo sapiens
ttttccaaaaaggaa

SEQ ID NO: 1479986 - DNA, 15 bp, Homo sapiens
tccaaaaaggaaact

SEQ ID NO: 1479987 - DNA, 15 bp, Homo sapiens
ccaaaaaggaaactg

SEQ ID NO: 1479988 - DNA, 15 bp, Homo sapiens
caaaaaggaaactga

SEQ ID NO: 1479989 - DNA, 15 bp, Homo sapiens
aaaaaggaaactgag

SEQ ID NO: 1479990 - DNA, 15 bp, Homo sapiens
aaaaggaaactgagg

SEQ ID NO: 1479991 - DNA, 15 bp, Homo sapiens
aaaggaaactgaggc

SEQ ID NO: 1479992 - DNA, 15 bp, Homo sapiens
aaggaaactgaggca

SEQ ID NO: 1479993 - DNA, 15 bp, Homo sapiens
aggaaactgaggcat

SEQ ID NO: 1479994 - DNA, 15 bp, Homo sapiens
gaaactgaggcatgg

SEQ ID NO: 1479995 - DNA, 15 bp, Homo sapiens
aaactgaggcatgga

SEQ ID NO: 1479996 - DNA, 15 bp, Homo sapiens
actgaggcatggaga

SEQ ID NO: 1479997 - DNA, 15 bp, Homo sapiens
ctgaggcatggagag

SEQ ID NO: 1479998 - DNA, 15 bp, Homo sapiens
tgaggcatggagaga

SEQ ID NO: 1479999 - DNA, 15 bp, Homo sapiens
gaggcatggagagat

SEQ ID NO: 1480000 - DNA, 15 bp, Homo sapiens
aggcatggagagatt

SEQ ID NO: 1480001 - DNA, 15 bp, Homo sapiens
ggcatggagagatta

SEQ ID NO: 1480002 - DNA, 15 bp, Homo sapiens
gcatggagagattaa

SEQ ID NO: 1480003 - DNA, 15 bp, Homo sapiens
catggagagattaaa

SEQ ID NO: 1480004 - DNA, 15 bp, Homo sapiens
atggagagattaaag

SEQ ID NO: 1480005 - DNA, 15 bp, Homo sapiens
tggagagattaaaga

SEQ ID NO: 1480006 - DNA, 15 bp, Homo sapiens
ggagagattaaagaa

SEQ ID NO: 1480007 - DNA, 15 bp, Homo sapiens
gagagattaaagaac

SEQ ID NO: 1480008 - DNA, 15 bp, Homo sapiens
agagattaaagaact

SEQ ID NO: 1480009 - DNA, 15 bp, Homo sapiens
gagattaaagaactt

SEQ ID NO: 1480010 - DNA, 15 bp, Homo sapiens
agattaaagaacttg

SEQ ID NO: 1480011 - DNA, 15 bp, Homo sapiens
gattaaagaacttgt

SEQ ID NO: 1480012 - DNA, 15 bp, Homo sapiens
attaaagaacttgtc

SEQ ID NO: 1480013 - DNA, 15 bp, Homo sapiens
ttaaagaacttgtcc

SEQ ID NO: 1480014 - DNA, 15 bp, Homo sapiens
taaagaacttgtcca

SEQ ID NO: 1480015 - DNA, 15 bp, Homo sapiens
aaagaacttgtccaa

SEQ ID NO: 1480016 - DNA, 15 bp, Homo sapiens
aagaacttgtccaag

SEQ ID NO: 1480017 - DNA, 15 bp, Homo sapiens
agaacttgtccaagg

SEQ ID NO: 1480018 - DNA, 15 bp, Homo sapiens
gaacttgtccaaggt

SEQ ID NO: 1480019 - DNA, 15 bp, Homo sapiens
aacttgtccaaggtc

SEQ ID NO: 1480020 - DNA, 15 bp, Homo sapiens
acttgtccaaggtca

SEQ ID NO: 1480021 - DNA, 15 bp, Homo sapiens
cttgtccaaggtcac

SEQ ID NO: 1480022 - DNA, 15 bp, Homo sapiens
ttgtccaaggtcaca

SEQ ID NO: 1480023 - DNA, 15 bp, Homo sapiens
tgtccaaggtcacaa

SEQ ID NO: 1480024 - DNA, 15 bp, Homo sapiens
gtccaaggtcacaag

SEQ ID NO: 1480025 - DNA, 15 bp, Homo sapiens
tccaaggtcacaaga

SEQ ID NO: 1480026 - DNA, 15 bp, Homo sapiens
ccaaggtcacaagac

SEQ ID NO: 1480027 - DNA, 15 bp, Homo sapiens
caaggtcacaagact

SEQ ID NO: 1480028 - DNA, 15 bp, Homo sapiens
aaggtcacaagactg

SEQ ID NO: 1480029 - DNA, 15 bp, Homo sapiens
aggtcacaagactgg

SEQ ID NO: 1480030 - DNA, 15 bp, Homo sapiens
ggtcacaagactggc

SEQ ID NO: 1480031 - DNA, 15 bp, Homo sapiens
gtcacaagactggca

SEQ ID NO: 1480032 - DNA, 15 bp, Homo sapiens
tcacaagactggcaa

SEQ ID NO: 1480033 - DNA, 15 bp, Homo sapiens
cacaagactggcaag

SEQ ID NO: 1480034 - DNA, 15 bp, Homo sapiens
acaagactggcaagt

SEQ ID NO: 1480035 - DNA, 15 bp, Homo sapiens
caagactggcaagtg

SEQ ID NO: 1480036 - DNA, 15 bp, Homo sapiens
aagactggcaagtgg

SEQ ID NO: 1480037 - DNA, 15 bp, Homo sapiens
agactggcaagtggt

SEQ ID NO: 1480038 - DNA, 15 bp, Homo sapiens
gactggcaagtggta

SEQ ID NO: 1480039 - DNA, 15 bp, Homo sapiens
actggcaagtggtag

SEQ ID NO: 1480040 - DNA, 15 bp, Homo sapiens
ctggcaagtggtaga

SEQ ID NO: 1480041 - DNA, 15 bp, Homo sapiens
tggcaagtggtagat

SEQ ID NO: 1480042 - DNA, 15 bp, Homo sapiens
ggcaagtggtagatg

SEQ ID NO: 1480043 - DNA, 15 bp, Homo sapiens
gcaagtggtagatgt

SEQ ID NO: 1480044 - DNA, 15 bp, Homo sapiens
caagtggtagatgta

SEQ ID NO: 1480045 - DNA, 15 bp, Homo sapiens
aagtggtagatgtag

SEQ ID NO: 1480046 - DNA, 15 bp, Homo sapiens
agtggtagatgtaga

SEQ ID NO: 1480047 - DNA, 15 bp, Homo sapiens
gtggtagatgtagaa

SEQ ID NO: 1480048 - DNA, 15 bp, Homo sapiens
tggtagatgtagaat

SEQ ID NO: 1480049 - DNA, 15 bp, Homo sapiens
ggtagatgtagaatt

SEQ ID NO: 1480050 - DNA, 15 bp, Homo sapiens
gtagatgtagaattc

SEQ ID NO: 1480051 - DNA, 15 bp, Homo sapiens
tagatgtagaattca

SEQ ID NO: 1480052 - DNA, 15 bp, Homo sapiens
agatgtagaattcag

SEQ ID NO: 1480053 - DNA, 15 bp, Homo sapiens
gatgtagaattcaga

SEQ ID NO: 1480054 - DNA, 15 bp, Homo sapiens
atgtagaattcagat

SEQ ID NO: 1480055 - DNA, 15 bp, Homo sapiens
tgtagaattcagatc

SEQ ID NO: 1480056 - DNA, 15 bp, Homo sapiens
gtagaattcagatcc

SEQ ID NO: 1480057 - DNA, 15 bp, Homo sapiens
tagaattcagatcct

SEQ ID NO: 1480058 - DNA, 15 bp, Homo sapiens
agaattcagatcctg

SEQ ID NO: 1480059 - DNA, 15 bp, Homo sapiens
gaattcagatcctga

SEQ ID NO: 1480060 - DNA, 15 bp, Homo sapiens
aattcagatcctgac

SEQ ID NO: 1480061 - DNA, 15 bp, Homo sapiens
attcagatcctgaca

SEQ ID NO: 1480062 - DNA, 15 bp, Homo sapiens
ttcagatcctgacag

SEQ ID NO: 1480063 - DNA, 15 bp, Homo sapiens
tcagatcctgacagt

SEQ ID NO: 1480064 - DNA, 15 bp, Homo sapiens
cagatcctgacagtc

SEQ ID NO: 1480065 - DNA, 15 bp, Homo sapiens
agatcctgacagtct

SEQ ID NO: 1480066 - DNA, 15 bp, Homo sapiens
gatcctgacagtctg

SEQ ID NO: 1480067 - DNA, 15 bp, Homo sapiens
atcctgacagtctgg

SEQ ID NO: 1480068 - DNA, 15 bp, Homo sapiens
tcctgacagtctggc

SEQ ID NO: 1480069 - DNA, 15 bp, Homo sapiens
cctgacagtctggct

SEQ ID NO: 1480070 - DNA, 15 bp, Homo sapiens
ctgacagtctggctc

SEQ ID NO: 1480071 - DNA, 15 bp, Homo sapiens
tgacagtctggctct

SEQ ID NO: 1480072 - DNA, 15 bp, Homo sapiens
gacagtctggctctg

SEQ ID NO: 1480073 - DNA, 15 bp, Homo sapiens
acagtctggctctgc

SEQ ID NO: 1480074 - DNA, 15 bp, Homo sapiens
cagtctggctctgcg

SEQ ID NO: 1480075 - DNA, 15 bp, Homo sapiens
agtctggctctgcgg

SEQ ID NO: 1480076 - DNA, 15 bp, Homo sapiens
gtctggctctgcggg

SEQ ID NO: 1480077 - DNA, 15 bp, Homo sapiens
tctggctctgcgggt

SEQ ID NO: 1480078 - DNA, 15 bp, Homo sapiens
ctggctctgcgggta

SEQ ID NO: 1480079 - DNA, 15 bp, Homo sapiens
tggctctgcgggtaa

SEQ ID NO: 1480080 - DNA, 15 bp, Homo sapiens
ggctctgcgggtaac

SEQ ID NO: 1480081 - DNA, 15 bp, Homo sapiens
gctctgcgggtaaca

SEQ ID NO: 1480082 - DNA, 15 bp, Homo sapiens
ctctgcgggtaacat

SEQ ID NO: 1480083 - DNA, 15 bp, Homo sapiens
tctgcgggtaacatg

SEQ ID NO: 1480084 - DNA, 15 bp, Homo sapiens
ctgcgggtaacatgt

SEQ ID NO: 1480085 - DNA, 15 bp, Homo sapiens
tgcgggtaacatgtc

SEQ ID NO: 1480086 - DNA, 15 bp, Homo sapiens
gcgggtaacatgtca

SEQ ID NO: 1480087 - DNA, 15 bp, Homo sapiens
cgggtaacatgtcaa

SEQ ID NO: 1480088 - DNA, 15 bp, Homo sapiens
gggtaacatgtcaaa

SEQ ID NO: 1480089 - DNA, 15 bp, Homo sapiens
ggtaacatgtcaaag

SEQ ID NO: 1480090 - DNA, 15 bp, Homo sapiens
gtaacatgtcaaaga

SEQ ID NO: 1480091 - DNA, 15 bp, Homo sapiens
taacatgtcaaagat

SEQ ID NO: 1480092 - DNA, 15 bp, Homo sapiens
aacatgtcaaagatg

SEQ ID NO: 1480093 - DNA, 15 bp, Homo sapiens
acatgtcaaagatga

SEQ ID NO: 1480094 - DNA, 15 bp, Homo sapiens
catgtcaaagatgac

SEQ ID NO: 1480095 - DNA, 15 bp, Homo sapiens
atgtcaaagatgaca

SEQ ID NO: 1480096 - DNA, 15 bp, Homo sapiens
tgtcaaagatgacag

SEQ ID NO: 1480097 - DNA, 15 bp, Homo sapiens
gtcaaagatgacaga

SEQ ID NO: 1480098 - DNA, 15 bp, Homo sapiens
tcaaagatgacagac

SEQ ID NO: 1480099 - DNA, 15 bp, Homo sapiens
caaagatgacagact

SEQ ID NO: 1480100 - DNA, 15 bp, Homo sapiens
aaagatgacagactg

SEQ ID NO: 1480101 - DNA, 15 bp, Homo sapiens
aagatgacagactgt

SEQ ID NO: 1480102 - DNA, 15 bp, Homo sapiens
agatgacagactgta

SEQ ID NO: 1480103 - DNA, 15 bp, Homo sapiens
gatgacagactgtac

SEQ ID NO: 1480104 - DNA, 15 bp, Homo sapiens
atgacagactgtacc

SEQ ID NO: 1480105 - DNA, 15 bp, Homo sapiens
tgacagactgtacct

SEQ ID NO: 1480106 - DNA, 15 bp, Homo sapiens
gacagactgtacctc

SEQ ID NO: 1480107 - DNA, 15 bp, Homo sapiens
acagactgtacctct

SEQ ID NO: 1480108 - DNA, 15 bp, Homo sapiens
cagactgtacctctc

SEQ ID NO: 1480109 - DNA, 15 bp, Homo sapiens
agactgtacctctca

SEQ ID NO: 1480110 - DNA, 15 bp, Homo sapiens
gactgtacctctcac

SEQ ID NO: 1480111 - DNA, 15 bp, Homo sapiens
actgtacctctcaca

SEQ ID NO: 1480112 - DNA, 15 bp, Homo sapiens
ctgtacctctcacaa

SEQ ID NO: 1480113 - DNA, 15 bp, Homo sapiens
tgtacctctcacaaa

SEQ ID NO: 1480114 - DNA, 15 bp, Homo sapiens
gtacctctcacaaac

SEQ ID NO: 1480115 - DNA, 15 bp, Homo sapiens
tacctctcacaaacc

SEQ ID NO: 1480116 - DNA, 15 bp, Homo sapiens
acctctcacaaacca

SEQ ID NO: 1480117 - DNA, 15 bp, Homo sapiens
cctctcacaaaccag

SEQ ID NO: 1480118 - DNA, 15 bp, Homo sapiens
ctctcacaaaccagc

SEQ ID NO: 1480119 - DNA, 15 bp, Homo sapiens
tctcacaaaccagca

SEQ ID NO: 1480120 - DNA, 15 bp, Homo sapiens
ctcacaaaccagcag

SEQ ID NO: 1480121 - DNA, 15 bp, Homo sapiens
tcacaaaccagcaga

SEQ ID NO: 1480122 - DNA, 15 bp, Homo sapiens
cacaaaccagcagaa

SEQ ID NO: 1480123 - DNA, 15 bp, Homo sapiens
acaaaccagcagaat

SEQ ID NO: 1480124 - DNA, 15 bp, Homo sapiens
caaaccagcagaatg

SEQ ID NO: 1480125 - DNA, 15 bp, Homo sapiens
aaaccagcagaatgg

SEQ ID NO: 1480126 - DNA, 15 bp, Homo sapiens
aaccagcagaatgga

SEQ ID NO: 1480127 - DNA, 15 bp, Homo sapiens
accagcagaatggag

SEQ ID NO: 1480128 - DNA, 15 bp, Homo sapiens
ccagcagaatggaga

SEQ ID NO: 1480129 - DNA, 15 bp, Homo sapiens
cagcagaatggagag

SEQ ID NO: 1480130 - DNA, 15 bp, Homo sapiens
agcagaatggagagc

SEQ ID NO: 1480131 - DNA, 15 bp, Homo sapiens
gcagaatggagagcc

SEQ ID NO: 1480132 - DNA, 15 bp, Homo sapiens
cagaatggagagccc

SEQ ID NO: 1480133 - DNA, 15 bp, Homo sapiens
agaatggagagcccc

SEQ ID NO: 1480134 - DNA, 15 bp, Homo sapiens
gaatggagagccccc

SEQ ID NO: 1480135 - DNA, 15 bp, Homo sapiens
aatggagagccccct

SEQ ID NO: 1480136 - DNA, 15 bp, Homo sapiens
atggagagccccctc

SEQ ID NO: 1480137 - DNA, 15 bp, Homo sapiens
tggagagccccctca

SEQ ID NO: 1480138 - DNA, 15 bp, Homo sapiens
ggagagccccctcaa

SEQ ID NO: 1480139 - DNA, 15 bp, Homo sapiens
gagagccccctcaac

SEQ ID NO: 1480140 - DNA, 15 bp, Homo sapiens
agagccccctcaacc

SEQ ID NO: 1480141 - DNA, 15 bp, Homo sapiens
gagccccctcaaccc

SEQ ID NO: 1480142 - DNA, 15 bp, Homo sapiens
agccccctcaaccct

SEQ ID NO: 1480143 - DNA, 15 bp, Homo sapiens
gccccctcaaccctc

SEQ ID NO: 1480144 - DNA, 15 bp, Homo sapiens
ccccctcaaccctca

SEQ ID NO: 1480145 - DNA, 15 bp, Homo sapiens
cccctcaaccctcac

SEQ ID NO: 1480146 - DNA, 15 bp, Homo sapiens
ccctcaaccctcaca

SEQ ID NO: 1480147 - DNA, 15 bp, Homo sapiens
cctcaaccctcacat

SEQ ID NO: 1480148 - DNA, 15 bp, Homo sapiens
ctcaaccctcacatc

SEQ ID NO: 1480149 - DNA, 15 bp, Homo sapiens
tcaaccctcacatca

SEQ ID NO: 1480150 - DNA, 15 bp, Homo sapiens
caaccctcacatcaa

SEQ ID NO: 1480151 - DNA, 15 bp, Homo sapiens
aaccctcacatcaaa

SEQ ID NO: 1480152 - DNA, 15 bp, Homo sapiens
accctcacatcaaaa

SEQ ID NO: 1480153 - DNA, 15 bp, Homo sapiens
ccctcacatcaaaac

SEQ ID NO: 1480154 - DNA, 15 bp, Homo sapiens
cctcacatcaaaacc

SEQ ID NO: 1480155 - DNA, 15 bp, Homo sapiens
ctcacatcaaaaccc

SEQ ID NO: 1480156 - DNA, 15 bp, Homo sapiens
tcacatcaaaaccct

SEQ ID NO: 1480157 - DNA, 15 bp, Homo sapiens
cacatcaaaaccctg

SEQ ID NO: 1480158 - DNA, 15 bp, Homo sapiens
acatcaaaaccctgt

SEQ ID NO: 1480159 - DNA, 15 bp, Homo sapiens
catcaaaaccctgtg

SEQ ID NO: 1480160 - DNA, 15 bp, Homo sapiens
atcaaaaccctgtgg

SEQ ID NO: 1480161 - DNA, 15 bp, Homo sapiens
tcaaaaccctgtggg

SEQ ID NO: 1480162 - DNA, 15 bp, Homo sapiens
caaaaccctgtgggt

SEQ ID NO: 1480163 - DNA, 15 bp, Homo sapiens
aaaaccctgtgggtg

SEQ ID NO: 1480164 - DNA, 15 bp, Homo sapiens
aaaccctgtgggtgc

SEQ ID NO: 1480165 - DNA, 15 bp, Homo sapiens
aaccctgtgggtgct

SEQ ID NO: 1480166 - DNA, 15 bp, Homo sapiens
accctgtgggtgctg

SEQ ID NO: 1480167 - DNA, 15 bp, Homo sapiens
ccctgtgggtgctgt

SEQ ID NO: 1480168 - DNA, 15 bp, Homo sapiens
cctgtgggtgctgtc

SEQ ID NO: 1480169 - DNA, 15 bp, Homo sapiens
ctgtgggtgctgtca

SEQ ID NO: 1480170 - DNA, 15 bp, Homo sapiens
tgtgggtgctgtcat

SEQ ID NO: 1480171 - DNA, 15 bp, Homo sapiens
gtgggtgctgtcatt

SEQ ID NO: 1480172 - DNA, 15 bp, Homo sapiens
tgggtgctgtcattg

SEQ ID NO: 1480173 - DNA, 15 bp, Homo sapiens
gggtgctgtcattgt

SEQ ID NO: 1480174 - DNA, 15 bp, Homo sapiens
ggtgctgtcattgtg

SEQ ID NO: 1480175 - DNA, 15 bp, Homo sapiens
gtgctgtcattgtgc

SEQ ID NO: 1480176 - DNA, 15 bp, Homo sapiens
tgctgtcattgtgcc

SEQ ID NO: 1480177 - DNA, 15 bp, Homo sapiens
gctgtcattgtgccc

SEQ ID NO: 1480178 - DNA, 15 bp, Homo sapiens
ctgtcattgtgccca

SEQ ID NO: 1480179 - DNA, 15 bp, Homo sapiens
tgtcattgtgcccat

SEQ ID NO: 1480180 - DNA, 15 bp, Homo sapiens
gtcattgtgcccatt

SEQ ID NO: 1480181 - DNA, 15 bp, Homo sapiens
tcattgtgcccattt

SEQ ID NO: 1480182 - DNA, 15 bp, Homo sapiens
cattgtgcccatttt

SEQ ID NO: 1480183 - DNA, 15 bp, Homo sapiens
attgtgcccatttta

SEQ ID NO: 1480184 - DNA, 15 bp, Homo sapiens
ttgtgcccattttat

SEQ ID NO: 1480185 - DNA, 15 bp, Homo sapiens
tgtgcccattttatg

SEQ ID NO: 1480186 - DNA, 15 bp, Homo sapiens
gtgcccattttatgg

SEQ ID NO: 1480187 - DNA, 15 bp, Homo sapiens
tgcccattttatgga

SEQ ID NO: 1480188 - DNA, 15 bp, Homo sapiens
gcccattttatggat

SEQ ID NO: 1480189 - DNA, 15 bp, Homo sapiens
cccattttatggata

SEQ ID NO: 1480190 - DNA, 15 bp, Homo sapiens
ccattttatggataa

SEQ ID NO: 1480191 - DNA, 15 bp, Homo sapiens
cattttatggataag

SEQ ID NO: 1480192 - DNA, 15 bp, Homo sapiens
attttatggataagg

SEQ ID NO: 1480193 - DNA, 15 bp, Homo sapiens
ttttatggataaggg

SEQ ID NO: 1480194 - DNA, 15 bp, Homo sapiens
tttatggataagggg

SEQ ID NO: 1480195 - DNA, 15 bp, Homo sapiens
ttatggataagggga

SEQ ID NO: 1480196 - DNA, 15 bp, Homo sapiens
tatggataaggggag

SEQ ID NO: 1480197 - DNA, 15 bp, Homo sapiens
atggataaggggaga

SEQ ID NO: 1480198 - DNA, 15 bp, Homo sapiens
tggataaggggagaa

SEQ ID NO: 1480199 - DNA, 15 bp, Homo sapiens
ggataaggggagaac

SEQ ID NO: 1480200 - DNA, 15 bp, Homo sapiens
gataaggggagaacc

SEQ ID NO: 1480201 - DNA, 15 bp, Homo sapiens
ataaggggagaacca

SEQ ID NO: 1480202 - DNA, 15 bp, Homo sapiens
taaggggagaaccaa

SEQ ID NO: 1480203 - DNA, 15 bp, Homo sapiens
aaggggagaaccaat

SEQ ID NO: 1480204 - DNA, 15 bp, Homo sapiens
aggggagaaccaatt

SEQ ID NO: 1480205 - DNA, 15 bp, Homo sapiens
ggggagaaccaattc

SEQ ID NO: 1480206 - DNA, 15 bp, Homo sapiens
gggagaaccaattca

SEQ ID NO: 1480207 - DNA, 15 bp, Homo sapiens
ggagaaccaattcac

SEQ ID NO: 1480208 - DNA, 15 bp, Homo sapiens
gagaaccaattcact

SEQ ID NO: 1480209 - DNA, 15 bp, Homo sapiens
agaaccaattcactc

SEQ ID NO: 1480210 - DNA, 15 bp, Homo sapiens
gaaccaattcactca

SEQ ID NO: 1480211 - DNA, 15 bp, Homo sapiens
aaccaattcactcag

SEQ ID NO: 1480212 - DNA, 15 bp, Homo sapiens
accaattcactcagc

SEQ ID NO: 1480213 - DNA, 15 bp, Homo sapiens
ccaattcactcagct

SEQ ID NO: 1480214 - DNA, 15 bp, Homo sapiens
caattcactcagcta

SEQ ID NO: 1480215 - DNA, 15 bp, Homo sapiens
aattcactcagctag

SEQ ID NO: 1480216 - DNA, 15 bp, Homo sapiens
attcactcagctagt

SEQ ID NO: 1480217 - DNA, 15 bp, Homo sapiens
ttcactcagctagta

SEQ ID NO: 1480218 - DNA, 15 bp, Homo sapiens
tcactcagctagtaa

SEQ ID NO: 1480219 - DNA, 15 bp, Homo sapiens
cactcagctagtaag

SEQ ID NO: 1480220 - DNA, 15 bp, Homo sapiens
actcagctagtaagt

SEQ ID NO: 1480221 - DNA, 15 bp, Homo sapiens
ctcagctagtaagtg

SEQ ID NO: 1480222 - DNA, 15 bp, Homo sapiens
tcagctagtaagtgg

SEQ ID NO: 1480223 - DNA, 15 bp, Homo sapiens
cagctagtaagtggc

SEQ ID NO: 1480224 - DNA, 15 bp, Homo sapiens
agctagtaagtggca

SEQ ID NO: 1480225 - DNA, 15 bp, Homo sapiens
gctagtaagtggcaa

SEQ ID NO: 1480226 - DNA, 15 bp, Homo sapiens
ctagtaagtggcaat

SEQ ID NO: 1480227 - DNA, 15 bp, Homo sapiens
tagtaagtggcaatc

SEQ ID NO: 1480228 - DNA, 15 bp, Homo sapiens
agtaagtggcaatca

SEQ ID NO: 1480229 - DNA, 15 bp, Homo sapiens
gtaagtggcaatcat

SEQ ID NO: 1480230 - DNA, 15 bp, Homo sapiens
taagtggcaatcatg

SEQ ID NO: 1480231 - DNA, 15 bp, Homo sapiens
aagtggcaatcatgt

SEQ ID NO: 1480232 - DNA, 15 bp, Homo sapiens
agtggcaatcatgtc

SEQ ID NO: 1480233 - DNA, 15 bp, Homo sapiens
gtggcaatcatgtct

SEQ ID NO: 1480234 - DNA, 15 bp, Homo sapiens
tggcaatcatgtcta

SEQ ID NO: 1480235 - DNA, 15 bp, Homo sapiens
ggcaatcatgtctac

SEQ ID NO: 1480236 - DNA, 15 bp, Homo sapiens
gcaatcatgtctaca

SEQ ID NO: 1480237 - DNA, 15 bp, Homo sapiens
caatcatgtctacag

SEQ ID NO: 1480238 - DNA, 15 bp, Homo sapiens
aatcatgtctacaga

SEQ ID NO: 1480239 - DNA, 15 bp, Homo sapiens
atcatgtctacagaa

SEQ ID NO: 1480240 - DNA, 15 bp, Homo sapiens
tcatgtctacagaaa

SEQ ID NO: 1480241 - DNA, 15 bp, Homo sapiens
catgtctacagaaaa

SEQ ID NO: 1480242 - DNA, 15 bp, Homo sapiens
atgtctacagaaaag

SEQ ID NO: 1480243 - DNA, 15 bp, Homo sapiens
tgtctacagaaaagc

SEQ ID NO: 1480244 - DNA, 15 bp, Homo sapiens
gtctacagaaaagca

SEQ ID NO: 1480245 - DNA, 15 bp, Homo sapiens
tctacagaaaagcac

SEQ ID NO: 1480246 - DNA, 15 bp, Homo sapiens
ctacagaaaagcaca

SEQ ID NO: 1480247 - DNA, 15 bp, Homo sapiens
tacagaaaagcacaa

SEQ ID NO: 1480248 - DNA, 15 bp, Homo sapiens
acagaaaagcacaaa

SEQ ID NO: 1480249 - DNA, 15 bp, Homo sapiens
cagaaaagcacaaag

SEQ ID NO: 1480250 - DNA, 15 bp, Homo sapiens
agaaaagcacaaaga

SEQ ID NO: 1480251 - DNA, 15 bp, Homo sapiens
gaaaagcacaaagaa

SEQ ID NO: 1480252 - DNA, 15 bp, Homo sapiens
aaaagcacaaagaaa

SEQ ID NO: 1480253 - DNA, 15 bp, Homo sapiens
aaagcacaaagaaaa

SEQ ID NO: 1480254 - DNA, 15 bp, Homo sapiens
aagcacaaagaaaat

SEQ ID NO: 1480255 - DNA, 15 bp, Homo sapiens
agcacaaagaaaatt

SEQ ID NO: 1480256 - DNA, 15 bp, Homo sapiens
gcacaaagaaaatta

SEQ ID NO: 1480257 - DNA, 15 bp, Homo sapiens
cacaaagaaaattat

SEQ ID NO: 1480258 - DNA, 15 bp, Homo sapiens
acaaagaaaattatc

SEQ ID NO: 1480259 - DNA, 15 bp, Homo sapiens
caaagaaaattatcg

SEQ ID NO: 1480260 - DNA, 15 bp, Homo sapiens
aaagaaaattatcgt

SEQ ID NO: 1480261 - DNA, 15 bp, Homo sapiens
aagaaaattatcgtg

SEQ ID NO: 1480262 - DNA, 15 bp, Homo sapiens
agaaaattatcgtgg

SEQ ID NO: 1480263 - DNA, 15 bp, Homo sapiens
gaaaattatcgtggg

SEQ ID NO: 1480264 - DNA, 15 bp, Homo sapiens
aaaattatcgtgggg

SEQ ID NO: 1480265 - DNA, 15 bp, Homo sapiens
aaattatcgtgggga

SEQ ID NO: 1480266 - DNA, 15 bp, Homo sapiens
aattatcgtggggaa

SEQ ID NO: 1480267 - DNA, 15 bp, Homo sapiens
attatcgtggggaat

SEQ ID NO: 1480268 - DNA, 15 bp, Homo sapiens
ttatcgtggggaatt

SEQ ID NO: 1480269 - DNA, 15 bp, Homo sapiens
tatcgtggggaattc

SEQ ID NO: 1480270 - DNA, 15 bp, Homo sapiens
atcgtggggaattct

SEQ ID NO: 1480271 - DNA, 15 bp, Homo sapiens
tcgtggggaattctc

SEQ ID NO: 1480272 - DNA, 15 bp, Homo sapiens
cgtggggaattctca

SEQ ID NO: 1480273 - DNA, 15 bp, Homo sapiens
gtggggaattctcaa

SEQ ID NO: 1480274 - DNA, 15 bp, Homo sapiens
tggggaattctcaat

SEQ ID NO: 1480275 - DNA, 15 bp, Homo sapiens
ggggaattctcaatc

SEQ ID NO: 1480276 - DNA, 15 bp, Homo sapiens
gggaattctcaatct

SEQ ID NO: 1480277 - DNA, 15 bp, Homo sapiens
ggaattctcaatcta

SEQ ID NO: 1480278 - DNA, 15 bp, Homo sapiens
gaattctcaatctag

SEQ ID NO: 1480279 - DNA, 15 bp, Homo sapiens
aattctcaatctagt

SEQ ID NO: 1480280 - DNA, 15 bp, Homo sapiens
attctcaatctagta

SEQ ID NO: 1480281 - DNA, 15 bp, Homo sapiens
ttctcaatctagtag

SEQ ID NO: 1480282 - DNA, 15 bp, Homo sapiens
tctcaatctagtagg

SEQ ID NO: 1480283 - DNA, 15 bp, Homo sapiens
ctcaatctagtagga

SEQ ID NO: 1480284 - DNA, 15 bp, Homo sapiens
tcaatctagtaggag

SEQ ID NO: 1480285 - DNA, 15 bp, Homo sapiens
caatctagtaggaga

SEQ ID NO: 1480286 - DNA, 15 bp, Homo sapiens
aatctagtaggagag

SEQ ID NO: 1480287 - DNA, 15 bp, Homo sapiens
atctagtaggagaga

SEQ ID NO: 1480288 - DNA, 15 bp, Homo sapiens
tctagtaggagagat

SEQ ID NO: 1480289 - DNA, 15 bp, Homo sapiens
ctagtaggagagata

SEQ ID NO: 1480290 - DNA, 15 bp, Homo sapiens
tagtaggagagatag

SEQ ID NO: 1480291 - DNA, 15 bp, Homo sapiens
agtaggagagataga

SEQ ID NO: 1480292 - DNA, 15 bp, Homo sapiens
gtaggagagatagaa

SEQ ID NO: 1480293 - DNA, 15 bp, Homo sapiens
taggagagatagaac

SEQ ID NO: 1480294 - DNA, 15 bp, Homo sapiens
aggagagatagaaca

SEQ ID NO: 1480295 - DNA, 15 bp, Homo sapiens
ggagagatagaacat

SEQ ID NO: 1480296 - DNA, 15 bp, Homo sapiens
gagagatagaacata

SEQ ID NO: 1480297 - DNA, 15 bp, Homo sapiens
agagatagaacataa

SEQ ID NO: 1480298 - DNA, 15 bp, Homo sapiens
gagatagaacataaa

SEQ ID NO: 1480299 - DNA, 15 bp, Homo sapiens
agatagaacataaac

SEQ ID NO: 1480300 - DNA, 15 bp, Homo sapiens
gatagaacataaact

SEQ ID NO: 1480301 - DNA, 15 bp, Homo sapiens
atagaacataaacta

SEQ ID NO: 1480302 - DNA, 15 bp, Homo sapiens
tagaacataaactat

SEQ ID NO: 1480303 - DNA, 15 bp, Homo sapiens
agaacataaactatg

SEQ ID NO: 1480304 - DNA, 15 bp, Homo sapiens
gaacataaactatga

SEQ ID NO: 1480305 - DNA, 15 bp, Homo sapiens
aacataaactatgaa

SEQ ID NO: 1480306 - DNA, 15 bp, Homo sapiens
acataaactatgaaa

SEQ ID NO: 1480307 - DNA, 15 bp, Homo sapiens
cataaactatgaaaa

SEQ ID NO: 1480308 - DNA, 15 bp, Homo sapiens
ataaactatgaaaaa

SEQ ID NO: 1480309 - DNA, 15 bp, Homo sapiens
taaactatgaaaaac

SEQ ID NO: 1480310 - DNA, 15 bp, Homo sapiens
aaactatgaaaaaca

SEQ ID NO: 1480311 - DNA, 15 bp, Homo sapiens
aactatgaaaaacaa

SEQ ID NO: 1480312 - DNA, 15 bp, Homo sapiens
actatgaaaaacaac

SEQ ID NO: 1480313 - DNA, 15 bp, Homo sapiens
ctatgaaaaacaaca

SEQ ID NO: 1480314 - DNA, 15 bp, Homo sapiens
tatgaaaaacaacaa

SEQ ID NO: 1480315 - DNA, 15 bp, Homo sapiens
atgaaaaacaacaat

SEQ ID NO: 1480316 - DNA, 15 bp, Homo sapiens
tgaaaaacaacaatg

SEQ ID NO: 1480317 - DNA, 15 bp, Homo sapiens
gaaaaacaacaatgg

SEQ ID NO: 1480318 - DNA, 15 bp, Homo sapiens
aaaaacaacaatgga

SEQ ID NO: 1480319 - DNA, 15 bp, Homo sapiens
aaaacaacaatggaa

SEQ ID NO: 1480320 - DNA, 15 bp, Homo sapiens
aaacaacaatggaag

SEQ ID NO: 1480321 - DNA, 15 bp, Homo sapiens
aacaacaatggaagg

SEQ ID NO: 1480322 - DNA, 15 bp, Homo sapiens
acaacaatggaaggc

SEQ ID NO: 1480323 - DNA, 15 bp, Homo sapiens
caacaatggaaggca

SEQ ID NO: 1480324 - DNA, 15 bp, Homo sapiens
aacaatggaaggcaa

SEQ ID NO: 1480325 - DNA, 15 bp, Homo sapiens
acaatggaaggcaat

SEQ ID NO: 1480326 - DNA, 15 bp, Homo sapiens
caatggaaggcaatg

SEQ ID NO: 1480327 - DNA, 15 bp, Homo sapiens
aatggaaggcaatgg

SEQ ID NO: 1480328 - DNA, 15 bp, Homo sapiens
atggaaggcaatggt

SEQ ID NO: 1480329 - DNA, 15 bp, Homo sapiens
tggaaggcaatggtt

SEQ ID NO: 1480330 - DNA, 15 bp, Homo sapiens
ggaaggcaatggtta

SEQ ID NO: 1480331 - DNA, 15 bp, Homo sapiens
gaaggcaatggttaa

SEQ ID NO: 1480332 - DNA, 15 bp, Homo sapiens
aaggcaatggttaaa

SEQ ID NO: 1480333 - DNA, 15 bp, Homo sapiens
aggcaatggttaaat

SEQ ID NO: 1480334 - DNA, 15 bp, Homo sapiens
ggcaatggttaaata

SEQ ID NO: 1480335 - DNA, 15 bp, Homo sapiens
gcaatggttaaataa

SEQ ID NO: 1480336 - DNA, 15 bp, Homo sapiens
caatggttaaataaa

SEQ ID NO: 1480337 - DNA, 15 bp, Homo sapiens
aatggttaaataaat

SEQ ID NO: 1480338 - DNA, 15 bp, Homo sapiens
atggttaaataaata

SEQ ID NO: 1480339 - DNA, 15 bp, Homo sapiens
tggttaaataaatat

SEQ ID NO: 1480340 - DNA, 15 bp, Homo sapiens
ggttaaataaatata

SEQ ID NO: 1480341 - DNA, 15 bp, Homo sapiens
gttaaataaatataa

SEQ ID NO: 1480342 - DNA, 15 bp, Homo sapiens
ttaaataaatataaa

SEQ ID NO: 1480343 - DNA, 15 bp, Homo sapiens
taaataaatataaaa

SEQ ID NO: 1480344 - DNA, 15 bp, Homo sapiens
aaataaatataaaag

SEQ ID NO: 1480345 - DNA, 15 bp, Homo sapiens
aataaatataaaagc

SEQ ID NO: 1480346 - DNA, 15 bp, Homo sapiens
ataaatataaaagca

SEQ ID NO: 1480347 - DNA, 15 bp, Homo sapiens
taaatataaaagcaa

SEQ ID NO: 1480348 - DNA, 15 bp, Homo sapiens
aaatataaaagcaac

SEQ ID NO: 1480349 - DNA, 15 bp, Homo sapiens
aatataaaagcaaca

SEQ ID NO: 1480350 - DNA, 15 bp, Homo sapiens
atataaaagcaacat

SEQ ID NO: 1480351 - DNA, 15 bp, Homo sapiens
tataaaagcaacatg

SEQ ID NO: 1480352 - DNA, 15 bp, Homo sapiens
ataaaagcaacatga

SEQ ID NO: 1480353 - DNA, 15 bp, Homo sapiens
taaaagcaacatgac

SEQ ID NO: 1480354 - DNA, 15 bp, Homo sapiens
aaaagcaacatgaca

SEQ ID NO: 1480355 - DNA, 15 bp, Homo sapiens
aaagcaacatgacaa

SEQ ID NO: 1480356 - DNA, 15 bp, Homo sapiens
aagcaacatgacaag

SEQ ID NO: 1480357 - DNA, 15 bp, Homo sapiens
agcaacatgacaagg

SEQ ID NO: 1480358 - DNA, 15 bp, Homo sapiens
gcaacatgacaaggc

SEQ ID NO: 1480359 - DNA, 15 bp, Homo sapiens
caacatgacaaggca

SEQ ID NO: 1480360 - DNA, 15 bp, Homo sapiens
aacatgacaaggcag

SEQ ID NO: 1480361 - DNA, 15 bp, Homo sapiens
acatgacaaggcagt

SEQ ID NO: 1480362 - DNA, 15 bp, Homo sapiens
catgacaaggcagtc

SEQ ID NO: 1480363 - DNA, 15 bp, Homo sapiens
atgacaaggcagtct

SEQ ID NO: 1480364 - DNA, 15 bp, Homo sapiens
tgacaaggcagtcta

SEQ ID NO: 1480365 - DNA, 15 bp, Homo sapiens
gacaaggcagtctaa

SEQ ID NO: 1480366 - DNA, 15 bp, Homo sapiens
acaaggcagtctaag

SEQ ID NO: 1480367 - DNA, 15 bp, Homo sapiens
caaggcagtctaaga

SEQ ID NO: 1480368 - DNA, 15 bp, Homo sapiens
aaggcagtctaagat

SEQ ID NO: 1480369 - DNA, 15 bp, Homo sapiens
aggcagtctaagata

SEQ ID NO: 1480370 - DNA, 15 bp, Homo sapiens
ggcagtctaagataa

SEQ ID NO: 1480371 - DNA, 15 bp, Homo sapiens
gcagtctaagataaa

SEQ ID NO: 1480372 - DNA, 15 bp, Homo sapiens
cagtctaagataaag

SEQ ID NO: 1480373 - DNA, 15 bp, Homo sapiens
agtctaagataaagt

SEQ ID NO: 1480374 - DNA, 15 bp, Homo sapiens
gtctaagataaagtg

SEQ ID NO: 1480375 - DNA, 15 bp, Homo sapiens
tctaagataaagtgc

SEQ ID NO: 1480376 - DNA, 15 bp, Homo sapiens
ctaagataaagtgcc

SEQ ID NO: 1480377 - DNA, 15 bp, Homo sapiens
taagataaagtgcca

SEQ ID NO: 1480378 - DNA, 15 bp, Homo sapiens
aagataaagtgccaa

SEQ ID NO: 1480379 - DNA, 15 bp, Homo sapiens
agataaagtgccaaa

SEQ ID NO: 1480380 - DNA, 15 bp, Homo sapiens
gataaagtgccaaat

SEQ ID NO: 1480381 - DNA, 15 bp, Homo sapiens
ataaagtgccaaatt

SEQ ID NO: 1480382 - DNA, 15 bp, Homo sapiens
taaagtgccaaattg

SEQ ID NO: 1480383 - DNA, 15 bp, Homo sapiens
aaagtgccaaattgg

SEQ ID NO: 1480384 - DNA, 15 bp, Homo sapiens
aagtgccaaattggt

SEQ ID NO: 1480385 - DNA, 15 bp, Homo sapiens
agtgccaaattggtg

SEQ ID NO: 1480386 - DNA, 15 bp, Homo sapiens
gtgccaaattggtgc

SEQ ID NO: 1480387 - DNA, 15 bp, Homo sapiens
tgccaaattggtgcc

SEQ ID NO: 1480388 - DNA, 15 bp, Homo sapiens
gccaaattggtgcca

SEQ ID NO: 1480389 - DNA, 15 bp, Homo sapiens
ccaaattggtgccaa

SEQ ID NO: 1480390 - DNA, 15 bp, Homo sapiens
caaattggtgccaac

SEQ ID NO: 1480391 - DNA, 15 bp, Homo sapiens
aaattggtgccaaca

SEQ ID NO: 1480392 - DNA, 15 bp, Homo sapiens
aattggtgccaacag

SEQ ID NO: 1480393 - DNA, 15 bp, Homo sapiens
ttggtgccaacagac

SEQ ID NO: 1480394 - DNA, 15 bp, Homo sapiens
tggtgccaacagact

SEQ ID NO: 1480395 - DNA, 15 bp, Homo sapiens
ggtgccaacagactt

SEQ ID NO: 1480396 - DNA, 15 bp, Homo sapiens
gtgccaacagacttc

SEQ ID NO: 1480397 - DNA, 15 bp, Homo sapiens
tgccaacagacttca

SEQ ID NO: 1480398 - DNA, 15 bp, Homo sapiens
gccaacagacttcag

SEQ ID NO: 1480399 - DNA, 15 bp, Homo sapiens
ccaacagacttcagc

SEQ ID NO: 1480400 - DNA, 15 bp, Homo sapiens
caacagacttcagca

SEQ ID NO: 1480401 - DNA, 15 bp, Homo sapiens
aacagacttcagcag

SEQ ID NO: 1480402 - DNA, 15 bp, Homo sapiens
acagacttcagcaga

SEQ ID NO: 1480403 - DNA, 15 bp, Homo sapiens
cagacttcagcagaa

SEQ ID NO: 1480404 - DNA, 15 bp, Homo sapiens
agacttcagcagaat

SEQ ID NO: 1480405 - DNA, 15 bp, Homo sapiens
gacttcagcagaatg

SEQ ID NO: 1480406 - DNA, 15 bp, Homo sapiens
acttcagcagaatgg

SEQ ID NO: 1480407 - DNA, 15 bp, Homo sapiens
cttcagcagaatgga

SEQ ID NO: 1480408 - DNA, 15 bp, Homo sapiens
ttcagcagaatggag

SEQ ID NO: 1480409 - DNA, 15 bp, Homo sapiens
tcagcagaatggagg

SEQ ID NO: 1480410 - DNA, 15 bp, Homo sapiens
cagcagaatggaggt

SEQ ID NO: 1480411 - DNA, 15 bp, Homo sapiens
agcagaatggaggtt

SEQ ID NO: 1480412 - DNA, 15 bp, Homo sapiens
gcagaatggaggttc

SEQ ID NO: 1480413 - DNA, 15 bp, Homo sapiens
cagaatggaggttct

SEQ ID NO: 1480414 - DNA, 15 bp, Homo sapiens
agaatggaggttctt

SEQ ID NO: 1480415 - DNA, 15 bp, Homo sapiens
gaatggaggttctta

SEQ ID NO: 1480416 - DNA, 15 bp, Homo sapiens
aatggaggttcttat

SEQ ID NO: 1480417 - DNA, 15 bp, Homo sapiens
atggaggttcttatg

SEQ ID NO: 1480418 - DNA, 15 bp, Homo sapiens
tggaggttcttatgc

SEQ ID NO: 1480419 - DNA, 15 bp, Homo sapiens
ggaggttcttatgct

SEQ ID NO: 1480420 - DNA, 15 bp, Homo sapiens
gaggttcttatgctg

SEQ ID NO: 1480421 - DNA, 15 bp, Homo sapiens
aggttcttatgctgg

SEQ ID NO: 1480422 - DNA, 15 bp, Homo sapiens
ggttcttatgctggg

SEQ ID NO: 1480423 - DNA, 15 bp, Homo sapiens
gttcttatgctgggc

SEQ ID NO: 1480424 - DNA, 15 bp, Homo sapiens
ttcttatgctgggct

SEQ ID NO: 1480425 - DNA, 15 bp, Homo sapiens
tcttatgctgggctg

SEQ ID NO: 1480426 - DNA, 15 bp, Homo sapiens
cttatgctgggctgg

SEQ ID NO: 1480427 - DNA, 15 bp, Homo sapiens
ttatgctgggctgga

SEQ ID NO: 1480428 - DNA, 15 bp, Homo sapiens
tatgctgggctggag

SEQ ID NO: 1480429 - DNA, 15 bp, Homo sapiens
atgctgggctggagt

SEQ ID NO: 1480430 - DNA, 15 bp, Homo sapiens
tgctgggctggagtg

SEQ ID NO: 1480431 - DNA, 15 bp, Homo sapiens
gctgggctggagtga

SEQ ID NO: 1480432 - DNA, 15 bp, Homo sapiens
ctgggctggagtgag

SEQ ID NO: 1480433 - DNA, 15 bp, Homo sapiens
tgggctggagtgagc

SEQ ID NO: 1480434 - DNA, 15 bp, Homo sapiens
gggctggagtgagca

SEQ ID NO: 1480435 - DNA, 15 bp, Homo sapiens
ggctggagtgagcag

SEQ ID NO: 1480436 - DNA, 15 bp, Homo sapiens
gctggagtgagcagg

SEQ ID NO: 1480437 - DNA, 15 bp, Homo sapiens
ctggagtgagcaggg

SEQ ID NO: 1480438 - DNA, 15 bp, Homo sapiens
tggagtgagcaggga

SEQ ID NO: 1480439 - DNA, 15 bp, Homo sapiens
ggagtgagcagggag

SEQ ID NO: 1480440 - DNA, 15 bp, Homo sapiens
gagtgagcagggaga

SEQ ID NO: 1480441 - DNA, 15 bp, Homo sapiens
agtgagcagggagac

SEQ ID NO: 1480442 - DNA, 15 bp, Homo sapiens
gtgagcagggagact

SEQ ID NO: 1480443 - DNA, 15 bp, Homo sapiens
tgagcagggagactt

SEQ ID NO: 1480444 - DNA, 15 bp, Homo sapiens
gagcagggagacttc

SEQ ID NO: 1480445 - DNA, 15 bp, Homo sapiens
agcagggagacttcc

SEQ ID NO: 1480446 - DNA, 15 bp, Homo sapiens
gcagggagacttcct

SEQ ID NO: 1480447 - DNA, 15 bp, Homo sapiens
cagggagacttcctg

SEQ ID NO: 1480448 - DNA, 15 bp, Homo sapiens
agggagacttcctgg

SEQ ID NO: 1480449 - DNA, 15 bp, Homo sapiens
gggagacttcctgga

SEQ ID NO: 1480450 - DNA, 15 bp, Homo sapiens
ggagacttcctggag

SEQ ID NO: 1480451 - DNA, 15 bp, Homo sapiens
gagacttcctggagg

SEQ ID NO: 1480452 - DNA, 15 bp, Homo sapiens
agacttcctggagga

SEQ ID NO: 1480453 - DNA, 15 bp, Homo sapiens
gacttcctggaggag

SEQ ID NO: 1480454 - DNA, 15 bp, Homo sapiens
acttcctggaggagg

SEQ ID NO: 1480455 - DNA, 15 bp, Homo sapiens
cttcctggaggaggc

SEQ ID NO: 1480456 - DNA, 15 bp, Homo sapiens
ttcctggaggaggca

SEQ ID NO: 1480457 - DNA, 15 bp, Homo sapiens
tcctggaggaggcag

SEQ ID NO: 1480458 - DNA, 15 bp, Homo sapiens
cctggaggaggcaga

SEQ ID NO: 1480459 - DNA, 15 bp, Homo sapiens
ctggaggaggcagaa

SEQ ID NO: 1480460 - DNA, 15 bp, Homo sapiens
tggaggaggcagaat

SEQ ID NO: 1480461 - DNA, 15 bp, Homo sapiens
ggaggaggcagaatg

SEQ ID NO: 1480462 - DNA, 15 bp, Homo sapiens
gaggaggcagaatgt

SEQ ID NO: 1480463 - DNA, 15 bp, Homo sapiens
aggaggcagaatgtg

SEQ ID NO: 1480464 - DNA, 15 bp, Homo sapiens
ggaggcagaatgtga

SEQ ID NO: 1480465 - DNA, 15 bp, Homo sapiens
gaggcagaatgtgag

SEQ ID NO: 1480466 - DNA, 15 bp, Homo sapiens
aggcagaatgtgagg

SEQ ID NO: 1480467 - DNA, 15 bp, Homo sapiens
ggcagaatgtgaggt

SEQ ID NO: 1480468 - DNA, 15 bp, Homo sapiens
gcagaatgtgaggtg

SEQ ID NO: 1480469 - DNA, 15 bp, Homo sapiens
cagaatgtgaggtgt

SEQ ID NO: 1480470 - DNA, 15 bp, Homo sapiens
agaatgtgaggtgtt

SEQ ID NO: 1480471 - DNA, 15 bp, Homo sapiens
gaatgtgaggtgttc

SEQ ID NO: 1480472 - DNA, 15 bp, Homo sapiens
aatgtgaggtgttca

SEQ ID NO: 1480473 - DNA, 15 bp, Homo sapiens
atgtgaggtgttcaa

SEQ ID NO: 1480474 - DNA, 15 bp, Homo sapiens
tgtgaggtgttcaac

SEQ ID NO: 1480475 - DNA, 15 bp, Homo sapiens
gtgaggtgttcaaca

SEQ ID NO: 1480476 - DNA, 15 bp, Homo sapiens
tgaggtgttcaacag

SEQ ID NO: 1480477 - DNA, 15 bp, Homo sapiens
gaggtgttcaacagt

SEQ ID NO: 1480478 - DNA, 15 bp, Homo sapiens
aggtgttcaacagtt

SEQ ID NO: 1480479 - DNA, 15 bp, Homo sapiens
ggtgttcaacagttt

SEQ ID NO: 1480480 - DNA, 15 bp, Homo sapiens
gtgttcaacagtttg

SEQ ID NO: 1480481 - DNA, 15 bp, Homo sapiens
tgttcaacagtttgg

SEQ ID NO: 1480482 - DNA, 15 bp, Homo sapiens
gttcaacagtttggt

SEQ ID NO: 1480483 - DNA, 15 bp, Homo sapiens
ttcaacagtttggtg

SEQ ID NO: 1480484 - DNA, 15 bp, Homo sapiens
tcaacagtttggtga

SEQ ID NO: 1480485 - DNA, 15 bp, Homo sapiens
caacagtttggtgaa

SEQ ID NO: 1480486 - DNA, 15 bp, Homo sapiens
aacagtttggtgaat

SEQ ID NO: 1480487 - DNA, 15 bp, Homo sapiens
acagtttggtgaatg

SEQ ID NO: 1480488 - DNA, 15 bp, Homo sapiens
cagtttggtgaatga

SEQ ID NO: 1480489 - DNA, 15 bp, Homo sapiens
agtttggtgaatgaa

SEQ ID NO: 1480490 - DNA, 15 bp, Homo sapiens
gtttggtgaatgaat

SEQ ID NO: 1480491 - DNA, 15 bp, Homo sapiens
tttggtgaatgaatg

SEQ ID NO: 1480492 - DNA, 15 bp, Homo sapiens
ttggtgaatgaatga

SEQ ID NO: 1480493 - DNA, 15 bp, Homo sapiens
tggtgaatgaatgag

SEQ ID NO: 1480494 - DNA, 15 bp, Homo sapiens
ggtgaatgaatgaga

SEQ ID NO: 1480495 - DNA, 15 bp, Homo sapiens
gtgaatgaatgagat

SEQ ID NO: 1480496 - DNA, 15 bp, Homo sapiens
tgaatgaatgagata

SEQ ID NO: 1480497 - DNA, 15 bp, Homo sapiens
gaatgaatgagatat

SEQ ID NO: 1480498 - DNA, 15 bp, Homo sapiens
aatgaatgagatatg

SEQ ID NO: 1480499 - DNA, 15 bp, Homo sapiens
atgaatgagatatga

SEQ ID NO: 1480500 - DNA, 15 bp, Homo sapiens
tgaatgagatatgat

SEQ ID NO: 1480501 - DNA, 15 bp, Homo sapiens
gaatgagatatgatt

SEQ ID NO: 1480502 - DNA, 15 bp, Homo sapiens
aatgagatatgatta

SEQ ID NO: 1480503 - DNA, 15 bp, Homo sapiens
atgagatatgattag

SEQ ID NO: 1480504 - DNA, 15 bp, Homo sapiens
tgagatatgattagg

SEQ ID NO: 1480505 - DNA, 15 bp, Homo sapiens
gagatatgattaggc

SEQ ID NO: 1480506 - DNA, 15 bp, Homo sapiens
agatatgattaggca

SEQ ID NO: 1480507 - DNA, 15 bp, Homo sapiens
gatatgattaggcag

SEQ ID NO: 1480508 - DNA, 15 bp, Homo sapiens
atatgattaggcaga

SEQ ID NO: 1480509 - DNA, 15 bp, Homo sapiens
tatgattaggcagag

SEQ ID NO: 1480510 - DNA, 15 bp, Homo sapiens
atgattaggcagaga

SEQ ID NO: 1480511 - DNA, 15 bp, Homo sapiens
tgattaggcagagaa

SEQ ID NO: 1480512 - DNA, 15 bp, Homo sapiens
gattaggcagagaag

SEQ ID NO: 1480513 - DNA, 15 bp, Homo sapiens
attaggcagagaaga

SEQ ID NO: 1480514 - DNA, 15 bp, Homo sapiens
ttaggcagagaagac

SEQ ID NO: 1480515 - DNA, 15 bp, Homo sapiens
taggcagagaagaca

SEQ ID NO: 1480516 - DNA, 15 bp, Homo sapiens
aggcagagaagacag

SEQ ID NO: 1480517 - DNA, 15 bp, Homo sapiens
ggcagagaagacagg

SEQ ID NO: 1480518 - DNA, 15 bp, Homo sapiens
gcagagaagacaggg

SEQ ID NO: 1480519 - DNA, 15 bp, Homo sapiens
cagagaagacaggga

SEQ ID NO: 1480520 - DNA, 15 bp, Homo sapiens
agagaagacagggag

SEQ ID NO: 1480521 - DNA, 15 bp, Homo sapiens
gagaagacagggagg

SEQ ID NO: 1480522 - DNA, 15 bp, Homo sapiens
agaagacagggaggc

SEQ ID NO: 1480523 - DNA, 15 bp, Homo sapiens
gaagacagggaggca

SEQ ID NO: 1480524 - DNA, 15 bp, Homo sapiens
aagacagggaggcaa

SEQ ID NO: 1480525 - DNA, 15 bp, Homo sapiens
agacagggaggcaat

SEQ ID NO: 1480526 - DNA, 15 bp, Homo sapiens
gacagggaggcaatt

SEQ ID NO: 1480527 - DNA, 15 bp, Homo sapiens
acagggaggcaattc

SEQ ID NO: 1480528 - DNA, 15 bp, Homo sapiens
cagggaggcaattct

SEQ ID NO: 1480529 - DNA, 15 bp, Homo sapiens
agggaggcaattcta

SEQ ID NO: 1480530 - DNA, 15 bp, Homo sapiens
gggaggcaattctat

SEQ ID NO: 1480531 - DNA, 15 bp, Homo sapiens
ggaggcaattctatg

SEQ ID NO: 1480532 - DNA, 15 bp, Homo sapiens
gaggcaattctatgc

SEQ ID NO: 1480533 - DNA, 15 bp, Homo sapiens
aggcaattctatgca

SEQ ID NO: 1480534 - DNA, 15 bp, Homo sapiens
ggcaattctatgcag

SEQ ID NO: 1480535 - DNA, 15 bp, Homo sapiens
gcaattctatgcagg

SEQ ID NO: 1480536 - DNA, 15 bp, Homo sapiens
caattctatgcaggt

SEQ ID NO: 1480537 - DNA, 15 bp, Homo sapiens
aattctatgcaggtg

SEQ ID NO: 1480538 - DNA, 15 bp, Homo sapiens
attctatgcaggtga

SEQ ID NO: 1480539 - DNA, 15 bp, Homo sapiens
ttctatgcaggtgaa

SEQ ID NO: 1480540 - DNA, 15 bp, Homo sapiens
tctatgcaggtgaag

SEQ ID NO: 1480541 - DNA, 15 bp, Homo sapiens
ctatgcaggtgaagc

SEQ ID NO: 1480542 - DNA, 15 bp, Homo sapiens
tatgcaggtgaagct

SEQ ID NO: 1480543 - DNA, 15 bp, Homo sapiens
atgcaggtgaagctg

SEQ ID NO: 1480544 - DNA, 15 bp, Homo sapiens
tgcaggtgaagctgc

SEQ ID NO: 1480545 - DNA, 15 bp, Homo sapiens
gcaggtgaagctgca

SEQ ID NO: 1480546 - DNA, 15 bp, Homo sapiens
caggtgaagctgcat

SEQ ID NO: 1480547 - DNA, 15 bp, Homo sapiens
aggtgaagctgcata

SEQ ID NO: 1480548 - DNA, 15 bp, Homo sapiens
ggtgaagctgcatat

SEQ ID NO: 1480549 - DNA, 15 bp, Homo sapiens
gtgaagctgcatatg

SEQ ID NO: 1480550 - DNA, 15 bp, Homo sapiens
tgaagctgcatatgt

SEQ ID NO: 1480551 - DNA, 15 bp, Homo sapiens
gaagctgcatatgta

SEQ ID NO: 1480552 - DNA, 15 bp, Homo sapiens
aagctgcatatgtat

SEQ ID NO: 1480553 - DNA, 15 bp, Homo sapiens
agctgcatatgtata

SEQ ID NO: 1480554 - DNA, 15 bp, Homo sapiens
gctgcatatgtatat

SEQ ID NO: 1480555 - DNA, 15 bp, Homo sapiens
ctgcatatgtatatt

SEQ ID NO: 1480556 - DNA, 15 bp, Homo sapiens
tgcatatgtatatta

SEQ ID NO: 1480557 - DNA, 15 bp, Homo sapiens
gcatatgtatattaa

SEQ ID NO: 1480558 - DNA, 15 bp, Homo sapiens
catatgtatattaaa

SEQ ID NO: 1480559 - DNA, 15 bp, Homo sapiens
atatgtatattaaat

SEQ ID NO: 1480560 - DNA, 15 bp, Homo sapiens
tatgtatattaaatg

SEQ ID NO: 1480561 - DNA, 15 bp, Homo sapiens
atgtatattaaatgt

SEQ ID NO: 1480562 - DNA, 15 bp, Homo sapiens
tgtatattaaatgta

SEQ ID NO: 1480563 - DNA, 15 bp, Homo sapiens
gtatattaaatgtac

SEQ ID NO: 1480564 - DNA, 15 bp, Homo sapiens
tatattaaatgtaca

SEQ ID NO: 1480565 - DNA, 15 bp, Homo sapiens
atattaaatgtacat

SEQ ID NO: 1480566 - DNA, 15 bp, Homo sapiens
tattaaatgtacatt

SEQ ID NO: 1480567 - DNA, 15 bp, Homo sapiens
attaaatgtacatta

SEQ ID NO: 1480568 - DNA, 15 bp, Homo sapiens
ttaaatgtacattaa

SEQ ID NO: 1480569 - DNA, 15 bp, Homo sapiens
taaatgtacattaaa

SEQ ID NO: 1480570 - DNA, 15 bp, Homo sapiens
aaatgtacattaaat

SEQ ID NO: 1480571 - DNA, 15 bp, Homo sapiens
aatgtacattaaata

SEQ ID NO: 1480572 - DNA, 15 bp, Homo sapiens
atgtacattaaatat

SEQ ID NO: 1480573 - DNA, 15 bp, Homo sapiens
tgtacattaaatatg

SEQ ID NO: 1480574 - DNA, 15 bp, Homo sapiens
gtacattaaatatgc

SEQ ID NO: 1480575 - DNA, 15 bp, Homo sapiens
tacattaaatatgcc

SEQ ID NO: 1480576 - DNA, 15 bp, Homo sapiens
acattaaatatgcct

SEQ ID NO: 1480577 - DNA, 15 bp, Homo sapiens
cattaaatatgcctc

SEQ ID NO: 1480578 - DNA, 15 bp, Homo sapiens
attaaatatgcctcc

SEQ ID NO: 1480579 - DNA, 15 bp, Homo sapiens
ttaaatatgcctcca

SEQ ID NO: 1480580 - DNA, 15 bp, Homo sapiens
taaatatgcctccaa

SEQ ID NO: 1480581 - DNA, 15 bp, Homo sapiens
aaatatgcctccaaa

SEQ ID NO: 1480582 - DNA, 15 bp, Homo sapiens
aatatgcctccaaag

SEQ ID NO: 1480583 - DNA, 15 bp, Homo sapiens
atatgcctccaaagg

SEQ ID NO: 1480584 - DNA, 15 bp, Homo sapiens
tatgcctccaaaggt

SEQ ID NO: 1480585 - DNA, 15 bp, Homo sapiens
atgcctccaaaggtt

SEQ ID NO: 1480586 - DNA, 15 bp, Homo sapiens
tgcctccaaaggtta

SEQ ID NO: 1480587 - DNA, 15 bp, Homo sapiens
gcctccaaaggttaa

SEQ ID NO: 1480588 - DNA, 15 bp, Homo sapiens
cctccaaaggttaag

SEQ ID NO: 1480589 - DNA, 15 bp, Homo sapiens
ctccaaaggttaaga

SEQ ID NO: 1480590 - DNA, 15 bp, Homo sapiens
tccaaaggttaagag

SEQ ID NO: 1480591 - DNA, 15 bp, Homo sapiens
ccaaaggttaagagt

SEQ ID NO: 1480592 - DNA, 15 bp, Homo sapiens
caaaggttaagagtg

SEQ ID NO: 1480593 - DNA, 15 bp, Homo sapiens
aaaggttaagagtgc

SEQ ID NO: 1480594 - DNA, 15 bp, Homo sapiens
aaggttaagagtgca

SEQ ID NO: 1480595 - DNA, 15 bp, Homo sapiens
aggttaagagtgcag

SEQ ID NO: 1480596 - DNA, 15 bp, Homo sapiens
ggttaagagtgcagg

SEQ ID NO: 1480597 - DNA, 15 bp, Homo sapiens
gttaagagtgcaggc

SEQ ID NO: 1480598 - DNA, 15 bp, Homo sapiens
ttaagagtgcaggcg

SEQ ID NO: 1480599 - DNA, 15 bp, Homo sapiens
taagagtgcaggcga

SEQ ID NO: 1480600 - DNA, 15 bp, Homo sapiens
aagagtgcaggcgag

SEQ ID NO: 1480601 - DNA, 15 bp, Homo sapiens
agagtgcaggcgaga

SEQ ID NO: 1480602 - DNA, 15 bp, Homo sapiens
gagtgcaggcgagaa

SEQ ID NO: 1480603 - DNA, 15 bp, Homo sapiens
agtgcaggcgagaaa

SEQ ID NO: 1480604 - DNA, 15 bp, Homo sapiens
gtgcaggcgagaaag

SEQ ID NO: 1480605 - DNA, 15 bp, Homo sapiens
tgcaggcgagaaaga

SEQ ID NO: 1480606 - DNA, 15 bp, Homo sapiens
gcaggcgagaaagag

SEQ ID NO: 1480607 - DNA, 15 bp, Homo sapiens
caggcgagaaagagg

SEQ ID NO: 1480608 - DNA, 15 bp, Homo sapiens
aggcgagaaagaggt

SEQ ID NO: 1480609 - DNA, 15 bp, Homo sapiens
ggcgagaaagaggtg

SEQ ID NO: 1480610 - DNA, 15 bp, Homo sapiens
gcgagaaagaggtgg

SEQ ID NO: 1480611 - DNA, 15 bp, Homo sapiens
cgagaaagaggtggg

SEQ ID NO: 1480612 - DNA, 15 bp, Homo sapiens
gagaaagaggtgggg

SEQ ID NO: 1480613 - DNA, 15 bp, Homo sapiens
agaaagaggtggggg

SEQ ID NO: 1480614 - DNA, 15 bp, Homo sapiens
gaaagaggtggggga

SEQ ID NO: 1480615 - DNA, 15 bp, Homo sapiens
aaagaggtgggggag

SEQ ID NO: 1480616 - DNA, 15 bp, Homo sapiens
aagaggtgggggagt

SEQ ID NO: 1480617 - DNA, 15 bp, Homo sapiens
agaggtgggggagtc

SEQ ID NO: 1480618 - DNA, 15 bp, Homo sapiens
gaggtgggggagtct

SEQ ID NO: 1480619 - DNA, 15 bp, Homo sapiens
aggtgggggagtctt

SEQ ID NO: 1480620 - DNA, 15 bp, Homo sapiens
ggtgggggagtctta

SEQ ID NO: 1480621 - DNA, 15 bp, Homo sapiens
gtgggggagtcttac

SEQ ID NO: 1480622 - DNA, 15 bp, Homo sapiens
tgggggagtcttaca

SEQ ID NO: 1480623 - DNA, 15 bp, Homo sapiens
gggggagtcttacat

SEQ ID NO: 1480624 - DNA, 15 bp, Homo sapiens
ggggagtcttacata

SEQ ID NO: 1480625 - DNA, 15 bp, Homo sapiens
gggagtcttacataa

SEQ ID NO: 1480626 - DNA, 15 bp, Homo sapiens
ggagtcttacataac

SEQ ID NO: 1480627 - DNA, 15 bp, Homo sapiens
gagtcttacataaca

SEQ ID NO: 1480628 - DNA, 15 bp, Homo sapiens
agtcttacataacaa

SEQ ID NO: 1480629 - DNA, 15 bp, Homo sapiens
gtcttacataacaag

SEQ ID NO: 1480630 - DNA, 15 bp, Homo sapiens
tcttacataacaaga

SEQ ID NO: 1480631 - DNA, 15 bp, Homo sapiens
cttacataacaagaa

SEQ ID NO: 1480632 - DNA, 15 bp, Homo sapiens
ttacataacaagaag

SEQ ID NO: 1480633 - DNA, 15 bp, Homo sapiens
tacataacaagaaga

SEQ ID NO: 1480634 - DNA, 15 bp, Homo sapiens
acataacaagaagaa

SEQ ID NO: 1480635 - DNA, 15 bp, Homo sapiens
cataacaagaagaaa

SEQ ID NO: 1480636 - DNA, 15 bp, Homo sapiens
ataacaagaagaaaa

SEQ ID NO: 1480637 - DNA, 15 bp, Homo sapiens
taacaagaagaaaaa

SEQ ID NO: 1480638 - DNA, 15 bp, Homo sapiens
aacaagaagaaaaac

SEQ ID NO: 1480639 - DNA, 15 bp, Homo sapiens
acaagaagaaaaact

SEQ ID NO: 1480640 - DNA, 15 bp, Homo sapiens
caagaagaaaaacta

SEQ ID NO: 1480641 - DNA, 15 bp, Homo sapiens
aagaagaaaaactat

SEQ ID NO: 1480642 - DNA, 15 bp, Homo sapiens
agaagaaaaactatt

SEQ ID NO: 1480643 - DNA, 15 bp, Homo sapiens
gaagaaaaactattt

SEQ ID NO: 1480644 - DNA, 15 bp, Homo sapiens
aagaaaaactatttg

SEQ ID NO: 1480645 - DNA, 15 bp, Homo sapiens
agaaaaactatttga

SEQ ID NO: 1480646 - DNA, 15 bp, Homo sapiens
gaaaaactatttgaa

SEQ ID NO: 1480647 - DNA, 15 bp, Homo sapiens
aaaaactatttgaaa

SEQ ID NO: 1480648 - DNA, 15 bp, Homo sapiens
aaaactatttgaaat

SEQ ID NO: 1480649 - DNA, 15 bp, Homo sapiens
aaactatttgaaata

SEQ ID NO: 1480650 - DNA, 15 bp, Homo sapiens
aactatttgaaatag

SEQ ID NO: 1480651 - DNA, 15 bp, Homo sapiens
actatttgaaatagg

SEQ ID NO: 1480652 - DNA, 15 bp, Homo sapiens
ctatttgaaatagga

SEQ ID NO: 1480653 - DNA, 15 bp, Homo sapiens
tatttgaaataggac

SEQ ID NO: 1480654 - DNA, 15 bp, Homo sapiens
atttgaaataggacc

SEQ ID NO: 1480655 - DNA, 15 bp, Homo sapiens
tttgaaataggacct

SEQ ID NO: 1480656 - DNA, 15 bp, Homo sapiens
ttgaaataggacctt

SEQ ID NO: 1480657 - DNA, 15 bp, Homo sapiens
tgaaataggacctta

SEQ ID NO: 1480658 - DNA, 15 bp, Homo sapiens
gaaataggaccttaa

SEQ ID NO: 1480659 - DNA, 15 bp, Homo sapiens
aaataggaccttaaa

SEQ ID NO: 1480660 - DNA, 15 bp, Homo sapiens
aataggaccttaaaa

SEQ ID NO: 1480661 - DNA, 15 bp, Homo sapiens
ataggaccttaaaat

SEQ ID NO: 1480662 - DNA, 15 bp, Homo sapiens
taggaccttaaaatg

SEQ ID NO: 1480663 - DNA, 15 bp, Homo sapiens
aggaccttaaaatgc

SEQ ID NO: 1480664 - DNA, 15 bp, Homo sapiens
ggaccttaaaatgca

SEQ ID NO: 1480665 - DNA, 15 bp, Homo sapiens
gaccttaaaatgcag

SEQ ID NO: 1480666 - DNA, 15 bp, Homo sapiens
accttaaaatgcagg

SEQ ID NO: 1480667 - DNA, 15 bp, Homo sapiens
ccttaaaatgcagga

SEQ ID NO: 1480668 - DNA, 15 bp, Homo sapiens
cttaaaatgcaggag

SEQ ID NO: 1480669 - DNA, 15 bp, Homo sapiens
ttaaaatgcaggagg

SEQ ID NO: 1480670 - DNA, 15 bp, Homo sapiens
taaaatgcaggaggt

SEQ ID NO: 1480671 - DNA, 15 bp, Homo sapiens
aaaatgcaggaggtt

SEQ ID NO: 1480672 - DNA, 15 bp, Homo sapiens
aaatgcaggaggttg

SEQ ID NO: 1480673 - DNA, 15 bp, Homo sapiens
aatgcaggaggttga

SEQ ID NO: 1480674 - DNA, 15 bp, Homo sapiens
atgcaggaggttgag

SEQ ID NO: 1480675 - DNA, 15 bp, Homo sapiens
tgcaggaggttgagc

SEQ ID NO: 1480676 - DNA, 15 bp, Homo sapiens
gcaggaggttgagca

SEQ ID NO: 1480677 - DNA, 15 bp, Homo sapiens
caggaggttgagcaa

SEQ ID NO: 1480678 - DNA, 15 bp, Homo sapiens
aggaggttgagcaag

SEQ ID NO: 1480679 - DNA, 15 bp, Homo sapiens
ggaggttgagcaaga

SEQ ID NO: 1480680 - DNA, 15 bp, Homo sapiens
gaggttgagcaagaa

SEQ ID NO: 1480681 - DNA, 15 bp, Homo sapiens
aggttgagcaagaaa

SEQ ID NO: 1480682 - DNA, 15 bp, Homo sapiens
ggttgagcaagaaag

SEQ ID NO: 1480683 - DNA, 15 bp, Homo sapiens
gttgagcaagaaaga

SEQ ID NO: 1480684 - DNA, 15 bp, Homo sapiens
ttgagcaagaaagag

SEQ ID NO: 1480685 - DNA, 15 bp, Homo sapiens
tgagcaagaaagaga

SEQ ID NO: 1480686 - DNA, 15 bp, Homo sapiens
gagcaagaaagagaa

SEQ ID NO: 1480687 - DNA, 15 bp, Homo sapiens
agcaagaaagagaag

SEQ ID NO: 1480688 - DNA, 15 bp, Homo sapiens
gcaagaaagagaagg

SEQ ID NO: 1480689 - DNA, 15 bp, Homo sapiens
caagaaagagaaggc

SEQ ID NO: 1480690 - DNA, 15 bp, Homo sapiens
aagaaagagaaggca

SEQ ID NO: 1480691 - DNA, 15 bp, Homo sapiens
agaaagagaaggcat

SEQ ID NO: 1480692 - DNA, 15 bp, Homo sapiens
gaaagagaaggcatg

SEQ ID NO: 1480693 - DNA, 15 bp, Homo sapiens
aaagagaaggcatgg

SEQ ID NO: 1480694 - DNA, 15 bp, Homo sapiens
aagagaaggcatggg

SEQ ID NO: 1480695 - DNA, 15 bp, Homo sapiens
agagaaggcatggga

SEQ ID NO: 1480696 - DNA, 15 bp, Homo sapiens
gagaaggcatgggag

SEQ ID NO: 1480697 - DNA, 15 bp, Homo sapiens
agaaggcatgggagc

SEQ ID NO: 1480698 - DNA, 15 bp, Homo sapiens
gaaggcatgggagca

SEQ ID NO: 1480699 - DNA, 15 bp, Homo sapiens
aaggcatgggagcac

SEQ ID NO: 1480700 - DNA, 15 bp, Homo sapiens
aggcatgggagcaca

SEQ ID NO: 1480701 - DNA, 15 bp, Homo sapiens
ggcatgggagcacag

SEQ ID NO: 1480702 - DNA, 15 bp, Homo sapiens
gcatgggagcacagg

SEQ ID NO: 1480703 - DNA, 15 bp, Homo sapiens
catgggagcacaggg

SEQ ID NO: 1480704 - DNA, 15 bp, Homo sapiens
atgggagcacagggc

SEQ ID NO: 1480705 - DNA, 15 bp, Homo sapiens
tgggagcacagggca

SEQ ID NO: 1480706 - DNA, 15 bp, Homo sapiens
gggagcacagggcag

SEQ ID NO: 1480707 - DNA, 15 bp, Homo sapiens
ggagcacagggcaga

SEQ ID NO: 1480708 - DNA, 15 bp, Homo sapiens
gagcacagggcagaa

SEQ ID NO: 1480709 - DNA, 15 bp, Homo sapiens
agcacagggcagaac

SEQ ID NO: 1480710 - DNA, 15 bp, Homo sapiens
gcacagggcagaaca

SEQ ID NO: 1480711 - DNA, 15 bp, Homo sapiens
cacagggcagaacaa

SEQ ID NO: 1480712 - DNA, 15 bp, Homo sapiens
acagggcagaacaat

SEQ ID NO: 1480713 - DNA, 15 bp, Homo sapiens
cagggcagaacaatt

SEQ ID NO: 1480714 - DNA, 15 bp, Homo sapiens
agggcagaacaattg

SEQ ID NO: 1480715 - DNA, 15 bp, Homo sapiens
gggcagaacaattga

SEQ ID NO: 1480716 - DNA, 15 bp, Homo sapiens
ggcagaacaattgaa

SEQ ID NO: 1480717 - DNA, 15 bp, Homo sapiens
gcagaacaattgaag

SEQ ID NO: 1480718 - DNA, 15 bp, Homo sapiens
cagaacaattgaagg

SEQ ID NO: 1480719 - DNA, 15 bp, Homo sapiens
agaacaattgaaggt

SEQ ID NO: 1480720 - DNA, 15 bp, Homo sapiens
gaacaattgaaggtg

SEQ ID NO: 1480721 - DNA, 15 bp, Homo sapiens
aacaattgaaggtga

SEQ ID NO: 1480722 - DNA, 15 bp, Homo sapiens
acaattgaaggtgac

SEQ ID NO: 1480723 - DNA, 15 bp, Homo sapiens
caattgaaggtgaca

SEQ ID NO: 1480724 - DNA, 15 bp, Homo sapiens
aattgaaggtgacag

SEQ ID NO: 1480725 - DNA, 15 bp, Homo sapiens
attgaaggtgacaga

SEQ ID NO: 1480726 - DNA, 15 bp, Homo sapiens
ttgaaggtgacagag

SEQ ID NO: 1480727 - DNA, 15 bp, Homo sapiens
tgaaggtgacagagg

SEQ ID NO: 1480728 - DNA, 15 bp, Homo sapiens
gaaggtgacagaggg

SEQ ID NO: 1480729 - DNA, 15 bp, Homo sapiens
aaggtgacagaggga

SEQ ID NO: 1480730 - DNA, 15 bp, Homo sapiens
aggtgacagagggaa

SEQ ID NO: 1480731 - DNA, 15 bp, Homo sapiens
ggtgacagagggaaa

SEQ ID NO: 1480732 - DNA, 15 bp, Homo sapiens
gtgacagagggaaaa

SEQ ID NO: 1480733 - DNA, 15 bp, Homo sapiens
tgacagagggaaaat

SEQ ID NO: 1480734 - DNA, 15 bp, Homo sapiens
gacagagggaaaatg

SEQ ID NO: 1480735 - DNA, 15 bp, Homo sapiens
acagagggaaaatga

SEQ ID NO: 1480736 - DNA, 15 bp, Homo sapiens
cagagggaaaatgaa

SEQ ID NO: 1480737 - DNA, 15 bp, Homo sapiens
agagggaaaatgaac

SEQ ID NO: 1480738 - DNA, 15 bp, Homo sapiens
gagggaaaatgaaca

SEQ ID NO: 1480739 - DNA, 15 bp, Homo sapiens
agggaaaatgaacag

SEQ ID NO: 1480740 - DNA, 15 bp, Homo sapiens
gggaaaatgaacaga

SEQ ID NO: 1480741 - DNA, 15 bp, Homo sapiens
ggaaaatgaacagag

SEQ ID NO: 1480742 - DNA, 15 bp, Homo sapiens
gaaaatgaacagaga

SEQ ID NO: 1480743 - DNA, 15 bp, Homo sapiens
aaaatgaacagagaa

SEQ ID NO: 1480744 - DNA, 15 bp, Homo sapiens
aaatgaacagagaac

SEQ ID NO: 1480745 - DNA, 15 bp, Homo sapiens
aatgaacagagaaca

SEQ ID NO: 1480746 - DNA, 15 bp, Homo sapiens
atgaacagagaacac

SEQ ID NO: 1480747 - DNA, 15 bp, Homo sapiens
tgaacagagaacaca

SEQ ID NO: 1480748 - DNA, 15 bp, Homo sapiens
gaacagagaacacaa

SEQ ID NO: 1480749 - DNA, 15 bp, Homo sapiens
aacagagaacacaaa

SEQ ID NO: 1480750 - DNA, 15 bp, Homo sapiens
acagagaacacaaaa

SEQ ID NO: 1480751 - DNA, 15 bp, Homo sapiens
cagagaacacaaaag

SEQ ID NO: 1480752 - DNA, 15 bp, Homo sapiens
agagaacacaaaagg

SEQ ID NO: 1480753 - DNA, 15 bp, Homo sapiens
gagaacacaaaagga

SEQ ID NO: 1480754 - DNA, 15 bp, Homo sapiens
agaacacaaaaggaa

SEQ ID NO: 1480755 - DNA, 15 bp, Homo sapiens
gaacacaaaaggaaa

SEQ ID NO: 1480756 - DNA, 15 bp, Homo sapiens
aacacaaaaggaaag

SEQ ID NO: 1480757 - DNA, 15 bp, Homo sapiens
acacaaaaggaaagg

SEQ ID NO: 1480758 - DNA, 15 bp, Homo sapiens
cacaaaaggaaagga

SEQ ID NO: 1480759 - DNA, 15 bp, Homo sapiens
acaaaaggaaaggag

SEQ ID NO: 1480760 - DNA, 15 bp, Homo sapiens
caaaaggaaaggagg

SEQ ID NO: 1480761 - DNA, 15 bp, Homo sapiens
aaaaggaaaggagga

SEQ ID NO: 1480762 - DNA, 15 bp, Homo sapiens
aaaggaaaggaggag

SEQ ID NO: 1480763 - DNA, 15 bp, Homo sapiens
aaggaaaggaggagc

SEQ ID NO: 1480764 - DNA, 15 bp, Homo sapiens
aggaaaggaggagca

SEQ ID NO: 1480765 - DNA, 15 bp, Homo sapiens
ggaaaggaggagcag

SEQ ID NO: 1480766 - DNA, 15 bp, Homo sapiens
gaaaggaggagcaga

SEQ ID NO: 1480767 - DNA, 15 bp, Homo sapiens
aaaggaggagcagaa

SEQ ID NO: 1480768 - DNA, 15 bp, Homo sapiens
aaggaggagcagaat

SEQ ID NO: 1480769 - DNA, 15 bp, Homo sapiens
aggaggagcagaatg

SEQ ID NO: 1480770 - DNA, 15 bp, Homo sapiens
ggaggagcagaatga

SEQ ID NO: 1480771 - DNA, 15 bp, Homo sapiens
gaggagcagaatgaa

SEQ ID NO: 1480772 - DNA, 15 bp, Homo sapiens
aggagcagaatgaaa

SEQ ID NO: 1480773 - DNA, 15 bp, Homo sapiens
ggagcagaatgaaat

SEQ ID NO: 1480774 - DNA, 15 bp, Homo sapiens
gagcagaatgaaata

SEQ ID NO: 1480775 - DNA, 15 bp, Homo sapiens
agcagaatgaaatag

SEQ ID NO: 1480776 - DNA, 15 bp, Homo sapiens
gcagaatgaaataga

SEQ ID NO: 1480777 - DNA, 15 bp, Homo sapiens
cagaatgaaatagag

SEQ ID NO: 1480778 - DNA, 15 bp, Homo sapiens
agaatgaaatagagc

SEQ ID NO: 1480779 - DNA, 15 bp, Homo sapiens
gaatgaaatagagca

SEQ ID NO: 1480780 - DNA, 15 bp, Homo sapiens
aatgaaatagagcac

SEQ ID NO: 1480781 - DNA, 15 bp, Homo sapiens
atgaaatagagcaca

SEQ ID NO: 1480782 - DNA, 15 bp, Homo sapiens
tgaaatagagcacag

SEQ ID NO: 1480783 - DNA, 15 bp, Homo sapiens
gaaatagagcacagg

SEQ ID NO: 1480784 - DNA, 15 bp, Homo sapiens
aaatagagcacagga

SEQ ID NO: 1480785 - DNA, 15 bp, Homo sapiens
aatagagcacaggaa

SEQ ID NO: 1480786 - DNA, 15 bp, Homo sapiens
atagagcacaggaac

SEQ ID NO: 1480787 - DNA, 15 bp, Homo sapiens
tagagcacaggaact

SEQ ID NO: 1480788 - DNA, 15 bp, Homo sapiens
agagcacaggaactg

SEQ ID NO: 1480789 - DNA, 15 bp, Homo sapiens
gagcacaggaactgc

SEQ ID NO: 1480790 - DNA, 15 bp, Homo sapiens
agcacaggaactgcg

SEQ ID NO: 1480791 - DNA, 15 bp, Homo sapiens
gcacaggaactgcgc

SEQ ID NO: 1480792 - DNA, 15 bp, Homo sapiens
cacaggaactgcgca

SEQ ID NO: 1480793 - DNA, 15 bp, Homo sapiens
acaggaactgcgcag

SEQ ID NO: 1480794 - DNA, 15 bp, Homo sapiens
caggaactgcgcaga

SEQ ID NO: 1480795 - DNA, 15 bp, Homo sapiens
aggaactgcgcagag

SEQ ID NO: 1480796 - DNA, 15 bp, Homo sapiens
ggaactgcgcagaga

SEQ ID NO: 1480797 - DNA, 15 bp, Homo sapiens
gaactgcgcagagac

SEQ ID NO: 1480798 - DNA, 15 bp, Homo sapiens
aactgcgcagagacg

SEQ ID NO: 1480799 - DNA, 15 bp, Homo sapiens
actgcgcagagacgg

SEQ ID NO: 1480800 - DNA, 15 bp, Homo sapiens
ctgcgcagagacggc

SEQ ID NO: 1480801 - DNA, 15 bp, Homo sapiens
tgcgcagagacggcc

SEQ ID NO: 1480802 - DNA, 15 bp, Homo sapiens
gcgcagagacggccc

SEQ ID NO: 1480803 - DNA, 15 bp, Homo sapiens
cgcagagacggccct

SEQ ID NO: 1480804 - DNA, 15 bp, Homo sapiens
gcagagacggccctg

SEQ ID NO: 1480805 - DNA, 15 bp, Homo sapiens
cagagacggccctgg

SEQ ID NO: 1480806 - DNA, 15 bp, Homo sapiens
agagacggccctggc

SEQ ID NO: 1480807 - DNA, 15 bp, Homo sapiens
gagacggccctggct

SEQ ID NO: 1480808 - DNA, 15 bp, Homo sapiens
agacggccctggctg

SEQ ID NO: 1480809 - DNA, 15 bp, Homo sapiens
gacggccctggctgc

SEQ ID NO: 1480810 - DNA, 15 bp, Homo sapiens
acggccctggctgcc

SEQ ID NO: 1480811 - DNA, 15 bp, Homo sapiens
cggccctggctgccg

SEQ ID NO: 1480812 - DNA, 15 bp, Homo sapiens
ggccctggctgccga

SEQ ID NO: 1480813 - DNA, 15 bp, Homo sapiens
gccctggctgccgag

SEQ ID NO: 1480814 - DNA, 15 bp, Homo sapiens
tggctgccgagctct

SEQ ID NO: 1480815 - DNA, 15 bp, Homo sapiens
ggctgccgagctctc

SEQ ID NO: 1480816 - DNA, 15 bp, Homo sapiens
gctgccgagctctcc

SEQ ID NO: 1480817 - DNA, 15 bp, Homo sapiens
ctgccgagctctccc

SEQ ID NO: 1480818 - DNA, 15 bp, Homo sapiens
tgccgagctctccca

SEQ ID NO: 1480819 - DNA, 15 bp, Homo sapiens
gccgagctctcccag

SEQ ID NO: 1480820 - DNA, 15 bp, Homo sapiens
ccgagctctcccaga

SEQ ID NO: 1480821 - DNA, 15 bp, Homo sapiens
cgagctctcccagaa

SEQ ID NO: 1480822 - DNA, 15 bp, Homo sapiens
gagctctcccagaaa

SEQ ID NO: 1480823 - DNA, 15 bp, Homo sapiens
agctctcccagaaaa

SEQ ID NO: 1480824 - DNA, 15 bp, Homo sapiens
gctctcccagaaaat

SEQ ID NO: 1480825 - DNA, 15 bp, Homo sapiens
ctctcccagaaaatg

SEQ ID NO: 1480826 - DNA, 15 bp, Homo sapiens
tctcccagaaaatgg

SEQ ID NO: 1480827 - DNA, 15 bp, Homo sapiens
ctcccagaaaatgga

SEQ ID NO: 1480828 - DNA, 15 bp, Homo sapiens
tcccagaaaatggac

SEQ ID NO: 1480829 - DNA, 15 bp, Homo sapiens
cccagaaaatggacc

SEQ ID NO: 1480830 - DNA, 15 bp, Homo sapiens
ccagaaaatggacct

SEQ ID NO: 1480831 - DNA, 15 bp, Homo sapiens
cagaaaatggacctc

SEQ ID NO: 1480832 - DNA, 15 bp, Homo sapiens
agaaaatggacctcc

SEQ ID NO: 1480833 - DNA, 15 bp, Homo sapiens
gaaaatggacctccc

SEQ ID NO: 1480834 - DNA, 15 bp, Homo sapiens
aaaatggacctcccc

SEQ ID NO: 1480835 - DNA, 15 bp, Homo sapiens
aaatggacctcccca

SEQ ID NO: 1480836 - DNA, 15 bp, Homo sapiens
aatggacctccccag

SEQ ID NO: 1480837 - DNA, 15 bp, Homo sapiens
atggacctccccagg

SEQ ID NO: 1480838 - DNA, 15 bp, Homo sapiens
tggacctccccaggc

SEQ ID NO: 1480839 - DNA, 15 bp, Homo sapiens
ggacctccccaggcc

SEQ ID NO: 1480840 - DNA, 15 bp, Homo sapiens
acctccccaggcccc

SEQ ID NO: 1480841 - DNA, 15 bp, Homo sapiens
cctccccaggcccca

SEQ ID NO: 1480842 - DNA, 15 bp, Homo sapiens
ctccccaggccccac

SEQ ID NO: 1480843 - DNA, 15 bp, Homo sapiens
tccccaggccccacc

SEQ ID NO: 1480844 - DNA, 15 bp, Homo sapiens
ccccaggccccacct

SEQ ID NO: 1480845 - DNA, 15 bp, Homo sapiens
cccaggccccacctc

SEQ ID NO: 1480846 - DNA, 15 bp, Homo sapiens
ccaggccccacctcc

SEQ ID NO: 1480847 - DNA, 15 bp, Homo sapiens
caggccccacctccc

SEQ ID NO: 1480848 - DNA, 15 bp, Homo sapiens
aggccccacctccct

SEQ ID NO: 1480849 - DNA, 15 bp, Homo sapiens
ggccccacctccctc

SEQ ID NO: 1480850 - DNA, 15 bp, Homo sapiens
gccccacctccctcc

SEQ ID NO: 1480851 - DNA, 15 bp, Homo sapiens
ccccacctccctcca

SEQ ID NO: 1480852 - DNA, 15 bp, Homo sapiens
cccacctccctccat

SEQ ID NO: 1480853 - DNA, 15 bp, Homo sapiens
ccacctccctccatc

SEQ ID NO: 1480854 - DNA, 15 bp, Homo sapiens
cacctccctccatca

SEQ ID NO: 1480855 - DNA, 15 bp, Homo sapiens
acctccctccatcac

SEQ ID NO: 1480856 - DNA, 15 bp, Homo sapiens
cctccctccatcact

SEQ ID NO: 1480857 - DNA, 15 bp, Homo sapiens
ctccctccatcactc

SEQ ID NO: 1480858 - DNA, 15 bp, Homo sapiens
tccctccatcactcc

SEQ ID NO: 1480859 - DNA, 15 bp, Homo sapiens
ccctccatcactccc

SEQ ID NO: 1480860 - DNA, 15 bp, Homo sapiens
cctccatcactccca

SEQ ID NO: 1480861 - DNA, 15 bp, Homo sapiens
ctccatcactcccat

SEQ ID NO: 1480862 - DNA, 15 bp, Homo sapiens
tccatcactcccatc

SEQ ID NO: 1480863 - DNA, 15 bp, Homo sapiens
ccatcactcccatcc

SEQ ID NO: 1480864 - DNA, 15 bp, Homo sapiens
catcactcccatcca

SEQ ID NO: 1480865 - DNA, 15 bp, Homo sapiens
atcactcccatccac

SEQ ID NO: 1480866 - DNA, 15 bp, Homo sapiens
tcactcccatccaca

SEQ ID NO: 1480867 - DNA, 15 bp, Homo sapiens
cactcccatccacaa

SEQ ID NO: 1480868 - DNA, 15 bp, Homo sapiens
actcccatccacaag

SEQ ID NO: 1480869 - DNA, 15 bp, Homo sapiens
ctcccatccacaagg

SEQ ID NO: 1480870 - DNA, 15 bp, Homo sapiens
tcccatccacaaggt

SEQ ID NO: 1480871 - DNA, 15 bp, Homo sapiens
cccatccacaaggtt

SEQ ID NO: 1480872 - DNA, 15 bp, Homo sapiens
ccatccacaaggttt

SEQ ID NO: 1480873 - DNA, 15 bp, Homo sapiens
catccacaaggtttc

SEQ ID NO: 1480874 - DNA, 15 bp, Homo sapiens
atccacaaggtttct

SEQ ID NO: 1480875 - DNA, 15 bp, Homo sapiens
tccacaaggtttctg

SEQ ID NO: 1480876 - DNA, 15 bp, Homo sapiens
ccacaaggtttctgc

SEQ ID NO: 1480877 - DNA, 15 bp, Homo sapiens
cacaaggtttctgcc

SEQ ID NO: 1480878 - DNA, 15 bp, Homo sapiens
acaaggtttctgcca

SEQ ID NO: 1480879 - DNA, 15 bp, Homo sapiens
caaggtttctgccac

SEQ ID NO: 1480880 - DNA, 15 bp, Homo sapiens
aaggtttctgccaca

SEQ ID NO: 1480881 - DNA, 15 bp, Homo sapiens
aggtttctgccacat

SEQ ID NO: 1480882 - DNA, 15 bp, Homo sapiens
ggtttctgccacatg

SEQ ID NO: 1480883 - DNA, 15 bp, Homo sapiens
gtttctgccacatgt

SEQ ID NO: 1480884 - DNA, 15 bp, Homo sapiens
tttctgccacatgtc

SEQ ID NO: 1480885 - DNA, 15 bp, Homo sapiens
ttctgccacatgtca

SEQ ID NO: 1480886 - DNA, 15 bp, Homo sapiens
tctgccacatgtcac

SEQ ID NO: 1480887 - DNA, 15 bp, Homo sapiens
ctgccacatgtcaca

SEQ ID NO: 1480888 - DNA, 15 bp, Homo sapiens
tgccacatgtcacag

SEQ ID NO: 1480889 - DNA, 15 bp, Homo sapiens
gccacatgtcacagc

SEQ ID NO: 1480890 - DNA, 15 bp, Homo sapiens
ccacatgtcacagca

SEQ ID NO: 1480891 - DNA, 15 bp, Homo sapiens
cacatgtcacagcaa

SEQ ID NO: 1480892 - DNA, 15 bp, Homo sapiens
acatgtcacagcaac

SEQ ID NO: 1480893 - DNA, 15 bp, Homo sapiens
catgtcacagcaaca

SEQ ID NO: 1480894 - DNA, 15 bp, Homo sapiens
atgtcacagcaacaa

SEQ ID NO: 1480895 - DNA, 15 bp, Homo sapiens
tgtcacagcaacaat

SEQ ID NO: 1480896 - DNA, 15 bp, Homo sapiens
gtcacagcaacaata

SEQ ID NO: 1480897 - DNA, 15 bp, Homo sapiens
tcacagcaacaatat

SEQ ID NO: 1480898 - DNA, 15 bp, Homo sapiens
cacagcaacaatatg

SEQ ID NO: 1480899 - DNA, 15 bp, Homo sapiens
acagcaacaatatgg

SEQ ID NO: 1480900 - DNA, 15 bp, Homo sapiens
cagcaacaatatggt

SEQ ID NO: 1480901 - DNA, 15 bp, Homo sapiens
agcaacaatatggta

SEQ ID NO: 1480902 - DNA, 15 bp, Homo sapiens
gcaacaatatggtaa

SEQ ID NO: 1480903 - DNA, 15 bp, Homo sapiens
caacaatatggtaac

SEQ ID NO: 1480904 - DNA, 15 bp, Homo sapiens
aacaatatggtaacc

SEQ ID NO: 1480905 - DNA, 15 bp, Homo sapiens
acaatatggtaacca

SEQ ID NO: 1480906 - DNA, 15 bp, Homo sapiens
caatatggtaaccat

SEQ ID NO: 1480907 - DNA, 15 bp, Homo sapiens
aatatggtaaccata

SEQ ID NO: 1480908 - DNA, 15 bp, Homo sapiens
atatggtaaccatat

SEQ ID NO: 1480909 - DNA, 15 bp, Homo sapiens
tatggtaaccatatg

SEQ ID NO: 1480910 - DNA, 15 bp, Homo sapiens
atggtaaccatatgc

SEQ ID NO: 1480911 - DNA, 15 bp, Homo sapiens
tggtaaccatatgcc

SEQ ID NO: 1480912 - DNA, 15 bp, Homo sapiens
ggtaaccatatgccc

SEQ ID NO: 1480913 - DNA, 15 bp, Homo sapiens
gtaaccatatgcccc

SEQ ID NO: 1480914 - DNA, 15 bp, Homo sapiens
taaccatatgccccg

SEQ ID NO: 1480915 - DNA, 15 bp, Homo sapiens
aaccatatgccccga

SEQ ID NO: 1480916 - DNA, 15 bp, Homo sapiens
accatatgccccgag

SEQ ID NO: 1480917 - DNA, 15 bp, Homo sapiens
ccatatgccccgagc

SEQ ID NO: 1480918 - DNA, 15 bp, Homo sapiens
catatgccccgagcc

SEQ ID NO: 1480919 - DNA, 15 bp, Homo sapiens
atatgccccgagcca

SEQ ID NO: 1480920 - DNA, 15 bp, Homo sapiens
tatgccccgagccac

SEQ ID NO: 1480921 - DNA, 15 bp, Homo sapiens
atgccccgagccaca

SEQ ID NO: 1480922 - DNA, 15 bp, Homo sapiens
tgccccgagccacaa

SEQ ID NO: 1480923 - DNA, 15 bp, Homo sapiens
gccccgagccacaaa

SEQ ID NO: 1480924 - DNA, 15 bp, Homo sapiens
ccccgagccacaaaa

SEQ ID NO: 1480925 - DNA, 15 bp, Homo sapiens
cccgagccacaaaag

SEQ ID NO: 1480926 - DNA, 15 bp, Homo sapiens
ccgagccacaaaaga

SEQ ID NO: 1480927 - DNA, 15 bp, Homo sapiens
cgagccacaaaagaa

SEQ ID NO: 1480928 - DNA, 15 bp, Homo sapiens
gagccacaaaagaac

SEQ ID NO: 1480929 - DNA, 15 bp, Homo sapiens
agccacaaaagaact

SEQ ID NO: 1480930 - DNA, 15 bp, Homo sapiens
gccacaaaagaacta

SEQ ID NO: 1480931 - DNA, 15 bp, Homo sapiens
ccacaaaagaactaa

SEQ ID NO: 1480932 - DNA, 15 bp, Homo sapiens
cacaaaagaactaaa

SEQ ID NO: 1480933 - DNA, 15 bp, Homo sapiens
acaaaagaactaaac

SEQ ID NO: 1480934 - DNA, 15 bp, Homo sapiens
caaaagaactaaaca

SEQ ID NO: 1480935 - DNA, 15 bp, Homo sapiens
aaaagaactaaacac

SEQ ID NO: 1480936 - DNA, 15 bp, Homo sapiens
aaagaactaaacacc

SEQ ID NO: 1480937 - DNA, 15 bp, Homo sapiens
aagaactaaacacct

SEQ ID NO: 1480938 - DNA, 15 bp, Homo sapiens
agaactaaacacctt

SEQ ID NO: 1480939 - DNA, 15 bp, Homo sapiens
gaactaaacaccttg

SEQ ID NO: 1480940 - DNA, 15 bp, Homo sapiens
aactaaacaccttgg

SEQ ID NO: 1480941 - DNA, 15 bp, Homo sapiens
actaaacaccttgga

SEQ ID NO: 1480942 - DNA, 15 bp, Homo sapiens
ctaaacaccttggac

SEQ ID NO: 1480943 - DNA, 15 bp, Homo sapiens
taaacaccttggaca

SEQ ID NO: 1480944 - DNA, 15 bp, Homo sapiens
aaacaccttggacag

SEQ ID NO: 1480945 - DNA, 15 bp, Homo sapiens
aacaccttggacaga

SEQ ID NO: 1480946 - DNA, 15 bp, Homo sapiens
acaccttggacagag

SEQ ID NO: 1480947 - DNA, 15 bp, Homo sapiens
caccttggacagagc

SEQ ID NO: 1480948 - DNA, 15 bp, Homo sapiens
accttggacagagca

SEQ ID NO: 1480949 - DNA, 15 bp, Homo sapiens
ccttggacagagcag

SEQ ID NO: 1480950 - DNA, 15 bp, Homo sapiens
cttggacagagcagt

SEQ ID NO: 1480951 - DNA, 15 bp, Homo sapiens
ttggacagagcagtt

SEQ ID NO: 1480952 - DNA, 15 bp, Homo sapiens
tggacagagcagttc

SEQ ID NO: 1480953 - DNA, 15 bp, Homo sapiens
ggacagagcagttca

SEQ ID NO: 1480954 - DNA, 15 bp, Homo sapiens
gacagagcagttcac

SEQ ID NO: 1480955 - DNA, 15 bp, Homo sapiens
acagagcagttcacc

SEQ ID NO: 1480956 - DNA, 15 bp, Homo sapiens
cagagcagttcaccc

SEQ ID NO: 1480957 - DNA, 15 bp, Homo sapiens
agagcagttcaccca

SEQ ID NO: 1480958 - DNA, 15 bp, Homo sapiens
gagcagttcacccag

SEQ ID NO: 1480959 - DNA, 15 bp, Homo sapiens
agcagttcacccaga

SEQ ID NO: 1480960 - DNA, 15 bp, Homo sapiens
gcagttcacccagat

SEQ ID NO: 1480961 - DNA, 15 bp, Homo sapiens
cagttcacccagatg

SEQ ID NO: 1480962 - DNA, 15 bp, Homo sapiens
agttcacccagatgt

SEQ ID NO: 1480963 - DNA, 15 bp, Homo sapiens
gttcacccagatgtg

SEQ ID NO: 1480964 - DNA, 15 bp, Homo sapiens
ttcacccagatgtgc

SEQ ID NO: 1480965 - DNA, 15 bp, Homo sapiens
tcacccagatgtgct

SEQ ID NO: 1480966 - DNA, 15 bp, Homo sapiens
cacccagatgtgcta

SEQ ID NO: 1480967 - DNA, 15 bp, Homo sapiens
acccagatgtgctag

SEQ ID NO: 1480968 - DNA, 15 bp, Homo sapiens
cccagatgtgctagt

SEQ ID NO: 1480969 - DNA, 15 bp, Homo sapiens
ccagatgtgctagtt

SEQ ID NO: 1480970 - DNA, 15 bp, Homo sapiens
cagatgtgctagttg

SEQ ID NO: 1480971 - DNA, 15 bp, Homo sapiens
agatgtgctagttgg

SEQ ID NO: 1480972 - DNA, 15 bp, Homo sapiens
gatgtgctagttgga

SEQ ID NO: 1480973 - DNA, 15 bp, Homo sapiens
atgtgctagttggaa

SEQ ID NO: 1480974 - DNA, 15 bp, Homo sapiens
tgtgctagttggaaa

SEQ ID NO: 1480975 - DNA, 15 bp, Homo sapiens
gtgctagttggaaat

SEQ ID NO: 1480976 - DNA, 15 bp, Homo sapiens
tgctagttggaaata

SEQ ID NO: 1480977 - DNA, 15 bp, Homo sapiens
gctagttggaaatac

SEQ ID NO: 1480978 - DNA, 15 bp, Homo sapiens
ctagttggaaatact

SEQ ID NO: 1480979 - DNA, 15 bp, Homo sapiens
tagttggaaatactg

SEQ ID NO: 1480980 - DNA, 15 bp, Homo sapiens
agttggaaatactgc

SEQ ID NO: 1480981 - DNA, 15 bp, Homo sapiens
gttggaaatactgca

SEQ ID NO: 1480982 - DNA, 15 bp, Homo sapiens
ttggaaatactgcac

SEQ ID NO: 1480983 - DNA, 15 bp, Homo sapiens
tggaaatactgcacc

SEQ ID NO: 1480984 - DNA, 15 bp, Homo sapiens
ggaaatactgcaccc

SEQ ID NO: 1480985 - DNA, 15 bp, Homo sapiens
gaaatactgcaccct

SEQ ID NO: 1480986 - DNA, 15 bp, Homo sapiens
aaatactgcaccctc

SEQ ID NO: 1480987 - DNA, 15 bp, Homo sapiens
aatactgcaccctca

SEQ ID NO: 1480988 - DNA, 15 bp, Homo sapiens
atactgcaccctcag

SEQ ID NO: 1480989 - DNA, 15 bp, Homo sapiens
tactgcaccctcagg

SEQ ID NO: 1480990 - DNA, 15 bp, Homo sapiens
actgcaccctcagga

SEQ ID NO: 1480991 - DNA, 15 bp, Homo sapiens
ctgcaccctcaggac

SEQ ID NO: 1480992 - DNA, 15 bp, Homo sapiens
tgcaccctcaggacc

SEQ ID NO: 1480993 - DNA, 15 bp, Homo sapiens
gcaccctcaggacct

SEQ ID NO: 1480994 - DNA, 15 bp, Homo sapiens
caccctcaggacctg

SEQ ID NO: 1480995 - DNA, 15 bp, Homo sapiens
accctcaggacctgc

SEQ ID NO: 1480996 - DNA, 15 bp, Homo sapiens
ccctcaggacctgct

SEQ ID NO: 1480997 - DNA, 15 bp, Homo sapiens
cctcaggacctgctt

SEQ ID NO: 1480998 - DNA, 15 bp, Homo sapiens
ctcaggacctgcttc

SEQ ID NO: 1480999 - DNA, 15 bp, Homo sapiens
tcaggacctgcttcc

SEQ ID NO: 1481000 - DNA, 15 bp, Homo sapiens
caggacctgcttcct

SEQ ID NO: 1481001 - DNA, 15 bp, Homo sapiens
aggacctgcttcctg

SEQ ID NO: 1481002 - DNA, 15 bp, Homo sapiens
ggacctgcttcctga

SEQ ID NO: 1481003 - DNA, 15 bp, Homo sapiens
gacctgcttcctgac

SEQ ID NO: 1481004 - DNA, 15 bp, Homo sapiens
acctgcttcctgact

SEQ ID NO: 1481005 - DNA, 15 bp, Homo sapiens
cctgcttcctgactt

SEQ ID NO: 1481006 - DNA, 15 bp, Homo sapiens
ctgcttcctgacttg

SEQ ID NO: 1481007 - DNA, 15 bp, Homo sapiens
tgcttcctgacttga

SEQ ID NO: 1481008 - DNA, 15 bp, Homo sapiens
gcttcctgacttgat

SEQ ID NO: 1481009 - DNA, 15 bp, Homo sapiens
cttcctgacttgatg

SEQ ID NO: 1481010 - DNA, 15 bp, Homo sapiens
ttcctgacttgatgg

SEQ ID NO: 1481011 - DNA, 15 bp, Homo sapiens
tcctgacttgatggg

SEQ ID NO: 1481012 - DNA, 15 bp, Homo sapiens
cctgacttgatgggc

SEQ ID NO: 1481013 - DNA, 15 bp, Homo sapiens
ctgacttgatgggcc

SEQ ID NO: 1481014 - DNA, 15 bp, Homo sapiens
tgacttgatgggcct

SEQ ID NO: 1481015 - DNA, 15 bp, Homo sapiens
gacttgatgggcctg

SEQ ID NO: 1481016 - DNA, 15 bp, Homo sapiens
acttgatgggcctga

SEQ ID NO: 1481017 - DNA, 15 bp, Homo sapiens
cttgatgggcctgag

SEQ ID NO: 1481018 - DNA, 15 bp, Homo sapiens
ttgatgggcctgagg

SEQ ID NO: 1481019 - DNA, 15 bp, Homo sapiens
tgatgggcctgaggt

SEQ ID NO: 1481020 - DNA, 15 bp, Homo sapiens
gatgggcctgaggtc

SEQ ID NO: 1481021 - DNA, 15 bp, Homo sapiens
atgggcctgaggtca

SEQ ID NO: 1481022 - DNA, 15 bp, Homo sapiens
tgggcctgaggtcac

SEQ ID NO: 1481023 - DNA, 15 bp, Homo sapiens
gggcctgaggtcacc

SEQ ID NO: 1481024 - DNA, 15 bp, Homo sapiens
ggcctgaggtcacca

SEQ ID NO: 1481025 - DNA, 15 bp, Homo sapiens
gcctgaggtcaccaa

SEQ ID NO: 1481026 - DNA, 15 bp, Homo sapiens
cctgaggtcaccaag

SEQ ID NO: 1481027 - DNA, 15 bp, Homo sapiens
ctgaggtcaccaagc

SEQ ID NO: 1481028 - DNA, 15 bp, Homo sapiens
tgaggtcaccaagca

SEQ ID NO: 1481029 - DNA, 15 bp, Homo sapiens
gaggtcaccaagcat

SEQ ID NO: 1481030 - DNA, 15 bp, Homo sapiens
aggtcaccaagcatg

SEQ ID NO: 1481031 - DNA, 15 bp, Homo sapiens
ggtcaccaagcatgg

SEQ ID NO: 1481032 - DNA, 15 bp, Homo sapiens
gtcaccaagcatggc

SEQ ID NO: 1481033 - DNA, 15 bp, Homo sapiens
tcaccaagcatggct

SEQ ID NO: 1481034 - DNA, 15 bp, Homo sapiens
caccaagcatggctc

SEQ ID NO: 1481035 - DNA, 15 bp, Homo sapiens
accaagcatggctca

SEQ ID NO: 1481036 - DNA, 15 bp, Homo sapiens
ccaagcatggctcag

SEQ ID NO: 1481037 - DNA, 15 bp, Homo sapiens
caagcatggctcagc

SEQ ID NO: 1481038 - DNA, 15 bp, Homo sapiens
aagcatggctcagcc

SEQ ID NO: 1481039 - DNA, 15 bp, Homo sapiens
agcatggctcagccg

SEQ ID NO: 1481040 - DNA, 15 bp, Homo sapiens
gcatggctcagccgt

SEQ ID NO: 1481041 - DNA, 15 bp, Homo sapiens
catggctcagccgtg

SEQ ID NO: 1481042 - DNA, 15 bp, Homo sapiens
atggctcagccgtga

SEQ ID NO: 1481043 - DNA, 15 bp, Homo sapiens
tggctcagccgtgaa

SEQ ID NO: 1481044 - DNA, 15 bp, Homo sapiens
ggctcagccgtgaat

SEQ ID NO: 1481045 - DNA, 15 bp, Homo sapiens
gctcagccgtgaatc

SEQ ID NO: 1481046 - DNA, 15 bp, Homo sapiens
ctcagccgtgaatca

SEQ ID NO: 1481047 - DNA, 15 bp, Homo sapiens
tcagccgtgaatcac

SEQ ID NO: 1481048 - DNA, 15 bp, Homo sapiens
cagccgtgaatcacg

SEQ ID NO: 1481049 - DNA, 15 bp, Homo sapiens
agccgtgaatcacgg

SEQ ID NO: 1481050 - DNA, 15 bp, Homo sapiens
gccgtgaatcacgga

SEQ ID NO: 1481051 - DNA, 15 bp, Homo sapiens
ccgtgaatcacggaa

SEQ ID NO: 1481052 - DNA, 15 bp, Homo sapiens
cgtgaatcacggaaa

SEQ ID NO: 1481053 - DNA, 15 bp, Homo sapiens
gtgaatcacggaaaa

SEQ ID NO: 1481054 - DNA, 15 bp, Homo sapiens
tgaatcacggaaaag

SEQ ID NO: 1481055 - DNA, 15 bp, Homo sapiens
gaatcacggaaaaga

SEQ ID NO: 1481056 - DNA, 15 bp, Homo sapiens
aatcacggaaaagaa

SEQ ID NO: 1481057 - DNA, 15 bp, Homo sapiens
atcacggaaaagaag

SEQ ID NO: 1481058 - DNA, 15 bp, Homo sapiens
tcacggaaaagaagc

SEQ ID NO: 1481059 - DNA, 15 bp, Homo sapiens
cacggaaaagaagcg

SEQ ID NO: 1481060 - DNA, 15 bp, Homo sapiens
acggaaaagaagcgg

SEQ ID NO: 1481061 - DNA, 15 bp, Homo sapiens
cggaaaagaagcggc

SEQ ID NO: 1481062 - DNA, 15 bp, Homo sapiens
ggaaaagaagcggcc

SEQ ID NO: 1481063 - DNA, 15 bp, Homo sapiens
gaaaagaagcggcca

SEQ ID NO: 1481064 - DNA, 15 bp, Homo sapiens
aaaagaagcggccat

SEQ ID NO: 1481065 - DNA, 15 bp, Homo sapiens
aaagaagcggccatt

SEQ ID NO: 1481066 - DNA, 15 bp, Homo sapiens
aagaagcggccatta

SEQ ID NO: 1481067 - DNA, 15 bp, Homo sapiens
agaagcggccattaa

SEQ ID NO: 1481068 - DNA, 15 bp, Homo sapiens
gaagcggccattaag

SEQ ID NO: 1481069 - DNA, 15 bp, Homo sapiens
aagcggccattaaga

SEQ ID NO: 1481070 - DNA, 15 bp, Homo sapiens
agcggccattaagag

SEQ ID NO: 1481071 - DNA, 15 bp, Homo sapiens
gcggccattaagagc

SEQ ID NO: 1481072 - DNA, 15 bp, Homo sapiens
cggccattaagagct

SEQ ID NO: 1481073 - DNA, 15 bp, Homo sapiens
ggccattaagagctg

SEQ ID NO: 1481074 - DNA, 15 bp, Homo sapiens
gccattaagagctgg

SEQ ID NO: 1481075 - DNA, 15 bp, Homo sapiens
ccattaagagctgga

SEQ ID NO: 1481076 - DNA, 15 bp, Homo sapiens
cattaagagctggaa

SEQ ID NO: 1481077 - DNA, 15 bp, Homo sapiens
attaagagctggaaa

SEQ ID NO: 1481078 - DNA, 15 bp, Homo sapiens
ttaagagctggaaaa

SEQ ID NO: 1481079 - DNA, 15 bp, Homo sapiens
taagagctggaaaac

SEQ ID NO: 1481080 - DNA, 15 bp, Homo sapiens
aagagctggaaaacg

SEQ ID NO: 1481081 - DNA, 15 bp, Homo sapiens
agagctggaaaacgg

SEQ ID NO: 1481082 - DNA, 15 bp, Homo sapiens
gagctggaaaacgga

SEQ ID NO: 1481083 - DNA, 15 bp, Homo sapiens
agctggaaaacggat

SEQ ID NO: 1481084 - DNA, 15 bp, Homo sapiens
gctggaaaacggatt

SEQ ID NO: 1481085 - DNA, 15 bp, Homo sapiens
ctggaaaacggattc

SEQ ID NO: 1481086 - DNA, 15 bp, Homo sapiens
tggaaaacggattca

SEQ ID NO: 1481087 - DNA, 15 bp, Homo sapiens
ggaaaacggattcag

SEQ ID NO: 1481088 - DNA, 15 bp, Homo sapiens
gaaaacggattcagg

SEQ ID NO: 1481089 - DNA, 15 bp, Homo sapiens
aaaacggattcaggg

SEQ ID NO: 1481090 - DNA, 15 bp, Homo sapiens
aaacggattcagggt

SEQ ID NO: 1481091 - DNA, 15 bp, Homo sapiens
aacggattcagggtc

SEQ ID NO: 1481092 - DNA, 15 bp, Homo sapiens
acggattcagggtct

SEQ ID NO: 1481093 - DNA, 15 bp, Homo sapiens
cggattcagggtctc

SEQ ID NO: 1481094 - DNA, 15 bp, Homo sapiens
ggattcagggtctcc

SEQ ID NO: 1481095 - DNA, 15 bp, Homo sapiens
gattcagggtctccc

SEQ ID NO: 1481096 - DNA, 15 bp, Homo sapiens
attcagggtctcccc

SEQ ID NO: 1481097 - DNA, 15 bp, Homo sapiens
ttcagggtctcccct

SEQ ID NO: 1481098 - DNA, 15 bp, Homo sapiens
tcagggtctcccctg

SEQ ID NO: 1481099 - DNA, 15 bp, Homo sapiens
cagggtctcccctgt

SEQ ID NO: 1481100 - DNA, 15 bp, Homo sapiens
agggtctcccctgtc

SEQ ID NO: 1481101 - DNA, 15 bp, Homo sapiens
gggtctcccctgtcc

SEQ ID NO: 1481102 - DNA, 15 bp, Homo sapiens
ggtctcccctgtccc

SEQ ID NO: 1481103 - DNA, 15 bp, Homo sapiens
gtctcccctgtcccc

SEQ ID NO: 1481104 - DNA, 15 bp, Homo sapiens
tctcccctgtcccca

SEQ ID NO: 1481105 - DNA, 15 bp, Homo sapiens
ctcccctgtccccat

SEQ ID NO: 1481106 - DNA, 15 bp, Homo sapiens
tcccctgtccccatg

SEQ ID NO: 1481107 - DNA, 15 bp, Homo sapiens
cccctgtccccatgc

SEQ ID NO: 1481108 - DNA, 15 bp, Homo sapiens
ccctgtccccatgcc

SEQ ID NO: 1481109 - DNA, 15 bp, Homo sapiens
cctgtccccatgccc

SEQ ID NO: 1481110 - DNA, 15 bp, Homo sapiens
ctgtccccatgccct

SEQ ID NO: 1481111 - DNA, 15 bp, Homo sapiens
tgtccccatgccctg

SEQ ID NO: 1481112 - DNA, 15 bp, Homo sapiens
gtccccatgccctga

SEQ ID NO: 1481113 - DNA, 15 bp, Homo sapiens
tccccatgccctgag

SEQ ID NO: 1481114 - DNA, 15 bp, Homo sapiens
ccccatgccctgaga

SEQ ID NO: 1481115 - DNA, 15 bp, Homo sapiens
cccatgccctgagag

SEQ ID NO: 1481116 - DNA, 15 bp, Homo sapiens
ccatgccctgagagg

SEQ ID NO: 1481117 - DNA, 15 bp, Homo sapiens
catgccctgagagga

SEQ ID NO: 1481118 - DNA, 15 bp, Homo sapiens
atgccctgagaggaa

SEQ ID NO: 1481119 - DNA, 15 bp, Homo sapiens
tgccctgagaggaaa

SEQ ID NO: 1481120 - DNA, 15 bp, Homo sapiens
gccctgagaggaaac

SEQ ID NO: 1481121 - DNA, 15 bp, Homo sapiens
ccctgagaggaaacg

SEQ ID NO: 1481122 - DNA, 15 bp, Homo sapiens
cctgagaggaaacga

SEQ ID NO: 1481123 - DNA, 15 bp, Homo sapiens
ctgagaggaaacgaa

SEQ ID NO: 1481124 - DNA, 15 bp, Homo sapiens
tgagaggaaacgaaa

SEQ ID NO: 1481125 - DNA, 15 bp, Homo sapiens
gagaggaaacgaaat

SEQ ID NO: 1481126 - DNA, 15 bp, Homo sapiens
agaggaaacgaaata

SEQ ID NO: 1481127 - DNA, 15 bp, Homo sapiens
gaggaaacgaaataa

SEQ ID NO: 1481128 - DNA, 15 bp, Homo sapiens
aggaaacgaaataaa

SEQ ID NO: 1481129 - DNA, 15 bp, Homo sapiens
ggaaacgaaataaaa

SEQ ID NO: 1481130 - DNA, 15 bp, Homo sapiens
gaaacgaaataaaat

SEQ ID NO: 1481131 - DNA, 15 bp, Homo sapiens
aaacgaaataaaatg

SEQ ID NO: 1481132 - DNA, 15 bp, Homo sapiens
aacgaaataaaatgg

SEQ ID NO: 1481133 - DNA, 15 bp, Homo sapiens
acgaaataaaatgga

SEQ ID NO: 1481134 - DNA, 15 bp, Homo sapiens
cgaaataaaatggat

SEQ ID NO: 1481135 - DNA, 15 bp, Homo sapiens
gaaataaaatggatg

SEQ ID NO: 1481136 - DNA, 15 bp, Homo sapiens
aaataaaatggatgc

SEQ ID NO: 1481137 - DNA, 15 bp, Homo sapiens
aataaaatggatgca

SEQ ID NO: 1481138 - DNA, 15 bp, Homo sapiens
ataaaatggatgcac

SEQ ID NO: 1481139 - DNA, 15 bp, Homo sapiens
taaaatggatgcacg

SEQ ID NO: 1481140 - DNA, 15 bp, Homo sapiens
aaaatggatgcacgc

SEQ ID NO: 1481141 - DNA, 15 bp, Homo sapiens
aaatggatgcacgcc

SEQ ID NO: 1481142 - DNA, 15 bp, Homo sapiens
aatggatgcacgcct

SEQ ID NO: 1481143 - DNA, 15 bp, Homo sapiens
atggatgcacgcctc

SEQ ID NO: 1481144 - DNA, 15 bp, Homo sapiens
tggatgcacgcctca

SEQ ID NO: 1481145 - DNA, 15 bp, Homo sapiens
ggatgcacgcctcat

SEQ ID NO: 1481146 - DNA, 15 bp, Homo sapiens
gatgcacgcctcatc

SEQ ID NO: 1481147 - DNA, 15 bp, Homo sapiens
atgcacgcctcatct

SEQ ID NO: 1481148 - DNA, 15 bp, Homo sapiens
tgcacgcctcatctg

SEQ ID NO: 1481149 - DNA, 15 bp, Homo sapiens
gcacgcctcatctgt

SEQ ID NO: 1481150 - DNA, 15 bp, Homo sapiens
cacgcctcatctgtg

SEQ ID NO: 1481151 - DNA, 15 bp, Homo sapiens
acgcctcatctgtgc

SEQ ID NO: 1481152 - DNA, 15 bp, Homo sapiens
cgcctcatctgtgcg

SEQ ID NO: 1481153 - DNA, 15 bp, Homo sapiens
gcctcatctgtgcgt

SEQ ID NO: 1481154 - DNA, 15 bp, Homo sapiens
cctcatctgtgcgtc

SEQ ID NO: 1481155 - DNA, 15 bp, Homo sapiens
ctcatctgtgcgtcg

SEQ ID NO: 1481156 - DNA, 15 bp, Homo sapiens
tcatctgtgcgtcga

SEQ ID NO: 1481157 - DNA, 15 bp, Homo sapiens
catctgtgcgtcgag

SEQ ID NO: 1481158 - DNA, 15 bp, Homo sapiens
atctgtgcgtcgagt

SEQ ID NO: 1481159 - DNA, 15 bp, Homo sapiens
tctgtgcgtcgagtt

SEQ ID NO: 1481160 - DNA, 15 bp, Homo sapiens
ctgtgcgtcgagttg

SEQ ID NO: 1481161 - DNA, 15 bp, Homo sapiens
tgtgcgtcgagttga

SEQ ID NO: 1481162 - DNA, 15 bp, Homo sapiens
gtgcgtcgagttgaa

SEQ ID NO: 1481163 - DNA, 15 bp, Homo sapiens
tgcgtcgagttgaag

SEQ ID NO: 1481164 - DNA, 15 bp, Homo sapiens
gcgtcgagttgaagc

SEQ ID NO: 1481165 - DNA, 15 bp, Homo sapiens
cgtcgagttgaagcg

SEQ ID NO: 1481166 - DNA, 15 bp, Homo sapiens
gtcgagttgaagcgg

SEQ ID NO: 1481167 - DNA, 15 bp, Homo sapiens
tcgagttgaagcggc

SEQ ID NO: 1481168 - DNA, 15 bp, Homo sapiens
cgagttgaagcggca

SEQ ID NO: 1481169 - DNA, 15 bp, Homo sapiens
gagttgaagcggcat

SEQ ID NO: 1481170 - DNA, 15 bp, Homo sapiens
agttgaagcggcatt

SEQ ID NO: 1481171 - DNA, 15 bp, Homo sapiens
gttgaagcggcattc

SEQ ID NO: 1481172 - DNA, 15 bp, Homo sapiens
ttgaagcggcattct

SEQ ID NO: 1481173 - DNA, 15 bp, Homo sapiens
tgaagcggcattctt

SEQ ID NO: 1481174 - DNA, 15 bp, Homo sapiens
gaagcggcattcttt

SEQ ID NO: 1481175 - DNA, 15 bp, Homo sapiens
aagcggcattctttt

SEQ ID NO: 1481176 - DNA, 15 bp, Homo sapiens
agcggcattcttttc

SEQ ID NO: 1481177 - DNA, 15 bp, Homo sapiens
gcggcattcttttct

SEQ ID NO: 1481178 - DNA, 15 bp, Homo sapiens
cggcattcttttctg

SEQ ID NO: 1481179 - DNA, 15 bp, Homo sapiens
ggcattcttttctgg

SEQ ID NO: 1481180 - DNA, 15 bp, Homo sapiens
gcattcttttctggc

SEQ ID NO: 1481181 - DNA, 15 bp, Homo sapiens
cattcttttctggct

SEQ ID NO: 1481182 - DNA, 15 bp, Homo sapiens
attcttttctggctg

SEQ ID NO: 1481183 - DNA, 15 bp, Homo sapiens
ttcttttctggctgc

SEQ ID NO: 1481184 - DNA, 15 bp, Homo sapiens
tcttttctggctgct

SEQ ID NO: 1481185 - DNA, 15 bp, Homo sapiens
cttttctggctgctg

SEQ ID NO: 1481186 - DNA, 15 bp, Homo sapiens
ttttctggctgctgc

SEQ ID NO: 1481187 - DNA, 15 bp, Homo sapiens
tttctggctgctgcc

SEQ ID NO: 1481188 - DNA, 15 bp, Homo sapiens
ttctggctgctgcca

SEQ ID NO: 1481189 - DNA, 15 bp, Homo sapiens
tctggctgctgccag

SEQ ID NO: 1481190 - DNA, 15 bp, Homo sapiens
ctggctgctgccagt

SEQ ID NO: 1481191 - DNA, 15 bp, Homo sapiens
tggctgctgccagtc

SEQ ID NO: 1481192 - DNA, 15 bp, Homo sapiens
ggctgctgccagtca

SEQ ID NO: 1481193 - DNA, 15 bp, Homo sapiens
gctgctgccagtcac

SEQ ID NO: 1481194 - DNA, 15 bp, Homo sapiens
ctgctgccagtcaca

SEQ ID NO: 1481195 - DNA, 15 bp, Homo sapiens
tgctgccagtcacac

SEQ ID NO: 1481196 - DNA, 15 bp, Homo sapiens
gctgccagtcacaca

SEQ ID NO: 1481197 - DNA, 15 bp, Homo sapiens
ctgccagtcacacaa

SEQ ID NO: 1481198 - DNA, 15 bp, Homo sapiens
tgccagtcacacaaa

SEQ ID NO: 1481199 - DNA, 15 bp, Homo sapiens
gccagtcacacaaag

SEQ ID NO: 1481200 - DNA, 15 bp, Homo sapiens
ccagtcacacaaagc

SEQ ID NO: 1481201 - DNA, 15 bp, Homo sapiens
cagtcacacaaagcg

SEQ ID NO: 1481202 - DNA, 15 bp, Homo sapiens
agtcacacaaagcgt

SEQ ID NO: 1481203 - DNA, 15 bp, Homo sapiens
gtcacacaaagcgtc

SEQ ID NO: 1481204 - DNA, 15 bp, Homo sapiens
tcacacaaagcgtcc

SEQ ID NO: 1481205 - DNA, 15 bp, Homo sapiens
cacacaaagcgtccc

SEQ ID NO: 1481206 - DNA, 15 bp, Homo sapiens
acacaaagcgtcccg

SEQ ID NO: 1481207 - DNA, 15 bp, Homo sapiens
cacaaagcgtcccgg

SEQ ID NO: 1481208 - DNA, 15 bp, Homo sapiens
acaaagcgtcccggc

SEQ ID NO: 1481209 - DNA, 15 bp, Homo sapiens
caaagcgtcccggct

SEQ ID NO: 1481210 - DNA, 15 bp, Homo sapiens
aaagcgtcccggctt

SEQ ID NO: 1481211 - DNA, 15 bp, Homo sapiens
aagcgtcccggcttg

SEQ ID NO: 1481212 - DNA, 15 bp, Homo sapiens
agcgtcccggcttgt

SEQ ID NO: 1481213 - DNA, 15 bp, Homo sapiens
gcgtcccggcttgtg

SEQ ID NO: 1481214 - DNA, 15 bp, Homo sapiens
cgtcccggcttgtgt

SEQ ID NO: 1481215 - DNA, 15 bp, Homo sapiens
gtcccggcttgtgtg

SEQ ID NO: 1481216 - DNA, 15 bp, Homo sapiens
tcccggcttgtgtgc

SEQ ID NO: 1481217 - DNA, 15 bp, Homo sapiens
cccggcttgtgtgcg

SEQ ID NO: 1481218 - DNA, 15 bp, Homo sapiens
ccggcttgtgtgcgt

SEQ ID NO: 1481219 - DNA, 15 bp, Homo sapiens
cggcttgtgtgcgtg

SEQ ID NO: 1481220 - DNA, 15 bp, Homo sapiens
ggcttgtgtgcgtga

SEQ ID NO: 1481221 - DNA, 15 bp, Homo sapiens
gcttgtgtgcgtgag

SEQ ID NO: 1481222 - DNA, 15 bp, Homo sapiens
cttgtgtgcgtgagg

SEQ ID NO: 1481223 - DNA, 15 bp, Homo sapiens
ttgtgtgcgtgaggc

SEQ ID NO: 1481224 - DNA, 15 bp, Homo sapiens
tgtgtgcgtgaggca

SEQ ID NO: 1481225 - DNA, 15 bp, Homo sapiens
gtgtgcgtgaggcag

SEQ ID NO: 1481226 - DNA, 15 bp, Homo sapiens
tgtgcgtgaggcagg

SEQ ID NO: 1481227 - DNA, 15 bp, Homo sapiens
gtgcgtgaggcagga

SEQ ID NO: 1481228 - DNA, 15 bp, Homo sapiens
tgcgtgaggcaggac

SEQ ID NO: 1481229 - DNA, 15 bp, Homo sapiens
gcgtgaggcaggacg

SEQ ID NO: 1481230 - DNA, 15 bp, Homo sapiens
cgtgaggcaggacgt

SEQ ID NO: 1481231 - DNA, 15 bp, Homo sapiens
gtgaggcaggacgtc

SEQ ID NO: 1481232 - DNA, 15 bp, Homo sapiens
tgaggcaggacgtcc

SEQ ID NO: 1481233 - DNA, 15 bp, Homo sapiens
gaggcaggacgtcct

SEQ ID NO: 1481234 - DNA, 15 bp, Homo sapiens
aggcaggacgtcctt

SEQ ID NO: 1481235 - DNA, 15 bp, Homo sapiens
ggcaggacgtccttg

SEQ ID NO: 1481236 - DNA, 15 bp, Homo sapiens
gcaggacgtccttgc

SEQ ID NO: 1481237 - DNA, 15 bp, Homo sapiens
caggacgtccttgct

SEQ ID NO: 1481238 - DNA, 15 bp, Homo sapiens
aggacgtccttgctt

SEQ ID NO: 1481239 - DNA, 15 bp, Homo sapiens
ggacgtccttgcttc

SEQ ID NO: 1481240 - DNA, 15 bp, Homo sapiens
gacgtccttgcttcg

SEQ ID NO: 1481241 - DNA, 15 bp, Homo sapiens
acgtccttgcttcgc

SEQ ID NO: 1481242 - DNA, 15 bp, Homo sapiens
cgtccttgcttcgca

SEQ ID NO: 1481243 - DNA, 15 bp, Homo sapiens
gtccttgcttcgcaa

SEQ ID NO: 1481244 - DNA, 15 bp, Homo sapiens
tccttgcttcgcaag

SEQ ID NO: 1481245 - DNA, 15 bp, Homo sapiens
ccttgcttcgcaagg

SEQ ID NO: 1481246 - DNA, 15 bp, Homo sapiens
cttgcttcgcaaggc

SEQ ID NO: 1481247 - DNA, 15 bp, Homo sapiens
ttgcttcgcaaggct

SEQ ID NO: 1481248 - DNA, 15 bp, Homo sapiens
tgcttcgcaaggctg

SEQ ID NO: 1481249 - DNA, 15 bp, Homo sapiens
gcttcgcaaggctga

SEQ ID NO: 1481250 - DNA, 15 bp, Homo sapiens
cttcgcaaggctgat

SEQ ID NO: 1481251 - DNA, 15 bp, Homo sapiens
ttcgcaaggctgatt

SEQ ID NO: 1481252 - DNA, 15 bp, Homo sapiens
tcgcaaggctgattt

SEQ ID NO: 1481253 - DNA, 15 bp, Homo sapiens
cgcaaggctgatttt

SEQ ID NO: 1481254 - DNA, 15 bp, Homo sapiens
gcaaggctgattttg

SEQ ID NO: 1481255 - DNA, 15 bp, Homo sapiens
caaggctgattttgc

SEQ ID NO: 1481256 - DNA, 15 bp, Homo sapiens
aaggctgattttgcc

SEQ ID NO: 1481257 - DNA, 15 bp, Homo sapiens
aggctgattttgcct

SEQ ID NO: 1481258 - DNA, 15 bp, Homo sapiens
ggctgattttgcctt

SEQ ID NO: 1481259 - DNA, 15 bp, Homo sapiens
gctgattttgccttc

SEQ ID NO: 1481260 - DNA, 15 bp, Homo sapiens
ctgattttgccttcg

SEQ ID NO: 1481261 - DNA, 15 bp, Homo sapiens
tgattttgccttcgt

SEQ ID NO: 1481262 - DNA, 15 bp, Homo sapiens
gattttgccttcgtc

SEQ ID NO: 1481263 - DNA, 15 bp, Homo sapiens
attttgccttcgtcc

SEQ ID NO: 1481264 - DNA, 15 bp, Homo sapiens
ttttgccttcgtccc

SEQ ID NO: 1481265 - DNA, 15 bp, Homo sapiens
tttgccttcgtcccc

SEQ ID NO: 1481266 - DNA, 15 bp, Homo sapiens
ttgccttcgtccccc

SEQ ID NO: 1481267 - DNA, 15 bp, Homo sapiens
tgccttcgtccccct

SEQ ID NO: 1481268 - DNA, 15 bp, Homo sapiens
gccttcgtccccctg

SEQ ID NO: 1481269 - DNA, 15 bp, Homo sapiens
ccttcgtccccctgc

SEQ ID NO: 1481270 - DNA, 15 bp, Homo sapiens
cttcgtccccctgcc

SEQ ID NO: 1481271 - DNA, 15 bp, Homo sapiens
ttcgtccccctgcca

SEQ ID NO: 1481272 - DNA, 15 bp, Homo sapiens
tcgtccccctgccag

SEQ ID NO: 1481273 - DNA, 15 bp, Homo sapiens
cgtccccctgccagg

SEQ ID NO: 1481274 - DNA, 15 bp, Homo sapiens
gtccccctgccaggc

SEQ ID NO: 1481275 - DNA, 15 bp, Homo sapiens
tccccctgccaggct

SEQ ID NO: 1481276 - DNA, 15 bp, Homo sapiens
ccccctgccaggctg

SEQ ID NO: 1481277 - DNA, 15 bp, Homo sapiens
cccctgccaggctgc

SEQ ID NO: 1481278 - DNA, 15 bp, Homo sapiens
ccctgccaggctgct

SEQ ID NO: 1481279 - DNA, 15 bp, Homo sapiens
cctgccaggctgctc

SEQ ID NO: 1481280 - DNA, 15 bp, Homo sapiens
ctgccaggctgctct

SEQ ID NO: 1481281 - DNA, 15 bp, Homo sapiens
tgccaggctgctctc

SEQ ID NO: 1481282 - DNA, 15 bp, Homo sapiens
gccaggctgctctct

SEQ ID NO: 1481283 - DNA, 15 bp, Homo sapiens
ccaggctgctctctg

SEQ ID NO: 1481284 - DNA, 15 bp, Homo sapiens
caggctgctctctgg

SEQ ID NO: 1481285 - DNA, 15 bp, Homo sapiens
aggctgctctctggg

SEQ ID NO: 1481286 - DNA, 15 bp, Homo sapiens
ggctgctctctgggt

SEQ ID NO: 1481287 - DNA, 15 bp, Homo sapiens
gctgctctctgggtg

SEQ ID NO: 1481288 - DNA, 15 bp, Homo sapiens
ctgctctctgggtgt

SEQ ID NO: 1481289 - DNA, 15 bp, Homo sapiens
tgctctctgggtgtt

SEQ ID NO: 1481290 - DNA, 15 bp, Homo sapiens
gctctctgggtgttg

SEQ ID NO: 1481291 - DNA, 15 bp, Homo sapiens
ctctctgggtgttgc

SEQ ID NO: 1481292 - DNA, 15 bp, Homo sapiens
tctctgggtgttgct

SEQ ID NO: 1481293 - DNA, 15 bp, Homo sapiens
ctctgggtgttgctg

SEQ ID NO: 1481294 - DNA, 15 bp, Homo sapiens
tctgggtgttgctgg

SEQ ID NO: 1481295 - DNA, 15 bp, Homo sapiens
ctgggtgttgctgga

SEQ ID NO: 1481296 - DNA, 15 bp, Homo sapiens
tgggtgttgctggaa

SEQ ID NO: 1481297 - DNA, 15 bp, Homo sapiens
gggtgttgctggaag

SEQ ID NO: 1481298 - DNA, 15 bp, Homo sapiens
ggtgttgctggaagg

SEQ ID NO: 1481299 - DNA, 15 bp, Homo sapiens
gtgttgctggaaggg

SEQ ID NO: 1481300 - DNA, 15 bp, Homo sapiens
tgttgctggaaggga

SEQ ID NO: 1481301 - DNA, 15 bp, Homo sapiens
gttgctggaagggag

SEQ ID NO: 1481302 - DNA, 15 bp, Homo sapiens
ttgctggaagggagt

SEQ ID NO: 1481303 - DNA, 15 bp, Homo sapiens
tgctggaagggagtg

SEQ ID NO: 1481304 - DNA, 15 bp, Homo sapiens
gctggaagggagtga

SEQ ID NO: 1481305 - DNA, 15 bp, Homo sapiens
ctggaagggagtgaa

SEQ ID NO: 1481306 - DNA, 15 bp, Homo sapiens
tggaagggagtgaag

SEQ ID NO: 1481307 - DNA, 15 bp, Homo sapiens
ggaagggagtgaagc

SEQ ID NO: 1481308 - DNA, 15 bp, Homo sapiens
gaagggagtgaagcc

SEQ ID NO: 1481309 - DNA, 15 bp, Homo sapiens
aagggagtgaagccc

SEQ ID NO: 1481310 - DNA, 15 bp, Homo sapiens
agggagtgaagcccc

SEQ ID NO: 1481311 - DNA, 15 bp, Homo sapiens
gggagtgaagccccc

SEQ ID NO: 1481312 - DNA, 15 bp, Homo sapiens
ggagtgaagcccccc

SEQ ID NO: 1481313 - DNA, 15 bp, Homo sapiens
gagtgaagccccccc

SEQ ID NO: 1481314 - DNA, 15 bp, Homo sapiens
agtgaagccccccca

SEQ ID NO: 1481315 - DNA, 15 bp, Homo sapiens
gtgaagcccccccat

SEQ ID NO: 1481316 - DNA, 15 bp, Homo sapiens
tgaagcccccccata

SEQ ID NO: 1481317 - DNA, 15 bp, Homo sapiens
gaagcccccccatat

SEQ ID NO: 1481318 - DNA, 15 bp, Homo sapiens
aagcccccccatatg

SEQ ID NO: 1481319 - DNA, 15 bp, Homo sapiens
agcccccccatatgc

SEQ ID NO: 1481320 - DNA, 15 bp, Homo sapiens
gcccccccatatgca

SEQ ID NO: 1481321 - DNA, 15 bp, Homo sapiens
cccccccatatgcat

SEQ ID NO: 1481322 - DNA, 15 bp, Homo sapiens
ccccccatatgcatg

SEQ ID NO: 1481323 - DNA, 15 bp, Homo sapiens
cccccatatgcatgt

SEQ ID NO: 1481324 - DNA, 15 bp, Homo sapiens
ccccatatgcatgtt

SEQ ID NO: 1481325 - DNA, 15 bp, Homo sapiens
cccatatgcatgttt

SEQ ID NO: 1481326 - DNA, 15 bp, Homo sapiens
ccatatgcatgtttc

SEQ ID NO: 1481327 - DNA, 15 bp, Homo sapiens
catatgcatgtttcc

SEQ ID NO: 1481328 - DNA, 15 bp, Homo sapiens
atatgcatgtttcct

SEQ ID NO: 1481329 - DNA, 15 bp, Homo sapiens
tatgcatgtttcctc

SEQ ID NO: 1481330 - DNA, 15 bp, Homo sapiens
atgcatgtttcctcg

SEQ ID NO: 1481331 - DNA, 15 bp, Homo sapiens
tgcatgtttcctcgt

SEQ ID NO: 1481332 - DNA, 15 bp, Homo sapiens
gcatgtttcctcgtg

SEQ ID NO: 1481333 - DNA, 15 bp, Homo sapiens
catgtttcctcgtgg

SEQ ID NO: 1481334 - DNA, 15 bp, Homo sapiens
atgtttcctcgtggg

SEQ ID NO: 1481335 - DNA, 15 bp, Homo sapiens
tgtttcctcgtgggc

SEQ ID NO: 1481336 - DNA, 15 bp, Homo sapiens
gtttcctcgtgggct

SEQ ID NO: 1481337 - DNA, 15 bp, Homo sapiens
tttcctcgtgggctc

SEQ ID NO: 1481338 - DNA, 15 bp, Homo sapiens
ttcctcgtgggctcc

SEQ ID NO: 1481339 - DNA, 15 bp, Homo sapiens
tcctcgtgggctccc

SEQ ID NO: 1481340 - DNA, 15 bp, Homo sapiens
cctcgtgggctccct

SEQ ID NO: 1481341 - DNA, 15 bp, Homo sapiens
ctcgtgggctccctg

SEQ ID NO: 1481342 - DNA, 15 bp, Homo sapiens
tcgtgggctccctgt

SEQ ID NO: 1481343 - DNA, 15 bp, Homo sapiens
cgtgggctccctgtg

SEQ ID NO: 1481344 - DNA, 15 bp, Homo sapiens
gtgggctccctgtga

SEQ ID NO: 1481345 - DNA, 15 bp, Homo sapiens
tgggctccctgtgat

SEQ ID NO: 1481346 - DNA, 15 bp, Homo sapiens
gggctccctgtgatt

SEQ ID NO: 1481347 - DNA, 15 bp, Homo sapiens
ggctccctgtgattg

SEQ ID NO: 1481348 - DNA, 15 bp, Homo sapiens
gctccctgtgattgt

SEQ ID NO: 1481349 - DNA, 15 bp, Homo sapiens
ctccctgtgattgta

SEQ ID NO: 1481350 - DNA, 15 bp, Homo sapiens
tccctgtgattgtaa

SEQ ID NO: 1481351 - DNA, 15 bp, Homo sapiens
ccctgtgattgtaag

SEQ ID NO: 1481352 - DNA, 15 bp, Homo sapiens
cctgtgattgtaagg

SEQ ID NO: 1481353 - DNA, 15 bp, Homo sapiens
ctgtgattgtaaggg

SEQ ID NO: 1481354 - DNA, 15 bp, Homo sapiens
tgtgattgtaagggc

SEQ ID NO: 1481355 - DNA, 15 bp, Homo sapiens
gtgattgtaagggcc

SEQ ID NO: 1481356 - DNA, 15 bp, Homo sapiens
tgattgtaagggccc

SEQ ID NO: 1481357 - DNA, 15 bp, Homo sapiens
gattgtaagggcccc

SEQ ID NO: 1481358 - DNA, 15 bp, Homo sapiens
attgtaagggccccg

SEQ ID NO: 1481359 - DNA, 15 bp, Homo sapiens
ttgtaagggccccgg

SEQ ID NO: 1481360 - DNA, 15 bp, Homo sapiens
tgtaagggccccggt

SEQ ID NO: 1481361 - DNA, 15 bp, Homo sapiens
gtaagggccccggtt

SEQ ID NO: 1481362 - DNA, 15 bp, Homo sapiens
taagggccccggtta

SEQ ID NO: 1481363 - DNA, 15 bp, Homo sapiens
aagggccccggttac

SEQ ID NO: 1481364 - DNA, 15 bp, Homo sapiens
agggccccggttacc

SEQ ID NO: 1481365 - DNA, 15 bp, Homo sapiens
gggccccggttacca

SEQ ID NO: 1481366 - DNA, 15 bp, Homo sapiens
ggccccggttaccat

SEQ ID NO: 1481367 - DNA, 15 bp, Homo sapiens
gccccggttaccatg

SEQ ID NO: 1481368 - DNA, 15 bp, Homo sapiens
ccccggttaccatgg

SEQ ID NO: 1481369 - DNA, 15 bp, Homo sapiens
cccggttaccatggc

SEQ ID NO: 1481370 - DNA, 15 bp, Homo sapiens
ccggttaccatggca

SEQ ID NO: 1481371 - DNA, 15 bp, Homo sapiens
cggttaccatggcaa

SEQ ID NO: 1481372 - DNA, 15 bp, Homo sapiens
ggttaccatggcaac

SEQ ID NO: 1481373 - DNA, 15 bp, Homo sapiens
gttaccatggcaact

SEQ ID NO: 1481374 - DNA, 15 bp, Homo sapiens
ttaccatggcaactg

SEQ ID NO: 1481375 - DNA, 15 bp, Homo sapiens
taccatggcaactgc

SEQ ID NO: 1481376 - DNA, 15 bp, Homo sapiens
accatggcaactgcc

SEQ ID NO: 1481377 - DNA, 15 bp, Homo sapiens
ccatggcaactgcca

SEQ ID NO: 1481378 - DNA, 15 bp, Homo sapiens
catggcaactgccac

SEQ ID NO: 1481379 - DNA, 15 bp, Homo sapiens
atggcaactgccacg

SEQ ID NO: 1481380 - DNA, 15 bp, Homo sapiens
tggcaactgccacgt

SEQ ID NO: 1481381 - DNA, 15 bp, Homo sapiens
ggcaactgccacgtg

SEQ ID NO: 1481382 - DNA, 15 bp, Homo sapiens
gcaactgccacgtga

SEQ ID NO: 1481383 - DNA, 15 bp, Homo sapiens
caactgccacgtgag

SEQ ID NO: 1481384 - DNA, 15 bp, Homo sapiens
aactgccacgtgagg

SEQ ID NO: 1481385 - DNA, 15 bp, Homo sapiens
actgccacgtgagga

SEQ ID NO: 1481386 - DNA, 15 bp, Homo sapiens
ctgccacgtgaggaa

SEQ ID NO: 1481387 - DNA, 15 bp, Homo sapiens
tgccacgtgaggaaa

SEQ ID NO: 1481388 - DNA, 15 bp, Homo sapiens
gccacgtgaggaaat

SEQ ID NO: 1481389 - DNA, 15 bp, Homo sapiens
ccacgtgaggaaatt

SEQ ID NO: 1481390 - DNA, 15 bp, Homo sapiens
cacgtgaggaaattg

SEQ ID NO: 1481391 - DNA, 15 bp, Homo sapiens
acgtgaggaaattgt

SEQ ID NO: 1481392 - DNA, 15 bp, Homo sapiens
cgtgaggaaattgtc

SEQ ID NO: 1481393 - DNA, 15 bp, Homo sapiens
gtgaggaaattgtcg

SEQ ID NO: 1481394 - DNA, 15 bp, Homo sapiens
tgaggaaattgtcgg

SEQ ID NO: 1481395 - DNA, 15 bp, Homo sapiens
gaggaaattgtcgga

SEQ ID NO: 1481396 - DNA, 15 bp, Homo sapiens
aggaaattgtcggat

SEQ ID NO: 1481397 - DNA, 15 bp, Homo sapiens
ggaaattgtcggata

SEQ ID NO: 1481398 - DNA, 15 bp, Homo sapiens
gaaattgtcggataa

SEQ ID NO: 1481399 - DNA, 15 bp, Homo sapiens
aaattgtcggataag

SEQ ID NO: 1481400 - DNA, 15 bp, Homo sapiens
aattgtcggataaga

SEQ ID NO: 1481401 - DNA, 15 bp, Homo sapiens
attgtcggataagat

SEQ ID NO: 1481402 - DNA, 15 bp, Homo sapiens
ttgtcggataagatc

SEQ ID NO: 1481403 - DNA, 15 bp, Homo sapiens
tgtcggataagatca

SEQ ID NO: 1481404 - DNA, 15 bp, Homo sapiens
gtcggataagatcat

SEQ ID NO: 1481405 - DNA, 15 bp, Homo sapiens
tcggataagatcata

SEQ ID NO: 1481406 - DNA, 15 bp, Homo sapiens
cggataagatcatag

SEQ ID NO: 1481407 - DNA, 15 bp, Homo sapiens
ggataagatcatagc

SEQ ID NO: 1481408 - DNA, 15 bp, Homo sapiens
gataagatcatagct

SEQ ID NO: 1481409 - DNA, 15 bp, Homo sapiens
ataagatcatagctt

SEQ ID NO: 1481410 - DNA, 15 bp, Homo sapiens
taagatcatagcttc

SEQ ID NO: 1481411 - DNA, 15 bp, Homo sapiens
aagatcatagcttct

SEQ ID NO: 1481412 - DNA, 15 bp, Homo sapiens
agatcatagcttcta

SEQ ID NO: 1481413 - DNA, 15 bp, Homo sapiens
gatcatagcttctag

SEQ ID NO: 1481414 - DNA, 15 bp, Homo sapiens
atcatagcttctagg

SEQ ID NO: 1481415 - DNA, 15 bp, Homo sapiens
tcatagcttctagga

SEQ ID NO: 1481416 - DNA, 15 bp, Homo sapiens
catagcttctaggaa

SEQ ID NO: 1481417 - DNA, 15 bp, Homo sapiens
atagcttctaggaat

SEQ ID NO: 1481418 - DNA, 15 bp, Homo sapiens
tagcttctaggaata

SEQ ID NO: 1481419 - DNA, 15 bp, Homo sapiens
agcttctaggaatag

SEQ ID NO: 1481420 - DNA, 15 bp, Homo sapiens
gcttctaggaatagg

SEQ ID NO: 1481421 - DNA, 15 bp, Homo sapiens
cttctaggaatagga

SEQ ID NO: 1481422 - DNA, 15 bp, Homo sapiens
ttctaggaataggac

SEQ ID NO: 1481423 - DNA, 15 bp, Homo sapiens
tctaggaataggacc

SEQ ID NO: 1481424 - DNA, 15 bp, Homo sapiens
ctaggaataggacct

SEQ ID NO: 1481425 - DNA, 15 bp, Homo sapiens
taggaataggacctc

SEQ ID NO: 1481426 - DNA, 15 bp, Homo sapiens
aggaataggacctca

SEQ ID NO: 1481427 - DNA, 15 bp, Homo sapiens
ggaataggacctcaa

SEQ ID NO: 1481428 - DNA, 15 bp, Homo sapiens
gaataggacctcaag

SEQ ID NO: 1481429 - DNA, 15 bp, Homo sapiens
aataggacctcaagt

SEQ ID NO: 1481430 - DNA, 15 bp, Homo sapiens
ataggacctcaagtg

SEQ ID NO: 1481431 - DNA, 15 bp, Homo sapiens
taggacctcaagtgg

SEQ ID NO: 1481432 - DNA, 15 bp, Homo sapiens
aggacctcaagtggt

SEQ ID NO: 1481433 - DNA, 15 bp, Homo sapiens
ggacctcaagtggtt

SEQ ID NO: 1481434 - DNA, 15 bp, Homo sapiens
gacctcaagtggttg

SEQ ID NO: 1481435 - DNA, 15 bp, Homo sapiens
acctcaagtggttgt

SEQ ID NO: 1481436 - DNA, 15 bp, Homo sapiens
cctcaagtggttgtt

SEQ ID NO: 1481437 - DNA, 15 bp, Homo sapiens
ctcaagtggttgttt

SEQ ID NO: 1481438 - DNA, 15 bp, Homo sapiens
tcaagtggttgtttg

SEQ ID NO: 1481439 - DNA, 15 bp, Homo sapiens
caagtggttgtttgg

SEQ ID NO: 1481440 - DNA, 15 bp, Homo sapiens
aagtggttgtttggg

SEQ ID NO: 1481441 - DNA, 15 bp, Homo sapiens
agtggttgtttgggg

SEQ ID NO: 1481442 - DNA, 15 bp, Homo sapiens
gtggttgtttgggga

SEQ ID NO: 1481443 - DNA, 15 bp, Homo sapiens
tggttgtttggggaa

SEQ ID NO: 1481444 - DNA, 15 bp, Homo sapiens
ggttgtttggggaaa

SEQ ID NO: 1481445 - DNA, 15 bp, Homo sapiens
gttgtttggggaaag

SEQ ID NO: 1481446 - DNA, 15 bp, Homo sapiens
ttgtttggggaaagt

SEQ ID NO: 1481447 - DNA, 15 bp, Homo sapiens
tgtttggggaaagtg

SEQ ID NO: 1481448 - DNA, 15 bp, Homo sapiens
gtttggggaaagtgg

SEQ ID NO: 1481449 - DNA, 15 bp, Homo sapiens
tttggggaaagtggt

SEQ ID NO: 1481450 - DNA, 15 bp, Homo sapiens
ttggggaaagtggtc

SEQ ID NO: 1481451 - DNA, 15 bp, Homo sapiens
tggggaaagtggtca

SEQ ID NO: 1481452 - DNA, 15 bp, Homo sapiens
ggggaaagtggtcag

SEQ ID NO: 1481453 - DNA, 15 bp, Homo sapiens
gggaaagtggtcagt

SEQ ID NO: 1481454 - DNA, 15 bp, Homo sapiens
ggaaagtggtcagtg

SEQ ID NO: 1481455 - DNA, 15 bp, Homo sapiens
gaaagtggtcagtgg

SEQ ID NO: 1481456 - DNA, 15 bp, Homo sapiens
aaagtggtcagtggc

SEQ ID NO: 1481457 - DNA, 15 bp, Homo sapiens
aagtggtcagtggct

SEQ ID NO: 1481458 - DNA, 15 bp, Homo sapiens
agtggtcagtggctt

SEQ ID NO: 1481459 - DNA, 15 bp, Homo sapiens
gtggtcagtggcttc

SEQ ID NO: 1481460 - DNA, 15 bp, Homo sapiens
tggtcagtggcttca

SEQ ID NO: 1481461 - DNA, 15 bp, Homo sapiens
ggtcagtggcttcat

SEQ ID NO: 1481462 - DNA, 15 bp, Homo sapiens
gtcagtggcttcatg

SEQ ID NO: 1481463 - DNA, 15 bp, Homo sapiens
tcagtggcttcatgt

SEQ ID NO: 1481464 - DNA, 15 bp, Homo sapiens
cagtggcttcatgtt

SEQ ID NO: 1481465 - DNA, 15 bp, Homo sapiens
agtggcttcatgttt

SEQ ID NO: 1481466 - DNA, 15 bp, Homo sapiens
gtggcttcatgttta

SEQ ID NO: 1481467 - DNA, 15 bp, Homo sapiens
tggcttcatgtttaa

SEQ ID NO: 1481468 - DNA, 15 bp, Homo sapiens
ggcttcatgtttaaa

SEQ ID NO: 1481469 - DNA, 15 bp, Homo sapiens
gcttcatgtttaaat

SEQ ID NO: 1481470 - DNA, 15 bp, Homo sapiens
cttcatgtttaaatt

SEQ ID NO: 1481471 - DNA, 15 bp, Homo sapiens
ttcatgtttaaattt

SEQ ID NO: 1481472 - DNA, 15 bp, Homo sapiens
tcatgtttaaatttg

SEQ ID NO: 1481473 - DNA, 15 bp, Homo sapiens
catgtttaaatttga

SEQ ID NO: 1481474 - DNA, 15 bp, Homo sapiens
atgtttaaatttgaa

SEQ ID NO: 1481475 - DNA, 15 bp, Homo sapiens
tgtttaaatttgaac

SEQ ID NO: 1481476 - DNA, 15 bp, Homo sapiens
gtttaaatttgaaca

SEQ ID NO: 1481477 - DNA, 15 bp, Homo sapiens
tttaaatttgaacaa

SEQ ID NO: 1481478 - DNA, 15 bp, Homo sapiens
ttaaatttgaacaag

SEQ ID NO: 1481479 - DNA, 15 bp, Homo sapiens
taaatttgaacaaga

SEQ ID NO: 1481480 - DNA, 15 bp, Homo sapiens
aaatttgaacaagaa

SEQ ID NO: 1481481 - DNA, 15 bp, Homo sapiens
aatttgaacaagaaa

SEQ ID NO: 1481482 - DNA, 15 bp, Homo sapiens
atttgaacaagaaac

SEQ ID NO: 1481483 - DNA, 15 bp, Homo sapiens
tttgaacaagaaaca

SEQ ID NO: 1481484 - DNA, 15 bp, Homo sapiens
ttgaacaagaaacag

SEQ ID NO: 1481485 - DNA, 15 bp, Homo sapiens
tgaacaagaaacagt

SEQ ID NO: 1481486 - DNA, 15 bp, Homo sapiens
gaacaagaaacagtc

SEQ ID NO: 1481487 - DNA, 15 bp, Homo sapiens
aacaagaaacagtca

SEQ ID NO: 1481488 - DNA, 15 bp, Homo sapiens
acaagaaacagtcac

SEQ ID NO: 1481489 - DNA, 15 bp, Homo sapiens
caagaaacagtcact

SEQ ID NO: 1481490 - DNA, 15 bp, Homo sapiens
aagaaacagtcactg

SEQ ID NO: 1481491 - DNA, 15 bp, Homo sapiens
agaaacagtcactgg

SEQ ID NO: 1481492 - DNA, 15 bp, Homo sapiens
gaaacagtcactggg

SEQ ID NO: 1481493 - DNA, 15 bp, Homo sapiens
aaacagtcactgggt

SEQ ID NO: 1481494 - DNA, 15 bp, Homo sapiens
aacagtcactgggtg

SEQ ID NO: 1481495 - DNA, 15 bp, Homo sapiens
acagtcactgggtgt

SEQ ID NO: 1481496 - DNA, 15 bp, Homo sapiens
cagtcactgggtgtg

SEQ ID NO: 1481497 - DNA, 15 bp, Homo sapiens
agtcactgggtgtgg

SEQ ID NO: 1481498 - DNA, 15 bp, Homo sapiens
gtcactgggtgtggc

SEQ ID NO: 1481499 - DNA, 15 bp, Homo sapiens
tcactgggtgtggct

SEQ ID NO: 1481500 - DNA, 15 bp, Homo sapiens
cactgggtgtggctg

SEQ ID NO: 1481501 - DNA, 15 bp, Homo sapiens
actgggtgtggctgc

SEQ ID NO: 1481502 - DNA, 15 bp, Homo sapiens
ctgggtgtggctgct

SEQ ID NO: 1481503 - DNA, 15 bp, Homo sapiens
tgggtgtggctgctt

SEQ ID NO: 1481504 - DNA, 15 bp, Homo sapiens
gggtgtggctgcttt

SEQ ID NO: 1481505 - DNA, 15 bp, Homo sapiens
ggtgtggctgcttta

SEQ ID NO: 1481506 - DNA, 15 bp, Homo sapiens
gtgtggctgctttaa

SEQ ID NO: 1481507 - DNA, 15 bp, Homo sapiens
tgtggctgctttaaa

SEQ ID NO: 1481508 - DNA, 15 bp, Homo sapiens
gtggctgctttaaaa

SEQ ID NO: 1481509 - DNA, 15 bp, Homo sapiens
tggctgctttaaaag

SEQ ID NO: 1481510 - DNA, 15 bp, Homo sapiens
ggctgctttaaaaga

SEQ ID NO: 1481511 - DNA, 15 bp, Homo sapiens
gctgctttaaaagaa

SEQ ID NO: 1481512 - DNA, 15 bp, Homo sapiens
ctgctttaaaagaaa

SEQ ID NO: 1481513 - DNA, 15 bp, Homo sapiens
tgctttaaaagaaaa

SEQ ID NO: 1481514 - DNA, 15 bp, Homo sapiens
gctttaaaagaaaat

SEQ ID NO: 1481515 - DNA, 15 bp, Homo sapiens
ctttaaaagaaaatt

SEQ ID NO: 1481516 - DNA, 15 bp, Homo sapiens
tttaaaagaaaatta

SEQ ID NO: 1481517 - DNA, 15 bp, Homo sapiens
ttaaaagaaaattag

SEQ ID NO: 1481518 - DNA, 15 bp, Homo sapiens
taaaagaaaattagg

SEQ ID NO: 1481519 - DNA, 15 bp, Homo sapiens
aaaagaaaattaggc

SEQ ID NO: 1481520 - DNA, 15 bp, Homo sapiens
aaagaaaattaggca

SEQ ID NO: 1481521 - DNA, 15 bp, Homo sapiens
aagaaaattaggcaa

SEQ ID NO: 1481522 - DNA, 15 bp, Homo sapiens
agaaaattaggcaag

SEQ ID NO: 1481523 - DNA, 15 bp, Homo sapiens
gaaaattaggcaagc

SEQ ID NO: 1481524 - DNA, 15 bp, Homo sapiens
aaaattaggcaagcc

SEQ ID NO: 1481525 - DNA, 15 bp, Homo sapiens
aaattaggcaagcct

SEQ ID NO: 1481526 - DNA, 15 bp, Homo sapiens
aattaggcaagcctt

SEQ ID NO: 1481527 - DNA, 15 bp, Homo sapiens
attaggcaagccttg

SEQ ID NO: 1481528 - DNA, 15 bp, Homo sapiens
ttaggcaagccttgg

SEQ ID NO: 1481529 - DNA, 15 bp, Homo sapiens
taggcaagccttggg

SEQ ID NO: 1481530 - DNA, 15 bp, Homo sapiens
aggcaagccttgggg

SEQ ID NO: 1481531 - DNA, 15 bp, Homo sapiens
ggcaagccttggggg

SEQ ID NO: 1481532 - DNA, 15 bp, Homo sapiens
gcaagccttggggga

SEQ ID NO: 1481533 - DNA, 15 bp, Homo sapiens
caagccttgggggaa

SEQ ID NO: 1481534 - DNA, 15 bp, Homo sapiens
aagccttgggggaag

SEQ ID NO: 1481535 - DNA, 15 bp, Homo sapiens
agccttgggggaagg

SEQ ID NO: 1481536 - DNA, 15 bp, Homo sapiens
gccttgggggaaggc

SEQ ID NO: 1481537 - DNA, 15 bp, Homo sapiens
ccttgggggaaggct

SEQ ID NO: 1481538 - DNA, 15 bp, Homo sapiens
cttgggggaaggctt

SEQ ID NO: 1481539 - DNA, 15 bp, Homo sapiens
ttgggggaaggcttc

SEQ ID NO: 1481540 - DNA, 15 bp, Homo sapiens
tgggggaaggcttca

SEQ ID NO: 1481541 - DNA, 15 bp, Homo sapiens
gggggaaggcttcat

SEQ ID NO: 1481542 - DNA, 15 bp, Homo sapiens
ggggaaggcttcatc

SEQ ID NO: 1481543 - DNA, 15 bp, Homo sapiens
gggaaggcttcatca

SEQ ID NO: 1481544 - DNA, 15 bp, Homo sapiens
ggaaggcttcatcaa

SEQ ID NO: 1481545 - DNA, 15 bp, Homo sapiens
gaaggcttcatcaaa

SEQ ID NO: 1481546 - DNA, 15 bp, Homo sapiens
aaggcttcatcaaaa

SEQ ID NO: 1481547 - DNA, 15 bp, Homo sapiens
aggcttcatcaaaat

SEQ ID NO: 1481548 - DNA, 15 bp, Homo sapiens
ggcttcatcaaaatt

SEQ ID NO: 1481549 - DNA, 15 bp, Homo sapiens
gcttcatcaaaatta

SEQ ID NO: 1481550 - DNA, 15 bp, Homo sapiens
cttcatcaaaattac

SEQ ID NO: 1481551 - DNA, 15 bp, Homo sapiens
ttcatcaaaattact

SEQ ID NO: 1481552 - DNA, 15 bp, Homo sapiens
tcatcaaaattactc

SEQ ID NO: 1481553 - DNA, 15 bp, Homo sapiens
catcaaaattactca

SEQ ID NO: 1481554 - DNA, 15 bp, Homo sapiens
atcaaaattactcaa

SEQ ID NO: 1481555 - DNA, 15 bp, Homo sapiens
tcaaaattactcaaa

SEQ ID NO: 1481556 - DNA, 15 bp, Homo sapiens
caaaattactcaaag

SEQ ID NO: 1481557 - DNA, 15 bp, Homo sapiens
aaaattactcaaagc

SEQ ID NO: 1481558 - DNA, 15 bp, Homo sapiens
aaattactcaaagcg

SEQ ID NO: 1481559 - DNA, 15 bp, Homo sapiens
aattactcaaagcgc

SEQ ID NO: 1481560 - DNA, 15 bp, Homo sapiens
attactcaaagcgca

SEQ ID NO: 1481561 - DNA, 15 bp, Homo sapiens
ttactcaaagcgcaa

SEQ ID NO: 1481562 - DNA, 15 bp, Homo sapiens
tactcaaagcgcaaa

SEQ ID NO: 1481563 - DNA, 15 bp, Homo sapiens
actcaaagcgcaaag

SEQ ID NO: 1481564 - DNA, 15 bp, Homo sapiens
ctcaaagcgcaaaga

SEQ ID NO: 1481565 - DNA, 15 bp, Homo sapiens
tcaaagcgcaaagat

SEQ ID NO: 1481566 - DNA, 15 bp, Homo sapiens
caaagcgcaaagata

SEQ ID NO: 1481567 - DNA, 15 bp, Homo sapiens
aaagcgcaaagatag

SEQ ID NO: 1481568 - DNA, 15 bp, Homo sapiens
aagcgcaaagataga

SEQ ID NO: 1481569 - DNA, 15 bp, Homo sapiens
agcgcaaagatagaa

SEQ ID NO: 1481570 - DNA, 15 bp, Homo sapiens
gcgcaaagatagaag

SEQ ID NO: 1481571 - DNA, 15 bp, Homo sapiens
cgcaaagatagaagg

SEQ ID NO: 1481572 - DNA, 15 bp, Homo sapiens
gcaaagatagaaggg

SEQ ID NO: 1481573 - DNA, 15 bp, Homo sapiens
caaagatagaagggg

SEQ ID NO: 1481574 - DNA, 15 bp, Homo sapiens
aaagatagaaggggt

SEQ ID NO: 1481575 - DNA, 15 bp, Homo sapiens
aagatagaaggggta

SEQ ID NO: 1481576 - DNA, 15 bp, Homo sapiens
agatagaaggggtag

SEQ ID NO: 1481577 - DNA, 15 bp, Homo sapiens
gatagaaggggtagt

SEQ ID NO: 1481578 - DNA, 15 bp, Homo sapiens
atagaaggggtagtc

SEQ ID NO: 1481579 - DNA, 15 bp, Homo sapiens
tagaaggggtagtct

SEQ ID NO: 1481580 - DNA, 15 bp, Homo sapiens
agaaggggtagtctg

SEQ ID NO: 1481581 - DNA, 15 bp, Homo sapiens
gaaggggtagtctgg

SEQ ID NO: 1481582 - DNA, 15 bp, Homo sapiens
aaggggtagtctggc

SEQ ID NO: 1481583 - DNA, 15 bp, Homo sapiens
aggggtagtctggct

SEQ ID NO: 1481584 - DNA, 15 bp, Homo sapiens
ggggtagtctggctg

SEQ ID NO: 1481585 - DNA, 15 bp, Homo sapiens
gggtagtctggctgg

SEQ ID NO: 1481586 - DNA, 15 bp, Homo sapiens
ggtagtctggctggt

SEQ ID NO: 1481587 - DNA, 15 bp, Homo sapiens
gtagtctggctggtg

SEQ ID NO: 1481588 - DNA, 15 bp, Homo sapiens
tagtctggctggtgt

SEQ ID NO: 1481589 - DNA, 15 bp, Homo sapiens
agtctggctggtgtg

SEQ ID NO: 1481590 - DNA, 15 bp, Homo sapiens
gtctggctggtgtgg

SEQ ID NO: 1481591 - DNA, 15 bp, Homo sapiens
tctggctggtgtgga

SEQ ID NO: 1481592 - DNA, 15 bp, Homo sapiens
ctggctggtgtggag

SEQ ID NO: 1481593 - DNA, 15 bp, Homo sapiens
tggctggtgtggagg

SEQ ID NO: 1481594 - DNA, 15 bp, Homo sapiens
ggctggtgtggaggt

SEQ ID NO: 1481595 - DNA, 15 bp, Homo sapiens
gctggtgtggaggtg

SEQ ID NO: 1481596 - DNA, 15 bp, Homo sapiens
ctggtgtggaggtgt

SEQ ID NO: 1481597 - DNA, 15 bp, Homo sapiens
tggtgtggaggtgtg

SEQ ID NO: 1481598 - DNA, 15 bp, Homo sapiens
ggtgtggaggtgtgg

SEQ ID NO: 1481599 - DNA, 15 bp, Homo sapiens
gtgtggaggtgtggg

SEQ ID NO: 1481600 - DNA, 15 bp, Homo sapiens
tgtggaggtgtgggc

SEQ ID NO: 1481601 - DNA, 15 bp, Homo sapiens
gtggaggtgtgggca

SEQ ID NO: 1481602 - DNA, 15 bp, Homo sapiens
tggaggtgtgggcag

SEQ ID NO: 1481603 - DNA, 15 bp, Homo sapiens
ggaggtgtgggcagg

SEQ ID NO: 1481604 - DNA, 15 bp, Homo sapiens
gaggtgtgggcaggc

SEQ ID NO: 1481605 - DNA, 15 bp, Homo sapiens
aggtgtgggcaggca

SEQ ID NO: 1481606 - DNA, 15 bp, Homo sapiens
ggtgtgggcaggcag

SEQ ID NO: 1481607 - DNA, 15 bp, Homo sapiens
gtgtgggcaggcagg

SEQ ID NO: 1481608 - DNA, 15 bp, Homo sapiens
tgtgggcaggcaggg

SEQ ID NO: 1481609 - DNA, 15 bp, Homo sapiens
gtgggcaggcaggga

SEQ ID NO: 1481610 - DNA, 15 bp, Homo sapiens
tgggcaggcagggag

SEQ ID NO: 1481611 - DNA, 15 bp, Homo sapiens
ggcaggcagggaggg

SEQ ID NO: 1481612 - DNA, 15 bp, Homo sapiens
gcaggcagggagggt

SEQ ID NO: 1481613 - DNA, 15 bp, Homo sapiens
caggcagggagggtt

SEQ ID NO: 1481614 - DNA, 15 bp, Homo sapiens
aggcagggagggttt

SEQ ID NO: 1481615 - DNA, 15 bp, Homo sapiens
ggcagggagggtttg

SEQ ID NO: 1481616 - DNA, 15 bp, Homo sapiens
gcagggagggtttgc

SEQ ID NO: 1481617 - DNA, 15 bp, Homo sapiens
cagggagggtttgca

SEQ ID NO: 1481618 - DNA, 15 bp, Homo sapiens
agggagggtttgcat

SEQ ID NO: 1481619 - DNA, 15 bp, Homo sapiens
gggagggtttgcatt

SEQ ID NO: 1481620 - DNA, 15 bp, Homo sapiens
ggagggtttgcattt

SEQ ID NO: 1481621 - DNA, 15 bp, Homo sapiens
gagggtttgcatttc

SEQ ID NO: 1481622 - DNA, 15 bp, Homo sapiens
agggtttgcatttcc

SEQ ID NO: 1481623 - DNA, 15 bp, Homo sapiens
gggtttgcatttccc

SEQ ID NO: 1481624 - DNA, 15 bp, Homo sapiens
ggtttgcatttccca

SEQ ID NO: 1481625 - DNA, 15 bp, Homo sapiens
gtttgcatttcccat

SEQ ID NO: 1481626 - DNA, 15 bp, Homo sapiens
tttgcatttcccatc

SEQ ID NO: 1481627 - DNA, 15 bp, Homo sapiens
ttgcatttcccatcg

SEQ ID NO: 1481628 - DNA, 15 bp, Homo sapiens
tgcatttcccatcgg

SEQ ID NO: 1481629 - DNA, 15 bp, Homo sapiens
gcatttcccatcggg

SEQ ID NO: 1481630 - DNA, 15 bp, Homo sapiens
catttcccatcgggc

SEQ ID NO: 1481631 - DNA, 15 bp, Homo sapiens
atttcccatcgggcg

SEQ ID NO: 1481632 - DNA, 15 bp, Homo sapiens
tttcccatcgggcgc

SEQ ID NO: 1481633 - DNA, 15 bp, Homo sapiens
ttcccatcgggcgct

SEQ ID NO: 1481634 - DNA, 15 bp, Homo sapiens
tcccatcgggcgctg

SEQ ID NO: 1481635 - DNA, 15 bp, Homo sapiens
cccatcgggcgctga

SEQ ID NO: 1481636 - DNA, 15 bp, Homo sapiens
ccatcgggcgctgag

SEQ ID NO: 1481637 - DNA, 15 bp, Homo sapiens
catcgggcgctgagg

SEQ ID NO: 1481638 - DNA, 15 bp, Homo sapiens
atcgggcgctgaggt

SEQ ID NO: 1481639 - DNA, 15 bp, Homo sapiens
tcgggcgctgaggtt

SEQ ID NO: 1481640 - DNA, 15 bp, Homo sapiens
cgggcgctgaggttt

SEQ ID NO: 1481641 - DNA, 15 bp, Homo sapiens
gggcgctgaggtttt

SEQ ID NO: 1481642 - DNA, 15 bp, Homo sapiens
ggcgctgaggttttt

SEQ ID NO: 1481643 - DNA, 15 bp, Homo sapiens
gcgctgaggttttta

SEQ ID NO: 1481644 - DNA, 15 bp, Homo sapiens
cgctgaggtttttat

SEQ ID NO: 1481645 - DNA, 15 bp, Homo sapiens
gctgaggtttttatt

SEQ ID NO: 1481646 - DNA, 15 bp, Homo sapiens
ctgaggtttttattt

SEQ ID NO: 1481647 - DNA, 15 bp, Homo sapiens
tgaggtttttattta

SEQ ID NO: 1481648 - DNA, 15 bp, Homo sapiens
gaggtttttatttaa

SEQ ID NO: 1481649 - DNA, 15 bp, Homo sapiens
aggtttttatttaac

SEQ ID NO: 1481650 - DNA, 15 bp, Homo sapiens
ggtttttatttaact

SEQ ID NO: 1481651 - DNA, 15 bp, Homo sapiens
gtttttatttaactt

SEQ ID NO: 1481652 - DNA, 15 bp, Homo sapiens
tttttatttaactta

SEQ ID NO: 1481653 - DNA, 15 bp, Homo sapiens
ttttatttaacttaa

SEQ ID NO: 1481654 - DNA, 15 bp, Homo sapiens
tttatttaacttaat

SEQ ID NO: 1481655 - DNA, 15 bp, Homo sapiens
ttatttaacttaatt

SEQ ID NO: 1481656 - DNA, 15 bp, Homo sapiens
tatttaacttaattc

SEQ ID NO: 1481657 - DNA, 15 bp, Homo sapiens
atttaacttaattca

SEQ ID NO: 1481658 - DNA, 15 bp, Homo sapiens
tttaacttaattcat

SEQ ID NO: 1481659 - DNA, 15 bp, Homo sapiens
ttaacttaattcatt

SEQ ID NO: 1481660 - DNA, 15 bp, Homo sapiens
taacttaattcattg

SEQ ID NO: 1481661 - DNA, 15 bp, Homo sapiens
aacttaattcattgc

SEQ ID NO: 1481662 - DNA, 15 bp, Homo sapiens
acttaattcattgca

SEQ ID NO: 1481663 - DNA, 15 bp, Homo sapiens
cttaattcattgcac

SEQ ID NO: 1481664 - DNA, 15 bp, Homo sapiens
ttaattcattgcaca

SEQ ID NO: 1481665 - DNA, 15 bp, Homo sapiens
taattcattgcacac

SEQ ID NO: 1481666 - DNA, 15 bp, Homo sapiens
aattcattgcacact

SEQ ID NO: 1481667 - DNA, 15 bp, Homo sapiens
attcattgcacactt

SEQ ID NO: 1481668 - DNA, 15 bp, Homo sapiens
ttcattgcacacttc

SEQ ID NO: 1481669 - DNA, 15 bp, Homo sapiens
tcattgcacacttct

SEQ ID NO: 1481670 - DNA, 15 bp, Homo sapiens
cattgcacacttctt

SEQ ID NO: 1481671 - DNA, 15 bp, Homo sapiens
attgcacacttctta

SEQ ID NO: 1481672 - DNA, 15 bp, Homo sapiens
ttgcacacttcttag

SEQ ID NO: 1481673 - DNA, 15 bp, Homo sapiens
tgcacacttcttagg

SEQ ID NO: 1481674 - DNA, 15 bp, Homo sapiens
gcacacttcttaggt

SEQ ID NO: 1481675 - DNA, 15 bp, Homo sapiens
cacacttcttaggtg

SEQ ID NO: 1481676 - DNA, 15 bp, Homo sapiens
acacttcttaggtgc

SEQ ID NO: 1481677 - DNA, 15 bp, Homo sapiens
cacttcttaggtgcc

SEQ ID NO: 1481678 - DNA, 15 bp, Homo sapiens
acttcttaggtgcca

SEQ ID NO: 1481679 - DNA, 15 bp, Homo sapiens
cttcttaggtgccag

SEQ ID NO: 1481680 - DNA, 15 bp, Homo sapiens
ttcttaggtgccagg

SEQ ID NO: 1481681 - DNA, 15 bp, Homo sapiens
tcttaggtgccagga

SEQ ID NO: 1481682 - DNA, 15 bp, Homo sapiens
cttaggtgccaggaa

SEQ ID NO: 1481683 - DNA, 15 bp, Homo sapiens
ttaggtgccaggaag

SEQ ID NO: 1481684 - DNA, 15 bp, Homo sapiens
taggtgccaggaagt

SEQ ID NO: 1481685 - DNA, 15 bp, Homo sapiens
aggtgccaggaagtg

SEQ ID NO: 1481686 - DNA, 15 bp, Homo sapiens
ggtgccaggaagtgt

SEQ ID NO: 1481687 - DNA, 15 bp, Homo sapiens
gtgccaggaagtgtg

SEQ ID NO: 1481688 - DNA, 15 bp, Homo sapiens
tgccaggaagtgtgc

SEQ ID NO: 1481689 - DNA, 15 bp, Homo sapiens
gccaggaagtgtgcc

SEQ ID NO: 1481690 - DNA, 15 bp, Homo sapiens
ccaggaagtgtgcca

SEQ ID NO: 1481691 - DNA, 15 bp, Homo sapiens
caggaagtgtgccaa

SEQ ID NO: 1481692 - DNA, 15 bp, Homo sapiens
aggaagtgtgccaac

SEQ ID NO: 1481693 - DNA, 15 bp, Homo sapiens
ggaagtgtgccaaca

SEQ ID NO: 1481694 - DNA, 15 bp, Homo sapiens
gaagtgtgccaacaa

SEQ ID NO: 1481695 - DNA, 15 bp, Homo sapiens
aagtgtgccaacaac

SEQ ID NO: 1481696 - DNA, 15 bp, Homo sapiens
agtgtgccaacaact

SEQ ID NO: 1481697 - DNA, 15 bp, Homo sapiens
gtgtgccaacaactg

SEQ ID NO: 1481698 - DNA, 15 bp, Homo sapiens
tgtgccaacaactgg

SEQ ID NO: 1481699 - DNA, 15 bp, Homo sapiens
gtgccaacaactggg

SEQ ID NO: 1481700 - DNA, 15 bp, Homo sapiens
tgccaacaactgggg

SEQ ID NO: 1481701 - DNA, 15 bp, Homo sapiens
gccaacaactgggga

SEQ ID NO: 1481702 - DNA, 15 bp, Homo sapiens
ccaacaactggggat

SEQ ID NO: 1481703 - DNA, 15 bp, Homo sapiens
caacaactggggatg

SEQ ID NO: 1481704 - DNA, 15 bp, Homo sapiens
aacaactggggatga

SEQ ID NO: 1481705 - DNA, 15 bp, Homo sapiens
acaactggggatgaa

SEQ ID NO: 1481706 - DNA, 15 bp, Homo sapiens
caactggggatgaaa

SEQ ID NO: 1481707 - DNA, 15 bp, Homo sapiens
aactggggatgaaaa

SEQ ID NO: 1481708 - DNA, 15 bp, Homo sapiens
actggggatgaaaac

SEQ ID NO: 1481709 - DNA, 15 bp, Homo sapiens
ctggggatgaaaacc

SEQ ID NO: 1481710 - DNA, 15 bp, Homo sapiens
tggggatgaaaacca

SEQ ID NO: 1481711 - DNA, 15 bp, Homo sapiens
ggggatgaaaaccag

SEQ ID NO: 1481712 - DNA, 15 bp, Homo sapiens
gggatgaaaaccagg

SEQ ID NO: 1481713 - DNA, 15 bp, Homo sapiens
ggatgaaaaccagga

SEQ ID NO: 1481714 - DNA, 15 bp, Homo sapiens
gatgaaaaccaggaa

SEQ ID NO: 1481715 - DNA, 15 bp, Homo sapiens
atgaaaaccaggaat

SEQ ID NO: 1481716 - DNA, 15 bp, Homo sapiens
tgaaaaccaggaatc

SEQ ID NO: 1481717 - DNA, 15 bp, Homo sapiens
gaaaaccaggaatca

SEQ ID NO: 1481718 - DNA, 15 bp, Homo sapiens
aaaaccaggaatcag

SEQ ID NO: 1481719 - DNA, 15 bp, Homo sapiens
aaaccaggaatcaga

SEQ ID NO: 1481720 - DNA, 15 bp, Homo sapiens
aaccaggaatcagac

SEQ ID NO: 1481721 - DNA, 15 bp, Homo sapiens
accaggaatcagact

SEQ ID NO: 1481722 - DNA, 15 bp, Homo sapiens
ccaggaatcagactg

SEQ ID NO: 1481723 - DNA, 15 bp, Homo sapiens
caggaatcagactga

SEQ ID NO: 1481724 - DNA, 15 bp, Homo sapiens
aggaatcagactgat

SEQ ID NO: 1481725 - DNA, 15 bp, Homo sapiens
ggaatcagactgatg

SEQ ID NO: 1481726 - DNA, 15 bp, Homo sapiens
gaatcagactgatga

SEQ ID NO: 1481727 - DNA, 15 bp, Homo sapiens
aatcagactgatgag

SEQ ID NO: 1481728 - DNA, 15 bp, Homo sapiens
atcagactgatgagg

SEQ ID NO: 1481729 - DNA, 15 bp, Homo sapiens
tcagactgatgaggt

SEQ ID NO: 1481730 - DNA, 15 bp, Homo sapiens
cagactgatgaggtt

SEQ ID NO: 1481731 - DNA, 15 bp, Homo sapiens
agactgatgaggttc

SEQ ID NO: 1481732 - DNA, 15 bp, Homo sapiens
gactgatgaggttct

SEQ ID NO: 1481733 - DNA, 15 bp, Homo sapiens
actgatgaggttctt

SEQ ID NO: 1481734 - DNA, 15 bp, Homo sapiens
ctgatgaggttcttc

SEQ ID NO: 1481735 - DNA, 15 bp, Homo sapiens
tgatgaggttcttct

SEQ ID NO: 1481736 - DNA, 15 bp, Homo sapiens
gatgaggttcttctc

SEQ ID NO: 1481737 - DNA, 15 bp, Homo sapiens
atgaggttcttctct

SEQ ID NO: 1481738 - DNA, 15 bp, Homo sapiens
tgaggttcttctctt

SEQ ID NO: 1481739 - DNA, 15 bp, Homo sapiens
gaggttcttctcttc

SEQ ID NO: 1481740 - DNA, 15 bp, Homo sapiens
aggttcttctcttca

SEQ ID NO: 1481741 - DNA, 15 bp, Homo sapiens
ggttcttctcttcag

SEQ ID NO: 1481742 - DNA, 15 bp, Homo sapiens
gttcttctcttcagg

SEQ ID NO: 1481743 - DNA, 15 bp, Homo sapiens
ttcttctcttcaggg

SEQ ID NO: 1481744 - DNA, 15 bp, Homo sapiens
tcttctcttcagggt

SEQ ID NO: 1481745 - DNA, 15 bp, Homo sapiens
cttctcttcagggtg

SEQ ID NO: 1481746 - DNA, 15 bp, Homo sapiens
ttctcttcagggtgc

SEQ ID NO: 1481747 - DNA, 15 bp, Homo sapiens
tctcttcagggtgcc

SEQ ID NO: 1481748 - DNA, 15 bp, Homo sapiens
ctcttcagggtgcct

SEQ ID NO: 1481749 - DNA, 15 bp, Homo sapiens
tcttcagggtgccta

SEQ ID NO: 1481750 - DNA, 15 bp, Homo sapiens
cttcagggtgcctaa

SEQ ID NO: 1481751 - DNA, 15 bp, Homo sapiens
ttcagggtgcctaac

SEQ ID NO: 1481752 - DNA, 15 bp, Homo sapiens
tcagggtgcctaact

SEQ ID NO: 1481753 - DNA, 15 bp, Homo sapiens
cagggtgcctaacta

SEQ ID NO: 1481754 - DNA, 15 bp, Homo sapiens
agggtgcctaactag

SEQ ID NO: 1481755 - DNA, 15 bp, Homo sapiens
gggtgcctaactaga

SEQ ID NO: 1481756 - DNA, 15 bp, Homo sapiens
ggtgcctaactagaa

SEQ ID NO: 1481757 - DNA, 15 bp, Homo sapiens
gtgcctaactagaat

SEQ ID NO: 1481758 - DNA, 15 bp, Homo sapiens
tgcctaactagaatt

SEQ ID NO: 1481759 - DNA, 15 bp, Homo sapiens
gcctaactagaattt

SEQ ID NO: 1481760 - DNA, 15 bp, Homo sapiens
cctaactagaatttg

SEQ ID NO: 1481761 - DNA, 15 bp, Homo sapiens
ctaactagaatttgt

SEQ ID NO: 1481762 - DNA, 15 bp, Homo sapiens
taactagaatttgtc

SEQ ID NO: 1481763 - DNA, 15 bp, Homo sapiens
aactagaatttgtcc

SEQ ID NO: 1481764 - DNA, 15 bp, Homo sapiens
actagaatttgtcct

SEQ ID NO: 1481765 - DNA, 15 bp, Homo sapiens
ctagaatttgtcctc

SEQ ID NO: 1481766 - DNA, 15 bp, Homo sapiens
tagaatttgtcctcg

SEQ ID NO: 1481767 - DNA, 15 bp, Homo sapiens
agaatttgtcctcga

SEQ ID NO: 1481768 - DNA, 15 bp, Homo sapiens
gaatttgtcctcgag

SEQ ID NO: 1481769 - DNA, 15 bp, Homo sapiens
aatttgtcctcgaga

SEQ ID NO: 1481770 - DNA, 15 bp, Homo sapiens
atttgtcctcgagaa

SEQ ID NO: 1481771 - DNA, 15 bp, Homo sapiens
tttgtcctcgagaaa

SEQ ID NO: 1481772 - DNA, 15 bp, Homo sapiens
ttgtcctcgagaaaa

SEQ ID NO: 1481773 - DNA, 15 bp, Homo sapiens
tgtcctcgagaaaaa

SEQ ID NO: 1481774 - DNA, 15 bp, Homo sapiens
gtcctcgagaaaaag

SEQ ID NO: 1481775 - DNA, 15 bp, Homo sapiens
tcctcgagaaaaaga

SEQ ID NO: 1481776 - DNA, 15 bp, Homo sapiens
cctcgagaaaaagaa

SEQ ID NO: 1481777 - DNA, 15 bp, Homo sapiens
ctcgagaaaaagaat

SEQ ID NO: 1481778 - DNA, 15 bp, Homo sapiens
tcgagaaaaagaata

SEQ ID NO: 1481779 - DNA, 15 bp, Homo sapiens
cgagaaaaagaatag

SEQ ID NO: 1481780 - DNA, 15 bp, Homo sapiens
gagaaaaagaatagg

SEQ ID NO: 1481781 - DNA, 15 bp, Homo sapiens
agaaaaagaatagga

SEQ ID NO: 1481782 - DNA, 15 bp, Homo sapiens
gaaaaagaataggaa

SEQ ID NO: 1481783 - DNA, 15 bp, Homo sapiens
aaaaagaataggaaa

SEQ ID NO: 1481784 - DNA, 15 bp, Homo sapiens
aaaagaataggaaag

SEQ ID NO: 1481785 - DNA, 15 bp, Homo sapiens
aaagaataggaaagt

SEQ ID NO: 1481786 - DNA, 15 bp, Homo sapiens
aagaataggaaagtt

SEQ ID NO: 1481787 - DNA, 15 bp, Homo sapiens
agaataggaaagttc

SEQ ID NO: 1481788 - DNA, 15 bp, Homo sapiens
gaataggaaagttcc

SEQ ID NO: 1481789 - DNA, 15 bp, Homo sapiens
ataggaaagttccca

SEQ ID NO: 1481790 - DNA, 15 bp, Homo sapiens
taggaaagttcccat

SEQ ID NO: 1481791 - DNA, 15 bp, Homo sapiens
aggaaagttcccatg

SEQ ID NO: 1481792 - DNA, 15 bp, Homo sapiens
ggaaagttcccatga

SEQ ID NO: 1481793 - DNA, 15 bp, Homo sapiens
gaaagttcccatgac

SEQ ID NO: 1481794 - DNA, 15 bp, Homo sapiens
aaagttcccatgacc

SEQ ID NO: 1481795 - DNA, 15 bp, Homo sapiens
aagttcccatgaccc

SEQ ID NO: 1481796 - DNA, 15 bp, Homo sapiens
agttcccatgacccc

SEQ ID NO: 1481797 - DNA, 15 bp, Homo sapiens
gttcccatgacccca

SEQ ID NO: 1481798 - DNA, 15 bp, Homo sapiens
ttcccatgaccccag

SEQ ID NO: 1481799 - DNA, 15 bp, Homo sapiens
tcccatgaccccagg

SEQ ID NO: 1481800 - DNA, 15 bp, Homo sapiens
cccatgaccccagga

SEQ ID NO: 1481801 - DNA, 15 bp, Homo sapiens
ccatgaccccaggaa

SEQ ID NO: 1481802 - DNA, 15 bp, Homo sapiens
catgaccccaggaat

SEQ ID NO: 1481803 - DNA, 15 bp, Homo sapiens
atgaccccaggaatc

SEQ ID NO: 1481804 - DNA, 15 bp, Homo sapiens
tgaccccaggaatcg

SEQ ID NO: 1481805 - DNA, 15 bp, Homo sapiens
gaccccaggaatcga

SEQ ID NO: 1481806 - DNA, 15 bp, Homo sapiens
accccaggaatcgaa

SEQ ID NO: 1481807 - DNA, 15 bp, Homo sapiens
ccccaggaatcgaag

SEQ ID NO: 1481808 - DNA, 15 bp, Homo sapiens
cccaggaatcgaaga

SEQ ID NO: 1481809 - DNA, 15 bp, Homo sapiens
ccaggaatcgaagag

SEQ ID NO: 1481810 - DNA, 15 bp, Homo sapiens
caggaatcgaagaga

SEQ ID NO: 1481811 - DNA, 15 bp, Homo sapiens
aggaatcgaagagac

SEQ ID NO: 1481812 - DNA, 15 bp, Homo sapiens
ggaatcgaagagaca

SEQ ID NO: 1481813 - DNA, 15 bp, Homo sapiens
gaatcgaagagacaa

SEQ ID NO: 1481814 - DNA, 15 bp, Homo sapiens
aatcgaagagacaac

SEQ ID NO: 1481815 - DNA, 15 bp, Homo sapiens
atcgaagagacaacc

SEQ ID NO: 1481816 - DNA, 15 bp, Homo sapiens
tcgaagagacaacca

SEQ ID NO: 1481817 - DNA, 15 bp, Homo sapiens
cgaagagacaaccaa

SEQ ID NO: 1481818 - DNA, 15 bp, Homo sapiens
gaagagacaaccaag

SEQ ID NO: 1481819 - DNA, 15 bp, Homo sapiens
aagagacaaccaagg

SEQ ID NO: 1481820 - DNA, 15 bp, Homo sapiens
agagacaaccaaggg

SEQ ID NO: 1481821 - DNA, 15 bp, Homo sapiens
gagacaaccaagggc

SEQ ID NO: 1481822 - DNA, 15 bp, Homo sapiens
agacaaccaagggca

SEQ ID NO: 1481823 - DNA, 15 bp, Homo sapiens
gacaaccaagggcac

SEQ ID NO: 1481824 - DNA, 15 bp, Homo sapiens
acaaccaagggcaca

SEQ ID NO: 1481825 - DNA, 15 bp, Homo sapiens
caaccaagggcacat

SEQ ID NO: 1481826 - DNA, 15 bp, Homo sapiens
aaccaagggcacatg

SEQ ID NO: 1481827 - DNA, 15 bp, Homo sapiens
accaagggcacatgc

SEQ ID NO: 1481828 - DNA, 15 bp, Homo sapiens
ccaagggcacatgcc

SEQ ID NO: 1481829 - DNA, 15 bp, Homo sapiens
caagggcacatgcca

SEQ ID NO: 1481830 - DNA, 15 bp, Homo sapiens
aagggcacatgccat

SEQ ID NO: 1481831 - DNA, 15 bp, Homo sapiens
agggcacatgccatc

SEQ ID NO: 1481832 - DNA, 15 bp, Homo sapiens
gggcacatgccatcc

SEQ ID NO: 1481833 - DNA, 15 bp, Homo sapiens
ggcacatgccatcca

SEQ ID NO: 1481834 - DNA, 15 bp, Homo sapiens
gcacatgccatccac

SEQ ID NO: 1481835 - DNA, 15 bp, Homo sapiens
cacatgccatccaca

SEQ ID NO: 1481836 - DNA, 15 bp, Homo sapiens
acatgccatccacac

SEQ ID NO: 1481837 - DNA, 15 bp, Homo sapiens
catgccatccacact

SEQ ID NO: 1481838 - DNA, 15 bp, Homo sapiens
atgccatccacactc

SEQ ID NO: 1481839 - DNA, 15 bp, Homo sapiens
tgccatccacactct

SEQ ID NO: 1481840 - DNA, 15 bp, Homo sapiens
gccatccacactctt

SEQ ID NO: 1481841 - DNA, 15 bp, Homo sapiens
ccatccacactcttt

SEQ ID NO: 1481842 - DNA, 15 bp, Homo sapiens
catccacactctttc

SEQ ID NO: 1481843 - DNA, 15 bp, Homo sapiens
atccacactctttcc

SEQ ID NO: 1481844 - DNA, 15 bp, Homo sapiens
tccacactctttcct

SEQ ID NO: 1481845 - DNA, 15 bp, Homo sapiens
ccacactctttcctc

SEQ ID NO: 1481846 - DNA, 15 bp, Homo sapiens
cacactctttcctct

SEQ ID NO: 1481847 - DNA, 15 bp, Homo sapiens
acactctttcctctc

SEQ ID NO: 1481848 - DNA, 15 bp, Homo sapiens
cactctttcctctcc

SEQ ID NO: 1481849 - DNA, 15 bp, Homo sapiens
actctttcctctcct

SEQ ID NO: 1481850 - DNA, 15 bp, Homo sapiens
ctctttcctctcctc

SEQ ID NO: 1481851 - DNA, 15 bp, Homo sapiens
tctttcctctcctca

SEQ ID NO: 1481852 - DNA, 15 bp, Homo sapiens
ctttcctctcctcaa

SEQ ID NO: 1481853 - DNA, 15 bp, Homo sapiens
tttcctctcctcaag

SEQ ID NO: 1481854 - DNA, 15 bp, Homo sapiens
ttcctctcctcaagg

SEQ ID NO: 1481855 - DNA, 15 bp, Homo sapiens
tcctctcctcaaggc

SEQ ID NO: 1481856 - DNA, 15 bp, Homo sapiens
cctctcctcaaggct

SEQ ID NO: 1481857 - DNA, 15 bp, Homo sapiens
ctctcctcaaggctt

SEQ ID NO: 1481858 - DNA, 15 bp, Homo sapiens
tctcctcaaggctta

SEQ ID NO: 1481859 - DNA, 15 bp, Homo sapiens
ctcctcaaggcttag

SEQ ID NO: 1481860 - DNA, 15 bp, Homo sapiens
tcctcaaggcttaga

SEQ ID NO: 1481861 - DNA, 15 bp, Homo sapiens
cctcaaggcttagaa

SEQ ID NO: 1481862 - DNA, 15 bp, Homo sapiens
ctcaaggcttagaaa

SEQ ID NO: 1481863 - DNA, 15 bp, Homo sapiens
tcaaggcttagaaaa

SEQ ID NO: 1481864 - DNA, 15 bp, Homo sapiens
caaggcttagaaaaa

SEQ ID NO: 1481865 - DNA, 15 bp, Homo sapiens
aaggcttagaaaaac

SEQ ID NO: 1481866 - DNA, 15 bp, Homo sapiens
aggcttagaaaaact

SEQ ID NO: 1481867 - DNA, 15 bp, Homo sapiens
ggcttagaaaaactg

SEQ ID NO: 1481868 - DNA, 15 bp, Homo sapiens
gcttagaaaaactgc

SEQ ID NO: 1481869 - DNA, 15 bp, Homo sapiens
cttagaaaaactgca

SEQ ID NO: 1481870 - DNA, 15 bp, Homo sapiens
ttagaaaaactgcag

SEQ ID NO: 1481871 - DNA, 15 bp, Homo sapiens
tagaaaaactgcaga

SEQ ID NO: 1481872 - DNA, 15 bp, Homo sapiens
agaaaaactgcagaa

SEQ ID NO: 1481873 - DNA, 15 bp, Homo sapiens
gaaaaactgcagaac

SEQ ID NO: 1481874 - DNA, 15 bp, Homo sapiens
aaaaactgcagaacc

SEQ ID NO: 1481875 - DNA, 15 bp, Homo sapiens
aaaactgcagaacct

SEQ ID NO: 1481876 - DNA, 15 bp, Homo sapiens
aaactgcagaacctg

SEQ ID NO: 1481877 - DNA, 15 bp, Homo sapiens
aactgcagaacctgc

SEQ ID NO: 1481878 - DNA, 15 bp, Homo sapiens
actgcagaacctgcc

SEQ ID NO: 1481879 - DNA, 15 bp, Homo sapiens
ctgcagaacctgccg

SEQ ID NO: 1481880 - DNA, 15 bp, Homo sapiens
tgcagaacctgccgc

SEQ ID NO: 1481881 - DNA, 15 bp, Homo sapiens
gcagaacctgccgcc

SEQ ID NO: 1481882 - DNA, 15 bp, Homo sapiens
cagaacctgccgcct

SEQ ID NO: 1481883 - DNA, 15 bp, Homo sapiens
agaacctgccgcctc

SEQ ID NO: 1481884 - DNA, 15 bp, Homo sapiens
gaacctgccgcctcc

SEQ ID NO: 1481885 - DNA, 15 bp, Homo sapiens
aacctgccgcctcca

SEQ ID NO: 1481886 - DNA, 15 bp, Homo sapiens
acctgccgcctccac

SEQ ID NO: 1481887 - DNA, 15 bp, Homo sapiens
cctgccgcctccacc

SEQ ID NO: 1481888 - DNA, 15 bp, Homo sapiens
ctgccgcctccaccc

SEQ ID NO: 1481889 - DNA, 15 bp, Homo sapiens
tgccgcctccacccc

SEQ ID NO: 1481890 - DNA, 15 bp, Homo sapiens
gccgcctccacccct

SEQ ID NO: 1481891 - DNA, 15 bp, Homo sapiens
ccgcctccacccctg

SEQ ID NO: 1481892 - DNA, 15 bp, Homo sapiens
cgcctccacccctgg

SEQ ID NO: 1481893 - DNA, 15 bp, Homo sapiens
gcctccacccctggt

SEQ ID NO: 1481894 - DNA, 15 bp, Homo sapiens
cctccacccctggtg

SEQ ID NO: 1481895 - DNA, 15 bp, Homo sapiens
ctccacccctggtgg

SEQ ID NO: 1481896 - DNA, 15 bp, Homo sapiens
tccacccctggtgga

SEQ ID NO: 1481897 - DNA, 15 bp, Homo sapiens
ccacccctggtggac

SEQ ID NO: 1481898 - DNA, 15 bp, Homo sapiens
cacccctggtggaca

SEQ ID NO: 1481899 - DNA, 15 bp, Homo sapiens
acccctggtggacaa

SEQ ID NO: 1481900 - DNA, 15 bp, Homo sapiens
cccctggtggacaag

SEQ ID NO: 1481901 - DNA, 15 bp, Homo sapiens
ccctggtggacaagc

SEQ ID NO: 1481902 - DNA, 15 bp, Homo sapiens
cctggtggacaagcc

SEQ ID NO: 1481903 - DNA, 15 bp, Homo sapiens
ctggtggacaagcct

SEQ ID NO: 1481904 - DNA, 15 bp, Homo sapiens
tggtggacaagcctc

SEQ ID NO: 1481905 - DNA, 15 bp, Homo sapiens
ggtggacaagcctct

SEQ ID NO: 1481906 - DNA, 15 bp, Homo sapiens
gtggacaagcctctg

SEQ ID NO: 1481907 - DNA, 15 bp, Homo sapiens
tggacaagcctctgc

SEQ ID NO: 1481908 - DNA, 15 bp, Homo sapiens
ggacaagcctctgct

SEQ ID NO: 1481909 - DNA, 15 bp, Homo sapiens
gacaagcctctgctt

SEQ ID NO: 1481910 - DNA, 15 bp, Homo sapiens
acaagcctctgcttc

SEQ ID NO: 1481911 - DNA, 15 bp, Homo sapiens
caagcctctgcttcc

SEQ ID NO: 1481912 - DNA, 15 bp, Homo sapiens
aagcctctgcttccc

SEQ ID NO: 1481913 - DNA, 15 bp, Homo sapiens
agcctctgcttcccc

SEQ ID NO: 1481914 - DNA, 15 bp, Homo sapiens
gcctctgcttcccct

SEQ ID NO: 1481915 - DNA, 15 bp, Homo sapiens
cctctgcttcccctg

SEQ ID NO: 1481916 - DNA, 15 bp, Homo sapiens
ctctgcttcccctgt

SEQ ID NO: 1481917 - DNA, 15 bp, Homo sapiens
tctgcttcccctgtg

SEQ ID NO: 1481918 - DNA, 15 bp, Homo sapiens
ctgcttcccctgtgg

SEQ ID NO: 1481919 - DNA, 15 bp, Homo sapiens
tgcttcccctgtggg

SEQ ID NO: 1481920 - DNA, 15 bp, Homo sapiens
gcttcccctgtggga

SEQ ID NO: 1481921 - DNA, 15 bp, Homo sapiens
cttcccctgtgggag

SEQ ID NO: 1481922 - DNA, 15 bp, Homo sapiens
ttcccctgtgggagc

SEQ ID NO: 1481923 - DNA, 15 bp, Homo sapiens
tcccctgtgggagcc

SEQ ID NO: 1481924 - DNA, 15 bp, Homo sapiens
cccctgtgggagccc

SEQ ID NO: 1481925 - DNA, 15 bp, Homo sapiens
ccctgtgggagccca

SEQ ID NO: 1481926 - DNA, 15 bp, Homo sapiens
cctgtgggagcccat

SEQ ID NO: 1481927 - DNA, 15 bp, Homo sapiens
ctgtgggagcccatc

SEQ ID NO: 1481928 - DNA, 15 bp, Homo sapiens
tgtgggagcccatcc

SEQ ID NO: 1481929 - DNA, 15 bp, Homo sapiens
gtgggagcccatcct

SEQ ID NO: 1481930 - DNA, 15 bp, Homo sapiens
tgggagcccatcctt

SEQ ID NO: 1481931 - DNA, 15 bp, Homo sapiens
gggagcccatccttt

SEQ ID NO: 1481932 - DNA, 15 bp, Homo sapiens
ggagcccatccttta

SEQ ID NO: 1481933 - DNA, 15 bp, Homo sapiens
gagcccatcctttag

SEQ ID NO: 1481934 - DNA, 15 bp, Homo sapiens
agcccatcctttagg

SEQ ID NO: 1481935 - DNA, 15 bp, Homo sapiens
gcccatcctttagga

SEQ ID NO: 1481936 - DNA, 15 bp, Homo sapiens
cccatcctttaggat

SEQ ID NO: 1481937 - DNA, 15 bp, Homo sapiens
ccatcctttaggatc

SEQ ID NO: 1481938 - DNA, 15 bp, Homo sapiens
catcctttaggatct

SEQ ID NO: 1481939 - DNA, 15 bp, Homo sapiens
atcctttaggatctg

SEQ ID NO: 1481940 - DNA, 15 bp, Homo sapiens
tcctttaggatctga

SEQ ID NO: 1481941 - DNA, 15 bp, Homo sapiens
cctttaggatctgaa

SEQ ID NO: 1481942 - DNA, 15 bp, Homo sapiens
ctttaggatctgaat

SEQ ID NO: 1481943 - DNA, 15 bp, Homo sapiens
tttaggatctgaatg

SEQ ID NO: 1481944 - DNA, 15 bp, Homo sapiens
ttaggatctgaatgt

SEQ ID NO: 1481945 - DNA, 15 bp, Homo sapiens
taggatctgaatgtt

SEQ ID NO: 1481946 - DNA, 15 bp, Homo sapiens
aggatctgaatgttc

SEQ ID NO: 1481947 - DNA, 15 bp, Homo sapiens
ggatctgaatgttct

SEQ ID NO: 1481948 - DNA, 15 bp, Homo sapiens
gatctgaatgttctg

SEQ ID NO: 1481949 - DNA, 15 bp, Homo sapiens
atctgaatgttctga

SEQ ID NO: 1481950 - DNA, 15 bp, Homo sapiens
tctgaatgttctgac

SEQ ID NO: 1481951 - DNA, 15 bp, Homo sapiens
ctgaatgttctgact

SEQ ID NO: 1481952 - DNA, 15 bp, Homo sapiens
tgaatgttctgactc

SEQ ID NO: 1481953 - DNA, 15 bp, Homo sapiens
gaatgttctgactcc

SEQ ID NO: 1481954 - DNA, 15 bp, Homo sapiens
aatgttctgactccc

SEQ ID NO: 1481955 - DNA, 15 bp, Homo sapiens
atgttctgactccca

SEQ ID NO: 1481956 - DNA, 15 bp, Homo sapiens
tgttctgactcccac

SEQ ID NO: 1481957 - DNA, 15 bp, Homo sapiens
gttctgactcccacc

SEQ ID NO: 1481958 - DNA, 15 bp, Homo sapiens
ttctgactcccacct

SEQ ID NO: 1481959 - DNA, 15 bp, Homo sapiens
tctgactcccacctt

SEQ ID NO: 1481960 - DNA, 15 bp, Homo sapiens
ctgactcccaccttc

SEQ ID NO: 1481961 - DNA, 15 bp, Homo sapiens
tgactcccaccttcc

SEQ ID NO: 1481962 - DNA, 15 bp, Homo sapiens
gactcccaccttccc

SEQ ID NO: 1481963 - DNA, 15 bp, Homo sapiens
actcccaccttccct

SEQ ID NO: 1481964 - DNA, 15 bp, Homo sapiens
ctcccaccttccctt

SEQ ID NO: 1481965 - DNA, 15 bp, Homo sapiens
tcccaccttcccttt

SEQ ID NO: 1481966 - DNA, 15 bp, Homo sapiens
cccaccttccctttg

SEQ ID NO: 1481967 - DNA, 15 bp, Homo sapiens
ccaccttccctttgt

SEQ ID NO: 1481968 - DNA, 15 bp, Homo sapiens
caccttccctttgtc

SEQ ID NO: 1481969 - DNA, 15 bp, Homo sapiens
accttccctttgtca

SEQ ID NO: 1481970 - DNA, 15 bp, Homo sapiens
ccttccctttgtcac

SEQ ID NO: 1481971 - DNA, 15 bp, Homo sapiens
cttccctttgtcacg

SEQ ID NO: 1481972 - DNA, 15 bp, Homo sapiens
ttccctttgtcacgc

SEQ ID NO: 1481973 - DNA, 15 bp, Homo sapiens
tccctttgtcacgca

SEQ ID NO: 1481974 - DNA, 15 bp, Homo sapiens
ccctttgtcacgcag

SEQ ID NO: 1481975 - DNA, 15 bp, Homo sapiens
cctttgtcacgcaga

SEQ ID NO: 1481976 - DNA, 15 bp, Homo sapiens
ctttgtcacgcagag

SEQ ID NO: 1481977 - DNA, 15 bp, Homo sapiens
tttgtcacgcagagt

SEQ ID NO: 1481978 - DNA, 15 bp, Homo sapiens
ttgtcacgcagagtc

SEQ ID NO: 1481979 - DNA, 15 bp, Homo sapiens
tgtcacgcagagtcc

SEQ ID NO: 1481980 - DNA, 15 bp, Homo sapiens
gtcacgcagagtcct

SEQ ID NO: 1481981 - DNA, 15 bp, Homo sapiens
tcacgcagagtcctc

SEQ ID NO: 1481982 - DNA, 15 bp, Homo sapiens
cacgcagagtcctct

SEQ ID NO: 1481983 - DNA, 15 bp, Homo sapiens
acgcagagtcctctc

SEQ ID NO: 1481984 - DNA, 15 bp, Homo sapiens
cgcagagtcctctct

SEQ ID NO: 1481985 - DNA, 15 bp, Homo sapiens
gcagagtcctctctt

SEQ ID NO: 1481986 - DNA, 15 bp, Homo sapiens
cagagtcctctcttg

SEQ ID NO: 1481987 - DNA, 15 bp, Homo sapiens
agagtcctctcttgt

SEQ ID NO: 1481988 - DNA, 15 bp, Homo sapiens
gagtcctctcttgtc

SEQ ID NO: 1481989 - DNA, 15 bp, Homo sapiens
agtcctctcttgtcc

SEQ ID NO: 1481990 - DNA, 15 bp, Homo sapiens
gtcctctcttgtccc

SEQ ID NO: 1481991 - DNA, 15 bp, Homo sapiens
tcctctcttgtccct

SEQ ID NO: 1481992 - DNA, 15 bp, Homo sapiens
cctctcttgtccctg

SEQ ID NO: 1481993 - DNA, 15 bp, Homo sapiens
ctctcttgtccctgc

SEQ ID NO: 1481994 - DNA, 15 bp, Homo sapiens
tctcttgtccctgca

SEQ ID NO: 1481995 - DNA, 15 bp, Homo sapiens
ctcttgtccctgcag

SEQ ID NO: 1481996 - DNA, 15 bp, Homo sapiens
tcttgtccctgcaga

SEQ ID NO: 1481997 - DNA, 15 bp, Homo sapiens
cttgtccctgcagac

SEQ ID NO: 1481998 - DNA, 15 bp, Homo sapiens
ttgtccctgcagacc

SEQ ID NO: 1481999 - DNA, 15 bp, Homo sapiens
tgtccctgcagaccc

SEQ ID NO: 1482000 - DNA, 15 bp, Homo sapiens
gtccctgcagaccca

SEQ ID NO: 1482001 - DNA, 15 bp, Homo sapiens
tccctgcagacccag

SEQ ID NO: 1482002 - DNA, 15 bp, Homo sapiens
ccctgcagacccaga

SEQ ID NO: 1482003 - DNA, 15 bp, Homo sapiens
cctgcagacccagat

SEQ ID NO: 1482004 - DNA, 15 bp, Homo sapiens
ctgcagacccagatt

SEQ ID NO: 1482005 - DNA, 15 bp, Homo sapiens
tgcagacccagattg

SEQ ID NO: 1482006 - DNA, 15 bp, Homo sapiens
gcagacccagattga

SEQ ID NO: 1482007 - DNA, 15 bp, Homo sapiens
cagacccagattgag

SEQ ID NO: 1482008 - DNA, 15 bp, Homo sapiens
agacccagattgaga

SEQ ID NO: 1482009 - DNA, 15 bp, Homo sapiens
gacccagattgagat

SEQ ID NO: 1482010 - DNA, 15 bp, Homo sapiens
acccagattgagatc

SEQ ID NO: 1482011 - DNA, 15 bp, Homo sapiens
cccagattgagatcc

SEQ ID NO: 1482012 - DNA, 15 bp, Homo sapiens
ccagattgagatcct

SEQ ID NO: 1482013 - DNA, 15 bp, Homo sapiens
cagattgagatcctc

SEQ ID NO: 1482014 - DNA, 15 bp, Homo sapiens
agattgagatcctct

SEQ ID NO: 1482015 - DNA, 15 bp, Homo sapiens
gattgagatcctctt

SEQ ID NO: 1482016 - DNA, 15 bp, Homo sapiens
attgagatcctcttg

SEQ ID NO: 1482017 - DNA, 15 bp, Homo sapiens
ttgagatcctcttgg

SEQ ID NO: 1482018 - DNA, 15 bp, Homo sapiens
tgagatcctcttggt

SEQ ID NO: 1482019 - DNA, 15 bp, Homo sapiens
gagatcctcttggtc

SEQ ID NO: 1482020 - DNA, 15 bp, Homo sapiens
agatcctcttggtct

SEQ ID NO: 1482021 - DNA, 15 bp, Homo sapiens
gatcctcttggtcta

SEQ ID NO: 1482022 - DNA, 15 bp, Homo sapiens
atcctcttggtctag

SEQ ID NO: 1482023 - DNA, 15 bp, Homo sapiens
tcctcttggtctagc

SEQ ID NO: 1482024 - DNA, 15 bp, Homo sapiens
cctcttggtctagct

SEQ ID NO: 1482025 - DNA, 15 bp, Homo sapiens
ctcttggtctagctg

SEQ ID NO: 1482026 - DNA, 15 bp, Homo sapiens
tcttggtctagctgc

SEQ ID NO: 1482027 - DNA, 15 bp, Homo sapiens
cttggtctagctgcc

SEQ ID NO: 1482028 - DNA, 15 bp, Homo sapiens
ttggtctagctgcca

SEQ ID NO: 1482029 - DNA, 15 bp, Homo sapiens
tggtctagctgccag

SEQ ID NO: 1482030 - DNA, 15 bp, Homo sapiens
ggtctagctgccagg

SEQ ID NO: 1482031 - DNA, 15 bp, Homo sapiens
gtctagctgccaggt

SEQ ID NO: 1482032 - DNA, 15 bp, Homo sapiens
tctagctgccaggtc

SEQ ID NO: 1482033 - DNA, 15 bp, Homo sapiens
ctagctgccaggtca

SEQ ID NO: 1482034 - DNA, 15 bp, Homo sapiens
tagctgccaggtcag

SEQ ID NO: 1482035 - DNA, 15 bp, Homo sapiens
agctgccaggtcaga

SEQ ID NO: 1482036 - DNA, 15 bp, Homo sapiens
gctgccaggtcagac

SEQ ID NO: 1482037 - DNA, 15 bp, Homo sapiens
ctgccaggtcagacc

SEQ ID NO: 1482038 - DNA, 15 bp, Homo sapiens
tgccaggtcagaccc

SEQ ID NO: 1482039 - DNA, 15 bp, Homo sapiens
gccaggtcagaccca

SEQ ID NO: 1482040 - DNA, 15 bp, Homo sapiens
ccaggtcagacccat

SEQ ID NO: 1482041 - DNA, 15 bp, Homo sapiens
caggtcagacccata

SEQ ID NO: 1482042 - DNA, 15 bp, Homo sapiens
aggtcagacccataa

SEQ ID NO: 1482043 - DNA, 15 bp, Homo sapiens
ggtcagacccataaa

SEQ ID NO: 1482044 - DNA, 15 bp, Homo sapiens
gtcagacccataaag

SEQ ID NO: 1482045 - DNA, 15 bp, Homo sapiens
tcagacccataaaga

SEQ ID NO: 1482046 - DNA, 15 bp, Homo sapiens
cagacccataaagac

SEQ ID NO: 1482047 - DNA, 15 bp, Homo sapiens
agacccataaagacc

SEQ ID NO: 1482048 - DNA, 15 bp, Homo sapiens
gacccataaagacca

SEQ ID NO: 1482049 - DNA, 15 bp, Homo sapiens
acccataaagaccag

SEQ ID NO: 1482050 - DNA, 15 bp, Homo sapiens
cccataaagaccagg

SEQ ID NO: 1482051 - DNA, 15 bp, Homo sapiens
ccataaagaccaggc

SEQ ID NO: 1482052 - DNA, 15 bp, Homo sapiens
cataaagaccaggcc

SEQ ID NO: 1482053 - DNA, 15 bp, Homo sapiens
ataaagaccaggcct

SEQ ID NO: 1482054 - DNA, 15 bp, Homo sapiens
taaagaccaggcctc

SEQ ID NO: 1482055 - DNA, 15 bp, Homo sapiens
aaagaccaggcctca

SEQ ID NO: 1482056 - DNA, 15 bp, Homo sapiens
aagaccaggcctcaa

SEQ ID NO: 1482057 - DNA, 15 bp, Homo sapiens
agaccaggcctcaag

SEQ ID NO: 1482058 - DNA, 15 bp, Homo sapiens
accaggcctcaaggg

SEQ ID NO: 1482059 - DNA, 15 bp, Homo sapiens
ccaggcctcaaggga

SEQ ID NO: 1482060 - DNA, 15 bp, Homo sapiens
caggcctcaagggac

SEQ ID NO: 1482061 - DNA, 15 bp, Homo sapiens
aggcctcaagggaca

SEQ ID NO: 1482062 - DNA, 15 bp, Homo sapiens
ggcctcaagggacat

SEQ ID NO: 1482063 - DNA, 15 bp, Homo sapiens
gcctcaagggacatt

SEQ ID NO: 1482064 - DNA, 15 bp, Homo sapiens
cctcaagggacattc

SEQ ID NO: 1482065 - DNA, 15 bp, Homo sapiens
ctcaagggacattct

SEQ ID NO: 1482066 - DNA, 15 bp, Homo sapiens
tcaagggacattctt

SEQ ID NO: 1482067 - DNA, 15 bp, Homo sapiens
caagggacattctta

SEQ ID NO: 1482068 - DNA, 15 bp, Homo sapiens
aagggacattcttag

SEQ ID NO: 1482069 - DNA, 15 bp, Homo sapiens
agggacattcttaga

SEQ ID NO: 1482070 - DNA, 15 bp, Homo sapiens
gggacattcttagaa

SEQ ID NO: 1482071 - DNA, 15 bp, Homo sapiens
ggacattcttagaag

SEQ ID NO: 1482072 - DNA, 15 bp, Homo sapiens
gacattcttagaagc

SEQ ID NO: 1482073 - DNA, 15 bp, Homo sapiens
acattcttagaagcc

SEQ ID NO: 1482074 - DNA, 15 bp, Homo sapiens
cattcttagaagcct

SEQ ID NO: 1482075 - DNA, 15 bp, Homo sapiens
attcttagaagcctc

SEQ ID NO: 1482076 - DNA, 15 bp, Homo sapiens
ttcttagaagcctct

SEQ ID NO: 1482077 - DNA, 15 bp, Homo sapiens
tcttagaagcctctt

SEQ ID NO: 1482078 - DNA, 15 bp, Homo sapiens
cttagaagcctcttt

SEQ ID NO: 1482079 - DNA, 15 bp, Homo sapiens
ttagaagcctctttc

SEQ ID NO: 1482080 - DNA, 15 bp, Homo sapiens
tagaagcctctttct

SEQ ID NO: 1482081 - DNA, 15 bp, Homo sapiens
agaagcctctttctc

SEQ ID NO: 1482082 - DNA, 15 bp, Homo sapiens
gaagcctctttctca

SEQ ID NO: 1482083 - DNA, 15 bp, Homo sapiens
aagcctctttctcaa

SEQ ID NO: 1482084 - DNA, 15 bp, Homo sapiens
agcctctttctcaag

SEQ ID NO: 1482085 - DNA, 15 bp, Homo sapiens
gcctctttctcaagc

SEQ ID NO: 1482086 - DNA, 15 bp, Homo sapiens
cctctttctcaagca

SEQ ID NO: 1482087 - DNA, 15 bp, Homo sapiens
ctctttctcaagcaa

SEQ ID NO: 1482088 - DNA, 15 bp, Homo sapiens
tctttctcaagcaat

SEQ ID NO: 1482089 - DNA, 15 bp, Homo sapiens
ctttctcaagcaata

SEQ ID NO: 1482090 - DNA, 15 bp, Homo sapiens
tttctcaagcaatag

SEQ ID NO: 1482091 - DNA, 15 bp, Homo sapiens
ttctcaagcaatagg

SEQ ID NO: 1482092 - DNA, 15 bp, Homo sapiens
tctcaagcaatagga

SEQ ID NO: 1482093 - DNA, 15 bp, Homo sapiens
ctcaagcaataggaa

SEQ ID NO: 1482094 - DNA, 15 bp, Homo sapiens
tcaagcaataggaaa

SEQ ID NO: 1482095 - DNA, 15 bp, Homo sapiens
caagcaataggaaag

SEQ ID NO: 1482096 - DNA, 15 bp, Homo sapiens
aagcaataggaaagc

SEQ ID NO: 1482097 - DNA, 15 bp, Homo sapiens
agcaataggaaagct

SEQ ID NO: 1482098 - DNA, 15 bp, Homo sapiens
gcaataggaaagctc

SEQ ID NO: 1482099 - DNA, 15 bp, Homo sapiens
caataggaaagctcc

SEQ ID NO: 1482100 - DNA, 15 bp, Homo sapiens
aataggaaagctccg

SEQ ID NO: 1482101 - DNA, 15 bp, Homo sapiens
ataggaaagctccgg

SEQ ID NO: 1482102 - DNA, 15 bp, Homo sapiens
taggaaagctccgga

SEQ ID NO: 1482103 - DNA, 15 bp, Homo sapiens
aggaaagctccggaa

SEQ ID NO: 1482104 - DNA, 15 bp, Homo sapiens
ggaaagctccggaac

SEQ ID NO: 1482105 - DNA, 15 bp, Homo sapiens
gaaagctccggaact

SEQ ID NO: 1482106 - DNA, 15 bp, Homo sapiens
aaagctccggaactc

SEQ ID NO: 1482107 - DNA, 15 bp, Homo sapiens
aagctccggaactcc

SEQ ID NO: 1482108 - DNA, 15 bp, Homo sapiens
agctccggaactcca

SEQ ID NO: 1482109 - DNA, 15 bp, Homo sapiens
gctccggaactccat

SEQ ID NO: 1482110 - DNA, 15 bp, Homo sapiens
ctccggaactccatc

SEQ ID NO: 1482111 - DNA, 15 bp, Homo sapiens
tccggaactccatcc

SEQ ID NO: 1482112 - DNA, 15 bp, Homo sapiens
ccggaactccatcct

SEQ ID NO: 1482113 - DNA, 15 bp, Homo sapiens
cggaactccatcctg

SEQ ID NO: 1482114 - DNA, 15 bp, Homo sapiens
ggaactccatcctgg

SEQ ID NO: 1482115 - DNA, 15 bp, Homo sapiens
gaactccatcctggc

SEQ ID NO: 1482116 - DNA, 15 bp, Homo sapiens
aactccatcctggct

SEQ ID NO: 1482117 - DNA, 15 bp, Homo sapiens
actccatcctggctc

SEQ ID NO: 1482118 - DNA, 15 bp, Homo sapiens
ctccatcctggctcc

SEQ ID NO: 1482119 - DNA, 15 bp, Homo sapiens
tccatcctggctccc

SEQ ID NO: 1482120 - DNA, 15 bp, Homo sapiens
ccatcctggctccca

SEQ ID NO: 1482121 - DNA, 15 bp, Homo sapiens
catcctggctcccag

SEQ ID NO: 1482122 - DNA, 15 bp, Homo sapiens
atcctggctcccagg

SEQ ID NO: 1482123 - DNA, 15 bp, Homo sapiens
tcctggctcccaggc

SEQ ID NO: 1482124 - DNA, 15 bp, Homo sapiens
cctggctcccaggct

SEQ ID NO: 1482125 - DNA, 15 bp, Homo sapiens
ctggctcccaggcta

SEQ ID NO: 1482126 - DNA, 15 bp, Homo sapiens
tggctcccaggctac

SEQ ID NO: 1482127 - DNA, 15 bp, Homo sapiens
ggctcccaggctact

SEQ ID NO: 1482128 - DNA, 15 bp, Homo sapiens
gctcccaggctacta

SEQ ID NO: 1482129 - DNA, 15 bp, Homo sapiens
ctcccaggctactat

SEQ ID NO: 1482130 - DNA, 15 bp, Homo sapiens
tcccaggctactatt

SEQ ID NO: 1482131 - DNA, 15 bp, Homo sapiens
cccaggctactattt

SEQ ID NO: 1482132 - DNA, 15 bp, Homo sapiens
ccaggctactatttc

SEQ ID NO: 1482133 - DNA, 15 bp, Homo sapiens
caggctactatttca

SEQ ID NO: 1482134 - DNA, 15 bp, Homo sapiens
aggctactatttcaa

SEQ ID NO: 1482135 - DNA, 15 bp, Homo sapiens
ggctactatttcaac

SEQ ID NO: 1482136 - DNA, 15 bp, Homo sapiens
gctactatttcaacc

SEQ ID NO: 1482137 - DNA, 15 bp, Homo sapiens
ctactatttcaaccc

SEQ ID NO: 1482138 - DNA, 15 bp, Homo sapiens
tactatttcaaccct

SEQ ID NO: 1482139 - DNA, 15 bp, Homo sapiens
actatttcaaccctg

SEQ ID NO: 1482140 - DNA, 15 bp, Homo sapiens
ctatttcaaccctgc

SEQ ID NO: 1482141 - DNA, 15 bp, Homo sapiens
tatttcaaccctgca

SEQ ID NO: 1482142 - DNA, 15 bp, Homo sapiens
atttcaaccctgcag

SEQ ID NO: 1482143 - DNA, 15 bp, Homo sapiens
tttcaaccctgcagt

SEQ ID NO: 1482144 - DNA, 15 bp, Homo sapiens
ttcaaccctgcagtg

SEQ ID NO: 1482145 - DNA, 15 bp, Homo sapiens
tcaaccctgcagtgg

SEQ ID NO: 1482146 - DNA, 15 bp, Homo sapiens
caaccctgcagtggg

SEQ ID NO: 1482147 - DNA, 15 bp, Homo sapiens
aaccctgcagtgggt

SEQ ID NO: 1482148 - DNA, 15 bp, Homo sapiens
accctgcagtgggtg

SEQ ID NO: 1482149 - DNA, 15 bp, Homo sapiens
ccctgcagtgggtga

SEQ ID NO: 1482150 - DNA, 15 bp, Homo sapiens
cctgcagtgggtgaa

SEQ ID NO: 1482151 - DNA, 15 bp, Homo sapiens
ctgcagtgggtgaaa

SEQ ID NO: 1482152 - DNA, 15 bp, Homo sapiens
tgcagtgggtgaaat

SEQ ID NO: 1482153 - DNA, 15 bp, Homo sapiens
gcagtgggtgaaatt

SEQ ID NO: 1482154 - DNA, 15 bp, Homo sapiens
cagtgggtgaaattc

SEQ ID NO: 1482155 - DNA, 15 bp, Homo sapiens
agtgggtgaaattca

SEQ ID NO: 1482156 - DNA, 15 bp, Homo sapiens
gtgggtgaaattcac

SEQ ID NO: 1482157 - DNA, 15 bp, Homo sapiens
tgggtgaaattcact

SEQ ID NO: 1482158 - DNA, 15 bp, Homo sapiens
gggtgaaattcactc

SEQ ID NO: 1482159 - DNA, 15 bp, Homo sapiens
ggtgaaattcactcc

SEQ ID NO: 1482160 - DNA, 15 bp, Homo sapiens
gtgaaattcactcca

SEQ ID NO: 1482161 - DNA, 15 bp, Homo sapiens
tgaaattcactccac

SEQ ID NO: 1482162 - DNA, 15 bp, Homo sapiens
gaaattcactccacg

SEQ ID NO: 1482163 - DNA, 15 bp, Homo sapiens
aaattcactccacga

SEQ ID NO: 1482164 - DNA, 15 bp, Homo sapiens
aattcactccacgag

SEQ ID NO: 1482165 - DNA, 15 bp, Homo sapiens
attcactccacgagg

SEQ ID NO: 1482166 - DNA, 15 bp, Homo sapiens
ttcactccacgagga

SEQ ID NO: 1482167 - DNA, 15 bp, Homo sapiens
tcactccacgaggaa

SEQ ID NO: 1482168 - DNA, 15 bp, Homo sapiens
cactccacgaggaag

SEQ ID NO: 1482169 - DNA, 15 bp, Homo sapiens
actccacgaggaagc

SEQ ID NO: 1482170 - DNA, 15 bp, Homo sapiens
ctccacgaggaagca

SEQ ID NO: 1482171 - DNA, 15 bp, Homo sapiens
tccacgaggaagcac

SEQ ID NO: 1482172 - DNA, 15 bp, Homo sapiens
ccacgaggaagcact

SEQ ID NO: 1482173 - DNA, 15 bp, Homo sapiens
cacgaggaagcactg

SEQ ID NO: 1482174 - DNA, 15 bp, Homo sapiens
acgaggaagcactgc

SEQ ID NO: 1482175 - DNA, 15 bp, Homo sapiens
cgaggaagcactgca

SEQ ID NO: 1482176 - DNA, 15 bp, Homo sapiens
gaggaagcactgcag

SEQ ID NO: 1482177 - DNA, 15 bp, Homo sapiens
aggaagcactgcagt

SEQ ID NO: 1482178 - DNA, 15 bp, Homo sapiens
ggaagcactgcagtc

SEQ ID NO: 1482179 - DNA, 15 bp, Homo sapiens
gaagcactgcagtca

SEQ ID NO: 1482180 - DNA, 15 bp, Homo sapiens
aagcactgcagtcac

SEQ ID NO: 1482181 - DNA, 15 bp, Homo sapiens
agcactgcagtcact

SEQ ID NO: 1482182 - DNA, 15 bp, Homo sapiens
gcactgcagtcactc

SEQ ID NO: 1482183 - DNA, 15 bp, Homo sapiens
cactgcagtcactcc

SEQ ID NO: 1482184 - DNA, 15 bp, Homo sapiens
actgcagtcactccc

SEQ ID NO: 1482185 - DNA, 15 bp, Homo sapiens
ctgcagtcactcccc

SEQ ID NO: 1482186 - DNA, 15 bp, Homo sapiens
tgcagtcactcccca

SEQ ID NO: 1482187 - DNA, 15 bp, Homo sapiens
gcagtcactccccac

SEQ ID NO: 1482188 - DNA, 15 bp, Homo sapiens
cagtcactccccacg

SEQ ID NO: 1482189 - DNA, 15 bp, Homo sapiens
agtcactccccacgg

SEQ ID NO: 1482190 - DNA, 15 bp, Homo sapiens
gtcactccccacgga

SEQ ID NO: 1482191 - DNA, 15 bp, Homo sapiens
tcactccccacggaa

SEQ ID NO: 1482192 - DNA, 15 bp, Homo sapiens
cactccccacggaag

SEQ ID NO: 1482193 - DNA, 15 bp, Homo sapiens
actccccacggaagc

SEQ ID NO: 1482194 - DNA, 15 bp, Homo sapiens
ctccccacggaagct

SEQ ID NO: 1482195 - DNA, 15 bp, Homo sapiens
tccccacggaagctt

SEQ ID NO: 1482196 - DNA, 15 bp, Homo sapiens
ccccacggaagcttt

SEQ ID NO: 1482197 - DNA, 15 bp, Homo sapiens
cccacggaagctttt

SEQ ID NO: 1482198 - DNA, 15 bp, Homo sapiens
ccacggaagcttttc

SEQ ID NO: 1482199 - DNA, 15 bp, Homo sapiens
cacggaagcttttct

SEQ ID NO: 1482200 - DNA, 15 bp, Homo sapiens
acggaagcttttctt

SEQ ID NO: 1482201 - DNA, 15 bp, Homo sapiens
cggaagcttttcttc

SEQ ID NO: 1482202 - DNA, 15 bp, Homo sapiens
ggaagcttttcttcc

SEQ ID NO: 1482203 - DNA, 15 bp, Homo sapiens
gaagcttttcttcca

SEQ ID NO: 1482204 - DNA, 15 bp, Homo sapiens
aagcttttcttccaa

SEQ ID NO: 1482205 - DNA, 15 bp, Homo sapiens
agcttttcttccaaa

SEQ ID NO: 1482206 - DNA, 15 bp, Homo sapiens
gcttttcttccaaac

SEQ ID NO: 1482207 - DNA, 15 bp, Homo sapiens
cttttcttccaaact

SEQ ID NO: 1482208 - DNA, 15 bp, Homo sapiens
ttttcttccaaactt

SEQ ID NO: 1482209 - DNA, 15 bp, Homo sapiens
tttcttccaaacttt

SEQ ID NO: 1482210 - DNA, 15 bp, Homo sapiens
ttcttccaaactttc

SEQ ID NO: 1482211 - DNA, 15 bp, Homo sapiens
tcttccaaactttca

SEQ ID NO: 1482212 - DNA, 15 bp, Homo sapiens
cttccaaactttcag

SEQ ID NO: 1482213 - DNA, 15 bp, Homo sapiens
ttccaaactttcagc

SEQ ID NO: 1482214 - DNA, 15 bp, Homo sapiens
tccaaactttcagct

SEQ ID NO: 1482215 - DNA, 15 bp, Homo sapiens
ccaaactttcagctc

SEQ ID NO: 1482216 - DNA, 15 bp, Homo sapiens
caaactttcagctct

SEQ ID NO: 1482217 - DNA, 15 bp, Homo sapiens
aaactttcagctctt

SEQ ID NO: 1482218 - DNA, 15 bp, Homo sapiens
aactttcagctcttg

SEQ ID NO: 1482219 - DNA, 15 bp, Homo sapiens
actttcagctcttgg

SEQ ID NO: 1482220 - DNA, 15 bp, Homo sapiens
ctttcagctcttggt

SEQ ID NO: 1482221 - DNA, 15 bp, Homo sapiens
tttcagctcttggtg

SEQ ID NO: 1482222 - DNA, 15 bp, Homo sapiens
ttcagctcttggtgg

SEQ ID NO: 1482223 - DNA, 15 bp, Homo sapiens
tcagctcttggtggt

SEQ ID NO: 1482224 - DNA, 15 bp, Homo sapiens
cagctcttggtggtc

SEQ ID NO: 1482225 - DNA, 15 bp, Homo sapiens
agctcttggtggtca

SEQ ID NO: 1482226 - DNA, 15 bp, Homo sapiens
gctcttggtggtcag

SEQ ID NO: 1482227 - DNA, 15 bp, Homo sapiens
ctcttggtggtcagg

SEQ ID NO: 1482228 - DNA, 15 bp, Homo sapiens
tcttggtggtcaggg

SEQ ID NO: 1482229 - DNA, 15 bp, Homo sapiens
cttggtggtcaggga

SEQ ID NO: 1482230 - DNA, 15 bp, Homo sapiens
ttggtggtcagggaa

SEQ ID NO: 1482231 - DNA, 15 bp, Homo sapiens
tggtggtcagggaag

SEQ ID NO: 1482232 - DNA, 15 bp, Homo sapiens
ggtggtcagggaagt

SEQ ID NO: 1482233 - DNA, 15 bp, Homo sapiens
gtggtcagggaagtc

SEQ ID NO: 1482234 - DNA, 15 bp, Homo sapiens
tggtcagggaagtct

SEQ ID NO: 1482235 - DNA, 15 bp, Homo sapiens
ggtcagggaagtctg

SEQ ID NO: 1482236 - DNA, 15 bp, Homo sapiens
gtcagggaagtctga

SEQ ID NO: 1482237 - DNA, 15 bp, Homo sapiens
tcagggaagtctgac

SEQ ID NO: 1482238 - DNA, 15 bp, Homo sapiens
cagggaagtctgacc

SEQ ID NO: 1482239 - DNA, 15 bp, Homo sapiens
agggaagtctgacca

SEQ ID NO: 1482240 - DNA, 15 bp, Homo sapiens
gggaagtctgaccat

SEQ ID NO: 1482241 - DNA, 15 bp, Homo sapiens
ggaagtctgaccatt

SEQ ID NO: 1482242 - DNA, 15 bp, Homo sapiens
gaagtctgaccattt

SEQ ID NO: 1482243 - DNA, 15 bp, Homo sapiens
aagtctgaccattta

SEQ ID NO: 1482244 - DNA, 15 bp, Homo sapiens
agtctgaccatttat

SEQ ID NO: 1482245 - DNA, 15 bp, Homo sapiens
gtctgaccatttatc

SEQ ID NO: 1482246 - DNA, 15 bp, Homo sapiens
tctgaccatttatca

SEQ ID NO: 1482247 - DNA, 15 bp, Homo sapiens
ctgaccatttatcat

SEQ ID NO: 1482248 - DNA, 15 bp, Homo sapiens
tgaccatttatcatc

SEQ ID NO: 1482249 - DNA, 15 bp, Homo sapiens
gaccatttatcatca

SEQ ID NO: 1482250 - DNA, 15 bp, Homo sapiens
accatttatcatcat

SEQ ID NO: 1482251 - DNA, 15 bp, Homo sapiens
ccatttatcatcatc

SEQ ID NO: 1482252 - DNA, 15 bp, Homo sapiens
catttatcatcatcg

SEQ ID NO: 1482253 - DNA, 15 bp, Homo sapiens
atttatcatcatcgg

SEQ ID NO: 1482254 - DNA, 15 bp, Homo sapiens
tttatcatcatcgga

SEQ ID NO: 1482255 - DNA, 15 bp, Homo sapiens
ttatcatcatcggaa

SEQ ID NO: 1482256 - DNA, 15 bp, Homo sapiens
tatcatcatcggaaa

SEQ ID NO: 1482257 - DNA, 15 bp, Homo sapiens
atcatcatcggaaag

SEQ ID NO: 1482258 - DNA, 15 bp, Homo sapiens
tcatcatcggaaagc

SEQ ID NO: 1482259 - DNA, 15 bp, Homo sapiens
catcatcggaaagca

SEQ ID NO: 1482260 - DNA, 15 bp, Homo sapiens
atcatcggaaagcat

SEQ ID NO: 1482261 - DNA, 15 bp, Homo sapiens
tcatcggaaagcatg

SEQ ID NO: 1482262 - DNA, 15 bp, Homo sapiens
catcggaaagcatga

SEQ ID NO: 1482263 - DNA, 15 bp, Homo sapiens
atcggaaagcatgaa

SEQ ID NO: 1482264 - DNA, 15 bp, Homo sapiens
tcggaaagcatgaaa

SEQ ID NO: 1482265 - DNA, 15 bp, Homo sapiens
cggaaagcatgaaac

SEQ ID NO: 1482266 - DNA, 15 bp, Homo sapiens
ggaaagcatgaaact

SEQ ID NO: 1482267 - DNA, 15 bp, Homo sapiens
gaaagcatgaaactt

SEQ ID NO: 1482268 - DNA, 15 bp, Homo sapiens
aaagcatgaaacttt

SEQ ID NO: 1482269 - DNA, 15 bp, Homo sapiens
aagcatgaaactttc

SEQ ID NO: 1482270 - DNA, 15 bp, Homo sapiens
agcatgaaactttca

SEQ ID NO: 1482271 - DNA, 15 bp, Homo sapiens
gcatgaaactttcag

SEQ ID NO: 1482272 - DNA, 15 bp, Homo sapiens
catgaaactttcagt

SEQ ID NO: 1482273 - DNA, 15 bp, Homo sapiens
atgaaactttcagta

SEQ ID NO: 1482274 - DNA, 15 bp, Homo sapiens
tgaaactttcagtaa

SEQ ID NO: 1482275 - DNA, 15 bp, Homo sapiens
gaaactttcagtaaa

SEQ ID NO: 1482276 - DNA, 15 bp, Homo sapiens
aaactttcagtaaag

SEQ ID NO: 1482277 - DNA, 15 bp, Homo sapiens
aactttcagtaaagg

SEQ ID NO: 1482278 - DNA, 15 bp, Homo sapiens
actttcagtaaagga

SEQ ID NO: 1482279 - DNA, 15 bp, Homo sapiens
ctttcagtaaaggat

SEQ ID NO: 1482280 - DNA, 15 bp, Homo sapiens
tttcagtaaaggatg

SEQ ID NO: 1482281 - DNA, 15 bp, Homo sapiens
ttcagtaaaggatgg

SEQ ID NO: 1482282 - DNA, 15 bp, Homo sapiens
tcagtaaaggatggt

SEQ ID NO: 1482283 - DNA, 15 bp, Homo sapiens
cagtaaaggatggtt

SEQ ID NO: 1482284 - DNA, 15 bp, Homo sapiens
agtaaaggatggtta

SEQ ID NO: 1482285 - DNA, 15 bp, Homo sapiens
gtaaaggatggttaa

SEQ ID NO: 1482286 - DNA, 15 bp, Homo sapiens
taaaggatggttaaa

SEQ ID NO: 1482287 - DNA, 15 bp, Homo sapiens
aaaggatggttaaaa

SEQ ID NO: 1482288 - DNA, 15 bp, Homo sapiens
aaggatggttaaaaa

SEQ ID NO: 1482289 - DNA, 15 bp, Homo sapiens
aggatggttaaaaat

SEQ ID NO: 1482290 - DNA, 15 bp, Homo sapiens
ggatggttaaaaatg

SEQ ID NO: 1482291 - DNA, 15 bp, Homo sapiens
gatggttaaaaatgt

SEQ ID NO: 1482292 - DNA, 15 bp, Homo sapiens
atggttaaaaatgtc

SEQ ID NO: 1482293 - DNA, 15 bp, Homo sapiens
tggttaaaaatgtcc

SEQ ID NO: 1482294 - DNA, 15 bp, Homo sapiens
ggttaaaaatgtcca

SEQ ID NO: 1482295 - DNA, 15 bp, Homo sapiens
gttaaaaatgtccag

SEQ ID NO: 1482296 - DNA, 15 bp, Homo sapiens
ttaaaaatgtccagg

SEQ ID NO: 1482297 - DNA, 15 bp, Homo sapiens
taaaaatgtccagga

SEQ ID NO: 1482298 - DNA, 15 bp, Homo sapiens
aaaaatgtccaggag

SEQ ID NO: 1482299 - DNA, 15 bp, Homo sapiens
aaaatgtccaggagc

SEQ ID NO: 1482300 - DNA, 15 bp, Homo sapiens
aaatgtccaggagct

SEQ ID NO: 1482301 - DNA, 15 bp, Homo sapiens
aatgtccaggagctg

SEQ ID NO: 1482302 - DNA, 15 bp, Homo sapiens
atgtccaggagctgg

SEQ ID NO: 1482303 - DNA, 15 bp, Homo sapiens
tgtccaggagctggg

SEQ ID NO: 1482304 - DNA, 15 bp, Homo sapiens
gtccaggagctggga

SEQ ID NO: 1482305 - DNA, 15 bp, Homo sapiens
tccaggagctgggag

SEQ ID NO: 1482306 - DNA, 15 bp, Homo sapiens
ccaggagctgggaga

SEQ ID NO: 1482307 - DNA, 15 bp, Homo sapiens
caggagctgggagat

SEQ ID NO: 1482308 - DNA, 15 bp, Homo sapiens
aggagctgggagatt

SEQ ID NO: 1482309 - DNA, 15 bp, Homo sapiens
ggagctgggagatta

SEQ ID NO: 1482310 - DNA, 15 bp, Homo sapiens
gagctgggagattaa

SEQ ID NO: 1482311 - DNA, 15 bp, Homo sapiens
agctgggagattaag

SEQ ID NO: 1482312 - DNA, 15 bp, Homo sapiens
gctgggagattaagt

SEQ ID NO: 1482313 - DNA, 15 bp, Homo sapiens
ctgggagattaagta

SEQ ID NO: 1482314 - DNA, 15 bp, Homo sapiens
tgggagattaagtaa

SEQ ID NO: 1482315 - DNA, 15 bp, Homo sapiens
gggagattaagtaac

SEQ ID NO: 1482316 - DNA, 15 bp, Homo sapiens
ggagattaagtaact

SEQ ID NO: 1482317 - DNA, 15 bp, Homo sapiens
gagattaagtaactt

SEQ ID NO: 1482318 - DNA, 15 bp, Homo sapiens
agattaagtaacttg

SEQ ID NO: 1482319 - DNA, 15 bp, Homo sapiens
gattaagtaacttgc

SEQ ID NO: 1482320 - DNA, 15 bp, Homo sapiens
attaagtaacttgcc

SEQ ID NO: 1482321 - DNA, 15 bp, Homo sapiens
agtaacttgcccaaa

SEQ ID NO: 1482322 - DNA, 15 bp, Homo sapiens
gtaacttgcccaaag

SEQ ID NO: 1482323 - DNA, 15 bp, Homo sapiens
taacttgcccaaagt

SEQ ID NO: 1482324 - DNA, 15 bp, Homo sapiens
aacttgcccaaagtt

SEQ ID NO: 1482325 - DNA, 15 bp, Homo sapiens
acttgcccaaagttg

SEQ ID NO: 1482326 - DNA, 15 bp, Homo sapiens
cttgcccaaagttgc

SEQ ID NO: 1482327 - DNA, 15 bp, Homo sapiens
ttgcccaaagttgca

SEQ ID NO: 1482328 - DNA, 15 bp, Homo sapiens
tgcccaaagttgcac

SEQ ID NO: 1482329 - DNA, 15 bp, Homo sapiens
gcccaaagttgcaca

SEQ ID NO: 1482330 - DNA, 15 bp, Homo sapiens
cccaaagttgcacag

SEQ ID NO: 1482331 - DNA, 15 bp, Homo sapiens
ccaaagttgcacagc

SEQ ID NO: 1482332 - DNA, 15 bp, Homo sapiens
caaagttgcacagcc

SEQ ID NO: 1482333 - DNA, 15 bp, Homo sapiens
aaagttgcacagcca

SEQ ID NO: 1482334 - DNA, 15 bp, Homo sapiens
aagttgcacagccaa

SEQ ID NO: 1482335 - DNA, 15 bp, Homo sapiens
agttgcacagccaat

SEQ ID NO: 1482336 - DNA, 15 bp, Homo sapiens
gttgcacagccaata

SEQ ID NO: 1482337 - DNA, 15 bp, Homo sapiens
ttgcacagccaataa

SEQ ID NO: 1482338 - DNA, 15 bp, Homo sapiens
tgcacagccaataaa

SEQ ID NO: 1482339 - DNA, 15 bp, Homo sapiens
gcacagccaataaag

SEQ ID NO: 1482340 - DNA, 15 bp, Homo sapiens
cacagccaataaagc

SEQ ID NO: 1482341 - DNA, 15 bp, Homo sapiens
acagccaataaagct

SEQ ID NO: 1482342 - DNA, 15 bp, Homo sapiens
cagccaataaagctc

SEQ ID NO: 1482343 - DNA, 15 bp, Homo sapiens
agccaataaagctcc

SEQ ID NO: 1482344 - DNA, 15 bp, Homo sapiens
gccaataaagctcca

SEQ ID NO: 1482345 - DNA, 15 bp, Homo sapiens
ccaataaagctccac

SEQ ID NO: 1482346 - DNA, 15 bp, Homo sapiens
caataaagctccaca

SEQ ID NO: 1482347 - DNA, 15 bp, Homo sapiens
aataaagctccacat

SEQ ID NO: 1482348 - DNA, 15 bp, Homo sapiens
ataaagctccacatt

SEQ ID NO: 1482349 - DNA, 15 bp, Homo sapiens
taaagctccacattg

SEQ ID NO: 1482350 - DNA, 15 bp, Homo sapiens
aaagctccacattga

SEQ ID NO: 1482351 - DNA, 15 bp, Homo sapiens
aagctccacattgac

SEQ ID NO: 1482352 - DNA, 15 bp, Homo sapiens
agctccacattgacc

SEQ ID NO: 1482353 - DNA, 15 bp, Homo sapiens
gctccacattgaccc

SEQ ID NO: 1482354 - DNA, 15 bp, Homo sapiens
ctccacattgaccca

SEQ ID NO: 1482355 - DNA, 15 bp, Homo sapiens
tccacattgacccag

SEQ ID NO: 1482356 - DNA, 15 bp, Homo sapiens
ccacattgacccagc

SEQ ID NO: 1482357 - DNA, 15 bp, Homo sapiens
cacattgacccagct

SEQ ID NO: 1482358 - DNA, 15 bp, Homo sapiens
acattgacccagctg

SEQ ID NO: 1482359 - DNA, 15 bp, Homo sapiens
cattgacccagctgg

SEQ ID NO: 1482360 - DNA, 15 bp, Homo sapiens
attgacccagctggt

SEQ ID NO: 1482361 - DNA, 15 bp, Homo sapiens
ttgacccagctggtg

SEQ ID NO: 1482362 - DNA, 15 bp, Homo sapiens
tgacccagctggtgg

SEQ ID NO: 1482363 - DNA, 15 bp, Homo sapiens
gacccagctggtggc

SEQ ID NO: 1482364 - DNA, 15 bp, Homo sapiens
acccagctggtggcc

SEQ ID NO: 1482365 - DNA, 15 bp, Homo sapiens
cccagctggtggcca

SEQ ID NO: 1482366 - DNA, 15 bp, Homo sapiens
ccagctggtggccag

SEQ ID NO: 1482367 - DNA, 15 bp, Homo sapiens
cagctggtggccagt

SEQ ID NO: 1482368 - DNA, 15 bp, Homo sapiens
agctggtggccagtg

SEQ ID NO: 1482369 - DNA, 15 bp, Homo sapiens
gctggtggccagtgc

SEQ ID NO: 1482370 - DNA, 15 bp, Homo sapiens
ctggtggccagtgcc

SEQ ID NO: 1482371 - DNA, 15 bp, Homo sapiens
tggtggccagtgcct

SEQ ID NO: 1482372 - DNA, 15 bp, Homo sapiens
ggtggccagtgcctt

SEQ ID NO: 1482373 - DNA, 15 bp, Homo sapiens
gtggccagtgccttt

SEQ ID NO: 1482374 - DNA, 15 bp, Homo sapiens
tggccagtgcctttt

SEQ ID NO: 1482375 - DNA, 15 bp, Homo sapiens
ggccagtgccttttg

SEQ ID NO: 1482376 - DNA, 15 bp, Homo sapiens
gccagtgccttttgt

SEQ ID NO: 1482377 - DNA, 15 bp, Homo sapiens
ccagtgccttttgtt

SEQ ID NO: 1482378 - DNA, 15 bp, Homo sapiens
cagtgccttttgtta

SEQ ID NO: 1482379 - DNA, 15 bp, Homo sapiens
agtgccttttgttag

SEQ ID NO: 1482380 - DNA, 15 bp, Homo sapiens
gtgccttttgttaga

SEQ ID NO: 1482381 - DNA, 15 bp, Homo sapiens
tgccttttgttagaa

SEQ ID NO: 1482382 - DNA, 15 bp, Homo sapiens
gccttttgttagaac

SEQ ID NO: 1482383 - DNA, 15 bp, Homo sapiens
ccttttgttagaaca

SEQ ID NO: 1482384 - DNA, 15 bp, Homo sapiens
cttttgttagaacag

SEQ ID NO: 1482385 - DNA, 15 bp, Homo sapiens
ttttgttagaacaga

SEQ ID NO: 1482386 - DNA, 15 bp, Homo sapiens
tttgttagaacagat

SEQ ID NO: 1482387 - DNA, 15 bp, Homo sapiens
ttgttagaacagatt

SEQ ID NO: 1482388 - DNA, 15 bp, Homo sapiens
tgttagaacagattt

SEQ ID NO: 1482389 - DNA, 15 bp, Homo sapiens
gttagaacagattta

SEQ ID NO: 1482390 - DNA, 15 bp, Homo sapiens
ttagaacagatttaa

SEQ ID NO: 1482391 - DNA, 15 bp, Homo sapiens
tagaacagatttaaa

SEQ ID NO: 1482392 - DNA, 15 bp, Homo sapiens
agaacagatttaaag

SEQ ID NO: 1482393 - DNA, 15 bp, Homo sapiens
gaacagatttaaagc

SEQ ID NO: 1482394 - DNA, 15 bp, Homo sapiens
aacagatttaaagca

SEQ ID NO: 1482395 - DNA, 15 bp, Homo sapiens
acagatttaaagcag

SEQ ID NO: 1482396 - DNA, 15 bp, Homo sapiens
cagatttaaagcagc

SEQ ID NO: 1482397 - DNA, 15 bp, Homo sapiens
agatttaaagcagct

SEQ ID NO: 1482398 - DNA, 15 bp, Homo sapiens
gatttaaagcagctg

SEQ ID NO: 1482399 - DNA, 15 bp, Homo sapiens
atttaaagcagctgt

SEQ ID NO: 1482400 - DNA, 15 bp, Homo sapiens
tttaaagcagctgtc

SEQ ID NO: 1482401 - DNA, 15 bp, Homo sapiens
ttaaagcagctgtcc

SEQ ID NO: 1482402 - DNA, 15 bp, Homo sapiens
taaagcagctgtcca

SEQ ID NO: 1482403 - DNA, 15 bp, Homo sapiens
aaagcagctgtccat

SEQ ID NO: 1482404 - DNA, 15 bp, Homo sapiens
aagcagctgtccatg

SEQ ID NO: 1482405 - DNA, 15 bp, Homo sapiens
agcagctgtccatga

SEQ ID NO: 1482406 - DNA, 15 bp, Homo sapiens
gcagctgtccatgaa

SEQ ID NO: 1482407 - DNA, 15 bp, Homo sapiens
cagctgtccatgaag

SEQ ID NO: 1482408 - DNA, 15 bp, Homo sapiens
agctgtccatgaagg

SEQ ID NO: 1482409 - DNA, 15 bp, Homo sapiens
gctgtccatgaaggg

SEQ ID NO: 1482410 - DNA, 15 bp, Homo sapiens
ctgtccatgaaggga

SEQ ID NO: 1482411 - DNA, 15 bp, Homo sapiens
tgtccatgaagggaa

SEQ ID NO: 1482412 - DNA, 15 bp, Homo sapiens
gtccatgaagggaag

SEQ ID NO: 1482413 - DNA, 15 bp, Homo sapiens
tccatgaagggaagc

SEQ ID NO: 1482414 - DNA, 15 bp, Homo sapiens
ccatgaagggaagca

SEQ ID NO: 1482415 - DNA, 15 bp, Homo sapiens
catgaagggaagcaa

SEQ ID NO: 1482416 - DNA, 15 bp, Homo sapiens
atgaagggaagcaag

SEQ ID NO: 1482417 - DNA, 15 bp, Homo sapiens
tgaagggaagcaagc

SEQ ID NO: 1482418 - DNA, 15 bp, Homo sapiens
gaagggaagcaagca

SEQ ID NO: 1482419 - DNA, 15 bp, Homo sapiens
aagggaagcaagcag

SEQ ID NO: 1482420 - DNA, 15 bp, Homo sapiens
agggaagcaagcagt

SEQ ID NO: 1482421 - DNA, 15 bp, Homo sapiens
gggaagcaagcagtg

SEQ ID NO: 1482422 - DNA, 15 bp, Homo sapiens
ggaagcaagcagtgt

SEQ ID NO: 1482423 - DNA, 15 bp, Homo sapiens
gaagcaagcagtgtg

SEQ ID NO: 1482424 - DNA, 15 bp, Homo sapiens
aagcaagcagtgtgg

SEQ ID NO: 1482425 - DNA, 15 bp, Homo sapiens
agcaagcagtgtggt

SEQ ID NO: 1482426 - DNA, 15 bp, Homo sapiens
gcaagcagtgtggtg

SEQ ID NO: 1482427 - DNA, 15 bp, Homo sapiens
caagcagtgtggtga

SEQ ID NO: 1482428 - DNA, 15 bp, Homo sapiens
aagcagtgtggtgat

SEQ ID NO: 1482429 - DNA, 15 bp, Homo sapiens
agcagtgtggtgatt

SEQ ID NO: 1482430 - DNA, 15 bp, Homo sapiens
gcagtgtggtgattg

SEQ ID NO: 1482431 - DNA, 15 bp, Homo sapiens
cagtgtggtgattgg

SEQ ID NO: 1482432 - DNA, 15 bp, Homo sapiens
agtgtggtgattggc

SEQ ID NO: 1482433 - DNA, 15 bp, Homo sapiens
gtgtggtgattggct

SEQ ID NO: 1482434 - DNA, 15 bp, Homo sapiens
tgtggtgattggctg

SEQ ID NO: 1482435 - DNA, 15 bp, Homo sapiens
gtggtgattggctgc

SEQ ID NO: 1482436 - DNA, 15 bp, Homo sapiens
tggtgattggctgcc

SEQ ID NO: 1482437 - DNA, 15 bp, Homo sapiens
ggtgattggctgcct

SEQ ID NO: 1482438 - DNA, 15 bp, Homo sapiens
gtgattggctgcctt

SEQ ID NO: 1482439 - DNA, 15 bp, Homo sapiens
tgattggctgccttt

SEQ ID NO: 1482440 - DNA, 15 bp, Homo sapiens
gattggctgcctttt

SEQ ID NO: 1482441 - DNA, 15 bp, Homo sapiens
attggctgccttttg

SEQ ID NO: 1482442 - DNA, 15 bp, Homo sapiens
ttggctgccttttga

SEQ ID NO: 1482443 - DNA, 15 bp, Homo sapiens
tggctgccttttgac

SEQ ID NO: 1482444 - DNA, 15 bp, Homo sapiens
ggctgccttttgacc

SEQ ID NO: 1482445 - DNA, 15 bp, Homo sapiens
gctgccttttgaccc

SEQ ID NO: 1482446 - DNA, 15 bp, Homo sapiens
ctgccttttgacccc

SEQ ID NO: 1482447 - DNA, 15 bp, Homo sapiens
tgccttttgacccca

SEQ ID NO: 1482448 - DNA, 15 bp, Homo sapiens
gccttttgaccccat

SEQ ID NO: 1482449 - DNA, 15 bp, Homo sapiens
ccttttgaccccatc

SEQ ID NO: 1482450 - DNA, 15 bp, Homo sapiens
cttttgaccccatct

SEQ ID NO: 1482451 - DNA, 15 bp, Homo sapiens
ttttgaccccatctg

SEQ ID NO: 1482452 - DNA, 15 bp, Homo sapiens
tttgaccccatctgc

SEQ ID NO: 1482453 - DNA, 15 bp, Homo sapiens
ttgaccccatctgca

SEQ ID NO: 1482454 - DNA, 15 bp, Homo sapiens
tgaccccatctgcag

SEQ ID NO: 1482455 - DNA, 15 bp, Homo sapiens
gaccccatctgcagc

SEQ ID NO: 1482456 - DNA, 15 bp, Homo sapiens
accccatctgcagcc

SEQ ID NO: 1482457 - DNA, 15 bp, Homo sapiens
ccccatctgcagcca

SEQ ID NO: 1482458 - DNA, 15 bp, Homo sapiens
cccatctgcagccag

SEQ ID NO: 1482459 - DNA, 15 bp, Homo sapiens
ccatctgcagccagg

SEQ ID NO: 1482460 - DNA, 15 bp, Homo sapiens
catctgcagccagga

SEQ ID NO: 1482461 - DNA, 15 bp, Homo sapiens
atctgcagccaggat

SEQ ID NO: 1482462 - DNA, 15 bp, Homo sapiens
tctgcagccaggatg

SEQ ID NO: 1482463 - DNA, 15 bp, Homo sapiens
ctgcagccaggatgg

SEQ ID NO: 1482464 - DNA, 15 bp, Homo sapiens
tgcagccaggatggc

SEQ ID NO: 1482465 - DNA, 15 bp, Homo sapiens
gcagccaggatggcc

SEQ ID NO: 1482466 - DNA, 15 bp, Homo sapiens
cagccaggatggcca

SEQ ID NO: 1482467 - DNA, 15 bp, Homo sapiens
agccaggatggccag

SEQ ID NO: 1482468 - DNA, 15 bp, Homo sapiens
gccaggatggccagg

SEQ ID NO: 1482469 - DNA, 15 bp, Homo sapiens
ccaggatggccaggg

SEQ ID NO: 1482470 - DNA, 15 bp, Homo sapiens
caggatggccagggc

SEQ ID NO: 1482471 - DNA, 15 bp, Homo sapiens
aggatggccagggct

SEQ ID NO: 1482472 - DNA, 15 bp, Homo sapiens
ggatggccagggctc

SEQ ID NO: 1482473 - DNA, 15 bp, Homo sapiens
gatggccagggctcc

SEQ ID NO: 1482474 - DNA, 15 bp, Homo sapiens
atggccagggctcct

SEQ ID NO: 1482475 - DNA, 15 bp, Homo sapiens
tggccagggctcctc

SEQ ID NO: 1482476 - DNA, 15 bp, Homo sapiens
ggccagggctcctct

SEQ ID NO: 1482477 - DNA, 15 bp, Homo sapiens
gccagggctcctctg

SEQ ID NO: 1482478 - DNA, 15 bp, Homo sapiens
ccagggctcctctgc

SEQ ID NO: 1482479 - DNA, 15 bp, Homo sapiens
cagggctcctctgca

SEQ ID NO: 1482480 - DNA, 15 bp, Homo sapiens
agggctcctctgcag

SEQ ID NO: 1482481 - DNA, 15 bp, Homo sapiens
gggctcctctgcagg

SEQ ID NO: 1482482 - DNA, 15 bp, Homo sapiens
ggctcctctgcagga

SEQ ID NO: 1482483 - DNA, 15 bp, Homo sapiens
gctcctctgcaggaa

SEQ ID NO: 1482484 - DNA, 15 bp, Homo sapiens
ctcctctgcaggaag

SEQ ID NO: 1482485 - DNA, 15 bp, Homo sapiens
tcctctgcaggaaga

SEQ ID NO: 1482486 - DNA, 15 bp, Homo sapiens
cctctgcaggaagag

SEQ ID NO: 1482487 - DNA, 15 bp, Homo sapiens
ctctgcaggaagagg

SEQ ID NO: 1482488 - DNA, 15 bp, Homo sapiens
tctgcaggaagaggc

SEQ ID NO: 1482489 - DNA, 15 bp, Homo sapiens
ctgcaggaagaggct

SEQ ID NO: 1482490 - DNA, 15 bp, Homo sapiens
tgcaggaagaggctg

SEQ ID NO: 1482491 - DNA, 15 bp, Homo sapiens
gcaggaagaggctgc

SEQ ID NO: 1482492 - DNA, 15 bp, Homo sapiens
caggaagaggctgct

SEQ ID NO: 1482493 - DNA, 15 bp, Homo sapiens
aggaagaggctgctc

SEQ ID NO: 1482494 - DNA, 15 bp, Homo sapiens
ggaagaggctgctcc

SEQ ID NO: 1482495 - DNA, 15 bp, Homo sapiens
gaagaggctgctccc

SEQ ID NO: 1482496 - DNA, 15 bp, Homo sapiens
aagaggctgctccca

SEQ ID NO: 1482497 - DNA, 15 bp, Homo sapiens
agaggctgctcccag

SEQ ID NO: 1482498 - DNA, 15 bp, Homo sapiens
gaggctgctcccagt

SEQ ID NO: 1482499 - DNA, 15 bp, Homo sapiens
aggctgctcccagtg

SEQ ID NO: 1482500 - DNA, 15 bp, Homo sapiens
ggctgctcccagtgt

SEQ ID NO: 1482501 - DNA, 15 bp, Homo sapiens
gctgctcccagtgtg

SEQ ID NO: 1482502 - DNA, 15 bp, Homo sapiens
ctgctcccagtgtgg

SEQ ID NO: 1482503 - DNA, 15 bp, Homo sapiens
tgctcccagtgtggt

SEQ ID NO: 1482504 - DNA, 15 bp, Homo sapiens
gctcccagtgtggtc

SEQ ID NO: 1482505 - DNA, 15 bp, Homo sapiens
ctcccagtgtggtcc

SEQ ID NO: 1482506 - DNA, 15 bp, Homo sapiens
tcccagtgtggtcca

SEQ ID NO: 1482507 - DNA, 15 bp, Homo sapiens
cccagtgtggtccag

SEQ ID NO: 1482508 - DNA, 15 bp, Homo sapiens
ccagtgtggtccaga

SEQ ID NO: 1482509 - DNA, 15 bp, Homo sapiens
cagtgtggtccagat

SEQ ID NO: 1482510 - DNA, 15 bp, Homo sapiens
agtgtggtccagatc

SEQ ID NO: 1482511 - DNA, 15 bp, Homo sapiens
gtgtggtccagatct

SEQ ID NO: 1482512 - DNA, 15 bp, Homo sapiens
tgtggtccagatctt

SEQ ID NO: 1482513 - DNA, 15 bp, Homo sapiens
gtggtccagatcttc

SEQ ID NO: 1482514 - DNA, 15 bp, Homo sapiens
tggtccagatcttca

SEQ ID NO: 1482515 - DNA, 15 bp, Homo sapiens
ggtccagatcttcac

SEQ ID NO: 1482516 - DNA, 15 bp, Homo sapiens
gtccagatcttcacc

SEQ ID NO: 1482517 - DNA, 15 bp, Homo sapiens
tccagatcttcaccc

SEQ ID NO: 1482518 - DNA, 15 bp, Homo sapiens
ccagatcttcaccca

SEQ ID NO: 1482519 - DNA, 15 bp, Homo sapiens
cagatcttcacccat

SEQ ID NO: 1482520 - DNA, 15 bp, Homo sapiens
agatcttcacccatc

SEQ ID NO: 1482521 - DNA, 15 bp, Homo sapiens
gatcttcacccatcc

SEQ ID NO: 1482522 - DNA, 15 bp, Homo sapiens
atcttcacccatcct

SEQ ID NO: 1482523 - DNA, 15 bp, Homo sapiens
tcttcacccatcctc

SEQ ID NO: 1482524 - DNA, 15 bp, Homo sapiens
cttcacccatcctca

SEQ ID NO: 1482525 - DNA, 15 bp, Homo sapiens
ttcacccatcctcag

SEQ ID NO: 1482526 - DNA, 15 bp, Homo sapiens
tcacccatcctcagg

SEQ ID NO: 1482527 - DNA, 15 bp, Homo sapiens
cacccatcctcaggc

SEQ ID NO: 1482528 - DNA, 15 bp, Homo sapiens
acccatcctcaggcg

SEQ ID NO: 1482529 - DNA, 15 bp, Homo sapiens
cccatcctcaggcgg

SEQ ID NO: 1482530 - DNA, 15 bp, Homo sapiens
ccatcctcaggcggc

SEQ ID NO: 1482531 - DNA, 15 bp, Homo sapiens
catcctcaggcggca

SEQ ID NO: 1482532 - DNA, 15 bp, Homo sapiens
atcctcaggcggcac

SEQ ID NO: 1482533 - DNA, 15 bp, Homo sapiens
tcctcaggcggcacc

SEQ ID NO: 1482534 - DNA, 15 bp, Homo sapiens
cctcaggcggcacca

SEQ ID NO: 1482535 - DNA, 15 bp, Homo sapiens
ctcaggcggcaccat

SEQ ID NO: 1482536 - DNA, 15 bp, Homo sapiens
tcaggcggcaccatc

SEQ ID NO: 1482537 - DNA, 15 bp, Homo sapiens
caggcggcaccatca

SEQ ID NO: 1482538 - DNA, 15 bp, Homo sapiens
aggcggcaccatcac

SEQ ID NO: 1482539 - DNA, 15 bp, Homo sapiens
ggcggcaccatcact

SEQ ID NO: 1482540 - DNA, 15 bp, Homo sapiens
gcggcaccatcactg

SEQ ID NO: 1482541 - DNA, 15 bp, Homo sapiens
cggcaccatcactgg

SEQ ID NO: 1482542 - DNA, 15 bp, Homo sapiens
ggcaccatcactggg

SEQ ID NO: 1482543 - DNA, 15 bp, Homo sapiens
gcaccatcactggga

SEQ ID NO: 1482544 - DNA, 15 bp, Homo sapiens
caccatcactgggat

SEQ ID NO: 1482545 - DNA, 15 bp, Homo sapiens
accatcactgggatc

SEQ ID NO: 1482546 - DNA, 15 bp, Homo sapiens
ccatcactgggatca

SEQ ID NO: 1482547 - DNA, 15 bp, Homo sapiens
catcactgggatcag

SEQ ID NO: 1482548 - DNA, 15 bp, Homo sapiens
atcactgggatcagg

SEQ ID NO: 1482549 - DNA, 15 bp, Homo sapiens
tcactgggatcagga

SEQ ID NO: 1482550 - DNA, 15 bp, Homo sapiens
cactgggatcaggaa

SEQ ID NO: 1482551 - DNA, 15 bp, Homo sapiens
actgggatcaggaaa

SEQ ID NO: 1482552 - DNA, 15 bp, Homo sapiens
ctgggatcaggaaac

SEQ ID NO: 1482553 - DNA, 15 bp, Homo sapiens
tgggatcaggaaacc

SEQ ID NO: 1482554 - DNA, 15 bp, Homo sapiens
gggatcaggaaacca

SEQ ID NO: 1482555 - DNA, 15 bp, Homo sapiens
ggatcaggaaaccat

SEQ ID NO: 1482556 - DNA, 15 bp, Homo sapiens
gatcaggaaaccatt

SEQ ID NO: 1482557 - DNA, 15 bp, Homo sapiens
atcaggaaaccattc

SEQ ID NO: 1482558 - DNA, 15 bp, Homo sapiens
tcaggaaaccattcc

SEQ ID NO: 1482559 - DNA, 15 bp, Homo sapiens
caggaaaccattccc

SEQ ID NO: 1482560 - DNA, 15 bp, Homo sapiens
aggaaaccattcccc

SEQ ID NO: 1482561 - DNA, 15 bp, Homo sapiens
ggaaaccattcccca

SEQ ID NO: 1482562 - DNA, 15 bp, Homo sapiens
gaaaccattccccag

SEQ ID NO: 1482563 - DNA, 15 bp, Homo sapiens
aaaccattccccagg

SEQ ID NO: 1482564 - DNA, 15 bp, Homo sapiens
aaccattccccaggt

SEQ ID NO: 1482565 - DNA, 15 bp, Homo sapiens
accattccccaggtc

SEQ ID NO: 1482566 - DNA, 15 bp, Homo sapiens
ccattccccaggtca

SEQ ID NO: 1482567 - DNA, 15 bp, Homo sapiens
cattccccaggtcag

SEQ ID NO: 1482568 - DNA, 15 bp, Homo sapiens
attccccaggtcagg

SEQ ID NO: 1482569 - DNA, 15 bp, Homo sapiens
ttccccaggtcaggg

SEQ ID NO: 1482570 - DNA, 15 bp, Homo sapiens
tccccaggtcaggga

SEQ ID NO: 1482571 - DNA, 15 bp, Homo sapiens
ccccaggtcagggac

SEQ ID NO: 1482572 - DNA, 15 bp, Homo sapiens
cccaggtcagggaca

SEQ ID NO: 1482573 - DNA, 15 bp, Homo sapiens
ccaggtcagggacaa

SEQ ID NO: 1482574 - DNA, 15 bp, Homo sapiens
caggtcagggacaac

SEQ ID NO: 1482575 - DNA, 15 bp, Homo sapiens
aggtcagggacaaca

SEQ ID NO: 1482576 - DNA, 15 bp, Homo sapiens
ggtcagggacaacat

SEQ ID NO: 1482577 - DNA, 15 bp, Homo sapiens
gtcagggacaacatt

SEQ ID NO: 1482578 - DNA, 15 bp, Homo sapiens
tcagggacaacattc

SEQ ID NO: 1482579 - DNA, 15 bp, Homo sapiens
cagggacaacattca

SEQ ID NO: 1482580 - DNA, 15 bp, Homo sapiens
agggacaacattcac

SEQ ID NO: 1482581 - DNA, 15 bp, Homo sapiens
gggacaacattcaca

SEQ ID NO: 1482582 - DNA, 15 bp, Homo sapiens
ggacaacattcacat

SEQ ID NO: 1482583 - DNA, 15 bp, Homo sapiens
gacaacattcacatc

SEQ ID NO: 1482584 - DNA, 15 bp, Homo sapiens
acaacattcacatca

SEQ ID NO: 1482585 - DNA, 15 bp, Homo sapiens
caacattcacatcat

SEQ ID NO: 1482586 - DNA, 15 bp, Homo sapiens
aacattcacatcatg

SEQ ID NO: 1482587 - DNA, 15 bp, Homo sapiens
acattcacatcatga

SEQ ID NO: 1482588 - DNA, 15 bp, Homo sapiens
cattcacatcatgac

SEQ ID NO: 1482589 - DNA, 15 bp, Homo sapiens
attcacatcatgaca

SEQ ID NO: 1482590 - DNA, 15 bp, Homo sapiens
ttcacatcatgacaa

SEQ ID NO: 1482591 - DNA, 15 bp, Homo sapiens
tcacatcatgacaat

SEQ ID NO: 1482592 - DNA, 15 bp, Homo sapiens
cacatcatgacaatc

SEQ ID NO: 1482593 - DNA, 15 bp, Homo sapiens
acatcatgacaatct

SEQ ID NO: 1482594 - DNA, 15 bp, Homo sapiens
catcatgacaatctg

SEQ ID NO: 1482595 - DNA, 15 bp, Homo sapiens
atcatgacaatctgt

SEQ ID NO: 1482596 - DNA, 15 bp, Homo sapiens
tcatgacaatctgta

SEQ ID NO: 1482597 - DNA, 15 bp, Homo sapiens
catgacaatctgtaa

SEQ ID NO: 1482598 - DNA, 15 bp, Homo sapiens
atgacaatctgtaag

SEQ ID NO: 1482599 - DNA, 15 bp, Homo sapiens
tgacaatctgtaagg

SEQ ID NO: 1482600 - DNA, 15 bp, Homo sapiens
gacaatctgtaaggc

SEQ ID NO: 1482601 - DNA, 15 bp, Homo sapiens
acaatctgtaaggcg

SEQ ID NO: 1482602 - DNA, 15 bp, Homo sapiens
caatctgtaaggcgc

SEQ ID NO: 1482603 - DNA, 15 bp, Homo sapiens
aatctgtaaggcgcg

SEQ ID NO: 1482604 - DNA, 15 bp, Homo sapiens
atctgtaaggcgcgg

SEQ ID NO: 1482605 - DNA, 15 bp, Homo sapiens
tctgtaaggcgcggg

SEQ ID NO: 1482606 - DNA, 15 bp, Homo sapiens
ctgtaaggcgcgggc

SEQ ID NO: 1482607 - DNA, 15 bp, Homo sapiens
tgtaaggcgcgggct

SEQ ID NO: 1482608 - DNA, 15 bp, Homo sapiens
gtaaggcgcgggctg

SEQ ID NO: 1482609 - DNA, 15 bp, Homo sapiens
taaggcgcgggctgc

SEQ ID NO: 1482610 - DNA, 15 bp, Homo sapiens
aaggcgcgggctgca

SEQ ID NO: 1482611 - DNA, 15 bp, Homo sapiens
aggcgcgggctgcaa

SEQ ID NO: 1482612 - DNA, 15 bp, Homo sapiens
ggcgcgggctgcaag

SEQ ID NO: 1482613 - DNA, 15 bp, Homo sapiens
gcgcgggctgcaaga

SEQ ID NO: 1482614 - DNA, 15 bp, Homo sapiens
cgcgggctgcaagac

SEQ ID NO: 1482615 - DNA, 15 bp, Homo sapiens
gcgggctgcaagaca

SEQ ID NO: 1482616 - DNA, 15 bp, Homo sapiens
cgggctgcaagacag

SEQ ID NO: 1482617 - DNA, 15 bp, Homo sapiens
gggctgcaagacagc

SEQ ID NO: 1482618 - DNA, 15 bp, Homo sapiens
ggctgcaagacagca

SEQ ID NO: 1482619 - DNA, 15 bp, Homo sapiens
gctgcaagacagcag

SEQ ID NO: 1482620 - DNA, 15 bp, Homo sapiens
ctgcaagacagcagc

SEQ ID NO: 1482621 - DNA, 15 bp, Homo sapiens
tgcaagacagcagcc

SEQ ID NO: 1482622 - DNA, 15 bp, Homo sapiens
gcaagacagcagccc

SEQ ID NO: 1482623 - DNA, 15 bp, Homo sapiens
caagacagcagccca

SEQ ID NO: 1482624 - DNA, 15 bp, Homo sapiens
aagacagcagcccat

SEQ ID NO: 1482625 - DNA, 15 bp, Homo sapiens
agacagcagcccatt

SEQ ID NO: 1482626 - DNA, 15 bp, Homo sapiens
gacagcagcccattg

SEQ ID NO: 1482627 - DNA, 15 bp, Homo sapiens
acagcagcccattgt

SEQ ID NO: 1482628 - DNA, 15 bp, Homo sapiens
cagcagcccattgtc

SEQ ID NO: 1482629 - DNA, 15 bp, Homo sapiens
agcagcccattgtct

SEQ ID NO: 1482630 - DNA, 15 bp, Homo sapiens
gcagcccattgtctt

SEQ ID NO: 1482631 - DNA, 15 bp, Homo sapiens
cagcccattgtcttg

SEQ ID NO: 1482632 - DNA, 15 bp, Homo sapiens
agcccattgtcttga

SEQ ID NO: 1482633 - DNA, 15 bp, Homo sapiens
gcccattgtcttgaa

SEQ ID NO: 1482634 - DNA, 15 bp, Homo sapiens
cccattgtcttgaag

SEQ ID NO: 1482635 - DNA, 15 bp, Homo sapiens
ccattgtcttgaagc

SEQ ID NO: 1482636 - DNA, 15 bp, Homo sapiens
cattgtcttgaagca

SEQ ID NO: 1482637 - DNA, 15 bp, Homo sapiens
attgtcttgaagcag

SEQ ID NO: 1482638 - DNA, 15 bp, Homo sapiens
ttgtcttgaagcagg

SEQ ID NO: 1482639 - DNA, 15 bp, Homo sapiens
tgtcttgaagcaggg

SEQ ID NO: 1482640 - DNA, 15 bp, Homo sapiens
gtcttgaagcagggt

SEQ ID NO: 1482641 - DNA, 15 bp, Homo sapiens
tcttgaagcagggtt

SEQ ID NO: 1482642 - DNA, 15 bp, Homo sapiens
cttgaagcagggttc

SEQ ID NO: 1482643 - DNA, 15 bp, Homo sapiens
ttgaagcagggttct

SEQ ID NO: 1482644 - DNA, 15 bp, Homo sapiens
tgaagcagggttctg

SEQ ID NO: 1482645 - DNA, 15 bp, Homo sapiens
gaagcagggttctgg

SEQ ID NO: 1482646 - DNA, 15 bp, Homo sapiens
aagcagggttctgga

SEQ ID NO: 1482647 - DNA, 15 bp, Homo sapiens
agcagggttctggag

SEQ ID NO: 1482648 - DNA, 15 bp, Homo sapiens
gcagggttctggagg

SEQ ID NO: 1482649 - DNA, 15 bp, Homo sapiens
cagggttctggagga

SEQ ID NO: 1482650 - DNA, 15 bp, Homo sapiens
agggttctggaggag

SEQ ID NO: 1482651 - DNA, 15 bp, Homo sapiens
gggttctggaggaga

SEQ ID NO: 1482652 - DNA, 15 bp, Homo sapiens
ggttctggaggagac

SEQ ID NO: 1482653 - DNA, 15 bp, Homo sapiens
gttctggaggagaca

SEQ ID NO: 1482654 - DNA, 15 bp, Homo sapiens
ttctggaggagacac

SEQ ID NO: 1482655 - DNA, 15 bp, Homo sapiens
tctggaggagacacg

SEQ ID NO: 1482656 - DNA, 15 bp, Homo sapiens
ctggaggagacacgg

SEQ ID NO: 1482657 - DNA, 15 bp, Homo sapiens
tggaggagacacggt

SEQ ID NO: 1482658 - DNA, 15 bp, Homo sapiens
ggaggagacacggtg

SEQ ID NO: 1482659 - DNA, 15 bp, Homo sapiens
gaggagacacggtgc

SEQ ID NO: 1482660 - DNA, 15 bp, Homo sapiens
aggagacacggtgcc

SEQ ID NO: 1482661 - DNA, 15 bp, Homo sapiens
ggagacacggtgccc

SEQ ID NO: 1482662 - DNA, 15 bp, Homo sapiens
gagacacggtgccca

SEQ ID NO: 1482663 - DNA, 15 bp, Homo sapiens
agacacggtgcccat

SEQ ID NO: 1482664 - DNA, 15 bp, Homo sapiens
gacacggtgcccatc

SEQ ID NO: 1482665 - DNA, 15 bp, Homo sapiens
acacggtgcccatca

SEQ ID NO: 1482666 - DNA, 15 bp, Homo sapiens
cacggtgcccatcac

SEQ ID NO: 1482667 - DNA, 15 bp, Homo sapiens
acggtgcccatcacc

SEQ ID NO: 1482668 - DNA, 15 bp, Homo sapiens
cggtgcccatcacct

SEQ ID NO: 1482669 - DNA, 15 bp, Homo sapiens
ggtgcccatcacctg

SEQ ID NO: 1482670 - DNA, 15 bp, Homo sapiens
gtgcccatcacctgc

SEQ ID NO: 1482671 - DNA, 15 bp, Homo sapiens
tgcccatcacctgcc

SEQ ID NO: 1482672 - DNA, 15 bp, Homo sapiens
gcccatcacctgccc

SEQ ID NO: 1482673 - DNA, 15 bp, Homo sapiens
cccatcacctgccct

SEQ ID NO: 1482674 - DNA, 15 bp, Homo sapiens
ccatcacctgccctt

SEQ ID NO: 1482675 - DNA, 15 bp, Homo sapiens
catcacctgcccttt

SEQ ID NO: 1482676 - DNA, 15 bp, Homo sapiens
atcacctgccctttc

SEQ ID NO: 1482677 - DNA, 15 bp, Homo sapiens
tcacctgccctttct

SEQ ID NO: 1482678 - DNA, 15 bp, Homo sapiens
cacctgccctttctt

SEQ ID NO: 1482679 - DNA, 15 bp, Homo sapiens
acctgccctttcttt

SEQ ID NO: 1482680 - DNA, 15 bp, Homo sapiens
cctgccctttctttg

SEQ ID NO: 1482681 - DNA, 15 bp, Homo sapiens
ctgccctttctttgt

SEQ ID NO: 1482682 - DNA, 15 bp, Homo sapiens
tgccctttctttgtc

SEQ ID NO: 1482683 - DNA, 15 bp, Homo sapiens
gtactttcgtctgca

SEQ ID NO: 1482684 - DNA, 15 bp, Homo sapiens
tactttcgtctgcaa

SEQ ID NO: 1482685 - DNA, 15 bp, Homo sapiens
actttcgtctgcaaa

SEQ ID NO: 1482686 - DNA, 15 bp, Homo sapiens
ctttcgtctgcaaat

SEQ ID NO: 1482687 - DNA, 15 bp, Homo sapiens
tttcgtctgcaaata

SEQ ID NO: 1482688 - DNA, 15 bp, Homo sapiens
ttcgtctgcaaataa

SEQ ID NO: 1482689 - DNA, 15 bp, Homo sapiens
tcgtctgcaaataat

SEQ ID NO: 1482690 - DNA, 15 bp, Homo sapiens
cgtctgcaaataatt

SEQ ID NO: 1482691 - DNA, 15 bp, Homo sapiens
gtctgcaaataattg

SEQ ID NO: 1482692 - DNA, 15 bp, Homo sapiens
tctgcaaataattgc

SEQ ID NO: 1482693 - DNA, 15 bp, Homo sapiens
ctgcaaataattgca

SEQ ID NO: 1482694 - DNA, 15 bp, Homo sapiens
tgcaaataattgcaa

SEQ ID NO: 1482695 - DNA, 15 bp, Homo sapiens
gcaaataattgcaat

SEQ ID NO: 1482696 - DNA, 15 bp, Homo sapiens
caaataattgcaatt

SEQ ID NO: 1482697 - DNA, 15 bp, Homo sapiens
aaataattgcaattg

SEQ ID NO: 1482698 - DNA, 15 bp, Homo sapiens
aataattgcaattgc

SEQ ID NO: 1482699 - DNA, 15 bp, Homo sapiens
ataattgcaattgca

SEQ ID NO: 1482700 - DNA, 15 bp, Homo sapiens
taattgcaattgcat

SEQ ID NO: 1482701 - DNA, 15 bp, Homo sapiens
aattgcaattgcatc

SEQ ID NO: 1482702 - DNA, 15 bp, Homo sapiens
attgcaattgcatct

SEQ ID NO: 1482703 - DNA, 15 bp, Homo sapiens
ttgcaattgcatctt

SEQ ID NO: 1482704 - DNA, 15 bp, Homo sapiens
tgcaattgcatcttc

SEQ ID NO: 1482705 - DNA, 15 bp, Homo sapiens
gcaattgcatcttct

SEQ ID NO: 1482706 - DNA, 15 bp, Homo sapiens
caattgcatcttcta

SEQ ID NO: 1482707 - DNA, 15 bp, Homo sapiens
aattgcatcttctag

SEQ ID NO: 1482708 - DNA, 15 bp, Homo sapiens
attgcatcttctagg

SEQ ID NO: 1482709 - DNA, 15 bp, Homo sapiens
ttgcatcttctagga

SEQ ID NO: 1482710 - DNA, 15 bp, Homo sapiens
tgcatcttctaggaa

SEQ ID NO: 1482711 - DNA, 15 bp, Homo sapiens
gcatcttctaggaat

SEQ ID NO: 1482712 - DNA, 15 bp, Homo sapiens
catcttctaggaatt

SEQ ID NO: 1482713 - DNA, 15 bp, Homo sapiens
atcttctaggaattc

SEQ ID NO: 1482714 - DNA, 15 bp, Homo sapiens
tcttctaggaattct

SEQ ID NO: 1482715 - DNA, 15 bp, Homo sapiens
cttctaggaattctt

SEQ ID NO: 1482716 - DNA, 15 bp, Homo sapiens
ttctaggaattcttt

SEQ ID NO: 1482717 - DNA, 15 bp, Homo sapiens
tctaggaattctttc

SEQ ID NO: 1482718 - DNA, 15 bp, Homo sapiens
ctaggaattctttct

SEQ ID NO: 1482719 - DNA, 15 bp, Homo sapiens
taggaattctttctc

SEQ ID NO: 1482720 - DNA, 15 bp, Homo sapiens
aggaattctttctct

SEQ ID NO: 1482721 - DNA, 15 bp, Homo sapiens
ggaattctttctctg

SEQ ID NO: 1482722 - DNA, 15 bp, Homo sapiens
gaattctttctctgg

SEQ ID NO: 1482723 - DNA, 15 bp, Homo sapiens
aattctttctctggg

SEQ ID NO: 1482724 - DNA, 15 bp, Homo sapiens
attctttctctgggt

SEQ ID NO: 1482725 - DNA, 15 bp, Homo sapiens
ttctttctctgggtc

SEQ ID NO: 1482726 - DNA, 15 bp, Homo sapiens
tctttctctgggtca

SEQ ID NO: 1482727 - DNA, 15 bp, Homo sapiens
ctttctctgggtcat

SEQ ID NO: 1482728 - DNA, 15 bp, Homo sapiens
tttctctgggtcatc

SEQ ID NO: 1482729 - DNA, 15 bp, Homo sapiens
ttctctgggtcatcc

SEQ ID NO: 1482730 - DNA, 15 bp, Homo sapiens
tctctgggtcatcca

SEQ ID NO: 1482731 - DNA, 15 bp, Homo sapiens
ctctgggtcatccac

SEQ ID NO: 1482732 - DNA, 15 bp, Homo sapiens
tctgggtcatccact

SEQ ID NO: 1482733 - DNA, 15 bp, Homo sapiens
ctgggtcatccactg

SEQ ID NO: 1482734 - DNA, 15 bp, Homo sapiens
tgggtcatccactgc

SEQ ID NO: 1482735 - DNA, 15 bp, Homo sapiens
gggtcatccactgct

SEQ ID NO: 1482736 - DNA, 15 bp, Homo sapiens
ggtcatccactgctg

SEQ ID NO: 1482737 - DNA, 15 bp, Homo sapiens
gtcatccactgctga

SEQ ID NO: 1482738 - DNA, 15 bp, Homo sapiens
tcatccactgctgag

SEQ ID NO: 1482739 - DNA, 15 bp, Homo sapiens
catccactgctgagc

SEQ ID NO: 1482740 - DNA, 15 bp, Homo sapiens
atccactgctgagcc

SEQ ID NO: 1482741 - DNA, 15 bp, Homo sapiens
tccactgctgagccc

SEQ ID NO: 1482742 - DNA, 15 bp, Homo sapiens
ccactgctgagcccc

SEQ ID NO: 1482743 - DNA, 15 bp, Homo sapiens
cactgctgagccccc

SEQ ID NO: 1482744 - DNA, 15 bp, Homo sapiens
actgctgagccccct

SEQ ID NO: 1482745 - DNA, 15 bp, Homo sapiens
ctgctgagccccctc

SEQ ID NO: 1482746 - DNA, 15 bp, Homo sapiens
tgctgagccccctcc

SEQ ID NO: 1482747 - DNA, 15 bp, Homo sapiens
gctgagccccctccc

SEQ ID NO: 1482748 - DNA, 15 bp, Homo sapiens
ctgagccccctcccc

SEQ ID NO: 1482749 - DNA, 15 bp, Homo sapiens
tgagccccctcccca

SEQ ID NO: 1482750 - DNA, 15 bp, Homo sapiens
gagccccctccccag

SEQ ID NO: 1482751 - DNA, 15 bp, Homo sapiens
agccccctccccagg

SEQ ID NO: 1482752 - DNA, 15 bp, Homo sapiens
gccccctccccagga

SEQ ID NO: 1482753 - DNA, 15 bp, Homo sapiens
ccccctccccaggaa

SEQ ID NO: 1482754 - DNA, 15 bp, Homo sapiens
cccctccccaggaag

SEQ ID NO: 1482755 - DNA, 15 bp, Homo sapiens
ccctccccaggaagt

SEQ ID NO: 1482756 - DNA, 15 bp, Homo sapiens
cctccccaggaagtg

SEQ ID NO: 1482757 - DNA, 15 bp, Homo sapiens
ctccccaggaagtgg

SEQ ID NO: 1482758 - DNA, 15 bp, Homo sapiens
tccccaggaagtgga

SEQ ID NO: 1482759 - DNA, 15 bp, Homo sapiens
ccccaggaagtggaa

SEQ ID NO: 1482760 - DNA, 15 bp, Homo sapiens
cccaggaagtggaat

SEQ ID NO: 1482761 - DNA, 15 bp, Homo sapiens
ccaggaagtggaatt

SEQ ID NO: 1482762 - DNA, 15 bp, Homo sapiens
caggaagtggaattg

SEQ ID NO: 1482763 - DNA, 15 bp, Homo sapiens
aggaagtggaattgt

SEQ ID NO: 1482764 - DNA, 15 bp, Homo sapiens
ggaagtggaattgta

SEQ ID NO: 1482765 - DNA, 15 bp, Homo sapiens
gaagtggaattgtaa

SEQ ID NO: 1482766 - DNA, 15 bp, Homo sapiens
aagtggaattgtaag

SEQ ID NO: 1482767 - DNA, 15 bp, Homo sapiens
agtggaattgtaagt

SEQ ID NO: 1482768 - DNA, 15 bp, Homo sapiens
gtggaattgtaagtg

SEQ ID NO: 1482769 - DNA, 15 bp, Homo sapiens
tggaattgtaagtga

SEQ ID NO: 1482770 - DNA, 15 bp, Homo sapiens
ggaattgtaagtgaa

SEQ ID NO: 1482771 - DNA, 15 bp, Homo sapiens
gaattgtaagtgaaa

SEQ ID NO: 1482772 - DNA, 15 bp, Homo sapiens
aattgtaagtgaaag

SEQ ID NO: 1482773 - DNA, 15 bp, Homo sapiens
attgtaagtgaaagg

SEQ ID NO: 1482774 - DNA, 15 bp, Homo sapiens
ttgtaagtgaaaggg

SEQ ID NO: 1482775 - DNA, 15 bp, Homo sapiens
tgtaagtgaaagggg

SEQ ID NO: 1482776 - DNA, 15 bp, Homo sapiens
gtaagtgaaagggga

SEQ ID NO: 1482777 - DNA, 15 bp, Homo sapiens
taagtgaaaggggaa

SEQ ID NO: 1482778 - DNA, 15 bp, Homo sapiens
aagtgaaaggggaaa

SEQ ID NO: 1482779 - DNA, 15 bp, Homo sapiens
agtgaaaggggaaag

SEQ ID NO: 1482780 - DNA, 15 bp, Homo sapiens
gtgaaaggggaaagg

SEQ ID NO: 1482781 - DNA, 15 bp, Homo sapiens
tgaaaggggaaaggc

SEQ ID NO: 1482782 - DNA, 15 bp, Homo sapiens
gaaaggggaaaggca

SEQ ID NO: 1482783 - DNA, 15 bp, Homo sapiens
aaaggggaaaggcac

SEQ ID NO: 1482784 - DNA, 15 bp, Homo sapiens
aaggggaaaggcact

SEQ ID NO: 1482785 - DNA, 15 bp, Homo sapiens
aggggaaaggcactt

SEQ ID NO: 1482786 - DNA, 15 bp, Homo sapiens
ggggaaaggcacttg

SEQ ID NO: 1482787 - DNA, 15 bp, Homo sapiens
gggaaaggcacttgg

SEQ ID NO: 1482788 - DNA, 15 bp, Homo sapiens
ggaaaggcacttggg

SEQ ID NO: 1482789 - DNA, 15 bp, Homo sapiens
gaaaggcacttggga

SEQ ID NO: 1482790 - DNA, 15 bp, Homo sapiens
aaaggcacttgggag

SEQ ID NO: 1482791 - DNA, 15 bp, Homo sapiens
aaggcacttgggagg

SEQ ID NO: 1482792 - DNA, 15 bp, Homo sapiens
aggcacttgggaggg

SEQ ID NO: 1482793 - DNA, 15 bp, Homo sapiens
ggcacttgggagggg

SEQ ID NO: 1482794 - DNA, 15 bp, Homo sapiens
gcacttgggaggggg

SEQ ID NO: 1482795 - DNA, 15 bp, Homo sapiens
cacttgggaggggga

SEQ ID NO: 1482796 - DNA, 15 bp, Homo sapiens
acttgggagggggaa

SEQ ID NO: 1482797 - DNA, 15 bp, Homo sapiens
cttgggagggggaat

SEQ ID NO: 1482798 - DNA, 15 bp, Homo sapiens
ttgggagggggaatg

SEQ ID NO: 1482799 - DNA, 15 bp, Homo sapiens
tgggagggggaatga

SEQ ID NO: 1482800 - DNA, 15 bp, Homo sapiens
gggagggggaatgat

SEQ ID NO: 1482801 - DNA, 15 bp, Homo sapiens
ggagggggaatgatg

SEQ ID NO: 1482802 - DNA, 15 bp, Homo sapiens
gagggggaatgatgt

SEQ ID NO: 1482803 - DNA, 15 bp, Homo sapiens
agggggaatgatgtt

SEQ ID NO: 1482804 - DNA, 15 bp, Homo sapiens
gggggaatgatgttc

SEQ ID NO: 1482805 - DNA, 15 bp, Homo sapiens
ggggaatgatgttca

SEQ ID NO: 1482806 - DNA, 15 bp, Homo sapiens
gggaatgatgttcaa

SEQ ID NO: 1482807 - DNA, 15 bp, Homo sapiens
ggaatgatgttcaac

SEQ ID NO: 1482808 - DNA, 15 bp, Homo sapiens
gaatgatgttcaaca

SEQ ID NO: 1482809 - DNA, 15 bp, Homo sapiens
aatgatgttcaacaa

SEQ ID NO: 1482810 - DNA, 15 bp, Homo sapiens
atgatgttcaacaag

SEQ ID NO: 1482811 - DNA, 15 bp, Homo sapiens
tgatgttcaacaaga

SEQ ID NO: 1482812 - DNA, 15 bp, Homo sapiens
gatgttcaacaagac

SEQ ID NO: 1482813 - DNA, 15 bp, Homo sapiens
atgttcaacaagact

SEQ ID NO: 1482814 - DNA, 15 bp, Homo sapiens
tgttcaacaagactc

SEQ ID NO: 1482815 - DNA, 15 bp, Homo sapiens
gttcaacaagactcc

SEQ ID NO: 1482816 - DNA, 15 bp, Homo sapiens
ttcaacaagactcct

SEQ ID NO: 1482817 - DNA, 15 bp, Homo sapiens
tcaacaagactcctt

SEQ ID NO: 1482818 - DNA, 15 bp, Homo sapiens
caacaagactccttg

SEQ ID NO: 1482819 - DNA, 15 bp, Homo sapiens
aacaagactccttga

SEQ ID NO: 1482820 - DNA, 15 bp, Homo sapiens
acaagactccttgaa

SEQ ID NO: 1482821 - DNA, 15 bp, Homo sapiens
caagactccttgaaa

SEQ ID NO: 1482822 - DNA, 15 bp, Homo sapiens
aagactccttgaaaa

SEQ ID NO: 1482823 - DNA, 15 bp, Homo sapiens
agactccttgaaaag

SEQ ID NO: 1482824 - DNA, 15 bp, Homo sapiens
gactccttgaaaagt

SEQ ID NO: 1482825 - DNA, 15 bp, Homo sapiens
actccttgaaaagtc

SEQ ID NO: 1482826 - DNA, 15 bp, Homo sapiens
ctccttgaaaagtca

SEQ ID NO: 1482827 - DNA, 15 bp, Homo sapiens
tccttgaaaagtcag

SEQ ID NO: 1482828 - DNA, 15 bp, Homo sapiens
ccttgaaaagtcagc

SEQ ID NO: 1482829 - DNA, 15 bp, Homo sapiens
cttgaaaagtcagcc

SEQ ID NO: 1482830 - DNA, 15 bp, Homo sapiens
ttgaaaagtcagccg

SEQ ID NO: 1482831 - DNA, 15 bp, Homo sapiens
tgaaaagtcagccgg

SEQ ID NO: 1482832 - DNA, 15 bp, Homo sapiens
gaaaagtcagccggg

SEQ ID NO: 1482833 - DNA, 15 bp, Homo sapiens
aaaagtcagccgggg

SEQ ID NO: 1482834 - DNA, 15 bp, Homo sapiens
aaagtcagccggggt

SEQ ID NO: 1482835 - DNA, 15 bp, Homo sapiens
aagtcagccggggtc

SEQ ID NO: 1482836 - DNA, 15 bp, Homo sapiens
agtcagccggggtcc

SEQ ID NO: 1482837 - DNA, 15 bp, Homo sapiens
gtcagccggggtcca

SEQ ID NO: 1482838 - DNA, 15 bp, Homo sapiens
tcagccggggtccag

SEQ ID NO: 1482839 - DNA, 15 bp, Homo sapiens
cagccggggtccagg

SEQ ID NO: 1482840 - DNA, 15 bp, Homo sapiens
agccggggtccaggc

SEQ ID NO: 1482841 - DNA, 15 bp, Homo sapiens
gccggggtccaggca

SEQ ID NO: 1482842 - DNA, 15 bp, Homo sapiens
ccggggtccaggcac

SEQ ID NO: 1482843 - DNA, 15 bp, Homo sapiens
cggggtccaggcacg

SEQ ID NO: 1482844 - DNA, 15 bp, Homo sapiens
ggggtccaggcacgg

SEQ ID NO: 1482845 - DNA, 15 bp, Homo sapiens
gggtccaggcacggt

SEQ ID NO: 1482846 - DNA, 15 bp, Homo sapiens
ggtccaggcacggtg

SEQ ID NO: 1482847 - DNA, 15 bp, Homo sapiens
gtccaggcacggtgg

SEQ ID NO: 1482848 - DNA, 15 bp, Homo sapiens
tccaggcacggtggc

SEQ ID NO: 1482849 - DNA, 15 bp, Homo sapiens
gccgaggcaggtggg

SEQ ID NO: 1482850 - DNA, 15 bp, Homo sapiens
ccgaggcaggtgggt

SEQ ID NO: 1482851 - DNA, 15 bp, Homo sapiens
cgaggcaggtgggtc

SEQ ID NO: 1482852 - DNA, 15 bp, Homo sapiens
gaggcaggtgggtca

SEQ ID NO: 1482853 - DNA, 15 bp, Homo sapiens
aggcaggtgggtcac

SEQ ID NO: 1482854 - DNA, 15 bp, Homo sapiens
ggcaggtgggtcacc

SEQ ID NO: 1482855 - DNA, 15 bp, Homo sapiens
gcaggtgggtcacct

SEQ ID NO: 1482856 - DNA, 15 bp, Homo sapiens
caggtgggtcacctg

SEQ ID NO: 1482857 - DNA, 15 bp, Homo sapiens
aggtgggtcacctga

SEQ ID NO: 1482858 - DNA, 15 bp, Homo sapiens
gtgggtcacctgagg

SEQ ID NO: 1482859 - DNA, 15 bp, Homo sapiens
tgggtcacctgaggt

SEQ ID NO: 1482860 - DNA, 15 bp, Homo sapiens
gggtcacctgaggtc

SEQ ID NO: 1482861 - DNA, 15 bp, Homo sapiens
ggtcacctgaggtca

SEQ ID NO: 1482862 - DNA, 15 bp, Homo sapiens
gtcacctgaggtcag

SEQ ID NO: 1482863 - DNA, 15 bp, Homo sapiens
cctgtctctactaat

SEQ ID NO: 1482864 - DNA, 15 bp, Homo sapiens
ctgtctctactaatt

SEQ ID NO: 1482865 - DNA, 15 bp, Homo sapiens
tgtctctactaatta

SEQ ID NO: 1482866 - DNA, 15 bp, Homo sapiens
gtctctactaattag

SEQ ID NO: 1482867 - DNA, 15 bp, Homo sapiens
tctctactaattaga

SEQ ID NO: 1482868 - DNA, 15 bp, Homo sapiens
ctctactaattagat

SEQ ID NO: 1482869 - DNA, 15 bp, Homo sapiens
tctactaattagatg

SEQ ID NO: 1482870 - DNA, 15 bp, Homo sapiens
ctactaattagatgg

SEQ ID NO: 1482871 - DNA, 15 bp, Homo sapiens
tactaattagatggg

SEQ ID NO: 1482872 - DNA, 15 bp, Homo sapiens
actaattagatgggc

SEQ ID NO: 1482873 - DNA, 15 bp, Homo sapiens
ctaattagatgggcg

SEQ ID NO: 1482874 - DNA, 15 bp, Homo sapiens
taattagatgggcgt

SEQ ID NO: 1482875 - DNA, 15 bp, Homo sapiens
aattagatgggcgtg

SEQ ID NO: 1482876 - DNA, 15 bp, Homo sapiens
attagatgggcgtgg

SEQ ID NO: 1482877 - DNA, 15 bp, Homo sapiens
ttagatgggcgtggt

SEQ ID NO: 1482878 - DNA, 15 bp, Homo sapiens
tagatgggcgtggtg

SEQ ID NO: 1482879 - DNA, 15 bp, Homo sapiens
agatgggcgtggtgg

SEQ ID NO: 1482880 - DNA, 15 bp, Homo sapiens
gatgggcgtggtggt

SEQ ID NO: 1482881 - DNA, 15 bp, Homo sapiens
atgggcgtggtggtg

SEQ ID NO: 1482882 - DNA, 15 bp, Homo sapiens
gaggcaggagaatta

SEQ ID NO: 1482883 - DNA, 15 bp, Homo sapiens
aggcaggagaattac

SEQ ID NO: 1482884 - DNA, 15 bp, Homo sapiens
ggcaggagaattact

SEQ ID NO: 1482885 - DNA, 15 bp, Homo sapiens
gcaggagaattactt

SEQ ID NO: 1482886 - DNA, 15 bp, Homo sapiens
caggagaattacttg

SEQ ID NO: 1482887 - DNA, 15 bp, Homo sapiens
aggagaattacttga

SEQ ID NO: 1482888 - DNA, 15 bp, Homo sapiens
ggagaattacttgac

SEQ ID NO: 1482889 - DNA, 15 bp, Homo sapiens
gagaattacttgacc

SEQ ID NO: 1482890 - DNA, 15 bp, Homo sapiens
agaattacttgaccc

SEQ ID NO: 1482891 - DNA, 15 bp, Homo sapiens
gaattacttgaccct

SEQ ID NO: 1482892 - DNA, 15 bp, Homo sapiens
aattacttgaccctg

SEQ ID NO: 1482893 - DNA, 15 bp, Homo sapiens
attacttgaccctgg

SEQ ID NO: 1482894 - DNA, 15 bp, Homo sapiens
ttacttgaccctggg

SEQ ID NO: 1482895 - DNA, 15 bp, Homo sapiens
tacttgaccctggga

SEQ ID NO: 1482896 - DNA, 15 bp, Homo sapiens
acttgaccctgggag

SEQ ID NO: 1482897 - DNA, 15 bp, Homo sapiens
cttgaccctgggagg

SEQ ID NO: 1482898 - DNA, 15 bp, Homo sapiens
ttgaccctgggaggc

SEQ ID NO: 1482899 - DNA, 15 bp, Homo sapiens
tgaccctgggaggca

SEQ ID NO: 1482900 - DNA, 15 bp, Homo sapiens
gaccctgggaggcag

SEQ ID NO: 1482901 - DNA, 15 bp, Homo sapiens
accctgggaggcaga

SEQ ID NO: 1482902 - DNA, 15 bp, Homo sapiens
ccctgggaggcagag

SEQ ID NO: 1482903 - DNA, 15 bp, Homo sapiens
gcagaggttgcggta

SEQ ID NO: 1482904 - DNA, 15 bp, Homo sapiens
cagaggttgcggtaa

SEQ ID NO: 1482905 - DNA, 15 bp, Homo sapiens
agaggttgcggtaag

SEQ ID NO: 1482906 - DNA, 15 bp, Homo sapiens
gaggttgcggtaagc

SEQ ID NO: 1482907 - DNA, 15 bp, Homo sapiens
aggttgcggtaagct

SEQ ID NO: 1482908 - DNA, 15 bp, Homo sapiens
ggttgcggtaagctg

SEQ ID NO: 1482909 - DNA, 15 bp, Homo sapiens
gttgcggtaagctga

SEQ ID NO: 1482910 - DNA, 15 bp, Homo sapiens
ttgcggtaagctgag

SEQ ID NO: 1482911 - DNA, 15 bp, Homo sapiens
tgcggtaagctgaga

SEQ ID NO: 1482912 - DNA, 15 bp, Homo sapiens
gcggtaagctgagat

SEQ ID NO: 1482913 - DNA, 15 bp, Homo sapiens
cggtaagctgagatc

SEQ ID NO: 1482914 - DNA, 15 bp, Homo sapiens
ggtaagctgagatcg

SEQ ID NO: 1482915 - DNA, 15 bp, Homo sapiens
gtaagctgagatcgc

SEQ ID NO: 1482916 - DNA, 15 bp, Homo sapiens
taagctgagatcgcg

SEQ ID NO: 1482917 - DNA, 15 bp, Homo sapiens
aagctgagatcgcgc

SEQ ID NO: 1482918 - DNA, 15 bp, Homo sapiens
gctgagatcgcgcct

SEQ ID NO: 1482919 - DNA, 15 bp, Homo sapiens
ctgagatcgcgcctc

SEQ ID NO: 1482920 - DNA, 15 bp, Homo sapiens
tgagatcgcgcctct

SEQ ID NO: 1482921 - DNA, 15 bp, Homo sapiens
gagatcgcgcctctg

SEQ ID NO: 1482922 - DNA, 15 bp, Homo sapiens
agatcgcgcctctgc

SEQ ID NO: 1482923 - DNA, 15 bp, Homo sapiens
gatcgcgcctctgca

SEQ ID NO: 1482924 - DNA, 15 bp, Homo sapiens
atcgcgcctctgcac

SEQ ID NO: 1482925 - DNA, 15 bp, Homo sapiens
tcgcgcctctgcact

SEQ ID NO: 1482926 - DNA, 15 bp, Homo sapiens
cgcgcctctgcactc

SEQ ID NO: 1482927 - DNA, 15 bp, Homo sapiens
gcgcctctgcactcc

SEQ ID NO: 1482928 - DNA, 15 bp, Homo sapiens
cgcctctgcactcca

SEQ ID NO: 1482929 - DNA, 15 bp, Homo sapiens
ctgggcgacaagagt

SEQ ID NO: 1482930 - DNA, 15 bp, Homo sapiens
tgggcgacaagagtg

SEQ ID NO: 1482931 - DNA, 15 bp, Homo sapiens
gggcgacaagagtga

SEQ ID NO: 1482932 - DNA, 15 bp, Homo sapiens
ggcgacaagagtgaa

SEQ ID NO: 1482933 - DNA, 15 bp, Homo sapiens
gcgacaagagtgaaa

SEQ ID NO: 1482934 - DNA, 15 bp, Homo sapiens
cgacaagagtgaaac

SEQ ID NO: 1482935 - DNA, 15 bp, Homo sapiens
gacaagagtgaaact

SEQ ID NO: 1482936 - DNA, 15 bp, Homo sapiens
caagagtgaaactct

SEQ ID NO: 1482937 - DNA, 15 bp, Homo sapiens
aagagtgaaactctg

SEQ ID NO: 1482938 - DNA, 15 bp, Homo sapiens
aaactctgtctcaaa

SEQ ID NO: 1482939 - DNA, 15 bp, Homo sapiens
aactctgtctcaaaa

SEQ ID NO: 1482940 - DNA, 15 bp, Homo sapiens
aaagaaaagaaaagt

SEQ ID NO: 1482941 - DNA, 15 bp, Homo sapiens
aagaaaagaaaagtc

SEQ ID NO: 1482942 - DNA, 15 bp, Homo sapiens
agaaaagaaaagtca

SEQ ID NO: 1482943 - DNA, 15 bp, Homo sapiens
gaaaagaaaagtcag

SEQ ID NO: 1482944 - DNA, 15 bp, Homo sapiens
aaaagaaaagtcagc

SEQ ID NO: 1482945 - DNA, 15 bp, Homo sapiens
aaagaaaagtcagcc

SEQ ID NO: 1482946 - DNA, 15 bp, Homo sapiens
aagaaaagtcagccg

SEQ ID NO: 1482947 - DNA, 15 bp, Homo sapiens
agaaaagtcagccgg

SEQ ID NO: 1482948 - DNA, 15 bp, Homo sapiens
gaaaagtcagccgga

SEQ ID NO: 1482949 - DNA, 15 bp, Homo sapiens
aaaagtcagccggac

SEQ ID NO: 1482950 - DNA, 15 bp, Homo sapiens
aaagtcagccggaca

SEQ ID NO: 1482951 - DNA, 15 bp, Homo sapiens
aagtcagccggacac

SEQ ID NO: 1482952 - DNA, 15 bp, Homo sapiens
agtcagccggacact

SEQ ID NO: 1482953 - DNA, 15 bp, Homo sapiens
gtcagccggacactc

SEQ ID NO: 1482954 - DNA, 15 bp, Homo sapiens
tcagccggacactct

SEQ ID NO: 1482955 - DNA, 15 bp, Homo sapiens
cagccggacactctg

SEQ ID NO: 1482956 - DNA, 15 bp, Homo sapiens
agccggacactctga

SEQ ID NO: 1482957 - DNA, 15 bp, Homo sapiens
gccggacactctgaa

SEQ ID NO: 1482958 - DNA, 15 bp, Homo sapiens
ccggacactctgaag

SEQ ID NO: 1482959 - DNA, 15 bp, Homo sapiens
cggacactctgaagc

SEQ ID NO: 1482960 - DNA, 15 bp, Homo sapiens
ggacactctgaagct

SEQ ID NO: 1482961 - DNA, 15 bp, Homo sapiens
gacactctgaagctc

SEQ ID NO: 1482962 - DNA, 15 bp, Homo sapiens
acactctgaagctct

SEQ ID NO: 1482963 - DNA, 15 bp, Homo sapiens
cactctgaagctctg

SEQ ID NO: 1482964 - DNA, 15 bp, Homo sapiens
actctgaagctctgt

SEQ ID NO: 1482965 - DNA, 15 bp, Homo sapiens
ctctgaagctctgtg

SEQ ID NO: 1482966 - DNA, 15 bp, Homo sapiens
tctgaagctctgtgg

SEQ ID NO: 1482967 - DNA, 15 bp, Homo sapiens
ctgaagctctgtggc

SEQ ID NO: 1482968 - DNA, 15 bp, Homo sapiens
tgaagctctgtggca

SEQ ID NO: 1482969 - DNA, 15 bp, Homo sapiens
gaagctctgtggcag

SEQ ID NO: 1482970 - DNA, 15 bp, Homo sapiens
aagctctgtggcaga

SEQ ID NO: 1482971 - DNA, 15 bp, Homo sapiens
agctctgtggcagat

SEQ ID NO: 1482972 - DNA, 15 bp, Homo sapiens
gctctgtggcagatt

SEQ ID NO: 1482973 - DNA, 15 bp, Homo sapiens
ctctgtggcagattt

SEQ ID NO: 1482974 - DNA, 15 bp, Homo sapiens
tctgtggcagatttg

SEQ ID NO: 1482975 - DNA, 15 bp, Homo sapiens
ctgtggcagatttgg

SEQ ID NO: 1482976 - DNA, 15 bp, Homo sapiens
tgtggcagatttggc

SEQ ID NO: 1482977 - DNA, 15 bp, Homo sapiens
gtggcagatttggct

SEQ ID NO: 1482978 - DNA, 15 bp, Homo sapiens
tggcagatttggctg

SEQ ID NO: 1482979 - DNA, 15 bp, Homo sapiens
ggcagatttggctgt

SEQ ID NO: 1482980 - DNA, 15 bp, Homo sapiens
gcagatttggctgtg

SEQ ID NO: 1482981 - DNA, 15 bp, Homo sapiens
cagatttggctgtgt

SEQ ID NO: 1482982 - DNA, 15 bp, Homo sapiens
agatttggctgtgtg

SEQ ID NO: 1482983 - DNA, 15 bp, Homo sapiens
gatttggctgtgtgc

SEQ ID NO: 1482984 - DNA, 15 bp, Homo sapiens
atttggctgtgtgct

SEQ ID NO: 1482985 - DNA, 15 bp, Homo sapiens
tttggctgtgtgcta

SEQ ID NO: 1482986 - DNA, 15 bp, Homo sapiens
ttggctgtgtgctac

SEQ ID NO: 1482987 - DNA, 15 bp, Homo sapiens
tggctgtgtgctacg

SEQ ID NO: 1482988 - DNA, 15 bp, Homo sapiens
ggctgtgtgctacgg

SEQ ID NO: 1482989 - DNA, 15 bp, Homo sapiens
gctgtgtgctacggc

SEQ ID NO: 1482990 - DNA, 15 bp, Homo sapiens
ctgtgtgctacggcc

SEQ ID NO: 1482991 - DNA, 15 bp, Homo sapiens
tgtgtgctacggcct

SEQ ID NO: 1482992 - DNA, 15 bp, Homo sapiens
gtgtgctacggccta

SEQ ID NO: 1482993 - DNA, 15 bp, Homo sapiens
tgtgctacggcctaa

SEQ ID NO: 1482994 - DNA, 15 bp, Homo sapiens
gtgctacggcctaaa

SEQ ID NO: 1482995 - DNA, 15 bp, Homo sapiens
tgctacggcctaaaa

SEQ ID NO: 1482996 - DNA, 15 bp, Homo sapiens
gctacggcctaaaat

SEQ ID NO: 1482997 - DNA, 15 bp, Homo sapiens
ctacggcctaaaatt

SEQ ID NO: 1482998 - DNA, 15 bp, Homo sapiens
tacggcctaaaattg

SEQ ID NO: 1482999 - DNA, 15 bp, Homo sapiens
acggcctaaaattgg

SEQ ID NO: 1483000 - DNA, 15 bp, Homo sapiens
cggcctaaaattgga

SEQ ID NO: 1483001 - DNA, 15 bp, Homo sapiens
ggcctaaaattggag

SEQ ID NO: 1483002 - DNA, 15 bp, Homo sapiens
gcctaaaattggaga

SEQ ID NO: 1483003 - DNA, 15 bp, Homo sapiens
cctaaaattggagac

SEQ ID NO: 1483004 - DNA, 15 bp, Homo sapiens
ctaaaattggagacg

SEQ ID NO: 1483005 - DNA, 15 bp, Homo sapiens
taaaattggagacgg

SEQ ID NO: 1483006 - DNA, 15 bp, Homo sapiens
aaaattggagacggc

SEQ ID NO: 1483007 - DNA, 15 bp, Homo sapiens
aaattggagacggca

SEQ ID NO: 1483008 - DNA, 15 bp, Homo sapiens
aattggagacggcaa

SEQ ID NO: 1483009 - DNA, 15 bp, Homo sapiens
attggagacggcaaa

SEQ ID NO: 1483010 - DNA, 15 bp, Homo sapiens
ttggagacggcaaag

SEQ ID NO: 1483011 - DNA, 15 bp, Homo sapiens
tggagacggcaaagt

SEQ ID NO: 1483012 - DNA, 15 bp, Homo sapiens
ggagacggcaaagtg

SEQ ID NO: 1483013 - DNA, 15 bp, Homo sapiens
gagacggcaaagtgg

SEQ ID NO: 1483014 - DNA, 15 bp, Homo sapiens
agacggcaaagtgga

SEQ ID NO: 1483015 - DNA, 15 bp, Homo sapiens
gacggcaaagtggaa

SEQ ID NO: 1483016 - DNA, 15 bp, Homo sapiens
acggcaaagtggaaa

SEQ ID NO: 1483017 - DNA, 15 bp, Homo sapiens
cggcaaagtggaaac

SEQ ID NO: 1483018 - DNA, 15 bp, Homo sapiens
ggcaaagtggaaacg

SEQ ID NO: 1483019 - DNA, 15 bp, Homo sapiens
gcaaagtggaaacgg

SEQ ID NO: 1483020 - DNA, 15 bp, Homo sapiens
caaagtggaaacggt

SEQ ID NO: 1483021 - DNA, 15 bp, Homo sapiens
aaagtggaaacggtt

SEQ ID NO: 1483022 - DNA, 15 bp, Homo sapiens
aagtggaaacggttt

SEQ ID NO: 1483023 - DNA, 15 bp, Homo sapiens
agtggaaacggttta

SEQ ID NO: 1483024 - DNA, 15 bp, Homo sapiens
gtggaaacggtttag

SEQ ID NO: 1483025 - DNA, 15 bp, Homo sapiens
tggaaacggtttagg

SEQ ID NO: 1483026 - DNA, 15 bp, Homo sapiens
ggaaacggtttaggg

SEQ ID NO: 1483027 - DNA, 15 bp, Homo sapiens
gaaacggtttagggg

SEQ ID NO: 1483028 - DNA, 15 bp, Homo sapiens
aaacggtttagggga

SEQ ID NO: 1483029 - DNA, 15 bp, Homo sapiens
aacggtttaggggag

SEQ ID NO: 1483030 - DNA, 15 bp, Homo sapiens
acggtttaggggagg

SEQ ID NO: 1483031 - DNA, 15 bp, Homo sapiens
cggtttaggggagga

SEQ ID NO: 1483032 - DNA, 15 bp, Homo sapiens
ggtttaggggaggag

SEQ ID NO: 1483033 - DNA, 15 bp, Homo sapiens
gtttaggggaggagt

SEQ ID NO: 1483034 - DNA, 15 bp, Homo sapiens
tttaggggaggagta

SEQ ID NO: 1483035 - DNA, 15 bp, Homo sapiens
ttaggggaggagtag

SEQ ID NO: 1483036 - DNA, 15 bp, Homo sapiens
taggggaggagtaga

SEQ ID NO: 1483037 - DNA, 15 bp, Homo sapiens
aggggaggagtagaa

SEQ ID NO: 1483038 - DNA, 15 bp, Homo sapiens
ggggaggagtagaag

SEQ ID NO: 1483039 - DNA, 15 bp, Homo sapiens
gggaggagtagaagc

SEQ ID NO: 1483040 - DNA, 15 bp, Homo sapiens
ggaggagtagaagct

SEQ ID NO: 1483041 - DNA, 15 bp, Homo sapiens
gaggagtagaagctt

SEQ ID NO: 1483042 - DNA, 15 bp, Homo sapiens
aggagtagaagcttt

SEQ ID NO: 1483043 - DNA, 15 bp, Homo sapiens
ggagtagaagctttg

SEQ ID NO: 1483044 - DNA, 15 bp, Homo sapiens
gagtagaagctttgc

SEQ ID NO: 1483045 - DNA, 15 bp, Homo sapiens
agtagaagctttgca

SEQ ID NO: 1483046 - DNA, 15 bp, Homo sapiens
gtagaagctttgcag

SEQ ID NO: 1483047 - DNA, 15 bp, Homo sapiens
tagaagctttgcagt

SEQ ID NO: 1483048 - DNA, 15 bp, Homo sapiens
agaagctttgcagtc

SEQ ID NO: 1483049 - DNA, 15 bp, Homo sapiens
gaagctttgcagtca

SEQ ID NO: 1483050 - DNA, 15 bp, Homo sapiens
aagctttgcagtcag

SEQ ID NO: 1483051 - DNA, 15 bp, Homo sapiens
agctttgcagtcagg

SEQ ID NO: 1483052 - DNA, 15 bp, Homo sapiens
gctttgcagtcaggc

SEQ ID NO: 1483053 - DNA, 15 bp, Homo sapiens
ctttgcagtcaggcc

SEQ ID NO: 1483054 - DNA, 15 bp, Homo sapiens
tttgcagtcaggcca

SEQ ID NO: 1483055 - DNA, 15 bp, Homo sapiens
ttgcagtcaggccag

SEQ ID NO: 1483056 - DNA, 15 bp, Homo sapiens
tgcagtcaggccagc

SEQ ID NO: 1483057 - DNA, 15 bp, Homo sapiens
gcagtcaggccagca

SEQ ID NO: 1483058 - DNA, 15 bp, Homo sapiens
cagtcaggccagcag

SEQ ID NO: 1483059 - DNA, 15 bp, Homo sapiens
agtcaggccagcagc

SEQ ID NO: 1483060 - DNA, 15 bp, Homo sapiens
gtcaggccagcagca

SEQ ID NO: 1483061 - DNA, 15 bp, Homo sapiens
tcaggccagcagcat

SEQ ID NO: 1483062 - DNA, 15 bp, Homo sapiens
caggccagcagcatg

SEQ ID NO: 1483063 - DNA, 15 bp, Homo sapiens
aggccagcagcatgg

SEQ ID NO: 1483064 - DNA, 15 bp, Homo sapiens
ggccagcagcatgga

SEQ ID NO: 1483065 - DNA, 15 bp, Homo sapiens
gccagcagcatggag

SEQ ID NO: 1483066 - DNA, 15 bp, Homo sapiens
ccagcagcatggaga

SEQ ID NO: 1483067 - DNA, 15 bp, Homo sapiens
cagcagcatggagac

SEQ ID NO: 1483068 - DNA, 15 bp, Homo sapiens
agcagcatggagact

SEQ ID NO: 1483069 - DNA, 15 bp, Homo sapiens
gcagcatggagactc

SEQ ID NO: 1483070 - DNA, 15 bp, Homo sapiens
cagcatggagactca

SEQ ID NO: 1483071 - DNA, 15 bp, Homo sapiens
agcatggagactcat

SEQ ID NO: 1483072 - DNA, 15 bp, Homo sapiens
gcatggagactcatg

SEQ ID NO: 1483073 - DNA, 15 bp, Homo sapiens
catggagactcatga

SEQ ID NO: 1483074 - DNA, 15 bp, Homo sapiens
atggagactcatgag

SEQ ID NO: 1483075 - DNA, 15 bp, Homo sapiens
tggagactcatgagg

SEQ ID NO: 1483076 - DNA, 15 bp, Homo sapiens
ggagactcatgaggt

SEQ ID NO: 1483077 - DNA, 15 bp, Homo sapiens
gagactcatgaggtg

SEQ ID NO: 1483078 - DNA, 15 bp, Homo sapiens
agactcatgaggtga

SEQ ID NO: 1483079 - DNA, 15 bp, Homo sapiens
gactcatgaggtgag

SEQ ID NO: 1483080 - DNA, 15 bp, Homo sapiens
actcatgaggtgagg

SEQ ID NO: 1483081 - DNA, 15 bp, Homo sapiens
ctcatgaggtgaggg

SEQ ID NO: 1483082 - DNA, 15 bp, Homo sapiens
tcatgaggtgagggg

SEQ ID NO: 1483083 - DNA, 15 bp, Homo sapiens
catgaggtgaggggc

SEQ ID NO: 1483084 - DNA, 15 bp, Homo sapiens
atgaggtgaggggcc

SEQ ID NO: 1483085 - DNA, 15 bp, Homo sapiens
tgaggtgaggggcca

SEQ ID NO: 1483086 - DNA, 15 bp, Homo sapiens
gaggtgaggggccag

SEQ ID NO: 1483087 - DNA, 15 bp, Homo sapiens
aggtgaggggccaga

SEQ ID NO: 1483088 - DNA, 15 bp, Homo sapiens
ggtgaggggccagag

SEQ ID NO: 1483089 - DNA, 15 bp, Homo sapiens
gtgaggggccagagg

SEQ ID NO: 1483090 - DNA, 15 bp, Homo sapiens
tgaggggccagaggc

SEQ ID NO: 1483091 - DNA, 15 bp, Homo sapiens
gaggggccagaggca

SEQ ID NO: 1483092 - DNA, 15 bp, Homo sapiens
aggggccagaggcaa

SEQ ID NO: 1483093 - DNA, 15 bp, Homo sapiens
ggggccagaggcaag

SEQ ID NO: 1483094 - DNA, 15 bp, Homo sapiens
gggccagaggcaagt

SEQ ID NO: 1483095 - DNA, 15 bp, Homo sapiens
ggccagaggcaagta

SEQ ID NO: 1483096 - DNA, 15 bp, Homo sapiens
gccagaggcaagtag

SEQ ID NO: 1483097 - DNA, 15 bp, Homo sapiens
ccagaggcaagtagc

SEQ ID NO: 1483098 - DNA, 15 bp, Homo sapiens
cagaggcaagtagca

SEQ ID NO: 1483099 - DNA, 15 bp, Homo sapiens
agaggcaagtagcaa

SEQ ID NO: 1483100 - DNA, 15 bp, Homo sapiens
gaggcaagtagcaaa

SEQ ID NO: 1483101 - DNA, 15 bp, Homo sapiens
aggcaagtagcaaac

SEQ ID NO: 1483102 - DNA, 15 bp, Homo sapiens
ggcaagtagcaaacc

SEQ ID NO: 1483103 - DNA, 15 bp, Homo sapiens
gcaagtagcaaacct

SEQ ID NO: 1483104 - DNA, 15 bp, Homo sapiens
caagtagcaaacctc

SEQ ID NO: 1483105 - DNA, 15 bp, Homo sapiens
aagtagcaaacctct

SEQ ID NO: 1483106 - DNA, 15 bp, Homo sapiens
agtagcaaacctctt

SEQ ID NO: 1483107 - DNA, 15 bp, Homo sapiens
gtagcaaacctcttt

SEQ ID NO: 1483108 - DNA, 15 bp, Homo sapiens
tagcaaacctcttta

SEQ ID NO: 1483109 - DNA, 15 bp, Homo sapiens
agcaaacctctttaa

SEQ ID NO: 1483110 - DNA, 15 bp, Homo sapiens
gcaaacctctttaag

SEQ ID NO: 1483111 - DNA, 15 bp, Homo sapiens
caaacctctttaagc

SEQ ID NO: 1483112 - DNA, 15 bp, Homo sapiens
aaacctctttaagcc

SEQ ID NO: 1483113 - DNA, 15 bp, Homo sapiens
aacctctttaagcct

SEQ ID NO: 1483114 - DNA, 15 bp, Homo sapiens
acctctttaagcctc

SEQ ID NO: 1483115 - DNA, 15 bp, Homo sapiens
cctctttaagcctca

SEQ ID NO: 1483116 - DNA, 15 bp, Homo sapiens
ctctttaagcctcaa

SEQ ID NO: 1483117 - DNA, 15 bp, Homo sapiens
tctttaagcctcaat

SEQ ID NO: 1483118 - DNA, 15 bp, Homo sapiens
ctttaagcctcaatt

SEQ ID NO: 1483119 - DNA, 15 bp, Homo sapiens
tttaagcctcaattt

SEQ ID NO: 1483120 - DNA, 15 bp, Homo sapiens
ttaagcctcaatttt

SEQ ID NO: 1483121 - DNA, 15 bp, Homo sapiens
taagcctcaattttc

SEQ ID NO: 1483122 - DNA, 15 bp, Homo sapiens
aagcctcaattttct

SEQ ID NO: 1483123 - DNA, 15 bp, Homo sapiens
agcctcaattttctt

SEQ ID NO: 1483124 - DNA, 15 bp, Homo sapiens
gcctcaattttcttt

SEQ ID NO: 1483125 - DNA, 15 bp, Homo sapiens
cctcaattttctttt

SEQ ID NO: 1483126 - DNA, 15 bp, Homo sapiens
ctcaattttcttttc

SEQ ID NO: 1483127 - DNA, 15 bp, Homo sapiens
tcaattttcttttca

SEQ ID NO: 1483128 - DNA, 15 bp, Homo sapiens
caattttcttttcaa

SEQ ID NO: 1483129 - DNA, 15 bp, Homo sapiens
aattttcttttcaat

SEQ ID NO: 1483130 - DNA, 15 bp, Homo sapiens
attttcttttcaata

SEQ ID NO: 1483131 - DNA, 15 bp, Homo sapiens
ttttcttttcaataa

SEQ ID NO: 1483132 - DNA, 15 bp, Homo sapiens
tttcttttcaataat

SEQ ID NO: 1483133 - DNA, 15 bp, Homo sapiens
ttcttttcaataata

SEQ ID NO: 1483134 - DNA, 15 bp, Homo sapiens
tcttttcaataatat

SEQ ID NO: 1483135 - DNA, 15 bp, Homo sapiens
cttttcaataatatg

SEQ ID NO: 1483136 - DNA, 15 bp, Homo sapiens
ttttcaataatatga

SEQ ID NO: 1483137 - DNA, 15 bp, Homo sapiens
tttcaataatatgag

SEQ ID NO: 1483138 - DNA, 15 bp, Homo sapiens
ttcaataatatgagg

SEQ ID NO: 1483139 - DNA, 15 bp, Homo sapiens
tcaataatatgagga

SEQ ID NO: 1483140 - DNA, 15 bp, Homo sapiens
caataatatgaggat

SEQ ID NO: 1483141 - DNA, 15 bp, Homo sapiens
aataatatgaggatc

SEQ ID NO: 1483142 - DNA, 15 bp, Homo sapiens
ataatatgaggatcc

SEQ ID NO: 1483143 - DNA, 15 bp, Homo sapiens
taatatgaggatcct

SEQ ID NO: 1483144 - DNA, 15 bp, Homo sapiens
aatatgaggatccta

SEQ ID NO: 1483145 - DNA, 15 bp, Homo sapiens
atatgaggatcctaa

SEQ ID NO: 1483146 - DNA, 15 bp, Homo sapiens
tatgaggatcctaac

SEQ ID NO: 1483147 - DNA, 15 bp, Homo sapiens
atgaggatcctaact

SEQ ID NO: 1483148 - DNA, 15 bp, Homo sapiens
tgaggatcctaactc

SEQ ID NO: 1483149 - DNA, 15 bp, Homo sapiens
gaggatcctaactca

SEQ ID NO: 1483150 - DNA, 15 bp, Homo sapiens
aggatcctaactcat

SEQ ID NO: 1483151 - DNA, 15 bp, Homo sapiens
ggatcctaactcata

SEQ ID NO: 1483152 - DNA, 15 bp, Homo sapiens
gatcctaactcatat

SEQ ID NO: 1483153 - DNA, 15 bp, Homo sapiens
atcctaactcatatt

SEQ ID NO: 1483154 - DNA, 15 bp, Homo sapiens
tcctaactcatattt

SEQ ID NO: 1483155 - DNA, 15 bp, Homo sapiens
cctaactcatatttt

SEQ ID NO: 1483156 - DNA, 15 bp, Homo sapiens
ctaactcatatttta

SEQ ID NO: 1483157 - DNA, 15 bp, Homo sapiens
taactcatattttaa

SEQ ID NO: 1483158 - DNA, 15 bp, Homo sapiens
aactcatattttaaa

SEQ ID NO: 1483159 - DNA, 15 bp, Homo sapiens
actcatattttaaaa

SEQ ID NO: 1483160 - DNA, 15 bp, Homo sapiens
ctcatattttaaaag

SEQ ID NO: 1483161 - DNA, 15 bp, Homo sapiens
tcatattttaaaagg

SEQ ID NO: 1483162 - DNA, 15 bp, Homo sapiens
catattttaaaaggt

SEQ ID NO: 1483163 - DNA, 15 bp, Homo sapiens
atattttaaaaggtt

SEQ ID NO: 1483164 - DNA, 15 bp, Homo sapiens
tattttaaaaggtta

SEQ ID NO: 1483165 - DNA, 15 bp, Homo sapiens
attttaaaaggttaa

SEQ ID NO: 1483166 - DNA, 15 bp, Homo sapiens
ttttaaaaggttaaa

SEQ ID NO: 1483167 - DNA, 15 bp, Homo sapiens
tttaaaaggttaaat

SEQ ID NO: 1483168 - DNA, 15 bp, Homo sapiens
ttaaaaggttaaatg

SEQ ID NO: 1483169 - DNA, 15 bp, Homo sapiens
taaaaggttaaatga

SEQ ID NO: 1483170 - DNA, 15 bp, Homo sapiens
aaaaggttaaatgag

SEQ ID NO: 1483171 - DNA, 15 bp, Homo sapiens
aaaggttaaatgagg

SEQ ID NO: 1483172 - DNA, 15 bp, Homo sapiens
aaggttaaatgaggt

SEQ ID NO: 1483173 - DNA, 15 bp, Homo sapiens
aggttaaatgaggtg

SEQ ID NO: 1483174 - DNA, 15 bp, Homo sapiens
ggttaaatgaggtga

SEQ ID NO: 1483175 - DNA, 15 bp, Homo sapiens
gttaaatgaggtgat

SEQ ID NO: 1483176 - DNA, 15 bp, Homo sapiens
ttaaatgaggtgatg

SEQ ID NO: 1483177 - DNA, 15 bp, Homo sapiens
taaatgaggtgatga

SEQ ID NO: 1483178 - DNA, 15 bp, Homo sapiens
aaatgaggtgatgat

SEQ ID NO: 1483179 - DNA, 15 bp, Homo sapiens
aatgaggtgatgata

SEQ ID NO: 1483180 - DNA, 15 bp, Homo sapiens
atgaggtgatgatag

SEQ ID NO: 1483181 - DNA, 15 bp, Homo sapiens
tgaggtgatgatagt

SEQ ID NO: 1483182 - DNA, 15 bp, Homo sapiens
gaggtgatgatagta

SEQ ID NO: 1483183 - DNA, 15 bp, Homo sapiens
aggtgatgatagtaa

SEQ ID NO: 1483184 - DNA, 15 bp, Homo sapiens
ggtgatgatagtaaa

SEQ ID NO: 1483185 - DNA, 15 bp, Homo sapiens
gtgatgatagtaaaa

SEQ ID NO: 1483186 - DNA, 15 bp, Homo sapiens
tgatgatagtaaaag

SEQ ID NO: 1483187 - DNA, 15 bp, Homo sapiens
gatgatagtaaaagt

SEQ ID NO: 1483188 - DNA, 15 bp, Homo sapiens
atgatagtaaaagtt

SEQ ID NO: 1483189 - DNA, 15 bp, Homo sapiens
tgatagtaaaagttc

SEQ ID NO: 1483190 - DNA, 15 bp, Homo sapiens
gatagtaaaagttcc

SEQ ID NO: 1483191 - DNA, 15 bp, Homo sapiens
atagtaaaagttcct

SEQ ID NO: 1483192 - DNA, 15 bp, Homo sapiens
tagtaaaagttcctt

SEQ ID NO: 1483193 - DNA, 15 bp, Homo sapiens
agtaaaagttccttg

SEQ ID NO: 1483194 - DNA, 15 bp, Homo sapiens
gtaaaagttccttgg

SEQ ID NO: 1483195 - DNA, 15 bp, Homo sapiens
taaaagttccttgga

SEQ ID NO: 1483196 - DNA, 15 bp, Homo sapiens
aaaagttccttggaa

SEQ ID NO: 1483197 - DNA, 15 bp, Homo sapiens
aaagttccttggaaa

SEQ ID NO: 1483198 - DNA, 15 bp, Homo sapiens
aagttccttggaaac

SEQ ID NO: 1483199 - DNA, 15 bp, Homo sapiens
agttccttggaaact

SEQ ID NO: 1483200 - DNA, 15 bp, Homo sapiens
gttccttggaaactt

SEQ ID NO: 1483201 - DNA, 15 bp, Homo sapiens
ttccttggaaacttc

SEQ ID NO: 1483202 - DNA, 15 bp, Homo sapiens
tccttggaaacttca

SEQ ID NO: 1483203 - DNA, 15 bp, Homo sapiens
ccttggaaacttcaa

SEQ ID NO: 1483204 - DNA, 15 bp, Homo sapiens
cttggaaacttcaag

SEQ ID NO: 1483205 - DNA, 15 bp, Homo sapiens
ttggaaacttcaagt

SEQ ID NO: 1483206 - DNA, 15 bp, Homo sapiens
tggaaacttcaagtc

SEQ ID NO: 1483207 - DNA, 15 bp, Homo sapiens
ggaaacttcaagtca

SEQ ID NO: 1483208 - DNA, 15 bp, Homo sapiens
gaaacttcaagtcat

SEQ ID NO: 1483209 - DNA, 15 bp, Homo sapiens
aaacttcaagtcatc

SEQ ID NO: 1483210 - DNA, 15 bp, Homo sapiens
aacttcaagtcatca

SEQ ID NO: 1483211 - DNA, 15 bp, Homo sapiens
acttcaagtcatcaa

SEQ ID NO: 1483212 - DNA, 15 bp, Homo sapiens
cttcaagtcatcaaa

SEQ ID NO: 1483213 - DNA, 15 bp, Homo sapiens
ttcaagtcatcaaat

SEQ ID NO: 1483214 - DNA, 15 bp, Homo sapiens
tcaagtcatcaaata

SEQ ID NO: 1483215 - DNA, 15 bp, Homo sapiens
caagtcatcaaataa

SEQ ID NO: 1483216 - DNA, 15 bp, Homo sapiens
aagtcatcaaataat

SEQ ID NO: 1483217 - DNA, 15 bp, Homo sapiens
agtcatcaaataata

SEQ ID NO: 1483218 - DNA, 15 bp, Homo sapiens
gtcatcaaataatac

SEQ ID NO: 1483219 - DNA, 15 bp, Homo sapiens
tcatcaaataataca

SEQ ID NO: 1483220 - DNA, 15 bp, Homo sapiens
catcaaataatacat

SEQ ID NO: 1483221 - DNA, 15 bp, Homo sapiens
atcaaataatacatg

SEQ ID NO: 1483222 - DNA, 15 bp, Homo sapiens
tcaaataatacatgt

SEQ ID NO: 1483223 - DNA, 15 bp, Homo sapiens
caaataatacatgtt

SEQ ID NO: 1483224 - DNA, 15 bp, Homo sapiens
aaataatacatgttc

SEQ ID NO: 1483225 - DNA, 15 bp, Homo sapiens
aataatacatgttct

SEQ ID NO: 1483226 - DNA, 15 bp, Homo sapiens
ataatacatgttcta

SEQ ID NO: 1483227 - DNA, 15 bp, Homo sapiens
taatacatgttctat

SEQ ID NO: 1483228 - DNA, 15 bp, Homo sapiens
aatacatgttctatt

SEQ ID NO: 1483229 - DNA, 15 bp, Homo sapiens
atacatgttctattt

SEQ ID NO: 1483230 - DNA, 15 bp, Homo sapiens
tacatgttctatttg

SEQ ID NO: 1483231 - DNA, 15 bp, Homo sapiens
acatgttctatttga

SEQ ID NO: 1483232 - DNA, 15 bp, Homo sapiens
catgttctatttgat

SEQ ID NO: 1483233 - DNA, 15 bp, Homo sapiens
atgttctatttgatc

SEQ ID NO: 1483234 - DNA, 15 bp, Homo sapiens
tgttctatttgatcg

SEQ ID NO: 1483235 - DNA, 15 bp, Homo sapiens
gttctatttgatcgt

SEQ ID NO: 1483236 - DNA, 15 bp, Homo sapiens
ttctatttgatcgtt

SEQ ID NO: 1483237 - DNA, 15 bp, Homo sapiens
tctatttgatcgttc

SEQ ID NO: 1483238 - DNA, 15 bp, Homo sapiens
ctatttgatcgttct

SEQ ID NO: 1483239 - DNA, 15 bp, Homo sapiens
tatttgatcgttctc

SEQ ID NO: 1483240 - DNA, 15 bp, Homo sapiens
atttgatcgttctca

SEQ ID NO: 1483241 - DNA, 15 bp, Homo sapiens
tttgatcgttctcat

SEQ ID NO: 1483242 - DNA, 15 bp, Homo sapiens
ttgatcgttctcatt

SEQ ID NO: 1483243 - DNA, 15 bp, Homo sapiens
tgatcgttctcattt

SEQ ID NO: 1483244 - DNA, 15 bp, Homo sapiens
gatcgttctcattta

SEQ ID NO: 1483245 - DNA, 15 bp, Homo sapiens
atcgttctcatttaa

SEQ ID NO: 1483246 - DNA, 15 bp, Homo sapiens
tcgttctcatttaaa

SEQ ID NO: 1483247 - DNA, 15 bp, Homo sapiens
cgttctcatttaaaa

SEQ ID NO: 1483248 - DNA, 15 bp, Homo sapiens
gttctcatttaaaaa

SEQ ID NO: 1483249 - DNA, 15 bp, Homo sapiens
ttctcatttaaaaat

SEQ ID NO: 1483250 - DNA, 15 bp, Homo sapiens
tctcatttaaaaatg

SEQ ID NO: 1483251 - DNA, 15 bp, Homo sapiens
ctcatttaaaaatgt

SEQ ID NO: 1483252 - DNA, 15 bp, Homo sapiens
tcatttaaaaatgtg

SEQ ID NO: 1483253 - DNA, 15 bp, Homo sapiens
catttaaaaatgtgg

SEQ ID NO: 1483254 - DNA, 15 bp, Homo sapiens
atttaaaaatgtggt

SEQ ID NO: 1483255 - DNA, 15 bp, Homo sapiens
tttaaaaatgtggtc

SEQ ID NO: 1483256 - DNA, 15 bp, Homo sapiens
ttaaaaatgtggtcc

SEQ ID NO: 1483257 - DNA, 15 bp, Homo sapiens
taaaaatgtggtcct

SEQ ID NO: 1483258 - DNA, 15 bp, Homo sapiens
aaaaatgtggtcctt

SEQ ID NO: 1483259 - DNA, 15 bp, Homo sapiens
aaaatgtggtccttg

SEQ ID NO: 1483260 - DNA, 15 bp, Homo sapiens
aaatgtggtccttgt

SEQ ID NO: 1483261 - DNA, 15 bp, Homo sapiens
aatgtggtccttgtt

SEQ ID NO: 1483262 - DNA, 15 bp, Homo sapiens
atgtggtccttgttt

SEQ ID NO: 1483263 - DNA, 15 bp, Homo sapiens
tgtggtccttgtttg

SEQ ID NO: 1483264 - DNA, 15 bp, Homo sapiens
gtggtccttgtttgg

SEQ ID NO: 1483265 - DNA, 15 bp, Homo sapiens
tggtccttgtttggt

SEQ ID NO: 1483266 - DNA, 15 bp, Homo sapiens
ggtccttgtttggtt

SEQ ID NO: 1483267 - DNA, 15 bp, Homo sapiens
gtccttgtttggttt

SEQ ID NO: 1483268 - DNA, 15 bp, Homo sapiens
tccttgtttggtttt

SEQ ID NO: 1483269 - DNA, 15 bp, Homo sapiens
ccttgtttggttttt

SEQ ID NO: 1483270 - DNA, 15 bp, Homo sapiens
cttgtttggtttttg

SEQ ID NO: 1483271 - DNA, 15 bp, Homo sapiens
ttgtttggtttttgt

SEQ ID NO: 1483272 - DNA, 15 bp, Homo sapiens
tgtttggtttttgtc

SEQ ID NO: 1483273 - DNA, 15 bp, Homo sapiens
gtttggtttttgtct

SEQ ID NO: 1483274 - DNA, 15 bp, Homo sapiens
tttggtttttgtctg

SEQ ID NO: 1483275 - DNA, 15 bp, Homo sapiens
ttggtttttgtctgt

SEQ ID NO: 1483276 - DNA, 15 bp, Homo sapiens
tggtttttgtctgtt

SEQ ID NO: 1483277 - DNA, 15 bp, Homo sapiens
ggtttttgtctgttg

SEQ ID NO: 1483278 - DNA, 15 bp, Homo sapiens
gtttttgtctgttgt

SEQ ID NO: 1483279 - DNA, 15 bp, Homo sapiens
tttttgtctgttgtt

SEQ ID NO: 1483280 - DNA, 15 bp, Homo sapiens
ttttgtctgttgttt

SEQ ID NO: 1483281 - DNA, 15 bp, Homo sapiens
tttgtctgttgttta

SEQ ID NO: 1483282 - DNA, 15 bp, Homo sapiens
ttgtctgttgtttat

SEQ ID NO: 1483283 - DNA, 15 bp, Homo sapiens
tgtctgttgtttatt

SEQ ID NO: 1483284 - DNA, 15 bp, Homo sapiens
gtctgttgtttattt

SEQ ID NO: 1483285 - DNA, 15 bp, Homo sapiens
tctgttgtttatttt

SEQ ID NO: 1483286 - DNA, 15 bp, Homo sapiens
ctgttgtttattttg

SEQ ID NO: 1483287 - DNA, 15 bp, Homo sapiens
tgttgtttattttgt

SEQ ID NO: 1483288 - DNA, 15 bp, Homo sapiens
gttgtttattttgtt

SEQ ID NO: 1483289 - DNA, 15 bp, Homo sapiens
ttgtttattttgttt

SEQ ID NO: 1483290 - DNA, 15 bp, Homo sapiens
tgtttattttgtttt

SEQ ID NO: 1483291 - DNA, 15 bp, Homo sapiens
gtttattttgttttt

SEQ ID NO: 1483292 - DNA, 15 bp, Homo sapiens
tttattttgtttttg

SEQ ID NO: 1483293 - DNA, 15 bp, Homo sapiens
ttattttgtttttgt

SEQ ID NO: 1483294 - DNA, 15 bp, Homo sapiens
tattttgtttttgtc

SEQ ID NO: 1483295 - DNA, 15 bp, Homo sapiens
attttgtttttgtcg

SEQ ID NO: 1483296 - DNA, 15 bp, Homo sapiens
ttttgtttttgtcgt

SEQ ID NO: 1483297 - DNA, 15 bp, Homo sapiens
tttgtttttgtcgtt

SEQ ID NO: 1483298 - DNA, 15 bp, Homo sapiens
ttgtttttgtcgttt

SEQ ID NO: 1483299 - DNA, 15 bp, Homo sapiens
tgtttttgtcgtttg

SEQ ID NO: 1483300 - DNA, 15 bp, Homo sapiens
gtttttgtcgtttgg

SEQ ID NO: 1483301 - DNA, 15 bp, Homo sapiens
tttttgtcgtttgga

SEQ ID NO: 1483302 - DNA, 15 bp, Homo sapiens
ttttgtcgtttggag

SEQ ID NO: 1483303 - DNA, 15 bp, Homo sapiens
tttgtcgtttggaga

SEQ ID NO: 1483304 - DNA, 15 bp, Homo sapiens
ttgtcgtttggagat

SEQ ID NO: 1483305 - DNA, 15 bp, Homo sapiens
tgtcgtttggagata

SEQ ID NO: 1483306 - DNA, 15 bp, Homo sapiens
gtcgtttggagataa

SEQ ID NO: 1483307 - DNA, 15 bp, Homo sapiens
tcgtttggagataat

SEQ ID NO: 1483308 - DNA, 15 bp, Homo sapiens
cgtttggagataatt

SEQ ID NO: 1483309 - DNA, 15 bp, Homo sapiens
gtttggagataattc

SEQ ID NO: 1483310 - DNA, 15 bp, Homo sapiens
tttggagataattcc

SEQ ID NO: 1483311 - DNA, 15 bp, Homo sapiens
ttggagataattcca

SEQ ID NO: 1483312 - DNA, 15 bp, Homo sapiens
tggagataattccac

SEQ ID NO: 1483313 - DNA, 15 bp, Homo sapiens
ggagataattccact

SEQ ID NO: 1483314 - DNA, 15 bp, Homo sapiens
gagataattccacta

SEQ ID NO: 1483315 - DNA, 15 bp, Homo sapiens
agataattccactat

SEQ ID NO: 1483316 - DNA, 15 bp, Homo sapiens
gataattccactatg

SEQ ID NO: 1483317 - DNA, 15 bp, Homo sapiens
ataattccactatgt

SEQ ID NO: 1483318 - DNA, 15 bp, Homo sapiens
taattccactatgtg

SEQ ID NO: 1483319 - DNA, 15 bp, Homo sapiens
aattccactatgtgt

SEQ ID NO: 1483320 - DNA, 15 bp, Homo sapiens
attccactatgtgtc

SEQ ID NO: 1483321 - DNA, 15 bp, Homo sapiens
ttccactatgtgtct

SEQ ID NO: 1483322 - DNA, 15 bp, Homo sapiens
tccactatgtgtcta

SEQ ID NO: 1483323 - DNA, 15 bp, Homo sapiens
ccactatgtgtctat

SEQ ID NO: 1483324 - DNA, 15 bp, Homo sapiens
cactatgtgtctatc

SEQ ID NO: 1483325 - DNA, 15 bp, Homo sapiens
actatgtgtctatca

SEQ ID NO: 1483326 - DNA, 15 bp, Homo sapiens
ctatgtgtctatcag

SEQ ID NO: 1483327 - DNA, 15 bp, Homo sapiens
tatgtgtctatcaga

SEQ ID NO: 1483328 - DNA, 15 bp, Homo sapiens
atgtgtctatcagag

SEQ ID NO: 1483329 - DNA, 15 bp, Homo sapiens
tgtgtctatcagagg

SEQ ID NO: 1483330 - DNA, 15 bp, Homo sapiens
gtgtctatcagagga

SEQ ID NO: 1483331 - DNA, 15 bp, Homo sapiens
tgtctatcagaggac

SEQ ID NO: 1483332 - DNA, 15 bp, Homo sapiens
gtctatcagaggact

SEQ ID NO: 1483333 - DNA, 15 bp, Homo sapiens
tctatcagaggactt

SEQ ID NO: 1483334 - DNA, 15 bp, Homo sapiens
ctatcagaggactta

SEQ ID NO: 1483335 - DNA, 15 bp, Homo sapiens
tatcagaggacttag

SEQ ID NO: 1483336 - DNA, 15 bp, Homo sapiens
atcagaggacttaga

SEQ ID NO: 1483337 - DNA, 15 bp, Homo sapiens
tcagaggacttagac

SEQ ID NO: 1483338 - DNA, 15 bp, Homo sapiens
cagaggacttagact

SEQ ID NO: 1483339 - DNA, 15 bp, Homo sapiens
agaggacttagactt

SEQ ID NO: 1483340 - DNA, 15 bp, Homo sapiens
gaggacttagacttt

SEQ ID NO: 1483341 - DNA, 15 bp, Homo sapiens
aggacttagacttta

SEQ ID NO: 1483342 - DNA, 15 bp, Homo sapiens
ggacttagactttaa

SEQ ID NO: 1483343 - DNA, 15 bp, Homo sapiens
gacttagactttaat

SEQ ID NO: 1483344 - DNA, 15 bp, Homo sapiens
acttagactttaatt

SEQ ID NO: 1483345 - DNA, 15 bp, Homo sapiens
cttagactttaattc

SEQ ID NO: 1483346 - DNA, 15 bp, Homo sapiens
ttagactttaattct

SEQ ID NO: 1483347 - DNA, 15 bp, Homo sapiens
tagactttaattctg

SEQ ID NO: 1483348 - DNA, 15 bp, Homo sapiens
agactttaattctga

SEQ ID NO: 1483349 - DNA, 15 bp, Homo sapiens
gactttaattctgag

SEQ ID NO: 1483350 - DNA, 15 bp, Homo sapiens
actttaattctgaga

SEQ ID NO: 1483351 - DNA, 15 bp, Homo sapiens
ctttaattctgagat

SEQ ID NO: 1483352 - DNA, 15 bp, Homo sapiens
tttaattctgagatc

SEQ ID NO: 1483353 - DNA, 15 bp, Homo sapiens
ttaattctgagatcg

SEQ ID NO: 1483354 - DNA, 15 bp, Homo sapiens
taattctgagatcga

SEQ ID NO: 1483355 - DNA, 15 bp, Homo sapiens
aattctgagatcgat

SEQ ID NO: 1483356 - DNA, 15 bp, Homo sapiens
attctgagatcgatt

SEQ ID NO: 1483357 - DNA, 15 bp, Homo sapiens
ttctgagatcgattc

SEQ ID NO: 1483358 - DNA, 15 bp, Homo sapiens
tctgagatcgattcc

SEQ ID NO: 1483359 - DNA, 15 bp, Homo sapiens
ctgagatcgattccc

SEQ ID NO: 1483360 - DNA, 15 bp, Homo sapiens
tgagatcgattcccc

SEQ ID NO: 1483361 - DNA, 15 bp, Homo sapiens
gagatcgattccccc

SEQ ID NO: 1483362 - DNA, 15 bp, Homo sapiens
agatcgattcccccc

SEQ ID NO: 1483363 - DNA, 15 bp, Homo sapiens
gatcgattcccccct

SEQ ID NO: 1483364 - DNA, 15 bp, Homo sapiens
atcgattcccccctc

SEQ ID NO: 1483365 - DNA, 15 bp, Homo sapiens
tcgattcccccctca

SEQ ID NO: 1483366 - DNA, 15 bp, Homo sapiens
cgattcccccctcac

SEQ ID NO: 1483367 - DNA, 15 bp, Homo sapiens
gattcccccctcact

SEQ ID NO: 1483368 - DNA, 15 bp, Homo sapiens
attcccccctcactg

SEQ ID NO: 1483369 - DNA, 15 bp, Homo sapiens
ttcccccctcactgt

SEQ ID NO: 1483370 - DNA, 15 bp, Homo sapiens
tcccccctcactgtg

SEQ ID NO: 1483371 - DNA, 15 bp, Homo sapiens
cccccctcactgtgt

SEQ ID NO: 1483372 - DNA, 15 bp, Homo sapiens
ccccctcactgtgtg

SEQ ID NO: 1483373 - DNA, 15 bp, Homo sapiens
cccctcactgtgtga

SEQ ID NO: 1483374 - DNA, 15 bp, Homo sapiens
ccctcactgtgtgaa

SEQ ID NO: 1483375 - DNA, 15 bp, Homo sapiens
cctcactgtgtgaac

SEQ ID NO: 1483376 - DNA, 15 bp, Homo sapiens
ctcactgtgtgaacc

SEQ ID NO: 1483377 - DNA, 15 bp, Homo sapiens
tcactgtgtgaacct

SEQ ID NO: 1483378 - DNA, 15 bp, Homo sapiens
cactgtgtgaaccta

SEQ ID NO: 1483379 - DNA, 15 bp, Homo sapiens
actgtgtgaacctag

SEQ ID NO: 1483380 - DNA, 15 bp, Homo sapiens
ctgtgtgaacctaga

SEQ ID NO: 1483381 - DNA, 15 bp, Homo sapiens
tgtgtgaacctagaa

SEQ ID NO: 1483382 - DNA, 15 bp, Homo sapiens
gtgtgaacctagaag

SEQ ID NO: 1483383 - DNA, 15 bp, Homo sapiens
tgtgaacctagaagg

SEQ ID NO: 1483384 - DNA, 15 bp, Homo sapiens
gtgaacctagaaggg

SEQ ID NO: 1483385 - DNA, 15 bp, Homo sapiens
tgaacctagaagggt

SEQ ID NO: 1483386 - DNA, 15 bp, Homo sapiens
gaacctagaagggtt

SEQ ID NO: 1483387 - DNA, 15 bp, Homo sapiens
aacctagaagggtta

SEQ ID NO: 1483388 - DNA, 15 bp, Homo sapiens
acctagaagggttat

SEQ ID NO: 1483389 - DNA, 15 bp, Homo sapiens
cctagaagggttatg

SEQ ID NO: 1483390 - DNA, 15 bp, Homo sapiens
ctagaagggttatgc

SEQ ID NO: 1483391 - DNA, 15 bp, Homo sapiens
tagaagggttatgct

SEQ ID NO: 1483392 - DNA, 15 bp, Homo sapiens
agaagggttatgctt

SEQ ID NO: 1483393 - DNA, 15 bp, Homo sapiens
gaagggttatgcttt

SEQ ID NO: 1483394 - DNA, 15 bp, Homo sapiens
aagggttatgctttg

SEQ ID NO: 1483395 - DNA, 15 bp, Homo sapiens
agggttatgctttgt

SEQ ID NO: 1483396 - DNA, 15 bp, Homo sapiens
gggttatgctttgtg

SEQ ID NO: 1483397 - DNA, 15 bp, Homo sapiens
ggttatgctttgtgc

SEQ ID NO: 1483398 - DNA, 15 bp, Homo sapiens
gttatgctttgtgcc

SEQ ID NO: 1483399 - DNA, 15 bp, Homo sapiens
ttatgctttgtgcct

SEQ ID NO: 1483400 - DNA, 15 bp, Homo sapiens
tatgctttgtgcctc

SEQ ID NO: 1483401 - DNA, 15 bp, Homo sapiens
atgctttgtgcctca

SEQ ID NO: 1483402 - DNA, 15 bp, Homo sapiens
tgctttgtgcctcag

SEQ ID NO: 1483403 - DNA, 15 bp, Homo sapiens
gctttgtgcctcagt

SEQ ID NO: 1483404 - DNA, 15 bp, Homo sapiens
ctttgtgcctcagtt

SEQ ID NO: 1483405 - DNA, 15 bp, Homo sapiens
tttgtgcctcagttt

SEQ ID NO: 1483406 - DNA, 15 bp, Homo sapiens
ttgtgcctcagtttc

SEQ ID NO: 1483407 - DNA, 15 bp, Homo sapiens
agtttccccacctgg

SEQ ID NO: 1483408 - DNA, 15 bp, Homo sapiens
gtttccccacctgga

SEQ ID NO: 1483409 - DNA, 15 bp, Homo sapiens
tttccccacctggac

SEQ ID NO: 1483410 - DNA, 15 bp, Homo sapiens
ttccccacctggaca

SEQ ID NO: 1483411 - DNA, 15 bp, Homo sapiens
tccccacctggacag

SEQ ID NO: 1483412 - DNA, 15 bp, Homo sapiens
ccccacctggacagt

SEQ ID NO: 1483413 - DNA, 15 bp, Homo sapiens
cccacctggacagtc

SEQ ID NO: 1483414 - DNA, 15 bp, Homo sapiens
ccacctggacagtca

SEQ ID NO: 1483415 - DNA, 15 bp, Homo sapiens
cacctggacagtcat

SEQ ID NO: 1483416 - DNA, 15 bp, Homo sapiens
acctggacagtcatg

SEQ ID NO: 1483417 - DNA, 15 bp, Homo sapiens
cctggacagtcatgg

SEQ ID NO: 1483418 - DNA, 15 bp, Homo sapiens
ctggacagtcatggt

SEQ ID NO: 1483419 - DNA, 15 bp, Homo sapiens
tggacagtcatggtg

SEQ ID NO: 1483420 - DNA, 15 bp, Homo sapiens
ggacagtcatggtgc

SEQ ID NO: 1483421 - DNA, 15 bp, Homo sapiens
gacagtcatggtgct

SEQ ID NO: 1483422 - DNA, 15 bp, Homo sapiens
acagtcatggtgctg

SEQ ID NO: 1483423 - DNA, 15 bp, Homo sapiens
cagtcatggtgctga

SEQ ID NO: 1483424 - DNA, 15 bp, Homo sapiens
agtcatggtgctgat

SEQ ID NO: 1483425 - DNA, 15 bp, Homo sapiens
gtcatggtgctgatt

SEQ ID NO: 1483426 - DNA, 15 bp, Homo sapiens
tcatggtgctgattc

SEQ ID NO: 1483427 - DNA, 15 bp, Homo sapiens
catggtgctgattcc

SEQ ID NO: 1483428 - DNA, 15 bp, Homo sapiens
atggtgctgattcct

SEQ ID NO: 1483429 - DNA, 15 bp, Homo sapiens
tggtgctgattcctg

SEQ ID NO: 1483430 - DNA, 15 bp, Homo sapiens
ggtgctgattcctgc

SEQ ID NO: 1483431 - DNA, 15 bp, Homo sapiens
gtgctgattcctgcc

SEQ ID NO: 1483432 - DNA, 15 bp, Homo sapiens
tgctgattcctgcca

SEQ ID NO: 1483433 - DNA, 15 bp, Homo sapiens
gctgattcctgccag

SEQ ID NO: 1483434 - DNA, 15 bp, Homo sapiens
ctgattcctgccagc

SEQ ID NO: 1483435 - DNA, 15 bp, Homo sapiens
tgattcctgccagcc

SEQ ID NO: 1483436 - DNA, 15 bp, Homo sapiens
gattcctgccagcca

SEQ ID NO: 1483437 - DNA, 15 bp, Homo sapiens
attcctgccagccag

SEQ ID NO: 1483438 - DNA, 15 bp, Homo sapiens
ttcctgccagccagt

SEQ ID NO: 1483439 - DNA, 15 bp, Homo sapiens
tcctgccagccagtg

SEQ ID NO: 1483440 - DNA, 15 bp, Homo sapiens
cctgccagccagtgt

SEQ ID NO: 1483441 - DNA, 15 bp, Homo sapiens
ctgccagccagtgtc

SEQ ID NO: 1483442 - DNA, 15 bp, Homo sapiens
tgccagccagtgtca

SEQ ID NO: 1483443 - DNA, 15 bp, Homo sapiens
gccagccagtgtcaa

SEQ ID NO: 1483444 - DNA, 15 bp, Homo sapiens
ccagccagtgtcaat

SEQ ID NO: 1483445 - DNA, 15 bp, Homo sapiens
cagccagtgtcaata

SEQ ID NO: 1483446 - DNA, 15 bp, Homo sapiens
agccagtgtcaataa

SEQ ID NO: 1483447 - DNA, 15 bp, Homo sapiens
gccagtgtcaataac

SEQ ID NO: 1483448 - DNA, 15 bp, Homo sapiens
ccagtgtcaataacc

SEQ ID NO: 1483449 - DNA, 15 bp, Homo sapiens
cagtgtcaataacca

SEQ ID NO: 1483450 - DNA, 15 bp, Homo sapiens
agtgtcaataaccac

SEQ ID NO: 1483451 - DNA, 15 bp, Homo sapiens
gtgtcaataaccaca

SEQ ID NO: 1483452 - DNA, 15 bp, Homo sapiens
tgtcaataaccacag

SEQ ID NO: 1483453 - DNA, 15 bp, Homo sapiens
gtcaataaccacagt

SEQ ID NO: 1483454 - DNA, 15 bp, Homo sapiens
tcaataaccacagtg

SEQ ID NO: 1483455 - DNA, 15 bp, Homo sapiens
caataaccacagtga

SEQ ID NO: 1483456 - DNA, 15 bp, Homo sapiens
aataaccacagtgaa

SEQ ID NO: 1483457 - DNA, 15 bp, Homo sapiens
ataaccacagtgaaa

SEQ ID NO: 1483458 - DNA, 15 bp, Homo sapiens
taaccacagtgaaag

SEQ ID NO: 1483459 - DNA, 15 bp, Homo sapiens
aaccacagtgaaagg

SEQ ID NO: 1483460 - DNA, 15 bp, Homo sapiens
accacagtgaaagga

SEQ ID NO: 1483461 - DNA, 15 bp, Homo sapiens
ccacagtgaaaggat

SEQ ID NO: 1483462 - DNA, 15 bp, Homo sapiens
cacagtgaaaggata

SEQ ID NO: 1483463 - DNA, 15 bp, Homo sapiens
acagtgaaaggatac

SEQ ID NO: 1483464 - DNA, 15 bp, Homo sapiens
cagtgaaaggatact

SEQ ID NO: 1483465 - DNA, 15 bp, Homo sapiens
agtgaaaggatactc

SEQ ID NO: 1483466 - DNA, 15 bp, Homo sapiens
gtgaaaggatactca

SEQ ID NO: 1483467 - DNA, 15 bp, Homo sapiens
tgaaaggatactcag

SEQ ID NO: 1483468 - DNA, 15 bp, Homo sapiens
gaaaggatactcaga

SEQ ID NO: 1483469 - DNA, 15 bp, Homo sapiens
aaaggatactcagac

SEQ ID NO: 1483470 - DNA, 15 bp, Homo sapiens
aaggatactcagaca

SEQ ID NO: 1483471 - DNA, 15 bp, Homo sapiens
aggatactcagacag

SEQ ID NO: 1483472 - DNA, 15 bp, Homo sapiens
ggatactcagacagt

SEQ ID NO: 1483473 - DNA, 15 bp, Homo sapiens
gatactcagacagtc

SEQ ID NO: 1483474 - DNA, 15 bp, Homo sapiens
atactcagacagtca

SEQ ID NO: 1483475 - DNA, 15 bp, Homo sapiens
tactcagacagtcac

SEQ ID NO: 1483476 - DNA, 15 bp, Homo sapiens
actcagacagtcacc

SEQ ID NO: 1483477 - DNA, 15 bp, Homo sapiens
ctcagacagtcacct

SEQ ID NO: 1483478 - DNA, 15 bp, Homo sapiens
tcagacagtcacctc

SEQ ID NO: 1483479 - DNA, 15 bp, Homo sapiens
cagacagtcacctct

SEQ ID NO: 1483480 - DNA, 15 bp, Homo sapiens
agacagtcacctcta

SEQ ID NO: 1483481 - DNA, 15 bp, Homo sapiens
gacagtcacctctac

SEQ ID NO: 1483482 - DNA, 15 bp, Homo sapiens
acagtcacctctaca

SEQ ID NO: 1483483 - DNA, 15 bp, Homo sapiens
cagtcacctctacag

SEQ ID NO: 1483484 - DNA, 15 bp, Homo sapiens
agtcacctctacagc

SEQ ID NO: 1483485 - DNA, 15 bp, Homo sapiens
gtcacctctacagcc

SEQ ID NO: 1483486 - DNA, 15 bp, Homo sapiens
tcacctctacagcct

SEQ ID NO: 1483487 - DNA, 15 bp, Homo sapiens
cacctctacagcctt

SEQ ID NO: 1483488 - DNA, 15 bp, Homo sapiens
acctctacagccttt

SEQ ID NO: 1483489 - DNA, 15 bp, Homo sapiens
cctctacagcctttg

SEQ ID NO: 1483490 - DNA, 15 bp, Homo sapiens
ctctacagcctttga

SEQ ID NO: 1483491 - DNA, 15 bp, Homo sapiens
tctacagcctttgaa

SEQ ID NO: 1483492 - DNA, 15 bp, Homo sapiens
ctacagcctttgaat

SEQ ID NO: 1483493 - DNA, 15 bp, Homo sapiens
tacagcctttgaata

SEQ ID NO: 1483494 - DNA, 15 bp, Homo sapiens
acagcctttgaatat

SEQ ID NO: 1483495 - DNA, 15 bp, Homo sapiens
cagcctttgaatatg

SEQ ID NO: 1483496 - DNA, 15 bp, Homo sapiens
agcctttgaatatgg

SEQ ID NO: 1483497 - DNA, 15 bp, Homo sapiens
gcctttgaatatggg

SEQ ID NO: 1483498 - DNA, 15 bp, Homo sapiens
cctttgaatatgggt

SEQ ID NO: 1483499 - DNA, 15 bp, Homo sapiens
ctttgaatatgggtt

SEQ ID NO: 1483500 - DNA, 15 bp, Homo sapiens
tttgaatatgggttt

SEQ ID NO: 1483501 - DNA, 15 bp, Homo sapiens
ttgaatatgggtttt

SEQ ID NO: 1483502 - DNA, 15 bp, Homo sapiens
tgaatatgggttttc

SEQ ID NO: 1483503 - DNA, 15 bp, Homo sapiens
gaatatgggttttcg

SEQ ID NO: 1483504 - DNA, 15 bp, Homo sapiens
aatatgggttttcgg

SEQ ID NO: 1483505 - DNA, 15 bp, Homo sapiens
atatgggttttcggt

SEQ ID NO: 1483506 - DNA, 15 bp, Homo sapiens
tatgggttttcggtt

SEQ ID NO: 1483507 - DNA, 15 bp, Homo sapiens
atgggttttcggttg

SEQ ID NO: 1483508 - DNA, 15 bp, Homo sapiens
tgggttttcggttgc

SEQ ID NO: 1483509 - DNA, 15 bp, Homo sapiens
gggttttcggttgct

SEQ ID NO: 1483510 - DNA, 15 bp, Homo sapiens
ggttttcggttgctg

SEQ ID NO: 1483511 - DNA, 15 bp, Homo sapiens
gttttcggttgctga

SEQ ID NO: 1483512 - DNA, 15 bp, Homo sapiens
ttttcggttgctgag

SEQ ID NO: 1483513 - DNA, 15 bp, Homo sapiens
tttcggttgctgagt

SEQ ID NO: 1483514 - DNA, 15 bp, Homo sapiens
ttcggttgctgagta

SEQ ID NO: 1483515 - DNA, 15 bp, Homo sapiens
tcggttgctgagtaa

SEQ ID NO: 1483516 - DNA, 15 bp, Homo sapiens
cggttgctgagtaaa

SEQ ID NO: 1483517 - DNA, 15 bp, Homo sapiens
ggttgctgagtaaaa

SEQ ID NO: 1483518 - DNA, 15 bp, Homo sapiens
gttgctgagtaaaat

SEQ ID NO: 1483519 - DNA, 15 bp, Homo sapiens
ttgctgagtaaaatg

SEQ ID NO: 1483520 - DNA, 15 bp, Homo sapiens
tgctgagtaaaatgc

SEQ ID NO: 1483521 - DNA, 15 bp, Homo sapiens
gctgagtaaaatgct

SEQ ID NO: 1483522 - DNA, 15 bp, Homo sapiens
ctgagtaaaatgctc

SEQ ID NO: 1483523 - DNA, 15 bp, Homo sapiens
tgagtaaaatgctcg

SEQ ID NO: 1483524 - DNA, 15 bp, Homo sapiens
gagtaaaatgctcgg

SEQ ID NO: 1483525 - DNA, 15 bp, Homo sapiens
agtaaaatgctcgga

SEQ ID NO: 1483526 - DNA, 15 bp, Homo sapiens
gtaaaatgctcggag

SEQ ID NO: 1483527 - DNA, 15 bp, Homo sapiens
taaaatgctcggaga

SEQ ID NO: 1483528 - DNA, 15 bp, Homo sapiens
aaaatgctcggagac

SEQ ID NO: 1483529 - DNA, 15 bp, Homo sapiens
aaatgctcggagacg

SEQ ID NO: 1483530 - DNA, 15 bp, Homo sapiens
aatgctcggagacgt

SEQ ID NO: 1483531 - DNA, 15 bp, Homo sapiens
atgctcggagacgtt

SEQ ID NO: 1483532 - DNA, 15 bp, Homo sapiens
tgctcggagacgttc

SEQ ID NO: 1483533 - DNA, 15 bp, Homo sapiens
gctcggagacgttcc

SEQ ID NO: 1483534 - DNA, 15 bp, Homo sapiens
ctcggagacgttccg

SEQ ID NO: 1483535 - DNA, 15 bp, Homo sapiens
tcggagacgttccgg

SEQ ID NO: 1483536 - DNA, 15 bp, Homo sapiens
cggagacgttccggt

SEQ ID NO: 1483537 - DNA, 15 bp, Homo sapiens
ggagacgttccggtt

SEQ ID NO: 1483538 - DNA, 15 bp, Homo sapiens
gagacgttccggtta

SEQ ID NO: 1483539 - DNA, 15 bp, Homo sapiens
agacgttccggttac

SEQ ID NO: 1483540 - DNA, 15 bp, Homo sapiens
gacgttccggttact

SEQ ID NO: 1483541 - DNA, 15 bp, Homo sapiens
acgttccggttacta

SEQ ID NO: 1483542 - DNA, 15 bp, Homo sapiens
cgttccggttactat

SEQ ID NO: 1483543 - DNA, 15 bp, Homo sapiens
gttccggttactatg

SEQ ID NO: 1483544 - DNA, 15 bp, Homo sapiens
ttccggttactatgg

SEQ ID NO: 1483545 - DNA, 15 bp, Homo sapiens
tccggttactatggc

SEQ ID NO: 1483546 - DNA, 15 bp, Homo sapiens
ccggttactatggct

SEQ ID NO: 1483547 - DNA, 15 bp, Homo sapiens
cggttactatggcta

SEQ ID NO: 1483548 - DNA, 15 bp, Homo sapiens
ggttactatggctac

SEQ ID NO: 1483549 - DNA, 15 bp, Homo sapiens
gttactatggctaca

SEQ ID NO: 1483550 - DNA, 15 bp, Homo sapiens
ttactatggctacat

SEQ ID NO: 1483551 - DNA, 15 bp, Homo sapiens
tactatggctacata

SEQ ID NO: 1483552 - DNA, 15 bp, Homo sapiens
actatggctacataa

SEQ ID NO: 1483553 - DNA, 15 bp, Homo sapiens
ctatggctacataag

SEQ ID NO: 1483554 - DNA, 15 bp, Homo sapiens
tatggctacataaga

SEQ ID NO: 1483555 - DNA, 15 bp, Homo sapiens
atggctacataagaa

SEQ ID NO: 1483556 - DNA, 15 bp, Homo sapiens
tggctacataagaaa

SEQ ID NO: 1483557 - DNA, 15 bp, Homo sapiens
ggctacataagaaat

SEQ ID NO: 1483558 - DNA, 15 bp, Homo sapiens
gctacataagaaatt

SEQ ID NO: 1483559 - DNA, 15 bp, Homo sapiens
ctacataagaaatta

SEQ ID NO: 1483560 - DNA, 15 bp, Homo sapiens
tacataagaaattac

SEQ ID NO: 1483561 - DNA, 15 bp, Homo sapiens
acataagaaattacc

SEQ ID NO: 1483562 - DNA, 15 bp, Homo sapiens
cataagaaattaccc

SEQ ID NO: 1483563 - DNA, 15 bp, Homo sapiens
ataagaaattacccc

SEQ ID NO: 1483564 - DNA, 15 bp, Homo sapiens
taagaaattaccccg

SEQ ID NO: 1483565 - DNA, 15 bp, Homo sapiens
aagaaattaccccga

SEQ ID NO: 1483566 - DNA, 15 bp, Homo sapiens
agaaattaccccgaa

SEQ ID NO: 1483567 - DNA, 15 bp, Homo sapiens
gaaattaccccgaaa

SEQ ID NO: 1483568 - DNA, 15 bp, Homo sapiens
aaattaccccgaaac

SEQ ID NO: 1483569 - DNA, 15 bp, Homo sapiens
aattaccccgaaacc

SEQ ID NO: 1483570 - DNA, 15 bp, Homo sapiens
attaccccgaaacct

SEQ ID NO: 1483571 - DNA, 15 bp, Homo sapiens
ttaccccgaaaccta

SEQ ID NO: 1483572 - DNA, 15 bp, Homo sapiens
taccccgaaacctag

SEQ ID NO: 1483573 - DNA, 15 bp, Homo sapiens
accccgaaacctagt

SEQ ID NO: 1483574 - DNA, 15 bp, Homo sapiens
ccccgaaacctagtg

SEQ ID NO: 1483575 - DNA, 15 bp, Homo sapiens
cccgaaacctagtgg

SEQ ID NO: 1483576 - DNA, 15 bp, Homo sapiens
ccgaaacctagtggc

SEQ ID NO: 1483577 - DNA, 15 bp, Homo sapiens
cgaaacctagtggca

SEQ ID NO: 1483578 - DNA, 15 bp, Homo sapiens
gaaacctagtggcat

SEQ ID NO: 1483579 - DNA, 15 bp, Homo sapiens
aaacctagtggcata

SEQ ID NO: 1483580 - DNA, 15 bp, Homo sapiens
aacctagtggcataa

SEQ ID NO: 1483581 - DNA, 15 bp, Homo sapiens
acctagtggcataaa

SEQ ID NO: 1483582 - DNA, 15 bp, Homo sapiens
cctagtggcataaac

SEQ ID NO: 1483583 - DNA, 15 bp, Homo sapiens
ctagtggcataaacc

SEQ ID NO: 1483584 - DNA, 15 bp, Homo sapiens
tagtggcataaacca

SEQ ID NO: 1483585 - DNA, 15 bp, Homo sapiens
agtggcataaaccaa

SEQ ID NO: 1483586 - DNA, 15 bp, Homo sapiens
gtggcataaaccaat

SEQ ID NO: 1483587 - DNA, 15 bp, Homo sapiens
tggcataaaccaatt

SEQ ID NO: 1483588 - DNA, 15 bp, Homo sapiens
ggcataaaccaatta

SEQ ID NO: 1483589 - DNA, 15 bp, Homo sapiens
gcataaaccaattat

SEQ ID NO: 1483590 - DNA, 15 bp, Homo sapiens
cataaaccaattatt

SEQ ID NO: 1483591 - DNA, 15 bp, Homo sapiens
ataaaccaattatta

SEQ ID NO: 1483592 - DNA, 15 bp, Homo sapiens
taaaccaattattag

SEQ ID NO: 1483593 - DNA, 15 bp, Homo sapiens
aaaccaattattagg

SEQ ID NO: 1483594 - DNA, 15 bp, Homo sapiens
aaccaattattaggc

SEQ ID NO: 1483595 - DNA, 15 bp, Homo sapiens
accaattattaggct

SEQ ID NO: 1483596 - DNA, 15 bp, Homo sapiens
ccaattattaggctc

SEQ ID NO: 1483597 - DNA, 15 bp, Homo sapiens
caattattaggctca

SEQ ID NO: 1483598 - DNA, 15 bp, Homo sapiens
aattattaggctcat

SEQ ID NO: 1483599 - DNA, 15 bp, Homo sapiens
attattaggctcatg

SEQ ID NO: 1483600 - DNA, 15 bp, Homo sapiens
ttattaggctcatga

SEQ ID NO: 1483601 - DNA, 15 bp, Homo sapiens
tattaggctcatgag

SEQ ID NO: 1483602 - DNA, 15 bp, Homo sapiens
attaggctcatgagt

SEQ ID NO: 1483603 - DNA, 15 bp, Homo sapiens
ttaggctcatgagtt

SEQ ID NO: 1483604 - DNA, 15 bp, Homo sapiens
taggctcatgagttt

SEQ ID NO: 1483605 - DNA, 15 bp, Homo sapiens
aggctcatgagtttt

SEQ ID NO: 1483606 - DNA, 15 bp, Homo sapiens
ggctcatgagttttg

SEQ ID NO: 1483607 - DNA, 15 bp, Homo sapiens
gctcatgagttttgt

SEQ ID NO: 1483608 - DNA, 15 bp, Homo sapiens
ctcatgagttttgtt

SEQ ID NO: 1483609 - DNA, 15 bp, Homo sapiens
tcatgagttttgtta

SEQ ID NO: 1483610 - DNA, 15 bp, Homo sapiens
catgagttttgttat

SEQ ID NO: 1483611 - DNA, 15 bp, Homo sapiens
atgagttttgttatc

SEQ ID NO: 1483612 - DNA, 15 bp, Homo sapiens
tgagttttgttatcc

SEQ ID NO: 1483613 - DNA, 15 bp, Homo sapiens
gagttttgttatcct

SEQ ID NO: 1483614 - DNA, 15 bp, Homo sapiens
agttttgttatcctt

SEQ ID NO: 1483615 - DNA, 15 bp, Homo sapiens
gttttgttatccttc

SEQ ID NO: 1483616 - DNA, 15 bp, Homo sapiens
ttttgttatccttca

SEQ ID NO: 1483617 - DNA, 15 bp, Homo sapiens
tttgttatccttcac

SEQ ID NO: 1483618 - DNA, 15 bp, Homo sapiens
ttgttatccttcact

SEQ ID NO: 1483619 - DNA, 15 bp, Homo sapiens
tgttatccttcactg

SEQ ID NO: 1483620 - DNA, 15 bp, Homo sapiens
gttatccttcactga

SEQ ID NO: 1483621 - DNA, 15 bp, Homo sapiens
ttatccttcactgaa

SEQ ID NO: 1483622 - DNA, 15 bp, Homo sapiens
tatccttcactgaag

SEQ ID NO: 1483623 - DNA, 15 bp, Homo sapiens
atccttcactgaagg

SEQ ID NO: 1483624 - DNA, 15 bp, Homo sapiens
tccttcactgaaggc

SEQ ID NO: 1483625 - DNA, 15 bp, Homo sapiens
ccttcactgaaggct

SEQ ID NO: 1483626 - DNA, 15 bp, Homo sapiens
cttcactgaaggctc

SEQ ID NO: 1483627 - DNA, 15 bp, Homo sapiens
ttcactgaaggctcg

SEQ ID NO: 1483628 - DNA, 15 bp, Homo sapiens
tcactgaaggctcgt

SEQ ID NO: 1483629 - DNA, 15 bp, Homo sapiens
cactgaaggctcgtt

SEQ ID NO: 1483630 - DNA, 15 bp, Homo sapiens
actgaaggctcgttc

SEQ ID NO: 1483631 - DNA, 15 bp, Homo sapiens
ctgaaggctcgttca

SEQ ID NO: 1483632 - DNA, 15 bp, Homo sapiens
tgaaggctcgttcac

SEQ ID NO: 1483633 - DNA, 15 bp, Homo sapiens
gaaggctcgttcact

SEQ ID NO: 1483634 - DNA, 15 bp, Homo sapiens
aaggctcgttcactc

SEQ ID NO: 1483635 - DNA, 15 bp, Homo sapiens
aggctcgttcactct

SEQ ID NO: 1483636 - DNA, 15 bp, Homo sapiens
ggctcgttcactctc

SEQ ID NO: 1483637 - DNA, 15 bp, Homo sapiens
gctcgttcactctca

SEQ ID NO: 1483638 - DNA, 15 bp, Homo sapiens
ctcgttcactctcaa

SEQ ID NO: 1483639 - DNA, 15 bp, Homo sapiens
tcgttcactctcaag

SEQ ID NO: 1483640 - DNA, 15 bp, Homo sapiens
cgttcactctcaagt

SEQ ID NO: 1483641 - DNA, 15 bp, Homo sapiens
gttcactctcaagtc

SEQ ID NO: 1483642 - DNA, 15 bp, Homo sapiens
ttcactctcaagtct

SEQ ID NO: 1483643 - DNA, 15 bp, Homo sapiens
tcactctcaagtctg

SEQ ID NO: 1483644 - DNA, 15 bp, Homo sapiens
cactctcaagtctgg

SEQ ID NO: 1483645 - DNA, 15 bp, Homo sapiens
actctcaagtctgga

SEQ ID NO: 1483646 - DNA, 15 bp, Homo sapiens
ctctcaagtctggag

SEQ ID NO: 1483647 - DNA, 15 bp, Homo sapiens
tctcaagtctggagg

SEQ ID NO: 1483648 - DNA, 15 bp, Homo sapiens
ctcaagtctggaggt

SEQ ID NO: 1483649 - DNA, 15 bp, Homo sapiens
tcaagtctggaggtt

SEQ ID NO: 1483650 - DNA, 15 bp, Homo sapiens
caagtctggaggttg

SEQ ID NO: 1483651 - DNA, 15 bp, Homo sapiens
aagtctggaggttga

SEQ ID NO: 1483652 - DNA, 15 bp, Homo sapiens
agtctggaggttgac

SEQ ID NO: 1483653 - DNA, 15 bp, Homo sapiens
gtctggaggttgacg

SEQ ID NO: 1483654 - DNA, 15 bp, Homo sapiens
tctggaggttgacgc

SEQ ID NO: 1483655 - DNA, 15 bp, Homo sapiens
ctggaggttgacgct

SEQ ID NO: 1483656 - DNA, 15 bp, Homo sapiens
tggaggttgacgctg

SEQ ID NO: 1483657 - DNA, 15 bp, Homo sapiens
ggaggttgacgctgt

SEQ ID NO: 1483658 - DNA, 15 bp, Homo sapiens
gaggttgacgctgtg

SEQ ID NO: 1483659 - DNA, 15 bp, Homo sapiens
aggttgacgctgtgg

SEQ ID NO: 1483660 - DNA, 15 bp, Homo sapiens
ggttgacgctgtggt

SEQ ID NO: 1483661 - DNA, 15 bp, Homo sapiens
gttgacgctgtggtt

SEQ ID NO: 1483662 - DNA, 15 bp, Homo sapiens
ttgacgctgtggttg

SEQ ID NO: 1483663 - DNA, 15 bp, Homo sapiens
tgacgctgtggttgg

SEQ ID NO: 1483664 - DNA, 15 bp, Homo sapiens
gacgctgtggttggc

SEQ ID NO: 1483665 - DNA, 15 bp, Homo sapiens
acgctgtggttggct

SEQ ID NO: 1483666 - DNA, 15 bp, Homo sapiens
cgctgtggttggctg

SEQ ID NO: 1483667 - DNA, 15 bp, Homo sapiens
gctgtggttggctgt

SEQ ID NO: 1483668 - DNA, 15 bp, Homo sapiens
ctgtggttggctgtg

SEQ ID NO: 1483669 - DNA, 15 bp, Homo sapiens
tgtggttggctgtgg

SEQ ID NO: 1483670 - DNA, 15 bp, Homo sapiens
gtggttggctgtggc

SEQ ID NO: 1483671 - DNA, 15 bp, Homo sapiens
tggttggctgtggcc

SEQ ID NO: 1483672 - DNA, 15 bp, Homo sapiens
ggttggctgtggcct

SEQ ID NO: 1483673 - DNA, 15 bp, Homo sapiens
gttggctgtggcctc

SEQ ID NO: 1483674 - DNA, 15 bp, Homo sapiens
ttggctgtggcctcg

SEQ ID NO: 1483675 - DNA, 15 bp, Homo sapiens
tggctgtggcctcgg

SEQ ID NO: 1483676 - DNA, 15 bp, Homo sapiens
ggctgtggcctcggt

SEQ ID NO: 1483677 - DNA, 15 bp, Homo sapiens
gctgtggcctcggtt

SEQ ID NO: 1483678 - DNA, 15 bp, Homo sapiens
ctgtggcctcggttc

SEQ ID NO: 1483679 - DNA, 15 bp, Homo sapiens
tgtggcctcggttcc

SEQ ID NO: 1483680 - DNA, 15 bp, Homo sapiens
gtggcctcggttcct

SEQ ID NO: 1483681 - DNA, 15 bp, Homo sapiens
tggcctcggttcctc

SEQ ID NO: 1483682 - DNA, 15 bp, Homo sapiens
ggcctcggttcctct

SEQ ID NO: 1483683 - DNA, 15 bp, Homo sapiens
gcctcggttcctctc

SEQ ID NO: 1483684 - DNA, 15 bp, Homo sapiens
cctcggttcctctcc

SEQ ID NO: 1483685 - DNA, 15 bp, Homo sapiens
ctcggttcctctcct

SEQ ID NO: 1483686 - DNA, 15 bp, Homo sapiens
tcggttcctctcctg

SEQ ID NO: 1483687 - DNA, 15 bp, Homo sapiens
cggttcctctcctgc

SEQ ID NO: 1483688 - DNA, 15 bp, Homo sapiens
ggttcctctcctgcg

SEQ ID NO: 1483689 - DNA, 15 bp, Homo sapiens
gttcctctcctgcgg

SEQ ID NO: 1483690 - DNA, 15 bp, Homo sapiens
ttcctctcctgcggg

SEQ ID NO: 1483691 - DNA, 15 bp, Homo sapiens
tcctctcctgcgggc

SEQ ID NO: 1483692 - DNA, 15 bp, Homo sapiens
cctctcctgcgggcc

SEQ ID NO: 1483693 - DNA, 15 bp, Homo sapiens
ctctcctgcgggcct

SEQ ID NO: 1483694 - DNA, 15 bp, Homo sapiens
tctcctgcgggcctc

SEQ ID NO: 1483695 - DNA, 15 bp, Homo sapiens
ctcctgcgggcctct

SEQ ID NO: 1483696 - DNA, 15 bp, Homo sapiens
tcctgcgggcctctc

SEQ ID NO: 1483697 - DNA, 15 bp, Homo sapiens
cctgcgggcctctcc

SEQ ID NO: 1483698 - DNA, 15 bp, Homo sapiens
ctgcgggcctctcca

SEQ ID NO: 1483699 - DNA, 15 bp, Homo sapiens
tgcgggcctctccat

SEQ ID NO: 1483700 - DNA, 15 bp, Homo sapiens
gcgggcctctccata

SEQ ID NO: 1483701 - DNA, 15 bp, Homo sapiens
cgggcctctccatac

SEQ ID NO: 1483702 - DNA, 15 bp, Homo sapiens
gggcctctccatacg

SEQ ID NO: 1483703 - DNA, 15 bp, Homo sapiens
ggcctctccatacgg

SEQ ID NO: 1483704 - DNA, 15 bp, Homo sapiens
gcctctccatacggt

SEQ ID NO: 1483705 - DNA, 15 bp, Homo sapiens
cctctccatacggtt

SEQ ID NO: 1483706 - DNA, 15 bp, Homo sapiens
ctctccatacggttg

SEQ ID NO: 1483707 - DNA, 15 bp, Homo sapiens
tctccatacggttgc

SEQ ID NO: 1483708 - DNA, 15 bp, Homo sapiens
ctccatacggttgct

SEQ ID NO: 1483709 - DNA, 15 bp, Homo sapiens
tccatacggttgctc

SEQ ID NO: 1483710 - DNA, 15 bp, Homo sapiens
ccatacggttgctca

SEQ ID NO: 1483711 - DNA, 15 bp, Homo sapiens
catacggttgctcag

SEQ ID NO: 1483712 - DNA, 15 bp, Homo sapiens
atacggttgctcagc

SEQ ID NO: 1483713 - DNA, 15 bp, Homo sapiens
tacggttgctcagct

SEQ ID NO: 1483714 - DNA, 15 bp, Homo sapiens
acggttgctcagctt

SEQ ID NO: 1483715 - DNA, 15 bp, Homo sapiens
cggttgctcagcttg

SEQ ID NO: 1483716 - DNA, 15 bp, Homo sapiens
ggttgctcagcttgg

SEQ ID NO: 1483717 - DNA, 15 bp, Homo sapiens
gttgctcagcttggg

SEQ ID NO: 1483718 - DNA, 15 bp, Homo sapiens
ttgctcagcttgggc

SEQ ID NO: 1483719 - DNA, 15 bp, Homo sapiens
tgctcagcttgggct

SEQ ID NO: 1483720 - DNA, 15 bp, Homo sapiens
gctcagcttgggcta

SEQ ID NO: 1483721 - DNA, 15 bp, Homo sapiens
ctcagcttgggctaa

SEQ ID NO: 1483722 - DNA, 15 bp, Homo sapiens
tcagcttgggctaat

SEQ ID NO: 1483723 - DNA, 15 bp, Homo sapiens
cagcttgggctaatc

SEQ ID NO: 1483724 - DNA, 15 bp, Homo sapiens
agcttgggctaatct

SEQ ID NO: 1483725 - DNA, 15 bp, Homo sapiens
gcttgggctaatctg

SEQ ID NO: 1483726 - DNA, 15 bp, Homo sapiens
cttgggctaatctga

SEQ ID NO: 1483727 - DNA, 15 bp, Homo sapiens
ttgggctaatctgag

SEQ ID NO: 1483728 - DNA, 15 bp, Homo sapiens
tgggctaatctgagc

SEQ ID NO: 1483729 - DNA, 15 bp, Homo sapiens
gggctaatctgagct

SEQ ID NO: 1483730 - DNA, 15 bp, Homo sapiens
ggctaatctgagctt

SEQ ID NO: 1483731 - DNA, 15 bp, Homo sapiens
gctaatctgagcttc

SEQ ID NO: 1483732 - DNA, 15 bp, Homo sapiens
ctaatctgagcttcc

SEQ ID NO: 1483733 - DNA, 15 bp, Homo sapiens
taatctgagcttcct

SEQ ID NO: 1483734 - DNA, 15 bp, Homo sapiens
aatctgagcttcctc

SEQ ID NO: 1483735 - DNA, 15 bp, Homo sapiens
atctgagcttcctca

SEQ ID NO: 1483736 - DNA, 15 bp, Homo sapiens
tctgagcttcctcac

SEQ ID NO: 1483737 - DNA, 15 bp, Homo sapiens
ctgagcttcctcaca

SEQ ID NO: 1483738 - DNA, 15 bp, Homo sapiens
tgagcttcctcacag

SEQ ID NO: 1483739 - DNA, 15 bp, Homo sapiens
gagcttcctcacagc

SEQ ID NO: 1483740 - DNA, 15 bp, Homo sapiens
agcttcctcacagca

SEQ ID NO: 1483741 - DNA, 15 bp, Homo sapiens
gcttcctcacagcat

SEQ ID NO: 1483742 - DNA, 15 bp, Homo sapiens
cttcctcacagcatg

SEQ ID NO: 1483743 - DNA, 15 bp, Homo sapiens
ttcctcacagcatgg

SEQ ID NO: 1483744 - DNA, 15 bp, Homo sapiens
tcctcacagcatggt

SEQ ID NO: 1483745 - DNA, 15 bp, Homo sapiens
cctcacagcatggtg

SEQ ID NO: 1483746 - DNA, 15 bp, Homo sapiens
ctcacagcatggtgg

SEQ ID NO: 1483747 - DNA, 15 bp, Homo sapiens
tcacagcatggtggc

SEQ ID NO: 1483748 - DNA, 15 bp, Homo sapiens
cacagcatggtggcg

SEQ ID NO: 1483749 - DNA, 15 bp, Homo sapiens
acagcatggtggcga

SEQ ID NO: 1483750 - DNA, 15 bp, Homo sapiens
cagcatggtggcgat

SEQ ID NO: 1483751 - DNA, 15 bp, Homo sapiens
agcatggtggcgatt

SEQ ID NO: 1483752 - DNA, 15 bp, Homo sapiens
gcatggtggcgattt

SEQ ID NO: 1483753 - DNA, 15 bp, Homo sapiens
catggtggcgatttc

SEQ ID NO: 1483754 - DNA, 15 bp, Homo sapiens
atggtggcgatttcc

SEQ ID NO: 1483755 - DNA, 15 bp, Homo sapiens
tggtggcgatttcca

SEQ ID NO: 1483756 - DNA, 15 bp, Homo sapiens
ggtggcgatttccac

SEQ ID NO: 1483757 - DNA, 15 bp, Homo sapiens
gtggcgatttccacg

SEQ ID NO: 1483758 - DNA, 15 bp, Homo sapiens
tggcgatttccacgg

SEQ ID NO: 1483759 - DNA, 15 bp, Homo sapiens
ggcgatttccacgga

SEQ ID NO: 1483760 - DNA, 15 bp, Homo sapiens
gcgatttccacggac

SEQ ID NO: 1483761 - DNA, 15 bp, Homo sapiens
cgatttccacggact

SEQ ID NO: 1483762 - DNA, 15 bp, Homo sapiens
gatttccacggacta

SEQ ID NO: 1483763 - DNA, 15 bp, Homo sapiens
atttccacggactag

SEQ ID NO: 1483764 - DNA, 15 bp, Homo sapiens
tttccacggactaga

SEQ ID NO: 1483765 - DNA, 15 bp, Homo sapiens
ttccacggactagag

SEQ ID NO: 1483766 - DNA, 15 bp, Homo sapiens
tccacggactagagg

SEQ ID NO: 1483767 - DNA, 15 bp, Homo sapiens
ccacggactagaggc

SEQ ID NO: 1483768 - DNA, 15 bp, Homo sapiens
cacggactagaggcc

SEQ ID NO: 1483769 - DNA, 15 bp, Homo sapiens
acggactagaggccc

SEQ ID NO: 1483770 - DNA, 15 bp, Homo sapiens
cggactagaggccca

SEQ ID NO: 1483771 - DNA, 15 bp, Homo sapiens
ggactagaggcccaa

SEQ ID NO: 1483772 - DNA, 15 bp, Homo sapiens
gactagaggcccaag

SEQ ID NO: 1483773 - DNA, 15 bp, Homo sapiens
actagaggcccaaga

SEQ ID NO: 1483774 - DNA, 15 bp, Homo sapiens
ctagaggcccaagag

SEQ ID NO: 1483775 - DNA, 15 bp, Homo sapiens
tagaggcccaagaga

SEQ ID NO: 1483776 - DNA, 15 bp, Homo sapiens
agaggcccaagagag

SEQ ID NO: 1483777 - DNA, 15 bp, Homo sapiens
gaggcccaagagaga

SEQ ID NO: 1483778 - DNA, 15 bp, Homo sapiens
aggcccaagagagaa

SEQ ID NO: 1483779 - DNA, 15 bp, Homo sapiens
ggcccaagagagaac

SEQ ID NO: 1483780 - DNA, 15 bp, Homo sapiens
gcccaagagagaaca

SEQ ID NO: 1483781 - DNA, 15 bp, Homo sapiens
cccaagagagaacaa

SEQ ID NO: 1483782 - DNA, 15 bp, Homo sapiens
ccaagagagaacaag

SEQ ID NO: 1483783 - DNA, 15 bp, Homo sapiens
caagagagaacaaga

SEQ ID NO: 1483784 - DNA, 15 bp, Homo sapiens
aagagagaacaagaa

SEQ ID NO: 1483785 - DNA, 15 bp, Homo sapiens
agagagaacaagaag

SEQ ID NO: 1483786 - DNA, 15 bp, Homo sapiens
gagagaacaagaagc

SEQ ID NO: 1483787 - DNA, 15 bp, Homo sapiens
agagaacaagaagca

SEQ ID NO: 1483788 - DNA, 15 bp, Homo sapiens
gagaacaagaagcag

SEQ ID NO: 1483789 - DNA, 15 bp, Homo sapiens
gaacaagaagcaggt

SEQ ID NO: 1483790 - DNA, 15 bp, Homo sapiens
aacaagaagcaggtg

SEQ ID NO: 1483791 - DNA, 15 bp, Homo sapiens
acaagaagcaggtgg

SEQ ID NO: 1483792 - DNA, 15 bp, Homo sapiens
caagaagcaggtgga

SEQ ID NO: 1483793 - DNA, 15 bp, Homo sapiens
aagaagcaggtggaa

SEQ ID NO: 1483794 - DNA, 15 bp, Homo sapiens
agaagcaggtggaag

SEQ ID NO: 1483795 - DNA, 15 bp, Homo sapiens
gaagcaggtggaagt

SEQ ID NO: 1483796 - DNA, 15 bp, Homo sapiens
aagcaggtggaagtc

SEQ ID NO: 1483797 - DNA, 15 bp, Homo sapiens
agcaggtggaagtca

SEQ ID NO: 1483798 - DNA, 15 bp, Homo sapiens
gcaggtggaagtcat

SEQ ID NO: 1483799 - DNA, 15 bp, Homo sapiens
caggtggaagtcata

SEQ ID NO: 1483800 - DNA, 15 bp, Homo sapiens
aggtggaagtcataa

SEQ ID NO: 1483801 - DNA, 15 bp, Homo sapiens
ggtggaagtcataat

SEQ ID NO: 1483802 - DNA, 15 bp, Homo sapiens
gtggaagtcataata

SEQ ID NO: 1483803 - DNA, 15 bp, Homo sapiens
tggaagtcataatac

SEQ ID NO: 1483804 - DNA, 15 bp, Homo sapiens
ggaagtcataatacc

SEQ ID NO: 1483805 - DNA, 15 bp, Homo sapiens
gaagtcataatacct

SEQ ID NO: 1483806 - DNA, 15 bp, Homo sapiens
aagtcataatacctt

SEQ ID NO: 1483807 - DNA, 15 bp, Homo sapiens
agtcataataccttt

SEQ ID NO: 1483808 - DNA, 15 bp, Homo sapiens
gtcataataccttta

SEQ ID NO: 1483809 - DNA, 15 bp, Homo sapiens
tcataatacctttat

SEQ ID NO: 1483810 - DNA, 15 bp, Homo sapiens
cataatacctttatc

SEQ ID NO: 1483811 - DNA, 15 bp, Homo sapiens
ataatacctttatca

SEQ ID NO: 1483812 - DNA, 15 bp, Homo sapiens
taatacctttatcac

SEQ ID NO: 1483813 - DNA, 15 bp, Homo sapiens
aatacctttatcacc

SEQ ID NO: 1483814 - DNA, 15 bp, Homo sapiens
atacctttatcacct

SEQ ID NO: 1483815 - DNA, 15 bp, Homo sapiens
tacctttatcacctt

SEQ ID NO: 1483816 - DNA, 15 bp, Homo sapiens
acctttatcaccttg

SEQ ID NO: 1483817 - DNA, 15 bp, Homo sapiens
cctttatcaccttgt

SEQ ID NO: 1483818 - DNA, 15 bp, Homo sapiens
ctttatcaccttgtc

SEQ ID NO: 1483819 - DNA, 15 bp, Homo sapiens
tttatcaccttgtcc

SEQ ID NO: 1483820 - DNA, 15 bp, Homo sapiens
ttatcaccttgtccc

SEQ ID NO: 1483821 - DNA, 15 bp, Homo sapiens
tatcaccttgtcccg

SEQ ID NO: 1483822 - DNA, 15 bp, Homo sapiens
atcaccttgtcccgg

SEQ ID NO: 1483823 - DNA, 15 bp, Homo sapiens
tcaccttgtcccgga

SEQ ID NO: 1483824 - DNA, 15 bp, Homo sapiens
caccttgtcccggaa

SEQ ID NO: 1483825 - DNA, 15 bp, Homo sapiens
accttgtcccggaag

SEQ ID NO: 1483826 - DNA, 15 bp, Homo sapiens
ccttgtcccggaagt

SEQ ID NO: 1483827 - DNA, 15 bp, Homo sapiens
cttgtcccggaagtc

SEQ ID NO: 1483828 - DNA, 15 bp, Homo sapiens
ttgtcccggaagtca

SEQ ID NO: 1483829 - DNA, 15 bp, Homo sapiens
tgtcccggaagtcac

SEQ ID NO: 1483830 - DNA, 15 bp, Homo sapiens
gtcccggaagtcacg

SEQ ID NO: 1483831 - DNA, 15 bp, Homo sapiens
tcccggaagtcacgc

SEQ ID NO: 1483832 - DNA, 15 bp, Homo sapiens
cccggaagtcacgca

SEQ ID NO: 1483833 - DNA, 15 bp, Homo sapiens
ccggaagtcacgcaa

SEQ ID NO: 1483834 - DNA, 15 bp, Homo sapiens
cggaagtcacgcaag

SEQ ID NO: 1483835 - DNA, 15 bp, Homo sapiens
ggaagtcacgcaagg

SEQ ID NO: 1483836 - DNA, 15 bp, Homo sapiens
gaagtcacgcaaggc

SEQ ID NO: 1483837 - DNA, 15 bp, Homo sapiens
aagtcacgcaaggcc

SEQ ID NO: 1483838 - DNA, 15 bp, Homo sapiens
agtcacgcaaggcca

SEQ ID NO: 1483839 - DNA, 15 bp, Homo sapiens
gtcacgcaaggccat

SEQ ID NO: 1483840 - DNA, 15 bp, Homo sapiens
tcacgcaaggccatt

SEQ ID NO: 1483841 - DNA, 15 bp, Homo sapiens
cacgcaaggccattt

SEQ ID NO: 1483842 - DNA, 15 bp, Homo sapiens
acgcaaggccatttc

SEQ ID NO: 1483843 - DNA, 15 bp, Homo sapiens
cgcaaggccatttct

SEQ ID NO: 1483844 - DNA, 15 bp, Homo sapiens
gcaaggccatttctt

SEQ ID NO: 1483845 - DNA, 15 bp, Homo sapiens
caaggccatttcttg

SEQ ID NO: 1483846 - DNA, 15 bp, Homo sapiens
aaggccatttcttga

SEQ ID NO: 1483847 - DNA, 15 bp, Homo sapiens
aggccatttcttgag

SEQ ID NO: 1483848 - DNA, 15 bp, Homo sapiens
ggccatttcttgagg

SEQ ID NO: 1483849 - DNA, 15 bp, Homo sapiens
gccatttcttgaggc

SEQ ID NO: 1483850 - DNA, 15 bp, Homo sapiens
ccatttcttgaggca

SEQ ID NO: 1483851 - DNA, 15 bp, Homo sapiens
catttcttgaggcaa

SEQ ID NO: 1483852 - DNA, 15 bp, Homo sapiens
atttcttgaggcaat

SEQ ID NO: 1483853 - DNA, 15 bp, Homo sapiens
tttcttgaggcaatc

SEQ ID NO: 1483854 - DNA, 15 bp, Homo sapiens
ttcttgaggcaatca

SEQ ID NO: 1483855 - DNA, 15 bp, Homo sapiens
tcttgaggcaatcat

SEQ ID NO: 1483856 - DNA, 15 bp, Homo sapiens
cttgaggcaatcata

SEQ ID NO: 1483857 - DNA, 15 bp, Homo sapiens
ttgaggcaatcataa

SEQ ID NO: 1483858 - DNA, 15 bp, Homo sapiens
tgaggcaatcataaa

SEQ ID NO: 1483859 - DNA, 15 bp, Homo sapiens
gaggcaatcataaag

SEQ ID NO: 1483860 - DNA, 15 bp, Homo sapiens
aggcaatcataaagt

SEQ ID NO: 1483861 - DNA, 15 bp, Homo sapiens
ggcaatcataaagtt

SEQ ID NO: 1483862 - DNA, 15 bp, Homo sapiens
gcaatcataaagttc

SEQ ID NO: 1483863 - DNA, 15 bp, Homo sapiens
caatcataaagttcc

SEQ ID NO: 1483864 - DNA, 15 bp, Homo sapiens
aatcataaagttcca

SEQ ID NO: 1483865 - DNA, 15 bp, Homo sapiens
atcataaagttccat

SEQ ID NO: 1483866 - DNA, 15 bp, Homo sapiens
tcataaagttccatc

SEQ ID NO: 1483867 - DNA, 15 bp, Homo sapiens
cataaagttccatct

SEQ ID NO: 1483868 - DNA, 15 bp, Homo sapiens
ataaagttccatctg

SEQ ID NO: 1483869 - DNA, 15 bp, Homo sapiens
taaagttccatctga

SEQ ID NO: 1483870 - DNA, 15 bp, Homo sapiens
aaagttccatctgag

SEQ ID NO: 1483871 - DNA, 15 bp, Homo sapiens
aagttccatctgagt

SEQ ID NO: 1483872 - DNA, 15 bp, Homo sapiens
agttccatctgagtt

SEQ ID NO: 1483873 - DNA, 15 bp, Homo sapiens
gttccatctgagttc

SEQ ID NO: 1483874 - DNA, 15 bp, Homo sapiens
ttccatctgagttca

SEQ ID NO: 1483875 - DNA, 15 bp, Homo sapiens
tccatctgagttcaa

SEQ ID NO: 1483876 - DNA, 15 bp, Homo sapiens
ccatctgagttcaag

SEQ ID NO: 1483877 - DNA, 15 bp, Homo sapiens
catctgagttcaagg

SEQ ID NO: 1483878 - DNA, 15 bp, Homo sapiens
atctgagttcaaggg

SEQ ID NO: 1483879 - DNA, 15 bp, Homo sapiens
tctgagttcaagggg

SEQ ID NO: 1483880 - DNA, 15 bp, Homo sapiens
ctgagttcaaggggg

SEQ ID NO: 1483881 - DNA, 15 bp, Homo sapiens
tgagttcaaggggga

SEQ ID NO: 1483882 - DNA, 15 bp, Homo sapiens
gagttcaagggggaa

SEQ ID NO: 1483883 - DNA, 15 bp, Homo sapiens
agttcaagggggaag

SEQ ID NO: 1483884 - DNA, 15 bp, Homo sapiens
gttcaagggggaaga

SEQ ID NO: 1483885 - DNA, 15 bp, Homo sapiens
ttcaagggggaagaa

SEQ ID NO: 1483886 - DNA, 15 bp, Homo sapiens
tcaagggggaagaaa

SEQ ID NO: 1483887 - DNA, 15 bp, Homo sapiens
caagggggaagaaaa

SEQ ID NO: 1483888 - DNA, 15 bp, Homo sapiens
aagggggaagaaaat

SEQ ID NO: 1483889 - DNA, 15 bp, Homo sapiens
agggggaagaaaata

SEQ ID NO: 1483890 - DNA, 15 bp, Homo sapiens
gggggaagaaaataa

SEQ ID NO: 1483891 - DNA, 15 bp, Homo sapiens
ggggaagaaaataag

SEQ ID NO: 1483892 - DNA, 15 bp, Homo sapiens
gggaagaaaataagc

SEQ ID NO: 1483893 - DNA, 15 bp, Homo sapiens
ggaagaaaataagct

SEQ ID NO: 1483894 - DNA, 15 bp, Homo sapiens
gaagaaaataagctc

SEQ ID NO: 1483895 - DNA, 15 bp, Homo sapiens
aagaaaataagctct

SEQ ID NO: 1483896 - DNA, 15 bp, Homo sapiens
agaaaataagctctg

SEQ ID NO: 1483897 - DNA, 15 bp, Homo sapiens
gaaaataagctctgc

SEQ ID NO: 1483898 - DNA, 15 bp, Homo sapiens
aaaataagctctgcc

SEQ ID NO: 1483899 - DNA, 15 bp, Homo sapiens
aaataagctctgcct

SEQ ID NO: 1483900 - DNA, 15 bp, Homo sapiens
aataagctctgcctt

SEQ ID NO: 1483901 - DNA, 15 bp, Homo sapiens
ataagctctgccttt

SEQ ID NO: 1483902 - DNA, 15 bp, Homo sapiens
taagctctgcctttt

SEQ ID NO: 1483903 - DNA, 15 bp, Homo sapiens
aagctctgccttttg

SEQ ID NO: 1483904 - DNA, 15 bp, Homo sapiens
agctctgccttttga

SEQ ID NO: 1483905 - DNA, 15 bp, Homo sapiens
gctctgccttttgat

SEQ ID NO: 1483906 - DNA, 15 bp, Homo sapiens
ctctgccttttgatg

SEQ ID NO: 1483907 - DNA, 15 bp, Homo sapiens
tctgccttttgatgg

SEQ ID NO: 1483908 - DNA, 15 bp, Homo sapiens
ctgccttttgatggg

SEQ ID NO: 1483909 - DNA, 15 bp, Homo sapiens
tgccttttgatggga

SEQ ID NO: 1483910 - DNA, 15 bp, Homo sapiens
gccttttgatgggaa

SEQ ID NO: 1483911 - DNA, 15 bp, Homo sapiens
ccttttgatgggaag

SEQ ID NO: 1483912 - DNA, 15 bp, Homo sapiens
cttttgatgggaaga

SEQ ID NO: 1483913 - DNA, 15 bp, Homo sapiens
ttttgatgggaagag

SEQ ID NO: 1483914 - DNA, 15 bp, Homo sapiens
tttgatgggaagaga

SEQ ID NO: 1483915 - DNA, 15 bp, Homo sapiens
ttgatgggaagagag

SEQ ID NO: 1483916 - DNA, 15 bp, Homo sapiens
tgatgggaagagaga

SEQ ID NO: 1483917 - DNA, 15 bp, Homo sapiens
gatgggaagagagag

SEQ ID NO: 1483918 - DNA, 15 bp, Homo sapiens
atgggaagagagagg

SEQ ID NO: 1483919 - DNA, 15 bp, Homo sapiens
tgggaagagagaggc

SEQ ID NO: 1483920 - DNA, 15 bp, Homo sapiens
gggaagagagaggca

SEQ ID NO: 1483921 - DNA, 15 bp, Homo sapiens
ggaagagagaggcaa

SEQ ID NO: 1483922 - DNA, 15 bp, Homo sapiens
gaagagagaggcaaa

SEQ ID NO: 1483923 - DNA, 15 bp, Homo sapiens
aagagagaggcaaag

SEQ ID NO: 1483924 - DNA, 15 bp, Homo sapiens
agagagaggcaaaga

SEQ ID NO: 1483925 - DNA, 15 bp, Homo sapiens
gagagaggcaaagat

SEQ ID NO: 1483926 - DNA, 15 bp, Homo sapiens
agagaggcaaagata

SEQ ID NO: 1483927 - DNA, 15 bp, Homo sapiens
gagaggcaaagataa

SEQ ID NO: 1483928 - DNA, 15 bp, Homo sapiens
agaggcaaagataag

SEQ ID NO: 1483929 - DNA, 15 bp, Homo sapiens
gaggcaaagataaga

SEQ ID NO: 1483930 - DNA, 15 bp, Homo sapiens
aggcaaagataagaa

SEQ ID NO: 1483931 - DNA, 15 bp, Homo sapiens
ggcaaagataagaaa

SEQ ID NO: 1483932 - DNA, 15 bp, Homo sapiens
gcaaagataagaaat

SEQ ID NO: 1483933 - DNA, 15 bp, Homo sapiens
caaagataagaaata

SEQ ID NO: 1483934 - DNA, 15 bp, Homo sapiens
aaagataagaaatat

SEQ ID NO: 1483935 - DNA, 15 bp, Homo sapiens
aagataagaaatatt

SEQ ID NO: 1483936 - DNA, 15 bp, Homo sapiens
agataagaaatattc

SEQ ID NO: 1483937 - DNA, 15 bp, Homo sapiens
gataagaaatattct

SEQ ID NO: 1483938 - DNA, 15 bp, Homo sapiens
ataagaaatattctg

SEQ ID NO: 1483939 - DNA, 15 bp, Homo sapiens
taagaaatattctga

SEQ ID NO: 1483940 - DNA, 15 bp, Homo sapiens
aagaaatattctgat

SEQ ID NO: 1483941 - DNA, 15 bp, Homo sapiens
agaaatattctgatg

SEQ ID NO: 1483942 - DNA, 15 bp, Homo sapiens
gaaatattctgatgg

SEQ ID NO: 1483943 - DNA, 15 bp, Homo sapiens
aaatattctgatggt

SEQ ID NO: 1483944 - DNA, 15 bp, Homo sapiens
aatattctgatggtc

SEQ ID NO: 1483945 - DNA, 15 bp, Homo sapiens
atattctgatggtca

SEQ ID NO: 1483946 - DNA, 15 bp, Homo sapiens
tattctgatggtcat

SEQ ID NO: 1483947 - DNA, 15 bp, Homo sapiens
attctgatggtcatt

SEQ ID NO: 1483948 - DNA, 15 bp, Homo sapiens
ttctgatggtcattt

SEQ ID NO: 1483949 - DNA, 15 bp, Homo sapiens
tctgatggtcatttt

SEQ ID NO: 1483950 - DNA, 15 bp, Homo sapiens
ctgatggtcattttg

SEQ ID NO: 1483951 - DNA, 15 bp, Homo sapiens
tgatggtcattttga

SEQ ID NO: 1483952 - DNA, 15 bp, Homo sapiens
gatggtcattttgag

SEQ ID NO: 1483953 - DNA, 15 bp, Homo sapiens
atggtcattttgaga

SEQ ID NO: 1483954 - DNA, 15 bp, Homo sapiens
tggtcattttgagaa

SEQ ID NO: 1483955 - DNA, 15 bp, Homo sapiens
ggtcattttgagaaa

SEQ ID NO: 1483956 - DNA, 15 bp, Homo sapiens
gtcattttgagaaaa

SEQ ID NO: 1483957 - DNA, 15 bp, Homo sapiens
tcattttgagaaaat

SEQ ID NO: 1483958 - DNA, 15 bp, Homo sapiens
cattttgagaaaatg

SEQ ID NO: 1483959 - DNA, 15 bp, Homo sapiens
attttgagaaaatgc

SEQ ID NO: 1483960 - DNA, 15 bp, Homo sapiens
ttttgagaaaatgcg

SEQ ID NO: 1483961 - DNA, 15 bp, Homo sapiens
tttgagaaaatgcga

SEQ ID NO: 1483962 - DNA, 15 bp, Homo sapiens
ttgagaaaatgcgac

SEQ ID NO: 1483963 - DNA, 15 bp, Homo sapiens
tgagaaaatgcgact

SEQ ID NO: 1483964 - DNA, 15 bp, Homo sapiens
gagaaaatgcgactg

SEQ ID NO: 1483965 - DNA, 15 bp, Homo sapiens
agaaaatgcgactgt

SEQ ID NO: 1483966 - DNA, 15 bp, Homo sapiens
gaaaatgcgactgtg

SEQ ID NO: 1483967 - DNA, 15 bp, Homo sapiens
aaaatgcgactgtgc

SEQ ID NO: 1483968 - DNA, 15 bp, Homo sapiens
aaatgcgactgtgcc

SEQ ID NO: 1483969 - DNA, 15 bp, Homo sapiens
aatgcgactgtgcct

SEQ ID NO: 1483970 - DNA, 15 bp, Homo sapiens
atgcgactgtgcctc

SEQ ID NO: 1483971 - DNA, 15 bp, Homo sapiens
tgcgactgtgcctca

SEQ ID NO: 1483972 - DNA, 15 bp, Homo sapiens
gcgactgtgcctcat

SEQ ID NO: 1483973 - DNA, 15 bp, Homo sapiens
cgactgtgcctcatg

SEQ ID NO: 1483974 - DNA, 15 bp, Homo sapiens
gactgtgcctcatgc

SEQ ID NO: 1483975 - DNA, 15 bp, Homo sapiens
actgtgcctcatgca

SEQ ID NO: 1483976 - DNA, 15 bp, Homo sapiens
ctgtgcctcatgcaa

SEQ ID NO: 1483977 - DNA, 15 bp, Homo sapiens
tgtgcctcatgcaaa

SEQ ID NO: 1483978 - DNA, 15 bp, Homo sapiens
gtgcctcatgcaaag

SEQ ID NO: 1483979 - DNA, 15 bp, Homo sapiens
tgcctcatgcaaagg

SEQ ID NO: 1483980 - DNA, 15 bp, Homo sapiens
gcctcatgcaaagga

SEQ ID NO: 1483981 - DNA, 15 bp, Homo sapiens
cctcatgcaaaggag

SEQ ID NO: 1483982 - DNA, 15 bp, Homo sapiens
ctcatgcaaaggagt

SEQ ID NO: 1483983 - DNA, 15 bp, Homo sapiens
tcatgcaaaggagtt

SEQ ID NO: 1483984 - DNA, 15 bp, Homo sapiens
catgcaaaggagttt

SEQ ID NO: 1483985 - DNA, 15 bp, Homo sapiens
atgcaaaggagtttt

SEQ ID NO: 1483986 - DNA, 15 bp, Homo sapiens
tgcaaaggagttttc

SEQ ID NO: 1483987 - DNA, 15 bp, Homo sapiens
gcaaaggagttttca

SEQ ID NO: 1483988 - DNA, 15 bp, Homo sapiens
caaaggagttttcag

SEQ ID NO: 1483989 - DNA, 15 bp, Homo sapiens
aaaggagttttcagt

SEQ ID NO: 1483990 - DNA, 15 bp, Homo sapiens
aaggagttttcagtt

SEQ ID NO: 1483991 - DNA, 15 bp, Homo sapiens
aggagttttcagtta

SEQ ID NO: 1483992 - DNA, 15 bp, Homo sapiens
ggagttttcagttaa

SEQ ID NO: 1483993 - DNA, 15 bp, Homo sapiens
gagttttcagttaat

SEQ ID NO: 1483994 - DNA, 15 bp, Homo sapiens
agttttcagttaatg

SEQ ID NO: 1483995 - DNA, 15 bp, Homo sapiens
gttttcagttaatgc

SEQ ID NO: 1483996 - DNA, 15 bp, Homo sapiens
ttttcagttaatgct

SEQ ID NO: 1483997 - DNA, 15 bp, Homo sapiens
tttcagttaatgctt

SEQ ID NO: 1483998 - DNA, 15 bp, Homo sapiens
ttcagttaatgcttg

SEQ ID NO: 1483999 - DNA, 15 bp, Homo sapiens
tcagttaatgcttga

SEQ ID NO: 1484000 - DNA, 15 bp, Homo sapiens
cagttaatgcttgat

SEQ ID NO: 1484001 - DNA, 15 bp, Homo sapiens
agttaatgcttgatg

SEQ ID NO: 1484002 - DNA, 15 bp, Homo sapiens
gttaatgcttgatga

SEQ ID NO: 1484003 - DNA, 15 bp, Homo sapiens
ttaatgcttgatgac

SEQ ID NO: 1484004 - DNA, 15 bp, Homo sapiens
taatgcttgatgact

SEQ ID NO: 1484005 - DNA, 15 bp, Homo sapiens
aatgcttgatgactg

SEQ ID NO: 1484006 - DNA, 15 bp, Homo sapiens
atgcttgatgactga

SEQ ID NO: 1484007 - DNA, 15 bp, Homo sapiens
tgcttgatgactgac

SEQ ID NO: 1484008 - DNA, 15 bp, Homo sapiens
gcttgatgactgact

SEQ ID NO: 1484009 - DNA, 15 bp, Homo sapiens
cttgatgactgacta

SEQ ID NO: 1484010 - DNA, 15 bp, Homo sapiens
ttgatgactgactaa

SEQ ID NO: 1484011 - DNA, 15 bp, Homo sapiens
tgatgactgactaat

SEQ ID NO: 1484012 - DNA, 15 bp, Homo sapiens
gatgactgactaatg

SEQ ID NO: 1484013 - DNA, 15 bp, Homo sapiens
atgactgactaatgt

SEQ ID NO: 1484014 - DNA, 15 bp, Homo sapiens
tgactgactaatgtt

SEQ ID NO: 1484015 - DNA, 15 bp, Homo sapiens
gactgactaatgttt

SEQ ID NO: 1484016 - DNA, 15 bp, Homo sapiens
actgactaatgtttc

SEQ ID NO: 1484017 - DNA, 15 bp, Homo sapiens
ctgactaatgtttcc

SEQ ID NO: 1484018 - DNA, 15 bp, Homo sapiens
tgactaatgtttccc

SEQ ID NO: 1484019 - DNA, 15 bp, Homo sapiens
gactaatgtttccca

SEQ ID NO: 1484020 - DNA, 15 bp, Homo sapiens
actaatgtttcccac

SEQ ID NO: 1484021 - DNA, 15 bp, Homo sapiens
ctaatgtttcccacc

SEQ ID NO: 1484022 - DNA, 15 bp, Homo sapiens
taatgtttcccacct

SEQ ID NO: 1484023 - DNA, 15 bp, Homo sapiens
aatgtttcccacctt

SEQ ID NO: 1484024 - DNA, 15 bp, Homo sapiens
atgtttcccaccttc

SEQ ID NO: 1484025 - DNA, 15 bp, Homo sapiens
tgtttcccaccttct

SEQ ID NO: 1484026 - DNA, 15 bp, Homo sapiens
gtttcccaccttctt

SEQ ID NO: 1484027 - DNA, 15 bp, Homo sapiens
tttcccaccttcttc

SEQ ID NO: 1484028 - DNA, 15 bp, Homo sapiens
ttcccaccttcttcc

SEQ ID NO: 1484029 - DNA, 15 bp, Homo sapiens
tcccaccttcttcct

SEQ ID NO: 1484030 - DNA, 15 bp, Homo sapiens
cccaccttcttcctt

SEQ ID NO: 1484031 - DNA, 15 bp, Homo sapiens
ccaccttcttcctta

SEQ ID NO: 1484032 - DNA, 15 bp, Homo sapiens
caccttcttccttat

SEQ ID NO: 1484033 - DNA, 15 bp, Homo sapiens
accttcttccttatc

SEQ ID NO: 1484034 - DNA, 15 bp, Homo sapiens
ccttcttccttatcc

SEQ ID NO: 1484035 - DNA, 15 bp, Homo sapiens
cttcttccttatcca

SEQ ID NO: 1484036 - DNA, 15 bp, Homo sapiens
ttcttccttatccaa

SEQ ID NO: 1484037 - DNA, 15 bp, Homo sapiens
tcttccttatccaac

SEQ ID NO: 1484038 - DNA, 15 bp, Homo sapiens
cttccttatccaact

SEQ ID NO: 1484039 - DNA, 15 bp, Homo sapiens
ttccttatccaactt

SEQ ID NO: 1484040 - DNA, 15 bp, Homo sapiens
tccttatccaacttt

SEQ ID NO: 1484041 - DNA, 15 bp, Homo sapiens
ccttatccaactttc

SEQ ID NO: 1484042 - DNA, 15 bp, Homo sapiens
cttatccaactttcc

SEQ ID NO: 1484043 - DNA, 15 bp, Homo sapiens
ttatccaactttcca

SEQ ID NO: 1484044 - DNA, 15 bp, Homo sapiens
tatccaactttccat

SEQ ID NO: 1484045 - DNA, 15 bp, Homo sapiens
atccaactttccata

SEQ ID NO: 1484046 - DNA, 15 bp, Homo sapiens
tccaactttccataa

SEQ ID NO: 1484047 - DNA, 15 bp, Homo sapiens
ccaactttccataaa

SEQ ID NO: 1484048 - DNA, 15 bp, Homo sapiens
caactttccataaaa

SEQ ID NO: 1484049 - DNA, 15 bp, Homo sapiens
aactttccataaaat

SEQ ID NO: 1484050 - DNA, 15 bp, Homo sapiens
actttccataaaatt

SEQ ID NO: 1484051 - DNA, 15 bp, Homo sapiens
ctttccataaaattt

SEQ ID NO: 1484052 - DNA, 15 bp, Homo sapiens
tttccataaaattta

SEQ ID NO: 1484053 - DNA, 15 bp, Homo sapiens
ttccataaaatttac

SEQ ID NO: 1484054 - DNA, 15 bp, Homo sapiens
tccataaaatttacc

SEQ ID NO: 1484055 - DNA, 15 bp, Homo sapiens
ccataaaatttacct

SEQ ID NO: 1484056 - DNA, 15 bp, Homo sapiens
cataaaatttacctc

SEQ ID NO: 1484057 - DNA, 15 bp, Homo sapiens
ataaaatttacctcc

SEQ ID NO: 1484058 - DNA, 15 bp, Homo sapiens
taaaatttacctcct

SEQ ID NO: 1484059 - DNA, 15 bp, Homo sapiens
aaaatttacctcctc

SEQ ID NO: 1484060 - DNA, 15 bp, Homo sapiens
aaatttacctcctct

SEQ ID NO: 1484061 - DNA, 15 bp, Homo sapiens
aatttacctcctctt

SEQ ID NO: 1484062 - DNA, 15 bp, Homo sapiens
atttacctcctcttc

SEQ ID NO: 1484063 - DNA, 15 bp, Homo sapiens
tttacctcctcttcc

SEQ ID NO: 1484064 - DNA, 15 bp, Homo sapiens
ttacctcctcttccc

SEQ ID NO: 1484065 - DNA, 15 bp, Homo sapiens
tacctcctcttccct

SEQ ID NO: 1484066 - DNA, 15 bp, Homo sapiens
acctcctcttccctt

SEQ ID NO: 1484067 - DNA, 15 bp, Homo sapiens
cctcctcttcccttt

SEQ ID NO: 1484068 - DNA, 15 bp, Homo sapiens
ctcctcttccctttt

SEQ ID NO: 1484069 - DNA, 15 bp, Homo sapiens
tcctcttcccttttc

SEQ ID NO: 1484070 - DNA, 15 bp, Homo sapiens
cctcttcccttttcc

SEQ ID NO: 1484071 - DNA, 15 bp, Homo sapiens
ctcttcccttttccc

SEQ ID NO: 1484072 - DNA, 15 bp, Homo sapiens
tcttcccttttccct

SEQ ID NO: 1484073 - DNA, 15 bp, Homo sapiens
cttcccttttccctc

SEQ ID NO: 1484074 - DNA, 15 bp, Homo sapiens
ttcccttttccctcc

SEQ ID NO: 1484075 - DNA, 15 bp, Homo sapiens
tcccttttccctccc

SEQ ID NO: 1484076 - DNA, 15 bp, Homo sapiens
cccttttccctccct

SEQ ID NO: 1484077 - DNA, 15 bp, Homo sapiens
ccttttccctccctg

SEQ ID NO: 1484078 - DNA, 15 bp, Homo sapiens
cttttccctccctgc

SEQ ID NO: 1484079 - DNA, 15 bp, Homo sapiens
ttttccctccctgcc

SEQ ID NO: 1484080 - DNA, 15 bp, Homo sapiens
tttccctccctgccc

SEQ ID NO: 1484081 - DNA, 15 bp, Homo sapiens
ttccctccctgccct

SEQ ID NO: 1484082 - DNA, 15 bp, Homo sapiens
tccctccctgccctt

SEQ ID NO: 1484083 - DNA, 15 bp, Homo sapiens
ccctccctgcccttt

SEQ ID NO: 1484084 - DNA, 15 bp, Homo sapiens
cctccctgcccttta

SEQ ID NO: 1484085 - DNA, 15 bp, Homo sapiens
ctccctgccctttac

SEQ ID NO: 1484086 - DNA, 15 bp, Homo sapiens
tccctgccctttacg

SEQ ID NO: 1484087 - DNA, 15 bp, Homo sapiens
ccctgccctttacgc

SEQ ID NO: 1484088 - DNA, 15 bp, Homo sapiens
cctgccctttacgca

SEQ ID NO: 1484089 - DNA, 15 bp, Homo sapiens
ctgccctttacgcag

SEQ ID NO: 1484090 - DNA, 15 bp, Homo sapiens
tgccctttacgcagt

SEQ ID NO: 1484091 - DNA, 15 bp, Homo sapiens
gccctttacgcagtg

SEQ ID NO: 1484092 - DNA, 15 bp, Homo sapiens
ccctttacgcagtgg

SEQ ID NO: 1484093 - DNA, 15 bp, Homo sapiens
cctttacgcagtgga

SEQ ID NO: 1484094 - DNA, 15 bp, Homo sapiens
ctttacgcagtggaa

SEQ ID NO: 1484095 - DNA, 15 bp, Homo sapiens
tttacgcagtggaaa

SEQ ID NO: 1484096 - DNA, 15 bp, Homo sapiens
ttacgcagtggaaat

SEQ ID NO: 1484097 - DNA, 15 bp, Homo sapiens
tacgcagtggaaatg

SEQ ID NO: 1484098 - DNA, 15 bp, Homo sapiens
acgcagtggaaatga

SEQ ID NO: 1484099 - DNA, 15 bp, Homo sapiens
cgcagtggaaatgag

SEQ ID NO: 1484100 - DNA, 15 bp, Homo sapiens
gcagtggaaatgagg

SEQ ID NO: 1484101 - DNA, 15 bp, Homo sapiens
cagtggaaatgagga

SEQ ID NO: 1484102 - DNA, 15 bp, Homo sapiens
agtggaaatgaggag

SEQ ID NO: 1484103 - DNA, 15 bp, Homo sapiens
gtggaaatgaggagc

SEQ ID NO: 1484104 - DNA, 15 bp, Homo sapiens
tggaaatgaggagca

SEQ ID NO: 1484105 - DNA, 15 bp, Homo sapiens
ggaaatgaggagcaa

SEQ ID NO: 1484106 - DNA, 15 bp, Homo sapiens
gaaatgaggagcaag

SEQ ID NO: 1484107 - DNA, 15 bp, Homo sapiens
aaatgaggagcaaga

SEQ ID NO: 1484108 - DNA, 15 bp, Homo sapiens
aatgaggagcaagaa

SEQ ID NO: 1484109 - DNA, 15 bp, Homo sapiens
atgaggagcaagaaa

SEQ ID NO: 1484110 - DNA, 15 bp, Homo sapiens
tgaggagcaagaaat

SEQ ID NO: 1484111 - DNA, 15 bp, Homo sapiens
gaggagcaagaaatg

SEQ ID NO: 1484112 - DNA, 15 bp, Homo sapiens
aggagcaagaaatgc

SEQ ID NO: 1484113 - DNA, 15 bp, Homo sapiens
ggagcaagaaatgcg

SEQ ID NO: 1484114 - DNA, 15 bp, Homo sapiens
gagcaagaaatgcgc

SEQ ID NO: 1484115 - DNA, 15 bp, Homo sapiens
agcaagaaatgcgca

SEQ ID NO: 1484116 - DNA, 15 bp, Homo sapiens
gcaagaaatgcgcac

SEQ ID NO: 1484117 - DNA, 15 bp, Homo sapiens
caagaaatgcgcaca

SEQ ID NO: 1484118 - DNA, 15 bp, Homo sapiens
aagaaatgcgcacat

SEQ ID NO: 1484119 - DNA, 15 bp, Homo sapiens
agaaatgcgcacatg

SEQ ID NO: 1484120 - DNA, 15 bp, Homo sapiens
gaaatgcgcacatgt

SEQ ID NO: 1484121 - DNA, 15 bp, Homo sapiens
aaatgcgcacatgta

SEQ ID NO: 1484122 - DNA, 15 bp, Homo sapiens
aatgcgcacatgtag

SEQ ID NO: 1484123 - DNA, 15 bp, Homo sapiens
atgcgcacatgtaga

SEQ ID NO: 1484124 - DNA, 15 bp, Homo sapiens
tgcgcacatgtagag

SEQ ID NO: 1484125 - DNA, 15 bp, Homo sapiens
gcgcacatgtagaga

SEQ ID NO: 1484126 - DNA, 15 bp, Homo sapiens
cgcacatgtagagag

SEQ ID NO: 1484127 - DNA, 15 bp, Homo sapiens
gcacatgtagagagg

SEQ ID NO: 1484128 - DNA, 15 bp, Homo sapiens
cacatgtagagagga

SEQ ID NO: 1484129 - DNA, 15 bp, Homo sapiens
acatgtagagaggag

SEQ ID NO: 1484130 - DNA, 15 bp, Homo sapiens
catgtagagaggaga

SEQ ID NO: 1484131 - DNA, 15 bp, Homo sapiens
atgtagagaggagag

SEQ ID NO: 1484132 - DNA, 15 bp, Homo sapiens
tgtagagaggagaga

SEQ ID NO: 1484133 - DNA, 15 bp, Homo sapiens
gtagagaggagagag

SEQ ID NO: 1484134 - DNA, 15 bp, Homo sapiens
tagagaggagagaga

SEQ ID NO: 1484135 - DNA, 15 bp, Homo sapiens
agagaggagagagaa

SEQ ID NO: 1484136 - DNA, 15 bp, Homo sapiens
gagaggagagagaag

SEQ ID NO: 1484137 - DNA, 15 bp, Homo sapiens
agaggagagagaagc

SEQ ID NO: 1484138 - DNA, 15 bp, Homo sapiens
gaggagagagaagca

SEQ ID NO: 1484139 - DNA, 15 bp, Homo sapiens
aggagagagaagcaa

SEQ ID NO: 1484140 - DNA, 15 bp, Homo sapiens
ggagagagaagcaaa

SEQ ID NO: 1484141 - DNA, 15 bp, Homo sapiens
gagagagaagcaaaa

SEQ ID NO: 1484142 - DNA, 15 bp, Homo sapiens
agagagaagcaaaag

SEQ ID NO: 1484143 - DNA, 15 bp, Homo sapiens
gagagaagcaaaagg

SEQ ID NO: 1484144 - DNA, 15 bp, Homo sapiens
agagaagcaaaaggc

SEQ ID NO: 1484145 - DNA, 15 bp, Homo sapiens
gagaagcaaaaggct

SEQ ID NO: 1484146 - DNA, 15 bp, Homo sapiens
agaagcaaaaggctt

SEQ ID NO: 1484147 - DNA, 15 bp, Homo sapiens
gaagcaaaaggcttg

SEQ ID NO: 1484148 - DNA, 15 bp, Homo sapiens
aagcaaaaggcttgg

SEQ ID NO: 1484149 - DNA, 15 bp, Homo sapiens
agcaaaaggcttggc

SEQ ID NO: 1484150 - DNA, 15 bp, Homo sapiens
gcaaaaggcttggcc

SEQ ID NO: 1484151 - DNA, 15 bp, Homo sapiens
caaaaggcttggcct

SEQ ID NO: 1484152 - DNA, 15 bp, Homo sapiens
aaaaggcttggcctt

SEQ ID NO: 1484153 - DNA, 15 bp, Homo sapiens
aaaggcttggccttg

SEQ ID NO: 1484154 - DNA, 15 bp, Homo sapiens
aaggcttggccttgc

SEQ ID NO: 1484155 - DNA, 15 bp, Homo sapiens
aggcttggccttgct

SEQ ID NO: 1484156 - DNA, 15 bp, Homo sapiens
ggcttggccttgcta

SEQ ID NO: 1484157 - DNA, 15 bp, Homo sapiens
gcttggccttgctaa

SEQ ID NO: 1484158 - DNA, 15 bp, Homo sapiens
cttggccttgctaac

SEQ ID NO: 1484159 - DNA, 15 bp, Homo sapiens
ttggccttgctaaca

SEQ ID NO: 1484160 - DNA, 15 bp, Homo sapiens
tggccttgctaacag

SEQ ID NO: 1484161 - DNA, 15 bp, Homo sapiens
ggccttgctaacagc

SEQ ID NO: 1484162 - DNA, 15 bp, Homo sapiens
gccttgctaacagcg

SEQ ID NO: 1484163 - DNA, 15 bp, Homo sapiens
ccttgctaacagcgg

SEQ ID NO: 1484164 - DNA, 15 bp, Homo sapiens
cttgctaacagcggc

SEQ ID NO: 1484165 - DNA, 15 bp, Homo sapiens
ttgctaacagcggcc

SEQ ID NO: 1484166 - DNA, 15 bp, Homo sapiens
tgctaacagcggcca

SEQ ID NO: 1484167 - DNA, 15 bp, Homo sapiens
gctaacagcggccac

SEQ ID NO: 1484168 - DNA, 15 bp, Homo sapiens
ctaacagcggccacc

SEQ ID NO: 1484169 - DNA, 15 bp, Homo sapiens
taacagcggccacct

SEQ ID NO: 1484170 - DNA, 15 bp, Homo sapiens
aacagcggccacctg

SEQ ID NO: 1484171 - DNA, 15 bp, Homo sapiens
acagcggccacctgc

SEQ ID NO: 1484172 - DNA, 15 bp, Homo sapiens
cagcggccacctgct

SEQ ID NO: 1484173 - DNA, 15 bp, Homo sapiens
agcggccacctgctc

SEQ ID NO: 1484174 - DNA, 15 bp, Homo sapiens
gcggccacctgctct

SEQ ID NO: 1484175 - DNA, 15 bp, Homo sapiens
cggccacctgctctt

SEQ ID NO: 1484176 - DNA, 15 bp, Homo sapiens
ggccacctgctcttg

SEQ ID NO: 1484177 - DNA, 15 bp, Homo sapiens
gccacctgctcttgg

SEQ ID NO: 1484178 - DNA, 15 bp, Homo sapiens
ccacctgctcttggc

SEQ ID NO: 1484179 - DNA, 15 bp, Homo sapiens
cacctgctcttggca

SEQ ID NO: 1484180 - DNA, 15 bp, Homo sapiens
acctgctcttggcac

SEQ ID NO: 1484181 - DNA, 15 bp, Homo sapiens
cctgctcttggcact

SEQ ID NO: 1484182 - DNA, 15 bp, Homo sapiens
ctgctcttggcactt

SEQ ID NO: 1484183 - DNA, 15 bp, Homo sapiens
tgctcttggcacttc

SEQ ID NO: 1484184 - DNA, 15 bp, Homo sapiens
gctcttggcacttca

SEQ ID NO: 1484185 - DNA, 15 bp, Homo sapiens
ctcttggcacttcag

SEQ ID NO: 1484186 - DNA, 15 bp, Homo sapiens
tcttggcacttcaga

SEQ ID NO: 1484187 - DNA, 15 bp, Homo sapiens
cttggcacttcagat

SEQ ID NO: 1484188 - DNA, 15 bp, Homo sapiens
ttggcacttcagatg

SEQ ID NO: 1484189 - DNA, 15 bp, Homo sapiens
tggcacttcagatga

SEQ ID NO: 1484190 - DNA, 15 bp, Homo sapiens
ggcacttcagatgag

SEQ ID NO: 1484191 - DNA, 15 bp, Homo sapiens
gcacttcagatgaga

SEQ ID NO: 1484192 - DNA, 15 bp, Homo sapiens
cacttcagatgagac

SEQ ID NO: 1484193 - DNA, 15 bp, Homo sapiens
acttcagatgagact

SEQ ID NO: 1484194 - DNA, 15 bp, Homo sapiens
cttcagatgagactt

SEQ ID NO: 1484195 - DNA, 15 bp, Homo sapiens
ttcagatgagacttg

SEQ ID NO: 1484196 - DNA, 15 bp, Homo sapiens
tcagatgagacttgg

SEQ ID NO: 1484197 - DNA, 15 bp, Homo sapiens
cagatgagacttgga

SEQ ID NO: 1484198 - DNA, 15 bp, Homo sapiens
agatgagacttggag

SEQ ID NO: 1484199 - DNA, 15 bp, Homo sapiens
gatgagacttggagt

SEQ ID NO: 1484200 - DNA, 15 bp, Homo sapiens
atgagacttggagtg

SEQ ID NO: 1484201 - DNA, 15 bp, Homo sapiens
tgagacttggagtga

SEQ ID NO: 1484202 - DNA, 15 bp, Homo sapiens
gagacttggagtgac

SEQ ID NO: 1484203 - DNA, 15 bp, Homo sapiens
agacttggagtgacc

SEQ ID NO: 1484204 - DNA, 15 bp, Homo sapiens
gacttggagtgaccc

SEQ ID NO: 1484205 - DNA, 15 bp, Homo sapiens
acttggagtgacccc

SEQ ID NO: 1484206 - DNA, 15 bp, Homo sapiens
cttggagtgacccca

SEQ ID NO: 1484207 - DNA, 15 bp, Homo sapiens
ttggagtgaccccaa

SEQ ID NO: 1484208 - DNA, 15 bp, Homo sapiens
tggagtgaccccaac

SEQ ID NO: 1484209 - DNA, 15 bp, Homo sapiens
ggagtgaccccaacc

SEQ ID NO: 1484210 - DNA, 15 bp, Homo sapiens
gagtgaccccaaccc

SEQ ID NO: 1484211 - DNA, 15 bp, Homo sapiens
agtgaccccaaccca

SEQ ID NO: 1484212 - DNA, 15 bp, Homo sapiens
gtgaccccaacccag

SEQ ID NO: 1484213 - DNA, 15 bp, Homo sapiens
tgaccccaacccagg

SEQ ID NO: 1484214 - DNA, 15 bp, Homo sapiens
gaccccaacccaggc

SEQ ID NO: 1484215 - DNA, 15 bp, Homo sapiens
accccaacccaggct

SEQ ID NO: 1484216 - DNA, 15 bp, Homo sapiens
ccccaacccaggctg

SEQ ID NO: 1484217 - DNA, 15 bp, Homo sapiens
cccaacccaggctga

SEQ ID NO: 1484218 - DNA, 15 bp, Homo sapiens
ccaacccaggctgat

SEQ ID NO: 1484219 - DNA, 15 bp, Homo sapiens
caacccaggctgatc

SEQ ID NO: 1484220 - DNA, 15 bp, Homo sapiens
aacccaggctgatca

SEQ ID NO: 1484221 - DNA, 15 bp, Homo sapiens
acccaggctgatcac

SEQ ID NO: 1484222 - DNA, 15 bp, Homo sapiens
cccaggctgatcacc

SEQ ID NO: 1484223 - DNA, 15 bp, Homo sapiens
ccaggctgatcaccc

SEQ ID NO: 1484224 - DNA, 15 bp, Homo sapiens
caggctgatcacccc

SEQ ID NO: 1484225 - DNA, 15 bp, Homo sapiens
aggctgatcaccccc

SEQ ID NO: 1484226 - DNA, 15 bp, Homo sapiens
ggctgatcaccccca

SEQ ID NO: 1484227 - DNA, 15 bp, Homo sapiens
gctgatcacccccac

SEQ ID NO: 1484228 - DNA, 15 bp, Homo sapiens
ctgatcacccccact

SEQ ID NO: 1484229 - DNA, 15 bp, Homo sapiens
tgatcacccccactg

SEQ ID NO: 1484230 - DNA, 15 bp, Homo sapiens
gatcacccccactgc

SEQ ID NO: 1484231 - DNA, 15 bp, Homo sapiens
atcacccccactgct

SEQ ID NO: 1484232 - DNA, 15 bp, Homo sapiens
tcacccccactgctg

SEQ ID NO: 1484233 - DNA, 15 bp, Homo sapiens
cacccccactgctgc

SEQ ID NO: 1484234 - DNA, 15 bp, Homo sapiens
acccccactgctgca

SEQ ID NO: 1484235 - DNA, 15 bp, Homo sapiens
cccccactgctgcag

SEQ ID NO: 1484236 - DNA, 15 bp, Homo sapiens
ccccactgctgcaga

SEQ ID NO: 1484237 - DNA, 15 bp, Homo sapiens
cccactgctgcagag

SEQ ID NO: 1484238 - DNA, 15 bp, Homo sapiens
ccactgctgcagagc

SEQ ID NO: 1484239 - DNA, 15 bp, Homo sapiens
cactgctgcagagcc

SEQ ID NO: 1484240 - DNA, 15 bp, Homo sapiens
actgctgcagagcct

SEQ ID NO: 1484241 - DNA, 15 bp, Homo sapiens
ctgctgcagagcctg

SEQ ID NO: 1484242 - DNA, 15 bp, Homo sapiens
tgctgcagagcctgc

SEQ ID NO: 1484243 - DNA, 15 bp, Homo sapiens
gctgcagagcctgct

SEQ ID NO: 1484244 - DNA, 15 bp, Homo sapiens
ctgcagagcctgctg

SEQ ID NO: 1484245 - DNA, 15 bp, Homo sapiens
tgcagagcctgctgg

SEQ ID NO: 1484246 - DNA, 15 bp, Homo sapiens
gcagagcctgctggt

SEQ ID NO: 1484247 - DNA, 15 bp, Homo sapiens
cagagcctgctggtt

SEQ ID NO: 1484248 - DNA, 15 bp, Homo sapiens
agagcctgctggttt

SEQ ID NO: 1484249 - DNA, 15 bp, Homo sapiens
gagcctgctggtttc

SEQ ID NO: 1484250 - DNA, 15 bp, Homo sapiens
agcctgctggtttcc

SEQ ID NO: 1484251 - DNA, 15 bp, Homo sapiens
gcctgctggtttccc

SEQ ID NO: 1484252 - DNA, 15 bp, Homo sapiens
cctgctggtttccca

SEQ ID NO: 1484253 - DNA, 15 bp, Homo sapiens
ctgctggtttcccaa

SEQ ID NO: 1484254 - DNA, 15 bp, Homo sapiens
tgctggtttcccaaa

SEQ ID NO: 1484255 - DNA, 15 bp, Homo sapiens
gctggtttcccaaag

SEQ ID NO: 1484256 - DNA, 15 bp, Homo sapiens
ctggtttcccaaagc

SEQ ID NO: 1484257 - DNA, 15 bp, Homo sapiens
tggtttcccaaagca

SEQ ID NO: 1484258 - DNA, 15 bp, Homo sapiens
ggtttcccaaagcag

SEQ ID NO: 1484259 - DNA, 15 bp, Homo sapiens
gtttcccaaagcaga

SEQ ID NO: 1484260 - DNA, 15 bp, Homo sapiens
tttcccaaagcagag

SEQ ID NO: 1484261 - DNA, 15 bp, Homo sapiens
ttcccaaagcagaga

SEQ ID NO: 1484262 - DNA, 15 bp, Homo sapiens
tcccaaagcagagaa

SEQ ID NO: 1484263 - DNA, 15 bp, Homo sapiens
cccaaagcagagaac

SEQ ID NO: 1484264 - DNA, 15 bp, Homo sapiens
ccaaagcagagaaca

SEQ ID NO: 1484265 - DNA, 15 bp, Homo sapiens
caaagcagagaacac

SEQ ID NO: 1484266 - DNA, 15 bp, Homo sapiens
aaagcagagaacaca

SEQ ID NO: 1484267 - DNA, 15 bp, Homo sapiens
aagcagagaacacag

SEQ ID NO: 1484268 - DNA, 15 bp, Homo sapiens
agcagagaacacaga

SEQ ID NO: 1484269 - DNA, 15 bp, Homo sapiens
gcagagaacacagag

SEQ ID NO: 1484270 - DNA, 15 bp, Homo sapiens
cagagaacacagagg

SEQ ID NO: 1484271 - DNA, 15 bp, Homo sapiens
agagaacacagaggg

SEQ ID NO: 1484272 - DNA, 15 bp, Homo sapiens
gagaacacagagggc

SEQ ID NO: 1484273 - DNA, 15 bp, Homo sapiens
agaacacagagggct

SEQ ID NO: 1484274 - DNA, 15 bp, Homo sapiens
gaacacagagggctt

SEQ ID NO: 1484275 - DNA, 15 bp, Homo sapiens
aacacagagggcttt

SEQ ID NO: 1484276 - DNA, 15 bp, Homo sapiens
acacagagggctttg

SEQ ID NO: 1484277 - DNA, 15 bp, Homo sapiens
cacagagggctttgc

SEQ ID NO: 1484278 - DNA, 15 bp, Homo sapiens
acagagggctttgca

SEQ ID NO: 1484279 - DNA, 15 bp, Homo sapiens
cagagggctttgcac

SEQ ID NO: 1484280 - DNA, 15 bp, Homo sapiens
agagggctttgcacc

SEQ ID NO: 1484281 - DNA, 15 bp, Homo sapiens
gagggctttgcacct

SEQ ID NO: 1484282 - DNA, 15 bp, Homo sapiens
agggctttgcaccta

SEQ ID NO: 1484283 - DNA, 15 bp, Homo sapiens
gggctttgcacctaa

SEQ ID NO: 1484284 - DNA, 15 bp, Homo sapiens
ggctttgcacctaag

SEQ ID NO: 1484285 - DNA, 15 bp, Homo sapiens
gctttgcacctaagt

SEQ ID NO: 1484286 - DNA, 15 bp, Homo sapiens
ctttgcacctaagta

SEQ ID NO: 1484287 - DNA, 15 bp, Homo sapiens
tttgcacctaagtat

SEQ ID NO: 1484288 - DNA, 15 bp, Homo sapiens
ttgcacctaagtatc

SEQ ID NO: 1484289 - DNA, 15 bp, Homo sapiens
tgcacctaagtatct

SEQ ID NO: 1484290 - DNA, 15 bp, Homo sapiens
gcacctaagtatctt

SEQ ID NO: 1484291 - DNA, 15 bp, Homo sapiens
cacctaagtatcttg

SEQ ID NO: 1484292 - DNA, 15 bp, Homo sapiens
acctaagtatcttgt

SEQ ID NO: 1484293 - DNA, 15 bp, Homo sapiens
cctaagtatcttgtt

SEQ ID NO: 1484294 - DNA, 15 bp, Homo sapiens
ctaagtatcttgttc

SEQ ID NO: 1484295 - DNA, 15 bp, Homo sapiens
taagtatcttgttcg

SEQ ID NO: 1484296 - DNA, 15 bp, Homo sapiens
aagtatcttgttcgc

SEQ ID NO: 1484297 - DNA, 15 bp, Homo sapiens
agtatcttgttcgca

SEQ ID NO: 1484298 - DNA, 15 bp, Homo sapiens
gtatcttgttcgcat

SEQ ID NO: 1484299 - DNA, 15 bp, Homo sapiens
tatcttgttcgcatt

SEQ ID NO: 1484300 - DNA, 15 bp, Homo sapiens
atcttgttcgcattt

SEQ ID NO: 1484301 - DNA, 15 bp, Homo sapiens
tcttgttcgcatttc

SEQ ID NO: 1484302 - DNA, 15 bp, Homo sapiens
cttgttcgcatttca

SEQ ID NO: 1484303 - DNA, 15 bp, Homo sapiens
ttgttcgcatttcat

SEQ ID NO: 1484304 - DNA, 15 bp, Homo sapiens
tgttcgcatttcata

SEQ ID NO: 1484305 - DNA, 15 bp, Homo sapiens
gttcgcatttcatat

SEQ ID NO: 1484306 - DNA, 15 bp, Homo sapiens
ttcgcatttcatatt

SEQ ID NO: 1484307 - DNA, 15 bp, Homo sapiens
tcgcatttcatattc

SEQ ID NO: 1484308 - DNA, 15 bp, Homo sapiens
cgcatttcatattct

SEQ ID NO: 1484309 - DNA, 15 bp, Homo sapiens
gcatttcatattctc

SEQ ID NO: 1484310 - DNA, 15 bp, Homo sapiens
catttcatattctct

SEQ ID NO: 1484311 - DNA, 15 bp, Homo sapiens
atttcatattctctc

SEQ ID NO: 1484312 - DNA, 15 bp, Homo sapiens
tttcatattctctcc

SEQ ID NO: 1484313 - DNA, 15 bp, Homo sapiens
ttcatattctctccg

SEQ ID NO: 1484314 - DNA, 15 bp, Homo sapiens
tcatattctctccga

SEQ ID NO: 1484315 - DNA, 15 bp, Homo sapiens
catattctctccgac

SEQ ID NO: 1484316 - DNA, 15 bp, Homo sapiens
atattctctccgact

SEQ ID NO: 1484317 - DNA, 15 bp, Homo sapiens
tattctctccgactg

SEQ ID NO: 1484318 - DNA, 15 bp, Homo sapiens
attctctccgactgg

SEQ ID NO: 1484319 - DNA, 15 bp, Homo sapiens
ttctctccgactggc

SEQ ID NO: 1484320 - DNA, 15 bp, Homo sapiens
tctctccgactggca

SEQ ID NO: 1484321 - DNA, 15 bp, Homo sapiens
ctctccgactggcaa

SEQ ID NO: 1484322 - DNA, 15 bp, Homo sapiens
tctccgactggcaag

SEQ ID NO: 1484323 - DNA, 15 bp, Homo sapiens
ctccgactggcaaga

SEQ ID NO: 1484324 - DNA, 15 bp, Homo sapiens
tccgactggcaagag

SEQ ID NO: 1484325 - DNA, 15 bp, Homo sapiens
ccgactggcaagaga

SEQ ID NO: 1484326 - DNA, 15 bp, Homo sapiens
cgactggcaagagaa

SEQ ID NO: 1484327 - DNA, 15 bp, Homo sapiens
gactggcaagagaag

SEQ ID NO: 1484328 - DNA, 15 bp, Homo sapiens
actggcaagagaagg

SEQ ID NO: 1484329 - DNA, 15 bp, Homo sapiens
ctggcaagagaaggg

SEQ ID NO: 1484330 - DNA, 15 bp, Homo sapiens
tggcaagagaaggga

SEQ ID NO: 1484331 - DNA, 15 bp, Homo sapiens
ggcaagagaagggac

SEQ ID NO: 1484332 - DNA, 15 bp, Homo sapiens
gcaagagaagggact

SEQ ID NO: 1484333 - DNA, 15 bp, Homo sapiens
caagagaagggactt

SEQ ID NO: 1484334 - DNA, 15 bp, Homo sapiens
aagagaagggacttc

SEQ ID NO: 1484335 - DNA, 15 bp, Homo sapiens
agagaagggacttcg

SEQ ID NO: 1484336 - DNA, 15 bp, Homo sapiens
gagaagggacttcgt

SEQ ID NO: 1484337 - DNA, 15 bp, Homo sapiens
agaagggacttcgtg

SEQ ID NO: 1484338 - DNA, 15 bp, Homo sapiens
gaagggacttcgtgt

SEQ ID NO: 1484339 - DNA, 15 bp, Homo sapiens
aagggacttcgtgtc

SEQ ID NO: 1484340 - DNA, 15 bp, Homo sapiens
agggacttcgtgtca

SEQ ID NO: 1484341 - DNA, 15 bp, Homo sapiens
gggacttcgtgtcat

SEQ ID NO: 1484342 - DNA, 15 bp, Homo sapiens
ggacttcgtgtcatt

SEQ ID NO: 1484343 - DNA, 15 bp, Homo sapiens
gacttcgtgtcatta

SEQ ID NO: 1484344 - DNA, 15 bp, Homo sapiens
acttcgtgtcattat

SEQ ID NO: 1484345 - DNA, 15 bp, Homo sapiens
cttcgtgtcattatg

SEQ ID NO: 1484346 - DNA, 15 bp, Homo sapiens
ttcgtgtcattatgc

SEQ ID NO: 1484347 - DNA, 15 bp, Homo sapiens
tcgtgtcattatgca

SEQ ID NO: 1484348 - DNA, 15 bp, Homo sapiens
cgtgtcattatgcaa

SEQ ID NO: 1484349 - DNA, 15 bp, Homo sapiens
gtgtcattatgcaaa

SEQ ID NO: 1484350 - DNA, 15 bp, Homo sapiens
tgtcattatgcaaat

SEQ ID NO: 1484351 - DNA, 15 bp, Homo sapiens
gtcattatgcaaata

SEQ ID NO: 1484352 - DNA, 15 bp, Homo sapiens
tcattatgcaaataa

SEQ ID NO: 1484353 - DNA, 15 bp, Homo sapiens
cattatgcaaataat

SEQ ID NO: 1484354 - DNA, 15 bp, Homo sapiens
attatgcaaataatg

SEQ ID NO: 1484355 - DNA, 15 bp, Homo sapiens
ttatgcaaataatgt

SEQ ID NO: 1484356 - DNA, 15 bp, Homo sapiens
tatgcaaataatgta

SEQ ID NO: 1484357 - DNA, 15 bp, Homo sapiens
atgcaaataatgtaa

SEQ ID NO: 1484358 - DNA, 15 bp, Homo sapiens
tgcaaataatgtaat

SEQ ID NO: 1484359 - DNA, 15 bp, Homo sapiens
gcaaataatgtaata

SEQ ID NO: 1484360 - DNA, 15 bp, Homo sapiens
caaataatgtaataa

SEQ ID NO: 1484361 - DNA, 15 bp, Homo sapiens
aaataatgtaataaa

SEQ ID NO: 1484362 - DNA, 15 bp, Homo sapiens
aataatgtaataaaa

SEQ ID NO: 1484363 - DNA, 15 bp, Homo sapiens
ataatgtaataaaaa

SEQ ID NO: 1484364 - DNA, 15 bp, Homo sapiens
taatgtaataaaaag

SEQ ID NO: 1484365 - DNA, 15 bp, Homo sapiens
aatgtaataaaaagc

SEQ ID NO: 1484366 - DNA, 15 bp, Homo sapiens
atgtaataaaaagcc

SEQ ID NO: 1484367 - DNA, 15 bp, Homo sapiens
tgtaataaaaagcca

SEQ ID NO: 1484368 - DNA, 15 bp, Homo sapiens
gtaataaaaagccaa

SEQ ID NO: 1484369 - DNA, 15 bp, Homo sapiens
taataaaaagccaaa

SEQ ID NO: 1484370 - DNA, 15 bp, Homo sapiens
aataaaaagccaaaa

SEQ ID NO: 1484371 - DNA, 15 bp, Homo sapiens
ataaaaagccaaaac

SEQ ID NO: 1484372 - DNA, 15 bp, Homo sapiens
taaaaagccaaaact

SEQ ID NO: 1484373 - DNA, 15 bp, Homo sapiens
aaaaagccaaaacta

SEQ ID NO: 1484374 - DNA, 15 bp, Homo sapiens
aaaagccaaaactag

SEQ ID NO: 1484375 - DNA, 15 bp, Homo sapiens
aaagccaaaactagc

SEQ ID NO: 1484376 - DNA, 15 bp, Homo sapiens
aagccaaaactagcg

SEQ ID NO: 1484377 - DNA, 15 bp, Homo sapiens
agccaaaactagcgt

SEQ ID NO: 1484378 - DNA, 15 bp, Homo sapiens
gccaaaactagcgtg

SEQ ID NO: 1484379 - DNA, 15 bp, Homo sapiens
ccaaaactagcgtgc

SEQ ID NO: 1484380 - DNA, 15 bp, Homo sapiens
caaaactagcgtgct

SEQ ID NO: 1484381 - DNA, 15 bp, Homo sapiens
aaaactagcgtgctc

SEQ ID NO: 1484382 - DNA, 15 bp, Homo sapiens
aaactagcgtgctcc

SEQ ID NO: 1484383 - DNA, 15 bp, Homo sapiens
aactagcgtgctccc

SEQ ID NO: 1484384 - DNA, 15 bp, Homo sapiens
actagcgtgctccct

SEQ ID NO: 1484385 - DNA, 15 bp, Homo sapiens
ctagcgtgctccctg

SEQ ID NO: 1484386 - DNA, 15 bp, Homo sapiens
tagcgtgctccctgt

SEQ ID NO: 1484387 - DNA, 15 bp, Homo sapiens
agcgtgctccctgtg

SEQ ID NO: 1484388 - DNA, 15 bp, Homo sapiens
gcgtgctccctgtgg

SEQ ID NO: 1484389 - DNA, 15 bp, Homo sapiens
cgtgctccctgtggt

SEQ ID NO: 1484390 - DNA, 15 bp, Homo sapiens
gtgctccctgtggtg

SEQ ID NO: 1484391 - DNA, 15 bp, Homo sapiens
tgctccctgtggtga

SEQ ID NO: 1484392 - DNA, 15 bp, Homo sapiens
gctccctgtggtgac

SEQ ID NO: 1484393 - DNA, 15 bp, Homo sapiens
ctccctgtggtgacc

SEQ ID NO: 1484394 - DNA, 15 bp, Homo sapiens
tccctgtggtgaccc

SEQ ID NO: 1484395 - DNA, 15 bp, Homo sapiens
ccctgtggtgaccct

SEQ ID NO: 1484396 - DNA, 15 bp, Homo sapiens
cctgtggtgaccctg

SEQ ID NO: 1484397 - DNA, 15 bp, Homo sapiens
ctgtggtgaccctgg

SEQ ID NO: 1484398 - DNA, 15 bp, Homo sapiens
tgtggtgaccctggg

SEQ ID NO: 1484399 - DNA, 15 bp, Homo sapiens
gtggtgaccctgggt

SEQ ID NO: 1484400 - DNA, 15 bp, Homo sapiens
tggtgaccctgggta

SEQ ID NO: 1484401 - DNA, 15 bp, Homo sapiens
ggtgaccctgggtaa

SEQ ID NO: 1484402 - DNA, 15 bp, Homo sapiens
gtgaccctgggtaat

SEQ ID NO: 1484403 - DNA, 15 bp, Homo sapiens
tgaccctgggtaatg

SEQ ID NO: 1484404 - DNA, 15 bp, Homo sapiens
gaccctgggtaatgg

SEQ ID NO: 1484405 - DNA, 15 bp, Homo sapiens
accctgggtaatgga

SEQ ID NO: 1484406 - DNA, 15 bp, Homo sapiens
ccctgggtaatggat

SEQ ID NO: 1484407 - DNA, 15 bp, Homo sapiens
cctgggtaatggata

SEQ ID NO: 1484408 - DNA, 15 bp, Homo sapiens
ctgggtaatggatat

SEQ ID NO: 1484409 - DNA, 15 bp, Homo sapiens
tgggtaatggatatg

SEQ ID NO: 1484410 - DNA, 15 bp, Homo sapiens
gggtaatggatatgc

SEQ ID NO: 1484411 - DNA, 15 bp, Homo sapiens
ggtaatggatatgcc

SEQ ID NO: 1484412 - DNA, 15 bp, Homo sapiens
gtaatggatatgcca

SEQ ID NO: 1484413 - DNA, 15 bp, Homo sapiens
taatggatatgccag

SEQ ID NO: 1484414 - DNA, 15 bp, Homo sapiens
aatggatatgccaga

SEQ ID NO: 1484415 - DNA, 15 bp, Homo sapiens
atggatatgccagag

SEQ ID NO: 1484416 - DNA, 15 bp, Homo sapiens
tggatatgccagaga

SEQ ID NO: 1484417 - DNA, 15 bp, Homo sapiens
ggatatgccagagat

SEQ ID NO: 1484418 - DNA, 15 bp, Homo sapiens
gatatgccagagatt

SEQ ID NO: 1484419 - DNA, 15 bp, Homo sapiens
atatgccagagatta

SEQ ID NO: 1484420 - DNA, 15 bp, Homo sapiens
tatgccagagattag

SEQ ID NO: 1484421 - DNA, 15 bp, Homo sapiens
atgccagagattagc

SEQ ID NO: 1484422 - DNA, 15 bp, Homo sapiens
tgccagagattagcc

SEQ ID NO: 1484423 - DNA, 15 bp, Homo sapiens
gccagagattagcct

SEQ ID NO: 1484424 - DNA, 15 bp, Homo sapiens
ccagagattagcctt

SEQ ID NO: 1484425 - DNA, 15 bp, Homo sapiens
cagagattagccttc

SEQ ID NO: 1484426 - DNA, 15 bp, Homo sapiens
agagattagccttcc

SEQ ID NO: 1484427 - DNA, 15 bp, Homo sapiens
gagattagccttcca

SEQ ID NO: 1484428 - DNA, 15 bp, Homo sapiens
agattagccttccag

SEQ ID NO: 1484429 - DNA, 15 bp, Homo sapiens
gattagccttccaga

SEQ ID NO: 1484430 - DNA, 15 bp, Homo sapiens
attagccttccagag

SEQ ID NO: 1484431 - DNA, 15 bp, Homo sapiens
ttagccttccagagc

SEQ ID NO: 1484432 - DNA, 15 bp, Homo sapiens
tagccttccagagcc

SEQ ID NO: 1484433 - DNA, 15 bp, Homo sapiens
agccttccagagccc

SEQ ID NO: 1484434 - DNA, 15 bp, Homo sapiens
gccttccagagccct

SEQ ID NO: 1484435 - DNA, 15 bp, Homo sapiens
ccttccagagccctg

SEQ ID NO: 1484436 - DNA, 15 bp, Homo sapiens
cttccagagccctgc

SEQ ID NO: 1484437 - DNA, 15 bp, Homo sapiens
ttccagagccctgca

SEQ ID NO: 1484438 - DNA, 15 bp, Homo sapiens
tccagagccctgcac

SEQ ID NO: 1484439 - DNA, 15 bp, Homo sapiens
ccagagccctgcact

SEQ ID NO: 1484440 - DNA, 15 bp, Homo sapiens
cagagccctgcactg

SEQ ID NO: 1484441 - DNA, 15 bp, Homo sapiens
agagccctgcactgg

SEQ ID NO: 1484442 - DNA, 15 bp, Homo sapiens
gagccctgcactggg

SEQ ID NO: 1484443 - DNA, 15 bp, Homo sapiens
agccctgcactggga

SEQ ID NO: 1484444 - DNA, 15 bp, Homo sapiens
gccctgcactgggag

SEQ ID NO: 1484445 - DNA, 15 bp, Homo sapiens
ccctgcactgggagc

SEQ ID NO: 1484446 - DNA, 15 bp, Homo sapiens
cctgcactgggagcg

SEQ ID NO: 1484447 - DNA, 15 bp, Homo sapiens
ctgcactgggagcgg

SEQ ID NO: 1484448 - DNA, 15 bp, Homo sapiens
tgcactgggagcggc

SEQ ID NO: 1484449 - DNA, 15 bp, Homo sapiens
gcactgggagcggcg

SEQ ID NO: 1484450 - DNA, 15 bp, Homo sapiens
cactgggagcggcgg

SEQ ID NO: 1484451 - DNA, 15 bp, Homo sapiens
actgggagcggcgga

SEQ ID NO: 1484452 - DNA, 15 bp, Homo sapiens
ctgggagcggcggag

SEQ ID NO: 1484453 - DNA, 15 bp, Homo sapiens
tgggagcggcggagt

SEQ ID NO: 1484454 - DNA, 15 bp, Homo sapiens
gggagcggcggagtg

SEQ ID NO: 1484455 - DNA, 15 bp, Homo sapiens
ggagcggcggagtgg

SEQ ID NO: 1484456 - DNA, 15 bp, Homo sapiens
gagcggcggagtggg

SEQ ID NO: 1484457 - DNA, 15 bp, Homo sapiens
agcggcggagtgggc

SEQ ID NO: 1484458 - DNA, 15 bp, Homo sapiens
gcggcggagtgggcc

SEQ ID NO: 1484459 - DNA, 15 bp, Homo sapiens
cggcggagtgggccc

SEQ ID NO: 1484460 - DNA, 15 bp, Homo sapiens
ggcggagtgggccca

SEQ ID NO: 1484461 - DNA, 15 bp, Homo sapiens
gcggagtgggcccac

SEQ ID NO: 1484462 - DNA, 15 bp, Homo sapiens
cggagtgggcccact

SEQ ID NO: 1484463 - DNA, 15 bp, Homo sapiens
ggagtgggcccactg

SEQ ID NO: 1484464 - DNA, 15 bp, Homo sapiens
gagtgggcccactga

SEQ ID NO: 1484465 - DNA, 15 bp, Homo sapiens
agtgggcccactgag

SEQ ID NO: 1484466 - DNA, 15 bp, Homo sapiens
gtgggcccactgagc

SEQ ID NO: 1484467 - DNA, 15 bp, Homo sapiens
tgggcccactgagca

SEQ ID NO: 1484468 - DNA, 15 bp, Homo sapiens
gggcccactgagcag

SEQ ID NO: 1484469 - DNA, 15 bp, Homo sapiens
ggcccactgagcagg

SEQ ID NO: 1484470 - DNA, 15 bp, Homo sapiens
gcccactgagcaggg

SEQ ID NO: 1484471 - DNA, 15 bp, Homo sapiens
cccactgagcagggc

SEQ ID NO: 1484472 - DNA, 15 bp, Homo sapiens
ccactgagcagggca

SEQ ID NO: 1484473 - DNA, 15 bp, Homo sapiens
cactgagcagggcag

SEQ ID NO: 1484474 - DNA, 15 bp, Homo sapiens
actgagcagggcagc

SEQ ID NO: 1484475 - DNA, 15 bp, Homo sapiens
ctgagcagggcagcc

SEQ ID NO: 1484476 - DNA, 15 bp, Homo sapiens
tgagcagggcagcca

SEQ ID NO: 1484477 - DNA, 15 bp, Homo sapiens
gagcagggcagccac

SEQ ID NO: 1484478 - DNA, 15 bp, Homo sapiens
gcagggcagccacag

SEQ ID NO: 1484479 - DNA, 15 bp, Homo sapiens
cagggcagccacagg

SEQ ID NO: 1484480 - DNA, 15 bp, Homo sapiens
agggcagccacaggg

SEQ ID NO: 1484481 - DNA, 15 bp, Homo sapiens
gggcagccacaggga

SEQ ID NO: 1484482 - DNA, 15 bp, Homo sapiens
ggcagccacagggaa

SEQ ID NO: 1484483 - DNA, 15 bp, Homo sapiens
gcagccacagggaac

SEQ ID NO: 1484484 - DNA, 15 bp, Homo sapiens
cagccacagggaact

SEQ ID NO: 1484485 - DNA, 15 bp, Homo sapiens
agccacagggaactt

SEQ ID NO: 1484486 - DNA, 15 bp, Homo sapiens
gccacagggaacttg

SEQ ID NO: 1484487 - DNA, 15 bp, Homo sapiens
ccacagggaacttgg

SEQ ID NO: 1484488 - DNA, 15 bp, Homo sapiens
cacagggaacttggt

SEQ ID NO: 1484489 - DNA, 15 bp, Homo sapiens
acagggaacttggtc

SEQ ID NO: 1484490 - DNA, 15 bp, Homo sapiens
cagggaacttggtct

SEQ ID NO: 1484491 - DNA, 15 bp, Homo sapiens
agggaacttggtctg

SEQ ID NO: 1484492 - DNA, 15 bp, Homo sapiens
gggaacttggtctgg

SEQ ID NO: 1484493 - DNA, 15 bp, Homo sapiens
ggaacttggtctggt

SEQ ID NO: 1484494 - DNA, 15 bp, Homo sapiens
gaacttggtctggtt

SEQ ID NO: 1484495 - DNA, 15 bp, Homo sapiens
aacttggtctggttg

SEQ ID NO: 1484496 - DNA, 15 bp, Homo sapiens
acttggtctggttgc

SEQ ID NO: 1484497 - DNA, 15 bp, Homo sapiens
cttggtctggttgct

SEQ ID NO: 1484498 - DNA, 15 bp, Homo sapiens
ttggtctggttgctt

SEQ ID NO: 1484499 - DNA, 15 bp, Homo sapiens
tggtctggttgcttt

SEQ ID NO: 1484500 - DNA, 15 bp, Homo sapiens
ggtctggttgctttt

SEQ ID NO: 1484501 - DNA, 15 bp, Homo sapiens
gtctggttgcttttg

SEQ ID NO: 1484502 - DNA, 15 bp, Homo sapiens
tctggttgcttttga

SEQ ID NO: 1484503 - DNA, 15 bp, Homo sapiens
ctggttgcttttgac

SEQ ID NO: 1484504 - DNA, 15 bp, Homo sapiens
tggttgcttttgaca

SEQ ID NO: 1484505 - DNA, 15 bp, Homo sapiens
ggttgcttttgacat

SEQ ID NO: 1484506 - DNA, 15 bp, Homo sapiens
gttgcttttgacatt

SEQ ID NO: 1484507 - DNA, 15 bp, Homo sapiens
ttgcttttgacattc

SEQ ID NO: 1484508 - DNA, 15 bp, Homo sapiens
tgcttttgacattcc

SEQ ID NO: 1484509 - DNA, 15 bp, Homo sapiens
gcttttgacattcct

SEQ ID NO: 1484510 - DNA, 15 bp, Homo sapiens
cttttgacattcctt

SEQ ID NO: 1484511 - DNA, 15 bp, Homo sapiens
ttttgacattccttt

SEQ ID NO: 1484512 - DNA, 15 bp, Homo sapiens
tttgacattcctttc

SEQ ID NO: 1484513 - DNA, 15 bp, Homo sapiens
ttgacattcctttca

SEQ ID NO: 1484514 - DNA, 15 bp, Homo sapiens
tgacattcctttcac

SEQ ID NO: 1484515 - DNA, 15 bp, Homo sapiens
gacattcctttcacc

SEQ ID NO: 1484516 - DNA, 15 bp, Homo sapiens
acattcctttcacca

SEQ ID NO: 1484517 - DNA, 15 bp, Homo sapiens
cattcctttcaccag

SEQ ID NO: 1484518 - DNA, 15 bp, Homo sapiens
attcctttcaccaga

SEQ ID NO: 1484519 - DNA, 15 bp, Homo sapiens
ttcctttcaccagac

SEQ ID NO: 1484520 - DNA, 15 bp, Homo sapiens
tcctttcaccagaca

SEQ ID NO: 1484521 - DNA, 15 bp, Homo sapiens
cctttcaccagacac

SEQ ID NO: 1484522 - DNA, 15 bp, Homo sapiens
ctttcaccagacacc

SEQ ID NO: 1484523 - DNA, 15 bp, Homo sapiens
tttcaccagacacct

SEQ ID NO: 1484524 - DNA, 15 bp, Homo sapiens
ttcaccagacacctc

SEQ ID NO: 1484525 - DNA, 15 bp, Homo sapiens
tcaccagacacctcc

SEQ ID NO: 1484526 - DNA, 15 bp, Homo sapiens
caccagacacctcca

SEQ ID NO: 1484527 - DNA, 15 bp, Homo sapiens
accagacacctccag

SEQ ID NO: 1484528 - DNA, 15 bp, Homo sapiens
ccagacacctccagc

SEQ ID NO: 1484529 - DNA, 15 bp, Homo sapiens
cagacacctccagcc

SEQ ID NO: 1484530 - DNA, 15 bp, Homo sapiens
agacacctccagcca

SEQ ID NO: 1484531 - DNA, 15 bp, Homo sapiens
gacacctccagccaa

SEQ ID NO: 1484532 - DNA, 15 bp, Homo sapiens
acacctccagccaag

SEQ ID NO: 1484533 - DNA, 15 bp, Homo sapiens
cacctccagccaagc

SEQ ID NO: 1484534 - DNA, 15 bp, Homo sapiens
acctccagccaagct

SEQ ID NO: 1484535 - DNA, 15 bp, Homo sapiens
cctccagccaagctg

SEQ ID NO: 1484536 - DNA, 15 bp, Homo sapiens
ctccagccaagctgg

SEQ ID NO: 1484537 - DNA, 15 bp, Homo sapiens
tccagccaagctggt

SEQ ID NO: 1484538 - DNA, 15 bp, Homo sapiens
ccagccaagctggtc

SEQ ID NO: 1484539 - DNA, 15 bp, Homo sapiens
cagccaagctggtca

SEQ ID NO: 1484540 - DNA, 15 bp, Homo sapiens
agccaagctggtcag

SEQ ID NO: 1484541 - DNA, 15 bp, Homo sapiens
gccaagctggtcagc

SEQ ID NO: 1484542 - DNA, 15 bp, Homo sapiens
ccaagctggtcagcc

SEQ ID NO: 1484543 - DNA, 15 bp, Homo sapiens
caagctggtcagccc

SEQ ID NO: 1484544 - DNA, 15 bp, Homo sapiens
aagctggtcagcccc

SEQ ID NO: 1484545 - DNA, 15 bp, Homo sapiens
agctggtcagcccca

SEQ ID NO: 1484546 - DNA, 15 bp, Homo sapiens
gctggtcagccccag

SEQ ID NO: 1484547 - DNA, 15 bp, Homo sapiens
ctggtcagccccaga

SEQ ID NO: 1484548 - DNA, 15 bp, Homo sapiens
tggtcagccccagac

SEQ ID NO: 1484549 - DNA, 15 bp, Homo sapiens
ggtcagccccagaca

SEQ ID NO: 1484550 - DNA, 15 bp, Homo sapiens
gtcagccccagacaa

SEQ ID NO: 1484551 - DNA, 15 bp, Homo sapiens
tcagccccagacaac

SEQ ID NO: 1484552 - DNA, 15 bp, Homo sapiens
cagccccagacaact

SEQ ID NO: 1484553 - DNA, 15 bp, Homo sapiens
agccccagacaactg

SEQ ID NO: 1484554 - DNA, 15 bp, Homo sapiens
gccccagacaactgt

SEQ ID NO: 1484555 - DNA, 15 bp, Homo sapiens
ccccagacaactgtc

SEQ ID NO: 1484556 - DNA, 15 bp, Homo sapiens
cccagacaactgtcc

SEQ ID NO: 1484557 - DNA, 15 bp, Homo sapiens
ccagacaactgtcct

SEQ ID NO: 1484558 - DNA, 15 bp, Homo sapiens
cagacaactgtcctt

SEQ ID NO: 1484559 - DNA, 15 bp, Homo sapiens
agacaactgtcctta

SEQ ID NO: 1484560 - DNA, 15 bp, Homo sapiens
gacaactgtccttag

SEQ ID NO: 1484561 - DNA, 15 bp, Homo sapiens
acaactgtccttagg

SEQ ID NO: 1484562 - DNA, 15 bp, Homo sapiens
caactgtccttagga

SEQ ID NO: 1484563 - DNA, 15 bp, Homo sapiens
aactgtccttaggag

SEQ ID NO: 1484564 - DNA, 15 bp, Homo sapiens
actgtccttaggaga

SEQ ID NO: 1484565 - DNA, 15 bp, Homo sapiens
ctgtccttaggagat

SEQ ID NO: 1484566 - DNA, 15 bp, Homo sapiens
tgtccttaggagatt

SEQ ID NO: 1484567 - DNA, 15 bp, Homo sapiens
gtccttaggagattc

SEQ ID NO: 1484568 - DNA, 15 bp, Homo sapiens
tccttaggagattca

SEQ ID NO: 1484569 - DNA, 15 bp, Homo sapiens
ccttaggagattcag

SEQ ID NO: 1484570 - DNA, 15 bp, Homo sapiens
cttaggagattcagg

SEQ ID NO: 1484571 - DNA, 15 bp, Homo sapiens
ttaggagattcaggg

SEQ ID NO: 1484572 - DNA, 15 bp, Homo sapiens
taggagattcagggc

SEQ ID NO: 1484573 - DNA, 15 bp, Homo sapiens
aggagattcagggca

SEQ ID NO: 1484574 - DNA, 15 bp, Homo sapiens
ggagattcagggcag

SEQ ID NO: 1484575 - DNA, 15 bp, Homo sapiens
gagattcagggcaga

SEQ ID NO: 1484576 - DNA, 15 bp, Homo sapiens
agattcagggcagaa

SEQ ID NO: 1484577 - DNA, 15 bp, Homo sapiens
gattcagggcagaac

SEQ ID NO: 1484578 - DNA, 15 bp, Homo sapiens
attcagggcagaaca

SEQ ID NO: 1484579 - DNA, 15 bp, Homo sapiens
ttcagggcagaacag

SEQ ID NO: 1484580 - DNA, 15 bp, Homo sapiens
tcagggcagaacaga

SEQ ID NO: 1484581 - DNA, 15 bp, Homo sapiens
cagggcagaacagag

SEQ ID NO: 1484582 - DNA, 15 bp, Homo sapiens
agggcagaacagagg

SEQ ID NO: 1484583 - DNA, 15 bp, Homo sapiens
gggcagaacagaggg

SEQ ID NO: 1484584 - DNA, 15 bp, Homo sapiens
ggcagaacagaggga

SEQ ID NO: 1484585 - DNA, 15 bp, Homo sapiens
gcagaacagagggaa

SEQ ID NO: 1484586 - DNA, 15 bp, Homo sapiens
cagaacagagggaaa

SEQ ID NO: 1484587 - DNA, 15 bp, Homo sapiens
agaacagagggaaag

SEQ ID NO: 1484588 - DNA, 15 bp, Homo sapiens
gaacagagggaaagg

SEQ ID NO: 1484589 - DNA, 15 bp, Homo sapiens
aacagagggaaagga

SEQ ID NO: 1484590 - DNA, 15 bp, Homo sapiens
acagagggaaaggaa

SEQ ID NO: 1484591 - DNA, 15 bp, Homo sapiens
cagagggaaaggaat

SEQ ID NO: 1484592 - DNA, 15 bp, Homo sapiens
agagggaaaggaatg

SEQ ID NO: 1484593 - DNA, 15 bp, Homo sapiens
gagggaaaggaatgg

SEQ ID NO: 1484594 - DNA, 15 bp, Homo sapiens
agggaaaggaatggg

SEQ ID NO: 1484595 - DNA, 15 bp, Homo sapiens
gggaaaggaatggga

SEQ ID NO: 1484596 - DNA, 15 bp, Homo sapiens
ggaaaggaatgggaa

SEQ ID NO: 1484597 - DNA, 15 bp, Homo sapiens
gaaaggaatgggaag

SEQ ID NO: 1484598 - DNA, 15 bp, Homo sapiens
aaaggaatgggaagg

SEQ ID NO: 1484599 - DNA, 15 bp, Homo sapiens
aaggaatgggaagga

SEQ ID NO: 1484600 - DNA, 15 bp, Homo sapiens
aggaatgggaaggac

SEQ ID NO: 1484601 - DNA, 15 bp, Homo sapiens
ggaatgggaaggaca

SEQ ID NO: 1484602 - DNA, 15 bp, Homo sapiens
gaatgggaaggacac

SEQ ID NO: 1484603 - DNA, 15 bp, Homo sapiens
aatgggaaggacaca

SEQ ID NO: 1484604 - DNA, 15 bp, Homo sapiens
atgggaaggacacaa

SEQ ID NO: 1484605 - DNA, 15 bp, Homo sapiens
tgggaaggacacaat

SEQ ID NO: 1484606 - DNA, 15 bp, Homo sapiens
gggaaggacacaatg

SEQ ID NO: 1484607 - DNA, 15 bp, Homo sapiens
ggaaggacacaatgg

SEQ ID NO: 1484608 - DNA, 15 bp, Homo sapiens
gaaggacacaatggg

SEQ ID NO: 1484609 - DNA, 15 bp, Homo sapiens
aaggacacaatggga

SEQ ID NO: 1484610 - DNA, 15 bp, Homo sapiens
aggacacaatgggac

SEQ ID NO: 1484611 - DNA, 15 bp, Homo sapiens
ggacacaatgggaca

SEQ ID NO: 1484612 - DNA, 15 bp, Homo sapiens
gacacaatgggacat

SEQ ID NO: 1484613 - DNA, 15 bp, Homo sapiens
acacaatgggacatt

SEQ ID NO: 1484614 - DNA, 15 bp, Homo sapiens
cacaatgggacattg

SEQ ID NO: 1484615 - DNA, 15 bp, Homo sapiens
acaatgggacattgg

SEQ ID NO: 1484616 - DNA, 15 bp, Homo sapiens
caatgggacattggt

SEQ ID NO: 1484617 - DNA, 15 bp, Homo sapiens
aatgggacattggtg

SEQ ID NO: 1484618 - DNA, 15 bp, Homo sapiens
atgggacattggtgc

SEQ ID NO: 1484619 - DNA, 15 bp, Homo sapiens
tgggacattggtgct

SEQ ID NO: 1484620 - DNA, 15 bp, Homo sapiens
gggacattggtgctt

SEQ ID NO: 1484621 - DNA, 15 bp, Homo sapiens
ggacattggtgcttc

SEQ ID NO: 1484622 - DNA, 15 bp, Homo sapiens
gacattggtgcttct

SEQ ID NO: 1484623 - DNA, 15 bp, Homo sapiens
acattggtgcttctc

SEQ ID NO: 1484624 - DNA, 15 bp, Homo sapiens
cattggtgcttctca

SEQ ID NO: 1484625 - DNA, 15 bp, Homo sapiens
attggtgcttctcag

SEQ ID NO: 1484626 - DNA, 15 bp, Homo sapiens
ttggtgcttctcagg

SEQ ID NO: 1484627 - DNA, 15 bp, Homo sapiens
tggtgcttctcaggc

SEQ ID NO: 1484628 - DNA, 15 bp, Homo sapiens
ggtgcttctcaggcc

SEQ ID NO: 1484629 - DNA, 15 bp, Homo sapiens
gtgcttctcaggccc

SEQ ID NO: 1484630 - DNA, 15 bp, Homo sapiens
tgcttctcaggcccc

SEQ ID NO: 1484631 - DNA, 15 bp, Homo sapiens
gcttctcaggcccca

SEQ ID NO: 1484632 - DNA, 15 bp, Homo sapiens
cttctcaggccccat

SEQ ID NO: 1484633 - DNA, 15 bp, Homo sapiens
ttctcaggccccatg

SEQ ID NO: 1484634 - DNA, 15 bp, Homo sapiens
tctcaggccccatgt

SEQ ID NO: 1484635 - DNA, 15 bp, Homo sapiens
ctcaggccccatgtc

SEQ ID NO: 1484636 - DNA, 15 bp, Homo sapiens
tcaggccccatgtct

SEQ ID NO: 1484637 - DNA, 15 bp, Homo sapiens
caggccccatgtctt

SEQ ID NO: 1484638 - DNA, 15 bp, Homo sapiens
aggccccatgtcttg

SEQ ID NO: 1484639 - DNA, 15 bp, Homo sapiens
ggccccatgtcttgg

SEQ ID NO: 1484640 - DNA, 15 bp, Homo sapiens
gccccatgtcttggg

SEQ ID NO: 1484641 - DNA, 15 bp, Homo sapiens
ccccatgtcttgggt

SEQ ID NO: 1484642 - DNA, 15 bp, Homo sapiens
cccatgtcttgggtc

SEQ ID NO: 1484643 - DNA, 15 bp, Homo sapiens
ccatgtcttgggtca

SEQ ID NO: 1484644 - DNA, 15 bp, Homo sapiens
catgtcttgggtcat

SEQ ID NO: 1484645 - DNA, 15 bp, Homo sapiens
atgtcttgggtcatt

SEQ ID NO: 1484646 - DNA, 15 bp, Homo sapiens
tgtcttgggtcattc

SEQ ID NO: 1484647 - DNA, 15 bp, Homo sapiens
gtcttgggtcattct

SEQ ID NO: 1484648 - DNA, 15 bp, Homo sapiens
tcttgggtcattctg

SEQ ID NO: 1484649 - DNA, 15 bp, Homo sapiens
cttgggtcattctgt

SEQ ID NO: 1484650 - DNA, 15 bp, Homo sapiens
ttgggtcattctgtg

SEQ ID NO: 1484651 - DNA, 15 bp, Homo sapiens
tgggtcattctgtgt

SEQ ID NO: 1484652 - DNA, 15 bp, Homo sapiens
gggtcattctgtgtt

SEQ ID NO: 1484653 - DNA, 15 bp, Homo sapiens
ggtcattctgtgtta

SEQ ID NO: 1484654 - DNA, 15 bp, Homo sapiens
gtcattctgtgttag

SEQ ID NO: 1484655 - DNA, 15 bp, Homo sapiens
tcattctgtgttaga

SEQ ID NO: 1484656 - DNA, 15 bp, Homo sapiens
cattctgtgttagaa

SEQ ID NO: 1484657 - DNA, 15 bp, Homo sapiens
attctgtgttagaaa

SEQ ID NO: 1484658 - DNA, 15 bp, Homo sapiens
ttctgtgttagaaat

SEQ ID NO: 1484659 - DNA, 15 bp, Homo sapiens
tctgtgttagaaata

SEQ ID NO: 1484660 - DNA, 15 bp, Homo sapiens
ctgtgttagaaataa

SEQ ID NO: 1484661 - DNA, 15 bp, Homo sapiens
tgtgttagaaataaa

SEQ ID NO: 1484662 - DNA, 15 bp, Homo sapiens
gtgttagaaataaag

SEQ ID NO: 1484663 - DNA, 15 bp, Homo sapiens
tgttagaaataaagc

SEQ ID NO: 1484664 - DNA, 15 bp, Homo sapiens
gttagaaataaagct

SEQ ID NO: 1484665 - DNA, 15 bp, Homo sapiens
ttagaaataaagctc

SEQ ID NO: 1484666 - DNA, 15 bp, Homo sapiens
tagaaataaagctca

SEQ ID NO: 1484667 - DNA, 15 bp, Homo sapiens
agaaataaagctcag

SEQ ID NO: 1484668 - DNA, 15 bp, Homo sapiens
gaaataaagctcagc

SEQ ID NO: 1484669 - DNA, 15 bp, Homo sapiens
aaataaagctcagcc

SEQ ID NO: 1484670 - DNA, 15 bp, Homo sapiens
aataaagctcagcct

SEQ ID NO: 1484671 - DNA, 15 bp, Homo sapiens
ataaagctcagccta

SEQ ID NO: 1484672 - DNA, 15 bp, Homo sapiens
taaagctcagcctac

SEQ ID NO: 1484673 - DNA, 15 bp, Homo sapiens
aaagctcagcctacg

SEQ ID NO: 1484674 - DNA, 15 bp, Homo sapiens
aagctcagcctacgt

SEQ ID NO: 1484675 - DNA, 15 bp, Homo sapiens
agctcagcctacgta

SEQ ID NO: 1484676 - DNA, 15 bp, Homo sapiens
gctcagcctacgtat

SEQ ID NO: 1484677 - DNA, 15 bp, Homo sapiens
ctcagcctacgtata

SEQ ID NO: 1484678 - DNA, 15 bp, Homo sapiens
tcagcctacgtataa

SEQ ID NO: 1484679 - DNA, 15 bp, Homo sapiens
cagcctacgtataag

SEQ ID NO: 1484680 - DNA, 15 bp, Homo sapiens
agcctacgtataagg

SEQ ID NO: 1484681 - DNA, 15 bp, Homo sapiens
gcctacgtataagga

SEQ ID NO: 1484682 - DNA, 15 bp, Homo sapiens
cctacgtataaggaa

SEQ ID NO: 1484683 - DNA, 15 bp, Homo sapiens
ctacgtataaggaag

SEQ ID NO: 1484684 - DNA, 15 bp, Homo sapiens
tacgtataaggaaga

SEQ ID NO: 1484685 - DNA, 15 bp, Homo sapiens
acgtataaggaagaa

SEQ ID NO: 1484686 - DNA, 15 bp, Homo sapiens
cgtataaggaagaac

SEQ ID NO: 1484687 - DNA, 15 bp, Homo sapiens
gtataaggaagaaca

SEQ ID NO: 1484688 - DNA, 15 bp, Homo sapiens
tataaggaagaacag

SEQ ID NO: 1484689 - DNA, 15 bp, Homo sapiens
ataaggaagaacaga

SEQ ID NO: 1484690 - DNA, 15 bp, Homo sapiens
taaggaagaacagag

SEQ ID NO: 1484691 - DNA, 15 bp, Homo sapiens
aaggaagaacagagg

SEQ ID NO: 1484692 - DNA, 15 bp, Homo sapiens
aggaagaacagaggg

SEQ ID NO: 1484693 - DNA, 15 bp, Homo sapiens
ggaagaacagaggga

SEQ ID NO: 1484694 - DNA, 15 bp, Homo sapiens
gaagaacagagggaa

SEQ ID NO: 1484695 - DNA, 15 bp, Homo sapiens
aagaacagagggaaa

SEQ ID NO: 1484696 - DNA, 15 bp, Homo sapiens
aacagagggaaaggg

SEQ ID NO: 1484697 - DNA, 15 bp, Homo sapiens
acagagggaaagggt

SEQ ID NO: 1484698 - DNA, 15 bp, Homo sapiens
cagagggaaagggtc

SEQ ID NO: 1484699 - DNA, 15 bp, Homo sapiens
agagggaaagggtct

SEQ ID NO: 1484700 - DNA, 15 bp, Homo sapiens
gagggaaagggtctc

SEQ ID NO: 1484701 - DNA, 15 bp, Homo sapiens
agggaaagggtctcc

SEQ ID NO: 1484702 - DNA, 15 bp, Homo sapiens
gggaaagggtctccc

SEQ ID NO: 1484703 - DNA, 15 bp, Homo sapiens
ggaaagggtctccca

SEQ ID NO: 1484704 - DNA, 15 bp, Homo sapiens
gaaagggtctcccac

SEQ ID NO: 1484705 - DNA, 15 bp, Homo sapiens
aaagggtctcccact

SEQ ID NO: 1484706 - DNA, 15 bp, Homo sapiens
aagggtctcccactc

SEQ ID NO: 1484707 - DNA, 15 bp, Homo sapiens
agggtctcccactca

SEQ ID NO: 1484708 - DNA, 15 bp, Homo sapiens
gggtctcccactcat

SEQ ID NO: 1484709 - DNA, 15 bp, Homo sapiens
ggtctcccactcatg

SEQ ID NO: 1484710 - DNA, 15 bp, Homo sapiens
gtctcccactcatgt

SEQ ID NO: 1484711 - DNA, 15 bp, Homo sapiens
tctcccactcatgtc

SEQ ID NO: 1484712 - DNA, 15 bp, Homo sapiens
ctcccactcatgtcc

SEQ ID NO: 1484713 - DNA, 15 bp, Homo sapiens
tcccactcatgtcca

SEQ ID NO: 1484714 - DNA, 15 bp, Homo sapiens
cccactcatgtccac

SEQ ID NO: 1484715 - DNA, 15 bp, Homo sapiens
ccactcatgtccact

SEQ ID NO: 1484716 - DNA, 15 bp, Homo sapiens
cactcatgtccactt

SEQ ID NO: 1484717 - DNA, 15 bp, Homo sapiens
actcatgtccacttc

SEQ ID NO: 1484718 - DNA, 15 bp, Homo sapiens
ctcatgtccacttct

SEQ ID NO: 1484719 - DNA, 15 bp, Homo sapiens
tcatgtccacttctg

SEQ ID NO: 1484720 - DNA, 15 bp, Homo sapiens
catgtccacttctgg

SEQ ID NO: 1484721 - DNA, 15 bp, Homo sapiens
atgtccacttctggc

SEQ ID NO: 1484722 - DNA, 15 bp, Homo sapiens
tgtccacttctggca

SEQ ID NO: 1484723 - DNA, 15 bp, Homo sapiens
gtccacttctggcat

SEQ ID NO: 1484724 - DNA, 15 bp, Homo sapiens
tccacttctggcatt

SEQ ID NO: 1484725 - DNA, 15 bp, Homo sapiens
ccacttctggcattt

SEQ ID NO: 1484726 - DNA, 15 bp, Homo sapiens
cacttctggcatttt

SEQ ID NO: 1484727 - DNA, 15 bp, Homo sapiens
acttctggcattttt

SEQ ID NO: 1484728 - DNA, 15 bp, Homo sapiens
cttctggcatttttc

SEQ ID NO: 1484729 - DNA, 15 bp, Homo sapiens
ttctggcatttttcc

SEQ ID NO: 1484730 - DNA, 15 bp, Homo sapiens
tctggcatttttcct

SEQ ID NO: 1484731 - DNA, 15 bp, Homo sapiens
ctggcatttttcctc

SEQ ID NO: 1484732 - DNA, 15 bp, Homo sapiens
tggcatttttcctcc

SEQ ID NO: 1484733 - DNA, 15 bp, Homo sapiens
ggcatttttcctcct

SEQ ID NO: 1484734 - DNA, 15 bp, Homo sapiens
gcatttttcctcctc

SEQ ID NO: 1484735 - DNA, 15 bp, Homo sapiens
catttttcctcctct

SEQ ID NO: 1484736 - DNA, 15 bp, Homo sapiens
atttttcctcctcta

SEQ ID NO: 1484737 - DNA, 15 bp, Homo sapiens
tttttcctcctctaa

SEQ ID NO: 1484738 - DNA, 15 bp, Homo sapiens
ttttcctcctctaac

SEQ ID NO: 1484739 - DNA, 15 bp, Homo sapiens
tttcctcctctaact

SEQ ID NO: 1484740 - DNA, 15 bp, Homo sapiens
ttcctcctctaactc

SEQ ID NO: 1484741 - DNA, 15 bp, Homo sapiens
tcctcctctaactcc

SEQ ID NO: 1484742 - DNA, 15 bp, Homo sapiens
cctcctctaactcca

SEQ ID NO: 1484743 - DNA, 15 bp, Homo sapiens
ctcctctaactccac

SEQ ID NO: 1484744 - DNA, 15 bp, Homo sapiens
tcctctaactccact

SEQ ID NO: 1484745 - DNA, 15 bp, Homo sapiens
cctctaactccactg

SEQ ID NO: 1484746 - DNA, 15 bp, Homo sapiens
ctctaactccactgg

SEQ ID NO: 1484747 - DNA, 15 bp, Homo sapiens
tctaactccactgga

SEQ ID NO: 1484748 - DNA, 15 bp, Homo sapiens
ctaactccactggac

SEQ ID NO: 1484749 - DNA, 15 bp, Homo sapiens
taactccactggact

SEQ ID NO: 1484750 - DNA, 15 bp, Homo sapiens
aactccactggactc

SEQ ID NO: 1484751 - DNA, 15 bp, Homo sapiens
actccactggactca

SEQ ID NO: 1484752 - DNA, 15 bp, Homo sapiens
ctccactggactcat

SEQ ID NO: 1484753 - DNA, 15 bp, Homo sapiens
tccactggactcata

SEQ ID NO: 1484754 - DNA, 15 bp, Homo sapiens
ccactggactcataa

SEQ ID NO: 1484755 - DNA, 15 bp, Homo sapiens
cactggactcataac

SEQ ID NO: 1484756 - DNA, 15 bp, Homo sapiens
actggactcataact

SEQ ID NO: 1484757 - DNA, 15 bp, Homo sapiens
ctggactcataactg

SEQ ID NO: 1484758 - DNA, 15 bp, Homo sapiens
tggactcataactgt

SEQ ID NO: 1484759 - DNA, 15 bp, Homo sapiens
ggactcataactgtg

SEQ ID NO: 1484760 - DNA, 15 bp, Homo sapiens
gactcataactgtga

SEQ ID NO: 1484761 - DNA, 15 bp, Homo sapiens
actcataactgtgaa

SEQ ID NO: 1484762 - DNA, 15 bp, Homo sapiens
ctcataactgtgaaa

SEQ ID NO: 1484763 - DNA, 15 bp, Homo sapiens
tcataactgtgaaat

SEQ ID NO: 1484764 - DNA, 15 bp, Homo sapiens
cataactgtgaaata

SEQ ID NO: 1484765 - DNA, 15 bp, Homo sapiens
ataactgtgaaatat

SEQ ID NO: 1484766 - DNA, 15 bp, Homo sapiens
taactgtgaaatatt

SEQ ID NO: 1484767 - DNA, 15 bp, Homo sapiens
aactgtgaaatattt

SEQ ID NO: 1484768 - DNA, 15 bp, Homo sapiens
actgtgaaatatttg

SEQ ID NO: 1484769 - DNA, 15 bp, Homo sapiens
ctgtgaaatatttgt

SEQ ID NO: 1484770 - DNA, 15 bp, Homo sapiens
tgtgaaatatttgtt

SEQ ID NO: 1484771 - DNA, 15 bp, Homo sapiens
gtgaaatatttgttc

SEQ ID NO: 1484772 - DNA, 15 bp, Homo sapiens
tgaaatatttgttcc

SEQ ID NO: 1484773 - DNA, 15 bp, Homo sapiens
gaaatatttgttcct

SEQ ID NO: 1484774 - DNA, 15 bp, Homo sapiens
aaatatttgttcctt

SEQ ID NO: 1484775 - DNA, 15 bp, Homo sapiens
aatatttgttccttc

SEQ ID NO: 1484776 - DNA, 15 bp, Homo sapiens
atatttgttccttcc

SEQ ID NO: 1484777 - DNA, 15 bp, Homo sapiens
tatttgttccttccc

SEQ ID NO: 1484778 - DNA, 15 bp, Homo sapiens
atttgttccttccca

SEQ ID NO: 1484779 - DNA, 15 bp, Homo sapiens
tttgttccttcccac

SEQ ID NO: 1484780 - DNA, 15 bp, Homo sapiens
ttgttccttcccaca

SEQ ID NO: 1484781 - DNA, 15 bp, Homo sapiens
tgttccttcccacac

SEQ ID NO: 1484782 - DNA, 15 bp, Homo sapiens
gttccttcccacaca

SEQ ID NO: 1484783 - DNA, 15 bp, Homo sapiens
ttccttcccacacac

SEQ ID NO: 1484784 - DNA, 15 bp, Homo sapiens
tccttcccacacaca

SEQ ID NO: 1484785 - DNA, 15 bp, Homo sapiens
ccttcccacacacag

SEQ ID NO: 1484786 - DNA, 15 bp, Homo sapiens
cttcccacacacagg

SEQ ID NO: 1484787 - DNA, 15 bp, Homo sapiens
ttcccacacacagga

SEQ ID NO: 1484788 - DNA, 15 bp, Homo sapiens
tcccacacacaggat

SEQ ID NO: 1484789 - DNA, 15 bp, Homo sapiens
cccacacacaggata

SEQ ID NO: 1484790 - DNA, 15 bp, Homo sapiens
ccacacacaggataa

SEQ ID NO: 1484791 - DNA, 15 bp, Homo sapiens
cacacacaggataat

SEQ ID NO: 1484792 - DNA, 15 bp, Homo sapiens
acacacaggataatg

SEQ ID NO: 1484793 - DNA, 15 bp, Homo sapiens
cacacaggataatgg

SEQ ID NO: 1484794 - DNA, 15 bp, Homo sapiens
acacaggataatggc

SEQ ID NO: 1484795 - DNA, 15 bp, Homo sapiens
cacaggataatggca

SEQ ID NO: 1484796 - DNA, 15 bp, Homo sapiens
acaggataatggcag

SEQ ID NO: 1484797 - DNA, 15 bp, Homo sapiens
caggataatggcaga

SEQ ID NO: 1484798 - DNA, 15 bp, Homo sapiens
aggataatggcagaa

SEQ ID NO: 1484799 - DNA, 15 bp, Homo sapiens
ggataatggcagaaa

SEQ ID NO: 1484800 - DNA, 15 bp, Homo sapiens
gataatggcagaaat

SEQ ID NO: 1484801 - DNA, 15 bp, Homo sapiens
ataatggcagaaatt

SEQ ID NO: 1484802 - DNA, 15 bp, Homo sapiens
taatggcagaaattt

SEQ ID NO: 1484803 - DNA, 15 bp, Homo sapiens
aatggcagaaatttc

SEQ ID NO: 1484804 - DNA, 15 bp, Homo sapiens
atggcagaaatttct

SEQ ID NO: 1484805 - DNA, 15 bp, Homo sapiens
tggcagaaatttctg

SEQ ID NO: 1484806 - DNA, 15 bp, Homo sapiens
ggcagaaatttctgt

SEQ ID NO: 1484807 - DNA, 15 bp, Homo sapiens
gcagaaatttctgtt

SEQ ID NO: 1484808 - DNA, 15 bp, Homo sapiens
cagaaatttctgtta

SEQ ID NO: 1484809 - DNA, 15 bp, Homo sapiens
agaaatttctgttat

SEQ ID NO: 1484810 - DNA, 15 bp, Homo sapiens
gaaatttctgttatg

SEQ ID NO: 1484811 - DNA, 15 bp, Homo sapiens
aaatttctgttatgt

SEQ ID NO: 1484812 - DNA, 15 bp, Homo sapiens
aatttctgttatgtc

SEQ ID NO: 1484813 - DNA, 15 bp, Homo sapiens
atttctgttatgtct

SEQ ID NO: 1484814 - DNA, 15 bp, Homo sapiens
tttctgttatgtctt

SEQ ID NO: 1484815 - DNA, 15 bp, Homo sapiens
ttctgttatgtcttc

SEQ ID NO: 1484816 - DNA, 15 bp, Homo sapiens
tctgttatgtcttcc

SEQ ID NO: 1484817 - DNA, 15 bp, Homo sapiens
ctgttatgtcttccc

SEQ ID NO: 1484818 - DNA, 15 bp, Homo sapiens
tgttatgtcttcccg

SEQ ID NO: 1484819 - DNA, 15 bp, Homo sapiens
gttatgtcttcccga

SEQ ID NO: 1484820 - DNA, 15 bp, Homo sapiens
ttatgtcttcccgag

SEQ ID NO: 1484821 - DNA, 15 bp, Homo sapiens
tatgtcttcccgagt

SEQ ID NO: 1484822 - DNA, 15 bp, Homo sapiens
atgtcttcccgagtg

SEQ ID NO: 1484823 - DNA, 15 bp, Homo sapiens
tgtcttcccgagtga

SEQ ID NO: 1484824 - DNA, 15 bp, Homo sapiens
gtcttcccgagtgaa

SEQ ID NO: 1484825 - DNA, 15 bp, Homo sapiens
tcttcccgagtgaaa

SEQ ID NO: 1484826 - DNA, 15 bp, Homo sapiens
cttcccgagtgaaat

SEQ ID NO: 1484827 - DNA, 15 bp, Homo sapiens
ttcccgagtgaaatg

SEQ ID NO: 1484828 - DNA, 15 bp, Homo sapiens
tcccgagtgaaatgg

SEQ ID NO: 1484829 - DNA, 15 bp, Homo sapiens
cccgagtgaaatggg

SEQ ID NO: 1484830 - DNA, 15 bp, Homo sapiens
ccgagtgaaatgggg

SEQ ID NO: 1484831 - DNA, 15 bp, Homo sapiens
cgagtgaaatgggga

SEQ ID NO: 1484832 - DNA, 15 bp, Homo sapiens
gagtgaaatggggag

SEQ ID NO: 1484833 - DNA, 15 bp, Homo sapiens
agtgaaatggggaga

SEQ ID NO: 1484834 - DNA, 15 bp, Homo sapiens
gtgaaatggggagat

SEQ ID NO: 1484835 - DNA, 15 bp, Homo sapiens
tgaaatggggagata

SEQ ID NO: 1484836 - DNA, 15 bp, Homo sapiens
gaaatggggagatac

SEQ ID NO: 1484837 - DNA, 15 bp, Homo sapiens
aaatggggagatact

SEQ ID NO: 1484838 - DNA, 15 bp, Homo sapiens
aatggggagatactc

SEQ ID NO: 1484839 - DNA, 15 bp, Homo sapiens
atggggagatactca

SEQ ID NO: 1484840 - DNA, 15 bp, Homo sapiens
tggggagatactcaa

SEQ ID NO: 1484841 - DNA, 15 bp, Homo sapiens
ggggagatactcaaa

SEQ ID NO: 1484842 - DNA, 15 bp, Homo sapiens
gggagatactcaaac

SEQ ID NO: 1484843 - DNA, 15 bp, Homo sapiens
ggagatactcaaacc

SEQ ID NO: 1484844 - DNA, 15 bp, Homo sapiens
gagatactcaaacca

SEQ ID NO: 1484845 - DNA, 15 bp, Homo sapiens
agatactcaaaccac

SEQ ID NO: 1484846 - DNA, 15 bp, Homo sapiens
gatactcaaaccacc

SEQ ID NO: 1484847 - DNA, 15 bp, Homo sapiens
atactcaaaccaccc

SEQ ID NO: 1484848 - DNA, 15 bp, Homo sapiens
tactcaaaccaccct

SEQ ID NO: 1484849 - DNA, 15 bp, Homo sapiens
actcaaaccaccctc

SEQ ID NO: 1484850 - DNA, 15 bp, Homo sapiens
ctcaaaccaccctct

SEQ ID NO: 1484851 - DNA, 15 bp, Homo sapiens
tcaaaccaccctctt

SEQ ID NO: 1484852 - DNA, 15 bp, Homo sapiens
caaaccaccctcttc

SEQ ID NO: 1484853 - DNA, 15 bp, Homo sapiens
aaaccaccctcttct

SEQ ID NO: 1484854 - DNA, 15 bp, Homo sapiens
aaccaccctcttctt

SEQ ID NO: 1484855 - DNA, 15 bp, Homo sapiens
accaccctcttcttc

SEQ ID NO: 1484856 - DNA, 15 bp, Homo sapiens
ccaccctcttcttct

SEQ ID NO: 1484857 - DNA, 15 bp, Homo sapiens
caccctcttcttctt

SEQ ID NO: 1484858 - DNA, 15 bp, Homo sapiens
accctcttcttcttt

SEQ ID NO: 1484859 - DNA, 15 bp, Homo sapiens
ccctcttcttctttc

SEQ ID NO: 1484860 - DNA, 15 bp, Homo sapiens
cctcttcttctttcc

SEQ ID NO: 1484861 - DNA, 15 bp, Homo sapiens
ctcttcttctttcct

SEQ ID NO: 1484862 - DNA, 15 bp, Homo sapiens
tcttcttctttcctt

SEQ ID NO: 1484863 - DNA, 15 bp, Homo sapiens
cttcttctttccttg

SEQ ID NO: 1484864 - DNA, 15 bp, Homo sapiens
ttcttctttccttgc

SEQ ID NO: 1484865 - DNA, 15 bp, Homo sapiens
tcttctttccttgcc

SEQ ID NO: 1484866 - DNA, 15 bp, Homo sapiens
cttctttccttgccc

SEQ ID NO: 1484867 - DNA, 15 bp, Homo sapiens
ttctttccttgcccc

SEQ ID NO: 1484868 - DNA, 15 bp, Homo sapiens
tctttccttgcccct

SEQ ID NO: 1484869 - DNA, 15 bp, Homo sapiens
ctttccttgcccctc

SEQ ID NO: 1484870 - DNA, 15 bp, Homo sapiens
tttccttgcccctct

SEQ ID NO: 1484871 - DNA, 15 bp, Homo sapiens
ttccttgcccctctg

SEQ ID NO: 1484872 - DNA, 15 bp, Homo sapiens
tccttgcccctctgg

SEQ ID NO: 1484873 - DNA, 15 bp, Homo sapiens
ccttgcccctctgga

SEQ ID NO: 1484874 - DNA, 15 bp, Homo sapiens
cttgcccctctggag

SEQ ID NO: 1484875 - DNA, 15 bp, Homo sapiens
ttgcccctctggagg

SEQ ID NO: 1484876 - DNA, 15 bp, Homo sapiens
tgcccctctggaggc

SEQ ID NO: 1484877 - DNA, 15 bp, Homo sapiens
gcccctctggaggct

SEQ ID NO: 1484878 - DNA, 15 bp, Homo sapiens
cccctctggaggctt

SEQ ID NO: 1484879 - DNA, 15 bp, Homo sapiens
ccctctggaggcttt

SEQ ID NO: 1484880 - DNA, 15 bp, Homo sapiens
cctctggaggctttt

SEQ ID NO: 1484881 - DNA, 15 bp, Homo sapiens
ctctggaggcttttc

SEQ ID NO: 1484882 - DNA, 15 bp, Homo sapiens
tctggaggcttttcc

SEQ ID NO: 1484883 - DNA, 15 bp, Homo sapiens
ctggaggcttttcca

SEQ ID NO: 1484884 - DNA, 15 bp, Homo sapiens
tggaggcttttccat

SEQ ID NO: 1484885 - DNA, 15 bp, Homo sapiens
ggaggcttttccatc

SEQ ID NO: 1484886 - DNA, 15 bp, Homo sapiens
gaggcttttccatct

SEQ ID NO: 1484887 - DNA, 15 bp, Homo sapiens
aggcttttccatctc

SEQ ID NO: 1484888 - DNA, 15 bp, Homo sapiens
ggcttttccatctcg

SEQ ID NO: 1484889 - DNA, 15 bp, Homo sapiens
gcttttccatctcgg

SEQ ID NO: 1484890 - DNA, 15 bp, Homo sapiens
cttttccatctcggc

SEQ ID NO: 1484891 - DNA, 15 bp, Homo sapiens
ttttccatctcggcc

SEQ ID NO: 1484892 - DNA, 15 bp, Homo sapiens
tttccatctcggcct

SEQ ID NO: 1484893 - DNA, 15 bp, Homo sapiens
ttccatctcggcctt

SEQ ID NO: 1484894 - DNA, 15 bp, Homo sapiens
tccatctcggcctta

SEQ ID NO: 1484895 - DNA, 15 bp, Homo sapiens
ccatctcggccttag

SEQ ID NO: 1484896 - DNA, 15 bp, Homo sapiens
catctcggccttagc

SEQ ID NO: 1484897 - DNA, 15 bp, Homo sapiens
atctcggccttagct

SEQ ID NO: 1484898 - DNA, 15 bp, Homo sapiens
tctcggccttagcta

SEQ ID NO: 1484899 - DNA, 15 bp, Homo sapiens
ctcggccttagctag

SEQ ID NO: 1484900 - DNA, 15 bp, Homo sapiens
tcggccttagctaga

SEQ ID NO: 1484901 - DNA, 15 bp, Homo sapiens
cggccttagctagac

SEQ ID NO: 1484902 - DNA, 15 bp, Homo sapiens
ggccttagctagact

SEQ ID NO: 1484903 - DNA, 15 bp, Homo sapiens
gccttagctagactg

SEQ ID NO: 1484904 - DNA, 15 bp, Homo sapiens
ccttagctagactgt

SEQ ID NO: 1484905 - DNA, 15 bp, Homo sapiens
cttagctagactgtt

SEQ ID NO: 1484906 - DNA, 15 bp, Homo sapiens
ttagctagactgttt

SEQ ID NO: 1484907 - DNA, 15 bp, Homo sapiens
tagctagactgtttg

SEQ ID NO: 1484908 - DNA, 15 bp, Homo sapiens
agctagactgtttga

SEQ ID NO: 1484909 - DNA, 15 bp, Homo sapiens
gctagactgtttgaa

SEQ ID NO: 1484910 - DNA, 15 bp, Homo sapiens
ctagactgtttgaag

SEQ ID NO: 1484911 - DNA, 15 bp, Homo sapiens
tagactgtttgaaga

SEQ ID NO: 1484912 - DNA, 15 bp, Homo sapiens
agactgtttgaagat

SEQ ID NO: 1484913 - DNA, 15 bp, Homo sapiens
gactgtttgaagatg

SEQ ID NO: 1484914 - DNA, 15 bp, Homo sapiens
actgtttgaagatgc

SEQ ID NO: 1484915 - DNA, 15 bp, Homo sapiens
ctgtttgaagatgca

SEQ ID NO: 1484916 - DNA, 15 bp, Homo sapiens
tgtttgaagatgcaa

SEQ ID NO: 1484917 - DNA, 15 bp, Homo sapiens
gtttgaagatgcaat

SEQ ID NO: 1484918 - DNA, 15 bp, Homo sapiens
tttgaagatgcaatg

SEQ ID NO: 1484919 - DNA, 15 bp, Homo sapiens
ttgaagatgcaatgg

SEQ ID NO: 1484920 - DNA, 15 bp, Homo sapiens
tgaagatgcaatggt

SEQ ID NO: 1484921 - DNA, 15 bp, Homo sapiens
gaagatgcaatggtt

SEQ ID NO: 1484922 - DNA, 15 bp, Homo sapiens
aagatgcaatggttt

SEQ ID NO: 1484923 - DNA, 15 bp, Homo sapiens
agatgcaatggtttg

SEQ ID NO: 1484924 - DNA, 15 bp, Homo sapiens
gatgcaatggtttgc

SEQ ID NO: 1484925 - DNA, 15 bp, Homo sapiens
atgcaatggtttgct

SEQ ID NO: 1484926 - DNA, 15 bp, Homo sapiens
tgcaatggtttgctc

SEQ ID NO: 1484927 - DNA, 15 bp, Homo sapiens
gcaatggtttgctca

SEQ ID NO: 1484928 - DNA, 15 bp, Homo sapiens
caatggtttgctcat

SEQ ID NO: 1484929 - DNA, 15 bp, Homo sapiens
aatggtttgctcatc

SEQ ID NO: 1484930 - DNA, 15 bp, Homo sapiens
atggtttgctcatcg

SEQ ID NO: 1484931 - DNA, 15 bp, Homo sapiens
tggtttgctcatcgt

SEQ ID NO: 1484932 - DNA, 15 bp, Homo sapiens
ggtttgctcatcgtt

SEQ ID NO: 1484933 - DNA, 15 bp, Homo sapiens
gtttgctcatcgttc

SEQ ID NO: 1484934 - DNA, 15 bp, Homo sapiens
tttgctcatcgttca

SEQ ID NO: 1484935 - DNA, 15 bp, Homo sapiens
ttgctcatcgttcat

SEQ ID NO: 1484936 - DNA, 15 bp, Homo sapiens
tgctcatcgttcata

SEQ ID NO: 1484937 - DNA, 15 bp, Homo sapiens
gctcatcgttcatat

SEQ ID NO: 1484938 - DNA, 15 bp, Homo sapiens
ctcatcgttcatatc

SEQ ID NO: 1484939 - DNA, 15 bp, Homo sapiens
tcatcgttcatatcg

SEQ ID NO: 1484940 - DNA, 15 bp, Homo sapiens
catcgttcatatcgg

SEQ ID NO: 1484941 - DNA, 15 bp, Homo sapiens
atcgttcatatcggc

SEQ ID NO: 1484942 - DNA, 15 bp, Homo sapiens
tcgttcatatcggcc

SEQ ID NO: 1484943 - DNA, 15 bp, Homo sapiens
cgttcatatcggcca

SEQ ID NO: 1484944 - DNA, 15 bp, Homo sapiens
gttcatatcggccag

SEQ ID NO: 1484945 - DNA, 15 bp, Homo sapiens
ttcatatcggccagg

SEQ ID NO: 1484946 - DNA, 15 bp, Homo sapiens
tcatatcggccaggc

SEQ ID NO: 1484947 - DNA, 15 bp, Homo sapiens
catatcggccaggcc

SEQ ID NO: 1484948 - DNA, 15 bp, Homo sapiens
atatcggccaggcca

SEQ ID NO: 1484949 - DNA, 15 bp, Homo sapiens
tatcggccaggccac

SEQ ID NO: 1484950 - DNA, 15 bp, Homo sapiens
atcggccaggccact

SEQ ID NO: 1484951 - DNA, 15 bp, Homo sapiens
tcggccaggccactg

SEQ ID NO: 1484952 - DNA, 15 bp, Homo sapiens
cggccaggccactgt

SEQ ID NO: 1484953 - DNA, 15 bp, Homo sapiens
ggccaggccactgtg

SEQ ID NO: 1484954 - DNA, 15 bp, Homo sapiens
gccaggccactgtgc

SEQ ID NO: 1484955 - DNA, 15 bp, Homo sapiens
ccaggccactgtgcg

SEQ ID NO: 1484956 - DNA, 15 bp, Homo sapiens
caggccactgtgcgg

SEQ ID NO: 1484957 - DNA, 15 bp, Homo sapiens
aggccactgtgcggc

SEQ ID NO: 1484958 - DNA, 15 bp, Homo sapiens
ggccactgtgcggcc

SEQ ID NO: 1484959 - DNA, 15 bp, Homo sapiens
gccactgtgcggcca

SEQ ID NO: 1484960 - DNA, 15 bp, Homo sapiens
ccactgtgcggccat

SEQ ID NO: 1484961 - DNA, 15 bp, Homo sapiens
cactgtgcggccatg

SEQ ID NO: 1484962 - DNA, 15 bp, Homo sapiens
actgtgcggccatgc

SEQ ID NO: 1484963 - DNA, 15 bp, Homo sapiens
ctgtgcggccatgct

SEQ ID NO: 1484964 - DNA, 15 bp, Homo sapiens
tgtgcggccatgctc

SEQ ID NO: 1484965 - DNA, 15 bp, Homo sapiens
gtgcggccatgctct

SEQ ID NO: 1484966 - DNA, 15 bp, Homo sapiens
tgcggccatgctctg

SEQ ID NO: 1484967 - DNA, 15 bp, Homo sapiens
gcggccatgctctga

SEQ ID NO: 1484968 - DNA, 15 bp, Homo sapiens
cggccatgctctgat

SEQ ID NO: 1484969 - DNA, 15 bp, Homo sapiens
ggccatgctctgatc

SEQ ID NO: 1484970 - DNA, 15 bp, Homo sapiens
gccatgctctgatca

SEQ ID NO: 1484971 - DNA, 15 bp, Homo sapiens
ccatgctctgatcac

SEQ ID NO: 1484972 - DNA, 15 bp, Homo sapiens
catgctctgatcaca

SEQ ID NO: 1484973 - DNA, 15 bp, Homo sapiens
atgctctgatcacat

SEQ ID NO: 1484974 - DNA, 15 bp, Homo sapiens
tgctctgatcacatc

SEQ ID NO: 1484975 - DNA, 15 bp, Homo sapiens
gctctgatcacatcc

SEQ ID NO: 1484976 - DNA, 15 bp, Homo sapiens
ctctgatcacatccc

SEQ ID NO: 1484977 - DNA, 15 bp, Homo sapiens
tctgatcacatccca

SEQ ID NO: 1484978 - DNA, 15 bp, Homo sapiens
ctgatcacatcccat

SEQ ID NO: 1484979 - DNA, 15 bp, Homo sapiens
tgatcacatcccatc

SEQ ID NO: 1484980 - DNA, 15 bp, Homo sapiens
gatcacatcccatca

SEQ ID NO: 1484981 - DNA, 15 bp, Homo sapiens
atcacatcccatcac

SEQ ID NO: 1484982 - DNA, 15 bp, Homo sapiens
tcacatcccatcact

SEQ ID NO: 1484983 - DNA, 15 bp, Homo sapiens
cacatcccatcactc

SEQ ID NO: 1484984 - DNA, 15 bp, Homo sapiens
acatcccatcactca

SEQ ID NO: 1484985 - DNA, 15 bp, Homo sapiens
catcccatcactcaa

SEQ ID NO: 1484986 - DNA, 15 bp, Homo sapiens
atcccatcactcaac

SEQ ID NO: 1484987 - DNA, 15 bp, Homo sapiens
tcccatcactcaact

SEQ ID NO: 1484988 - DNA, 15 bp, Homo sapiens
cccatcactcaactc

SEQ ID NO: 1484989 - DNA, 15 bp, Homo sapiens
ccatcactcaactca

SEQ ID NO: 1484990 - DNA, 15 bp, Homo sapiens
catcactcaactcat

SEQ ID NO: 1484991 - DNA, 15 bp, Homo sapiens
atcactcaactcatg

SEQ ID NO: 1484992 - DNA, 15 bp, Homo sapiens
tcactcaactcatgt

SEQ ID NO: 1484993 - DNA, 15 bp, Homo sapiens
cactcaactcatgtg

SEQ ID NO: 1484994 - DNA, 15 bp, Homo sapiens
actcaactcatgtgc

SEQ ID NO: 1484995 - DNA, 15 bp, Homo sapiens
ctcaactcatgtgca

SEQ ID NO: 1484996 - DNA, 15 bp, Homo sapiens
tcaactcatgtgcac

SEQ ID NO: 1484997 - DNA, 15 bp, Homo sapiens
caactcatgtgcaca

SEQ ID NO: 1484998 - DNA, 15 bp, Homo sapiens
aactcatgtgcacat

SEQ ID NO: 1484999 - DNA, 15 bp, Homo sapiens
actcatgtgcacatg

SEQ ID NO: 1485000 - DNA, 15 bp, Homo sapiens
ctcatgtgcacatga

SEQ ID NO: 1485001 - DNA, 15 bp, Homo sapiens
tcatgtgcacatgaa

SEQ ID NO: 1485002 - DNA, 15 bp, Homo sapiens
catgtgcacatgaaa

SEQ ID NO: 1485003 - DNA, 15 bp, Homo sapiens
atgtgcacatgaaaa

SEQ ID NO: 1485004 - DNA, 15 bp, Homo sapiens
tgtgcacatgaaaag

SEQ ID NO: 1485005 - DNA, 15 bp, Homo sapiens
gtgcacatgaaaagt

SEQ ID NO: 1485006 - DNA, 15 bp, Homo sapiens
tgcacatgaaaagta

SEQ ID NO: 1485007 - DNA, 15 bp, Homo sapiens
gcacatgaaaagtaa

SEQ ID NO: 1485008 - DNA, 15 bp, Homo sapiens
cacatgaaaagtaac

SEQ ID NO: 1485009 - DNA, 15 bp, Homo sapiens
acatgaaaagtaaca

SEQ ID NO: 1485010 - DNA, 15 bp, Homo sapiens
catgaaaagtaacat

SEQ ID NO: 1485011 - DNA, 15 bp, Homo sapiens
atgaaaagtaacatt

SEQ ID NO: 1485012 - DNA, 15 bp, Homo sapiens
tgaaaagtaacattt

SEQ ID NO: 1485013 - DNA, 15 bp, Homo sapiens
gaaaagtaacatttg

SEQ ID NO: 1485014 - DNA, 15 bp, Homo sapiens
aaaagtaacatttga

SEQ ID NO: 1485015 - DNA, 15 bp, Homo sapiens
aaagtaacatttgac

SEQ ID NO: 1485016 - DNA, 15 bp, Homo sapiens
aagtaacatttgact

SEQ ID NO: 1485017 - DNA, 15 bp, Homo sapiens
agtaacatttgactt

SEQ ID NO: 1485018 - DNA, 15 bp, Homo sapiens
gtaacatttgactta

SEQ ID NO: 1485019 - DNA, 15 bp, Homo sapiens
taacatttgacttaa

SEQ ID NO: 1485020 - DNA, 15 bp, Homo sapiens
aacatttgacttaat

SEQ ID NO: 1485021 - DNA, 15 bp, Homo sapiens
acatttgacttaatc

SEQ ID NO: 1485022 - DNA, 15 bp, Homo sapiens
catttgacttaatct

SEQ ID NO: 1485023 - DNA, 15 bp, Homo sapiens
atttgacttaatcta

SEQ ID NO: 1485024 - DNA, 15 bp, Homo sapiens
tttgacttaatctaa

SEQ ID NO: 1485025 - DNA, 15 bp, Homo sapiens
ttgacttaatctaag

SEQ ID NO: 1485026 - DNA, 15 bp, Homo sapiens
tgacttaatctaagg

SEQ ID NO: 1485027 - DNA, 15 bp, Homo sapiens
gacttaatctaagga

SEQ ID NO: 1485028 - DNA, 15 bp, Homo sapiens
acttaatctaaggaa

SEQ ID NO: 1485029 - DNA, 15 bp, Homo sapiens
cttaatctaaggaaa

SEQ ID NO: 1485030 - DNA, 15 bp, Homo sapiens
ttaatctaaggaaaa

SEQ ID NO: 1485031 - DNA, 15 bp, Homo sapiens
taatctaaggaaaac

SEQ ID NO: 1485032 - DNA, 15 bp, Homo sapiens
aatctaaggaaaaca

SEQ ID NO: 1485033 - DNA, 15 bp, Homo sapiens
atctaaggaaaacaa

SEQ ID NO: 1485034 - DNA, 15 bp, Homo sapiens
tctaaggaaaacaaa

SEQ ID NO: 1485035 - DNA, 15 bp, Homo sapiens
ctaaggaaaacaaat

SEQ ID NO: 1485036 - DNA, 15 bp, Homo sapiens
taaggaaaacaaatg

SEQ ID NO: 1485037 - DNA, 15 bp, Homo sapiens
aaggaaaacaaatgt

SEQ ID NO: 1485038 - DNA, 15 bp, Homo sapiens
aggaaaacaaatgtt

SEQ ID NO: 1485039 - DNA, 15 bp, Homo sapiens
ggaaaacaaatgttg

SEQ ID NO: 1485040 - DNA, 15 bp, Homo sapiens
gaaaacaaatgttgg

SEQ ID NO: 1485041 - DNA, 15 bp, Homo sapiens
aaaacaaatgttgga

SEQ ID NO: 1485042 - DNA, 15 bp, Homo sapiens
aaacaaatgttggaa

SEQ ID NO: 1485043 - DNA, 15 bp, Homo sapiens
aacaaatgttggaag

SEQ ID NO: 1485044 - DNA, 15 bp, Homo sapiens
acaaatgttggaaga

SEQ ID NO: 1485045 - DNA, 15 bp, Homo sapiens
caaatgttggaagac

SEQ ID NO: 1485046 - DNA, 15 bp, Homo sapiens
aaatgttggaagaca

SEQ ID NO: 1485047 - DNA, 15 bp, Homo sapiens
aatgttggaagacac

SEQ ID NO: 1485048 - DNA, 15 bp, Homo sapiens
atgttggaagacaca

SEQ ID NO: 1485049 - DNA, 15 bp, Homo sapiens
tgttggaagacacat

SEQ ID NO: 1485050 - DNA, 15 bp, Homo sapiens
gttggaagacacatt

SEQ ID NO: 1485051 - DNA, 15 bp, Homo sapiens
ttggaagacacattt

SEQ ID NO: 1485052 - DNA, 15 bp, Homo sapiens
tggaagacacatttg

SEQ ID NO: 1485053 - DNA, 15 bp, Homo sapiens
ggaagacacatttgt

SEQ ID NO: 1485054 - DNA, 15 bp, Homo sapiens
gaagacacatttgta

SEQ ID NO: 1485055 - DNA, 15 bp, Homo sapiens
aagacacatttgtaa

SEQ ID NO: 1485056 - DNA, 15 bp, Homo sapiens
agacacatttgtaag

SEQ ID NO: 1485057 - DNA, 15 bp, Homo sapiens
gacacatttgtaagt

SEQ ID NO: 1485058 - DNA, 15 bp, Homo sapiens
acacatttgtaagta

SEQ ID NO: 1485059 - DNA, 15 bp, Homo sapiens
cacatttgtaagtat

SEQ ID NO: 1485060 - DNA, 15 bp, Homo sapiens
acatttgtaagtata

SEQ ID NO: 1485061 - DNA, 15 bp, Homo sapiens
catttgtaagtataa

SEQ ID NO: 1485062 - DNA, 15 bp, Homo sapiens
atttgtaagtataac

SEQ ID NO: 1485063 - DNA, 15 bp, Homo sapiens
tttgtaagtataaca

SEQ ID NO: 1485064 - DNA, 15 bp, Homo sapiens
ttgtaagtataacaa

SEQ ID NO: 1485065 - DNA, 15 bp, Homo sapiens
tgtaagtataacaag

SEQ ID NO: 1485066 - DNA, 15 bp, Homo sapiens
gtaagtataacaaga

SEQ ID NO: 1485067 - DNA, 15 bp, Homo sapiens
taagtataacaagaa

SEQ ID NO: 1485068 - DNA, 15 bp, Homo sapiens
aagtataacaagaaa

SEQ ID NO: 1485069 - DNA, 15 bp, Homo sapiens
agtataacaagaaaa

SEQ ID NO: 1485070 - DNA, 15 bp, Homo sapiens
gtataacaagaaaag

SEQ ID NO: 1485071 - DNA, 15 bp, Homo sapiens
tataacaagaaaaga

SEQ ID NO: 1485072 - DNA, 15 bp, Homo sapiens
ataacaagaaaagat

SEQ ID NO: 1485073 - DNA, 15 bp, Homo sapiens
taacaagaaaagatg

SEQ ID NO: 1485074 - DNA, 15 bp, Homo sapiens
aacaagaaaagatgc

SEQ ID NO: 1485075 - DNA, 15 bp, Homo sapiens
acaagaaaagatgca

SEQ ID NO: 1485076 - DNA, 15 bp, Homo sapiens
caagaaaagatgcat

SEQ ID NO: 1485077 - DNA, 15 bp, Homo sapiens
aagaaaagatgcata

SEQ ID NO: 1485078 - DNA, 15 bp, Homo sapiens
agaaaagatgcatat

SEQ ID NO: 1485079 - DNA, 15 bp, Homo sapiens
gaaaagatgcatata

SEQ ID NO: 1485080 - DNA, 15 bp, Homo sapiens
aaaagatgcatatag

SEQ ID NO: 1485081 - DNA, 15 bp, Homo sapiens
aaagatgcatatagg

SEQ ID NO: 1485082 - DNA, 15 bp, Homo sapiens
aagatgcatataggc

SEQ ID NO: 1485083 - DNA, 15 bp, Homo sapiens
agatgcatataggca

SEQ ID NO: 1485084 - DNA, 15 bp, Homo sapiens
gatgcatataggcac

SEQ ID NO: 1485085 - DNA, 15 bp, Homo sapiens
atgcatataggcaca

SEQ ID NO: 1485086 - DNA, 15 bp, Homo sapiens
tgcatataggcacac

SEQ ID NO: 1485087 - DNA, 15 bp, Homo sapiens
gcatataggcacaca

SEQ ID NO: 1485088 - DNA, 15 bp, Homo sapiens
catataggcacacat

SEQ ID NO: 1485089 - DNA, 15 bp, Homo sapiens
atataggcacacata

SEQ ID NO: 1485090 - DNA, 15 bp, Homo sapiens
tataggcacacatat

SEQ ID NO: 1485091 - DNA, 15 bp, Homo sapiens
ataggcacacatatg

SEQ ID NO: 1485092 - DNA, 15 bp, Homo sapiens
taggcacacatatgt

SEQ ID NO: 1485093 - DNA, 15 bp, Homo sapiens
aggcacacatatgtg

SEQ ID NO: 1485094 - DNA, 15 bp, Homo sapiens
ggcacacatatgtga

SEQ ID NO: 1485095 - DNA, 15 bp, Homo sapiens
gcacacatatgtgac

SEQ ID NO: 1485096 - DNA, 15 bp, Homo sapiens
cacacatatgtgaca

SEQ ID NO: 1485097 - DNA, 15 bp, Homo sapiens
acacatatgtgacaa

SEQ ID NO: 1485098 - DNA, 15 bp, Homo sapiens
cacatatgtgacaaa

SEQ ID NO: 1485099 - DNA, 15 bp, Homo sapiens
acatatgtgacaaat

SEQ ID NO: 1485100 - DNA, 15 bp, Homo sapiens
catatgtgacaaatt

SEQ ID NO: 1485101 - DNA, 15 bp, Homo sapiens
atatgtgacaaattc

SEQ ID NO: 1485102 - DNA, 15 bp, Homo sapiens
tatgtgacaaattcc

SEQ ID NO: 1485103 - DNA, 15 bp, Homo sapiens
atgtgacaaattcca

SEQ ID NO: 1485104 - DNA, 15 bp, Homo sapiens
tgtgacaaattccaa

SEQ ID NO: 1485105 - DNA, 15 bp, Homo sapiens
gtgacaaattccaaa

SEQ ID NO: 1485106 - DNA, 15 bp, Homo sapiens
tgacaaattccaaaa

SEQ ID NO: 1485107 - DNA, 15 bp, Homo sapiens
gacaaattccaaaat

SEQ ID NO: 1485108 - DNA, 15 bp, Homo sapiens
caaattccaaaataa

SEQ ID NO: 1485109 - DNA, 15 bp, Homo sapiens
aaattccaaaataag

SEQ ID NO: 1485110 - DNA, 15 bp, Homo sapiens
aattccaaaataagt

SEQ ID NO: 1485111 - DNA, 15 bp, Homo sapiens
attccaaaataagtg

SEQ ID NO: 1485112 - DNA, 15 bp, Homo sapiens
ttccaaaataagtga

SEQ ID NO: 1485113 - DNA, 15 bp, Homo sapiens
tccaaaataagtgaa

SEQ ID NO: 1485114 - DNA, 15 bp, Homo sapiens
ccaaaataagtgaaa

SEQ ID NO: 1485115 - DNA, 15 bp, Homo sapiens
caaaataagtgaaat

SEQ ID NO: 1485116 - DNA, 15 bp, Homo sapiens
aaaataagtgaaatt

SEQ ID NO: 1485117 - DNA, 15 bp, Homo sapiens
aaataagtgaaattt

SEQ ID NO: 1485118 - DNA, 15 bp, Homo sapiens
aataagtgaaatttt

SEQ ID NO: 1485119 - DNA, 15 bp, Homo sapiens
ataagtgaaattttt

SEQ ID NO: 1485120 - DNA, 15 bp, Homo sapiens
taagtgaaattttta

SEQ ID NO: 1485121 - DNA, 15 bp, Homo sapiens
aagtgaaatttttaa

SEQ ID NO: 1485122 - DNA, 15 bp, Homo sapiens
agtgaaatttttaaa

SEQ ID NO: 1485123 - DNA, 15 bp, Homo sapiens
gtgaaatttttaaat

SEQ ID NO: 1485124 - DNA, 15 bp, Homo sapiens
tgaaatttttaaatt

SEQ ID NO: 1485125 - DNA, 15 bp, Homo sapiens
gaaatttttaaattc

SEQ ID NO: 1485126 - DNA, 15 bp, Homo sapiens
aaatttttaaattcg

SEQ ID NO: 1485127 - DNA, 15 bp, Homo sapiens
aatttttaaattcgt

SEQ ID NO: 1485128 - DNA, 15 bp, Homo sapiens
atttttaaattcgtg

SEQ ID NO: 1485129 - DNA, 15 bp, Homo sapiens
tttttaaattcgtga

SEQ ID NO: 1485130 - DNA, 15 bp, Homo sapiens
ttttaaattcgtgaa

SEQ ID NO: 1485131 - DNA, 15 bp, Homo sapiens
tttaaattcgtgaat

SEQ ID NO: 1485132 - DNA, 15 bp, Homo sapiens
ttaaattcgtgaatg

SEQ ID NO: 1485133 - DNA, 15 bp, Homo sapiens
taaattcgtgaatgc

SEQ ID NO: 1485134 - DNA, 15 bp, Homo sapiens
aaattcgtgaatgca

SEQ ID NO: 1485135 - DNA, 15 bp, Homo sapiens
aattcgtgaatgcac

SEQ ID NO: 1485136 - DNA, 15 bp, Homo sapiens
attcgtgaatgcaca

SEQ ID NO: 1485137 - DNA, 15 bp, Homo sapiens
ttcgtgaatgcacag

SEQ ID NO: 1485138 - DNA, 15 bp, Homo sapiens
tcgtgaatgcacaga

SEQ ID NO: 1485139 - DNA, 15 bp, Homo sapiens
cgtgaatgcacagat

SEQ ID NO: 1485140 - DNA, 15 bp, Homo sapiens
gtgaatgcacagatg

SEQ ID NO: 1485141 - DNA, 15 bp, Homo sapiens
tgaatgcacagatgt

SEQ ID NO: 1485142 - DNA, 15 bp, Homo sapiens
gaatgcacagatgta

SEQ ID NO: 1485143 - DNA, 15 bp, Homo sapiens
aatgcacagatgtac

SEQ ID NO: 1485144 - DNA, 15 bp, Homo sapiens
atgcacagatgtacc

SEQ ID NO: 1485145 - DNA, 15 bp, Homo sapiens
tgcacagatgtaccc

SEQ ID NO: 1485146 - DNA, 15 bp, Homo sapiens
gcacagatgtaccca

SEQ ID NO: 1485147 - DNA, 15 bp, Homo sapiens
cacagatgtacccac

SEQ ID NO: 1485148 - DNA, 15 bp, Homo sapiens
acagatgtacccacg

SEQ ID NO: 1485149 - DNA, 15 bp, Homo sapiens
cagatgtacccacgc

SEQ ID NO: 1485150 - DNA, 15 bp, Homo sapiens
agatgtacccacgcc

SEQ ID NO: 1485151 - DNA, 15 bp, Homo sapiens
gatgtacccacgcca

SEQ ID NO: 1485152 - DNA, 15 bp, Homo sapiens
atgtacccacgccat

SEQ ID NO: 1485153 - DNA, 15 bp, Homo sapiens
tgtacccacgccatt

SEQ ID NO: 1485154 - DNA, 15 bp, Homo sapiens
gtacccacgccattc

SEQ ID NO: 1485155 - DNA, 15 bp, Homo sapiens
tacccacgccattct

SEQ ID NO: 1485156 - DNA, 15 bp, Homo sapiens
acccacgccattctt

SEQ ID NO: 1485157 - DNA, 15 bp, Homo sapiens
cccacgccattcttc

SEQ ID NO: 1485158 - DNA, 15 bp, Homo sapiens
ccacgccattcttct

SEQ ID NO: 1485159 - DNA, 15 bp, Homo sapiens
cacgccattcttctg

SEQ ID NO: 1485160 - DNA, 15 bp, Homo sapiens
acgccattcttctga

SEQ ID NO: 1485161 - DNA, 15 bp, Homo sapiens
cgccattcttctgat

SEQ ID NO: 1485162 - DNA, 15 bp, Homo sapiens
gccattcttctgata

SEQ ID NO: 1485163 - DNA, 15 bp, Homo sapiens
ccattcttctgatat

SEQ ID NO: 1485164 - DNA, 15 bp, Homo sapiens
cattcttctgatatt

SEQ ID NO: 1485165 - DNA, 15 bp, Homo sapiens
attcttctgatattc

SEQ ID NO: 1485166 - DNA, 15 bp, Homo sapiens
ttcttctgatattca

SEQ ID NO: 1485167 - DNA, 15 bp, Homo sapiens
tcttctgatattcac

SEQ ID NO: 1485168 - DNA, 15 bp, Homo sapiens
cttctgatattcact

SEQ ID NO: 1485169 - DNA, 15 bp, Homo sapiens
ttctgatattcactg

SEQ ID NO: 1485170 - DNA, 15 bp, Homo sapiens
tctgatattcactga

SEQ ID NO: 1485171 - DNA, 15 bp, Homo sapiens
ctgatattcactgag

SEQ ID NO: 1485172 - DNA, 15 bp, Homo sapiens
tgatattcactgagt

SEQ ID NO: 1485173 - DNA, 15 bp, Homo sapiens
gatattcactgagta

SEQ ID NO: 1485174 - DNA, 15 bp, Homo sapiens
atattcactgagtat

SEQ ID NO: 1485175 - DNA, 15 bp, Homo sapiens
tattcactgagtatg

SEQ ID NO: 1485176 - DNA, 15 bp, Homo sapiens
attcactgagtatgt

SEQ ID NO: 1485177 - DNA, 15 bp, Homo sapiens
ttcactgagtatgtg

SEQ ID NO: 1485178 - DNA, 15 bp, Homo sapiens
tcactgagtatgtgg

SEQ ID NO: 1485179 - DNA, 15 bp, Homo sapiens
cactgagtatgtggt

SEQ ID NO: 1485180 - DNA, 15 bp, Homo sapiens
actgagtatgtggtg

SEQ ID NO: 1485181 - DNA, 15 bp, Homo sapiens
ctgagtatgtggtgt

SEQ ID NO: 1485182 - DNA, 15 bp, Homo sapiens
tgagtatgtggtgta

SEQ ID NO: 1485183 - DNA, 15 bp, Homo sapiens
gagtatgtggtgtac

SEQ ID NO: 1485184 - DNA, 15 bp, Homo sapiens
agtatgtggtgtacg

SEQ ID NO: 1485185 - DNA, 15 bp, Homo sapiens
gtatgtggtgtacga

SEQ ID NO: 1485186 - DNA, 15 bp, Homo sapiens
tatgtggtgtacgaa

SEQ ID NO: 1485187 - DNA, 15 bp, Homo sapiens
atgtggtgtacgaac

SEQ ID NO: 1485188 - DNA, 15 bp, Homo sapiens
tgtggtgtacgaaca

SEQ ID NO: 1485189 - DNA, 15 bp, Homo sapiens
gtggtgtacgaacaa

SEQ ID NO: 1485190 - DNA, 15 bp, Homo sapiens
tggtgtacgaacaac

SEQ ID NO: 1485191 - DNA, 15 bp, Homo sapiens
ggtgtacgaacaaca

SEQ ID NO: 1485192 - DNA, 15 bp, Homo sapiens
gtgtacgaacaacag

SEQ ID NO: 1485193 - DNA, 15 bp, Homo sapiens
tgtacgaacaacagt

SEQ ID NO: 1485194 - DNA, 15 bp, Homo sapiens
gtacgaacaacagta

SEQ ID NO: 1485195 - DNA, 15 bp, Homo sapiens
tacgaacaacagtat

SEQ ID NO: 1485196 - DNA, 15 bp, Homo sapiens
acgaacaacagtata

SEQ ID NO: 1485197 - DNA, 15 bp, Homo sapiens
cgaacaacagtataa

SEQ ID NO: 1485198 - DNA, 15 bp, Homo sapiens
gaacaacagtataaa

SEQ ID NO: 1485199 - DNA, 15 bp, Homo sapiens
aacaacagtataaat

SEQ ID NO: 1485200 - DNA, 15 bp, Homo sapiens
acaacagtataaata

SEQ ID NO: 1485201 - DNA, 15 bp, Homo sapiens
caacagtataaatag

SEQ ID NO: 1485202 - DNA, 15 bp, Homo sapiens
aacagtataaatagg

SEQ ID NO: 1485203 - DNA, 15 bp, Homo sapiens
acagtataaataggt

SEQ ID NO: 1485204 - DNA, 15 bp, Homo sapiens
cagtataaataggtg

SEQ ID NO: 1485205 - DNA, 15 bp, Homo sapiens
agtataaataggtgc

SEQ ID NO: 1485206 - DNA, 15 bp, Homo sapiens
gtataaataggtgct

SEQ ID NO: 1485207 - DNA, 15 bp, Homo sapiens
tataaataggtgcta

SEQ ID NO: 1485208 - DNA, 15 bp, Homo sapiens
ataaataggtgctag

SEQ ID NO: 1485209 - DNA, 15 bp, Homo sapiens
taaataggtgctagc

SEQ ID NO: 1485210 - DNA, 15 bp, Homo sapiens
aaataggtgctagcc

SEQ ID NO: 1485211 - DNA, 15 bp, Homo sapiens
aataggtgctagcca

SEQ ID NO: 1485212 - DNA, 15 bp, Homo sapiens
ataggtgctagccac

SEQ ID NO: 1485213 - DNA, 15 bp, Homo sapiens
taggtgctagccacc

SEQ ID NO: 1485214 - DNA, 15 bp, Homo sapiens
aggtgctagccacct

SEQ ID NO: 1485215 - DNA, 15 bp, Homo sapiens
ggtgctagccaccta

SEQ ID NO: 1485216 - DNA, 15 bp, Homo sapiens
gtgctagccacctac

SEQ ID NO: 1485217 - DNA, 15 bp, Homo sapiens
tgctagccacctacc

SEQ ID NO: 1485218 - DNA, 15 bp, Homo sapiens
gctagccacctacca

SEQ ID NO: 1485219 - DNA, 15 bp, Homo sapiens
ctagccacctaccat

SEQ ID NO: 1485220 - DNA, 15 bp, Homo sapiens
tagccacctaccatt

SEQ ID NO: 1485221 - DNA, 15 bp, Homo sapiens
agccacctaccattt

SEQ ID NO: 1485222 - DNA, 15 bp, Homo sapiens
gccacctaccatttt

SEQ ID NO: 1485223 - DNA, 15 bp, Homo sapiens
ccacctaccattttc

SEQ ID NO: 1485224 - DNA, 15 bp, Homo sapiens
cacctaccattttca

SEQ ID NO: 1485225 - DNA, 15 bp, Homo sapiens
acctaccattttcat

SEQ ID NO: 1485226 - DNA, 15 bp, Homo sapiens
cctaccattttcatt

SEQ ID NO: 1485227 - DNA, 15 bp, Homo sapiens
ctaccattttcatta

SEQ ID NO: 1485228 - DNA, 15 bp, Homo sapiens
taccattttcattat

SEQ ID NO: 1485229 - DNA, 15 bp, Homo sapiens
accattttcattatc

SEQ ID NO: 1485230 - DNA, 15 bp, Homo sapiens
ccattttcattatct

SEQ ID NO: 1485231 - DNA, 15 bp, Homo sapiens
cattttcattatctc

SEQ ID NO: 1485232 - DNA, 15 bp, Homo sapiens
attttcattatctca

SEQ ID NO: 1485233 - DNA, 15 bp, Homo sapiens
ttttcattatctcac

SEQ ID NO: 1485234 - DNA, 15 bp, Homo sapiens
tttcattatctcaca

SEQ ID NO: 1485235 - DNA, 15 bp, Homo sapiens
ttcattatctcacaa

SEQ ID NO: 1485236 - DNA, 15 bp, Homo sapiens
tcattatctcacaac

SEQ ID NO: 1485237 - DNA, 15 bp, Homo sapiens
cattatctcacaaca

SEQ ID NO: 1485238 - DNA, 15 bp, Homo sapiens
attatctcacaacag

SEQ ID NO: 1485239 - DNA, 15 bp, Homo sapiens
ttatctcacaacaga

SEQ ID NO: 1485240 - DNA, 15 bp, Homo sapiens
tatctcacaacagat

SEQ ID NO: 1485241 - DNA, 15 bp, Homo sapiens
atctcacaacagatg

SEQ ID NO: 1485242 - DNA, 15 bp, Homo sapiens
tctcacaacagatgc

SEQ ID NO: 1485243 - DNA, 15 bp, Homo sapiens
ctcacaacagatgcc

SEQ ID NO: 1485244 - DNA, 15 bp, Homo sapiens
tcacaacagatgcct

SEQ ID NO: 1485245 - DNA, 15 bp, Homo sapiens
cacaacagatgcctc

SEQ ID NO: 1485246 - DNA, 15 bp, Homo sapiens
acaacagatgcctcc

SEQ ID NO: 1485247 - DNA, 15 bp, Homo sapiens
caacagatgcctcct

SEQ ID NO: 1485248 - DNA, 15 bp, Homo sapiens
aacagatgcctcctc

SEQ ID NO: 1485249 - DNA, 15 bp, Homo sapiens
acagatgcctcctct

SEQ ID NO: 1485250 - DNA, 15 bp, Homo sapiens
cagatgcctcctctc

SEQ ID NO: 1485251 - DNA, 15 bp, Homo sapiens
agatgcctcctctcc

SEQ ID NO: 1485252 - DNA, 15 bp, Homo sapiens
gatgcctcctctcct

SEQ ID NO: 1485253 - DNA, 15 bp, Homo sapiens
atgcctcctctcctc

SEQ ID NO: 1485254 - DNA, 15 bp, Homo sapiens
tgcctcctctcctca

SEQ ID NO: 1485255 - DNA, 15 bp, Homo sapiens
gcctcctctcctcat

SEQ ID NO: 1485256 - DNA, 15 bp, Homo sapiens
cctcctctcctcatt

SEQ ID NO: 1485257 - DNA, 15 bp, Homo sapiens
ctcctctcctcattc

SEQ ID NO: 1485258 - DNA, 15 bp, Homo sapiens
tcctctcctcattca

SEQ ID NO: 1485259 - DNA, 15 bp, Homo sapiens
cctctcctcattcac

SEQ ID NO: 1485260 - DNA, 15 bp, Homo sapiens
ctctcctcattcaca

SEQ ID NO: 1485261 - DNA, 15 bp, Homo sapiens
tctcctcattcacag

SEQ ID NO: 1485262 - DNA, 15 bp, Homo sapiens
ctcctcattcacagg

SEQ ID NO: 1485263 - DNA, 15 bp, Homo sapiens
tcctcattcacaggg

SEQ ID NO: 1485264 - DNA, 15 bp, Homo sapiens
cctcattcacagggc

SEQ ID NO: 1485265 - DNA, 15 bp, Homo sapiens
ctcattcacagggct

SEQ ID NO: 1485266 - DNA, 15 bp, Homo sapiens
tcattcacagggcta

SEQ ID NO: 1485267 - DNA, 15 bp, Homo sapiens
cattcacagggctat

SEQ ID NO: 1485268 - DNA, 15 bp, Homo sapiens
attcacagggctatt

SEQ ID NO: 1485269 - DNA, 15 bp, Homo sapiens
ttcacagggctattc

SEQ ID NO: 1485270 - DNA, 15 bp, Homo sapiens
tcacagggctattca

SEQ ID NO: 1485271 - DNA, 15 bp, Homo sapiens
cacagggctattcag

SEQ ID NO: 1485272 - DNA, 15 bp, Homo sapiens
acagggctattcagg

SEQ ID NO: 1485273 - DNA, 15 bp, Homo sapiens
cagggctattcaggc

SEQ ID NO: 1485274 - DNA, 15 bp, Homo sapiens
agggctattcaggct

SEQ ID NO: 1485275 - DNA, 15 bp, Homo sapiens
gggctattcaggcta

SEQ ID NO: 1485276 - DNA, 15 bp, Homo sapiens
ggctattcaggctat

SEQ ID NO: 1485277 - DNA, 15 bp, Homo sapiens
gctattcaggctatg

SEQ ID NO: 1485278 - DNA, 15 bp, Homo sapiens
ctattcaggctatgt

SEQ ID NO: 1485279 - DNA, 15 bp, Homo sapiens
tattcaggctatgta

SEQ ID NO: 1485280 - DNA, 15 bp, Homo sapiens
attcaggctatgtaa

SEQ ID NO: 1485281 - DNA, 15 bp, Homo sapiens
ttcaggctatgtaac

SEQ ID NO: 1485282 - DNA, 15 bp, Homo sapiens
tcaggctatgtaaca

SEQ ID NO: 1485283 - DNA, 15 bp, Homo sapiens
caggctatgtaacag

SEQ ID NO: 1485284 - DNA, 15 bp, Homo sapiens
aggctatgtaacaga

SEQ ID NO: 1485285 - DNA, 15 bp, Homo sapiens
ggctatgtaacagag

SEQ ID NO: 1485286 - DNA, 15 bp, Homo sapiens
gctatgtaacagagc

SEQ ID NO: 1485287 - DNA, 15 bp, Homo sapiens
ctatgtaacagagcc

SEQ ID NO: 1485288 - DNA, 15 bp, Homo sapiens
tatgtaacagagcct

SEQ ID NO: 1485289 - DNA, 15 bp, Homo sapiens
atgtaacagagcctt

SEQ ID NO: 1485290 - DNA, 15 bp, Homo sapiens
tgtaacagagcctta

SEQ ID NO: 1485291 - DNA, 15 bp, Homo sapiens
gtaacagagccttat

SEQ ID NO: 1485292 - DNA, 15 bp, Homo sapiens
taacagagccttatc

SEQ ID NO: 1485293 - DNA, 15 bp, Homo sapiens
aacagagccttatct

SEQ ID NO: 1485294 - DNA, 15 bp, Homo sapiens
acagagccttatcta

SEQ ID NO: 1485295 - DNA, 15 bp, Homo sapiens
cagagccttatctat

SEQ ID NO: 1485296 - DNA, 15 bp, Homo sapiens
agagccttatctatg

SEQ ID NO: 1485297 - DNA, 15 bp, Homo sapiens
gagccttatctatgg

SEQ ID NO: 1485298 - DNA, 15 bp, Homo sapiens
agccttatctatggc

SEQ ID NO: 1485299 - DNA, 15 bp, Homo sapiens
gccttatctatggca

SEQ ID NO: 1485300 - DNA, 15 bp, Homo sapiens
ccttatctatggcac

SEQ ID NO: 1485301 - DNA, 15 bp, Homo sapiens
cttatctatggcacc

SEQ ID NO: 1485302 - DNA, 15 bp, Homo sapiens
ttatctatggcacct

SEQ ID NO: 1485303 - DNA, 15 bp, Homo sapiens
tatctatggcaccta

SEQ ID NO: 1485304 - DNA, 15 bp, Homo sapiens
atctatggcacctag

SEQ ID NO: 1485305 - DNA, 15 bp, Homo sapiens
tctatggcacctaga

SEQ ID NO: 1485306 - DNA, 15 bp, Homo sapiens
ctatggcacctagag

SEQ ID NO: 1485307 - DNA, 15 bp, Homo sapiens
tatggcacctagagg

SEQ ID NO: 1485308 - DNA, 15 bp, Homo sapiens
atggcacctagaggc

SEQ ID NO: 1485309 - DNA, 15 bp, Homo sapiens
tggcacctagaggcc

SEQ ID NO: 1485310 - DNA, 15 bp, Homo sapiens
ggcacctagaggcct

SEQ ID NO: 1485311 - DNA, 15 bp, Homo sapiens
gcacctagaggcctg

SEQ ID NO: 1485312 - DNA, 15 bp, Homo sapiens
cacctagaggcctgg

SEQ ID NO: 1485313 - DNA, 15 bp, Homo sapiens
acctagaggcctgga

SEQ ID NO: 1485314 - DNA, 15 bp, Homo sapiens
cctagaggcctggac

SEQ ID NO: 1485315 - DNA, 15 bp, Homo sapiens
ctagaggcctggact

SEQ ID NO: 1485316 - DNA, 15 bp, Homo sapiens
tagaggcctggactc

SEQ ID NO: 1485317 - DNA, 15 bp, Homo sapiens
agaggcctggactca

SEQ ID NO: 1485318 - DNA, 15 bp, Homo sapiens
gaggcctggactcag

SEQ ID NO: 1485319 - DNA, 15 bp, Homo sapiens
aggcctggactcaga

SEQ ID NO: 1485320 - DNA, 15 bp, Homo sapiens
ggcctggactcagaa

SEQ ID NO: 1485321 - DNA, 15 bp, Homo sapiens
gcctggactcagaaa

SEQ ID NO: 1485322 - DNA, 15 bp, Homo sapiens
cctggactcagaaac

SEQ ID NO: 1485323 - DNA, 15 bp, Homo sapiens
ctggactcagaaacc

SEQ ID NO: 1485324 - DNA, 15 bp, Homo sapiens
tggactcagaaacca

SEQ ID NO: 1485325 - DNA, 15 bp, Homo sapiens
ggactcagaaaccag

SEQ ID NO: 1485326 - DNA, 15 bp, Homo sapiens
gactcagaaaccaga

SEQ ID NO: 1485327 - DNA, 15 bp, Homo sapiens
actcagaaaccagag

SEQ ID NO: 1485328 - DNA, 15 bp, Homo sapiens
ctcagaaaccagaga

SEQ ID NO: 1485329 - DNA, 15 bp, Homo sapiens
tcagaaaccagagac

SEQ ID NO: 1485330 - DNA, 15 bp, Homo sapiens
cagaaaccagagaca

SEQ ID NO: 1485331 - DNA, 15 bp, Homo sapiens
agaaaccagagacag

SEQ ID NO: 1485332 - DNA, 15 bp, Homo sapiens
gaaaccagagacagg

SEQ ID NO: 1485333 - DNA, 15 bp, Homo sapiens
aaaccagagacaggc

SEQ ID NO: 1485334 - DNA, 15 bp, Homo sapiens
aaccagagacaggca

SEQ ID NO: 1485335 - DNA, 15 bp, Homo sapiens
accagagacaggcag

SEQ ID NO: 1485336 - DNA, 15 bp, Homo sapiens
ccagagacaggcaga

SEQ ID NO: 1485337 - DNA, 15 bp, Homo sapiens
cagagacaggcagag

SEQ ID NO: 1485338 - DNA, 15 bp, Homo sapiens
agagacaggcagagg

SEQ ID NO: 1485339 - DNA, 15 bp, Homo sapiens
gagacaggcagagga

SEQ ID NO: 1485340 - DNA, 15 bp, Homo sapiens
agacaggcagaggac

SEQ ID NO: 1485341 - DNA, 15 bp, Homo sapiens
gacaggcagaggact

SEQ ID NO: 1485342 - DNA, 15 bp, Homo sapiens
acaggcagaggactg

SEQ ID NO: 1485343 - DNA, 15 bp, Homo sapiens
caggcagaggactga

SEQ ID NO: 1485344 - DNA, 15 bp, Homo sapiens
aggcagaggactgag

SEQ ID NO: 1485345 - DNA, 15 bp, Homo sapiens
ggcagaggactgagc

SEQ ID NO: 1485346 - DNA, 15 bp, Homo sapiens
gcagaggactgagcc

SEQ ID NO: 1485347 - DNA, 15 bp, Homo sapiens
cagaggactgagcct

SEQ ID NO: 1485348 - DNA, 15 bp, Homo sapiens
agaggactgagcctg

SEQ ID NO: 1485349 - DNA, 15 bp, Homo sapiens
gaggactgagcctgc

SEQ ID NO: 1485350 - DNA, 15 bp, Homo sapiens
aggactgagcctgca

SEQ ID NO: 1485351 - DNA, 15 bp, Homo sapiens
ggactgagcctgcaa

SEQ ID NO: 1485352 - DNA, 15 bp, Homo sapiens
gactgagcctgcaat

SEQ ID NO: 1485353 - DNA, 15 bp, Homo sapiens
actgagcctgcaatg

SEQ ID NO: 1485354 - DNA, 15 bp, Homo sapiens
ctgagcctgcaatgg

SEQ ID NO: 1485355 - DNA, 15 bp, Homo sapiens
tgagcctgcaatgga

SEQ ID NO: 1485356 - DNA, 15 bp, Homo sapiens
gagcctgcaatggaa

SEQ ID NO: 1485357 - DNA, 15 bp, Homo sapiens
agcctgcaatggaat

SEQ ID NO: 1485358 - DNA, 15 bp, Homo sapiens
gcctgcaatggaatg

SEQ ID NO: 1485359 - DNA, 15 bp, Homo sapiens
cctgcaatggaatga

SEQ ID NO: 1485360 - DNA, 15 bp, Homo sapiens
ctgcaatggaatgac

SEQ ID NO: 1485361 - DNA, 15 bp, Homo sapiens
tgcaatggaatgaca

SEQ ID NO: 1485362 - DNA, 15 bp, Homo sapiens
gcaatggaatgacac

SEQ ID NO: 1485363 - DNA, 15 bp, Homo sapiens
caatggaatgacacc

SEQ ID NO: 1485364 - DNA, 15 bp, Homo sapiens
aatggaatgacaccc

SEQ ID NO: 1485365 - DNA, 15 bp, Homo sapiens
atggaatgacaccca

SEQ ID NO: 1485366 - DNA, 15 bp, Homo sapiens
tggaatgacacccat

SEQ ID NO: 1485367 - DNA, 15 bp, Homo sapiens
ggaatgacacccatg

SEQ ID NO: 1485368 - DNA, 15 bp, Homo sapiens
gaatgacacccatgg

SEQ ID NO: 1485369 - DNA, 15 bp, Homo sapiens
aatgacacccatggt

SEQ ID NO: 1485370 - DNA, 15 bp, Homo sapiens
atgacacccatggtt

SEQ ID NO: 1485371 - DNA, 15 bp, Homo sapiens
tgacacccatggttt

SEQ ID NO: 1485372 - DNA, 15 bp, Homo sapiens
gacacccatggtttt

SEQ ID NO: 1485373 - DNA, 15 bp, Homo sapiens
acacccatggtttta

SEQ ID NO: 1485374 - DNA, 15 bp, Homo sapiens
cacccatggttttaa

SEQ ID NO: 1485375 - DNA, 15 bp, Homo sapiens
acccatggttttaaa

SEQ ID NO: 1485376 - DNA, 15 bp, Homo sapiens
cccatggttttaaag

SEQ ID NO: 1485377 - DNA, 15 bp, Homo sapiens
ccatggttttaaagg

SEQ ID NO: 1485378 - DNA, 15 bp, Homo sapiens
catggttttaaagga

SEQ ID NO: 1485379 - DNA, 15 bp, Homo sapiens
atggttttaaaggaa

SEQ ID NO: 1485380 - DNA, 15 bp, Homo sapiens
tggttttaaaggaag

SEQ ID NO: 1485381 - DNA, 15 bp, Homo sapiens
ggttttaaaggaaga

SEQ ID NO: 1485382 - DNA, 15 bp, Homo sapiens
gttttaaaggaagag

SEQ ID NO: 1485383 - DNA, 15 bp, Homo sapiens
ttttaaaggaagagt

SEQ ID NO: 1485384 - DNA, 15 bp, Homo sapiens
tttaaaggaagagtg

SEQ ID NO: 1485385 - DNA, 15 bp, Homo sapiens
ttaaaggaagagtgg

SEQ ID NO: 1485386 - DNA, 15 bp, Homo sapiens
taaaggaagagtgga

SEQ ID NO: 1485387 - DNA, 15 bp, Homo sapiens
aaaggaagagtggac

SEQ ID NO: 1485388 - DNA, 15 bp, Homo sapiens
aaggaagagtggaca

SEQ ID NO: 1485389 - DNA, 15 bp, Homo sapiens
aggaagagtggacac

SEQ ID NO: 1485390 - DNA, 15 bp, Homo sapiens
ggaagagtggacacg

SEQ ID NO: 1485391 - DNA, 15 bp, Homo sapiens
gaagagtggacacgc

SEQ ID NO: 1485392 - DNA, 15 bp, Homo sapiens
aagagtggacacgca

SEQ ID NO: 1485393 - DNA, 15 bp, Homo sapiens
agagtggacacgcag

SEQ ID NO: 1485394 - DNA, 15 bp, Homo sapiens
gagtggacacgcaga

SEQ ID NO: 1485395 - DNA, 15 bp, Homo sapiens
agtggacacgcagat

SEQ ID NO: 1485396 - DNA, 15 bp, Homo sapiens
gtggacacgcagatt

SEQ ID NO: 1485397 - DNA, 15 bp, Homo sapiens
tggacacgcagatta

SEQ ID NO: 1485398 - DNA, 15 bp, Homo sapiens
ggacacgcagattag

SEQ ID NO: 1485399 - DNA, 15 bp, Homo sapiens
gacacgcagattagt

SEQ ID NO: 1485400 - DNA, 15 bp, Homo sapiens
acacgcagattagtg

SEQ ID NO: 1485401 - DNA, 15 bp, Homo sapiens
cacgcagattagtga

SEQ ID NO: 1485402 - DNA, 15 bp, Homo sapiens
acgcagattagtgaa

SEQ ID NO: 1485403 - DNA, 15 bp, Homo sapiens
cgcagattagtgaaa

SEQ ID NO: 1485404 - DNA, 15 bp, Homo sapiens
gcagattagtgaaat

SEQ ID NO: 1485405 - DNA, 15 bp, Homo sapiens
cagattagtgaaatc

SEQ ID NO: 1485406 - DNA, 15 bp, Homo sapiens
agattagtgaaatcg

SEQ ID NO: 1485407 - DNA, 15 bp, Homo sapiens
gattagtgaaatcgg

SEQ ID NO: 1485408 - DNA, 15 bp, Homo sapiens
attagtgaaatcggc

SEQ ID NO: 1485409 - DNA, 15 bp, Homo sapiens
ttagtgaaatcggct

SEQ ID NO: 1485410 - DNA, 15 bp, Homo sapiens
tagtgaaatcggctc

SEQ ID NO: 1485411 - DNA, 15 bp, Homo sapiens
agtgaaatcggctct

SEQ ID NO: 1485412 - DNA, 15 bp, Homo sapiens
gtgaaatcggctctg

SEQ ID NO: 1485413 - DNA, 15 bp, Homo sapiens
tgaaatcggctctgt

SEQ ID NO: 1485414 - DNA, 15 bp, Homo sapiens
gaaatcggctctgta

SEQ ID NO: 1485415 - DNA, 15 bp, Homo sapiens
aaatcggctctgtac

SEQ ID NO: 1485416 - DNA, 15 bp, Homo sapiens
aatcggctctgtact

SEQ ID NO: 1485417 - DNA, 15 bp, Homo sapiens
atcggctctgtactc

SEQ ID NO: 1485418 - DNA, 15 bp, Homo sapiens
tcggctctgtactct

SEQ ID NO: 1485419 - DNA, 15 bp, Homo sapiens
cggctctgtactcta

SEQ ID NO: 1485420 - DNA, 15 bp, Homo sapiens
ggctctgtactctag

SEQ ID NO: 1485421 - DNA, 15 bp, Homo sapiens
gctctgtactctagg

SEQ ID NO: 1485422 - DNA, 15 bp, Homo sapiens
ctctgtactctagga

SEQ ID NO: 1485423 - DNA, 15 bp, Homo sapiens
tctgtactctaggag

SEQ ID NO: 1485424 - DNA, 15 bp, Homo sapiens
ctgtactctaggagc

SEQ ID NO: 1485425 - DNA, 15 bp, Homo sapiens
tgtactctaggagcc

SEQ ID NO: 1485426 - DNA, 15 bp, Homo sapiens
gtactctaggagccc

SEQ ID NO: 1485427 - DNA, 15 bp, Homo sapiens
tactctaggagccca

SEQ ID NO: 1485428 - DNA, 15 bp, Homo sapiens
actctaggagcccat

SEQ ID NO: 1485429 - DNA, 15 bp, Homo sapiens
ctctaggagcccatg

SEQ ID NO: 1485430 - DNA, 15 bp, Homo sapiens
tctaggagcccatgg

SEQ ID NO: 1485431 - DNA, 15 bp, Homo sapiens
ctaggagcccatggg

SEQ ID NO: 1485432 - DNA, 15 bp, Homo sapiens
taggagcccatggga

SEQ ID NO: 1485433 - DNA, 15 bp, Homo sapiens
aggagcccatgggat

SEQ ID NO: 1485434 - DNA, 15 bp, Homo sapiens
ggagcccatgggatt

SEQ ID NO: 1485435 - DNA, 15 bp, Homo sapiens
gagcccatgggattt

SEQ ID NO: 1485436 - DNA, 15 bp, Homo sapiens
agcccatgggatttg

SEQ ID NO: 1485437 - DNA, 15 bp, Homo sapiens
gcccatgggatttgc

SEQ ID NO: 1485438 - DNA, 15 bp, Homo sapiens
cccatgggatttgca

SEQ ID NO: 1485439 - DNA, 15 bp, Homo sapiens
ccatgggatttgcat

SEQ ID NO: 1485440 - DNA, 15 bp, Homo sapiens
catgggatttgcatt

SEQ ID NO: 1485441 - DNA, 15 bp, Homo sapiens
atgggatttgcattt

SEQ ID NO: 1485442 - DNA, 15 bp, Homo sapiens
tgggatttgcatttc

SEQ ID NO: 1485443 - DNA, 15 bp, Homo sapiens
gggatttgcatttca

SEQ ID NO: 1485444 - DNA, 15 bp, Homo sapiens
ggatttgcatttcag

SEQ ID NO: 1485445 - DNA, 15 bp, Homo sapiens
gatttgcatttcagg

SEQ ID NO: 1485446 - DNA, 15 bp, Homo sapiens
atttgcatttcaggc

SEQ ID NO: 1485447 - DNA, 15 bp, Homo sapiens
tttgcatttcaggct

SEQ ID NO: 1485448 - DNA, 15 bp, Homo sapiens
ttgcatttcaggctc

SEQ ID NO: 1485449 - DNA, 15 bp, Homo sapiens
tgcatttcaggctct

SEQ ID NO: 1485450 - DNA, 15 bp, Homo sapiens
gcatttcaggctcta

SEQ ID NO: 1485451 - DNA, 15 bp, Homo sapiens
catttcaggctctat

SEQ ID NO: 1485452 - DNA, 15 bp, Homo sapiens
atttcaggctctatc

SEQ ID NO: 1485453 - DNA, 15 bp, Homo sapiens
tttcaggctctatca

SEQ ID NO: 1485454 - DNA, 15 bp, Homo sapiens
ttcaggctctatcat

SEQ ID NO: 1485455 - DNA, 15 bp, Homo sapiens
tcaggctctatcatc

SEQ ID NO: 1485456 - DNA, 15 bp, Homo sapiens
caggctctatcatca

SEQ ID NO: 1485457 - DNA, 15 bp, Homo sapiens
aggctctatcatcac

SEQ ID NO: 1485458 - DNA, 15 bp, Homo sapiens
ggctctatcatcacc

SEQ ID NO: 1485459 - DNA, 15 bp, Homo sapiens
gctctatcatcacca

SEQ ID NO: 1485460 - DNA, 15 bp, Homo sapiens
ctctatcatcaccaa

SEQ ID NO: 1485461 - DNA, 15 bp, Homo sapiens
tctatcatcaccaaa

SEQ ID NO: 1485462 - DNA, 15 bp, Homo sapiens
ctatcatcaccaaat

SEQ ID NO: 1485463 - DNA, 15 bp, Homo sapiens
tatcatcaccaaatc

SEQ ID NO: 1485464 - DNA, 15 bp, Homo sapiens
atcatcaccaaatct

SEQ ID NO: 1485465 - DNA, 15 bp, Homo sapiens
tcatcaccaaatcta

SEQ ID NO: 1485466 - DNA, 15 bp, Homo sapiens
catcaccaaatctac

SEQ ID NO: 1485467 - DNA, 15 bp, Homo sapiens
atcaccaaatctact

SEQ ID NO: 1485468 - DNA, 15 bp, Homo sapiens
tcaccaaatctactt

SEQ ID NO: 1485469 - DNA, 15 bp, Homo sapiens
caccaaatctactta

SEQ ID NO: 1485470 - DNA, 15 bp, Homo sapiens
accaaatctacttat

SEQ ID NO: 1485471 - DNA, 15 bp, Homo sapiens
ccaaatctacttatt

SEQ ID NO: 1485472 - DNA, 15 bp, Homo sapiens
caaatctacttatta

SEQ ID NO: 1485473 - DNA, 15 bp, Homo sapiens
aaatctacttattag

SEQ ID NO: 1485474 - DNA, 15 bp, Homo sapiens
aatctacttattagt

SEQ ID NO: 1485475 - DNA, 15 bp, Homo sapiens
atctacttattagta

SEQ ID NO: 1485476 - DNA, 15 bp, Homo sapiens
tctacttattagtag

SEQ ID NO: 1485477 - DNA, 15 bp, Homo sapiens
ctacttattagtagt

SEQ ID NO: 1485478 - DNA, 15 bp, Homo sapiens
tacttattagtagtt

SEQ ID NO: 1485479 - DNA, 15 bp, Homo sapiens
acttattagtagttt

SEQ ID NO: 1485480 - DNA, 15 bp, Homo sapiens
cttattagtagttta

SEQ ID NO: 1485481 - DNA, 15 bp, Homo sapiens
ttattagtagtttag

SEQ ID NO: 1485482 - DNA, 15 bp, Homo sapiens
tattagtagtttagg

SEQ ID NO: 1485483 - DNA, 15 bp, Homo sapiens
attagtagtttaggc

SEQ ID NO: 1485484 - DNA, 15 bp, Homo sapiens
ttagtagtttaggca

SEQ ID NO: 1485485 - DNA, 15 bp, Homo sapiens
tagtagtttaggcaa

SEQ ID NO: 1485486 - DNA, 15 bp, Homo sapiens
agtagtttaggcaac

SEQ ID NO: 1485487 - DNA, 15 bp, Homo sapiens
gtagtttaggcaact

SEQ ID NO: 1485488 - DNA, 15 bp, Homo sapiens
tagtttaggcaacta

SEQ ID NO: 1485489 - DNA, 15 bp, Homo sapiens
agtttaggcaactaa

SEQ ID NO: 1485490 - DNA, 15 bp, Homo sapiens
gtttaggcaactaat

SEQ ID NO: 1485491 - DNA, 15 bp, Homo sapiens
tttaggcaactaatc

SEQ ID NO: 1485492 - DNA, 15 bp, Homo sapiens
ttaggcaactaatct

SEQ ID NO: 1485493 - DNA, 15 bp, Homo sapiens
taggcaactaatctt

SEQ ID NO: 1485494 - DNA, 15 bp, Homo sapiens
aggcaactaatcttt

SEQ ID NO: 1485495 - DNA, 15 bp, Homo sapiens
ggcaactaatctttt

SEQ ID NO: 1485496 - DNA, 15 bp, Homo sapiens
gcaactaatctttta

SEQ ID NO: 1485497 - DNA, 15 bp, Homo sapiens
actaatcttttaaac

SEQ ID NO: 1485498 - DNA, 15 bp, Homo sapiens
ctaatcttttaaaca

SEQ ID NO: 1485499 - DNA, 15 bp, Homo sapiens
taatcttttaaacaa

SEQ ID NO: 1485500 - DNA, 15 bp, Homo sapiens
aatcttttaaacaat

SEQ ID NO: 1485501 - DNA, 15 bp, Homo sapiens
atcttttaaacaatc

SEQ ID NO: 1485502 - DNA, 15 bp, Homo sapiens
tcttttaaacaatca

SEQ ID NO: 1485503 - DNA, 15 bp, Homo sapiens
cttttaaacaatcaa

SEQ ID NO: 1485504 - DNA, 15 bp, Homo sapiens
ttttaaacaatcaac

SEQ ID NO: 1485505 - DNA, 15 bp, Homo sapiens
tttaaacaatcaaca

SEQ ID NO: 1485506 - DNA, 15 bp, Homo sapiens
ttaaacaatcaacat

SEQ ID NO: 1485507 - DNA, 15 bp, Homo sapiens
taaacaatcaacatt

SEQ ID NO: 1485508 - DNA, 15 bp, Homo sapiens
aaacaatcaacattc

SEQ ID NO: 1485509 - DNA, 15 bp, Homo sapiens
aacaatcaacattcg

SEQ ID NO: 1485510 - DNA, 15 bp, Homo sapiens
acaatcaacattcgg

SEQ ID NO: 1485511 - DNA, 15 bp, Homo sapiens
caatcaacattcgga

SEQ ID NO: 1485512 - DNA, 15 bp, Homo sapiens
aatcaacattcggag

SEQ ID NO: 1485513 - DNA, 15 bp, Homo sapiens
atcaacattcggaga

SEQ ID NO: 1485514 - DNA, 15 bp, Homo sapiens
tcaacattcggagaa

SEQ ID NO: 1485515 - DNA, 15 bp, Homo sapiens
caacattcggagaag

SEQ ID NO: 1485516 - DNA, 15 bp, Homo sapiens
aacattcggagaagt

SEQ ID NO: 1485517 - DNA, 15 bp, Homo sapiens
acattcggagaagta

SEQ ID NO: 1485518 - DNA, 15 bp, Homo sapiens
cattcggagaagtag

SEQ ID NO: 1485519 - DNA, 15 bp, Homo sapiens
attcggagaagtagg

SEQ ID NO: 1485520 - DNA, 15 bp, Homo sapiens
ttcggagaagtaggt

SEQ ID NO: 1485521 - DNA, 15 bp, Homo sapiens
tcggagaagtaggta

SEQ ID NO: 1485522 - DNA, 15 bp, Homo sapiens
cggagaagtaggtat

SEQ ID NO: 1485523 - DNA, 15 bp, Homo sapiens
ggagaagtaggtatc

SEQ ID NO: 1485524 - DNA, 15 bp, Homo sapiens
gagaagtaggtatcg

SEQ ID NO: 1485525 - DNA, 15 bp, Homo sapiens
agaagtaggtatcgc

SEQ ID NO: 1485526 - DNA, 15 bp, Homo sapiens
gaagtaggtatcgct

SEQ ID NO: 1485527 - DNA, 15 bp, Homo sapiens
aagtaggtatcgctc

SEQ ID NO: 1485528 - DNA, 15 bp, Homo sapiens
agtaggtatcgctct

SEQ ID NO: 1485529 - DNA, 15 bp, Homo sapiens
gtaggtatcgctctg

SEQ ID NO: 1485530 - DNA, 15 bp, Homo sapiens
taggtatcgctctgg

SEQ ID NO: 1485531 - DNA, 15 bp, Homo sapiens
aggtatcgctctggc

SEQ ID NO: 1485532 - DNA, 15 bp, Homo sapiens
ggtatcgctctggct

SEQ ID NO: 1485533 - DNA, 15 bp, Homo sapiens
gtatcgctctggctt

SEQ ID NO: 1485534 - DNA, 15 bp, Homo sapiens
tatcgctctggcttt

SEQ ID NO: 1485535 - DNA, 15 bp, Homo sapiens
atcgctctggcttta

SEQ ID NO: 1485536 - DNA, 15 bp, Homo sapiens
tcgctctggctttat

SEQ ID NO: 1485537 - DNA, 15 bp, Homo sapiens
cgctctggctttatc

SEQ ID NO: 1485538 - DNA, 15 bp, Homo sapiens
gctctggctttatct

SEQ ID NO: 1485539 - DNA, 15 bp, Homo sapiens
ctctggctttatctg

SEQ ID NO: 1485540 - DNA, 15 bp, Homo sapiens
tctggctttatctga

SEQ ID NO: 1485541 - DNA, 15 bp, Homo sapiens
ctggctttatctgaa

SEQ ID NO: 1485542 - DNA, 15 bp, Homo sapiens
tggctttatctgaac

SEQ ID NO: 1485543 - DNA, 15 bp, Homo sapiens
ggctttatctgaact

SEQ ID NO: 1485544 - DNA, 15 bp, Homo sapiens
gctttatctgaactc

SEQ ID NO: 1485545 - DNA, 15 bp, Homo sapiens
ctttatctgaactcc

SEQ ID NO: 1485546 - DNA, 15 bp, Homo sapiens
tttatctgaactccc

SEQ ID NO: 1485547 - DNA, 15 bp, Homo sapiens
ttatctgaactccct

SEQ ID NO: 1485548 - DNA, 15 bp, Homo sapiens
tatctgaactccctc

SEQ ID NO: 1485549 - DNA, 15 bp, Homo sapiens
atctgaactccctct

SEQ ID NO: 1485550 - DNA, 15 bp, Homo sapiens
tctgaactccctctt

SEQ ID NO: 1485551 - DNA, 15 bp, Homo sapiens
ctgaactccctcttg

SEQ ID NO: 1485552 - DNA, 15 bp, Homo sapiens
tgaactccctcttga

SEQ ID NO: 1485553 - DNA, 15 bp, Homo sapiens
gaactccctcttgac

SEQ ID NO: 1485554 - DNA, 15 bp, Homo sapiens
aactccctcttgacc

SEQ ID NO: 1485555 - DNA, 15 bp, Homo sapiens
actccctcttgaccc

SEQ ID NO: 1485556 - DNA, 15 bp, Homo sapiens
ctccctcttgaccca

SEQ ID NO: 1485557 - DNA, 15 bp, Homo sapiens
tccctcttgacccat

SEQ ID NO: 1485558 - DNA, 15 bp, Homo sapiens
ccctcttgacccatc

SEQ ID NO: 1485559 - DNA, 15 bp, Homo sapiens
cctcttgacccatct

SEQ ID NO: 1485560 - DNA, 15 bp, Homo sapiens
ctcttgacccatctc

SEQ ID NO: 1485561 - DNA, 15 bp, Homo sapiens
tcttgacccatctcc

SEQ ID NO: 1485562 - DNA, 15 bp, Homo sapiens
cttgacccatctcca

SEQ ID NO: 1485563 - DNA, 15 bp, Homo sapiens
ttgacccatctccaa

SEQ ID NO: 1485564 - DNA, 15 bp, Homo sapiens
tgacccatctccaac

SEQ ID NO: 1485565 - DNA, 15 bp, Homo sapiens
gacccatctccaacc

SEQ ID NO: 1485566 - DNA, 15 bp, Homo sapiens
acccatctccaaccc

SEQ ID NO: 1485567 - DNA, 15 bp, Homo sapiens
cccatctccaaccca

SEQ ID NO: 1485568 - DNA, 15 bp, Homo sapiens
ccatctccaacccaa

SEQ ID NO: 1485569 - DNA, 15 bp, Homo sapiens
catctccaacccaat

SEQ ID NO: 1485570 - DNA, 15 bp, Homo sapiens
atctccaacccaatg

SEQ ID NO: 1485571 - DNA, 15 bp, Homo sapiens
tctccaacccaatgg

SEQ ID NO: 1485572 - DNA, 15 bp, Homo sapiens
ctccaacccaatggt

SEQ ID NO: 1485573 - DNA, 15 bp, Homo sapiens
tccaacccaatggtt

SEQ ID NO: 1485574 - DNA, 15 bp, Homo sapiens
ccaacccaatggttc

SEQ ID NO: 1485575 - DNA, 15 bp, Homo sapiens
caacccaatggttct

SEQ ID NO: 1485576 - DNA, 15 bp, Homo sapiens
aacccaatggttctc

SEQ ID NO: 1485577 - DNA, 15 bp, Homo sapiens
acccaatggttctca

SEQ ID NO: 1485578 - DNA, 15 bp, Homo sapiens
cccaatggttctcac

SEQ ID NO: 1485579 - DNA, 15 bp, Homo sapiens
ccaatggttctcacg

SEQ ID NO: 1485580 - DNA, 15 bp, Homo sapiens
caatggttctcacgc

SEQ ID NO: 1485581 - DNA, 15 bp, Homo sapiens
aatggttctcacgcc

SEQ ID NO: 1485582 - DNA, 15 bp, Homo sapiens
atggttctcacgcca

SEQ ID NO: 1485583 - DNA, 15 bp, Homo sapiens
tggttctcacgccat

SEQ ID NO: 1485584 - DNA, 15 bp, Homo sapiens
ggttctcacgccatt

SEQ ID NO: 1485585 - DNA, 15 bp, Homo sapiens
gttctcacgccattt

SEQ ID NO: 1485586 - DNA, 15 bp, Homo sapiens
ttctcacgccatttc

SEQ ID NO: 1485587 - DNA, 15 bp, Homo sapiens
tctcacgccatttct

SEQ ID NO: 1485588 - DNA, 15 bp, Homo sapiens
ctcacgccatttctc

SEQ ID NO: 1485589 - DNA, 15 bp, Homo sapiens
tcacgccatttctca

SEQ ID NO: 1485590 - DNA, 15 bp, Homo sapiens
cacgccatttctcag

SEQ ID NO: 1485591 - DNA, 15 bp, Homo sapiens
acgccatttctcagc

SEQ ID NO: 1485592 - DNA, 15 bp, Homo sapiens
cgccatttctcagca

SEQ ID NO: 1485593 - DNA, 15 bp, Homo sapiens
gccatttctcagcat

SEQ ID NO: 1485594 - DNA, 15 bp, Homo sapiens
ccatttctcagcatt

SEQ ID NO: 1485595 - DNA, 15 bp, Homo sapiens
catttctcagcattg

SEQ ID NO: 1485596 - DNA, 15 bp, Homo sapiens
atttctcagcattgg

SEQ ID NO: 1485597 - DNA, 15 bp, Homo sapiens
tttctcagcattggc

SEQ ID NO: 1485598 - DNA, 15 bp, Homo sapiens
ttctcagcattggcc

SEQ ID NO: 1485599 - DNA, 15 bp, Homo sapiens
tctcagcattggcct

SEQ ID NO: 1485600 - DNA, 15 bp, Homo sapiens
ctcagcattggcctt

SEQ ID NO: 1485601 - DNA, 15 bp, Homo sapiens
tcagcattggccttc

SEQ ID NO: 1485602 - DNA, 15 bp, Homo sapiens
cagcattggccttca

SEQ ID NO: 1485603 - DNA, 15 bp, Homo sapiens
agcattggccttcat

SEQ ID NO: 1485604 - DNA, 15 bp, Homo sapiens
gcattggccttcatt

SEQ ID NO: 1485605 - DNA, 15 bp, Homo sapiens
cattggccttcatta

SEQ ID NO: 1485606 - DNA, 15 bp, Homo sapiens
attggccttcattaa

SEQ ID NO: 1485607 - DNA, 15 bp, Homo sapiens
ttggccttcattaaa

SEQ ID NO: 1485608 - DNA, 15 bp, Homo sapiens
tggccttcattaaaa

SEQ ID NO: 1485609 - DNA, 15 bp, Homo sapiens
ggccttcattaaaat

SEQ ID NO: 1485610 - DNA, 15 bp, Homo sapiens
gccttcattaaaatt

SEQ ID NO: 1485611 - DNA, 15 bp, Homo sapiens
ccttcattaaaattt

SEQ ID NO: 1485612 - DNA, 15 bp, Homo sapiens
cttcattaaaatttt

SEQ ID NO: 1485613 - DNA, 15 bp, Homo sapiens
ttcattaaaattttt

SEQ ID NO: 1485614 - DNA, 15 bp, Homo sapiens
tcattaaaatttttt

SEQ ID NO: 1485615 - DNA, 15 bp, Homo sapiens
cattaaaattttttt

SEQ ID NO: 1485616 - DNA, 15 bp, Homo sapiens
attaaaatttttttt

SEQ ID NO: 1485617 - DNA, 15 bp, Homo sapiens
ttaaaatttttttta

SEQ ID NO: 1485618 - DNA, 15 bp, Homo sapiens
taaaattttttttaa

SEQ ID NO: 1485619 - DNA, 15 bp, Homo sapiens
aaaattttttttaac

SEQ ID NO: 1485620 - DNA, 15 bp, Homo sapiens
aaattttttttaact

SEQ ID NO: 1485621 - DNA, 15 bp, Homo sapiens
aattttttttaactt

SEQ ID NO: 1485622 - DNA, 15 bp, Homo sapiens
attttttttaacttt

SEQ ID NO: 1485623 - DNA, 15 bp, Homo sapiens
ttttttttaactttt

SEQ ID NO: 1485624 - DNA, 15 bp, Homo sapiens
tttttttaacttttt

SEQ ID NO: 1485625 - DNA, 15 bp, Homo sapiens
ttttttaactttttt

SEQ ID NO: 1485626 - DNA, 15 bp, Homo sapiens
tttttaacttttttt

SEQ ID NO: 1485627 - DNA, 15 bp, Homo sapiens
ttttaactttttttt

SEQ ID NO: 1485628 - DNA, 15 bp, Homo sapiens
tttaacttttttttt

SEQ ID NO: 1485629 - DNA, 15 bp, Homo sapiens
ttaactttttttttt

SEQ ID NO: 1485630 - DNA, 15 bp, Homo sapiens
taacttttttttttt

SEQ ID NO: 1485631 - DNA, 15 bp, Homo sapiens
ttttttttgagacac

SEQ ID NO: 1485632 - DNA, 15 bp, Homo sapiens
tttttttgagacact

SEQ ID NO: 1485633 - DNA, 15 bp, Homo sapiens
ttttttgagacactg

SEQ ID NO: 1485634 - DNA, 15 bp, Homo sapiens
tttttgagacactgt

SEQ ID NO: 1485635 - DNA, 15 bp, Homo sapiens
ttttgagacactgtc

SEQ ID NO: 1485636 - DNA, 15 bp, Homo sapiens
tttgagacactgtct

SEQ ID NO: 1485637 - DNA, 15 bp, Homo sapiens
ttgagacactgtctt

SEQ ID NO: 1485638 - DNA, 15 bp, Homo sapiens
tgagacactgtctta

SEQ ID NO: 1485639 - DNA, 15 bp, Homo sapiens
gagacactgtcttac

SEQ ID NO: 1485640 - DNA, 15 bp, Homo sapiens
agacactgtcttact

SEQ ID NO: 1485641 - DNA, 15 bp, Homo sapiens
gacactgtcttactc

SEQ ID NO: 1485642 - DNA, 15 bp, Homo sapiens
acactgtcttactct

SEQ ID NO: 1485643 - DNA, 15 bp, Homo sapiens
cactgtcttactctg

SEQ ID NO: 1485644 - DNA, 15 bp, Homo sapiens
actgtcttactctgt

SEQ ID NO: 1485645 - DNA, 15 bp, Homo sapiens
ctgtcttactctgtt

SEQ ID NO: 1485646 - DNA, 15 bp, Homo sapiens
tgtcttactctgttg

SEQ ID NO: 1485647 - DNA, 15 bp, Homo sapiens
ttgcccaggatggat

SEQ ID NO: 1485648 - DNA, 15 bp, Homo sapiens
tgcccaggatggatg

SEQ ID NO: 1485649 - DNA, 15 bp, Homo sapiens
gcccaggatggatgg

SEQ ID NO: 1485650 - DNA, 15 bp, Homo sapiens
cccaggatggatggt

SEQ ID NO: 1485651 - DNA, 15 bp, Homo sapiens
ccaggatggatggta

SEQ ID NO: 1485652 - DNA, 15 bp, Homo sapiens
caggatggatggtat

SEQ ID NO: 1485653 - DNA, 15 bp, Homo sapiens
aggatggatggtatg

SEQ ID NO: 1485654 - DNA, 15 bp, Homo sapiens
ggatggatggtatga

SEQ ID NO: 1485655 - DNA, 15 bp, Homo sapiens
gatggatggtatgat

SEQ ID NO: 1485656 - DNA, 15 bp, Homo sapiens
atggatggtatgatc

SEQ ID NO: 1485657 - DNA, 15 bp, Homo sapiens
tggatggtatgatca

SEQ ID NO: 1485658 - DNA, 15 bp, Homo sapiens
ggatggtatgatcat

SEQ ID NO: 1485659 - DNA, 15 bp, Homo sapiens
gatggtatgatcatg

SEQ ID NO: 1485660 - DNA, 15 bp, Homo sapiens
atggtatgatcatgg

SEQ ID NO: 1485661 - DNA, 15 bp, Homo sapiens
tggtatgatcatggc

SEQ ID NO: 1485662 - DNA, 15 bp, Homo sapiens
ggtatgatcatggct

SEQ ID NO: 1485663 - DNA, 15 bp, Homo sapiens
gtatgatcatggctc

SEQ ID NO: 1485664 - DNA, 15 bp, Homo sapiens
tatgatcatggctca

SEQ ID NO: 1485665 - DNA, 15 bp, Homo sapiens
atgatcatggctcac

SEQ ID NO: 1485666 - DNA, 15 bp, Homo sapiens
tgatcatggctcact

SEQ ID NO: 1485667 - DNA, 15 bp, Homo sapiens
ctcctgggctcaggt

SEQ ID NO: 1485668 - DNA, 15 bp, Homo sapiens
tcctgggctcaggtg

SEQ ID NO: 1485669 - DNA, 15 bp, Homo sapiens
cctgggctcaggtga

SEQ ID NO: 1485670 - DNA, 15 bp, Homo sapiens
ctgggctcaggtgat

SEQ ID NO: 1485671 - DNA, 15 bp, Homo sapiens
tgggctcaggtgatc

SEQ ID NO: 1485672 - DNA, 15 bp, Homo sapiens
ctcaggtgatcctct

SEQ ID NO: 1485673 - DNA, 15 bp, Homo sapiens
tcaggtgatcctctc

SEQ ID NO: 1485674 - DNA, 15 bp, Homo sapiens
caggtgatcctctca

SEQ ID NO: 1485675 - DNA, 15 bp, Homo sapiens
aggtgatcctctcac

SEQ ID NO: 1485676 - DNA, 15 bp, Homo sapiens
ggtgatcctctcacc

SEQ ID NO: 1485677 - DNA, 15 bp, Homo sapiens
gtgatcctctcacct

SEQ ID NO: 1485678 - DNA, 15 bp, Homo sapiens
tgatcctctcacctc

SEQ ID NO: 1485679 - DNA, 15 bp, Homo sapiens
gatcctctcacctca

SEQ ID NO: 1485680 - DNA, 15 bp, Homo sapiens
atcctctcacctcag

SEQ ID NO: 1485681 - DNA, 15 bp, Homo sapiens
tcctctcacctcagt

SEQ ID NO: 1485682 - DNA, 15 bp, Homo sapiens
cctctcacctcagtt

SEQ ID NO: 1485683 - DNA, 15 bp, Homo sapiens
ctctcacctcagttt

SEQ ID NO: 1485684 - DNA, 15 bp, Homo sapiens
tctcacctcagtttt

SEQ ID NO: 1485685 - DNA, 15 bp, Homo sapiens
ctcacctcagttttc

SEQ ID NO: 1485686 - DNA, 15 bp, Homo sapiens
tcacctcagttttcc

SEQ ID NO: 1485687 - DNA, 15 bp, Homo sapiens
cacctcagttttcca

SEQ ID NO: 1485688 - DNA, 15 bp, Homo sapiens
acctcagttttccaa

SEQ ID NO: 1485689 - DNA, 15 bp, Homo sapiens
cctcagttttccaag

SEQ ID NO: 1485690 - DNA, 15 bp, Homo sapiens
ctcagttttccaagt

SEQ ID NO: 1485691 - DNA, 15 bp, Homo sapiens
tcagttttccaagta

SEQ ID NO: 1485692 - DNA, 15 bp, Homo sapiens
cagttttccaagtag

SEQ ID NO: 1485693 - DNA, 15 bp, Homo sapiens
agttttccaagtagc

SEQ ID NO: 1485694 - DNA, 15 bp, Homo sapiens
gttttccaagtagct

SEQ ID NO: 1485695 - DNA, 15 bp, Homo sapiens
ttttccaagtagcta

SEQ ID NO: 1485696 - DNA, 15 bp, Homo sapiens
tttccaagtagctag

SEQ ID NO: 1485697 - DNA, 15 bp, Homo sapiens
ttccaagtagctagg

SEQ ID NO: 1485698 - DNA, 15 bp, Homo sapiens
tccaagtagctagga

SEQ ID NO: 1485699 - DNA, 15 bp, Homo sapiens
ccaagtagctaggac

SEQ ID NO: 1485700 - DNA, 15 bp, Homo sapiens
caagtagctaggacc

SEQ ID NO: 1485701 - DNA, 15 bp, Homo sapiens
aagtagctaggacca

SEQ ID NO: 1485702 - DNA, 15 bp, Homo sapiens
agtagctaggaccac

SEQ ID NO: 1485703 - DNA, 15 bp, Homo sapiens
gtagctaggaccaca

SEQ ID NO: 1485704 - DNA, 15 bp, Homo sapiens
agctaggaccacaga

SEQ ID NO: 1485705 - DNA, 15 bp, Homo sapiens
gctaggaccacagac

SEQ ID NO: 1485706 - DNA, 15 bp, Homo sapiens
ctaggaccacagaca

SEQ ID NO: 1485707 - DNA, 15 bp, Homo sapiens
taggaccacagacac

SEQ ID NO: 1485708 - DNA, 15 bp, Homo sapiens
aggaccacagacaca

SEQ ID NO: 1485709 - DNA, 15 bp, Homo sapiens
ggaccacagacacac

SEQ ID NO: 1485710 - DNA, 15 bp, Homo sapiens
gaccacagacacacc

SEQ ID NO: 1485711 - DNA, 15 bp, Homo sapiens
accacagacacacca

SEQ ID NO: 1485712 - DNA, 15 bp, Homo sapiens
ccacagacacaccac

SEQ ID NO: 1485713 - DNA, 15 bp, Homo sapiens
cacagacacaccacc

SEQ ID NO: 1485714 - DNA, 15 bp, Homo sapiens
acagacacaccacca

SEQ ID NO: 1485715 - DNA, 15 bp, Homo sapiens
cagacacaccaccac

SEQ ID NO: 1485716 - DNA, 15 bp, Homo sapiens
agacacaccaccaca

SEQ ID NO: 1485717 - DNA, 15 bp, Homo sapiens
gacacaccaccacac

SEQ ID NO: 1485718 - DNA, 15 bp, Homo sapiens
acaccaccacacctt

SEQ ID NO: 1485719 - DNA, 15 bp, Homo sapiens
caccaccacaccttt

SEQ ID NO: 1485720 - DNA, 15 bp, Homo sapiens
accaccacacctttt

SEQ ID NO: 1485721 - DNA, 15 bp, Homo sapiens
ccaccacaccttttt

SEQ ID NO: 1485722 - DNA, 15 bp, Homo sapiens
caccacacctttttt

SEQ ID NO: 1485723 - DNA, 15 bp, Homo sapiens
accacaccttttttt

SEQ ID NO: 1485724 - DNA, 15 bp, Homo sapiens
ccacacctttttttt

SEQ ID NO: 1485725 - DNA, 15 bp, Homo sapiens
cacacctttttttta

SEQ ID NO: 1485726 - DNA, 15 bp, Homo sapiens
acaccttttttttat

SEQ ID NO: 1485727 - DNA, 15 bp, Homo sapiens
caccttttttttatt

SEQ ID NO: 1485728 - DNA, 15 bp, Homo sapiens
accttttttttattt

SEQ ID NO: 1485729 - DNA, 15 bp, Homo sapiens
ccttttttttatttt

SEQ ID NO: 1485730 - DNA, 15 bp, Homo sapiens
cttttttttattttt

SEQ ID NO: 1485731 - DNA, 15 bp, Homo sapiens
ttttttattttttat

SEQ ID NO: 1485732 - DNA, 15 bp, Homo sapiens
tttttattttttatt

SEQ ID NO: 1485733 - DNA, 15 bp, Homo sapiens
ttttattttttattt

SEQ ID NO: 1485734 - DNA, 15 bp, Homo sapiens
tttattttttatttt

SEQ ID NO: 1485735 - DNA, 15 bp, Homo sapiens
ttattttttattttt

SEQ ID NO: 1485736 - DNA, 15 bp, Homo sapiens
tattttttattttta

SEQ ID NO: 1485737 - DNA, 15 bp, Homo sapiens
attttttatttttat

SEQ ID NO: 1485738 - DNA, 15 bp, Homo sapiens
ttttttatttttatt

SEQ ID NO: 1485739 - DNA, 15 bp, Homo sapiens
ttatttatttttttg

SEQ ID NO: 1485740 - DNA, 15 bp, Homo sapiens
tatttatttttttga

SEQ ID NO: 1485741 - DNA, 15 bp, Homo sapiens
atttatttttttgag

SEQ ID NO: 1485742 - DNA, 15 bp, Homo sapiens
tatttttttgagacg

SEQ ID NO: 1485743 - DNA, 15 bp, Homo sapiens
atttttttgagacgg

SEQ ID NO: 1485744 - DNA, 15 bp, Homo sapiens
tgtcgcccaggctga

SEQ ID NO: 1485745 - DNA, 15 bp, Homo sapiens
gtcgcccaggctgaa

SEQ ID NO: 1485746 - DNA, 15 bp, Homo sapiens
tcgcccaggctgaag

SEQ ID NO: 1485747 - DNA, 15 bp, Homo sapiens
cgcccaggctgaagt

SEQ ID NO: 1485748 - DNA, 15 bp, Homo sapiens
gaagtgcagtggtgt

SEQ ID NO: 1485749 - DNA, 15 bp, Homo sapiens
aagtgcagtggtgtg

SEQ ID NO: 1485750 - DNA, 15 bp, Homo sapiens
caagctctgcctccc

SEQ ID NO: 1485751 - DNA, 15 bp, Homo sapiens
aagctctgcctcccg

SEQ ID NO: 1485752 - DNA, 15 bp, Homo sapiens
agctctgcctcccgg

SEQ ID NO: 1485753 - DNA, 15 bp, Homo sapiens
gctctgcctcccggg

SEQ ID NO: 1485754 - DNA, 15 bp, Homo sapiens
cacgccattctccca

SEQ ID NO: 1485755 - DNA, 15 bp, Homo sapiens
acgccattctcccac

SEQ ID NO: 1485756 - DNA, 15 bp, Homo sapiens
cgccattctcccacc

SEQ ID NO: 1485757 - DNA, 15 bp, Homo sapiens
gccattctcccacct

SEQ ID NO: 1485758 - DNA, 15 bp, Homo sapiens
ccattctcccacctc

SEQ ID NO: 1485759 - DNA, 15 bp, Homo sapiens
cattctcccacctca

SEQ ID NO: 1485760 - DNA, 15 bp, Homo sapiens
ccaccacgcctggtt

SEQ ID NO: 1485761 - DNA, 15 bp, Homo sapiens
caccacgcctggtta

SEQ ID NO: 1485762 - DNA, 15 bp, Homo sapiens
accacgcctggttaa

SEQ ID NO: 1485763 - DNA, 15 bp, Homo sapiens
ccacgcctggttaat

SEQ ID NO: 1485764 - DNA, 15 bp, Homo sapiens
cacgcctggttaatt

SEQ ID NO: 1485765 - DNA, 15 bp, Homo sapiens
acgcctggttaattt

SEQ ID NO: 1485766 - DNA, 15 bp, Homo sapiens
cgcctggttaatttt

SEQ ID NO: 1485767 - DNA, 15 bp, Homo sapiens
tttttgtattttttt

SEQ ID NO: 1485768 - DNA, 15 bp, Homo sapiens
agccaggatggtctt

SEQ ID NO: 1485769 - DNA, 15 bp, Homo sapiens
gccaggatggtcttg

SEQ ID NO: 1485770 - DNA, 15 bp, Homo sapiens
ccaggatggtcttga

SEQ ID NO: 1485771 - DNA, 15 bp, Homo sapiens
caggatggtcttgat

SEQ ID NO: 1485772 - DNA, 15 bp, Homo sapiens
aggatggtcttgatc

SEQ ID NO: 1485773 - DNA, 15 bp, Homo sapiens
ggatggtcttgatct

SEQ ID NO: 1485774 - DNA, 15 bp, Homo sapiens
gatggtcttgatctc

SEQ ID NO: 1485775 - DNA, 15 bp, Homo sapiens
atggtcttgatctct

SEQ ID NO: 1485776 - DNA, 15 bp, Homo sapiens
tggtcttgatctctt

SEQ ID NO: 1485777 - DNA, 15 bp, Homo sapiens
tgatctcttgacctc

SEQ ID NO: 1485778 - DNA, 15 bp, Homo sapiens
ggattacaggcgtgg

SEQ ID NO: 1485779 - DNA, 15 bp, Homo sapiens
gattacaggcgtggg

SEQ ID NO: 1485780 - DNA, 15 bp, Homo sapiens
attacaggcgtgggt

SEQ ID NO: 1485781 - DNA, 15 bp, Homo sapiens
ttacaggcgtgggtt

SEQ ID NO: 1485782 - DNA, 15 bp, Homo sapiens
tacaggcgtgggttt

SEQ ID NO: 1485783 - DNA, 15 bp, Homo sapiens
acaggcgtgggtttt

SEQ ID NO: 1485784 - DNA, 15 bp, Homo sapiens
caggcgtgggttttt

SEQ ID NO: 1485785 - DNA, 15 bp, Homo sapiens
aggcgtgggtttttt

SEQ ID NO: 1485786 - DNA, 15 bp, Homo sapiens
ggcgtgggttttttt

SEQ ID NO: 1485787 - DNA, 15 bp, Homo sapiens
gcgtgggtttttttt

SEQ ID NO: 1485788 - DNA, 15 bp, Homo sapiens
cgtgggttttttttt

SEQ ID NO: 1485789 - DNA, 15 bp, Homo sapiens
tgggttttttttttt

SEQ ID NO: 1485790 - DNA, 15 bp, Homo sapiens
gggtttttttttttg

SEQ ID NO: 1485791 - DNA, 15 bp, Homo sapiens
ggtttttttttttgg

SEQ ID NO: 1485792 - DNA, 15 bp, Homo sapiens
gtttttttttttggg

SEQ ID NO: 1485793 - DNA, 15 bp, Homo sapiens
tttttttttttgggt

SEQ ID NO: 1485794 - DNA, 15 bp, Homo sapiens
ttttttttttgggtt

SEQ ID NO: 1485795 - DNA, 15 bp, Homo sapiens
tttttttttgggttt

SEQ ID NO: 1485796 - DNA, 15 bp, Homo sapiens
ttttttttgggtttg

SEQ ID NO: 1485797 - DNA, 15 bp, Homo sapiens
tttttttgggtttgt

SEQ ID NO: 1485798 - DNA, 15 bp, Homo sapiens
ttttttgggtttgtt

SEQ ID NO: 1485799 - DNA, 15 bp, Homo sapiens
tttttgggtttgttt

SEQ ID NO: 1485800 - DNA, 15 bp, Homo sapiens
ttttgggtttgtttt

SEQ ID NO: 1485801 - DNA, 15 bp, Homo sapiens
tttgggtttgttttt

SEQ ID NO: 1485802 - DNA, 15 bp, Homo sapiens
ttgggtttgtttttt

SEQ ID NO: 1485803 - DNA, 15 bp, Homo sapiens
tgggtttgttttttt

SEQ ID NO: 1485804 - DNA, 15 bp, Homo sapiens
gggtttgtttttttt

SEQ ID NO: 1485805 - DNA, 15 bp, Homo sapiens
gtttttttttttttg

SEQ ID NO: 1485806 - DNA, 15 bp, Homo sapiens
tttttttttgtagag

SEQ ID NO: 1485807 - DNA, 15 bp, Homo sapiens
tttttttgtagagaa

SEQ ID NO: 1485808 - DNA, 15 bp, Homo sapiens
ttttttgtagagaaa

SEQ ID NO: 1485809 - DNA, 15 bp, Homo sapiens
tttttgtagagaaag

SEQ ID NO: 1485810 - DNA, 15 bp, Homo sapiens
ttttgtagagaaaga

SEQ ID NO: 1485811 - DNA, 15 bp, Homo sapiens
tttgtagagaaagag

SEQ ID NO: 1485812 - DNA, 15 bp, Homo sapiens
ttgtagagaaagagt

SEQ ID NO: 1485813 - DNA, 15 bp, Homo sapiens
tgtagagaaagagtt

SEQ ID NO: 1485814 - DNA, 15 bp, Homo sapiens
gtagagaaagagtta

SEQ ID NO: 1485815 - DNA, 15 bp, Homo sapiens
tagagaaagagttat

SEQ ID NO: 1485816 - DNA, 15 bp, Homo sapiens
agagaaagagttatg

SEQ ID NO: 1485817 - DNA, 15 bp, Homo sapiens
gagaaagagttatgc

SEQ ID NO: 1485818 - DNA, 15 bp, Homo sapiens
agaaagagttatgcc

SEQ ID NO: 1485819 - DNA, 15 bp, Homo sapiens
gaaagagttatgcca

SEQ ID NO: 1485820 - DNA, 15 bp, Homo sapiens
aaagagttatgccac

SEQ ID NO: 1485821 - DNA, 15 bp, Homo sapiens
aagagttatgccacg

SEQ ID NO: 1485822 - DNA, 15 bp, Homo sapiens
agagttatgccacgt

SEQ ID NO: 1485823 - DNA, 15 bp, Homo sapiens
gagttatgccacgtt

SEQ ID NO: 1485824 - DNA, 15 bp, Homo sapiens
agttatgccacgtta

SEQ ID NO: 1485825 - DNA, 15 bp, Homo sapiens
gttatgccacgttac

SEQ ID NO: 1485826 - DNA, 15 bp, Homo sapiens
ttatgccacgttacc

SEQ ID NO: 1485827 - DNA, 15 bp, Homo sapiens
tatgccacgttacct

SEQ ID NO: 1485828 - DNA, 15 bp, Homo sapiens
atgccacgttaccta

SEQ ID NO: 1485829 - DNA, 15 bp, Homo sapiens
tgccacgttacctag

SEQ ID NO: 1485830 - DNA, 15 bp, Homo sapiens
gccacgttacctagg

SEQ ID NO: 1485831 - DNA, 15 bp, Homo sapiens
ccacgttacctaggc

SEQ ID NO: 1485832 - DNA, 15 bp, Homo sapiens
cacgttacctaggct

SEQ ID NO: 1485833 - DNA, 15 bp, Homo sapiens
acgttacctaggctg

SEQ ID NO: 1485834 - DNA, 15 bp, Homo sapiens
cgttacctaggctgg

SEQ ID NO: 1485835 - DNA, 15 bp, Homo sapiens
ggctggtcttgaatg

SEQ ID NO: 1485836 - DNA, 15 bp, Homo sapiens
gctggtcttgaatgc

SEQ ID NO: 1485837 - DNA, 15 bp, Homo sapiens
ctggtcttgaatgcc

SEQ ID NO: 1485838 - DNA, 15 bp, Homo sapiens
tggtcttgaatgcct

SEQ ID NO: 1485839 - DNA, 15 bp, Homo sapiens
ggtcttgaatgcctg

SEQ ID NO: 1485840 - DNA, 15 bp, Homo sapiens
gtcttgaatgcctgg

SEQ ID NO: 1485841 - DNA, 15 bp, Homo sapiens
tcttgaatgcctggg

SEQ ID NO: 1485842 - DNA, 15 bp, Homo sapiens
cttgaatgcctgggc

SEQ ID NO: 1485843 - DNA, 15 bp, Homo sapiens
ttgaatgcctgggct

SEQ ID NO: 1485844 - DNA, 15 bp, Homo sapiens
tgaatgcctgggctc

SEQ ID NO: 1485845 - DNA, 15 bp, Homo sapiens
gaatgcctgggctca

SEQ ID NO: 1485846 - DNA, 15 bp, Homo sapiens
aatgcctgggctcaa

SEQ ID NO: 1485847 - DNA, 15 bp, Homo sapiens
atgcctgggctcaag

SEQ ID NO: 1485848 - DNA, 15 bp, Homo sapiens
tgcctgggctcaagc

SEQ ID NO: 1485849 - DNA, 15 bp, Homo sapiens
gcctgggctcaagca

SEQ ID NO: 1485850 - DNA, 15 bp, Homo sapiens
cctgggctcaagcat

SEQ ID NO: 1485851 - DNA, 15 bp, Homo sapiens
ctgggctcaagcatt

SEQ ID NO: 1485852 - DNA, 15 bp, Homo sapiens
tgggctcaagcattc

SEQ ID NO: 1485853 - DNA, 15 bp, Homo sapiens
gggctcaagcattcc

SEQ ID NO: 1485854 - DNA, 15 bp, Homo sapiens
ggctcaagcattcca

SEQ ID NO: 1485855 - DNA, 15 bp, Homo sapiens
gctcaagcattccac

SEQ ID NO: 1485856 - DNA, 15 bp, Homo sapiens
ctcaagcattccacc

SEQ ID NO: 1485857 - DNA, 15 bp, Homo sapiens
tcaagcattccaccc

SEQ ID NO: 1485858 - DNA, 15 bp, Homo sapiens
caagcattccacccg

SEQ ID NO: 1485859 - DNA, 15 bp, Homo sapiens
aagcattccacccgg

SEQ ID NO: 1485860 - DNA, 15 bp, Homo sapiens
agcattccacccggt

SEQ ID NO: 1485861 - DNA, 15 bp, Homo sapiens
gcattccacccggtt

SEQ ID NO: 1485862 - DNA, 15 bp, Homo sapiens
cattccacccggttc

SEQ ID NO: 1485863 - DNA, 15 bp, Homo sapiens
attccacccggttca

SEQ ID NO: 1485864 - DNA, 15 bp, Homo sapiens
ttccacccggttcag

SEQ ID NO: 1485865 - DNA, 15 bp, Homo sapiens
tccacccggttcagc

SEQ ID NO: 1485866 - DNA, 15 bp, Homo sapiens
ccacccggttcagcc

SEQ ID NO: 1485867 - DNA, 15 bp, Homo sapiens
cacccggttcagcct

SEQ ID NO: 1485868 - DNA, 15 bp, Homo sapiens
acccggttcagcctc

SEQ ID NO: 1485869 - DNA, 15 bp, Homo sapiens
cccggttcagcctcc

SEQ ID NO: 1485870 - DNA, 15 bp, Homo sapiens
ccggttcagcctcca

SEQ ID NO: 1485871 - DNA, 15 bp, Homo sapiens
cggttcagcctccaa

SEQ ID NO: 1485872 - DNA, 15 bp, Homo sapiens
ggttcagcctccaaa

SEQ ID NO: 1485873 - DNA, 15 bp, Homo sapiens
gttcagcctccaaaa

SEQ ID NO: 1485874 - DNA, 15 bp, Homo sapiens
ttcagcctccaaaag

SEQ ID NO: 1485875 - DNA, 15 bp, Homo sapiens
tcagcctccaaaagt

SEQ ID NO: 1485876 - DNA, 15 bp, Homo sapiens
cagcctccaaaagtg

SEQ ID NO: 1485877 - DNA, 15 bp, Homo sapiens
agcctccaaaagtgc

SEQ ID NO: 1485878 - DNA, 15 bp, Homo sapiens
gcctccaaaagtgct

SEQ ID NO: 1485879 - DNA, 15 bp, Homo sapiens
cctccaaaagtgctg

SEQ ID NO: 1485880 - DNA, 15 bp, Homo sapiens
ctccaaaagtgctgg

SEQ ID NO: 1485881 - DNA, 15 bp, Homo sapiens
tccaaaagtgctggg

SEQ ID NO: 1485882 - DNA, 15 bp, Homo sapiens
agtgctgggattatg

SEQ ID NO: 1485883 - DNA, 15 bp, Homo sapiens
gtgctgggattatgg

SEQ ID NO: 1485884 - DNA, 15 bp, Homo sapiens
tgctgggattatggg

SEQ ID NO: 1485885 - DNA, 15 bp, Homo sapiens
gctgggattatgggc

SEQ ID NO: 1485886 - DNA, 15 bp, Homo sapiens
ctgggattatgggca

SEQ ID NO: 1485887 - DNA, 15 bp, Homo sapiens
atgggcatgagccat

SEQ ID NO: 1485888 - DNA, 15 bp, Homo sapiens
tgggcatgagccatt

SEQ ID NO: 1485889 - DNA, 15 bp, Homo sapiens
gggcatgagccattg

SEQ ID NO: 1485890 - DNA, 15 bp, Homo sapiens
ggcatgagccattgt

SEQ ID NO: 1485891 - DNA, 15 bp, Homo sapiens
gcatgagccattgtg

SEQ ID NO: 1485892 - DNA, 15 bp, Homo sapiens
catgagccattgtgc

SEQ ID NO: 1485893 - DNA, 15 bp, Homo sapiens
atgagccattgtgcc

SEQ ID NO: 1485894 - DNA, 15 bp, Homo sapiens
tgagccattgtgccc

SEQ ID NO: 1485895 - DNA, 15 bp, Homo sapiens
gagccattgtgccca

SEQ ID NO: 1485896 - DNA, 15 bp, Homo sapiens
agccattgtgcccag

SEQ ID NO: 1485897 - DNA, 15 bp, Homo sapiens
gccattgtgcccagc

SEQ ID NO: 1485898 - DNA, 15 bp, Homo sapiens
ccattgtgcccagct

SEQ ID NO: 1485899 - DNA, 15 bp, Homo sapiens
cattgtgcccagctt

SEQ ID NO: 1485900 - DNA, 15 bp, Homo sapiens
attgtgcccagcttt

SEQ ID NO: 1485901 - DNA, 15 bp, Homo sapiens
ttgtgcccagctttt

SEQ ID NO: 1485902 - DNA, 15 bp, Homo sapiens
tgtgcccagcttttt

SEQ ID NO: 1485903 - DNA, 15 bp, Homo sapiens
gtgcccagcttttta

SEQ ID NO: 1485904 - DNA, 15 bp, Homo sapiens
tgcccagctttttaa

SEQ ID NO: 1485905 - DNA, 15 bp, Homo sapiens
gcccagctttttaaa

SEQ ID NO: 1485906 - DNA, 15 bp, Homo sapiens
cccagctttttaaac

SEQ ID NO: 1485907 - DNA, 15 bp, Homo sapiens
ccagctttttaaaca

SEQ ID NO: 1485908 - DNA, 15 bp, Homo sapiens
cagctttttaaacaa

SEQ ID NO: 1485909 - DNA, 15 bp, Homo sapiens
agctttttaaacaat

SEQ ID NO: 1485910 - DNA, 15 bp, Homo sapiens
gctttttaaacaatt

SEQ ID NO: 1485911 - DNA, 15 bp, Homo sapiens
ctttttaaacaattt

SEQ ID NO: 1485912 - DNA, 15 bp, Homo sapiens
tttttaaacaatttt

SEQ ID NO: 1485913 - DNA, 15 bp, Homo sapiens
ttttaaacaattttt

SEQ ID NO: 1485914 - DNA, 15 bp, Homo sapiens
tttaaacaatttttt

SEQ ID NO: 1485915 - DNA, 15 bp, Homo sapiens
ttaaacaattttttt

SEQ ID NO: 1485916 - DNA, 15 bp, Homo sapiens
taaacaatttttttc

SEQ ID NO: 1485917 - DNA, 15 bp, Homo sapiens
aaacaatttttttct

SEQ ID NO: 1485918 - DNA, 15 bp, Homo sapiens
aacaatttttttctt

SEQ ID NO: 1485919 - DNA, 15 bp, Homo sapiens
acaatttttttcttt

SEQ ID NO: 1485920 - DNA, 15 bp, Homo sapiens
caatttttttctttt

SEQ ID NO: 1485921 - DNA, 15 bp, Homo sapiens
tcttttttttctttg

SEQ ID NO: 1485922 - DNA, 15 bp, Homo sapiens
cttttttttctttgg

SEQ ID NO: 1485923 - DNA, 15 bp, Homo sapiens
ttttttttctttgga

SEQ ID NO: 1485924 - DNA, 15 bp, Homo sapiens
tttttttctttggag

SEQ ID NO: 1485925 - DNA, 15 bp, Homo sapiens
tttttctttggagac

SEQ ID NO: 1485926 - DNA, 15 bp, Homo sapiens
ttttctttggagaca

SEQ ID NO: 1485927 - DNA, 15 bp, Homo sapiens
tttctttggagacag

SEQ ID NO: 1485928 - DNA, 15 bp, Homo sapiens
ttctttggagacaga

SEQ ID NO: 1485929 - DNA, 15 bp, Homo sapiens
tctttggagacagag

SEQ ID NO: 1485930 - DNA, 15 bp, Homo sapiens
ctttggagacagagg

SEQ ID NO: 1485931 - DNA, 15 bp, Homo sapiens
tttggagacagaggc

SEQ ID NO: 1485932 - DNA, 15 bp, Homo sapiens
ttggagacagaggct

SEQ ID NO: 1485933 - DNA, 15 bp, Homo sapiens
tggagacagaggctc

SEQ ID NO: 1485934 - DNA, 15 bp, Homo sapiens
ggagacagaggctca

SEQ ID NO: 1485935 - DNA, 15 bp, Homo sapiens
gagacagaggctcac

SEQ ID NO: 1485936 - DNA, 15 bp, Homo sapiens
agacagaggctcact

SEQ ID NO: 1485937 - DNA, 15 bp, Homo sapiens
gacagaggctcactc

SEQ ID NO: 1485938 - DNA, 15 bp, Homo sapiens
acagaggctcactct

SEQ ID NO: 1485939 - DNA, 15 bp, Homo sapiens
cagaggctcactcta

SEQ ID NO: 1485940 - DNA, 15 bp, Homo sapiens
agaggctcactctat

SEQ ID NO: 1485941 - DNA, 15 bp, Homo sapiens
gaggctcactctatt

SEQ ID NO: 1485942 - DNA, 15 bp, Homo sapiens
aggctcactctattg

SEQ ID NO: 1485943 - DNA, 15 bp, Homo sapiens
ggctcactctattgc

SEQ ID NO: 1485944 - DNA, 15 bp, Homo sapiens
gctcactctattgcc

SEQ ID NO: 1485945 - DNA, 15 bp, Homo sapiens
ctcactctattgccc

SEQ ID NO: 1485946 - DNA, 15 bp, Homo sapiens
cactctattgcccaa

SEQ ID NO: 1485947 - DNA, 15 bp, Homo sapiens
actctattgcccaag

SEQ ID NO: 1485948 - DNA, 15 bp, Homo sapiens
ctctattgcccaagc

SEQ ID NO: 1485949 - DNA, 15 bp, Homo sapiens
tctattgcccaagcc

SEQ ID NO: 1485950 - DNA, 15 bp, Homo sapiens
ctattgcccaagcca

SEQ ID NO: 1485951 - DNA, 15 bp, Homo sapiens
tattgcccaagccag

SEQ ID NO: 1485952 - DNA, 15 bp, Homo sapiens
attgcccaagccaga

SEQ ID NO: 1485953 - DNA, 15 bp, Homo sapiens
ttgcccaagccagag

SEQ ID NO: 1485954 - DNA, 15 bp, Homo sapiens
tgcccaagccagagt

SEQ ID NO: 1485955 - DNA, 15 bp, Homo sapiens
gcccaagccagagtg

SEQ ID NO: 1485956 - DNA, 15 bp, Homo sapiens
cccaagccagagtgc

SEQ ID NO: 1485957 - DNA, 15 bp, Homo sapiens
ccaagccagagtgct

SEQ ID NO: 1485958 - DNA, 15 bp, Homo sapiens
caagccagagtgctg

SEQ ID NO: 1485959 - DNA, 15 bp, Homo sapiens
aagccagagtgctgt

SEQ ID NO: 1485960 - DNA, 15 bp, Homo sapiens
agccagagtgctgtg

SEQ ID NO: 1485961 - DNA, 15 bp, Homo sapiens
gccagagtgctgtgc

SEQ ID NO: 1485962 - DNA, 15 bp, Homo sapiens
ccagagtgctgtgcc

SEQ ID NO: 1485963 - DNA, 15 bp, Homo sapiens
cagagtgctgtgccg

SEQ ID NO: 1485964 - DNA, 15 bp, Homo sapiens
agagtgctgtgccgc

SEQ ID NO: 1485965 - DNA, 15 bp, Homo sapiens
gagtgctgtgccgct

SEQ ID NO: 1485966 - DNA, 15 bp, Homo sapiens
agtgctgtgccgcta

SEQ ID NO: 1485967 - DNA, 15 bp, Homo sapiens
gtgctgtgccgctac

SEQ ID NO: 1485968 - DNA, 15 bp, Homo sapiens
tgctgtgccgctaca

SEQ ID NO: 1485969 - DNA, 15 bp, Homo sapiens
gctgtgccgctacat

SEQ ID NO: 1485970 - DNA, 15 bp, Homo sapiens
ctgtgccgctacatc

SEQ ID NO: 1485971 - DNA, 15 bp, Homo sapiens
tgtgccgctacatcg

SEQ ID NO: 1485972 - DNA, 15 bp, Homo sapiens
gtgccgctacatcgg

SEQ ID NO: 1485973 - DNA, 15 bp, Homo sapiens
tgccgctacatcggc

SEQ ID NO: 1485974 - DNA, 15 bp, Homo sapiens
gccgctacatcggct

SEQ ID NO: 1485975 - DNA, 15 bp, Homo sapiens
ccgctacatcggctc

SEQ ID NO: 1485976 - DNA, 15 bp, Homo sapiens
cgctacatcggctca

SEQ ID NO: 1485977 - DNA, 15 bp, Homo sapiens
gctacatcggctcac

SEQ ID NO: 1485978 - DNA, 15 bp, Homo sapiens
ctacatcggctcaca

SEQ ID NO: 1485979 - DNA, 15 bp, Homo sapiens
tacatcggctcacag

SEQ ID NO: 1485980 - DNA, 15 bp, Homo sapiens
acatcggctcacagc

SEQ ID NO: 1485981 - DNA, 15 bp, Homo sapiens
catcggctcacagca

SEQ ID NO: 1485982 - DNA, 15 bp, Homo sapiens
atcggctcacagcaa

SEQ ID NO: 1485983 - DNA, 15 bp, Homo sapiens
tcggctcacagcaag

SEQ ID NO: 1485984 - DNA, 15 bp, Homo sapiens
cggctcacagcaagc

SEQ ID NO: 1485985 - DNA, 15 bp, Homo sapiens
ggctcacagcaagct

SEQ ID NO: 1485986 - DNA, 15 bp, Homo sapiens
gctcacagcaagctc

SEQ ID NO: 1485987 - DNA, 15 bp, Homo sapiens
ctcacagcaagctcc

SEQ ID NO: 1485988 - DNA, 15 bp, Homo sapiens
tcacagcaagctccg

SEQ ID NO: 1485989 - DNA, 15 bp, Homo sapiens
cacagcaagctccgc

SEQ ID NO: 1485990 - DNA, 15 bp, Homo sapiens
acagcaagctccgcc

SEQ ID NO: 1485991 - DNA, 15 bp, Homo sapiens
cagcaagctccgcct

SEQ ID NO: 1485992 - DNA, 15 bp, Homo sapiens
agcaagctccgcctc

SEQ ID NO: 1485993 - DNA, 15 bp, Homo sapiens
caagctccgcctcct

SEQ ID NO: 1485994 - DNA, 15 bp, Homo sapiens
ctcctgggttcaatc

SEQ ID NO: 1485995 - DNA, 15 bp, Homo sapiens
tcctgggttcaatcg

SEQ ID NO: 1485996 - DNA, 15 bp, Homo sapiens
cctgggttcaatcga

SEQ ID NO: 1485997 - DNA, 15 bp, Homo sapiens
ctgggttcaatcgat

SEQ ID NO: 1485998 - DNA, 15 bp, Homo sapiens
tgggttcaatcgatt

SEQ ID NO: 1485999 - DNA, 15 bp, Homo sapiens
gggttcaatcgattc

SEQ ID NO: 1486000 - DNA, 15 bp, Homo sapiens
ggttcaatcgattct

SEQ ID NO: 1486001 - DNA, 15 bp, Homo sapiens
gttcaatcgattctc

SEQ ID NO: 1486002 - DNA, 15 bp, Homo sapiens
ttcaatcgattctcc

SEQ ID NO: 1486003 - DNA, 15 bp, Homo sapiens
tcaatcgattctcct

SEQ ID NO: 1486004 - DNA, 15 bp, Homo sapiens
caatcgattctcctg

SEQ ID NO: 1486005 - DNA, 15 bp, Homo sapiens
aatcgattctcctgc

SEQ ID NO: 1486006 - DNA, 15 bp, Homo sapiens
atcgattctcctgcc

SEQ ID NO: 1486007 - DNA, 15 bp, Homo sapiens
tcgattctcctgcct

SEQ ID NO: 1486008 - DNA, 15 bp, Homo sapiens
ggattataggcaccc

SEQ ID NO: 1486009 - DNA, 15 bp, Homo sapiens
gattataggcaccca

SEQ ID NO: 1486010 - DNA, 15 bp, Homo sapiens
attataggcacccac

SEQ ID NO: 1486011 - DNA, 15 bp, Homo sapiens
ttataggcacccacc

SEQ ID NO: 1486012 - DNA, 15 bp, Homo sapiens
tataggcacccacca

SEQ ID NO: 1486013 - DNA, 15 bp, Homo sapiens
ataggcacccaccac

SEQ ID NO: 1486014 - DNA, 15 bp, Homo sapiens
taggcacccaccacc

SEQ ID NO: 1486015 - DNA, 15 bp, Homo sapiens
caccacacctggctg

SEQ ID NO: 1486016 - DNA, 15 bp, Homo sapiens
accacacctggctga

SEQ ID NO: 1486017 - DNA, 15 bp, Homo sapiens
ccacacctggctgag

SEQ ID NO: 1486018 - DNA, 15 bp, Homo sapiens
cacacctggctgagt

SEQ ID NO: 1486019 - DNA, 15 bp, Homo sapiens
acacctggctgagtt

SEQ ID NO: 1486020 - DNA, 15 bp, Homo sapiens
cacctggctgagttt

SEQ ID NO: 1486021 - DNA, 15 bp, Homo sapiens
acctggctgagtttt

SEQ ID NO: 1486022 - DNA, 15 bp, Homo sapiens
cctggctgagttttg

SEQ ID NO: 1486023 - DNA, 15 bp, Homo sapiens
ctggctgagttttgt

SEQ ID NO: 1486024 - DNA, 15 bp, Homo sapiens
tggctgagttttgta

SEQ ID NO: 1486025 - DNA, 15 bp, Homo sapiens
ggctgagttttgtat

SEQ ID NO: 1486026 - DNA, 15 bp, Homo sapiens
gctgagttttgtatt

SEQ ID NO: 1486027 - DNA, 15 bp, Homo sapiens
ctgagttttgtattt

SEQ ID NO: 1486028 - DNA, 15 bp, Homo sapiens
tgagttttgtatttt

SEQ ID NO: 1486029 - DNA, 15 bp, Homo sapiens
gagttttgtattttt

SEQ ID NO: 1486030 - DNA, 15 bp, Homo sapiens
tttttagtagaaaca

SEQ ID NO: 1486031 - DNA, 15 bp, Homo sapiens
ttttagtagaaacag

SEQ ID NO: 1486032 - DNA, 15 bp, Homo sapiens
tttagtagaaacagg

SEQ ID NO: 1486033 - DNA, 15 bp, Homo sapiens
ttagtagaaacaggg

SEQ ID NO: 1486034 - DNA, 15 bp, Homo sapiens
tagtagaaacagggt

SEQ ID NO: 1486035 - DNA, 15 bp, Homo sapiens
agtagaaacagggtt

SEQ ID NO: 1486036 - DNA, 15 bp, Homo sapiens
tagaaacagggtttc

SEQ ID NO: 1486037 - DNA, 15 bp, Homo sapiens
agaaacagggtttca

SEQ ID NO: 1486038 - DNA, 15 bp, Homo sapiens
gaaacagggtttcat

SEQ ID NO: 1486039 - DNA, 15 bp, Homo sapiens
aaacagggtttcatt

SEQ ID NO: 1486040 - DNA, 15 bp, Homo sapiens
aacagggtttcatta

SEQ ID NO: 1486041 - DNA, 15 bp, Homo sapiens
acagggtttcattat

SEQ ID NO: 1486042 - DNA, 15 bp, Homo sapiens
cagggtttcattatg

SEQ ID NO: 1486043 - DNA, 15 bp, Homo sapiens
agggtttcattatgt

SEQ ID NO: 1486044 - DNA, 15 bp, Homo sapiens
gggtttcattatgtt

SEQ ID NO: 1486045 - DNA, 15 bp, Homo sapiens
ggtttcattatgttg

SEQ ID NO: 1486046 - DNA, 15 bp, Homo sapiens
gtttcattatgttgg

SEQ ID NO: 1486047 - DNA, 15 bp, Homo sapiens
tttcattatgttggc

SEQ ID NO: 1486048 - DNA, 15 bp, Homo sapiens
ttcattatgttggcc

SEQ ID NO: 1486049 - DNA, 15 bp, Homo sapiens
tcattatgttggcca

SEQ ID NO: 1486050 - DNA, 15 bp, Homo sapiens
cattatgttggccag

SEQ ID NO: 1486051 - DNA, 15 bp, Homo sapiens
attatgttggccagg

SEQ ID NO: 1486052 - DNA, 15 bp, Homo sapiens
ttatgttggccaggc

SEQ ID NO: 1486053 - DNA, 15 bp, Homo sapiens
tggccaggctgttct

SEQ ID NO: 1486054 - DNA, 15 bp, Homo sapiens
ggccaggctgttctc

SEQ ID NO: 1486055 - DNA, 15 bp, Homo sapiens
gccaggctgttctca

SEQ ID NO: 1486056 - DNA, 15 bp, Homo sapiens
ccaggctgttctcaa

SEQ ID NO: 1486057 - DNA, 15 bp, Homo sapiens
caggctgttctcaac

SEQ ID NO: 1486058 - DNA, 15 bp, Homo sapiens
aggctgttctcaacc

SEQ ID NO: 1486059 - DNA, 15 bp, Homo sapiens
ggctgttctcaacct

SEQ ID NO: 1486060 - DNA, 15 bp, Homo sapiens
gctgttctcaacctc

SEQ ID NO: 1486061 - DNA, 15 bp, Homo sapiens
ctgttctcaacctcc

SEQ ID NO: 1486062 - DNA, 15 bp, Homo sapiens
tgttctcaacctcct

SEQ ID NO: 1486063 - DNA, 15 bp, Homo sapiens
gttctcaacctcctg

SEQ ID NO: 1486064 - DNA, 15 bp, Homo sapiens
ttctcaacctcctgg

SEQ ID NO: 1486065 - DNA, 15 bp, Homo sapiens
tctcaacctcctggc

SEQ ID NO: 1486066 - DNA, 15 bp, Homo sapiens
ctcaacctcctggcc

SEQ ID NO: 1486067 - DNA, 15 bp, Homo sapiens
tcaacctcctggcct

SEQ ID NO: 1486068 - DNA, 15 bp, Homo sapiens
caacctcctggcctc

SEQ ID NO: 1486069 - DNA, 15 bp, Homo sapiens
aacctcctggcctca

SEQ ID NO: 1486070 - DNA, 15 bp, Homo sapiens
acctcctggcctcag

SEQ ID NO: 1486071 - DNA, 15 bp, Homo sapiens
cctcctggcctcaga

SEQ ID NO: 1486072 - DNA, 15 bp, Homo sapiens
ctcctggcctcagat

SEQ ID NO: 1486073 - DNA, 15 bp, Homo sapiens
tcctggcctcagatg

SEQ ID NO: 1486074 - DNA, 15 bp, Homo sapiens
cctggcctcagatga

SEQ ID NO: 1486075 - DNA, 15 bp, Homo sapiens
ctggcctcagatgat

SEQ ID NO: 1486076 - DNA, 15 bp, Homo sapiens
tggcctcagatgatc

SEQ ID NO: 1486077 - DNA, 15 bp, Homo sapiens
ggcctcagatgatct

SEQ ID NO: 1486078 - DNA, 15 bp, Homo sapiens
gcctcagatgatctt

SEQ ID NO: 1486079 - DNA, 15 bp, Homo sapiens
cctcagatgatcttc

SEQ ID NO: 1486080 - DNA, 15 bp, Homo sapiens
ctcagatgatcttcc

SEQ ID NO: 1486081 - DNA, 15 bp, Homo sapiens
tcagatgatcttccc

SEQ ID NO: 1486082 - DNA, 15 bp, Homo sapiens
cagatgatcttcccg

SEQ ID NO: 1486083 - DNA, 15 bp, Homo sapiens
agatgatcttcccgc

SEQ ID NO: 1486084 - DNA, 15 bp, Homo sapiens
gatgatcttcccgcc

SEQ ID NO: 1486085 - DNA, 15 bp, Homo sapiens
atgatcttcccgcct

SEQ ID NO: 1486086 - DNA, 15 bp, Homo sapiens
tgatcttcccgcctc

SEQ ID NO: 1486087 - DNA, 15 bp, Homo sapiens
gatcttcccgcctca

SEQ ID NO: 1486088 - DNA, 15 bp, Homo sapiens
atcttcccgcctcag

SEQ ID NO: 1486089 - DNA, 15 bp, Homo sapiens
tcttcccgcctcagc

SEQ ID NO: 1486090 - DNA, 15 bp, Homo sapiens
cttcccgcctcagcc

SEQ ID NO: 1486091 - DNA, 15 bp, Homo sapiens
ttcccgcctcagcct

SEQ ID NO: 1486092 - DNA, 15 bp, Homo sapiens
ccgcctcagccttcc

SEQ ID NO: 1486093 - DNA, 15 bp, Homo sapiens
cgcctcagccttcca

SEQ ID NO: 1486094 - DNA, 15 bp, Homo sapiens
gcctcagccttccaa

SEQ ID NO: 1486095 - DNA, 15 bp, Homo sapiens
cctcagccttccaaa

SEQ ID NO: 1486096 - DNA, 15 bp, Homo sapiens
ctcagccttccaaaa
